United States Patent Application Publication US 2007/0042381 A1 - sequence listing, part 34

SEQ ID NO: 1512051 - RNA, 23 nt, Human
ugagcagggcucagcggggacag

SEQ ID NO: 1512052 - RNA, 22 nt, Human
ugagccgagaucacgccacugc

SEQ ID NO: 1512053 - RNA, 11 nt, Human
ugagcucagga

SEQ ID NO: 1512054 - RNA, 19 nt, Human
ugagcucaggaguuugaga

SEQ ID NO: 1512055 - RNA, 14 nt, Human
ucuuauaauuuaaa

SEQ ID NO: 1512056 - RNA, 13 nt, Human
ucuuauaauuuaa

SEQ ID NO: 1512057 - RNA, 20 nt, Human
ucuuagguuggcaaaaaggc

SEQ ID NO: 1512058 - RNA, 23 nt, Human
ucuuagguuggcaaaaaggcagg

SEQ ID NO: 1512059 - RNA, 22 nt, Human
ucugugucagguggggcagcuu

SEQ ID NO: 1512060 - RNA, 17 nt, Human
ucugugucagguggggc

SEQ ID NO: 1512061 - RNA, 20 nt, Human
ucugugucagguggggcagc

SEQ ID NO: 1512062 - RNA, 15 nt, Human
ucuuagauguauaua

SEQ ID NO: 1512063 - RNA, 15 nt, Human
ucuucagaucucuaa

SEQ ID NO: 1512064 - RNA, 14 nt, Human
ucuucagaucucua

SEQ ID NO: 1512065 - RNA, 21 nt, Human
ucuucagagacuccugcaggc

SEQ ID NO: 1512066 - RNA, 13 nt, Human
ucuuagcuccccu

SEQ ID NO: 1512067 - RNA, 14 nt, Human
ucuuagcuccccuc

SEQ ID NO: 1512068 - RNA, 16 nt, Human
ucuuagcuccccucca

SEQ ID NO: 1512069 - RNA, 14 nt, Human
ucuuauacauuuga

SEQ ID NO: 1512070 - RNA, 22 nt, Human
ucuuauccaacaucaacaucuu

SEQ ID NO: 1512071 - RNA, 19 nt, Human
ucuugccaaauauaaauaa

SEQ ID NO: 1512072 - RNA, 19 nt, Human
ucuugaaggaaaaugauac

SEQ ID NO: 1512073 - RNA, 14 nt, Human
ucuugcucugcuga

SEQ ID NO: 1512074 - RNA, 15 nt, Human
ucuugcucugcugac

SEQ ID NO: 1512075 - RNA, 23 nt, Human
ucuugcucugcugacagacacag

SEQ ID NO: 1512076 - RNA, 18 nt, Human
ucuuguagcuuuaucaaa

SEQ ID NO: 1512077 - RNA, 16 nt, Human
ucuucuuggucucagu

SEQ ID NO: 1512078 - RNA, 13 nt, Human
ucuugaagacuuu

SEQ ID NO: 1512079 - RNA, 22 nt, Human
ucuugaagacuuuucuuucagc

SEQ ID NO: 1512080 - RNA, 21 nt, Human
ucuugaaauauaggaacuuaa

SEQ ID NO: 1512081 - RNA, 20 nt, Human
ucuugaaauauaggaacuua

SEQ ID NO: 1512082 - RNA, 17 nt, Human
ucuuuccacagaagcuc

SEQ ID NO: 1512083 - RNA, 12 nt, Human
ucuuucccuccc

SEQ ID NO: 1512084 - RNA, 13 nt, Human
ucuuucccucccu

SEQ ID NO: 1512085 - RNA, 23 nt, Human
ucuuucccucccuuccucuuucc

SEQ ID NO: 1512086 - RNA, 23 nt, Human
ucuuuccaaaguacacuguuuca

SEQ ID NO: 1512087 - RNA, 13 nt, Human
ucuuguguguuua

SEQ ID NO: 1512088 - RNA, 14 nt, Human
ucuuugcagacagg

SEQ ID NO: 1512089 - RNA, 17 nt, Human
ucuuugcagacaggcaa

SEQ ID NO: 1512090 - RNA, 23 nt, Human
ucuuugagugaagcugggagaac

SEQ ID NO: 1512091 - RNA, 13 nt, Human
ucuuugcagacag

SEQ ID NO: 1512092 - RNA, 16 nt, Human
ucuuuggacccugagg

SEQ ID NO: 1512093 - RNA, 14 nt, Human
ucuuuggacccuga

SEQ ID NO: 1512094 - RNA, 15 nt, Human
ucuuuggacccugag

SEQ ID NO: 1512095 - RNA, 13 nt, Human
ucuuuggacccug

SEQ ID NO: 1512096 - RNA, 23 nt, Human
ugaaacacucaguuguucaauaa

SEQ ID NO: 1512097 - RNA, 12 nt, Human
ugaaaauuuuga

SEQ ID NO: 1512098 - RNA, 14 nt, Human
ugaaaauucagugg

SEQ ID NO: 1512099 - RNA, 22 nt, Human
ugaaaauuauuuuguucauaca

SEQ ID NO: 1512100 - RNA, 23 nt, Human
ugaaaauuauuuuguucauacau

SEQ ID NO: 1512101 - RNA, 19 nt, Human
ugaaaagaaaaaugagccu

SEQ ID NO: 1512102 - RNA, 19 nt, Human
ugaaaauuauuuuguucau

SEQ ID NO: 1512103 - RNA, 20 nt, Human
ugaaaagaaaaaugagccug

SEQ ID NO: 1512104 - RNA, 22 nt, Human
ugaaaagaaaaaugagccuggc

SEQ ID NO: 1512105 - RNA, 21 nt, Human
ugaaaacacauuuuucuuagg

SEQ ID NO: 1512106 - RNA, 17 nt, Human
ugaaaacacuguucucu

SEQ ID NO: 1512107 - RNA, 20 nt, Human
ugaaaacacuguucucugcc

SEQ ID NO: 1512108 - RNA, 21 nt, Human
ugaaaacacuguucucugccc

SEQ ID NO: 1512109 - RNA, 22 nt, Human
ugaaaacacuguucucugcccu

SEQ ID NO: 1512110 - RNA, 23 nt, Human
ugaaaacacuguucucugcccuc

SEQ ID NO: 1512111 - RNA, 16 nt, Human
ucuggugacuuuccuc

SEQ ID NO: 1512112 - RNA, 13 nt, Human
ucugucuaggaau

SEQ ID NO: 1512113 - RNA, 21 nt, Human
ucuguccugggagugagcugg

SEQ ID NO: 1512114 - RNA, 14 nt, Human
ucugucucagucca

SEQ ID NO: 1512115 - RNA, 14 nt, Human
ucuguacagagccc

SEQ ID NO: 1512116 - RNA, 23 nt, Human
ucuguacagagcccacgccccca

SEQ ID NO: 1512117 - RNA, 15 nt, Human
ucuguacagagccca

SEQ ID NO: 1512118 - RNA, 12 nt, Human
ucuguccuggga

SEQ ID NO: 1512119 - RNA, 17 nt, Human
ucugucgcccagucugg

SEQ ID NO: 1512120 - RNA, 17 nt, Human
ucugcugcuggcugguu

SEQ ID NO: 1512121 - RNA, 14 nt, Human
ucugcugcuggcug

SEQ ID NO: 1512122 - RNA, 15 nt, Human
ucugcugcuggcugg

SEQ ID NO: 1512123 - RNA, 17 nt, Human
ucugcugacagacacag

SEQ ID NO: 1512124 - RNA, 11 nt, Human
ucugcugcugg

SEQ ID NO: 1512125 - RNA, 13 nt, Human
ucugcugcuggcu

SEQ ID NO: 1512126 - RNA, 13 nt, Human
ucugccugcccag

SEQ ID NO: 1512127 - RNA, 17 nt, Human
ucugccugcccaggccc

SEQ ID NO: 1512128 - RNA, 18 nt, Human
ucugccugcccaggcccc

SEQ ID NO: 1512129 - RNA, 20 nt, Human
ucugccugcccaggccccug

SEQ ID NO: 1512130 - RNA, 12 nt, Human
ucugcucuccuu

SEQ ID NO: 1512131 - RNA, 13 nt, Human
ucugcucuccuuc

SEQ ID NO: 1512132 - RNA, 14 nt, Human
ucugcucuccuucc

SEQ ID NO: 1512133 - RNA, 15 nt, Human
ucugcucuccuuccu

SEQ ID NO: 1512134 - RNA, 19 nt, Human
ucugcucuccuuccuggag

SEQ ID NO: 1512135 - RNA, 20 nt, Human
ucugcucuccuuccuggagc

SEQ ID NO: 1512136 - RNA, 14 nt, Human
ucugcaucagcugc

SEQ ID NO: 1512137 - RNA, 12 nt, Human
ucugcccacucc

SEQ ID NO: 1512138 - RNA, 22 nt, Human
ucugccauauucuguuggccag

SEQ ID NO: 1512139 - RNA, 23 nt, Human
ucugccauauucuguuggccagu

SEQ ID NO: 1512140 - RNA, 12 nt, Human
ucugccucccau

SEQ ID NO: 1512141 - RNA, 13 nt, Human
ucugccucccauc

SEQ ID NO: 1512142 - RNA, 15 nt, Human
ucugccucccaucac

SEQ ID NO: 1512143 - RNA, 16 nt, Human
ucugcccacucccugc

SEQ ID NO: 1512144 - RNA, 13 nt, Human
ucugcccacuccc

SEQ ID NO: 1512145 - RNA, 14 nt, Human
ucugcccacucccu

SEQ ID NO: 1512146 - RNA, 15 nt, Human
ucugccucugacaca

SEQ ID NO: 1512147 - RNA, 18 nt, Human
ucugccucugacacacag

SEQ ID NO: 1512148 - RNA, 16 nt, Human
ucugccucccaucacc

SEQ ID NO: 1512149 - RNA, 17 nt, Human
ucugccucccaucaccc

SEQ ID NO: 1512150 - RNA, 20 nt, Human
ucugccucccaucacccgcu

SEQ ID NO: 1512151 - RNA, 21 nt, Human
ucugccucccaucacccgcua

SEQ ID NO: 1512152 - RNA, 23 nt, Human
ucugccucugacacacagcucug

SEQ ID NO: 1512153 - RNA, 21 nt, Human
ucugccucugacacacagcuc

SEQ ID NO: 1512154 - RNA, 22 nt, Human
ucugccucugacacacagcucu

SEQ ID NO: 1512155 - RNA, 19 nt, Human
ucugccugaagucacacag

SEQ ID NO: 1512156 - RNA, 20 nt, Human
ucugccugaagucacacagu

SEQ ID NO: 1512157 - RNA, 13 nt, Human
ucugcacuccccu

SEQ ID NO: 1512158 - RNA, 23 nt, Human
ucugaggaauccagacccggcug

SEQ ID NO: 1512159 - RNA, 22 nt, Human
ucugaggaauccagacccggcu

SEQ ID NO: 1512160 - RNA, 18 nt, Human
ucugaggaauccagaccc

SEQ ID NO: 1512161 - RNA, 21 nt, Human
ucugaggaauccagacccggc

SEQ ID NO: 1512162 - RNA, 18 nt, Human
ucugagaggacuuuucuu

SEQ ID NO: 1512163 - RNA, 24 nt, Human
ucugagaucaaaacgguuuuacug

SEQ ID NO: 1512164 - RNA, 23 nt, Human
ucucauaauuuauacaggucaua

SEQ ID NO: 1512165 - RNA, 20 nt, Human
ucugacccaugcugcccugu

SEQ ID NO: 1512166 - RNA, 22 nt, Human
ucugacccaugcugcccuguga

SEQ ID NO: 1512167 - RNA, 23 nt, Human
ucugacccaugcugcccugugag

SEQ ID NO: 1512168 - RNA, 13 nt, Human
ucuauauuuuaca

SEQ ID NO: 1512169 - RNA, 12 nt, Human
ucuagggaaaaa

SEQ ID NO: 1512170 - RNA, 19 nt, Human
ucuagggaaaaaccagcgu

SEQ ID NO: 1512171 - RNA, 18 nt, Human
ucuacucuagggaaaaac

SEQ ID NO: 1512172 - RNA, 20 nt, Human
ucuacucgaguuacagacaa

SEQ ID NO: 1512173 - RNA, 21 nt, Human
ucuacucgaguuacagacaaa

SEQ ID NO: 1512174 - RNA, 15 nt, Human
ucuacuaaaaauaca

SEQ ID NO: 1512175 - RNA, 19 nt, Human
ucuacuaaaaauacaaaaa

SEQ ID NO: 1512176 - RNA, 16 nt, Human
ucucauaauuuauaca

SEQ ID NO: 1512177 - RNA, 22 nt, Human
ucucauaauuuauacaggucau

SEQ ID NO: 1512178 - RNA, 17 nt, Human
ucucacuguugcccagg

SEQ ID NO: 1512179 - RNA, 14 nt, Human
ucucacuguugccc

SEQ ID NO: 1512180 - RNA, 15 nt, Human
ucucacuguugccca

SEQ ID NO: 1512181 - RNA, 13 nt, Human
ucuaugaaauauu

SEQ ID NO: 1512182 - RNA, 18 nt, Human
ucucaaauuucuaaaucu

SEQ ID NO: 1512183 - RNA, 16 nt, Human
ucucacacaugagcau

SEQ ID NO: 1512184 - RNA, 23 nt, Human
ucucacacaugagcaucaggcca

SEQ ID NO: 1512185 - RNA, 20 nt, Human
ucucacugccaugccagcuu

SEQ ID NO: 1512186 - RNA, 21 nt, Human
ucucacacaugagcaucaggc

SEQ ID NO: 1512187 - RNA, 23 nt, Human
ucucacucugucgcccagucugg

SEQ ID NO: 1512188 - RNA, 16 nt, Human
ucucaaauuucuaaau

SEQ ID NO: 1512189 - RNA, 14 nt, Human
ucucaaauuucuaa

SEQ ID NO: 1512190 - RNA, 13 nt, Human
ucucaaauuucua

SEQ ID NO: 1512191 - RNA, 15 nt, Human
ucggccuccauccug

SEQ ID NO: 1512192 - RNA, 16 nt, Human
ucggccuccauccuga

SEQ ID NO: 1512193 - RNA, 17 nt, Human
ucggccuccauccugag

SEQ ID NO: 1512194 - RNA, 14 nt, Human
ucgcccagucugga

SEQ ID NO: 1512195 - RNA, 19 nt, Human
ucgcccagucuggaaugca

SEQ ID NO: 1512196 - RNA, 23 nt, Human
ucgcccagucuggaaugcagugg

SEQ ID NO: 1512197 - RNA, 18 nt, Human
ucggaaaacaugcuacac

SEQ ID NO: 1512198 - RNA, 15 nt, Human
ucggaaaacaugcua

SEQ ID NO: 1512199 - RNA, 17 nt, Human
ucgcaggauucuuccuc

SEQ ID NO: 1512200 - RNA, 21 nt, Human
ucgcaggauucuuccucccuc

SEQ ID NO: 1512201 - RNA, 23 nt, Human
ucgcaggauucuuccucccuccc

SEQ ID NO: 1512202 - RNA, 22 nt, Human
uccuuuucgcaggauucuuccu

SEQ ID NO: 1512203 - RNA, 22 nt, Human
uccuuggugucgggcaugacac

SEQ ID NO: 1512204 - RNA, 17 nt, Human
uccuuugugaggaagcc

SEQ ID NO: 1512205 - RNA, 18 nt, Human
uccuuugugaggaagccg

SEQ ID NO: 1512206 - RNA, 22 nt, Human
uccuuugugaggaagccgcugg

SEQ ID NO: 1512207 - RNA, 18 nt, Human
uccuuggugucgggcaug

SEQ ID NO: 1512208 - RNA, 21 nt, Human
uccuuggugucgggcaugaca

SEQ ID NO: 1512209 - RNA, 17 nt, Human
uccuugcaucaauuuuu

SEQ ID NO: 1512210 - RNA, 22 nt, Human
uccuugaaaacacuguucucug

SEQ ID NO: 1512211 - RNA, 23 nt, Human
uccuugaaaacacuguucucugc

SEQ ID NO: 1512212 - RNA, 21 nt, Human
uccuuaccagcagagcaccuu

SEQ ID NO: 1512213 - RNA, 17 nt, Human
ucccaugagccucagca

SEQ ID NO: 1512214 - RNA, 22 nt, Human
ucccaugagccucagcauccug

SEQ ID NO: 1512215 - RNA, 18 nt, Human
ucccucccuuccucuuuc

SEQ ID NO: 1512216 - RNA, 14 nt, Human
ucccugccaaugga

SEQ ID NO: 1512217 - RNA, 16 nt, Human
ucccugccaauggacu

SEQ ID NO: 1512218 - RNA, 17 nt, Human
ucccucuggggcuguuc

SEQ ID NO: 1512219 - RNA, 13 nt, Human
ucccucuggggcu

SEQ ID NO: 1512220 - RNA, 22 nt, Human
uccgaaagggacuuggaagcuc

SEQ ID NO: 1512221 - RNA, 21 nt, Human
uccgaaagggacuuggaagcu

SEQ ID NO: 1512222 - RNA, 21 nt, Human
uccgcuuucuacccagcgagc

SEQ ID NO: 1512223 - RNA, 16 nt, Human
ucccuucccaccucuc

SEQ ID NO: 1512224 - RNA, 17 nt, Human
ucccuucccaccucucu

SEQ ID NO: 1512225 - RNA, 21 nt, Human
ucccuucccacuggaggcaug

SEQ ID NO: 1512226 - RNA, 21 nt, Human
uccucuaggaggucucuaaga

SEQ ID NO: 1512227 - RNA, 21 nt, Human
uccuccuuuucacaguucucu

SEQ ID NO: 1512228 - RNA, 15 nt, Human
uccucuggccugugu

SEQ ID NO: 1512229 - RNA, 15 nt, Human
uccucuguacagagc

SEQ ID NO: 1512230 - RNA, 13 nt, Human
uccucuguacaga

SEQ ID NO: 1512231 - RNA, 17 nt, Human
uccugagccagauuuca

SEQ ID NO: 1512232 - RNA, 23 nt, Human
uccucuguacagagcccacgccc

SEQ ID NO: 1512233 - RNA, 15 nt, Human
uccugaggcuccacu

SEQ ID NO: 1512234 - RNA, 21 nt, Human
uccugagccagauuucacucu

SEQ ID NO: 1512235 - RNA, 18 nt, Human
uccugagccagauuucac

SEQ ID NO: 1512236 - RNA, 19 nt, Human
uccugagccagauuucacu

SEQ ID NO: 1512237 - RNA, 12 nt, Human
uccugaggcugg

SEQ ID NO: 1512238 - RNA, 16 nt, Human
uccugaggcuccacuu

SEQ ID NO: 1512239 - RNA, 17 nt, Human
uccugaggcuccacuug

SEQ ID NO: 1512240 - RNA, 15 nt, Human
uccugaggcugggcu

SEQ ID NO: 1512241 - RNA, 16 nt, Human
uccugaggcugggcuc

SEQ ID NO: 1512242 - RNA, 17 nt, Human
uccugaggcugggcucc

SEQ ID NO: 1512243 - RNA, 19 nt, Human
uccugaggcugggcucccu

SEQ ID NO: 1512244 - RNA, 18 nt, Human
uccuccgccuuaccagga

SEQ ID NO: 1512245 - RNA, 12 nt, Human
uccuccucagau

SEQ ID NO: 1512246 - RNA, 20 nt, Human
uccucaaaacuucagacaua

SEQ ID NO: 1512247 - RNA, 12 nt, Human
uccuccaggugc

SEQ ID NO: 1512248 - RNA, 13 nt, Human
uccuccaggugca

SEQ ID NO: 1512249 - RNA, 14 nt, Human
uccuccaggugcac

SEQ ID NO: 1512250 - RNA, 18 nt, Human
uccuccaggugcacaagc

SEQ ID NO: 1512251 - RNA, 20 nt, Human
uccuccaggugcacaagcuc

SEQ ID NO: 1512252 - RNA, 22 nt, Human
uccuccaggugcacaagcucca

SEQ ID NO: 1512253 - RNA, 22 nt, Human
uccuaguuccaccaucaagcca

SEQ ID NO: 1512254 - RNA, 21 nt, Human
uccuaguuccaccaucaagcc

SEQ ID NO: 1512255 - RNA, 16 nt, Human
uccuaagcuauucagu

SEQ ID NO: 1512256 - RNA, 18 nt, Human
uccuaagcuauucaguaa

SEQ ID NO: 1512257 - RNA, 14 nt, Human
uccuaguuccacca

SEQ ID NO: 1512258 - RNA, 17 nt, Human
uccuaguuccaccauca

SEQ ID NO: 1512259 - RNA, 12 nt, Human
uccauacauuug

SEQ ID NO: 1512260 - RNA, 17 nt, Human
uccauagagagcaagac

SEQ ID NO: 1512261 - RNA, 21 nt, Human
uccagggcuggacugaggccu

SEQ ID NO: 1512262 - RNA, 22 nt, Human
uccagggcuggacugaggccug

SEQ ID NO: 1512263 - RNA, 23 nt, Human
uccagggcuggacugaggccuga

SEQ ID NO: 1512264 - RNA, 14 nt, Human
uccagggcuggacu

SEQ ID NO: 1512265 - RNA, 17 nt, Human
uccagggcuggacugag

SEQ ID NO: 1512266 - RNA, 19 nt, Human
uccagggcuggacugaggc

SEQ ID NO: 1512267 - RNA, 20 nt, Human
uccauagagagcaagacgcu

SEQ ID NO: 1512268 - RNA, 13 nt, Human
ucccaacucaccc

SEQ ID NO: 1512269 - RNA, 17 nt, Human
ucccaacucaccccagc

SEQ ID NO: 1512270 - RNA, 18 nt, Human
ucccaacucaccccagcc

SEQ ID NO: 1512271 - RNA, 19 nt, Human
ucccaacucaccccagccc

SEQ ID NO: 1512272 - RNA, 21 nt, Human
ucccaacucaccccagcccca

SEQ ID NO: 1512273 - RNA, 14 nt, Human
ucccaccucucuca

SEQ ID NO: 1512274 - RNA, 17 nt, Human
ucccaccucucucacuc

SEQ ID NO: 1512275 - RNA, 18 nt, Human
ucccaccucucucacucc

SEQ ID NO: 1512276 - RNA, 18 nt, Human
ucccaccucagccucccg

SEQ ID NO: 1512277 - RNA, 18 nt, Human
ucccacgagggugccgug

SEQ ID NO: 1512278 - RNA, 14 nt, Human
ucccacucagucca

SEQ ID NO: 1512279 - RNA, 20 nt, Human
ucccaccucucucacuccuu

SEQ ID NO: 1512280 - RNA, 19 nt, Human
ucccaccuuggcugcaggg

SEQ ID NO: 1512281 - RNA, 21 nt, Human
ucccaccuuggcugcagggag

SEQ ID NO: 1512282 - RNA, 17 nt, Human
ucccaggcauuccccag

SEQ ID NO: 1512283 - RNA, 18 nt, Human
ucccaggcauuccccagg

SEQ ID NO: 1512284 - RNA, 19 nt, Human
ucccaggcauuccccagga

SEQ ID NO: 1512285 - RNA, 15 nt, Human
ucccaugagccucag

SEQ ID NO: 1512286 - RNA, 16 nt, Human
ucccaugagccucagc

SEQ ID NO: 1512287 - RNA, 19 nt, Human
uccacuuucuagccagagg

SEQ ID NO: 1512288 - RNA, 18 nt, Human
uccacuuucagugaaagc

SEQ ID NO: 1512289 - RNA, 14 nt, Human
uccacuuucuagcc

SEQ ID NO: 1512290 - RNA, 22 nt, Human
uccacugugccaugugccaggu

SEQ ID NO: 1512291 - RNA, 21 nt, Human
uccacccugcucuccgaccag

SEQ ID NO: 1512292 - RNA, 14 nt, Human
uccacccugcucuc

SEQ ID NO: 1512293 - RNA, 18 nt, Human
uccagcaaaucaagcuga

SEQ ID NO: 1512294 - RNA, 14 nt, Human
uccaagcaggacau

SEQ ID NO: 1512295 - RNA, 22 nt, Human
uccaagcaggacauggacaagg

SEQ ID NO: 1512296 - RNA, 12 nt, Human
uccaagagcuga

SEQ ID NO: 1512297 - RNA, 19 nt, Human
uccaagaagcccaggaaag

SEQ ID NO: 1512298 - RNA, 20 nt, Human
uccaagaccuucuccuucac

SEQ ID NO: 1512299 - RNA, 14 nt, Human
uccaagaagcccag

SEQ ID NO: 1512300 - RNA, 15 nt, Human
uccaagaagcccagg

SEQ ID NO: 1512301 - RNA, 16 nt, Human
uccaagaagcccagga

SEQ ID NO: 1512302 - RNA, 21 nt, Human
uccacaagagcccaggccucc

SEQ ID NO: 1512303 - RNA, 20 nt, Human
uccacaagagcccaggccuc

SEQ ID NO: 1512304 - RNA, 17 nt, Human
ucagauaugauucaaau

SEQ ID NO: 1512305 - RNA, 16 nt, Human
ucagauaugauucaaa

SEQ ID NO: 1512306 - RNA, 18 nt, Human
ucagauaugauucaaaug

SEQ ID NO: 1512307 - RNA, 15 nt, Human
ucagaucucuaacuu

SEQ ID NO: 1512308 - RNA, 18 nt, Human
ucagcacgauuucuguuu

SEQ ID NO: 1512309 - RNA, 17 nt, Human
ucagcacgauuucuguu

SEQ ID NO: 1512310 - RNA, 16 nt, Human
ucagcacgauuucugu

SEQ ID NO: 1512311 - RNA, 15 nt, Human
ucagcacgauuucug

SEQ ID NO: 1512312 - RNA, 12 nt, Human
ucagccucccaa

SEQ ID NO: 1512313 - RNA, 13 nt, Human
ucagccucccaaa

SEQ ID NO: 1512314 - RNA, 15 nt, Human
ucagcauccuggcac

SEQ ID NO: 1512315 - RNA, 16 nt, Human
ucagcauccuggcacc

SEQ ID NO: 1512316 - RNA, 17 nt, Human
ucagcauccuggcaccc

SEQ ID NO: 1512317 - RNA, 18 nt, Human
ucagcauccuggcacccg

SEQ ID NO: 1512318 - RNA, 15 nt, Human
ucagcugcuacuacu

SEQ ID NO: 1512319 - RNA, 16 nt, Human
ucagcugcugaaacaa

SEQ ID NO: 1512320 - RNA, 22 nt, Human
ucaggagaguagaacagauaau

SEQ ID NO: 1512321 - RNA, 22 nt, Human
ucagccucccaaagugcuggga

SEQ ID NO: 1512322 - RNA, 12 nt, Human
ucagccucccga

SEQ ID NO: 1512323 - RNA, 20 nt, Human
ucagccucccgaauagcugg

SEQ ID NO: 1512324 - RNA, 16 nt, Human
ucagccugcuccagcu

SEQ ID NO: 1512325 - RNA, 22 nt, Human
ucagcuccccucggagaagagc

SEQ ID NO: 1512326 - RNA, 18 nt, Human
ucagcuccagcucaccag

SEQ ID NO: 1512327 - RNA, 21 nt, Human
ucagcuccagcucaccagccc

SEQ ID NO: 1512328 - RNA, 22 nt, Human
ucagcuccagcucaccagcccc

SEQ ID NO: 1512329 - RNA, 21 nt, Human
ucauggaauuggagcucgugg

SEQ ID NO: 1512330 - RNA, 15 nt, Human
ucaugaaagauucaa

SEQ ID NO: 1512331 - RNA, 13 nt, Human
ucaugaaagauuc

SEQ ID NO: 1512332 - RNA, 19 nt, Human
ucauggaauuggagcucgu

SEQ ID NO: 1512333 - RNA, 13 nt, Human
ucaucuuucuuga

SEQ ID NO: 1512334 - RNA, 22 nt, Human
ucaucuuucuugaucaacaucu

SEQ ID NO: 1512335 - RNA, 14 nt, Human
ucaucauccuaagc

SEQ ID NO: 1512336 - RNA, 17 nt, Human
ucagucugauucccaag

SEQ ID NO: 1512337 - RNA, 19 nt, Human
ucagucugauucccaagcu

SEQ ID NO: 1512338 - RNA, 18 nt, Human
ucagugugacugaucucu

SEQ ID NO: 1512339 - RNA, 19 nt, Human
ucagugugucuaaauuuga

SEQ ID NO: 1512340 - RNA, 18 nt, Human
ucaguccaugaagaugua

SEQ ID NO: 1512341 - RNA, 15 nt, Human
ucaguccauagcaga

SEQ ID NO: 1512342 - RNA, 21 nt, Human
ucagguggggucacucuggca

SEQ ID NO: 1512343 - RNA, 17 nt, Human
ucagguggggucacucu

SEQ ID NO: 1512344 - RNA, 20 nt, Human
ucagguggggucacucuggc

SEQ ID NO: 1512345 - RNA, 14 nt, Human
ucagguggggcagc

SEQ ID NO: 1512346 - RNA, 18 nt, Human
ucaggugcugccauccag

SEQ ID NO: 1512347 - RNA, 20 nt, Human
ucaggugcugccauccaggu

SEQ ID NO: 1512348 - RNA, 15 nt, Human
ucagguggggcagcu

SEQ ID NO: 1512349 - RNA, 16 nt, Human
ucagguggggcagcuu

SEQ ID NO: 1512350 - RNA, 17 nt, Human
ucagguggggcagcuug

SEQ ID NO: 1512351 - RNA, 17 nt, Human
uauauaacaaugcugua

SEQ ID NO: 1512352 - RNA, 19 nt, Human
uauauaacaaugcuguauu

SEQ ID NO: 1512353 - RNA, 14 nt, Human
uauaucuuguagcu

SEQ ID NO: 1512354 - RNA, 18 nt, Human
uauauaaguauucuaaau

SEQ ID NO: 1512355 - RNA, 16 nt, Human
uauauuuuuuucugaa

SEQ ID NO: 1512356 - RNA, 19 nt, Human
uauauuuuuuucugaaauu

SEQ ID NO: 1512357 - RNA, 20 nt, Human
uauauuuuuuucugaaauuu

SEQ ID NO: 1512358 - RNA, 21 nt, Human
uauauuuuuuguuaaaugauu

SEQ ID NO: 1512359 - RNA, 14 nt, Human
uauaugcuucuguu

SEQ ID NO: 1512360 - RNA, 16 nt, Human
uauaugcuucuguuuu

SEQ ID NO: 1512361 - RNA, 20 nt, Human
uaucaggugcugccauccag

SEQ ID NO: 1512362 - RNA, 14 nt, Human
uaucaaaagaaaga

SEQ ID NO: 1512363 - RNA, 19 nt, Human
uaucaggugcugccaucca

SEQ ID NO: 1512364 - RNA, 18 nt, Human
uauaaaccgaacugaugu

SEQ ID NO: 1512365 - RNA, 11 nt, Human
uauaaacuuua

SEQ ID NO: 1512366 - RNA, 14 nt, Human
uauaaacuuuaccu

SEQ ID NO: 1512367 - RNA, 13 nt, Human
uauaaacuuuacc

SEQ ID NO: 1512368 - RNA, 18 nt, Human
uauaaacuuuaccuuuuu

SEQ ID NO: 1512369 - RNA, 17 nt, Human
uauaaacuuuaccuuuu

SEQ ID NO: 1512370 - RNA, 16 nt, Human
uauaaacuuuaccuuu

SEQ ID NO: 1512371 - RNA, 15 nt, Human
uauaaacuuuaccuu

SEQ ID NO: 1512372 - RNA, 15 nt, Human
uaguuugauuaaauu

SEQ ID NO: 1512373 - RNA, 21 nt, Human
uaguuugauuaaauucuugca

SEQ ID NO: 1512374 - RNA, 16 nt, Human
uaguuugauuaaauuc

SEQ ID NO: 1512375 - RNA, 14 nt, Human
uauaaacacuauau

SEQ ID NO: 1512376 - RNA, 17 nt, Human
uaguauuguccaggucu

SEQ ID NO: 1512377 - RNA, 16 nt, Human
uaguaugguggcuggg

SEQ ID NO: 1512378 - RNA, 20 nt, Human
uaguggcuuaaaacaacacu

SEQ ID NO: 1512379 - RNA, 20 nt, Human
uaguuguuugauucagacag

SEQ ID NO: 1512380 - RNA, 21 nt, Human
uaguuguuugauucagacagc

SEQ ID NO: 1512381 - RNA, 22 nt, Human
uaguuguuugauucagacagcu

SEQ ID NO: 1512382 - RNA, 18 nt, Human
uaguaugaggcauuuguu

SEQ ID NO: 1512383 - RNA, 17 nt, Human
uaguaugaggcauuugu

SEQ ID NO: 1512384 - RNA, 22 nt, Human
uagguuaauuccaauuauauga

SEQ ID NO: 1512385 - RNA, 13 nt, Human
uagguguggggga

SEQ ID NO: 1512386 - RNA, 17 nt, Human
uaggugugggggaagca

SEQ ID NO: 1512387 - RNA, 23 nt, Human
uaggugugacugaauuucuuuug

SEQ ID NO: 1512388 - RNA, 21 nt, Human
uaggugugacugaauuucuuu

SEQ ID NO: 1512389 - RNA, 19 nt, Human
uaggugugacugaauuucu

SEQ ID NO: 1512390 - RNA, 23 nt, Human
uaggugcuacaaaaacacagcaa

SEQ ID NO: 1512391 - RNA, 20 nt, Human
uaggugcuacaaaaacacag

SEQ ID NO: 1512392 - RNA, 22 nt, Human
uaggugcuacaaaaacacagca

SEQ ID NO: 1512393 - RNA, 11 nt, Human
uagggaaaaac

SEQ ID NO: 1512394 - RNA, 11 nt, Human
uaggugacaga

SEQ ID NO: 1512395 - RNA, 16 nt, Human
uaggugacagagugag

SEQ ID NO: 1512396 - RNA, 22 nt, Human
uagcuggucuuauuuguaaagc

SEQ ID NO: 1512397 - RNA, 13 nt, Human
uagcauccuggaa

SEQ ID NO: 1512398 - RNA, 15 nt, Human
uagcauccuggaaua

SEQ ID NO: 1512399 - RNA, 16 nt, Human
uagcauccuggaauau

SEQ ID NO: 1512400 - RNA, 18 nt, Human
uagcauccuggaauaucu

SEQ ID NO: 1512401 - RNA, 19 nt, Human
uagcauacguacacauuuu

SEQ ID NO: 1512402 - RNA, 18 nt, Human
uagcauacguacacauuu

SEQ ID NO: 1512403 - RNA, 17 nt, Human
uagcauacguacacauu

SEQ ID NO: 1512404 - RNA, 16 nt, Human
uagcauacguacacau

SEQ ID NO: 1512405 - RNA, 11 nt, Human
uagcagggaaa

SEQ ID NO: 1512406 - RNA, 14 nt, Human
uagauaggccaugg

SEQ ID NO: 1512407 - RNA, 16 nt, Human
uagauacuguaucaug

SEQ ID NO: 1512408 - RNA, 16 nt, Human
uagccuaggugacaga

SEQ ID NO: 1512409 - RNA, 21 nt, Human
uagcauggcauauuuuucaca

SEQ ID NO: 1512410 - RNA, 15 nt, Human
uagcauggcauauuu

SEQ ID NO: 1512411 - RNA, 17 nt, Human
uagcauggcauauuuuu

SEQ ID NO: 1512412 - RNA, 18 nt, Human
uagcauggcauauuuuuc

SEQ ID NO: 1512413 - RNA, 18 nt, Human
uagccugugccucuggga

SEQ ID NO: 1512414 - RNA, 20 nt, Human
uagccugugccucugggacu

SEQ ID NO: 1512415 - RNA, 12 nt, Human
uagcucauucuc

SEQ ID NO: 1512416 - RNA, 20 nt, Human
uagcucaggugucccugcac

SEQ ID NO: 1512417 - RNA, 21 nt, Human
uagcucaggugucccugcacu

SEQ ID NO: 1512418 - RNA, 15 nt, Human
uagcugggacuacag

SEQ ID NO: 1512419 - RNA, 17 nt, Human
uagcugggacuacaggc

SEQ ID NO: 1512420 - RNA, 19 nt, Human
uagcugggacuacaggcac

SEQ ID NO: 1512421 - RNA, 23 nt, Human
uagaauaccacaggaaccacaag

SEQ ID NO: 1512422 - RNA, 14 nt, Human
uacuuguggacaca

SEQ ID NO: 1512423 - RNA, 15 nt, Human
uagaauuaacacaug

SEQ ID NO: 1512424 - RNA, 16 nt, Human
uagaauuaacacauga

SEQ ID NO: 1512425 - RNA, 18 nt, Human
uagaauuaacacaugauc

SEQ ID NO: 1512426 - RNA, 23 nt, Human
uagaauuaguggcacuugcuuuu

SEQ ID NO: 1512427 - RNA, 11 nt, Human
uagagacaggg

SEQ ID NO: 1512428 - RNA, 15 nt, Human
uagagguucaaagau

SEQ ID NO: 1512429 - RNA, 14 nt, Human
uagagguucaaaga

SEQ ID NO: 1512430 - RNA, 12 nt, Human
uagagugggagc

SEQ ID NO: 1512431 - RNA, 17 nt, Human
uagaguugauacuacag

SEQ ID NO: 1512432 - RNA, 14 nt, Human
uagaguugauacua

SEQ ID NO: 1512433 - RNA, 21 nt, Human
uacauggcuggagcuagaauu

SEQ ID NO: 1512434 - RNA, 14 nt, Human
uacauuuuuaagug

SEQ ID NO: 1512435 - RNA, 22 nt, Human
uacauuuuuaagugcugcauuu

SEQ ID NO: 1512436 - RNA, 19 nt, Human
uacauuuuuaagugcugca

SEQ ID NO: 1512437 - RNA, 14 nt, Human
uacauggaauaaca

SEQ ID NO: 1512438 - RNA, 18 nt, Human
uacauggaauaacaugua

SEQ ID NO: 1512439 - RNA, 19 nt, Human
uacauggaauaacauguaa

SEQ ID NO: 1512440 - RNA, 22 nt, Human
uacauggaauaacauguaauua

SEQ ID NO: 1512441 - RNA, 16 nt, Human
uacauaaacaaguccu

SEQ ID NO: 1512442 - RNA, 21 nt, Human
uacaguuuguuaguaugaggc

SEQ ID NO: 1512443 - RNA, 19 nt, Human
uacaguuuguuaguaugag

SEQ ID NO: 1512444 - RNA, 23 nt, Human
uacaugaaaacacauuuuucuua

SEQ ID NO: 1512445 - RNA, 19 nt, Human
uacaugaaaacacauuuuu

SEQ ID NO: 1512446 - RNA, 18 nt, Human
uacaugaaaacacauuuu

SEQ ID NO: 1512447 - RNA, 17 nt, Human
uacaugaaaacacauuu

SEQ ID NO: 1512448 - RNA, 16 nt, Human
uacaugaaaacacauu

SEQ ID NO: 1512449 - RNA, 16 nt, Human
uacauaagauaaaugu

SEQ ID NO: 1512450 - RNA, 17 nt, Human
uacauaagauaaaugug

SEQ ID NO: 1512451 - RNA, 23 nt, Human
uacaguucggugagcuacaaaug

SEQ ID NO: 1512452 - RNA, 14 nt, Human
uacaggauuugaaa

SEQ ID NO: 1512453 - RNA, 14 nt, Human
uacaggaaguacug

SEQ ID NO: 1512454 - RNA, 15 nt, Human
uacaggaaguacugg

SEQ ID NO: 1512455 - RNA, 22 nt, Human
uacaggaaguacuggagaaaau

SEQ ID NO: 1512456 - RNA, 15 nt, Human
uacaggagugagcac

SEQ ID NO: 1512457 - RNA, 18 nt, Human
uacaguuuguuaguauga

SEQ ID NO: 1512458 - RNA, 20 nt, Human
uacaguugaaaaacagcuga

SEQ ID NO: 1512459 - RNA, 21 nt, Human
uacagcuugaccgugaggcca

SEQ ID NO: 1512460 - RNA, 17 nt, Human
uacaguugaaaaacagc

SEQ ID NO: 1512461 - RNA, 19 nt, Human
uacaguugaaaaacagcug

SEQ ID NO: 1512462 - RNA, 20 nt, Human
uacagcuccuuugaaaacuc

SEQ ID NO: 1512463 - RNA, 14 nt, Human
uacagcuccuuuga

SEQ ID NO: 1512464 - RNA, 20 nt, Human
uacagcuugaccgugaggcc

SEQ ID NO: 1512465 - RNA, 18 nt, Human
uacaggaagguagaaaua

SEQ ID NO: 1512466 - RNA, 13 nt, Human
uacaggaaguacu

SEQ ID NO: 1512467 - RNA, 22 nt, Human
uacacuguuucaaacuuuacua

SEQ ID NO: 1512468 - RNA, 16 nt, Human
uacacuuacacuuuau

SEQ ID NO: 1512469 - RNA, 20 nt, Human
uacacuguuucaaacuuuac

SEQ ID NO: 1512470 - RNA, 22 nt, Human
uacacugugcugagucugaagg

SEQ ID NO: 1512471 - RNA, 23 nt, Human
uacacugugcugagucugaaggc

SEQ ID NO: 1512472 - RNA, 11 nt, Human
uacacacacac

SEQ ID NO: 1512473 - RNA, 21 nt, Human
uacacugugcugagucugaag

SEQ ID NO: 1512474 - RNA, 15 nt, Human
uacacacugcauguu

SEQ ID NO: 1512475 - RNA, 17 nt, Human
uacacacucaaaucaag

SEQ ID NO: 1512476 - RNA, 17 nt, Human
uacacacugcauguuug

SEQ ID NO: 1512477 - RNA, 16 nt, Human
uacacacucaaaucaa

SEQ ID NO: 1512478 - RNA, 18 nt, Human
uaauuuugugaagcaaaa

SEQ ID NO: 1512479 - RNA, 12 nt, Human
uaauuuuuauau

SEQ ID NO: 1512480 - RNA, 16 nt, Human
uaauuuuuauauuuga

SEQ ID NO: 1512481 - RNA, 17 nt, Human
uaauuuuuauauuugaa

SEQ ID NO: 1512482 - RNA, 18 nt, Human
uacaaacaaaauuucuau

SEQ ID NO: 1512483 - RNA, 17 nt, Human
uacaaacaugugguuaa

SEQ ID NO: 1512484 - RNA, 14 nt, Human
uacaaaguagaagu

SEQ ID NO: 1512485 - RNA, 18 nt, Human
uacaaaguagaagucuua

SEQ ID NO: 1512486 - RNA, 22 nt, Human
uaccaaaaaucucaauauuuca

SEQ ID NO: 1512487 - RNA, 14 nt, Human
uacccagaaaguua

SEQ ID NO: 1512488 - RNA, 23 nt, Human
uacauuuuuaagugcugcauuua

SEQ ID NO: 1512489 - RNA, 22 nt, Human
uaccuaacgaaguauccuucag

SEQ ID NO: 1512490 - RNA, 16 nt, Human
uacccagcgagcccug

SEQ ID NO: 1512491 - RNA, 16 nt, Human
uaccuaucaucuuaag

SEQ ID NO: 1512492 - RNA, 15 nt, Human
uaccuacauacaauu

SEQ ID NO: 1512493 - RNA, 18 nt, Human
uaccucggugccuuccuc

SEQ ID NO: 1512494 - RNA, 21 nt, Human
uaccucuugagccuugaacuu

SEQ ID NO: 1512495 - RNA, 22 nt, Human
uaccuuuuuuagaguugauacu

SEQ ID NO: 1512496 - RNA, 19 nt, Human
uaccuuuuuuagaguugau

SEQ ID NO: 1512497 - RNA, 13 nt, Human
uaccuuuuuuaga

SEQ ID NO: 1512498 - RNA, 17 nt, Human
uaccuuuuuuauacaua

SEQ ID NO: 1512499 - RNA, 16 nt, Human
uaccuuuuuuauacau

SEQ ID NO: 1512500 - RNA, 13 nt, Human
uaccuuuuuuaua

SEQ ID NO: 1512501 - RNA, 18 nt, Human
uacgaaaagaggggaaga

SEQ ID NO: 1512502 - RNA, 21 nt, Human
uacgaaaagaggggaagagac

SEQ ID NO: 1512503 - RNA, 14 nt, Human
uacuaaggaaucuu

SEQ ID NO: 1512504 - RNA, 21 nt, Human
uacuaauagacaauuuauuau

SEQ ID NO: 1512505 - RNA, 22 nt, Human
uacuaauaaaauuuaaaagucu

SEQ ID NO: 1512506 - RNA, 17 nt, Human
uacuaaccagcagaaau

SEQ ID NO: 1512507 - RNA, 16 nt, Human
uacuguccuacccacc

SEQ ID NO: 1512508 - RNA, 23 nt, Human
uacugucagcuccccucggagaa

SEQ ID NO: 1512509 - RNA, 21 nt, Human
uacugucuucaguaagccgug

SEQ ID NO: 1512510 - RNA, 13 nt, Human
uacuuguggacac

SEQ ID NO: 1512511 - RNA, 13 nt, Human
uacuuaacuauuc

SEQ ID NO: 1512512 - RNA, 16 nt, Human
uacucuacccucuuag

SEQ ID NO: 1512513 - RNA, 12 nt, Human
uacucccaucug

SEQ ID NO: 1512514 - RNA, 22 nt, Human
uacucgaguuacagacaaagcg

SEQ ID NO: 1512515 - RNA, 18 nt, Human
uacucgaguuacagacaa

SEQ ID NO: 1512516 - RNA, 20 nt, Human
uacuacaguuuguuaguaug

SEQ ID NO: 1512517 - RNA, 14 nt, Human
uacuacaguuuguu

SEQ ID NO: 1512518 - RNA, 13 nt, Human
uacuacaguuugu

SEQ ID NO: 1512519 - RNA, 22 nt, Human
uacuacaguccucccaucucac

SEQ ID NO: 1512520 - RNA, 18 nt, Human
uaagucauucauaaaccu

SEQ ID NO: 1512521 - RNA, 13 nt, Human
uaagugaaauaag

SEQ ID NO: 1512522 - RNA, 12 nt, Human
uaagugagagag

SEQ ID NO: 1512523 - RNA, 23 nt, Human
uaagugaggaugaaaaaauaaca

SEQ ID NO: 1512524 - RNA, 14 nt, Human
uaagugcugcauuu

SEQ ID NO: 1512525 - RNA, 19 nt, Human
uaauaaauauuuuugccau

SEQ ID NO: 1512526 - RNA, 21 nt, Human
uaauaacugugaaguuuacau

SEQ ID NO: 1512527 - RNA, 22 nt, Human
uaagugcugcauuuaaaagaua

SEQ ID NO: 1512528 - RNA, 18 nt, Human
uaagugcugcauuuaaaa

SEQ ID NO: 1512529 - RNA, 16 nt, Human
uaagugcugcauuuaa

SEQ ID NO: 1512530 - RNA, 15 nt, Human
uaagugcugcauuua

SEQ ID NO: 1512531 - RNA, 22 nt, Human
uaagugguucuuugguuccagu

SEQ ID NO: 1512532 - RNA, 14 nt, Human
uaagcuauucagua

SEQ ID NO: 1512533 - RNA, 22 nt, Human
uaagaggcagggucucacucug

SEQ ID NO: 1512534 - RNA, 12 nt, Human
uaagaggcaggg

SEQ ID NO: 1512535 - RNA, 15 nt, Human
uaagaggcagggucu

SEQ ID NO: 1512536 - RNA, 17 nt, Human
uaaggguaucuggugac

SEQ ID NO: 1512537 - RNA, 18 nt, Human
uaagguuaccuuuguucc

SEQ ID NO: 1512538 - RNA, 15 nt, Human
uaaggugugcucuga

SEQ ID NO: 1512539 - RNA, 20 nt, Human
uaagguggguacgggagggu

SEQ ID NO: 1512540 - RNA, 14 nt, Human
uaauaauguuucaa

SEQ ID NO: 1512541 - RNA, 18 nt, Human
uaauaugcacacauuuuu

SEQ ID NO: 1512542 - RNA, 17 nt, Human
uaauaugcacacauuuu

SEQ ID NO: 1512543 - RNA, 16 nt, Human
uaauaugcacacauuu

SEQ ID NO: 1512544 - RNA, 15 nt, Human
uaauaugcacacauu

SEQ ID NO: 1512545 - RNA, 19 nt, Human
uaauaugcacacauuuuuu

SEQ ID NO: 1512546 - RNA, 13 nt, Human
uaaucuaaaugga

SEQ ID NO: 1512547 - RNA, 20 nt, Human
uaauccucuaggaggucucu

SEQ ID NO: 1512548 - RNA, 20 nt, Human
uaauauuaaggaagacaaug

SEQ ID NO: 1512549 - RNA, 17 nt, Human
uaaugauaacuggaaac

SEQ ID NO: 1512550 - RNA, 22 nt, Human
uaaugauaacuggaaacuucag

SEQ ID NO: 1512551 - RNA, 23 nt, Human
uaaugauaacuggaaacuucagc

SEQ ID NO: 1512552 - RNA, 15 nt, Human
uaaugcgugcauacc

SEQ ID NO: 1512553 - RNA, 23 nt, Human
uaaugcgugcauaccacuuuugu

SEQ ID NO: 1512554 - RNA, 22 nt, Human
uaaugcgugcauaccacuuuug

SEQ ID NO: 1512555 - RNA, 19 nt, Human
uaaugcgugcauaccacuu

SEQ ID NO: 1512556 - RNA, 15 nt, Human
uaauggggcggugag

SEQ ID NO: 1512557 - RNA, 22 nt, Human
uaauguuucaaacauauauaac

SEQ ID NO: 1512558 - RNA, 14 nt, Human
uaauuaaguacuau

SEQ ID NO: 1512559 - RNA, 17 nt, Human
uaauuaaguacuaugua

SEQ ID NO: 1512560 - RNA, 20 nt, Human
uaauuaaguacuauguauca

SEQ ID NO: 1512561 - RNA, 13 nt, Human
uaaauucuuucau

SEQ ID NO: 1512562 - RNA, 20 nt, Human
uaaauugacacuuaaaaaug

SEQ ID NO: 1512563 - RNA, 23 nt, Human
uaaauugacacuuaaaaaugguu

SEQ ID NO: 1512564 - RNA, 22 nt, Human
uaaauuuaguauuuuguuucag

SEQ ID NO: 1512565 - RNA, 22 nt, Human
uaaauuugaauguuaagcagau

SEQ ID NO: 1512566 - RNA, 14 nt, Human
uaaauuugaauguu

SEQ ID NO: 1512567 - RNA, 18 nt, Human
uaacaccaugauuaacca

SEQ ID NO: 1512568 - RNA, 16 nt, Human
uaaauucuugcaaagu

SEQ ID NO: 1512569 - RNA, 22 nt, Human
uaaauucuugcaaaguaucccu

SEQ ID NO: 1512570 - RNA, 18 nt, Human
uaaauucuugcaaaguau

SEQ ID NO: 1512571 - RNA, 17 nt, Human
uaaauucuugcaaagua

SEQ ID NO: 1512572 - RNA, 16 nt, Human
uaaaugugccuucauu

SEQ ID NO: 1512573 - RNA, 16 nt, Human
uaaaugugcuuuuaaa

SEQ ID NO: 1512574 - RNA, 11 nt, Human
uaaauuauuuu

SEQ ID NO: 1512575 - RNA, 20 nt, Human
uaaaugucuaguuguaacac

SEQ ID NO: 1512576 - RNA, 22 nt, Human
uaaaugucucuuuaaugucaca

SEQ ID NO: 1512577 - RNA, 20 nt, Human
uaaauggcuuccuggcaaua

SEQ ID NO: 1512578 - RNA, 17 nt, Human
uaaaugggggugcauuu

SEQ ID NO: 1512579 - RNA, 14 nt, Human
uaaaugggggugca

SEQ ID NO: 1512580 - RNA, 19 nt, Human
uaaaugggggugcauuuga

SEQ ID NO: 1512581 - RNA, 18 nt, Human
uaaaugggggugcauuug

SEQ ID NO: 1512582 - RNA, 13 nt, Human
uaaaugcccagcc

SEQ ID NO: 1512583 - RNA, 16 nt, Human
uaaauggaaccacucu

SEQ ID NO: 1512584 - RNA, 14 nt, Human
uaaaugcccagccc

SEQ ID NO: 1512585 - RNA, 15 nt, Human
uaaaugcccagcccc

SEQ ID NO: 1512586 - RNA, 16 nt, Human
uaaaugcccagccccu

SEQ ID NO: 1512587 - RNA, 17 nt, Human
uaaaugcccagccccuu

SEQ ID NO: 1512588 - RNA, 14 nt, Human
uaagagagaaugag

SEQ ID NO: 1512589 - RNA, 23 nt, Human
uaagagagaaugagagacacacu

SEQ ID NO: 1512590 - RNA, 22 nt, Human
uaagaaccuuuugagugccuua

SEQ ID NO: 1512591 - RNA, 13 nt, Human
uaagagagaauga

SEQ ID NO: 1512592 - RNA, 19 nt, Human
uaagaaccuuuugagugcc

SEQ ID NO: 1512593 - RNA, 21 nt, Human
uaagaaaauaucacuugucaa

SEQ ID NO: 1512594 - RNA, 24 nt, Human
uaagaaagacuaucuaaauguuga

SEQ ID NO: 1512595 - RNA, 15 nt, Human
uaacuggaaacuuca

SEQ ID NO: 1512596 - RNA, 17 nt, Human
uaacugugaaguuuaca

SEQ ID NO: 1512597 - RNA, 18 nt, Human
uaacugugaaguuuacau

SEQ ID NO: 1512598 - RNA, 18 nt, Human
uaagaaaaaggaugcaca

SEQ ID NO: 1512599 - RNA, 16 nt, Human
uaagaaaaaggaugca

SEQ ID NO: 1512600 - RNA, 23 nt, Human
uaagaaaaaggaugcacagaguu

SEQ ID NO: 1512601 - RNA, 19 nt, Human
uaagaaaaaggaugcacag

SEQ ID NO: 1512602 - RNA, 14 nt, Human
uaacucaauauuuu

SEQ ID NO: 1512603 - RNA, 22 nt, Human
uaacucaauauuuuccaugaaa

SEQ ID NO: 1512604 - RNA, 16 nt, Human
uaaccacuucagcuga

SEQ ID NO: 1512605 - RNA, 23 nt, Human
uaaccaguguuguggauuuaaca

SEQ ID NO: 1512606 - RNA, 12 nt, Human
uaacagaaaugu

SEQ ID NO: 1512607 - RNA, 11 nt, Human
uaacagaaaug

SEQ ID NO: 1512608 - RNA, 20 nt, Human
guuuagcuggaaaaguaugu

SEQ ID NO: 1512609 - RNA, 21 nt, Human
guuuagcuggaaaaguauguu

SEQ ID NO: 1512610 - RNA, 20 nt, Human
guuuaggauguugaaaaagu

SEQ ID NO: 1512611 - RNA, 20 nt, Human
guuuauauaagcuuguauuc

SEQ ID NO: 1512612 - RNA, 15 nt, Human
guuuagauaauacac

SEQ ID NO: 1512613 - RNA, 14 nt, Human
guuuagauaauaca

SEQ ID NO: 1512614 - RNA, 15 nt, Human
guuguuacauuuuua

SEQ ID NO: 1512615 - RNA, 14 nt, Human
guuguuacauuuuu

SEQ ID NO: 1512616 - RNA, 20 nt, Human
guuguuugauucagacagcu

SEQ ID NO: 1512617 - RNA, 19 nt, Human
guugucugcaacucugaag

SEQ ID NO: 1512618 - RNA, 14 nt, Human
guugugaauguugu

SEQ ID NO: 1512619 - RNA, 22 nt, Human
guuguggauuuaacagaaaugu

SEQ ID NO: 1512620 - RNA, 14 nt, Human
guugugguuaaucu

SEQ ID NO: 1512621 - RNA, 12 nt, Human
guugucagcuga

SEQ ID NO: 1512622 - RNA, 23 nt, Human
guuggcugggggccucagugcca

SEQ ID NO: 1512623 - RNA, 19 nt, Human
guuggcugggggccucagu

SEQ ID NO: 1512624 - RNA, 12 nt, Human
guuggcuggggg

SEQ ID NO: 1512625 - RNA, 20 nt, Human
guuggccccugcccggcugc

SEQ ID NO: 1512626 - RNA, 13 nt, Human
guuggccccugcc

SEQ ID NO: 1512627 - RNA, 14 nt, Human
guuggccccugccc

SEQ ID NO: 1512628 - RNA, 17 nt, Human
guuuucaaaauaaaaau

SEQ ID NO: 1512629 - RNA, 11 nt, Human
guuuucacucu

SEQ ID NO: 1512630 - RNA, 12 nt, Human
guuuucacucuu

SEQ ID NO: 1512631 - RNA, 20 nt, Human
guuuguuucugaaagggacg

SEQ ID NO: 1512632 - RNA, 14 nt, Human
guuuuguuccccuc

SEQ ID NO: 1512633 - RNA, 15 nt, Human
guuuuguuccccucc

SEQ ID NO: 1512634 - RNA, 16 nt, Human
guuuuguuccccuccu

SEQ ID NO: 1512635 - RNA, 17 nt, Human
guuuuguuccccuccuc

SEQ ID NO: 1512636 - RNA, 22 nt, Human
guuuuguuccccuccuccacuc

SEQ ID NO: 1512637 - RNA, 20 nt, Human
guuuuguuccccuccuccac

SEQ ID NO: 1512638 - RNA, 21 nt, Human
guuuuguuccccuccuccacu

SEQ ID NO: 1512639 - RNA, 13 nt, Human
guuuuccugaaga

SEQ ID NO: 1512640 - RNA, 19 nt, Human
guuuuccaugaguccccug

SEQ ID NO: 1512641 - RNA, 20 nt, Human
guuuuccaugaguccccugu

SEQ ID NO: 1512642 - RNA, 17 nt, Human
guuugagaucagccugg

SEQ ID NO: 1512643 - RNA, 23 nt, Human
guuugauuaaauucuugcaaagu

SEQ ID NO: 1512644 - RNA, 18 nt, Human
guuugagaucagccuggg

SEQ ID NO: 1512645 - RNA, 16 nt, Human
guuugauucagacagc

SEQ ID NO: 1512646 - RNA, 20 nt, Human
guuugauucagacagcugcc

SEQ ID NO: 1512647 - RNA, 21 nt, Human
guuugauucagacagcugccu

SEQ ID NO: 1512648 - RNA, 15 nt, Human
uaaaauccauacauu

SEQ ID NO: 1512649 - RNA, 17 nt, Human
uaaaauccauacauuug

SEQ ID NO: 1512650 - RNA, 18 nt, Human
uaaaaucauuucugcauc

SEQ ID NO: 1512651 - RNA, 22 nt, Human
uaaaaucauuucugcaucagcu

SEQ ID NO: 1512652 - RNA, 19 nt, Human
uaaaaggugaccaaugaug

SEQ ID NO: 1512653 - RNA, 12 nt, Human
uaaaaggugacc

SEQ ID NO: 1512654 - RNA, 10 nt, Human
uaaaaucauu

SEQ ID NO: 1512655 - RNA, 13 nt, Human
uaaaaucauuucu

SEQ ID NO: 1512656 - RNA, 12 nt, Human
uaaaaggagcca

SEQ ID NO: 1512657 - RNA, 21 nt, Human
uaaaagguaugcaaucaaauc

SEQ ID NO: 1512658 - RNA, 13 nt, Human
uaaaaccacagca

SEQ ID NO: 1512659 - RNA, 21 nt, Human
uaaaagauacaguuacucaga

SEQ ID NO: 1512660 - RNA, 14 nt, Human
uaaaagauacaguu

SEQ ID NO: 1512661 - RNA, 20 nt, Human
uaaaagauacaguuacucag

SEQ ID NO: 1512662 - RNA, 17 nt, Human
uaaaagauacaguuacu

SEQ ID NO: 1512663 - RNA, 13 nt, Human
uaaaaacaacuuu

SEQ ID NO: 1512664 - RNA, 18 nt, Human
uaaaaacaacuuuauacc

SEQ ID NO: 1512665 - RNA, 19 nt, Human
uaaaaacaacuuuauaccc

SEQ ID NO: 1512666 - RNA, 21 nt, Human
uaaaaagacauucuuccaaaa

SEQ ID NO: 1512667 - RNA, 18 nt, Human
uaaaaaugguuuaaaugg

SEQ ID NO: 1512668 - RNA, 19 nt, Human
uaaaaagccugcaauuuca

SEQ ID NO: 1512669 - RNA, 19 nt, Human
uaaaaaugguuuaaauggu

SEQ ID NO: 1512670 - RNA, 22 nt, Human
uaaaacaagcacuaaacaaaga

SEQ ID NO: 1512671 - RNA, 15 nt, Human
uaaaacaacacucac

SEQ ID NO: 1512672 - RNA, 17 nt, Human
uaaaacacaacaucuuu

SEQ ID NO: 1512673 - RNA, 22 nt, Human
uaaaacacaacaucuuuuucua

SEQ ID NO: 1512674 - RNA, 23 nt, Human
uaaaacacaacaucuuuuucuac

SEQ ID NO: 1512675 - RNA, 14 nt, Human
uaaaggaauuuaaa

SEQ ID NO: 1512676 - RNA, 15 nt, Human
uaaaggcuaccuuug

SEQ ID NO: 1512677 - RNA, 20 nt, Human
uaaagccugaguuugcuuuc

SEQ ID NO: 1512678 - RNA, 14 nt, Human
uaaaguguuugaaa

SEQ ID NO: 1512679 - RNA, 17 nt, Human
uaaaggcuaccuuugua

SEQ ID NO: 1512680 - RNA, 15 nt, Human
uaaaguuaguaaaga

SEQ ID NO: 1512681 - RNA, 19 nt, Human
uaaagcagcguuucuauga

SEQ ID NO: 1512682 - RNA, 17 nt, Human
uaaagcagcguuucuau

SEQ ID NO: 1512683 - RNA, 16 nt, Human
uaaagcagcguuucua

SEQ ID NO: 1512684 - RNA, 12 nt, Human
uaaagaaaacug

SEQ ID NO: 1512685 - RNA, 18 nt, Human
uaaagaaaaucucuguga

SEQ ID NO: 1512686 - RNA, 21 nt, Human
uaaagaaaaguuuaccaucug

SEQ ID NO: 1512687 - RNA, 20 nt, Human
uaaacaagaccacguuucua

SEQ ID NO: 1512688 - RNA, 22 nt, Human
uaaacaagaccacguuucuaaa

SEQ ID NO: 1512689 - RNA, 21 nt, Human
uaaacaagaccacguuucuaa

SEQ ID NO: 1512690 - RNA, 19 nt, Human
uaaaccaaggcuagaacca

SEQ ID NO: 1512691 - RNA, 13 nt, Human
uaaacuuaaucua

SEQ ID NO: 1512692 - RNA, 22 nt, Human
uaaacuugguuuuuaaaaaacu

SEQ ID NO: 1512693 - RNA, 18 nt, Human
guucggauuuggggugga

SEQ ID NO: 1512694 - RNA, 12 nt, Human
guucugaagaag

SEQ ID NO: 1512695 - RNA, 13 nt, Human
guucugaagaaga

SEQ ID NO: 1512696 - RNA, 14 nt, Human
guucugaagaagau

SEQ ID NO: 1512697 - RNA, 15 nt, Human
guucugaagaagaug

SEQ ID NO: 1512698 - RNA, 19 nt, Human
guucugauccuaguuccac

SEQ ID NO: 1512699 - RNA, 23 nt, Human
guugaaaagacuccaaagaaaug

SEQ ID NO: 1512700 - RNA, 17 nt, Human
guugaaaagacuccaaa

SEQ ID NO: 1512701 - RNA, 22 nt, Human
guugaaaagacuccaaagaaau

SEQ ID NO: 1512702 - RNA, 17 nt, Human
guugaaaaacagcugag

SEQ ID NO: 1512703 - RNA, 20 nt, Human
guucuuuccaaaguacacug

SEQ ID NO: 1512704 - RNA, 18 nt, Human
guucuuuccaaaguacac

SEQ ID NO: 1512705 - RNA, 14 nt, Human
guucuuuccaaagu

SEQ ID NO: 1512706 - RNA, 13 nt, Human
guucuuuccaaag

SEQ ID NO: 1512707 - RNA, 23 nt, Human
guucuggcagaguugaagacaga

SEQ ID NO: 1512708 - RNA, 12 nt, Human
guucuggcucuu

SEQ ID NO: 1512709 - RNA, 16 nt, Human
guucuggcucuuccag

SEQ ID NO: 1512710 - RNA, 20 nt, Human
guucuggcucuuccaggcug

SEQ ID NO: 1512711 - RNA, 11 nt, Human
guucugggaca

SEQ ID NO: 1512712 - RNA, 12 nt, Human
guucugggacac

SEQ ID NO: 1512713 - RNA, 14 nt, Human
guucugggacacag

SEQ ID NO: 1512714 - RNA, 15 nt, Human
guucugggacacagu

SEQ ID NO: 1512715 - RNA, 16 nt, Human
guucugggacacaguu

SEQ ID NO: 1512716 - RNA, 23 nt, Human
guucugggacacaguucaauucu

SEQ ID NO: 1512717 - RNA, 18 nt, Human
guucuuucacccuuuucu

SEQ ID NO: 1512718 - RNA, 20 nt, Human
guugauggugguauguuuuc

SEQ ID NO: 1512719 - RNA, 21 nt, Human
guugauggugguauguuuuca

SEQ ID NO: 1512720 - RNA, 18 nt, Human
guugaagagguuuuaaag

SEQ ID NO: 1512721 - RNA, 16 nt, Human
guugaagacagagcua

SEQ ID NO: 1512722 - RNA, 15 nt, Human
guugcaggaccucag

SEQ ID NO: 1512723 - RNA, 12 nt, Human
guugcccaggca

SEQ ID NO: 1512724 - RNA, 15 nt, Human
guugcccaggcaggu

SEQ ID NO: 1512725 - RNA, 14 nt, Human
guugcccaggcagg

SEQ ID NO: 1512726 - RNA, 13 nt, Human
guugccagucacc

SEQ ID NO: 1512727 - RNA, 14 nt, Human
guugccagucaccc

SEQ ID NO: 1512728 - RNA, 16 nt, Human
guugccagucaccccg

SEQ ID NO: 1512729 - RNA, 17 nt, Human
guugccagucaccccgg

SEQ ID NO: 1512730 - RNA, 18 nt, Human
guugccagucaccccggc

SEQ ID NO: 1512731 - RNA, 23 nt, Human
guugccagucaccccggccaccu

SEQ ID NO: 1512732 - RNA, 13 nt, Human
guuggccaggcug

SEQ ID NO: 1512733 - RNA, 15 nt, Human
guuggccaggcuggu

SEQ ID NO: 1512734 - RNA, 14 nt, Human
guuggccaggcugg

SEQ ID NO: 1512735 - RNA, 17 nt, Human
guuggccaggcuggucu

SEQ ID NO: 1512736 - RNA, 19 nt, Human
guuggccaggcuggucuca

SEQ ID NO: 1512737 - RNA, 14 nt, Human
guuggccaguguga

SEQ ID NO: 1512738 - RNA, 23 nt, Human
guuggccaaagccaaagcuaggc

SEQ ID NO: 1512739 - RNA, 14 nt, Human
guuggcaaaaaggc

SEQ ID NO: 1512740 - RNA, 18 nt, Human
guuggcaaaaaggcagga

SEQ ID NO: 1512741 - RNA, 23 nt, Human
guuaccucugccucagaaaacaa

SEQ ID NO: 1512742 - RNA, 16 nt, Human
guuacccaaauuaaga

SEQ ID NO: 1512743 - RNA, 23 nt, Human
guuaccauuuugggguacccacu

SEQ ID NO: 1512744 - RNA, 21 nt, Human
guuacauuuuuaagugcugca

SEQ ID NO: 1512745 - RNA, 20 nt, Human
guuacauauuauauguucua

SEQ ID NO: 1512746 - RNA, 18 nt, Human
guuacauaagauaaaugu

SEQ ID NO: 1512747 - RNA, 19 nt, Human
guuacauaagauaaaugug

SEQ ID NO: 1512748 - RNA, 15 nt, Human
guuacagacaaagcg

SEQ ID NO: 1512749 - RNA, 17 nt, Human
guuacagacaaagcgug

SEQ ID NO: 1512750 - RNA, 22 nt, Human
guuacuaaguuuuuauggcuuu

SEQ ID NO: 1512751 - RNA, 15 nt, Human
guuacucagaauucu

SEQ ID NO: 1512752 - RNA, 22 nt, Human
guuaguuucuccaagcaggaca

SEQ ID NO: 1512753 - RNA, 16 nt, Human
guuaguuucuccaagc

SEQ ID NO: 1512754 - RNA, 19 nt, Human
guuaguuucuccaagcagg

SEQ ID NO: 1512755 - RNA, 21 nt, Human
guuaugacuccagaauuuccc

SEQ ID NO: 1512756 - RNA, 17 nt, Human
guuauuauauuuacaaa

SEQ ID NO: 1512757 - RNA, 19 nt, Human
guucaagcgauucuucugc

SEQ ID NO: 1512758 - RNA, 19 nt, Human
guuauuaaaaaucucaaau

SEQ ID NO: 1512759 - RNA, 18 nt, Human
guucaauaauaaauauuu

SEQ ID NO: 1512760 - RNA, 20 nt, Human
guucaagcgauucuucugcu

SEQ ID NO: 1512761 - RNA, 23 nt, Human
guucaauucucauuugucacaca

SEQ ID NO: 1512762 - RNA, 16 nt, Human
guucaauucucauuug

SEQ ID NO: 1512763 - RNA, 12 nt, Human
guucaugaaaga

SEQ ID NO: 1512764 - RNA, 18 nt, Human
guucaucuugaauuguaa

SEQ ID NO: 1512765 - RNA, 12 nt, Human
guucaucuugaa

SEQ ID NO: 1512766 - RNA, 13 nt, Human
guucaucuugaau

SEQ ID NO: 1512767 - RNA, 16 nt, Human
guucaucaaugaauga

SEQ ID NO: 1512768 - RNA, 17 nt, Human
guucaucauccuaagcu

SEQ ID NO: 1512769 - RNA, 19 nt, Human
guucacugcaaccuccgcc

SEQ ID NO: 1512770 - RNA, 17 nt, Human
guuccaccaucaagcca

SEQ ID NO: 1512771 - RNA, 20 nt, Human
guuccaccaucaagccacca

SEQ ID NO: 1512772 - RNA, 22 nt, Human
guuccucauuagcauuuugcua

SEQ ID NO: 1512773 - RNA, 14 nt, Human
guuccuaauccucu

SEQ ID NO: 1512774 - RNA, 21 nt, Human
guguggggccaugccuccuca

SEQ ID NO: 1512775 - RNA, 23 nt, Human
guguggagaagccacaggccuga

SEQ ID NO: 1512776 - RNA, 22 nt, Human
guguggagaagccacaggccug

SEQ ID NO: 1512777 - RNA, 21 nt, Human
guguggagaagcggcuggcag

SEQ ID NO: 1512778 - RNA, 13 nt, Human
guguggagaagcg

SEQ ID NO: 1512779 - RNA, 12 nt, Human
gugugcucugau

SEQ ID NO: 1512780 - RNA, 15 nt, Human
gugugcucugaucau

SEQ ID NO: 1512781 - RNA, 22 nt, Human
gugugcucugaucauccacugu

SEQ ID NO: 1512782 - RNA, 22 nt, Human
gugucucuugguccugcugcag

SEQ ID NO: 1512783 - RNA, 18 nt, Human
gugucucuugguccugcu

SEQ ID NO: 1512784 - RNA, 19 nt, Human
gugucucuugguccugcug

SEQ ID NO: 1512785 - RNA, 20 nt, Human
gugucucuugguccugcugc

SEQ ID NO: 1512786 - RNA, 21 nt, Human
gugucucuugguccugcugca

SEQ ID NO: 1512787 - RNA, 15 nt, Human
gugucgggcaugaca

SEQ ID NO: 1512788 - RNA, 18 nt, Human
guguccccugacagggcc

SEQ ID NO: 1512789 - RNA, 23 nt, Human
gugucccugcacuugcagacucu

SEQ ID NO: 1512790 - RNA, 14 nt, Human
guguccggucccug

SEQ ID NO: 1512791 - RNA, 13 nt, Human
gugucuccaaccc

SEQ ID NO: 1512792 - RNA, 17 nt, Human
gugucuccaacccccca

SEQ ID NO: 1512793 - RNA, 17 nt, Human
gugucucccuucauccu

SEQ ID NO: 1512794 - RNA, 14 nt, Human
gugucucuuggucc

SEQ ID NO: 1512795 - RNA, 18 nt, Human
gugucuccaaccccccag

SEQ ID NO: 1512796 - RNA, 19 nt, Human
gugucuccaaccccccagc

SEQ ID NO: 1512797 - RNA, 21 nt, Human
gugucuccaaccccccagcac

SEQ ID NO: 1512798 - RNA, 13 nt, Human
guuacagacaaag

SEQ ID NO: 1512799 - RNA, 15 nt, Human
guuacacuaaaaggu

SEQ ID NO: 1512800 - RNA, 16 nt, Human
guuacacuaaaaggug

SEQ ID NO: 1512801 - RNA, 22 nt, Human
guuaaaauaccagccaguaaau

SEQ ID NO: 1512802 - RNA, 20 nt, Human
guuaaaagaugaaaauauuu

SEQ ID NO: 1512803 - RNA, 14 nt, Human
guuaaaagaugaaa

SEQ ID NO: 1512804 - RNA, 16 nt, Human
guuaaaagaugaaaau

SEQ ID NO: 1512805 - RNA, 15 nt, Human
guguuuuuaacucaa

SEQ ID NO: 1512806 - RNA, 12 nt, Human
guguuacuaagu

SEQ ID NO: 1512807 - RNA, 14 nt, Human
guguuacuaaguuu

SEQ ID NO: 1512808 - RNA, 23 nt, Human
guguuacuagccucaaaauacau

SEQ ID NO: 1512809 - RNA, 18 nt, Human
guguuaugacuccagaau

SEQ ID NO: 1512810 - RNA, 13 nt, Human
gugucccugcacu

SEQ ID NO: 1512811 - RNA, 16 nt, Human
gugucccugcacuugc

SEQ ID NO: 1512812 - RNA, 18 nt, Human
gugucccugcacuugcag

SEQ ID NO: 1512813 - RNA, 17 nt, Human
guguacauggaauaaca

SEQ ID NO: 1512814 - RNA, 22 nt, Human
guguacauggaauaacauguaa

SEQ ID NO: 1512815 - RNA, 15 nt, Human
guguacuuaacuauu

SEQ ID NO: 1512816 - RNA, 17 nt, Human
guguaagacaaaaagcu

SEQ ID NO: 1512817 - RNA, 19 nt, Human
guggugcgaucuggguuca

SEQ ID NO: 1512818 - RNA, 18 nt, Human
guggugaccccaggaggg

SEQ ID NO: 1512819 - RNA, 21 nt, Human
guguaaguagauaggccaugg

SEQ ID NO: 1512820 - RNA, 21 nt, Human
guguaaguauucuuauuuaau

SEQ ID NO: 1512821 - RNA, 16 nt, Human
guggugaccccaggag

SEQ ID NO: 1512822 - RNA, 21 nt, Human
guggugagaggcauccaguau

SEQ ID NO: 1512823 - RNA, 14 nt, Human
guggugaccucugc

SEQ ID NO: 1512824 - RNA, 17 nt, Human
guggugaccucugccug

SEQ ID NO: 1512825 - RNA, 17 nt, Human
gugguagagugugccug

SEQ ID NO: 1512826 - RNA, 14 nt, Human
gugguacuugauca

SEQ ID NO: 1512827 - RNA, 19 nt, Human
gugguaugaucacggcuca

SEQ ID NO: 1512828 - RNA, 14 nt, Human
guggucccacccca

SEQ ID NO: 1512829 - RNA, 15 nt, Human
guggucccaccccac

SEQ ID NO: 1512830 - RNA, 16 nt, Human
guggucccaccccaca

SEQ ID NO: 1512831 - RNA, 17 nt, Human
guggucccaccccacac

SEQ ID NO: 1512832 - RNA, 18 nt, Human
gugguccuaaucuucuga

SEQ ID NO: 1512833 - RNA, 15 nt, Human
gugggcauucaaaug

SEQ ID NO: 1512834 - RNA, 17 nt, Human
gugggcccaaugcacuu

SEQ ID NO: 1512835 - RNA, 15 nt, Human
gugggcuaguugggc

SEQ ID NO: 1512836 - RNA, 15 nt, Human
guggggaccucaggc

SEQ ID NO: 1512837 - RNA, 18 nt, Human
guggggaccucaggccug

SEQ ID NO: 1512838 - RNA, 23 nt, Human
guggguuucuaaagcugccagcc

SEQ ID NO: 1512839 - RNA, 13 nt, Human
guggggcagcuug

SEQ ID NO: 1512840 - RNA, 17 nt, Human
guggggcagcuugaggg

SEQ ID NO: 1512841 - RNA, 15 nt, Human
gugcuacaaaaacac

SEQ ID NO: 1512842 - RNA, 20 nt, Human
gugcuacaaaaacacagcaa

SEQ ID NO: 1512843 - RNA, 21 nt, Human
gugcuacaaaaacacagcaag

SEQ ID NO: 1512844 - RNA, 14 nt, Human
guggcucacgccug

SEQ ID NO: 1512845 - RNA, 12 nt, Human
guggcugcuuca

SEQ ID NO: 1512846 - RNA, 14 nt, Human
guggcugcuucaag

SEQ ID NO: 1512847 - RNA, 19 nt, Human
guggcuggguuggagggug

SEQ ID NO: 1512848 - RNA, 23 nt, Human
guggcugcuucaaggauccugag

SEQ ID NO: 1512849 - RNA, 15 nt, Human
guggcugcuucaagg

SEQ ID NO: 1512850 - RNA, 16 nt, Human
guggcugcuucaagga

SEQ ID NO: 1512851 - RNA, 19 nt, Human
guggcugcuucaaggaucc

SEQ ID NO: 1512852 - RNA, 22 nt, Human
guggcugcuucaaggauccuga

SEQ ID NO: 1512853 - RNA, 22 nt, Human
guggcuuaaaacaacacucaca

SEQ ID NO: 1512854 - RNA, 23 nt, Human
gugauccacccaccucagccucc

SEQ ID NO: 1512855 - RNA, 24 nt, Human
gugauccacccaccucagccuccc

SEQ ID NO: 1512856 - RNA, 18 nt, Human
gugauuuuuguaauuuuu

SEQ ID NO: 1512857 - RNA, 13 nt, Human
gugauuuuuguaa

SEQ ID NO: 1512858 - RNA, 12 nt, Human
gugauuuucauu

SEQ ID NO: 1512859 - RNA, 20 nt, Human
gugcaguggugcgaucuggg

SEQ ID NO: 1512860 - RNA, 23 nt, Human
gugcaguggugcgaucuggguuc

SEQ ID NO: 1512861 - RNA, 21 nt, Human
gugcaguuugguguguccucc

SEQ ID NO: 1512862 - RNA, 22 nt, Human
gugcauaccacuuuuguucuug

SEQ ID NO: 1512863 - RNA, 20 nt, Human
gugccagguuuuuggucuga

SEQ ID NO: 1512864 - RNA, 14 nt, Human
gugccaugugccag

SEQ ID NO: 1512865 - RNA, 16 nt, Human
gugccaugugccaggu

SEQ ID NO: 1512866 - RNA, 21 nt, Human
gugcgaucuggguucacugca

SEQ ID NO: 1512867 - RNA, 18 nt, Human
gugcggcggucccagcuc

SEQ ID NO: 1512868 - RNA, 19 nt, Human
gugcggcggucccagcucc

SEQ ID NO: 1512869 - RNA, 22 nt, Human
gugcggcggucccagcucccug

SEQ ID NO: 1512870 - RNA, 14 nt, Human
gugcggccuuuggc

SEQ ID NO: 1512871 - RNA, 14 nt, Human
gugcgccuacagga

SEQ ID NO: 1512872 - RNA, 17 nt, Human
gugaggaugaaaaaaua

SEQ ID NO: 1512873 - RNA, 14 nt, Human
gugagcuacaaaug

SEQ ID NO: 1512874 - RNA, 19 nt, Human
gugagccgagaucacgcca

SEQ ID NO: 1512875 - RNA, 15 nt, Human
gugagccacugcacc

SEQ ID NO: 1512876 - RNA, 20 nt, Human
gugagccacugcaccgggcc

SEQ ID NO: 1512877 - RNA, 14 nt, Human
gugauauuuuucuu

SEQ ID NO: 1512878 - RNA, 17 nt, Human
gugauacaaugcugugc

SEQ ID NO: 1512879 - RNA, 15 nt, Human
gugauacaaugcugu

SEQ ID NO: 1512880 - RNA, 17 nt, Human
gugaguugauagcacag

SEQ ID NO: 1512881 - RNA, 12 nt, Human
gugacagaggca

SEQ ID NO: 1512882 - RNA, 13 nt, Human
gugacagaggcag

SEQ ID NO: 1512883 - RNA, 14 nt, Human
gugacagaggcagc

SEQ ID NO: 1512884 - RNA, 15 nt, Human
gugacagaggcagcc

SEQ ID NO: 1512885 - RNA, 13 nt, Human
gugaccucugccu

SEQ ID NO: 1512886 - RNA, 14 nt, Human
gugaccucugccug

SEQ ID NO: 1512887 - RNA, 15 nt, Human
gugaccucugccuga

SEQ ID NO: 1512888 - RNA, 22 nt, Human
gugaauucuugaaggaaaauga

SEQ ID NO: 1512889 - RNA, 20 nt, Human
gugacaaggauugcuacugu

SEQ ID NO: 1512890 - RNA, 21 nt, Human
gugaaugaugauccuaggcau

SEQ ID NO: 1512891 - RNA, 18 nt, Human
gugaauucuugaaggaaa

SEQ ID NO: 1512892 - RNA, 21 nt, Human
gugaacaaauuuacagagaca

SEQ ID NO: 1512893 - RNA, 15 nt, Human
gugaacacaucagcu

SEQ ID NO: 1512894 - RNA, 13 nt, Human
gugaacacaucag

SEQ ID NO: 1512895 - RNA, 18 nt, Human
gucgucaaagcugaaaug

SEQ ID NO: 1512896 - RNA, 15 nt, Human
gucgguccuggugcc

SEQ ID NO: 1512897 - RNA, 17 nt, Human
gucgguccuggugcccu

SEQ ID NO: 1512898 - RNA, 18 nt, Human
gucgguccuggugcccug

SEQ ID NO: 1512899 - RNA, 23 nt, Human
gucuaagauaguaacaaugaaga

SEQ ID NO: 1512900 - RNA, 21 nt, Human
gucuaagauaguaacaaugaa

SEQ ID NO: 1512901 - RNA, 13 nt, Human
gucuaaauuugaa

SEQ ID NO: 1512902 - RNA, 18 nt, Human
gucucacuauguugccca

SEQ ID NO: 1512903 - RNA, 19 nt, Human
gucucacuauguugcccag

SEQ ID NO: 1512904 - RNA, 15 nt, Human
gucccugccaaugga

SEQ ID NO: 1512905 - RNA, 11 nt, Human
gucccugccaa

SEQ ID NO: 1512906 - RNA, 14 nt, Human
gucccugccaaugg

SEQ ID NO: 1512907 - RNA, 21 nt, Human
guccuuaccagcagagcaccu

SEQ ID NO: 1512908 - RNA, 19 nt, Human
guccuuaccagcagagcac

SEQ ID NO: 1512909 - RNA, 21 nt, Human
gucggaaaacaugcuacacac

SEQ ID NO: 1512910 - RNA, 16 nt, Human
gucgggcaugacacga

SEQ ID NO: 1512911 - RNA, 23 nt, Human
gucggguuuuauuguuuaaaauc

SEQ ID NO: 1512912 - RNA, 13 nt, Human
gucucacuguugc

SEQ ID NO: 1512913 - RNA, 22 nt, Human
gucucacucugucgcccagucu

SEQ ID NO: 1512914 - RNA, 15 nt, Human
gucucacucugucgc

SEQ ID NO: 1512915 - RNA, 16 nt, Human
gucucacucugucgcc

SEQ ID NO: 1512916 - RNA, 18 nt, Human
gucucacucugucgccca

SEQ ID NO: 1512917 - RNA, 19 nt, Human
gucucacucugucgcccag

SEQ ID NO: 1512918 - RNA, 13 nt, Human
gucucuugguccu

SEQ ID NO: 1512919 - RNA, 17 nt, Human
gucuguucuuuccaaag

SEQ ID NO: 1512920 - RNA, 14 nt, Human
gucuguucuuucca

SEQ ID NO: 1512921 - RNA, 18 nt, Human
gucugugccauuuuguau

SEQ ID NO: 1512922 - RNA, 22 nt, Human
gucugugagaugcuagaacucc

SEQ ID NO: 1512923 - RNA, 23 nt, Human
gucugugagaugcuagaacuccc

SEQ ID NO: 1512924 - RNA, 15 nt, Human
gucugugagaugcua

SEQ ID NO: 1512925 - RNA, 16 nt, Human
gucugugagaugcuag

SEQ ID NO: 1512926 - RNA, 17 nt, Human
gucugugagaugcuaga

SEQ ID NO: 1512927 - RNA, 21 nt, Human
gucugugagaugcuagaacuc

SEQ ID NO: 1512928 - RNA, 21 nt, Human
gucuugaacuccuggccucaa

SEQ ID NO: 1512929 - RNA, 18 nt, Human
gucuugaacuccuggccu

SEQ ID NO: 1512930 - RNA, 20 nt, Human
gucuugaacuccuggccuca

SEQ ID NO: 1512931 - RNA, 16 nt, Human
gucuugcaauggcagc

SEQ ID NO: 1512932 - RNA, 17 nt, Human
gucuugcaauggcagcc

SEQ ID NO: 1512933 - RNA, 18 nt, Human
gucuugcaauggcagccu

SEQ ID NO: 1512934 - RNA, 19 nt, Human
gucuugcaauggcagccuu

SEQ ID NO: 1512935 - RNA, 21 nt, Human
gucuuaaaaaguggaaaaaua

SEQ ID NO: 1512936 - RNA, 16 nt, Human
gucuugaacuccuggc

SEQ ID NO: 1512937 - RNA, 17 nt, Human
gucuugaacuccuggcc

SEQ ID NO: 1512938 - RNA, 23 nt, Human
gucuugcaauggcagccuuggca

SEQ ID NO: 1512939 - RNA, 20 nt, Human
gucuugcaauggcagccuug

SEQ ID NO: 1512940 - RNA, 21 nt, Human
gucuugcaauggcagccuugg

SEQ ID NO: 1512941 - RNA, 16 nt, Human
gucccugcacuugcag

SEQ ID NO: 1512942 - RNA, 19 nt, Human
gucccugcacuugcagacu

SEQ ID NO: 1512943 - RNA, 21 nt, Human
gucccugcacuugcagacucu

SEQ ID NO: 1512944 - RNA, 17 nt, Human
guccccaccgcagacag

SEQ ID NO: 1512945 - RNA, 23 nt, Human
gucccaccuuggcugcagggagu

SEQ ID NO: 1512946 - RNA, 21 nt, Human
gucauucagauaugauucaaa

SEQ ID NO: 1512947 - RNA, 13 nt, Human
gucaggaaagaga

SEQ ID NO: 1512948 - RNA, 21 nt, Human
gucagcuccccucggagaaga

SEQ ID NO: 1512949 - RNA, 22 nt, Human
gucagcuccccucggagaagag

SEQ ID NO: 1512950 - RNA, 23 nt, Human
gucagcuccccucggagaagagc

SEQ ID NO: 1512951 - RNA, 13 nt, Human
guccacccaggag

SEQ ID NO: 1512952 - RNA, 12 nt, Human
guccacccagga

SEQ ID NO: 1512953 - RNA, 23 nt, Human
guccacccaggagccccgaggcc

SEQ ID NO: 1512954 - RNA, 21 nt, Human
gucccaccuuggcugcaggga

SEQ ID NO: 1512955 - RNA, 20 nt, Human
guauuuuaaaagaaugauua

SEQ ID NO: 1512956 - RNA, 13 nt, Human
guauuuuaaucac

SEQ ID NO: 1512957 - RNA, 22 nt, Human
guauuuuaucuuugauucuccu

SEQ ID NO: 1512958 - RNA, 23 nt, Human
guauuuuaucuuugauucuccuu

SEQ ID NO: 1512959 - RNA, 14 nt, Human
guauuuuacuaaua

SEQ ID NO: 1512960 - RNA, 17 nt, Human
gucaccagacggggcug

SEQ ID NO: 1512961 - RNA, 16 nt, Human
gucaccagacggggcu

SEQ ID NO: 1512962 - RNA, 15 nt, Human
gucaaugcagccccc

SEQ ID NO: 1512963 - RNA, 23 nt, Human
gucaauaaaauccauacauuugu

SEQ ID NO: 1512964 - RNA, 22 nt, Human
gucaauaaaauccauacauuug

SEQ ID NO: 1512965 - RNA, 15 nt, Human
gucaagugaaaaagg

SEQ ID NO: 1512966 - RNA, 19 nt, Human
guauuuuguuuuugucuua

SEQ ID NO: 1512967 - RNA, 22 nt, Human
gucaccccggccaccugcggug

SEQ ID NO: 1512968 - RNA, 17 nt, Human
gucaccccggccaccug

SEQ ID NO: 1512969 - RNA, 18 nt, Human
gucaccccggccaccugc

SEQ ID NO: 1512970 - RNA, 22 nt, Human
gucacucuggcagcucagagag

SEQ ID NO: 1512971 - RNA, 17 nt, Human
gucacucuggcagcuca

SEQ ID NO: 1512972 - RNA, 19 nt, Human
gucacucuggcagcucaga

SEQ ID NO: 1512973 - RNA, 12 nt, Human
gucacucuggca

SEQ ID NO: 1512974 - RNA, 13 nt, Human
gucacucuggcag

SEQ ID NO: 1512975 - RNA, 14 nt, Human
gucacucuggcagc

SEQ ID NO: 1512976 - RNA, 16 nt, Human
gucacucuggcagcuc

SEQ ID NO: 1512977 - RNA, 19 nt, Human
gucagcuccccucggagaa

SEQ ID NO: 1512978 - RNA, 15 nt, Human
gucagagccugcagu

SEQ ID NO: 1512979 - RNA, 16 nt, Human
gucagagccugcaguu

SEQ ID NO: 1512980 - RNA, 14 nt, Human
gucagagccugcag

SEQ ID NO: 1512981 - RNA, 14 nt, Human
guaguguuggagaa

SEQ ID NO: 1512982 - RNA, 15 nt, Human
guaguguuggagaag

SEQ ID NO: 1512983 - RNA, 17 nt, Human
guaguguuggagaagaa

SEQ ID NO: 1512984 - RNA, 14 nt, Human
guagucaggugccu

SEQ ID NO: 1512985 - RNA, 16 nt, Human
guaggguuauaauaau

SEQ ID NO: 1512986 - RNA, 19 nt, Human
gcuauaggugcuacaaaaa

SEQ ID NO: 1512987 - RNA, 18 nt, Human
gcuauaggugcuacaaaa

SEQ ID NO: 1512988 - RNA, 15 nt, Human
guagagugugccuga

SEQ ID NO: 1512989 - RNA, 16 nt, Human
guagcauccuggaaua

SEQ ID NO: 1512990 - RNA, 14 nt, Human
guagcacugacaga

SEQ ID NO: 1512991 - RNA, 15 nt, Human
guagcacugacagau

SEQ ID NO: 1512992 - RNA, 21 nt, Human
guagcauuuguguugaagagg

SEQ ID NO: 1512993 - RNA, 23 nt, Human
guagggcgggaggauguucuggg

SEQ ID NO: 1512994 - RNA, 21 nt, Human
guagggcgggaggauguucug

SEQ ID NO: 1512995 - RNA, 22 nt, Human
guagggcgggaggauguucugg

SEQ ID NO: 1512996 - RNA, 16 nt, Human
guagggcgggaggaug

SEQ ID NO: 1512997 - RNA, 17 nt, Human
guauguuagugcaaauu

SEQ ID NO: 1512998 - RNA, 22 nt, Human
guaugaucacggcucacugcag

SEQ ID NO: 1512999 - RNA, 21 nt, Human
guaugaucacggcucacugca

SEQ ID NO: 1513000 - RNA, 20 nt, Human
guaugaggcauuuguuugaa

SEQ ID NO: 1513001 - RNA, 17 nt, Human
guaugaggcauuuguuu

SEQ ID NO: 1513002 - RNA, 20 nt, Human
guaugaucacggcucacugc

SEQ ID NO: 1513003 - RNA, 19 nt, Human
guauguuuuuguguauuug

SEQ ID NO: 1513004 - RNA, 23 nt, Human
guauguuuuuguguauuuguuaa

SEQ ID NO: 1513005 - RNA, 15 nt, Human
guauguuuguacuug

SEQ ID NO: 1513006 - RNA, 13 nt, Human
guaugaaauuaua

SEQ ID NO: 1513007 - RNA, 23 nt, Human
guaugaaauuauauaaguauucu

SEQ ID NO: 1513008 - RNA, 15 nt, Human
guaugaggcauuugu

SEQ ID NO: 1513009 - RNA, 13 nt, Human
guaugaggcauuu

SEQ ID NO: 1513010 - RNA, 12 nt, Human
guaucugagcag

SEQ ID NO: 1513011 - RNA, 12 nt, Human
guaucuggugac

SEQ ID NO: 1513012 - RNA, 19 nt, Human
guaucuggugacuuuccuc

SEQ ID NO: 1513013 - RNA, 22 nt, Human
guauaugucaagccauaauugu

SEQ ID NO: 1513014 - RNA, 15 nt, Human
uuucucugauacaga

SEQ ID NO: 1513015 - RNA, 16 nt, Human
uuucucugauacagaa

SEQ ID NO: 1513016 - RNA, 17 nt, Human
uuucucugauacagaaa

SEQ ID NO: 1513017 - RNA, 18 nt, Human
uuucucugauacagaaaa

SEQ ID NO: 1513018 - RNA, 21 nt, Human
uuucugaaauuuccugggagc

SEQ ID NO: 1513019 - RNA, 20 nt, Human
uuucuguucuuucuggcuau

SEQ ID NO: 1513020 - RNA, 15 nt, Human
uuucugagaaagacu

SEQ ID NO: 1513021 - RNA, 13 nt, Human
uuucugagaaaga

SEQ ID NO: 1513022 - RNA, 21 nt, Human
uuucuaaaggcuaccuuugua

SEQ ID NO: 1513023 - RNA, 20 nt, Human
uuucuaaaggcuaccuuugu

SEQ ID NO: 1513024 - RNA, 17 nt, Human
uuaccacagacauacua

SEQ ID NO: 1513025 - RNA, 14 nt, Human
uuaccacagacaua

SEQ ID NO: 1513026 - RNA, 16 nt, Human
uuuccugaggcugggc

SEQ ID NO: 1513027 - RNA, 18 nt, Human
uuugaaucaucaagucuu

SEQ ID NO: 1513028 - RNA, 13 nt, Human
uuugaauaugaaa

SEQ ID NO: 1513029 - RNA, 22 nt, Human
uuugaagaugccgcauuuggau

SEQ ID NO: 1513030 - RNA, 21 nt, Human
uuugaaucucauaauuuauac

SEQ ID NO: 1513031 - RNA, 22 nt, Human
uuugaaucucauaauuuauaca

SEQ ID NO: 1513032 - RNA, 16 nt, Human
uuugaaucucauaauu

SEQ ID NO: 1513033 - RNA, 19 nt, Human
uuugaaucucauaauuuau

SEQ ID NO: 1513034 - RNA, 20 nt, Human
uuugaaucucauaauuuaua

SEQ ID NO: 1513035 - RNA, 12 nt, Human
uuucuugccucu

SEQ ID NO: 1513036 - RNA, 19 nt, Human
uuugaacugauaaagauga

SEQ ID NO: 1513037 - RNA, 17 nt, Human
uuugaacugauaaagau

SEQ ID NO: 1513038 - RNA, 15 nt, Human
uuugaacugauaaag

SEQ ID NO: 1513039 - RNA, 14 nt, Human
uuugaacucuucaa

SEQ ID NO: 1513040 - RNA, 21 nt, Human
uuucuugaucaacaucuuuuc

SEQ ID NO: 1513041 - RNA, 16 nt, Human
uuucuuaaacaaaugu

SEQ ID NO: 1513042 - RNA, 23 nt, Human
uuucuuagggaaggauacaaaag

SEQ ID NO: 1513043 - RNA, 18 nt, Human
uuucuuagggaaggauac

SEQ ID NO: 1513044 - RNA, 17 nt, Human
uuucuuauuucauuucu

SEQ ID NO: 1513045 - RNA, 13 nt, Human
uuucuucucccuc

SEQ ID NO: 1513046 - RNA, 12 nt, Human
uuucuucucccu

SEQ ID NO: 1513047 - RNA, 19 nt, Human
uuuggacaaaauggaauac

SEQ ID NO: 1513048 - RNA, 21 nt, Human
uuuggaauuuugugcccccau

SEQ ID NO: 1513049 - RNA, 13 nt, Human
uuuguauaaaaua

SEQ ID NO: 1513050 - RNA, 16 nt, Human
uuugguuuuguucccc

SEQ ID NO: 1513051 - RNA, 19 nt, Human
uuugguuuuguuccccucc

SEQ ID NO: 1513052 - RNA, 21 nt, Human
uuugguuuuguuccccuccuc

SEQ ID NO: 1513053 - RNA, 14 nt, Human
uuuguauaaaauaa

SEQ ID NO: 1513054 - RNA, 16 nt, Human
uuuguauaaaauaauu

SEQ ID NO: 1513055 - RNA, 19 nt, Human
uuugguuuucacauuggaa

SEQ ID NO: 1513056 - RNA, 14 nt, Human
uuugguuuuguucc

SEQ ID NO: 1513057 - RNA, 15 nt, Human
uuugguuuuguuccc

SEQ ID NO: 1513058 - RNA, 19 nt, Human
uuuggugguuucagaaaug

SEQ ID NO: 1513059 - RNA, 12 nt, Human
uuuggaaaauaa

SEQ ID NO: 1513060 - RNA, 14 nt, Human
uuuggaauuuugug

SEQ ID NO: 1513061 - RNA, 16 nt, Human
uuugcuuugugauuuu

SEQ ID NO: 1513062 - RNA, 15 nt, Human
uuugcuuugugauuu

SEQ ID NO: 1513063 - RNA, 21 nt, Human
uuuuaaaagaaugauuaugaa

SEQ ID NO: 1513064 - RNA, 17 nt, Human
uuuuaaagaaugcucuu

SEQ ID NO: 1513065 - RNA, 21 nt, Human
uuuguucuggcucuuccaggc

SEQ ID NO: 1513066 - RNA, 19 nt, Human
uuuguuccccuccuccacu

SEQ ID NO: 1513067 - RNA, 21 nt, Human
uuuuaaaugcaccuggaauau

SEQ ID NO: 1513068 - RNA, 12 nt, Human
uuuuaaaugcac

SEQ ID NO: 1513069 - RNA, 11 nt, Human
uuuuaaaugca

SEQ ID NO: 1513070 - RNA, 13 nt, Human
uuuuaauuaaaua

SEQ ID NO: 1513071 - RNA, 15 nt, Human
uuuuugaagcuguau

SEQ ID NO: 1513072 - RNA, 13 nt, Human
uuuuuugauauau

SEQ ID NO: 1513073 - RNA, 19 nt, Human
uuuuucucuaggaaauauu

SEQ ID NO: 1513074 - RNA, 23 nt, Human
uuuuucucugauacagaaaaguu

SEQ ID NO: 1513075 - RNA, 19 nt, Human
uuuuuccuucagugccuua

SEQ ID NO: 1513076 - RNA, 11 nt, Human
uuuuuccuuca

SEQ ID NO: 1513077 - RNA, 11 nt, Human
uuuuuaaaugc

SEQ ID NO: 1513078 - RNA, 18 nt, Human
uuuuuaaaaaagaaacau

SEQ ID NO: 1513079 - RNA, 16 nt, Human
uuuugucauauaagau

SEQ ID NO: 1513080 - RNA, 14 nt, Human
uuuugguuuuguuc

SEQ ID NO: 1513081 - RNA, 20 nt, Human
uuuugguuuuguuccccucc

SEQ ID NO: 1513082 - RNA, 16 nt, Human
uuuugguuuuguuccc

SEQ ID NO: 1513083 - RNA, 19 nt, Human
uuuuguagagccagggucu

SEQ ID NO: 1513084 - RNA, 19 nt, Human
uuuuguagcacugacagau

SEQ ID NO: 1513085 - RNA, 18 nt, Human
uuuuguagcacugacaga

SEQ ID NO: 1513086 - RNA, 15 nt, Human
uuuucuaaauuuauc

SEQ ID NO: 1513087 - RNA, 14 nt, Human
uuuuccugaaaacc

SEQ ID NO: 1513088 - RNA, 18 nt, Human
uuuuggucuggagggaag

SEQ ID NO: 1513089 - RNA, 15 nt, Human
uuuuggucuguguga

SEQ ID NO: 1513090 - RNA, 14 nt, Human
uuuuggcugcugaa

SEQ ID NO: 1513091 - RNA, 20 nt, Human
uuuugaaucucauaauuuau

SEQ ID NO: 1513092 - RNA, 20 nt, Human
uuuugacaaggggcaguggu

SEQ ID NO: 1513093 - RNA, 18 nt, Human
uuuuggaugguguuacau

SEQ ID NO: 1513094 - RNA, 11 nt, Human
uuuugacagaa

SEQ ID NO: 1513095 - RNA, 18 nt, Human
gcgccuacaggagugagc

SEQ ID NO: 1513096 - RNA, 15 nt, Human
gcgccuacaggagug

SEQ ID NO: 1513097 - RNA, 22 nt, Human
gcgacagugagacucugucuca

SEQ ID NO: 1513098 - RNA, 12 nt, Human
gcgacagugaga

SEQ ID NO: 1513099 - RNA, 11 nt, Human
gcggacagcca

SEQ ID NO: 1513100 - RNA, 13 nt, Human
gcggacagccacg

SEQ ID NO: 1513101 - RNA, 15 nt, Human
gcgucgguccuggug

SEQ ID NO: 1513102 - RNA, 19 nt, Human
gcgucucauacucaccuca

SEQ ID NO: 1513103 - RNA, 16 nt, Human
gcggacagccacggcc

SEQ ID NO: 1513104 - RNA, 15 nt, Human
gcggacagccacggc

SEQ ID NO: 1513105 - RNA, 20 nt, Human
gcuaccuuuguauucucucc

SEQ ID NO: 1513106 - RNA, 16 nt, Human
gcuaccuuuguauucu

SEQ ID NO: 1513107 - RNA, 19 nt, Human
gcuagaacucccuuucaac

SEQ ID NO: 1513108 - RNA, 15 nt, Human
gcuaggaacacuccu

SEQ ID NO: 1513109 - RNA, 16 nt, Human
gcuaggaacacuccuu

SEQ ID NO: 1513110 - RNA, 13 nt, Human
gcuauaggugcua

SEQ ID NO: 1513111 - RNA, 21 nt, Human
gcuaagagggagggagggcuc

SEQ ID NO: 1513112 - RNA, 20 nt, Human
gcuaagagggagggagggcu

SEQ ID NO: 1513113 - RNA, 20 nt, Human
gcuacacacugcauguuugu

SEQ ID NO: 1513114 - RNA, 13 nt, Human
gcuacacacugca

SEQ ID NO: 1513115 - RNA, 22 nt, Human
gcuacacaggggaaaagaggag

SEQ ID NO: 1513116 - RNA, 14 nt, Human
gcuacacaggggaa

SEQ ID NO: 1513117 - RNA, 15 nt, Human
gcuaaagcccagaga

SEQ ID NO: 1513118 - RNA, 13 nt, Human
gcuaagagggagg

SEQ ID NO: 1513119 - RNA, 16 nt, Human
gccuuuggcagaguuc

SEQ ID NO: 1513120 - RNA, 13 nt, Human
gccuuuggcuuca

SEQ ID NO: 1513121 - RNA, 23 nt, Human
gcgacaaugcaaaccaucauuga

SEQ ID NO: 1513122 - RNA, 15 nt, Human
gccuuccaggggugg

SEQ ID NO: 1513123 - RNA, 16 nt, Human
gccuuccagggguggg

SEQ ID NO: 1513124 - RNA, 21 nt, Human
gccuuccaggggugggacacc

SEQ ID NO: 1513125 - RNA, 12 nt, Human
gccuuccagggg

SEQ ID NO: 1513126 - RNA, 16 nt, Human
gccuuauggaacacuc

SEQ ID NO: 1513127 - RNA, 18 nt, Human
gccuuauggaacacucug

SEQ ID NO: 1513128 - RNA, 19 nt, Human
gccuuauggaacacucuga

SEQ ID NO: 1513129 - RNA, 20 nt, Human
gccuuauggaacacucugag

SEQ ID NO: 1513130 - RNA, 18 nt, Human
gccuuacccucauguucu

SEQ ID NO: 1513131 - RNA, 21 nt, Human
gccuuacacaaugguuuucuu

SEQ ID NO: 1513132 - RNA, 20 nt, Human
gccuuacacaaugguuuucu

SEQ ID NO: 1513133 - RNA, 19 nt, Human
gccuuacccucauguucuu

SEQ ID NO: 1513134 - RNA, 20 nt, Human
gccuuagaagucacacagua

SEQ ID NO: 1513135 - RNA, 19 nt, Human
gccuuagaagucacacagu

SEQ ID NO: 1513136 - RNA, 17 nt, Human
gccuuagaagucacaca

SEQ ID NO: 1513137 - RNA, 18 nt, Human
gccuuagaagucacacag

SEQ ID NO: 1513138 - RNA, 10 nt, Human
gccuuaugga

SEQ ID NO: 1513139 - RNA, 14 nt, Human
gccuuauggaacac

SEQ ID NO: 1513140 - RNA, 22 nt, Human
gccugggggcugggcagaggaa

SEQ ID NO: 1513141 - RNA, 15 nt, Human
gccugcaauuucaua

SEQ ID NO: 1513142 - RNA, 13 nt, Human
gccugguggcagc

SEQ ID NO: 1513143 - RNA, 14 nt, Human
gccugguggcagcu

SEQ ID NO: 1513144 - RNA, 18 nt, Human
gccugguggcagcugcgg

SEQ ID NO: 1513145 - RNA, 19 nt, Human
gccugguggcagcugcggu

SEQ ID NO: 1513146 - RNA, 21 nt, Human
gccugguggcagcugcggucc

SEQ ID NO: 1513147 - RNA, 15 nt, Human
gccuccucaggagcc

SEQ ID NO: 1513148 - RNA, 12 nt, Human
gccuccucagga

SEQ ID NO: 1513149 - RNA, 20 nt, Human
gccucccgaguagcugggac

SEQ ID NO: 1513150 - RNA, 18 nt, Human
gccucccgaguagcuggg

SEQ ID NO: 1513151 - RNA, 19 nt, Human
gccucccgaguagcuggga

SEQ ID NO: 1513152 - RNA, 17 nt, Human
gccucccaucacccgcu

SEQ ID NO: 1513153 - RNA, 21 nt, Human
gccucacaguccuuaccagca

SEQ ID NO: 1513154 - RNA, 18 nt, Human
gccucacaguccuuacca

SEQ ID NO: 1513155 - RNA, 15 nt, Human
gccucagcauccugg

SEQ ID NO: 1513156 - RNA, 16 nt, Human
gccucagcauccuggc

SEQ ID NO: 1513157 - RNA, 17 nt, Human
gccucagcauccuggca

SEQ ID NO: 1513158 - RNA, 18 nt, Human
gccucccaaagugcuggg

SEQ ID NO: 1513159 - RNA, 19 nt, Human
gccucccaaagugcuggga

SEQ ID NO: 1513160 - RNA, 13 nt, Human
gccucccaacuca

SEQ ID NO: 1513161 - RNA, 21 nt, Human
gccucccaacucaccccagcc

SEQ ID NO: 1513162 - RNA, 14 nt, Human
gccucccaucaccc

SEQ ID NO: 1513163 - RNA, 16 nt, Human
gccucccaucacccgc

SEQ ID NO: 1513164 - RNA, 16 nt, Human
gccucccaacucaccc

SEQ ID NO: 1513165 - RNA, 17 nt, Human
gccucccaacucacccc

SEQ ID NO: 1513166 - RNA, 18 nt, Human
gccucccaacucacccca

SEQ ID NO: 1513167 - RNA, 19 nt, Human
gccucccaacucaccccag

SEQ ID NO: 1513168 - RNA, 13 nt, Human
gccucucucaggc

SEQ ID NO: 1513169 - RNA, 14 nt, Human
gccucucucaggcc

SEQ ID NO: 1513170 - RNA, 16 nt, Human
gccucucucaggccaa

SEQ ID NO: 1513171 - RNA, 17 nt, Human
gccucugacacacagcu

SEQ ID NO: 1513172 - RNA, 18 nt, Human
gccucugacacacagcuc

SEQ ID NO: 1513173 - RNA, 14 nt, Human
gccucugcacuccc

SEQ ID NO: 1513174 - RNA, 19 nt, Human
gccucugacacacagcucu

SEQ ID NO: 1513175 - RNA, 20 nt, Human
gccucugacacacagcucug

SEQ ID NO: 1513176 - RNA, 21 nt, Human
gccucugacacacagcucugu

SEQ ID NO: 1513177 - RNA, 18 nt, Human
gccucugccucugacaca

SEQ ID NO: 1513178 - RNA, 15 nt, Human
gccucugcacucccc

SEQ ID NO: 1513179 - RNA, 12 nt, Human
gccucugccucu

SEQ ID NO: 1513180 - RNA, 13 nt, Human
gccucugccucug

SEQ ID NO: 1513181 - RNA, 13 nt, Human
gccugcaagggag

SEQ ID NO: 1513182 - RNA, 15 nt, Human
gccugcaagggagug

SEQ ID NO: 1513183 - RNA, 14 nt, Human
gcccuucucuccag

SEQ ID NO: 1513184 - RNA, 16 nt, Human
gcccuucucuccagcc

SEQ ID NO: 1513185 - RNA, 17 nt, Human
gcccuucucuccagccc

SEQ ID NO: 1513186 - RNA, 18 nt, Human
gcccuucucuccagcccc

SEQ ID NO: 1513187 - RNA, 13 nt, Human
gccgaagcccagg

SEQ ID NO: 1513188 - RNA, 21 nt, Human
gccgggcgcgguggcucacgc

SEQ ID NO: 1513189 - RNA, 20 nt, Human
gccgggcgugguggugagug

SEQ ID NO: 1513190 - RNA, 22 nt, Human
gccgagaucacgccacugcacu

SEQ ID NO: 1513191 - RNA, 20 nt, Human
gccgagaucacgccacugca

SEQ ID NO: 1513192 - RNA, 21 nt, Human
gccgagaucacgccacugcac

SEQ ID NO: 1513193 - RNA, 11 nt, Human
gccgcagcccu

SEQ ID NO: 1513194 - RNA, 12 nt, Human
gccgcagcccug

SEQ ID NO: 1513195 - RNA, 13 nt, Human
gccgcagcccugc

SEQ ID NO: 1513196 - RNA, 12 nt, Human
gccgcagagcug

SEQ ID NO: 1513197 - RNA, 15 nt, Human
gccgucuaccugagg

SEQ ID NO: 1513198 - RNA, 16 nt, Human
gccgucuaccugaggg

SEQ ID NO: 1513199 - RNA, 17 nt, Human
gccgucuaccugagggg

SEQ ID NO: 1513200 - RNA, 18 nt, Human
gccgucuaccugaggggc

SEQ ID NO: 1513201 - RNA, 20 nt, Human
gccguguaaccauggaccca

SEQ ID NO: 1513202 - RNA, 18 nt, Human
gccucaaccuccugggcu

SEQ ID NO: 1513203 - RNA, 19 nt, Human
gccucaaccuccugggcua

SEQ ID NO: 1513204 - RNA, 13 nt, Human
gccucacaguccu

SEQ ID NO: 1513205 - RNA, 17 nt, Human
gccucacaguccuuacc

SEQ ID NO: 1513206 - RNA, 18 nt, Human
gccguguccccugacagg

SEQ ID NO: 1513207 - RNA, 13 nt, Human
gccaggcuggucu

SEQ ID NO: 1513208 - RNA, 15 nt, Human
gccaggcuggucuca

SEQ ID NO: 1513209 - RNA, 23 nt, Human
gccaguaaaugggggugcauuug

SEQ ID NO: 1513210 - RNA, 15 nt, Human
gccaugccuccucag

SEQ ID NO: 1513211 - RNA, 14 nt, Human
gccaugcuccuggc

SEQ ID NO: 1513212 - RNA, 14 nt, Human
gccauccagguuca

SEQ ID NO: 1513213 - RNA, 24 nt, Human
gccaugcuccuggcccacugcauc

SEQ ID NO: 1513214 - RNA, 15 nt, Human
gccaugggccuccug

SEQ ID NO: 1513215 - RNA, 16 nt, Human
gccaugggccuccugu

SEQ ID NO: 1513216 - RNA, 15 nt, Human
gcccaccuggccucu

SEQ ID NO: 1513217 - RNA, 16 nt, Human
gcccaccuggccucug

SEQ ID NO: 1513218 - RNA, 17 nt, Human
gcccaccuggccucugc

SEQ ID NO: 1513219 - RNA, 20 nt, Human
gcccaccuggccucugcacu

SEQ ID NO: 1513220 - RNA, 21 nt, Human
gcccaccuggccucugcacuc

SEQ ID NO: 1513221 - RNA, 24 nt, Human
gcccaccuggccucugcacucccc

SEQ ID NO: 1513222 - RNA, 14 nt, Human
gcccacuucugcca

SEQ ID NO: 1513223 - RNA, 13 nt, Human
gcccaccuuggcu

SEQ ID NO: 1513224 - RNA, 15 nt, Human
gcccaccuuggcuca

SEQ ID NO: 1513225 - RNA, 16 nt, Human
gcccaccuuggcucaa

SEQ ID NO: 1513226 - RNA, 17 nt, Human
gcccaccuuggcucaag

SEQ ID NO: 1513227 - RNA, 19 nt, Human
gccaggagccuccugcccu

SEQ ID NO: 1513228 - RNA, 20 nt, Human
gccaggagccuccugcccuu

SEQ ID NO: 1513229 - RNA, 14 nt, Human
gccaggagccuccu

SEQ ID NO: 1513230 - RNA, 16 nt, Human
gccaggagccuccugc

SEQ ID NO: 1513231 - RNA, 15 nt, Human
gccaggaagccagca

SEQ ID NO: 1513232 - RNA, 17 nt, Human
gccagcugcuugggcuu

SEQ ID NO: 1513233 - RNA, 18 nt, Human
gccagcugcuugggcuuc

SEQ ID NO: 1513234 - RNA, 20 nt, Human
gccagcugcuugggcuucau

SEQ ID NO: 1513235 - RNA, 12 nt, Human
gccaggaagcca

SEQ ID NO: 1513236 - RNA, 13 nt, Human
gccaggaagccag

SEQ ID NO: 1513237 - RNA, 14 nt, Human
gccaggaagccagc

SEQ ID NO: 1513238 - RNA, 14 nt, Human
gccagaugcaccag

SEQ ID NO: 1513239 - RNA, 17 nt, Human
gccagagggagugacag

SEQ ID NO: 1513240 - RNA, 22 nt, Human
gccagccgagauagccaaggcc

SEQ ID NO: 1513241 - RNA, 15 nt, Human
gccagaugcaccagc

SEQ ID NO: 1513242 - RNA, 20 nt, Human
gccagauucuuuccugaggc

SEQ ID NO: 1513243 - RNA, 24 nt, Human
gccagauucuuuccugaggcuggg

SEQ ID NO: 1513244 - RNA, 13 nt, Human
gccagauuucacu

SEQ ID NO: 1513245 - RNA, 20 nt, Human
gccaaggccaaaggaagcac

SEQ ID NO: 1513246 - RNA, 24 nt, Human
gccaaggccaaaggaagcacaugc

SEQ ID NO: 1513247 - RNA, 20 nt, Human
gccacugcaccgggccacag

SEQ ID NO: 1513248 - RNA, 21 nt, Human
gccacugcaccgggccacaga

SEQ ID NO: 1513249 - RNA, 22 nt, Human
gccagagacacaagccuucggc

SEQ ID NO: 1513250 - RNA, 22 nt, Human
gccacugcaccgggccacagag

SEQ ID NO: 1513251 - RNA, 21 nt, Human
gccagagacacaagccuucgg

SEQ ID NO: 1513252 - RNA, 17 nt, Human
gccccuguucuggcaga

SEQ ID NO: 1513253 - RNA, 16 nt, Human
gccccucagggucccu

SEQ ID NO: 1513254 - RNA, 18 nt, Human
gccccucagggucccugg

SEQ ID NO: 1513255 - RNA, 15 nt, Human
gccccgaggccuucu

SEQ ID NO: 1513256 - RNA, 14 nt, Human
gccccucagggucc

SEQ ID NO: 1513257 - RNA, 18 nt, Human
gccccgaggccuucucug

SEQ ID NO: 1513258 - RNA, 22 nt, Human
gccccgaggccuucucugaagg

SEQ ID NO: 1513259 - RNA, 12 nt, Human
gcccgggcucug

SEQ ID NO: 1513260 - RNA, 19 nt, Human
gcccuccaagaccuucucc

SEQ ID NO: 1513261 - RNA, 21 nt, Human
gcccuccaagaccuucuccuu

SEQ ID NO: 1513262 - RNA, 22 nt, Human
gcccuccaagaccuucuccuuc

SEQ ID NO: 1513263 - RNA, 23 nt, Human
gcccuccaagaccuucuccuuca

SEQ ID NO: 1513264 - RNA, 13 nt, Human
gcccucugcccac

SEQ ID NO: 1513265 - RNA, 16 nt, Human
gcccucugcccacucc

SEQ ID NO: 1513266 - RNA, 18 nt, Human
gcccucugcccacucccu

SEQ ID NO: 1513267 - RNA, 19 nt, Human
gcccucugcccacucccug

SEQ ID NO: 1513268 - RNA, 14 nt, Human
gcccugagcuuucu

SEQ ID NO: 1513269 - RNA, 16 nt, Human
gcccugcagagggcac

SEQ ID NO: 1513270 - RNA, 15 nt, Human
gcccugcagagggca

SEQ ID NO: 1513271 - RNA, 13 nt, Human
gcccugcagaggg

SEQ ID NO: 1513272 - RNA, 14 nt, Human
gcccugcagagggc

SEQ ID NO: 1513273 - RNA, 15 nt, Human
gccccauucugccug

SEQ ID NO: 1513274 - RNA, 14 nt, Human
gccccauucugccu

SEQ ID NO: 1513275 - RNA, 13 nt, Human
gccccauccucug

SEQ ID NO: 1513276 - RNA, 14 nt, Human
gccccauccucugu

SEQ ID NO: 1513277 - RNA, 22 nt, Human
gccccauccucuguacagagcc

SEQ ID NO: 1513278 - RNA, 15 nt, Human
gccccagugcccaca

SEQ ID NO: 1513279 - RNA, 13 nt, Human
gccccagugccca

SEQ ID NO: 1513280 - RNA, 14 nt, Human
gccccagugcccac

SEQ ID NO: 1513281 - RNA, 18 nt, Human
gccccaucccaaacccuu

SEQ ID NO: 1513282 - RNA, 12 nt, Human
gccccagugccc

SEQ ID NO: 1513283 - RNA, 13 nt, Human
gcccaggccuccu

SEQ ID NO: 1513284 - RNA, 21 nt, Human
gcccagagaggguggugaccu

SEQ ID NO: 1513285 - RNA, 23 nt, Human
gcccaggccccugccacccuggg

SEQ ID NO: 1513286 - RNA, 12 nt, Human
gcccaggcuggc

SEQ ID NO: 1513287 - RNA, 19 nt, Human
gcauucaaauguauuacag

SEQ ID NO: 1513288 - RNA, 19 nt, Human
gcauuaucuagauacugua

SEQ ID NO: 1513289 - RNA, 17 nt, Human
gcauuaucuagauacug

SEQ ID NO: 1513290 - RNA, 16 nt, Human
gcauuuguguugaaga

SEQ ID NO: 1513291 - RNA, 16 nt, Human
gcauuuguuugaacug

SEQ ID NO: 1513292 - RNA, 14 nt, Human
gcauuugcugaaua

SEQ ID NO: 1513293 - RNA, 17 nt, Human
gcauuugcugaauacag

SEQ ID NO: 1513294 - RNA, 13 nt, Human
gcauuugcugaau

SEQ ID NO: 1513295 - RNA, 18 nt, Human
gcauuuguuugaacugau

SEQ ID NO: 1513296 - RNA, 14 nt, Human
gccaaacucaccug

SEQ ID NO: 1513297 - RNA, 16 nt, Human
gccaaacucaccugcc

SEQ ID NO: 1513298 - RNA, 19 nt, Human
gccaaacucaccugccccu

SEQ ID NO: 1513299 - RNA, 20 nt, Human
gccaaagccaaagcuaggcc

SEQ ID NO: 1513300 - RNA, 16 nt, Human
gccaaagccuccucca

SEQ ID NO: 1513301 - RNA, 19 nt, Human
gccaaagccuccuccagcc

SEQ ID NO: 1513302 - RNA, 16 nt, Human
gccaaagcuaggccug

SEQ ID NO: 1513303 - RNA, 22 nt, Human
gccaaagcuaggccuggccaga

SEQ ID NO: 1513304 - RNA, 12 nt, Human
gccaaaggaagc

SEQ ID NO: 1513305 - RNA, 12 nt, Human
gcaucagcugcu

SEQ ID NO: 1513306 - RNA, 18 nt, Human
gcaugaaguaauaugcac

SEQ ID NO: 1513307 - RNA, 13 nt, Human
gcaugaagguuuc

SEQ ID NO: 1513308 - RNA, 13 nt, Human
gcauuauauuuau

SEQ ID NO: 1513309 - RNA, 22 nt, Human
gcauguucucugaggacacuaa

SEQ ID NO: 1513310 - RNA, 15 nt, Human
gcauguucucugagg

SEQ ID NO: 1513311 - RNA, 21 nt, Human
gcauguucucugaggacacua

SEQ ID NO: 1513312 - RNA, 18 nt, Human
gcaugcgggcuuccuccu

SEQ ID NO: 1513313 - RNA, 15 nt, Human
gcagugcaugcuguc

SEQ ID NO: 1513314 - RNA, 16 nt, Human
gcagugcaugcugucc

SEQ ID NO: 1513315 - RNA, 22 nt, Human
gcagguccaggguuugaguuca

SEQ ID NO: 1513316 - RNA, 19 nt, Human
gcaggucuugaacuccugg

SEQ ID NO: 1513317 - RNA, 20 nt, Human
gcaggucuugaacuccuggc

SEQ ID NO: 1513318 - RNA, 22 nt, Human
gcagggcucagcggggacagcu

SEQ ID NO: 1513319 - RNA, 18 nt, Human
gcagggucucacucuguc

SEQ ID NO: 1513320 - RNA, 17 nt, Human
gcaggcagccaggccac

SEQ ID NO: 1513321 - RNA, 15 nt, Human
gcaggcagccaggcc

SEQ ID NO: 1513322 - RNA, 16 nt, Human
gcaggcagccaggcca

SEQ ID NO: 1513323 - RNA, 19 nt, Human
gcagggcucagcggggaca

SEQ ID NO: 1513324 - RNA, 21 nt, Human
gcagggcucagcggggacagc

SEQ ID NO: 1513325 - RNA, 17 nt, Human
gcauagguuuaauaauu

SEQ ID NO: 1513326 - RNA, 15 nt, Human
gcaguugaaaagacu

SEQ ID NO: 1513327 - RNA, 18 nt, Human
gcauagauucccugagca

SEQ ID NO: 1513328 - RNA, 20 nt, Human
gcauauuuuucacauaucua

SEQ ID NO: 1513329 - RNA, 14 nt, Human
gcauauuuuucaca

SEQ ID NO: 1513330 - RNA, 15 nt, Human
gcauauuuuucacau

SEQ ID NO: 1513331 - RNA, 16 nt, Human
gcauauuuuucacaua

SEQ ID NO: 1513332 - RNA, 19 nt, Human
gcauauuuuucacauaucu

SEQ ID NO: 1513333 - RNA, 23 nt, Human
gcaguggugguuuucuguucuuu

SEQ ID NO: 1513334 - RNA, 18 nt, Human
gcagugguguggagaagc

SEQ ID NO: 1513335 - RNA, 13 nt, Human
gcagugggagcug

SEQ ID NO: 1513336 - RNA, 14 nt, Human
gcagugggagcugc

SEQ ID NO: 1513337 - RNA, 15 nt, Human
gcagugggagcugcc

SEQ ID NO: 1513338 - RNA, 13 nt, Human
gcauagaaguaaa

SEQ ID NO: 1513339 - RNA, 17 nt, Human
gcaguucugaagaagau

SEQ ID NO: 1513340 - RNA, 15 nt, Human
gcaguucugaagaag

SEQ ID NO: 1513341 - RNA, 17 nt, Human
gcaguuauuaacacuaa

SEQ ID NO: 1513342 - RNA, 17 nt, Human
gcagacaguuaagagaa

SEQ ID NO: 1513343 - RNA, 21 nt, Human
gcagaguugaagacagagcua

SEQ ID NO: 1513344 - RNA, 18 nt, Human
gcagauaaacaguaguga

SEQ ID NO: 1513345 - RNA, 22 nt, Human
gcagauacaggaaaagcugcug

SEQ ID NO: 1513346 - RNA, 17 nt, Human
gcagccccauucugccu

SEQ ID NO: 1513347 - RNA, 23 nt, Human
gcagcaauaaagcagcguuucua

SEQ ID NO: 1513348 - RNA, 16 nt, Human
gcagcaauaaagcagc

SEQ ID NO: 1513349 - RNA, 18 nt, Human
gcagccccauucugccug

SEQ ID NO: 1513350 - RNA, 19 nt, Human
gcagccccauucugccugc

SEQ ID NO: 1513351 - RNA, 21 nt, Human
gcagccccauucugccugccc

SEQ ID NO: 1513352 - RNA, 24 nt, Human
gcagccccauucugccugcccagg

SEQ ID NO: 1513353 - RNA, 20 nt, Human
gcagccccgugggguuccuc

SEQ ID NO: 1513354 - RNA, 20 nt, Human
gcagccccuguucuggcaga

SEQ ID NO: 1513355 - RNA, 21 nt, Human
gcagccccuguucuggcagag

SEQ ID NO: 1513356 - RNA, 13 nt, Human
gcagcccugcaga

SEQ ID NO: 1513357 - RNA, 14 nt, Human
gcagcccugcagag

SEQ ID NO: 1513358 - RNA, 15 nt, Human
gcagcccugcagagg

SEQ ID NO: 1513359 - RNA, 16 nt, Human
gcagcccugcagaggg

SEQ ID NO: 1513360 - RNA, 17 nt, Human
gcagcccugcagagggc

SEQ ID NO: 1513361 - RNA, 15 nt, Human
gcagcucaccucucc

SEQ ID NO: 1513362 - RNA, 15 nt, Human
gcagccuuggcaaac

SEQ ID NO: 1513363 - RNA, 14 nt, Human
gcagcucaccucuc

SEQ ID NO: 1513364 - RNA, 23 nt, Human
gcaggaggaucacuugaguccag

SEQ ID NO: 1513365 - RNA, 12 nt, Human
gcaggcagccag

SEQ ID NO: 1513366 - RNA, 13 nt, Human
gcaggcagccagg

SEQ ID NO: 1513367 - RNA, 14 nt, Human
gcaggcagccaggc

SEQ ID NO: 1513368 - RNA, 12 nt, Human
gcacgauuucug

SEQ ID NO: 1513369 - RNA, 19 nt, Human
gcaccuuagacagucccug

SEQ ID NO: 1513370 - RNA, 18 nt, Human
gcaccuuagacagucccu

SEQ ID NO: 1513371 - RNA, 21 nt, Human
gcaccuggaauauauaaccag

SEQ ID NO: 1513372 - RNA, 18 nt, Human
gcaccuggaauauauaac

SEQ ID NO: 1513373 - RNA, 15 nt, Human
gcacccucaggcagg

SEQ ID NO: 1513374 - RNA, 22 nt, Human
gcaccuggaauauauaaccagu

SEQ ID NO: 1513375 - RNA, 14 nt, Human
gcaccuuagacagu

SEQ ID NO: 1513376 - RNA, 17 nt, Human
gcaccuuagacaguccc

SEQ ID NO: 1513377 - RNA, 16 nt, Human
gcaccagcagccugga

SEQ ID NO: 1513378 - RNA, 22 nt, Human
gcacccaccaucaugucuggcu

SEQ ID NO: 1513379 - RNA, 19 nt, Human
gcacccggccccugcuggu

SEQ ID NO: 1513380 - RNA, 15 nt, Human
gcaccagcagccugg

SEQ ID NO: 1513381 - RNA, 21 nt, Human
gcaccacugcacuccagccug

SEQ ID NO: 1513382 - RNA, 22 nt, Human
gcaccacugcacuccagccugg

SEQ ID NO: 1513383 - RNA, 12 nt, Human
gcaauggcagcc

SEQ ID NO: 1513384 - RNA, 13 nt, Human
gcaauggcagccu

SEQ ID NO: 1513385 - RNA, 14 nt, Human
gcaauggcagccuu

SEQ ID NO: 1513386 - RNA, 23 nt, Human
gcagacaggcaagcaccuccugc

SEQ ID NO: 1513387 - RNA, 18 nt, Human
gcagacaggaccagggau

SEQ ID NO: 1513388 - RNA, 19 nt, Human
gcagacaggcaagcaccuc

SEQ ID NO: 1513389 - RNA, 12 nt, Human
gcagacaggacc

SEQ ID NO: 1513390 - RNA, 13 nt, Human
gcagacaggacca

SEQ ID NO: 1513391 - RNA, 15 nt, Human
gcagacaggaccagg

SEQ ID NO: 1513392 - RNA, 16 nt, Human
gcacugcuuccaguga

SEQ ID NO: 1513393 - RNA, 18 nt, Human
gcacugcuuccagugagg

SEQ ID NO: 1513394 - RNA, 22 nt, Human
gcacugcuuccagugaggcucu

SEQ ID NO: 1513395 - RNA, 20 nt, Human
gcacugcuuccagugaggcu

SEQ ID NO: 1513396 - RNA, 18 nt, Human
gauuuccguuaaaauacc

SEQ ID NO: 1513397 - RNA, 15 nt, Human
gauuuccguuaaaau

SEQ ID NO: 1513398 - RNA, 13 nt, Human
gauuuggggugga

SEQ ID NO: 1513399 - RNA, 19 nt, Human
gauuucuguuuagauaaua

SEQ ID NO: 1513400 - RNA, 11 nt, Human
gauuucuguuu

SEQ ID NO: 1513401 - RNA, 21 nt, Human
gauuucuguuuagauaauaca

SEQ ID NO: 1513402 - RNA, 15 nt, Human
gauuuuccugaaaac

SEQ ID NO: 1513403 - RNA, 19 nt, Human
gauuuguuaaugauagcua

SEQ ID NO: 1513404 - RNA, 17 nt, Human
gauucauauuuacuucu

SEQ ID NO: 1513405 - RNA, 18 nt, Human
gauucauauuuacuucuu

SEQ ID NO: 1513406 - RNA, 19 nt, Human
gauucauauuuacuucuua

SEQ ID NO: 1513407 - RNA, 19 nt, Human
gauucagacagcugccugg

SEQ ID NO: 1513408 - RNA, 13 nt, Human
gauucagcucugc

SEQ ID NO: 1513409 - RNA, 15 nt, Human
gauucagcucugcaa

SEQ ID NO: 1513410 - RNA, 23 nt, Human
gauggggcugcaccggcuggccu

SEQ ID NO: 1513411 - RNA, 21 nt, Human
gauucccaagcucugcuccuc

SEQ ID NO: 1513412 - RNA, 19 nt, Human
gauucccaagcucugcucc

SEQ ID NO: 1513413 - RNA, 20 nt, Human
gauucccaagcucugcuccu

SEQ ID NO: 1513414 - RNA, 21 nt, Human
gauugcaacaggcugggcuuc

SEQ ID NO: 1513415 - RNA, 16 nt, Human
gauugcaccacugcac

SEQ ID NO: 1513416 - RNA, 23 nt, Human
gauugcaccacugcacuccagcc

SEQ ID NO: 1513417 - RNA, 16 nt, Human
gauucuuuccugaggc

SEQ ID NO: 1513418 - RNA, 17 nt, Human
gauucuuuccugaggcu

SEQ ID NO: 1513419 - RNA, 18 nt, Human
gauucuuuccugaggcug

SEQ ID NO: 1513420 - RNA, 20 nt, Human
gauugcaacaggcugggcuu

SEQ ID NO: 1513421 - RNA, 16 nt, Human
gcaaaguaucccuacu

SEQ ID NO: 1513422 - RNA, 17 nt, Human
gcaagaauugaagcagg

SEQ ID NO: 1513423 - RNA, 23 nt, Human
gcaagacgcugugcugcccugcc

SEQ ID NO: 1513424 - RNA, 14 nt, Human
gcaagacgcugugc

SEQ ID NO: 1513425 - RNA, 20 nt, Human
gcaagacgcugugcugcccu

SEQ ID NO: 1513426 - RNA, 21 nt, Human
gcaagacgcugugcugcccug

SEQ ID NO: 1513427 - RNA, 22 nt, Human
gcaagacgcugugcugcccugc

SEQ ID NO: 1513428 - RNA, 11 nt, Human
gcaaggcuguc

SEQ ID NO: 1513429 - RNA, 13 nt, Human
gcaaggcugucaa

SEQ ID NO: 1513430 - RNA, 14 nt, Human
gcaagggugauggg

SEQ ID NO: 1513431 - RNA, 10 nt, Human
gcaagccaga

SEQ ID NO: 1513432 - RNA, 18 nt, Human
gcaaggagauuuacaacu

SEQ ID NO: 1513433 - RNA, 14 nt, Human
gcaaggucauuuuu

SEQ ID NO: 1513434 - RNA, 15 nt, Human
gcaaucaaaucugcu

SEQ ID NO: 1513435 - RNA, 17 nt, Human
gcaaucaaaucugcuuu

SEQ ID NO: 1513436 - RNA, 17 nt, Human
gcaaugaccuuucaaua

SEQ ID NO: 1513437 - RNA, 20 nt, Human
gcaaugaccuuucaauagga

SEQ ID NO: 1513438 - RNA, 22 nt, Human
gcaaugaccuuucaauaggaaa

SEQ ID NO: 1513439 - RNA, 23 nt, Human
gcaaugaccuuucaauaggaaaa

SEQ ID NO: 1513440 - RNA, 13 nt, Human
gcaaugcuggcug

SEQ ID NO: 1513441 - RNA, 14 nt, Human
gcaaugcuggcugu

SEQ ID NO: 1513442 - RNA, 22 nt, Human
gcaaugcuggcuguuggcuggg

SEQ ID NO: 1513443 - RNA, 23 nt, Human
gcaaugcuggcuguuggcugggg

SEQ ID NO: 1513444 - RNA, 13 nt, Human
gauccuggaaauc

SEQ ID NO: 1513445 - RNA, 22 nt, Human
gauccugagccagauuucacuc

SEQ ID NO: 1513446 - RNA, 15 nt, Human
gaucccucauccuca

SEQ ID NO: 1513447 - RNA, 16 nt, Human
gaucccucauccucau

SEQ ID NO: 1513448 - RNA, 16 nt, Human
gaucuuuucaaguuaa

SEQ ID NO: 1513449 - RNA, 14 nt, Human
gaugaaaauauuug

SEQ ID NO: 1513450 - RNA, 18 nt, Human
gaucuuugcagacaggca

SEQ ID NO: 1513451 - RNA, 22 nt, Human
gauggauuuccagccaaagccu

SEQ ID NO: 1513452 - RNA, 20 nt, Human
gaugccugguggcagcugcg

SEQ ID NO: 1513453 - RNA, 18 nt, Human
gaugccugguggcagcug

SEQ ID NO: 1513454 - RNA, 19 nt, Human
gaugccugguggcagcugc

SEQ ID NO: 1513455 - RNA, 21 nt, Human
gauggcuaguaucaaaagaaa

SEQ ID NO: 1513456 - RNA, 13 nt, Human
gauggggcccugc

SEQ ID NO: 1513457 - RNA, 14 nt, Human
gauggggcccugcc

SEQ ID NO: 1513458 - RNA, 22 nt, Human
gauggggcccugccuccuuugu

SEQ ID NO: 1513459 - RNA, 19 nt, Human
gaugcagccucacaguccu

SEQ ID NO: 1513460 - RNA, 14 nt, Human
gaugcagccucaca

SEQ ID NO: 1513461 - RNA, 12 nt, Human
gaugcagccuca

SEQ ID NO: 1513462 - RNA, 16 nt, Human
gaugcagcauuaugau

SEQ ID NO: 1513463 - RNA, 14 nt, Human
gaugcaccagcccu

SEQ ID NO: 1513464 - RNA, 13 nt, Human
gaugcaccagccc

SEQ ID NO: 1513465 - RNA, 22 nt, Human
gaugcacagaguuguuacauuu

SEQ ID NO: 1513466 - RNA, 17 nt, Human
gaugacaacuucccagu

SEQ ID NO: 1513467 - RNA, 11 nt, Human
gauacagaaaa

SEQ ID NO: 1513468 - RNA, 23 nt, Human
gauagauaggucagugcaaauac

SEQ ID NO: 1513469 - RNA, 22 nt, Human
gauaauacaccacuacauucug

SEQ ID NO: 1513470 - RNA, 21 nt, Human
gauaauacaccacuacauucu

SEQ ID NO: 1513471 - RNA, 18 nt, Human
gauaauacaccacuacau

SEQ ID NO: 1513472 - RNA, 18 nt, Human
gauacaggaaaagcugcu

SEQ ID NO: 1513473 - RNA, 19 nt, Human
gauacaggaaaagcugcug

SEQ ID NO: 1513474 - RNA, 21 nt, Human
gauagcacagacccugcccug

SEQ ID NO: 1513475 - RNA, 22 nt, Human
gauagcacagacccugcccugu

SEQ ID NO: 1513476 - RNA, 13 nt, Human
gauagcagggcau

SEQ ID NO: 1513477 - RNA, 13 nt, Human
gaggaaggaaacc

SEQ ID NO: 1513478 - RNA, 19 nt, Human
gaggaaggaaacccagcuc

SEQ ID NO: 1513479 - RNA, 20 nt, Human
gaggaaggaaacccagcucu

SEQ ID NO: 1513480 - RNA, 21 nt, Human
gaggaaggaaacccagcucug

SEQ ID NO: 1513481 - RNA, 12 nt, Human
gauaaguucaua

SEQ ID NO: 1513482 - RNA, 14 nt, Human
gauaaguucauaca

SEQ ID NO: 1513483 - RNA, 16 nt, Human
gauaaguucauacauu

SEQ ID NO: 1513484 - RNA, 22 nt, Human
gauaaauaguuuaugauuccac

SEQ ID NO: 1513485 - RNA, 17 nt, Human
gaucauccacugugcca

SEQ ID NO: 1513486 - RNA, 19 nt, Human
gaucauccacugugccaug

SEQ ID NO: 1513487 - RNA, 21 nt, Human
gaucauccacugugccaugug

SEQ ID NO: 1513488 - RNA, 21 nt, Human
gaucaaguuauuuuuaauuug

SEQ ID NO: 1513489 - RNA, 18 nt, Human
gaucacgccacugcacua

SEQ ID NO: 1513490 - RNA, 22 nt, Human
gauagucuuucaguuaaggaga

SEQ ID NO: 1513491 - RNA, 15 nt, Human
gauaguaacaaugaa

SEQ ID NO: 1513492 - RNA, 16 nt, Human
gauaguauugugcaua

SEQ ID NO: 1513493 - RNA, 14 nt, Human
gauagucuuucagu

SEQ ID NO: 1513494 - RNA, 12 nt, Human
gaucacggcuca

SEQ ID NO: 1513495 - RNA, 22 nt, Human
gaucagucugauucccaagcuc

SEQ ID NO: 1513496 - RNA, 12 nt, Human
gaucagccuggg

SEQ ID NO: 1513497 - RNA, 15 nt, Human
gaucagccugggcaa

SEQ ID NO: 1513498 - RNA, 16 nt, Human
gagcucgugggacagu

SEQ ID NO: 1513499 - RNA, 17 nt, Human
gagcugaggcaauucua

SEQ ID NO: 1513500 - RNA, 15 nt, Human
gagcugaguggggga

SEQ ID NO: 1513501 - RNA, 15 nt, Human
gagccugcaguuauu

SEQ ID NO: 1513502 - RNA, 15 nt, Human
gagcuagcagcaggg

SEQ ID NO: 1513503 - RNA, 17 nt, Human
gagcuagcagcagggag

SEQ ID NO: 1513504 - RNA, 14 nt, Human
gagcuuuuguagaa

SEQ ID NO: 1513505 - RNA, 16 nt, Human
gaggaaagcaaaggag

SEQ ID NO: 1513506 - RNA, 17 nt, Human
gaggaaagcaaaggaga

SEQ ID NO: 1513507 - RNA, 20 nt, Human
gagcuuugaaaauucagugg

SEQ ID NO: 1513508 - RNA, 22 nt, Human
gagcuuucugcuaucaaagagg

SEQ ID NO: 1513509 - RNA, 17 nt, Human
gaggaagagaaaaaaua

SEQ ID NO: 1513510 - RNA, 13 nt, Human
gaggaagccgcug

SEQ ID NO: 1513511 - RNA, 18 nt, Human
gaggaagccgcuggggcc

SEQ ID NO: 1513512 - RNA, 14 nt, Human
gaggaagccgcugg

SEQ ID NO: 1513513 - RNA, 17 nt, Human
gaggaagccgcuggggc

SEQ ID NO: 1513514 - RNA, 14 nt, Human
gaggaacaaggcaa

SEQ ID NO: 1513515 - RNA, 16 nt, Human
gaggaacaaggcaagg

SEQ ID NO: 1513516 - RNA, 19 nt, Human
gaggaagaacggggcucuu

SEQ ID NO: 1513517 - RNA, 23 nt, Human
gaggaagaacggggcucuucuca

SEQ ID NO: 1513518 - RNA, 14 nt, Human
gagccgaagcccag

SEQ ID NO: 1513519 - RNA, 15 nt, Human
gagccgaagcccagg

SEQ ID NO: 1513520 - RNA, 19 nt, Human
gagccgagaucacgccacu

SEQ ID NO: 1513521 - RNA, 20 nt, Human
gagccgagaucacgccacug

SEQ ID NO: 1513522 - RNA, 11 nt, Human
gagcccacgcc

SEQ ID NO: 1513523 - RNA, 21 nt, Human
gagccgagaucacgccacugc

SEQ ID NO: 1513524 - RNA, 22 nt, Human
gagccgagaucacgccacugca

SEQ ID NO: 1513525 - RNA, 12 nt, Human
gagccugcaguu

SEQ ID NO: 1513526 - RNA, 13 nt, Human
gagccuccugccc

SEQ ID NO: 1513527 - RNA, 13 nt, Human
gagccucagcauc

SEQ ID NO: 1513528 - RNA, 17 nt, Human
gagccucagcauccugg

SEQ ID NO: 1513529 - RNA, 14 nt, Human
gagccucagcaucc

SEQ ID NO: 1513530 - RNA, 15 nt, Human
gagccucagcauccu

SEQ ID NO: 1513531 - RNA, 20 nt, Human
gagccagauuucacucuccu

SEQ ID NO: 1513532 - RNA, 13 nt, Human
gagcccaccuugg

SEQ ID NO: 1513533 - RNA, 15 nt, Human
gagcccaccuuggcu

SEQ ID NO: 1513534 - RNA, 17 nt, Human
gagcccaccuuggcuca

SEQ ID NO: 1513535 - RNA, 18 nt, Human
gagccacugcaccgggcc

SEQ ID NO: 1513536 - RNA, 19 nt, Human
gagccacugcaccgggcca

SEQ ID NO: 1513537 - RNA, 20 nt, Human
gagccacugcaccgggccac

SEQ ID NO: 1513538 - RNA, 15 nt, Human
gagccagauuucacu

SEQ ID NO: 1513539 - RNA, 18 nt, Human
gagccagauuucacucuc

SEQ ID NO: 1513540 - RNA, 19 nt, Human
gagccagauuucacucucc

SEQ ID NO: 1513541 - RNA, 22 nt, Human
gagcagccacauuccugaugcu

SEQ ID NO: 1513542 - RNA, 23 nt, Human
gagcagagaccaucccugaaggc

SEQ ID NO: 1513543 - RNA, 19 nt, Human
gagcagagaccaucccuga

SEQ ID NO: 1513544 - RNA, 21 nt, Human
gagcagagaccaucccugaag

SEQ ID NO: 1513545 - RNA, 20 nt, Human
gagauagccaaggccaaagg

SEQ ID NO: 1513546 - RNA, 21 nt, Human
gagauagccaaggccaaagga

SEQ ID NO: 1513547 - RNA, 17 nt, Human
gagcagagaccaucccu

SEQ ID NO: 1513548 - RNA, 18 nt, Human
gagcagagaccaucccug

SEQ ID NO: 1513549 - RNA, 16 nt, Human
gagcagagaccauccc

SEQ ID NO: 1513550 - RNA, 14 nt, Human
gagaagaacugaaa

SEQ ID NO: 1513551 - RNA, 16 nt, Human
gagaagaacugaaauc

SEQ ID NO: 1513552 - RNA, 15 nt, Human
gagaagagcuguuca

SEQ ID NO: 1513553 - RNA, 22 nt, Human
gagaagagcuguucacagccag

SEQ ID NO: 1513554 - RNA, 22 nt, Human
gagaaugcacaaacagaggccg

SEQ ID NO: 1513555 - RNA, 20 nt, Human
gagaaugcacaaacagaggc

SEQ ID NO: 1513556 - RNA, 21 nt, Human
gagaaugcacaaacagaggcc

SEQ ID NO: 1513557 - RNA, 12 nt, Human
gagacagcccgg

SEQ ID NO: 1513558 - RNA, 19 nt, Human
gagacagaguuuucacucu

SEQ ID NO: 1513559 - RNA, 18 nt, Human
gagacacacugaagaagc

SEQ ID NO: 1513560 - RNA, 15 nt, Human
gagacacaagccuuc

SEQ ID NO: 1513561 - RNA, 17 nt, Human
gagacacaagccuucgg

SEQ ID NO: 1513562 - RNA, 23 nt, Human
gagaaaguacuucuccacccugc

SEQ ID NO: 1513563 - RNA, 13 nt, Human
gagaaagacuauu

SEQ ID NO: 1513564 - RNA, 15 nt, Human
gagaaagacuauuca

SEQ ID NO: 1513565 - RNA, 17 nt, Human
gagaaagacuauucaaa

SEQ ID NO: 1513566 - RNA, 18 nt, Human
gagaaagacuauucaaac

SEQ ID NO: 1513567 - RNA, 21 nt, Human
gagaaaauggacguguuauga

SEQ ID NO: 1513568 - RNA, 14 nt, Human
gacuuggaagcucc

SEQ ID NO: 1513569 - RNA, 15 nt, Human
gacuuggaagcuccg

SEQ ID NO: 1513570 - RNA, 16 nt, Human
gacuuggaagcuccgc

SEQ ID NO: 1513571 - RNA, 19 nt, Human
gacucgcgacaaugcaaac

SEQ ID NO: 1513572 - RNA, 17 nt, Human
gacuccugcaggcagcc

SEQ ID NO: 1513573 - RNA, 18 nt, Human
gacucgcgacaaugcaaa

SEQ ID NO: 1513574 - RNA, 19 nt, Human
gagagacacacugaagaag

SEQ ID NO: 1513575 - RNA, 17 nt, Human
gagagaagagaaugcac

SEQ ID NO: 1513576 - RNA, 17 nt, Human
gagauacagaauuuuau

SEQ ID NO: 1513577 - RNA, 19 nt, Human
gagagugaacaaauuuaca

SEQ ID NO: 1513578 - RNA, 15 nt, Human
gagagugaacaaauu

SEQ ID NO: 1513579 - RNA, 21 nt, Human
gagagggugggagugggccca

SEQ ID NO: 1513580 - RNA, 13 nt, Human
gagaggggaacag

SEQ ID NO: 1513581 - RNA, 18 nt, Human
gagaggggaacagacugg

SEQ ID NO: 1513582 - RNA, 13 nt, Human
gagagccuuccag

SEQ ID NO: 1513583 - RNA, 14 nt, Human
gagagccuuccagg

SEQ ID NO: 1513584 - RNA, 15 nt, Human
gagacagcucugcau

SEQ ID NO: 1513585 - RNA, 18 nt, Human
gagacagcucugcauacu

SEQ ID NO: 1513586 - RNA, 13 nt, Human
gagacagcucugc

SEQ ID NO: 1513587 - RNA, 24 nt, Human
gagacagcccgggcucugccuccc

SEQ ID NO: 1513588 - RNA, 14 nt, Human
gagacagcccgggc

SEQ ID NO: 1513589 - RNA, 17 nt, Human
gagacagcccgggcucu

SEQ ID NO: 1513590 - RNA, 18 nt, Human
gagacagcccgggcucug

SEQ ID NO: 1513591 - RNA, 19 nt, Human
gagacagcccgggcucugc

SEQ ID NO: 1513592 - RNA, 20 nt, Human
gagacagcccgggcucugcc

SEQ ID NO: 1513593 - RNA, 21 nt, Human
gagacagcccgggcucugccu

SEQ ID NO: 1513594 - RNA, 22 nt, Human
gagacagcccgggcucugccuc

SEQ ID NO: 1513595 - RNA, 23 nt, Human
gagacagcccgggcucugccucc

SEQ ID NO: 1513596 - RNA, 12 nt, Human
gagaccaucccu

SEQ ID NO: 1513597 - RNA, 16 nt, Human
gagacucgcgacaaug

SEQ ID NO: 1513598 - RNA, 18 nt, Human
gagacucgcgacaaugca

SEQ ID NO: 1513599 - RNA, 14 nt, Human
gagacucgagaacu

SEQ ID NO: 1513600 - RNA, 15 nt, Human
gagacucgagaacuu

SEQ ID NO: 1513601 - RNA, 16 nt, Human
gagacucgagaacuuu

SEQ ID NO: 1513602 - RNA, 17 nt, Human
gagacucgagaacuuuc

SEQ ID NO: 1513603 - RNA, 20 nt, Human
gagacucgagaacuuucauu

SEQ ID NO: 1513604 - RNA, 14 nt, Human
gagacucugucuca

SEQ ID NO: 1513605 - RNA, 23 nt, Human
gacggagucccaccuuggcugca

SEQ ID NO: 1513606 - RNA, 21 nt, Human
gacggagucccaccuuggcug

SEQ ID NO: 1513607 - RNA, 18 nt, Human
gacggagucccaccuugg

SEQ ID NO: 1513608 - RNA, 17 nt, Human
gacguguuaugacucca

SEQ ID NO: 1513609 - RNA, 20 nt, Human
gacguguuaugacuccagaa

SEQ ID NO: 1513610 - RNA, 23 nt, Human
gaccuugaacuggguacuugugg

SEQ ID NO: 1513611 - RNA, 22 nt, Human
gaccuuuaagagaaaugagcug

SEQ ID NO: 1513612 - RNA, 21 nt, Human
gaccuuucaauaggaaaaacu

SEQ ID NO: 1513613 - RNA, 12 nt, Human
gacuacaggcac

SEQ ID NO: 1513614 - RNA, 17 nt, Human
gacuacucccccaggug

SEQ ID NO: 1513615 - RNA, 22 nt, Human
gacguguuaugacuccagaauu

SEQ ID NO: 1513616 - RNA, 15 nt, Human
gacuccugcaggcag

SEQ ID NO: 1513617 - RNA, 16 nt, Human
gacuccugcaggcagc

SEQ ID NO: 1513618 - RNA, 14 nt, Human
gaccgugaggccag

SEQ ID NO: 1513619 - RNA, 15 nt, Human
gaccgugaggccaga

SEQ ID NO: 1513620 - RNA, 17 nt, Human
gacccugcccugugggc

SEQ ID NO: 1513621 - RNA, 23 nt, Human
gaccugauuucugagcauuuaau

SEQ ID NO: 1513622 - RNA, 18 nt, Human
gaccugaggcccuucucu

SEQ ID NO: 1513623 - RNA, 21 nt, Human
gaccugaggcccuucucucca

SEQ ID NO: 1513624 - RNA, 11 nt, Human
gaccucaggcc

SEQ ID NO: 1513625 - RNA, 12 nt, Human
gaccucaggccu

SEQ ID NO: 1513626 - RNA, 13 nt, Human
gaccucaggccug

SEQ ID NO: 1513627 - RNA, 15 nt, Human
gaccugaggcccuuc

SEQ ID NO: 1513628 - RNA, 14 nt, Human
gacccaugcugccc

SEQ ID NO: 1513629 - RNA, 15 nt, Human
gacccaugcugcccu

SEQ ID NO: 1513630 - RNA, 16 nt, Human
gacccaugcugcccug

SEQ ID NO: 1513631 - RNA, 17 nt, Human
gacccaugcugcccugu

SEQ ID NO: 1513632 - RNA, 12 nt, Human
gaccccagcucu

SEQ ID NO: 1513633 - RNA, 11 nt, Human
gacccacugcu

SEQ ID NO: 1513634 - RNA, 12 nt, Human
gacccacugcuu

SEQ ID NO: 1513635 - RNA, 14 nt, Human
gaccccagcucugc

SEQ ID NO: 1513636 - RNA, 13 nt, Human
gaccccuccaugu

SEQ ID NO: 1513637 - RNA, 19 nt, Human
gacccugaggcccagaggg

SEQ ID NO: 1513638 - RNA, 20 nt, Human
gacccugaggcccagagggc

SEQ ID NO: 1513639 - RNA, 21 nt, Human
gacccugaggcccagagggcc

SEQ ID NO: 1513640 - RNA, 13 nt, Human
gacccugcccugu

SEQ ID NO: 1513641 - RNA, 15 nt, Human
gacccugcccugugg

SEQ ID NO: 1513642 - RNA, 16 nt, Human
gacccugcccuguggg

SEQ ID NO: 1513643 - RNA, 23 nt, Human
gacccugucucaaaaaaagaaaa

SEQ ID NO: 1513644 - RNA, 22 nt, Human
gacacccugugauggggcccug

SEQ ID NO: 1513645 - RNA, 23 nt, Human
gacacccugugauggggcccugc

SEQ ID NO: 1513646 - RNA, 12 nt, Human
gacacccuguga

SEQ ID NO: 1513647 - RNA, 13 nt, Human
gacacccugugau

SEQ ID NO: 1513648 - RNA, 18 nt, Human
gacacaggcccggcucca

SEQ ID NO: 1513649 - RNA, 15 nt, Human
gacacgaauauugcu

SEQ ID NO: 1513650 - RNA, 18 nt, Human
gacaccuugacagggcac

SEQ ID NO: 1513651 - RNA, 20 nt, Human
gacaccuugacagggcacac

SEQ ID NO: 1513652 - RNA, 15 nt, Human
gacaccuugacaggg

SEQ ID NO: 1513653 - RNA, 17 nt, Human
gacaccuugacagggca

SEQ ID NO: 1513654 - RNA, 19 nt, Human
gacacgaauauugcugaug

SEQ ID NO: 1513655 - RNA, 17 nt, Human
gacacgaauauugcuga

SEQ ID NO: 1513656 - RNA, 18 nt, Human
gacacgaauauugcugau

SEQ ID NO: 1513657 - RNA, 15 nt, Human
gacacuaaccacgcu

SEQ ID NO: 1513658 - RNA, 16 nt, Human
gacacuaaccacgcug

SEQ ID NO: 1513659 - RNA, 17 nt, Human
gacacuaaccacgcugg

SEQ ID NO: 1513660 - RNA, 18 nt, Human
gacacuaaccacgcugga

SEQ ID NO: 1513661 - RNA, 15 nt, Human
gacaagcucacagac

SEQ ID NO: 1513662 - RNA, 22 nt, Human
gacaaggauugcuacuguccua

SEQ ID NO: 1513663 - RNA, 14 nt, Human
gaagucuuuguaca

SEQ ID NO: 1513664 - RNA, 16 nt, Human
gaagucuuuguacaga

SEQ ID NO: 1513665 - RNA, 16 nt, Human
gacaaugacccagugg

SEQ ID NO: 1513666 - RNA, 12 nt, Human
gacaauuuauua

SEQ ID NO: 1513667 - RNA, 16 nt, Human
gacaaugcaaaccauc

SEQ ID NO: 1513668 - RNA, 18 nt, Human
gacaaugcaaaccaucau

SEQ ID NO: 1513669 - RNA, 21 nt, Human
gacaaugacuuacuguacaug

SEQ ID NO: 1513670 - RNA, 12 nt, Human
gacaaugcaaac

SEQ ID NO: 1513671 - RNA, 20 nt, Human
gacaaugacuuacuguacau

SEQ ID NO: 1513672 - RNA, 17 nt, Human
gacaaugacuuacugua

SEQ ID NO: 1513673 - RNA, 19 nt, Human
gacaauuuauuauggcaca

SEQ ID NO: 1513674 - RNA, 13 nt, Human
gacaauuuauuau

SEQ ID NO: 1513675 - RNA, 13 nt, Human
gacacacagcucu

SEQ ID NO: 1513676 - RNA, 15 nt, Human
gacacaggcccggcu

SEQ ID NO: 1513677 - RNA, 17 nt, Human
gacacaggcccggcucc

SEQ ID NO: 1513678 - RNA, 22 nt, Human
gacaugggacauuugcucaugg

SEQ ID NO: 1513679 - RNA, 20 nt, Human
gacaugggugaacuuacuug

SEQ ID NO: 1513680 - RNA, 21 nt, Human
gacaugucuuuucuugcauga

SEQ ID NO: 1513681 - RNA, 17 nt, Human
gacaugucuuuucuugc

SEQ ID NO: 1513682 - RNA, 23 nt, Human
gacauacuaaccagcagaaaugc

SEQ ID NO: 1513683 - RNA, 14 nt, Human
gacaucaacagaua

SEQ ID NO: 1513684 - RNA, 20 nt, Human
gacaggcauguucucugagg

SEQ ID NO: 1513685 - RNA, 16 nt, Human
gacauacuaaccagca

SEQ ID NO: 1513686 - RNA, 15 nt, Human
gacauacuaaccagc

SEQ ID NO: 1513687 - RNA, 14 nt, Human
gacaggcaaugcug

SEQ ID NO: 1513688 - RNA, 16 nt, Human
gacaggcaaugcuggc

SEQ ID NO: 1513689 - RNA, 17 nt, Human
gacaggcaaugcuggcu

SEQ ID NO: 1513690 - RNA, 18 nt, Human
gacaggcaaugcuggcug

SEQ ID NO: 1513691 - RNA, 18 nt, Human
gacaggcauguucucuga

SEQ ID NO: 1513692 - RNA, 19 nt, Human
gacaggcauguucucugag

SEQ ID NO: 1513693 - RNA, 14 nt, Human
gacagcugccuggg

SEQ ID NO: 1513694 - RNA, 15 nt, Human
gacagcugccuggga

SEQ ID NO: 1513695 - RNA, 13 nt, Human
gacagccacggcc

SEQ ID NO: 1513696 - RNA, 12 nt, Human
gacagcugccug

SEQ ID NO: 1513697 - RNA, 13 nt, Human
gacagcugccugg

SEQ ID NO: 1513698 - RNA, 14 nt, Human
gacagacacaggcc

SEQ ID NO: 1513699 - RNA, 20 nt, Human
gacacuaaccacgcuggacc

SEQ ID NO: 1513700 - RNA, 21 nt, Human
gacacuaaccacgcuggaccu

SEQ ID NO: 1513701 - RNA, 15 nt, Human
gacagacacaggccc

SEQ ID NO: 1513702 - RNA, 16 nt, Human
gacagacacaggcccg

SEQ ID NO: 1513703 - RNA, 23 nt, Human
gaagauuuugaaauuuuuauuaa

SEQ ID NO: 1513704 - RNA, 17 nt, Human
gaagauguagaggagaa

SEQ ID NO: 1513705 - RNA, 20 nt, Human
gaagaguauuuuugacagaa

SEQ ID NO: 1513706 - RNA, 23 nt, Human
gaagagcuguucacagccagacu

SEQ ID NO: 1513707 - RNA, 13 nt, Human
gaagagcuguuca

SEQ ID NO: 1513708 - RNA, 15 nt, Human
gaagagcuguucaca

SEQ ID NO: 1513709 - RNA, 20 nt, Human
gaagagcuguucacagccag

SEQ ID NO: 1513710 - RNA, 15 nt, Human
gaagacuucaucccu

SEQ ID NO: 1513711 - RNA, 16 nt, Human
gaagacuucaucccuc

SEQ ID NO: 1513712 - RNA, 12 nt, Human
gaagagccuugc

SEQ ID NO: 1513713 - RNA, 17 nt, Human
gaagacuucaucccucu

SEQ ID NO: 1513714 - RNA, 19 nt, Human
gaagacuucaucccucugg

SEQ ID NO: 1513715 - RNA, 14 nt, Human
gaaccacaagacug

SEQ ID NO: 1513716 - RNA, 15 nt, Human
gaaccacaagacugc

SEQ ID NO: 1513717 - RNA, 20 nt, Human
gaaccacaucuugcucugcu

SEQ ID NO: 1513718 - RNA, 18 nt, Human
gaaccacaucuugcucug

SEQ ID NO: 1513719 - RNA, 16 nt, Human
gaacucccuuucaaca

SEQ ID NO: 1513720 - RNA, 17 nt, Human
gaacuuaaauaauguga

SEQ ID NO: 1513721 - RNA, 14 nt, Human
gaacuuaaauaaug

SEQ ID NO: 1513722 - RNA, 22 nt, Human
gaacuuugaccucugcagcaau

SEQ ID NO: 1513723 - RNA, 16 nt, Human
gaacuuugaccucugc

SEQ ID NO: 1513724 - RNA, 14 nt, Human
gaacuuucauuuuu

SEQ ID NO: 1513725 - RNA, 23 nt, Human
gaacuuucauuuuuuuccaggcu

SEQ ID NO: 1513726 - RNA, 17 nt, Human
gaacuuuccaggaaggc

SEQ ID NO: 1513727 - RNA, 12 nt, Human
gaacuugguucc

SEQ ID NO: 1513728 - RNA, 12 nt, Human
gaacuuucauuu

SEQ ID NO: 1513729 - RNA, 13 nt, Human
gaacuuucauuuu

SEQ ID NO: 1513730 - RNA, 18 nt, Human
gaacuuggcgcugccccu

SEQ ID NO: 1513731 - RNA, 17 nt, Human
gaacuugggccacugug

SEQ ID NO: 1513732 - RNA, 23 nt, Human
gaaguccaagcauuuagauguau

SEQ ID NO: 1513733 - RNA, 21 nt, Human
gaagucacauuccugaacagg

SEQ ID NO: 1513734 - RNA, 16 nt, Human
gaagucacauuccuga

SEQ ID NO: 1513735 - RNA, 20 nt, Human
gaagucacauuccugaacag

SEQ ID NO: 1513736 - RNA, 16 nt, Human
gaaggugauuuauucu

SEQ ID NO: 1513737 - RNA, 20 nt, Human
gaaguaauaugcacacauuu

SEQ ID NO: 1513738 - RNA, 19 nt, Human
gaaguaauaugcacacauu

SEQ ID NO: 1513739 - RNA, 21 nt, Human
gaaguaauaugcacacauuuu

SEQ ID NO: 1513740 - RNA, 13 nt, Human
gaagucacacagu

SEQ ID NO: 1513741 - RNA, 13 nt, Human
gaagggggcuggg

SEQ ID NO: 1513742 - RNA, 15 nt, Human
gaagggggcugggac

SEQ ID NO: 1513743 - RNA, 19 nt, Human
gaaggaagacuucaucccu

SEQ ID NO: 1513744 - RNA, 21 nt, Human
gaaggaaacccagcucugguc

SEQ ID NO: 1513745 - RNA, 22 nt, Human
gaaggaaacccagcucuggucc

SEQ ID NO: 1513746 - RNA, 15 nt, Human
gaaggaacguccccu

SEQ ID NO: 1513747 - RNA, 19 nt, Human
gaaggacauugcggacagc

SEQ ID NO: 1513748 - RNA, 20 nt, Human
gaaggacauugcggacagcc

SEQ ID NO: 1513749 - RNA, 21 nt, Human
gaaggacauugcggacagcca

SEQ ID NO: 1513750 - RNA, 20 nt, Human
gaaggaaacccagcucuggu

SEQ ID NO: 1513751 - RNA, 14 nt, Human
gaagccgcuggggc

SEQ ID NO: 1513752 - RNA, 18 nt, Human
gaagccgcuggggccagu

SEQ ID NO: 1513753 - RNA, 20 nt, Human
gaagccgcuggggccaguug

SEQ ID NO: 1513754 - RNA, 21 nt, Human
gaagccgcuggggccaguugg

SEQ ID NO: 1513755 - RNA, 14 nt, Human
gaaauaaacgucuu

SEQ ID NO: 1513756 - RNA, 16 nt, Human
gaaauaaacgucuuaa

SEQ ID NO: 1513757 - RNA, 17 nt, Human
gaaauaaacgucuuaaa

SEQ ID NO: 1513758 - RNA, 18 nt, Human
gaaauaaacgucuuaaau

SEQ ID NO: 1513759 - RNA, 21 nt, Human
gaaauaaacgucuuaaauauu

SEQ ID NO: 1513760 - RNA, 15 nt, Human
gaaauauuuauuuua

SEQ ID NO: 1513761 - RNA, 16 nt, Human
gaaauauuuauuuuaa

SEQ ID NO: 1513762 - RNA, 13 nt, Human
gaaauauuuauuu

SEQ ID NO: 1513763 - RNA, 20 nt, Human
gaaauaucugaaaauguaug

SEQ ID NO: 1513764 - RNA, 18 nt, Human
gaaauaucugaaaaugua

SEQ ID NO: 1513765 - RNA, 19 nt, Human
gaaauaucugaaaauguau

SEQ ID NO: 1513766 - RNA, 20 nt, Human
gaaauuacuaauuuuacuuc

SEQ ID NO: 1513767 - RNA, 17 nt, Human
gaaauguacagcaagga

SEQ ID NO: 1513768 - RNA, 17 nt, Human
gaaaugggcagagcaga

SEQ ID NO: 1513769 - RNA, 19 nt, Human
gaaaugggcagagcagaga

SEQ ID NO: 1513770 - RNA, 11 nt, Human
gaaaugagcug

SEQ ID NO: 1513771 - RNA, 18 nt, Human
gaaaugaggucagagccu

SEQ ID NO: 1513772 - RNA, 16 nt, Human
gaaaugggcagagcag

SEQ ID NO: 1513773 - RNA, 15 nt, Human
gaaaugggcagagca

SEQ ID NO: 1513774 - RNA, 20 nt, Human
gaaauuuccuaauuuauucu

SEQ ID NO: 1513775 - RNA, 19 nt, Human
gaaauuacuaauuuuacuu

SEQ ID NO: 1513776 - RNA, 17 nt, Human
gaaauuauauaaguauu

SEQ ID NO: 1513777 - RNA, 23 nt, Human
gaaauuauauaaguauucuaaau

SEQ ID NO: 1513778 - RNA, 21 nt, Human
gaaauuuccugggagcuuuug

SEQ ID NO: 1513779 - RNA, 15 nt, Human
gaacacuccuucaca

SEQ ID NO: 1513780 - RNA, 16 nt, Human
gaacacuccuucacag

SEQ ID NO: 1513781 - RNA, 17 nt, Human
gaacacuccuucacaga

SEQ ID NO: 1513782 - RNA, 20 nt, Human
gaacagacuggaagcacagc

SEQ ID NO: 1513783 - RNA, 22 nt, Human
gaacaguuguguuugaagcaca

SEQ ID NO: 1513784 - RNA, 24 nt, Human
gaacaguuaccucugccucagaaa

SEQ ID NO: 1513785 - RNA, 20 nt, Human
gaacaguuguguuugaagca

SEQ ID NO: 1513786 - RNA, 17 nt, Human
gaacaggauauucucac

SEQ ID NO: 1513787 - RNA, 18 nt, Human
gaacagauaaucagugug

SEQ ID NO: 1513788 - RNA, 22 nt, Human
gaacagacuggaagcacagcuu

SEQ ID NO: 1513789 - RNA, 11 nt, Human
gaaaggaaaga

SEQ ID NO: 1513790 - RNA, 16 nt, Human
gaaaggaaagaggcuc

SEQ ID NO: 1513791 - RNA, 23 nt, Human
gaaaguuauugauaaguucauac

SEQ ID NO: 1513792 - RNA, 13 nt, Human
gaaacugccagca

SEQ ID NO: 1513793 - RNA, 15 nt, Human
gaaacugccagcaac

SEQ ID NO: 1513794 - RNA, 16 nt, Human
gaaaaaugagccuggc

SEQ ID NO: 1513795 - RNA, 19 nt, Human
gaaagacuauucaaacagu

SEQ ID NO: 1513796 - RNA, 22 nt, Human
gaaagacuauucaaacagucuc

SEQ ID NO: 1513797 - RNA, 23 nt, Human
gaaagacuauucaaacagucuca

SEQ ID NO: 1513798 - RNA, 17 nt, Human
gaaagacuguacaaagu

SEQ ID NO: 1513799 - RNA, 16 nt, Human
gaaagaucaaaagguu

SEQ ID NO: 1513800 - RNA, 13 nt, Human
gaaagcagaacag

SEQ ID NO: 1513801 - RNA, 14 nt, Human
gaaagcagaacagu

SEQ ID NO: 1513802 - RNA, 16 nt, Human
cuuuggaacaagaugg

SEQ ID NO: 1513803 - RNA, 22 nt, Human
cuuuucauuuaggugaggaagc

SEQ ID NO: 1513804 - RNA, 13 nt, Human
cuuuuccaacccu

SEQ ID NO: 1513805 - RNA, 23 nt, Human
cuuuuccaacccucaucaccaac

SEQ ID NO: 1513806 - RNA, 20 nt, Human
cuuuucgcaggauucuuccu

SEQ ID NO: 1513807 - RNA, 21 nt, Human
cuuuucgcaggauucuuccuc

SEQ ID NO: 1513808 - RNA, 15 nt, Human
cuuuuuucacuacau

SEQ ID NO: 1513809 - RNA, 11 nt, Human
gaaaaagaaaa

SEQ ID NO: 1513810 - RNA, 16 nt, Human
gaaaaagaaaaaauau

SEQ ID NO: 1513811 - RNA, 18 nt, Human
cuuuuuuauacauaaaca

SEQ ID NO: 1513812 - RNA, 15 nt, Human
cuuuuuuauacauaa

SEQ ID NO: 1513813 - RNA, 17 nt, Human
cuuuuuuauacauaaac

SEQ ID NO: 1513814 - RNA, 16 nt, Human
cuuuuuuauacauaaa

SEQ ID NO: 1513815 - RNA, 22 nt, Human
cuuuuuaauauugauaugcuua

SEQ ID NO: 1513816 - RNA, 13 nt, Human
cuuuucuuuucuu

SEQ ID NO: 1513817 - RNA, 17 nt, Human
cuuuucuuucagccaag

SEQ ID NO: 1513818 - RNA, 17 nt, Human
cuuuccugaggcugggc

SEQ ID NO: 1513819 - RNA, 16 nt, Human
cuuuccugaggcuggg

SEQ ID NO: 1513820 - RNA, 20 nt, Human
cuuuccugaggcugggcucc

SEQ ID NO: 1513821 - RNA, 21 nt, Human
cuuuccugaggcugggcuccc

SEQ ID NO: 1513822 - RNA, 16 nt, Human
cuuugcagacaggcaa

SEQ ID NO: 1513823 - RNA, 19 nt, Human
cuuuggaaagaguaggaag

SEQ ID NO: 1513824 - RNA, 23 nt, Human
cuuuggaaagaguaggaagacuu

SEQ ID NO: 1513825 - RNA, 14 nt, Human
cuuugcagacaggc

SEQ ID NO: 1513826 - RNA, 15 nt, Human
cuuugcagacaggca

SEQ ID NO: 1513827 - RNA, 20 nt, Human
cuuguguguuuauugucaaa

SEQ ID NO: 1513828 - RNA, 21 nt, Human
cuuguggacacagcucuucuc

SEQ ID NO: 1513829 - RNA, 15 nt, Human
cuuuccaggaaggcu

SEQ ID NO: 1513830 - RNA, 19 nt, Human
cuuuccucaaaacuucaga

SEQ ID NO: 1513831 - RNA, 22 nt, Human
cuuuccaaaguacacuguuuca

SEQ ID NO: 1513832 - RNA, 16 nt, Human
cuuuccaaaugcccag

SEQ ID NO: 1513833 - RNA, 16 nt, Human
cuuuccaaaguacacu

SEQ ID NO: 1513834 - RNA, 14 nt, Human
cuuuccaggaaggc

SEQ ID NO: 1513835 - RNA, 17 nt, Human
cuuguggacacagcucu

SEQ ID NO: 1513836 - RNA, 18 nt, Human
cuuguggacacagcucuu

SEQ ID NO: 1513837 - RNA, 18 nt, Human
cuuguaaaggaauuuaaa

SEQ ID NO: 1513838 - RNA, 20 nt, Human
cuuggggaccagagcugcca

SEQ ID NO: 1513839 - RNA, 14 nt, Human
cuuggcugcaggga

SEQ ID NO: 1513840 - RNA, 17 nt, Human
cuuggggaccagagcug

SEQ ID NO: 1513841 - RNA, 18 nt, Human
cuuggggaccagagcugc

SEQ ID NO: 1513842 - RNA, 19 nt, Human
cuuggggaccagagcugcc

SEQ ID NO: 1513843 - RNA, 17 nt, Human
cuugccaaauauaaaua

SEQ ID NO: 1513844 - RNA, 14 nt, Human
cuugcauugcagag

SEQ ID NO: 1513845 - RNA, 13 nt, Human
cuugcuugcuuuu

SEQ ID NO: 1513846 - RNA, 23 nt, Human
cuuggcucaaguccucuuuucug

SEQ ID NO: 1513847 - RNA, 13 nt, Human
cuuggauuguccc

SEQ ID NO: 1513848 - RNA, 14 nt, Human
cuuggauugucccc

SEQ ID NO: 1513849 - RNA, 12 nt, Human
cuuggcugcagg

SEQ ID NO: 1513850 - RNA, 13 nt, Human
cuuggcugcaggg

SEQ ID NO: 1513851 - RNA, 13 nt, Human
cuucuuuccacag

SEQ ID NO: 1513852 - RNA, 19 nt, Human
cuucuuuccacagaagcuc

SEQ ID NO: 1513853 - RNA, 19 nt, Human
cuugaaauauaggaacuua

SEQ ID NO: 1513854 - RNA, 19 nt, Human
cuugaacuccuggccucaa

SEQ ID NO: 1513855 - RNA, 16 nt, Human
cuugaacuggguacuu

SEQ ID NO: 1513856 - RNA, 15 nt, Human
cuugaacuuugaccu

SEQ ID NO: 1513857 - RNA, 18 nt, Human
cuugaacuggguacuugu

SEQ ID NO: 1513858 - RNA, 20 nt, Human
cuugaacuggguacuugugg

SEQ ID NO: 1513859 - RNA, 19 nt, Human
cuugaacccgggaggcaga

SEQ ID NO: 1513860 - RNA, 20 nt, Human
cuugaacccgggaggcagag

SEQ ID NO: 1513861 - RNA, 14 nt, Human
cuugaacuccuggc

SEQ ID NO: 1513862 - RNA, 15 nt, Human
cuugaacuccuggcc

SEQ ID NO: 1513863 - RNA, 17 nt, Human
cuugaacuccuggccuc

SEQ ID NO: 1513864 - RNA, 18 nt, Human
cuugaacuccuggccuca

SEQ ID NO: 1513865 - RNA, 13 nt, Human
cuugagcucagga

SEQ ID NO: 1513866 - RNA, 22 nt, Human
cuugagccuugaacuuugaccu

SEQ ID NO: 1513867 - RNA, 20 nt, Human
cuugagccuugaacuuugac

SEQ ID NO: 1513868 - RNA, 19 nt, Human
cuugagccuugaacuuuga

SEQ ID NO: 1513869 - RNA, 17 nt, Human
cuugaccauucuccacc

SEQ ID NO: 1513870 - RNA, 20 nt, Human
cuugaccauucuccaccugc

SEQ ID NO: 1513871 - RNA, 14 nt, Human
cuugagagggugga

SEQ ID NO: 1513872 - RNA, 21 nt, Human
cuugaccauucuccaccugcc

SEQ ID NO: 1513873 - RNA, 21 nt, Human
cuugcaugguuuagaaagcuu

SEQ ID NO: 1513874 - RNA, 21 nt, Human
cuugcaugaggcuaguguggu

SEQ ID NO: 1513875 - RNA, 23 nt, Human
cuugcaucaauuuuucuuauuuc

SEQ ID NO: 1513876 - RNA, 20 nt, Human
cuugcagacucuacagaggc

SEQ ID NO: 1513877 - RNA, 18 nt, Human
cuugcagacucuacagag

SEQ ID NO: 1513878 - RNA, 22 nt, Human
cuugcaaaguaucccuacugua

SEQ ID NO: 1513879 - RNA, 18 nt, Human
cuugaguugauucagcuc

SEQ ID NO: 1513880 - RNA, 14 nt, Human
cuugcaauggcagc

SEQ ID NO: 1513881 - RNA, 15 nt, Human
cuguaugauucccag

SEQ ID NO: 1513882 - RNA, 18 nt, Human
cuguaucccaugagccuc

SEQ ID NO: 1513883 - RNA, 19 nt, Human
cuguaucccaugagccuca

SEQ ID NO: 1513884 - RNA, 22 nt, Human
cuguaccucuugagccuugaac

SEQ ID NO: 1513885 - RNA, 15 nt, Human
cuguaucccaugagc

SEQ ID NO: 1513886 - RNA, 13 nt, Human
cuguauuuuaaaa

SEQ ID NO: 1513887 - RNA, 16 nt, Human
cuguauuuuaaaagaa

SEQ ID NO: 1513888 - RNA, 19 nt, Human
cuguauuuuaaaagaauga

SEQ ID NO: 1513889 - RNA, 22 nt, Human
cugucccagugccgagaaggaa

SEQ ID NO: 1513890 - RNA, 18 nt, Human
cugucucuacuaaaaaua

SEQ ID NO: 1513891 - RNA, 14 nt, Human
cuguccgagcuuug

SEQ ID NO: 1513892 - RNA, 21 nt, Human
cuguccuacucugugucaggu

SEQ ID NO: 1513893 - RNA, 22 nt, Human
cugucucaaaaaaagaaaaaga

SEQ ID NO: 1513894 - RNA, 13 nt, Human
cugucccccugac

SEQ ID NO: 1513895 - RNA, 14 nt, Human
cugucccccugaca

SEQ ID NO: 1513896 - RNA, 17 nt, Human
cuguccccgcacugggc

SEQ ID NO: 1513897 - RNA, 16 nt, Human
cuguccuacucugugu

SEQ ID NO: 1513898 - RNA, 17 nt, Human
cuguccuacucuguguc

SEQ ID NO: 1513899 - RNA, 18 nt, Human
cuguccuacucuguguca

SEQ ID NO: 1513900 - RNA, 20 nt, Human
cuguccuacucugugucagg

SEQ ID NO: 1513901 - RNA, 15 nt, Human
cuggguuggagggug

SEQ ID NO: 1513902 - RNA, 20 nt, Human
cugggcucccuucccaccuc

SEQ ID NO: 1513903 - RNA, 21 nt, Human
cugggcucccuucccaccucu

SEQ ID NO: 1513904 - RNA, 22 nt, Human
cugggcucccuucccaccucuc

SEQ ID NO: 1513905 - RNA, 19 nt, Human
cuggguacuuguggacaca

SEQ ID NO: 1513906 - RNA, 18 nt, Human
cuggguacuuguggacac

SEQ ID NO: 1513907 - RNA, 16 nt, Human
cuggguacuuguggac

SEQ ID NO: 1513908 - RNA, 13 nt, Human
cuggucccacuca

SEQ ID NO: 1513909 - RNA, 14 nt, Human
cuggucccacgagg

SEQ ID NO: 1513910 - RNA, 14 nt, Human
cuggucccacucag

SEQ ID NO: 1513911 - RNA, 17 nt, Human
cuggucccacgagggug

SEQ ID NO: 1513912 - RNA, 19 nt, Human
cuggucccacgagggugcc

SEQ ID NO: 1513913 - RNA, 23 nt, Human
cuggucucaaacucuugaccuca

SEQ ID NO: 1513914 - RNA, 16 nt, Human
cugguuccauggccuc

SEQ ID NO: 1513915 - RNA, 20 nt, Human
cugguucaggguuggccccu

SEQ ID NO: 1513916 - RNA, 12 nt, Human
cugguggcagcu

SEQ ID NO: 1513917 - RNA, 16 nt, Human
cugguggcagcucacc

SEQ ID NO: 1513918 - RNA, 13 nt, Human
cugguggcagcuc

SEQ ID NO: 1513919 - RNA, 14 nt, Human
cugguggcagcuca

SEQ ID NO: 1513920 - RNA, 17 nt, Human
cuguaauuugugauaca

SEQ ID NO: 1513921 - RNA, 18 nt, Human
cuguaauuugugauacaa

SEQ ID NO: 1513922 - RNA, 22 nt, Human
cuguaauuugugauacaaugcu

SEQ ID NO: 1513923 - RNA, 21 nt, Human
cuguaauuugugauacaaugc

SEQ ID NO: 1513924 - RNA, 23 nt, Human
cuguacagagcccacgcccccac

SEQ ID NO: 1513925 - RNA, 23 nt, Human
cuguacaugaaaacacauuuuuc

SEQ ID NO: 1513926 - RNA, 22 nt, Human
cuguacaugaaaacacauuuuu

SEQ ID NO: 1513927 - RNA, 21 nt, Human
cuguaccucuugagccuugaa

SEQ ID NO: 1513928 - RNA, 19 nt, Human
cugggaggucaaggcugca

SEQ ID NO: 1513929 - RNA, 21 nt, Human
cugggaggucaaggcugcagu

SEQ ID NO: 1513930 - RNA, 12 nt, Human
cugggagugagc

SEQ ID NO: 1513931 - RNA, 20 nt, Human
cugggaucccucauccucau

SEQ ID NO: 1513932 - RNA, 18 nt, Human
cugggaugauuggagggg

SEQ ID NO: 1513933 - RNA, 20 nt, Human
cugggauuacaggugugaac

SEQ ID NO: 1513934 - RNA, 17 nt, Human
cugggauuacaggugug

SEQ ID NO: 1513935 - RNA, 16 nt, Human
cuggcuguuggcuggg

SEQ ID NO: 1513936 - RNA, 17 nt, Human
cuggcuguuggcugggg

SEQ ID NO: 1513937 - RNA, 20 nt, Human
cuggcugguuagagguuccc

SEQ ID NO: 1513938 - RNA, 18 nt, Human
cuggcuguuggcuggggg

SEQ ID NO: 1513939 - RNA, 17 nt, Human
cugggagagccuuccag

SEQ ID NO: 1513940 - RNA, 18 nt, Human
cugggagagccuuccagg

SEQ ID NO: 1513941 - RNA, 21 nt, Human
cugggagagccuuccaggggu

SEQ ID NO: 1513942 - RNA, 19 nt, Human
cugggagagccuuccaggg

SEQ ID NO: 1513943 - RNA, 20 nt, Human
cugggagagccuuccagggg

SEQ ID NO: 1513944 - RNA, 18 nt, Human
cuggaauauauaaccagu

SEQ ID NO: 1513945 - RNA, 14 nt, Human
cuggcaagaaugug

SEQ ID NO: 1513946 - RNA, 14 nt, Human
cuggaaugcagugg

SEQ ID NO: 1513947 - RNA, 16 nt, Human
cuggcacccggccccu

SEQ ID NO: 1513948 - RNA, 17 nt, Human
cuggcacccggccccug

SEQ ID NO: 1513949 - RNA, 18 nt, Human
cuggcacccggccccugc

SEQ ID NO: 1513950 - RNA, 19 nt, Human
cuggcacccggccccugcu

SEQ ID NO: 1513951 - RNA, 24 nt, Human
cuggcaugggaaugaaugucagug

SEQ ID NO: 1513952 - RNA, 15 nt, Human
cuggcacuauaaugu

SEQ ID NO: 1513953 - RNA, 16 nt, Human
cuggcacuauaaugua

SEQ ID NO: 1513954 - RNA, 22 nt, Human
cuggcacuauaauguaagcucu

SEQ ID NO: 1513955 - RNA, 16 nt, Human
cuggcaugggaaugaa

SEQ ID NO: 1513956 - RNA, 18 nt, Human
cuggcaugggaaugaaug

SEQ ID NO: 1513957 - RNA, 19 nt, Human
cuggcaugggaaugaaugu

SEQ ID NO: 1513958 - RNA, 22 nt, Human
cuggcaugggaaugaaugucag

SEQ ID NO: 1513959 - RNA, 12 nt, Human
cuggccucugca

SEQ ID NO: 1513960 - RNA, 23 nt, Human
cuggccucaagugauucuccugc

SEQ ID NO: 1513961 - RNA, 14 nt, Human
cuggccuggccccu

SEQ ID NO: 1513962 - RNA, 18 nt, Human
cuggccugagcugggaug

SEQ ID NO: 1513963 - RNA, 13 nt, Human
cuggccucugcac

SEQ ID NO: 1513964 - RNA, 14 nt, Human
cuggccucugcacu

SEQ ID NO: 1513965 - RNA, 16 nt, Human
cuggccucugcacucc

SEQ ID NO: 1513966 - RNA, 16 nt, Human
cuggccugagcuggga

SEQ ID NO: 1513967 - RNA, 16 nt, Human
cuggccuucggccucc

SEQ ID NO: 1513968 - RNA, 17 nt, Human
cuggccuucggccucca

SEQ ID NO: 1513969 - RNA, 18 nt, Human
cuggccuucggccuccau

SEQ ID NO: 1513970 - RNA, 21 nt, Human
cuggccuucggccuccauccu

SEQ ID NO: 1513971 - RNA, 15 nt, Human
cuggccuucggccuc

SEQ ID NO: 1513972 - RNA, 19 nt, Human
cuggccuggccccucaggg

SEQ ID NO: 1513973 - RNA, 16 nt, Human
cuggccuggccccuca

SEQ ID NO: 1513974 - RNA, 17 nt, Human
cuggccuggccccucag

SEQ ID NO: 1513975 - RNA, 17 nt, Human
cugcaguugccagucac

SEQ ID NO: 1513976 - RNA, 13 nt, Human
cugcaguugccag

SEQ ID NO: 1513977 - RNA, 16 nt, Human
cugcaguugccaguca

SEQ ID NO: 1513978 - RNA, 17 nt, Human
cugcagcaauaaagcag

SEQ ID NO: 1513979 - RNA, 10 nt, Human
cugcagaggg

SEQ ID NO: 1513980 - RNA, 16 nt, Human
cugcagcaauaaagca

SEQ ID NO: 1513981 - RNA, 15 nt, Human
cugcagcaauaaagc

SEQ ID NO: 1513982 - RNA, 13 nt, Human
cugcagagggcac

SEQ ID NO: 1513983 - RNA, 12 nt, Human
cugcacugucaa

SEQ ID NO: 1513984 - RNA, 21 nt, Human
cugcacuccccugcugggugu

SEQ ID NO: 1513985 - RNA, 24 nt, Human
cugaggcccuucucuccagccccu

SEQ ID NO: 1513986 - RNA, 14 nt, Human
cugcaccggcuggc

SEQ ID NO: 1513987 - RNA, 22 nt, Human
cugaggcccuucucuccagccc

SEQ ID NO: 1513988 - RNA, 23 nt, Human
cugaggcccuucucuccagcccc

SEQ ID NO: 1513989 - RNA, 15 nt, Human
cugcaccggcuggcc

SEQ ID NO: 1513990 - RNA, 16 nt, Human
cugcaccggcuggccu

SEQ ID NO: 1513991 - RNA, 15 nt, Human
cugcaccgggccaca

SEQ ID NO: 1513992 - RNA, 20 nt, Human
cugcacuccagccuggguga

SEQ ID NO: 1513993 - RNA, 18 nt, Human
cugcaccgggccacagag

SEQ ID NO: 1513994 - RNA, 20 nt, Human
cugcaccgggccacagagaa

SEQ ID NO: 1513995 - RNA, 14 nt, Human
cugcacuccccugc

SEQ ID NO: 1513996 - RNA, 13 nt, Human
cugcacuccccug

SEQ ID NO: 1513997 - RNA, 19 nt, Human
cugcacuccccugcugggu

SEQ ID NO: 1513998 - RNA, 20 nt, Human
cugcacuccccugcugggug

SEQ ID NO: 1513999 - RNA, 22 nt, Human
cugccaggaagccagcaggcuc

SEQ ID NO: 1514000 - RNA, 21 nt, Human
cugccauccagguucagcuug

SEQ ID NO: 1514001 - RNA, 15 nt, Human
cugccauccucccaa

SEQ ID NO: 1514002 - RNA, 15 nt, Human
cugccagcaacgcag

SEQ ID NO: 1514003 - RNA, 13 nt, Human
cugccaggaagcc

SEQ ID NO: 1514004 - RNA, 14 nt, Human
cugccaggaagcca

SEQ ID NO: 1514005 - RNA, 20 nt, Human
cugccaggaagccagcaggc

SEQ ID NO: 1514006 - RNA, 21 nt, Human
cugccaggaagccagcaggcu

SEQ ID NO: 1514007 - RNA, 15 nt, Human
cugcauaugaaagga

SEQ ID NO: 1514008 - RNA, 20 nt, Human
cugcaucaagaugugacaug

SEQ ID NO: 1514009 - RNA, 20 nt, Human
cugcaucagcugcugaaaca

SEQ ID NO: 1514010 - RNA, 21 nt, Human
cugccacccuggggagaaagu

SEQ ID NO: 1514011 - RNA, 12 nt, Human
cugccacccugg

SEQ ID NO: 1514012 - RNA, 14 nt, Human
cugccacccugggg

SEQ ID NO: 1514013 - RNA, 19 nt, Human
cugccccuggcagccccug

SEQ ID NO: 1514014 - RNA, 18 nt, Human
cugccccuggcagccccu

SEQ ID NO: 1514015 - RNA, 13 nt, Human
cugcccggcaggg

SEQ ID NO: 1514016 - RNA, 20 nt, Human
cugcccggcaggguccuaga

SEQ ID NO: 1514017 - RNA, 15 nt, Human
cugccauuucugaga

SEQ ID NO: 1514018 - RNA, 12 nt, Human
cugcccaccugg

SEQ ID NO: 1514019 - RNA, 13 nt, Human
cugcccaccuggc

SEQ ID NO: 1514020 - RNA, 14 nt, Human
cugcccaggccccu

SEQ ID NO: 1514021 - RNA, 15 nt, Human
cugcccaggccccug

SEQ ID NO: 1514022 - RNA, 16 nt, Human
cugcccaggccccugc

SEQ ID NO: 1514023 - RNA, 18 nt, Human
cugcccaggccccugcca

SEQ ID NO: 1514024 - RNA, 19 nt, Human
cugcccaggccccugccac

SEQ ID NO: 1514025 - RNA, 20 nt, Human
cugcccaggccccugccacc

SEQ ID NO: 1514026 - RNA, 15 nt, Human
cugcugcaguugcca

SEQ ID NO: 1514027 - RNA, 14 nt, Human
cugcugcaguugcc

SEQ ID NO: 1514028 - RNA, 10 nt, Human
cugcugcagu

SEQ ID NO: 1514029 - RNA, 13 nt, Human
cugcugcaguugc

SEQ ID NO: 1514030 - RNA, 12 nt, Human
cugcucugguua

SEQ ID NO: 1514031 - RNA, 20 nt, Human
cugcggugcuaucuccccca

SEQ ID NO: 1514032 - RNA, 21 nt, Human
cugcggugcuaucucccccag

SEQ ID NO: 1514033 - RNA, 22 nt, Human
cugcggugcuaucucccccagc

SEQ ID NO: 1514034 - RNA, 23 nt, Human
cugcggugcuaucucccccagcc

SEQ ID NO: 1514035 - RNA, 23 nt, Human
cugcuccucuccccagcaaguga

SEQ ID NO: 1514036 - RNA, 19 nt, Human
cugcuccucuccccagcaa

SEQ ID NO: 1514037 - RNA, 20 nt, Human
cugcuccucuccccagcaag

SEQ ID NO: 1514038 - RNA, 15 nt, Human
cugcucuccgaccag

SEQ ID NO: 1514039 - RNA, 19 nt, Human
cugcucuccgaccagacac

SEQ ID NO: 1514040 - RNA, 23 nt, Human
cugcgguccacccaggagccccg

SEQ ID NO: 1514041 - RNA, 18 nt, Human
cugcggugcuaucucccc

SEQ ID NO: 1514042 - RNA, 19 nt, Human
cugcggugcuaucuccccc

SEQ ID NO: 1514043 - RNA, 21 nt, Human
cugcccugcccaccuggccuc

SEQ ID NO: 1514044 - RNA, 18 nt, Human
cugccugaagucacacag

SEQ ID NO: 1514045 - RNA, 16 nt, Human
cugccugaagucacac

SEQ ID NO: 1514046 - RNA, 20 nt, Human
cugcccugcccaccuggccu

SEQ ID NO: 1514047 - RNA, 23 nt, Human
cugccugaagucacacagugagu

SEQ ID NO: 1514048 - RNA, 19 nt, Human
cugccugaagucacacagu

SEQ ID NO: 1514049 - RNA, 19 nt, Human
cugcuuuugucuaugggac

SEQ ID NO: 1514050 - RNA, 17 nt, Human
cugcuuuuggucugugu

SEQ ID NO: 1514051 - RNA, 15 nt, Human
cugcuuuuggucugu

SEQ ID NO: 1514052 - RNA, 19 nt, Human
cugcuugggcuucauccuc

SEQ ID NO: 1514053 - RNA, 19 nt, Human
cugcuugugaaaggaaaga

SEQ ID NO: 1514054 - RNA, 13 nt, Human
cugcuugggcuuc

SEQ ID NO: 1514055 - RNA, 15 nt, Human
cugcuugggcuucau

SEQ ID NO: 1514056 - RNA, 17 nt, Human
cugcuugggcuucaucc

SEQ ID NO: 1514057 - RNA, 18 nt, Human
cugcuugggcuucauccu

SEQ ID NO: 1514058 - RNA, 22 nt, Human
cugcuugaggcaacucaucuua

SEQ ID NO: 1514059 - RNA, 20 nt, Human
cugcuugcuugcuuuuuaau

SEQ ID NO: 1514060 - RNA, 13 nt, Human
cugcuugaggcaa

SEQ ID NO: 1514061 - RNA, 20 nt, Human
cugcuugaggcaacucaucu

SEQ ID NO: 1514062 - RNA, 21 nt, Human
cugcuugaggcaacucaucuu

SEQ ID NO: 1514063 - RNA, 12 nt, Human
cugcugcuggcu

SEQ ID NO: 1514064 - RNA, 13 nt, Human
cugcugcuggcug

SEQ ID NO: 1514065 - RNA, 14 nt, Human
cugcugcuggcugg

SEQ ID NO: 1514066 - RNA, 14 nt, Human
cugcuggguguggc

SEQ ID NO: 1514067 - RNA, 15 nt, Human
cugcuggguguggcg

SEQ ID NO: 1514068 - RNA, 17 nt, Human
cugcuggguguggcgca

SEQ ID NO: 1514069 - RNA, 18 nt, Human
cucuuuaaugucacaggc

SEQ ID NO: 1514070 - RNA, 13 nt, Human
cucuugguccugc

SEQ ID NO: 1514071 - RNA, 15 nt, Human
cucuugguccugcug

SEQ ID NO: 1514072 - RNA, 16 nt, Human
cucuugguccugcugc

SEQ ID NO: 1514073 - RNA, 17 nt, Human
cucuugguccugcugca

SEQ ID NO: 1514074 - RNA, 17 nt, Human
cucuuucccucccuucc

SEQ ID NO: 1514075 - RNA, 20 nt, Human
cucuuuaaugucacaggcag

SEQ ID NO: 1514076 - RNA, 21 nt, Human
cucuuuaaugucacaggcagg

SEQ ID NO: 1514077 - RNA, 22 nt, Human
cucuuuaaugucacaggcaggu

SEQ ID NO: 1514078 - RNA, 23 nt, Human
cucuuuaaugucacaggcagguc

SEQ ID NO: 1514079 - RNA, 21 nt, Human
cucuuggguucaagcgauucu

SEQ ID NO: 1514080 - RNA, 19 nt, Human
cucuuggguucaagcgauu

SEQ ID NO: 1514081 - RNA, 22 nt, Human
cucuugaaauauaggaacuuaa

SEQ ID NO: 1514082 - RNA, 22 nt, Human
cucuucuuuaaagggauggcaa

SEQ ID NO: 1514083 - RNA, 21 nt, Human
cugaaauaaacgucuuaaaua

SEQ ID NO: 1514084 - RNA, 23 nt, Human
cugaaagcccugagcuuucugcu

SEQ ID NO: 1514085 - RNA, 16 nt, Human
cugaaagcccugagcu

SEQ ID NO: 1514086 - RNA, 17 nt, Human
cugaaagcccugagcuu

SEQ ID NO: 1514087 - RNA, 18 nt, Human
cugaaagcccugagcuuu

SEQ ID NO: 1514088 - RNA, 19 nt, Human
cugaaagcccugagcuuuc

SEQ ID NO: 1514089 - RNA, 17 nt, Human
cucuuucuauuguuucu

SEQ ID NO: 1514090 - RNA, 15 nt, Human
cugaaagcccugagc

SEQ ID NO: 1514091 - RNA, 13 nt, Human
cugaaauuuccug

SEQ ID NO: 1514092 - RNA, 23 nt, Human
cugaaauuuccugggagcuuuug

SEQ ID NO: 1514093 - RNA, 16 nt, Human
cugaaauuuccuggga

SEQ ID NO: 1514094 - RNA, 23 nt, Human
cugaagaagcaccaaucaugaau

SEQ ID NO: 1514095 - RNA, 19 nt, Human
cugaagaauugaaaaacca

SEQ ID NO: 1514096 - RNA, 13 nt, Human
cucugugagacuc

SEQ ID NO: 1514097 - RNA, 17 nt, Human
cucugugagacucgaga

SEQ ID NO: 1514098 - RNA, 18 nt, Human
cucugugagacucgagaa

SEQ ID NO: 1514099 - RNA, 19 nt, Human
cucugugucagguggggca

SEQ ID NO: 1514100 - RNA, 15 nt, Human
cucugugucaggugg

SEQ ID NO: 1514101 - RNA, 13 nt, Human
cucuuagaaaaac

SEQ ID NO: 1514102 - RNA, 15 nt, Human
cucuuagaaaaacca

SEQ ID NO: 1514103 - RNA, 13 nt, Human
cucuuccaggcug

SEQ ID NO: 1514104 - RNA, 14 nt, Human
cucuuccaggcugg

SEQ ID NO: 1514105 - RNA, 15 nt, Human
cucuuccaggcuggg

SEQ ID NO: 1514106 - RNA, 12 nt, Human
cucuggccuucg

SEQ ID NO: 1514107 - RNA, 15 nt, Human
cucuggcagcucaga

SEQ ID NO: 1514108 - RNA, 16 nt, Human
cucuggcagcucagag

SEQ ID NO: 1514109 - RNA, 19 nt, Human
cucuggccuucggccucca

SEQ ID NO: 1514110 - RNA, 16 nt, Human
cucuggacaggcaugu

SEQ ID NO: 1514111 - RNA, 22 nt, Human
cucuggacaggcauguucucug

SEQ ID NO: 1514112 - RNA, 12 nt, Human
cucuggcagcuc

SEQ ID NO: 1514113 - RNA, 14 nt, Human
cucuggcagcucag

SEQ ID NO: 1514114 - RNA, 13 nt, Human
cucucuccucccu

SEQ ID NO: 1514115 - RNA, 21 nt, Human
cucugccugaagucacacagu

SEQ ID NO: 1514116 - RNA, 22 nt, Human
cucugccugaagucacacagug

SEQ ID NO: 1514117 - RNA, 15 nt, Human
cucuggacaggcaug

SEQ ID NO: 1514118 - RNA, 12 nt, Human
cugaggcccaga

SEQ ID NO: 1514119 - RNA, 13 nt, Human
cugaggcccagag

SEQ ID NO: 1514120 - RNA, 14 nt, Human
cugaggcccagagg

SEQ ID NO: 1514121 - RNA, 15 nt, Human
cugaggcccagaggg

SEQ ID NO: 1514122 - RNA, 16 nt, Human
cugaggcccagagggc

SEQ ID NO: 1514123 - RNA, 17 nt, Human
cugaggcccagagggcc

SEQ ID NO: 1514124 - RNA, 18 nt, Human
cugaggcccagagggccu

SEQ ID NO: 1514125 - RNA, 19 nt, Human
cugaggcccagagggccug

SEQ ID NO: 1514126 - RNA, 21 nt, Human
cugaggcccagagggccugca

SEQ ID NO: 1514127 - RNA, 23 nt, Human
cugaggcccagagggccugcaag

SEQ ID NO: 1514128 - RNA, 14 nt, Human
cugaggcccuucuc

SEQ ID NO: 1514129 - RNA, 15 nt, Human
cugaggcccuucucu

SEQ ID NO: 1514130 - RNA, 18 nt, Human
cugaggcccuucucucca

SEQ ID NO: 1514131 - RNA, 19 nt, Human
cugaggcccuucucuccag

SEQ ID NO: 1514132 - RNA, 20 nt, Human
cugaggcccuucucuccagc

SEQ ID NO: 1514133 - RNA, 14 nt, Human
cugagcgcuccugc

SEQ ID NO: 1514134 - RNA, 12 nt, Human
cugagccugguc

SEQ ID NO: 1514135 - RNA, 16 nt, Human
cugagcgacagugaga

SEQ ID NO: 1514136 - RNA, 20 nt, Human
cugagcgacagugagacucu

SEQ ID NO: 1514137 - RNA, 19 nt, Human
cugagacagcccgggcucu

SEQ ID NO: 1514138 - RNA, 16 nt, Human
cugagacagcccgggc

SEQ ID NO: 1514139 - RNA, 17 nt, Human
cugagacagcccgggcu

SEQ ID NO: 1514140 - RNA, 18 nt, Human
cugagacagcccgggcuc

SEQ ID NO: 1514141 - RNA, 17 nt, Human
cugagccagauuucacu

SEQ ID NO: 1514142 - RNA, 18 nt, Human
cugagccagauuucacuc

SEQ ID NO: 1514143 - RNA, 19 nt, Human
cugagccagauuucacucu

SEQ ID NO: 1514144 - RNA, 20 nt, Human
cugagccagauuucacucuc

SEQ ID NO: 1514145 - RNA, 21 nt, Human
cugagccagauuucacucucc

SEQ ID NO: 1514146 - RNA, 23 nt, Human
cugagaaagacuauucaaacagu

SEQ ID NO: 1514147 - RNA, 17 nt, Human
cugagaauguaagaacu

SEQ ID NO: 1514148 - RNA, 19 nt, Human
cugagaauguaagaacuac

SEQ ID NO: 1514149 - RNA, 14 nt, Human
cugagacagcccgg

SEQ ID NO: 1514150 - RNA, 15 nt, Human
cugagacagcccggg

SEQ ID NO: 1514151 - RNA, 17 nt, Human
cugacucuuaagaagac

SEQ ID NO: 1514152 - RNA, 16 nt, Human
cugacuguuuucucuu

SEQ ID NO: 1514153 - RNA, 15 nt, Human
cugacuaugacauaa

SEQ ID NO: 1514154 - RNA, 16 nt, Human
cugacuucuaaguaaa

SEQ ID NO: 1514155 - RNA, 18 nt, Human
cugacuguuuucucuuga

SEQ ID NO: 1514156 - RNA, 13 nt, Human
cugacuucuaagu

SEQ ID NO: 1514157 - RNA, 15 nt, Human
cugacuucuaaguaa

SEQ ID NO: 1514158 - RNA, 16 nt, Human
cugacccaugcugccc

SEQ ID NO: 1514159 - RNA, 14 nt, Human
cugacccaugcugc

SEQ ID NO: 1514160 - RNA, 15 nt, Human
cugacccaugcugcc

SEQ ID NO: 1514161 - RNA, 13 nt, Human
cugacccacugcu

SEQ ID NO: 1514162 - RNA, 14 nt, Human
cugacccacugcuu

SEQ ID NO: 1514163 - RNA, 22 nt, Human
cugacauuguuggccaaagcca

SEQ ID NO: 1514164 - RNA, 17 nt, Human
cugacagggccagugca

SEQ ID NO: 1514165 - RNA, 12 nt, Human
cugacagggcca

SEQ ID NO: 1514166 - RNA, 11 nt, Human
cugacagauuu

SEQ ID NO: 1514167 - RNA, 15 nt, Human
cugacagauuuccau

SEQ ID NO: 1514168 - RNA, 19 nt, Human
cugaagacucauucuucug

SEQ ID NO: 1514169 - RNA, 14 nt, Human
cucucucacuccuu

SEQ ID NO: 1514170 - RNA, 12 nt, Human
cucucucacucc

SEQ ID NO: 1514171 - RNA, 16 nt, Human
cucuccuuccuggagc

SEQ ID NO: 1514172 - RNA, 19 nt, Human
cucuccagccccuggaugc

SEQ ID NO: 1514173 - RNA, 14 nt, Human
cucuccccagcaag

SEQ ID NO: 1514174 - RNA, 22 nt, Human
cucuccccagcaagugagagcu

SEQ ID NO: 1514175 - RNA, 12 nt, Human
cucuccucugcu

SEQ ID NO: 1514176 - RNA, 24 nt, Human
cucuccccagcaagugagagcugg

SEQ ID NO: 1514177 - RNA, 21 nt, Human
cucuccugauagucuuucagu

SEQ ID NO: 1514178 - RNA, 13 nt, Human
cucuccucugcug

SEQ ID NO: 1514179 - RNA, 14 nt, Human
cucuccucugcugc

SEQ ID NO: 1514180 - RNA, 15 nt, Human
cucuccucugcugcu

SEQ ID NO: 1514181 - RNA, 18 nt, Human
cucuccucugcugcuggc

SEQ ID NO: 1514182 - RNA, 22 nt, Human
cucucaggccagcugcuugggc

SEQ ID NO: 1514183 - RNA, 17 nt, Human
cucucaggccagcugcu

SEQ ID NO: 1514184 - RNA, 18 nt, Human
cucucaggccagcugcuu

SEQ ID NO: 1514185 - RNA, 19 nt, Human
cucucaggccagcugcuug

SEQ ID NO: 1514186 - RNA, 21 nt, Human
cucucaggccagcugcuuggg

SEQ ID NO: 1514187 - RNA, 14 nt, Human
cucuccagccccug

SEQ ID NO: 1514188 - RNA, 15 nt, Human
cucuccagccccugg

SEQ ID NO: 1514189 - RNA, 16 nt, Human
cucuccagccccugga

SEQ ID NO: 1514190 - RNA, 17 nt, Human
cucuccagccccuggau

SEQ ID NO: 1514191 - RNA, 18 nt, Human
cucuccagccccuggaug

SEQ ID NO: 1514192 - RNA, 12 nt, Human
cucucaggccaa

SEQ ID NO: 1514193 - RNA, 20 nt, Human
cucucaggccaaacucaccu

SEQ ID NO: 1514194 - RNA, 21 nt, Human
cucucaggccaaacucaccug

SEQ ID NO: 1514195 - RNA, 22 nt, Human
cucucaggccaaacucaccugc

SEQ ID NO: 1514196 - RNA, 23 nt, Human
cucucaggccaaacucaccugcc

SEQ ID NO: 1514197 - RNA, 13 nt, Human
cucucaggccagc

SEQ ID NO: 1514198 - RNA, 15 nt, Human
cucucaggccagcug

SEQ ID NO: 1514199 - RNA, 15 nt, Human
cucuaguuugauuaa

SEQ ID NO: 1514200 - RNA, 20 nt, Human
cucuaguuugauuaaauucu

SEQ ID NO: 1514201 - RNA, 19 nt, Human
cucuaguuugauuaaauuc

SEQ ID NO: 1514202 - RNA, 21 nt, Human
cucuaguuugauuaaauucuu

SEQ ID NO: 1514203 - RNA, 15 nt, Human
cucuaggaaauauuu

SEQ ID NO: 1514204 - RNA, 17 nt, Human
cucuaggaaauauuuau

SEQ ID NO: 1514205 - RNA, 23 nt, Human
cucuagggaaaaaccagcgugug

SEQ ID NO: 1514206 - RNA, 20 nt, Human
cucuaccauccccuguagag

SEQ ID NO: 1514207 - RNA, 13 nt, Human
cucuacccuggca

SEQ ID NO: 1514208 - RNA, 13 nt, Human
cucuacaaaaagc

SEQ ID NO: 1514209 - RNA, 13 nt, Human
cucuacagaggcc

SEQ ID NO: 1514210 - RNA, 19 nt, Human
cucuacagaggccaugggc

SEQ ID NO: 1514211 - RNA, 14 nt, Human
cucuacagaggcca

SEQ ID NO: 1514212 - RNA, 16 nt, Human
cucuacagaggccaug

SEQ ID NO: 1514213 - RNA, 13 nt, Human
cuccuucaccuuu

SEQ ID NO: 1514214 - RNA, 19 nt, Human
cuccuucacagaugggugc

SEQ ID NO: 1514215 - RNA, 20 nt, Human
cuccugugugugcgccuaca

SEQ ID NO: 1514216 - RNA, 16 nt, Human
cuccuucacagauggg

SEQ ID NO: 1514217 - RNA, 17 nt, Human
cuccuucacagaugggu

SEQ ID NO: 1514218 - RNA, 16 nt, Human
cuccuccacucucccc

SEQ ID NO: 1514219 - RNA, 15 nt, Human
cuccgaccagacacc

SEQ ID NO: 1514220 - RNA, 14 nt, Human
cuccugccgcagag

SEQ ID NO: 1514221 - RNA, 16 nt, Human
cuccugccucagccuc

SEQ ID NO: 1514222 - RNA, 15 nt, Human
cuccugccucagccu

SEQ ID NO: 1514223 - RNA, 16 nt, Human
cuccugugugugcgcc

SEQ ID NO: 1514224 - RNA, 19 nt, Human
cuccugugugugcgccuac

SEQ ID NO: 1514225 - RNA, 11 nt, Human
cuccugcaggc

SEQ ID NO: 1514226 - RNA, 12 nt, Human
cuccugcaggca

SEQ ID NO: 1514227 - RNA, 17 nt, Human
cuccugcaggcagccag

SEQ ID NO: 1514228 - RNA, 18 nt, Human
cuccugcaggcagccagg

SEQ ID NO: 1514229 - RNA, 20 nt, Human
cuccugcaggcagccaggcc

SEQ ID NO: 1514230 - RNA, 13 nt, Human
cuccugccucagc

SEQ ID NO: 1514231 - RNA, 14 nt, Human
cuccugccucagcc

SEQ ID NO: 1514232 - RNA, 11 nt, Human
cuccugcccuu

SEQ ID NO: 1514233 - RNA, 17 nt, Human
cucccaaagugcuggga

SEQ ID NO: 1514234 - RNA, 13 nt, Human
cuccaugugggcu

SEQ ID NO: 1514235 - RNA, 18 nt, Human
cucacuauguugcccagg

SEQ ID NO: 1514236 - RNA, 11 nt, Human
cuccauccuga

SEQ ID NO: 1514237 - RNA, 16 nt, Human
cuccauccugaggcuc

SEQ ID NO: 1514238 - RNA, 18 nt, Human
cuccauccugaggcucca

SEQ ID NO: 1514239 - RNA, 20 nt, Human
cuccauccugaggcuccacu

SEQ ID NO: 1514240 - RNA, 22 nt, Human
cucccaacucaccccagcccca

SEQ ID NO: 1514241 - RNA, 18 nt, Human
cucccaaagugcugggau

SEQ ID NO: 1514242 - RNA, 14 nt, Human
cuccaugugggcua

SEQ ID NO: 1514243 - RNA, 17 nt, Human
cucccaacucaccccag

SEQ ID NO: 1514244 - RNA, 11 nt, Human
cucccaucugu

SEQ ID NO: 1514245 - RNA, 14 nt, Human
cucccaucugugaa

SEQ ID NO: 1514246 - RNA, 15 nt, Human
cucccaucugugaaa

SEQ ID NO: 1514247 - RNA, 18 nt, Human
cucccaucugugaaagga

SEQ ID NO: 1514248 - RNA, 23 nt, Human
cucccaucugugaaaggaaagag

SEQ ID NO: 1514249 - RNA, 19 nt, Human
cucccgaauagcugggacu

SEQ ID NO: 1514250 - RNA, 18 nt, Human
cucccgaguagcugggac

SEQ ID NO: 1514251 - RNA, 13 nt, Human
cuccccugcuggg

SEQ ID NO: 1514252 - RNA, 14 nt, Human
cuccccugcugggu

SEQ ID NO: 1514253 - RNA, 17 nt, Human
cucccgaauagcuggga

SEQ ID NO: 1514254 - RNA, 18 nt, Human
cucccgaauagcugggac

SEQ ID NO: 1514255 - RNA, 16 nt, Human
cucccgaguagcuggg

SEQ ID NO: 1514256 - RNA, 17 nt, Human
cucccgaguagcuggga

SEQ ID NO: 1514257 - RNA, 12 nt, Human
cuccccagcaag

SEQ ID NO: 1514258 - RNA, 20 nt, Human
cuccccagcaagugagagcu

SEQ ID NO: 1514259 - RNA, 21 nt, Human
cuccccagcaagugagagcug

SEQ ID NO: 1514260 - RNA, 12 nt, Human
cuccccugcugg

SEQ ID NO: 1514261 - RNA, 17 nt, Human
cuacagaggccaugggc

SEQ ID NO: 1514262 - RNA, 18 nt, Human
cuaccauccccuguagag

SEQ ID NO: 1514263 - RNA, 17 nt, Human
cuacccacccuccuuuc

SEQ ID NO: 1514264 - RNA, 22 nt, Human
cuacccacccuccuuucaccac

SEQ ID NO: 1514265 - RNA, 12 nt, Human
cuacccaggugc

SEQ ID NO: 1514266 - RNA, 15 nt, Human
cuacccgcagaguuc

SEQ ID NO: 1514267 - RNA, 20 nt, Human
cuacccagcgagcccuggug

SEQ ID NO: 1514268 - RNA, 15 nt, Human
cuacagaggccaugg

SEQ ID NO: 1514269 - RNA, 15 nt, Human
cuacacacugcaugu

SEQ ID NO: 1514270 - RNA, 13 nt, Human
cuacacacugcau

SEQ ID NO: 1514271 - RNA, 16 nt, Human
cuacaauuuaaagcaa

SEQ ID NO: 1514272 - RNA, 21 nt, Human
cuacacacugcauguuuguga

SEQ ID NO: 1514273 - RNA, 16 nt, Human
cuacacuccagugaga

SEQ ID NO: 1514274 - RNA, 17 nt, Human
cuacacuccagugagac

SEQ ID NO: 1514275 - RNA, 19 nt, Human
cuaauguaauaacugugaa

SEQ ID NO: 1514276 - RNA, 14 nt, Human
cuaauguacugcau

SEQ ID NO: 1514277 - RNA, 16 nt, Human
cuaauguacugcauau

SEQ ID NO: 1514278 - RNA, 21 nt, Human
cuaauaaaauuuaaaagucuu

SEQ ID NO: 1514279 - RNA, 16 nt, Human
cuaaggugugcucuga

SEQ ID NO: 1514280 - RNA, 15 nt, Human
cuaagcaaaauguga

SEQ ID NO: 1514281 - RNA, 18 nt, Human
cuaagcaaaaugugauau

SEQ ID NO: 1514282 - RNA, 16 nt, Human
cuaaccagcagaaaug

SEQ ID NO: 1514283 - RNA, 17 nt, Human
cuaaccacgcuggaccu

SEQ ID NO: 1514284 - RNA, 17 nt, Human
cuaaccagcagaaaugc

SEQ ID NO: 1514285 - RNA, 14 nt, Human
cuaagcaaaaugug

SEQ ID NO: 1514286 - RNA, 15 nt, Human
cuaaggugugcucug

SEQ ID NO: 1514287 - RNA, 19 nt, Human
cuaagcuauucaguaauaa

SEQ ID NO: 1514288 - RNA, 21 nt, Human
cuaagcuauucaguaauaacu

SEQ ID NO: 1514289 - RNA, 15 nt, Human
cuacuugggaggcug

SEQ ID NO: 1514290 - RNA, 18 nt, Human
cuacuugggaggcugaga

SEQ ID NO: 1514291 - RNA, 19 nt, Human
cuacuugggaggcugagau

SEQ ID NO: 1514292 - RNA, 22 nt, Human
cuacuuauuguagcauccugga

SEQ ID NO: 1514293 - RNA, 16 nt, Human
cuacuguaauuuguga

SEQ ID NO: 1514294 - RNA, 17 nt, Human
cuacuguaauuugugau

SEQ ID NO: 1514295 - RNA, 14 nt, Human
cuacugaggugcua

SEQ ID NO: 1514296 - RNA, 16 nt, Human
cuacucugugucaggu

SEQ ID NO: 1514297 - RNA, 21 nt, Human
cuacucugugucagguggggc

SEQ ID NO: 1514298 - RNA, 14 nt, Human
cuacccgggaaggg

SEQ ID NO: 1514299 - RNA, 15 nt, Human
cuacccgggaagggg

SEQ ID NO: 1514300 - RNA, 20 nt, Human
cuacccgggaagggggcugg

SEQ ID NO: 1514301 - RNA, 21 nt, Human
cuacccgggaagggggcuggg

SEQ ID NO: 1514302 - RNA, 17 nt, Human
cuagcacuuugggaggc

SEQ ID NO: 1514303 - RNA, 17 nt, Human
cuagagugaacuugggc

SEQ ID NO: 1514304 - RNA, 21 nt, Human
cuagagugaacuugggccacu

SEQ ID NO: 1514305 - RNA, 15 nt, Human
cuagagguucaaaga

SEQ ID NO: 1514306 - RNA, 20 nt, Human
cuagacgagcaggcuucuuc

SEQ ID NO: 1514307 - RNA, 21 nt, Human
cuagacgagcaggcuucuucc

SEQ ID NO: 1514308 - RNA, 21 nt, Human
cuacuguaauuugugauacaa

SEQ ID NO: 1514309 - RNA, 22 nt, Human
cuaggacugaauuaugaaacuu

SEQ ID NO: 1514310 - RNA, 22 nt, Human
cuaggaccccuccaugugggcu

SEQ ID NO: 1514311 - RNA, 17 nt, Human
cuaggaggucucuaaga

SEQ ID NO: 1514312 - RNA, 21 nt, Human
cuaggaagacuuuggaaagag

SEQ ID NO: 1514313 - RNA, 13 nt, Human
cuaggaacacucc

SEQ ID NO: 1514314 - RNA, 15 nt, Human
cuaggaacacuccuu

SEQ ID NO: 1514315 - RNA, 12 nt, Human
cuagcagcaggg

SEQ ID NO: 1514316 - RNA, 22 nt, Human
cuaguauuucuaugaaauauua

SEQ ID NO: 1514317 - RNA, 19 nt, Human
cuaguauuucuaugaaaua

SEQ ID NO: 1514318 - RNA, 20 nt, Human
cuaguauuucuaugaaauau

SEQ ID NO: 1514319 - RNA, 16 nt, Human
cuaguaugaaauuaua

SEQ ID NO: 1514320 - RNA, 23 nt, Human
cuaguaucaaaagaaagaaaauc

SEQ ID NO: 1514321 - RNA, 15 nt, Human
cuaguaucaaaagaa

SEQ ID NO: 1514322 - RNA, 17 nt, Human
cuaguaucaaaagaaag

SEQ ID NO: 1514323 - RNA, 21 nt, Human
cuaggcauuugcugaauacag

SEQ ID NO: 1514324 - RNA, 19 nt, Human
cuagugugguguuuccugg

SEQ ID NO: 1514325 - RNA, 23 nt, Human
cuagugugguguuuccuggcacu

SEQ ID NO: 1514326 - RNA, 21 nt, Human
cuagugugguguuuccuggca

SEQ ID NO: 1514327 - RNA, 22 nt, Human
cuagugugguguuuccuggcac

SEQ ID NO: 1514328 - RNA, 13 nt, Human
cuaugaaauauua

SEQ ID NO: 1514329 - RNA, 18 nt, Human
cuaugaaauauuauguua

SEQ ID NO: 1514330 - RNA, 14 nt, Human
cuaugacacaugca

SEQ ID NO: 1514331 - RNA, 18 nt, Human
cuaugacauaaaaacaac

SEQ ID NO: 1514332 - RNA, 20 nt, Human
cuaucaaguauuauaccuuu

SEQ ID NO: 1514333 - RNA, 22 nt, Human
cuauauuuuuuguuaaaugauu

SEQ ID NO: 1514334 - RNA, 19 nt, Human
cuauauuguuugcuaagca

SEQ ID NO: 1514335 - RNA, 22 nt, Human
cuauauuguuuucaguguacau

SEQ ID NO: 1514336 - RNA, 20 nt, Human
cuauauuuuuuguuaaauga

SEQ ID NO: 1514337 - RNA, 23 nt, Human
cuauauuguuuucaguguacaug

SEQ ID NO: 1514338 - RNA, 14 nt, Human
cuaguuccaccauc

SEQ ID NO: 1514339 - RNA, 13 nt, Human
cucacauuuauau

SEQ ID NO: 1514340 - RNA, 19 nt, Human
cucaccagccccagugccc

SEQ ID NO: 1514341 - RNA, 20 nt, Human
cucaccagccccagugccca

SEQ ID NO: 1514342 - RNA, 21 nt, Human
cucaccagccccagugcccac

SEQ ID NO: 1514343 - RNA, 18 nt, Human
cucaagugauucuccugc

SEQ ID NO: 1514344 - RNA, 19 nt, Human
cucaagugauucuccugcc

SEQ ID NO: 1514345 - RNA, 20 nt, Human
cucaagugauucuccugccu

SEQ ID NO: 1514346 - RNA, 21 nt, Human
cucaagugauucuccugccuc

SEQ ID NO: 1514347 - RNA, 14 nt, Human
cucaccccagcccc

SEQ ID NO: 1514348 - RNA, 12 nt, Human
cucaccccagcc

SEQ ID NO: 1514349 - RNA, 13 nt, Human
cucaccccagccc

SEQ ID NO: 1514350 - RNA, 14 nt, Human
cucaccccugguuc

SEQ ID NO: 1514351 - RNA, 17 nt, Human
cucaccccugguucuca

SEQ ID NO: 1514352 - RNA, 16 nt, Human
cucacuauguugccca

SEQ ID NO: 1514353 - RNA, 17 nt, Human
cucacuauguugcccag

SEQ ID NO: 1514354 - RNA, 17 nt, Human
cucaccccuugccauaa

SEQ ID NO: 1514355 - RNA, 19 nt, Human
cucaccccugguucucauc

SEQ ID NO: 1514356 - RNA, 20 nt, Human
cucaccccugguucucaucu

SEQ ID NO: 1514357 - RNA, 21 nt, Human
cucaccccugguucucaucuu

SEQ ID NO: 1514358 - RNA, 23 nt, Human
cucaccccugguucucaucuuuc

SEQ ID NO: 1514359 - RNA, 14 nt, Human
cuaugcauuugaaa

SEQ ID NO: 1514360 - RNA, 18 nt, Human
cucaacuagcagauacag

SEQ ID NO: 1514361 - RNA, 13 nt, Human
cucaaauuucuaa

SEQ ID NO: 1514362 - RNA, 20 nt, Human
cucaacucuccuccagaguc

SEQ ID NO: 1514363 - RNA, 21 nt, Human
cucaacucuccuccagaguca

SEQ ID NO: 1514364 - RNA, 21 nt, Human
cuaugacauaaaaacaacuuu

SEQ ID NO: 1514365 - RNA, 12 nt, Human
cuaugcauuuga

SEQ ID NO: 1514366 - RNA, 11 nt, Human
cuaugcauuug

SEQ ID NO: 1514367 - RNA, 21 nt, Human
cuaugcauuugaaaauuuuga

SEQ ID NO: 1514368 - RNA, 15 nt, Human
cuaacauggaaguac

SEQ ID NO: 1514369 - RNA, 17 nt, Human
cuaacauggaaguacua

SEQ ID NO: 1514370 - RNA, 23 nt, Human
cuaaauuugaauguuaagcagau

SEQ ID NO: 1514371 - RNA, 16 nt, Human
cuaaauguugaaagau

SEQ ID NO: 1514372 - RNA, 16 nt, Human
cuaaauucaugcugcu

SEQ ID NO: 1514373 - RNA, 23 nt, Human
cuaaauugacacuuaaaaauggu

SEQ ID NO: 1514374 - RNA, 20 nt, Human
cuaaaucuccaaaauaaaac

SEQ ID NO: 1514375 - RNA, 15 nt, Human
cuaaauggaaccacu

SEQ ID NO: 1514376 - RNA, 17 nt, Human
cuaaauggaaccacucu

SEQ ID NO: 1514377 - RNA, 16 nt, Human
cuaaauggaaccacuc

SEQ ID NO: 1514378 - RNA, 18 nt, Human
cuaaauggaaccacucua

SEQ ID NO: 1514379 - RNA, 15 nt, Human
cgugccaccccgagg

SEQ ID NO: 1514380 - RNA, 22 nt, Human
cgugccaccccgagggcugagc

SEQ ID NO: 1514381 - RNA, 19 nt, Human
cgugccaccccgagggcug

SEQ ID NO: 1514382 - RNA, 16 nt, Human
cgucucauacucaccu

SEQ ID NO: 1514383 - RNA, 16 nt, Human
cgucuaccugaggggc

SEQ ID NO: 1514384 - RNA, 18 nt, Human
cggugcuaucucccccag

SEQ ID NO: 1514385 - RNA, 20 nt, Human
cggugcuaucucccccagcc

SEQ ID NO: 1514386 - RNA, 21 nt, Human
cggugcuaucucccccagccc

SEQ ID NO: 1514387 - RNA, 22 nt, Human
cggugcuaucucccccagcccc

SEQ ID NO: 1514388 - RNA, 16 nt, Human
cgugcacacaccagag

SEQ ID NO: 1514389 - RNA, 20 nt, Human
cgucugacaggcaaugcugg

SEQ ID NO: 1514390 - RNA, 21 nt, Human
cgucugacaggcaaugcuggc

SEQ ID NO: 1514391 - RNA, 22 nt, Human
cgucugacaggcaaugcuggcu

SEQ ID NO: 1514392 - RNA, 21 nt, Human
cgugcaguggugcgaucuggg

SEQ ID NO: 1514393 - RNA, 22 nt, Human
cgugcaguggugcgaucugggu

SEQ ID NO: 1514394 - RNA, 18 nt, Human
cgugcacacaccagagcc

SEQ ID NO: 1514395 - RNA, 19 nt, Human
cgugcacacaccagagccc

SEQ ID NO: 1514396 - RNA, 17 nt, Human
cggugagcuacaaaugc

SEQ ID NO: 1514397 - RNA, 20 nt, Human
cggugagaggggaacagacu

SEQ ID NO: 1514398 - RNA, 21 nt, Human
cggugagaggggaacagacug

SEQ ID NO: 1514399 - RNA, 13 nt, Human
cgguccuggugcc

SEQ ID NO: 1514400 - RNA, 13 nt, Human
cggucccagcucc

SEQ ID NO: 1514401 - RNA, 12 nt, Human
cggucccagcuc

SEQ ID NO: 1514402 - RNA, 22 nt, Human
cggucggguuuuauuguuuaaa

SEQ ID NO: 1514403 - RNA, 21 nt, Human
cggguuuuauuguuuaaaauc

SEQ ID NO: 1514404 - RNA, 14 nt, Human
cgguccacccagga

SEQ ID NO: 1514405 - RNA, 15 nt, Human
cgguccacccaggag

SEQ ID NO: 1514406 - RNA, 16 nt, Human
cgguccacccaggagc

SEQ ID NO: 1514407 - RNA, 20 nt, Human
cgguccacccaggagccccg

SEQ ID NO: 1514408 - RNA, 23 nt, Human
cggggacagcuccuucuguccua

SEQ ID NO: 1514409 - RNA, 16 nt, Human
cggggcucuucucauu

SEQ ID NO: 1514410 - RNA, 17 nt, Human
cggggcucuucucauuu

SEQ ID NO: 1514411 - RNA, 23 nt, Human
cggggcucuucucauuucacccc

SEQ ID NO: 1514412 - RNA, 15 nt, Human
cgggggcagagaggg

SEQ ID NO: 1514413 - RNA, 23 nt, Human
cggcuggccuggccccucagggu

SEQ ID NO: 1514414 - RNA, 14 nt, Human
cggcuggcagccca

SEQ ID NO: 1514415 - RNA, 22 nt, Human
cggcuggccuggccccucaggg

SEQ ID NO: 1514416 - RNA, 18 nt, Human
cgggaggucgaggcagga

SEQ ID NO: 1514417 - RNA, 20 nt, Human
cgggaggucgaggcaggagg

SEQ ID NO: 1514418 - RNA, 14 nt, Human
cgggcacucagaag

SEQ ID NO: 1514419 - RNA, 22 nt, Human
cgggcacucagaagacacugau

SEQ ID NO: 1514420 - RNA, 22 nt, Human
cggccaguggccuuccccagca

SEQ ID NO: 1514421 - RNA, 24 nt, Human
cggccaggccagagggagugacag

SEQ ID NO: 1514422 - RNA, 13 nt, Human
cggccccugcugg

SEQ ID NO: 1514423 - RNA, 18 nt, Human
cggccccugcugguucag

SEQ ID NO: 1514424 - RNA, 19 nt, Human
cggccccugcugguucagg

SEQ ID NO: 1514425 - RNA, 12 nt, Human
cggccuccaucc

SEQ ID NO: 1514426 - RNA, 14 nt, Human
cggccuccauccug

SEQ ID NO: 1514427 - RNA, 13 nt, Human
cggaagagccuug

SEQ ID NO: 1514428 - RNA, 14 nt, Human
cggaauaguuggcu

SEQ ID NO: 1514429 - RNA, 11 nt, Human
cggccaccugc

SEQ ID NO: 1514430 - RNA, 15 nt, Human
cggccaccugcggug

SEQ ID NO: 1514431 - RNA, 16 nt, Human
cggccaccugcggugc

SEQ ID NO: 1514432 - RNA, 17 nt, Human
cggccaccugcggugcu

SEQ ID NO: 1514433 - RNA, 19 nt, Human
cgcgccaaauaaugucucu

SEQ ID NO: 1514434 - RNA, 21 nt, Human
cgcgccaaauaaugucucugu

SEQ ID NO: 1514435 - RNA, 23 nt, Human
cgcgccaaauaaugucucuguga

SEQ ID NO: 1514436 - RNA, 12 nt, Human
cgcccagucugg

SEQ ID NO: 1514437 - RNA, 22 nt, Human
cgcccaggcuuagucacugaga

SEQ ID NO: 1514438 - RNA, 17 nt, Human
ccucugcccacucccug

SEQ ID NO: 1514439 - RNA, 19 nt, Human
ccucugcccacucccugca

SEQ ID NO: 1514440 - RNA, 20 nt, Human
ccucugcccacucccugcaa

SEQ ID NO: 1514441 - RNA, 23 nt, Human
cgccaggggaaaaucagccugcu

SEQ ID NO: 1514442 - RNA, 14 nt, Human
cgccaucccagccc

SEQ ID NO: 1514443 - RNA, 16 nt, Human
cgccaucccagcccca

SEQ ID NO: 1514444 - RNA, 17 nt, Human
cgccaucccagccccaa

SEQ ID NO: 1514445 - RNA, 22 nt, Human
cgcuaagagggagggagggcuc

SEQ ID NO: 1514446 - RNA, 16 nt, Human
cgcuacccgggaaggg

SEQ ID NO: 1514447 - RNA, 17 nt, Human
cgcuacccgggaagggg

SEQ ID NO: 1514448 - RNA, 14 nt, Human
cgcucucuggccuu

SEQ ID NO: 1514449 - RNA, 15 nt, Human
cgcucucuggccuuc

SEQ ID NO: 1514450 - RNA, 15 nt, Human
cgcugugcugcccug

SEQ ID NO: 1514451 - RNA, 16 nt, Human
cgcugugcugcccugc

SEQ ID NO: 1514452 - RNA, 17 nt, Human
cgcugugcugcccugcc

SEQ ID NO: 1514453 - RNA, 22 nt, Human
cgcugucagccauuccuguucc

SEQ ID NO: 1514454 - RNA, 18 nt, Human
cgcucucuggccuucggc

SEQ ID NO: 1514455 - RNA, 18 nt, Human
cgcugugcugcccugccc

SEQ ID NO: 1514456 - RNA, 20 nt, Human
cggaaaacaugcuacacacu

SEQ ID NO: 1514457 - RNA, 15 nt, Human
cggaaaacaugcuac

SEQ ID NO: 1514458 - RNA, 18 nt, Human
caguggccuuccccagca

SEQ ID NO: 1514459 - RNA, 17 nt, Human
caguggccuuccccagc

SEQ ID NO: 1514460 - RNA, 19 nt, Human
caguggccuuccccagcau

SEQ ID NO: 1514461 - RNA, 22 nt, Human
cagugguuccuaauccucuagg

SEQ ID NO: 1514462 - RNA, 12 nt, Human
caguggcagcug

SEQ ID NO: 1514463 - RNA, 13 nt, Human
caguggcagcugc

SEQ ID NO: 1514464 - RNA, 14 nt, Human
caguggcagcugcu

SEQ ID NO: 1514465 - RNA, 15 nt, Human
caguggcagcugcuu

SEQ ID NO: 1514466 - RNA, 16 nt, Human
caguggcagcugcuuu

SEQ ID NO: 1514467 - RNA, 23 nt, Human
cagugugucuaaauuugaauguu

SEQ ID NO: 1514468 - RNA, 14 nt, Human
cagugugucuaaau

SEQ ID NO: 1514469 - RNA, 14 nt, Human
cagugugacaagga

SEQ ID NO: 1514470 - RNA, 12 nt, Human
cagugugacuga

SEQ ID NO: 1514471 - RNA, 14 nt, Human
cagugucaaugcag

SEQ ID NO: 1514472 - RNA, 16 nt, Human
caguguacauggaaua

SEQ ID NO: 1514473 - RNA, 20 nt, Human
caguguacauggaauaacau

SEQ ID NO: 1514474 - RNA, 23 nt, Human
caguguacauggaauaacaugua

SEQ ID NO: 1514475 - RNA, 22 nt, Human
caguguuguggauuuaacagaa

SEQ ID NO: 1514476 - RNA, 20 nt, Human
caguguuguggauuuaacag

SEQ ID NO: 1514477 - RNA, 19 nt, Human
caguguuguggauuuaaca

SEQ ID NO: 1514478 - RNA, 21 nt, Human
caguuaccucugccucagaaa

SEQ ID NO: 1514479 - RNA, 14 nt, Human
caguuacucagaau

SEQ ID NO: 1514480 - RNA, 13 nt, Human
caguuaagagaaa

SEQ ID NO: 1514481 - RNA, 14 nt, Human
caguuaagagaaau

SEQ ID NO: 1514482 - RNA, 15 nt, Human
caguucugaagaaga

SEQ ID NO: 1514483 - RNA, 16 nt, Human
caguucugaagaagau

SEQ ID NO: 1514484 - RNA, 22 nt, Human
caguucugaagaagaugguacc

SEQ ID NO: 1514485 - RNA, 13 nt, Human
caguucugaagaa

SEQ ID NO: 1514486 - RNA, 14 nt, Human
caguucugaagaag

SEQ ID NO: 1514487 - RNA, 12 nt, Human
caguucugaaga

SEQ ID NO: 1514488 - RNA, 22 nt, Human
caguucucuccuucuucccccc

SEQ ID NO: 1514489 - RNA, 22 nt, Human
caguucggugagcuacaaaugc

SEQ ID NO: 1514490 - RNA, 15 nt, Human
caguuccuuucaaug

SEQ ID NO: 1514491 - RNA, 13 nt, Human
caguucucuccuu

SEQ ID NO: 1514492 - RNA, 14 nt, Human
caguucucuccuuc

SEQ ID NO: 1514493 - RNA, 15 nt, Human
caguucucuccuucu

SEQ ID NO: 1514494 - RNA, 12 nt, Human
caguugaaaaac

SEQ ID NO: 1514495 - RNA, 18 nt, Human
caguugaaaaacagcuga

SEQ ID NO: 1514496 - RNA, 19 nt, Human
caguugaaaaacagcugag

SEQ ID NO: 1514497 - RNA, 17 nt, Human
cauaccaacacgagcag

SEQ ID NO: 1514498 - RNA, 15 nt, Human
cauacauuguacgaa

SEQ ID NO: 1514499 - RNA, 12 nt, Human
cauacauauuuu

SEQ ID NO: 1514500 - RNA, 19 nt, Human
cauacauauuuuuguagca

SEQ ID NO: 1514501 - RNA, 19 nt, Human
cauaccacuuuuguucuug

SEQ ID NO: 1514502 - RNA, 11 nt, Human
cauacccaccc

SEQ ID NO: 1514503 - RNA, 12 nt, Human
cauacccacccc

SEQ ID NO: 1514504 - RNA, 18 nt, Human
cauaccacuuuuguucuu

SEQ ID NO: 1514505 - RNA, 15 nt, Human
cauaccacuuuuguu

SEQ ID NO: 1514506 - RNA, 14 nt, Human
cauaccacuuuugu

SEQ ID NO: 1514507 - RNA, 13 nt, Human
cauaccacuuuug

SEQ ID NO: 1514508 - RNA, 16 nt, Human
cauaaguaauucaaga

SEQ ID NO: 1514509 - RNA, 17 nt, Human
cauaaguaauucaagaa

SEQ ID NO: 1514510 - RNA, 18 nt, Human
cauaaguaauucaagaaa

SEQ ID NO: 1514511 - RNA, 22 nt, Human
cauaaguaauucaagaaaacaa

SEQ ID NO: 1514512 - RNA, 14 nt, Human
cauaagauaaaugu

SEQ ID NO: 1514513 - RNA, 19 nt, Human
cauaaauuuaguauuuugu

SEQ ID NO: 1514514 - RNA, 20 nt, Human
cauaaauuuaguauuuuguu

SEQ ID NO: 1514515 - RNA, 16 nt, Human
cauaaccuagccuuag

SEQ ID NO: 1514516 - RNA, 21 nt, Human
cauaaacaagaccacguuucu

SEQ ID NO: 1514517 - RNA, 20 nt, Human
cauaaacaagaccacguuuc

SEQ ID NO: 1514518 - RNA, 22 nt, Human
cauaaacaagaccacguuucua

SEQ ID NO: 1514519 - RNA, 23 nt, Human
cauaaaaagccugcaauuucaua

SEQ ID NO: 1514520 - RNA, 17 nt, Human
cauaaaaacaacuuuau

SEQ ID NO: 1514521 - RNA, 20 nt, Human
cauaaaaacaacuuuauacc

SEQ ID NO: 1514522 - RNA, 21 nt, Human
cauaaaaacaacuuuauaccc

SEQ ID NO: 1514523 - RNA, 23 nt, Human
cauaaaaacaacuuuauacccag

SEQ ID NO: 1514524 - RNA, 21 nt, Human
cauaaaaauuagccaagugug

SEQ ID NO: 1514525 - RNA, 23 nt, Human
caguugaaaagacuccaaagaaa

SEQ ID NO: 1514526 - RNA, 21 nt, Human
caguugaaaagacuccaaaga

SEQ ID NO: 1514527 - RNA, 22 nt, Human
caguugaaaagacuccaaagaa

SEQ ID NO: 1514528 - RNA, 18 nt, Human
caguugaaaagacuccaa

SEQ ID NO: 1514529 - RNA, 14 nt, Human
caguugaaaagacu

SEQ ID NO: 1514530 - RNA, 16 nt, Human
caguuggguggaugcc

SEQ ID NO: 1514531 - RNA, 23 nt, Human
caguugccagucaccccggccac

SEQ ID NO: 1514532 - RNA, 18 nt, Human
caguuggguggaugccug

SEQ ID NO: 1514533 - RNA, 19 nt, Human
caguuggguggaugccugg

SEQ ID NO: 1514534 - RNA, 18 nt, Human
caguuggucccccuucca

SEQ ID NO: 1514535 - RNA, 19 nt, Human
caguuggucccccuuccau

SEQ ID NO: 1514536 - RNA, 20 nt, Human
caguuggucccccuuccaug

SEQ ID NO: 1514537 - RNA, 21 nt, Human
caguuggucccccuuccaugg

SEQ ID NO: 1514538 - RNA, 22 nt, Human
caguuggucccccuuccaugga

SEQ ID NO: 1514539 - RNA, 17 nt, Human
caguuguuagugugucu

SEQ ID NO: 1514540 - RNA, 14 nt, Human
caguuuucugagaa

SEQ ID NO: 1514541 - RNA, 15 nt, Human
caguuuucugagaaa

SEQ ID NO: 1514542 - RNA, 15 nt, Human
cauaaaaacaacuuu

SEQ ID NO: 1514543 - RNA, 18 nt, Human
caguuguuagugugucuu

SEQ ID NO: 1514544 - RNA, 19 nt, Human
caguuuucugagaaagacu

SEQ ID NO: 1514545 - RNA, 20 nt, Human
caguuuucugagaaagacua

SEQ ID NO: 1514546 - RNA, 21 nt, Human
cauacuaaccagcagaaaugc

SEQ ID NO: 1514547 - RNA, 14 nt, Human
cauacuaaccagca

SEQ ID NO: 1514548 - RNA, 18 nt, Human
cauacguacacauuuuau

SEQ ID NO: 1514549 - RNA, 17 nt, Human
cauacguacacauuuua

SEQ ID NO: 1514550 - RNA, 16 nt, Human
cauacguacacauuuu

SEQ ID NO: 1514551 - RNA, 15 nt, Human
cauacguacacauuu

SEQ ID NO: 1514552 - RNA, 13 nt, Human
cauacguacacau

SEQ ID NO: 1514553 - RNA, 14 nt, Human
cauacccaccccca

SEQ ID NO: 1514554 - RNA, 17 nt, Human
cauacccacccccaccc

SEQ ID NO: 1514555 - RNA, 18 nt, Human
cauacccacccccaccca

SEQ ID NO: 1514556 - RNA, 21 nt, Human
cauacccacccccacccaagg

SEQ ID NO: 1514557 - RNA, 12 nt, Human
cauauuuucaug

SEQ ID NO: 1514558 - RNA, 14 nt, Human
cauauuuuucacau

SEQ ID NO: 1514559 - RNA, 21 nt, Human
cauauuuuucacauaucuagu

SEQ ID NO: 1514560 - RNA, 22 nt, Human
caucaagucuuucacauuuaaa

SEQ ID NO: 1514561 - RNA, 14 nt, Human
caucaagaugugac

SEQ ID NO: 1514562 - RNA, 18 nt, Human
caucaaugaaugaaugaa

SEQ ID NO: 1514563 - RNA, 12 nt, Human
cauauuucaauu

SEQ ID NO: 1514564 - RNA, 20 nt, Human
cauauuuacuucuuauacau

SEQ ID NO: 1514565 - RNA, 16 nt, Human
cauauuuacuucuuau

SEQ ID NO: 1514566 - RNA, 17 nt, Human
cauauuuacuucuuaua

SEQ ID NO: 1514567 - RNA, 13 nt, Human
cauaugccugggc

SEQ ID NO: 1514568 - RNA, 14 nt, Human
cauauuuacuucuu

SEQ ID NO: 1514569 - RNA, 18 nt, Human
cauauuuuucacauaucu

SEQ ID NO: 1514570 - RNA, 23 nt, Human
cauagagagcaagacgcugugcu

SEQ ID NO: 1514571 - RNA, 19 nt, Human
cauagagagcaagacgcug

SEQ ID NO: 1514572 - RNA, 21 nt, Human
cauagagagcaagacgcugug

SEQ ID NO: 1514573 - RNA, 19 nt, Human
cauagaaaacacuacagug

SEQ ID NO: 1514574 - RNA, 11 nt, Human
cauacucugcu

SEQ ID NO: 1514575 - RNA, 16 nt, Human
cauacucccaucugug

SEQ ID NO: 1514576 - RNA, 15 nt, Human
cauacucccaucugu

SEQ ID NO: 1514577 - RNA, 18 nt, Human
cauacucccaucugugaa

SEQ ID NO: 1514578 - RNA, 20 nt, Human
cauacucccaucugugaaag

SEQ ID NO: 1514579 - RNA, 23 nt, Human
cauauauauguuuuaagaggcag

SEQ ID NO: 1514580 - RNA, 22 nt, Human
cauauauauguuuuaagaggca

SEQ ID NO: 1514581 - RNA, 22 nt, Human
cauaguggcuuaaaacaacacu

SEQ ID NO: 1514582 - RNA, 20 nt, Human
cauaguaugguggcuggguu

SEQ ID NO: 1514583 - RNA, 18 nt, Human
cauaguaugguggcuggg

SEQ ID NO: 1514584 - RNA, 19 nt, Human
cauaguaugguggcugggu

SEQ ID NO: 1514585 - RNA, 22 nt, Human
caucuuccaaggguacuaagga

SEQ ID NO: 1514586 - RNA, 16 nt, Human
caucucuuagcucccc

SEQ ID NO: 1514587 - RNA, 17 nt, Human
caucucuuagcuccccu

SEQ ID NO: 1514588 - RNA, 18 nt, Human
caucucuuagcuccccuc

SEQ ID NO: 1514589 - RNA, 19 nt, Human
caucucuuagcuccccucc

SEQ ID NO: 1514590 - RNA, 21 nt, Human
caucucuuagcuccccuccaa

SEQ ID NO: 1514591 - RNA, 23 nt, Human
caucucuuagcuccccuccaacc

SEQ ID NO: 1514592 - RNA, 13 nt, Human
caucuugcucugc

SEQ ID NO: 1514593 - RNA, 15 nt, Human
caucuugcucugcug

SEQ ID NO: 1514594 - RNA, 14 nt, Human
caucuugcucugcu

SEQ ID NO: 1514595 - RNA, 20 nt, Human
caucuugcucugcugacaga

SEQ ID NO: 1514596 - RNA, 14 nt, Human
caucuagugagcag

SEQ ID NO: 1514597 - RNA, 15 nt, Human
caucuacccuccgau

SEQ ID NO: 1514598 - RNA, 21 nt, Human
cauccucuguacagagcccac

SEQ ID NO: 1514599 - RNA, 19 nt, Human
cauccucuguacagagccc

SEQ ID NO: 1514600 - RNA, 15 nt, Human
cauccucuguacaga

SEQ ID NO: 1514601 - RNA, 18 nt, Human
cauccucuguacagagcc

SEQ ID NO: 1514602 - RNA, 22 nt, Human
caucuagugagcagucaggaaa

SEQ ID NO: 1514603 - RNA, 16 nt, Human
caucucacacaugagc

SEQ ID NO: 1514604 - RNA, 17 nt, Human
caucucacacaugagca

SEQ ID NO: 1514605 - RNA, 20 nt, Human
caucucacacaugagcauca

SEQ ID NO: 1514606 - RNA, 15 nt, Human
cauccucauacccac

SEQ ID NO: 1514607 - RNA, 16 nt, Human
cauccucauacccacc

SEQ ID NO: 1514608 - RNA, 13 nt, Human
cauccucccaagg

SEQ ID NO: 1514609 - RNA, 17 nt, Human
cauccucauacccaccc

SEQ ID NO: 1514610 - RNA, 18 nt, Human
cauccucauacccacccc

SEQ ID NO: 1514611 - RNA, 21 nt, Human
cauccucauacccacccccac

SEQ ID NO: 1514612 - RNA, 22 nt, Human
cauccucauacccacccccacc

SEQ ID NO: 1514613 - RNA, 11 nt, Human
cauccuccuca

SEQ ID NO: 1514614 - RNA, 12 nt, Human
cauccuccucag

SEQ ID NO: 1514615 - RNA, 15 nt, Human
cauccuccucagauc

SEQ ID NO: 1514616 - RNA, 16 nt, Human
cauccuccucagaucu

SEQ ID NO: 1514617 - RNA, 18 nt, Human
cauccuccucagaucuuc

SEQ ID NO: 1514618 - RNA, 19 nt, Human
cauccuccucagaucuucu

SEQ ID NO: 1514619 - RNA, 15 nt, Human
cauccagguucagcu

SEQ ID NO: 1514620 - RNA, 17 nt, Human
cauccagguucagcuug

SEQ ID NO: 1514621 - RNA, 19 nt, Human
caucccucuggggcuguuc

SEQ ID NO: 1514622 - RNA, 11 nt, Human
caucccugaag

SEQ ID NO: 1514623 - RNA, 13 nt, Human
caucccugaaggc

SEQ ID NO: 1514624 - RNA, 20 nt, Human
caucaccaacgucugugcca

SEQ ID NO: 1514625 - RNA, 13 nt, Human
caucauugaaauc

SEQ ID NO: 1514626 - RNA, 15 nt, Human
caucaccaacgucug

SEQ ID NO: 1514627 - RNA, 14 nt, Human
caucauugaaaucu

SEQ ID NO: 1514628 - RNA, 15 nt, Human
caucauugaaaucuu

SEQ ID NO: 1514629 - RNA, 20 nt, Human
caucauugaaaucuuuuugc

SEQ ID NO: 1514630 - RNA, 21 nt, Human
caucauugaaaucuuuuugcu

SEQ ID NO: 1514631 - RNA, 22 nt, Human
caucccugaaggccccgcccag

SEQ ID NO: 1514632 - RNA, 17 nt, Human
caucccugaaggccccg

SEQ ID NO: 1514633 - RNA, 18 nt, Human
caucccugaaggccccgc

SEQ ID NO: 1514634 - RNA, 19 nt, Human
caucccugaaggccccgcc

SEQ ID NO: 1514635 - RNA, 21 nt, Human
caucccugaaggccccgccca

SEQ ID NO: 1514636 - RNA, 14 nt, Human
caugucuuuucuug

SEQ ID NO: 1514637 - RNA, 19 nt, Human
caugucuuuucuugcauga

SEQ ID NO: 1514638 - RNA, 21 nt, Human
caugucuuuucuugcaugagg

SEQ ID NO: 1514639 - RNA, 23 nt, Human
caugucuuuucuugcaugaggcu

SEQ ID NO: 1514640 - RNA, 18 nt, Human
cauguaauuaaguacuau

SEQ ID NO: 1514641 - RNA, 21 nt, Human
cauguaauuaaguacuaugua

SEQ ID NO: 1514642 - RNA, 16 nt, Human
cauggucggaaaacau

SEQ ID NO: 1514643 - RNA, 23 nt, Human
cauguuugauguaucugagcagg

SEQ ID NO: 1514644 - RNA, 15 nt, Human
caugugcacaugcac

SEQ ID NO: 1514645 - RNA, 21 nt, Human
caugugccagguuuuuggucu

SEQ ID NO: 1514646 - RNA, 22 nt, Human
caugugccagguuuuuggucug

SEQ ID NO: 1514647 - RNA, 17 nt, Human
caugugguuaaugccau

SEQ ID NO: 1514648 - RNA, 22 nt, Human
caugugguuaaugccauggaca

SEQ ID NO: 1514649 - RNA, 21 nt, Human
cauuaaagccugaguuugcuu

SEQ ID NO: 1514650 - RNA, 15 nt, Human
cauguuuuguuuacg

SEQ ID NO: 1514651 - RNA, 18 nt, Human
cauguuuuucuucucccu

SEQ ID NO: 1514652 - RNA, 16 nt, Human
cauggaauaacaugua

SEQ ID NO: 1514653 - RNA, 15 nt, Human
cauggacagaagaag

SEQ ID NO: 1514654 - RNA, 21 nt, Human
cauggacagaagaaggcagca

SEQ ID NO: 1514655 - RNA, 18 nt, Human
cauggacaugaucuucuu

SEQ ID NO: 1514656 - RNA, 20 nt, Human
cauggaaguacuauaauuua

SEQ ID NO: 1514657 - RNA, 22 nt, Human
cauggaaguacuauaauuuacc

SEQ ID NO: 1514658 - RNA, 23 nt, Human
caugcugucuacacuaagagaga

SEQ ID NO: 1514659 - RNA, 22 nt, Human
caugcugucccuuacgugaguc

SEQ ID NO: 1514660 - RNA, 20 nt, Human
caugcuguucaugaaagauu

SEQ ID NO: 1514661 - RNA, 18 nt, Human
caugccuggauggggcug

SEQ ID NO: 1514662 - RNA, 21 nt, Human
caugccuggauggggcugcac

SEQ ID NO: 1514663 - RNA, 23 nt, Human
caugccuggauggggcugcaccg

SEQ ID NO: 1514664 - RNA, 16 nt, Human
cauggaguauauguca

SEQ ID NO: 1514665 - RNA, 18 nt, Human
caugggaaugaaugucag

SEQ ID NO: 1514666 - RNA, 11 nt, Human
cauggacuuug

SEQ ID NO: 1514667 - RNA, 13 nt, Human
cauggacuuuguu

SEQ ID NO: 1514668 - RNA, 17 nt, Human
cauggagguuugaagau

SEQ ID NO: 1514669 - RNA, 16 nt, Human
caugggccuccugugu

SEQ ID NO: 1514670 - RNA, 17 nt, Human
caugggccuccugugug

SEQ ID NO: 1514671 - RNA, 23 nt, Human
caugggacagggaggacgcucuc

SEQ ID NO: 1514672 - RNA, 15 nt, Human
caugggccuccugug

SEQ ID NO: 1514673 - RNA, 17 nt, Human
caugggacagggaggac

SEQ ID NO: 1514674 - RNA, 22 nt, Human
caugggaaugaaugucagugug

SEQ ID NO: 1514675 - RNA, 14 nt, Human
caugccucucucag

SEQ ID NO: 1514676 - RNA, 15 nt, Human
caugccucucucagg

SEQ ID NO: 1514677 - RNA, 13 nt, Human
caugccuggaugg

SEQ ID NO: 1514678 - RNA, 15 nt, Human
caugccuccucagga

SEQ ID NO: 1514679 - RNA, 16 nt, Human
caugccucucucaggc

SEQ ID NO: 1514680 - RNA, 17 nt, Human
caugccucucucaggcc

SEQ ID NO: 1514681 - RNA, 18 nt, Human
caugccucucucaggcca

SEQ ID NO: 1514682 - RNA, 19 nt, Human
caugccucucucaggccaa

SEQ ID NO: 1514683 - RNA, 19 nt, Human
caugccagcuuaucucagg

SEQ ID NO: 1514684 - RNA, 20 nt, Human
caugccagcuuaucucaggg

SEQ ID NO: 1514685 - RNA, 13 nt, Human
caugccccugaac

SEQ ID NO: 1514686 - RNA, 14 nt, Human
cauugaccugaggc

SEQ ID NO: 1514687 - RNA, 13 nt, Human
cauugaccugagg

SEQ ID NO: 1514688 - RNA, 22 nt, Human
cauugaccugaggcccuucucu

SEQ ID NO: 1514689 - RNA, 19 nt, Human
cauugaaaucuuuuugcuu

SEQ ID NO: 1514690 - RNA, 21 nt, Human
cauuucuuccacaagagccca

SEQ ID NO: 1514691 - RNA, 23 nt, Human
cauuucugcaucagcugcugaaa

SEQ ID NO: 1514692 - RNA, 19 nt, Human
cauuuaaagcuuauuaaaa

SEQ ID NO: 1514693 - RNA, 17 nt, Human
cauuuacuuuguguuca

SEQ ID NO: 1514694 - RNA, 21 nt, Human
cauuuacuuuguguucaccuu

SEQ ID NO: 1514695 - RNA, 15 nt, Human
cauuugcucauggaa

SEQ ID NO: 1514696 - RNA, 14 nt, Human
cauuugcucaugga

SEQ ID NO: 1514697 - RNA, 16 nt, Human
cauuugcucauggaau

SEQ ID NO: 1514698 - RNA, 18 nt, Human
cauuugcucauggaauug

SEQ ID NO: 1514699 - RNA, 22 nt, Human
cauuugaggucuguucuuucca

SEQ ID NO: 1514700 - RNA, 19 nt, Human
cauuuuauuuuauuaugca

SEQ ID NO: 1514701 - RNA, 21 nt, Human
cauuuuauuuuauuaugcaug

SEQ ID NO: 1514702 - RNA, 22 nt, Human
cauuuuauuuuauuaugcauga

SEQ ID NO: 1514703 - RNA, 23 nt, Human
cauuuugggguacccacugcucu

SEQ ID NO: 1514704 - RNA, 19 nt, Human
cauuuuuaguagagacagg

SEQ ID NO: 1514705 - RNA, 20 nt, Human
cauuuuuaagugcugcauuu

SEQ ID NO: 1514706 - RNA, 15 nt, Human
cauuuuuaagugcug

SEQ ID NO: 1514707 - RNA, 20 nt, Human
cauuuugggguacccacugc

SEQ ID NO: 1514708 - RNA, 21 nt, Human
cauuuugggguacccacugcu

SEQ ID NO: 1514709 - RNA, 22 nt, Human
cauuuugggguacccacugcuc

SEQ ID NO: 1514710 - RNA, 18 nt, Human
cauuuugcuaaaugugaa

SEQ ID NO: 1514711 - RNA, 21 nt, Human
cauuuugcuaaaugugaauga

SEQ ID NO: 1514712 - RNA, 24 nt, Human
cauuuugcuaaaugugaaugauga

SEQ ID NO: 1514713 - RNA, 17 nt, Human
ccaaacucaccugcccc

SEQ ID NO: 1514714 - RNA, 17 nt, Human
ccaaagaaauguaaggg

SEQ ID NO: 1514715 - RNA, 20 nt, Human
cauuuuuaguagagacaggg

SEQ ID NO: 1514716 - RNA, 21 nt, Human
ccaaaauaaaacuuuuuaaaa

SEQ ID NO: 1514717 - RNA, 18 nt, Human
ccaaaauaaaacuuuuua

SEQ ID NO: 1514718 - RNA, 19 nt, Human
cauuugaggucuguucuuu

SEQ ID NO: 1514719 - RNA, 18 nt, Human
cauuugaggucuguucuu

SEQ ID NO: 1514720 - RNA, 17 nt, Human
cauuugaggucuguucu

SEQ ID NO: 1514721 - RNA, 16 nt, Human
cauuugagcagggcuc

SEQ ID NO: 1514722 - RNA, 14 nt, Human
cauuugagcagggc

SEQ ID NO: 1514723 - RNA, 23 nt, Human
cauuucuuccacaagagcccagg

SEQ ID NO: 1514724 - RNA, 16 nt, Human
ccaacaucaacaucuu

SEQ ID NO: 1514725 - RNA, 16 nt, Human
ccaacauacucccauc

SEQ ID NO: 1514726 - RNA, 14 nt, Human
ccaacauacuccca

SEQ ID NO: 1514727 - RNA, 21 nt, Human
ccaacacgagcaggcuacugu

SEQ ID NO: 1514728 - RNA, 15 nt, Human
ccaaauucuuucagu

SEQ ID NO: 1514729 - RNA, 22 nt, Human
ccaaauucuuucaguggcuacc

SEQ ID NO: 1514730 - RNA, 23 nt, Human
ccaaauuucauaccuaucaucuu

SEQ ID NO: 1514731 - RNA, 19 nt, Human
ccaaagcagugcaugcugu

SEQ ID NO: 1514732 - RNA, 14 nt, Human
ccaacacgagcagg

SEQ ID NO: 1514733 - RNA, 15 nt, Human
ccaagaccuucuccu

SEQ ID NO: 1514734 - RNA, 14 nt, Human
ccaaccuggggggc

SEQ ID NO: 1514735 - RNA, 13 nt, Human
ccaacccucauca

SEQ ID NO: 1514736 - RNA, 15 nt, Human
ccaacccucaucacc

SEQ ID NO: 1514737 - RNA, 13 nt, Human
ccaaagaugcagc

SEQ ID NO: 1514738 - RNA, 14 nt, Human
ccaaagaugcagcc

SEQ ID NO: 1514739 - RNA, 22 nt, Human
ccaagagcugaggcaauucuaa

SEQ ID NO: 1514740 - RNA, 14 nt, Human
ccaagcaggacaug

SEQ ID NO: 1514741 - RNA, 12 nt, Human
ccaagcucccag

SEQ ID NO: 1514742 - RNA, 13 nt, Human
ccaagcucccagg

SEQ ID NO: 1514743 - RNA, 18 nt, Human
ccaaggcuagaaccaccu

SEQ ID NO: 1514744 - RNA, 18 nt, Human
ccaauucuuacaaacaug

SEQ ID NO: 1514745 - RNA, 19 nt, Human
ccaauucuuacaaacaugu

SEQ ID NO: 1514746 - RNA, 18 nt, Human
ccacaaaggagagcuagc

SEQ ID NO: 1514747 - RNA, 16 nt, Human
ccacaagaaaugaaag

SEQ ID NO: 1514748 - RNA, 22 nt, Human
ccacaagaaaugaaagcaggga

SEQ ID NO: 1514749 - RNA, 16 nt, Human
ccacaagacccuugug

SEQ ID NO: 1514750 - RNA, 13 nt, Human
ccacaagagccca

SEQ ID NO: 1514751 - RNA, 19 nt, Human
ccaaggcugauuaaaccaa

SEQ ID NO: 1514752 - RNA, 14 nt, Human
ccaaggcuggggga

SEQ ID NO: 1514753 - RNA, 20 nt, Human
ccaauauucauagcagcuua

SEQ ID NO: 1514754 - RNA, 20 nt, Human
ccacaagagcccaggccucc

SEQ ID NO: 1514755 - RNA, 21 nt, Human
ccacaagagcccaggccuccu

SEQ ID NO: 1514756 - RNA, 16 nt, Human
ccacaagagcccaggc

SEQ ID NO: 1514757 - RNA, 17 nt, Human
ccacaagagcccaggcc

SEQ ID NO: 1514758 - RNA, 18 nt, Human
ccacaagagcccaggccu

SEQ ID NO: 1514759 - RNA, 19 nt, Human
ccacaagagcccaggccuc

SEQ ID NO: 1514760 - RNA, 15 nt, Human
ccacaaguuaaauaa

SEQ ID NO: 1514761 - RNA, 20 nt, Human
ccacaaguuaaauaaaucau

SEQ ID NO: 1514762 - RNA, 14 nt, Human
ccaucaugucuggc

SEQ ID NO: 1514763 - RNA, 16 nt, Human
ccaucaugucuggcua

SEQ ID NO: 1514764 - RNA, 16 nt, Human
ccauccugaggcucca

SEQ ID NO: 1514765 - RNA, 15 nt, Human
ccauccugaggcucc

SEQ ID NO: 1514766 - RNA, 21 nt, Human
ccauccucuguacagagccca

SEQ ID NO: 1514767 - RNA, 12 nt, Human
ccaucaagccac

SEQ ID NO: 1514768 - RNA, 12 nt, Human
ccaucacccgcu

SEQ ID NO: 1514769 - RNA, 22 nt, Human
ccagugguuccuaauccucuag

SEQ ID NO: 1514770 - RNA, 23 nt, Human
ccauagagagcaagacgcugugc

SEQ ID NO: 1514771 - RNA, 15 nt, Human
ccauauucuguuggc

SEQ ID NO: 1514772 - RNA, 18 nt, Human
ccauauucuguuggccag

SEQ ID NO: 1514773 - RNA, 19 nt, Human
ccauauucuguuggccagu

SEQ ID NO: 1514774 - RNA, 17 nt, Human
ccagugcuuuauguugu

SEQ ID NO: 1514775 - RNA, 23 nt, Human
ccagggacagaggggguggccuc

SEQ ID NO: 1514776 - RNA, 20 nt, Human
ccaggaagccagcaggcucu

SEQ ID NO: 1514777 - RNA, 22 nt, Human
ccagcugugcucuggacaggca

SEQ ID NO: 1514778 - RNA, 23 nt, Human
ccagcugugcucuggacaggcau

SEQ ID NO: 1514779 - RNA, 16 nt, Human
ccagcuguucagcugg

SEQ ID NO: 1514780 - RNA, 15 nt, Human
ccaggaagccagcag

SEQ ID NO: 1514781 - RNA, 17 nt, Human
ccaggaagccagcaggc

SEQ ID NO: 1514782 - RNA, 19 nt, Human
ccaggaagccagcaggcuc

SEQ ID NO: 1514783 - RNA, 12 nt, Human
ccaggagcagcc

SEQ ID NO: 1514784 - RNA, 13 nt, Human
ccaggagcagcca

SEQ ID NO: 1514785 - RNA, 14 nt, Human
ccaggacugggcca

SEQ ID NO: 1514786 - RNA, 17 nt, Human
ccaggacugggccacuu

SEQ ID NO: 1514787 - RNA, 12 nt, Human
ccaggacugggc

SEQ ID NO: 1514788 - RNA, 13 nt, Human
ccaggacugggcc

SEQ ID NO: 1514789 - RNA, 15 nt, Human
ccaggagcagccaca

SEQ ID NO: 1514790 - RNA, 14 nt, Human
ccaggagcagccac

SEQ ID NO: 1514791 - RNA, 14 nt, Human
ccaggccagaggga

SEQ ID NO: 1514792 - RNA, 21 nt, Human
ccaggccagagggagugacag

SEQ ID NO: 1514793 - RNA, 21 nt, Human
ccaggccccugccacccuggg

SEQ ID NO: 1514794 - RNA, 23 nt, Human
ccaggccccugccacccugggga

SEQ ID NO: 1514795 - RNA, 17 nt, Human
ccaggcccucugcccac

SEQ ID NO: 1514796 - RNA, 18 nt, Human
ccaggcccucugcccacu

SEQ ID NO: 1514797 - RNA, 19 nt, Human
ccaggcccucugcccacuc

SEQ ID NO: 1514798 - RNA, 20 nt, Human
ccaggcccucugcccacucc

SEQ ID NO: 1514799 - RNA, 13 nt, Human
ccaggccuccuac

SEQ ID NO: 1514800 - RNA, 18 nt, Human
ccaggccuccuacagcuu

SEQ ID NO: 1514801 - RNA, 19 nt, Human
ccaggccuccuacagcuug

SEQ ID NO: 1514802 - RNA, 20 nt, Human
ccagcugcuugggcuucauc

SEQ ID NO: 1514803 - RNA, 16 nt, Human
ccagcugcuugggcuu

SEQ ID NO: 1514804 - RNA, 18 nt, Human
ccagcugcuugggcuuca

SEQ ID NO: 1514805 - RNA, 15 nt, Human
ccagcugcuugggcu

SEQ ID NO: 1514806 - RNA, 18 nt, Human
ccagcugugcucuggaca

SEQ ID NO: 1514807 - RNA, 20 nt, Human
ccagcugugcucuggacagg

SEQ ID NO: 1514808 - RNA, 21 nt, Human
ccagcugugcucuggacaggc

SEQ ID NO: 1514809 - RNA, 19 nt, Human
ccagccugagcgacaguga

SEQ ID NO: 1514810 - RNA, 22 nt, Human
ccagcucugcgucgguccuggu

SEQ ID NO: 1514811 - RNA, 11 nt, Human
cccagcucugc

SEQ ID NO: 1514812 - RNA, 18 nt, Human
cccagcucugguccauag

SEQ ID NO: 1514813 - RNA, 15 nt, Human
cccagcucuggucca

SEQ ID NO: 1514814 - RNA, 16 nt, Human
cccagcucugguccau

SEQ ID NO: 1514815 - RNA, 12 nt, Human
cccagcucugcg

SEQ ID NO: 1514816 - RNA, 12 nt, Human
cccagcucuggu

SEQ ID NO: 1514817 - RNA, 13 nt, Human
cccagcucugguc

SEQ ID NO: 1514818 - RNA, 14 nt, Human
cccagcucuggucc

SEQ ID NO: 1514819 - RNA, 15 nt, Human
cccagcgagcccugg

SEQ ID NO: 1514820 - RNA, 14 nt, Human
cccagcgagcccug

SEQ ID NO: 1514821 - RNA, 12 nt, Human
cccaggacuggg

SEQ ID NO: 1514822 - RNA, 13 nt, Human
cccaggacugggc

SEQ ID NO: 1514823 - RNA, 14 nt, Human
cccaggacugggcc

SEQ ID NO: 1514824 - RNA, 15 nt, Human
cccaggacugggcca

SEQ ID NO: 1514825 - RNA, 13 nt, Human
cccaggagccccg

SEQ ID NO: 1514826 - RNA, 14 nt, Human
cccaggagccccga

SEQ ID NO: 1514827 - RNA, 18 nt, Human
cccaggagccccgaggcc

SEQ ID NO: 1514828 - RNA, 14 nt, Human
cccaggaggccagc

SEQ ID NO: 1514829 - RNA, 15 nt, Human
cccagaggagggcag

SEQ ID NO: 1514830 - RNA, 16 nt, Human
cccagcaagugagagc

SEQ ID NO: 1514831 - RNA, 13 nt, Human
cccagccccaaug

SEQ ID NO: 1514832 - RNA, 17 nt, Human
cccagauuggcucacac

SEQ ID NO: 1514833 - RNA, 19 nt, Human
cccagauuggcucacacug

SEQ ID NO: 1514834 - RNA, 20 nt, Human
cccagauuggcucacacuga

SEQ ID NO: 1514835 - RNA, 21 nt, Human
cccagauuggcucacacugag

SEQ ID NO: 1514836 - RNA, 22 nt, Human
cccagauuggcucacacugaga

SEQ ID NO: 1514837 - RNA, 17 nt, Human
cccagccccaaugaaca

SEQ ID NO: 1514838 - RNA, 11 nt, Human
cccagccccau

SEQ ID NO: 1514839 - RNA, 12 nt, Human
cccagccccauc

SEQ ID NO: 1514840 - RNA, 18 nt, Human
cccagccccauccucugu

SEQ ID NO: 1514841 - RNA, 19 nt, Human
cccagccccauccucugua

SEQ ID NO: 1514842 - RNA, 13 nt, Human
cccagccccaucc

SEQ ID NO: 1514843 - RNA, 14 nt, Human
cccagccccauccc

SEQ ID NO: 1514844 - RNA, 14 nt, Human
cccagccccauccu

SEQ ID NO: 1514845 - RNA, 15 nt, Human
cccagccccauccuc

SEQ ID NO: 1514846 - RNA, 18 nt, Human
cccaggaggccagccuug

SEQ ID NO: 1514847 - RNA, 16 nt, Human
ccauguuggccaggcu

SEQ ID NO: 1514848 - RNA, 15 nt, Human
ccauguuggccaggc

SEQ ID NO: 1514849 - RNA, 19 nt, Human
ccauguuggccaggcuggu

SEQ ID NO: 1514850 - RNA, 21 nt, Human
ccauguuggccaggcuggucu

SEQ ID NO: 1514851 - RNA, 12 nt, Human
cccaccuggccu

SEQ ID NO: 1514852 - RNA, 15 nt, Human
cccaccuggccucug

SEQ ID NO: 1514853 - RNA, 16 nt, Human
cccaccuggccucugc

SEQ ID NO: 1514854 - RNA, 17 nt, Human
cccaccuuggcugcagg

SEQ ID NO: 1514855 - RNA, 19 nt, Human
cccaccuuggcugcaggga

SEQ ID NO: 1514856 - RNA, 20 nt, Human
cccaccuuggcugcagggag

SEQ ID NO: 1514857 - RNA, 15 nt, Human
cccacgcccccacug

SEQ ID NO: 1514858 - RNA, 17 nt, Human
cccacgagggugccgug

SEQ ID NO: 1514859 - RNA, 13 nt, Human
cccacgcccccac

SEQ ID NO: 1514860 - RNA, 14 nt, Human
cccacgcccccacu

SEQ ID NO: 1514861 - RNA, 13 nt, Human
ccaugugccaggu

SEQ ID NO: 1514862 - RNA, 23 nt, Human
ccauggcacucuauguucuaaga

SEQ ID NO: 1514863 - RNA, 13 nt, Human
ccauguuggccag

SEQ ID NO: 1514864 - RNA, 14 nt, Human
ccauguuggccagg

SEQ ID NO: 1514865 - RNA, 16 nt, Human
ccaugcugcccuguga

SEQ ID NO: 1514866 - RNA, 17 nt, Human
ccaugcugcccugugag

SEQ ID NO: 1514867 - RNA, 15 nt, Human
ccaugcuccuggccc

SEQ ID NO: 1514868 - RNA, 18 nt, Human
ccaugcuccuggcccacu

SEQ ID NO: 1514869 - RNA, 16 nt, Human
ccaugccuccucagga

SEQ ID NO: 1514870 - RNA, 22 nt, Human
ccaugaaaaugcaacaacaugu

SEQ ID NO: 1514871 - RNA, 13 nt, Human
cccagguuucuau

SEQ ID NO: 1514872 - RNA, 17 nt, Human
cccaggcauuccccagg

SEQ ID NO: 1514873 - RNA, 18 nt, Human
cccaggcauuccccagga

SEQ ID NO: 1514874 - RNA, 15 nt, Human
cccaggaggccagcc

SEQ ID NO: 1514875 - RNA, 16 nt, Human
cccaggaggccagccu

SEQ ID NO: 1514876 - RNA, 23 nt, Human
cccaggcaggucuugaacuccug

SEQ ID NO: 1514877 - RNA, 15 nt, Human
cccaggcauucccca

SEQ ID NO: 1514878 - RNA, 15 nt, Human
cccagugccgagaag

SEQ ID NO: 1514879 - RNA, 21 nt, Human
cccagugcccacaggaucagu

SEQ ID NO: 1514880 - RNA, 10 nt, Human
cccagucugg

SEQ ID NO: 1514881 - RNA, 18 nt, Human
cccagucuggaaugcagu

SEQ ID NO: 1514882 - RNA, 19 nt, Human
cccagucuggaaugcagug

SEQ ID NO: 1514883 - RNA, 17 nt, Human
cccagugccgagaagga

SEQ ID NO: 1514884 - RNA, 20 nt, Human
cccagugguuccuaauccuc

SEQ ID NO: 1514885 - RNA, 14 nt, Human
cccaguuagcucuc

SEQ ID NO: 1514886 - RNA, 18 nt, Human
cccaucucacacaugagc

SEQ ID NO: 1514887 - RNA, 13 nt, Human
cccaucucacaca

SEQ ID NO: 1514888 - RNA, 20 nt, Human
cccaucugugaaaggaaaga

SEQ ID NO: 1514889 - RNA, 14 nt, Human
cccaugcugcccug

SEQ ID NO: 1514890 - RNA, 12 nt, Human
cccaugcugccc

SEQ ID NO: 1514891 - RNA, 13 nt, Human
cccaugcugcccu

SEQ ID NO: 1514892 - RNA, 15 nt, Human
cccaugagccucagc

SEQ ID NO: 1514893 - RNA, 16 nt, Human
cccaugagccucagca

SEQ ID NO: 1514894 - RNA, 20 nt, Human
cccaugagccucagcauccu

SEQ ID NO: 1514895 - RNA, 21 nt, Human
ccccaaauggaaaugggcaga

SEQ ID NO: 1514896 - RNA, 22 nt, Human
cccaugagccucagcauccugg

SEQ ID NO: 1514897 - RNA, 17 nt, Human
ccuccaggugcacaagc

SEQ ID NO: 1514898 - RNA, 11 nt, Human
ccuccaggugc

SEQ ID NO: 1514899 - RNA, 12 nt, Human
ccuccaggugca

SEQ ID NO: 1514900 - RNA, 14 nt, Human
ccuccauccugagg

SEQ ID NO: 1514901 - RNA, 12 nt, Human
ccuccauccuga

SEQ ID NO: 1514902 - RNA, 13 nt, Human
ccuccauccugag

SEQ ID NO: 1514903 - RNA, 12 nt, Human
ccuccauguggg

SEQ ID NO: 1514904 - RNA, 15 nt, Human
ccuccaugugggcua

SEQ ID NO: 1514905 - RNA, 17 nt, Human
ccucccaaagugcuggg

SEQ ID NO: 1514906 - RNA, 14 nt, Human
ccucccaacucacc

SEQ ID NO: 1514907 - RNA, 19 nt, Human
ccuccacucucccccaccc

SEQ ID NO: 1514908 - RNA, 22 nt, Human
ccuccacucucccccacccccu

SEQ ID NO: 1514909 - RNA, 23 nt, Human
ccuccagggcuggacugaggccu

SEQ ID NO: 1514910 - RNA, 14 nt, Human
ccuccacucucccc

SEQ ID NO: 1514911 - RNA, 17 nt, Human
ccuccacucucccccac

SEQ ID NO: 1514912 - RNA, 12 nt, Human
ccucauacccac

SEQ ID NO: 1514913 - RNA, 18 nt, Human
ccucaggugagaagcaga

SEQ ID NO: 1514914 - RNA, 20 nt, Human
ccucaggugagaagcagagg

SEQ ID NO: 1514915 - RNA, 19 nt, Human
ccucccgaguagcugggac

SEQ ID NO: 1514916 - RNA, 17 nt, Human
ccucccgaguagcuggg

SEQ ID NO: 1514917 - RNA, 18 nt, Human
ccucccgaguagcuggga

SEQ ID NO: 1514918 - RNA, 19 nt, Human
ccucccgaauagcugggac

SEQ ID NO: 1514919 - RNA, 20 nt, Human
ccucccgaauagcugggacu

SEQ ID NO: 1514920 - RNA, 13 nt, Human
ccucccucuuucc

SEQ ID NO: 1514921 - RNA, 11 nt, Human
ccuccucagau

SEQ ID NO: 1514922 - RNA, 12 nt, Human
ccuccuccagcc

SEQ ID NO: 1514923 - RNA, 14 nt, Human
ccuccucagaucuu

SEQ ID NO: 1514924 - RNA, 16 nt, Human
ccuccccgcccuuuuu

SEQ ID NO: 1514925 - RNA, 15 nt, Human
ccucccaacucaccc

SEQ ID NO: 1514926 - RNA, 18 nt, Human
ccucccgaauagcuggga

SEQ ID NO: 1514927 - RNA, 21 nt, Human
ccucccgaauagcugggacua

SEQ ID NO: 1514928 - RNA, 21 nt, Human
ccuccuccagccgccaugcuc

SEQ ID NO: 1514929 - RNA, 20 nt, Human
ccucuccccagcaagugaga

SEQ ID NO: 1514930 - RNA, 13 nt, Human
ccucucccuugga

SEQ ID NO: 1514931 - RNA, 22 nt, Human
ccucucccuuggauuguccccg

SEQ ID NO: 1514932 - RNA, 15 nt, Human
ccucuccccagcaag

SEQ ID NO: 1514933 - RNA, 21 nt, Human
ccucugacacacagcucuguc

SEQ ID NO: 1514934 - RNA, 13 nt, Human
ccucugacacaca

SEQ ID NO: 1514935 - RNA, 15 nt, Human
ccucugacacacagc

SEQ ID NO: 1514936 - RNA, 14 nt, Human
ccucugacacacag

SEQ ID NO: 1514937 - RNA, 19 nt, Human
ccucugacacacagcucug

SEQ ID NO: 1514938 - RNA, 20 nt, Human
ccucugacacacagcucugu

SEQ ID NO: 1514939 - RNA, 19 nt, Human
ccucugcagcaauaaagca

SEQ ID NO: 1514940 - RNA, 19 nt, Human
ccucugcacuccccugcug

SEQ ID NO: 1514941 - RNA, 13 nt, Human
ccucugcccacuc

SEQ ID NO: 1514942 - RNA, 16 nt, Human
ccucugcccacucccu

SEQ ID NO: 1514943 - RNA, 18 nt, Human
ccucugcagcaauaaagc

SEQ ID NO: 1514944 - RNA, 14 nt, Human
ccucugcagcaaua

SEQ ID NO: 1514945 - RNA, 23 nt, Human
ccucugcacuccccugcugggug

SEQ ID NO: 1514946 - RNA, 18 nt, Human
ccucugcacuccccugcu

SEQ ID NO: 1514947 - RNA, 11 nt, Human
ccucugcacaa

SEQ ID NO: 1514948 - RNA, 16 nt, Human
ccucugcacuccccug

SEQ ID NO: 1514949 - RNA, 17 nt, Human
ccucugcacuccccugc

SEQ ID NO: 1514950 - RNA, 14 nt, Human
ccucagcauccugg

SEQ ID NO: 1514951 - RNA, 16 nt, Human
ccucagaucuucugug

SEQ ID NO: 1514952 - RNA, 16 nt, Human
ccucagggucccuggu

SEQ ID NO: 1514953 - RNA, 17 nt, Human
ccucagggucccuggug

SEQ ID NO: 1514954 - RNA, 20 nt, Human
ccucagggucccugguggca

SEQ ID NO: 1514955 - RNA, 22 nt, Human
ccucagggucccugguggcagc

SEQ ID NO: 1514956 - RNA, 17 nt, Human
ccuauuagagaagagau

SEQ ID NO: 1514957 - RNA, 16 nt, Human
ccuauuagagaagaga

SEQ ID NO: 1514958 - RNA, 11 nt, Human
ccucacacagc

SEQ ID NO: 1514959 - RNA, 24 nt, Human
ccucacaguccuuaccagcagagc

SEQ ID NO: 1514960 - RNA, 23 nt, Human
ccucacaguccuuaccagcagag

SEQ ID NO: 1514961 - RNA, 18 nt, Human
ccuaggugacagagugag

SEQ ID NO: 1514962 - RNA, 15 nt, Human
ccuaggugacagagu

SEQ ID NO: 1514963 - RNA, 22 nt, Human
ccucaggugagaagcagaggaa

SEQ ID NO: 1514964 - RNA, 17 nt, Human
ccgggaagggggcuggg

SEQ ID NO: 1514965 - RNA, 22 nt, Human
ccgggaggcagagguugcagug

SEQ ID NO: 1514966 - RNA, 20 nt, Human
ccgggaagggggcugggaca

SEQ ID NO: 1514967 - RNA, 14 nt, Human
cccugguucucauc

SEQ ID NO: 1514968 - RNA, 12 nt, Human
cccuucccaccu

SEQ ID NO: 1514969 - RNA, 13 nt, Human
cccuucccaccuc

SEQ ID NO: 1514970 - RNA, 22 nt, Human
cccuuguggucccaccccacac

SEQ ID NO: 1514971 - RNA, 22 nt, Human
cccuugguuaggcauuguggga

SEQ ID NO: 1514972 - RNA, 23 nt, Human
cccuugguuaggcauugugggaa

SEQ ID NO: 1514973 - RNA, 17 nt, Human
cccuuggauuguccccg

SEQ ID NO: 1514974 - RNA, 13 nt, Human
ccuaaacauauga

SEQ ID NO: 1514975 - RNA, 16 nt, Human
ccuaaaauucagugga

SEQ ID NO: 1514976 - RNA, 22 nt, Human
ccuacaguugaaaaacagcuga

SEQ ID NO: 1514977 - RNA, 19 nt, Human
ccuacagcuugaccgugag

SEQ ID NO: 1514978 - RNA, 13 nt, Human
ccuaggugacaga

SEQ ID NO: 1514979 - RNA, 21 nt, Human
ccuagaaauuccccacccuga

SEQ ID NO: 1514980 - RNA, 19 nt, Human
ccuacuguaauuugugaua

SEQ ID NO: 1514981 - RNA, 18 nt, Human
ccuacccacccuccuuuc

SEQ ID NO: 1514982 - RNA, 18 nt, Human
ccuacaggagugagcacu

SEQ ID NO: 1514983 - RNA, 13 nt, Human
ccuacccacccuc

SEQ ID NO: 1514984 - RNA, 12 nt, Human
ccguuauuaaaa

SEQ ID NO: 1514985 - RNA, 16 nt, Human
cccugccuccuuugug

SEQ ID NO: 1514986 - RNA, 23 nt, Human
cccugccuccuuugugaggaagc

SEQ ID NO: 1514987 - RNA, 13 nt, Human
cccugcccaccug

SEQ ID NO: 1514988 - RNA, 17 nt, Human
cccugccacccugggga

SEQ ID NO: 1514989 - RNA, 18 nt, Human
cccugccacccuggggag

SEQ ID NO: 1514990 - RNA, 12 nt, Human
cccugccacccu

SEQ ID NO: 1514991 - RNA, 14 nt, Human
cccugccacccugg

SEQ ID NO: 1514992 - RNA, 15 nt, Human
cccugccacccuggg

SEQ ID NO: 1514993 - RNA, 22 nt, Human
cccugcaaccugauugugucuc

SEQ ID NO: 1514994 - RNA, 16 nt, Human
cccugcaaccugauug

SEQ ID NO: 1514995 - RNA, 12 nt, Human
cccugcagaggg

SEQ ID NO: 1514996 - RNA, 20 nt, Human
cccugcagagggcacagaaa

SEQ ID NO: 1514997 - RNA, 18 nt, Human
cccugcagagggcacaga

SEQ ID NO: 1514998 - RNA, 13 nt, Human
cccugcugguuca

SEQ ID NO: 1514999 - RNA, 19 nt, Human
cccugcugguucaggguug

SEQ ID NO: 1515000 - RNA, 20 nt, Human
cccugcugguucaggguugg

SEQ ID NO: 1515001 - RNA, 22 nt, Human
cccugguggcagugggagcugc

SEQ ID NO: 1515002 - RNA, 14 nt, Human
cccugguggcagcu

SEQ ID NO: 1515003 - RNA, 22 nt, Human
cccucauccucauacccacccc

SEQ ID NO: 1515004 - RNA, 21 nt, Human
cccuccaagaccuucuccuuc

SEQ ID NO: 1515005 - RNA, 21 nt, Human
cccucagggucccugguggca

SEQ ID NO: 1515006 - RNA, 20 nt, Human
cccucagucuggcccuuccu

SEQ ID NO: 1515007 - RNA, 22 nt, Human
cccucaucaccaacgucugugc

SEQ ID NO: 1515008 - RNA, 17 nt, Human
cccucauccucauaccc

SEQ ID NO: 1515009 - RNA, 20 nt, Human
cccucauccucauacccacc

SEQ ID NO: 1515010 - RNA, 13 nt, Human
cccucccucuuuc

SEQ ID NO: 1515011 - RNA, 16 nt, Human
cccucccuuucucccc

SEQ ID NO: 1515012 - RNA, 13 nt, Human
cccucccuuucuc

SEQ ID NO: 1515013 - RNA, 14 nt, Human
cccucccuuucucc

SEQ ID NO: 1515014 - RNA, 16 nt, Human
cccuccccgcccuuuu

SEQ ID NO: 1515015 - RNA, 17 nt, Human
cccuccccgcccuuuuu

SEQ ID NO: 1515016 - RNA, 17 nt, Human
cccuccaugugggcuag

SEQ ID NO: 1515017 - RNA, 15 nt, Human
cccucagggucccug

SEQ ID NO: 1515018 - RNA, 16 nt, Human
cccucagggucccugg

SEQ ID NO: 1515019 - RNA, 17 nt, Human
cccucagggucccuggu

SEQ ID NO: 1515020 - RNA, 18 nt, Human
cccucagggucccuggug

SEQ ID NO: 1515021 - RNA, 19 nt, Human
cccucagggucccuggugg

SEQ ID NO: 1515022 - RNA, 22 nt, Human
cccuaaaguguauuuuuuuacu

SEQ ID NO: 1515023 - RNA, 17 nt, Human
cccuaaaguguauuuuu

SEQ ID NO: 1515024 - RNA, 16 nt, Human
cccggcaggguccuag

SEQ ID NO: 1515025 - RNA, 13 nt, Human
ccccagccugcua

SEQ ID NO: 1515026 - RNA, 15 nt, Human
ccccagccccauccu

SEQ ID NO: 1515027 - RNA, 12 nt, Human
ccccaggaggcc

SEQ ID NO: 1515028 - RNA, 13 nt, Human
ccccaggacuggg

SEQ ID NO: 1515029 - RNA, 14 nt, Human
ccccaggacugggc

SEQ ID NO: 1515030 - RNA, 16 nt, Human
ccccaggacugggcca

SEQ ID NO: 1515031 - RNA, 22 nt, Human
ccccaggacugggccacuucug

SEQ ID NO: 1515032 - RNA, 15 nt, Human
ccccuggcagccccu

SEQ ID NO: 1515033 - RNA, 12 nt, Human
ccccuggcagcc

SEQ ID NO: 1515034 - RNA, 14 nt, Human
ccccuggcagcccc

SEQ ID NO: 1515035 - RNA, 22 nt, Human
ccccaggugguuauggagaggg

SEQ ID NO: 1515036 - RNA, 14 nt, Human
ccccaggugccagu

SEQ ID NO: 1515037 - RNA, 22 nt, Human
cccgcuaagagggagggagggc

SEQ ID NO: 1515038 - RNA, 21 nt, Human
cccgaggccuucucugaagga

SEQ ID NO: 1515039 - RNA, 20 nt, Human
cccgaggccuucucugaagg

SEQ ID NO: 1515040 - RNA, 15 nt, Human
cccgaggccuucucu

SEQ ID NO: 1515041 - RNA, 18 nt, Human
ccccugguucucaucuuu

SEQ ID NO: 1515042 - RNA, 15 nt, Human
ccccugguucucauc

SEQ ID NO: 1515043 - RNA, 22 nt, Human
ccccuguccccgcacugggcuu

SEQ ID NO: 1515044 - RNA, 17 nt, Human
cugaucucucgugauug

SEQ ID NO: 1515045 - RNA, 18 nt, Human
cugaucucucgugauuga

SEQ ID NO: 1515046 - RNA, 19 nt, Human
cugacccugcuucaaauau

SEQ ID NO: 1515047 - RNA, 23 nt, Human
cugacccugcuucaaauauuucc

SEQ ID NO: 1515048 - RNA, 12 nt, Human
cugagcugggau

SEQ ID NO: 1515049 - RNA, 22 nt, Human
cugagcugggaugauuggaggg

SEQ ID NO: 1515050 - RNA, 15 nt, Human
cugaggaagaacggg

SEQ ID NO: 1515051 - RNA, 18 nt, Human
cugaggaagaacggggcu

SEQ ID NO: 1515052 - RNA, 14 nt, Human
cugaggaauccaga

SEQ ID NO: 1515053 - RNA, 23 nt, Human
cugaggaagaacggggcucuucu

SEQ ID NO: 1515054 - RNA, 13 nt, Human
cugaggugggagg

SEQ ID NO: 1515055 - RNA, 22 nt, Human
cugaggugggaggaucucuuga

SEQ ID NO: 1515056 - RNA, 14 nt, Human
cugaggggccucuu

SEQ ID NO: 1515057 - RNA, 23 nt, Human
cugaggaauccagacccggcugc

SEQ ID NO: 1515058 - RNA, 13 nt, Human
cugaaagaggaau

SEQ ID NO: 1515059 - RNA, 17 nt, Human
cugaaagaggaaugaag

SEQ ID NO: 1515060 - RNA, 24 nt, Human
cucuugauucauaaugacuuaagc

SEQ ID NO: 1515061 - RNA, 22 nt, Human
cucuugauucauaaugacuuaa

SEQ ID NO: 1515062 - RNA, 15 nt, Human
cucuugagccuggga

SEQ ID NO: 1515063 - RNA, 16 nt, Human
cucuugagccugggag

SEQ ID NO: 1515064 - RNA, 14 nt, Human
cucuugagccuggg

SEQ ID NO: 1515065 - RNA, 17 nt, Human
cucugcacaagcugcac

SEQ ID NO: 1515066 - RNA, 18 nt, Human
cucugcacaagcugcacc

SEQ ID NO: 1515067 - RNA, 19 nt, Human
cucugcacaagcugcaccc

SEQ ID NO: 1515068 - RNA, 14 nt, Human
cugaaaauguaugu

SEQ ID NO: 1515069 - RNA, 13 nt, Human
cugacacacagcu

SEQ ID NO: 1515070 - RNA, 15 nt, Human
cugacacacagcucu

SEQ ID NO: 1515071 - RNA, 16 nt, Human
cugacacacagcucug

SEQ ID NO: 1515072 - RNA, 17 nt, Human
cugacacacagcucugu

SEQ ID NO: 1515073 - RNA, 18 nt, Human
cugacacacagcucuguc

SEQ ID NO: 1515074 - RNA, 19 nt, Human
cugacacacagcucugucc

SEQ ID NO: 1515075 - RNA, 20 nt, Human
cugacacacagcucuguccu

SEQ ID NO: 1515076 - RNA, 21 nt, Human
cugacacacagcucuguccug

SEQ ID NO: 1515077 - RNA, 22 nt, Human
cugacacacagcucuguccugg

SEQ ID NO: 1515078 - RNA, 23 nt, Human
cugacacacagcucuguccuggg

SEQ ID NO: 1515079 - RNA, 14 nt, Human
cuccgucaacucau

SEQ ID NO: 1515080 - RNA, 23 nt, Human
cuccgcuuucuacccagcgagcc

SEQ ID NO: 1515081 - RNA, 22 nt, Human
cuccgcuuucuacccagcgagc

SEQ ID NO: 1515082 - RNA, 21 nt, Human
cuccgcuuucuacccagcgag

SEQ ID NO: 1515083 - RNA, 19 nt, Human
cuccccaugauguuuagaa

SEQ ID NO: 1515084 - RNA, 16 nt, Human
cucccucccucuuucc

SEQ ID NO: 1515085 - RNA, 15 nt, Human
cucccucuuucccuc

SEQ ID NO: 1515086 - RNA, 19 nt, Human
cucccucuuucccucccuu

SEQ ID NO: 1515087 - RNA, 14 nt, Human
cucccaccucagcc

SEQ ID NO: 1515088 - RNA, 16 nt, Human
cucccaccucagccuc

SEQ ID NO: 1515089 - RNA, 17 nt, Human
cucccaccucagccucc

SEQ ID NO: 1515090 - RNA, 18 nt, Human
cuccaggugcacaagcuc

SEQ ID NO: 1515091 - RNA, 19 nt, Human
cuccaggugcacaagcucc

SEQ ID NO: 1515092 - RNA, 20 nt, Human
cuccaggugcacaagcucca

SEQ ID NO: 1515093 - RNA, 22 nt, Human
cuccaggugcacaagcuccaag

SEQ ID NO: 1515094 - RNA, 23 nt, Human
cuccaggcuguaucccaugagcc

SEQ ID NO: 1515095 - RNA, 16 nt, Human
cuccagacacaugucc

SEQ ID NO: 1515096 - RNA, 22 nt, Human
cuccagaauuucccaaagcagu

SEQ ID NO: 1515097 - RNA, 11 nt, Human
cuccagacaca

SEQ ID NO: 1515098 - RNA, 16 nt, Human
cucagaaucucaaaua

SEQ ID NO: 1515099 - RNA, 17 nt, Human
cucagaaucucaaauaa

SEQ ID NO: 1515100 - RNA, 11 nt, Human
cucggugccuu

SEQ ID NO: 1515101 - RNA, 22 nt, Human
cuccuuuagcgcccaguugggu

SEQ ID NO: 1515102 - RNA, 22 nt, Human
cuccuagccugugccucuggga

SEQ ID NO: 1515103 - RNA, 16 nt, Human
cuccuuuagcgcccag

SEQ ID NO: 1515104 - RNA, 17 nt, Human
cuccuuuagcgcccagu

SEQ ID NO: 1515105 - RNA, 24 nt, Human
cuccuuuucacaguucucuccuuc

SEQ ID NO: 1515106 - RNA, 13 nt, Human
cucucccuuggau

SEQ ID NO: 1515107 - RNA, 21 nt, Human
cucuccgaccagacaccuuga

SEQ ID NO: 1515108 - RNA, 16 nt, Human
cucuccgaccagacac

SEQ ID NO: 1515109 - RNA, 13 nt, Human
cucuccuccuuuu

SEQ ID NO: 1515110 - RNA, 20 nt, Human
cucuccuccuuuucacaguu

SEQ ID NO: 1515111 - RNA, 19 nt, Human
cucucuggccuucggccuc

SEQ ID NO: 1515112 - RNA, 22 nt, Human
cucucuggccuucggccuccau

SEQ ID NO: 1515113 - RNA, 17 nt, Human
cucucuggccuucggcc

SEQ ID NO: 1515114 - RNA, 10 nt, Human
cucuccucug

SEQ ID NO: 1515115 - RNA, 15 nt, Human
cgguuuauauaagcu

SEQ ID NO: 1515116 - RNA, 13 nt, Human
cgguguggagaag

SEQ ID NO: 1515117 - RNA, 16 nt, Human
cguacacauuuuauuu

SEQ ID NO: 1515118 - RNA, 13 nt, Human
cguacacauuuua

SEQ ID NO: 1515119 - RNA, 15 nt, Human
cggagacggaguccc

SEQ ID NO: 1515120 - RNA, 23 nt, Human
cggagaagagcuguucacagcca

SEQ ID NO: 1515121 - RNA, 24 nt, Human
cggagaagagcuguucacagccag

SEQ ID NO: 1515122 - RNA, 15 nt, Human
cuaaagcugccagcc

SEQ ID NO: 1515123 - RNA, 16 nt, Human
cuaaaggcuaccuuug

SEQ ID NO: 1515124 - RNA, 15 nt, Human
cuaaaggcuaccuuu

SEQ ID NO: 1515125 - RNA, 14 nt, Human
cuaaagcugccagc

SEQ ID NO: 1515126 - RNA, 19 nt, Human
cuaaaggcuaccuuuguau

SEQ ID NO: 1515127 - RNA, 17 nt, Human
cuaaaggcuaccuuugu

SEQ ID NO: 1515128 - RNA, 22 nt, Human
cuaaaguguauuuuuuuacuaa

SEQ ID NO: 1515129 - RNA, 19 nt, Human
cguguccccugacagggcc

SEQ ID NO: 1515130 - RNA, 16 nt, Human
cguguccccugacagg

SEQ ID NO: 1515131 - RNA, 18 nt, Human
cguguccccugacagggc

SEQ ID NO: 1515132 - RNA, 13 nt, Human
cguuaaaauacca

SEQ ID NO: 1515133 - RNA, 14 nt, Human
cuaacuggacuggu

SEQ ID NO: 1515134 - RNA, 13 nt, Human
cgaguagcuggga

SEQ ID NO: 1515135 - RNA, 17 nt, Human
cgcuggggccaguuggu

SEQ ID NO: 1515136 - RNA, 20 nt, Human
cgcuggggccaguugguccc

SEQ ID NO: 1515137 - RNA, 16 nt, Human
cgccuuaaggauguuc

SEQ ID NO: 1515138 - RNA, 18 nt, Human
cgcugccccuggcagccc

SEQ ID NO: 1515139 - RNA, 19 nt, Human
cgcuggaccuugaacuggg

SEQ ID NO: 1515140 - RNA, 23 nt, Human
cgcuggaccuugaacuggguacu

SEQ ID NO: 1515141 - RNA, 16 nt, Human
cgcugccccuggcagc

SEQ ID NO: 1515142 - RNA, 17 nt, Human
cgcugccccuggcagcc

SEQ ID NO: 1515143 - RNA, 16 nt, Human
cuaccugaggggccuc

SEQ ID NO: 1515144 - RNA, 19 nt, Human
cuaccugaggggccucuua

SEQ ID NO: 1515145 - RNA, 23 nt, Human
cuaccugaggggccucuuauggg

SEQ ID NO: 1515146 - RNA, 14 nt, Human
cuagggaagauaau

SEQ ID NO: 1515147 - RNA, 19 nt, Human
cuaguuugauuaaauucuu

SEQ ID NO: 1515148 - RNA, 17 nt, Human
cuaguuugauuaaauuc

SEQ ID NO: 1515149 - RNA, 21 nt, Human
cuaguuugauuaaauucuugc

SEQ ID NO: 1515150 - RNA, 20 nt, Human
cuaguuugauuaaauucuug

SEQ ID NO: 1515151 - RNA, 12 nt, Human
cuaggccugggg

SEQ ID NO: 1515152 - RNA, 13 nt, Human
cuaggccugggga

SEQ ID NO: 1515153 - RNA, 14 nt, Human
cuaggccuggccag

SEQ ID NO: 1515154 - RNA, 15 nt, Human
cuaggccuggccaga

SEQ ID NO: 1515155 - RNA, 18 nt, Human
cuaggccuggccagaugc

SEQ ID NO: 1515156 - RNA, 19 nt, Human
cuaggccuggccagaugca

SEQ ID NO: 1515157 - RNA, 19 nt, Human
cuagccagaggagagagga

SEQ ID NO: 1515158 - RNA, 17 nt, Human
cuagccagaggagagag

SEQ ID NO: 1515159 - RNA, 13 nt, Human
cuaggccuggcca

SEQ ID NO: 1515160 - RNA, 20 nt, Human
cuagcauacguacacauuuu

SEQ ID NO: 1515161 - RNA, 19 nt, Human
cuagcauacguacacauuu

SEQ ID NO: 1515162 - RNA, 18 nt, Human
cuagcauacguacacauu

SEQ ID NO: 1515163 - RNA, 16 nt, Human
cuagcauacguacaca

SEQ ID NO: 1515164 - RNA, 19 nt, Human
cucagaaaacaaggaugaa

SEQ ID NO: 1515165 - RNA, 23 nt, Human
cucagaaaacaaggaugaauuaa

SEQ ID NO: 1515166 - RNA, 12 nt, Human
cucagaauauug

SEQ ID NO: 1515167 - RNA, 18 nt, Human
cucacuuguuuuauuuaa

SEQ ID NO: 1515168 - RNA, 13 nt, Human
cucaccugccccu

SEQ ID NO: 1515169 - RNA, 18 nt, Human
cucaccugccccucaacu

SEQ ID NO: 1515170 - RNA, 14 nt, Human
cucaccugccccuc

SEQ ID NO: 1515171 - RNA, 16 nt, Human
cucaccugccccucaa

SEQ ID NO: 1515172 - RNA, 13 nt, Human
cucaccucucccu

SEQ ID NO: 1515173 - RNA, 14 nt, Human
cucaccucucccuu

SEQ ID NO: 1515174 - RNA, 15 nt, Human
cucaccucucccuug

SEQ ID NO: 1515175 - RNA, 16 nt, Human
cucaccucucccuugg

SEQ ID NO: 1515176 - RNA, 17 nt, Human
cucaccucucccuugga

SEQ ID NO: 1515177 - RNA, 17 nt, Human
cucaaaacugcacuguc

SEQ ID NO: 1515178 - RNA, 13 nt, Human
cucaaaacugcac

SEQ ID NO: 1515179 - RNA, 18 nt, Human
cucaaaaaaagaaaaaga

SEQ ID NO: 1515180 - RNA, 16 nt, Human
cuauguugcccaggca

SEQ ID NO: 1515181 - RNA, 17 nt, Human
cuauguugcccaggcag

SEQ ID NO: 1515182 - RNA, 22 nt, Human
cuauguguagggcgggaggaug

SEQ ID NO: 1515183 - RNA, 15 nt, Human
cuauguugcccaggc

SEQ ID NO: 1515184 - RNA, 23 nt, Human
cuaugucauuugcuggagcucug

SEQ ID NO: 1515185 - RNA, 19 nt, Human
cuauguaucaaugaguaac

SEQ ID NO: 1515186 - RNA, 20 nt, Human
cuaucucccccagccccauc

SEQ ID NO: 1515187 - RNA, 14 nt, Human
cucacaaaggaugc

SEQ ID NO: 1515188 - RNA, 12 nt, Human
cucaaauaacua

SEQ ID NO: 1515189 - RNA, 14 nt, Human
cucacacaugagca

SEQ ID NO: 1515190 - RNA, 21 nt, Human
cucacacaugagcaucaggcc

SEQ ID NO: 1515191 - RNA, 16 nt, Human
ccugccucagccuccc

SEQ ID NO: 1515192 - RNA, 15 nt, Human
ccugccucagccucc

SEQ ID NO: 1515193 - RNA, 21 nt, Human
ccugcccaggccccugccacc

SEQ ID NO: 1515194 - RNA, 22 nt, Human
ccugcccaggccccugccaccc

SEQ ID NO: 1515195 - RNA, 18 nt, Human
ccugcccaccuggccucu

SEQ ID NO: 1515196 - RNA, 19 nt, Human
ccugcccaccuggccucug

SEQ ID NO: 1515197 - RNA, 19 nt, Human
ccugcccaggccccugcca

SEQ ID NO: 1515198 - RNA, 15 nt, Human
ccugcccaccuggcc

SEQ ID NO: 1515199 - RNA, 17 nt, Human
ccugcccaccuggccuc

SEQ ID NO: 1515200 - RNA, 16 nt, Human
ccucuuugagugaagc

SEQ ID NO: 1515201 - RNA, 15 nt, Human
ccucuuugagugaag

SEQ ID NO: 1515202 - RNA, 19 nt, Human
ccucuuucccucccuuccu

SEQ ID NO: 1515203 - RNA, 11 nt, Human
ccugagauuuc

SEQ ID NO: 1515204 - RNA, 15 nt, Human
ccugagauuucaucu

SEQ ID NO: 1515205 - RNA, 16 nt, Human
ccugagauuucaucug

SEQ ID NO: 1515206 - RNA, 17 nt, Human
ccugagauuucaucugc

SEQ ID NO: 1515207 - RNA, 18 nt, Human
ccugagauuucaucugcu

SEQ ID NO: 1515208 - RNA, 22 nt, Human
ccugagauuucaucugcucucc

SEQ ID NO: 1515209 - RNA, 23 nt, Human
ccugagauuucaucugcucuccu

SEQ ID NO: 1515210 - RNA, 15 nt, Human
ccugcaggcagccag

SEQ ID NO: 1515211 - RNA, 14 nt, Human
ccugcaggcagcca

SEQ ID NO: 1515212 - RNA, 12 nt, Human
ccugcaggcagc

SEQ ID NO: 1515213 - RNA, 13 nt, Human
ccugcaggcagcc

SEQ ID NO: 1515214 - RNA, 13 nt, Human
ccugguucucauc

SEQ ID NO: 1515215 - RNA, 17 nt, Human
ccugucucuacuaaaaa

SEQ ID NO: 1515216 - RNA, 20 nt, Human
ccugguggcagugggagcug

SEQ ID NO: 1515217 - RNA, 18 nt, Human
ccugguggcagugggagc

SEQ ID NO: 1515218 - RNA, 19 nt, Human
ccugguggcagugggagcu

SEQ ID NO: 1515219 - RNA, 13 nt, Human
ccugguguggaag

SEQ ID NO: 1515220 - RNA, 15 nt, Human
ccuggggagaaagua

SEQ ID NO: 1515221 - RNA, 17 nt, Human
ccuggauggggcugcac

SEQ ID NO: 1515222 - RNA, 18 nt, Human
ccuggauggggcugcacc

SEQ ID NO: 1515223 - RNA, 15 nt, Human
ccuggauggggcugc

SEQ ID NO: 1515224 - RNA, 14 nt, Human
ccuggaugcccagg

SEQ ID NO: 1515225 - RNA, 20 nt, Human
ccuggccccucagggucccu

SEQ ID NO: 1515226 - RNA, 21 nt, Human
ccuggccccucagggucccug

SEQ ID NO: 1515227 - RNA, 18 nt, Human
ccuggccccucagggucc

SEQ ID NO: 1515228 - RNA, 16 nt, Human
ccucaacaccucugca

SEQ ID NO: 1515229 - RNA, 15 nt, Human
ccucaaccuccuggg

SEQ ID NO: 1515230 - RNA, 21 nt, Human
ccucaacucuccuccagaguc

SEQ ID NO: 1515231 - RNA, 23 nt, Human
ccucaacucuccuccagagucag

SEQ ID NO: 1515232 - RNA, 23 nt, Human
ccucaagugauucuccugccuca

SEQ ID NO: 1515233 - RNA, 16 nt, Human
ccucaaccuccugggc

SEQ ID NO: 1515234 - RNA, 20 nt, Human
ccucaagugauucuccugcc

SEQ ID NO: 1515235 - RNA, 10 nt, Human
ccucaggccu

SEQ ID NO: 1515236 - RNA, 12 nt, Human
ccucaggcaggu

SEQ ID NO: 1515237 - RNA, 18 nt, Human
ccucaggcaggugggaug

SEQ ID NO: 1515238 - RNA, 17 nt, Human
ccucccaucacccgcua

SEQ ID NO: 1515239 - RNA, 20 nt, Human
ccuccaagaccuucuccuuc

SEQ ID NO: 1515240 - RNA, 12 nt, Human
ccucccaucacc

SEQ ID NO: 1515241 - RNA, 16 nt, Human
ccuccaagaccuucuc

SEQ ID NO: 1515242 - RNA, 17 nt, Human
ccuccaagaccuucucc

SEQ ID NO: 1515243 - RNA, 19 nt, Human
ccuccaagaccuucuccuu

SEQ ID NO: 1515244 - RNA, 12 nt, Human
ccucggagaaga

SEQ ID NO: 1515245 - RNA, 14 nt, Human
ccucggagaagagc

SEQ ID NO: 1515246 - RNA, 23 nt, Human
ccuccuuugugaggaagccgcug

SEQ ID NO: 1515247 - RNA, 18 nt, Human
ccuccuuuucacaguucu

SEQ ID NO: 1515248 - RNA, 16 nt, Human
ccucccuucucuucac

SEQ ID NO: 1515249 - RNA, 14 nt, Human
ccuccgccucuugg

SEQ ID NO: 1515250 - RNA, 12 nt, Human
ccucccuuucuc

SEQ ID NO: 1515251 - RNA, 13 nt, Human
ccucccuuucucc

SEQ ID NO: 1515252 - RNA, 14 nt, Human
ccucccuuucuccc

SEQ ID NO: 1515253 - RNA, 15 nt, Human
ccucccuuucucccc

SEQ ID NO: 1515254 - RNA, 22 nt, Human
ccuagccuuagaagucacacag

SEQ ID NO: 1515255 - RNA, 23 nt, Human
ccuagccugugccucugggacug

SEQ ID NO: 1515256 - RNA, 19 nt, Human
ccuagccuuagaagucaca

SEQ ID NO: 1515257 - RNA, 17 nt, Human
ccggccaccugcggugc

SEQ ID NO: 1515258 - RNA, 18 nt, Human
ccggcaggguccuagaaa

SEQ ID NO: 1515259 - RNA, 18 nt, Human
ccggccaccugcggugcu

SEQ ID NO: 1515260 - RNA, 15 nt, Human
cccugugggccccca

SEQ ID NO: 1515261 - RNA, 14 nt, Human
cccuccuuucacca

SEQ ID NO: 1515262 - RNA, 21 nt, Human
cccugugaguacuacaguccu

SEQ ID NO: 1515263 - RNA, 23 nt, Human
cccugugaguacuacaguccucc

SEQ ID NO: 1515264 - RNA, 15 nt, Human
cccugugauggggcc

SEQ ID NO: 1515265 - RNA, 14 nt, Human
cccuucucuccagc

SEQ ID NO: 1515266 - RNA, 19 nt, Human
cccuucucuccagccccug

SEQ ID NO: 1515267 - RNA, 21 nt, Human
cccuuuuuuggcugcugaagg

SEQ ID NO: 1515268 - RNA, 22 nt, Human
cccuuuuuuggcugcugaaggc

SEQ ID NO: 1515269 - RNA, 23 nt, Human
cccuuuuuuggcugcugaaggcu

SEQ ID NO: 1515270 - RNA, 15 nt, Human
cccuucucucaucuc

SEQ ID NO: 1515271 - RNA, 15 nt, Human
ccgaagcccaggggc

SEQ ID NO: 1515272 - RNA, 16 nt, Human
ccgaagcccaggggcc

SEQ ID NO: 1515273 - RNA, 17 nt, Human
ccgaagcccaggggccg

SEQ ID NO: 1515274 - RNA, 15 nt, Human
ccgcagagcuggccg

SEQ ID NO: 1515275 - RNA, 13 nt, Human
ccgcagagcuggc

SEQ ID NO: 1515276 - RNA, 14 nt, Human
ccgcagcccugcag

SEQ ID NO: 1515277 - RNA, 18 nt, Human
ccgcagcccugcagaggg

SEQ ID NO: 1515278 - RNA, 23 nt, Human
ccgcagcccugcagagggcacag

SEQ ID NO: 1515279 - RNA, 13 nt, Human
cccaacuccagaa

SEQ ID NO: 1515280 - RNA, 17 nt, Human
cccaacucaccccagcc

SEQ ID NO: 1515281 - RNA, 20 nt, Human
cccaacucaccccagcccca

SEQ ID NO: 1515282 - RNA, 13 nt, Human
cccaagcucugcu

SEQ ID NO: 1515283 - RNA, 14 nt, Human
cccaagcucugcuc

SEQ ID NO: 1515284 - RNA, 15 nt, Human
cccaagcucugcucc

SEQ ID NO: 1515285 - RNA, 12 nt, Human
cccacccccacc

SEQ ID NO: 1515286 - RNA, 13 nt, Human
cccacucccugca

SEQ ID NO: 1515287 - RNA, 23 nt, Human
cccacugcuuuuggucuguguga

SEQ ID NO: 1515288 - RNA, 15 nt, Human
cccaacucaccccag

SEQ ID NO: 1515289 - RNA, 16 nt, Human
cccaacucaccccagc

SEQ ID NO: 1515290 - RNA, 18 nt, Human
ccaguuggucccccuucc

SEQ ID NO: 1515291 - RNA, 20 nt, Human
ccaguuggucccccuuccau

SEQ ID NO: 1515292 - RNA, 19 nt, Human
ccauccagguucagcuugu

SEQ ID NO: 1515293 - RNA, 20 nt, Human
ccaucccaaacccuucagug

SEQ ID NO: 1515294 - RNA, 19 nt, Human
ccaucccauaugccugggc

SEQ ID NO: 1515295 - RNA, 20 nt, Human
ccaucccauaugccugggca

SEQ ID NO: 1515296 - RNA, 21 nt, Human
ccaucccauaugccugggcag

SEQ ID NO: 1515297 - RNA, 13 nt, Human
ccaguuggucccc

SEQ ID NO: 1515298 - RNA, 13 nt, Human
ccaugaguccccu

SEQ ID NO: 1515299 - RNA, 18 nt, Human
ccaugaguccccuguuug

SEQ ID NO: 1515300 - RNA, 20 nt, Human
ccaugaggaacaaggcaagg

SEQ ID NO: 1515301 - RNA, 23 nt, Human
ccaugaggaacaaggcaaggcug

SEQ ID NO: 1515302 - RNA, 23 nt, Human
ccaggcaggucuugaacuccugg

SEQ ID NO: 1515303 - RNA, 12 nt, Human
ccaggcaggucu

SEQ ID NO: 1515304 - RNA, 14 nt, Human
ccaggcaggucuug

SEQ ID NO: 1515305 - RNA, 12 nt, Human
ccaggcuggcgu

SEQ ID NO: 1515306 - RNA, 16 nt, Human
ccaggcuggcgugcag

SEQ ID NO: 1515307 - RNA, 23 nt, Human
ccagccccuucugacccaugcug

SEQ ID NO: 1515308 - RNA, 24 nt, Human
ccagccccuucugacccaugcugc

SEQ ID NO: 1515309 - RNA, 12 nt, Human
ccagcagaaaug

SEQ ID NO: 1515310 - RNA, 18 nt, Human
ccagccccauccucugua

SEQ ID NO: 1515311 - RNA, 15 nt, Human
ccagccccauccucu

SEQ ID NO: 1515312 - RNA, 17 nt, Human
ccagccccauccucugu

SEQ ID NO: 1515313 - RNA, 12 nt, Human
ccagcagagcac

SEQ ID NO: 1515314 - RNA, 13 nt, Human
ccagcagagcacc

SEQ ID NO: 1515315 - RNA, 14 nt, Human
ccagcagagcaccu

SEQ ID NO: 1515316 - RNA, 17 nt, Human
ccagccccagugcccac

SEQ ID NO: 1515317 - RNA, 17 nt, Human
ccccugaauuuaaauag

SEQ ID NO: 1515318 - RNA, 16 nt, Human
ccccugacagggccag

SEQ ID NO: 1515319 - RNA, 13 nt, Human
ccccugcacucca

SEQ ID NO: 1515320 - RNA, 13 nt, Human
ccccugaauuuaa

SEQ ID NO: 1515321 - RNA, 15 nt, Human
ccccugacaacacuc

SEQ ID NO: 1515322 - RNA, 14 nt, Human
ccccugccacccug

SEQ ID NO: 1515323 - RNA, 16 nt, Human
ccccugccacccuggg

SEQ ID NO: 1515324 - RNA, 16 nt, Human
ccccugcccccaggac

SEQ ID NO: 1515325 - RNA, 17 nt, Human
ccccugcccccaggacu

SEQ ID NO: 1515326 - RNA, 23 nt, Human
ccccugcccccaggacugggcca

SEQ ID NO: 1515327 - RNA, 18 nt, Human
ccccugcccccaggacug

SEQ ID NO: 1515328 - RNA, 19 nt, Human
ccccugcccccaggacugg

SEQ ID NO: 1515329 - RNA, 16 nt, Human
cccucaacucuccucc

SEQ ID NO: 1515330 - RNA, 20 nt, Human
cccucaacucuccuccagag

SEQ ID NO: 1515331 - RNA, 22 nt, Human
cccgggaagggggcugggacau

SEQ ID NO: 1515332 - RNA, 16 nt, Human
cccucaacaccucugc

SEQ ID NO: 1515333 - RNA, 18 nt, Human
cccgggaagggggcuggg

SEQ ID NO: 1515334 - RNA, 21 nt, Human
cccgggaagggggcugggaca

SEQ ID NO: 1515335 - RNA, 13 nt, Human
ccccuucugaccc

SEQ ID NO: 1515336 - RNA, 14 nt, Human
ccccuucugaccca

SEQ ID NO: 1515337 - RNA, 16 nt, Human
ccccuucugacccaug

SEQ ID NO: 1515338 - RNA, 17 nt, Human
cccgaauagcugggacu

SEQ ID NO: 1515339 - RNA, 18 nt, Human
cccgaauagcugggacua

SEQ ID NO: 1515340 - RNA, 22 nt, Human
cccgaauagcugggacuacagg

SEQ ID NO: 1515341 - RNA, 11 nt, Human
cccggcuccag

SEQ ID NO: 1515342 - RNA, 15 nt, Human
cccgggaagggggcu

SEQ ID NO: 1515343 - RNA, 15 nt, Human
cccggccccugcugg

SEQ ID NO: 1515344 - RNA, 16 nt, Human
cccggccccugcuggu

SEQ ID NO: 1515345 - RNA, 12 nt, Human
cccuccuccacu

SEQ ID NO: 1515346 - RNA, 13 nt, Human
cccuccuccacuc

SEQ ID NO: 1515347 - RNA, 14 nt, Human
cccuccuccacucu

SEQ ID NO: 1515348 - RNA, 16 nt, Human
cccaggaaaggcucca

SEQ ID NO: 1515349 - RNA, 13 nt, Human
cccagcacugagg

SEQ ID NO: 1515350 - RNA, 14 nt, Human
cccagcacugagga

SEQ ID NO: 1515351 - RNA, 15 nt, Human
cccagggaaguuuug

SEQ ID NO: 1515352 - RNA, 22 nt, Human
cccaggcuuagucacugagaca

SEQ ID NO: 1515353 - RNA, 17 nt, Human
cccaggaaaggcuccag

SEQ ID NO: 1515354 - RNA, 18 nt, Human
cccaggaaaggcuccagg

SEQ ID NO: 1515355 - RNA, 21 nt, Human
cccauccucuguacagagccc

SEQ ID NO: 1515356 - RNA, 22 nt, Human
cccauccucuguacagagccca

SEQ ID NO: 1515357 - RNA, 15 nt, Human
ccccagauugcaaca

SEQ ID NO: 1515358 - RNA, 20 nt, Human
ccccagauugcaacaggcug

SEQ ID NO: 1515359 - RNA, 21 nt, Human
ccccagauugcaacaggcugg

SEQ ID NO: 1515360 - RNA, 10 nt, Human
ccccagcccc

SEQ ID NO: 1515361 - RNA, 15 nt, Human
cccauuugcuccuuu

SEQ ID NO: 1515362 - RNA, 20 nt, Human
cccauucugccugcccaggc

SEQ ID NO: 1515363 - RNA, 19 nt, Human
cccauucugccugcccagg

SEQ ID NO: 1515364 - RNA, 14 nt, Human
cccauucugccugc

SEQ ID NO: 1515365 - RNA, 15 nt, Human
cccauucugccugcc

SEQ ID NO: 1515366 - RNA, 19 nt, Human
ccccgagggcugagccugg

SEQ ID NO: 1515367 - RNA, 21 nt, Human
ccccgagggcugagccugguc

SEQ ID NO: 1515368 - RNA, 14 nt, Human
ccccgcacugggcu

SEQ ID NO: 1515369 - RNA, 14 nt, Human
ccccgagggcugag

SEQ ID NO: 1515370 - RNA, 23 nt, Human
ccccgacccuugccgucuaccug

SEQ ID NO: 1515371 - RNA, 23 nt, Human
cacuccagccugagcgacaguga

SEQ ID NO: 1515372 - RNA, 13 nt, Human
cacuccagccugg

SEQ ID NO: 1515373 - RNA, 14 nt, Human
cacuccagccuggg

SEQ ID NO: 1515374 - RNA, 17 nt, Human
cacuacauucuguuaau

SEQ ID NO: 1515375 - RNA, 16 nt, Human
cacuacauucuguuaa

SEQ ID NO: 1515376 - RNA, 21 nt, Human
cacuacauuauaaaugucucu

SEQ ID NO: 1515377 - RNA, 21 nt, Human
cacuacauucuguuaaucauu

SEQ ID NO: 1515378 - RNA, 13 nt, Human
cacuccagccuga

SEQ ID NO: 1515379 - RNA, 12 nt, Human
cacuccagccug

SEQ ID NO: 1515380 - RNA, 15 nt, Human
cacggcucacugcag

SEQ ID NO: 1515381 - RNA, 14 nt, Human
cacggcucacugca

SEQ ID NO: 1515382 - RNA, 12 nt, Human
cacggccaggcc

SEQ ID NO: 1515383 - RNA, 13 nt, Human
cacggccaggcca

SEQ ID NO: 1515384 - RNA, 20 nt, Human
cacucuuauugcccacgcug

SEQ ID NO: 1515385 - RNA, 21 nt, Human
cacucuuauugcccacgcugg

SEQ ID NO: 1515386 - RNA, 22 nt, Human
cacucuuauugcccacgcugga

SEQ ID NO: 1515387 - RNA, 12 nt, Human
caccucagccuc

SEQ ID NO: 1515388 - RNA, 14 nt, Human
caccuuugaagaag

SEQ ID NO: 1515389 - RNA, 14 nt, Human
caccuuucccaucu

SEQ ID NO: 1515390 - RNA, 18 nt, Human
caccuuggcugcagggag

SEQ ID NO: 1515391 - RNA, 15 nt, Human
caccuuggcugcagg

SEQ ID NO: 1515392 - RNA, 16 nt, Human
caccuuggcugcaggg

SEQ ID NO: 1515393 - RNA, 13 nt, Human
cacuuucuagcca

SEQ ID NO: 1515394 - RNA, 18 nt, Human
cacuuucuagccagagga

SEQ ID NO: 1515395 - RNA, 16 nt, Human
cacuuucuagccagag

SEQ ID NO: 1515396 - RNA, 17 nt, Human
cacuuucuagccagagg

SEQ ID NO: 1515397 - RNA, 17 nt, Human
cacuuguguuuugcaag

SEQ ID NO: 1515398 - RNA, 18 nt, Human
cacuuguguuaugaagca

SEQ ID NO: 1515399 - RNA, 20 nt, Human
cacugggcuuggggaccaga

SEQ ID NO: 1515400 - RNA, 15 nt, Human
cacuuaaaaaugguu

SEQ ID NO: 1515401 - RNA, 22 nt, Human
cacuguuuugaaucucauaauu

SEQ ID NO: 1515402 - RNA, 18 nt, Human
cacuguugcccaggcugg

SEQ ID NO: 1515403 - RNA, 19 nt, Human
cacuguugcccaggcuggc

SEQ ID NO: 1515404 - RNA, 23 nt, Human
cacuguugcccaggcuggcgugc

SEQ ID NO: 1515405 - RNA, 17 nt, Human
cacugccaugccagcuu

SEQ ID NO: 1515406 - RNA, 20 nt, Human
cacugcagccucaaccuccu

SEQ ID NO: 1515407 - RNA, 21 nt, Human
cacugcagccucaaccuccug

SEQ ID NO: 1515408 - RNA, 22 nt, Human
cacugcagccucaaccuccugg

SEQ ID NO: 1515409 - RNA, 23 nt, Human
cacugcagccucaaccuccuggg

SEQ ID NO: 1515410 - RNA, 19 nt, Human
cacugcagccucaaccucc

SEQ ID NO: 1515411 - RNA, 14 nt, Human
cacugcagccucaa

SEQ ID NO: 1515412 - RNA, 11 nt, Human
cagaaaguuau

SEQ ID NO: 1515413 - RNA, 16 nt, Human
cagaaaguuauugaua

SEQ ID NO: 1515414 - RNA, 17 nt, Human
cagaaauguguuaucac

SEQ ID NO: 1515415 - RNA, 16 nt, Human
cagaaauguacagcaa

SEQ ID NO: 1515416 - RNA, 11 nt, Human
cagaacaguga

SEQ ID NO: 1515417 - RNA, 12 nt, Human
cagaacagugau

SEQ ID NO: 1515418 - RNA, 17 nt, Human
cagaacagugauuacca

SEQ ID NO: 1515419 - RNA, 18 nt, Human
cagaacagugauuaccag

SEQ ID NO: 1515420 - RNA, 14 nt, Human
cagaaguuucugcc

SEQ ID NO: 1515421 - RNA, 16 nt, Human
cagaaguuucugccgc

SEQ ID NO: 1515422 - RNA, 20 nt, Human
caauaaaauccauacauuug

SEQ ID NO: 1515423 - RNA, 23 nt, Human
caauaaaauccauacauuugugu

SEQ ID NO: 1515424 - RNA, 21 nt, Human
caagucagucauucagauaug

SEQ ID NO: 1515425 - RNA, 17 nt, Human
caaggcaaggcugucaa

SEQ ID NO: 1515426 - RNA, 18 nt, Human
caaggcaaggcugucaau

SEQ ID NO: 1515427 - RNA, 21 nt, Human
caaggccaaaggaagcacaug

SEQ ID NO: 1515428 - RNA, 19 nt, Human
caaggccaaaggaagcaca

SEQ ID NO: 1515429 - RNA, 20 nt, Human
caaggccaaaggaagcacau

SEQ ID NO: 1515430 - RNA, 18 nt, Human
caauggcuuacuccagga

SEQ ID NO: 1515431 - RNA, 15 nt, Human
caaugggagcucaug

SEQ ID NO: 1515432 - RNA, 18 nt, Human
cacaagagcccaggccuc

SEQ ID NO: 1515433 - RNA, 19 nt, Human
cacaagagcccaggccucc

SEQ ID NO: 1515434 - RNA, 20 nt, Human
cacaagagcccaggccuccu

SEQ ID NO: 1515435 - RNA, 18 nt, Human
cacaagcuccaagcuccc

SEQ ID NO: 1515436 - RNA, 19 nt, Human
cacaagcuccaagcuccca

SEQ ID NO: 1515437 - RNA, 13 nt, Human
caaugcuggcugu

SEQ ID NO: 1515438 - RNA, 20 nt, Human
caaugcuggcuguuggcugg

SEQ ID NO: 1515439 - RNA, 21 nt, Human
caaugcuggcuguuggcuggg

SEQ ID NO: 1515440 - RNA, 20 nt, Human
cacaagcuccaagcucccag

SEQ ID NO: 1515441 - RNA, 21 nt, Human
cacaagcuccaagcucccagg

SEQ ID NO: 1515442 - RNA, 11 nt, Human
cacacauuuuu

SEQ ID NO: 1515443 - RNA, 10 nt, Human
cacacauuuu

SEQ ID NO: 1515444 - RNA, 20 nt, Human
cacacauuuuuuaaaugcac

SEQ ID NO: 1515445 - RNA, 19 nt, Human
cacacauuuuuuaaaugca

SEQ ID NO: 1515446 - RNA, 16 nt, Human
cacacauuuuuuaaau

SEQ ID NO: 1515447 - RNA, 12 nt, Human
cacacauuuuuu

SEQ ID NO: 1515448 - RNA, 18 nt, Human
cacagcucuucuccaggc

SEQ ID NO: 1515449 - RNA, 17 nt, Human
cacagcucuucuccagg

SEQ ID NO: 1515450 - RNA, 14 nt, Human
cacagcucuucucc

SEQ ID NO: 1515451 - RNA, 15 nt, Human
cacagcucuucucca

SEQ ID NO: 1515452 - RNA, 15 nt, Human
cacagcucuguccug

SEQ ID NO: 1515453 - RNA, 16 nt, Human
cacagcucuguccugg

SEQ ID NO: 1515454 - RNA, 18 nt, Human
cacagcucuguccuggga

SEQ ID NO: 1515455 - RNA, 19 nt, Human
cacagcucuguccugggag

SEQ ID NO: 1515456 - RNA, 18 nt, Human
cacagacccugcccugug

SEQ ID NO: 1515457 - RNA, 11 nt, Human
cacagcucugu

SEQ ID NO: 1515458 - RNA, 14 nt, Human
cacagcucuguccu

SEQ ID NO: 1515459 - RNA, 14 nt, Human
cacagacccugccc

SEQ ID NO: 1515460 - RNA, 16 nt, Human
cacagacccugcccug

SEQ ID NO: 1515461 - RNA, 17 nt, Human
cacagacccugcccugu

SEQ ID NO: 1515462 - RNA, 19 nt, Human
cacaggcuuagggacagga

SEQ ID NO: 1515463 - RNA, 22 nt, Human
cacaggcuuagggacaggaccc

SEQ ID NO: 1515464 - RNA, 18 nt, Human
cacaggcuuagggacagg

SEQ ID NO: 1515465 - RNA, 21 nt, Human
cacauuuuauuuuauuaugca

SEQ ID NO: 1515466 - RNA, 20 nt, Human
cacauuuuauuuuauuaugc

SEQ ID NO: 1515467 - RNA, 19 nt, Human
cacauuuuauuuuauuaug

SEQ ID NO: 1515468 - RNA, 17 nt, Human
cacauuuuauuuuauua

SEQ ID NO: 1515469 - RNA, 17 nt, Human
caccaacauacucccau

SEQ ID NO: 1515470 - RNA, 16 nt, Human
caccaacgucugugcc

SEQ ID NO: 1515471 - RNA, 14 nt, Human
caccaacgucugug

SEQ ID NO: 1515472 - RNA, 17 nt, Human
cacccaccucagccucc

SEQ ID NO: 1515473 - RNA, 13 nt, Human
caccagccccagu

SEQ ID NO: 1515474 - RNA, 16 nt, Human
caccagccccagugcc

SEQ ID NO: 1515475 - RNA, 18 nt, Human
cacccaccucagccuccc

SEQ ID NO: 1515476 - RNA, 16 nt, Human
cacccaggagccccga

SEQ ID NO: 1515477 - RNA, 16 nt, Human
auucaaaugucuauaa

SEQ ID NO: 1515478 - RNA, 18 nt, Human
auucaacagguuuuccug

SEQ ID NO: 1515479 - RNA, 19 nt, Human
auuaugaauuacauuugua

SEQ ID NO: 1515480 - RNA, 20 nt, Human
auuaugaauuacauuuguau

SEQ ID NO: 1515481 - RNA, 22 nt, Human
auuaugaauuacauuuguauaa

SEQ ID NO: 1515482 - RNA, 11 nt, Human
auuaaauuaug

SEQ ID NO: 1515483 - RNA, 17 nt, Human
auuaaaugcccagcccc

SEQ ID NO: 1515484 - RNA, 19 nt, Human
auuaaaugcccagccccuu

SEQ ID NO: 1515485 - RNA, 18 nt, Human
auucucuaguuugauuaa

SEQ ID NO: 1515486 - RNA, 17 nt, Human
auucucuaguuugauua

SEQ ID NO: 1515487 - RNA, 22 nt, Human
auucuccuuguguuacuaaguu

SEQ ID NO: 1515488 - RNA, 21 nt, Human
auucuccuuguguuacuaagu

SEQ ID NO: 1515489 - RNA, 19 nt, Human
auucuccuuguguuacuaa

SEQ ID NO: 1515490 - RNA, 18 nt, Human
auucuccuuguguuacua

SEQ ID NO: 1515491 - RNA, 19 nt, Human
auucucuaguuugauuaaa

SEQ ID NO: 1515492 - RNA, 19 nt, Human
auucuucugcuucagccuc

SEQ ID NO: 1515493 - RNA, 20 nt, Human
auucuucugcuucagccucc

SEQ ID NO: 1515494 - RNA, 22 nt, Human
auucuucuguacgucugacagg

SEQ ID NO: 1515495 - RNA, 14 nt, Human
auucuugcaaagua

SEQ ID NO: 1515496 - RNA, 16 nt, Human
auucuugcaaaguauc

SEQ ID NO: 1515497 - RNA, 15 nt, Human
auucuugcaaaguau

SEQ ID NO: 1515498 - RNA, 14 nt, Human
auuguguugugaau

SEQ ID NO: 1515499 - RNA, 16 nt, Human
auuguugucugcaacu

SEQ ID NO: 1515500 - RNA, 17 nt, Human
auuguguugugaauguu

SEQ ID NO: 1515501 - RNA, 15 nt, Human
auuguuuaaaaucau

SEQ ID NO: 1515502 - RNA, 14 nt, Human
auuucuaugaaaua

SEQ ID NO: 1515503 - RNA, 16 nt, Human
auuucauaugcuguau

SEQ ID NO: 1515504 - RNA, 20 nt, Human
auuucauaccuaucaucuua

SEQ ID NO: 1515505 - RNA, 16 nt, Human
auuuaauaaaugugcc

SEQ ID NO: 1515506 - RNA, 16 nt, Human
auuuaaugaaagacug

SEQ ID NO: 1515507 - RNA, 20 nt, Human
auuuaaugaaagacuguaca

SEQ ID NO: 1515508 - RNA, 21 nt, Human
auuuaaugaaagacuguacaa

SEQ ID NO: 1515509 - RNA, 17 nt, Human
caacucauauuuucaug

SEQ ID NO: 1515510 - RNA, 18 nt, Human
caacucaccccagcccca

SEQ ID NO: 1515511 - RNA, 19 nt, Human
caaccccccagcacugagg

SEQ ID NO: 1515512 - RNA, 20 nt, Human
caaccccccagcacugagga

SEQ ID NO: 1515513 - RNA, 14 nt, Human
caaccccccagcac

SEQ ID NO: 1515514 - RNA, 15 nt, Human
caaccccccagcacu

SEQ ID NO: 1515515 - RNA, 16 nt, Human
caaccccccagcacug

SEQ ID NO: 1515516 - RNA, 18 nt, Human
caaccccccagcacugag

SEQ ID NO: 1515517 - RNA, 13 nt, Human
caagaugguucua

SEQ ID NO: 1515518 - RNA, 16 nt, Human
caagaugguucuagca

SEQ ID NO: 1515519 - RNA, 20 nt, Human
caagaauuucuaggacugaa

SEQ ID NO: 1515520 - RNA, 19 nt, Human
caagacccaaaaggcagaa

SEQ ID NO: 1515521 - RNA, 18 nt, Human
caagaccacguuucuaaa

SEQ ID NO: 1515522 - RNA, 17 nt, Human
caagaccacguuucuaa

SEQ ID NO: 1515523 - RNA, 22 nt, Human
caagaauugaagcaggacuaaa

SEQ ID NO: 1515524 - RNA, 14 nt, Human
caacucuccuccag

SEQ ID NO: 1515525 - RNA, 21 nt, Human
caacaacauguauaauauuuu

SEQ ID NO: 1515526 - RNA, 22 nt, Human
caacaacauguauaauauuuuu

SEQ ID NO: 1515527 - RNA, 22 nt, Human
caaaguagaagucuuagaugua

SEQ ID NO: 1515528 - RNA, 21 nt, Human
caaaguaucccuacuguaauu

SEQ ID NO: 1515529 - RNA, 19 nt, Human
caaaguaucccuacuguaa

SEQ ID NO: 1515530 - RNA, 18 nt, Human
caaagggugaaaauuauu

SEQ ID NO: 1515531 - RNA, 18 nt, Human
caaagauauuuugcuuug

SEQ ID NO: 1515532 - RNA, 22 nt, Human
caaagcagugcaugcugucccu

SEQ ID NO: 1515533 - RNA, 16 nt, Human
caaagauauuuugcuu

SEQ ID NO: 1515534 - RNA, 14 nt, Human
caaagauauuuugc

SEQ ID NO: 1515535 - RNA, 18 nt, Human
caaagcagugcaugcugu

SEQ ID NO: 1515536 - RNA, 21 nt, Human
caaagcagugcaugcuguccc

SEQ ID NO: 1515537 - RNA, 21 nt, Human
caaaucuuaacuugaaggagu

SEQ ID NO: 1515538 - RNA, 23 nt, Human
caaaugcuguaacuuucugaaau

SEQ ID NO: 1515539 - RNA, 14 nt, Human
auuuuauaucuugu

SEQ ID NO: 1515540 - RNA, 16 nt, Human
auuuuauaucuuguag

SEQ ID NO: 1515541 - RNA, 19 nt, Human
auuuuagggguagcauuug

SEQ ID NO: 1515542 - RNA, 21 nt, Human
auuuuauaucaauuuaaaaaa

SEQ ID NO: 1515543 - RNA, 12 nt, Human
auuuuauaucuu

SEQ ID NO: 1515544 - RNA, 14 nt, Human
auuuuuagacagag

SEQ ID NO: 1515545 - RNA, 19 nt, Human
auuuuuaagugcugcauuu

SEQ ID NO: 1515546 - RNA, 18 nt, Human
auuuuuaagugcugcauu

SEQ ID NO: 1515547 - RNA, 16 nt, Human
auuuuuaagugcugca

SEQ ID NO: 1515548 - RNA, 15 nt, Human
auuuuuauauuugaa

SEQ ID NO: 1515549 - RNA, 16 nt, Human
auuuuuauauuugaaa

SEQ ID NO: 1515550 - RNA, 18 nt, Human
auuuuuuuuuccuucagu

SEQ ID NO: 1515551 - RNA, 16 nt, Human
auuuuuuugagacaga

SEQ ID NO: 1515552 - RNA, 23 nt, Human
auuuuuuuuuccuucagugccuu

SEQ ID NO: 1515553 - RNA, 20 nt, Human
auuuuuuuuuccuucagugc

SEQ ID NO: 1515554 - RNA, 22 nt, Human
auuuuuuuuuccuucagugccu

SEQ ID NO: 1515555 - RNA, 21 nt, Human
caaaaggauaaugaauacuuu

SEQ ID NO: 1515556 - RNA, 17 nt, Human
caaacauauauaacaau

SEQ ID NO: 1515557 - RNA, 16 nt, Human
caaacagucucaggaa

SEQ ID NO: 1515558 - RNA, 17 nt, Human
caaacagucucaggaaa

SEQ ID NO: 1515559 - RNA, 14 nt, Human
caaacccuucagug

SEQ ID NO: 1515560 - RNA, 14 nt, Human
caaaccaaauaaaa

SEQ ID NO: 1515561 - RNA, 15 nt, Human
caaaccaaauaaaaa

SEQ ID NO: 1515562 - RNA, 13 nt, Human
caucugcucuccu

SEQ ID NO: 1515563 - RNA, 14 nt, Human
caucugcucuccuu

SEQ ID NO: 1515564 - RNA, 15 nt, Human
caucugcucuccuuc

SEQ ID NO: 1515565 - RNA, 21 nt, Human
cauccccuguagagugggagc

SEQ ID NO: 1515566 - RNA, 14 nt, Human
cauccccuguagag

SEQ ID NO: 1515567 - RNA, 19 nt, Human
caucccauaugccugggca

SEQ ID NO: 1515568 - RNA, 20 nt, Human
caucaggccaggcccucugc

SEQ ID NO: 1515569 - RNA, 16 nt, Human
caucaggccaggcccu

SEQ ID NO: 1515570 - RNA, 19 nt, Human
caucaggccaggcccucug

SEQ ID NO: 1515571 - RNA, 15 nt, Human
caucaggccaggccc

SEQ ID NO: 1515572 - RNA, 19 nt, Human
cauagcagagaaugaaagg

SEQ ID NO: 1515573 - RNA, 22 nt, Human
cauagcagagaaugaaagggcc

SEQ ID NO: 1515574 - RNA, 23 nt, Human
cauagcagagaaugaaagggccc

SEQ ID NO: 1515575 - RNA, 13 nt, Human
cauaauuuauaca

SEQ ID NO: 1515576 - RNA, 20 nt, Human
cauaauuuauacaggucaua

SEQ ID NO: 1515577 - RNA, 15 nt, Human
cagugggagcugccu

SEQ ID NO: 1515578 - RNA, 22 nt, Human
cauaugccugggcagaaggaag

SEQ ID NO: 1515579 - RNA, 15 nt, Human
cauaugccugggcag

SEQ ID NO: 1515580 - RNA, 20 nt, Human
cauaugccugggcagaagga

SEQ ID NO: 1515581 - RNA, 22 nt, Human
cauauucaggaagcucagggcc

SEQ ID NO: 1515582 - RNA, 20 nt, Human
cauauucaggaagcucaggg

SEQ ID NO: 1515583 - RNA, 14 nt, Human
cauauucaggaagc

SEQ ID NO: 1515584 - RNA, 15 nt, Human
cauauucaggaagcu

SEQ ID NO: 1515585 - RNA, 24 nt, Human
caugauuaaccacuucagcugacu

SEQ ID NO: 1515586 - RNA, 22 nt, Human
caugauuaaccacuucagcuga

SEQ ID NO: 1515587 - RNA, 23 nt, Human
caugauuaaccacuucagcugac

SEQ ID NO: 1515588 - RNA, 14 nt, Human
caugcaccacgggc

SEQ ID NO: 1515589 - RNA, 16 nt, Human
caugcacgugugugca

SEQ ID NO: 1515590 - RNA, 13 nt, Human
caugcuccuggcc

SEQ ID NO: 1515591 - RNA, 12 nt, Human
caugcugcccug

SEQ ID NO: 1515592 - RNA, 13 nt, Human
caugcugcccugu

SEQ ID NO: 1515593 - RNA, 15 nt, Human
caugaagguuucuga

SEQ ID NO: 1515594 - RNA, 18 nt, Human
caugaagguuucugaaaa

SEQ ID NO: 1515595 - RNA, 21 nt, Human
caugacacgaauauugcugau

SEQ ID NO: 1515596 - RNA, 23 nt, Human
caugacacgaauauugcugaugg

SEQ ID NO: 1515597 - RNA, 23 nt, Human
caugaaguaauaugcacacauuu

SEQ ID NO: 1515598 - RNA, 22 nt, Human
caugaaguaauaugcacacauu

SEQ ID NO: 1515599 - RNA, 19 nt, Human
caugaaguaauaugcacac

SEQ ID NO: 1515600 - RNA, 15 nt, Human
caugaaguaauaugc

SEQ ID NO: 1515601 - RNA, 14 nt, Human
caugcugcccugug

SEQ ID NO: 1515602 - RNA, 15 nt, Human
caugcugcccuguga

SEQ ID NO: 1515603 - RNA, 19 nt, Human
caugucaagagucgcugug

SEQ ID NO: 1515604 - RNA, 21 nt, Human
caugucaagagucgcugugcc

SEQ ID NO: 1515605 - RNA, 15 nt, Human
cauguauaauauuuu

SEQ ID NO: 1515606 - RNA, 18 nt, Human
cauguauaauauuuuuaa

SEQ ID NO: 1515607 - RNA, 20 nt, Human
cauguauaauauuuuuaauu

SEQ ID NO: 1515608 - RNA, 22 nt, Human
cauuaggugugacugaauuucu

SEQ ID NO: 1515609 - RNA, 23 nt, Human
cauuaucuagauacuguaucaug

SEQ ID NO: 1515610 - RNA, 12 nt, Human
cauuaucucaaa

SEQ ID NO: 1515611 - RNA, 13 nt, Human
cauuaucucaaaa

SEQ ID NO: 1515612 - RNA, 18 nt, Human
cauguccaagaagcccag

SEQ ID NO: 1515613 - RNA, 19 nt, Human
cauguccaagaagcccagg

SEQ ID NO: 1515614 - RNA, 20 nt, Human
cauguccaagaagcccagga

SEQ ID NO: 1515615 - RNA, 12 nt, Human
cauguuggccag

SEQ ID NO: 1515616 - RNA, 13 nt, Human
cauguuggccagg

SEQ ID NO: 1515617 - RNA, 21 nt, Human
cauuaugaugugggucaagga

SEQ ID NO: 1515618 - RNA, 12 nt, Human
cauuccuguucc

SEQ ID NO: 1515619 - RNA, 14 nt, Human
cauuuauucugcuc

SEQ ID NO: 1515620 - RNA, 15 nt, Human
cauuuauucugcuca

SEQ ID NO: 1515621 - RNA, 15 nt, Human
cauuuggauuggaug

SEQ ID NO: 1515622 - RNA, 21 nt, Human
cauuuggagacacaacuauuu

SEQ ID NO: 1515623 - RNA, 17 nt, Human
cauuugucacacacuuu

SEQ ID NO: 1515624 - RNA, 21 nt, Human
cauuguaaaugugcuuuuaaa

SEQ ID NO: 1515625 - RNA, 19 nt, Human
cauuguaaauaguauuuga

SEQ ID NO: 1515626 - RNA, 16 nt, Human
cauuuuuuaaaugcac

SEQ ID NO: 1515627 - RNA, 15 nt, Human
cauuuuuuaaaugca

SEQ ID NO: 1515628 - RNA, 19 nt, Human
cauuuuuuaaaugcaccug

SEQ ID NO: 1515629 - RNA, 15 nt, Human
ccaaggccaaaggaa

SEQ ID NO: 1515630 - RNA, 20 nt, Human
ccaagcuggucccacucagu

SEQ ID NO: 1515631 - RNA, 15 nt, Human
ccaagaagcccagga

SEQ ID NO: 1515632 - RNA, 14 nt, Human
ccaagaagcccagg

SEQ ID NO: 1515633 - RNA, 12 nt, Human
ccaagcuggucc

SEQ ID NO: 1515634 - RNA, 19 nt, Human
ccaagcuggucccacucag

SEQ ID NO: 1515635 - RNA, 22 nt, Human
ccaaauggaaaugggcagagca

SEQ ID NO: 1515636 - RNA, 13 nt, Human
ccaacgucugugc

SEQ ID NO: 1515637 - RNA, 15 nt, Human
ccaacgucugugcca

SEQ ID NO: 1515638 - RNA, 24 nt, Human
ccaacggcaagggaacaaguacuu

SEQ ID NO: 1515639 - RNA, 16 nt, Human
ccaacgucugugccau

SEQ ID NO: 1515640 - RNA, 13 nt, Human
ccaagaagcccag

SEQ ID NO: 1515641 - RNA, 15 nt, Human
ccaaauaaugucucu

SEQ ID NO: 1515642 - RNA, 16 nt, Human
ccaaauaaugucucug

SEQ ID NO: 1515643 - RNA, 17 nt, Human
ccaaauaaugucucugu

SEQ ID NO: 1515644 - RNA, 16 nt, Human
ccaaggccaaaggaag

SEQ ID NO: 1515645 - RNA, 16 nt, Human
ccacagaagcuccagg

SEQ ID NO: 1515646 - RNA, 18 nt, Human
ccaccagucugacuguuu

SEQ ID NO: 1515647 - RNA, 18 nt, Human
ccacagaagcuccaggua

SEQ ID NO: 1515648 - RNA, 22 nt, Human
ccacagagaaaguacuucucca

SEQ ID NO: 1515649 - RNA, 13 nt, Human
ccacgcccccacu

SEQ ID NO: 1515650 - RNA, 16 nt, Human
ccacgagggugccgug

SEQ ID NO: 1515651 - RNA, 18 nt, Human
ccaccuuggcugcaggga

SEQ ID NO: 1515652 - RNA, 19 nt, Human
ccaccuuggcugcagggag

SEQ ID NO: 1515653 - RNA, 13 nt, Human
ccacgcuggagug

SEQ ID NO: 1515654 - RNA, 18 nt, Human
ccacgcuggaccuugaac

SEQ ID NO: 1515655 - RNA, 18 nt, Human
ccaccaucaugucuggcu

SEQ ID NO: 1515656 - RNA, 19 nt, Human
ccaccaucaugucuggcua

SEQ ID NO: 1515657 - RNA, 12 nt, Human
ccaccuuggcug

SEQ ID NO: 1515658 - RNA, 14 nt, Human
ccaccuuggcugca

SEQ ID NO: 1515659 - RNA, 15 nt, Human
ccaccuuggcugcag

SEQ ID NO: 1515660 - RNA, 16 nt, Human
ccaccuuggcugcagg

SEQ ID NO: 1515661 - RNA, 22 nt, Human
cagugcacuaauguguaagaca

SEQ ID NO: 1515662 - RNA, 19 nt, Human
cagucugauucccaagcuc

SEQ ID NO: 1515663 - RNA, 20 nt, Human
cagucugauucccaagcucu

SEQ ID NO: 1515664 - RNA, 19 nt, Human
cagugcaugcugucccuua

SEQ ID NO: 1515665 - RNA, 22 nt, Human
cagugcaugcugucccuuacgu

SEQ ID NO: 1515666 - RNA, 23 nt, Human
cagugcaugcugucccuuacgug

SEQ ID NO: 1515667 - RNA, 11 nt, Human
cagugggagcu

SEQ ID NO: 1515668 - RNA, 12 nt, Human
cagugcccacag

SEQ ID NO: 1515669 - RNA, 22 nt, Human
cagugcaguuugguguguccuc

SEQ ID NO: 1515670 - RNA, 15 nt, Human
cagugccaaaaacaa

SEQ ID NO: 1515671 - RNA, 15 nt, Human
cagucucaggaaauc

SEQ ID NO: 1515672 - RNA, 15 nt, Human
cagucaccucaugga

SEQ ID NO: 1515673 - RNA, 22 nt, Human
cagucaccccggccaccugcgg

SEQ ID NO: 1515674 - RNA, 20 nt, Human
cagucaccccggccaccugc

SEQ ID NO: 1515675 - RNA, 19 nt, Human
cagucaccccggccaccug

SEQ ID NO: 1515676 - RNA, 18 nt, Human
cagguuuaagcuguuacu

SEQ ID NO: 1515677 - RNA, 21 nt, Human
cagguuggugggggccucggu

SEQ ID NO: 1515678 - RNA, 16 nt, Human
cagguuuaagcuguua

SEQ ID NO: 1515679 - RNA, 14 nt, Human
caggugcgaaagga

SEQ ID NO: 1515680 - RNA, 18 nt, Human
caggugcuaggaacacuc

SEQ ID NO: 1515681 - RNA, 20 nt, Human
caggugcuaggaacacuccu

SEQ ID NO: 1515682 - RNA, 14 nt, Human
cagguugguggggg

SEQ ID NO: 1515683 - RNA, 20 nt, Human
caggugauccacccaccuca

SEQ ID NO: 1515684 - RNA, 14 nt, Human
caggguuggccccu

SEQ ID NO: 1515685 - RNA, 12 nt, Human
caggguuggccc

SEQ ID NO: 1515686 - RNA, 16 nt, Human
caggugauccacccac

SEQ ID NO: 1515687 - RNA, 17 nt, Human
caggugauccacccacc

SEQ ID NO: 1515688 - RNA, 22 nt, Human
cagggucucacucugucgccca

SEQ ID NO: 1515689 - RNA, 21 nt, Human
cagggucucacucugucgccc

SEQ ID NO: 1515690 - RNA, 18 nt, Human
cagggucucacucugucg

SEQ ID NO: 1515691 - RNA, 16 nt, Human
caggguguggggccau

SEQ ID NO: 1515692 - RNA, 17 nt, Human
caggguguggggccaug

SEQ ID NO: 1515693 - RNA, 22 nt, Human
caggguguggggccaugccucc

SEQ ID NO: 1515694 - RNA, 12 nt, Human
caggccuccuac

SEQ ID NO: 1515695 - RNA, 14 nt, Human
caggccugagauuu

SEQ ID NO: 1515696 - RNA, 16 nt, Human
caggccugagauuuca

SEQ ID NO: 1515697 - RNA, 18 nt, Human
caggccugagauuucauc

SEQ ID NO: 1515698 - RNA, 19 nt, Human
caggccugagauuucaucu

SEQ ID NO: 1515699 - RNA, 21 nt, Human
caggccugagauuucaucugc

SEQ ID NO: 1515700 - RNA, 23 nt, Human
caggccugagauuucaucugcuc

SEQ ID NO: 1515701 - RNA, 19 nt, Human
cagggaggacgcucucugg

SEQ ID NO: 1515702 - RNA, 17 nt, Human
cagggaggacgcucucu

SEQ ID NO: 1515703 - RNA, 18 nt, Human
cagggaggacgcucucug

SEQ ID NO: 1515704 - RNA, 17 nt, Human
caggcugggcuucagug

SEQ ID NO: 1515705 - RNA, 19 nt, Human
caggcugggcuucaguggc

SEQ ID NO: 1515706 - RNA, 15 nt, Human
caggcuggcgugcag

SEQ ID NO: 1515707 - RNA, 16 nt, Human
caggcugggcuucagu

SEQ ID NO: 1515708 - RNA, 22 nt, Human
cagggaguccgaaagggacuug

SEQ ID NO: 1515709 - RNA, 18 nt, Human
cagggaggugaccccagg

SEQ ID NO: 1515710 - RNA, 18 nt, Human
caggcacccaccaucaug

SEQ ID NO: 1515711 - RNA, 22 nt, Human
caggcacccaccaucaugucug

SEQ ID NO: 1515712 - RNA, 23 nt, Human
caggcacccaccaucaugucugg

SEQ ID NO: 1515713 - RNA, 18 nt, Human
caggaggccagccuugac

SEQ ID NO: 1515714 - RNA, 17 nt, Human
caggaggccagccuuga

SEQ ID NO: 1515715 - RNA, 15 nt, Human
caggagggaggcagg

SEQ ID NO: 1515716 - RNA, 21 nt, Human
caggagggaggcaggggaggg

SEQ ID NO: 1515717 - RNA, 15 nt, Human
caggaggccagccuu

SEQ ID NO: 1515718 - RNA, 16 nt, Human
caggaggccagccuug

SEQ ID NO: 1515719 - RNA, 18 nt, Human
caggaccccagcucugcg

SEQ ID NO: 1515720 - RNA, 16 nt, Human
caggaccccagcucug

SEQ ID NO: 1515721 - RNA, 17 nt, Human
caggaccccagcucugc

SEQ ID NO: 1515722 - RNA, 23 nt, Human
caggccagagggagugacagagg

SEQ ID NO: 1515723 - RNA, 19 nt, Human
caggccagagggagugaca

SEQ ID NO: 1515724 - RNA, 21 nt, Human
caggccagagggagugacaga

SEQ ID NO: 1515725 - RNA, 16 nt, Human
cagcuccaagaauuuc

SEQ ID NO: 1515726 - RNA, 19 nt, Human
cagcuccaagaauuucuag

SEQ ID NO: 1515727 - RNA, 13 nt, Human
cagcuccagcuca

SEQ ID NO: 1515728 - RNA, 14 nt, Human
cagcuccagcucac

SEQ ID NO: 1515729 - RNA, 15 nt, Human
cagcuccagcucacc

SEQ ID NO: 1515730 - RNA, 22 nt, Human
cagcuccagcucaccagcccca

SEQ ID NO: 1515731 - RNA, 16 nt, Human
cagcuccagcucacca

SEQ ID NO: 1515732 - RNA, 17 nt, Human
cagcuccagcucaccag

SEQ ID NO: 1515733 - RNA, 18 nt, Human
cagcuccagcucaccagc

SEQ ID NO: 1515734 - RNA, 20 nt, Human
cagcuccagcucaccagccc

SEQ ID NO: 1515735 - RNA, 16 nt, Human
cagcuccccucggaga

SEQ ID NO: 1515736 - RNA, 17 nt, Human
cagcuccccucggagaa

SEQ ID NO: 1515737 - RNA, 18 nt, Human
cagcuccccucggagaag

SEQ ID NO: 1515738 - RNA, 20 nt, Human
cagcuccccucggagaagag

SEQ ID NO: 1515739 - RNA, 14 nt, Human
caggaaaggcucca

SEQ ID NO: 1515740 - RNA, 15 nt, Human
caggaaaggcuccag

SEQ ID NO: 1515741 - RNA, 23 nt, Human
caggaaaucaaauaugcaaagca

SEQ ID NO: 1515742 - RNA, 19 nt, Human
cagcugugcucuggacagg

SEQ ID NO: 1515743 - RNA, 18 nt, Human
cagcugugcucuggacag

SEQ ID NO: 1515744 - RNA, 15 nt, Human
cagcuucauuuccug

SEQ ID NO: 1515745 - RNA, 18 nt, Human
cagcuucauuuccugugu

SEQ ID NO: 1515746 - RNA, 19 nt, Human
cagcuucauuuccuguguc

SEQ ID NO: 1515747 - RNA, 15 nt, Human
cagcccuucuuucca

SEQ ID NO: 1515748 - RNA, 19 nt, Human
cagcccuucuuuccacaga

SEQ ID NO: 1515749 - RNA, 20 nt, Human
cagcccuucuuuccacagaa

SEQ ID NO: 1515750 - RNA, 21 nt, Human
cagccgagauagccaaggcca

SEQ ID NO: 1515751 - RNA, 12 nt, Human
cagccccuggau

SEQ ID NO: 1515752 - RNA, 13 nt, Human
cagccccuggaug

SEQ ID NO: 1515753 - RNA, 14 nt, Human
cagccccuggaugc

SEQ ID NO: 1515754 - RNA, 22 nt, Human
cagccccuggaugcagccucac

SEQ ID NO: 1515755 - RNA, 16 nt, Human
cagcccuuagcaggga

SEQ ID NO: 1515756 - RNA, 21 nt, Human
cagcccuuagcagggaaacag

SEQ ID NO: 1515757 - RNA, 17 nt, Human
cagccccuggaugcagc

SEQ ID NO: 1515758 - RNA, 18 nt, Human
cagccccuggaugcagcc

SEQ ID NO: 1515759 - RNA, 19 nt, Human
cagccccuggaugcagccu

SEQ ID NO: 1515760 - RNA, 21 nt, Human
cagccccuggaugcagccuca

SEQ ID NO: 1515761 - RNA, 15 nt, Human
cagcggggacagcuc

SEQ ID NO: 1515762 - RNA, 16 nt, Human
cagcggggacagcucc

SEQ ID NO: 1515763 - RNA, 17 nt, Human
cagcggggacagcuccu

SEQ ID NO: 1515764 - RNA, 18 nt, Human
cagccugagcgacaguga

SEQ ID NO: 1515765 - RNA, 19 nt, Human
cagccugagcgacagugag

SEQ ID NO: 1515766 - RNA, 22 nt, Human
cagccugagcgacagugagacu

SEQ ID NO: 1515767 - RNA, 22 nt, Human
cagcacagccucuuagaugcag

SEQ ID NO: 1515768 - RNA, 22 nt, Human
cagccaggccacaagacccuug

SEQ ID NO: 1515769 - RNA, 12 nt, Human
cagccaggccac

SEQ ID NO: 1515770 - RNA, 13 nt, Human
cagccaggccaca

SEQ ID NO: 1515771 - RNA, 19 nt, Human
cagcauauucaggaagcuc

SEQ ID NO: 1515772 - RNA, 22 nt, Human
cagcauauucaggaagcucagg

SEQ ID NO: 1515773 - RNA, 23 nt, Human
cagcauauucaggaagcucaggg

SEQ ID NO: 1515774 - RNA, 22 nt, Human
cagcaguugaaaagacuccaaa

SEQ ID NO: 1515775 - RNA, 17 nt, Human
cagcaguugaaaagacu

SEQ ID NO: 1515776 - RNA, 20 nt, Human
cagcaguugaaaagacucca

SEQ ID NO: 1515777 - RNA, 21 nt, Human
cagcaguugaaaagacuccaa

SEQ ID NO: 1515778 - RNA, 15 nt, Human
cagauaugauucaaa

SEQ ID NO: 1515779 - RNA, 16 nt, Human
cagauaugauucaaau

SEQ ID NO: 1515780 - RNA, 17 nt, Human
cagauaugauucaaaug

SEQ ID NO: 1515781 - RNA, 19 nt, Human
cagauaugauucaaauguc

SEQ ID NO: 1515782 - RNA, 20 nt, Human
cagagucagaaguuucugcc

SEQ ID NO: 1515783 - RNA, 18 nt, Human
cagaggggguggccuccc

SEQ ID NO: 1515784 - RNA, 19 nt, Human
cagaggggguggccuccca

SEQ ID NO: 1515785 - RNA, 20 nt, Human
cagaggggguggccucccaa

SEQ ID NO: 1515786 - RNA, 22 nt, Human
cagagggccugcaagggaguga

SEQ ID NO: 1515787 - RNA, 19 nt, Human
cagaaguuucugccgcagc

SEQ ID NO: 1515788 - RNA, 20 nt, Human
cagaaguuugagaucagccu

SEQ ID NO: 1515789 - RNA, 22 nt, Human
cagaaguuugagaucagccugg

SEQ ID NO: 1515790 - RNA, 23 nt, Human
cagaaguuugagaucagccuggg

SEQ ID NO: 1515791 - RNA, 18 nt, Human
cagagcugccaccugccu

SEQ ID NO: 1515792 - RNA, 20 nt, Human
cagagcugggauguuucugu

SEQ ID NO: 1515793 - RNA, 23 nt, Human
gaugcuucucacugccaugccag

SEQ ID NO: 1515794 - RNA, 17 nt, Human
gauguagaggagaaacu

SEQ ID NO: 1515795 - RNA, 16 nt, Human
gaugcuuguacauaau

SEQ ID NO: 1515796 - RNA, 14 nt, Human
gaugcuuguacaua

SEQ ID NO: 1515797 - RNA, 20 nt, Human
gaucuggguucacugcaacc

SEQ ID NO: 1515798 - RNA, 22 nt, Human
gaguugauagcacagacccugc

SEQ ID NO: 1515799 - RNA, 18 nt, Human
gaucuggguucacugcaa

SEQ ID NO: 1515800 - RNA, 22 nt, Human
gauuuuuuuuuccuucagugcc

SEQ ID NO: 1515801 - RNA, 12 nt, Human
gauuucaucugc

SEQ ID NO: 1515802 - RNA, 15 nt, Human
gauuucaucugcucu

SEQ ID NO: 1515803 - RNA, 17 nt, Human
gauuucaucugcucucc

SEQ ID NO: 1515804 - RNA, 23 nt, Human
gauuuuuuuuuccuucagugccu

SEQ ID NO: 1515805 - RNA, 12 nt, Human
gauucuuuccug

SEQ ID NO: 1515806 - RNA, 13 nt, Human
gauuucacucucc

SEQ ID NO: 1515807 - RNA, 16 nt, Human
gauuucacucuccuug

SEQ ID NO: 1515808 - RNA, 17 nt, Human
gauuucacucuccuugg

SEQ ID NO: 1515809 - RNA, 18 nt, Human
gauuucacucuccuuggu

SEQ ID NO: 1515810 - RNA, 19 nt, Human
gauucuccugccucagccu

SEQ ID NO: 1515811 - RNA, 11 nt, Human
gauucuccuuc

SEQ ID NO: 1515812 - RNA, 20 nt, Human
gauucuccugccucagccuc

SEQ ID NO: 1515813 - RNA, 21 nt, Human
gauucuccugccucagccucc

SEQ ID NO: 1515814 - RNA, 23 nt, Human
gauuuaacagaaauguacagcaa

SEQ ID NO: 1515815 - RNA, 20 nt, Human
gauuuaacagaaauguacag

SEQ ID NO: 1515816 - RNA, 21 nt, Human
gauucuucugcuucagccucc

SEQ ID NO: 1515817 - RNA, 23 nt, Human
gauucuuauggacaaugacccag

SEQ ID NO: 1515818 - RNA, 22 nt, Human
gcaacccuggugaccagcacca

SEQ ID NO: 1515819 - RNA, 18 nt, Human
gcaaccuccgccucuugg

SEQ ID NO: 1515820 - RNA, 19 nt, Human
gcaaccuccgccucuuggg

SEQ ID NO: 1515821 - RNA, 15 nt, Human
gcaaaagaugcuucu

SEQ ID NO: 1515822 - RNA, 18 nt, Human
gcaacccccagccugcua

SEQ ID NO: 1515823 - RNA, 16 nt, Human
gcaaaagaugcuucuc

SEQ ID NO: 1515824 - RNA, 12 nt, Human
gcacacaccaga

SEQ ID NO: 1515825 - RNA, 14 nt, Human
gcacacaccagagc

SEQ ID NO: 1515826 - RNA, 15 nt, Human
gcacacaccagagcc

SEQ ID NO: 1515827 - RNA, 16 nt, Human
gcacacaccagagccc

SEQ ID NO: 1515828 - RNA, 17 nt, Human
gcacacaccagagccca

SEQ ID NO: 1515829 - RNA, 18 nt, Human
gcacacaccagagcccac

SEQ ID NO: 1515830 - RNA, 19 nt, Human
gcacacaccagagcccacc

SEQ ID NO: 1515831 - RNA, 18 nt, Human
gcaauagucaaauugugu

SEQ ID NO: 1515832 - RNA, 21 nt, Human
gcaauaaagcagcguuucuau

SEQ ID NO: 1515833 - RNA, 11 nt, Human
gcaauaaagca

SEQ ID NO: 1515834 - RNA, 12 nt, Human
gcaccuccugcc

SEQ ID NO: 1515835 - RNA, 20 nt, Human
gcacacaccagagcccaccu

SEQ ID NO: 1515836 - RNA, 11 nt, Human
gcacacauuuu

SEQ ID NO: 1515837 - RNA, 12 nt, Human
gcacacauuuuu

SEQ ID NO: 1515838 - RNA, 14 nt, Human
gcacacauuuuuua

SEQ ID NO: 1515839 - RNA, 18 nt, Human
gcaccggcuggccuggcc

SEQ ID NO: 1515840 - RNA, 17 nt, Human
gcaccggcuggccuggc

SEQ ID NO: 1515841 - RNA, 15 nt, Human
gcaccggcuggccug

SEQ ID NO: 1515842 - RNA, 16 nt, Human
gcaccggcuggccugg

SEQ ID NO: 1515843 - RNA, 17 nt, Human
gcacuccagccugggug

SEQ ID NO: 1515844 - RNA, 12 nt, Human
gcacuccccugc

SEQ ID NO: 1515845 - RNA, 22 nt, Human
gcacuauagccuaggugacaga

SEQ ID NO: 1515846 - RNA, 14 nt, Human
gccaagaauucuua

SEQ ID NO: 1515847 - RNA, 18 nt, Human
gccaagaauucuuaaaua

SEQ ID NO: 1515848 - RNA, 15 nt, Human
gcauuuaaaagauac

SEQ ID NO: 1515849 - RNA, 12 nt, Human
gcauuuaaaaga

SEQ ID NO: 1515850 - RNA, 16 nt, Human
gcauuugaaaauuuug

SEQ ID NO: 1515851 - RNA, 14 nt, Human
gcauuugaaaauuu

SEQ ID NO: 1515852 - RNA, 17 nt, Human
gcauccuggcacccggc

SEQ ID NO: 1515853 - RNA, 21 nt, Human
gcauccuggcacccggccccu

SEQ ID NO: 1515854 - RNA, 22 nt, Human
gcauccuggcacccggccccug

SEQ ID NO: 1515855 - RNA, 23 nt, Human
gcauccuggcacccggccccugc

SEQ ID NO: 1515856 - RNA, 18 nt, Human
gcauggcauauuuuucac

SEQ ID NO: 1515857 - RNA, 18 nt, Human
gcaugugaugagaggaaa

SEQ ID NO: 1515858 - RNA, 16 nt, Human
gcauuguaaaugugcu

SEQ ID NO: 1515859 - RNA, 17 nt, Human
gcaugugaugagaggaa

SEQ ID NO: 1515860 - RNA, 19 nt, Human
gcaugggaaugaaugucag

SEQ ID NO: 1515861 - RNA, 16 nt, Human
gcaugggaaugaaugu

SEQ ID NO: 1515862 - RNA, 19 nt, Human
gccaaggccaaaggaagca

SEQ ID NO: 1515863 - RNA, 17 nt, Human
gccaaggccaaaggaag

SEQ ID NO: 1515864 - RNA, 11 nt, Human
gccaaggccaa

SEQ ID NO: 1515865 - RNA, 16 nt, Human
gcauaccacuuuuguu

SEQ ID NO: 1515866 - RNA, 15 nt, Human
gcauaccacuuuugu

SEQ ID NO: 1515867 - RNA, 19 nt, Human
gcagggacuugaacccaua

SEQ ID NO: 1515868 - RNA, 15 nt, Human
gcauaaaaauuagcc

SEQ ID NO: 1515869 - RNA, 14 nt, Human
gcaguugccaguca

SEQ ID NO: 1515870 - RNA, 23 nt, Human
gcaguugccagucaccccggcca

SEQ ID NO: 1515871 - RNA, 16 nt, Human
gcacuuuguucuggcu

SEQ ID NO: 1515872 - RNA, 18 nt, Human
gcaggcucucaggccagc

SEQ ID NO: 1515873 - RNA, 17 nt, Human
gcaggcucucaggccag

SEQ ID NO: 1515874 - RNA, 22 nt, Human
gcagggaaacagcuaaugggac

SEQ ID NO: 1515875 - RNA, 19 nt, Human
gcagcuugaggguugggcu

SEQ ID NO: 1515876 - RNA, 21 nt, Human
gcagcuugaggguugggcugg

SEQ ID NO: 1515877 - RNA, 22 nt, Human
gcaggcucgggcuccccagccc

SEQ ID NO: 1515878 - RNA, 12 nt, Human
gcaggcucucag

SEQ ID NO: 1515879 - RNA, 13 nt, Human
gcaggcucucagg

SEQ ID NO: 1515880 - RNA, 14 nt, Human
gcaggcucucaggc

SEQ ID NO: 1515881 - RNA, 15 nt, Human
gcaggcucucaggcc

SEQ ID NO: 1515882 - RNA, 16 nt, Human
gcaggcucucaggcca

SEQ ID NO: 1515883 - RNA, 16 nt, Human
gcagcuugaggguugg

SEQ ID NO: 1515884 - RNA, 15 nt, Human
gcagcuuauucacaa

SEQ ID NO: 1515885 - RNA, 22 nt, Human
gcagcugcgguccacccaggag

SEQ ID NO: 1515886 - RNA, 23 nt, Human
gcagcugcgguccacccaggagc

SEQ ID NO: 1515887 - RNA, 13 nt, Human
gcagcugcuuuug

SEQ ID NO: 1515888 - RNA, 20 nt, Human
gcagcugcuuuugucuaugg

SEQ ID NO: 1515889 - RNA, 15 nt, Human
gaggcucugcccuug

SEQ ID NO: 1515890 - RNA, 17 nt, Human
gaggcucugcccuuggu

SEQ ID NO: 1515891 - RNA, 12 nt, Human
gaggcucugccc

SEQ ID NO: 1515892 - RNA, 13 nt, Human
gaggcucugcccu

SEQ ID NO: 1515893 - RNA, 14 nt, Human
gaggcucugcccuu

SEQ ID NO: 1515894 - RNA, 20 nt, Human
gaggccagagacacaagccu

SEQ ID NO: 1515895 - RNA, 14 nt, Human
gaggcugccucucc

SEQ ID NO: 1515896 - RNA, 12 nt, Human
gaggggaacaga

SEQ ID NO: 1515897 - RNA, 12 nt, Human
gagggcuccaga

SEQ ID NO: 1515898 - RNA, 13 nt, Human
gagggcuccagac

SEQ ID NO: 1515899 - RNA, 14 nt, Human
gagggcuccagaca

SEQ ID NO: 1515900 - RNA, 15 nt, Human
gagggcuccagacac

SEQ ID NO: 1515901 - RNA, 17 nt, Human
gaggugggauccuccag

SEQ ID NO: 1515902 - RNA, 14 nt, Human
gagucacuggaaca

SEQ ID NO: 1515903 - RNA, 21 nt, Human
gagucacuggaacacuaauga

SEQ ID NO: 1515904 - RNA, 15 nt, Human
gaggugggauccucc

SEQ ID NO: 1515905 - RNA, 16 nt, Human
gaggugggauccucca

SEQ ID NO: 1515906 - RNA, 18 nt, Human
gagucagaaguuucugcc

SEQ ID NO: 1515907 - RNA, 14 nt, Human
gagugagacucugu

SEQ ID NO: 1515908 - RNA, 18 nt, Human
gagugagacucugucuca

SEQ ID NO: 1515909 - RNA, 24 nt, Human
gagugagcacuaaggugugcucug

SEQ ID NO: 1515910 - RNA, 18 nt, Human
gagugcagugagccgaga

SEQ ID NO: 1515911 - RNA, 22 nt, Human
gaguugauacuacaguuuguua

SEQ ID NO: 1515912 - RNA, 21 nt, Human
gaguugauagcacagacccug

SEQ ID NO: 1515913 - RNA, 19 nt, Human
gaguugauacuacaguuug

SEQ ID NO: 1515914 - RNA, 18 nt, Human
gagugccuuacacaaugg

SEQ ID NO: 1515915 - RNA, 17 nt, Human
gagcuguucacagccag

SEQ ID NO: 1515916 - RNA, 20 nt, Human
gagcugccuguucagcucca

SEQ ID NO: 1515917 - RNA, 17 nt, Human
gagcggagaaaggaagg

SEQ ID NO: 1515918 - RNA, 15 nt, Human
gagcugccuguucag

SEQ ID NO: 1515919 - RNA, 16 nt, Human
gagcugccuguucagc

SEQ ID NO: 1515920 - RNA, 19 nt, Human
gagcugccuguucagcucc

SEQ ID NO: 1515921 - RNA, 15 nt, Human
gagcgcuccugccgc

SEQ ID NO: 1515922 - RNA, 21 nt, Human
gagcgcuccugccgcagagcu

SEQ ID NO: 1515923 - RNA, 22 nt, Human
gagcgcuccugccgcagagcug

SEQ ID NO: 1515924 - RNA, 23 nt, Human
gagcgcuccugccgcagagcugg

SEQ ID NO: 1515925 - RNA, 15 nt, Human
gagcgacagugagac

SEQ ID NO: 1515926 - RNA, 12 nt, Human
gagccuuccagg

SEQ ID NO: 1515927 - RNA, 13 nt, Human
gagccuuccaggg

SEQ ID NO: 1515928 - RNA, 20 nt, Human
gagcaucaggccaggcccuc

SEQ ID NO: 1515929 - RNA, 22 nt, Human
gagcaucaggccaggcccucug

SEQ ID NO: 1515930 - RNA, 15 nt, Human
gaccaucccugaagg

SEQ ID NO: 1515931 - RNA, 18 nt, Human
gaccaucccugaaggccc

SEQ ID NO: 1515932 - RNA, 16 nt, Human
gaccaucccugaaggc

SEQ ID NO: 1515933 - RNA, 17 nt, Human
gaccaucccugaaggcc

SEQ ID NO: 1515934 - RNA, 16 nt, Human
gaccauucuccaccug

SEQ ID NO: 1515935 - RNA, 17 nt, Human
gaccauucuccaccugc

SEQ ID NO: 1515936 - RNA, 16 nt, Human
gacccuauugcugcuu

SEQ ID NO: 1515937 - RNA, 12 nt, Human
gacccggcugcg

SEQ ID NO: 1515938 - RNA, 13 nt, Human
gacccggcugcgu

SEQ ID NO: 1515939 - RNA, 20 nt, Human
gacaguauggcagcuuuccu

SEQ ID NO: 1515940 - RNA, 21 nt, Human
gacagcccuucuuuccacaga

SEQ ID NO: 1515941 - RNA, 20 nt, Human
gacagaaagcagaacaguga

SEQ ID NO: 1515942 - RNA, 14 nt, Human
gacagaaagcagaa

SEQ ID NO: 1515943 - RNA, 16 nt, Human
gacagcuccuucuguc

SEQ ID NO: 1515944 - RNA, 13 nt, Human
gacagcuccuucu

SEQ ID NO: 1515945 - RNA, 14 nt, Human
gacagcuccuucug

SEQ ID NO: 1515946 - RNA, 15 nt, Human
gacagcuccuucugu

SEQ ID NO: 1515947 - RNA, 22 nt, Human
gacuuuguuaguuucuccaagc

SEQ ID NO: 1515948 - RNA, 23 nt, Human
gacuuuucuguccgagcuuugaa

SEQ ID NO: 1515949 - RNA, 21 nt, Human
gacuuuucuguccgagcuuug

SEQ ID NO: 1515950 - RNA, 16 nt, Human
gacuguuuucucuuga

SEQ ID NO: 1515951 - RNA, 18 nt, Human
gacuguuuucucuugaga

SEQ ID NO: 1515952 - RNA, 14 nt, Human
gacuuuggaaagac

SEQ ID NO: 1515953 - RNA, 14 nt, Human
gacuuuggaaagag

SEQ ID NO: 1515954 - RNA, 14 nt, Human
gacucaaugcacug

SEQ ID NO: 1515955 - RNA, 17 nt, Human
gacucaaugcacugaca

SEQ ID NO: 1515956 - RNA, 22 nt, Human
gacuguacaaaguagaagucuu

SEQ ID NO: 1515957 - RNA, 17 nt, Human
gagaagcggcuggcagc

SEQ ID NO: 1515958 - RNA, 12 nt, Human
gacgcugugcug

SEQ ID NO: 1515959 - RNA, 15 nt, Human
gacgcugugcugccc

SEQ ID NO: 1515960 - RNA, 13 nt, Human
gacgcugugcugc

SEQ ID NO: 1515961 - RNA, 22 nt, Human
gacuauucaaacagucucagga

SEQ ID NO: 1515962 - RNA, 18 nt, Human
gacuauauuguacacacc

SEQ ID NO: 1515963 - RNA, 15 nt, Human
gacuauucaaacagu

SEQ ID NO: 1515964 - RNA, 16 nt, Human
gacuauucaaacaguc

SEQ ID NO: 1515965 - RNA, 21 nt, Human
gaaacaagucagucauucaga

SEQ ID NO: 1515966 - RNA, 23 nt, Human
gaaaauuauuuuguucauacaua

SEQ ID NO: 1515967 - RNA, 23 nt, Human
gaaaagaaaaaugagccuggcaa

SEQ ID NO: 1515968 - RNA, 21 nt, Human
gaaaacuuuaugcuaagugaa

SEQ ID NO: 1515969 - RNA, 20 nt, Human
gaaaauuauuuuguucauac

SEQ ID NO: 1515970 - RNA, 21 nt, Human
gaaaauuauuuuguucauaca

SEQ ID NO: 1515971 - RNA, 22 nt, Human
gaaaauuauuuuguucauacau

SEQ ID NO: 1515972 - RNA, 14 nt, Human
gaaaagacuccaaa

SEQ ID NO: 1515973 - RNA, 18 nt, Human
gaaaagacuccaaagaaa

SEQ ID NO: 1515974 - RNA, 16 nt, Human
gaaaagacuccaaaga

SEQ ID NO: 1515975 - RNA, 17 nt, Human
gaaaagacuccaaagaa

SEQ ID NO: 1515976 - RNA, 17 nt, Human
gaaaugaaagcagggac

SEQ ID NO: 1515977 - RNA, 15 nt, Human
gaaagggcccagaga

SEQ ID NO: 1515978 - RNA, 16 nt, Human
gaaagggcccagagag

SEQ ID NO: 1515979 - RNA, 13 nt, Human
gaaagggcccaga

SEQ ID NO: 1515980 - RNA, 16 nt, Human
gaaaggcuccaggagc

SEQ ID NO: 1515981 - RNA, 13 nt, Human
gaaaggcuccagg

SEQ ID NO: 1515982 - RNA, 14 nt, Human
gaaaggcuccagga

SEQ ID NO: 1515983 - RNA, 15 nt, Human
gaaaggcuccaggag

SEQ ID NO: 1515984 - RNA, 17 nt, Human
gaaacuggauuaaacuu

SEQ ID NO: 1515985 - RNA, 13 nt, Human
gaaacuggauuaa

SEQ ID NO: 1515986 - RNA, 18 nt, Human
gaaagaaaaucaggcugg

SEQ ID NO: 1515987 - RNA, 17 nt, Human
gaagcacagugaucaag

SEQ ID NO: 1515988 - RNA, 14 nt, Human
gaagcacaugccuc

SEQ ID NO: 1515989 - RNA, 22 nt, Human
gaagcacaugccucucucaggc

SEQ ID NO: 1515990 - RNA, 13 nt, Human
gaagcacagcuuc

SEQ ID NO: 1515991 - RNA, 14 nt, Human
gaagcacagcuuca

SEQ ID NO: 1515992 - RNA, 16 nt, Human
gaagacucauucuucu

SEQ ID NO: 1515993 - RNA, 17 nt, Human
gaagacucauucuucug

SEQ ID NO: 1515994 - RNA, 18 nt, Human
gaagacucauucuucugu

SEQ ID NO: 1515995 - RNA, 16 nt, Human
gaagcaccauaacuuu

SEQ ID NO: 1515996 - RNA, 21 nt, Human
gaagacacugaugggcaaccc

SEQ ID NO: 1515997 - RNA, 16 nt, Human
gaagacacugaugggc

SEQ ID NO: 1515998 - RNA, 13 nt, Human
gaagacagagcua

SEQ ID NO: 1515999 - RNA, 15 nt, Human
gaagacagagcuaca

SEQ ID NO: 1516000 - RNA, 12 nt, Human
gaagacagcucu

SEQ ID NO: 1516001 - RNA, 13 nt, Human
gaagacagcucuu

SEQ ID NO: 1516002 - RNA, 14 nt, Human
gaagacagcucuua

SEQ ID NO: 1516003 - RNA, 15 nt, Human
gaagacagcucuuau

SEQ ID NO: 1516004 - RNA, 22 nt, Human
gaaccauggucggaaaacaugc

SEQ ID NO: 1516005 - RNA, 23 nt, Human
gaaccaccacacccagcccacuu

SEQ ID NO: 1516006 - RNA, 16 nt, Human
gaacccaaguccaagc

SEQ ID NO: 1516007 - RNA, 17 nt, Human
gaacccaaguccaagca

SEQ ID NO: 1516008 - RNA, 13 nt, Human
gaacugaaaucau

SEQ ID NO: 1516009 - RNA, 17 nt, Human
gaacugauguaaguaaa

SEQ ID NO: 1516010 - RNA, 13 nt, Human
gaacuccuggccu

SEQ ID NO: 1516011 - RNA, 17 nt, Human
gaacccgggaggcagag

SEQ ID NO: 1516012 - RNA, 19 nt, Human
gaacccgggaggcagaggu

SEQ ID NO: 1516013 - RNA, 15 nt, Human
gaacuccuggccuca

SEQ ID NO: 1516014 - RNA, 14 nt, Human
gaacuccuggccuc

SEQ ID NO: 1516015 - RNA, 18 nt, Human
gaaccaccacacccagcc

SEQ ID NO: 1516016 - RNA, 20 nt, Human
gaaccaccacacccagccca

SEQ ID NO: 1516017 - RNA, 21 nt, Human
gaaccaccacacccagcccac

SEQ ID NO: 1516018 - RNA, 22 nt, Human
gaaccaccacacccagcccacu

SEQ ID NO: 1516019 - RNA, 22 nt, Human
cuuuguauucucuccuguaccu

SEQ ID NO: 1516020 - RNA, 21 nt, Human
cuuuuauaaacuuuaccuuuu

SEQ ID NO: 1516021 - RNA, 20 nt, Human
cuuuuauaaacuuuaccuuu

SEQ ID NO: 1516022 - RNA, 17 nt, Human
cuuuguauucucuccug

SEQ ID NO: 1516023 - RNA, 20 nt, Human
cuuugauucuccuucagccc

SEQ ID NO: 1516024 - RNA, 16 nt, Human
cuuugauucuccuuca

SEQ ID NO: 1516025 - RNA, 18 nt, Human
cuuugauucuccuucagc

SEQ ID NO: 1516026 - RNA, 19 nt, Human
cuuugauucuccuucagcc

SEQ ID NO: 1516027 - RNA, 22 nt, Human
cuuugauucuccuucagcccuc

SEQ ID NO: 1516028 - RNA, 18 nt, Human
cuuugacgccaucccagc

SEQ ID NO: 1516029 - RNA, 16 nt, Human
cuuugacgccauccca

SEQ ID NO: 1516030 - RNA, 17 nt, Human
cuuugacgccaucccag

SEQ ID NO: 1516031 - RNA, 17 nt, Human
cuuucuacccagcgagc

SEQ ID NO: 1516032 - RNA, 15 nt, Human
cuuucuacccagcga

SEQ ID NO: 1516033 - RNA, 16 nt, Human
cuuucuacccagcgag

SEQ ID NO: 1516034 - RNA, 17 nt, Human
cuugggucccagggaag

SEQ ID NO: 1516035 - RNA, 22 nt, Human
cuugguagaagcccuucuaccu

SEQ ID NO: 1516036 - RNA, 19 nt, Human
cuuggucugugagaugcua

SEQ ID NO: 1516037 - RNA, 15 nt, Human
cuugguccugcugca

SEQ ID NO: 1516038 - RNA, 16 nt, Human
cuuggucugugagaug

SEQ ID NO: 1516039 - RNA, 14 nt, Human
cuugguccugcugc

SEQ ID NO: 1516040 - RNA, 19 nt, Human
cuuggugucgggcaugaca

SEQ ID NO: 1516041 - RNA, 20 nt, Human
cuuggugucgggcaugacac

SEQ ID NO: 1516042 - RNA, 19 nt, Human
cuugucuuuggacccugag

SEQ ID NO: 1516043 - RNA, 18 nt, Human
cuugucuuuggacccuga

SEQ ID NO: 1516044 - RNA, 13 nt, Human
cuugucuuuggac

SEQ ID NO: 1516045 - RNA, 15 nt, Human
cuugucuuuggaccc

SEQ ID NO: 1516046 - RNA, 20 nt, Human
cuuucacccuuuucuguuug

SEQ ID NO: 1516047 - RNA, 14 nt, Human
cuuucacccuuuuc

SEQ ID NO: 1516048 - RNA, 15 nt, Human
cuuucacccuuuucu

SEQ ID NO: 1516049 - RNA, 15 nt, Human
cuucugacccaugcu

SEQ ID NO: 1516050 - RNA, 13 nt, Human
cuucuucagagac

SEQ ID NO: 1516051 - RNA, 14 nt, Human
cuucuucagagacu

SEQ ID NO: 1516052 - RNA, 18 nt, Human
cuucuucagagacuccug

SEQ ID NO: 1516053 - RNA, 20 nt, Human
cuucucacauuuauauuuuu

SEQ ID NO: 1516054 - RNA, 13 nt, Human
cuucucacauuua

SEQ ID NO: 1516055 - RNA, 13 nt, Human
cuucuaaguaaaa

SEQ ID NO: 1516056 - RNA, 17 nt, Human
cuucuaaguaaaaccac

SEQ ID NO: 1516057 - RNA, 22 nt, Human
cuucuaaguaaaaccacagcag

SEQ ID NO: 1516058 - RNA, 21 nt, Human
cuucuaaguaaaaccacagca

SEQ ID NO: 1516059 - RNA, 13 nt, Human
cuuccuccuggug

SEQ ID NO: 1516060 - RNA, 22 nt, Human
cuuccucuuuccaucuacccuc

SEQ ID NO: 1516061 - RNA, 12 nt, Human
cuugauucauaa

SEQ ID NO: 1516062 - RNA, 12 nt, Human
cuugcaaaguau

SEQ ID NO: 1516063 - RNA, 23 nt, Human
cuuggauuguccccgacccuugc

SEQ ID NO: 1516064 - RNA, 24 nt, Human
cuuggauuguccccgacccuugcc

SEQ ID NO: 1516065 - RNA, 18 nt, Human
cuugaauuguaaggaaug

SEQ ID NO: 1516066 - RNA, 16 nt, Human
cuugacaucaacugca

SEQ ID NO: 1516067 - RNA, 23 nt, Human
cuugaucaacaucuuuucuugcc

SEQ ID NO: 1516068 - RNA, 17 nt, Human
cuugaucaacaucuuuu

SEQ ID NO: 1516069 - RNA, 22 nt, Human
cuugauauccucuuugagugaa

SEQ ID NO: 1516070 - RNA, 17 nt, Human
cuugauauccucuuuga

SEQ ID NO: 1516071 - RNA, 18 nt, Human
cuugauguguuaucucuu

SEQ ID NO: 1516072 - RNA, 19 nt, Human
cuguuggcugggggccuca

SEQ ID NO: 1516073 - RNA, 22 nt, Human
cuguuggcugggggccucagug

SEQ ID NO: 1516074 - RNA, 14 nt, Human
cuguuggcuggggg

SEQ ID NO: 1516075 - RNA, 13 nt, Human
cuuaaauaaugug

SEQ ID NO: 1516076 - RNA, 14 nt, Human
cuuaaaacaacacu

SEQ ID NO: 1516077 - RNA, 15 nt, Human
cuuaccagcagagca

SEQ ID NO: 1516078 - RNA, 12 nt, Human
cuguucacagcc

SEQ ID NO: 1516079 - RNA, 16 nt, Human
cuuaccagcagagcac

SEQ ID NO: 1516080 - RNA, 22 nt, Human
cuuagcucauucuccuuguguu

SEQ ID NO: 1516081 - RNA, 17 nt, Human
cuuagcuccccuccaac

SEQ ID NO: 1516082 - RNA, 23 nt, Human
cuuagcucauucuccuuguguua

SEQ ID NO: 1516083 - RNA, 14 nt, Human
cuuagcuccccucc

SEQ ID NO: 1516084 - RNA, 21 nt, Human
cuuagggaaggauacaaaagc

SEQ ID NO: 1516085 - RNA, 18 nt, Human
cuuagggacaggacccca

SEQ ID NO: 1516086 - RNA, 20 nt, Human
cuuagggacaggaccccagc

SEQ ID NO: 1516087 - RNA, 19 nt, Human
cuuagggaaggauacaaaa

SEQ ID NO: 1516088 - RNA, 23 nt, Human
cuuagggacaggaccccagcucu

SEQ ID NO: 1516089 - RNA, 21 nt, Human
cuuagggacaggaccccagcu

SEQ ID NO: 1516090 - RNA, 22 nt, Human
cuuagggacaggaccccagcuc

SEQ ID NO: 1516091 - RNA, 13 nt, Human
cuguuauaaucuu

SEQ ID NO: 1516092 - RNA, 19 nt, Human
cuguuauaaucuuucacag

SEQ ID NO: 1516093 - RNA, 21 nt, Human
cugugcugcccugcccaccug

SEQ ID NO: 1516094 - RNA, 17 nt, Human
cugugucagcauagaag

SEQ ID NO: 1516095 - RNA, 19 nt, Human
cugugucagcauagaagua

SEQ ID NO: 1516096 - RNA, 15 nt, Human
cugugcugcccugcc

SEQ ID NO: 1516097 - RNA, 17 nt, Human
cugugcugcccugccca

SEQ ID NO: 1516098 - RNA, 18 nt, Human
cugugcugcccugcccac

SEQ ID NO: 1516099 - RNA, 19 nt, Human
cugugcugcccugcccacc

SEQ ID NO: 1516100 - RNA, 12 nt, Human
cugugcugcccu

SEQ ID NO: 1516101 - RNA, 13 nt, Human
cugugcugcccug

SEQ ID NO: 1516102 - RNA, 14 nt, Human
cugugcugcccugc

SEQ ID NO: 1516103 - RNA, 20 nt, Human
cugucaauuacaggaaguac

SEQ ID NO: 1516104 - RNA, 23 nt, Human
cugucaauuacaggaaguacugg

SEQ ID NO: 1516105 - RNA, 16 nt, Human
cugucgcccagucugg

SEQ ID NO: 1516106 - RNA, 22 nt, Human
cuggugacaugucuuuucuugc

SEQ ID NO: 1516107 - RNA, 13 nt, Human
cuguagaguggga

SEQ ID NO: 1516108 - RNA, 11 nt, Human
cugggacacag

SEQ ID NO: 1516109 - RNA, 14 nt, Human
cuggccuagcauac

SEQ ID NO: 1516110 - RNA, 22 nt, Human
cuggccccucagggucccuggu

SEQ ID NO: 1516111 - RNA, 19 nt, Human
cuggcagaguugaagacag

SEQ ID NO: 1516112 - RNA, 11 nt, Human
cuggcagccca

SEQ ID NO: 1516113 - RNA, 12 nt, Human
cuggcagccccu

SEQ ID NO: 1516114 - RNA, 13 nt, Human
cuggcagccccug

SEQ ID NO: 1516115 - RNA, 17 nt, Human
cuggcagaguugaagac

SEQ ID NO: 1516116 - RNA, 18 nt, Human
cuggcagaguugaagaca

SEQ ID NO: 1516117 - RNA, 15 nt, Human
cuggguggggcagug

SEQ ID NO: 1516118 - RNA, 18 nt, Human
cuggguucacugcaaccu

SEQ ID NO: 1516119 - RNA, 20 nt, Human
cuggguucacugcaaccucc

SEQ ID NO: 1516120 - RNA, 12 nt, Human
cugggcagaagg

SEQ ID NO: 1516121 - RNA, 15 nt, Human
cugggcagaaggaag

SEQ ID NO: 1516122 - RNA, 16 nt, Human
cugggcagaaggaaga

SEQ ID NO: 1516123 - RNA, 18 nt, Human
cugggccacuucugggug

SEQ ID NO: 1516124 - RNA, 23 nt, Human
cugccucucccaucacuucccua

SEQ ID NO: 1516125 - RNA, 15 nt, Human
cugccucucccauca

SEQ ID NO: 1516126 - RNA, 22 nt, Human
cugccucucccaucacuucccu

SEQ ID NO: 1516127 - RNA, 17 nt, Human
cugccuguucagcucca

SEQ ID NO: 1516128 - RNA, 18 nt, Human
cugccuguucagcuccag

SEQ ID NO: 1516129 - RNA, 20 nt, Human
cugccuguugggccaggagc

SEQ ID NO: 1516130 - RNA, 19 nt, Human
cugccuguucagcuccagc

SEQ ID NO: 1516131 - RNA, 18 nt, Human
cugcugacuguuuucucu

SEQ ID NO: 1516132 - RNA, 21 nt, Human
cugcugacuguuuucucuuga

SEQ ID NO: 1516133 - RNA, 20 nt, Human
cugccuguucagcuccagcu

SEQ ID NO: 1516134 - RNA, 23 nt, Human
cugccuguugggccaggagccuc

SEQ ID NO: 1516135 - RNA, 21 nt, Human
cugccuguugggccaggagcc

SEQ ID NO: 1516136 - RNA, 22 nt, Human
cugccuguugggccaggagccu

SEQ ID NO: 1516137 - RNA, 17 nt, Human
cugcuaucaaagagguu

SEQ ID NO: 1516138 - RNA, 14 nt, Human
cuggagaaaaugga

SEQ ID NO: 1516139 - RNA, 12 nt, Human
cuggacugaggc

SEQ ID NO: 1516140 - RNA, 13 nt, Human
cuggacugaggcc

SEQ ID NO: 1516141 - RNA, 15 nt, Human
cuggacugaggccug

SEQ ID NO: 1516142 - RNA, 16 nt, Human
cuggacugaggccuga

SEQ ID NO: 1516143 - RNA, 18 nt, Human
cuggacugaggccugagc

SEQ ID NO: 1516144 - RNA, 14 nt, Human
cuggaagcacagcu

SEQ ID NO: 1516145 - RNA, 21 nt, Human
cugcuuuugucuaugggacuc

SEQ ID NO: 1516146 - RNA, 19 nt, Human
cugcuuuuuaaagaaugcu

SEQ ID NO: 1516147 - RNA, 14 nt, Human
cugcuucaaauauu

SEQ ID NO: 1516148 - RNA, 19 nt, Human
cugcuucaaauauuucccu

SEQ ID NO: 1516149 - RNA, 12 nt, Human
cugcuucaagga

SEQ ID NO: 1516150 - RNA, 13 nt, Human
cugcuucaaggau

SEQ ID NO: 1516151 - RNA, 21 nt, Human
cugcuucaaggauccugagcc

SEQ ID NO: 1516152 - RNA, 22 nt, Human
cugcuucaaggauccugagcca

SEQ ID NO: 1516153 - RNA, 23 nt, Human
cugcuucaaggauccugagccag

SEQ ID NO: 1516154 - RNA, 20 nt, Human
cugcuuuugucuaugggacu

SEQ ID NO: 1516155 - RNA, 17 nt, Human
gcucacugcagccucaa

SEQ ID NO: 1516156 - RNA, 15 nt, Human
gcucacugcagccuc

SEQ ID NO: 1516157 - RNA, 16 nt, Human
gcucacugcagccuca

SEQ ID NO: 1516158 - RNA, 11 nt, Human
gcucacugcag

SEQ ID NO: 1516159 - RNA, 12 nt, Human
gcucacugcagc

SEQ ID NO: 1516160 - RNA, 13 nt, Human
gcucacugcagcc

SEQ ID NO: 1516161 - RNA, 14 nt, Human
gcucacugcagccu

SEQ ID NO: 1516162 - RNA, 22 nt, Human
gcuauuuuuauuuguuugugca

SEQ ID NO: 1516163 - RNA, 20 nt, Human
gcuauucaguaauaacucua

SEQ ID NO: 1516164 - RNA, 14 nt, Human
gcucagagagggug

SEQ ID NO: 1516165 - RNA, 13 nt, Human
gcucagagagggu

SEQ ID NO: 1516166 - RNA, 17 nt, Human
gcucaggugucccugca

SEQ ID NO: 1516167 - RNA, 16 nt, Human
gcucaggugucccugc

SEQ ID NO: 1516168 - RNA, 14 nt, Human
gcucaggugucccu

SEQ ID NO: 1516169 - RNA, 16 nt, Human
gcuaggccuggccaga

SEQ ID NO: 1516170 - RNA, 17 nt, Human
gcuaggccuggccagau

SEQ ID NO: 1516171 - RNA, 23 nt, Human
gcuaggccuggccagaugcacca

SEQ ID NO: 1516172 - RNA, 13 nt, Human
gcuaugcauuuga

SEQ ID NO: 1516173 - RNA, 19 nt, Human
gcuauucaguaauaacucu

SEQ ID NO: 1516174 - RNA, 12 nt, Human
gcuaugcauuug

SEQ ID NO: 1516175 - RNA, 21 nt, Human
gcuagugugguguuuccuggc

SEQ ID NO: 1516176 - RNA, 22 nt, Human
gcuagugugguguuuccuggca

SEQ ID NO: 1516177 - RNA, 18 nt, Human
gcguuucuaugacacaug

SEQ ID NO: 1516178 - RNA, 23 nt, Human
gcgugcacacaccagagcccacc

SEQ ID NO: 1516179 - RNA, 20 nt, Human
gcgugcacacaccagagccc

SEQ ID NO: 1516180 - RNA, 21 nt, Human
gcgggaggauguucugggaca

SEQ ID NO: 1516181 - RNA, 22 nt, Human
gcgggaggauguucugggacac

SEQ ID NO: 1516182 - RNA, 23 nt, Human
gcuaagugauccucccaccucag

SEQ ID NO: 1516183 - RNA, 15 nt, Human
gcuaaugggacacua

SEQ ID NO: 1516184 - RNA, 13 nt, Human
gcuaaugggacac

SEQ ID NO: 1516185 - RNA, 12 nt, Human
gcuagaacuccc

SEQ ID NO: 1516186 - RNA, 13 nt, Human
gcuagaacucccu

SEQ ID NO: 1516187 - RNA, 14 nt, Human
gcuagaacucccuu

SEQ ID NO: 1516188 - RNA, 15 nt, Human
gcuagaacucccuuu

SEQ ID NO: 1516189 - RNA, 16 nt, Human
gcuagaacucccuuuc

SEQ ID NO: 1516190 - RNA, 18 nt, Human
gcuagaacucccuuucaa

SEQ ID NO: 1516191 - RNA, 15 nt, Human
gcuccacuuggucug

SEQ ID NO: 1516192 - RNA, 18 nt, Human
gcuccagcucaccagccc

SEQ ID NO: 1516193 - RNA, 18 nt, Human
gcuccacuuggucuguga

SEQ ID NO: 1516194 - RNA, 19 nt, Human
gcuccacuuggucugugag

SEQ ID NO: 1516195 - RNA, 20 nt, Human
gcuccagcucaccagcccca

SEQ ID NO: 1516196 - RNA, 21 nt, Human
gcuccagcucaccagccccag

SEQ ID NO: 1516197 - RNA, 17 nt, Human
gcucccaggcauucccc

SEQ ID NO: 1516198 - RNA, 14 nt, Human
gcuccuggcccacu

SEQ ID NO: 1516199 - RNA, 15 nt, Human
gcuccuggcccacug

SEQ ID NO: 1516200 - RNA, 20 nt, Human
gcuccuggcccacugcaucg

SEQ ID NO: 1516201 - RNA, 18 nt, Human
gcuccuggcccacugcau

SEQ ID NO: 1516202 - RNA, 19 nt, Human
gcuccuggcccacugcauc

SEQ ID NO: 1516203 - RNA, 21 nt, Human
gcuccccucggagaagagcug

SEQ ID NO: 1516204 - RNA, 23 nt, Human
gcucugcaagaauugaagcagga

SEQ ID NO: 1516205 - RNA, 17 nt, Human
gcucugaucauccacug

SEQ ID NO: 1516206 - RNA, 11 nt, Human
gcucugcccuu

SEQ ID NO: 1516207 - RNA, 18 nt, Human
gcccugcagagggcacag

SEQ ID NO: 1516208 - RNA, 11 nt, Human
gcccugccucc

SEQ ID NO: 1516209 - RNA, 17 nt, Human
gcccugcccaccuggcc

SEQ ID NO: 1516210 - RNA, 20 nt, Human
gcccugcccaccuggccucu

SEQ ID NO: 1516211 - RNA, 21 nt, Human
gcccugcccaccuggccucug

SEQ ID NO: 1516212 - RNA, 22 nt, Human
gcccugcccaccuggccucugc

SEQ ID NO: 1516213 - RNA, 22 nt, Human
gcccuuagcagggaaacagcua

SEQ ID NO: 1516214 - RNA, 20 nt, Human
gccgcagcccugcagagggc

SEQ ID NO: 1516215 - RNA, 20 nt, Human
gcccuuagcagggaaacagc

SEQ ID NO: 1516216 - RNA, 14 nt, Human
gcccugccuccuuu

SEQ ID NO: 1516217 - RNA, 12 nt, Human
gcccugccuccu

SEQ ID NO: 1516218 - RNA, 13 nt, Human
gcccugccuccuu

SEQ ID NO: 1516219 - RNA, 23 nt, Human
gccuagcauacguacacauuuua

SEQ ID NO: 1516220 - RNA, 22 nt, Human
gccuagcauacguacacauuuu

SEQ ID NO: 1516221 - RNA, 21 nt, Human
gccuagcauacguacacauuu

SEQ ID NO: 1516222 - RNA, 20 nt, Human
gccuagcauacguacacauu

SEQ ID NO: 1516223 - RNA, 13 nt, Human
gccuaggugacag

SEQ ID NO: 1516224 - RNA, 14 nt, Human
gccuaggugacaga

SEQ ID NO: 1516225 - RNA, 15 nt, Human
gccuaggugacagag

SEQ ID NO: 1516226 - RNA, 20 nt, Human
gccuaggugacagagugaga

SEQ ID NO: 1516227 - RNA, 17 nt, Human
gccccugccacccuggg

SEQ ID NO: 1516228 - RNA, 16 nt, Human
gccccugccacccugg

SEQ ID NO: 1516229 - RNA, 12 nt, Human
gcccccacuggu

SEQ ID NO: 1516230 - RNA, 23 nt, Human
gcccgggcucugccucccaucac

SEQ ID NO: 1516231 - RNA, 18 nt, Human
gcccucaccccugguucu

SEQ ID NO: 1516232 - RNA, 21 nt, Human
gcccucaccccugguucucau

SEQ ID NO: 1516233 - RNA, 22 nt, Human
gcccucaccccugguucucauc

SEQ ID NO: 1516234 - RNA, 22 nt, Human
gcgaucuggguucacugcaacc

SEQ ID NO: 1516235 - RNA, 20 nt, Human
gcgcagcauauucaggaagc

SEQ ID NO: 1516236 - RNA, 17 nt, Human
gcgagcccugguggcag

SEQ ID NO: 1516237 - RNA, 21 nt, Human
gccuucggccuccauccugag

SEQ ID NO: 1516238 - RNA, 23 nt, Human
gccuucggccuccauccugaggc

SEQ ID NO: 1516239 - RNA, 20 nt, Human
gccuucggccuccauccuga

SEQ ID NO: 1516240 - RNA, 21 nt, Human
gccuguugggccaggagccuc

SEQ ID NO: 1516241 - RNA, 17 nt, Human
gccuugaccauucucca

SEQ ID NO: 1516242 - RNA, 19 nt, Human
gccuugaccauucuccacc

SEQ ID NO: 1516243 - RNA, 20 nt, Human
gccuugaccauucuccaccu

SEQ ID NO: 1516244 - RNA, 21 nt, Human
gccuugaccauucuccaccug

SEQ ID NO: 1516245 - RNA, 18 nt, Human
gccugugccucugggacu

SEQ ID NO: 1516246 - RNA, 13 nt, Human
gccuggcucaggu

SEQ ID NO: 1516247 - RNA, 16 nt, Human
gccugugccucuggga

SEQ ID NO: 1516248 - RNA, 17 nt, Human
gccugugccucugggac

SEQ ID NO: 1516249 - RNA, 14 nt, Human
gccuguugggccag

SEQ ID NO: 1516250 - RNA, 15 nt, Human
gccuguugggccagg

SEQ ID NO: 1516251 - RNA, 16 nt, Human
gccuguugggccagga

SEQ ID NO: 1516252 - RNA, 18 nt, Human
gccuguugggccaggagc

SEQ ID NO: 1516253 - RNA, 20 nt, Human
gccuguugggccaggagccu

SEQ ID NO: 1516254 - RNA, 20 nt, Human
gccuggccugagcugggaug

SEQ ID NO: 1516255 - RNA, 13 nt, Human
gccuggccugagc

SEQ ID NO: 1516256 - RNA, 14 nt, Human
gccuggccugagcu

SEQ ID NO: 1516257 - RNA, 18 nt, Human
gccuggccugagcuggga

SEQ ID NO: 1516258 - RNA, 17 nt, Human
gccucgaacuggcugca

SEQ ID NO: 1516259 - RNA, 19 nt, Human
gccuccugugugugcgccu

SEQ ID NO: 1516260 - RNA, 23 nt, Human
gccuccugugugugcgccuacag

SEQ ID NO: 1516261 - RNA, 16 nt, Human
gccucccaaagugcug

SEQ ID NO: 1516262 - RNA, 17 nt, Human
gccucccaaagugcugg

SEQ ID NO: 1516263 - RNA, 12 nt, Human
gccuccauccug

SEQ ID NO: 1516264 - RNA, 21 nt, Human
gccuccagggcuggacugagg

SEQ ID NO: 1516265 - RNA, 22 nt, Human
gccuccagggcuggacugaggc

SEQ ID NO: 1516266 - RNA, 23 nt, Human
gccuccagggcuggacugaggcc

SEQ ID NO: 1516267 - RNA, 24 nt, Human
gccuccagggcuggacugaggccu

SEQ ID NO: 1516268 - RNA, 15 nt, Human
gccucuuagaugcag

SEQ ID NO: 1516269 - RNA, 16 nt, Human
gccucuuaugggcugg

SEQ ID NO: 1516270 - RNA, 17 nt, Human
gccucuuaugggcuggg

SEQ ID NO: 1516271 - RNA, 18 nt, Human
gccucuuaugggcugggu

SEQ ID NO: 1516272 - RNA, 20 nt, Human
gccucgaacuggcugcaaag

SEQ ID NO: 1516273 - RNA, 22 nt, Human
gccucgaacuggcugcaaaggg

SEQ ID NO: 1516274 - RNA, 14 nt, Human
gccucuuggguuca

SEQ ID NO: 1516275 - RNA, 21 nt, Human
gccucuuaugggcuggguucu

SEQ ID NO: 1516276 - RNA, 13 nt, Human
gccugcccaggcc

SEQ ID NO: 1516277 - RNA, 14 nt, Human
gccugcccaggccc

SEQ ID NO: 1516278 - RNA, 22 nt, Human
gccugcccaggccccugccacc

SEQ ID NO: 1516279 - RNA, 15 nt, Human
gccugcccaggcccc

SEQ ID NO: 1516280 - RNA, 17 nt, Human
gccugcccaggccccug

SEQ ID NO: 1516281 - RNA, 9 nt, Human
ggacuuugu

SEQ ID NO: 1516282 - RNA, 13 nt, Human
ggagaaacuggaa

SEQ ID NO: 1516283 - RNA, 16 nt, Human
ggagaaaggaagggcu

SEQ ID NO: 1516284 - RNA, 15 nt, Human
ggacuuggaagcucc

SEQ ID NO: 1516285 - RNA, 14 nt, Human
ggacuuggaagcuc

SEQ ID NO: 1516286 - RNA, 22 nt, Human
ggacucauuuuaaaaaauggaa

SEQ ID NO: 1516287 - RNA, 16 nt, Human
ggacucaaugcacuga

SEQ ID NO: 1516288 - RNA, 18 nt, Human
ggacucaaugcacugaca

SEQ ID NO: 1516289 - RNA, 15 nt, Human
ggacucaaugcacug

SEQ ID NO: 1516290 - RNA, 24 nt, Human
ggacuaacuugucuuuggacccug

SEQ ID NO: 1516291 - RNA, 14 nt, Human
ggacuacaggugug

SEQ ID NO: 1516292 - RNA, 20 nt, Human
ggacuaacuugucuuuggac

SEQ ID NO: 1516293 - RNA, 12 nt, Human
ggacccugaggc

SEQ ID NO: 1516294 - RNA, 13 nt, Human
ggacccugaggcc

SEQ ID NO: 1516295 - RNA, 13 nt, Human
ggaccucaggccu

SEQ ID NO: 1516296 - RNA, 20 nt, Human
ggaccucaggccugggggcu

SEQ ID NO: 1516297 - RNA, 14 nt, Human
ggaccucaggccug

SEQ ID NO: 1516298 - RNA, 15 nt, Human
ggaccucaggccugg

SEQ ID NO: 1516299 - RNA, 20 nt, Human
ggacguguuaugacuccaga

SEQ ID NO: 1516300 - RNA, 11 nt, Human
ggacccugagg

SEQ ID NO: 1516301 - RNA, 12 nt, Human
ggacccccugaa

SEQ ID NO: 1516302 - RNA, 21 nt, Human
ggacaggaccccagcucugcg

SEQ ID NO: 1516303 - RNA, 18 nt, Human
ggacaggaccccagcucu

SEQ ID NO: 1516304 - RNA, 20 nt, Human
ggacaggaccccagcucugc

SEQ ID NO: 1516305 - RNA, 23 nt, Human
ggacaggcauguucucugaggac

SEQ ID NO: 1516306 - RNA, 19 nt, Human
ggaaggaaacccagcucug

SEQ ID NO: 1516307 - RNA, 20 nt, Human
ggaaggaaacccagcucugg

SEQ ID NO: 1516308 - RNA, 16 nt, Human
ggaaggaaacccagcu

SEQ ID NO: 1516309 - RNA, 11 nt, Human
ggaagcuccgc

SEQ ID NO: 1516310 - RNA, 15 nt, Human
ggaagcucagggccu

SEQ ID NO: 1516311 - RNA, 23 nt, Human
ggaagcucagggccuggcucagg

SEQ ID NO: 1516312 - RNA, 15 nt, Human
ggaagccgcuggggc

SEQ ID NO: 1516313 - RNA, 19 nt, Human
ggaaugaagauacugaaau

SEQ ID NO: 1516314 - RNA, 13 nt, Human
ggacaagagcagg

SEQ ID NO: 1516315 - RNA, 22 nt, Human
ggacaaggaugaucuaggaaga

SEQ ID NO: 1516316 - RNA, 23 nt, Human
ggacaaggaugaucuaggaagac

SEQ ID NO: 1516317 - RNA, 16 nt, Human
ggaauccagacccggc

SEQ ID NO: 1516318 - RNA, 18 nt, Human
ggaauaacauguaauuaa

SEQ ID NO: 1516319 - RNA, 21 nt, Human
ggaaguuuuguggaggagcuc

SEQ ID NO: 1516320 - RNA, 21 nt, Human
ggacacagcucuucuccaggc

SEQ ID NO: 1516321 - RNA, 15 nt, Human
ggacacagcucuucu

SEQ ID NO: 1516322 - RNA, 18 nt, Human
ggacacagcucuucucca

SEQ ID NO: 1516323 - RNA, 14 nt, Human
ggacaggaccccag

SEQ ID NO: 1516324 - RNA, 15 nt, Human
ggacaggaccccagc

SEQ ID NO: 1516325 - RNA, 16 nt, Human
ggacaggaccccagcu

SEQ ID NO: 1516326 - RNA, 17 nt, Human
ggacaggaccccagcuc

SEQ ID NO: 1516327 - RNA, 20 nt, Human
ggacagcuccuucuguccua

SEQ ID NO: 1516328 - RNA, 17 nt, Human
ggacacuaaccacgcug

SEQ ID NO: 1516329 - RNA, 22 nt, Human
ggacacuaaccacgcuggaccu

SEQ ID NO: 1516330 - RNA, 19 nt, Human
ggacagcuccuucuguccu

SEQ ID NO: 1516331 - RNA, 15 nt, Human
ggaagagaaaaaaua

SEQ ID NO: 1516332 - RNA, 18 nt, Human
ggaagacuuuggaaagag

SEQ ID NO: 1516333 - RNA, 13 nt, Human
ggaagagaaaaaa

SEQ ID NO: 1516334 - RNA, 13 nt, Human
ggaagacuuugga

SEQ ID NO: 1516335 - RNA, 17 nt, Human
ggaagacuuuggaaaga

SEQ ID NO: 1516336 - RNA, 13 nt, Human
ggaagacagcucu

SEQ ID NO: 1516337 - RNA, 14 nt, Human
ggaagacagcucuu

SEQ ID NO: 1516338 - RNA, 15 nt, Human
ggaacacucugagac

SEQ ID NO: 1516339 - RNA, 16 nt, Human
ggaacacucugagacu

SEQ ID NO: 1516340 - RNA, 17 nt, Human
ggaacagacuggaagca

SEQ ID NO: 1516341 - RNA, 12 nt, Human
ggaacacucuga

SEQ ID NO: 1516342 - RNA, 14 nt, Human
ggaacacucugaga

SEQ ID NO: 1516343 - RNA, 18 nt, Human
gcuggagugcagugagcc

SEQ ID NO: 1516344 - RNA, 17 nt, Human
gcuggagugcagugagc

SEQ ID NO: 1516345 - RNA, 22 nt, Human
gcuggagugcagugagccgaga

SEQ ID NO: 1516346 - RNA, 20 nt, Human
gcuggccuggccccucaggg

SEQ ID NO: 1516347 - RNA, 18 nt, Human
gcugcugaaggcucgagc

SEQ ID NO: 1516348 - RNA, 13 nt, Human
gcugcuggcuggu

SEQ ID NO: 1516349 - RNA, 13 nt, Human
gcucugcccuugg

SEQ ID NO: 1516350 - RNA, 15 nt, Human
gcucugguccauaga

SEQ ID NO: 1516351 - RNA, 16 nt, Human
gcucugguccauagag

SEQ ID NO: 1516352 - RNA, 23 nt, Human
gcucugguccauagagagcaaga

SEQ ID NO: 1516353 - RNA, 13 nt, Human
gcugcugaaggcu

SEQ ID NO: 1516354 - RNA, 14 nt, Human
gcugcugaaggcuc

SEQ ID NO: 1516355 - RNA, 15 nt, Human
gcugcugaaggcucg

SEQ ID NO: 1516356 - RNA, 12 nt, Human
gcugggcucccu

SEQ ID NO: 1516357 - RNA, 15 nt, Human
gcuggcuguuggcug

SEQ ID NO: 1516358 - RNA, 16 nt, Human
gcuggcuguuggcugg

SEQ ID NO: 1516359 - RNA, 17 nt, Human
gcuggcuguuggcuggg

SEQ ID NO: 1516360 - RNA, 21 nt, Human
gcuggguggcaccagcagccu

SEQ ID NO: 1516361 - RNA, 22 nt, Human
gcuggguggcaccagcagccug

SEQ ID NO: 1516362 - RNA, 23 nt, Human
gcuggguggcaccagcagccugg

SEQ ID NO: 1516363 - RNA, 19 nt, Human
gcuucaaggauccugagcc

SEQ ID NO: 1516364 - RNA, 20 nt, Human
gcuucaaggauccugagcca

SEQ ID NO: 1516365 - RNA, 21 nt, Human
gcuucaaggauccugagccag

SEQ ID NO: 1516366 - RNA, 17 nt, Human
gcuucacggaagagccu

SEQ ID NO: 1516367 - RNA, 19 nt, Human
gcuucacggaagagccuug

SEQ ID NO: 1516368 - RNA, 18 nt, Human
gcuucacggaagagccuu

SEQ ID NO: 1516369 - RNA, 12 nt, Human
gcuucagccucc

SEQ ID NO: 1516370 - RNA, 22 nt, Human
gcuuccucauaguaugguggcu

SEQ ID NO: 1516371 - RNA, 12 nt, Human
gcuuguacauaa

SEQ ID NO: 1516372 - RNA, 14 nt, Human
gcuugagcucagga

SEQ ID NO: 1516373 - RNA, 20 nt, Human
gcuuguaaauagcucaggug

SEQ ID NO: 1516374 - RNA, 21 nt, Human
guacuucaaauccuugaagau

SEQ ID NO: 1516375 - RNA, 22 nt, Human
guacuucaaauccuugaagauu

SEQ ID NO: 1516376 - RNA, 15 nt, Human
guacuucaugcuguc

SEQ ID NO: 1516377 - RNA, 14 nt, Human
guacuuaacuauuc

SEQ ID NO: 1516378 - RNA, 16 nt, Human
guacuggagaaaaugg

SEQ ID NO: 1516379 - RNA, 15 nt, Human
guacuauguaucaau

SEQ ID NO: 1516380 - RNA, 17 nt, Human
guacuauguaucaauga

SEQ ID NO: 1516381 - RNA, 13 nt, Human
guacuauguauca

SEQ ID NO: 1516382 - RNA, 13 nt, Human
guacccacugcuc

SEQ ID NO: 1516383 - RNA, 14 nt, Human
guacccacugcucu

SEQ ID NO: 1516384 - RNA, 18 nt, Human
guacuacaguccucccau

SEQ ID NO: 1516385 - RNA, 19 nt, Human
guacuacaguccucccauc

SEQ ID NO: 1516386 - RNA, 11 nt, Human
guagagacagg

SEQ ID NO: 1516387 - RNA, 12 nt, Human
guagagacaggg

SEQ ID NO: 1516388 - RNA, 15 nt, Human
guagagccagggucu

SEQ ID NO: 1516389 - RNA, 18 nt, Human
guagagccagggucucac

SEQ ID NO: 1516390 - RNA, 13 nt, Human
guagagacagggu

SEQ ID NO: 1516391 - RNA, 10 nt, Human
guagagccag

SEQ ID NO: 1516392 - RNA, 11 nt, Human
guagagccagg

SEQ ID NO: 1516393 - RNA, 21 nt, Human
guagaagucuuagauguauau

SEQ ID NO: 1516394 - RNA, 18 nt, Human
guagaagcccuucuaccu

SEQ ID NO: 1516395 - RNA, 20 nt, Human
guagaaauaucugaaaaugu

SEQ ID NO: 1516396 - RNA, 21 nt, Human
guagaaauaucugaaaaugua

SEQ ID NO: 1516397 - RNA, 23 nt, Human
guagaaauaucugaaaauguaug

SEQ ID NO: 1516398 - RNA, 22 nt, Human
guagaacacaaggucauuugcu

SEQ ID NO: 1516399 - RNA, 15 nt, Human
aaauccauacauuug

SEQ ID NO: 1516400 - RNA, 18 nt, Human
aaauccauacauuugugu

SEQ ID NO: 1516401 - RNA, 16 nt, Human
guacaugaaaacacau

SEQ ID NO: 1516402 - RNA, 15 nt, Human
guacaugaaaacaca

SEQ ID NO: 1516403 - RNA, 14 nt, Human
guacaugaaaacac

SEQ ID NO: 1516404 - RNA, 20 nt, Human
guacaugaaaacacauuuuu

SEQ ID NO: 1516405 - RNA, 19 nt, Human
guacaugaaaacacauuuu

SEQ ID NO: 1516406 - RNA, 18 nt, Human
guacaugaaaacacauuu

SEQ ID NO: 1516407 - RNA, 17 nt, Human
guacaugaaaacacauu

SEQ ID NO: 1516408 - RNA, 19 nt, Human
guacauggaauaacaugua

SEQ ID NO: 1516409 - RNA, 15 nt, Human
guacauuuggagaca

SEQ ID NO: 1516410 - RNA, 12 nt, Human
guacccacugcu

SEQ ID NO: 1516411 - RNA, 15 nt, Human
aaauauuauguguuu

SEQ ID NO: 1516412 - RNA, 17 nt, Human
aaauauuauguuaaaac

SEQ ID NO: 1516413 - RNA, 14 nt, Human
aaauauuauguguu

SEQ ID NO: 1516414 - RNA, 15 nt, Human
aaauauuauaacuca

SEQ ID NO: 1516415 - RNA, 19 nt, Human
aaaucauuucugcaucagc

SEQ ID NO: 1516416 - RNA, 21 nt, Human
aaaucauuucugcaucagcug

SEQ ID NO: 1516417 - RNA, 22 nt, Human
aaaucauuucugcaucagcugc

SEQ ID NO: 1516418 - RNA, 23 nt, Human
aaaucauuucugcaucagcugcu

SEQ ID NO: 1516419 - RNA, 12 nt, Human
aaaucauuucug

SEQ ID NO: 1516420 - RNA, 19 nt, Human
aaaucagccguguaaccau

SEQ ID NO: 1516421 - RNA, 12 nt, Human
aaaucagccugc

SEQ ID NO: 1516422 - RNA, 18 nt, Human
aaaucagccugcuccagc

SEQ ID NO: 1516423 - RNA, 20 nt, Human
guaauaggcguaacuaauuu

SEQ ID NO: 1516424 - RNA, 15 nt, Human
guaauaacugugaag

SEQ ID NO: 1516425 - RNA, 16 nt, Human
guaauaacugugaagu

SEQ ID NO: 1516426 - RNA, 22 nt, Human
guaauaacugugaaguuuacau

SEQ ID NO: 1516427 - RNA, 18 nt, Human
guaauaugcacacauuuu

SEQ ID NO: 1516428 - RNA, 17 nt, Human
guaauaugcacacauuu

SEQ ID NO: 1516429 - RNA, 16 nt, Human
guaauaugcacacauu

SEQ ID NO: 1516430 - RNA, 14 nt, Human
guaauaugcacaca

SEQ ID NO: 1516431 - RNA, 22 nt, Human
aaauacgugggcauucaaaugu

SEQ ID NO: 1516432 - RNA, 18 nt, Human
aaauaccagccaguaaau

SEQ ID NO: 1516433 - RNA, 17 nt, Human
aaauacagauagauaua

SEQ ID NO: 1516434 - RNA, 19 nt, Human
aaauacacacucaaaucaa

SEQ ID NO: 1516435 - RNA, 22 nt, Human
aaauaauuuuuauauuugaaau

SEQ ID NO: 1516436 - RNA, 23 nt, Human
aaauaauuuuuauauuugaaaua

SEQ ID NO: 1516437 - RNA, 15 nt, Human
aaauacacacucaaa

SEQ ID NO: 1516438 - RNA, 23 nt, Human
guacacugccuucucaacuccaa

SEQ ID NO: 1516439 - RNA, 21 nt, Human
aaauaauuuuuauauuugaaa

SEQ ID NO: 1516440 - RNA, 21 nt, Human
guaauuuuuuuaucgucacug

SEQ ID NO: 1516441 - RNA, 14 nt, Human
aaauaaaaauauug

SEQ ID NO: 1516442 - RNA, 18 nt, Human
aaaguauguuagugcaaa

SEQ ID NO: 1516443 - RNA, 18 nt, Human
aaaguaucccuacuguaa

SEQ ID NO: 1516444 - RNA, 23 nt, Human
aaaguacuucuccacccugcucu

SEQ ID NO: 1516445 - RNA, 20 nt, Human
aaaguacuucuccacccugc

SEQ ID NO: 1516446 - RNA, 21 nt, Human
aaaguacuucuccacccugcu

SEQ ID NO: 1516447 - RNA, 19 nt, Human
aaaguacuucuccacccug

SEQ ID NO: 1516448 - RNA, 20 nt, Human
aaaguacacuguuucaaacu

SEQ ID NO: 1516449 - RNA, 20 nt, Human
aaagguauuuuaaucaccaa

SEQ ID NO: 1516450 - RNA, 23 nt, Human
aaaguucugcagauaaacaguag

SEQ ID NO: 1516451 - RNA, 20 nt, Human
aaaguuauugauaaguucau

SEQ ID NO: 1516452 - RNA, 13 nt, Human
gguggaugccugg

SEQ ID NO: 1516453 - RNA, 21 nt, Human
ggugcauuugaggucuguucu

SEQ ID NO: 1516454 - RNA, 14 nt, Human
ggugaaaauuauuu

SEQ ID NO: 1516455 - RNA, 22 nt, Human
ggugaaaauuauuuuguucaua

SEQ ID NO: 1516456 - RNA, 13 nt, Human
ggugaacagaaca

SEQ ID NO: 1516457 - RNA, 13 nt, Human
ggucgaggcagga

SEQ ID NO: 1516458 - RNA, 18 nt, Human
ggugauccacccaccuca

SEQ ID NO: 1516459 - RNA, 23 nt, Human
ggugauccacccaccucagccuc

SEQ ID NO: 1516460 - RNA, 24 nt, Human
ggugauccacccaccucagccucc

SEQ ID NO: 1516461 - RNA, 12 nt, Human
ggugcaaugacc

SEQ ID NO: 1516462 - RNA, 13 nt, Human
ggugcaaugaccu

SEQ ID NO: 1516463 - RNA, 16 nt, Human
ggugcaaugaccuuuc

SEQ ID NO: 1516464 - RNA, 14 nt, Human
aaagguacuucaaa

SEQ ID NO: 1516465 - RNA, 17 nt, Human
aaagggugaaaauuauu

SEQ ID NO: 1516466 - RNA, 22 nt, Human
aaagggacuuggaagcuccgcu

SEQ ID NO: 1516467 - RNA, 20 nt, Human
aaagggauggcaagaugugg

SEQ ID NO: 1516468 - RNA, 17 nt, Human
aaaggagauuggaagga

SEQ ID NO: 1516469 - RNA, 21 nt, Human
aaaggagagcuagcagcaggg

SEQ ID NO: 1516470 - RNA, 22 nt, Human
aaaggaaagagggagguaagga

SEQ ID NO: 1516471 - RNA, 13 nt, Human
aaagcugcugaca

SEQ ID NO: 1516472 - RNA, 15 nt, Human
aaagcuuguuaagau

SEQ ID NO: 1516473 - RNA, 17 nt, Human
aaagcacugacuucuaa

SEQ ID NO: 1516474 - RNA, 21 nt, Human
aaagcacugacuucuaaguaa

SEQ ID NO: 1516475 - RNA, 15 nt, Human
aaagcucacuuuacu

SEQ ID NO: 1516476 - RNA, 13 nt, Human
aaagacagugaaa

SEQ ID NO: 1516477 - RNA, 14 nt, Human
aaagacagagcugg

SEQ ID NO: 1516478 - RNA, 22 nt, Human
aaagaccuuuggagcaaagcug

SEQ ID NO: 1516479 - RNA, 18 nt, Human
aaagacuauucaaacagu

SEQ ID NO: 1516480 - RNA, 19 nt, Human
aaagacuauucaaacaguc

SEQ ID NO: 1516481 - RNA, 21 nt, Human
aaagacuauucaaacagucuc

SEQ ID NO: 1516482 - RNA, 15 nt, Human
aaagacuccaaagaa

SEQ ID NO: 1516483 - RNA, 21 nt, Human
aaagacuccaaagaaauguaa

SEQ ID NO: 1516484 - RNA, 23 nt, Human
aaacuucagcgguuuauauaagc

SEQ ID NO: 1516485 - RNA, 14 nt, Human
ggguggccucccaa

SEQ ID NO: 1516486 - RNA, 14 nt, Human
aaagacuguacaaa

SEQ ID NO: 1516487 - RNA, 23 nt, Human
aaagacugaguacguugugcauu

SEQ ID NO: 1516488 - RNA, 13 nt, Human
aaagacuguacaa

SEQ ID NO: 1516489 - RNA, 19 nt, Human
aaagaugcuucucacugcc

SEQ ID NO: 1516490 - RNA, 17 nt, Human
aaagaugcuucucacug

SEQ ID NO: 1516491 - RNA, 14 nt, Human
aaagaugcuucuca

SEQ ID NO: 1516492 - RNA, 15 nt, Human
aaagaggaaugaagu

SEQ ID NO: 1516493 - RNA, 15 nt, Human
aaagaggcagcuuga

SEQ ID NO: 1516494 - RNA, 15 nt, Human
gguccugcagccugc

SEQ ID NO: 1516495 - RNA, 14 nt, Human
gguccugcugcagu

SEQ ID NO: 1516496 - RNA, 12 nt, Human
gguccugcugca

SEQ ID NO: 1516497 - RNA, 16 nt, Human
gguccugcagccugca

SEQ ID NO: 1516498 - RNA, 11 nt, Human
gguccugcugc

SEQ ID NO: 1516499 - RNA, 15 nt, Human
aaacgggcucagcaa

SEQ ID NO: 1516500 - RNA, 23 nt, Human
aaaccaagucaagugaaaaagga

SEQ ID NO: 1516501 - RNA, 15 nt, Human
aaaccacagcaguug

SEQ ID NO: 1516502 - RNA, 12 nt, Human
aaaccacagcag

SEQ ID NO: 1516503 - RNA, 15 nt, Human
aaacucguuaauuug

SEQ ID NO: 1516504 - RNA, 13 nt, Human
aaacgucuuaaau

SEQ ID NO: 1516505 - RNA, 14 nt, Human
aaacgucuuaaaua

SEQ ID NO: 1516506 - RNA, 19 nt, Human
aaacuuaaucuaaauggaa

SEQ ID NO: 1516507 - RNA, 18 nt, Human
aaacuuaaucuaaaugga

SEQ ID NO: 1516508 - RNA, 17 nt, Human
aaacuuaaucuaaaugg

SEQ ID NO: 1516509 - RNA, 16 nt, Human
aaacuuaaucuaaaug

SEQ ID NO: 1516510 - RNA, 19 nt, Human
aaacuguuaauaguucagg

SEQ ID NO: 1516511 - RNA, 13 nt, Human
aaacucuccucug

SEQ ID NO: 1516512 - RNA, 19 nt, Human
ggggaauugaggacacuga

SEQ ID NO: 1516513 - RNA, 15 nt, Human
ggggaauucaucucu

SEQ ID NO: 1516514 - RNA, 16 nt, Human
ggggaccagagcugcc

SEQ ID NO: 1516515 - RNA, 18 nt, Human
ggggaauguuugccucug

SEQ ID NO: 1516516 - RNA, 22 nt, Human
ggggaauguuugccucugccuc

SEQ ID NO: 1516517 - RNA, 17 nt, Human
aaacauggccuuugcuu

SEQ ID NO: 1516518 - RNA, 20 nt, Human
aaacagucucaggaaaucaa

SEQ ID NO: 1516519 - RNA, 14 nt, Human
aaacaguagugaua

SEQ ID NO: 1516520 - RNA, 16 nt, Human
aaacauggccuuugcu

SEQ ID NO: 1516521 - RNA, 15 nt, Human
aaacagucucaggaa

SEQ ID NO: 1516522 - RNA, 15 nt, Human
ggggccucagugcca

SEQ ID NO: 1516523 - RNA, 12 nt, Human
gggggccucagu

SEQ ID NO: 1516524 - RNA, 15 nt, Human
gggggccucagugcc

SEQ ID NO: 1516525 - RNA, 17 nt, Human
gggggccucagugccac

SEQ ID NO: 1516526 - RNA, 18 nt, Human
gggggccucagugccacu

SEQ ID NO: 1516527 - RNA, 16 nt, Human
ggggccggccaguggc

SEQ ID NO: 1516528 - RNA, 11 nt, Human
ggggagaaagu

SEQ ID NO: 1516529 - RNA, 13 nt, Human
ggggaccucaggc

SEQ ID NO: 1516530 - RNA, 20 nt, Human
aaaauuuugauguuuuaagg

SEQ ID NO: 1516531 - RNA, 19 nt, Human
aaaauuuagaaauauaauu

SEQ ID NO: 1516532 - RNA, 13 nt, Human
gggaugagaaagg

SEQ ID NO: 1516533 - RNA, 19 nt, Human
aaacacaaacgggcucagc

SEQ ID NO: 1516534 - RNA, 11 nt, Human
aaacacagcaa

SEQ ID NO: 1516535 - RNA, 12 nt, Human
aaacacauuuuu

SEQ ID NO: 1516536 - RNA, 11 nt, Human
aaacacauuuu

SEQ ID NO: 1516537 - RNA, 12 nt, Human
aaacacagcaag

SEQ ID NO: 1516538 - RNA, 14 nt, Human
aaacacagcaaggg

SEQ ID NO: 1516539 - RNA, 20 nt, Human
gggacagucaccucauggaa

SEQ ID NO: 1516540 - RNA, 21 nt, Human
gggacagucaccucauggaau

SEQ ID NO: 1516541 - RNA, 22 nt, Human
gggacagucaccucauggaauu

SEQ ID NO: 1516542 - RNA, 15 nt, Human
gggacagcuccuucu

SEQ ID NO: 1516543 - RNA, 16 nt, Human
gggacagcuccuucug

SEQ ID NO: 1516544 - RNA, 13 nt, Human
gggaagagacuug

SEQ ID NO: 1516545 - RNA, 12 nt, Human
gggacagcuccu

SEQ ID NO: 1516546 - RNA, 13 nt, Human
gggacagcuccuu

SEQ ID NO: 1516547 - RNA, 21 nt, Human
ggcuuccuccugguguggaag

SEQ ID NO: 1516548 - RNA, 18 nt, Human
gggaagaagcucucuccu

SEQ ID NO: 1516549 - RNA, 20 nt, Human
gggaacccaaguccaagcau

SEQ ID NO: 1516550 - RNA, 19 nt, Human
ggcuggguggcaccagcag

SEQ ID NO: 1516551 - RNA, 19 nt, Human
ggcuggguucuacccaggu

SEQ ID NO: 1516552 - RNA, 21 nt, Human
ggcuggguucuacccaggugc

SEQ ID NO: 1516553 - RNA, 14 nt, Human
aaaaauaacaauga

SEQ ID NO: 1516554 - RNA, 15 nt, Human
ggcugggggccucag

SEQ ID NO: 1516555 - RNA, 16 nt, Human
ggcugggggccucagu

SEQ ID NO: 1516556 - RNA, 17 nt, Human
ggcugggggccucagug

SEQ ID NO: 1516557 - RNA, 19 nt, Human
ggcugggggccucagugcc

SEQ ID NO: 1516558 - RNA, 18 nt, Human
ggcuguaucccaugagcc

SEQ ID NO: 1516559 - RNA, 22 nt, Human
ggcuggguucuacccaggugcu

SEQ ID NO: 1516560 - RNA, 22 nt, Human
ggcugguucggauuuggggugg

SEQ ID NO: 1516561 - RNA, 23 nt, Human
ggcugguucggauuuggggugga

SEQ ID NO: 1516562 - RNA, 18 nt, Human
ggcuucaguggcagcugc

SEQ ID NO: 1516563 - RNA, 19 nt, Human
ggcuucaguggcagcugcu

SEQ ID NO: 1516564 - RNA, 20 nt, Human
ggcuucaguggcagcugcuu

SEQ ID NO: 1516565 - RNA, 22 nt, Human
ggcuucauccuccucagaucuu

SEQ ID NO: 1516566 - RNA, 18 nt, Human
ggcuucauccuccucaga

SEQ ID NO: 1516567 - RNA, 16 nt, Human
ggcuuccucauaguau

SEQ ID NO: 1516568 - RNA, 21 nt, Human
gggagaaccaaaaagaggcua

SEQ ID NO: 1516569 - RNA, 15 nt, Human
gggacuuggaagcuc

SEQ ID NO: 1516570 - RNA, 17 nt, Human
gggacuuggaagcuccg

SEQ ID NO: 1516571 - RNA, 18 nt, Human
gggacuuggaagcuccgc

SEQ ID NO: 1516572 - RNA, 23 nt, Human
gggacuuggaagcuccgcuuucu

SEQ ID NO: 1516573 - RNA, 15 nt, Human
gggaggucgaggcag

SEQ ID NO: 1516574 - RNA, 18 nt, Human
gggaggucaaggcugcag

SEQ ID NO: 1516575 - RNA, 15 nt, Human
gggagggagggcucc

SEQ ID NO: 1516576 - RNA, 16 nt, Human
gggagggagggcucca

SEQ ID NO: 1516577 - RNA, 23 nt, Human
gggagcaggcucgggcuccccag

SEQ ID NO: 1516578 - RNA, 15 nt, Human
gggagagccuuccag

SEQ ID NO: 1516579 - RNA, 19 nt, Human
gggagagccuuccaggggu

SEQ ID NO: 1516580 - RNA, 19 nt, Human
gggacauuugcucauggaa

SEQ ID NO: 1516581 - RNA, 14 nt, Human
gggaccagagcugc

SEQ ID NO: 1516582 - RNA, 20 nt, Human
gggaccagagcugccaccug

SEQ ID NO: 1516583 - RNA, 17 nt, Human
aaaaaugguuuaaaugg

SEQ ID NO: 1516584 - RNA, 14 nt, Human
aaaacaugcuacac

SEQ ID NO: 1516585 - RNA, 13 nt, Human
aaaacaugcuaca

SEQ ID NO: 1516586 - RNA, 12 nt, Human
aaaacccaagug

SEQ ID NO: 1516587 - RNA, 14 nt, Human
aaaacguggcugcu

SEQ ID NO: 1516588 - RNA, 18 nt, Human
aaaacucuccucugcugc

SEQ ID NO: 1516589 - RNA, 21 nt, Human
aaaagauuuucagaaaauauu

SEQ ID NO: 1516590 - RNA, 15 nt, Human
aaaacuucagacaua

SEQ ID NO: 1516591 - RNA, 22 nt, Human
aaaacuugauguguuaucucuu

SEQ ID NO: 1516592 - RNA, 19 nt, Human
ggcucagcaaaagaugcuu

SEQ ID NO: 1516593 - RNA, 18 nt, Human
ggcucagcggggacagcu

SEQ ID NO: 1516594 - RNA, 19 nt, Human
ggcucagcggggacagcuc

SEQ ID NO: 1516595 - RNA, 20 nt, Human
ggcucagcggggacagcucc

SEQ ID NO: 1516596 - RNA, 19 nt, Human
ggcucagguggggucacuc

SEQ ID NO: 1516597 - RNA, 20 nt, Human
ggcucagguggggucacucu

SEQ ID NO: 1516598 - RNA, 14 nt, Human
ggcuccacuugguc

SEQ ID NO: 1516599 - RNA, 16 nt, Human
ggcuccacuuggucug

SEQ ID NO: 1516600 - RNA, 18 nt, Human
ggcugggagagccuucca

SEQ ID NO: 1516601 - RNA, 13 nt, Human
ggcugcugaaggc

SEQ ID NO: 1516602 - RNA, 14 nt, Human
ggcugggagagccu

SEQ ID NO: 1516603 - RNA, 15 nt, Human
ggcugggagagccuu

SEQ ID NO: 1516604 - RNA, 16 nt, Human
ggcugggagagccuuc

SEQ ID NO: 1516605 - RNA, 11 nt, Human
ggcucucaggc

SEQ ID NO: 1516606 - RNA, 14 nt, Human
ggcucuuccaggcu

SEQ ID NO: 1516607 - RNA, 12 nt, Human
ggcucuuccagg

SEQ ID NO: 1516608 - RNA, 14 nt, Human
ggcucucaggccag

SEQ ID NO: 1516609 - RNA, 13 nt, Human
ggcucucaggcca

SEQ ID NO: 1516610 - RNA, 22 nt, Human
ggcugcggaaugaaccacaucu

SEQ ID NO: 1516611 - RNA, 21 nt, Human
ggcugccaaugggagcucaug

SEQ ID NO: 1516612 - RNA, 19 nt, Human
ggcugccaaugggagcuca

SEQ ID NO: 1516613 - RNA, 20 nt, Human
ggcugccaaugggagcucau

SEQ ID NO: 1516614 - RNA, 16 nt, Human
ggagagaagagaaugc

SEQ ID NO: 1516615 - RNA, 11 nt, Human
ggcagccccug

SEQ ID NO: 1516616 - RNA, 20 nt, Human
ggcacagaaaauggaagaca

SEQ ID NO: 1516617 - RNA, 21 nt, Human
ggcacagaaaauggaagacag

SEQ ID NO: 1516618 - RNA, 23 nt, Human
ggcacagaaaauggaagacagcu

SEQ ID NO: 1516619 - RNA, 21 nt, Human
ggcacaguuuucugagaaaga

SEQ ID NO: 1516620 - RNA, 13 nt, Human
ggcacaucagcac

SEQ ID NO: 1516621 - RNA, 23 nt, Human
ggcacucagaagacacugauggg

SEQ ID NO: 1516622 - RNA, 22 nt, Human
ggcagccccuguucuggcagag

SEQ ID NO: 1516623 - RNA, 21 nt, Human
ggcaguggugguuuucuguuc

SEQ ID NO: 1516624 - RNA, 20 nt, Human
ggcaguggugguuuucuguu

SEQ ID NO: 1516625 - RNA, 22 nt, Human
ggccagugcaguuugguguguc

SEQ ID NO: 1516626 - RNA, 20 nt, Human
ggccagugugacaaggauug

SEQ ID NO: 1516627 - RNA, 14 nt, Human
ggccaguugguccc

SEQ ID NO: 1516628 - RNA, 17 nt, Human
ggccaguuggucccccu

SEQ ID NO: 1516629 - RNA, 22 nt, Human
ggcccuucucuccagccccugg

SEQ ID NO: 1516630 - RNA, 23 nt, Human
ggcccuucucuccagccccugga

SEQ ID NO: 1516631 - RNA, 14 nt, Human
ggccuccauccuga

SEQ ID NO: 1516632 - RNA, 15 nt, Human
ggccuccauccugag

SEQ ID NO: 1516633 - RNA, 16 nt, Human
ggccuccauccugagg

SEQ ID NO: 1516634 - RNA, 13 nt, Human
ggcccggcuccag

SEQ ID NO: 1516635 - RNA, 23 nt, Human
ggccccugcugguucaggguugg

SEQ ID NO: 1516636 - RNA, 13 nt, Human
ggccccugcuggu

SEQ ID NO: 1516637 - RNA, 14 nt, Human
ggccccugcugguu

SEQ ID NO: 1516638 - RNA, 15 nt, Human
ggcccggcuccaggc

SEQ ID NO: 1516639 - RNA, 20 nt, Human
ggcccuucucuccagccccu

SEQ ID NO: 1516640 - RNA, 21 nt, Human
ggcccuucucuccagccccug

SEQ ID NO: 1516641 - RNA, 13 nt, Human
auucaggaagcuc

SEQ ID NO: 1516642 - RNA, 22 nt, Human
auuccccacccugaaagcccug

SEQ ID NO: 1516643 - RNA, 19 nt, Human
auucuaacuuuuuugcuau

SEQ ID NO: 1516644 - RNA, 18 nt, Human
auucagaaggaucuucau

SEQ ID NO: 1516645 - RNA, 24 nt, Human
auucagaaggaucuucaucugacu

SEQ ID NO: 1516646 - RNA, 11 nt, Human
auucagacagc

SEQ ID NO: 1516647 - RNA, 12 nt, Human
auucagacagcu

SEQ ID NO: 1516648 - RNA, 13 nt, Human
auucagacagcug

SEQ ID NO: 1516649 - RNA, 18 nt, Human
auucagacagcugccugg

SEQ ID NO: 1516650 - RNA, 12 nt, Human
auucaggaagcu

SEQ ID NO: 1516651 - RNA, 14 nt, Human
auucagacagcugc

SEQ ID NO: 1516652 - RNA, 15 nt, Human
auucagacagcugcc

SEQ ID NO: 1516653 - RNA, 16 nt, Human
auucagacagcugccu

SEQ ID NO: 1516654 - RNA, 17 nt, Human
auucagacagcugccug

SEQ ID NO: 1516655 - RNA, 15 nt, Human
auuauauuuauuacu

SEQ ID NO: 1516656 - RNA, 18 nt, Human
auuauauuuauuacugua

SEQ ID NO: 1516657 - RNA, 21 nt, Human
auuauguuaaaacugggacag

SEQ ID NO: 1516658 - RNA, 18 nt, Human
auuaucuagauacuguau

SEQ ID NO: 1516659 - RNA, 14 nt, Human
auuaucuagauacu

SEQ ID NO: 1516660 - RNA, 19 nt, Human
auucaaacagucucaggaa

SEQ ID NO: 1516661 - RNA, 20 nt, Human
auucaaacagucucaggaaa

SEQ ID NO: 1516662 - RNA, 17 nt, Human
auuauuuuguucauaca

SEQ ID NO: 1516663 - RNA, 18 nt, Human
auuauuuuguucauacau

SEQ ID NO: 1516664 - RNA, 19 nt, Human
auuauuuuguucauacaua

SEQ ID NO: 1516665 - RNA, 21 nt, Human
auuauuuuguucauacauauu

SEQ ID NO: 1516666 - RNA, 18 nt, Human
auucaaacagucucagga

SEQ ID NO: 1516667 - RNA, 15 nt, Human
auuauuuuguucaua

SEQ ID NO: 1516668 - RNA, 16 nt, Human
auuauuuuguucauac

SEQ ID NO: 1516669 - RNA, 15 nt, Human
auuauauuuacaaau

SEQ ID NO: 1516670 - RNA, 19 nt, Human
auucagacagcugccuggg

SEQ ID NO: 1516671 - RNA, 13 nt, Human
auucuuccucccu

SEQ ID NO: 1516672 - RNA, 17 nt, Human
auucuuacaaacaugug

SEQ ID NO: 1516673 - RNA, 16 nt, Human
auucuuacaaacaugu

SEQ ID NO: 1516674 - RNA, 21 nt, Human
auucuuacaaacaugugguua

SEQ ID NO: 1516675 - RNA, 14 nt, Human
auucuuaaauaugu

SEQ ID NO: 1516676 - RNA, 15 nt, Human
auugaaaaaccauuu

SEQ ID NO: 1516677 - RNA, 20 nt, Human
auugaaaucuuuuugcuuug

SEQ ID NO: 1516678 - RNA, 17 nt, Human
auugaaaucuuuuugcu

SEQ ID NO: 1516679 - RNA, 18 nt, Human
auugaaaucuuuuugcuu

SEQ ID NO: 1516680 - RNA, 15 nt, Human
auugacacuuaaaaa

SEQ ID NO: 1516681 - RNA, 17 nt, Human
auugacacuuaaaaaug

SEQ ID NO: 1516682 - RNA, 19 nt, Human
auugacacuuaaaaauggu

SEQ ID NO: 1516683 - RNA, 14 nt, Human
auucuguuggccag

SEQ ID NO: 1516684 - RNA, 19 nt, Human
auucuguuggccaguguga

SEQ ID NO: 1516685 - RNA, 21 nt, Human
auucuguuggccagugugaca

SEQ ID NO: 1516686 - RNA, 18 nt, Human
auucugcucacauaucug

SEQ ID NO: 1516687 - RNA, 20 nt, Human
auucugccugcccaggcccc

SEQ ID NO: 1516688 - RNA, 21 nt, Human
auucugccugcccaggccccu

SEQ ID NO: 1516689 - RNA, 19 nt, Human
auucugcucacauaucugu

SEQ ID NO: 1516690 - RNA, 20 nt, Human
auucugcucacauaucuguc

SEQ ID NO: 1516691 - RNA, 21 nt, Human
auucugcucacauaucuguca

SEQ ID NO: 1516692 - RNA, 22 nt, Human
auucugcucacauaucugucau

SEQ ID NO: 1516693 - RNA, 17 nt, Human
auucucauuugucacac

SEQ ID NO: 1516694 - RNA, 15 nt, Human
auucuagcuaaugua

SEQ ID NO: 1516695 - RNA, 18 nt, Human
auucuagcuaauguaaua

SEQ ID NO: 1516696 - RNA, 11 nt, Human
auucugccugc

SEQ ID NO: 1516697 - RNA, 13 nt, Human
auucugccugccc

SEQ ID NO: 1516698 - RNA, 14 nt, Human
auucugccugccca

SEQ ID NO: 1516699 - RNA, 15 nt, Human
auucugccugcccag

SEQ ID NO: 1516700 - RNA, 16 nt, Human
auucugccugcccagg

SEQ ID NO: 1516701 - RNA, 17 nt, Human
auucugccugcccaggc

SEQ ID NO: 1516702 - RNA, 18 nt, Human
auucugccugcccaggcc

SEQ ID NO: 1516703 - RNA, 19 nt, Human
auucugccugcccaggccc

SEQ ID NO: 1516704 - RNA, 20 nt, Human
auuuuuucucuaggaaauau

SEQ ID NO: 1516705 - RNA, 23 nt, Human
auuuuuucucuaggaaauauuua

SEQ ID NO: 1516706 - RNA, 18 nt, Human
auuuuuuguuaaaugauu

SEQ ID NO: 1516707 - RNA, 22 nt, Human
auuuuugugauuuugugauuga

SEQ ID NO: 1516708 - RNA, 21 nt, Human
auuuuuguagcacugacagau

SEQ ID NO: 1516709 - RNA, 20 nt, Human
auuuuuguagcacugacaga

SEQ ID NO: 1516710 - RNA, 12 nt, Human
auuuuuguaauu

SEQ ID NO: 1516711 - RNA, 19 nt, Human
auuuuuguagagccagggu

SEQ ID NO: 1516712 - RNA, 21 nt, Human
auuuuuguuuucauuaucuca

SEQ ID NO: 1516713 - RNA, 14 nt, Human
auuuuuuaaaugca

SEQ ID NO: 1516714 - RNA, 13 nt, Human
auuuuuuaaaugc

SEQ ID NO: 1516715 - RNA, 22 nt, Human
auuuuugacagaauauguuuca

SEQ ID NO: 1516716 - RNA, 22 nt, Human
auuuuucuuagggaaggauaca

SEQ ID NO: 1516717 - RNA, 15 nt, Human
auuuuucuuauuuca

SEQ ID NO: 1516718 - RNA, 19 nt, Human
auuuuucuuauuucauuuc

SEQ ID NO: 1516719 - RNA, 20 nt, Human
auuuuucuuauuucauuucu

SEQ ID NO: 1516720 - RNA, 12 nt, Human
auuuuugacaga

SEQ ID NO: 1516721 - RNA, 13 nt, Human
auuuuugacagaa

SEQ ID NO: 1516722 - RNA, 14 nt, Human
auuuuugacagaau

SEQ ID NO: 1516723 - RNA, 15 nt, Human
auuuuugacagaaua

SEQ ID NO: 1516724 - RNA, 15 nt, Human
auuuuuccaaaauaa

SEQ ID NO: 1516725 - RNA, 21 nt, Human
auuuuucuuagggaaggauac

SEQ ID NO: 1516726 - RNA, 21 nt, Human
auuuuguuuuugucuuaaaaa

SEQ ID NO: 1516727 - RNA, 15 nt, Human
auuuuucacauaucu

SEQ ID NO: 1516728 - RNA, 18 nt, Human
auuuuucacauaucuagu

SEQ ID NO: 1516729 - RNA, 21 nt, Human
auuuuucacauaucuaguaug

SEQ ID NO: 1516730 - RNA, 12 nt, Human
auuuuaauaaug

SEQ ID NO: 1516731 - RNA, 15 nt, Human
auuuuccaugaaaau

SEQ ID NO: 1516732 - RNA, 15 nt, Human
auuuucuauaauuua

SEQ ID NO: 1516733 - RNA, 14 nt, Human
auuuucuauaauuu

SEQ ID NO: 1516734 - RNA, 14 nt, Human
auuuuccugaaaac

SEQ ID NO: 1516735 - RNA, 19 nt, Human
auuuucccuauuagagaag

SEQ ID NO: 1516736 - RNA, 16 nt, Human
auuuuccugccaggca

SEQ ID NO: 1516737 - RNA, 21 nt, Human
auuuugcugucccuuuuccuu

SEQ ID NO: 1516738 - RNA, 20 nt, Human
auuuugcuaaaugugaauga

SEQ ID NO: 1516739 - RNA, 19 nt, Human
auuuugauccaagcugguc

SEQ ID NO: 1516740 - RNA, 17 nt, Human
auuuugauguuuuaagg

SEQ ID NO: 1516741 - RNA, 15 nt, Human
auuuugauguuuuaa

SEQ ID NO: 1516742 - RNA, 12 nt, Human
auuuuguucaua

SEQ ID NO: 1516743 - RNA, 14 nt, Human
auuuuguucauaca

SEQ ID NO: 1516744 - RNA, 15 nt, Human
auuuuguucauacau

SEQ ID NO: 1516745 - RNA, 16 nt, Human
auuuuguucauacaua

SEQ ID NO: 1516746 - RNA, 18 nt, Human
auuuuguucauacauauu

SEQ ID NO: 1516747 - RNA, 16 nt, Human
auuuuguuucagugca

SEQ ID NO: 1516748 - RNA, 19 nt, Human
auuuugugcccccauguaa

SEQ ID NO: 1516749 - RNA, 23 nt, Human
auuuugucauauaagauucauau

SEQ ID NO: 1516750 - RNA, 20 nt, Human
auuuugcuuugugauuuuug

SEQ ID NO: 1516751 - RNA, 18 nt, Human
auuuugcuuugugauuuu

SEQ ID NO: 1516752 - RNA, 12 nt, Human
auuuugcuuugu

SEQ ID NO: 1516753 - RNA, 20 nt, Human
auuuuggaaaauaaauuauu

SEQ ID NO: 1516754 - RNA, 14 nt, Human
auuuuggaaaauaa

SEQ ID NO: 1516755 - RNA, 19 nt, Human
auuuuggaaaauaaauuau

SEQ ID NO: 1516756 - RNA, 22 nt, Human
auuuguaguguuggagaagaac

SEQ ID NO: 1516757 - RNA, 14 nt, Human
auuuguauaaaaua

SEQ ID NO: 1516758 - RNA, 15 nt, Human
auuuguauaaaauaa

SEQ ID NO: 1516759 - RNA, 23 nt, Human
auuuuaaaagaaugauuaugaau

SEQ ID NO: 1516760 - RNA, 16 nt, Human
auuuuaaaagaaugau

SEQ ID NO: 1516761 - RNA, 22 nt, Human
auuuuaaaaauacagauagaua

SEQ ID NO: 1516762 - RNA, 17 nt, Human
auuucuaggacugaauu

SEQ ID NO: 1516763 - RNA, 18 nt, Human
auuucuaggacugaauua

SEQ ID NO: 1516764 - RNA, 20 nt, Human
auuucuaggacugaauuaug

SEQ ID NO: 1516765 - RNA, 23 nt, Human
auuucuaggacugaauuaugaaa

SEQ ID NO: 1516766 - RNA, 20 nt, Human
auuucuuccacaagagccca

SEQ ID NO: 1516767 - RNA, 23 nt, Human
auuucuuccacaagagcccaggc

SEQ ID NO: 1516768 - RNA, 20 nt, Human
auuucuugagguaaaagcau

SEQ ID NO: 1516769 - RNA, 16 nt, Human
auuugaaaauuuugau

SEQ ID NO: 1516770 - RNA, 14 nt, Human
auuuauuuuaauaa

SEQ ID NO: 1516771 - RNA, 12 nt, Human
auuuauuuaaau

SEQ ID NO: 1516772 - RNA, 14 nt, Human
auuuauuuaaauuu

SEQ ID NO: 1516773 - RNA, 15 nt, Human
auuuccaagagcuga

SEQ ID NO: 1516774 - RNA, 19 nt, Human
auuucccaaagcagugcau

SEQ ID NO: 1516775 - RNA, 16 nt, Human
auuuccaagagcugag

SEQ ID NO: 1516776 - RNA, 19 nt, Human
auuggacaguaaaauccac

SEQ ID NO: 1516777 - RNA, 19 nt, Human
auuggagcucgugggacag

SEQ ID NO: 1516778 - RNA, 13 nt, Human
auugacuuuuuau

SEQ ID NO: 1516779 - RNA, 18 nt, Human
auugacuuuuuauggcac

SEQ ID NO: 1516780 - RNA, 18 nt, Human
auugcuuuggucauauga

SEQ ID NO: 1516781 - RNA, 21 nt, Human
auugauuuccguuaaaauacc

SEQ ID NO: 1516782 - RNA, 14 nt, Human
auugcuuuggucau

SEQ ID NO: 1516783 - RNA, 17 nt, Human
auuuaaaagauacaguu

SEQ ID NO: 1516784 - RNA, 16 nt, Human
auuuaaaagauacagu

SEQ ID NO: 1516785 - RNA, 14 nt, Human
auuuaaaagauaca

SEQ ID NO: 1516786 - RNA, 13 nt, Human
auugucuagugaa

SEQ ID NO: 1516787 - RNA, 14 nt, Human
auugugggaagggg

SEQ ID NO: 1516788 - RNA, 13 nt, Human
auugugggaaggg

SEQ ID NO: 1516789 - RNA, 23 nt, Human
auugucaaaguggugagaggcau

SEQ ID NO: 1516790 - RNA, 17 nt, Human
auuguacgaagaguauu

SEQ ID NO: 1516791 - RNA, 16 nt, Human
auuguacgaagaguau

SEQ ID NO: 1516792 - RNA, 22 nt, Human
auugguuuuccaaucauuugac

SEQ ID NO: 1516793 - RNA, 18 nt, Human
augggccuccugugugug

SEQ ID NO: 1516794 - RNA, 12 nt, Human
auggggaugcag

SEQ ID NO: 1516795 - RNA, 20 nt, Human
augggcuggguucuacccag

SEQ ID NO: 1516796 - RNA, 22 nt, Human
uuugaaaacucuguguuuggaa

SEQ ID NO: 1516797 - RNA, 15 nt, Human
augggggugcauuug

SEQ ID NO: 1516798 - RNA, 14 nt, Human
augggggugcauuu

SEQ ID NO: 1516799 - RNA, 24 nt, Human
auggggcugcaccggcuggccugg

SEQ ID NO: 1516800 - RNA, 21 nt, Human
uuucugcagccacuauuguua

SEQ ID NO: 1516801 - RNA, 18 nt, Human
augggcaacccccagccu

SEQ ID NO: 1516802 - RNA, 18 nt, Human
uuucucccagucauuuaa

SEQ ID NO: 1516803 - RNA, 15 nt, Human
augggauccuggagu

SEQ ID NO: 1516804 - RNA, 19 nt, Human
uuucuggcuaugcauuuga

SEQ ID NO: 1516805 - RNA, 18 nt, Human
uuucuggcuaugcauuug

SEQ ID NO: 1516806 - RNA, 16 nt, Human
uuucuggcuaugcauu

SEQ ID NO: 1516807 - RNA, 15 nt, Human
uuucuggcuaugcau

SEQ ID NO: 1516808 - RNA, 19 nt, Human
uuucugcagccacuauugu

SEQ ID NO: 1516809 - RNA, 13 nt, Human
uuucuccccugcc

SEQ ID NO: 1516810 - RNA, 14 nt, Human
uuucuccccugccc

SEQ ID NO: 1516811 - RNA, 16 nt, Human
uuucuccccugccccc

SEQ ID NO: 1516812 - RNA, 17 nt, Human
uuucuccccugccccca

SEQ ID NO: 1516813 - RNA, 20 nt, Human
uuucuccccugcccccagga

SEQ ID NO: 1516814 - RNA, 21 nt, Human
augguuugaauauaaacacua

SEQ ID NO: 1516815 - RNA, 21 nt, Human
augguucccuugaugaagaag

SEQ ID NO: 1516816 - RNA, 16 nt, Human
augguuuucaaaauaa

SEQ ID NO: 1516817 - RNA, 14 nt, Human
augguuuucuugug

SEQ ID NO: 1516818 - RNA, 22 nt, Human
augguuugaauauaaacacuau

SEQ ID NO: 1516819 - RNA, 16 nt, Human
augguuugcaaggaag

SEQ ID NO: 1516820 - RNA, 17 nt, Human
augguuugcaaggaagc

SEQ ID NO: 1516821 - RNA, 18 nt, Human
augguuugcaaggaagcc

SEQ ID NO: 1516822 - RNA, 14 nt, Human
augguuuucaaaau

SEQ ID NO: 1516823 - RNA, 15 nt, Human
augguuuucaaaaua

SEQ ID NO: 1516824 - RNA, 14 nt, Human
augguguuacauau

SEQ ID NO: 1516825 - RNA, 12 nt, Human
augguggcuggg

SEQ ID NO: 1516826 - RNA, 13 nt, Human
augguggcugggu

SEQ ID NO: 1516827 - RNA, 15 nt, Human
augguggcuggguug

SEQ ID NO: 1516828 - RNA, 17 nt, Human
augguggcuggguugga

SEQ ID NO: 1516829 - RNA, 19 nt, Human
auggugcaaugaccuuuca

SEQ ID NO: 1516830 - RNA, 16 nt, Human
auggugcaaugaccuu

SEQ ID NO: 1516831 - RNA, 17 nt, Human
auggugcaaugaccuuu

SEQ ID NO: 1516832 - RNA, 15 nt, Human
augggugcuuggagg

SEQ ID NO: 1516833 - RNA, 20 nt, Human
auggugagggauacccaucc

SEQ ID NO: 1516834 - RNA, 20 nt, Human
augggugcuuggaggaagga

SEQ ID NO: 1516835 - RNA, 12 nt, Human
auggugcaauga

SEQ ID NO: 1516836 - RNA, 13 nt, Human
auggugcaaugac

SEQ ID NO: 1516837 - RNA, 15 nt, Human
auggugcaaugaccu

SEQ ID NO: 1516838 - RNA, 18 nt, Human
uuugugaaggugauuuau

SEQ ID NO: 1516839 - RNA, 17 nt, Human
uuugugaagcaaaauuu

SEQ ID NO: 1516840 - RNA, 19 nt, Human
uuuguaguguuggagaaga

SEQ ID NO: 1516841 - RNA, 21 nt, Human
uuuguaguguuggagaagaac

SEQ ID NO: 1516842 - RNA, 23 nt, Human
augucucuuuaaugucacaggca

SEQ ID NO: 1516843 - RNA, 16 nt, Human
augugaugagaggaaa

SEQ ID NO: 1516844 - RNA, 17 nt, Human
augugaugagaggaaau

SEQ ID NO: 1516845 - RNA, 19 nt, Human
augugaugagaggaaauca

SEQ ID NO: 1516846 - RNA, 23 nt, Human
augugcacaugcacgugugugca

SEQ ID NO: 1516847 - RNA, 13 nt, Human
uuuggcagaguuc

SEQ ID NO: 1516848 - RNA, 14 nt, Human
auguaugauuacau

SEQ ID NO: 1516849 - RNA, 22 nt, Human
auguauuacaguggggaaugaa

SEQ ID NO: 1516850 - RNA, 16 nt, Human
auguauguguaaguau

SEQ ID NO: 1516851 - RNA, 21 nt, Human
augucucugugagacucgaga

SEQ ID NO: 1516852 - RNA, 23 nt, Human
augucucugugagacucgagaac

SEQ ID NO: 1516853 - RNA, 17 nt, Human
auguccacugguucuuc

SEQ ID NO: 1516854 - RNA, 15 nt, Human
augucagugugacug

SEQ ID NO: 1516855 - RNA, 12 nt, Human
augucaguguga

SEQ ID NO: 1516856 - RNA, 13 nt, Human
augucagugugac

SEQ ID NO: 1516857 - RNA, 16 nt, Human
auguacuucaugcugu

SEQ ID NO: 1516858 - RNA, 17 nt, Human
auguagaggagaaacug

SEQ ID NO: 1516859 - RNA, 19 nt, Human
auguagaggagaaacugga

SEQ ID NO: 1516860 - RNA, 12 nt, Human
auguagaggaga

SEQ ID NO: 1516861 - RNA, 13 nt, Human
auguagaggagaa

SEQ ID NO: 1516862 - RNA, 19 nt, Human
auguagcgcuuugaauaug

SEQ ID NO: 1516863 - RNA, 21 nt, Human
auguagcgcuuugaauaugaa

SEQ ID NO: 1516864 - RNA, 22 nt, Human
uuugacagaauauguuucaaac

SEQ ID NO: 1516865 - RNA, 12 nt, Human
uuugaccucugc

SEQ ID NO: 1516866 - RNA, 18 nt, Human
uuugaccucugcagcaau

SEQ ID NO: 1516867 - RNA, 14 nt, Human
uuugcaagccagau

SEQ ID NO: 1516868 - RNA, 12 nt, Human
uuugcaaggaag

SEQ ID NO: 1516869 - RNA, 14 nt, Human
uuugcaaggaagcc

SEQ ID NO: 1516870 - RNA, 21 nt, Human
uuugcaaggaagccacagcug

SEQ ID NO: 1516871 - RNA, 15 nt, Human
uuugccguuauuaaa

SEQ ID NO: 1516872 - RNA, 21 nt, Human
uuugauucuccuucagcccuc

SEQ ID NO: 1516873 - RNA, 12 nt, Human
uuugauucuccu

SEQ ID NO: 1516874 - RNA, 13 nt, Human
uuugauucuccuu

SEQ ID NO: 1516875 - RNA, 14 nt, Human
uuugauucuccuuc

SEQ ID NO: 1516876 - RNA, 16 nt, Human
uuugauucuccuucag

SEQ ID NO: 1516877 - RNA, 22 nt, Human
uuugauucagacagcugccugg

SEQ ID NO: 1516878 - RNA, 13 nt, Human
uuugccucugccu

SEQ ID NO: 1516879 - RNA, 19 nt, Human
uuugacgggaaacaaaacu

SEQ ID NO: 1516880 - RNA, 20 nt, Human
uuugacgccaucccagcccc

SEQ ID NO: 1516881 - RNA, 13 nt, Human
uuugacgccaucc

SEQ ID NO: 1516882 - RNA, 14 nt, Human
uuugacgccauccc

SEQ ID NO: 1516883 - RNA, 16 nt, Human
uuugacgccaucccag

SEQ ID NO: 1516884 - RNA, 19 nt, Human
uuugacgccaucccagccc

SEQ ID NO: 1516885 - RNA, 23 nt, Human
uuugauuaaauucuugcaaagua

SEQ ID NO: 1516886 - RNA, 21 nt, Human
uuugauucagacagcugccug

SEQ ID NO: 1516887 - RNA, 21 nt, Human
uuugauuaaauucuugcaaag

SEQ ID NO: 1516888 - RNA, 18 nt, Human
uuugauuaaauucuugca

SEQ ID NO: 1516889 - RNA, 13 nt, Human
uuugauuaaauuc

SEQ ID NO: 1516890 - RNA, 22 nt, Human
uuugauguucuuucacccuuuu

SEQ ID NO: 1516891 - RNA, 18 nt, Human
uuuaaauauaugcuaagu

SEQ ID NO: 1516892 - RNA, 13 nt, Human
uuuaauuaaauaa

SEQ ID NO: 1516893 - RNA, 12 nt, Human
uuuaauucaguu

SEQ ID NO: 1516894 - RNA, 18 nt, Human
augcagccucacaguccu

SEQ ID NO: 1516895 - RNA, 13 nt, Human
augcaguucugaa

SEQ ID NO: 1516896 - RNA, 23 nt, Human
augcagugguaugaucacggcuc

SEQ ID NO: 1516897 - RNA, 17 nt, Human
augccauggacagaaga

SEQ ID NO: 1516898 - RNA, 18 nt, Human
augccauggacagaagaa

SEQ ID NO: 1516899 - RNA, 19 nt, Human
augccauggacagaagaag

SEQ ID NO: 1516900 - RNA, 17 nt, Human
augccauuuaaagcuua

SEQ ID NO: 1516901 - RNA, 21 nt, Human
augccauuuaaagcuuauuaa

SEQ ID NO: 1516902 - RNA, 12 nt, Human
augcccagcccc

SEQ ID NO: 1516903 - RNA, 13 nt, Human
augcccagccccu

SEQ ID NO: 1516904 - RNA, 14 nt, Human
augcccagccccuu

SEQ ID NO: 1516905 - RNA, 15 nt, Human
augcccagccccuuc

SEQ ID NO: 1516906 - RNA, 20 nt, Human
augcgugcauaccacuuuug

SEQ ID NO: 1516907 - RNA, 23 nt, Human
augcuaaagguuguauugcauau

SEQ ID NO: 1516908 - RNA, 13 nt, Human
augccuccucagg

SEQ ID NO: 1516909 - RNA, 15 nt, Human
augccuccucaggag

SEQ ID NO: 1516910 - RNA, 14 nt, Human
augccuccucagga

SEQ ID NO: 1516911 - RNA, 18 nt, Human
augccuccucaggagccg

SEQ ID NO: 1516912 - RNA, 17 nt, Human
augcacuuuguucuggc

SEQ ID NO: 1516913 - RNA, 19 nt, Human
augcacuuuguucuggcuc

SEQ ID NO: 1516914 - RNA, 20 nt, Human
augcacuuuguucuggcucu

SEQ ID NO: 1516915 - RNA, 13 nt, Human
augcaccuggaau

SEQ ID NO: 1516916 - RNA, 22 nt, Human
augcaccagcccuuagcaggga

SEQ ID NO: 1516917 - RNA, 13 nt, Human
uuuaaagaaugcu

SEQ ID NO: 1516918 - RNA, 21 nt, Human
augcacuuuguucuggcucuu

SEQ ID NO: 1516919 - RNA, 14 nt, Human
augauuaaguaaug

SEQ ID NO: 1516920 - RNA, 18 nt, Human
augauuaaguaaugauaa

SEQ ID NO: 1516921 - RNA, 17 nt, Human
augaucuaggaagacuu

SEQ ID NO: 1516922 - RNA, 20 nt, Human
augaucuaggaagacuuugg

SEQ ID NO: 1516923 - RNA, 15 nt, Human
augauaacuggaaac

SEQ ID NO: 1516924 - RNA, 17 nt, Human
augauaaguaaaugcua

SEQ ID NO: 1516925 - RNA, 20 nt, Human
uuguguuacuaaguuuuuau

SEQ ID NO: 1516926 - RNA, 15 nt, Human
uuguguuacuaaguu

SEQ ID NO: 1516927 - RNA, 13 nt, Human
uuguguuacuaag

SEQ ID NO: 1516928 - RNA, 13 nt, Human
uuguguucaccuu

SEQ ID NO: 1516929 - RNA, 21 nt, Human
uuguuccacaaguuaaauaaa

SEQ ID NO: 1516930 - RNA, 21 nt, Human
uuuaucaaagggugaaaauua

SEQ ID NO: 1516931 - RNA, 13 nt, Human
augcuaagugaaa

SEQ ID NO: 1516932 - RNA, 20 nt, Human
augcuagaacucccuuucaa

SEQ ID NO: 1516933 - RNA, 21 nt, Human
augcuagaacucccuuucaac

SEQ ID NO: 1516934 - RNA, 22 nt, Human
augcuagaacucccuuucaaca

SEQ ID NO: 1516935 - RNA, 18 nt, Human
augcuagguuaauuccaa

SEQ ID NO: 1516936 - RNA, 17 nt, Human
augcuguucaugaaaga

SEQ ID NO: 1516937 - RNA, 22 nt, Human
augcugugcccuaaaguguauu

SEQ ID NO: 1516938 - RNA, 23 nt, Human
augcuguucaugaaagauucaau

SEQ ID NO: 1516939 - RNA, 19 nt, Human
augcuguucaugaaagauu

SEQ ID NO: 1516940 - RNA, 13 nt, Human
augcuucucacug

SEQ ID NO: 1516941 - RNA, 16 nt, Human
uuucaaacauauauaa

SEQ ID NO: 1516942 - RNA, 17 nt, Human
uuucaaacauauauaac

SEQ ID NO: 1516943 - RNA, 16 nt, Human
uuucaaacuuuacuau

SEQ ID NO: 1516944 - RNA, 22 nt, Human
uuucaaacuuuacuauggcccu

SEQ ID NO: 1516945 - RNA, 11 nt, Human
auggacuuugu

SEQ ID NO: 1516946 - RNA, 12 nt, Human
auggacuuuguu

SEQ ID NO: 1516947 - RNA, 17 nt, Human
uuuccaugaaaaugcaa

SEQ ID NO: 1516948 - RNA, 17 nt, Human
uuuccaugaguccccug

SEQ ID NO: 1516949 - RNA, 18 nt, Human
uuuccaugaguccccugu

SEQ ID NO: 1516950 - RNA, 14 nt, Human
uuucaaacuuugga

SEQ ID NO: 1516951 - RNA, 14 nt, Human
auggcacuaguauu

SEQ ID NO: 1516952 - RNA, 16 nt, Human
auggcacuaguauuuc

SEQ ID NO: 1516953 - RNA, 15 nt, Human
auggcagugucuuuc

SEQ ID NO: 1516954 - RNA, 18 nt, Human
auggcauauuuuucacau

SEQ ID NO: 1516955 - RNA, 20 nt, Human
auggcauauuuuucacauau

SEQ ID NO: 1516956 - RNA, 21 nt, Human
auggcauauuuuucacauauc

SEQ ID NO: 1516957 - RNA, 22 nt, Human
auggcauauuuuucacauaucu

SEQ ID NO: 1516958 - RNA, 23 nt, Human
auggcauauuuuucacauaucua

SEQ ID NO: 1516959 - RNA, 18 nt, Human
auggcuaauguacugcau

SEQ ID NO: 1516960 - RNA, 19 nt, Human
auggcuaagcaaaauguga

SEQ ID NO: 1516961 - RNA, 19 nt, Human
augggagagaagagaaugc

SEQ ID NO: 1516962 - RNA, 15 nt, Human
augggagagaagaga

SEQ ID NO: 1516963 - RNA, 17 nt, Human
aucaggguuaguauugu

SEQ ID NO: 1516964 - RNA, 20 nt, Human
aucaggccaggcccucugcc

SEQ ID NO: 1516965 - RNA, 13 nt, Human
aucagcacgauuu

SEQ ID NO: 1516966 - RNA, 15 nt, Human
aucaggccaggcccu

SEQ ID NO: 1516967 - RNA, 16 nt, Human
aucaggccaggcccuc

SEQ ID NO: 1516968 - RNA, 18 nt, Human
aucaggccaggcccucug

SEQ ID NO: 1516969 - RNA, 12 nt, Human
aucagaauucuc

SEQ ID NO: 1516970 - RNA, 13 nt, Human
uucuaggacugaa

SEQ ID NO: 1516971 - RNA, 14 nt, Human
uucuaggacugaau

SEQ ID NO: 1516972 - RNA, 16 nt, Human
uucuaggacugaauua

SEQ ID NO: 1516973 - RNA, 23 nt, Human
uucuaggacugaauuaugaaacu

SEQ ID NO: 1516974 - RNA, 22 nt, Human
aucacuugucaauaaaauccau

SEQ ID NO: 1516975 - RNA, 11 nt, Human
aucagaauucu

SEQ ID NO: 1516976 - RNA, 21 nt, Human
uucuaaaucuccaaaauaaaa

SEQ ID NO: 1516977 - RNA, 21 nt, Human
uucuaaaggcuaccuuuguau

SEQ ID NO: 1516978 - RNA, 20 nt, Human
uucuaaaggcuaccuuugua

SEQ ID NO: 1516979 - RNA, 15 nt, Human
uucggccuccauccu

SEQ ID NO: 1516980 - RNA, 17 nt, Human
uucggauuuggggugga

SEQ ID NO: 1516981 - RNA, 14 nt, Human
uucggccuccaucc

SEQ ID NO: 1516982 - RNA, 15 nt, Human
uucgcuccugugucu

SEQ ID NO: 1516983 - RNA, 19 nt, Human
uucgcuccugugucuugca

SEQ ID NO: 1516984 - RNA, 17 nt, Human
uucuagcuaauguaaua

SEQ ID NO: 1516985 - RNA, 16 nt, Human
uucuagcauggcugcc

SEQ ID NO: 1516986 - RNA, 22 nt, Human
uucuagcauggcauauuuuuca

SEQ ID NO: 1516987 - RNA, 14 nt, Human
uucuagcauggcau

SEQ ID NO: 1516988 - RNA, 15 nt, Human
uucuagcauggcaua

SEQ ID NO: 1516989 - RNA, 18 nt, Human
uucuagcauggcauauuu

SEQ ID NO: 1516990 - RNA, 20 nt, Human
uucuagcauggcauauuuuu

SEQ ID NO: 1516991 - RNA, 21 nt, Human
uucuagcauggcauauuuuuc

SEQ ID NO: 1516992 - RNA, 14 nt, Human
uucuaaauuuuaua

SEQ ID NO: 1516993 - RNA, 23 nt, Human
uucuaagaagugaaaaucuacac

SEQ ID NO: 1516994 - RNA, 19 nt, Human
uucuaacaaaaaaauauau

SEQ ID NO: 1516995 - RNA, 15 nt, Human
uucuaaguaaaacca

SEQ ID NO: 1516996 - RNA, 17 nt, Human
uucuaaguaaaaccaca

SEQ ID NO: 1516997 - RNA, 16 nt, Human
uucuaaguaaaaccac

SEQ ID NO: 1516998 - RNA, 14 nt, Human
uuccugaacaggau

SEQ ID NO: 1516999 - RNA, 14 nt, Human
uuccugaaccgaug

SEQ ID NO: 1517000 - RNA, 15 nt, Human
uuccugaacaggaua

SEQ ID NO: 1517001 - RNA, 18 nt, Human
uuccugaagaauugaaaa

SEQ ID NO: 1517002 - RNA, 13 nt, Human
uuccucuuuccau

SEQ ID NO: 1517003 - RNA, 17 nt, Human
uuccucuuuccaucuac

SEQ ID NO: 1517004 - RNA, 22 nt, Human
uuccucuuuccaucuacccucc

SEQ ID NO: 1517005 - RNA, 19 nt, Human
uuccguagguuauuuucag

SEQ ID NO: 1517006 - RNA, 16 nt, Human
uuccguuaaaauacca

SEQ ID NO: 1517007 - RNA, 14 nt, Human
uuccguuaaaauac

SEQ ID NO: 1517008 - RNA, 20 nt, Human
uucccucaccuuucccaucu

SEQ ID NO: 1517009 - RNA, 14 nt, Human
aucaaugaguaaca

SEQ ID NO: 1517010 - RNA, 18 nt, Human
aucacggcucacugcagc

SEQ ID NO: 1517011 - RNA, 19 nt, Human
aucacggcucacugcagcc

SEQ ID NO: 1517012 - RNA, 13 nt, Human
aucacgccacugc

SEQ ID NO: 1517013 - RNA, 14 nt, Human
aucacgccacugca

SEQ ID NO: 1517014 - RNA, 15 nt, Human
aucacggcucacugc

SEQ ID NO: 1517015 - RNA, 12 nt, Human
auauuuuucaca

SEQ ID NO: 1517016 - RNA, 13 nt, Human
auauuuuucacau

SEQ ID NO: 1517017 - RNA, 14 nt, Human
auauuuuucacaua

SEQ ID NO: 1517018 - RNA, 15 nt, Human
auauuuuucacauau

SEQ ID NO: 1517019 - RNA, 17 nt, Human
auauuuuucacauaucu

SEQ ID NO: 1517020 - RNA, 11 nt, Human
uuccugugucu

SEQ ID NO: 1517021 - RNA, 14 nt, Human
aucaacagauaaau

SEQ ID NO: 1517022 - RNA, 15 nt, Human
aucaacaucuuuucu

SEQ ID NO: 1517023 - RNA, 13 nt, Human
aucaacaucuuuu

SEQ ID NO: 1517024 - RNA, 20 nt, Human
auauuuuuuguuaaaugauu

SEQ ID NO: 1517025 - RNA, 18 nt, Human
auauuuuuuguuaaauga

SEQ ID NO: 1517026 - RNA, 16 nt, Human
auauuuuuuaucauaa

SEQ ID NO: 1517027 - RNA, 17 nt, Human
uugaaauuguauuacaa

SEQ ID NO: 1517028 - RNA, 19 nt, Human
uugaacccgggaggcagag

SEQ ID NO: 1517029 - RNA, 16 nt, Human
auccuccucagaucuu

SEQ ID NO: 1517030 - RNA, 16 nt, Human
auccuaggcauuugcu

SEQ ID NO: 1517031 - RNA, 21 nt, Human
auccuaagcuauucaguaaua

SEQ ID NO: 1517032 - RNA, 18 nt, Human
auccuaaauuuacccucu

SEQ ID NO: 1517033 - RNA, 12 nt, Human
auccuaagcuau

SEQ ID NO: 1517034 - RNA, 20 nt, Human
uucuucugcuucagccuccc

SEQ ID NO: 1517035 - RNA, 14 nt, Human
uucuucucccucag

SEQ ID NO: 1517036 - RNA, 13 nt, Human
uucuucugcuuca

SEQ ID NO: 1517037 - RNA, 15 nt, Human
uucuucugcuucagc

SEQ ID NO: 1517038 - RNA, 13 nt, Human
uucuucucccuca

SEQ ID NO: 1517039 - RNA, 24 nt, Human
aucccauaugccugggcagaagga

SEQ ID NO: 1517040 - RNA, 13 nt, Human
aucccaugagccu

SEQ ID NO: 1517041 - RNA, 14 nt, Human
aucccucauccuca

SEQ ID NO: 1517042 - RNA, 21 nt, Human
aucccucauccucauacccac

SEQ ID NO: 1517043 - RNA, 23 nt, Human
aucccucauccucauacccaccc

SEQ ID NO: 1517044 - RNA, 18 nt, Human
auccaagcuggucccacu

SEQ ID NO: 1517045 - RNA, 21 nt, Human
auccaagcuggucccacucag

SEQ ID NO: 1517046 - RNA, 13 nt, Human
auccacccaccuc

SEQ ID NO: 1517047 - RNA, 15 nt, Human
auccacccaccucag

SEQ ID NO: 1517048 - RNA, 16 nt, Human
auccacccaccucagc

SEQ ID NO: 1517049 - RNA, 16 nt, Human
auccaguaucuugaag

SEQ ID NO: 1517050 - RNA, 21 nt, Human
auccaguaucuugaagacuuu

SEQ ID NO: 1517051 - RNA, 18 nt, Human
aucccauaugccugggca

SEQ ID NO: 1517052 - RNA, 19 nt, Human
aucccaaacccuucagugc

SEQ ID NO: 1517053 - RNA, 20 nt, Human
aucccaaacccuucagugcc

SEQ ID NO: 1517054 - RNA, 12 nt, Human
uucucuaggaaa

SEQ ID NO: 1517055 - RNA, 17 nt, Human
uucucuaguuugauuaa

SEQ ID NO: 1517056 - RNA, 15 nt, Human
uucucuaguuugauu

SEQ ID NO: 1517057 - RNA, 20 nt, Human
uucucuaguuugauuaaauu

SEQ ID NO: 1517058 - RNA, 14 nt, Human
aucaggugcugcca

SEQ ID NO: 1517059 - RNA, 21 nt, Human
uucuccuuguguuacuaaguu

SEQ ID NO: 1517060 - RNA, 15 nt, Human
uucuccuucagcccu

SEQ ID NO: 1517061 - RNA, 20 nt, Human
uucuccuucagcccucaccc

SEQ ID NO: 1517062 - RNA, 23 nt, Human
uucugaacuuggcgcugccccug

SEQ ID NO: 1517063 - RNA, 15 nt, Human
uucugccauauucug

SEQ ID NO: 1517064 - RNA, 19 nt, Human
uucugaacuuggcgcugcc

SEQ ID NO: 1517065 - RNA, 22 nt, Human
uucugaacuuggcgcugccccu

SEQ ID NO: 1517066 - RNA, 21 nt, Human
uucugccugcccaggccccug

SEQ ID NO: 1517067 - RNA, 18 nt, Human
uucugccugcccaggccc

SEQ ID NO: 1517068 - RNA, 16 nt, Human
uucuggcucuuccagg

SEQ ID NO: 1517069 - RNA, 17 nt, Human
uucuggcucuuccaggc

SEQ ID NO: 1517070 - RNA, 14 nt, Human
aucucauuuccaag

SEQ ID NO: 1517071 - RNA, 14 nt, Human
aucuccaaaauaaa

SEQ ID NO: 1517072 - RNA, 21 nt, Human
aucuccaaaauaaaacuuuuu

SEQ ID NO: 1517073 - RNA, 20 nt, Human
aucuccaaaauaaaacuuuu

SEQ ID NO: 1517074 - RNA, 17 nt, Human
aucuccaaaauaaaacu

SEQ ID NO: 1517075 - RNA, 16 nt, Human
aucucagggccugguc

SEQ ID NO: 1517076 - RNA, 15 nt, Human
aucucuugagccugg

SEQ ID NO: 1517077 - RNA, 18 nt, Human
aucucuugagccugggag

SEQ ID NO: 1517078 - RNA, 14 nt, Human
aucugaaaauguau

SEQ ID NO: 1517079 - RNA, 16 nt, Human
aucugaaaauguaugu

SEQ ID NO: 1517080 - RNA, 19 nt, Human
aucugaaaauguaugugua

SEQ ID NO: 1517081 - RNA, 20 nt, Human
aucugaaaauguauguguaa

SEQ ID NO: 1517082 - RNA, 22 nt, Human
aucugaaaauguauguguaagu

SEQ ID NO: 1517083 - RNA, 15 nt, Human
aucucccccagcccc

SEQ ID NO: 1517084 - RNA, 21 nt, Human
aucucccccagccccauccuc

SEQ ID NO: 1517085 - RNA, 16 nt, Human
aucucccccagcccca

SEQ ID NO: 1517086 - RNA, 17 nt, Human
aucucccccagccccau

SEQ ID NO: 1517087 - RNA, 13 nt, Human
uugauuauaaagu

SEQ ID NO: 1517088 - RNA, 14 nt, Human
uugauuaaauucuu

SEQ ID NO: 1517089 - RNA, 12 nt, Human
uugcaaggaagc

SEQ ID NO: 1517090 - RNA, 13 nt, Human
uugcaaggaagcc

SEQ ID NO: 1517091 - RNA, 23 nt, Human
aucugaaaauguauguguaagua

SEQ ID NO: 1517092 - RNA, 23 nt, Human
uugauguuuuaaggaugcuugua

SEQ ID NO: 1517093 - RNA, 13 nt, Human
uugauuaaauucu

SEQ ID NO: 1517094 - RNA, 14 nt, Human
uugcauauauacau

SEQ ID NO: 1517095 - RNA, 13 nt, Human
uugcaucaauuuu

SEQ ID NO: 1517096 - RNA, 16 nt, Human
uugcaauggcagccuu

SEQ ID NO: 1517097 - RNA, 17 nt, Human
uugcaauggcagccuug

SEQ ID NO: 1517098 - RNA, 19 nt, Human
uugcaauggcagccuuggc

SEQ ID NO: 1517099 - RNA, 15 nt, Human
uugcaccacugcacu

SEQ ID NO: 1517100 - RNA, 16 nt, Human
uugcaccacugcacuc

SEQ ID NO: 1517101 - RNA, 18 nt, Human
uugcaccacugcacucca

SEQ ID NO: 1517102 - RNA, 19 nt, Human
uugacuugacagaacacug

SEQ ID NO: 1517103 - RNA, 20 nt, Human
uugacuugacagaacacugu

SEQ ID NO: 1517104 - RNA, 21 nt, Human
uugacuugacagaacacuguc

SEQ ID NO: 1517105 - RNA, 20 nt, Human
uugacagaauauguuucaaa

SEQ ID NO: 1517106 - RNA, 16 nt, Human
uugagaucagccuggg

SEQ ID NO: 1517107 - RNA, 15 nt, Human
uugauacuacaguuu

SEQ ID NO: 1517108 - RNA, 18 nt, Human
aucuaauauguaacaagc

SEQ ID NO: 1517109 - RNA, 20 nt, Human
aucuaauauguaacaagcca

SEQ ID NO: 1517110 - RNA, 18 nt, Human
aucuacacuccagugaga

SEQ ID NO: 1517111 - RNA, 19 nt, Human
aucuacacuccagugagac

SEQ ID NO: 1517112 - RNA, 20 nt, Human
uugaguugauucagcucugc

SEQ ID NO: 1517113 - RNA, 20 nt, Human
uugagugaagcugggagaac

SEQ ID NO: 1517114 - RNA, 11 nt, Human
uugagugccuu

SEQ ID NO: 1517115 - RNA, 17 nt, Human
uugaagggaaauuucag

SEQ ID NO: 1517116 - RNA, 22 nt, Human
uugacacuuauagauugaaauu

SEQ ID NO: 1517117 - RNA, 14 nt, Human
uugacagaacacug

SEQ ID NO: 1517118 - RNA, 15 nt, Human
uugacagaacacugu

SEQ ID NO: 1517119 - RNA, 16 nt, Human
uugacagaacacuguc

SEQ ID NO: 1517120 - RNA, 17 nt, Human
uugacagaacacugucu

SEQ ID NO: 1517121 - RNA, 17 nt, Human
uugacagaauauguuuc

SEQ ID NO: 1517122 - RNA, 16 nt, Human
auccucuguacagagc

SEQ ID NO: 1517123 - RNA, 17 nt, Human
auccucuguacagagcc

SEQ ID NO: 1517124 - RNA, 19 nt, Human
aucuaaauggaaccacucu

SEQ ID NO: 1517125 - RNA, 18 nt, Human
aucuaaauggaaccacuc

SEQ ID NO: 1517126 - RNA, 17 nt, Human
aucuaaauggaaccacu

SEQ ID NO: 1517127 - RNA, 13 nt, Human
aucuaaauggaac

SEQ ID NO: 1517128 - RNA, 14 nt, Human
aucuuauaauuuaa

SEQ ID NO: 1517129 - RNA, 18 nt, Human
aucuuguagcuuuaucaa

SEQ ID NO: 1517130 - RNA, 13 nt, Human
aucuugcucugcu

SEQ ID NO: 1517131 - RNA, 20 nt, Human
aucuuggucagauuugaacu

SEQ ID NO: 1517132 - RNA, 23 nt, Human
aucugugaaaggaaagagggagg

SEQ ID NO: 1517133 - RNA, 18 nt, Human
aucugugaaaggaaagag

SEQ ID NO: 1517134 - RNA, 19 nt, Human
aucuuguagcuuuaucaaa

SEQ ID NO: 1517135 - RNA, 20 nt, Human
aucuuguagcuuuaucaaag

SEQ ID NO: 1517136 - RNA, 10 nt, Human
aucuggugac

SEQ ID NO: 1517137 - RNA, 16 nt, Human
aucuggugacuuuccu

SEQ ID NO: 1517138 - RNA, 17 nt, Human
aucuggugacuuuccuc

SEQ ID NO: 1517139 - RNA, 17 nt, Human
aucugugaaaggaaaga

SEQ ID NO: 1517140 - RNA, 18 nt, Human
augaacuuguaaaggaau

SEQ ID NO: 1517141 - RNA, 19 nt, Human
augaaauuauauaaguauu

SEQ ID NO: 1517142 - RNA, 21 nt, Human
augaaauuauauaaguauucu

SEQ ID NO: 1517143 - RNA, 19 nt, Human
augaaagggcccagagagg

SEQ ID NO: 1517144 - RNA, 15 nt, Human
augaauuacauuugu

SEQ ID NO: 1517145 - RNA, 23 nt, Human
augaauggcuaagcaaaauguga

SEQ ID NO: 1517146 - RNA, 16 nt, Human
augaauuacauuugua

SEQ ID NO: 1517147 - RNA, 17 nt, Human
augaauuacauuuguau

SEQ ID NO: 1517148 - RNA, 18 nt, Human
uuggggaccagagcugcc

SEQ ID NO: 1517149 - RNA, 20 nt, Human
aucuuugauucuccuucagc

SEQ ID NO: 1517150 - RNA, 18 nt, Human
aucuuugcagacaggcaa

SEQ ID NO: 1517151 - RNA, 22 nt, Human
aucuuuucauuuaggugaggaa

SEQ ID NO: 1517152 - RNA, 17 nt, Human
aucuuugcagacaggca

SEQ ID NO: 1517153 - RNA, 16 nt, Human
aucuuugauucuccuu

SEQ ID NO: 1517154 - RNA, 17 nt, Human
aucuuugauucuccuuc

SEQ ID NO: 1517155 - RNA, 18 nt, Human
aucuuugauucuccuuca

SEQ ID NO: 1517156 - RNA, 19 nt, Human
aucuuugauucuccuucag

SEQ ID NO: 1517157 - RNA, 18 nt, Human
augaaagggcccagagag

SEQ ID NO: 1517158 - RNA, 23 nt, Human
aucuuuucuugccucuguccccu

SEQ ID NO: 1517159 - RNA, 14 nt, Human
aucuuuucuugccu

SEQ ID NO: 1517160 - RNA, 16 nt, Human
uuggcucacacugaga

SEQ ID NO: 1517161 - RNA, 17 nt, Human
uuggcucacacugagaa

SEQ ID NO: 1517162 - RNA, 13 nt, Human
aucuuucuugauc

SEQ ID NO: 1517163 - RNA, 18 nt, Human
aucuuucuugaucaacau

SEQ ID NO: 1517164 - RNA, 14 nt, Human
aucuuugauucucc

SEQ ID NO: 1517165 - RNA, 15 nt, Human
aucuuugauucuccu

SEQ ID NO: 1517166 - RNA, 20 nt, Human
uuggagacacaacuauuuuu

SEQ ID NO: 1517167 - RNA, 14 nt, Human
uugcuugaaagaaa

SEQ ID NO: 1517168 - RNA, 16 nt, Human
uuggagggugucccaa

SEQ ID NO: 1517169 - RNA, 18 nt, Human
uuggccccugcccggcug

SEQ ID NO: 1517170 - RNA, 14 nt, Human
auaauuuuaagaaa

SEQ ID NO: 1517171 - RNA, 19 nt, Human
auaauuuauacaggucaua

SEQ ID NO: 1517172 - RNA, 21 nt, Human
auaauuuauacaggucauauu

SEQ ID NO: 1517173 - RNA, 17 nt, Human
auaauucagaaggaucu

SEQ ID NO: 1517174 - RNA, 14 nt, Human
auaaucuuucacag

SEQ ID NO: 1517175 - RNA, 14 nt, Human
auaauauuuuuaau

SEQ ID NO: 1517176 - RNA, 17 nt, Human
auaaucaaauacauuuu

SEQ ID NO: 1517177 - RNA, 20 nt, Human
auaauauuuuuaauuaaaua

SEQ ID NO: 1517178 - RNA, 14 nt, Human
auaagccagacauc

SEQ ID NO: 1517179 - RNA, 21 nt, Human
auaagauucauauuuacuucu

SEQ ID NO: 1517180 - RNA, 22 nt, Human
auaagccaaaaaaugcuugcuu

SEQ ID NO: 1517181 - RNA, 14 nt, Human
uuaggguuaugauu

SEQ ID NO: 1517182 - RNA, 16 nt, Human
uuaggguuaugauuaa

SEQ ID NO: 1517183 - RNA, 15 nt, Human
uuagggagagaagau

SEQ ID NO: 1517184 - RNA, 18 nt, Human
uuagguuggcaaaaaggc

SEQ ID NO: 1517185 - RNA, 19 nt, Human
uuaggugugggggaagcac

SEQ ID NO: 1517186 - RNA, 15 nt, Human
uuaggugaggaagca

SEQ ID NO: 1517187 - RNA, 13 nt, Human
uuauaaacuuuac

SEQ ID NO: 1517188 - RNA, 13 nt, Human
uuaguagagacag

SEQ ID NO: 1517189 - RNA, 17 nt, Human
uuaguagagacaggguu

SEQ ID NO: 1517190 - RNA, 14 nt, Human
uuaguagagacagg

SEQ ID NO: 1517191 - RNA, 17 nt, Human
uuacaguggggaaugaa

SEQ ID NO: 1517192 - RNA, 19 nt, Human
uuaccagcagagcaccuua

SEQ ID NO: 1517193 - RNA, 20 nt, Human
uuacauaagauaaaugugcu

SEQ ID NO: 1517194 - RNA, 14 nt, Human
uuacaggugugaac

SEQ ID NO: 1517195 - RNA, 19 nt, Human
auaacucauuuguuguuug

SEQ ID NO: 1517196 - RNA, 12 nt, Human
uuacaaacaugu

SEQ ID NO: 1517197 - RNA, 15 nt, Human
uuacaaacauguggu

SEQ ID NO: 1517198 - RNA, 12 nt, Human
uuacuguacaug

SEQ ID NO: 1517199 - RNA, 23 nt, Human
uuacuguacaugaaaacacauuu

SEQ ID NO: 1517200 - RNA, 22 nt, Human
uuacuguacaugaaaacacauu

SEQ ID NO: 1517201 - RNA, 14 nt, Human
uuacuguacaugaa

SEQ ID NO: 1517202 - RNA, 13 nt, Human
uuacuguacauga

SEQ ID NO: 1517203 - RNA, 15 nt, Human
uuacugcagcuuugu

SEQ ID NO: 1517204 - RNA, 16 nt, Human
uuagaagucacacagu

SEQ ID NO: 1517205 - RNA, 14 nt, Human
auaagauucauauu

SEQ ID NO: 1517206 - RNA, 16 nt, Human
uuaauuugguuuucac

SEQ ID NO: 1517207 - RNA, 22 nt, Human
uuaagagagucuauuuacggaa

SEQ ID NO: 1517208 - RNA, 15 nt, Human
uuaaucuaaauggaa

SEQ ID NO: 1517209 - RNA, 16 nt, Human
aguuuuauaugcuucu

SEQ ID NO: 1517210 - RNA, 21 nt, Human
aguuuugugaaggugauuuau

SEQ ID NO: 1517211 - RNA, 22 nt, Human
uuaacuuuuauaaacuuuaccu

SEQ ID NO: 1517212 - RNA, 23 nt, Human
uuaacuuuuauaaacuuuaccuu

SEQ ID NO: 1517213 - RNA, 19 nt, Human
uuaagaaaaaggaugcaca

SEQ ID NO: 1517214 - RNA, 20 nt, Human
aguuuaaauuguaauaggcg

SEQ ID NO: 1517215 - RNA, 17 nt, Human
aguuuaaauuguaauag

SEQ ID NO: 1517216 - RNA, 12 nt, Human
aguuuaccaucu

SEQ ID NO: 1517217 - RNA, 15 nt, Human
aguuuacauuguaaa

SEQ ID NO: 1517218 - RNA, 17 nt, Human
aguuuacauuguaaaua

SEQ ID NO: 1517219 - RNA, 15 nt, Human
aguuuagcuggaaaa

SEQ ID NO: 1517220 - RNA, 16 nt, Human
aguuuaccaucugaaa

SEQ ID NO: 1517221 - RNA, 16 nt, Human
aguuuagcuggaaaag

SEQ ID NO: 1517222 - RNA, 20 nt, Human
uuaaaaaucucaaauuucua

SEQ ID NO: 1517223 - RNA, 19 nt, Human
uuaaaaaucucaaauuucu

SEQ ID NO: 1517224 - RNA, 16 nt, Human
uuaaaaaauggaacau

SEQ ID NO: 1517225 - RNA, 20 nt, Human
uuaaaaaugguuuaaauggu

SEQ ID NO: 1517226 - RNA, 22 nt, Human
uuaaaaucauuucugcaucagc

SEQ ID NO: 1517227 - RNA, 16 nt, Human
uuaacagaaauguaca

SEQ ID NO: 1517228 - RNA, 14 nt, Human
uuaacagaaaugua

SEQ ID NO: 1517229 - RNA, 13 nt, Human
uuaacagaaaugu

SEQ ID NO: 1517230 - RNA, 12 nt, Human
uuaacagaaaug

SEQ ID NO: 1517231 - RNA, 15 nt, Human
uuaaauuuugaguuc

SEQ ID NO: 1517232 - RNA, 20 nt, Human
uuaaauuuugaguucuacau

SEQ ID NO: 1517233 - RNA, 14 nt, Human
uuaaauuuuguguc

SEQ ID NO: 1517234 - RNA, 16 nt, Human
uuaaauuuugugucuc

SEQ ID NO: 1517235 - RNA, 19 nt, Human
aguuucugccgcagcccug

SEQ ID NO: 1517236 - RNA, 22 nt, Human
aguuuguuaguaugaggcauuu

SEQ ID NO: 1517237 - RNA, 15 nt, Human
aguuucugccgcagc

SEQ ID NO: 1517238 - RNA, 14 nt, Human
aguuucucuuuuca

SEQ ID NO: 1517239 - RNA, 18 nt, Human
auagauaggucagugcaa

SEQ ID NO: 1517240 - RNA, 14 nt, Human
auagaguguacuua

SEQ ID NO: 1517241 - RNA, 19 nt, Human
auagaguguacuuaacuau

SEQ ID NO: 1517242 - RNA, 21 nt, Human
auagaguguacuuaacuauuc

SEQ ID NO: 1517243 - RNA, 14 nt, Human
auagagagagacca

SEQ ID NO: 1517244 - RNA, 15 nt, Human
auagagcaaaauuga

SEQ ID NO: 1517245 - RNA, 17 nt, Human
auagagcaaaauugaug

SEQ ID NO: 1517246 - RNA, 21 nt, Human
auagagcaaaauugauguguu

SEQ ID NO: 1517247 - RNA, 22 nt, Human
auagagcaaaauugauguguuu

SEQ ID NO: 1517248 - RNA, 13 nt, Human
auagaaguaaaaa

SEQ ID NO: 1517249 - RNA, 17 nt, Human
auagaauuaacacauga

SEQ ID NO: 1517250 - RNA, 23 nt, Human
auagacaauuuauuauggcacau

SEQ ID NO: 1517251 - RNA, 22 nt, Human
auagacaauuuauuauggcaca

SEQ ID NO: 1517252 - RNA, 16 nt, Human
auagacaauuuauuau

SEQ ID NO: 1517253 - RNA, 14 nt, Human
auacucuuauaucu

SEQ ID NO: 1517254 - RNA, 18 nt, Human
auacucuuauaucuauau

SEQ ID NO: 1517255 - RNA, 16 nt, Human
auacucugcuuagaau

SEQ ID NO: 1517256 - RNA, 17 nt, Human
auacuccuccaagguua

SEQ ID NO: 1517257 - RNA, 14 nt, Human
auacucccaucugu

SEQ ID NO: 1517258 - RNA, 16 nt, Human
auacucauuaggaugg

SEQ ID NO: 1517259 - RNA, 11 nt, Human
auacucccauc

SEQ ID NO: 1517260 - RNA, 14 nt, Human
uuauuauauuuaca

SEQ ID NO: 1517261 - RNA, 19 nt, Human
uuauguuaaaacugggaca

SEQ ID NO: 1517262 - RNA, 15 nt, Human
uuauuauauuuacaa

SEQ ID NO: 1517263 - RNA, 12 nt, Human
uuauuaugcaug

SEQ ID NO: 1517264 - RNA, 13 nt, Human
uuauuaugcauga

SEQ ID NO: 1517265 - RNA, 19 nt, Human
uuaugauuaaguaaugaua

SEQ ID NO: 1517266 - RNA, 22 nt, Human
uuaugauuaaguaaugauaacu

SEQ ID NO: 1517267 - RNA, 19 nt, Human
uuauggcuuuugugcauua

SEQ ID NO: 1517268 - RNA, 20 nt, Human
uuaugaugugggucaaggaa

SEQ ID NO: 1517269 - RNA, 21 nt, Human
uuaugaugugggucaaggaau

SEQ ID NO: 1517270 - RNA, 13 nt, Human
uuaugggcugggu

SEQ ID NO: 1517271 - RNA, 22 nt, Human
uuaugggcuggguucuacccag

SEQ ID NO: 1517272 - RNA, 14 nt, Human
uuaugaaacuuuug

SEQ ID NO: 1517273 - RNA, 17 nt, Human
uuaugaaacuuuuggaa

SEQ ID NO: 1517274 - RNA, 18 nt, Human
uuaugaaacuuuuggaag

SEQ ID NO: 1517275 - RNA, 19 nt, Human
uuaugaaacuuuuggaagg

SEQ ID NO: 1517276 - RNA, 21 nt, Human
uuaucacccagaagaaaauag

SEQ ID NO: 1517277 - RNA, 19 nt, Human
uuaucacccagaagaaaau

SEQ ID NO: 1517278 - RNA, 18 nt, Human
uuaucacccagaagaaaa

SEQ ID NO: 1517279 - RNA, 17 nt, Human
uuaucacccagaagaaa

SEQ ID NO: 1517280 - RNA, 14 nt, Human
uuaugaauuacauu

SEQ ID NO: 1517281 - RNA, 16 nt, Human
uuaugaauuacauuug

SEQ ID NO: 1517282 - RNA, 17 nt, Human
uuaugaauuacauuugu

SEQ ID NO: 1517283 - RNA, 21 nt, Human
uuaugaauuacauuuguauaa

SEQ ID NO: 1517284 - RNA, 11 nt, Human
uuaugacucca

SEQ ID NO: 1517285 - RNA, 18 nt, Human
auacaguuacucagaauu

SEQ ID NO: 1517286 - RNA, 23 nt, Human
auacagauagauauaugcucugc

SEQ ID NO: 1517287 - RNA, 23 nt, Human
auacaggaaaagcugcugacagu

SEQ ID NO: 1517288 - RNA, 20 nt, Human
auacaguuacucagaauucu

SEQ ID NO: 1517289 - RNA, 18 nt, Human
uuauaaacuuuaccuuuu

SEQ ID NO: 1517290 - RNA, 17 nt, Human
uuauaaacuuuaccuuu

SEQ ID NO: 1517291 - RNA, 16 nt, Human
auacagaggcaacugc

SEQ ID NO: 1517292 - RNA, 17 nt, Human
auacagaggcaacugca

SEQ ID NO: 1517293 - RNA, 18 nt, Human
auacgugggcauucaaau

SEQ ID NO: 1517294 - RNA, 19 nt, Human
auacgugggcauucaaaug

SEQ ID NO: 1517295 - RNA, 16 nt, Human
auacguacacauuuua

SEQ ID NO: 1517296 - RNA, 15 nt, Human
auacguacacauuuu

SEQ ID NO: 1517297 - RNA, 14 nt, Human
auacguacacauuu

SEQ ID NO: 1517298 - RNA, 13 nt, Human
auacguacacauu

SEQ ID NO: 1517299 - RNA, 23 nt, Human
auacgcaacauaauuaaauuuug

SEQ ID NO: 1517300 - RNA, 14 nt, Human
auaccuuuuuuaga

SEQ ID NO: 1517301 - RNA, 17 nt, Human
auaccagccaguaaaug

SEQ ID NO: 1517302 - RNA, 18 nt, Human
auaccacuuuuguucuug

SEQ ID NO: 1517303 - RNA, 17 nt, Human
auaccacuuuuguucuu

SEQ ID NO: 1517304 - RNA, 19 nt, Human
uuauauuugaaauauugac

SEQ ID NO: 1517305 - RNA, 17 nt, Human
auacuauggaauuucuc

SEQ ID NO: 1517306 - RNA, 20 nt, Human
auacuaaccagcagaaaugc

SEQ ID NO: 1517307 - RNA, 19 nt, Human
auacuaaccagcagaaaug

SEQ ID NO: 1517308 - RNA, 13 nt, Human
auacuaaccagca

SEQ ID NO: 1517309 - RNA, 16 nt, Human
aguggggaaugaagau

SEQ ID NO: 1517310 - RNA, 11 nt, Human
aguggcagcug

SEQ ID NO: 1517311 - RNA, 19 nt, Human
uguuacauaagauaaaugu

SEQ ID NO: 1517312 - RNA, 23 nt, Human
uguuaagcagauggaaugcugug

SEQ ID NO: 1517313 - RNA, 22 nt, Human
uguguuaucacccagaagaaaa

SEQ ID NO: 1517314 - RNA, 23 nt, Human
uguguuaucacccagaagaaaau

SEQ ID NO: 1517315 - RNA, 20 nt, Human
uguggucacaggaaguagag

SEQ ID NO: 1517316 - RNA, 14 nt, Human
uguguaaaauguga

SEQ ID NO: 1517317 - RNA, 19 nt, Human
ugugucuaaauuugaaugu

SEQ ID NO: 1517318 - RNA, 22 nt, Human
ugugucuaaauuugaauguuaa

SEQ ID NO: 1517319 - RNA, 20 nt, Human
ugugucuugcaauggcagcc

SEQ ID NO: 1517320 - RNA, 11 nt, Human
uguguguuuau

SEQ ID NO: 1517321 - RNA, 13 nt, Human
uguuaugacucca

SEQ ID NO: 1517322 - RNA, 17 nt, Human
uguuaugacuccagaau

SEQ ID NO: 1517323 - RNA, 22 nt, Human
agugugguguuuccuggcacug

SEQ ID NO: 1517324 - RNA, 19 nt, Human
uguuccacaaguuaaauaa

SEQ ID NO: 1517325 - RNA, 21 nt, Human
agugugccugaagucccagau

SEQ ID NO: 1517326 - RNA, 20 nt, Human
agugugacugaucucucgug

SEQ ID NO: 1517327 - RNA, 19 nt, Human
agugugaggguccugcagc

SEQ ID NO: 1517328 - RNA, 16 nt, Human
aguguuguggauuuaa

SEQ ID NO: 1517329 - RNA, 13 nt, Human
aguuacucagaau

SEQ ID NO: 1517330 - RNA, 20 nt, Human
aguguuguggauuuaacaga

SEQ ID NO: 1517331 - RNA, 19 nt, Human
aguguuguggauuuaacag

SEQ ID NO: 1517332 - RNA, 15 nt, Human
uguucuaagaaguga

SEQ ID NO: 1517333 - RNA, 22 nt, Human
uguugcccacagcuguaugauu

SEQ ID NO: 1517334 - RNA, 23 nt, Human
uguugcccaggcuggcgugcagu

SEQ ID NO: 1517335 - RNA, 20 nt, Human
uguugcccaggcuggcgugc

SEQ ID NO: 1517336 - RNA, 12 nt, Human
uguugcccaggc

SEQ ID NO: 1517337 - RNA, 14 nt, Human
agugccaaaaacaa

SEQ ID NO: 1517338 - RNA, 16 nt, Human
agugcaugcugucccu

SEQ ID NO: 1517339 - RNA, 17 nt, Human
agugcacuaauguguaa

SEQ ID NO: 1517340 - RNA, 21 nt, Human
agugcacuaauguguaagaca

SEQ ID NO: 1517341 - RNA, 17 nt, Human
agugcagugagccgaga

SEQ ID NO: 1517342 - RNA, 14 nt, Human
agugcaaauuguca

SEQ ID NO: 1517343 - RNA, 16 nt, Human
agugaggaugaaaaaa

SEQ ID NO: 1517344 - RNA, 14 nt, Human
agugaggcucugcc

SEQ ID NO: 1517345 - RNA, 13 nt, Human
agugaggcucugc

SEQ ID NO: 1517346 - RNA, 12 nt, Human
agugaggcucug

SEQ ID NO: 1517347 - RNA, 12 nt, Human
ugugcucugauc

SEQ ID NO: 1517348 - RNA, 18 nt, Human
ugugcugagucugaaggc

SEQ ID NO: 1517349 - RNA, 19 nt, Human
ugugcugagucugaaggcu

SEQ ID NO: 1517350 - RNA, 12 nt, Human
ugugcugcccug

SEQ ID NO: 1517351 - RNA, 14 nt, Human
uguggaugauaaaa

SEQ ID NO: 1517352 - RNA, 22 nt, Human
uguggauuuaacagaaauguac

SEQ ID NO: 1517353 - RNA, 23 nt, Human
agugagcugguuuuuagcggaga

SEQ ID NO: 1517354 - RNA, 20 nt, Human
uguggauuuaacagaaaugu

SEQ ID NO: 1517355 - RNA, 19 nt, Human
uguggauuuaacagaaaug

SEQ ID NO: 1517356 - RNA, 18 nt, Human
ugugcugcccugcccacc

SEQ ID NO: 1517357 - RNA, 19 nt, Human
ugugcugcccugcccaccu

SEQ ID NO: 1517358 - RNA, 20 nt, Human
ugugcugcccugcccaccug

SEQ ID NO: 1517359 - RNA, 21 nt, Human
ugugcugcccugcccaccugg

SEQ ID NO: 1517360 - RNA, 14 nt, Human
agugagcacuaagg

SEQ ID NO: 1517361 - RNA, 22 nt, Human
agugagcacuaaggugugcucu

SEQ ID NO: 1517362 - RNA, 22 nt, Human
ugugaugaugaaaugaggucag

SEQ ID NO: 1517363 - RNA, 19 nt, Human
ugugaugagaggaaaucac

SEQ ID NO: 1517364 - RNA, 12 nt, Human
agugagcugguu

SEQ ID NO: 1517365 - RNA, 18 nt, Human
agucuuucacauuuaaau

SEQ ID NO: 1517366 - RNA, 21 nt, Human
agugaacaaauuuacagagac

SEQ ID NO: 1517367 - RNA, 16 nt, Human
agucuuucacauuuaa

SEQ ID NO: 1517368 - RNA, 20 nt, Human
agugaacuugggccacugug

SEQ ID NO: 1517369 - RNA, 21 nt, Human
agugacugauggcuaauguac

SEQ ID NO: 1517370 - RNA, 22 nt, Human
agugaacaaauuuacagagaca

SEQ ID NO: 1517371 - RNA, 23 nt, Human
agugaacaaauuuacagagacag

SEQ ID NO: 1517372 - RNA, 16 nt, Human
agugaacuugggccac

SEQ ID NO: 1517373 - RNA, 12 nt, Human
agucugaaggcu

SEQ ID NO: 1517374 - RNA, 13 nt, Human
agucuuagaugua

SEQ ID NO: 1517375 - RNA, 23 nt, Human
agucuuagauguauauauuuccu

SEQ ID NO: 1517376 - RNA, 14 nt, Human
agucuuagauguau

SEQ ID NO: 1517377 - RNA, 16 nt, Human
agucuuagauguauau

SEQ ID NO: 1517378 - RNA, 16 nt, Human
agucucuugauucaua

SEQ ID NO: 1517379 - RNA, 17 nt, Human
agucucuugauucauaa

SEQ ID NO: 1517380 - RNA, 11 nt, Human
ugugaggaagc

SEQ ID NO: 1517381 - RNA, 12 nt, Human
ugugaggaagcc

SEQ ID NO: 1517382 - RNA, 19 nt, Human
ugugagacucgagaacuuu

SEQ ID NO: 1517383 - RNA, 17 nt, Human
agucaccccggccaccu

SEQ ID NO: 1517384 - RNA, 15 nt, Human
agucaccaagcccag

SEQ ID NO: 1517385 - RNA, 19 nt, Human
aguauucuuauuuaaugaa

SEQ ID NO: 1517386 - RNA, 15 nt, Human
aguauuacuucugcu

SEQ ID NO: 1517387 - RNA, 23 nt, Human
ugucauuugcuggagcucugccc

SEQ ID NO: 1517388 - RNA, 14 nt, Human
uguccaagaagccc

SEQ ID NO: 1517389 - RNA, 15 nt, Human
uguccaagaagccca

SEQ ID NO: 1517390 - RNA, 17 nt, Human
ugucagguggggcagcu

SEQ ID NO: 1517391 - RNA, 18 nt, Human
ugucagguggggcagcuu

SEQ ID NO: 1517392 - RNA, 20 nt, Human
ugucagguggggcagcuuga

SEQ ID NO: 1517393 - RNA, 20 nt, Human
ugucauuugagcagggcuca

SEQ ID NO: 1517394 - RNA, 21 nt, Human
ugucauuugagcagggcucag

SEQ ID NO: 1517395 - RNA, 22 nt, Human
ugucauuugagcagggcucagc

SEQ ID NO: 1517396 - RNA, 16 nt, Human
uguccaagaagcccag

SEQ ID NO: 1517397 - RNA, 17 nt, Human
uguccaagaagcccagg

SEQ ID NO: 1517398 - RNA, 18 nt, Human
uguccaagaagcccagga

SEQ ID NO: 1517399 - RNA, 22 nt, Human
uguccaagaagcccaggaaagg

SEQ ID NO: 1517400 - RNA, 22 nt, Human
uguccccuucucucaucucuua

SEQ ID NO: 1517401 - RNA, 20 nt, Human
ugucccugcacuugcagacu

SEQ ID NO: 1517402 - RNA, 22 nt, Human
ugucccugcacuugcagacucu

SEQ ID NO: 1517403 - RNA, 23 nt, Human
ugucccugcacuugcagacucua

SEQ ID NO: 1517404 - RNA, 15 nt, Human
uguccccugacaggg

SEQ ID NO: 1517405 - RNA, 16 nt, Human
uguccccugacagggc

SEQ ID NO: 1517406 - RNA, 18 nt, Human
uguccccugacagggcca

SEQ ID NO: 1517407 - RNA, 11 nt, Human
uguccccuucu

SEQ ID NO: 1517408 - RNA, 14 nt, Human
uguccccuucucuc

SEQ ID NO: 1517409 - RNA, 16 nt, Human
uguccccuucucucau

SEQ ID NO: 1517410 - RNA, 20 nt, Human
uguccccuucucucaucucu

SEQ ID NO: 1517411 - RNA, 15 nt, Human
agucuauuuacggaa

SEQ ID NO: 1517412 - RNA, 20 nt, Human
agucuauuuacggaacucaa

SEQ ID NO: 1517413 - RNA, 23 nt, Human
agucucacuguugcccaggcugg

SEQ ID NO: 1517414 - RNA, 13 nt, Human
agucucaggaaau

SEQ ID NO: 1517415 - RNA, 16 nt, Human
agucucaggaaaucaa

SEQ ID NO: 1517416 - RNA, 11 nt, Human
ugucuccaacc

SEQ ID NO: 1517417 - RNA, 16 nt, Human
ugucuccaacccccca

SEQ ID NO: 1517418 - RNA, 17 nt, Human
ugucuccaaccccccag

SEQ ID NO: 1517419 - RNA, 19 nt, Human
ugucuccaaccccccagca

SEQ ID NO: 1517420 - RNA, 20 nt, Human
ugucuccaaccccccagcac

SEQ ID NO: 1517421 - RNA, 21 nt, Human
ugucuccaaccccccagcacu

SEQ ID NO: 1517422 - RNA, 22 nt, Human
ugucuccaaccccccagcacug

SEQ ID NO: 1517423 - RNA, 23 nt, Human
ugucuccaaccccccagcacuga

SEQ ID NO: 1517424 - RNA, 18 nt, Human
agucgcugugccacaggc

SEQ ID NO: 1517425 - RNA, 14 nt, Human
aguccucccaucuc

SEQ ID NO: 1517426 - RNA, 16 nt, Human
aguccucccaucucac

SEQ ID NO: 1517427 - RNA, 14 nt, Human
agucaggaaagaga

SEQ ID NO: 1517428 - RNA, 15 nt, Human
agucaggaaagagaa

SEQ ID NO: 1517429 - RNA, 22 nt, Human
agucagaaguuucugccgcagc

SEQ ID NO: 1517430 - RNA, 19 nt, Human
ugucccuuacgugaguccu

SEQ ID NO: 1517431 - RNA, 23 nt, Human
ugucccuuacgugaguccuggca

SEQ ID NO: 1517432 - RNA, 18 nt, Human
agucccaccuuggcugca

SEQ ID NO: 1517433 - RNA, 19 nt, Human
agucccaccuuggcugcag

SEQ ID NO: 1517434 - RNA, 20 nt, Human
agucccaccuuggcugcagg

SEQ ID NO: 1517435 - RNA, 15 nt, Human
agucccaccuuggcu

SEQ ID NO: 1517436 - RNA, 16 nt, Human
agucccaccuuggcug

SEQ ID NO: 1517437 - RNA, 16 nt, Human
uguaggguuauaauaa

SEQ ID NO: 1517438 - RNA, 17 nt, Human
uguaggguuauaauaau

SEQ ID NO: 1517439 - RNA, 17 nt, Human
uguaguguuggagaaga

SEQ ID NO: 1517440 - RNA, 18 nt, Human
uguaguguuggagaagaa

SEQ ID NO: 1517441 - RNA, 19 nt, Human
uguaguguuggagaagaac

SEQ ID NO: 1517442 - RNA, 18 nt, Human
uguauauccuuucuaaca

SEQ ID NO: 1517443 - RNA, 22 nt, Human
uguauauauuuccuauauuguu

SEQ ID NO: 1517444 - RNA, 18 nt, Human
uguauauauuuccuauau

SEQ ID NO: 1517445 - RNA, 21 nt, Human
uguacauggaauaacauguaa

SEQ ID NO: 1517446 - RNA, 13 nt, Human
aguaauagagcaa

SEQ ID NO: 1517447 - RNA, 16 nt, Human
aguaaaaccacagcag

SEQ ID NO: 1517448 - RNA, 17 nt, Human
aguaaaaccacagcagu

SEQ ID NO: 1517449 - RNA, 19 nt, Human
aguaaaaccacagcaguug

SEQ ID NO: 1517450 - RNA, 20 nt, Human
aguaaaaccacagcaguuga

SEQ ID NO: 1517451 - RNA, 13 nt, Human
aguaaugauaacu

SEQ ID NO: 1517452 - RNA, 12 nt, Human
aguaauuggaaa

SEQ ID NO: 1517453 - RNA, 13 nt, Human
aguaauuggaaag

SEQ ID NO: 1517454 - RNA, 19 nt, Human
aguaauucaagaaaacaac

SEQ ID NO: 1517455 - RNA, 19 nt, Human
aguacauuuggagacacaa

SEQ ID NO: 1517456 - RNA, 23 nt, Human
aguacacuguuucaaacuuuacu

SEQ ID NO: 1517457 - RNA, 21 nt, Human
aguacacuguuucaaacuuua

SEQ ID NO: 1517458 - RNA, 12 nt, Human
aggugugcucug

SEQ ID NO: 1517459 - RNA, 14 nt, Human
agguugaagcacca

SEQ ID NO: 1517460 - RNA, 16 nt, Human
aggugucccugcacuu

SEQ ID NO: 1517461 - RNA, 20 nt, Human
aggugucccugcacuugcag

SEQ ID NO: 1517462 - RNA, 21 nt, Human
aggugugagucaccaagccca

SEQ ID NO: 1517463 - RNA, 22 nt, Human
aggugugagucaccaagcccag

SEQ ID NO: 1517464 - RNA, 12 nt, Human
aggugggaggau

SEQ ID NO: 1517465 - RNA, 16 nt, Human
aggugcuacaaaaaca

SEQ ID NO: 1517466 - RNA, 14 nt, Human
agguuucugaaaau

SEQ ID NO: 1517467 - RNA, 20 nt, Human
agguuggcaaaaaggcagga

SEQ ID NO: 1517468 - RNA, 15 nt, Human
agguuucugaaaauu

SEQ ID NO: 1517469 - RNA, 23 nt, Human
agguuucugaaaauuaacacugc

SEQ ID NO: 1517470 - RNA, 13 nt, Human
uguaagggaaacu

SEQ ID NO: 1517471 - RNA, 18 nt, Human
uguaagggaaacugccag

SEQ ID NO: 1517472 - RNA, 23 nt, Human
uguaauuaaguacuauguaucaa

SEQ ID NO: 1517473 - RNA, 18 nt, Human
uguaauuaaguacuaugu

SEQ ID NO: 1517474 - RNA, 19 nt, Human
uguaagggaaacugccagc

SEQ ID NO: 1517475 - RNA, 19 nt, Human
uguaauuaaguacuaugua

SEQ ID NO: 1517476 - RNA, 21 nt, Human
uguaauuaaguacuauguauc

SEQ ID NO: 1517477 - RNA, 14 nt, Human
uguacaugaaaaca

SEQ ID NO: 1517478 - RNA, 16 nt, Human
uguacaugaaaacaca

SEQ ID NO: 1517479 - RNA, 20 nt, Human
uguacauaaugcgugcauac

SEQ ID NO: 1517480 - RNA, 19 nt, Human
uguacauaaugcgugcaua

SEQ ID NO: 1517481 - RNA, 20 nt, Human
uguaauuuuuuuaucgucac

SEQ ID NO: 1517482 - RNA, 18 nt, Human
ugggaaacaaaaggauaa

SEQ ID NO: 1517483 - RNA, 21 nt, Human
uggcuuuugugcauuaucuag

SEQ ID NO: 1517484 - RNA, 16 nt, Human
uggcuuuugugcauua

SEQ ID NO: 1517485 - RNA, 22 nt, Human
uggcuucacggaagagccuugc

SEQ ID NO: 1517486 - RNA, 17 nt, Human
uggcuucacggaagagc

SEQ ID NO: 1517487 - RNA, 20 nt, Human
uggcuucacggaagagccuu

SEQ ID NO: 1517488 - RNA, 14 nt, Human
ugggaaagcauugu

SEQ ID NO: 1517489 - RNA, 16 nt, Human
ugggaaagcauuguaa

SEQ ID NO: 1517490 - RNA, 21 nt, Human
ugggaaagcauuguaaaugug

SEQ ID NO: 1517491 - RNA, 17 nt, Human
ugggaaagcauuguaaa

SEQ ID NO: 1517492 - RNA, 18 nt, Human
ugggaaagcauuguaaau

SEQ ID NO: 1517493 - RNA, 16 nt, Human
uggcuguuggcugggg

SEQ ID NO: 1517494 - RNA, 18 nt, Human
uggcuguuggcugggggc

SEQ ID NO: 1517495 - RNA, 23 nt, Human
uggcuguuggcugggggccucag

SEQ ID NO: 1517496 - RNA, 14 nt, Human
uggcuucacggaag

SEQ ID NO: 1517497 - RNA, 23 nt, Human
uggcugcaaaggguaucaggugc

SEQ ID NO: 1517498 - RNA, 13 nt, Human
uggcucacgccug

SEQ ID NO: 1517499 - RNA, 23 nt, Human
uggcuauaggugcuacaaaaaca

SEQ ID NO: 1517500 - RNA, 12 nt, Human
uggcucacacug

SEQ ID NO: 1517501 - RNA, 13 nt, Human
uggcucacacuga

SEQ ID NO: 1517502 - RNA, 14 nt, Human
uggcucacacugag

SEQ ID NO: 1517503 - RNA, 15 nt, Human
uggcucacacugaga

SEQ ID NO: 1517504 - RNA, 16 nt, Human
uggcucacacugagaa

SEQ ID NO: 1517505 - RNA, 18 nt, Human
uggcuaagcaaaauguga

SEQ ID NO: 1517506 - RNA, 17 nt, Human
aggcuccaggagcagcc

SEQ ID NO: 1517507 - RNA, 18 nt, Human
aggcuccaggagcagcca

SEQ ID NO: 1517508 - RNA, 19 nt, Human
aggcuccaggagcagccac

SEQ ID NO: 1517509 - RNA, 23 nt, Human
aggcuccaggagcagccacauuc

SEQ ID NO: 1517510 - RNA, 17 nt, Human
uggcuaauguacugcau

SEQ ID NO: 1517511 - RNA, 19 nt, Human
uggcuaauguacugcauau

SEQ ID NO: 1517512 - RNA, 15 nt, Human
uggcuauaggugcua

SEQ ID NO: 1517513 - RNA, 19 nt, Human
uggcuauaggugcuacaaa

SEQ ID NO: 1517514 - RNA, 14 nt, Human
aggcuggguucuga

SEQ ID NO: 1517515 - RNA, 17 nt, Human
aggcuggguucugaucc

SEQ ID NO: 1517516 - RNA, 22 nt, Human
aggcugggggaagaagcucucu

SEQ ID NO: 1517517 - RNA, 18 nt, Human
aggcugggcuucaguggc

SEQ ID NO: 1517518 - RNA, 19 nt, Human
aggcugggcuucaguggca

SEQ ID NO: 1517519 - RNA, 20 nt, Human
aggcugggcuucaguggcag

SEQ ID NO: 1517520 - RNA, 21 nt, Human
aggcugggcuucaguggcagc

SEQ ID NO: 1517521 - RNA, 22 nt, Human
aggcugggcuucaguggcagcu

SEQ ID NO: 1517522 - RNA, 23 nt, Human
aggcugggcuucaguggcagcug

SEQ ID NO: 1517523 - RNA, 17 nt, Human
aggcugggggaagaagc

SEQ ID NO: 1517524 - RNA, 20 nt, Human
ugggaacccaaguccaagca

SEQ ID NO: 1517525 - RNA, 19 nt, Human
aggcugggagagccuucca

SEQ ID NO: 1517526 - RNA, 16 nt, Human
aggcugggagagccuu

SEQ ID NO: 1517527 - RNA, 22 nt, Human
aggcugggagagccuuccaggg

SEQ ID NO: 1517528 - RNA, 20 nt, Human
aggcugggagagccuuccag

SEQ ID NO: 1517529 - RNA, 21 nt, Human
aggcugggagagccuuccagg

SEQ ID NO: 1517530 - RNA, 13 nt, Human
aggcugggcuccc

SEQ ID NO: 1517531 - RNA, 14 nt, Human
aggcugggcucccu

SEQ ID NO: 1517532 - RNA, 18 nt, Human
aggcugggcucccuuccc

SEQ ID NO: 1517533 - RNA, 14 nt, Human
aggcugggcuucag

SEQ ID NO: 1517534 - RNA, 21 nt, Human
aggcugggcucccuucccacc

SEQ ID NO: 1517535 - RNA, 23 nt, Human
aggcugggcucccuucccaccuc

SEQ ID NO: 1517536 - RNA, 14 nt, Human
agggaaacugccag

SEQ ID NO: 1517537 - RNA, 15 nt, Human
agggaaacugccagc

SEQ ID NO: 1517538 - RNA, 16 nt, Human
agggaaacugccagca

SEQ ID NO: 1517539 - RNA, 19 nt, Human
agggaaacugccagcaacg

SEQ ID NO: 1517540 - RNA, 21 nt, Human
agggaaacugccagcaacgca

SEQ ID NO: 1517541 - RNA, 23 nt, Human
agggaaacugccagcaacgcagg

SEQ ID NO: 1517542 - RNA, 23 nt, Human
aggcuuagucacugagacagccc

SEQ ID NO: 1517543 - RNA, 22 nt, Human
aggcuuagucacugagacagcc

SEQ ID NO: 1517544 - RNA, 14 nt, Human
ugggcauucaaaug

SEQ ID NO: 1517545 - RNA, 13 nt, Human
ugggcauucaaau

SEQ ID NO: 1517546 - RNA, 23 nt, Human
ugggcagaaggaagacuucaucc

SEQ ID NO: 1517547 - RNA, 16 nt, Human
ugggcagaaggaagac

SEQ ID NO: 1517548 - RNA, 20 nt, Human
ugggcagaaggaagacuuca

SEQ ID NO: 1517549 - RNA, 13 nt, Human
ugggcagaaggaa

SEQ ID NO: 1517550 - RNA, 17 nt, Human
ugggaggucaaggcugc

SEQ ID NO: 1517551 - RNA, 19 nt, Human
ugggaggcugagaugggag

SEQ ID NO: 1517552 - RNA, 21 nt, Human
ugggagaaccaaaaagaggcu

SEQ ID NO: 1517553 - RNA, 22 nt, Human
ugggagaaccaaaaagaggcua

SEQ ID NO: 1517554 - RNA, 22 nt, Human
ugggaggauugcuugagcucag

SEQ ID NO: 1517555 - RNA, 18 nt, Human
ugggaggauugcuugagc

SEQ ID NO: 1517556 - RNA, 21 nt, Human
ugggaggauugcuugagcuca

SEQ ID NO: 1517557 - RNA, 13 nt, Human
agggagagaagau

SEQ ID NO: 1517558 - RNA, 14 nt, Human
agggagagaagaua

SEQ ID NO: 1517559 - RNA, 21 nt, Human
agggagaagacuauauuguac

SEQ ID NO: 1517560 - RNA, 20 nt, Human
agggacuuggaagcuccgcu

SEQ ID NO: 1517561 - RNA, 13 nt, Human
agggaaauuucag

SEQ ID NO: 1517562 - RNA, 23 nt, Human
agggacuucugucuucacaacag

SEQ ID NO: 1517563 - RNA, 15 nt, Human
agggacuuggaagcu

SEQ ID NO: 1517564 - RNA, 18 nt, Human
agggacuuggaagcuccg

SEQ ID NO: 1517565 - RNA, 19 nt, Human
agggacuuggaagcuccgc

SEQ ID NO: 1517566 - RNA, 18 nt, Human
ugggacucaaugcacuga

SEQ ID NO: 1517567 - RNA, 16 nt, Human
ugggacuacaggugug

SEQ ID NO: 1517568 - RNA, 18 nt, Human
ugggacuacaggcaccca

SEQ ID NO: 1517569 - RNA, 16 nt, Human
agggagcgagggagaa

SEQ ID NO: 1517570 - RNA, 22 nt, Human
agggcuguuauaaucuuucaca

SEQ ID NO: 1517571 - RNA, 14 nt, Human
ugggcucccuuccc

SEQ ID NO: 1517572 - RNA, 15 nt, Human
ugggcucccuuccca

SEQ ID NO: 1517573 - RNA, 16 nt, Human
agggcugagccugguc

SEQ ID NO: 1517574 - RNA, 17 nt, Human
agggcugagccuggucc

SEQ ID NO: 1517575 - RNA, 14 nt, Human
agggcuggacugag

SEQ ID NO: 1517576 - RNA, 15 nt, Human
agggcuggacugagg

SEQ ID NO: 1517577 - RNA, 16 nt, Human
agggcuggacugaggc

SEQ ID NO: 1517578 - RNA, 17 nt, Human
agggcuggacugaggcc

SEQ ID NO: 1517579 - RNA, 18 nt, Human
agggcuggacugaggccu

SEQ ID NO: 1517580 - RNA, 20 nt, Human
agggcuggacugaggccuga

SEQ ID NO: 1517581 - RNA, 20 nt, Human
agggcuccagacacaugucc

SEQ ID NO: 1517582 - RNA, 14 nt, Human
agggcccagagagg

SEQ ID NO: 1517583 - RNA, 18 nt, Human
agggcccagagagggugg

SEQ ID NO: 1517584 - RNA, 12 nt, Human
agggagggcucc

SEQ ID NO: 1517585 - RNA, 13 nt, Human
agggagggcucca

SEQ ID NO: 1517586 - RNA, 19 nt, Human
agggagggcuccagacaca

SEQ ID NO: 1517587 - RNA, 22 nt, Human
agggagggcuccagacacaugu

SEQ ID NO: 1517588 - RNA, 20 nt, Human
agggaguccgaaagggacuu

SEQ ID NO: 1517589 - RNA, 23 nt, Human
agggaguccgaaagggacuugga

SEQ ID NO: 1517590 - RNA, 20 nt, Human
agggagugaguugauagcac

SEQ ID NO: 1517591 - RNA, 12 nt, Human
agggcccagaga

SEQ ID NO: 1517592 - RNA, 13 nt, Human
agggcccagagag

SEQ ID NO: 1517593 - RNA, 16 nt, Human
agggauacccauccca

SEQ ID NO: 1517594 - RNA, 15 nt, Human
aggaggccagccuug

SEQ ID NO: 1517595 - RNA, 21 nt, Human
aggaguuugagaccaaccugg

SEQ ID NO: 1517596 - RNA, 20 nt, Human
uggaaguacuauaauuuacc

SEQ ID NO: 1517597 - RNA, 13 nt, Human
uggaagcuccgcu

SEQ ID NO: 1517598 - RNA, 14 nt, Human
uggaacacucugag

SEQ ID NO: 1517599 - RNA, 12 nt, Human
uggaacacucug

SEQ ID NO: 1517600 - RNA, 12 nt, Human
ugcugcccugcc

SEQ ID NO: 1517601 - RNA, 10 nt, Human
ugcugcccug

SEQ ID NO: 1517602 - RNA, 17 nt, Human
uggacaaaauggaauac

SEQ ID NO: 1517603 - RNA, 14 nt, Human
uggacaaaauggaa

SEQ ID NO: 1517604 - RNA, 15 nt, Human
uggacaccggaaaca

SEQ ID NO: 1517605 - RNA, 17 nt, Human
aggcaagcaccuccugc

SEQ ID NO: 1517606 - RNA, 14 nt, Human
aggcaagcaccucc

SEQ ID NO: 1517607 - RNA, 18 nt, Human
aggaugcuuguacauaau

SEQ ID NO: 1517608 - RNA, 12 nt, Human
aggaucagucug

SEQ ID NO: 1517609 - RNA, 21 nt, Human
aggauccugagccagauuuca

SEQ ID NO: 1517610 - RNA, 16 nt, Human
aggaugcuuguacaua

SEQ ID NO: 1517611 - RNA, 15 nt, Human
aggaugcuuguacau

SEQ ID NO: 1517612 - RNA, 12 nt, Human
aggaucucuuga

SEQ ID NO: 1517613 - RNA, 18 nt, Human
uggagaagccacaggccu

SEQ ID NO: 1517614 - RNA, 19 nt, Human
uggagaagccacaggccug

SEQ ID NO: 1517615 - RNA, 20 nt, Human
uggagaagccacaggccuga

SEQ ID NO: 1517616 - RNA, 16 nt, Human
uggagaagaacugaaa

SEQ ID NO: 1517617 - RNA, 24 nt, Human
uggacuuuguuaguuucuccaagc

SEQ ID NO: 1517618 - RNA, 14 nt, Human
uggagaaaauggac

SEQ ID NO: 1517619 - RNA, 22 nt, Human
uggacuuuguuaguuucuccaa

SEQ ID NO: 1517620 - RNA, 11 nt, Human
uggacuuuguu

SEQ ID NO: 1517621 - RNA, 15 nt, Human
aggcaaugcuggcug

SEQ ID NO: 1517622 - RNA, 16 nt, Human
aggcaaugcuggcugu

SEQ ID NO: 1517623 - RNA, 20 nt, Human
uggagcccagaggagggcag

SEQ ID NO: 1517624 - RNA, 23 nt, Human
uggagcccagaggagggcagcag

SEQ ID NO: 1517625 - RNA, 21 nt, Human
uggagaagccacaggccugag

SEQ ID NO: 1517626 - RNA, 15 nt, Human
uggagcccagaggag

SEQ ID NO: 1517627 - RNA, 19 nt, Human
uggagcccagaggagggca

SEQ ID NO: 1517628 - RNA, 21 nt, Human
aggcaggucuugaacuccugg

SEQ ID NO: 1517629 - RNA, 22 nt, Human
aggcagggucucacucugucgc

SEQ ID NO: 1517630 - RNA, 14 nt, Human
aggcagguccaggg

SEQ ID NO: 1517631 - RNA, 19 nt, Human
aggcagggucucacucugu

SEQ ID NO: 1517632 - RNA, 20 nt, Human
aggcagggucucacucuguc

SEQ ID NO: 1517633 - RNA, 21 nt, Human
aggcagggucucacucugucg

SEQ ID NO: 1517634 - RNA, 20 nt, Human
aggcagcucuaaaugucaau

SEQ ID NO: 1517635 - RNA, 22 nt, Human
aggcagccccauucugccugcc

SEQ ID NO: 1517636 - RNA, 15 nt, Human
aggcacccaccauca

SEQ ID NO: 1517637 - RNA, 19 nt, Human
aggcagccccauucugccu

SEQ ID NO: 1517638 - RNA, 20 nt, Human
aggcagccccauucugccug

SEQ ID NO: 1517639 - RNA, 21 nt, Human
aggcagccccauucugccugc

SEQ ID NO: 1517640 - RNA, 12 nt, Human
aggcaggauggc

SEQ ID NO: 1517641 - RNA, 13 nt, Human
aggccuggccaga

SEQ ID NO: 1517642 - RNA, 15 nt, Human
aggccuggccagaug

SEQ ID NO: 1517643 - RNA, 12 nt, Human
aggccuggccag

SEQ ID NO: 1517644 - RNA, 17 nt, Human
aggcccggcuccaggcu

SEQ ID NO: 1517645 - RNA, 21 nt, Human
aggccccugucucagggugag

SEQ ID NO: 1517646 - RNA, 14 nt, Human
aggcccggcuccag

SEQ ID NO: 1517647 - RNA, 15 nt, Human
aggcccggcuccagg

SEQ ID NO: 1517648 - RNA, 16 nt, Human
aggcccggcuccaggc

SEQ ID NO: 1517649 - RNA, 19 nt, Human
aggcccagagggccugcaa

SEQ ID NO: 1517650 - RNA, 20 nt, Human
aggcccagagggccugcaag

SEQ ID NO: 1517651 - RNA, 13 nt, Human
aggccccugccac

SEQ ID NO: 1517652 - RNA, 15 nt, Human
aggccccugccaccc

SEQ ID NO: 1517653 - RNA, 17 nt, Human
aggccccugccacccug

SEQ ID NO: 1517654 - RNA, 18 nt, Human
aggccccugccacccugg

SEQ ID NO: 1517655 - RNA, 21 nt, Human
aggccccugccacccugggga

SEQ ID NO: 1517656 - RNA, 18 nt, Human
uggcaccagcagccugga

SEQ ID NO: 1517657 - RNA, 16 nt, Human
uggcaccagcagccug

SEQ ID NO: 1517658 - RNA, 17 nt, Human
uggcaccagcagccugg

SEQ ID NO: 1517659 - RNA, 18 nt, Human
uggcacagcccaaagaag

SEQ ID NO: 1517660 - RNA, 20 nt, Human
uggcacagcccaaagaagga

SEQ ID NO: 1517661 - RNA, 16 nt, Human
aggcccagagggccug

SEQ ID NO: 1517662 - RNA, 23 nt, Human
aggccagagacacaagccuucgg

SEQ ID NO: 1517663 - RNA, 18 nt, Human
aggccaugggccuccugu

SEQ ID NO: 1517664 - RNA, 14 nt, Human
uggcagcucagaga

SEQ ID NO: 1517665 - RNA, 15 nt, Human
uggcagcucagagag

SEQ ID NO: 1517666 - RNA, 16 nt, Human
uggcagcucagagagg

SEQ ID NO: 1517667 - RNA, 18 nt, Human
uggcagcucagagagggu

SEQ ID NO: 1517668 - RNA, 13 nt, Human
aggccagagacac

SEQ ID NO: 1517669 - RNA, 18 nt, Human
aggccagagacacaagcc

SEQ ID NO: 1517670 - RNA, 13 nt, Human
aggcuccaggagc

SEQ ID NO: 1517671 - RNA, 14 nt, Human
aggcuccaggagca

SEQ ID NO: 1517672 - RNA, 16 nt, Human
aggcuccaggagcagc

SEQ ID NO: 1517673 - RNA, 11 nt, Human
aggcuccacuu

SEQ ID NO: 1517674 - RNA, 17 nt, Human
aggcuccacuuggucug

SEQ ID NO: 1517675 - RNA, 21 nt, Human
aggcuccacuuggucugugag

SEQ ID NO: 1517676 - RNA, 22 nt, Human
aggcuccacuuggucugugaga

SEQ ID NO: 1517677 - RNA, 17 nt, Human
aggccuucucugaagga

SEQ ID NO: 1517678 - RNA, 18 nt, Human
aggccuucucugaaggac

SEQ ID NO: 1517679 - RNA, 20 nt, Human
uggccucugcacuccccugc

SEQ ID NO: 1517680 - RNA, 19 nt, Human
uggccucugcacuccccug

SEQ ID NO: 1517681 - RNA, 19 nt, Human
uggcccacgcacuucggga

SEQ ID NO: 1517682 - RNA, 13 nt, Human
uggcccacugcau

SEQ ID NO: 1517683 - RNA, 14 nt, Human
uggcccacugcauc

SEQ ID NO: 1517684 - RNA, 15 nt, Human
ugccuguucagcucc

SEQ ID NO: 1517685 - RNA, 16 nt, Human
ugccuguucagcucca

SEQ ID NO: 1517686 - RNA, 17 nt, Human
ugccuguucagcuccag

SEQ ID NO: 1517687 - RNA, 13 nt, Human
ugcgaaaggauga

SEQ ID NO: 1517688 - RNA, 19 nt, Human
ugcgaaaggaugaaaguga

SEQ ID NO: 1517689 - RNA, 18 nt, Human
ugcggacagccacggcca

SEQ ID NO: 1517690 - RNA, 22 nt, Human
ugccucugacacacagcucugu

SEQ ID NO: 1517691 - RNA, 10 nt, Human
agcugccugu

SEQ ID NO: 1517692 - RNA, 13 nt, Human
agcuggaaaagua

SEQ ID NO: 1517693 - RNA, 21 nt, Human
agcugccugggaucccucauc

SEQ ID NO: 1517694 - RNA, 13 nt, Human
agcugccugggau

SEQ ID NO: 1517695 - RNA, 19 nt, Human
agcugccugggaucccuca

SEQ ID NO: 1517696 - RNA, 17 nt, Human
agcugggauguuucugu

SEQ ID NO: 1517697 - RNA, 14 nt, Human
agcugggcagguug

SEQ ID NO: 1517698 - RNA, 19 nt, Human
agcugggacuacaggugug

SEQ ID NO: 1517699 - RNA, 23 nt, Human
agcugggaugauuggagggggga

SEQ ID NO: 1517700 - RNA, 20 nt, Human
ugccucugacacacagcucu

SEQ ID NO: 1517701 - RNA, 21 nt, Human
ugccucugacacacagcucug

SEQ ID NO: 1517702 - RNA, 16 nt, Human
ugccucucucaggcca

SEQ ID NO: 1517703 - RNA, 15 nt, Human
ugccucucucaggcc

SEQ ID NO: 1517704 - RNA, 13 nt, Human
ugccucccaucac

SEQ ID NO: 1517705 - RNA, 14 nt, Human
ugccucccaucacc

SEQ ID NO: 1517706 - RNA, 19 nt, Human
ugccucccaucacccgcua

SEQ ID NO: 1517707 - RNA, 13 nt, Human
ugccucucucagg

SEQ ID NO: 1517708 - RNA, 14 nt, Human
ugccucucucaggc

SEQ ID NO: 1517709 - RNA, 14 nt, Human
agcugccagccgag

SEQ ID NO: 1517710 - RNA, 13 nt, Human
agcugccaccugc

SEQ ID NO: 1517711 - RNA, 13 nt, Human
agcugcacccuca

SEQ ID NO: 1517712 - RNA, 17 nt, Human
agcugcacccucaggca

SEQ ID NO: 1517713 - RNA, 18 nt, Human
agcugcacccucaggcag

SEQ ID NO: 1517714 - RNA, 19 nt, Human
agcugcacccucaggcagg

SEQ ID NO: 1517715 - RNA, 20 nt, Human
agcugcacccucaggcaggu

SEQ ID NO: 1517716 - RNA, 22 nt, Human
agcugcacccucaggcaggugg

SEQ ID NO: 1517717 - RNA, 18 nt, Human
agcucuucuccaggcugu

SEQ ID NO: 1517718 - RNA, 23 nt, Human
agcucugcgucgguccuggugcc

SEQ ID NO: 1517719 - RNA, 12 nt, Human
agcucuguccug

SEQ ID NO: 1517720 - RNA, 14 nt, Human
agcucuguccuggg

SEQ ID NO: 1517721 - RNA, 22 nt, Human
ugcccuccaagaccuucuccuu

SEQ ID NO: 1517722 - RNA, 19 nt, Human
ugcccuccaagaccuucuc

SEQ ID NO: 1517723 - RNA, 20 nt, Human
ugcccuccaagaccuucucc

SEQ ID NO: 1517724 - RNA, 16 nt, Human
agcucucuccucccuu

SEQ ID NO: 1517725 - RNA, 22 nt, Human
agcucugcuccucuccccagca

SEQ ID NO: 1517726 - RNA, 12 nt, Human
agcucugcuccu

SEQ ID NO: 1517727 - RNA, 22 nt, Human
agcucugcgucgguccuggugc

SEQ ID NO: 1517728 - RNA, 14 nt, Human
aggaaauauuuauu

SEQ ID NO: 1517729 - RNA, 18 nt, Human
aggaaauauuuauuuuaa

SEQ ID NO: 1517730 - RNA, 22 nt, Human
aggaaaggcuccaggagcagcc

SEQ ID NO: 1517731 - RNA, 23 nt, Human
aggaaaggcuccaggagcagcca

SEQ ID NO: 1517732 - RNA, 18 nt, Human
aggaaaggcuccaggagc

SEQ ID NO: 1517733 - RNA, 20 nt, Human
aggaaaggcuccaggagcag

SEQ ID NO: 1517734 - RNA, 21 nt, Human
ugcugacuguuuucucuugag

SEQ ID NO: 1517735 - RNA, 24 nt, Human
ugcugacuguuuucucuugagagg

SEQ ID NO: 1517736 - RNA, 14 nt, Human
ugcugagucugaag

SEQ ID NO: 1517737 - RNA, 19 nt, Human
ugcuauccagcuauuuuua

SEQ ID NO: 1517738 - RNA, 22 nt, Human
ugcucugaucauccacugugcc

SEQ ID NO: 1517739 - RNA, 17 nt, Human
ugcugacuguuuucucu

SEQ ID NO: 1517740 - RNA, 15 nt, Human
ugcucugcauguuac

SEQ ID NO: 1517741 - RNA, 18 nt, Human
ugcucugcauguuacaua

SEQ ID NO: 1517742 - RNA, 17 nt, Human
aggaagcucagggccug

SEQ ID NO: 1517743 - RNA, 18 nt, Human
aggaagcucagggccugg

SEQ ID NO: 1517744 - RNA, 22 nt, Human
aggaagcucagggccuggcuca

SEQ ID NO: 1517745 - RNA, 14 nt, Human
aggaagagaaaaaa

SEQ ID NO: 1517746 - RNA, 15 nt, Human
aggaagacuuuggaa

SEQ ID NO: 1517747 - RNA, 19 nt, Human
aggaaaucaaauaugcaaa

SEQ ID NO: 1517748 - RNA, 23 nt, Human
aggaauccagacccggcugcgug

SEQ ID NO: 1517749 - RNA, 19 nt, Human
aggaauugacccacaagaa

SEQ ID NO: 1517750 - RNA, 23 nt, Human
aggaauugacccacaagaaauga

SEQ ID NO: 1517751 - RNA, 11 nt, Human
ugcugccaucc

SEQ ID NO: 1517752 - RNA, 21 nt, Human
ugcugccauccagguucagcu

SEQ ID NO: 1517753 - RNA, 22 nt, Human
ugcugccauccagguucagcuu

SEQ ID NO: 1517754 - RNA, 12 nt, Human
ugcugccaucca

SEQ ID NO: 1517755 - RNA, 13 nt, Human
ugcugccauccag

SEQ ID NO: 1517756 - RNA, 14 nt, Human
ugcugccauccagg

SEQ ID NO: 1517757 - RNA, 15 nt, Human
ugcugccauccaggu

SEQ ID NO: 1517758 - RNA, 21 nt, Human
agcuuauugucuagugaaacu

SEQ ID NO: 1517759 - RNA, 23 nt, Human
agcuuggaaacuggaugagguca

SEQ ID NO: 1517760 - RNA, 15 nt, Human
agcuuauuaaaacuc

SEQ ID NO: 1517761 - RNA, 20 nt, Human
agcuuauuaaaacucauuuu

SEQ ID NO: 1517762 - RNA, 19 nt, Human
agcuuguaaauagcucagg

SEQ ID NO: 1517763 - RNA, 20 nt, Human
agcuuguaaauagcucaggu

SEQ ID NO: 1517764 - RNA, 21 nt, Human
agcuuguaaauagcucaggug

SEQ ID NO: 1517765 - RNA, 20 nt, Human
agcuuaaaggggcuagagug

SEQ ID NO: 1517766 - RNA, 12 nt, Human
agcuuaucucag

SEQ ID NO: 1517767 - RNA, 14 nt, Human
agcuuaucucaggg

SEQ ID NO: 1517768 - RNA, 15 nt, Human
agcuuaucucagggg

SEQ ID NO: 1517769 - RNA, 20 nt, Human
ugcggacagccacggccagg

SEQ ID NO: 1517770 - RNA, 21 nt, Human
ugcggacagccacggccaggc

SEQ ID NO: 1517771 - RNA, 13 nt, Human
aggaaagagaacu

SEQ ID NO: 1517772 - RNA, 19 nt, Human
aggaaagagaacuuccaga

SEQ ID NO: 1517773 - RNA, 12 nt, Human
aggaaagaggcu

SEQ ID NO: 1517774 - RNA, 13 nt, Human
aggaaagaggcuc

SEQ ID NO: 1517775 - RNA, 16 nt, Human
ugcuaguaauuggaaa

SEQ ID NO: 1517776 - RNA, 19 nt, Human
aggaaagcaaaggagauug

SEQ ID NO: 1517777 - RNA, 14 nt, Human
ugcuaguaauugga

SEQ ID NO: 1517778 - RNA, 16 nt, Human
aggaaagaggcucugg

SEQ ID NO: 1517779 - RNA, 17 nt, Human
aggaaagcaaaggagau

SEQ ID NO: 1517780 - RNA, 12 nt, Human
agcuuugaaaau

SEQ ID NO: 1517781 - RNA, 16 nt, Human
agcuuugaaaauucag

SEQ ID NO: 1517782 - RNA, 18 nt, Human
agcuuugaaaauucagug

SEQ ID NO: 1517783 - RNA, 19 nt, Human
agcuuugaaaauucagugg

SEQ ID NO: 1517784 - RNA, 21 nt, Human
aggaaacccagcucuggucca

SEQ ID NO: 1517785 - RNA, 18 nt, Human
aggaaacccagcucuggu

SEQ ID NO: 1517786 - RNA, 20 nt, Human
aggaaacccagcucuggucc

SEQ ID NO: 1517787 - RNA, 15 nt, Human
aggaaacccagcucu

SEQ ID NO: 1517788 - RNA, 16 nt, Human
aggaaacccagcucug

SEQ ID NO: 1517789 - RNA, 17 nt, Human
aggaaacccagcucugg

SEQ ID NO: 1517790 - RNA, 19 nt, Human
ugcagugagccgagauugu

SEQ ID NO: 1517791 - RNA, 21 nt, Human
ugcaguuugguguguccuccg

SEQ ID NO: 1517792 - RNA, 14 nt, Human
ugcagugagccgag

SEQ ID NO: 1517793 - RNA, 19 nt, Human
agccugagcgacagugaga

SEQ ID NO: 1517794 - RNA, 18 nt, Human
ugcagccucaaccuccug

SEQ ID NO: 1517795 - RNA, 19 nt, Human
ugcagccucaaccuccugg

SEQ ID NO: 1517796 - RNA, 20 nt, Human
ugcagccucaaccuccuggg

SEQ ID NO: 1517797 - RNA, 16 nt, Human
agccucagcauccugg

SEQ ID NO: 1517798 - RNA, 15 nt, Human
agccucagcauccug

SEQ ID NO: 1517799 - RNA, 19 nt, Human
agccucaaccuccugggcu

SEQ ID NO: 1517800 - RNA, 18 nt, Human
agccugagcgacagugag

SEQ ID NO: 1517801 - RNA, 17 nt, Human
agccucaaccuccuggg

SEQ ID NO: 1517802 - RNA, 18 nt, Human
agccucaaccuccugggc

SEQ ID NO: 1517803 - RNA, 13 nt, Human
agccucagcaucc

SEQ ID NO: 1517804 - RNA, 14 nt, Human
agccucagcauccu

SEQ ID NO: 1517805 - RNA, 16 nt, Human
agccugccucuucucu

SEQ ID NO: 1517806 - RNA, 19 nt, Human
agccugccucuucucuacu

SEQ ID NO: 1517807 - RNA, 20 nt, Human
agccugcaggaccucgugcc

SEQ ID NO: 1517808 - RNA, 21 nt, Human
agccugcaggaccucgugcca

SEQ ID NO: 1517809 - RNA, 23 nt, Human
agccugcaguuauuaacacuaac

SEQ ID NO: 1517810 - RNA, 16 nt, Human
ugcaugcugucccuua

SEQ ID NO: 1517811 - RNA, 19 nt, Human
agccugcaauuucauaugc

SEQ ID NO: 1517812 - RNA, 21 nt, Human
agccugcaauuucauaugcug

SEQ ID NO: 1517813 - RNA, 22 nt, Human
ugcaugaaguaauaugcacaca

SEQ ID NO: 1517814 - RNA, 21 nt, Human
ugcaugaggcuaguguggugu

SEQ ID NO: 1517815 - RNA, 13 nt, Human
ugcaugcuguccc

SEQ ID NO: 1517816 - RNA, 14 nt, Human
ugcaugcugucccu

SEQ ID NO: 1517817 - RNA, 15 nt, Human
ugcaugcugucccuu

SEQ ID NO: 1517818 - RNA, 22 nt, Human
ugcauaccacuuuuguucuugg

SEQ ID NO: 1517819 - RNA, 13 nt, Human
ugcauacucauua

SEQ ID NO: 1517820 - RNA, 18 nt, Human
agcccuucuuuccacaga

SEQ ID NO: 1517821 - RNA, 19 nt, Human
agcccuucuuuccacagaa

SEQ ID NO: 1517822 - RNA, 15 nt, Human
agccuaggugacaga

SEQ ID NO: 1517823 - RNA, 17 nt, Human
agccuaggugacagagu

SEQ ID NO: 1517824 - RNA, 15 nt, Human
agccucaaccuccug

SEQ ID NO: 1517825 - RNA, 19 nt, Human
ugcagacucuacagaggcc

SEQ ID NO: 1517826 - RNA, 20 nt, Human
ugcagacucuacagaggcca

SEQ ID NO: 1517827 - RNA, 15 nt, Human
ugcacuccccugcug

SEQ ID NO: 1517828 - RNA, 22 nt, Human
ugcagacucuacagaggccaug

SEQ ID NO: 1517829 - RNA, 14 nt, Human
ugcacaagcugcac

SEQ ID NO: 1517830 - RNA, 15 nt, Human
ugcacacaccagagc

SEQ ID NO: 1517831 - RNA, 17 nt, Human
ugcacacaccagagccc

SEQ ID NO: 1517832 - RNA, 15 nt, Human
ugcacaagcuccaag

SEQ ID NO: 1517833 - RNA, 16 nt, Human
ugcacaagcuccaagc

SEQ ID NO: 1517834 - RNA, 18 nt, Human
ugcacaagcuccaagcuc

SEQ ID NO: 1517835 - RNA, 20 nt, Human
ugcacaagcuccaagcuccc

SEQ ID NO: 1517836 - RNA, 22 nt, Human
ugcacaagcuccaagcucccag

SEQ ID NO: 1517837 - RNA, 23 nt, Human
ugcacaagcuccaagcucccagg

SEQ ID NO: 1517838 - RNA, 14 nt, Human
ugcaccacugcacu

SEQ ID NO: 1517839 - RNA, 15 nt, Human
ugcaccacugcacuc

SEQ ID NO: 1517840 - RNA, 22 nt, Human
ugcacuauagccuaggugacag

SEQ ID NO: 1517841 - RNA, 12 nt, Human
ugcacuccccug

SEQ ID NO: 1517842 - RNA, 13 nt, Human
ugcacuccccugc

SEQ ID NO: 1517843 - RNA, 18 nt, Human
ugcauuugaggucuguuc

SEQ ID NO: 1517844 - RNA, 23 nt, Human
ugcauuugaaaauuuugauguuu

SEQ ID NO: 1517845 - RNA, 19 nt, Human
ugcauuugaaaauuuugau

SEQ ID NO: 1517846 - RNA, 22 nt, Human
agcgcuccugccgcagagcugg

SEQ ID NO: 1517847 - RNA, 17 nt, Human
agcgcuccugccgcaga

SEQ ID NO: 1517848 - RNA, 20 nt, Human
agcgcuccugccgcagagcu

SEQ ID NO: 1517849 - RNA, 21 nt, Human
agcgcuccugccgcagagcug

SEQ ID NO: 1517850 - RNA, 14 nt, Human
agccugcuccagcu

SEQ ID NO: 1517851 - RNA, 14 nt, Human
agcgcccaguuggg

SEQ ID NO: 1517852 - RNA, 22 nt, Human
agcgcccaguuggguggaugcc

SEQ ID NO: 1517853 - RNA, 15 nt, Human
ugccagucaccccgg

SEQ ID NO: 1517854 - RNA, 16 nt, Human
ugccagucaccccggc

SEQ ID NO: 1517855 - RNA, 18 nt, Human
ugccagucaccccggcca

SEQ ID NO: 1517856 - RNA, 20 nt, Human
ugccagucaccccggccacc

SEQ ID NO: 1517857 - RNA, 22 nt, Human
ugccagucaccccggccaccug

SEQ ID NO: 1517858 - RNA, 23 nt, Human
ugccagucaccccggccaccugc

SEQ ID NO: 1517859 - RNA, 15 nt, Human
ugccauauucuguug

SEQ ID NO: 1517860 - RNA, 16 nt, Human
ugccauauucuguugg

SEQ ID NO: 1517861 - RNA, 17 nt, Human
ugccauauucuguuggc

SEQ ID NO: 1517862 - RNA, 15 nt, Human
agcgugagccacugc

SEQ ID NO: 1517863 - RNA, 16 nt, Human
agcggggacagcuccu

SEQ ID NO: 1517864 - RNA, 17 nt, Human
agcggggacagcuccuu

SEQ ID NO: 1517865 - RNA, 15 nt, Human
agcggggacagcucc

SEQ ID NO: 1517866 - RNA, 20 nt, Human
ugccauauucuguuggccag

SEQ ID NO: 1517867 - RNA, 21 nt, Human
ugccauauucuguuggccagu

SEQ ID NO: 1517868 - RNA, 20 nt, Human
agcgugguggacaugcacag

SEQ ID NO: 1517869 - RNA, 16 nt, Human
agcgugagccacugca

SEQ ID NO: 1517870 - RNA, 17 nt, Human
agcgugagccacugcac

SEQ ID NO: 1517871 - RNA, 23 nt, Human
agcgugguggacaugcacagcua

SEQ ID NO: 1517872 - RNA, 19 nt, Human
agcuauggugucauaggcu

SEQ ID NO: 1517873 - RNA, 18 nt, Human
agcucagggccuggcuca

SEQ ID NO: 1517874 - RNA, 20 nt, Human
ugccauguuggccaggcugg

SEQ ID NO: 1517875 - RNA, 21 nt, Human
ugccauguuggccaggcuggu

SEQ ID NO: 1517876 - RNA, 22 nt, Human
agcuauuuuuauuuguuugugc

SEQ ID NO: 1517877 - RNA, 15 nt, Human
agcucagggccuggc

SEQ ID NO: 1517878 - RNA, 16 nt, Human
agcucagggccuggcu

SEQ ID NO: 1517879 - RNA, 17 nt, Human
agcucagggccuggcuc

SEQ ID NO: 1517880 - RNA, 17 nt, Human
ugccauguuggccaggc

SEQ ID NO: 1517881 - RNA, 18 nt, Human
ugccauguuggccaggcu

SEQ ID NO: 1517882 - RNA, 19 nt, Human
ugccauguuggccaggcug

SEQ ID NO: 1517883 - RNA, 19 nt, Human
ugccccucaacucuccucc

SEQ ID NO: 1517884 - RNA, 12 nt, Human
ugcccccaggac

SEQ ID NO: 1517885 - RNA, 13 nt, Human
ugcccccaggacu

SEQ ID NO: 1517886 - RNA, 14 nt, Human
ugcccccaggacug

SEQ ID NO: 1517887 - RNA, 15 nt, Human
ugcccccaggacugg

SEQ ID NO: 1517888 - RNA, 16 nt, Human
ugcccccaggacuggg

SEQ ID NO: 1517889 - RNA, 17 nt, Human
ugcccccaggacugggc

SEQ ID NO: 1517890 - RNA, 19 nt, Human
ugcccccaggacugggcca

SEQ ID NO: 1517891 - RNA, 11 nt, Human
ugcccccagga

SEQ ID NO: 1517892 - RNA, 12 nt, Human
ugcccaggcccc

SEQ ID NO: 1517893 - RNA, 16 nt, Human
ugcccacaggaucagu

SEQ ID NO: 1517894 - RNA, 14 nt, Human
ugcccaggccccug

SEQ ID NO: 1517895 - RNA, 20 nt, Human
ugcccaggccccugccaccc

SEQ ID NO: 1517896 - RNA, 22 nt, Human
ugcccaggccccugccacccug

SEQ ID NO: 1517897 - RNA, 14 nt, Human
ugcccacaggauca

SEQ ID NO: 1517898 - RNA, 15 nt, Human
ugcccaggcaggucu

SEQ ID NO: 1517899 - RNA, 16 nt, Human
ugcccaggcaggucuu

SEQ ID NO: 1517900 - RNA, 17 nt, Human
ugcccaggcaggucuug

SEQ ID NO: 1517901 - RNA, 20 nt, Human
ugcccaggcaggucuugaac

SEQ ID NO: 1517902 - RNA, 11 nt, Human
ugcccaggccc

SEQ ID NO: 1517903 - RNA, 14 nt, Human
agaagcuccaggua

SEQ ID NO: 1517904 - RNA, 15 nt, Human
agaagcggcuggcag

SEQ ID NO: 1517905 - RNA, 16 nt, Human
agaagcggcuggcagc

SEQ ID NO: 1517906 - RNA, 16 nt, Human
ucuggcagcucagaga

SEQ ID NO: 1517907 - RNA, 14 nt, Human
ucuggcagcucaga

SEQ ID NO: 1517908 - RNA, 15 nt, Human
ucuggcagcucagag

SEQ ID NO: 1517909 - RNA, 21 nt, Human
agaagaacugaaaucauacuu

SEQ ID NO: 1517910 - RNA, 13 nt, Human
agaagaaggcagc

SEQ ID NO: 1517911 - RNA, 14 nt, Human
agaagaaggcagca

SEQ ID NO: 1517912 - RNA, 21 nt, Human
agaagaaggcagcagguggca

SEQ ID NO: 1517913 - RNA, 14 nt, Human
ucugcccuccaaga

SEQ ID NO: 1517914 - RNA, 18 nt, Human
ucugcccuccaagaccuu

SEQ ID NO: 1517915 - RNA, 13 nt, Human
ucugcuucagccu

SEQ ID NO: 1517916 - RNA, 17 nt, Human
ucugcucacauaucugu

SEQ ID NO: 1517917 - RNA, 16 nt, Human
ucugcucacauaucug

SEQ ID NO: 1517918 - RNA, 23 nt, Human
ucugagaaagacuauucaaacag

SEQ ID NO: 1517919 - RNA, 21 nt, Human
ucugagaaagacuauucaaac

SEQ ID NO: 1517920 - RNA, 22 nt, Human
ucugagaaagacuauucaaaca

SEQ ID NO: 1517921 - RNA, 16 nt, Human
ucugauacagaaaagu

SEQ ID NO: 1517922 - RNA, 17 nt, Human
ucugauacagaaaaguu

SEQ ID NO: 1517923 - RNA, 19 nt, Human
ucugauucccaagcucugc

SEQ ID NO: 1517924 - RNA, 20 nt, Human
ucugauucccaagcucugcu

SEQ ID NO: 1517925 - RNA, 21 nt, Human
ucugauucccaagcucugcuc

SEQ ID NO: 1517926 - RNA, 21 nt, Human
ucugacuguuuccaucaaggg

SEQ ID NO: 1517927 - RNA, 14 nt, Human
ucugagaaagacua

SEQ ID NO: 1517928 - RNA, 15 nt, Human
ucugagaaagacuau

SEQ ID NO: 1517929 - RNA, 19 nt, Human
ucugagaaagacuauucaa

SEQ ID NO: 1517930 - RNA, 20 nt, Human
ucugagaaagacuauucaaa

SEQ ID NO: 1517931 - RNA, 19 nt, Human
ucugacccugcuucaaaua

SEQ ID NO: 1517932 - RNA, 15 nt, Human
agaaagacagagcug

SEQ ID NO: 1517933 - RNA, 19 nt, Human
agaaagacuauucaaacag

SEQ ID NO: 1517934 - RNA, 20 nt, Human
agaaagacuauucaaacagu

SEQ ID NO: 1517935 - RNA, 23 nt, Human
agaaagacuauucaaacagucuc

SEQ ID NO: 1517936 - RNA, 11 nt, Human
agaaauguguu

SEQ ID NO: 1517937 - RNA, 15 nt, Human
ucugcagauaaacag

SEQ ID NO: 1517938 - RNA, 16 nt, Human
agaaauguacagcaag

SEQ ID NO: 1517939 - RNA, 17 nt, Human
agaaauguacagcaagg

SEQ ID NO: 1517940 - RNA, 14 nt, Human
agaacucccuuuca

SEQ ID NO: 1517941 - RNA, 15 nt, Human
agaacucccuuucaa

SEQ ID NO: 1517942 - RNA, 22 nt, Human
agaacuacaaacaaaauuucua

SEQ ID NO: 1517943 - RNA, 23 nt, Human
agaacuacaaacaaaauuucuau

SEQ ID NO: 1517944 - RNA, 18 nt, Human
agaacuacaaacaaaauu

SEQ ID NO: 1517945 - RNA, 17 nt, Human
agaacggggcucuucuc

SEQ ID NO: 1517946 - RNA, 19 nt, Human
agaacggggcucuucucau

SEQ ID NO: 1517947 - RNA, 20 nt, Human
agaacggggcucuucucauu

SEQ ID NO: 1517948 - RNA, 21 nt, Human
agaacggggcucuucucauuu

SEQ ID NO: 1517949 - RNA, 23 nt, Human
acuuuuuugcuauccagcuauuu

SEQ ID NO: 1517950 - RNA, 15 nt, Human
acuuuuucuuuaugu

SEQ ID NO: 1517951 - RNA, 23 nt, Human
acuuuggaaagacuuuuccaacc

SEQ ID NO: 1517952 - RNA, 17 nt, Human
acuuuggaaagacuuuu

SEQ ID NO: 1517953 - RNA, 13 nt, Human
acuuuggaaagac

SEQ ID NO: 1517954 - RNA, 14 nt, Human
acuuuggaaagacu

SEQ ID NO: 1517955 - RNA, 23 nt, Human
acuuugaccucugcagcaauaaa

SEQ ID NO: 1517956 - RNA, 19 nt, Human
acuuugaccucugcagcaa

SEQ ID NO: 1517957 - RNA, 23 nt, Human
acuuuaccuuuuuuauacauaaa

SEQ ID NO: 1517958 - RNA, 22 nt, Human
acuuuaccuuuuuuauacauaa

SEQ ID NO: 1517959 - RNA, 19 nt, Human
acuuuaccuuuuuuauaca

SEQ ID NO: 1517960 - RNA, 18 nt, Human
acuuuaccuuuuuuauac

SEQ ID NO: 1517961 - RNA, 15 nt, Human
ucucccagucauuua

SEQ ID NO: 1517962 - RNA, 11 nt, Human
ucucccuugga

SEQ ID NO: 1517963 - RNA, 18 nt, Human
ucucccuuggauuguccc

SEQ ID NO: 1517964 - RNA, 15 nt, Human
ucuccucugcugcug

SEQ ID NO: 1517965 - RNA, 13 nt, Human
ucuccucugcugc

SEQ ID NO: 1517966 - RNA, 14 nt, Human
ucuccucugcugcu

SEQ ID NO: 1517967 - RNA, 12 nt, Human
ucuccucugcug

SEQ ID NO: 1517968 - RNA, 19 nt, Human
ucucccuuggauugucccc

SEQ ID NO: 1517969 - RNA, 21 nt, Human
ucucccuuggauuguccccga

SEQ ID NO: 1517970 - RNA, 13 nt, Human
agaaacuggaacu

SEQ ID NO: 1517971 - RNA, 15 nt, Human
agaaacuggaacucu

SEQ ID NO: 1517972 - RNA, 19 nt, Human
agaaaacaaggaugaauua

SEQ ID NO: 1517973 - RNA, 17 nt, Human
agaaaaaugagccuggc

SEQ ID NO: 1517974 - RNA, 22 nt, Human
ucucuuuaaugucacaggcagg

SEQ ID NO: 1517975 - RNA, 17 nt, Human
ucucuugagccugggag

SEQ ID NO: 1517976 - RNA, 15 nt, Human
ucucuugagccuggg

SEQ ID NO: 1517977 - RNA, 13 nt, Human
ucucuugagccug

SEQ ID NO: 1517978 - RNA, 14 nt, Human
ucucuugagccugg

SEQ ID NO: 1517979 - RNA, 12 nt, Human
ucucuucuuuaa

SEQ ID NO: 1517980 - RNA, 14 nt, Human
ucucuugagagggu

SEQ ID NO: 1517981 - RNA, 13 nt, Human
ucucuucuuuaaa

SEQ ID NO: 1517982 - RNA, 11 nt, Human
ucucugcccuc

SEQ ID NO: 1517983 - RNA, 16 nt, Human
ucucuggccuucggcc

SEQ ID NO: 1517984 - RNA, 17 nt, Human
ucucuggccuucggccu

SEQ ID NO: 1517985 - RNA, 22 nt, Human
ucucuccuguaccucuugagcc

SEQ ID NO: 1517986 - RNA, 20 nt, Human
ucucuccuguaccucuugag

SEQ ID NO: 1517987 - RNA, 16 nt, Human
ucucuccagccccugg

SEQ ID NO: 1517988 - RNA, 15 nt, Human
ucucuccagccccug

SEQ ID NO: 1517989 - RNA, 20 nt, Human
ucuccuucagcccucacccc

SEQ ID NO: 1517990 - RNA, 13 nt, Human
ucucuccagcccc

SEQ ID NO: 1517991 - RNA, 14 nt, Human
ucucuccagccccu

SEQ ID NO: 1517992 - RNA, 20 nt, Human
ucuccuucaccuuugucccc

SEQ ID NO: 1517993 - RNA, 15 nt, Human
ucuccuucagcccuc

SEQ ID NO: 1517994 - RNA, 19 nt, Human
ucuccuucagcccucaccc

SEQ ID NO: 1517995 - RNA, 20 nt, Human
ucuguuuuauaauuuuguga

SEQ ID NO: 1517996 - RNA, 18 nt, Human
ucuguuuuauaauuuugu

SEQ ID NO: 1517997 - RNA, 13 nt, Human
agaauuucuagga

SEQ ID NO: 1517998 - RNA, 21 nt, Human
agaauuucuaggacugaauua

SEQ ID NO: 1517999 - RNA, 23 nt, Human
agaauuucccaaagcagugcaug

SEQ ID NO: 1518000 - RNA, 17 nt, Human
agaauuucccaaagcag

SEQ ID NO: 1518001 - RNA, 18 nt, Human
agaauuucccaaagcagu

SEQ ID NO: 1518002 - RNA, 18 nt, Human
ucuguuggccagugugac

SEQ ID NO: 1518003 - RNA, 19 nt, Human
ucuguuggccagugugaca

SEQ ID NO: 1518004 - RNA, 20 nt, Human
ucuguuggccagugugacaa

SEQ ID NO: 1518005 - RNA, 22 nt, Human
ucugugaaaggaaagagggagg

SEQ ID NO: 1518006 - RNA, 15 nt, Human
ucugugaaaggaaag

SEQ ID NO: 1518007 - RNA, 21 nt, Human
ucugugaaaggaaagagggag

SEQ ID NO: 1518008 - RNA, 22 nt, Human
ucuggucuaaauuguguuacua

SEQ ID NO: 1518009 - RNA, 15 nt, Human
ucugucauuugagca

SEQ ID NO: 1518010 - RNA, 20 nt, Human
ucugucauuugagcagggcu

SEQ ID NO: 1518011 - RNA, 23 nt, Human
ucugucauuugagcagggcucag

SEQ ID NO: 1518012 - RNA, 16 nt, Human
agaaggaaaaggcagg

SEQ ID NO: 1518013 - RNA, 18 nt, Human
ucugguccauagagagca

SEQ ID NO: 1518014 - RNA, 11 nt, Human
ucuggggcugu

SEQ ID NO: 1518015 - RNA, 14 nt, Human
ucuggguucacugc

SEQ ID NO: 1518016 - RNA, 16 nt, Human
ucuggguucacugcaa

SEQ ID NO: 1518017 - RNA, 17 nt, Human
agaauuugauaugugaa

SEQ ID NO: 1518018 - RNA, 18 nt, Human
agaauuugauaugugaac

SEQ ID NO: 1518019 - RNA, 19 nt, Human
agaauuugauaugugaaca

SEQ ID NO: 1518020 - RNA, 20 nt, Human
agaauuugauaugugaacag

SEQ ID NO: 1518021 - RNA, 19 nt, Human
agacagucccugccaaugg

SEQ ID NO: 1518022 - RNA, 15 nt, Human
agacagucccugcca

SEQ ID NO: 1518023 - RNA, 16 nt, Human
agacagucccugccaa

SEQ ID NO: 1518024 - RNA, 17 nt, Human
agacagucccugccaau

SEQ ID NO: 1518025 - RNA, 21 nt, Human
agacaggguuuugccauguug

SEQ ID NO: 1518026 - RNA, 15 nt, Human
agacaggaccaggga

SEQ ID NO: 1518027 - RNA, 16 nt, Human
agacaggaccagggau

SEQ ID NO: 1518028 - RNA, 23 nt, Human
agacaggcaagcaccuccugccu

SEQ ID NO: 1518029 - RNA, 22 nt, Human
ucuuagaugcaguucugaagaa

SEQ ID NO: 1518030 - RNA, 14 nt, Human
ucuuaugggcuggg

SEQ ID NO: 1518031 - RNA, 15 nt, Human
ucuuaugggcugggu

SEQ ID NO: 1518032 - RNA, 16 nt, Human
ucuuaugggcuggguu

SEQ ID NO: 1518033 - RNA, 14 nt, Human
ucuuauugcccacg

SEQ ID NO: 1518034 - RNA, 18 nt, Human
ucuuaugggcuggguucu

SEQ ID NO: 1518035 - RNA, 18 nt, Human
ucuuauugcccacgcugg

SEQ ID NO: 1518036 - RNA, 22 nt, Human
ucuuauugcccacgcuggagug

SEQ ID NO: 1518037 - RNA, 18 nt, Human
ucuuaauuaaaagaauau

SEQ ID NO: 1518038 - RNA, 21 nt, Human
ucuuaauuaaaagaauauuuu

SEQ ID NO: 1518039 - RNA, 22 nt, Human
ucuuccaggcugggagagccuu

SEQ ID NO: 1518040 - RNA, 17 nt, Human
ucuuauuuaaugaaaga

SEQ ID NO: 1518041 - RNA, 22 nt, Human
agacuccaaagaaauguaaggg

SEQ ID NO: 1518042 - RNA, 23 nt, Human
agacuauucaaacagucucagga

SEQ ID NO: 1518043 - RNA, 16 nt, Human
agacuccaaagaaaug

SEQ ID NO: 1518044 - RNA, 19 nt, Human
agacuccaaagaaauguaa

SEQ ID NO: 1518045 - RNA, 17 nt, Human
ucuugcaauggcagccu

SEQ ID NO: 1518046 - RNA, 13 nt, Human
ucuugcaauggca

SEQ ID NO: 1518047 - RNA, 16 nt, Human
ucuugcaauggcagcc

SEQ ID NO: 1518048 - RNA, 19 nt, Human
agacuaucuaaauguugaa

SEQ ID NO: 1518049 - RNA, 17 nt, Human
agacuaucuaaauguug

SEQ ID NO: 1518050 - RNA, 18 nt, Human
agacuaucuaaauguuga

SEQ ID NO: 1518051 - RNA, 17 nt, Human
agacucauucuucugua

SEQ ID NO: 1518052 - RNA, 21 nt, Human
agacuauucaaacagucucag

SEQ ID NO: 1518053 - RNA, 18 nt, Human
agacuauucaaacagucu

SEQ ID NO: 1518054 - RNA, 20 nt, Human
agacuauucaaacagucuca

SEQ ID NO: 1518055 - RNA, 18 nt, Human
agacucauucuucuguac

SEQ ID NO: 1518056 - RNA, 12 nt, Human
agacuccaaaga

SEQ ID NO: 1518057 - RNA, 13 nt, Human
agacuccaaagaa

SEQ ID NO: 1518058 - RNA, 14 nt, Human
agacuccaaagaaa

SEQ ID NO: 1518059 - RNA, 19 nt, Human
agacccuuguggucccacc

SEQ ID NO: 1518060 - RNA, 20 nt, Human
agacccuuguggucccaccc

SEQ ID NO: 1518061 - RNA, 22 nt, Human
agacccuuguggucccacccca

SEQ ID NO: 1518062 - RNA, 23 nt, Human
agacccuuguggucccaccccac

SEQ ID NO: 1518063 - RNA, 13 nt, Human
agacccuuguggu

SEQ ID NO: 1518064 - RNA, 15 nt, Human
agacccuuguggucc

SEQ ID NO: 1518065 - RNA, 16 nt, Human
agacccugcccugugg

SEQ ID NO: 1518066 - RNA, 19 nt, Human
agacccugcccugugggcc

SEQ ID NO: 1518067 - RNA, 21 nt, Human
agacccugcccugugggcccc

SEQ ID NO: 1518068 - RNA, 23 nt, Human
agacccugcccugugggccccca

SEQ ID NO: 1518069 - RNA, 12 nt, Human
agacccugcccu

SEQ ID NO: 1518070 - RNA, 13 nt, Human
agacccugcccug

SEQ ID NO: 1518071 - RNA, 14 nt, Human
agacccugcccugu

SEQ ID NO: 1518072 - RNA, 17 nt, Human
ucuuuaaaauacacacu

SEQ ID NO: 1518073 - RNA, 21 nt, Human
ucuuuaaagggauggcaagau

SEQ ID NO: 1518074 - RNA, 15 nt, Human
ucuuuacuucaugga

SEQ ID NO: 1518075 - RNA, 19 nt, Human
agacucuacagaggccaug

SEQ ID NO: 1518076 - RNA, 17 nt, Human
agacucuacagaggcca

SEQ ID NO: 1518077 - RNA, 18 nt, Human
agacuccugcaggcagcc

SEQ ID NO: 1518078 - RNA, 19 nt, Human
agacuccugcaggcagcca

SEQ ID NO: 1518079 - RNA, 20 nt, Human
agacuccugcaggcagccag

SEQ ID NO: 1518080 - RNA, 23 nt, Human
agacuccugcaggcagccaggcc

SEQ ID NO: 1518081 - RNA, 13 nt, Human
ucuuuccugaggc

SEQ ID NO: 1518082 - RNA, 14 nt, Human
ucuuuccugaggcu

SEQ ID NO: 1518083 - RNA, 15 nt, Human
ucuuuccugaggcug

SEQ ID NO: 1518084 - RNA, 16 nt, Human
ucuuuccugaggcugg

SEQ ID NO: 1518085 - RNA, 15 nt, Human
agacuccugcaggca

SEQ ID NO: 1518086 - RNA, 16 nt, Human
agacuccugcaggcag

SEQ ID NO: 1518087 - RNA, 17 nt, Human
agacuccugcaggcagc

SEQ ID NO: 1518088 - RNA, 18 nt, Human
agagacacacugaagaag

SEQ ID NO: 1518089 - RNA, 20 nt, Human
agagacacacugaagaagca

SEQ ID NO: 1518090 - RNA, 13 nt, Human
agagaccaucccu

SEQ ID NO: 1518091 - RNA, 14 nt, Human
agagaccaucccug

SEQ ID NO: 1518092 - RNA, 18 nt, Human
agagaccaucccugaagg

SEQ ID NO: 1518093 - RNA, 15 nt, Human
agagaccaucccuga

SEQ ID NO: 1518094 - RNA, 17 nt, Human
agagacacacugaagaa

SEQ ID NO: 1518095 - RNA, 15 nt, Human
agagaaugagagaca

SEQ ID NO: 1518096 - RNA, 15 nt, Human
agacuuuggaaagac

SEQ ID NO: 1518097 - RNA, 12 nt, Human
agacuuuggaaa

SEQ ID NO: 1518098 - RNA, 14 nt, Human
agacuuuggaaaga

SEQ ID NO: 1518099 - RNA, 18 nt, Human
agagaaugaaagggccca

SEQ ID NO: 1518100 - RNA, 18 nt, Human
agacuggcacaguuuucu

SEQ ID NO: 1518101 - RNA, 14 nt, Human
agacuggcacaguu

SEQ ID NO: 1518102 - RNA, 15 nt, Human
agacuggcacaguuu

SEQ ID NO: 1518103 - RNA, 14 nt, Human
agacuucaucccuc

SEQ ID NO: 1518104 - RNA, 17 nt, Human
agacuucaucccucugg

SEQ ID NO: 1518105 - RNA, 17 nt, Human
agaggcuaugugagcac

SEQ ID NO: 1518106 - RNA, 21 nt, Human
agagggagggagggcuccaga

SEQ ID NO: 1518107 - RNA, 15 nt, Human
agagggagguaagga

SEQ ID NO: 1518108 - RNA, 22 nt, Human
agagggagggagggcuccagac

SEQ ID NO: 1518109 - RNA, 18 nt, Human
ugaagauguagaggagaa

SEQ ID NO: 1518110 - RNA, 22 nt, Human
ugaagaagcaccaaucaugaau

SEQ ID NO: 1518111 - RNA, 11 nt, Human
ugaagaagaga

SEQ ID NO: 1518112 - RNA, 11 nt, Human
ugaagacaaug

SEQ ID NO: 1518113 - RNA, 17 nt, Human
ugaagacaaugacuuac

SEQ ID NO: 1518114 - RNA, 13 nt, Human
ugaagacaaugac

SEQ ID NO: 1518115 - RNA, 14 nt, Human
ugaagaagauggua

SEQ ID NO: 1518116 - RNA, 20 nt, Human
ugaagaagcaccaaucauga

SEQ ID NO: 1518117 - RNA, 17 nt, Human
ugaacuuugaccucugc

SEQ ID NO: 1518118 - RNA, 16 nt, Human
ugaacuuugaccucug

SEQ ID NO: 1518119 - RNA, 11 nt, Human
ugaacuuugac

SEQ ID NO: 1518120 - RNA, 14 nt, Human
ucuuuggucuacac

SEQ ID NO: 1518121 - RNA, 21 nt, Human
ucuuuggucuacacugugcug

SEQ ID NO: 1518122 - RNA, 21 nt, Human
ugaagacaaugacuuacugua

SEQ ID NO: 1518123 - RNA, 19 nt, Human
agagcugggugucaagagg

SEQ ID NO: 1518124 - RNA, 12 nt, Human
agaggaaagcaa

SEQ ID NO: 1518125 - RNA, 16 nt, Human
agaggaaagcaaagga

SEQ ID NO: 1518126 - RNA, 18 nt, Human
agaggaaagcaaaggaga

SEQ ID NO: 1518127 - RNA, 19 nt, Human
agaggaaagcaaaggagau

SEQ ID NO: 1518128 - RNA, 11 nt, Human
agaggaaauca

SEQ ID NO: 1518129 - RNA, 12 nt, Human
agaggaaaucac

SEQ ID NO: 1518130 - RNA, 21 nt, Human
agaggaaaucaccgaaaacgu

SEQ ID NO: 1518131 - RNA, 18 nt, Human
agaggcaacugcauuggc

SEQ ID NO: 1518132 - RNA, 13 nt, Human
ugaagguuucuga

SEQ ID NO: 1518133 - RNA, 16 nt, Human
ugaagguuucugaaaa

SEQ ID NO: 1518134 - RNA, 15 nt, Human
ugaauauaaacacua

SEQ ID NO: 1518135 - RNA, 14 nt, Human
ugaauauaaucccu

SEQ ID NO: 1518136 - RNA, 16 nt, Human
ugaauauaaacacuau

SEQ ID NO: 1518137 - RNA, 18 nt, Human
agagucuauuuacggaac

SEQ ID NO: 1518138 - RNA, 22 nt, Human
agagugaacaaauuuacagaga

SEQ ID NO: 1518139 - RNA, 15 nt, Human
agagugagacucugu

SEQ ID NO: 1518140 - RNA, 16 nt, Human
agagugagacucuguc

SEQ ID NO: 1518141 - RNA, 20 nt, Human
agagucucacuguugcccag

SEQ ID NO: 1518142 - RNA, 22 nt, Human
agagucucacuguugcccaggc

SEQ ID NO: 1518143 - RNA, 14 nt, Human
ugaaugucagugug

SEQ ID NO: 1518144 - RNA, 15 nt, Human
ugaaugucaguguga

SEQ ID NO: 1518145 - RNA, 18 nt, Human
ugaaugucagugugacug

SEQ ID NO: 1518146 - RNA, 15 nt, Human
agagucgcugugcca

SEQ ID NO: 1518147 - RNA, 19 nt, Human
agagucgcugugccacagg

SEQ ID NO: 1518148 - RNA, 14 nt, Human
agagucgcugugcc

SEQ ID NO: 1518149 - RNA, 21 nt, Human
agaucaaccccuucgcuccug

SEQ ID NO: 1518150 - RNA, 14 nt, Human
agaucaaccccuuc

SEQ ID NO: 1518151 - RNA, 19 nt, Human
agaucaaccccuucgcucc

SEQ ID NO: 1518152 - RNA, 19 nt, Human
agauacaggaaaagcugcu

SEQ ID NO: 1518153 - RNA, 19 nt, Human
agagugagacucugucuca

SEQ ID NO: 1518154 - RNA, 19 nt, Human
agauaaggguaucugguga

SEQ ID NO: 1518155 - RNA, 18 nt, Human
agauaauacaccacuaca

SEQ ID NO: 1518156 - RNA, 19 nt, Human
agauaaucagugugucuaa

SEQ ID NO: 1518157 - RNA, 15 nt, Human
agauccuuccuuuug

SEQ ID NO: 1518158 - RNA, 12 nt, Human
ugacccaugcug

SEQ ID NO: 1518159 - RNA, 13 nt, Human
ugaccucugccug

SEQ ID NO: 1518160 - RNA, 14 nt, Human
ugaccucugccuga

SEQ ID NO: 1518161 - RNA, 12 nt, Human
ugaccugaggcc

SEQ ID NO: 1518162 - RNA, 18 nt, Human
agaugcuucucacugcca

SEQ ID NO: 1518163 - RNA, 23 nt, Human
agaugcuagaacucccuuucaac

SEQ ID NO: 1518164 - RNA, 23 nt, Human
agauuauauauauuuuuuucuga

SEQ ID NO: 1518165 - RNA, 21 nt, Human
agauucaaugccccugaauuu

SEQ ID NO: 1518166 - RNA, 22 nt, Human
agauucaaugccccugaauuua

SEQ ID NO: 1518167 - RNA, 17 nt, Human
ugacuugacagaacacu

SEQ ID NO: 1518168 - RNA, 19 nt, Human
ugacuugacagaacacugu

SEQ ID NO: 1518169 - RNA, 15 nt, Human
ugacuucuaaguaaa

SEQ ID NO: 1518170 - RNA, 15 nt, Human
ugacuguuuccauca

SEQ ID NO: 1518171 - RNA, 21 nt, Human
ugacuguuuucucuugagagg

SEQ ID NO: 1518172 - RNA, 20 nt, Human
ugacuccagaauuucccaaa

SEQ ID NO: 1518173 - RNA, 23 nt, Human
ugacuccagaauuucccaaagca

SEQ ID NO: 1518174 - RNA, 17 nt, Human
ugaccugaggcccuucu

SEQ ID NO: 1518175 - RNA, 14 nt, Human
ugaccugaggcccu

SEQ ID NO: 1518176 - RNA, 15 nt, Human
ugaccugaggcccuu

SEQ ID NO: 1518177 - RNA, 17 nt, Human
ugacuccagaauuuccc

SEQ ID NO: 1518178 - RNA, 19 nt, Human
ugacuccagaauuucccaa

SEQ ID NO: 1518179 - RNA, 14 nt, Human
agauuuuccugaaa

SEQ ID NO: 1518180 - RNA, 17 nt, Human
agauuuucagaaaauau

SEQ ID NO: 1518181 - RNA, 12 nt, Human
agauuuucagaa

SEQ ID NO: 1518182 - RNA, 16 nt, Human
agauuuaccacuugug

SEQ ID NO: 1518183 - RNA, 23 nt, Human
agauuggcucacacugagaaugu

SEQ ID NO: 1518184 - RNA, 16 nt, Human
agauugugccccugca

SEQ ID NO: 1518185 - RNA, 21 nt, Human
agauugugccccugcacucca

SEQ ID NO: 1518186 - RNA, 13 nt, Human
agauuucacucuc

SEQ ID NO: 1518187 - RNA, 14 nt, Human
agauuucacucucc

SEQ ID NO: 1518188 - RNA, 17 nt, Human
agauuucacucuccuug

SEQ ID NO: 1518189 - RNA, 17 nt, Human
ugagguacugagaguga

SEQ ID NO: 1518190 - RNA, 20 nt, Human
ugaggguugggcugguguca

SEQ ID NO: 1518191 - RNA, 22 nt, Human
ugagguacugagagugaacaaa

SEQ ID NO: 1518192 - RNA, 13 nt, Human
ugaggucagagcc

SEQ ID NO: 1518193 - RNA, 14 nt, Human
ugaggucagagccu

SEQ ID NO: 1518194 - RNA, 16 nt, Human
ugaggucagagccugc

SEQ ID NO: 1518195 - RNA, 20 nt, Human
agcagagaccaucccugaag

SEQ ID NO: 1518196 - RNA, 20 nt, Human
agcagagcaccuuagacagu

SEQ ID NO: 1518197 - RNA, 17 nt, Human
ugaggucagagccugca

SEQ ID NO: 1518198 - RNA, 18 nt, Human
agcagagaccaucccuga

SEQ ID NO: 1518199 - RNA, 19 nt, Human
agcagagaccaucccugaa

SEQ ID NO: 1518200 - RNA, 17 nt, Human
agcagaggaaggagagg

SEQ ID NO: 1518201 - RNA, 21 nt, Human
agcagauggaaugcuguguua

SEQ ID NO: 1518202 - RNA, 19 nt, Human
agcagauggagaccccuug

SEQ ID NO: 1518203 - RNA, 13 nt, Human
ugaggggccucuu

SEQ ID NO: 1518204 - RNA, 23 nt, Human
ugaggguccugcagccugcagga

SEQ ID NO: 1518205 - RNA, 21 nt, Human
ugaggguccugcagccugcag

SEQ ID NO: 1518206 - RNA, 22 nt, Human
ugaggguccugcagccugcagg

SEQ ID NO: 1518207 - RNA, 14 nt, Human
ugaggguccugcag

SEQ ID NO: 1518208 - RNA, 15 nt, Human
ugaggguccugcagc

SEQ ID NO: 1518209 - RNA, 18 nt, Human
ugaggguccugcagccug

SEQ ID NO: 1518210 - RNA, 19 nt, Human
ugaggguccugcagccugc

SEQ ID NO: 1518211 - RNA, 12 nt, Human
ugaggggccucu

SEQ ID NO: 1518212 - RNA, 19 nt, Human
ugagggauacccaucccau

SEQ ID NO: 1518213 - RNA, 16 nt, Human
ugaggcccuucucucc

SEQ ID NO: 1518214 - RNA, 18 nt, Human
ugaggcccuucucuccag

SEQ ID NO: 1518215 - RNA, 19 nt, Human
ugaggcccuucucuccagc

SEQ ID NO: 1518216 - RNA, 20 nt, Human
ugaggcccuucucuccagcc

SEQ ID NO: 1518217 - RNA, 22 nt, Human
ugaggcccuucucuccagcccc

SEQ ID NO: 1518218 - RNA, 23 nt, Human
ugaggcccuucucuccagccccu

SEQ ID NO: 1518219 - RNA, 24 nt, Human
ugaggcccuucucuccagccccug

SEQ ID NO: 1518220 - RNA, 16 nt, Human
ugagcuacaaaugcau

SEQ ID NO: 1518221 - RNA, 14 nt, Human
ugagcuacaaaugc

SEQ ID NO: 1518222 - RNA, 13 nt, Human
ugagcuacaaaug

SEQ ID NO: 1518223 - RNA, 14 nt, Human
ugagcgcuccugcc

SEQ ID NO: 1518224 - RNA, 18 nt, Human
ugagcgcuccugccgcag

SEQ ID NO: 1518225 - RNA, 22 nt, Human
ugagcgcuccugccgcagagcu

SEQ ID NO: 1518226 - RNA, 15 nt, Human
ugaggaagcaaaagc

SEQ ID NO: 1518227 - RNA, 17 nt, Human
ugaggaagaacggggcu

SEQ ID NO: 1518228 - RNA, 19 nt, Human
ugaggaagaacggggcucu

SEQ ID NO: 1518229 - RNA, 23 nt, Human
ugaggaagaacggggcucuucuc

SEQ ID NO: 1518230 - RNA, 24 nt, Human
ugaggaagaacggggcucuucuca

SEQ ID NO: 1518231 - RNA, 22 nt, Human
ugaggaagcaaaagcaucuaug

SEQ ID NO: 1518232 - RNA, 14 nt, Human
ugaggaagccgcug

SEQ ID NO: 1518233 - RNA, 17 nt, Human
ugaggaagccgcugggg

SEQ ID NO: 1518234 - RNA, 18 nt, Human
ugaggaagccgcuggggc

SEQ ID NO: 1518235 - RNA, 19 nt, Human
ugaggaagccgcuggggcc

SEQ ID NO: 1518236 - RNA, 21 nt, Human
ugaggaagccgcuggggccag

SEQ ID NO: 1518237 - RNA, 20 nt, Human
ugaggccagagacacaagcc

SEQ ID NO: 1518238 - RNA, 14 nt, Human
ugaggccagagaca

SEQ ID NO: 1518239 - RNA, 16 nt, Human
ugaggccagagacaca

SEQ ID NO: 1518240 - RNA, 12 nt, Human
ugaggcccagag

SEQ ID NO: 1518241 - RNA, 13 nt, Human
ugaggcccagagg

SEQ ID NO: 1518242 - RNA, 23 nt, Human
ugaggcccagagggccugcaagg

SEQ ID NO: 1518243 - RNA, 21 nt, Human
ugaggcccagagggccugcaa

SEQ ID NO: 1518244 - RNA, 22 nt, Human
ugaggcccagagggccugcaag

SEQ ID NO: 1518245 - RNA, 15 nt, Human
ugaggcccagagggc

SEQ ID NO: 1518246 - RNA, 17 nt, Human
ugaggcccagagggccu

SEQ ID NO: 1518247 - RNA, 18 nt, Human
ugaggcccagagggccug

SEQ ID NO: 1518248 - RNA, 20 nt, Human
ugaggcccagagggccugca

SEQ ID NO: 1518249 - RNA, 15 nt, Human
ugaggacacugauau

SEQ ID NO: 1518250 - RNA, 21 nt, Human
ugaggacacuaaccacgcugg

SEQ ID NO: 1518251 - RNA, 12 nt, Human
ugaggccagaga

SEQ ID NO: 1518252 - RNA, 21 nt, Human
ugaggaauccagacccggcug

SEQ ID NO: 1518253 - RNA, 22 nt, Human
ugaggaauccagacccggcugc

SEQ ID NO: 1518254 - RNA, 15 nt, Human
agcacagugaucaag

SEQ ID NO: 1518255 - RNA, 22 nt, Human
agcacagccucuuagaugcagu

SEQ ID NO: 1518256 - RNA, 16 nt, Human
agcacagcuucauuuc

SEQ ID NO: 1518257 - RNA, 16 nt, Human
agcaccaaucaugaau

SEQ ID NO: 1518258 - RNA, 13 nt, Human
agcacaugccucu

SEQ ID NO: 1518259 - RNA, 14 nt, Human
agcacaugccucuc

SEQ ID NO: 1518260 - RNA, 16 nt, Human
agcacaugccucucuc

SEQ ID NO: 1518261 - RNA, 22 nt, Human
agcaagugagagcuggguguca

SEQ ID NO: 1518262 - RNA, 14 nt, Human
agcaagugagagcu

SEQ ID NO: 1518263 - RNA, 17 nt, Human
ugagccagauuucacuc

SEQ ID NO: 1518264 - RNA, 22 nt, Human
ugagccagauuucacucuccuu

SEQ ID NO: 1518265 - RNA, 20 nt, Human
agcaagugagacccugucuc

SEQ ID NO: 1518266 - RNA, 13 nt, Human
agcaagugagagc

SEQ ID NO: 1518267 - RNA, 14 nt, Human
agcaacgcaggccc

SEQ ID NO: 1518268 - RNA, 15 nt, Human
ugagcaauccugcaa

SEQ ID NO: 1518269 - RNA, 20 nt, Human
ugagcacuaaggugugcucu

SEQ ID NO: 1518270 - RNA, 21 nt, Human
ugagcacuaaggugugcucug

SEQ ID NO: 1518271 - RNA, 22 nt, Human
ugagcacuaaggugugcucuga

SEQ ID NO: 1518272 - RNA, 23 nt, Human
ugagcacuaaggugugcucugau

SEQ ID NO: 1518273 - RNA, 21 nt, Human
ugagcaucaggccaggcccuc

SEQ ID NO: 1518274 - RNA, 22 nt, Human
ugagcaucaggccaggcccucu

SEQ ID NO: 1518275 - RNA, 24 nt, Human
ugagcaucaggccaggcccucugc

SEQ ID NO: 1518276 - RNA, 21 nt, Human
ugagccacugcaccgggccac

SEQ ID NO: 1518277 - RNA, 23 nt, Human
ugagccacugcaccgggccacag

SEQ ID NO: 1518278 - RNA, 13 nt, Human
ugagccagauuuc

SEQ ID NO: 1518279 - RNA, 14 nt, Human
ugagccagauuuca

SEQ ID NO: 1518280 - RNA, 16 nt, Human
ugagccagauuucacu

SEQ ID NO: 1518281 - RNA, 21 nt, Human
agcagagaaugaaagggccca

SEQ ID NO: 1518282 - RNA, 22 nt, Human
agcagagaaugaaagggcccag

SEQ ID NO: 1518283 - RNA, 23 nt, Human
agcagagaaugaaagggcccaga

SEQ ID NO: 1518284 - RNA, 14 nt, Human
agcagagaauucuc

SEQ ID NO: 1518285 - RNA, 21 nt, Human
agcagagaauucucuuaucca

SEQ ID NO: 1518286 - RNA, 15 nt, Human
agcagagaccauccc

SEQ ID NO: 1518287 - RNA, 16 nt, Human
agcagagaccaucccu

SEQ ID NO: 1518288 - RNA, 17 nt, Human
agcagagaccaucccug

SEQ ID NO: 1518289 - RNA, 10 nt, Human
ugagccuggc

SEQ ID NO: 1518290 - RNA, 14 nt, Human
ugagccuugaacuu

SEQ ID NO: 1518291 - RNA, 11 nt, Human
ugagccugguc

SEQ ID NO: 1518292 - RNA, 19 nt, Human
ugagccugggaggucaagg

SEQ ID NO: 1518293 - RNA, 22 nt, Human
ugagccugggaggucaaggcug

SEQ ID NO: 1518294 - RNA, 11 nt, Human
ugagccuggca

SEQ ID NO: 1518295 - RNA, 16 nt, Human
ugagccuggcaagaau

SEQ ID NO: 1518296 - RNA, 14 nt, Human
ugagccugggaggu

SEQ ID NO: 1518297 - RNA, 19 nt, Human
ugagccuugaacuuugacc

SEQ ID NO: 1518298 - RNA, 18 nt, Human
ugagccuugaacuuugac

SEQ ID NO: 1518299 - RNA, 17 nt, Human
ugagccuugaacuuuga

SEQ ID NO: 1518300 - RNA, 15 nt, Human
ugagccuugaacuuu

SEQ ID NO: 1518301 - RNA, 13 nt, Human
ugagcgacaguga

SEQ ID NO: 1518302 - RNA, 14 nt, Human
ugagcgacagugag

SEQ ID NO: 1518303 - RNA, 16 nt, Human
ugagcgacagugagac

SEQ ID NO: 1518304 - RNA, 20 nt, Human
ugagcgacagugagacucug

SEQ ID NO: 1518305 - RNA, 22 nt, Human
agcacuuugggaggccaaggug

SEQ ID NO: 1518306 - RNA, 23 nt, Human
agcacuuugggaggccaaggugg

SEQ ID NO: 1518307 - RNA, 13 nt, Human
agcagaaaugccu

SEQ ID NO: 1518308 - RNA, 12 nt, Human
agcagaaaugcc

SEQ ID NO: 1518309 - RNA, 19 nt, Human
agcagaaaugccuuacccu

SEQ ID NO: 1518310 - RNA, 14 nt, Human
agcagaacagugau

SEQ ID NO: 1518311 - RNA, 12 nt, Human
agcagaaggggg

SEQ ID NO: 1518312 - RNA, 16 nt, Human
agcagaaggggguggu

SEQ ID NO: 1518313 - RNA, 22 nt, Human
agcagaaggggguggugucucc

SEQ ID NO: 1518314 - RNA, 23 nt, Human
agcagaaggggguggugucucca

SEQ ID NO: 1518315 - RNA, 19 nt, Human
agcaccuuagacagucccu

SEQ ID NO: 1518316 - RNA, 20 nt, Human
agcaccuuagacagucccug

SEQ ID NO: 1518317 - RNA, 21 nt, Human
agcaccuuagacagucccugc

SEQ ID NO: 1518318 - RNA, 22 nt, Human
agcaccuuagacagucccugcc

SEQ ID NO: 1518319 - RNA, 23 nt, Human
agcaccuuagacagucccugcca

SEQ ID NO: 1518320 - RNA, 13 nt, Human
agcacgauuucug

SEQ ID NO: 1518321 - RNA, 15 nt, Human
agcacgauuucuguu

SEQ ID NO: 1518322 - RNA, 14 nt, Human
agcacgauuucugu

SEQ ID NO: 1518323 - RNA, 16 nt, Human
agcacgauuucuguuu

SEQ ID NO: 1518324 - RNA, 20 nt, Human
acuggguacuuguggacaca

SEQ ID NO: 1518325 - RNA, 23 nt, Human
acuggguacuuguggacacagcu

SEQ ID NO: 1518326 - RNA, 19 nt, Human
acuggguacuuguggacac

SEQ ID NO: 1518327 - RNA, 12 nt, Human
ucgcuccugugu

SEQ ID NO: 1518328 - RNA, 13 nt, Human
ucgcuccuguguc

SEQ ID NO: 1518329 - RNA, 14 nt, Human
ucgcuccugugucu

SEQ ID NO: 1518330 - RNA, 19 nt, Human
acuguaauuugugauacaa

SEQ ID NO: 1518331 - RNA, 13 nt, Human
acuguacaaagua

SEQ ID NO: 1518332 - RNA, 14 nt, Human
acuguacaaaguag

SEQ ID NO: 1518333 - RNA, 15 nt, Human
acuguacaaaguaga

SEQ ID NO: 1518334 - RNA, 14 nt, Human
acuguacaugaaaa

SEQ ID NO: 1518335 - RNA, 13 nt, Human
acuguacaugaaa

SEQ ID NO: 1518336 - RNA, 23 nt, Human
acuguacaugaaaacacauuuuu

SEQ ID NO: 1518337 - RNA, 16 nt, Human
acuguacaugaaaaca

SEQ ID NO: 1518338 - RNA, 14 nt, Human
ucgagcaugccugg

SEQ ID NO: 1518339 - RNA, 15 nt, Human
ucgagcaugccugga

SEQ ID NO: 1518340 - RNA, 14 nt, Human
ucgaggacagggag

SEQ ID NO: 1518341 - RNA, 17 nt, Human
ucgaggacagggaggug

SEQ ID NO: 1518342 - RNA, 14 nt, Human
ucgcgacaaugcaa

SEQ ID NO: 1518343 - RNA, 13 nt, Human
ucgcgacaaugca

SEQ ID NO: 1518344 - RNA, 19 nt, Human
uccuuucaaugguuugcaa

SEQ ID NO: 1518345 - RNA, 15 nt, Human
uccuuucaccacaug

SEQ ID NO: 1518346 - RNA, 22 nt, Human
uccuuucuaacaaaaaaauaua

SEQ ID NO: 1518347 - RNA, 14 nt, Human
ucgaacuggcugca

SEQ ID NO: 1518348 - RNA, 15 nt, Human
ucgaacuggcugcaa

SEQ ID NO: 1518349 - RNA, 20 nt, Human
uccuuccuggagcccagagg

SEQ ID NO: 1518350 - RNA, 14 nt, Human
uccuucagugccuu

SEQ ID NO: 1518351 - RNA, 22 nt, Human
uccuucagugccuuauggaaca

SEQ ID NO: 1518352 - RNA, 13 nt, Human
uccuucagugccu

SEQ ID NO: 1518353 - RNA, 13 nt, Human
uccuucagccuga

SEQ ID NO: 1518354 - RNA, 11 nt, Human
uccuucagugc

SEQ ID NO: 1518355 - RNA, 12 nt, Human
uccuucagugcc

SEQ ID NO: 1518356 - RNA, 21 nt, Human
uccuucagcccucaccccugg

SEQ ID NO: 1518357 - RNA, 14 nt, Human
uccuucagcccuca

SEQ ID NO: 1518358 - RNA, 15 nt, Human
uccuucagcccucac

SEQ ID NO: 1518359 - RNA, 19 nt, Human
uccuucagcccucaccccu

SEQ ID NO: 1518360 - RNA, 13 nt, Human
uccuucagcccuc

SEQ ID NO: 1518361 - RNA, 22 nt, Human
acuggcugcaaaggguaucagg

SEQ ID NO: 1518362 - RNA, 22 nt, Human
acuggcacaguuuucugagaaa

SEQ ID NO: 1518363 - RNA, 16 nt, Human
acugccuuuggcagag

SEQ ID NO: 1518364 - RNA, 19 nt, Human
acugccuuuggcagaguuc

SEQ ID NO: 1518365 - RNA, 22 nt, Human
acugccuucucaacuccaaacu

SEQ ID NO: 1518366 - RNA, 21 nt, Human
acugcuugugaaaggaaagag

SEQ ID NO: 1518367 - RNA, 18 nt, Human
acugcuuccagugaggcu

SEQ ID NO: 1518368 - RNA, 21 nt, Human
acugcuuccagugaggcucug

SEQ ID NO: 1518369 - RNA, 22 nt, Human
acugcuuccagugaggcucugc

SEQ ID NO: 1518370 - RNA, 23 nt, Human
acugcuuccagugaggcucugcc

SEQ ID NO: 1518371 - RNA, 13 nt, Human
uccugcagccugc

SEQ ID NO: 1518372 - RNA, 22 nt, Human
uccugcaggcagccaggccaca

SEQ ID NO: 1518373 - RNA, 19 nt, Human
uccugccucagccucccaa

SEQ ID NO: 1518374 - RNA, 16 nt, Human
uccugcaggcagccag

SEQ ID NO: 1518375 - RNA, 17 nt, Human
uccugcaggcagccagg

SEQ ID NO: 1518376 - RNA, 19 nt, Human
uccugcaggcagccaggcc

SEQ ID NO: 1518377 - RNA, 20 nt, Human
uccugcaggcagccaggcca

SEQ ID NO: 1518378 - RNA, 21 nt, Human
uccugccucgaacuggcugca

SEQ ID NO: 1518379 - RNA, 20 nt, Human
uccugccucgaacuggcugc

SEQ ID NO: 1518380 - RNA, 13 nt, Human
acugaggccugag

SEQ ID NO: 1518381 - RNA, 14 nt, Human
acugaggccugagc

SEQ ID NO: 1518382 - RNA, 17 nt, Human
acugaggggaggggagc

SEQ ID NO: 1518383 - RNA, 22 nt, Human
acugaggggaggggagcauggg

SEQ ID NO: 1518384 - RNA, 13 nt, Human
acugaggaagaac

SEQ ID NO: 1518385 - RNA, 22 nt, Human
acugaggaagaacggggcucuu

SEQ ID NO: 1518386 - RNA, 15 nt, Human
uccucuccccagcaa

SEQ ID NO: 1518387 - RNA, 16 nt, Human
acugcaaccuccgccu

SEQ ID NO: 1518388 - RNA, 22 nt, Human
acugcaaccuccgccucuuggg

SEQ ID NO: 1518389 - RNA, 13 nt, Human
acugcaaccuccg

SEQ ID NO: 1518390 - RNA, 14 nt, Human
acugcaaccuccgc

SEQ ID NO: 1518391 - RNA, 23 nt, Human
acugaguacguugugcauuuggu

SEQ ID NO: 1518392 - RNA, 22 nt, Human
acugaguacguugugcauuugg

SEQ ID NO: 1518393 - RNA, 21 nt, Human
acugaguacguugugcauuug

SEQ ID NO: 1518394 - RNA, 19 nt, Human
acugaguacguugugcauu

SEQ ID NO: 1518395 - RNA, 18 nt, Human
acugaguacguugugcau

SEQ ID NO: 1518396 - RNA, 19 nt, Human
uccuguucccaugagauga

SEQ ID NO: 1518397 - RNA, 18 nt, Human
uccugugugugcgccuac

SEQ ID NO: 1518398 - RNA, 13 nt, Human
uccugugugugcg

SEQ ID NO: 1518399 - RNA, 14 nt, Human
uccugugugugcgc

SEQ ID NO: 1518400 - RNA, 23 nt, Human
uccugugucuugcaauggcagcc

SEQ ID NO: 1518401 - RNA, 24 nt, Human
uccugugucuugcaauggcagccu

SEQ ID NO: 1518402 - RNA, 23 nt, Human
acugcagccucaaccuccugggc

SEQ ID NO: 1518403 - RNA, 19 nt, Human
acugcagccucaaccuccu

SEQ ID NO: 1518404 - RNA, 21 nt, Human
acugcagccucaaccuccugg

SEQ ID NO: 1518405 - RNA, 22 nt, Human
acugcagccucaaccuccuggg

SEQ ID NO: 1518406 - RNA, 13 nt, Human
uccugcugcaguu

SEQ ID NO: 1518407 - RNA, 21 nt, Human
uccugcugcaguugccaguca

SEQ ID NO: 1518408 - RNA, 23 nt, Human
acucuuauaucuauauuuuacau

SEQ ID NO: 1518409 - RNA, 21 nt, Human
acucuccucugcugcuggcug

SEQ ID NO: 1518410 - RNA, 14 nt, Human
acucucccccaccc

SEQ ID NO: 1518411 - RNA, 20 nt, Human
acucucccccacccccuccc

SEQ ID NO: 1518412 - RNA, 18 nt, Human
acucuccucugcugcugg

SEQ ID NO: 1518413 - RNA, 19 nt, Human
acucuccucugcugcuggc

SEQ ID NO: 1518414 - RNA, 18 nt, Human
acucgcgacaaugcaaac

SEQ ID NO: 1518415 - RNA, 19 nt, Human
uccuaggcauuugcugaau

SEQ ID NO: 1518416 - RNA, 20 nt, Human
acucgcgacaaugcaaacca

SEQ ID NO: 1518417 - RNA, 23 nt, Human
acucgcgacaaugcaaaccauca

SEQ ID NO: 1518418 - RNA, 10 nt, Human
acucuccccc

SEQ ID NO: 1518419 - RNA, 17 nt, Human
acucuccucugcugcug

SEQ ID NO: 1518420 - RNA, 20 nt, Human
uccucagaucuucugugggu

SEQ ID NO: 1518421 - RNA, 16 nt, Human
acucuuauugcccacg

SEQ ID NO: 1518422 - RNA, 19 nt, Human
acucuuauugcccacgcug

SEQ ID NO: 1518423 - RNA, 22 nt, Human
uccucauacccacccccaccca

SEQ ID NO: 1518424 - RNA, 14 nt, Human
uccucauacccacc

SEQ ID NO: 1518425 - RNA, 18 nt, Human
uccucauacccaccccca

SEQ ID NO: 1518426 - RNA, 12 nt, Human
uccucuccccag

SEQ ID NO: 1518427 - RNA, 17 nt, Human
uccucccucccucuuuc

SEQ ID NO: 1518428 - RNA, 15 nt, Human
uccucccucccucuu

SEQ ID NO: 1518429 - RNA, 19 nt, Human
uccucccucccucuuuccc

SEQ ID NO: 1518430 - RNA, 19 nt, Human
acuccagugagacagcucu

SEQ ID NO: 1518431 - RNA, 20 nt, Human
acucauuuuaaaaaauggaa

SEQ ID NO: 1518432 - RNA, 22 nt, Human
ucccucauccucauacccaccc

SEQ ID NO: 1518433 - RNA, 21 nt, Human
ucccucagucuggcccuuccu

SEQ ID NO: 1518434 - RNA, 12 nt, Human
acuccugcaggc

SEQ ID NO: 1518435 - RNA, 22 nt, Human
ucccuuuccaaaugcccagcuu

SEQ ID NO: 1518436 - RNA, 18 nt, Human
ucccuuacgugaguccug

SEQ ID NO: 1518437 - RNA, 22 nt, Human
ucccuuacgugaguccuggcau

SEQ ID NO: 1518438 - RNA, 20 nt, Human
uccuagcacuuugggaggcc

SEQ ID NO: 1518439 - RNA, 14 nt, Human
uccuaggcauuugc

SEQ ID NO: 1518440 - RNA, 22 nt, Human
ucccuuugacgccaucccagcc

SEQ ID NO: 1518441 - RNA, 23 nt, Human
ucccuuugacgccaucccagccc

SEQ ID NO: 1518442 - RNA, 18 nt, Human
ucccuauuagagaagaga

SEQ ID NO: 1518443 - RNA, 18 nt, Human
ucccgaauagcugggacu

SEQ ID NO: 1518444 - RNA, 18 nt, Human
uccccuucucucaucucu

SEQ ID NO: 1518445 - RNA, 15 nt, Human
uccccuucucucauc

SEQ ID NO: 1518446 - RNA, 16 nt, Human
uccccuucucucaucu

SEQ ID NO: 1518447 - RNA, 13 nt, Human
uccccuucucuca

SEQ ID NO: 1518448 - RNA, 14 nt, Human
uccccuccuccacu

SEQ ID NO: 1518449 - RNA, 16 nt, Human
uccccuccuccacucu

SEQ ID NO: 1518450 - RNA, 15 nt, Human
ucccgaauagcuggg

SEQ ID NO: 1518451 - RNA, 16 nt, Human
ucccgaauagcuggga

SEQ ID NO: 1518452 - RNA, 12 nt, Human
uccccuccaacc

SEQ ID NO: 1518453 - RNA, 13 nt, Human
uccccuccaaccu

SEQ ID NO: 1518454 - RNA, 22 nt, Human
uccccuccaaccuggggggcag

SEQ ID NO: 1518455 - RNA, 12 nt, Human
uccccuccucca

SEQ ID NO: 1518456 - RNA, 18 nt, Human
acuauguugcccaggcag

SEQ ID NO: 1518457 - RNA, 22 nt, Human
acuaugacauaaaaacaacuuu

SEQ ID NO: 1518458 - RNA, 16 nt, Human
acuaucuaaauguuga

SEQ ID NO: 1518459 - RNA, 19 nt, Human
acuauguugcccaggcagg

SEQ ID NO: 1518460 - RNA, 20 nt, Human
acuauguugcccaggcaggu

SEQ ID NO: 1518461 - RNA, 23 nt, Human
acuauguugcccaggcaggucuu

SEQ ID NO: 1518462 - RNA, 24 nt, Human
uccccaccgcagacaggaccaggg

SEQ ID NO: 1518463 - RNA, 15 nt, Human
acuauauuguacaca

SEQ ID NO: 1518464 - RNA, 23 nt, Human
acuauaauuuaccugaagucuuu

SEQ ID NO: 1518465 - RNA, 17 nt, Human
acuauagccuaggugac

SEQ ID NO: 1518466 - RNA, 18 nt, Human
acuauagccuaggugaca

SEQ ID NO: 1518467 - RNA, 13 nt, Human
uccagccugggug

SEQ ID NO: 1518468 - RNA, 24 nt, Human
uccagccugggugacagagcaagu

SEQ ID NO: 1518469 - RNA, 21 nt, Human
uccagcuauuuuuauuuguuu

SEQ ID NO: 1518470 - RNA, 15 nt, Human
uccagcucaccagcc

SEQ ID NO: 1518471 - RNA, 14 nt, Human
uccagcucaccagc

SEQ ID NO: 1518472 - RNA, 12 nt, Human
acguuucuaaag

SEQ ID NO: 1518473 - RNA, 14 nt, Human
acguuucuaaaggc

SEQ ID NO: 1518474 - RNA, 15 nt, Human
acguuucuaaaggcu

SEQ ID NO: 1518475 - RNA, 13 nt, Human
acuaaaaauacaa

SEQ ID NO: 1518476 - RNA, 16 nt, Human
acuaaccagcagaaau

SEQ ID NO: 1518477 - RNA, 13 nt, Human
acuaaccacgcug

SEQ ID NO: 1518478 - RNA, 17 nt, Human
acuaaccagcagaaaug

SEQ ID NO: 1518479 - RNA, 15 nt, Human
acuacaguccuccca

SEQ ID NO: 1518480 - RNA, 17 nt, Human
acuacaguccucccauc

SEQ ID NO: 1518481 - RNA, 16 nt, Human
acuacaguccucccau

SEQ ID NO: 1518482 - RNA, 11 nt, Human
acuacauucug

SEQ ID NO: 1518483 - RNA, 15 nt, Human
ucccagugaauucuu

SEQ ID NO: 1518484 - RNA, 19 nt, Human
ucccagugccgagaaggaa

SEQ ID NO: 1518485 - RNA, 22 nt, Human
ucccagugccgagaaggaagcc

SEQ ID NO: 1518486 - RNA, 15 nt, Human
ucccauaugccuggg

SEQ ID NO: 1518487 - RNA, 16 nt, Human
ucccauaugccugggc

SEQ ID NO: 1518488 - RNA, 13 nt, Human
ucccaucucacac

SEQ ID NO: 1518489 - RNA, 14 nt, Human
ucccaucucacaca

SEQ ID NO: 1518490 - RNA, 19 nt, Human
ucccaucucacacaugagc

SEQ ID NO: 1518491 - RNA, 19 nt, Human
ucaugacaaagacugagua

SEQ ID NO: 1518492 - RNA, 22 nt, Human
ucaugaauuaguuuuauaugcu

SEQ ID NO: 1518493 - RNA, 23 nt, Human
ucauccacugugccaugugccag

SEQ ID NO: 1518494 - RNA, 19 nt, Human
ucauccacugugccaugug

SEQ ID NO: 1518495 - RNA, 21 nt, Human
ucauccacugugccaugugcc

SEQ ID NO: 1518496 - RNA, 13 nt, Human
ucaugucuggcua

SEQ ID NO: 1518497 - RNA, 17 nt, Human
ucauguucuuaauucuu

SEQ ID NO: 1518498 - RNA, 11 nt, Human
ucauguucuua

SEQ ID NO: 1518499 - RNA, 21 nt, Human
accucuaaauucuuucauuuu

SEQ ID NO: 1518500 - RNA, 13 nt, Human
accucucccuugg

SEQ ID NO: 1518501 - RNA, 14 nt, Human
accucucccuugga

SEQ ID NO: 1518502 - RNA, 15 nt, Human
accucucccuuggau

SEQ ID NO: 1518503 - RNA, 12 nt, Human
accucugcacaa

SEQ ID NO: 1518504 - RNA, 23 nt, Human
accucucccuuggauuguccccg

SEQ ID NO: 1518505 - RNA, 14 nt, Human
accucucucacucc

SEQ ID NO: 1518506 - RNA, 19 nt, Human
accucucucacuccuugaa

SEQ ID NO: 1518507 - RNA, 18 nt, Human
accucuaaauucuuucau

SEQ ID NO: 1518508 - RNA, 17 nt, Human
accucggugccuuccuc

SEQ ID NO: 1518509 - RNA, 21 nt, Human
ucauucuccuuguguuacuaa

SEQ ID NO: 1518510 - RNA, 22 nt, Human
ucauugaccugaggcccuucuc

SEQ ID NO: 1518511 - RNA, 17 nt, Human
accgccaaggcuggggg

SEQ ID NO: 1518512 - RNA, 20 nt, Human
accgcagacaggaccaggga

SEQ ID NO: 1518513 - RNA, 10 nt, Human
acccuuuucu

SEQ ID NO: 1518514 - RNA, 19 nt, Human
ucauauuaauauauuucca

SEQ ID NO: 1518515 - RNA, 18 nt, Human
accgacguugccaucaaa

SEQ ID NO: 1518516 - RNA, 20 nt, Human
ucauauuuacuucuuauaca

SEQ ID NO: 1518517 - RNA, 21 nt, Human
ucauauuuacuucuuauacau

SEQ ID NO: 1518518 - RNA, 22 nt, Human
ucauauuuacuucuuauacauu

SEQ ID NO: 1518519 - RNA, 13 nt, Human
accuagccuuaga

SEQ ID NO: 1518520 - RNA, 11 nt, Human
accucagccuc

SEQ ID NO: 1518521 - RNA, 20 nt, Human
accuccgccucuuggguuca

SEQ ID NO: 1518522 - RNA, 20 nt, Human
ucauuuuagggguagcauuu

SEQ ID NO: 1518523 - RNA, 21 nt, Human
ucauuugagcagggcucagcg

SEQ ID NO: 1518524 - RNA, 18 nt, Human
ucauuugacuaagagucu

SEQ ID NO: 1518525 - RNA, 20 nt, Human
ucauuugcuaacuagcuugg

SEQ ID NO: 1518526 - RNA, 17 nt, Human
ucauuuuuuuuaagaaa

SEQ ID NO: 1518527 - RNA, 13 nt, Human
ucauuuuuuuuaa

SEQ ID NO: 1518528 - RNA, 18 nt, Human
ucauuuuuuuccaggcug

SEQ ID NO: 1518529 - RNA, 13 nt, Human
ucauuuuuuucca

SEQ ID NO: 1518530 - RNA, 16 nt, Human
ucauuuuuuuccaggc

SEQ ID NO: 1518531 - RNA, 15 nt, Human
accugaagucuuugu

SEQ ID NO: 1518532 - RNA, 22 nt, Human
accugaagucuuuguacagaca

SEQ ID NO: 1518533 - RNA, 23 nt, Human
accugcggugcuaucucccccag

SEQ ID NO: 1518534 - RNA, 19 nt, Human
accugcggugcuaucuccc

SEQ ID NO: 1518535 - RNA, 22 nt, Human
accugcggugcuaucuccccca

SEQ ID NO: 1518536 - RNA, 19 nt, Human
ucauuugagcagggcucag

SEQ ID NO: 1518537 - RNA, 17 nt, Human
accuggaauauauaacc

SEQ ID NO: 1518538 - RNA, 14 nt, Human
accuggaauauaua

SEQ ID NO: 1518539 - RNA, 21 nt, Human
uccaacuaucucauuuccaag

SEQ ID NO: 1518540 - RNA, 12 nt, Human
uccaagcuccca

SEQ ID NO: 1518541 - RNA, 13 nt, Human
uccaagcucccag

SEQ ID NO: 1518542 - RNA, 16 nt, Human
uccaagcucccaggca

SEQ ID NO: 1518543 - RNA, 14 nt, Human
uccaagcucccagg

SEQ ID NO: 1518544 - RNA, 15 nt, Human
uccaagcucccaggc

SEQ ID NO: 1518545 - RNA, 16 nt, Human
uccaagcuggucccac

SEQ ID NO: 1518546 - RNA, 11 nt, Human
uccaagcuggu

SEQ ID NO: 1518547 - RNA, 12 nt, Human
accuucuccuuc

SEQ ID NO: 1518548 - RNA, 16 nt, Human
accuugacagggcaca

SEQ ID NO: 1518549 - RNA, 15 nt, Human
accuugacagggcac

SEQ ID NO: 1518550 - RNA, 15 nt, Human
accuugaaugaugcc

SEQ ID NO: 1518551 - RNA, 14 nt, Human
accuugacagggca

SEQ ID NO: 1518552 - RNA, 14 nt, Human
accuucuccuucac

SEQ ID NO: 1518553 - RNA, 13 nt, Human
accuucuccuuca

SEQ ID NO: 1518554 - RNA, 17 nt, Human
accuuagacagucccug

SEQ ID NO: 1518555 - RNA, 23 nt, Human
accuuaggaauaaucuccuguua

SEQ ID NO: 1518556 - RNA, 15 nt, Human
uccaccaucaagcca

SEQ ID NO: 1518557 - RNA, 18 nt, Human
uccaccaucaagccacca

SEQ ID NO: 1518558 - RNA, 22 nt, Human
uccacucucccccacccccucc

SEQ ID NO: 1518559 - RNA, 22 nt, Human
uccagaaguuugagaucagccu

SEQ ID NO: 1518560 - RNA, 19 nt, Human
accuuuguauucucuccug

SEQ ID NO: 1518561 - RNA, 15 nt, Human
accuuuguauucucu

SEQ ID NO: 1518562 - RNA, 23 nt, Human
accuuuguauucucuccuguacc

SEQ ID NO: 1518563 - RNA, 21 nt, Human
uccagccugagcgacagugag

SEQ ID NO: 1518564 - RNA, 20 nt, Human
uccagccugagcgacaguga

SEQ ID NO: 1518565 - RNA, 22 nt, Human
uccagccccuggaugcagccuc

SEQ ID NO: 1518566 - RNA, 14 nt, Human
uccagacccggcug

SEQ ID NO: 1518567 - RNA, 15 nt, Human
uccagccccuggaug

SEQ ID NO: 1518568 - RNA, 16 nt, Human
uccagccccuggaugc

SEQ ID NO: 1518569 - RNA, 17 nt, Human
uccagccccuggaugca

SEQ ID NO: 1518570 - RNA, 19 nt, Human
uccagccccuggaugcagc

SEQ ID NO: 1518571 - RNA, 21 nt, Human
uccagccccuggaugcagccu

SEQ ID NO: 1518572 - RNA, 18 nt, Human
ucagcggggacagcuccu

SEQ ID NO: 1518573 - RNA, 16 nt, Human
ucagcggggacagcuc

SEQ ID NO: 1518574 - RNA, 17 nt, Human
ucagcggggacagcucc

SEQ ID NO: 1518575 - RNA, 20 nt, Human
ucaggccaaacucaccugcc

SEQ ID NO: 1518576 - RNA, 23 nt, Human
ucaggccaaacucaccugccccu

SEQ ID NO: 1518577 - RNA, 12 nt, Human
ucaggaagcuca

SEQ ID NO: 1518578 - RNA, 17 nt, Human
ucaggaagcucagggcc

SEQ ID NO: 1518579 - RNA, 19 nt, Human
ucaggaagcucagggccug

SEQ ID NO: 1518580 - RNA, 20 nt, Human
ucaggaagcucagggccugg

SEQ ID NO: 1518581 - RNA, 15 nt, Human
ucaggccagcugcuu

SEQ ID NO: 1518582 - RNA, 20 nt, Human
ucaggccagcugcuugggcu

SEQ ID NO: 1518583 - RNA, 11 nt, Human
ucaggccaggc

SEQ ID NO: 1518584 - RNA, 12 nt, Human
ucaggccaggcc

SEQ ID NO: 1518585 - RNA, 13 nt, Human
ucagggucccugg

SEQ ID NO: 1518586 - RNA, 14 nt, Human
ucagggucccuggu

SEQ ID NO: 1518587 - RNA, 18 nt, Human
ucagggucccugguggca

SEQ ID NO: 1518588 - RNA, 13 nt, Human
ucagguaacaggc

SEQ ID NO: 1518589 - RNA, 15 nt, Human
ucagguaacaggcag

SEQ ID NO: 1518590 - RNA, 16 nt, Human
ucagguaacaggcaga

SEQ ID NO: 1518591 - RNA, 19 nt, Human
accccuucgcuccuguguc

SEQ ID NO: 1518592 - RNA, 20 nt, Human
accccuucgcuccugugucu

SEQ ID NO: 1518593 - RNA, 16 nt, Human
acccuuguggucccac

SEQ ID NO: 1518594 - RNA, 17 nt, Human
acccuuguggucccacc

SEQ ID NO: 1518595 - RNA, 19 nt, Human
acccuuguggucccacccc

SEQ ID NO: 1518596 - RNA, 20 nt, Human
acccuuguggucccacccca

SEQ ID NO: 1518597 - RNA, 14 nt, Human
acccugcccugugg

SEQ ID NO: 1518598 - RNA, 13 nt, Human
acccugcccugug

SEQ ID NO: 1518599 - RNA, 11 nt, Human
acccugcccug

SEQ ID NO: 1518600 - RNA, 12 nt, Human
acccugcccugu

SEQ ID NO: 1518601 - RNA, 14 nt, Human
acccucuuagaaaa

SEQ ID NO: 1518602 - RNA, 13 nt, Human
acccagcucuggu

SEQ ID NO: 1518603 - RNA, 15 nt, Human
acccagcucuggucc

SEQ ID NO: 1518604 - RNA, 13 nt, Human
ucagaucuucugu

SEQ ID NO: 1518605 - RNA, 14 nt, Human
ucagaagacacuga

SEQ ID NO: 1518606 - RNA, 13 nt, Human
ucagaagacacug

SEQ ID NO: 1518607 - RNA, 10 nt, Human
ucagccuggg

SEQ ID NO: 1518608 - RNA, 12 nt, Human
ucagccugggca

SEQ ID NO: 1518609 - RNA, 15 nt, Human
acccccuccccgccc

SEQ ID NO: 1518610 - RNA, 13 nt, Human
accccucccuuuc

SEQ ID NO: 1518611 - RNA, 14 nt, Human
accccucccuuucu

SEQ ID NO: 1518612 - RNA, 16 nt, Human
accccucccuuucucc

SEQ ID NO: 1518613 - RNA, 18 nt, Human
accccucccuuucucccc

SEQ ID NO: 1518614 - RNA, 19 nt, Human
accccucccuuucuccccu

SEQ ID NO: 1518615 - RNA, 23 nt, Human
accccucccuuucuccccugccc

SEQ ID NO: 1518616 - RNA, 15 nt, Human
acccccagccugcua

SEQ ID NO: 1518617 - RNA, 19 nt, Human
accacuuguguuuugcaag

SEQ ID NO: 1518618 - RNA, 23 nt, Human
accacuuguguuuugcaagccag

SEQ ID NO: 1518619 - RNA, 12 nt, Human
accacuuuuguu

SEQ ID NO: 1518620 - RNA, 11 nt, Human
accagacaggu

SEQ ID NO: 1518621 - RNA, 22 nt, Human
accagacaccuugacagggcac

SEQ ID NO: 1518622 - RNA, 23 nt, Human
accagacaccuugacagggcaca

SEQ ID NO: 1518623 - RNA, 12 nt, Human
accagagcugcc

SEQ ID NO: 1518624 - RNA, 19 nt, Human
accagagcccaccuuggcu

SEQ ID NO: 1518625 - RNA, 22 nt, Human
accagagcccaccuuggcucaa

SEQ ID NO: 1518626 - RNA, 19 nt, Human
ucaccugaagacucauucu

SEQ ID NO: 1518627 - RNA, 23 nt, Human
ucaccugaagacucauucuucug

SEQ ID NO: 1518628 - RNA, 13 nt, Human
uauuucauuuauu

SEQ ID NO: 1518629 - RNA, 12 nt, Human
uauuucauuucu

SEQ ID NO: 1518630 - RNA, 13 nt, Human
uauuucauuucuu

SEQ ID NO: 1518631 - RNA, 22 nt, Human
accacagacauacuaaccagca

SEQ ID NO: 1518632 - RNA, 21 nt, Human
accacagacauacuaaccagc

SEQ ID NO: 1518633 - RNA, 11 nt, Human
accacagcagu

SEQ ID NO: 1518634 - RNA, 14 nt, Human
accacaucuugcuc

SEQ ID NO: 1518635 - RNA, 15 nt, Human
accacuucagcugac

SEQ ID NO: 1518636 - RNA, 13 nt, Human
accacuucagcug

SEQ ID NO: 1518637 - RNA, 14 nt, Human
accacuucagcuga

SEQ ID NO: 1518638 - RNA, 17 nt, Human
accacugcacuccagcc

SEQ ID NO: 1518639 - RNA, 14 nt, Human
accacugcagaaga

SEQ ID NO: 1518640 - RNA, 19 nt, Human
accacugcagaagacagua

SEQ ID NO: 1518641 - RNA, 20 nt, Human
accacucuaucaaguauuau

SEQ ID NO: 1518642 - RNA, 16 nt, Human
accacaucuugcucug

SEQ ID NO: 1518643 - RNA, 20 nt, Human
accacaucuugcucugcuga

SEQ ID NO: 1518644 - RNA, 21 nt, Human
accacaucuugcucugcugac

SEQ ID NO: 1518645 - RNA, 24 nt, Human
accacaucuugcucugcugacaga

SEQ ID NO: 1518646 - RNA, 16 nt, Human
acccagcccacuucug

SEQ ID NO: 1518647 - RNA, 17 nt, Human
acccagcccacuucugc

SEQ ID NO: 1518648 - RNA, 18 nt, Human
acccagcccacuucugcc

SEQ ID NO: 1518649 - RNA, 16 nt, Human
acccagaagaaaauag

SEQ ID NO: 1518650 - RNA, 21 nt, Human
acccaaauguucaucaaugaa

SEQ ID NO: 1518651 - RNA, 18 nt, Human
acccaaaaggcagaagca

SEQ ID NO: 1518652 - RNA, 23 nt, Human
accauuuugggguacccacugcu

SEQ ID NO: 1518653 - RNA, 13 nt, Human
acccaaaaggcag

SEQ ID NO: 1518654 - RNA, 15 nt, Human
acccaaaaggcagaa

SEQ ID NO: 1518655 - RNA, 23 nt, Human
accaugauuaaccacuucagcug

SEQ ID NO: 1518656 - RNA, 22 nt, Human
accaugauuaaccacuucagcu

SEQ ID NO: 1518657 - RNA, 18 nt, Human
accauucuccaccugcca

SEQ ID NO: 1518658 - RNA, 13 nt, Human
accauucuccacc

SEQ ID NO: 1518659 - RNA, 16 nt, Human
accauucuccaccugc

SEQ ID NO: 1518660 - RNA, 19 nt, Human
ucacuguugcccaggcugg

SEQ ID NO: 1518661 - RNA, 17 nt, Human
ucacuguugcccaggcu

SEQ ID NO: 1518662 - RNA, 18 nt, Human
ucacuguugcccaggcug

SEQ ID NO: 1518663 - RNA, 21 nt, Human
accaguguuguggauuuaaca

SEQ ID NO: 1518664 - RNA, 13 nt, Human
ucacugagacagc

SEQ ID NO: 1518665 - RNA, 14 nt, Human
ucacugagacagcc

SEQ ID NO: 1518666 - RNA, 15 nt, Human
ucacugagacagccc

SEQ ID NO: 1518667 - RNA, 16 nt, Human
ucacugagacagcccg

SEQ ID NO: 1518668 - RNA, 13 nt, Human
ucacugcagccuc

SEQ ID NO: 1518669 - RNA, 12 nt, Human
ucacugcagccu

SEQ ID NO: 1518670 - RNA, 21 nt, Human
uauguuuucaggcuagaugua

SEQ ID NO: 1518671 - RNA, 17 nt, Human
uauguuuuaagaggcag

SEQ ID NO: 1518672 - RNA, 19 nt, Human
uauguuuuaagaggcaggg

SEQ ID NO: 1518673 - RNA, 22 nt, Human
uauuaaaaaucucaaauuucua

SEQ ID NO: 1518674 - RNA, 20 nt, Human
uauuaaaaaucucaaauuuc

SEQ ID NO: 1518675 - RNA, 18 nt, Human
uauuaaaaaucucaaauu

SEQ ID NO: 1518676 - RNA, 16 nt, Human
uauuaaaaaucucaaa

SEQ ID NO: 1518677 - RNA, 23 nt, Human
uauuacaguggggaaugaagaua

SEQ ID NO: 1518678 - RNA, 23 nt, Human
uauuaaaaaucucaaauuucuaa

SEQ ID NO: 1518679 - RNA, 12 nt, Human
uauuaaaacuca

SEQ ID NO: 1518680 - RNA, 16 nt, Human
uauuaaaacucauuuu

SEQ ID NO: 1518681 - RNA, 16 nt, Human
uauuaccacagacaua

SEQ ID NO: 1518682 - RNA, 12 nt, Human
uauuagagaaga

SEQ ID NO: 1518683 - RNA, 23 nt, Human
uauucauagcagcuuauucacaa

SEQ ID NO: 1518684 - RNA, 16 nt, Human
uauucaggagaguaga

SEQ ID NO: 1518685 - RNA, 18 nt, Human
uauucaggaagcucaggg

SEQ ID NO: 1518686 - RNA, 22 nt, Human
uauucaggaagcucagggccug

SEQ ID NO: 1518687 - RNA, 21 nt, Human
acaguuaccucugccucagaa

SEQ ID NO: 1518688 - RNA, 15 nt, Human
acaguuaagagaaau

SEQ ID NO: 1518689 - RNA, 14 nt, Human
acagugagacucug

SEQ ID NO: 1518690 - RNA, 18 nt, Human
acagugagacucugucuc

SEQ ID NO: 1518691 - RNA, 20 nt, Human
acagugaaagaaaauaacaa

SEQ ID NO: 1518692 - RNA, 17 nt, Human
acagucucaggaaauca

SEQ ID NO: 1518693 - RNA, 21 nt, Human
acaguccuuaccagcagagca

SEQ ID NO: 1518694 - RNA, 22 nt, Human
acaguccuuaccagcagagcac

SEQ ID NO: 1518695 - RNA, 13 nt, Human
acagucucaggaa

SEQ ID NO: 1518696 - RNA, 14 nt, Human
acagucucaggaaa

SEQ ID NO: 1518697 - RNA, 15 nt, Human
acagucucaggaaau

SEQ ID NO: 1518698 - RNA, 16 nt, Human
acagucucaggaaauc

SEQ ID NO: 1518699 - RNA, 17 nt, Human
acaguccucccaucuca

SEQ ID NO: 1518700 - RNA, 18 nt, Human
acaguccuuaccagcaga

SEQ ID NO: 1518701 - RNA, 20 nt, Human
acaguccuuaccagcagagc

SEQ ID NO: 1518702 - RNA, 15 nt, Human
acagucccugccaau

SEQ ID NO: 1518703 - RNA, 13 nt, Human
acaguccucccau

SEQ ID NO: 1518704 - RNA, 14 nt, Human
acaguccucccauc

SEQ ID NO: 1518705 - RNA, 15 nt, Human
acaguccucccaucu

SEQ ID NO: 1518706 - RNA, 13 nt, Human
acagucccugcca

SEQ ID NO: 1518707 - RNA, 15 nt, Human
acaguauuacuucug

SEQ ID NO: 1518708 - RNA, 16 nt, Human
acaguauuacuucugc

SEQ ID NO: 1518709 - RNA, 17 nt, Human
acaguauuacuucugcu

SEQ ID NO: 1518710 - RNA, 19 nt, Human
acaguauuacuucugcuac

SEQ ID NO: 1518711 - RNA, 21 nt, Human
acaguauggcagcuuuccuca

SEQ ID NO: 1518712 - RNA, 21 nt, Human
acaggcugggcuucaguggca

SEQ ID NO: 1518713 - RNA, 14 nt, Human
acaggcugggcuuc

SEQ ID NO: 1518714 - RNA, 17 nt, Human
acaggcugggcuucagu

SEQ ID NO: 1518715 - RNA, 22 nt, Human
acagguuuuccugaagaauuga

SEQ ID NO: 1518716 - RNA, 22 nt, Human
acagggcacaccgggcacucag

SEQ ID NO: 1518717 - RNA, 17 nt, Human
uauuguagcauccugga

SEQ ID NO: 1518718 - RNA, 18 nt, Human
uauuguagcauccuggaa

SEQ ID NO: 1518719 - RNA, 20 nt, Human
uauuguagcauccuggaaua

SEQ ID NO: 1518720 - RNA, 21 nt, Human
uauuguagcauccuggaauau

SEQ ID NO: 1518721 - RNA, 13 nt, Human
uauugucaaagug

SEQ ID NO: 1518722 - RNA, 17 nt, Human
uauugucaaagugguga

SEQ ID NO: 1518723 - RNA, 17 nt, Human
uauugucuagugaaacu

SEQ ID NO: 1518724 - RNA, 17 nt, Human
uauuuaaccucuaaauu

SEQ ID NO: 1518725 - RNA, 18 nt, Human
uauuuaaccucuaaauuc

SEQ ID NO: 1518726 - RNA, 14 nt, Human
uauuuaauagguuu

SEQ ID NO: 1518727 - RNA, 15 nt, Human
uauuuaaugaaagac

SEQ ID NO: 1518728 - RNA, 21 nt, Human
uauuuaaugaaagacuguaca

SEQ ID NO: 1518729 - RNA, 14 nt, Human
uauuuauuuuaaua

SEQ ID NO: 1518730 - RNA, 16 nt, Human
uauuuauuuuaauaau

SEQ ID NO: 1518731 - RNA, 18 nt, Human
uauuuauuuuaauaaugu

SEQ ID NO: 1518732 - RNA, 22 nt, Human
uauuucaauuuccaagagcuga

SEQ ID NO: 1518733 - RNA, 13 nt, Human
uauuuauuuaaau

SEQ ID NO: 1518734 - RNA, 14 nt, Human
uauuuauuuaaauu

SEQ ID NO: 1518735 - RNA, 23 nt, Human
uauuuaauuuuuuugagacagag

SEQ ID NO: 1518736 - RNA, 19 nt, Human
uauuuaaugauaaguaaau

SEQ ID NO: 1518737 - RNA, 18 nt, Human
uauuuacuucuuauacau

SEQ ID NO: 1518738 - RNA, 22 nt, Human
acaguucggugagcuacaaaug

SEQ ID NO: 1518739 - RNA, 19 nt, Human
acaguucggugagcuacaa

SEQ ID NO: 1518740 - RNA, 23 nt, Human
acaguucggugagcuacaaaugc

SEQ ID NO: 1518741 - RNA, 16 nt, Human
acaguucucuccuucu

SEQ ID NO: 1518742 - RNA, 20 nt, Human
acaguucaauucucauuugu

SEQ ID NO: 1518743 - RNA, 20 nt, Human
acaguuacucagaauucucu

SEQ ID NO: 1518744 - RNA, 13 nt, Human
acaguuacucaga

SEQ ID NO: 1518745 - RNA, 17 nt, Human
acaguucucuccuucuu

SEQ ID NO: 1518746 - RNA, 24 nt, Human
uauucucuccuguaccucuugagc

SEQ ID NO: 1518747 - RNA, 20 nt, Human
uauucucuccuguaccucuu

SEQ ID NO: 1518748 - RNA, 15 nt, Human
uauucuuauuuaaug

SEQ ID NO: 1518749 - RNA, 16 nt, Human
uauucuguuggccagu

SEQ ID NO: 1518750 - RNA, 17 nt, Human
acagacuggaagcacag

SEQ ID NO: 1518751 - RNA, 14 nt, Human
acagacuggaagca

SEQ ID NO: 1518752 - RNA, 18 nt, Human
acagacccugcccugugg

SEQ ID NO: 1518753 - RNA, 20 nt, Human
acagacccugcccugugggc

SEQ ID NO: 1518754 - RNA, 17 nt, Human
acagacccugcccugug

SEQ ID NO: 1518755 - RNA, 16 nt, Human
acagacccugcccugu

SEQ ID NO: 1518756 - RNA, 11 nt, Human
acacuccuuca

SEQ ID NO: 1518757 - RNA, 13 nt, Human
acacuccuucaca

SEQ ID NO: 1518758 - RNA, 23 nt, Human
acagacacaggcccggcuccagg

SEQ ID NO: 1518759 - RNA, 14 nt, Human
uauauuuacaaaug

SEQ ID NO: 1518760 - RNA, 15 nt, Human
uauauuuacaaaugg

SEQ ID NO: 1518761 - RNA, 21 nt, Human
uaucaaguauuauaccuuuuu

SEQ ID NO: 1518762 - RNA, 18 nt, Human
uaucacccagaagaaaau

SEQ ID NO: 1518763 - RNA, 16 nt, Human
uaucuagauacuguau

SEQ ID NO: 1518764 - RNA, 15 nt, Human
uaucuagauacugua

SEQ ID NO: 1518765 - RNA, 10 nt, Human
uaucagaauu

SEQ ID NO: 1518766 - RNA, 14 nt, Human
uaucuaguaugaaa

SEQ ID NO: 1518767 - RNA, 16 nt, Human
uaucuaguaugaaauu

SEQ ID NO: 1518768 - RNA, 17 nt, Human
uaucuaguaugaaauua

SEQ ID NO: 1518769 - RNA, 19 nt, Human
uaucuagauacuguaucau

SEQ ID NO: 1518770 - RNA, 18 nt, Human
uaucucccccagccccau

SEQ ID NO: 1518771 - RNA, 17 nt, Human
uaucucccccagcccca

SEQ ID NO: 1518772 - RNA, 18 nt, Human
acagagcuacacagggga

SEQ ID NO: 1518773 - RNA, 16 nt, Human
acagagcuacacaggg

SEQ ID NO: 1518774 - RNA, 15 nt, Human
acagcuccaagaauu

SEQ ID NO: 1518775 - RNA, 17 nt, Human
acagcuaacauggaagu

SEQ ID NO: 1518776 - RNA, 14 nt, Human
acagcuaacaugga

SEQ ID NO: 1518777 - RNA, 15 nt, Human
acagcuaacauggaa

SEQ ID NO: 1518778 - RNA, 16 nt, Human
uauggcuuuugugcau

SEQ ID NO: 1518779 - RNA, 17 nt, Human
uauggcuauaggugcua

SEQ ID NO: 1518780 - RNA, 16 nt, Human
uauggcuauaggugcu

SEQ ID NO: 1518781 - RNA, 19 nt, Human
uaugcucugcauguuacau

SEQ ID NO: 1518782 - RNA, 16 nt, Human
uauggccgggcagggu

SEQ ID NO: 1518783 - RNA, 18 nt, Human
uaugaugugggucaagga

SEQ ID NO: 1518784 - RNA, 18 nt, Human
uaugcucugcauguuaca

SEQ ID NO: 1518785 - RNA, 15 nt, Human
uaucuugaagacuuu

SEQ ID NO: 1518786 - RNA, 18 nt, Human
uaugagcuuccuucugug

SEQ ID NO: 1518787 - RNA, 21 nt, Human
uaugagcuuccuucugugaaa

SEQ ID NO: 1518788 - RNA, 13 nt, Human
uaugaggcauuug

SEQ ID NO: 1518789 - RNA, 21 nt, Human
uaugaucacggcucacugcag

SEQ ID NO: 1518790 - RNA, 23 nt, Human
uaugaucacggcucacugcagcc

SEQ ID NO: 1518791 - RNA, 19 nt, Human
acagcccaaagaaggaaaa

SEQ ID NO: 1518792 - RNA, 20 nt, Human
acagaguuuucacucuuauu

SEQ ID NO: 1518793 - RNA, 15 nt, Human
acagaguuguuacau

SEQ ID NO: 1518794 - RNA, 18 nt, Human
acagaguuuucacucuua

SEQ ID NO: 1518795 - RNA, 14 nt, Human
uauaauuuugugaa

SEQ ID NO: 1518796 - RNA, 20 nt, Human
uauaaccaguguuguggauu

SEQ ID NO: 1518797 - RNA, 14 nt, Human
uauacauuugauaa

SEQ ID NO: 1518798 - RNA, 19 nt, Human
uauaauuuugugaagcaaa

SEQ ID NO: 1518799 - RNA, 14 nt, Human
uauacauaaacaag

SEQ ID NO: 1518800 - RNA, 13 nt, Human
uauacauaaacaa

SEQ ID NO: 1518801 - RNA, 21 nt, Human
uauacacuuacacuuuaugca

SEQ ID NO: 1518802 - RNA, 21 nt, Human
uauauauuuuuuucugaaauu

SEQ ID NO: 1518803 - RNA, 22 nt, Human
uauauauuuuuuucugaaauuu

SEQ ID NO: 1518804 - RNA, 20 nt, Human
uauauauuuuuuucugaaau

SEQ ID NO: 1518805 - RNA, 23 nt, Human
uauauauuuuuuucugaaauuuc

SEQ ID NO: 1518806 - RNA, 16 nt, Human
uauauccuuucuaaca

SEQ ID NO: 1518807 - RNA, 21 nt, Human
acacucauugaccugaggccc

SEQ ID NO: 1518808 - RNA, 23 nt, Human
acacucauugaccugaggcccuu

SEQ ID NO: 1518809 - RNA, 17 nt, Human
uauauccuuucuaacaa

SEQ ID NO: 1518810 - RNA, 19 nt, Human
uauagauugaaauuuccua

SEQ ID NO: 1518811 - RNA, 20 nt, Human
uauagccuaggugacagagu

SEQ ID NO: 1518812 - RNA, 13 nt, Human
uauaggaauugac

SEQ ID NO: 1518813 - RNA, 14 nt, Human
uauaggaauugacc

SEQ ID NO: 1518814 - RNA, 19 nt, Human
uauaggaauugacccacaa

SEQ ID NO: 1518815 - RNA, 23 nt, Human
uauaggugcuacaaaaacacagc

SEQ ID NO: 1518816 - RNA, 21 nt, Human
uauaggugcuacaaaaacaca

SEQ ID NO: 1518817 - RNA, 16 nt, Human
uaguuuuauaugcuuc

SEQ ID NO: 1518818 - RNA, 20 nt, Human
uaguuccucauuagcauuuu

SEQ ID NO: 1518819 - RNA, 22 nt, Human
uagugagcagucaggaaagaga

SEQ ID NO: 1518820 - RNA, 22 nt, Human
acaagcucacagaccuuugaac

SEQ ID NO: 1518821 - RNA, 21 nt, Human
uagucaggugccucaagagaa

SEQ ID NO: 1518822 - RNA, 19 nt, Human
acaagcugcacccucaggc

SEQ ID NO: 1518823 - RNA, 21 nt, Human
acaagcugcacccucaggcag

SEQ ID NO: 1518824 - RNA, 22 nt, Human
acaagcugcacccucaggcagg

SEQ ID NO: 1518825 - RNA, 23 nt, Human
acaagcugcacccucaggcaggu

SEQ ID NO: 1518826 - RNA, 19 nt, Human
acacccugugauggggccc

SEQ ID NO: 1518827 - RNA, 11 nt, Human
acacccuguga

SEQ ID NO: 1518828 - RNA, 12 nt, Human
acacccugugau

SEQ ID NO: 1518829 - RNA, 18 nt, Human
acacccugugauggggcc

SEQ ID NO: 1518830 - RNA, 20 nt, Human
acacccagcccacuucugcc

SEQ ID NO: 1518831 - RNA, 21 nt, Human
acacccagcccacuucugcca

SEQ ID NO: 1518832 - RNA, 21 nt, Human
acacaugcaaggucauuuuuu

SEQ ID NO: 1518833 - RNA, 21 nt, Human
uauaaaauaauuuuuauauuu

SEQ ID NO: 1518834 - RNA, 22 nt, Human
uauaaaauaauuuuuauauuug

SEQ ID NO: 1518835 - RNA, 23 nt, Human
uauaaaauaauuuuuauauuuga

SEQ ID NO: 1518836 - RNA, 20 nt, Human
acacaugcaaggucauuuuu

SEQ ID NO: 1518837 - RNA, 19 nt, Human
acacaugcaaggucauuuu

SEQ ID NO: 1518838 - RNA, 14 nt, Human
aauucuuucauuuu

SEQ ID NO: 1518839 - RNA, 15 nt, Human
uacguacacauuuua

SEQ ID NO: 1518840 - RNA, 21 nt, Human
aauugacccacaagaaaugaa

SEQ ID NO: 1518841 - RNA, 16 nt, Human
aauugacccacaagaa

SEQ ID NO: 1518842 - RNA, 19 nt, Human
aauugacccacaagaaaug

SEQ ID NO: 1518843 - RNA, 17 nt, Human
aauucuuacaaacaugu

SEQ ID NO: 1518844 - RNA, 22 nt, Human
aauucuucuccacuuucuagcc

SEQ ID NO: 1518845 - RNA, 15 nt, Human
aauucuugaaggaaa

SEQ ID NO: 1518846 - RNA, 16 nt, Human
aauucuugaaggaaaa

SEQ ID NO: 1518847 - RNA, 21 nt, Human
aauucuugaaggaaaaugaua

SEQ ID NO: 1518848 - RNA, 21 nt, Human
aauucuugccaaauauaaaua

SEQ ID NO: 1518849 - RNA, 20 nt, Human
aauucuugcaaaguaucccu

SEQ ID NO: 1518850 - RNA, 14 nt, Human
aauucuugcaaagu

SEQ ID NO: 1518851 - RNA, 20 nt, Human
uacucuuauaucuauauuuu

SEQ ID NO: 1518852 - RNA, 22 nt, Human
uacucuuauaucuauauuuuac

SEQ ID NO: 1518853 - RNA, 16 nt, Human
uacuauaauuuaccug

SEQ ID NO: 1518854 - RNA, 16 nt, Human
uacuauguaucaauga

SEQ ID NO: 1518855 - RNA, 14 nt, Human
uacguugugcauuu

SEQ ID NO: 1518856 - RNA, 13 nt, Human
uacguugugcauu

SEQ ID NO: 1518857 - RNA, 13 nt, Human
uacguaugagacg

SEQ ID NO: 1518858 - RNA, 14 nt, Human
uacgucugacaggc

SEQ ID NO: 1518859 - RNA, 17 nt, Human
aauuugagauacaaaca

SEQ ID NO: 1518860 - RNA, 14 nt, Human
uacuucaaauccuu

SEQ ID NO: 1518861 - RNA, 19 nt, Human
uacuucaaauccuugaaga

SEQ ID NO: 1518862 - RNA, 19 nt, Human
aauuugauaugugaacagu

SEQ ID NO: 1518863 - RNA, 15 nt, Human
aauuugauaugugaa

SEQ ID NO: 1518864 - RNA, 21 nt, Human
aauuugauaguauugugcaua

SEQ ID NO: 1518865 - RNA, 16 nt, Human
aauuugauaugugaac

SEQ ID NO: 1518866 - RNA, 18 nt, Human
aauuugauaugugaacag

SEQ ID NO: 1518867 - RNA, 20 nt, Human
aauuucucccagucauuuaa

SEQ ID NO: 1518868 - RNA, 21 nt, Human
aauuucuaaaucuccaaaaua

SEQ ID NO: 1518869 - RNA, 13 nt, Human
aauuucuaaaucu

SEQ ID NO: 1518870 - RNA, 17 nt, Human
aauuuaucaguaccuaa

SEQ ID NO: 1518871 - RNA, 17 nt, Human
aauuuagaaauauaauu

SEQ ID NO: 1518872 - RNA, 15 nt, Human
aauuuaccugaaguc

SEQ ID NO: 1518873 - RNA, 15 nt, Human
aauuuaaauagcuuu

SEQ ID NO: 1518874 - RNA, 16 nt, Human
aauuuaaauagcuuuu

SEQ ID NO: 1518875 - RNA, 19 nt, Human
aauuuacccucuugaauau

SEQ ID NO: 1518876 - RNA, 22 nt, Human
aauuuacccucuugaauauaau

SEQ ID NO: 1518877 - RNA, 19 nt, Human
aauuuacauacucugcuua

SEQ ID NO: 1518878 - RNA, 12 nt, Human
aauuuaaagcaa

SEQ ID NO: 1518879 - RNA, 13 nt, Human
aauuuaaaagucu

SEQ ID NO: 1518880 - RNA, 23 nt, Human
aauugugugaaagguacuucaaa

SEQ ID NO: 1518881 - RNA, 13 nt, Human
uacuguaagaaaa

SEQ ID NO: 1518882 - RNA, 22 nt, Human
aauuguuuggggaugagaaagg

SEQ ID NO: 1518883 - RNA, 21 nt, Human
uacuucaaauccuugaagauu

SEQ ID NO: 1518884 - RNA, 16 nt, Human
uacuucaugcugucua

SEQ ID NO: 1518885 - RNA, 15 nt, Human
uagaacucccuuuca

SEQ ID NO: 1518886 - RNA, 23 nt, Human
uagaagucacauuccugaacagg

SEQ ID NO: 1518887 - RNA, 16 nt, Human
uagaagucacacagua

SEQ ID NO: 1518888 - RNA, 16 nt, Human
uagaagucuuagaugu

SEQ ID NO: 1518889 - RNA, 17 nt, Human
uagaagucuuagaugua

SEQ ID NO: 1518890 - RNA, 20 nt, Human
uagaagucuuagauguauau

SEQ ID NO: 1518891 - RNA, 18 nt, Human
uagaagucuuagauguau

SEQ ID NO: 1518892 - RNA, 19 nt, Human
uagaagucuuagauguaua

SEQ ID NO: 1518893 - RNA, 19 nt, Human
uagaauuugauaugugaac

SEQ ID NO: 1518894 - RNA, 16 nt, Human
uagacaauuuauuaug

SEQ ID NO: 1518895 - RNA, 19 nt, Human
aauuuuuauauuugaaaua

SEQ ID NO: 1518896 - RNA, 17 nt, Human
aauuuuuauuaaauuau

SEQ ID NO: 1518897 - RNA, 18 nt, Human
aauuuuuauuaaauuaug

SEQ ID NO: 1518898 - RNA, 12 nt, Human
uagacagucccu

SEQ ID NO: 1518899 - RNA, 14 nt, Human
uagacagucccugc

SEQ ID NO: 1518900 - RNA, 16 nt, Human
uagacagucccugcca

SEQ ID NO: 1518901 - RNA, 19 nt, Human
aauuuuuucucuaggaaau

SEQ ID NO: 1518902 - RNA, 13 nt, Human
acaaaaaaauaua

SEQ ID NO: 1518903 - RNA, 17 nt, Human
acaaaaaaauauauuua

SEQ ID NO: 1518904 - RNA, 17 nt, Human
aauuuuuuugagacaga

SEQ ID NO: 1518905 - RNA, 13 nt, Human
acaaaaacauggc

SEQ ID NO: 1518906 - RNA, 20 nt, Human
acaaaaaaauauauuuaaug

SEQ ID NO: 1518907 - RNA, 19 nt, Human
uagcauuuguguugaagag

SEQ ID NO: 1518908 - RNA, 15 nt, Human
acaacaacaaaauga

SEQ ID NO: 1518909 - RNA, 12 nt, Human
acaacacucaca

SEQ ID NO: 1518910 - RNA, 18 nt, Human
acaagcacuaaacaaaga

SEQ ID NO: 1518911 - RNA, 17 nt, Human
acaagagcccaggccuc

SEQ ID NO: 1518912 - RNA, 18 nt, Human
acaagagcccaggccucc

SEQ ID NO: 1518913 - RNA, 12 nt, Human
acaagccacccc

SEQ ID NO: 1518914 - RNA, 13 nt, Human
acaagcugcaccc

SEQ ID NO: 1518915 - RNA, 20 nt, Human
acaagcgugagccacugcac

SEQ ID NO: 1518916 - RNA, 21 nt, Human
acaagcgugagccacugcacc

SEQ ID NO: 1518917 - RNA, 21 nt, Human
uagcaugucgucaaagcugaa

SEQ ID NO: 1518918 - RNA, 22 nt, Human
uagauuuuagacccuauugcug

SEQ ID NO: 1518919 - RNA, 17 nt, Human
uagcacagacccugccc

SEQ ID NO: 1518920 - RNA, 18 nt, Human
uagcacagacccugcccu

SEQ ID NO: 1518921 - RNA, 19 nt, Human
uagcacagacccugcccug

SEQ ID NO: 1518922 - RNA, 17 nt, Human
uagaugcaguucugaag

SEQ ID NO: 1518923 - RNA, 19 nt, Human
uagaugcaguucugaagaa

SEQ ID NO: 1518924 - RNA, 16 nt, Human
uagaugcaguucugaa

SEQ ID NO: 1518925 - RNA, 19 nt, Human
uagaggagaaacuggaacu

SEQ ID NO: 1518926 - RNA, 16 nt, Human
acaaaaagcauaaaaa

SEQ ID NO: 1518927 - RNA, 16 nt, Human
uaccaugccauuuaaa

SEQ ID NO: 1518928 - RNA, 17 nt, Human
uaccauccccuguagag

SEQ ID NO: 1518929 - RNA, 17 nt, Human
uaccacuuuuguucuug

SEQ ID NO: 1518930 - RNA, 14 nt, Human
uacccgcagaguuc

SEQ ID NO: 1518931 - RNA, 20 nt, Human
uacccgggaagggggcuggg

SEQ ID NO: 1518932 - RNA, 16 nt, Human
uacccucauguucuua

SEQ ID NO: 1518933 - RNA, 20 nt, Human
uacccuggcacuauaaugua

SEQ ID NO: 1518934 - RNA, 22 nt, Human
uacccuggcacuauaauguaag

SEQ ID NO: 1518935 - RNA, 18 nt, Human
aauguugacaugggacau

SEQ ID NO: 1518936 - RNA, 15 nt, Human
aaugucacaggcagg

SEQ ID NO: 1518937 - RNA, 17 nt, Human
aauuaaauuuugugucu

SEQ ID NO: 1518938 - RNA, 18 nt, Human
aauuaaauuuugugucuc

SEQ ID NO: 1518939 - RNA, 12 nt, Human
aauuaacacugc

SEQ ID NO: 1518940 - RNA, 22 nt, Human
aauuaacuuuuauaaacuuuac

SEQ ID NO: 1518941 - RNA, 20 nt, Human
aauuaacuuuuauaaacuuu

SEQ ID NO: 1518942 - RNA, 18 nt, Human
aauuaacuuuuauaaacu

SEQ ID NO: 1518943 - RNA, 23 nt, Human
uacauuguacgaagaguauuuuu

SEQ ID NO: 1518944 - RNA, 20 nt, Human
uacauuguacgaagaguauu

SEQ ID NO: 1518945 - RNA, 22 nt, Human
uacauuguacgaagaguauuuu

SEQ ID NO: 1518946 - RNA, 23 nt, Human
uacauggcuggagcuagaauuug

SEQ ID NO: 1518947 - RNA, 13 nt, Human
aauuaaguacuau

SEQ ID NO: 1518948 - RNA, 20 nt, Human
uacaguggggaaugaagaua

SEQ ID NO: 1518949 - RNA, 16 nt, Human
uacauaaguaauucaa

SEQ ID NO: 1518950 - RNA, 17 nt, Human
uacauaaguaauucaag

SEQ ID NO: 1518951 - RNA, 15 nt, Human
uacauaaugcgugca

SEQ ID NO: 1518952 - RNA, 19 nt, Human
uacauaaguaauucaagaa

SEQ ID NO: 1518953 - RNA, 18 nt, Human
uacaguaucucagggccu

SEQ ID NO: 1518954 - RNA, 12 nt, Human
uacaguccuccc

SEQ ID NO: 1518955 - RNA, 15 nt, Human
uacaguccucccauc

SEQ ID NO: 1518956 - RNA, 17 nt, Human
uacaguccucccaucuc

SEQ ID NO: 1518957 - RNA, 18 nt, Human
uacaguccucccaucuca

SEQ ID NO: 1518958 - RNA, 22 nt, Human
aaugugaaacuggauuaaacuu

SEQ ID NO: 1518959 - RNA, 14 nt, Human
aaugucacaggcag

SEQ ID NO: 1518960 - RNA, 13 nt, Human
aaugucacaggca

SEQ ID NO: 1518961 - RNA, 13 nt, Human
aauguaagcucua

SEQ ID NO: 1518962 - RNA, 15 nt, Human
aauguaagcucuacu

SEQ ID NO: 1518963 - RNA, 17 nt, Human
aaugguuuucuugugug

SEQ ID NO: 1518964 - RNA, 18 nt, Human
aaugguuuucuugugugu

SEQ ID NO: 1518965 - RNA, 22 nt, Human
aaugguuuucuuguguguuuau

SEQ ID NO: 1518966 - RNA, 17 nt, Human
aaugguuugaauauaaa

SEQ ID NO: 1518967 - RNA, 23 nt, Human
aaugguuugaauauaaacacuau

SEQ ID NO: 1518968 - RNA, 17 nt, Human
aaugguuugcaaggaag

SEQ ID NO: 1518969 - RNA, 14 nt, Human
aaugguuugaauau

SEQ ID NO: 1518970 - RNA, 16 nt, Human
aaugguuuaaaugguc

SEQ ID NO: 1518971 - RNA, 23 nt, Human
aauguacagcaaggagauuuaca

SEQ ID NO: 1518972 - RNA, 21 nt, Human
aauguacagcaaggagauuua

SEQ ID NO: 1518973 - RNA, 22 nt, Human
uacagcaaggagauuuacaacu

SEQ ID NO: 1518974 - RNA, 17 nt, Human
uaauuuaccugaagucu

SEQ ID NO: 1518975 - RNA, 18 nt, Human
uaauuuaccugaagucuu

SEQ ID NO: 1518976 - RNA, 22 nt, Human
uaauuugauaguauugugcaua

SEQ ID NO: 1518977 - RNA, 15 nt, Human
uacaaaaagcauaaa

SEQ ID NO: 1518978 - RNA, 16 nt, Human
uacaaaaacauggccu

SEQ ID NO: 1518979 - RNA, 17 nt, Human
uacaaaaacacagcaag

SEQ ID NO: 1518980 - RNA, 18 nt, Human
uacaaaaacacagcaagg

SEQ ID NO: 1518981 - RNA, 21 nt, Human
uacaagcgugagccacugcac

SEQ ID NO: 1518982 - RNA, 16 nt, Human
uacaagcgugagccac

SEQ ID NO: 1518983 - RNA, 18 nt, Human
uacaagcgugagccacug

SEQ ID NO: 1518984 - RNA, 19 nt, Human
uacaagcgugagccacugc

SEQ ID NO: 1518985 - RNA, 20 nt, Human
uacaagcgugagccacugca

SEQ ID NO: 1518986 - RNA, 23 nt, Human
uaauuaguuccucauuagcauuu

SEQ ID NO: 1518987 - RNA, 19 nt, Human
aaugcacuuuguucuggcu

SEQ ID NO: 1518988 - RNA, 20 nt, Human
aaugcacuuuguucuggcuc

SEQ ID NO: 1518989 - RNA, 19 nt, Human
aaugcacaaacagaggccg

SEQ ID NO: 1518990 - RNA, 20 nt, Human
aaugcacaaacagaggccgc

SEQ ID NO: 1518991 - RNA, 13 nt, Human
aaugcacuuuguu

SEQ ID NO: 1518992 - RNA, 16 nt, Human
aaugcacuuuguucug

SEQ ID NO: 1518993 - RNA, 22 nt, Human
aaugcaaaccaucauugaaauc

SEQ ID NO: 1518994 - RNA, 23 nt, Human
aaugcaaaccaucauugaaaucu

SEQ ID NO: 1518995 - RNA, 15 nt, Human
aaugcaacaacaugu

SEQ ID NO: 1518996 - RNA, 18 nt, Human
aaugcaacaacauguaua

SEQ ID NO: 1518997 - RNA, 18 nt, Human
aaugcacaaacagaggcc

SEQ ID NO: 1518998 - RNA, 20 nt, Human
aaugaaugucagugugacug

SEQ ID NO: 1518999 - RNA, 21 nt, Human
aaugaaugucagugugacuga

SEQ ID NO: 1519000 - RNA, 13 nt, Human
aaugaccuuucaa

SEQ ID NO: 1519001 - RNA, 14 nt, Human
aaugaccuuucaau

SEQ ID NO: 1519002 - RNA, 15 nt, Human
aaugaccuuucaaua

SEQ ID NO: 1519003 - RNA, 16 nt, Human
aaugcaaaccaucauu

SEQ ID NO: 1519004 - RNA, 16 nt, Human
uaauguaagcucuacu

SEQ ID NO: 1519005 - RNA, 17 nt, Human
uaauguaagcucuacug

SEQ ID NO: 1519006 - RNA, 23 nt, Human
uaaugugaaacuggauuaaacuu

SEQ ID NO: 1519007 - RNA, 22 nt, Human
uaaugugaaacuggauuaaacu

SEQ ID NO: 1519008 - RNA, 20 nt, Human
uaaugugaaacuggauuaaa

SEQ ID NO: 1519009 - RNA, 12 nt, Human
uaaugugaaacu

SEQ ID NO: 1519010 - RNA, 18 nt, Human
uaauguaauaacugugaa

SEQ ID NO: 1519011 - RNA, 17 nt, Human
uaauguaauaacuguga

SEQ ID NO: 1519012 - RNA, 15 nt, Human
uaaugucacaggcag

SEQ ID NO: 1519013 - RNA, 16 nt, Human
uaaugucacaggcagg

SEQ ID NO: 1519014 - RNA, 17 nt, Human
uaaugucacaggcaggu

SEQ ID NO: 1519015 - RNA, 23 nt, Human
aaucuucugaacuuggcgcugcc

SEQ ID NO: 1519016 - RNA, 15 nt, Human
aaugaaugaaugaau

SEQ ID NO: 1519017 - RNA, 14 nt, Human
aaugaaugaaacau

SEQ ID NO: 1519018 - RNA, 15 nt, Human
aaugaaugucagugu

SEQ ID NO: 1519019 - RNA, 23 nt, Human
uaaucagugugucuaaauuugaa

SEQ ID NO: 1519020 - RNA, 13 nt, Human
uaaucuuucacag

SEQ ID NO: 1519021 - RNA, 17 nt, Human
uaaucagugugucuaaa

SEQ ID NO: 1519022 - RNA, 18 nt, Human
uaaucagugugucuaaau

SEQ ID NO: 1519023 - RNA, 21 nt, Human
uaauauugauaugcuuauaca

SEQ ID NO: 1519024 - RNA, 14 nt, Human
uaauagacaauuua

SEQ ID NO: 1519025 - RNA, 19 nt, Human
uaacaaugcuguauuuuaa

SEQ ID NO: 1519026 - RNA, 20 nt, Human
aauacaguaucucagggccu

SEQ ID NO: 1519027 - RNA, 23 nt, Human
uaauacaccacuacauucuguua

SEQ ID NO: 1519028 - RNA, 22 nt, Human
uaauacaccacuacauucuguu

SEQ ID NO: 1519029 - RNA, 22 nt, Human
guuccccuccuccacucucccc

SEQ ID NO: 1519030 - RNA, 19 nt, Human
aaggaaaaaauaacaauga

SEQ ID NO: 1519031 - RNA, 16 nt, Human
aaggaaaaaauaacaa

SEQ ID NO: 1519032 - RNA, 17 nt, Human
aagcucugcuccucucc

SEQ ID NO: 1519033 - RNA, 13 nt, Human
aagcucugcuccu

SEQ ID NO: 1519034 - RNA, 18 nt, Human
aagcuguuacugucuuca

SEQ ID NO: 1519035 - RNA, 13 nt, Human
guguuuauuguca

SEQ ID NO: 1519036 - RNA, 13 nt, Human
guguuuauuuaua

SEQ ID NO: 1519037 - RNA, 11 nt, Human
aagcucccagg

SEQ ID NO: 1519038 - RNA, 23 nt, Human
aagcucccaggcauuccccagga

SEQ ID NO: 1519039 - RNA, 12 nt, Human
aagcucccaggc

SEQ ID NO: 1519040 - RNA, 22 nt, Human
aagcucccaggcauuccccagg

SEQ ID NO: 1519041 - RNA, 13 nt, Human
guugaauuuuaca

SEQ ID NO: 1519042 - RNA, 13 nt, Human
guugacaugggac

SEQ ID NO: 1519043 - RNA, 23 nt, Human
guugauagcacagacccugcccu

SEQ ID NO: 1519044 - RNA, 16 nt, Human
guucucugaggacacu

SEQ ID NO: 1519045 - RNA, 11 nt, Human
guucucugccc

SEQ ID NO: 1519046 - RNA, 13 nt, Human
guucucugcccuc

SEQ ID NO: 1519047 - RNA, 12 nt, Human
guucucugcccu

SEQ ID NO: 1519048 - RNA, 11 nt, Human
guucucaucuu

SEQ ID NO: 1519049 - RNA, 16 nt, Human
guucucaucuuucuug

SEQ ID NO: 1519050 - RNA, 15 nt, Human
aaggcuaccuuugua

SEQ ID NO: 1519051 - RNA, 13 nt, Human
aaggcuaccuuug

SEQ ID NO: 1519052 - RNA, 19 nt, Human
aaggccccgcccaggcuua

SEQ ID NO: 1519053 - RNA, 14 nt, Human
aaggccccgcccag

SEQ ID NO: 1519054 - RNA, 16 nt, Human
aaggccccgcccaggc

SEQ ID NO: 1519055 - RNA, 24 nt, Human
aaggaugcacagaguuguuacauu

SEQ ID NO: 1519056 - RNA, 14 nt, Human
aaggaugcccaaag

SEQ ID NO: 1519057 - RNA, 19 nt, Human
aaggaugcccaaagaugca

SEQ ID NO: 1519058 - RNA, 17 nt, Human
guugggcuggugucacc

SEQ ID NO: 1519059 - RNA, 14 nt, Human
guugggucaccaga

SEQ ID NO: 1519060 - RNA, 13 nt, Human
guuggguggaugc

SEQ ID NO: 1519061 - RNA, 21 nt, Human
guugggucaccagacggggcu

SEQ ID NO: 1519062 - RNA, 15 nt, Human
guugcccaggcuggc

SEQ ID NO: 1519063 - RNA, 16 nt, Human
guugcccaggcuggcg

SEQ ID NO: 1519064 - RNA, 17 nt, Human
guugcccaggcuggcgu

SEQ ID NO: 1519065 - RNA, 18 nt, Human
aaggagauuuacaacugg

SEQ ID NO: 1519066 - RNA, 16 nt, Human
aaggaaacccagcucu

SEQ ID NO: 1519067 - RNA, 15 nt, Human
aaggaaacccagcuc

SEQ ID NO: 1519068 - RNA, 14 nt, Human
aaggaaaaugauac

SEQ ID NO: 1519069 - RNA, 13 nt, Human
aaggauaaugaau

SEQ ID NO: 1519070 - RNA, 12 nt, Human
aaggagcaucua

SEQ ID NO: 1519071 - RNA, 20 nt, Human
aaggaggaagagaaaaaaua

SEQ ID NO: 1519072 - RNA, 11 nt, Human
aaggauccuga

SEQ ID NO: 1519073 - RNA, 12 nt, Human
aaggauccugag

SEQ ID NO: 1519074 - RNA, 14 nt, Human
aaggaucuucaucu

SEQ ID NO: 1519075 - RNA, 13 nt, Human
aaggauccugagc

SEQ ID NO: 1519076 - RNA, 22 nt, Human
aaggauccugagccagauuuca

SEQ ID NO: 1519077 - RNA, 20 nt, Human
aagucacauuccugaacagg

SEQ ID NO: 1519078 - RNA, 13 nt, Human
aagucacacagug

SEQ ID NO: 1519079 - RNA, 24 nt, Human
aagucacacaguauuacuucugcu

SEQ ID NO: 1519080 - RNA, 21 nt, Human
aagucaagugaaaaaggagga

SEQ ID NO: 1519081 - RNA, 18 nt, Human
aaguauucuuauuuaaug

SEQ ID NO: 1519082 - RNA, 19 nt, Human
aaguauucuuauuuaauga

SEQ ID NO: 1519083 - RNA, 23 nt, Human
aaguauguuagugcaaauuguca

SEQ ID NO: 1519084 - RNA, 22 nt, Human
aaguacuucuccacccugcucu

SEQ ID NO: 1519085 - RNA, 23 nt, Human
aaguacuucuccacccugcucuc

SEQ ID NO: 1519086 - RNA, 15 nt, Human
aaguauucuaaauuu

SEQ ID NO: 1519087 - RNA, 13 nt, Human
aaguauucuaaau

SEQ ID NO: 1519088 - RNA, 16 nt, Human
aaguacuauguaucaa

SEQ ID NO: 1519089 - RNA, 15 nt, Human
aaguacuggagaaaa

SEQ ID NO: 1519090 - RNA, 21 nt, Human
aaguacuucuccacccugcuc

SEQ ID NO: 1519091 - RNA, 16 nt, Human
guuuucugagaaagac

SEQ ID NO: 1519092 - RNA, 17 nt, Human
guuuucugagaaagacu

SEQ ID NO: 1519093 - RNA, 22 nt, Human
guuuucugagaaagacuauuca

SEQ ID NO: 1519094 - RNA, 23 nt, Human
guuuuuuuuuaaaaaagaaacau

SEQ ID NO: 1519095 - RNA, 16 nt, Human
guuuuugucuuaaaaa

SEQ ID NO: 1519096 - RNA, 24 nt, Human
guuuuuggaugguguuacauauua

SEQ ID NO: 1519097 - RNA, 18 nt, Human
guuuuucuaggccugggg

SEQ ID NO: 1519098 - RNA, 22 nt, Human
aagucuuauauauuguagauaa

SEQ ID NO: 1519099 - RNA, 18 nt, Human
aagucuuagauguauaua

SEQ ID NO: 1519100 - RNA, 19 nt, Human
aagucuuagauguauauau

SEQ ID NO: 1519101 - RNA, 15 nt, Human
guuuuauaauuuugu

SEQ ID NO: 1519102 - RNA, 22 nt, Human
guuuuauaauuuugugaagcaa

SEQ ID NO: 1519103 - RNA, 16 nt, Human
guuuuacugcagcuuu

SEQ ID NO: 1519104 - RNA, 18 nt, Human
guuuuacugcagcuuugu

SEQ ID NO: 1519105 - RNA, 14 nt, Human
guuuuaagaggcag

SEQ ID NO: 1519106 - RNA, 18 nt, Human
guuuuaaggaugcuugua

SEQ ID NO: 1519107 - RNA, 16 nt, Human
guuuuaagaggcaggg

SEQ ID NO: 1519108 - RNA, 17 nt, Human
guuugccucugccucug

SEQ ID NO: 1519109 - RNA, 13 nt, Human
guuugcuaaguga

SEQ ID NO: 1519110 - RNA, 22 nt, Human
guuucugccgcagcccugcaga

SEQ ID NO: 1519111 - RNA, 22 nt, Human
guuucuaugacacaugcaaggu

SEQ ID NO: 1519112 - RNA, 15 nt, Human
aagggcccagagagg

SEQ ID NO: 1519113 - RNA, 13 nt, Human
aagggcccagaga

SEQ ID NO: 1519114 - RNA, 17 nt, Human
aaggggcaguggugguu

SEQ ID NO: 1519115 - RNA, 14 nt, Human
aaggggcaguggug

SEQ ID NO: 1519116 - RNA, 19 nt, Human
aaggguaucaggugcugcc

SEQ ID NO: 1519117 - RNA, 16 nt, Human
aaggguaucuggugac

SEQ ID NO: 1519118 - RNA, 14 nt, Human
aaggcugggggaag

SEQ ID NO: 1519119 - RNA, 13 nt, Human
aagggccuggccu

SEQ ID NO: 1519120 - RNA, 14 nt, Human
aaguaaaaccacag

SEQ ID NO: 1519121 - RNA, 15 nt, Human
aaguaaaaccacagc

SEQ ID NO: 1519122 - RNA, 16 nt, Human
aaguaaaaccacagca

SEQ ID NO: 1519123 - RNA, 21 nt, Human
aagggugaugggaaagcauug

SEQ ID NO: 1519124 - RNA, 17 nt, Human
aaguaaaaccacagcag

SEQ ID NO: 1519125 - RNA, 18 nt, Human
aaguaaaaccacagcagu

SEQ ID NO: 1519126 - RNA, 12 nt, Human
aaguaaaugcua

SEQ ID NO: 1519127 - RNA, 15 nt, Human
aauaacaauaaaaga

SEQ ID NO: 1519128 - RNA, 12 nt, Human
aauaacauguaa

SEQ ID NO: 1519129 - RNA, 19 nt, Human
aauaacauguaauuaagua

SEQ ID NO: 1519130 - RNA, 22 nt, Human
aauaacauguaauuaaguacua

SEQ ID NO: 1519131 - RNA, 12 nt, Human
aauaaauuauuu

SEQ ID NO: 1519132 - RNA, 12 nt, Human
aauaaaugugcc

SEQ ID NO: 1519133 - RNA, 21 nt, Human
aauaaaugugccuucauuuuu

SEQ ID NO: 1519134 - RNA, 15 nt, Human
aauaacuaaaaggua

SEQ ID NO: 1519135 - RNA, 13 nt, Human
uaaagucaggggu

SEQ ID NO: 1519136 - RNA, 20 nt, Human
uaaaguguauuuuuuuacua

SEQ ID NO: 1519137 - RNA, 19 nt, Human
uaaaguguauuuuuuuacu

SEQ ID NO: 1519138 - RNA, 15 nt, Human
uaaaguguauuuuuu

SEQ ID NO: 1519139 - RNA, 14 nt, Human
uaaaguguauuuuu

SEQ ID NO: 1519140 - RNA, 12 nt, Human
aauaaaaauaau

SEQ ID NO: 1519141 - RNA, 22 nt, Human
aauaaaaauauuguguugugaa

SEQ ID NO: 1519142 - RNA, 22 nt, Human
aauaaaauccauacauuugugu

SEQ ID NO: 1519143 - RNA, 14 nt, Human
aauaaaguaauuau

SEQ ID NO: 1519144 - RNA, 12 nt, Human
uaaauagcuuuu

SEQ ID NO: 1519145 - RNA, 18 nt, Human
uaaauaguauuugagagu

SEQ ID NO: 1519146 - RNA, 19 nt, Human
uaaaucuccaaaauaaaac

SEQ ID NO: 1519147 - RNA, 15 nt, Human
aauacaccacuacau

SEQ ID NO: 1519148 - RNA, 14 nt, Human
aauacacacucaaa

SEQ ID NO: 1519149 - RNA, 21 nt, Human
aauacaccacuacauucuguu

SEQ ID NO: 1519150 - RNA, 20 nt, Human
aauacaccacuacauucugu

SEQ ID NO: 1519151 - RNA, 18 nt, Human
aauacaccacuacauucu

SEQ ID NO: 1519152 - RNA, 16 nt, Human
aauacaccacuacauu

SEQ ID NO: 1519153 - RNA, 21 nt, Human
uaaaucuccaaaauaaaacuu

SEQ ID NO: 1519154 - RNA, 20 nt, Human
uaaaucuccaaaauaaaacu

SEQ ID NO: 1519155 - RNA, 22 nt, Human
uaaaucuccaaaauaaaacuuu

SEQ ID NO: 1519156 - RNA, 17 nt, Human
uaaaugauuucauucaa

SEQ ID NO: 1519157 - RNA, 15 nt, Human
uaacaaugcuguauu

SEQ ID NO: 1519158 - RNA, 17 nt, Human
uaacaaugcuguauuuu

SEQ ID NO: 1519159 - RNA, 13 nt, Human
uaacaagccaccc

SEQ ID NO: 1519160 - RNA, 14 nt, Human
uaaauuuuauaucu

SEQ ID NO: 1519161 - RNA, 16 nt, Human
uaaauuuugaguucua

SEQ ID NO: 1519162 - RNA, 17 nt, Human
uaaauuuugaguucuac

SEQ ID NO: 1519163 - RNA, 20 nt, Human
uaacaaaaaaauauauuuaa

SEQ ID NO: 1519164 - RNA, 23 nt, Human
uaacaaaaaaauauauuuaauga

SEQ ID NO: 1519165 - RNA, 13 nt, Human
uaaacgucuuaaa

SEQ ID NO: 1519166 - RNA, 17 nt, Human
uaaacgucuuaaauauu

SEQ ID NO: 1519167 - RNA, 18 nt, Human
uaaaccucaaaaugucua

SEQ ID NO: 1519168 - RNA, 19 nt, Human
uaaaccucaaaaugucuaa

SEQ ID NO: 1519169 - RNA, 16 nt, Human
uaaaccgccaaggcug

SEQ ID NO: 1519170 - RNA, 18 nt, Human
uaaaccgccaaggcuggg

SEQ ID NO: 1519171 - RNA, 19 nt, Human
uaaaggcuaccuuuguauu

SEQ ID NO: 1519172 - RNA, 21 nt, Human
uaaaggcuaccuuuguauucu

SEQ ID NO: 1519173 - RNA, 19 nt, Human
aaguuauugauaaguucau

SEQ ID NO: 1519174 - RNA, 20 nt, Human
aaguuauugauaaguucaua

SEQ ID NO: 1519175 - RNA, 19 nt, Human
aaguuagaacauuugcugu

SEQ ID NO: 1519176 - RNA, 14 nt, Human
aaguuaaauuuuau

SEQ ID NO: 1519177 - RNA, 12 nt, Human
aaguuaaauaaa

SEQ ID NO: 1519178 - RNA, 14 nt, Human
aaguuaaauaaauc

SEQ ID NO: 1519179 - RNA, 14 nt, Human
aaguuuaccaucug

SEQ ID NO: 1519180 - RNA, 19 nt, Human
aaguuuacauuguaaauag

SEQ ID NO: 1519181 - RNA, 18 nt, Human
aaguuuacauuguaaaua

SEQ ID NO: 1519182 - RNA, 17 nt, Human
aaguucugcagauaaac

SEQ ID NO: 1519183 - RNA, 22 nt, Human
aaguuauugauaaguucauaca

SEQ ID NO: 1519184 - RNA, 23 nt, Human
aaguuauugauaaguucauacau

SEQ ID NO: 1519185 - RNA, 15 nt, Human
aaguucauacauugu

SEQ ID NO: 1519186 - RNA, 12 nt, Human
aaguucauacau

SEQ ID NO: 1519187 - RNA, 13 nt, Human
aaguucauacauu

SEQ ID NO: 1519188 - RNA, 16 nt, Human
aagcaaguauuagaau

SEQ ID NO: 1519189 - RNA, 20 nt, Human
gugucccaaaaagaaaggag

SEQ ID NO: 1519190 - RNA, 21 nt, Human
gugucuugcaauggcagccuu

SEQ ID NO: 1519191 - RNA, 17 nt, Human
gugugaggguccugcag

SEQ ID NO: 1519192 - RNA, 20 nt, Human
gugugagucaccaagcccag

SEQ ID NO: 1519193 - RNA, 15 nt, Human
gugugguguuuccug

SEQ ID NO: 1519194 - RNA, 13 nt, Human
gugugagucacca

SEQ ID NO: 1519195 - RNA, 18 nt, Human
gugugagucaccaagccc

SEQ ID NO: 1519196 - RNA, 19 nt, Human
gugugguguuuccuggcac

SEQ ID NO: 1519197 - RNA, 19 nt, Human
aagcaaaauuuuuucucua

SEQ ID NO: 1519198 - RNA, 21 nt, Human
aagauguagcgcuuugaauau

SEQ ID NO: 1519199 - RNA, 22 nt, Human
aagauguagaggagaaacugga

SEQ ID NO: 1519200 - RNA, 22 nt, Human
aagauauuuugcuuugugauuu

SEQ ID NO: 1519201 - RNA, 20 nt, Human
aagaguaggaagacuuugga

SEQ ID NO: 1519202 - RNA, 20 nt, Human
aagauauuuugcuuugugau

SEQ ID NO: 1519203 - RNA, 17 nt, Human
aagauauuuugcuuugu

SEQ ID NO: 1519204 - RNA, 16 nt, Human
aagaguaggaagacuu

SEQ ID NO: 1519205 - RNA, 18 nt, Human
aagaguaggaagacuuug

SEQ ID NO: 1519206 - RNA, 19 nt, Human
aagaguaggaagacuuugg

SEQ ID NO: 1519207 - RNA, 15 nt, Human
aagauauuuugcuuu

SEQ ID NO: 1519208 - RNA, 19 nt, Human
gugguguuuccuggcacug

SEQ ID NO: 1519209 - RNA, 18 nt, Human
gugguuauggagagggug

SEQ ID NO: 1519210 - RNA, 23 nt, Human
gugguuaaugccauggacagaag

SEQ ID NO: 1519211 - RNA, 14 nt, Human
gugggucaaggaau

SEQ ID NO: 1519212 - RNA, 14 nt, Human
gugguguggagaag

SEQ ID NO: 1519213 - RNA, 22 nt, Human
gugguguggagaagccacaggc

SEQ ID NO: 1519214 - RNA, 15 nt, Human
gugguguuuccuggc

SEQ ID NO: 1519215 - RNA, 16 nt, Human
gugguguuuccuggca

SEQ ID NO: 1519216 - RNA, 12 nt, Human
gugggagcugag

SEQ ID NO: 1519217 - RNA, 15 nt, Human
gugggauccuccagg

SEQ ID NO: 1519218 - RNA, 18 nt, Human
gugggauccuccaggugc

SEQ ID NO: 1519219 - RNA, 15 nt, Human
guggccucccaacuc

SEQ ID NO: 1519220 - RNA, 23 nt, Human
gugggaaagauuacuuuuucuuu

SEQ ID NO: 1519221 - RNA, 13 nt, Human
guggccucccaac

SEQ ID NO: 1519222 - RNA, 14 nt, Human
guggccucccaacu

SEQ ID NO: 1519223 - RNA, 11 nt, Human
aagagcugagg

SEQ ID NO: 1519224 - RNA, 18 nt, Human
aagagcugaggcaauucu

SEQ ID NO: 1519225 - RNA, 18 nt, Human
aagagcuguucacagcca

SEQ ID NO: 1519226 - RNA, 19 nt, Human
aagagcuguucacagccag

SEQ ID NO: 1519227 - RNA, 16 nt, Human
aagagcccaggccucc

SEQ ID NO: 1519228 - RNA, 12 nt, Human
aagagcccaggc

SEQ ID NO: 1519229 - RNA, 14 nt, Human
aagagcccaggccu

SEQ ID NO: 1519230 - RNA, 16 nt, Human
aagacuguacaaagua

SEQ ID NO: 1519231 - RNA, 16 nt, Human
aagagauugugguuuc

SEQ ID NO: 1519232 - RNA, 19 nt, Human
aagagauugugguuucauu

SEQ ID NO: 1519233 - RNA, 17 nt, Human
aagacucauucuucugu

SEQ ID NO: 1519234 - RNA, 14 nt, Human
aagacuccaaagaa

SEQ ID NO: 1519235 - RNA, 16 nt, Human
aagacuccaaagaaau

SEQ ID NO: 1519236 - RNA, 17 nt, Human
aagacuccaaagaaaug

SEQ ID NO: 1519237 - RNA, 21 nt, Human
aagacgcugugcugcccugcc

SEQ ID NO: 1519238 - RNA, 22 nt, Human
aagacgcugugcugcccugccc

SEQ ID NO: 1519239 - RNA, 14 nt, Human
aagacuauucaaac

SEQ ID NO: 1519240 - RNA, 23 nt, Human
aagacgcugugcugcccugccca

SEQ ID NO: 1519241 - RNA, 24 nt, Human
aagaauuucuaggacugaauuaug

SEQ ID NO: 1519242 - RNA, 16 nt, Human
aagacaaaaagcuacu

SEQ ID NO: 1519243 - RNA, 13 nt, Human
aagacccaaaagg

SEQ ID NO: 1519244 - RNA, 19 nt, Human
guggcagcugcgguccacc

SEQ ID NO: 1519245 - RNA, 17 nt, Human
guggcagcugcggucca

SEQ ID NO: 1519246 - RNA, 13 nt, Human
aagaauauuuuaa

SEQ ID NO: 1519247 - RNA, 18 nt, Human
guggcaccagcagccugg

SEQ ID NO: 1519248 - RNA, 13 nt, Human
guggcaccagcag

SEQ ID NO: 1519249 - RNA, 14 nt, Human
guggcaccagcagc

SEQ ID NO: 1519250 - RNA, 22 nt, Human
guggcagcucaccucucccuug

SEQ ID NO: 1519251 - RNA, 14 nt, Human
guggcagcugcggu

SEQ ID NO: 1519252 - RNA, 23 nt, Human
guggauuuaacagaaauguacag

SEQ ID NO: 1519253 - RNA, 21 nt, Human
guggauuuugguuuuguuccc

SEQ ID NO: 1519254 - RNA, 21 nt, Human
guggauuuaacagaaauguac

SEQ ID NO: 1519255 - RNA, 14 nt, Human
guggacacagcucu

SEQ ID NO: 1519256 - RNA, 15 nt, Human
guggacacagcucuu

SEQ ID NO: 1519257 - RNA, 17 nt, Human
guggacacagcucuucu

SEQ ID NO: 1519258 - RNA, 24 nt, Human
guggacacagcucuucuccaggcu

SEQ ID NO: 1519259 - RNA, 21 nt, Human
gugcugcccugcccaccuggc

SEQ ID NO: 1519260 - RNA, 19 nt, Human
gugcugcccugcccaccug

SEQ ID NO: 1519261 - RNA, 20 nt, Human
gugcugcccugcccaccugg

SEQ ID NO: 1519262 - RNA, 20 nt, Human
gugcacuaauguguaagaca

SEQ ID NO: 1519263 - RNA, 22 nt, Human
gugcacuaauguguaagacaaa

SEQ ID NO: 1519264 - RNA, 22 nt, Human
gugcauuugaggucuguucuuu

SEQ ID NO: 1519265 - RNA, 21 nt, Human
gugcauuugaggucuguucuu

SEQ ID NO: 1519266 - RNA, 15 nt, Human
gugcauuuggugguu

SEQ ID NO: 1519267 - RNA, 14 nt, Human
gugccaagcagagg

SEQ ID NO: 1519268 - RNA, 12 nt, Human
gugcacacacca

SEQ ID NO: 1519269 - RNA, 14 nt, Human
gugcacacaccaga

SEQ ID NO: 1519270 - RNA, 18 nt, Human
gugcacguacacacacau

SEQ ID NO: 1519271 - RNA, 17 nt, Human
gugcacacaccagagcc

SEQ ID NO: 1519272 - RNA, 14 nt, Human
aacuuggcgcugcc

SEQ ID NO: 1519273 - RNA, 17 nt, Human
aacuuggcgcugccccu

SEQ ID NO: 1519274 - RNA, 23 nt, Human
aacuugguucccauuugcuccuu

SEQ ID NO: 1519275 - RNA, 15 nt, Human
gugccucugggacug

SEQ ID NO: 1519276 - RNA, 13 nt, Human
aagaaaauaucac

SEQ ID NO: 1519277 - RNA, 16 nt, Human
aagaaaauaccaagga

SEQ ID NO: 1519278 - RNA, 15 nt, Human
aagaagcucucuccu

SEQ ID NO: 1519279 - RNA, 14 nt, Human
aagaagcucucucc

SEQ ID NO: 1519280 - RNA, 16 nt, Human
aagaagcccaggaaag

SEQ ID NO: 1519281 - RNA, 17 nt, Human
aagaagcccaggaaagg

SEQ ID NO: 1519282 - RNA, 16 nt, Human
aagaaaaguuuaccau

SEQ ID NO: 1519283 - RNA, 20 nt, Human
aagaaaaaggaugcacagag

SEQ ID NO: 1519284 - RNA, 19 nt, Human
aagaaaaaggaugcacaga

SEQ ID NO: 1519285 - RNA, 22 nt, Human
aagaaaaaggaugcacagaguu

SEQ ID NO: 1519286 - RNA, 20 nt, Human
gucuaccugaggggccucuu

SEQ ID NO: 1519287 - RNA, 23 nt, Human
gucgcccagucuggaaugcagug

SEQ ID NO: 1519288 - RNA, 13 nt, Human
gucgcccagucug

SEQ ID NO: 1519289 - RNA, 14 nt, Human
gucgcccagucugg

SEQ ID NO: 1519290 - RNA, 14 nt, Human
gucgaggacaggga

SEQ ID NO: 1519291 - RNA, 10 nt, Human
guccugcagc

SEQ ID NO: 1519292 - RNA, 17 nt, Human
guccugcugcaguugcc

SEQ ID NO: 1519293 - RNA, 18 nt, Human
guccugcagccugcagga

SEQ ID NO: 1519294 - RNA, 14 nt, Human
guccugcagccugc

SEQ ID NO: 1519295 - RNA, 13 nt, Human
guccugcugcagu

SEQ ID NO: 1519296 - RNA, 16 nt, Human
guccugcugcaguugc

SEQ ID NO: 1519297 - RNA, 13 nt, Human
aaccacaucuugc

SEQ ID NO: 1519298 - RNA, 18 nt, Human
aaccacaucuugcucugc

SEQ ID NO: 1519299 - RNA, 13 nt, Human
gucuccauguuug

SEQ ID NO: 1519300 - RNA, 16 nt, Human
aacauuuugucauaua

SEQ ID NO: 1519301 - RNA, 22 nt, Human
gucucaaacucuugaccucagg

SEQ ID NO: 1519302 - RNA, 14 nt, Human
gucuaugggacuca

SEQ ID NO: 1519303 - RNA, 15 nt, Human
gucuaugggacucaa

SEQ ID NO: 1519304 - RNA, 23 nt, Human
gucucaguccaugaagauguaga

SEQ ID NO: 1519305 - RNA, 22 nt, Human
gucuccaaccccccagcacuga

SEQ ID NO: 1519306 - RNA, 16 nt, Human
gucuccaaccccccag

SEQ ID NO: 1519307 - RNA, 17 nt, Human
gucuccaaccccccagc

SEQ ID NO: 1519308 - RNA, 20 nt, Human
gucuccaaccccccagcacu

SEQ ID NO: 1519309 - RNA, 21 nt, Human
gucuccaaccccccagcacug

SEQ ID NO: 1519310 - RNA, 22 nt, Human
guagcucuaggagggcuggcaa

SEQ ID NO: 1519311 - RNA, 19 nt, Human
gucccaccuuggcugcagg

SEQ ID NO: 1519312 - RNA, 20 nt, Human
gucccaccuuggcugcaggg

SEQ ID NO: 1519313 - RNA, 17 nt, Human
gucccaccuuggcugca

SEQ ID NO: 1519314 - RNA, 18 nt, Human
gucccaccuuggcugcag

SEQ ID NO: 1519315 - RNA, 13 nt, Human
guccgagcuuuga

SEQ ID NO: 1519316 - RNA, 22 nt, Human
guccgaaagggacuuggaagcu

SEQ ID NO: 1519317 - RNA, 13 nt, Human
gucccuuuuccuu

SEQ ID NO: 1519318 - RNA, 21 nt, Human
guccgaaagggacuuggaagc

SEQ ID NO: 1519319 - RNA, 12 nt, Human
guccccuucucu

SEQ ID NO: 1519320 - RNA, 13 nt, Human
guccccuucucuc

SEQ ID NO: 1519321 - RNA, 14 nt, Human
guccccuucucuca

SEQ ID NO: 1519322 - RNA, 17 nt, Human
guccccuucucucaucu

SEQ ID NO: 1519323 - RNA, 18 nt, Human
guccccuucucucaucuc

SEQ ID NO: 1519324 - RNA, 19 nt, Human
guccccuucucucaucucu

SEQ ID NO: 1519325 - RNA, 20 nt, Human
guccccuucucucaucucuu

SEQ ID NO: 1519326 - RNA, 18 nt, Human
gucccccugacaacacuc

SEQ ID NO: 1519327 - RNA, 13 nt, Human
gucccccugacaa

SEQ ID NO: 1519328 - RNA, 15 nt, Human
guccccgcacugggc

SEQ ID NO: 1519329 - RNA, 16 nt, Human
guccccgcacugggcu

SEQ ID NO: 1519330 - RNA, 23 nt, Human
guccccuguuuguuucugaaagg

SEQ ID NO: 1519331 - RNA, 11 nt, Human
guccccuucuc

SEQ ID NO: 1519332 - RNA, 16 nt, Human
aacauauauaacaaug

SEQ ID NO: 1519333 - RNA, 14 nt, Human
aacaucaacaucuu

SEQ ID NO: 1519334 - RNA, 22 nt, Human
aacauguuuuucuucucccuca

SEQ ID NO: 1519335 - RNA, 12 nt, Human
aacauaauuaaa

SEQ ID NO: 1519336 - RNA, 20 nt, Human
aacauacucccaucugugaa

SEQ ID NO: 1519337 - RNA, 18 nt, Human
aacauacucccaucugug

SEQ ID NO: 1519338 - RNA, 19 nt, Human
aacagucucaggaaaucaa

SEQ ID NO: 1519339 - RNA, 19 nt, Human
aacagguuuuccugaagaa

SEQ ID NO: 1519340 - RNA, 17 nt, Human
aacagucucaggaaauc

SEQ ID NO: 1519341 - RNA, 13 nt, Human
guccuacccaccc

SEQ ID NO: 1519342 - RNA, 15 nt, Human
guccuacccacccuc

SEQ ID NO: 1519343 - RNA, 16 nt, Human
aacagauaaauaguuu

SEQ ID NO: 1519344 - RNA, 19 nt, Human
aacagauuauuaccuuaca

SEQ ID NO: 1519345 - RNA, 20 nt, Human
aacugaaaucauacuucuua

SEQ ID NO: 1519346 - RNA, 20 nt, Human
gugaguccuggcaugggaau

SEQ ID NO: 1519347 - RNA, 15 nt, Human
gugagucgaggacag

SEQ ID NO: 1519348 - RNA, 17 nt, Human
gugaguccuggcauggg

SEQ ID NO: 1519349 - RNA, 19 nt, Human
gugaguacuacaguccucc

SEQ ID NO: 1519350 - RNA, 21 nt, Human
gugaguacuacaguccuccca

SEQ ID NO: 1519351 - RNA, 12 nt, Human
gugagagcuggg

SEQ ID NO: 1519352 - RNA, 12 nt, Human
gugaccccaggu

SEQ ID NO: 1519353 - RNA, 21 nt, Human
gugagcacuaaggugugcucu

SEQ ID NO: 1519354 - RNA, 17 nt, Human
gugaguacuacaguccu

SEQ ID NO: 1519355 - RNA, 13 nt, Human
gugagagcugggu

SEQ ID NO: 1519356 - RNA, 16 nt, Human
gugagaggggaacaga

SEQ ID NO: 1519357 - RNA, 17 nt, Human
gugaccaaugaugguca

SEQ ID NO: 1519358 - RNA, 18 nt, Human
gugaccauguuuuguuua

SEQ ID NO: 1519359 - RNA, 18 nt, Human
gugaccagcaccaucucu

SEQ ID NO: 1519360 - RNA, 21 nt, Human
gugaccagcaccaucucuccu

SEQ ID NO: 1519361 - RNA, 23 nt, Human
gugacagaggcagccccauucug

SEQ ID NO: 1519362 - RNA, 14 nt, Human
gugacaugucuuuu

SEQ ID NO: 1519363 - RNA, 16 nt, Human
gugacagaggcagccc

SEQ ID NO: 1519364 - RNA, 18 nt, Human
gugacagaggcagcccca

SEQ ID NO: 1519365 - RNA, 19 nt, Human
gugacagaggcagccccau

SEQ ID NO: 1519366 - RNA, 13 nt, Human
aacuauauuguuu

SEQ ID NO: 1519367 - RNA, 20 nt, Human
aacuaucucauuuccaagca

SEQ ID NO: 1519368 - RNA, 23 nt, Human
aacuaucucauuuccaagcaagu

SEQ ID NO: 1519369 - RNA, 23 nt, Human
gugaagacaaugacuuacuguac

SEQ ID NO: 1519370 - RNA, 14 nt, Human
gugaagugaagaca

SEQ ID NO: 1519371 - RNA, 16 nt, Human
gugaagugaaugaaac

SEQ ID NO: 1519372 - RNA, 23 nt, Human
aacguggcugcuucaaggauccu

SEQ ID NO: 1519373 - RNA, 19 nt, Human
aaccugauugugucucuug

SEQ ID NO: 1519374 - RNA, 18 nt, Human
aaccugauugugucucuu

SEQ ID NO: 1519375 - RNA, 15 nt, Human
gucuuuguacagaca

SEQ ID NO: 1519376 - RNA, 16 nt, Human
gucuuuguacagacaa

SEQ ID NO: 1519377 - RNA, 16 nt, Human
gucuucaguaagccgu

SEQ ID NO: 1519378 - RNA, 18 nt, Human
gucucuuuaaugucacag

SEQ ID NO: 1519379 - RNA, 19 nt, Human
gucucuuuaaugucacagg

SEQ ID NO: 1519380 - RNA, 20 nt, Human
gucucuuuaaugucacaggc

SEQ ID NO: 1519381 - RNA, 19 nt, Human
gucugaaggcuggguucug

SEQ ID NO: 1519382 - RNA, 22 nt, Human
gucucuuuaaugucacaggcag

SEQ ID NO: 1519383 - RNA, 23 nt, Human
gucucuuuaaugucacaggcagg

SEQ ID NO: 1519384 - RNA, 17 nt, Human
gucucuugguccugcug

SEQ ID NO: 1519385 - RNA, 20 nt, Human
gucucuugguccugcugcag

SEQ ID NO: 1519386 - RNA, 18 nt, Human
gucucuugguccugcugc

SEQ ID NO: 1519387 - RNA, 19 nt, Human
gucucuugguccugcugca

SEQ ID NO: 1519388 - RNA, 13 nt, Human
gucugacccacug

SEQ ID NO: 1519389 - RNA, 21 nt, Human
gucugacaggcaaugcuggcu

SEQ ID NO: 1519390 - RNA, 22 nt, Human
gucugacaggcaaugcuggcug

SEQ ID NO: 1519391 - RNA, 23 nt, Human
gucugacaggcaaugcuggcugu

SEQ ID NO: 1519392 - RNA, 19 nt, Human
aguggccuuccccagcaug

SEQ ID NO: 1519393 - RNA, 23 nt, Human
aguggcuuaaaacaacacucaca

SEQ ID NO: 1519394 - RNA, 15 nt, Human
agugucuuaauuaaa

SEQ ID NO: 1519395 - RNA, 18 nt, Human
aguguauuuuuuuacuaa

SEQ ID NO: 1519396 - RNA, 17 nt, Human
aguguauuuuuuuacua

SEQ ID NO: 1519397 - RNA, 16 nt, Human
agugggagcugccugu

SEQ ID NO: 1519398 - RNA, 15 nt, Human
agugggagcugccug

SEQ ID NO: 1519399 - RNA, 14 nt, Human
agugggagcugccu

SEQ ID NO: 1519400 - RNA, 21 nt, Human
agugucuuaauuaaaagaaua

SEQ ID NO: 1519401 - RNA, 17 nt, Human
agugucuuaauuaaaag

SEQ ID NO: 1519402 - RNA, 18 nt, Human
agugucuuaauuaaaaga

SEQ ID NO: 1519403 - RNA, 22 nt, Human
aguugaaaaucuuauaauuuaa

SEQ ID NO: 1519404 - RNA, 15 nt, Human
aguucauacauugua

SEQ ID NO: 1519405 - RNA, 20 nt, Human
aguucagguaacaggcagau

SEQ ID NO: 1519406 - RNA, 17 nt, Human
aguuacagacaaagcgu

SEQ ID NO: 1519407 - RNA, 19 nt, Human
aguucagguaacaggcaga

SEQ ID NO: 1519408 - RNA, 10 nt, Human
aguucauaca

SEQ ID NO: 1519409 - RNA, 11 nt, Human
aguucauacau

SEQ ID NO: 1519410 - RNA, 14 nt, Human
aguuacagacaaag

SEQ ID NO: 1519411 - RNA, 16 nt, Human
aguuacagacaaagcg

SEQ ID NO: 1519412 - RNA, 12 nt, Human
aguuaaauaaau

SEQ ID NO: 1519413 - RNA, 23 nt, Human
aguugaaaaucuuauaauuuaaa

SEQ ID NO: 1519414 - RNA, 22 nt, Human
aguugaaaagacuccaaagaaa

SEQ ID NO: 1519415 - RNA, 16 nt, Human
aguuguguuugaagca

SEQ ID NO: 1519416 - RNA, 14 nt, Human
aguugaagacagag

SEQ ID NO: 1519417 - RNA, 20 nt, Human
aguuguuugauucagacagc

SEQ ID NO: 1519418 - RNA, 11 nt, Human
aguaucuugaa

SEQ ID NO: 1519419 - RNA, 12 nt, Human
aguaucuugaag

SEQ ID NO: 1519420 - RNA, 15 nt, Human
aguaucuugaagacu

SEQ ID NO: 1519421 - RNA, 14 nt, Human
aguaugaaauuaua

SEQ ID NO: 1519422 - RNA, 16 nt, Human
aguaugaaauuauaua

SEQ ID NO: 1519423 - RNA, 17 nt, Human
aguaugaggcauuuguu

SEQ ID NO: 1519424 - RNA, 16 nt, Human
aguaugaggcauuugu

SEQ ID NO: 1519425 - RNA, 15 nt, Human
aguaugaggcauuug

SEQ ID NO: 1519426 - RNA, 23 nt, Human
agucaaauugugugaaagguacu

SEQ ID NO: 1519427 - RNA, 19 nt, Human
agucaaauugugugaaagg

SEQ ID NO: 1519428 - RNA, 14 nt, Human
aguaugguggcugg

SEQ ID NO: 1519429 - RNA, 12 nt, Human
aguccuguaaug

SEQ ID NO: 1519430 - RNA, 17 nt, Human
agucugaaggcuggguu

SEQ ID NO: 1519431 - RNA, 16 nt, Human
agucugaaggcugggu

SEQ ID NO: 1519432 - RNA, 13 nt, Human
agucugaaggcug

SEQ ID NO: 1519433 - RNA, 15 nt, Human
agucugaaggcuggg

SEQ ID NO: 1519434 - RNA, 22 nt, Human
aguccuggcaugggaaugaaug

SEQ ID NO: 1519435 - RNA, 20 nt, Human
aguccuggcaugggaaugaa

SEQ ID NO: 1519436 - RNA, 21 nt, Human
aguccuggcaugggaaugaau

SEQ ID NO: 1519437 - RNA, 16 nt, Human
agugaagacaaugacu

SEQ ID NO: 1519438 - RNA, 14 nt, Human
agugaagacaauga

SEQ ID NO: 1519439 - RNA, 20 nt, Human
agucugauucccaagcucug

SEQ ID NO: 1519440 - RNA, 16 nt, Human
agucugauucccaagc

SEQ ID NO: 1519441 - RNA, 18 nt, Human
agucugauucccaagcuc

SEQ ID NO: 1519442 - RNA, 17 nt, Human
agucuggaaugcagugg

SEQ ID NO: 1519443 - RNA, 18 nt, Human
agucuggaaugcaguggu

SEQ ID NO: 1519444 - RNA, 14 nt, Human
auagucaaauugug

SEQ ID NO: 1519445 - RNA, 23 nt, Human
auaguauuugagaguucuaaauu

SEQ ID NO: 1519446 - RNA, 17 nt, Human
auagucaaauuguguga

SEQ ID NO: 1519447 - RNA, 15 nt, Human
auagguuuaauaauu

SEQ ID NO: 1519448 - RNA, 14 nt, Human
auagguuuggacaa

SEQ ID NO: 1519449 - RNA, 18 nt, Human
auagguuuggacaaaaug

SEQ ID NO: 1519450 - RNA, 17 nt, Human
auaguaugguggcuggg

SEQ ID NO: 1519451 - RNA, 18 nt, Human
auaguaugguggcugggu

SEQ ID NO: 1519452 - RNA, 20 nt, Human
auaguauuugagaguucuaa

SEQ ID NO: 1519453 - RNA, 21 nt, Human
auaguauuugagaguucuaaa

SEQ ID NO: 1519454 - RNA, 14 nt, Human
auaggugcuacaaa

SEQ ID NO: 1519455 - RNA, 23 nt, Human
auaggugcuacaaaaacacagca

SEQ ID NO: 1519456 - RNA, 15 nt, Human
auaggugcuacaaaa

SEQ ID NO: 1519457 - RNA, 21 nt, Human
auaggugcuacaaaaacacag

SEQ ID NO: 1519458 - RNA, 15 nt, Human
auagccaaggccaaa

SEQ ID NO: 1519459 - RNA, 21 nt, Human
auagccaaggccaaaggaagc

SEQ ID NO: 1519460 - RNA, 19 nt, Human
auauauuuuuuucugaaau

SEQ ID NO: 1519461 - RNA, 15 nt, Human
auaucaauuuaaaaa

SEQ ID NO: 1519462 - RNA, 13 nt, Human
auauuauguguuu

SEQ ID NO: 1519463 - RNA, 14 nt, Human
auauuuacguauga

SEQ ID NO: 1519464 - RNA, 13 nt, Human
auauuuauuuuaa

SEQ ID NO: 1519465 - RNA, 19 nt, Human
auauuuacuucuuauacau

SEQ ID NO: 1519466 - RNA, 23 nt, Human
auaugcuucuguuuuauaauuuu

SEQ ID NO: 1519467 - RNA, 22 nt, Human
auauuaccacagacauacuaac

SEQ ID NO: 1519468 - RNA, 20 nt, Human
auaugcuucuguuuuauaau

SEQ ID NO: 1519469 - RNA, 22 nt, Human
auaugcuucuguuuuauaauuu

SEQ ID NO: 1519470 - RNA, 16 nt, Human
auaugcucugcauguu

SEQ ID NO: 1519471 - RNA, 23 nt, Human
auaauguuucaaacauauauaac

SEQ ID NO: 1519472 - RNA, 11 nt, Human
auaaugucucu

SEQ ID NO: 1519473 - RNA, 15 nt, Human
auaauguaagcucua

SEQ ID NO: 1519474 - RNA, 15 nt, Human
auaaugucucuguga

SEQ ID NO: 1519475 - RNA, 19 nt, Human
auaaugucucugugagacu

SEQ ID NO: 1519476 - RNA, 20 nt, Human
auaauuaaauuuugaguucu

SEQ ID NO: 1519477 - RNA, 20 nt, Human
auacaccacuacauucuguu

SEQ ID NO: 1519478 - RNA, 19 nt, Human
auacaccacuacauucugu

SEQ ID NO: 1519479 - RNA, 21 nt, Human
auacaccacuacauucuguua

SEQ ID NO: 1519480 - RNA, 17 nt, Human
auacacacucaaaucaa

SEQ ID NO: 1519481 - RNA, 18 nt, Human
auacacacucaaaucaag

SEQ ID NO: 1519482 - RNA, 20 nt, Human
auacacacucaaaucaagaa

SEQ ID NO: 1519483 - RNA, 21 nt, Human
auaaugcgugcauaccacuuu

SEQ ID NO: 1519484 - RNA, 12 nt, Human
auacccaccccc

SEQ ID NO: 1519485 - RNA, 11 nt, Human
auacccacccc

SEQ ID NO: 1519486 - RNA, 18 nt, Human
auaccugucccccugaca

SEQ ID NO: 1519487 - RNA, 18 nt, Human
auaaaggauuaaugucaa

SEQ ID NO: 1519488 - RNA, 24 nt, Human
auaaacuuuaccuuuuuuauacau

SEQ ID NO: 1519489 - RNA, 21 nt, Human
auaaacuuuaccuuuuuuaua

SEQ ID NO: 1519490 - RNA, 17 nt, Human
auaaaacuuuuuaaaau

SEQ ID NO: 1519491 - RNA, 22 nt, Human
auaaaaauauuguguugugaau

SEQ ID NO: 1519492 - RNA, 14 nt, Human
auaaaaauauugug

SEQ ID NO: 1519493 - RNA, 11 nt, Human
auaaaacuuuu

SEQ ID NO: 1519494 - RNA, 15 nt, Human
auaaaacuuuuuaaa

SEQ ID NO: 1519495 - RNA, 13 nt, Human
auaaagcagcguu

SEQ ID NO: 1519496 - RNA, 20 nt, Human
auaaagcagcguuucuauga

SEQ ID NO: 1519497 - RNA, 19 nt, Human
auaaagcagcguuucuaug

SEQ ID NO: 1519498 - RNA, 18 nt, Human
auaaagcagcguuucuau

SEQ ID NO: 1519499 - RNA, 14 nt, Human
auaaagcagcguuu

SEQ ID NO: 1519500 - RNA, 17 nt, Human
auauuuauuuuaauaau

SEQ ID NO: 1519501 - RNA, 14 nt, Human
auauuuauuuuaau

SEQ ID NO: 1519502 - RNA, 15 nt, Human
auauuuauuuuaaua

SEQ ID NO: 1519503 - RNA, 21 nt, Human
aucacagccucugaaaaccaa

SEQ ID NO: 1519504 - RNA, 18 nt, Human
aucaccaacgucugugcc

SEQ ID NO: 1519505 - RNA, 19 nt, Human
aucaccaacgucugugcca

SEQ ID NO: 1519506 - RNA, 20 nt, Human
aucaccaacgucugugccau

SEQ ID NO: 1519507 - RNA, 23 nt, Human
aucagcacgauuucuguuuagau

SEQ ID NO: 1519508 - RNA, 20 nt, Human
aucagcacgauuucuguuua

SEQ ID NO: 1519509 - RNA, 19 nt, Human
aucagcacgauuucuguuu

SEQ ID NO: 1519510 - RNA, 14 nt, Human
aucaccgaaaacgu

SEQ ID NO: 1519511 - RNA, 19 nt, Human
aucaccgaaaacguggcug

SEQ ID NO: 1519512 - RNA, 21 nt, Human
aucaccgaaaacguggcugcu

SEQ ID NO: 1519513 - RNA, 20 nt, Human
aucagccugcuccagcuguu

SEQ ID NO: 1519514 - RNA, 19 nt, Human
aucagccugcuccagcugu

SEQ ID NO: 1519515 - RNA, 18 nt, Human
aucagccugcuccagcug

SEQ ID NO: 1519516 - RNA, 18 nt, Human
aucagcuccacuuucagu

SEQ ID NO: 1519517 - RNA, 21 nt, Human
aucagcugcugaaacaacaaa

SEQ ID NO: 1519518 - RNA, 22 nt, Human
aucagcugcugaaacaacaaau

SEQ ID NO: 1519519 - RNA, 23 nt, Human
aucagcugcugaaacaacaaaua

SEQ ID NO: 1519520 - RNA, 15 nt, Human
auccagacccggcug

SEQ ID NO: 1519521 - RNA, 14 nt, Human
aucccauuuaaaaa

SEQ ID NO: 1519522 - RNA, 15 nt, Human
aucccauuuaaaaaa

SEQ ID NO: 1519523 - RNA, 15 nt, Human
auccccuguagagug

SEQ ID NO: 1519524 - RNA, 11 nt, Human
auccuccaggu

SEQ ID NO: 1519525 - RNA, 23 nt, Human
auccuccaggugcacaagcucca

SEQ ID NO: 1519526 - RNA, 13 nt, Human
auccuccaggugc

SEQ ID NO: 1519527 - RNA, 15 nt, Human
auccucccaccucag

SEQ ID NO: 1519528 - RNA, 20 nt, Human
auccucccaccucagccucc

SEQ ID NO: 1519529 - RNA, 18 nt, Human
auccucccaccucagccu

SEQ ID NO: 1519530 - RNA, 19 nt, Human
auccucccaccucagccuc

SEQ ID NO: 1519531 - RNA, 21 nt, Human
augaccuuucaauaggaaaaa

SEQ ID NO: 1519532 - RNA, 22 nt, Human
augaccuuucaauaggaaaaac

SEQ ID NO: 1519533 - RNA, 23 nt, Human
augaccuuucaauaggaaaaacu

SEQ ID NO: 1519534 - RNA, 17 nt, Human
augaagguuucugaaaa

SEQ ID NO: 1519535 - RNA, 19 nt, Human
augaagguuucugaaaauu

SEQ ID NO: 1519536 - RNA, 13 nt, Human
augaaagacugua

SEQ ID NO: 1519537 - RNA, 16 nt, Human
augaaagacuguacaa

SEQ ID NO: 1519538 - RNA, 17 nt, Human
augaaagacuguacaaa

SEQ ID NO: 1519539 - RNA, 19 nt, Human
augaaagacuguacaaagu

SEQ ID NO: 1519540 - RNA, 17 nt, Human
aucuauauuuuacauaa

SEQ ID NO: 1519541 - RNA, 21 nt, Human
aucuauauuuuacauaaauuu

SEQ ID NO: 1519542 - RNA, 22 nt, Human
aucugcuuuuuaaagaaugcuc

SEQ ID NO: 1519543 - RNA, 17 nt, Human
aucuugaauuguaagga

SEQ ID NO: 1519544 - RNA, 18 nt, Human
aucuugaagacuuuucuu

SEQ ID NO: 1519545 - RNA, 14 nt, Human
aucuucuuuauaau

SEQ ID NO: 1519546 - RNA, 11 nt, Human
augugaacagu

SEQ ID NO: 1519547 - RNA, 21 nt, Human
augugaacaguuguguuugaa

SEQ ID NO: 1519548 - RNA, 23 nt, Human
augugaacaguuguguuugaagc

SEQ ID NO: 1519549 - RNA, 22 nt, Human
augugaaacuggauuaaacuua

SEQ ID NO: 1519550 - RNA, 14 nt, Human
augucuuuucuugc

SEQ ID NO: 1519551 - RNA, 19 nt, Human
auggucaccaaaucagcug

SEQ ID NO: 1519552 - RNA, 20 nt, Human
auguauucuagcuaauguaa

SEQ ID NO: 1519553 - RNA, 23 nt, Human
auguaauuaaguacuauguauca

SEQ ID NO: 1519554 - RNA, 19 nt, Human
auguauucuagcuaaugua

SEQ ID NO: 1519555 - RNA, 15 nt, Human
auggucggaaaacau

SEQ ID NO: 1519556 - RNA, 14 nt, Human
auguaagggaaacu

SEQ ID NO: 1519557 - RNA, 16 nt, Human
auguaagggaaacugc

SEQ ID NO: 1519558 - RNA, 20 nt, Human
auguaagggaaacugccagc

SEQ ID NO: 1519559 - RNA, 19 nt, Human
auguaagggaaacugccag

SEQ ID NO: 1519560 - RNA, 15 nt, Human
auguaauuaaguacu

SEQ ID NO: 1519561 - RNA, 17 nt, Human
auguaauuaaguacuau

SEQ ID NO: 1519562 - RNA, 20 nt, Human
augugggcuaguugggcuuc

SEQ ID NO: 1519563 - RNA, 18 nt, Human
augugggcagugauguca

SEQ ID NO: 1519564 - RNA, 17 nt, Human
auguucuaagaagugaa

SEQ ID NO: 1519565 - RNA, 16 nt, Human
auguucucucuucucc

SEQ ID NO: 1519566 - RNA, 11 nt, Human
auguucuggga

SEQ ID NO: 1519567 - RNA, 12 nt, Human
auguucugggac

SEQ ID NO: 1519568 - RNA, 14 nt, Human
auguuucaaacuuu

SEQ ID NO: 1519569 - RNA, 17 nt, Human
auguuucaaacuuugga

SEQ ID NO: 1519570 - RNA, 13 nt, Human
auguucugggaca

SEQ ID NO: 1519571 - RNA, 12 nt, Human
auguuucaaacu

SEQ ID NO: 1519572 - RNA, 13 nt, Human
auguuucaaacuu

SEQ ID NO: 1519573 - RNA, 22 nt, Human
auguuugccucugccucugaca

SEQ ID NO: 1519574 - RNA, 19 nt, Human
auguuugccucugccucug

SEQ ID NO: 1519575 - RNA, 20 nt, Human
augcaugaaguaauaugcac

SEQ ID NO: 1519576 - RNA, 16 nt, Human
augcaugaaguaauau

SEQ ID NO: 1519577 - RNA, 19 nt, Human
augccucucucaggccaaa

SEQ ID NO: 1519578 - RNA, 21 nt, Human
augcauagguuuagcaguaua

SEQ ID NO: 1519579 - RNA, 18 nt, Human
augcacagaguuguuaca

SEQ ID NO: 1519580 - RNA, 17 nt, Human
augcacagaguuguuac

SEQ ID NO: 1519581 - RNA, 16 nt, Human
augcacagaguuguua

SEQ ID NO: 1519582 - RNA, 16 nt, Human
augcacaaacagaggc

SEQ ID NO: 1519583 - RNA, 17 nt, Human
augcacaaacagaggcc

SEQ ID NO: 1519584 - RNA, 15 nt, Human
augcacaaacagagg

SEQ ID NO: 1519585 - RNA, 24 nt, Human
augauguuuuccaugaguccccug

SEQ ID NO: 1519586 - RNA, 16 nt, Human
augaugccaugaggaa

SEQ ID NO: 1519587 - RNA, 17 nt, Human
augaugccaugaggaac

SEQ ID NO: 1519588 - RNA, 15 nt, Human
augcuuguacauaau

SEQ ID NO: 1519589 - RNA, 14 nt, Human
augcuuguacauaa

SEQ ID NO: 1519590 - RNA, 13 nt, Human
augcuuguacaua

SEQ ID NO: 1519591 - RNA, 12 nt, Human
augcuuguacau

SEQ ID NO: 1519592 - RNA, 12 nt, Human
augcugcccugu

SEQ ID NO: 1519593 - RNA, 15 nt, Human
auggauuuccagcca

SEQ ID NO: 1519594 - RNA, 16 nt, Human
augcucuuuacuucau

SEQ ID NO: 1519595 - RNA, 11 nt, Human
augcugcccug

SEQ ID NO: 1519596 - RNA, 15 nt, Human
agacagauacuccuc

SEQ ID NO: 1519597 - RNA, 22 nt, Human
agacagauacuccuccaagguu

SEQ ID NO: 1519598 - RNA, 21 nt, Human
agacagauacuccuccaaggu

SEQ ID NO: 1519599 - RNA, 16 nt, Human
agacagcccgggcucu

SEQ ID NO: 1519600 - RNA, 14 nt, Human
agacagcccgggcu

SEQ ID NO: 1519601 - RNA, 15 nt, Human
agacagcccgggcuc

SEQ ID NO: 1519602 - RNA, 22 nt, Human
agacgcugugcugcccugccca

SEQ ID NO: 1519603 - RNA, 18 nt, Human
agacggagucccaccuug

SEQ ID NO: 1519604 - RNA, 12 nt, Human
agacagcugccu

SEQ ID NO: 1519605 - RNA, 11 nt, Human
agacagcucuu

SEQ ID NO: 1519606 - RNA, 12 nt, Human
agacagcucuua

SEQ ID NO: 1519607 - RNA, 21 nt, Human
agacgcugugcugcccugccc

SEQ ID NO: 1519608 - RNA, 17 nt, Human
agagaacuuccagaucc

SEQ ID NO: 1519609 - RNA, 17 nt, Human
agagcccacgcccccac

SEQ ID NO: 1519610 - RNA, 16 nt, Human
agagcccacgccccca

SEQ ID NO: 1519611 - RNA, 19 nt, Human
agagcccaccuuggcucaa

SEQ ID NO: 1519612 - RNA, 13 nt, Human
agagcccacgccc

SEQ ID NO: 1519613 - RNA, 23 nt, Human
agagaggguggugaccucugccu

SEQ ID NO: 1519614 - RNA, 22 nt, Human
agagaggguggugaccucugcc

SEQ ID NO: 1519615 - RNA, 20 nt, Human
agagaggguggugaccucug

SEQ ID NO: 1519616 - RNA, 21 nt, Human
agagaggguggugaccucugc

SEQ ID NO: 1519617 - RNA, 19 nt, Human
agacuggaagcacagcuuc

SEQ ID NO: 1519618 - RNA, 17 nt, Human
agacuggaagcacagcu

SEQ ID NO: 1519619 - RNA, 19 nt, Human
agauauaugcucugcaugu

SEQ ID NO: 1519620 - RNA, 19 nt, Human
agaguggggauaugauuua

SEQ ID NO: 1519621 - RNA, 23 nt, Human
agaggguggugaccucugccuga

SEQ ID NO: 1519622 - RNA, 11 nt, Human
agagugggagc

SEQ ID NO: 1519623 - RNA, 14 nt, Human
agagugugccugaa

SEQ ID NO: 1519624 - RNA, 12 nt, Human
agagggcacaga

SEQ ID NO: 1519625 - RNA, 20 nt, Human
agaggguggugaccucugcc

SEQ ID NO: 1519626 - RNA, 22 nt, Human
agaggguggugaccucugccug

SEQ ID NO: 1519627 - RNA, 14 nt, Human
agaggacuuuucuu

SEQ ID NO: 1519628 - RNA, 15 nt, Human
agaggagagaggacc

SEQ ID NO: 1519629 - RNA, 16 nt, Human
agaggagagaggaccc

SEQ ID NO: 1519630 - RNA, 16 nt, Human
agaggaaggagaggag

SEQ ID NO: 1519631 - RNA, 15 nt, Human
agagcccaggccucc

SEQ ID NO: 1519632 - RNA, 13 nt, Human
agagcccaggccu

SEQ ID NO: 1519633 - RNA, 14 nt, Human
agagcccaggccuc

SEQ ID NO: 1519634 - RNA, 23 nt, Human
agccaagugugguagagugugcc

SEQ ID NO: 1519635 - RNA, 23 nt, Human
agcaugccuggauggggcugcac

SEQ ID NO: 1519636 - RNA, 22 nt, Human
agcauccuggcacccggccccu

SEQ ID NO: 1519637 - RNA, 23 nt, Human
agcauccuggcacccggccccug

SEQ ID NO: 1519638 - RNA, 16 nt, Human
agcaguugaaaagacu

SEQ ID NO: 1519639 - RNA, 13 nt, Human
agcaguugaaaag

SEQ ID NO: 1519640 - RNA, 21 nt, Human
agcaguugaaaagacuccaaa

SEQ ID NO: 1519641 - RNA, 18 nt, Human
agcagcguuucuaugaca

SEQ ID NO: 1519642 - RNA, 13 nt, Human
agcagcguuucua

SEQ ID NO: 1519643 - RNA, 19 nt, Human
agcagugcaugcugucccu

SEQ ID NO: 1519644 - RNA, 20 nt, Human
agcagugcaugcugucccuu

SEQ ID NO: 1519645 - RNA, 20 nt, Human
agcacagacccugcccugug

SEQ ID NO: 1519646 - RNA, 18 nt, Human
agcacagacccugcccug

SEQ ID NO: 1519647 - RNA, 19 nt, Human
agcacagacccugcccugu

SEQ ID NO: 1519648 - RNA, 13 nt, Human
agcacugacagau

SEQ ID NO: 1519649 - RNA, 14 nt, Human
agcacugacagauu

SEQ ID NO: 1519650 - RNA, 18 nt, Human
agcacugacagauuucca

SEQ ID NO: 1519651 - RNA, 16 nt, Human
agcacugacuucuaag

SEQ ID NO: 1519652 - RNA, 23 nt, Human
agcacacuugacaucaacugcau

SEQ ID NO: 1519653 - RNA, 12 nt, Human
agcacagacccu

SEQ ID NO: 1519654 - RNA, 13 nt, Human
agccgcuggggcc

SEQ ID NO: 1519655 - RNA, 21 nt, Human
agccgccaugcuccuggccca

SEQ ID NO: 1519656 - RNA, 23 nt, Human
agcccucaccccugguucucauc

SEQ ID NO: 1519657 - RNA, 21 nt, Human
agccgggcgugguggugagug

SEQ ID NO: 1519658 - RNA, 22 nt, Human
agccucccacgacugcccggca

SEQ ID NO: 1519659 - RNA, 21 nt, Human
agccucccaaagugcugggau

SEQ ID NO: 1519660 - RNA, 22 nt, Human
agccucccgaguagcugggacu

SEQ ID NO: 1519661 - RNA, 20 nt, Human
agccucccgaguagcuggga

SEQ ID NO: 1519662 - RNA, 18 nt, Human
agccucccgaguagcugg

SEQ ID NO: 1519663 - RNA, 19 nt, Human
agccucccgaguagcuggg

SEQ ID NO: 1519664 - RNA, 14 nt, Human
agccuccuccagcc

SEQ ID NO: 1519665 - RNA, 13 nt, Human
agccccagugccc

SEQ ID NO: 1519666 - RNA, 14 nt, Human
agccccagugccca

SEQ ID NO: 1519667 - RNA, 15 nt, Human
agccccagugcccac

SEQ ID NO: 1519668 - RNA, 22 nt, Human
agcccucaccccugguucucau

SEQ ID NO: 1519669 - RNA, 13 nt, Human
agccccauucugc

SEQ ID NO: 1519670 - RNA, 16 nt, Human
agccccauucugccug

SEQ ID NO: 1519671 - RNA, 18 nt, Human
agccagcaggcucucagg

SEQ ID NO: 1519672 - RNA, 19 nt, Human
agccagcaggcucucaggc

SEQ ID NO: 1519673 - RNA, 20 nt, Human
agccagcaggcucucaggcc

SEQ ID NO: 1519674 - RNA, 23 nt, Human
aggaugguucccuugaugaagaa

SEQ ID NO: 1519675 - RNA, 15 nt, Human
aggauguucugggac

SEQ ID NO: 1519676 - RNA, 16 nt, Human
aggauguucugggaca

SEQ ID NO: 1519677 - RNA, 14 nt, Human
aggauuauuggaaa

SEQ ID NO: 1519678 - RNA, 18 nt, Human
aggauguucugggacaca

SEQ ID NO: 1519679 - RNA, 23 nt, Human
aggaugcuuguacauaaugcgug

SEQ ID NO: 1519680 - RNA, 21 nt, Human
aggaugcuuguacauaaugcg

SEQ ID NO: 1519681 - RNA, 13 nt, Human
aggaccucaggug

SEQ ID NO: 1519682 - RNA, 13 nt, Human
aggaccccagcuc

SEQ ID NO: 1519683 - RNA, 20 nt, Human
aggaauccagacccggcugc

SEQ ID NO: 1519684 - RNA, 21 nt, Human
aggaaucaugugccaagcaga

SEQ ID NO: 1519685 - RNA, 17 nt, Human
aggaauccagacccggc

SEQ ID NO: 1519686 - RNA, 23 nt, Human
agcugcgguccacccaggagccc

SEQ ID NO: 1519687 - RNA, 12 nt, Human
agcuccuucugu

SEQ ID NO: 1519688 - RNA, 13 nt, Human
agcuccuucuguc

SEQ ID NO: 1519689 - RNA, 20 nt, Human
agcuccgcuuucuacccagc

SEQ ID NO: 1519690 - RNA, 21 nt, Human
agcuccgcuuucuacccagcg

SEQ ID NO: 1519691 - RNA, 23 nt, Human
agcuccgcuuucuacccagcgag

SEQ ID NO: 1519692 - RNA, 20 nt, Human
agguaaaagcaucacaugaa

SEQ ID NO: 1519693 - RNA, 18 nt, Human
aggucuguucuuuccaaa

SEQ ID NO: 1519694 - RNA, 23 nt, Human
aggucuguucuuuccaaaguaca

SEQ ID NO: 1519695 - RNA, 22 nt, Human
aggucuguucuuuccaaaguac

SEQ ID NO: 1519696 - RNA, 18 nt, Human
aggugcuacaaaaacaca

SEQ ID NO: 1519697 - RNA, 19 nt, Human
aggugcuacaaaaacacag

SEQ ID NO: 1519698 - RNA, 20 nt, Human
aggugcuacaaaaacacagc

SEQ ID NO: 1519699 - RNA, 21 nt, Human
aggugcuacaaaaacacagca

SEQ ID NO: 1519700 - RNA, 22 nt, Human
aggugcuacaaaaacacagcaa

SEQ ID NO: 1519701 - RNA, 15 nt, Human
agguuaauaaaguaa

SEQ ID NO: 1519702 - RNA, 23 nt, Human
aggugcuaggaacacuccuucac

SEQ ID NO: 1519703 - RNA, 19 nt, Human
aggugcuaggaacacuccu

SEQ ID NO: 1519704 - RNA, 22 nt, Human
aggugcuaggaacacuccuuca

SEQ ID NO: 1519705 - RNA, 23 nt, Human
aggugcuacaaaaacacagcaag

SEQ ID NO: 1519706 - RNA, 24 nt, Human
aggugcuacaaaaacacagcaagg

SEQ ID NO: 1519707 - RNA, 15 nt, Human
agguucaaagauauu

SEQ ID NO: 1519708 - RNA, 14 nt, Human
agguucaaagauau

SEQ ID NO: 1519709 - RNA, 22 nt, Human
agguucccuuugacgccauccc

SEQ ID NO: 1519710 - RNA, 23 nt, Human
agguucccuuugacgccauccca

SEQ ID NO: 1519711 - RNA, 19 nt, Human
aggguaucaggugcugcca

SEQ ID NO: 1519712 - RNA, 21 nt, Human
aggguaucaggugcugccauc

SEQ ID NO: 1519713 - RNA, 15 nt, Human
aggguaucuggugac

SEQ ID NO: 1519714 - RNA, 19 nt, Human
aggggccucuuaugggcug

SEQ ID NO: 1519715 - RNA, 20 nt, Human
aggggccucuuaugggcugg

SEQ ID NO: 1519716 - RNA, 21 nt, Human
aggggccucuuaugggcuggg

SEQ ID NO: 1519717 - RNA, 11 nt, Human
agggucccugg

SEQ ID NO: 1519718 - RNA, 20 nt, Human
agggacaggaccccagcucu

SEQ ID NO: 1519719 - RNA, 17 nt, Human
agggacaggaccccagc

SEQ ID NO: 1519720 - RNA, 18 nt, Human
agggacaggaccccagcu

SEQ ID NO: 1519721 - RNA, 13 nt, Human
agggacaggaccc

SEQ ID NO: 1519722 - RNA, 16 nt, Human
agggacaggaccccag

SEQ ID NO: 1519723 - RNA, 23 nt, Human
agggacagaggggguggccuccc

SEQ ID NO: 1519724 - RNA, 21 nt, Human
aggcugucaauuacaggaagu

SEQ ID NO: 1519725 - RNA, 22 nt, Human
agggacagaggggguggccucc

SEQ ID NO: 1519726 - RNA, 15 nt, Human
aggcuagauguaugu

SEQ ID NO: 1519727 - RNA, 16 nt, Human
aggcuagauguaugua

SEQ ID NO: 1519728 - RNA, 17 nt, Human
aggcuagauguauguac

SEQ ID NO: 1519729 - RNA, 22 nt, Human
aggcugguucggauuuggggug

SEQ ID NO: 1519730 - RNA, 20 nt, Human
aggcugucaauuacaggaag

SEQ ID NO: 1519731 - RNA, 13 nt, Human
aggcuguauccca

SEQ ID NO: 1519732 - RNA, 18 nt, Human
aggcuguaucccaugagc

SEQ ID NO: 1519733 - RNA, 17 nt, Human
agggacgcuacccggga

SEQ ID NO: 1519734 - RNA, 17 nt, Human
aggcuacugucagcucc

SEQ ID NO: 1519735 - RNA, 18 nt, Human
aggcuaaagcccagagac

SEQ ID NO: 1519736 - RNA, 21 nt, Human
aggcuagaaccaccugccuau

SEQ ID NO: 1519737 - RNA, 20 nt, Human
aggcccuucucuccagcccc

SEQ ID NO: 1519738 - RNA, 21 nt, Human
aggcccuucucuccagccccu

SEQ ID NO: 1519739 - RNA, 22 nt, Human
aggcccuucucuccagccccug

SEQ ID NO: 1519740 - RNA, 23 nt, Human
aggcccuucucuccagccccugg

SEQ ID NO: 1519741 - RNA, 16 nt, Human
accccuccaugugggc

SEQ ID NO: 1519742 - RNA, 19 nt, Human
accccuccaugugggcuag

SEQ ID NO: 1519743 - RNA, 16 nt, Human
acccaccucagccucc

SEQ ID NO: 1519744 - RNA, 11 nt, Human
acccccugaau

SEQ ID NO: 1519745 - RNA, 18 nt, Human
acccaagggccuggccug

SEQ ID NO: 1519746 - RNA, 19 nt, Human
acccaagggccuggccuga

SEQ ID NO: 1519747 - RNA, 22 nt, Human
acccaagggccuggccugagcu

SEQ ID NO: 1519748 - RNA, 20 nt, Human
accauauuaccacagacaua

SEQ ID NO: 1519749 - RNA, 21 nt, Human
acccacaagaaaugaaagcag

SEQ ID NO: 1519750 - RNA, 17 nt, Human
acccacaagaaaugaaa

SEQ ID NO: 1519751 - RNA, 23 nt, Human
acccaagggccuggccugagcug

SEQ ID NO: 1519752 - RNA, 13 nt, Human
acccaccucagcc

SEQ ID NO: 1519753 - RNA, 14 nt, Human
acccaccucagccu

SEQ ID NO: 1519754 - RNA, 15 nt, Human
acccaccucagccuc

SEQ ID NO: 1519755 - RNA, 16 nt, Human
accauauuaccacaga

SEQ ID NO: 1519756 - RNA, 14 nt, Human
accauauuaccaca

SEQ ID NO: 1519757 - RNA, 13 nt, Human
accagcagaaaug

SEQ ID NO: 1519758 - RNA, 17 nt, Human
accagccaguaaauggg

SEQ ID NO: 1519759 - RNA, 12 nt, Human
accaagcccagu

SEQ ID NO: 1519760 - RNA, 15 nt, Human
acauuuauucugcuc

SEQ ID NO: 1519761 - RNA, 14 nt, Human
acaggcacccacca

SEQ ID NO: 1519762 - RNA, 19 nt, Human
acaggcaaugcuggcuguu

SEQ ID NO: 1519763 - RNA, 23 nt, Human
acaggcaaugcuggcuguuggcu

SEQ ID NO: 1519764 - RNA, 19 nt, Human
acaggguuuugccauguug

SEQ ID NO: 1519765 - RNA, 22 nt, Human
acauaaugcgugcauaccacuu

SEQ ID NO: 1519766 - RNA, 23 nt, Human
acauaaugcgugcauaccacuuu

SEQ ID NO: 1519767 - RNA, 19 nt, Human
acaucagcacgauuucugu

SEQ ID NO: 1519768 - RNA, 18 nt, Human
acaucagcacgauuucug

SEQ ID NO: 1519769 - RNA, 17 nt, Human
acaucagcacgauuucu

SEQ ID NO: 1519770 - RNA, 15 nt, Human
acaucagcacgauuu

SEQ ID NO: 1519771 - RNA, 16 nt, Human
acaugugcacaugcac

SEQ ID NO: 1519772 - RNA, 18 nt, Human
acaugugcacaugcacgu

SEQ ID NO: 1519773 - RNA, 21 nt, Human
acagagugagacucugucuca

SEQ ID NO: 1519774 - RNA, 14 nt, Human
acagaggggguggc

SEQ ID NO: 1519775 - RNA, 15 nt, Human
acagagugagacucu

SEQ ID NO: 1519776 - RNA, 19 nt, Human
acagagugagacucugucu

SEQ ID NO: 1519777 - RNA, 21 nt, Human
acagcaguugaaaagacucca

SEQ ID NO: 1519778 - RNA, 22 nt, Human
acagcaguugaaaagacuccaa

SEQ ID NO: 1519779 - RNA, 23 nt, Human
acagcaguugaaaagacuccaaa

SEQ ID NO: 1519780 - RNA, 11 nt, Human
acagacacagg

SEQ ID NO: 1519781 - RNA, 13 nt, Human
acagacaaagcgu

SEQ ID NO: 1519782 - RNA, 15 nt, Human
acacuguacugcaau

SEQ ID NO: 1519783 - RNA, 15 nt, Human
acagacacaggcccg

SEQ ID NO: 1519784 - RNA, 19 nt, Human
acagaggcagccccauucu

SEQ ID NO: 1519785 - RNA, 23 nt, Human
acagaggcagccccauucugccu

SEQ ID NO: 1519786 - RNA, 13 nt, Human
acagacacaggcc

SEQ ID NO: 1519787 - RNA, 14 nt, Human
acagacacaggccc

SEQ ID NO: 1519788 - RNA, 15 nt, Human
acagaggcagcccca

SEQ ID NO: 1519789 - RNA, 19 nt, Human
acacugcuuguguuuuuaa

SEQ ID NO: 1519790 - RNA, 23 nt, Human
acacugcuuguguuuuuaacuca

SEQ ID NO: 1519791 - RNA, 15 nt, Human
acacugcauguuugu

SEQ ID NO: 1519792 - RNA, 14 nt, Human
acacugcauguuug

SEQ ID NO: 1519793 - RNA, 12 nt, Human
acaggcaagcac

SEQ ID NO: 1519794 - RNA, 15 nt, Human
acaggcaagcaccuc

SEQ ID NO: 1519795 - RNA, 16 nt, Human
acagcucuucuccagg

SEQ ID NO: 1519796 - RNA, 17 nt, Human
acagcucuucuccaggc

SEQ ID NO: 1519797 - RNA, 18 nt, Human
acagcucuucuccaggcu

SEQ ID NO: 1519798 - RNA, 19 nt, Human
acagccacggccaggccag

SEQ ID NO: 1519799 - RNA, 18 nt, Human
acagccacggccaggcca

SEQ ID NO: 1519800 - RNA, 15 nt, Human
acagccacggccagg

SEQ ID NO: 1519801 - RNA, 16 nt, Human
acagccacggccaggc

SEQ ID NO: 1519802 - RNA, 17 nt, Human
acagccacggccaggcc

SEQ ID NO: 1519803 - RNA, 13 nt, Human
aauuuugugaagc

SEQ ID NO: 1519804 - RNA, 16 nt, Human
acaaacaaaauuucua

SEQ ID NO: 1519805 - RNA, 18 nt, Human
acaaacaaaauuucuauu

SEQ ID NO: 1519806 - RNA, 19 nt, Human
acaaacaaaauuucuauua

SEQ ID NO: 1519807 - RNA, 14 nt, Human
acaaaauuucuauu

SEQ ID NO: 1519808 - RNA, 22 nt, Human
acaaaauguaggguuauaauaa

SEQ ID NO: 1519809 - RNA, 13 nt, Human
acaagaaaugaaa

SEQ ID NO: 1519810 - RNA, 17 nt, Human
acaaggauugcuacugu

SEQ ID NO: 1519811 - RNA, 12 nt, Human
acaaggcaaggc

SEQ ID NO: 1519812 - RNA, 14 nt, Human
acaaggcaaggcug

SEQ ID NO: 1519813 - RNA, 15 nt, Human
acaaggcaaggcugu

SEQ ID NO: 1519814 - RNA, 20 nt, Human
acacagcucuguccugggag

SEQ ID NO: 1519815 - RNA, 19 nt, Human
acacagaggcugccucucc

SEQ ID NO: 1519816 - RNA, 22 nt, Human
acacauuuuuuaaaugcaccug

SEQ ID NO: 1519817 - RNA, 20 nt, Human
acacauuuuuuaaaugcacc

SEQ ID NO: 1519818 - RNA, 12 nt, Human
acacauuuuucu

SEQ ID NO: 1519819 - RNA, 22 nt, Human
acacauuuuauuuuauuaugca

SEQ ID NO: 1519820 - RNA, 11 nt, Human
acacagcucuu

SEQ ID NO: 1519821 - RNA, 13 nt, Human
acacagcucuucu

SEQ ID NO: 1519822 - RNA, 19 nt, Human
acacgagcaggcuacuguc

SEQ ID NO: 1519823 - RNA, 21 nt, Human
acacgagcaggcuacugucag

SEQ ID NO: 1519824 - RNA, 15 nt, Human
acacgcgugcacaca

SEQ ID NO: 1519825 - RNA, 17 nt, Human
acacgcgugcacacacc

SEQ ID NO: 1519826 - RNA, 16 nt, Human
accugucccccugaca

SEQ ID NO: 1519827 - RNA, 12 nt, Human
accugucccccu

SEQ ID NO: 1519828 - RNA, 15 nt, Human
accugucccccugac

SEQ ID NO: 1519829 - RNA, 17 nt, Human
accuuggcugcagggag

SEQ ID NO: 1519830 - RNA, 18 nt, Human
accuuggcugcagggagu

SEQ ID NO: 1519831 - RNA, 13 nt, Human
accuuucccaucu

SEQ ID NO: 1519832 - RNA, 18 nt, Human
accuuucccaucuuccaa

SEQ ID NO: 1519833 - RNA, 15 nt, Human
accuuuaagagaaau

SEQ ID NO: 1519834 - RNA, 20 nt, Human
accucugcagcaauaaagca

SEQ ID NO: 1519835 - RNA, 18 nt, Human
accucugcagcaauaaag

SEQ ID NO: 1519836 - RNA, 21 nt, Human
accucugcagcaauaaagcag

SEQ ID NO: 1519837 - RNA, 14 nt, Human
acggaacucaaaua

SEQ ID NO: 1519838 - RNA, 13 nt, Human
acgucugacaggc

SEQ ID NO: 1519839 - RNA, 14 nt, Human
acgucugacaggca

SEQ ID NO: 1519840 - RNA, 15 nt, Human
acgucugacaggcaa

SEQ ID NO: 1519841 - RNA, 15 nt, Human
acgcugugcugcccu

SEQ ID NO: 1519842 - RNA, 11 nt, Human
acgcugugcug

SEQ ID NO: 1519843 - RNA, 12 nt, Human
acgcugugcugc

SEQ ID NO: 1519844 - RNA, 14 nt, Human
acgcugugcugccc

SEQ ID NO: 1519845 - RNA, 22 nt, Human
acgcaggcccccaggugccagu

SEQ ID NO: 1519846 - RNA, 13 nt, Human
acuaagagagaau

SEQ ID NO: 1519847 - RNA, 15 nt, Human
acuaagagagaauga

SEQ ID NO: 1519848 - RNA, 11 nt, Human
acgugaguccu

SEQ ID NO: 1519849 - RNA, 20 nt, Human
acuaguauuucuaugaaaua

SEQ ID NO: 1519850 - RNA, 21 nt, Human
acuauucaaacagucucagga

SEQ ID NO: 1519851 - RNA, 22 nt, Human
acuauucaggagaguagaacag

SEQ ID NO: 1519852 - RNA, 13 nt, Human
acucaaaagcugg

SEQ ID NO: 1519853 - RNA, 18 nt, Human
acucaaaagcugggcagg

SEQ ID NO: 1519854 - RNA, 19 nt, Human
acucaguccauagcagaga

SEQ ID NO: 1519855 - RNA, 15 nt, Human
acucauauuuucaug

SEQ ID NO: 1519856 - RNA, 23 nt, Human
acucuaucaaguauuauaccuuu

SEQ ID NO: 1519857 - RNA, 17 nt, Human
acucuauguucuaagaa

SEQ ID NO: 1519858 - RNA, 19 nt, Human
acucugucgcccagucugg

SEQ ID NO: 1519859 - RNA, 15 nt, Human
acucuagggaaaaac

SEQ ID NO: 1519860 - RNA, 17 nt, Human
acucuagggaaaaacca

SEQ ID NO: 1519861 - RNA, 19 nt, Human
acuguaagaaaauaucacu

SEQ ID NO: 1519862 - RNA, 13 nt, Human
acuguaagaaaau

SEQ ID NO: 1519863 - RNA, 22 nt, Human
acuguaagaaaauaucacuugu

SEQ ID NO: 1519864 - RNA, 18 nt, Human
acugguuccauggccucu

SEQ ID NO: 1519865 - RNA, 22 nt, Human
acugugaaguuuacauuguaaa

SEQ ID NO: 1519866 - RNA, 14 nt, Human
acugguauuuuauc

SEQ ID NO: 1519867 - RNA, 15 nt, Human
acuggagaaaaugga

SEQ ID NO: 1519868 - RNA, 19 nt, Human
acuggaagcacagcuucau

SEQ ID NO: 1519869 - RNA, 17 nt, Human
acuggaagcacagcuuc

SEQ ID NO: 1519870 - RNA, 13 nt, Human
acugccagcaacg

SEQ ID NO: 1519871 - RNA, 20 nt, Human
acucugucucaguccaugaa

SEQ ID NO: 1519872 - RNA, 18 nt, Human
acucugucucaguccaug

SEQ ID NO: 1519873 - RNA, 18 nt, Human
acuuguaaaggaauuuaa

SEQ ID NO: 1519874 - RNA, 16 nt, Human
acuugguuuuuaaaaa

SEQ ID NO: 1519875 - RNA, 14 nt, Human
acuugggccacugu

SEQ ID NO: 1519876 - RNA, 15 nt, Human
acuugggccacugug

SEQ ID NO: 1519877 - RNA, 22 nt, Human
acuucugucuucacaacagauu

SEQ ID NO: 1519878 - RNA, 12 nt, Human
acuucagacaua

SEQ ID NO: 1519879 - RNA, 16 nt, Human
acuucuggguggggca

SEQ ID NO: 1519880 - RNA, 17 nt, Human
acuucuggguggggcag

SEQ ID NO: 1519881 - RNA, 21 nt, Human
acuucugucuucacaacagau

SEQ ID NO: 1519882 - RNA, 22 nt, Human
acugugcugagucugaaggcug

SEQ ID NO: 1519883 - RNA, 20 nt, Human
acugugcugagucugaaggc

SEQ ID NO: 1519884 - RNA, 14 nt, Human
acuuuuggaaggua

SEQ ID NO: 1519885 - RNA, 14 nt, Human
acuuuucuuugugg

SEQ ID NO: 1519886 - RNA, 19 nt, Human
agaaaauaguggugugauu

SEQ ID NO: 1519887 - RNA, 15 nt, Human
agaaaauaccaagga

SEQ ID NO: 1519888 - RNA, 16 nt, Human
agaaaaucaggcuggc

SEQ ID NO: 1519889 - RNA, 15 nt, Human
acuuuuauaaacuuu

SEQ ID NO: 1519890 - RNA, 20 nt, Human
acuuuucauaaccuagccuu

SEQ ID NO: 1519891 - RNA, 16 nt, Human
acuuuucuuucagcca

SEQ ID NO: 1519892 - RNA, 13 nt, Human
acuuuuauaaacu

SEQ ID NO: 1519893 - RNA, 20 nt, Human
acuuuguucuggcucuucca

SEQ ID NO: 1519894 - RNA, 19 nt, Human
acuuuguucuggcucuucc

SEQ ID NO: 1519895 - RNA, 22 nt, Human
acuuuauuuucuauaauuuaaa

SEQ ID NO: 1519896 - RNA, 16 nt, Human
acuuuguucuggcucu

SEQ ID NO: 1519897 - RNA, 17 nt, Human
acuuuguucuggcucuu

SEQ ID NO: 1519898 - RNA, 20 nt, Human
acuuuauacccagaaaguua

SEQ ID NO: 1519899 - RNA, 22 nt, Human
acuuuauacccagaaaguuauu

SEQ ID NO: 1519900 - RNA, 23 nt, Human
agaaaguuauugauaaguucaua

SEQ ID NO: 1519901 - RNA, 11 nt, Human
agaaaguuauu

SEQ ID NO: 1519902 - RNA, 23 nt, Human
agaaaguacuucuccacccugcu

SEQ ID NO: 1519903 - RNA, 22 nt, Human
agaaaguacuucuccacccugc

SEQ ID NO: 1519904 - RNA, 23 nt, Human
aauguuucaaacauauauaacaa

SEQ ID NO: 1519905 - RNA, 15 nt, Human
aauguuugccucugc

SEQ ID NO: 1519906 - RNA, 16 nt, Human
aauguuugccucugcc

SEQ ID NO: 1519907 - RNA, 17 nt, Human
aaugugaaaagaaaaau

SEQ ID NO: 1519908 - RNA, 15 nt, Human
aaugugaaaagaaaa

SEQ ID NO: 1519909 - RNA, 21 nt, Human
aaugcuggcuguuggcugggg

SEQ ID NO: 1519910 - RNA, 21 nt, Human
aaugcuagguuaauuccaauu

SEQ ID NO: 1519911 - RNA, 19 nt, Human
aaugcgugcauaccacuuu

SEQ ID NO: 1519912 - RNA, 18 nt, Human
aaugcuagguuaauucca

SEQ ID NO: 1519913 - RNA, 19 nt, Human
aaugcuagguuaauuccaa

SEQ ID NO: 1519914 - RNA, 18 nt, Human
aaugcgugcauaccacuu

SEQ ID NO: 1519915 - RNA, 23 nt, Human
aaugccuuacccucauguucuua

SEQ ID NO: 1519916 - RNA, 13 nt, Human
aauacucuuauau

SEQ ID NO: 1519917 - RNA, 20 nt, Human
aauacucuacccucuuagaa

SEQ ID NO: 1519918 - RNA, 22 nt, Human
aauacucuacccucuuagaaaa

SEQ ID NO: 1519919 - RNA, 13 nt, Human
aauauguuucaaa

SEQ ID NO: 1519920 - RNA, 15 nt, Human
aauauguuucaaacu

SEQ ID NO: 1519921 - RNA, 16 nt, Human
aauauguuucaaacuu

SEQ ID NO: 1519922 - RNA, 17 nt, Human
aauauguuucaaacuuu

SEQ ID NO: 1519923 - RNA, 13 nt, Human
aauagacaauuua

SEQ ID NO: 1519924 - RNA, 22 nt, Human
aauauuauaacucauuuguugu

SEQ ID NO: 1519925 - RNA, 15 nt, Human
aaucaccaaaggcuc

SEQ ID NO: 1519926 - RNA, 14 nt, Human
aaucaccgaaaacg

SEQ ID NO: 1519927 - RNA, 15 nt, Human
aaucaccgaaaacgu

SEQ ID NO: 1519928 - RNA, 21 nt, Human
aaugauuaugaauuacauuug

SEQ ID NO: 1519929 - RNA, 23 nt, Human
aaugauuaugaauuacauuugua

SEQ ID NO: 1519930 - RNA, 15 nt, Human
aaugauuaugaauua

SEQ ID NO: 1519931 - RNA, 16 nt, Human
aaucucaaauuucuaa

SEQ ID NO: 1519932 - RNA, 15 nt, Human
aauccaaugaaauga

SEQ ID NO: 1519933 - RNA, 19 nt, Human
aauccagacccggcugcgu

SEQ ID NO: 1519934 - RNA, 18 nt, Human
aaucucaaauuucuaaau

SEQ ID NO: 1519935 - RNA, 17 nt, Human
aaucucaaauuucuaaa

SEQ ID NO: 1519936 - RNA, 19 nt, Human
aaguagaagucuuagaugu

SEQ ID NO: 1519937 - RNA, 20 nt, Human
aaguagaagucuuagaugua

SEQ ID NO: 1519938 - RNA, 21 nt, Human
aaguagaagucuuagauguau

SEQ ID NO: 1519939 - RNA, 21 nt, Human
aaguagggacuucugucuuca

SEQ ID NO: 1519940 - RNA, 23 nt, Human
aaguaucccuacuguaauuugug

SEQ ID NO: 1519941 - RNA, 18 nt, Human
aaguaucccuacuguaau

SEQ ID NO: 1519942 - RNA, 18 nt, Human
aaguccaagcauuuagau

SEQ ID NO: 1519943 - RNA, 17 nt, Human
aaguccaagcauaccaa

SEQ ID NO: 1519944 - RNA, 18 nt, Human
aaguccucuuuucugaga

SEQ ID NO: 1519945 - RNA, 22 nt, Human
aaguccucuuuucugagaggac

SEQ ID NO: 1519946 - RNA, 19 nt, Human
aaggucauuuuuuuuaaga

SEQ ID NO: 1519947 - RNA, 18 nt, Human
aaggucauuuuuuuuaag

SEQ ID NO: 1519948 - RNA, 18 nt, Human
aagggacgcuacccggga

SEQ ID NO: 1519949 - RNA, 23 nt, Human
aagggaaacugccagcaacgcag

SEQ ID NO: 1519950 - RNA, 16 nt, Human
aagggaaacugccagc

SEQ ID NO: 1519951 - RNA, 17 nt, Human
aagggaaacugccagca

SEQ ID NO: 1519952 - RNA, 12 nt, Human
aaguugaauuuu

SEQ ID NO: 1519953 - RNA, 21 nt, Human
aaguggaaaaauagccugccu

SEQ ID NO: 1519954 - RNA, 19 nt, Human
aaguggaaaaauagccugc

SEQ ID NO: 1519955 - RNA, 18 nt, Human
aagcuggucccacucagu

SEQ ID NO: 1519956 - RNA, 21 nt, Human
aagcuggucccacucagucca

SEQ ID NO: 1519957 - RNA, 20 nt, Human
aaggcagcucuaaaugucaa

SEQ ID NO: 1519958 - RNA, 20 nt, Human
aaggcagggagcgagggaga

SEQ ID NO: 1519959 - RNA, 15 nt, Human
aaggauguucuagca

SEQ ID NO: 1519960 - RNA, 15 nt, Human
aaggauugcuacugu

SEQ ID NO: 1519961 - RNA, 21 nt, Human
aagcgauucuucugcuucagc

SEQ ID NO: 1519962 - RNA, 14 nt, Human
aagauacugaaaua

SEQ ID NO: 1519963 - RNA, 17 nt, Human
aagauuacuuuuucuuu

SEQ ID NO: 1519964 - RNA, 13 nt, Human
aagauacugaaau

SEQ ID NO: 1519965 - RNA, 12 nt, Human
aagauaaaugug

SEQ ID NO: 1519966 - RNA, 13 nt, Human
aagauaaaugugc

SEQ ID NO: 1519967 - RNA, 14 nt, Human
aagauaaaugugcu

SEQ ID NO: 1519968 - RNA, 11 nt, Human
aacuuucauuu

SEQ ID NO: 1519969 - RNA, 14 nt, Human
aacuuucauuuuuu

SEQ ID NO: 1519970 - RNA, 17 nt, Human
aacuuucauuuuuuucc

SEQ ID NO: 1519971 - RNA, 20 nt, Human
aagccagcaggcucucaggc

SEQ ID NO: 1519972 - RNA, 23 nt, Human
aagccagcaggcucucaggccag

SEQ ID NO: 1519973 - RNA, 20 nt, Human
aagcagcguuucuaugacac

SEQ ID NO: 1519974 - RNA, 17 nt, Human
aagcagcguuucuauga

SEQ ID NO: 1519975 - RNA, 14 nt, Human
aagcagcguuucua

SEQ ID NO: 1519976 - RNA, 17 nt, Human
aagcagauggaaugcug

SEQ ID NO: 1519977 - RNA, 19 nt, Human
aagcagauggaaugcugug

SEQ ID NO: 1519978 - RNA, 20 nt, Human
aagcagauggaaugcugugu

SEQ ID NO: 1519979 - RNA, 22 nt, Human
aagcagcguuucuaugacacau

SEQ ID NO: 1519980 - RNA, 21 nt, Human
aagcagcguuucuaugacaca

SEQ ID NO: 1519981 - RNA, 14 nt, Human
aagccacagcuggu

SEQ ID NO: 1519982 - RNA, 14 nt, Human
aagccacaggccug

SEQ ID NO: 1519983 - RNA, 15 nt, Human
aagccacaggccuga

SEQ ID NO: 1519984 - RNA, 17 nt, Human
aagccacaggccugaga

SEQ ID NO: 1519985 - RNA, 19 nt, Human
aagccacaggccugagauu

SEQ ID NO: 1519986 - RNA, 22 nt, Human
aagccacaggccugagauuuca

SEQ ID NO: 1519987 - RNA, 23 nt, Human
aagccacaggccugagauuucau

SEQ ID NO: 1519988 - RNA, 15 nt, Human
aaauauuuauuuuaa

SEQ ID NO: 1519989 - RNA, 13 nt, Human
aaauauuuauuuu

SEQ ID NO: 1519990 - RNA, 20 nt, Human
aaauauuuauuuuaauaaug

SEQ ID NO: 1519991 - RNA, 12 nt, Human
aaaucaaauaug

SEQ ID NO: 1519992 - RNA, 14 nt, Human
aaaucaaauaugca

SEQ ID NO: 1519993 - RNA, 15 nt, Human
aaaucaaauaugcaa

SEQ ID NO: 1519994 - RNA, 16 nt, Human
aaaucaaauaugcaaa

SEQ ID NO: 1519995 - RNA, 17 nt, Human
aaauagcuuuuuucucu

SEQ ID NO: 1519996 - RNA, 20 nt, Human
aaauagcuuuuuucucugau

SEQ ID NO: 1519997 - RNA, 24 nt, Human
aaauagcucaggugucccugcacu

SEQ ID NO: 1519998 - RNA, 16 nt, Human
aaagccuccuccagcc

SEQ ID NO: 1519999 - RNA, 15 nt, Human
aaaggcuccaggagc

SEQ ID NO: 1520000 - RNA, 16 nt, Human
aaaggcuccaggagca

SEQ ID NO: 1520001 - RNA, 14 nt, Human
aaaggcagaagcaa

SEQ ID NO: 1520002 - RNA, 19 nt, Human
aaaggcagaagcaacccaa

SEQ ID NO: 1520003 - RNA, 19 nt, Human
aaauaaaacuuuuuaaaau

SEQ ID NO: 1520004 - RNA, 16 nt, Human
aaauaaaacuuuuuaa

SEQ ID NO: 1520005 - RNA, 13 nt, Human
aaauaaaacuuuu

SEQ ID NO: 1520006 - RNA, 19 nt, Human
aaaggcuccaggagcagcc

SEQ ID NO: 1520007 - RNA, 20 nt, Human
aaaggcuccaggagcagcca

SEQ ID NO: 1520008 - RNA, 13 nt, Human
aaaguggaaaaau

SEQ ID NO: 1520009 - RNA, 13 nt, Human
aaaaguugaauuu

SEQ ID NO: 1520010 - RNA, 17 nt, Human
aaaauaaaacuuuuuaa

SEQ ID NO: 1520011 - RNA, 18 nt, Human
aaaaguucugcagauaaa

SEQ ID NO: 1520012 - RNA, 17 nt, Human
aaaaucaguuguacagu

SEQ ID NO: 1520013 - RNA, 21 nt, Human
aaaaucuacacuccagugaga

SEQ ID NO: 1520014 - RNA, 16 nt, Human
aaaaagaaacauuugg

SEQ ID NO: 1520015 - RNA, 15 nt, Human
aaaaagaaaggaggg

SEQ ID NO: 1520016 - RNA, 24 nt, Human
aaacacucaguuguucaauaauaa

SEQ ID NO: 1520017 - RNA, 16 nt, Human
aaacacuguucucugc

SEQ ID NO: 1520018 - RNA, 12 nt, Human
aaaauugaugug

SEQ ID NO: 1520019 - RNA, 14 nt, Human
aaaauugauguguu

SEQ ID NO: 1520020 - RNA, 21 nt, Human
aaaauugauguguuuauuuau

SEQ ID NO: 1520021 - RNA, 16 nt, Human
aaaaucucaauauuuc

SEQ ID NO: 1520022 - RNA, 17 nt, Human
aaaaucucaauauuuca

SEQ ID NO: 1520023 - RNA, 22 nt, Human
aaaaucucaaauuucuaaaucu

SEQ ID NO: 1520024 - RNA, 19 nt, Human
aaaaucucaaauuucuaaa

SEQ ID NO: 1520025 - RNA, 22 nt, Human
aaacugagauccuuccuuuuga

SEQ ID NO: 1520026 - RNA, 21 nt, Human
aaacugagaugugaacacauc

SEQ ID NO: 1520027 - RNA, 23 nt, Human
aaacugagaugugaacacaucag

SEQ ID NO: 1520028 - RNA, 14 nt, Human
aaagaguaggaaga

SEQ ID NO: 1520029 - RNA, 15 nt, Human
aaagaaauguaaggg

SEQ ID NO: 1520030 - RNA, 16 nt, Human
aaagauauuuugcuuu

SEQ ID NO: 1520031 - RNA, 12 nt, Human
aaagauauuuug

SEQ ID NO: 1520032 - RNA, 20 nt, Human
aaagauauuuugcuuuguga

SEQ ID NO: 1520033 - RNA, 17 nt, Human
aaagauauuuugcuuug

SEQ ID NO: 1520034 - RNA, 20 nt, Human
aaaccauuaugaagaagaga

SEQ ID NO: 1520035 - RNA, 18 nt, Human
aaacucuccucugcugcu

SEQ ID NO: 1520036 - RNA, 18 nt, Human
aaaccaucauugaaaucu

SEQ ID NO: 1520037 - RNA, 17 nt, Human
aaccuagggugauauua

SEQ ID NO: 1520038 - RNA, 21 nt, Human
aaccgaacugauguaaguaaa

SEQ ID NO: 1520039 - RNA, 13 nt, Human
aaccacgcuggac

SEQ ID NO: 1520040 - RNA, 15 nt, Human
aaccacuucagcuga

SEQ ID NO: 1520041 - RNA, 16 nt, Human
aacacaucagcuugcc

SEQ ID NO: 1520042 - RNA, 13 nt, Human
aacaacauguaua

SEQ ID NO: 1520043 - RNA, 18 nt, Human
aacaaauuuacagagaca

SEQ ID NO: 1520044 - RNA, 17 nt, Human
aaaucuuauaauuuaaa

SEQ ID NO: 1520045 - RNA, 22 nt, Human
aaauguuguucucuucuuuaaa

SEQ ID NO: 1520046 - RNA, 22 nt, Human
aaauugacacuuaaaaaugguu

SEQ ID NO: 1520047 - RNA, 19 nt, Human
aaauugacacuuaaaaaug

SEQ ID NO: 1520048 - RNA, 12 nt, Human
aaauuaacacug

SEQ ID NO: 1520049 - RNA, 13 nt, Human
aaauuaacacugc

SEQ ID NO: 1520050 - RNA, 21 nt, Human
aaauuaacacugcuuguguuu

SEQ ID NO: 1520051 - RNA, 13 nt, Human
aaauucuuucauu

SEQ ID NO: 1520052 - RNA, 21 nt, Human
aaauucuugcaaaguaucccu

SEQ ID NO: 1520053 - RNA, 15 nt, Human
aacugacucuuaaga

SEQ ID NO: 1520054 - RNA, 18 nt, Human
aacugacucuuaagaaga

SEQ ID NO: 1520055 - RNA, 19 nt, Human
aacugacucuuaagaagac

SEQ ID NO: 1520056 - RNA, 20 nt, Human
aacugacucuuaagaagacu

SEQ ID NO: 1520057 - RNA, 20 nt, Human
aacugagaugugaacacauc

SEQ ID NO: 1520058 - RNA, 18 nt, Human
aacugagauccuuccuuu

SEQ ID NO: 1520059 - RNA, 23 nt, Human
aacugagaugugaacacaucagc

SEQ ID NO: 1520060 - RNA, 14 nt, Human
aacugauaaagaug

SEQ ID NO: 1520061 - RNA, 16 nt, Human
aacuuaaucuaaaugg

SEQ ID NO: 1520062 - RNA, 15 nt, Human
aacuuaaucuaaaug

SEQ ID NO: 1520063 - RNA, 18 nt, Human
aacuuaaucuaaauggaa

SEQ ID NO: 1520064 - RNA, 21 nt, Human
aacuuuaugcuaagugaaaua

SEQ ID NO: 1520065 - RNA, 20 nt, Human
aacuuuaugcuaagugaaau

SEQ ID NO: 1520066 - RNA, 22 nt, Human
aacuuuauacccagaaaguuau

SEQ ID NO: 1520067 - RNA, 23 nt, Human
aacuuuauacccagaaaguuauu

SEQ ID NO: 1520068 - RNA, 13 nt, Human
aaaaacacagcaa

SEQ ID NO: 1520069 - RNA, 18 nt, Human
aaaaacacagcaagggug

SEQ ID NO: 1520070 - RNA, 15 nt, Human
aaaaaauauuuuccu

SEQ ID NO: 1520071 - RNA, 14 nt, Human
caccccggccaccu

SEQ ID NO: 1520072 - RNA, 15 nt, Human
caccccggccaccug

SEQ ID NO: 1520073 - RNA, 16 nt, Human
caccccggccaccugc

SEQ ID NO: 1520074 - RNA, 17 nt, Human
caccccggccaccugcg

SEQ ID NO: 1520075 - RNA, 15 nt, Human
caccccgagggcuga

SEQ ID NO: 1520076 - RNA, 16 nt, Human
cacccccuccccgccc

SEQ ID NO: 1520077 - RNA, 22 nt, Human
cacccccacccaagggccuggc

SEQ ID NO: 1520078 - RNA, 19 nt, Human
cacccaagggccuggccug

SEQ ID NO: 1520079 - RNA, 20 nt, Human
cacccaagggccuggccuga

SEQ ID NO: 1520080 - RNA, 21 nt, Human
cacccaagggccuggccugag

SEQ ID NO: 1520081 - RNA, 23 nt, Human
cacccaagggccuggccugagcu

SEQ ID NO: 1520082 - RNA, 17 nt, Human
cacccaagggccuggcc

SEQ ID NO: 1520083 - RNA, 18 nt, Human
cacccaagggccuggccu

SEQ ID NO: 1520084 - RNA, 20 nt, Human
cacccaccaucaugucuggc

SEQ ID NO: 1520085 - RNA, 22 nt, Human
cacccaccaucaugucuggcua

SEQ ID NO: 1520086 - RNA, 12 nt, Human
cacccaccucag

SEQ ID NO: 1520087 - RNA, 13 nt, Human
cacccaccucagc

SEQ ID NO: 1520088 - RNA, 14 nt, Human
cacccaccucagcc

SEQ ID NO: 1520089 - RNA, 16 nt, Human
cacccaccucagccuc

SEQ ID NO: 1520090 - RNA, 13 nt, Human
caccccagcccca

SEQ ID NO: 1520091 - RNA, 16 nt, Human
caaaaaaugcuugcuu

SEQ ID NO: 1520092 - RNA, 23 nt, Human
caaaaaaauauauuuaaugauaa

SEQ ID NO: 1520093 - RNA, 18 nt, Human
auuuuuuuacuaauagac

SEQ ID NO: 1520094 - RNA, 16 nt, Human
caaaggaguagaaaga

SEQ ID NO: 1520095 - RNA, 12 nt, Human
caaaggaagcac

SEQ ID NO: 1520096 - RNA, 16 nt, Human
caaagcuuguuaagau

SEQ ID NO: 1520097 - RNA, 20 nt, Human
caaagccaaagcuaggccug

SEQ ID NO: 1520098 - RNA, 21 nt, Human
caaagccaaagcuaggccugg

SEQ ID NO: 1520099 - RNA, 22 nt, Human
caaagccaaagcuaggccuggc

SEQ ID NO: 1520100 - RNA, 16 nt, Human
caaagcuaggccuggc

SEQ ID NO: 1520101 - RNA, 17 nt, Human
caaagcuaggccuggcc

SEQ ID NO: 1520102 - RNA, 18 nt, Human
caaagcuaggccuggcca

SEQ ID NO: 1520103 - RNA, 13 nt, Human
caaauacauuuua

SEQ ID NO: 1520104 - RNA, 13 nt, Human
caaauaaugucuc

SEQ ID NO: 1520105 - RNA, 16 nt, Human
caaauaaugucucugu

SEQ ID NO: 1520106 - RNA, 20 nt, Human
caaauaaugucucugugaga

SEQ ID NO: 1520107 - RNA, 23 nt, Human
caaauaaugucucugugagacuc

SEQ ID NO: 1520108 - RNA, 15 nt, Human
caaauaaaaauauug

SEQ ID NO: 1520109 - RNA, 21 nt, Human
caaaggaugcccaaagaugca

SEQ ID NO: 1520110 - RNA, 19 nt, Human
caaauaugcaaagcacuga

SEQ ID NO: 1520111 - RNA, 18 nt, Human
caaauaugcaaagcacug

SEQ ID NO: 1520112 - RNA, 16 nt, Human
caaauaugcaaagcac

SEQ ID NO: 1520113 - RNA, 17 nt, Human
caaauaugcaaagcacu

SEQ ID NO: 1520114 - RNA, 13 nt, Human
caaaucagcugcu

SEQ ID NO: 1520115 - RNA, 16 nt, Human
caaaucagcugcuacu

SEQ ID NO: 1520116 - RNA, 22 nt, Human
caaauucugcuugcuugcuuuu

SEQ ID NO: 1520117 - RNA, 21 nt, Human
caaauguucaucaaugaauga

SEQ ID NO: 1520118 - RNA, 12 nt, Human
caacuuuauacc

SEQ ID NO: 1520119 - RNA, 21 nt, Human
caacucugaaggguaauuaua

SEQ ID NO: 1520120 - RNA, 20 nt, Human
caacucuccuccagagucag

SEQ ID NO: 1520121 - RNA, 19 nt, Human
caacucuccuccagaguca

SEQ ID NO: 1520122 - RNA, 16 nt, Human
caaccugauugugucu

SEQ ID NO: 1520123 - RNA, 12 nt, Human
caacccucauca

SEQ ID NO: 1520124 - RNA, 15 nt, Human
caacccucaucacca

SEQ ID NO: 1520125 - RNA, 14 nt, Human
caaauuuacagaga

SEQ ID NO: 1520126 - RNA, 16 nt, Human
caaauuuacagagaca

SEQ ID NO: 1520127 - RNA, 24 nt, Human
caacaggcugggcuucaguggcag

SEQ ID NO: 1520128 - RNA, 15 nt, Human
caaauuuacagagac

SEQ ID NO: 1520129 - RNA, 23 nt, Human
caacaggcugggcuucaguggca

SEQ ID NO: 1520130 - RNA, 22 nt, Human
caacaucuuggucagauuugaa

SEQ ID NO: 1520131 - RNA, 19 nt, Human
caacagguuuuccugaaga

SEQ ID NO: 1520132 - RNA, 18 nt, Human
caacaggguuuuuuucca

SEQ ID NO: 1520133 - RNA, 15 nt, Human
caacagguuuuccug

SEQ ID NO: 1520134 - RNA, 17 nt, Human
caacauguauaauauuu

SEQ ID NO: 1520135 - RNA, 18 nt, Human
caacauguauaauauuuu

SEQ ID NO: 1520136 - RNA, 19 nt, Human
caacauguauaauauuuuu

SEQ ID NO: 1520137 - RNA, 23 nt, Human
caacauguauaauauuuuuaauu

SEQ ID NO: 1520138 - RNA, 13 nt, Human
caacaucuuuucu

SEQ ID NO: 1520139 - RNA, 13 nt, Human
caacauguauaau

SEQ ID NO: 1520140 - RNA, 22 nt, Human
caaccccuucgcuccugugucu

SEQ ID NO: 1520141 - RNA, 21 nt, Human
caaccccuucgcuccuguguc

SEQ ID NO: 1520142 - RNA, 18 nt, Human
caaccccuucgcuccugu

SEQ ID NO: 1520143 - RNA, 19 nt, Human
caaccccuucgcuccugug

SEQ ID NO: 1520144 - RNA, 22 nt, Human
caagccaccaacauacucccau

SEQ ID NO: 1520145 - RNA, 18 nt, Human
caagugauucuccugccu

SEQ ID NO: 1520146 - RNA, 22 nt, Human
caagugauucuccugccucagc

SEQ ID NO: 1520147 - RNA, 22 nt, Human
caagugugguagagugugccug

SEQ ID NO: 1520148 - RNA, 19 nt, Human
caagugaaaaaggaggaag

SEQ ID NO: 1520149 - RNA, 16 nt, Human
caagugauucuccugc

SEQ ID NO: 1520150 - RNA, 17 nt, Human
caagugauucuccugcc

SEQ ID NO: 1520151 - RNA, 15 nt, Human
caaggauugcuacug

SEQ ID NO: 1520152 - RNA, 19 nt, Human
caaggauugcuacuguccu

SEQ ID NO: 1520153 - RNA, 19 nt, Human
caagggccuggccugagcu

SEQ ID NO: 1520154 - RNA, 12 nt, Human
caaggugggagg

SEQ ID NO: 1520155 - RNA, 23 nt, Human
caaggugggaggauugcuugagc

SEQ ID NO: 1520156 - RNA, 17 nt, Human
caagcacuaaacaaaga

SEQ ID NO: 1520157 - RNA, 21 nt, Human
caagccaccaacauacuccca

SEQ ID NO: 1520158 - RNA, 16 nt, Human
caagcgugagccacug

SEQ ID NO: 1520159 - RNA, 13 nt, Human
caaggauccugag

SEQ ID NO: 1520160 - RNA, 21 nt, Human
caaggaugaucuaggaagacu

SEQ ID NO: 1520161 - RNA, 17 nt, Human
caagcgugagccacugc

SEQ ID NO: 1520162 - RNA, 18 nt, Human
caagcgugagccacugca

SEQ ID NO: 1520163 - RNA, 16 nt, Human
caaggaagccacagcu

SEQ ID NO: 1520164 - RNA, 16 nt, Human
cacauuccugaacagg

SEQ ID NO: 1520165 - RNA, 16 nt, Human
cacauuccugaugcuu

SEQ ID NO: 1520166 - RNA, 17 nt, Human
cacaugugcacaugcac

SEQ ID NO: 1520167 - RNA, 14 nt, Human
cacaugugcacaug

SEQ ID NO: 1520168 - RNA, 15 nt, Human
cacaugugcacaugc

SEQ ID NO: 1520169 - RNA, 19 nt, Human
cacaugccucucucaggcc

SEQ ID NO: 1520170 - RNA, 18 nt, Human
cacauggcuauguuuuag

SEQ ID NO: 1520171 - RNA, 18 nt, Human
cacaucagcacgauuucu

SEQ ID NO: 1520172 - RNA, 12 nt, Human
cacauaucuguc

SEQ ID NO: 1520173 - RNA, 14 nt, Human
cacauaucugucau

SEQ ID NO: 1520174 - RNA, 19 nt, Human
cacaucagcacgauuucug

SEQ ID NO: 1520175 - RNA, 13 nt, Human
cacaugccucucu

SEQ ID NO: 1520176 - RNA, 17 nt, Human
cacaugccucucucagg

SEQ ID NO: 1520177 - RNA, 18 nt, Human
cacaugccucucucaggc

SEQ ID NO: 1520178 - RNA, 17 nt, Human
cacauuggaaacaaguc

SEQ ID NO: 1520179 - RNA, 13 nt, Human
caccacacccagc

SEQ ID NO: 1520180 - RNA, 15 nt, Human
caccacacccagccc

SEQ ID NO: 1520181 - RNA, 17 nt, Human
caccacacccagcccac

SEQ ID NO: 1520182 - RNA, 19 nt, Human
caccacaugugcacaugca

SEQ ID NO: 1520183 - RNA, 15 nt, Human
caccacaugugcaca

SEQ ID NO: 1520184 - RNA, 18 nt, Human
caccacaugugcacaugc

SEQ ID NO: 1520185 - RNA, 18 nt, Human
caccacuacauucuguua

SEQ ID NO: 1520186 - RNA, 17 nt, Human
caccacuacauucuguu

SEQ ID NO: 1520187 - RNA, 16 nt, Human
caccacuacauucugu

SEQ ID NO: 1520188 - RNA, 14 nt, Human
caccaccucuuugg

SEQ ID NO: 1520189 - RNA, 20 nt, Human
caccacuacauucuguuaau

SEQ ID NO: 1520190 - RNA, 19 nt, Human
caccacuacauucuguuaa

SEQ ID NO: 1520191 - RNA, 19 nt, Human
cacaggaaccacaagacug

SEQ ID NO: 1520192 - RNA, 20 nt, Human
cacaggaaccacaagacugc

SEQ ID NO: 1520193 - RNA, 15 nt, Human
cacaggaaguagagg

SEQ ID NO: 1520194 - RNA, 12 nt, Human
cacaggaucagu

SEQ ID NO: 1520195 - RNA, 15 nt, Human
cacaggaucagucug

SEQ ID NO: 1520196 - RNA, 16 nt, Human
cacaggaucagucuga

SEQ ID NO: 1520197 - RNA, 17 nt, Human
cacaggaucagucugau

SEQ ID NO: 1520198 - RNA, 10 nt, Human
cacaggcagg

SEQ ID NO: 1520199 - RNA, 16 nt, Human
cacaggcccggcucca

SEQ ID NO: 1520200 - RNA, 17 nt, Human
cacaggcccggcuccag

SEQ ID NO: 1520201 - RNA, 18 nt, Human
cacaggcccggcuccagg

SEQ ID NO: 1520202 - RNA, 19 nt, Human
cacaggcccggcuccaggc

SEQ ID NO: 1520203 - RNA, 23 nt, Human
cacauaucuaguaugaaauuaua

SEQ ID NO: 1520204 - RNA, 17 nt, Human
cacauacacacacacgc

SEQ ID NO: 1520205 - RNA, 15 nt, Human
cacaguuuucugaga

SEQ ID NO: 1520206 - RNA, 14 nt, Human
cacaguuuucugag

SEQ ID NO: 1520207 - RNA, 19 nt, Human
cacagugagucgaggacag

SEQ ID NO: 1520208 - RNA, 20 nt, Human
cacagugagucgaggacagg

SEQ ID NO: 1520209 - RNA, 18 nt, Human
cacagugagucgaggaca

SEQ ID NO: 1520210 - RNA, 20 nt, Human
cacaggcccggcuccaggcu

SEQ ID NO: 1520211 - RNA, 23 nt, Human
cacaggcccggcuccaggcuccu

SEQ ID NO: 1520212 - RNA, 20 nt, Human
cacagaugggugcuuggagg

SEQ ID NO: 1520213 - RNA, 21 nt, Human
cacagaguuguuacauuuuua

SEQ ID NO: 1520214 - RNA, 20 nt, Human
cacagaguuguuacauuuuu

SEQ ID NO: 1520215 - RNA, 14 nt, Human
cacagaugggugcu

SEQ ID NO: 1520216 - RNA, 18 nt, Human
cacagaugggugcuugga

SEQ ID NO: 1520217 - RNA, 23 nt, Human
cacagaugggugcuuggaggaag

SEQ ID NO: 1520218 - RNA, 21 nt, Human
cacagugagucgaggacaggg

SEQ ID NO: 1520219 - RNA, 19 nt, Human
cacacucaaaucaagaaac

SEQ ID NO: 1520220 - RNA, 21 nt, Human
cacacuugacaucaacugcau

SEQ ID NO: 1520221 - RNA, 12 nt, Human
cacagagaaagu

SEQ ID NO: 1520222 - RNA, 17 nt, Human
cacagaguuguuacauu

SEQ ID NO: 1520223 - RNA, 16 nt, Human
cacagaguuguuacau

SEQ ID NO: 1520224 - RNA, 13 nt, Human
cacaacuauauug

SEQ ID NO: 1520225 - RNA, 14 nt, Human
cacaacuauuuuuc

SEQ ID NO: 1520226 - RNA, 19 nt, Human
cacaacuauuuuuccaaaa

SEQ ID NO: 1520227 - RNA, 14 nt, Human
cacacaccagagcc

SEQ ID NO: 1520228 - RNA, 19 nt, Human
cacacagaggcugccucuc

SEQ ID NO: 1520229 - RNA, 21 nt, Human
cacacagaggcugccucuccc

SEQ ID NO: 1520230 - RNA, 12 nt, Human
cacacagcucug

SEQ ID NO: 1520231 - RNA, 13 nt, Human
cacacccagccca

SEQ ID NO: 1520232 - RNA, 15 nt, Human
cacaccagagcccac

SEQ ID NO: 1520233 - RNA, 12 nt, Human
cacaccagagcc

SEQ ID NO: 1520234 - RNA, 13 nt, Human
cacaccagagccc

SEQ ID NO: 1520235 - RNA, 17 nt, Human
cacaccgggcacucaga

SEQ ID NO: 1520236 - RNA, 13 nt, Human
caaugaccuuuca

SEQ ID NO: 1520237 - RNA, 22 nt, Human
caaugaaugaaugaauggcuaa

SEQ ID NO: 1520238 - RNA, 23 nt, Human
caaugcacuuuguucuggcucuu

SEQ ID NO: 1520239 - RNA, 19 nt, Human
caaugcaaaccaucauuga

SEQ ID NO: 1520240 - RNA, 20 nt, Human
caaugcaaaccaucauugaa

SEQ ID NO: 1520241 - RNA, 17 nt, Human
caaugcaaaccaucauu

SEQ ID NO: 1520242 - RNA, 18 nt, Human
caaugcaaaccaucauug

SEQ ID NO: 1520243 - RNA, 21 nt, Human
caauaggaaaaacugauuuuu

SEQ ID NO: 1520244 - RNA, 20 nt, Human
caauaggaaaaacugauuuu

SEQ ID NO: 1520245 - RNA, 11 nt, Human
cacaacagauu

SEQ ID NO: 1520246 - RNA, 16 nt, Human
cacaaaaguuucucuu

SEQ ID NO: 1520247 - RNA, 18 nt, Human
cacaaaaguuucucuuuu

SEQ ID NO: 1520248 - RNA, 19 nt, Human
caaugugaaaagaaaaaug

SEQ ID NO: 1520249 - RNA, 18 nt, Human
uuggacaaaauggaauac

SEQ ID NO: 1520250 - RNA, 19 nt, Human
uuggaagcuccgcuuucua

SEQ ID NO: 1520251 - RNA, 15 nt, Human
uuggauuguccccga

SEQ ID NO: 1520252 - RNA, 18 nt, Human
uuggacccugaggcccag

SEQ ID NO: 1520253 - RNA, 19 nt, Human
uuggacccugaggcccaga

SEQ ID NO: 1520254 - RNA, 21 nt, Human
uuggacccugaggcccagagg

SEQ ID NO: 1520255 - RNA, 16 nt, Human
uugcuaagcauuccaa

SEQ ID NO: 1520256 - RNA, 18 nt, Human
uugcuaagcauuccaacu

SEQ ID NO: 1520257 - RNA, 14 nt, Human
uugcugcuugaggc

SEQ ID NO: 1520258 - RNA, 16 nt, Human
uugcugcuugaggcaa

SEQ ID NO: 1520259 - RNA, 16 nt, Human
uugcugucccuuuucc

SEQ ID NO: 1520260 - RNA, 18 nt, Human
uugcugucccuuuuccuu

SEQ ID NO: 1520261 - RNA, 20 nt, Human
uugccauguuggccaggcug

SEQ ID NO: 1520262 - RNA, 21 nt, Human
uugccauguuggccaggcugg

SEQ ID NO: 1520263 - RNA, 17 nt, Human
uuguagaagucacauuc

SEQ ID NO: 1520264 - RNA, 22 nt, Human
uuguagaagucacauuccugaa

SEQ ID NO: 1520265 - RNA, 15 nt, Human
uuguagcauccugga

SEQ ID NO: 1520266 - RNA, 17 nt, Human
uuguagcauccucuuua

SEQ ID NO: 1520267 - RNA, 22 nt, Human
uuguagcacugacagauuucca

SEQ ID NO: 1520268 - RNA, 14 nt, Human
uuguagcacugaca

SEQ ID NO: 1520269 - RNA, 16 nt, Human
uuguagcacugacaga

SEQ ID NO: 1520270 - RNA, 17 nt, Human
uuguagcacugacagau

SEQ ID NO: 1520271 - RNA, 18 nt, Human
uuguagcacugacagauu

SEQ ID NO: 1520272 - RNA, 20 nt, Human
uuguaaaauggugugaccac

SEQ ID NO: 1520273 - RNA, 16 nt, Human
uuguaccgcaauguga

SEQ ID NO: 1520274 - RNA, 16 nt, Human
uuguacgaagaguauu

SEQ ID NO: 1520275 - RNA, 19 nt, Human
uuguacgaagaguauuuuu

SEQ ID NO: 1520276 - RNA, 20 nt, Human
uugucuaugggacucaaugc

SEQ ID NO: 1520277 - RNA, 22 nt, Human
uugucaaaguggugagaggcau

SEQ ID NO: 1520278 - RNA, 14 nt, Human
uugucuaugggacu

SEQ ID NO: 1520279 - RNA, 20 nt, Human
uugguaaggggaauugagga

SEQ ID NO: 1520280 - RNA, 13 nt, Human
uugggauuaauau

SEQ ID NO: 1520281 - RNA, 20 nt, Human
uuggucugacccacugcuuu

SEQ ID NO: 1520282 - RNA, 15 nt, Human
uuggucugugagaug

SEQ ID NO: 1520283 - RNA, 12 nt, Human
uuguaaaauggu

SEQ ID NO: 1520284 - RNA, 13 nt, Human
uuguaaaauggug

SEQ ID NO: 1520285 - RNA, 23 nt, Human
uuggcuucacggaagagccuugc

SEQ ID NO: 1520286 - RNA, 21 nt, Human
uugaagagguuuuaaagcuuc

SEQ ID NO: 1520287 - RNA, 20 nt, Human
uugaagcacagugaucaagu

SEQ ID NO: 1520288 - RNA, 16 nt, Human
uugaagagguuuuaaa

SEQ ID NO: 1520289 - RNA, 20 nt, Human
uugaacuuugaccucugcag

SEQ ID NO: 1520290 - RNA, 18 nt, Human
uugaacuuugaccucugc

SEQ ID NO: 1520291 - RNA, 17 nt, Human
uugaacuuugaccucug

SEQ ID NO: 1520292 - RNA, 14 nt, Human
uugaauguuaagca

SEQ ID NO: 1520293 - RNA, 17 nt, Human
uugaauguuaagcagau

SEQ ID NO: 1520294 - RNA, 12 nt, Human
uugaaugaugcc

SEQ ID NO: 1520295 - RNA, 16 nt, Human
uugaaugaugccauga

SEQ ID NO: 1520296 - RNA, 15 nt, Human
uugaacuuugaccuc

SEQ ID NO: 1520297 - RNA, 21 nt, Human
uugaaaaucuuauaauuuaaa

SEQ ID NO: 1520298 - RNA, 21 nt, Human
uucuuuccugaggcugggcuc

SEQ ID NO: 1520299 - RNA, 19 nt, Human
uucuuaggguuaugauuaa

SEQ ID NO: 1520300 - RNA, 17 nt, Human
uucuuagggaaggauac

SEQ ID NO: 1520301 - RNA, 13 nt, Human
uucuucagagacu

SEQ ID NO: 1520302 - RNA, 14 nt, Human
uucuuguguguuua

SEQ ID NO: 1520303 - RNA, 16 nt, Human
uucuggcuaugcauuu

SEQ ID NO: 1520304 - RNA, 20 nt, Human
uucuggcagaguugaagaca

SEQ ID NO: 1520305 - RNA, 24 nt, Human
uucuaaguaaaaccacagcaguug

SEQ ID NO: 1520306 - RNA, 18 nt, Human
uucuaagucauucauaaa

SEQ ID NO: 1520307 - RNA, 20 nt, Human
uugauaugccuuuucccaac

SEQ ID NO: 1520308 - RNA, 16 nt, Human
uugauaugugaacagu

SEQ ID NO: 1520309 - RNA, 16 nt, Human
uugauaugcuuauaca

SEQ ID NO: 1520310 - RNA, 17 nt, Human
uugaucaacaucuuuuc

SEQ ID NO: 1520311 - RNA, 18 nt, Human
uugaucaacaucuuuucu

SEQ ID NO: 1520312 - RNA, 22 nt, Human
uugaucaacaucuuuucuugcc

SEQ ID NO: 1520313 - RNA, 17 nt, Human
uugauucagacagcugc

SEQ ID NO: 1520314 - RNA, 21 nt, Human
uugauucagacagcugccugg

SEQ ID NO: 1520315 - RNA, 23 nt, Human
uugauucagacagcugccuggga

SEQ ID NO: 1520316 - RNA, 16 nt, Human
uugauucagcucugca

SEQ ID NO: 1520317 - RNA, 16 nt, Human
uugagccuugaacuuu

SEQ ID NO: 1520318 - RNA, 15 nt, Human
uugagccuugaacuu

SEQ ID NO: 1520319 - RNA, 14 nt, Human
uugagccuugaacu

SEQ ID NO: 1520320 - RNA, 14 nt, Human
uugaauuguaagga

SEQ ID NO: 1520321 - RNA, 19 nt, Human
uugagccuugaacuuugac

SEQ ID NO: 1520322 - RNA, 13 nt, Human
uugccagucaccc

SEQ ID NO: 1520323 - RNA, 16 nt, Human
uugccauguuggccag

SEQ ID NO: 1520324 - RNA, 17 nt, Human
uugccauguuggccagg

SEQ ID NO: 1520325 - RNA, 18 nt, Human
uugccauguuggccaggc

SEQ ID NO: 1520326 - RNA, 19 nt, Human
uugccauguuggccaggcu

SEQ ID NO: 1520327 - RNA, 23 nt, Human
uugcagacaggcaagcaccuccu

SEQ ID NO: 1520328 - RNA, 12 nt, Human
uugauucuccuu

SEQ ID NO: 1520329 - RNA, 13 nt, Human
uugauucuccuuc

SEQ ID NO: 1520330 - RNA, 17 nt, Human
uugauucuccuucagcc

SEQ ID NO: 1520331 - RNA, 20 nt, Human
uugauucuccuucagcccuc

SEQ ID NO: 1520332 - RNA, 13 nt, Human
uugauucauaaug

SEQ ID NO: 1520333 - RNA, 17 nt, Human
uugauucauaaugacuu

SEQ ID NO: 1520334 - RNA, 20 nt, Human
uugucuuuggacccugaggc

SEQ ID NO: 1520335 - RNA, 24 nt, Human
uugucuuuggacccugaggcccag

SEQ ID NO: 1520336 - RNA, 15 nt, Human
uugucuuuggacccu

SEQ ID NO: 1520337 - RNA, 19 nt, Human
uuguucaauaauaaauauu

SEQ ID NO: 1520338 - RNA, 18 nt, Human
uuguuuaaaaucauuucu

SEQ ID NO: 1520339 - RNA, 13 nt, Human
uuguuugguuaua

SEQ ID NO: 1520340 - RNA, 20 nt, Human
uuguuuggggaugagaaagg

SEQ ID NO: 1520341 - RNA, 12 nt, Human
uuuaaaaugucu

SEQ ID NO: 1520342 - RNA, 13 nt, Human
uuuaacagaaaug

SEQ ID NO: 1520343 - RNA, 19 nt, Human
uuuaaaauacacacucaaa

SEQ ID NO: 1520344 - RNA, 16 nt, Human
uuuaaaaucauuucug

SEQ ID NO: 1520345 - RNA, 14 nt, Human
uuuaaaagaaugau

SEQ ID NO: 1520346 - RNA, 17 nt, Human
uuuaaaagaaugauuau

SEQ ID NO: 1520347 - RNA, 13 nt, Human
uuuaaaagauaca

SEQ ID NO: 1520348 - RNA, 16 nt, Human
uuuacauggcuggagc

SEQ ID NO: 1520349 - RNA, 14 nt, Human
uuuaccaucugaaa

SEQ ID NO: 1520350 - RNA, 13 nt, Human
uuuaccaucugaa

SEQ ID NO: 1520351 - RNA, 13 nt, Human
uuuacagagacag

SEQ ID NO: 1520352 - RNA, 13 nt, Human
uuuaauaaaccau

SEQ ID NO: 1520353 - RNA, 15 nt, Human
uuuaauaauguuuca

SEQ ID NO: 1520354 - RNA, 19 nt, Human
uuuaauaauguuucaaaca

SEQ ID NO: 1520355 - RNA, 14 nt, Human
uuuaaccucuaaau

SEQ ID NO: 1520356 - RNA, 15 nt, Human
uuuaacagaaaugua

SEQ ID NO: 1520357 - RNA, 14 nt, Human
uuuaacagaaaugu

SEQ ID NO: 1520358 - RNA, 22 nt, Human
uuuagacccuauugcugcuuga

SEQ ID NO: 1520359 - RNA, 19 nt, Human
uuuagacccuauugcugcu

SEQ ID NO: 1520360 - RNA, 21 nt, Human
uuuacccucuugaauauaauc

SEQ ID NO: 1520361 - RNA, 20 nt, Human
uuuauacauaaacaagacca

SEQ ID NO: 1520362 - RNA, 12 nt, Human
uuuauacauaaa

SEQ ID NO: 1520363 - RNA, 15 nt, Human
uuuauacaggucaua

SEQ ID NO: 1520364 - RNA, 17 nt, Human
uuuauggcacuaguauu

SEQ ID NO: 1520365 - RNA, 20 nt, Human
uuuaugccuuuuauuucuua

SEQ ID NO: 1520366 - RNA, 14 nt, Human
uuucaauuuccaag

SEQ ID NO: 1520367 - RNA, 17 nt, Human
uuucagccaagaauucu

SEQ ID NO: 1520368 - RNA, 15 nt, Human
uuucacauaucuagu

SEQ ID NO: 1520369 - RNA, 21 nt, Human
uuucacauaucuaguaugaaa

SEQ ID NO: 1520370 - RNA, 17 nt, Human
uuucagugaaagcauca

SEQ ID NO: 1520371 - RNA, 15 nt, Human
uuucauuuuuuucca

SEQ ID NO: 1520372 - RNA, 20 nt, Human
uuucauuuuuuuccaggcug

SEQ ID NO: 1520373 - RNA, 12 nt, Human
uuucugaaauuu

SEQ ID NO: 1520374 - RNA, 19 nt, Human
uuucugaaauuuccuggga

SEQ ID NO: 1520375 - RNA, 19 nt, Human
uuucugaaaauuaacacug

SEQ ID NO: 1520376 - RNA, 20 nt, Human
uuucugaaaauuaacacugc

SEQ ID NO: 1520377 - RNA, 14 nt, Human
uuucugaaauaaca

SEQ ID NO: 1520378 - RNA, 12 nt, Human
uuucucuaggaa

SEQ ID NO: 1520379 - RNA, 23 nt, Human
uuucuacucgaguuacagacaaa

SEQ ID NO: 1520380 - RNA, 22 nt, Human
uuucuacccagcgagcccuggu

SEQ ID NO: 1520381 - RNA, 15 nt, Human
uuucuacccagcgag

SEQ ID NO: 1520382 - RNA, 18 nt, Human
uuucuacccagcgagccc

SEQ ID NO: 1520383 - RNA, 19 nt, Human
uuucuaaaucuccaaaaua

SEQ ID NO: 1520384 - RNA, 21 nt, Human
uuucuaacaaaaaaauauauu

SEQ ID NO: 1520385 - RNA, 13 nt, Human
uuuccuaauuuau

SEQ ID NO: 1520386 - RNA, 23 nt, Human
uuuccuggcacugcuuccaguga

SEQ ID NO: 1520387 - RNA, 19 nt, Human
uuuccuggcacugcuucca

SEQ ID NO: 1520388 - RNA, 14 nt, Human
uuugauaugugaac

SEQ ID NO: 1520389 - RNA, 15 nt, Human
uuugauaugugaaca

SEQ ID NO: 1520390 - RNA, 17 nt, Human
uuugauaugugaacagu

SEQ ID NO: 1520391 - RNA, 14 nt, Human
uuugauccaagcug

SEQ ID NO: 1520392 - RNA, 15 nt, Human
uuuggacccugaggc

SEQ ID NO: 1520393 - RNA, 19 nt, Human
uuuggacccugaggcccag

SEQ ID NO: 1520394 - RNA, 16 nt, Human
uuugcuugaaagaaaa

SEQ ID NO: 1520395 - RNA, 14 nt, Human
uuugcuugaaagaa

SEQ ID NO: 1520396 - RNA, 18 nt, Human
uuugguaaggggaauuga

SEQ ID NO: 1520397 - RNA, 15 nt, Human
uuuguauucucuccu

SEQ ID NO: 1520398 - RNA, 18 nt, Human
uuugaagcacagugauca

SEQ ID NO: 1520399 - RNA, 21 nt, Human
uuugaaauuguauuacaaauc

SEQ ID NO: 1520400 - RNA, 18 nt, Human
uuucuugccucugucccc

SEQ ID NO: 1520401 - RNA, 21 nt, Human
uuucuugccucuguccccuuc

SEQ ID NO: 1520402 - RNA, 19 nt, Human
uuucuuguguguuuauugu

SEQ ID NO: 1520403 - RNA, 17 nt, Human
uuugaauauaaacacua

SEQ ID NO: 1520404 - RNA, 18 nt, Human
uuugaauauaaacacuau

SEQ ID NO: 1520405 - RNA, 19 nt, Human
uuugaauauaaacacuaua

SEQ ID NO: 1520406 - RNA, 16 nt, Human
uuugagaguucuaaau

SEQ ID NO: 1520407 - RNA, 16 nt, Human
uuugagaucagccugg

SEQ ID NO: 1520408 - RNA, 17 nt, Human
uuugagaucagccuggg

SEQ ID NO: 1520409 - RNA, 13 nt, Human
uuugaguucuaca

SEQ ID NO: 1520410 - RNA, 21 nt, Human
uguuucaaacauauauaacaa

SEQ ID NO: 1520411 - RNA, 22 nt, Human
uguuucaaacauauauaacaau

SEQ ID NO: 1520412 - RNA, 15 nt, Human
uguuucaaacuuuac

SEQ ID NO: 1520413 - RNA, 20 nt, Human
uguuuagauaauacaccacu

SEQ ID NO: 1520414 - RNA, 16 nt, Human
uguuuagauaauacac

SEQ ID NO: 1520415 - RNA, 19 nt, Human
uguuucaaacauauauaac

SEQ ID NO: 1520416 - RNA, 13 nt, Human
uguuugugauuga

SEQ ID NO: 1520417 - RNA, 13 nt, Human
uuaaaagaaugau

SEQ ID NO: 1520418 - RNA, 15 nt, Human
uuaaaagaugaaaau

SEQ ID NO: 1520419 - RNA, 18 nt, Human
uuaaaagaugaaaauauu

SEQ ID NO: 1520420 - RNA, 21 nt, Human
uuaaaauaccagccaguaaau

SEQ ID NO: 1520421 - RNA, 22 nt, Human
uuaaacugguauuuuaucuuug

SEQ ID NO: 1520422 - RNA, 13 nt, Human
uuaaacugguauu

SEQ ID NO: 1520423 - RNA, 19 nt, Human
uuaaacugguauuuuaucu

SEQ ID NO: 1520424 - RNA, 17 nt, Human
uuaaaagauacaguuac

SEQ ID NO: 1520425 - RNA, 14 nt, Human
uuaaaagauacagu

SEQ ID NO: 1520426 - RNA, 21 nt, Human
uuaaaagaauauuuuaacuuc

SEQ ID NO: 1520427 - RNA, 22 nt, Human
uuaaaagaauauuuuaacuucc

SEQ ID NO: 1520428 - RNA, 18 nt, Human
uguuuuaaggaugcuugu

SEQ ID NO: 1520429 - RNA, 22 nt, Human
uguuuuaagaggcagggucuca

SEQ ID NO: 1520430 - RNA, 19 nt, Human
uguuuuaaggaugcuugua

SEQ ID NO: 1520431 - RNA, 12 nt, Human
uuaacucaauau

SEQ ID NO: 1520432 - RNA, 16 nt, Human
uuaacuucacauauug

SEQ ID NO: 1520433 - RNA, 15 nt, Human
uuaacuuuuauaaac

SEQ ID NO: 1520434 - RNA, 17 nt, Human
uuaacuuuuauaaacuu

SEQ ID NO: 1520435 - RNA, 16 nt, Human
uuaacuuuuauaaacu

SEQ ID NO: 1520436 - RNA, 18 nt, Human
uuaacuuuuauaaacuuu

SEQ ID NO: 1520437 - RNA, 21 nt, Human
uuaagcagauggaaugcugug

SEQ ID NO: 1520438 - RNA, 17 nt, Human
uuaaccacuucagcuga

SEQ ID NO: 1520439 - RNA, 22 nt, Human
uuaaugucaauucuugccaaau

SEQ ID NO: 1520440 - RNA, 21 nt, Human
uuacaagcgugagccacugca

SEQ ID NO: 1520441 - RNA, 20 nt, Human
uuacaagcgugagccacugc

SEQ ID NO: 1520442 - RNA, 13 nt, Human
uuaauauauuucc

SEQ ID NO: 1520443 - RNA, 14 nt, Human
uuaauauauuucca

SEQ ID NO: 1520444 - RNA, 21 nt, Human
uuaaugauaaguaaaugcuag

SEQ ID NO: 1520445 - RNA, 18 nt, Human
uuaauauugauaugcuua

SEQ ID NO: 1520446 - RNA, 22 nt, Human
uuaauauugauaugcuuauaca

SEQ ID NO: 1520447 - RNA, 17 nt, Human
uuaagcuguuacugucu

SEQ ID NO: 1520448 - RNA, 19 nt, Human
uuacuauggcccuggccua

SEQ ID NO: 1520449 - RNA, 21 nt, Human
uuacuuaaaccgccaaggcug

SEQ ID NO: 1520450 - RNA, 11 nt, Human
uuacuucugcu

SEQ ID NO: 1520451 - RNA, 12 nt, Human
uuacuucugcua

SEQ ID NO: 1520452 - RNA, 23 nt, Human
uuacuucuuauacauuugauaaa

SEQ ID NO: 1520453 - RNA, 18 nt, Human
uuacuuagguguggggga

SEQ ID NO: 1520454 - RNA, 17 nt, Human
uuacuaguuucccuugc

SEQ ID NO: 1520455 - RNA, 16 nt, Human
uuacuaauagacaauu

SEQ ID NO: 1520456 - RNA, 14 nt, Human
uuacuaaguuuuua

SEQ ID NO: 1520457 - RNA, 13 nt, Human
uuacuaaguuuuu

SEQ ID NO: 1520458 - RNA, 19 nt, Human
uuagaaacacaacuauauu

SEQ ID NO: 1520459 - RNA, 15 nt, Human
uuagacagucccugc

SEQ ID NO: 1520460 - RNA, 14 nt, Human
uuacuuuguguuca

SEQ ID NO: 1520461 - RNA, 17 nt, Human
uuacuuuaaaaggagcc

SEQ ID NO: 1520462 - RNA, 18 nt, Human
uuacuuuaaaaggagcca

SEQ ID NO: 1520463 - RNA, 16 nt, Human
uuagacagucccugcc

SEQ ID NO: 1520464 - RNA, 17 nt, Human
uuagacagucccugcca

SEQ ID NO: 1520465 - RNA, 18 nt, Human
uuagacagucccugccaa

SEQ ID NO: 1520466 - RNA, 18 nt, Human
uuaggauguugaaaaagu

SEQ ID NO: 1520467 - RNA, 18 nt, Human
uuaguaugaggcauuugu

SEQ ID NO: 1520468 - RNA, 16 nt, Human
uuaguaugaggcauuu

SEQ ID NO: 1520469 - RNA, 12 nt, Human
uuagcuggaaaa

SEQ ID NO: 1520470 - RNA, 13 nt, Human
uuagcuggaaaag

SEQ ID NO: 1520471 - RNA, 13 nt, Human
uuagcuccccucc

SEQ ID NO: 1520472 - RNA, 14 nt, Human
uuagcuccccucca

SEQ ID NO: 1520473 - RNA, 18 nt, Human
uuagcuccccuccaaccu

SEQ ID NO: 1520474 - RNA, 20 nt, Human
uuagaugcaguucugaagaa

SEQ ID NO: 1520475 - RNA, 21 nt, Human
uuagaugcaguucugaagaag

SEQ ID NO: 1520476 - RNA, 22 nt, Human
uuagauaauacaccacuacauu

SEQ ID NO: 1520477 - RNA, 14 nt, Human
uuagaguugauacu

SEQ ID NO: 1520478 - RNA, 21 nt, Human
uuauggcacuaguauuucuau

SEQ ID NO: 1520479 - RNA, 16 nt, Human
uuauggaacacucuga

SEQ ID NO: 1520480 - RNA, 15 nt, Human
uuaugccuuuuauuu

SEQ ID NO: 1520481 - RNA, 22 nt, Human
uuaugcaugaaguaauaugcac

SEQ ID NO: 1520482 - RNA, 16 nt, Human
uuaugcaugaaguaau

SEQ ID NO: 1520483 - RNA, 16 nt, Human
uuaucuagauacugua

SEQ ID NO: 1520484 - RNA, 16 nt, Human
uuaguuccucauuagc

SEQ ID NO: 1520485 - RNA, 14 nt, Human
uuaguuccuugagu

SEQ ID NO: 1520486 - RNA, 17 nt, Human
uuaucuagauacuguau

SEQ ID NO: 1520487 - RNA, 16 nt, Human
uuauggccgggcaggg

SEQ ID NO: 1520488 - RNA, 17 nt, Human
uuauggcuauaggugcu

SEQ ID NO: 1520489 - RNA, 18 nt, Human
uuauggcuauaggugcua

SEQ ID NO: 1520490 - RNA, 16 nt, Human
uuauuacuguaagaaa

SEQ ID NO: 1520491 - RNA, 17 nt, Human
uuauuacuguaagaaaa

SEQ ID NO: 1520492 - RNA, 18 nt, Human
uuauuacuguaagaaaau

SEQ ID NO: 1520493 - RNA, 11 nt, Human
uuauucugcuc

SEQ ID NO: 1520494 - RNA, 15 nt, Human
uuauugcccacgcug

SEQ ID NO: 1520495 - RNA, 15 nt, Human
uuauugauaaguuca

SEQ ID NO: 1520496 - RNA, 19 nt, Human
uuauugauaaguucauaca

SEQ ID NO: 1520497 - RNA, 20 nt, Human
uuauugauaaguucauacau

SEQ ID NO: 1520498 - RNA, 20 nt, Human
uucagauaaucacaauacau

SEQ ID NO: 1520499 - RNA, 16 nt, Human
uucagacauagaauua

SEQ ID NO: 1520500 - RNA, 21 nt, Human
uucagacagcugccugggauc

SEQ ID NO: 1520501 - RNA, 20 nt, Human
uucagacauagaauuaacac

SEQ ID NO: 1520502 - RNA, 13 nt, Human
uucacucuccuug

SEQ ID NO: 1520503 - RNA, 15 nt, Human
uucacgugguccuaa

SEQ ID NO: 1520504 - RNA, 18 nt, Human
uucacggaagagccuugc

SEQ ID NO: 1520505 - RNA, 17 nt, Human
uucaauuuccaagagcu

SEQ ID NO: 1520506 - RNA, 19 nt, Human
uucaauuuccaagagcuga

SEQ ID NO: 1520507 - RNA, 13 nt, Human
uucaauaggaaaa

SEQ ID NO: 1520508 - RNA, 15 nt, Human
uucaauaggaaaaac

SEQ ID NO: 1520509 - RNA, 18 nt, Human
uucaauaggaaaaacuga

SEQ ID NO: 1520510 - RNA, 20 nt, Human
uucaauaggaaaaacugauu

SEQ ID NO: 1520511 - RNA, 17 nt, Human
uucaaauccuugaagau

SEQ ID NO: 1520512 - RNA, 17 nt, Human
uuauuuuaauaauguuu

SEQ ID NO: 1520513 - RNA, 15 nt, Human
uuauuuuaauaaugu

SEQ ID NO: 1520514 - RNA, 16 nt, Human
uuauuuuaauaauguu

SEQ ID NO: 1520515 - RNA, 15 nt, Human
uuauugucuagugaa

SEQ ID NO: 1520516 - RNA, 18 nt, Human
uuauugucaaagugguga

SEQ ID NO: 1520517 - RNA, 17 nt, Human
uuauugucaaaguggug

SEQ ID NO: 1520518 - RNA, 20 nt, Human
uuauugguuuuccaaucauu

SEQ ID NO: 1520519 - RNA, 13 nt, Human
uuccaaaauaauu

SEQ ID NO: 1520520 - RNA, 21 nt, Human
uuccaaaauaauuuuaagaaa

SEQ ID NO: 1520521 - RNA, 15 nt, Human
uuccaaauucugcuu

SEQ ID NO: 1520522 - RNA, 15 nt, Human
uucaugaaagauuca

SEQ ID NO: 1520523 - RNA, 17 nt, Human
uucaugaaagauucaau

SEQ ID NO: 1520524 - RNA, 21 nt, Human
uucaucuugaauuguaaggaa

SEQ ID NO: 1520525 - RNA, 11 nt, Human
uucaggaagcu

SEQ ID NO: 1520526 - RNA, 13 nt, Human
uucaggaagcuca

SEQ ID NO: 1520527 - RNA, 15 nt, Human
uucaggaagcucagg

SEQ ID NO: 1520528 - RNA, 19 nt, Human
uucaugcauagguuuagca

SEQ ID NO: 1520529 - RNA, 12 nt, Human
uuccaaaauaau

SEQ ID NO: 1520530 - RNA, 15 nt, Human
uucauuuccuguguc

SEQ ID NO: 1520531 - RNA, 16 nt, Human
uucauuuccugugucu

SEQ ID NO: 1520532 - RNA, 16 nt, Human
uucccauuugcuccuu

SEQ ID NO: 1520533 - RNA, 15 nt, Human
uuccccaggaggcca

SEQ ID NO: 1520534 - RNA, 16 nt, Human
uuccccaggaggccag

SEQ ID NO: 1520535 - RNA, 11 nt, Human
uucccucccuu

SEQ ID NO: 1520536 - RNA, 17 nt, Human
uucccucccuuccucuu

SEQ ID NO: 1520537 - RNA, 20 nt, Human
uucccucccuuccucuuucc

SEQ ID NO: 1520538 - RNA, 21 nt, Human
uuccccaggaggccagccuug

SEQ ID NO: 1520539 - RNA, 17 nt, Human
uuccccaggaggccagc

SEQ ID NO: 1520540 - RNA, 18 nt, Human
uuccccaggaggccagcc

SEQ ID NO: 1520541 - RNA, 19 nt, Human
uuccccaggaggccagccu

SEQ ID NO: 1520542 - RNA, 20 nt, Human
uuccccaggaggccagccuu

SEQ ID NO: 1520543 - RNA, 17 nt, Human
uucccuugaugaagaag

SEQ ID NO: 1520544 - RNA, 18 nt, Human
uucccuugaugaagaagu

SEQ ID NO: 1520545 - RNA, 20 nt, Human
uucccuuugacgccauccca

SEQ ID NO: 1520546 - RNA, 21 nt, Human
uucccuuugacgccaucccag

SEQ ID NO: 1520547 - RNA, 22 nt, Human
uucccuuugacgccaucccagc

SEQ ID NO: 1520548 - RNA, 13 nt, Human
uuccucauuagca

SEQ ID NO: 1520549 - RNA, 13 nt, Human
uucuaaagcugcc

SEQ ID NO: 1520550 - RNA, 17 nt, Human
uucuaaagcugccagcc

SEQ ID NO: 1520551 - RNA, 20 nt, Human
uucgggaggucgaggcagga

SEQ ID NO: 1520552 - RNA, 20 nt, Human
uuccuuggacucauuuuaaa

SEQ ID NO: 1520553 - RNA, 17 nt, Human
uuccugccaggcauggu

SEQ ID NO: 1520554 - RNA, 23 nt, Human
uuccugaugcuucuucagagacu

SEQ ID NO: 1520555 - RNA, 15 nt, Human
uuccugaugcuucuu

SEQ ID NO: 1520556 - RNA, 18 nt, Human
uuccugaugcuucuucag

SEQ ID NO: 1520557 - RNA, 19 nt, Human
uuccugaugcuucuucaga

SEQ ID NO: 1520558 - RNA, 15 nt, Human
uuccuggagcccaga

SEQ ID NO: 1520559 - RNA, 16 nt, Human
uuccuggagcccagag

SEQ ID NO: 1520560 - RNA, 14 nt, Human
uuccuggcacugcu

SEQ ID NO: 1520561 - RNA, 19 nt, Human
uuccuggcacugcuuccag

SEQ ID NO: 1520562 - RNA, 20 nt, Human
uuccuugaguugauucagcu

SEQ ID NO: 1520563 - RNA, 21 nt, Human
uggggccaguuggucccccuu

SEQ ID NO: 1520564 - RNA, 20 nt, Human
uggggccaguuggucccccu

SEQ ID NO: 1520565 - RNA, 15 nt, Human
uggggaugagaaagg

SEQ ID NO: 1520566 - RNA, 23 nt, Human
uggggaugagaaagguugaagca

SEQ ID NO: 1520567 - RNA, 16 nt, Human
ugggggaguggccaca

SEQ ID NO: 1520568 - RNA, 17 nt, Human
uggguacuuguggacac

SEQ ID NO: 1520569 - RNA, 18 nt, Human
uggguacuuguggacaca

SEQ ID NO: 1520570 - RNA, 14 nt, Human
ugggccuggcuccc

SEQ ID NO: 1520571 - RNA, 14 nt, Human
ugggauguuucugu

SEQ ID NO: 1520572 - RNA, 23 nt, Human
ugggcagagcagagaccaucccu

SEQ ID NO: 1520573 - RNA, 22 nt, Human
ugggauuacaagcgugagccac

SEQ ID NO: 1520574 - RNA, 22 nt, Human
ugggcagagcagagaccauccc

SEQ ID NO: 1520575 - RNA, 14 nt, Human
ugggauccuccagg

SEQ ID NO: 1520576 - RNA, 12 nt, Human
ugggauccucca

SEQ ID NO: 1520577 - RNA, 13 nt, Human
ugggauccuccag

SEQ ID NO: 1520578 - RNA, 14 nt, Human
ugggagugggccca

SEQ ID NO: 1520579 - RNA, 16 nt, Human
ugggagugggcccaau

SEQ ID NO: 1520580 - RNA, 16 nt, Human
uggcugggggccucag

SEQ ID NO: 1520581 - RNA, 17 nt, Human
uggcugggggccucagu

SEQ ID NO: 1520582 - RNA, 20 nt, Human
uggcugggggccucagugcc

SEQ ID NO: 1520583 - RNA, 13 nt, Human
ugguauguuuuca

SEQ ID NO: 1520584 - RNA, 21 nt, Human
ugguauguuuucaggcuagau

SEQ ID NO: 1520585 - RNA, 20 nt, Human
ugggucaccagacggggcug

SEQ ID NO: 1520586 - RNA, 21 nt, Human
ugggucaccagacggggcugg

SEQ ID NO: 1520587 - RNA, 19 nt, Human
ugggucaccagacggggcu

SEQ ID NO: 1520588 - RNA, 13 nt, Human
ugggucaaggaau

SEQ ID NO: 1520589 - RNA, 14 nt, Human
uggucccccuucca

SEQ ID NO: 1520590 - RNA, 22 nt, Human
uggucacaggaaguagaggagg

SEQ ID NO: 1520591 - RNA, 15 nt, Human
uggucccccuuccau

SEQ ID NO: 1520592 - RNA, 16 nt, Human
uggucccccuuccaug

SEQ ID NO: 1520593 - RNA, 18 nt, Human
uggucccccuuccaugga

SEQ ID NO: 1520594 - RNA, 23 nt, Human
uggucccccuuccauggacuuug

SEQ ID NO: 1520595 - RNA, 13 nt, Human
ugguccugcugca

SEQ ID NO: 1520596 - RNA, 15 nt, Human
ugguccugcugcagu

SEQ ID NO: 1520597 - RNA, 23 nt, Human
ugguccugcugcaguugccaguc

SEQ ID NO: 1520598 - RNA, 17 nt, Human
ugguccuaaucuucuga

SEQ ID NO: 1520599 - RNA, 19 nt, Human
ugguccuaaucuucugaac

SEQ ID NO: 1520600 - RNA, 17 nt, Human
uggucggaaaacaugcu

SEQ ID NO: 1520601 - RNA, 14 nt, Human
uggucggaaaacau

SEQ ID NO: 1520602 - RNA, 19 nt, Human
uggucuacacugugcugag

SEQ ID NO: 1520603 - RNA, 13 nt, Human
uggugaccucugc

SEQ ID NO: 1520604 - RNA, 14 nt, Human
uggugaccucugcc

SEQ ID NO: 1520605 - RNA, 15 nt, Human
uggucuacacugugc

SEQ ID NO: 1520606 - RNA, 16 nt, Human
uggucuacacugugcu

SEQ ID NO: 1520607 - RNA, 17 nt, Human
uggucuacacugugcug

SEQ ID NO: 1520608 - RNA, 18 nt, Human
uggucuacacugugcuga

SEQ ID NO: 1520609 - RNA, 21 nt, Human
uggugcaaugaccuuucaaua

SEQ ID NO: 1520610 - RNA, 19 nt, Human
uggugacuuuccucuuugg

SEQ ID NO: 1520611 - RNA, 15 nt, Human
uggugaccucugccu

SEQ ID NO: 1520612 - RNA, 16 nt, Human
uggugaccucugccug

SEQ ID NO: 1520613 - RNA, 17 nt, Human
uggugaccucugccuga

SEQ ID NO: 1520614 - RNA, 22 nt, Human
uggugaccucugccugaaguca

SEQ ID NO: 1520615 - RNA, 11 nt, Human
uggacugaggc

SEQ ID NO: 1520616 - RNA, 14 nt, Human
uggacugaggccug

SEQ ID NO: 1520617 - RNA, 15 nt, Human
uggacugaggccuga

SEQ ID NO: 1520618 - RNA, 16 nt, Human
uggacugaggccugag

SEQ ID NO: 1520619 - RNA, 20 nt, Human
uggcaauagucaaauugugu

SEQ ID NO: 1520620 - RNA, 15 nt, Human
uggcacuaguauuuc

SEQ ID NO: 1520621 - RNA, 22 nt, Human
uggcagaauggggugcaugaag

SEQ ID NO: 1520622 - RNA, 15 nt, Human
uggcacuauaaugua

SEQ ID NO: 1520623 - RNA, 16 nt, Human
uggcacuauaauguaa

SEQ ID NO: 1520624 - RNA, 16 nt, Human
uggcaaaaaggcagga

SEQ ID NO: 1520625 - RNA, 12 nt, Human
uggcaaaaaggc

SEQ ID NO: 1520626 - RNA, 20 nt, Human
uggaggagcucaggacacua

SEQ ID NO: 1520627 - RNA, 22 nt, Human
uggaggagcucaggacacuaau

SEQ ID NO: 1520628 - RNA, 21 nt, Human
uggaggaaggaaacccagcuc

SEQ ID NO: 1520629 - RNA, 23 nt, Human
uggaggaaggaaacccagcucug

SEQ ID NO: 1520630 - RNA, 11 nt, Human
uggcugcuuca

SEQ ID NO: 1520631 - RNA, 15 nt, Human
uggcugcuucaagga

SEQ ID NO: 1520632 - RNA, 16 nt, Human
uggcugcuucaaggau

SEQ ID NO: 1520633 - RNA, 22 nt, Human
uggcgcagcauauucaggaagc

SEQ ID NO: 1520634 - RNA, 23 nt, Human
uggcgcagcauauucaggaagcu

SEQ ID NO: 1520635 - RNA, 16 nt, Human
uggcgcugccccuggc

SEQ ID NO: 1520636 - RNA, 23 nt, Human
uggcgcugccccuggcagccccu

SEQ ID NO: 1520637 - RNA, 20 nt, Human
uggccccugcccggcugcgg

SEQ ID NO: 1520638 - RNA, 15 nt, Human
uggccccugcccggc

SEQ ID NO: 1520639 - RNA, 16 nt, Human
uggccccugcccggcu

SEQ ID NO: 1520640 - RNA, 15 nt, Human
uggccaggcuggucu

SEQ ID NO: 1520641 - RNA, 13 nt, Human
uggccaggcuggu

SEQ ID NO: 1520642 - RNA, 20 nt, Human
uggccagaugcaccagcccu

SEQ ID NO: 1520643 - RNA, 19 nt, Human
uggccagaugcaccagccc

SEQ ID NO: 1520644 - RNA, 15 nt, Human
uggcagaguugaaga

SEQ ID NO: 1520645 - RNA, 21 nt, Human
uggcagaguggauucuugaac

SEQ ID NO: 1520646 - RNA, 17 nt, Human
uggcagaguugaagaca

SEQ ID NO: 1520647 - RNA, 19 nt, Human
uggcagaguugaagacaga

SEQ ID NO: 1520648 - RNA, 17 nt, Human
uggccagaugcaccagc

SEQ ID NO: 1520649 - RNA, 18 nt, Human
uggccagaugcaccagcc

SEQ ID NO: 1520650 - RNA, 17 nt, Human
ugcggacagccacggcc

SEQ ID NO: 1520651 - RNA, 20 nt, Human
ugcuaacuagcuuggaaacu

SEQ ID NO: 1520652 - RNA, 22 nt, Human
ugcuaacuagcuuggaaacugg

SEQ ID NO: 1520653 - RNA, 21 nt, Human
ugcuacuguccuacccacccu

SEQ ID NO: 1520654 - RNA, 22 nt, Human
ugcuacuguccuacccacccuc

SEQ ID NO: 1520655 - RNA, 22 nt, Human
ugcuaggaacacuccuucacag

SEQ ID NO: 1520656 - RNA, 18 nt, Human
ugcuagaacucccuuuca

SEQ ID NO: 1520657 - RNA, 21 nt, Human
ugcuaggaacacuccuucaca

SEQ ID NO: 1520658 - RNA, 13 nt, Human
ugcuagaacuccc

SEQ ID NO: 1520659 - RNA, 14 nt, Human
ugcuagaacucccu

SEQ ID NO: 1520660 - RNA, 15 nt, Human
ugcuagaacucccuu

SEQ ID NO: 1520661 - RNA, 17 nt, Human
ugcuagaacucccuuuc

SEQ ID NO: 1520662 - RNA, 23 nt, Human
ugcucuccgaccagacaccuuga

SEQ ID NO: 1520663 - RNA, 16 nt, Human
ugcuguucaugaaaga

SEQ ID NO: 1520664 - RNA, 17 nt, Human
ugcuguucaugaaagau

SEQ ID NO: 1520665 - RNA, 11 nt, Human
ugcuguguuaa

SEQ ID NO: 1520666 - RNA, 18 nt, Human
ugcuguguuaaauaaacc

SEQ ID NO: 1520667 - RNA, 18 nt, Human
ugcuguaacuuucugaaa

SEQ ID NO: 1520668 - RNA, 20 nt, Human
ugcugggggggauuguaaaa

SEQ ID NO: 1520669 - RNA, 17 nt, Human
ugcugggcuugucugua

SEQ ID NO: 1520670 - RNA, 13 nt, Human
ugcuggguguggc

SEQ ID NO: 1520671 - RNA, 23 nt, Human
ugcugcauuuaaaagauacaguu

SEQ ID NO: 1520672 - RNA, 19 nt, Human
ugcugcauuuaaaagauac

SEQ ID NO: 1520673 - RNA, 18 nt, Human
ugcugcauuuaaaagaua

SEQ ID NO: 1520674 - RNA, 17 nt, Human
ugcugcauuuaaaagau

SEQ ID NO: 1520675 - RNA, 20 nt, Human
ugcugggauuacagguguga

SEQ ID NO: 1520676 - RNA, 19 nt, Human
ugcugcuugaggcaacuca

SEQ ID NO: 1520677 - RNA, 12 nt, Human
ugcugcuugagg

SEQ ID NO: 1520678 - RNA, 18 nt, Human
ugcccaggcuggcgugca

SEQ ID NO: 1520679 - RNA, 19 nt, Human
ugcccaggcuggcgugcag

SEQ ID NO: 1520680 - RNA, 20 nt, Human
ugcccaggcuggcgugcagu

SEQ ID NO: 1520681 - RNA, 17 nt, Human
ugccccuggcagccccu

SEQ ID NO: 1520682 - RNA, 12 nt, Human
ugcccggcugcg

SEQ ID NO: 1520683 - RNA, 14 nt, Human
ugcccggcugcgga

SEQ ID NO: 1520684 - RNA, 16 nt, Human
ugccccuggcagcccc

SEQ ID NO: 1520685 - RNA, 15 nt, Human
ugccucaagagaagg

SEQ ID NO: 1520686 - RNA, 14 nt, Human
ugccucaagagaag

SEQ ID NO: 1520687 - RNA, 16 nt, Human
ugccuccucaggagcc

SEQ ID NO: 1520688 - RNA, 13 nt, Human
ugccuccucagga

SEQ ID NO: 1520689 - RNA, 15 nt, Human
ugcccugcccaccug

SEQ ID NO: 1520690 - RNA, 16 nt, Human
ugcccugcccaccugg

SEQ ID NO: 1520691 - RNA, 20 nt, Human
ugcccugcccaccuggccuc

SEQ ID NO: 1520692 - RNA, 21 nt, Human
ugcccugcccaccuggccucu

SEQ ID NO: 1520693 - RNA, 23 nt, Human
ugcccugugaguacuacaguccu

SEQ ID NO: 1520694 - RNA, 16 nt, Human
ugccacuaaauugaca

SEQ ID NO: 1520695 - RNA, 20 nt, Human
ugccaggaagccagcaggcu

SEQ ID NO: 1520696 - RNA, 22 nt, Human
ugccaggaagccagcaggcucu

SEQ ID NO: 1520697 - RNA, 14 nt, Human
ugccaggcauggug

SEQ ID NO: 1520698 - RNA, 20 nt, Human
ugccacuaaauugacacuua

SEQ ID NO: 1520699 - RNA, 23 nt, Human
ugcauuuggugguuucagaaaug

SEQ ID NO: 1520700 - RNA, 21 nt, Human
ugcauuuggugguuucagaaa

SEQ ID NO: 1520701 - RNA, 17 nt, Human
ugcaugguuuagaaagc

SEQ ID NO: 1520702 - RNA, 13 nt, Human
ugcaucagcugcu

SEQ ID NO: 1520703 - RNA, 19 nt, Human
ugcaucagcugcugaaaca

SEQ ID NO: 1520704 - RNA, 22 nt, Human
ugcaucaauuuuucuuauuuca

SEQ ID NO: 1520705 - RNA, 12 nt, Human
ugcaguucugaa

SEQ ID NO: 1520706 - RNA, 14 nt, Human
ugcaguucugaaga

SEQ ID NO: 1520707 - RNA, 16 nt, Human
ugcaguugccagucac

SEQ ID NO: 1520708 - RNA, 16 nt, Human
ugcauagguuuagcag

SEQ ID NO: 1520709 - RNA, 21 nt, Human
ugcaguuacacuaaaagguga

SEQ ID NO: 1520710 - RNA, 21 nt, Human
ugcaguggugcgaucuggguu

SEQ ID NO: 1520711 - RNA, 13 nt, Human
ugcagggaguccg

SEQ ID NO: 1520712 - RNA, 18 nt, Human
ugacagaauauguuucaa

SEQ ID NO: 1520713 - RNA, 22 nt, Human
ugacagagugagacucugucuc

SEQ ID NO: 1520714 - RNA, 19 nt, Human
ugacagagugagacucugu

SEQ ID NO: 1520715 - RNA, 18 nt, Human
ugacagaggcagccccau

SEQ ID NO: 1520716 - RNA, 23 nt, Human
ugacagaggcagccccauucugc

SEQ ID NO: 1520717 - RNA, 14 nt, Human
ugacagagugagac

SEQ ID NO: 1520718 - RNA, 17 nt, Human
ugacagagugagacucu

SEQ ID NO: 1520719 - RNA, 20 nt, Human
ugacagacacaggcccggcu

SEQ ID NO: 1520720 - RNA, 23 nt, Human
ugacagacacaggcccggcucca

SEQ ID NO: 1520721 - RNA, 14 nt, Human
ugacagaggcagcc

SEQ ID NO: 1520722 - RNA, 15 nt, Human
ugacagaggcagccc

SEQ ID NO: 1520723 - RNA, 16 nt, Human
ugacagaggcagcccc

SEQ ID NO: 1520724 - RNA, 17 nt, Human
ugacagaggcagcccca

SEQ ID NO: 1520725 - RNA, 12 nt, Human
ugacaagcucac

SEQ ID NO: 1520726 - RNA, 15 nt, Human
ugacaagcucacaga

SEQ ID NO: 1520727 - RNA, 20 nt, Human
ugacaagcucacagaccuuu

SEQ ID NO: 1520728 - RNA, 18 nt, Human
ugacaaggauugcuacug

SEQ ID NO: 1520729 - RNA, 13 nt, Human
ugacagaacacug

SEQ ID NO: 1520730 - RNA, 14 nt, Human
ugacagaacacugu

SEQ ID NO: 1520731 - RNA, 15 nt, Human
ugacagaacacuguc

SEQ ID NO: 1520732 - RNA, 16 nt, Human
ugacagaacacugucu

SEQ ID NO: 1520733 - RNA, 17 nt, Human
ugacagaacacugucuu

SEQ ID NO: 1520734 - RNA, 21 nt, Human
ugacagaacacugucuugaag

SEQ ID NO: 1520735 - RNA, 16 nt, Human
ugacagaauauguuuc

SEQ ID NO: 1520736 - RNA, 16 nt, Human
ugacaugggacauuug

SEQ ID NO: 1520737 - RNA, 17 nt, Human
ugacaugggacauuugc

SEQ ID NO: 1520738 - RNA, 18 nt, Human
ugacaugggacauuugcu

SEQ ID NO: 1520739 - RNA, 13 nt, Human
ugacaugucuuuu

SEQ ID NO: 1520740 - RNA, 15 nt, Human
ugacaugucuuuucu

SEQ ID NO: 1520741 - RNA, 20 nt, Human
ugaccacugcagaagacagu

SEQ ID NO: 1520742 - RNA, 19 nt, Human
ugaccagcaccaucucucc

SEQ ID NO: 1520743 - RNA, 20 nt, Human
ugaccagcaccaucucuccu

SEQ ID NO: 1520744 - RNA, 16 nt, Human
ugaccauucuccaccu

SEQ ID NO: 1520745 - RNA, 17 nt, Human
ugaccauucuccaccug

SEQ ID NO: 1520746 - RNA, 18 nt, Human
ugaccauucuccaccugc

SEQ ID NO: 1520747 - RNA, 19 nt, Human
ugaccauucuccaccugcc

SEQ ID NO: 1520748 - RNA, 13 nt, Human
ugaccgugaggcc

SEQ ID NO: 1520749 - RNA, 14 nt, Human
ugaccgugaggcca

SEQ ID NO: 1520750 - RNA, 16 nt, Human
ugaccgugaggccaga

SEQ ID NO: 1520751 - RNA, 20 nt, Human
ugaccgugaggccagagaca

SEQ ID NO: 1520752 - RNA, 15 nt, Human
ugaagauacugaaau

SEQ ID NO: 1520753 - RNA, 16 nt, Human
ugaagauacugaaaua

SEQ ID NO: 1520754 - RNA, 18 nt, Human
ugaagauacugaaauaaa

SEQ ID NO: 1520755 - RNA, 14 nt, Human
ugaagauacugaaa

SEQ ID NO: 1520756 - RNA, 17 nt, Human
ugaacuccuggccucaa

SEQ ID NO: 1520757 - RNA, 15 nt, Human
ugaaggccccgccca

SEQ ID NO: 1520758 - RNA, 16 nt, Human
ugaaggccccgcccag

SEQ ID NO: 1520759 - RNA, 22 nt, Human
ugaaggacauugcggacagcca

SEQ ID NO: 1520760 - RNA, 19 nt, Human
ugaaggacauugcggacag

SEQ ID NO: 1520761 - RNA, 20 nt, Human
ugaaggacauugcggacagc

SEQ ID NO: 1520762 - RNA, 13 nt, Human
ugaaguccaagca

SEQ ID NO: 1520763 - RNA, 11 nt, Human
ugaaguccaag

SEQ ID NO: 1520764 - RNA, 17 nt, Human
ugaaggccccgcccagg

SEQ ID NO: 1520765 - RNA, 15 nt, Human
ugaauuacauuugua

SEQ ID NO: 1520766 - RNA, 16 nt, Human
ugaauuacauuuguau

SEQ ID NO: 1520767 - RNA, 18 nt, Human
ugaauuacauuuguauaa

SEQ ID NO: 1520768 - RNA, 13 nt, Human
ugaauuaugaaac

SEQ ID NO: 1520769 - RNA, 15 nt, Human
ugaauuaugaaacuu

SEQ ID NO: 1520770 - RNA, 17 nt, Human
ugaauuaugaaacuuuu

SEQ ID NO: 1520771 - RNA, 23 nt, Human
ugaaugaugauccuaggcauuug

SEQ ID NO: 1520772 - RNA, 19 nt, Human
ucuuuccacagaagcucca

SEQ ID NO: 1520773 - RNA, 17 nt, Human
ucuuuccaaaguacacu

SEQ ID NO: 1520774 - RNA, 14 nt, Human
ucuuuccaaaguac

SEQ ID NO: 1520775 - RNA, 13 nt, Human
ucuuuccaaagua

SEQ ID NO: 1520776 - RNA, 16 nt, Human
ucuuucagccaagaau

SEQ ID NO: 1520777 - RNA, 19 nt, Human
ucuuucagccaagaauucu

SEQ ID NO: 1520778 - RNA, 20 nt, Human
ucuuucagccaagaauucuu

SEQ ID NO: 1520779 - RNA, 21 nt, Human
ucuuucagccaagaauucuua

SEQ ID NO: 1520780 - RNA, 12 nt, Human
ucuuugccaagu

SEQ ID NO: 1520781 - RNA, 15 nt, Human
ucuuugauucuccuu

SEQ ID NO: 1520782 - RNA, 16 nt, Human
ucuuugauucuccuuc

SEQ ID NO: 1520783 - RNA, 19 nt, Human
ucuuugauucuccuucagc

SEQ ID NO: 1520784 - RNA, 20 nt, Human
ucuuugauucuccuucagcc

SEQ ID NO: 1520785 - RNA, 23 nt, Human
ucuuugauucuccuucagcccuc

SEQ ID NO: 1520786 - RNA, 17 nt, Human
ucuuuggacacucacac

SEQ ID NO: 1520787 - RNA, 16 nt, Human
ucucccuucauccuuc

SEQ ID NO: 1520788 - RNA, 20 nt, Human
ucuccucugcugcuggcugg

SEQ ID NO: 1520789 - RNA, 15 nt, Human
ucuugcaugaggcua

SEQ ID NO: 1520790 - RNA, 16 nt, Human
ucuuguguguuuauug

SEQ ID NO: 1520791 - RNA, 21 nt, Human
ucuuguguguuuauugucaaa

SEQ ID NO: 1520792 - RNA, 23 nt, Human
ucuuucacccuuuucuguuugcu

SEQ ID NO: 1520793 - RNA, 16 nt, Human
ugaaauauugacuuuu

SEQ ID NO: 1520794 - RNA, 19 nt, Human
ugaacaguuguguuugaag

SEQ ID NO: 1520795 - RNA, 22 nt, Human
ugaaccaagaacuuuccaggaa

SEQ ID NO: 1520796 - RNA, 19 nt, Human
ugaaccacaucuugcucug

SEQ ID NO: 1520797 - RNA, 23 nt, Human
ugaaccacaucuugcucugcuga

SEQ ID NO: 1520798 - RNA, 17 nt, Human
ugaaccaccacacccag

SEQ ID NO: 1520799 - RNA, 20 nt, Human
ugaaccaccacacccagccc

SEQ ID NO: 1520800 - RNA, 21 nt, Human
ugaaccaccacacccagccca

SEQ ID NO: 1520801 - RNA, 20 nt, Human
ugaaaagcuccauuuuuagu

SEQ ID NO: 1520802 - RNA, 13 nt, Human
ugaaaauuuugau

SEQ ID NO: 1520803 - RNA, 21 nt, Human
ugaaaauuuugauguuuuaag

SEQ ID NO: 1520804 - RNA, 19 nt, Human
ugaaaauuuugauguuuua

SEQ ID NO: 1520805 - RNA, 22 nt, Human
ugaaacaacaaauaggaauugu

SEQ ID NO: 1520806 - RNA, 14 nt, Human
ugaaacauuuuguc

SEQ ID NO: 1520807 - RNA, 16 nt, Human
ugaaagguacuucaaa

SEQ ID NO: 1520808 - RNA, 15 nt, Human
ugaaagguacuucaa

SEQ ID NO: 1520809 - RNA, 15 nt, Human
ugaaagggcccagag

SEQ ID NO: 1520810 - RNA, 23 nt, Human
ugaaagggaguauuacaaaaaca

SEQ ID NO: 1520811 - RNA, 13 nt, Human
ugaaagggcccag

SEQ ID NO: 1520812 - RNA, 18 nt, Human
ugaaacccugucucuacu

SEQ ID NO: 1520813 - RNA, 18 nt, Human
ugaaagaggcagcuugaa

SEQ ID NO: 1520814 - RNA, 18 nt, Human
ugaaagcccugagcuuuc

SEQ ID NO: 1520815 - RNA, 13 nt, Human
ugagcugggauga

SEQ ID NO: 1520816 - RNA, 23 nt, Human
ugaggcauuuguuugaacugaua

SEQ ID NO: 1520817 - RNA, 23 nt, Human
ugaggcuagugugguguuuccug

SEQ ID NO: 1520818 - RNA, 21 nt, Human
ugaggcauuuguuugaacuga

SEQ ID NO: 1520819 - RNA, 17 nt, Human
ugaggcuaguguggugu

SEQ ID NO: 1520820 - RNA, 20 nt, Human
ugaggcauuuguuugaacug

SEQ ID NO: 1520821 - RNA, 19 nt, Human
ugaggcauuuguuugaacu

SEQ ID NO: 1520822 - RNA, 12 nt, Human
ugaggcauuugu

SEQ ID NO: 1520823 - RNA, 15 nt, Human
ugaggcucugcccuu

SEQ ID NO: 1520824 - RNA, 17 nt, Human
ugagggaacagagaggu

SEQ ID NO: 1520825 - RNA, 18 nt, Human
ugaggcuccacuuggucu

SEQ ID NO: 1520826 - RNA, 20 nt, Human
ugaggcuccacuuggucugu

SEQ ID NO: 1520827 - RNA, 13 nt, Human
ugaggcucugccc

SEQ ID NO: 1520828 - RNA, 14 nt, Human
ugaggcucugcccu

SEQ ID NO: 1520829 - RNA, 12 nt, Human
ugaggugggagg

SEQ ID NO: 1520830 - RNA, 13 nt, Human
ugaggugggagga

SEQ ID NO: 1520831 - RNA, 16 nt, Human
ugauaacuggaaacuu

SEQ ID NO: 1520832 - RNA, 14 nt, Human
ugagugagcaugcc

SEQ ID NO: 1520833 - RNA, 16 nt, Human
ugaguugauagcacag

SEQ ID NO: 1520834 - RNA, 20 nt, Human
ugaguugauagcacagaccc

SEQ ID NO: 1520835 - RNA, 23 nt, Human
ugaguugacuugacagaacacug

SEQ ID NO: 1520836 - RNA, 21 nt, Human
ugaguugauagcacagacccu

SEQ ID NO: 1520837 - RNA, 19 nt, Human
ugagucgaggacagggagg

SEQ ID NO: 1520838 - RNA, 21 nt, Human
ugaggugggaggaucucuuga

SEQ ID NO: 1520839 - RNA, 19 nt, Human
ugaguccagaaguuugaga

SEQ ID NO: 1520840 - RNA, 13 nt, Human
ugagucugaaggc

SEQ ID NO: 1520841 - RNA, 15 nt, Human
ugagucugaaggcug

SEQ ID NO: 1520842 - RNA, 17 nt, Human
ugagucugaaggcuggg

SEQ ID NO: 1520843 - RNA, 18 nt, Human
ugagucugaaggcugggu

SEQ ID NO: 1520844 - RNA, 23 nt, Human
ugagacguuuuuggaagaguagu

SEQ ID NO: 1520845 - RNA, 12 nt, Human
ugagacucgaga

SEQ ID NO: 1520846 - RNA, 15 nt, Human
ugagacucgagaacu

SEQ ID NO: 1520847 - RNA, 16 nt, Human
ugagacucgagaacuu

SEQ ID NO: 1520848 - RNA, 19 nt, Human
ugagacucgcgacaaugca

SEQ ID NO: 1520849 - RNA, 20 nt, Human
ugaccucaggugauccaccc

SEQ ID NO: 1520850 - RNA, 21 nt, Human
ugaccucaggugauccaccca

SEQ ID NO: 1520851 - RNA, 17 nt, Human
ugagacucgagaacuuu

SEQ ID NO: 1520852 - RNA, 16 nt, Human
ugagagugaacaaauu

SEQ ID NO: 1520853 - RNA, 20 nt, Human
ugagacucgcgacaaugcaa

SEQ ID NO: 1520854 - RNA, 21 nt, Human
ugagacucgcgacaaugcaaa

SEQ ID NO: 1520855 - RNA, 22 nt, Human
ugagacucgcgacaaugcaaac

SEQ ID NO: 1520856 - RNA, 23 nt, Human
ugagacucgcgacaaugcaaacc

SEQ ID NO: 1520857 - RNA, 15 nt, Human
ugagaucaaaacggu

SEQ ID NO: 1520858 - RNA, 14 nt, Human
ugagaucagccugg

SEQ ID NO: 1520859 - RNA, 15 nt, Human
ugagaucagccuggg

SEQ ID NO: 1520860 - RNA, 13 nt, Human
ugagcagggcuca

SEQ ID NO: 1520861 - RNA, 14 nt, Human
ugagcagggcucag

SEQ ID NO: 1520862 - RNA, 15 nt, Human
ugagcagggcucagc

SEQ ID NO: 1520863 - RNA, 19 nt, Human
ugagccgagaucacgccac

SEQ ID NO: 1520864 - RNA, 21 nt, Human
ugagccgagaucacgccacug

SEQ ID NO: 1520865 - RNA, 17 nt, Human
ugagccucagcauccug

SEQ ID NO: 1520866 - RNA, 22 nt, Human
ugagccucagcauccuggcacc

SEQ ID NO: 1520867 - RNA, 18 nt, Human
ugagccucagcauccugg

SEQ ID NO: 1520868 - RNA, 21 nt, Human
ugagccucagcauccuggcac

SEQ ID NO: 1520869 - RNA, 18 nt, Human
ugagcaucaggccaggcc

SEQ ID NO: 1520870 - RNA, 19 nt, Human
ugagcaucaggccaggccc

SEQ ID NO: 1520871 - RNA, 20 nt, Human
ugagcaucaggccaggcccu

SEQ ID NO: 1520872 - RNA, 19 nt, Human
ugagcagggcucagcgggg

SEQ ID NO: 1520873 - RNA, 16 nt, Human
ugagcagggcucagcg

SEQ ID NO: 1520874 - RNA, 17 nt, Human
ugagcagggcucagcgg

SEQ ID NO: 1520875 - RNA, 13 nt, Human
ugauuauauguca

SEQ ID NO: 1520876 - RNA, 17 nt, Human
ugauuaugaauuacauu

SEQ ID NO: 1520877 - RNA, 19 nt, Human
ugauuaugaauuacauuug

SEQ ID NO: 1520878 - RNA, 22 nt, Human
ugauguuuagaaacacaacuau

SEQ ID NO: 1520879 - RNA, 20 nt, Human
ugauguucuuucacccuuuu

SEQ ID NO: 1520880 - RNA, 21 nt, Human
ugauuaugaauuacauuugua

SEQ ID NO: 1520881 - RNA, 22 nt, Human
ugauuaugaauuacauuuguau

SEQ ID NO: 1520882 - RNA, 20 nt, Human
ugauucaacagguuuuccug

SEQ ID NO: 1520883 - RNA, 13 nt, Human
ugauucagacagc

SEQ ID NO: 1520884 - RNA, 14 nt, Human
ugauucagacagcu

SEQ ID NO: 1520885 - RNA, 15 nt, Human
ugauucagacagcug

SEQ ID NO: 1520886 - RNA, 16 nt, Human
ugauucagacagcugc

SEQ ID NO: 1520887 - RNA, 16 nt, Human
ugauugugucucuugg

SEQ ID NO: 1520888 - RNA, 13 nt, Human
ugauuggaggggg

SEQ ID NO: 1520889 - RNA, 21 nt, Human
ugauuggaggggggagguggg

SEQ ID NO: 1520890 - RNA, 23 nt, Human
ugauucuccuucagcccucaccc

SEQ ID NO: 1520891 - RNA, 18 nt, Human
ugauucagacagcugccu

SEQ ID NO: 1520892 - RNA, 19 nt, Human
ugauucagacagcugccug

SEQ ID NO: 1520893 - RNA, 20 nt, Human
ugauucagacagcugccugg

SEQ ID NO: 1520894 - RNA, 21 nt, Human
ugauucagacagcugccuggg

SEQ ID NO: 1520895 - RNA, 23 nt, Human
ugauucagacagcugccugggau

SEQ ID NO: 1520896 - RNA, 21 nt, Human
ugauucuccugccucagccuc

SEQ ID NO: 1520897 - RNA, 12 nt, Human
ugauucuccuuc

SEQ ID NO: 1520898 - RNA, 13 nt, Human
ugauucuccuuca

SEQ ID NO: 1520899 - RNA, 14 nt, Human
ugauucuccuucag

SEQ ID NO: 1520900 - RNA, 16 nt, Human
ugauucuccuucagcc

SEQ ID NO: 1520901 - RNA, 18 nt, Human
ugauucuccuucagcccu

SEQ ID NO: 1520902 - RNA, 19 nt, Human
ugauucuccuucagcccuc

SEQ ID NO: 1520903 - RNA, 21 nt, Human
ugauucuccuucagcccucac

SEQ ID NO: 1520904 - RNA, 16 nt, Human
ugaugcuucuucagag

SEQ ID NO: 1520905 - RNA, 17 nt, Human
ugaugcuucuucagaga

SEQ ID NO: 1520906 - RNA, 18 nt, Human
ugaugcuucuucagagac

SEQ ID NO: 1520907 - RNA, 14 nt, Human
ugauguguuuauuu

SEQ ID NO: 1520908 - RNA, 18 nt, Human
ugauguguuuauuuauag

SEQ ID NO: 1520909 - RNA, 16 nt, Human
ugauguguuaucucuu

SEQ ID NO: 1520910 - RNA, 18 nt, Human
ugaugugggucaaggaau

SEQ ID NO: 1520911 - RNA, 20 nt, Human
ugaugcuacaggauuugaaa

SEQ ID NO: 1520912 - RNA, 23 nt, Human
ugaugcuacaggauuugaaauug

SEQ ID NO: 1520913 - RNA, 18 nt, Human
ugaucuuugcagacaggc

SEQ ID NO: 1520914 - RNA, 16 nt, Human
ugaucuuugcagacag

SEQ ID NO: 1520915 - RNA, 17 nt, Human
ugaucuuuaaaauacac

SEQ ID NO: 1520916 - RNA, 17 nt, Human
ugaucagcuuauugucu

SEQ ID NO: 1520917 - RNA, 24 nt, Human
ugaucagcuuauugucuagugaaa

SEQ ID NO: 1520918 - RNA, 20 nt, Human
ugauaagaaccuuuugagug

SEQ ID NO: 1520919 - RNA, 13 nt, Human
ugauagcacagac

SEQ ID NO: 1520920 - RNA, 14 nt, Human
ugauagcacagacc

SEQ ID NO: 1520921 - RNA, 13 nt, Human
ugauccaagcugg

SEQ ID NO: 1520922 - RNA, 14 nt, Human
ugauccaagcuggu

SEQ ID NO: 1520923 - RNA, 15 nt, Human
ugauccaagcugguc

SEQ ID NO: 1520924 - RNA, 17 nt, Human
ugauccaagcugguccc

SEQ ID NO: 1520925 - RNA, 20 nt, Human
ugaucuucuuuauaauucua

SEQ ID NO: 1520926 - RNA, 14 nt, Human
ugaucuuuaaaaua

SEQ ID NO: 1520927 - RNA, 17 nt, Human
ugaucucucgugauuga

SEQ ID NO: 1520928 - RNA, 17 nt, Human
ugauccacccaccucag

SEQ ID NO: 1520929 - RNA, 18 nt, Human
ugauccacccaccucagc

SEQ ID NO: 1520930 - RNA, 19 nt, Human
ugauccacccaccucagcc

SEQ ID NO: 1520931 - RNA, 22 nt, Human
ucuccagccccuggaugcagcc

SEQ ID NO: 1520932 - RNA, 16 nt, Human
ucuccagccccuggau

SEQ ID NO: 1520933 - RNA, 18 nt, Human
ucuccagccccuggaugc

SEQ ID NO: 1520934 - RNA, 12 nt, Human
ucuccagccccu

SEQ ID NO: 1520935 - RNA, 13 nt, Human
ucuccagccccug

SEQ ID NO: 1520936 - RNA, 14 nt, Human
ucuccagccccugg

SEQ ID NO: 1520937 - RNA, 15 nt, Human
ucuccagccccugga

SEQ ID NO: 1520938 - RNA, 16 nt, Human
ucuccccugcccccag

SEQ ID NO: 1520939 - RNA, 12 nt, Human
ucuccccugccc

SEQ ID NO: 1520940 - RNA, 14 nt, Human
ucuccccugccccc

SEQ ID NO: 1520941 - RNA, 15 nt, Human
ucuccccugccccca

SEQ ID NO: 1520942 - RNA, 18 nt, Human
ucucccucagucuggccc

SEQ ID NO: 1520943 - RNA, 23 nt, Human
ucucccucagucuggcccuuccu

SEQ ID NO: 1520944 - RNA, 12 nt, Human
ucucccccaccc

SEQ ID NO: 1520945 - RNA, 15 nt, Human
ucucccccacccccu

SEQ ID NO: 1520946 - RNA, 11 nt, Human
ucuccaggcug

SEQ ID NO: 1520947 - RNA, 12 nt, Human
ucucccccagcc

SEQ ID NO: 1520948 - RNA, 19 nt, Human
ucucccccacccccucccc

SEQ ID NO: 1520949 - RNA, 20 nt, Human
ucucccccacccccuccccg

SEQ ID NO: 1520950 - RNA, 13 nt, Human
ucucccccagccc

SEQ ID NO: 1520951 - RNA, 23 nt, Human
ucucaguccaugaagauguagag

SEQ ID NO: 1520952 - RNA, 23 nt, Human
ucuaugggacucaaugcacugac

SEQ ID NO: 1520953 - RNA, 19 nt, Human
ucuaugggacucaaugcac

SEQ ID NO: 1520954 - RNA, 12 nt, Human
ucuaugggacuc

SEQ ID NO: 1520955 - RNA, 13 nt, Human
ucuaugggacuca

SEQ ID NO: 1520956 - RNA, 13 nt, Human
ucucaucuuucuu

SEQ ID NO: 1520957 - RNA, 22 nt, Human
ucucaucuuucuugaucaacau

SEQ ID NO: 1520958 - RNA, 12 nt, Human
ucucaucuuucu

SEQ ID NO: 1520959 - RNA, 20 nt, Human
ucucaucucuuagcuccccu

SEQ ID NO: 1520960 - RNA, 17 nt, Human
ucucaucucuuagcucc

SEQ ID NO: 1520961 - RNA, 16 nt, Human
ucucauacucaccuca

SEQ ID NO: 1520962 - RNA, 18 nt, Human
ucucauacucaccucacc

SEQ ID NO: 1520963 - RNA, 13 nt, Human
ucuccacccugcu

SEQ ID NO: 1520964 - RNA, 17 nt, Human
ucuccacccugcucucc

SEQ ID NO: 1520965 - RNA, 14 nt, Human
ucuccacccugcuc

SEQ ID NO: 1520966 - RNA, 16 nt, Human
ucuccacccugcucuc

SEQ ID NO: 1520967 - RNA, 22 nt, Human
ucuccaccugccagggacagag

SEQ ID NO: 1520968 - RNA, 17 nt, Human
ucuccaccugccaggga

SEQ ID NO: 1520969 - RNA, 19 nt, Human
ucuccaccugccagggaca

SEQ ID NO: 1520970 - RNA, 14 nt, Human
ucuccaccugccag

SEQ ID NO: 1520971 - RNA, 15 nt, Human
ucuccaccugccagg

SEQ ID NO: 1520972 - RNA, 16 nt, Human
ucuccaccugccaggg

SEQ ID NO: 1520973 - RNA, 17 nt, Human
ucuacacuaagagagaa

SEQ ID NO: 1520974 - RNA, 16 nt, Human
ucuacacauacaugua

SEQ ID NO: 1520975 - RNA, 15 nt, Human
ucuacagaggccaug

SEQ ID NO: 1520976 - RNA, 16 nt, Human
ucuacagaggccaugg

SEQ ID NO: 1520977 - RNA, 12 nt, Human
ucuacuaaaaau

SEQ ID NO: 1520978 - RNA, 14 nt, Human
ucuaccuuccugca

SEQ ID NO: 1520979 - RNA, 17 nt, Human
ucuaugacacaugcaag

SEQ ID NO: 1520980 - RNA, 14 nt, Human
ucuaugacacaugc

SEQ ID NO: 1520981 - RNA, 16 nt, Human
ucuaucagauuaaguu

SEQ ID NO: 1520982 - RNA, 15 nt, Human
ucuaggaagacuuug

SEQ ID NO: 1520983 - RNA, 16 nt, Human
ucuaggaagacuuugg

SEQ ID NO: 1520984 - RNA, 19 nt, Human
ucuaggaagacuuuggaaa

SEQ ID NO: 1520985 - RNA, 21 nt, Human
ucuaggaagacuuuggaaaga

SEQ ID NO: 1520986 - RNA, 20 nt, Human
ucuaaaggcuaccuuuguau

SEQ ID NO: 1520987 - RNA, 19 nt, Human
ucuaaaggcuaccuuugua

SEQ ID NO: 1520988 - RNA, 17 nt, Human
ucuaaaggcuaccuuug

SEQ ID NO: 1520989 - RNA, 18 nt, Human
ucuaaaggcuaccuuugu

SEQ ID NO: 1520990 - RNA, 12 nt, Human
ucggagaagagc

SEQ ID NO: 1520991 - RNA, 14 nt, Human
ucggagaagagcug

SEQ ID NO: 1520992 - RNA, 16 nt, Human
ucggagaagagcuguu

SEQ ID NO: 1520993 - RNA, 13 nt, Human
ucgugacaacacu

SEQ ID NO: 1520994 - RNA, 16 nt, Human
ucggauuuggggugga

SEQ ID NO: 1520995 - RNA, 17 nt, Human
uccuggcaauagucaaa

SEQ ID NO: 1520996 - RNA, 23 nt, Human
uccuggcacccggccccugcugg

SEQ ID NO: 1520997 - RNA, 13 nt, Human
uccuggcacugcu

SEQ ID NO: 1520998 - RNA, 16 nt, Human
uccuggcacugcuucc

SEQ ID NO: 1520999 - RNA, 17 nt, Human
uccuggcacugcuucca

SEQ ID NO: 1521000 - RNA, 12 nt, Human
uccuggccucaa

SEQ ID NO: 1521001 - RNA, 11 nt, Human
uccuguagccc

SEQ ID NO: 1521002 - RNA, 13 nt, Human
uccuguagcccua

SEQ ID NO: 1521003 - RNA, 14 nt, Human
uccuggaguucugg

SEQ ID NO: 1521004 - RNA, 15 nt, Human
uccuggagcccagag

SEQ ID NO: 1521005 - RNA, 18 nt, Human
uccuggagcccagaggag

SEQ ID NO: 1521006 - RNA, 22 nt, Human
uccuggagcccagaggagggca

SEQ ID NO: 1521007 - RNA, 18 nt, Human
uccugccgcagagcuggc

SEQ ID NO: 1521008 - RNA, 20 nt, Human
uccugccgcagagcuggccg

SEQ ID NO: 1521009 - RNA, 13 nt, Human
uccugccgcagag

SEQ ID NO: 1521010 - RNA, 15 nt, Human
uccugccgcagagcu

SEQ ID NO: 1521011 - RNA, 16 nt, Human
uccugccgcagagcug

SEQ ID NO: 1521012 - RNA, 17 nt, Human
uccugccgcagagcugg

SEQ ID NO: 1521013 - RNA, 20 nt, Human
uccugcccuuaccugccagg

SEQ ID NO: 1521014 - RNA, 17 nt, Human
uccugcccuuaccugcc

SEQ ID NO: 1521015 - RNA, 13 nt, Human
uccugccaggcau

SEQ ID NO: 1521016 - RNA, 14 nt, Human
uccugccaggcaug

SEQ ID NO: 1521017 - RNA, 21 nt, Human
uccugaggcuccacuuggucu

SEQ ID NO: 1521018 - RNA, 19 nt, Human
uccugaggcuccacuuggu

SEQ ID NO: 1521019 - RNA, 20 nt, Human
uccugaggcuccacuugguc

SEQ ID NO: 1521020 - RNA, 17 nt, Human
uccugccccugagccca

SEQ ID NO: 1521021 - RNA, 18 nt, Human
uccugccccugagcccau

SEQ ID NO: 1521022 - RNA, 14 nt, Human
uccuagugaaagag

SEQ ID NO: 1521023 - RNA, 23 nt, Human
uccuagugaaagaggcagcuuga

SEQ ID NO: 1521024 - RNA, 12 nt, Human
uccuaguuccac

SEQ ID NO: 1521025 - RNA, 23 nt, Human
uccuauauuguuuucaguguaca

SEQ ID NO: 1521026 - RNA, 12 nt, Human
uccucccaccuc

SEQ ID NO: 1521027 - RNA, 13 nt, Human
uccucccaccuca

SEQ ID NO: 1521028 - RNA, 10 nt, Human
uccuccaggu

SEQ ID NO: 1521029 - RNA, 18 nt, Human
uccucauuagcauuuugc

SEQ ID NO: 1521030 - RNA, 19 nt, Human
uccgccuuaccaggagaag

SEQ ID NO: 1521031 - RNA, 16 nt, Human
uccgcuuucuacccag

SEQ ID NO: 1521032 - RNA, 18 nt, Human
uccgcuuucuacccagcg

SEQ ID NO: 1521033 - RNA, 20 nt, Human
uccgcuuucuacccagcgag

SEQ ID NO: 1521034 - RNA, 20 nt, Human
uccuaagcuauucaguaaua

SEQ ID NO: 1521035 - RNA, 21 nt, Human
uccuaagcuauucaguaauaa

SEQ ID NO: 1521036 - RNA, 14 nt, Human
uccgccucuugggu

SEQ ID NO: 1521037 - RNA, 15 nt, Human
ucccuuccucuuucc

SEQ ID NO: 1521038 - RNA, 16 nt, Human
ucccuuccucuuucca

SEQ ID NO: 1521039 - RNA, 15 nt, Human
ucccccuuccaugga

SEQ ID NO: 1521040 - RNA, 16 nt, Human
uccaaaguacacuguu

SEQ ID NO: 1521041 - RNA, 14 nt, Human
uccaaaguacacug

SEQ ID NO: 1521042 - RNA, 21 nt, Human
uccacuuggucugugagaugc

SEQ ID NO: 1521043 - RNA, 23 nt, Human
uccacuuggucugugagaugcua

SEQ ID NO: 1521044 - RNA, 20 nt, Human
uccacuuucuagccagagga

SEQ ID NO: 1521045 - RNA, 21 nt, Human
uccacuuucuagccagaggag

SEQ ID NO: 1521046 - RNA, 19 nt, Human
uccaggggugggacacccu

SEQ ID NO: 1521047 - RNA, 20 nt, Human
uccaggggugggacacccug

SEQ ID NO: 1521048 - RNA, 12 nt, Human
uccaggagcagc

SEQ ID NO: 1521049 - RNA, 13 nt, Human
uccaggagcagcc

SEQ ID NO: 1521050 - RNA, 14 nt, Human
uccaggagcagcca

SEQ ID NO: 1521051 - RNA, 15 nt, Human
uccaggagcagccac

SEQ ID NO: 1521052 - RNA, 20 nt, Human
uccaugggccauaugaaaag

SEQ ID NO: 1521053 - RNA, 13 nt, Human
uccauggacuuug

SEQ ID NO: 1521054 - RNA, 15 nt, Human
uccauacauuugugu

SEQ ID NO: 1521055 - RNA, 14 nt, Human
uccauagagagcaa

SEQ ID NO: 1521056 - RNA, 15 nt, Human
uccauagagagcaag

SEQ ID NO: 1521057 - RNA, 20 nt, Human
uccagguuuaagcuguuacu

SEQ ID NO: 1521058 - RNA, 19 nt, Human
uccagguagagggugugua

SEQ ID NO: 1521059 - RNA, 22 nt, Human
uccaggggugggacacccugug

SEQ ID NO: 1521060 - RNA, 20 nt, Human
ucccaugagccucagcaucc

SEQ ID NO: 1521061 - RNA, 13 nt, Human
uccccagauugca

SEQ ID NO: 1521062 - RNA, 18 nt, Human
uccccagauugcaacagg

SEQ ID NO: 1521063 - RNA, 19 nt, Human
uccccagauugcaacaggc

SEQ ID NO: 1521064 - RNA, 20 nt, Human
uccccagauugcaacaggcu

SEQ ID NO: 1521065 - RNA, 22 nt, Human
uccccagauugcaacaggcugg

SEQ ID NO: 1521066 - RNA, 23 nt, Human
uccccagauugcaacaggcuggg

SEQ ID NO: 1521067 - RNA, 20 nt, Human
uccccagcaagugagagcug

SEQ ID NO: 1521068 - RNA, 21 nt, Human
uccccagcaagugagagcugg

SEQ ID NO: 1521069 - RNA, 22 nt, Human
uccccagcaagugagagcuggg

SEQ ID NO: 1521070 - RNA, 21 nt, Human
uccccagcaugcaccacgggc

SEQ ID NO: 1521071 - RNA, 19 nt, Human
uccccagcaugcaccacgg

SEQ ID NO: 1521072 - RNA, 20 nt, Human
uccccagcaugcaccacggg

SEQ ID NO: 1521073 - RNA, 14 nt, Human
uccccaggaggcca

SEQ ID NO: 1521074 - RNA, 22 nt, Human
ucccccagccccauccucugua

SEQ ID NO: 1521075 - RNA, 20 nt, Human
ucccccagccccauccucug

SEQ ID NO: 1521076 - RNA, 21 nt, Human
ucccccagccccauccucugu

SEQ ID NO: 1521077 - RNA, 15 nt, Human
uccccaggaggccag

SEQ ID NO: 1521078 - RNA, 16 nt, Human
uccccaggaggccagc

SEQ ID NO: 1521079 - RNA, 17 nt, Human
ucccccagccccauccu

SEQ ID NO: 1521080 - RNA, 17 nt, Human
uccccaggaggccagcc

SEQ ID NO: 1521081 - RNA, 23 nt, Human
ucccagcugugcucuggacaggc

SEQ ID NO: 1521082 - RNA, 21 nt, Human
ucccagcugugcucuggacag

SEQ ID NO: 1521083 - RNA, 22 nt, Human
ucccagcugugcucuggacagg

SEQ ID NO: 1521084 - RNA, 24 nt, Human
ucccaggcauuccccaggaggcca

SEQ ID NO: 1521085 - RNA, 15 nt, Human
ucccaucuuccaagg

SEQ ID NO: 1521086 - RNA, 18 nt, Human
ucccaugagccucagcau

SEQ ID NO: 1521087 - RNA, 19 nt, Human
ucccaugagccucagcauc

SEQ ID NO: 1521088 - RNA, 20 nt, Human
uccaugugggcuaguugggc

SEQ ID NO: 1521089 - RNA, 22 nt, Human
ucccaccucucucacuccuuga

SEQ ID NO: 1521090 - RNA, 13 nt, Human
ucccaccuuggcu

SEQ ID NO: 1521091 - RNA, 16 nt, Human
ucccaccuuggcugca

SEQ ID NO: 1521092 - RNA, 17 nt, Human
ucccaccuuggcugcag

SEQ ID NO: 1521093 - RNA, 18 nt, Human
ucccaccuuggcugcagg

SEQ ID NO: 1521094 - RNA, 17 nt, Human
ucaugcuguucaugaaa

SEQ ID NO: 1521095 - RNA, 18 nt, Human
ucauccacugugccaugu

SEQ ID NO: 1521096 - RNA, 14 nt, Human
ucauccacugugcc

SEQ ID NO: 1521097 - RNA, 17 nt, Human
ucauccacugugccaug

SEQ ID NO: 1521098 - RNA, 17 nt, Human
ucaucaaugaaugaaug

SEQ ID NO: 1521099 - RNA, 12 nt, Human
ucauagcagcuu

SEQ ID NO: 1521100 - RNA, 11 nt, Human
ucauagcagcu

SEQ ID NO: 1521101 - RNA, 16 nt, Human
ucagugccaaaaacaa

SEQ ID NO: 1521102 - RNA, 20 nt, Human
ucaguguacauggaauaaca

SEQ ID NO: 1521103 - RNA, 16 nt, Human
ucauuaggauggcuag

SEQ ID NO: 1521104 - RNA, 14 nt, Human
uccaaagaaaugua

SEQ ID NO: 1521105 - RNA, 17 nt, Human
uccaaagaaauguaagg

SEQ ID NO: 1521106 - RNA, 13 nt, Human
uccaaaguacacu

SEQ ID NO: 1521107 - RNA, 22 nt, Human
uccaaaaagauuuucagaaaau

SEQ ID NO: 1521108 - RNA, 16 nt, Human
uccaaaccaaauaaaa

SEQ ID NO: 1521109 - RNA, 21 nt, Human
ucagucugauucccaagcucu

SEQ ID NO: 1521110 - RNA, 22 nt, Human
ucagucugauucccaagcucug

SEQ ID NO: 1521111 - RNA, 23 nt, Human
ucagucugauucccaagcucugc

SEQ ID NO: 1521112 - RNA, 20 nt, Human
ucagguggggcagcuugagg

SEQ ID NO: 1521113 - RNA, 21 nt, Human
ucagguggggcagcuugaggg

SEQ ID NO: 1521114 - RNA, 16 nt, Human
ucaggugauccaccca

SEQ ID NO: 1521115 - RNA, 23 nt, Human
ucaggugccucaagagaaggcaa

SEQ ID NO: 1521116 - RNA, 23 nt, Human
ucaggugauccacccaccucagc

SEQ ID NO: 1521117 - RNA, 18 nt, Human
ucagguggggcagcuuga

SEQ ID NO: 1521118 - RNA, 19 nt, Human
ucagguggggcagcuugag

SEQ ID NO: 1521119 - RNA, 12 nt, Human
ucaggacacuaa

SEQ ID NO: 1521120 - RNA, 13 nt, Human
ucaggacacuaau

SEQ ID NO: 1521121 - RNA, 21 nt, Human
ucaggccugggggcugggcag

SEQ ID NO: 1521122 - RNA, 23 nt, Human
ucagcucugcaagaauugaagca

SEQ ID NO: 1521123 - RNA, 23 nt, Human
ucaggaagcucagggccuggcuc

SEQ ID NO: 1521124 - RNA, 23 nt, Human
ucagcuccagcucaccagcccca

SEQ ID NO: 1521125 - RNA, 24 nt, Human
ucagcuccagcucaccagccccag

SEQ ID NO: 1521126 - RNA, 16 nt, Human
uaugauucccagccag

SEQ ID NO: 1521127 - RNA, 16 nt, Human
uaugauucaaaugucu

SEQ ID NO: 1521128 - RNA, 21 nt, Human
uaugauucaaaugucuauaaa

SEQ ID NO: 1521129 - RNA, 17 nt, Human
uaugacuccagaauuuc

SEQ ID NO: 1521130 - RNA, 23 nt, Human
uaugacuccagaauuucccaaag

SEQ ID NO: 1521131 - RNA, 16 nt, Human
uaugacuccagaauuu

SEQ ID NO: 1521132 - RNA, 18 nt, Human
uaugaccuucuaggaagc

SEQ ID NO: 1521133 - RNA, 16 nt, Human
uaugaccuucuaggaa

SEQ ID NO: 1521134 - RNA, 14 nt, Human
uaugcacacauuuu

SEQ ID NO: 1521135 - RNA, 13 nt, Human
uaugcacacauuu

SEQ ID NO: 1521136 - RNA, 15 nt, Human
uaugcaaagcacuga

SEQ ID NO: 1521137 - RNA, 18 nt, Human
uaugcaaucaaaucugcu

SEQ ID NO: 1521138 - RNA, 12 nt, Human
uaugcaaagcac

SEQ ID NO: 1521139 - RNA, 13 nt, Human
uaugcaaagcacu

SEQ ID NO: 1521140 - RNA, 14 nt, Human
uaugcaaagcacug

SEQ ID NO: 1521141 - RNA, 15 nt, Human
uaugcuucuguuuua

SEQ ID NO: 1521142 - RNA, 16 nt, Human
uaugcuucuguuuuau

SEQ ID NO: 1521143 - RNA, 18 nt, Human
uaugcaugaaguaauaug

SEQ ID NO: 1521144 - RNA, 13 nt, Human
uaugcaugaagua

SEQ ID NO: 1521145 - RNA, 22 nt, Human
uaugcuuauacacuuacacuuu

SEQ ID NO: 1521146 - RNA, 13 nt, Human
uauggaacacucu

SEQ ID NO: 1521147 - RNA, 16 nt, Human
uauggaacacucugag

SEQ ID NO: 1521148 - RNA, 17 nt, Human
uauggaacacucugaga

SEQ ID NO: 1521149 - RNA, 18 nt, Human
uauggaacacucugagac

SEQ ID NO: 1521150 - RNA, 19 nt, Human
uauggaacacucugagacu

SEQ ID NO: 1521151 - RNA, 17 nt, Human
uauggacaaugacccag

SEQ ID NO: 1521152 - RNA, 14 nt, Human
uaucuugaagacuu

SEQ ID NO: 1521153 - RNA, 20 nt, Human
uaucugucauuugagcaggg

SEQ ID NO: 1521154 - RNA, 21 nt, Human
uaucugucauuugagcagggc

SEQ ID NO: 1521155 - RNA, 23 nt, Human
uaucugucauuugagcagggcuc

SEQ ID NO: 1521156 - RNA, 17 nt, Human
uaugaauuacauuugua

SEQ ID NO: 1521157 - RNA, 23 nt, Human
uaugaauuacauuuguauaaaau

SEQ ID NO: 1521158 - RNA, 23 nt, Human
uaugacauaaaaacaacuuuaua

SEQ ID NO: 1521159 - RNA, 19 nt, Human
uaugacauaaaaacaacuu

SEQ ID NO: 1521160 - RNA, 22 nt, Human
uaugacauaaaaacaacuuuau

SEQ ID NO: 1521161 - RNA, 12 nt, Human
uaugacacaugc

SEQ ID NO: 1521162 - RNA, 22 nt, Human
uaugacacaugcaaggucauuu

SEQ ID NO: 1521163 - RNA, 17 nt, Human
uauccuuucuaacaaaa

SEQ ID NO: 1521164 - RNA, 15 nt, Human
uauccuucagccuga

SEQ ID NO: 1521165 - RNA, 19 nt, Human
uauauguuuuaagaggcag

SEQ ID NO: 1521166 - RNA, 21 nt, Human
uaucuaauauguaacaagcca

SEQ ID NO: 1521167 - RNA, 16 nt, Human
uaucgucacugcuuaa

SEQ ID NO: 1521168 - RNA, 16 nt, Human
uaggucagugcaaaua

SEQ ID NO: 1521169 - RNA, 19 nt, Human
uagggaaaaaccagcgugu

SEQ ID NO: 1521170 - RNA, 20 nt, Human
uagggaaaaaccagcgugug

SEQ ID NO: 1521171 - RNA, 21 nt, Human
uagggaaaaaccagcguguga

SEQ ID NO: 1521172 - RNA, 20 nt, Human
uaggaauugacccacaagaa

SEQ ID NO: 1521173 - RNA, 12 nt, Human
uaggaauugacc

SEQ ID NO: 1521174 - RNA, 15 nt, Human
uaggccuggccagau

SEQ ID NO: 1521175 - RNA, 18 nt, Human
uaggccuggccagaugca

SEQ ID NO: 1521176 - RNA, 18 nt, Human
uaggccaugggacaggga

SEQ ID NO: 1521177 - RNA, 13 nt, Human
uagucaaauugug

SEQ ID NO: 1521178 - RNA, 14 nt, Human
uagucaaauugugu

SEQ ID NO: 1521179 - RNA, 14 nt, Human
uagugcaaauuguc

SEQ ID NO: 1521180 - RNA, 15 nt, Human
uagugcaaauuguca

SEQ ID NO: 1521181 - RNA, 18 nt, Human
uaguauuucuaugaaaua

SEQ ID NO: 1521182 - RNA, 19 nt, Human
uaguauuucuaugaaauau

SEQ ID NO: 1521183 - RNA, 15 nt, Human
uaguaugaggcauuu

SEQ ID NO: 1521184 - RNA, 16 nt, Human
uaguauuucuaugaaa

SEQ ID NO: 1521185 - RNA, 15 nt, Human
uaguaugaaauuaua

SEQ ID NO: 1521186 - RNA, 23 nt, Human
uaguaugaaauuauauaaguauu

SEQ ID NO: 1521187 - RNA, 13 nt, Human
uaguaugaaauua

SEQ ID NO: 1521188 - RNA, 13 nt, Human
uaguaucaaaaga

SEQ ID NO: 1521189 - RNA, 23 nt, Human
uaggugacagagugagacucugu

SEQ ID NO: 1521190 - RNA, 18 nt, Human
uaggugcuacaaaaacac

SEQ ID NO: 1521191 - RNA, 22 nt, Human
uauaauauuuuuaauuaaauaa

SEQ ID NO: 1521192 - RNA, 13 nt, Human
uauauaacaaugc

SEQ ID NO: 1521193 - RNA, 13 nt, Human
uauaugcuucugu

SEQ ID NO: 1521194 - RNA, 21 nt, Human
uauaugcucugcauguuacau

SEQ ID NO: 1521195 - RNA, 14 nt, Human
uauuucuaugaaau

SEQ ID NO: 1521196 - RNA, 15 nt, Human
uauuucuaugaaaua

SEQ ID NO: 1521197 - RNA, 13 nt, Human
uauuucuaugaaa

SEQ ID NO: 1521198 - RNA, 14 nt, Human
uauuuauuacugua

SEQ ID NO: 1521199 - RNA, 22 nt, Human
uauuuauuaaaugcccagcccc

SEQ ID NO: 1521200 - RNA, 20 nt, Human
uauuguuuaaaaucauuucu

SEQ ID NO: 1521201 - RNA, 17 nt, Human
uauuuaugggauccugg

SEQ ID NO: 1521202 - RNA, 14 nt, Human
uauugauaaguuca

SEQ ID NO: 1521203 - RNA, 16 nt, Human
uauugauaaguucaua

SEQ ID NO: 1521204 - RNA, 20 nt, Human
uauugauaugcuuauacacu

SEQ ID NO: 1521205 - RNA, 21 nt, Human
uauugauaugcuuauacacuu

SEQ ID NO: 1521206 - RNA, 23 nt, Human
uauugauaaguucauacauugua

SEQ ID NO: 1521207 - RNA, 23 nt, Human
uauugcugauggugcaaugaccu

SEQ ID NO: 1521208 - RNA, 13 nt, Human
uauugcccacgcu

SEQ ID NO: 1521209 - RNA, 14 nt, Human
uauugcccacgcug

SEQ ID NO: 1521210 - RNA, 15 nt, Human
uauugcccacgcugg

SEQ ID NO: 1521211 - RNA, 14 nt, Human
uauuguguugugaa

SEQ ID NO: 1521212 - RNA, 15 nt, Human
uauuguuuaaaauca

SEQ ID NO: 1521213 - RNA, 16 nt, Human
uauuguuuaaaaucau

SEQ ID NO: 1521214 - RNA, 17 nt, Human
uauuguuuaaaaucauu

SEQ ID NO: 1521215 - RNA, 16 nt, Human
uauuauguuaaaacug

SEQ ID NO: 1521216 - RNA, 12 nt, Human
uauuauguguuu

SEQ ID NO: 1521217 - RNA, 17 nt, Human
uauuauauuuacaaaug

SEQ ID NO: 1521218 - RNA, 14 nt, Human
uauuauauguucua

SEQ ID NO: 1521219 - RNA, 17 nt, Human
uauuauauguucuagaa

SEQ ID NO: 1521220 - RNA, 14 nt, Human
uauuauaccuuuuu

SEQ ID NO: 1521221 - RNA, 13 nt, Human
uauuauaccuuuu

SEQ ID NO: 1521222 - RNA, 12 nt, Human
uauuauaccuuu

SEQ ID NO: 1521223 - RNA, 14 nt, Human
uauuaaggaagaca

SEQ ID NO: 1521224 - RNA, 24 nt, Human
uauuaagaaagacuaucuaaaugu

SEQ ID NO: 1521225 - RNA, 19 nt, Human
uauggaggcuuugcauaga

SEQ ID NO: 1521226 - RNA, 12 nt, Human
uauguuaaaacu

SEQ ID NO: 1521227 - RNA, 19 nt, Human
uauguuagugcaaauuguc

SEQ ID NO: 1521228 - RNA, 17 nt, Human
uauguucuaagaaguga

SEQ ID NO: 1521229 - RNA, 22 nt, Human
uauguucuuaguggauguucug

SEQ ID NO: 1521230 - RNA, 21 nt, Human
uauguugcccaggcaggucuu

SEQ ID NO: 1521231 - RNA, 16 nt, Human
uauuaagaaagacuau

SEQ ID NO: 1521232 - RNA, 15 nt, Human
uauuaaaugcccagc

SEQ ID NO: 1521233 - RNA, 17 nt, Human
uauuaaaugcccagccc

SEQ ID NO: 1521234 - RNA, 19 nt, Human
uauuaaaugcccagccccu

SEQ ID NO: 1521235 - RNA, 17 nt, Human
ucaaacauauauaacaa

SEQ ID NO: 1521236 - RNA, 16 nt, Human
ucaaauccuugaagau

SEQ ID NO: 1521237 - RNA, 18 nt, Human
ucaaauaugcaaagcacu

SEQ ID NO: 1521238 - RNA, 19 nt, Human
ucaaauaugcaaagcacug

SEQ ID NO: 1521239 - RNA, 20 nt, Human
ucaaagagagaaaauaaaga

SEQ ID NO: 1521240 - RNA, 15 nt, Human
ucaaagagagaaaau

SEQ ID NO: 1521241 - RNA, 12 nt, Human
ucaaagagguuu

SEQ ID NO: 1521242 - RNA, 23 nt, Human
ucaaagagguuuuaaaaaaaucc

SEQ ID NO: 1521243 - RNA, 17 nt, Human
ucaaauaugcaaagcac

SEQ ID NO: 1521244 - RNA, 22 nt, Human
ucaacuccaaacugacucuuaa

SEQ ID NO: 1521245 - RNA, 20 nt, Human
ucaacucuccuccagaguca

SEQ ID NO: 1521246 - RNA, 16 nt, Human
ucaaccuccugggcua

SEQ ID NO: 1521247 - RNA, 20 nt, Human
ucaaccccuucgcuccugug

SEQ ID NO: 1521248 - RNA, 15 nt, Human
ucaaccuccugggcu

SEQ ID NO: 1521249 - RNA, 18 nt, Human
ucaaccccuucgcuccug

SEQ ID NO: 1521250 - RNA, 19 nt, Human
ucaaccccuucgcuccugu

SEQ ID NO: 1521251 - RNA, 13 nt, Human
ucaaggauccuga

SEQ ID NO: 1521252 - RNA, 14 nt, Human
ucaaggauccugag

SEQ ID NO: 1521253 - RNA, 17 nt, Human
ucaaggauccugagcca

SEQ ID NO: 1521254 - RNA, 15 nt, Human
ucaaggauccugagc

SEQ ID NO: 1521255 - RNA, 16 nt, Human
ucaaggauccugagcc

SEQ ID NO: 1521256 - RNA, 21 nt, Human
ucaagcgauucuucugcuuca

SEQ ID NO: 1521257 - RNA, 18 nt, Human
ucaagcgauucuucugcu

SEQ ID NO: 1521258 - RNA, 19 nt, Human
ucaagcgauucuucugcuu

SEQ ID NO: 1521259 - RNA, 12 nt, Human
ucaagccaccaa

SEQ ID NO: 1521260 - RNA, 20 nt, Human
ucaagccaccaacauacucc

SEQ ID NO: 1521261 - RNA, 14 nt, Human
ucaauaaaauccau

SEQ ID NO: 1521262 - RNA, 22 nt, Human
ucacaagacccaaaaggcagaa

SEQ ID NO: 1521263 - RNA, 14 nt, Human
ucacauuggaaaca

SEQ ID NO: 1521264 - RNA, 15 nt, Human
ucacacacuuuggcu

SEQ ID NO: 1521265 - RNA, 23 nt, Human
ucacacaugagcaucaggccagg

SEQ ID NO: 1521266 - RNA, 12 nt, Human
ucacauuuaaau

SEQ ID NO: 1521267 - RNA, 17 nt, Human
ucacauuggaaacaagu

SEQ ID NO: 1521268 - RNA, 14 nt, Human
ucacauuuauucug

SEQ ID NO: 1521269 - RNA, 17 nt, Human
ucaccaacgucugugcc

SEQ ID NO: 1521270 - RNA, 18 nt, Human
ucaccaacgucugugcca

SEQ ID NO: 1521271 - RNA, 15 nt, Human
ucaccagacggggcu

SEQ ID NO: 1521272 - RNA, 19 nt, Human
ucaccagacggggcuggag

SEQ ID NO: 1521273 - RNA, 21 nt, Human
ucaccccugguucucaucuuu

SEQ ID NO: 1521274 - RNA, 22 nt, Human
ucaccccugguucucaucuuuc

SEQ ID NO: 1521275 - RNA, 18 nt, Human
ucacccgcuaagagggag

SEQ ID NO: 1521276 - RNA, 13 nt, Human
ucaccaagcccag

SEQ ID NO: 1521277 - RNA, 22 nt, Human
ucaccgaaaacguggcugcuuc

SEQ ID NO: 1521278 - RNA, 23 nt, Human
ucaccgaaaacguggcugcuuca

SEQ ID NO: 1521279 - RNA, 15 nt, Human
ucaccgaaaacgugg

SEQ ID NO: 1521280 - RNA, 19 nt, Human
ucaccgaaaacguggcugc

SEQ ID NO: 1521281 - RNA, 20 nt, Human
ucaccgaaaacguggcugcu

SEQ ID NO: 1521282 - RNA, 21 nt, Human
ucaccgaaaacguggcugcuu

SEQ ID NO: 1521283 - RNA, 19 nt, Human
ucacccgcuaagagggagg

SEQ ID NO: 1521284 - RNA, 12 nt, Human
ucacccuuuucu

SEQ ID NO: 1521285 - RNA, 14 nt, Human
ucaccgaaaacgug

SEQ ID NO: 1521286 - RNA, 19 nt, Human
guggcagugggagcugccu

SEQ ID NO: 1521287 - RNA, 21 nt, Human
guggcagugggagcugccugu

SEQ ID NO: 1521288 - RNA, 15 nt, Human
guggcagugggagcu

SEQ ID NO: 1521289 - RNA, 16 nt, Human
guggcagugggagcug

SEQ ID NO: 1521290 - RNA, 17 nt, Human
guggcagugggagcugc

SEQ ID NO: 1521291 - RNA, 20 nt, Human
guggaugccugguggcagcu

SEQ ID NO: 1521292 - RNA, 21 nt, Human
guggcagcugcgguccaccca

SEQ ID NO: 1521293 - RNA, 22 nt, Human
guggcagcugcgguccacccag

SEQ ID NO: 1521294 - RNA, 23 nt, Human
guggcagcugcgguccacccagg

SEQ ID NO: 1521295 - RNA, 12 nt, Human
guggcagcugcu

SEQ ID NO: 1521296 - RNA, 13 nt, Human
guggcagcugcuu

SEQ ID NO: 1521297 - RNA, 19 nt, Human
guggcagcugcuuuugucu

SEQ ID NO: 1521298 - RNA, 20 nt, Human
guggagaagcggcuggcagc

SEQ ID NO: 1521299 - RNA, 17 nt, Human
guggagaagccacaggc

SEQ ID NO: 1521300 - RNA, 20 nt, Human
guggagaagccacaggccug

SEQ ID NO: 1521301 - RNA, 22 nt, Human
guggagaagccacaggccugag

SEQ ID NO: 1521302 - RNA, 16 nt, Human
guggaugccugguggc

SEQ ID NO: 1521303 - RNA, 18 nt, Human
guggaugccugguggcag

SEQ ID NO: 1521304 - RNA, 17 nt, Human
guggaguucaucuugaa

SEQ ID NO: 1521305 - RNA, 16 nt, Human
guggaggagcucagga

SEQ ID NO: 1521306 - RNA, 20 nt, Human
guggaggagcucaggacacu

SEQ ID NO: 1521307 - RNA, 23 nt, Human
guggaggagcucaggacacuaau

SEQ ID NO: 1521308 - RNA, 12 nt, Human
gugcuuggagga

SEQ ID NO: 1521309 - RNA, 13 nt, Human
gugcuuggaggaa

SEQ ID NO: 1521310 - RNA, 15 nt, Human
gugcuuggaggaagg

SEQ ID NO: 1521311 - RNA, 22 nt, Human
gugcugccauccagguucagcu

SEQ ID NO: 1521312 - RNA, 11 nt, Human
gugcugcccug

SEQ ID NO: 1521313 - RNA, 12 nt, Human
gugcugcccugc

SEQ ID NO: 1521314 - RNA, 18 nt, Human
guggaaaaauagccugcc

SEQ ID NO: 1521315 - RNA, 15 nt, Human
gugcucuggacaggc

SEQ ID NO: 1521316 - RNA, 16 nt, Human
gugcucuggacaggca

SEQ ID NO: 1521317 - RNA, 19 nt, Human
gugcccuggaugcccagga

SEQ ID NO: 1521318 - RNA, 18 nt, Human
gugcccuggaugcccagg

SEQ ID NO: 1521319 - RNA, 22 nt, Human
gugccgagaaggaagccuccca

SEQ ID NO: 1521320 - RNA, 21 nt, Human
gugccuuggggacaagagcag

SEQ ID NO: 1521321 - RNA, 17 nt, Human
gugcucuggacaggcau

SEQ ID NO: 1521322 - RNA, 18 nt, Human
gugcucuggacaggcaug

SEQ ID NO: 1521323 - RNA, 23 nt, Human
gugcugaaugguuuucaaaauaa

SEQ ID NO: 1521324 - RNA, 19 nt, Human
gugcugaaugguuuucaaa

SEQ ID NO: 1521325 - RNA, 20 nt, Human
gugcugaaugguuuucaaaa

SEQ ID NO: 1521326 - RNA, 20 nt, Human
gugcugcauuuaaaagauac

SEQ ID NO: 1521327 - RNA, 19 nt, Human
gugcugcauuuaaaagaua

SEQ ID NO: 1521328 - RNA, 12 nt, Human
gugcugcauuua

SEQ ID NO: 1521329 - RNA, 23 nt, Human
gugcugaguugguguugacaugu

SEQ ID NO: 1521330 - RNA, 15 nt, Human
gugcugccauccagg

SEQ ID NO: 1521331 - RNA, 18 nt, Human
gugcugccauccagguuc

SEQ ID NO: 1521332 - RNA, 19 nt, Human
gugcugccauccagguuca

SEQ ID NO: 1521333 - RNA, 12 nt, Human
gugcugagucug

SEQ ID NO: 1521334 - RNA, 16 nt, Human
gugcugagucugaagg

SEQ ID NO: 1521335 - RNA, 17 nt, Human
gugcugagucugaaggc

SEQ ID NO: 1521336 - RNA, 18 nt, Human
gugcugagucugaaggcu

SEQ ID NO: 1521337 - RNA, 19 nt, Human
gugcugagucugaaggcug

SEQ ID NO: 1521338 - RNA, 21 nt, Human
gugcauaccacuuuuguucuu

SEQ ID NO: 1521339 - RNA, 14 nt, Human
gugcauaccacuuu

SEQ ID NO: 1521340 - RNA, 13 nt, Human
gugcauaccacuu

SEQ ID NO: 1521341 - RNA, 22 nt, Human
gugcaugaagguuucugaaaau

SEQ ID NO: 1521342 - RNA, 22 nt, Human
gugcaugcugucccuuacguga

SEQ ID NO: 1521343 - RNA, 22 nt, Human
gugccagguuuuuggucugacc

SEQ ID NO: 1521344 - RNA, 18 nt, Human
gugcaaauugucacagga

SEQ ID NO: 1521345 - RNA, 19 nt, Human
gugcauaaguuaacuucca

SEQ ID NO: 1521346 - RNA, 20 nt, Human
gugcccacaggaucagucug

SEQ ID NO: 1521347 - RNA, 14 nt, Human
gugauucuccugcc

SEQ ID NO: 1521348 - RNA, 16 nt, Human
gugauucuccugccuc

SEQ ID NO: 1521349 - RNA, 17 nt, Human
gugauucuccugccuca

SEQ ID NO: 1521350 - RNA, 18 nt, Human
gugauucuccugccucag

SEQ ID NO: 1521351 - RNA, 19 nt, Human
gugauucuccugccucagc

SEQ ID NO: 1521352 - RNA, 20 nt, Human
gugauucuccugccucagcc

SEQ ID NO: 1521353 - RNA, 22 nt, Human
gugauucuccugccucagccuc

SEQ ID NO: 1521354 - RNA, 23 nt, Human
gugauucuccugccucagccucc

SEQ ID NO: 1521355 - RNA, 23 nt, Human
gugauccucccaccucagccucc

SEQ ID NO: 1521356 - RNA, 20 nt, Human
gugauccucccaccucagcc

SEQ ID NO: 1521357 - RNA, 22 nt, Human
gugauccucccaccucagccuc

SEQ ID NO: 1521358 - RNA, 22 nt, Human
gugauccacccaccucagccuc

SEQ ID NO: 1521359 - RNA, 14 nt, Human
gugauccucccacc

SEQ ID NO: 1521360 - RNA, 15 nt, Human
gugauccucccaccu

SEQ ID NO: 1521361 - RNA, 18 nt, Human
gugauccucccaccucag

SEQ ID NO: 1521362 - RNA, 11 nt, Human
gugaggccaga

SEQ ID NO: 1521363 - RNA, 13 nt, Human
gugaggccagaga

SEQ ID NO: 1521364 - RNA, 15 nt, Human
gugauccacccaccu

SEQ ID NO: 1521365 - RNA, 18 nt, Human
gugauccacccaccucag

SEQ ID NO: 1521366 - RNA, 20 nt, Human
gugauccacccaccucagcc

SEQ ID NO: 1521367 - RNA, 16 nt, Human
gugacaagcucacaga

SEQ ID NO: 1521368 - RNA, 16 nt, Human
gugacaacacuugugu

SEQ ID NO: 1521369 - RNA, 12 nt, Human
gugaccucugcc

SEQ ID NO: 1521370 - RNA, 15 nt, Human
gugacugaauuucuu

SEQ ID NO: 1521371 - RNA, 18 nt, Human
gugacugaauuucuuuug

SEQ ID NO: 1521372 - RNA, 16 nt, Human
gugacugaauuucuuu

SEQ ID NO: 1521373 - RNA, 16 nt, Human
gugagcagucaggaaa

SEQ ID NO: 1521374 - RNA, 17 nt, Human
gugacugaucucucgug

SEQ ID NO: 1521375 - RNA, 13 nt, Human
gugagccacugca

SEQ ID NO: 1521376 - RNA, 14 nt, Human
gugagccacugcac

SEQ ID NO: 1521377 - RNA, 11 nt, Human
gugaggaagcc

SEQ ID NO: 1521378 - RNA, 16 nt, Human
gugaggaagccgcugg

SEQ ID NO: 1521379 - RNA, 19 nt, Human
gugaggaagccgcuggggc

SEQ ID NO: 1521380 - RNA, 19 nt, Human
gugaaaggaaagagggagg

SEQ ID NO: 1521381 - RNA, 17 nt, Human
gugaaaguacauuugga

SEQ ID NO: 1521382 - RNA, 20 nt, Human
gugaaagcaucacuugggau

SEQ ID NO: 1521383 - RNA, 19 nt, Human
gugaaagaaaauaacaaua

SEQ ID NO: 1521384 - RNA, 20 nt, Human
gugaaacucguuaauuugua

SEQ ID NO: 1521385 - RNA, 12 nt, Human
gugaaacuggau

SEQ ID NO: 1521386 - RNA, 12 nt, Human
gugaaaauuauu

SEQ ID NO: 1521387 - RNA, 15 nt, Human
gugaaaauuauuuug

SEQ ID NO: 1521388 - RNA, 14 nt, Human
gugaaaagaaaaau

SEQ ID NO: 1521389 - RNA, 23 nt, Human
gugaaaagaaaaaugagccuggc

SEQ ID NO: 1521390 - RNA, 17 nt, Human
gucuacacuaagagaga

SEQ ID NO: 1521391 - RNA, 23 nt, Human
gucuacacuaagagagaaugaga

SEQ ID NO: 1521392 - RNA, 15 nt, Human
gucuacacugugcug

SEQ ID NO: 1521393 - RNA, 18 nt, Human
guccuuaccagcagagca

SEQ ID NO: 1521394 - RNA, 15 nt, Human
guccuuaccagcaga

SEQ ID NO: 1521395 - RNA, 16 nt, Human
guccuuaccagcagag

SEQ ID NO: 1521396 - RNA, 17 nt, Human
guccuuaccagcagagc

SEQ ID NO: 1521397 - RNA, 13 nt, Human
gucuaccugaggg

SEQ ID NO: 1521398 - RNA, 11 nt, Human
gucucacucug

SEQ ID NO: 1521399 - RNA, 20 nt, Human
gucucacuguugcccaggcu

SEQ ID NO: 1521400 - RNA, 21 nt, Human
gucucacuguugcccaggcug

SEQ ID NO: 1521401 - RNA, 22 nt, Human
gucucacuguugcccaggcugg

SEQ ID NO: 1521402 - RNA, 23 nt, Human
gucucacuguugcccaggcuggc

SEQ ID NO: 1521403 - RNA, 20 nt, Human
gucucacuauguugcccagg

SEQ ID NO: 1521404 - RNA, 21 nt, Human
gucucacuauguugcccaggc

SEQ ID NO: 1521405 - RNA, 23 nt, Human
gucucacuauguugcccaggcag

SEQ ID NO: 1521406 - RNA, 16 nt, Human
gucucacuguugccca

SEQ ID NO: 1521407 - RNA, 17 nt, Human
gucucacuguugcccag

SEQ ID NO: 1521408 - RNA, 18 nt, Human
gucucacuguugcccagg

SEQ ID NO: 1521409 - RNA, 19 nt, Human
gucucacuguugcccaggc

SEQ ID NO: 1521410 - RNA, 13 nt, Human
gucugacuguuuc

SEQ ID NO: 1521411 - RNA, 21 nt, Human
gucugaggaauccagacccgg

SEQ ID NO: 1521412 - RNA, 17 nt, Human
gucugauucccaagcuc

SEQ ID NO: 1521413 - RNA, 18 nt, Human
gucugauucccaagcucu

SEQ ID NO: 1521414 - RNA, 19 nt, Human
gucugauucccaagcucug

SEQ ID NO: 1521415 - RNA, 20 nt, Human
gucugauucccaagcucugc

SEQ ID NO: 1521416 - RNA, 21 nt, Human
gucugauucccaagcucugcu

SEQ ID NO: 1521417 - RNA, 15 nt, Human
gucucugugagacuc

SEQ ID NO: 1521418 - RNA, 14 nt, Human
gucugacccacugc

SEQ ID NO: 1521419 - RNA, 15 nt, Human
gucugacccacugcu

SEQ ID NO: 1521420 - RNA, 18 nt, Human
gucugaggaauccagacc

SEQ ID NO: 1521421 - RNA, 19 nt, Human
gucugaggaauccagaccc

SEQ ID NO: 1521422 - RNA, 15 nt, Human
gucccagcucccugg

SEQ ID NO: 1521423 - RNA, 12 nt, Human
gucccagugccg

SEQ ID NO: 1521424 - RNA, 23 nt, Human
guccuagaaauuccccacccuga

SEQ ID NO: 1521425 - RNA, 15 nt, Human
guccuacucuguguc

SEQ ID NO: 1521426 - RNA, 23 nt, Human
guccuacucugugucaggugggg

SEQ ID NO: 1521427 - RNA, 16 nt, Human
gucccugguggcagcu

SEQ ID NO: 1521428 - RNA, 17 nt, Human
gucccugguggcagcuc

SEQ ID NO: 1521429 - RNA, 19 nt, Human
guccugggagugagcuggu

SEQ ID NO: 1521430 - RNA, 17 nt, Human
guccugggagugagcug

SEQ ID NO: 1521431 - RNA, 18 nt, Human
guccugggagugagcugg

SEQ ID NO: 1521432 - RNA, 11 nt, Human
guccuggugcc

SEQ ID NO: 1521433 - RNA, 12 nt, Human
guccuggugccc

SEQ ID NO: 1521434 - RNA, 20 nt, Human
guccuggugcccuggaugcc

SEQ ID NO: 1521435 - RNA, 23 nt, Human
guccuggugcccuggaugcccag

SEQ ID NO: 1521436 - RNA, 12 nt, Human
guccucccaucu

SEQ ID NO: 1521437 - RNA, 13 nt, Human
guccucccaucuc

SEQ ID NO: 1521438 - RNA, 14 nt, Human
guccucccaucuca

SEQ ID NO: 1521439 - RNA, 23 nt, Human
guccucccaucucacacaugagc

SEQ ID NO: 1521440 - RNA, 15 nt, Human
guccugggagugagc

SEQ ID NO: 1521441 - RNA, 16 nt, Human
guccugggagugagcu

SEQ ID NO: 1521442 - RNA, 18 nt, Human
guccuccgccuuaccagg

SEQ ID NO: 1521443 - RNA, 17 nt, Human
guccuggcaugggaaug

SEQ ID NO: 1521444 - RNA, 21 nt, Human
guauucuaaauuuuauaucuu

SEQ ID NO: 1521445 - RNA, 17 nt, Human
guauuucuaugaaauau

SEQ ID NO: 1521446 - RNA, 22 nt, Human
guauuucuaugaaauauuaugu

SEQ ID NO: 1521447 - RNA, 19 nt, Human
guauuugagaguucuaaau

SEQ ID NO: 1521448 - RNA, 21 nt, Human
guauuugagaguucuaaauuu

SEQ ID NO: 1521449 - RNA, 20 nt, Human
guauuacaguggggaaugaa

SEQ ID NO: 1521450 - RNA, 15 nt, Human
guagagugggagcug

SEQ ID NO: 1521451 - RNA, 13 nt, Human
guagagugggagc

SEQ ID NO: 1521452 - RNA, 22 nt, Human
guauuacaguggggaaugaaga

SEQ ID NO: 1521453 - RNA, 13 nt, Human
guauuacuucugc

SEQ ID NO: 1521454 - RNA, 14 nt, Human
guauuacuucugcu

SEQ ID NO: 1521455 - RNA, 15 nt, Human
guauuacuucugcua

SEQ ID NO: 1521456 - RNA, 14 nt, Human
guauuauaccuuuu

SEQ ID NO: 1521457 - RNA, 14 nt, Human
gucaccucauggaa

SEQ ID NO: 1521458 - RNA, 20 nt, Human
gucaccugaagacucauucu

SEQ ID NO: 1521459 - RNA, 13 nt, Human
gucaccccggcca

SEQ ID NO: 1521460 - RNA, 15 nt, Human
gucaccccggccacc

SEQ ID NO: 1521461 - RNA, 15 nt, Human
gucaauaaaauccau

SEQ ID NO: 1521462 - RNA, 21 nt, Human
gucaauaaaauccauacauuu

SEQ ID NO: 1521463 - RNA, 16 nt, Human
gucaauuacaggaagu

SEQ ID NO: 1521464 - RNA, 13 nt, Human
gucaauuacagga

SEQ ID NO: 1521465 - RNA, 15 nt, Human
gucaauuacaggaag

SEQ ID NO: 1521466 - RNA, 16 nt, Human
guauuuuaaaagaaug

SEQ ID NO: 1521467 - RNA, 17 nt, Human
guauuuuaaaagaauga

SEQ ID NO: 1521468 - RNA, 14 nt, Human
guauuuguuaaugg

SEQ ID NO: 1521469 - RNA, 18 nt, Human
guauuuuaaaagaaugau

SEQ ID NO: 1521470 - RNA, 18 nt, Human
gucaagagggucugagga

SEQ ID NO: 1521471 - RNA, 19 nt, Human
gucaagagggucugaggaa

SEQ ID NO: 1521472 - RNA, 19 nt, Human
gucaagugaaaaaggagga

SEQ ID NO: 1521473 - RNA, 16 nt, Human
gucaagugaaaaagga

SEQ ID NO: 1521474 - RNA, 18 nt, Human
gucaagugaaaaaggagg

SEQ ID NO: 1521475 - RNA, 17 nt, Human
gucccagauacuugggg

SEQ ID NO: 1521476 - RNA, 17 nt, Human
gucccagauuggcucac

SEQ ID NO: 1521477 - RNA, 21 nt, Human
gucccagauuggcucacacug

SEQ ID NO: 1521478 - RNA, 22 nt, Human
gucccagauuggcucacacuga

SEQ ID NO: 1521479 - RNA, 11 nt, Human
gucccagcucc

SEQ ID NO: 1521480 - RNA, 14 nt, Human
gucccacucagucc

SEQ ID NO: 1521481 - RNA, 15 nt, Human
gucccacucagucca

SEQ ID NO: 1521482 - RNA, 14 nt, Human
guccacccaggagc

SEQ ID NO: 1521483 - RNA, 15 nt, Human
guccacccaggagcc

SEQ ID NO: 1521484 - RNA, 16 nt, Human
guccacccaggagccc

SEQ ID NO: 1521485 - RNA, 21 nt, Human
gucauauaagauucauauuua

SEQ ID NO: 1521486 - RNA, 17 nt, Human
ggggaucacagccucug

SEQ ID NO: 1521487 - RNA, 13 nt, Human
ggggaguggccac

SEQ ID NO: 1521488 - RNA, 22 nt, Human
gggcuuggggaccagagcugcc

SEQ ID NO: 1521489 - RNA, 21 nt, Human
gggcuuggggaccagagcugc

SEQ ID NO: 1521490 - RNA, 20 nt, Human
gggcuucauccuccucagau

SEQ ID NO: 1521491 - RNA, 20 nt, Human
gggcuuggggaccagagcug

SEQ ID NO: 1521492 - RNA, 19 nt, Human
gggcuucauccuccucaga

SEQ ID NO: 1521493 - RNA, 19 nt, Human
gggcuucaguggcagcugc

SEQ ID NO: 1521494 - RNA, 20 nt, Human
gggcuucaguggcagcugcu

SEQ ID NO: 1521495 - RNA, 15 nt, Human
gggcuucaguggcag

SEQ ID NO: 1521496 - RNA, 16 nt, Human
gggcuucaguggcagc

SEQ ID NO: 1521497 - RNA, 17 nt, Human
gggcuucaguggcagcu

SEQ ID NO: 1521498 - RNA, 18 nt, Human
gggcuucaguggcagcug

SEQ ID NO: 1521499 - RNA, 13 nt, Human
ggggcugggacau

SEQ ID NO: 1521500 - RNA, 16 nt, Human
ggggcugggcagagga

SEQ ID NO: 1521501 - RNA, 17 nt, Human
ggggcugggcagaggaa

SEQ ID NO: 1521502 - RNA, 20 nt, Human
ggggugcggcggucccagcu

SEQ ID NO: 1521503 - RNA, 19 nt, Human
ggggugcggcggucccagc

SEQ ID NO: 1521504 - RNA, 23 nt, Human
gggguucccuuuuuuggcugcug

SEQ ID NO: 1521505 - RNA, 18 nt, Human
ggguacccacugcucugg

SEQ ID NO: 1521506 - RNA, 13 nt, Human
ggguacccacugc

SEQ ID NO: 1521507 - RNA, 15 nt, Human
ggguacccacugcuc

SEQ ID NO: 1521508 - RNA, 19 nt, Human
ggguacuuguggacacagc

SEQ ID NO: 1521509 - RNA, 22 nt, Human
ggguacuuguggacacagcucu

SEQ ID NO: 1521510 - RNA, 23 nt, Human
ggguacuuguggacacagcucuu

SEQ ID NO: 1521511 - RNA, 23 nt, Human
ggguagagcggagaaaggaaggg

SEQ ID NO: 1521512 - RNA, 16 nt, Human
gggcgcgguggcucac

SEQ ID NO: 1521513 - RNA, 13 nt, Human
gggcucccuuccc

SEQ ID NO: 1521514 - RNA, 14 nt, Human
gggcucccuuccca

SEQ ID NO: 1521515 - RNA, 17 nt, Human
gggcucccuucccaccu

SEQ ID NO: 1521516 - RNA, 18 nt, Human
gggcucccuucccaccuc

SEQ ID NO: 1521517 - RNA, 23 nt, Human
gggcucccuucccaccucucuca

SEQ ID NO: 1521518 - RNA, 21 nt, Human
gggcccggguugggucaccag

SEQ ID NO: 1521519 - RNA, 22 nt, Human
gggcccggguugggucaccaga

SEQ ID NO: 1521520 - RNA, 17 nt, Human
gggccuggcucaggugg

SEQ ID NO: 1521521 - RNA, 18 nt, Human
gggccuggucguuuucaa

SEQ ID NO: 1521522 - RNA, 14 nt, Human
gggccuggcucagg

SEQ ID NO: 1521523 - RNA, 16 nt, Human
gggccuggcucaggug

SEQ ID NO: 1521524 - RNA, 12 nt, Human
gggccuggccug

SEQ ID NO: 1521525 - RNA, 12 nt, Human
gggccuggcuca

SEQ ID NO: 1521526 - RNA, 14 nt, Human
gggcuucaguggca

SEQ ID NO: 1521527 - RNA, 17 nt, Human
gggcugcaccggcuggc

SEQ ID NO: 1521528 - RNA, 16 nt, Human
gggcugaggugggagg

SEQ ID NO: 1521529 - RNA, 14 nt, Human
gggcugcaccggcu

SEQ ID NO: 1521530 - RNA, 15 nt, Human
gggcugagccugguc

SEQ ID NO: 1521531 - RNA, 23 nt, Human
gggcugagccuggucccacgagg

SEQ ID NO: 1521532 - RNA, 13 nt, Human
gggcugagccugg

SEQ ID NO: 1521533 - RNA, 12 nt, Human
gggcucuucuca

SEQ ID NO: 1521534 - RNA, 15 nt, Human
gggcucuucucauuu

SEQ ID NO: 1521535 - RNA, 13 nt, Human
gggcucugccucc

SEQ ID NO: 1521536 - RNA, 15 nt, Human
gggcucugccuccca

SEQ ID NO: 1521537 - RNA, 16 nt, Human
gggcucugccucccau

SEQ ID NO: 1521538 - RNA, 17 nt, Human
gggcucugccucccauc

SEQ ID NO: 1521539 - RNA, 20 nt, Human
gggcucugccucccaucacc

SEQ ID NO: 1521540 - RNA, 19 nt, Human
ggguuggccccugcccggc

SEQ ID NO: 1521541 - RNA, 23 nt, Human
ggguucccuuuuuuggcugcuga

SEQ ID NO: 1521542 - RNA, 22 nt, Human
ggguucuacccaggugcuagga

SEQ ID NO: 1521543 - RNA, 22 nt, Human
gguacuucaaauccuugaagau

SEQ ID NO: 1521544 - RNA, 21 nt, Human
gguacuuguggacacagcucu

SEQ ID NO: 1521545 - RNA, 22 nt, Human
gguacuuguggacacagcucuu

SEQ ID NO: 1521546 - RNA, 17 nt, Human
gguacccacugcucugg

SEQ ID NO: 1521547 - RNA, 15 nt, Human
ggguugggcuggugu

SEQ ID NO: 1521548 - RNA, 15 nt, Human
gguagacacacauga

SEQ ID NO: 1521549 - RNA, 22 nt, Human
gguagacacacaugaaguccaa

SEQ ID NO: 1521550 - RNA, 16 nt, Human
ggucacucuggcagcu

SEQ ID NO: 1521551 - RNA, 20 nt, Human
ggucacucuggcagcucaga

SEQ ID NO: 1521552 - RNA, 22 nt, Human
ggucacucuggcagcucagaga

SEQ ID NO: 1521553 - RNA, 12 nt, Human
ggucagagccug

SEQ ID NO: 1521554 - RNA, 13 nt, Human
ggucagagccugc

SEQ ID NO: 1521555 - RNA, 14 nt, Human
ggucagagccugca

SEQ ID NO: 1521556 - RNA, 15 nt, Human
ggucagagccugcag

SEQ ID NO: 1521557 - RNA, 16 nt, Human
ggucagagccugcagu

SEQ ID NO: 1521558 - RNA, 22 nt, Human
ggucccacucaguccauagcag

SEQ ID NO: 1521559 - RNA, 12 nt, Human
ggucccacucag

SEQ ID NO: 1521560 - RNA, 14 nt, Human
ggucccacucaguc

SEQ ID NO: 1521561 - RNA, 13 nt, Human
ggucccccuucca

SEQ ID NO: 1521562 - RNA, 18 nt, Human
ggucccccuuccauggac

SEQ ID NO: 1521563 - RNA, 23 nt, Human
ggucccccuuccauggacuuugu

SEQ ID NO: 1521564 - RNA, 20 nt, Human
ggucccagcucccuggcucc

SEQ ID NO: 1521565 - RNA, 12 nt, Human
ggucccagcucc

SEQ ID NO: 1521566 - RNA, 14 nt, Human
ggucccagcucccu

SEQ ID NO: 1521567 - RNA, 15 nt, Human
ggucccagcucccug

SEQ ID NO: 1521568 - RNA, 14 nt, Human
ggucccugguggca

SEQ ID NO: 1521569 - RNA, 22 nt, Human
ggucccugguggcagcucaccu

SEQ ID NO: 1521570 - RNA, 23 nt, Human
gguccuagaaauuccccacccug

SEQ ID NO: 1521571 - RNA, 22 nt, Human
ggucucacuauguugcccaggc

SEQ ID NO: 1521572 - RNA, 12 nt, Human
ggucucacucug

SEQ ID NO: 1521573 - RNA, 16 nt, Human
ggucucacucugucgc

SEQ ID NO: 1521574 - RNA, 15 nt, Human
ggucugacccacugc

SEQ ID NO: 1521575 - RNA, 16 nt, Human
ggucugacccacugcu

SEQ ID NO: 1521576 - RNA, 18 nt, Human
ggugaagugaagacaaug

SEQ ID NO: 1521577 - RNA, 19 nt, Human
ggucugaggaauccagacc

SEQ ID NO: 1521578 - RNA, 16 nt, Human
ggugaacuugguuccc

SEQ ID NO: 1521579 - RNA, 15 nt, Human
ggugcccuggaugcc

SEQ ID NO: 1521580 - RNA, 18 nt, Human
ggugcccuggaugcccag

SEQ ID NO: 1521581 - RNA, 19 nt, Human
ggugcccuggaugcccagg

SEQ ID NO: 1521582 - RNA, 20 nt, Human
ggugcccuggaugcccagga

SEQ ID NO: 1521583 - RNA, 21 nt, Human
ggugacagagugagacucugu

SEQ ID NO: 1521584 - RNA, 14 nt, Human
ggugaccucugccu

SEQ ID NO: 1521585 - RNA, 16 nt, Human
ggugaccucugccuga

SEQ ID NO: 1521586 - RNA, 21 nt, Human
ggugaccucugccugaaguca

SEQ ID NO: 1521587 - RNA, 19 nt, Human
ggugcggcggucccagcuc

SEQ ID NO: 1521588 - RNA, 19 nt, Human
ggugcuacaaaaacacagc

SEQ ID NO: 1521589 - RNA, 23 nt, Human
ggugcuaucucccccagccccau

SEQ ID NO: 1521590 - RNA, 22 nt, Human
ggugcuaucucccccagcccca

SEQ ID NO: 1521591 - RNA, 21 nt, Human
ggugcuacaaaaacacagcaa

SEQ ID NO: 1521592 - RNA, 16 nt, Human
gguggcagugggagcu

SEQ ID NO: 1521593 - RNA, 15 nt, Human
gguggcagcugcggu

SEQ ID NO: 1521594 - RNA, 23 nt, Human
gguggcagcugcgguccacccag

SEQ ID NO: 1521595 - RNA, 13 nt, Human
gguggcagcucac

SEQ ID NO: 1521596 - RNA, 11 nt, Human
gguggcagcug

SEQ ID NO: 1521597 - RNA, 12 nt, Human
gguggcagcugc

SEQ ID NO: 1521598 - RNA, 13 nt, Human
gguggcagcugcg

SEQ ID NO: 1521599 - RNA, 15 nt, Human
guaaauaguauuuga

SEQ ID NO: 1521600 - RNA, 16 nt, Human
guaaauaguauuugag

SEQ ID NO: 1521601 - RNA, 17 nt, Human
guaaauaguauuugaga

SEQ ID NO: 1521602 - RNA, 20 nt, Human
guaaaugggggugcauuuga

SEQ ID NO: 1521603 - RNA, 19 nt, Human
guaaaugggggugcauuug

SEQ ID NO: 1521604 - RNA, 18 nt, Human
guaaaugggggugcauuu

SEQ ID NO: 1521605 - RNA, 22 nt, Human
guaaauuaacuuuuauaaacuu

SEQ ID NO: 1521606 - RNA, 21 nt, Human
guaaauuaacuuuuauaaacu

SEQ ID NO: 1521607 - RNA, 17 nt, Human
guaaauuaacuuuuaua

SEQ ID NO: 1521608 - RNA, 16 nt, Human
guaaauuaacuuuuau

SEQ ID NO: 1521609 - RNA, 15 nt, Human
guaaauuaacuuuua

SEQ ID NO: 1521610 - RNA, 18 nt, Human
guaaggaauaccuguccc

SEQ ID NO: 1521611 - RNA, 20 nt, Human
guaaggaauaccuguccccc

SEQ ID NO: 1521612 - RNA, 21 nt, Human
guaaggaauaccugucccccu

SEQ ID NO: 1521613 - RNA, 23 nt, Human
guaaggaauaccugucccccuga

SEQ ID NO: 1521614 - RNA, 13 nt, Human
guaaggaaugauu

SEQ ID NO: 1521615 - RNA, 22 nt, Human
guaaguauucuuauuuaaugaa

SEQ ID NO: 1521616 - RNA, 17 nt, Human
guaagggaaacugccag

SEQ ID NO: 1521617 - RNA, 18 nt, Human
guaagggaaacugccagc

SEQ ID NO: 1521618 - RNA, 23 nt, Human
guaaauuaacuuuuauaaacuuu

SEQ ID NO: 1521619 - RNA, 14 nt, Human
guaaaaccacagca

SEQ ID NO: 1521620 - RNA, 15 nt, Human
guaaaaccacagcag

SEQ ID NO: 1521621 - RNA, 16 nt, Human
guaaaaccacagcagu

SEQ ID NO: 1521622 - RNA, 18 nt, Human
guaaaaccacagcaguug

SEQ ID NO: 1521623 - RNA, 23 nt, Human
guaaaaccacagcaguugaaaag

SEQ ID NO: 1521624 - RNA, 20 nt, Human
gguuuucacauuggaaacaa

SEQ ID NO: 1521625 - RNA, 21 nt, Human
gguuuuccaaucauuugacua

SEQ ID NO: 1521626 - RNA, 15 nt, Human
gguuuucuguucuuu

SEQ ID NO: 1521627 - RNA, 13 nt, Human
gguuuucuguucu

SEQ ID NO: 1521628 - RNA, 12 nt, Human
gguuuucuguuc

SEQ ID NO: 1521629 - RNA, 14 nt, Human
gguuuuguuccccu

SEQ ID NO: 1521630 - RNA, 19 nt, Human
gguuuuguuccccuccucc

SEQ ID NO: 1521631 - RNA, 22 nt, Human
gguuuuguuccccuccuccacu

SEQ ID NO: 1521632 - RNA, 23 nt, Human
gguuuugccauguuggccaggcu

SEQ ID NO: 1521633 - RNA, 14 nt, Human
gguugggcuggugu

SEQ ID NO: 1521634 - RNA, 18 nt, Human
gguuggcaaaaaggcagg

SEQ ID NO: 1521635 - RNA, 13 nt, Human
gguuggugggggc

SEQ ID NO: 1521636 - RNA, 13 nt, Human
gguuuaagcuguu

SEQ ID NO: 1521637 - RNA, 20 nt, Human
gguucacugcaaccuccgcc

SEQ ID NO: 1521638 - RNA, 22 nt, Human
gguucaagcgauucuucugcuu

SEQ ID NO: 1521639 - RNA, 23 nt, Human
gguucaagcgauucuucugcuuc

SEQ ID NO: 1521640 - RNA, 12 nt, Human
gguucagcuugu

SEQ ID NO: 1521641 - RNA, 14 nt, Human
gguugaagcaccaa

SEQ ID NO: 1521642 - RNA, 13 nt, Human
gguggccucccaa

SEQ ID NO: 1521643 - RNA, 17 nt, Human
gguggccucccaacuca

SEQ ID NO: 1521644 - RNA, 21 nt, Human
gguucaagcgauucuucugcu

SEQ ID NO: 1521645 - RNA, 19 nt, Human
guaaugauaacuggaaacu

SEQ ID NO: 1521646 - RNA, 13 nt, Human
guaauucaagaaa

SEQ ID NO: 1521647 - RNA, 14 nt, Human
guaauucaagaaaa

SEQ ID NO: 1521648 - RNA, 15 nt, Human
guaauuggaaaggca

SEQ ID NO: 1521649 - RNA, 18 nt, Human
guacacuguuucaaacuu

SEQ ID NO: 1521650 - RNA, 21 nt, Human
guaauuaaguacuauguauca

SEQ ID NO: 1521651 - RNA, 14 nt, Human
guaauuaaguacua

SEQ ID NO: 1521652 - RNA, 17 nt, Human
guaauuaaguacuaugu

SEQ ID NO: 1521653 - RNA, 20 nt, Human
guaauuaaguacuauguauc

SEQ ID NO: 1521654 - RNA, 16 nt, Human
guacagacaacaaacc

SEQ ID NO: 1521655 - RNA, 21 nt, Human
guacacuguuucaaacuuuac

SEQ ID NO: 1521656 - RNA, 20 nt, Human
guacacuguuucaaacuuua

SEQ ID NO: 1521657 - RNA, 19 nt, Human
guacacuguuucaaacuuu

SEQ ID NO: 1521658 - RNA, 12 nt, Human
guacagagccca

SEQ ID NO: 1521659 - RNA, 18 nt, Human
guacagagcccacgcccc

SEQ ID NO: 1521660 - RNA, 22 nt, Human
guacagagcccacgcccccacu

SEQ ID NO: 1521661 - RNA, 20 nt, Human
guacagcaaggagauuuaca

SEQ ID NO: 1521662 - RNA, 23 nt, Human
guacaguugcuguugugugauca

SEQ ID NO: 1521663 - RNA, 20 nt, Human
guacauaaugcgugcauacc

SEQ ID NO: 1521664 - RNA, 15 nt, Human
guacccacugcucug

SEQ ID NO: 1521665 - RNA, 16 nt, Human
guacuuguggacacag

SEQ ID NO: 1521666 - RNA, 20 nt, Human
guacuuguggacacagcucu

SEQ ID NO: 1521667 - RNA, 20 nt, Human
guacuucuccacccugcucu

SEQ ID NO: 1521668 - RNA, 21 nt, Human
guacuucuccacccugcucuc

SEQ ID NO: 1521669 - RNA, 16 nt, Human
guacuucuccacccug

SEQ ID NO: 1521670 - RNA, 17 nt, Human
guacuucuccacccugc

SEQ ID NO: 1521671 - RNA, 18 nt, Human
guacuucuccacccugcu

SEQ ID NO: 1521672 - RNA, 19 nt, Human
guacuucuccacccugcuc

SEQ ID NO: 1521673 - RNA, 23 nt, Human
guacuuuauuuucuauaauuuaa

SEQ ID NO: 1521674 - RNA, 21 nt, Human
guacuuguggacacagcucuu

SEQ ID NO: 1521675 - RNA, 18 nt, Human
guagaaagacagagcugg

SEQ ID NO: 1521676 - RNA, 21 nt, Human
guagaaagacagagcugggau

SEQ ID NO: 1521677 - RNA, 16 nt, Human
guagagcggagaaagg

SEQ ID NO: 1521678 - RNA, 15 nt, Human
guagaggagaaacug

SEQ ID NO: 1521679 - RNA, 12 nt, Human
guacuacaauuu

SEQ ID NO: 1521680 - RNA, 17 nt, Human
guacuacaguccuccca

SEQ ID NO: 1521681 - RNA, 15 nt, Human
guacuacaauuuaaa

SEQ ID NO: 1521682 - RNA, 14 nt, Human
guacuucuccaccc

SEQ ID NO: 1521683 - RNA, 15 nt, Human
guacuucuccacccu

SEQ ID NO: 1521684 - RNA, 17 nt, Human
guacguugugcauuugg

SEQ ID NO: 1521685 - RNA, 15 nt, Human
guacuaaggaaucuu

SEQ ID NO: 1521686 - RNA, 23 nt, Human
guacuaaggaaucuuucugcuuu

SEQ ID NO: 1521687 - RNA, 16 nt, Human
guacguugugcauuug

SEQ ID NO: 1521688 - RNA, 15 nt, Human
guacguugugcauuu

SEQ ID NO: 1521689 - RNA, 14 nt, Human
guacguugugcauu

SEQ ID NO: 1521690 - RNA, 17 nt, Human
guacgucugacaggcaa

SEQ ID NO: 1521691 - RNA, 15 nt, Human
guacgaagaguauuu

SEQ ID NO: 1521692 - RNA, 14 nt, Human
guacgucugacagg

SEQ ID NO: 1521693 - RNA, 15 nt, Human
guacgucugacaggc

SEQ ID NO: 1521694 - RNA, 15 nt, Human
guaccgcaaugugac

SEQ ID NO: 1521695 - RNA, 16 nt, Human
guacccacugcucugg

SEQ ID NO: 1521696 - RNA, 22 nt, Human
guaccucuugagccuugaacuu

SEQ ID NO: 1521697 - RNA, 21 nt, Human
guaccucuugagccuugaacu

SEQ ID NO: 1521698 - RNA, 13 nt, Human
guaccucuugagc

SEQ ID NO: 1521699 - RNA, 19 nt, Human
ggcgcugccccuggcagcc

SEQ ID NO: 1521700 - RNA, 21 nt, Human
ggcgcugccccuggcagcccc

SEQ ID NO: 1521701 - RNA, 23 nt, Human
ggcgcugccccuggcagccccug

SEQ ID NO: 1521702 - RNA, 15 nt, Human
ggcgcgguggcucac

SEQ ID NO: 1521703 - RNA, 14 nt, Human
ggccugggggcugg

SEQ ID NO: 1521704 - RNA, 20 nt, Human
ggccugggggcugggcagag

SEQ ID NO: 1521705 - RNA, 22 nt, Human
ggccugggggcugggcagagga

SEQ ID NO: 1521706 - RNA, 22 nt, Human
ggcuaggaccccuccauguggg

SEQ ID NO: 1521707 - RNA, 16 nt, Human
ggcuaggaccccucca

SEQ ID NO: 1521708 - RNA, 22 nt, Human
ggcuagagguucaaagauauuu

SEQ ID NO: 1521709 - RNA, 17 nt, Human
ggcuagagguucaaaga

SEQ ID NO: 1521710 - RNA, 16 nt, Human
ggcuaguugggcuucc

SEQ ID NO: 1521711 - RNA, 23 nt, Human
ggcuagugugguguuuccuggca

SEQ ID NO: 1521712 - RNA, 15 nt, Human
ggcuaguugggcuuc

SEQ ID NO: 1521713 - RNA, 15 nt, Human
ggcuaugcauuugaa

SEQ ID NO: 1521714 - RNA, 12 nt, Human
ggcuccaggagc

SEQ ID NO: 1521715 - RNA, 13 nt, Human
ggcuccaggagca

SEQ ID NO: 1521716 - RNA, 19 nt, Human
ggcuccaggagcagccaca

SEQ ID NO: 1521717 - RNA, 12 nt, Human
ggcucacacuga

SEQ ID NO: 1521718 - RNA, 14 nt, Human
ggcucacacugaga

SEQ ID NO: 1521719 - RNA, 15 nt, Human
ggcucaaguccucuu

SEQ ID NO: 1521720 - RNA, 21 nt, Human
ggcucaaguccucuuuucuga

SEQ ID NO: 1521721 - RNA, 11 nt, Human
ggcuccaggcu

SEQ ID NO: 1521722 - RNA, 16 nt, Human
ggcuccaggcuccuuu

SEQ ID NO: 1521723 - RNA, 18 nt, Human
ggccucuuaugggcuggg

SEQ ID NO: 1521724 - RNA, 20 nt, Human
ggccucgguguggagaagcg

SEQ ID NO: 1521725 - RNA, 17 nt, Human
ggccucuuaugggcugg

SEQ ID NO: 1521726 - RNA, 13 nt, Human
ggccucugcacuc

SEQ ID NO: 1521727 - RNA, 14 nt, Human
ggccucugcacucc

SEQ ID NO: 1521728 - RNA, 15 nt, Human
ggccucugcacuccc

SEQ ID NO: 1521729 - RNA, 16 nt, Human
ggccucugcacucccc

SEQ ID NO: 1521730 - RNA, 13 nt, Human
ggcccugccuccu

SEQ ID NO: 1521731 - RNA, 14 nt, Human
ggcccugccuccuu

SEQ ID NO: 1521732 - RNA, 15 nt, Human
ggcccugccuccuuu

SEQ ID NO: 1521733 - RNA, 11 nt, Human
ggcccagagag

SEQ ID NO: 1521734 - RNA, 12 nt, Human
ggcccagagagg

SEQ ID NO: 1521735 - RNA, 21 nt, Human
ggcccucugcccacucccugc

SEQ ID NO: 1521736 - RNA, 19 nt, Human
ggcccucugcccacucccu

SEQ ID NO: 1521737 - RNA, 20 nt, Human
ggcccucugcccacucccug

SEQ ID NO: 1521738 - RNA, 13 nt, Human
ggcccucugccca

SEQ ID NO: 1521739 - RNA, 15 nt, Human
ggcccucugcccacu

SEQ ID NO: 1521740 - RNA, 16 nt, Human
ggcccucugcccacuc

SEQ ID NO: 1521741 - RNA, 17 nt, Human
ggcccucugcccacucc

SEQ ID NO: 1521742 - RNA, 12 nt, Human
ggagugcaguga

SEQ ID NO: 1521743 - RNA, 14 nt, Human
ggagugcagugagc

SEQ ID NO: 1521744 - RNA, 15 nt, Human
ggagugcagugagcc

SEQ ID NO: 1521745 - RNA, 18 nt, Human
ggauacaaaagcauguga

SEQ ID NO: 1521746 - RNA, 22 nt, Human
ggaucccucauccucauaccca

SEQ ID NO: 1521747 - RNA, 13 nt, Human
ggaucccucaucc

SEQ ID NO: 1521748 - RNA, 17 nt, Human
ggaucccucauccucau

SEQ ID NO: 1521749 - RNA, 23 nt, Human
ggaugcacagaguuguuacauuu

SEQ ID NO: 1521750 - RNA, 21 nt, Human
ggaugauuggaggggggaggu

SEQ ID NO: 1521751 - RNA, 16 nt, Human
ggaugcagccucacag

SEQ ID NO: 1521752 - RNA, 17 nt, Human
ggaugcagccucacagu

SEQ ID NO: 1521753 - RNA, 12 nt, Human
ggauccuccagg

SEQ ID NO: 1521754 - RNA, 13 nt, Human
ggauccuccaggu

SEQ ID NO: 1521755 - RNA, 19 nt, Human
ggaugcagccucacagucc

SEQ ID NO: 1521756 - RNA, 13 nt, Human
ggaugcagcauua

SEQ ID NO: 1521757 - RNA, 15 nt, Human
ggaugcuuguacaua

SEQ ID NO: 1521758 - RNA, 19 nt, Human
ggauuacaagcgugagcca

SEQ ID NO: 1521759 - RNA, 18 nt, Human
ggcaacccccagccugcu

SEQ ID NO: 1521760 - RNA, 19 nt, Human
ggcaacccccagccugcua

SEQ ID NO: 1521761 - RNA, 14 nt, Human
ggcaaugcuggcug

SEQ ID NO: 1521762 - RNA, 15 nt, Human
ggcaaugcuggcugu

SEQ ID NO: 1521763 - RNA, 23 nt, Human
ggcaaugcuggcuguuggcuggg

SEQ ID NO: 1521764 - RNA, 22 nt, Human
ggcacccggccccugcugguuc

SEQ ID NO: 1521765 - RNA, 23 nt, Human
ggcacccaccaucaugucuggcu

SEQ ID NO: 1521766 - RNA, 16 nt, Human
ggauucuuauggacaa

SEQ ID NO: 1521767 - RNA, 16 nt, Human
ggauucuuccucccuc

SEQ ID NO: 1521768 - RNA, 23 nt, Human
ggauuacaagcgugagccacugc

SEQ ID NO: 1521769 - RNA, 17 nt, Human
ggauuagggagagaaga

SEQ ID NO: 1521770 - RNA, 17 nt, Human
ggauugcuacuguccua

SEQ ID NO: 1521771 - RNA, 15 nt, Human
ggauuguaaaauggu

SEQ ID NO: 1521772 - RNA, 16 nt, Human
ggcaacccccagccug

SEQ ID NO: 1521773 - RNA, 17 nt, Human
ggcaacccccagccugc

SEQ ID NO: 1521774 - RNA, 16 nt, Human
ggccaugggccuccug

SEQ ID NO: 1521775 - RNA, 23 nt, Human
ggccagcugcuugggcuucaucc

SEQ ID NO: 1521776 - RNA, 18 nt, Human
ggccaggcccucugccca

SEQ ID NO: 1521777 - RNA, 20 nt, Human
ggccagccuugaccauucuc

SEQ ID NO: 1521778 - RNA, 22 nt, Human
ggccagccuugaccauucucca

SEQ ID NO: 1521779 - RNA, 17 nt, Human
ggccagcugcuugggcu

SEQ ID NO: 1521780 - RNA, 18 nt, Human
ggcauuccccaggaggcc

SEQ ID NO: 1521781 - RNA, 19 nt, Human
ggcauuccccaggaggcca

SEQ ID NO: 1521782 - RNA, 18 nt, Human
ggcaugggaaugaauguc

SEQ ID NO: 1521783 - RNA, 14 nt, Human
ggcauggcugggaa

SEQ ID NO: 1521784 - RNA, 22 nt, Human
ggcaugggaaugaaugucagug

SEQ ID NO: 1521785 - RNA, 17 nt, Human
ggcauuccccaggaggc

SEQ ID NO: 1521786 - RNA, 15 nt, Human
ggcaugaagacagau

SEQ ID NO: 1521787 - RNA, 18 nt, Human
ggcaugacacgaauauug

SEQ ID NO: 1521788 - RNA, 22 nt, Human
ggcaugacacgaauauugcuga

SEQ ID NO: 1521789 - RNA, 19 nt, Human
ggcagggucucacucuguc

SEQ ID NO: 1521790 - RNA, 20 nt, Human
ggcagggucucacucugucg

SEQ ID NO: 1521791 - RNA, 13 nt, Human
ggcagugggagcu

SEQ ID NO: 1521792 - RNA, 14 nt, Human
ggcagugggagcug

SEQ ID NO: 1521793 - RNA, 16 nt, Human
ggcagugggagcugcc

SEQ ID NO: 1521794 - RNA, 12 nt, Human
ggcagcucaccu

SEQ ID NO: 1521795 - RNA, 14 nt, Human
ggcagcucaccucu

SEQ ID NO: 1521796 - RNA, 17 nt, Human
ggcagcuugaggguugg

SEQ ID NO: 1521797 - RNA, 16 nt, Human
ggcagcucaccucucc

SEQ ID NO: 1521798 - RNA, 21 nt, Human
ggcagcucagagaggguggga

SEQ ID NO: 1521799 - RNA, 15 nt, Human
ggagaaucacuugaa

SEQ ID NO: 1521800 - RNA, 19 nt, Human
ggagaaucacuugaacccg

SEQ ID NO: 1521801 - RNA, 17 nt, Human
ggagaagcggcuggcag

SEQ ID NO: 1521802 - RNA, 18 nt, Human
ggagaagcggcuggcagc

SEQ ID NO: 1521803 - RNA, 15 nt, Human
ggacgcucucuggcc

SEQ ID NO: 1521804 - RNA, 13 nt, Human
ggacgcucucugg

SEQ ID NO: 1521805 - RNA, 14 nt, Human
ggacgcucucuggc

SEQ ID NO: 1521806 - RNA, 16 nt, Human
ggacauuugcucaugg

SEQ ID NO: 1521807 - RNA, 22 nt, Human
ggacagccacggccaggccaga

SEQ ID NO: 1521808 - RNA, 20 nt, Human
ggacauugcggacagccacg

SEQ ID NO: 1521809 - RNA, 17 nt, Human
ggacacucaaaagcugg

SEQ ID NO: 1521810 - RNA, 22 nt, Human
ggacacucaaaagcugggcagg

SEQ ID NO: 1521811 - RNA, 15 nt, Human
ggacagccacggcca

SEQ ID NO: 1521812 - RNA, 19 nt, Human
ggacagccacggccaggcc

SEQ ID NO: 1521813 - RNA, 20 nt, Human
ggacagccacggccaggcca

SEQ ID NO: 1521814 - RNA, 21 nt, Human
ggacagccacggccaggccag

SEQ ID NO: 1521815 - RNA, 17 nt, Human
ggacgcuacccgggaag

SEQ ID NO: 1521816 - RNA, 19 nt, Human
ggacgcuacccgggaaggg

SEQ ID NO: 1521817 - RNA, 20 nt, Human
ggacgcuacccgggaagggg

SEQ ID NO: 1521818 - RNA, 13 nt, Human
ggaccucgugcca

SEQ ID NO: 1521819 - RNA, 15 nt, Human
ggaccuugaacuggg

SEQ ID NO: 1521820 - RNA, 17 nt, Human
ggaccuugaacugggua

SEQ ID NO: 1521821 - RNA, 13 nt, Human
ggaccagagcugc

SEQ ID NO: 1521822 - RNA, 14 nt, Human
ggaccagagcugcc

SEQ ID NO: 1521823 - RNA, 19 nt, Human
ggaccucaggugagaagca

SEQ ID NO: 1521824 - RNA, 23 nt, Human
ggaccucaggugagaagcagagg

SEQ ID NO: 1521825 - RNA, 23 nt, Human
ggaaggggagauaaggguaucug

SEQ ID NO: 1521826 - RNA, 20 nt, Human
ggaagugacgguuuaauggg

SEQ ID NO: 1521827 - RNA, 18 nt, Human
ggaaguacuggagaaaau

SEQ ID NO: 1521828 - RNA, 12 nt, Human
ggaaguacugga

SEQ ID NO: 1521829 - RNA, 16 nt, Human
ggaaguacuggagaaa

SEQ ID NO: 1521830 - RNA, 16 nt, Human
ggaauuggagcucgug

SEQ ID NO: 1521831 - RNA, 22 nt, Human
ggaauuggagcucgugggacag

SEQ ID NO: 1521832 - RNA, 23 nt, Human
ggaauuucucccagucauuuaau

SEQ ID NO: 1521833 - RNA, 16 nt, Human
ggacaaaauggaauac

SEQ ID NO: 1521834 - RNA, 17 nt, Human
ggacaaaauggaauacu

SEQ ID NO: 1521835 - RNA, 19 nt, Human
ggaauguuugccucugccu

SEQ ID NO: 1521836 - RNA, 20 nt, Human
ggaauucaucucucuuuaau

SEQ ID NO: 1521837 - RNA, 14 nt, Human
ggaaugcuguguua

SEQ ID NO: 1521838 - RNA, 15 nt, Human
ggaauggcacagccc

SEQ ID NO: 1521839 - RNA, 24 nt, Human
ggaaugauuaauuaaaacacaaca

SEQ ID NO: 1521840 - RNA, 12 nt, Human
ggaaugcagugg

SEQ ID NO: 1521841 - RNA, 14 nt, Human
ggaaaagcugcuga

SEQ ID NO: 1521842 - RNA, 20 nt, Human
ggaaaaggcagggagcgagg

SEQ ID NO: 1521843 - RNA, 18 nt, Human
ggaaaagcugcugacagu

SEQ ID NO: 1521844 - RNA, 20 nt, Human
ggaaaagcugcugacagugu

SEQ ID NO: 1521845 - RNA, 18 nt, Human
ggaaaacaugcuacacac

SEQ ID NO: 1521846 - RNA, 21 nt, Human
gcuuuguuuguugucagcuga

SEQ ID NO: 1521847 - RNA, 17 nt, Human
gcuuuuaaaaaaaaaua

SEQ ID NO: 1521848 - RNA, 15 nt, Human
gcuuugugauuuuug

SEQ ID NO: 1521849 - RNA, 22 nt, Human
gcuugaggguugggcugguguc

SEQ ID NO: 1521850 - RNA, 18 nt, Human
gcuugaggguugggcugg

SEQ ID NO: 1521851 - RNA, 20 nt, Human
gcuugaggguugggcuggug

SEQ ID NO: 1521852 - RNA, 14 nt, Human
gcuuuaucaaaggg

SEQ ID NO: 1521853 - RNA, 16 nt, Human
ggaacaggaaacugau

SEQ ID NO: 1521854 - RNA, 21 nt, Human
ggaaaucaccgaaaacguggc

SEQ ID NO: 1521855 - RNA, 14 nt, Human
ggaaaucaccgaaa

SEQ ID NO: 1521856 - RNA, 17 nt, Human
ggaaaucaaauaugcaa

SEQ ID NO: 1521857 - RNA, 12 nt, Human
ggaaaggcucca

SEQ ID NO: 1521858 - RNA, 13 nt, Human
ggaaaggcuccag

SEQ ID NO: 1521859 - RNA, 14 nt, Human
ggaaaggcuccagg

SEQ ID NO: 1521860 - RNA, 19 nt, Human
ggaaaaucagccugcucca

SEQ ID NO: 1521861 - RNA, 23 nt, Human
ggaaaaucagccugcuccagcug

SEQ ID NO: 1521862 - RNA, 22 nt, Human
ggaaaggcuccaggagcagcca

SEQ ID NO: 1521863 - RNA, 21 nt, Human
ggaaaggggcaggccagagcu

SEQ ID NO: 1521864 - RNA, 17 nt, Human
ggaaaggcuccaggagc

SEQ ID NO: 1521865 - RNA, 19 nt, Human
ggaaaggcuccaggagcag

SEQ ID NO: 1521866 - RNA, 20 nt, Human
ggaaaggcuccaggagcagc

SEQ ID NO: 1521867 - RNA, 21 nt, Human
ggaaaggcuccaggagcagcc

SEQ ID NO: 1521868 - RNA, 21 nt, Human
gcuguucaugaaagauucaau

SEQ ID NO: 1521869 - RNA, 12 nt, Human
gcuguucaugaa

SEQ ID NO: 1521870 - RNA, 14 nt, Human
gcuguucagcuggu

SEQ ID NO: 1521871 - RNA, 17 nt, Human
gcugucuccauguuuga

SEQ ID NO: 1521872 - RNA, 20 nt, Human
gcugucuacacuaagagaga

SEQ ID NO: 1521873 - RNA, 20 nt, Human
gcugccaaugggagcucaug

SEQ ID NO: 1521874 - RNA, 15 nt, Human
gcugccaaugggagc

SEQ ID NO: 1521875 - RNA, 16 nt, Human
gcugccaaugggagcu

SEQ ID NO: 1521876 - RNA, 19 nt, Human
gcugccaaugggagcucau

SEQ ID NO: 1521877 - RNA, 21 nt, Human
gcuuagucacugagacagccc

SEQ ID NO: 1521878 - RNA, 19 nt, Human
gcuuagucacugagacagc

SEQ ID NO: 1521879 - RNA, 20 nt, Human
gcuuagucacugagacagcc

SEQ ID NO: 1521880 - RNA, 15 nt, Human
gcuuagucacugaga

SEQ ID NO: 1521881 - RNA, 17 nt, Human
gcuuagucacugagaca

SEQ ID NO: 1521882 - RNA, 22 nt, Human
gcuuagggacaggaccccagcu

SEQ ID NO: 1521883 - RNA, 23 nt, Human
gcuuagggacaggaccccagcuc

SEQ ID NO: 1521884 - RNA, 16 nt, Human
gcuucaguggcagcug

SEQ ID NO: 1521885 - RNA, 12 nt, Human
gcuuauacacuu

SEQ ID NO: 1521886 - RNA, 20 nt, Human
gcuuauacacuuacacuuua

SEQ ID NO: 1521887 - RNA, 19 nt, Human
gcuuaucucaggggugugc

SEQ ID NO: 1521888 - RNA, 17 nt, Human
gcuucaguggcagcugc

SEQ ID NO: 1521889 - RNA, 18 nt, Human
gcuucaguggcagcugcu

SEQ ID NO: 1521890 - RNA, 12 nt, Human
gcuucauccucc

SEQ ID NO: 1521891 - RNA, 15 nt, Human
gcuucauccuccuca

SEQ ID NO: 1521892 - RNA, 13 nt, Human
gcuucauuuccug

SEQ ID NO: 1521893 - RNA, 16 nt, Human
gcuucauuuccugugu

SEQ ID NO: 1521894 - RNA, 16 nt, Human
gcuuccagugaggcuc

SEQ ID NO: 1521895 - RNA, 18 nt, Human
gcuuccagugaggcucug

SEQ ID NO: 1521896 - RNA, 17 nt, Human
gcuucauuuccuguguc

SEQ ID NO: 1521897 - RNA, 21 nt, Human
gcuucauccuccucagaucuu

SEQ ID NO: 1521898 - RNA, 18 nt, Human
gcuucauuuccugugucu

SEQ ID NO: 1521899 - RNA, 15 nt, Human
gcuuccagugaggcu

SEQ ID NO: 1521900 - RNA, 16 nt, Human
gcuugaggguugggcu

SEQ ID NO: 1521901 - RNA, 14 nt, Human
gcuccaagaauuuc

SEQ ID NO: 1521902 - RNA, 13 nt, Human
gcuccaagcuccc

SEQ ID NO: 1521903 - RNA, 14 nt, Human
gcuccaagcuccca

SEQ ID NO: 1521904 - RNA, 15 nt, Human
gcuccaagcucccag

SEQ ID NO: 1521905 - RNA, 21 nt, Human
gcuccaagcucccaggcauuc

SEQ ID NO: 1521906 - RNA, 16 nt, Human
gcuccaagcucccagg

SEQ ID NO: 1521907 - RNA, 17 nt, Human
gcuccaagcucccaggc

SEQ ID NO: 1521908 - RNA, 18 nt, Human
gcuccaagcucccaggca

SEQ ID NO: 1521909 - RNA, 19 nt, Human
gcuccaagcucccaggcau

SEQ ID NO: 1521910 - RNA, 20 nt, Human
gcuccauuuuuagugaaaua

SEQ ID NO: 1521911 - RNA, 20 nt, Human
gcuccagcuguucagcuggu

SEQ ID NO: 1521912 - RNA, 24 nt, Human
gcuccaggcuccuuuagcgcccag

SEQ ID NO: 1521913 - RNA, 11 nt, Human
gcuccagcugu

SEQ ID NO: 1521914 - RNA, 16 nt, Human
gcuccaggcuccuuua

SEQ ID NO: 1521915 - RNA, 23 nt, Human
gcuccaggcuccuuuagcgccca

SEQ ID NO: 1521916 - RNA, 14 nt, Human
gcucaccucucccu

SEQ ID NO: 1521917 - RNA, 20 nt, Human
gcucaccagccccagugccc

SEQ ID NO: 1521918 - RNA, 23 nt, Human
gcucaccagccccagugcccaca

SEQ ID NO: 1521919 - RNA, 19 nt, Human
gcucaccagccccagugcc

SEQ ID NO: 1521920 - RNA, 17 nt, Human
gcucagcaaaagaugcu

SEQ ID NO: 1521921 - RNA, 20 nt, Human
gcucagcaaaagaugcuucu

SEQ ID NO: 1521922 - RNA, 22 nt, Human
gcucagcaaaagaugcuucuca

SEQ ID NO: 1521923 - RNA, 23 nt, Human
gcucagcaaaagaugcuucucac

SEQ ID NO: 1521924 - RNA, 19 nt, Human
gcucaggugucccugcacu

SEQ ID NO: 1521925 - RNA, 15 nt, Human
gcucagcggggacag

SEQ ID NO: 1521926 - RNA, 16 nt, Human
gcucagcggggacagc

SEQ ID NO: 1521927 - RNA, 20 nt, Human
gcucagcggggacagcuccu

SEQ ID NO: 1521928 - RNA, 21 nt, Human
gcucagcggggacagcuccuu

SEQ ID NO: 1521929 - RNA, 22 nt, Human
gcucagcggggacagcuccuuc

SEQ ID NO: 1521930 - RNA, 18 nt, Human
gcucaggugucccugcac

SEQ ID NO: 1521931 - RNA, 14 nt, Human
gcuaagcauuccaa

SEQ ID NO: 1521932 - RNA, 17 nt, Human
gcuaagcaaaaugugau

SEQ ID NO: 1521933 - RNA, 23 nt, Human
gcuaagagggagggagggcucca

SEQ ID NO: 1521934 - RNA, 16 nt, Human
gcuacccgcagaguuc

SEQ ID NO: 1521935 - RNA, 14 nt, Human
gcuacccgggaagg

SEQ ID NO: 1521936 - RNA, 15 nt, Human
gcuacccgggaaggg

SEQ ID NO: 1521937 - RNA, 22 nt, Human
gcuacccgcagaguucucagaa

SEQ ID NO: 1521938 - RNA, 21 nt, Human
gcuacccgggaagggggcugg

SEQ ID NO: 1521939 - RNA, 21 nt, Human
gcuagagguucaaagauauuu

SEQ ID NO: 1521940 - RNA, 19 nt, Human
gcuagagguucaaagauau

SEQ ID NO: 1521941 - RNA, 18 nt, Human
gcuagagguucaaagaua

SEQ ID NO: 1521942 - RNA, 23 nt, Human
gcuaucucccccagccccauccu

SEQ ID NO: 1521943 - RNA, 19 nt, Human
gcuaucucccccagcccca

SEQ ID NO: 1521944 - RNA, 20 nt, Human
gcuaucucccccagccccau

SEQ ID NO: 1521945 - RNA, 21 nt, Human
gcuaucucccccagccccauc

SEQ ID NO: 1521946 - RNA, 22 nt, Human
gcuaucucccccagccccaucc

SEQ ID NO: 1521947 - RNA, 16 nt, Human
gcuaucucccccagcc

SEQ ID NO: 1521948 - RNA, 17 nt, Human
gcuaucucccccagccc

SEQ ID NO: 1521949 - RNA, 18 nt, Human
gcuaucucccccagcccc

SEQ ID NO: 1521950 - RNA, 15 nt, Human
gcgggcuuccuccug

SEQ ID NO: 1521951 - RNA, 12 nt, Human
gcggggacagcu

SEQ ID NO: 1521952 - RNA, 13 nt, Human
gcggggacagcuc

SEQ ID NO: 1521953 - RNA, 16 nt, Human
gcgguccacccaggag

SEQ ID NO: 1521954 - RNA, 20 nt, Human
gcgguccacccaggagcccc

SEQ ID NO: 1521955 - RNA, 18 nt, Human
gcgguccacccaggagcc

SEQ ID NO: 1521956 - RNA, 19 nt, Human
gcgguccacccaggagccc

SEQ ID NO: 1521957 - RNA, 18 nt, Human
gcgugagccacugcaccg

SEQ ID NO: 1521958 - RNA, 23 nt, Human
gcgugagccacugcaccgggcca

SEQ ID NO: 1521959 - RNA, 16 nt, Human
gcuaaagcccagagac

SEQ ID NO: 1521960 - RNA, 13 nt, Human
gcuaaaugugaau

SEQ ID NO: 1521961 - RNA, 16 nt, Human
gcuaaaugugaaugau

SEQ ID NO: 1521962 - RNA, 14 nt, Human
gcuaacauggaagu

SEQ ID NO: 1521963 - RNA, 22 nt, Human
gcuaagagggagggagggcucc

SEQ ID NO: 1521964 - RNA, 15 nt, Human
gcugauggugcaaug

SEQ ID NO: 1521965 - RNA, 16 nt, Human
gcugauggugcaauga

SEQ ID NO: 1521966 - RNA, 22 nt, Human
gcugagugggggaucacagccu

SEQ ID NO: 1521967 - RNA, 13 nt, Human
gcugaguuggugu

SEQ ID NO: 1521968 - RNA, 23 nt, Human
gcugagugggggaucacagccuc

SEQ ID NO: 1521969 - RNA, 15 nt, Human
gcugagucugaaggc

SEQ ID NO: 1521970 - RNA, 16 nt, Human
gcugagucugaaggcu

SEQ ID NO: 1521971 - RNA, 18 nt, Human
gcugagucugaaggcugg

SEQ ID NO: 1521972 - RNA, 19 nt, Human
gcugagucugaaggcuggg

SEQ ID NO: 1521973 - RNA, 17 nt, Human
gcugcauuuaaaagaua

SEQ ID NO: 1521974 - RNA, 21 nt, Human
gcugcaguugccagucacccc

SEQ ID NO: 1521975 - RNA, 18 nt, Human
gcugcaguugccagucac

SEQ ID NO: 1521976 - RNA, 20 nt, Human
gcugcaguugccagucaccc

SEQ ID NO: 1521977 - RNA, 18 nt, Human
gcugauggugcaaugacc

SEQ ID NO: 1521978 - RNA, 21 nt, Human
gcugauggugcaaugaccuuu

SEQ ID NO: 1521979 - RNA, 21 nt, Human
gcugacagacacaggcccggc

SEQ ID NO: 1521980 - RNA, 22 nt, Human
gcucuucucauuucaccccucc

SEQ ID NO: 1521981 - RNA, 23 nt, Human
gcucuucucauuucaccccuccc

SEQ ID NO: 1521982 - RNA, 14 nt, Human
gcucuucuccaggc

SEQ ID NO: 1521983 - RNA, 16 nt, Human
gcucuucuccaggcug

SEQ ID NO: 1521984 - RNA, 19 nt, Human
gcucuuccaggcugggaga

SEQ ID NO: 1521985 - RNA, 18 nt, Human
gcucuuccaggcugggag

SEQ ID NO: 1521986 - RNA, 12 nt, Human
gcucuucucauu

SEQ ID NO: 1521987 - RNA, 22 nt, Human
gcucuuccaggcugggagagcc

SEQ ID NO: 1521988 - RNA, 12 nt, Human
gcucuucuccag

SEQ ID NO: 1521989 - RNA, 14 nt, Human
gcucuucucauuuc

SEQ ID NO: 1521990 - RNA, 15 nt, Human
gcucuucucauuuca

SEQ ID NO: 1521991 - RNA, 16 nt, Human
gcucuucucauuucac

SEQ ID NO: 1521992 - RNA, 20 nt, Human
gcucuucucauuucaccccu

SEQ ID NO: 1521993 - RNA, 19 nt, Human
gcucuccgaccagacaccu

SEQ ID NO: 1521994 - RNA, 13 nt, Human
gcucuccgaccag

SEQ ID NO: 1521995 - RNA, 17 nt, Human
gcucuccgaccagacac

SEQ ID NO: 1521996 - RNA, 11 nt, Human
gcucuccuucc

SEQ ID NO: 1521997 - RNA, 12 nt, Human
gcucuccuuccu

SEQ ID NO: 1521998 - RNA, 22 nt, Human
gcucuccuuccuggagcccaga

SEQ ID NO: 1521999 - RNA, 11 nt, Human
gcucucuggcc

SEQ ID NO: 1522000 - RNA, 12 nt, Human
gcucucuggccu

SEQ ID NO: 1522001 - RNA, 13 nt, Human
gcucucuggccuu

SEQ ID NO: 1522002 - RNA, 15 nt, Human
gcucccuucccaccu

SEQ ID NO: 1522003 - RNA, 16 nt, Human
gcucccuucccaccuc

SEQ ID NO: 1522004 - RNA, 18 nt, Human
gcucccuucccaccucuc

SEQ ID NO: 1522005 - RNA, 19 nt, Human
gcucccuucccaccucucu

SEQ ID NO: 1522006 - RNA, 21 nt, Human
gcuccuucuguccuacucugu

SEQ ID NO: 1522007 - RNA, 16 nt, Human
gcucgagcaugccugg

SEQ ID NO: 1522008 - RNA, 17 nt, Human
gcucgagcaugccugga

SEQ ID NO: 1522009 - RNA, 21 nt, Human
gcucugcgucgguccuggugc

SEQ ID NO: 1522010 - RNA, 20 nt, Human
gcucugcgucgguccuggug

SEQ ID NO: 1522011 - RNA, 13 nt, Human
gcucugcuccucu

SEQ ID NO: 1522012 - RNA, 14 nt, Human
gcucugcuccucuc

SEQ ID NO: 1522013 - RNA, 13 nt, Human
gcucugccuccca

SEQ ID NO: 1522014 - RNA, 14 nt, Human
gcucugccucccau

SEQ ID NO: 1522015 - RNA, 15 nt, Human
gcucugccucccauc

SEQ ID NO: 1522016 - RNA, 22 nt, Human
gcucugccucccaucacccgcu

SEQ ID NO: 1522017 - RNA, 14 nt, Human
gcucucuggccuuc

SEQ ID NO: 1522018 - RNA, 15 nt, Human
gcucucuggccuucg

SEQ ID NO: 1522019 - RNA, 19 nt, Human
gcucucuggccuucggccu

SEQ ID NO: 1522020 - RNA, 20 nt, Human
gcucucuggccuucggccuc

SEQ ID NO: 1522021 - RNA, 14 nt, Human
gcucugcccuuggu

SEQ ID NO: 1522022 - RNA, 23 nt, Human
gcucugcccuugguuaggcauug

SEQ ID NO: 1522023 - RNA, 11 nt, Human
gcucugccucc

SEQ ID NO: 1522024 - RNA, 14 nt, Human
gcucuggacaggca

SEQ ID NO: 1522025 - RNA, 15 nt, Human
gcucuggacaggcau

SEQ ID NO: 1522026 - RNA, 16 nt, Human
gcucuggacaggcaug

SEQ ID NO: 1522027 - RNA, 21 nt, Human
gcucuggacaggcauguucuc

SEQ ID NO: 1522028 - RNA, 22 nt, Human
gcucuggacaggcauguucucu

SEQ ID NO: 1522029 - RNA, 19 nt, Human
gcucugcuccucuccccag

SEQ ID NO: 1522030 - RNA, 21 nt, Human
gcucugcuccucuccccagca

SEQ ID NO: 1522031 - RNA, 13 nt, Human
gcucugcugacag

SEQ ID NO: 1522032 - RNA, 14 nt, Human
gcucugcugacaga

SEQ ID NO: 1522033 - RNA, 18 nt, Human
gcucugcugacagacaca

SEQ ID NO: 1522034 - RNA, 19 nt, Human
gcucugcugacagacacag

SEQ ID NO: 1522035 - RNA, 20 nt, Human
gcucugcugacagacacagg

SEQ ID NO: 1522036 - RNA, 23 nt, Human
gcucugcugacagacacaggccc

SEQ ID NO: 1522037 - RNA, 22 nt, Human
gccugaagucacacagugaguc

SEQ ID NO: 1522038 - RNA, 16 nt, Human
gccugcuccagcuguu

SEQ ID NO: 1522039 - RNA, 18 nt, Human
gccugcuccagcuguuca

SEQ ID NO: 1522040 - RNA, 15 nt, Human
gccugcuccagcugu

SEQ ID NO: 1522041 - RNA, 21 nt, Human
gccugggggcugggcagagga

SEQ ID NO: 1522042 - RNA, 20 nt, Human
gccugggggcugggcagagg

SEQ ID NO: 1522043 - RNA, 18 nt, Human
gccugggcagaaggaaga

SEQ ID NO: 1522044 - RNA, 16 nt, Human
gccugggcagaaggaa

SEQ ID NO: 1522045 - RNA, 17 nt, Human
gccugggcagaaggaag

SEQ ID NO: 1522046 - RNA, 14 nt, Human
gccuggauggggcu

SEQ ID NO: 1522047 - RNA, 15 nt, Human
gccuggauggggcug

SEQ ID NO: 1522048 - RNA, 15 nt, Human
gccugggcagaagga

SEQ ID NO: 1522049 - RNA, 16 nt, Human
gccuggccagaugcac

SEQ ID NO: 1522050 - RNA, 14 nt, Human
gccuggccagaugc

SEQ ID NO: 1522051 - RNA, 15 nt, Human
gccuggccagaugca

SEQ ID NO: 1522052 - RNA, 17 nt, Human
gccucccgaguagcugg

SEQ ID NO: 1522053 - RNA, 23 nt, Human
gccucccgaauagcugggacuac

SEQ ID NO: 1522054 - RNA, 15 nt, Human
gccucccgaguagcu

SEQ ID NO: 1522055 - RNA, 15 nt, Human
gccucagugccacua

SEQ ID NO: 1522056 - RNA, 22 nt, Human
gccucccaacucaccccagccc

SEQ ID NO: 1522057 - RNA, 23 nt, Human
gccucccaacucaccccagcccc

SEQ ID NO: 1522058 - RNA, 21 nt, Human
gccucccacgacugcccggca

SEQ ID NO: 1522059 - RNA, 14 nt, Human
gccucccacgacug

SEQ ID NO: 1522060 - RNA, 22 nt, Human
gccucaagugauucuccugccu

SEQ ID NO: 1522061 - RNA, 23 nt, Human
gccucagccucccaaagugcugg

SEQ ID NO: 1522062 - RNA, 12 nt, Human
gccucagugcca

SEQ ID NO: 1522063 - RNA, 14 nt, Human
gccucagugccacu

SEQ ID NO: 1522064 - RNA, 22 nt, Human
gccuauauuuuuuguuaaauga

SEQ ID NO: 1522065 - RNA, 17 nt, Human
gccuaagugcagccccg

SEQ ID NO: 1522066 - RNA, 14 nt, Human
gccucaaccuccug

SEQ ID NO: 1522067 - RNA, 16 nt, Human
gccucaaccuccuggg

SEQ ID NO: 1522068 - RNA, 17 nt, Human
gccucaaccuccugggc

SEQ ID NO: 1522069 - RNA, 19 nt, Human
gccucaagugauucuccug

SEQ ID NO: 1522070 - RNA, 20 nt, Human
gccucaagugauucuccugc

SEQ ID NO: 1522071 - RNA, 21 nt, Human
gccucaagugauucuccugcc

SEQ ID NO: 1522072 - RNA, 14 nt, Human
gcccugguggcagu

SEQ ID NO: 1522073 - RNA, 17 nt, Human
gcccugguggcaguggg

SEQ ID NO: 1522074 - RNA, 18 nt, Human
gcccugguggcaguggga

SEQ ID NO: 1522075 - RNA, 19 nt, Human
gcccugguggcagugggag

SEQ ID NO: 1522076 - RNA, 20 nt, Human
gcccugguggcagugggagc

SEQ ID NO: 1522077 - RNA, 21 nt, Human
gcccugguggcagugggagcu

SEQ ID NO: 1522078 - RNA, 22 nt, Human
gcccugguggcagugggagcug

SEQ ID NO: 1522079 - RNA, 23 nt, Human
gcccugguggcagugggagcugc

SEQ ID NO: 1522080 - RNA, 16 nt, Human
gccgagaucacgccac

SEQ ID NO: 1522081 - RNA, 18 nt, Human
gccgagaucacgccacug

SEQ ID NO: 1522082 - RNA, 19 nt, Human
gccgagaucacgccacugc

SEQ ID NO: 1522083 - RNA, 18 nt, Human
gccgagauugcaccacug

SEQ ID NO: 1522084 - RNA, 17 nt, Human
gccgagauugcaccacu

SEQ ID NO: 1522085 - RNA, 23 nt, Human
gcccuucucuccagccccuggau

SEQ ID NO: 1522086 - RNA, 21 nt, Human
gcccuucucuccagccccugg

SEQ ID NO: 1522087 - RNA, 22 nt, Human
gcccuucucuccagccccugga

SEQ ID NO: 1522088 - RNA, 19 nt, Human
gcccuucucuccagccccu

SEQ ID NO: 1522089 - RNA, 20 nt, Human
gcccuggaugcccaggaauc

SEQ ID NO: 1522090 - RNA, 17 nt, Human
gcccggcuccaggcucc

SEQ ID NO: 1522091 - RNA, 18 nt, Human
gcccggcuccaggcuccu

SEQ ID NO: 1522092 - RNA, 12 nt, Human
gcccucugccca

SEQ ID NO: 1522093 - RNA, 16 nt, Human
gcccugagcuuucugc

SEQ ID NO: 1522094 - RNA, 17 nt, Human
gcagacucuacagaggc

SEQ ID NO: 1522095 - RNA, 15 nt, Human
gcagacucuacagag

SEQ ID NO: 1522096 - RNA, 13 nt, Human
gccccugccaccc

SEQ ID NO: 1522097 - RNA, 14 nt, Human
gccccugccacccu

SEQ ID NO: 1522098 - RNA, 15 nt, Human
gccccugccacccug

SEQ ID NO: 1522099 - RNA, 21 nt, Human
gccccuguucuggcagaguug

SEQ ID NO: 1522100 - RNA, 12 nt, Human
gcccggcuccag

SEQ ID NO: 1522101 - RNA, 16 nt, Human
gcccggcuccaggcuc

SEQ ID NO: 1522102 - RNA, 19 nt, Human
gaugggugcuuggaggaag

SEQ ID NO: 1522103 - RNA, 13 nt, Human
gauggggcugcac

SEQ ID NO: 1522104 - RNA, 19 nt, Human
gauggggcugcaccggcug

SEQ ID NO: 1522105 - RNA, 15 nt, Human
gauggggcugcaccg

SEQ ID NO: 1522106 - RNA, 22 nt, Human
gauggccgggcgcgguggcuca

SEQ ID NO: 1522107 - RNA, 20 nt, Human
gaugggcaacccccagccug

SEQ ID NO: 1522108 - RNA, 21 nt, Human
gaugggcaacccccagccugc

SEQ ID NO: 1522109 - RNA, 24 nt, Human
gauggggcccugccuccuuuguga

SEQ ID NO: 1522110 - RNA, 18 nt, Human
gaugcuagaacucccuuu

SEQ ID NO: 1522111 - RNA, 20 nt, Human
gaugcuagaacucccuuuca

SEQ ID NO: 1522112 - RNA, 22 nt, Human
gaugcuagaacucccuuucaac

SEQ ID NO: 1522113 - RNA, 20 nt, Human
gaugcccaaagaugcagccg

SEQ ID NO: 1522114 - RNA, 19 nt, Human
gaugcccaaagaugcagcc

SEQ ID NO: 1522115 - RNA, 22 nt, Human
gaugguucccuugaugaagaag

SEQ ID NO: 1522116 - RNA, 17 nt, Human
gaugugggucaaggaau

SEQ ID NO: 1522117 - RNA, 12 nt, Human
gauggugcaaug

SEQ ID NO: 1522118 - RNA, 14 nt, Human
gauggugcaaugac

SEQ ID NO: 1522119 - RNA, 17 nt, Human
gauggugcaaugaccuu

SEQ ID NO: 1522120 - RNA, 15 nt, Human
gauggugcaaugacc

SEQ ID NO: 1522121 - RNA, 16 nt, Human
gauggugcaaugaccu

SEQ ID NO: 1522122 - RNA, 23 nt, Human
gauuacaagcgugagccacugca

SEQ ID NO: 1522123 - RNA, 15 nt, Human
gauuaaacuuaaucu

SEQ ID NO: 1522124 - RNA, 22 nt, Human
gauuacaagcgugagccacugc

SEQ ID NO: 1522125 - RNA, 21 nt, Human
gauucaaugccccugaauuua

SEQ ID NO: 1522126 - RNA, 19 nt, Human
gauucaaugccccugaauu

SEQ ID NO: 1522127 - RNA, 20 nt, Human
gauucaaugccccugaauuu

SEQ ID NO: 1522128 - RNA, 20 nt, Human
gauuacaggugugaaccacc

SEQ ID NO: 1522129 - RNA, 14 nt, Human
gauucuccugccuc

SEQ ID NO: 1522130 - RNA, 15 nt, Human
gauugcaacaggcug

SEQ ID NO: 1522131 - RNA, 22 nt, Human
gauugcguggaauugugcugag

SEQ ID NO: 1522132 - RNA, 14 nt, Human
gauuuaacagaaau

SEQ ID NO: 1522133 - RNA, 13 nt, Human
gauuuaacagaaa

SEQ ID NO: 1522134 - RNA, 22 nt, Human
gauuuccguuaaaauaccagcc

SEQ ID NO: 1522135 - RNA, 15 nt, Human
gauuuaacagaaaug

SEQ ID NO: 1522136 - RNA, 16 nt, Human
gcaaauugucacagga

SEQ ID NO: 1522137 - RNA, 15 nt, Human
gcaaaccaucauuga

SEQ ID NO: 1522138 - RNA, 23 nt, Human
gcaaagcacugacuucuaaguaa

SEQ ID NO: 1522139 - RNA, 21 nt, Human
gcaaagcugaugacaacuucc

SEQ ID NO: 1522140 - RNA, 17 nt, Human
gcaaaggaguagaaaga

SEQ ID NO: 1522141 - RNA, 19 nt, Human
gauuuugguuuuguucccc

SEQ ID NO: 1522142 - RNA, 22 nt, Human
gauuuugguuuuguuccccucc

SEQ ID NO: 1522143 - RNA, 12 nt, Human
gcaaaccaucau

SEQ ID NO: 1522144 - RNA, 21 nt, Human
gauuuugaaauuuuuauuaaa

SEQ ID NO: 1522145 - RNA, 19 nt, Human
gauuuugauccaagcuggu

SEQ ID NO: 1522146 - RNA, 14 nt, Human
gcagaagggggugg

SEQ ID NO: 1522147 - RNA, 15 nt, Human
gcagaaggggguggu

SEQ ID NO: 1522148 - RNA, 22 nt, Human
gcagaaggggguggugucucca

SEQ ID NO: 1522149 - RNA, 19 nt, Human
gcacuguggguagacacac

SEQ ID NO: 1522150 - RNA, 12 nt, Human
gcagacaggcaa

SEQ ID NO: 1522151 - RNA, 13 nt, Human
gcagacaggcaag

SEQ ID NO: 1522152 - RNA, 14 nt, Human
gcagacaggcaagc

SEQ ID NO: 1522153 - RNA, 23 nt, Human
gcacugcuuccagugaggcucug

SEQ ID NO: 1522154 - RNA, 16 nt, Human
gcacgauuucuguuua

SEQ ID NO: 1522155 - RNA, 15 nt, Human
gcacugacuucuaag

SEQ ID NO: 1522156 - RNA, 18 nt, Human
gcacugacuucuaaguaa

SEQ ID NO: 1522157 - RNA, 11 nt, Human
gcacugaggaa

SEQ ID NO: 1522158 - RNA, 13 nt, Human
gcacugaggaaga

SEQ ID NO: 1522159 - RNA, 18 nt, Human
gcacugaggaagaacggg

SEQ ID NO: 1522160 - RNA, 12 nt, Human
gcaccauaacuu

SEQ ID NO: 1522161 - RNA, 20 nt, Human
gcaccuuagacagucccugc

SEQ ID NO: 1522162 - RNA, 21 nt, Human
gcaccuuagacagucccugcc

SEQ ID NO: 1522163 - RNA, 15 nt, Human
gcacgauuucuguuu

SEQ ID NO: 1522164 - RNA, 13 nt, Human
gcacgauuucugu

SEQ ID NO: 1522165 - RNA, 21 nt, Human
gcacagaguuguuacauuuuu

SEQ ID NO: 1522166 - RNA, 19 nt, Human
gcacagaguuguuacauuu

SEQ ID NO: 1522167 - RNA, 18 nt, Human
gcacagaguuguuacauu

SEQ ID NO: 1522168 - RNA, 16 nt, Human
gcacagaguuguuaca

SEQ ID NO: 1522169 - RNA, 22 nt, Human
gcacagaguuguuacauuuuua

SEQ ID NO: 1522170 - RNA, 13 nt, Human
gcaacucugaagg

SEQ ID NO: 1522171 - RNA, 15 nt, Human
gcaauggcagccuug

SEQ ID NO: 1522172 - RNA, 14 nt, Human
gcaacucaucuuag

SEQ ID NO: 1522173 - RNA, 14 nt, Human
gcaaugugauaaaa

SEQ ID NO: 1522174 - RNA, 14 nt, Human
gcaauuucauaugc

SEQ ID NO: 1522175 - RNA, 15 nt, Human
gcacaaacagaggcc

SEQ ID NO: 1522176 - RNA, 16 nt, Human
gcacaaacagaggccg

SEQ ID NO: 1522177 - RNA, 14 nt, Human
gcacaaacagaggc

SEQ ID NO: 1522178 - RNA, 21 nt, Human
gcacaagcuccaagcucccag

SEQ ID NO: 1522179 - RNA, 18 nt, Human
gcacaagcuccaagcucc

SEQ ID NO: 1522180 - RNA, 15 nt, Human
gcacaagcuccaagc

SEQ ID NO: 1522181 - RNA, 17 nt, Human
gcacaagcuccaagcuc

SEQ ID NO: 1522182 - RNA, 20 nt, Human
gcacagaaaauggaagacag

SEQ ID NO: 1522183 - RNA, 15 nt, Human
gcacagaguuguuac

SEQ ID NO: 1522184 - RNA, 22 nt, Human
gcacagacccugcccugugggc

SEQ ID NO: 1522185 - RNA, 18 nt, Human
gcacagacccugcccugu

SEQ ID NO: 1522186 - RNA, 19 nt, Human
gcacagacccugcccugug

SEQ ID NO: 1522187 - RNA, 20 nt, Human
gcacagacccugcccugugg

SEQ ID NO: 1522188 - RNA, 21 nt, Human
gcacagacccugcccuguggg

SEQ ID NO: 1522189 - RNA, 21 nt, Human
gcacagaaaauggaagacagc

SEQ ID NO: 1522190 - RNA, 22 nt, Human
gcacagaaaauggaagacagcu

SEQ ID NO: 1522191 - RNA, 23 nt, Human
gcacagaaaauggaagacagcuc

SEQ ID NO: 1522192 - RNA, 14 nt, Human
gcacagacccugcc

SEQ ID NO: 1522193 - RNA, 15 nt, Human
gcacagacccugccc

SEQ ID NO: 1522194 - RNA, 16 nt, Human
gcacagacccugcccu

SEQ ID NO: 1522195 - RNA, 17 nt, Human
gcacagacccugcccug

SEQ ID NO: 1522196 - RNA, 22 nt, Human
gauaaauggcuuccuggcaaua

SEQ ID NO: 1522197 - RNA, 15 nt, Human
gaguugaagacagag

SEQ ID NO: 1522198 - RNA, 17 nt, Human
gaguugaagacagagcu

SEQ ID NO: 1522199 - RNA, 21 nt, Human
gaguugaagacagagcuacac

SEQ ID NO: 1522200 - RNA, 23 nt, Human
gaguugacuugacagaacacugu

SEQ ID NO: 1522201 - RNA, 13 nt, Human
gaguuacagacaa

SEQ ID NO: 1522202 - RNA, 15 nt, Human
gaguuacagacaaag

SEQ ID NO: 1522203 - RNA, 14 nt, Human
gaguucaucuugaa

SEQ ID NO: 1522204 - RNA, 19 nt, Human
gaguucaucuugaauugua

SEQ ID NO: 1522205 - RNA, 20 nt, Human
gaguucaucuugaauuguaa

SEQ ID NO: 1522206 - RNA, 18 nt, Human
gaguguacuuaacuauuc

SEQ ID NO: 1522207 - RNA, 13 nt, Human
gagugggugaaua

SEQ ID NO: 1522208 - RNA, 17 nt, Human
gagugacagaggcagcc

SEQ ID NO: 1522209 - RNA, 19 nt, Human
gagugucuuaauuaaaaga

SEQ ID NO: 1522210 - RNA, 20 nt, Human
gagugugccugaagucccag

SEQ ID NO: 1522211 - RNA, 12 nt, Human
gaguuacagaca

SEQ ID NO: 1522212 - RNA, 14 nt, Human
gauaugauucaaau

SEQ ID NO: 1522213 - RNA, 22 nt, Human
gauaugauucaaaugucuauaa

SEQ ID NO: 1522214 - RNA, 24 nt, Human
gauaugauucaaaugucuauaaac

SEQ ID NO: 1522215 - RNA, 18 nt, Human
gaucacggcucacugcag

SEQ ID NO: 1522216 - RNA, 14 nt, Human
gaucacagccucug

SEQ ID NO: 1522217 - RNA, 20 nt, Human
gaucacggcucacugcagcc

SEQ ID NO: 1522218 - RNA, 15 nt, Human
gaucacggcucacug

SEQ ID NO: 1522219 - RNA, 16 nt, Human
gaucacggcucacugc

SEQ ID NO: 1522220 - RNA, 21 nt, Human
gauacaggaaaagcugcugac

SEQ ID NO: 1522221 - RNA, 23 nt, Human
gauacaggaaaagcugcugacag

SEQ ID NO: 1522222 - RNA, 22 nt, Human
gauaagaaccuuuugagugccu

SEQ ID NO: 1522223 - RNA, 20 nt, Human
gauacaggaaaagcugcuga

SEQ ID NO: 1522224 - RNA, 16 nt, Human
gauagcacagacccug

SEQ ID NO: 1522225 - RNA, 15 nt, Human
gauagcacagacccu

SEQ ID NO: 1522226 - RNA, 22 nt, Human
gauagccaaggccaaaggaagc

SEQ ID NO: 1522227 - RNA, 21 nt, Human
gagucuauuuacggaacucaa

SEQ ID NO: 1522228 - RNA, 12 nt, Human
gagucugaaggc

SEQ ID NO: 1522229 - RNA, 13 nt, Human
gagucugaaggcu

SEQ ID NO: 1522230 - RNA, 15 nt, Human
gagucugaaggcugg

SEQ ID NO: 1522231 - RNA, 14 nt, Human
gagucugaaggcug

SEQ ID NO: 1522232 - RNA, 17 nt, Human
gagugaagcugggagaa

SEQ ID NO: 1522233 - RNA, 14 nt, Human
gagugacagaggca

SEQ ID NO: 1522234 - RNA, 15 nt, Human
gagugacagaggcag

SEQ ID NO: 1522235 - RNA, 16 nt, Human
gagugacagaggcagc

SEQ ID NO: 1522236 - RNA, 11 nt, Human
gaguauauguc

SEQ ID NO: 1522237 - RNA, 18 nt, Human
gaguaggaagacuuugga

SEQ ID NO: 1522238 - RNA, 19 nt, Human
gaguaggaagacuuuggaa

SEQ ID NO: 1522239 - RNA, 15 nt, Human
gagucgaggacaggg

SEQ ID NO: 1522240 - RNA, 16 nt, Human
gagucgaggacaggga

SEQ ID NO: 1522241 - RNA, 19 nt, Human
gaguccgaaagggacuugg

SEQ ID NO: 1522242 - RNA, 14 nt, Human
gagucgaggacagg

SEQ ID NO: 1522243 - RNA, 20 nt, Human
gaguacuacaguccucccau

SEQ ID NO: 1522244 - RNA, 17 nt, Human
gaguagaaagacagagc

SEQ ID NO: 1522245 - RNA, 20 nt, Human
gaguagaaagacagagcugg

SEQ ID NO: 1522246 - RNA, 21 nt, Human
gaguacuacaguccucccauc

SEQ ID NO: 1522247 - RNA, 23 nt, Human
gaguacuacaguccucccaucuc

SEQ ID NO: 1522248 - RNA, 22 nt, Human
gaguagaaagacagagcuggga

SEQ ID NO: 1522249 - RNA, 22 nt, Human
gaguagcugggacuacaggcac

SEQ ID NO: 1522250 - RNA, 12 nt, Human
gaguaggaagac

SEQ ID NO: 1522251 - RNA, 13 nt, Human
gaguaggaagacu

SEQ ID NO: 1522252 - RNA, 17 nt, Human
gaguaggaagacuuugg

SEQ ID NO: 1522253 - RNA, 17 nt, Human
gaggucagagccugcag

SEQ ID NO: 1522254 - RNA, 20 nt, Human
gaggucagagccugcaguua

SEQ ID NO: 1522255 - RNA, 15 nt, Human
gagguugggaggcca

SEQ ID NO: 1522256 - RNA, 17 nt, Human
gagguugggaggccauu

SEQ ID NO: 1522257 - RNA, 16 nt, Human
gagguuucaaaccucc

SEQ ID NO: 1522258 - RNA, 24 nt, Human
gagguaaggaauaccugucccccu

SEQ ID NO: 1522259 - RNA, 21 nt, Human
gagguaaggaauaccuguccc

SEQ ID NO: 1522260 - RNA, 14 nt, Human
gaggguugggcugg

SEQ ID NO: 1522261 - RNA, 15 nt, Human
gaggguugggcuggu

SEQ ID NO: 1522262 - RNA, 17 nt, Human
gaggucaaggcugcagu

SEQ ID NO: 1522263 - RNA, 12 nt, Human
gaggucagagcc

SEQ ID NO: 1522264 - RNA, 13 nt, Human
gaggucagagccu

SEQ ID NO: 1522265 - RNA, 13 nt, Human
gaggguccugcag

SEQ ID NO: 1522266 - RNA, 17 nt, Human
gaggguccugcagccug

SEQ ID NO: 1522267 - RNA, 21 nt, Human
gaggguccugcagccugcagg

SEQ ID NO: 1522268 - RNA, 18 nt, Human
gaggguccugcagccugc

SEQ ID NO: 1522269 - RNA, 13 nt, Human
gagggucugagga

SEQ ID NO: 1522270 - RNA, 14 nt, Human
gagggucugaggaa

SEQ ID NO: 1522271 - RNA, 21 nt, Human
gagggugaagugaagacaaug

SEQ ID NO: 1522272 - RNA, 23 nt, Human
gagggugccguguccccugacag

SEQ ID NO: 1522273 - RNA, 12 nt, Human
gaggguggaaua

SEQ ID NO: 1522274 - RNA, 15 nt, Human
gagggugggaguggg

SEQ ID NO: 1522275 - RNA, 14 nt, Human
gaggguggugaccu

SEQ ID NO: 1522276 - RNA, 21 nt, Human
gaggguggugaccucugccug

SEQ ID NO: 1522277 - RNA, 22 nt, Human
gagggugucccaaaaagaaagg

SEQ ID NO: 1522278 - RNA, 20 nt, Human
gaggcugggcucccuuccca

SEQ ID NO: 1522279 - RNA, 22 nt, Human
gagggagcaaguccuucccuuu

SEQ ID NO: 1522280 - RNA, 19 nt, Human
gagggagggcuccagacac

SEQ ID NO: 1522281 - RNA, 21 nt, Human
gagggagugacagaggcagcc

SEQ ID NO: 1522282 - RNA, 22 nt, Human
gagggagugacagaggcagccc

SEQ ID NO: 1522283 - RNA, 20 nt, Human
gagggagggcuccagacaca

SEQ ID NO: 1522284 - RNA, 14 nt, Human
gagggagguaagga

SEQ ID NO: 1522285 - RNA, 18 nt, Human
gagggagugacagaggca

SEQ ID NO: 1522286 - RNA, 14 nt, Human
gagggcacagaaaa

SEQ ID NO: 1522287 - RNA, 17 nt, Human
gaggggguggccuccca

SEQ ID NO: 1522288 - RNA, 13 nt, Human
gaggguaaggcug

SEQ ID NO: 1522289 - RNA, 19 nt, Human
gaggggugcggcgguccca

SEQ ID NO: 1522290 - RNA, 22 nt, Human
gaggggugcggcggucccagcu

SEQ ID NO: 1522291 - RNA, 16 nt, Human
gaggccuucucugaag

SEQ ID NO: 1522292 - RNA, 18 nt, Human
gaggccuucucugaagga

SEQ ID NO: 1522293 - RNA, 19 nt, Human
gaggccuucucugaaggac

SEQ ID NO: 1522294 - RNA, 11 nt, Human
gaggcccagag

SEQ ID NO: 1522295 - RNA, 13 nt, Human
gaggcccagaggg

SEQ ID NO: 1522296 - RNA, 14 nt, Human
gaggcccagagggc

SEQ ID NO: 1522297 - RNA, 19 nt, Human
gaggcccagagggccugca

SEQ ID NO: 1522298 - RNA, 15 nt, Human
gaggcccagagggcc

SEQ ID NO: 1522299 - RNA, 16 nt, Human
gaggcccagagggccu

SEQ ID NO: 1522300 - RNA, 22 nt, Human
gaggcccuucucuccagccccu

SEQ ID NO: 1522301 - RNA, 21 nt, Human
gaggcccuucucuccagcccc

SEQ ID NO: 1522302 - RNA, 15 nt, Human
gaggcccuucucucc

SEQ ID NO: 1522303 - RNA, 20 nt, Human
gaggcccuucucuccagccc

SEQ ID NO: 1522304 - RNA, 19 nt, Human
gaggcagagguugcaguga

SEQ ID NO: 1522305 - RNA, 19 nt, Human
gaggcagccccauucugcc

SEQ ID NO: 1522306 - RNA, 21 nt, Human
gaggcagccccauucugccug

SEQ ID NO: 1522307 - RNA, 20 nt, Human
gaggcagccccauucugccu

SEQ ID NO: 1522308 - RNA, 9 nt, Human
gaggcaggg

SEQ ID NO: 1522309 - RNA, 14 nt, Human
gaggccaugggccu

SEQ ID NO: 1522310 - RNA, 17 nt, Human
gaggccaugggccuccu

SEQ ID NO: 1522311 - RNA, 18 nt, Human
gaggccaugggccuccug

SEQ ID NO: 1522312 - RNA, 20 nt, Human
gaggccaugggccuccugug

SEQ ID NO: 1522313 - RNA, 21 nt, Human
gaggccaugggccuccugugu

SEQ ID NO: 1522314 - RNA, 23 nt, Human
gaggccaugggccuccugugugu

SEQ ID NO: 1522315 - RNA, 20 nt, Human
gaggauugcuugagcucagg

SEQ ID NO: 1522316 - RNA, 13 nt, Human
gaggaucucuuga

SEQ ID NO: 1522317 - RNA, 22 nt, Human
gaggaucucuugagccugggag

SEQ ID NO: 1522318 - RNA, 16 nt, Human
gaggaucucuugagcc

SEQ ID NO: 1522319 - RNA, 19 nt, Human
gaggaucucuugagccugg

SEQ ID NO: 1522320 - RNA, 19 nt, Human
gagauagccaaggccaaag

SEQ ID NO: 1522321 - RNA, 18 nt, Human
gagaucacgccacugcac

SEQ ID NO: 1522322 - RNA, 19 nt, Human
gagaucacgccacugcacu

SEQ ID NO: 1522323 - RNA, 14 nt, Human
gagauagccaaggc

SEQ ID NO: 1522324 - RNA, 16 nt, Human
gagauagccaaggcca

SEQ ID NO: 1522325 - RNA, 23 nt, Human
gagaucaaccccuucgcuccugu

SEQ ID NO: 1522326 - RNA, 20 nt, Human
gagcaccuuagacagucccu

SEQ ID NO: 1522327 - RNA, 21 nt, Human
gagcacuaaggugugcucuga

SEQ ID NO: 1522328 - RNA, 15 nt, Human
gagcacuaaggugug

SEQ ID NO: 1522329 - RNA, 21 nt, Human
gagcaccuuagacagucccug

SEQ ID NO: 1522330 - RNA, 22 nt, Human
gagcaccuuagacagucccugc

SEQ ID NO: 1522331 - RNA, 19 nt, Human
gagccaauuuaaagaaaac

SEQ ID NO: 1522332 - RNA, 12 nt, Human
gagcagagacca

SEQ ID NO: 1522333 - RNA, 16 nt, Human
gagcagagaauucucu

SEQ ID NO: 1522334 - RNA, 14 nt, Human
gagccagggucuca

SEQ ID NO: 1522335 - RNA, 23 nt, Human
gagccagauuucacucuccuugg

SEQ ID NO: 1522336 - RNA, 19 nt, Human
gagccagggucucacuaug

SEQ ID NO: 1522337 - RNA, 14 nt, Human
gagcccagaggagg

SEQ ID NO: 1522338 - RNA, 22 nt, Human
gagcccagaggagggcagcaga

SEQ ID NO: 1522339 - RNA, 20 nt, Human
gagaaugagagacacacuga

SEQ ID NO: 1522340 - RNA, 21 nt, Human
gagaaugagagacacacugaa

SEQ ID NO: 1522341 - RNA, 23 nt, Human
gagaaugcacaaacagaggccgc

SEQ ID NO: 1522342 - RNA, 19 nt, Human
gagacagcuugaucaaagg

SEQ ID NO: 1522343 - RNA, 15 nt, Human
gagaauguaagaacu

SEQ ID NO: 1522344 - RNA, 16 nt, Human
gagaauguaagaacua

SEQ ID NO: 1522345 - RNA, 20 nt, Human
gagacagcucugcauacuca

SEQ ID NO: 1522346 - RNA, 14 nt, Human
gagaccaucccuga

SEQ ID NO: 1522347 - RNA, 18 nt, Human
gagaccaucccugaaggc

SEQ ID NO: 1522348 - RNA, 21 nt, Human
gagaccaucccugaaggcccc

SEQ ID NO: 1522349 - RNA, 22 nt, Human
gagacaggguuuugccauguug

SEQ ID NO: 1522350 - RNA, 19 nt, Human
gagacuccugcaggcagcc

SEQ ID NO: 1522351 - RNA, 20 nt, Human
gagacuccugcaggcagcca

SEQ ID NO: 1522352 - RNA, 21 nt, Human
gagacuccugcaggcagccag

SEQ ID NO: 1522353 - RNA, 20 nt, Human
gagacucgcgacaaugcaaa

SEQ ID NO: 1522354 - RNA, 21 nt, Human
gagacucgcgacaaugcaaac

SEQ ID NO: 1522355 - RNA, 22 nt, Human
gagacuccugcaggcagccagg

SEQ ID NO: 1522356 - RNA, 13 nt, Human
gagacucugucuc

SEQ ID NO: 1522357 - RNA, 18 nt, Human
gagagccccucacacagc

SEQ ID NO: 1522358 - RNA, 13 nt, Human
gagagagcuggag

SEQ ID NO: 1522359 - RNA, 15 nt, Human
gagaguagaacagau

SEQ ID NO: 1522360 - RNA, 13 nt, Human
gagaggggcacag

SEQ ID NO: 1522361 - RNA, 19 nt, Human
gagaggggaacagacugga

SEQ ID NO: 1522362 - RNA, 14 nt, Human
gagagggugggagu

SEQ ID NO: 1522363 - RNA, 20 nt, Human
gagagggugggagugggccc

SEQ ID NO: 1522364 - RNA, 16 nt, Human
gagagggugggagugg

SEQ ID NO: 1522365 - RNA, 13 nt, Human
gagaagccacagg

SEQ ID NO: 1522366 - RNA, 17 nt, Human
gagaagccacaggccug

SEQ ID NO: 1522367 - RNA, 18 nt, Human
gagaagccacaggccuga

SEQ ID NO: 1522368 - RNA, 17 nt, Human
gagaaugagagacacac

SEQ ID NO: 1522369 - RNA, 20 nt, Human
gagaagccacaggccugaga

SEQ ID NO: 1522370 - RNA, 22 nt, Human
gagaagccacaggccugagauu

SEQ ID NO: 1522371 - RNA, 16 nt, Human
gagaagagaaugcaca

SEQ ID NO: 1522372 - RNA, 16 nt, Human
gagaagcagaggaagg

SEQ ID NO: 1522373 - RNA, 13 nt, Human
gagaagagcuguu

SEQ ID NO: 1522374 - RNA, 22 nt, Human
gagaacuuccagauccuggaaa

SEQ ID NO: 1522375 - RNA, 23 nt, Human
gagaacuuccagauccuggaaau

SEQ ID NO: 1522376 - RNA, 13 nt, Human
gagaagaacugaa

SEQ ID NO: 1522377 - RNA, 14 nt, Human
gagaagagaaugca

SEQ ID NO: 1522378 - RNA, 15 nt, Human
gagaacuuucauuuu

SEQ ID NO: 1522379 - RNA, 16 nt, Human
gagaacuuucauuuuu

SEQ ID NO: 1522380 - RNA, 17 nt, Human
gagaacuuucauuuuuu

SEQ ID NO: 1522381 - RNA, 21 nt, Human
gagaaccuagggugauauuaa

SEQ ID NO: 1522382 - RNA, 22 nt, Human
gagaaccuagggugauauuaac

SEQ ID NO: 1522383 - RNA, 14 nt, Human
gagaaaugagcuug

SEQ ID NO: 1522384 - RNA, 22 nt, Human
gagaaaguacuucuccacccug

SEQ ID NO: 1522385 - RNA, 16 nt, Human
gagaaagguugaagca

SEQ ID NO: 1522386 - RNA, 13 nt, Human
gacuuggaagcuc

SEQ ID NO: 1522387 - RNA, 16 nt, Human
gacuugacagaacacu

SEQ ID NO: 1522388 - RNA, 18 nt, Human
gacuugacagaacacugu

SEQ ID NO: 1522389 - RNA, 19 nt, Human
gacuuaagcacacuugaca

SEQ ID NO: 1522390 - RNA, 16 nt, Human
gacuucuaaguaaaac

SEQ ID NO: 1522391 - RNA, 17 nt, Human
gacuucuaaguaaaacc

SEQ ID NO: 1522392 - RNA, 18 nt, Human
gacuucuaaguaaaacca

SEQ ID NO: 1522393 - RNA, 24 nt, Human
gacuucuaaguaaaaccacagcag

SEQ ID NO: 1522394 - RNA, 19 nt, Human
gacuucuaaguaaaaccac

SEQ ID NO: 1522395 - RNA, 23 nt, Human
gacuucuaaguaaaaccacagca

SEQ ID NO: 1522396 - RNA, 20 nt, Human
gacuucugucuucacaacag

SEQ ID NO: 1522397 - RNA, 23 nt, Human
gacuucugucuucacaacagauu

SEQ ID NO: 1522398 - RNA, 24 nt, Human
gacugcauuauauuuauuacugua

SEQ ID NO: 1522399 - RNA, 13 nt, Human
gacugcccggcag

SEQ ID NO: 1522400 - RNA, 15 nt, Human
gacugcccggcaggg

SEQ ID NO: 1522401 - RNA, 14 nt, Human
gacugcauuauauu

SEQ ID NO: 1522402 - RNA, 16 nt, Human
gacugcauuauauuua

SEQ ID NO: 1522403 - RNA, 23 nt, Human
gacugaguacguugugcauuugg

SEQ ID NO: 1522404 - RNA, 17 nt, Human
gacucgcgacaaugcaa

SEQ ID NO: 1522405 - RNA, 19 nt, Human
gacucgagaacuuucauuu

SEQ ID NO: 1522406 - RNA, 16 nt, Human
gacucgagaacuuuca

SEQ ID NO: 1522407 - RNA, 22 nt, Human
gacugaguacguugugcauuug

SEQ ID NO: 1522408 - RNA, 21 nt, Human
gacugaguacguugugcauuu

SEQ ID NO: 1522409 - RNA, 14 nt, Human
gacuggaagcacag

SEQ ID NO: 1522410 - RNA, 15 nt, Human
gacuggaagcacagc

SEQ ID NO: 1522411 - RNA, 16 nt, Human
gacuggaagcacagcu

SEQ ID NO: 1522412 - RNA, 18 nt, Human
gacuggaagcacagcuuc

SEQ ID NO: 1522413 - RNA, 14 nt, Human
gacucauucuucug

SEQ ID NO: 1522414 - RNA, 15 nt, Human
gacucauucuucugu

SEQ ID NO: 1522415 - RNA, 18 nt, Human
gacuacaggugugaguca

SEQ ID NO: 1522416 - RNA, 21 nt, Human
gacuacaggugugagucacca

SEQ ID NO: 1522417 - RNA, 13 nt, Human
gacuacaggugug

SEQ ID NO: 1522418 - RNA, 12 nt, Human
gacuccugcagg

SEQ ID NO: 1522419 - RNA, 14 nt, Human
gacuccugcaggca

SEQ ID NO: 1522420 - RNA, 13 nt, Human
gacuccugcaggc

SEQ ID NO: 1522421 - RNA, 13 nt, Human
gacucgcgacaau

SEQ ID NO: 1522422 - RNA, 16 nt, Human
gacuccaaagaaaugu

SEQ ID NO: 1522423 - RNA, 18 nt, Human
gacuccaaagaaauguaa

SEQ ID NO: 1522424 - RNA, 21 nt, Human
gacucauuuuaaaaaauggaa

SEQ ID NO: 1522425 - RNA, 11 nt, Human
gacuccaaaga

SEQ ID NO: 1522426 - RNA, 12 nt, Human
gacuccaaagaa

SEQ ID NO: 1522427 - RNA, 15 nt, Human
gacuccaaagaaaug

SEQ ID NO: 1522428 - RNA, 16 nt, Human
gaauuggagcucgugg

SEQ ID NO: 1522429 - RNA, 16 nt, Human
gaauugacccacaaga

SEQ ID NO: 1522430 - RNA, 21 nt, Human
gaauugacccacaagaaauga

SEQ ID NO: 1522431 - RNA, 18 nt, Human
gaauucuugaaggaaaau

SEQ ID NO: 1522432 - RNA, 23 nt, Human
gaauucuugaaggaaaaugauac

SEQ ID NO: 1522433 - RNA, 15 nt, Human
gaauguuaagcagau

SEQ ID NO: 1522434 - RNA, 15 nt, Human
gaauguuugccucug

SEQ ID NO: 1522435 - RNA, 14 nt, Human
gaauguuaagcaga

SEQ ID NO: 1522436 - RNA, 13 nt, Human
gaaugucagugug

SEQ ID NO: 1522437 - RNA, 20 nt, Human
gaauccagacccggcugcgu

SEQ ID NO: 1522438 - RNA, 12 nt, Human
gaaaggcuccag

SEQ ID NO: 1522439 - RNA, 18 nt, Human
gaaucucugaauuugaga

SEQ ID NO: 1522440 - RNA, 19 nt, Human
gaaucucauaauuuauaca

SEQ ID NO: 1522441 - RNA, 20 nt, Human
gaaugcacaaacagaggccg

SEQ ID NO: 1522442 - RNA, 18 nt, Human
gaaugaaccacaucuugc

SEQ ID NO: 1522443 - RNA, 21 nt, Human
gaaugcacaaacagaggccgc

SEQ ID NO: 1522444 - RNA, 13 nt, Human
gaaugcuguguua

SEQ ID NO: 1522445 - RNA, 11 nt, Human
gaaugcagugg

SEQ ID NO: 1522446 - RNA, 14 nt, Human
gaaugcuguguuaa

SEQ ID NO: 1522447 - RNA, 22 nt, Human
gaauggcacagcccaaagaagg

SEQ ID NO: 1522448 - RNA, 20 nt, Human
gaauuugauaugugaacagu

SEQ ID NO: 1522449 - RNA, 22 nt, Human
gaauuucuuuugccguuauuaa

SEQ ID NO: 1522450 - RNA, 19 nt, Human
gaauuucuaggacugaauu

SEQ ID NO: 1522451 - RNA, 20 nt, Human
gaauuucuaggacugaauua

SEQ ID NO: 1522452 - RNA, 15 nt, Human
gaauuguaaggaaug

SEQ ID NO: 1522453 - RNA, 22 nt, Human
gacaacacucauugaccugagg

SEQ ID NO: 1522454 - RNA, 23 nt, Human
gacaacacucauugaccugaggc

SEQ ID NO: 1522455 - RNA, 16 nt, Human
gacaaggaaaaaauaa

SEQ ID NO: 1522456 - RNA, 21 nt, Human
gacaaggaugaucuaggaaga

SEQ ID NO: 1522457 - RNA, 18 nt, Human
gacaaggauugcuacugu

SEQ ID NO: 1522458 - RNA, 19 nt, Human
gacaaggauugcuacuguc

SEQ ID NO: 1522459 - RNA, 21 nt, Human
gacaaggauugcuacuguccu

SEQ ID NO: 1522460 - RNA, 19 nt, Human
gacaaugugaaaagaaaaa

SEQ ID NO: 1522461 - RNA, 20 nt, Human
gacaaugugaaaagaaaaau

SEQ ID NO: 1522462 - RNA, 22 nt, Human
gacaaugcaaaccaucauugaa

SEQ ID NO: 1522463 - RNA, 12 nt, Human
gacaaugugaaa

SEQ ID NO: 1522464 - RNA, 18 nt, Human
gacaaugugaaaagaaaa

SEQ ID NO: 1522465 - RNA, 16 nt, Human
gacacaagccuucggc

SEQ ID NO: 1522466 - RNA, 22 nt, Human
gacacaagccuucggcgccuua

SEQ ID NO: 1522467 - RNA, 13 nt, Human
gacacaacuauuu

SEQ ID NO: 1522468 - RNA, 19 nt, Human
gacacaggcccggcuccag

SEQ ID NO: 1522469 - RNA, 14 nt, Human
gacacaugcaaggu

SEQ ID NO: 1522470 - RNA, 20 nt, Human
gacacaggcccggcuccagg

SEQ ID NO: 1522471 - RNA, 21 nt, Human
gacacaggcccggcuccaggc

SEQ ID NO: 1522472 - RNA, 19 nt, Human
gacacaugcaaggucauuu

SEQ ID NO: 1522473 - RNA, 15 nt, Human
gacacauguccaaga

SEQ ID NO: 1522474 - RNA, 20 nt, Human
gacacauguccaagaagccc

SEQ ID NO: 1522475 - RNA, 23 nt, Human
gacacauguccaagaagcccagg

SEQ ID NO: 1522476 - RNA, 17 nt, Human
gacaugggacauuugcu

SEQ ID NO: 1522477 - RNA, 16 nt, Human
gacaugggacauuugc

SEQ ID NO: 1522478 - RNA, 18 nt, Human
gacaugggaaaggggaag

SEQ ID NO: 1522479 - RNA, 14 nt, Human
gaccacguuucuaa

SEQ ID NO: 1522480 - RNA, 16 nt, Human
gaccacguuucuaaag

SEQ ID NO: 1522481 - RNA, 21 nt, Human
gaccacugcagaagacaguau

SEQ ID NO: 1522482 - RNA, 21 nt, Human
gaccagacaccuugacagggc

SEQ ID NO: 1522483 - RNA, 11 nt, Human
gaccagagcug

SEQ ID NO: 1522484 - RNA, 19 nt, Human
gaccauucuccaccugcca

SEQ ID NO: 1522485 - RNA, 20 nt, Human
gaccauucuccaccugccag

SEQ ID NO: 1522486 - RNA, 21 nt, Human
gaccauucuccaccugccagg

SEQ ID NO: 1522487 - RNA, 22 nt, Human
gaccauucuccaccugccaggg

SEQ ID NO: 1522488 - RNA, 18 nt, Human
gaccagagcugccaccug

SEQ ID NO: 1522489 - RNA, 19 nt, Human
gaccagagcugccaccugc

SEQ ID NO: 1522490 - RNA, 13 nt, Human
gaccagagcugcc

SEQ ID NO: 1522491 - RNA, 14 nt, Human
gaccagagcugcca

SEQ ID NO: 1522492 - RNA, 15 nt, Human
gaccagagcugccac

SEQ ID NO: 1522493 - RNA, 17 nt, Human
gaccagagcugccaccu

SEQ ID NO: 1522494 - RNA, 12 nt, Human
gacccugucuca

SEQ ID NO: 1522495 - RNA, 19 nt, Human
gacccuuguggucccaccc

SEQ ID NO: 1522496 - RNA, 20 nt, Human
gacccuuguggucccacccc

SEQ ID NO: 1522497 - RNA, 21 nt, Human
gacccuuguggucccacccca

SEQ ID NO: 1522498 - RNA, 19 nt, Human
gaccgugaggccagagaca

SEQ ID NO: 1522499 - RNA, 18 nt, Human
gaccgugaggccagagac

SEQ ID NO: 1522500 - RNA, 16 nt, Human
gaccgugaggccagag

SEQ ID NO: 1522501 - RNA, 17 nt, Human
gaccgugaggccagaga

SEQ ID NO: 1522502 - RNA, 16 nt, Human
gacccaaaaggcagaa

SEQ ID NO: 1522503 - RNA, 15 nt, Human
gacccacaagaaaug

SEQ ID NO: 1522504 - RNA, 22 nt, Human
gacccacaagaaaugaaagcag

SEQ ID NO: 1522505 - RNA, 14 nt, Human
gaccccuccaugug

SEQ ID NO: 1522506 - RNA, 18 nt, Human
gaccccuccaugugggcu

SEQ ID NO: 1522507 - RNA, 21 nt, Human
gaccccuccaugugggcuagu

SEQ ID NO: 1522508 - RNA, 22 nt, Human
gacccugaggcccagagggccu

SEQ ID NO: 1522509 - RNA, 23 nt, Human
gacccugaggcccagagggccug

SEQ ID NO: 1522510 - RNA, 12 nt, Human
gacccugcccug

SEQ ID NO: 1522511 - RNA, 22 nt, Human
gacaguuaagagaaaugagcuu

SEQ ID NO: 1522512 - RNA, 20 nt, Human
gacauagaauuaacacauga

SEQ ID NO: 1522513 - RNA, 14 nt, Human
gacaugaucuucuu

SEQ ID NO: 1522514 - RNA, 14 nt, Human
gacaugggaaaggg

SEQ ID NO: 1522515 - RNA, 23 nt, Human
gacagggcacaccgggcacucag

SEQ ID NO: 1522516 - RNA, 18 nt, Human
gacagggaggacgcucuc

SEQ ID NO: 1522517 - RNA, 16 nt, Human
gacagggaggugaccc

SEQ ID NO: 1522518 - RNA, 14 nt, Human
gacaguuaagagaa

SEQ ID NO: 1522519 - RNA, 24 nt, Human
gacagggcacaccgggcacucaga

SEQ ID NO: 1522520 - RNA, 17 nt, Human
gacagggaggacgcucu

SEQ ID NO: 1522521 - RNA, 19 nt, Human
gacaggaccccagcucugc

SEQ ID NO: 1522522 - RNA, 14 nt, Human
gacaggaccccagc

SEQ ID NO: 1522523 - RNA, 15 nt, Human
gacaggaccccagcu

SEQ ID NO: 1522524 - RNA, 16 nt, Human
gacaggaccccagcuc

SEQ ID NO: 1522525 - RNA, 17 nt, Human
gacaggaccccagcucu

SEQ ID NO: 1522526 - RNA, 18 nt, Human
gacaggaccccagcucug

SEQ ID NO: 1522527 - RNA, 20 nt, Human
gacaggaccccagcucugcg

SEQ ID NO: 1522528 - RNA, 14 nt, Human
gacaggaccaggga

SEQ ID NO: 1522529 - RNA, 15 nt, Human
gacaggaccagggau

SEQ ID NO: 1522530 - RNA, 23 nt, Human
gacaggaccagggauuuccauga

SEQ ID NO: 1522531 - RNA, 18 nt, Human
gacagcugccugggaucc

SEQ ID NO: 1522532 - RNA, 21 nt, Human
gacagcugccugggaucccuc

SEQ ID NO: 1522533 - RNA, 20 nt, Human
gacagccacggccaggccag

SEQ ID NO: 1522534 - RNA, 21 nt, Human
gacagccacggccaggccaga

SEQ ID NO: 1522535 - RNA, 16 nt, Human
gacagcugccugggau

SEQ ID NO: 1522536 - RNA, 17 nt, Human
gacagcugccugggauc

SEQ ID NO: 1522537 - RNA, 20 nt, Human
gacagagugagacucugucu

SEQ ID NO: 1522538 - RNA, 22 nt, Human
gacagagugagacucugucuca

SEQ ID NO: 1522539 - RNA, 14 nt, Human
gacagccacggcca

SEQ ID NO: 1522540 - RNA, 17 nt, Human
gacagccacggccaggc

SEQ ID NO: 1522541 - RNA, 18 nt, Human
gacagccacggccaggcc

SEQ ID NO: 1522542 - RNA, 19 nt, Human
gacagccacggccaggcca

SEQ ID NO: 1522543 - RNA, 21 nt, Human
gacagagcaagugagacccug

SEQ ID NO: 1522544 - RNA, 14 nt, Human
gacagaggcagccc

SEQ ID NO: 1522545 - RNA, 16 nt, Human
gacagaggcagcccca

SEQ ID NO: 1522546 - RNA, 17 nt, Human
gacagaggcagccccau

SEQ ID NO: 1522547 - RNA, 15 nt, Human
gacagaggggguggc

SEQ ID NO: 1522548 - RNA, 18 nt, Human
gacagaggggguggccuc

SEQ ID NO: 1522549 - RNA, 19 nt, Human
gacagaggggguggccucc

SEQ ID NO: 1522550 - RNA, 21 nt, Human
gacagaggggguggccuccca

SEQ ID NO: 1522551 - RNA, 22 nt, Human
gacagaggggguggccucccaa

SEQ ID NO: 1522552 - RNA, 23 nt, Human
gacagaggggguggccucccaac

SEQ ID NO: 1522553 - RNA, 14 nt, Human
gacagagucucacu

SEQ ID NO: 1522554 - RNA, 20 nt, Human
cuuuuguucuugguuuguaa

SEQ ID NO: 1522555 - RNA, 18 nt, Human
cuuuguuaguuucuccaa

SEQ ID NO: 1522556 - RNA, 12 nt, Human
cuuuuguucuug

SEQ ID NO: 1522557 - RNA, 11 nt, Human
cuuuuguucuu

SEQ ID NO: 1522558 - RNA, 12 nt, Human
gaaaaaggagga

SEQ ID NO: 1522559 - RNA, 15 nt, Human
gaaaaaggaggaaga

SEQ ID NO: 1522560 - RNA, 18 nt, Human
gaaaacacauuuuucuua

SEQ ID NO: 1522561 - RNA, 17 nt, Human
gaaaaaggaugcacaga

SEQ ID NO: 1522562 - RNA, 19 nt, Human
gaaaacacauuuuucuuag

SEQ ID NO: 1522563 - RNA, 18 nt, Human
gaaaacacuguucucugc

SEQ ID NO: 1522564 - RNA, 17 nt, Human
cuuuuuuggcugcugaa

SEQ ID NO: 1522565 - RNA, 20 nt, Human
cuuuuuuggcugcugaaggc

SEQ ID NO: 1522566 - RNA, 22 nt, Human
cuuuuuuggcugcugaaggcuc

SEQ ID NO: 1522567 - RNA, 21 nt, Human
gaaaauauuauguguuuccau

SEQ ID NO: 1522568 - RNA, 18 nt, Human
gaaaauauuuguaucaca

SEQ ID NO: 1522569 - RNA, 18 nt, Human
gaaaaucuuauaauuuaa

SEQ ID NO: 1522570 - RNA, 22 nt, Human
gaaaaucuacacuccagugaga

SEQ ID NO: 1522571 - RNA, 20 nt, Human
gaaaaucagccugcuccagc

SEQ ID NO: 1522572 - RNA, 22 nt, Human
gaaaaucagccugcuccagcug

SEQ ID NO: 1522573 - RNA, 14 nt, Human
gaaaaguugaauuu

SEQ ID NO: 1522574 - RNA, 15 nt, Human
gaaaaguugaauuuu

SEQ ID NO: 1522575 - RNA, 11 nt, Human
gaaaaggcagg

SEQ ID NO: 1522576 - RNA, 24 nt, Human
gaaaacacuguucucugcccucca

SEQ ID NO: 1522577 - RNA, 20 nt, Human
gaaaacguggcugcuucaag

SEQ ID NO: 1522578 - RNA, 22 nt, Human
gaaaacguggcugcuucaagga

SEQ ID NO: 1522579 - RNA, 21 nt, Human
gaaagcuugcccuggugccuc

SEQ ID NO: 1522580 - RNA, 14 nt, Human
gaaagcagggacuu

SEQ ID NO: 1522581 - RNA, 17 nt, Human
gaaagcccugagcuuuc

SEQ ID NO: 1522582 - RNA, 21 nt, Human
gaaagcccugagcuuucugcu

SEQ ID NO: 1522583 - RNA, 22 nt, Human
gaaagcccugagcuuucugcua

SEQ ID NO: 1522584 - RNA, 15 nt, Human
gaaagaguaggaaga

SEQ ID NO: 1522585 - RNA, 16 nt, Human
gaaagaguaggaagac

SEQ ID NO: 1522586 - RNA, 22 nt, Human
gaaagcagaacagugauuacca

SEQ ID NO: 1522587 - RNA, 17 nt, Human
gaaagcagaacagugau

SEQ ID NO: 1522588 - RNA, 20 nt, Human
gaaagaggcagcuugaaacu

SEQ ID NO: 1522589 - RNA, 21 nt, Human
gaaagaggaaugaaguacuca

SEQ ID NO: 1522590 - RNA, 17 nt, Human
gaaagagaacuuccaga

SEQ ID NO: 1522591 - RNA, 19 nt, Human
gaaagacuuuuccaacccu

SEQ ID NO: 1522592 - RNA, 23 nt, Human
gaaacucguuaauuuguaguguu

SEQ ID NO: 1522593 - RNA, 14 nt, Human
gaaacccugucucu

SEQ ID NO: 1522594 - RNA, 23 nt, Human
gaaacccagcucugguccauaga

SEQ ID NO: 1522595 - RNA, 21 nt, Human
gaaaccauuaugaagaagaga

SEQ ID NO: 1522596 - RNA, 16 nt, Human
gaaacacaacuauauu

SEQ ID NO: 1522597 - RNA, 16 nt, Human
gaaaaugaaucccucu

SEQ ID NO: 1522598 - RNA, 20 nt, Human
gaaaaugauacgcaacauaa

SEQ ID NO: 1522599 - RNA, 18 nt, Human
gaaaaugcaacaacaugu

SEQ ID NO: 1522600 - RNA, 20 nt, Human
gaaaaugcaacaacauguau

SEQ ID NO: 1522601 - RNA, 13 nt, Human
gaaacccagcucu

SEQ ID NO: 1522602 - RNA, 14 nt, Human
gaaacccagcucug

SEQ ID NO: 1522603 - RNA, 15 nt, Human
gaaacccagcucugg

SEQ ID NO: 1522604 - RNA, 16 nt, Human
gaaacccagcucuggu

SEQ ID NO: 1522605 - RNA, 18 nt, Human
gaaacccagcucuggucc

SEQ ID NO: 1522606 - RNA, 19 nt, Human
gaaacccagcucuggucca

SEQ ID NO: 1522607 - RNA, 17 nt, Human
cuuguacuuuauuuucu

SEQ ID NO: 1522608 - RNA, 23 nt, Human
cuugucaauaaaauccauacauu

SEQ ID NO: 1522609 - RNA, 19 nt, Human
cuugaguuuaaauuguaau

SEQ ID NO: 1522610 - RNA, 23 nt, Human
cuuggggggcugaggugggagga

SEQ ID NO: 1522611 - RNA, 12 nt, Human
cuuguacauaau

SEQ ID NO: 1522612 - RNA, 15 nt, Human
cuuguacauaaugcg

SEQ ID NO: 1522613 - RNA, 17 nt, Human
cuuguaaauagcucagg

SEQ ID NO: 1522614 - RNA, 18 nt, Human
cuuguaaauagcucaggu

SEQ ID NO: 1522615 - RNA, 21 nt, Human
cuuguacauaaugcgugcaua

SEQ ID NO: 1522616 - RNA, 19 nt, Human
cuuguacauaaugcgugca

SEQ ID NO: 1522617 - RNA, 22 nt, Human
cuuguacauaaugcgugcauac

SEQ ID NO: 1522618 - RNA, 21 nt, Human
cuuguaaauagcucagguguc

SEQ ID NO: 1522619 - RNA, 15 nt, Human
cuuuaugcacaaaau

SEQ ID NO: 1522620 - RNA, 21 nt, Human
cuuuaucaaagggugaaaauu

SEQ ID NO: 1522621 - RNA, 22 nt, Human
cuuuaucaaagggugaaaauua

SEQ ID NO: 1522622 - RNA, 14 nt, Human
cuuuagcgcccagu

SEQ ID NO: 1522623 - RNA, 15 nt, Human
cuuuagcgcccaguu

SEQ ID NO: 1522624 - RNA, 19 nt, Human
cuuuauaauucuacuuuga

SEQ ID NO: 1522625 - RNA, 22 nt, Human
cuuuaccuuuuuuauacauaaa

SEQ ID NO: 1522626 - RNA, 13 nt, Human
cuuuacuauggcc

SEQ ID NO: 1522627 - RNA, 14 nt, Human
cuuuguccccaccg

SEQ ID NO: 1522628 - RNA, 19 nt, Human
cuuuggcuauuagagauca

SEQ ID NO: 1522629 - RNA, 19 nt, Human
cuuugugaggaagccgcug

SEQ ID NO: 1522630 - RNA, 15 nt, Human
cuuugugaggaagcc

SEQ ID NO: 1522631 - RNA, 15 nt, Human
cuuuguccccaccgc

SEQ ID NO: 1522632 - RNA, 20 nt, Human
cuuugcagacaggcaagcac

SEQ ID NO: 1522633 - RNA, 24 nt, Human
cuuugaccucugcagcaauaaagc

SEQ ID NO: 1522634 - RNA, 20 nt, Human
cuuugaccucugcagcaaua

SEQ ID NO: 1522635 - RNA, 18 nt, Human
cuuugaccucugcagcaa

SEQ ID NO: 1522636 - RNA, 17 nt, Human
cuuugaccucugcagca

SEQ ID NO: 1522637 - RNA, 15 nt, Human
cuuugaccucugcag

SEQ ID NO: 1522638 - RNA, 14 nt, Human
cuuugaccucugca

SEQ ID NO: 1522639 - RNA, 15 nt, Human
cuuuccaucuacccu

SEQ ID NO: 1522640 - RNA, 12 nt, Human
cuuuccugaggc

SEQ ID NO: 1522641 - RNA, 11 nt, Human
cuuucccuccc

SEQ ID NO: 1522642 - RNA, 13 nt, Human
cuuucccucccuu

SEQ ID NO: 1522643 - RNA, 14 nt, Human
cuuucccucccuuc

SEQ ID NO: 1522644 - RNA, 16 nt, Human
cuuucccucccuuccu

SEQ ID NO: 1522645 - RNA, 20 nt, Human
cuuucuggcuaugcauuuga

SEQ ID NO: 1522646 - RNA, 19 nt, Human
cuuucuggcuaugcauuug

SEQ ID NO: 1522647 - RNA, 18 nt, Human
cuuucuggcuaugcauuu

SEQ ID NO: 1522648 - RNA, 17 nt, Human
cuuucuggcuaugcauu

SEQ ID NO: 1522649 - RNA, 13 nt, Human
cuuuccugaggcu

SEQ ID NO: 1522650 - RNA, 15 nt, Human
cuuuccugaggcugg

SEQ ID NO: 1522651 - RNA, 16 nt, Human
cuuucugcuuguguua

SEQ ID NO: 1522652 - RNA, 19 nt, Human
cuuauaucuauauuuuaca

SEQ ID NO: 1522653 - RNA, 19 nt, Human
cuuauaggaauugacccac

SEQ ID NO: 1522654 - RNA, 22 nt, Human
cuuagaugcaguucugaagaag

SEQ ID NO: 1522655 - RNA, 13 nt, Human
cuuagauguauau

SEQ ID NO: 1522656 - RNA, 19 nt, Human
cuuagauguauauauuucc

SEQ ID NO: 1522657 - RNA, 16 nt, Human
cuuagucacugagaca

SEQ ID NO: 1522658 - RNA, 16 nt, Human
cuguucuggcagaguu

SEQ ID NO: 1522659 - RNA, 20 nt, Human
cuuagucacugagacagccc

SEQ ID NO: 1522660 - RNA, 18 nt, Human
cuuagucacugagacagc

SEQ ID NO: 1522661 - RNA, 19 nt, Human
cuuagucacugagacagcc

SEQ ID NO: 1522662 - RNA, 17 nt, Human
cuuauuuaaugaaagac

SEQ ID NO: 1522663 - RNA, 14 nt, Human
cuuauuucauuucu

SEQ ID NO: 1522664 - RNA, 18 nt, Human
cuuauuuaaugaaagacu

SEQ ID NO: 1522665 - RNA, 15 nt, Human
cuuauuucauuucuu

SEQ ID NO: 1522666 - RNA, 15 nt, Human
cuucaaauauuuccc

SEQ ID NO: 1522667 - RNA, 10 nt, Human
cuucaaggau

SEQ ID NO: 1522668 - RNA, 13 nt, Human
cuucaaggauccu

SEQ ID NO: 1522669 - RNA, 15 nt, Human
cuucaaggauccuga

SEQ ID NO: 1522670 - RNA, 16 nt, Human
cuucaaggauccugag

SEQ ID NO: 1522671 - RNA, 23 nt, Human
cuucacagaugggugcuuggagg

SEQ ID NO: 1522672 - RNA, 13 nt, Human
cuucccuuucugc

SEQ ID NO: 1522673 - RNA, 17 nt, Human
cuucccuacaguugaaa

SEQ ID NO: 1522674 - RNA, 15 nt, Human
cuuccaggcugggag

SEQ ID NO: 1522675 - RNA, 16 nt, Human
cuuccaggcugggaga

SEQ ID NO: 1522676 - RNA, 19 nt, Human
cuuccaggcugggagagcc

SEQ ID NO: 1522677 - RNA, 14 nt, Human
cuuccagggguggg

SEQ ID NO: 1522678 - RNA, 15 nt, Human
cuuccagggguggga

SEQ ID NO: 1522679 - RNA, 17 nt, Human
cuuccaggggugggaca

SEQ ID NO: 1522680 - RNA, 21 nt, Human
cuuccaggggugggacacccu

SEQ ID NO: 1522681 - RNA, 22 nt, Human
cuuccacaagagcccaggccuc

SEQ ID NO: 1522682 - RNA, 12 nt, Human
cuuccaggcugg

SEQ ID NO: 1522683 - RNA, 14 nt, Human
cuuccaggcuggga

SEQ ID NO: 1522684 - RNA, 17 nt, Human
cuucaguggcagcugcu

SEQ ID NO: 1522685 - RNA, 17 nt, Human
cuuccacaagagcccag

SEQ ID NO: 1522686 - RNA, 19 nt, Human
cuuccacaagagcccaggc

SEQ ID NO: 1522687 - RNA, 21 nt, Human
cuuccacaagagcccaggccu

SEQ ID NO: 1522688 - RNA, 16 nt, Human
cuucaguaagccguga

SEQ ID NO: 1522689 - RNA, 23 nt, Human
cuucaguaagccgugauuuucau

SEQ ID NO: 1522690 - RNA, 18 nt, Human
cuucagugccuuauggaa

SEQ ID NO: 1522691 - RNA, 22 nt, Human
cuucagugccuuauggaacacu

SEQ ID NO: 1522692 - RNA, 13 nt, Human
cuucaguggcagc

SEQ ID NO: 1522693 - RNA, 14 nt, Human
cuucaguggcagcu

SEQ ID NO: 1522694 - RNA, 15 nt, Human
cuucaguggcagcug

SEQ ID NO: 1522695 - RNA, 16 nt, Human
cuucaguggcagcugc

SEQ ID NO: 1522696 - RNA, 22 nt, Human
cuucuuuauaauucuacuuuga

SEQ ID NO: 1522697 - RNA, 14 nt, Human
cuugaaaacacugu

SEQ ID NO: 1522698 - RNA, 23 nt, Human
cuugaaaacacuguucucugccc

SEQ ID NO: 1522699 - RNA, 14 nt, Human
cuucugugaaagua

SEQ ID NO: 1522700 - RNA, 13 nt, Human
cuucuguggguuu

SEQ ID NO: 1522701 - RNA, 14 nt, Human
cuucuguggguuuc

SEQ ID NO: 1522702 - RNA, 21 nt, Human
cuucuguggguuucuaaagcu

SEQ ID NO: 1522703 - RNA, 18 nt, Human
cuugagccuugaacuuug

SEQ ID NO: 1522704 - RNA, 17 nt, Human
cuugagccuugaacuuu

SEQ ID NO: 1522705 - RNA, 15 nt, Human
cuugagccuugaacu

SEQ ID NO: 1522706 - RNA, 21 nt, Human
cuugaggguugggcugguguc

SEQ ID NO: 1522707 - RNA, 19 nt, Human
cuugaggguugggcuggug

SEQ ID NO: 1522708 - RNA, 20 nt, Human
cuugaggguugggcuggugu

SEQ ID NO: 1522709 - RNA, 16 nt, Human
cuugaagacuuuucuu

SEQ ID NO: 1522710 - RNA, 17 nt, Human
cuugaccgugaggccag

SEQ ID NO: 1522711 - RNA, 22 nt, Human
cuugaccauucuccaccugcca

SEQ ID NO: 1522712 - RNA, 23 nt, Human
cuugaccauucuccaccugccag

SEQ ID NO: 1522713 - RNA, 18 nt, Human
cuugaccgugaggccaga

SEQ ID NO: 1522714 - RNA, 20 nt, Human
cuugaccgugaggccagaga

SEQ ID NO: 1522715 - RNA, 21 nt, Human
cuugaccgugaggccagagac

SEQ ID NO: 1522716 - RNA, 13 nt, Human
cuugaccucaggu

SEQ ID NO: 1522717 - RNA, 14 nt, Human
cuugaacccgggag

SEQ ID NO: 1522718 - RNA, 13 nt, Human
cuugaacuccugg

SEQ ID NO: 1522719 - RNA, 21 nt, Human
cuugaacuuugaccucugcag

SEQ ID NO: 1522720 - RNA, 17 nt, Human
cuugaacuuugaccucu

SEQ ID NO: 1522721 - RNA, 15 nt, Human
cuucuggguggggca

SEQ ID NO: 1522722 - RNA, 13 nt, Human
cuucugcuucagc

SEQ ID NO: 1522723 - RNA, 21 nt, Human
cuucuguacgucugacaggca

SEQ ID NO: 1522724 - RNA, 14 nt, Human
cuucuguacgucug

SEQ ID NO: 1522725 - RNA, 15 nt, Human
cuucuguacgucuga

SEQ ID NO: 1522726 - RNA, 18 nt, Human
cuucuguacgucugacag

SEQ ID NO: 1522727 - RNA, 20 nt, Human
cuucuguacgucugacaggc

SEQ ID NO: 1522728 - RNA, 16 nt, Human
cuucuguccuacucug

SEQ ID NO: 1522729 - RNA, 17 nt, Human
cuucuguccuacucugu

SEQ ID NO: 1522730 - RNA, 18 nt, Human
cuucuguccuacucugug

SEQ ID NO: 1522731 - RNA, 19 nt, Human
cuucuguccuacucugugu

SEQ ID NO: 1522732 - RNA, 21 nt, Human
cuucuguccuacucuguguca

SEQ ID NO: 1522733 - RNA, 18 nt, Human
cuucugucuucacaacag

SEQ ID NO: 1522734 - RNA, 21 nt, Human
cuucugucuucacaacagauu

SEQ ID NO: 1522735 - RNA, 22 nt, Human
cuucugucuucacaacagauua

SEQ ID NO: 1522736 - RNA, 13 nt, Human
cuucucugaagga

SEQ ID NO: 1522737 - RNA, 19 nt, Human
cuucuccuucaccuuuguc

SEQ ID NO: 1522738 - RNA, 13 nt, Human
cuucucuccagcc

SEQ ID NO: 1522739 - RNA, 15 nt, Human
cuucucuccagcccc

SEQ ID NO: 1522740 - RNA, 17 nt, Human
cuucucuccagccccug

SEQ ID NO: 1522741 - RNA, 19 nt, Human
cuucucuccagccccugga

SEQ ID NO: 1522742 - RNA, 12 nt, Human
cuucuccaggcu

SEQ ID NO: 1522743 - RNA, 13 nt, Human
cuucuccaggcug

SEQ ID NO: 1522744 - RNA, 14 nt, Human
cuucuccaggcugu

SEQ ID NO: 1522745 - RNA, 16 nt, Human
cuuccuggagcccaga

SEQ ID NO: 1522746 - RNA, 17 nt, Human
cuuccuggagcccagag

SEQ ID NO: 1522747 - RNA, 22 nt, Human
cuuccuggagcccagaggaggg

SEQ ID NO: 1522748 - RNA, 11 nt, Human
cuucuccacuu

SEQ ID NO: 1522749 - RNA, 20 nt, Human
cuucuccacuuucuagccag

SEQ ID NO: 1522750 - RNA, 21 nt, Human
cugugucuugcaauggcagcc

SEQ ID NO: 1522751 - RNA, 22 nt, Human
cugugucuugcaauggcagccu

SEQ ID NO: 1522752 - RNA, 23 nt, Human
cugugucuugcaauggcagccuu

SEQ ID NO: 1522753 - RNA, 21 nt, Human
cuguuaaaagaugaaaauauu

SEQ ID NO: 1522754 - RNA, 23 nt, Human
cuguuaaaagaugaaaauauuug

SEQ ID NO: 1522755 - RNA, 20 nt, Human
cugugugugcgccuacagga

SEQ ID NO: 1522756 - RNA, 17 nt, Human
cuguucaugaaagauuc

SEQ ID NO: 1522757 - RNA, 18 nt, Human
cuguucaugaaagauuca

SEQ ID NO: 1522758 - RNA, 23 nt, Human
cuguucaugaaagauucaaugcc

SEQ ID NO: 1522759 - RNA, 13 nt, Human
cuguuacugucuu

SEQ ID NO: 1522760 - RNA, 19 nt, Human
cuguucagcugguugaggu

SEQ ID NO: 1522761 - RNA, 21 nt, Human
cuguucagcugguugagguuu

SEQ ID NO: 1522762 - RNA, 20 nt, Human
cuguucucugcccuccaaga

SEQ ID NO: 1522763 - RNA, 18 nt, Human
cuguucucugcccuccaa

SEQ ID NO: 1522764 - RNA, 19 nt, Human
cuguucucugcccuccaag

SEQ ID NO: 1522765 - RNA, 14 nt, Human
cuguucucugcccu

SEQ ID NO: 1522766 - RNA, 15 nt, Human
cuguucucugcccuc

SEQ ID NO: 1522767 - RNA, 16 nt, Human
cuguucucugcccucc

SEQ ID NO: 1522768 - RNA, 17 nt, Human
cuguucucugcccucca

SEQ ID NO: 1522769 - RNA, 13 nt, Human
cuguucucugccc

SEQ ID NO: 1522770 - RNA, 18 nt, Human
cugucuccauguuugaug

SEQ ID NO: 1522771 - RNA, 13 nt, Human
cugucucagggug

SEQ ID NO: 1522772 - RNA, 23 nt, Human
cugugaguacuacaguccuccca

SEQ ID NO: 1522773 - RNA, 20 nt, Human
cugugaguacuacaguccuc

SEQ ID NO: 1522774 - RNA, 21 nt, Human
cugugaguacuacaguccucc

SEQ ID NO: 1522775 - RNA, 18 nt, Human
cugugauggggcccugcc

SEQ ID NO: 1522776 - RNA, 17 nt, Human
cugugauggggcccugc

SEQ ID NO: 1522777 - RNA, 19 nt, Human
cugugauggggcccugccu

SEQ ID NO: 1522778 - RNA, 20 nt, Human
cugugauggggcccugccuc

SEQ ID NO: 1522779 - RNA, 22 nt, Human
cugugccauuuuguauuuuacu

SEQ ID NO: 1522780 - RNA, 14 nt, Human
cugugccauuuugu

SEQ ID NO: 1522781 - RNA, 16 nt, Human
cugugccaugugccag

SEQ ID NO: 1522782 - RNA, 18 nt, Human
cugugccaugugccaggu

SEQ ID NO: 1522783 - RNA, 13 nt, Human
cugugccacaggc

SEQ ID NO: 1522784 - RNA, 17 nt, Human
cuguggaugauaaaaca

SEQ ID NO: 1522785 - RNA, 14 nt, Human
cugugggcccccaa

SEQ ID NO: 1522786 - RNA, 14 nt, Human
cugugccucuggga

SEQ ID NO: 1522787 - RNA, 16 nt, Human
cugugccucugggacu

SEQ ID NO: 1522788 - RNA, 22 nt, Human
cugugcugcccugcccaccugg

SEQ ID NO: 1522789 - RNA, 17 nt, Human
cugugccucugggacug

SEQ ID NO: 1522790 - RNA, 18 nt, Human
cugugccucugggacugg

SEQ ID NO: 1522791 - RNA, 22 nt, Human
cuguauuuuaaaagaaugauua

SEQ ID NO: 1522792 - RNA, 20 nt, Human
cuguauuuuaaaagaaugau

SEQ ID NO: 1522793 - RNA, 14 nt, Human
cuguaucccaugag

SEQ ID NO: 1522794 - RNA, 23 nt, Human
cuguaucccaugagccucagcau

SEQ ID NO: 1522795 - RNA, 13 nt, Human
cugucaauuacag

SEQ ID NO: 1522796 - RNA, 13 nt, Human
cuguacagagccc

SEQ ID NO: 1522797 - RNA, 22 nt, Human
cuguauauauuuauggccgggc

SEQ ID NO: 1522798 - RNA, 14 nt, Human
cuguccuacccacc

SEQ ID NO: 1522799 - RNA, 22 nt, Human
cugucccuuacgugaguccugg

SEQ ID NO: 1522800 - RNA, 15 nt, Human
cuguccgagcuuuga

SEQ ID NO: 1522801 - RNA, 18 nt, Human
cugucucaaaaaaagaaa

SEQ ID NO: 1522802 - RNA, 23 nt, Human
cugucucaaaaaaacacaaaagu

SEQ ID NO: 1522803 - RNA, 16 nt, Human
cugucucaaaaaaaga

SEQ ID NO: 1522804 - RNA, 18 nt, Human
cuguccccgcacugggcu

SEQ ID NO: 1522805 - RNA, 19 nt, Human
cuguccccgcacugggcuu

SEQ ID NO: 1522806 - RNA, 22 nt, Human
cuguccccgcacugggcuuggg

SEQ ID NO: 1522807 - RNA, 20 nt, Human
cugucccuuacgugaguccu

SEQ ID NO: 1522808 - RNA, 14 nt, Human
cuguccccuucucu

SEQ ID NO: 1522809 - RNA, 16 nt, Human
cuguccccuucucuca

SEQ ID NO: 1522810 - RNA, 19 nt, Human
cuguccccuucucucaucu

SEQ ID NO: 1522811 - RNA, 20 nt, Human
cuguccccuucucucaucuc

SEQ ID NO: 1522812 - RNA, 21 nt, Human
cuguccccuucucucaucucu

SEQ ID NO: 1522813 - RNA, 22 nt, Human
cuguccccuucucucaucucuu

SEQ ID NO: 1522814 - RNA, 23 nt, Human
cuguccccuucucucaucucuua

SEQ ID NO: 1522815 - RNA, 22 nt, Human
cuggguaacuagggaagauaau

SEQ ID NO: 1522816 - RNA, 19 nt, Human
cuggguucuacccaggugc

SEQ ID NO: 1522817 - RNA, 14 nt, Human
cuggguacuugugg

SEQ ID NO: 1522818 - RNA, 15 nt, Human
cuggguucuacccag

SEQ ID NO: 1522819 - RNA, 16 nt, Human
cuggguucuacccagg

SEQ ID NO: 1522820 - RNA, 17 nt, Human
cuggguucuacccaggu

SEQ ID NO: 1522821 - RNA, 16 nt, Human
cuggggggcaguggug

SEQ ID NO: 1522822 - RNA, 13 nt, Human
cuggggggcagug

SEQ ID NO: 1522823 - RNA, 22 nt, Human
cugggggggauuguaaaauggu

SEQ ID NO: 1522824 - RNA, 19 nt, Human
cugggggcugggcagagga

SEQ ID NO: 1522825 - RNA, 15 nt, Human
cugggggaagaagcu

SEQ ID NO: 1522826 - RNA, 24 nt, Human
cugggcuucaguggcagcugcuuu

SEQ ID NO: 1522827 - RNA, 13 nt, Human
cugggggaagaag

SEQ ID NO: 1522828 - RNA, 20 nt, Human
cuguaauccuagcacuuugg

SEQ ID NO: 1522829 - RNA, 13 nt, Human
cuguacaaaguag

SEQ ID NO: 1522830 - RNA, 15 nt, Human
cuguacaaaguagaa

SEQ ID NO: 1522831 - RNA, 21 nt, Human
cugguucggauuuggggugga

SEQ ID NO: 1522832 - RNA, 23 nt, Human
cugguucggauuugggguggauu

SEQ ID NO: 1522833 - RNA, 23 nt, Human
cuguaaucacagcuacuugggag

SEQ ID NO: 1522834 - RNA, 23 nt, Human
cugguggcagcucaccucucccu

SEQ ID NO: 1522835 - RNA, 13 nt, Human
cugguggcagcug

SEQ ID NO: 1522836 - RNA, 14 nt, Human
cugguggcagcugc

SEQ ID NO: 1522837 - RNA, 14 nt, Human
cugguauuuuaucu

SEQ ID NO: 1522838 - RNA, 20 nt, Human
cuggcacccggccccugcug

SEQ ID NO: 1522839 - RNA, 21 nt, Human
cuggcacccggccccugcugg

SEQ ID NO: 1522840 - RNA, 20 nt, Human
cuggagugcagugagccgag

SEQ ID NO: 1522841 - RNA, 21 nt, Human
cuggcacaguuuucugagaaa

SEQ ID NO: 1522842 - RNA, 22 nt, Human
cuggcacaguuuucugagaaag

SEQ ID NO: 1522843 - RNA, 22 nt, Human
cuggcacccggccccugcuggu

SEQ ID NO: 1522844 - RNA, 19 nt, Human
cuggcacugcuuccaguga

SEQ ID NO: 1522845 - RNA, 20 nt, Human
cuggcacugcuuccagugag

SEQ ID NO: 1522846 - RNA, 23 nt, Human
cuggcacugcuuccagugaggcu

SEQ ID NO: 1522847 - RNA, 14 nt, Human
cuggccagaugcac

SEQ ID NO: 1522848 - RNA, 15 nt, Human
cuggcccacugcauc

SEQ ID NO: 1522849 - RNA, 21 nt, Human
cuggccucugcacuccccugc

SEQ ID NO: 1522850 - RNA, 18 nt, Human
cuggccucugcacucccc

SEQ ID NO: 1522851 - RNA, 20 nt, Human
cuggccucugcacuccccug

SEQ ID NO: 1522852 - RNA, 13 nt, Human
cuggccuggcccc

SEQ ID NO: 1522853 - RNA, 24 nt, Human
cuggccuggccccucagggucccu

SEQ ID NO: 1522854 - RNA, 22 nt, Human
cuggccuucggccuccauccug

SEQ ID NO: 1522855 - RNA, 14 nt, Human
cuggccugugucua

SEQ ID NO: 1522856 - RNA, 23 nt, Human
cuggccuucggccuccauccuga

SEQ ID NO: 1522857 - RNA, 14 nt, Human
cuggcgugcagugg

SEQ ID NO: 1522858 - RNA, 15 nt, Human
cuggcgugcaguggu

SEQ ID NO: 1522859 - RNA, 21 nt, Human
cuggcucuuccaggcugggag

SEQ ID NO: 1522860 - RNA, 22 nt, Human
cuggcucuuccaggcugggaga

SEQ ID NO: 1522861 - RNA, 24 nt, Human
cuggcucuuccaggcugggagagc

SEQ ID NO: 1522862 - RNA, 21 nt, Human
cuggagcccagaggagggcag

SEQ ID NO: 1522863 - RNA, 23 nt, Human
cuggagcccagaggagggcagca

SEQ ID NO: 1522864 - RNA, 16 nt, Human
cuggagcucugcccau

SEQ ID NO: 1522865 - RNA, 13 nt, Human
cuggagcucugcc

SEQ ID NO: 1522866 - RNA, 17 nt, Human
cuggagguacgaaaaga

SEQ ID NO: 1522867 - RNA, 22 nt, Human
cuggagguacgaaaagagggga

SEQ ID NO: 1522868 - RNA, 14 nt, Human
cuggagugcaguga

SEQ ID NO: 1522869 - RNA, 15 nt, Human
cuggagugcagugag

SEQ ID NO: 1522870 - RNA, 16 nt, Human
cuggagugcagugagc

SEQ ID NO: 1522871 - RNA, 17 nt, Human
cuggagugcagugagcc

SEQ ID NO: 1522872 - RNA, 23 nt, Human
cuggacaggcauguucucugagg

SEQ ID NO: 1522873 - RNA, 17 nt, Human
cuggacaggcauguucu

SEQ ID NO: 1522874 - RNA, 16 nt, Human
cuggaccuugaacugg

SEQ ID NO: 1522875 - RNA, 15 nt, Human
cuggacccuguggau

SEQ ID NO: 1522876 - RNA, 17 nt, Human
cuggaccuugaacuggg

SEQ ID NO: 1522877 - RNA, 20 nt, Human
cuggaccuugaacuggguac

SEQ ID NO: 1522878 - RNA, 21 nt, Human
cuggaccuugaacuggguacu

SEQ ID NO: 1522879 - RNA, 15 nt, Human
cugcugcuggcuggu

SEQ ID NO: 1522880 - RNA, 13 nt, Human
cugcugguucagg

SEQ ID NO: 1522881 - RNA, 15 nt, Human
cugcugguucagggu

SEQ ID NO: 1522882 - RNA, 23 nt, Human
cugcugguucaggguuggccccu

SEQ ID NO: 1522883 - RNA, 15 nt, Human
cugcuuccagugagg

SEQ ID NO: 1522884 - RNA, 16 nt, Human
cugcuuccagugaggc

SEQ ID NO: 1522885 - RNA, 18 nt, Human
cugcuuccagugaggcuc

SEQ ID NO: 1522886 - RNA, 19 nt, Human
cugcuuccagugaggcucu

SEQ ID NO: 1522887 - RNA, 20 nt, Human
cugcuuccagugaggcucug

SEQ ID NO: 1522888 - RNA, 21 nt, Human
cugcuuccagugaggcucugc

SEQ ID NO: 1522889 - RNA, 23 nt, Human
cugcuuccagugaggcucugccc

SEQ ID NO: 1522890 - RNA, 15 nt, Human
cugcucuccuuccug

SEQ ID NO: 1522891 - RNA, 12 nt, Human
cugcucuccuuc

SEQ ID NO: 1522892 - RNA, 13 nt, Human
cugcucuccuucc

SEQ ID NO: 1522893 - RNA, 16 nt, Human
cugcucuccuuccugg

SEQ ID NO: 1522894 - RNA, 11 nt, Human
cugcugaaggc

SEQ ID NO: 1522895 - RNA, 12 nt, Human
cugcugaaggcu

SEQ ID NO: 1522896 - RNA, 19 nt, Human
cugcgaccacaagaaggau

SEQ ID NO: 1522897 - RNA, 19 nt, Human
cugcuccagcuguucagcu

SEQ ID NO: 1522898 - RNA, 20 nt, Human
cugcuccagcuguucagcug

SEQ ID NO: 1522899 - RNA, 23 nt, Human
cucccuucccaccucucucacuc

SEQ ID NO: 1522900 - RNA, 12 nt, Human
cugcccuccaag

SEQ ID NO: 1522901 - RNA, 14 nt, Human
cucccuucccaccu

SEQ ID NO: 1522902 - RNA, 15 nt, Human
cucccuucccaccuc

SEQ ID NO: 1522903 - RNA, 16 nt, Human
cucccuucccaccucu

SEQ ID NO: 1522904 - RNA, 17 nt, Human
cucccuucccaccucuc

SEQ ID NO: 1522905 - RNA, 19 nt, Human
cugcccuccaagaccuucu

SEQ ID NO: 1522906 - RNA, 15 nt, Human
cugccgcagcccugc

SEQ ID NO: 1522907 - RNA, 19 nt, Human
cugccgcagcccugcagag

SEQ ID NO: 1522908 - RNA, 17 nt, Human
cugccgcagcccugcag

SEQ ID NO: 1522909 - RNA, 18 nt, Human
cugccgcagcccugcaga

SEQ ID NO: 1522910 - RNA, 15 nt, Human
cugccucugacacac

SEQ ID NO: 1522911 - RNA, 22 nt, Human
cugccucugacacacagcucug

SEQ ID NO: 1522912 - RNA, 23 nt, Human
cugccucugacacacagcucugu

SEQ ID NO: 1522913 - RNA, 11 nt, Human
cugccucccau

SEQ ID NO: 1522914 - RNA, 12 nt, Human
cugccucccauc

SEQ ID NO: 1522915 - RNA, 14 nt, Human
cugccucccaucac

SEQ ID NO: 1522916 - RNA, 16 nt, Human
cugccucccaucaccc

SEQ ID NO: 1522917 - RNA, 19 nt, Human
cugccucccaucacccgcu

SEQ ID NO: 1522918 - RNA, 15 nt, Human
cugccucuucucuac

SEQ ID NO: 1522919 - RNA, 15 nt, Human
cugccugaagucaca

SEQ ID NO: 1522920 - RNA, 16 nt, Human
cugccugcccaggccc

SEQ ID NO: 1522921 - RNA, 17 nt, Human
cugccugcccaggcccc

SEQ ID NO: 1522922 - RNA, 21 nt, Human
cugccugggaucccucauccu

SEQ ID NO: 1522923 - RNA, 22 nt, Human
cugccugggaucccucauccuc

SEQ ID NO: 1522924 - RNA, 20 nt, Human
cugccugcccaggccccugc

SEQ ID NO: 1522925 - RNA, 18 nt, Human
cuagaguuuagcuggaaa

SEQ ID NO: 1522926 - RNA, 19 nt, Human
cuagaguuuagcuggaaaa

SEQ ID NO: 1522927 - RNA, 21 nt, Human
cuagagguucaaagauauuuu

SEQ ID NO: 1522928 - RNA, 18 nt, Human
cuagagguucaaagauau

SEQ ID NO: 1522929 - RNA, 17 nt, Human
cuagagguucaaagaua

SEQ ID NO: 1522930 - RNA, 20 nt, Human
cuacuguccuacccacccuc

SEQ ID NO: 1522931 - RNA, 12 nt, Human
cuacucuguguc

SEQ ID NO: 1522932 - RNA, 13 nt, Human
cuacucuguguca

SEQ ID NO: 1522933 - RNA, 19 nt, Human
cuacuguccuacccacccu

SEQ ID NO: 1522934 - RNA, 15 nt, Human
cuacucgaguuacag

SEQ ID NO: 1522935 - RNA, 16 nt, Human
cuacucgaguuacaga

SEQ ID NO: 1522936 - RNA, 19 nt, Human
cuacucgaguuacagacaa

SEQ ID NO: 1522937 - RNA, 14 nt, Human
cuaggaaauauuua

SEQ ID NO: 1522938 - RNA, 15 nt, Human
cuaggaaauauuuau

SEQ ID NO: 1522939 - RNA, 19 nt, Human
cuaggaaauauuuauuuua

SEQ ID NO: 1522940 - RNA, 20 nt, Human
cuaggaaauauuuauuuuaa

SEQ ID NO: 1522941 - RNA, 22 nt, Human
cuagcuaauguaauaacuguga

SEQ ID NO: 1522942 - RNA, 22 nt, Human
cuagccuuagaagucacacagu

SEQ ID NO: 1522943 - RNA, 23 nt, Human
cuagccuuagaagucacacagua

SEQ ID NO: 1522944 - RNA, 16 nt, Human
cuagauacuguaucau

SEQ ID NO: 1522945 - RNA, 13 nt, Human
cuagauacuguau

SEQ ID NO: 1522946 - RNA, 24 nt, Human
cuagauacuguaucaugacaaaga

SEQ ID NO: 1522947 - RNA, 21 nt, Human
cuagccugugccucugggacu

SEQ ID NO: 1522948 - RNA, 19 nt, Human
cuagccugugccucuggga

SEQ ID NO: 1522949 - RNA, 22 nt, Human
cuagccugugccucugggacug

SEQ ID NO: 1522950 - RNA, 21 nt, Human
cuagccuuagaagucacacag

SEQ ID NO: 1522951 - RNA, 15 nt, Human
cuauaggugcuacaa

SEQ ID NO: 1522952 - RNA, 19 nt, Human
cuaugaaauauuauguuaa

SEQ ID NO: 1522953 - RNA, 19 nt, Human
cuauagccuaggugacaga

SEQ ID NO: 1522954 - RNA, 18 nt, Human
cuauagccuaggugacag

SEQ ID NO: 1522955 - RNA, 20 nt, Human
cuauagccuaggugacagag

SEQ ID NO: 1522956 - RNA, 21 nt, Human
cuauagccuaggugacagagu

SEQ ID NO: 1522957 - RNA, 13 nt, Human
cuauaauuuaaau

SEQ ID NO: 1522958 - RNA, 12 nt, Human
cuauaauuuaaa

SEQ ID NO: 1522959 - RNA, 20 nt, Human
cuaggaacacuccuucacag

SEQ ID NO: 1522960 - RNA, 15 nt, Human
cuaggaagacuuugg

SEQ ID NO: 1522961 - RNA, 17 nt, Human
cuaggaagacuuuggaa

SEQ ID NO: 1522962 - RNA, 23 nt, Human
cuauucaguaauaacucuacccu

SEQ ID NO: 1522963 - RNA, 16 nt, Human
cuauucaaacagucuc

SEQ ID NO: 1522964 - RNA, 17 nt, Human
cuauucaguaauaacuc

SEQ ID NO: 1522965 - RNA, 21 nt, Human
cuauucaggagaguagaacag

SEQ ID NO: 1522966 - RNA, 13 nt, Human
cuauguaucaaug

SEQ ID NO: 1522967 - RNA, 16 nt, Human
cuauguaucaaugagu

SEQ ID NO: 1522968 - RNA, 14 nt, Human
cucaacucuccucc

SEQ ID NO: 1522969 - RNA, 17 nt, Human
cucaaauuucuaaaucu

SEQ ID NO: 1522970 - RNA, 15 nt, Human
cucaaauuucuaaau

SEQ ID NO: 1522971 - RNA, 12 nt, Human
cucaaauuugga

SEQ ID NO: 1522972 - RNA, 14 nt, Human
cucaaauuucuaaa

SEQ ID NO: 1522973 - RNA, 14 nt, Human
cucacacugagaau

SEQ ID NO: 1522974 - RNA, 20 nt, Human
cucacacugagaauguaaga

SEQ ID NO: 1522975 - RNA, 12 nt, Human
cucacacugaga

SEQ ID NO: 1522976 - RNA, 13 nt, Human
cucacacugagaa

SEQ ID NO: 1522977 - RNA, 14 nt, Human
cucaaguccucuuu

SEQ ID NO: 1522978 - RNA, 23 nt, Human
cucacacggacacucaaaagcug

SEQ ID NO: 1522979 - RNA, 19 nt, Human
cucaacucuccuccagagu

SEQ ID NO: 1522980 - RNA, 16 nt, Human
cucaacucuccuccag

SEQ ID NO: 1522981 - RNA, 18 nt, Human
cucaacucuccuccagag

SEQ ID NO: 1522982 - RNA, 16 nt, Human
cuauugcugcuugagg

SEQ ID NO: 1522983 - RNA, 15 nt, Human
cucccgaguagcugg

SEQ ID NO: 1522984 - RNA, 20 nt, Human
cucccgaauagcugggacua

SEQ ID NO: 1522985 - RNA, 23 nt, Human
cucccgaauagcugggacuacag

SEQ ID NO: 1522986 - RNA, 15 nt, Human
cucccuucauccuuc

SEQ ID NO: 1522987 - RNA, 18 nt, Human
cucccucagucuggcccu

SEQ ID NO: 1522988 - RNA, 20 nt, Human
cuccccagccccaucccaaa

SEQ ID NO: 1522989 - RNA, 14 nt, Human
cuccccucggagaa

SEQ ID NO: 1522990 - RNA, 21 nt, Human
cuccccugcuggguguggcgc

SEQ ID NO: 1522991 - RNA, 23 nt, Human
cuccccugcuggguguggcgcag

SEQ ID NO: 1522992 - RNA, 16 nt, Human
cucccaaagugcuggg

SEQ ID NO: 1522993 - RNA, 23 nt, Human
cucccaaagugcugggauuacag

SEQ ID NO: 1522994 - RNA, 16 nt, Human
cucccaacucacccca

SEQ ID NO: 1522995 - RNA, 15 nt, Human
cucccacaaaggaga

SEQ ID NO: 1522996 - RNA, 14 nt, Human
cucccaacucaccc

SEQ ID NO: 1522997 - RNA, 15 nt, Human
cucccaacucacccc

SEQ ID NO: 1522998 - RNA, 16 nt, Human
cucccaucacuucccu

SEQ ID NO: 1522999 - RNA, 13 nt, Human
cuccacucucccc

SEQ ID NO: 1523000 - RNA, 15 nt, Human
cuccacucuccccca

SEQ ID NO: 1523001 - RNA, 11 nt, Human
cuccagccccu

SEQ ID NO: 1523002 - RNA, 13 nt, Human
cuccagccccugg

SEQ ID NO: 1523003 - RNA, 14 nt, Human
cuccagccccugga

SEQ ID NO: 1523004 - RNA, 15 nt, Human
cuccagccccuggau

SEQ ID NO: 1523005 - RNA, 15 nt, Human
cuccagcucaccagc

SEQ ID NO: 1523006 - RNA, 16 nt, Human
cuccagcucaccagcc

SEQ ID NO: 1523007 - RNA, 18 nt, Human
cuccagcucaccagcccc

SEQ ID NO: 1523008 - RNA, 16 nt, Human
cuccacucucccccac

SEQ ID NO: 1523009 - RNA, 16 nt, Human
cuccagagucagaagu

SEQ ID NO: 1523010 - RNA, 21 nt, Human
cucauaaaaagccugcaauuu

SEQ ID NO: 1523011 - RNA, 22 nt, Human
cucauucuccuuguguuacuaa

SEQ ID NO: 1523012 - RNA, 18 nt, Human
cucauucuccuuguguua

SEQ ID NO: 1523013 - RNA, 12 nt, Human
cucauucuucug

SEQ ID NO: 1523014 - RNA, 17 nt, Human
cucauugaccugaggcc

SEQ ID NO: 1523015 - RNA, 14 nt, Human
cucauuucaccccu

SEQ ID NO: 1523016 - RNA, 17 nt, Human
cucauuucaccccuccc

SEQ ID NO: 1523017 - RNA, 19 nt, Human
cucauuucaccccucccuu

SEQ ID NO: 1523018 - RNA, 22 nt, Human
cucauuucaccccucccuuucu

SEQ ID NO: 1523019 - RNA, 19 nt, Human
cucauugaccugaggcccu

SEQ ID NO: 1523020 - RNA, 21 nt, Human
cucauugaccugaggcccuuc

SEQ ID NO: 1523021 - RNA, 23 nt, Human
cucauuucaccccucccuuucuc

SEQ ID NO: 1523022 - RNA, 12 nt, Human
cucauuuccaag

SEQ ID NO: 1523023 - RNA, 13 nt, Human
cucauuuccaagc

SEQ ID NO: 1523024 - RNA, 14 nt, Human
cucauuuccaagca

SEQ ID NO: 1523025 - RNA, 17 nt, Human
cucauuuccaagcaagu

SEQ ID NO: 1523026 - RNA, 21 nt, Human
cucauuuccaagcaaguauua

SEQ ID NO: 1523027 - RNA, 21 nt, Human
cucauuugucacacacuuugg

SEQ ID NO: 1523028 - RNA, 22 nt, Human
cucaggaaaucaaauaugcaaa

SEQ ID NO: 1523029 - RNA, 23 nt, Human
cucaggagccgaagcccaggggc

SEQ ID NO: 1523030 - RNA, 21 nt, Human
cucaggagccgaagcccaggg

SEQ ID NO: 1523031 - RNA, 15 nt, Human
cucaggcagguggga

SEQ ID NO: 1523032 - RNA, 18 nt, Human
cucaggcaggugggaugg

SEQ ID NO: 1523033 - RNA, 13 nt, Human
cucagggccuggc

SEQ ID NO: 1523034 - RNA, 18 nt, Human
cucagggccuggcucagg

SEQ ID NO: 1523035 - RNA, 19 nt, Human
cucagggccuggcucaggu

SEQ ID NO: 1523036 - RNA, 20 nt, Human
cucagggccuggcucaggug

SEQ ID NO: 1523037 - RNA, 23 nt, Human
cucaggugauccacccaccucag

SEQ ID NO: 1523038 - RNA, 19 nt, Human
cucagguggggucacucug

SEQ ID NO: 1523039 - RNA, 20 nt, Human
cucagguggggucacucugg

SEQ ID NO: 1523040 - RNA, 21 nt, Human
cucagguggggucacucuggc

SEQ ID NO: 1523041 - RNA, 24 nt, Human
cucagggucccugguggcagcuca

SEQ ID NO: 1523042 - RNA, 14 nt, Human
cucagggccugguc

SEQ ID NO: 1523043 - RNA, 20 nt, Human
cucagggucccugguggcag

SEQ ID NO: 1523044 - RNA, 21 nt, Human
cucagggucccugguggcagc

SEQ ID NO: 1523045 - RNA, 22 nt, Human
cucagggucccugguggcagcu

SEQ ID NO: 1523046 - RNA, 23 nt, Human
cucagcggggacagcuccuucug

SEQ ID NO: 1523047 - RNA, 14 nt, Human
cucagcggggacag

SEQ ID NO: 1523048 - RNA, 15 nt, Human
cucagcggggacagc

SEQ ID NO: 1523049 - RNA, 16 nt, Human
cucagcggggacagcu

SEQ ID NO: 1523050 - RNA, 18 nt, Human
cucagcggggacagcucc

SEQ ID NO: 1523051 - RNA, 19 nt, Human
cucagcggggacagcuccu

SEQ ID NO: 1523052 - RNA, 20 nt, Human
cucagcggggacagcuccuu

SEQ ID NO: 1523053 - RNA, 21 nt, Human
cucagcggggacagcuccuuc

SEQ ID NO: 1523054 - RNA, 15 nt, Human
cucagcauccuggca

SEQ ID NO: 1523055 - RNA, 21 nt, Human
cucagcaaaagaugcuucuca

SEQ ID NO: 1523056 - RNA, 16 nt, Human
cucagcaggggagggu

SEQ ID NO: 1523057 - RNA, 19 nt, Human
cucagcaaaagaugcuucu

SEQ ID NO: 1523058 - RNA, 20 nt, Human
cucagcaaaagaugcuucuc

SEQ ID NO: 1523059 - RNA, 13 nt, Human
cucagcauccugg

SEQ ID NO: 1523060 - RNA, 21 nt, Human
cucagcauccuggcacccggc

SEQ ID NO: 1523061 - RNA, 22 nt, Human
cucagcauccuggcacccggcc

SEQ ID NO: 1523062 - RNA, 16 nt, Human
cucagaucuucugugg

SEQ ID NO: 1523063 - RNA, 23 nt, Human
cucagagagggugggagugggcc

SEQ ID NO: 1523064 - RNA, 19 nt, Human
cucagagagggugggagug

SEQ ID NO: 1523065 - RNA, 16 nt, Human
cucacuguugcccagg

SEQ ID NO: 1523066 - RNA, 17 nt, Human
cucacuguugcccaggc

SEQ ID NO: 1523067 - RNA, 18 nt, Human
cucacuguugcccaggcu

SEQ ID NO: 1523068 - RNA, 19 nt, Human
cucacuguugcccaggcug

SEQ ID NO: 1523069 - RNA, 14 nt, Human
cucacuguugccca

SEQ ID NO: 1523070 - RNA, 15 nt, Human
cucacuguugcccag

SEQ ID NO: 1523071 - RNA, 15 nt, Human
cucacugcagccuca

SEQ ID NO: 1523072 - RNA, 16 nt, Human
cucacugcagccucaa

SEQ ID NO: 1523073 - RNA, 22 nt, Human
cuaggaaauauuuauuuuaaua

SEQ ID NO: 1523074 - RNA, 14 nt, Human
cuacauucuguuaa

SEQ ID NO: 1523075 - RNA, 13 nt, Human
cuacauucuguua

SEQ ID NO: 1523076 - RNA, 22 nt, Human
cuacauuauaaaugucucuuua

SEQ ID NO: 1523077 - RNA, 17 nt, Human
cuacccucuuagaaaaa

SEQ ID NO: 1523078 - RNA, 19 nt, Human
cuacccagcgagcccuggu

SEQ ID NO: 1523079 - RNA, 18 nt, Human
cuacccagcgagcccugg

SEQ ID NO: 1523080 - RNA, 13 nt, Human
cuacccaggugcu

SEQ ID NO: 1523081 - RNA, 13 nt, Human
cuacccacccucc

SEQ ID NO: 1523082 - RNA, 15 nt, Human
cuacccagcgagccc

SEQ ID NO: 1523083 - RNA, 17 nt, Human
cuacccagcgagcccug

SEQ ID NO: 1523084 - RNA, 15 nt, Human
cuacaggcacccacc

SEQ ID NO: 1523085 - RNA, 17 nt, Human
cuacaggcacccaccau

SEQ ID NO: 1523086 - RNA, 14 nt, Human
cuacaggagugagc

SEQ ID NO: 1523087 - RNA, 15 nt, Human
cuacaggagugagca

SEQ ID NO: 1523088 - RNA, 16 nt, Human
cuacaggagugagcac

SEQ ID NO: 1523089 - RNA, 14 nt, Human
cuacaggugugagu

SEQ ID NO: 1523090 - RNA, 16 nt, Human
cuacaggugugaguca

SEQ ID NO: 1523091 - RNA, 13 nt, Human
cuacaguccuccc

SEQ ID NO: 1523092 - RNA, 18 nt, Human
cuacauggaguauauguc

SEQ ID NO: 1523093 - RNA, 20 nt, Human
cuacauggaguauaugucaa

SEQ ID NO: 1523094 - RNA, 23 nt, Human
cuacagcuugaccgugaggccag

SEQ ID NO: 1523095 - RNA, 19 nt, Human
cuacagcuugaccgugagg

SEQ ID NO: 1523096 - RNA, 22 nt, Human
cuacagcuugaccgugaggcca

SEQ ID NO: 1523097 - RNA, 22 nt, Human
cuacagaggccaugggccuccu

SEQ ID NO: 1523098 - RNA, 18 nt, Human
cuacagaggccaugggcc

SEQ ID NO: 1523099 - RNA, 20 nt, Human
cuacagaggccaugggccuc

SEQ ID NO: 1523100 - RNA, 13 nt, Human
cuacacugugcug

SEQ ID NO: 1523101 - RNA, 14 nt, Human
cuacacugugcuga

SEQ ID NO: 1523102 - RNA, 17 nt, Human
cuacacugugcugaguc

SEQ ID NO: 1523103 - RNA, 18 nt, Human
cuacacugugcugagucu

SEQ ID NO: 1523104 - RNA, 23 nt, Human
cuaauagacaauuuauuauggca

SEQ ID NO: 1523105 - RNA, 19 nt, Human
cuaauagacaauuuauuau

SEQ ID NO: 1523106 - RNA, 17 nt, Human
cuaauagacaauuuauu

SEQ ID NO: 1523107 - RNA, 12 nt, Human
cuaauacaccag

SEQ ID NO: 1523108 - RNA, 20 nt, Human
cuaaguaaaaccacagcagu

SEQ ID NO: 1523109 - RNA, 19 nt, Human
cuaaguaaaaccacagcag

SEQ ID NO: 1523110 - RNA, 14 nt, Human
cuaaguaaaaccac

SEQ ID NO: 1523111 - RNA, 18 nt, Human
cuaaguaaaaccacagca

SEQ ID NO: 1523112 - RNA, 21 nt, Human
cuaagcuucacuguaaaauaa

SEQ ID NO: 1523113 - RNA, 22 nt, Human
cuaagcuauucaguaauaacuc

SEQ ID NO: 1523114 - RNA, 23 nt, Human
cuacacgagauacagaauuuuau

SEQ ID NO: 1523115 - RNA, 14 nt, Human
cuacacuaagagag

SEQ ID NO: 1523116 - RNA, 21 nt, Human
cuacacaggggaaaagaggag

SEQ ID NO: 1523117 - RNA, 12 nt, Human
cuaaugggacac

SEQ ID NO: 1523118 - RNA, 13 nt, Human
cuaaugggacacu

SEQ ID NO: 1523119 - RNA, 18 nt, Human
cuaauauguaacaagcca

SEQ ID NO: 1523120 - RNA, 19 nt, Human
cuaaauucuuucauuuuag

SEQ ID NO: 1523121 - RNA, 19 nt, Human
cuaaauugacacuuaaaaa

SEQ ID NO: 1523122 - RNA, 20 nt, Human
cuaaauuuuauaucuuguag

SEQ ID NO: 1523123 - RNA, 14 nt, Human
cuaaauuuuaagug

SEQ ID NO: 1523124 - RNA, 13 nt, Human
cuaaauuuuauau

SEQ ID NO: 1523125 - RNA, 15 nt, Human
cuaaauuuuauaucu

SEQ ID NO: 1523126 - RNA, 16 nt, Human
cuaaauuuuauaucuu

SEQ ID NO: 1523127 - RNA, 12 nt, Human
cuaaccacgcug

SEQ ID NO: 1523128 - RNA, 14 nt, Human
cuaaccacgcugga

SEQ ID NO: 1523129 - RNA, 14 nt, Human
cuaagagagaauga

SEQ ID NO: 1523130 - RNA, 15 nt, Human
cuaagagagaaugag

SEQ ID NO: 1523131 - RNA, 13 nt, Human
cuaagagggaggg

SEQ ID NO: 1523132 - RNA, 15 nt, Human
cuaagagggagggag

SEQ ID NO: 1523133 - RNA, 22 nt, Human
cuaagagggagggagggcucca

SEQ ID NO: 1523134 - RNA, 16 nt, Human
cuaagauaguaacaau

SEQ ID NO: 1523135 - RNA, 23 nt, Human
cuaagagggagggagggcuccag

SEQ ID NO: 1523136 - RNA, 21 nt, Human
cuaaaucuccaaaauaaaacu

SEQ ID NO: 1523137 - RNA, 22 nt, Human
cuaaaugaaaaucgugacaaca

SEQ ID NO: 1523138 - RNA, 23 nt, Human
cgggaggauguucugggacacag

SEQ ID NO: 1523139 - RNA, 20 nt, Human
cgggaggcagagguugcagu

SEQ ID NO: 1523140 - RNA, 11 nt, Human
cuaaaaacaua

SEQ ID NO: 1523141 - RNA, 16 nt, Human
cgggaagggggcuggg

SEQ ID NO: 1523142 - RNA, 19 nt, Human
cgggaagggggcugggaca

SEQ ID NO: 1523143 - RNA, 20 nt, Human
cgggaagggggcugggacau

SEQ ID NO: 1523144 - RNA, 14 nt, Human
cggcuggccuggcc

SEQ ID NO: 1523145 - RNA, 23 nt, Human
cggcuggcagcccaccccucaac

SEQ ID NO: 1523146 - RNA, 13 nt, Human
cggcuggccuggc

SEQ ID NO: 1523147 - RNA, 11 nt, Human
cggccaggcca

SEQ ID NO: 1523148 - RNA, 12 nt, Human
cggccaggccag

SEQ ID NO: 1523149 - RNA, 20 nt, Human
cggccaggccagagggagug

SEQ ID NO: 1523150 - RNA, 19 nt, Human
cgcugugcugcccugccca

SEQ ID NO: 1523151 - RNA, 15 nt, Human
cgcugugccacaggc

SEQ ID NO: 1523152 - RNA, 21 nt, Human
cgcugugcugcccugcccacc

SEQ ID NO: 1523153 - RNA, 23 nt, Human
cgcugugcugcccugcccaccug

SEQ ID NO: 1523154 - RNA, 11 nt, Human
cgcugugcugc

SEQ ID NO: 1523155 - RNA, 13 nt, Human
cgcugugcugccc

SEQ ID NO: 1523156 - RNA, 14 nt, Human
cgcugugcugcccu

SEQ ID NO: 1523157 - RNA, 18 nt, Human
cgcuccugccgcagagcu

SEQ ID NO: 1523158 - RNA, 19 nt, Human
cgcuccugccgcagagcug

SEQ ID NO: 1523159 - RNA, 20 nt, Human
cgcuccugccgcagagcugg

SEQ ID NO: 1523160 - RNA, 16 nt, Human
cgcuuucuacccagcg

SEQ ID NO: 1523161 - RNA, 14 nt, Human
cgcuuucuacccag

SEQ ID NO: 1523162 - RNA, 16 nt, Human
cggaauaguuggcuag

SEQ ID NO: 1523163 - RNA, 17 nt, Human
cggaauaguuggcuagg

SEQ ID NO: 1523164 - RNA, 13 nt, Human
cggaauauauuuu

SEQ ID NO: 1523165 - RNA, 21 nt, Human
cggacagccacggccaggcca

SEQ ID NO: 1523166 - RNA, 22 nt, Human
cggacagccacggccaggccag

SEQ ID NO: 1523167 - RNA, 15 nt, Human
cggagaaaggaaggg

SEQ ID NO: 1523168 - RNA, 17 nt, Human
cggagaaaggaagggcu

SEQ ID NO: 1523169 - RNA, 19 nt, Human
cgcgguggcucacgccugu

SEQ ID NO: 1523170 - RNA, 15 nt, Human
cgcgacaaugcaaac

SEQ ID NO: 1523171 - RNA, 14 nt, Human
cgcgacaaugcaaa

SEQ ID NO: 1523172 - RNA, 18 nt, Human
cgcuacccgggaaggggg

SEQ ID NO: 1523173 - RNA, 21 nt, Human
cgcuacccgggaagggggcug

SEQ ID NO: 1523174 - RNA, 24 nt, Human
cgcuacccgggaagggggcuggga

SEQ ID NO: 1523175 - RNA, 18 nt, Human
cgcagcccugcagagggc

SEQ ID NO: 1523176 - RNA, 19 nt, Human
cgcagcccugcagagggca

SEQ ID NO: 1523177 - RNA, 13 nt, Human
cgcccagucugga

SEQ ID NO: 1523178 - RNA, 19 nt, Human
cgcccagucuggaaugcag

SEQ ID NO: 1523179 - RNA, 21 nt, Human
cgcccagucuggaaugcagug

SEQ ID NO: 1523180 - RNA, 13 nt, Human
cgcacugggcuug

SEQ ID NO: 1523181 - RNA, 21 nt, Human
cgaugggcccaauucuuacaa

SEQ ID NO: 1523182 - RNA, 23 nt, Human
cgcacuucgggaggucgaggcag

SEQ ID NO: 1523183 - RNA, 17 nt, Human
cgcacugggcuugggga

SEQ ID NO: 1523184 - RNA, 14 nt, Human
cgcagagcuggccg

SEQ ID NO: 1523185 - RNA, 19 nt, Human
cgcagcauauucaggaagc

SEQ ID NO: 1523186 - RNA, 20 nt, Human
cgcagcauauucaggaagcu

SEQ ID NO: 1523187 - RNA, 17 nt, Human
cgcagcccugcagaggg

SEQ ID NO: 1523188 - RNA, 19 nt, Human
cgagcccugguggcagugg

SEQ ID NO: 1523189 - RNA, 16 nt, Human
cgaggacagggaggug

SEQ ID NO: 1523190 - RNA, 17 nt, Human
cgaggagguaaugaauu

SEQ ID NO: 1523191 - RNA, 20 nt, Human
ccuguggaugauaaaacaca

SEQ ID NO: 1523192 - RNA, 20 nt, Human
ccugugggcccccaaaugga

SEQ ID NO: 1523193 - RNA, 20 nt, Human
ccugugccucugggacugga

SEQ ID NO: 1523194 - RNA, 19 nt, Human
ccuucauuuggcauucccc

SEQ ID NO: 1523195 - RNA, 16 nt, Human
ccuucucucaucucuu

SEQ ID NO: 1523196 - RNA, 17 nt, Human
ccuucucucaucucuua

SEQ ID NO: 1523197 - RNA, 21 nt, Human
ccuucucucaucucuuagcuc

SEQ ID NO: 1523198 - RNA, 12 nt, Human
ccuucucuccag

SEQ ID NO: 1523199 - RNA, 13 nt, Human
ccuucucuccagc

SEQ ID NO: 1523200 - RNA, 15 nt, Human
ccuucucuccagccc

SEQ ID NO: 1523201 - RNA, 16 nt, Human
ccuucucuccagcccc

SEQ ID NO: 1523202 - RNA, 17 nt, Human
ccuucggccuccauccu

SEQ ID NO: 1523203 - RNA, 19 nt, Human
ccuucggccuccauccuga

SEQ ID NO: 1523204 - RNA, 18 nt, Human
ccuucggccuccauccug

SEQ ID NO: 1523205 - RNA, 17 nt, Human
ccuuccauggacuuugu

SEQ ID NO: 1523206 - RNA, 21 nt, Human
ccuuccuggagcccagaggag

SEQ ID NO: 1523207 - RNA, 13 nt, Human
ccuuccaggggug

SEQ ID NO: 1523208 - RNA, 21 nt, Human
ccuuggugucgggcaugacac

SEQ ID NO: 1523209 - RNA, 19 nt, Human
ccuuggugucgggcaugac

SEQ ID NO: 1523210 - RNA, 20 nt, Human
ccuuggugucgggcaugaca

SEQ ID NO: 1523211 - RNA, 14 nt, Human
ccuuggggagcagg

SEQ ID NO: 1523212 - RNA, 16 nt, Human
ccuuggcugcagggag

SEQ ID NO: 1523213 - RNA, 19 nt, Human
ccuuggauuguccccgacc

SEQ ID NO: 1523214 - RNA, 22 nt, Human
ccuuggcucaaguccucuuuuc

SEQ ID NO: 1523215 - RNA, 15 nt, Human
ccuuggauugucccc

SEQ ID NO: 1523216 - RNA, 15 nt, Human
ccuuggacucauuuu

SEQ ID NO: 1523217 - RNA, 17 nt, Human
ccuucucuccagccccu

SEQ ID NO: 1523218 - RNA, 18 nt, Human
ccuucucuccagccccug

SEQ ID NO: 1523219 - RNA, 18 nt, Human
ccuugacagggcacaccg

SEQ ID NO: 1523220 - RNA, 21 nt, Human
ccuugacagggcacaccgggc

SEQ ID NO: 1523221 - RNA, 19 nt, Human
ccuucucuccagccccugg

SEQ ID NO: 1523222 - RNA, 23 nt, Human
ccuuuguauucucuccuguaccu

SEQ ID NO: 1523223 - RNA, 22 nt, Human
ccuuuguauucucuccuguacc

SEQ ID NO: 1523224 - RNA, 24 nt, Human
ccuuuguauucucuccuguaccuc

SEQ ID NO: 1523225 - RNA, 16 nt, Human
ccuuuguccccaccgc

SEQ ID NO: 1523226 - RNA, 18 nt, Human
ccuuuguccccaccgcag

SEQ ID NO: 1523227 - RNA, 14 nt, Human
ccuuuguccccacc

SEQ ID NO: 1523228 - RNA, 15 nt, Human
ccuuuuuuggcugcu

SEQ ID NO: 1523229 - RNA, 14 nt, Human
ccuuugugaggaag

SEQ ID NO: 1523230 - RNA, 22 nt, Human
ccuuuguccccaccgcagacag

SEQ ID NO: 1523231 - RNA, 23 nt, Human
ccuuuguccccaccgcagacagg

SEQ ID NO: 1523232 - RNA, 15 nt, Human
ccuuugugaggaagc

SEQ ID NO: 1523233 - RNA, 16 nt, Human
ccuuugugaggaagcc

SEQ ID NO: 1523234 - RNA, 17 nt, Human
ccuuugugaggaagccg

SEQ ID NO: 1523235 - RNA, 23 nt, Human
ccuuugugaggaagccgcugggg

SEQ ID NO: 1523236 - RNA, 16 nt, Human
cgaagcccaggggccg

SEQ ID NO: 1523237 - RNA, 21 nt, Human
cgaacauguuuuucuucuccc

SEQ ID NO: 1523238 - RNA, 23 nt, Human
cgaacauguuuuucuucucccuc

SEQ ID NO: 1523239 - RNA, 23 nt, Human
cgaaagggacuuggaagcuccgc

SEQ ID NO: 1523240 - RNA, 17 nt, Human
ccuuuuuuggcugcuga

SEQ ID NO: 1523241 - RNA, 18 nt, Human
ccuuuuuuggcugcugaa

SEQ ID NO: 1523242 - RNA, 20 nt, Human
ccuuuuuuggcugcugaagg

SEQ ID NO: 1523243 - RNA, 22 nt, Human
ccuuuuuuggcugcugaaggcu

SEQ ID NO: 1523244 - RNA, 15 nt, Human
cgaauauugcugaug

SEQ ID NO: 1523245 - RNA, 17 nt, Human
cgaauauugcugauggu

SEQ ID NO: 1523246 - RNA, 16 nt, Human
cgaauagcugggacua

SEQ ID NO: 1523247 - RNA, 11 nt, Human
cgaauauugcu

SEQ ID NO: 1523248 - RNA, 12 nt, Human
cgaauauugcug

SEQ ID NO: 1523249 - RNA, 14 nt, Human
cgaauauugcugau

SEQ ID NO: 1523250 - RNA, 11 nt, Human
ccugcccugug

SEQ ID NO: 1523251 - RNA, 12 nt, Human
ccugcccugugg

SEQ ID NO: 1523252 - RNA, 14 nt, Human
ccugcccugugggc

SEQ ID NO: 1523253 - RNA, 15 nt, Human
ccugcccugugggcc

SEQ ID NO: 1523254 - RNA, 19 nt, Human
ccugcccuuaccugccagg

SEQ ID NO: 1523255 - RNA, 21 nt, Human
ccugcccuuaccugccaggaa

SEQ ID NO: 1523256 - RNA, 22 nt, Human
ccugcccuuaccugccaggaag

SEQ ID NO: 1523257 - RNA, 13 nt, Human
ccugccgcagagc

SEQ ID NO: 1523258 - RNA, 14 nt, Human
ccugccgcagagcu

SEQ ID NO: 1523259 - RNA, 15 nt, Human
ccugccgcagagcug

SEQ ID NO: 1523260 - RNA, 16 nt, Human
ccugccgcagagcugg

SEQ ID NO: 1523261 - RNA, 12 nt, Human
ccugccucagcc

SEQ ID NO: 1523262 - RNA, 13 nt, Human
ccugccucagccu

SEQ ID NO: 1523263 - RNA, 14 nt, Human
ccugccucagccuc

SEQ ID NO: 1523264 - RNA, 14 nt, Human
ccugccuguugggc

SEQ ID NO: 1523265 - RNA, 17 nt, Human
ccugccgcagagcuggc

SEQ ID NO: 1523266 - RNA, 12 nt, Human
ccugccaggcau

SEQ ID NO: 1523267 - RNA, 15 nt, Human
ccugccaggcauggu

SEQ ID NO: 1523268 - RNA, 14 nt, Human
ccugcccggcugcg

SEQ ID NO: 1523269 - RNA, 16 nt, Human
ccugcccggcugcgga

SEQ ID NO: 1523270 - RNA, 17 nt, Human
ccugccccugagcccau

SEQ ID NO: 1523271 - RNA, 22 nt, Human
ccugccuguugggccaggagcc

SEQ ID NO: 1523272 - RNA, 18 nt, Human
ccugaaggccccgcccag

SEQ ID NO: 1523273 - RNA, 19 nt, Human
ccugaaggccccgcccagg

SEQ ID NO: 1523274 - RNA, 22 nt, Human
ccugaaggccccgcccaggcuu

SEQ ID NO: 1523275 - RNA, 20 nt, Human
ccugaaggccccgcccaggc

SEQ ID NO: 1523276 - RNA, 21 nt, Human
ccugaaggccccgcccaggcu

SEQ ID NO: 1523277 - RNA, 18 nt, Human
ccugaaagcccugagcuu

SEQ ID NO: 1523278 - RNA, 13 nt, Human
ccugaaagaggaa

SEQ ID NO: 1523279 - RNA, 13 nt, Human
ccugaaagcccug

SEQ ID NO: 1523280 - RNA, 14 nt, Human
ccugaaagcccuga

SEQ ID NO: 1523281 - RNA, 15 nt, Human
ccugagcugggauga

SEQ ID NO: 1523282 - RNA, 16 nt, Human
ccugccacccugggga

SEQ ID NO: 1523283 - RNA, 22 nt, Human
ccugccacccuggggagaaagu

SEQ ID NO: 1523284 - RNA, 14 nt, Human
ccugccacccuggg

SEQ ID NO: 1523285 - RNA, 12 nt, Human
ccugccacccug

SEQ ID NO: 1523286 - RNA, 13 nt, Human
ccugccacccugg

SEQ ID NO: 1523287 - RNA, 16 nt, Human
ccugcacuugcagacu

SEQ ID NO: 1523288 - RNA, 19 nt, Human
ccugccaauggacuaacuu

SEQ ID NO: 1523289 - RNA, 17 nt, Human
ccugaggcuccacuugg

SEQ ID NO: 1523290 - RNA, 13 nt, Human
ccugaggcuccac

SEQ ID NO: 1523291 - RNA, 14 nt, Human
ccugaggcuccacu

SEQ ID NO: 1523292 - RNA, 13 nt, Human
ccugaggcugggc

SEQ ID NO: 1523293 - RNA, 14 nt, Human
ccugaggcugggcu

SEQ ID NO: 1523294 - RNA, 15 nt, Human
ccugaggcugggcuc

SEQ ID NO: 1523295 - RNA, 16 nt, Human
ccugaggcugggcucc

SEQ ID NO: 1523296 - RNA, 12 nt, Human
ccugagcuggga

SEQ ID NO: 1523297 - RNA, 15 nt, Human
ccugaggcccagagg

SEQ ID NO: 1523298 - RNA, 16 nt, Human
ccugaggcccagaggg

SEQ ID NO: 1523299 - RNA, 17 nt, Human
ccugaggcccagagggc

SEQ ID NO: 1523300 - RNA, 18 nt, Human
ccugaggcccagagggcc

SEQ ID NO: 1523301 - RNA, 20 nt, Human
ccugagccagauuucacucu

SEQ ID NO: 1523302 - RNA, 12 nt, Human
ccugagcgcucc

SEQ ID NO: 1523303 - RNA, 16 nt, Human
ccugagcgcuccugcc

SEQ ID NO: 1523304 - RNA, 21 nt, Human
ccugagcgcuccugccgcaga

SEQ ID NO: 1523305 - RNA, 23 nt, Human
ccugagcgcuccugccgcagagc

SEQ ID NO: 1523306 - RNA, 22 nt, Human
ccugaagucuuuguacagacaa

SEQ ID NO: 1523307 - RNA, 20 nt, Human
ccugaagucacacagugagu

SEQ ID NO: 1523308 - RNA, 15 nt, Human
ccugagccagauuuc

SEQ ID NO: 1523309 - RNA, 16 nt, Human
ccugagccagauuuca

SEQ ID NO: 1523310 - RNA, 18 nt, Human
ccugagccagauuucacu

SEQ ID NO: 1523311 - RNA, 18 nt, Human
ccugccuguugggccagg

SEQ ID NO: 1523312 - RNA, 19 nt, Human
ccugccuguugggccagga

SEQ ID NO: 1523313 - RNA, 20 nt, Human
ccugccuguugggccaggag

SEQ ID NO: 1523314 - RNA, 21 nt, Human
ccugcuaauuccccagauugc

SEQ ID NO: 1523315 - RNA, 19 nt, Human
ccuggcacccggccccugc

SEQ ID NO: 1523316 - RNA, 20 nt, Human
ccuggcacccggccccugcu

SEQ ID NO: 1523317 - RNA, 21 nt, Human
ccuggcacccggccccugcug

SEQ ID NO: 1523318 - RNA, 12 nt, Human
ccuggcacugcu

SEQ ID NO: 1523319 - RNA, 17 nt, Human
ccuggcacugcuuccag

SEQ ID NO: 1523320 - RNA, 13 nt, Human
ccuggcacugcuu

SEQ ID NO: 1523321 - RNA, 16 nt, Human
ccuggcacugcuucca

SEQ ID NO: 1523322 - RNA, 13 nt, Human
ccuggcaugggaa

SEQ ID NO: 1523323 - RNA, 13 nt, Human
ccuggcccacugc

SEQ ID NO: 1523324 - RNA, 14 nt, Human
ccuggcccacugca

SEQ ID NO: 1523325 - RNA, 21 nt, Human
ccuggccagaugcaccagccc

SEQ ID NO: 1523326 - RNA, 23 nt, Human
ccuggccagaugcaccagcccuu

SEQ ID NO: 1523327 - RNA, 12 nt, Human
ccuggggggcag

SEQ ID NO: 1523328 - RNA, 19 nt, Human
ccugggggcugggcagagg

SEQ ID NO: 1523329 - RNA, 20 nt, Human
ccugggggcugggcagagga

SEQ ID NO: 1523330 - RNA, 21 nt, Human
ccugggggcugggcagaggaa

SEQ ID NO: 1523331 - RNA, 22 nt, Human
ccugggaggucaaggcugcagu

SEQ ID NO: 1523332 - RNA, 16 nt, Human
ccugggagugagcugg

SEQ ID NO: 1523333 - RNA, 18 nt, Human
ccugggagugagcugguu

SEQ ID NO: 1523334 - RNA, 16 nt, Human
ccugggcagaaggaag

SEQ ID NO: 1523335 - RNA, 16 nt, Human
ccuggcccacugcauc

SEQ ID NO: 1523336 - RNA, 14 nt, Human
ccuggcaugggaau

SEQ ID NO: 1523337 - RNA, 12 nt, Human
ccuguaccucuu

SEQ ID NO: 1523338 - RNA, 10 nt, Human
ccuguaccuc

SEQ ID NO: 1523339 - RNA, 15 nt, Human
ccugguggcaguggg

SEQ ID NO: 1523340 - RNA, 13 nt, Human
ccugguggcagug

SEQ ID NO: 1523341 - RNA, 14 nt, Human
ccugguggcagugg

SEQ ID NO: 1523342 - RNA, 13 nt, Human
ccuguagcccuaa

SEQ ID NO: 1523343 - RNA, 19 nt, Human
ccuguagagugggagcuga

SEQ ID NO: 1523344 - RNA, 15 nt, Human
ccuguagagugggag

SEQ ID NO: 1523345 - RNA, 16 nt, Human
ccuguagagugggagc

SEQ ID NO: 1523346 - RNA, 12 nt, Human
ccugucccccug

SEQ ID NO: 1523347 - RNA, 13 nt, Human
ccugucccccuga

SEQ ID NO: 1523348 - RNA, 14 nt, Human
ccugucccccugac

SEQ ID NO: 1523349 - RNA, 15 nt, Human
ccugucccccugaca

SEQ ID NO: 1523350 - RNA, 16 nt, Human
ccugucccccugacaa

SEQ ID NO: 1523351 - RNA, 19 nt, Human
ccugguggcagcucaccuc

SEQ ID NO: 1523352 - RNA, 21 nt, Human
ccugguggcagcucaccucuc

SEQ ID NO: 1523353 - RNA, 22 nt, Human
ccugguggcagcucaccucucc

SEQ ID NO: 1523354 - RNA, 14 nt, Human
ccugguggcagcug

SEQ ID NO: 1523355 - RNA, 15 nt, Human
ccugguggcagcugc

SEQ ID NO: 1523356 - RNA, 16 nt, Human
ccugguggcagcugcg

SEQ ID NO: 1523357 - RNA, 17 nt, Human
ccugguggcagcugcgg

SEQ ID NO: 1523358 - RNA, 18 nt, Human
ccugguggcagcugcggu

SEQ ID NO: 1523359 - RNA, 15 nt, Human
ccuaacgaaguaucc

SEQ ID NO: 1523360 - RNA, 21 nt, Human
ccuacaguugaaaaacagcug

SEQ ID NO: 1523361 - RNA, 18 nt, Human
ccgugaggccagagacac

SEQ ID NO: 1523362 - RNA, 22 nt, Human
ccgggcucugccucccaucacc

SEQ ID NO: 1523363 - RNA, 18 nt, Human
ccgggcucugccucccau

SEQ ID NO: 1523364 - RNA, 14 nt, Human
ccgggcucugccuc

SEQ ID NO: 1523365 - RNA, 15 nt, Human
ccgggcucugccucc

SEQ ID NO: 1523366 - RNA, 16 nt, Human
ccggcuccaggcuccu

SEQ ID NO: 1523367 - RNA, 21 nt, Human
ccggcuccaggcuccuuuagc

SEQ ID NO: 1523368 - RNA, 22 nt, Human
ccgggcacucagaagacacuga

SEQ ID NO: 1523369 - RNA, 15 nt, Human
ccgggcagggugugg

SEQ ID NO: 1523370 - RNA, 13 nt, Human
ccgggccacagag

SEQ ID NO: 1523371 - RNA, 14 nt, Human
ccgcuggggccagu

SEQ ID NO: 1523372 - RNA, 11 nt, Human
ccgcuggggcc

SEQ ID NO: 1523373 - RNA, 18 nt, Human
ccgagauagccaaggcca

SEQ ID NO: 1523374 - RNA, 21 nt, Human
ccgagauugcaccacugcacu

SEQ ID NO: 1523375 - RNA, 15 nt, Human
ccgagauugcaccac

SEQ ID NO: 1523376 - RNA, 19 nt, Human
ccgagauugcaccacugca

SEQ ID NO: 1523377 - RNA, 15 nt, Human
ccgcagacaggacca

SEQ ID NO: 1523378 - RNA, 23 nt, Human
ccgcacugggcuuggggaccaga

SEQ ID NO: 1523379 - RNA, 19 nt, Human
ccgagcuuugaaaauucag

SEQ ID NO: 1523380 - RNA, 14 nt, Human
ccgaguagcuggga

SEQ ID NO: 1523381 - RNA, 16 nt, Human
ccgaguagcugggacu

SEQ ID NO: 1523382 - RNA, 14 nt, Human
cccugccuccuuug

SEQ ID NO: 1523383 - RNA, 11 nt, Human
cccugccuccu

SEQ ID NO: 1523384 - RNA, 12 nt, Human
cccugaggccca

SEQ ID NO: 1523385 - RNA, 22 nt, Human
cccugcucuccgaccagacacc

SEQ ID NO: 1523386 - RNA, 21 nt, Human
cccugcucuccgaccagacac

SEQ ID NO: 1523387 - RNA, 15 nt, Human
cccuugaugaagaag

SEQ ID NO: 1523388 - RNA, 12 nt, Human
cccuuccaugga

SEQ ID NO: 1523389 - RNA, 23 nt, Human
cccuuagcagggaaacagcuaau

SEQ ID NO: 1523390 - RNA, 14 nt, Human
cccuuagcagggaa

SEQ ID NO: 1523391 - RNA, 15 nt, Human
cccuuacgugagucc

SEQ ID NO: 1523392 - RNA, 17 nt, Human
cccuuacgugaguccug

SEQ ID NO: 1523393 - RNA, 13 nt, Human
cccuguucuggca

SEQ ID NO: 1523394 - RNA, 14 nt, Human
cccuguucuggcag

SEQ ID NO: 1523395 - RNA, 19 nt, Human
cccuguuuguuucugaaag

SEQ ID NO: 1523396 - RNA, 17 nt, Human
cccuuaccugccaggaa

SEQ ID NO: 1523397 - RNA, 20 nt, Human
cccuuaccugccaggaagcc

SEQ ID NO: 1523398 - RNA, 23 nt, Human
cccuuaccugccaggaagccagc

SEQ ID NO: 1523399 - RNA, 21 nt, Human
cccugguggcagcucaccucu

SEQ ID NO: 1523400 - RNA, 13 nt, Human
cccugguggcagu

SEQ ID NO: 1523401 - RNA, 14 nt, Human
cccugguggcagug

SEQ ID NO: 1523402 - RNA, 15 nt, Human
cccugguggcagugg

SEQ ID NO: 1523403 - RNA, 23 nt, Human
cccucccucuuucccucccuucc

SEQ ID NO: 1523404 - RNA, 12 nt, Human
cccucuuucccu

SEQ ID NO: 1523405 - RNA, 17 nt, Human
cccucuuucccucccuu

SEQ ID NO: 1523406 - RNA, 20 nt, Human
cccucuuucccucccuuccu

SEQ ID NO: 1523407 - RNA, 12 nt, Human
cccucuggggcu

SEQ ID NO: 1523408 - RNA, 19 nt, Human
cccucugcccacucccugc

SEQ ID NO: 1523409 - RNA, 11 nt, Human
cccucugccca

SEQ ID NO: 1523410 - RNA, 15 nt, Human
cccucugcccacucc

SEQ ID NO: 1523411 - RNA, 18 nt, Human
cccucugcccacucccug

SEQ ID NO: 1523412 - RNA, 13 nt, Human
cccugaggcccag

SEQ ID NO: 1523413 - RNA, 20 nt, Human
ccccuguucuggcagaguug

SEQ ID NO: 1523414 - RNA, 13 nt, Human
ccccuuccaugga

SEQ ID NO: 1523415 - RNA, 20 nt, Human
ccccuuccauggacuuuguu

SEQ ID NO: 1523416 - RNA, 20 nt, Human
cccgcccaggcuuagucacu

SEQ ID NO: 1523417 - RNA, 22 nt, Human
cccgcccaggcuuagucacuga

SEQ ID NO: 1523418 - RNA, 23 nt, Human
cccgcuaagagggagggagggcu

SEQ ID NO: 1523419 - RNA, 17 nt, Human
ccccugcccggcugcgg

SEQ ID NO: 1523420 - RNA, 19 nt, Human
ccccugcccggcugcggaa

SEQ ID NO: 1523421 - RNA, 14 nt, Human
ccccugcugggugu

SEQ ID NO: 1523422 - RNA, 17 nt, Human
ccccugcuggguguggc

SEQ ID NO: 1523423 - RNA, 11 nt, Human
ccccugcuggu

SEQ ID NO: 1523424 - RNA, 13 nt, Human
ccccugcugguuc

SEQ ID NO: 1523425 - RNA, 15 nt, Human
ccccugcugguucag

SEQ ID NO: 1523426 - RNA, 20 nt, Human
ccccugcugguucaggguug

SEQ ID NO: 1523427 - RNA, 15 nt, Human
ccccuggaugcagcc

SEQ ID NO: 1523428 - RNA, 18 nt, Human
ccccuggaugcagccuca

SEQ ID NO: 1523429 - RNA, 19 nt, Human
ccccuggaugcagccucac

SEQ ID NO: 1523430 - RNA, 15 nt, Human
ccccucaacaccucu

SEQ ID NO: 1523431 - RNA, 16 nt, Human
ccccucaacaccucug

SEQ ID NO: 1523432 - RNA, 23 nt, Human
ccccucaacucuccuccagaguc

SEQ ID NO: 1523433 - RNA, 12 nt, Human
cccccagccugc

SEQ ID NO: 1523434 - RNA, 17 nt, Human
cccccugacaacacuca

SEQ ID NO: 1523435 - RNA, 19 nt, Human
cccccugacaacacucauu

SEQ ID NO: 1523436 - RNA, 14 nt, Human
ccccuccaaccugg

SEQ ID NO: 1523437 - RNA, 16 nt, Human
ccccucagggucccug

SEQ ID NO: 1523438 - RNA, 15 nt, Human
ccccucccuuucucc

SEQ ID NO: 1523439 - RNA, 12 nt, Human
ccccucccuuuc

SEQ ID NO: 1523440 - RNA, 12 nt, Human
ccccuccaugug

SEQ ID NO: 1523441 - RNA, 18 nt, Human
ccccuccuccacucuccc

SEQ ID NO: 1523442 - RNA, 12 nt, Human
ccccuccuccac

SEQ ID NO: 1523443 - RNA, 15 nt, Human
ccccuccuccacucu

SEQ ID NO: 1523444 - RNA, 15 nt, Human
ccccucggagaagag

SEQ ID NO: 1523445 - RNA, 12 nt, Human
cccccacccccu

SEQ ID NO: 1523446 - RNA, 15 nt, Human
cccccacuggugaca

SEQ ID NO: 1523447 - RNA, 11 nt, Human
cccccacuggu

SEQ ID NO: 1523448 - RNA, 13 nt, Human
cccccacugguga

SEQ ID NO: 1523449 - RNA, 14 nt, Human
ccccauccucugua

SEQ ID NO: 1523450 - RNA, 24 nt, Human
cccccacccaagggccuggccuga

SEQ ID NO: 1523451 - RNA, 17 nt, Human
ccccauccucuguacag

SEQ ID NO: 1523452 - RNA, 13 nt, Human
cccccacccaagg

SEQ ID NO: 1523453 - RNA, 14 nt, Human
ccccagugcccaca

SEQ ID NO: 1523454 - RNA, 15 nt, Human
ccccagugcccacag

SEQ ID NO: 1523455 - RNA, 16 nt, Human
ccccagugcccacagg

SEQ ID NO: 1523456 - RNA, 20 nt, Human
ccccagugcccacaggauca

SEQ ID NO: 1523457 - RNA, 14 nt, Human
cccaguugggugga

SEQ ID NO: 1523458 - RNA, 19 nt, Human
cccaucucuacaaaaagca

SEQ ID NO: 1523459 - RNA, 12 nt, Human
cccaucugugaa

SEQ ID NO: 1523460 - RNA, 14 nt, Human
cccaugagccucag

SEQ ID NO: 1523461 - RNA, 15 nt, Human
ccccaccgcagacag

SEQ ID NO: 1523462 - RNA, 19 nt, Human
ccccaccgcagacaggacc

SEQ ID NO: 1523463 - RNA, 14 nt, Human
cccacgcuggagug

SEQ ID NO: 1523464 - RNA, 16 nt, Human
cccaccuuggcugcag

SEQ ID NO: 1523465 - RNA, 17 nt, Human
cccacgcccccacuggu

SEQ ID NO: 1523466 - RNA, 19 nt, Human
cccacgcccccacugguga

SEQ ID NO: 1523467 - RNA, 15 nt, Human
cccaccuuggcucaa

SEQ ID NO: 1523468 - RNA, 22 nt, Human
cccaccuuggcucaaguccucu

SEQ ID NO: 1523469 - RNA, 14 nt, Human
cccaccuuggcugc

SEQ ID NO: 1523470 - RNA, 15 nt, Human
cccaccuuggcugca

SEQ ID NO: 1523471 - RNA, 12 nt, Human
cccaccucagcc

SEQ ID NO: 1523472 - RNA, 14 nt, Human
cccaccucagccuc

SEQ ID NO: 1523473 - RNA, 15 nt, Human
cccaccucagccucc

SEQ ID NO: 1523474 - RNA, 17 nt, Human
cccaccucagccucccg

SEQ ID NO: 1523475 - RNA, 19 nt, Human
cccaccucucucacuccuu

SEQ ID NO: 1523476 - RNA, 12 nt, Human
cccaccuuggcu

SEQ ID NO: 1523477 - RNA, 21 nt, Human
cccaccucagccucccaaagu

SEQ ID NO: 1523478 - RNA, 13 nt, Human
cccaccucucuca

SEQ ID NO: 1523479 - RNA, 14 nt, Human
cccaccucucucac

SEQ ID NO: 1523480 - RNA, 17 nt, Human
cccaccucucucacucc

SEQ ID NO: 1523481 - RNA, 20 nt, Human
ccauuuugcugucccuuuuc

SEQ ID NO: 1523482 - RNA, 23 nt, Human
ccauuuuggauucuuauggacaa

SEQ ID NO: 1523483 - RNA, 21 nt, Human
ccauuuuguauuuuacuaaua

SEQ ID NO: 1523484 - RNA, 12 nt, Human
cccaagggccug

SEQ ID NO: 1523485 - RNA, 14 nt, Human
cccaagggccuggc

SEQ ID NO: 1523486 - RNA, 17 nt, Human
cccaagggccuggccug

SEQ ID NO: 1523487 - RNA, 16 nt, Human
cccaagggccuggccu

SEQ ID NO: 1523488 - RNA, 17 nt, Human
cccacaggaucagucug

SEQ ID NO: 1523489 - RNA, 13 nt, Human
cccacaggaucag

SEQ ID NO: 1523490 - RNA, 17 nt, Human
ccaucugaaagugguac

SEQ ID NO: 1523491 - RNA, 17 nt, Human
ccauuaugaagaagaga

SEQ ID NO: 1523492 - RNA, 14 nt, Human
ccauucuccaccug

SEQ ID NO: 1523493 - RNA, 13 nt, Human
ccauuugcuccuu

SEQ ID NO: 1523494 - RNA, 16 nt, Human
ccauucugccugccca

SEQ ID NO: 1523495 - RNA, 15 nt, Human
ccauucugccugccc

SEQ ID NO: 1523496 - RNA, 15 nt, Human
ccaggcccucugccc

SEQ ID NO: 1523497 - RNA, 16 nt, Human
ccaggcccucugccca

SEQ ID NO: 1523498 - RNA, 14 nt, Human
ccaggcuggucuca

SEQ ID NO: 1523499 - RNA, 21 nt, Human
ccaggcuuagucacugagaca

SEQ ID NO: 1523500 - RNA, 22 nt, Human
ccaggcuuagucacugagacag

SEQ ID NO: 1523501 - RNA, 23 nt, Human
ccaggcuuagucacugagacagc

SEQ ID NO: 1523502 - RNA, 19 nt, Human
ccaggccccugccacccug

SEQ ID NO: 1523503 - RNA, 13 nt, Human
ccaggcccucugc

SEQ ID NO: 1523504 - RNA, 14 nt, Human
ccaggcccucugcc

SEQ ID NO: 1523505 - RNA, 12 nt, Human
ccaggccagagg

SEQ ID NO: 1523506 - RNA, 14 nt, Human
ccaggccccugcca

SEQ ID NO: 1523507 - RNA, 15 nt, Human
ccaggccccugccac

SEQ ID NO: 1523508 - RNA, 16 nt, Human
ccaggccccugccacc

SEQ ID NO: 1523509 - RNA, 15 nt, Human
ccaggaggccagccu

SEQ ID NO: 1523510 - RNA, 18 nt, Human
ccaggaggccagccuuga

SEQ ID NO: 1523511 - RNA, 20 nt, Human
ccaggaggccagccuugacc

SEQ ID NO: 1523512 - RNA, 20 nt, Human
ccagguagaggguguguaag

SEQ ID NO: 1523513 - RNA, 23 nt, Human
ccagugcccacaggaucagucug

SEQ ID NO: 1523514 - RNA, 20 nt, Human
ccauccugaggcuccacuug

SEQ ID NO: 1523515 - RNA, 18 nt, Human
ccauccugaggcuccacu

SEQ ID NO: 1523516 - RNA, 17 nt, Human
ccaucauugaaaucuuu

SEQ ID NO: 1523517 - RNA, 14 nt, Human
ccaucauugaaauc

SEQ ID NO: 1523518 - RNA, 16 nt, Human
ccaucauugaaaucuu

SEQ ID NO: 1523519 - RNA, 14 nt, Human
ccaucucacacaug

SEQ ID NO: 1523520 - RNA, 15 nt, Human
ccaucucacacauga

SEQ ID NO: 1523521 - RNA, 17 nt, Human
ccaucucacacaugagc

SEQ ID NO: 1523522 - RNA, 18 nt, Human
ccaucucacacaugagca

SEQ ID NO: 1523523 - RNA, 20 nt, Human
ccaucucacacaugagcauc

SEQ ID NO: 1523524 - RNA, 21 nt, Human
ccaucucacacaugagcauca

SEQ ID NO: 1523525 - RNA, 15 nt, Human
ccaucucuccuccuu

SEQ ID NO: 1523526 - RNA, 19 nt, Human
ccauauuaccacagacaua

SEQ ID NO: 1523527 - RNA, 16 nt, Human
ccaucaagccaccaac

SEQ ID NO: 1523528 - RNA, 13 nt, Human
ccaucaagccacc

SEQ ID NO: 1523529 - RNA, 14 nt, Human
ccaucaagccacca

SEQ ID NO: 1523530 - RNA, 12 nt, Human
ccaucaugucug

SEQ ID NO: 1523531 - RNA, 13 nt, Human
ccaucaugucugg

SEQ ID NO: 1523532 - RNA, 12 nt, Human
ccaucauugaaa

SEQ ID NO: 1523533 - RNA, 15 nt, Human
ccauaugccugggca

SEQ ID NO: 1523534 - RNA, 14 nt, Human
ccagugugacaagg

SEQ ID NO: 1523535 - RNA, 23 nt, Human
ccagugugacaaggauugcuacu

SEQ ID NO: 1523536 - RNA, 14 nt, Human
ccagguagaacaca

SEQ ID NO: 1523537 - RNA, 12 nt, Human
ccaggugccagu

SEQ ID NO: 1523538 - RNA, 13 nt, Human
ccaggugccaguu

SEQ ID NO: 1523539 - RNA, 22 nt, Human
ccaguaaaugggggugcauuug

SEQ ID NO: 1523540 - RNA, 21 nt, Human
ccaguaaaugggggugcauuu

SEQ ID NO: 1523541 - RNA, 20 nt, Human
ccaguaaaugggggugcauu

SEQ ID NO: 1523542 - RNA, 13 nt, Human
ccagguuuaagcu

SEQ ID NO: 1523543 - RNA, 16 nt, Human
ccagguuucuaugugu

SEQ ID NO: 1523544 - RNA, 23 nt, Human
ccagugcaguuugguguguccuc

SEQ ID NO: 1523545 - RNA, 13 nt, Human
ccagugaggcucu

SEQ ID NO: 1523546 - RNA, 21 nt, Human
ccagugaugcuaaagguugua

SEQ ID NO: 1523547 - RNA, 17 nt, Human
ccaguggccuuccccag

SEQ ID NO: 1523548 - RNA, 19 nt, Human
ccaguggccuuccccagca

SEQ ID NO: 1523549 - RNA, 23 nt, Human
ccaguaaaugggggugcauuuga

SEQ ID NO: 1523550 - RNA, 23 nt, Human
ccagugaauucuugaaggaaaau

SEQ ID NO: 1523551 - RNA, 16 nt, Human
ccagacccggcugcgu

SEQ ID NO: 1523552 - RNA, 14 nt, Human
ccagacccggcugc

SEQ ID NO: 1523553 - RNA, 15 nt, Human
ccagacccggcugcg

SEQ ID NO: 1523554 - RNA, 14 nt, Human
ccagacaucaacag

SEQ ID NO: 1523555 - RNA, 22 nt, Human
ccagacacauguccaagaagcc

SEQ ID NO: 1523556 - RNA, 17 nt, Human
ccagacacauguccaag

SEQ ID NO: 1523557 - RNA, 20 nt, Human
ccagacacauguccaagaag

SEQ ID NO: 1523558 - RNA, 22 nt, Human
ccagaagaaaauagugguguga

SEQ ID NO: 1523559 - RNA, 19 nt, Human
ccacugugccaugugccag

SEQ ID NO: 1523560 - RNA, 15 nt, Human
ccacugugccaugug

SEQ ID NO: 1523561 - RNA, 16 nt, Human
ccacugugccaugugc

SEQ ID NO: 1523562 - RNA, 22 nt, Human
ccacugcuuuuggucuguguga

SEQ ID NO: 1523563 - RNA, 20 nt, Human
ccacugcuuuuggucugugu

SEQ ID NO: 1523564 - RNA, 12 nt, Human
ccacugcucugg

SEQ ID NO: 1523565 - RNA, 13 nt, Human
ccacugcucuggu

SEQ ID NO: 1523566 - RNA, 15 nt, Human
ccacugcucugguua

SEQ ID NO: 1523567 - RNA, 23 nt, Human
ccacuggugacaugucuuuucuu

SEQ ID NO: 1523568 - RNA, 15 nt, Human
ccacugguucuucuu

SEQ ID NO: 1523569 - RNA, 14 nt, Human
ccacugugaagaga

SEQ ID NO: 1523570 - RNA, 15 nt, Human
ccacugugaagagaa

SEQ ID NO: 1523571 - RNA, 21 nt, Human
ccacugcaucguuucaucuuc

SEQ ID NO: 1523572 - RNA, 23 nt, Human
ccacugcaucguuucaucuucca

SEQ ID NO: 1523573 - RNA, 14 nt, Human
ccacccuccuuuca

SEQ ID NO: 1523574 - RNA, 19 nt, Human
ccacccccacccaagggcc

SEQ ID NO: 1523575 - RNA, 14 nt, Human
ccaccucucucacu

SEQ ID NO: 1523576 - RNA, 16 nt, Human
ccaccucucucacucc

SEQ ID NO: 1523577 - RNA, 19 nt, Human
ccaccucucucacuccuug

SEQ ID NO: 1523578 - RNA, 20 nt, Human
ccaccucucucacuccuuga

SEQ ID NO: 1523579 - RNA, 11 nt, Human
ccacccugcuc

SEQ ID NO: 1523580 - RNA, 13 nt, Human
ccacccugcucuc

SEQ ID NO: 1523581 - RNA, 12 nt, Human
ccacccugcucu

SEQ ID NO: 1523582 - RNA, 14 nt, Human
ccaccuggccucug

SEQ ID NO: 1523583 - RNA, 13 nt, Human
ccaccuggccucu

SEQ ID NO: 1523584 - RNA, 20 nt, Human
ccaccuggccucugcacucc

SEQ ID NO: 1523585 - RNA, 13 nt, Human
ccaccugccaggg

SEQ ID NO: 1523586 - RNA, 14 nt, Human
ccaccugccaggga

SEQ ID NO: 1523587 - RNA, 15 nt, Human
ccaccugccagggac

SEQ ID NO: 1523588 - RNA, 16 nt, Human
ccaccugccagggaca

SEQ ID NO: 1523589 - RNA, 13 nt, Human
ccaccuuggcuca

SEQ ID NO: 1523590 - RNA, 23 nt, Human
ccagccuugaccauucuccaccu

SEQ ID NO: 1523591 - RNA, 13 nt, Human
ccagcgagcccug

SEQ ID NO: 1523592 - RNA, 13 nt, Human
ccagccuggguga

SEQ ID NO: 1523593 - RNA, 19 nt, Human
ccagcaggcucucaggcca

SEQ ID NO: 1523594 - RNA, 20 nt, Human
ccagcaggcucucaggccag

SEQ ID NO: 1523595 - RNA, 21 nt, Human
ccagcaggcucucaggccagc

SEQ ID NO: 1523596 - RNA, 23 nt, Human
ccagcaggcucucaggccagcug

SEQ ID NO: 1523597 - RNA, 16 nt, Human
ccagcccacuucugcc

SEQ ID NO: 1523598 - RNA, 17 nt, Human
ccagcccacuucugcca

SEQ ID NO: 1523599 - RNA, 17 nt, Human
ccagccgagauagccaa

SEQ ID NO: 1523600 - RNA, 20 nt, Human
ccagccgagauagccaaggc

SEQ ID NO: 1523601 - RNA, 22 nt, Human
ccagccgagauagccaaggcca

SEQ ID NO: 1523602 - RNA, 23 nt, Human
ccagccgagauagccaaggccaa

SEQ ID NO: 1523603 - RNA, 19 nt, Human
ccagccccaaaacucuccu

SEQ ID NO: 1523604 - RNA, 17 nt, Human
ccagcaccaucucuccu

SEQ ID NO: 1523605 - RNA, 18 nt, Human
ccagcaccaucucuccuc

SEQ ID NO: 1523606 - RNA, 16 nt, Human
ccagcaggcucucagg

SEQ ID NO: 1523607 - RNA, 17 nt, Human
ccagcaggcucucaggc

SEQ ID NO: 1523608 - RNA, 18 nt, Human
ccagcaggcucucaggcc

SEQ ID NO: 1523609 - RNA, 17 nt, Human
ccagcaagugagagcug

SEQ ID NO: 1523610 - RNA, 18 nt, Human
ccagcaagugagagcugg

SEQ ID NO: 1523611 - RNA, 19 nt, Human
ccagcaagugagagcuggg

SEQ ID NO: 1523612 - RNA, 20 nt, Human
ccagcaagugagagcugggu

SEQ ID NO: 1523613 - RNA, 14 nt, Human
ccagagcccaccuu

SEQ ID NO: 1523614 - RNA, 14 nt, Human
ccagauugcaacag

SEQ ID NO: 1523615 - RNA, 16 nt, Human
ccagauugcaacaggc

SEQ ID NO: 1523616 - RNA, 16 nt, Human
ccagauuggcucacac

SEQ ID NO: 1523617 - RNA, 23 nt, Human
ccagauugcaacaggcugggcuu

SEQ ID NO: 1523618 - RNA, 18 nt, Human
ccagauugcaacaggcug

SEQ ID NO: 1523619 - RNA, 22 nt, Human
ccagauugcaacaggcugggcu

SEQ ID NO: 1523620 - RNA, 18 nt, Human
ccagauuucacucuccuu

SEQ ID NO: 1523621 - RNA, 19 nt, Human
ccagauuucacucuccuug

SEQ ID NO: 1523622 - RNA, 19 nt, Human
ccagauuggcucacacuga

SEQ ID NO: 1523623 - RNA, 20 nt, Human
ccagauuggcucacacugag

SEQ ID NO: 1523624 - RNA, 21 nt, Human
ccagauuggcucacacugaga

SEQ ID NO: 1523625 - RNA, 22 nt, Human
ccagauuggcucacacugagaa

SEQ ID NO: 1523626 - RNA, 15 nt, Human
caaccuccugggcua

SEQ ID NO: 1523627 - RNA, 14 nt, Human
caaccuccugggcu

SEQ ID NO: 1523628 - RNA, 13 nt, Human
caacgucugugcc

SEQ ID NO: 1523629 - RNA, 14 nt, Human
caacgucugugcca

SEQ ID NO: 1523630 - RNA, 18 nt, Human
caacacucauugaccuga

SEQ ID NO: 1523631 - RNA, 20 nt, Human
caacacucauugaccugagg

SEQ ID NO: 1523632 - RNA, 22 nt, Human
caacacucauugaccugaggcc

SEQ ID NO: 1523633 - RNA, 19 nt, Human
caagacugcacaucaaaau

SEQ ID NO: 1523634 - RNA, 18 nt, Human
caagacucuuuggacacu

SEQ ID NO: 1523635 - RNA, 14 nt, Human
caagagcccaggcc

SEQ ID NO: 1523636 - RNA, 15 nt, Human
caagagcccaggccu

SEQ ID NO: 1523637 - RNA, 19 nt, Human
caagacgcugugcugcccu

SEQ ID NO: 1523638 - RNA, 18 nt, Human
caagacgcugugcugccc

SEQ ID NO: 1523639 - RNA, 16 nt, Human
caagagcccaggccuc

SEQ ID NO: 1523640 - RNA, 17 nt, Human
caagagcccaggccucc

SEQ ID NO: 1523641 - RNA, 15 nt, Human
caagcaccuccugcc

SEQ ID NO: 1523642 - RNA, 16 nt, Human
caagcaccuccugccu

SEQ ID NO: 1523643 - RNA, 17 nt, Human
caagcaccuccugccuc

SEQ ID NO: 1523644 - RNA, 18 nt, Human
caagaaaacaacuucaau

SEQ ID NO: 1523645 - RNA, 15 nt, Human
caagaaaacaacuuc

SEQ ID NO: 1523646 - RNA, 20 nt, Human
caagaacuuuccaggaaggc

SEQ ID NO: 1523647 - RNA, 16 nt, Human
caagaccuucuccuuc

SEQ ID NO: 1523648 - RNA, 17 nt, Human
caagaccuucuccuuca

SEQ ID NO: 1523649 - RNA, 18 nt, Human
caagaccuucuccuucac

SEQ ID NO: 1523650 - RNA, 16 nt, Human
caagacgcugugcugc

SEQ ID NO: 1523651 - RNA, 17 nt, Human
caagacgcugugcugcc

SEQ ID NO: 1523652 - RNA, 21 nt, Human
caagccagauuuuccugaaaa

SEQ ID NO: 1523653 - RNA, 18 nt, Human
caagcaccuccugccucg

SEQ ID NO: 1523654 - RNA, 14 nt, Human
caagcaggacaugg

SEQ ID NO: 1523655 - RNA, 18 nt, Human
caagcaggacauggacaa

SEQ ID NO: 1523656 - RNA, 19 nt, Human
caagcgauucuucugcuuc

SEQ ID NO: 1523657 - RNA, 20 nt, Human
caagcgauucuucugcuuca

SEQ ID NO: 1523658 - RNA, 22 nt, Human
caagcgauucuucugcuucagc

SEQ ID NO: 1523659 - RNA, 17 nt, Human
caaggcugauuaaacca

SEQ ID NO: 1523660 - RNA, 17 nt, Human
caagcuggucccacuca

SEQ ID NO: 1523661 - RNA, 19 nt, Human
caagcuggucccacucagu

SEQ ID NO: 1523662 - RNA, 14 nt, Human
caaguccucuuuuc

SEQ ID NO: 1523663 - RNA, 20 nt, Human
caaggucauuuuuuuuaaga

SEQ ID NO: 1523664 - RNA, 14 nt, Human
caaggucauuuuuu

SEQ ID NO: 1523665 - RNA, 18 nt, Human
caaggggcccaaauucuu

SEQ ID NO: 1523666 - RNA, 12 nt, Human
caaggcugcagu

SEQ ID NO: 1523667 - RNA, 15 nt, Human
caaggcugcagugag

SEQ ID NO: 1523668 - RNA, 23 nt, Human
caaggcugucaauuacaggaagu

SEQ ID NO: 1523669 - RNA, 14 nt, Human
caaguuaaauaaau

SEQ ID NO: 1523670 - RNA, 18 nt, Human
caagugagagcugggugu

SEQ ID NO: 1523671 - RNA, 21 nt, Human
caaguccucuuuucugagagg

SEQ ID NO: 1523672 - RNA, 14 nt, Human
caagugagagcugg

SEQ ID NO: 1523673 - RNA, 15 nt, Human
caagugagagcuggg

SEQ ID NO: 1523674 - RNA, 17 nt, Human
caagugagagcugggug

SEQ ID NO: 1523675 - RNA, 15 nt, Human
caaugugauaaaacc

SEQ ID NO: 1523676 - RNA, 17 nt, Human
caaugugauaaaacccc

SEQ ID NO: 1523677 - RNA, 16 nt, Human
caauuacaggaaguac

SEQ ID NO: 1523678 - RNA, 17 nt, Human
caauuacaggaaguacu

SEQ ID NO: 1523679 - RNA, 23 nt, Human
caauucucauuugucacacacuu

SEQ ID NO: 1523680 - RNA, 17 nt, Human
caaugcacuuuguucug

SEQ ID NO: 1523681 - RNA, 22 nt, Human
caaugcacuuuguucuggcucu

SEQ ID NO: 1523682 - RNA, 20 nt, Human
caaugcacuuuguucuggcu

SEQ ID NO: 1523683 - RNA, 21 nt, Human
caaugcacuuuguucuggcuc

SEQ ID NO: 1523684 - RNA, 23 nt, Human
caaugaccuuucaauaggaaaaa

SEQ ID NO: 1523685 - RNA, 18 nt, Human
caaugacuuacuguacau

SEQ ID NO: 1523686 - RNA, 17 nt, Human
caaugacuuacuguaca

SEQ ID NO: 1523687 - RNA, 15 nt, Human
caaugacuuacugua

SEQ ID NO: 1523688 - RNA, 17 nt, Human
caauauucgcuguguca

SEQ ID NO: 1523689 - RNA, 23 nt, Human
caauacaucccuuaccugggaaa

SEQ ID NO: 1523690 - RNA, 12 nt, Human
caauaggaaaaa

SEQ ID NO: 1523691 - RNA, 13 nt, Human
caauaggaaaaac

SEQ ID NO: 1523692 - RNA, 14 nt, Human
caauguucucucuu

SEQ ID NO: 1523693 - RNA, 14 nt, Human
caauaggaaaaacu

SEQ ID NO: 1523694 - RNA, 21 nt, Human
caaauacgugggcauucaaau

SEQ ID NO: 1523695 - RNA, 22 nt, Human
caaauacgugggcauucaaaug

SEQ ID NO: 1523696 - RNA, 20 nt, Human
caaauacgugggcauucaaa

SEQ ID NO: 1523697 - RNA, 22 nt, Human
caaagggggaggcuaaagccca

SEQ ID NO: 1523698 - RNA, 23 nt, Human
caaagugcugggauuacaggugu

SEQ ID NO: 1523699 - RNA, 19 nt, Human
caaagugcugggauuacag

SEQ ID NO: 1523700 - RNA, 19 nt, Human
caaaggguaucaggugcug

SEQ ID NO: 1523701 - RNA, 21 nt, Human
caaauaugcaaagcacugacu

SEQ ID NO: 1523702 - RNA, 15 nt, Human
caaaugucuauaaac

SEQ ID NO: 1523703 - RNA, 14 nt, Human
caaaugucuauaaa

SEQ ID NO: 1523704 - RNA, 15 nt, Human
caaauugugugaaag

SEQ ID NO: 1523705 - RNA, 14 nt, Human
caaauuucuaaauc

SEQ ID NO: 1523706 - RNA, 12 nt, Human
caaauuucuaaa

SEQ ID NO: 1523707 - RNA, 11 nt, Human
caaauuucuaa

SEQ ID NO: 1523708 - RNA, 14 nt, Human
caaaggaagcacau

SEQ ID NO: 1523709 - RNA, 16 nt, Human
caaaggguaucaggug

SEQ ID NO: 1523710 - RNA, 18 nt, Human
caaaggguaucaggugcu

SEQ ID NO: 1523711 - RNA, 13 nt, Human
caaaggaagcaca

SEQ ID NO: 1523712 - RNA, 19 nt, Human
caaagcugaugacaacuuc

SEQ ID NO: 1523713 - RNA, 13 nt, Human
caaagcuaggccu

SEQ ID NO: 1523714 - RNA, 14 nt, Human
caaagcuaggccug

SEQ ID NO: 1523715 - RNA, 19 nt, Human
caaagcuaggccuggccag

SEQ ID NO: 1523716 - RNA, 15 nt, Human
caaagcuaggccugg

SEQ ID NO: 1523717 - RNA, 17 nt, Human
caaagccuccuccagcc

SEQ ID NO: 1523718 - RNA, 18 nt, Human
caaagccuccuccagccg

SEQ ID NO: 1523719 - RNA, 17 nt, Human
caaacucaccugccccu

SEQ ID NO: 1523720 - RNA, 16 nt, Human
caaaauuuuuucucua

SEQ ID NO: 1523721 - RNA, 21 nt, Human
caaaauuuuuucucuaggaaa

SEQ ID NO: 1523722 - RNA, 22 nt, Human
caaaauuuuuucucuaggaaau

SEQ ID NO: 1523723 - RNA, 15 nt, Human
caaacacauacagga

SEQ ID NO: 1523724 - RNA, 20 nt, Human
caaacccuucagugccaaaa

SEQ ID NO: 1523725 - RNA, 22 nt, Human
caaaauugauguguuuauuuau

SEQ ID NO: 1523726 - RNA, 15 nt, Human
caaaauugauguguu

SEQ ID NO: 1523727 - RNA, 16 nt, Human
caaaauugauguguuu

SEQ ID NO: 1523728 - RNA, 14 nt, Human
caaaauaaaacuuu

SEQ ID NO: 1523729 - RNA, 12 nt, Human
caaaauaaaacu

SEQ ID NO: 1523730 - RNA, 15 nt, Human
caaaauguaggguua

SEQ ID NO: 1523731 - RNA, 19 nt, Human
caaaaaucucaauauuuca

SEQ ID NO: 1523732 - RNA, 17 nt, Human
caaaauaaaaaugaggu

SEQ ID NO: 1523733 - RNA, 23 nt, Human
caaaacuucagacauagaauuaa

SEQ ID NO: 1523734 - RNA, 23 nt, Human
caaaacucuccucugcugcuggc

SEQ ID NO: 1523735 - RNA, 22 nt, Human
caaaacucuccucugcugcugg

SEQ ID NO: 1523736 - RNA, 20 nt, Human
caaaacucuccucugcugcu

SEQ ID NO: 1523737 - RNA, 21 nt, Human
caaaacucuccucugcugcug

SEQ ID NO: 1523738 - RNA, 13 nt, Human
caaaaaggcagga

SEQ ID NO: 1523739 - RNA, 20 nt, Human
caaaaacauggccuuugcuu

SEQ ID NO: 1523740 - RNA, 15 nt, Human
caaaaacacagcaag

SEQ ID NO: 1523741 - RNA, 17 nt, Human
caaaaacacagcaaggg

SEQ ID NO: 1523742 - RNA, 13 nt, Human
caaaaacacagca

SEQ ID NO: 1523743 - RNA, 14 nt, Human
caaaaacacagcaa

SEQ ID NO: 1523744 - RNA, 13 nt, Human
auuuuccugaaaa

SEQ ID NO: 1523745 - RNA, 21 nt, Human
auuuugggguacccacugcuc

SEQ ID NO: 1523746 - RNA, 22 nt, Human
auuuugggguacccacugcucu

SEQ ID NO: 1523747 - RNA, 23 nt, Human
auuuugggguacccacugcucug

SEQ ID NO: 1523748 - RNA, 17 nt, Human
auuuugguuuuguuccc

SEQ ID NO: 1523749 - RNA, 21 nt, Human
auuuugguuuuguuccccucc

SEQ ID NO: 1523750 - RNA, 22 nt, Human
auuuugguuuuguuccccuccu

SEQ ID NO: 1523751 - RNA, 23 nt, Human
auuuugguuuuguuccccuccuc

SEQ ID NO: 1523752 - RNA, 16 nt, Human
auuuugguuuuguucc

SEQ ID NO: 1523753 - RNA, 19 nt, Human
cacagugaucaaguuauuu

SEQ ID NO: 1523754 - RNA, 19 nt, Human
cacaggcagguccaggguu

SEQ ID NO: 1523755 - RNA, 22 nt, Human
cacagugagucgaggacaggga

SEQ ID NO: 1523756 - RNA, 13 nt, Human
cacaguccuuacc

SEQ ID NO: 1523757 - RNA, 15 nt, Human
cacaguccuuaccag

SEQ ID NO: 1523758 - RNA, 21 nt, Human
cacaguccuuaccagcagagc

SEQ ID NO: 1523759 - RNA, 22 nt, Human
cacaguccuuaccagcagagca

SEQ ID NO: 1523760 - RNA, 14 nt, Human
cacaguucucuccu

SEQ ID NO: 1523761 - RNA, 15 nt, Human
cacaguucucuccuu

SEQ ID NO: 1523762 - RNA, 11 nt, Human
cacaggcaggu

SEQ ID NO: 1523763 - RNA, 14 nt, Human
cacaggcaggucca

SEQ ID NO: 1523764 - RNA, 15 nt, Human
cacaggcagguccag

SEQ ID NO: 1523765 - RNA, 21 nt, Human
cacagcuucauuuccuguguc

SEQ ID NO: 1523766 - RNA, 22 nt, Human
cacagcuucauuuccugugucu

SEQ ID NO: 1523767 - RNA, 22 nt, Human
cacagcugggguggggaccuca

SEQ ID NO: 1523768 - RNA, 23 nt, Human
cacagcugggguggggaccucag

SEQ ID NO: 1523769 - RNA, 16 nt, Human
cacaguuuucugagaa

SEQ ID NO: 1523770 - RNA, 17 nt, Human
cacaguuuucugagaaa

SEQ ID NO: 1523771 - RNA, 19 nt, Human
cacaguuuucugagaaaga

SEQ ID NO: 1523772 - RNA, 20 nt, Human
cacaguuuucugagaaagac

SEQ ID NO: 1523773 - RNA, 16 nt, Human
auugucaaagugguga

SEQ ID NO: 1523774 - RNA, 17 nt, Human
auuguccccgacccuug

SEQ ID NO: 1523775 - RNA, 19 nt, Human
auuguccccgacccuugcc

SEQ ID NO: 1523776 - RNA, 20 nt, Human
auuguccccgacccuugccg

SEQ ID NO: 1523777 - RNA, 18 nt, Human
auugugucucuugguccu

SEQ ID NO: 1523778 - RNA, 14 nt, Human
auugugucucuugg

SEQ ID NO: 1523779 - RNA, 17 nt, Human
auucuccuuguguuacu

SEQ ID NO: 1523780 - RNA, 23 nt, Human
auucuccuucagcccucaccccu

SEQ ID NO: 1523781 - RNA, 14 nt, Human
auucuuauuuaaug

SEQ ID NO: 1523782 - RNA, 18 nt, Human
auucuuauuuaaugaaag

SEQ ID NO: 1523783 - RNA, 13 nt, Human
auucuuauuuaau

SEQ ID NO: 1523784 - RNA, 22 nt, Human
auucuuccucccucccucuuuc

SEQ ID NO: 1523785 - RNA, 13 nt, Human
auucuucuccacu

SEQ ID NO: 1523786 - RNA, 18 nt, Human
auugacccacaagaaaug

SEQ ID NO: 1523787 - RNA, 21 nt, Human
auugacccacaagaaaugaaa

SEQ ID NO: 1523788 - RNA, 14 nt, Human
auuugaaauauuga

SEQ ID NO: 1523789 - RNA, 15 nt, Human
auuugaaaauuuuga

SEQ ID NO: 1523790 - RNA, 14 nt, Human
auuugaaaauuuug

SEQ ID NO: 1523791 - RNA, 17 nt, Human
auuuccguuaaaauacc

SEQ ID NO: 1523792 - RNA, 16 nt, Human
auuuccguuaaaauac

SEQ ID NO: 1523793 - RNA, 15 nt, Human
auuuccguuaaaaua

SEQ ID NO: 1523794 - RNA, 19 nt, Human
auuuauuuuaauaauguuu

SEQ ID NO: 1523795 - RNA, 20 nt, Human
auuuauuuuaauaauguuuc

SEQ ID NO: 1523796 - RNA, 12 nt, Human
auuucauuucuu

SEQ ID NO: 1523797 - RNA, 17 nt, Human
auuuccagccaaagccu

SEQ ID NO: 1523798 - RNA, 17 nt, Human
auuuauuuuaauaaugu

SEQ ID NO: 1523799 - RNA, 13 nt, Human
auuuauucugcuc

SEQ ID NO: 1523800 - RNA, 13 nt, Human
auuuagauguaua

SEQ ID NO: 1523801 - RNA, 18 nt, Human
auuuaguauuuuguuuca

SEQ ID NO: 1523802 - RNA, 12 nt, Human
auuuaacagaaa

SEQ ID NO: 1523803 - RNA, 14 nt, Human
auuuaacagaaaug

SEQ ID NO: 1523804 - RNA, 15 nt, Human
auuuaacagaaaugu

SEQ ID NO: 1523805 - RNA, 17 nt, Human
auuuacuucuuauacau

SEQ ID NO: 1523806 - RNA, 14 nt, Human
auuuacuucuuaua

SEQ ID NO: 1523807 - RNA, 16 nt, Human
auuuacuucuuauaca

SEQ ID NO: 1523808 - RNA, 15 nt, Human
auuuagaaauauaau

SEQ ID NO: 1523809 - RNA, 14 nt, Human
auuuauucugcuca

SEQ ID NO: 1523810 - RNA, 22 nt, Human
auuuucaguuauuauauuuaca

SEQ ID NO: 1523811 - RNA, 14 nt, Human
auuuucagaaaaua

SEQ ID NO: 1523812 - RNA, 17 nt, Human
auuuucagaaaauauua

SEQ ID NO: 1523813 - RNA, 18 nt, Human
auuuuaaaagaaugauua

SEQ ID NO: 1523814 - RNA, 22 nt, Human
auuuuaaaagaaugauuaugaa

SEQ ID NO: 1523815 - RNA, 16 nt, Human
auuuuacauaaauuua

SEQ ID NO: 1523816 - RNA, 17 nt, Human
auuuuacauaaauuuag

SEQ ID NO: 1523817 - RNA, 15 nt, Human
auuuuaauucaguug

SEQ ID NO: 1523818 - RNA, 18 nt, Human
auuuguauaaaauaauuu

SEQ ID NO: 1523819 - RNA, 19 nt, Human
auuuguauaaaauaauuuu

SEQ ID NO: 1523820 - RNA, 21 nt, Human
auuuguauaaaauaauuuuua

SEQ ID NO: 1523821 - RNA, 17 nt, Human
auuuuaaaagaaugauu

SEQ ID NO: 1523822 - RNA, 15 nt, Human
auuugugauacaaug

SEQ ID NO: 1523823 - RNA, 14 nt, Human
auuugugauacaau

SEQ ID NO: 1523824 - RNA, 20 nt, Human
augugcuaguaauuggaaag

SEQ ID NO: 1523825 - RNA, 24 nt, Human
auguggaguucaucuugaauugua

SEQ ID NO: 1523826 - RNA, 20 nt, Human
auguggaguucaucuugaau

SEQ ID NO: 1523827 - RNA, 19 nt, Human
augugcuaguaauuggaaa

SEQ ID NO: 1523828 - RNA, 20 nt, Human
uuuuaauaauguuucaaaca

SEQ ID NO: 1523829 - RNA, 16 nt, Human
uuuuaauaauguuuca

SEQ ID NO: 1523830 - RNA, 22 nt, Human
augugccagguuuuuggucuga

SEQ ID NO: 1523831 - RNA, 12 nt, Human
uuuuaauaaugu

SEQ ID NO: 1523832 - RNA, 13 nt, Human
uuuuaauaauguu

SEQ ID NO: 1523833 - RNA, 14 nt, Human
uuuuaauaauguuu

SEQ ID NO: 1523834 - RNA, 20 nt, Human
auggggcccugccuccuuug

SEQ ID NO: 1523835 - RNA, 12 nt, Human
auggggcugcac

SEQ ID NO: 1523836 - RNA, 20 nt, Human
auguugcccaggcaggucuu

SEQ ID NO: 1523837 - RNA, 18 nt, Human
auguucaucaaugaauga

SEQ ID NO: 1523838 - RNA, 17 nt, Human
auguugcccaggcaggu

SEQ ID NO: 1523839 - RNA, 12 nt, Human
auguugcccagg

SEQ ID NO: 1523840 - RNA, 14 nt, Human
uuuucucuaggaaa

SEQ ID NO: 1523841 - RNA, 16 nt, Human
uuuucucuaggaaaua

SEQ ID NO: 1523842 - RNA, 15 nt, Human
uuuucugagaaagac

SEQ ID NO: 1523843 - RNA, 18 nt, Human
uuuucugagaaagacuau

SEQ ID NO: 1523844 - RNA, 15 nt, Human
uuuuccaaaauaauu

SEQ ID NO: 1523845 - RNA, 20 nt, Human
uuuucauuuaggugaggaag

SEQ ID NO: 1523846 - RNA, 11 nt, Human
uuuuauuuuau

SEQ ID NO: 1523847 - RNA, 13 nt, Human
uuuuauuaugcau

SEQ ID NO: 1523848 - RNA, 15 nt, Human
auguuuucaggcuag

SEQ ID NO: 1523849 - RNA, 17 nt, Human
auguuuucaggcuagau

SEQ ID NO: 1523850 - RNA, 21 nt, Human
auguuuucaggcuagauguau

SEQ ID NO: 1523851 - RNA, 16 nt, Human
auuaaacuuaaucuaa

SEQ ID NO: 1523852 - RNA, 15 nt, Human
auuaaaagaauauuu

SEQ ID NO: 1523853 - RNA, 22 nt, Human
auuaaaaaucucaaauuucuaa

SEQ ID NO: 1523854 - RNA, 20 nt, Human
auuaaaaaucucaaauuucu

SEQ ID NO: 1523855 - RNA, 19 nt, Human
auuaaaaaucucaaauuuc

SEQ ID NO: 1523856 - RNA, 15 nt, Human
auuaaaaaucucaaa

SEQ ID NO: 1523857 - RNA, 14 nt, Human
uuuuguucauacau

SEQ ID NO: 1523858 - RNA, 23 nt, Human
uuuugugcauuaucuagauacug

SEQ ID NO: 1523859 - RNA, 20 nt, Human
uuuugugcauuaucuagaua

SEQ ID NO: 1523860 - RNA, 17 nt, Human
uuuugugcauuaucuag

SEQ ID NO: 1523861 - RNA, 21 nt, Human
uuuuguuccacaaguuaaaua

SEQ ID NO: 1523862 - RNA, 17 nt, Human
uuuuguucauacauauu

SEQ ID NO: 1523863 - RNA, 15 nt, Human
uuuuguuccacaagu

SEQ ID NO: 1523864 - RNA, 20 nt, Human
uuuuuaucgucacugcuuaa

SEQ ID NO: 1523865 - RNA, 12 nt, Human
uuuuuauggcuu

SEQ ID NO: 1523866 - RNA, 19 nt, Human
uuuuuauauuugaaauauu

SEQ ID NO: 1523867 - RNA, 23 nt, Human
uuuuuauacauaaacaagaccac

SEQ ID NO: 1523868 - RNA, 21 nt, Human
uuuuguuugguuauaucgaaa

SEQ ID NO: 1523869 - RNA, 11 nt, Human
uuuuuacuaau

SEQ ID NO: 1523870 - RNA, 13 nt, Human
uuuuguuugguua

SEQ ID NO: 1523871 - RNA, 16 nt, Human
uuuuguuugguuauau

SEQ ID NO: 1523872 - RNA, 22 nt, Human
uuuuuagacagagucucacugu

SEQ ID NO: 1523873 - RNA, 23 nt, Human
uuuugccauguuggccaggcugg

SEQ ID NO: 1523874 - RNA, 14 nt, Human
uuuugaguucuaca

SEQ ID NO: 1523875 - RNA, 15 nt, Human
uuuugauauaugaaa

SEQ ID NO: 1523876 - RNA, 17 nt, Human
uuuugauccaagcuggu

SEQ ID NO: 1523877 - RNA, 17 nt, Human
uuuugagugccuuacac

SEQ ID NO: 1523878 - RNA, 17 nt, Human
auuacauuuguauaaaa

SEQ ID NO: 1523879 - RNA, 18 nt, Human
auuacauuuguauaaaau

SEQ ID NO: 1523880 - RNA, 20 nt, Human
auuacauuuguauaaaauaa

SEQ ID NO: 1523881 - RNA, 21 nt, Human
auuacaguggggaaugaagau

SEQ ID NO: 1523882 - RNA, 14 nt, Human
auuaaguacuaugu

SEQ ID NO: 1523883 - RNA, 16 nt, Human
auuaaguacuauguau

SEQ ID NO: 1523884 - RNA, 15 nt, Human
uuuuuguguauuugu

SEQ ID NO: 1523885 - RNA, 17 nt, Human
uuuuuguagcacugaca

SEQ ID NO: 1523886 - RNA, 23 nt, Human
auuaaguaaugauaacuggaaac

SEQ ID NO: 1523887 - RNA, 22 nt, Human
uuuuuguuccacaaguuaaaua

SEQ ID NO: 1523888 - RNA, 19 nt, Human
uuuuugugaaaagcuccau

SEQ ID NO: 1523889 - RNA, 19 nt, Human
uuuuuguagagccaggguc

SEQ ID NO: 1523890 - RNA, 20 nt, Human
uuuuuguagagccagggucu

SEQ ID NO: 1523891 - RNA, 22 nt, Human
uuuuuauggcuuuugugcauua

SEQ ID NO: 1523892 - RNA, 21 nt, Human
uuuuuauggcuuuugugcauu

SEQ ID NO: 1523893 - RNA, 20 nt, Human
uuuuuauggcuuuugugcau

SEQ ID NO: 1523894 - RNA, 24 nt, Human
auuacuuacguauguuuguacuug

SEQ ID NO: 1523895 - RNA, 12 nt, Human
auuacuucugcu

SEQ ID NO: 1523896 - RNA, 20 nt, Human
auuauauaaguauucuaaau

SEQ ID NO: 1523897 - RNA, 14 nt, Human
auuauauaaguauu

SEQ ID NO: 1523898 - RNA, 17 nt, Human
auuauauaaguauucua

SEQ ID NO: 1523899 - RNA, 20 nt, Human
auucagauaugauucaaaug

SEQ ID NO: 1523900 - RNA, 18 nt, Human
auucagauaugauucaaa

SEQ ID NO: 1523901 - RNA, 20 nt, Human
auucaggaagcucagggccu

SEQ ID NO: 1523902 - RNA, 17 nt, Human
auucaggaagcucaggg

SEQ ID NO: 1523903 - RNA, 19 nt, Human
auucaggaagcucagggcc

SEQ ID NO: 1523904 - RNA, 15 nt, Human
auucaguaauaacuc

SEQ ID NO: 1523905 - RNA, 19 nt, Human
auucaguaauaacucuacc

SEQ ID NO: 1523906 - RNA, 14 nt, Human
auucaggaagcuca

SEQ ID NO: 1523907 - RNA, 17 nt, Human
auucccaagcucugcuc

SEQ ID NO: 1523908 - RNA, 16 nt, Human
auucccaagcucugcu

SEQ ID NO: 1523909 - RNA, 14 nt, Human
auucccaagcucug

SEQ ID NO: 1523910 - RNA, 15 nt, Human
auucccaagcucugc

SEQ ID NO: 1523911 - RNA, 20 nt, Human
auucuccugccucagccucc

SEQ ID NO: 1523912 - RNA, 19 nt, Human
auucuccugccucagccuc

SEQ ID NO: 1523913 - RNA, 15 nt, Human
auucuccugccucag

SEQ ID NO: 1523914 - RNA, 17 nt, Human
auucuccugccucagcc

SEQ ID NO: 1523915 - RNA, 16 nt, Human
auucuccuuguguuac

SEQ ID NO: 1523916 - RNA, 16 nt, Human
auucuccuucagcccu

SEQ ID NO: 1523917 - RNA, 17 nt, Human
auucuccuucagcccuc

SEQ ID NO: 1523918 - RNA, 18 nt, Human
auucuccuucagcccuca

SEQ ID NO: 1523919 - RNA, 22 nt, Human
auucuccuucagcccucacccc

SEQ ID NO: 1523920 - RNA, 13 nt, Human
auucuccuucagc

SEQ ID NO: 1523921 - RNA, 14 nt, Human
auucuccuucagcc

SEQ ID NO: 1523922 - RNA, 15 nt, Human
auucuccuucagccc

SEQ ID NO: 1523923 - RNA, 11 nt, Human
auucuccugcc

SEQ ID NO: 1523924 - RNA, 14 nt, Human
auucuccugccuca

SEQ ID NO: 1523925 - RNA, 13 nt, Human
auucuccugccuc

SEQ ID NO: 1523926 - RNA, 21 nt, Human
auucuccaccugccagggaca

SEQ ID NO: 1523927 - RNA, 14 nt, Human
auucuaaauuuuau

SEQ ID NO: 1523928 - RNA, 19 nt, Human
auucuccaccugccaggga

SEQ ID NO: 1523929 - RNA, 20 nt, Human
auucuccaccugccagggac

SEQ ID NO: 1523930 - RNA, 12 nt, Human
auugaaaucuuu

SEQ ID NO: 1523931 - RNA, 11 nt, Human
uugcucaugga

SEQ ID NO: 1523932 - RNA, 12 nt, Human
uugcucauggaa

SEQ ID NO: 1523933 - RNA, 19 nt, Human
uugcugaauacagaggcaa

SEQ ID NO: 1523934 - RNA, 20 nt, Human
uugcuaagugaggaugaaaa

SEQ ID NO: 1523935 - RNA, 17 nt, Human
uugcugauggugcaaug

SEQ ID NO: 1523936 - RNA, 18 nt, Human
uugcugauggugcaauga

SEQ ID NO: 1523937 - RNA, 19 nt, Human
uugcugauggugcaaugac

SEQ ID NO: 1523938 - RNA, 17 nt, Human
uuggaaagaguaggaag

SEQ ID NO: 1523939 - RNA, 21 nt, Human
augaaauauuauguuaaaacu

SEQ ID NO: 1523940 - RNA, 14 nt, Human
augaaaugagguca

SEQ ID NO: 1523941 - RNA, 20 nt, Human
augaaagacuguacaaagua

SEQ ID NO: 1523942 - RNA, 22 nt, Human
uuggcgcugccccuggcagccc

SEQ ID NO: 1523943 - RNA, 16 nt, Human
uuggcugcugaaggcu

SEQ ID NO: 1523944 - RNA, 18 nt, Human
uuggaaagaguaggaaga

SEQ ID NO: 1523945 - RNA, 23 nt, Human
uuggaaagaguaggaagacuuug

SEQ ID NO: 1523946 - RNA, 22 nt, Human
uuggcuagagguucaaagauau

SEQ ID NO: 1523947 - RNA, 22 nt, Human
uuggcuaggaccccuccaugug

SEQ ID NO: 1523948 - RNA, 21 nt, Human
uuggcuagagguucaaagaua

SEQ ID NO: 1523949 - RNA, 23 nt, Human
uuggcuauuagagaucaaccccu

SEQ ID NO: 1523950 - RNA, 14 nt, Human
uuggcugcagggag

SEQ ID NO: 1523951 - RNA, 11 nt, Human
uuggcugcuga

SEQ ID NO: 1523952 - RNA, 15 nt, Human
uuggcugcugaaggc

SEQ ID NO: 1523953 - RNA, 13 nt, Human
uuguauaaaauaa

SEQ ID NO: 1523954 - RNA, 15 nt, Human
uuguauaaaauaauu

SEQ ID NO: 1523955 - RNA, 20 nt, Human
uuguaaggaaugauuaauua

SEQ ID NO: 1523956 - RNA, 21 nt, Human
augaauuaguuuuauaugcuu

SEQ ID NO: 1523957 - RNA, 23 nt, Human
augaauuaguuuuauaugcuucu

SEQ ID NO: 1523958 - RNA, 19 nt, Human
augacacgaauauugcuga

SEQ ID NO: 1523959 - RNA, 20 nt, Human
augacacgaauauugcugau

SEQ ID NO: 1523960 - RNA, 19 nt, Human
uuggggaagaacgaagcca

SEQ ID NO: 1523961 - RNA, 17 nt, Human
uugggguacccacugcu

SEQ ID NO: 1523962 - RNA, 18 nt, Human
augaauuacauuuguaua

SEQ ID NO: 1523963 - RNA, 19 nt, Human
augaauuacauuuguauaa

SEQ ID NO: 1523964 - RNA, 22 nt, Human
augaauuacauuuguauaaaau

SEQ ID NO: 1523965 - RNA, 14 nt, Human
augaaaugacuucu

SEQ ID NO: 1523966 - RNA, 13 nt, Human
augaaccacaucu

SEQ ID NO: 1523967 - RNA, 20 nt, Human
augaaccacaucuugcucug

SEQ ID NO: 1523968 - RNA, 22 nt, Human
augaaccacaucuugcucugcu

SEQ ID NO: 1523969 - RNA, 14 nt, Human
uugguuuuguuccc

SEQ ID NO: 1523970 - RNA, 17 nt, Human
uugguuuuguuccccuc

SEQ ID NO: 1523971 - RNA, 19 nt, Human
uugguuaggcauuguggga

SEQ ID NO: 1523972 - RNA, 22 nt, Human
uugggguacccacugcucuggu

SEQ ID NO: 1523973 - RNA, 18 nt, Human
uugguuuuguuccccucc

SEQ ID NO: 1523974 - RNA, 14 nt, Human
uuguaaggaaugau

SEQ ID NO: 1523975 - RNA, 18 nt, Human
uugugaagcaaaauuuuu

SEQ ID NO: 1523976 - RNA, 13 nt, Human
uuguuccccuccu

SEQ ID NO: 1523977 - RNA, 14 nt, Human
uuguuccccuccuc

SEQ ID NO: 1523978 - RNA, 15 nt, Human
uuguuccccuccucc

SEQ ID NO: 1523979 - RNA, 23 nt, Human
uuguuccccuccuccacucuccc

SEQ ID NO: 1523980 - RNA, 16 nt, Human
uuguuccccuccucca

SEQ ID NO: 1523981 - RNA, 18 nt, Human
uuguuccccuccuccacu

SEQ ID NO: 1523982 - RNA, 19 nt, Human
uuguuccccuccuccacuc

SEQ ID NO: 1523983 - RNA, 20 nt, Human
uuguuccccuccuccacucu

SEQ ID NO: 1523984 - RNA, 23 nt, Human
augaucacggcucacugcagccu

SEQ ID NO: 1523985 - RNA, 16 nt, Human
augauccuaggcauuu

SEQ ID NO: 1523986 - RNA, 15 nt, Human
augaucuaggaagac

SEQ ID NO: 1523987 - RNA, 14 nt, Human
augaucuucuuuau

SEQ ID NO: 1523988 - RNA, 15 nt, Human
augaucacggcucac

SEQ ID NO: 1523989 - RNA, 18 nt, Human
augaucacggcucacugc

SEQ ID NO: 1523990 - RNA, 19 nt, Human
augaucacggcucacugca

SEQ ID NO: 1523991 - RNA, 16 nt, Human
augcaaggucauuuuu

SEQ ID NO: 1523992 - RNA, 14 nt, Human
augcaaggucauuu

SEQ ID NO: 1523993 - RNA, 14 nt, Human
augcaccuggaaua

SEQ ID NO: 1523994 - RNA, 16 nt, Human
augcaccuggaauaua

SEQ ID NO: 1523995 - RNA, 22 nt, Human
augcaaggucauuuuuuuuaag

SEQ ID NO: 1523996 - RNA, 15 nt, Human
augaucuucuuuaua

SEQ ID NO: 1523997 - RNA, 18 nt, Human
augaucuucuuuauaauu

SEQ ID NO: 1523998 - RNA, 16 nt, Human
augcaaaccaucauug

SEQ ID NO: 1523999 - RNA, 18 nt, Human
augcaaaccaucauugaa

SEQ ID NO: 1524000 - RNA, 19 nt, Human
augcaaaccaucauugaaa

SEQ ID NO: 1524001 - RNA, 20 nt, Human
augcaaaccaucauugaaau

SEQ ID NO: 1524002 - RNA, 21 nt, Human
augcaaaccaucauugaaauc

SEQ ID NO: 1524003 - RNA, 22 nt, Human
augcaaaccaucauugaaaucu

SEQ ID NO: 1524004 - RNA, 19 nt, Human
augcaccuggaauauauaa

SEQ ID NO: 1524005 - RNA, 14 nt, Human
augauaacuggaaa

SEQ ID NO: 1524006 - RNA, 15 nt, Human
augauaaaacacaaa

SEQ ID NO: 1524007 - RNA, 17 nt, Human
augaguggcuuuaauga

SEQ ID NO: 1524008 - RNA, 17 nt, Human
augagccucagcauccu

SEQ ID NO: 1524009 - RNA, 18 nt, Human
augagccucagcauccug

SEQ ID NO: 1524010 - RNA, 19 nt, Human
augagccucagcauccugg

SEQ ID NO: 1524011 - RNA, 15 nt, Human
augagcaucaggcca

SEQ ID NO: 1524012 - RNA, 16 nt, Human
augagcaucaggccag

SEQ ID NO: 1524013 - RNA, 17 nt, Human
augagcaucaggccagg

SEQ ID NO: 1524014 - RNA, 18 nt, Human
augagcaucaggccaggc

SEQ ID NO: 1524015 - RNA, 19 nt, Human
augagcaucaggccaggcc

SEQ ID NO: 1524016 - RNA, 20 nt, Human
augagcaucaggccaggccc

SEQ ID NO: 1524017 - RNA, 21 nt, Human
augagcaucaggccaggcccu

SEQ ID NO: 1524018 - RNA, 22 nt, Human
augagcaucaggccaggcccuc

SEQ ID NO: 1524019 - RNA, 12 nt, Human
augagccucagc

SEQ ID NO: 1524020 - RNA, 15 nt, Human
augagccucagcauc

SEQ ID NO: 1524021 - RNA, 16 nt, Human
augagccucagcaucc

SEQ ID NO: 1524022 - RNA, 16 nt, Human
augagaggaaaucacc

SEQ ID NO: 1524023 - RNA, 14 nt, Human
augagaggaaauca

SEQ ID NO: 1524024 - RNA, 15 nt, Human
augagaggaaaucac

SEQ ID NO: 1524025 - RNA, 19 nt, Human
augacauaaaaacaacuuu

SEQ ID NO: 1524026 - RNA, 12 nt, Human
augagaggaaau

SEQ ID NO: 1524027 - RNA, 13 nt, Human
augagaggaaauc

SEQ ID NO: 1524028 - RNA, 16 nt, Human
uuuaaagcuuccauug

SEQ ID NO: 1524029 - RNA, 24 nt, Human
uuuaaagcuuauuaaaacucauuu

SEQ ID NO: 1524030 - RNA, 18 nt, Human
augcuacacacugcaugu

SEQ ID NO: 1524031 - RNA, 17 nt, Human
augcuacacacugcaug

SEQ ID NO: 1524032 - RNA, 20 nt, Human
uuuaccuuuuuuauacauaa

SEQ ID NO: 1524033 - RNA, 19 nt, Human
uuuaccuuuuuuauacaua

SEQ ID NO: 1524034 - RNA, 14 nt, Human
uuuaccuuuuuuau

SEQ ID NO: 1524035 - RNA, 18 nt, Human
uuuacuaauagacaauuu

SEQ ID NO: 1524036 - RNA, 17 nt, Human
uuuacuaauagacaauu

SEQ ID NO: 1524037 - RNA, 14 nt, Human
uuuacuaauagaca

SEQ ID NO: 1524038 - RNA, 21 nt, Human
uuuaccuuuuuuauacauaaa

SEQ ID NO: 1524039 - RNA, 17 nt, Human
uuuauaugcuucuguuu

SEQ ID NO: 1524040 - RNA, 19 nt, Human
uuuauaugcuucuguuuua

SEQ ID NO: 1524041 - RNA, 19 nt, Human
uuuauuaaaugcccagccc

SEQ ID NO: 1524042 - RNA, 20 nt, Human
uuuagcuggaaaaguauguu

SEQ ID NO: 1524043 - RNA, 15 nt, Human
uuuaguagagacagg

SEQ ID NO: 1524044 - RNA, 13 nt, Human
uuuagauaauaca

SEQ ID NO: 1524045 - RNA, 18 nt, Human
uuuagaguugauacuaca

SEQ ID NO: 1524046 - RNA, 15 nt, Human
uuuagauaauacacc

SEQ ID NO: 1524047 - RNA, 23 nt, Human
auggaauuggagcucgugggaca

SEQ ID NO: 1524048 - RNA, 15 nt, Human
uuucauaugcuguau

SEQ ID NO: 1524049 - RNA, 19 nt, Human
uuuccagguuuaagcuguu

SEQ ID NO: 1524050 - RNA, 22 nt, Human
uuucagaaaauauuauguguuu

SEQ ID NO: 1524051 - RNA, 15 nt, Human
uuucacucuccuugg

SEQ ID NO: 1524052 - RNA, 24 nt, Human
uuucacucuuauugcccacgcugg

SEQ ID NO: 1524053 - RNA, 14 nt, Human
uuucacucuccuug

SEQ ID NO: 1524054 - RNA, 22 nt, Human
uuucaccccucccuuucucccc

SEQ ID NO: 1524055 - RNA, 13 nt, Human
uuucaccccuccc

SEQ ID NO: 1524056 - RNA, 14 nt, Human
uuucaccccucccu

SEQ ID NO: 1524057 - RNA, 15 nt, Human
uuucaccccucccuu

SEQ ID NO: 1524058 - RNA, 17 nt, Human
uuucaccccucccuuuc

SEQ ID NO: 1524059 - RNA, 18 nt, Human
uuucaccccucccuuucu

SEQ ID NO: 1524060 - RNA, 20 nt, Human
uuucaccccucccuuucucc

SEQ ID NO: 1524061 - RNA, 16 nt, Human
uuuauuuuaauaaugu

SEQ ID NO: 1524062 - RNA, 14 nt, Human
auggaauaacaugu

SEQ ID NO: 1524063 - RNA, 15 nt, Human
auggaauaacaugua

SEQ ID NO: 1524064 - RNA, 18 nt, Human
auggaacacucugagacu

SEQ ID NO: 1524065 - RNA, 17 nt, Human
auggaacacucugagac

SEQ ID NO: 1524066 - RNA, 16 nt, Human
auggaacauaaaauac

SEQ ID NO: 1524067 - RNA, 21 nt, Human
auggaaguacuauaauuuacc

SEQ ID NO: 1524068 - RNA, 19 nt, Human
uuuauuacuguaagaaaau

SEQ ID NO: 1524069 - RNA, 19 nt, Human
augcuguauauccuuucua

SEQ ID NO: 1524070 - RNA, 14 nt, Human
augcuguauuuuaa

SEQ ID NO: 1524071 - RNA, 19 nt, Human
augcuguauuuuaaaagaa

SEQ ID NO: 1524072 - RNA, 19 nt, Human
augcugugcccuaaagugu

SEQ ID NO: 1524073 - RNA, 21 nt, Human
uuucuaggacugaauuaugaa

SEQ ID NO: 1524074 - RNA, 17 nt, Human
uuucuaggacugaauua

SEQ ID NO: 1524075 - RNA, 22 nt, Human
uuucuaggacugaauuaugaaa

SEQ ID NO: 1524076 - RNA, 14 nt, Human
uuucuaaagcugcc

SEQ ID NO: 1524077 - RNA, 13 nt, Human
uuucuaugaaaua

SEQ ID NO: 1524078 - RNA, 14 nt, Human
uuucuaugaaauau

SEQ ID NO: 1524079 - RNA, 20 nt, Human
uuucuaugaaauauuauguu

SEQ ID NO: 1524080 - RNA, 21 nt, Human
uuucuaugacacaugcaaggu

SEQ ID NO: 1524081 - RNA, 15 nt, Human
uuucuaugacacaug

SEQ ID NO: 1524082 - RNA, 22 nt, Human
uuucuauuaaauuaaauuuugu

SEQ ID NO: 1524083 - RNA, 14 nt, Human
uuucugcaucagcu

SEQ ID NO: 1524084 - RNA, 17 nt, Human
uuucucccagucauuua

SEQ ID NO: 1524085 - RNA, 14 nt, Human
uuucugccgcagcc

SEQ ID NO: 1524086 - RNA, 16 nt, Human
uuucugccgcagcccu

SEQ ID NO: 1524087 - RNA, 14 nt, Human
uuugaaauauugac

SEQ ID NO: 1524088 - RNA, 15 nt, Human
uuugaaauauugacu

SEQ ID NO: 1524089 - RNA, 23 nt, Human
augggcuggguucuacccaggug

SEQ ID NO: 1524090 - RNA, 14 nt, Human
auggggcccugccu

SEQ ID NO: 1524091 - RNA, 13 nt, Human
auggggcccugcc

SEQ ID NO: 1524092 - RNA, 13 nt, Human
uuucuuuguggcu

SEQ ID NO: 1524093 - RNA, 22 nt, Human
augggacauuugcucauggaau

SEQ ID NO: 1524094 - RNA, 21 nt, Human
augggacauuugcucauggaa

SEQ ID NO: 1524095 - RNA, 21 nt, Human
auggcuauaggugcuacaaaa

SEQ ID NO: 1524096 - RNA, 23 nt, Human
auggcuauaggugcuacaaaaac

SEQ ID NO: 1524097 - RNA, 18 nt, Human
auggccucuucagaucuc

SEQ ID NO: 1524098 - RNA, 16 nt, Human
auggcuauaggugcua

SEQ ID NO: 1524099 - RNA, 19 nt, Human
auggcuauaggugcuacaa

SEQ ID NO: 1524100 - RNA, 21 nt, Human
auggacccaauauuuaccaga

SEQ ID NO: 1524101 - RNA, 17 nt, Human
auggaauuucucccagu

SEQ ID NO: 1524102 - RNA, 13 nt, Human
augggagcucaug

SEQ ID NO: 1524103 - RNA, 19 nt, Human
augggcaacccccagccug

SEQ ID NO: 1524104 - RNA, 21 nt, Human
augggcaacccccagccugcu

SEQ ID NO: 1524105 - RNA, 15 nt, Human
augggcagagcagag

SEQ ID NO: 1524106 - RNA, 13 nt, Human
augggcagagcag

SEQ ID NO: 1524107 - RNA, 14 nt, Human
augggcagagcaga

SEQ ID NO: 1524108 - RNA, 15 nt, Human
augggccuccugugu

SEQ ID NO: 1524109 - RNA, 11 nt, Human
uuuccuucagu

SEQ ID NO: 1524110 - RNA, 12 nt, Human
uuuccuucagug

SEQ ID NO: 1524111 - RNA, 15 nt, Human
uuuccuucagugccu

SEQ ID NO: 1524112 - RNA, 17 nt, Human
augggccuccugugugu

SEQ ID NO: 1524113 - RNA, 12 nt, Human
uuuccugugucu

SEQ ID NO: 1524114 - RNA, 23 nt, Human
uuuccuucauucaacccaccugc

SEQ ID NO: 1524115 - RNA, 18 nt, Human
uuuccuucagugccuuau

SEQ ID NO: 1524116 - RNA, 21 nt, Human
uuuccuucagugccuuaugga

SEQ ID NO: 1524117 - RNA, 22 nt, Human
uuuccuucagugccuuauggaa

SEQ ID NO: 1524118 - RNA, 21 nt, Human
uuuccuucauucaacccaccu

SEQ ID NO: 1524119 - RNA, 22 nt, Human
uuucgcaggauucuuccucccu

SEQ ID NO: 1524120 - RNA, 18 nt, Human
uuucgcaggauucuuccu

SEQ ID NO: 1524121 - RNA, 16 nt, Human
uucagauaugauucaa

SEQ ID NO: 1524122 - RNA, 17 nt, Human
uucagauaugauucaaa

SEQ ID NO: 1524123 - RNA, 18 nt, Human
uucagauaugauucaaau

SEQ ID NO: 1524124 - RNA, 19 nt, Human
uucagauaugauucaaaug

SEQ ID NO: 1524125 - RNA, 16 nt, Human
uucagaaauguguuau

SEQ ID NO: 1524126 - RNA, 13 nt, Human
uucagaaaauauu

SEQ ID NO: 1524127 - RNA, 17 nt, Human
uucagcgguuuauauaa

SEQ ID NO: 1524128 - RNA, 14 nt, Human
uucagccaagaauu

SEQ ID NO: 1524129 - RNA, 14 nt, Human
uucaggguuggccc

SEQ ID NO: 1524130 - RNA, 16 nt, Human
uucaggguuggccccu

SEQ ID NO: 1524131 - RNA, 17 nt, Human
uucaggguuggccccug

SEQ ID NO: 1524132 - RNA, 19 nt, Human
uucaggguuggccccugcc

SEQ ID NO: 1524133 - RNA, 22 nt, Human
uucaggguuggccccugcccgg

SEQ ID NO: 1524134 - RNA, 15 nt, Human
uucagguaacaggca

SEQ ID NO: 1524135 - RNA, 16 nt, Human
uucagguaacaggcag

SEQ ID NO: 1524136 - RNA, 13 nt, Human
auauaugcuaagu

SEQ ID NO: 1524137 - RNA, 15 nt, Human
uucaucaaugaauga

SEQ ID NO: 1524138 - RNA, 13 nt, Human
auauauuuuaauu

SEQ ID NO: 1524139 - RNA, 23 nt, Human
auauauuuauggccgggcagggu

SEQ ID NO: 1524140 - RNA, 21 nt, Human
auauauguuuuaagaggcagg

SEQ ID NO: 1524141 - RNA, 22 nt, Human
auauauguuuuaagaggcaggg

SEQ ID NO: 1524142 - RNA, 16 nt, Human
auauauuuaaugauaa

SEQ ID NO: 1524143 - RNA, 13 nt, Human
uucauaugcugua

SEQ ID NO: 1524144 - RNA, 16 nt, Human
uucagugaaagcauca

SEQ ID NO: 1524145 - RNA, 16 nt, Human
uucagugccaaaaaca

SEQ ID NO: 1524146 - RNA, 17 nt, Human
uucagguaacaggcaga

SEQ ID NO: 1524147 - RNA, 14 nt, Human
uucaguaagccgug

SEQ ID NO: 1524148 - RNA, 22 nt, Human
uucaugcuguucaugaaagauu

SEQ ID NO: 1524149 - RNA, 16 nt, Human
auauggggaugcagca

SEQ ID NO: 1524150 - RNA, 20 nt, Human
auauggggaugcagcauuau

SEQ ID NO: 1524151 - RNA, 23 nt, Human
auauguaccuaacgaaguauccu

SEQ ID NO: 1524152 - RNA, 20 nt, Human
auauguggaguucaucuuga

SEQ ID NO: 1524153 - RNA, 21 nt, Human
auauguggaguucaucuugaa

SEQ ID NO: 1524154 - RNA, 22 nt, Human
auaugagcuuccuucugugaaa

SEQ ID NO: 1524155 - RNA, 21 nt, Human
auaugagcuuccuucugugaa

SEQ ID NO: 1524156 - RNA, 15 nt, Human
auaugcaaagcacug

SEQ ID NO: 1524157 - RNA, 13 nt, Human
auaugcaaagcac

SEQ ID NO: 1524158 - RNA, 14 nt, Human
auaugcaaagcacu

SEQ ID NO: 1524159 - RNA, 15 nt, Human
uuccaggcugggaga

SEQ ID NO: 1524160 - RNA, 17 nt, Human
uuccaggcugggagagc

SEQ ID NO: 1524161 - RNA, 18 nt, Human
uuccagguuuaagcuguu

SEQ ID NO: 1524162 - RNA, 18 nt, Human
uuccaccaucaagccacc

SEQ ID NO: 1524163 - RNA, 22 nt, Human
uuccacaagagcccaggccucc

SEQ ID NO: 1524164 - RNA, 21 nt, Human
uuccacaagagcccaggccuc

SEQ ID NO: 1524165 - RNA, 22 nt, Human
uuccaauuuacauacucugcuu

SEQ ID NO: 1524166 - RNA, 14 nt, Human
uucauuaucucaaa

SEQ ID NO: 1524167 - RNA, 18 nt, Human
auauucucacagcuccaa

SEQ ID NO: 1524168 - RNA, 19 nt, Human
auauuaccacagacauacu

SEQ ID NO: 1524169 - RNA, 21 nt, Human
auauucucacagcuccaagaa

SEQ ID NO: 1524170 - RNA, 15 nt, Human
auauugauaugcuua

SEQ ID NO: 1524171 - RNA, 22 nt, Human
auauugcugauggugcaaugac

SEQ ID NO: 1524172 - RNA, 12 nt, Human
auauuuaaugau

SEQ ID NO: 1524173 - RNA, 13 nt, Human
auauuuaaugaua

SEQ ID NO: 1524174 - RNA, 23 nt, Human
auauuuaaugauaaguaaaugcu

SEQ ID NO: 1524175 - RNA, 13 nt, Human
auauuuacaaaug

SEQ ID NO: 1524176 - RNA, 14 nt, Human
auauuguuugcuaa

SEQ ID NO: 1524177 - RNA, 13 nt, Human
auauuguuuucag

SEQ ID NO: 1524178 - RNA, 17 nt, Human
auauuguuuucagugua

SEQ ID NO: 1524179 - RNA, 17 nt, Human
auauuaccacagacaua

SEQ ID NO: 1524180 - RNA, 16 nt, Human
auauuaagaaagacua

SEQ ID NO: 1524181 - RNA, 15 nt, Human
auauuaagaaagacu

SEQ ID NO: 1524182 - RNA, 17 nt, Human
auauuaagaaagacuau

SEQ ID NO: 1524183 - RNA, 22 nt, Human
auauuaagaaagacuaucuaaa

SEQ ID NO: 1524184 - RNA, 13 nt, Human
auauguuucaaac

SEQ ID NO: 1524185 - RNA, 14 nt, Human
auauguuucaaacu

SEQ ID NO: 1524186 - RNA, 16 nt, Human
auauguuucaaacuuu

SEQ ID NO: 1524187 - RNA, 17 nt, Human
auauguuucaaacuuug

SEQ ID NO: 1524188 - RNA, 17 nt, Human
uucccagugaauucuug

SEQ ID NO: 1524189 - RNA, 15 nt, Human
uuccagugaggcucu

SEQ ID NO: 1524190 - RNA, 16 nt, Human
uuccagugaggcucug

SEQ ID NO: 1524191 - RNA, 12 nt, Human
uuccugaacagg

SEQ ID NO: 1524192 - RNA, 22 nt, Human
uuccucuuuuuauuuaguuccu

SEQ ID NO: 1524193 - RNA, 20 nt, Human
uuccuggcacugcuuccagu

SEQ ID NO: 1524194 - RNA, 22 nt, Human
uuccuggcacugcuuccaguga

SEQ ID NO: 1524195 - RNA, 21 nt, Human
aucaaggguacacugccuucu

SEQ ID NO: 1524196 - RNA, 19 nt, Human
aucaauucuguauuccaga

SEQ ID NO: 1524197 - RNA, 13 nt, Human
aucaauuuaaaaa

SEQ ID NO: 1524198 - RNA, 15 nt, Human
aucacgccacugcac

SEQ ID NO: 1524199 - RNA, 17 nt, Human
aucacgccacugcacua

SEQ ID NO: 1524200 - RNA, 14 nt, Human
aucaauuuuucuua

SEQ ID NO: 1524201 - RNA, 19 nt, Human
aucaauuuuucuuauuuca

SEQ ID NO: 1524202 - RNA, 18 nt, Human
auauuuuucacauaucua

SEQ ID NO: 1524203 - RNA, 15 nt, Human
auauuuuuguagcac

SEQ ID NO: 1524204 - RNA, 16 nt, Human
auauuuuuguagcacu

SEQ ID NO: 1524205 - RNA, 23 nt, Human
auauuuuuguagcacugacagau

SEQ ID NO: 1524206 - RNA, 16 nt, Human
aucaaggguacacugc

SEQ ID NO: 1524207 - RNA, 21 nt, Human
aucaacugcaucaagauguga

SEQ ID NO: 1524208 - RNA, 16 nt, Human
aucaaauaugcaaagc

SEQ ID NO: 1524209 - RNA, 17 nt, Human
aucaaauaugcaaagca

SEQ ID NO: 1524210 - RNA, 18 nt, Human
aucaaauaugcaaagcac

SEQ ID NO: 1524211 - RNA, 23 nt, Human
aucacuugaacccgggaggcaga

SEQ ID NO: 1524212 - RNA, 15 nt, Human
aucaggugcugccau

SEQ ID NO: 1524213 - RNA, 17 nt, Human
aucaggugcugccaucc

SEQ ID NO: 1524214 - RNA, 19 nt, Human
aucaggugcugccauccag

SEQ ID NO: 1524215 - RNA, 23 nt, Human
aucagugugucuaaauuugaaug

SEQ ID NO: 1524216 - RNA, 19 nt, Human
aucagucugauucccaagc

SEQ ID NO: 1524217 - RNA, 16 nt, Human
aucauuaggugugacu

SEQ ID NO: 1524218 - RNA, 21 nt, Human
aucauccacugugccaugugc

SEQ ID NO: 1524219 - RNA, 23 nt, Human
aucauccacugugccaugugcca

SEQ ID NO: 1524220 - RNA, 15 nt, Human
aucauaaaacuugau

SEQ ID NO: 1524221 - RNA, 13 nt, Human
aucauugaaaucu

SEQ ID NO: 1524222 - RNA, 12 nt, Human
aucauugaaauc

SEQ ID NO: 1524223 - RNA, 15 nt, Human
uucuccccugccccc

SEQ ID NO: 1524224 - RNA, 16 nt, Human
uucuccccugccccca

SEQ ID NO: 1524225 - RNA, 17 nt, Human
uucuccccugcccccag

SEQ ID NO: 1524226 - RNA, 18 nt, Human
uucuccccugcccccagg

SEQ ID NO: 1524227 - RNA, 19 nt, Human
uucuccccugcccccagga

SEQ ID NO: 1524228 - RNA, 21 nt, Human
uucuccccugcccccaggacu

SEQ ID NO: 1524229 - RNA, 22 nt, Human
uucuccccugcccccaggacug

SEQ ID NO: 1524230 - RNA, 23 nt, Human
uucuccccugcccccaggacugg

SEQ ID NO: 1524231 - RNA, 16 nt, Human
uucugcaucagcugcu

SEQ ID NO: 1524232 - RNA, 21 nt, Human
uucucuaguuugauuaaauuc

SEQ ID NO: 1524233 - RNA, 12 nt, Human
uucucucaucuc

SEQ ID NO: 1524234 - RNA, 13 nt, Human
uucucucaucucu

SEQ ID NO: 1524235 - RNA, 17 nt, Human
uucucucaucucuuagc

SEQ ID NO: 1524236 - RNA, 20 nt, Human
uucucucaucucuuagcucc

SEQ ID NO: 1524237 - RNA, 23 nt, Human
uucucucaucucuuagcuccccu

SEQ ID NO: 1524238 - RNA, 17 nt, Human
uucugccugcccaggcc

SEQ ID NO: 1524239 - RNA, 15 nt, Human
uucugccugcccagg

SEQ ID NO: 1524240 - RNA, 16 nt, Human
uucugccugcccaggc

SEQ ID NO: 1524241 - RNA, 14 nt, Human
auccaguaucuuga

SEQ ID NO: 1524242 - RNA, 15 nt, Human
auccaguaucuugaa

SEQ ID NO: 1524243 - RNA, 17 nt, Human
auccagguucagcuugu

SEQ ID NO: 1524244 - RNA, 11 nt, Human
aucccagcccc

SEQ ID NO: 1524245 - RNA, 12 nt, Human
aucccagcccca

SEQ ID NO: 1524246 - RNA, 16 nt, Human
aucccaugagccucag

SEQ ID NO: 1524247 - RNA, 22 nt, Human
aucccugaaggccccgcccagg

SEQ ID NO: 1524248 - RNA, 17 nt, Human
aucccugaaggccccgc

SEQ ID NO: 1524249 - RNA, 17 nt, Human
aucccaugagccucagc

SEQ ID NO: 1524250 - RNA, 18 nt, Human
aucccaugagccucagca

SEQ ID NO: 1524251 - RNA, 16 nt, Human
uucuguuuuauaauuu

SEQ ID NO: 1524252 - RNA, 17 nt, Human
uucuguuuuauaauuuu

SEQ ID NO: 1524253 - RNA, 18 nt, Human
uucuguuuagauaauaca

SEQ ID NO: 1524254 - RNA, 13 nt, Human
uucuguuuagaua

SEQ ID NO: 1524255 - RNA, 12 nt, Human
uucuuucuggcu

SEQ ID NO: 1524256 - RNA, 20 nt, Human
uucuuucuggcuaugcauuu

SEQ ID NO: 1524257 - RNA, 17 nt, Human
uucuuucuggcuaugca

SEQ ID NO: 1524258 - RNA, 18 nt, Human
uucuugccucuguccccu

SEQ ID NO: 1524259 - RNA, 20 nt, Human
uucuugccucuguccccuuc

SEQ ID NO: 1524260 - RNA, 22 nt, Human
uucuucuccacuuucuagccag

SEQ ID NO: 1524261 - RNA, 11 nt, Human
uucuucucccu

SEQ ID NO: 1524262 - RNA, 15 nt, Human
auccuggaguucugg

SEQ ID NO: 1524263 - RNA, 17 nt, Human
auccuggcacccggccc

SEQ ID NO: 1524264 - RNA, 19 nt, Human
auccuggcacccggccccu

SEQ ID NO: 1524265 - RNA, 20 nt, Human
auccuggcacccggccccug

SEQ ID NO: 1524266 - RNA, 21 nt, Human
auccuggcacccggccccugc

SEQ ID NO: 1524267 - RNA, 22 nt, Human
auccuggcacccggccccugcu

SEQ ID NO: 1524268 - RNA, 23 nt, Human
auccuggcacccggccccugcug

SEQ ID NO: 1524269 - RNA, 16 nt, Human
auccugcaauuccacu

SEQ ID NO: 1524270 - RNA, 22 nt, Human
auccugaggcuccacuuggucu

SEQ ID NO: 1524271 - RNA, 13 nt, Human
auccugccccuga

SEQ ID NO: 1524272 - RNA, 11 nt, Human
auccugaggcu

SEQ ID NO: 1524273 - RNA, 13 nt, Human
auccugaggcucc

SEQ ID NO: 1524274 - RNA, 16 nt, Human
auccugaggcuccacu

SEQ ID NO: 1524275 - RNA, 18 nt, Human
auccugaggcuccacuug

SEQ ID NO: 1524276 - RNA, 14 nt, Human
auccugagccagau

SEQ ID NO: 1524277 - RNA, 15 nt, Human
auccugagccagauu

SEQ ID NO: 1524278 - RNA, 17 nt, Human
auccugagccagauuuc

SEQ ID NO: 1524279 - RNA, 21 nt, Human
auccugagccagauuucacuc

SEQ ID NO: 1524280 - RNA, 17 nt, Human
auccucuuugagugaag

SEQ ID NO: 1524281 - RNA, 11 nt, Human
auccugagcca

SEQ ID NO: 1524282 - RNA, 12 nt, Human
auccugagccag

SEQ ID NO: 1524283 - RNA, 13 nt, Human
auccugagccaga

SEQ ID NO: 1524284 - RNA, 18 nt, Human
auccucuguacagagccc

SEQ ID NO: 1524285 - RNA, 20 nt, Human
auccucuguacagagcccac

SEQ ID NO: 1524286 - RNA, 20 nt, Human
uucuuuugccguuauuaaaa

SEQ ID NO: 1524287 - RNA, 15 nt, Human
uugaauauaaacacu

SEQ ID NO: 1524288 - RNA, 16 nt, Human
uugaauauaaacacua

SEQ ID NO: 1524289 - RNA, 18 nt, Human
uugaauauaaacacuaua

SEQ ID NO: 1524290 - RNA, 17 nt, Human
uugacacuuaaaaaugg

SEQ ID NO: 1524291 - RNA, 17 nt, Human
uugaaggaaaaugauac

SEQ ID NO: 1524292 - RNA, 15 nt, Human
aucuaaauguugaaa

SEQ ID NO: 1524293 - RNA, 14 nt, Human
aucgucacugcuua

SEQ ID NO: 1524294 - RNA, 18 nt, Human
aucgucacugcuuaacuu

SEQ ID NO: 1524295 - RNA, 14 nt, Human
aucgugacaacacu

SEQ ID NO: 1524296 - RNA, 15 nt, Human
aucgugacaacacuu

SEQ ID NO: 1524297 - RNA, 17 nt, Human
uugauaaguucauacau

SEQ ID NO: 1524298 - RNA, 16 nt, Human
uugauaaguucauaca

SEQ ID NO: 1524299 - RNA, 12 nt, Human
uugauaaaguaa

SEQ ID NO: 1524300 - RNA, 15 nt, Human
uugagaucagccugg

SEQ ID NO: 1524301 - RNA, 16 nt, Human
uugaggucuguucuuu

SEQ ID NO: 1524302 - RNA, 14 nt, Human
uugagaguucuaaa

SEQ ID NO: 1524303 - RNA, 14 nt, Human
uugacccacaagaa

SEQ ID NO: 1524304 - RNA, 24 nt, Human
uugaccauucuccaccugccaggg

SEQ ID NO: 1524305 - RNA, 13 nt, Human
uugacaucaacug

SEQ ID NO: 1524306 - RNA, 18 nt, Human
uugaccauucuccaccug

SEQ ID NO: 1524307 - RNA, 19 nt, Human
uugaccauucuccaccugc

SEQ ID NO: 1524308 - RNA, 19 nt, Human
uugacacuuaaaaaugguu

SEQ ID NO: 1524309 - RNA, 20 nt, Human
aguuauuauauuuacaaaug

SEQ ID NO: 1524310 - RNA, 19 nt, Human
aguuauggcuauaggugcu

SEQ ID NO: 1524311 - RNA, 23 nt, Human
aguuauugauaaguucauacauu

SEQ ID NO: 1524312 - RNA, 17 nt, Human
aguuauugauaaguuca

SEQ ID NO: 1524313 - RNA, 19 nt, Human
aguuauugauaaguucaua

SEQ ID NO: 1524314 - RNA, 21 nt, Human
aguuauugauaaguucauaca

SEQ ID NO: 1524315 - RNA, 22 nt, Human
aguuauugauaaguucauacau

SEQ ID NO: 1524316 - RNA, 17 nt, Human
aguuacccaaauuaaga

SEQ ID NO: 1524317 - RNA, 18 nt, Human
aguuacccaaauuaagag

SEQ ID NO: 1524318 - RNA, 20 nt, Human
uguucuuuccaaaguacacu

SEQ ID NO: 1524319 - RNA, 18 nt, Human
uguucuuuccaaaguaca

SEQ ID NO: 1524320 - RNA, 17 nt, Human
aguuagggaauggcaca

SEQ ID NO: 1524321 - RNA, 21 nt, Human
aguucgaugggcccaauucuu

SEQ ID NO: 1524322 - RNA, 21 nt, Human
aguuauuuuuauuuauuuaaa

SEQ ID NO: 1524323 - RNA, 15 nt, Human
aguucuaaauuuugu

SEQ ID NO: 1524324 - RNA, 13 nt, Human
uguugggccagga

SEQ ID NO: 1524325 - RNA, 16 nt, Human
uguugggccaggagcc

SEQ ID NO: 1524326 - RNA, 13 nt, Human
uguugucagcuga

SEQ ID NO: 1524327 - RNA, 19 nt, Human
agugggggaguggccacag

SEQ ID NO: 1524328 - RNA, 20 nt, Human
agugggggaguggccacaga

SEQ ID NO: 1524329 - RNA, 18 nt, Human
agugggggaucacagccu

SEQ ID NO: 1524330 - RNA, 13 nt, Human
agugggugaauaa

SEQ ID NO: 1524331 - RNA, 18 nt, Human
agugggugaauaauacag

SEQ ID NO: 1524332 - RNA, 14 nt, Human
aguggcagcugcuu

SEQ ID NO: 1524333 - RNA, 20 nt, Human
aguggcagcugcuuuugucu

SEQ ID NO: 1524334 - RNA, 12 nt, Human
aguggcagcugc

SEQ ID NO: 1524335 - RNA, 13 nt, Human
aguggcagcugcu

SEQ ID NO: 1524336 - RNA, 16 nt, Human
aguggugcgaucuggg

SEQ ID NO: 1524337 - RNA, 21 nt, Human
agugguuccuaauccucuagg

SEQ ID NO: 1524338 - RNA, 19 nt, Human
agugggugaauaauacagu

SEQ ID NO: 1524339 - RNA, 14 nt, Human
agugggucccagau

SEQ ID NO: 1524340 - RNA, 21 nt, Human
aguguacauggaauaacaugu

SEQ ID NO: 1524341 - RNA, 22 nt, Human
aguguacauggaauaacaugua

SEQ ID NO: 1524342 - RNA, 13 nt, Human
agugguuuagaaa

SEQ ID NO: 1524343 - RNA, 23 nt, Human
aguguacauggaauaacauguaa

SEQ ID NO: 1524344 - RNA, 18 nt, Human
uguucuugguuuguaaau

SEQ ID NO: 1524345 - RNA, 17 nt, Human
uguucuugguuuguaaa

SEQ ID NO: 1524346 - RNA, 14 nt, Human
uguucuuuccaaag

SEQ ID NO: 1524347 - RNA, 13 nt, Human
uguucuuuccaaa

SEQ ID NO: 1524348 - RNA, 19 nt, Human
uguucuugguuuguaaauu

SEQ ID NO: 1524349 - RNA, 16 nt, Human
uguucuuaauucuuag

SEQ ID NO: 1524350 - RNA, 14 nt, Human
uguucuuaauucuu

SEQ ID NO: 1524351 - RNA, 14 nt, Human
uguucugggacaca

SEQ ID NO: 1524352 - RNA, 15 nt, Human
uguucugggacacag

SEQ ID NO: 1524353 - RNA, 13 nt, Human
uguucugggacac

SEQ ID NO: 1524354 - RNA, 13 nt, Human
uguuuuauaauuu

SEQ ID NO: 1524355 - RNA, 20 nt, Human
uguuuuauaauuuugugaag

SEQ ID NO: 1524356 - RNA, 15 nt, Human
uguuuucaguguaca

SEQ ID NO: 1524357 - RNA, 13 nt, Human
aguucucuccuuc

SEQ ID NO: 1524358 - RNA, 16 nt, Human
aguucucuccuucuuc

SEQ ID NO: 1524359 - RNA, 15 nt, Human
uguuuucucuugaga

SEQ ID NO: 1524360 - RNA, 17 nt, Human
uguuuucaguguacaug

SEQ ID NO: 1524361 - RNA, 19 nt, Human
uguuugcuaagcauuccaa

SEQ ID NO: 1524362 - RNA, 19 nt, Human
uguuuggggaugagaaagg

SEQ ID NO: 1524363 - RNA, 15 nt, Human
uguuuggggaugaga

SEQ ID NO: 1524364 - RNA, 15 nt, Human
uguuugcuaagcauu

SEQ ID NO: 1524365 - RNA, 16 nt, Human
uguuugccucugccuc

SEQ ID NO: 1524366 - RNA, 14 nt, Human
uguuugccucugcc

SEQ ID NO: 1524367 - RNA, 14 nt, Human
uguugucagcugaa

SEQ ID NO: 1524368 - RNA, 23 nt, Human
aguugauucagcucugcaagaau

SEQ ID NO: 1524369 - RNA, 14 nt, Human
aguugauucagcuc

SEQ ID NO: 1524370 - RNA, 15 nt, Human
aguugauucagcucu

SEQ ID NO: 1524371 - RNA, 17 nt, Human
aguugauucagcucugc

SEQ ID NO: 1524372 - RNA, 18 nt, Human
aguugauucagcucugca

SEQ ID NO: 1524373 - RNA, 21 nt, Human
aguugauaugccuuuucccaa

SEQ ID NO: 1524374 - RNA, 22 nt, Human
aguugauagcacagacccugcc

SEQ ID NO: 1524375 - RNA, 23 nt, Human
aguugauagcacagacccugccc

SEQ ID NO: 1524376 - RNA, 13 nt, Human
aguugauucagcu

SEQ ID NO: 1524377 - RNA, 13 nt, Human
aguucugaagaag

SEQ ID NO: 1524378 - RNA, 14 nt, Human
aguucugaagaaga

SEQ ID NO: 1524379 - RNA, 15 nt, Human
aguucugaagaagau

SEQ ID NO: 1524380 - RNA, 16 nt, Human
aguucugaagaagaug

SEQ ID NO: 1524381 - RNA, 15 nt, Human
aguugauagcacaga

SEQ ID NO: 1524382 - RNA, 19 nt, Human
aguugauagcacagacccu

SEQ ID NO: 1524383 - RNA, 20 nt, Human
aguugauagcacagacccug

SEQ ID NO: 1524384 - RNA, 21 nt, Human
aguugauagcacagacccugc

SEQ ID NO: 1524385 - RNA, 21 nt, Human
aguuucuccaagcaggacaug

SEQ ID NO: 1524386 - RNA, 13 nt, Human
aguuucuccaagc

SEQ ID NO: 1524387 - RNA, 15 nt, Human
aguuucuccaagcag

SEQ ID NO: 1524388 - RNA, 20 nt, Human
uuaaauucuugcaaaguauc

SEQ ID NO: 1524389 - RNA, 16 nt, Human
uuaaauucuugcaaag

SEQ ID NO: 1524390 - RNA, 13 nt, Human
uuaaauucuugca

SEQ ID NO: 1524391 - RNA, 22 nt, Human
aguuuucacucuuauugcccac

SEQ ID NO: 1524392 - RNA, 16 nt, Human
aguuugguguguccuc

SEQ ID NO: 1524393 - RNA, 19 nt, Human
uuaaaaaagaaacauuugg

SEQ ID NO: 1524394 - RNA, 18 nt, Human
uuaaaaaguggaaaaaua

SEQ ID NO: 1524395 - RNA, 17 nt, Human
uuaaaacaacacucaca

SEQ ID NO: 1524396 - RNA, 15 nt, Human
uuaaaaaagaaacau

SEQ ID NO: 1524397 - RNA, 18 nt, Human
uuaaaaaagaaacauuug

SEQ ID NO: 1524398 - RNA, 20 nt, Human
aguugccagucaccccggcc

SEQ ID NO: 1524399 - RNA, 14 nt, Human
uuaaaaucauuucu

SEQ ID NO: 1524400 - RNA, 17 nt, Human
uuaaaccgccaaggcug

SEQ ID NO: 1524401 - RNA, 22 nt, Human
uuaaauaaugugaaacuggauu

SEQ ID NO: 1524402 - RNA, 21 nt, Human
uuaaauaaugugaaacuggau

SEQ ID NO: 1524403 - RNA, 20 nt, Human
uuaaauaaugugaaacugga

SEQ ID NO: 1524404 - RNA, 13 nt, Human
uuaaauaaaucau

SEQ ID NO: 1524405 - RNA, 15 nt, Human
uuaaauaaaucauaa

SEQ ID NO: 1524406 - RNA, 22 nt, Human
uuaucaaagggugaaaauuauu

SEQ ID NO: 1524407 - RNA, 22 nt, Human
auaccacaggaaccacaagacu

SEQ ID NO: 1524408 - RNA, 19 nt, Human
auaccagccaguaaauggg

SEQ ID NO: 1524409 - RNA, 21 nt, Human
auacuaaccagcagaaaugcc

SEQ ID NO: 1524410 - RNA, 20 nt, Human
auacuacaguuuguuaguau

SEQ ID NO: 1524411 - RNA, 16 nt, Human
auacuacaguuuguua

SEQ ID NO: 1524412 - RNA, 15 nt, Human
auacuacaguuuguu

SEQ ID NO: 1524413 - RNA, 13 nt, Human
auacuacaguuug

SEQ ID NO: 1524414 - RNA, 20 nt, Human
auacaucccuuaccugggaa

SEQ ID NO: 1524415 - RNA, 19 nt, Human
auacauauuuuuguagcac

SEQ ID NO: 1524416 - RNA, 20 nt, Human
auacauaaacaagaccacgu

SEQ ID NO: 1524417 - RNA, 14 nt, Human
auacauuguacgaa

SEQ ID NO: 1524418 - RNA, 21 nt, Human
auacauuguacgaagaguauu

SEQ ID NO: 1524419 - RNA, 22 nt, Human
auacauuguacgaagaguauuu

SEQ ID NO: 1524420 - RNA, 19 nt, Human
auaccaaguugauacuuga

SEQ ID NO: 1524421 - RNA, 16 nt, Human
auacauuugauaaagu

SEQ ID NO: 1524422 - RNA, 21 nt, Human
auacaguucggugagcuacaa

SEQ ID NO: 1524423 - RNA, 15 nt, Human
auacaggucauauua

SEQ ID NO: 1524424 - RNA, 21 nt, Human
auacaggucauauuaauauau

SEQ ID NO: 1524425 - RNA, 14 nt, Human
auacaggaaaagcu

SEQ ID NO: 1524426 - RNA, 19 nt, Human
auacaggaaaagcugcuga

SEQ ID NO: 1524427 - RNA, 20 nt, Human
auacaggaaaagcugcugac

SEQ ID NO: 1524428 - RNA, 22 nt, Human
auacaggaaaagcugcugacag

SEQ ID NO: 1524429 - RNA, 16 nt, Human
uuauagccgaaaugau

SEQ ID NO: 1524430 - RNA, 18 nt, Human
uuauacuuuguaaagaca

SEQ ID NO: 1524431 - RNA, 23 nt, Human
uuauagaguguacuuaacuauuc

SEQ ID NO: 1524432 - RNA, 23 nt, Human
uuauacccagaaaguuauugaua

SEQ ID NO: 1524433 - RNA, 18 nt, Human
uuauacccagaaaguuau

SEQ ID NO: 1524434 - RNA, 19 nt, Human
uuauacccagaaaguuauu

SEQ ID NO: 1524435 - RNA, 18 nt, Human
uuauauaagcuuguauuc

SEQ ID NO: 1524436 - RNA, 13 nt, Human
uuauauaaguauu

SEQ ID NO: 1524437 - RNA, 14 nt, Human
uuauauaaguauuc

SEQ ID NO: 1524438 - RNA, 16 nt, Human
uuauauaaguauucua

SEQ ID NO: 1524439 - RNA, 22 nt, Human
uuauauauauuuuuuucugaaa

SEQ ID NO: 1524440 - RNA, 15 nt, Human
auaauuuuaagaaau

SEQ ID NO: 1524441 - RNA, 21 nt, Human
auaauuuuaagaaaucaaaga

SEQ ID NO: 1524442 - RNA, 13 nt, Human
auaauuuugugaa

SEQ ID NO: 1524443 - RNA, 14 nt, Human
auaauuuugugaag

SEQ ID NO: 1524444 - RNA, 15 nt, Human
auaauuuugugaagc

SEQ ID NO: 1524445 - RNA, 20 nt, Human
auaauuuugugaagcaaaau

SEQ ID NO: 1524446 - RNA, 14 nt, Human
auaauuuuuauauu

SEQ ID NO: 1524447 - RNA, 16 nt, Human
auaauuuuuauauuug

SEQ ID NO: 1524448 - RNA, 19 nt, Human
auaauuuuuauauuugaaa

SEQ ID NO: 1524449 - RNA, 21 nt, Human
auaauuuuuauauuugaaaua

SEQ ID NO: 1524450 - RNA, 22 nt, Human
auaauuuuuauauuugaaauau

SEQ ID NO: 1524451 - RNA, 15 nt, Human
auacaaaagcaugug

SEQ ID NO: 1524452 - RNA, 13 nt, Human
auacaaaagcaug

SEQ ID NO: 1524453 - RNA, 12 nt, Human
auacaaaagcau

SEQ ID NO: 1524454 - RNA, 22 nt, Human
auacaaaaaaaaaaaaaaauua

SEQ ID NO: 1524455 - RNA, 18 nt, Human
aguuuucugagaaagacu

SEQ ID NO: 1524456 - RNA, 14 nt, Human
aguuuucugagaaa

SEQ ID NO: 1524457 - RNA, 17 nt, Human
aguuuucugagaaagac

SEQ ID NO: 1524458 - RNA, 12 nt, Human
aguuuucugaga

SEQ ID NO: 1524459 - RNA, 13 nt, Human
aguuuucugagaa

SEQ ID NO: 1524460 - RNA, 16 nt, Human
auaaaccgaacugaug

SEQ ID NO: 1524461 - RNA, 16 nt, Human
auaaaccucaaaaugu

SEQ ID NO: 1524462 - RNA, 22 nt, Human
auaaaccuugucuaugaaauga

SEQ ID NO: 1524463 - RNA, 22 nt, Human
auaaacauuuguagcauccucu

SEQ ID NO: 1524464 - RNA, 15 nt, Human
auaaacgucuuaaau

SEQ ID NO: 1524465 - RNA, 16 nt, Human
auaaacgucuuaaaua

SEQ ID NO: 1524466 - RNA, 18 nt, Human
auaaacgucuuaaauauu

SEQ ID NO: 1524467 - RNA, 16 nt, Human
auaaacuuuaccuuuu

SEQ ID NO: 1524468 - RNA, 15 nt, Human
auaaacuuuaccuuu

SEQ ID NO: 1524469 - RNA, 13 nt, Human
auaaacuuuaccu

SEQ ID NO: 1524470 - RNA, 19 nt, Human
auaaaugugccuucauuuu

SEQ ID NO: 1524471 - RNA, 12 nt, Human
auaacuggaaac

SEQ ID NO: 1524472 - RNA, 20 nt, Human
auaaccaguguuguggauuu

SEQ ID NO: 1524473 - RNA, 23 nt, Human
uuaccauuuugggguacccacug

SEQ ID NO: 1524474 - RNA, 18 nt, Human
uuacaggaaguacuggag

SEQ ID NO: 1524475 - RNA, 22 nt, Human
uuacaggaaguacuggagaaaa

SEQ ID NO: 1524476 - RNA, 12 nt, Human
auaacugugaag

SEQ ID NO: 1524477 - RNA, 16 nt, Human
uuacaggaaguacugg

SEQ ID NO: 1524478 - RNA, 23 nt, Human
auaagaaccuuuugagugccuua

SEQ ID NO: 1524479 - RNA, 17 nt, Human
auaaguuaacuuccaau

SEQ ID NO: 1524480 - RNA, 12 nt, Human
uuaccugggaaa

SEQ ID NO: 1524481 - RNA, 22 nt, Human
auaagaaccuuuugagugccuu

SEQ ID NO: 1524482 - RNA, 22 nt, Human
auaaguuaacuuccaauuuaca

SEQ ID NO: 1524483 - RNA, 21 nt, Human
auaaguucauacauuguacga

SEQ ID NO: 1524484 - RNA, 11 nt, Human
auaaguucaua

SEQ ID NO: 1524485 - RNA, 13 nt, Human
auaaguucauaca

SEQ ID NO: 1524486 - RNA, 14 nt, Human
auaaguucauacau

SEQ ID NO: 1524487 - RNA, 15 nt, Human
auaaguucauacauu

SEQ ID NO: 1524488 - RNA, 23 nt, Human
auaauacaccacuacauucuguu

SEQ ID NO: 1524489 - RNA, 23 nt, Human
uuagaugcaguucugaagaagau

SEQ ID NO: 1524490 - RNA, 22 nt, Human
uuagaugcaguucugaagaaga

SEQ ID NO: 1524491 - RNA, 21 nt, Human
auaaucuuucacaggggacag

SEQ ID NO: 1524492 - RNA, 20 nt, Human
auaaucagugugucuaaauu

SEQ ID NO: 1524493 - RNA, 19 nt, Human
auaauacaguaucucaggg

SEQ ID NO: 1524494 - RNA, 14 nt, Human
auaaugaauacuuu

SEQ ID NO: 1524495 - RNA, 14 nt, Human
auaauucuacuuug

SEQ ID NO: 1524496 - RNA, 16 nt, Human
aggggauagagagaga

SEQ ID NO: 1524497 - RNA, 18 nt, Human
aggguaucaggugcugcc

SEQ ID NO: 1524498 - RNA, 16 nt, Human
aggguaucaggugcug

SEQ ID NO: 1524499 - RNA, 19 nt, Human
aggguacuaaggaaucuuu

SEQ ID NO: 1524500 - RNA, 15 nt, Human
ugguccauagagagc

SEQ ID NO: 1524501 - RNA, 16 nt, Human
ugguccauagagagca

SEQ ID NO: 1524502 - RNA, 23 nt, Human
uggucaccaaaucagcugcuacu

SEQ ID NO: 1524503 - RNA, 21 nt, Human
uggucaccaaaucagcugcua

SEQ ID NO: 1524504 - RNA, 24 nt, Human
agggugccguguccccugacaggg

SEQ ID NO: 1524505 - RNA, 15 nt, Human
agggugccguguccc

SEQ ID NO: 1524506 - RNA, 15 nt, Human
agggugaaaauuauu

SEQ ID NO: 1524507 - RNA, 21 nt, Human
agggugaugggaaagcauugu

SEQ ID NO: 1524508 - RNA, 22 nt, Human
agggugaugggaaagcauugua

SEQ ID NO: 1524509 - RNA, 23 nt, Human
uggguggaugccugguggcagcu

SEQ ID NO: 1524510 - RNA, 14 nt, Human
uggguggaugccug

SEQ ID NO: 1524511 - RNA, 22 nt, Human
ugguccaugggccauaugaaaa

SEQ ID NO: 1524512 - RNA, 19 nt, Human
ugguccauagagagcaaga

SEQ ID NO: 1524513 - RNA, 13 nt, Human
uggucccacccca

SEQ ID NO: 1524514 - RNA, 16 nt, Human
uggucuuauuuguaaa

SEQ ID NO: 1524515 - RNA, 22 nt, Human
uggucugugagaugcuagaacu

SEQ ID NO: 1524516 - RNA, 12 nt, Human
uggucuguguga

SEQ ID NO: 1524517 - RNA, 19 nt, Human
uggugaacagaacaaaagg

SEQ ID NO: 1524518 - RNA, 18 nt, Human
aggguggugaccucugcc

SEQ ID NO: 1524519 - RNA, 19 nt, Human
aggguggugaccucugccu

SEQ ID NO: 1524520 - RNA, 21 nt, Human
aggguggugaccucugccuga

SEQ ID NO: 1524521 - RNA, 13 nt, Human
aggguuggccccu

SEQ ID NO: 1524522 - RNA, 14 nt, Human
aggguuggccccug

SEQ ID NO: 1524523 - RNA, 17 nt, Human
aggguuggccccugccc

SEQ ID NO: 1524524 - RNA, 15 nt, Human
aggguugggcuggug

SEQ ID NO: 1524525 - RNA, 15 nt, Human
aggucagugcaaaua

SEQ ID NO: 1524526 - RNA, 21 nt, Human
aggucaaggcugcagugagcc

SEQ ID NO: 1524527 - RNA, 23 nt, Human
aggucauuuuuuuuaagaaaaag

SEQ ID NO: 1524528 - RNA, 22 nt, Human
aggucauuuuuuuuaagaaaaa

SEQ ID NO: 1524529 - RNA, 22 nt, Human
aggucuugaacuccuggccuca

SEQ ID NO: 1524530 - RNA, 16 nt, Human
aggucauauuaauaua

SEQ ID NO: 1524531 - RNA, 20 nt, Human
aggucuugaacuccuggccu

SEQ ID NO: 1524532 - RNA, 21 nt, Human
aggucuugaacuccuggccuc

SEQ ID NO: 1524533 - RNA, 22 nt, Human
agguaugaccuucuaggaagcu

SEQ ID NO: 1524534 - RNA, 23 nt, Human
agguaugaccuucuaggaagcuc

SEQ ID NO: 1524535 - RNA, 17 nt, Human
agguaugcaaucaaauc

SEQ ID NO: 1524536 - RNA, 20 nt, Human
agguaugaccuucuaggaag

SEQ ID NO: 1524537 - RNA, 14 nt, Human
aggguuggagcagu

SEQ ID NO: 1524538 - RNA, 17 nt, Human
aggguugggcugguguc

SEQ ID NO: 1524539 - RNA, 20 nt, Human
aggguuuauguuuaggaugu

SEQ ID NO: 1524540 - RNA, 12 nt, Human
ugguuuucuguu

SEQ ID NO: 1524541 - RNA, 15 nt, Human
ugguuugcaaggaag

SEQ ID NO: 1524542 - RNA, 17 nt, Human
ugguuugcaaggaagcc

SEQ ID NO: 1524543 - RNA, 15 nt, Human
ugguuucagaaaugu

SEQ ID NO: 1524544 - RNA, 14 nt, Human
ugguuucagaaaug

SEQ ID NO: 1524545 - RNA, 16 nt, Human
uguaaaggaauuuaaa

SEQ ID NO: 1524546 - RNA, 15 nt, Human
ugguuuucuguucuu

SEQ ID NO: 1524547 - RNA, 13 nt, Human
ugguuuucuguuc

SEQ ID NO: 1524548 - RNA, 23 nt, Human
aggugauccacccaccucagccu

SEQ ID NO: 1524549 - RNA, 15 nt, Human
ugguggcagagugga

SEQ ID NO: 1524550 - RNA, 12 nt, Human
ugguggcagcuc

SEQ ID NO: 1524551 - RNA, 16 nt, Human
ugguggcagcucaccu

SEQ ID NO: 1524552 - RNA, 19 nt, Human
ugguggcagcucaccucuc

SEQ ID NO: 1524553 - RNA, 20 nt, Human
ugguggcagcucaccucucc

SEQ ID NO: 1524554 - RNA, 23 nt, Human
ugguggcagcucaccucucccuu

SEQ ID NO: 1524555 - RNA, 12 nt, Human
ugguggcagcug

SEQ ID NO: 1524556 - RNA, 13 nt, Human
ugguggcagcugc

SEQ ID NO: 1524557 - RNA, 15 nt, Human
ugguguuuccuggca

SEQ ID NO: 1524558 - RNA, 17 nt, Human
ugguguuuccuggcacu

SEQ ID NO: 1524559 - RNA, 13 nt, Human
ugguuaaugccau

SEQ ID NO: 1524560 - RNA, 20 nt, Human
ugguucaggguuggccccug

SEQ ID NO: 1524561 - RNA, 22 nt, Human
ugguucaggguuggccccugcc

SEQ ID NO: 1524562 - RNA, 23 nt, Human
ugguucaggguuggccccugccc

SEQ ID NO: 1524563 - RNA, 21 nt, Human
uguagaagucacauuccugaa

SEQ ID NO: 1524564 - RNA, 20 nt, Human
uguacaugaaaacacauuuu

SEQ ID NO: 1524565 - RNA, 19 nt, Human
uguacaugaaaacacauuu

SEQ ID NO: 1524566 - RNA, 18 nt, Human
uguacaugaaaacacauu

SEQ ID NO: 1524567 - RNA, 17 nt, Human
uguacaugaaaacacau

SEQ ID NO: 1524568 - RNA, 15 nt, Human
uguacuuaacuauuc

SEQ ID NO: 1524569 - RNA, 16 nt, Human
uguaauuugugauaca

SEQ ID NO: 1524570 - RNA, 18 nt, Human
uguaaggaaugauuaauu

SEQ ID NO: 1524571 - RNA, 21 nt, Human
uguaauuugugauacaaugcu

SEQ ID NO: 1524572 - RNA, 17 nt, Human
uguaauuugugauacaa

SEQ ID NO: 1524573 - RNA, 19 nt, Human
uguacaaaguagaagucuu

SEQ ID NO: 1524574 - RNA, 23 nt, Human
uguacaaaguagaagucuuagau

SEQ ID NO: 1524575 - RNA, 18 nt, Human
uguaagaaaauaucacuu

SEQ ID NO: 1524576 - RNA, 18 nt, Human
uguaagaacuacaaacaa

SEQ ID NO: 1524577 - RNA, 13 nt, Human
uguaaggaaugau

SEQ ID NO: 1524578 - RNA, 14 nt, Human
uguaaggaaugauu

SEQ ID NO: 1524579 - RNA, 15 nt, Human
uguaaggaaugauua

SEQ ID NO: 1524580 - RNA, 16 nt, Human
agguggggcagcuuga

SEQ ID NO: 1524581 - RNA, 14 nt, Human
agguggggcagcuu

SEQ ID NO: 1524582 - RNA, 13 nt, Human
agguggggcagcu

SEQ ID NO: 1524583 - RNA, 18 nt, Human
aggugugacugaauuucu

SEQ ID NO: 1524584 - RNA, 23 nt, Human
aggugugaaccaccacacccagc

SEQ ID NO: 1524585 - RNA, 22 nt, Human
aggugugaaccaccacacccag

SEQ ID NO: 1524586 - RNA, 20 nt, Human
aggugugacugaauuucuuu

SEQ ID NO: 1524587 - RNA, 14 nt, Human
aggugugagucacc

SEQ ID NO: 1524588 - RNA, 20 nt, Human
aggugugagucaccaagccc

SEQ ID NO: 1524589 - RNA, 21 nt, Human
agugagcagucaggaaagaga

SEQ ID NO: 1524590 - RNA, 14 nt, Human
agugagagcugggu

SEQ ID NO: 1524591 - RNA, 16 nt, Human
agugagccgagauugu

SEQ ID NO: 1524592 - RNA, 15 nt, Human
ugugauggggcccug

SEQ ID NO: 1524593 - RNA, 16 nt, Human
ugugauggggcccugc

SEQ ID NO: 1524594 - RNA, 17 nt, Human
ugugauggggcccugcc

SEQ ID NO: 1524595 - RNA, 18 nt, Human
ugugauggggcccugccu

SEQ ID NO: 1524596 - RNA, 20 nt, Human
agugaaacucguuaauuugu

SEQ ID NO: 1524597 - RNA, 14 nt, Human
agugagacagcucu

SEQ ID NO: 1524598 - RNA, 22 nt, Human
agugaaagaggcagcuugaaac

SEQ ID NO: 1524599 - RNA, 16 nt, Human
agugaaagaggcagcu

SEQ ID NO: 1524600 - RNA, 22 nt, Human
agugagacucugucucaaaaaa

SEQ ID NO: 1524601 - RNA, 16 nt, Human
agugagacucugucuc

SEQ ID NO: 1524602 - RNA, 17 nt, Human
agugagacucugucuca

SEQ ID NO: 1524603 - RNA, 14 nt, Human
agugaaagcaucac

SEQ ID NO: 1524604 - RNA, 17 nt, Human
agugagacccugucuca

SEQ ID NO: 1524605 - RNA, 21 nt, Human
agugagacccugucucaaaaa

SEQ ID NO: 1524606 - RNA, 13 nt, Human
agugagacucugu

SEQ ID NO: 1524607 - RNA, 11 nt, Human
agugaaaaagg

SEQ ID NO: 1524608 - RNA, 17 nt, Human
agugaaaaaggaggaag

SEQ ID NO: 1524609 - RNA, 20 nt, Human
agugaaaaaggaggaagaga

SEQ ID NO: 1524610 - RNA, 23 nt, Human
agugaaaaaggaggaagagaaaa

SEQ ID NO: 1524611 - RNA, 14 nt, Human
ugugaagcaaaauu

SEQ ID NO: 1524612 - RNA, 19 nt, Human
ugugagcacaaagguagcu

SEQ ID NO: 1524613 - RNA, 13 nt, Human
ugucucugagagu

SEQ ID NO: 1524614 - RNA, 17 nt, Human
ugucucuacuaaaaaua

SEQ ID NO: 1524615 - RNA, 23 nt, Human
aguccccuguuuguuucugaaag

SEQ ID NO: 1524616 - RNA, 13 nt, Human
agucccugccaau

SEQ ID NO: 1524617 - RNA, 14 nt, Human
agucccugccaaug

SEQ ID NO: 1524618 - RNA, 16 nt, Human
agucccugccaaugga

SEQ ID NO: 1524619 - RNA, 13 nt, Human
ugucucugugaga

SEQ ID NO: 1524620 - RNA, 18 nt, Human
ugucucuugguccugcug

SEQ ID NO: 1524621 - RNA, 19 nt, Human
ugucucuugguccugcugc

SEQ ID NO: 1524622 - RNA, 20 nt, Human
ugucucuugguccugcugca

SEQ ID NO: 1524623 - RNA, 21 nt, Human
ugucucuugguccugcugcag

SEQ ID NO: 1524624 - RNA, 22 nt, Human
ugucucuuuaaugucacaggca

SEQ ID NO: 1524625 - RNA, 22 nt, Human
ugucucuugguccugcugcagu

SEQ ID NO: 1524626 - RNA, 21 nt, Human
ugucucuuuaaugucacaggc

SEQ ID NO: 1524627 - RNA, 14 nt, Human
ugucuuaauuaaaa

SEQ ID NO: 1524628 - RNA, 22 nt, Human
ugugaacaguuguguuugaagc

SEQ ID NO: 1524629 - RNA, 15 nt, Human
ugugaaccaccacac

SEQ ID NO: 1524630 - RNA, 16 nt, Human
ugugaaccaccacacc

SEQ ID NO: 1524631 - RNA, 17 nt, Human
ugugaaccaccacaccc

SEQ ID NO: 1524632 - RNA, 22 nt, Human
ugugaaccaccacacccagccc

SEQ ID NO: 1524633 - RNA, 23 nt, Human
ugugaaccaccacacccagccca

SEQ ID NO: 1524634 - RNA, 15 nt, Human
ugucuugcaauggca

SEQ ID NO: 1524635 - RNA, 17 nt, Human
ugucuugcaauggcagc

SEQ ID NO: 1524636 - RNA, 18 nt, Human
ugucuugcaauggcagcc

SEQ ID NO: 1524637 - RNA, 20 nt, Human
ugucuugcaauggcagccuu

SEQ ID NO: 1524638 - RNA, 21 nt, Human
ugucuugcaauggcagccuug

SEQ ID NO: 1524639 - RNA, 14 nt, Human
ugucuucacaacag

SEQ ID NO: 1524640 - RNA, 23 nt, Human
agguuuggacaaaauggaauacu

SEQ ID NO: 1524641 - RNA, 12 nt, Human
uguagagccagg

SEQ ID NO: 1524642 - RNA, 15 nt, Human
uguagagccaggguc

SEQ ID NO: 1524643 - RNA, 15 nt, Human
uguaucccaugagcc

SEQ ID NO: 1524644 - RNA, 16 nt, Human
uguaucccaugagccu

SEQ ID NO: 1524645 - RNA, 14 nt, Human
uguauguguaagua

SEQ ID NO: 1524646 - RNA, 13 nt, Human
aguagcugggacu

SEQ ID NO: 1524647 - RNA, 14 nt, Human
aguagcugggacua

SEQ ID NO: 1524648 - RNA, 16 nt, Human
ugucaaaguggugaga

SEQ ID NO: 1524649 - RNA, 19 nt, Human
ugucaaaguggugagaggc

SEQ ID NO: 1524650 - RNA, 14 nt, Human
ugucaaagugguga

SEQ ID NO: 1524651 - RNA, 15 nt, Human
ugucaaaguggugag

SEQ ID NO: 1524652 - RNA, 15 nt, Human
aguauuguccagguc

SEQ ID NO: 1524653 - RNA, 16 nt, Human
aguauuguccaggucu

SEQ ID NO: 1524654 - RNA, 20 nt, Human
agucacauuccaagccucau

SEQ ID NO: 1524655 - RNA, 15 nt, Human
agucacugagacagc

SEQ ID NO: 1524656 - RNA, 16 nt, Human
agucacugagacagcc

SEQ ID NO: 1524657 - RNA, 17 nt, Human
agucacugagacagccc

SEQ ID NO: 1524658 - RNA, 15 nt, Human
ugucagcauagaagu

SEQ ID NO: 1524659 - RNA, 18 nt, Human
aguauguuagugcaaauu

SEQ ID NO: 1524660 - RNA, 21 nt, Human
aguauguuagugcaaauuguc

SEQ ID NO: 1524661 - RNA, 22 nt, Human
aguagcugggacuacaggcacc

SEQ ID NO: 1524662 - RNA, 19 nt, Human
aguagcugggacuacaggc

SEQ ID NO: 1524663 - RNA, 21 nt, Human
aguagcugggacuacaggcac

SEQ ID NO: 1524664 - RNA, 15 nt, Human
aguauuauaccuuuu

SEQ ID NO: 1524665 - RNA, 14 nt, Human
aguauuauaccuuu

SEQ ID NO: 1524666 - RNA, 15 nt, Human
agucagucauucaga

SEQ ID NO: 1524667 - RNA, 21 nt, Human
agucagucauucagauaugau

SEQ ID NO: 1524668 - RNA, 14 nt, Human
ugucuaagauagua

SEQ ID NO: 1524669 - RNA, 15 nt, Human
ugucuaagauaguaa

SEQ ID NO: 1524670 - RNA, 18 nt, Human
ugucuaaauuugaauguu

SEQ ID NO: 1524671 - RNA, 23 nt, Human
aguccauauuucaauuuccaaga

SEQ ID NO: 1524672 - RNA, 14 nt, Human
aguccccuguuugu

SEQ ID NO: 1524673 - RNA, 19 nt, Human
aguccccuguuuguuucug

SEQ ID NO: 1524674 - RNA, 21 nt, Human
agucccaccuuggcugcaggg

SEQ ID NO: 1524675 - RNA, 23 nt, Human
agucccaccuuggcugcagggag

SEQ ID NO: 1524676 - RNA, 21 nt, Human
aguccauauuucaauuuccaa

SEQ ID NO: 1524677 - RNA, 17 nt, Human
ugucccuuuuccuuuuu

SEQ ID NO: 1524678 - RNA, 12 nt, Human
ugucccuuuucc

SEQ ID NO: 1524679 - RNA, 14 nt, Human
ugucccugcacuug

SEQ ID NO: 1524680 - RNA, 18 nt, Human
agucacugagacagcccg

SEQ ID NO: 1524681 - RNA, 16 nt, Human
ugucagccauuccugu

SEQ ID NO: 1524682 - RNA, 23 nt, Human
ugucagcuccccucggagaagag

SEQ ID NO: 1524683 - RNA, 20 nt, Human
ugucagcuccccucggagaa

SEQ ID NO: 1524684 - RNA, 21 nt, Human
ugucagcuccccucggagaag

SEQ ID NO: 1524685 - RNA, 23 nt, Human
agcugcuuuugucuaugggacuc

SEQ ID NO: 1524686 - RNA, 24 nt, Human
agcugcuuuugucuaugggacuca

SEQ ID NO: 1524687 - RNA, 13 nt, Human
agcugccuguuca

SEQ ID NO: 1524688 - RNA, 14 nt, Human
ugccucugacacac

SEQ ID NO: 1524689 - RNA, 16 nt, Human
ugccucugacacacag

SEQ ID NO: 1524690 - RNA, 11 nt, Human
ugccucugccu

SEQ ID NO: 1524691 - RNA, 20 nt, Human
ugccugcccaggccccugcc

SEQ ID NO: 1524692 - RNA, 12 nt, Human
ugccucugccuc

SEQ ID NO: 1524693 - RNA, 17 nt, Human
ugccugcccaggccccu

SEQ ID NO: 1524694 - RNA, 18 nt, Human
ugccugcccaggccccug

SEQ ID NO: 1524695 - RNA, 19 nt, Human
ugccugcccaggccccugc

SEQ ID NO: 1524696 - RNA, 17 nt, Human
ugccucucucaggccaa

SEQ ID NO: 1524697 - RNA, 18 nt, Human
ugccucagaaaacaagga

SEQ ID NO: 1524698 - RNA, 22 nt, Human
ugccucccaucacccgcuaaga

SEQ ID NO: 1524699 - RNA, 20 nt, Human
ugccgcagcccugcagaggg

SEQ ID NO: 1524700 - RNA, 15 nt, Human
ugccucaccccuugc

SEQ ID NO: 1524701 - RNA, 15 nt, Human
agcucuucuccaggc

SEQ ID NO: 1524702 - RNA, 16 nt, Human
agcucuucuccaggcu

SEQ ID NO: 1524703 - RNA, 17 nt, Human
agcucuucuccaggcug

SEQ ID NO: 1524704 - RNA, 19 nt, Human
ugcccuguuaaaagaugaa

SEQ ID NO: 1524705 - RNA, 22 nt, Human
ugcccuuaccugccaggaagcc

SEQ ID NO: 1524706 - RNA, 15 nt, Human
ugcccugugggcccc

SEQ ID NO: 1524707 - RNA, 18 nt, Human
ugcccugugggcccccaa

SEQ ID NO: 1524708 - RNA, 13 nt, Human
agcuccagcucac

SEQ ID NO: 1524709 - RNA, 17 nt, Human
agcuccagcucaccagc

SEQ ID NO: 1524710 - RNA, 14 nt, Human
ugcccugcccaccu

SEQ ID NO: 1524711 - RNA, 17 nt, Human
agcuccaagcucccagg

SEQ ID NO: 1524712 - RNA, 18 nt, Human
agcuccaagcucccaggc

SEQ ID NO: 1524713 - RNA, 19 nt, Human
agcuccaagcucccaggca

SEQ ID NO: 1524714 - RNA, 23 nt, Human
agcucugcccauccugccccuga

SEQ ID NO: 1524715 - RNA, 23 nt, Human
agcuccuucuguccuacucugug

SEQ ID NO: 1524716 - RNA, 21 nt, Human
agcuccagcucaccagcccca

SEQ ID NO: 1524717 - RNA, 18 nt, Human
agcuccagcucaccagcc

SEQ ID NO: 1524718 - RNA, 19 nt, Human
agcuccagcucaccagccc

SEQ ID NO: 1524719 - RNA, 19 nt, Human
ugcauuugaggucuguucu

SEQ ID NO: 1524720 - RNA, 20 nt, Human
ugcauuuaaaagauacaguu

SEQ ID NO: 1524721 - RNA, 23 nt, Human
agccuugaccauucuccaccugc

SEQ ID NO: 1524722 - RNA, 22 nt, Human
agcgauucuucugcuucagccu

SEQ ID NO: 1524723 - RNA, 22 nt, Human
agccuugaacuuugaccucugc

SEQ ID NO: 1524724 - RNA, 16 nt, Human
agccuugaacuuugac

SEQ ID NO: 1524725 - RNA, 23 nt, Human
agccuugaacuuugaccucugca

SEQ ID NO: 1524726 - RNA, 15 nt, Human
agccuugaacuuuga

SEQ ID NO: 1524727 - RNA, 18 nt, Human
agccuuccagggguggga

SEQ ID NO: 1524728 - RNA, 21 nt, Human
ugcauuugaggucuguucuuu

SEQ ID NO: 1524729 - RNA, 20 nt, Human
ugcauuugaggucuguucuu

SEQ ID NO: 1524730 - RNA, 18 nt, Human
ugccagcuuaucucaggg

SEQ ID NO: 1524731 - RNA, 13 nt, Human
agcggcuggcagc

SEQ ID NO: 1524732 - RNA, 22 nt, Human
agcggggacagcuccuucuguc

SEQ ID NO: 1524733 - RNA, 23 nt, Human
agcggcuggcagcccaccccuca

SEQ ID NO: 1524734 - RNA, 19 nt, Human
agcggggacagcuccuucu

SEQ ID NO: 1524735 - RNA, 20 nt, Human
agcggggacagcuccuucug

SEQ ID NO: 1524736 - RNA, 15 nt, Human
agcuccaagaauuuc

SEQ ID NO: 1524737 - RNA, 17 nt, Human
agcucaggugucccugc

SEQ ID NO: 1524738 - RNA, 18 nt, Human
agcuccaagaauuucuag

SEQ ID NO: 1524739 - RNA, 15 nt, Human
agcuccaagcuccca

SEQ ID NO: 1524740 - RNA, 16 nt, Human
agcuccaagcucccag

SEQ ID NO: 1524741 - RNA, 22 nt, Human
ugccauuuaaagcuuauuaaaa

SEQ ID NO: 1524742 - RNA, 20 nt, Human
agcucagggccuggcucagg

SEQ ID NO: 1524743 - RNA, 14 nt, Human
agcucagggccugg

SEQ ID NO: 1524744 - RNA, 19 nt, Human
agcucagggccuggcucag

SEQ ID NO: 1524745 - RNA, 19 nt, Human
agcuauucaguaauaacuc

SEQ ID NO: 1524746 - RNA, 12 nt, Human
agcucagggccu

SEQ ID NO: 1524747 - RNA, 13 nt, Human
agcucagggccug

SEQ ID NO: 1524748 - RNA, 17 nt, Human
agcuacccgcagaguuc

SEQ ID NO: 1524749 - RNA, 21 nt, Human
agcuaggccuggccagaugca

SEQ ID NO: 1524750 - RNA, 13 nt, Human
agcgugagccacu

SEQ ID NO: 1524751 - RNA, 16 nt, Human
ugccccauucaacauc

SEQ ID NO: 1524752 - RNA, 20 nt, Human
ugcccuaaaguguauuuuuu

SEQ ID NO: 1524753 - RNA, 23 nt, Human
ugccccgaacauguuuuucuucu

SEQ ID NO: 1524754 - RNA, 17 nt, Human
ugcccaaagaugcagcc

SEQ ID NO: 1524755 - RNA, 20 nt, Human
ugcccaaagaugcagccggu

SEQ ID NO: 1524756 - RNA, 13 nt, Human
ugcccagccccuu

SEQ ID NO: 1524757 - RNA, 16 nt, Human
ugcccagccccuucug

SEQ ID NO: 1524758 - RNA, 17 nt, Human
ugcccagccccuucuga

SEQ ID NO: 1524759 - RNA, 20 nt, Human
ugcccagccccuucugaccc

SEQ ID NO: 1524760 - RNA, 15 nt, Human
ugcccaggccccugc

SEQ ID NO: 1524761 - RNA, 17 nt, Human
ugcccaggccccugcca

SEQ ID NO: 1524762 - RNA, 18 nt, Human
ugcccaggccccugccac

SEQ ID NO: 1524763 - RNA, 17 nt, Human
agccucacaguccuuac

SEQ ID NO: 1524764 - RNA, 18 nt, Human
agccucacaguccuuacc

SEQ ID NO: 1524765 - RNA, 20 nt, Human
agccucaaccuccugggcua

SEQ ID NO: 1524766 - RNA, 18 nt, Human
agccgagaucacgccacu

SEQ ID NO: 1524767 - RNA, 21 nt, Human
ugcagccucaaccuccugggc

SEQ ID NO: 1524768 - RNA, 22 nt, Human
ugcagccucaaccuccugggcu

SEQ ID NO: 1524769 - RNA, 23 nt, Human
ugcagccucaaccuccugggcua

SEQ ID NO: 1524770 - RNA, 23 nt, Human
agccucugaaaaccaauguucuc

SEQ ID NO: 1524771 - RNA, 14 nt, Human
agccgaagcccagg

SEQ ID NO: 1524772 - RNA, 21 nt, Human
agccgagauagccaaggccaa

SEQ ID NO: 1524773 - RNA, 17 nt, Human
agccgagaucacgccac

SEQ ID NO: 1524774 - RNA, 17 nt, Human
agcccuugcauugcaga

SEQ ID NO: 1524775 - RNA, 21 nt, Human
agcccuuagcagggaaacagc

SEQ ID NO: 1524776 - RNA, 18 nt, Human
ugcagacucuacagaggc

SEQ ID NO: 1524777 - RNA, 16 nt, Human
ugcagacucuacagag

SEQ ID NO: 1524778 - RNA, 17 nt, Human
ugcagacucuacagagg

SEQ ID NO: 1524779 - RNA, 16 nt, Human
agcccuuagcagggaa

SEQ ID NO: 1524780 - RNA, 21 nt, Human
agcccugguggcagugggagc

SEQ ID NO: 1524781 - RNA, 19 nt, Human
ugcacuccccugcugggug

SEQ ID NO: 1524782 - RNA, 16 nt, Human
ugcacuccccugcugg

SEQ ID NO: 1524783 - RNA, 17 nt, Human
ugcacuccccugcuggg

SEQ ID NO: 1524784 - RNA, 15 nt, Human
ugcacacauuuuuua

SEQ ID NO: 1524785 - RNA, 13 nt, Human
ugcacacauuuuu

SEQ ID NO: 1524786 - RNA, 12 nt, Human
ugcacacauuuu

SEQ ID NO: 1524787 - RNA, 11 nt, Human
ugcacacauuu

SEQ ID NO: 1524788 - RNA, 22 nt, Human
ugcagaagacaguauggcagcu

SEQ ID NO: 1524789 - RNA, 14 nt, Human
ugcagaagacagua

SEQ ID NO: 1524790 - RNA, 15 nt, Human
ugcagaagacaguau

SEQ ID NO: 1524791 - RNA, 22 nt, Human
ugcagacaggcaagcaccuccu

SEQ ID NO: 1524792 - RNA, 13 nt, Human
agcccaggggccg

SEQ ID NO: 1524793 - RNA, 16 nt, Human
agccccaaaacucucc

SEQ ID NO: 1524794 - RNA, 17 nt, Human
agccccaaaacucuccu

SEQ ID NO: 1524795 - RNA, 18 nt, Human
agccccaaaacucuccuc

SEQ ID NO: 1524796 - RNA, 21 nt, Human
agccccauucugccugcccag

SEQ ID NO: 1524797 - RNA, 22 nt, Human
agccccauucugccugcccagg

SEQ ID NO: 1524798 - RNA, 21 nt, Human
ugcaaaccaucauugaaaucu

SEQ ID NO: 1524799 - RNA, 22 nt, Human
ugcacacaccagagcccaccuu

SEQ ID NO: 1524800 - RNA, 21 nt, Human
ugcacacaccagagcccaccu

SEQ ID NO: 1524801 - RNA, 18 nt, Human
ugcacacaccagagccca

SEQ ID NO: 1524802 - RNA, 14 nt, Human
agcccugguggcag

SEQ ID NO: 1524803 - RNA, 15 nt, Human
agcccugguggcagu

SEQ ID NO: 1524804 - RNA, 16 nt, Human
agcccugguggcagug

SEQ ID NO: 1524805 - RNA, 23 nt, Human
agccccauucugccugcccaggc

SEQ ID NO: 1524806 - RNA, 13 nt, Human
agcccacuucugc

SEQ ID NO: 1524807 - RNA, 14 nt, Human
agcccacuucugcc

SEQ ID NO: 1524808 - RNA, 15 nt, Human
agcccacuucugcca

SEQ ID NO: 1524809 - RNA, 22 nt, Human
agcccacuucugccauauucug

SEQ ID NO: 1524810 - RNA, 21 nt, Human
agccaguaaaugggggugcau

SEQ ID NO: 1524811 - RNA, 22 nt, Human
agccaguaaaugggggugcauu

SEQ ID NO: 1524812 - RNA, 13 nt, Human
agccaguaaaugg

SEQ ID NO: 1524813 - RNA, 22 nt, Human
ugauucccaagcucugcuccuc

SEQ ID NO: 1524814 - RNA, 23 nt, Human
ugauucccaagcucugcuccucu

SEQ ID NO: 1524815 - RNA, 13 nt, Human
ugauucuccugcc

SEQ ID NO: 1524816 - RNA, 14 nt, Human
agcccaggaaaggc

SEQ ID NO: 1524817 - RNA, 21 nt, Human
ugauucauaaugacuuaagca

SEQ ID NO: 1524818 - RNA, 18 nt, Human
agcccaggaaaggcucca

SEQ ID NO: 1524819 - RNA, 16 nt, Human
ugauucauaaugacuu

SEQ ID NO: 1524820 - RNA, 22 nt, Human
ugauuuccguuaaaauaccagc

SEQ ID NO: 1524821 - RNA, 13 nt, Human
ugauuucauucaa

SEQ ID NO: 1524822 - RNA, 17 nt, Human
ugauuuggggauauuuu

SEQ ID NO: 1524823 - RNA, 19 nt, Human
ugaugggaaagcauuguaa

SEQ ID NO: 1524824 - RNA, 21 nt, Human
ugaugggcaacccccagccug

SEQ ID NO: 1524825 - RNA, 15 nt, Human
ugauggggcccugcc

SEQ ID NO: 1524826 - RNA, 16 nt, Human
ugauggggcccugccu

SEQ ID NO: 1524827 - RNA, 19 nt, Human
ugauggggcccugccuccu

SEQ ID NO: 1524828 - RNA, 13 nt, Human
ugaugagaggaaa

SEQ ID NO: 1524829 - RNA, 14 nt, Human
ugaugagaggaaau

SEQ ID NO: 1524830 - RNA, 15 nt, Human
ugaugagaggaaauc

SEQ ID NO: 1524831 - RNA, 16 nt, Human
ugaugagaggaaauca

SEQ ID NO: 1524832 - RNA, 11 nt, Human
ugaugaagaag

SEQ ID NO: 1524833 - RNA, 12 nt, Human
ugaugaagaagu

SEQ ID NO: 1524834 - RNA, 16 nt, Human
ugauccuaguuccacc

SEQ ID NO: 1524835 - RNA, 15 nt, Human
ugauccucccaccuc

SEQ ID NO: 1524836 - RNA, 22 nt, Human
ugauccucccaccucagccucc

SEQ ID NO: 1524837 - RNA, 16 nt, Human
ugauccucccaccuca

SEQ ID NO: 1524838 - RNA, 21 nt, Human
ugauccucccaccucagccuc

SEQ ID NO: 1524839 - RNA, 23 nt, Human
ugauuaaguaaugauaacuggaa

SEQ ID NO: 1524840 - RNA, 20 nt, Human
ugauuaaccacuucagcuga

SEQ ID NO: 1524841 - RNA, 15 nt, Human
ugauuaauuaaaaca

SEQ ID NO: 1524842 - RNA, 18 nt, Human
ugauuaaguaaugauaac

SEQ ID NO: 1524843 - RNA, 19 nt, Human
ugauuaaccacuucagcug

SEQ ID NO: 1524844 - RNA, 20 nt, Human
ugauuaaauucuugcaaagu

SEQ ID NO: 1524845 - RNA, 19 nt, Human
ugauuaaauucuugcaaag

SEQ ID NO: 1524846 - RNA, 15 nt, Human
ugauggugcaaugac

SEQ ID NO: 1524847 - RNA, 13 nt, Human
ugauggugcaaug

SEQ ID NO: 1524848 - RNA, 20 nt, Human
agccacugcaccgggccaca

SEQ ID NO: 1524849 - RNA, 18 nt, Human
agccacugcaccgggcca

SEQ ID NO: 1524850 - RNA, 19 nt, Human
agccacugcaccgggccac

SEQ ID NO: 1524851 - RNA, 10 nt, Human
agccagagga

SEQ ID NO: 1524852 - RNA, 11 nt, Human
agccagaggag

SEQ ID NO: 1524853 - RNA, 18 nt, Human
uggcugccaaugggagcu

SEQ ID NO: 1524854 - RNA, 20 nt, Human
uggcugccaaugggagcuca

SEQ ID NO: 1524855 - RNA, 15 nt, Human
uggcugcagggaguc

SEQ ID NO: 1524856 - RNA, 13 nt, Human
uggcugcagggag

SEQ ID NO: 1524857 - RNA, 14 nt, Human
uggcugcagggagu

SEQ ID NO: 1524858 - RNA, 12 nt, Human
uggcugcaaagg

SEQ ID NO: 1524859 - RNA, 18 nt, Human
uggcucaaguccucuuuu

SEQ ID NO: 1524860 - RNA, 20 nt, Human
uggcucuuccaggcugggag

SEQ ID NO: 1524861 - RNA, 21 nt, Human
uggcucuuccaggcugggaga

SEQ ID NO: 1524862 - RNA, 18 nt, Human
aggcuggcgugcaguggu

SEQ ID NO: 1524863 - RNA, 20 nt, Human
aggcuggcgugcaguggugc

SEQ ID NO: 1524864 - RNA, 22 nt, Human
uggcuagagguucaaagauauu

SEQ ID NO: 1524865 - RNA, 14 nt, Human
aggcugggagagcc

SEQ ID NO: 1524866 - RNA, 22 nt, Human
uggcuauuagagaucaaccccu

SEQ ID NO: 1524867 - RNA, 19 nt, Human
uggcuaugcauuugaaaau

SEQ ID NO: 1524868 - RNA, 14 nt, Human
uggcuaugcauuug

SEQ ID NO: 1524869 - RNA, 17 nt, Human
uggcuaugcauuugaaa

SEQ ID NO: 1524870 - RNA, 15 nt, Human
uggcuaugcauuuga

SEQ ID NO: 1524871 - RNA, 16 nt, Human
ugggaaaggggaaguu

SEQ ID NO: 1524872 - RNA, 23 nt, Human
uggcuucacggaagagccuugcg

SEQ ID NO: 1524873 - RNA, 14 nt, Human
uggcugugucuccc

SEQ ID NO: 1524874 - RNA, 13 nt, Human
uggcuguuggcug

SEQ ID NO: 1524875 - RNA, 15 nt, Human
uggcuguuggcuggg

SEQ ID NO: 1524876 - RNA, 17 nt, Human
uggcuuaaaacaacacu

SEQ ID NO: 1524877 - RNA, 11 nt, Human
uggcugcugaa

SEQ ID NO: 1524878 - RNA, 16 nt, Human
aggcucugcccuuggu

SEQ ID NO: 1524879 - RNA, 13 nt, Human
aggcuggcgugca

SEQ ID NO: 1524880 - RNA, 17 nt, Human
aggcuggcgugcagugg

SEQ ID NO: 1524881 - RNA, 19 nt, Human
aggcuccuuuagcgcccag

SEQ ID NO: 1524882 - RNA, 12 nt, Human
aggcucgagcau

SEQ ID NO: 1524883 - RNA, 21 nt, Human
aggcucgagcaugccuggaug

SEQ ID NO: 1524884 - RNA, 15 nt, Human
aggcucgagcaugcc

SEQ ID NO: 1524885 - RNA, 17 nt, Human
aggcucgagcaugccug

SEQ ID NO: 1524886 - RNA, 18 nt, Human
aggcucgagcaugccugg

SEQ ID NO: 1524887 - RNA, 19 nt, Human
aggcucgagcaugccugga

SEQ ID NO: 1524888 - RNA, 21 nt, Human
aggcucucaggccagcugcuu

SEQ ID NO: 1524889 - RNA, 11 nt, Human
aggcucugccc

SEQ ID NO: 1524890 - RNA, 12 nt, Human
aggcucugcccu

SEQ ID NO: 1524891 - RNA, 13 nt, Human
aggcucugcccuu

SEQ ID NO: 1524892 - RNA, 14 nt, Human
aggcucugcccuug

SEQ ID NO: 1524893 - RNA, 15 nt, Human
aggcucugcccuugg

SEQ ID NO: 1524894 - RNA, 11 nt, Human
aggcucucagg

SEQ ID NO: 1524895 - RNA, 12 nt, Human
aggcucucaggc

SEQ ID NO: 1524896 - RNA, 14 nt, Human
aggcucucaggcca

SEQ ID NO: 1524897 - RNA, 15 nt, Human
aggcucucaggccag

SEQ ID NO: 1524898 - RNA, 16 nt, Human
aggcucucaggccagc

SEQ ID NO: 1524899 - RNA, 18 nt, Human
aggcucucaggccagcug

SEQ ID NO: 1524900 - RNA, 19 nt, Human
aggcucucaggccagcugc

SEQ ID NO: 1524901 - RNA, 20 nt, Human
aggcucucaggccagcugcu

SEQ ID NO: 1524902 - RNA, 18 nt, Human
uggacgagaaaacaauaa

SEQ ID NO: 1524903 - RNA, 16 nt, Human
aggccaaacucaccug

SEQ ID NO: 1524904 - RNA, 18 nt, Human
aggcauuuguuugaacug

SEQ ID NO: 1524905 - RNA, 23 nt, Human
aggccaaaggaagcacaugccuc

SEQ ID NO: 1524906 - RNA, 20 nt, Human
aggccaaacucaccugcccc

SEQ ID NO: 1524907 - RNA, 14 nt, Human
aggccaaaggaagc

SEQ ID NO: 1524908 - RNA, 15 nt, Human
aggccaaaggaagca

SEQ ID NO: 1524909 - RNA, 15 nt, Human
aggccacaagacccu

SEQ ID NO: 1524910 - RNA, 16 nt, Human
aggccacaagacccuu

SEQ ID NO: 1524911 - RNA, 20 nt, Human
uggaugccugguggcagcug

SEQ ID NO: 1524912 - RNA, 18 nt, Human
uggaugccugguggcagc

SEQ ID NO: 1524913 - RNA, 19 nt, Human
uggaugccugguggcagcu

SEQ ID NO: 1524914 - RNA, 16 nt, Human
uggaguucaucuugaa

SEQ ID NO: 1524915 - RNA, 17 nt, Human
uggaguucaucuugaau

SEQ ID NO: 1524916 - RNA, 20 nt, Human
uggaguucaucuugaauugu

SEQ ID NO: 1524917 - RNA, 12 nt, Human
aggccagagaca

SEQ ID NO: 1524918 - RNA, 13 nt, Human
uggcagccuuggc

SEQ ID NO: 1524919 - RNA, 20 nt, Human
aggccacaagacccuugugg

SEQ ID NO: 1524920 - RNA, 12 nt, Human
uggcagccccug

SEQ ID NO: 1524921 - RNA, 20 nt, Human
uggcacaucagcacgauuuc

SEQ ID NO: 1524922 - RNA, 22 nt, Human
uggcacaguuuucugagaaaga

SEQ ID NO: 1524923 - RNA, 22 nt, Human
uggauuaaacuuaaucuaaaug

SEQ ID NO: 1524924 - RNA, 12 nt, Human
uggauguucuga

SEQ ID NO: 1524925 - RNA, 21 nt, Human
uggcacaucagcacgauuucu

SEQ ID NO: 1524926 - RNA, 15 nt, Human
uggcacccggccccu

SEQ ID NO: 1524927 - RNA, 16 nt, Human
uggcacccggccccug

SEQ ID NO: 1524928 - RNA, 21 nt, Human
uggcagaguugaagacagagc

SEQ ID NO: 1524929 - RNA, 22 nt, Human
uggcagaguugaagacagagcu

SEQ ID NO: 1524930 - RNA, 17 nt, Human
uggccaggcuggucuca

SEQ ID NO: 1524931 - RNA, 22 nt, Human
uggcaugggaaugaaugucagu

SEQ ID NO: 1524932 - RNA, 12 nt, Human
uggcaugggaau

SEQ ID NO: 1524933 - RNA, 15 nt, Human
uggcaugggaaugaa

SEQ ID NO: 1524934 - RNA, 17 nt, Human
aggccugccuccagggc

SEQ ID NO: 1524935 - RNA, 19 nt, Human
aggccugccuccagggcug

SEQ ID NO: 1524936 - RNA, 20 nt, Human
aggccugccuccagggcugg

SEQ ID NO: 1524937 - RNA, 21 nt, Human
aggccugccuccagggcugga

SEQ ID NO: 1524938 - RNA, 13 nt, Human
aggcccucugccc

SEQ ID NO: 1524939 - RNA, 14 nt, Human
aggcccucugccca

SEQ ID NO: 1524940 - RNA, 15 nt, Human
aggcccucugcccac

SEQ ID NO: 1524941 - RNA, 14 nt, Human
uggccucugcacuc

SEQ ID NO: 1524942 - RNA, 15 nt, Human
uggccucugcacucc

SEQ ID NO: 1524943 - RNA, 17 nt, Human
uggccucugcacucccc

SEQ ID NO: 1524944 - RNA, 23 nt, Human
uggccgggcgcgguggcucacgc

SEQ ID NO: 1524945 - RNA, 18 nt, Human
uggccucugcacuccccu

SEQ ID NO: 1524946 - RNA, 12 nt, Human
uggccuggcccc

SEQ ID NO: 1524947 - RNA, 23 nt, Human
aggccugggggcugggcagagga

SEQ ID NO: 1524948 - RNA, 22 nt, Human
aggccuggccagaugcaccagc

SEQ ID NO: 1524949 - RNA, 23 nt, Human
aggccuggccagaugcaccagcc

SEQ ID NO: 1524950 - RNA, 16 nt, Human
aggccuggccagaugc

SEQ ID NO: 1524951 - RNA, 17 nt, Human
aggccuggccagaugca

SEQ ID NO: 1524952 - RNA, 21 nt, Human
aggccuggccagaugcaccag

SEQ ID NO: 1524953 - RNA, 12 nt, Human
uggccgggcagg

SEQ ID NO: 1524954 - RNA, 13 nt, Human
uggccgggcaggg

SEQ ID NO: 1524955 - RNA, 21 nt, Human
uggccgcgccaaauaaugucu

SEQ ID NO: 1524956 - RNA, 22 nt, Human
uggccgcgccaaauaaugucuc

SEQ ID NO: 1524957 - RNA, 23 nt, Human
uggccgcgccaaauaaugucucu

SEQ ID NO: 1524958 - RNA, 21 nt, Human
uggccccugcccggcugcgga

SEQ ID NO: 1524959 - RNA, 18 nt, Human
uggaauuggagcucgugg

SEQ ID NO: 1524960 - RNA, 19 nt, Human
aggcaacugcauuggcuuu

SEQ ID NO: 1524961 - RNA, 22 nt, Human
uggaauuucucccagucauuua

SEQ ID NO: 1524962 - RNA, 17 nt, Human
aggcaacucaucuuagg

SEQ ID NO: 1524963 - RNA, 19 nt, Human
aggaugcccaaagaugcag

SEQ ID NO: 1524964 - RNA, 20 nt, Human
aggaugaucuaggaagacuu

SEQ ID NO: 1524965 - RNA, 14 nt, Human
aggaugcccaaaga

SEQ ID NO: 1524966 - RNA, 19 nt, Human
aggauuuugauccaagcug

SEQ ID NO: 1524967 - RNA, 15 nt, Human
uggacacagcucuuc

SEQ ID NO: 1524968 - RNA, 16 nt, Human
uggacacagcucuucu

SEQ ID NO: 1524969 - RNA, 18 nt, Human
uggacacagcucuucucc

SEQ ID NO: 1524970 - RNA, 21 nt, Human
uggacacagcucuucuccagg

SEQ ID NO: 1524971 - RNA, 15 nt, Human
uggacccugaggccc

SEQ ID NO: 1524972 - RNA, 14 nt, Human
uggacccugaggcc

SEQ ID NO: 1524973 - RNA, 12 nt, Human
uggacccugagg

SEQ ID NO: 1524974 - RNA, 13 nt, Human
uggacccugaggc

SEQ ID NO: 1524975 - RNA, 20 nt, Human
uggaaauauuaagaaagacu

SEQ ID NO: 1524976 - RNA, 23 nt, Human
uggaaaugggcagagcagagacc

SEQ ID NO: 1524977 - RNA, 21 nt, Human
aggauacaaaagcaugugaga

SEQ ID NO: 1524978 - RNA, 15 nt, Human
aggauccugagccag

SEQ ID NO: 1524979 - RNA, 16 nt, Human
aggauccugagccaga

SEQ ID NO: 1524980 - RNA, 22 nt, Human
aggagggaggcaggggaggggu

SEQ ID NO: 1524981 - RNA, 17 nt, Human
aggauccugagccagau

SEQ ID NO: 1524982 - RNA, 18 nt, Human
aggauccugagccagauu

SEQ ID NO: 1524983 - RNA, 21 nt, Human
aggaucucuugagccugggag

SEQ ID NO: 1524984 - RNA, 22 nt, Human
aggaucucuugagccugggagg

SEQ ID NO: 1524985 - RNA, 16 nt, Human
aggaugaucuaggaag

SEQ ID NO: 1524986 - RNA, 17 nt, Human
aggaugaucuaggaaga

SEQ ID NO: 1524987 - RNA, 19 nt, Human
aggacugaauuaugaaacu

SEQ ID NO: 1524988 - RNA, 20 nt, Human
aggacugaauuaugaaacuu

SEQ ID NO: 1524989 - RNA, 19 nt, Human
aggacauugcggacagcca

SEQ ID NO: 1524990 - RNA, 23 nt, Human
aggacauugcggacagccacggc

SEQ ID NO: 1524991 - RNA, 15 nt, Human
aggacauugcggaca

SEQ ID NO: 1524992 - RNA, 17 nt, Human
aggacauugcggacagc

SEQ ID NO: 1524993 - RNA, 18 nt, Human
aggacauugcggacagcc

SEQ ID NO: 1524994 - RNA, 22 nt, Human
aggagccccgaggccuucucug

SEQ ID NO: 1524995 - RNA, 11 nt, Human
aggagaaacug

SEQ ID NO: 1524996 - RNA, 17 nt, Human
aggagauuggaaggaac

SEQ ID NO: 1524997 - RNA, 17 nt, Human
aggagaaacuggaacuc

SEQ ID NO: 1524998 - RNA, 21 nt, Human
ugcuuggaggaaggaaaccca

SEQ ID NO: 1524999 - RNA, 12 nt, Human
ugcuugggcuuc

SEQ ID NO: 1525000 - RNA, 16 nt, Human
ugcuugggcuucaucc

SEQ ID NO: 1525001 - RNA, 13 nt, Human
uggaaaggcagcu

SEQ ID NO: 1525002 - RNA, 15 nt, Human
uggaaauauuaagaa

SEQ ID NO: 1525003 - RNA, 19 nt, Human
ugcuugggcuucauccucc

SEQ ID NO: 1525004 - RNA, 15 nt, Human
ugcugcccugugagu

SEQ ID NO: 1525005 - RNA, 13 nt, Human
ugcuggagcucug

SEQ ID NO: 1525006 - RNA, 14 nt, Human
ugcuggagcucugc

SEQ ID NO: 1525007 - RNA, 13 nt, Human
ugcugcccuguga

SEQ ID NO: 1525008 - RNA, 14 nt, Human
ugcugcccugugag

SEQ ID NO: 1525009 - RNA, 16 nt, Human
ugcuggcugguuagag

SEQ ID NO: 1525010 - RNA, 18 nt, Human
ugcuggcuguuggcuggg

SEQ ID NO: 1525011 - RNA, 14 nt, Human
aggacacugauaug

SEQ ID NO: 1525012 - RNA, 23 nt, Human
aggacacuaaccacgcuggaccu

SEQ ID NO: 1525013 - RNA, 17 nt, Human
aggacacugauaugggu

SEQ ID NO: 1525014 - RNA, 22 nt, Human
aggacagggaggugaccccagg

SEQ ID NO: 1525015 - RNA, 16 nt, Human
ugcuucaaggauccug

SEQ ID NO: 1525016 - RNA, 18 nt, Human
ugcuucaaggauccugag

SEQ ID NO: 1525017 - RNA, 19 nt, Human
ugcuucaaggauccugagc

SEQ ID NO: 1525018 - RNA, 20 nt, Human
ugcuucaaggauccugagcc

SEQ ID NO: 1525019 - RNA, 13 nt, Human
ugcuucagccucc

SEQ ID NO: 1525020 - RNA, 14 nt, Human
ugcuucagccuccc

SEQ ID NO: 1525021 - RNA, 13 nt, Human
ugcuuauacacuu

SEQ ID NO: 1525022 - RNA, 19 nt, Human
agcugggacuacaggcacc

SEQ ID NO: 1525023 - RNA, 16 nt, Human
agcugggacuacaggc

SEQ ID NO: 1525024 - RNA, 18 nt, Human
agcugggacuacaggcac

SEQ ID NO: 1525025 - RNA, 16 nt, Human
ugcuccagcuguucag

SEQ ID NO: 1525026 - RNA, 19 nt, Human
ugcuccagcuguucagcug

SEQ ID NO: 1525027 - RNA, 20 nt, Human
ugcuccagcuguucagcugg

SEQ ID NO: 1525028 - RNA, 21 nt, Human
ugcucugcugacagacacagg

SEQ ID NO: 1525029 - RNA, 22 nt, Human
ugcucugcugacagacacaggc

SEQ ID NO: 1525030 - RNA, 15 nt, Human
ugcugagucugaagg

SEQ ID NO: 1525031 - RNA, 11 nt, Human
aggaauuuaaa

SEQ ID NO: 1525032 - RNA, 19 nt, Human
aggaaggaaacccagcucu

SEQ ID NO: 1525033 - RNA, 15 nt, Human
aggaaggagaggaga

SEQ ID NO: 1525034 - RNA, 18 nt, Human
aggaaggaaacccagcuc

SEQ ID NO: 1525035 - RNA, 17 nt, Human
aggaagccagcaggcuc

SEQ ID NO: 1525036 - RNA, 18 nt, Human
aggaagccagcaggcucu

SEQ ID NO: 1525037 - RNA, 14 nt, Human
aggaagccagcagg

SEQ ID NO: 1525038 - RNA, 15 nt, Human
aggaagccagcaggc

SEQ ID NO: 1525039 - RNA, 13 nt, Human
aggaagacuuugg

SEQ ID NO: 1525040 - RNA, 14 nt, Human
aggaagacuuugga

SEQ ID NO: 1525041 - RNA, 23 nt, Human
aggaagcacaugccucucucagg

SEQ ID NO: 1525042 - RNA, 24 nt, Human
aggaagcacaugccucucucaggc

SEQ ID NO: 1525043 - RNA, 16 nt, Human
ugcugagucugaaggc

SEQ ID NO: 1525044 - RNA, 17 nt, Human
ugcugagucugaaggcu

SEQ ID NO: 1525045 - RNA, 18 nt, Human
ugcugagucugaaggcug

SEQ ID NO: 1525046 - RNA, 21 nt, Human
ugcugagucugaaggcugggu

SEQ ID NO: 1525047 - RNA, 22 nt, Human
ugcugagucugaaggcuggguu

SEQ ID NO: 1525048 - RNA, 23 nt, Human
ugcugagucugaaggcuggguuc

SEQ ID NO: 1525049 - RNA, 13 nt, Human
aggaagacuucau

SEQ ID NO: 1525050 - RNA, 19 nt, Human
aggaagacuucaucccucu

SEQ ID NO: 1525051 - RNA, 21 nt, Human
ugagagacacacugaagaagc

SEQ ID NO: 1525052 - RNA, 22 nt, Human
ugagagacacacugaagaagca

SEQ ID NO: 1525053 - RNA, 14 nt, Human
ugagagcugggugu

SEQ ID NO: 1525054 - RNA, 10 nt, Human
ugagaggaaa

SEQ ID NO: 1525055 - RNA, 11 nt, Human
ugagaggaaau

SEQ ID NO: 1525056 - RNA, 12 nt, Human
ugagaggaaauc

SEQ ID NO: 1525057 - RNA, 13 nt, Human
ugagaggaaauca

SEQ ID NO: 1525058 - RNA, 14 nt, Human
ugagaggaaaucac

SEQ ID NO: 1525059 - RNA, 13 nt, Human
ugagauuucaucu

SEQ ID NO: 1525060 - RNA, 24 nt, Human
ugagaugugaacacaucagcuugc

SEQ ID NO: 1525061 - RNA, 18 nt, Human
ugagaugugaacacauca

SEQ ID NO: 1525062 - RNA, 19 nt, Human
ugagaugugaacacaucag

SEQ ID NO: 1525063 - RNA, 13 nt, Human
ugagaugugaaca

SEQ ID NO: 1525064 - RNA, 17 nt, Human
ugagaggaaaucaccga

SEQ ID NO: 1525065 - RNA, 23 nt, Human
ugagaggacuuuucuuuguggcu

SEQ ID NO: 1525066 - RNA, 16 nt, Human
ugagagacacacugaa

SEQ ID NO: 1525067 - RNA, 17 nt, Human
ugagagacacacugaag

SEQ ID NO: 1525068 - RNA, 19 nt, Human
ugagagacacacugaagaa

SEQ ID NO: 1525069 - RNA, 20 nt, Human
ugagagacacacugaagaag

SEQ ID NO: 1525070 - RNA, 20 nt, Human
ugagacucugucucagucca

SEQ ID NO: 1525071 - RNA, 20 nt, Human
ugagacucugucucaaaaaa

SEQ ID NO: 1525072 - RNA, 12 nt, Human
ugagacagcucu

SEQ ID NO: 1525073 - RNA, 22 nt, Human
ugagacagcccgggcucugccu

SEQ ID NO: 1525074 - RNA, 17 nt, Human
ugagacagcccgggcuc

SEQ ID NO: 1525075 - RNA, 18 nt, Human
ugagacagcccgggcucu

SEQ ID NO: 1525076 - RNA, 19 nt, Human
ugagacagcccgggcucug

SEQ ID NO: 1525077 - RNA, 20 nt, Human
ugagacagcccgggcucugc

SEQ ID NO: 1525078 - RNA, 15 nt, Human
agauuuuccugaaaa

SEQ ID NO: 1525079 - RNA, 16 nt, Human
agauuuuccugaaaac

SEQ ID NO: 1525080 - RNA, 12 nt, Human
ugagaauuaccc

SEQ ID NO: 1525081 - RNA, 15 nt, Human
ugagaauguaagaac

SEQ ID NO: 1525082 - RNA, 11 nt, Human
ugagacagagu

SEQ ID NO: 1525083 - RNA, 21 nt, Human
ugagacagaguuuucacucuu

SEQ ID NO: 1525084 - RNA, 13 nt, Human
ugagacagcccgg

SEQ ID NO: 1525085 - RNA, 20 nt, Human
agcaagggugaugggaaagc

SEQ ID NO: 1525086 - RNA, 22 nt, Human
agcaagggugaugggaaagcau

SEQ ID NO: 1525087 - RNA, 14 nt, Human
agcaagucaggguu

SEQ ID NO: 1525088 - RNA, 16 nt, Human
agcaagugagacccug

SEQ ID NO: 1525089 - RNA, 15 nt, Human
agcaagugagagcug

SEQ ID NO: 1525090 - RNA, 16 nt, Human
agcaagugagagcugg

SEQ ID NO: 1525091 - RNA, 14 nt, Human
agcaaggagauuua

SEQ ID NO: 1525092 - RNA, 19 nt, Human
agcaaggagauuuacaacu

SEQ ID NO: 1525093 - RNA, 17 nt, Human
agcaaggagauuuacaa

SEQ ID NO: 1525094 - RNA, 16 nt, Human
agcaagggugauggga

SEQ ID NO: 1525095 - RNA, 20 nt, Human
ugagccagauuucacucucc

SEQ ID NO: 1525096 - RNA, 21 nt, Human
ugagccagauuucacucuccu

SEQ ID NO: 1525097 - RNA, 14 nt, Human
ugagccacugcacc

SEQ ID NO: 1525098 - RNA, 18 nt, Human
ugagccacugcaccgggc

SEQ ID NO: 1525099 - RNA, 18 nt, Human
ugagccagauuucacucu

SEQ ID NO: 1525100 - RNA, 19 nt, Human
ugagccagauuucacucuc

SEQ ID NO: 1525101 - RNA, 22 nt, Human
ugagauuucaucugcucuccuu

SEQ ID NO: 1525102 - RNA, 14 nt, Human
ugagauuucaucug

SEQ ID NO: 1525103 - RNA, 18 nt, Human
ugagauuucaucugcucu

SEQ ID NO: 1525104 - RNA, 19 nt, Human
ugagauuucaucugcucuc

SEQ ID NO: 1525105 - RNA, 21 nt, Human
ugagauuucaucugcucuccu

SEQ ID NO: 1525106 - RNA, 12 nt, Human
ugagccacugca

SEQ ID NO: 1525107 - RNA, 13 nt, Human
ugagccacugcac

SEQ ID NO: 1525108 - RNA, 13 nt, Human
agcaccuccugcc

SEQ ID NO: 1525109 - RNA, 14 nt, Human
agcaccuccugccu

SEQ ID NO: 1525110 - RNA, 16 nt, Human
agcaccuccugccucg

SEQ ID NO: 1525111 - RNA, 22 nt, Human
agcaccaaaagcuuaccaaggg

SEQ ID NO: 1525112 - RNA, 23 nt, Human
agcacaugccucucucaggccaa

SEQ ID NO: 1525113 - RNA, 16 nt, Human
agcaccaucucuccuc

SEQ ID NO: 1525114 - RNA, 18 nt, Human
agcacaugccucucucag

SEQ ID NO: 1525115 - RNA, 19 nt, Human
agcacaugccucucucagg

SEQ ID NO: 1525116 - RNA, 20 nt, Human
agcacaugccucucucaggc

SEQ ID NO: 1525117 - RNA, 21 nt, Human
agcacaugccucucucaggcc

SEQ ID NO: 1525118 - RNA, 22 nt, Human
agcacaugccucucucaggcca

SEQ ID NO: 1525119 - RNA, 21 nt, Human
agcacagcuucauuuccugug

SEQ ID NO: 1525120 - RNA, 17 nt, Human
agcaagugagagcuggg

SEQ ID NO: 1525121 - RNA, 18 nt, Human
agcaagugagagcugggu

SEQ ID NO: 1525122 - RNA, 21 nt, Human
agaugcaguucugaagaagau

SEQ ID NO: 1525123 - RNA, 19 nt, Human
agaugcuagaacucccuuu

SEQ ID NO: 1525124 - RNA, 21 nt, Human
agaugcuagaacucccuuuca

SEQ ID NO: 1525125 - RNA, 22 nt, Human
agaugcuagaacucccuuucaa

SEQ ID NO: 1525126 - RNA, 13 nt, Human
agauccuggaaau

SEQ ID NO: 1525127 - RNA, 14 nt, Human
agauccuggaaauc

SEQ ID NO: 1525128 - RNA, 18 nt, Human
agaucucuaacuucacca

SEQ ID NO: 1525129 - RNA, 16 nt, Human
ugacagggccagugca

SEQ ID NO: 1525130 - RNA, 19 nt, Human
ugacagggccagugcaguu

SEQ ID NO: 1525131 - RNA, 22 nt, Human
ugacagggcacaccgggcacuc

SEQ ID NO: 1525132 - RNA, 17 nt, Human
ugacaggcaaugcuggc

SEQ ID NO: 1525133 - RNA, 19 nt, Human
ugacaggcaaugcuggcug

SEQ ID NO: 1525134 - RNA, 16 nt, Human
ugacacgaauauugcu

SEQ ID NO: 1525135 - RNA, 19 nt, Human
ugacacgaauauugcugau

SEQ ID NO: 1525136 - RNA, 15 nt, Human
ugacacuuaaaaaug

SEQ ID NO: 1525137 - RNA, 16 nt, Human
ugacacuuaaaaaugg

SEQ ID NO: 1525138 - RNA, 20 nt, Human
ugacuuacuguacaugaaaa

SEQ ID NO: 1525139 - RNA, 12 nt, Human
ugacuuacugua

SEQ ID NO: 1525140 - RNA, 13 nt, Human
agauucauauuua

SEQ ID NO: 1525141 - RNA, 16 nt, Human
agauucauauuuacuu

SEQ ID NO: 1525142 - RNA, 23 nt, Human
agauuucaucugcucuccuuccu

SEQ ID NO: 1525143 - RNA, 19 nt, Human
agauuucacucuccuuggu

SEQ ID NO: 1525144 - RNA, 13 nt, Human
agauuucaucugc

SEQ ID NO: 1525145 - RNA, 15 nt, Human
agauuucaucugcuc

SEQ ID NO: 1525146 - RNA, 18 nt, Human
agauuucaucugcucucc

SEQ ID NO: 1525147 - RNA, 19 nt, Human
agauuucaucugcucuccu

SEQ ID NO: 1525148 - RNA, 20 nt, Human
agauuucaucugcucuccuu

SEQ ID NO: 1525149 - RNA, 21 nt, Human
agauuucaucugcucuccuuc

SEQ ID NO: 1525150 - RNA, 19 nt, Human
agauucauauuuacuucuu

SEQ ID NO: 1525151 - RNA, 22 nt, Human
agaugugaacacaucagcuugc

SEQ ID NO: 1525152 - RNA, 22 nt, Human
agauguauguacuucaugcugu

SEQ ID NO: 1525153 - RNA, 17 nt, Human
agaugugaacacaucag

SEQ ID NO: 1525154 - RNA, 15 nt, Human
ugaccuuuaagagaa

SEQ ID NO: 1525155 - RNA, 14 nt, Human
ugacuaugacauaa

SEQ ID NO: 1525156 - RNA, 12 nt, Human
ugaccuuucaau

SEQ ID NO: 1525157 - RNA, 13 nt, Human
ugaccuuucaaua

SEQ ID NO: 1525158 - RNA, 14 nt, Human
ucuuuguggcuucc

SEQ ID NO: 1525159 - RNA, 16 nt, Human
agagacacacugaaga

SEQ ID NO: 1525160 - RNA, 14 nt, Human
agagacagaaagca

SEQ ID NO: 1525161 - RNA, 15 nt, Human
agagacagaaagcag

SEQ ID NO: 1525162 - RNA, 14 nt, Human
ucuuuguacagaca

SEQ ID NO: 1525163 - RNA, 15 nt, Human
ucuuuguacagacaa

SEQ ID NO: 1525164 - RNA, 20 nt, Human
ucuuuguacagacaacaaac

SEQ ID NO: 1525165 - RNA, 15 nt, Human
agacuuuuccaaccc

SEQ ID NO: 1525166 - RNA, 19 nt, Human
agacuuuggaaagaguagg

SEQ ID NO: 1525167 - RNA, 19 nt, Human
agacuuuucuuucagccaa

SEQ ID NO: 1525168 - RNA, 16 nt, Human
agagacacaagccuuc

SEQ ID NO: 1525169 - RNA, 19 nt, Human
agagacacaagccuucggc

SEQ ID NO: 1525170 - RNA, 20 nt, Human
agacugguuccauggccucu

SEQ ID NO: 1525171 - RNA, 14 nt, Human
agacuguacaaagu

SEQ ID NO: 1525172 - RNA, 17 nt, Human
agacuuuggaaagacuu

SEQ ID NO: 1525173 - RNA, 15 nt, Human
agacuuuggaaagag

SEQ ID NO: 1525174 - RNA, 12 nt, Human
ucuuuccugagg

SEQ ID NO: 1525175 - RNA, 18 nt, Human
ucuuuaaugucacaggca

SEQ ID NO: 1525176 - RNA, 19 nt, Human
ucuuuaaugucacaggcag

SEQ ID NO: 1525177 - RNA, 20 nt, Human
agacaggcaagcaccuccug

SEQ ID NO: 1525178 - RNA, 22 nt, Human
agacaggcaagcaccuccugcc

SEQ ID NO: 1525179 - RNA, 15 nt, Human
ucuuuaaugucacag

SEQ ID NO: 1525180 - RNA, 23 nt, Human
agacuggcacaguuuucugagaa

SEQ ID NO: 1525181 - RNA, 13 nt, Human
agacucugucuca

SEQ ID NO: 1525182 - RNA, 20 nt, Human
agacuggcacaguuuucuga

SEQ ID NO: 1525183 - RNA, 21 nt, Human
agacuggcacaguuuucugag

SEQ ID NO: 1525184 - RNA, 13 nt, Human
agacuccugcagg

SEQ ID NO: 1525185 - RNA, 14 nt, Human
agacuccugcaggc

SEQ ID NO: 1525186 - RNA, 18 nt, Human
ugaaaauuaacacugcuu

SEQ ID NO: 1525187 - RNA, 14 nt, Human
ugaaaauuaacacu

SEQ ID NO: 1525188 - RNA, 15 nt, Human
ugaaaauuaacacug

SEQ ID NO: 1525189 - RNA, 16 nt, Human
ugaaaauuaacacugc

SEQ ID NO: 1525190 - RNA, 13 nt, Human
ugaaagaaaauaa

SEQ ID NO: 1525191 - RNA, 18 nt, Human
ugaaacuggauuaaacuu

SEQ ID NO: 1525192 - RNA, 17 nt, Human
ugaaacuggauuaaacu

SEQ ID NO: 1525193 - RNA, 23 nt, Human
ugaaaaugcaacaacauguauaa

SEQ ID NO: 1525194 - RNA, 20 nt, Human
ugaaaaugcaacaacaugua

SEQ ID NO: 1525195 - RNA, 21 nt, Human
ugaaaaugcaacaacauguau

SEQ ID NO: 1525196 - RNA, 18 nt, Human
ugaaaaugcaacaacaug

SEQ ID NO: 1525197 - RNA, 16 nt, Human
ugaaaaucgugacaac

SEQ ID NO: 1525198 - RNA, 21 nt, Human
ugaaaauauuuguaucacaaa

SEQ ID NO: 1525199 - RNA, 22 nt, Human
ugaaaauauuuguaucacaaau

SEQ ID NO: 1525200 - RNA, 17 nt, Human
ugaaaauauuuguauca

SEQ ID NO: 1525201 - RNA, 20 nt, Human
ugaaaacacauuuuucuuag

SEQ ID NO: 1525202 - RNA, 19 nt, Human
ugaaaacacauuuuucuua

SEQ ID NO: 1525203 - RNA, 17 nt, Human
ugaaaacacauuuuucu

SEQ ID NO: 1525204 - RNA, 15 nt, Human
ugaaaacacauuuuu

SEQ ID NO: 1525205 - RNA, 13 nt, Human
ugaaaacacauuu

SEQ ID NO: 1525206 - RNA, 12 nt, Human
ugaaaacacauu

SEQ ID NO: 1525207 - RNA, 14 nt, Human
ugaaaacacauuuu

SEQ ID NO: 1525208 - RNA, 18 nt, Human
ugaaagaggaaugaagua

SEQ ID NO: 1525209 - RNA, 19 nt, Human
agagaccaucccugaaggc

SEQ ID NO: 1525210 - RNA, 21 nt, Human
agagaccaucccugaaggccc

SEQ ID NO: 1525211 - RNA, 22 nt, Human
agagaccaucccugaaggcccc

SEQ ID NO: 1525212 - RNA, 23 nt, Human
agagaccaucccugaaggccccg

SEQ ID NO: 1525213 - RNA, 17 nt, Human
ugaaagaggaaugaagu

SEQ ID NO: 1525214 - RNA, 22 nt, Human
ugaaagacuguacaaaguagaa

SEQ ID NO: 1525215 - RNA, 18 nt, Human
ugaaagacuguacaaagu

SEQ ID NO: 1525216 - RNA, 19 nt, Human
ugaaagacuguacaaagua

SEQ ID NO: 1525217 - RNA, 22 nt, Human
ugaaagaaaauaccaaggaaca

SEQ ID NO: 1525218 - RNA, 16 nt, Human
ugaaagacuguacaaa

SEQ ID NO: 1525219 - RNA, 15 nt, Human
agagacuccugcagg

SEQ ID NO: 1525220 - RNA, 12 nt, Human
agagacuccugc

SEQ ID NO: 1525221 - RNA, 13 nt, Human
agagacuccugca

SEQ ID NO: 1525222 - RNA, 14 nt, Human
agagacuccugcag

SEQ ID NO: 1525223 - RNA, 15 nt, Human
ugaaauuuccuggga

SEQ ID NO: 1525224 - RNA, 19 nt, Human
ugaaauuuccuaauuuauu

SEQ ID NO: 1525225 - RNA, 19 nt, Human
ugaaauuuuuauuaaauua

SEQ ID NO: 1525226 - RNA, 21 nt, Human
ugaaauuuccugggagcuuuu

SEQ ID NO: 1525227 - RNA, 20 nt, Human
ugaaauuuuuauuaaauuau

SEQ ID NO: 1525228 - RNA, 13 nt, Human
ugaaauaaacguc

SEQ ID NO: 1525229 - RNA, 18 nt, Human
ugaaauaaacgucuuaaa

SEQ ID NO: 1525230 - RNA, 22 nt, Human
ugaaauaaacgucuuaaauauu

SEQ ID NO: 1525231 - RNA, 23 nt, Human
ugaaauaaacgucuuaaauauuc

SEQ ID NO: 1525232 - RNA, 17 nt, Human
ugaaauaacauggccuu

SEQ ID NO: 1525233 - RNA, 16 nt, Human
ugaaauaacauggccu

SEQ ID NO: 1525234 - RNA, 14 nt, Human
ugaaauaagccaga

SEQ ID NO: 1525235 - RNA, 16 nt, Human
agagauugugguuuca

SEQ ID NO: 1525236 - RNA, 23 nt, Human
ugaacuagaguuuagcuggaaaa

SEQ ID NO: 1525237 - RNA, 22 nt, Human
ugaaccgaugagaaauaaaguu

SEQ ID NO: 1525238 - RNA, 22 nt, Human
ugaacccauauuuguacaccaa

SEQ ID NO: 1525239 - RNA, 18 nt, Human
ugaacccgggaggcagag

SEQ ID NO: 1525240 - RNA, 18 nt, Human
ugaacaaauuuacagaga

SEQ ID NO: 1525241 - RNA, 22 nt, Human
ugaaccaccacacccagcccac

SEQ ID NO: 1525242 - RNA, 13 nt, Human
ugaacaaauuuac

SEQ ID NO: 1525243 - RNA, 13 nt, Human
ugaagacagagcu

SEQ ID NO: 1525244 - RNA, 23 nt, Human
ugaagacaaugacuuacuguaca

SEQ ID NO: 1525245 - RNA, 22 nt, Human
ugaagacaaugacuuacuguac

SEQ ID NO: 1525246 - RNA, 11 nt, Human
ugaacuccugg

SEQ ID NO: 1525247 - RNA, 20 nt, Human
agagguucaaagauauuuug

SEQ ID NO: 1525248 - RNA, 19 nt, Human
agagguucaaagauauuuu

SEQ ID NO: 1525249 - RNA, 16 nt, Human
agagguucaaagauau

SEQ ID NO: 1525250 - RNA, 13 nt, Human
agagguucaaaga

SEQ ID NO: 1525251 - RNA, 20 nt, Human
agagggagugacagaggcag

SEQ ID NO: 1525252 - RNA, 15 nt, Human
agagggagugacaga

SEQ ID NO: 1525253 - RNA, 22 nt, Human
agaggcugccucucccaucacu

SEQ ID NO: 1525254 - RNA, 24 nt, Human
agaggcagccccauucugccugcc

SEQ ID NO: 1525255 - RNA, 20 nt, Human
agaggccugccuccagggcu

SEQ ID NO: 1525256 - RNA, 21 nt, Human
agaggccugccuccagggcug

SEQ ID NO: 1525257 - RNA, 22 nt, Human
agaggccugccuccagggcugg

SEQ ID NO: 1525258 - RNA, 18 nt, Human
agagcuguucacagccag

SEQ ID NO: 1525259 - RNA, 19 nt, Human
agagcuguucacagccaga

SEQ ID NO: 1525260 - RNA, 22 nt, Human
agaggcagccccauucugccug

SEQ ID NO: 1525261 - RNA, 23 nt, Human
agaggcagccccauucugccugc

SEQ ID NO: 1525262 - RNA, 13 nt, Human
ugaauaauacagu

SEQ ID NO: 1525263 - RNA, 17 nt, Human
ugaaguacucauacaug

SEQ ID NO: 1525264 - RNA, 13 nt, Human
ugaagucacacag

SEQ ID NO: 1525265 - RNA, 12 nt, Human
ugaauaauacag

SEQ ID NO: 1525266 - RNA, 17 nt, Human
ugaagauuuaccacuug

SEQ ID NO: 1525267 - RNA, 20 nt, Human
ugaagauuuaccacuugugu

SEQ ID NO: 1525268 - RNA, 18 nt, Human
ugaagguuucugaaaauu

SEQ ID NO: 1525269 - RNA, 22 nt, Human
ugaaguaauaugcacacauuuu

SEQ ID NO: 1525270 - RNA, 21 nt, Human
ugaaguaauaugcacacauuu

SEQ ID NO: 1525271 - RNA, 20 nt, Human
ugaaguaauaugcacacauu

SEQ ID NO: 1525272 - RNA, 16 nt, Human
ugaaguaauaugcaca

SEQ ID NO: 1525273 - RNA, 15 nt, Human
ugaaguaauaugcac

SEQ ID NO: 1525274 - RNA, 13 nt, Human
agaauauguuuca

SEQ ID NO: 1525275 - RNA, 17 nt, Human
agaauauguuucaaacu

SEQ ID NO: 1525276 - RNA, 18 nt, Human
agaauauguuucaaacuu

SEQ ID NO: 1525277 - RNA, 19 nt, Human
agaauauguuucaaacuuu

SEQ ID NO: 1525278 - RNA, 21 nt, Human
agaauauguuucaaacuuugg

SEQ ID NO: 1525279 - RNA, 14 nt, Human
ucugcuuguguuaa

SEQ ID NO: 1525280 - RNA, 21 nt, Human
agaaguuucugccgcagcccu

SEQ ID NO: 1525281 - RNA, 22 nt, Human
agaaguuucugccgcagcccug

SEQ ID NO: 1525282 - RNA, 23 nt, Human
agaaguuucugccgcagcccugc

SEQ ID NO: 1525283 - RNA, 23 nt, Human
agaauuaacacaugauccugcaa

SEQ ID NO: 1525284 - RNA, 15 nt, Human
agaauuaacacauga

SEQ ID NO: 1525285 - RNA, 15 nt, Human
agaauguaagaacua

SEQ ID NO: 1525286 - RNA, 16 nt, Human
agaauguaagaacuac

SEQ ID NO: 1525287 - RNA, 15 nt, Human
agaauggggugcaug

SEQ ID NO: 1525288 - RNA, 22 nt, Human
agaauuugauaugugaacaguu

SEQ ID NO: 1525289 - RNA, 21 nt, Human
agaauuugauaugugaacagu

SEQ ID NO: 1525290 - RNA, 12 nt, Human
agacacacauga

SEQ ID NO: 1525291 - RNA, 15 nt, Human
agacacacaugaagu

SEQ ID NO: 1525292 - RNA, 12 nt, Human
agacacaggccc

SEQ ID NO: 1525293 - RNA, 13 nt, Human
agacacaggcccg

SEQ ID NO: 1525294 - RNA, 16 nt, Human
agacacaggcccggcu

SEQ ID NO: 1525295 - RNA, 13 nt, Human
agacagagcuaca

SEQ ID NO: 1525296 - RNA, 19 nt, Human
agacaccuugacagggcac

SEQ ID NO: 1525297 - RNA, 18 nt, Human
agacaccuugacagggca

SEQ ID NO: 1525298 - RNA, 17 nt, Human
agacaccuugacagggc

SEQ ID NO: 1525299 - RNA, 16 nt, Human
agacacauguccaaga

SEQ ID NO: 1525300 - RNA, 20 nt, Human
agacacauguccaagaagcc

SEQ ID NO: 1525301 - RNA, 13 nt, Human
ucuguucuuucca

SEQ ID NO: 1525302 - RNA, 22 nt, Human
ucuguucuuuccaaaguacacu

SEQ ID NO: 1525303 - RNA, 12 nt, Human
ucuguuggccag

SEQ ID NO: 1525304 - RNA, 17 nt, Human
ucuguuggccaguguga

SEQ ID NO: 1525305 - RNA, 13 nt, Human
ucuguuuagauaa

SEQ ID NO: 1525306 - RNA, 17 nt, Human
ucugugagacucgagaa

SEQ ID NO: 1525307 - RNA, 21 nt, Human
ucugugagacucgagaacuuu

SEQ ID NO: 1525308 - RNA, 23 nt, Human
ucugugagaugcuagaacucccu

SEQ ID NO: 1525309 - RNA, 17 nt, Human
ucugugagaugcuagaa

SEQ ID NO: 1525310 - RNA, 22 nt, Human
ucugugagaugcuagaacuccc

SEQ ID NO: 1525311 - RNA, 14 nt, Human
ucugugagaugcua

SEQ ID NO: 1525312 - RNA, 16 nt, Human
ucugugaaaguacauu

SEQ ID NO: 1525313 - RNA, 18 nt, Human
agaagaugguaccaccag

SEQ ID NO: 1525314 - RNA, 13 nt, Human
agaagaacugaaa

SEQ ID NO: 1525315 - RNA, 14 nt, Human
agaagaacugaaau

SEQ ID NO: 1525316 - RNA, 22 nt, Human
agaacugccuuuggcagaguuc

SEQ ID NO: 1525317 - RNA, 16 nt, Human
agaagccacaggccug

SEQ ID NO: 1525318 - RNA, 17 nt, Human
agaagccacaggccuga

SEQ ID NO: 1525319 - RNA, 18 nt, Human
agaagccacaggccugag

SEQ ID NO: 1525320 - RNA, 18 nt, Human
agaagauuuugaaauuuu

SEQ ID NO: 1525321 - RNA, 19 nt, Human
agaagcaacccaaauguuc

SEQ ID NO: 1525322 - RNA, 12 nt, Human
agaagcccagga

SEQ ID NO: 1525323 - RNA, 16 nt, Human
agaagcccaggaaagg

SEQ ID NO: 1525324 - RNA, 18 nt, Human
agaagcccaggaaaggcu

SEQ ID NO: 1525325 - RNA, 20 nt, Human
agaagcccaggaaaggcucc

SEQ ID NO: 1525326 - RNA, 21 nt, Human
agaagcccaggaaaggcucca

SEQ ID NO: 1525327 - RNA, 22 nt, Human
agaagcccaggaaaggcuccag

SEQ ID NO: 1525328 - RNA, 23 nt, Human
agaagcccaggaaaggcuccagg

SEQ ID NO: 1525329 - RNA, 17 nt, Human
ucugcccacucccugca

SEQ ID NO: 1525330 - RNA, 19 nt, Human
ucugcucacauaucuguca

SEQ ID NO: 1525331 - RNA, 20 nt, Human
ucugcucacauaucugucau

SEQ ID NO: 1525332 - RNA, 14 nt, Human
ucugcuucagccuc

SEQ ID NO: 1525333 - RNA, 15 nt, Human
ucugcuucagccucc

SEQ ID NO: 1525334 - RNA, 14 nt, Human
ucugccgcagcccu

SEQ ID NO: 1525335 - RNA, 15 nt, Human
ucugccgcagcccug

SEQ ID NO: 1525336 - RNA, 18 nt, Human
ucugcccacucccugcaa

SEQ ID NO: 1525337 - RNA, 21 nt, Human
ucugcccacucccugcaaccu

SEQ ID NO: 1525338 - RNA, 23 nt, Human
ucugcccacucccugcaaccuga

SEQ ID NO: 1525339 - RNA, 19 nt, Human
ucugcccuccaagaccuuc

SEQ ID NO: 1525340 - RNA, 23 nt, Human
ucugccgcagcccugcagagggc

SEQ ID NO: 1525341 - RNA, 22 nt, Human
ucugccgcagcccugcagaggg

SEQ ID NO: 1525342 - RNA, 21 nt, Human
ucugccugcccaggccccugc

SEQ ID NO: 1525343 - RNA, 22 nt, Human
ucugccugcccaggccccugcc

SEQ ID NO: 1525344 - RNA, 20 nt, Human
ucugcgucgguccuggugcc

SEQ ID NO: 1525345 - RNA, 15 nt, Human
agaaauguacagcaa

SEQ ID NO: 1525346 - RNA, 14 nt, Human
agaaauguacagca

SEQ ID NO: 1525347 - RNA, 17 nt, Human
ucugcagcaauaaagca

SEQ ID NO: 1525348 - RNA, 18 nt, Human
ucugcagcaauaaagcag

SEQ ID NO: 1525349 - RNA, 18 nt, Human
ucugcagauaaacaguag

SEQ ID NO: 1525350 - RNA, 17 nt, Human
ucugcacuccccugcug

SEQ ID NO: 1525351 - RNA, 16 nt, Human
ucugcacuccccugcu

SEQ ID NO: 1525352 - RNA, 14 nt, Human
ucugcacuccccug

SEQ ID NO: 1525353 - RNA, 15 nt, Human
ucugcacuccccugc

SEQ ID NO: 1525354 - RNA, 22 nt, Human
ucugagacucgcgacaaugcaa

SEQ ID NO: 1525355 - RNA, 21 nt, Human
ucugagacucgcgacaaugca

SEQ ID NO: 1525356 - RNA, 17 nt, Human
ucugaucauccacugug

SEQ ID NO: 1525357 - RNA, 21 nt, Human
ucugaucauccacugugccau

SEQ ID NO: 1525358 - RNA, 13 nt, Human
ucugacacacagc

SEQ ID NO: 1525359 - RNA, 14 nt, Human
ucugacacacagcu

SEQ ID NO: 1525360 - RNA, 15 nt, Human
ucugacacacagcuc

SEQ ID NO: 1525361 - RNA, 22 nt, Human
ucugaaggacauugcggacagc

SEQ ID NO: 1525362 - RNA, 21 nt, Human
ucugaaggacauugcggacag

SEQ ID NO: 1525363 - RNA, 17 nt, Human
ucuaggaaauauuuauu

SEQ ID NO: 1525364 - RNA, 16 nt, Human
ucuaggaaauauuuau

SEQ ID NO: 1525365 - RNA, 13 nt, Human
ucuagccagagga

SEQ ID NO: 1525366 - RNA, 22 nt, Human
ucuaguuguuugauucagacag

SEQ ID NO: 1525367 - RNA, 12 nt, Human
ucuaggaagacu

SEQ ID NO: 1525368 - RNA, 13 nt, Human
ucuauaaaccgaa

SEQ ID NO: 1525369 - RNA, 23 nt, Human
ucuaguuguuugauucagacagc

SEQ ID NO: 1525370 - RNA, 21 nt, Human
ucuaguuugauuaaauucuug

SEQ ID NO: 1525371 - RNA, 22 nt, Human
ucuaguuugauuaaauucuugc

SEQ ID NO: 1525372 - RNA, 13 nt, Human
ucuagauacugua

SEQ ID NO: 1525373 - RNA, 21 nt, Human
ucuagcauggcauauuuuuca

SEQ ID NO: 1525374 - RNA, 18 nt, Human
ucuagcauggcugccaau

SEQ ID NO: 1525375 - RNA, 22 nt, Human
ucuagcauggcauauuuuucac

SEQ ID NO: 1525376 - RNA, 23 nt, Human
ucuagcauggcauauuuuucaca

SEQ ID NO: 1525377 - RNA, 14 nt, Human
acuucccuuucugc

SEQ ID NO: 1525378 - RNA, 16 nt, Human
acuucaucccucuggg

SEQ ID NO: 1525379 - RNA, 17 nt, Human
ucucacuauguugccca

SEQ ID NO: 1525380 - RNA, 19 nt, Human
ucucacuauguugcccagg

SEQ ID NO: 1525381 - RNA, 23 nt, Human
acuuaacuauucaggagaguaga

SEQ ID NO: 1525382 - RNA, 12 nt, Human
acuguugcccag

SEQ ID NO: 1525383 - RNA, 20 nt, Human
acuuaaauaaugugaaacug

SEQ ID NO: 1525384 - RNA, 16 nt, Human
acuuacacuuuaugca

SEQ ID NO: 1525385 - RNA, 22 nt, Human
acuuaaucuaaauggaaccacu

SEQ ID NO: 1525386 - RNA, 19 nt, Human
acuuaaucuaaauggaacc

SEQ ID NO: 1525387 - RNA, 17 nt, Human
acuuaaucuaaauggaa

SEQ ID NO: 1525388 - RNA, 13 nt, Human
acuuaagcacacu

SEQ ID NO: 1525389 - RNA, 15 nt, Human
acuuagguguggggg

SEQ ID NO: 1525390 - RNA, 21 nt, Human
acuuacuguacaugaaaacac

SEQ ID NO: 1525391 - RNA, 17 nt, Human
acuuacacuuuaugcac

SEQ ID NO: 1525392 - RNA, 22 nt, Human
acuuacuguacaugaaaacaca

SEQ ID NO: 1525393 - RNA, 19 nt, Human
ucuacccagcgagcccugg

SEQ ID NO: 1525394 - RNA, 21 nt, Human
ucuacagaggccaugggccuc

SEQ ID NO: 1525395 - RNA, 18 nt, Human
uccugggagugagcuggu

SEQ ID NO: 1525396 - RNA, 20 nt, Human
ucuaaguaaaaccacagcag

SEQ ID NO: 1525397 - RNA, 19 nt, Human
ucuaaguaaaaccacagca

SEQ ID NO: 1525398 - RNA, 14 nt, Human
ucuaaguaaaacca

SEQ ID NO: 1525399 - RNA, 15 nt, Human
ucuaaguaaaaccac

SEQ ID NO: 1525400 - RNA, 21 nt, Human
ucuacccuggcacuauaaugu

SEQ ID NO: 1525401 - RNA, 20 nt, Human
ucuacccagcgagcccuggu

SEQ ID NO: 1525402 - RNA, 14 nt, Human
ucuacccaggugcu

SEQ ID NO: 1525403 - RNA, 19 nt, Human
ucuacccuggcacuauaau

SEQ ID NO: 1525404 - RNA, 16 nt, Human
acuguucucugcccuc

SEQ ID NO: 1525405 - RNA, 17 nt, Human
acuguucucugcccucc

SEQ ID NO: 1525406 - RNA, 19 nt, Human
acuguucucugcccuccaa

SEQ ID NO: 1525407 - RNA, 18 nt, Human
acuguucucugcccucca

SEQ ID NO: 1525408 - RNA, 22 nt, Human
acuuuuuauggcacuaguauuu

SEQ ID NO: 1525409 - RNA, 23 nt, Human
acuuuuguucuugguuuguaaau

SEQ ID NO: 1525410 - RNA, 15 nt, Human
acuuuuguucuuggu

SEQ ID NO: 1525411 - RNA, 21 nt, Human
ucuccuuguguuacuaaguuu

SEQ ID NO: 1525412 - RNA, 13 nt, Human
ucuccuuguguua

SEQ ID NO: 1525413 - RNA, 16 nt, Human
ucuccuucaccuuugu

SEQ ID NO: 1525414 - RNA, 19 nt, Human
agaaaaaauauuuucccua

SEQ ID NO: 1525415 - RNA, 18 nt, Human
ucuccuucaccuuugucc

SEQ ID NO: 1525416 - RNA, 17 nt, Human
agaaaaaauauuuuccc

SEQ ID NO: 1525417 - RNA, 14 nt, Human
ucuccuucaccuuu

SEQ ID NO: 1525418 - RNA, 15 nt, Human
ucuccuucaccuuug

SEQ ID NO: 1525419 - RNA, 13 nt, Human
acuuugaccucug

SEQ ID NO: 1525420 - RNA, 12 nt, Human
acuuugaccucu

SEQ ID NO: 1525421 - RNA, 13 nt, Human
acuuuuguucuug

SEQ ID NO: 1525422 - RNA, 12 nt, Human
acuuuuguucuu

SEQ ID NO: 1525423 - RNA, 21 nt, Human
acuuuguuaguuucuccaagc

SEQ ID NO: 1525424 - RNA, 14 nt, Human
acuuuguucuggcu

SEQ ID NO: 1525425 - RNA, 20 nt, Human
acuuuguuaguuucuccaag

SEQ ID NO: 1525426 - RNA, 12 nt, Human
acuuuaccuuuu

SEQ ID NO: 1525427 - RNA, 20 nt, Human
acuuucugaaauaacauggc

SEQ ID NO: 1525428 - RNA, 17 nt, Human
ucuccucugcugcuggc

SEQ ID NO: 1525429 - RNA, 18 nt, Human
ucuccucugcugcuggcu

SEQ ID NO: 1525430 - RNA, 15 nt, Human
ucuccuccagaguca

SEQ ID NO: 1525431 - RNA, 16 nt, Human
ucuccucugcugcugg

SEQ ID NO: 1525432 - RNA, 23 nt, Human
ucuccccagcaagugagagcugg

SEQ ID NO: 1525433 - RNA, 12 nt, Human
ucuccacccugc

SEQ ID NO: 1525434 - RNA, 18 nt, Human
ucuccaagcaggacaugg

SEQ ID NO: 1525435 - RNA, 19 nt, Human
ucuccaagcaggacaugga

SEQ ID NO: 1525436 - RNA, 17 nt, Human
ucuccgaccagacaccu

SEQ ID NO: 1525437 - RNA, 23 nt, Human
ucuccgaccagacaccuugacag

SEQ ID NO: 1525438 - RNA, 15 nt, Human
acuugucaauaaaau

SEQ ID NO: 1525439 - RNA, 19 nt, Human
acuuguggacacagcucuu

SEQ ID NO: 1525440 - RNA, 22 nt, Human
acuuguggacacagcucuucuc

SEQ ID NO: 1525441 - RNA, 20 nt, Human
acuugucuuuggacccugag

SEQ ID NO: 1525442 - RNA, 21 nt, Human
acuugucuuuggacccugagg

SEQ ID NO: 1525443 - RNA, 23 nt, Human
acuugcagacucuacagaggcca

SEQ ID NO: 1525444 - RNA, 19 nt, Human
acuugcagacucuacagag

SEQ ID NO: 1525445 - RNA, 22 nt, Human
acuugcagacucuacagaggcc

SEQ ID NO: 1525446 - RNA, 20 nt, Human
ucucacuauguugcccaggc

SEQ ID NO: 1525447 - RNA, 21 nt, Human
ucucacuauguugcccaggca

SEQ ID NO: 1525448 - RNA, 22 nt, Human
ucucacuauguugcccaggcag

SEQ ID NO: 1525449 - RNA, 23 nt, Human
ucucacuauguugcccaggcagg

SEQ ID NO: 1525450 - RNA, 15 nt, Human
ucucauuuccaagca

SEQ ID NO: 1525451 - RNA, 16 nt, Human
ucucauuucaccccuc

SEQ ID NO: 1525452 - RNA, 17 nt, Human
ucucauuucaccccucc

SEQ ID NO: 1525453 - RNA, 19 nt, Human
ucucauuucaccccucccu

SEQ ID NO: 1525454 - RNA, 22 nt, Human
ucucauuucaccccucccuuuc

SEQ ID NO: 1525455 - RNA, 14 nt, Human
ucucauuugucaca

SEQ ID NO: 1525456 - RNA, 16 nt, Human
ucucauuugucacaca

SEQ ID NO: 1525457 - RNA, 13 nt, Human
ucuccaaaauaaa

SEQ ID NO: 1525458 - RNA, 16 nt, Human
ucuccaagcaggacau

SEQ ID NO: 1525459 - RNA, 21 nt, Human
ucucaggccagcugcuugggc

SEQ ID NO: 1525460 - RNA, 17 nt, Human
ucucaggccagcugcuu

SEQ ID NO: 1525461 - RNA, 18 nt, Human
ucucaggccagcugcuug

SEQ ID NO: 1525462 - RNA, 23 nt, Human
ucucaggaaaucaaauaugcaaa

SEQ ID NO: 1525463 - RNA, 14 nt, Human
ucucaggaaaucaa

SEQ ID NO: 1525464 - RNA, 21 nt, Human
ucucaggaaaucaaauaugca

SEQ ID NO: 1525465 - RNA, 10 nt, Human
ucucaggcca

SEQ ID NO: 1525466 - RNA, 12 nt, Human
ucucaggccaaa

SEQ ID NO: 1525467 - RNA, 12 nt, Human
ucucaggccagc

SEQ ID NO: 1525468 - RNA, 13 nt, Human
ucucaggccagcu

SEQ ID NO: 1525469 - RNA, 22 nt, Human
uccuggaauaucuccgucaacu

SEQ ID NO: 1525470 - RNA, 16 nt, Human
uccuggaaaucagggu

SEQ ID NO: 1525471 - RNA, 15 nt, Human
uccuggaaauauuaa

SEQ ID NO: 1525472 - RNA, 15 nt, Human
uccugggagcuuuug

SEQ ID NO: 1525473 - RNA, 12 nt, Human
uccugggaguga

SEQ ID NO: 1525474 - RNA, 14 nt, Human
uccugggagugagc

SEQ ID NO: 1525475 - RNA, 17 nt, Human
uccugggagugagcugg

SEQ ID NO: 1525476 - RNA, 17 nt, Human
uccugcagccugcagga

SEQ ID NO: 1525477 - RNA, 12 nt, Human
uccugcaggcag

SEQ ID NO: 1525478 - RNA, 13 nt, Human
uccugcaggcagc

SEQ ID NO: 1525479 - RNA, 14 nt, Human
uccugcaggcagcc

SEQ ID NO: 1525480 - RNA, 15 nt, Human
uccugcaggcagcca

SEQ ID NO: 1525481 - RNA, 13 nt, Human
acugcacuguuuu

SEQ ID NO: 1525482 - RNA, 19 nt, Human
uccugaugcuucuucagag

SEQ ID NO: 1525483 - RNA, 20 nt, Human
uccugaugcuucuucagaga

SEQ ID NO: 1525484 - RNA, 21 nt, Human
uccugaugcuucuucagagac

SEQ ID NO: 1525485 - RNA, 21 nt, Human
acugcacuauagccuagguga

SEQ ID NO: 1525486 - RNA, 14 nt, Human
acugcacuccagcc

SEQ ID NO: 1525487 - RNA, 17 nt, Human
acugcacuccagccugg

SEQ ID NO: 1525488 - RNA, 18 nt, Human
acugcacuccagccuggg

SEQ ID NO: 1525489 - RNA, 19 nt, Human
acugcacuccagccugggu

SEQ ID NO: 1525490 - RNA, 20 nt, Human
acugcacuccagccugggug

SEQ ID NO: 1525491 - RNA, 21 nt, Human
acugauaaagaugagugagca

SEQ ID NO: 1525492 - RNA, 13 nt, Human
acugauaaagaug

SEQ ID NO: 1525493 - RNA, 14 nt, Human
acugcaccgggcca

SEQ ID NO: 1525494 - RNA, 16 nt, Human
acugcaccgggccaca

SEQ ID NO: 1525495 - RNA, 20 nt, Human
acugcacuauagccuaggug

SEQ ID NO: 1525496 - RNA, 12 nt, Human
acugaagaagca

SEQ ID NO: 1525497 - RNA, 13 nt, Human
acugacucuuaag

SEQ ID NO: 1525498 - RNA, 14 nt, Human
acugacucuuaaga

SEQ ID NO: 1525499 - RNA, 15 nt, Human
acugacucuuaagaa

SEQ ID NO: 1525500 - RNA, 16 nt, Human
acugacucuuaagaag

SEQ ID NO: 1525501 - RNA, 17 nt, Human
acugacucuuaagaaga

SEQ ID NO: 1525502 - RNA, 18 nt, Human
acugacucuuaagaagac

SEQ ID NO: 1525503 - RNA, 20 nt, Human
acugacucuuaagaagacug

SEQ ID NO: 1525504 - RNA, 13 nt, Human
acugacuucuaag

SEQ ID NO: 1525505 - RNA, 15 nt, Human
acugacuucuaagua

SEQ ID NO: 1525506 - RNA, 16 nt, Human
acugacuucuaaguaa

SEQ ID NO: 1525507 - RNA, 22 nt, Human
acugacuucuaaguaaaaccac

SEQ ID NO: 1525508 - RNA, 19 nt, Human
acugagaauguaagaacua

SEQ ID NO: 1525509 - RNA, 20 nt, Human
acugagaauguaagaacuac

SEQ ID NO: 1525510 - RNA, 15 nt, Human
acugagacagcccgg

SEQ ID NO: 1525511 - RNA, 18 nt, Human
acugagacagcccgggcu

SEQ ID NO: 1525512 - RNA, 21 nt, Human
acugagacagcccgggcucug

SEQ ID NO: 1525513 - RNA, 18 nt, Human
acugagagugaacaaauu

SEQ ID NO: 1525514 - RNA, 22 nt, Human
acugagacagcccgggcucugc

SEQ ID NO: 1525515 - RNA, 23 nt, Human
acugagacagcccgggcucugcc

SEQ ID NO: 1525516 - RNA, 22 nt, Human
acugagaugugaacacaucagc

SEQ ID NO: 1525517 - RNA, 20 nt, Human
acugagauccuuccuuuuga

SEQ ID NO: 1525518 - RNA, 17 nt, Human
acugagaugugaacaca

SEQ ID NO: 1525519 - RNA, 19 nt, Human
acucuuucuauuguuucuu

SEQ ID NO: 1525520 - RNA, 22 nt, Human
uccucuuuggucuacacugugc

SEQ ID NO: 1525521 - RNA, 23 nt, Human
uccucuuuggucuacacugugcu

SEQ ID NO: 1525522 - RNA, 19 nt, Human
uccucuuuccaucuacccu

SEQ ID NO: 1525523 - RNA, 19 nt, Human
uccucuuuggucuacacug

SEQ ID NO: 1525524 - RNA, 21 nt, Human
uccucuuuggucuacacugug

SEQ ID NO: 1525525 - RNA, 11 nt, Human
uccucccuccc

SEQ ID NO: 1525526 - RNA, 14 nt, Human
uccucccucccucu

SEQ ID NO: 1525527 - RNA, 11 nt, Human
uccucuuucca

SEQ ID NO: 1525528 - RNA, 12 nt, Human
uccucuuuccau

SEQ ID NO: 1525529 - RNA, 23 nt, Human
ucccuuuuuuggcugcugaaggc

SEQ ID NO: 1525530 - RNA, 20 nt, Human
ucccuuuuuuggcugcugaa

SEQ ID NO: 1525531 - RNA, 22 nt, Human
ucccuuuuuuggcugcugaagg

SEQ ID NO: 1525532 - RNA, 21 nt, Human
ucccuuugacgccaucccagc

SEQ ID NO: 1525533 - RNA, 19 nt, Human
ucccuuugacgccauccca

SEQ ID NO: 1525534 - RNA, 17 nt, Human
ucccuuuuuuggcugcu

SEQ ID NO: 1525535 - RNA, 19 nt, Human
ucccuuuuuuggcugcuga

SEQ ID NO: 1525536 - RNA, 12 nt, Human
acuccuggccuc

SEQ ID NO: 1525537 - RNA, 16 nt, Human
ucccuuugacgccauc

SEQ ID NO: 1525538 - RNA, 18 nt, Human
ucccuuugacgccauccc

SEQ ID NO: 1525539 - RNA, 22 nt, Human
ucccugguggcagcucaccucu

SEQ ID NO: 1525540 - RNA, 23 nt, Human
ucccugguggcagcucaccucuc

SEQ ID NO: 1525541 - RNA, 19 nt, Human
ucccuuggauuguccccga

SEQ ID NO: 1525542 - RNA, 20 nt, Human
ucccuuggauuguccccgac

SEQ ID NO: 1525543 - RNA, 13 nt, Human
uccuacucugugu

SEQ ID NO: 1525544 - RNA, 14 nt, Human
uccuacucuguguc

SEQ ID NO: 1525545 - RNA, 15 nt, Human
uccuacucuguguca

SEQ ID NO: 1525546 - RNA, 13 nt, Human
uccuaggcauuug

SEQ ID NO: 1525547 - RNA, 13 nt, Human
acuccuggccuca

SEQ ID NO: 1525548 - RNA, 14 nt, Human
acuccuggccucaa

SEQ ID NO: 1525549 - RNA, 13 nt, Human
acucaccccagcc

SEQ ID NO: 1525550 - RNA, 16 nt, Human
acucaccccagcccca

SEQ ID NO: 1525551 - RNA, 14 nt, Human
acucaccccagccc

SEQ ID NO: 1525552 - RNA, 15 nt, Human
acucaccccagcccc

SEQ ID NO: 1525553 - RNA, 14 nt, Human
acuccugcaggcag

SEQ ID NO: 1525554 - RNA, 17 nt, Human
acuccugcaggcagcca

SEQ ID NO: 1525555 - RNA, 22 nt, Human
acuccugcaggcagccaggcca

SEQ ID NO: 1525556 - RNA, 15 nt, Human
acuccugcaggcagc

SEQ ID NO: 1525557 - RNA, 16 nt, Human
acuccugcaggcagcc

SEQ ID NO: 1525558 - RNA, 18 nt, Human
ucccugguggcagcucac

SEQ ID NO: 1525559 - RNA, 19 nt, Human
ucccugguggcagcucacc

SEQ ID NO: 1525560 - RNA, 20 nt, Human
ucccugguggcagcucaccu

SEQ ID NO: 1525561 - RNA, 21 nt, Human
ucccugguggcagcucaccuc

SEQ ID NO: 1525562 - RNA, 16 nt, Human
ucccugguggcagcuc

SEQ ID NO: 1525563 - RNA, 17 nt, Human
ucccugguggcagcuca

SEQ ID NO: 1525564 - RNA, 11 nt, Human
acuccuggccu

SEQ ID NO: 1525565 - RNA, 21 nt, Human
acucuuaagaagacugcauua

SEQ ID NO: 1525566 - RNA, 16 nt, Human
acucuuauaucuauau

SEQ ID NO: 1525567 - RNA, 17 nt, Human
acucuuauaucuauauu

SEQ ID NO: 1525568 - RNA, 18 nt, Human
acucuuauaucuauauuu

SEQ ID NO: 1525569 - RNA, 22 nt, Human
acucuuauaucuauauuuuaca

SEQ ID NO: 1525570 - RNA, 14 nt, Human
acucuugaccucag

SEQ ID NO: 1525571 - RNA, 19 nt, Human
acucuuauaucuauauuuu

SEQ ID NO: 1525572 - RNA, 15 nt, Human
acucuugaccucagg

SEQ ID NO: 1525573 - RNA, 16 nt, Human
acucuugaccucaggu

SEQ ID NO: 1525574 - RNA, 22 nt, Human
uccucauaguaugguggcuggg

SEQ ID NO: 1525575 - RNA, 21 nt, Human
uccucaggagccgaagcccag

SEQ ID NO: 1525576 - RNA, 22 nt, Human
uccucaggagccgaagcccagg

SEQ ID NO: 1525577 - RNA, 23 nt, Human
uccucauacccacccccacccaa

SEQ ID NO: 1525578 - RNA, 11 nt, Human
acucugagacu

SEQ ID NO: 1525579 - RNA, 22 nt, Human
acucugagacucgcgacaaugc

SEQ ID NO: 1525580 - RNA, 16 nt, Human
acucuccuuggugucg

SEQ ID NO: 1525581 - RNA, 23 nt, Human
acucuccuuggugucgggcauga

SEQ ID NO: 1525582 - RNA, 13 nt, Human
acucuggcagcuc

SEQ ID NO: 1525583 - RNA, 15 nt, Human
acucuggcagcucag

SEQ ID NO: 1525584 - RNA, 23 nt, Human
acuccuugaaaacacuguucucu

SEQ ID NO: 1525585 - RNA, 24 nt, Human
acuccuugaaaacacuguucucug

SEQ ID NO: 1525586 - RNA, 22 nt, Human
acucucccccacccccuccccg

SEQ ID NO: 1525587 - RNA, 14 nt, Human
acucuccuccagag

SEQ ID NO: 1525588 - RNA, 17 nt, Human
acucuccuccagaguca

SEQ ID NO: 1525589 - RNA, 12 nt, Human
acucuccucugc

SEQ ID NO: 1525590 - RNA, 13 nt, Human
acucuccucugcu

SEQ ID NO: 1525591 - RNA, 14 nt, Human
acucuccucugcug

SEQ ID NO: 1525592 - RNA, 16 nt, Human
acucuccucugcugcu

SEQ ID NO: 1525593 - RNA, 18 nt, Human
acucuccuggaaauauua

SEQ ID NO: 1525594 - RNA, 15 nt, Human
acucuccuugguguc

SEQ ID NO: 1525595 - RNA, 11 nt, Human
uccagccuggg

SEQ ID NO: 1525596 - RNA, 16 nt, Human
uccagaauuucccaaa

SEQ ID NO: 1525597 - RNA, 14 nt, Human
uccagaauuuccca

SEQ ID NO: 1525598 - RNA, 15 nt, Human
uccagaauuucccaa

SEQ ID NO: 1525599 - RNA, 14 nt, Human
uccaggcuguaucc

SEQ ID NO: 1525600 - RNA, 23 nt, Human
uccaggcugggagagccuuccag

SEQ ID NO: 1525601 - RNA, 11 nt, Human
uccaggcuggu

SEQ ID NO: 1525602 - RNA, 13 nt, Human
uccaggcugguuc

SEQ ID NO: 1525603 - RNA, 15 nt, Human
acgaauauugcugau

SEQ ID NO: 1525604 - RNA, 18 nt, Human
acgaauauugcugauggu

SEQ ID NO: 1525605 - RNA, 10 nt, Human
uccaggcucc

SEQ ID NO: 1525606 - RNA, 12 nt, Human
uccaggcuccuu

SEQ ID NO: 1525607 - RNA, 22 nt, Human
uccaggcuccuuuagcgcccag

SEQ ID NO: 1525608 - RNA, 20 nt, Human
uccaggcugggagagccuuc

SEQ ID NO: 1525609 - RNA, 21 nt, Human
uccaggcugggagagccuucc

SEQ ID NO: 1525610 - RNA, 18 nt, Human
accuuuggagcaaagcug

SEQ ID NO: 1525611 - RNA, 18 nt, Human
accuuuguccccaccgca

SEQ ID NO: 1525612 - RNA, 17 nt, Human
accuuuguccccaccgc

SEQ ID NO: 1525613 - RNA, 19 nt, Human
accuugaaaacuuuaugcu

SEQ ID NO: 1525614 - RNA, 20 nt, Human
accuugaacuggguacuugu

SEQ ID NO: 1525615 - RNA, 13 nt, Human
accuuuuuuauac

SEQ ID NO: 1525616 - RNA, 20 nt, Human
accuuuuggucuggagggaa

SEQ ID NO: 1525617 - RNA, 12 nt, Human
uccacucucccc

SEQ ID NO: 1525618 - RNA, 22 nt, Human
uccacugguucuucuuggucuc

SEQ ID NO: 1525619 - RNA, 13 nt, Human
uccacucuccccc

SEQ ID NO: 1525620 - RNA, 14 nt, Human
uccacucuccccca

SEQ ID NO: 1525621 - RNA, 16 nt, Human
uccacucucccccacc

SEQ ID NO: 1525622 - RNA, 18 nt, Human
uccacucucccccacccc

SEQ ID NO: 1525623 - RNA, 21 nt, Human
uccacugugccaugugccagg

SEQ ID NO: 1525624 - RNA, 22 nt, Human
uccagugaggcucugcccuugg

SEQ ID NO: 1525625 - RNA, 23 nt, Human
uccagugaggcucugcccuuggu

SEQ ID NO: 1525626 - RNA, 18 nt, Human
uccagugagacagcucug

SEQ ID NO: 1525627 - RNA, 15 nt, Human
uccagugaggcucug

SEQ ID NO: 1525628 - RNA, 16 nt, Human
uccagugaggcucugc

SEQ ID NO: 1525629 - RNA, 17 nt, Human
uccagugaggcucugcc

SEQ ID NO: 1525630 - RNA, 16 nt, Human
uccaguaucuugaaga

SEQ ID NO: 1525631 - RNA, 18 nt, Human
uccaguaucuugaagacu

SEQ ID NO: 1525632 - RNA, 12 nt, Human
acggccaggcca

SEQ ID NO: 1525633 - RNA, 13 nt, Human
acggccaggccag

SEQ ID NO: 1525634 - RNA, 16 nt, Human
acggcucacugcagcc

SEQ ID NO: 1525635 - RNA, 17 nt, Human
acggcucacugcagccu

SEQ ID NO: 1525636 - RNA, 18 nt, Human
acggcucacugcagccuc

SEQ ID NO: 1525637 - RNA, 18 nt, Human
acggcuuuuacuuaaacc

SEQ ID NO: 1525638 - RNA, 14 nt, Human
uccaguaucuugaa

SEQ ID NO: 1525639 - RNA, 15 nt, Human
uccaguaucuugaag

SEQ ID NO: 1525640 - RNA, 20 nt, Human
acgcgugcacacaccagagc

SEQ ID NO: 1525641 - RNA, 21 nt, Human
acgcuacccgggaagggggcu

SEQ ID NO: 1525642 - RNA, 21 nt, Human
acgaauauugcugauggugca

SEQ ID NO: 1525643 - RNA, 23 nt, Human
acggagucccaccuuggcugcag

SEQ ID NO: 1525644 - RNA, 17 nt, Human
acgcuggagugcaguga

SEQ ID NO: 1525645 - RNA, 18 nt, Human
acgcuggagugcagugag

SEQ ID NO: 1525646 - RNA, 20 nt, Human
acgcuggaccuugaacuggg

SEQ ID NO: 1525647 - RNA, 23 nt, Human
acgcuggaccuugaacuggguac

SEQ ID NO: 1525648 - RNA, 15 nt, Human
acgcuggagugcagu

SEQ ID NO: 1525649 - RNA, 16 nt, Human
acgcuggagugcagug

SEQ ID NO: 1525650 - RNA, 13 nt, Human
acgcuggaccuug

SEQ ID NO: 1525651 - RNA, 11 nt, Human
acgcucucugg

SEQ ID NO: 1525652 - RNA, 14 nt, Human
acgcucucuggccu

SEQ ID NO: 1525653 - RNA, 16 nt, Human
ucccagauacuugggg

SEQ ID NO: 1525654 - RNA, 18 nt, Human
ucccagauacuugggggg

SEQ ID NO: 1525655 - RNA, 22 nt, Human
ucccagauuggcucacacugag

SEQ ID NO: 1525656 - RNA, 18 nt, Human
ucccagauuggcucacac

SEQ ID NO: 1525657 - RNA, 19 nt, Human
ucccagauuggcucacacu

SEQ ID NO: 1525658 - RNA, 20 nt, Human
ucccagauuggcucacacug

SEQ ID NO: 1525659 - RNA, 21 nt, Human
ucccagauuggcucacacuga

SEQ ID NO: 1525660 - RNA, 15 nt, Human
acuaauuuuaaaaug

SEQ ID NO: 1525661 - RNA, 15 nt, Human
acuaauuuuacuucu

SEQ ID NO: 1525662 - RNA, 18 nt, Human
acuacaaacaaaauuucu

SEQ ID NO: 1525663 - RNA, 20 nt, Human
acuacaaacaaaauuucuau

SEQ ID NO: 1525664 - RNA, 22 nt, Human
acguuucuaaaggcuaccuuug

SEQ ID NO: 1525665 - RNA, 18 nt, Human
acguggcugcuucaagga

SEQ ID NO: 1525666 - RNA, 23 nt, Human
acguggcugcuucaaggauccug

SEQ ID NO: 1525667 - RNA, 19 nt, Human
acguggcugcuucaaggau

SEQ ID NO: 1525668 - RNA, 21 nt, Human
acguggcugcuucaaggaucc

SEQ ID NO: 1525669 - RNA, 13 nt, Human
acguugugcauuu

SEQ ID NO: 1525670 - RNA, 15 nt, Human
acguugugcauuugg

SEQ ID NO: 1525671 - RNA, 14 nt, Human
acguugugcauuug

SEQ ID NO: 1525672 - RNA, 16 nt, Human
acguuucuaaaggcua

SEQ ID NO: 1525673 - RNA, 19 nt, Human
uccauccugaggcuccacu

SEQ ID NO: 1525674 - RNA, 12 nt, Human
uccauccugagg

SEQ ID NO: 1525675 - RNA, 15 nt, Human
uccauccugaggcuc

SEQ ID NO: 1525676 - RNA, 16 nt, Human
acuaucucauuuccaa

SEQ ID NO: 1525677 - RNA, 17 nt, Human
acuaucucauuuccaag

SEQ ID NO: 1525678 - RNA, 15 nt, Human
acuaucucauuucca

SEQ ID NO: 1525679 - RNA, 21 nt, Human
acuaucuaaauguugaaagau

SEQ ID NO: 1525680 - RNA, 17 nt, Human
acuauauuguuugcuaa

SEQ ID NO: 1525681 - RNA, 22 nt, Human
acuauauuguuugcuaagcauu

SEQ ID NO: 1525682 - RNA, 20 nt, Human
acuauagccuaggugacaga

SEQ ID NO: 1525683 - RNA, 22 nt, Human
acuauagccuaggugacagagu

SEQ ID NO: 1525684 - RNA, 17 nt, Human
acuauguugcccaggca

SEQ ID NO: 1525685 - RNA, 15 nt, Human
acuauguugcccagg

SEQ ID NO: 1525686 - RNA, 16 nt, Human
acuauguugcccaggc

SEQ ID NO: 1525687 - RNA, 22 nt, Human
acuauggcccuggccuagcaua

SEQ ID NO: 1525688 - RNA, 14 nt, Human
acuauguugcccag

SEQ ID NO: 1525689 - RNA, 16 nt, Human
acucaaugcacugaca

SEQ ID NO: 1525690 - RNA, 23 nt, Human
uccccacccugaaagcccugagc

SEQ ID NO: 1525691 - RNA, 15 nt, Human
uccccaccgcagaca

SEQ ID NO: 1525692 - RNA, 16 nt, Human
uccccaccgcagacag

SEQ ID NO: 1525693 - RNA, 18 nt, Human
uccccaggaggccagccu

SEQ ID NO: 1525694 - RNA, 10 nt, Human
ucccagcucc

SEQ ID NO: 1525695 - RNA, 16 nt, Human
ucccccagccccaucc

SEQ ID NO: 1525696 - RNA, 13 nt, Human
ucccccagcccca

SEQ ID NO: 1525697 - RNA, 15 nt, Human
ucccccagccccauc

SEQ ID NO: 1525698 - RNA, 23 nt, Human
uccccaggaggccagccuugacc

SEQ ID NO: 1525699 - RNA, 20 nt, Human
uccccaggaggccagccuug

SEQ ID NO: 1525700 - RNA, 21 nt, Human
uccccaggaggccagccuuga

SEQ ID NO: 1525701 - RNA, 20 nt, Human
ucacagaugggugcuuggag

SEQ ID NO: 1525702 - RNA, 13 nt, Human
ucacagccucuga

SEQ ID NO: 1525703 - RNA, 16 nt, Human
ucacaguucucuccuu

SEQ ID NO: 1525704 - RNA, 20 nt, Human
ucacaguucucuccuucuuc

SEQ ID NO: 1525705 - RNA, 16 nt, Human
ucaauucuugccaaau

SEQ ID NO: 1525706 - RNA, 13 nt, Human
ucaauuuccaaga

SEQ ID NO: 1525707 - RNA, 18 nt, Human
ucaauuuccaagagcuga

SEQ ID NO: 1525708 - RNA, 20 nt, Human
ucaauuuccaagagcugagg

SEQ ID NO: 1525709 - RNA, 17 nt, Human
ucacaaaggaugcccaa

SEQ ID NO: 1525710 - RNA, 15 nt, Human
accaccacacccagc

SEQ ID NO: 1525711 - RNA, 20 nt, Human
accaccacacccagcccacu

SEQ ID NO: 1525712 - RNA, 18 nt, Human
accacaugugcacaugca

SEQ ID NO: 1525713 - RNA, 17 nt, Human
accacaucuugcucugc

SEQ ID NO: 1525714 - RNA, 18 nt, Human
accacaucuugcucugcu

SEQ ID NO: 1525715 - RNA, 19 nt, Human
accacaucuugcucugcug

SEQ ID NO: 1525716 - RNA, 14 nt, Human
ucacauaucuagua

SEQ ID NO: 1525717 - RNA, 12 nt, Human
ucaccucaugga

SEQ ID NO: 1525718 - RNA, 13 nt, Human
ucaccucauggaa

SEQ ID NO: 1525719 - RNA, 14 nt, Human
ucaccucauggaau

SEQ ID NO: 1525720 - RNA, 22 nt, Human
accagcgugugacuacuccccc

SEQ ID NO: 1525721 - RNA, 16 nt, Human
accacuacauucuguu

SEQ ID NO: 1525722 - RNA, 17 nt, Human
accacuacauucuguua

SEQ ID NO: 1525723 - RNA, 14 nt, Human
accagucugacugu

SEQ ID NO: 1525724 - RNA, 17 nt, Human
accaguguuguggauuu

SEQ ID NO: 1525725 - RNA, 15 nt, Human
accaguguuguggau

SEQ ID NO: 1525726 - RNA, 10 nt, Human
ucacuugagu

SEQ ID NO: 1525727 - RNA, 23 nt, Human
ucacuugaacccgggaggcagag

SEQ ID NO: 1525728 - RNA, 23 nt, Human
ucacuguugcccaggcuggcgug

SEQ ID NO: 1525729 - RNA, 15 nt, Human
ucacugcagccucaa

SEQ ID NO: 1525730 - RNA, 17 nt, Human
ucacuauguugcccagg

SEQ ID NO: 1525731 - RNA, 17 nt, Human
ucacugagacagcccgg

SEQ ID NO: 1525732 - RNA, 21 nt, Human
ucacugagacagcccgggcuc

SEQ ID NO: 1525733 - RNA, 22 nt, Human
ucacugagacagcccgggcucu

SEQ ID NO: 1525734 - RNA, 14 nt, Human
ucacugcagccuca

SEQ ID NO: 1525735 - RNA, 18 nt, Human
ucaaauugugugaaaggu

SEQ ID NO: 1525736 - RNA, 14 nt, Human
acauuccugaacag

SEQ ID NO: 1525737 - RNA, 15 nt, Human
acauuccugaacagg

SEQ ID NO: 1525738 - RNA, 14 nt, Human
acauuccugaugcu

SEQ ID NO: 1525739 - RNA, 19 nt, Human
acauguccaagaagcccag

SEQ ID NO: 1525740 - RNA, 15 nt, Human
acauguccaagaagc

SEQ ID NO: 1525741 - RNA, 23 nt, Human
acauguaauuaaguacuauguau

SEQ ID NO: 1525742 - RNA, 13 nt, Human
ucaaauuucuaaa

SEQ ID NO: 1525743 - RNA, 14 nt, Human
ucaaauuucuaaau

SEQ ID NO: 1525744 - RNA, 20 nt, Human
ucaacugcaucaagauguga

SEQ ID NO: 1525745 - RNA, 14 nt, Human
ucaaccagcagaug

SEQ ID NO: 1525746 - RNA, 15 nt, Human
acaugggacauuugc

SEQ ID NO: 1525747 - RNA, 20 nt, Human
acaugggacauuugcucaug

SEQ ID NO: 1525748 - RNA, 21 nt, Human
acaugggacauuugcucaugg

SEQ ID NO: 1525749 - RNA, 11 nt, Human
acaugggacau

SEQ ID NO: 1525750 - RNA, 14 nt, Human
acaugggacauuug

SEQ ID NO: 1525751 - RNA, 14 nt, Human
acauggaaguacua

SEQ ID NO: 1525752 - RNA, 15 nt, Human
acauguaauuaagua

SEQ ID NO: 1525753 - RNA, 17 nt, Human
acauguaauuaaguacu

SEQ ID NO: 1525754 - RNA, 19 nt, Human
acauguaauuaaguacuau

SEQ ID NO: 1525755 - RNA, 21 nt, Human
acauguaauuaaguacuaugu

SEQ ID NO: 1525756 - RNA, 22 nt, Human
acauguaauuaaguacuaugua

SEQ ID NO: 1525757 - RNA, 22 nt, Human
acaugcuacacacugcauguuu

SEQ ID NO: 1525758 - RNA, 21 nt, Human
acaugcuacacacugcauguu

SEQ ID NO: 1525759 - RNA, 15 nt, Human
acaugcuacacacug

SEQ ID NO: 1525760 - RNA, 23 nt, Human
acaugagguacugagagugaaca

SEQ ID NO: 1525761 - RNA, 12 nt, Human
acagucccugcc

SEQ ID NO: 1525762 - RNA, 20 nt, Human
acaugagguacugagaguga

SEQ ID NO: 1525763 - RNA, 15 nt, Human
ucaauauuucagaua

SEQ ID NO: 1525764 - RNA, 19 nt, Human
ucaauauuucagauaauca

SEQ ID NO: 1525765 - RNA, 23 nt, Human
ucaaugaaugaaugaauggcuaa

SEQ ID NO: 1525766 - RNA, 19 nt, Human
acauucuuccaaaaagauu

SEQ ID NO: 1525767 - RNA, 22 nt, Human
ucaauaucuuuuuuuuaauaaa

SEQ ID NO: 1525768 - RNA, 18 nt, Human
ucaauauccaaaccaaau

SEQ ID NO: 1525769 - RNA, 17 nt, Human
ucaagaaaacaacuuca

SEQ ID NO: 1525770 - RNA, 21 nt, Human
acauuuuuuaaaugcaccugg

SEQ ID NO: 1525771 - RNA, 17 nt, Human
acauuuuuuaaaugcac

SEQ ID NO: 1525772 - RNA, 16 nt, Human
acauuuuuuaaaugca

SEQ ID NO: 1525773 - RNA, 14 nt, Human
acauuuuuuaaaug

SEQ ID NO: 1525774 - RNA, 23 nt, Human
acauuuuuaagugcugcauuuaa

SEQ ID NO: 1525775 - RNA, 22 nt, Human
acauuuuuaagugcugcauuua

SEQ ID NO: 1525776 - RNA, 21 nt, Human
acauuuuuaagugcugcauuu

SEQ ID NO: 1525777 - RNA, 20 nt, Human
acauuuuauuuuauuaugca

SEQ ID NO: 1525778 - RNA, 19 nt, Human
acauuuuauuuuauuaugc

SEQ ID NO: 1525779 - RNA, 14 nt, Human
acauuuuauuuuau

SEQ ID NO: 1525780 - RNA, 18 nt, Human
acauuuuauuuuauuaug

SEQ ID NO: 1525781 - RNA, 21 nt, Human
ucagauuugaacucuucaauc

SEQ ID NO: 1525782 - RNA, 12 nt, Human
ucagauuugaac

SEQ ID NO: 1525783 - RNA, 18 nt, Human
accaguguuguggauuua

SEQ ID NO: 1525784 - RNA, 15 nt, Human
ucagcaaaagaugcu

SEQ ID NO: 1525785 - RNA, 23 nt, Human
acccaggagccccgaggccuucu

SEQ ID NO: 1525786 - RNA, 17 nt, Human
accccacacacgccaga

SEQ ID NO: 1525787 - RNA, 13 nt, Human
accccagccccaa

SEQ ID NO: 1525788 - RNA, 22 nt, Human
accccagccccaaaacucuccu

SEQ ID NO: 1525789 - RNA, 18 nt, Human
accccaucucuacaaaaa

SEQ ID NO: 1525790 - RNA, 14 nt, Human
accccugcuucuga

SEQ ID NO: 1525791 - RNA, 12 nt, Human
ucagcuccagcu

SEQ ID NO: 1525792 - RNA, 18 nt, Human
ucagcuccacuuucagug

SEQ ID NO: 1525793 - RNA, 19 nt, Human
ucagcggggacagcuccuu

SEQ ID NO: 1525794 - RNA, 20 nt, Human
ucagcggggacagcuccuuc

SEQ ID NO: 1525795 - RNA, 21 nt, Human
ucagcggggacagcuccuucu

SEQ ID NO: 1525796 - RNA, 23 nt, Human
ucagcggggacagcuccuucugu

SEQ ID NO: 1525797 - RNA, 16 nt, Human
acccugaaagcccuga

SEQ ID NO: 1525798 - RNA, 18 nt, Human
acccugaaagcccugagc

SEQ ID NO: 1525799 - RNA, 14 nt, Human
acccugaggcccag

SEQ ID NO: 1525800 - RNA, 15 nt, Human
accgaaaacguggcu

SEQ ID NO: 1525801 - RNA, 17 nt, Human
acccuugccgucuaccu

SEQ ID NO: 1525802 - RNA, 23 nt, Human
acccuuguggucccaccccacac

SEQ ID NO: 1525803 - RNA, 17 nt, Human
acccugcccugugggcc

SEQ ID NO: 1525804 - RNA, 22 nt, Human
acccugcccugugggcccccaa

SEQ ID NO: 1525805 - RNA, 15 nt, Human
acccugaggcccaga

SEQ ID NO: 1525806 - RNA, 16 nt, Human
acccugaggcccagag

SEQ ID NO: 1525807 - RNA, 17 nt, Human
acccugaggcccagagg

SEQ ID NO: 1525808 - RNA, 15 nt, Human
acccugcccuguggg

SEQ ID NO: 1525809 - RNA, 17 nt, Human
ucaggguuggccccugc

SEQ ID NO: 1525810 - RNA, 23 nt, Human
ucagguaacaggcagauacagga

SEQ ID NO: 1525811 - RNA, 21 nt, Human
ucagguaacaggcagauacag

SEQ ID NO: 1525812 - RNA, 22 nt, Human
ucagguaacaggcagauacagg

SEQ ID NO: 1525813 - RNA, 14 nt, Human
acccggccccugcu

SEQ ID NO: 1525814 - RNA, 15 nt, Human
acccggccccugcug

SEQ ID NO: 1525815 - RNA, 16 nt, Human
acccggccccugcugg

SEQ ID NO: 1525816 - RNA, 22 nt, Human
acccggccccugcugguucagg

SEQ ID NO: 1525817 - RNA, 17 nt, Human
acccggccccugcuggu

SEQ ID NO: 1525818 - RNA, 20 nt, Human
acccggccccugcugguuca

SEQ ID NO: 1525819 - RNA, 17 nt, Human
acccgggaggcagaggu

SEQ ID NO: 1525820 - RNA, 12 nt, Human
acccgggaaggg

SEQ ID NO: 1525821 - RNA, 13 nt, Human
acccgggaagggg

SEQ ID NO: 1525822 - RNA, 21 nt, Human
ucaggccaggcccucugccca

SEQ ID NO: 1525823 - RNA, 22 nt, Human
ucaggccaggcccucugcccac

SEQ ID NO: 1525824 - RNA, 14 nt, Human
ucagcuccagcuca

SEQ ID NO: 1525825 - RNA, 15 nt, Human
ucagcuccagcucac

SEQ ID NO: 1525826 - RNA, 21 nt, Human
ucagcuuguaaauagcucagg

SEQ ID NO: 1525827 - RNA, 22 nt, Human
ucagcuuguaaauagcucaggu

SEQ ID NO: 1525828 - RNA, 23 nt, Human
ucaggccaggcccucugcccacu

SEQ ID NO: 1525829 - RNA, 19 nt, Human
ucagggucccugguggcag

SEQ ID NO: 1525830 - RNA, 16 nt, Human
ucaggguuggccccug

SEQ ID NO: 1525831 - RNA, 16 nt, Human
accucaaaaugucuaa

SEQ ID NO: 1525832 - RNA, 16 nt, Human
accuagggugauauua

SEQ ID NO: 1525833 - RNA, 17 nt, Human
accgcagacaggaccag

SEQ ID NO: 1525834 - RNA, 12 nt, Human
accgcagacagg

SEQ ID NO: 1525835 - RNA, 16 nt, Human
accgcagacaggacca

SEQ ID NO: 1525836 - RNA, 20 nt, Human
accucccacaaaggagagcu

SEQ ID NO: 1525837 - RNA, 16 nt, Human
ucaugaaagauucaau

SEQ ID NO: 1525838 - RNA, 17 nt, Human
ucaugaaagauucaaug

SEQ ID NO: 1525839 - RNA, 15 nt, Human
ucaguuuuugugaaa

SEQ ID NO: 1525840 - RNA, 17 nt, Human
ucaguuuuugugaaaag

SEQ ID NO: 1525841 - RNA, 22 nt, Human
ucauaaaaagccugcaauuuca

SEQ ID NO: 1525842 - RNA, 12 nt, Human
ucaguggcagcu

SEQ ID NO: 1525843 - RNA, 13 nt, Human
ucaguggcagcug

SEQ ID NO: 1525844 - RNA, 16 nt, Human
ucagugccuuauggaa

SEQ ID NO: 1525845 - RNA, 18 nt, Human
ucagugccuuauggaaca

SEQ ID NO: 1525846 - RNA, 11 nt, Human
ucaguggcagc

SEQ ID NO: 1525847 - RNA, 12 nt, Human
ucagugccacua

SEQ ID NO: 1525848 - RNA, 17 nt, Human
accgaaaacguggcugc

SEQ ID NO: 1525849 - RNA, 19 nt, Human
accgaaaacguggcugcuu

SEQ ID NO: 1525850 - RNA, 20 nt, Human
accgaaaacguggcugcuuc

SEQ ID NO: 1525851 - RNA, 9 nt, Human
ucagugccu

SEQ ID NO: 1525852 - RNA, 10 nt, Human
ucagugccuu

SEQ ID NO: 1525853 - RNA, 11 nt, Human
ucagugccuua

SEQ ID NO: 1525854 - RNA, 12 nt, Human
ucagugccuuau

SEQ ID NO: 1525855 - RNA, 14 nt, Human
ucagugccuuaugg

SEQ ID NO: 1525856 - RNA, 15 nt, Human
ucagugccuuaugga

SEQ ID NO: 1525857 - RNA, 15 nt, Human
ucauauuuucaugcu

SEQ ID NO: 1525858 - RNA, 16 nt, Human
ucauauuuacuucuua

SEQ ID NO: 1525859 - RNA, 15 nt, Human
ucauauuuacuucuu

SEQ ID NO: 1525860 - RNA, 23 nt, Human
ucauauuuacuucuuauacauuu

SEQ ID NO: 1525861 - RNA, 21 nt, Human
ucauaguaugguggcuggguu

SEQ ID NO: 1525862 - RNA, 18 nt, Human
ucauauaagauucauauu

SEQ ID NO: 1525863 - RNA, 14 nt, Human
ucauaaccuagccu

SEQ ID NO: 1525864 - RNA, 15 nt, Human
ucauaguaugguggc

SEQ ID NO: 1525865 - RNA, 18 nt, Human
ucauaguaugguggcugg

SEQ ID NO: 1525866 - RNA, 19 nt, Human
ucauaguaugguggcuggg

SEQ ID NO: 1525867 - RNA, 20 nt, Human
uaacgauaaaagacagugaa

SEQ ID NO: 1525868 - RNA, 14 nt, Human
uaacuucaccauau

SEQ ID NO: 1525869 - RNA, 17 nt, Human
uaacuuccaauuuacau

SEQ ID NO: 1525870 - RNA, 21 nt, Human
uaacuucacauauugauuucc

SEQ ID NO: 1525871 - RNA, 16 nt, Human
uaacuuucugaaauaa

SEQ ID NO: 1525872 - RNA, 22 nt, Human
aauaucacuugucaauaaaauc

SEQ ID NO: 1525873 - RNA, 13 nt, Human
aauaucagacuuu

SEQ ID NO: 1525874 - RNA, 18 nt, Human
uaacauggacaugaucuu

SEQ ID NO: 1525875 - RNA, 23 nt, Human
uaacauggacaugaucuucuuua

SEQ ID NO: 1525876 - RNA, 17 nt, Human
uaacauguaauuaagua

SEQ ID NO: 1525877 - RNA, 16 nt, Human
aauagucaaauugugu

SEQ ID NO: 1525878 - RNA, 20 nt, Human
aauaguauuugagaguucua

SEQ ID NO: 1525879 - RNA, 22 nt, Human
aauaguauuugagaguucuaaa

SEQ ID NO: 1525880 - RNA, 19 nt, Human
aauagucaaauugugugaa

SEQ ID NO: 1525881 - RNA, 23 nt, Human
aauaguauuugagaguucuaaau

SEQ ID NO: 1525882 - RNA, 16 nt, Human
aauaguggugugauuu

SEQ ID NO: 1525883 - RNA, 22 nt, Human
aauaguggugugauuuggggau

SEQ ID NO: 1525884 - RNA, 13 nt, Human
aauaguuggcuag

SEQ ID NO: 1525885 - RNA, 18 nt, Human
aauauuuauuuuaauaau

SEQ ID NO: 1525886 - RNA, 19 nt, Human
aauauuuauuuuaauaaug

SEQ ID NO: 1525887 - RNA, 14 nt, Human
aauauuucagauaa

SEQ ID NO: 1525888 - RNA, 17 nt, Human
aauauuguguugugaau

SEQ ID NO: 1525889 - RNA, 18 nt, Human
aauauuguguugugaaug

SEQ ID NO: 1525890 - RNA, 17 nt, Human
aauauugauaugcuuau

SEQ ID NO: 1525891 - RNA, 21 nt, Human
aauaugccccauucaacaucu

SEQ ID NO: 1525892 - RNA, 24 nt, Human
aauaugccccauucaacaucuagu

SEQ ID NO: 1525893 - RNA, 15 nt, Human
uaagagaaaugagcu

SEQ ID NO: 1525894 - RNA, 17 nt, Human
aauaugcacacauuuuu

SEQ ID NO: 1525895 - RNA, 16 nt, Human
aauaugcacacauuuu

SEQ ID NO: 1525896 - RNA, 22 nt, Human
aauaugcacacauuuuuuaaau

SEQ ID NO: 1525897 - RNA, 22 nt, Human
aaucaggguuaguauuguccag

SEQ ID NO: 1525898 - RNA, 16 nt, Human
aaucaggguuaguauu

SEQ ID NO: 1525899 - RNA, 21 nt, Human
aaucaggguuaguauugucca

SEQ ID NO: 1525900 - RNA, 22 nt, Human
uaagcagauggaaugcuguguu

SEQ ID NO: 1525901 - RNA, 22 nt, Human
uaagcuguuacugucuucagua

SEQ ID NO: 1525902 - RNA, 21 nt, Human
uaagcaaguuaaguguccucc

SEQ ID NO: 1525903 - RNA, 18 nt, Human
uaagcacacuugacauca

SEQ ID NO: 1525904 - RNA, 13 nt, Human
uaauguacugcau

SEQ ID NO: 1525905 - RNA, 18 nt, Human
uaaugucacaggcagguc

SEQ ID NO: 1525906 - RNA, 11 nt, Human
uaaugucucug

SEQ ID NO: 1525907 - RNA, 19 nt, Human
uaaugucucugugagacuc

SEQ ID NO: 1525908 - RNA, 17 nt, Human
aaugaaacauuuuguca

SEQ ID NO: 1525909 - RNA, 19 nt, Human
aaugaaacacucaguuguu

SEQ ID NO: 1525910 - RNA, 16 nt, Human
aaugaaagacuguaca

SEQ ID NO: 1525911 - RNA, 17 nt, Human
aaugaaagacuguacaa

SEQ ID NO: 1525912 - RNA, 17 nt, Human
aaugaaaccugugucuc

SEQ ID NO: 1525913 - RNA, 22 nt, Human
aaugaaugucagugugacugau

SEQ ID NO: 1525914 - RNA, 22 nt, Human
aaugaauggcuaagcaaaaugu

SEQ ID NO: 1525915 - RNA, 14 nt, Human
aaugaaugucagug

SEQ ID NO: 1525916 - RNA, 18 nt, Human
aaugaaagacuguacaaa

SEQ ID NO: 1525917 - RNA, 13 nt, Human
aaugaaugucagu

SEQ ID NO: 1525918 - RNA, 15 nt, Human
uaauauuuuuaauua

SEQ ID NO: 1525919 - RNA, 14 nt, Human
uaauauuuuuaauu

SEQ ID NO: 1525920 - RNA, 17 nt, Human
uaaugaaugaaacauuu

SEQ ID NO: 1525921 - RNA, 12 nt, Human
uaauagagcaaa

SEQ ID NO: 1525922 - RNA, 21 nt, Human
uaauagagcaaaauugaugug

SEQ ID NO: 1525923 - RNA, 22 nt, Human
uaauagacaauuuauuauggca

SEQ ID NO: 1525924 - RNA, 18 nt, Human
uaauagacaauuuauuau

SEQ ID NO: 1525925 - RNA, 16 nt, Human
uaauagacaauuuauu

SEQ ID NO: 1525926 - RNA, 21 nt, Human
uaauacaccacuacauucugu

SEQ ID NO: 1525927 - RNA, 19 nt, Human
uaauacaccacuacauucu

SEQ ID NO: 1525928 - RNA, 18 nt, Human
uaauacaccacuacauuc

SEQ ID NO: 1525929 - RNA, 16 nt, Human
uaauacaccacuacau

SEQ ID NO: 1525930 - RNA, 12 nt, Human
aaucaugaauua

SEQ ID NO: 1525931 - RNA, 15 nt, Human
aaucaugaauuaguu

SEQ ID NO: 1525932 - RNA, 16 nt, Human
uaagcuuguauuccuu

SEQ ID NO: 1525933 - RNA, 19 nt, Human
uaaguaaugauaacuggaa

SEQ ID NO: 1525934 - RNA, 13 nt, Human
uaaguaaaugcua

SEQ ID NO: 1525935 - RNA, 21 nt, Human
uaaguauucuuauuuaaugaa

SEQ ID NO: 1525936 - RNA, 20 nt, Human
uaaguauucuuauuuaauga

SEQ ID NO: 1525937 - RNA, 16 nt, Human
uaaguauucuaaauuu

SEQ ID NO: 1525938 - RNA, 19 nt, Human
uaaguauucuuauuuaaug

SEQ ID NO: 1525939 - RNA, 13 nt, Human
uaaguacuaugua

SEQ ID NO: 1525940 - RNA, 16 nt, Human
uaaguacuauguauca

SEQ ID NO: 1525941 - RNA, 17 nt, Human
uaaguacuauguaucaa

SEQ ID NO: 1525942 - RNA, 19 nt, Human
uaaguacuauguaucaaug

SEQ ID NO: 1525943 - RNA, 19 nt, Human
aaucuuauaauuuaaaaua

SEQ ID NO: 1525944 - RNA, 19 nt, Human
aaucuacacuccagugaga

SEQ ID NO: 1525945 - RNA, 23 nt, Human
aaucauuaggugugacugaauuu

SEQ ID NO: 1525946 - RNA, 17 nt, Human
aaucauuaggugugacu

SEQ ID NO: 1525947 - RNA, 15 nt, Human
aaucauuagguguga

SEQ ID NO: 1525948 - RNA, 19 nt, Human
aauguauguguaaguauuc

SEQ ID NO: 1525949 - RNA, 22 nt, Human
aauguauuacaguggggaauga

SEQ ID NO: 1525950 - RNA, 20 nt, Human
aauguauguguaaguauucu

SEQ ID NO: 1525951 - RNA, 14 nt, Human
aaugugaaacugga

SEQ ID NO: 1525952 - RNA, 19 nt, Human
aaugugaaaagaaaaauga

SEQ ID NO: 1525953 - RNA, 15 nt, Human
aaugugaaacuggau

SEQ ID NO: 1525954 - RNA, 20 nt, Human
uacaucccuuaccugggaaa

SEQ ID NO: 1525955 - RNA, 24 nt, Human
uacauaaugcgugcauaccacuuu

SEQ ID NO: 1525956 - RNA, 23 nt, Human
uacauaaugcgugcauaccacuu

SEQ ID NO: 1525957 - RNA, 23 nt, Human
uacaggucauauuaauauauuuc

SEQ ID NO: 1525958 - RNA, 16 nt, Human
uacaggugugagucac

SEQ ID NO: 1525959 - RNA, 15 nt, Human
aauuaagagagucua

SEQ ID NO: 1525960 - RNA, 13 nt, Human
uacauucuguuaa

SEQ ID NO: 1525961 - RNA, 17 nt, Human
uacauuguaaauaguau

SEQ ID NO: 1525962 - RNA, 13 nt, Human
aauguuaagcaga

SEQ ID NO: 1525963 - RNA, 11 nt, Human
aauuaacuuuu

SEQ ID NO: 1525964 - RNA, 14 nt, Human
uacacuaagagaga

SEQ ID NO: 1525965 - RNA, 18 nt, Human
uacacuaagagagaauga

SEQ ID NO: 1525966 - RNA, 23 nt, Human
uacacauuuuauuuuauuaugca

SEQ ID NO: 1525967 - RNA, 15 nt, Human
uacacuaaaagguga

SEQ ID NO: 1525968 - RNA, 19 nt, Human
uacacauuuuauuuuauua

SEQ ID NO: 1525969 - RNA, 22 nt, Human
uacacauuuuauuuuauuaugc

SEQ ID NO: 1525970 - RNA, 21 nt, Human
uacacauuuuauuuuauuaug

SEQ ID NO: 1525971 - RNA, 22 nt, Human
uacagacaacaaaccuguuucu

SEQ ID NO: 1525972 - RNA, 19 nt, Human
aauggcacagcccaaagaa

SEQ ID NO: 1525973 - RNA, 16 nt, Human
aauggcagccuuggca

SEQ ID NO: 1525974 - RNA, 12 nt, Human
aauggcagccuu

SEQ ID NO: 1525975 - RNA, 17 nt, Human
aauggcacagcccaaag

SEQ ID NO: 1525976 - RNA, 20 nt, Human
aauggcacagcccaaagaag

SEQ ID NO: 1525977 - RNA, 20 nt, Human
aauggaaaugggcagagcag

SEQ ID NO: 1525978 - RNA, 21 nt, Human
aauggaaaugggcagagcaga

SEQ ID NO: 1525979 - RNA, 14 nt, Human
aauggaaccacucu

SEQ ID NO: 1525980 - RNA, 23 nt, Human
aauggacguguuaugacuccaga

SEQ ID NO: 1525981 - RNA, 20 nt, Human
aauggacuaacuugucuuug

SEQ ID NO: 1525982 - RNA, 16 nt, Human
aaugcuguauuuuaaa

SEQ ID NO: 1525983 - RNA, 13 nt, Human
aaugcuguguuaa

SEQ ID NO: 1525984 - RNA, 13 nt, Human
aaugcccagcccc

SEQ ID NO: 1525985 - RNA, 11 nt, Human
aaugcccagcc

SEQ ID NO: 1525986 - RNA, 12 nt, Human
aaugcccagccc

SEQ ID NO: 1525987 - RNA, 21 nt, Human
aaugccauggacagaagaagg

SEQ ID NO: 1525988 - RNA, 22 nt, Human
aaugcacuuuguucuggcucuu

SEQ ID NO: 1525989 - RNA, 21 nt, Human
uacaaugcugugcccuaaagu

SEQ ID NO: 1525990 - RNA, 18 nt, Human
aaugaccuuucaauagga

SEQ ID NO: 1525991 - RNA, 16 nt, Human
aaugaccuuucaauag

SEQ ID NO: 1525992 - RNA, 17 nt, Human
aaugaccuuucaauagg

SEQ ID NO: 1525993 - RNA, 20 nt, Human
aaugaccuuucaauaggaaa

SEQ ID NO: 1525994 - RNA, 21 nt, Human
aaugcacuuuguucuggcucu

SEQ ID NO: 1525995 - RNA, 11 nt, Human
aauuacaggaa

SEQ ID NO: 1525996 - RNA, 15 nt, Human
aauuagccaagugug

SEQ ID NO: 1525997 - RNA, 10 nt, Human
uaccuguccc

SEQ ID NO: 1525998 - RNA, 13 nt, Human
uaccugucccccu

SEQ ID NO: 1525999 - RNA, 14 nt, Human
uaccugucccccug

SEQ ID NO: 1526000 - RNA, 16 nt, Human
uaccugucccccugac

SEQ ID NO: 1526001 - RNA, 17 nt, Human
uaccugucccccugaca

SEQ ID NO: 1526002 - RNA, 23 nt, Human
uaccugccaggaagccagcaggc

SEQ ID NO: 1526003 - RNA, 18 nt, Human
uaccugccaggaagccag

SEQ ID NO: 1526004 - RNA, 20 nt, Human
uaccugccaggaagccagca

SEQ ID NO: 1526005 - RNA, 19 nt, Human
uacauuguacgaagaguau

SEQ ID NO: 1526006 - RNA, 21 nt, Human
aauuaguacagaaauauccau

SEQ ID NO: 1526007 - RNA, 21 nt, Human
aauuauuuuguucauacauau

SEQ ID NO: 1526008 - RNA, 22 nt, Human
aauuauuuuguucauacauauu

SEQ ID NO: 1526009 - RNA, 16 nt, Human
aauuauuuuguucaua

SEQ ID NO: 1526010 - RNA, 18 nt, Human
aauuauuuuguucauaca

SEQ ID NO: 1526011 - RNA, 19 nt, Human
aauuauuuuguucauacau

SEQ ID NO: 1526012 - RNA, 20 nt, Human
aauuauuuuguucauacaua

SEQ ID NO: 1526013 - RNA, 18 nt, Human
aauuccaagugauugaaa

SEQ ID NO: 1526014 - RNA, 15 nt, Human
aauucagaaggaucu

SEQ ID NO: 1526015 - RNA, 22 nt, Human
aauuccacuuauaggaauugac

SEQ ID NO: 1526016 - RNA, 14 nt, Human
aauuccccacccug

SEQ ID NO: 1526017 - RNA, 12 nt, Human
aauuccccagau

SEQ ID NO: 1526018 - RNA, 13 nt, Human
aauugauguguuu

SEQ ID NO: 1526019 - RNA, 14 nt, Human
aauugauguguuua

SEQ ID NO: 1526020 - RNA, 22 nt, Human
aauugacccacaagaaaugaaa

SEQ ID NO: 1526021 - RNA, 22 nt, Human
uacuguacaugaaaacacauuu

SEQ ID NO: 1526022 - RNA, 21 nt, Human
uacuguacaugaaaacacauu

SEQ ID NO: 1526023 - RNA, 23 nt, Human
uacuguaauuugugauacaaugc

SEQ ID NO: 1526024 - RNA, 14 nt, Human
uacuguaagaaaau

SEQ ID NO: 1526025 - RNA, 18 nt, Human
uacuguaauuugugauac

SEQ ID NO: 1526026 - RNA, 20 nt, Human
uacuguaauuugugauacaa

SEQ ID NO: 1526027 - RNA, 19 nt, Human
uacuguaauuugugauaca

SEQ ID NO: 1526028 - RNA, 21 nt, Human
uacucugugucagguggggca

SEQ ID NO: 1526029 - RNA, 12 nt, Human
uacucuguguca

SEQ ID NO: 1526030 - RNA, 16 nt, Human
uacuggagaaaaugga

SEQ ID NO: 1526031 - RNA, 17 nt, Human
uacuacuccuguaggaa

SEQ ID NO: 1526032 - RNA, 23 nt, Human
uacuauggcccuggccuagcaua

SEQ ID NO: 1526033 - RNA, 12 nt, Human
uacuauguauca

SEQ ID NO: 1526034 - RNA, 13 nt, Human
uacuauguaucaa

SEQ ID NO: 1526035 - RNA, 14 nt, Human
uacuauguaucaau

SEQ ID NO: 1526036 - RNA, 22 nt, Human
uacucuccuggaaauauuaaga

SEQ ID NO: 1526037 - RNA, 23 nt, Human
uacucuccuggaaauauuaagaa

SEQ ID NO: 1526038 - RNA, 16 nt, Human
uacguugugcauuugg

SEQ ID NO: 1526039 - RNA, 15 nt, Human
uacguugugcauuug

SEQ ID NO: 1526040 - RNA, 14 nt, Human
uacguacacauuuu

SEQ ID NO: 1526041 - RNA, 13 nt, Human
uacguacacauuu

SEQ ID NO: 1526042 - RNA, 12 nt, Human
uacguacacauu

SEQ ID NO: 1526043 - RNA, 22 nt, Human
uacgccaggggaaaaucagccu

SEQ ID NO: 1526044 - RNA, 16 nt, Human
acagccucuuagaugc

SEQ ID NO: 1526045 - RNA, 23 nt, Human
uauggcuuuugugcauuaucuag

SEQ ID NO: 1526046 - RNA, 17 nt, Human
uauggcuuuugugcauu

SEQ ID NO: 1526047 - RNA, 21 nt, Human
uauggcuuuugugcauuaucu

SEQ ID NO: 1526048 - RNA, 18 nt, Human
uauggcuuuugugcauua

SEQ ID NO: 1526049 - RNA, 15 nt, Human
uaugcuuauacacuu

SEQ ID NO: 1526050 - RNA, 19 nt, Human
uaugccccauucaacaucu

SEQ ID NO: 1526051 - RNA, 17 nt, Human
uaugccugggcagaagg

SEQ ID NO: 1526052 - RNA, 16 nt, Human
uaugauuaaguaauga

SEQ ID NO: 1526053 - RNA, 20 nt, Human
uaugauuaaguaaugauaac

SEQ ID NO: 1526054 - RNA, 21 nt, Human
uaugauuaaguaaugauaacu

SEQ ID NO: 1526055 - RNA, 11 nt, Human
uaugcauuuga

SEQ ID NO: 1526056 - RNA, 24 nt, Human
uaugcauuugaaaauuuugauguu

SEQ ID NO: 1526057 - RNA, 23 nt, Human
uaugcauuugaaaauuuugaugu

SEQ ID NO: 1526058 - RNA, 19 nt, Human
uaugaaauuauauaaguau

SEQ ID NO: 1526059 - RNA, 22 nt, Human
uaucuuugauucuccuucagcc

SEQ ID NO: 1526060 - RNA, 19 nt, Human
uaucuuugauucuccuuca

SEQ ID NO: 1526061 - RNA, 21 nt, Human
acagcaaggagauuuacaacu

SEQ ID NO: 1526062 - RNA, 17 nt, Human
acagcccgggcucugcc

SEQ ID NO: 1526063 - RNA, 18 nt, Human
acagcaagggugauggga

SEQ ID NO: 1526064 - RNA, 18 nt, Human
acagcccgggcucugccu

SEQ ID NO: 1526065 - RNA, 19 nt, Human
acagcccgggcucugccuc

SEQ ID NO: 1526066 - RNA, 20 nt, Human
acagcccgggcucugccucc

SEQ ID NO: 1526067 - RNA, 20 nt, Human
acagauuuccauccuaguca

SEQ ID NO: 1526068 - RNA, 17 nt, Human
acagcaaggagauuuac

SEQ ID NO: 1526069 - RNA, 20 nt, Human
acagagcccacgcccccacu

SEQ ID NO: 1526070 - RNA, 15 nt, Human
acagagcccacgccc

SEQ ID NO: 1526071 - RNA, 18 nt, Human
acagagcccacgccccca

SEQ ID NO: 1526072 - RNA, 19 nt, Human
acagagcccacgcccccac

SEQ ID NO: 1526073 - RNA, 23 nt, Human
uaucuauauuuuacauaaauuua

SEQ ID NO: 1526074 - RNA, 17 nt, Human
uaucucaaaacugcacu

SEQ ID NO: 1526075 - RNA, 13 nt, Human
uaucucccccagc

SEQ ID NO: 1526076 - RNA, 16 nt, Human
uaucucccccagcccc

SEQ ID NO: 1526077 - RNA, 14 nt, Human
uaucucccccagcc

SEQ ID NO: 1526078 - RNA, 11 nt, Human
acagagaaagu

SEQ ID NO: 1526079 - RNA, 18 nt, Human
acagagaaaguacuucuc

SEQ ID NO: 1526080 - RNA, 19 nt, Human
uauccaaaccaaauaaaaa

SEQ ID NO: 1526081 - RNA, 18 nt, Human
uaucaaguauuauaccuu

SEQ ID NO: 1526082 - RNA, 17 nt, Human
acagaaauguacagcaa

SEQ ID NO: 1526083 - RNA, 16 nt, Human
acagaaauguacagca

SEQ ID NO: 1526084 - RNA, 14 nt, Human
acagaaauguacag

SEQ ID NO: 1526085 - RNA, 20 nt, Human
acagaaaauggaagacagcu

SEQ ID NO: 1526086 - RNA, 17 nt, Human
acagaaaauucuucucc

SEQ ID NO: 1526087 - RNA, 18 nt, Human
acagaaaauucuucucca

SEQ ID NO: 1526088 - RNA, 15 nt, Human
uauauuguuugcuaa

SEQ ID NO: 1526089 - RNA, 13 nt, Human
acagacccugccc

SEQ ID NO: 1526090 - RNA, 14 nt, Human
acagacccugcccu

SEQ ID NO: 1526091 - RNA, 15 nt, Human
acagacccugcccug

SEQ ID NO: 1526092 - RNA, 14 nt, Human
uauguuuuugugua

SEQ ID NO: 1526093 - RNA, 18 nt, Human
uauguuuuuguguauuug

SEQ ID NO: 1526094 - RNA, 12 nt, Human
uaugugaacagu

SEQ ID NO: 1526095 - RNA, 22 nt, Human
uaugugaacaguuguguuugaa

SEQ ID NO: 1526096 - RNA, 20 nt, Human
uauguggaguucaucuugaa

SEQ ID NO: 1526097 - RNA, 22 nt, Human
acaggcauguucucugaggaca

SEQ ID NO: 1526098 - RNA, 15 nt, Human
acaggcauguucucu

SEQ ID NO: 1526099 - RNA, 18 nt, Human
acaggcauguucucugag

SEQ ID NO: 1526100 - RNA, 19 nt, Human
acaggcauguucucugagg

SEQ ID NO: 1526101 - RNA, 20 nt, Human
acaggcauguucucugagga

SEQ ID NO: 1526102 - RNA, 14 nt, Human
acaggcauguucuc

SEQ ID NO: 1526103 - RNA, 14 nt, Human
acaggcagguccag

SEQ ID NO: 1526104 - RNA, 16 nt, Human
acaggcagguccaggg

SEQ ID NO: 1526105 - RNA, 16 nt, Human
acaggagugagcacua

SEQ ID NO: 1526106 - RNA, 14 nt, Human
acaggaucagucug

SEQ ID NO: 1526107 - RNA, 15 nt, Human
acaggaucagucuga

SEQ ID NO: 1526108 - RNA, 23 nt, Human
acaggaccagggauuuccaugau

SEQ ID NO: 1526109 - RNA, 12 nt, Human
acaggaccccag

SEQ ID NO: 1526110 - RNA, 13 nt, Human
acaggaccccagc

SEQ ID NO: 1526111 - RNA, 14 nt, Human
acaggaccccagcu

SEQ ID NO: 1526112 - RNA, 15 nt, Human
acaggaccccagcuc

SEQ ID NO: 1526113 - RNA, 16 nt, Human
acaggaccccagcucu

SEQ ID NO: 1526114 - RNA, 17 nt, Human
acaggaccccagcucug

SEQ ID NO: 1526115 - RNA, 19 nt, Human
acaggaccccagcucugcg

SEQ ID NO: 1526116 - RNA, 18 nt, Human
acaggaccccagcucugc

SEQ ID NO: 1526117 - RNA, 13 nt, Human
acaggaaguacug

SEQ ID NO: 1526118 - RNA, 17 nt, Human
acaggaaguagaggagg

SEQ ID NO: 1526119 - RNA, 15 nt, Human
acaggaaaagcugcu

SEQ ID NO: 1526120 - RNA, 16 nt, Human
acaggaaaagcugcug

SEQ ID NO: 1526121 - RNA, 17 nt, Human
acaggaaaagcugcuga

SEQ ID NO: 1526122 - RNA, 18 nt, Human
acaggaaaagcugcugac

SEQ ID NO: 1526123 - RNA, 13 nt, Human
acagcuaacaugg

SEQ ID NO: 1526124 - RNA, 16 nt, Human
acagucaccucaugga

SEQ ID NO: 1526125 - RNA, 17 nt, Human
acagucaccucauggaa

SEQ ID NO: 1526126 - RNA, 18 nt, Human
acagucaccucauggaau

SEQ ID NO: 1526127 - RNA, 12 nt, Human
acagggcacacc

SEQ ID NO: 1526128 - RNA, 20 nt, Human
acagggcacaccgggcacuc

SEQ ID NO: 1526129 - RNA, 16 nt, Human
acaggcuuagggacag

SEQ ID NO: 1526130 - RNA, 23 nt, Human
acaggcugggcuucaguggcagc

SEQ ID NO: 1526131 - RNA, 12 nt, Human
acaggcugggcu

SEQ ID NO: 1526132 - RNA, 22 nt, Human
acaggcugggcuucaguggcag

SEQ ID NO: 1526133 - RNA, 20 nt, Human
acagggaggacgcucucugg

SEQ ID NO: 1526134 - RNA, 21 nt, Human
acagggaggacgcucucuggc

SEQ ID NO: 1526135 - RNA, 16 nt, Human
uauucaggaagcucag

SEQ ID NO: 1526136 - RNA, 14 nt, Human
uauucaggaagcuc

SEQ ID NO: 1526137 - RNA, 20 nt, Human
uauucaguaauaacucuacc

SEQ ID NO: 1526138 - RNA, 23 nt, Human
uauucaaacagucucaggaaauc

SEQ ID NO: 1526139 - RNA, 15 nt, Human
uauucaaacagucuc

SEQ ID NO: 1526140 - RNA, 15 nt, Human
uauuagaauaccaca

SEQ ID NO: 1526141 - RNA, 14 nt, Human
uauuacuguaagaa

SEQ ID NO: 1526142 - RNA, 14 nt, Human
uauuacuucugcua

SEQ ID NO: 1526143 - RNA, 13 nt, Human
uauuacuucugcu

SEQ ID NO: 1526144 - RNA, 20 nt, Human
acacucacauuuauucugcu

SEQ ID NO: 1526145 - RNA, 22 nt, Human
acacucacauuuauucugcuca

SEQ ID NO: 1526146 - RNA, 13 nt, Human
acacuaagagaga

SEQ ID NO: 1526147 - RNA, 14 nt, Human
acacuaagagagaa

SEQ ID NO: 1526148 - RNA, 15 nt, Human
acacucaaaagcugg

SEQ ID NO: 1526149 - RNA, 19 nt, Human
acacucaaaucaagaaacu

SEQ ID NO: 1526150 - RNA, 15 nt, Human
acaccuuauauuuac

SEQ ID NO: 1526151 - RNA, 12 nt, Human
acacgaauauug

SEQ ID NO: 1526152 - RNA, 21 nt, Human
acaccucugcacaagcugcac

SEQ ID NO: 1526153 - RNA, 16 nt, Human
acaccgggcacucaga

SEQ ID NO: 1526154 - RNA, 22 nt, Human
acacaucagcuugcccuguuaa

SEQ ID NO: 1526155 - RNA, 21 nt, Human
acacauuuuauuuuauuaugc

SEQ ID NO: 1526156 - RNA, 15 nt, Human
acacaugaaguccaa

SEQ ID NO: 1526157 - RNA, 15 nt, Human
acacaucagcuugcc

SEQ ID NO: 1526158 - RNA, 18 nt, Human
acacaugauccugcaauu

SEQ ID NO: 1526159 - RNA, 21 nt, Human
acacaugagcaucaggccagg

SEQ ID NO: 1526160 - RNA, 20 nt, Human
acacauuuuauuuuauuaug

SEQ ID NO: 1526161 - RNA, 19 nt, Human
acacauuuuauuuuauuau

SEQ ID NO: 1526162 - RNA, 14 nt, Human
acacauuuuauuuu

SEQ ID NO: 1526163 - RNA, 18 nt, Human
acacaugcaaggucauuu

SEQ ID NO: 1526164 - RNA, 15 nt, Human
uaguucccaggugau

SEQ ID NO: 1526165 - RNA, 20 nt, Human
uaguuccaccaucaagccac

SEQ ID NO: 1526166 - RNA, 19 nt, Human
acacacagcucuguccugg

SEQ ID NO: 1526167 - RNA, 17 nt, Human
acacacagcucuguccu

SEQ ID NO: 1526168 - RNA, 13 nt, Human
acacacagcucug

SEQ ID NO: 1526169 - RNA, 14 nt, Human
acacacagcucugu

SEQ ID NO: 1526170 - RNA, 22 nt, Human
acacacacgcgugcacacacca

SEQ ID NO: 1526171 - RNA, 21 nt, Human
acacacugcauguuugugauu

SEQ ID NO: 1526172 - RNA, 20 nt, Human
acacacucaaaucaagaaac

SEQ ID NO: 1526173 - RNA, 15 nt, Human
acacacucaaaucaa

SEQ ID NO: 1526174 - RNA, 14 nt, Human
acacaccagagccc

SEQ ID NO: 1526175 - RNA, 15 nt, Human
acacaccagagccca

SEQ ID NO: 1526176 - RNA, 20 nt, Human
acacaccagagcccaccuug

SEQ ID NO: 1526177 - RNA, 21 nt, Human
acacacgcgugcacacaccag

SEQ ID NO: 1526178 - RNA, 19 nt, Human
acaaugugaaaagaaaaau

SEQ ID NO: 1526179 - RNA, 17 nt, Human
acaaugugaaaagaaaa

SEQ ID NO: 1526180 - RNA, 24 nt, Human
acaaugcugugcccuaaaguguau

SEQ ID NO: 1526181 - RNA, 23 nt, Human
acaaugcugugcccuaaagugua

SEQ ID NO: 1526182 - RNA, 22 nt, Human
acaaugcugugcccuaaagugu

SEQ ID NO: 1526183 - RNA, 22 nt, Human
acaaugcuguauuuuaaaagaa

SEQ ID NO: 1526184 - RNA, 21 nt, Human
acaaugcugugcccuaaagug

SEQ ID NO: 1526185 - RNA, 22 nt, Human
uagugaaacucguuaauuugua

SEQ ID NO: 1526186 - RNA, 23 nt, Human
uaguguuggagaagaacugaaau

SEQ ID NO: 1526187 - RNA, 19 nt, Human
acacaguauuacuucugcu

SEQ ID NO: 1526188 - RNA, 22 nt, Human
acacaguauuacuucugcuaca

SEQ ID NO: 1526189 - RNA, 18 nt, Human
acacaguauuacuucugc

SEQ ID NO: 1526190 - RNA, 19 nt, Human
uaggaaauauuuauuuuaa

SEQ ID NO: 1526191 - RNA, 18 nt, Human
uaggaaauauuuauuuua

SEQ ID NO: 1526192 - RNA, 21 nt, Human
uagggaauggcacagcccaaa

SEQ ID NO: 1526193 - RNA, 19 nt, Human
uagggacaggaccccagcu

SEQ ID NO: 1526194 - RNA, 20 nt, Human
uagggacaggaccccagcuc

SEQ ID NO: 1526195 - RNA, 22 nt, Human
uagggacaggaccccagcucug

SEQ ID NO: 1526196 - RNA, 21 nt, Human
uagggacaggaccccagcucu

SEQ ID NO: 1526197 - RNA, 14 nt, Human
uagggagagaagau

SEQ ID NO: 1526198 - RNA, 15 nt, Human
uagggagagaagaua

SEQ ID NO: 1526199 - RNA, 14 nt, Human
uaggcauuguggga

SEQ ID NO: 1526200 - RNA, 16 nt, Human
uaggcauuugcugaau

SEQ ID NO: 1526201 - RNA, 20 nt, Human
uaggcauuugcugaauacag

SEQ ID NO: 1526202 - RNA, 13 nt, Human
acaagacugcaca

SEQ ID NO: 1526203 - RNA, 14 nt, Human
acaagacugcacau

SEQ ID NO: 1526204 - RNA, 23 nt, Human
acaauacaucccuuaccugggaa

SEQ ID NO: 1526205 - RNA, 19 nt, Human
acaaugacuuacuguacau

SEQ ID NO: 1526206 - RNA, 18 nt, Human
acaaugacuuacuguaca

SEQ ID NO: 1526207 - RNA, 17 nt, Human
acaaugacuuacuguac

SEQ ID NO: 1526208 - RNA, 12 nt, Human
acaaugacuuac

SEQ ID NO: 1526209 - RNA, 12 nt, Human
uagcuaauguaa

SEQ ID NO: 1526210 - RNA, 19 nt, Human
uagcuaauguaauaacugu

SEQ ID NO: 1526211 - RNA, 19 nt, Human
uagauauaugcucugcaug

SEQ ID NO: 1526212 - RNA, 22 nt, Human
uagaggagaaacuggaacucuc

SEQ ID NO: 1526213 - RNA, 15 nt, Human
uagauauaugcucug

SEQ ID NO: 1526214 - RNA, 22 nt, Human
uagagcaaaauugauguguuua

SEQ ID NO: 1526215 - RNA, 14 nt, Human
uagagcaaaauuga

SEQ ID NO: 1526216 - RNA, 21 nt, Human
uagagcaaaauugauguguuu

SEQ ID NO: 1526217 - RNA, 18 nt, Human
acaaaaggauaaugaaua

SEQ ID NO: 1526218 - RNA, 22 nt, Human
acaaaagcaugugagacugguu

SEQ ID NO: 1526219 - RNA, 11 nt, Human
acaaaagcaug

SEQ ID NO: 1526220 - RNA, 22 nt, Human
acaaaggaugcccaaagaugca

SEQ ID NO: 1526221 - RNA, 11 nt, Human
uagccagagga

SEQ ID NO: 1526222 - RNA, 15 nt, Human
uagccagaggagaga

SEQ ID NO: 1526223 - RNA, 19 nt, Human
acaaauuuacagagacaga

SEQ ID NO: 1526224 - RNA, 18 nt, Human
acaaauuuacagagacag

SEQ ID NO: 1526225 - RNA, 23 nt, Human
acaacacucauugaccugaggcc

SEQ ID NO: 1526226 - RNA, 21 nt, Human
acaacacucauugaccugagg

SEQ ID NO: 1526227 - RNA, 19 nt, Human
acaagaccacguuucuaaa

SEQ ID NO: 1526228 - RNA, 20 nt, Human
acaagacccaaaaggcagaa

SEQ ID NO: 1526229 - RNA, 19 nt, Human
acaagacccuugugguccc

SEQ ID NO: 1526230 - RNA, 18 nt, Human
uagcaugucgucaaagcu

SEQ ID NO: 1526231 - RNA, 16 nt, Human
uagcauuuugcuaaau

SEQ ID NO: 1526232 - RNA, 21 nt, Human
uagccaaggccaaaggaagca

SEQ ID NO: 1526233 - RNA, 22 nt, Human
uagcauuuugcuaaaugugaau

SEQ ID NO: 1526234 - RNA, 15 nt, Human
uagaugcaguucuga

SEQ ID NO: 1526235 - RNA, 19 nt, Human
uagcauggcugccaauggg

SEQ ID NO: 1526236 - RNA, 22 nt, Human
uagcauggcauauuuuucacau

SEQ ID NO: 1526237 - RNA, 12 nt, Human
guguuugaagca

SEQ ID NO: 1526238 - RNA, 16 nt, Human
aagcacacuugacauc

SEQ ID NO: 1526239 - RNA, 14 nt, Human
aagcacaugccucu

SEQ ID NO: 1526240 - RNA, 15 nt, Human
aagcacaugccucuc

SEQ ID NO: 1526241 - RNA, 16 nt, Human
aagcacaugccucucu

SEQ ID NO: 1526242 - RNA, 19 nt, Human
aagcacaugccucucucag

SEQ ID NO: 1526243 - RNA, 20 nt, Human
aagcacaugccucucucagg

SEQ ID NO: 1526244 - RNA, 16 nt, Human
aagcacuaaacaaaga

SEQ ID NO: 1526245 - RNA, 17 nt, Human
aagcaccuccugccucg

SEQ ID NO: 1526246 - RNA, 16 nt, Human
aagcacugacuucuaa

SEQ ID NO: 1526247 - RNA, 17 nt, Human
aagcacugacuucuaag

SEQ ID NO: 1526248 - RNA, 21 nt, Human
aagcacaugccucucucaggc

SEQ ID NO: 1526249 - RNA, 13 nt, Human
aagcaccuccugc

SEQ ID NO: 1526250 - RNA, 14 nt, Human
aagcaccuccugcc

SEQ ID NO: 1526251 - RNA, 15 nt, Human
aagcaccuccugccu

SEQ ID NO: 1526252 - RNA, 16 nt, Human
aagcaccuccugccuc

SEQ ID NO: 1526253 - RNA, 12 nt, Human
aagcaugugaga

SEQ ID NO: 1526254 - RNA, 19 nt, Human
aagcacugacuucuaagua

SEQ ID NO: 1526255 - RNA, 20 nt, Human
aagcacugacuucuaaguaa

SEQ ID NO: 1526256 - RNA, 16 nt, Human
aagcauuuacuuugug

SEQ ID NO: 1526257 - RNA, 19 nt, Human
aagcauuguaaaugugcuu

SEQ ID NO: 1526258 - RNA, 17 nt, Human
aagccaaagcuaggccu

SEQ ID NO: 1526259 - RNA, 18 nt, Human
aagccaaagcuaggccug

SEQ ID NO: 1526260 - RNA, 20 nt, Human
aagccaaagcuaggccuggc

SEQ ID NO: 1526261 - RNA, 13 nt, Human
aagcaaaauguga

SEQ ID NO: 1526262 - RNA, 17 nt, Human
aagcaacccaaauguuc

SEQ ID NO: 1526263 - RNA, 23 nt, Human
aagaucaaaagguuaauaaagua

SEQ ID NO: 1526264 - RNA, 20 nt, Human
aagaucaaaagguuaauaaa

SEQ ID NO: 1526265 - RNA, 20 nt, Human
gugucagguggggcagcuug

SEQ ID NO: 1526266 - RNA, 19 nt, Human
gugucagguggggcagcuu

SEQ ID NO: 1526267 - RNA, 22 nt, Human
gugucuuaauuaaaagaauauu

SEQ ID NO: 1526268 - RNA, 23 nt, Human
gugugaaccaccacacccagccc

SEQ ID NO: 1526269 - RNA, 14 nt, Human
gugucaccugaaga

SEQ ID NO: 1526270 - RNA, 22 nt, Human
gugucaccugaagacucauucu

SEQ ID NO: 1526271 - RNA, 14 nt, Human
gugucagguggggc

SEQ ID NO: 1526272 - RNA, 18 nt, Human
gugucagguggggcagcu

SEQ ID NO: 1526273 - RNA, 15 nt, Human
aagauagcagggcau

SEQ ID NO: 1526274 - RNA, 11 nt, Human
aagaggcaggg

SEQ ID NO: 1526275 - RNA, 14 nt, Human
aagaggcagggucu

SEQ ID NO: 1526276 - RNA, 21 nt, Human
aagagggagggagggcuccag

SEQ ID NO: 1526277 - RNA, 22 nt, Human
aagagggagggagggcuccaga

SEQ ID NO: 1526278 - RNA, 15 nt, Human
guguaaaaugugaag

SEQ ID NO: 1526279 - RNA, 18 nt, Human
gugcugcccugcccaccu

SEQ ID NO: 1526280 - RNA, 23 nt, Human
gugcugcccugcccaccuggccu

SEQ ID NO: 1526281 - RNA, 15 nt, Human
gugguuucagaaaug

SEQ ID NO: 1526282 - RNA, 21 nt, Human
aagccuuggggcugaugcagu

SEQ ID NO: 1526283 - RNA, 16 nt, Human
aagccucccacgacug

SEQ ID NO: 1526284 - RNA, 15 nt, Human
aagccuccuccagcc

SEQ ID NO: 1526285 - RNA, 19 nt, Human
aagccuccuccagccgcca

SEQ ID NO: 1526286 - RNA, 17 nt, Human
guucagguaacaggcag

SEQ ID NO: 1526287 - RNA, 18 nt, Human
guucagguaacaggcaga

SEQ ID NO: 1526288 - RNA, 21 nt, Human
aagccgugauuuucauugcug

SEQ ID NO: 1526289 - RNA, 21 nt, Human
guucaggguuggccccugccc

SEQ ID NO: 1526290 - RNA, 22 nt, Human
guucaggguuggccccugcccg

SEQ ID NO: 1526291 - RNA, 23 nt, Human
guucagcuuguaaauagcucagg

SEQ ID NO: 1526292 - RNA, 20 nt, Human
guuauuauauuuacaaaugg

SEQ ID NO: 1526293 - RNA, 21 nt, Human
guuauugauaaguucauacau

SEQ ID NO: 1526294 - RNA, 22 nt, Human
guuauugauaaguucauacauu

SEQ ID NO: 1526295 - RNA, 19 nt, Human
guuauuauauuuacaaaug

SEQ ID NO: 1526296 - RNA, 19 nt, Human
guuagagguucccuuugac

SEQ ID NO: 1526297 - RNA, 19 nt, Human
guuaauuccaauuauauga

SEQ ID NO: 1526298 - RNA, 18 nt, Human
guuaaucauuagguguga

SEQ ID NO: 1526299 - RNA, 23 nt, Human
aagcuuguauuccuuuuucucuc

SEQ ID NO: 1526300 - RNA, 18 nt, Human
aagcuuauuaaaacucau

SEQ ID NO: 1526301 - RNA, 18 nt, Human
guucccuugaugaagaag

SEQ ID NO: 1526302 - RNA, 22 nt, Human
guucuagcauggcauauuuuuc

SEQ ID NO: 1526303 - RNA, 21 nt, Human
guucccuuuuuuggcugcuga

SEQ ID NO: 1526304 - RNA, 22 nt, Human
guucccuuuuuuggcugcugaa

SEQ ID NO: 1526305 - RNA, 19 nt, Human
guugacuugacagaacacu

SEQ ID NO: 1526306 - RNA, 20 nt, Human
guugacuugacagaacacug

SEQ ID NO: 1526307 - RNA, 22 nt, Human
guugauagcacagacccugccc

SEQ ID NO: 1526308 - RNA, 14 nt, Human
guugauagcacaga

SEQ ID NO: 1526309 - RNA, 19 nt, Human
guugauagcacagacccug

SEQ ID NO: 1526310 - RNA, 18 nt, Human
guucuugguuuguaaauu

SEQ ID NO: 1526311 - RNA, 15 nt, Human
guucuugguuuguaa

SEQ ID NO: 1526312 - RNA, 14 nt, Human
guucuugguuugua

SEQ ID NO: 1526313 - RNA, 19 nt, Human
guucuagcauggcugccaa

SEQ ID NO: 1526314 - RNA, 15 nt, Human
guucucucuucucca

SEQ ID NO: 1526315 - RNA, 12 nt, Human
guucucugagga

SEQ ID NO: 1526316 - RNA, 14 nt, Human
guucucugaggaca

SEQ ID NO: 1526317 - RNA, 15 nt, Human
guucucugcccucca

SEQ ID NO: 1526318 - RNA, 13 nt, Human
guucuuaauucuu

SEQ ID NO: 1526319 - RNA, 17 nt, Human
guucucugcccuccaag

SEQ ID NO: 1526320 - RNA, 18 nt, Human
guucucugcccuccaaga

SEQ ID NO: 1526321 - RNA, 17 nt, Human
guucuuaauucuuagcu

SEQ ID NO: 1526322 - RNA, 14 nt, Human
guucuuaauucuua

SEQ ID NO: 1526323 - RNA, 18 nt, Human
aaguauguuagugcaaau

SEQ ID NO: 1526324 - RNA, 19 nt, Human
aaguauguuagugcaaauu

SEQ ID NO: 1526325 - RNA, 21 nt, Human
aaguauguuagugcaaauugu

SEQ ID NO: 1526326 - RNA, 19 nt, Human
aaguauguguaaaauguga

SEQ ID NO: 1526327 - RNA, 15 nt, Human
aaguauuauaccuuu

SEQ ID NO: 1526328 - RNA, 15 nt, Human
aaguacuauguauca

SEQ ID NO: 1526329 - RNA, 18 nt, Human
aaguacuucuccacccug

SEQ ID NO: 1526330 - RNA, 19 nt, Human
aaguacuucuccacccugc

SEQ ID NO: 1526331 - RNA, 20 nt, Human
aaguacuucuccacccugcu

SEQ ID NO: 1526332 - RNA, 14 nt, Human
aaguacuauaauuu

SEQ ID NO: 1526333 - RNA, 17 nt, Human
aaguacuauaauuuacc

SEQ ID NO: 1526334 - RNA, 13 nt, Human
aaguacuauguau

SEQ ID NO: 1526335 - RNA, 23 nt, Human
aaguauucuuauuuaaugaaaga

SEQ ID NO: 1526336 - RNA, 19 nt, Human
aaguauuauaccuuuuuua

SEQ ID NO: 1526337 - RNA, 16 nt, Human
aaguauuauaccuuuu

SEQ ID NO: 1526338 - RNA, 21 nt, Human
aaguauucuuauuuaaugaaa

SEQ ID NO: 1526339 - RNA, 19 nt, Human
guuuggacaaaauggaaua

SEQ ID NO: 1526340 - RNA, 15 nt, Human
guuuuaaagcuucca

SEQ ID NO: 1526341 - RNA, 20 nt, Human
aaguaauaugcacacauuuu

SEQ ID NO: 1526342 - RNA, 18 nt, Human
aaguaauaugcacacauu

SEQ ID NO: 1526343 - RNA, 17 nt, Human
aaguaauaugcacacau

SEQ ID NO: 1526344 - RNA, 21 nt, Human
aaguaauaugcacacauuuuu

SEQ ID NO: 1526345 - RNA, 19 nt, Human
guuuucuguucuuucuggc

SEQ ID NO: 1526346 - RNA, 16 nt, Human
guuuucuguucuuucu

SEQ ID NO: 1526347 - RNA, 15 nt, Human
guuuucuguucuuuc

SEQ ID NO: 1526348 - RNA, 14 nt, Human
guuuucuguucuuu

SEQ ID NO: 1526349 - RNA, 22 nt, Human
guuuuaaggaugcuuguacaua

SEQ ID NO: 1526350 - RNA, 16 nt, Human
aagguuucugaaaauu

SEQ ID NO: 1526351 - RNA, 13 nt, Human
aaggggagaguaa

SEQ ID NO: 1526352 - RNA, 12 nt, Human
aagggggcuggg

SEQ ID NO: 1526353 - RNA, 23 nt, Human
aagggggcugggacaugggaaag

SEQ ID NO: 1526354 - RNA, 17 nt, Human
aaggggguggugucucc

SEQ ID NO: 1526355 - RNA, 15 nt, Human
aagggcuguuauaau

SEQ ID NO: 1526356 - RNA, 17 nt, Human
aagggcuguuauaaucu

SEQ ID NO: 1526357 - RNA, 16 nt, Human
aaggcugggggaagaa

SEQ ID NO: 1526358 - RNA, 13 nt, Human
guuucagaaaugu

SEQ ID NO: 1526359 - RNA, 11 nt, Human
guuucagaaau

SEQ ID NO: 1526360 - RNA, 19 nt, Human
aaggcugggggaagaagcu

SEQ ID NO: 1526361 - RNA, 22 nt, Human
aaggcugggggaagaagcucuc

SEQ ID NO: 1526362 - RNA, 20 nt, Human
aaggcugucaauuacaggaa

SEQ ID NO: 1526363 - RNA, 21 nt, Human
guuuaagugacugauggcuaa

SEQ ID NO: 1526364 - RNA, 23 nt, Human
guuguuugauucagacagcugcc

SEQ ID NO: 1526365 - RNA, 12 nt, Human
aaggaaaaugau

SEQ ID NO: 1526366 - RNA, 17 nt, Human
aaggaaacccagcucug

SEQ ID NO: 1526367 - RNA, 22 nt, Human
aaggaaacccagcucuggucca

SEQ ID NO: 1526368 - RNA, 14 nt, Human
guuuaugauuccac

SEQ ID NO: 1526369 - RNA, 13 nt, Human
aagugugguagag

SEQ ID NO: 1526370 - RNA, 23 nt, Human
aaguguauuuuuuuacuaauaga

SEQ ID NO: 1526371 - RNA, 19 nt, Human
aaguuauuuuuaauuuggu

SEQ ID NO: 1526372 - RNA, 19 nt, Human
aaguuucugccgcagcccu

SEQ ID NO: 1526373 - RNA, 21 nt, Human
aaguuucugccgcagcccugc

SEQ ID NO: 1526374 - RNA, 13 nt, Human
uaaaaugugaagu

SEQ ID NO: 1526375 - RNA, 11 nt, Human
uaaaaugugaa

SEQ ID NO: 1526376 - RNA, 9 nt, Human
uaaaauggu

SEQ ID NO: 1526377 - RNA, 20 nt, Human
aaguuugagaucagccuggg

SEQ ID NO: 1526378 - RNA, 22 nt, Human
uaaaauaauuuuuauauuugaa

SEQ ID NO: 1526379 - RNA, 21 nt, Human
uaaaauacacacucaaaucaa

SEQ ID NO: 1526380 - RNA, 13 nt, Human
uaaaagucuugug

SEQ ID NO: 1526381 - RNA, 13 nt, Human
uaaaagaauauuu

SEQ ID NO: 1526382 - RNA, 16 nt, Human
uaaaagaauauuuuaa

SEQ ID NO: 1526383 - RNA, 21 nt, Human
uaaaauaccagccaguaaaug

SEQ ID NO: 1526384 - RNA, 13 nt, Human
aagugauccuccc

SEQ ID NO: 1526385 - RNA, 19 nt, Human
aagugauccucccaccuca

SEQ ID NO: 1526386 - RNA, 20 nt, Human
aagugauccucccaccucag

SEQ ID NO: 1526387 - RNA, 23 nt, Human
aagugauccucccaccucagccu

SEQ ID NO: 1526388 - RNA, 14 nt, Human
uaaaaauauugugu

SEQ ID NO: 1526389 - RNA, 22 nt, Human
uaaaaagccugcaauuucauau

SEQ ID NO: 1526390 - RNA, 21 nt, Human
uaaaaaaaaaccugagcccca

SEQ ID NO: 1526391 - RNA, 13 nt, Human
uaaaacccaagug

SEQ ID NO: 1526392 - RNA, 15 nt, Human
uaaaacuuuuuaaaa

SEQ ID NO: 1526393 - RNA, 12 nt, Human
uaaaacuuuuua

SEQ ID NO: 1526394 - RNA, 23 nt, Human
uaaaaaucucaaauuucuaaauc

SEQ ID NO: 1526395 - RNA, 21 nt, Human
uaaaaauauuguguugugaau

SEQ ID NO: 1526396 - RNA, 22 nt, Human
uaaaaauauuguguugugaaug

SEQ ID NO: 1526397 - RNA, 15 nt, Human
uaaaaaugagguacu

SEQ ID NO: 1526398 - RNA, 15 nt, Human
uaaaaccacagcagu

SEQ ID NO: 1526399 - RNA, 22 nt, Human
uaaaaaugagguacucuccugg

SEQ ID NO: 1526400 - RNA, 14 nt, Human
uaaaaccacagcag

SEQ ID NO: 1526401 - RNA, 11 nt, Human
gugauuaccag

SEQ ID NO: 1526402 - RNA, 16 nt, Human
gugauuaccagggacu

SEQ ID NO: 1526403 - RNA, 17 nt, Human
gugauuaccagggacug

SEQ ID NO: 1526404 - RNA, 22 nt, Human
gugcaaugaccuuucaauagga

SEQ ID NO: 1526405 - RNA, 23 nt, Human
gugcacaagcuccaagcucccag

SEQ ID NO: 1526406 - RNA, 21 nt, Human
gugcacaugcacgugugugca

SEQ ID NO: 1526407 - RNA, 18 nt, Human
gugcaaugaccuuucaau

SEQ ID NO: 1526408 - RNA, 13 nt, Human
gugcacaagcucc

SEQ ID NO: 1526409 - RNA, 16 nt, Human
gugcacaagcuccaag

SEQ ID NO: 1526410 - RNA, 21 nt, Human
gugcacaagcuccaagcuccc

SEQ ID NO: 1526411 - RNA, 20 nt, Human
gugcauuugaggucuguucu

SEQ ID NO: 1526412 - RNA, 21 nt, Human
gugcauuuggugguuucagaa

SEQ ID NO: 1526413 - RNA, 23 nt, Human
gugccaaaaacaacaacaaaaug

SEQ ID NO: 1526414 - RNA, 19 nt, Human
gugcauuugaggucuguuc

SEQ ID NO: 1526415 - RNA, 17 nt, Human
gugcauuugaggucugu

SEQ ID NO: 1526416 - RNA, 18 nt, Human
aacuucagcgguuuauau

SEQ ID NO: 1526417 - RNA, 13 nt, Human
aacuucagacaua

SEQ ID NO: 1526418 - RNA, 21 nt, Human
aacuucagcgguuuauauaag

SEQ ID NO: 1526419 - RNA, 23 nt, Human
aacuuccuuggacucauuuuaaa

SEQ ID NO: 1526420 - RNA, 17 nt, Human
aacugugaaguuuacau

SEQ ID NO: 1526421 - RNA, 19 nt, Human
aacugugaaguuuacauug

SEQ ID NO: 1526422 - RNA, 22 nt, Human
aacuucaccauauuaccacaga

SEQ ID NO: 1526423 - RNA, 22 nt, Human
aacuucacauauugauuuccgu

SEQ ID NO: 1526424 - RNA, 14 nt, Human
aacuucacauauug

SEQ ID NO: 1526425 - RNA, 19 nt, Human
gugcuaucucccccagccc

SEQ ID NO: 1526426 - RNA, 16 nt, Human
gugcucugaucaucca

SEQ ID NO: 1526427 - RNA, 13 nt, Human
gugcucuggacag

SEQ ID NO: 1526428 - RNA, 14 nt, Human
gugcucuggacagg

SEQ ID NO: 1526429 - RNA, 13 nt, Human
gugcugcccugcc

SEQ ID NO: 1526430 - RNA, 14 nt, Human
gugcugcccugccc

SEQ ID NO: 1526431 - RNA, 15 nt, Human
gugcugcccugccca

SEQ ID NO: 1526432 - RNA, 22 nt, Human
aagaagcaccaaucaugaauua

SEQ ID NO: 1526433 - RNA, 22 nt, Human
gugcuacaaaaacacagcaagg

SEQ ID NO: 1526434 - RNA, 17 nt, Human
gugcuaggaacacuccu

SEQ ID NO: 1526435 - RNA, 15 nt, Human
gugcuaucuccccca

SEQ ID NO: 1526436 - RNA, 18 nt, Human
gugcuaucucccccagcc

SEQ ID NO: 1526437 - RNA, 11 nt, Human
aagaaacauuu

SEQ ID NO: 1526438 - RNA, 14 nt, Human
aagaaacaacagaa

SEQ ID NO: 1526439 - RNA, 22 nt, Human
aagaaaauaguggugugauuug

SEQ ID NO: 1526440 - RNA, 21 nt, Human
aagaaaauaguggugugauuu

SEQ ID NO: 1526441 - RNA, 15 nt, Human
aagaaaauaguggug

SEQ ID NO: 1526442 - RNA, 14 nt, Human
aagaaagaaaauca

SEQ ID NO: 1526443 - RNA, 16 nt, Human
aagaaagaaaaucagg

SEQ ID NO: 1526444 - RNA, 23 nt, Human
aacuuuaccuuuuuuauacauaa

SEQ ID NO: 1526445 - RNA, 22 nt, Human
aacuuuaccuuuuuuauacaua

SEQ ID NO: 1526446 - RNA, 21 nt, Human
aacuuuaccuuuuuuauacau

SEQ ID NO: 1526447 - RNA, 17 nt, Human
aagaaaaaugagccugg

SEQ ID NO: 1526448 - RNA, 18 nt, Human
aagaaaaaugagccuggc

SEQ ID NO: 1526449 - RNA, 14 nt, Human
aagaaaacaacuuc

SEQ ID NO: 1526450 - RNA, 19 nt, Human
aagaaaaaauauuuucccu

SEQ ID NO: 1526451 - RNA, 13 nt, Human
aagaaaaagaaaa

SEQ ID NO: 1526452 - RNA, 18 nt, Human
aagaaaaagaaaaagaaa

SEQ ID NO: 1526453 - RNA, 12 nt, Human
aacgucuuaaau

SEQ ID NO: 1526454 - RNA, 14 nt, Human
aacgucuuaaauau

SEQ ID NO: 1526455 - RNA, 15 nt, Human
aacgucuuaaauauu

SEQ ID NO: 1526456 - RNA, 12 nt, Human
aaccuggggggc

SEQ ID NO: 1526457 - RNA, 21 nt, Human
aacucauuuuuguuuucauua

SEQ ID NO: 1526458 - RNA, 23 nt, Human
aacuauucaggagaguagaacag

SEQ ID NO: 1526459 - RNA, 24 nt, Human
aacucauuuuuguuuucauuaucu

SEQ ID NO: 1526460 - RNA, 17 nt, Human
aacuagggaagauaaua

SEQ ID NO: 1526461 - RNA, 12 nt, Human
aacguggcugcu

SEQ ID NO: 1526462 - RNA, 13 nt, Human
aacguggcugcuu

SEQ ID NO: 1526463 - RNA, 13 nt, Human
gucuucacaacag

SEQ ID NO: 1526464 - RNA, 14 nt, Human
gucuuaauuaaaag

SEQ ID NO: 1526465 - RNA, 19 nt, Human
gucuuaauuaaaagaauau

SEQ ID NO: 1526466 - RNA, 18 nt, Human
gucuggaaugcaguggua

SEQ ID NO: 1526467 - RNA, 15 nt, Human
gucuggaaugcagug

SEQ ID NO: 1526468 - RNA, 16 nt, Human
gucuggaaugcagugg

SEQ ID NO: 1526469 - RNA, 14 nt, Human
gucugaaggcuggg

SEQ ID NO: 1526470 - RNA, 14 nt, Human
gucucaaaaaaaca

SEQ ID NO: 1526471 - RNA, 17 nt, Human
gucucaaaaaaagaaaa

SEQ ID NO: 1526472 - RNA, 19 nt, Human
gucucaaaaaaagaaaaag

SEQ ID NO: 1526473 - RNA, 20 nt, Human
gucugacaggcaaugcuggc

SEQ ID NO: 1526474 - RNA, 15 nt, Human
gucugacaggcaaug

SEQ ID NO: 1526475 - RNA, 18 nt, Human
gucugacaggcaaugcug

SEQ ID NO: 1526476 - RNA, 12 nt, Human
gucugacaggca

SEQ ID NO: 1526477 - RNA, 13 nt, Human
gucugacaggcaa

SEQ ID NO: 1526478 - RNA, 14 nt, Human
gucugacaggcaau

SEQ ID NO: 1526479 - RNA, 22 nt, Human
gugagacccugucucaaaaaaa

SEQ ID NO: 1526480 - RNA, 17 nt, Human
gugagacucgagaacuu

SEQ ID NO: 1526481 - RNA, 20 nt, Human
gugagacucgagaacuuuca

SEQ ID NO: 1526482 - RNA, 22 nt, Human
gugagacucgagaacuuucauu

SEQ ID NO: 1526483 - RNA, 14 nt, Human
gugagacucugucu

SEQ ID NO: 1526484 - RNA, 16 nt, Human
gugagacucugucuca

SEQ ID NO: 1526485 - RNA, 19 nt, Human
gugacaugucuuuucuugc

SEQ ID NO: 1526486 - RNA, 20 nt, Human
gugacagagugagacucugu

SEQ ID NO: 1526487 - RNA, 22 nt, Human
gugacagagugagacucugucu

SEQ ID NO: 1526488 - RNA, 12 nt, Human
aacuccuggccu

SEQ ID NO: 1526489 - RNA, 14 nt, Human
gugaaguuuacauu

SEQ ID NO: 1526490 - RNA, 23 nt, Human
gugaauaauacaguaucucaggg

SEQ ID NO: 1526491 - RNA, 18 nt, Human
gugaggcucugcccuugg

SEQ ID NO: 1526492 - RNA, 23 nt, Human
gugaguacuacaguccucccauc

SEQ ID NO: 1526493 - RNA, 17 nt, Human
gugagucaccaagccca

SEQ ID NO: 1526494 - RNA, 19 nt, Human
gugagucaccaagcccagu

SEQ ID NO: 1526495 - RNA, 19 nt, Human
aacucuccucugcugcugg

SEQ ID NO: 1526496 - RNA, 21 nt, Human
aacucuccucugcugcuggcu

SEQ ID NO: 1526497 - RNA, 18 nt, Human
gugagacucugucucaaa

SEQ ID NO: 1526498 - RNA, 12 nt, Human
gugaggcucugc

SEQ ID NO: 1526499 - RNA, 13 nt, Human
gugaggcucugcc

SEQ ID NO: 1526500 - RNA, 14 nt, Human
gugaggcucugccc

SEQ ID NO: 1526501 - RNA, 15 nt, Human
gugaggcucugcccu

SEQ ID NO: 1526502 - RNA, 16 nt, Human
gugaggcucugcccuu

SEQ ID NO: 1526503 - RNA, 17 nt, Human
gugaggcucugcccuug

SEQ ID NO: 1526504 - RNA, 22 nt, Human
aacucuccucugcugcuggcug

SEQ ID NO: 1526505 - RNA, 23 nt, Human
aacucuccucugcugcuggcugg

SEQ ID NO: 1526506 - RNA, 21 nt, Human
aacugauuuuuuuuuccuuca

SEQ ID NO: 1526507 - RNA, 22 nt, Human
aacugauuuuuuuuuccuucag

SEQ ID NO: 1526508 - RNA, 23 nt, Human
aacugauuuuuuuuuccuucagu

SEQ ID NO: 1526509 - RNA, 16 nt, Human
aacugcauuggcuuug

SEQ ID NO: 1526510 - RNA, 22 nt, Human
guccccuguuuguuucugaaag

SEQ ID NO: 1526511 - RNA, 14 nt, Human
guccccugacaggg

SEQ ID NO: 1526512 - RNA, 18 nt, Human
guccccuguuuguuucug

SEQ ID NO: 1526513 - RNA, 18 nt, Human
gucccugguggcagcuca

SEQ ID NO: 1526514 - RNA, 19 nt, Human
gucccugguggcagcucac

SEQ ID NO: 1526515 - RNA, 18 nt, Human
gucccuuacgugaguccu

SEQ ID NO: 1526516 - RNA, 19 nt, Human
gucccuuacgugaguccug

SEQ ID NO: 1526517 - RNA, 22 nt, Human
guccaugaagauguagaggaga

SEQ ID NO: 1526518 - RNA, 23 nt, Human
guccaugaagauguagaggagaa

SEQ ID NO: 1526519 - RNA, 19 nt, Human
gucauuugagcagggcuca

SEQ ID NO: 1526520 - RNA, 15 nt, Human
gucccaccccacaca

SEQ ID NO: 1526521 - RNA, 22 nt, Human
guccccaccgcagacaggacca

SEQ ID NO: 1526522 - RNA, 20 nt, Human
gucccaccccacacacgcca

SEQ ID NO: 1526523 - RNA, 18 nt, Human
guccccaccgcagacagg

SEQ ID NO: 1526524 - RNA, 17 nt, Human
aacacucauugaccuga

SEQ ID NO: 1526525 - RNA, 21 nt, Human
aacacucacauuuauucugcu

SEQ ID NO: 1526526 - RNA, 17 nt, Human
gucauuugagcagggcu

SEQ ID NO: 1526527 - RNA, 19 nt, Human
aacacuguucucugcccuc

SEQ ID NO: 1526528 - RNA, 17 nt, Human
aacacuguucucugccc

SEQ ID NO: 1526529 - RNA, 18 nt, Human
aacacuguucucugcccu

SEQ ID NO: 1526530 - RNA, 20 nt, Human
aacacagcaagggugauggg

SEQ ID NO: 1526531 - RNA, 19 nt, Human
aacacaaacgggcucagca

SEQ ID NO: 1526532 - RNA, 19 nt, Human
aaauuucuaaaucuccaaa

SEQ ID NO: 1526533 - RNA, 20 nt, Human
gucuauuuacggaacucaaa

SEQ ID NO: 1526534 - RNA, 22 nt, Human
gucuaugggacucaaugcacug

SEQ ID NO: 1526535 - RNA, 16 nt, Human
gucgcugugccacagg

SEQ ID NO: 1526536 - RNA, 14 nt, Human
gucuaccugagggg

SEQ ID NO: 1526537 - RNA, 17 nt, Human
gucgcugugccacaggc

SEQ ID NO: 1526538 - RNA, 15 nt, Human
gucuaccugaggggc

SEQ ID NO: 1526539 - RNA, 16 nt, Human
gucuaccugaggggcc

SEQ ID NO: 1526540 - RNA, 16 nt, Human
gucgaggacagggagg

SEQ ID NO: 1526541 - RNA, 12 nt, Human
gucgaggcagga

SEQ ID NO: 1526542 - RNA, 14 nt, Human
guccucuuuucuga

SEQ ID NO: 1526543 - RNA, 19 nt, Human
guccugcugcaguugccag

SEQ ID NO: 1526544 - RNA, 16 nt, Human
guccuggcaugggaau

SEQ ID NO: 1526545 - RNA, 17 nt, Human
aacauguauaauauuuu

SEQ ID NO: 1526546 - RNA, 14 nt, Human
aacauaaaauacaa

SEQ ID NO: 1526547 - RNA, 14 nt, Human
aacagucucaggaa

SEQ ID NO: 1526548 - RNA, 12 nt, Human
aacauauauaac

SEQ ID NO: 1526549 - RNA, 18 nt, Human
aacaguccauugaaaggg

SEQ ID NO: 1526550 - RNA, 13 nt, Human
aacagucucagga

SEQ ID NO: 1526551 - RNA, 18 nt, Human
gucacauuccugaacagg

SEQ ID NO: 1526552 - RNA, 22 nt, Human
gucaccaaaucagcugcuacua

SEQ ID NO: 1526553 - RNA, 20 nt, Human
gucacaggaaguagaggagg

SEQ ID NO: 1526554 - RNA, 12 nt, Human
gucacaggcagg

SEQ ID NO: 1526555 - RNA, 22 nt, Human
gucaauuacaggaaguacugga

SEQ ID NO: 1526556 - RNA, 21 nt, Human
gucaauuuuguuauguauauu

SEQ ID NO: 1526557 - RNA, 13 nt, Human
gucacaggaagua

SEQ ID NO: 1526558 - RNA, 15 nt, Human
gucacaggaaguaga

SEQ ID NO: 1526559 - RNA, 10 nt, Human
gucacugcuu

SEQ ID NO: 1526560 - RNA, 17 nt, Human
gucacugagacagcccg

SEQ ID NO: 1526561 - RNA, 18 nt, Human
gucacugagacagcccgg

SEQ ID NO: 1526562 - RNA, 21 nt, Human
gucacugagacagcccgggcu

SEQ ID NO: 1526563 - RNA, 23 nt, Human
gucacugagacagcccgggcucu

SEQ ID NO: 1526564 - RNA, 14 nt, Human
gucacugagacagc

SEQ ID NO: 1526565 - RNA, 15 nt, Human
gucacugagacagcc

SEQ ID NO: 1526566 - RNA, 16 nt, Human
gucacugagacagccc

SEQ ID NO: 1526567 - RNA, 12 nt, Human
gucaccaagccc

SEQ ID NO: 1526568 - RNA, 15 nt, Human
gucaccaagcccagu

SEQ ID NO: 1526569 - RNA, 23 nt, Human
gucacucuggcagcucagagagg

SEQ ID NO: 1526570 - RNA, 14 nt, Human
gucaggaaagagaa

SEQ ID NO: 1526571 - RNA, 23 nt, Human
gucagaaguuucugccgcagccc

SEQ ID NO: 1526572 - RNA, 21 nt, Human
gucagaaguuucugccgcagc

SEQ ID NO: 1526573 - RNA, 21 nt, Human
gucacugcuuaacuucacaua

SEQ ID NO: 1526574 - RNA, 15 nt, Human
gucacugcuuaacuu

SEQ ID NO: 1526575 - RNA, 15 nt, Human
aaauuucuaaaucuc

SEQ ID NO: 1526576 - RNA, 13 nt, Human
aaauuucuaaauc

SEQ ID NO: 1526577 - RNA, 15 nt, Human
gucagugugacugau

SEQ ID NO: 1526578 - RNA, 16 nt, Human
gucagguggggcagcu

SEQ ID NO: 1526579 - RNA, 17 nt, Human
gucagguggggcagcuu

SEQ ID NO: 1526580 - RNA, 18 nt, Human
gucagguggggcagcuug

SEQ ID NO: 1526581 - RNA, 22 nt, Human
gucagguggggcagcuugaggg

SEQ ID NO: 1526582 - RNA, 18 nt, Human
aaaugugccuucauuuuu

SEQ ID NO: 1526583 - RNA, 15 nt, Human
aaaugugcuuuuaaa

SEQ ID NO: 1526584 - RNA, 17 nt, Human
aaauuguauuacaaauc

SEQ ID NO: 1526585 - RNA, 17 nt, Human
aaauuccaagugauuga

SEQ ID NO: 1526586 - RNA, 16 nt, Human
aaauuccccacccuga

SEQ ID NO: 1526587 - RNA, 11 nt, Human
aaaucauuucu

SEQ ID NO: 1526588 - RNA, 21 nt, Human
guauucucuccuguaccucuu

SEQ ID NO: 1526589 - RNA, 18 nt, Human
guauucucuccuguaccu

SEQ ID NO: 1526590 - RNA, 24 nt, Human
guauucuaaauuuuauaucuugua

SEQ ID NO: 1526591 - RNA, 19 nt, Human
guauucuagcuaauguaau

SEQ ID NO: 1526592 - RNA, 18 nt, Human
aaauguaugauuacauca

SEQ ID NO: 1526593 - RNA, 21 nt, Human
aaaugucucuuuaaugucaca

SEQ ID NO: 1526594 - RNA, 19 nt, Human
cuucugaacuuggcgcugc

SEQ ID NO: 1526595 - RNA, 22 nt, Human
cuucugaacuuggcgcugcccc

SEQ ID NO: 1526596 - RNA, 12 nt, Human
cuuccucccucc

SEQ ID NO: 1526597 - RNA, 13 nt, Human
cuuccucccuccc

SEQ ID NO: 1526598 - RNA, 14 nt, Human
cuuccucccucccu

SEQ ID NO: 1526599 - RNA, 18 nt, Human
cuuccucccucccucuuu

SEQ ID NO: 1526600 - RNA, 21 nt, Human
cuuccucuuuccaucuacccu

SEQ ID NO: 1526601 - RNA, 23 nt, Human
cuucugaacuuggcgcugccccu

SEQ ID NO: 1526602 - RNA, 18 nt, Human
cuucugacccaugcugcc

SEQ ID NO: 1526603 - RNA, 16 nt, Human
cuucugacccaugcug

SEQ ID NO: 1526604 - RNA, 17 nt, Human
cuucugacccaugcugc

SEQ ID NO: 1526605 - RNA, 13 nt, Human
cuucuuauacauu

SEQ ID NO: 1526606 - RNA, 16 nt, Human
cuucuuauacauuuga

SEQ ID NO: 1526607 - RNA, 21 nt, Human
cuuggcgcugccccuggcagc

SEQ ID NO: 1526608 - RNA, 22 nt, Human
cuuggcgcugccccuggcagcc

SEQ ID NO: 1526609 - RNA, 23 nt, Human
cuuggcgcugccccuggcagccc

SEQ ID NO: 1526610 - RNA, 17 nt, Human
cuugccucuguccccuu

SEQ ID NO: 1526611 - RNA, 22 nt, Human
cuuggauuguccccgacccuug

SEQ ID NO: 1526612 - RNA, 18 nt, Human
cuuggauuguccccgacc

SEQ ID NO: 1526613 - RNA, 20 nt, Human
cuuggauuguccccgacccu

SEQ ID NO: 1526614 - RNA, 15 nt, Human
cuuggauuguccccg

SEQ ID NO: 1526615 - RNA, 19 nt, Human
cuugauucauaaugacuua

SEQ ID NO: 1526616 - RNA, 19 nt, Human
cuugccgucuaccugaggg

SEQ ID NO: 1526617 - RNA, 18 nt, Human
cuugccgucuaccugagg

SEQ ID NO: 1526618 - RNA, 15 nt, Human
cuugauguguuaucu

SEQ ID NO: 1526619 - RNA, 17 nt, Human
cuuucaauaggaaaaac

SEQ ID NO: 1526620 - RNA, 18 nt, Human
cuuucaauaggaaaaacu

SEQ ID NO: 1526621 - RNA, 21 nt, Human
cuugucuuuggacccugaggc

SEQ ID NO: 1526622 - RNA, 22 nt, Human
cuugucuuuggacccugaggcc

SEQ ID NO: 1526623 - RNA, 23 nt, Human
cuuuaaugucacaggcaggucca

SEQ ID NO: 1526624 - RNA, 22 nt, Human
cuuuaaugucacaggcaggucc

SEQ ID NO: 1526625 - RNA, 14 nt, Human
cuuucaauaggaaa

SEQ ID NO: 1526626 - RNA, 15 nt, Human
cuuucaauaggaaaa

SEQ ID NO: 1526627 - RNA, 17 nt, Human
cuuuaaugucacaggca

SEQ ID NO: 1526628 - RNA, 18 nt, Human
cuuuaaugucacaggcag

SEQ ID NO: 1526629 - RNA, 19 nt, Human
cuuuaaugucacaggcagg

SEQ ID NO: 1526630 - RNA, 20 nt, Human
cuuuaaugucacaggcaggu

SEQ ID NO: 1526631 - RNA, 20 nt, Human
cuugucucccagcucagggc

SEQ ID NO: 1526632 - RNA, 20 nt, Human
cuugucuuuggacccugagg

SEQ ID NO: 1526633 - RNA, 13 nt, Human
cuugucuguagau

SEQ ID NO: 1526634 - RNA, 23 nt, Human
cuuggucucagugucaaugcagc

SEQ ID NO: 1526635 - RNA, 22 nt, Human
cuugguccugcugcaguugcca

SEQ ID NO: 1526636 - RNA, 20 nt, Human
cuugguucccauuugcuccu

SEQ ID NO: 1526637 - RNA, 16 nt, Human
cuugguucccauuugc

SEQ ID NO: 1526638 - RNA, 16 nt, Human
cuugguccugcugcag

SEQ ID NO: 1526639 - RNA, 17 nt, Human
cuugguccugcugcagu

SEQ ID NO: 1526640 - RNA, 18 nt, Human
cuugguccugcugcaguu

SEQ ID NO: 1526641 - RNA, 20 nt, Human
cuugguccugcugcaguugc

SEQ ID NO: 1526642 - RNA, 19 nt, Human
gaaaaaauauuuuccugcc

SEQ ID NO: 1526643 - RNA, 21 nt, Human
cuuuuuuuuuuuuuuugacaa

SEQ ID NO: 1526644 - RNA, 18 nt, Human
cuuuugugcauuaucuag

SEQ ID NO: 1526645 - RNA, 14 nt, Human
cuuuugugcauuau

SEQ ID NO: 1526646 - RNA, 18 nt, Human
cuuuugccguuauuaaaa

SEQ ID NO: 1526647 - RNA, 15 nt, Human
cuuuuggucugugug

SEQ ID NO: 1526648 - RNA, 16 nt, Human
cuuuuggucuguguga

SEQ ID NO: 1526649 - RNA, 17 nt, Human
cuuuugucuaugggacu

SEQ ID NO: 1526650 - RNA, 15 nt, Human
gaaaauuaacacugc

SEQ ID NO: 1526651 - RNA, 13 nt, Human
gaaaauuaacacu

SEQ ID NO: 1526652 - RNA, 20 nt, Human
gaaaagacuccaaagaaaug

SEQ ID NO: 1526653 - RNA, 21 nt, Human
gaaaagacuccaaagaaaugu

SEQ ID NO: 1526654 - RNA, 18 nt, Human
gaaaauuuugauguuuua

SEQ ID NO: 1526655 - RNA, 14 nt, Human
gaaagacagagcug

SEQ ID NO: 1526656 - RNA, 16 nt, Human
gaaagacagagcuggg

SEQ ID NO: 1526657 - RNA, 23 nt, Human
gaaacuucagcgguuuauauaag

SEQ ID NO: 1526658 - RNA, 23 nt, Human
gaaaucaaauaugcaaagcacug

SEQ ID NO: 1526659 - RNA, 17 nt, Human
gaaaucaccgaaaacgu

SEQ ID NO: 1526660 - RNA, 19 nt, Human
gaaaucaccgaaaacgugg

SEQ ID NO: 1526661 - RNA, 18 nt, Human
gaaaugaaagcagggacu

SEQ ID NO: 1526662 - RNA, 18 nt, Human
gaaauuuuuauuaaauua

SEQ ID NO: 1526663 - RNA, 23 nt, Human
gaacaaauuuacagagacagaaa

SEQ ID NO: 1526664 - RNA, 16 nt, Human
gaacaagaugguucua

SEQ ID NO: 1526665 - RNA, 17 nt, Human
gaacaaauuuacagaga

SEQ ID NO: 1526666 - RNA, 18 nt, Human
gaacaaauuuacagagac

SEQ ID NO: 1526667 - RNA, 19 nt, Human
gaaauuuuuauuaaauuau

SEQ ID NO: 1526668 - RNA, 22 nt, Human
gaaaguacuucuccacccugcu

SEQ ID NO: 1526669 - RNA, 21 nt, Human
gaaaguacuucuccacccugc

SEQ ID NO: 1526670 - RNA, 19 nt, Human
gaaaucaaagagagaaaau

SEQ ID NO: 1526671 - RNA, 16 nt, Human
gaaaucaaauaugcaa

SEQ ID NO: 1526672 - RNA, 17 nt, Human
gaaaucaaauaugcaaa

SEQ ID NO: 1526673 - RNA, 18 nt, Human
gaaagacuaucuaaaugu

SEQ ID NO: 1526674 - RNA, 17 nt, Human
gaaaggcuccaggagca

SEQ ID NO: 1526675 - RNA, 18 nt, Human
gaaaggcuccaggagcag

SEQ ID NO: 1526676 - RNA, 19 nt, Human
gaaaggcuccaggagcagc

SEQ ID NO: 1526677 - RNA, 20 nt, Human
gaaaggcuccaggagcagcc

SEQ ID NO: 1526678 - RNA, 14 nt, Human
gaacaaggcaaggc

SEQ ID NO: 1526679 - RNA, 15 nt, Human
gaacaaggcaaggcu

SEQ ID NO: 1526680 - RNA, 17 nt, Human
gaacaaggcaaggcugu

SEQ ID NO: 1526681 - RNA, 18 nt, Human
gaacaaggcaaggcuguc

SEQ ID NO: 1526682 - RNA, 21 nt, Human
gaacaaggcaaggcugucaau

SEQ ID NO: 1526683 - RNA, 21 nt, Human
cuuaaaaaugguuuaaauggu

SEQ ID NO: 1526684 - RNA, 13 nt, Human
cuuaaaaaugguu

SEQ ID NO: 1526685 - RNA, 20 nt, Human
cuuaaaaaugguuuaaaugg

SEQ ID NO: 1526686 - RNA, 19 nt, Human
cuuaaauaaugugaaacug

SEQ ID NO: 1526687 - RNA, 16 nt, Human
cuuaaauaaugugaaa

SEQ ID NO: 1526688 - RNA, 14 nt, Human
cuuaaauaauguga

SEQ ID NO: 1526689 - RNA, 12 nt, Human
cuguuggccagu

SEQ ID NO: 1526690 - RNA, 15 nt, Human
cuguuggccagugug

SEQ ID NO: 1526691 - RNA, 19 nt, Human
cuguucacagccagacugg

SEQ ID NO: 1526692 - RNA, 22 nt, Human
cuguucacagccagacuggcac

SEQ ID NO: 1526693 - RNA, 15 nt, Human
cuguucagcuccagc

SEQ ID NO: 1526694 - RNA, 16 nt, Human
cuguucagcuccagcu

SEQ ID NO: 1526695 - RNA, 18 nt, Human
cuguucagcuccagcuca

SEQ ID NO: 1526696 - RNA, 19 nt, Human
cuguucagcuccagcucac

SEQ ID NO: 1526697 - RNA, 22 nt, Human
cuguucagcuccagcucaccag

SEQ ID NO: 1526698 - RNA, 12 nt, Human
cuguucagcugg

SEQ ID NO: 1526699 - RNA, 18 nt, Human
cuguucagcugguugagg

SEQ ID NO: 1526700 - RNA, 18 nt, Human
cugugcucuggacaggca

SEQ ID NO: 1526701 - RNA, 19 nt, Human
cugugcucuggacaggcau

SEQ ID NO: 1526702 - RNA, 17 nt, Human
cuguuacugucuucagu

SEQ ID NO: 1526703 - RNA, 17 nt, Human
cugugcucuggacaggc

SEQ ID NO: 1526704 - RNA, 23 nt, Human
cugugagaugcuagaacucccuu

SEQ ID NO: 1526705 - RNA, 23 nt, Human
cugugaaguuuacauuguaaaua

SEQ ID NO: 1526706 - RNA, 20 nt, Human
cugucuacacuaagagagaa

SEQ ID NO: 1526707 - RNA, 22 nt, Human
cugucuaaugaaaccugugucu

SEQ ID NO: 1526708 - RNA, 18 nt, Human
cuguaggaagguuaaugu

SEQ ID NO: 1526709 - RNA, 14 nt, Human
cugucauuugagca

SEQ ID NO: 1526710 - RNA, 13 nt, Human
cuguccugggagu

SEQ ID NO: 1526711 - RNA, 14 nt, Human
cuguccugggagug

SEQ ID NO: 1526712 - RNA, 20 nt, Human
cuguccugggagugagcugg

SEQ ID NO: 1526713 - RNA, 16 nt, Human
cugucauuugagcagg

SEQ ID NO: 1526714 - RNA, 21 nt, Human
cuguccugggagugagcuggu

SEQ ID NO: 1526715 - RNA, 20 nt, Human
cuguaagaaaauaucacuug

SEQ ID NO: 1526716 - RNA, 15 nt, Human
cuguagagugggagc

SEQ ID NO: 1526717 - RNA, 18 nt, Human
cuggucuuauuuguaaag

SEQ ID NO: 1526718 - RNA, 17 nt, Human
cuggugcccuggaugcc

SEQ ID NO: 1526719 - RNA, 20 nt, Human
cuggugcccuggaugcccag

SEQ ID NO: 1526720 - RNA, 21 nt, Human
cuggugcccuggaugcccagg

SEQ ID NO: 1526721 - RNA, 12 nt, Human
cuggugccucac

SEQ ID NO: 1526722 - RNA, 23 nt, Human
cuggaaaaguauguuagugcaaa

SEQ ID NO: 1526723 - RNA, 14 nt, Human
cugcuuccagugag

SEQ ID NO: 1526724 - RNA, 14 nt, Human
cugcuucaaggauc

SEQ ID NO: 1526725 - RNA, 16 nt, Human
cugcuucaaggauccu

SEQ ID NO: 1526726 - RNA, 19 nt, Human
cugcuucaaggauccugag

SEQ ID NO: 1526727 - RNA, 20 nt, Human
cugcuucaaggauccugagc

SEQ ID NO: 1526728 - RNA, 23 nt, Human
cuggagugugaggguccugcagc

SEQ ID NO: 1526729 - RNA, 21 nt, Human
cuggagaaaauggacguguua

SEQ ID NO: 1526730 - RNA, 16 nt, Human
cuggaugcagccucac

SEQ ID NO: 1526731 - RNA, 17 nt, Human
cuggaugcagccucaca

SEQ ID NO: 1526732 - RNA, 18 nt, Human
cuggaugcagccucacag

SEQ ID NO: 1526733 - RNA, 22 nt, Human
cuggaugcagccucacaguccu

SEQ ID NO: 1526734 - RNA, 23 nt, Human
cuggcagccccuguucuggcaga

SEQ ID NO: 1526735 - RNA, 22 nt, Human
cuggcagaguugaagacagagc

SEQ ID NO: 1526736 - RNA, 20 nt, Human
cuggcagaguugaagacaga

SEQ ID NO: 1526737 - RNA, 21 nt, Human
cuggcagaguugaagacagag

SEQ ID NO: 1526738 - RNA, 13 nt, Human
cuggcucuuccag

SEQ ID NO: 1526739 - RNA, 14 nt, Human
cuggcucuuccagg

SEQ ID NO: 1526740 - RNA, 15 nt, Human
cuggcucuuccaggc

SEQ ID NO: 1526741 - RNA, 17 nt, Human
cugggacuacaggcacc

SEQ ID NO: 1526742 - RNA, 21 nt, Human
cugggacuacaggcacccacc

SEQ ID NO: 1526743 - RNA, 17 nt, Human
cugggacuacaggugug

SEQ ID NO: 1526744 - RNA, 16 nt, Human
cuggcagcucagagag

SEQ ID NO: 1526745 - RNA, 17 nt, Human
cuggcagcucagagagg

SEQ ID NO: 1526746 - RNA, 19 nt, Human
cuggcagcucagagagggu

SEQ ID NO: 1526747 - RNA, 18 nt, Human
cuggccgcgccaaauaau

SEQ ID NO: 1526748 - RNA, 22 nt, Human
cugcccuuaccugccaggaagc

SEQ ID NO: 1526749 - RNA, 23 nt, Human
cugcccuuaccugccaggaagcc

SEQ ID NO: 1526750 - RNA, 14 nt, Human
cugcccugugggcc

SEQ ID NO: 1526751 - RNA, 19 nt, Human
cugcccuuaccugccagga

SEQ ID NO: 1526752 - RNA, 11 nt, Human
cugcccugugg

SEQ ID NO: 1526753 - RNA, 12 nt, Human
cugcccuguggg

SEQ ID NO: 1526754 - RNA, 24 nt, Human
cugcccugugaguacuacaguccu

SEQ ID NO: 1526755 - RNA, 14 nt, Human
cugcucacauaucu

SEQ ID NO: 1526756 - RNA, 24 nt, Human
cugcugaaggcucgagcaugccug

SEQ ID NO: 1526757 - RNA, 23 nt, Human
cugcugaaggcucgagcaugccu

SEQ ID NO: 1526758 - RNA, 18 nt, Human
cugcugaaggcucgagca

SEQ ID NO: 1526759 - RNA, 14 nt, Human
cugccuguugggcc

SEQ ID NO: 1526760 - RNA, 23 nt, Human
cugccuguucagcuccagcucac

SEQ ID NO: 1526761 - RNA, 20 nt, Human
cugccucgaacuggcugcaa

SEQ ID NO: 1526762 - RNA, 14 nt, Human
cugccuccuuugug

SEQ ID NO: 1526763 - RNA, 17 nt, Human
cugccuccuuugugagg

SEQ ID NO: 1526764 - RNA, 21 nt, Human
cugccuccuuugugaggaagc

SEQ ID NO: 1526765 - RNA, 23 nt, Human
cugccuccuuugugaggaagccg

SEQ ID NO: 1526766 - RNA, 14 nt, Human
cugccucgaacugg

SEQ ID NO: 1526767 - RNA, 17 nt, Human
gcaaaagaugcuucuca

SEQ ID NO: 1526768 - RNA, 22 nt, Human
gcaaaagaugcuucucacugcc

SEQ ID NO: 1526769 - RNA, 14 nt, Human
gcaaaaaggcagga

SEQ ID NO: 1526770 - RNA, 21 nt, Human
gauuuuuuuuuccuucagugc

SEQ ID NO: 1526771 - RNA, 11 nt, Human
gauuucacucu

SEQ ID NO: 1526772 - RNA, 12 nt, Human
gauuucacucuc

SEQ ID NO: 1526773 - RNA, 17 nt, Human
gauuuuuuuuuccuuca

SEQ ID NO: 1526774 - RNA, 18 nt, Human
gauuuuuuuuuccuucag

SEQ ID NO: 1526775 - RNA, 18 nt, Human
gauuuaacagaaauguac

SEQ ID NO: 1526776 - RNA, 17 nt, Human
gauuuaacagaaaugua

SEQ ID NO: 1526777 - RNA, 16 nt, Human
gauuuaacagaaaugu

SEQ ID NO: 1526778 - RNA, 20 nt, Human
gauucuucugcuucagccuc

SEQ ID NO: 1526779 - RNA, 19 nt, Human
gauuuaacagaaauguaca

SEQ ID NO: 1526780 - RNA, 13 nt, Human
gauucuucugcuu

SEQ ID NO: 1526781 - RNA, 15 nt, Human
gauucuucugcuuca

SEQ ID NO: 1526782 - RNA, 16 nt, Human
gcaagugagagcuggg

SEQ ID NO: 1526783 - RNA, 17 nt, Human
gcaaaauugauguguuu

SEQ ID NO: 1526784 - RNA, 13 nt, Human
gcaacaggcuggg

SEQ ID NO: 1526785 - RNA, 14 nt, Human
gcaacaggcugggc

SEQ ID NO: 1526786 - RNA, 15 nt, Human
gcaacaggcugggcu

SEQ ID NO: 1526787 - RNA, 16 nt, Human
gcaacaggcugggcuu

SEQ ID NO: 1526788 - RNA, 19 nt, Human
gcaacaggcugggcuucag

SEQ ID NO: 1526789 - RNA, 13 nt, Human
gcaaccaccacca

SEQ ID NO: 1526790 - RNA, 16 nt, Human
gcaaccaccaccaacc

SEQ ID NO: 1526791 - RNA, 18 nt, Human
gcaaccaccaccaaccac

SEQ ID NO: 1526792 - RNA, 14 nt, Human
gcaacccccagccu

SEQ ID NO: 1526793 - RNA, 15 nt, Human
gcaacccccagccug

SEQ ID NO: 1526794 - RNA, 16 nt, Human
gcaacccccagccugc

SEQ ID NO: 1526795 - RNA, 17 nt, Human
gcaacccccagccugcu

SEQ ID NO: 1526796 - RNA, 20 nt, Human
gcaaccuccgccucuugggu

SEQ ID NO: 1526797 - RNA, 19 nt, Human
gaucucuugagccugggag

SEQ ID NO: 1526798 - RNA, 22 nt, Human
gaugauuggaggggggaggugg

SEQ ID NO: 1526799 - RNA, 13 nt, Human
gaugauccuaggc

SEQ ID NO: 1526800 - RNA, 14 nt, Human
gaugauccuaggca

SEQ ID NO: 1526801 - RNA, 17 nt, Human
gaugcuucuucagagac

SEQ ID NO: 1526802 - RNA, 20 nt, Human
gaugcuucuucagagacucc

SEQ ID NO: 1526803 - RNA, 21 nt, Human
gaugcuucuucagagacuccu

SEQ ID NO: 1526804 - RNA, 22 nt, Human
gauccacccaccucagccuccc

SEQ ID NO: 1526805 - RNA, 20 nt, Human
gauccacccaccucagccuc

SEQ ID NO: 1526806 - RNA, 21 nt, Human
gauccacccaccucagccucc

SEQ ID NO: 1526807 - RNA, 21 nt, Human
gauccaagcuggucccacuca

SEQ ID NO: 1526808 - RNA, 18 nt, Human
gauccacccaccucagcc

SEQ ID NO: 1526809 - RNA, 19 nt, Human
gauccacccaccucagccu

SEQ ID NO: 1526810 - RNA, 21 nt, Human
gaucaaccccuucgcuccugu

SEQ ID NO: 1526811 - RNA, 17 nt, Human
gaucaacaucuuuucuu

SEQ ID NO: 1526812 - RNA, 20 nt, Human
gaucaacaucuuuucuugcc

SEQ ID NO: 1526813 - RNA, 14 nt, Human
gaucaacaucuuuu

SEQ ID NO: 1526814 - RNA, 16 nt, Human
gaucaacaucuuuucu

SEQ ID NO: 1526815 - RNA, 12 nt, Human
gauccaagcugg

SEQ ID NO: 1526816 - RNA, 16 nt, Human
gauccaagcugguccc

SEQ ID NO: 1526817 - RNA, 17 nt, Human
gauccaagcugguccca

SEQ ID NO: 1526818 - RNA, 19 nt, Human
gauccaagcuggucccacu

SEQ ID NO: 1526819 - RNA, 16 nt, Human
gauacuugaauaacca

SEQ ID NO: 1526820 - RNA, 23 nt, Human
gaucaaaagguuaauaaaguaau

SEQ ID NO: 1526821 - RNA, 17 nt, Human
gaucaaaggcacacagc

SEQ ID NO: 1526822 - RNA, 15 nt, Human
gauauuuugcuuugu

SEQ ID NO: 1526823 - RNA, 20 nt, Human
gaucaaaagguuaauaaagu

SEQ ID NO: 1526824 - RNA, 12 nt, Human
gauacugaaaua

SEQ ID NO: 1526825 - RNA, 21 nt, Human
gauacuguaucaugacaaaga

SEQ ID NO: 1526826 - RNA, 17 nt, Human
gauacuguaucaugaca

SEQ ID NO: 1526827 - RNA, 23 nt, Human
gauacaguuacucagaauucucu

SEQ ID NO: 1526828 - RNA, 19 nt, Human
gauacaguuacucagaauu

SEQ ID NO: 1526829 - RNA, 16 nt, Human
gauacaguuacucaga

SEQ ID NO: 1526830 - RNA, 20 nt, Human
gcaucuagcaugucgucaaa

SEQ ID NO: 1526831 - RNA, 14 nt, Human
gcauccuggcaccc

SEQ ID NO: 1526832 - RNA, 13 nt, Human
gcauccuggcacc

SEQ ID NO: 1526833 - RNA, 21 nt, Human
gcauggcugccaaugggagcu

SEQ ID NO: 1526834 - RNA, 13 nt, Human
gcaugggaaugaa

SEQ ID NO: 1526835 - RNA, 19 nt, Human
gcaugugaugagaggaaau

SEQ ID NO: 1526836 - RNA, 21 nt, Human
gcaugugaugagaggaaauca

SEQ ID NO: 1526837 - RNA, 13 nt, Human
gcauugugggaag

SEQ ID NO: 1526838 - RNA, 15 nt, Human
gcauugugggaaggg

SEQ ID NO: 1526839 - RNA, 17 nt, Human
gcauuuaaaagauacag

SEQ ID NO: 1526840 - RNA, 16 nt, Human
gcauuuaaaagauaca

SEQ ID NO: 1526841 - RNA, 16 nt, Human
gcauugugggaagggg

SEQ ID NO: 1526842 - RNA, 18 nt, Human
gcauugugggaaggggag

SEQ ID NO: 1526843 - RNA, 22 nt, Human
gcauuuaaaagauacaguuacu

SEQ ID NO: 1526844 - RNA, 18 nt, Human
gcauuuaaaagauacagu

SEQ ID NO: 1526845 - RNA, 15 nt, Human
gcauuuacuuugugu

SEQ ID NO: 1526846 - RNA, 18 nt, Human
gcauccaguaucuugaag

SEQ ID NO: 1526847 - RNA, 14 nt, Human
gcauccaguaucuu

SEQ ID NO: 1526848 - RNA, 17 nt, Human
gcauccaguaucuugaa

SEQ ID NO: 1526849 - RNA, 22 nt, Human
gcaguuguugcccacagcugua

SEQ ID NO: 1526850 - RNA, 13 nt, Human
gcagugaugucac

SEQ ID NO: 1526851 - RNA, 17 nt, Human
gcauacguacacauuuu

SEQ ID NO: 1526852 - RNA, 16 nt, Human
gcauacguacacauuu

SEQ ID NO: 1526853 - RNA, 15 nt, Human
gcauacguacacauu

SEQ ID NO: 1526854 - RNA, 18 nt, Human
gcauacguacacauuuua

SEQ ID NO: 1526855 - RNA, 18 nt, Human
gcagaacagugauuacca

SEQ ID NO: 1526856 - RNA, 22 nt, Human
gcagaacagugauuaccaggga

SEQ ID NO: 1526857 - RNA, 21 nt, Human
gcagaggaaagcaaaggagau

SEQ ID NO: 1526858 - RNA, 13 nt, Human
gcagaggaaagca

SEQ ID NO: 1526859 - RNA, 14 nt, Human
gcagaggaaagcaa

SEQ ID NO: 1526860 - RNA, 18 nt, Human
gcagaggaaagcaaagga

SEQ ID NO: 1526861 - RNA, 20 nt, Human
gcagaggaaagcaaaggaga

SEQ ID NO: 1526862 - RNA, 14 nt, Human
gcagagggcacaga

SEQ ID NO: 1526863 - RNA, 17 nt, Human
gcagcauauucaggaag

SEQ ID NO: 1526864 - RNA, 18 nt, Human
gcagcauauucaggaagc

SEQ ID NO: 1526865 - RNA, 19 nt, Human
gcagcauauucaggaagcu

SEQ ID NO: 1526866 - RNA, 23 nt, Human
gcagcauauucaggaagcucagg

SEQ ID NO: 1526867 - RNA, 22 nt, Human
gcacuuuguucuggcucuucca

SEQ ID NO: 1526868 - RNA, 12 nt, Human
gcagaacaguga

SEQ ID NO: 1526869 - RNA, 13 nt, Human
gcagaacagugau

SEQ ID NO: 1526870 - RNA, 14 nt, Human
gcacuccagccugg

SEQ ID NO: 1526871 - RNA, 15 nt, Human
gcacuccagccuggg

SEQ ID NO: 1526872 - RNA, 13 nt, Human
gcacuccccugcu

SEQ ID NO: 1526873 - RNA, 14 nt, Human
gcacuccccugcug

SEQ ID NO: 1526874 - RNA, 15 nt, Human
gcacuccccugcugg

SEQ ID NO: 1526875 - RNA, 16 nt, Human
gcacuccccugcuggg

SEQ ID NO: 1526876 - RNA, 18 nt, Human
gcacuuuguucuggcucu

SEQ ID NO: 1526877 - RNA, 19 nt, Human
gcacuuuguucuggcucuu

SEQ ID NO: 1526878 - RNA, 20 nt, Human
gcacucagaagacacugaug

SEQ ID NO: 1526879 - RNA, 18 nt, Human
gcaagugagagcugggug

SEQ ID NO: 1526880 - RNA, 19 nt, Human
gcaagugagagcugggugu

SEQ ID NO: 1526881 - RNA, 18 nt, Human
gcagcccaccccucaaca

SEQ ID NO: 1526882 - RNA, 15 nt, Human
gcagccacauuccug

SEQ ID NO: 1526883 - RNA, 18 nt, Human
gagacgggggcagagagg

SEQ ID NO: 1526884 - RNA, 16 nt, Human
gagacggagucccacc

SEQ ID NO: 1526885 - RNA, 19 nt, Human
gagacggagucccaccuug

SEQ ID NO: 1526886 - RNA, 14 nt, Human
gagacggaguccca

SEQ ID NO: 1526887 - RNA, 15 nt, Human
gagaaugaaagggcc

SEQ ID NO: 1526888 - RNA, 23 nt, Human
gagaaugaaagggcccagagagg

SEQ ID NO: 1526889 - RNA, 22 nt, Human
gacuuuuuauggcacuaguauu

SEQ ID NO: 1526890 - RNA, 19 nt, Human
gacuuuuccaacccucauc

SEQ ID NO: 1526891 - RNA, 14 nt, Human
gacuuuuccaaccc

SEQ ID NO: 1526892 - RNA, 20 nt, Human
gacuuuuccaacccucauca

SEQ ID NO: 1526893 - RNA, 19 nt, Human
gacuuuuuuuuuuuauaau

SEQ ID NO: 1526894 - RNA, 13 nt, Human
gagacuccugcag

SEQ ID NO: 1526895 - RNA, 14 nt, Human
gagacuccugcagg

SEQ ID NO: 1526896 - RNA, 15 nt, Human
gagagccuuccaggg

SEQ ID NO: 1526897 - RNA, 16 nt, Human
gagagccuuccagggg

SEQ ID NO: 1526898 - RNA, 13 nt, Human
gagagcugggugu

SEQ ID NO: 1526899 - RNA, 15 nt, Human
gagagcuagcagcag

SEQ ID NO: 1526900 - RNA, 21 nt, Human
gagagcuagcagcagggaggg

SEQ ID NO: 1526901 - RNA, 18 nt, Human
gagagccuuccaggggug

SEQ ID NO: 1526902 - RNA, 20 nt, Human
gagagccuuccagggguggg

SEQ ID NO: 1526903 - RNA, 15 nt, Human
gagaggacccccuga

SEQ ID NO: 1526904 - RNA, 12 nt, Human
gagaggaaauca

SEQ ID NO: 1526905 - RNA, 20 nt, Human
gagagcugggugucaagagg

SEQ ID NO: 1526906 - RNA, 20 nt, Human
gagaugcuagaacucccuuu

SEQ ID NO: 1526907 - RNA, 16 nt, Human
gagaugcuagaacucc

SEQ ID NO: 1526908 - RNA, 21 nt, Human
gagauugugccccugcacucc

SEQ ID NO: 1526909 - RNA, 14 nt, Human
gagauuggaaggaa

SEQ ID NO: 1526910 - RNA, 21 nt, Human
gaggacgcucucuggccuucg

SEQ ID NO: 1526911 - RNA, 16 nt, Human
gaggacuuuucuuugu

SEQ ID NO: 1526912 - RNA, 20 nt, Human
gaggacuuuucuuuguggcu

SEQ ID NO: 1526913 - RNA, 23 nt, Human
gaggacuuuucuuuguggcuucc

SEQ ID NO: 1526914 - RNA, 12 nt, Human
gaggagaaacug

SEQ ID NO: 1526915 - RNA, 14 nt, Human
gaggagaaacugga

SEQ ID NO: 1526916 - RNA, 12 nt, Human
gaggagagagga

SEQ ID NO: 1526917 - RNA, 14 nt, Human
gaggagagaggacc

SEQ ID NO: 1526918 - RNA, 15 nt, Human
gaggagagaggaccc

SEQ ID NO: 1526919 - RNA, 22 nt, Human
gaggcagggucucacucugucg

SEQ ID NO: 1526920 - RNA, 19 nt, Human
gaggcagggucucacucug

SEQ ID NO: 1526921 - RNA, 20 nt, Human
gaggcagggucucacucugu

SEQ ID NO: 1526922 - RNA, 18 nt, Human
gaggcugagaugggagaa

SEQ ID NO: 1526923 - RNA, 17 nt, Human
gaggcuccacuuggucu

SEQ ID NO: 1526924 - RNA, 18 nt, Human
gaggcuccacuuggucug

SEQ ID NO: 1526925 - RNA, 19 nt, Human
gaggcauuuguuugaacug

SEQ ID NO: 1526926 - RNA, 22 nt, Human
gaggcaugugaugagaggaaau

SEQ ID NO: 1526927 - RNA, 20 nt, Human
gaggcaugugaugagaggaa

SEQ ID NO: 1526928 - RNA, 21 nt, Human
gaggcaugugaugagaggaaa

SEQ ID NO: 1526929 - RNA, 21 nt, Human
gaggcauuuguuugaacugau

SEQ ID NO: 1526930 - RNA, 15 nt, Human
gaggcuccacuuggu

SEQ ID NO: 1526931 - RNA, 17 nt, Human
gaggccaaggugggagg

SEQ ID NO: 1526932 - RNA, 14 nt, Human
gagggccugcaagg

SEQ ID NO: 1526933 - RNA, 17 nt, Human
gagggccugcaagggag

SEQ ID NO: 1526934 - RNA, 21 nt, Human
gagggccugcaagggagugag

SEQ ID NO: 1526935 - RNA, 14 nt, Human
gagccccgaggccu

SEQ ID NO: 1526936 - RNA, 17 nt, Human
gagccccgaggccuucu

SEQ ID NO: 1526937 - RNA, 14 nt, Human
gagcagucaggaaa

SEQ ID NO: 1526938 - RNA, 14 nt, Human
gagcaucaggccag

SEQ ID NO: 1526939 - RNA, 17 nt, Human
gagcaucaggccaggcc

SEQ ID NO: 1526940 - RNA, 15 nt, Human
gagcaucaggccagg

SEQ ID NO: 1526941 - RNA, 16 nt, Human
gagcaucaggccaggc

SEQ ID NO: 1526942 - RNA, 21 nt, Human
gagcaugccuggauggggcug

SEQ ID NO: 1526943 - RNA, 13 nt, Human
gagcaugccugga

SEQ ID NO: 1526944 - RNA, 13 nt, Human
gagcccugguggc

SEQ ID NO: 1526945 - RNA, 14 nt, Human
gagcccugguggca

SEQ ID NO: 1526946 - RNA, 20 nt, Human
gagcuguucacagccagacu

SEQ ID NO: 1526947 - RNA, 23 nt, Human
gagcuggccgcgccaaauaaugu

SEQ ID NO: 1526948 - RNA, 22 nt, Human
gagcuguucacagccagacugg

SEQ ID NO: 1526949 - RNA, 14 nt, Human
gaaugauuaugaau

SEQ ID NO: 1526950 - RNA, 14 nt, Human
gaaugauuaauuaa

SEQ ID NO: 1526951 - RNA, 20 nt, Human
gaaugaugauccuaggcauu

SEQ ID NO: 1526952 - RNA, 14 nt, Human
gaaugaugccauga

SEQ ID NO: 1526953 - RNA, 15 nt, Human
gaaugaauggcuaag

SEQ ID NO: 1526954 - RNA, 20 nt, Human
gaaugaauggcuaagcaaaa

SEQ ID NO: 1526955 - RNA, 22 nt, Human
gaaugauuaugaauuacauuug

SEQ ID NO: 1526956 - RNA, 18 nt, Human
gaaugcacaaacagaggc

SEQ ID NO: 1526957 - RNA, 19 nt, Human
gaaugcacaaacagaggcc

SEQ ID NO: 1526958 - RNA, 16 nt, Human
gaauguuugccucugc

SEQ ID NO: 1526959 - RNA, 17 nt, Human
gaauguuugccucugcc

SEQ ID NO: 1526960 - RNA, 13 nt, Human
gaauuacauuugu

SEQ ID NO: 1526961 - RNA, 18 nt, Human
gaauuaaguuagggaaug

SEQ ID NO: 1526962 - RNA, 21 nt, Human
gaauuaaguuagggaauggca

SEQ ID NO: 1526963 - RNA, 15 nt, Human
gaauuacauuuguau

SEQ ID NO: 1526964 - RNA, 18 nt, Human
gaauuacauuuguauaaa

SEQ ID NO: 1526965 - RNA, 20 nt, Human
gaauuacauuuguauaaaau

SEQ ID NO: 1526966 - RNA, 14 nt, Human
gaauuaacacauga

SEQ ID NO: 1526967 - RNA, 15 nt, Human
gaauuaacacaugau

SEQ ID NO: 1526968 - RNA, 18 nt, Human
gaauguuugccucugccu

SEQ ID NO: 1526969 - RNA, 19 nt, Human
gaauguuugccucugccuc

SEQ ID NO: 1526970 - RNA, 14 nt, Human
gacaaaaagcuacu

SEQ ID NO: 1526971 - RNA, 14 nt, Human
gaauuaugaaacuu

SEQ ID NO: 1526972 - RNA, 12 nt, Human
gacacagcucuu

SEQ ID NO: 1526973 - RNA, 19 nt, Human
gacacagcucuucuccagg

SEQ ID NO: 1526974 - RNA, 20 nt, Human
gacacagcucuucuccaggc

SEQ ID NO: 1526975 - RNA, 21 nt, Human
gacacagcucuucuccaggcu

SEQ ID NO: 1526976 - RNA, 13 nt, Human
gacacagcucuuc

SEQ ID NO: 1526977 - RNA, 22 nt, Human
gaauaucuccgucaacucauau

SEQ ID NO: 1526978 - RNA, 11 nt, Human
gaauauugcug

SEQ ID NO: 1526979 - RNA, 12 nt, Human
gaauauugcuga

SEQ ID NO: 1526980 - RNA, 13 nt, Human
gaauauugcugau

SEQ ID NO: 1526981 - RNA, 15 nt, Human
gaauauauaaccagu

SEQ ID NO: 1526982 - RNA, 22 nt, Human
gaauauugcuuuggucauauga

SEQ ID NO: 1526983 - RNA, 24 nt, Human
gaauauugcugauggugcaaugac

SEQ ID NO: 1526984 - RNA, 22 nt, Human
gaauauugcugauggugcaaug

SEQ ID NO: 1526985 - RNA, 23 nt, Human
gaauauugcugauggugcaauga

SEQ ID NO: 1526986 - RNA, 14 nt, Human
gaaugaauggcuaa

SEQ ID NO: 1526987 - RNA, 18 nt, Human
gacagucaccucauggaa

SEQ ID NO: 1526988 - RNA, 11 nt, Human
gacagcucuua

SEQ ID NO: 1526989 - RNA, 12 nt, Human
gacagucccugc

SEQ ID NO: 1526990 - RNA, 12 nt, Human
gacagcucugca

SEQ ID NO: 1526991 - RNA, 19 nt, Human
gacagcuccuucuguccua

SEQ ID NO: 1526992 - RNA, 10 nt, Human
gacagcucuu

SEQ ID NO: 1526993 - RNA, 14 nt, Human
gacagucccugcca

SEQ ID NO: 1526994 - RNA, 15 nt, Human
gacagucccugccaa

SEQ ID NO: 1526995 - RNA, 16 nt, Human
gacagucccugccaau

SEQ ID NO: 1526996 - RNA, 20 nt, Human
gacagucccugccaauggac

SEQ ID NO: 1526997 - RNA, 14 nt, Human
gacagcccgggcuc

SEQ ID NO: 1526998 - RNA, 16 nt, Human
gacagcccgggcucug

SEQ ID NO: 1526999 - RNA, 17 nt, Human
gacagcuccuucugucc

SEQ ID NO: 1527000 - RNA, 18 nt, Human
gacagcuccuucuguccu

SEQ ID NO: 1527001 - RNA, 23 nt, Human
gacauugcggacagccacggcca

SEQ ID NO: 1527002 - RNA, 22 nt, Human
gacgcuacccgggaagggggcu

SEQ ID NO: 1527003 - RNA, 14 nt, Human
gacgcucucuggcc

SEQ ID NO: 1527004 - RNA, 23 nt, Human
gacgcuacccgggaagggggcug

SEQ ID NO: 1527005 - RNA, 15 nt, Human
gacgcucucuggccu

SEQ ID NO: 1527006 - RNA, 21 nt, Human
gacgcugugcugcccugccca

SEQ ID NO: 1527007 - RNA, 18 nt, Human
gacgcugugcugcccugc

SEQ ID NO: 1527008 - RNA, 16 nt, Human
gacgcugugcugcccu

SEQ ID NO: 1527009 - RNA, 17 nt, Human
gacgcugugcugcccug

SEQ ID NO: 1527010 - RNA, 22 nt, Human
gaccucugcagcaauaaagcag

SEQ ID NO: 1527011 - RNA, 18 nt, Human
gaccucugcagcaauaaa

SEQ ID NO: 1527012 - RNA, 16 nt, Human
gaccucugcagcaaua

SEQ ID NO: 1527013 - RNA, 15 nt, Human
gacgccaucccagcc

SEQ ID NO: 1527014 - RNA, 21 nt, Human
gacgccaucccagccccaaug

SEQ ID NO: 1527015 - RNA, 13 nt, Human
gaccucugccuga

SEQ ID NO: 1527016 - RNA, 12 nt, Human
gacgccauccca

SEQ ID NO: 1527017 - RNA, 13 nt, Human
gacgccaucccag

SEQ ID NO: 1527018 - RNA, 10 nt, Human
gacccugagg

SEQ ID NO: 1527019 - RNA, 14 nt, Human
gaccucaggccugg

SEQ ID NO: 1527020 - RNA, 19 nt, Human
gaccucaggccugggggcu

SEQ ID NO: 1527021 - RNA, 18 nt, Human
gaccucaggugagaagca

SEQ ID NO: 1527022 - RNA, 19 nt, Human
gaccucaggugagaagcag

SEQ ID NO: 1527023 - RNA, 21 nt, Human
gaccucaggugagaagcagag

SEQ ID NO: 1527024 - RNA, 19 nt, Human
gaccucaggugauccaccc

SEQ ID NO: 1527025 - RNA, 20 nt, Human
gaccucaggugauccaccca

SEQ ID NO: 1527026 - RNA, 21 nt, Human
gaccucaggugauccacccac

SEQ ID NO: 1527027 - RNA, 13 nt, Human
gcauuuagaugua

SEQ ID NO: 1527028 - RNA, 19 nt, Human
gcauuuaggccaugggaca

SEQ ID NO: 1527029 - RNA, 12 nt, Human
gcauuuagaugu

SEQ ID NO: 1527030 - RNA, 18 nt, Human
gcauuuacuuuguguuca

SEQ ID NO: 1527031 - RNA, 16 nt, Human
gcccacgcccccacug

SEQ ID NO: 1527032 - RNA, 17 nt, Human
gcccacgcccccacugg

SEQ ID NO: 1527033 - RNA, 21 nt, Human
gcccacgcccccacuggugac

SEQ ID NO: 1527034 - RNA, 23 nt, Human
gcccacgcuggagugcagugagc

SEQ ID NO: 1527035 - RNA, 19 nt, Human
gcccacgcuggagugcagu

SEQ ID NO: 1527036 - RNA, 21 nt, Human
gcccacgcuggagugcaguga

SEQ ID NO: 1527037 - RNA, 13 nt, Human
gcccacuucugcc

SEQ ID NO: 1527038 - RNA, 24 nt, Human
gcccaggaaaggcuccaggagcag

SEQ ID NO: 1527039 - RNA, 22 nt, Human
gcccaggaaaggcuccaggagc

SEQ ID NO: 1527040 - RNA, 23 nt, Human
gcccaggaaaggcuccaggagca

SEQ ID NO: 1527041 - RNA, 11 nt, Human
gcccaggcccc

SEQ ID NO: 1527042 - RNA, 12 nt, Human
gcccaggccccu

SEQ ID NO: 1527043 - RNA, 20 nt, Human
gcccaggccccugccacccu

SEQ ID NO: 1527044 - RNA, 21 nt, Human
gcccaggccccugccacccug

SEQ ID NO: 1527045 - RNA, 22 nt, Human
gcccaggccccugccacccugg

SEQ ID NO: 1527046 - RNA, 12 nt, Human
gcccaggcaggu

SEQ ID NO: 1527047 - RNA, 11 nt, Human
gcccaggcagg

SEQ ID NO: 1527048 - RNA, 12 nt, Human
gcccccaggacu

SEQ ID NO: 1527049 - RNA, 13 nt, Human
gcccccaggacug

SEQ ID NO: 1527050 - RNA, 14 nt, Human
gcccccaggacugg

SEQ ID NO: 1527051 - RNA, 15 nt, Human
gcccccaggacuggg

SEQ ID NO: 1527052 - RNA, 16 nt, Human
gcccccaggacugggc

SEQ ID NO: 1527053 - RNA, 12 nt, Human
gccccugcuggu

SEQ ID NO: 1527054 - RNA, 17 nt, Human
gcccccaggacugggcc

SEQ ID NO: 1527055 - RNA, 15 nt, Human
gccccugcugguuca

SEQ ID NO: 1527056 - RNA, 16 nt, Human
gccccugcugguucag

SEQ ID NO: 1527057 - RNA, 12 nt, Human
gccccuggcagc

SEQ ID NO: 1527058 - RNA, 15 nt, Human
gccccuggcagcccc

SEQ ID NO: 1527059 - RNA, 11 nt, Human
gccccaaaagg

SEQ ID NO: 1527060 - RNA, 21 nt, Human
gccccaaaacucuccucugcu

SEQ ID NO: 1527061 - RNA, 20 nt, Human
gccccaaaacucuccucugc

SEQ ID NO: 1527062 - RNA, 16 nt, Human
gccuacaggagugagc

SEQ ID NO: 1527063 - RNA, 14 nt, Human
gcccugcccaccug

SEQ ID NO: 1527064 - RNA, 15 nt, Human
gcccugcccaccugg

SEQ ID NO: 1527065 - RNA, 19 nt, Human
gcccuuagcagggaaacag

SEQ ID NO: 1527066 - RNA, 23 nt, Human
gcccuuaccugccaggaagccag

SEQ ID NO: 1527067 - RNA, 21 nt, Human
gcccugugggcccccaaaugg

SEQ ID NO: 1527068 - RNA, 16 nt, Human
gcccugugggccccca

SEQ ID NO: 1527069 - RNA, 17 nt, Human
gcccugugggcccccaa

SEQ ID NO: 1527070 - RNA, 22 nt, Human
gcccuuaccugccaggaagcca

SEQ ID NO: 1527071 - RNA, 21 nt, Human
gccccugcugguucaggguug

SEQ ID NO: 1527072 - RNA, 16 nt, Human
gccccuggcagccccu

SEQ ID NO: 1527073 - RNA, 17 nt, Human
gccccuggcagccccug

SEQ ID NO: 1527074 - RNA, 17 nt, Human
gccuacaggagugagca

SEQ ID NO: 1527075 - RNA, 19 nt, Human
gccuagcauacguacacau

SEQ ID NO: 1527076 - RNA, 12 nt, Human
gccuagcauacg

SEQ ID NO: 1527077 - RNA, 16 nt, Human
gccucgaacuggcugc

SEQ ID NO: 1527078 - RNA, 22 nt, Human
gccuccuuugugaggaagccgc

SEQ ID NO: 1527079 - RNA, 13 nt, Human
gccucgaacuggc

SEQ ID NO: 1527080 - RNA, 18 nt, Human
gccuccugcccuuaccug

SEQ ID NO: 1527081 - RNA, 13 nt, Human
gccuccauccuga

SEQ ID NO: 1527082 - RNA, 14 nt, Human
gccuccauccugag

SEQ ID NO: 1527083 - RNA, 15 nt, Human
gccuccauccugagg

SEQ ID NO: 1527084 - RNA, 22 nt, Human
gccucauguccacugguucuuc

SEQ ID NO: 1527085 - RNA, 13 nt, Human
gcucaggaguuug

SEQ ID NO: 1527086 - RNA, 18 nt, Human
gcucagggccuggcucag

SEQ ID NO: 1527087 - RNA, 19 nt, Human
gcucagggccuggcucagg

SEQ ID NO: 1527088 - RNA, 20 nt, Human
gcucagggccuggcucaggu

SEQ ID NO: 1527089 - RNA, 22 nt, Human
gcuaggaccccuccaugugggc

SEQ ID NO: 1527090 - RNA, 20 nt, Human
gcuaggaccccuccaugugg

SEQ ID NO: 1527091 - RNA, 18 nt, Human
gcuauucaguaauaacuc

SEQ ID NO: 1527092 - RNA, 21 nt, Human
gcuaguugggcuuccucauag

SEQ ID NO: 1527093 - RNA, 14 nt, Human
gcuaguugggcuuc

SEQ ID NO: 1527094 - RNA, 16 nt, Human
gcuaguugggcuuccu

SEQ ID NO: 1527095 - RNA, 18 nt, Human
gcuaagugauccucccac

SEQ ID NO: 1527096 - RNA, 22 nt, Human
gcuaagugauccucccaccuca

SEQ ID NO: 1527097 - RNA, 14 nt, Human
gccuugaacuuuga

SEQ ID NO: 1527098 - RNA, 15 nt, Human
gccuucucugaagga

SEQ ID NO: 1527099 - RNA, 16 nt, Human
gccuucucugaaggac

SEQ ID NO: 1527100 - RNA, 15 nt, Human
gccuguucagcucca

SEQ ID NO: 1527101 - RNA, 16 nt, Human
gccuguucagcuccag

SEQ ID NO: 1527102 - RNA, 17 nt, Human
gccuguucagcuccagc

SEQ ID NO: 1527103 - RNA, 15 nt, Human
gccucuguccccuuc

SEQ ID NO: 1527104 - RNA, 18 nt, Human
gccucuguccccuucucu

SEQ ID NO: 1527105 - RNA, 19 nt, Human
gccucuguccccuucucuc

SEQ ID NO: 1527106 - RNA, 20 nt, Human
gccucuguccccuucucuca

SEQ ID NO: 1527107 - RNA, 21 nt, Human
gccucuguccccuucucucau

SEQ ID NO: 1527108 - RNA, 22 nt, Human
gccucuguccccuucucucauc

SEQ ID NO: 1527109 - RNA, 23 nt, Human
gccugggaucccucauccucaua

SEQ ID NO: 1527110 - RNA, 11 nt, Human
gccugggcaga

SEQ ID NO: 1527111 - RNA, 19 nt, Human
gccugugccucugggacug

SEQ ID NO: 1527112 - RNA, 21 nt, Human
gcgcagcauauucaggaagcu

SEQ ID NO: 1527113 - RNA, 23 nt, Human
gcgauucuucugcuucagccucc

SEQ ID NO: 1527114 - RNA, 23 nt, Human
gccuugaacuuugaccucugcag

SEQ ID NO: 1527115 - RNA, 16 nt, Human
gccuugaccauucucc

SEQ ID NO: 1527116 - RNA, 22 nt, Human
gccuugaccauucuccaccugc

SEQ ID NO: 1527117 - RNA, 22 nt, Human
gcgauucuucugcuucagccuc

SEQ ID NO: 1527118 - RNA, 23 nt, Human
gccuugaccauucuccaccugcc

SEQ ID NO: 1527119 - RNA, 14 nt, Human
gcggcggucccagc

SEQ ID NO: 1527120 - RNA, 16 nt, Human
gcggcggucccagcuc

SEQ ID NO: 1527121 - RNA, 17 nt, Human
gcggcggucccagcucc

SEQ ID NO: 1527122 - RNA, 20 nt, Human
gcgggaggauguucugggac

SEQ ID NO: 1527123 - RNA, 15 nt, Human
gcggcuggcagccca

SEQ ID NO: 1527124 - RNA, 20 nt, Human
gcugccccuggcagccccug

SEQ ID NO: 1527125 - RNA, 18 nt, Human
gcugccccuggcagcccc

SEQ ID NO: 1527126 - RNA, 19 nt, Human
gcugccccuggcagccccu

SEQ ID NO: 1527127 - RNA, 20 nt, Human
gcugccugggaucccucauc

SEQ ID NO: 1527128 - RNA, 16 nt, Human
gcugccucucccauca

SEQ ID NO: 1527129 - RNA, 21 nt, Human
gcugccugggaucccucaucc

SEQ ID NO: 1527130 - RNA, 17 nt, Human
gcugccuguucagcucc

SEQ ID NO: 1527131 - RNA, 12 nt, Human
gcugccuguuca

SEQ ID NO: 1527132 - RNA, 13 nt, Human
gcugccuguucag

SEQ ID NO: 1527133 - RNA, 18 nt, Human
gcugcacccucaggcagg

SEQ ID NO: 1527134 - RNA, 19 nt, Human
gcugcacccucaggcaggu

SEQ ID NO: 1527135 - RNA, 13 nt, Human
gcugcaccggcug

SEQ ID NO: 1527136 - RNA, 14 nt, Human
gcugcaccggcugg

SEQ ID NO: 1527137 - RNA, 15 nt, Human
gcugaggugggagga

SEQ ID NO: 1527138 - RNA, 23 nt, Human
gcugagggugagugggugaauaa

SEQ ID NO: 1527139 - RNA, 14 nt, Human
gcugaggugggagg

SEQ ID NO: 1527140 - RNA, 15 nt, Human
gcugaggcaauucua

SEQ ID NO: 1527141 - RNA, 14 nt, Human
gcugaggcaauucu

SEQ ID NO: 1527142 - RNA, 20 nt, Human
gcuguauuuuaaaagaauga

SEQ ID NO: 1527143 - RNA, 18 nt, Human
gcuguauuuuaaaagaau

SEQ ID NO: 1527144 - RNA, 21 nt, Human
gcuguauuuuaaaagaaugau

SEQ ID NO: 1527145 - RNA, 17 nt, Human
gcuguaucccaugagcc

SEQ ID NO: 1527146 - RNA, 19 nt, Human
gcuguaucccaugagccuc

SEQ ID NO: 1527147 - RNA, 18 nt, Human
gcugugcucuggacaggc

SEQ ID NO: 1527148 - RNA, 15 nt, Human
gcugugcucuggaca

SEQ ID NO: 1527149 - RNA, 16 nt, Human
gcugugcucuggacag

SEQ ID NO: 1527150 - RNA, 13 nt, Human
gcugugcucugga

SEQ ID NO: 1527151 - RNA, 16 nt, Human
gcuguuggcugggggc

SEQ ID NO: 1527152 - RNA, 20 nt, Human
gcuguuggcugggggccuca

SEQ ID NO: 1527153 - RNA, 15 nt, Human
gcugugcugcccugc

SEQ ID NO: 1527154 - RNA, 16 nt, Human
gcugugcugcccugcc

SEQ ID NO: 1527155 - RNA, 17 nt, Human
gcugugcugcccugccc

SEQ ID NO: 1527156 - RNA, 15 nt, Human
gcuguuggcuggggg

SEQ ID NO: 1527157 - RNA, 20 nt, Human
gcuggcuguuggcugggggc

SEQ ID NO: 1527158 - RNA, 23 nt, Human
gcuggcuguuggcugggggccuc

SEQ ID NO: 1527159 - RNA, 17 nt, Human
gcugggguggggaccuc

SEQ ID NO: 1527160 - RNA, 19 nt, Human
gcugggguggggaccucag

SEQ ID NO: 1527161 - RNA, 22 nt, Human
gcugggguggggaccucaggcc

SEQ ID NO: 1527162 - RNA, 23 nt, Human
gcugggguggggaccucaggccu

SEQ ID NO: 1527163 - RNA, 18 nt, Human
gcuggguucuacccaggu

SEQ ID NO: 1527164 - RNA, 20 nt, Human
gcuggguucuacccaggugc

SEQ ID NO: 1527165 - RNA, 21 nt, Human
gcuggguucuacccaggugcu

SEQ ID NO: 1527166 - RNA, 13 nt, Human
gcugcugaaacaa

SEQ ID NO: 1527167 - RNA, 12 nt, Human
gcugcugaaggc

SEQ ID NO: 1527168 - RNA, 20 nt, Human
gcuggcgugcaguggugcga

SEQ ID NO: 1527169 - RNA, 15 nt, Human
gcuggcgugcagugg

SEQ ID NO: 1527170 - RNA, 18 nt, Human
gcuggcgugcaguggugc

SEQ ID NO: 1527171 - RNA, 18 nt, Human
gcuggcuguuggcugggg

SEQ ID NO: 1527172 - RNA, 19 nt, Human
gcuggcuguuggcuggggg

SEQ ID NO: 1527173 - RNA, 14 nt, Human
gcuggcgugcagug

SEQ ID NO: 1527174 - RNA, 14 nt, Human
ggacauggacaagg

SEQ ID NO: 1527175 - RNA, 13 nt, Human
ggacauggacaag

SEQ ID NO: 1527176 - RNA, 17 nt, Human
ggacagucaccucaugg

SEQ ID NO: 1527177 - RNA, 18 nt, Human
ggacagucaccucaugga

SEQ ID NO: 1527178 - RNA, 21 nt, Human
ggacagucaccucauggaauu

SEQ ID NO: 1527179 - RNA, 13 nt, Human
ggacacccuguga

SEQ ID NO: 1527180 - RNA, 23 nt, Human
ggacacccugugauggggcccug

SEQ ID NO: 1527181 - RNA, 17 nt, Human
ggacagggaggugaccc

SEQ ID NO: 1527182 - RNA, 12 nt, Human
ggacacccugug

SEQ ID NO: 1527183 - RNA, 14 nt, Human
ggacacagcucuuc

SEQ ID NO: 1527184 - RNA, 13 nt, Human
ggacacagcucuu

SEQ ID NO: 1527185 - RNA, 14 nt, Human
ggaaugauuaauua

SEQ ID NO: 1527186 - RNA, 12 nt, Human
ggacacagcucu

SEQ ID NO: 1527187 - RNA, 19 nt, Human
ggaaugaaugucaguguga

SEQ ID NO: 1527188 - RNA, 19 nt, Human
ggaauacucuuauaucuau

SEQ ID NO: 1527189 - RNA, 16 nt, Human
ggaauaccuguccccc

SEQ ID NO: 1527190 - RNA, 19 nt, Human
ggaauaccugucccccuga

SEQ ID NO: 1527191 - RNA, 16 nt, Human
ggaauauauaaccagu

SEQ ID NO: 1527192 - RNA, 16 nt, Human
ggaagcucagggccug

SEQ ID NO: 1527193 - RNA, 17 nt, Human
ggaagcucagggccugg

SEQ ID NO: 1527194 - RNA, 22 nt, Human
ggaagcucagggccuggcucag

SEQ ID NO: 1527195 - RNA, 21 nt, Human
ggaagcucagggccuggcuca

SEQ ID NO: 1527196 - RNA, 15 nt, Human
ggaauaccugucccc

SEQ ID NO: 1527197 - RNA, 19 nt, Human
ggaaaucaggguuaguauu

SEQ ID NO: 1527198 - RNA, 23 nt, Human
ggaaaucaccgaaaacguggcug

SEQ ID NO: 1527199 - RNA, 18 nt, Human
ggaagccgcuggggccag

SEQ ID NO: 1527200 - RNA, 22 nt, Human
ggaagccagcaggcucucaggc

SEQ ID NO: 1527201 - RNA, 23 nt, Human
ggaagccagcaggcucucaggcc

SEQ ID NO: 1527202 - RNA, 21 nt, Human
ggaagccagcaggcucucagg

SEQ ID NO: 1527203 - RNA, 20 nt, Human
ggaaagacuuuuccaacccu

SEQ ID NO: 1527204 - RNA, 14 nt, Human
ggaaagaggcucug

SEQ ID NO: 1527205 - RNA, 19 nt, Human
ggaaagcaaaggagauugg

SEQ ID NO: 1527206 - RNA, 16 nt, Human
ggaaagaguaggaaga

SEQ ID NO: 1527207 - RNA, 17 nt, Human
ggaaagaguaggaagac

SEQ ID NO: 1527208 - RNA, 16 nt, Human
ggaaaaaauaacaaug

SEQ ID NO: 1527209 - RNA, 19 nt, Human
gcuuuugugcauuaucuag

SEQ ID NO: 1527210 - RNA, 13 nt, Human
gcuuuugugcauu

SEQ ID NO: 1527211 - RNA, 15 nt, Human
gcuuuuuaauauuga

SEQ ID NO: 1527212 - RNA, 15 nt, Human
ggaaacccagcucug

SEQ ID NO: 1527213 - RNA, 20 nt, Human
ggaaacagcuaaugggacac

SEQ ID NO: 1527214 - RNA, 17 nt, Human
ggaaacuggaugagguc

SEQ ID NO: 1527215 - RNA, 13 nt, Human
ggaaacugccagc

SEQ ID NO: 1527216 - RNA, 20 nt, Human
gcuugaccgugaggccagag

SEQ ID NO: 1527217 - RNA, 22 nt, Human
gcuuggggaccagagcugccac

SEQ ID NO: 1527218 - RNA, 17 nt, Human
gcuuggggaccagagcu

SEQ ID NO: 1527219 - RNA, 18 nt, Human
gcuuggggaccagagcug

SEQ ID NO: 1527220 - RNA, 20 nt, Human
gcuuggggaccagagcugcc

SEQ ID NO: 1527221 - RNA, 21 nt, Human
gcuuggggaccagagcugcca

SEQ ID NO: 1527222 - RNA, 13 nt, Human
gcuuucuacccag

SEQ ID NO: 1527223 - RNA, 19 nt, Human
gcuuucuacccagcgagcc

SEQ ID NO: 1527224 - RNA, 22 nt, Human
gcuuucuacccagcgagcccug

SEQ ID NO: 1527225 - RNA, 23 nt, Human
gcuuucuacccagcgagcccugg

SEQ ID NO: 1527226 - RNA, 16 nt, Human
gcuucuucagagacuc

SEQ ID NO: 1527227 - RNA, 17 nt, Human
gcuuaacuucacauauu

SEQ ID NO: 1527228 - RNA, 16 nt, Human
gcuuaacuucacauau

SEQ ID NO: 1527229 - RNA, 19 nt, Human
gcuucuucagagacuccug

SEQ ID NO: 1527230 - RNA, 21 nt, Human
gcuucuucagagacuccugca

SEQ ID NO: 1527231 - RNA, 23 nt, Human
gcuucuucagagacuccugcagg

SEQ ID NO: 1527232 - RNA, 17 nt, Human
gcuugaccgugaggcca

SEQ ID NO: 1527233 - RNA, 18 nt, Human
gcuugaccgugaggccag

SEQ ID NO: 1527234 - RNA, 19 nt, Human
gcuugaccgugaggccaga

SEQ ID NO: 1527235 - RNA, 23 nt, Human
gcuugggcuucauccuccucaga

SEQ ID NO: 1527236 - RNA, 16 nt, Human
gcuuggggaccagagc

SEQ ID NO: 1527237 - RNA, 17 nt, Human
gguuuucacauuggaaa

SEQ ID NO: 1527238 - RNA, 19 nt, Human
gguuuuauuguuuaaaauc

SEQ ID NO: 1527239 - RNA, 20 nt, Human
gguuuguaaauuaacuuuua

SEQ ID NO: 1527240 - RNA, 22 nt, Human
gguuucuaaagcugccagccga

SEQ ID NO: 1527241 - RNA, 16 nt, Human
gguuucuaaagcugcc

SEQ ID NO: 1527242 - RNA, 17 nt, Human
aaaguauguuagugcaa

SEQ ID NO: 1527243 - RNA, 14 nt, Human
aaagugguacuuga

SEQ ID NO: 1527244 - RNA, 20 nt, Human
aaagugguacuugaucauuu

SEQ ID NO: 1527245 - RNA, 21 nt, Human
aaaguguauuuuuuuacuaau

SEQ ID NO: 1527246 - RNA, 14 nt, Human
aaaguguauuuuuu

SEQ ID NO: 1527247 - RNA, 21 nt, Human
aaaguaucccuacuguaauuu

SEQ ID NO: 1527248 - RNA, 20 nt, Human
aaaguagaagucuuagaugu

SEQ ID NO: 1527249 - RNA, 22 nt, Human
aaaguagaagucuuagauguau

SEQ ID NO: 1527250 - RNA, 18 nt, Human
aaaguacacuguuucaaa

SEQ ID NO: 1527251 - RNA, 19 nt, Human
aaaguacacuguuucaaac

SEQ ID NO: 1527252 - RNA, 17 nt, Human
gguguugacaugugcuu

SEQ ID NO: 1527253 - RNA, 11 nt, Human
gguguggggga

SEQ ID NO: 1527254 - RNA, 13 nt, Human
ggugugggggaag

SEQ ID NO: 1527255 - RNA, 13 nt, Human
ggugggggccucg

SEQ ID NO: 1527256 - RNA, 14 nt, Human
gguguggagaagcg

SEQ ID NO: 1527257 - RNA, 23 nt, Human
gguguggagaagcggcuggcagc

SEQ ID NO: 1527258 - RNA, 17 nt, Human
gguucccauuugcuccu

SEQ ID NO: 1527259 - RNA, 17 nt, Human
gguguuuuaaaaaaucu

SEQ ID NO: 1527260 - RNA, 17 nt, Human
gguguuuccuggcacug

SEQ ID NO: 1527261 - RNA, 19 nt, Human
gguguuuccuggcacugcu

SEQ ID NO: 1527262 - RNA, 23 nt, Human
gguucccuuugacgccaucccag

SEQ ID NO: 1527263 - RNA, 22 nt, Human
gguucccuuuuuuggcugcuga

SEQ ID NO: 1527264 - RNA, 20 nt, Human
gguucggauuugggguggau

SEQ ID NO: 1527265 - RNA, 20 nt, Human
gguucuagcauggcauauuu

SEQ ID NO: 1527266 - RNA, 18 nt, Human
gguggcuggguuggaggg

SEQ ID NO: 1527267 - RNA, 19 nt, Human
gguggggaccucaggccug

SEQ ID NO: 1527268 - RNA, 13 nt, Human
ggugggacacccu

SEQ ID NO: 1527269 - RNA, 16 nt, Human
ggugggacacccugug

SEQ ID NO: 1527270 - RNA, 17 nt, Human
ggugggacacccuguga

SEQ ID NO: 1527271 - RNA, 20 nt, Human
ggugggaggaucucuugagc

SEQ ID NO: 1527272 - RNA, 20 nt, Human
aaagggcuguuauaaucuuu

SEQ ID NO: 1527273 - RNA, 22 nt, Human
aaagggcuguuauaaucuuuca

SEQ ID NO: 1527274 - RNA, 13 nt, Human
aaagcuuauuaaa

SEQ ID NO: 1527275 - RNA, 20 nt, Human
aaagggcccagagagggugg

SEQ ID NO: 1527276 - RNA, 16 nt, Human
aaagcagaacagugau

SEQ ID NO: 1527277 - RNA, 14 nt, Human
gguggcaccagcag

SEQ ID NO: 1527278 - RNA, 20 nt, Human
gguggcaccagcagccugga

SEQ ID NO: 1527279 - RNA, 12 nt, Human
aaacuuuaugcu

SEQ ID NO: 1527280 - RNA, 19 nt, Human
aaacuuuaugcuaagugaa

SEQ ID NO: 1527281 - RNA, 22 nt, Human
aaagcugccagccgagauagcc

SEQ ID NO: 1527282 - RNA, 17 nt, Human
aaagcuaggccuggcca

SEQ ID NO: 1527283 - RNA, 12 nt, Human
aaagcugccagc

SEQ ID NO: 1527284 - RNA, 13 nt, Human
aaagcugccagcc

SEQ ID NO: 1527285 - RNA, 15 nt, Human
aaagcagcguuucua

SEQ ID NO: 1527286 - RNA, 13 nt, Human
aaagcagugcaug

SEQ ID NO: 1527287 - RNA, 16 nt, Human
aaagcagugcaugcug

SEQ ID NO: 1527288 - RNA, 14 nt, Human
aaagcuaggccugg

SEQ ID NO: 1527289 - RNA, 16 nt, Human
aaagcuaggccuggcc

SEQ ID NO: 1527290 - RNA, 18 nt, Human
aaauauaugcuaagucuu

SEQ ID NO: 1527291 - RNA, 14 nt, Human
aaauauauuuaaug

SEQ ID NO: 1527292 - RNA, 15 nt, Human
aaauauauuuaauga

SEQ ID NO: 1527293 - RNA, 22 nt, Human
aaauaucacuugucaauaaaau

SEQ ID NO: 1527294 - RNA, 20 nt, Human
aaauacgugggcauucaaau

SEQ ID NO: 1527295 - RNA, 21 nt, Human
aaauacgugggcauucaaaug

SEQ ID NO: 1527296 - RNA, 15 nt, Human
aaauauaggaacuua

SEQ ID NO: 1527297 - RNA, 19 nt, Human
aaauaccagccaguaaaug

SEQ ID NO: 1527298 - RNA, 16 nt, Human
guacacacacauacac

SEQ ID NO: 1527299 - RNA, 21 nt, Human
aaauaccaugccauuuaaagc

SEQ ID NO: 1527300 - RNA, 21 nt, Human
aaauaccagccaguaaauggg

SEQ ID NO: 1527301 - RNA, 20 nt, Human
aaauaccagccaguaaaugg

SEQ ID NO: 1527302 - RNA, 13 nt, Human
aaauaugcaaagc

SEQ ID NO: 1527303 - RNA, 15 nt, Human
aaauaugcaaagcac

SEQ ID NO: 1527304 - RNA, 16 nt, Human
aaauaugcaaagcacu

SEQ ID NO: 1527305 - RNA, 17 nt, Human
aaauaugcaaagcacug

SEQ ID NO: 1527306 - RNA, 12 nt, Human
aaauaucugaaa

SEQ ID NO: 1527307 - RNA, 14 nt, Human
aaauaucugaaaau

SEQ ID NO: 1527308 - RNA, 17 nt, Human
aaauaucugaaaaugua

SEQ ID NO: 1527309 - RNA, 18 nt, Human
aaauaucugaaaauguau

SEQ ID NO: 1527310 - RNA, 19 nt, Human
aaauaucugaaaauguaug

SEQ ID NO: 1527311 - RNA, 21 nt, Human
aaauaucugaaaauguaugug

SEQ ID NO: 1527312 - RNA, 22 nt, Human
aaauaucugaaaauguaugugu

SEQ ID NO: 1527313 - RNA, 23 nt, Human
aaauaucugaaaauguaugugua

SEQ ID NO: 1527314 - RNA, 16 nt, Human
aaaucagcugcuacua

SEQ ID NO: 1527315 - RNA, 20 nt, Human
aaauauuguguugugaaugu

SEQ ID NO: 1527316 - RNA, 23 nt, Human
aaaucagccugcuccagcuguuc

SEQ ID NO: 1527317 - RNA, 19 nt, Human
aaaucagccugcuccagcu

SEQ ID NO: 1527318 - RNA, 21 nt, Human
aaaucagccugcuccagcugu

SEQ ID NO: 1527319 - RNA, 19 nt, Human
aaauauuaagaaagacuau

SEQ ID NO: 1527320 - RNA, 16 nt, Human
guaacaagccacccca

SEQ ID NO: 1527321 - RNA, 19 nt, Human
guaacaggaaaauuuuaaa

SEQ ID NO: 1527322 - RNA, 20 nt, Human
guaacaggaaaauuuuaaaa

SEQ ID NO: 1527323 - RNA, 22 nt, Human
aaauaaugugaaacuggauuaa

SEQ ID NO: 1527324 - RNA, 12 nt, Human
aaaguggugaga

SEQ ID NO: 1527325 - RNA, 23 nt, Human
aaagugguacuugaucauuuuua

SEQ ID NO: 1527326 - RNA, 22 nt, Human
aaaguguauuuuuuuacuaaua

SEQ ID NO: 1527327 - RNA, 19 nt, Human
guaauagagcaaaauugau

SEQ ID NO: 1527328 - RNA, 15 nt, Human
guaauagagcaaaau

SEQ ID NO: 1527329 - RNA, 22 nt, Human
guaauuugugauacaaugcugu

SEQ ID NO: 1527330 - RNA, 23 nt, Human
guaauccuagcacuuugggaggc

SEQ ID NO: 1527331 - RNA, 13 nt, Human
guaauccuaaauu

SEQ ID NO: 1527332 - RNA, 20 nt, Human
guaauuugugauacaaugcu

SEQ ID NO: 1527333 - RNA, 17 nt, Human
guaauuugugauacaau

SEQ ID NO: 1527334 - RNA, 15 nt, Human
guaauuugugauaca

SEQ ID NO: 1527335 - RNA, 14 nt, Human
ggucagugcaaaua

SEQ ID NO: 1527336 - RNA, 16 nt, Human
ggucauagcagugcuu

SEQ ID NO: 1527337 - RNA, 18 nt, Human
ggucauauuaauauauuu

SEQ ID NO: 1527338 - RNA, 19 nt, Human
gguaucaggugcugccauc

SEQ ID NO: 1527339 - RNA, 22 nt, Human
aaacuugauguguuaucucuua

SEQ ID NO: 1527340 - RNA, 21 nt, Human
aaacuucccuuucugcuugug

SEQ ID NO: 1527341 - RNA, 14 nt, Human
gguaucaggugcug

SEQ ID NO: 1527342 - RNA, 20 nt, Human
gguaggguaagugagagagg

SEQ ID NO: 1527343 - RNA, 20 nt, Human
gguaaggaauaccugucccc

SEQ ID NO: 1527344 - RNA, 13 nt, Human
gguaacaggcaga

SEQ ID NO: 1527345 - RNA, 19 nt, Human
gggugggacacccugugau

SEQ ID NO: 1527346 - RNA, 23 nt, Human
ggguuuugccauguuggccaggc

SEQ ID NO: 1527347 - RNA, 20 nt, Human
ggguuuugccauguuggcca

SEQ ID NO: 1527348 - RNA, 21 nt, Human
aaacguggcugcuucaaggau

SEQ ID NO: 1527349 - RNA, 14 nt, Human
aaacuuaaucuaaa

SEQ ID NO: 1527350 - RNA, 19 nt, Human
aaacuucagacauagaauu

SEQ ID NO: 1527351 - RNA, 15 nt, Human
gggugggacacccug

SEQ ID NO: 1527352 - RNA, 18 nt, Human
gggugggacacccuguga

SEQ ID NO: 1527353 - RNA, 22 nt, Human
aaaccugugucucugagaguag

SEQ ID NO: 1527354 - RNA, 12 nt, Human
gggucaaggaau

SEQ ID NO: 1527355 - RNA, 22 nt, Human
gggucacucuggcagcucagag

SEQ ID NO: 1527356 - RNA, 14 nt, Human
gggucacucuggca

SEQ ID NO: 1527357 - RNA, 20 nt, Human
gggucacucuggcagcucag

SEQ ID NO: 1527358 - RNA, 19 nt, Human
aaacauuuugucauauaag

SEQ ID NO: 1527359 - RNA, 18 nt, Human
ggguccugcagccugcag

SEQ ID NO: 1527360 - RNA, 23 nt, Human
ggguccugcagccugcaggaccu

SEQ ID NO: 1527361 - RNA, 19 nt, Human
ggguccugcagccugcagg

SEQ ID NO: 1527362 - RNA, 11 nt, Human
gggggcuggga

SEQ ID NO: 1527363 - RNA, 15 nt, Human
ggggcccugccuccu

SEQ ID NO: 1527364 - RNA, 21 nt, Human
ggggucacucuggcagcucag

SEQ ID NO: 1527365 - RNA, 13 nt, Human
ggggguggccucc

SEQ ID NO: 1527366 - RNA, 15 nt, Human
gggggcugggcagag

SEQ ID NO: 1527367 - RNA, 14 nt, Human
ggggccaugccucc

SEQ ID NO: 1527368 - RNA, 17 nt, Human
ggggccaugccuccuca

SEQ ID NO: 1527369 - RNA, 19 nt, Human
ggggccaugccuccucagg

SEQ ID NO: 1527370 - RNA, 14 nt, Human
ggggaccagagcug

SEQ ID NO: 1527371 - RNA, 15 nt, Human
ggggaccagagcugc

SEQ ID NO: 1527372 - RNA, 17 nt, Human
ggggcccaugaaagagg

SEQ ID NO: 1527373 - RNA, 23 nt, Human
ggggccaugccuccucaggagcc

SEQ ID NO: 1527374 - RNA, 18 nt, Human
aaaauguauguguaagua

SEQ ID NO: 1527375 - RNA, 12 nt, Human
ggggaccagagc

SEQ ID NO: 1527376 - RNA, 13 nt, Human
ggggaccagagcu

SEQ ID NO: 1527377 - RNA, 16 nt, Human
aaaauauuuuccugcc

SEQ ID NO: 1527378 - RNA, 16 nt, Human
aaaauauauuuaauga

SEQ ID NO: 1527379 - RNA, 18 nt, Human
aaaaugcaacaacaugua

SEQ ID NO: 1527380 - RNA, 22 nt, Human
gggccacuucuggguggggcag

SEQ ID NO: 1527381 - RNA, 20 nt, Human
aaaauggaagacagcucuua

SEQ ID NO: 1527382 - RNA, 11 nt, Human
aaaauaauuuu

SEQ ID NO: 1527383 - RNA, 16 nt, Human
aaaauaauuuuuauau

SEQ ID NO: 1527384 - RNA, 17 nt, Human
aaaauaauuuuuauauu

SEQ ID NO: 1527385 - RNA, 20 nt, Human
aaaauaauuuuuauauuuga

SEQ ID NO: 1527386 - RNA, 14 nt, Human
aaaauacacacuca

SEQ ID NO: 1527387 - RNA, 14 nt, Human
aaaauaccaaggaa

SEQ ID NO: 1527388 - RNA, 13 nt, Human
aaaauaccaagga

SEQ ID NO: 1527389 - RNA, 13 nt, Human
aaaaggaugcaca

SEQ ID NO: 1527390 - RNA, 22 nt, Human
aaaaggagccaauuuaaagaaa

SEQ ID NO: 1527391 - RNA, 22 nt, Human
aaaaggaugcacagaguuguua

SEQ ID NO: 1527392 - RNA, 19 nt, Human
aaaaggaugcacagaguug

SEQ ID NO: 1527393 - RNA, 15 nt, Human
aaaaggaugcacaga

SEQ ID NO: 1527394 - RNA, 14 nt, Human
aaaaggaugcacag

SEQ ID NO: 1527395 - RNA, 16 nt, Human
aaaagguuaauaaagu

SEQ ID NO: 1527396 - RNA, 17 nt, Human
aaaagguuaauaaagua

SEQ ID NO: 1527397 - RNA, 11 nt, Human
aaaaggcagga

SEQ ID NO: 1527398 - RNA, 16 nt, Human
aaaaugguuuaaaugg

SEQ ID NO: 1527399 - RNA, 18 nt, Human
aaaaugguuuaaaugguc

SEQ ID NO: 1527400 - RNA, 17 nt, Human
gggcuggguucuaccca

SEQ ID NO: 1527401 - RNA, 20 nt, Human
gggcugcaccggcuggccug

SEQ ID NO: 1527402 - RNA, 21 nt, Human
gggcugcaccggcuggccugg

SEQ ID NO: 1527403 - RNA, 15 nt, Human
gggcugggcagagga

SEQ ID NO: 1527404 - RNA, 19 nt, Human
gggcugcaccggcuggccu

SEQ ID NO: 1527405 - RNA, 21 nt, Human
gggcucagcggggacagcucc

SEQ ID NO: 1527406 - RNA, 10 nt, Human
gggcuccaga

SEQ ID NO: 1527407 - RNA, 13 nt, Human
gggcuccagacac

SEQ ID NO: 1527408 - RNA, 15 nt, Human
gggcuaguugggcuu

SEQ ID NO: 1527409 - RNA, 18 nt, Human
gggcuaguugggcuuccu

SEQ ID NO: 1527410 - RNA, 22 nt, Human
gggcucagcaaaagaugcuucu

SEQ ID NO: 1527411 - RNA, 17 nt, Human
gggcucagcggggacag

SEQ ID NO: 1527412 - RNA, 19 nt, Human
gggcucagcggggacagcu

SEQ ID NO: 1527413 - RNA, 13 nt, Human
gggccaggagccu

SEQ ID NO: 1527414 - RNA, 14 nt, Human
gggccaggagccuc

SEQ ID NO: 1527415 - RNA, 17 nt, Human
gggccggccaguggccu

SEQ ID NO: 1527416 - RNA, 15 nt, Human
gggcgugguggugag

SEQ ID NO: 1527417 - RNA, 21 nt, Human
gggcggugagaggggaacaga

SEQ ID NO: 1527418 - RNA, 15 nt, Human
gggccucagugccac

SEQ ID NO: 1527419 - RNA, 13 nt, Human
gggccucagugcc

SEQ ID NO: 1527420 - RNA, 14 nt, Human
gggccucagugcca

SEQ ID NO: 1527421 - RNA, 19 nt, Human
gggccucuuaugggcuggg

SEQ ID NO: 1527422 - RNA, 18 nt, Human
gggccucuuaugggcugg

SEQ ID NO: 1527423 - RNA, 22 nt, Human
gggccucgguguggagaagcgg

SEQ ID NO: 1527424 - RNA, 16 nt, Human
ggcuagagguucaaag

SEQ ID NO: 1527425 - RNA, 14 nt, Human
ggcuaccuuuguau

SEQ ID NO: 1527426 - RNA, 13 nt, Human
ggcuaccuuugua

SEQ ID NO: 1527427 - RNA, 20 nt, Human
ggcuaagugauccucccacc

SEQ ID NO: 1527428 - RNA, 16 nt, Human
ggcuaauguacugcau

SEQ ID NO: 1527429 - RNA, 20 nt, Human
ggcuaagcuucacuguaaaa

SEQ ID NO: 1527430 - RNA, 14 nt, Human
ggcgugcaguggug

SEQ ID NO: 1527431 - RNA, 16 nt, Human
ggccuucggccuccau

SEQ ID NO: 1527432 - RNA, 14 nt, Human
ggccuuccccagca

SEQ ID NO: 1527433 - RNA, 13 nt, Human
ggccuuccccagc

SEQ ID NO: 1527434 - RNA, 18 nt, Human
ggccuucggccuccaucc

SEQ ID NO: 1527435 - RNA, 22 nt, Human
ggccuucggccuccauccugag

SEQ ID NO: 1527436 - RNA, 16 nt, Human
ggccugcaagggagug

SEQ ID NO: 1527437 - RNA, 16 nt, Human
ggccuggccagaugca

SEQ ID NO: 1527438 - RNA, 12 nt, Human
ggccuggccaga

SEQ ID NO: 1527439 - RNA, 15 nt, Human
ggccuggccagaugc

SEQ ID NO: 1527440 - RNA, 18 nt, Human
ggccugccuccagggcug

SEQ ID NO: 1527441 - RNA, 19 nt, Human
ggccugccuccagggcugg

SEQ ID NO: 1527442 - RNA, 20 nt, Human
ggccugccuccagggcugga

SEQ ID NO: 1527443 - RNA, 17 nt, Human
ggccagaugcaccagcc

SEQ ID NO: 1527444 - RNA, 22 nt, Human
ggccagagggagugacagaggc

SEQ ID NO: 1527445 - RNA, 15 nt, Human
ggccagaugcaccag

SEQ ID NO: 1527446 - RNA, 16 nt, Human
ggccagaugcaccagc

SEQ ID NO: 1527447 - RNA, 23 nt, Human
ggccucccaacucaccccagccc

SEQ ID NO: 1527448 - RNA, 20 nt, Human
ggccucccaacucaccccag

SEQ ID NO: 1527449 - RNA, 22 nt, Human
ggccucccaacucaccccagcc

SEQ ID NO: 1527450 - RNA, 13 nt, Human
ggccucagugcca

SEQ ID NO: 1527451 - RNA, 17 nt, Human
ggccucccaacucaccc

SEQ ID NO: 1527452 - RNA, 18 nt, Human
ggccucccaacucacccc

SEQ ID NO: 1527453 - RNA, 19 nt, Human
ggccucccaacucacccca

SEQ ID NO: 1527454 - RNA, 22 nt, Human
ggccgcgccaaauaaugucucu

SEQ ID NO: 1527455 - RNA, 11 nt, Human
aaaaaguuugu

SEQ ID NO: 1527456 - RNA, 18 nt, Human
aaaaaguuugucuuaguu

SEQ ID NO: 1527457 - RNA, 20 nt, Human
aaaaagccugcaauuucaua

SEQ ID NO: 1527458 - RNA, 14 nt, Human
aaaaaggaggaaga

SEQ ID NO: 1527459 - RNA, 21 nt, Human
aaaaaggaugcacagaguugu

SEQ ID NO: 1527460 - RNA, 12 nt, Human
aaaaaggcagga

SEQ ID NO: 1527461 - RNA, 13 nt, Human
aaaaauacaaaaa

SEQ ID NO: 1527462 - RNA, 14 nt, Human
ggcuggguuggagg

SEQ ID NO: 1527463 - RNA, 23 nt, Human
aaaaagauuuucagaaaauauua

SEQ ID NO: 1527464 - RNA, 22 nt, Human
aaaaaacugcugacuguuuucu

SEQ ID NO: 1527465 - RNA, 13 nt, Human
ggcuggccuggcc

SEQ ID NO: 1527466 - RNA, 14 nt, Human
ggcuggccuggccc

SEQ ID NO: 1527467 - RNA, 15 nt, Human
ggcuggccuggcccc

SEQ ID NO: 1527468 - RNA, 13 nt, Human
ggcucccuuccca

SEQ ID NO: 1527469 - RNA, 15 nt, Human
ggcucuuccaggcug

SEQ ID NO: 1527470 - RNA, 17 nt, Human
ggcucuuccaggcuggg

SEQ ID NO: 1527471 - RNA, 18 nt, Human
ggcucuuccaggcuggga

SEQ ID NO: 1527472 - RNA, 20 nt, Human
ggcucuuccaggcugggaga

SEQ ID NO: 1527473 - RNA, 15 nt, Human
ggcucacugcagccu

SEQ ID NO: 1527474 - RNA, 13 nt, Human
ggcucacugcagc

SEQ ID NO: 1527475 - RNA, 14 nt, Human
ggcucacugcagcc

SEQ ID NO: 1527476 - RNA, 13 nt, Human
ggauuguccccga

SEQ ID NO: 1527477 - RNA, 14 nt, Human
ggaugaaaaaauaa

SEQ ID NO: 1527478 - RNA, 17 nt, Human
ggauuuaacagaaaugu

SEQ ID NO: 1527479 - RNA, 16 nt, Human
ggauuuaacagaaaug

SEQ ID NO: 1527480 - RNA, 22 nt, Human
ggauuuaacagaaauguacagc

SEQ ID NO: 1527481 - RNA, 12 nt, Human
ggauuuaacaga

SEQ ID NO: 1527482 - RNA, 16 nt, Human
ggauuguccccgaccc

SEQ ID NO: 1527483 - RNA, 20 nt, Human
ggauuguccccgacccuugc

SEQ ID NO: 1527484 - RNA, 18 nt, Human
ggaucucuugagccuggg

SEQ ID NO: 1527485 - RNA, 23 nt, Human
ggaucuucaucugacuaugacau

SEQ ID NO: 1527486 - RNA, 16 nt, Human
ggaguucaucuugaau

SEQ ID NO: 1527487 - RNA, 15 nt, Human
ggauccugagccaga

SEQ ID NO: 1527488 - RNA, 16 nt, Human
ggauccugagccagau

SEQ ID NO: 1527489 - RNA, 18 nt, Human
ggauccugagccagauuu

SEQ ID NO: 1527490 - RNA, 19 nt, Human
ggauccugagccagauuuc

SEQ ID NO: 1527491 - RNA, 20 nt, Human
ggauccugagccagauuuca

SEQ ID NO: 1527492 - RNA, 23 nt, Human
ggauccugagccagauuucacuc

SEQ ID NO: 1527493 - RNA, 20 nt, Human
ggagugugaggguccugcag

SEQ ID NO: 1527494 - RNA, 16 nt, Human
ggaguggccacagaaa

SEQ ID NO: 1527495 - RNA, 12 nt, Human
ggagugggccca

SEQ ID NO: 1527496 - RNA, 22 nt, Human
ggagugggcccaaugcacuuug

SEQ ID NO: 1527497 - RNA, 15 nt, Human
ggaguggccacagaa

SEQ ID NO: 1527498 - RNA, 20 nt, Human
ggaggcuaaagcccagagac

SEQ ID NO: 1527499 - RNA, 13 nt, Human
ggaggggggaggu

SEQ ID NO: 1527500 - RNA, 14 nt, Human
ggaggggggaggug

SEQ ID NO: 1527501 - RNA, 22 nt, Human
ggagguaaggaauaccuguccc

SEQ ID NO: 1527502 - RNA, 21 nt, Human
ggagggugacgggggugaacu

SEQ ID NO: 1527503 - RNA, 22 nt, Human
ggaggugggauccuccaggugc

SEQ ID NO: 1527504 - RNA, 23 nt, Human
ggaggugggauccuccaggugca

SEQ ID NO: 1527505 - RNA, 14 nt, Human
ggcauuugcugaau

SEQ ID NO: 1527506 - RNA, 17 nt, Human
ggccagagacacaagcc

SEQ ID NO: 1527507 - RNA, 18 nt, Human
ggccagagacacaagccu

SEQ ID NO: 1527508 - RNA, 17 nt, Human
ggccagagggagugaca

SEQ ID NO: 1527509 - RNA, 19 nt, Human
ggccagagggagugacaga

SEQ ID NO: 1527510 - RNA, 17 nt, Human
ggcauuuguuugaacug

SEQ ID NO: 1527511 - RNA, 14 nt, Human
ggccaaaggaagca

SEQ ID NO: 1527512 - RNA, 16 nt, Human
ggccaaaggaagcaca

SEQ ID NO: 1527513 - RNA, 21 nt, Human
ggccaaaggaagcacaugccu

SEQ ID NO: 1527514 - RNA, 19 nt, Human
ggccaaaggaagcacaugc

SEQ ID NO: 1527515 - RNA, 18 nt, Human
ggcaggaggaucacuuga

SEQ ID NO: 1527516 - RNA, 14 nt, Human
ggcagccaggccac

SEQ ID NO: 1527517 - RNA, 13 nt, Human
ggcagccaggcca

SEQ ID NO: 1527518 - RNA, 22 nt, Human
ggcacugcuuccagugaggcuc

SEQ ID NO: 1527519 - RNA, 20 nt, Human
ggcacugcuuccagugaggc

SEQ ID NO: 1527520 - RNA, 23 nt, Human
ggcagccccauucugccugccca

SEQ ID NO: 1527521 - RNA, 22 nt, Human
ggcagccccauucugccugccc

SEQ ID NO: 1527522 - RNA, 16 nt, Human
ggcagccccauucugc

SEQ ID NO: 1527523 - RNA, 20 nt, Human
ggcagccccauucugccugc

SEQ ID NO: 1527524 - RNA, 21 nt, Human
ggcagccccauucugccugcc

SEQ ID NO: 1527525 - RNA, 15 nt, Human
ggcaaaaaggcagga

SEQ ID NO: 1527526 - RNA, 18 nt, Human
ggcacaucagcacgauuu

SEQ ID NO: 1527527 - RNA, 19 nt, Human
ggcacagaaaauggaagac

SEQ ID NO: 1527528 - RNA, 16 nt, Human
ggcacugcuuccagug

SEQ ID NO: 1527529 - RNA, 18 nt, Human
ggcacaccgggcacucag

SEQ ID NO: 1527530 - RNA, 18 nt, Human
caggcagauacaggaaaa

SEQ ID NO: 1527531 - RNA, 13 nt, Human
caggccagaggga

SEQ ID NO: 1527532 - RNA, 15 nt, Human
caggccagagggagu

SEQ ID NO: 1527533 - RNA, 19 nt, Human
caggccagcugcuugggcu

SEQ ID NO: 1527534 - RNA, 21 nt, Human
caggccagcugcuugggcuuc

SEQ ID NO: 1527535 - RNA, 23 nt, Human
caggccagcugcuugggcuucau

SEQ ID NO: 1527536 - RNA, 17 nt, Human
caggccaggcccucugc

SEQ ID NO: 1527537 - RNA, 18 nt, Human
caggccaggcccucugcc

SEQ ID NO: 1527538 - RNA, 19 nt, Human
caggccaggcccucugccc

SEQ ID NO: 1527539 - RNA, 16 nt, Human
caggccagagggagug

SEQ ID NO: 1527540 - RNA, 20 nt, Human
caggccaggcccucugccca

SEQ ID NO: 1527541 - RNA, 14 nt, Human
cagggcuggacuga

SEQ ID NO: 1527542 - RNA, 15 nt, Human
cagggcuggacugag

SEQ ID NO: 1527543 - RNA, 18 nt, Human
cagggcuggacugaggcc

SEQ ID NO: 1527544 - RNA, 20 nt, Human
caggggaaaaucagccugcu

SEQ ID NO: 1527545 - RNA, 19 nt, Human
caggggaaaaucagccugc

SEQ ID NO: 1527546 - RNA, 16 nt, Human
cagggcuggacugagg

SEQ ID NO: 1527547 - RNA, 17 nt, Human
cagggcuggacugaggc

SEQ ID NO: 1527548 - RNA, 19 nt, Human
cagggcuggacugaggccu

SEQ ID NO: 1527549 - RNA, 21 nt, Human
cagggcucagcggggacagcu

SEQ ID NO: 1527550 - RNA, 23 nt, Human
cagggcucagcggggacagcucc

SEQ ID NO: 1527551 - RNA, 23 nt, Human
caggcugggcuucaguggcagcu

SEQ ID NO: 1527552 - RNA, 21 nt, Human
caggcugggcuucaguggcag

SEQ ID NO: 1527553 - RNA, 22 nt, Human
caggcugggcuucaguggcagc

SEQ ID NO: 1527554 - RNA, 12 nt, Human
caggcugggaga

SEQ ID NO: 1527555 - RNA, 14 nt, Human
caggcugggagagc

SEQ ID NO: 1527556 - RNA, 15 nt, Human
caggcugggagagcc

SEQ ID NO: 1527557 - RNA, 20 nt, Human
caggcugggcuucaguggca

SEQ ID NO: 1527558 - RNA, 20 nt, Human
cagucugacuguuuccauca

SEQ ID NO: 1527559 - RNA, 13 nt, Human
cagugcaugcugu

SEQ ID NO: 1527560 - RNA, 14 nt, Human
cagugcaugcuguc

SEQ ID NO: 1527561 - RNA, 18 nt, Human
cagucuggaaugcagugg

SEQ ID NO: 1527562 - RNA, 17 nt, Human
cagucuggaaugcagug

SEQ ID NO: 1527563 - RNA, 15 nt, Human
cagucuggaaugcag

SEQ ID NO: 1527564 - RNA, 14 nt, Human
caguggggaaugaa

SEQ ID NO: 1527565 - RNA, 18 nt, Human
caguggugguuuucuguu

SEQ ID NO: 1527566 - RNA, 21 nt, Human
caguggugcgaucuggguuca

SEQ ID NO: 1527567 - RNA, 16 nt, Human
cagugcaugcuguccc

SEQ ID NO: 1527568 - RNA, 17 nt, Human
cagugcaugcugucccu

SEQ ID NO: 1527569 - RNA, 13 nt, Human
cagugcccacagg

SEQ ID NO: 1527570 - RNA, 15 nt, Human
cagugcccacaggau

SEQ ID NO: 1527571 - RNA, 17 nt, Human
cagugcccacaggauca

SEQ ID NO: 1527572 - RNA, 20 nt, Human
cagugggagcugccuguuca

SEQ ID NO: 1527573 - RNA, 23 nt, Human
cagugggagcugccuguucagcu

SEQ ID NO: 1527574 - RNA, 18 nt, Human
cagugcccacaggaucag

SEQ ID NO: 1527575 - RNA, 16 nt, Human
cagucaccucauggaa

SEQ ID NO: 1527576 - RNA, 15 nt, Human
cagucacauuccaag

SEQ ID NO: 1527577 - RNA, 19 nt, Human
cagucaccucauggaauug

SEQ ID NO: 1527578 - RNA, 14 nt, Human
cagucaccccggcc

SEQ ID NO: 1527579 - RNA, 14 nt, Human
cagguuuaagcugu

SEQ ID NO: 1527580 - RNA, 12 nt, Human
cagguuuuccug

SEQ ID NO: 1527581 - RNA, 16 nt, Human
cagguuuuccugaaga

SEQ ID NO: 1527582 - RNA, 21 nt, Human
caggugcacaagcuccaagcu

SEQ ID NO: 1527583 - RNA, 19 nt, Human
caggugccaguuauggcua

SEQ ID NO: 1527584 - RNA, 22 nt, Human
caggugcacaagcuccaagcuc

SEQ ID NO: 1527585 - RNA, 21 nt, Human
caggugauccacccaccucag

SEQ ID NO: 1527586 - RNA, 15 nt, Human
caggugcacaagcuc

SEQ ID NO: 1527587 - RNA, 22 nt, Human
caggugauccacccaccucagc

SEQ ID NO: 1527588 - RNA, 23 nt, Human
caggugauccacccaccucagcc

SEQ ID NO: 1527589 - RNA, 17 nt, Human
caggugcacaagcucca

SEQ ID NO: 1527590 - RNA, 18 nt, Human
caggugcacaagcuccaa

SEQ ID NO: 1527591 - RNA, 19 nt, Human
caggugcacaagcuccaag

SEQ ID NO: 1527592 - RNA, 20 nt, Human
caggugcacaagcuccaagc

SEQ ID NO: 1527593 - RNA, 13 nt, Human
cagauccuggaaa

SEQ ID NO: 1527594 - RNA, 12 nt, Human
cagauccuggaa

SEQ ID NO: 1527595 - RNA, 17 nt, Human
cagagguugcagugagc

SEQ ID NO: 1527596 - RNA, 22 nt, Human
cagaggggguggccucccaacu

SEQ ID NO: 1527597 - RNA, 23 nt, Human
cagaggggguggccucccaacuc

SEQ ID NO: 1527598 - RNA, 17 nt, Human
cagauucuuuccugagg

SEQ ID NO: 1527599 - RNA, 18 nt, Human
cagauucuuuccugaggc

SEQ ID NO: 1527600 - RNA, 19 nt, Human
cagauucuuuccugaggcu

SEQ ID NO: 1527601 - RNA, 17 nt, Human
cagcauagaaguaacuu

SEQ ID NO: 1527602 - RNA, 20 nt, Human
cagcacgauuucuguuuaga

SEQ ID NO: 1527603 - RNA, 19 nt, Human
cagcacgauuucuguuuag

SEQ ID NO: 1527604 - RNA, 18 nt, Human
cagcacgauuucuguuua

SEQ ID NO: 1527605 - RNA, 16 nt, Human
cagcacgauuucuguu

SEQ ID NO: 1527606 - RNA, 17 nt, Human
cagauugcaacaggcug

SEQ ID NO: 1527607 - RNA, 20 nt, Human
cagauucuuuccugaggcug

SEQ ID NO: 1527608 - RNA, 22 nt, Human
cagauucuuuccugaggcuggg

SEQ ID NO: 1527609 - RNA, 20 nt, Human
cagcaucauggagguuugaa

SEQ ID NO: 1527610 - RNA, 13 nt, Human
cagccaguaaaug

SEQ ID NO: 1527611 - RNA, 19 nt, Human
cagccgagauagccaaggc

SEQ ID NO: 1527612 - RNA, 20 nt, Human
cagccgagauagccaaggcc

SEQ ID NO: 1527613 - RNA, 19 nt, Human
cagccugcuaauuccccag

SEQ ID NO: 1527614 - RNA, 15 nt, Human
cagccugcuccagcu

SEQ ID NO: 1527615 - RNA, 12 nt, Human
cagccugcucca

SEQ ID NO: 1527616 - RNA, 18 nt, Human
cagcggggacagcuccuu

SEQ ID NO: 1527617 - RNA, 19 nt, Human
cagcggggacagcuccuuc

SEQ ID NO: 1527618 - RNA, 21 nt, Human
cagcggggacagcuccuucug

SEQ ID NO: 1527619 - RNA, 24 nt, Human
cagcugugcucuggacaggcaugu

SEQ ID NO: 1527620 - RNA, 15 nt, Human
cagcugccugggauc

SEQ ID NO: 1527621 - RNA, 20 nt, Human
cagcugugcucuggacaggc

SEQ ID NO: 1527622 - RNA, 12 nt, Human
cagcugccuggg

SEQ ID NO: 1527623 - RNA, 13 nt, Human
cagcugccuggga

SEQ ID NO: 1527624 - RNA, 14 nt, Human
cagcugccugggau

SEQ ID NO: 1527625 - RNA, 21 nt, Human
cagcuccccucggagaagagc

SEQ ID NO: 1527626 - RNA, 22 nt, Human
cagcuccccucggagaagagcu

SEQ ID NO: 1527627 - RNA, 18 nt, Human
caggaaaagcugcugaca

SEQ ID NO: 1527628 - RNA, 15 nt, Human
caggaaaagcugcug

SEQ ID NO: 1527629 - RNA, 16 nt, Human
caggaaaagcugcuga

SEQ ID NO: 1527630 - RNA, 17 nt, Human
cauggcugccaauggga

SEQ ID NO: 1527631 - RNA, 14 nt, Human
caugggaaugaaug

SEQ ID NO: 1527632 - RNA, 15 nt, Human
caugggaaugaaugu

SEQ ID NO: 1527633 - RNA, 16 nt, Human
caugggaaugaauguc

SEQ ID NO: 1527634 - RNA, 17 nt, Human
caugggaaugaauguca

SEQ ID NO: 1527635 - RNA, 14 nt, Human
caugauguuuagaa

SEQ ID NO: 1527636 - RNA, 14 nt, Human
caugcuacacacug

SEQ ID NO: 1527637 - RNA, 23 nt, Human
caugcuacacacugcauguuugu

SEQ ID NO: 1527638 - RNA, 20 nt, Human
caugcuacacacugcauguu

SEQ ID NO: 1527639 - RNA, 13 nt, Human
caugauguuuucc

SEQ ID NO: 1527640 - RNA, 19 nt, Human
cauuauauuuauuacugua

SEQ ID NO: 1527641 - RNA, 13 nt, Human
cauucuccaccug

SEQ ID NO: 1527642 - RNA, 14 nt, Human
cauucuccaccugc

SEQ ID NO: 1527643 - RNA, 16 nt, Human
cauucuccaccugcca

SEQ ID NO: 1527644 - RNA, 16 nt, Human
cauguuggccaggcug

SEQ ID NO: 1527645 - RNA, 14 nt, Human
cauguuggccaggc

SEQ ID NO: 1527646 - RNA, 15 nt, Human
cauguuggccaggcu

SEQ ID NO: 1527647 - RNA, 12 nt, Human
cauccuggaaua

SEQ ID NO: 1527648 - RNA, 23 nt, Human
cauccuggcacccggccccugcu

SEQ ID NO: 1527649 - RNA, 22 nt, Human
cauccuggcacccggccccugc

SEQ ID NO: 1527650 - RNA, 16 nt, Human
caucugcucuccuucc

SEQ ID NO: 1527651 - RNA, 18 nt, Human
caucugcucuccuuccug

SEQ ID NO: 1527652 - RNA, 20 nt, Human
caucugcucuccuuccugga

SEQ ID NO: 1527653 - RNA, 15 nt, Human
cauccuggcacccgg

SEQ ID NO: 1527654 - RNA, 12 nt, Human
caucacuucccu

SEQ ID NO: 1527655 - RNA, 14 nt, Human
caucacuucccuac

SEQ ID NO: 1527656 - RNA, 16 nt, Human
cauauuaccacagaca

SEQ ID NO: 1527657 - RNA, 17 nt, Human
cauauucuguuggccag

SEQ ID NO: 1527658 - RNA, 18 nt, Human
cauauucuguuggccagu

SEQ ID NO: 1527659 - RNA, 14 nt, Human
cauauuaauauauu

SEQ ID NO: 1527660 - RNA, 15 nt, Human
cauauuaauauauuu

SEQ ID NO: 1527661 - RNA, 19 nt, Human
cauauuaauauauuuccau

SEQ ID NO: 1527662 - RNA, 22 nt, Human
caguggugguuuucuguucuuu

SEQ ID NO: 1527663 - RNA, 21 nt, Human
caguggugguuuucuguucuu

SEQ ID NO: 1527664 - RNA, 20 nt, Human
caguggugguuuucuguucu

SEQ ID NO: 1527665 - RNA, 19 nt, Human
caguggugguuuucuguuc

SEQ ID NO: 1527666 - RNA, 23 nt, Human
cauaugcuguauauccuuucuaa

SEQ ID NO: 1527667 - RNA, 13 nt, Human
ccaccgcagacag

SEQ ID NO: 1527668 - RNA, 22 nt, Human
ccaccgcagacaggaccaggga

SEQ ID NO: 1527669 - RNA, 21 nt, Human
ccaccuuugaagaaguaagga

SEQ ID NO: 1527670 - RNA, 18 nt, Human
ccacgcccccacugguga

SEQ ID NO: 1527671 - RNA, 19 nt, Human
ccacgcccccacuggugac

SEQ ID NO: 1527672 - RNA, 16 nt, Human
ccacgcccccacuggu

SEQ ID NO: 1527673 - RNA, 17 nt, Human
ccacgcccccacuggug

SEQ ID NO: 1527674 - RNA, 13 nt, Human
ccaccaucaagcc

SEQ ID NO: 1527675 - RNA, 14 nt, Human
ccaccaucaagcca

SEQ ID NO: 1527676 - RNA, 15 nt, Human
ccaccaucaagccac

SEQ ID NO: 1527677 - RNA, 23 nt, Human
ccacagcaguugaaaagacucca

SEQ ID NO: 1527678 - RNA, 17 nt, Human
ccacagcaguugaaaag

SEQ ID NO: 1527679 - RNA, 18 nt, Human
ccacagcaguugaaaaga

SEQ ID NO: 1527680 - RNA, 12 nt, Human
ccacagcaguug

SEQ ID NO: 1527681 - RNA, 19 nt, Human
cauuuguauaaaauaauuu

SEQ ID NO: 1527682 - RNA, 20 nt, Human
cauuuguauaaaauaauuuu

SEQ ID NO: 1527683 - RNA, 16 nt, Human
cauuuguguugaagag

SEQ ID NO: 1527684 - RNA, 18 nt, Human
cauuuuuuuccaggcugg

SEQ ID NO: 1527685 - RNA, 15 nt, Human
cauuuuuuuccaggc

SEQ ID NO: 1527686 - RNA, 17 nt, Human
cauuuuuuuccaggcug

SEQ ID NO: 1527687 - RNA, 20 nt, Human
cauuuguguugaagagguuu

SEQ ID NO: 1527688 - RNA, 22 nt, Human
cauuuuuuuuaagaaaaaggau

SEQ ID NO: 1527689 - RNA, 21 nt, Human
ccaaaacucuccucugcugcu

SEQ ID NO: 1527690 - RNA, 17 nt, Human
ccaaugggagcucaugg

SEQ ID NO: 1527691 - RNA, 17 nt, Human
ccaauauuuaccagacc

SEQ ID NO: 1527692 - RNA, 15 nt, Human
ccaaugauggucacc

SEQ ID NO: 1527693 - RNA, 14 nt, Human
ccaaugcacuuugu

SEQ ID NO: 1527694 - RNA, 18 nt, Human
ccaagcucugcuccucuc

SEQ ID NO: 1527695 - RNA, 12 nt, Human
ccaagcucugcu

SEQ ID NO: 1527696 - RNA, 13 nt, Human
ccaagcucugcuc

SEQ ID NO: 1527697 - RNA, 18 nt, Human
ccaaauguucaucaauga

SEQ ID NO: 1527698 - RNA, 18 nt, Human
ccaacucaccccagcccc

SEQ ID NO: 1527699 - RNA, 16 nt, Human
ccaacucaccccagcc

SEQ ID NO: 1527700 - RNA, 17 nt, Human
ccaacucaccccagccc

SEQ ID NO: 1527701 - RNA, 17 nt, Human
ccaaauguucaucaaug

SEQ ID NO: 1527702 - RNA, 23 nt, Human
ccaaauggaaaugggcagagcag

SEQ ID NO: 1527703 - RNA, 13 nt, Human
auuccugaacagg

SEQ ID NO: 1527704 - RNA, 21 nt, Human
auucucuccuguaccucuuga

SEQ ID NO: 1527705 - RNA, 19 nt, Human
auucucuccuguaccucuu

SEQ ID NO: 1527706 - RNA, 21 nt, Human
auuccugaugcuucuucagag

SEQ ID NO: 1527707 - RNA, 17 nt, Human
auucuugccaaauauaa

SEQ ID NO: 1527708 - RNA, 17 nt, Human
auucuuuccugaggcug

SEQ ID NO: 1527709 - RNA, 22 nt, Human
auucuuuccugaggcugggcuc

SEQ ID NO: 1527710 - RNA, 20 nt, Human
auuaaauuuugaguucuaca

SEQ ID NO: 1527711 - RNA, 18 nt, Human
auuaaauucuugcaaagu

SEQ ID NO: 1527712 - RNA, 14 nt, Human
auuaaauucuugca

SEQ ID NO: 1527713 - RNA, 20 nt, Human
auuaaauucuugcaaaguau

SEQ ID NO: 1527714 - RNA, 18 nt, Human
auuaaauuuugaguucua

SEQ ID NO: 1527715 - RNA, 22 nt, Human
auucaagaaaacaacuucaaua

SEQ ID NO: 1527716 - RNA, 18 nt, Human
auucacaagacccaaaag

SEQ ID NO: 1527717 - RNA, 17 nt, Human
auucaucucucuuuaau

SEQ ID NO: 1527718 - RNA, 22 nt, Human
auucaucucucuuuaauauaaa

SEQ ID NO: 1527719 - RNA, 20 nt, Human
auucauauuuacuucuuaua

SEQ ID NO: 1527720 - RNA, 18 nt, Human
auucauauuuacuucuua

SEQ ID NO: 1527721 - RNA, 19 nt, Human
auucauauuuacuucuuau

SEQ ID NO: 1527722 - RNA, 13 nt, Human
auuguaaaauggu

SEQ ID NO: 1527723 - RNA, 23 nt, Human
auuguaauaggcguaacuaauuu

SEQ ID NO: 1527724 - RNA, 16 nt, Human
auuguaaggaaugauu

SEQ ID NO: 1527725 - RNA, 15 nt, Human
auuguaaggaaugau

SEQ ID NO: 1527726 - RNA, 14 nt, Human
auuguaaaugugcu

SEQ ID NO: 1527727 - RNA, 15 nt, Human
auuguaaaugugcuu

SEQ ID NO: 1527728 - RNA, 17 nt, Human
auuguaaaugugcuuuu

SEQ ID NO: 1527729 - RNA, 19 nt, Human
auuguucuuaguuugcagu

SEQ ID NO: 1527730 - RNA, 19 nt, Human
auuguacacaccuuauauu

SEQ ID NO: 1527731 - RNA, 19 nt, Human
auuguuuaaaaucauuucu

SEQ ID NO: 1527732 - RNA, 15 nt, Human
auuucuaugaaauau

SEQ ID NO: 1527733 - RNA, 18 nt, Human
auuucuaugaaauauuau

SEQ ID NO: 1527734 - RNA, 11 nt, Human
auuucaucugc

SEQ ID NO: 1527735 - RNA, 14 nt, Human
auuucaucugcucu

SEQ ID NO: 1527736 - RNA, 15 nt, Human
auuucaucugcucuc

SEQ ID NO: 1527737 - RNA, 16 nt, Human
auuucaucugcucucc

SEQ ID NO: 1527738 - RNA, 17 nt, Human
auuucaucugcucuccu

SEQ ID NO: 1527739 - RNA, 20 nt, Human
auuucuaugaaauauuaugu

SEQ ID NO: 1527740 - RNA, 16 nt, Human
auuucuguuuagauaa

SEQ ID NO: 1527741 - RNA, 14 nt, Human
auuucuguuuagau

SEQ ID NO: 1527742 - RNA, 12 nt, Human
auuucuguuuag

SEQ ID NO: 1527743 - RNA, 19 nt, Human
auuucuguuuagauaauac

SEQ ID NO: 1527744 - RNA, 16 nt, Human
auuucagcagcugcag

SEQ ID NO: 1527745 - RNA, 19 nt, Human
auuuauacaggucauauua

SEQ ID NO: 1527746 - RNA, 15 nt, Human
auuuaaugaaagacu

SEQ ID NO: 1527747 - RNA, 22 nt, Human
auuuaaugauaaguaaaugcua

SEQ ID NO: 1527748 - RNA, 14 nt, Human
auuuaaugaaagac

SEQ ID NO: 1527749 - RNA, 17 nt, Human
caaaucagcugcuacua

SEQ ID NO: 1527750 - RNA, 20 nt, Human
caaaguacacuguuucaaac

SEQ ID NO: 1527751 - RNA, 16 nt, Human
caaaguacacuguuuc

SEQ ID NO: 1527752 - RNA, 21 nt, Human
caaaguacacuguuucaaacu

SEQ ID NO: 1527753 - RNA, 13 nt, Human
caaagaugcagcc

SEQ ID NO: 1527754 - RNA, 14 nt, Human
caaagaugcagccg

SEQ ID NO: 1527755 - RNA, 21 nt, Human
caaaucugcuuuuuaaagaau

SEQ ID NO: 1527756 - RNA, 23 nt, Human
caacaaaccuguuucugcagcca

SEQ ID NO: 1527757 - RNA, 22 nt, Human
caacaccucugcacaagcugca

SEQ ID NO: 1527758 - RNA, 20 nt, Human
caacaccuuguuucccucuc

SEQ ID NO: 1527759 - RNA, 15 nt, Human
caacacgagcaggcu

SEQ ID NO: 1527760 - RNA, 23 nt, Human
caagaauuucuaggacugaauua

SEQ ID NO: 1527761 - RNA, 23 nt, Human
caagacccuuguggucccacccc

SEQ ID NO: 1527762 - RNA, 22 nt, Human
caagacccuuguggucccaccc

SEQ ID NO: 1527763 - RNA, 18 nt, Human
caagacccuugugguccc

SEQ ID NO: 1527764 - RNA, 19 nt, Human
caagacccuugugguccca

SEQ ID NO: 1527765 - RNA, 17 nt, Human
caacucaccccagcccc

SEQ ID NO: 1527766 - RNA, 16 nt, Human
caacucaccccagccc

SEQ ID NO: 1527767 - RNA, 13 nt, Human
caacucaccccag

SEQ ID NO: 1527768 - RNA, 15 nt, Human
caacucaccccagcc

SEQ ID NO: 1527769 - RNA, 21 nt, Human
caacuaucucauuuccaagca

SEQ ID NO: 1527770 - RNA, 15 nt, Human
caacccccagccugc

SEQ ID NO: 1527771 - RNA, 16 nt, Human
caacccccagccugcu

SEQ ID NO: 1527772 - RNA, 17 nt, Human
caacccccagccugcua

SEQ ID NO: 1527773 - RNA, 19 nt, Human
caacccaaauguucaucaa

SEQ ID NO: 1527774 - RNA, 18 nt, Human
caaccacugcgaccacaa

SEQ ID NO: 1527775 - RNA, 15 nt, Human
caaaagcugggcagg

SEQ ID NO: 1527776 - RNA, 19 nt, Human
caaaagcugggcagguugg

SEQ ID NO: 1527777 - RNA, 18 nt, Human
caaaaaaauauauuuaau

SEQ ID NO: 1527778 - RNA, 17 nt, Human
auuuuuuuuuccuucag

SEQ ID NO: 1527779 - RNA, 13 nt, Human
auuuuuuuuuccu

SEQ ID NO: 1527780 - RNA, 16 nt, Human
auuuuuuuuuccuuca

SEQ ID NO: 1527781 - RNA, 13 nt, Human
auuuuuaagugcu

SEQ ID NO: 1527782 - RNA, 17 nt, Human
auuuuauagcuacuaau

SEQ ID NO: 1527783 - RNA, 16 nt, Human
auuuguuugaacugau

SEQ ID NO: 1527784 - RNA, 14 nt, Human
auuuguuugaacug

SEQ ID NO: 1527785 - RNA, 20 nt, Human
auuuguuugaacugauaaag

SEQ ID NO: 1527786 - RNA, 13 nt, Human
auuuguuugaacu

SEQ ID NO: 1527787 - RNA, 13 nt, Human
auuuuaucuuuga

SEQ ID NO: 1527788 - RNA, 15 nt, Human
auuuuaucuuugauu

SEQ ID NO: 1527789 - RNA, 20 nt, Human
auuuuaucuuugauucuccu

SEQ ID NO: 1527790 - RNA, 21 nt, Human
auuuuaucuuugauucuccuu

SEQ ID NO: 1527791 - RNA, 22 nt, Human
auuuuaucuuugauucuccuuc

SEQ ID NO: 1527792 - RNA, 23 nt, Human
auuuuaucuuugauucuccuuca

SEQ ID NO: 1527793 - RNA, 18 nt, Human
auuuugauccaagcuggu

SEQ ID NO: 1527794 - RNA, 11 nt, Human
cacugaagaag

SEQ ID NO: 1527795 - RNA, 17 nt, Human
cacucuuauugcccacg

SEQ ID NO: 1527796 - RNA, 18 nt, Human
cacucuuauugcccacgc

SEQ ID NO: 1527797 - RNA, 19 nt, Human
cacucuuauugcccacgcu

SEQ ID NO: 1527798 - RNA, 14 nt, Human
cacggccaggccag

SEQ ID NO: 1527799 - RNA, 15 nt, Human
cacggccaggccaga

SEQ ID NO: 1527800 - RNA, 16 nt, Human
cacggccaggccagag

SEQ ID NO: 1527801 - RNA, 20 nt, Human
cacggagggugacgggggug

SEQ ID NO: 1527802 - RNA, 17 nt, Human
cacggccaggccagagg

SEQ ID NO: 1527803 - RNA, 15 nt, Human
cacuaauacaccagg

SEQ ID NO: 1527804 - RNA, 23 nt, Human
cacuacggaauaguuggcuagga

SEQ ID NO: 1527805 - RNA, 17 nt, Human
caccuuuguccccaccg

SEQ ID NO: 1527806 - RNA, 14 nt, Human
caccuuugucccca

SEQ ID NO: 1527807 - RNA, 15 nt, Human
caccuuuguccccac

SEQ ID NO: 1527808 - RNA, 17 nt, Human
caccugccagggacaga

SEQ ID NO: 1527809 - RNA, 19 nt, Human
caccuugacagggcacacc

SEQ ID NO: 1527810 - RNA, 14 nt, Human
caccuuggcucaag

SEQ ID NO: 1527811 - RNA, 13 nt, Human
caccuuggcucaa

SEQ ID NO: 1527812 - RNA, 21 nt, Human
caccuacaugagguacugaga

SEQ ID NO: 1527813 - RNA, 14 nt, Human
caccugccagggac

SEQ ID NO: 1527814 - RNA, 16 nt, Human
caccugccagggacag

SEQ ID NO: 1527815 - RNA, 23 nt, Human
caccucaaaauaccaugccauuu

SEQ ID NO: 1527816 - RNA, 17 nt, Human
cacuggugacaugucuu

SEQ ID NO: 1527817 - RNA, 15 nt, Human
cacuguugcccaggc

SEQ ID NO: 1527818 - RNA, 16 nt, Human
cacuguugcccaggcu

SEQ ID NO: 1527819 - RNA, 23 nt, Human
cacugggcuuggggaccagagcu

SEQ ID NO: 1527820 - RNA, 22 nt, Human
cacugggcuuggggaccagagc

SEQ ID NO: 1527821 - RNA, 20 nt, Human
cacuuggucugugagaugcu

SEQ ID NO: 1527822 - RNA, 17 nt, Human
cacuguugcccaggcug

SEQ ID NO: 1527823 - RNA, 19 nt, Human
cacuguuucaaacuuuacu

SEQ ID NO: 1527824 - RNA, 17 nt, Human
cacuuucagugaaagca

SEQ ID NO: 1527825 - RNA, 18 nt, Human
cacuuucagugaaagcau

SEQ ID NO: 1527826 - RNA, 19 nt, Human
cacuuucagugaaagcauc

SEQ ID NO: 1527827 - RNA, 23 nt, Human
cagaaguuucugccgcagcccug

SEQ ID NO: 1527828 - RNA, 22 nt, Human
cagaaguuucugccgcagcccu

SEQ ID NO: 1527829 - RNA, 20 nt, Human
cagaaguuucugccgcagcc

SEQ ID NO: 1527830 - RNA, 21 nt, Human
cagaaguuucugccgcagccc

SEQ ID NO: 1527831 - RNA, 20 nt, Human
cagaauaaucaaauacauuu

SEQ ID NO: 1527832 - RNA, 12 nt, Human
cagaauauguuu

SEQ ID NO: 1527833 - RNA, 13 nt, Human
cagaauauugcuu

SEQ ID NO: 1527834 - RNA, 18 nt, Human
cagaauauguuucaaacu

SEQ ID NO: 1527835 - RNA, 20 nt, Human
cagaauauguuucaaacuuu

SEQ ID NO: 1527836 - RNA, 13 nt, Human
cagaauauguuuc

SEQ ID NO: 1527837 - RNA, 14 nt, Human
cagaauauguuuca

SEQ ID NO: 1527838 - RNA, 15 nt, Human
cagaauauguuucaa

SEQ ID NO: 1527839 - RNA, 17 nt, Human
cagaauauguuucaaac

SEQ ID NO: 1527840 - RNA, 11 nt, Human
cagaacacugu

SEQ ID NO: 1527841 - RNA, 23 nt, Human
cacagguaugaccuucuaggaag

SEQ ID NO: 1527842 - RNA, 22 nt, Human
cacagcuaacauggaaguacua

SEQ ID NO: 1527843 - RNA, 20 nt, Human
cacagcucuguccugggagu

SEQ ID NO: 1527844 - RNA, 23 nt, Human
cacagcucuguccugggagugag

SEQ ID NO: 1527845 - RNA, 10 nt, Human
cacagcucuu

SEQ ID NO: 1527846 - RNA, 19 nt, Human
cacagacccugcccugugg

SEQ ID NO: 1527847 - RNA, 20 nt, Human
cacagacccugcccuguggg

SEQ ID NO: 1527848 - RNA, 21 nt, Human
cacagacccugcccugugggc

SEQ ID NO: 1527849 - RNA, 18 nt, Human
cacagacauacuaaccag

SEQ ID NO: 1527850 - RNA, 22 nt, Human
cacagacccugcccugugggcc

SEQ ID NO: 1527851 - RNA, 15 nt, Human
cacagcuaacaugga

SEQ ID NO: 1527852 - RNA, 16 nt, Human
cacagcuaacauggaa

SEQ ID NO: 1527853 - RNA, 16 nt, Human
cacaguauuacuucug

SEQ ID NO: 1527854 - RNA, 18 nt, Human
cacaguauuacuucugcu

SEQ ID NO: 1527855 - RNA, 19 nt, Human
cacaguauuacuucugcua

SEQ ID NO: 1527856 - RNA, 17 nt, Human
cacccagcccacuucug

SEQ ID NO: 1527857 - RNA, 23 nt, Human
caccaacauacucccaucuguga

SEQ ID NO: 1527858 - RNA, 14 nt, Human
caccagcagccugg

SEQ ID NO: 1527859 - RNA, 15 nt, Human
caccagcagccugga

SEQ ID NO: 1527860 - RNA, 24 nt, Human
cacccaggagccccgaggccuucu

SEQ ID NO: 1527861 - RNA, 19 nt, Human
cacccagcccacuucugcc

SEQ ID NO: 1527862 - RNA, 20 nt, Human
cacccaggagccccgaggcc

SEQ ID NO: 1527863 - RNA, 23 nt, Human
cacccaggagccccgaggccuuc

SEQ ID NO: 1527864 - RNA, 15 nt, Human
cacauuuuauuuuau

SEQ ID NO: 1527865 - RNA, 19 nt, Human
cacaucuugcucugcugac

SEQ ID NO: 1527866 - RNA, 18 nt, Human
cacaucuugcucugcuga

SEQ ID NO: 1527867 - RNA, 21 nt, Human
cacauuuuuuaaaugcaccug

SEQ ID NO: 1527868 - RNA, 17 nt, Human
cacauuuuuuaaaugca

SEQ ID NO: 1527869 - RNA, 14 nt, Human
cacauuuuucuuag

SEQ ID NO: 1527870 - RNA, 13 nt, Human
cacauuuuucuua

SEQ ID NO: 1527871 - RNA, 20 nt, Human
caccaacauacucccaucug

SEQ ID NO: 1527872 - RNA, 21 nt, Human
caccaacauacucccaucugu

SEQ ID NO: 1527873 - RNA, 17 nt, Human
cacaucuugcucugcug

SEQ ID NO: 1527874 - RNA, 22 nt, Human
cacaucagcacgauuucuguuu

SEQ ID NO: 1527875 - RNA, 24 nt, Human
cacaucagcuccacuuucagugaa

SEQ ID NO: 1527876 - RNA, 13 nt, Human
cacaucagcuugc

SEQ ID NO: 1527877 - RNA, 21 nt, Human
cacaucagcacgauuucuguu

SEQ ID NO: 1527878 - RNA, 20 nt, Human
cacaucagcacgauuucugu

SEQ ID NO: 1527879 - RNA, 14 nt, Human
caaguauuagaaua

SEQ ID NO: 1527880 - RNA, 20 nt, Human
caaguauuagaauaccacag

SEQ ID NO: 1527881 - RNA, 13 nt, Human
caaguauuauacc

SEQ ID NO: 1527882 - RNA, 16 nt, Human
cacaagacugcacauc

SEQ ID NO: 1527883 - RNA, 12 nt, Human
caauuuaaagca

SEQ ID NO: 1527884 - RNA, 12 nt, Human
caauuuaaaaaa

SEQ ID NO: 1527885 - RNA, 14 nt, Human
cacaagacccuugu

SEQ ID NO: 1527886 - RNA, 16 nt, Human
cacaagacccuugugg

SEQ ID NO: 1527887 - RNA, 14 nt, Human
cacaagccuucggc

SEQ ID NO: 1527888 - RNA, 12 nt, Human
caauauuucaga

SEQ ID NO: 1527889 - RNA, 20 nt, Human
caauauuucagauaaucaca

SEQ ID NO: 1527890 - RNA, 21 nt, Human
caauauuucagauaaucacaa

SEQ ID NO: 1527891 - RNA, 14 nt, Human
caaugcuguauuuu

SEQ ID NO: 1527892 - RNA, 23 nt, Human
caaugcuguauuuuaaaagaaug

SEQ ID NO: 1527893 - RNA, 22 nt, Human
caaugcuggcuguuggcugggg

SEQ ID NO: 1527894 - RNA, 23 nt, Human
caaugcuggcuguuggcuggggg

SEQ ID NO: 1527895 - RNA, 17 nt, Human
caauucuuacaaacaug

SEQ ID NO: 1527896 - RNA, 18 nt, Human
caauucuuacaaacaugu

SEQ ID NO: 1527897 - RNA, 19 nt, Human
caauucuuacaaacaugug

SEQ ID NO: 1527898 - RNA, 22 nt, Human
caaugcugugcccuaaagugua

SEQ ID NO: 1527899 - RNA, 16 nt, Human
ccauccccuguagagu

SEQ ID NO: 1527900 - RNA, 22 nt, Human
ccauccccuguagagugggagc

SEQ ID NO: 1527901 - RNA, 14 nt, Human
ccaugagccucagc

SEQ ID NO: 1527902 - RNA, 18 nt, Human
ccaugagccucagcaucc

SEQ ID NO: 1527903 - RNA, 19 nt, Human
ccaugagccucagcauccu

SEQ ID NO: 1527904 - RNA, 14 nt, Human
ccaugaguccccug

SEQ ID NO: 1527905 - RNA, 15 nt, Human
ccaugaguccccugu

SEQ ID NO: 1527906 - RNA, 16 nt, Human
ccaugaguccccuguu

SEQ ID NO: 1527907 - RNA, 13 nt, Human
ccaugggccuccu

SEQ ID NO: 1527908 - RNA, 13 nt, Human
ccauacauuugug

SEQ ID NO: 1527909 - RNA, 14 nt, Human
ccauacauuugugu

SEQ ID NO: 1527910 - RNA, 23 nt, Human
ccaucccaaacccuucagugcca

SEQ ID NO: 1527911 - RNA, 12 nt, Human
ccaucccagccc

SEQ ID NO: 1527912 - RNA, 13 nt, Human
ccaucccagcccc

SEQ ID NO: 1527913 - RNA, 22 nt, Human
ccauuuaaagcuuauuaaaacu

SEQ ID NO: 1527914 - RNA, 17 nt, Human
ccaugggccuccugugu

SEQ ID NO: 1527915 - RNA, 14 nt, Human
ccaugggccuccug

SEQ ID NO: 1527916 - RNA, 15 nt, Human
ccaugggccuccugu

SEQ ID NO: 1527917 - RNA, 12 nt, Human
ccagucaccccg

SEQ ID NO: 1527918 - RNA, 13 nt, Human
ccagucaccccgg

SEQ ID NO: 1527919 - RNA, 20 nt, Human
ccagucaccccggccaccug

SEQ ID NO: 1527920 - RNA, 21 nt, Human
ccagucaccccggccaccugc

SEQ ID NO: 1527921 - RNA, 21 nt, Human
ccaggagggaggcaggggagg

SEQ ID NO: 1527922 - RNA, 13 nt, Human
ccaggcugggaga

SEQ ID NO: 1527923 - RNA, 14 nt, Human
ccaggcugggagag

SEQ ID NO: 1527924 - RNA, 23 nt, Human
ccaggcugggagagccuuccagg

SEQ ID NO: 1527925 - RNA, 22 nt, Human
ccaggcugggagagccuuccag

SEQ ID NO: 1527926 - RNA, 19 nt, Human
ccaggggccggccaguggc

SEQ ID NO: 1527927 - RNA, 15 nt, Human
ccaggcugggagagc

SEQ ID NO: 1527928 - RNA, 17 nt, Human
ccaggcugggagagccu

SEQ ID NO: 1527929 - RNA, 18 nt, Human
ccaggcugggagagccuu

SEQ ID NO: 1527930 - RNA, 21 nt, Human
ccaggcugggagagccuucca

SEQ ID NO: 1527931 - RNA, 15 nt, Human
ccaggagggaggcag

SEQ ID NO: 1527932 - RNA, 22 nt, Human
ccaggagggaggcaggggaggg

SEQ ID NO: 1527933 - RNA, 21 nt, Human
ccagccccuggaugcagccuc

SEQ ID NO: 1527934 - RNA, 10 nt, Human
ccagccccuu

SEQ ID NO: 1527935 - RNA, 15 nt, Human
ccagcagccuggacc

SEQ ID NO: 1527936 - RNA, 19 nt, Human
ccagcagccuggacccugu

SEQ ID NO: 1527937 - RNA, 20 nt, Human
ccagcagccuggacccugug

SEQ ID NO: 1527938 - RNA, 21 nt, Human
ccaggaaaggcuccaggagca

SEQ ID NO: 1527939 - RNA, 22 nt, Human
ccaggaaaggcuccaggagcag

SEQ ID NO: 1527940 - RNA, 23 nt, Human
ccaggaaaggcuccaggagcagc

SEQ ID NO: 1527941 - RNA, 20 nt, Human
ccacucucccccacccccuc

SEQ ID NO: 1527942 - RNA, 23 nt, Human
ccagcagagcaccuuagacaguc

SEQ ID NO: 1527943 - RNA, 19 nt, Human
ccagcagagcaccuuagac

SEQ ID NO: 1527944 - RNA, 17 nt, Human
ccccuucugacccaugc

SEQ ID NO: 1527945 - RNA, 12 nt, Human
cccgggaagggg

SEQ ID NO: 1527946 - RNA, 12 nt, Human
cccggcugcgga

SEQ ID NO: 1527947 - RNA, 18 nt, Human
ccccugcacuccagccug

SEQ ID NO: 1527948 - RNA, 13 nt, Human
ccccuucucucau

SEQ ID NO: 1527949 - RNA, 16 nt, Human
ccccuucucucaucuc

SEQ ID NO: 1527950 - RNA, 19 nt, Human
ccccuucgcuccugugucu

SEQ ID NO: 1527951 - RNA, 14 nt, Human
ccccuucgcuccug

SEQ ID NO: 1527952 - RNA, 15 nt, Human
ccccuucgcuccugu

SEQ ID NO: 1527953 - RNA, 17 nt, Human
ccccuucgcuccugugu

SEQ ID NO: 1527954 - RNA, 15 nt, Human
ccccauucugccugc

SEQ ID NO: 1527955 - RNA, 13 nt, Human
ccccauucugccu

SEQ ID NO: 1527956 - RNA, 14 nt, Human
ccccauucugccug

SEQ ID NO: 1527957 - RNA, 23 nt, Human
cccauucugccugcccaggcccc

SEQ ID NO: 1527958 - RNA, 22 nt, Human
ccccagauugcaacaggcuggg

SEQ ID NO: 1527959 - RNA, 23 nt, Human
ccccagauugcaacaggcugggc

SEQ ID NO: 1527960 - RNA, 17 nt, Human
ccccagcaagugagagc

SEQ ID NO: 1527961 - RNA, 22 nt, Human
ccccauccucuguacagagccc

SEQ ID NO: 1527962 - RNA, 19 nt, Human
ccccauccucuguacagag

SEQ ID NO: 1527963 - RNA, 21 nt, Human
ccccauccucuguacagagcc

SEQ ID NO: 1527964 - RNA, 19 nt, Human
ccccagcaagugagagcug

SEQ ID NO: 1527965 - RNA, 20 nt, Human
ccccagcaagugagagcugg

SEQ ID NO: 1527966 - RNA, 21 nt, Human
ccccagcaagugagagcuggg

SEQ ID NO: 1527967 - RNA, 21 nt, Human
cccauucugccugcccaggcc

SEQ ID NO: 1527968 - RNA, 22 nt, Human
cccauucugccugcccaggccc

SEQ ID NO: 1527969 - RNA, 24 nt, Human
cccagcacugaggaagaacggggc

SEQ ID NO: 1527970 - RNA, 17 nt, Human
cccagcccacuucugcc

SEQ ID NO: 1527971 - RNA, 14 nt, Human
cccagcccacuucu

SEQ ID NO: 1527972 - RNA, 15 nt, Human
cccagcacugaggaa

SEQ ID NO: 1527973 - RNA, 23 nt, Human
cccaggaaaggcuccaggagcag

SEQ ID NO: 1527974 - RNA, 21 nt, Human
cccaggaaaggcuccaggagc

SEQ ID NO: 1527975 - RNA, 22 nt, Human
cccaggaaaggcuccaggagca

SEQ ID NO: 1527976 - RNA, 22 nt, Human
cccagcuuaaaggggcuagagu

SEQ ID NO: 1527977 - RNA, 19 nt, Human
cccaggaaaggcuccagga

SEQ ID NO: 1527978 - RNA, 21 nt, Human
cccagcugugcucuggacagg

SEQ ID NO: 1527979 - RNA, 23 nt, Human
cccagcugugcucuggacaggca

SEQ ID NO: 1527980 - RNA, 15 nt, Human
cccaggcuuagucac

SEQ ID NO: 1527981 - RNA, 20 nt, Human
cccaggcuuagucacugaga

SEQ ID NO: 1527982 - RNA, 23 nt, Human
ccucauggaauuggagcucgugg

SEQ ID NO: 1527983 - RNA, 21 nt, Human
ccucaggagccgaagcccagg

SEQ ID NO: 1527984 - RNA, 12 nt, Human
ccucaggagccg

SEQ ID NO: 1527985 - RNA, 19 nt, Human
ccucaggagccgaagccca

SEQ ID NO: 1527986 - RNA, 22 nt, Human
ccucaggagccgaagcccaggg

SEQ ID NO: 1527987 - RNA, 16 nt, Human
ccucccaucucacaca

SEQ ID NO: 1527988 - RNA, 13 nt, Human
ccucccaucucac

SEQ ID NO: 1527989 - RNA, 15 nt, Human
ccucauguccacugg

SEQ ID NO: 1527990 - RNA, 19 nt, Human
ccuccaaccuggggggcag

SEQ ID NO: 1527991 - RNA, 15 nt, Human
ccucccaccucagcc

SEQ ID NO: 1527992 - RNA, 17 nt, Human
ccucccaccucagccuc

SEQ ID NO: 1527993 - RNA, 15 nt, Human
ccggccccugcuggu

SEQ ID NO: 1527994 - RNA, 14 nt, Human
ccggccccugcugg

SEQ ID NO: 1527995 - RNA, 17 nt, Human
cccugugauggggcccu

SEQ ID NO: 1527996 - RNA, 18 nt, Human
cccugugauggggcccug

SEQ ID NO: 1527997 - RNA, 19 nt, Human
cccugugauggggcccugc

SEQ ID NO: 1527998 - RNA, 20 nt, Human
cccugugauggggcccugcc

SEQ ID NO: 1527999 - RNA, 13 nt, Human
cccuucgcuccug

SEQ ID NO: 1528000 - RNA, 16 nt, Human
cccugucuaaugaaac

SEQ ID NO: 1528001 - RNA, 20 nt, Human
cccugucucaaaaaaagaaa

SEQ ID NO: 1528002 - RNA, 23 nt, Human
cccugucucaaaaaaagaaaaag

SEQ ID NO: 1528003 - RNA, 13 nt, Human
ccggccccugcug

SEQ ID NO: 1528004 - RNA, 14 nt, Human
cccuucgcuccugu

SEQ ID NO: 1528005 - RNA, 15 nt, Human
cccuucgcuccugug

SEQ ID NO: 1528006 - RNA, 21 nt, Human
cccuucucuccagccccugga

SEQ ID NO: 1528007 - RNA, 22 nt, Human
cccuucucuccagccccuggau

SEQ ID NO: 1528008 - RNA, 15 nt, Human
ccugucuaaugaaac

SEQ ID NO: 1528009 - RNA, 22 nt, Human
ccugucuaaugaaaccuguguc

SEQ ID NO: 1528010 - RNA, 15 nt, Human
ccuguaaucacagcu

SEQ ID NO: 1528011 - RNA, 14 nt, Human
ccugguucucaucu

SEQ ID NO: 1528012 - RNA, 15 nt, Human
ccugguucucaucuu

SEQ ID NO: 1528013 - RNA, 16 nt, Human
ccugguucucaucuuu

SEQ ID NO: 1528014 - RNA, 18 nt, Human
ccugggggcugggcagag

SEQ ID NO: 1528015 - RNA, 21 nt, Human
ccugguggcagugggagcugc

SEQ ID NO: 1528016 - RNA, 22 nt, Human
ccuggccuagcauacguacaca

SEQ ID NO: 1528017 - RNA, 22 nt, Human
ccuggccucaagugauucuccu

SEQ ID NO: 1528018 - RNA, 20 nt, Human
ccuggccucugcacuccccu

SEQ ID NO: 1528019 - RNA, 21 nt, Human
ccuggccucugcacuccccug

SEQ ID NO: 1528020 - RNA, 22 nt, Human
ccuggccucugcacuccccugc

SEQ ID NO: 1528021 - RNA, 19 nt, Human
ccugccucgaacuggcugc

SEQ ID NO: 1528022 - RNA, 15 nt, Human
ccugccuccagggcu

SEQ ID NO: 1528023 - RNA, 16 nt, Human
ccugccuccagggcug

SEQ ID NO: 1528024 - RNA, 17 nt, Human
ccugccuccagggcugg

SEQ ID NO: 1528025 - RNA, 20 nt, Human
ccugccuccagggcuggacu

SEQ ID NO: 1528026 - RNA, 21 nt, Human
ccugccuccagggcuggacug

SEQ ID NO: 1528027 - RNA, 23 nt, Human
ccugccuccagggcuggacugag

SEQ ID NO: 1528028 - RNA, 21 nt, Human
ccugccucgaacuggcugcaa

SEQ ID NO: 1528029 - RNA, 23 nt, Human
ccugccucgaacuggcugcaaag

SEQ ID NO: 1528030 - RNA, 17 nt, Human
ccugcugcaguugccag

SEQ ID NO: 1528031 - RNA, 19 nt, Human
ccugcugcaguugccaguc

SEQ ID NO: 1528032 - RNA, 21 nt, Human
ccugcugcaguugccagucac

SEQ ID NO: 1528033 - RNA, 20 nt, Human
ccugcugcaguugccaguca

SEQ ID NO: 1528034 - RNA, 13 nt, Human
ccugcccaggccc

SEQ ID NO: 1528035 - RNA, 12 nt, Human
ccugccuccagg

SEQ ID NO: 1528036 - RNA, 12 nt, Human
ccugcccaccug

SEQ ID NO: 1528037 - RNA, 13 nt, Human
ccugcccaccugg

SEQ ID NO: 1528038 - RNA, 14 nt, Human
ccugcccaccuggc

SEQ ID NO: 1528039 - RNA, 20 nt, Human
ccugcccaccuggccucugc

SEQ ID NO: 1528040 - RNA, 17 nt, Human
ccugcacuugcagacuc

SEQ ID NO: 1528041 - RNA, 18 nt, Human
ccugcacuugcagacucu

SEQ ID NO: 1528042 - RNA, 19 nt, Human
ccugcacuugcagacucua

SEQ ID NO: 1528043 - RNA, 16 nt, Human
ccucuuucccucccuu

SEQ ID NO: 1528044 - RNA, 13 nt, Human
ccucuuucccucc

SEQ ID NO: 1528045 - RNA, 19 nt, Human
ccugcagccugcaggaccu

SEQ ID NO: 1528046 - RNA, 16 nt, Human
ccugcagccugcagga

SEQ ID NO: 1528047 - RNA, 11 nt, Human
ccucuuucccu

SEQ ID NO: 1528048 - RNA, 23 nt, Human
cuaaguuuuuauggcuuuugugc

SEQ ID NO: 1528049 - RNA, 20 nt, Human
cuaaguuuuuauggcuuuug

SEQ ID NO: 1528050 - RNA, 21 nt, Human
cuaagugguacuaacuuuccu

SEQ ID NO: 1528051 - RNA, 23 nt, Human
cuaagugauccucccaccucagc

SEQ ID NO: 1528052 - RNA, 22 nt, Human
cuaaguaaaaccacagcaguug

SEQ ID NO: 1528053 - RNA, 23 nt, Human
cuaaguaaaaccacagcaguuga

SEQ ID NO: 1528054 - RNA, 17 nt, Human
cuaauuuauucuaaauu

SEQ ID NO: 1528055 - RNA, 19 nt, Human
cuacaguccucccaucuca

SEQ ID NO: 1528056 - RNA, 18 nt, Human
cuacaaaaacacagcaag

SEQ ID NO: 1528057 - RNA, 16 nt, Human
cuacaaaaacacagca

SEQ ID NO: 1528058 - RNA, 17 nt, Human
cuacaaaaacacagcaa

SEQ ID NO: 1528059 - RNA, 20 nt, Human
cuacaaaaacacagcaaggg

SEQ ID NO: 1528060 - RNA, 20 nt, Human
cuacaguccucccaucucac

SEQ ID NO: 1528061 - RNA, 21 nt, Human
cuacaguugaaaaacagcuga

SEQ ID NO: 1528062 - RNA, 18 nt, Human
cuacauacuauggaauuu

SEQ ID NO: 1528063 - RNA, 22 nt, Human
cuacaguugaaaaacagcugag

SEQ ID NO: 1528064 - RNA, 20 nt, Human
cuacaugagguacugagagu

SEQ ID NO: 1528065 - RNA, 17 nt, Human
cuaccuuuguauucucu

SEQ ID NO: 1528066 - RNA, 23 nt, Human
cuagaauuugauaugugaacagu

SEQ ID NO: 1528067 - RNA, 23 nt, Human
cuagcauacguacacauuuuauu

SEQ ID NO: 1528068 - RNA, 21 nt, Human
cuagcauacguacacauuuua

SEQ ID NO: 1528069 - RNA, 12 nt, Human
cuagaacucccu

SEQ ID NO: 1528070 - RNA, 13 nt, Human
cuagaacucccuu

SEQ ID NO: 1528071 - RNA, 22 nt, Human
cuagaagauuuugaaauuuuua

SEQ ID NO: 1528072 - RNA, 14 nt, Human
cuaucuaaauguug

SEQ ID NO: 1528073 - RNA, 15 nt, Human
cuaucucccccagcc

SEQ ID NO: 1528074 - RNA, 22 nt, Human
cuaguuugauuaaauucuugca

SEQ ID NO: 1528075 - RNA, 15 nt, Human
cuaguuugauuaaau

SEQ ID NO: 1528076 - RNA, 13 nt, Human
cuaguuugauuaa

SEQ ID NO: 1528077 - RNA, 22 nt, Human
cuaguuguuugauucagacagc

SEQ ID NO: 1528078 - RNA, 23 nt, Human
cuaguuguuugauucagacagcu

SEQ ID NO: 1528079 - RNA, 12 nt, Human
cuagccagagga

SEQ ID NO: 1528080 - RNA, 13 nt, Human
cuagccagaggag

SEQ ID NO: 1528081 - RNA, 15 nt, Human
cuagccagaggagag

SEQ ID NO: 1528082 - RNA, 17 nt, Human
cucaaaaaaagaaaaag

SEQ ID NO: 1528083 - RNA, 18 nt, Human
cucaaaagcugggcaggu

SEQ ID NO: 1528084 - RNA, 23 nt, Human
cucaaaauaccaugccauuuaaa

SEQ ID NO: 1528085 - RNA, 18 nt, Human
cuaucucccccagcccca

SEQ ID NO: 1528086 - RNA, 16 nt, Human
cuaucucccccagccc

SEQ ID NO: 1528087 - RNA, 17 nt, Human
cuaucucccccagcccc

SEQ ID NO: 1528088 - RNA, 11 nt, Human
cucaauauuuu

SEQ ID NO: 1528089 - RNA, 20 nt, Human
cucaaacucuugaccucagg

SEQ ID NO: 1528090 - RNA, 13 nt, Human
cucaauauuuucc

SEQ ID NO: 1528091 - RNA, 13 nt, Human
cucaaugcacuga

SEQ ID NO: 1528092 - RNA, 15 nt, Human
cucaaugcacugaca

SEQ ID NO: 1528093 - RNA, 19 nt, Human
cgacccuugccgucuaccu

SEQ ID NO: 1528094 - RNA, 20 nt, Human
cgacccuugccgucuaccug

SEQ ID NO: 1528095 - RNA, 17 nt, Human
cgacugcccggcagggu

SEQ ID NO: 1528096 - RNA, 21 nt, Human
ccuuuuuuagaguugauacua

SEQ ID NO: 1528097 - RNA, 13 nt, Human
cgacaaugcaaac

SEQ ID NO: 1528098 - RNA, 12 nt, Human
cgacaaugcaaa

SEQ ID NO: 1528099 - RNA, 16 nt, Human
ccuugccgucuaccug

SEQ ID NO: 1528100 - RNA, 17 nt, Human
ccuugccgucuaccuga

SEQ ID NO: 1528101 - RNA, 21 nt, Human
ccuuucaauaggaaaaacuga

SEQ ID NO: 1528102 - RNA, 15 nt, Human
ccuuuugagugccuu

SEQ ID NO: 1528103 - RNA, 17 nt, Human
ccuuuugagugccuuac

SEQ ID NO: 1528104 - RNA, 17 nt, Human
cgccagauucuuuccug

SEQ ID NO: 1528105 - RNA, 23 nt, Human
cgccacuguuuugaaucucauaa

SEQ ID NO: 1528106 - RNA, 17 nt, Human
cgccaaauaaugucucu

SEQ ID NO: 1528107 - RNA, 19 nt, Human
cgccaaauaaugucucugu

SEQ ID NO: 1528108 - RNA, 14 nt, Human
cgauagugguggug

SEQ ID NO: 1528109 - RNA, 22 nt, Human
cgcaggauucuuccucccuccc

SEQ ID NO: 1528110 - RNA, 18 nt, Human
cgcaggcccccaggugcc

SEQ ID NO: 1528111 - RNA, 16 nt, Human
cggagucccaccuugg

SEQ ID NO: 1528112 - RNA, 13 nt, Human
cgcugccccuggc

SEQ ID NO: 1528113 - RNA, 14 nt, Human
cggggacagcuccu

SEQ ID NO: 1528114 - RNA, 17 nt, Human
cgggcucugccucccau

SEQ ID NO: 1528115 - RNA, 15 nt, Human
cggggacagcuccuu

SEQ ID NO: 1528116 - RNA, 22 nt, Human
cggggacagcuccuucuguccu

SEQ ID NO: 1528117 - RNA, 18 nt, Human
cgguguggagaagcggcu

SEQ ID NO: 1528118 - RNA, 17 nt, Human
cgggccacagagaaagu

SEQ ID NO: 1528119 - RNA, 11 nt, Human
cgggcucagca

SEQ ID NO: 1528120 - RNA, 15 nt, Human
cgggcucagcaaaag

SEQ ID NO: 1528121 - RNA, 14 nt, Human
cgggcucugccucc

SEQ ID NO: 1528122 - RNA, 16 nt, Human
cgggcucugccuccca

SEQ ID NO: 1528123 - RNA, 12 nt, Human
cgggccacagag

SEQ ID NO: 1528124 - RNA, 14 nt, Human
cgggccacagagaa

SEQ ID NO: 1528125 - RNA, 13 nt, Human
cggcuccaggcuc

SEQ ID NO: 1528126 - RNA, 14 nt, Human
cggcuccaggcucc

SEQ ID NO: 1528127 - RNA, 15 nt, Human
cggcuccaggcuccu

SEQ ID NO: 1528128 - RNA, 16 nt, Human
cggcuccaggcuccuu

SEQ ID NO: 1528129 - RNA, 18 nt, Human
cggagucccaccuuggcu

SEQ ID NO: 1528130 - RNA, 20 nt, Human
cggagucccaccuuggcugc

SEQ ID NO: 1528131 - RNA, 15 nt, Human
cggcucacugcagcc

SEQ ID NO: 1528132 - RNA, 16 nt, Human
cggcucacugcagccu

SEQ ID NO: 1528133 - RNA, 17 nt, Human
cggcucacugcagccuc

SEQ ID NO: 1528134 - RNA, 12 nt, Human
cggcuccaggcu

SEQ ID NO: 1528135 - RNA, 14 nt, Human
cgugcacacaccag

SEQ ID NO: 1528136 - RNA, 20 nt, Human
cguguaaccauggacccaau

SEQ ID NO: 1528137 - RNA, 18 nt, Human
cgugaguccuggcauggg

SEQ ID NO: 1528138 - RNA, 17 nt, Human
cgugaguccuggcaugg

SEQ ID NO: 1528139 - RNA, 17 nt, Human
cgugaggccagagacac

SEQ ID NO: 1528140 - RNA, 16 nt, Human
cgugaguccuggcaug

SEQ ID NO: 1528141 - RNA, 16 nt, Human
cgguuuuacugcagcu

SEQ ID NO: 1528142 - RNA, 13 nt, Human
cuccaagaauuuc

SEQ ID NO: 1528143 - RNA, 18 nt, Human
cuccaaccuggggggcag

SEQ ID NO: 1528144 - RNA, 14 nt, Human
cuccaagaauuucu

SEQ ID NO: 1528145 - RNA, 15 nt, Human
cuccaagaccuucuc

SEQ ID NO: 1528146 - RNA, 22 nt, Human
cuccaagaccuucuccuucacc

SEQ ID NO: 1528147 - RNA, 13 nt, Human
cuccaagcaggac

SEQ ID NO: 1528148 - RNA, 14 nt, Human
cuccaagcaggaca

SEQ ID NO: 1528149 - RNA, 22 nt, Human
cuccaagcaggacauggacaag

SEQ ID NO: 1528150 - RNA, 24 nt, Human
cuccaagcaggacauggacaagga

SEQ ID NO: 1528151 - RNA, 17 nt, Human
cuccaagcucccaggca

SEQ ID NO: 1528152 - RNA, 13 nt, Human
cuccacuuggucu

SEQ ID NO: 1528153 - RNA, 15 nt, Human
cuccacuuggucugu

SEQ ID NO: 1528154 - RNA, 16 nt, Human
cuccacuuggucugug

SEQ ID NO: 1528155 - RNA, 17 nt, Human
cuccacuuggucuguga

SEQ ID NO: 1528156 - RNA, 21 nt, Human
cuccacuuggucugugagaug

SEQ ID NO: 1528157 - RNA, 22 nt, Human
cuccacuuggucugugagaugc

SEQ ID NO: 1528158 - RNA, 13 nt, Human
cuccaagcuccca

SEQ ID NO: 1528159 - RNA, 14 nt, Human
cuccaagcucccag

SEQ ID NO: 1528160 - RNA, 15 nt, Human
cuccaagcucccagg

SEQ ID NO: 1528161 - RNA, 16 nt, Human
cuccaagcucccaggc

SEQ ID NO: 1528162 - RNA, 23 nt, Human
cuccacuuggucugugagaugcu

SEQ ID NO: 1528163 - RNA, 16 nt, Human
cuccacuuucuagcca

SEQ ID NO: 1528164 - RNA, 19 nt, Human
cuccacuuucuagccagag

SEQ ID NO: 1528165 - RNA, 20 nt, Human
cuccacuuucuagccagagg

SEQ ID NO: 1528166 - RNA, 21 nt, Human
cuccagggcuggacugaggcc

SEQ ID NO: 1528167 - RNA, 17 nt, Human
cuccagggcuggacuga

SEQ ID NO: 1528168 - RNA, 18 nt, Human
cuccagggcuggacugag

SEQ ID NO: 1528169 - RNA, 19 nt, Human
cuccagggcuggacugagg

SEQ ID NO: 1528170 - RNA, 20 nt, Human
cuccagggcuggacugaggc

SEQ ID NO: 1528171 - RNA, 12 nt, Human
cuccagggcugg

SEQ ID NO: 1528172 - RNA, 13 nt, Human
cuccagggcugga

SEQ ID NO: 1528173 - RNA, 14 nt, Human
cuccagggcuggac

SEQ ID NO: 1528174 - RNA, 15 nt, Human
cuccagggcuggacu

SEQ ID NO: 1528175 - RNA, 16 nt, Human
cuccagggcuggacug

SEQ ID NO: 1528176 - RNA, 14 nt, Human
cucguuaauuugua

SEQ ID NO: 1528177 - RNA, 13 nt, Human
cucgaacuggcug

SEQ ID NO: 1528178 - RNA, 14 nt, Human
cucgaacuggcugc

SEQ ID NO: 1528179 - RNA, 15 nt, Human
cucgaacuggcugca

SEQ ID NO: 1528180 - RNA, 16 nt, Human
cucgaacuggcugcaa

SEQ ID NO: 1528181 - RNA, 16 nt, Human
cuccucugcugcuggc

SEQ ID NO: 1528182 - RNA, 18 nt, Human
cuccucugcugcuggcug

SEQ ID NO: 1528183 - RNA, 16 nt, Human
cuccuggcccacugca

SEQ ID NO: 1528184 - RNA, 18 nt, Human
cuccuggcccacugcauc

SEQ ID NO: 1528185 - RNA, 22 nt, Human
cucccccagccccauccucugu

SEQ ID NO: 1528186 - RNA, 15 nt, Human
cucccccagccccau

SEQ ID NO: 1528187 - RNA, 20 nt, Human
cucccccagccccauccucu

SEQ ID NO: 1528188 - RNA, 15 nt, Human
cugaaacaacaaaua

SEQ ID NO: 1528189 - RNA, 13 nt, Human
cugaaacuucccu

SEQ ID NO: 1528190 - RNA, 23 nt, Human
cugaaggacauugcggacagcca

SEQ ID NO: 1528191 - RNA, 22 nt, Human
cugacaacacucauugaccuga

SEQ ID NO: 1528192 - RNA, 23 nt, Human
cugacaacacucauugaccugag

SEQ ID NO: 1528193 - RNA, 19 nt, Human
cugaaggccccgcccaggc

SEQ ID NO: 1528194 - RNA, 17 nt, Human
cugaaggcuggguucug

SEQ ID NO: 1528195 - RNA, 21 nt, Human
cugaaggccccgcccaggcuu

SEQ ID NO: 1528196 - RNA, 23 nt, Human
cucuugagccuugaacuuugacc

SEQ ID NO: 1528197 - RNA, 18 nt, Human
cucuugagccuugaacuu

SEQ ID NO: 1528198 - RNA, 17 nt, Human
cucuugagccuugaacu

SEQ ID NO: 1528199 - RNA, 16 nt, Human
cucuugagccuugaac

SEQ ID NO: 1528200 - RNA, 22 nt, Human
cucuuagaugcaguucugaaga

SEQ ID NO: 1528201 - RNA, 13 nt, Human
cucuuauugccca

SEQ ID NO: 1528202 - RNA, 14 nt, Human
cucuuauugcccac

SEQ ID NO: 1528203 - RNA, 15 nt, Human
cucuuauugcccacg

SEQ ID NO: 1528204 - RNA, 19 nt, Human
cucuuauugcccacgcugg

SEQ ID NO: 1528205 - RNA, 20 nt, Human
cucuuauugcccacgcugga

SEQ ID NO: 1528206 - RNA, 19 nt, Human
cucuuagcuccccuccaac

SEQ ID NO: 1528207 - RNA, 18 nt, Human
cucuuagcuccccuccaa

SEQ ID NO: 1528208 - RNA, 15 nt, Human
cucuuagcuccccuc

SEQ ID NO: 1528209 - RNA, 17 nt, Human
cucuuagcuccccucca

SEQ ID NO: 1528210 - RNA, 14 nt, Human
cucuucaaucucuu

SEQ ID NO: 1528211 - RNA, 19 nt, Human
cucuucagaucucuaacuu

SEQ ID NO: 1528212 - RNA, 18 nt, Human
cucuucagaucucuaacu

SEQ ID NO: 1528213 - RNA, 13 nt, Human
cucugcuccucuc

SEQ ID NO: 1528214 - RNA, 18 nt, Human
cucugcuccucuccccag

SEQ ID NO: 1528215 - RNA, 20 nt, Human
cucugcuccucuccccagca

SEQ ID NO: 1528216 - RNA, 13 nt, Human
cucugcagcaaua

SEQ ID NO: 1528217 - RNA, 21 nt, Human
cucugcacuccccugcugggu

SEQ ID NO: 1528218 - RNA, 20 nt, Human
cucugcacuccccugcuggg

SEQ ID NO: 1528219 - RNA, 14 nt, Human
cucugguccauaga

SEQ ID NO: 1528220 - RNA, 13 nt, Human
cucugcugacaga

SEQ ID NO: 1528221 - RNA, 14 nt, Human
cucugcugacagac

SEQ ID NO: 1528222 - RNA, 16 nt, Human
cucugcugacagacac

SEQ ID NO: 1528223 - RNA, 15 nt, Human
cucugguuaucuaau

SEQ ID NO: 1528224 - RNA, 15 nt, Human
cucugguccauagag

SEQ ID NO: 1528225 - RNA, 21 nt, Human
cugagaucaaaacgguuuuac

SEQ ID NO: 1528226 - RNA, 14 nt, Human
cugagcuuucugcu

SEQ ID NO: 1528227 - RNA, 16 nt, Human
cugagaugugaacaca

SEQ ID NO: 1528228 - RNA, 15 nt, Human
cugagcuuucugcua

SEQ ID NO: 1528229 - RNA, 23 nt, Human
cugaggacacuaaccacgcugga

SEQ ID NO: 1528230 - RNA, 21 nt, Human
cugaggaauccagacccggcu

SEQ ID NO: 1528231 - RNA, 20 nt, Human
cugaggacacuaaccacgcu

SEQ ID NO: 1528232 - RNA, 17 nt, Human
cugaggaauccagaccc

SEQ ID NO: 1528233 - RNA, 20 nt, Human
cugaggaauccagacccggc

SEQ ID NO: 1528234 - RNA, 20 nt, Human
cugaguacguugugcauuug

SEQ ID NO: 1528235 - RNA, 19 nt, Human
cugaguacguugugcauuu

SEQ ID NO: 1528236 - RNA, 17 nt, Human
cugaguacguugugcau

SEQ ID NO: 1528237 - RNA, 18 nt, Human
cugaguacguugugcauu

SEQ ID NO: 1528238 - RNA, 21 nt, Human
cugaguacguugugcauuugg

SEQ ID NO: 1528239 - RNA, 12 nt, Human
cugaggugggag

SEQ ID NO: 1528240 - RNA, 17 nt, Human
cugagaguagagucacu

SEQ ID NO: 1528241 - RNA, 21 nt, Human
cugagaggacuuuucuuugug

SEQ ID NO: 1528242 - RNA, 22 nt, Human
cugagaggacuuuucuuugugg

SEQ ID NO: 1528243 - RNA, 22 nt, Human
cugagacucgcgacaaugcaaa

SEQ ID NO: 1528244 - RNA, 21 nt, Human
cugagacucgcgacaaugcaa

SEQ ID NO: 1528245 - RNA, 23 nt, Human
cugagacagcccgggcucugccu

SEQ ID NO: 1528246 - RNA, 21 nt, Human
cugacccaugcugcccuguga

SEQ ID NO: 1528247 - RNA, 22 nt, Human
cugacccaugcugcccugugag

SEQ ID NO: 1528248 - RNA, 15 nt, Human
aguugaauuuuacau

SEQ ID NO: 1528249 - RNA, 19 nt, Human
aguuguaccgcaaugugac

SEQ ID NO: 1528250 - RNA, 18 nt, Human
aguuacagacaaagcgug

SEQ ID NO: 1528251 - RNA, 15 nt, Human
aguuguuacauuuuu

SEQ ID NO: 1528252 - RNA, 13 nt, Human
aguuguuacauuu

SEQ ID NO: 1528253 - RNA, 16 nt, Human
aguuguuacauuuuua

SEQ ID NO: 1528254 - RNA, 19 nt, Human
aguuguuacauuuuuaagu

SEQ ID NO: 1528255 - RNA, 23 nt, Human
agugugacaaggauugcuacugu

SEQ ID NO: 1528256 - RNA, 18 nt, Human
agugauuaccagggacug

SEQ ID NO: 1528257 - RNA, 16 nt, Human
aguccaagcauuuaga

SEQ ID NO: 1528258 - RNA, 21 nt, Human
aguccaagcauuuagauguau

SEQ ID NO: 1528259 - RNA, 15 nt, Human
agucauucagauaug

SEQ ID NO: 1528260 - RNA, 20 nt, Human
agucauucagauaugauuca

SEQ ID NO: 1528261 - RNA, 23 nt, Human
agucauucagauaugauucaaau

SEQ ID NO: 1528262 - RNA, 15 nt, Human
agucaaauuguguga

SEQ ID NO: 1528263 - RNA, 17 nt, Human
agucaaauugugugaaa

SEQ ID NO: 1528264 - RNA, 16 nt, Human
agucaagugaaaaagg

SEQ ID NO: 1528265 - RNA, 13 nt, Human
agucaaauugugu

SEQ ID NO: 1528266 - RNA, 20 nt, Human
agucaagugaaaaaggagga

SEQ ID NO: 1528267 - RNA, 13 nt, Human
agugauccuccca

SEQ ID NO: 1528268 - RNA, 18 nt, Human
auaucacuugucaauaaa

SEQ ID NO: 1528269 - RNA, 15 nt, Human
auauccuuucuaaca

SEQ ID NO: 1528270 - RNA, 16 nt, Human
auauccuuucuaacaa

SEQ ID NO: 1528271 - RNA, 22 nt, Human
auaugccugggcagaaggaaga

SEQ ID NO: 1528272 - RNA, 21 nt, Human
auaugcuuauacacuuacacu

SEQ ID NO: 1528273 - RNA, 14 nt, Human
auaugcuuauacac

SEQ ID NO: 1528274 - RNA, 16 nt, Human
auaugcuuauacacuu

SEQ ID NO: 1528275 - RNA, 19 nt, Human
auaugcuuauacacuuaca

SEQ ID NO: 1528276 - RNA, 23 nt, Human
auauuucagauaaucacaauaca

SEQ ID NO: 1528277 - RNA, 14 nt, Human
auauuuauuacugu

SEQ ID NO: 1528278 - RNA, 19 nt, Human
auauuuauuacuguaagaa

SEQ ID NO: 1528279 - RNA, 18 nt, Human
auauuuauuuuaauaaug

SEQ ID NO: 1528280 - RNA, 22 nt, Human
auauuuauuacuguaagaaaau

SEQ ID NO: 1528281 - RNA, 17 nt, Human
auauucaggaagcucag

SEQ ID NO: 1528282 - RNA, 14 nt, Human
auauucaggaagcu

SEQ ID NO: 1528283 - RNA, 16 nt, Human
auauucaggaagcuca

SEQ ID NO: 1528284 - RNA, 13 nt, Human
auauucaggaagc

SEQ ID NO: 1528285 - RNA, 16 nt, Human
auauaggaacuuaaau

SEQ ID NO: 1528286 - RNA, 16 nt, Human
auaguaugguggcugg

SEQ ID NO: 1528287 - RNA, 22 nt, Human
auauaaguauucuaaauuuuau

SEQ ID NO: 1528288 - RNA, 15 nt, Human
auaguaugguggcug

SEQ ID NO: 1528289 - RNA, 18 nt, Human
auaaugugaaacuggauu

SEQ ID NO: 1528290 - RNA, 21 nt, Human
auaaugugaaacuggauuaaa

SEQ ID NO: 1528291 - RNA, 19 nt, Human
auaaugugaaacuggauua

SEQ ID NO: 1528292 - RNA, 14 nt, Human
auaauuacuauguc

SEQ ID NO: 1528293 - RNA, 17 nt, Human
auaccugggauacugug

SEQ ID NO: 1528294 - RNA, 20 nt, Human
auaccugggauacugugccc

SEQ ID NO: 1528295 - RNA, 13 nt, Human
auaccuguccccc

SEQ ID NO: 1528296 - RNA, 12 nt, Human
auaccugucccc

SEQ ID NO: 1528297 - RNA, 20 nt, Human
auguucuuucacccuuuucu

SEQ ID NO: 1528298 - RNA, 15 nt, Human
auguucuuaauucuu

SEQ ID NO: 1528299 - RNA, 20 nt, Human
auguucuuaguggauguucu

SEQ ID NO: 1528300 - RNA, 22 nt, Human
auguucugacccugcuucaaau

SEQ ID NO: 1528301 - RNA, 18 nt, Human
auguucucugaggacacu

SEQ ID NO: 1528302 - RNA, 14 nt, Human
auguuugccucugc

SEQ ID NO: 1528303 - RNA, 16 nt, Human
auguuuuaagaggcag

SEQ ID NO: 1528304 - RNA, 18 nt, Human
auguuuuaagaggcaggg

SEQ ID NO: 1528305 - RNA, 14 nt, Human
auuaaaugcccagc

SEQ ID NO: 1528306 - RNA, 15 nt, Human
auuaaaugcccagcc

SEQ ID NO: 1528307 - RNA, 16 nt, Human
auuaaaugcccagccc

SEQ ID NO: 1528308 - RNA, 13 nt, Human
auuaaauucuugc

SEQ ID NO: 1528309 - RNA, 16 nt, Human
augugggucaaggaau

SEQ ID NO: 1528310 - RNA, 16 nt, Human
auguaaguaaacgguc

SEQ ID NO: 1528311 - RNA, 17 nt, Human
auguaauaacugugaag

SEQ ID NO: 1528312 - RNA, 17 nt, Human
auguaagcucuacugag

SEQ ID NO: 1528313 - RNA, 21 nt, Human
auguaagggaaacugccagca

SEQ ID NO: 1528314 - RNA, 22 nt, Human
auguaagggaaacugccagcaa

SEQ ID NO: 1528315 - RNA, 16 nt, Human
augucaaucagccuag

SEQ ID NO: 1528316 - RNA, 15 nt, Human
augucacaggcaggu

SEQ ID NO: 1528317 - RNA, 16 nt, Human
augucacaggcagguc

SEQ ID NO: 1528318 - RNA, 17 nt, Human
augucacaggcaggucc

SEQ ID NO: 1528319 - RNA, 18 nt, Human
auggcuggagcuagaauu

SEQ ID NO: 1528320 - RNA, 23 nt, Human
auggcugccaaugggagcucaug

SEQ ID NO: 1528321 - RNA, 21 nt, Human
augggaaugaaugucagugug

SEQ ID NO: 1528322 - RNA, 15 nt, Human
augggaaugaauguc

SEQ ID NO: 1528323 - RNA, 11 nt, Human
auggaacacuc

SEQ ID NO: 1528324 - RNA, 19 nt, Human
auggaaaugggcagagcag

SEQ ID NO: 1528325 - RNA, 20 nt, Human
auggaaaugggcagagcaga

SEQ ID NO: 1528326 - RNA, 14 nt, Human
augccuuuucccaa

SEQ ID NO: 1528327 - RNA, 14 nt, Human
augccuuuuauuuc

SEQ ID NO: 1528328 - RNA, 23 nt, Human
augcaugaaguaauaugcacaca

SEQ ID NO: 1528329 - RNA, 18 nt, Human
augcauuugaaaauuuug

SEQ ID NO: 1528330 - RNA, 12 nt, Human
augcauuugaaa

SEQ ID NO: 1528331 - RNA, 10 nt, Human
augcauuuga

SEQ ID NO: 1528332 - RNA, 21 nt, Human
augccuggauggggcugcacc

SEQ ID NO: 1528333 - RNA, 23 nt, Human
augccuggauggggcugcaccgg

SEQ ID NO: 1528334 - RNA, 17 nt, Human
augccugggcagaagga

SEQ ID NO: 1528335 - RNA, 11 nt, Human
augccuggugg

SEQ ID NO: 1528336 - RNA, 15 nt, Human
augccugguggcagc

SEQ ID NO: 1528337 - RNA, 16 nt, Human
augccugguggcagcu

SEQ ID NO: 1528338 - RNA, 17 nt, Human
augccugguggcagcug

SEQ ID NO: 1528339 - RNA, 18 nt, Human
augccugguggcagcugc

SEQ ID NO: 1528340 - RNA, 21 nt, Human
augcacagcuaacauggaagu

SEQ ID NO: 1528341 - RNA, 23 nt, Human
augcacacauuuuuuaaaugcac

SEQ ID NO: 1528342 - RNA, 14 nt, Human
augcacagcuaaca

SEQ ID NO: 1528343 - RNA, 22 nt, Human
augcacacauuuuuuaaaugca

SEQ ID NO: 1528344 - RNA, 19 nt, Human
augcacacauuuuuuaaau

SEQ ID NO: 1528345 - RNA, 17 nt, Human
augcacacauuuuuuaa

SEQ ID NO: 1528346 - RNA, 19 nt, Human
augaugugggucaaggaau

SEQ ID NO: 1528347 - RNA, 20 nt, Human
augaaacacucaguuguuca

SEQ ID NO: 1528348 - RNA, 14 nt, Human
augacucagaauau

SEQ ID NO: 1528349 - RNA, 17 nt, Human
augacuccagaauuucc

SEQ ID NO: 1528350 - RNA, 12 nt, Human
augacuccagaa

SEQ ID NO: 1528351 - RNA, 16 nt, Human
augacuccagaauuuc

SEQ ID NO: 1528352 - RNA, 12 nt, Human
augacccagugg

SEQ ID NO: 1528353 - RNA, 13 nt, Human
augagccuggcaa

SEQ ID NO: 1528354 - RNA, 14 nt, Human
augagccuggcaag

SEQ ID NO: 1528355 - RNA, 22 nt, Human
aucuuauaauuuaaaauaugcu

SEQ ID NO: 1528356 - RNA, 19 nt, Human
aucuuccaacucaaacucu

SEQ ID NO: 1528357 - RNA, 22 nt, Human
aucucucgugauugauaagaac

SEQ ID NO: 1528358 - RNA, 17 nt, Human
aucucucuuuaauauaa

SEQ ID NO: 1528359 - RNA, 13 nt, Human
aucugcucuccuu

SEQ ID NO: 1528360 - RNA, 14 nt, Human
aucugcucuccuuc

SEQ ID NO: 1528361 - RNA, 15 nt, Human
aucugcucuccuucc

SEQ ID NO: 1528362 - RNA, 16 nt, Human
aucugcucuccuuccu

SEQ ID NO: 1528363 - RNA, 17 nt, Human
aucugcucuccuuccug

SEQ ID NO: 1528364 - RNA, 20 nt, Human
aucugcucuccuuccuggag

SEQ ID NO: 1528365 - RNA, 21 nt, Human
aucugcucuccuuccuggagc

SEQ ID NO: 1528366 - RNA, 17 nt, Human
aucuugaagacuuuucu

SEQ ID NO: 1528367 - RNA, 22 nt, Human
aucuucugaacuuggcgcugcc

SEQ ID NO: 1528368 - RNA, 17 nt, Human
aucuucuuuauaauucu

SEQ ID NO: 1528369 - RNA, 17 nt, Human
aucagccugcuccagcu

SEQ ID NO: 1528370 - RNA, 17 nt, Human
aucagcugcugaaacaa

SEQ ID NO: 1528371 - RNA, 13 nt, Human
aucagcugcuacu

SEQ ID NO: 1528372 - RNA, 23 nt, Human
aucagcugcuacuacuccuguag

SEQ ID NO: 1528373 - RNA, 11 nt, Human
aucagccuggg

SEQ ID NO: 1528374 - RNA, 20 nt, Human
aucagccugggcaaugugau

SEQ ID NO: 1528375 - RNA, 21 nt, Human
aucagccugggcaaugugaua

SEQ ID NO: 1528376 - RNA, 12 nt, Human
aucagcugcuac

SEQ ID NO: 1528377 - RNA, 18 nt, Human
auccacccaccucagccu

SEQ ID NO: 1528378 - RNA, 20 nt, Human
auccacccaccucagccucc

SEQ ID NO: 1528379 - RNA, 15 nt, Human
aucccuacuguaauu

SEQ ID NO: 1528380 - RNA, 13 nt, Human
aucccucauccuc

SEQ ID NO: 1528381 - RNA, 18 nt, Human
auccucauacccaccccc

SEQ ID NO: 1528382 - RNA, 19 nt, Human
auccucauacccaccccca

SEQ ID NO: 1528383 - RNA, 22 nt, Human
auccucauacccacccccaccc

SEQ ID NO: 1528384 - RNA, 13 nt, Human
aucgaugcagugc

SEQ ID NO: 1528385 - RNA, 14 nt, Human
auccuccucagauc

SEQ ID NO: 1528386 - RNA, 13 nt, Human
auccuuucuaaca

SEQ ID NO: 1528387 - RNA, 23 nt, Human
auccucauacccacccccaccca

SEQ ID NO: 1528388 - RNA, 11 nt, Human
auccuccucag

SEQ ID NO: 1528389 - RNA, 14 nt, Human
auccuccaggugca

SEQ ID NO: 1528390 - RNA, 19 nt, Human
auccuccaggugcacaagc

SEQ ID NO: 1528391 - RNA, 22 nt, Human
auccuccaggugcacaagcucc

SEQ ID NO: 1528392 - RNA, 14 nt, Human
aggaccucgugcca

SEQ ID NO: 1528393 - RNA, 14 nt, Human
aggaccucagguga

SEQ ID NO: 1528394 - RNA, 20 nt, Human
aggaccucaggugagaagca

SEQ ID NO: 1528395 - RNA, 15 nt, Human
aggagagcuagcagc

SEQ ID NO: 1528396 - RNA, 15 nt, Human
aggagaggagagggg

SEQ ID NO: 1528397 - RNA, 16 nt, Human
aggagaggggcacagg

SEQ ID NO: 1528398 - RNA, 18 nt, Human
aggagaggggcacagggu

SEQ ID NO: 1528399 - RNA, 14 nt, Human
aggaccccagcucu

SEQ ID NO: 1528400 - RNA, 16 nt, Human
aggaccccagcucugc

SEQ ID NO: 1528401 - RNA, 20 nt, Human
aggaccccuccaugugggcu

SEQ ID NO: 1528402 - RNA, 17 nt, Human
aggaccccagcucugcg

SEQ ID NO: 1528403 - RNA, 17 nt, Human
aggagaguagaacagau

SEQ ID NO: 1528404 - RNA, 17 nt, Human
aggaggggauagagaga

SEQ ID NO: 1528405 - RNA, 17 nt, Human
aggauguugaaaaaguu

SEQ ID NO: 1528406 - RNA, 14 nt, Human
aggauguugaaaaa

SEQ ID NO: 1528407 - RNA, 20 nt, Human
aggauguucugggacacagu

SEQ ID NO: 1528408 - RNA, 16 nt, Human
aggauucuuccucccu

SEQ ID NO: 1528409 - RNA, 12 nt, Human
aggauucuuccu

SEQ ID NO: 1528410 - RNA, 14 nt, Human
agcuguaugauucc

SEQ ID NO: 1528411 - RNA, 13 nt, Human
aggaaaaacugau

SEQ ID NO: 1528412 - RNA, 15 nt, Human
aggaaaaacugauuu

SEQ ID NO: 1528413 - RNA, 19 nt, Human
agcuuccuucugugaaagu

SEQ ID NO: 1528414 - RNA, 17 nt, Human
agcugggugucaagagg

SEQ ID NO: 1528415 - RNA, 22 nt, Human
agcugggugucaagagggucug

SEQ ID NO: 1528416 - RNA, 21 nt, Human
agcuggucccacucaguccau

SEQ ID NO: 1528417 - RNA, 15 nt, Human
aggggcacagggucu

SEQ ID NO: 1528418 - RNA, 21 nt, Human
aggggauagagagagaccacu

SEQ ID NO: 1528419 - RNA, 19 nt, Human
agggcgggaggauguucug

SEQ ID NO: 1528420 - RNA, 18 nt, Human
agggccuggccugagcug

SEQ ID NO: 1528421 - RNA, 17 nt, Human
agggcacaccgggcacu

SEQ ID NO: 1528422 - RNA, 22 nt, Human
agggcacagaaaauggaagaca

SEQ ID NO: 1528423 - RNA, 20 nt, Human
agggcacaccgggcacucag

SEQ ID NO: 1528424 - RNA, 21 nt, Human
agggcacaccgggcacucaga

SEQ ID NO: 1528425 - RNA, 15 nt, Human
agggccuggccugag

SEQ ID NO: 1528426 - RNA, 16 nt, Human
agggccuggccugagc

SEQ ID NO: 1528427 - RNA, 17 nt, Human
agggccuggccugagcu

SEQ ID NO: 1528428 - RNA, 23 nt, Human
aggcuagugugguguuuccuggc

SEQ ID NO: 1528429 - RNA, 18 nt, Human
aggcugccucucccauca

SEQ ID NO: 1528430 - RNA, 21 nt, Human
agggacgcuacccgggaaggg

SEQ ID NO: 1528431 - RNA, 12 nt, Human
agggacagaggg

SEQ ID NO: 1528432 - RNA, 13 nt, Human
agggacagagggg

SEQ ID NO: 1528433 - RNA, 20 nt, Human
agggacagaggggguggccu

SEQ ID NO: 1528434 - RNA, 14 nt, Human
aggucgaggcagga

SEQ ID NO: 1528435 - RNA, 16 nt, Human
aggugcugccauccag

SEQ ID NO: 1528436 - RNA, 17 nt, Human
aggugcugccauccagg

SEQ ID NO: 1528437 - RNA, 13 nt, Human
agguucagcuugu

SEQ ID NO: 1528438 - RNA, 13 nt, Human
agguucccuuuga

SEQ ID NO: 1528439 - RNA, 17 nt, Human
agguucaaagauauuuu

SEQ ID NO: 1528440 - RNA, 14 nt, Human
agguuaauguucau

SEQ ID NO: 1528441 - RNA, 15 nt, Human
agguuaauuccaauu

SEQ ID NO: 1528442 - RNA, 22 nt, Human
agguuaauuccaauuauaugag

SEQ ID NO: 1528443 - RNA, 22 nt, Human
agguacgaaaagaggggaagag

SEQ ID NO: 1528444 - RNA, 17 nt, Human
agguaaggaauaccugu

SEQ ID NO: 1528445 - RNA, 15 nt, Human
agccagauuuuccug

SEQ ID NO: 1528446 - RNA, 19 nt, Human
agccagauuuuccugaaaa

SEQ ID NO: 1528447 - RNA, 16 nt, Human
agcccaaagaaggaaa

SEQ ID NO: 1528448 - RNA, 22 nt, Human
agccaaggccaaaggaagcaca

SEQ ID NO: 1528449 - RNA, 23 nt, Human
agccaaggccaaaggaagcacau

SEQ ID NO: 1528450 - RNA, 15 nt, Human
agcaugcaccacggg

SEQ ID NO: 1528451 - RNA, 20 nt, Human
agccagaggagagaggaccc

SEQ ID NO: 1528452 - RNA, 12 nt, Human
agcaugccugga

SEQ ID NO: 1528453 - RNA, 20 nt, Human
agcaugccuggauggggcug

SEQ ID NO: 1528454 - RNA, 19 nt, Human
agccaaagcuaggccuggc

SEQ ID NO: 1528455 - RNA, 20 nt, Human
agccaaagcuaggccuggcc

SEQ ID NO: 1528456 - RNA, 23 nt, Human
agccaaagcuaggccuggccaga

SEQ ID NO: 1528457 - RNA, 21 nt, Human
agcagccacauuccugaugcu

SEQ ID NO: 1528458 - RNA, 20 nt, Human
agcacuaaggugugcucuga

SEQ ID NO: 1528459 - RNA, 19 nt, Human
agcacuaaggugugcucug

SEQ ID NO: 1528460 - RNA, 23 nt, Human
agcaguugaaaagacuccaaaga

SEQ ID NO: 1528461 - RNA, 14 nt, Human
agauguagaggaga

SEQ ID NO: 1528462 - RNA, 21 nt, Human
agaugggagaaucacuugaac

SEQ ID NO: 1528463 - RNA, 16 nt, Human
agauguagaggagaaa

SEQ ID NO: 1528464 - RNA, 20 nt, Human
agccucccaaagugcuggga

SEQ ID NO: 1528465 - RNA, 18 nt, Human
agccucccgaauagcugg

SEQ ID NO: 1528466 - RNA, 19 nt, Human
agccucccgaauagcuggg

SEQ ID NO: 1528467 - RNA, 20 nt, Human
agccucccgaauagcuggga

SEQ ID NO: 1528468 - RNA, 22 nt, Human
agccucccgaauagcugggacu

SEQ ID NO: 1528469 - RNA, 17 nt, Human
agccucccgaguagcug

SEQ ID NO: 1528470 - RNA, 18 nt, Human
agccucccaaagugcugg

SEQ ID NO: 1528471 - RNA, 19 nt, Human
agccucccaaagugcuggg

SEQ ID NO: 1528472 - RNA, 14 nt, Human
agccgcuggggcca

SEQ ID NO: 1528473 - RNA, 22 nt, Human
agccgcuggggccaguuggucc

SEQ ID NO: 1528474 - RNA, 20 nt, Human
agccgagauugcaccacugc

SEQ ID NO: 1528475 - RNA, 21 nt, Human
agccgagaucacgccacugca

SEQ ID NO: 1528476 - RNA, 19 nt, Human
agccgagauugcaccacug

SEQ ID NO: 1528477 - RNA, 16 nt, Human
agccccagugcccaca

SEQ ID NO: 1528478 - RNA, 20 nt, Human
agccccaucccaaacccuuc

SEQ ID NO: 1528479 - RNA, 11 nt, Human
agccccauccu

SEQ ID NO: 1528480 - RNA, 15 nt, Human
agcccugagcuuucu

SEQ ID NO: 1528481 - RNA, 19 nt, Human
agccgagaucacgccacug

SEQ ID NO: 1528482 - RNA, 20 nt, Human
agccgagaucacgccacugc

SEQ ID NO: 1528483 - RNA, 13 nt, Human
agacggggcugga

SEQ ID NO: 1528484 - RNA, 18 nt, Human
agacgggggcagagaggg

SEQ ID NO: 1528485 - RNA, 19 nt, Human
agacggagucccaccuugg

SEQ ID NO: 1528486 - RNA, 21 nt, Human
agacagcccgggcucugccuc

SEQ ID NO: 1528487 - RNA, 17 nt, Human
agacagcccgggcucug

SEQ ID NO: 1528488 - RNA, 14 nt, Human
agacacaacuauuu

SEQ ID NO: 1528489 - RNA, 19 nt, Human
agacacaacuauuuuucca

SEQ ID NO: 1528490 - RNA, 18 nt, Human
agacagcccgggcucugc

SEQ ID NO: 1528491 - RNA, 20 nt, Human
agacagcccgggcucugccu

SEQ ID NO: 1528492 - RNA, 13 nt, Human
agaccaucccuga

SEQ ID NO: 1528493 - RNA, 14 nt, Human
agaccaucccugaa

SEQ ID NO: 1528494 - RNA, 17 nt, Human
agaccaucccugaaggc

SEQ ID NO: 1528495 - RNA, 18 nt, Human
agaccaucccugaaggcc

SEQ ID NO: 1528496 - RNA, 21 nt, Human
agaccaucccugaaggccccg

SEQ ID NO: 1528497 - RNA, 21 nt, Human
agacaauuuauuauggcacau

SEQ ID NO: 1528498 - RNA, 15 nt, Human
agacaauuuauuaug

SEQ ID NO: 1528499 - RNA, 19 nt, Human
agacaaugacuuacuguac

SEQ ID NO: 1528500 - RNA, 17 nt, Human
agacaaugacuuacugu

SEQ ID NO: 1528501 - RNA, 13 nt, Human
agacaaugacuua

SEQ ID NO: 1528502 - RNA, 17 nt, Human
agacugcauuauauuua

SEQ ID NO: 1528503 - RNA, 21 nt, Human
agacugcauuauauuuauuac

SEQ ID NO: 1528504 - RNA, 18 nt, Human
agagaaaguacuucucca

SEQ ID NO: 1528505 - RNA, 10 nt, Human
agagaagaga

SEQ ID NO: 1528506 - RNA, 21 nt, Human
agagaagagauugugguuuca

SEQ ID NO: 1528507 - RNA, 21 nt, Human
agauaggucagugcaaauacu

SEQ ID NO: 1528508 - RNA, 15 nt, Human
agauagccaaggcca

SEQ ID NO: 1528509 - RNA, 16 nt, Human
agauagccaaggccaa

SEQ ID NO: 1528510 - RNA, 14 nt, Human
agaucuucuguggg

SEQ ID NO: 1528511 - RNA, 13 nt, Human
agauagccaaggc

SEQ ID NO: 1528512 - RNA, 22 nt, Human
agauacuuggggggcugaggug

SEQ ID NO: 1528513 - RNA, 13 nt, Human
agaggagaggggc

SEQ ID NO: 1528514 - RNA, 16 nt, Human
agaggggaagagacuu

SEQ ID NO: 1528515 - RNA, 22 nt, Human
agaggggaacagacuggaagca

SEQ ID NO: 1528516 - RNA, 14 nt, Human
aauuaguuuuauau

SEQ ID NO: 1528517 - RNA, 17 nt, Human
aauuaguuuuauaugcu

SEQ ID NO: 1528518 - RNA, 20 nt, Human
aauuaguuuuauaugcuucu

SEQ ID NO: 1528519 - RNA, 18 nt, Human
aauuaguggcacuugcuu

SEQ ID NO: 1528520 - RNA, 14 nt, Human
aauuaaauuuugag

SEQ ID NO: 1528521 - RNA, 22 nt, Human
aauuaaauuuugaguucuacau

SEQ ID NO: 1528522 - RNA, 18 nt, Human
aauguuugccucugccuc

SEQ ID NO: 1528523 - RNA, 19 nt, Human
aauguuugccucugccucu

SEQ ID NO: 1528524 - RNA, 18 nt, Human
aauuaaaacacaacaucu

SEQ ID NO: 1528525 - RNA, 15 nt, Human
aaugucagugugacu

SEQ ID NO: 1528526 - RNA, 16 nt, Human
aaugucagugugacug

SEQ ID NO: 1528527 - RNA, 13 nt, Human
aaugucaguguga

SEQ ID NO: 1528528 - RNA, 20 nt, Human
aaugucucuuuaaugucaca

SEQ ID NO: 1528529 - RNA, 17 nt, Human
aaugucucugugagacu

SEQ ID NO: 1528530 - RNA, 18 nt, Human
aaugucucugugagacuc

SEQ ID NO: 1528531 - RNA, 22 nt, Human
aaugucuaguuguaacaccaug

SEQ ID NO: 1528532 - RNA, 17 nt, Human
aaugucagugugacuga

SEQ ID NO: 1528533 - RNA, 21 nt, Human
aaugucagugugacugaucuc

SEQ ID NO: 1528534 - RNA, 15 nt, Human
aaugggcagagcaga

SEQ ID NO: 1528535 - RNA, 13 nt, Human
aaugggcagagca

SEQ ID NO: 1528536 - RNA, 12 nt, Human
aaugaagauacu

SEQ ID NO: 1528537 - RNA, 17 nt, Human
aaugauaacuggaaacu

SEQ ID NO: 1528538 - RNA, 20 nt, Human
aaugauaacuggaaacuuca

SEQ ID NO: 1528539 - RNA, 17 nt, Human
aaugaagauacugaaau

SEQ ID NO: 1528540 - RNA, 18 nt, Human
aaugauaaguaaaugcua

SEQ ID NO: 1528541 - RNA, 21 nt, Human
aaugauaaguaaaugcuaggu

SEQ ID NO: 1528542 - RNA, 21 nt, Human
aaugaugauccuaggcauuug

SEQ ID NO: 1528543 - RNA, 16 nt, Human
aaugaaccacaucuug

SEQ ID NO: 1528544 - RNA, 17 nt, Human
aaugaaccacaucuugc

SEQ ID NO: 1528545 - RNA, 23 nt, Human
aaugaaccacaucuugcucugcu

SEQ ID NO: 1528546 - RNA, 22 nt, Human
aaucugcuuuuuaaagaaugcu

SEQ ID NO: 1528547 - RNA, 13 nt, Human
aauccauacauuu

SEQ ID NO: 1528548 - RNA, 14 nt, Human
aauccauacauuug

SEQ ID NO: 1528549 - RNA, 18 nt, Human
aaucuccaaaauaaaacu

SEQ ID NO: 1528550 - RNA, 14 nt, Human
aaucuccaaaauaa

SEQ ID NO: 1528551 - RNA, 13 nt, Human
aaucuccaaaaua

SEQ ID NO: 1528552 - RNA, 18 nt, Human
aaucucauaauuuauaca

SEQ ID NO: 1528553 - RNA, 17 nt, Human
aaugaucuuuucaaguu

SEQ ID NO: 1528554 - RNA, 19 nt, Human
aaugaugccaugaggaaca

SEQ ID NO: 1528555 - RNA, 13 nt, Human
aaucacaauacau

SEQ ID NO: 1528556 - RNA, 15 nt, Human
aaucaagaaacuuaa

SEQ ID NO: 1528557 - RNA, 16 nt, Human
aauauuauguuaaaac

SEQ ID NO: 1528558 - RNA, 14 nt, Human
aauauuauguguuu

SEQ ID NO: 1528559 - RNA, 18 nt, Human
aauaugguguacauucuu

SEQ ID NO: 1528560 - RNA, 21 nt, Human
aauauaggaacuuaaauaaug

SEQ ID NO: 1528561 - RNA, 20 nt, Human
aauauaggaacuuaaauaau

SEQ ID NO: 1528562 - RNA, 18 nt, Human
aauauaggaacuuaaaua

SEQ ID NO: 1528563 - RNA, 17 nt, Human
aauaaacgucuuaaaua

SEQ ID NO: 1528564 - RNA, 16 nt, Human
aauaaacgucuuaaau

SEQ ID NO: 1528565 - RNA, 21 nt, Human
aauaauccuaaacauaugaau

SEQ ID NO: 1528566 - RNA, 16 nt, Human
aauaaugugaaacugg

SEQ ID NO: 1528567 - RNA, 11 nt, Human
aauaaugucuc

SEQ ID NO: 1528568 - RNA, 12 nt, Human
aauaaugucucu

SEQ ID NO: 1528569 - RNA, 13 nt, Human
aauaaugucucug

SEQ ID NO: 1528570 - RNA, 18 nt, Human
aaguauguguaaaaugug

SEQ ID NO: 1528571 - RNA, 17 nt, Human
aaguaucccuacuguaa

SEQ ID NO: 1528572 - RNA, 16 nt, Human
aaguaucccuacugua

SEQ ID NO: 1528573 - RNA, 11 nt, Human
aaguacuucuu

SEQ ID NO: 1528574 - RNA, 15 nt, Human
aagguuaauaaagua

SEQ ID NO: 1528575 - RNA, 16 nt, Human
aagguuaauaaaguaa

SEQ ID NO: 1528576 - RNA, 20 nt, Human
aagguuaauguucaucaucc

SEQ ID NO: 1528577 - RNA, 13 nt, Human
aagguuguauugc

SEQ ID NO: 1528578 - RNA, 17 nt, Human
aagguuguauugcauau

SEQ ID NO: 1528579 - RNA, 11 nt, Human
aaggugggagg

SEQ ID NO: 1528580 - RNA, 17 nt, Human
aagucuuagauguauau

SEQ ID NO: 1528581 - RNA, 16 nt, Human
aagucuuagauguaua

SEQ ID NO: 1528582 - RNA, 11 nt, Human
aagcugggcag

SEQ ID NO: 1528583 - RNA, 15 nt, Human
aagcugggcagguug

SEQ ID NO: 1528584 - RNA, 13 nt, Human
aagcugggcaggu

SEQ ID NO: 1528585 - RNA, 18 nt, Human
aaggacauugcggacagc

SEQ ID NO: 1528586 - RNA, 22 nt, Human
aagcugcacccucaggcaggug

SEQ ID NO: 1528587 - RNA, 21 nt, Human
aagcugcacccucaggcaggu

SEQ ID NO: 1528588 - RNA, 20 nt, Human
aagcugcacccucaggcagg

SEQ ID NO: 1528589 - RNA, 12 nt, Human
aagcguggugga

SEQ ID NO: 1528590 - RNA, 17 nt, Human
aaggcaaggcugucaau

SEQ ID NO: 1528591 - RNA, 18 nt, Human
aaggcaaggcugucaauu

SEQ ID NO: 1528592 - RNA, 16 nt, Human
aagauuuaccacuugu

SEQ ID NO: 1528593 - RNA, 13 nt, Human
aagccagauuuuc

SEQ ID NO: 1528594 - RNA, 19 nt, Human
aagccagauuuuccugaaa

SEQ ID NO: 1528595 - RNA, 14 nt, Human
aagcagaggaagga

SEQ ID NO: 1528596 - RNA, 13 nt, Human
aagauuuucagaa

SEQ ID NO: 1528597 - RNA, 21 nt, Human
aagcagaggaaggagaggaga

SEQ ID NO: 1528598 - RNA, 12 nt, Human
aaauaacaauga

SEQ ID NO: 1528599 - RNA, 11 nt, Human
aaagugcuggg

SEQ ID NO: 1528600 - RNA, 14 nt, Human
aaagugcugggauu

SEQ ID NO: 1528601 - RNA, 18 nt, Human
aaauggcuuccuggcaau

SEQ ID NO: 1528602 - RNA, 20 nt, Human
aaauggacguguuaugacuc

SEQ ID NO: 1528603 - RNA, 21 nt, Human
aaauggacguguuaugacucc

SEQ ID NO: 1528604 - RNA, 22 nt, Human
aaauggacguguuaugacucca

SEQ ID NO: 1528605 - RNA, 16 nt, Human
aaauggaaaugggcag

SEQ ID NO: 1528606 - RNA, 18 nt, Human
aaauggaagacagcucuu

SEQ ID NO: 1528607 - RNA, 18 nt, Human
aaaucaaauaugcaaagc

SEQ ID NO: 1528608 - RNA, 19 nt, Human
aaaucaaauaugcaaagca

SEQ ID NO: 1528609 - RNA, 14 nt, Human
aaauaguauuugag

SEQ ID NO: 1528610 - RNA, 19 nt, Human
aaauaguggugugauuugg

SEQ ID NO: 1528611 - RNA, 14 nt, Human
aaauauaauugaca

SEQ ID NO: 1528612 - RNA, 18 nt, Human
aaacacuguucucugccc

SEQ ID NO: 1528613 - RNA, 13 nt, Human
aaaauucagugga

SEQ ID NO: 1528614 - RNA, 15 nt, Human
aaaacacauuuuucu

SEQ ID NO: 1528615 - RNA, 13 nt, Human
aaaacacauuuuu

SEQ ID NO: 1528616 - RNA, 19 nt, Human
aaacacuguucucugcccu

SEQ ID NO: 1528617 - RNA, 22 nt, Human
aaacacuguucucugcccucca

SEQ ID NO: 1528618 - RNA, 19 nt, Human
aaacugccagcaacgcagg

SEQ ID NO: 1528619 - RNA, 16 nt, Human
aaacugacucuuaaga

SEQ ID NO: 1528620 - RNA, 17 nt, Human
aaacugacucuuaagaa

SEQ ID NO: 1528621 - RNA, 14 nt, Human
aaacugccagcaac

SEQ ID NO: 1528622 - RNA, 15 nt, Human
aaacugccagcaacg

SEQ ID NO: 1528623 - RNA, 17 nt, Human
aaagaugaaaauauuug

SEQ ID NO: 1528624 - RNA, 13 nt, Human
aaagaugaaaaua

SEQ ID NO: 1528625 - RNA, 16 nt, Human
aaagaugaaaauauuu

SEQ ID NO: 1528626 - RNA, 16 nt, Human
aacuuuggaacaagau

SEQ ID NO: 1528627 - RNA, 20 nt, Human
aacuuugaccucugcagcaa

SEQ ID NO: 1528628 - RNA, 19 nt, Human
aacuuugaccucugcagca

SEQ ID NO: 1528629 - RNA, 15 nt, Human
aacuuuuauaaacuu

SEQ ID NO: 1528630 - RNA, 12 nt, Human
aacuuuuauaaa

SEQ ID NO: 1528631 - RNA, 17 nt, Human
aacuuugaccucugcag

SEQ ID NO: 1528632 - RNA, 14 nt, Human
aacuuugaccucug

SEQ ID NO: 1528633 - RNA, 13 nt, Human
aacuuugaccucu

SEQ ID NO: 1528634 - RNA, 13 nt, Human
aagaaauguaagg

SEQ ID NO: 1528635 - RNA, 14 nt, Human
aagaaauguaaggg

SEQ ID NO: 1528636 - RNA, 19 nt, Human
aacuuuuauaaacuuuacc

SEQ ID NO: 1528637 - RNA, 16 nt, Human
aacuuuuauaaacuuu

SEQ ID NO: 1528638 - RNA, 17 nt, Human
aacugauuuuuuuuucc

SEQ ID NO: 1528639 - RNA, 20 nt, Human
aacugauuuuuuuuuccuuc

SEQ ID NO: 1528640 - RNA, 19 nt, Human
aacugauuuuuuuuuccuu

SEQ ID NO: 1528641 - RNA, 17 nt, Human
aacuuaaauaaugugaa

SEQ ID NO: 1528642 - RNA, 19 nt, Human
aacuuaaauaaugugaaac

SEQ ID NO: 1528643 - RNA, 12 nt, Human
aacucaccccag

SEQ ID NO: 1528644 - RNA, 14 nt, Human
aacucaauauuuuc

SEQ ID NO: 1528645 - RNA, 20 nt, Human
aacucaauauuuuccaugaa

SEQ ID NO: 1528646 - RNA, 21 nt, Human
aacucaauauuuuccaugaaa

SEQ ID NO: 1528647 - RNA, 12 nt, Human
aacucaauauuu

SEQ ID NO: 1528648 - RNA, 13 nt, Human
aacucaauauuuu

SEQ ID NO: 1528649 - RNA, 15 nt, Human
aacucaccccagccc

SEQ ID NO: 1528650 - RNA, 15 nt, Human
aacucaccugccccu

SEQ ID NO: 1528651 - RNA, 16 nt, Human
aacucaccugccccuc

SEQ ID NO: 1528652 - RNA, 13 nt, Human
aacuucacauauu

SEQ ID NO: 1528653 - RNA, 22 nt, Human
aaccacuggaaaguuuaugguu

SEQ ID NO: 1528654 - RNA, 22 nt, Human
aaccacucuaucaaguauuaua

SEQ ID NO: 1528655 - RNA, 23 nt, Human
aacauguaauuaaguacuaugua

SEQ ID NO: 1528656 - RNA, 14 nt, Human
aacauguaauuaag

SEQ ID NO: 1528657 - RNA, 21 nt, Human
aacauguaauuaaguacuaug

SEQ ID NO: 1528658 - RNA, 17 nt, Human
aaccaguguuguggauu

SEQ ID NO: 1528659 - RNA, 22 nt, Human
aacaugcuacacacugcauguu

SEQ ID NO: 1528660 - RNA, 14 nt, Human
aacccuggugacca

SEQ ID NO: 1528661 - RNA, 15 nt, Human
aacacgagcaggcua

SEQ ID NO: 1528662 - RNA, 19 nt, Human
aacacauuuuucuuaggga

SEQ ID NO: 1528663 - RNA, 14 nt, Human
acuagcuauggugu

SEQ ID NO: 1528664 - RNA, 13 nt, Human
acuccccugcugg

SEQ ID NO: 1528665 - RNA, 17 nt, Human
acuccccugcugggugu

SEQ ID NO: 1528666 - RNA, 14 nt, Human
acucccccaggugg

SEQ ID NO: 1528667 - RNA, 21 nt, Human
acucauaaaaagccugcaauu

SEQ ID NO: 1528668 - RNA, 17 nt, Human
acucaaacucuuaaaac

SEQ ID NO: 1528669 - RNA, 16 nt, Human
acucaaacucuuaaaa

SEQ ID NO: 1528670 - RNA, 11 nt, Human
acuauaaugua

SEQ ID NO: 1528671 - RNA, 14 nt, Human
acucaaaucaagaa

SEQ ID NO: 1528672 - RNA, 11 nt, Human
acucuuaaaac

SEQ ID NO: 1528673 - RNA, 18 nt, Human
acucuuaaaacccaagug

SEQ ID NO: 1528674 - RNA, 19 nt, Human
acucugugucagguggggc

SEQ ID NO: 1528675 - RNA, 16 nt, Human
acucugugucaggugg

SEQ ID NO: 1528676 - RNA, 21 nt, Human
acucuaucaaguauuauaccu

SEQ ID NO: 1528677 - RNA, 16 nt, Human
acucuaucaaguauua

SEQ ID NO: 1528678 - RNA, 14 nt, Human
acucuaucaaguau

SEQ ID NO: 1528679 - RNA, 21 nt, Human
acucuacccucuuagaaaaac

SEQ ID NO: 1528680 - RNA, 18 nt, Human
acucuacccucuuagaaa

SEQ ID NO: 1528681 - RNA, 12 nt, Human
acucccuuucaa

SEQ ID NO: 1528682 - RNA, 13 nt, Human
acucccuuucaac

SEQ ID NO: 1528683 - RNA, 16 nt, Human
acuaagagagaaugag

SEQ ID NO: 1528684 - RNA, 17 nt, Human
acguggcugcuucaagg

SEQ ID NO: 1528685 - RNA, 13 nt, Human
acguggcugcuuc

SEQ ID NO: 1528686 - RNA, 14 nt, Human
acguggcugcuuca

SEQ ID NO: 1528687 - RNA, 15 nt, Human
acguggcugcuucaa

SEQ ID NO: 1528688 - RNA, 17 nt, Human
acgccagauucuuuccu

SEQ ID NO: 1528689 - RNA, 16 nt, Human
acgcugugcugcccug

SEQ ID NO: 1528690 - RNA, 17 nt, Human
acgcugugcugcccugc

SEQ ID NO: 1528691 - RNA, 18 nt, Human
acgcugugcugcccugcc

SEQ ID NO: 1528692 - RNA, 22 nt, Human
acuaaguuuuuauggcuuuugu

SEQ ID NO: 1528693 - RNA, 15 nt, Human
acuaaguuuuuaugg

SEQ ID NO: 1528694 - RNA, 19 nt, Human
acgauuucuguuuagauaa

SEQ ID NO: 1528695 - RNA, 18 nt, Human
acgccacugcacuauagc

SEQ ID NO: 1528696 - RNA, 17 nt, Human
acgauuucuguuuagau

SEQ ID NO: 1528697 - RNA, 14 nt, Human
acgauuucuguuua

SEQ ID NO: 1528698 - RNA, 13 nt, Human
acgauuucuguuu

SEQ ID NO: 1528699 - RNA, 12 nt, Human
acgauuucuguu

SEQ ID NO: 1528700 - RNA, 14 nt, Human
accuuggcucaagu

SEQ ID NO: 1528701 - RNA, 12 nt, Human
accuuggcugca

SEQ ID NO: 1528702 - RNA, 16 nt, Human
accuuucaauaggaaa

SEQ ID NO: 1528703 - RNA, 14 nt, Human
accuuggcugcagg

SEQ ID NO: 1528704 - RNA, 17 nt, Human
accuuucaauaggaaaa

SEQ ID NO: 1528705 - RNA, 21 nt, Human
accuuucaauaggaaaaacug

SEQ ID NO: 1528706 - RNA, 23 nt, Human
accuuucaauaggaaaaacugau

SEQ ID NO: 1528707 - RNA, 23 nt, Human
accugccccucaacucuccucca

SEQ ID NO: 1528708 - RNA, 15 nt, Human
accucugcagcaaua

SEQ ID NO: 1528709 - RNA, 21 nt, Human
accucugcacaagcugcaccc

SEQ ID NO: 1528710 - RNA, 16 nt, Human
accucugcacaagcug

SEQ ID NO: 1528711 - RNA, 18 nt, Human
accucugcacaagcugca

SEQ ID NO: 1528712 - RNA, 20 nt, Human
acuuauuguagcauccugga

SEQ ID NO: 1528713 - RNA, 23 nt, Human
acuuauuguagcauccuggaaua

SEQ ID NO: 1528714 - RNA, 12 nt, Human
acuguuuugaau

SEQ ID NO: 1528715 - RNA, 19 nt, Human
acuucacauauugauuucc

SEQ ID NO: 1528716 - RNA, 13 nt, Human
acuguuucaaacu

SEQ ID NO: 1528717 - RNA, 20 nt, Human
acuuguaaaggaauuuaaaa

SEQ ID NO: 1528718 - RNA, 19 nt, Human
acuuguaaaggaauuuaaa

SEQ ID NO: 1528719 - RNA, 14 nt, Human
acuuggucugugag

SEQ ID NO: 1528720 - RNA, 15 nt, Human
acuuggucugugaga

SEQ ID NO: 1528721 - RNA, 18 nt, Human
acuucugccauauucugu

SEQ ID NO: 1528722 - RNA, 23 nt, Human
acuucacauauugauuuccguua

SEQ ID NO: 1528723 - RNA, 19 nt, Human
acuucugccauauucuguu

SEQ ID NO: 1528724 - RNA, 21 nt, Human
acuuggucugugagaugcuag

SEQ ID NO: 1528725 - RNA, 14 nt, Human
acuggagaaaaugg

SEQ ID NO: 1528726 - RNA, 16 nt, Human
acuggaagcacagcuu

SEQ ID NO: 1528727 - RNA, 15 nt, Human
acuggaagcacagcu

SEQ ID NO: 1528728 - RNA, 14 nt, Human
acuggaagcacagc

SEQ ID NO: 1528729 - RNA, 16 nt, Human
acugugccaugugcca

SEQ ID NO: 1528730 - RNA, 12 nt, Human
acugucuucagu

SEQ ID NO: 1528731 - RNA, 18 nt, Human
agaaaaguugaauuuuac

SEQ ID NO: 1528732 - RNA, 21 nt, Human
agaaaaguugaauuuuacaug

SEQ ID NO: 1528733 - RNA, 22 nt, Human
acuuuuauaaacuuuaccuuuu

SEQ ID NO: 1528734 - RNA, 19 nt, Human
acuuuuauaaacuuuaccu

SEQ ID NO: 1528735 - RNA, 23 nt, Human
agaaaauauuauguguuuccaua

SEQ ID NO: 1528736 - RNA, 22 nt, Human
agaaaauggacguguuaugacu

SEQ ID NO: 1528737 - RNA, 23 nt, Human
agaaaauggacguguuaugacuc

SEQ ID NO: 1528738 - RNA, 14 nt, Human
agaaaauaacaaua

SEQ ID NO: 1528739 - RNA, 23 nt, Human
agaaaauggaagacagcucuuau

SEQ ID NO: 1528740 - RNA, 15 nt, Human
agaaaauggacgugu

SEQ ID NO: 1528741 - RNA, 20 nt, Human
agaaaauggacguguuauga

SEQ ID NO: 1528742 - RNA, 18 nt, Human
acuuucagugaaagcauc

SEQ ID NO: 1528743 - RNA, 19 nt, Human
acuuuauacccagaaaguu

SEQ ID NO: 1528744 - RNA, 17 nt, Human
acuuucauuuuuuucca

SEQ ID NO: 1528745 - RNA, 20 nt, Human
acuuucauuuuuuuccaggc

SEQ ID NO: 1528746 - RNA, 16 nt, Human
acuuucuagccagagg

SEQ ID NO: 1528747 - RNA, 23 nt, Human
acuuuguucuggcucuuccaggc

SEQ ID NO: 1528748 - RNA, 21 nt, Human
acuuucauuuuuuuccaggcu

SEQ ID NO: 1528749 - RNA, 23 nt, Human
acuuucauuuuuuuccaggcugg

SEQ ID NO: 1528750 - RNA, 23 nt, Human
acuuuccuucauucaacccaccu

SEQ ID NO: 1528751 - RNA, 15 nt, Human
agaaauaaaguuucu

SEQ ID NO: 1528752 - RNA, 18 nt, Human
agaaauaaaguuucuguu

SEQ ID NO: 1528753 - RNA, 20 nt, Human
agaaaggaggggauagagag

SEQ ID NO: 1528754 - RNA, 23 nt, Human
agaaaggaggggauagagagaga

SEQ ID NO: 1528755 - RNA, 15 nt, Human
accccggccaccugc

SEQ ID NO: 1528756 - RNA, 15 nt, Human
accccgagggcugag

SEQ ID NO: 1528757 - RNA, 19 nt, Human
acccaugcugcccugugag

SEQ ID NO: 1528758 - RNA, 17 nt, Human
acccaugcugcccugug

SEQ ID NO: 1528759 - RNA, 18 nt, Human
acccaugcugcccuguga

SEQ ID NO: 1528760 - RNA, 16 nt, Human
acccaaguccaagcau

SEQ ID NO: 1528761 - RNA, 13 nt, Human
acccaagggccug

SEQ ID NO: 1528762 - RNA, 16 nt, Human
acccaagggccuggcc

SEQ ID NO: 1528763 - RNA, 15 nt, Human
acccacaagaaauga

SEQ ID NO: 1528764 - RNA, 14 nt, Human
accaucaugucugg

SEQ ID NO: 1528765 - RNA, 21 nt, Human
accaucccugaaggccccgcc

SEQ ID NO: 1528766 - RNA, 22 nt, Human
accaucccugaaggccccgccc

SEQ ID NO: 1528767 - RNA, 16 nt, Human
accaucaugucuggcu

SEQ ID NO: 1528768 - RNA, 17 nt, Human
accaucaugucuggcua

SEQ ID NO: 1528769 - RNA, 12 nt, Human
accaucauugaa

SEQ ID NO: 1528770 - RNA, 18 nt, Human
accaucccugaaggcccc

SEQ ID NO: 1528771 - RNA, 20 nt, Human
accccucaacaccucugcac

SEQ ID NO: 1528772 - RNA, 23 nt, Human
acauaaacaagaccacguuucua

SEQ ID NO: 1528773 - RNA, 20 nt, Human
acauaaauuuaguauuuugu

SEQ ID NO: 1528774 - RNA, 22 nt, Human
acaucagcacgauuucuguuua

SEQ ID NO: 1528775 - RNA, 21 nt, Human
acaucagcacgauuucuguuu

SEQ ID NO: 1528776 - RNA, 20 nt, Human
acaucagcacgauuucuguu

SEQ ID NO: 1528777 - RNA, 21 nt, Human
acauguuuuucuucucccuca

SEQ ID NO: 1528778 - RNA, 13 nt, Human
acauguuacaaca

SEQ ID NO: 1528779 - RNA, 19 nt, Human
acaugcaaggucauuuuuu

SEQ ID NO: 1528780 - RNA, 20 nt, Human
acaugcacagcuaacaugga

SEQ ID NO: 1528781 - RNA, 23 nt, Human
acaugcacagcuaacauggaagu

SEQ ID NO: 1528782 - RNA, 18 nt, Human
acauuugcucauggaauu

SEQ ID NO: 1528783 - RNA, 14 nt, Human
acauuuguauaaaa

SEQ ID NO: 1528784 - RNA, 21 nt, Human
acauuuguagcauccucuuua

SEQ ID NO: 1528785 - RNA, 14 nt, Human
accacgcuggaccu

SEQ ID NO: 1528786 - RNA, 14 nt, Human
accacuacauucug

SEQ ID NO: 1528787 - RNA, 19 nt, Human
accacguuucuaaaggcua

SEQ ID NO: 1528788 - RNA, 15 nt, Human
accacguuucuaaag

SEQ ID NO: 1528789 - RNA, 15 nt, Human
accacuacauucugu

SEQ ID NO: 1528790 - RNA, 14 nt, Human
accagcagccugga

SEQ ID NO: 1528791 - RNA, 17 nt, Human
accagcagccuggaccc

SEQ ID NO: 1528792 - RNA, 20 nt, Human
acaagucagucauucagaua

SEQ ID NO: 1528793 - RNA, 13 nt, Human
acaacuuuauacc

SEQ ID NO: 1528794 - RNA, 14 nt, Human
acaacuuuauaccc

SEQ ID NO: 1528795 - RNA, 17 nt, Human
acaacuucaauauccaa

SEQ ID NO: 1528796 - RNA, 18 nt, Human
acaacuucccagugaauu

SEQ ID NO: 1528797 - RNA, 16 nt, Human
acaacuauuuuuccaa

SEQ ID NO: 1528798 - RNA, 15 nt, Human
aauuuuauaucuugu

SEQ ID NO: 1528799 - RNA, 15 nt, Human
acaaaauggaauacu

SEQ ID NO: 1528800 - RNA, 19 nt, Human
acaaaauggaauacucuua

SEQ ID NO: 1528801 - RNA, 20 nt, Human
aauuuugaguucuacauaag

SEQ ID NO: 1528802 - RNA, 20 nt, Human
acaaaauggaauacucuuau

SEQ ID NO: 1528803 - RNA, 20 nt, Human
acaaaauguaggguuauaau

SEQ ID NO: 1528804 - RNA, 13 nt, Human
acaacuauauugu

SEQ ID NO: 1528805 - RNA, 13 nt, Human
acaaagacugagu

SEQ ID NO: 1528806 - RNA, 21 nt, Human
acaaaccuguuucugcagcca

SEQ ID NO: 1528807 - RNA, 15 nt, Human
acaaacgggcucagc

SEQ ID NO: 1528808 - RNA, 15 nt, Human
acacggacacucaaa

SEQ ID NO: 1528809 - RNA, 14 nt, Human
acacuaaccacgcu

SEQ ID NO: 1528810 - RNA, 15 nt, Human
acacuaaccacgcug

SEQ ID NO: 1528811 - RNA, 14 nt, Human
acacagcucugucc

SEQ ID NO: 1528812 - RNA, 11 nt, Human
acacagcucug

SEQ ID NO: 1528813 - RNA, 12 nt, Human
acacagcucugu

SEQ ID NO: 1528814 - RNA, 12 nt, Human
acaccagagccc

SEQ ID NO: 1528815 - RNA, 13 nt, Human
acaccagagccca

SEQ ID NO: 1528816 - RNA, 14 nt, Human
acaccacuacauuc

SEQ ID NO: 1528817 - RNA, 15 nt, Human
acaauuuauuauggc

SEQ ID NO: 1528818 - RNA, 16 nt, Human
acaauuuauuauggca

SEQ ID NO: 1528819 - RNA, 18 nt, Human
acacaaacgggcucagca

SEQ ID NO: 1528820 - RNA, 16 nt, Human
acagaagaaggcagca

SEQ ID NO: 1528821 - RNA, 12 nt, Human
acagaacacugu

SEQ ID NO: 1528822 - RNA, 14 nt, Human
acagaacacugucu

SEQ ID NO: 1528823 - RNA, 20 nt, Human
acagaagaaggcagcaggug

SEQ ID NO: 1528824 - RNA, 17 nt, Human
acacugugcugagucug

SEQ ID NO: 1528825 - RNA, 13 nt, Human
acacugucuugaa

SEQ ID NO: 1528826 - RNA, 19 nt, Human
acacugagaauguaagaac

SEQ ID NO: 1528827 - RNA, 20 nt, Human
acacugagaauguaagaacu

SEQ ID NO: 1528828 - RNA, 22 nt, Human
acacugagaauguaagaacuac

SEQ ID NO: 1528829 - RNA, 22 nt, Human
acagaggggguggccucccaac

SEQ ID NO: 1528830 - RNA, 12 nt, Human
acagagucucac

SEQ ID NO: 1528831 - RNA, 14 nt, Human
acagagucucacug

SEQ ID NO: 1528832 - RNA, 16 nt, Human
acagaauauguuucaa

SEQ ID NO: 1528833 - RNA, 17 nt, Human
acagaauauguuucaaa

SEQ ID NO: 1528834 - RNA, 19 nt, Human
acagaauauguuucaaacu

SEQ ID NO: 1528835 - RNA, 21 nt, Human
acagaauauguuucaaacuuu

SEQ ID NO: 1528836 - RNA, 15 nt, Human
acagcaguugaaaag

SEQ ID NO: 1528837 - RNA, 18 nt, Human
acagcaguugaaaagacu

SEQ ID NO: 1528838 - RNA, 17 nt, Human
acagagucucacuguug

SEQ ID NO: 1528839 - RNA, 19 nt, Human
acagagucucacuguugcc

SEQ ID NO: 1528840 - RNA, 23 nt, Human
acagagucucacuguugcccagg

SEQ ID NO: 1528841 - RNA, 16 nt, Human
acagccagacuggcac

SEQ ID NO: 1528842 - RNA, 13 nt, Human
acagccagacugg

SEQ ID NO: 1528843 - RNA, 15 nt, Human
acagccagacuggca

SEQ ID NO: 1528844 - RNA, 15 nt, Human
acagccaugauucuu

SEQ ID NO: 1528845 - RNA, 16 nt, Human
acagcccaaagaagga

SEQ ID NO: 1528846 - RNA, 17 nt, Human
acagcccaaagaaggaa

SEQ ID NO: 1528847 - RNA, 18 nt, Human
acagcccaaagaaggaaa

SEQ ID NO: 1528848 - RNA, 19 nt, Human
acaggucauauuaauauau

SEQ ID NO: 1528849 - RNA, 20 nt, Human
acaggugugaaccaccacac

SEQ ID NO: 1528850 - RNA, 23 nt, Human
acaggugugaaccaccacaccca

SEQ ID NO: 1528851 - RNA, 19 nt, Human
acaggcaagcaccuccugc

SEQ ID NO: 1528852 - RNA, 18 nt, Human
acaggcaagcaccuccug

SEQ ID NO: 1528853 - RNA, 16 nt, Human
acaggcaagcaccucc

SEQ ID NO: 1528854 - RNA, 23 nt, Human
acagcugccugggaucccucauc

SEQ ID NO: 1528855 - RNA, 13 nt, Human
acagcucuguccu

SEQ ID NO: 1528856 - RNA, 14 nt, Human
acagcugccuggga

SEQ ID NO: 1528857 - RNA, 20 nt, Human
acagcucugcauacucauua

SEQ ID NO: 1528858 - RNA, 15 nt, Human
acagcuccuucuguc

SEQ ID NO: 1528859 - RNA, 12 nt, Human
acagcuccuucu

SEQ ID NO: 1528860 - RNA, 13 nt, Human
acagcuccuucug

SEQ ID NO: 1528861 - RNA, 14 nt, Human
acagcuccuucugu

SEQ ID NO: 1528862 - RNA, 14 nt, Human
aaaacaaggaugaa

SEQ ID NO: 1528863 - RNA, 12 nt, Human
aaaacaacuuua

SEQ ID NO: 1528864 - RNA, 13 nt, Human
aaaaauuuuuguu

SEQ ID NO: 1528865 - RNA, 14 nt, Human
aaaaauuuuuguuu

SEQ ID NO: 1528866 - RNA, 17 nt, Human
aaaacaaggaugaauua

SEQ ID NO: 1528867 - RNA, 12 nt, Human
aaaacacauuuu

SEQ ID NO: 1528868 - RNA, 18 nt, Human
aaaacacagcaaggguga

SEQ ID NO: 1528869 - RNA, 12 nt, Human
aaaacacagcaa

SEQ ID NO: 1528870 - RNA, 13 nt, Human
aaaacacagcaag

SEQ ID NO: 1528871 - RNA, 15 nt, Human
aaaaacugauuuuuu

SEQ ID NO: 1528872 - RNA, 14 nt, Human
aaaaacauggccuu

SEQ ID NO: 1528873 - RNA, 13 nt, Human
aaaaacugauuuu

SEQ ID NO: 1528874 - RNA, 12 nt, Human
aaaaagaggcua

SEQ ID NO: 1528875 - RNA, 12 nt, Human
aaaaacaacuuu

SEQ ID NO: 1528876 - RNA, 12 nt, Human
aaaaacacagca

SEQ ID NO: 1528877 - RNA, 14 nt, Human
aaaaacacaaaagu

SEQ ID NO: 1528878 - RNA, 17 nt, Human
uuuucaaaauaaaaaug

SEQ ID NO: 1528879 - RNA, 18 nt, Human
uuuuauuuuuagacagag

SEQ ID NO: 1528880 - RNA, 13 nt, Human
uuuuauauuugaa

SEQ ID NO: 1528881 - RNA, 18 nt, Human
uuuuauauuugaaauauu

SEQ ID NO: 1528882 - RNA, 21 nt, Human
uuuuauacauaaacaagacca

SEQ ID NO: 1528883 - RNA, 13 nt, Human
uuuuauacauaaa

SEQ ID NO: 1528884 - RNA, 21 nt, Human
uuuuaaaguaacccuacaaaa

SEQ ID NO: 1528885 - RNA, 23 nt, Human
uuuuauaauuuugugaagcaaaa

SEQ ID NO: 1528886 - RNA, 21 nt, Human
uuuuauaauuuugugaagcaa

SEQ ID NO: 1528887 - RNA, 15 nt, Human
uuuuacuaauagaca

SEQ ID NO: 1528888 - RNA, 16 nt, Human
uuuucacauuggaaac

SEQ ID NO: 1528889 - RNA, 18 nt, Human
uuuucccuauuagagaag

SEQ ID NO: 1528890 - RNA, 22 nt, Human
uuuucccuauuagagaagagau

SEQ ID NO: 1528891 - RNA, 23 nt, Human
uuuucagaaaauauuauguguuu

SEQ ID NO: 1528892 - RNA, 16 nt, Human
uuuucuuucagccaag

SEQ ID NO: 1528893 - RNA, 14 nt, Human
uuuucuucucccuc

SEQ ID NO: 1528894 - RNA, 22 nt, Human
uuuucuuguguguuuauuguca

SEQ ID NO: 1528895 - RNA, 13 nt, Human
uuuucuucucccu

SEQ ID NO: 1528896 - RNA, 23 nt, Human
uuuucuacucgaguuacagacaa

SEQ ID NO: 1528897 - RNA, 13 nt, Human
uuuucuuauuuca

SEQ ID NO: 1528898 - RNA, 20 nt, Human
uuuucuacucgaguuacaga

SEQ ID NO: 1528899 - RNA, 22 nt, Human
uuuucuacucgaguuacagaca

SEQ ID NO: 1528900 - RNA, 13 nt, Human
uuuucuacucgag

SEQ ID NO: 1528901 - RNA, 13 nt, Human
uuuggacccugag

SEQ ID NO: 1528902 - RNA, 15 nt, Human
uuuccacagaagcuc

SEQ ID NO: 1528903 - RNA, 17 nt, Human
uuuccguuaaaauacca

SEQ ID NO: 1528904 - RNA, 15 nt, Human
uuuccguuaaaauac

SEQ ID NO: 1528905 - RNA, 21 nt, Human
uuugagugccuuacacaaugg

SEQ ID NO: 1528906 - RNA, 12 nt, Human
uuugaguucuac

SEQ ID NO: 1528907 - RNA, 16 nt, Human
uuuguugucagcugaa

SEQ ID NO: 1528908 - RNA, 15 nt, Human
uuuguugucagcuga

SEQ ID NO: 1528909 - RNA, 22 nt, Human
uuuguuaguaugaggcauuugu

SEQ ID NO: 1528910 - RNA, 18 nt, Human
uuuguauaaaauaauuuu

SEQ ID NO: 1528911 - RNA, 19 nt, Human
uuuguauaaaauaauuuuu

SEQ ID NO: 1528912 - RNA, 17 nt, Human
uuuguauaaaauaauuu

SEQ ID NO: 1528913 - RNA, 17 nt, Human
uuuggucuacacugugc

SEQ ID NO: 1528914 - RNA, 12 nt, Human
uuuuuccaggcu

SEQ ID NO: 1528915 - RNA, 23 nt, Human
uuuugacagaauauguuucaaac

SEQ ID NO: 1528916 - RNA, 22 nt, Human
uuuugacagaauauguuucaaa

SEQ ID NO: 1528917 - RNA, 23 nt, Human
uuuuuaagugcugcauuuaaaag

SEQ ID NO: 1528918 - RNA, 22 nt, Human
uuuuuaagugcugcauuuaaaa

SEQ ID NO: 1528919 - RNA, 19 nt, Human
uuuuuaagugcugcauuua

SEQ ID NO: 1528920 - RNA, 18 nt, Human
uuuuuaagugcugcauuu

SEQ ID NO: 1528921 - RNA, 17 nt, Human
uuuuuaagugcugcauu

SEQ ID NO: 1528922 - RNA, 16 nt, Human
uuuuuaagugcugcau

SEQ ID NO: 1528923 - RNA, 23 nt, Human
uuuuuaagaaaaaggaugcacag

SEQ ID NO: 1528924 - RNA, 22 nt, Human
uuuuuaacucaauauuuuccau

SEQ ID NO: 1528925 - RNA, 12 nt, Human
uuuuuaagaaaa

SEQ ID NO: 1528926 - RNA, 12 nt, Human
uuuuuuacuaau

SEQ ID NO: 1528927 - RNA, 12 nt, Human
uuuuuuuuaaga

SEQ ID NO: 1528928 - RNA, 17 nt, Human
uuuuuuccuucagugcc

SEQ ID NO: 1528929 - RNA, 11 nt, Human
uuuuuuuacua

SEQ ID NO: 1528930 - RNA, 13 nt, Human
uuuuuuuugacaa

SEQ ID NO: 1528931 - RNA, 20 nt, Human
uuccugaggcugggcucccu

SEQ ID NO: 1528932 - RNA, 15 nt, Human
uuccugaggcugggc

SEQ ID NO: 1528933 - RNA, 16 nt, Human
uuccauggccucuuca

SEQ ID NO: 1528934 - RNA, 12 nt, Human
uuccauggccuc

SEQ ID NO: 1528935 - RNA, 18 nt, Human
uucggugagcuacaaaug

SEQ ID NO: 1528936 - RNA, 17 nt, Human
uuccuuggacucauuuu

SEQ ID NO: 1528937 - RNA, 21 nt, Human
uuccuugaguugauucagcuc

SEQ ID NO: 1528938 - RNA, 22 nt, Human
uucuacucgaguuacagacaaa

SEQ ID NO: 1528939 - RNA, 14 nt, Human
uucuacccaggugc

SEQ ID NO: 1528940 - RNA, 20 nt, Human
uucuacccagcgagcccugg

SEQ ID NO: 1528941 - RNA, 21 nt, Human
uucuacccagcgagcccuggu

SEQ ID NO: 1528942 - RNA, 13 nt, Human
uucuacgccaggg

SEQ ID NO: 1528943 - RNA, 22 nt, Human
uucuacauaaguaauucaagaa

SEQ ID NO: 1528944 - RNA, 12 nt, Human
uucuacccagcg

SEQ ID NO: 1528945 - RNA, 19 nt, Human
uucuacccagcgagcccug

SEQ ID NO: 1528946 - RNA, 15 nt, Human
uucuacauacuaugg

SEQ ID NO: 1528947 - RNA, 13 nt, Human
uucucuccagccc

SEQ ID NO: 1528948 - RNA, 14 nt, Human
uucucuccagcccc

SEQ ID NO: 1528949 - RNA, 18 nt, Human
uucucuccuguaccucuu

SEQ ID NO: 1528950 - RNA, 14 nt, Human
uucucuccuguacc

SEQ ID NO: 1528951 - RNA, 15 nt, Human
uucucuccagccccu

SEQ ID NO: 1528952 - RNA, 16 nt, Human
uucucuccagccccug

SEQ ID NO: 1528953 - RNA, 19 nt, Human
uucucuccuguaccucuug

SEQ ID NO: 1528954 - RNA, 22 nt, Human
uucucuccuguaccucuugagc

SEQ ID NO: 1528955 - RNA, 14 nt, Human
uucucugaggacac

SEQ ID NO: 1528956 - RNA, 20 nt, Human
uucucugaggacacuaacca

SEQ ID NO: 1528957 - RNA, 11 nt, Human
uucucugcccu

SEQ ID NO: 1528958 - RNA, 12 nt, Human
uucucugcccuc

SEQ ID NO: 1528959 - RNA, 14 nt, Human
uucuaugaaauauu

SEQ ID NO: 1528960 - RNA, 21 nt, Human
uucuaugaaauauuauguuaa

SEQ ID NO: 1528961 - RNA, 19 nt, Human
uucucauuucaccccuccc

SEQ ID NO: 1528962 - RNA, 15 nt, Human
uucucauuucacccc

SEQ ID NO: 1528963 - RNA, 16 nt, Human
uucucauuucaccccu

SEQ ID NO: 1528964 - RNA, 20 nt, Human
uucuccaccugccagggaca

SEQ ID NO: 1528965 - RNA, 16 nt, Human
uucuccaccugccagg

SEQ ID NO: 1528966 - RNA, 18 nt, Human
uucuccaccugccaggga

SEQ ID NO: 1528967 - RNA, 21 nt, Human
uucuccaccucccacaaagga

SEQ ID NO: 1528968 - RNA, 12 nt, Human
uucuccaccugc

SEQ ID NO: 1528969 - RNA, 14 nt, Human
uucuccaccugcca

SEQ ID NO: 1528970 - RNA, 15 nt, Human
uucuccaccugccag

SEQ ID NO: 1528971 - RNA, 19 nt, Human
uucugcucacauaucuguc

SEQ ID NO: 1528972 - RNA, 19 nt, Human
uucugauccuaguuccacc

SEQ ID NO: 1528973 - RNA, 16 nt, Human
uucucugcccuccaag

SEQ ID NO: 1528974 - RNA, 17 nt, Human
uucucugcccuccaaga

SEQ ID NO: 1528975 - RNA, 23 nt, Human
uucugacccaugcugcccuguga

SEQ ID NO: 1528976 - RNA, 22 nt, Human
uucugacccaugcugcccugug

SEQ ID NO: 1528977 - RNA, 18 nt, Human
uucugacccugcuucaaa

SEQ ID NO: 1528978 - RNA, 21 nt, Human
uucugacccugcuucaaauau

SEQ ID NO: 1528979 - RNA, 16 nt, Human
uucugagaaagacuau

SEQ ID NO: 1528980 - RNA, 21 nt, Human
uucugagaaagacuauucaaa

SEQ ID NO: 1528981 - RNA, 16 nt, Human
uugaaaagacuccaaa

SEQ ID NO: 1528982 - RNA, 15 nt, Human
uugaacuccuggccu

SEQ ID NO: 1528983 - RNA, 16 nt, Human
uugaacuccuggccuc

SEQ ID NO: 1528984 - RNA, 23 nt, Human
uugaaaacacuguucucugcccu

SEQ ID NO: 1528985 - RNA, 18 nt, Human
uucuuuccacagaagcuc

SEQ ID NO: 1528986 - RNA, 21 nt, Human
uucuuuccaaaguacacuguu

SEQ ID NO: 1528987 - RNA, 20 nt, Human
uugaaaaaccauuuugcugu

SEQ ID NO: 1528988 - RNA, 14 nt, Human
uucuuuccaaagua

SEQ ID NO: 1528989 - RNA, 12 nt, Human
uucuuucagcca

SEQ ID NO: 1528990 - RNA, 23 nt, Human
uucuuccucccucccucuuuccc

SEQ ID NO: 1528991 - RNA, 13 nt, Human
uucuuccucccuc

SEQ ID NO: 1528992 - RNA, 21 nt, Human
uucuuguguguuuauugucaa

SEQ ID NO: 1528993 - RNA, 21 nt, Human
uucuuauacauuugauaaagu

SEQ ID NO: 1528994 - RNA, 17 nt, Human
uucuuccaaaaagauuu

SEQ ID NO: 1528995 - RNA, 21 nt, Human
uucuuccacaagagcccaggc

SEQ ID NO: 1528996 - RNA, 18 nt, Human
uucuguauuuuguuuuug

SEQ ID NO: 1528997 - RNA, 17 nt, Human
uucugucuucacaacag

SEQ ID NO: 1528998 - RNA, 14 nt, Human
uucugcuucagccu

SEQ ID NO: 1528999 - RNA, 18 nt, Human
uucugcuuguguuaagua

SEQ ID NO: 1529000 - RNA, 19 nt, Human
uucugcuucagccucccga

SEQ ID NO: 1529001 - RNA, 15 nt, Human
uucugcuucagccuc

SEQ ID NO: 1529002 - RNA, 16 nt, Human
uucugcuucagccucc

SEQ ID NO: 1529003 - RNA, 12 nt, Human
uugaauuuuaca

SEQ ID NO: 1529004 - RNA, 13 nt, Human
uugaacuuugacc

SEQ ID NO: 1529005 - RNA, 18 nt, Human
uugaacuggguacuugug

SEQ ID NO: 1529006 - RNA, 15 nt, Human
uugaccucugcagca

SEQ ID NO: 1529007 - RNA, 14 nt, Human
uugaccucugcagc

SEQ ID NO: 1529008 - RNA, 17 nt, Human
uugacccacaagaaaug

SEQ ID NO: 1529009 - RNA, 17 nt, Human
uugaccgugaggccaga

SEQ ID NO: 1529010 - RNA, 16 nt, Human
uugaccucugcagcaa

SEQ ID NO: 1529011 - RNA, 17 nt, Human
uugacgccaucccagcc

SEQ ID NO: 1529012 - RNA, 18 nt, Human
uugacgccaucccagccc

SEQ ID NO: 1529013 - RNA, 19 nt, Human
uugacgccaucccagcccc

SEQ ID NO: 1529014 - RNA, 20 nt, Human
uugacgccaucccagcccca

SEQ ID NO: 1529015 - RNA, 14 nt, Human
uugaugaagaaguu

SEQ ID NO: 1529016 - RNA, 23 nt, Human
uugaugaagaaguugauaugccu

SEQ ID NO: 1529017 - RNA, 15 nt, Human
uugaggucuguucuu

SEQ ID NO: 1529018 - RNA, 23 nt, Human
uugauauccucuuugagugaagc

SEQ ID NO: 1529019 - RNA, 16 nt, Human
uugaggguugggcugg

SEQ ID NO: 1529020 - RNA, 14 nt, Human
uugagccugggagg

SEQ ID NO: 1529021 - RNA, 13 nt, Human
uugaggguugggc

SEQ ID NO: 1529022 - RNA, 11 nt, Human
uugagccuggg

SEQ ID NO: 1529023 - RNA, 21 nt, Human
uugcaaaguaucccuacugua

SEQ ID NO: 1529024 - RNA, 16 nt, Human
uugaugaucuuugcag

SEQ ID NO: 1529025 - RNA, 22 nt, Human
uuauaucuuguagcuuuaucaa

SEQ ID NO: 1529026 - RNA, 15 nt, Human
uuauaucuuguagcu

SEQ ID NO: 1529027 - RNA, 21 nt, Human
uuauaucgaaauaguuacagg

SEQ ID NO: 1529028 - RNA, 16 nt, Human
uuauaauuuugugaag

SEQ ID NO: 1529029 - RNA, 17 nt, Human
uuauaauuuugugaagc

SEQ ID NO: 1529030 - RNA, 18 nt, Human
uuauaauuuugugaagca

SEQ ID NO: 1529031 - RNA, 14 nt, Human
uuauacaggucaua

SEQ ID NO: 1529032 - RNA, 19 nt, Human
uuauaucuauauuuuacau

SEQ ID NO: 1529033 - RNA, 23 nt, Human
uuauaucuauauuuuacauaaau

SEQ ID NO: 1529034 - RNA, 11 nt, Human
uuauacauaaa

SEQ ID NO: 1529035 - RNA, 22 nt, Human
uuauacaggucauauuaauaua

SEQ ID NO: 1529036 - RNA, 13 nt, Human
uuauacauaaaca

SEQ ID NO: 1529037 - RNA, 12 nt, Human
uuauaauuuaaa

SEQ ID NO: 1529038 - RNA, 14 nt, Human
uuauaauuuuguga

SEQ ID NO: 1529039 - RNA, 15 nt, Human
uuauaauuuugugaa

SEQ ID NO: 1529040 - RNA, 11 nt, Human
uuauaaucuuu

SEQ ID NO: 1529041 - RNA, 15 nt, Human
uuauaaugaaugaaa

SEQ ID NO: 1529042 - RNA, 18 nt, Human
uuauaauaauguuaacau

SEQ ID NO: 1529043 - RNA, 15 nt, Human
uuauaauaauguuaa

SEQ ID NO: 1529044 - RNA, 21 nt, Human
ugugaaaagaaaaaugagccu

SEQ ID NO: 1529045 - RNA, 17 nt, Human
ugugaaaagaaaaauga

SEQ ID NO: 1529046 - RNA, 13 nt, Human
ugugaaaagaaaa

SEQ ID NO: 1529047 - RNA, 15 nt, Human
ugugaaaagaaaaau

SEQ ID NO: 1529048 - RNA, 23 nt, Human
uuauguuguuguuguuuuuggau

SEQ ID NO: 1529049 - RNA, 17 nt, Human
uuauggcuuuugugcau

SEQ ID NO: 1529050 - RNA, 18 nt, Human
uuauggcuuuugugcauu

SEQ ID NO: 1529051 - RNA, 16 nt, Human
uuauggcuuuugugca

SEQ ID NO: 1529052 - RNA, 14 nt, Human
uuauggcacaucag

SEQ ID NO: 1529053 - RNA, 17 nt, Human
uuauggaacacucugag

SEQ ID NO: 1529054 - RNA, 21 nt, Human
uuauggacaaugacccagugg

SEQ ID NO: 1529055 - RNA, 18 nt, Human
uuauggaacacucugaga

SEQ ID NO: 1529056 - RNA, 20 nt, Human
uuauggaacacucugagacu

SEQ ID NO: 1529057 - RNA, 23 nt, Human
uuauuaaaaaucucaaauuucua

SEQ ID NO: 1529058 - RNA, 19 nt, Human
uuauuaaaugcccagcccc

SEQ ID NO: 1529059 - RNA, 21 nt, Human
uuauuaaaugcccagccccuu

SEQ ID NO: 1529060 - RNA, 19 nt, Human
uuauuagaaaaauauuaua

SEQ ID NO: 1529061 - RNA, 16 nt, Human
uuauauuuacaaaugg

SEQ ID NO: 1529062 - RNA, 20 nt, Human
uuauauuuauuacuguaaga

SEQ ID NO: 1529063 - RNA, 12 nt, Human
uuauauuugaaa

SEQ ID NO: 1529064 - RNA, 13 nt, Human
uuauauuugaaau

SEQ ID NO: 1529065 - RNA, 15 nt, Human
uuauauuugaaauau

SEQ ID NO: 1529066 - RNA, 11 nt, Human
uuaucucaaaa

SEQ ID NO: 1529067 - RNA, 14 nt, Human
uuaucuagauacug

SEQ ID NO: 1529068 - RNA, 18 nt, Human
uucaaauguauuacagug

SEQ ID NO: 1529069 - RNA, 16 nt, Human
uucaauaauaaauauu

SEQ ID NO: 1529070 - RNA, 14 nt, Human
uuauuuuguucaua

SEQ ID NO: 1529071 - RNA, 16 nt, Human
uuauuuuguucauaca

SEQ ID NO: 1529072 - RNA, 18 nt, Human
uucaaaugcuguaacuuu

SEQ ID NO: 1529073 - RNA, 22 nt, Human
uuauuuuggaaaauaaauuauu

SEQ ID NO: 1529074 - RNA, 19 nt, Human
uuauuuuaauaauguuuca

SEQ ID NO: 1529075 - RNA, 20 nt, Human
uuauuuuaauaauguuucaa

SEQ ID NO: 1529076 - RNA, 17 nt, Human
uuauuuuaauucaguug

SEQ ID NO: 1529077 - RNA, 18 nt, Human
uuauuuuauuaugcauga

SEQ ID NO: 1529078 - RNA, 19 nt, Human
uuauuucuuaaacaaaugu

SEQ ID NO: 1529079 - RNA, 21 nt, Human
uucaauaggaaaaacugauuu

SEQ ID NO: 1529080 - RNA, 22 nt, Human
uucaauaggaaaaacugauuuu

SEQ ID NO: 1529081 - RNA, 14 nt, Human
uucaccuuuguccc

SEQ ID NO: 1529082 - RNA, 19 nt, Human
uucaccuuuguccccaccg

SEQ ID NO: 1529083 - RNA, 20 nt, Human
uucaccuuuguccccaccgc

SEQ ID NO: 1529084 - RNA, 16 nt, Human
uucaccccucccuuuc

SEQ ID NO: 1529085 - RNA, 22 nt, Human
uucacaagacccaaaaggcaga

SEQ ID NO: 1529086 - RNA, 13 nt, Human
uucacccuuuucu

SEQ ID NO: 1529087 - RNA, 17 nt, Human
uucaccccucccuuucu

SEQ ID NO: 1529088 - RNA, 18 nt, Human
uucaccccucccuuucuc

SEQ ID NO: 1529089 - RNA, 20 nt, Human
uucaccccucccuuucuccc

SEQ ID NO: 1529090 - RNA, 22 nt, Human
uucaccccucccuuucuccccu

SEQ ID NO: 1529091 - RNA, 13 nt, Human
uucacggaagagc

SEQ ID NO: 1529092 - RNA, 22 nt, Human
uucaccuuuguccccaccgcag

SEQ ID NO: 1529093 - RNA, 17 nt, Human
uucacggaagagccuug

SEQ ID NO: 1529094 - RNA, 15 nt, Human
uucagacagcugccu

SEQ ID NO: 1529095 - RNA, 16 nt, Human
uucagacagcugccug

SEQ ID NO: 1529096 - RNA, 17 nt, Human
uucagacagcugccugg

SEQ ID NO: 1529097 - RNA, 21 nt, Human
uucaucugcucuccuuccugg

SEQ ID NO: 1529098 - RNA, 20 nt, Human
uucaugcuguucaugaaaga

SEQ ID NO: 1529099 - RNA, 14 nt, Human
uucauuuuuuucca

SEQ ID NO: 1529100 - RNA, 17 nt, Human
uucauuuuuuuccaggc

SEQ ID NO: 1529101 - RNA, 16 nt, Human
uuccaaaguacacugu

SEQ ID NO: 1529102 - RNA, 13 nt, Human
uuccaaaguacac

SEQ ID NO: 1529103 - RNA, 18 nt, Human
uucauuuuuuuccaggcu

SEQ ID NO: 1529104 - RNA, 21 nt, Human
uuccaaaaagauuuucagaaa

SEQ ID NO: 1529105 - RNA, 18 nt, Human
uuccagauccuggaaauc

SEQ ID NO: 1529106 - RNA, 19 nt, Human
uuccaacccucaucaccaa

SEQ ID NO: 1529107 - RNA, 19 nt, Human
uuccagauccuggaaauca

SEQ ID NO: 1529108 - RNA, 14 nt, Human
uuccauggacuuug

SEQ ID NO: 1529109 - RNA, 15 nt, Human
uuccauggacuuugu

SEQ ID NO: 1529110 - RNA, 23 nt, Human
uucaguuauuauauuuacaaaug

SEQ ID NO: 1529111 - RNA, 13 nt, Human
uucaucugcucuc

SEQ ID NO: 1529112 - RNA, 15 nt, Human
uucaucugcucuccu

SEQ ID NO: 1529113 - RNA, 16 nt, Human
uucaucugcucuccuu

SEQ ID NO: 1529114 - RNA, 19 nt, Human
uucaucugcucuccuuccu

SEQ ID NO: 1529115 - RNA, 15 nt, Human
uucauaaccuagccu

SEQ ID NO: 1529116 - RNA, 15 nt, Human
uucauccuccucaga

SEQ ID NO: 1529117 - RNA, 19 nt, Human
uucauccuccucagaucuu

SEQ ID NO: 1529118 - RNA, 22 nt, Human
uucagcuuguaaauagcucagg

SEQ ID NO: 1529119 - RNA, 14 nt, Human
uucaguggcagcug

SEQ ID NO: 1529120 - RNA, 22 nt, Human
uucagcuccagcucaccagccc

SEQ ID NO: 1529121 - RNA, 12 nt, Human
uucagcuccagc

SEQ ID NO: 1529122 - RNA, 15 nt, Human
uucagcuccagcuca

SEQ ID NO: 1529123 - RNA, 13 nt, Human
uucaguguacaug

SEQ ID NO: 1529124 - RNA, 12 nt, Human
uucaguguacau

SEQ ID NO: 1529125 - RNA, 17 nt, Human
uucaguggcagcugcuu

SEQ ID NO: 1529126 - RNA, 15 nt, Human
uucaguggcagcugc

SEQ ID NO: 1529127 - RNA, 16 nt, Human
uucaguggcagcugcu

SEQ ID NO: 1529128 - RNA, 22 nt, Human
uuuauaauuuugugaagcaaaa

SEQ ID NO: 1529129 - RNA, 13 nt, Human
uuuauuauggcac

SEQ ID NO: 1529130 - RNA, 13 nt, Human
uuuauuaugcaug

SEQ ID NO: 1529131 - RNA, 20 nt, Human
uuuauggcuuuugugcauua

SEQ ID NO: 1529132 - RNA, 16 nt, Human
uuuauggcuuuugugc

SEQ ID NO: 1529133 - RNA, 14 nt, Human
uuuauggcuuuugu

SEQ ID NO: 1529134 - RNA, 19 nt, Human
uuuauuuaguuccuugagu

SEQ ID NO: 1529135 - RNA, 13 nt, Human
uuuccaagagcug

SEQ ID NO: 1529136 - RNA, 14 nt, Human
uuuccaagagcuga

SEQ ID NO: 1529137 - RNA, 16 nt, Human
uuuccaagagcugagg

SEQ ID NO: 1529138 - RNA, 14 nt, Human
uuucauuuagguga

SEQ ID NO: 1529139 - RNA, 18 nt, Human
uuucauuuaggugaggaa

SEQ ID NO: 1529140 - RNA, 13 nt, Human
uuucaguguacau

SEQ ID NO: 1529141 - RNA, 14 nt, Human
uuucaguguacaug

SEQ ID NO: 1529142 - RNA, 12 nt, Human
uuucaauaggaa

SEQ ID NO: 1529143 - RNA, 14 nt, Human
uuucaauaggaaaa

SEQ ID NO: 1529144 - RNA, 17 nt, Human
uuucaauaggaaaaacu

SEQ ID NO: 1529145 - RNA, 19 nt, Human
uuucaauaggaaaaacuga

SEQ ID NO: 1529146 - RNA, 19 nt, Human
uuucaauuuccaagagcug

SEQ ID NO: 1529147 - RNA, 13 nt, Human
uuuaccacuugug

SEQ ID NO: 1529148 - RNA, 14 nt, Human
uuuaauaauguuuc

SEQ ID NO: 1529149 - RNA, 21 nt, Human
uuuaauagguuuggacaaaau

SEQ ID NO: 1529150 - RNA, 21 nt, Human
uuuacaccaguuccuuucaau

SEQ ID NO: 1529151 - RNA, 12 nt, Human
uuuagacagagu

SEQ ID NO: 1529152 - RNA, 14 nt, Human
uuuagaaauauaau

SEQ ID NO: 1529153 - RNA, 19 nt, Human
uuuacuucuuauacauuug

SEQ ID NO: 1529154 - RNA, 22 nt, Human
uuuacuucuuauacauuugaua

SEQ ID NO: 1529155 - RNA, 19 nt, Human
uuuaacucuauaauguguu

SEQ ID NO: 1529156 - RNA, 24 nt, Human
uuuaacucaauauuuuccaugaaa

SEQ ID NO: 1529157 - RNA, 18 nt, Human
uuuaacagaaauguacag

SEQ ID NO: 1529158 - RNA, 13 nt, Human
uuuaauaauguuu

SEQ ID NO: 1529159 - RNA, 18 nt, Human
uuuaagaaaaaggaugca

SEQ ID NO: 1529160 - RNA, 22 nt, Human
uuuaagaaaaaggaugcacaga

SEQ ID NO: 1529161 - RNA, 20 nt, Human
uuguguugaagagguuuuaa

SEQ ID NO: 1529162 - RNA, 13 nt, Human
uuguguugugaau

SEQ ID NO: 1529163 - RNA, 21 nt, Human
uuguguuuauauauaagccaa

SEQ ID NO: 1529164 - RNA, 23 nt, Human
uuguggauuuaacagaaauguac

SEQ ID NO: 1529165 - RNA, 22 nt, Human
uuguggauuuaacagaaaugua

SEQ ID NO: 1529166 - RNA, 17 nt, Human
uuguggacacagcucuu

SEQ ID NO: 1529167 - RNA, 16 nt, Human
uuguggacacagcucu

SEQ ID NO: 1529168 - RNA, 22 nt, Human
uuguggaggagcucaggacacu

SEQ ID NO: 1529169 - RNA, 21 nt, Human
uuguggauuuaacagaaaugu

SEQ ID NO: 1529170 - RNA, 20 nt, Human
uuguggauuuaacagaaaug

SEQ ID NO: 1529171 - RNA, 12 nt, Human
uugugcauuugg

SEQ ID NO: 1529172 - RNA, 23 nt, Human
uugugcauuaucuagauacugua

SEQ ID NO: 1529173 - RNA, 22 nt, Human
uugugcauuaucuagauacugu

SEQ ID NO: 1529174 - RNA, 17 nt, Human
uugugcauuaucuagau

SEQ ID NO: 1529175 - RNA, 12 nt, Human
uugugccccugc

SEQ ID NO: 1529176 - RNA, 18 nt, Human
uuguguuuugcaagccag

SEQ ID NO: 1529177 - RNA, 19 nt, Human
uuguuaaugguuugaauau

SEQ ID NO: 1529178 - RNA, 14 nt, Human
uuguuacauuuuua

SEQ ID NO: 1529179 - RNA, 21 nt, Human
uuguuaguaugaggcauuugu

SEQ ID NO: 1529180 - RNA, 19 nt, Human
uuguuaguaugaggcauuu

SEQ ID NO: 1529181 - RNA, 14 nt, Human
uuguuuaaaaucau

SEQ ID NO: 1529182 - RNA, 17 nt, Human
uuguuuaaaaucauuuc

SEQ ID NO: 1529183 - RNA, 22 nt, Human
uuguuaguaugaggcauuuguu

SEQ ID NO: 1529184 - RNA, 20 nt, Human
uuguuagugugucuuagugu

SEQ ID NO: 1529185 - RNA, 14 nt, Human
uuguauuacaaauc

SEQ ID NO: 1529186 - RNA, 16 nt, Human
uuguauucucuccugu

SEQ ID NO: 1529187 - RNA, 15 nt, Human
uuguauucucuccug

SEQ ID NO: 1529188 - RNA, 19 nt, Human
uuguauucucuccuguacc

SEQ ID NO: 1529189 - RNA, 21 nt, Human
uuguacgaagaguauuuuuga

SEQ ID NO: 1529190 - RNA, 23 nt, Human
uuguacgaagaguauuuuugaca

SEQ ID NO: 1529191 - RNA, 12 nt, Human
uugugauuuuug

SEQ ID NO: 1529192 - RNA, 17 nt, Human
uugugauuuuuguaauu

SEQ ID NO: 1529193 - RNA, 16 nt, Human
uugugauuuuuguaau

SEQ ID NO: 1529194 - RNA, 20 nt, Human
uugugaaaggaaagaggcuc

SEQ ID NO: 1529195 - RNA, 22 nt, Human
uugucuuaaaaaguggaaaaau

SEQ ID NO: 1529196 - RNA, 15 nt, Human
uugucuagugaaacu

SEQ ID NO: 1529197 - RNA, 15 nt, Human
uugucuuaaaaagug

SEQ ID NO: 1529198 - RNA, 18 nt, Human
uuguacauaaugcgugca

SEQ ID NO: 1529199 - RNA, 23 nt, Human
uuguaaauuaacuuuuauaaacu

SEQ ID NO: 1529200 - RNA, 18 nt, Human
uuguaaauuaacuuuuau

SEQ ID NO: 1529201 - RNA, 16 nt, Human
uuguaaauuaacuuuu

SEQ ID NO: 1529202 - RNA, 15 nt, Human
uuguaaauuaacuuu

SEQ ID NO: 1529203 - RNA, 17 nt, Human
uuguaaauaguauuuga

SEQ ID NO: 1529204 - RNA, 17 nt, Human
uuguaaauagcucaggu

SEQ ID NO: 1529205 - RNA, 16 nt, Human
uuggucugugagaugc

SEQ ID NO: 1529206 - RNA, 13 nt, Human
uuggucuguguga

SEQ ID NO: 1529207 - RNA, 16 nt, Human
uuggucccccuuccau

SEQ ID NO: 1529208 - RNA, 22 nt, Human
uuggguucaagcgauucuucug

SEQ ID NO: 1529209 - RNA, 14 nt, Human
uguacagacaacaa

SEQ ID NO: 1529210 - RNA, 11 nt, Human
uguacagagcc

SEQ ID NO: 1529211 - RNA, 14 nt, Human
uguaacaagccacc

SEQ ID NO: 1529212 - RNA, 17 nt, Human
uguaacaagccacccca

SEQ ID NO: 1529213 - RNA, 14 nt, Human
uguaauaacuguga

SEQ ID NO: 1529214 - RNA, 22 nt, Human
uguaauaacugugaaguuuaca

SEQ ID NO: 1529215 - RNA, 16 nt, Human
ugguuuucuguucuuu

SEQ ID NO: 1529216 - RNA, 19 nt, Human
ugguuuucuuguguguuua

SEQ ID NO: 1529217 - RNA, 16 nt, Human
ugguuuuguuccccuc

SEQ ID NO: 1529218 - RNA, 21 nt, Human
ugguuuuuaaaaaacugcuga

SEQ ID NO: 1529219 - RNA, 17 nt, Human
ugguuuuguuccccucc

SEQ ID NO: 1529220 - RNA, 20 nt, Human
ugguuuuguuccccuccucc

SEQ ID NO: 1529221 - RNA, 23 nt, Human
ugguuuuuaaaaaacugcugacu

SEQ ID NO: 1529222 - RNA, 11 nt, Human
uguaaaauggu

SEQ ID NO: 1529223 - RNA, 20 nt, Human
uguaaaaugugaagugaaug

SEQ ID NO: 1529224 - RNA, 12 nt, Human
uguaaaauggug

SEQ ID NO: 1529225 - RNA, 16 nt, Human
ugguucccuugaugaa

SEQ ID NO: 1529226 - RNA, 17 nt, Human
ugguucccuugaugaag

SEQ ID NO: 1529227 - RNA, 20 nt, Human
ugguucccuugaugaagaag

SEQ ID NO: 1529228 - RNA, 11 nt, Human
ugguucucauc

SEQ ID NO: 1529229 - RNA, 13 nt, Human
ugguucucaucuu

SEQ ID NO: 1529230 - RNA, 17 nt, Human
ugguucucaucuuucuu

SEQ ID NO: 1529231 - RNA, 14 nt, Human
ugguucucaucuuu

SEQ ID NO: 1529232 - RNA, 15 nt, Human
ugguucucaucuuuc

SEQ ID NO: 1529233 - RNA, 18 nt, Human
ugguugaugaucuuugca

SEQ ID NO: 1529234 - RNA, 16 nt, Human
uggugucaccugaaga

SEQ ID NO: 1529235 - RNA, 15 nt, Human
uggugucgggcauga

SEQ ID NO: 1529236 - RNA, 18 nt, Human
uggugucgggcaugacac

SEQ ID NO: 1529237 - RNA, 19 nt, Human
uggugucgggcaugacacg

SEQ ID NO: 1529238 - RNA, 15 nt, Human
uggugguaucugagu

SEQ ID NO: 1529239 - RNA, 18 nt, Human
uggugguuucagaaaugu

SEQ ID NO: 1529240 - RNA, 17 nt, Human
uggugguuucagaaaug

SEQ ID NO: 1529241 - RNA, 19 nt, Human
uggugguuuucuguucuuu

SEQ ID NO: 1529242 - RNA, 13 nt, Human
ugguggcuggguu

SEQ ID NO: 1529243 - RNA, 16 nt, Human
uggugggggccucggu

SEQ ID NO: 1529244 - RNA, 18 nt, Human
uggugggggccucggugu

SEQ ID NO: 1529245 - RNA, 14 nt, Human
uggguagacacaca

SEQ ID NO: 1529246 - RNA, 20 nt, Human
uggguacuuguggacacagc

SEQ ID NO: 1529247 - RNA, 23 nt, Human
uggguacuuguggacacagcucu

SEQ ID NO: 1529248 - RNA, 14 nt, Human
uggugagaggcauc

SEQ ID NO: 1529249 - RNA, 20 nt, Human
ugguggcagugggagcugcc

SEQ ID NO: 1529250 - RNA, 13 nt, Human
ugguggcaguggg

SEQ ID NO: 1529251 - RNA, 18 nt, Human
ugguggcagugggagcug

SEQ ID NO: 1529252 - RNA, 14 nt, Human
uggugcaaugaccu

SEQ ID NO: 1529253 - RNA, 19 nt, Human
uggugcaaugaccuuucaa

SEQ ID NO: 1529254 - RNA, 20 nt, Human
uggugcaaugaccuuucaau

SEQ ID NO: 1529255 - RNA, 17 nt, Human
ugucuacacuaagagag

SEQ ID NO: 1529256 - RNA, 22 nt, Human
ugucuacacuaagagagaauga

SEQ ID NO: 1529257 - RNA, 14 nt, Human
ugucuaaugaaacc

SEQ ID NO: 1529258 - RNA, 12 nt, Human
uguccugggagu

SEQ ID NO: 1529259 - RNA, 19 nt, Human
uguccugggagugagcugg

SEQ ID NO: 1529260 - RNA, 20 nt, Human
uguccugggagugagcuggu

SEQ ID NO: 1529261 - RNA, 17 nt, Human
uguccccgcacugggcu

SEQ ID NO: 1529262 - RNA, 19 nt, Human
uguccccgcacugggcuug

SEQ ID NO: 1529263 - RNA, 23 nt, Human
ugucuuuggacccugaggcccag

SEQ ID NO: 1529264 - RNA, 12 nt, Human
ugucuuaauuaa

SEQ ID NO: 1529265 - RNA, 16 nt, Human
ugucuuuucuugcaug

SEQ ID NO: 1529266 - RNA, 14 nt, Human
ugucuaugggacuc

SEQ ID NO: 1529267 - RNA, 15 nt, Human
ugucuaugggacuca

SEQ ID NO: 1529268 - RNA, 16 nt, Human
ugucuaugggacucaa

SEQ ID NO: 1529269 - RNA, 15 nt, Human
ugucuaguuguuuga

SEQ ID NO: 1529270 - RNA, 23 nt, Human
ugucuaguuguuugauucagaca

SEQ ID NO: 1529271 - RNA, 21 nt, Human
ugucucaaaaaaagaaaaaga

SEQ ID NO: 1529272 - RNA, 18 nt, Human
uguauuuuaaaagaauga

SEQ ID NO: 1529273 - RNA, 19 nt, Human
uguauuuuaaaagaaugau

SEQ ID NO: 1529274 - RNA, 19 nt, Human
uguauuuuacuaauaaaau

SEQ ID NO: 1529275 - RNA, 21 nt, Human
ugucaauuacaggaaguacug

SEQ ID NO: 1529276 - RNA, 13 nt, Human
ugucacacacuuu

SEQ ID NO: 1529277 - RNA, 14 nt, Human
ugucacaggcaggu

SEQ ID NO: 1529278 - RNA, 15 nt, Human
ugucacaggcagguc

SEQ ID NO: 1529279 - RNA, 16 nt, Human
ugucacaggcaggucc

SEQ ID NO: 1529280 - RNA, 17 nt, Human
ugucacaggcaggucca

SEQ ID NO: 1529281 - RNA, 21 nt, Human
ugucacaggcagguccagggu

SEQ ID NO: 1529282 - RNA, 16 nt, Human
ugucagugugacugau

SEQ ID NO: 1529283 - RNA, 19 nt, Human
ugucagugugacugaucuc

SEQ ID NO: 1529284 - RNA, 15 nt, Human
ugucagugugacuga

SEQ ID NO: 1529285 - RNA, 14 nt, Human
ugucagugugacug

SEQ ID NO: 1529286 - RNA, 20 nt, Human
uguaguguuggagaagaacu

SEQ ID NO: 1529287 - RNA, 21 nt, Human
uguaguguuggagaagaacug

SEQ ID NO: 1529288 - RNA, 14 nt, Human
uguauaaaauaauu

SEQ ID NO: 1529289 - RNA, 13 nt, Human
uguauaaaauaau

SEQ ID NO: 1529290 - RNA, 18 nt, Human
uguaggaagguuaauguu

SEQ ID NO: 1529291 - RNA, 14 nt, Human
uguagcuuuaucaa

SEQ ID NO: 1529292 - RNA, 15 nt, Human
uguagcuuuaucaaa

SEQ ID NO: 1529293 - RNA, 23 nt, Human
uguacagcaaggagauuuacaac

SEQ ID NO: 1529294 - RNA, 22 nt, Human
uguacagcaaggagauuuacaa

SEQ ID NO: 1529295 - RNA, 13 nt, Human
uguacagagccca

SEQ ID NO: 1529296 - RNA, 12 nt, Human
uguacagagccc

SEQ ID NO: 1529297 - RNA, 13 nt, Human
uguaucugagcag

SEQ ID NO: 1529298 - RNA, 18 nt, Human
ugggcagagcagagacca

SEQ ID NO: 1529299 - RNA, 14 nt, Human
ugggcagagcagag

SEQ ID NO: 1529300 - RNA, 15 nt, Human
ugggcagagcagaga

SEQ ID NO: 1529301 - RNA, 17 nt, Human
ugggcagagcagagacc

SEQ ID NO: 1529302 - RNA, 16 nt, Human
ugggaggaucucuuga

SEQ ID NO: 1529303 - RNA, 14 nt, Human
ugggacagggagga

SEQ ID NO: 1529304 - RNA, 16 nt, Human
ugggaaugaaugucag

SEQ ID NO: 1529305 - RNA, 21 nt, Human
ugggaaugaaugucaguguga

SEQ ID NO: 1529306 - RNA, 14 nt, Human
ugggacacccugug

SEQ ID NO: 1529307 - RNA, 15 nt, Human
ugggacacccuguga

SEQ ID NO: 1529308 - RNA, 18 nt, Human
ugggaggaucucuugagc

SEQ ID NO: 1529309 - RNA, 18 nt, Human
ugggaugauuggaggggg

SEQ ID NO: 1529310 - RNA, 19 nt, Human
uggggggcugaggugggag

SEQ ID NO: 1529311 - RNA, 16 nt, Human
ugggggccucagugcc

SEQ ID NO: 1529312 - RNA, 22 nt, Human
ugggcuucauccuccucagauc

SEQ ID NO: 1529313 - RNA, 15 nt, Human
ugggcuucauccucc

SEQ ID NO: 1529314 - RNA, 22 nt, Human
ugggcuucaguggcagcugcuu

SEQ ID NO: 1529315 - RNA, 13 nt, Human
uggggcagcuuga

SEQ ID NO: 1529316 - RNA, 23 nt, Human
ugggcuuggggaccagagcugcc

SEQ ID NO: 1529317 - RNA, 17 nt, Human
ugggcuugucuguagau

SEQ ID NO: 1529318 - RNA, 21 nt, Human
ugggcuugucuguagauuuua

SEQ ID NO: 1529319 - RNA, 14 nt, Human
uggcuuuaaugaau

SEQ ID NO: 1529320 - RNA, 22 nt, Human
uggcuuccuaaaauucagugga

SEQ ID NO: 1529321 - RNA, 13 nt, Human
uggccucugcacu

SEQ ID NO: 1529322 - RNA, 23 nt, Human
uggccuucggccuccauccugag

SEQ ID NO: 1529323 - RNA, 22 nt, Human
uggccuucggccuccauccuga

SEQ ID NO: 1529324 - RNA, 13 nt, Human
uggcugcugaagg

SEQ ID NO: 1529325 - RNA, 14 nt, Human
uggcugcugaaggc

SEQ ID NO: 1529326 - RNA, 16 nt, Human
uggcugcugaaggcuc

SEQ ID NO: 1529327 - RNA, 20 nt, Human
uggccuagcauacguacaca

SEQ ID NO: 1529328 - RNA, 14 nt, Human
uggccccugcccgg

SEQ ID NO: 1529329 - RNA, 21 nt, Human
uggccccucagggucccuggu

SEQ ID NO: 1529330 - RNA, 22 nt, Human
uggccccucagggucccuggug

SEQ ID NO: 1529331 - RNA, 17 nt, Human
uggcagcugcgguccac

SEQ ID NO: 1529332 - RNA, 19 nt, Human
uggcagcugcgguccaccc

SEQ ID NO: 1529333 - RNA, 13 nt, Human
uggccccucaggg

SEQ ID NO: 1529334 - RNA, 20 nt, Human
uggccccucagggucccugg

SEQ ID NO: 1529335 - RNA, 23 nt, Human
uggccuagcauacguacacauuu

SEQ ID NO: 1529336 - RNA, 18 nt, Human
uggccucaagugauucuc

SEQ ID NO: 1529337 - RNA, 23 nt, Human
uggccucaagugauucuccugcc

SEQ ID NO: 1529338 - RNA, 11 nt, Human
uggccucccaa

SEQ ID NO: 1529339 - RNA, 14 nt, Human
uggccucccaacuc

SEQ ID NO: 1529340 - RNA, 23 nt, Human
uggccucccaacucaccccagcc

SEQ ID NO: 1529341 - RNA, 19 nt, Human
uggccucccaacucacccc

SEQ ID NO: 1529342 - RNA, 20 nt, Human
uggccucccaacucacccca

SEQ ID NO: 1529343 - RNA, 21 nt, Human
uggccucccaacucaccccag

SEQ ID NO: 1529344 - RNA, 22 nt, Human
uggccucccaacucaccccagc

SEQ ID NO: 1529345 - RNA, 22 nt, Human
ugcuucuguuuuauaauuuugu

SEQ ID NO: 1529346 - RNA, 13 nt, Human
ugcuucuucagag

SEQ ID NO: 1529347 - RNA, 18 nt, Human
ugcuugugaaaggaaaga

SEQ ID NO: 1529348 - RNA, 12 nt, Human
ugcuuguguuaa

SEQ ID NO: 1529349 - RNA, 15 nt, Human
ugcuuguguuaagua

SEQ ID NO: 1529350 - RNA, 21 nt, Human
uggaaacuggaugaggucaua

SEQ ID NO: 1529351 - RNA, 22 nt, Human
uggaaaaguauguuagugcaaa

SEQ ID NO: 1529352 - RNA, 15 nt, Human
uggaacacucugaga

SEQ ID NO: 1529353 - RNA, 17 nt, Human
uggaacacucugagacu

SEQ ID NO: 1529354 - RNA, 17 nt, Human
ugcuucuguuuuauaau

SEQ ID NO: 1529355 - RNA, 22 nt, Human
ugcuuccagugaggcucugccc

SEQ ID NO: 1529356 - RNA, 23 nt, Human
ugcuuccagugaggcucugcccu

SEQ ID NO: 1529357 - RNA, 19 nt, Human
ugcuuaacuucacauauug

SEQ ID NO: 1529358 - RNA, 18 nt, Human
ugcuuaacuucacauauu

SEQ ID NO: 1529359 - RNA, 17 nt, Human
ugcuuaacuucacauau

SEQ ID NO: 1529360 - RNA, 14 nt, Human
ugcuuaacuucaca

SEQ ID NO: 1529361 - RNA, 13 nt, Human
ugcuuaacuucac

SEQ ID NO: 1529362 - RNA, 22 nt, Human
uggaugcagccucacaguccuu

SEQ ID NO: 1529363 - RNA, 13 nt, Human
uggaugcagccuc

SEQ ID NO: 1529364 - RNA, 21 nt, Human
uggaugcagccucacaguccu

SEQ ID NO: 1529365 - RNA, 23 nt, Human
uggaggggggaggugggauccuc

SEQ ID NO: 1529366 - RNA, 17 nt, Human
uggauuuaacagaaaug

SEQ ID NO: 1529367 - RNA, 15 nt, Human
uggauuuaacagaaa

SEQ ID NO: 1529368 - RNA, 21 nt, Human
uggcacuauaauguaagcucu

SEQ ID NO: 1529369 - RNA, 19 nt, Human
uggcacugcuuccagugag

SEQ ID NO: 1529370 - RNA, 22 nt, Human
uggcacuauaauguaagcucua

SEQ ID NO: 1529371 - RNA, 22 nt, Human
uggcacugcuuccagugaggcu

SEQ ID NO: 1529372 - RNA, 17 nt, Human
uggagacacaacuauuu

SEQ ID NO: 1529373 - RNA, 19 nt, Human
uggacuaacuugucuuugg

SEQ ID NO: 1529374 - RNA, 20 nt, Human
uggacuaacuugucuuugga

SEQ ID NO: 1529375 - RNA, 19 nt, Human
uggacguguuaugacucca

SEQ ID NO: 1529376 - RNA, 23 nt, Human
uggacguguuaugacuccagaau

SEQ ID NO: 1529377 - RNA, 18 nt, Human
uggacaggcauguucucu

SEQ ID NO: 1529378 - RNA, 22 nt, Human
uggacaggcauguucucugagg

SEQ ID NO: 1529379 - RNA, 23 nt, Human
uggacaggcauguucucugagga

SEQ ID NO: 1529380 - RNA, 23 nt, Human
ugaugcuucuucagagacuccug

SEQ ID NO: 1529381 - RNA, 13 nt, Human
ugauguauucuag

SEQ ID NO: 1529382 - RNA, 14 nt, Human
ugauguauucuagc

SEQ ID NO: 1529383 - RNA, 20 nt, Human
ugauguauucuagcuaaugu

SEQ ID NO: 1529384 - RNA, 21 nt, Human
ugauguauucuagcuaaugua

SEQ ID NO: 1529385 - RNA, 19 nt, Human
ugaugcuucuucagagacu

SEQ ID NO: 1529386 - RNA, 21 nt, Human
ugaugcuucuucagagacucc

SEQ ID NO: 1529387 - RNA, 22 nt, Human
ugaugcuucuucagagacuccu

SEQ ID NO: 1529388 - RNA, 23 nt, Human
ugaugaucuuugcagacaggcaa

SEQ ID NO: 1529389 - RNA, 20 nt, Human
ugaugaugaaaugaggucag

SEQ ID NO: 1529390 - RNA, 14 nt, Human
ugaugccaugagga

SEQ ID NO: 1529391 - RNA, 21 nt, Human
ugaucuuugcagacaggcaag

SEQ ID NO: 1529392 - RNA, 23 nt, Human
ugaucuuugcagacaggcaagca

SEQ ID NO: 1529393 - RNA, 19 nt, Human
ugaucuuugcagacaggca

SEQ ID NO: 1529394 - RNA, 20 nt, Human
ugaucuuugcagacaggcaa

SEQ ID NO: 1529395 - RNA, 24 nt, Human
ugauaguuguaccgcaaugugacu

SEQ ID NO: 1529396 - RNA, 22 nt, Human
ugaucacggcucacugcagccu

SEQ ID NO: 1529397 - RNA, 21 nt, Human
ugauccacccaccucagccuc

SEQ ID NO: 1529398 - RNA, 22 nt, Human
ugauccacccaccucagccucc

SEQ ID NO: 1529399 - RNA, 19 nt, Human
ugaucuaggaagacuuugg

SEQ ID NO: 1529400 - RNA, 21 nt, Human
ugaucuaggaagacuuuggaa

SEQ ID NO: 1529401 - RNA, 13 nt, Human
ugaucauccacug

SEQ ID NO: 1529402 - RNA, 24 nt, Human
ugaucauccacugugccaugugcc

SEQ ID NO: 1529403 - RNA, 21 nt, Human
ugauccaagcuggucccacuc

SEQ ID NO: 1529404 - RNA, 15 nt, Human
ugauccacccaccuc

SEQ ID NO: 1529405 - RNA, 16 nt, Human
ugauccacccaccuca

SEQ ID NO: 1529406 - RNA, 20 nt, Human
ugauccacccaccucagccu

SEQ ID NO: 1529407 - RNA, 20 nt, Human
ugaguugguguugacaugug

SEQ ID NO: 1529408 - RNA, 15 nt, Human
ugagucgaggacagg

SEQ ID NO: 1529409 - RNA, 16 nt, Human
ugagucgaggacaggg

SEQ ID NO: 1529410 - RNA, 23 nt, Human
ugaguugauagcacagacccugc

SEQ ID NO: 1529411 - RNA, 16 nt, Human
ugaguugauucagcuc

SEQ ID NO: 1529412 - RNA, 19 nt, Human
ugaguugauucagcucugc

SEQ ID NO: 1529413 - RNA, 18 nt, Human
ugagucgaggacagggag

SEQ ID NO: 1529414 - RNA, 22 nt, Human
ugauagcacagacccugcccug

SEQ ID NO: 1529415 - RNA, 23 nt, Human
ugauagcacagacccugcccugu

SEQ ID NO: 1529416 - RNA, 15 nt, Human
ugauagcacagaccc

SEQ ID NO: 1529417 - RNA, 16 nt, Human
ugauagcacagacccu

SEQ ID NO: 1529418 - RNA, 17 nt, Human
ugauagcacagacccug

SEQ ID NO: 1529419 - RNA, 18 nt, Human
ugauagcacagacccugc

SEQ ID NO: 1529420 - RNA, 20 nt, Human
ugauagcacagacccugccc

SEQ ID NO: 1529421 - RNA, 21 nt, Human
ugauagcacagacccugcccu

SEQ ID NO: 1529422 - RNA, 11 nt, Human
ugaggcugggc

SEQ ID NO: 1529423 - RNA, 15 nt, Human
ugaggucuguucuuu

SEQ ID NO: 1529424 - RNA, 14 nt, Human
ugaggucuguucuu

SEQ ID NO: 1529425 - RNA, 20 nt, Human
ugaggucuguucuuuccaaa

SEQ ID NO: 1529426 - RNA, 14 nt, Human
ugagucgaggacag

SEQ ID NO: 1529427 - RNA, 19 nt, Human
ugaguccuggcaugggaau

SEQ ID NO: 1529428 - RNA, 22 nt, Human
ugaguccuggcaugggaaugaa

SEQ ID NO: 1529429 - RNA, 11 nt, Human
ugaguccuggc

SEQ ID NO: 1529430 - RNA, 18 nt, Human
ugaguccuggcaugggaa

SEQ ID NO: 1529431 - RNA, 19 nt, Human
ugagguuucaaaccucccu

SEQ ID NO: 1529432 - RNA, 21 nt, Human
ugaguccccuguuuguuucug

SEQ ID NO: 1529433 - RNA, 16 nt, Human
ugaggugcuauguucu

SEQ ID NO: 1529434 - RNA, 17 nt, Human
ugagcagucaggaaaga

SEQ ID NO: 1529435 - RNA, 15 nt, Human
ugagcagucaggaaa

SEQ ID NO: 1529436 - RNA, 20 nt, Human
ugagcagucaggaaagagaa

SEQ ID NO: 1529437 - RNA, 13 nt, Human
ugagcaucaggcc

SEQ ID NO: 1529438 - RNA, 14 nt, Human
ugagaugcuagaac

SEQ ID NO: 1529439 - RNA, 16 nt, Human
ugagaugcuagaacuc

SEQ ID NO: 1529440 - RNA, 20 nt, Human
ugagaugcuagaacucccuu

SEQ ID NO: 1529441 - RNA, 16 nt, Human
ugagcaucaggccagg

SEQ ID NO: 1529442 - RNA, 14 nt, Human
ugagcaucaggcca

SEQ ID NO: 1529443 - RNA, 15 nt, Human
ugagcaucaggccag

SEQ ID NO: 1529444 - RNA, 13 nt, Human
ugagccccaaaag

SEQ ID NO: 1529445 - RNA, 13 nt, Human
ugagccucagcau

SEQ ID NO: 1529446 - RNA, 15 nt, Human
ugagccucagcaucc

SEQ ID NO: 1529447 - RNA, 20 nt, Human
ugagaaagacuauucaaaca

SEQ ID NO: 1529448 - RNA, 18 nt, Human
ugagaaagacuauucaaa

SEQ ID NO: 1529449 - RNA, 16 nt, Human
ugagaaagacuauuca

SEQ ID NO: 1529450 - RNA, 17 nt, Human
ugagaaagacuauucaa

SEQ ID NO: 1529451 - RNA, 14 nt, Human
ugagacagcucugc

SEQ ID NO: 1529452 - RNA, 16 nt, Human
ugagacagcucugcau

SEQ ID NO: 1529453 - RNA, 12 nt, Human
ugagacccuguc

SEQ ID NO: 1529454 - RNA, 12 nt, Human
ugagacucuguc

SEQ ID NO: 1529455 - RNA, 13 nt, Human
ugagacucugucu

SEQ ID NO: 1529456 - RNA, 14 nt, Human
ugagacucugucuc

SEQ ID NO: 1529457 - RNA, 23 nt, Human
ugagaggcauccaguaucuugaa

SEQ ID NO: 1529458 - RNA, 22 nt, Human
ugagaggcauccaguaucuuga

SEQ ID NO: 1529459 - RNA, 17 nt, Human
ugagaguagagucacug

SEQ ID NO: 1529460 - RNA, 18 nt, Human
ugagauccuuccuuuuga

SEQ ID NO: 1529461 - RNA, 13 nt, Human
ugacucuuaagaa

SEQ ID NO: 1529462 - RNA, 15 nt, Human
ugacugaauuucuuu

SEQ ID NO: 1529463 - RNA, 14 nt, Human
ugacugaauuucuu

SEQ ID NO: 1529464 - RNA, 12 nt, Human
ugacucuuaaga

SEQ ID NO: 1529465 - RNA, 13 nt, Human
ugacugaauuucu

SEQ ID NO: 1529466 - RNA, 18 nt, Human
ugaccuuucaauaggaaa

SEQ ID NO: 1529467 - RNA, 22 nt, Human
ugaccuuucaauaggaaaaacu

SEQ ID NO: 1529468 - RNA, 13 nt, Human
ugacgccauccca

SEQ ID NO: 1529469 - RNA, 14 nt, Human
ugacgccaucccag

SEQ ID NO: 1529470 - RNA, 15 nt, Human
ugacgccaucccagc

SEQ ID NO: 1529471 - RNA, 16 nt, Human
ugacgccaucccagcc

SEQ ID NO: 1529472 - RNA, 17 nt, Human
ugacgccaucccagccc

SEQ ID NO: 1529473 - RNA, 18 nt, Human
ugacgccaucccagcccc

SEQ ID NO: 1529474 - RNA, 19 nt, Human
ugacgccaucccagcccca

SEQ ID NO: 1529475 - RNA, 20 nt, Human
ugacgccaucccagccccaa

SEQ ID NO: 1529476 - RNA, 15 nt, Human
ucuugaacuccuggc

SEQ ID NO: 1529477 - RNA, 17 nt, Human
ucuugaauuguaaggaa

SEQ ID NO: 1529478 - RNA, 20 nt, Human
ugaccauucuccaccugcca

SEQ ID NO: 1529479 - RNA, 21 nt, Human
ugaccauucuccaccugccag

SEQ ID NO: 1529480 - RNA, 22 nt, Human
ugaccauucuccaccugccagg

SEQ ID NO: 1529481 - RNA, 23 nt, Human
ugaccauucuccaccugccaggg

SEQ ID NO: 1529482 - RNA, 16 nt, Human
ugaccucugcagcaau

SEQ ID NO: 1529483 - RNA, 13 nt, Human
ugaccucugcagc

SEQ ID NO: 1529484 - RNA, 22 nt, Human
ugaccucaggugauccacccac

SEQ ID NO: 1529485 - RNA, 23 nt, Human
ugaccucugcagcaauaaagcag

SEQ ID NO: 1529486 - RNA, 12 nt, Human
ugaccucugccu

SEQ ID NO: 1529487 - RNA, 21 nt, Human
ugaccucugcagcaauaaagc

SEQ ID NO: 1529488 - RNA, 18 nt, Human
ugaccucugcagcaauaa

SEQ ID NO: 1529489 - RNA, 14 nt, Human
ugaccuuucaauag

SEQ ID NO: 1529490 - RNA, 15 nt, Human
ugaccuuucaauagg

SEQ ID NO: 1529491 - RNA, 16 nt, Human
ugaccuuucaauagga

SEQ ID NO: 1529492 - RNA, 14 nt, Human
ugcauuauauuuau

SEQ ID NO: 1529493 - RNA, 12 nt, Human
ugcauuaucuag

SEQ ID NO: 1529494 - RNA, 18 nt, Human
ugcauuaucuagauacug

SEQ ID NO: 1529495 - RNA, 17 nt, Human
ugcauuaucuagauacu

SEQ ID NO: 1529496 - RNA, 17 nt, Human
ugccacaggcuuaggga

SEQ ID NO: 1529497 - RNA, 21 nt, Human
ugccacaggcuuagggacagg

SEQ ID NO: 1529498 - RNA, 20 nt, Human
ugccacaggcuuagggacag

SEQ ID NO: 1529499 - RNA, 19 nt, Human
ugcagauaaacaguaguga

SEQ ID NO: 1529500 - RNA, 15 nt, Human
ugcauguuugugauu

SEQ ID NO: 1529501 - RNA, 14 nt, Human
ugccaugugccagg

SEQ ID NO: 1529502 - RNA, 15 nt, Human
ugccaugugccaggu

SEQ ID NO: 1529503 - RNA, 23 nt, Human
ugccaugaggaacaaggcaaggc

SEQ ID NO: 1529504 - RNA, 20 nt, Human
ugccaugaggaacaaggcaa

SEQ ID NO: 1529505 - RNA, 18 nt, Human
ugcccacgcuggagugca

SEQ ID NO: 1529506 - RNA, 13 nt, Human
ugcccacucccug

SEQ ID NO: 1529507 - RNA, 12 nt, Human
ugccauguuggc

SEQ ID NO: 1529508 - RNA, 15 nt, Human
ugccauguuggccag

SEQ ID NO: 1529509 - RNA, 16 nt, Human
ugccauguuggccagg

SEQ ID NO: 1529510 - RNA, 20 nt, Human
ugcccaccuggccucugcac

SEQ ID NO: 1529511 - RNA, 12 nt, Human
ugccaggaagcc

SEQ ID NO: 1529512 - RNA, 16 nt, Human
ugccaggaagccagca

SEQ ID NO: 1529513 - RNA, 18 nt, Human
ugccaggaagccagcagg

SEQ ID NO: 1529514 - RNA, 19 nt, Human
ugccaggaagccagcaggc

SEQ ID NO: 1529515 - RNA, 17 nt, Human
ugccagguuuuuggucu

SEQ ID NO: 1529516 - RNA, 15 nt, Human
ugccauccagguuca

SEQ ID NO: 1529517 - RNA, 20 nt, Human
ugccauccagguucagcuug

SEQ ID NO: 1529518 - RNA, 12 nt, Human
ugccauccaggu

SEQ ID NO: 1529519 - RNA, 19 nt, Human
ugcccuaaaguguauuuuu

SEQ ID NO: 1529520 - RNA, 17 nt, Human
ugcccuaaaguguauuu

SEQ ID NO: 1529521 - RNA, 22 nt, Human
ugcccugcccaccuggccucug

SEQ ID NO: 1529522 - RNA, 23 nt, Human
ugcccugcccaccuggccucugc

SEQ ID NO: 1529523 - RNA, 21 nt, Human
ugccguguccccugacagggc

SEQ ID NO: 1529524 - RNA, 17 nt, Human
ugccgucuaccugaggg

SEQ ID NO: 1529525 - RNA, 19 nt, Human
ugccgucuaccugaggggc

SEQ ID NO: 1529526 - RNA, 15 nt, Human
ugccgucuaccugag

SEQ ID NO: 1529527 - RNA, 16 nt, Human
ugccgucuaccugagg

SEQ ID NO: 1529528 - RNA, 16 nt, Human
ugcccuggaugcccag

SEQ ID NO: 1529529 - RNA, 18 nt, Human
ugcccuggaugcccagga

SEQ ID NO: 1529530 - RNA, 21 nt, Human
ugccucuucucuacucuaggg

SEQ ID NO: 1529531 - RNA, 13 nt, Human
ugccugcccaggc

SEQ ID NO: 1529532 - RNA, 17 nt, Human
ugccugguggcagcugc

SEQ ID NO: 1529533 - RNA, 18 nt, Human
ugccugguggcagcugcg

SEQ ID NO: 1529534 - RNA, 19 nt, Human
ugccugguggcagcugcgg

SEQ ID NO: 1529535 - RNA, 22 nt, Human
ugccuccuuugugaggaagccg

SEQ ID NO: 1529536 - RNA, 21 nt, Human
ugccuccuuugugaggaagcc

SEQ ID NO: 1529537 - RNA, 12 nt, Human
ugccuccucagg

SEQ ID NO: 1529538 - RNA, 14 nt, Human
ugccucugggacug

SEQ ID NO: 1529539 - RNA, 13 nt, Human
ugccucugggacu

SEQ ID NO: 1529540 - RNA, 22 nt, Human
ugauuuuuuuuuccuucagugc

SEQ ID NO: 1529541 - RNA, 23 nt, Human
ugauuuuuuuuuccuucagugcc

SEQ ID NO: 1529542 - RNA, 16 nt, Human
ugauuuuuuuuuccuu

SEQ ID NO: 1529543 - RNA, 17 nt, Human
ugauuuuuuuuuccuuc

SEQ ID NO: 1529544 - RNA, 19 nt, Human
ugauuuuuuuuuccuucag

SEQ ID NO: 1529545 - RNA, 20 nt, Human
ugauuuuuuuuuccuucagu

SEQ ID NO: 1529546 - RNA, 15 nt, Human
ugauuuucauugcug

SEQ ID NO: 1529547 - RNA, 13 nt, Human
ugauuuucauugc

SEQ ID NO: 1529548 - RNA, 22 nt, Human
ugcaacucugaaggguaauuau

SEQ ID NO: 1529549 - RNA, 22 nt, Human
ugcaaccugauugugucucuug

SEQ ID NO: 1529550 - RNA, 19 nt, Human
ugcaaccugauugugucuc

SEQ ID NO: 1529551 - RNA, 20 nt, Human
ugcaaccugauugugucucu

SEQ ID NO: 1529552 - RNA, 18 nt, Human
ugcaaccuccgccucuug

SEQ ID NO: 1529553 - RNA, 20 nt, Human
ugcaaccuccgccucuuggg

SEQ ID NO: 1529554 - RNA, 21 nt, Human
ugcaaccuccgccucuugggu

SEQ ID NO: 1529555 - RNA, 13 nt, Human
ugcaaccuccgcc

SEQ ID NO: 1529556 - RNA, 14 nt, Human
ugcaaccuccgccu

SEQ ID NO: 1529557 - RNA, 19 nt, Human
ugcaacaggcugggcuuca

SEQ ID NO: 1529558 - RNA, 20 nt, Human
ugcaacaggcugggcuucag

SEQ ID NO: 1529559 - RNA, 14 nt, Human
ugcaacaggcuggg

SEQ ID NO: 1529560 - RNA, 15 nt, Human
ugcaacaggcugggc

SEQ ID NO: 1529561 - RNA, 16 nt, Human
ugcaacaggcugggcu

SEQ ID NO: 1529562 - RNA, 17 nt, Human
ugcaacaggcugggcuu

SEQ ID NO: 1529563 - RNA, 20 nt, Human
ugcacagaguuguuacauuu

SEQ ID NO: 1529564 - RNA, 19 nt, Human
ugcaccggcuggccuggcc

SEQ ID NO: 1529565 - RNA, 20 nt, Human
ugcaccggcuggccuggccc

SEQ ID NO: 1529566 - RNA, 22 nt, Human
ugcaccuggaauauauaaccag

SEQ ID NO: 1529567 - RNA, 20 nt, Human
ugcaccuggaauauauaacc

SEQ ID NO: 1529568 - RNA, 17 nt, Human
ugcaccuggaauauaua

SEQ ID NO: 1529569 - RNA, 21 nt, Human
ugcaccggcuggccuggcccc

SEQ ID NO: 1529570 - RNA, 18 nt, Human
ugcacugacauuguuggc

SEQ ID NO: 1529571 - RNA, 21 nt, Human
ugcacugacauuguuggccaa

SEQ ID NO: 1529572 - RNA, 16 nt, Human
ugcacuugcagacucu

SEQ ID NO: 1529573 - RNA, 13 nt, Human
ugcaauggcagcc

SEQ ID NO: 1529574 - RNA, 14 nt, Human
ugcaauggcagccu

SEQ ID NO: 1529575 - RNA, 15 nt, Human
ugcaauggcagccuu

SEQ ID NO: 1529576 - RNA, 16 nt, Human
ugcaauggcagccuug

SEQ ID NO: 1529577 - RNA, 13 nt, Human
ugcaaugaccuuu

SEQ ID NO: 1529578 - RNA, 16 nt, Human
ugcaaugaccuuucaa

SEQ ID NO: 1529579 - RNA, 17 nt, Human
ugcaaugaccuuucaau

SEQ ID NO: 1529580 - RNA, 19 nt, Human
ugcaaugaccuuucaauag

SEQ ID NO: 1529581 - RNA, 22 nt, Human
ugcaaugaccuuucaauaggaa

SEQ ID NO: 1529582 - RNA, 23 nt, Human
ugcaaugaccuuucaauaggaaa

SEQ ID NO: 1529583 - RNA, 19 nt, Human
ugcacagaguuguuacauu

SEQ ID NO: 1529584 - RNA, 18 nt, Human
ugcacagaguuguuacau

SEQ ID NO: 1529585 - RNA, 17 nt, Human
ugcacagaguuguuaca

SEQ ID NO: 1529586 - RNA, 20 nt, Human
ugcacaaacagaggccgcca

SEQ ID NO: 1529587 - RNA, 17 nt, Human
ugcacaaacagaggccg

SEQ ID NO: 1529588 - RNA, 19 nt, Human
ugcacaaacagaggccgcc

SEQ ID NO: 1529589 - RNA, 15 nt, Human
ugcacaaacagaggc

SEQ ID NO: 1529590 - RNA, 16 nt, Human
ugcacaaacagaggcc

SEQ ID NO: 1529591 - RNA, 14 nt, Human
ugcaauuucauaug

SEQ ID NO: 1529592 - RNA, 20 nt, Human
ugcaauuucauaugcuguau

SEQ ID NO: 1529593 - RNA, 16 nt, Human
ucugucgcccagucug

SEQ ID NO: 1529594 - RNA, 14 nt, Human
ucugucgcccaguc

SEQ ID NO: 1529595 - RNA, 20 nt, Human
ucuguccuacucugugucag

SEQ ID NO: 1529596 - RNA, 15 nt, Human
ucuguccuacucugu

SEQ ID NO: 1529597 - RNA, 19 nt, Human
ucuguccuacucuguguca

SEQ ID NO: 1529598 - RNA, 22 nt, Human
ucuggcuaugcauuugaaaauu

SEQ ID NO: 1529599 - RNA, 19 nt, Human
ucuggcuaugcauuugaaa

SEQ ID NO: 1529600 - RNA, 17 nt, Human
ucuggccuucggccucc

SEQ ID NO: 1529601 - RNA, 18 nt, Human
ucuggccuucggccucca

SEQ ID NO: 1529602 - RNA, 23 nt, Human
ucuggccuucggccuccauccug

SEQ ID NO: 1529603 - RNA, 23 nt, Human
ucuggcucuuccaggcugggaga

SEQ ID NO: 1529604 - RNA, 23 nt, Human
ucuggugacuuuccucuuugguc

SEQ ID NO: 1529605 - RNA, 14 nt, Human
ucugggacacaguu

SEQ ID NO: 1529606 - RNA, 18 nt, Human
ucugccauauucuguugg

SEQ ID NO: 1529607 - RNA, 14 nt, Human
ucugccugcccagg

SEQ ID NO: 1529608 - RNA, 15 nt, Human
ucugccugcccaggc

SEQ ID NO: 1529609 - RNA, 16 nt, Human
ucugccugcccaggcc

SEQ ID NO: 1529610 - RNA, 18 nt, Human
ucugcuccucuccccagc

SEQ ID NO: 1529611 - RNA, 21 nt, Human
ucugcuccucuccccagcaag

SEQ ID NO: 1529612 - RNA, 18 nt, Human
ucugcugacagacacagg

SEQ ID NO: 1529613 - RNA, 21 nt, Human
ucuggacaggcauguucucug

SEQ ID NO: 1529614 - RNA, 16 nt, Human
ucuggaaugcaguggu

SEQ ID NO: 1529615 - RNA, 14 nt, Human
ucuggacaggcaug

SEQ ID NO: 1529616 - RNA, 15 nt, Human
ucuggaaugcagugg

SEQ ID NO: 1529617 - RNA, 19 nt, Human
ucuggaauaaggagaauga

SEQ ID NO: 1529618 - RNA, 19 nt, Human
ucugcugacagacacaggc

SEQ ID NO: 1529619 - RNA, 20 nt, Human
ucugcugacagacacaggcc

SEQ ID NO: 1529620 - RNA, 21 nt, Human
ucugcugacagacacaggccc

SEQ ID NO: 1529621 - RNA, 22 nt, Human
ucugcugacagacacaggcccg

SEQ ID NO: 1529622 - RNA, 12 nt, Human
ucuuaagaagac

SEQ ID NO: 1529623 - RNA, 18 nt, Human
ucuuaagaagacugcauu

SEQ ID NO: 1529624 - RNA, 17 nt, Human
ucuuagcuccccuccaa

SEQ ID NO: 1529625 - RNA, 22 nt, Human
ucuuaaauauguggaguucauc

SEQ ID NO: 1529626 - RNA, 15 nt, Human
ucugucuucacaaca

SEQ ID NO: 1529627 - RNA, 17 nt, Human
ucuuaaacaaauguaug

SEQ ID NO: 1529628 - RNA, 13 nt, Human
ucuuaaaaagugg

SEQ ID NO: 1529629 - RNA, 10 nt, Human
ucuucucauu

SEQ ID NO: 1529630 - RNA, 22 nt, Human
ucuucucauuucaccccucccu

SEQ ID NO: 1529631 - RNA, 23 nt, Human
ucuucucauuucaccccucccuu

SEQ ID NO: 1529632 - RNA, 15 nt, Human
ucuucucauuucacc

SEQ ID NO: 1529633 - RNA, 18 nt, Human
ucuucucauuucaccccu

SEQ ID NO: 1529634 - RNA, 19 nt, Human
ucuucucauuucaccccuc

SEQ ID NO: 1529635 - RNA, 20 nt, Human
ucuucucauuucaccccucc

SEQ ID NO: 1529636 - RNA, 12 nt, Human
ucuugaacuccu

SEQ ID NO: 1529637 - RNA, 22 nt, Human
ucuuaggguuaugauuaaguaa

SEQ ID NO: 1529638 - RNA, 23 nt, Human
ucuucagaucucuaacuucacca

SEQ ID NO: 1529639 - RNA, 18 nt, Human
ucuucagaucucuaacuu

SEQ ID NO: 1529640 - RNA, 19 nt, Human
ucuucaucugacuaugaca

SEQ ID NO: 1529641 - RNA, 19 nt, Human
ucucugugagacucgagaa

SEQ ID NO: 1529642 - RNA, 22 nt, Human
ucucugugagacucgagaacuu

SEQ ID NO: 1529643 - RNA, 14 nt, Human
ucucugugagacuc

SEQ ID NO: 1529644 - RNA, 15 nt, Human
ucucugauacagaaa

SEQ ID NO: 1529645 - RNA, 17 nt, Human
ucucugaggacacuaac

SEQ ID NO: 1529646 - RNA, 15 nt, Human
ucucuaguuugauua

SEQ ID NO: 1529647 - RNA, 16 nt, Human
ucucuaguuugauuaa

SEQ ID NO: 1529648 - RNA, 21 nt, Human
ucuccuggaaauauuaagaaa

SEQ ID NO: 1529649 - RNA, 15 nt, Human
ucuccuguaccucuu

SEQ ID NO: 1529650 - RNA, 19 nt, Human
ucuccugccucagccuccc

SEQ ID NO: 1529651 - RNA, 17 nt, Human
ucuccugccucagccuc

SEQ ID NO: 1529652 - RNA, 15 nt, Human
ucuccugccucagcc

SEQ ID NO: 1529653 - RNA, 17 nt, Human
ucuccuguaccucuuga

SEQ ID NO: 1529654 - RNA, 16 nt, Human
ucuccuguaccucuug

SEQ ID NO: 1529655 - RNA, 19 nt, Human
ucuccuguaccucuugagc

SEQ ID NO: 1529656 - RNA, 14 nt, Human
ucucgugauugaua

SEQ ID NO: 1529657 - RNA, 22 nt, Human
ucucgugauugauaagaaccuu

SEQ ID NO: 1529658 - RNA, 12 nt, Human
ucucuaacuuca

SEQ ID NO: 1529659 - RNA, 19 nt, Human
ucucuaacuucaccauauu

SEQ ID NO: 1529660 - RNA, 14 nt, Human
ucugcaacucugaa

SEQ ID NO: 1529661 - RNA, 15 nt, Human
ucugcaacucugaag

SEQ ID NO: 1529662 - RNA, 20 nt, Human
ucugcaagaauugaagcagg

SEQ ID NO: 1529663 - RNA, 21 nt, Human
ucugcaagaauugaagcagga

SEQ ID NO: 1529664 - RNA, 14 nt, Human
ucugacccacugcu

SEQ ID NO: 1529665 - RNA, 15 nt, Human
ucugacccacugcuu

SEQ ID NO: 1529666 - RNA, 19 nt, Human
ucugcaucagcugcugaaa

SEQ ID NO: 1529667 - RNA, 21 nt, Human
ucugcaucagcugcugaaaca

SEQ ID NO: 1529668 - RNA, 17 nt, Human
ucugaaauuuccuggga

SEQ ID NO: 1529669 - RNA, 18 nt, Human
ucugaaauuuccugggag

SEQ ID NO: 1529670 - RNA, 20 nt, Human
ucugaaauuuccugggagcu

SEQ ID NO: 1529671 - RNA, 16 nt, Human
ucugacacacagcucu

SEQ ID NO: 1529672 - RNA, 17 nt, Human
ucugacacacagcucug

SEQ ID NO: 1529673 - RNA, 18 nt, Human
ucugacacacagcucugu

SEQ ID NO: 1529674 - RNA, 19 nt, Human
ucugacacacagcucuguc

SEQ ID NO: 1529675 - RNA, 13 nt, Human
ucugacccacugc

SEQ ID NO: 1529676 - RNA, 12 nt, Human
ucugacaggcaa

SEQ ID NO: 1529677 - RNA, 21 nt, Human
ucugacaggcaaugcuggcug

SEQ ID NO: 1529678 - RNA, 22 nt, Human
ucugacaggcaaugcuggcugu

SEQ ID NO: 1529679 - RNA, 14 nt, Human
ucugaaaauguaug

SEQ ID NO: 1529680 - RNA, 13 nt, Human
ucugaaaauguau

SEQ ID NO: 1529681 - RNA, 16 nt, Human
ucucuuagcuccccuc

SEQ ID NO: 1529682 - RNA, 17 nt, Human
ucucuuagcuccccucc

SEQ ID NO: 1529683 - RNA, 18 nt, Human
ucucuuagcuccccucca

SEQ ID NO: 1529684 - RNA, 19 nt, Human
ucucuuagcuccccuccaa

SEQ ID NO: 1529685 - RNA, 13 nt, Human
ucguuaauuugua

SEQ ID NO: 1529686 - RNA, 21 nt, Human
ucuaaaucuccaaaauaaaac

SEQ ID NO: 1529687 - RNA, 22 nt, Human
ucuaaaucuccaaaauaaaacu

SEQ ID NO: 1529688 - RNA, 21 nt, Human
ucguggaacaguuaccucugc

SEQ ID NO: 1529689 - RNA, 22 nt, Human
ucgugggacagucaccucaugg

SEQ ID NO: 1529690 - RNA, 22 nt, Human
ucgugccaccccgagggcugag

SEQ ID NO: 1529691 - RNA, 16 nt, Human
ucgugauugauaagaa

SEQ ID NO: 1529692 - RNA, 18 nt, Human
ucggccuccauccugagg

SEQ ID NO: 1529693 - RNA, 23 nt, Human
ucuaggacugaauuaugaaacuu

SEQ ID NO: 1529694 - RNA, 16 nt, Human
ucuaggacugaauuau

SEQ ID NO: 1529695 - RNA, 22 nt, Human
ucuagugagcagucaggaaaga

SEQ ID NO: 1529696 - RNA, 19 nt, Human
ucuagugagcagucaggaa

SEQ ID NO: 1529697 - RNA, 18 nt, Human
ucuaggaggucucuaaga

SEQ ID NO: 1529698 - RNA, 14 nt, Human
ucuaauauguaaca

SEQ ID NO: 1529699 - RNA, 14 nt, Human
ucuaugaaauauua

SEQ ID NO: 1529700 - RNA, 17 nt, Human
ucuaugaaauauuaugu

SEQ ID NO: 1529701 - RNA, 18 nt, Human
ucuaugaaauauuauguu

SEQ ID NO: 1529702 - RNA, 15 nt, Human
ucuaucaaguauuau

SEQ ID NO: 1529703 - RNA, 22 nt, Human
ucuaucaaguauuauaccuuuu

SEQ ID NO: 1529704 - RNA, 21 nt, Human
ucuaucaaguauuauaccuuu

SEQ ID NO: 1529705 - RNA, 17 nt, Human
ucucaaauaacuaaaag

SEQ ID NO: 1529706 - RNA, 16 nt, Human
uccuuggacucauuuu

SEQ ID NO: 1529707 - RNA, 23 nt, Human
uccuuuucacaguucucuccuuc

SEQ ID NO: 1529708 - RNA, 13 nt, Human
ucgaacuggcugc

SEQ ID NO: 1529709 - RNA, 18 nt, Human
uccuuuucgcaggauucu

SEQ ID NO: 1529710 - RNA, 21 nt, Human
uccuucaccuuuguccccacc

SEQ ID NO: 1529711 - RNA, 22 nt, Human
uccuucaccuuuguccccaccg

SEQ ID NO: 1529712 - RNA, 16 nt, Human
uccuuaccagcagagc

SEQ ID NO: 1529713 - RNA, 17 nt, Human
uccuuaccagcagagca

SEQ ID NO: 1529714 - RNA, 18 nt, Human
uccuuaccagcagagcac

SEQ ID NO: 1529715 - RNA, 18 nt, Human
uccuucacagaugggugc

SEQ ID NO: 1529716 - RNA, 19 nt, Human
uccuucacagaugggugcu

SEQ ID NO: 1529717 - RNA, 20 nt, Human
uccuuaccagcagagcaccu

SEQ ID NO: 1529718 - RNA, 18 nt, Human
uccuucaccuuugucccc

SEQ ID NO: 1529719 - RNA, 20 nt, Human
uccuucaccuuuguccccac

SEQ ID NO: 1529720 - RNA, 17 nt, Human
uccugccucagccuccc

SEQ ID NO: 1529721 - RNA, 16 nt, Human
uccugccucagccucc

SEQ ID NO: 1529722 - RNA, 13 nt, Human
uccugccucagcc

SEQ ID NO: 1529723 - RNA, 15 nt, Human
uccugccucagccuc

SEQ ID NO: 1529724 - RNA, 14 nt, Human
uccuggcacccggc

SEQ ID NO: 1529725 - RNA, 16 nt, Human
uccuggcacccggccc

SEQ ID NO: 1529726 - RNA, 19 nt, Human
uccuggcacccggccccug

SEQ ID NO: 1529727 - RNA, 14 nt, Human
uccugccucagccu

SEQ ID NO: 1529728 - RNA, 20 nt, Human
uccugccuaagugcagcccc

SEQ ID NO: 1529729 - RNA, 14 nt, Human
uccugagccagauu

SEQ ID NO: 1529730 - RNA, 13 nt, Human
uccugagccagau

SEQ ID NO: 1529731 - RNA, 20 nt, Human
uccuguaccucuugagccuu

SEQ ID NO: 1529732 - RNA, 22 nt, Human
uccuguaccucuugagccuuga

SEQ ID NO: 1529733 - RNA, 18 nt, Human
uccuggcacugcuuccag

SEQ ID NO: 1529734 - RNA, 22 nt, Human
uccuggcacugcuuccagugag

SEQ ID NO: 1529735 - RNA, 20 nt, Human
uccuggcacccggccccugc

SEQ ID NO: 1529736 - RNA, 21 nt, Human
uccuggcacccggccccugcu

SEQ ID NO: 1529737 - RNA, 22 nt, Human
uccuggcacccggccccugcug

SEQ ID NO: 1529738 - RNA, 16 nt, Human
ucccuauuagagaaga

SEQ ID NO: 1529739 - RNA, 17 nt, Human
uccagguuuaagcuguu

SEQ ID NO: 1529740 - RNA, 18 nt, Human
uccagguuuaagcuguua

SEQ ID NO: 1529741 - RNA, 20 nt, Human
uccccuguuuguuucugaaa

SEQ ID NO: 1529742 - RNA, 21 nt, Human
uccccuguuuguuucugaaag

SEQ ID NO: 1529743 - RNA, 15 nt, Human
ucccuugaugaagaa

SEQ ID NO: 1529744 - RNA, 16 nt, Human
ucccuugaugaagaag

SEQ ID NO: 1529745 - RNA, 14 nt, Human
ucccuucccaccuc

SEQ ID NO: 1529746 - RNA, 13 nt, Human
ucccuucccaccu

SEQ ID NO: 1529747 - RNA, 13 nt, Human
ucccugcacuugc

SEQ ID NO: 1529748 - RNA, 20 nt, Human
ucccugcacuugcagacucu

SEQ ID NO: 1529749 - RNA, 14 nt, Human
ucccugcacuugca

SEQ ID NO: 1529750 - RNA, 16 nt, Human
uccuaaucuucugaac

SEQ ID NO: 1529751 - RNA, 13 nt, Human
uccgaccagacac

SEQ ID NO: 1529752 - RNA, 17 nt, Human
uccgaccagacaccuug

SEQ ID NO: 1529753 - RNA, 18 nt, Human
uccuacccacccuccuuu

SEQ ID NO: 1529754 - RNA, 17 nt, Human
uccucauuagcauuuug

SEQ ID NO: 1529755 - RNA, 21 nt, Human
uccuauauuguuuucagugua

SEQ ID NO: 1529756 - RNA, 18 nt, Human
uccuauauuguuuucagu

SEQ ID NO: 1529757 - RNA, 23 nt, Human
uccuccacucucccccacccccu

SEQ ID NO: 1529758 - RNA, 16 nt, Human
uccuccacucuccccc

SEQ ID NO: 1529759 - RNA, 19 nt, Human
uccuccacucucccccacc

SEQ ID NO: 1529760 - RNA, 19 nt, Human
uccuccuuuucacaguucu

SEQ ID NO: 1529761 - RNA, 14 nt, Human
uccucuaggagguc

SEQ ID NO: 1529762 - RNA, 16 nt, Human
uccucuguacagagcc

SEQ ID NO: 1529763 - RNA, 17 nt, Human
uccucuguacagagccc

SEQ ID NO: 1529764 - RNA, 18 nt, Human
uccucuguacagagccca

SEQ ID NO: 1529765 - RNA, 19 nt, Human
uccucuguacagagcccac

SEQ ID NO: 1529766 - RNA, 17 nt, Human
uccucugcugcuggcug

SEQ ID NO: 1529767 - RNA, 17 nt, Human
uccucuaggaggucucu

SEQ ID NO: 1529768 - RNA, 14 nt, Human
uccucugcugcugg

SEQ ID NO: 1529769 - RNA, 15 nt, Human
uccucugcugcuggc

SEQ ID NO: 1529770 - RNA, 16 nt, Human
uccucugcugcuggcu

SEQ ID NO: 1529771 - RNA, 20 nt, Human
uauucuaaauuuuauaucuu

SEQ ID NO: 1529772 - RNA, 15 nt, Human
uauucuaaauuuuau

SEQ ID NO: 1529773 - RNA, 19 nt, Human
uauucuaaauuuuauaucu

SEQ ID NO: 1529774 - RNA, 19 nt, Human
uauucuagcuaauguaaua

SEQ ID NO: 1529775 - RNA, 14 nt, Human
uauucuaaauuuua

SEQ ID NO: 1529776 - RNA, 16 nt, Human
uauuauucccauucua

SEQ ID NO: 1529777 - RNA, 22 nt, Human
uauuccagacuugggaggaugu

SEQ ID NO: 1529778 - RNA, 22 nt, Human
uauuguuuucaguguacaugga

SEQ ID NO: 1529779 - RNA, 18 nt, Human
uauuguuuucaguguaca

SEQ ID NO: 1529780 - RNA, 20 nt, Human
uauuguuuucaguguacaug

SEQ ID NO: 1529781 - RNA, 12 nt, Human
uauuguuuucag

SEQ ID NO: 1529782 - RNA, 17 nt, Human
uauucucuccuguaccu

SEQ ID NO: 1529783 - RNA, 18 nt, Human
uauucucuccuguaccuc

SEQ ID NO: 1529784 - RNA, 17 nt, Human
uauugcugauggugcaa

SEQ ID NO: 1529785 - RNA, 22 nt, Human
uauugcugauggugcaaugacc

SEQ ID NO: 1529786 - RNA, 22 nt, Human
uauuggaaauuuguuauaauga

SEQ ID NO: 1529787 - RNA, 13 nt, Human
uauguacuucaug

SEQ ID NO: 1529788 - RNA, 17 nt, Human
uauguacuucaugcugu

SEQ ID NO: 1529789 - RNA, 13 nt, Human
gggaguggccaca

SEQ ID NO: 1529790 - RNA, 15 nt, Human
gggaguggccacaga

SEQ ID NO: 1529791 - RNA, 13 nt, Human
uauguugcccagg

SEQ ID NO: 1529792 - RNA, 16 nt, Human
uauguugcccaggcag

SEQ ID NO: 1529793 - RNA, 19 nt, Human
uauguugcccaggcagguc

SEQ ID NO: 1529794 - RNA, 20 nt, Human
uauguugcccaggcaggucu

SEQ ID NO: 1529795 - RNA, 13 nt, Human
uauguuucaaacu

SEQ ID NO: 1529796 - RNA, 15 nt, Human
uauguuucaaacuuu

SEQ ID NO: 1529797 - RNA, 16 nt, Human
uauguuucaaacuuug

SEQ ID NO: 1529798 - RNA, 12 nt, Human
uauuaauauauu

SEQ ID NO: 1529799 - RNA, 12 nt, Human
uauuaaauuaug

SEQ ID NO: 1529800 - RNA, 19 nt, Human
uauuaaauuaaauuuugug

SEQ ID NO: 1529801 - RNA, 21 nt, Human
uauuaaauuaaauuuuguguc

SEQ ID NO: 1529802 - RNA, 16 nt, Human
ucaaauaugcaaagca

SEQ ID NO: 1529803 - RNA, 14 nt, Human
ucaaauaugcaaag

SEQ ID NO: 1529804 - RNA, 20 nt, Human
ucaaaucaagaaacuuaagg

SEQ ID NO: 1529805 - RNA, 15 nt, Human
ucaaauccuugaaga

SEQ ID NO: 1529806 - RNA, 14 nt, Human
ucaaauugugugaa

SEQ ID NO: 1529807 - RNA, 15 nt, Human
ucaaauugugugaaa

SEQ ID NO: 1529808 - RNA, 23 nt, Human
ucaaccccuucgcuccugugucu

SEQ ID NO: 1529809 - RNA, 22 nt, Human
uauuuucccuauuagagaagag

SEQ ID NO: 1529810 - RNA, 17 nt, Human
uauuuuuuucuuuucuu

SEQ ID NO: 1529811 - RNA, 14 nt, Human
uauuuuuuuacuaa

SEQ ID NO: 1529812 - RNA, 14 nt, Human
ucaaaaaaagaaaa

SEQ ID NO: 1529813 - RNA, 15 nt, Human
ucaaaaaaagaaaaa

SEQ ID NO: 1529814 - RNA, 16 nt, Human
uauuuuccaugaaaau

SEQ ID NO: 1529815 - RNA, 20 nt, Human
uauuuuccaugaaaaugcaa

SEQ ID NO: 1529816 - RNA, 17 nt, Human
uauuuuauuaugcauga

SEQ ID NO: 1529817 - RNA, 14 nt, Human
uauuuuauuaugca

SEQ ID NO: 1529818 - RNA, 17 nt, Human
ucaaugccccugaauuu

SEQ ID NO: 1529819 - RNA, 18 nt, Human
ucaaugccccugaauuua

SEQ ID NO: 1529820 - RNA, 20 nt, Human
ucaaugccccugaauuuaaa

SEQ ID NO: 1529821 - RNA, 22 nt, Human
ucaaugccccugaauuuaaaua

SEQ ID NO: 1529822 - RNA, 18 nt, Human
ucaaugguuugcaaggaa

SEQ ID NO: 1529823 - RNA, 19 nt, Human
ucaaugguuugcaaggaag

SEQ ID NO: 1529824 - RNA, 21 nt, Human
ucaauuacaggaaguacugga

SEQ ID NO: 1529825 - RNA, 23 nt, Human
ucaauuacaggaaguacuggaga

SEQ ID NO: 1529826 - RNA, 21 nt, Human
ucaauaaaauccauacauuug

SEQ ID NO: 1529827 - RNA, 20 nt, Human
ucaagugauucuccugccuc

SEQ ID NO: 1529828 - RNA, 21 nt, Human
ucaagugauucuccugccuca

SEQ ID NO: 1529829 - RNA, 16 nt, Human
ucaccacaugugcaca

SEQ ID NO: 1529830 - RNA, 14 nt, Human
ucaccaaggcugau

SEQ ID NO: 1529831 - RNA, 21 nt, Human
ucaccaaaucagcugcuacua

SEQ ID NO: 1529832 - RNA, 19 nt, Human
ucaccaaaucagcugcuac

SEQ ID NO: 1529833 - RNA, 20 nt, Human
ucaccaaaucagcugcuacu

SEQ ID NO: 1529834 - RNA, 18 nt, Human
ucacauuuauucugcuca

SEQ ID NO: 1529835 - RNA, 19 nt, Human
ucacauuuauucugcucac

SEQ ID NO: 1529836 - RNA, 17 nt, Human
ucacauuuauucugcuc

SEQ ID NO: 1529837 - RNA, 13 nt, Human
ucacaagacccaa

SEQ ID NO: 1529838 - RNA, 17 nt, Human
ucacaagacccaaaagg

SEQ ID NO: 1529839 - RNA, 18 nt, Human
ucacaagacccaaaaggc

SEQ ID NO: 1529840 - RNA, 16 nt, Human
ucacagucacauucca

SEQ ID NO: 1529841 - RNA, 19 nt, Human
ucacaguccuuaccagcag

SEQ ID NO: 1529842 - RNA, 22 nt, Human
ucacaguccuuaccagcagagc

SEQ ID NO: 1529843 - RNA, 23 nt, Human
ucacaguccuuaccagcagagca

SEQ ID NO: 1529844 - RNA, 17 nt, Human
ucacaggcagguccagg

SEQ ID NO: 1529845 - RNA, 18 nt, Human
ucacaggcagguccaggg

SEQ ID NO: 1529846 - RNA, 19 nt, Human
ucacaggcagguccagggu

SEQ ID NO: 1529847 - RNA, 21 nt, Human
ucauucaacccaccugcgucu

SEQ ID NO: 1529848 - RNA, 19 nt, Human
ucauuaucucaaaacugca

SEQ ID NO: 1529849 - RNA, 20 nt, Human
ucauuaucucaaaacugcac

SEQ ID NO: 1529850 - RNA, 13 nt, Human
ucauuaucucaaa

SEQ ID NO: 1529851 - RNA, 23 nt, Human
ucauuucaccccucccuuucucc

SEQ ID NO: 1529852 - RNA, 14 nt, Human
ucauuucaccccuc

SEQ ID NO: 1529853 - RNA, 15 nt, Human
ucauuucaccccucc

SEQ ID NO: 1529854 - RNA, 16 nt, Human
ucauuucaccccuccc

SEQ ID NO: 1529855 - RNA, 21 nt, Human
ucauuucaccccucccuuucu

SEQ ID NO: 1529856 - RNA, 13 nt, Human
ucauuuccaagca

SEQ ID NO: 1529857 - RNA, 16 nt, Human
ucauuuccaagcaagu

SEQ ID NO: 1529858 - RNA, 13 nt, Human
ucauuuccugugu

SEQ ID NO: 1529859 - RNA, 16 nt, Human
ucauuuccugugucuu

SEQ ID NO: 1529860 - RNA, 15 nt, Human
ucauacucaccucac

SEQ ID NO: 1529861 - RNA, 19 nt, Human
ucaucaccaacgucugugc

SEQ ID NO: 1529862 - RNA, 20 nt, Human
ucaucaccaacgucugugcc

SEQ ID NO: 1529863 - RNA, 21 nt, Human
ucaucaccaacgucugugcca

SEQ ID NO: 1529864 - RNA, 15 nt, Human
ucaggugcugccauc

SEQ ID NO: 1529865 - RNA, 18 nt, Human
ucauaccuaucaucuuaa

SEQ ID NO: 1529866 - RNA, 21 nt, Human
ucaggugagaagcagaggaag

SEQ ID NO: 1529867 - RNA, 23 nt, Human
ucaggugagaagcagaggaagga

SEQ ID NO: 1529868 - RNA, 13 nt, Human
ucaggugcugcca

SEQ ID NO: 1529869 - RNA, 14 nt, Human
ucaggugcugccau

SEQ ID NO: 1529870 - RNA, 21 nt, Human
ucaucugcucuccuuccugga

SEQ ID NO: 1529871 - RNA, 17 nt, Human
ucaucugcucuccuucc

SEQ ID NO: 1529872 - RNA, 18 nt, Human
ucaucugcucuccuuccu

SEQ ID NO: 1529873 - RNA, 23 nt, Human
ucaucuuagguuggcaaaaaggc

SEQ ID NO: 1529874 - RNA, 12 nt, Human
ucaucugcucuc

SEQ ID NO: 1529875 - RNA, 14 nt, Human
ucaucugcucuccu

SEQ ID NO: 1529876 - RNA, 15 nt, Human
ucaucugcucuccuu

SEQ ID NO: 1529877 - RNA, 16 nt, Human
ucaucugcucuccuuc

SEQ ID NO: 1529878 - RNA, 19 nt, Human
ucaucuugaauuguaagga

SEQ ID NO: 1529879 - RNA, 17 nt, Human
ucaucugacuaugacau

SEQ ID NO: 1529880 - RNA, 18 nt, Human
ucaucugacuaugacaua

SEQ ID NO: 1529881 - RNA, 15 nt, Human
uccaggugcacaagc

SEQ ID NO: 1529882 - RNA, 23 nt, Human
uccaggggugggacacccuguga

SEQ ID NO: 1529883 - RNA, 22 nt, Human
uccaggagcagccacauuccug

SEQ ID NO: 1529884 - RNA, 17 nt, Human
uccaggagcagccacau

SEQ ID NO: 1529885 - RNA, 18 nt, Human
uccaggagcagccacauu

SEQ ID NO: 1529886 - RNA, 15 nt, Human
uccagguucagcuug

SEQ ID NO: 1529887 - RNA, 16 nt, Human
uccagguucagcuugu

SEQ ID NO: 1529888 - RNA, 18 nt, Human
uccaggugcacaagcucc

SEQ ID NO: 1529889 - RNA, 20 nt, Human
uccaggugcacaagcuccaa

SEQ ID NO: 1529890 - RNA, 21 nt, Human
uccaggugcacaagcuccaag

SEQ ID NO: 1529891 - RNA, 22 nt, Human
uccaggugcacaagcuccaagc

SEQ ID NO: 1529892 - RNA, 17 nt, Human
uccacuuggucugugag

SEQ ID NO: 1529893 - RNA, 15 nt, Human
uccacuuggucugug

SEQ ID NO: 1529894 - RNA, 16 nt, Human
uccacuuggucuguga

SEQ ID NO: 1529895 - RNA, 18 nt, Human
uccagcucaccagcccca

SEQ ID NO: 1529896 - RNA, 16 nt, Human
uccagcucaccagccc

SEQ ID NO: 1529897 - RNA, 17 nt, Human
uccagcucaccagcccc

SEQ ID NO: 1529898 - RNA, 17 nt, Human
uccagcuguucagcugg

SEQ ID NO: 1529899 - RNA, 16 nt, Human
uccaggagcagccaca

SEQ ID NO: 1529900 - RNA, 19 nt, Human
uccacagaagcuccaggua

SEQ ID NO: 1529901 - RNA, 12 nt, Human
uccacccugcuc

SEQ ID NO: 1529902 - RNA, 13 nt, Human
uccacccugcucu

SEQ ID NO: 1529903 - RNA, 18 nt, Human
uccaccugccagggacag

SEQ ID NO: 1529904 - RNA, 21 nt, Human
uccaccugccagggacagagg

SEQ ID NO: 1529905 - RNA, 17 nt, Human
uccaccugccagggaca

SEQ ID NO: 1529906 - RNA, 15 nt, Human
uccaccugccaggga

SEQ ID NO: 1529907 - RNA, 19 nt, Human
uccaaaauaauuuuaagaa

SEQ ID NO: 1529908 - RNA, 15 nt, Human
uccaaaauaauuuua

SEQ ID NO: 1529909 - RNA, 18 nt, Human
uccaaaauaaaacuuuuu

SEQ ID NO: 1529910 - RNA, 20 nt, Human
uccaaaauaaaacuuuuuaa

SEQ ID NO: 1529911 - RNA, 17 nt, Human
uccaauuuacauacucu

SEQ ID NO: 1529912 - RNA, 18 nt, Human
uccaauuuacauacucug

SEQ ID NO: 1529913 - RNA, 17 nt, Human
uccacaaguuaaauaaa

SEQ ID NO: 1529914 - RNA, 18 nt, Human
uccacaaguuaaauaaau

SEQ ID NO: 1529915 - RNA, 16 nt, Human
uccacaagagcccagg

SEQ ID NO: 1529916 - RNA, 17 nt, Human
uccacaagagcccaggc

SEQ ID NO: 1529917 - RNA, 18 nt, Human
uccacaagagcccaggcc

SEQ ID NO: 1529918 - RNA, 19 nt, Human
uccacaagagcccaggccu

SEQ ID NO: 1529919 - RNA, 13 nt, Human
ucagacagcugcc

SEQ ID NO: 1529920 - RNA, 14 nt, Human
ucagacagcugccu

SEQ ID NO: 1529921 - RNA, 20 nt, Human
ucacuuguuuuauuuaaccu

SEQ ID NO: 1529922 - RNA, 10 nt, Human
ucagaaaugu

SEQ ID NO: 1529923 - RNA, 23 nt, Human
ucagaauucucuaguuugauuaa

SEQ ID NO: 1529924 - RNA, 15 nt, Human
ucagaaauguguuau

SEQ ID NO: 1529925 - RNA, 20 nt, Human
ucacucuuauugcccacgcu

SEQ ID NO: 1529926 - RNA, 18 nt, Human
ucacugccaugccagcuu

SEQ ID NO: 1529927 - RNA, 19 nt, Human
ucaccccugguucucaucu

SEQ ID NO: 1529928 - RNA, 17 nt, Human
ucacucuuauugcccac

SEQ ID NO: 1529929 - RNA, 14 nt, Human
ucaccccucccuuu

SEQ ID NO: 1529930 - RNA, 17 nt, Human
ucaccccucccuuucuc

SEQ ID NO: 1529931 - RNA, 18 nt, Human
ucaccccucccuuucucc

SEQ ID NO: 1529932 - RNA, 20 nt, Human
ucaccccucccuuucucccc

SEQ ID NO: 1529933 - RNA, 15 nt, Human
ucaccccugguucuc

SEQ ID NO: 1529934 - RNA, 18 nt, Human
ucaccccugguucucauc

SEQ ID NO: 1529935 - RNA, 13 nt, Human
ucaccagccccag

SEQ ID NO: 1529936 - RNA, 16 nt, Human
ucaccagccccagugc

SEQ ID NO: 1529937 - RNA, 14 nt, Human
ucacugcuuaacuu

SEQ ID NO: 1529938 - RNA, 15 nt, Human
ucagauaugauucaa

SEQ ID NO: 1529939 - RNA, 20 nt, Human
ucagccucccgaguagcugg

SEQ ID NO: 1529940 - RNA, 18 nt, Human
ucagccucccgaguagcu

SEQ ID NO: 1529941 - RNA, 21 nt, Human
ucagccucccgaauagcuggg

SEQ ID NO: 1529942 - RNA, 22 nt, Human
ucagccucccgaauagcuggga

SEQ ID NO: 1529943 - RNA, 14 nt, Human
ucagccucccaaag

SEQ ID NO: 1529944 - RNA, 19 nt, Human
ucagccucccaaagugcug

SEQ ID NO: 1529945 - RNA, 21 nt, Human
ucagccucccaaagugcuggg

SEQ ID NO: 1529946 - RNA, 21 nt, Human
ucagccucccgaguagcuggg

SEQ ID NO: 1529947 - RNA, 22 nt, Human
ucagccucccgaguagcuggga

SEQ ID NO: 1529948 - RNA, 18 nt, Human
ucagccugcuccagcugu

SEQ ID NO: 1529949 - RNA, 19 nt, Human
ucagccugcuccagcuguu

SEQ ID NO: 1529950 - RNA, 17 nt, Human
ucagcuccccucggaga

SEQ ID NO: 1529951 - RNA, 15 nt, Human
ucagcugaaccuggg

SEQ ID NO: 1529952 - RNA, 16 nt, Human
ucagcugaaccugggu

SEQ ID NO: 1529953 - RNA, 18 nt, Human
ucagcuccccucggagaa

SEQ ID NO: 1529954 - RNA, 21 nt, Human
ucagcuccccucggagaagag

SEQ ID NO: 1529955 - RNA, 23 nt, Human
ucaggagccgaagcccaggggcc

SEQ ID NO: 1529956 - RNA, 13 nt, Human
ucaggcuagaugu

SEQ ID NO: 1529957 - RNA, 17 nt, Human
ucaggcuagauguaugu

SEQ ID NO: 1529958 - RNA, 14 nt, Human
ucagggccuggcuc

SEQ ID NO: 1529959 - RNA, 16 nt, Human
ucagggccuggcucag

SEQ ID NO: 1529960 - RNA, 15 nt, Human
ucaggugagaagcag

SEQ ID NO: 1529961 - RNA, 16 nt, Human
ucaggugagaagcaga

SEQ ID NO: 1529962 - RNA, 17 nt, Human
gggaggacgcucucugg

SEQ ID NO: 1529963 - RNA, 20 nt, Human
gggaggacgcucucuggccu

SEQ ID NO: 1529964 - RNA, 23 nt, Human
gggaggaucucuugagccuggga

SEQ ID NO: 1529965 - RNA, 22 nt, Human
gggaggauguucugggacacag

SEQ ID NO: 1529966 - RNA, 21 nt, Human
gggaggauugcuugagcucag

SEQ ID NO: 1529967 - RNA, 21 nt, Human
gggagugaguugauagcacag

SEQ ID NO: 1529968 - RNA, 17 nt, Human
gggagugacagaggcag

SEQ ID NO: 1529969 - RNA, 11 nt, Human
gggaggcagag

SEQ ID NO: 1529970 - RNA, 20 nt, Human
gggaggugggauccuccagg

SEQ ID NO: 1529971 - RNA, 23 nt, Human
gggaggauugcuugagcucagga

SEQ ID NO: 1529972 - RNA, 13 nt, Human
gggagcugccugu

SEQ ID NO: 1529973 - RNA, 21 nt, Human
gggagcugccuguucagcucc

SEQ ID NO: 1529974 - RNA, 22 nt, Human
gggagcugccuguucagcucca

SEQ ID NO: 1529975 - RNA, 14 nt, Human
gggaauugaggaca

SEQ ID NO: 1529976 - RNA, 19 nt, Human
gggaauguuugccucugcc

SEQ ID NO: 1529977 - RNA, 21 nt, Human
gggaauguuugccucugccuc

SEQ ID NO: 1529978 - RNA, 14 nt, Human
gggacacccuguga

SEQ ID NO: 1529979 - RNA, 23 nt, Human
gggacucaaugcacugacauugu

SEQ ID NO: 1529980 - RNA, 21 nt, Human
gggacugaggggaggggagca

SEQ ID NO: 1529981 - RNA, 17 nt, Human
gggacucaaugcacuga

SEQ ID NO: 1529982 - RNA, 19 nt, Human
gggacucaaugcacugaca

SEQ ID NO: 1529983 - RNA, 21 nt, Human
ggcuucacggaagagccuugc

SEQ ID NO: 1529984 - RNA, 22 nt, Human
ggcuuagggacaggaccccagc

SEQ ID NO: 1529985 - RNA, 14 nt, Human
ggcuuagucacuga

SEQ ID NO: 1529986 - RNA, 15 nt, Human
ggcuuagucacugag

SEQ ID NO: 1529987 - RNA, 20 nt, Human
ggcuucacggaagagccuug

SEQ ID NO: 1529988 - RNA, 17 nt, Human
ggcuuggggaccagagc

SEQ ID NO: 1529989 - RNA, 18 nt, Human
ggcuuggggaccagagcu

SEQ ID NO: 1529990 - RNA, 19 nt, Human
ggcuuggggaccagagcug

SEQ ID NO: 1529991 - RNA, 14 nt, Human
ggcuguuggcuggg

SEQ ID NO: 1529992 - RNA, 15 nt, Human
ggcuguuggcugggg

SEQ ID NO: 1529993 - RNA, 16 nt, Human
ggcuguuggcuggggg

SEQ ID NO: 1529994 - RNA, 20 nt, Human
ggcuguuggcugggggccuc

SEQ ID NO: 1529995 - RNA, 15 nt, Human
ggcuuaaaacaacac

SEQ ID NO: 1529996 - RNA, 20 nt, Human
ggcugggcucccuucccacc

SEQ ID NO: 1529997 - RNA, 21 nt, Human
ggcugggcucccuucccaccu

SEQ ID NO: 1529998 - RNA, 11 nt, Human
ggcugggcuuc

SEQ ID NO: 1529999 - RNA, 21 nt, Human
ggcugggcuucaguggcagcu

SEQ ID NO: 1530000 - RNA, 22 nt, Human
ggcugggcuucaguggcagcug

SEQ ID NO: 1530001 - RNA, 16 nt, Human
ggcugggggaagaagc

SEQ ID NO: 1530002 - RNA, 14 nt, Human
ggcugggggccuca

SEQ ID NO: 1530003 - RNA, 18 nt, Human
ggcuggagcuagaauuug

SEQ ID NO: 1530004 - RNA, 21 nt, Human
ggcugcuucaaggauccugag

SEQ ID NO: 1530005 - RNA, 20 nt, Human
ggcugcuucaaggauccuga

SEQ ID NO: 1530006 - RNA, 17 nt, Human
ggcuggacugaggccug

SEQ ID NO: 1530007 - RNA, 18 nt, Human
ggcuggacugaggccuga

SEQ ID NO: 1530008 - RNA, 13 nt, Human
ggcuggacugagg

SEQ ID NO: 1530009 - RNA, 14 nt, Human
ggcuggacugaggc

SEQ ID NO: 1530010 - RNA, 16 nt, Human
ggcuggacugaggccu

SEQ ID NO: 1530011 - RNA, 17 nt, Human
ggcucugccucccauca

SEQ ID NO: 1530012 - RNA, 15 nt, Human
ggcugcuucaaggau

SEQ ID NO: 1530013 - RNA, 19 nt, Human
ggcugcuucaaggauccug

SEQ ID NO: 1530014 - RNA, 14 nt, Human
ggcccagagggccu

SEQ ID NO: 1530015 - RNA, 17 nt, Human
ggcccagagggccugca

SEQ ID NO: 1530016 - RNA, 19 nt, Human
ggcccagagggccugcaag

SEQ ID NO: 1530017 - RNA, 20 nt, Human
ggcccagagggccugcaagg

SEQ ID NO: 1530018 - RNA, 23 nt, Human
ggccuagcauacguacacauuuu

SEQ ID NO: 1530019 - RNA, 22 nt, Human
ggccuagcauacguacacauuu

SEQ ID NO: 1530020 - RNA, 20 nt, Human
ggccuagcauacguacacau

SEQ ID NO: 1530021 - RNA, 14 nt, Human
ggccucaagugauu

SEQ ID NO: 1530022 - RNA, 22 nt, Human
ggccucaagugauucuccugcc

SEQ ID NO: 1530023 - RNA, 23 nt, Human
ggccucaagugauucuccugccu

SEQ ID NO: 1530024 - RNA, 14 nt, Human
ggccuccugugugu

SEQ ID NO: 1530025 - RNA, 20 nt, Human
ggccugagauuucaucugcu

SEQ ID NO: 1530026 - RNA, 22 nt, Human
ggccugagauuucaucugcucu

SEQ ID NO: 1530027 - RNA, 12 nt, Human
ggccugagcugg

SEQ ID NO: 1530028 - RNA, 13 nt, Human
ggccuggccccuc

SEQ ID NO: 1530029 - RNA, 22 nt, Human
ggccucugcacuccccugcugg

SEQ ID NO: 1530030 - RNA, 18 nt, Human
ggccucugcacuccccug

SEQ ID NO: 1530031 - RNA, 19 nt, Human
ggccucugcacuccccugc

SEQ ID NO: 1530032 - RNA, 14 nt, Human
ggccuggccccuca

SEQ ID NO: 1530033 - RNA, 15 nt, Human
ggccuggccccucag

SEQ ID NO: 1530034 - RNA, 17 nt, Human
ggccuggccccucaggg

SEQ ID NO: 1530035 - RNA, 18 nt, Human
ggccuggccccucagggu

SEQ ID NO: 1530036 - RNA, 23 nt, Human
ggccuggccccucagggucccug

SEQ ID NO: 1530037 - RNA, 10 nt, Human
ggccuggccu

SEQ ID NO: 1530038 - RNA, 13 nt, Human
ggccuggccugag

SEQ ID NO: 1530039 - RNA, 14 nt, Human
ggccuggccugagc

SEQ ID NO: 1530040 - RNA, 18 nt, Human
ggccugagcgcuccugcc

SEQ ID NO: 1530041 - RNA, 19 nt, Human
ggccuggccugagcuggga

SEQ ID NO: 1530042 - RNA, 15 nt, Human
ggccuggccugagcu

SEQ ID NO: 1530043 - RNA, 16 nt, Human
ggccuggccugagcug

SEQ ID NO: 1530044 - RNA, 23 nt, Human
ggccugggggcugggcagaggaa

SEQ ID NO: 1530045 - RNA, 23 nt, Human
ggcgcagcauauucaggaagcuc

SEQ ID NO: 1530046 - RNA, 24 nt, Human
ggcgcagcauauucaggaagcuca

SEQ ID NO: 1530047 - RNA, 16 nt, Human
ggcucugccucccauc

SEQ ID NO: 1530048 - RNA, 14 nt, Human
ggcucugcccuugg

SEQ ID NO: 1530049 - RNA, 15 nt, Human
ggcucugcccuuggu

SEQ ID NO: 1530050 - RNA, 13 nt, Human
ggcucugccuccc

SEQ ID NO: 1530051 - RNA, 15 nt, Human
ggcucugccucccau

SEQ ID NO: 1530052 - RNA, 12 nt, Human
ggcucugcccuu

SEQ ID NO: 1530053 - RNA, 17 nt, Human
ggcucccaugucaagag

SEQ ID NO: 1530054 - RNA, 15 nt, Human
ggcuccaggcuccuu

SEQ ID NO: 1530055 - RNA, 14 nt, Human
ggcuccaggcuccu

SEQ ID NO: 1530056 - RNA, 15 nt, Human
ggcucucaggccagc

SEQ ID NO: 1530057 - RNA, 16 nt, Human
ggcucucaggccagcu

SEQ ID NO: 1530058 - RNA, 17 nt, Human
ggcucucaggccagcug

SEQ ID NO: 1530059 - RNA, 18 nt, Human
ggcucucaggccagcugc

SEQ ID NO: 1530060 - RNA, 19 nt, Human
ggcucucaggccagcugcu

SEQ ID NO: 1530061 - RNA, 20 nt, Human
ggcucucaggccagcugcuu

SEQ ID NO: 1530062 - RNA, 9 nt, Human
ggcuccaga

SEQ ID NO: 1530063 - RNA, 14 nt, Human
ggcuaugcauuuga

SEQ ID NO: 1530064 - RNA, 15 nt, Human
ggcucacacugagaa

SEQ ID NO: 1530065 - RNA, 17 nt, Human
ggcucacacugagaaug

SEQ ID NO: 1530066 - RNA, 18 nt, Human
ggcucacacugagaaugu

SEQ ID NO: 1530067 - RNA, 13 nt, Human
ggcuaugcauuug

SEQ ID NO: 1530068 - RNA, 12 nt, Human
ggcuaugcauuu

SEQ ID NO: 1530069 - RNA, 10 nt, Human
ggcuccagac

SEQ ID NO: 1530070 - RNA, 14 nt, Human
ggcuccaggagcag

SEQ ID NO: 1530071 - RNA, 16 nt, Human
ggcuccaggagcagcc

SEQ ID NO: 1530072 - RNA, 18 nt, Human
ggcuccaggagcagccac

SEQ ID NO: 1530073 - RNA, 17 nt, Human
ggcuccaggagcagcca

SEQ ID NO: 1530074 - RNA, 12 nt, Human
ggcuccaggcuc

SEQ ID NO: 1530075 - RNA, 13 nt, Human
ggcuccaggcucc

SEQ ID NO: 1530076 - RNA, 14 nt, Human
ggcggucccagcuc

SEQ ID NO: 1530077 - RNA, 15 nt, Human
ggcggucccagcucc

SEQ ID NO: 1530078 - RNA, 20 nt, Human
ggcuaguaucaaaagaaaga

SEQ ID NO: 1530079 - RNA, 23 nt, Human
ggcuauaggugcuacaaaaacac

SEQ ID NO: 1530080 - RNA, 18 nt, Human
ggcgcugccccuggcagc

SEQ ID NO: 1530081 - RNA, 17 nt, Human
ggcgcugccccuggcag

SEQ ID NO: 1530082 - RNA, 11 nt, Human
ggcgcugcccc

SEQ ID NO: 1530083 - RNA, 14 nt, Human
ggagcuagaauuug

SEQ ID NO: 1530084 - RNA, 15 nt, Human
ggagccuccugcccu

SEQ ID NO: 1530085 - RNA, 14 nt, Human
ggagccuccugccc

SEQ ID NO: 1530086 - RNA, 21 nt, Human
ggagaccccuuggggagcagg

SEQ ID NO: 1530087 - RNA, 17 nt, Human
ggagggagggcuccaga

SEQ ID NO: 1530088 - RNA, 13 nt, Human
ggagggagggcuc

SEQ ID NO: 1530089 - RNA, 16 nt, Human
ggagggagggcuccag

SEQ ID NO: 1530090 - RNA, 19 nt, Human
ggaggacgcucucuggccu

SEQ ID NO: 1530091 - RNA, 16 nt, Human
ggaggacgcucucugg

SEQ ID NO: 1530092 - RNA, 18 nt, Human
ggaggauguucugggaca

SEQ ID NO: 1530093 - RNA, 21 nt, Human
ggaggauguucugggacacag

SEQ ID NO: 1530094 - RNA, 22 nt, Human
ggagucccaccuuggcugcagg

SEQ ID NO: 1530095 - RNA, 13 nt, Human
ggacugaggccug

SEQ ID NO: 1530096 - RNA, 14 nt, Human
ggacugaggccuga

SEQ ID NO: 1530097 - RNA, 11 nt, Human
ggagaagaacu

SEQ ID NO: 1530098 - RNA, 14 nt, Human
ggagaagaacugaa

SEQ ID NO: 1530099 - RNA, 15 nt, Human
ggagaagagcuguuc

SEQ ID NO: 1530100 - RNA, 19 nt, Human
ggagaagccacaggccuga

SEQ ID NO: 1530101 - RNA, 20 nt, Human
ggagaagccacaggccugag

SEQ ID NO: 1530102 - RNA, 23 nt, Human
ggagaagagcuguucacagccag

SEQ ID NO: 1530103 - RNA, 18 nt, Human
ggagaagccacaggccug

SEQ ID NO: 1530104 - RNA, 17 nt, Human
ggacugaauuaugaaac

SEQ ID NO: 1530105 - RNA, 19 nt, Human
ggacugaauuaugaaacuu

SEQ ID NO: 1530106 - RNA, 16 nt, Human
ggacgcucucuggccu

SEQ ID NO: 1530107 - RNA, 19 nt, Human
ggacgcucucuggccuucg

SEQ ID NO: 1530108 - RNA, 18 nt, Human
ggaccuugaacuggguac

SEQ ID NO: 1530109 - RNA, 17 nt, Human
ggacauuugcucaugga

SEQ ID NO: 1530110 - RNA, 20 nt, Human
ggacauuugcucauggaauu

SEQ ID NO: 1530111 - RNA, 19 nt, Human
ggaccagagcugccaccug

SEQ ID NO: 1530112 - RNA, 20 nt, Human
ggacagaggggguggccucc

SEQ ID NO: 1530113 - RNA, 11 nt, Human
ggacagcuccu

SEQ ID NO: 1530114 - RNA, 15 nt, Human
ggacagcuccuucug

SEQ ID NO: 1530115 - RNA, 16 nt, Human
ggacagcuccuucugu

SEQ ID NO: 1530116 - RNA, 17 nt, Human
ggacagcuccuucuguc

SEQ ID NO: 1530117 - RNA, 16 nt, Human
ggacagaggggguggc

SEQ ID NO: 1530118 - RNA, 14 nt, Human
ggacagaagaaggc

SEQ ID NO: 1530119 - RNA, 18 nt, Human
ggaugccugguggcagcu

SEQ ID NO: 1530120 - RNA, 19 nt, Human
ggaugccugguggcagcug

SEQ ID NO: 1530121 - RNA, 20 nt, Human
ggaugccugguggcagcugc

SEQ ID NO: 1530122 - RNA, 21 nt, Human
ggaugccugguggcagcugcg

SEQ ID NO: 1530123 - RNA, 18 nt, Human
ggaugcccaaagaugcag

SEQ ID NO: 1530124 - RNA, 19 nt, Human
ggaugcccaaagaugcagc

SEQ ID NO: 1530125 - RNA, 13 nt, Human
ggaugccuggugg

SEQ ID NO: 1530126 - RNA, 17 nt, Human
ggaugccugguggcagc

SEQ ID NO: 1530127 - RNA, 16 nt, Human
ggaugaucuaggaaga

SEQ ID NO: 1530128 - RNA, 18 nt, Human
ggaugaucuaggaagacu

SEQ ID NO: 1530129 - RNA, 22 nt, Human
ggaugaucuaggaagacuuugg

SEQ ID NO: 1530130 - RNA, 23 nt, Human
ggagucccaccuuggcugcaggg

SEQ ID NO: 1530131 - RNA, 21 nt, Human
ggcagagguugcagugagccg

SEQ ID NO: 1530132 - RNA, 20 nt, Human
ggcacccaccaucaugucug

SEQ ID NO: 1530133 - RNA, 18 nt, Human
ggcacccggccccugcug

SEQ ID NO: 1530134 - RNA, 19 nt, Human
ggcacccggccccugcugg

SEQ ID NO: 1530135 - RNA, 20 nt, Human
ggcacccggccccugcuggu

SEQ ID NO: 1530136 - RNA, 18 nt, Human
ggcacucagaagacacug

SEQ ID NO: 1530137 - RNA, 19 nt, Human
ggcacucagaagacacuga

SEQ ID NO: 1530138 - RNA, 20 nt, Human
ggcacucagaagacacugau

SEQ ID NO: 1530139 - RNA, 17 nt, Human
ggcaagcaccuccugcc

SEQ ID NO: 1530140 - RNA, 21 nt, Human
ggauucuuccucccucccucu

SEQ ID NO: 1530141 - RNA, 15 nt, Human
ggcaaggcugucaau

SEQ ID NO: 1530142 - RNA, 17 nt, Human
ggcaccagcagccugga

SEQ ID NO: 1530143 - RNA, 18 nt, Human
ggcaagcaccuccugccu

SEQ ID NO: 1530144 - RNA, 19 nt, Human
ggcaagcaccuccugccuc

SEQ ID NO: 1530145 - RNA, 22 nt, Human
ggccacagaaaauucuucucca

SEQ ID NO: 1530146 - RNA, 20 nt, Human
ggcauguucucugaggacac

SEQ ID NO: 1530147 - RNA, 15 nt, Human
ggccacuucugggug

SEQ ID NO: 1530148 - RNA, 20 nt, Human
ggccacugugaagagaacca

SEQ ID NO: 1530149 - RNA, 21 nt, Human
ggccacuucuggguggggcag

SEQ ID NO: 1530150 - RNA, 11 nt, Human
ggccaggagcc

SEQ ID NO: 1530151 - RNA, 13 nt, Human
ggccaggagccuc

SEQ ID NO: 1530152 - RNA, 14 nt, Human
ggccaggcccucug

SEQ ID NO: 1530153 - RNA, 17 nt, Human
ggccaggcccucugccc

SEQ ID NO: 1530154 - RNA, 15 nt, Human
ggccaggcccucugc

SEQ ID NO: 1530155 - RNA, 16 nt, Human
ggccaggcccucugcc

SEQ ID NO: 1530156 - RNA, 17 nt, Human
ggcagggucucacucug

SEQ ID NO: 1530157 - RNA, 18 nt, Human
ggcagggucucacucugu

SEQ ID NO: 1530158 - RNA, 23 nt, Human
ggcagcugcgguccacccaggag

SEQ ID NO: 1530159 - RNA, 24 nt, Human
ggcagcugcgguccacccaggagc

SEQ ID NO: 1530160 - RNA, 22 nt, Human
ggcagcugcuuuugucuauggg

SEQ ID NO: 1530161 - RNA, 12 nt, Human
ggcaggguccua

SEQ ID NO: 1530162 - RNA, 21 nt, Human
ggcagaguucuauaauguaaa

SEQ ID NO: 1530163 - RNA, 17 nt, Human
ggcagaguugaagacag

SEQ ID NO: 1530164 - RNA, 19 nt, Human
ggcagaguugaagacagag

SEQ ID NO: 1530165 - RNA, 21 nt, Human
ggcagaguugaagacagagcu

SEQ ID NO: 1530166 - RNA, 18 nt, Human
ggcaugugaugagaggaa

SEQ ID NO: 1530167 - RNA, 23 nt, Human
ggcaugugaugagaggaaaucac

SEQ ID NO: 1530168 - RNA, 21 nt, Human
gcucucaggccagcugcuugg

SEQ ID NO: 1530169 - RNA, 22 nt, Human
gcugacuguuuucucuugagag

SEQ ID NO: 1530170 - RNA, 20 nt, Human
gcugacagacacaggcccgg

SEQ ID NO: 1530171 - RNA, 18 nt, Human
gcugacagacacaggccc

SEQ ID NO: 1530172 - RNA, 19 nt, Human
gcugacagacacaggcccg

SEQ ID NO: 1530173 - RNA, 22 nt, Human
gcugcaaaggguaucaggugcu

SEQ ID NO: 1530174 - RNA, 23 nt, Human
gcugcaaaggguaucaggugcug

SEQ ID NO: 1530175 - RNA, 21 nt, Human
gcugauuaaaccaaggcuaga

SEQ ID NO: 1530176 - RNA, 19 nt, Human
gcugcauuuaaaagauaca

SEQ ID NO: 1530177 - RNA, 18 nt, Human
gcugcauuuaaaagauac

SEQ ID NO: 1530178 - RNA, 17 nt, Human
gcugcaguugccaguca

SEQ ID NO: 1530179 - RNA, 13 nt, Human
gcugcaguugcca

SEQ ID NO: 1530180 - RNA, 14 nt, Human
gcugcaguugccag

SEQ ID NO: 1530181 - RNA, 13 nt, Human
gcugccaccugcc

SEQ ID NO: 1530182 - RNA, 12 nt, Human
gcugccaccugc

SEQ ID NO: 1530183 - RNA, 16 nt, Human
gcuggaccuugaacug

SEQ ID NO: 1530184 - RNA, 15 nt, Human
gcuggaccuugaacu

SEQ ID NO: 1530185 - RNA, 21 nt, Human
gcuggaaaaguauguuagugc

SEQ ID NO: 1530186 - RNA, 23 nt, Human
gcuggaaaaguauguuagugcaa

SEQ ID NO: 1530187 - RNA, 22 nt, Human
gcugcuuuugucuaugggacuc

SEQ ID NO: 1530188 - RNA, 20 nt, Human
gcugccuguucagcuccagc

SEQ ID NO: 1530189 - RNA, 22 nt, Human
gcugccuguucagcuccagcuc

SEQ ID NO: 1530190 - RNA, 18 nt, Human
gcugccuguucagcucca

SEQ ID NO: 1530191 - RNA, 19 nt, Human
gcugccuguucagcuccag

SEQ ID NO: 1530192 - RNA, 14 nt, Human
gcugcgguccaccc

SEQ ID NO: 1530193 - RNA, 15 nt, Human
gcugcgguccaccca

SEQ ID NO: 1530194 - RNA, 22 nt, Human
gcugcgguccacccaggagccc

SEQ ID NO: 1530195 - RNA, 16 nt, Human
gcugcgguccacccag

SEQ ID NO: 1530196 - RNA, 21 nt, Human
gcugcgguccacccaggagcc

SEQ ID NO: 1530197 - RNA, 12 nt, Human
gcugcccugccc

SEQ ID NO: 1530198 - RNA, 13 nt, Human
gcugcccugccca

SEQ ID NO: 1530199 - RNA, 14 nt, Human
gcugcccugcccac

SEQ ID NO: 1530200 - RNA, 16 nt, Human
gcugcccugcccaccu

SEQ ID NO: 1530201 - RNA, 18 nt, Human
gcugcccugcccaccugg

SEQ ID NO: 1530202 - RNA, 20 nt, Human
gcugcccugcccaccuggcc

SEQ ID NO: 1530203 - RNA, 21 nt, Human
gcugcccugcccaccuggccu

SEQ ID NO: 1530204 - RNA, 22 nt, Human
gcugcccugcccaccuggccuc

SEQ ID NO: 1530205 - RNA, 23 nt, Human
gcugcccugcccaccuggccucu

SEQ ID NO: 1530206 - RNA, 24 nt, Human
gcugcccugcccaccuggccucug

SEQ ID NO: 1530207 - RNA, 15 nt, Human
gcugugucucccuuc

SEQ ID NO: 1530208 - RNA, 18 nt, Human
gcuguguuaaauaaaccu

SEQ ID NO: 1530209 - RNA, 16 nt, Human
gcuggugucaccugaa

SEQ ID NO: 1530210 - RNA, 17 nt, Human
gcugucagccauuccug

SEQ ID NO: 1530211 - RNA, 14 nt, Human
gcuggugucaccug

SEQ ID NO: 1530212 - RNA, 15 nt, Human
gcuggugucaccuga

SEQ ID NO: 1530213 - RNA, 23 nt, Human
gcugucccuuacgugaguccugg

SEQ ID NO: 1530214 - RNA, 16 nt, Human
gcugucccuuuuccuu

SEQ ID NO: 1530215 - RNA, 14 nt, Human
gcugggggccucag

SEQ ID NO: 1530216 - RNA, 15 nt, Human
gcugggggccucagu

SEQ ID NO: 1530217 - RNA, 18 nt, Human
gcugggggccucagugcc

SEQ ID NO: 1530218 - RNA, 14 nt, Human
gcuggucccacuca

SEQ ID NO: 1530219 - RNA, 21 nt, Human
gcugggcuucaguggcagcug

SEQ ID NO: 1530220 - RNA, 22 nt, Human
gcugggcuucaguggcagcugc

SEQ ID NO: 1530221 - RNA, 21 nt, Human
gcugggaugauuggagggggg

SEQ ID NO: 1530222 - RNA, 20 nt, Human
gcugggcuucaguggcagcu

SEQ ID NO: 1530223 - RNA, 16 nt, Human
gcuggccuggccccuc

SEQ ID NO: 1530224 - RNA, 19 nt, Human
gcugggaugauuggagggg

SEQ ID NO: 1530225 - RNA, 21 nt, Human
gcugggcucccuucccaccuc

SEQ ID NO: 1530226 - RNA, 13 nt, Human
gcuggccuggccc

SEQ ID NO: 1530227 - RNA, 14 nt, Human
gcuggccuggcccc

SEQ ID NO: 1530228 - RNA, 15 nt, Human
gcuggccuggccccu

SEQ ID NO: 1530229 - RNA, 12 nt, Human
gcuuguguuaag

SEQ ID NO: 1530230 - RNA, 18 nt, Human
gcuuggaaacuggaugag

SEQ ID NO: 1530231 - RNA, 19 nt, Human
gcuucuguuuuauaauuuu

SEQ ID NO: 1530232 - RNA, 22 nt, Human
gcuucucacugccaugccagcu

SEQ ID NO: 1530233 - RNA, 19 nt, Human
gcuucaguggcagcugcuu

SEQ ID NO: 1530234 - RNA, 20 nt, Human
gcuucaguggcagcugcuuu

SEQ ID NO: 1530235 - RNA, 13 nt, Human
gcuuaucucaggg

SEQ ID NO: 1530236 - RNA, 24 nt, Human
gcuccgcuuucuacccagcgagcc

SEQ ID NO: 1530237 - RNA, 12 nt, Human
gcuccugugucu

SEQ ID NO: 1530238 - RNA, 13 nt, Human
gcuccugugucuu

SEQ ID NO: 1530239 - RNA, 15 nt, Human
gcuccuucuguccua

SEQ ID NO: 1530240 - RNA, 13 nt, Human
gcuccuucugucc

SEQ ID NO: 1530241 - RNA, 17 nt, Human
gcuccuuuagcgcccag

SEQ ID NO: 1530242 - RNA, 19 nt, Human
gcucgagcaugccuggaug

SEQ ID NO: 1530243 - RNA, 21 nt, Human
gcucgagcaugccuggauggg

SEQ ID NO: 1530244 - RNA, 11 nt, Human
gcuccaggagc

SEQ ID NO: 1530245 - RNA, 12 nt, Human
gcuccaggagca

SEQ ID NO: 1530246 - RNA, 14 nt, Human
gcuccaggagcagc

SEQ ID NO: 1530247 - RNA, 21 nt, Human
gcuccagcuguucagcugguu

SEQ ID NO: 1530248 - RNA, 15 nt, Human
gcuccaggagcagcc

SEQ ID NO: 1530249 - RNA, 16 nt, Human
gcuccaggagcagcca

SEQ ID NO: 1530250 - RNA, 17 nt, Human
gcuccaggagcagccac

SEQ ID NO: 1530251 - RNA, 18 nt, Human
gcuccaggagcagccaca

SEQ ID NO: 1530252 - RNA, 12 nt, Human
gcuccaggcucc

SEQ ID NO: 1530253 - RNA, 13 nt, Human
gcuccaggcuccu

SEQ ID NO: 1530254 - RNA, 20 nt, Human
gcucccuucccaccucucuc

SEQ ID NO: 1530255 - RNA, 18 nt, Human
gcuccgcuuucuacccag

SEQ ID NO: 1530256 - RNA, 21 nt, Human
gcuccgcuuucuacccagcga

SEQ ID NO: 1530257 - RNA, 22 nt, Human
gcuccgcuuucuacccagcgag

SEQ ID NO: 1530258 - RNA, 23 nt, Human
gcuccgcuuucuacccagcgagc

SEQ ID NO: 1530259 - RNA, 17 nt, Human
gcucagcggggacagcu

SEQ ID NO: 1530260 - RNA, 18 nt, Human
gcucagcggggacagcuc

SEQ ID NO: 1530261 - RNA, 19 nt, Human
gcucagcggggacagcucc

SEQ ID NO: 1530262 - RNA, 23 nt, Human
gcucagcggggacagcuccuucu

SEQ ID NO: 1530263 - RNA, 16 nt, Human
gcucaccucucccuug

SEQ ID NO: 1530264 - RNA, 17 nt, Human
gcucaccucucccuugg

SEQ ID NO: 1530265 - RNA, 18 nt, Human
gcucaccucucccuugga

SEQ ID NO: 1530266 - RNA, 13 nt, Human
gcucacacugaga

SEQ ID NO: 1530267 - RNA, 14 nt, Human
gcucacacugagaa

SEQ ID NO: 1530268 - RNA, 22 nt, Human
gcucacacugagaauguaagaa

SEQ ID NO: 1530269 - RNA, 16 nt, Human
gcucacauaucuguca

SEQ ID NO: 1530270 - RNA, 12 nt, Human
gcucaccagccc

SEQ ID NO: 1530271 - RNA, 13 nt, Human
gcucaccagcccc

SEQ ID NO: 1530272 - RNA, 14 nt, Human
gcucaccagcccca

SEQ ID NO: 1530273 - RNA, 15 nt, Human
gcucaccagccccag

SEQ ID NO: 1530274 - RNA, 18 nt, Human
gcucaccagccccagugc

SEQ ID NO: 1530275 - RNA, 13 nt, Human
gcuaucuccccca

SEQ ID NO: 1530276 - RNA, 18 nt, Human
gcucaaguccucuuuucu

SEQ ID NO: 1530277 - RNA, 14 nt, Human
gcuaucucccccag

SEQ ID NO: 1530278 - RNA, 15 nt, Human
gcuaucucccccagc

SEQ ID NO: 1530279 - RNA, 19 nt, Human
gcucaaguccucuuuucug

SEQ ID NO: 1530280 - RNA, 22 nt, Human
gcucaaguccucuuuucugaga

SEQ ID NO: 1530281 - RNA, 19 nt, Human
gcuauccagcuauuuuuau

SEQ ID NO: 1530282 - RNA, 21 nt, Human
gcuauaggugcuacaaaaaca

SEQ ID NO: 1530283 - RNA, 14 nt, Human
gcuagauguaugua

SEQ ID NO: 1530284 - RNA, 16 nt, Human
gcuagauguauguacu

SEQ ID NO: 1530285 - RNA, 13 nt, Human
gcuagauguaugu

SEQ ID NO: 1530286 - RNA, 19 nt, Human
gcggugcuaucucccccag

SEQ ID NO: 1530287 - RNA, 22 nt, Human
gcggugcuaucucccccagccc

SEQ ID NO: 1530288 - RNA, 21 nt, Human
gcgccuuaaggauguucuagc

SEQ ID NO: 1530289 - RNA, 23 nt, Human
gcgcccaguuggguggaugccug

SEQ ID NO: 1530290 - RNA, 18 nt, Human
gcgccaaauaaugucucu

SEQ ID NO: 1530291 - RNA, 16 nt, Human
gcggagaaaggaaggg

SEQ ID NO: 1530292 - RNA, 19 nt, Human
gcggagacggagucccacc

SEQ ID NO: 1530293 - RNA, 14 nt, Human
gcggggacagcucc

SEQ ID NO: 1530294 - RNA, 18 nt, Human
gcgcugccccuggcagcc

SEQ ID NO: 1530295 - RNA, 21 nt, Human
gcgcugccccuggcagccccu

SEQ ID NO: 1530296 - RNA, 18 nt, Human
gcggggacagcuccuucu

SEQ ID NO: 1530297 - RNA, 15 nt, Human
gcggggacagcuccu

SEQ ID NO: 1530298 - RNA, 17 nt, Human
gcggggacagcuccuuc

SEQ ID NO: 1530299 - RNA, 19 nt, Human
gcggugagaggggaacaga

SEQ ID NO: 1530300 - RNA, 13 nt, Human
gcgguccacccag

SEQ ID NO: 1530301 - RNA, 14 nt, Human
gcgguccacccagg

SEQ ID NO: 1530302 - RNA, 15 nt, Human
gccuuacacaauggu

SEQ ID NO: 1530303 - RNA, 16 nt, Human
gccuuacacaaugguu

SEQ ID NO: 1530304 - RNA, 12 nt, Human
gcgacaaugcaa

SEQ ID NO: 1530305 - RNA, 13 nt, Human
gcgacaaugcaaa

SEQ ID NO: 1530306 - RNA, 20 nt, Human
gcgacaaugcaaaccaucau

SEQ ID NO: 1530307 - RNA, 21 nt, Human
gcgacaaugcaaaccaucauu

SEQ ID NO: 1530308 - RNA, 13 nt, Human
gccuggccccuca

SEQ ID NO: 1530309 - RNA, 14 nt, Human
gccuggccccucag

SEQ ID NO: 1530310 - RNA, 20 nt, Human
gccuggccagaugcaccagc

SEQ ID NO: 1530311 - RNA, 21 nt, Human
gccuggccagaugcaccagcc

SEQ ID NO: 1530312 - RNA, 22 nt, Human
gccuggccagaugcaccagccc

SEQ ID NO: 1530313 - RNA, 21 nt, Human
gccuggucccacgagggugcc

SEQ ID NO: 1530314 - RNA, 15 nt, Human
gccuguaauccuagc

SEQ ID NO: 1530315 - RNA, 20 nt, Human
gccuguaauccuagcacuuu

SEQ ID NO: 1530316 - RNA, 16 nt, Human
gccuggauggggcugc

SEQ ID NO: 1530317 - RNA, 18 nt, Human
gccuggauggggcugcac

SEQ ID NO: 1530318 - RNA, 20 nt, Human
gccuggauggggcugcaccg

SEQ ID NO: 1530319 - RNA, 14 nt, Human
gccuggacccugug

SEQ ID NO: 1530320 - RNA, 12 nt, Human
gccugagcuggg

SEQ ID NO: 1530321 - RNA, 22 nt, Human
gccugagcgcuccugccgcaga

SEQ ID NO: 1530322 - RNA, 23 nt, Human
gccugagcgcuccugccgcagag

SEQ ID NO: 1530323 - RNA, 17 nt, Human
gccugagcgacagugag

SEQ ID NO: 1530324 - RNA, 20 nt, Human
gccugagcgacagugagacu

SEQ ID NO: 1530325 - RNA, 17 nt, Human
gccugaagucacacagu

SEQ ID NO: 1530326 - RNA, 18 nt, Human
gccugaagucacacagug

SEQ ID NO: 1530327 - RNA, 19 nt, Human
gcccaguuggguggaugcc

SEQ ID NO: 1530328 - RNA, 21 nt, Human
gcccaguuggguggaugccug

SEQ ID NO: 1530329 - RNA, 22 nt, Human
gcccaguuggguggaugccugg

SEQ ID NO: 1530330 - RNA, 16 nt, Human
gccugaagucacacag

SEQ ID NO: 1530331 - RNA, 22 nt, Human
gccaccugcggugcuaucuccc

SEQ ID NO: 1530332 - RNA, 14 nt, Human
gccaccugcggugc

SEQ ID NO: 1530333 - RNA, 20 nt, Human
gccaccugcggugcuaucuc

SEQ ID NO: 1530334 - RNA, 19 nt, Human
gccacggccaggccagagg

SEQ ID NO: 1530335 - RNA, 18 nt, Human
gccacggccaggccagag

SEQ ID NO: 1530336 - RNA, 17 nt, Human
gccaccugccuguuggg

SEQ ID NO: 1530337 - RNA, 20 nt, Human
gccagagacacaagccuucg

SEQ ID NO: 1530338 - RNA, 10 nt, Human
gccagaggag

SEQ ID NO: 1530339 - RNA, 16 nt, Human
gccagagacacaagcc

SEQ ID NO: 1530340 - RNA, 19 nt, Human
gccagacuggcacaguuuu

SEQ ID NO: 1530341 - RNA, 17 nt, Human
gccagagacacaagccu

SEQ ID NO: 1530342 - RNA, 19 nt, Human
gccagagacacaagccuuc

SEQ ID NO: 1530343 - RNA, 20 nt, Human
gccacuauuguuagucucuu

SEQ ID NO: 1530344 - RNA, 15 nt, Human
gccagacuggcacag

SEQ ID NO: 1530345 - RNA, 18 nt, Human
gccagacuggcacaguuu

SEQ ID NO: 1530346 - RNA, 12 nt, Human
gccagaggagag

SEQ ID NO: 1530347 - RNA, 13 nt, Human
gccagaggagaga

SEQ ID NO: 1530348 - RNA, 15 nt, Human
gccagaggagagagg

SEQ ID NO: 1530349 - RNA, 17 nt, Human
gccagaggagagaggac

SEQ ID NO: 1530350 - RNA, 19 nt, Human
gccagaggagagaggaccc

SEQ ID NO: 1530351 - RNA, 22 nt, Human
gccagaggagagaggacccccu

SEQ ID NO: 1530352 - RNA, 21 nt, Human
gccagagggagugacagaggc

SEQ ID NO: 1530353 - RNA, 22 nt, Human
gccagagggagugacagaggca

SEQ ID NO: 1530354 - RNA, 23 nt, Human
gccagagggagugacagaggcag

SEQ ID NO: 1530355 - RNA, 16 nt, Human
gccagaugcaccagcc

SEQ ID NO: 1530356 - RNA, 17 nt, Human
gccagaugcaccagccc

SEQ ID NO: 1530357 - RNA, 18 nt, Human
gccagaugcaccagcccu

SEQ ID NO: 1530358 - RNA, 16 nt, Human
gccacaagacccuugu

SEQ ID NO: 1530359 - RNA, 22 nt, Human
gccacaagacccuugugguccc

SEQ ID NO: 1530360 - RNA, 12 nt, Human
gccacaggccug

SEQ ID NO: 1530361 - RNA, 13 nt, Human
gccacaggccuga

SEQ ID NO: 1530362 - RNA, 15 nt, Human
gccacaggccugaga

SEQ ID NO: 1530363 - RNA, 20 nt, Human
gccacaggccugagauuuca

SEQ ID NO: 1530364 - RNA, 22 nt, Human
gccacaggccugagauuucauc

SEQ ID NO: 1530365 - RNA, 23 nt, Human
gccacaggccugagauuucaucu

SEQ ID NO: 1530366 - RNA, 23 nt, Human
gccacagagaaaguacuucucca

SEQ ID NO: 1530367 - RNA, 13 nt, Human
gccacagagaaag

SEQ ID NO: 1530368 - RNA, 14 nt, Human
gccacagagaaagu

SEQ ID NO: 1530369 - RNA, 20 nt, Human
gccacagagaaaguacuucu

SEQ ID NO: 1530370 - RNA, 14 nt, Human
gccaaggugggagg

SEQ ID NO: 1530371 - RNA, 15 nt, Human
gccaaggugggagga

SEQ ID NO: 1530372 - RNA, 23 nt, Human
gccaaggugggaggauugcuuga

SEQ ID NO: 1530373 - RNA, 23 nt, Human
gcauuuggugguuucagaaaugu

SEQ ID NO: 1530374 - RNA, 22 nt, Human
gcauuuggugguuucagaaaug

SEQ ID NO: 1530375 - RNA, 20 nt, Human
gcauuugaggucuguucuuu

SEQ ID NO: 1530376 - RNA, 19 nt, Human
gcauuugaggucuguucuu

SEQ ID NO: 1530377 - RNA, 21 nt, Human
gcauuugaggucuguucuuuc

SEQ ID NO: 1530378 - RNA, 21 nt, Human
gccaaggcugggggaagaagc

SEQ ID NO: 1530379 - RNA, 19 nt, Human
gccaugggcacugugggua

SEQ ID NO: 1530380 - RNA, 23 nt, Human
gccaugggacagggaggacgcuc

SEQ ID NO: 1530381 - RNA, 18 nt, Human
gccauggacagaagaagg

SEQ ID NO: 1530382 - RNA, 15 nt, Human
gcccaaagaugcagc

SEQ ID NO: 1530383 - RNA, 19 nt, Human
gccaugccagcuuaucuca

SEQ ID NO: 1530384 - RNA, 13 nt, Human
gccaugccagcuu

SEQ ID NO: 1530385 - RNA, 18 nt, Human
gccaugccagcuuaucuc

SEQ ID NO: 1530386 - RNA, 18 nt, Human
gccaugaggaacaaggca

SEQ ID NO: 1530387 - RNA, 20 nt, Human
gccaugaggaacaaggcaag

SEQ ID NO: 1530388 - RNA, 19 nt, Human
gccagugaugcuaaagguu

SEQ ID NO: 1530389 - RNA, 20 nt, Human
gccagugaugcuaaagguug

SEQ ID NO: 1530390 - RNA, 12 nt, Human
gccaguaaaugg

SEQ ID NO: 1530391 - RNA, 17 nt, Human
gccagguuuuuggucug

SEQ ID NO: 1530392 - RNA, 21 nt, Human
gccagucaccccggccaccug

SEQ ID NO: 1530393 - RNA, 20 nt, Human
gccagucaccccggccaccu

SEQ ID NO: 1530394 - RNA, 17 nt, Human
gccagucaccccggcca

SEQ ID NO: 1530395 - RNA, 18 nt, Human
gccagucaccccggccac

SEQ ID NO: 1530396 - RNA, 13 nt, Human
gccagggacagag

SEQ ID NO: 1530397 - RNA, 16 nt, Human
gccagggacagagggg

SEQ ID NO: 1530398 - RNA, 18 nt, Human
gccagggacagagggggu

SEQ ID NO: 1530399 - RNA, 23 nt, Human
gccagggacagaggggguggccu

SEQ ID NO: 1530400 - RNA, 19 nt, Human
gccagauuuuccugaaaac

SEQ ID NO: 1530401 - RNA, 16 nt, Human
gccagauuucacucuc

SEQ ID NO: 1530402 - RNA, 18 nt, Human
gccagauuucacucuccu

SEQ ID NO: 1530403 - RNA, 21 nt, Human
gccagauuucacucuccuugg

SEQ ID NO: 1530404 - RNA, 22 nt, Human
gcccaauucuuacaaacaugug

SEQ ID NO: 1530405 - RNA, 21 nt, Human
gcccaaugcacuuuguucugg

SEQ ID NO: 1530406 - RNA, 15 nt, Human
gcccagagagggugg

SEQ ID NO: 1530407 - RNA, 16 nt, Human
gcccagaggagggcag

SEQ ID NO: 1530408 - RNA, 23 nt, Human
gcccagaggagggcagcagaagg

SEQ ID NO: 1530409 - RNA, 12 nt, Human
gcccagagggcc

SEQ ID NO: 1530410 - RNA, 14 nt, Human
gcccagagggccug

SEQ ID NO: 1530411 - RNA, 15 nt, Human
gcccagagggccugc

SEQ ID NO: 1530412 - RNA, 18 nt, Human
gcccagagggccugcaag

SEQ ID NO: 1530413 - RNA, 19 nt, Human
gcccagagggccugcaagg

SEQ ID NO: 1530414 - RNA, 22 nt, Human
gcccagagggccugcaagggag

SEQ ID NO: 1530415 - RNA, 20 nt, Human
gcccagagggccugcaaggg

SEQ ID NO: 1530416 - RNA, 21 nt, Human
gcccagagggccugcaaggga

SEQ ID NO: 1530417 - RNA, 9 nt, Human
gcccagccc

SEQ ID NO: 1530418 - RNA, 11 nt, Human
gcccagccccu

SEQ ID NO: 1530419 - RNA, 12 nt, Human
gcccagccccuu

SEQ ID NO: 1530420 - RNA, 20 nt, Human
gcccagccccuucugaccca

SEQ ID NO: 1530421 - RNA, 24 nt, Human
gcccagccccuucugacccaugcu

SEQ ID NO: 1530422 - RNA, 13 nt, Human
gcccagccccuuc

SEQ ID NO: 1530423 - RNA, 14 nt, Human
gcccagccccuucu

SEQ ID NO: 1530424 - RNA, 16 nt, Human
gcccagccccuucuga

SEQ ID NO: 1530425 - RNA, 17 nt, Human
gcccagccccuucugac

SEQ ID NO: 1530426 - RNA, 22 nt, Human
gcccaggcuggcgugcaguggu

SEQ ID NO: 1530427 - RNA, 19 nt, Human
gcccaggcuggcgugcagu

SEQ ID NO: 1530428 - RNA, 20 nt, Human
gcccaggcuggcgugcagug

SEQ ID NO: 1530429 - RNA, 18 nt, Human
gcccaggaaaggcuccag

SEQ ID NO: 1530430 - RNA, 19 nt, Human
gcccaggaaaggcuccagg

SEQ ID NO: 1530431 - RNA, 20 nt, Human
gcccaggaaaggcuccagga

SEQ ID NO: 1530432 - RNA, 21 nt, Human
gcccaggaaaggcuccaggag

SEQ ID NO: 1530433 - RNA, 23 nt, Human
gcccaggcuuagucacugagaca

SEQ ID NO: 1530434 - RNA, 19 nt, Human
gcccaggcuuagucacuga

SEQ ID NO: 1530435 - RNA, 21 nt, Human
gcccaggcuuagucacugaga

SEQ ID NO: 1530436 - RNA, 19 nt, Human
gcccagucuggaaugcagu

SEQ ID NO: 1530437 - RNA, 20 nt, Human
gcccagucuggaaugcagug

SEQ ID NO: 1530438 - RNA, 19 nt, Human
gcaggguccuagaaauucc

SEQ ID NO: 1530439 - RNA, 16 nt, Human
gcagggucucacucug

SEQ ID NO: 1530440 - RNA, 22 nt, Human
gcaggggaggguagagcggaga

SEQ ID NO: 1530441 - RNA, 12 nt, Human
gcaggggagggg

SEQ ID NO: 1530442 - RNA, 18 nt, Human
gcaggcagccaggccaca

SEQ ID NO: 1530443 - RNA, 17 nt, Human
gcagggucucacucugu

SEQ ID NO: 1530444 - RNA, 11 nt, Human
gcagugggagc

SEQ ID NO: 1530445 - RNA, 12 nt, Human
gcagugggagcu

SEQ ID NO: 1530446 - RNA, 18 nt, Human
gcaguggugcgaucuggg

SEQ ID NO: 1530447 - RNA, 19 nt, Human
gcaguggugcgaucugggu

SEQ ID NO: 1530448 - RNA, 21 nt, Human
gcaguggugguuuucuguucu

SEQ ID NO: 1530449 - RNA, 20 nt, Human
gcaguggugguuuucuguuc

SEQ ID NO: 1530450 - RNA, 19 nt, Human
gcaguggugguuuucuguu

SEQ ID NO: 1530451 - RNA, 22 nt, Human
gcaguggugcgaucuggguuca

SEQ ID NO: 1530452 - RNA, 20 nt, Human
gcaguggugcgaucuggguu

SEQ ID NO: 1530453 - RNA, 21 nt, Human
gcaguggugcgaucuggguuc

SEQ ID NO: 1530454 - RNA, 22 nt, Human
gcaguggugguuuucuguucuu

SEQ ID NO: 1530455 - RNA, 16 nt, Human
gcaguugaaaagacuc

SEQ ID NO: 1530456 - RNA, 19 nt, Human
gcaguugaaaagacuccaa

SEQ ID NO: 1530457 - RNA, 19 nt, Human
gcauacguacacauuuuau

SEQ ID NO: 1530458 - RNA, 21 nt, Human
gcaguugaaaagacuccaaag

SEQ ID NO: 1530459 - RNA, 22 nt, Human
gcaguugaaaagacuccaaaga

SEQ ID NO: 1530460 - RNA, 23 nt, Human
gcaucaggccaggcccucugccc

SEQ ID NO: 1530461 - RNA, 13 nt, Human
gcaucaggccagg

SEQ ID NO: 1530462 - RNA, 12 nt, Human
gcaucaggccag

SEQ ID NO: 1530463 - RNA, 23 nt, Human
gcaucagcugcugaaacaacaaa

SEQ ID NO: 1530464 - RNA, 22 nt, Human
gcaucagcugcugaaacaacaa

SEQ ID NO: 1530465 - RNA, 22 nt, Human
gcaugaaguaauaugcacacau

SEQ ID NO: 1530466 - RNA, 21 nt, Human
gcaugaaguaauaugcacaca

SEQ ID NO: 1530467 - RNA, 20 nt, Human
gcaugaaguaauaugcacac

SEQ ID NO: 1530468 - RNA, 23 nt, Human
gcaugaaguaauaugcacacauu

SEQ ID NO: 1530469 - RNA, 21 nt, Human
gcaugacacgaauauugcuga

SEQ ID NO: 1530470 - RNA, 22 nt, Human
gcaugacacgaauauugcugau

SEQ ID NO: 1530471 - RNA, 18 nt, Human
gcauuugaggucuguucu

SEQ ID NO: 1530472 - RNA, 22 nt, Human
gcauuccccaggaggccagccu

SEQ ID NO: 1530473 - RNA, 14 nt, Human
gcauuccccaggag

SEQ ID NO: 1530474 - RNA, 15 nt, Human
gcauuccccaggagg

SEQ ID NO: 1530475 - RNA, 16 nt, Human
gcauuccccaggaggc

SEQ ID NO: 1530476 - RNA, 17 nt, Human
gcauuccccaggaggcc

SEQ ID NO: 1530477 - RNA, 18 nt, Human
gcauuccccaggaggcca

SEQ ID NO: 1530478 - RNA, 19 nt, Human
gcauuccccaggaggccag

SEQ ID NO: 1530479 - RNA, 20 nt, Human
gcauuccccaggaggccagc

SEQ ID NO: 1530480 - RNA, 21 nt, Human
gcauuccccaggaggccagcc

SEQ ID NO: 1530481 - RNA, 24 nt, Human
gcauuaucuagauacuguaucaug

SEQ ID NO: 1530482 - RNA, 22 nt, Human
gcauuaucuagauacuguauca

SEQ ID NO: 1530483 - RNA, 15 nt, Human
gcaugccuggauggg

SEQ ID NO: 1530484 - RNA, 13 nt, Human
gcauguuacauaa

SEQ ID NO: 1530485 - RNA, 14 nt, Human
gcauguucucugag

SEQ ID NO: 1530486 - RNA, 14 nt, Human
gcaugccuggaugg

SEQ ID NO: 1530487 - RNA, 15 nt, Human
gcacagccucuuaga

SEQ ID NO: 1530488 - RNA, 17 nt, Human
gcacagcccaaagaagg

SEQ ID NO: 1530489 - RNA, 20 nt, Human
gauugugucucuugguccug

SEQ ID NO: 1530490 - RNA, 18 nt, Human
gcacagccucuuagaugc

SEQ ID NO: 1530491 - RNA, 23 nt, Human
gcacagcuucauuuccugugucu

SEQ ID NO: 1530492 - RNA, 17 nt, Human
gcaccaucucuccuccu

SEQ ID NO: 1530493 - RNA, 14 nt, Human
gcaccagcagccug

SEQ ID NO: 1530494 - RNA, 13 nt, Human
gcaccagcagccu

SEQ ID NO: 1530495 - RNA, 14 nt, Human
gcaccaucucuccu

SEQ ID NO: 1530496 - RNA, 15 nt, Human
gcaccaucucuccuc

SEQ ID NO: 1530497 - RNA, 12 nt, Human
gcacugggcuug

SEQ ID NO: 1530498 - RNA, 19 nt, Human
gcacuguuuuauuuuaauu

SEQ ID NO: 1530499 - RNA, 14 nt, Human
gcacugggcuuggg

SEQ ID NO: 1530500 - RNA, 22 nt, Human
gcacuauaauguaagcucuacu

SEQ ID NO: 1530501 - RNA, 20 nt, Human
gcacuauaauguaagcucua

SEQ ID NO: 1530502 - RNA, 14 nt, Human
gcacuauaauguaa

SEQ ID NO: 1530503 - RNA, 15 nt, Human
gcacuauaauguaag

SEQ ID NO: 1530504 - RNA, 12 nt, Human
gcacugcuucca

SEQ ID NO: 1530505 - RNA, 13 nt, Human
gcacugcuuccag

SEQ ID NO: 1530506 - RNA, 14 nt, Human
gcacugcuuccagu

SEQ ID NO: 1530507 - RNA, 15 nt, Human
gcacugcuuccagug

SEQ ID NO: 1530508 - RNA, 14 nt, Human
gcacgugugugcac

SEQ ID NO: 1530509 - RNA, 17 nt, Human
gcacuaaaguuaguaaa

SEQ ID NO: 1530510 - RNA, 20 nt, Human
gcacuaaggugugcucugau

SEQ ID NO: 1530511 - RNA, 16 nt, Human
gcacccucaggcaggu

SEQ ID NO: 1530512 - RNA, 19 nt, Human
gcacccucaggcagguggg

SEQ ID NO: 1530513 - RNA, 18 nt, Human
gcagcucagagagggugg

SEQ ID NO: 1530514 - RNA, 19 nt, Human
gcagcucagagaggguggg

SEQ ID NO: 1530515 - RNA, 16 nt, Human
gcagcucaccucuccc

SEQ ID NO: 1530516 - RNA, 17 nt, Human
gcagcucaccucucccu

SEQ ID NO: 1530517 - RNA, 20 nt, Human
gcagcucaccucucccuugg

SEQ ID NO: 1530518 - RNA, 21 nt, Human
gcagcucaccucucccuugga

SEQ ID NO: 1530519 - RNA, 14 nt, Human
gcagcucagagagg

SEQ ID NO: 1530520 - RNA, 20 nt, Human
gcagcagggagggcuucugc

SEQ ID NO: 1530521 - RNA, 18 nt, Human
gcagcagggagggcuucu

SEQ ID NO: 1530522 - RNA, 19 nt, Human
gcagcagggagggcuucug

SEQ ID NO: 1530523 - RNA, 15 nt, Human
gcagccucacagucc

SEQ ID NO: 1530524 - RNA, 17 nt, Human
gcagccucacaguccuu

SEQ ID NO: 1530525 - RNA, 19 nt, Human
gcagccucacaguccuuac

SEQ ID NO: 1530526 - RNA, 22 nt, Human
gcagagaccaucccugaaggcc

SEQ ID NO: 1530527 - RNA, 20 nt, Human
gcagagaccaucccugaagg

SEQ ID NO: 1530528 - RNA, 21 nt, Human
gcagagaccaucccugaaggc

SEQ ID NO: 1530529 - RNA, 22 nt, Human
gcacuucgggaggucgaggcag

SEQ ID NO: 1530530 - RNA, 14 nt, Human
gcacuugcagacuc

SEQ ID NO: 1530531 - RNA, 16 nt, Human
gcacuugcagacucua

SEQ ID NO: 1530532 - RNA, 18 nt, Human
gcagacucuacagaggcc

SEQ ID NO: 1530533 - RNA, 19 nt, Human
gcagacucuacagaggcca

SEQ ID NO: 1530534 - RNA, 22 nt, Human
gcagacucuacagaggccaugg

SEQ ID NO: 1530535 - RNA, 15 nt, Human
gcagcagaagggggu

SEQ ID NO: 1530536 - RNA, 22 nt, Human
gcagcagaaggggguggugucu

SEQ ID NO: 1530537 - RNA, 18 nt, Human
gcagauggagaccccuug

SEQ ID NO: 1530538 - RNA, 23 nt, Human
gcagagguugcagugagccgaga

SEQ ID NO: 1530539 - RNA, 18 nt, Human
gcagagguugcagugagc

SEQ ID NO: 1530540 - RNA, 19 nt, Human
gauucaacagguuuuccug

SEQ ID NO: 1530541 - RNA, 18 nt, Human
gauuaaccacuucagcug

SEQ ID NO: 1530542 - RNA, 19 nt, Human
gauuaaccacuucagcuga

SEQ ID NO: 1530543 - RNA, 21 nt, Human
gauuaaccacuucagcugacu

SEQ ID NO: 1530544 - RNA, 14 nt, Human
gauguuuuccauga

SEQ ID NO: 1530545 - RNA, 19 nt, Human
gauguugaaaaaguucugc

SEQ ID NO: 1530546 - RNA, 21 nt, Human
gauguucuuucacccuuuucu

SEQ ID NO: 1530547 - RNA, 19 nt, Human
gauuaaauucuugcaaagu

SEQ ID NO: 1530548 - RNA, 12 nt, Human
gauuaaauucuu

SEQ ID NO: 1530549 - RNA, 15 nt, Human
gauguuuuccaugag

SEQ ID NO: 1530550 - RNA, 23 nt, Human
gauguuuuccaugaguccccugu

SEQ ID NO: 1530551 - RNA, 16 nt, Human
gauguucugggacaca

SEQ ID NO: 1530552 - RNA, 23 nt, Human
gauggugcaaugaccuuucaaua

SEQ ID NO: 1530553 - RNA, 20 nt, Human
gauggugcaaugaccuuuca

SEQ ID NO: 1530554 - RNA, 16 nt, Human
gaugggcccaauucuu

SEQ ID NO: 1530555 - RNA, 12 nt, Human
gauucagacagc

SEQ ID NO: 1530556 - RNA, 22 nt, Human
gauucccaagcucugcuccucu

SEQ ID NO: 1530557 - RNA, 13 nt, Human
gauugugccccug

SEQ ID NO: 1530558 - RNA, 20 nt, Human
gauuguccccgacccuugcc

SEQ ID NO: 1530559 - RNA, 15 nt, Human
gauuguccccgaccc

SEQ ID NO: 1530560 - RNA, 23 nt, Human
gauugacgggacuguugguauug

SEQ ID NO: 1530561 - RNA, 11 nt, Human
gaugagaaagg

SEQ ID NO: 1530562 - RNA, 22 nt, Human
gaugagaaagguugaagcacca

SEQ ID NO: 1530563 - RNA, 23 nt, Human
gaugagaaauaaaguuucuguug

SEQ ID NO: 1530564 - RNA, 18 nt, Human
gaugcaguucugaagaag

SEQ ID NO: 1530565 - RNA, 21 nt, Human
gaugcacagaguuguuacauu

SEQ ID NO: 1530566 - RNA, 14 nt, Human
gaugccugguggca

SEQ ID NO: 1530567 - RNA, 16 nt, Human
gaugggaaagcauugu

SEQ ID NO: 1530568 - RNA, 22 nt, Human
gaugggcaacccccagccugcu

SEQ ID NO: 1530569 - RNA, 16 nt, Human
gaucacgccacugcac

SEQ ID NO: 1530570 - RNA, 11 nt, Human
gauccuccagg

SEQ ID NO: 1530571 - RNA, 15 nt, Human
gaucacgccacugca

SEQ ID NO: 1530572 - RNA, 18 nt, Human
gauccuaguuccaccauc

SEQ ID NO: 1530573 - RNA, 23 nt, Human
gaucaaccccuucgcuccugugu

SEQ ID NO: 1530574 - RNA, 13 nt, Human
gaucacgccacug

SEQ ID NO: 1530575 - RNA, 14 nt, Human
gaucacgccacugc

SEQ ID NO: 1530576 - RNA, 12 nt, Human
gauccuccaggu

SEQ ID NO: 1530577 - RNA, 19 nt, Human
gauccucccaccucagccu

SEQ ID NO: 1530578 - RNA, 20 nt, Human
gauccucccaccucagccuc

SEQ ID NO: 1530579 - RNA, 21 nt, Human
gauccucccaccucagccucc

SEQ ID NO: 1530580 - RNA, 14 nt, Human
gauccugagccaga

SEQ ID NO: 1530581 - RNA, 15 nt, Human
gauccugagccagau

SEQ ID NO: 1530582 - RNA, 19 nt, Human
gauccugagccagauuuca

SEQ ID NO: 1530583 - RNA, 17 nt, Human
gaucuuugcagacaggc

SEQ ID NO: 1530584 - RNA, 15 nt, Human
gaugaaaaaauaaca

SEQ ID NO: 1530585 - RNA, 16 nt, Human
gaucuuugcagacagg

SEQ ID NO: 1530586 - RNA, 23 nt, Human
gaucuucaucugacuaugacaua

SEQ ID NO: 1530587 - RNA, 14 nt, Human
gaucuuuaaaauac

SEQ ID NO: 1530588 - RNA, 21 nt, Human
gauccugagccagauuucacu

SEQ ID NO: 1530589 - RNA, 16 nt, Human
gaucuucaucugacua

SEQ ID NO: 1530590 - RNA, 21 nt, Human
gagucugaaggcuggguucug

SEQ ID NO: 1530591 - RNA, 22 nt, Human
gagucucacuguugcccaggcu

SEQ ID NO: 1530592 - RNA, 23 nt, Human
gagucucacuguugcccaggcug

SEQ ID NO: 1530593 - RNA, 13 nt, Human
gagucgcugugcc

SEQ ID NO: 1530594 - RNA, 17 nt, Human
gagucgaggacagggag

SEQ ID NO: 1530595 - RNA, 19 nt, Human
gagucucacuguugcccag

SEQ ID NO: 1530596 - RNA, 20 nt, Human
gagucucacuguugcccagg

SEQ ID NO: 1530597 - RNA, 21 nt, Human
gagucucacuguugcccaggc

SEQ ID NO: 1530598 - RNA, 18 nt, Human
gaguauuuuugacagaau

SEQ ID NO: 1530599 - RNA, 19 nt, Human
gaguagcugggacuacagg

SEQ ID NO: 1530600 - RNA, 14 nt, Human
gaguauuuuugaca

SEQ ID NO: 1530601 - RNA, 16 nt, Human
gaguauuuuugacaga

SEQ ID NO: 1530602 - RNA, 17 nt, Human
gaguauuuuugacagaa

SEQ ID NO: 1530603 - RNA, 12 nt, Human
gaguagcuggga

SEQ ID NO: 1530604 - RNA, 14 nt, Human
gaguagcugggacu

SEQ ID NO: 1530605 - RNA, 14 nt, Human
gaguccccuguuug

SEQ ID NO: 1530606 - RNA, 23 nt, Human
gaguccccuguuuguuucugaaa

SEQ ID NO: 1530607 - RNA, 12 nt, Human
gaguccccuguu

SEQ ID NO: 1530608 - RNA, 16 nt, Human
gaguacguugugcauu

SEQ ID NO: 1530609 - RNA, 19 nt, Human
gagguuuuaaaaaaauccc

SEQ ID NO: 1530610 - RNA, 19 nt, Human
gagguucaaagauauuuug

SEQ ID NO: 1530611 - RNA, 14 nt, Human
gagguucccuuuga

SEQ ID NO: 1530612 - RNA, 20 nt, Human
gaguacguugugcauuuggu

SEQ ID NO: 1530613 - RNA, 15 nt, Human
gaguacuacaguccu

SEQ ID NO: 1530614 - RNA, 18 nt, Human
gaguacguugugcauuug

SEQ ID NO: 1530615 - RNA, 17 nt, Human
gaguacguugugcauuu

SEQ ID NO: 1530616 - RNA, 18 nt, Human
gaguacuacaguccuccc

SEQ ID NO: 1530617 - RNA, 19 nt, Human
gaguacuacaguccuccca

SEQ ID NO: 1530618 - RNA, 22 nt, Human
gaggggggaggugggauccucc

SEQ ID NO: 1530619 - RNA, 15 nt, Human
gaggggguggccucc

SEQ ID NO: 1530620 - RNA, 15 nt, Human
gaggggggagguggg

SEQ ID NO: 1530621 - RNA, 21 nt, Human
gaggugggauccuccaggugc

SEQ ID NO: 1530622 - RNA, 22 nt, Human
gaggugggauccuccaggugca

SEQ ID NO: 1530623 - RNA, 18 nt, Human
gaggugggauccuccagg

SEQ ID NO: 1530624 - RNA, 21 nt, Human
gaguugaaaaucuuauaauuu

SEQ ID NO: 1530625 - RNA, 14 nt, Human
gaguugaagacaga

SEQ ID NO: 1530626 - RNA, 17 nt, Human
gagugugccugaagucc

SEQ ID NO: 1530627 - RNA, 23 nt, Human
gaguucaucuugaauuguaagga

SEQ ID NO: 1530628 - RNA, 12 nt, Human
gagugggcccaa

SEQ ID NO: 1530629 - RNA, 23 nt, Human
gagugggggaucacagccucuga

SEQ ID NO: 1530630 - RNA, 22 nt, Human
gagugaacaaauuuacagagac

SEQ ID NO: 1530631 - RNA, 23 nt, Human
gagugaacaaauuuacagagaca

SEQ ID NO: 1530632 - RNA, 19 nt, Human
gagugaacaaauuuacaga

SEQ ID NO: 1530633 - RNA, 13 nt, Human
gauagccaaggcc

SEQ ID NO: 1530634 - RNA, 14 nt, Human
gauagccaaggcca

SEQ ID NO: 1530635 - RNA, 12 nt, Human
gauagccaaggc

SEQ ID NO: 1530636 - RNA, 19 nt, Human
gauagcacagacccugccc

SEQ ID NO: 1530637 - RNA, 20 nt, Human
gauagcacagacccugcccu

SEQ ID NO: 1530638 - RNA, 22 nt, Human
gaucaaccccuucgcuccugug

SEQ ID NO: 1530639 - RNA, 23 nt, Human
gauauaugcucugcauguuacau

SEQ ID NO: 1530640 - RNA, 21 nt, Human
gauaaucagugugucuaaauu

SEQ ID NO: 1530641 - RNA, 14 nt, Human
gauagacugcuaca

SEQ ID NO: 1530642 - RNA, 18 nt, Human
gauacaaugcugugcccu

SEQ ID NO: 1530643 - RNA, 13 nt, Human
gauacaaugcugu

SEQ ID NO: 1530644 - RNA, 17 nt, Human
gauagcacagacccugc

SEQ ID NO: 1530645 - RNA, 18 nt, Human
gauagcacagacccugcc

SEQ ID NO: 1530646 - RNA, 18 nt, Human
gaggagcucaggacacua

SEQ ID NO: 1530647 - RNA, 13 nt, Human
gaggacagggagg

SEQ ID NO: 1530648 - RNA, 22 nt, Human
gaggacagggaggugaccccag

SEQ ID NO: 1530649 - RNA, 23 nt, Human
gaggacagggaggugaccccagg

SEQ ID NO: 1530650 - RNA, 15 nt, Human
gaggaauccagaccc

SEQ ID NO: 1530651 - RNA, 22 nt, Human
gaggaaggaaacccagcucugg

SEQ ID NO: 1530652 - RNA, 14 nt, Human
gaggaauccagacc

SEQ ID NO: 1530653 - RNA, 12 nt, Human
gaggauguucug

SEQ ID NO: 1530654 - RNA, 17 nt, Human
gaggauguucugggaca

SEQ ID NO: 1530655 - RNA, 20 nt, Human
gaggauguucugggacacag

SEQ ID NO: 1530656 - RNA, 16 nt, Human
gaggauugcuugagcu

SEQ ID NO: 1530657 - RNA, 23 nt, Human
gaggaguuugggguaugggagag

SEQ ID NO: 1530658 - RNA, 19 nt, Human
gaggagguaaugaauuaaa

SEQ ID NO: 1530659 - RNA, 13 nt, Human
gaggcagccccau

SEQ ID NO: 1530660 - RNA, 23 nt, Human
gaggcagccccauucugccugcc

SEQ ID NO: 1530661 - RNA, 18 nt, Human
gaggcagccccauucugc

SEQ ID NO: 1530662 - RNA, 22 nt, Human
gaggcagccccauucugccugc

SEQ ID NO: 1530663 - RNA, 12 nt, Human
gaggccagccuu

SEQ ID NO: 1530664 - RNA, 13 nt, Human
gaggccagccuug

SEQ ID NO: 1530665 - RNA, 14 nt, Human
gagggagggagggc

SEQ ID NO: 1530666 - RNA, 15 nt, Human
gagggagggagggcu

SEQ ID NO: 1530667 - RNA, 15 nt, Human
gagggagggcuccag

SEQ ID NO: 1530668 - RNA, 22 nt, Human
gaggggccucuuaugggcuggg

SEQ ID NO: 1530669 - RNA, 19 nt, Human
gagggcagcagaagggggu

SEQ ID NO: 1530670 - RNA, 21 nt, Human
gagggcagcagaagggggugg

SEQ ID NO: 1530671 - RNA, 22 nt, Human
gagggcagcagaaggggguggu

SEQ ID NO: 1530672 - RNA, 23 nt, Human
gagggcacagaaaauggaagaca

SEQ ID NO: 1530673 - RNA, 22 nt, Human
gagggcacagaaaauggaagac

SEQ ID NO: 1530674 - RNA, 13 nt, Human
gagggagugacag

SEQ ID NO: 1530675 - RNA, 14 nt, Human
gagggagugacaga

SEQ ID NO: 1530676 - RNA, 16 nt, Human
gagggagggcuccaga

SEQ ID NO: 1530677 - RNA, 16 nt, Human
gagggagugacagagg

SEQ ID NO: 1530678 - RNA, 13 nt, Human
gaggcugggcucc

SEQ ID NO: 1530679 - RNA, 14 nt, Human
gaggcugggcuccc

SEQ ID NO: 1530680 - RNA, 16 nt, Human
gaggcugggcucccuu

SEQ ID NO: 1530681 - RNA, 15 nt, Human
gaggcugggcucccu

SEQ ID NO: 1530682 - RNA, 14 nt, Human
gaggccuucucuga

SEQ ID NO: 1530683 - RNA, 20 nt, Human
gaggccugagcgcuccugcc

SEQ ID NO: 1530684 - RNA, 21 nt, Human
gaggccugccuccagggcugg

SEQ ID NO: 1530685 - RNA, 22 nt, Human
gaggccugccuccagggcugga

SEQ ID NO: 1530686 - RNA, 19 nt, Human
gaggccugccuccagggcu

SEQ ID NO: 1530687 - RNA, 20 nt, Human
gaggccugccuccagggcug

SEQ ID NO: 1530688 - RNA, 24 nt, Human
gaggcccuucucuccagccccugg

SEQ ID NO: 1530689 - RNA, 14 nt, Human
gaggcccuucucuc

SEQ ID NO: 1530690 - RNA, 23 nt, Human
gaggcccuucucuccagccccug

SEQ ID NO: 1530691 - RNA, 20 nt, Human
gaggccccugucucagggug

SEQ ID NO: 1530692 - RNA, 14 nt, Human
gagcuacaaaugca

SEQ ID NO: 1530693 - RNA, 23 nt, Human
gagcuacacaggggaaaagagga

SEQ ID NO: 1530694 - RNA, 18 nt, Human
gagcuacccgcagaguuc

SEQ ID NO: 1530695 - RNA, 17 nt, Human
gagcucaggacacuaau

SEQ ID NO: 1530696 - RNA, 14 nt, Human
gagcucaggacacu

SEQ ID NO: 1530697 - RNA, 13 nt, Human
gagcugccaccug

SEQ ID NO: 1530698 - RNA, 15 nt, Human
gagcugccaccugcc

SEQ ID NO: 1530699 - RNA, 16 nt, Human
gagcugccaccugccu

SEQ ID NO: 1530700 - RNA, 13 nt, Human
gagcuacaaaugc

SEQ ID NO: 1530701 - RNA, 12 nt, Human
gagcuacaaaug

SEQ ID NO: 1530702 - RNA, 15 nt, Human
gagccuggcaagaau

SEQ ID NO: 1530703 - RNA, 10 nt, Human
gagccuggca

SEQ ID NO: 1530704 - RNA, 19 nt, Human
gagccuggucccacgaggg

SEQ ID NO: 1530705 - RNA, 23 nt, Human
gagccuggucccacgagggugcc

SEQ ID NO: 1530706 - RNA, 13 nt, Human
gagccugggaggu

SEQ ID NO: 1530707 - RNA, 21 nt, Human
gagccugggaggucaaggcug

SEQ ID NO: 1530708 - RNA, 20 nt, Human
gagccuccugcccuuaccug

SEQ ID NO: 1530709 - RNA, 22 nt, Human
gagccuccugcccuuaccugcc

SEQ ID NO: 1530710 - RNA, 18 nt, Human
gagcccugguggcagugg

SEQ ID NO: 1530711 - RNA, 14 nt, Human
gagccuccugcccu

SEQ ID NO: 1530712 - RNA, 20 nt, Human
gagccucagcauccuggcac

SEQ ID NO: 1530713 - RNA, 21 nt, Human
gagccucagcauccuggcacc

SEQ ID NO: 1530714 - RNA, 15 nt, Human
gagcccugguggcag

SEQ ID NO: 1530715 - RNA, 16 nt, Human
gagcccugguggcagu

SEQ ID NO: 1530716 - RNA, 19 nt, Human
gagccucagcauccuggca

SEQ ID NO: 1530717 - RNA, 17 nt, Human
gagcccugguggcagug

SEQ ID NO: 1530718 - RNA, 13 nt, Human
gagaucagccugg

SEQ ID NO: 1530719 - RNA, 14 nt, Human
gagaucagccuggg

SEQ ID NO: 1530720 - RNA, 16 nt, Human
gagaucagccugggca

SEQ ID NO: 1530721 - RNA, 20 nt, Human
gagaucaaccccuucgcucc

SEQ ID NO: 1530722 - RNA, 19 nt, Human
gagcaccuuagacaguccc

SEQ ID NO: 1530723 - RNA, 17 nt, Human
gagcaccuuagacaguc

SEQ ID NO: 1530724 - RNA, 19 nt, Human
gagcaaaaucgaugcagug

SEQ ID NO: 1530725 - RNA, 13 nt, Human
gagcaaagcugau

SEQ ID NO: 1530726 - RNA, 21 nt, Human
gagcaagacgcugugcugccc

SEQ ID NO: 1530727 - RNA, 18 nt, Human
gagcaagacgcugugcug

SEQ ID NO: 1530728 - RNA, 22 nt, Human
gagcaagacgcugugcugcccu

SEQ ID NO: 1530729 - RNA, 23 nt, Human
gagcaagacgcugugcugcccug

SEQ ID NO: 1530730 - RNA, 18 nt, Human
gagcagccacauuccuga

SEQ ID NO: 1530731 - RNA, 13 nt, Human
gagccacugcacc

SEQ ID NO: 1530732 - RNA, 21 nt, Human
gagcagccacauuccugaugc

SEQ ID NO: 1530733 - RNA, 21 nt, Human
gagcaggcuacugucagcucc

SEQ ID NO: 1530734 - RNA, 22 nt, Human
gagccacugcaccgggccacag

SEQ ID NO: 1530735 - RNA, 13 nt, Human
gagccagauuuca

SEQ ID NO: 1530736 - RNA, 18 nt, Human
gagcccacgcccccacug

SEQ ID NO: 1530737 - RNA, 13 nt, Human
gagcccaggccuc

SEQ ID NO: 1530738 - RNA, 14 nt, Human
gagcccaggccucc

SEQ ID NO: 1530739 - RNA, 12 nt, Human
gagcccacgccc

SEQ ID NO: 1530740 - RNA, 15 nt, Human
gagcccacgccccca

SEQ ID NO: 1530741 - RNA, 16 nt, Human
gagcccacgcccccac

SEQ ID NO: 1530742 - RNA, 12 nt, Human
gagcccaggccu

SEQ ID NO: 1530743 - RNA, 22 nt, Human
gaacuagaguuuagcuggaaaa

SEQ ID NO: 1530744 - RNA, 19 nt, Human
gaacggggcucuucucauu

SEQ ID NO: 1530745 - RNA, 22 nt, Human
gaacggggcucuucucauuuca

SEQ ID NO: 1530746 - RNA, 15 nt, Human
gaacagacuggaagc

SEQ ID NO: 1530747 - RNA, 16 nt, Human
gaacagacuggaagca

SEQ ID NO: 1530748 - RNA, 19 nt, Human
gaacagacuggaagcacag

SEQ ID NO: 1530749 - RNA, 21 nt, Human
gaaccacaucuugcucugcug

SEQ ID NO: 1530750 - RNA, 18 nt, Human
gaaccugaagaacuauuu

SEQ ID NO: 1530751 - RNA, 16 nt, Human
gaaccaccacacccag

SEQ ID NO: 1530752 - RNA, 17 nt, Human
gaaccaccacacccagc

SEQ ID NO: 1530753 - RNA, 22 nt, Human
gaacuuccagauccuggaaauc

SEQ ID NO: 1530754 - RNA, 18 nt, Human
gaacuuacuugcauacca

SEQ ID NO: 1530755 - RNA, 15 nt, Human
gaacucccuuucaac

SEQ ID NO: 1530756 - RNA, 22 nt, Human
gaacuggguacuuguggacaca

SEQ ID NO: 1530757 - RNA, 14 nt, Human
gaacucccuuucaa

SEQ ID NO: 1530758 - RNA, 22 nt, Human
gaacuuguaaaggaauuuaaaa

SEQ ID NO: 1530759 - RNA, 21 nt, Human
gaagaagcaccaaucaugaau

SEQ ID NO: 1530760 - RNA, 21 nt, Human
gaacuuguaaaggaauuuaaa

SEQ ID NO: 1530761 - RNA, 17 nt, Human
gaacuuggcgcugcccc

SEQ ID NO: 1530762 - RNA, 23 nt, Human
gaacuugguucccauuugcuccu

SEQ ID NO: 1530763 - RNA, 13 nt, Human
gaacuuggcgcug

SEQ ID NO: 1530764 - RNA, 15 nt, Human
gaacuuggcgcugcc

SEQ ID NO: 1530765 - RNA, 16 nt, Human
gaacuuggcgcugccc

SEQ ID NO: 1530766 - RNA, 13 nt, Human
gaaauauuauguu

SEQ ID NO: 1530767 - RNA, 16 nt, Human
gaaauauuauguuaaa

SEQ ID NO: 1530768 - RNA, 14 nt, Human
gaaaugggcagagc

SEQ ID NO: 1530769 - RNA, 20 nt, Human
gaaaugggcagagcagagac

SEQ ID NO: 1530770 - RNA, 22 nt, Human
gaaauguaagggaaacugccag

SEQ ID NO: 1530771 - RNA, 17 nt, Human
gaaauuuguuauaauga

SEQ ID NO: 1530772 - RNA, 11 nt, Human
gaaacauuugg

SEQ ID NO: 1530773 - RNA, 21 nt, Human
gaaauaucugaaaauguaugu

SEQ ID NO: 1530774 - RNA, 17 nt, Human
gaaauauaggaacuuaa

SEQ ID NO: 1530775 - RNA, 13 nt, Human
gaaauauaauuga

SEQ ID NO: 1530776 - RNA, 14 nt, Human
gaauacuuuauaaa

SEQ ID NO: 1530777 - RNA, 14 nt, Human
gaauaacauguaau

SEQ ID NO: 1530778 - RNA, 20 nt, Human
gaaguuucugccgcagcccu

SEQ ID NO: 1530779 - RNA, 12 nt, Human
gaaguuucugcc

SEQ ID NO: 1530780 - RNA, 16 nt, Human
gaaguuuacauuguaa

SEQ ID NO: 1530781 - RNA, 17 nt, Human
gaaguuuacauuguaaa

SEQ ID NO: 1530782 - RNA, 14 nt, Human
gaaugaaagggccc

SEQ ID NO: 1530783 - RNA, 19 nt, Human
gaaugaaagggcccagaga

SEQ ID NO: 1530784 - RNA, 21 nt, Human
gaaugaaagggcccagagagg

SEQ ID NO: 1530785 - RNA, 16 nt, Human
gaaucuguauauauuu

SEQ ID NO: 1530786 - RNA, 18 nt, Human
gaaucucauaauuuauac

SEQ ID NO: 1530787 - RNA, 16 nt, Human
gaaucucaaauaacua

SEQ ID NO: 1530788 - RNA, 18 nt, Human
gaauccagacccggcugc

SEQ ID NO: 1530789 - RNA, 15 nt, Human
gaauagcugggacua

SEQ ID NO: 1530790 - RNA, 14 nt, Human
gaauagcugggacu

SEQ ID NO: 1530791 - RNA, 17 nt, Human
gaaggcagcagguggca

SEQ ID NO: 1530792 - RNA, 17 nt, Human
gaaggccccgcccaggc

SEQ ID NO: 1530793 - RNA, 16 nt, Human
gaaggccccgcccagg

SEQ ID NO: 1530794 - RNA, 14 nt, Human
gaaggccccgccca

SEQ ID NO: 1530795 - RNA, 15 nt, Human
gaaggccccgcccag

SEQ ID NO: 1530796 - RNA, 21 nt, Human
gaaggauacaaaagcauguga

SEQ ID NO: 1530797 - RNA, 19 nt, Human
gaaggauacaaaagcaugu

SEQ ID NO: 1530798 - RNA, 12 nt, Human
gaaggauacaaa

SEQ ID NO: 1530799 - RNA, 20 nt, Human
gaaggaaaaggcagggagcg

SEQ ID NO: 1530800 - RNA, 14 nt, Human
gaaggaaacccagc

SEQ ID NO: 1530801 - RNA, 17 nt, Human
gaaggaaacccagcucu

SEQ ID NO: 1530802 - RNA, 18 nt, Human
gaaggaaacccagcucug

SEQ ID NO: 1530803 - RNA, 19 nt, Human
gaaggaaacccagcucugg

SEQ ID NO: 1530804 - RNA, 14 nt, Human
gaaggaaaaugaua

SEQ ID NO: 1530805 - RNA, 15 nt, Human
gaagccagcaggcuc

SEQ ID NO: 1530806 - RNA, 16 nt, Human
gaagccagcaggcucu

SEQ ID NO: 1530807 - RNA, 17 nt, Human
gaagacugcauuauauu

SEQ ID NO: 1530808 - RNA, 14 nt, Human
gaagaagcucucuc

SEQ ID NO: 1530809 - RNA, 19 nt, Human
gaagacucauucuucugua

SEQ ID NO: 1530810 - RNA, 21 nt, Human
gaagacucauucuucuguacg

SEQ ID NO: 1530811 - RNA, 19 nt, Human
gaagccagcaggcucucag

SEQ ID NO: 1530812 - RNA, 23 nt, Human
gaagccagcaggcucucaggcca

SEQ ID NO: 1530813 - RNA, 23 nt, Human
gaagcccaggaaaggcuccagga

SEQ ID NO: 1530814 - RNA, 20 nt, Human
gaagcccaggaaaggcucca

SEQ ID NO: 1530815 - RNA, 21 nt, Human
gaagcccaggaaaggcuccag

SEQ ID NO: 1530816 - RNA, 22 nt, Human
gaagcccaggaaaggcuccagg

SEQ ID NO: 1530817 - RNA, 18 nt, Human
gaaggaaaaggcagggag

SEQ ID NO: 1530818 - RNA, 21 nt, Human
gaagccuuggggcugaugcag

SEQ ID NO: 1530819 - RNA, 14 nt, Human
gaagcggcuggcag

SEQ ID NO: 1530820 - RNA, 13 nt, Human
cuuuccacagaag

SEQ ID NO: 1530821 - RNA, 22 nt, Human
cuuuccaaaugcccagcuuaaa

SEQ ID NO: 1530822 - RNA, 18 nt, Human
cuuuccaaaugcccagcu

SEQ ID NO: 1530823 - RNA, 19 nt, Human
cuuuccaaaugcccagcuu

SEQ ID NO: 1530824 - RNA, 20 nt, Human
cuuucauuuuuuuccaggcu

SEQ ID NO: 1530825 - RNA, 22 nt, Human
cuuucauuuuuuuccaggcugg

SEQ ID NO: 1530826 - RNA, 15 nt, Human
cuuucauuuuuuucc

SEQ ID NO: 1530827 - RNA, 16 nt, Human
cuuucauuuuuuucca

SEQ ID NO: 1530828 - RNA, 19 nt, Human
cuuucauuuuuuuccaggc

SEQ ID NO: 1530829 - RNA, 15 nt, Human
cuuucagugaaagca

SEQ ID NO: 1530830 - RNA, 17 nt, Human
cuuucagugaaagcauc

SEQ ID NO: 1530831 - RNA, 21 nt, Human
cuuuauuuucuauaauuuaaa

SEQ ID NO: 1530832 - RNA, 13 nt, Human
cuuuauaauucua

SEQ ID NO: 1530833 - RNA, 20 nt, Human
cuuuaaagggauggcaagau

SEQ ID NO: 1530834 - RNA, 18 nt, Human
cuuuaaagggauggcaag

SEQ ID NO: 1530835 - RNA, 19 nt, Human
cuuguguuaaguaugugua

SEQ ID NO: 1530836 - RNA, 21 nt, Human
cuuguguguuuauugucaaag

SEQ ID NO: 1530837 - RNA, 16 nt, Human
cuuguaaauagcucag

SEQ ID NO: 1530838 - RNA, 19 nt, Human
cuuguaaaggaauuuaaaa

SEQ ID NO: 1530839 - RNA, 16 nt, Human
cuuggggggcugaggu

SEQ ID NO: 1530840 - RNA, 22 nt, Human
cuuggggggcugaggugggagg

SEQ ID NO: 1530841 - RNA, 16 nt, Human
cuuggggaccagagcu

SEQ ID NO: 1530842 - RNA, 22 nt, Human
cuuggggaccagagcugccacc

SEQ ID NO: 1530843 - RNA, 15 nt, Human
cuuggggggcugagg

SEQ ID NO: 1530844 - RNA, 18 nt, Human
cuugggccacugugaaga

SEQ ID NO: 1530845 - RNA, 13 nt, Human
cuugggcuucauc

SEQ ID NO: 1530846 - RNA, 14 nt, Human
cuugggccacugug

SEQ ID NO: 1530847 - RNA, 21 nt, Human
cuuggggaccagagcugccac

SEQ ID NO: 1530848 - RNA, 22 nt, Human
cuugggcuucauccuccucaga

SEQ ID NO: 1530849 - RNA, 22 nt, Human
cuuggaggaaggaaacccagcu

SEQ ID NO: 1530850 - RNA, 23 nt, Human
cuuggagggcaugaagacagaua

SEQ ID NO: 1530851 - RNA, 12 nt, Human
cuuggagggcau

SEQ ID NO: 1530852 - RNA, 16 nt, Human
cuuggcugcagggagu

SEQ ID NO: 1530853 - RNA, 17 nt, Human
cuuggcugcagggaguc

SEQ ID NO: 1530854 - RNA, 18 nt, Human
cuugcccuggugccucac

SEQ ID NO: 1530855 - RNA, 14 nt, Human
cuugcucugcugac

SEQ ID NO: 1530856 - RNA, 17 nt, Human
cuucuccacccugcucu

SEQ ID NO: 1530857 - RNA, 18 nt, Human
cuucuccacccugcucuc

SEQ ID NO: 1530858 - RNA, 21 nt, Human
cuucuccacccugcucuccga

SEQ ID NO: 1530859 - RNA, 21 nt, Human
cuucucauuucaccccucccu

SEQ ID NO: 1530860 - RNA, 18 nt, Human
cuucucauuucaccccuc

SEQ ID NO: 1530861 - RNA, 16 nt, Human
cuugcucugcugacag

SEQ ID NO: 1530862 - RNA, 17 nt, Human
cuugcucugcugacaga

SEQ ID NO: 1530863 - RNA, 20 nt, Human
cuugcuucaaccccaugaga

SEQ ID NO: 1530864 - RNA, 16 nt, Human
cuuggaaaugggagac

SEQ ID NO: 1530865 - RNA, 21 nt, Human
cuuggaaacuggaugagguca

SEQ ID NO: 1530866 - RNA, 13 nt, Human
cuuggaagcuccg

SEQ ID NO: 1530867 - RNA, 14 nt, Human
cuuggaagcuccgc

SEQ ID NO: 1530868 - RNA, 13 nt, Human
cuuggaggaagga

SEQ ID NO: 1530869 - RNA, 20 nt, Human
cuuuuuucucugauacagaa

SEQ ID NO: 1530870 - RNA, 16 nt, Human
cuuuugagcauuuaga

SEQ ID NO: 1530871 - RNA, 21 nt, Human
cuuuugagugccuuacacaau

SEQ ID NO: 1530872 - RNA, 22 nt, Human
cuuuuuucucugauacagaaaa

SEQ ID NO: 1530873 - RNA, 14 nt, Human
cuuuuuuggcugcu

SEQ ID NO: 1530874 - RNA, 15 nt, Human
cuuuuuuggcugcug

SEQ ID NO: 1530875 - RNA, 23 nt, Human
gaaaaaggaugcacagaguuguu

SEQ ID NO: 1530876 - RNA, 16 nt, Human
cuuuuuuggcugcuga

SEQ ID NO: 1530877 - RNA, 22 nt, Human
gaaaacaauaacgauaaaagac

SEQ ID NO: 1530878 - RNA, 13 nt, Human
gaaaacacauuuu

SEQ ID NO: 1530879 - RNA, 15 nt, Human
gaaaacaugcuacac

SEQ ID NO: 1530880 - RNA, 14 nt, Human
gaaaacaugcuaca

SEQ ID NO: 1530881 - RNA, 12 nt, Human
gaaaacaugcua

SEQ ID NO: 1530882 - RNA, 14 nt, Human
gaaaacacauuuuu

SEQ ID NO: 1530883 - RNA, 19 nt, Human
gaaaacguggcugcuucaa

SEQ ID NO: 1530884 - RNA, 18 nt, Human
gaaaacguggcugcuuca

SEQ ID NO: 1530885 - RNA, 15 nt, Human
gaaaacguggcugcu

SEQ ID NO: 1530886 - RNA, 16 nt, Human
gaaaacguggcugcuu

SEQ ID NO: 1530887 - RNA, 16 nt, Human
gaaaacaugcuacaca

SEQ ID NO: 1530888 - RNA, 19 nt, Human
gaaaauaacgauaaaagac

SEQ ID NO: 1530889 - RNA, 13 nt, Human
gaaaagcugcuga

SEQ ID NO: 1530890 - RNA, 17 nt, Human
gaaaagcugcugacagu

SEQ ID NO: 1530891 - RNA, 19 nt, Human
gaaaagcugcugacagugu

SEQ ID NO: 1530892 - RNA, 12 nt, Human
gaaaauaucacu

SEQ ID NO: 1530893 - RNA, 14 nt, Human
gaaaaucagccugc

SEQ ID NO: 1530894 - RNA, 17 nt, Human
gaaaauauuauguguuu

SEQ ID NO: 1530895 - RNA, 19 nt, Human
gaaaaucuuauaauuuaaa

SEQ ID NO: 1530896 - RNA, 16 nt, Human
gaaaaucagccugcuc

SEQ ID NO: 1530897 - RNA, 18 nt, Human
gaaaaucagccugcucca

SEQ ID NO: 1530898 - RNA, 20 nt, Human
gaaaaucuuauaauuuaaaa

SEQ ID NO: 1530899 - RNA, 18 nt, Human
gaaacagcuaaugggaca

SEQ ID NO: 1530900 - RNA, 18 nt, Human
cuuuguuuguugucagcu

SEQ ID NO: 1530901 - RNA, 20 nt, Human
cuuuguuuguugucagcuga

SEQ ID NO: 1530902 - RNA, 22 nt, Human
cuuuucauaaccuagccuuaga

SEQ ID NO: 1530903 - RNA, 20 nt, Human
cuuuucauaaccuagccuua

SEQ ID NO: 1530904 - RNA, 18 nt, Human
cuuuucuguccgagcuuu

SEQ ID NO: 1530905 - RNA, 23 nt, Human
cuuuucuguccgagcuuugaaaa

SEQ ID NO: 1530906 - RNA, 16 nt, Human
cuuuucuuucagccaa

SEQ ID NO: 1530907 - RNA, 23 nt, Human
cuuuucuugcaugaggcuagugu

SEQ ID NO: 1530908 - RNA, 19 nt, Human
cuuuggacccugaggccca

SEQ ID NO: 1530909 - RNA, 17 nt, Human
cuuuggacccugaggcc

SEQ ID NO: 1530910 - RNA, 18 nt, Human
cuuuggacccugaggccc

SEQ ID NO: 1530911 - RNA, 15 nt, Human
cuuuggacccugagg

SEQ ID NO: 1530912 - RNA, 16 nt, Human
cuuuggacccugaggc

SEQ ID NO: 1530913 - RNA, 16 nt, Human
cuuucccaucuuccaa

SEQ ID NO: 1530914 - RNA, 14 nt, Human
cuuugugauuuuug

SEQ ID NO: 1530915 - RNA, 23 nt, Human
cuuugggaggccaaggugggagg

SEQ ID NO: 1530916 - RNA, 22 nt, Human
cuuuguccccaccgcagacagg

SEQ ID NO: 1530917 - RNA, 13 nt, Human
cuuugggaggcca

SEQ ID NO: 1530918 - RNA, 18 nt, Human
cuuuguccccaccgcaga

SEQ ID NO: 1530919 - RNA, 19 nt, Human
cuuugugauuuuuguaauu

SEQ ID NO: 1530920 - RNA, 18 nt, Human
cuuugugauuuuuguaau

SEQ ID NO: 1530921 - RNA, 17 nt, Human
cuuugugauuuuuguaa

SEQ ID NO: 1530922 - RNA, 14 nt, Human
cuuuguucuggcuc

SEQ ID NO: 1530923 - RNA, 15 nt, Human
cuuuguucuggcucu

SEQ ID NO: 1530924 - RNA, 14 nt, Human
cuucagugccaaaa

SEQ ID NO: 1530925 - RNA, 15 nt, Human
cuucaguaagccgug

SEQ ID NO: 1530926 - RNA, 20 nt, Human
cuucauucaacccaccugcg

SEQ ID NO: 1530927 - RNA, 13 nt, Human
cuuccacaagagc

SEQ ID NO: 1530928 - RNA, 14 nt, Human
cuuccacaagagcc

SEQ ID NO: 1530929 - RNA, 15 nt, Human
cuuccacaagagccc

SEQ ID NO: 1530930 - RNA, 16 nt, Human
cuucagcgguuuauau

SEQ ID NO: 1530931 - RNA, 15 nt, Human
cuucagcugacuuuu

SEQ ID NO: 1530932 - RNA, 19 nt, Human
cuucagcugacuuuucugu

SEQ ID NO: 1530933 - RNA, 14 nt, Human
cuucaguaagccgu

SEQ ID NO: 1530934 - RNA, 14 nt, Human
cuucagccucccga

SEQ ID NO: 1530935 - RNA, 15 nt, Human
cuucagccugaaaga

SEQ ID NO: 1530936 - RNA, 16 nt, Human
cuucagccucccgagu

SEQ ID NO: 1530937 - RNA, 20 nt, Human
cuucagccucccgaguagcu

SEQ ID NO: 1530938 - RNA, 17 nt, Human
cuucaaauccuugaaga

SEQ ID NO: 1530939 - RNA, 22 nt, Human
cuuagucacugagacagcccgg

SEQ ID NO: 1530940 - RNA, 21 nt, Human
cuuagucacugagacagcccg

SEQ ID NO: 1530941 - RNA, 17 nt, Human
cuucaaggauccugagc

SEQ ID NO: 1530942 - RNA, 18 nt, Human
cuucaaggauccugagcc

SEQ ID NO: 1530943 - RNA, 19 nt, Human
cuucaaggauccugagcca

SEQ ID NO: 1530944 - RNA, 20 nt, Human
cuucaaggauccugagccag

SEQ ID NO: 1530945 - RNA, 12 nt, Human
cuucacaacaga

SEQ ID NO: 1530946 - RNA, 14 nt, Human
cuucacaacagauu

SEQ ID NO: 1530947 - RNA, 23 nt, Human
cuucaaggauccugagccagauu

SEQ ID NO: 1530948 - RNA, 21 nt, Human
cuucaaggauccugagccaga

SEQ ID NO: 1530949 - RNA, 22 nt, Human
cuucaaggauccugagccagau

SEQ ID NO: 1530950 - RNA, 23 nt, Human
cuucacauauugauuuccguuaa

SEQ ID NO: 1530951 - RNA, 14 nt, Human
cuucacauauugau

SEQ ID NO: 1530952 - RNA, 19 nt, Human
cuuccagauccuggaaauc

SEQ ID NO: 1530953 - RNA, 16 nt, Human
cuuccacaagagccca

SEQ ID NO: 1530954 - RNA, 14 nt, Human
cuucucauuucacc

SEQ ID NO: 1530955 - RNA, 15 nt, Human
cuucucauuucaccc

SEQ ID NO: 1530956 - RNA, 17 nt, Human
cuucucauuucaccccu

SEQ ID NO: 1530957 - RNA, 16 nt, Human
cuucucacugccaugc

SEQ ID NO: 1530958 - RNA, 21 nt, Human
cuucucacugccaugccagcu

SEQ ID NO: 1530959 - RNA, 20 nt, Human
cuucggccuccauccugagg

SEQ ID NO: 1530960 - RNA, 19 nt, Human
cuucgggaggucgaggcag

SEQ ID NO: 1530961 - RNA, 17 nt, Human
cuucgcuccugugucuu

SEQ ID NO: 1530962 - RNA, 23 nt, Human
cuuaagaagacugcauuauauuu

SEQ ID NO: 1530963 - RNA, 12 nt, Human
cuuaaaaauggu

SEQ ID NO: 1530964 - RNA, 20 nt, Human
cuuaauucuuagcucauucu

SEQ ID NO: 1530965 - RNA, 19 nt, Human
cuuaauuaaaagaauauuu

SEQ ID NO: 1530966 - RNA, 20 nt, Human
cuuaauuaaaagaauauuuu

SEQ ID NO: 1530967 - RNA, 16 nt, Human
cuuaauuaaaagaaua

SEQ ID NO: 1530968 - RNA, 17 nt, Human
cuuaauuaaaagaauau

SEQ ID NO: 1530969 - RNA, 19 nt, Human
cuuagaauuaguggcacuu

SEQ ID NO: 1530970 - RNA, 11 nt, Human
cuuagacaguc

SEQ ID NO: 1530971 - RNA, 14 nt, Human
cuuagucacugaga

SEQ ID NO: 1530972 - RNA, 23 nt, Human
cuuagguuggcaaaaaggcagga

SEQ ID NO: 1530973 - RNA, 20 nt, Human
cuuaccugccaggaagccag

SEQ ID NO: 1530974 - RNA, 13 nt, Human
cuuacuguacaug

SEQ ID NO: 1530975 - RNA, 20 nt, Human
cuuagaaaaaccaccaccau

SEQ ID NO: 1530976 - RNA, 17 nt, Human
cuuagaagucacacagu

SEQ ID NO: 1530977 - RNA, 20 nt, Human
cuuagaagucacacaguauu

SEQ ID NO: 1530978 - RNA, 18 nt, Human
cuguugcccaggcuggcg

SEQ ID NO: 1530979 - RNA, 17 nt, Human
cuguugcccaggcuggc

SEQ ID NO: 1530980 - RNA, 17 nt, Human
cuguuuagauaauacac

SEQ ID NO: 1530981 - RNA, 17 nt, Human
cuguuucaaacuuuacu

SEQ ID NO: 1530982 - RNA, 15 nt, Human
cuguuucaaacuuua

SEQ ID NO: 1530983 - RNA, 18 nt, Human
cuguuuagauaauacacc

SEQ ID NO: 1530984 - RNA, 17 nt, Human
cuguuugcuaagugagg

SEQ ID NO: 1530985 - RNA, 19 nt, Human
cuguuugcuaagugaggau

SEQ ID NO: 1530986 - RNA, 14 nt, Human
cuguuuuauaauuu

SEQ ID NO: 1530987 - RNA, 15 nt, Human
cuguuuuauaauuuu

SEQ ID NO: 1530988 - RNA, 16 nt, Human
cuuaaaaaguggaaaa

SEQ ID NO: 1530989 - RNA, 17 nt, Human
cuuaaaaaguggaaaaa

SEQ ID NO: 1530990 - RNA, 13 nt, Human
cuguuuucucuug

SEQ ID NO: 1530991 - RNA, 23 nt, Human
cuguucuuucuggcuaugcauuu

SEQ ID NO: 1530992 - RNA, 12 nt, Human
cuguugcccagg

SEQ ID NO: 1530993 - RNA, 13 nt, Human
cuguugcccaggc

SEQ ID NO: 1530994 - RNA, 14 nt, Human
cuguugcccaggcu

SEQ ID NO: 1530995 - RNA, 15 nt, Human
cuguugcccaggcug

SEQ ID NO: 1530996 - RNA, 16 nt, Human
cuguugcccaggcugg

SEQ ID NO: 1530997 - RNA, 16 nt, Human
cuguuaauaguucagg

SEQ ID NO: 1530998 - RNA, 21 nt, Human
cuguucuuucuggcuaugcau

SEQ ID NO: 1530999 - RNA, 14 nt, Human
cuguucuuucuggc

SEQ ID NO: 1531000 - RNA, 13 nt, Human
cuguucuuucugg

SEQ ID NO: 1531001 - RNA, 21 nt, Human
cuguucuuuccaaaguacacu

SEQ ID NO: 1531002 - RNA, 19 nt, Human
cuguucuuuccaaaguaca

SEQ ID NO: 1531003 - RNA, 16 nt, Human
cuguucuuuccaaagu

SEQ ID NO: 1531004 - RNA, 15 nt, Human
cuguucuuuccaaag

SEQ ID NO: 1531005 - RNA, 20 nt, Human
cugugucuuuuuucacuaca

SEQ ID NO: 1531006 - RNA, 18 nt, Human
cugugugugcgccuacag

SEQ ID NO: 1531007 - RNA, 20 nt, Human
cuguuaaaagaugaaaauau

SEQ ID NO: 1531008 - RNA, 19 nt, Human
cuguuaaaagaugaaaaua

SEQ ID NO: 1531009 - RNA, 15 nt, Human
cuguuaaaagaugaa

SEQ ID NO: 1531010 - RNA, 16 nt, Human
cuguuaaaagaugaaa

SEQ ID NO: 1531011 - RNA, 21 nt, Human
cuguggguuucuaaagcugcc

SEQ ID NO: 1531012 - RNA, 22 nt, Human
cuguggguuucuaaagcugcca

SEQ ID NO: 1531013 - RNA, 15 nt, Human
cugugaaaggaaaga

SEQ ID NO: 1531014 - RNA, 18 nt, Human
cugucuucaguaagccgu

SEQ ID NO: 1531015 - RNA, 18 nt, Human
cugucuucacaacagauu

SEQ ID NO: 1531016 - RNA, 23 nt, Human
cugucauuugagcagggcucagc

SEQ ID NO: 1531017 - RNA, 18 nt, Human
cugucaauuacaggaagu

SEQ ID NO: 1531018 - RNA, 19 nt, Human
cugucaauuacaggaagua

SEQ ID NO: 1531019 - RNA, 21 nt, Human
cugucauuugagcagggcuca

SEQ ID NO: 1531020 - RNA, 22 nt, Human
cugucauuugagcagggcucag

SEQ ID NO: 1531021 - RNA, 16 nt, Human
cugugaaaggaaagag

SEQ ID NO: 1531022 - RNA, 22 nt, Human
cugugaaaggaaagagggaggu

SEQ ID NO: 1531023 - RNA, 18 nt, Human
cugugaaaguacauuugg

SEQ ID NO: 1531024 - RNA, 15 nt, Human
cugugauggggcccu

SEQ ID NO: 1531025 - RNA, 23 nt, Human
cugugauggggcccugccuccuu

SEQ ID NO: 1531026 - RNA, 16 nt, Human
cugugauggggcccug

SEQ ID NO: 1531027 - RNA, 21 nt, Human
cugugauggggcccugccucc

SEQ ID NO: 1531028 - RNA, 14 nt, Human
cugugccaugugcc

SEQ ID NO: 1531029 - RNA, 19 nt, Human
cugugcccuaaaguguauu

SEQ ID NO: 1531030 - RNA, 15 nt, Human
cugugccaugugcca

SEQ ID NO: 1531031 - RNA, 17 nt, Human
cugguggcagcucaccu

SEQ ID NO: 1531032 - RNA, 18 nt, Human
cugguggcagcucaccuc

SEQ ID NO: 1531033 - RNA, 20 nt, Human
cugguggcagcucaccucuc

SEQ ID NO: 1531034 - RNA, 15 nt, Human
cugguggcagcugcg

SEQ ID NO: 1531035 - RNA, 14 nt, Human
cugguggcaguggg

SEQ ID NO: 1531036 - RNA, 18 nt, Human
cugguggcagugggagcu

SEQ ID NO: 1531037 - RNA, 21 nt, Human
cugguggcagcucaccucucc

SEQ ID NO: 1531038 - RNA, 19 nt, Human
cugguggcagugggagcug

SEQ ID NO: 1531039 - RNA, 15 nt, Human
cuguaauuugugaua

SEQ ID NO: 1531040 - RNA, 14 nt, Human
cuguaauuugugau

SEQ ID NO: 1531041 - RNA, 14 nt, Human
cuguacagagccca

SEQ ID NO: 1531042 - RNA, 15 nt, Human
cuguacagagcccac

SEQ ID NO: 1531043 - RNA, 18 nt, Human
cuguacagagcccacgcc

SEQ ID NO: 1531044 - RNA, 22 nt, Human
cuguacagagcccacgccccca

SEQ ID NO: 1531045 - RNA, 19 nt, Human
cuguaauccuagcacuuug

SEQ ID NO: 1531046 - RNA, 22 nt, Human
cugguuagagguucccuuugac

SEQ ID NO: 1531047 - RNA, 21 nt, Human
cugguuagagguucccuuuga

SEQ ID NO: 1531048 - RNA, 21 nt, Human
cuguaucccaugagccucagc

SEQ ID NO: 1531049 - RNA, 22 nt, Human
cuguaucccaugagccucagca

SEQ ID NO: 1531050 - RNA, 20 nt, Human
cuguaucccaugagccucag

SEQ ID NO: 1531051 - RNA, 20 nt, Human
cuguauuuuguuuuugucuu

SEQ ID NO: 1531052 - RNA, 15 nt, Human
cugucaauuacagga

SEQ ID NO: 1531053 - RNA, 16 nt, Human
cugucaauuacaggaa

SEQ ID NO: 1531054 - RNA, 19 nt, Human
cuguacgucugacaggcaa

SEQ ID NO: 1531055 - RNA, 20 nt, Human
cuguacgucugacaggcaau

SEQ ID NO: 1531056 - RNA, 21 nt, Human
cuguacaugaaaacacauuuu

SEQ ID NO: 1531057 - RNA, 20 nt, Human
cuguacaugaaaacacauuu

SEQ ID NO: 1531058 - RNA, 17 nt, Human
cuguacaugaaaacaca

SEQ ID NO: 1531059 - RNA, 14 nt, Human
cuguacgucugaca

SEQ ID NO: 1531060 - RNA, 15 nt, Human
cuguacgucugacag

SEQ ID NO: 1531061 - RNA, 16 nt, Human
cuguacgucugacagg

SEQ ID NO: 1531062 - RNA, 18 nt, Human
cuguacgucugacaggca

SEQ ID NO: 1531063 - RNA, 18 nt, Human
cugggggcugggcagagg

SEQ ID NO: 1531064 - RNA, 14 nt, Human
cugggggcugggca

SEQ ID NO: 1531065 - RNA, 17 nt, Human
cugggcuucaguggcag

SEQ ID NO: 1531066 - RNA, 15 nt, Human
cugggcuucaguggc

SEQ ID NO: 1531067 - RNA, 22 nt, Human
cugggcuuggggaccagagcug

SEQ ID NO: 1531068 - RNA, 18 nt, Human
cugggcuugucuguagau

SEQ ID NO: 1531069 - RNA, 20 nt, Human
cuggguaacuagggaagaua

SEQ ID NO: 1531070 - RNA, 19 nt, Human
cugggauguuucugucaca

SEQ ID NO: 1531071 - RNA, 21 nt, Human
cugggauuacaagcgugagcc

SEQ ID NO: 1531072 - RNA, 14 nt, Human
cugggauguuucug

SEQ ID NO: 1531073 - RNA, 22 nt, Human
cugauacagaaaaguugaauuu

SEQ ID NO: 1531074 - RNA, 20 nt, Human
cugauccuaguuccaccauc

SEQ ID NO: 1531075 - RNA, 21 nt, Human
cugauccuaguuccaccauca

SEQ ID NO: 1531076 - RNA, 14 nt, Human
cugauggugcaaug

SEQ ID NO: 1531077 - RNA, 15 nt, Human
cugauggugcaauga

SEQ ID NO: 1531078 - RNA, 16 nt, Human
cugauggugcaaugac

SEQ ID NO: 1531079 - RNA, 18 nt, Human
cugagucugaaggcuggg

SEQ ID NO: 1531080 - RNA, 19 nt, Human
cugagucugaaggcugggu

SEQ ID NO: 1531081 - RNA, 20 nt, Human
cugaguugacuugacagaac

SEQ ID NO: 1531082 - RNA, 21 nt, Human
cugaguugguguugacaugug

SEQ ID NO: 1531083 - RNA, 13 nt, Human
cugaggcugggcu

SEQ ID NO: 1531084 - RNA, 15 nt, Human
cugaggcugggcucc

SEQ ID NO: 1531085 - RNA, 16 nt, Human
cugaggcugggcuccc

SEQ ID NO: 1531086 - RNA, 17 nt, Human
cugaggcugggcucccu

SEQ ID NO: 1531087 - RNA, 22 nt, Human
cugaggcugggcucccuuccca

SEQ ID NO: 1531088 - RNA, 17 nt, Human
cugaggccugagcgcuc

SEQ ID NO: 1531089 - RNA, 18 nt, Human
cugaggccugagcgcucc

SEQ ID NO: 1531090 - RNA, 22 nt, Human
cugaggccugagcgcuccugcc

SEQ ID NO: 1531091 - RNA, 15 nt, Human
cugaggcuccacuug

SEQ ID NO: 1531092 - RNA, 21 nt, Human
cugaggcuccacuuggucugu

SEQ ID NO: 1531093 - RNA, 22 nt, Human
cugcacaagcugcacccucagg

SEQ ID NO: 1531094 - RNA, 18 nt, Human
cugcaauaaggggagagu

SEQ ID NO: 1531095 - RNA, 18 nt, Human
cugcacuugcagacucua

SEQ ID NO: 1531096 - RNA, 16 nt, Human
cugcacuccccugcug

SEQ ID NO: 1531097 - RNA, 17 nt, Human
cugcacuccccugcugg

SEQ ID NO: 1531098 - RNA, 18 nt, Human
cugcacuccccugcuggg

SEQ ID NO: 1531099 - RNA, 13 nt, Human
cugcacccucagg

SEQ ID NO: 1531100 - RNA, 14 nt, Human
cugcacccucaggc

SEQ ID NO: 1531101 - RNA, 16 nt, Human
cugcacccucaggcag

SEQ ID NO: 1531102 - RNA, 22 nt, Human
cugcaccggcuggccuggcccc

SEQ ID NO: 1531103 - RNA, 23 nt, Human
cugcaccggcuggccuggccccu

SEQ ID NO: 1531104 - RNA, 12 nt, Human
cugcaccgggcc

SEQ ID NO: 1531105 - RNA, 14 nt, Human
cugcaccgggccac

SEQ ID NO: 1531106 - RNA, 15 nt, Human
cugcacuccccugcu

SEQ ID NO: 1531107 - RNA, 16 nt, Human
cugauuuuuuuuuccu

SEQ ID NO: 1531108 - RNA, 18 nt, Human
cugauuuuuuuuuccuuc

SEQ ID NO: 1531109 - RNA, 19 nt, Human
cugauuuuuuuuuccuuca

SEQ ID NO: 1531110 - RNA, 20 nt, Human
cugauuuuuuuuuccuucag

SEQ ID NO: 1531111 - RNA, 23 nt, Human
cugauuuuuuuuuccuucagugc

SEQ ID NO: 1531112 - RNA, 21 nt, Human
cugauuuuuuuuuccuucagu

SEQ ID NO: 1531113 - RNA, 22 nt, Human
cugauuuuuuuuuccuucagug

SEQ ID NO: 1531114 - RNA, 21 nt, Human
cugauugugucucuugguccu

SEQ ID NO: 1531115 - RNA, 17 nt, Human
cugauugugucucuugg

SEQ ID NO: 1531116 - RNA, 17 nt, Human
cugauggugcaaugacc

SEQ ID NO: 1531117 - RNA, 19 nt, Human
cugauggugcaaugaccuu

SEQ ID NO: 1531118 - RNA, 20 nt, Human
cugauggugcaaugaccuuu

SEQ ID NO: 1531119 - RNA, 21 nt, Human
cugauggugcaaugaccuuuc

SEQ ID NO: 1531120 - RNA, 17 nt, Human
cugccucugacacacag

SEQ ID NO: 1531121 - RNA, 18 nt, Human
cugccucugacacacagc

SEQ ID NO: 1531122 - RNA, 21 nt, Human
cugccucugacacacagcucu

SEQ ID NO: 1531123 - RNA, 21 nt, Human
cugccugcccaggccccugcc

SEQ ID NO: 1531124 - RNA, 22 nt, Human
cugccugcccaggccccugcca

SEQ ID NO: 1531125 - RNA, 18 nt, Human
cugccuuuggcagaguuc

SEQ ID NO: 1531126 - RNA, 18 nt, Human
cugcgucgguccuggugc

SEQ ID NO: 1531127 - RNA, 17 nt, Human
cugcgucgguccuggug

SEQ ID NO: 1531128 - RNA, 19 nt, Human
cugcgguccacccaggagc

SEQ ID NO: 1531129 - RNA, 20 nt, Human
cugcgguccacccaggagcc

SEQ ID NO: 1531130 - RNA, 18 nt, Human
cugcgguccacccaggag

SEQ ID NO: 1531131 - RNA, 14 nt, Human
cugccuccagggcu

SEQ ID NO: 1531132 - RNA, 15 nt, Human
cugccuccagggcug

SEQ ID NO: 1531133 - RNA, 16 nt, Human
cugccuccagggcugg

SEQ ID NO: 1531134 - RNA, 17 nt, Human
cugccuccagggcugga

SEQ ID NO: 1531135 - RNA, 18 nt, Human
cugccuccagggcuggac

SEQ ID NO: 1531136 - RNA, 19 nt, Human
cugccuccagggcuggacu

SEQ ID NO: 1531137 - RNA, 20 nt, Human
cugccuccagggcuggacug

SEQ ID NO: 1531138 - RNA, 22 nt, Human
cugccuccagggcuggacugag

SEQ ID NO: 1531139 - RNA, 23 nt, Human
cugccuccagggcuggacugagg

SEQ ID NO: 1531140 - RNA, 15 nt, Human
cugccucagccuccc

SEQ ID NO: 1531141 - RNA, 19 nt, Human
cugccucagccucccaaag

SEQ ID NO: 1531142 - RNA, 12 nt, Human
cugccgcagccc

SEQ ID NO: 1531143 - RNA, 13 nt, Human
cugccgcagcccu

SEQ ID NO: 1531144 - RNA, 13 nt, Human
cugccgcagagcu

SEQ ID NO: 1531145 - RNA, 14 nt, Human
cugccgcagagcug

SEQ ID NO: 1531146 - RNA, 15 nt, Human
cugccgcagagcugg

SEQ ID NO: 1531147 - RNA, 23 nt, Human
cugccgcagcccugcagagggca

SEQ ID NO: 1531148 - RNA, 14 nt, Human
cugccgcagcccug

SEQ ID NO: 1531149 - RNA, 16 nt, Human
cugccgcagagcuggc

SEQ ID NO: 1531150 - RNA, 18 nt, Human
cugccgcagagcuggccg

SEQ ID NO: 1531151 - RNA, 20 nt, Human
cugccgcagcccugcagagg

SEQ ID NO: 1531152 - RNA, 21 nt, Human
cugccgcagcccugcagaggg

SEQ ID NO: 1531153 - RNA, 22 nt, Human
cugccgcagcccugcagagggc

SEQ ID NO: 1531154 - RNA, 11 nt, Human
cugccaggcau

SEQ ID NO: 1531155 - RNA, 13 nt, Human
cugccaggcaugg

SEQ ID NO: 1531156 - RNA, 14 nt, Human
cugccaugccagcu

SEQ ID NO: 1531157 - RNA, 15 nt, Human
cugccaugccagcuu

SEQ ID NO: 1531158 - RNA, 14 nt, Human
cugcccaccuggcc

SEQ ID NO: 1531159 - RNA, 15 nt, Human
cugcccaccuggccu

SEQ ID NO: 1531160 - RNA, 18 nt, Human
cugcccacucccugcaac

SEQ ID NO: 1531161 - RNA, 17 nt, Human
cugcccaccuggccucu

SEQ ID NO: 1531162 - RNA, 18 nt, Human
cugcccaccuggccucug

SEQ ID NO: 1531163 - RNA, 19 nt, Human
cugcccaccuggccucugc

SEQ ID NO: 1531164 - RNA, 20 nt, Human
cugcccaccuggccucugca

SEQ ID NO: 1531165 - RNA, 22 nt, Human
cugcccaccuggccucugcacu

SEQ ID NO: 1531166 - RNA, 14 nt, Human
cugcccacucccug

SEQ ID NO: 1531167 - RNA, 15 nt, Human
cugcccacucccugc

SEQ ID NO: 1531168 - RNA, 16 nt, Human
cugcccacucccugca

SEQ ID NO: 1531169 - RNA, 18 nt, Human
cugccaaugggagcucau

SEQ ID NO: 1531170 - RNA, 19 nt, Human
cugccaaugggagcucaug

SEQ ID NO: 1531171 - RNA, 18 nt, Human
cugcaugcgggcuuccuc

SEQ ID NO: 1531172 - RNA, 22 nt, Human
cugcaugcgggcuuccuccugg

SEQ ID NO: 1531173 - RNA, 16 nt, Human
cugcaucguuucaucu

SEQ ID NO: 1531174 - RNA, 22 nt, Human
cugcaucguuucaucuuccaac

SEQ ID NO: 1531175 - RNA, 21 nt, Human
cugcaguugccagucaccccg

SEQ ID NO: 1531176 - RNA, 22 nt, Human
cugcaguugccagucaccccgg

SEQ ID NO: 1531177 - RNA, 23 nt, Human
cugcacuugcagacucuacagag

SEQ ID NO: 1531178 - RNA, 19 nt, Human
cugcaguugccagucaccc

SEQ ID NO: 1531179 - RNA, 16 nt, Human
cugaauuaugaaacuu

SEQ ID NO: 1531180 - RNA, 14 nt, Human
cugaauuucuuuug

SEQ ID NO: 1531181 - RNA, 16 nt, Human
cugacagacacaggcc

SEQ ID NO: 1531182 - RNA, 17 nt, Human
cugacagacacaggccc

SEQ ID NO: 1531183 - RNA, 18 nt, Human
cugacagacacaggcccg

SEQ ID NO: 1531184 - RNA, 12 nt, Human
cugagaaagacu

SEQ ID NO: 1531185 - RNA, 13 nt, Human
cugagaaagacua

SEQ ID NO: 1531186 - RNA, 15 nt, Human
cugagaaagacuauu

SEQ ID NO: 1531187 - RNA, 18 nt, Human
cugagaaagacuauucaa

SEQ ID NO: 1531188 - RNA, 16 nt, Human
cugagcaggauuuuaa

SEQ ID NO: 1531189 - RNA, 15 nt, Human
cugagccagauuuca

SEQ ID NO: 1531190 - RNA, 13 nt, Human
cugagccagauuu

SEQ ID NO: 1531191 - RNA, 14 nt, Human
cugagccagauuuc

SEQ ID NO: 1531192 - RNA, 21 nt, Human
cugagaugugaacacaucagc

SEQ ID NO: 1531193 - RNA, 14 nt, Human
cugagauuucaucu

SEQ ID NO: 1531194 - RNA, 15 nt, Human
cugagauuucaucug

SEQ ID NO: 1531195 - RNA, 16 nt, Human
cugagauuucaucugc

SEQ ID NO: 1531196 - RNA, 18 nt, Human
cugagauuucaucugcuc

SEQ ID NO: 1531197 - RNA, 19 nt, Human
cugagauuucaucugcucu

SEQ ID NO: 1531198 - RNA, 20 nt, Human
cugagauuucaucugcucuc

SEQ ID NO: 1531199 - RNA, 21 nt, Human
cugagauuucaucugcucucc

SEQ ID NO: 1531200 - RNA, 22 nt, Human
cugagauuucaucugcucuccu

SEQ ID NO: 1531201 - RNA, 20 nt, Human
cugagacagcccgggcucug

SEQ ID NO: 1531202 - RNA, 22 nt, Human
cugagaaagacuauucaaacag

SEQ ID NO: 1531203 - RNA, 19 nt, Human
cugagaaagacuauucaaa

SEQ ID NO: 1531204 - RNA, 20 nt, Human
cugagaaagacuauucaaac

SEQ ID NO: 1531205 - RNA, 21 nt, Human
cugagacagcccgggcucugc

SEQ ID NO: 1531206 - RNA, 22 nt, Human
cugagacagcccgggcucugcc

SEQ ID NO: 1531207 - RNA, 20 nt, Human
cugagaugugaacacaucag

SEQ ID NO: 1531208 - RNA, 13 nt, Human
cugaauuaugaaa

SEQ ID NO: 1531209 - RNA, 14 nt, Human
cugaauuaugaaac

SEQ ID NO: 1531210 - RNA, 15 nt, Human
cugaauuaugaaacu

SEQ ID NO: 1531211 - RNA, 12 nt, Human
cugaauuucuuu

SEQ ID NO: 1531212 - RNA, 19 nt, Human
cugaaugguuuucaaaaua

SEQ ID NO: 1531213 - RNA, 20 nt, Human
cugaaugguuuucaaaauaa

SEQ ID NO: 1531214 - RNA, 17 nt, Human
cugaaguucagcugcau

SEQ ID NO: 1531215 - RNA, 22 nt, Human
cugaagucccagauacuugggg

SEQ ID NO: 1531216 - RNA, 17 nt, Human
cugaagucuuuguacag

SEQ ID NO: 1531217 - RNA, 20 nt, Human
cugaagucuuuguacagaca

SEQ ID NO: 1531218 - RNA, 14 nt, Human
cugaagaagauggu

SEQ ID NO: 1531219 - RNA, 17 nt, Human
cugaagucacacaguga

SEQ ID NO: 1531220 - RNA, 18 nt, Human
cugaagucacacagugag

SEQ ID NO: 1531221 - RNA, 19 nt, Human
cugaagucacacagugagu

SEQ ID NO: 1531222 - RNA, 21 nt, Human
cugaagucacacagugagucg

SEQ ID NO: 1531223 - RNA, 14 nt, Human
cugaagaacuauuu

SEQ ID NO: 1531224 - RNA, 20 nt, Human
cugaaauaaacgucuuaaau

SEQ ID NO: 1531225 - RNA, 16 nt, Human
cucuucuccaggcugu

SEQ ID NO: 1531226 - RNA, 22 nt, Human
cucuuuggucuacacugugcug

SEQ ID NO: 1531227 - RNA, 23 nt, Human
cucuuuggucuacacugugcuga

SEQ ID NO: 1531228 - RNA, 14 nt, Human
cucuuuucaaaaca

SEQ ID NO: 1531229 - RNA, 23 nt, Human
cugaaagggacgcuacccgggaa

SEQ ID NO: 1531230 - RNA, 15 nt, Human
cucugauacagaaaa

SEQ ID NO: 1531231 - RNA, 13 nt, Human
cucugcacaagcu

SEQ ID NO: 1531232 - RNA, 14 nt, Human
cucugcacaagcug

SEQ ID NO: 1531233 - RNA, 15 nt, Human
cucugcacaagcugc

SEQ ID NO: 1531234 - RNA, 16 nt, Human
cucugcacaagcugca

SEQ ID NO: 1531235 - RNA, 18 nt, Human
cucugcccacucccugca

SEQ ID NO: 1531236 - RNA, 20 nt, Human
cucugcccacucccugcaac

SEQ ID NO: 1531237 - RNA, 13 nt, Human
cucugcccacucc

SEQ ID NO: 1531238 - RNA, 15 nt, Human
cucugcccacucccu

SEQ ID NO: 1531239 - RNA, 16 nt, Human
cucugcccacucccug

SEQ ID NO: 1531240 - RNA, 17 nt, Human
cucugcccacucccugc

SEQ ID NO: 1531241 - RNA, 13 nt, Human
cucugccucccau

SEQ ID NO: 1531242 - RNA, 14 nt, Human
cucugccucccauc

SEQ ID NO: 1531243 - RNA, 16 nt, Human
cucugccucccaucac

SEQ ID NO: 1531244 - RNA, 17 nt, Human
cucugccucccaucacc

SEQ ID NO: 1531245 - RNA, 19 nt, Human
cucugaaggguaauuauau

SEQ ID NO: 1531246 - RNA, 19 nt, Human
cucugaauuugagauacaa

SEQ ID NO: 1531247 - RNA, 22 nt, Human
cucugaaggacauugcggacag

SEQ ID NO: 1531248 - RNA, 14 nt, Human
cucugacacacagc

SEQ ID NO: 1531249 - RNA, 15 nt, Human
cucugacacacagcu

SEQ ID NO: 1531250 - RNA, 16 nt, Human
cucugacacacagcuc

SEQ ID NO: 1531251 - RNA, 17 nt, Human
cucugacacacagcucu

SEQ ID NO: 1531252 - RNA, 18 nt, Human
cucugacacacagcucug

SEQ ID NO: 1531253 - RNA, 19 nt, Human
cucugacacacagcucugu

SEQ ID NO: 1531254 - RNA, 23 nt, Human
cucugacagaagaaccccagggu

SEQ ID NO: 1531255 - RNA, 23 nt, Human
cucugagacucgcgacaaugcaa

SEQ ID NO: 1531256 - RNA, 16 nt, Human
cucugaggacacuaac

SEQ ID NO: 1531257 - RNA, 12 nt, Human
cucugaggacac

SEQ ID NO: 1531258 - RNA, 14 nt, Human
cucugaggacacua

SEQ ID NO: 1531259 - RNA, 21 nt, Human
cucugagacucgcgacaaugc

SEQ ID NO: 1531260 - RNA, 19 nt, Human
cucuuaagaagacugcauu

SEQ ID NO: 1531261 - RNA, 20 nt, Human
cucugugucagguggggcag

SEQ ID NO: 1531262 - RNA, 21 nt, Human
cucugugucagguggggcagc

SEQ ID NO: 1531263 - RNA, 22 nt, Human
cucugugucagguggggcagcu

SEQ ID NO: 1531264 - RNA, 23 nt, Human
cucugugucagguggggcagcuu

SEQ ID NO: 1531265 - RNA, 11 nt, Human
cucuucucauu

SEQ ID NO: 1531266 - RNA, 12 nt, Human
cucuucucauuu

SEQ ID NO: 1531267 - RNA, 15 nt, Human
cucuucucauuucac

SEQ ID NO: 1531268 - RNA, 19 nt, Human
cucuucucauuucaccccu

SEQ ID NO: 1531269 - RNA, 15 nt, Human
cucuucuccaggcug

SEQ ID NO: 1531270 - RNA, 10 nt, Human
cucugccuga

SEQ ID NO: 1531271 - RNA, 21 nt, Human
cucugccucccaucacccgcu

SEQ ID NO: 1531272 - RNA, 19 nt, Human
cucugccucugacacacag

SEQ ID NO: 1531273 - RNA, 20 nt, Human
cucugccucugacacacagc

SEQ ID NO: 1531274 - RNA, 23 nt, Human
cucuggcagcucagagagggugg

SEQ ID NO: 1531275 - RNA, 21 nt, Human
cucuggccuucggccuccauc

SEQ ID NO: 1531276 - RNA, 22 nt, Human
cucuggccuucggccuccaucc

SEQ ID NO: 1531277 - RNA, 18 nt, Human
cucugucgcccagucugg

SEQ ID NO: 1531278 - RNA, 19 nt, Human
cucugucgcccagucugga

SEQ ID NO: 1531279 - RNA, 17 nt, Human
cucugucgcccagucug

SEQ ID NO: 1531280 - RNA, 13 nt, Human
cucugucgcccag

SEQ ID NO: 1531281 - RNA, 14 nt, Human
cucuguccugggag

SEQ ID NO: 1531282 - RNA, 15 nt, Human
cucuguccugggagu

SEQ ID NO: 1531283 - RNA, 22 nt, Human
cucuguccugggagugagcugg

SEQ ID NO: 1531284 - RNA, 23 nt, Human
cucaaauacgugggcauucaaau

SEQ ID NO: 1531285 - RNA, 21 nt, Human
cucaacaccucugcacaagcu

SEQ ID NO: 1531286 - RNA, 13 nt, Human
cucaaccuccugg

SEQ ID NO: 1531287 - RNA, 15 nt, Human
cucaaccuccugggc

SEQ ID NO: 1531288 - RNA, 17 nt, Human
cucaaccuccugggcua

SEQ ID NO: 1531289 - RNA, 18 nt, Human
cuauuguuagucucuuga

SEQ ID NO: 1531290 - RNA, 17 nt, Human
cucaagugauucuccug

SEQ ID NO: 1531291 - RNA, 21 nt, Human
cucaaguccucuuuucugaga

SEQ ID NO: 1531292 - RNA, 22 nt, Human
cucacacaugagcaucaggcca

SEQ ID NO: 1531293 - RNA, 24 nt, Human
cucacacaugagcaucaggccagg

SEQ ID NO: 1531294 - RNA, 15 nt, Human
cucacaguccuuacc

SEQ ID NO: 1531295 - RNA, 17 nt, Human
cucaccagccccagugc

SEQ ID NO: 1531296 - RNA, 18 nt, Human
cucaccagccccagugcc

SEQ ID NO: 1531297 - RNA, 13 nt, Human
cucaccagcccca

SEQ ID NO: 1531298 - RNA, 14 nt, Human
cucaccagccccag

SEQ ID NO: 1531299 - RNA, 15 nt, Human
cucaccagccccagu

SEQ ID NO: 1531300 - RNA, 22 nt, Human
cucacauuuauucugcucacau

SEQ ID NO: 1531301 - RNA, 15 nt, Human
cucacauuuauucug

SEQ ID NO: 1531302 - RNA, 19 nt, Human
cucacauuuauucugcuca

SEQ ID NO: 1531303 - RNA, 17 nt, Human
cucacaguccuuaccag

SEQ ID NO: 1531304 - RNA, 19 nt, Human
cucacaguccuuaccagca

SEQ ID NO: 1531305 - RNA, 22 nt, Human
cucacaguccuuaccagcagag

SEQ ID NO: 1531306 - RNA, 23 nt, Human
cucacaguccuuaccagcagagc

SEQ ID NO: 1531307 - RNA, 15 nt, Human
cucagaucuucugug

SEQ ID NO: 1531308 - RNA, 16 nt, Human
cucagcauccuggcac

SEQ ID NO: 1531309 - RNA, 17 nt, Human
cucagcauccuggcacc

SEQ ID NO: 1531310 - RNA, 18 nt, Human
cucagagagggugggagu

SEQ ID NO: 1531311 - RNA, 14 nt, Human
cucagagagggugg

SEQ ID NO: 1531312 - RNA, 21 nt, Human
cucacuguugcccaggcuggc

SEQ ID NO: 1531313 - RNA, 22 nt, Human
cucacuguugcccaggcuggcg

SEQ ID NO: 1531314 - RNA, 19 nt, Human
cucacugccaugccagcuu

SEQ ID NO: 1531315 - RNA, 22 nt, Human
cucacugccaugccagcuuauc

SEQ ID NO: 1531316 - RNA, 20 nt, Human
cucacuguugcccaggcugg

SEQ ID NO: 1531317 - RNA, 19 nt, Human
cucacuauguugcccaggc

SEQ ID NO: 1531318 - RNA, 20 nt, Human
cucacuauguugcccaggca

SEQ ID NO: 1531319 - RNA, 15 nt, Human
cucaccccagcccca

SEQ ID NO: 1531320 - RNA, 23 nt, Human
cucacuauguugcccaggcaggu

SEQ ID NO: 1531321 - RNA, 21 nt, Human
cucacuauguugcccaggcag

SEQ ID NO: 1531322 - RNA, 22 nt, Human
cucacuauguugcccaggcagg

SEQ ID NO: 1531323 - RNA, 13 nt, Human
cucacuccuugaa

SEQ ID NO: 1531324 - RNA, 11 nt, Human
cucacucuguc

SEQ ID NO: 1531325 - RNA, 12 nt, Human
cucacucugucg

SEQ ID NO: 1531326 - RNA, 14 nt, Human
cucacugcagccuc

SEQ ID NO: 1531327 - RNA, 13 nt, Human
cucacugcagccu

SEQ ID NO: 1531328 - RNA, 12 nt, Human
cucacugcagcc

SEQ ID NO: 1531329 - RNA, 22 nt, Human
cucacucugucgcccagucugg

SEQ ID NO: 1531330 - RNA, 13 nt, Human
cucacucugucgc

SEQ ID NO: 1531331 - RNA, 21 nt, Human
cucacucugucgcccagucug

SEQ ID NO: 1531332 - RNA, 18 nt, Human
cuaugggacucaaugcac

SEQ ID NO: 1531333 - RNA, 22 nt, Human
cuaugggacucaaugcacugac

SEQ ID NO: 1531334 - RNA, 23 nt, Human
cuaugggacucaaugcacugaca

SEQ ID NO: 1531335 - RNA, 15 nt, Human
cuauuagagaagaga

SEQ ID NO: 1531336 - RNA, 23 nt, Human
cuauucaaacagucucaggaaau

SEQ ID NO: 1531337 - RNA, 18 nt, Human
cuauucaaacagucucag

SEQ ID NO: 1531338 - RNA, 17 nt, Human
cuauauuuuacauaaau

SEQ ID NO: 1531339 - RNA, 14 nt, Human
cuauauuguacaca

SEQ ID NO: 1531340 - RNA, 15 nt, Human
cuauauuguacacac

SEQ ID NO: 1531341 - RNA, 18 nt, Human
cuauauuguuugcuaagc

SEQ ID NO: 1531342 - RNA, 13 nt, Human
cuauauuguacac

SEQ ID NO: 1531343 - RNA, 17 nt, Human
cuauagccuaggugaca

SEQ ID NO: 1531344 - RNA, 20 nt, Human
cuauaggugcuacaaaaaca

SEQ ID NO: 1531345 - RNA, 21 nt, Human
cuauaggugcuacaaaaacac

SEQ ID NO: 1531346 - RNA, 22 nt, Human
cuauaggugcuacaaaaacaca

SEQ ID NO: 1531347 - RNA, 21 nt, Human
cuauaauguaagcucuacuga

SEQ ID NO: 1531348 - RNA, 22 nt, Human
cuauaauuuaccugaagucuuu

SEQ ID NO: 1531349 - RNA, 16 nt, Human
cuauaauguaagcucu

SEQ ID NO: 1531350 - RNA, 16 nt, Human
cuaguaauuggaaagg

SEQ ID NO: 1531351 - RNA, 20 nt, Human
cuagugaaacucguuaauuu

SEQ ID NO: 1531352 - RNA, 18 nt, Human
cuagugaaagaggcagcu

SEQ ID NO: 1531353 - RNA, 19 nt, Human
cuagugaaagaggcagcuu

SEQ ID NO: 1531354 - RNA, 21 nt, Human
cuagugagcagucaggaaaga

SEQ ID NO: 1531355 - RNA, 23 nt, Human
cgcccaguuggguggaugccugg

SEQ ID NO: 1531356 - RNA, 20 nt, Human
cgccaucccagccccaauga

SEQ ID NO: 1531357 - RNA, 15 nt, Human
cgccaugcuccuggc

SEQ ID NO: 1531358 - RNA, 22 nt, Human
cgcccaguuggguggaugccug

SEQ ID NO: 1531359 - RNA, 14 nt, Human
cuaggugacagagu

SEQ ID NO: 1531360 - RNA, 18 nt, Human
cuaggugacagagugaga

SEQ ID NO: 1531361 - RNA, 24 nt, Human
cuaggugacagagugagacucugu

SEQ ID NO: 1531362 - RNA, 13 nt, Human
cucgcgacaaugc

SEQ ID NO: 1531363 - RNA, 22 nt, Human
cucgagcaugccuggauggggc

SEQ ID NO: 1531364 - RNA, 19 nt, Human
cucgagaacuuucauuuuu

SEQ ID NO: 1531365 - RNA, 13 nt, Human
cucgagcaugccu

SEQ ID NO: 1531366 - RNA, 15 nt, Human
cucgagcaugccugg

SEQ ID NO: 1531367 - RNA, 16 nt, Human
cucgagcaugccugga

SEQ ID NO: 1531368 - RNA, 19 nt, Human
cucgagcaugccuggaugg

SEQ ID NO: 1531369 - RNA, 20 nt, Human
cuccuuccuggagcccagag

SEQ ID NO: 1531370 - RNA, 23 nt, Human
cuccuuccuggagcccagaggag

SEQ ID NO: 1531371 - RNA, 23 nt, Human
cuccuuggugucgggcaugacac

SEQ ID NO: 1531372 - RNA, 21 nt, Human
cuccugugugugcgccuacag

SEQ ID NO: 1531373 - RNA, 23 nt, Human
cuccugugugugcgccuacagga

SEQ ID NO: 1531374 - RNA, 24 nt, Human
cuccugugugugcgccuacaggag

SEQ ID NO: 1531375 - RNA, 14 nt, Human
cuccuggaaauauu

SEQ ID NO: 1531376 - RNA, 17 nt, Human
cuccugccucagccucc

SEQ ID NO: 1531377 - RNA, 12 nt, Human
cuccugccucag

SEQ ID NO: 1531378 - RNA, 11 nt, Human
cuccugccuca

SEQ ID NO: 1531379 - RNA, 18 nt, Human
cuccugccgcagagcugg

SEQ ID NO: 1531380 - RNA, 22 nt, Human
cuccucuccccagcaagugaga

SEQ ID NO: 1531381 - RNA, 16 nt, Human
cuccugccgcagagcu

SEQ ID NO: 1531382 - RNA, 17 nt, Human
cuccugccgcagagcug

SEQ ID NO: 1531383 - RNA, 13 nt, Human
cuccucuccccag

SEQ ID NO: 1531384 - RNA, 15 nt, Human
cuccucuccccagca

SEQ ID NO: 1531385 - RNA, 22 nt, Human
cuccugccucgaacuggcugca

SEQ ID NO: 1531386 - RNA, 18 nt, Human
cuccugccucgaacuggc

SEQ ID NO: 1531387 - RNA, 20 nt, Human
cuccugccucgaacuggcug

SEQ ID NO: 1531388 - RNA, 21 nt, Human
cuccugccucgaacuggcugc

SEQ ID NO: 1531389 - RNA, 16 nt, Human
cucccgaauagcuggg

SEQ ID NO: 1531390 - RNA, 19 nt, Human
cucccgaguagcugggacu

SEQ ID NO: 1531391 - RNA, 20 nt, Human
cucccgaguagcugggacua

SEQ ID NO: 1531392 - RNA, 14 nt, Human
cuccauccugaggc

SEQ ID NO: 1531393 - RNA, 13 nt, Human
cuccauccugagg

SEQ ID NO: 1531394 - RNA, 22 nt, Human
cuccccagcaagugagagcugg

SEQ ID NO: 1531395 - RNA, 23 nt, Human
cuccccagcaagugagagcuggg

SEQ ID NO: 1531396 - RNA, 13 nt, Human
cuccccugccccc

SEQ ID NO: 1531397 - RNA, 14 nt, Human
cuccccugccccca

SEQ ID NO: 1531398 - RNA, 15 nt, Human
cuccccugcccccag

SEQ ID NO: 1531399 - RNA, 16 nt, Human
cuccccugcccccagg

SEQ ID NO: 1531400 - RNA, 17 nt, Human
cuccccugcccccagga

SEQ ID NO: 1531401 - RNA, 18 nt, Human
cuccccugcccccaggac

SEQ ID NO: 1531402 - RNA, 19 nt, Human
cuccccugcccccaggacu

SEQ ID NO: 1531403 - RNA, 20 nt, Human
cuccccugcccccaggacug

SEQ ID NO: 1531404 - RNA, 21 nt, Human
cuccccugcccccaggacugg

SEQ ID NO: 1531405 - RNA, 22 nt, Human
cuccccugcccccaggacuggg

SEQ ID NO: 1531406 - RNA, 23 nt, Human
cuccccugcccccaggacugggc

SEQ ID NO: 1531407 - RNA, 12 nt, Human
cuccucaggagc

SEQ ID NO: 1531408 - RNA, 13 nt, Human
cuccucaggagcc

SEQ ID NO: 1531409 - RNA, 22 nt, Human
cuccuccagccgccaugcuccu

SEQ ID NO: 1531410 - RNA, 17 nt, Human
cuccuccacucuccccc

SEQ ID NO: 1531411 - RNA, 15 nt, Human
cuccuccagccgcca

SEQ ID NO: 1531412 - RNA, 13 nt, Human
cuccuccagaguc

SEQ ID NO: 1531413 - RNA, 15 nt, Human
cuccuccagagucag

SEQ ID NO: 1531414 - RNA, 18 nt, Human
cuccucagaucuucugug

SEQ ID NO: 1531415 - RNA, 12 nt, Human
cucccuuucaac

SEQ ID NO: 1531416 - RNA, 21 nt, Human
cuccaaacugacucuuaagaa

SEQ ID NO: 1531417 - RNA, 12 nt, Human
cuccaaagaaau

SEQ ID NO: 1531418 - RNA, 18 nt, Human
cuccaaaauaaaacuuuu

SEQ ID NO: 1531419 - RNA, 13 nt, Human
cuccaaagaaaug

SEQ ID NO: 1531420 - RNA, 16 nt, Human
cuccaaaauaaaacuu

SEQ ID NO: 1531421 - RNA, 15 nt, Human
cuccaaaauaaaacu

SEQ ID NO: 1531422 - RNA, 18 nt, Human
cucauuugucacacacuu

SEQ ID NO: 1531423 - RNA, 20 nt, Human
cucaucucuuagcuccccuc

SEQ ID NO: 1531424 - RNA, 22 nt, Human
cucaucucuuagcuccccucca

SEQ ID NO: 1531425 - RNA, 17 nt, Human
cucauuugucacacacu

SEQ ID NO: 1531426 - RNA, 15 nt, Human
cuccacccugcucuc

SEQ ID NO: 1531427 - RNA, 13 nt, Human
cuccacccugcuc

SEQ ID NO: 1531428 - RNA, 18 nt, Human
cuccacaccauucagguc

SEQ ID NO: 1531429 - RNA, 20 nt, Human
cuccacaccauucaggucuu

SEQ ID NO: 1531430 - RNA, 15 nt, Human
cuccaccugccaggg

SEQ ID NO: 1531431 - RNA, 14 nt, Human
cuccaccugccagg

SEQ ID NO: 1531432 - RNA, 12 nt, Human
cuccaccugcca

SEQ ID NO: 1531433 - RNA, 13 nt, Human
cuccaccugccag

SEQ ID NO: 1531434 - RNA, 20 nt, Human
cuccagccccuggaugcagc

SEQ ID NO: 1531435 - RNA, 16 nt, Human
cuccagccccuggaug

SEQ ID NO: 1531436 - RNA, 17 nt, Human
cuccagccccuggaugc

SEQ ID NO: 1531437 - RNA, 14 nt, Human
cuccagcucaccag

SEQ ID NO: 1531438 - RNA, 12 nt, Human
cuccagccuggg

SEQ ID NO: 1531439 - RNA, 12 nt, Human
cuccauccugag

SEQ ID NO: 1531440 - RNA, 18 nt, Human
cuccaggagcagccacau

SEQ ID NO: 1531441 - RNA, 23 nt, Human
cuccaggagcagccacauuccug

SEQ ID NO: 1531442 - RNA, 11 nt, Human
cuccaggagca

SEQ ID NO: 1531443 - RNA, 13 nt, Human
cuccaggagcagc

SEQ ID NO: 1531444 - RNA, 14 nt, Human
cuccaggagcagcc

SEQ ID NO: 1531445 - RNA, 15 nt, Human
cuccaggagcagcca

SEQ ID NO: 1531446 - RNA, 16 nt, Human
cuccaggagcagccac

SEQ ID NO: 1531447 - RNA, 17 nt, Human
cuccaggagcagccaca

SEQ ID NO: 1531448 - RNA, 22 nt, Human
cucauacucaccucaccccacu

SEQ ID NO: 1531449 - RNA, 14 nt, Human
cucauacucaccuc

SEQ ID NO: 1531450 - RNA, 21 nt, Human
cucauaguaugguggcugggu

SEQ ID NO: 1531451 - RNA, 22 nt, Human
cucaggugauccacccaccuca

SEQ ID NO: 1531452 - RNA, 20 nt, Human
cucaggugauccacccaccu

SEQ ID NO: 1531453 - RNA, 18 nt, Human
cucaggugauccacccac

SEQ ID NO: 1531454 - RNA, 19 nt, Human
cucaggugauccacccacc

SEQ ID NO: 1531455 - RNA, 16 nt, Human
cucauacccaccccca

SEQ ID NO: 1531456 - RNA, 18 nt, Human
cucauacccacccccacc

SEQ ID NO: 1531457 - RNA, 19 nt, Human
cucauacccacccccaccc

SEQ ID NO: 1531458 - RNA, 21 nt, Human
cucauacccacccccacccaa

SEQ ID NO: 1531459 - RNA, 22 nt, Human
cucaucaccaacgucugugcca

SEQ ID NO: 1531460 - RNA, 21 nt, Human
cucaucaccaacgucugugcc

SEQ ID NO: 1531461 - RNA, 23 nt, Human
cucauaguaugguggcuggguug

SEQ ID NO: 1531462 - RNA, 15 nt, Human
cucauccucauaccc

SEQ ID NO: 1531463 - RNA, 17 nt, Human
cucaucucuuagcuccc

SEQ ID NO: 1531464 - RNA, 19 nt, Human
cucaucucuuagcuccccu

SEQ ID NO: 1531465 - RNA, 18 nt, Human
cucaggaguuugagacca

SEQ ID NO: 1531466 - RNA, 23 nt, Human
cucaggaguuugagaccaaccug

SEQ ID NO: 1531467 - RNA, 18 nt, Human
cucagcauccuggcaccc

SEQ ID NO: 1531468 - RNA, 14 nt, Human
cucagggccuggcu

SEQ ID NO: 1531469 - RNA, 15 nt, Human
cucagggccuggcuc

SEQ ID NO: 1531470 - RNA, 16 nt, Human
cucagggccuggcuca

SEQ ID NO: 1531471 - RNA, 15 nt, Human
cucagggccuggucg

SEQ ID NO: 1531472 - RNA, 15 nt, Human
cucagggucccuggu

SEQ ID NO: 1531473 - RNA, 16 nt, Human
cucagggucccuggug

SEQ ID NO: 1531474 - RNA, 17 nt, Human
cucagggucccuggugg

SEQ ID NO: 1531475 - RNA, 18 nt, Human
cucagggucccugguggc

SEQ ID NO: 1531476 - RNA, 16 nt, Human
cucaggugagaagcag

SEQ ID NO: 1531477 - RNA, 19 nt, Human
cucaggugagaagcagagg

SEQ ID NO: 1531478 - RNA, 20 nt, Human
cucaggugagaagcagagga

SEQ ID NO: 1531479 - RNA, 18 nt, Human
cgagaucacgccacugca

SEQ ID NO: 1531480 - RNA, 20 nt, Human
cgagaucacgccacugcacu

SEQ ID NO: 1531481 - RNA, 20 nt, Human
cgagauugcaccacugcacu

SEQ ID NO: 1531482 - RNA, 18 nt, Human
cgagcaggcuacugucag

SEQ ID NO: 1531483 - RNA, 20 nt, Human
cgagcaggcuucuucccccc

SEQ ID NO: 1531484 - RNA, 13 nt, Human
cgagcaugccugg

SEQ ID NO: 1531485 - RNA, 16 nt, Human
cgagcaugccuggaug

SEQ ID NO: 1531486 - RNA, 17 nt, Human
cgagcaugccuggaugg

SEQ ID NO: 1531487 - RNA, 18 nt, Human
cgagauagccaaggccaa

SEQ ID NO: 1531488 - RNA, 17 nt, Human
cgagaucacgccacugc

SEQ ID NO: 1531489 - RNA, 16 nt, Human
cgagaacuuucauuuu

SEQ ID NO: 1531490 - RNA, 17 nt, Human
cgagaacuuucauuuuu

SEQ ID NO: 1531491 - RNA, 15 nt, Human
cgaauagcugggacu

SEQ ID NO: 1531492 - RNA, 13 nt, Human
cgaauagcuggga

SEQ ID NO: 1531493 - RNA, 14 nt, Human
cgaauagcugggac

SEQ ID NO: 1531494 - RNA, 23 nt, Human
ccuuugacgccaucccagcccca

SEQ ID NO: 1531495 - RNA, 22 nt, Human
ccuuugacgccaucccagcccc

SEQ ID NO: 1531496 - RNA, 20 nt, Human
ccuuugacgccaucccagcc

SEQ ID NO: 1531497 - RNA, 21 nt, Human
ccuuugacgccaucccagccc

SEQ ID NO: 1531498 - RNA, 20 nt, Human
cgaaaacguggcugcuucaa

SEQ ID NO: 1531499 - RNA, 15 nt, Human
cgaaaacguggcugc

SEQ ID NO: 1531500 - RNA, 18 nt, Human
cgaaaacguggcugcuuc

SEQ ID NO: 1531501 - RNA, 19 nt, Human
cgaaaacguggcugcuuca

SEQ ID NO: 1531502 - RNA, 23 nt, Human
cgaagaguauuuuugacagaaua

SEQ ID NO: 1531503 - RNA, 21 nt, Human
cgaagaguauuuuugacagaa

SEQ ID NO: 1531504 - RNA, 12 nt, Human
cgaacuggcugc

SEQ ID NO: 1531505 - RNA, 14 nt, Human
cgaacuggcugcaa

SEQ ID NO: 1531506 - RNA, 21 nt, Human
cgaaagaacaguccauugaaa

SEQ ID NO: 1531507 - RNA, 12 nt, Human
cgaaagaacagu

SEQ ID NO: 1531508 - RNA, 22 nt, Human
cgaaagggacuuggaagcuccg

SEQ ID NO: 1531509 - RNA, 20 nt, Human
cgaaaggaugaaagugacca

SEQ ID NO: 1531510 - RNA, 19 nt, Human
cgaaagggacuuggaagcu

SEQ ID NO: 1531511 - RNA, 20 nt, Human
cgauuucuguuuagauaaua

SEQ ID NO: 1531512 - RNA, 18 nt, Human
cgagcccugguggcagug

SEQ ID NO: 1531513 - RNA, 18 nt, Human
cgagcaugccuggauggg

SEQ ID NO: 1531514 - RNA, 15 nt, Human
cgagcccugguggca

SEQ ID NO: 1531515 - RNA, 16 nt, Human
cgagcccugguggcag

SEQ ID NO: 1531516 - RNA, 22 nt, Human
cgccagauucuuuccugaggcu

SEQ ID NO: 1531517 - RNA, 22 nt, Human
cgccaggggaaaaucagccugc

SEQ ID NO: 1531518 - RNA, 15 nt, Human
cgcagcccugcagag

SEQ ID NO: 1531519 - RNA, 19 nt, Human
cgccagauucuuuccugag

SEQ ID NO: 1531520 - RNA, 20 nt, Human
cgccagauucuuuccugagg

SEQ ID NO: 1531521 - RNA, 21 nt, Human
cgccagauucuuuccugaggc

SEQ ID NO: 1531522 - RNA, 15 nt, Human
cgcagacaggaccag

SEQ ID NO: 1531523 - RNA, 16 nt, Human
cgcagacaggaccagg

SEQ ID NO: 1531524 - RNA, 14 nt, Human
cgcagcccugcaga

SEQ ID NO: 1531525 - RNA, 17 nt, Human
cgccaugcuccuggccc

SEQ ID NO: 1531526 - RNA, 14 nt, Human
cgagcaugccugga

SEQ ID NO: 1531527 - RNA, 19 nt, Human
ccuuucuccccugccccca

SEQ ID NO: 1531528 - RNA, 20 nt, Human
ccuuucuccccugcccccag

SEQ ID NO: 1531529 - RNA, 16 nt, Human
ccuuugacgccauccc

SEQ ID NO: 1531530 - RNA, 17 nt, Human
ccuuugacgccauccca

SEQ ID NO: 1531531 - RNA, 18 nt, Human
ccuuugacgccaucccag

SEQ ID NO: 1531532 - RNA, 15 nt, Human
ccuuucuccccugcc

SEQ ID NO: 1531533 - RNA, 18 nt, Human
ccuuucuccccugccccc

SEQ ID NO: 1531534 - RNA, 19 nt, Human
ccuuggggcugaugcaguu

SEQ ID NO: 1531535 - RNA, 22 nt, Human
ccuuggugucgggcaugacacg

SEQ ID NO: 1531536 - RNA, 21 nt, Human
ccuugguuaggcauuguggga

SEQ ID NO: 1531537 - RNA, 22 nt, Human
ccuugguuaggcauugugggaa

SEQ ID NO: 1531538 - RNA, 20 nt, Human
ccuugaguugauucagcucu

SEQ ID NO: 1531539 - RNA, 23 nt, Human
ccuugaccauucuccaccugcca

SEQ ID NO: 1531540 - RNA, 13 nt, Human
ccuugacucuuuc

SEQ ID NO: 1531541 - RNA, 15 nt, Human
ccuucuccuucaccu

SEQ ID NO: 1531542 - RNA, 19 nt, Human
ccuucuccuucaccuuugu

SEQ ID NO: 1531543 - RNA, 16 nt, Human
ccuucggccuccaucc

SEQ ID NO: 1531544 - RNA, 15 nt, Human
ccuucggcgccuuaa

SEQ ID NO: 1531545 - RNA, 14 nt, Human
ccuucuaggaagcu

SEQ ID NO: 1531546 - RNA, 14 nt, Human
ccuucucucaucuc

SEQ ID NO: 1531547 - RNA, 15 nt, Human
ccuucucucaucucu

SEQ ID NO: 1531548 - RNA, 15 nt, Human
ccuucugugaaagua

SEQ ID NO: 1531549 - RNA, 13 nt, Human
ccuucagcccuca

SEQ ID NO: 1531550 - RNA, 12 nt, Human
ccuucagccuga

SEQ ID NO: 1531551 - RNA, 11 nt, Human
ccuucagugcc

SEQ ID NO: 1531552 - RNA, 14 nt, Human
ccuucagcccucac

SEQ ID NO: 1531553 - RNA, 15 nt, Human
ccuucagcccucacc

SEQ ID NO: 1531554 - RNA, 14 nt, Human
ccuucagugccaaa

SEQ ID NO: 1531555 - RNA, 21 nt, Human
ccuucaccuuuguccccaccg

SEQ ID NO: 1531556 - RNA, 14 nt, Human
ccuuagacaguccc

SEQ ID NO: 1531557 - RNA, 17 nt, Human
ccuucacagaugggugc

SEQ ID NO: 1531558 - RNA, 19 nt, Human
ccuucaccuuuguccccac

SEQ ID NO: 1531559 - RNA, 20 nt, Human
ccuucaccuuuguccccacc

SEQ ID NO: 1531560 - RNA, 14 nt, Human
ccuucggccuccau

SEQ ID NO: 1531561 - RNA, 20 nt, Human
ccuucggccuccauccugag

SEQ ID NO: 1531562 - RNA, 22 nt, Human
ccuucauuuggcauuccccacu

SEQ ID NO: 1531563 - RNA, 18 nt, Human
ccuucagcccucaccccu

SEQ ID NO: 1531564 - RNA, 14 nt, Human
ccuuacacaauggu

SEQ ID NO: 1531565 - RNA, 20 nt, Human
ccuuacacaaugguuuucuu

SEQ ID NO: 1531566 - RNA, 17 nt, Human
ccuuagaagucacacag

SEQ ID NO: 1531567 - RNA, 18 nt, Human
ccuuagaagucacacagu

SEQ ID NO: 1531568 - RNA, 19 nt, Human
ccuuacccucauguucuua

SEQ ID NO: 1531569 - RNA, 19 nt, Human
ccuuaccugccaggaagcc

SEQ ID NO: 1531570 - RNA, 13 nt, Human
ccuuaccagcaga

SEQ ID NO: 1531571 - RNA, 15 nt, Human
ccuuacccucauguu

SEQ ID NO: 1531572 - RNA, 20 nt, Human
ccuuaccagcagagcaccuu

SEQ ID NO: 1531573 - RNA, 20 nt, Human
ccuguuaaaagaugaaaaua

SEQ ID NO: 1531574 - RNA, 21 nt, Human
ccuguuaaaagaugaaaauau

SEQ ID NO: 1531575 - RNA, 16 nt, Human
ccuguuucugcagcca

SEQ ID NO: 1531576 - RNA, 14 nt, Human
ccuguuuguuucug

SEQ ID NO: 1531577 - RNA, 18 nt, Human
ccuguuuguuucugaaag

SEQ ID NO: 1531578 - RNA, 20 nt, Human
ccugugugugcgccuacagg

SEQ ID NO: 1531579 - RNA, 21 nt, Human
ccugugugugcgccuacagga

SEQ ID NO: 1531580 - RNA, 22 nt, Human
ccugugucuugcaauggcagcc

SEQ ID NO: 1531581 - RNA, 17 nt, Human
ccugugucuugcaaugg

SEQ ID NO: 1531582 - RNA, 19 nt, Human
ccugugucuugcaauggca

SEQ ID NO: 1531583 - RNA, 21 nt, Human
ccugugucuugcaauggcagc

SEQ ID NO: 1531584 - RNA, 22 nt, Human
ccuggugcccuggaugcccagg

SEQ ID NO: 1531585 - RNA, 21 nt, Human
ccuggugcccuggaugcccag

SEQ ID NO: 1531586 - RNA, 12 nt, Human
ccuucagugccu

SEQ ID NO: 1531587 - RNA, 12 nt, Human
ccuggugcccug

SEQ ID NO: 1531588 - RNA, 18 nt, Human
ccuggugcccuggaugcc

SEQ ID NO: 1531589 - RNA, 20 nt, Human
ccuggugcccuggaugccca

SEQ ID NO: 1531590 - RNA, 20 nt, Human
ccuggucccacgagggugcc

SEQ ID NO: 1531591 - RNA, 18 nt, Human
ccuggaauauauaaccag

SEQ ID NO: 1531592 - RNA, 22 nt, Human
ccuggcacccggccccugcugg

SEQ ID NO: 1531593 - RNA, 23 nt, Human
ccuggcacccggccccugcuggu

SEQ ID NO: 1531594 - RNA, 22 nt, Human
ccuggcacuauaauguaagcuc

SEQ ID NO: 1531595 - RNA, 12 nt, Human
ccuggcagcccc

SEQ ID NO: 1531596 - RNA, 14 nt, Human
ccuggcagccccug

SEQ ID NO: 1531597 - RNA, 13 nt, Human
ccuggcagccccu

SEQ ID NO: 1531598 - RNA, 15 nt, Human
ccuggccagaugcac

SEQ ID NO: 1531599 - RNA, 20 nt, Human
ccuggccagaugcaccagcc

SEQ ID NO: 1531600 - RNA, 11 nt, Human
ccugccucagc

SEQ ID NO: 1531601 - RNA, 23 nt, Human
ccugccuguugggccaggagccu

SEQ ID NO: 1531602 - RNA, 22 nt, Human
ccugccccucaacucuccucca

SEQ ID NO: 1531603 - RNA, 20 nt, Human
ccugcccccaggacugggcc

SEQ ID NO: 1531604 - RNA, 22 nt, Human
ccugcccccaggacugggccac

SEQ ID NO: 1531605 - RNA, 16 nt, Human
ccugcccccaggacug

SEQ ID NO: 1531606 - RNA, 17 nt, Human
ccugcccccaggacugg

SEQ ID NO: 1531607 - RNA, 18 nt, Human
ccugcccccaggacuggg

SEQ ID NO: 1531608 - RNA, 19 nt, Human
ccugcccccaggacugggc

SEQ ID NO: 1531609 - RNA, 16 nt, Human
ccugcggugcuaucuc

SEQ ID NO: 1531610 - RNA, 17 nt, Human
ccugcggugcuaucucc

SEQ ID NO: 1531611 - RNA, 23 nt, Human
ccuggaaaucaggguuaguauug

SEQ ID NO: 1531612 - RNA, 14 nt, Human
ccugcuucaaauau

SEQ ID NO: 1531613 - RNA, 22 nt, Human
ccugcggugcuaucucccccag

SEQ ID NO: 1531614 - RNA, 21 nt, Human
ccugcucuccgaccagacacc

SEQ ID NO: 1531615 - RNA, 22 nt, Human
ccugcucuccgaccagacaccu

SEQ ID NO: 1531616 - RNA, 12 nt, Human
ccugagccagau

SEQ ID NO: 1531617 - RNA, 14 nt, Human
ccugagcuuucugc

SEQ ID NO: 1531618 - RNA, 11 nt, Human
ccugagcccca

SEQ ID NO: 1531619 - RNA, 21 nt, Human
ccugaggcccagagggccugc

SEQ ID NO: 1531620 - RNA, 16 nt, Human
ccugagcuuucugcua

SEQ ID NO: 1531621 - RNA, 13 nt, Human
ccugccaggaagc

SEQ ID NO: 1531622 - RNA, 14 nt, Human
ccugccaggaagcc

SEQ ID NO: 1531623 - RNA, 15 nt, Human
ccugccaggaagcca

SEQ ID NO: 1531624 - RNA, 17 nt, Human
ccugccaggaagccagc

SEQ ID NO: 1531625 - RNA, 22 nt, Human
ccugccagggacagagggggug

SEQ ID NO: 1531626 - RNA, 16 nt, Human
ccugccagggacagag

SEQ ID NO: 1531627 - RNA, 12 nt, Human
ccugcccccagg

SEQ ID NO: 1531628 - RNA, 14 nt, Human
ccugcccccaggac

SEQ ID NO: 1531629 - RNA, 15 nt, Human
ccugcccccaggacu

SEQ ID NO: 1531630 - RNA, 12 nt, Human
ccugccagggac

SEQ ID NO: 1531631 - RNA, 13 nt, Human
ccugccagggaca

SEQ ID NO: 1531632 - RNA, 14 nt, Human
ccugccagggacag

SEQ ID NO: 1531633 - RNA, 15 nt, Human
ccugccagggacaga

SEQ ID NO: 1531634 - RNA, 23 nt, Human
ccugccaggaagccagcaggcuc

SEQ ID NO: 1531635 - RNA, 16 nt, Human
ccugccaggcauggug

SEQ ID NO: 1531636 - RNA, 11 nt, Human
ccugccaggga

SEQ ID NO: 1531637 - RNA, 18 nt, Human
ccugccaggaagccagca

SEQ ID NO: 1531638 - RNA, 19 nt, Human
ccugccaggaagccagcag

SEQ ID NO: 1531639 - RNA, 21 nt, Human
ccugccaggaagccagcaggc

SEQ ID NO: 1531640 - RNA, 22 nt, Human
ccugccaggaagccagcaggcu

SEQ ID NO: 1531641 - RNA, 17 nt, Human
ccugauugugucucuug

SEQ ID NO: 1531642 - RNA, 19 nt, Human
ccugauugugucucuuggu

SEQ ID NO: 1531643 - RNA, 22 nt, Human
ccugcaaccugauugugucucu

SEQ ID NO: 1531644 - RNA, 21 nt, Human
ccugcaaccugauugugucuc

SEQ ID NO: 1531645 - RNA, 11 nt, Human
ccugaggcccu

SEQ ID NO: 1531646 - RNA, 12 nt, Human
ccugaggcccuu

SEQ ID NO: 1531647 - RNA, 20 nt, Human
ccugaugcuucuucagagac

SEQ ID NO: 1531648 - RNA, 21 nt, Human
ccugaugcuucuucagagacu

SEQ ID NO: 1531649 - RNA, 22 nt, Human
ccugaugcuucuucagagacuc

SEQ ID NO: 1531650 - RNA, 14 nt, Human
ccugaggcccuucu

SEQ ID NO: 1531651 - RNA, 15 nt, Human
ccugauugugucucu

SEQ ID NO: 1531652 - RNA, 19 nt, Human
ccugcaauuucauaugcug

SEQ ID NO: 1531653 - RNA, 14 nt, Human
ccugcaagaacaag

SEQ ID NO: 1531654 - RNA, 16 nt, Human
ccucuaggaggucucu

SEQ ID NO: 1531655 - RNA, 16 nt, Human
ccucggugccuuccuc

SEQ ID NO: 1531656 - RNA, 14 nt, Human
ccucgguguggaga

SEQ ID NO: 1531657 - RNA, 18 nt, Human
ccucgguguggagaagcg

SEQ ID NO: 1531658 - RNA, 23 nt, Human
ccuccugccucgaacuggcugca

SEQ ID NO: 1531659 - RNA, 14 nt, Human
ccuccugggcuaag

SEQ ID NO: 1531660 - RNA, 16 nt, Human
ccuccuccacucuccc

SEQ ID NO: 1531661 - RNA, 10 nt, Human
ccucccuccc

SEQ ID NO: 1531662 - RNA, 20 nt, Human
ccucccgaguagcugggacu

SEQ ID NO: 1531663 - RNA, 21 nt, Human
ccucccgaguagcugggacua

SEQ ID NO: 1531664 - RNA, 17 nt, Human
ccucccgaauagcuggg

SEQ ID NO: 1531665 - RNA, 23 nt, Human
ccuccaugugggcuaguugggcu

SEQ ID NO: 1531666 - RNA, 15 nt, Human
ccucccaaagugcug

SEQ ID NO: 1531667 - RNA, 16 nt, Human
ccucccaaagugcugg

SEQ ID NO: 1531668 - RNA, 22 nt, Human
ccuccaggugcacaagcuccaa

SEQ ID NO: 1531669 - RNA, 22 nt, Human
ccuccagggcuggacugaggcc

SEQ ID NO: 1531670 - RNA, 19 nt, Human
ccuccaggugcacaagcuc

SEQ ID NO: 1531671 - RNA, 21 nt, Human
ccuccaggugcacaagcucca

SEQ ID NO: 1531672 - RNA, 12 nt, Human
ccuccagggcug

SEQ ID NO: 1531673 - RNA, 13 nt, Human
ccuccagggcugg

SEQ ID NO: 1531674 - RNA, 16 nt, Human
ccuccagggcuggacu

SEQ ID NO: 1531675 - RNA, 17 nt, Human
ccuccagggcuggacug

SEQ ID NO: 1531676 - RNA, 18 nt, Human
ccuccagggcuggacuga

SEQ ID NO: 1531677 - RNA, 20 nt, Human
ccuccagggcuggacugagg

SEQ ID NO: 1531678 - RNA, 21 nt, Human
ccuccagggcuggacugaggc

SEQ ID NO: 1531679 - RNA, 13 nt, Human
ccucauccucaua

SEQ ID NO: 1531680 - RNA, 20 nt, Human
ccucauccucauacccaccc

SEQ ID NO: 1531681 - RNA, 20 nt, Human
ccucagucuggcccuuccuu

SEQ ID NO: 1531682 - RNA, 11 nt, Human
ccucagugcca

SEQ ID NO: 1531683 - RNA, 20 nt, Human
ccucauaguaugguggcugg

SEQ ID NO: 1531684 - RNA, 13 nt, Human
ccucauacccacc

SEQ ID NO: 1531685 - RNA, 21 nt, Human
ccucauaguaugguggcuggg

SEQ ID NO: 1531686 - RNA, 22 nt, Human
ccucauaguaugguggcugggu

SEQ ID NO: 1531687 - RNA, 13 nt, Human
ccucaucaccaac

SEQ ID NO: 1531688 - RNA, 14 nt, Human
ccucaucaccaacg

SEQ ID NO: 1531689 - RNA, 19 nt, Human
ccgcuuucuacccagcgag

SEQ ID NO: 1531690 - RNA, 23 nt, Human
ccgcuuucuacccagcgagcccu

SEQ ID NO: 1531691 - RNA, 17 nt, Human
ccggcuggccuggcccc

SEQ ID NO: 1531692 - RNA, 18 nt, Human
ccggcuggccuggccccu

SEQ ID NO: 1531693 - RNA, 12 nt, Human
ccgcuuucuacc

SEQ ID NO: 1531694 - RNA, 20 nt, Human
ccgggcgcgguggcucacgc

SEQ ID NO: 1531695 - RNA, 16 nt, Human
ccgggcguggugguga

SEQ ID NO: 1531696 - RNA, 13 nt, Human
ccgggcucugccu

SEQ ID NO: 1531697 - RNA, 14 nt, Human
ccgaggccuucucu

SEQ ID NO: 1531698 - RNA, 15 nt, Human
cccugguucucaucu

SEQ ID NO: 1531699 - RNA, 16 nt, Human
cccugguucucaucuu

SEQ ID NO: 1531700 - RNA, 20 nt, Human
cccugguggcagcucaccuc

SEQ ID NO: 1531701 - RNA, 17 nt, Human
cccugguucucaucuuu

SEQ ID NO: 1531702 - RNA, 20 nt, Human
ccgaguagcugggacuacag

SEQ ID NO: 1531703 - RNA, 17 nt, Human
ccgaggccuucucugaa

SEQ ID NO: 1531704 - RNA, 17 nt, Human
ccgaguagcugggacua

SEQ ID NO: 1531705 - RNA, 14 nt, Human
ccgcacugggcuug

SEQ ID NO: 1531706 - RNA, 19 nt, Human
ccgcacugggcuuggggac

SEQ ID NO: 1531707 - RNA, 22 nt, Human
ccgcgccaaauaaugucucugu

SEQ ID NO: 1531708 - RNA, 13 nt, Human
ccgccuuaccagg

SEQ ID NO: 1531709 - RNA, 21 nt, Human
ccgcuaagagggagggagggc

SEQ ID NO: 1531710 - RNA, 23 nt, Human
ccgcuaagagggagggagggcuc

SEQ ID NO: 1531711 - RNA, 17 nt, Human
ccguguccccugacagg

SEQ ID NO: 1531712 - RNA, 19 nt, Human
ccguguccccugacagggc

SEQ ID NO: 1531713 - RNA, 15 nt, Human
ccuaaaauucagugg

SEQ ID NO: 1531714 - RNA, 13 nt, Human
ccuaguuccacca

SEQ ID NO: 1531715 - RNA, 21 nt, Human
ccuaguuccaccaucaagcca

SEQ ID NO: 1531716 - RNA, 23 nt, Human
ccuaguuccaccaucaagccacc

SEQ ID NO: 1531717 - RNA, 22 nt, Human
ccuauauuguuuucaguguaca

SEQ ID NO: 1531718 - RNA, 18 nt, Human
ccuauauuguuuucagug

SEQ ID NO: 1531719 - RNA, 22 nt, Human
cccaccucucucacuccuugaa

SEQ ID NO: 1531720 - RNA, 18 nt, Human
cccaccaucaugucuggc

SEQ ID NO: 1531721 - RNA, 19 nt, Human
cccaccgcagacaggacca

SEQ ID NO: 1531722 - RNA, 20 nt, Human
cccaccgcagacaggaccag

SEQ ID NO: 1531723 - RNA, 19 nt, Human
cccacgcuggagugcagug

SEQ ID NO: 1531724 - RNA, 20 nt, Human
cccacgcuggagugcaguga

SEQ ID NO: 1531725 - RNA, 21 nt, Human
cccacgcuggagugcagugag

SEQ ID NO: 1531726 - RNA, 23 nt, Human
cccacuugagaauuacccuuuug

SEQ ID NO: 1531727 - RNA, 12 nt, Human
cccacuucugcc

SEQ ID NO: 1531728 - RNA, 17 nt, Human
cccaccuggccucugca

SEQ ID NO: 1531729 - RNA, 19 nt, Human
cccaccuggccucugcacu

SEQ ID NO: 1531730 - RNA, 21 nt, Human
cccaccuggccucugcacucc

SEQ ID NO: 1531731 - RNA, 20 nt, Human
cccacgacugcccggcaggg

SEQ ID NO: 1531732 - RNA, 21 nt, Human
cccacgacugcccggcagggu

SEQ ID NO: 1531733 - RNA, 20 nt, Human
cccacaagaaaugaaagcag

SEQ ID NO: 1531734 - RNA, 13 nt, Human
cccacaagaaaug

SEQ ID NO: 1531735 - RNA, 23 nt, Human
cccaaugcacuuuguucuggcuc

SEQ ID NO: 1531736 - RNA, 16 nt, Human
cccaaugcacuuuguu

SEQ ID NO: 1531737 - RNA, 20 nt, Human
cccaaugcacuuuguucugg

SEQ ID NO: 1531738 - RNA, 22 nt, Human
cccugcacuugcagacucuaca

SEQ ID NO: 1531739 - RNA, 19 nt, Human
cccugcacuugcagacucu

SEQ ID NO: 1531740 - RNA, 12 nt, Human
cccugcacuugc

SEQ ID NO: 1531741 - RNA, 16 nt, Human
cccucuggggcuguuc

SEQ ID NO: 1531742 - RNA, 15 nt, Human
cccugaaagcccuga

SEQ ID NO: 1531743 - RNA, 16 nt, Human
cccugaaagcccugag

SEQ ID NO: 1531744 - RNA, 14 nt, Human
cccugaggcccaga

SEQ ID NO: 1531745 - RNA, 15 nt, Human
cccugaggcccagag

SEQ ID NO: 1531746 - RNA, 16 nt, Human
cccugaggcccagagg

SEQ ID NO: 1531747 - RNA, 17 nt, Human
cccugaggcccagaggg

SEQ ID NO: 1531748 - RNA, 18 nt, Human
cccugaggcccagagggc

SEQ ID NO: 1531749 - RNA, 19 nt, Human
cccugaggcccagagggcc

SEQ ID NO: 1531750 - RNA, 20 nt, Human
cccugaggcccagagggccu

SEQ ID NO: 1531751 - RNA, 23 nt, Human
cccugaggcccagagggccugca

SEQ ID NO: 1531752 - RNA, 20 nt, Human
cccugcccaccuggccucug

SEQ ID NO: 1531753 - RNA, 18 nt, Human
cccugcccaccuggccuc

SEQ ID NO: 1531754 - RNA, 16 nt, Human
cccugcuggguguggc

SEQ ID NO: 1531755 - RNA, 21 nt, Human
cccugcuggguguggcgcagc

SEQ ID NO: 1531756 - RNA, 14 nt, Human
cccugcccaccugg

SEQ ID NO: 1531757 - RNA, 17 nt, Human
cccugcccaccuggccu

SEQ ID NO: 1531758 - RNA, 22 nt, Human
cccugcuggguguggcgcagca

SEQ ID NO: 1531759 - RNA, 15 nt, Human
cccugguggcagcuc

SEQ ID NO: 1531760 - RNA, 16 nt, Human
cccugguggcagcuca

SEQ ID NO: 1531761 - RNA, 17 nt, Human
cccugguggcagcucac

SEQ ID NO: 1531762 - RNA, 21 nt, Human
cccuggugaccagcaccaucu

SEQ ID NO: 1531763 - RNA, 19 nt, Human
cccgcugucagccauuccu

SEQ ID NO: 1531764 - RNA, 20 nt, Human
cccgcugucagccauuccug

SEQ ID NO: 1531765 - RNA, 23 nt, Human
cccgagggcugagccugguccca

SEQ ID NO: 1531766 - RNA, 22 nt, Human
cccgaguagcugggacuacagg

SEQ ID NO: 1531767 - RNA, 12 nt, Human
cccgggcucugc

SEQ ID NO: 1531768 - RNA, 14 nt, Human
cccgggcucugccu

SEQ ID NO: 1531769 - RNA, 15 nt, Human
cccgggcucugccuc

SEQ ID NO: 1531770 - RNA, 14 nt, Human
cccagagggccugc

SEQ ID NO: 1531771 - RNA, 15 nt, Human
cccagagggccugca

SEQ ID NO: 1531772 - RNA, 18 nt, Human
cccagagggccugcaagg

SEQ ID NO: 1531773 - RNA, 13 nt, Human
cccgaguagcugg

SEQ ID NO: 1531774 - RNA, 14 nt, Human
cccgaguagcuggg

SEQ ID NO: 1531775 - RNA, 15 nt, Human
cccgaguagcuggga

SEQ ID NO: 1531776 - RNA, 16 nt, Human
cccgaguagcugggac

SEQ ID NO: 1531777 - RNA, 17 nt, Human
cccgaguagcugggacu

SEQ ID NO: 1531778 - RNA, 18 nt, Human
cccgaguagcugggacua

SEQ ID NO: 1531779 - RNA, 21 nt, Human
cccgaguagcugggacuacag

SEQ ID NO: 1531780 - RNA, 20 nt, Human
cccuacaguugaaaaacagc

SEQ ID NO: 1531781 - RNA, 16 nt, Human
cccgggcucugccucc

SEQ ID NO: 1531782 - RNA, 18 nt, Human
cccggguugggucaccag

SEQ ID NO: 1531783 - RNA, 15 nt, Human
cccgugggguuccuc

SEQ ID NO: 1531784 - RNA, 18 nt, Human
ccauguuggccaggcugg

SEQ ID NO: 1531785 - RNA, 17 nt, Human
ccauguuggccaggcug

SEQ ID NO: 1531786 - RNA, 16 nt, Human
ccaugggacagggagg

SEQ ID NO: 1531787 - RNA, 19 nt, Human
ccaugggacagggaggacg

SEQ ID NO: 1531788 - RNA, 18 nt, Human
ccauuauuuuuaggaugu

SEQ ID NO: 1531789 - RNA, 19 nt, Human
ccauucuccaccugccagg

SEQ ID NO: 1531790 - RNA, 20 nt, Human
ccauucuccaccugccaggg

SEQ ID NO: 1531791 - RNA, 14 nt, Human
ccauuuguguuuau

SEQ ID NO: 1531792 - RNA, 13 nt, Human
cccaaagugcugg

SEQ ID NO: 1531793 - RNA, 15 nt, Human
cccaaagugcuggga

SEQ ID NO: 1531794 - RNA, 20 nt, Human
cccaaaacucuccucugcug

SEQ ID NO: 1531795 - RNA, 16 nt, Human
cccaaaacucuccucu

SEQ ID NO: 1531796 - RNA, 18 nt, Human
cccaaaacucuccucugc

SEQ ID NO: 1531797 - RNA, 16 nt, Human
cccaaagugcugggau

SEQ ID NO: 1531798 - RNA, 23 nt, Human
cccaaauggaaaugggcagagca

SEQ ID NO: 1531799 - RNA, 18 nt, Human
cccaaauggaaaugggca

SEQ ID NO: 1531800 - RNA, 22 nt, Human
cccaaauggaaaugggcagagc

SEQ ID NO: 1531801 - RNA, 18 nt, Human
ccauguuuuguuuacggu

SEQ ID NO: 1531802 - RNA, 17 nt, Human
ccagguuuuuggucuga

SEQ ID NO: 1531803 - RNA, 24 nt, Human
ccaggugcacaagcuccaagcucc

SEQ ID NO: 1531804 - RNA, 18 nt, Human
ccagucuggaaugcagug

SEQ ID NO: 1531805 - RNA, 19 nt, Human
ccagucuggaaugcagugg

SEQ ID NO: 1531806 - RNA, 20 nt, Human
ccagucuggaaugcaguggu

SEQ ID NO: 1531807 - RNA, 13 nt, Human
ccagggcuggacu

SEQ ID NO: 1531808 - RNA, 16 nt, Human
ccagggcuggacugag

SEQ ID NO: 1531809 - RNA, 17 nt, Human
ccagggcuggacugagg

SEQ ID NO: 1531810 - RNA, 18 nt, Human
ccagggcuggacugaggc

SEQ ID NO: 1531811 - RNA, 19 nt, Human
ccagggcuggacugaggcc

SEQ ID NO: 1531812 - RNA, 22 nt, Human
ccagggcuggacugaggccuga

SEQ ID NO: 1531813 - RNA, 19 nt, Human
ccaggugcacaagcuccaa

SEQ ID NO: 1531814 - RNA, 20 nt, Human
ccaggugcacaagcuccaag

SEQ ID NO: 1531815 - RNA, 20 nt, Human
ccaggcuuagucacugagac

SEQ ID NO: 1531816 - RNA, 14 nt, Human
ccagggacagaggg

SEQ ID NO: 1531817 - RNA, 15 nt, Human
ccagggacagagggg

SEQ ID NO: 1531818 - RNA, 21 nt, Human
ccagggacagaggggguggcc

SEQ ID NO: 1531819 - RNA, 22 nt, Human
ccagggacagaggggguggccu

SEQ ID NO: 1531820 - RNA, 19 nt, Human
ccaggagccccgaggccuu

SEQ ID NO: 1531821 - RNA, 20 nt, Human
ccaggagccccgaggccuuc

SEQ ID NO: 1531822 - RNA, 12 nt, Human
ccaggagccucc

SEQ ID NO: 1531823 - RNA, 18 nt, Human
ccaggcauuccccaggag

SEQ ID NO: 1531824 - RNA, 22 nt, Human
ccaggcauuccccaggaggcca

SEQ ID NO: 1531825 - RNA, 19 nt, Human
ccaggcauuccccaggagg

SEQ ID NO: 1531826 - RNA, 21 nt, Human
ccaggcauuccccaggaggcc

SEQ ID NO: 1531827 - RNA, 17 nt, Human
ccaggcuuagucacuga

SEQ ID NO: 1531828 - RNA, 24 nt, Human
ccaggcuguaucccaugagccuca

SEQ ID NO: 1531829 - RNA, 22 nt, Human
ccaggcccucugcccacucccu

SEQ ID NO: 1531830 - RNA, 23 nt, Human
ccaggcccucugcccacucccug

SEQ ID NO: 1531831 - RNA, 21 nt, Human
ccaggcccucugcccacuccc

SEQ ID NO: 1531832 - RNA, 22 nt, Human
ccaguguuguggauuuaacaga

SEQ ID NO: 1531833 - RNA, 21 nt, Human
ccaguuauggcuauaggugcu

SEQ ID NO: 1531834 - RNA, 14 nt, Human
ccaguuauggcuau

SEQ ID NO: 1531835 - RNA, 23 nt, Human
ccauauucuguuggccaguguga

SEQ ID NO: 1531836 - RNA, 16 nt, Human
ccagugaggcucugcc

SEQ ID NO: 1531837 - RNA, 14 nt, Human
ccagugaggcucug

SEQ ID NO: 1531838 - RNA, 15 nt, Human
ccagugaggcucugc

SEQ ID NO: 1531839 - RNA, 20 nt, Human
ccagugccgagaaggaagcc

SEQ ID NO: 1531840 - RNA, 17 nt, Human
ccagugaggcucugccc

SEQ ID NO: 1531841 - RNA, 13 nt, Human
ccaucuacccucc

SEQ ID NO: 1531842 - RNA, 18 nt, Human
ccagcaugcaccacgggc

SEQ ID NO: 1531843 - RNA, 20 nt, Human
ccagcaugcaccacgggccc

SEQ ID NO: 1531844 - RNA, 12 nt, Human
ccagcacugagg

SEQ ID NO: 1531845 - RNA, 13 nt, Human
ccagcacugagga

SEQ ID NO: 1531846 - RNA, 14 nt, Human
ccagcacugaggaa

SEQ ID NO: 1531847 - RNA, 15 nt, Human
ccagcacugaggaag

SEQ ID NO: 1531848 - RNA, 17 nt, Human
ccagcacugaggaagaa

SEQ ID NO: 1531849 - RNA, 22 nt, Human
ccagcacugaggaagaacgggg

SEQ ID NO: 1531850 - RNA, 15 nt, Human
ccagccaaagccucc

SEQ ID NO: 1531851 - RNA, 18 nt, Human
ccagccaaagccuccucc

SEQ ID NO: 1531852 - RNA, 19 nt, Human
ccagccaaagccuccucca

SEQ ID NO: 1531853 - RNA, 14 nt, Human
ccagccgccaugcu

SEQ ID NO: 1531854 - RNA, 18 nt, Human
ccagccgccaugcuccug

SEQ ID NO: 1531855 - RNA, 19 nt, Human
ccagccgccaugcuccugg

SEQ ID NO: 1531856 - RNA, 16 nt, Human
ccagccccagugccca

SEQ ID NO: 1531857 - RNA, 16 nt, Human
ccagcccuuagcaggg

SEQ ID NO: 1531858 - RNA, 17 nt, Human
ccagcccuuagcaggga

SEQ ID NO: 1531859 - RNA, 23 nt, Human
ccagccccaaaacucuccucugc

SEQ ID NO: 1531860 - RNA, 13 nt, Human
ccagccccagugc

SEQ ID NO: 1531861 - RNA, 15 nt, Human
ccagccccagugccc

SEQ ID NO: 1531862 - RNA, 16 nt, Human
ccagcaagugagagcu

SEQ ID NO: 1531863 - RNA, 21 nt, Human
ccagcaagugagagcugggug

SEQ ID NO: 1531864 - RNA, 22 nt, Human
ccagcaagugagagcugggugu

SEQ ID NO: 1531865 - RNA, 14 nt, Human
ccagauuucacucu

SEQ ID NO: 1531866 - RNA, 15 nt, Human
ccagcaagugagagc

SEQ ID NO: 1531867 - RNA, 15 nt, Human
ccagauuucacucuc

SEQ ID NO: 1531868 - RNA, 20 nt, Human
ccagacaccuugacagggca

SEQ ID NO: 1531869 - RNA, 21 nt, Human
ccagagaggguggugaccucu

SEQ ID NO: 1531870 - RNA, 23 nt, Human
ccagagaggguggugaccucugc

SEQ ID NO: 1531871 - RNA, 14 nt, Human
ccagagaggguggu

SEQ ID NO: 1531872 - RNA, 17 nt, Human
ccagacaccuugacagg

SEQ ID NO: 1531873 - RNA, 19 nt, Human
ccagacaccuugacagggc

SEQ ID NO: 1531874 - RNA, 21 nt, Human
ccagagcuacccgcagaguuc

SEQ ID NO: 1531875 - RNA, 20 nt, Human
ccagagcuacccgcagaguu

SEQ ID NO: 1531876 - RNA, 11 nt, Human
ccagagcugcc

SEQ ID NO: 1531877 - RNA, 12 nt, Human
ccagagcugcca

SEQ ID NO: 1531878 - RNA, 13 nt, Human
ccagagcugccac

SEQ ID NO: 1531879 - RNA, 14 nt, Human
ccagagcugccacc

SEQ ID NO: 1531880 - RNA, 15 nt, Human
ccagagcugccaccu

SEQ ID NO: 1531881 - RNA, 16 nt, Human
ccagagcugccaccug

SEQ ID NO: 1531882 - RNA, 19 nt, Human
ccagagcugccaccugccu

SEQ ID NO: 1531883 - RNA, 16 nt, Human
ccagagggagugacag

SEQ ID NO: 1531884 - RNA, 17 nt, Human
ccagagggagugacaga

SEQ ID NO: 1531885 - RNA, 18 nt, Human
ccagagggagugacagag

SEQ ID NO: 1531886 - RNA, 19 nt, Human
ccagagggagugacagagg

SEQ ID NO: 1531887 - RNA, 20 nt, Human
ccagagggagugacagaggc

SEQ ID NO: 1531888 - RNA, 21 nt, Human
ccagagggagugacagaggca

SEQ ID NO: 1531889 - RNA, 21 nt, Human
ccagaggagagaggacccccu

SEQ ID NO: 1531890 - RNA, 22 nt, Human
ccagaggagagaggacccccug

SEQ ID NO: 1531891 - RNA, 12 nt, Human
ccagaggagggc

SEQ ID NO: 1531892 - RNA, 22 nt, Human
ccagaggagggcagcagaaggg

SEQ ID NO: 1531893 - RNA, 12 nt, Human
ccagauuucacu

SEQ ID NO: 1531894 - RNA, 21 nt, Human
ccagauugcaacaggcugggc

SEQ ID NO: 1531895 - RNA, 23 nt, Human
ccagauucuuuccugaggcuggg

SEQ ID NO: 1531896 - RNA, 19 nt, Human
ccagauugcaacaggcugg

SEQ ID NO: 1531897 - RNA, 20 nt, Human
ccagauugcaacaggcuggg

SEQ ID NO: 1531898 - RNA, 15 nt, Human
ccagagggccugcaa

SEQ ID NO: 1531899 - RNA, 16 nt, Human
ccagagggccugcaag

SEQ ID NO: 1531900 - RNA, 13 nt, Human
ccagagggccugc

SEQ ID NO: 1531901 - RNA, 22 nt, Human
ccagagggagugacagaggcag

SEQ ID NO: 1531902 - RNA, 23 nt, Human
ccagagggagugacagaggcagc

SEQ ID NO: 1531903 - RNA, 18 nt, Human
ccagauucuuuccugagg

SEQ ID NO: 1531904 - RNA, 19 nt, Human
ccagauucuuuccugaggc

SEQ ID NO: 1531905 - RNA, 20 nt, Human
ccagauucuuuccugaggcu

SEQ ID NO: 1531906 - RNA, 21 nt, Human
ccagauucuuuccugaggcug

SEQ ID NO: 1531907 - RNA, 22 nt, Human
ccagauucuuuccugaggcugg

SEQ ID NO: 1531908 - RNA, 16 nt, Human
ccacugcgaccacaag

SEQ ID NO: 1531909 - RNA, 11 nt, Human
ccacugcucug

SEQ ID NO: 1531910 - RNA, 23 nt, Human
ccacugcacuccagccuggguga

SEQ ID NO: 1531911 - RNA, 15 nt, Human
ccacucccugcaacc

SEQ ID NO: 1531912 - RNA, 17 nt, Human
ccacucccugcaaccug

SEQ ID NO: 1531913 - RNA, 19 nt, Human
ccacugcacuccagccugg

SEQ ID NO: 1531914 - RNA, 20 nt, Human
ccacugcacuccagccuggg

SEQ ID NO: 1531915 - RNA, 12 nt, Human
ccacucccugca

SEQ ID NO: 1531916 - RNA, 13 nt, Human
ccacucccugcaa

SEQ ID NO: 1531917 - RNA, 23 nt, Human
ccacuacggaauaguuggcuagg

SEQ ID NO: 1531918 - RNA, 18 nt, Human
ccacuacauucuguuaau

SEQ ID NO: 1531919 - RNA, 22 nt, Human
ccacuacggaauaguuggcuag

SEQ ID NO: 1531920 - RNA, 13 nt, Human
ccacguuucuaaa

SEQ ID NO: 1531921 - RNA, 17 nt, Human
ccaccucccacaaagga

SEQ ID NO: 1531922 - RNA, 12 nt, Human
ccaccugccagg

SEQ ID NO: 1531923 - RNA, 17 nt, Human
ccaccugccuguugggc

SEQ ID NO: 1531924 - RNA, 20 nt, Human
ccaccugccuguugggccag

SEQ ID NO: 1531925 - RNA, 22 nt, Human
ccaccugcggugcuaucucccc

SEQ ID NO: 1531926 - RNA, 15 nt, Human
ccaccuggccucugc

SEQ ID NO: 1531927 - RNA, 16 nt, Human
ccaccuggccucugca

SEQ ID NO: 1531928 - RNA, 17 nt, Human
ccaccuggccucugcac

SEQ ID NO: 1531929 - RNA, 18 nt, Human
ccaccuggccucugcacu

SEQ ID NO: 1531930 - RNA, 12 nt, Human
ccacggccaggc

SEQ ID NO: 1531931 - RNA, 13 nt, Human
ccacggccaggcc

SEQ ID NO: 1531932 - RNA, 14 nt, Human
ccacggccaggcca

SEQ ID NO: 1531933 - RNA, 15 nt, Human
ccacggccaggccag

SEQ ID NO: 1531934 - RNA, 19 nt, Human
ccaccccucaacaccucug

SEQ ID NO: 1531935 - RNA, 16 nt, Human
ccacccugaaagcccu

SEQ ID NO: 1531936 - RNA, 17 nt, Human
ccacccugaaagcccug

SEQ ID NO: 1531937 - RNA, 18 nt, Human
ccacccugaaagcccuga

SEQ ID NO: 1531938 - RNA, 12 nt, Human
ccaccucagccu

SEQ ID NO: 1531939 - RNA, 13 nt, Human
ccaccucagccuc

SEQ ID NO: 1531940 - RNA, 14 nt, Human
ccaccucagccucc

SEQ ID NO: 1531941 - RNA, 15 nt, Human
ccaccucagccuccc

SEQ ID NO: 1531942 - RNA, 12 nt, Human
ccacccaggagc

SEQ ID NO: 1531943 - RNA, 23 nt, Human
ccaccccgagggcugagccuggu

SEQ ID NO: 1531944 - RNA, 14 nt, Human
ccacccaggagccc

SEQ ID NO: 1531945 - RNA, 12 nt, Human
ccacacccagcc

SEQ ID NO: 1531946 - RNA, 15 nt, Human
ccacacccagcccac

SEQ ID NO: 1531947 - RNA, 13 nt, Human
ccacacccagccc

SEQ ID NO: 1531948 - RNA, 14 nt, Human
ccacacccagccca

SEQ ID NO: 1531949 - RNA, 17 nt, Human
ccaccacacccagccca

SEQ ID NO: 1531950 - RNA, 16 nt, Human
ccacccaagggccugg

SEQ ID NO: 1531951 - RNA, 17 nt, Human
ccacccaagggccuggc

SEQ ID NO: 1531952 - RNA, 19 nt, Human
ccacccaagggccuggccu

SEQ ID NO: 1531953 - RNA, 20 nt, Human
ccaccaacauacucccaucu

SEQ ID NO: 1531954 - RNA, 14 nt, Human
ccaccacacccagc

SEQ ID NO: 1531955 - RNA, 16 nt, Human
ccaccacacccagccc

SEQ ID NO: 1531956 - RNA, 16 nt, Human
ccacccaccucagccu

SEQ ID NO: 1531957 - RNA, 14 nt, Human
ccacccaccucagc

SEQ ID NO: 1531958 - RNA, 15 nt, Human
ccacccaccucagcc

SEQ ID NO: 1531959 - RNA, 20 nt, Human
ccacccaagggccuggccug

SEQ ID NO: 1531960 - RNA, 21 nt, Human
ccacccaagggccuggccuga

SEQ ID NO: 1531961 - RNA, 22 nt, Human
ccacccaagggccuggccugag

SEQ ID NO: 1531962 - RNA, 13 nt, Human
ccacccaccucag

SEQ ID NO: 1531963 - RNA, 14 nt, Human
ccacaucuugcucu

SEQ ID NO: 1531964 - RNA, 14 nt, Human
ccaccaacauacuc

SEQ ID NO: 1531965 - RNA, 18 nt, Human
ccaccaacauacucccau

SEQ ID NO: 1531966 - RNA, 16 nt, Human
ccacaucuugcucugc

SEQ ID NO: 1531967 - RNA, 17 nt, Human
ccacaucuugcucugcu

SEQ ID NO: 1531968 - RNA, 22 nt, Human
ccacaucuugcucugcugacag

SEQ ID NO: 1531969 - RNA, 23 nt, Human
ccacaucuugcucugcugacaga

SEQ ID NO: 1531970 - RNA, 21 nt, Human
ccacccaggagccccgaggcc

SEQ ID NO: 1531971 - RNA, 20 nt, Human
cauucaaauguauuacagug

SEQ ID NO: 1531972 - RNA, 21 nt, Human
cauucagauaugauucaaaug

SEQ ID NO: 1531973 - RNA, 19 nt, Human
cauucauaaaccuugucua

SEQ ID NO: 1531974 - RNA, 22 nt, Human
cauuccaacuaucucauuucca

SEQ ID NO: 1531975 - RNA, 13 nt, Human
cauuccccaggag

SEQ ID NO: 1531976 - RNA, 15 nt, Human
cauuccccaggaggc

SEQ ID NO: 1531977 - RNA, 17 nt, Human
cauuccccaggaggcca

SEQ ID NO: 1531978 - RNA, 20 nt, Human
cauuccccaggaggccagcc

SEQ ID NO: 1531979 - RNA, 18 nt, Human
cauuccccaggaggccag

SEQ ID NO: 1531980 - RNA, 19 nt, Human
cauuccccaggaggccagc

SEQ ID NO: 1531981 - RNA, 14 nt, Human
cauuccugaacagg

SEQ ID NO: 1531982 - RNA, 14 nt, Human
cauuccugaugcuu

SEQ ID NO: 1531983 - RNA, 16 nt, Human
cauuccugaugcuucu

SEQ ID NO: 1531984 - RNA, 19 nt, Human
cauuccugaugcuucuuca

SEQ ID NO: 1531985 - RNA, 22 nt, Human
cauuccugaugcuucuucagag

SEQ ID NO: 1531986 - RNA, 23 nt, Human
cauuccugaugcuucuucagaga

SEQ ID NO: 1531987 - RNA, 13 nt, Human
cauucuggaauaa

SEQ ID NO: 1531988 - RNA, 17 nt, Human
cauucuguuaaucauua

SEQ ID NO: 1531989 - RNA, 12 nt, Human
cauucugccugc

SEQ ID NO: 1531990 - RNA, 13 nt, Human
cauucugccugcc

SEQ ID NO: 1531991 - RNA, 15 nt, Human
cauucugccugccca

SEQ ID NO: 1531992 - RNA, 16 nt, Human
cauucugccugcccag

SEQ ID NO: 1531993 - RNA, 17 nt, Human
cauucugccugcccagg

SEQ ID NO: 1531994 - RNA, 18 nt, Human
cauucugccugcccaggc

SEQ ID NO: 1531995 - RNA, 19 nt, Human
cauucugccugcccaggcc

SEQ ID NO: 1531996 - RNA, 20 nt, Human
cauucugccugcccaggccc

SEQ ID NO: 1531997 - RNA, 23 nt, Human
cauucuucuguacgucugacagg

SEQ ID NO: 1531998 - RNA, 23 nt, Human
cauuuuauuuuauuaugcaugaa

SEQ ID NO: 1531999 - RNA, 21 nt, Human
cauuuuuaagugcugcauuua

SEQ ID NO: 1532000 - RNA, 18 nt, Human
cauuuuuaguagagacag

SEQ ID NO: 1532001 - RNA, 14 nt, Human
cauuuuuaccauua

SEQ ID NO: 1532002 - RNA, 17 nt, Human
cauuuuuaguagagaca

SEQ ID NO: 1532003 - RNA, 16 nt, Human
ccaaacccuucagugc

SEQ ID NO: 1532004 - RNA, 15 nt, Human
cauuuaaaaaaaauc

SEQ ID NO: 1532005 - RNA, 20 nt, Human
cauuguacgaagaguauuuu

SEQ ID NO: 1532006 - RNA, 15 nt, Human
cauugugggaagggg

SEQ ID NO: 1532007 - RNA, 19 nt, Human
cauuguacgaagaguauuu

SEQ ID NO: 1532008 - RNA, 18 nt, Human
cauugaccugaggcccuu

SEQ ID NO: 1532009 - RNA, 15 nt, Human
cauugaccugaggcc

SEQ ID NO: 1532010 - RNA, 17 nt, Human
cauugaccugaggcccu

SEQ ID NO: 1532011 - RNA, 19 nt, Human
cauuugaaaauuuugaugu

SEQ ID NO: 1532012 - RNA, 17 nt, Human
cauuugaaaauuuugau

SEQ ID NO: 1532013 - RNA, 20 nt, Human
caugugcuaguaauuggaaa

SEQ ID NO: 1532014 - RNA, 14 nt, Human
caugugcacaugca

SEQ ID NO: 1532015 - RNA, 12 nt, Human
caugucuggcua

SEQ ID NO: 1532016 - RNA, 15 nt, Human
caugugaugagagga

SEQ ID NO: 1532017 - RNA, 16 nt, Human
caugugaugagaggaa

SEQ ID NO: 1532018 - RNA, 17 nt, Human
caugugaugagaggaaa

SEQ ID NO: 1532019 - RNA, 18 nt, Human
caugugaugagaggaaau

SEQ ID NO: 1532020 - RNA, 20 nt, Human
caugugaugagaggaaauca

SEQ ID NO: 1532021 - RNA, 21 nt, Human
caugugaugagaggaaaucac

SEQ ID NO: 1532022 - RNA, 23 nt, Human
cauggucggaaaacaugcuacac

SEQ ID NO: 1532023 - RNA, 19 nt, Human
cauggucggaaaacaugcu

SEQ ID NO: 1532024 - RNA, 17 nt, Human
cauggucggaaaacaug

SEQ ID NO: 1532025 - RNA, 14 nt, Human
cauguuugugauug

SEQ ID NO: 1532026 - RNA, 12 nt, Human
cauguuugugau

SEQ ID NO: 1532027 - RNA, 15 nt, Human
cauguuugugauuga

SEQ ID NO: 1532028 - RNA, 21 nt, Human
cauuaaaaaaucaguuguaca

SEQ ID NO: 1532029 - RNA, 19 nt, Human
cauguuuuucuucucccuc

SEQ ID NO: 1532030 - RNA, 20 nt, Human
cauguuuuucuucucccuca

SEQ ID NO: 1532031 - RNA, 15 nt, Human
caugcuguucaugaa

SEQ ID NO: 1532032 - RNA, 17 nt, Human
caugcugucccuuacgu

SEQ ID NO: 1532033 - RNA, 13 nt, Human
caugcugucccuu

SEQ ID NO: 1532034 - RNA, 15 nt, Human
caugcugucccuuac

SEQ ID NO: 1532035 - RNA, 17 nt, Human
caugcgggcuuccuccu

SEQ ID NO: 1532036 - RNA, 20 nt, Human
cauggaauuggagcucgugg

SEQ ID NO: 1532037 - RNA, 16 nt, Human
caugcuguucaugaaa

SEQ ID NO: 1532038 - RNA, 18 nt, Human
caugcuguucaugaaaga

SEQ ID NO: 1532039 - RNA, 15 nt, Human
cauggacuuccacug

SEQ ID NO: 1532040 - RNA, 23 nt, Human
cauggcauauuuuucacauaucu

SEQ ID NO: 1532041 - RNA, 15 nt, Human
cauggcauauuuuuc

SEQ ID NO: 1532042 - RNA, 19 nt, Human
cauggcauauuuuucacau

SEQ ID NO: 1532043 - RNA, 13 nt, Human
cauggcauauuuu

SEQ ID NO: 1532044 - RNA, 18 nt, Human
caugggccuccugugugu

SEQ ID NO: 1532045 - RNA, 13 nt, Human
caugaguccccug

SEQ ID NO: 1532046 - RNA, 19 nt, Human
caugagguacugagaguga

SEQ ID NO: 1532047 - RNA, 23 nt, Human
caugaguccccuguuuguuucug

SEQ ID NO: 1532048 - RNA, 14 nt, Human
caugaguccccugu

SEQ ID NO: 1532049 - RNA, 15 nt, Human
caugaguccccuguu

SEQ ID NO: 1532050 - RNA, 23 nt, Human
caugaggaacaaggcaaggcugu

SEQ ID NO: 1532051 - RNA, 16 nt, Human
caugagguacugagag

SEQ ID NO: 1532052 - RNA, 22 nt, Human
caugagccucagcauccuggca

SEQ ID NO: 1532053 - RNA, 23 nt, Human
caugagccucagcauccuggcac

SEQ ID NO: 1532054 - RNA, 16 nt, Human
caugaggaacaaggca

SEQ ID NO: 1532055 - RNA, 17 nt, Human
caugaggaacaaggcaa

SEQ ID NO: 1532056 - RNA, 20 nt, Human
caugaggaacaaggcaaggc

SEQ ID NO: 1532057 - RNA, 21 nt, Human
caugaggaacaaggcaaggcu

SEQ ID NO: 1532058 - RNA, 18 nt, Human
caugaagauguagaggag

SEQ ID NO: 1532059 - RNA, 19 nt, Human
caugaagauguagaggaga

SEQ ID NO: 1532060 - RNA, 13 nt, Human
caugagcaucagg

SEQ ID NO: 1532061 - RNA, 15 nt, Human
caugagcaucaggcc

SEQ ID NO: 1532062 - RNA, 16 nt, Human
caugagcaucaggcca

SEQ ID NO: 1532063 - RNA, 17 nt, Human
caugagcaucaggccag

SEQ ID NO: 1532064 - RNA, 18 nt, Human
caugagcaucaggccagg

SEQ ID NO: 1532065 - RNA, 20 nt, Human
caugagcaucaggccaggcc

SEQ ID NO: 1532066 - RNA, 21 nt, Human
caugagcaucaggccaggccc

SEQ ID NO: 1532067 - RNA, 22 nt, Human
caugagcaucaggccaggcccu

SEQ ID NO: 1532068 - RNA, 23 nt, Human
caugagcaucaggccaggcccuc

SEQ ID NO: 1532069 - RNA, 12 nt, Human
caugagccucag

SEQ ID NO: 1532070 - RNA, 15 nt, Human
caugagccucagcau

SEQ ID NO: 1532071 - RNA, 17 nt, Human
caugagccucagcaucc

SEQ ID NO: 1532072 - RNA, 18 nt, Human
caugagccucagcauccu

SEQ ID NO: 1532073 - RNA, 19 nt, Human
caugagccucagcauccug

SEQ ID NO: 1532074 - RNA, 20 nt, Human
caugagccucagcauccugg

SEQ ID NO: 1532075 - RNA, 21 nt, Human
caugagccucagcauccuggc

SEQ ID NO: 1532076 - RNA, 14 nt, Human
caugaaagauucaa

SEQ ID NO: 1532077 - RNA, 13 nt, Human
caugaaaaugcaa

SEQ ID NO: 1532078 - RNA, 15 nt, Human
caugaaaaugcaaca

SEQ ID NO: 1532079 - RNA, 22 nt, Human
caugaaaaugcaacaacaugua

SEQ ID NO: 1532080 - RNA, 21 nt, Human
caugaaaacacauuuuucuua

SEQ ID NO: 1532081 - RNA, 19 nt, Human
caugaaaacacauuuuucu

SEQ ID NO: 1532082 - RNA, 12 nt, Human
caugaagacaga

SEQ ID NO: 1532083 - RNA, 17 nt, Human
caugaaaacacauuuuu

SEQ ID NO: 1532084 - RNA, 16 nt, Human
caugaaaacacauuuu

SEQ ID NO: 1532085 - RNA, 15 nt, Human
caugaaaacacauuu

SEQ ID NO: 1532086 - RNA, 14 nt, Human
caugaaaacacauu

SEQ ID NO: 1532087 - RNA, 13 nt, Human
caugaaaacacau

SEQ ID NO: 1532088 - RNA, 21 nt, Human
caucuuuucuugccucugucc

SEQ ID NO: 1532089 - RNA, 14 nt, Human
caucuuuucuugcc

SEQ ID NO: 1532090 - RNA, 16 nt, Human
caucuuuucuugccuc

SEQ ID NO: 1532091 - RNA, 19 nt, Human
caucuugcucugcugacag

SEQ ID NO: 1532092 - RNA, 16 nt, Human
caucuugcucugcuga

SEQ ID NO: 1532093 - RNA, 17 nt, Human
caucuugcucugcugac

SEQ ID NO: 1532094 - RNA, 16 nt, Human
caucuugaauuguaag

SEQ ID NO: 1532095 - RNA, 21 nt, Human
caucuugaauuguaaggaaug

SEQ ID NO: 1532096 - RNA, 16 nt, Human
caucucuacaaaaagc

SEQ ID NO: 1532097 - RNA, 15 nt, Human
caucucuccuccuuu

SEQ ID NO: 1532098 - RNA, 14 nt, Human
caucucucuuuaau

SEQ ID NO: 1532099 - RNA, 17 nt, Human
caucugacuaugacaua

SEQ ID NO: 1532100 - RNA, 16 nt, Human
caucauccuaagcuau

SEQ ID NO: 1532101 - RNA, 13 nt, Human
caucaugucuggc

SEQ ID NO: 1532102 - RNA, 14 nt, Human
caucaugucuggcu

SEQ ID NO: 1532103 - RNA, 15 nt, Human
caucaugucuggcua

SEQ ID NO: 1532104 - RNA, 12 nt, Human
caucacccgcua

SEQ ID NO: 1532105 - RNA, 18 nt, Human
caucccuuaccugggaaa

SEQ ID NO: 1532106 - RNA, 15 nt, Human
caucccucuggggcu

SEQ ID NO: 1532107 - RNA, 14 nt, Human
cauccacugugcca

SEQ ID NO: 1532108 - RNA, 17 nt, Human
cauccacugugccaugu

SEQ ID NO: 1532109 - RNA, 23 nt, Human
cauccacugugccaugugccagg

SEQ ID NO: 1532110 - RNA, 21 nt, Human
cauauugauuuccguuaaaau

SEQ ID NO: 1532111 - RNA, 21 nt, Human
cauaucuaguaugaaauuaua

SEQ ID NO: 1532112 - RNA, 17 nt, Human
cauauugauuuccguua

SEQ ID NO: 1532113 - RNA, 22 nt, Human
cauauucuguuggccaguguga

SEQ ID NO: 1532114 - RNA, 15 nt, Human
cauauauaacaaugc

SEQ ID NO: 1532115 - RNA, 20 nt, Human
cauauauaacaaugcuguau

SEQ ID NO: 1532116 - RNA, 15 nt, Human
cauaucuaguaugaa

SEQ ID NO: 1532117 - RNA, 17 nt, Human
cauaucuaguaugaaau

SEQ ID NO: 1532118 - RNA, 18 nt, Human
cauaucuaguaugaaauu

SEQ ID NO: 1532119 - RNA, 13 nt, Human
cauauauaacaau

SEQ ID NO: 1532120 - RNA, 23 nt, Human
cauauaagauucauauuuacuuc

SEQ ID NO: 1532121 - RNA, 19 nt, Human
cagugcuugauugcgugga

SEQ ID NO: 1532122 - RNA, 16 nt, Human
cauaguaugguggcug

SEQ ID NO: 1532123 - RNA, 17 nt, Human
cauaguaugguggcugg

SEQ ID NO: 1532124 - RNA, 15 nt, Human
cauaguaugguggcu

SEQ ID NO: 1532125 - RNA, 14 nt, Human
caucaacaucuugg

SEQ ID NO: 1532126 - RNA, 20 nt, Human
caggucauauuaauauauuu

SEQ ID NO: 1532127 - RNA, 21 nt, Human
caggucauauuaauauauuuc

SEQ ID NO: 1532128 - RNA, 20 nt, Human
cagguaugaccuucuaggaa

SEQ ID NO: 1532129 - RNA, 19 nt, Human
cagguagaacacaagguca

SEQ ID NO: 1532130 - RNA, 20 nt, Human
cagguaacaggcagauacag

SEQ ID NO: 1532131 - RNA, 21 nt, Human
cagguaacaggcagauacagg

SEQ ID NO: 1532132 - RNA, 18 nt, Human
caggucuugaacuccugg

SEQ ID NO: 1532133 - RNA, 19 nt, Human
caggucuugaacuccuggc

SEQ ID NO: 1532134 - RNA, 20 nt, Human
caggucuugaacuccuggcc

SEQ ID NO: 1532135 - RNA, 21 nt, Human
caggucuugaacuccuggccu

SEQ ID NO: 1532136 - RNA, 22 nt, Human
caggucuugaacuccuggccuc

SEQ ID NO: 1532137 - RNA, 23 nt, Human
caggucuugaacuccuggccuca

SEQ ID NO: 1532138 - RNA, 21 nt, Human
caggugagaagcagaggaagg

SEQ ID NO: 1532139 - RNA, 13 nt, Human
caggugagaagca

SEQ ID NO: 1532140 - RNA, 20 nt, Human
caggugagaagcagaggaag

SEQ ID NO: 1532141 - RNA, 14 nt, Human
caggggugggacac

SEQ ID NO: 1532142 - RNA, 15 nt, Human
caggggugggacacc

SEQ ID NO: 1532143 - RNA, 20 nt, Human
caggggugggacacccugug

SEQ ID NO: 1532144 - RNA, 21 nt, Human
caggggugggacacccuguga

SEQ ID NO: 1532145 - RNA, 16 nt, Human
caggguuuugccaugu

SEQ ID NO: 1532146 - RNA, 17 nt, Human
cagggucucacucuguc

SEQ ID NO: 1532147 - RNA, 16 nt, Human
cagggucucacucugu

SEQ ID NO: 1532148 - RNA, 14 nt, Human
cagguaacaggcag

SEQ ID NO: 1532149 - RNA, 15 nt, Human
cagguaacaggcaga

SEQ ID NO: 1532150 - RNA, 16 nt, Human
cagguaacaggcagau

SEQ ID NO: 1532151 - RNA, 17 nt, Human
cagguaacaggcagaua

SEQ ID NO: 1532152 - RNA, 23 nt, Human
cagggucccugguggcagcucac

SEQ ID NO: 1532153 - RNA, 18 nt, Human
caggguccuguagcccua

SEQ ID NO: 1532154 - RNA, 21 nt, Human
cagggucucacuauguugccc

SEQ ID NO: 1532155 - RNA, 22 nt, Human
cagggucucacuauguugccca

SEQ ID NO: 1532156 - RNA, 23 nt, Human
cagggucucacuauguugcccag

SEQ ID NO: 1532157 - RNA, 15 nt, Human
cagggucucacucug

SEQ ID NO: 1532158 - RNA, 21 nt, Human
caggguauuccagagugggga

SEQ ID NO: 1532159 - RNA, 20 nt, Human
caggguauuccagagugggg

SEQ ID NO: 1532160 - RNA, 12 nt, Human
cagggucccugg

SEQ ID NO: 1532161 - RNA, 14 nt, Human
cagggucccuggug

SEQ ID NO: 1532162 - RNA, 15 nt, Human
cagggucccuggugg

SEQ ID NO: 1532163 - RNA, 18 nt, Human
cagggucccugguggcag

SEQ ID NO: 1532164 - RNA, 19 nt, Human
cagggucccugguggcagc

SEQ ID NO: 1532165 - RNA, 22 nt, Human
cagggucccugguggcagcuca

SEQ ID NO: 1532166 - RNA, 21 nt, Human
caguaaaugggggugcauuug

SEQ ID NO: 1532167 - RNA, 22 nt, Human
caguaaaugggggugcauuuga

SEQ ID NO: 1532168 - RNA, 12 nt, Human
cagguucagcuu

SEQ ID NO: 1532169 - RNA, 13 nt, Human
cagguucagcuug

SEQ ID NO: 1532170 - RNA, 12 nt, Human
caguaauaacuc

SEQ ID NO: 1532171 - RNA, 13 nt, Human
caguaauaacucu

SEQ ID NO: 1532172 - RNA, 22 nt, Human
caggugugagucaccaagccca

SEQ ID NO: 1532173 - RNA, 23 nt, Human
caggugugagucaccaagcccag

SEQ ID NO: 1532174 - RNA, 16 nt, Human
caggugugagucacca

SEQ ID NO: 1532175 - RNA, 20 nt, Human
caggugugagucaccaagcc

SEQ ID NO: 1532176 - RNA, 21 nt, Human
caggugugagucaccaagccc

SEQ ID NO: 1532177 - RNA, 16 nt, Human
caggugugaaccacca

SEQ ID NO: 1532178 - RNA, 19 nt, Human
caggugugaaccaccacac

SEQ ID NO: 1532179 - RNA, 22 nt, Human
caggugugaaccaccacaccca

SEQ ID NO: 1532180 - RNA, 23 nt, Human
caggugugaaccaccacacccag

SEQ ID NO: 1532181 - RNA, 16 nt, Human
caggugucccugcacu

SEQ ID NO: 1532182 - RNA, 15 nt, Human
caggugucccugcac

SEQ ID NO: 1532183 - RNA, 18 nt, Human
caggugucccugcacuug

SEQ ID NO: 1532184 - RNA, 19 nt, Human
caggugucccugcacuugc

SEQ ID NO: 1532185 - RNA, 12 nt, Human
caggugugaacc

SEQ ID NO: 1532186 - RNA, 13 nt, Human
cagguggggcagc

SEQ ID NO: 1532187 - RNA, 14 nt, Human
cagguggggcagcu

SEQ ID NO: 1532188 - RNA, 15 nt, Human
cagguggggcagcuu

SEQ ID NO: 1532189 - RNA, 16 nt, Human
cagguggggcagcuug

SEQ ID NO: 1532190 - RNA, 17 nt, Human
cagguggggcagcuuga

SEQ ID NO: 1532191 - RNA, 18 nt, Human
cagguggggucacucugg

SEQ ID NO: 1532192 - RNA, 23 nt, Human
cagguggggucacucuggcagcu

SEQ ID NO: 1532193 - RNA, 18 nt, Human
caggugguuauggagagg

SEQ ID NO: 1532194 - RNA, 19 nt, Human
cagguggggucacucuggc

SEQ ID NO: 1532195 - RNA, 20 nt, Human
cagguggggucacucuggca

SEQ ID NO: 1532196 - RNA, 21 nt, Human
cagguggggucacucuggcag

SEQ ID NO: 1532197 - RNA, 22 nt, Human
cagguggggucacucuggcagc

SEQ ID NO: 1532198 - RNA, 20 nt, Human
caggugguuauggagagggu

SEQ ID NO: 1532199 - RNA, 11 nt, Human
caggugucccu

SEQ ID NO: 1532200 - RNA, 14 nt, Human
caggugucccugca

SEQ ID NO: 1532201 - RNA, 15 nt, Human
cagucaggaaagaga

SEQ ID NO: 1532202 - RNA, 18 nt, Human
cagucaggaaagagaacu

SEQ ID NO: 1532203 - RNA, 22 nt, Human
cagucaggaaagagaacuucca

SEQ ID NO: 1532204 - RNA, 16 nt, Human
caguauuacuucugcu

SEQ ID NO: 1532205 - RNA, 18 nt, Human
caguauuacuucugcuac

SEQ ID NO: 1532206 - RNA, 19 nt, Human
caguauuacuucugcuaca

SEQ ID NO: 1532207 - RNA, 17 nt, Human
cagucauucagauauga

SEQ ID NO: 1532208 - RNA, 20 nt, Human
cagucauucagauaugauuc

SEQ ID NO: 1532209 - RNA, 16 nt, Human
caguccauagcagaga

SEQ ID NO: 1532210 - RNA, 13 nt, Human
caguccaugaaga

SEQ ID NO: 1532211 - RNA, 14 nt, Human
caguccauugaaag

SEQ ID NO: 1532212 - RNA, 12 nt, Human
caguagugauag

SEQ ID NO: 1532213 - RNA, 21 nt, Human
caguaucuugaagacuuuucu

SEQ ID NO: 1532214 - RNA, 12 nt, Human
caguauggcagc

SEQ ID NO: 1532215 - RNA, 15 nt, Human
caguaucucagggcc

SEQ ID NO: 1532216 - RNA, 12 nt, Human
caguaucuugaa

SEQ ID NO: 1532217 - RNA, 18 nt, Human
caguaucuugaagacuuu

SEQ ID NO: 1532218 - RNA, 13 nt, Human
caguaucucaggg

SEQ ID NO: 1532219 - RNA, 17 nt, Human
cagucccugccaaugga

SEQ ID NO: 1532220 - RNA, 12 nt, Human
caguccucccau

SEQ ID NO: 1532221 - RNA, 13 nt, Human
caguccucccauc

SEQ ID NO: 1532222 - RNA, 14 nt, Human
caguccucccaucu

SEQ ID NO: 1532223 - RNA, 15 nt, Human
caguccucccaucuc

SEQ ID NO: 1532224 - RNA, 12 nt, Human
cagucccugcca

SEQ ID NO: 1532225 - RNA, 13 nt, Human
cagucccugccaa

SEQ ID NO: 1532226 - RNA, 14 nt, Human
cagucccugccaau

SEQ ID NO: 1532227 - RNA, 15 nt, Human
cagucccugccaaug

SEQ ID NO: 1532228 - RNA, 16 nt, Human
cagucccugccaaugg

SEQ ID NO: 1532229 - RNA, 20 nt, Human
cagugaaagaaaauaacaau

SEQ ID NO: 1532230 - RNA, 16 nt, Human
cagugaaagaaaauaa

SEQ ID NO: 1532231 - RNA, 19 nt, Human
cagucuggaaugcaguggu

SEQ ID NO: 1532232 - RNA, 16 nt, Human
caguccucccaucuca

SEQ ID NO: 1532233 - RNA, 17 nt, Human
caguccucccaucucac

SEQ ID NO: 1532234 - RNA, 15 nt, Human
caguccuuaccagca

SEQ ID NO: 1532235 - RNA, 18 nt, Human
caguccuuaccagcagag

SEQ ID NO: 1532236 - RNA, 19 nt, Human
caguccuuaccagcagagc

SEQ ID NO: 1532237 - RNA, 20 nt, Human
caguccuuaccagcagagca

SEQ ID NO: 1532238 - RNA, 21 nt, Human
caguccuuaccagcagagcac

SEQ ID NO: 1532239 - RNA, 12 nt, Human
cagugaauucuu

SEQ ID NO: 1532240 - RNA, 13 nt, Human
cagugaaagcauc

SEQ ID NO: 1532241 - RNA, 14 nt, Human
cagugaaagcauca

SEQ ID NO: 1532242 - RNA, 15 nt, Human
cagugagacagcucu

SEQ ID NO: 1532243 - RNA, 24 nt, Human
cagugagccgagauugcaccacug

SEQ ID NO: 1532244 - RNA, 12 nt, Human
cagugaggcucu

SEQ ID NO: 1532245 - RNA, 13 nt, Human
cagugaggcucug

SEQ ID NO: 1532246 - RNA, 14 nt, Human
cagugaggcucugc

SEQ ID NO: 1532247 - RNA, 15 nt, Human
cagugaggcucugcc

SEQ ID NO: 1532248 - RNA, 16 nt, Human
cagugaggcucugccc

SEQ ID NO: 1532249 - RNA, 21 nt, Human
cagugaggcucugcccuuggu

SEQ ID NO: 1532250 - RNA, 17 nt, Human
cagugagucgaggacag

SEQ ID NO: 1532251 - RNA, 18 nt, Human
cagugagucgaggacagg

SEQ ID NO: 1532252 - RNA, 17 nt, Human
cagugaggcucugcccu

SEQ ID NO: 1532253 - RNA, 18 nt, Human
cagugaggcucugcccuu

SEQ ID NO: 1532254 - RNA, 19 nt, Human
cagugaggcucugcccuug

SEQ ID NO: 1532255 - RNA, 20 nt, Human
cagugaggcucugcccuugg

SEQ ID NO: 1532256 - RNA, 17 nt, Human
cagugauuaccagggac

SEQ ID NO: 1532257 - RNA, 18 nt, Human
cagugauuaccagggacu

SEQ ID NO: 1532258 - RNA, 22 nt, Human
cagugauuaccagggacugagg

SEQ ID NO: 1532259 - RNA, 19 nt, Human
cagugagucgaggacaggg

SEQ ID NO: 1532260 - RNA, 20 nt, Human
cagugagucgaggacaggga

SEQ ID NO: 1532261 - RNA, 22 nt, Human
cagugagucgaggacagggagg

SEQ ID NO: 1532262 - RNA, 23 nt, Human
cagugagucgaggacagggaggu

SEQ ID NO: 1532263 - RNA, 15 nt, Human
cagugccgagaagga

SEQ ID NO: 1532264 - RNA, 18 nt, Human
cagugccgagaaggaagc

SEQ ID NO: 1532265 - RNA, 11 nt, Human
cagugccuuau

SEQ ID NO: 1532266 - RNA, 13 nt, Human
cagugccuuaugg

SEQ ID NO: 1532267 - RNA, 15 nt, Human
cagugccuuauggaa

SEQ ID NO: 1532268 - RNA, 16 nt, Human
cagugccuuauggaac

SEQ ID NO: 1532269 - RNA, 17 nt, Human
cagugccuuauggaaca

SEQ ID NO: 1532270 - RNA, 18 nt, Human
cagugccuuauggaacac

SEQ ID NO: 1532271 - RNA, 19 nt, Human
cagugccuuauggaacacu

SEQ ID NO: 1532272 - RNA, 20 nt, Human
cagugccuuauggaacacuc

SEQ ID NO: 1532273 - RNA, 21 nt, Human
cagugccuuauggaacacucu

SEQ ID NO: 1532274 - RNA, 22 nt, Human
cagugccuuauggaacacucug

SEQ ID NO: 1532275 - RNA, 23 nt, Human
cagugccuuauggaacacucuga

SEQ ID NO: 1532276 - RNA, 11 nt, Human
caggggacagg

SEQ ID NO: 1532277 - RNA, 16 nt, Human
caggggacaggauggu

SEQ ID NO: 1532278 - RNA, 16 nt, Human
cagggccuggcucagg

SEQ ID NO: 1532279 - RNA, 19 nt, Human
cagggccuggcucaggugg

SEQ ID NO: 1532280 - RNA, 13 nt, Human
cagggccuggcuc

SEQ ID NO: 1532281 - RNA, 14 nt, Human
cagggccuggcuca

SEQ ID NO: 1532282 - RNA, 15 nt, Human
cagggccuggcucag

SEQ ID NO: 1532283 - RNA, 17 nt, Human
caggggccggccagugg

SEQ ID NO: 1532284 - RNA, 22 nt, Human
caggggccggccaguggccuuc

SEQ ID NO: 1532285 - RNA, 19 nt, Human
caggggaggguagagcgga

SEQ ID NO: 1532286 - RNA, 13 nt, Human
caggggaggggug

SEQ ID NO: 1532287 - RNA, 23 nt, Human
cagggacagaggggguggccucc

SEQ ID NO: 1532288 - RNA, 18 nt, Human
cagggacaggauaagagg

SEQ ID NO: 1532289 - RNA, 14 nt, Human
cagggcacaccggg

SEQ ID NO: 1532290 - RNA, 22 nt, Human
cagggcacaccgggcacucaga

SEQ ID NO: 1532291 - RNA, 23 nt, Human
cagggcacaccgggcacucagaa

SEQ ID NO: 1532292 - RNA, 15 nt, Human
cagggcacaccgggc

SEQ ID NO: 1532293 - RNA, 17 nt, Human
cagggcacaccgggcac

SEQ ID NO: 1532294 - RNA, 19 nt, Human
cagggcacaccgggcacuc

SEQ ID NO: 1532295 - RNA, 21 nt, Human
cagggcacaccgggcacucag

SEQ ID NO: 1532296 - RNA, 17 nt, Human
cagggcauggcugggaa

SEQ ID NO: 1532297 - RNA, 16 nt, Human
cagggccagugcaguu

SEQ ID NO: 1532298 - RNA, 13 nt, Human
cagggacagaggg

SEQ ID NO: 1532299 - RNA, 14 nt, Human
cagggacagagggg

SEQ ID NO: 1532300 - RNA, 20 nt, Human
cagggacagaggggguggcc

SEQ ID NO: 1532301 - RNA, 22 nt, Human
cagggaaacagcuaaugggaca

SEQ ID NO: 1532302 - RNA, 13 nt, Human
caggcuagaugua

SEQ ID NO: 1532303 - RNA, 19 nt, Human
caggcuagauguauguacu

SEQ ID NO: 1532304 - RNA, 14 nt, Human
caggcuacugucag

SEQ ID NO: 1532305 - RNA, 14 nt, Human
caggcuccuuuagc

SEQ ID NO: 1532306 - RNA, 19 nt, Human
caggcuccuuuagcgccca

SEQ ID NO: 1532307 - RNA, 20 nt, Human
caggcuccuuuagcgcccag

SEQ ID NO: 1532308 - RNA, 21 nt, Human
caggcuccuuuagcgcccagu

SEQ ID NO: 1532309 - RNA, 20 nt, Human
caggcucgggcuccccagcc

SEQ ID NO: 1532310 - RNA, 12 nt, Human
caggcucucagg

SEQ ID NO: 1532311 - RNA, 13 nt, Human
caggcucucaggc

SEQ ID NO: 1532312 - RNA, 14 nt, Human
caggcucucaggcc

SEQ ID NO: 1532313 - RNA, 15 nt, Human
caggcucucaggcca

SEQ ID NO: 1532314 - RNA, 16 nt, Human
caggcucucaggccag

SEQ ID NO: 1532315 - RNA, 21 nt, Human
caggcucucaggccagcugcu

SEQ ID NO: 1532316 - RNA, 23 nt, Human
caggcucucaggccagcugcuug

SEQ ID NO: 1532317 - RNA, 17 nt, Human
caggcucucaggccagc

SEQ ID NO: 1532318 - RNA, 18 nt, Human
caggcucucaggccagcu

SEQ ID NO: 1532319 - RNA, 19 nt, Human
caggcucucaggccagcug

SEQ ID NO: 1532320 - RNA, 20 nt, Human
caggcucucaggccagcugc

SEQ ID NO: 1532321 - RNA, 16 nt, Human
caggcccucugcccac

SEQ ID NO: 1532322 - RNA, 17 nt, Human
caggcccucugcccacu

SEQ ID NO: 1532323 - RNA, 19 nt, Human
caggcccucugcccacucc

SEQ ID NO: 1532324 - RNA, 20 nt, Human
caggcccucugcccacuccc

SEQ ID NO: 1532325 - RNA, 21 nt, Human
caggcccucugcccacucccu

SEQ ID NO: 1532326 - RNA, 22 nt, Human
caggcccucugcccacucccug

SEQ ID NO: 1532327 - RNA, 22 nt, Human
caggcccggcuccaggcuccuu

SEQ ID NO: 1532328 - RNA, 20 nt, Human
caggcccggcuccaggcucc

SEQ ID NO: 1532329 - RNA, 21 nt, Human
caggcccggcuccaggcuccu

SEQ ID NO: 1532330 - RNA, 13 nt, Human
caggcccucugcc

SEQ ID NO: 1532331 - RNA, 14 nt, Human
caggcccucugccc

SEQ ID NO: 1532332 - RNA, 15 nt, Human
caggcccucugccca

SEQ ID NO: 1532333 - RNA, 17 nt, Human
caggcccggcuccaggc

SEQ ID NO: 1532334 - RNA, 18 nt, Human
caggcccggcuccaggcu

SEQ ID NO: 1532335 - RNA, 19 nt, Human
caggcccggcuccaggcuc

SEQ ID NO: 1532336 - RNA, 16 nt, Human
caggcuuagggacagg

SEQ ID NO: 1532337 - RNA, 17 nt, Human
caggcuuagggacagga

SEQ ID NO: 1532338 - RNA, 22 nt, Human
caggcuuagucacugagacagc

SEQ ID NO: 1532339 - RNA, 23 nt, Human
caggcuuagucacugagacagcc

SEQ ID NO: 1532340 - RNA, 16 nt, Human
cagggaaacagcuaau

SEQ ID NO: 1532341 - RNA, 22 nt, Human
caggcuguaucccaugagccuc

SEQ ID NO: 1532342 - RNA, 23 nt, Human
caggcuguaucccaugagccuca

SEQ ID NO: 1532343 - RNA, 16 nt, Human
caggcuuagucacuga

SEQ ID NO: 1532344 - RNA, 17 nt, Human
caggcuuagucacugag

SEQ ID NO: 1532345 - RNA, 20 nt, Human
caggcuuagucacugagaca

SEQ ID NO: 1532346 - RNA, 21 nt, Human
caggcuuagucacugagacag

SEQ ID NO: 1532347 - RNA, 12 nt, Human
caggcuggucuc

SEQ ID NO: 1532348 - RNA, 19 nt, Human
caggcuggucucaaacucu

SEQ ID NO: 1532349 - RNA, 14 nt, Human
caggcuguauccca

SEQ ID NO: 1532350 - RNA, 20 nt, Human
caggcuguaucccaugagcc

SEQ ID NO: 1532351 - RNA, 21 nt, Human
caggcuguaucccaugagccu

SEQ ID NO: 1532352 - RNA, 13 nt, Human
caggcagguccag

SEQ ID NO: 1532353 - RNA, 16 nt, Human
caggcagccaggccac

SEQ ID NO: 1532354 - RNA, 17 nt, Human
caggcagccaggccaca

SEQ ID NO: 1532355 - RNA, 16 nt, Human
caggauuuuaaucuuu

SEQ ID NO: 1532356 - RNA, 20 nt, Human
caggauucuuccucccuccc

SEQ ID NO: 1532357 - RNA, 14 nt, Human
caggcaaugcuggc

SEQ ID NO: 1532358 - RNA, 14 nt, Human
caggcagccaggcc

SEQ ID NO: 1532359 - RNA, 15 nt, Human
caggcagccaggcca

SEQ ID NO: 1532360 - RNA, 14 nt, Human
caggcaagcaccuc

SEQ ID NO: 1532361 - RNA, 15 nt, Human
caggcaagcaccucc

SEQ ID NO: 1532362 - RNA, 16 nt, Human
caggcaagcaccuccu

SEQ ID NO: 1532363 - RNA, 21 nt, Human
caggcaagcaccuccugccuc

SEQ ID NO: 1532364 - RNA, 17 nt, Human
caggcaugguggcccac

SEQ ID NO: 1532365 - RNA, 14 nt, Human
caggcagguccagg

SEQ ID NO: 1532366 - RNA, 15 nt, Human
caggcagguccaggg

SEQ ID NO: 1532367 - RNA, 19 nt, Human
caggcagguccaggguuug

SEQ ID NO: 1532368 - RNA, 12 nt, Human
caggcaggucuu

SEQ ID NO: 1532369 - RNA, 13 nt, Human
caggcaggucuug

SEQ ID NO: 1532370 - RNA, 22 nt, Human
caggcaggucuugaacuccugg

SEQ ID NO: 1532371 - RNA, 23 nt, Human
caggcaggucuugaacuccuggc

SEQ ID NO: 1532372 - RNA, 15 nt, Human
caggcaggugggaug

SEQ ID NO: 1532373 - RNA, 24 nt, Human
caggcauuccccaggaggccagcc

SEQ ID NO: 1532374 - RNA, 22 nt, Human
caggcauuccccaggaggccag

SEQ ID NO: 1532375 - RNA, 23 nt, Human
caggcauuccccaggaggccagc

SEQ ID NO: 1532376 - RNA, 18 nt, Human
caggcauuccccaggagg

SEQ ID NO: 1532377 - RNA, 19 nt, Human
caggcauuccccaggaggc

SEQ ID NO: 1532378 - RNA, 20 nt, Human
caggcauuccccaggaggcc

SEQ ID NO: 1532379 - RNA, 21 nt, Human
caggcauuccccaggaggcca

SEQ ID NO: 1532380 - RNA, 15 nt, Human
caggcauguucucug

SEQ ID NO: 1532381 - RNA, 18 nt, Human
caggcauguucucugagg

SEQ ID NO: 1532382 - RNA, 19 nt, Human
caggcauguucucugagga

SEQ ID NO: 1532383 - RNA, 20 nt, Human
caggcauguucucugaggac

SEQ ID NO: 1532384 - RNA, 13 nt, Human
caggcauucccca

SEQ ID NO: 1532385 - RNA, 15 nt, Human
caggcauuccccagg

SEQ ID NO: 1532386 - RNA, 16 nt, Human
caggcauuccccagga

SEQ ID NO: 1532387 - RNA, 17 nt, Human
caggcauuccccaggag

SEQ ID NO: 1532388 - RNA, 21 nt, Human
caggauauucucacagcucca

SEQ ID NO: 1532389 - RNA, 13 nt, Human
caggaucagucug

SEQ ID NO: 1532390 - RNA, 14 nt, Human
caggaucagucuga

SEQ ID NO: 1532391 - RNA, 23 nt, Human
caggauggccgggcgcgguggcu

SEQ ID NO: 1532392 - RNA, 21 nt, Human
caggaugguucccuugaugaa

SEQ ID NO: 1532393 - RNA, 23 nt, Human
caggaugguucccuugaugaaga

SEQ ID NO: 1532394 - RNA, 17 nt, Human
caggauucuuccucccu

SEQ ID NO: 1532395 - RNA, 18 nt, Human
caggauucuuccucccuc

SEQ ID NO: 1532396 - RNA, 14 nt, Human
caggcccccaggug

SEQ ID NO: 1532397 - RNA, 19 nt, Human
caggcccccaggugccagu

SEQ ID NO: 1532398 - RNA, 20 nt, Human
caggcccccaggugccaguu

SEQ ID NO: 1532399 - RNA, 13 nt, Human
caggccccugcca

SEQ ID NO: 1532400 - RNA, 18 nt, Human
caggccaaacucaccugc

SEQ ID NO: 1532401 - RNA, 23 nt, Human
caggccaaacucaccugccccuc

SEQ ID NO: 1532402 - RNA, 13 nt, Human
caggccacaagac

SEQ ID NO: 1532403 - RNA, 17 nt, Human
caggccacaagacccuu

SEQ ID NO: 1532404 - RNA, 18 nt, Human
caggccacaagacccuug

SEQ ID NO: 1532405 - RNA, 20 nt, Human
caggccacaagacccuugug

SEQ ID NO: 1532406 - RNA, 21 nt, Human
caggccaggcccucugcccac

SEQ ID NO: 1532407 - RNA, 22 nt, Human
caggccaggcccucugcccacu

SEQ ID NO: 1532408 - RNA, 13 nt, Human
caggcccggcucc

SEQ ID NO: 1532409 - RNA, 14 nt, Human
caggcccggcucca

SEQ ID NO: 1532410 - RNA, 15 nt, Human
caggcccggcuccag

SEQ ID NO: 1532411 - RNA, 15 nt, Human
caggccccugccacc

SEQ ID NO: 1532412 - RNA, 17 nt, Human
caggccccugccacccu

SEQ ID NO: 1532413 - RNA, 19 nt, Human
caggccccugccacccugg

SEQ ID NO: 1532414 - RNA, 20 nt, Human
caggccccugccacccuggg

SEQ ID NO: 1532415 - RNA, 16 nt, Human
caggcccggcuccagg

SEQ ID NO: 1532416 - RNA, 17 nt, Human
caggagccgaagcccag

SEQ ID NO: 1532417 - RNA, 14 nt, Human
caggagccuccugc

SEQ ID NO: 1532418 - RNA, 17 nt, Human
caggagccuccugcccu

SEQ ID NO: 1532419 - RNA, 18 nt, Human
caggagccgaagcccagg

SEQ ID NO: 1532420 - RNA, 21 nt, Human
caggagccgaagcccaggggc

SEQ ID NO: 1532421 - RNA, 20 nt, Human
caggagccuccugcccuuac

SEQ ID NO: 1532422 - RNA, 12 nt, Human
caggagugagca

SEQ ID NO: 1532423 - RNA, 23 nt, Human
caggagccccgaggccuucucug

SEQ ID NO: 1532424 - RNA, 20 nt, Human
caggagccccgaggccuucu

SEQ ID NO: 1532425 - RNA, 22 nt, Human
caggagccccgaggccuucucu

SEQ ID NO: 1532426 - RNA, 15 nt, Human
caggagccccgaggc

SEQ ID NO: 1532427 - RNA, 16 nt, Human
caggagccccgaggcc

SEQ ID NO: 1532428 - RNA, 18 nt, Human
caggagccccgaggccuu

SEQ ID NO: 1532429 - RNA, 12 nt, Human
caggagcagcca

SEQ ID NO: 1532430 - RNA, 13 nt, Human
caggagcagccac

SEQ ID NO: 1532431 - RNA, 14 nt, Human
caggagcagccaca

SEQ ID NO: 1532432 - RNA, 19 nt, Human
caggagcagccacauuccu

SEQ ID NO: 1532433 - RNA, 16 nt, Human
caggagacccacaggu

SEQ ID NO: 1532434 - RNA, 19 nt, Human
caggagaagaaccugaaga

SEQ ID NO: 1532435 - RNA, 12 nt, Human
caggagaguaga

SEQ ID NO: 1532436 - RNA, 20 nt, Human
caggacugggccacuucugg

SEQ ID NO: 1532437 - RNA, 15 nt, Human
caggacugggccacu

SEQ ID NO: 1532438 - RNA, 16 nt, Human
caggacugggccacuu

SEQ ID NO: 1532439 - RNA, 12 nt, Human
caggacugggcc

SEQ ID NO: 1532440 - RNA, 13 nt, Human
caggacugggcca

SEQ ID NO: 1532441 - RNA, 21 nt, Human
caggaguuugagaccaaccug

SEQ ID NO: 1532442 - RNA, 22 nt, Human
caggaguuugagaccaaccugg

SEQ ID NO: 1532443 - RNA, 23 nt, Human
caggaguuugagaccaaccuggg

SEQ ID NO: 1532444 - RNA, 22 nt, Human
caggaagccagcaggcucucag

SEQ ID NO: 1532445 - RNA, 19 nt, Human
caggaagccagcaggcucu

SEQ ID NO: 1532446 - RNA, 21 nt, Human
caggaagccagcaggcucuca

SEQ ID NO: 1532447 - RNA, 14 nt, Human
caggaagccagcag

SEQ ID NO: 1532448 - RNA, 16 nt, Human
caggaagccagcaggc

SEQ ID NO: 1532449 - RNA, 17 nt, Human
caggaagccagcaggcu

SEQ ID NO: 1532450 - RNA, 18 nt, Human
caggaagccagcaggcuc

SEQ ID NO: 1532451 - RNA, 23 nt, Human
caggaagcucagggccuggcuca

SEQ ID NO: 1532452 - RNA, 20 nt, Human
caggaagcucagggccuggc

SEQ ID NO: 1532453 - RNA, 21 nt, Human
caggaagcucagggccuggcu

SEQ ID NO: 1532454 - RNA, 13 nt, Human
caggaagcucagg

SEQ ID NO: 1532455 - RNA, 14 nt, Human
caggaagcucaggg

SEQ ID NO: 1532456 - RNA, 15 nt, Human
caggaagcucagggc

SEQ ID NO: 1532457 - RNA, 16 nt, Human
caggaagcucagggcc

SEQ ID NO: 1532458 - RNA, 17 nt, Human
caggaagcucagggccu

SEQ ID NO: 1532459 - RNA, 18 nt, Human
caggaagcucagggccug

SEQ ID NO: 1532460 - RNA, 19 nt, Human
caggaagcucagggccugg

SEQ ID NO: 1532461 - RNA, 12 nt, Human
caggaaguacug

SEQ ID NO: 1532462 - RNA, 14 nt, Human
caggaaguacugga

SEQ ID NO: 1532463 - RNA, 16 nt, Human
caggaaguacuggaga

SEQ ID NO: 1532464 - RNA, 15 nt, Human
caggaaggcuaaagg

SEQ ID NO: 1532465 - RNA, 16 nt, Human
caggaaguagaggagg

SEQ ID NO: 1532466 - RNA, 15 nt, Human
caggaaguagaggag

SEQ ID NO: 1532467 - RNA, 20 nt, Human
caggaaguacuggagaaaau

SEQ ID NO: 1532468 - RNA, 17 nt, Human
caggaaguacuggagaa

SEQ ID NO: 1532469 - RNA, 18 nt, Human
caggaaguacuggagaaa

SEQ ID NO: 1532470 - RNA, 19 nt, Human
caggaaucuguauauauuu

SEQ ID NO: 1532471 - RNA, 19 nt, Human
cagcuguaugauucccagc

SEQ ID NO: 1532472 - RNA, 20 nt, Human
cagcuucauuuccugugucu

SEQ ID NO: 1532473 - RNA, 21 nt, Human
cagcuucauuuccugugucuu

SEQ ID NO: 1532474 - RNA, 18 nt, Human
cagcuugaaacugagaug

SEQ ID NO: 1532475 - RNA, 23 nt, Human
cagcuugaucaaaggcacacagc

SEQ ID NO: 1532476 - RNA, 19 nt, Human
cagcuugaucaaaggcaca

SEQ ID NO: 1532477 - RNA, 18 nt, Human
cagcuugaggguugggcu

SEQ ID NO: 1532478 - RNA, 19 nt, Human
cagcuugaggguugggcug

SEQ ID NO: 1532479 - RNA, 20 nt, Human
cagcuugaggguugggcugg

SEQ ID NO: 1532480 - RNA, 21 nt, Human
cagcuugaggguugggcuggu

SEQ ID NO: 1532481 - RNA, 14 nt, Human
cagcuugaggguug

SEQ ID NO: 1532482 - RNA, 15 nt, Human
cagcuugaggguugg

SEQ ID NO: 1532483 - RNA, 18 nt, Human
cagcuugaccgugaggcc

SEQ ID NO: 1532484 - RNA, 19 nt, Human
cagcuugaccgugaggcca

SEQ ID NO: 1532485 - RNA, 20 nt, Human
cagcuugaccgugaggccag

SEQ ID NO: 1532486 - RNA, 21 nt, Human
cagcuugaccgugaggccaga

SEQ ID NO: 1532487 - RNA, 18 nt, Human
caggaaccacaagacugc

SEQ ID NO: 1532488 - RNA, 12 nt, Human
cagcuuuguuug

SEQ ID NO: 1532489 - RNA, 21 nt, Human
cagcuuuguuuguugucagcu

SEQ ID NO: 1532490 - RNA, 22 nt, Human
cagcuuuguuuguugucagcug

SEQ ID NO: 1532491 - RNA, 23 nt, Human
cagcuuuguuuguugucagcuga

SEQ ID NO: 1532492 - RNA, 23 nt, Human
cagcuuuccucaaaacuucagac

SEQ ID NO: 1532493 - RNA, 21 nt, Human
cagcuuguaaauagcucaggu

SEQ ID NO: 1532494 - RNA, 22 nt, Human
cagcuuguaaauagcucaggug

SEQ ID NO: 1532495 - RNA, 18 nt, Human
cagcuuguaaauagcuca

SEQ ID NO: 1532496 - RNA, 19 nt, Human
cagcuuguaaauagcucag

SEQ ID NO: 1532497 - RNA, 20 nt, Human
cagcuuguaaauagcucagg

SEQ ID NO: 1532498 - RNA, 20 nt, Human
cagcucugcauacucauuag

SEQ ID NO: 1532499 - RNA, 21 nt, Human
cagcucugcaagaauugaagc

SEQ ID NO: 1532500 - RNA, 15 nt, Human
cagcucugcaagaau

SEQ ID NO: 1532501 - RNA, 16 nt, Human
cagcucugcaagaauu

SEQ ID NO: 1532502 - RNA, 13 nt, Human
cagcucagagagg

SEQ ID NO: 1532503 - RNA, 17 nt, Human
cagcucagagagggugg

SEQ ID NO: 1532504 - RNA, 19 nt, Human
cagcucagagaggguggga

SEQ ID NO: 1532505 - RNA, 20 nt, Human
cagcucagagagggugggag

SEQ ID NO: 1532506 - RNA, 16 nt, Human
cagcuccuucuguccu

SEQ ID NO: 1532507 - RNA, 17 nt, Human
cagcuccuucuguccua

SEQ ID NO: 1532508 - RNA, 21 nt, Human
cagcuccuucuguccuacucu

SEQ ID NO: 1532509 - RNA, 23 nt, Human
cagcuccuucuguccuacucugu

SEQ ID NO: 1532510 - RNA, 10 nt, Human
cagcucuggu

SEQ ID NO: 1532511 - RNA, 13 nt, Human
cagcucuggucca

SEQ ID NO: 1532512 - RNA, 16 nt, Human
cagcucugguccauag

SEQ ID NO: 1532513 - RNA, 17 nt, Human
cagcucugguccauaga

SEQ ID NO: 1532514 - RNA, 18 nt, Human
cagcucugguccauagag

SEQ ID NO: 1532515 - RNA, 21 nt, Human
cagcucugguccauagagagc

SEQ ID NO: 1532516 - RNA, 22 nt, Human
cagcucugguccauagagagca

SEQ ID NO: 1532517 - RNA, 23 nt, Human
cagcucugguccauagagagcaa

SEQ ID NO: 1532518 - RNA, 12 nt, Human
cagcucuguccu

SEQ ID NO: 1532519 - RNA, 13 nt, Human
cagcucuguccug

SEQ ID NO: 1532520 - RNA, 14 nt, Human
cagcucuguccugg

SEQ ID NO: 1532521 - RNA, 16 nt, Human
cagcucuguccuggga

SEQ ID NO: 1532522 - RNA, 17 nt, Human
cagcucuguccugggag

SEQ ID NO: 1532523 - RNA, 18 nt, Human
cagcucuguccugggagu

SEQ ID NO: 1532524 - RNA, 23 nt, Human
cagcucuguccugggagugagcu

SEQ ID NO: 1532525 - RNA, 10 nt, Human
cagcucuuau

SEQ ID NO: 1532526 - RNA, 21 nt, Human
cagcucuuauauugccauuuc

SEQ ID NO: 1532527 - RNA, 13 nt, Human
cagcucuucucca

SEQ ID NO: 1532528 - RNA, 14 nt, Human
cagcucuucuccag

SEQ ID NO: 1532529 - RNA, 15 nt, Human
cagcucuucuccagg

SEQ ID NO: 1532530 - RNA, 16 nt, Human
cagcucuucuccaggc

SEQ ID NO: 1532531 - RNA, 17 nt, Human
cagcucuucuccaggcu

SEQ ID NO: 1532532 - RNA, 18 nt, Human
cagcucuucuccaggcug

SEQ ID NO: 1532533 - RNA, 19 nt, Human
cagcucuucuccaggcugu

SEQ ID NO: 1532534 - RNA, 23 nt, Human
cagcucuucuccaggcuguaucc

SEQ ID NO: 1532535 - RNA, 21 nt, Human
cagcugggguggggaccucag

SEQ ID NO: 1532536 - RNA, 22 nt, Human
cagcugggguggggaccucagg

SEQ ID NO: 1532537 - RNA, 23 nt, Human
cagcugggguggggaccucaggc

SEQ ID NO: 1532538 - RNA, 18 nt, Human
cagcuguaugauucccag

SEQ ID NO: 1532539 - RNA, 19 nt, Human
cagcuggugguaucugagu

SEQ ID NO: 1532540 - RNA, 18 nt, Human
cagcugguugagguuuca

SEQ ID NO: 1532541 - RNA, 22 nt, Human
cagcugcuuuugucuaugggac

SEQ ID NO: 1532542 - RNA, 17 nt, Human
cagcugcuacuacuccu

SEQ ID NO: 1532543 - RNA, 20 nt, Human
cagcugcugaaacaacaaau

SEQ ID NO: 1532544 - RNA, 21 nt, Human
cagcugcugaaacaacaaaua

SEQ ID NO: 1532545 - RNA, 13 nt, Human
cagcugcuugggc

SEQ ID NO: 1532546 - RNA, 14 nt, Human
cagcugcuugggcu

SEQ ID NO: 1532547 - RNA, 15 nt, Human
cagcugcuugggcuu

SEQ ID NO: 1532548 - RNA, 16 nt, Human
cagcugcuugggcuuc

SEQ ID NO: 1532549 - RNA, 18 nt, Human
cagcugcuugggcuucau

SEQ ID NO: 1532550 - RNA, 19 nt, Human
cagcugcuugggcuucauc

SEQ ID NO: 1532551 - RNA, 21 nt, Human
cagcugcuugggcuucauccu

SEQ ID NO: 1532552 - RNA, 22 nt, Human
cagcugcuugggcuucauccuc

SEQ ID NO: 1532553 - RNA, 18 nt, Human
cagcugccugggaucccu

SEQ ID NO: 1532554 - RNA, 23 nt, Human
cagcugccugggaucccucaucc

SEQ ID NO: 1532555 - RNA, 18 nt, Human
cagcugcgguccacccag

SEQ ID NO: 1532556 - RNA, 19 nt, Human
cagcugcgguccacccagg

SEQ ID NO: 1532557 - RNA, 20 nt, Human
cagcugcgguccacccagga

SEQ ID NO: 1532558 - RNA, 21 nt, Human
cagcugcgguccacccaggag

SEQ ID NO: 1532559 - RNA, 22 nt, Human
cagcugcgguccacccaggagc

SEQ ID NO: 1532560 - RNA, 23 nt, Human
cagcugcgguccacccaggagcc

SEQ ID NO: 1532561 - RNA, 24 nt, Human
cagcugcgguccacccaggagccc

SEQ ID NO: 1532562 - RNA, 22 nt, Human
caggaagcucagggccuggcuc

SEQ ID NO: 1532563 - RNA, 17 nt, Human
cagccuugaccauucuc

SEQ ID NO: 1532564 - RNA, 20 nt, Human
cagccuugaccauucuccac

SEQ ID NO: 1532565 - RNA, 21 nt, Human
cagccuugaccauucuccacc

SEQ ID NO: 1532566 - RNA, 22 nt, Human
cagccuugaccauucuccaccu

SEQ ID NO: 1532567 - RNA, 23 nt, Human
cagccuugaccauucuccaccug

SEQ ID NO: 1532568 - RNA, 24 nt, Human
cagccuugaccauucuccaccugc

SEQ ID NO: 1532569 - RNA, 16 nt, Human
cagccugggcaaugug

SEQ ID NO: 1532570 - RNA, 19 nt, Human
cagccugggcaaugugaua

SEQ ID NO: 1532571 - RNA, 15 nt, Human
cagccuggacccugu

SEQ ID NO: 1532572 - RNA, 19 nt, Human
cagccuggacccuguggau

SEQ ID NO: 1532573 - RNA, 20 nt, Human
cagccugcuccagcuguuca

SEQ ID NO: 1532574 - RNA, 23 nt, Human
cagccucccgaauagcugggacu

SEQ ID NO: 1532575 - RNA, 19 nt, Human
cagccucccgaguagcugg

SEQ ID NO: 1532576 - RNA, 20 nt, Human
cagccucccgaguagcuggg

SEQ ID NO: 1532577 - RNA, 21 nt, Human
cagccucccgaguagcuggga

SEQ ID NO: 1532578 - RNA, 22 nt, Human
cagccucccgaguagcugggac

SEQ ID NO: 1532579 - RNA, 23 nt, Human
cagccucccgaguagcugggacu

SEQ ID NO: 1532580 - RNA, 12 nt, Human
cagcucagagag

SEQ ID NO: 1532581 - RNA, 19 nt, Human
cagcucaccucucccuugg

SEQ ID NO: 1532582 - RNA, 20 nt, Human
cagcucaccucucccuugga

SEQ ID NO: 1532583 - RNA, 22 nt, Human
cagcucaccagccccagugccc

SEQ ID NO: 1532584 - RNA, 20 nt, Human
cagcucaccagccccagugc

SEQ ID NO: 1532585 - RNA, 21 nt, Human
cagcucaccagccccagugcc

SEQ ID NO: 1532586 - RNA, 13 nt, Human
cagcucaccucuc

SEQ ID NO: 1532587 - RNA, 15 nt, Human
cagcucaccucuccc

SEQ ID NO: 1532588 - RNA, 16 nt, Human
cagcucaccucucccu

SEQ ID NO: 1532589 - RNA, 17 nt, Human
cagcucaccucucccuu

SEQ ID NO: 1532590 - RNA, 13 nt, Human
cagcuauuuuuau

SEQ ID NO: 1532591 - RNA, 13 nt, Human
cagcucaccagcc

SEQ ID NO: 1532592 - RNA, 15 nt, Human
cagcucaccagcccc

SEQ ID NO: 1532593 - RNA, 16 nt, Human
cagcucaccagcccca

SEQ ID NO: 1532594 - RNA, 17 nt, Human
cagcucaccagccccag

SEQ ID NO: 1532595 - RNA, 19 nt, Human
cagcucaccagccccagug

SEQ ID NO: 1532596 - RNA, 21 nt, Human
cagcgagcccugguggcagug

SEQ ID NO: 1532597 - RNA, 19 nt, Human
cagcuaacauggaaguacu

SEQ ID NO: 1532598 - RNA, 18 nt, Human
cagcuaacauggaaguac

SEQ ID NO: 1532599 - RNA, 13 nt, Human
cagcgagcccugg

SEQ ID NO: 1532600 - RNA, 16 nt, Human
cagcgagcccuggugg

SEQ ID NO: 1532601 - RNA, 17 nt, Human
cagcgagcccugguggc

SEQ ID NO: 1532602 - RNA, 19 nt, Human
cagcgagcccugguggcag

SEQ ID NO: 1532603 - RNA, 20 nt, Human
cagcgagcccugguggcagu

SEQ ID NO: 1532604 - RNA, 20 nt, Human
cagcuaacauggaaguacua

SEQ ID NO: 1532605 - RNA, 15 nt, Human
cagcuaaugggacac

SEQ ID NO: 1532606 - RNA, 16 nt, Human
cagcuaaugggacacu

SEQ ID NO: 1532607 - RNA, 19 nt, Human
cagcuacuugggaggcuga

SEQ ID NO: 1532608 - RNA, 16 nt, Human
cagccuaguugaucag

SEQ ID NO: 1532609 - RNA, 17 nt, Human
cagccucaaccuccugg

SEQ ID NO: 1532610 - RNA, 18 nt, Human
cagccucaaccuccuggg

SEQ ID NO: 1532611 - RNA, 19 nt, Human
cagccucaaccuccugggc

SEQ ID NO: 1532612 - RNA, 20 nt, Human
cagccucaaccuccugggcu

SEQ ID NO: 1532613 - RNA, 21 nt, Human
cagccucaaccuccugggcua

SEQ ID NO: 1532614 - RNA, 14 nt, Human
cagccucacagucc

SEQ ID NO: 1532615 - RNA, 15 nt, Human
cagccucacaguccu

SEQ ID NO: 1532616 - RNA, 20 nt, Human
cagccucacaguccuuacca

SEQ ID NO: 1532617 - RNA, 19 nt, Human
cagccucccaaagugcugg

SEQ ID NO: 1532618 - RNA, 20 nt, Human
cagccucccaaagugcuggg

SEQ ID NO: 1532619 - RNA, 21 nt, Human
cagccucccaaagugcuggga

SEQ ID NO: 1532620 - RNA, 23 nt, Human
cagccucccaaagugcugggauu

SEQ ID NO: 1532621 - RNA, 20 nt, Human
cagccucccgaauagcuggg

SEQ ID NO: 1532622 - RNA, 21 nt, Human
cagccucccgaauagcuggga

SEQ ID NO: 1532623 - RNA, 22 nt, Human
cagccucccgaauagcugggac

SEQ ID NO: 1532624 - RNA, 18 nt, Human
cagcccugcagagggcac

SEQ ID NO: 1532625 - RNA, 20 nt, Human
cagcccugcagagggcacag

SEQ ID NO: 1532626 - RNA, 13 nt, Human
cagcccugcagag

SEQ ID NO: 1532627 - RNA, 14 nt, Human
cagcccugcagagg

SEQ ID NO: 1532628 - RNA, 15 nt, Human
cagcccugcagaggg

SEQ ID NO: 1532629 - RNA, 16 nt, Human
cagcccugcagagggc

SEQ ID NO: 1532630 - RNA, 21 nt, Human
cagccguguaaccauggaccc

SEQ ID NO: 1532631 - RNA, 21 nt, Human
cagcccgggcucugccuccca

SEQ ID NO: 1532632 - RNA, 22 nt, Human
cagcccgggcucugccucccau

SEQ ID NO: 1532633 - RNA, 17 nt, Human
cagcccgggcucugccu

SEQ ID NO: 1532634 - RNA, 18 nt, Human
cagcccgggcucugccuc

SEQ ID NO: 1532635 - RNA, 19 nt, Human
cagcccgggcucugccucc

SEQ ID NO: 1532636 - RNA, 20 nt, Human
cagcccgggcucugccuccc

SEQ ID NO: 1532637 - RNA, 13 nt, Human
cagcccucacccc

SEQ ID NO: 1532638 - RNA, 14 nt, Human
cagcccucaccccu

SEQ ID NO: 1532639 - RNA, 15 nt, Human
cagcccucaccccug

SEQ ID NO: 1532640 - RNA, 18 nt, Human
cagcccucaccccugguu

SEQ ID NO: 1532641 - RNA, 24 nt, Human
cagccccuucugacccaugcugcc

SEQ ID NO: 1532642 - RNA, 22 nt, Human
cagccccuucugacccaugcug

SEQ ID NO: 1532643 - RNA, 23 nt, Human
cagccccuucugacccaugcugc

SEQ ID NO: 1532644 - RNA, 16 nt, Human
cagccccuucugaccc

SEQ ID NO: 1532645 - RNA, 17 nt, Human
cagccccuucugaccca

SEQ ID NO: 1532646 - RNA, 19 nt, Human
cagccccuucugacccaug

SEQ ID NO: 1532647 - RNA, 21 nt, Human
cagccccuucugacccaugcu

SEQ ID NO: 1532648 - RNA, 13 nt, Human
cagcccgggcucu

SEQ ID NO: 1532649 - RNA, 14 nt, Human
cagcccgggcucug

SEQ ID NO: 1532650 - RNA, 15 nt, Human
cagcccgggcucugc

SEQ ID NO: 1532651 - RNA, 16 nt, Human
cagcccgggcucugcc

SEQ ID NO: 1532652 - RNA, 13 nt, Human
cagccccagugcc

SEQ ID NO: 1532653 - RNA, 14 nt, Human
cagccccagugccc

SEQ ID NO: 1532654 - RNA, 15 nt, Human
cagccccagugccca

SEQ ID NO: 1532655 - RNA, 16 nt, Human
cagccccagugcccac

SEQ ID NO: 1532656 - RNA, 17 nt, Human
cagccccagugcccaca

SEQ ID NO: 1532657 - RNA, 18 nt, Human
cagccccagugcccacag

SEQ ID NO: 1532658 - RNA, 11 nt, Human
cagccccaucc

SEQ ID NO: 1532659 - RNA, 21 nt, Human
cagccccaucccaaacccuuc

SEQ ID NO: 1532660 - RNA, 20 nt, Human
cagccccuguucuggcagag

SEQ ID NO: 1532661 - RNA, 21 nt, Human
cagccccuguucuggcagagu

SEQ ID NO: 1532662 - RNA, 16 nt, Human
cagccccauucugccu

SEQ ID NO: 1532663 - RNA, 17 nt, Human
cagccccauucugccug

SEQ ID NO: 1532664 - RNA, 18 nt, Human
cagccccauucugccugc

SEQ ID NO: 1532665 - RNA, 23 nt, Human
cagccccuggaugcagccucaca

SEQ ID NO: 1532666 - RNA, 22 nt, Human
cagccccaucccaaacccuuca

SEQ ID NO: 1532667 - RNA, 12 nt, Human
cagccccauccu

SEQ ID NO: 1532668 - RNA, 13 nt, Human
cagccccauccuc

SEQ ID NO: 1532669 - RNA, 14 nt, Human
cagccccauccucu

SEQ ID NO: 1532670 - RNA, 16 nt, Human
cagccccauccucugu

SEQ ID NO: 1532671 - RNA, 22 nt, Human
cagccccauccucuguacagag

SEQ ID NO: 1532672 - RNA, 13 nt, Human
cagccccauucug

SEQ ID NO: 1532673 - RNA, 14 nt, Human
cagccccauucugc

SEQ ID NO: 1532674 - RNA, 23 nt, Human
cagcugcuuuugucuaugggacu

SEQ ID NO: 1532675 - RNA, 18 nt, Human
cagccaaagccuccucca

SEQ ID NO: 1532676 - RNA, 21 nt, Human
cagccaaagccuccuccagcc

SEQ ID NO: 1532677 - RNA, 15 nt, Human
cagccaaagccuccu

SEQ ID NO: 1532678 - RNA, 16 nt, Human
cagccaaagccuccuc

SEQ ID NO: 1532679 - RNA, 17 nt, Human
cagcaugcaccacgggc

SEQ ID NO: 1532680 - RNA, 21 nt, Human
cagcauccuggcacccggccc

SEQ ID NO: 1532681 - RNA, 19 nt, Human
cagcauccuggcacccggc

SEQ ID NO: 1532682 - RNA, 20 nt, Human
cagcauccuggcacccggcc

SEQ ID NO: 1532683 - RNA, 20 nt, Human
cagcagggagggcuucugcc

SEQ ID NO: 1532684 - RNA, 14 nt, Human
cagcauccuggcac

SEQ ID NO: 1532685 - RNA, 15 nt, Human
cagcauccuggcacc

SEQ ID NO: 1532686 - RNA, 16 nt, Human
cagcauccuggcaccc

SEQ ID NO: 1532687 - RNA, 17 nt, Human
cagcauccuggcacccg

SEQ ID NO: 1532688 - RNA, 16 nt, Human
cagcaggcucucaggc

SEQ ID NO: 1532689 - RNA, 17 nt, Human
cagcaggcucucaggcc

SEQ ID NO: 1532690 - RNA, 18 nt, Human
cagcaggcucucaggcca

SEQ ID NO: 1532691 - RNA, 19 nt, Human
cagcaggcucucaggccag

SEQ ID NO: 1532692 - RNA, 20 nt, Human
cagcaggcucucaggccagc

SEQ ID NO: 1532693 - RNA, 22 nt, Human
cagcaggcucucaggccagcug

SEQ ID NO: 1532694 - RNA, 18 nt, Human
cagcagggagggcuucug

SEQ ID NO: 1532695 - RNA, 19 nt, Human
cagcagccuggacccugug

SEQ ID NO: 1532696 - RNA, 22 nt, Human
cagcagccuggacccuguggau

SEQ ID NO: 1532697 - RNA, 12 nt, Human
cagcagccugga

SEQ ID NO: 1532698 - RNA, 14 nt, Human
cagcagccuggacc

SEQ ID NO: 1532699 - RNA, 15 nt, Human
cagcagccuggaccc

SEQ ID NO: 1532700 - RNA, 18 nt, Human
cagcagccuggacccugu

SEQ ID NO: 1532701 - RNA, 12 nt, Human
cagcaggcucuc

SEQ ID NO: 1532702 - RNA, 14 nt, Human
cagcaggcucucag

SEQ ID NO: 1532703 - RNA, 15 nt, Human
cagcaggcucucagg

SEQ ID NO: 1532704 - RNA, 17 nt, Human
cagcccaaagaaggaaa

SEQ ID NO: 1532705 - RNA, 15 nt, Human
cagcccaccccucaa

SEQ ID NO: 1532706 - RNA, 15 nt, Human
cagcccacuucugcc

SEQ ID NO: 1532707 - RNA, 22 nt, Human
cagccccaaaacucuccucugc

SEQ ID NO: 1532708 - RNA, 20 nt, Human
cagccccaaaacucuccucu

SEQ ID NO: 1532709 - RNA, 21 nt, Human
cagccccaaaacucuccucug

SEQ ID NO: 1532710 - RNA, 18 nt, Human
cagcccacuucugccaua

SEQ ID NO: 1532711 - RNA, 23 nt, Human
cagccacggccaggccagaggga

SEQ ID NO: 1532712 - RNA, 22 nt, Human
cagccaguaaaugggggugcau

SEQ ID NO: 1532713 - RNA, 14 nt, Human
cagccacggccagg

SEQ ID NO: 1532714 - RNA, 15 nt, Human
cagccacggccaggc

SEQ ID NO: 1532715 - RNA, 16 nt, Human
cagccacggccaggcc

SEQ ID NO: 1532716 - RNA, 17 nt, Human
cagccacggccaggcca

SEQ ID NO: 1532717 - RNA, 18 nt, Human
cagccacggccaggccag

SEQ ID NO: 1532718 - RNA, 19 nt, Human
cagccacggccaggccaga

SEQ ID NO: 1532719 - RNA, 21 nt, Human
cagccacggccaggccagagg

SEQ ID NO: 1532720 - RNA, 22 nt, Human
cagccacggccaggccagaggg

SEQ ID NO: 1532721 - RNA, 14 nt, Human
cagccacauuccug

SEQ ID NO: 1532722 - RNA, 19 nt, Human
cagccacauuccugaugcu

SEQ ID NO: 1532723 - RNA, 15 nt, Human
cagccacauuccuga

SEQ ID NO: 1532724 - RNA, 17 nt, Human
cagccacauuccugaug

SEQ ID NO: 1532725 - RNA, 17 nt, Human
cagcagaaaugccuuac

SEQ ID NO: 1532726 - RNA, 15 nt, Human
cagcagaaaugccuu

SEQ ID NO: 1532727 - RNA, 11 nt, Human
cagcagagcac

SEQ ID NO: 1532728 - RNA, 13 nt, Human
cagcagagcaccu

SEQ ID NO: 1532729 - RNA, 22 nt, Human
cagcagaaaugccuuacccuca

SEQ ID NO: 1532730 - RNA, 19 nt, Human
cagcagaaaugccuuaccc

SEQ ID NO: 1532731 - RNA, 13 nt, Human
cagcagaaggggg

SEQ ID NO: 1532732 - RNA, 17 nt, Human
cagcagaaggggguggu

SEQ ID NO: 1532733 - RNA, 22 nt, Human
cagcaauaaagcagcguuucua

SEQ ID NO: 1532734 - RNA, 21 nt, Human
cagcaauaaagcagcguuucu

SEQ ID NO: 1532735 - RNA, 13 nt, Human
cagcaauaaagca

SEQ ID NO: 1532736 - RNA, 19 nt, Human
cagcaagugagagcugggu

SEQ ID NO: 1532737 - RNA, 21 nt, Human
cagcaagugagagcugggugu

SEQ ID NO: 1532738 - RNA, 15 nt, Human
cagcaagucaggguu

SEQ ID NO: 1532739 - RNA, 12 nt, Human
cagcaagugaga

SEQ ID NO: 1532740 - RNA, 22 nt, Human
cagcaagggugaugggaaagca

SEQ ID NO: 1532741 - RNA, 23 nt, Human
cagcaagggugaugggaaagcau

SEQ ID NO: 1532742 - RNA, 14 nt, Human
cagcaagugagagc

SEQ ID NO: 1532743 - RNA, 15 nt, Human
cagcaagugagagcu

SEQ ID NO: 1532744 - RNA, 16 nt, Human
cagcaagugagagcug

SEQ ID NO: 1532745 - RNA, 17 nt, Human
cagcaagugagagcugg

SEQ ID NO: 1532746 - RNA, 18 nt, Human
cagcaaggagauuuacaa

SEQ ID NO: 1532747 - RNA, 17 nt, Human
cagcaaggagauuuaca

SEQ ID NO: 1532748 - RNA, 19 nt, Human
cagcaagggugaugggaaa

SEQ ID NO: 1532749 - RNA, 18 nt, Human
cagcaaaagaugcuucuc

SEQ ID NO: 1532750 - RNA, 23 nt, Human
cagcaacgcaggcccccaggugc

SEQ ID NO: 1532751 - RNA, 14 nt, Human
cagauuuuccugaa

SEQ ID NO: 1532752 - RNA, 15 nt, Human
cagauuuuccugaaa

SEQ ID NO: 1532753 - RNA, 14 nt, Human
cagauucuuuccug

SEQ ID NO: 1532754 - RNA, 15 nt, Human
cagauucuuuccuga

SEQ ID NO: 1532755 - RNA, 18 nt, Human
cagaugggugcuuggagg

SEQ ID NO: 1532756 - RNA, 16 nt, Human
cagauggaaugcugug

SEQ ID NO: 1532757 - RNA, 17 nt, Human
cagauggaaugcugugu

SEQ ID NO: 1532758 - RNA, 19 nt, Human
cagauggaaugcuguguua

SEQ ID NO: 1532759 - RNA, 21 nt, Human
cagauggaaugcuguguuaaa

SEQ ID NO: 1532760 - RNA, 23 nt, Human
cagaugggugcuuggaggaagga

SEQ ID NO: 1532761 - RNA, 14 nt, Human
cagcucaccagccc

SEQ ID NO: 1532762 - RNA, 15 nt, Human
cagagcccaccuugg

SEQ ID NO: 1532763 - RNA, 17 nt, Human
cagagcccaccuuggcu

SEQ ID NO: 1532764 - RNA, 19 nt, Human
cagagcccaccuuggcuca

SEQ ID NO: 1532765 - RNA, 20 nt, Human
cagagcccaccuuggcucaa

SEQ ID NO: 1532766 - RNA, 16 nt, Human
cagagcccacgccccc

SEQ ID NO: 1532767 - RNA, 23 nt, Human
cagagcaccuuagacagucccug

SEQ ID NO: 1532768 - RNA, 11 nt, Human
cagagcagaga

SEQ ID NO: 1532769 - RNA, 12 nt, Human
cagagcagagac

SEQ ID NO: 1532770 - RNA, 18 nt, Human
cagagcaccuuagacagu

SEQ ID NO: 1532771 - RNA, 19 nt, Human
cagagcaccuuagacaguc

SEQ ID NO: 1532772 - RNA, 21 nt, Human
cagagcaccuuagacaguccc

SEQ ID NO: 1532773 - RNA, 22 nt, Human
cagagcaccuuagacagucccu

SEQ ID NO: 1532774 - RNA, 13 nt, Human
cagagcagagacc

SEQ ID NO: 1532775 - RNA, 14 nt, Human
cagagcagagacca

SEQ ID NO: 1532776 - RNA, 15 nt, Human
cagagcagagaccau

SEQ ID NO: 1532777 - RNA, 17 nt, Human
cagagcagagaccaucc

SEQ ID NO: 1532778 - RNA, 18 nt, Human
cagagcagagaccauccc

SEQ ID NO: 1532779 - RNA, 19 nt, Human
cagagcagagaccaucccu

SEQ ID NO: 1532780 - RNA, 21 nt, Human
cagagcagagaccaucccuga

SEQ ID NO: 1532781 - RNA, 12 nt, Human
cagagccugcag

SEQ ID NO: 1532782 - RNA, 13 nt, Human
cagaggaaggaga

SEQ ID NO: 1532783 - RNA, 13 nt, Human
cagagccugcagu

SEQ ID NO: 1532784 - RNA, 23 nt, Human
cagagcccacgcccccacuggug

SEQ ID NO: 1532785 - RNA, 17 nt, Human
cagagcccacgccccca

SEQ ID NO: 1532786 - RNA, 19 nt, Human
cagagcccacgcccccacu

SEQ ID NO: 1532787 - RNA, 20 nt, Human
cagagcccacgcccccacug

SEQ ID NO: 1532788 - RNA, 21 nt, Human
cagagcccacgcccccacugg

SEQ ID NO: 1532789 - RNA, 14 nt, Human
cagaggagggcagc

SEQ ID NO: 1532790 - RNA, 18 nt, Human
cagaggagggcagcagaa

SEQ ID NO: 1532791 - RNA, 20 nt, Human
cagaggagagaggacccccu

SEQ ID NO: 1532792 - RNA, 11 nt, Human
cagaggcagcc

SEQ ID NO: 1532793 - RNA, 22 nt, Human
cagaggagggcagcagaagggg

SEQ ID NO: 1532794 - RNA, 13 nt, Human
cagaggagagagg

SEQ ID NO: 1532795 - RNA, 15 nt, Human
cagaggagagaggac

SEQ ID NO: 1532796 - RNA, 19 nt, Human
cagaggagagaggaccccc

SEQ ID NO: 1532797 - RNA, 19 nt, Human
cagagaaugaaagggccca

SEQ ID NO: 1532798 - RNA, 20 nt, Human
cagagaaugaaagggcccag

SEQ ID NO: 1532799 - RNA, 21 nt, Human
cagagaaugaaagggcccaga

SEQ ID NO: 1532800 - RNA, 15 nt, Human
cagagaauucucuua

SEQ ID NO: 1532801 - RNA, 16 nt, Human
cagagacacaagccuu

SEQ ID NO: 1532802 - RNA, 17 nt, Human
cagagacacaagccuuc

SEQ ID NO: 1532803 - RNA, 14 nt, Human
cagagacacaagcc

SEQ ID NO: 1532804 - RNA, 15 nt, Human
cagagacacaagccu

SEQ ID NO: 1532805 - RNA, 13 nt, Human
cagagaccauccc

SEQ ID NO: 1532806 - RNA, 14 nt, Human
cagagaccaucccu

SEQ ID NO: 1532807 - RNA, 16 nt, Human
cagagaccaucccuga

SEQ ID NO: 1532808 - RNA, 16 nt, Human
cagagcaccuuagaca

SEQ ID NO: 1532809 - RNA, 14 nt, Human
cagagcaagugaga

SEQ ID NO: 1532810 - RNA, 20 nt, Human
cagagcaagugagacccugu

SEQ ID NO: 1532811 - RNA, 21 nt, Human
cagagaccaucccugaaggcc

SEQ ID NO: 1532812 - RNA, 17 nt, Human
cagagaccaucccugaa

SEQ ID NO: 1532813 - RNA, 18 nt, Human
cagagaccaucccugaag

SEQ ID NO: 1532814 - RNA, 19 nt, Human
cagagaccaucccugaagg

SEQ ID NO: 1532815 - RNA, 20 nt, Human
cagagaccaucccugaaggc

SEQ ID NO: 1532816 - RNA, 13 nt, Human
cagagacuccugc

SEQ ID NO: 1532817 - RNA, 14 nt, Human
cagagacuccugca

SEQ ID NO: 1532818 - RNA, 15 nt, Human
cagagacuccugcag

SEQ ID NO: 1532819 - RNA, 16 nt, Human
cagagacuccugcagg

SEQ ID NO: 1532820 - RNA, 17 nt, Human
cagagacuccugcaggc

SEQ ID NO: 1532821 - RNA, 18 nt, Human
cagagacuccugcaggca

SEQ ID NO: 1532822 - RNA, 19 nt, Human
cagagacuccugcaggcag

SEQ ID NO: 1532823 - RNA, 13 nt, Human
cagaggcugccuc

SEQ ID NO: 1532824 - RNA, 23 nt, Human
cagaggcugccucucccaucacu

SEQ ID NO: 1532825 - RNA, 14 nt, Human
cagagggagugaca

SEQ ID NO: 1532826 - RNA, 16 nt, Human
cagagggagugacaga

SEQ ID NO: 1532827 - RNA, 18 nt, Human
cagagggagugacagagg

SEQ ID NO: 1532828 - RNA, 19 nt, Human
cagagggagugacagaggc

SEQ ID NO: 1532829 - RNA, 23 nt, Human
cagaggcagccccauucugccug

SEQ ID NO: 1532830 - RNA, 19 nt, Human
cagaggccaugggccuccu

SEQ ID NO: 1532831 - RNA, 20 nt, Human
cagaggccaugggccuccug

SEQ ID NO: 1532832 - RNA, 21 nt, Human
cagaggccaugggccuccugu

SEQ ID NO: 1532833 - RNA, 12 nt, Human
cagaggcagccc

SEQ ID NO: 1532834 - RNA, 13 nt, Human
cagaggcagcccc

SEQ ID NO: 1532835 - RNA, 14 nt, Human
cagaggcagcccca

SEQ ID NO: 1532836 - RNA, 15 nt, Human
cagaggcagccccau

SEQ ID NO: 1532837 - RNA, 18 nt, Human
cagaggcagccccauucu

SEQ ID NO: 1532838 - RNA, 19 nt, Human
cagaggcagccccauucug

SEQ ID NO: 1532839 - RNA, 20 nt, Human
cagaggcagccccauucugc

SEQ ID NO: 1532840 - RNA, 22 nt, Human
cagaggcagccccauucugccu

SEQ ID NO: 1532841 - RNA, 13 nt, Human
cagagucucacug

SEQ ID NO: 1532842 - RNA, 17 nt, Human
cagagucucacuguugc

SEQ ID NO: 1532843 - RNA, 19 nt, Human
cagagucucacuguugccc

SEQ ID NO: 1532844 - RNA, 20 nt, Human
cagagucucacuguugccca

SEQ ID NO: 1532845 - RNA, 21 nt, Human
cagagucucacuguugcccag

SEQ ID NO: 1532846 - RNA, 15 nt, Human
cagagggccugcaag

SEQ ID NO: 1532847 - RNA, 19 nt, Human
cagagggccugcaagggag

SEQ ID NO: 1532848 - RNA, 20 nt, Human
cagagggagugacagaggca

SEQ ID NO: 1532849 - RNA, 21 nt, Human
cagagggagugacagaggcag

SEQ ID NO: 1532850 - RNA, 22 nt, Human
cagagggagugacagaggcagc

SEQ ID NO: 1532851 - RNA, 23 nt, Human
cagagggagugacagaggcagcc

SEQ ID NO: 1532852 - RNA, 22 nt, Human
cagagucucacuguugcccagg

SEQ ID NO: 1532853 - RNA, 23 nt, Human
cagagucucacuguugcccaggc

SEQ ID NO: 1532854 - RNA, 16 nt, Human
cagagugagacucugu

SEQ ID NO: 1532855 - RNA, 17 nt, Human
cagagugagacucuguc

SEQ ID NO: 1532856 - RNA, 18 nt, Human
cagagugagacucugucu

SEQ ID NO: 1532857 - RNA, 19 nt, Human
cagagugagacucugucuc

SEQ ID NO: 1532858 - RNA, 20 nt, Human
cagagugagacucugucuca

SEQ ID NO: 1532859 - RNA, 14 nt, Human
cagauaaucacaau

SEQ ID NO: 1532860 - RNA, 14 nt, Human
cagauaaucagugu

SEQ ID NO: 1532861 - RNA, 23 nt, Human
cagauaaauaguuuaugauucca

SEQ ID NO: 1532862 - RNA, 14 nt, Human
cagauaaacaguag

SEQ ID NO: 1532863 - RNA, 19 nt, Human
cagaguuguuacauuuuua

SEQ ID NO: 1532864 - RNA, 18 nt, Human
cagaguuguuacauuuuu

SEQ ID NO: 1532865 - RNA, 15 nt, Human
cagaguuguuacauu

SEQ ID NO: 1532866 - RNA, 22 nt, Human
cagaguugaagacagagcuaca

SEQ ID NO: 1532867 - RNA, 14 nt, Human
cagaguuguuacau

SEQ ID NO: 1532868 - RNA, 17 nt, Human
cagaguugaagacagag

SEQ ID NO: 1532869 - RNA, 18 nt, Human
cagaguugaagacagagc

SEQ ID NO: 1532870 - RNA, 19 nt, Human
cagaguugaagacagagcu

SEQ ID NO: 1532871 - RNA, 20 nt, Human
cagaguugaagacagagcua

SEQ ID NO: 1532872 - RNA, 14 nt, Human
cagaguugaagaca

SEQ ID NO: 1532873 - RNA, 15 nt, Human
cagaguugaagacag

SEQ ID NO: 1532874 - RNA, 16 nt, Human
cagaguugaagacaga

SEQ ID NO: 1532875 - RNA, 14 nt, Human
cagauccuggaaau

SEQ ID NO: 1532876 - RNA, 20 nt, Human
cagaucucuaacuucaccau

SEQ ID NO: 1532877 - RNA, 20 nt, Human
cagauacaggaaaagcugcu

SEQ ID NO: 1532878 - RNA, 21 nt, Human
cagauacaggaaaagcugcug

SEQ ID NO: 1532879 - RNA, 22 nt, Human
cagauacaggaaaagcugcuga

SEQ ID NO: 1532880 - RNA, 23 nt, Human
cagauacaggaaaagcugcugac

SEQ ID NO: 1532881 - RNA, 17 nt, Human
cagaugcaccagcccuu

SEQ ID NO: 1532882 - RNA, 22 nt, Human
cagaugcaccagcccuuagcag

SEQ ID NO: 1532883 - RNA, 13 nt, Human
cagaugcaccagc

SEQ ID NO: 1532884 - RNA, 14 nt, Human
cagaugcaccagcc

SEQ ID NO: 1532885 - RNA, 16 nt, Human
cagaugcaccagcccu

SEQ ID NO: 1532886 - RNA, 16 nt, Human
cagaggccaugggccu

SEQ ID NO: 1532887 - RNA, 14 nt, Human
cagaccacaaaacu

SEQ ID NO: 1532888 - RNA, 20 nt, Human
cagaccacaaaacuuuucua

SEQ ID NO: 1532889 - RNA, 13 nt, Human
cagacccugcccu

SEQ ID NO: 1532890 - RNA, 14 nt, Human
cagacccugcccug

SEQ ID NO: 1532891 - RNA, 16 nt, Human
cagacccggcugcgug

SEQ ID NO: 1532892 - RNA, 12 nt, Human
cagacccugccc

SEQ ID NO: 1532893 - RNA, 12 nt, Human
cagacccggcug

SEQ ID NO: 1532894 - RNA, 14 nt, Human
cagacccggcugcg

SEQ ID NO: 1532895 - RNA, 22 nt, Human
cagacccugcccugugggcccc

SEQ ID NO: 1532896 - RNA, 15 nt, Human
cagacccugcccugu

SEQ ID NO: 1532897 - RNA, 16 nt, Human
cagacccugcccugug

SEQ ID NO: 1532898 - RNA, 17 nt, Human
cagacccugcccugugg

SEQ ID NO: 1532899 - RNA, 21 nt, Human
cagacccugcccugugggccc

SEQ ID NO: 1532900 - RNA, 19 nt, Human
cagacggggcuggagugug

SEQ ID NO: 1532901 - RNA, 13 nt, Human
cagacggggcugg

SEQ ID NO: 1532902 - RNA, 19 nt, Human
cagagaaaguacuucucca

SEQ ID NO: 1532903 - RNA, 23 nt, Human
cagagaaaguacuucuccacccu

SEQ ID NO: 1532904 - RNA, 18 nt, Human
cagaauggggugcaugaa

SEQ ID NO: 1532905 - RNA, 14 nt, Human
cagaauuucccaaa

SEQ ID NO: 1532906 - RNA, 11 nt, Human
cagaauucuca

SEQ ID NO: 1532907 - RNA, 18 nt, Human
cagaauucucuaguuuga

SEQ ID NO: 1532908 - RNA, 15 nt, Human
cagaauucucuaguu

SEQ ID NO: 1532909 - RNA, 24 nt, Human
cagaauuucccaaagcagugcaug

SEQ ID NO: 1532910 - RNA, 12 nt, Human
cagacaaagcgu

SEQ ID NO: 1532911 - RNA, 17 nt, Human
cagaauuucccaaagca

SEQ ID NO: 1532912 - RNA, 18 nt, Human
cagaauuucccaaagcag

SEQ ID NO: 1532913 - RNA, 19 nt, Human
cagaauuucccaaagcagu

SEQ ID NO: 1532914 - RNA, 20 nt, Human
cagaauuucccaaagcagug

SEQ ID NO: 1532915 - RNA, 20 nt, Human
cagacaacaaaccuguuucu

SEQ ID NO: 1532916 - RNA, 22 nt, Human
cagacaaagcgugguggacaug

SEQ ID NO: 1532917 - RNA, 20 nt, Human
cagacaguuaagagaaauga

SEQ ID NO: 1532918 - RNA, 19 nt, Human
cagacaccuugacagggca

SEQ ID NO: 1532919 - RNA, 20 nt, Human
cagacaccuugacagggcac

SEQ ID NO: 1532920 - RNA, 22 nt, Human
cagacaccuugacagggcacac

SEQ ID NO: 1532921 - RNA, 19 nt, Human
cagacauacuaaccagcag

SEQ ID NO: 1532922 - RNA, 17 nt, Human
cagacauagaauuaaca

SEQ ID NO: 1532923 - RNA, 19 nt, Human
cagacauagaauuaacaca

SEQ ID NO: 1532924 - RNA, 14 nt, Human
cagacacaugucca

SEQ ID NO: 1532925 - RNA, 17 nt, Human
cagacacauguccaaga

SEQ ID NO: 1532926 - RNA, 21 nt, Human
cagacacauguccaagaagcc

SEQ ID NO: 1532927 - RNA, 22 nt, Human
cagacacauguccaagaagccc

SEQ ID NO: 1532928 - RNA, 23 nt, Human
cagacacauguccaagaagccca

SEQ ID NO: 1532929 - RNA, 13 nt, Human
cagacacaggccc

SEQ ID NO: 1532930 - RNA, 14 nt, Human
cagacacaggcccg

SEQ ID NO: 1532931 - RNA, 15 nt, Human
cagacacaggcccgg

SEQ ID NO: 1532932 - RNA, 17 nt, Human
cagacacaggcccggcu

SEQ ID NO: 1532933 - RNA, 18 nt, Human
cagacacaggcccggcuc

SEQ ID NO: 1532934 - RNA, 21 nt, Human
cagacacaggcccggcuccag

SEQ ID NO: 1532935 - RNA, 22 nt, Human
cagacacaggcccggcuccagg

SEQ ID NO: 1532936 - RNA, 23 nt, Human
cagacacaggcccggcuccaggc

SEQ ID NO: 1532937 - RNA, 18 nt, Human
cagaaagcagaacaguga

SEQ ID NO: 1532938 - RNA, 19 nt, Human
cagaaagcagaacagugau

SEQ ID NO: 1532939 - RNA, 23 nt, Human
cagaacagugauuaccagggacu

SEQ ID NO: 1532940 - RNA, 17 nt, Human
cagaaaaguugaauuuu

SEQ ID NO: 1532941 - RNA, 20 nt, Human
cagaaaaguugaauuuuaca

SEQ ID NO: 1532942 - RNA, 22 nt, Human
cagaaaaguugaauuuuacaug

SEQ ID NO: 1532943 - RNA, 19 nt, Human
cagaaaauauuauguguuu

SEQ ID NO: 1532944 - RNA, 23 nt, Human
cagaaaauggaagacagcucuua

SEQ ID NO: 1532945 - RNA, 16 nt, Human
cagaaaauggaagaca

SEQ ID NO: 1532946 - RNA, 20 nt, Human
cagaaaauggaagacagcuc

SEQ ID NO: 1532947 - RNA, 21 nt, Human
cagaaaauggaagacagcucu

SEQ ID NO: 1532948 - RNA, 22 nt, Human
cagaaaauggaagacagcucuu

SEQ ID NO: 1532949 - RNA, 22 nt, Human
cacuuucuagccagaggagaga

SEQ ID NO: 1532950 - RNA, 16 nt, Human
cacuuugggaggccaa

SEQ ID NO: 1532951 - RNA, 12 nt, Human
cacuuugggagg

SEQ ID NO: 1532952 - RNA, 13 nt, Human
cacuuugggaggc

SEQ ID NO: 1532953 - RNA, 13 nt, Human
cacuuuguucugg

SEQ ID NO: 1532954 - RNA, 14 nt, Human
cacuuuguucuggc

SEQ ID NO: 1532955 - RNA, 16 nt, Human
cacuuuguucuggcuc

SEQ ID NO: 1532956 - RNA, 23 nt, Human
cacuuuguucuggcucuuccagg

SEQ ID NO: 1532957 - RNA, 14 nt, Human
cacuuuuguucuug

SEQ ID NO: 1532958 - RNA, 22 nt, Human
cacuuuuguucuugguuuguaa

SEQ ID NO: 1532959 - RNA, 14 nt, Human
cagaagaaggcagc

SEQ ID NO: 1532960 - RNA, 15 nt, Human
cagaagaaggcagca

SEQ ID NO: 1532961 - RNA, 21 nt, Human
cagaagacacugaugggcaac

SEQ ID NO: 1532962 - RNA, 19 nt, Human
cagaagcaacccaaauguu

SEQ ID NO: 1532963 - RNA, 20 nt, Human
cagaagcaacccaaauguuc

SEQ ID NO: 1532964 - RNA, 19 nt, Human
cagaaggaagacuucaucc

SEQ ID NO: 1532965 - RNA, 17 nt, Human
cagaaggaucuucaucu

SEQ ID NO: 1532966 - RNA, 16 nt, Human
cagaaggaagacuuca

SEQ ID NO: 1532967 - RNA, 17 nt, Human
cagaaggaagacuucau

SEQ ID NO: 1532968 - RNA, 18 nt, Human
cagaaggaagacuucauc

SEQ ID NO: 1532969 - RNA, 19 nt, Human
cagaaggggguggugucuc

SEQ ID NO: 1532970 - RNA, 20 nt, Human
cagaaggggguggugucucc

SEQ ID NO: 1532971 - RNA, 21 nt, Human
cagaaggggguggugucucca

SEQ ID NO: 1532972 - RNA, 14 nt, Human
cagaaggggguggu

SEQ ID NO: 1532973 - RNA, 17 nt, Human
cagaaucucaaauaacu

SEQ ID NO: 1532974 - RNA, 18 nt, Human
cagaaucucaaauaacua

SEQ ID NO: 1532975 - RNA, 16 nt, Human
cagacaacaaaccugu

SEQ ID NO: 1532976 - RNA, 16 nt, Human
cacucucccccacccc

SEQ ID NO: 1532977 - RNA, 18 nt, Human
cacucucccccacccccu

SEQ ID NO: 1532978 - RNA, 20 nt, Human
cacucucccccacccccucc

SEQ ID NO: 1532979 - RNA, 12 nt, Human
cacucuccuugg

SEQ ID NO: 1532980 - RNA, 12 nt, Human
cacucugagacu

SEQ ID NO: 1532981 - RNA, 23 nt, Human
cacucugagacucgcgacaaugc

SEQ ID NO: 1532982 - RNA, 12 nt, Human
cacucuggcagc

SEQ ID NO: 1532983 - RNA, 13 nt, Human
cacucuggcagcu

SEQ ID NO: 1532984 - RNA, 14 nt, Human
cacucuggcagcuc

SEQ ID NO: 1532985 - RNA, 15 nt, Human
cacucauugaccuga

SEQ ID NO: 1532986 - RNA, 16 nt, Human
cacucaguccauagca

SEQ ID NO: 1532987 - RNA, 18 nt, Human
cacucauugaccugaggc

SEQ ID NO: 1532988 - RNA, 19 nt, Human
cacucauugaccugaggcc

SEQ ID NO: 1532989 - RNA, 20 nt, Human
cacucauugaccugaggccc

SEQ ID NO: 1532990 - RNA, 22 nt, Human
cacucauugaccugaggcccuu

SEQ ID NO: 1532991 - RNA, 12 nt, Human
cacucccugcaa

SEQ ID NO: 1532992 - RNA, 13 nt, Human
cacucccugcaac

SEQ ID NO: 1532993 - RNA, 16 nt, Human
cacucccugcaaccug

SEQ ID NO: 1532994 - RNA, 17 nt, Human
cacucccugcaaccuga

SEQ ID NO: 1532995 - RNA, 14 nt, Human
cacuccuucacaga

SEQ ID NO: 1532996 - RNA, 21 nt, Human
cacuccuucacagaugggugc

SEQ ID NO: 1532997 - RNA, 17 nt, Human
cacuaagagagaaugag

SEQ ID NO: 1532998 - RNA, 18 nt, Human
cacuaaccacgcuggacc

SEQ ID NO: 1532999 - RNA, 17 nt, Human
cacuaaggugugcucug

SEQ ID NO: 1533000 - RNA, 18 nt, Human
cacuaaggugugcucuga

SEQ ID NO: 1533001 - RNA, 21 nt, Human
cacuaaauugacacuuaaaaa

SEQ ID NO: 1533002 - RNA, 14 nt, Human
cacuaaccacgcug

SEQ ID NO: 1533003 - RNA, 15 nt, Human
cacuaaccacgcugg

SEQ ID NO: 1533004 - RNA, 16 nt, Human
cacuaaccacgcugga

SEQ ID NO: 1533005 - RNA, 19 nt, Human
cacuaguauuucuaugaaa

SEQ ID NO: 1533006 - RNA, 14 nt, Human
cacuauaauguaag

SEQ ID NO: 1533007 - RNA, 18 nt, Human
cacuauaauguaagcucu

SEQ ID NO: 1533008 - RNA, 14 nt, Human
cacuauagccuagg

SEQ ID NO: 1533009 - RNA, 21 nt, Human
cacuauagccuaggugacaga

SEQ ID NO: 1533010 - RNA, 15 nt, Human
cacuauguugcccag

SEQ ID NO: 1533011 - RNA, 16 nt, Human
cacuauguugcccagg

SEQ ID NO: 1533012 - RNA, 17 nt, Human
cacuauguugcccaggc

SEQ ID NO: 1533013 - RNA, 18 nt, Human
cacuauguugcccaggca

SEQ ID NO: 1533014 - RNA, 19 nt, Human
cacuauguugcccaggcag

SEQ ID NO: 1533015 - RNA, 22 nt, Human
cacucagaagacacugaugggc

SEQ ID NO: 1533016 - RNA, 18 nt, Human
cacucagaagacacugau

SEQ ID NO: 1533017 - RNA, 19 nt, Human
cacucagaagacacugaug

SEQ ID NO: 1533018 - RNA, 19 nt, Human
cacucacauuuauucugcu

SEQ ID NO: 1533019 - RNA, 20 nt, Human
cacucacauuuauucugcuc

SEQ ID NO: 1533020 - RNA, 12 nt, Human
cacucagaagac

SEQ ID NO: 1533021 - RNA, 16 nt, Human
cacucagaagacacug

SEQ ID NO: 1533022 - RNA, 17 nt, Human
cacucagaagacacuga

SEQ ID NO: 1533023 - RNA, 20 nt, Human
cacucaaaagcugggcaggu

SEQ ID NO: 1533024 - RNA, 16 nt, Human
cacucaaaucaagaaa

SEQ ID NO: 1533025 - RNA, 20 nt, Human
cacuauguugcccaggcagg

SEQ ID NO: 1533026 - RNA, 21 nt, Human
cacuauguugcccaggcaggu

SEQ ID NO: 1533027 - RNA, 15 nt, Human
cacucaaaagcuggg

SEQ ID NO: 1533028 - RNA, 17 nt, Human
cacucaaaagcugggca

SEQ ID NO: 1533029 - RNA, 18 nt, Human
cacucaaaagcugggcag

SEQ ID NO: 1533030 - RNA, 19 nt, Human
cacucaaaagcugggcagg

SEQ ID NO: 1533031 - RNA, 13 nt, Human
cacuaaacaaaga

SEQ ID NO: 1533032 - RNA, 23 nt, Human
cacguuucuaaaggcuaccuuug

SEQ ID NO: 1533033 - RNA, 14 nt, Human
cacguuucuaaagg

SEQ ID NO: 1533034 - RNA, 12 nt, Human
cacguuucuaaa

SEQ ID NO: 1533035 - RNA, 16 nt, Human
cacgugguccuaaucu

SEQ ID NO: 1533036 - RNA, 19 nt, Human
cacgugguccuaaucuucu

SEQ ID NO: 1533037 - RNA, 22 nt, Human
cacguucuuacuaguuucccuu

SEQ ID NO: 1533038 - RNA, 18 nt, Human
cacguacacacacauaca

SEQ ID NO: 1533039 - RNA, 19 nt, Human
cacguacacacacauacac

SEQ ID NO: 1533040 - RNA, 14 nt, Human
cacguacacacaca

SEQ ID NO: 1533041 - RNA, 19 nt, Human
cacgccuguaauccuagca

SEQ ID NO: 1533042 - RNA, 20 nt, Human
cacgccuguaauccuagcac

SEQ ID NO: 1533043 - RNA, 23 nt, Human
cacgcgugcacacaccagagccc

SEQ ID NO: 1533044 - RNA, 15 nt, Human
cacgcgugcacacac

SEQ ID NO: 1533045 - RNA, 16 nt, Human
cacgcgugcacacacc

SEQ ID NO: 1533046 - RNA, 21 nt, Human
cacgcgugcacacaccagagc

SEQ ID NO: 1533047 - RNA, 20 nt, Human
cacgcuggaccuugaacugg

SEQ ID NO: 1533048 - RNA, 17 nt, Human
cacgcuggaccuugaac

SEQ ID NO: 1533049 - RNA, 16 nt, Human
cacggcucacugcagc

SEQ ID NO: 1533050 - RNA, 17 nt, Human
cacggcucacugcagcc

SEQ ID NO: 1533051 - RNA, 19 nt, Human
cacggcucacugcagccuc

SEQ ID NO: 1533052 - RNA, 20 nt, Human
cacggcucacugcagccuca

SEQ ID NO: 1533053 - RNA, 13 nt, Human
cacgccacugcac

SEQ ID NO: 1533054 - RNA, 15 nt, Human
cacgccacugcacua

SEQ ID NO: 1533055 - RNA, 19 nt, Human
cacgccagauucuuuccug

SEQ ID NO: 1533056 - RNA, 20 nt, Human
cacgccagauucuuuccuga

SEQ ID NO: 1533057 - RNA, 22 nt, Human
cacgccagauucuuuccugagg

SEQ ID NO: 1533058 - RNA, 23 nt, Human
cacgccagauucuuuccugaggc

SEQ ID NO: 1533059 - RNA, 13 nt, Human
cacgcccccacug

SEQ ID NO: 1533060 - RNA, 15 nt, Human
cacgcccccacuggu

SEQ ID NO: 1533061 - RNA, 17 nt, Human
cacgcccccacugguga

SEQ ID NO: 1533062 - RNA, 18 nt, Human
cacgcccccacuggugac

SEQ ID NO: 1533063 - RNA, 16 nt, Human
cacgauuucuguuuag

SEQ ID NO: 1533064 - RNA, 14 nt, Human
cacgauuucuguuu

SEQ ID NO: 1533065 - RNA, 12 nt, Human
cacgauuucugu

SEQ ID NO: 1533066 - RNA, 17 nt, Human
cacgcacuucgggaggu

SEQ ID NO: 1533067 - RNA, 17 nt, Human
cacgagcaggcuacugu

SEQ ID NO: 1533068 - RNA, 19 nt, Human
cacgagcaggcuacuguca

SEQ ID NO: 1533069 - RNA, 20 nt, Human
cacgagcaggcuacugucag

SEQ ID NO: 1533070 - RNA, 22 nt, Human
cacgagcaggcuacugucagcu

SEQ ID NO: 1533071 - RNA, 14 nt, Human
caccuuagacaguc

SEQ ID NO: 1533072 - RNA, 16 nt, Human
caccuuagacaguccc

SEQ ID NO: 1533073 - RNA, 18 nt, Human
caccuuagacagucccug

SEQ ID NO: 1533074 - RNA, 19 nt, Human
caccuuagacagucccugc

SEQ ID NO: 1533075 - RNA, 15 nt, Human
caccuuauauuuacg

SEQ ID NO: 1533076 - RNA, 21 nt, Human
caccuuagacagucccugcca

SEQ ID NO: 1533077 - RNA, 23 nt, Human
caccuuagacagucccugccaau

SEQ ID NO: 1533078 - RNA, 18 nt, Human
caccuugacagggcacac

SEQ ID NO: 1533079 - RNA, 15 nt, Human
caccuugacagggca

SEQ ID NO: 1533080 - RNA, 16 nt, Human
caccuugacagggcac

SEQ ID NO: 1533081 - RNA, 13 nt, Human
caccuugacaggg

SEQ ID NO: 1533082 - RNA, 16 nt, Human
cacgacugcccggcag

SEQ ID NO: 1533083 - RNA, 17 nt, Human
cacgacugcccggcagg

SEQ ID NO: 1533084 - RNA, 16 nt, Human
cacgaauauugcugau

SEQ ID NO: 1533085 - RNA, 19 nt, Human
cacgaauauugcugauggu

SEQ ID NO: 1533086 - RNA, 22 nt, Human
cacgaauauugcugauggugca

SEQ ID NO: 1533087 - RNA, 23 nt, Human
cacugcaaccuccgccucuuggg

SEQ ID NO: 1533088 - RNA, 14 nt, Human
cacugcaaccuccg

SEQ ID NO: 1533089 - RNA, 16 nt, Human
cacugcaaccuccgcc

SEQ ID NO: 1533090 - RNA, 13 nt, Human
cacugcaaccucc

SEQ ID NO: 1533091 - RNA, 14 nt, Human
cacugaugggcaac

SEQ ID NO: 1533092 - RNA, 18 nt, Human
cacugaugggcaaccccc

SEQ ID NO: 1533093 - RNA, 24 nt, Human
cacugaugggcaacccccagccug

SEQ ID NO: 1533094 - RNA, 21 nt, Human
cacugagaauguaagaacuac

SEQ ID NO: 1533095 - RNA, 19 nt, Human
cacugagaauguaagaacu

SEQ ID NO: 1533096 - RNA, 20 nt, Human
cacugagaauguaagaacua

SEQ ID NO: 1533097 - RNA, 23 nt, Human
cacugagacagcccgggcucugc

SEQ ID NO: 1533098 - RNA, 13 nt, Human
cacugaggaagaa

SEQ ID NO: 1533099 - RNA, 14 nt, Human
cacugaggaagaac

SEQ ID NO: 1533100 - RNA, 15 nt, Human
cacugaggaagaacg

SEQ ID NO: 1533101 - RNA, 17 nt, Human
cacugaggaagaacggg

SEQ ID NO: 1533102 - RNA, 15 nt, Human
cacucugucgcccag

SEQ ID NO: 1533103 - RNA, 16 nt, Human
cacucugucgcccagu

SEQ ID NO: 1533104 - RNA, 19 nt, Human
cacucugucgcccagucug

SEQ ID NO: 1533105 - RNA, 23 nt, Human
cacugacauuguuggccaaagcc

SEQ ID NO: 1533106 - RNA, 20 nt, Human
cacucugucgcccagucugg

SEQ ID NO: 1533107 - RNA, 13 nt, Human
cacugacagauuu

SEQ ID NO: 1533108 - RNA, 17 nt, Human
cacugacagauuuccau

SEQ ID NO: 1533109 - RNA, 22 nt, Human
cacugacagauuuccauccuag

SEQ ID NO: 1533110 - RNA, 23 nt, Human
cacucuggcagcucagagagggu

SEQ ID NO: 1533111 - RNA, 20 nt, Human
cacucuggcagcucagagag

SEQ ID NO: 1533112 - RNA, 21 nt, Human
cacucuggcagcucagagagg

SEQ ID NO: 1533113 - RNA, 15 nt, Human
cacucuggcagcuca

SEQ ID NO: 1533114 - RNA, 16 nt, Human
cacucuggcagcucag

SEQ ID NO: 1533115 - RNA, 17 nt, Human
cacucuggcagcucaga

SEQ ID NO: 1533116 - RNA, 19 nt, Human
cacucuggcagcucagaga

SEQ ID NO: 1533117 - RNA, 16 nt, Human
cacugagaauguaaga

SEQ ID NO: 1533118 - RNA, 18 nt, Human
cacugagaauguaagaac

SEQ ID NO: 1533119 - RNA, 21 nt, Human
cacugacuucuaaguaaaacc

SEQ ID NO: 1533120 - RNA, 12 nt, Human
cacugagacagc

SEQ ID NO: 1533121 - RNA, 13 nt, Human
cacugagacagcc

SEQ ID NO: 1533122 - RNA, 14 nt, Human
cacugagacagccc

SEQ ID NO: 1533123 - RNA, 17 nt, Human
cacugagacagcccggg

SEQ ID NO: 1533124 - RNA, 19 nt, Human
cacugagacagcccgggcu

SEQ ID NO: 1533125 - RNA, 22 nt, Human
cacugagacagcccgggcucug

SEQ ID NO: 1533126 - RNA, 14 nt, Human
cacugacuucuaag

SEQ ID NO: 1533127 - RNA, 15 nt, Human
cacugacuucuaagu

SEQ ID NO: 1533128 - RNA, 16 nt, Human
cacugacuucuaagua

SEQ ID NO: 1533129 - RNA, 20 nt, Human
cacugacuucuaaguaaaac

SEQ ID NO: 1533130 - RNA, 20 nt, Human
cacugccuucucaacuccaa

SEQ ID NO: 1533131 - RNA, 12 nt, Human
cacugcucuggu

SEQ ID NO: 1533132 - RNA, 19 nt, Human
cacugcacuauagccuagg

SEQ ID NO: 1533133 - RNA, 14 nt, Human
cacugcaccgggcc

SEQ ID NO: 1533134 - RNA, 15 nt, Human
cacugcaccgggcca

SEQ ID NO: 1533135 - RNA, 16 nt, Human
cacugcaccgggccac

SEQ ID NO: 1533136 - RNA, 18 nt, Human
cacugcaccgggccacag

SEQ ID NO: 1533137 - RNA, 19 nt, Human
cacugcaccgggccacaga

SEQ ID NO: 1533138 - RNA, 18 nt, Human
cacugcacuauagccuag

SEQ ID NO: 1533139 - RNA, 21 nt, Human
cacugcuuuuggucuguguga

SEQ ID NO: 1533140 - RNA, 17 nt, Human
cacuggaacacuaauga

SEQ ID NO: 1533141 - RNA, 22 nt, Human
cacugcuuccagugaggcucug

SEQ ID NO: 1533142 - RNA, 20 nt, Human
cacugcuuuuggucugugug

SEQ ID NO: 1533143 - RNA, 18 nt, Human
cacugcuuccagugaggc

SEQ ID NO: 1533144 - RNA, 19 nt, Human
cacugcuuccagugaggcu

SEQ ID NO: 1533145 - RNA, 20 nt, Human
cacugcuuccagugaggcuc

SEQ ID NO: 1533146 - RNA, 21 nt, Human
cacugcuuccagugaggcucu

SEQ ID NO: 1533147 - RNA, 13 nt, Human
cacugcuuaacuu

SEQ ID NO: 1533148 - RNA, 14 nt, Human
cacugcuuccagug

SEQ ID NO: 1533149 - RNA, 15 nt, Human
cacugcuuccaguga

SEQ ID NO: 1533150 - RNA, 16 nt, Human
cacugcuuccagugag

SEQ ID NO: 1533151 - RNA, 14 nt, Human
cacugucaagauga

SEQ ID NO: 1533152 - RNA, 13 nt, Human
cacugugaagaga

SEQ ID NO: 1533153 - RNA, 14 nt, Human
cacugucuugaaga

SEQ ID NO: 1533154 - RNA, 14 nt, Human
cacugugccaugug

SEQ ID NO: 1533155 - RNA, 22 nt, Human
cacuguggguagacacacauga

SEQ ID NO: 1533156 - RNA, 24 nt, Human
cacuguggguagacacacaugaag

SEQ ID NO: 1533157 - RNA, 13 nt, Human
cacuguucucugc

SEQ ID NO: 1533158 - RNA, 14 nt, Human
cacuguucucugcc

SEQ ID NO: 1533159 - RNA, 15 nt, Human
cacuguucucugccc

SEQ ID NO: 1533160 - RNA, 16 nt, Human
cacuguucucugcccu

SEQ ID NO: 1533161 - RNA, 17 nt, Human
cacuguucucugcccuc

SEQ ID NO: 1533162 - RNA, 19 nt, Human
cacuguucucugcccucca

SEQ ID NO: 1533163 - RNA, 21 nt, Human
cacuguucucugcccuccaag

SEQ ID NO: 1533164 - RNA, 22 nt, Human
cacuguucucugcccuccaaga

SEQ ID NO: 1533165 - RNA, 19 nt, Human
cacuguggguagacacaca

SEQ ID NO: 1533166 - RNA, 17 nt, Human
cacugugcugagucuga

SEQ ID NO: 1533167 - RNA, 20 nt, Human
cacugugcugagucugaagg

SEQ ID NO: 1533168 - RNA, 21 nt, Human
cacugugcugagucugaaggc

SEQ ID NO: 1533169 - RNA, 22 nt, Human
cacugugcugagucugaaggcu

SEQ ID NO: 1533170 - RNA, 18 nt, Human
cacugugccaugugccag

SEQ ID NO: 1533171 - RNA, 15 nt, Human
cacugugccaugugc

SEQ ID NO: 1533172 - RNA, 16 nt, Human
cacugugccaugugcc

SEQ ID NO: 1533173 - RNA, 13 nt, Human
cacugugcugagu

SEQ ID NO: 1533174 - RNA, 15 nt, Human
cacugugcugagucu

SEQ ID NO: 1533175 - RNA, 15 nt, Human
cacuuggucugugag

SEQ ID NO: 1533176 - RNA, 17 nt, Human
cacuuggucugugagau

SEQ ID NO: 1533177 - RNA, 19 nt, Human
cacuuucuagccagaggag

SEQ ID NO: 1533178 - RNA, 20 nt, Human
cacuuucuagccagaggaga

SEQ ID NO: 1533179 - RNA, 24 nt, Human
cacuugcagacucuacagaggcca

SEQ ID NO: 1533180 - RNA, 14 nt, Human
cacuugcagacucu

SEQ ID NO: 1533181 - RNA, 18 nt, Human
cacuugcagacucuacag

SEQ ID NO: 1533182 - RNA, 19 nt, Human
cacuugcagacucuacaga

SEQ ID NO: 1533183 - RNA, 22 nt, Human
cacuugcagacucuacagaggc

SEQ ID NO: 1533184 - RNA, 18 nt, Human
cacuucuggguggggcag

SEQ ID NO: 1533185 - RNA, 19 nt, Human
cacuucuggguggggcagu

SEQ ID NO: 1533186 - RNA, 20 nt, Human
cacuugaacccgggaggcag

SEQ ID NO: 1533187 - RNA, 21 nt, Human
cacuugaacccgggaggcaga

SEQ ID NO: 1533188 - RNA, 23 nt, Human
cacuugaacccgggaggcagagg

SEQ ID NO: 1533189 - RNA, 16 nt, Human
cacuugacaucaacug

SEQ ID NO: 1533190 - RNA, 13 nt, Human
cacuugcagacuc

SEQ ID NO: 1533191 - RNA, 13 nt, Human
cacuugaguccag

SEQ ID NO: 1533192 - RNA, 19 nt, Human
cacuugacaucaacugcau

SEQ ID NO: 1533193 - RNA, 17 nt, Human
cacuugagaauuacccu

SEQ ID NO: 1533194 - RNA, 20 nt, Human
cacuugagaauuacccuuuu

SEQ ID NO: 1533195 - RNA, 22 nt, Human
cacuucugccauauucuguugg

SEQ ID NO: 1533196 - RNA, 21 nt, Human
cacuucgggaggucgaggcag

SEQ ID NO: 1533197 - RNA, 23 nt, Human
cacuucgggaggucgaggcagga

SEQ ID NO: 1533198 - RNA, 16 nt, Human
cacuucccuacaugga

SEQ ID NO: 1533199 - RNA, 14 nt, Human
cacuguugcccagg

SEQ ID NO: 1533200 - RNA, 12 nt, Human
cacuucagcuga

SEQ ID NO: 1533201 - RNA, 21 nt, Human
cacuucagcugacuuuucugu

SEQ ID NO: 1533202 - RNA, 21 nt, Human
caccgcagacaggaccaggga

SEQ ID NO: 1533203 - RNA, 14 nt, Human
caccggcuggccug

SEQ ID NO: 1533204 - RNA, 15 nt, Human
caccggcuggccugg

SEQ ID NO: 1533205 - RNA, 16 nt, Human
caccggcuggccuggc

SEQ ID NO: 1533206 - RNA, 17 nt, Human
caccggcuggccuggcc

SEQ ID NO: 1533207 - RNA, 18 nt, Human
caccggcuggccuggccc

SEQ ID NO: 1533208 - RNA, 20 nt, Human
caccggcuggccuggccccu

SEQ ID NO: 1533209 - RNA, 14 nt, Human
caccgggcacucag

SEQ ID NO: 1533210 - RNA, 15 nt, Human
caccgggcacucaga

SEQ ID NO: 1533211 - RNA, 22 nt, Human
caccgggcacucagaagacacu

SEQ ID NO: 1533212 - RNA, 15 nt, Human
caccgggccacagag

SEQ ID NO: 1533213 - RNA, 18 nt, Human
caccgggccacagagaaa

SEQ ID NO: 1533214 - RNA, 11 nt, Human
caccucaugga

SEQ ID NO: 1533215 - RNA, 12 nt, Human
caccucauggaa

SEQ ID NO: 1533216 - RNA, 14 nt, Human
caccucauggaauu

SEQ ID NO: 1533217 - RNA, 13 nt, Human
caccucucccuug

SEQ ID NO: 1533218 - RNA, 14 nt, Human
caccucucccuugg

SEQ ID NO: 1533219 - RNA, 17 nt, Human
caccucucccuuggauu

SEQ ID NO: 1533220 - RNA, 14 nt, Human
caccuccugccucg

SEQ ID NO: 1533221 - RNA, 13 nt, Human
caccuccugccuc

SEQ ID NO: 1533222 - RNA, 11 nt, Human
caccuccugcc

SEQ ID NO: 1533223 - RNA, 23 nt, Human
caccuggccucugcacuccccug

SEQ ID NO: 1533224 - RNA, 17 nt, Human
caccuggccucugcacu

SEQ ID NO: 1533225 - RNA, 18 nt, Human
caccuggccucugcacuc

SEQ ID NO: 1533226 - RNA, 19 nt, Human
caccuggccucugcacucc

SEQ ID NO: 1533227 - RNA, 20 nt, Human
caccuggccucugcacuccc

SEQ ID NO: 1533228 - RNA, 12 nt, Human
caccuggccucu

SEQ ID NO: 1533229 - RNA, 13 nt, Human
caccuggccucug

SEQ ID NO: 1533230 - RNA, 14 nt, Human
caccuggccucugc

SEQ ID NO: 1533231 - RNA, 15 nt, Human
caccuggccucugca

SEQ ID NO: 1533232 - RNA, 20 nt, Human
caccuggaauauauaaccag

SEQ ID NO: 1533233 - RNA, 23 nt, Human
caccugcggugcuaucuccccca

SEQ ID NO: 1533234 - RNA, 23 nt, Human
caccugaagacucauucuucugu

SEQ ID NO: 1533235 - RNA, 14 nt, Human
caccugaagacuca

SEQ ID NO: 1533236 - RNA, 15 nt, Human
caccugaagacucau

SEQ ID NO: 1533237 - RNA, 15 nt, Human
caccucucucacucc

SEQ ID NO: 1533238 - RNA, 17 nt, Human
caccucucucacuccuu

SEQ ID NO: 1533239 - RNA, 18 nt, Human
caccucucucacuccuug

SEQ ID NO: 1533240 - RNA, 19 nt, Human
caccucucucacuccuuga

SEQ ID NO: 1533241 - RNA, 18 nt, Human
caccucugcacaagcugc

SEQ ID NO: 1533242 - RNA, 19 nt, Human
caccucugcacaagcugca

SEQ ID NO: 1533243 - RNA, 12 nt, Human
caccgcagacag

SEQ ID NO: 1533244 - RNA, 13 nt, Human
caccgcagacagg

SEQ ID NO: 1533245 - RNA, 14 nt, Human
caccgcagacagga

SEQ ID NO: 1533246 - RNA, 15 nt, Human
caccgcagacaggac

SEQ ID NO: 1533247 - RNA, 17 nt, Human
caccgcagacaggacca

SEQ ID NO: 1533248 - RNA, 18 nt, Human
caccgcagacaggaccag

SEQ ID NO: 1533249 - RNA, 15 nt, Human
caccgaaaacguggc

SEQ ID NO: 1533250 - RNA, 18 nt, Human
caccgaaaacguggcugc

SEQ ID NO: 1533251 - RNA, 22 nt, Human
caccgaaaacguggcugcuuca

SEQ ID NO: 1533252 - RNA, 19 nt, Human
caccgaaaacguggcugcu

SEQ ID NO: 1533253 - RNA, 21 nt, Human
caccgaaaacguggcugcuuc

SEQ ID NO: 1533254 - RNA, 11 nt, Human
cacccugugau

SEQ ID NO: 1533255 - RNA, 12 nt, Human
cacccugugaug

SEQ ID NO: 1533256 - RNA, 15 nt, Human
cacccugugaugggg

SEQ ID NO: 1533257 - RNA, 18 nt, Human
cacccugugauggggccc

SEQ ID NO: 1533258 - RNA, 20 nt, Human
cacccugugauggggcccug

SEQ ID NO: 1533259 - RNA, 21 nt, Human
cacccugugauggggcccugc

SEQ ID NO: 1533260 - RNA, 22 nt, Human
cacccugugauggggcccugcc

SEQ ID NO: 1533261 - RNA, 23 nt, Human
cacccugugauggggcccugccu

SEQ ID NO: 1533262 - RNA, 19 nt, Human
cacccgcuaagagggaggg

SEQ ID NO: 1533263 - RNA, 12 nt, Human
cacccggccccu

SEQ ID NO: 1533264 - RNA, 13 nt, Human
cacccggccccug

SEQ ID NO: 1533265 - RNA, 14 nt, Human
cacccggccccugc

SEQ ID NO: 1533266 - RNA, 16 nt, Human
cacccggccccugcug

SEQ ID NO: 1533267 - RNA, 17 nt, Human
cacccggccccugcugg

SEQ ID NO: 1533268 - RNA, 18 nt, Human
cacccggccccugcuggu

SEQ ID NO: 1533269 - RNA, 21 nt, Human
cacccggccccugcugguuca

SEQ ID NO: 1533270 - RNA, 13 nt, Human
cacauauugauuu

SEQ ID NO: 1533271 - RNA, 20 nt, Human
caccccucaacaccucugca

SEQ ID NO: 1533272 - RNA, 15 nt, Human
caccccucccuuucu

SEQ ID NO: 1533273 - RNA, 18 nt, Human
caccccucccuuucuccc

SEQ ID NO: 1533274 - RNA, 17 nt, Human
caccccugguucucauc

SEQ ID NO: 1533275 - RNA, 18 nt, Human
caccccugguucucaucu

SEQ ID NO: 1533276 - RNA, 20 nt, Human
cacauauugauuuccguuaa

SEQ ID NO: 1533277 - RNA, 16 nt, Human
cacgccagauucuuuc

SEQ ID NO: 1533278 - RNA, 19 nt, Human adenovirus A
gaagcgguaugucggccug

SEQ ID NO: 1533279 - RNA, 21 nt, Human adenovirus A
ccaggcacagcagacacaauc

SEQ ID NO: 1533280 - RNA, 15 nt, Human adenovirus A
aacccugaauguuug

SEQ ID NO: 1533281 - RNA, 15 nt, Human adenovirus A
acuauucuagcaaaa

SEQ ID NO: 1533282 - RNA, 21 nt, Human adenovirus A
cucugauuucgauaaacaaaa

SEQ ID NO: 1533283 - RNA, 21 nt, Human adenovirus A
cacagcuuauucgccagucaa

SEQ ID NO: 1533284 - RNA, 16 nt, Human adenovirus A
uuaaccauuguaaaug

SEQ ID NO: 1533285 - RNA, 18 nt, Human adenovirus A
ccaagcguagccgcagca

SEQ ID NO: 1533286 - RNA, 22 nt, Human adenovirus A
cuacuuuauaacuaacuuuaau

SEQ ID NO: 1533287 - RNA, 16 nt, Human adenovirus A
gcggccacuaaagacc

SEQ ID NO: 1533288 - RNA, 13 nt, Human adenovirus A
ucuuuagaaacuu

SEQ ID NO: 1533289 - RNA, 15 nt, Human adenovirus A
aacuccgcgcaagga

SEQ ID NO: 1533290 - RNA, 16 nt, Human adenovirus A
gcauuaguucuuuucu

SEQ ID NO: 1533291 - RNA, 20 nt, Human adenovirus A
uuucccucacaaauuugcau

SEQ ID NO: 1533292 - RNA, 16 nt, Human adenovirus A
uaaccagcugggcaga

SEQ ID NO: 1533293 - RNA, 15 nt, Human adenovirus A
agagcaaagguaucu

SEQ ID NO: 1533294 - RNA, 21 nt, Human adenovirus A
uuaccagaaugaucacagcaa

SEQ ID NO: 1533295 - RNA, 22 nt, Human adenovirus A
acuguuguauuauuugaacaca

SEQ ID NO: 1533296 - RNA, 14 nt, Human adenovirus A
auucuguuggacac

SEQ ID NO: 1533297 - RNA, 14 nt, Human adenovirus A
gaucuauuguuaau

SEQ ID NO: 1533298 - RNA, 22 nt, Human adenovirus A
cgcucuggcaggggaagguguu

SEQ ID NO: 1533299 - RNA, 14 nt, Human adenovirus A
uacggacagucugu

SEQ ID NO: 1533300 - RNA, 21 nt, Human adenovirus A
gauggguguuuggcagcaaug

SEQ ID NO: 1533301 - RNA, 19 nt, Human adenovirus A
agccauugguuuaaugcau

SEQ ID NO: 1533302 - RNA, 15 nt, Human adenovirus A
gccguaccuuuuguu

SEQ ID NO: 1533303 - RNA, 19 nt, Human adenovirus A
cccaagcuaaccgcuuuuc

SEQ ID NO: 1533304 - RNA, 12 nt, Human adenovirus A
uacuaacaacuc

SEQ ID NO: 1533305 - RNA, 22 nt, Human adenovirus A
uccccuguggagccacugcuac

SEQ ID NO: 1533306 - RNA, 15 nt, Human adenovirus A
caugguaagcucuug

SEQ ID NO: 1533307 - RNA, 13 nt, Human adenovirus A
aggguacagugga

SEQ ID NO: 1533308 - RNA, 17 nt, Human adenovirus A
cauguggagcuuucaac

SEQ ID NO: 1533309 - RNA, 16 nt, Human adenovirus A
gcucgcccgggacagu

SEQ ID NO: 1533310 - RNA, 17 nt, Human adenovirus A
ucccauuggucccaucc

SEQ ID NO: 1533311 - RNA, 22 nt, Human adenovirus A
uuauuaaaaaucaaauggcucu

SEQ ID NO: 1533312 - RNA, 17 nt, Human adenovirus A
gacaccauugaaaccag

SEQ ID NO: 1533313 - RNA, 16 nt, Human adenovirus A
caaauugcggcucuuu

SEQ ID NO: 1533314 - RNA, 18 nt, Human adenovirus A
gccagcucacggugucag

SEQ ID NO: 1533315 - RNA, 15 nt, Human adenovirus A
acgcacacaacagaa

SEQ ID NO: 1533316 - RNA, 19 nt, Human adenovirus A
gcaacauagccccaggucc

SEQ ID NO: 1533317 - RNA, 21 nt, Human adenovirus A
gaaaccagcgccgcaaacuug

SEQ ID NO: 1533318 - RNA, 16 nt, Human adenovirus A
gccggucgcgagcugc

SEQ ID NO: 1533319 - RNA, 12 nt, Human adenovirus A
aaucuuaaaugg

SEQ ID NO: 1533320 - RNA, 22 nt, Human adenovirus A
gcacaauaguuuaauguuuccc

SEQ ID NO: 1533321 - RNA, 20 nt, Human adenovirus A
cucuucuaucaucaaacugc

SEQ ID NO: 1533322 - RNA, 15 nt, Human adenovirus A
ugauaaccuugcaaa

SEQ ID NO: 1533323 - RNA, 17 nt, Human adenovirus A
ccugccggucgagcgcg

SEQ ID NO: 1533324 - RNA, 16 nt, Human adenovirus A
ucguccaagaucuuug

SEQ ID NO: 1533325 - RNA, 18 nt, Human adenovirus A
cacuuaagucuuuacaau

SEQ ID NO: 1533326 - RNA, 22 nt, Human adenovirus A
uguggacccuauuuuuugggaa

SEQ ID NO: 1533327 - RNA, 22 nt, Human adenovirus A
gucaccaucacugacgcccgcc

SEQ ID NO: 1533328 - RNA, 14 nt, Human adenovirus A
gaggucuccauguc

SEQ ID NO: 1533329 - RNA, 19 nt, Human adenovirus A
accugggauacuaccgcug

SEQ ID NO: 1533330 - RNA, 13 nt, Human adenovirus A
gaaguaagcuguu

SEQ ID NO: 1533331 - RNA, 15 nt, Human adenovirus A
accauugaaaccagc

SEQ ID NO: 1533332 - RNA, 21 nt, Human adenovirus A
cauuuacaguacaaauacagu

SEQ ID NO: 1533333 - RNA, 16 nt, Human adenovirus A
augcuuuucgccagca

SEQ ID NO: 1533334 - RNA, 14 nt, Human adenovirus A
cauuacgcagggaa

SEQ ID NO: 1533335 - RNA, 22 nt, Human adenovirus A
cuuaauuucaugguuugcuaac

SEQ ID NO: 1533336 - RNA, 16 nt, Human adenovirus A
uacugcagccugucuu

SEQ ID NO: 1533337 - RNA, 21 nt, Human adenovirus A
gacaccaugguaaaaaggaag

SEQ ID NO: 1533338 - RNA, 23 nt, Human adenovirus A
cgcugccgacguugcaagaggag

SEQ ID NO: 1533339 - RNA, 20 nt, Human adenovirus A
gacuugcuaacuaccuagcu

SEQ ID NO: 1533340 - RNA, 22 nt, Human adenovirus A
gccccacuaugcgggagggaca

SEQ ID NO: 1533341 - RNA, 18 nt, Human adenovirus A
acgaccgccuuuucuaga

SEQ ID NO: 1533342 - RNA, 15 nt, Human adenovirus A
cuuccgcggccgcuu

SEQ ID NO: 1533343 - RNA, 17 nt, Human adenovirus A
caggaaaaucccccucc

SEQ ID NO: 1533344 - RNA, 18 nt, Human adenovirus A
aacuaacuuuaauguuuc

SEQ ID NO: 1533345 - RNA, 15 nt, Human adenovirus A
uagagcguucuggga

SEQ ID NO: 1533346 - RNA, 15 nt, Human adenovirus A
acugugcgguuuaag

SEQ ID NO: 1533347 - RNA, 17 nt, Human adenovirus A
cagaugauggaaagccg

SEQ ID NO: 1533348 - RNA, 14 nt, Human adenovirus A
acaacauugaacuu

SEQ ID NO: 1533349 - RNA, 23 nt, Human adenovirus A
cagagggaaagguauucagcuga

SEQ ID NO: 1533350 - RNA, 19 nt, Human adenovirus A
aucccagcugacauacacu

SEQ ID NO: 1533351 - RNA, 18 nt, Human adenovirus A
ucuuuaaaaaucacaaaa

SEQ ID NO: 1533352 - RNA, 18 nt, Human adenovirus A
gacgagcaauuaacuaag

SEQ ID NO: 1533353 - RNA, 18 nt, Human adenovirus A
aaaugcauuaucaugaaa

SEQ ID NO: 1533354 - RNA, 18 nt, Human adenovirus A
gagguguaccuggcggcc

SEQ ID NO: 1533355 - RNA, 14 nt, Human adenovirus A
uucuuuagaaacuu

SEQ ID NO: 1533356 - RNA, 21 nt, Human adenovirus A
cccuccuggauuuuacacugg

SEQ ID NO: 1533357 - RNA, 20 nt, Human adenovirus A
agguagugggcacauugcaa

SEQ ID NO: 1533358 - RNA, 22 nt, Human adenovirus A
cgcguuguacaaagggggcgca

SEQ ID NO: 1533359 - RNA, 14 nt, Human adenovirus A
acuaaagaaacaaa

SEQ ID NO: 1533360 - RNA, 12 nt, Human adenovirus A
acauaccuggca

SEQ ID NO: 1533361 - RNA, 13 nt, Human adenovirus A
ccagcucuuggaa

SEQ ID NO: 1533362 - RNA, 12 nt, Human adenovirus A
uauacugggugc

SEQ ID NO: 1533363 - RNA, 21 nt, Human adenovirus A
ccuaauggagugucacugccg

SEQ ID NO: 1533364 - RNA, 15 nt, Human adenovirus A
cucuaacaagcugcg

SEQ ID NO: 1533365 - RNA, 13 nt, Human adenovirus A
gcagacaguggcu

SEQ ID NO: 1533366 - RNA, 18 nt, Human adenovirus A
cgaaaaaaaucacuuccg

SEQ ID NO: 1533367 - RNA, 13 nt, Human adenovirus A
ggaccauugaagg

SEQ ID NO: 1533368 - RNA, 13 nt, Human adenovirus A
gggcagccaggcg

SEQ ID NO: 1533369 - RNA, 16 nt, Human adenovirus A
agugccucaaagugaa

SEQ ID NO: 1533370 - RNA, 23 nt, Human adenovirus A
ugcuucggcaagguagcauuuua

SEQ ID NO: 1533371 - RNA, 18 nt, Human adenovirus A
gauaacccugaauguuug

SEQ ID NO: 1533372 - RNA, 18 nt, Human adenovirus A
ggcgcggacgagcucccg

SEQ ID NO: 1533373 - RNA, 20 nt, Human adenovirus A
cacgccaaagccacaccucc

SEQ ID NO: 1533374 - RNA, 17 nt, Human adenovirus A
ccuucuggcuuguaugc

SEQ ID NO: 1533375 - RNA, 23 nt, Human adenovirus A
gcccucuccaaugaaacccgcug

SEQ ID NO: 1533376 - RNA, 20 nt, Human adenovirus A
gcgcagaccuacgguggcag

SEQ ID NO: 1533377 - RNA, 16 nt, Human adenovirus A
ucuacuguugaugcag

SEQ ID NO: 1533378 - RNA, 15 nt, Human adenovirus A
cugaccauuacuuuu

SEQ ID NO: 1533379 - RNA, 15 nt, Human adenovirus A
agccacaugggaagg

SEQ ID NO: 1533380 - RNA, 20 nt, Human adenovirus A
uugauacuuguuuuuucuga

SEQ ID NO: 1533381 - RNA, 19 nt, Human adenovirus A
agugcuggaaagugacauu

SEQ ID NO: 1533382 - RNA, 12 nt, Human adenovirus A
agcaaacacugc

SEQ ID NO: 1533383 - RNA, 16 nt, Human adenovirus A
cagugucauuuacugc

SEQ ID NO: 1533384 - RNA, 18 nt, Human adenovirus A
caguucaugcuaaaagcu

SEQ ID NO: 1533385 - RNA, 16 nt, Human adenovirus A
cuaggaaaacaaacaa

SEQ ID NO: 1533386 - RNA, 21 nt, Human adenovirus A
auuaacuaagugguugggaac

SEQ ID NO: 1533387 - RNA, 20 nt, Human adenovirus A
agcccgcgaaaaaaaucacu

SEQ ID NO: 1533388 - RNA, 20 nt, Human adenovirus A
caggucccguaaaauacaca

SEQ ID NO: 1533389 - RNA, 12 nt, Human adenovirus A
caacacaaaaaa

SEQ ID NO: 1533390 - RNA, 20 nt, Human adenovirus A
augcaguguaaccagaucua

SEQ ID NO: 1533391 - RNA, 23 nt, Human adenovirus A
cccggaggaagcggcgguucggg

SEQ ID NO: 1533392 - RNA, 20 nt, Human adenovirus A
cuaacgcuggggcacagcuu

SEQ ID NO: 1533393 - RNA, 18 nt, Human adenovirus A
ugcuuugcucgagacauc

SEQ ID NO: 1533394 - RNA, 13 nt, Human adenovirus A
cacggccucagca

SEQ ID NO: 1533395 - RNA, 13 nt, Human adenovirus A
aaaguaugcugca

SEQ ID NO: 1533396 - RNA, 12 nt, Human adenovirus A
uggcacaacaca

SEQ ID NO: 1533397 - RNA, 19 nt, Human adenovirus A
uggaugcuuugggagacag

SEQ ID NO: 1533398 - RNA, 22 nt, Human adenovirus A
gccacgcuuugaccggucaggc

SEQ ID NO: 1533399 - RNA, 15 nt, Human adenovirus A
cagcgccaacaaaaa

SEQ ID NO: 1533400 - RNA, 17 nt, Human adenovirus A
caacaccaacaguuuaa

SEQ ID NO: 1533401 - RNA, 17 nt, Human adenovirus A
agaguguguuuaaaugg

SEQ ID NO: 1533402 - RNA, 17 nt, Human adenovirus A
auauaguacugcuucca

SEQ ID NO: 1533403 - RNA, 20 nt, Human adenovirus A
agcccuauccgucuccagcu

SEQ ID NO: 1533404 - RNA, 15 nt, Human adenovirus A
acgccccauccgugg

SEQ ID NO: 1533405 - RNA, 13 nt, Human adenovirus A
uaagacuuacccc

SEQ ID NO: 1533406 - RNA, 19 nt, Human adenovirus A
agcagguguaaccagcugg

SEQ ID NO: 1533407 - RNA, 22 nt, Human adenovirus A
uacaacugcuccccucaacagc

SEQ ID NO: 1533408 - RNA, 21 nt, Human adenovirus A
augacaaugaauaagccaccg

SEQ ID NO: 1533409 - RNA, 16 nt, Human adenovirus A
gauagcccacaaggaa

SEQ ID NO: 1533410 - RNA, 19 nt, Human adenovirus A
gcgguggaacugcagacag

SEQ ID NO: 1533411 - RNA, 14 nt, Human adenovirus A
ucucagugucauuu

SEQ ID NO: 1533412 - RNA, 19 nt, Human adenovirus A
uccugauuguagcuacaga

SEQ ID NO: 1533413 - RNA, 17 nt, Human adenovirus A
accgaccugcaacagcc

SEQ ID NO: 1533414 - RNA, 14 nt, Human adenovirus A
ccggcuuguugaau

SEQ ID NO: 1533415 - RNA, 20 nt, Human adenovirus A
gugcuguggaaagcauuuug

SEQ ID NO: 1533416 - RNA, 23 nt, Human adenovirus A
uaguagagacaaugaaacuuuua

SEQ ID NO: 1533417 - RNA, 18 nt, Human adenovirus A
caacacggaguaaugaac

SEQ ID NO: 1533418 - RNA, 17 nt, Human adenovirus A
auugacucgguaguggc

SEQ ID NO: 1533419 - RNA, 18 nt, Human adenovirus A
ucuucagagcacacuggg

SEQ ID NO: 1533420 - RNA, 20 nt, Human adenovirus A
auuaugcuggaaccugaagu

SEQ ID NO: 1533421 - RNA, 16 nt, Human adenovirus A
acacaaaacacaaauu

SEQ ID NO: 1533422 - RNA, 18 nt, Human adenovirus A
gccccccuccccugugga

SEQ ID NO: 1533423 - RNA, 16 nt, Human adenovirus A
caugaccauguaauaa

SEQ ID NO: 1533424 - RNA, 23 nt, Human adenovirus A
uacuucaccgcgcaagcuuucau

SEQ ID NO: 1533425 - RNA, 15 nt, Human adenovirus A
cauacaguaagcaca

SEQ ID NO: 1533426 - RNA, 20 nt, Human adenovirus A
ugcaaaauggacucaaauaa

SEQ ID NO: 1533427 - RNA, 19 nt, Human adenovirus A
auacaacucuacaaaucuu

SEQ ID NO: 1533428 - RNA, 20 nt, Human adenovirus A
gcggcucuuuugcagcucca

SEQ ID NO: 1533429 - RNA, 14 nt, Human adenovirus A
augcaaagccagcc

SEQ ID NO: 1533430 - RNA, 14 nt, Human adenovirus A
aaguucuguuucau

SEQ ID NO: 1533431 - RNA, 18 nt, Human adenovirus A
gcaaacaugcuguauccc

SEQ ID NO: 1533432 - RNA, 16 nt, Human adenovirus A
ucauaagacaaagccu

SEQ ID NO: 1533433 - RNA, 22 nt, Human adenovirus A
aaauaaugcauuaccagcagcc

SEQ ID NO: 1533434 - RNA, 23 nt, Human adenovirus A
aggaauaucaacugcuaugugca

SEQ ID NO: 1533435 - RNA, 16 nt, Human adenovirus A
uccacggugcacuuuu

SEQ ID NO: 1533436 - RNA, 15 nt, Human adenovirus A
cgcugcucagcucca

SEQ ID NO: 1533437 - RNA, 15 nt, Human adenovirus A
gcggugguggagaag

SEQ ID NO: 1533438 - RNA, 16 nt, Human adenovirus A
uugaaccgguugaaac

SEQ ID NO: 1533439 - RNA, 14 nt, Human adenovirus A
aucaucaaacugcc

SEQ ID NO: 1533440 - RNA, 17 nt, Human adenovirus A
caaaguaugcugcacaa

SEQ ID NO: 1533441 - RNA, 17 nt, Human adenovirus A
cgccggcgaacgggcag

SEQ ID NO: 1533442 - RNA, 17 nt, Human adenovirus A
acuucccaaauuuucca

SEQ ID NO: 1533443 - RNA, 23 nt, Human adenovirus A
ugcuucauugaauuaccagaaug

SEQ ID NO: 1533444 - RNA, 14 nt, Human adenovirus A
acuuaauuucuaga

SEQ ID NO: 1533445 - RNA, 20 nt, Human adenovirus A
guuagccugaaaaauaaaaa

SEQ ID NO: 1533446 - RNA, 21 nt, Human adenovirus A
aacuucgccaauaaaaacaac

SEQ ID NO: 1533447 - RNA, 16 nt, Human adenovirus A
auucgcgugccaggca

SEQ ID NO: 1533448 - RNA, 11 nt, Human adenovirus A
uucuccaaauc

SEQ ID NO: 1533449 - RNA, 15 nt, Human adenovirus A
cacauacaucaccuc

SEQ ID NO: 1533450 - RNA, 17 nt, Human adenovirus A
ugcucuaauagaacugg

SEQ ID NO: 1533451 - RNA, 14 nt, Human adenovirus A
caacaacagcuucu

SEQ ID NO: 1533452 - RNA, 14 nt, Human adenovirus A
cagcacgagagggg

SEQ ID NO: 1533453 - RNA, 15 nt, Human adenovirus A
gccugacgcucuggc

SEQ ID NO: 1533454 - RNA, 14 nt, Human adenovirus A
aucagaagccagca

SEQ ID NO: 1533455 - RNA, 13 nt, Human adenovirus A
uagagaggaauuu

SEQ ID NO: 1533456 - RNA, 18 nt, Human adenovirus A
ugcacguacuagccccug

SEQ ID NO: 1533457 - RNA, 23 nt, Human adenovirus A
gccgccguacuuguaacugugga

SEQ ID NO: 1533458 - RNA, 13 nt, Human adenovirus A
aauaucaacugcu

SEQ ID NO: 1533459 - RNA, 23 nt, Human adenovirus A
uauauuaagguacauuggcauua

SEQ ID NO: 1533460 - RNA, 16 nt, Human adenovirus A
uguggcccaaugcaau

SEQ ID NO: 1533461 - RNA, 13 nt, Human adenovirus A
uuaagaaaucuuu

SEQ ID NO: 1533462 - RNA, 21 nt, Human adenovirus A
aacaaacuguuagacagagca

SEQ ID NO: 1533463 - RNA, 11 nt, Human adenovirus A
auacucuggaa

SEQ ID NO: 1533464 - RNA, 15 nt, Human adenovirus A
accgucgcuuucaac

SEQ ID NO: 1533465 - RNA, 16 nt, Human adenovirus A
gacacggcacgcggcc

SEQ ID NO: 1533466 - RNA, 21 nt, Human adenovirus A
ucguacaggaauucugaccac

SEQ ID NO: 1533467 - RNA, 21 nt, Human adenovirus A
gcagaugagcuucuugcuuua

SEQ ID NO: 1533468 - RNA, 20 nt, Human adenovirus A
ugacuuuucgcuccucgcgu

SEQ ID NO: 1533469 - RNA, 17 nt, Human adenovirus A
cagcaacggcaggaaau

SEQ ID NO: 1533470 - RNA, 21 nt, Human adenovirus A
uacaugaagauuucugcuguc

SEQ ID NO: 1533471 - RNA, 23 nt, Human adenovirus A
aagucuggaucuucaaacaccug

SEQ ID NO: 1533472 - RNA, 15 nt, Human adenovirus A
uaugagucaaaguau

SEQ ID NO: 1533473 - RNA, 22 nt, Human adenovirus A
augauuuaagaguaguacaaau

SEQ ID NO: 1533474 - RNA, 20 nt, Human adenovirus A
aaaagagccacagcucugau

SEQ ID NO: 1533475 - RNA, 17 nt, Human adenovirus A
acuguaaaaccuacaca

SEQ ID NO: 1533476 - RNA, 21 nt, Human adenovirus A
cauuaaaaucaaccuuucgau

SEQ ID NO: 1533477 - RNA, 21 nt, Human adenovirus A
caacagcggggaggaagcuga

SEQ ID NO: 1533478 - RNA, 16 nt, Human adenovirus A
gcgaucagccaugugc

SEQ ID NO: 1533479 - RNA, 11 nt, Human adenovirus A
ucagcacugcg

SEQ ID NO: 1533480 - RNA, 16 nt, Human adenovirus A
caaugacaaugaauaa

SEQ ID NO: 1533481 - RNA, 14 nt, Human adenovirus A
cagucaaccgcgcu

SEQ ID NO: 1533482 - RNA, 16 nt, Human adenovirus A
acauguggagcuuuca

SEQ ID NO: 1533483 - RNA, 16 nt, Human adenovirus A
acaaacgcccugcucc

SEQ ID NO: 1533484 - RNA, 16 nt, Human adenovirus A
aggaaaugauggcuuu

SEQ ID NO: 1533485 - RNA, 19 nt, Human adenovirus A
gccagauguaaaaguacgu

SEQ ID NO: 1533486 - RNA, 19 nt, Human adenovirus A
agugcaaaauaaugacuau

SEQ ID NO: 1533487 - RNA, 20 nt, Human adenovirus A
cucucaaacgccgacgcugc

SEQ ID NO: 1533488 - RNA, 22 nt, Human adenovirus A
uugaaaagacugagaaccgucu

SEQ ID NO: 1533489 - RNA, 22 nt, Human adenovirus A
aagucgcaauuagggccagcau

SEQ ID NO: 1533490 - RNA, 23 nt, Human adenovirus A
caucuacagcgacaaagcacuau

SEQ ID NO: 1533491 - RNA, 21 nt, Human adenovirus A
aaaacuuaaugcccaagguca

SEQ ID NO: 1533492 - RNA, 22 nt, Human adenovirus A
aguuuaacgaggugcagcugcc

SEQ ID NO: 1533493 - RNA, 13 nt, Human adenovirus A
auguuaaguuugg

SEQ ID NO: 1533494 - RNA, 19 nt, Human adenovirus A
cugcaaaccgcgcuuuucu

SEQ ID NO: 1533495 - RNA, 23 nt, Human adenovirus A
uauuuuagagagugccccccucc

SEQ ID NO: 1533496 - RNA, 20 nt, Human adenovirus A
gugccaggcauuuccaggug

SEQ ID NO: 1533497 - RNA, 16 nt, Human adenovirus A
aaagcgcagaguaucc

SEQ ID NO: 1533498 - RNA, 14 nt, Human adenovirus A
gauaugaugcaaga

SEQ ID NO: 1533499 - RNA, 12 nt, Human adenovirus A
cuccugccacca

SEQ ID NO: 1533500 - RNA, 17 nt, Human adenovirus A
gccacaccuccacccaa

SEQ ID NO: 1533501 - RNA, 15 nt, Human adenovirus A
cuggcgaacaggaag

SEQ ID NO: 1533502 - RNA, 14 nt, Human adenovirus A
aguaauggaguugg

SEQ ID NO: 1533503 - RNA, 16 nt, Human adenovirus A
cauucaugcugauguu

SEQ ID NO: 1533504 - RNA, 13 nt, Human adenovirus A
acacgcugcccug

SEQ ID NO: 1533505 - RNA, 15 nt, Human adenovirus A
aacuuuuuacuaacu

SEQ ID NO: 1533506 - RNA, 14 nt, Human adenovirus A
gccucuucuucuuc

SEQ ID NO: 1533507 - RNA, 18 nt, Human adenovirus A
ggaacugcagacaguggc

SEQ ID NO: 1533508 - RNA, 17 nt, Human adenovirus A
aggguggggugcugccc

SEQ ID NO: 1533509 - RNA, 13 nt, Human adenovirus A
caaagugaagugu

SEQ ID NO: 1533510 - RNA, 14 nt, Human adenovirus A
cuguuagacagagc

SEQ ID NO: 1533511 - RNA, 11 nt, Human adenovirus A
aacccuucccc

SEQ ID NO: 1533512 - RNA, 22 nt, Human adenovirus A
gaaauaaaaaauuacaaaggca

SEQ ID NO: 1533513 - RNA, 14 nt, Human adenovirus A
auggcgaccagugu

SEQ ID NO: 1533514 - RNA, 18 nt, Human adenovirus A
auucuuccacuguuguau

SEQ ID NO: 1533515 - RNA, 20 nt, Human adenovirus A
ugugagggccgaugcauaca

SEQ ID NO: 1533516 - RNA, 23 nt, Human adenovirus A
acugcgucuccccauucgcagca

SEQ ID NO: 1533517 - RNA, 19 nt, Human adenovirus A
uccgacaacagcugcuguc

SEQ ID NO: 1533518 - RNA, 19 nt, Human adenovirus A
acgggccgcagcugcggcc

SEQ ID NO: 1533519 - RNA, 14 nt, Human adenovirus A
augucgaaugcagg

SEQ ID NO: 1533520 - RNA, 19 nt, Human adenovirus A
gcuuccgcggccgcuucua

SEQ ID NO: 1533521 - RNA, 13 nt, Human adenovirus A
uaaccaaauacug

SEQ ID NO: 1533522 - RNA, 15 nt, Human adenovirus A
accaccucaaaaucu

SEQ ID NO: 1533523 - RNA, 16 nt, Human adenovirus A
gcuaacuuuuuuccca

SEQ ID NO: 1533524 - RNA, 23 nt, Human adenovirus A
aggagaaaauaacacauaagcau

SEQ ID NO: 1533525 - RNA, 22 nt, Human adenovirus A
cagcucuuuuggauguaaaaaa

SEQ ID NO: 1533526 - RNA, 23 nt, Human adenovirus A
uggaaauuaauuugcaggcuaau

SEQ ID NO: 1533527 - RNA, 17 nt, Human adenovirus A
uaauuaagcgagcccaa

SEQ ID NO: 1533528 - RNA, 21 nt, Human adenovirus A
gaugauagagauaagcaggaa

SEQ ID NO: 1533529 - RNA, 15 nt, Human adenovirus A
aagacuauagagagg

SEQ ID NO: 1533530 - RNA, 15 nt, Human adenovirus A
agcuuaccacucaga

SEQ ID NO: 1533531 - RNA, 14 nt, Human adenovirus A
aauaucaauguuuu

SEQ ID NO: 1533532 - RNA, 23 nt, Human adenovirus A
uaaggauugguuccuaauacaaa

SEQ ID NO: 1533533 - RNA, 23 nt, Human adenovirus A
ucuguucaauaaauacugcuccc

SEQ ID NO: 1533534 - RNA, 20 nt, Human adenovirus A
acauggaaaaaaugaaaguu

SEQ ID NO: 1533535 - RNA, 16 nt, Human adenovirus A
aaaauauguuaaauua

SEQ ID NO: 1533536 - RNA, 16 nt, Human adenovirus A
augaauuugaaauaaa

SEQ ID NO: 1533537 - RNA, 20 nt, Human adenovirus A
gaugaaggucccuugcuuga

SEQ ID NO: 1533538 - RNA, 21 nt, Human adenovirus A
auacgcgugguuaaacugccu

SEQ ID NO: 1533539 - RNA, 18 nt, Human adenovirus A
cuacuucacccugggaaa

SEQ ID NO: 1533540 - RNA, 13 nt, Human adenovirus A
uuggcggccaugc

SEQ ID NO: 1533541 - RNA, 15 nt, Human adenovirus A
auccccagacaguuu

SEQ ID NO: 1533542 - RNA, 12 nt, Human adenovirus A
gaaaaaugugua

SEQ ID NO: 1533543 - RNA, 13 nt, Human adenovirus A
agcgcgagaagaa

SEQ ID NO: 1533544 - RNA, 18 nt, Human adenovirus A
cuaucaucaaacugccug

SEQ ID NO: 1533545 - RNA, 16 nt, Human adenovirus A
cugccaccgucaauuc

SEQ ID NO: 1533546 - RNA, 15 nt, Human adenovirus A
cagguguacuggucc

SEQ ID NO: 1533547 - RNA, 18 nt, Human adenovirus A
cgacgcaaaaaaggggca

SEQ ID NO: 1533548 - RNA, 19 nt, Human adenovirus A
auggggucaugaaaguaaa

SEQ ID NO: 1533549 - RNA, 18 nt, Human adenovirus A
uugagcccgaaguugacu

SEQ ID NO: 1533550 - RNA, 17 nt, Human adenovirus A
cagcgccaccugccauu

SEQ ID NO: 1533551 - RNA, 17 nt, Human adenovirus A
gaugcgggcagccaggc

SEQ ID NO: 1533552 - RNA, 17 nt, Human adenovirus A
aaggguggggugcugcc

SEQ ID NO: 1533553 - RNA, 14 nt, Human adenovirus A
cgccuuaacuucua

SEQ ID NO: 1533554 - RNA, 13 nt, Human adenovirus A
agcaucccagcug

SEQ ID NO: 1533555 - RNA, 20 nt, Human adenovirus A
uguucaauaaauacugcucc

SEQ ID NO: 1533556 - RNA, 16 nt, Human adenovirus A
aaaauaaaacuuccaa

SEQ ID NO: 1533557 - RNA, 20 nt, Human adenovirus A
cauuugaucagaaaaaacua

SEQ ID NO: 1533558 - RNA, 14 nt, Human adenovirus A
acuaugagucaagu

SEQ ID NO: 1533559 - RNA, 16 nt, Human adenovirus A
cuuuuguuagaugcag

SEQ ID NO: 1533560 - RNA, 14 nt, Human adenovirus A
augcccgccuggca

SEQ ID NO: 1533561 - RNA, 18 nt, Human adenovirus A
caacugucaaaccugaca

SEQ ID NO: 1533562 - RNA, 20 nt, Human adenovirus A
cuagcggugcccuaucuguu

SEQ ID NO: 1533563 - RNA, 15 nt, Human adenovirus A
gcucauggcgggcuc

SEQ ID NO: 1533564 - RNA, 16 nt, Human adenovirus A
aaacaguacaaagcca

SEQ ID NO: 1533565 - RNA, 16 nt, Human adenovirus A
accauugaaaccagcg

SEQ ID NO: 1533566 - RNA, 17 nt, Human adenovirus A
cagcgccaacaaaaacc

SEQ ID NO: 1533567 - RNA, 12 nt, Human adenovirus A
agcuaugaugcg

SEQ ID NO: 1533568 - RNA, 15 nt, Human adenovirus A
caccgcccaggcagg

SEQ ID NO: 1533569 - RNA, 16 nt, Human adenovirus A
gcuucuaaaagagcca

SEQ ID NO: 1533570 - RNA, 15 nt, Human adenovirus A
gugacacgcaccgca

SEQ ID NO: 1533571 - RNA, 13 nt, Human adenovirus A
uaguccguuuucu

SEQ ID NO: 1533572 - RNA, 17 nt, Human adenovirus A
gucucaaaagcagccau

SEQ ID NO: 1533573 - RNA, 13 nt, Human adenovirus A
acugggugccgcc

SEQ ID NO: 1533574 - RNA, 20 nt, Human adenovirus A
agaaaaaaaccuucgagaac

SEQ ID NO: 1533575 - RNA, 19 nt, Human adenovirus A
cuccaauuuguggaggaau

SEQ ID NO: 1533576 - RNA, 16 nt, Human adenovirus A
aauuugucugaaaauu

SEQ ID NO: 1533577 - RNA, 15 nt, Human adenovirus A
gguguuuggcagcaa

SEQ ID NO: 1533578 - RNA, 14 nt, Human adenovirus A
uguaucuguugaau

SEQ ID NO: 1533579 - RNA, 17 nt, Human adenovirus A
uuccaauggucuucaag

SEQ ID NO: 1533580 - RNA, 15 nt, Human adenovirus A
uucuuugguuugcaa

SEQ ID NO: 1533581 - RNA, 16 nt, Human adenovirus A
caucuuuuacuaaaau

SEQ ID NO: 1533582 - RNA, 18 nt, Human adenovirus A
uuacaggaggaggaggaa

SEQ ID NO: 1533583 - RNA, 20 nt, Human adenovirus A
caucuggggggucggcaucu

SEQ ID NO: 1533584 - RNA, 17 nt, Human adenovirus A
aaaauucggcuauuuac

SEQ ID NO: 1533585 - RNA, 21 nt, Human adenovirus A
acccuuccccaccuuucuggu

SEQ ID NO: 1533586 - RNA, 14 nt, Human adenovirus A
ugcugucacugagc

SEQ ID NO: 1533587 - RNA, 12 nt, Human adenovirus A
agugucccaaca

SEQ ID NO: 1533588 - RNA, 13 nt, Human adenovirus A
uguuuuauuaaaa

SEQ ID NO: 1533589 - RNA, 21 nt, Human adenovirus A
cagccagauguaaaaguacgu

SEQ ID NO: 1533590 - RNA, 12 nt, Human adenovirus A
gacaaaaagacu

SEQ ID NO: 1533591 - RNA, 23 nt, Human adenovirus A
cugaagcgcgugucuucucccug

SEQ ID NO: 1533592 - RNA, 20 nt, Human adenovirus A
uaccugagcggcaagaacaa

SEQ ID NO: 1533593 - RNA, 16 nt, Human adenovirus A
gucgcgagcugcgccg

SEQ ID NO: 1533594 - RNA, 13 nt, Human adenovirus A
uaaccuugcaaaa

SEQ ID NO: 1533595 - RNA, 13 nt, Human adenovirus A
ucuuuacaacugu

SEQ ID NO: 1533596 - RNA, 17 nt, Human adenovirus A
acgaugacgaagaccag

SEQ ID NO: 1533597 - RNA, 21 nt, Human adenovirus A
acaacucuacuuaaaagcaag

SEQ ID NO: 1533598 - RNA, 20 nt, Human adenovirus A
gccauccgcaggcaguacuu

SEQ ID NO: 1533599 - RNA, 22 nt, Human adenovirus A
agaggaagaagucgccgcggcg

SEQ ID NO: 1533600 - RNA, 19 nt, Human adenovirus A
agcugagcaaugcuacuaa

SEQ ID NO: 1533601 - RNA, 11 nt, Human adenovirus A
ucagcugcaaa

SEQ ID NO: 1533602 - RNA, 20 nt, Human adenovirus A
gucgaccuguggcaccugca

SEQ ID NO: 1533603 - RNA, 14 nt, Human adenovirus A
cgcgcggccagagc

SEQ ID NO: 1533604 - RNA, 12 nt, Human adenovirus A
cguacacuggcu

SEQ ID NO: 1533605 - RNA, 21 nt, Human adenovirus A
aaaguggucagauccuuagau

SEQ ID NO: 1533606 - RNA, 15 nt, Human adenovirus A
augccaguuuacuga

SEQ ID NO: 1533607 - RNA, 23 nt, Human adenovirus A
cgcaaguucaaagaagagcugcu

SEQ ID NO: 1533608 - RNA, 16 nt, Human adenovirus A
aggaggguuugcauuu

SEQ ID NO: 1533609 - RNA, 22 nt, Human adenovirus A
cuccuaccacuguacuuuugcc

SEQ ID NO: 1533610 - RNA, 16 nt, Human adenovirus A
uacgguggcagccaag

SEQ ID NO: 1533611 - RNA, 17 nt, Human adenovirus A
cuccauccaaaacuaac

SEQ ID NO: 1533612 - RNA, 20 nt, Human adenovirus A
ccuuggaagaggugccuaaa

SEQ ID NO: 1533613 - RNA, 19 nt, Human adenovirus A
uaggcagcagcagcaacac

SEQ ID NO: 1533614 - RNA, 16 nt, Human adenovirus A
agguuagccugaaaaa

SEQ ID NO: 1533615 - RNA, 17 nt, Human adenovirus A
accuaucccaugaccaa

SEQ ID NO: 1533616 - RNA, 22 nt, Human adenovirus A
agggcacaauaguuuaauguuu

SEQ ID NO: 1533617 - RNA, 20 nt, Human adenovirus A
acucuccugagcgucaccca

SEQ ID NO: 1533618 - RNA, 18 nt, Human adenovirus A
acaacaaaacacugagcu

SEQ ID NO: 1533619 - RNA, 22 nt, Human adenovirus A
uucgcgacaacagcggggagga

SEQ ID NO: 1533620 - RNA, 18 nt, Human adenovirus A
cuucaucgcuuucuucug

SEQ ID NO: 1533621 - RNA, 23 nt, Human adenovirus A
gucuggaucuucaaacaccugca

SEQ ID NO: 1533622 - RNA, 12 nt, Human adenovirus A
gggccaggagga

SEQ ID NO: 1533623 - RNA, 16 nt, Human adenovirus A
uaauccuaggcaaaga

SEQ ID NO: 1533624 - RNA, 22 nt, Human adenovirus A
gacuuuuuugccugguaaaaca

SEQ ID NO: 1533625 - RNA, 13 nt, Human adenovirus A
acagucugcagga

SEQ ID NO: 1533626 - RNA, 18 nt, Human adenovirus A
gagaaccgucugcaugau

SEQ ID NO: 1533627 - RNA, 21 nt, Human adenovirus A
aacugggggcguacacuggcu

SEQ ID NO: 1533628 - RNA, 20 nt, Human adenovirus A
ucccauuacaguagagucuu

SEQ ID NO: 1533629 - RNA, 19 nt, Human adenovirus A
ucagucagagagaaaagca

SEQ ID NO: 1533630 - RNA, 13 nt, Human adenovirus A
augccgcaguggu

SEQ ID NO: 1533631 - RNA, 21 nt, Human adenovirus A
uccugcgacaaaugcgaccuc

SEQ ID NO: 1533632 - RNA, 12 nt, Human adenovirus A
ccugacgcucug

SEQ ID NO: 1533633 - RNA, 16 nt, Human adenovirus A
uagucgcgcacugggc

SEQ ID NO: 1533634 - RNA, 13 nt, Human adenovirus A
aguacugcuucca

SEQ ID NO: 1533635 - RNA, 19 nt, Human adenovirus A
cuuguacggacaacauccu

SEQ ID NO: 1533636 - RNA, 21 nt, Human adenovirus A
uaaagacuccggaaacaacac

SEQ ID NO: 1533637 - RNA, 17 nt, Human adenovirus A
ugccagaagcacuggca

SEQ ID NO: 1533638 - RNA, 12 nt, Human adenovirus A
cuucaucuuuuc

SEQ ID NO: 1533639 - RNA, 24 nt, Human adenovirus A
agacauauggcaccaaggcgugga

SEQ ID NO: 1533640 - RNA, 14 nt, Human adenovirus A
gaacgguugcuucu

SEQ ID NO: 1533641 - RNA, 16 nt, Human adenovirus A
gaccucagcccagggc

SEQ ID NO: 1533642 - RNA, 13 nt, Human adenovirus A
agagcuuaugcau

SEQ ID NO: 1533643 - RNA, 18 nt, Human adenovirus A
guuagucgcgcacugggc

SEQ ID NO: 1533644 - RNA, 15 nt, Human adenovirus A
aauacuggcuaacgc

SEQ ID NO: 1533645 - RNA, 18 nt, Human adenovirus A
ugccaggacaaagauuuu

SEQ ID NO: 1533646 - RNA, 21 nt, Human adenovirus A
ucaccaugggaauagugcucu

SEQ ID NO: 1533647 - RNA, 15 nt, Human adenovirus A
agaggcauaaaaacu

SEQ ID NO: 1533648 - RNA, 20 nt, Human adenovirus A
ucaaaguaccuuacaaacga

SEQ ID NO: 1533649 - RNA, 18 nt, Human adenovirus A
cauaauguaacccuuccc

SEQ ID NO: 1533650 - RNA, 18 nt, Human adenovirus A
uggcgcuacggcugucau

SEQ ID NO: 1533651 - RNA, 23 nt, Human adenovirus A
uggaguggcgauuccaaggaaug

SEQ ID NO: 1533652 - RNA, 16 nt, Human adenovirus A
cagcggcgccacccua

SEQ ID NO: 1533653 - RNA, 16 nt, Human adenovirus A
agcgguaugucggccu

SEQ ID NO: 1533654 - RNA, 13 nt, Human adenovirus A
gcgcgcggccaga

SEQ ID NO: 1533655 - RNA, 22 nt, Human adenovirus A
gccagccaagcguagccgcagc

SEQ ID NO: 1533656 - RNA, 20 nt, Human adenovirus A
ucuaaaguaccaggaagcug

SEQ ID NO: 1533657 - RNA, 22 nt, Human adenovirus A
uggagauaaguuuaaaggcauu

SEQ ID NO: 1533658 - RNA, 14 nt, Human adenovirus A
uuuggaaacuguau

SEQ ID NO: 1533659 - RNA, 15 nt, Human adenovirus A
aacaucgcaaaacac

SEQ ID NO: 1533660 - RNA, 16 nt, Human adenovirus A
gaggacgaccccgccg

SEQ ID NO: 1533661 - RNA, 14 nt, Human adenovirus A
uacucuuauaaaau

SEQ ID NO: 1533662 - RNA, 13 nt, Human adenovirus A
acaacaguacagg

SEQ ID NO: 1533663 - RNA, 19 nt, Human adenovirus A
ccacugcgucaguaacaaa

SEQ ID NO: 1533664 - RNA, 18 nt, Human adenovirus A
ucacagcuuauucgccag

SEQ ID NO: 1533665 - RNA, 17 nt, Human adenovirus A
cuagugcaacauuugua

SEQ ID NO: 1533666 - RNA, 13 nt, Human adenovirus A
cgacgggccaggc

SEQ ID NO: 1533667 - RNA, 17 nt, Human adenovirus A
aaacgaccgccuuuucu

SEQ ID NO: 1533668 - RNA, 18 nt, Human adenovirus A
accucuuuaggcauuaaa

SEQ ID NO: 1533669 - RNA, 14 nt, Human adenovirus A
cagcaaacacugcu

SEQ ID NO: 1533670 - RNA, 12 nt, Human adenovirus A
gggucggagaac

SEQ ID NO: 1533671 - RNA, 17 nt, Human adenovirus A
gagccacagccccuagc

SEQ ID NO: 1533672 - RNA, 16 nt, Human adenovirus A
ccaacaugccaaacgu

SEQ ID NO: 1533673 - RNA, 22 nt, Human adenovirus A
agaaaucuuuuaccaaugaauu

SEQ ID NO: 1533674 - RNA, 16 nt, Human adenovirus A
gcaccccuucccaccu

SEQ ID NO: 1533675 - RNA, 15 nt, Human adenovirus A
gcugugaaaugaggc

SEQ ID NO: 1533676 - RNA, 17 nt, Human adenovirus A
cuucauacccaacuuug

SEQ ID NO: 1533677 - RNA, 15 nt, Human adenovirus A
acaacuuuuaacauu

SEQ ID NO: 1533678 - RNA, 16 nt, Human adenovirus A
aaaaaguaaacugucu

SEQ ID NO: 1533679 - RNA, 16 nt, Human adenovirus A
ugcaaugcuuaacaua

SEQ ID NO: 1533680 - RNA, 15 nt, Human adenovirus A
acauaauccagcaag

SEQ ID NO: 1533681 - RNA, 20 nt, Human adenovirus A
ucuagccaacauccagugcg

SEQ ID NO: 1533682 - RNA, 18 nt, Human adenovirus A
accagcgucccaaaagca

SEQ ID NO: 1533683 - RNA, 17 nt, Human adenovirus A
ucuggcgaacaggaaga

SEQ ID NO: 1533684 - RNA, 18 nt, Human adenovirus A
uuaaugcuggaugcuuug

SEQ ID NO: 1533685 - RNA, 16 nt, Human adenovirus A
gaguaggaagacagca

SEQ ID NO: 1533686 - RNA, 15 nt, Human adenovirus A
cauuuauaaauguua

SEQ ID NO: 1533687 - RNA, 14 nt, Human adenovirus A
ccgcguggucagga

SEQ ID NO: 1533688 - RNA, 19 nt, Human adenovirus A
cuggaccuuuaacggaaaa

SEQ ID NO: 1533689 - RNA, 16 nt, Human adenovirus A
ugcuaugugcaaauau

SEQ ID NO: 1533690 - RNA, 23 nt, Human adenovirus A
gggauggguguuuggcagcaaug

SEQ ID NO: 1533691 - RNA, 15 nt, Human adenovirus A
caucaggagcagaaa

SEQ ID NO: 1533692 - RNA, 15 nt, Human adenovirus A
uggccagugugcgcu

SEQ ID NO: 1533693 - RNA, 14 nt, Human adenovirus A
ugauuucagcuucu

SEQ ID NO: 1533694 - RNA, 14 nt, Human adenovirus A
guuucuguacugca

SEQ ID NO: 1533695 - RNA, 17 nt, Human adenovirus A
gcgacagaguugcuuuu

SEQ ID NO: 1533696 - RNA, 23 nt, Human adenovirus A
uuguguguuucuaaaacagaacc

SEQ ID NO: 1533697 - RNA, 16 nt, Human adenovirus A
cauuacaauuaacugc

SEQ ID NO: 1533698 - RNA, 18 nt, Human adenovirus A
gagcggcugacagagcgc

SEQ ID NO: 1533699 - RNA, 20 nt, Human adenovirus A
gucgccagcaagugccuccu

SEQ ID NO: 1533700 - RNA, 15 nt, Human adenovirus A
caaucuacaaacugg

SEQ ID NO: 1533701 - RNA, 17 nt, Human adenovirus A
aucaacuuaacccuccc

SEQ ID NO: 1533702 - RNA, 17 nt, Human adenovirus A
cagcauaaaagcuucaa

SEQ ID NO: 1533703 - RNA, 16 nt, Human adenovirus A
ccaugcaaagccagcc

SEQ ID NO: 1533704 - RNA, 15 nt, Human adenovirus A
gcguggaacagccaa

SEQ ID NO: 1533705 - RNA, 20 nt, Human adenovirus A
aggucaucguaggacaacuu

SEQ ID NO: 1533706 - RNA, 18 nt, Human adenovirus A
auucuggagaauaagcau

SEQ ID NO: 1533707 - RNA, 16 nt, Human adenovirus A
aaaccggccagaugcu

SEQ ID NO: 1533708 - RNA, 13 nt, Human adenovirus A
augugguccaggg

SEQ ID NO: 1533709 - RNA, 17 nt, Human adenovirus A
aaccgauugggaaaaag

SEQ ID NO: 1533710 - RNA, 18 nt, Human adenovirus A
uuaaacaacaaaacacug

SEQ ID NO: 1533711 - RNA, 20 nt, Human adenovirus A
uggagcgagaucuuccaaca

SEQ ID NO: 1533712 - RNA, 18 nt, Human adenovirus A
uaauugauuuacaaaccg

SEQ ID NO: 1533713 - RNA, 13 nt, Human adenovirus A
guuugacaccaga

SEQ ID NO: 1533714 - RNA, 17 nt, Human adenovirus A
gaacuaaaccuuccauc

SEQ ID NO: 1533715 - RNA, 13 nt, Human adenovirus A
uguacaguuucug

SEQ ID NO: 1533716 - RNA, 18 nt, Human adenovirus A
aaagucauccaaagauca

SEQ ID NO: 1533717 - RNA, 23 nt, Human adenovirus A
ucuguuauguaugcccagcauga

SEQ ID NO: 1533718 - RNA, 12 nt, Human adenovirus A
uaauauuuugcc

SEQ ID NO: 1533719 - RNA, 17 nt, Human adenovirus A
gucggagaaccuuucaa

SEQ ID NO: 1533720 - RNA, 22 nt, Human adenovirus A
uacuuaccggaaaucugaaaau

SEQ ID NO: 1533721 - RNA, 23 nt, Human adenovirus A
aucuugggcaaaauaugcuguac

SEQ ID NO: 1533722 - RNA, 15 nt, Human adenovirus A
cccuccccuguggag

SEQ ID NO: 1533723 - RNA, 21 nt, Human adenovirus A
uuacaacuugcuuccagacaa

SEQ ID NO: 1533724 - RNA, 20 nt, Human adenovirus A
acagcauggagugcuggaaa

SEQ ID NO: 1533725 - RNA, 18 nt, Human adenovirus A
ccgcaaagaugaggcugg

SEQ ID NO: 1533726 - RNA, 12 nt, Human adenovirus A
cuaugaaucuuu

SEQ ID NO: 1533727 - RNA, 21 nt, Human adenovirus A
ccgugguuggugggcagggau

SEQ ID NO: 1533728 - RNA, 16 nt, Human adenovirus A
aggcuuucuucaaauc

SEQ ID NO: 1533729 - RNA, 20 nt, Human adenovirus A
ucaaauuccugugcaaacug

SEQ ID NO: 1533730 - RNA, 16 nt, Human adenovirus A
cagcgccgagccacag

SEQ ID NO: 1533731 - RNA, 15 nt, Human adenovirus A
caaauuugcauuucc

SEQ ID NO: 1533732 - RNA, 13 nt, Human adenovirus A
cucacugcuuugc

SEQ ID NO: 1533733 - RNA, 15 nt, Human adenovirus A
aguaucugcccauuu

SEQ ID NO: 1533734 - RNA, 22 nt, Human adenovirus A
aacaaccucccgauaccaaaaa

SEQ ID NO: 1533735 - RNA, 19 nt, Human adenovirus A
gacgcagaagcucuguuca

SEQ ID NO: 1533736 - RNA, 18 nt, Human adenovirus A
acguccaagcgguuauug

SEQ ID NO: 1533737 - RNA, 17 nt, Human adenovirus A
gugagcauccaaaugga

SEQ ID NO: 1533738 - RNA, 21 nt, Human adenovirus A
guucccaaauauccaggagga

SEQ ID NO: 1533739 - RNA, 15 nt, Human adenovirus A
cuuucuaccaaggaa

SEQ ID NO: 1533740 - RNA, 21 nt, Human adenovirus A
cagaacccaguaugcugaaga

SEQ ID NO: 1533741 - RNA, 14 nt, Human adenovirus A
gcaccagaaagcag

SEQ ID NO: 1533742 - RNA, 22 nt, Human adenovirus A
ccuuccgugguuugguggaaaa

SEQ ID NO: 1533743 - RNA, 19 nt, Human adenovirus A
agcuacgcaguuuuucuac

SEQ ID NO: 1533744 - RNA, 14 nt, Human adenovirus A
gaucuagaaauuga

SEQ ID NO: 1533745 - RNA, 20 nt, Human adenovirus A
caauaacuacaaacaguuuc

SEQ ID NO: 1533746 - RNA, 14 nt, Human adenovirus A
aagcgaugacucag

SEQ ID NO: 1533747 - RNA, 14 nt, Human adenovirus A
acuaggggcuggcu

SEQ ID NO: 1533748 - RNA, 13 nt, Human adenovirus A
gaagcuggccaua

SEQ ID NO: 1533749 - RNA, 14 nt, Human adenovirus A
cagcucuugcagua

SEQ ID NO: 1533750 - RNA, 13 nt, Human adenovirus A
uuaguuuggcaga

SEQ ID NO: 1533751 - RNA, 19 nt, Human adenovirus A
cccaguuuuugcagugcca

SEQ ID NO: 1533752 - RNA, 12 nt, Human adenovirus A
auggaaccccaa

SEQ ID NO: 1533753 - RNA, 16 nt, Human adenovirus A
cgcagucaccaccagc

SEQ ID NO: 1533754 - RNA, 14 nt, Human adenovirus A
agucacaaguacau

SEQ ID NO: 1533755 - RNA, 16 nt, Human adenovirus A
caacaccucacaaggu

SEQ ID NO: 1533756 - RNA, 16 nt, Human adenovirus A
uccacacaucucaccu

SEQ ID NO: 1533757 - RNA, 13 nt, Human adenovirus A
gcgaccucagccc

SEQ ID NO: 1533758 - RNA, 21 nt, Human adenovirus A
uguaucuggacauccauguga

SEQ ID NO: 1533759 - RNA, 22 nt, Human adenovirus A
uucauguggucaggucuaucaa

SEQ ID NO: 1533760 - RNA, 21 nt, Human adenovirus A
auuacacucaggccauaaaga

SEQ ID NO: 1533761 - RNA, 22 nt, Human adenovirus A
cuuuauauugcauuuguccugu

SEQ ID NO: 1533762 - RNA, 19 nt, Human adenovirus A
acgagcucccggaggaagc

SEQ ID NO: 1533763 - RNA, 13 nt, Human adenovirus A
aaauuacacacua

SEQ ID NO: 1533764 - RNA, 19 nt, Human adenovirus A
uuuauaaccaaucuacaaa

SEQ ID NO: 1533765 - RNA, 18 nt, Human adenovirus A
aauuauugcuuuccucuu

SEQ ID NO: 1533766 - RNA, 23 nt, Human adenovirus A
agucucacguacuuacagggaga

SEQ ID NO: 1533767 - RNA, 22 nt, Human adenovirus A
ugagcgcugcggucuggggugc

SEQ ID NO: 1533768 - RNA, 15 nt, Human adenovirus A
cuuacucuauugcca

SEQ ID NO: 1533769 - RNA, 16 nt, Human adenovirus A
agguauuccuccuuau

SEQ ID NO: 1533770 - RNA, 17 nt, Human adenovirus A
caccaguuggaagaaug

SEQ ID NO: 1533771 - RNA, 18 nt, Human adenovirus A
guuuaacgaggugcagcu

SEQ ID NO: 1533772 - RNA, 18 nt, Human adenovirus A
ucuuacaugggcaucuug

SEQ ID NO: 1533773 - RNA, 22 nt, Human adenovirus A
uuuaagucgagauucauaccug

SEQ ID NO: 1533774 - RNA, 15 nt, Human adenovirus A
acccuccguguuccc

SEQ ID NO: 1533775 - RNA, 19 nt, Human adenovirus A
accuuuaguauagguauug

SEQ ID NO: 1533776 - RNA, 17 nt, Human adenovirus A
ccaugaaaacagcauua

SEQ ID NO: 1533777 - RNA, 19 nt, Human adenovirus A
uuuguccaguuuacuaaca

SEQ ID NO: 1533778 - RNA, 22 nt, Human adenovirus A
ucaaagaagagcugcugcaggc

SEQ ID NO: 1533779 - RNA, 18 nt, Human adenovirus A
aaaggaagcugcuguucu

SEQ ID NO: 1533780 - RNA, 20 nt, Human adenovirus A
uaacauguuuaugcgcugua

SEQ ID NO: 1533781 - RNA, 14 nt, Human adenovirus A
aacagacgcucucc

SEQ ID NO: 1533782 - RNA, 13 nt, Human adenovirus A
aguucaaacagug

SEQ ID NO: 1533783 - RNA, 21 nt, Human adenovirus A
uuuggcggccaugcaaagcca

SEQ ID NO: 1533784 - RNA, 21 nt, Human adenovirus A
caaugcuuggaagaaaaaaac

SEQ ID NO: 1533785 - RNA, 20 nt, Human adenovirus A
gccaacaucaugaaaacagc

SEQ ID NO: 1533786 - RNA, 15 nt, Human adenovirus A
acgauaccacucgag

SEQ ID NO: 1533787 - RNA, 20 nt, Human adenovirus A
gacccgauuacuuuuuucaa

SEQ ID NO: 1533788 - RNA, 22 nt, Human adenovirus A
acaucuacagcgacaaagcacu

SEQ ID NO: 1533789 - RNA, 23 nt, Human adenovirus A
uguccuacauuggaguuggaaga

SEQ ID NO: 1533790 - RNA, 19 nt, Human adenovirus A
augcuuuucgccagcagcc

SEQ ID NO: 1533791 - RNA, 19 nt, Human adenovirus A
gcugcaguuugucauuacu

SEQ ID NO: 1533792 - RNA, 15 nt, Human adenovirus A
cucagaaagccaacc

SEQ ID NO: 1533793 - RNA, 22 nt, Human adenovirus A
ucccauagcucaguuauauuuu

SEQ ID NO: 1533794 - RNA, 17 nt, Human adenovirus A
guagugggcacauugca

SEQ ID NO: 1533795 - RNA, 15 nt, Human adenovirus A
ucagauagcaagcgu

SEQ ID NO: 1533796 - RNA, 20 nt, Human adenovirus A
ggaguuggaagaaggagaag

SEQ ID NO: 1533797 - RNA, 21 nt, Human adenovirus A
agcugccgucuucguggagaa

SEQ ID NO: 1533798 - RNA, 20 nt, Human adenovirus A
gggcagcccaacccuuccca

SEQ ID NO: 1533799 - RNA, 23 nt, Human adenovirus A
uacugaaaaauagugacguaaau

SEQ ID NO: 1533800 - RNA, 17 nt, Human adenovirus A
aaagcauaauaugguuu

SEQ ID NO: 1533801 - RNA, 19 nt, Human adenovirus A
agugccagaagcacuggca

SEQ ID NO: 1533802 - RNA, 15 nt, Human adenovirus A
caaacuuucuccaaa

SEQ ID NO: 1533803 - RNA, 12 nt, Human adenovirus A
agaugccuggca

SEQ ID NO: 1533804 - RNA, 21 nt, Human adenovirus A
gaacggaacuacucagaacaa

SEQ ID NO: 1533805 - RNA, 19 nt, Human adenovirus A
aauaguggcugcaagguca

SEQ ID NO: 1533806 - RNA, 21 nt, Human adenovirus A
cagccgaaagaccacuaaaag

SEQ ID NO: 1533807 - RNA, 14 nt, Human adenovirus A
aacacaugucuccu

SEQ ID NO: 1533808 - RNA, 20 nt, Human adenovirus A
ccuugcagcgguuguaauaa

SEQ ID NO: 1533809 - RNA, 23 nt, Human adenovirus A
cuccguguucccacaguaggaag

SEQ ID NO: 1533810 - RNA, 22 nt, Human adenovirus A
uaccgcucgucaagccuaccug

SEQ ID NO: 1533811 - RNA, 22 nt, Human adenovirus A
cuuguucuuccucuucuaccuc

SEQ ID NO: 1533812 - RNA, 18 nt, Human adenovirus A
guggaucuccugccacca

SEQ ID NO: 1533813 - RNA, 23 nt, Human adenovirus A
uacgcagggaaaaauucuagccc

SEQ ID NO: 1533814 - RNA, 13 nt, Human adenovirus A
guggagccacugc

SEQ ID NO: 1533815 - RNA, 20 nt, Human adenovirus A
caaugaauaagccaccgcuc

SEQ ID NO: 1533816 - RNA, 15 nt, Human adenovirus A
aucaguguaaaaaag

SEQ ID NO: 1533817 - RNA, 17 nt, Human adenovirus A
ucugugagugcugauug

SEQ ID NO: 1533818 - RNA, 20 nt, Human adenovirus A
cucauuugcgcccagacgua

SEQ ID NO: 1533819 - RNA, 20 nt, Human adenovirus A
cagacuacguuuuacauccu

SEQ ID NO: 1533820 - RNA, 17 nt, Human adenovirus A
ugaaagaucacagccag

SEQ ID NO: 1533821 - RNA, 19 nt, Human adenovirus A
aagcuauuugagccuucau

SEQ ID NO: 1533822 - RNA, 20 nt, Human adenovirus A
aagaaagagaacaaacagug

SEQ ID NO: 1533823 - RNA, 23 nt, Human adenovirus A
guuacuucguugauaucaauguu

SEQ ID NO: 1533824 - RNA, 20 nt, Human adenovirus A
uggaacucgagugcaugcau

SEQ ID NO: 1533825 - RNA, 21 nt, Human adenovirus A
ugcuggugaaagaucacagcc

SEQ ID NO: 1533826 - RNA, 14 nt, Human adenovirus A
cuauugcgcagcaa

SEQ ID NO: 1533827 - RNA, 21 nt, Human adenovirus A
agucacucaagcggcauuccc

SEQ ID NO: 1533828 - RNA, 13 nt, Human adenovirus A
cucuuuaacauuc

SEQ ID NO: 1533829 - RNA, 23 nt, Human adenovirus A
aacuaguuuacccgccaguguua

SEQ ID NO: 1533830 - RNA, 20 nt, Human adenovirus A
aaugccuguuuuguauuauu

SEQ ID NO: 1533831 - RNA, 18 nt, Human adenovirus A
cauuacuuuuaaauacug

SEQ ID NO: 1533832 - RNA, 13 nt, Human adenovirus A
gaguuagaggaaa

SEQ ID NO: 1533833 - RNA, 17 nt, Human adenovirus A
gcagucugacagcaauu

SEQ ID NO: 1533834 - RNA, 21 nt, Human adenovirus A
ucggcuguauacuaccccucc

SEQ ID NO: 1533835 - RNA, 14 nt, Human adenovirus A
agcuccauggggcg

SEQ ID NO: 1533836 - RNA, 11 nt, Human adenovirus A
ccaugcaaagc

SEQ ID NO: 1533837 - RNA, 16 nt, Human adenovirus A
uugcuaaauuggccuu

SEQ ID NO: 1533838 - RNA, 22 nt, Human adenovirus A
gaacaguaucuggagcggucuu

SEQ ID NO: 1533839 - RNA, 14 nt, Human adenovirus A
cuccgacaacagcu

SEQ ID NO: 1533840 - RNA, 17 nt, Human adenovirus A
uggcagcggcgccaccc

SEQ ID NO: 1533841 - RNA, 13 nt, Human adenovirus A
cggaggaaagggc

SEQ ID NO: 1533842 - RNA, 20 nt, Human adenovirus A
agcaaaaauguuuucuggau

SEQ ID NO: 1533843 - RNA, 21 nt, Human adenovirus A
caccgccaugcgcgcggccag

SEQ ID NO: 1533844 - RNA, 19 nt, Human adenovirus A
ggucagauucuucuuccca

SEQ ID NO: 1533845 - RNA, 16 nt, Human adenovirus A
cuaccgucaucucuac

SEQ ID NO: 1533846 - RNA, 21 nt, Human adenovirus A
cauguaucagcagccaacuua

SEQ ID NO: 1533847 - RNA, 12 nt, Human adenovirus A
ccuaccacugua

SEQ ID NO: 1533848 - RNA, 14 nt, Human adenovirus A
uuuuguuagaugca

SEQ ID NO: 1533849 - RNA, 13 nt, Human adenovirus A
caacgaaggccaa

SEQ ID NO: 1533850 - RNA, 18 nt, Human adenovirus A
ccaacuuaacgcaguagu

SEQ ID NO: 1533851 - RNA, 22 nt, Human adenovirus A
guucaacaacagcuucuaaaag

SEQ ID NO: 1533852 - RNA, 21 nt, Human adenovirus A
gcagcuccaaccaugaaaaca

SEQ ID NO: 1533853 - RNA, 19 nt, Human adenovirus A
uggagccacaggaaagcuu

SEQ ID NO: 1533854 - RNA, 21 nt, Human adenovirus A
cccucgaugaugccgcagugg

SEQ ID NO: 1533855 - RNA, 14 nt, Human adenovirus A
guuccauggcuucg

SEQ ID NO: 1533856 - RNA, 20 nt, Human adenovirus A
cuaccugacacuacagagcu

SEQ ID NO: 1533857 - RNA, 18 nt, Human adenovirus A
caaacgauuauugucaca

SEQ ID NO: 1533858 - RNA, 20 nt, Human adenovirus A
uggccauaauguaacccuuc

SEQ ID NO: 1533859 - RNA, 16 nt, Human adenovirus A
agguguuaucuucaaa

SEQ ID NO: 1533860 - RNA, 16 nt, Human adenovirus A
aaacaacaaaacacug

SEQ ID NO: 1533861 - RNA, 22 nt, Human adenovirus A
augccagacacgcaucuugugu

SEQ ID NO: 1533862 - RNA, 16 nt, Human adenovirus A
ggaacagacaccgccc

SEQ ID NO: 1533863 - RNA, 12 nt, Human adenovirus A
uugggacagaac

SEQ ID NO: 1533864 - RNA, 19 nt, Human adenovirus A
accccaagauuaccacgcc

SEQ ID NO: 1533865 - RNA, 18 nt, Human adenovirus A
caagcacgccaaagccac

SEQ ID NO: 1533866 - RNA, 16 nt, Human adenovirus A
agcgaugacucagcug

SEQ ID NO: 1533867 - RNA, 13 nt, Human adenovirus A
accaaagccaugg

SEQ ID NO: 1533868 - RNA, 15 nt, Human adenovirus A
ugaaggcauuuaagg

SEQ ID NO: 1533869 - RNA, 23 nt, Human adenovirus A
ucacuuacauuauguaaagucag

SEQ ID NO: 1533870 - RNA, 18 nt, Human adenovirus A
aagaucuucguaggaaag

SEQ ID NO: 1533871 - RNA, 20 nt, Human adenovirus A
aaauacacauaaagagucuc

SEQ ID NO: 1533872 - RNA, 21 nt, Human adenovirus A
cuaagaaggcacccucccaga

SEQ ID NO: 1533873 - RNA, 17 nt, Human adenovirus A
uaaacaaaagcaaagca

SEQ ID NO: 1533874 - RNA, 15 nt, Human adenovirus A
uucuucgacuuuugc

SEQ ID NO: 1533875 - RNA, 13 nt, Human adenovirus A
aaggagaaaagcg

SEQ ID NO: 1533876 - RNA, 12 nt, Human adenovirus A
uaauugauuuac

SEQ ID NO: 1533877 - RNA, 18 nt, Human adenovirus A
agccgucuacucacagcu

SEQ ID NO: 1533878 - RNA, 16 nt, Human adenovirus A
agaucuucguaggaaa

SEQ ID NO: 1533879 - RNA, 16 nt, Human adenovirus A
cuucuuguacucaaau

SEQ ID NO: 1533880 - RNA, 18 nt, Human adenovirus A
ggcguuagcguccacaca

SEQ ID NO: 1533881 - RNA, 12 nt, Human adenovirus A
uuacucugcuaa

SEQ ID NO: 1533882 - RNA, 16 nt, Human adenovirus A
cugucaacagcauugg

SEQ ID NO: 1533883 - RNA, 13 nt, Human adenovirus A
cagcuaacgccac

SEQ ID NO: 1533884 - RNA, 22 nt, Human adenovirus A
uggguccuacggagggaagaaa

SEQ ID NO: 1533885 - RNA, 17 nt, Human adenovirus A
aaaaaucaaauggcucu

SEQ ID NO: 1533886 - RNA, 16 nt, Human adenovirus A
auucagcuaacaaugc

SEQ ID NO: 1533887 - RNA, 20 nt, Human adenovirus A
acuccauaaggcggcguccu

SEQ ID NO: 1533888 - RNA, 11 nt, Human adenovirus A
uacaaggcauu

SEQ ID NO: 1533889 - RNA, 24 nt, Human adenovirus A
gacagcuuuuauaugcgcauggcu

SEQ ID NO: 1533890 - RNA, 20 nt, Human adenovirus A
uuauucgauccauuuggauu

SEQ ID NO: 1533891 - RNA, 23 nt, Human adenovirus A
aagacgcaccgguugagcagaac

SEQ ID NO: 1533892 - RNA, 13 nt, Human adenovirus A
cauugcaacgcaa

SEQ ID NO: 1533893 - RNA, 11 nt, Human adenovirus A
ggaaaacuuuu

SEQ ID NO: 1533894 - RNA, 17 nt, Human adenovirus A
acuacagacaaacaagu

SEQ ID NO: 1533895 - RNA, 14 nt, Human adenovirus A
ccacacaucucacc

SEQ ID NO: 1533896 - RNA, 19 nt, Human adenovirus A
caacaauggcauagaaagu

SEQ ID NO: 1533897 - RNA, 20 nt, Human adenovirus A
uuuaaaggcauuauguucga

SEQ ID NO: 1533898 - RNA, 23 nt, Human adenovirus A
gucccgcccgcguuuggaaacug

SEQ ID NO: 1533899 - RNA, 16 nt, Human adenovirus A
cgucgccagcaagugc

SEQ ID NO: 1533900 - RNA, 20 nt, Human adenovirus A
acaacacggaguaaugaaca

SEQ ID NO: 1533901 - RNA, 14 nt, Human adenovirus A
augauggaaagccg

SEQ ID NO: 1533902 - RNA, 13 nt, Human adenovirus A
caguuucuggagc

SEQ ID NO: 1533903 - RNA, 21 nt, Human adenovirus A
gaucaauuucuuccuccugga

SEQ ID NO: 1533904 - RNA, 15 nt, Human adenovirus A
ugcucagcuggaaga

SEQ ID NO: 1533905 - RNA, 13 nt, Human adenovirus A
aauccacaaagca

SEQ ID NO: 1533906 - RNA, 15 nt, Human adenovirus A
gcggccacggccgga

SEQ ID NO: 1533907 - RNA, 12 nt, Human adenovirus A
aggcaacagaug

SEQ ID NO: 1533908 - RNA, 20 nt, Human adenovirus A
ccaaugaaacccgcugugag

SEQ ID NO: 1533909 - RNA, 16 nt, Human adenovirus A
ggcgaggaacuaaacc

SEQ ID NO: 1533910 - RNA, 22 nt, Human adenovirus A
acaaugaaaguugcauuuaaug

SEQ ID NO: 1533911 - RNA, 20 nt, Human adenovirus A
cagcagugcggccuguugcc

SEQ ID NO: 1533912 - RNA, 22 nt, Human adenovirus A
augugcaaauauaaaagcacaa

SEQ ID NO: 1533913 - RNA, 20 nt, Human adenovirus A
cuuaauaguucaacauagua

SEQ ID NO: 1533914 - RNA, 15 nt, Human adenovirus A
uacauaauccagcaa

SEQ ID NO: 1533915 - RNA, 23 nt, Human adenovirus A
gcuacaucuuuuacuaaaaugca

SEQ ID NO: 1533916 - RNA, 16 nt, Human adenovirus A
gaaacuuucagcccau

SEQ ID NO: 1533917 - RNA, 14 nt, Human adenovirus A
aauugcagaacuau

SEQ ID NO: 1533918 - RNA, 16 nt, Human adenovirus A
agagucaggcagagga

SEQ ID NO: 1533919 - RNA, 20 nt, Human adenovirus A
caaguugacuucgcacaggc

SEQ ID NO: 1533920 - RNA, 23 nt, Human adenovirus A
cuaguucuugucaacuacauaaa

SEQ ID NO: 1533921 - RNA, 22 nt, Human adenovirus A
cuaaaagagccacagcucugau

SEQ ID NO: 1533922 - RNA, 14 nt, Human adenovirus A
ccugcgguggugga

SEQ ID NO: 1533923 - RNA, 12 nt, Human adenovirus A
ccgcaaaacagg

SEQ ID NO: 1533924 - RNA, 12 nt, Human adenovirus A
augcaaagccag

SEQ ID NO: 1533925 - RNA, 16 nt, Human adenovirus A
aacaucgcaaaacacg

SEQ ID NO: 1533926 - RNA, 14 nt, Human adenovirus A
ugcuguucuuagua

SEQ ID NO: 1533927 - RNA, 12 nt, Human adenovirus A
agccuggauaaa

SEQ ID NO: 1533928 - RNA, 22 nt, Human adenovirus A
ugcgacaaaugcgaccucagcc

SEQ ID NO: 1533929 - RNA, 17 nt, Human adenovirus A
aacaauugcuucugagu

SEQ ID NO: 1533930 - RNA, 14 nt, Human adenovirus A
aaugcaaaauggac

SEQ ID NO: 1533931 - RNA, 18 nt, Human adenovirus A
gucuacaacugcuccccu

SEQ ID NO: 1533932 - RNA, 23 nt, Human adenovirus A
aacugcuccccucaacagcacag

SEQ ID NO: 1533933 - RNA, 17 nt, Human adenovirus A
guaugcugaagaaacag

SEQ ID NO: 1533934 - RNA, 19 nt, Human adenovirus A
cgggcuguaucuguugaau

SEQ ID NO: 1533935 - RNA, 21 nt, Human adenovirus A
aaauggauacucuuuaacauu

SEQ ID NO: 1533936 - RNA, 22 nt, Human adenovirus A
cuucucccugugcuucggcaag

SEQ ID NO: 1533937 - RNA, 15 nt, Human adenovirus A
auagguauugauaaa

SEQ ID NO: 1533938 - RNA, 22 nt, Human adenovirus A
gccaacaaaacuuaucagccag

SEQ ID NO: 1533939 - RNA, 19 nt, Human adenovirus A
acuguaugcgcgccuuaau

SEQ ID NO: 1533940 - RNA, 20 nt, Human adenovirus A
aucucacuuaagucuuuaca

SEQ ID NO: 1533941 - RNA, 17 nt, Human adenovirus A
uaacacaagagcgcccu

SEQ ID NO: 1533942 - RNA, 15 nt, Human adenovirus A
cagcaauuacuugaa

SEQ ID NO: 1533943 - RNA, 22 nt, Human adenovirus A
auauuguagccugcuuucagca

SEQ ID NO: 1533944 - RNA, 13 nt, Human adenovirus A
gcaaggcgccgca

SEQ ID NO: 1533945 - RNA, 15 nt, Human adenovirus A
ccuguggcaccugca

SEQ ID NO: 1533946 - RNA, 20 nt, Human adenovirus A
aaacaguauugugggacugg

SEQ ID NO: 1533947 - RNA, 15 nt, Human adenovirus A
uaggcaauuucugcc

SEQ ID NO: 1533948 - RNA, 15 nt, Human adenovirus A
accgcucgucaagcc

SEQ ID NO: 1533949 - RNA, 12 nt, Human adenovirus A
ggcuccacaccu

SEQ ID NO: 1533950 - RNA, 17 nt, Human adenovirus A
gccauuuugaaccagcg

SEQ ID NO: 1533951 - RNA, 17 nt, Human adenovirus A
caucagccgcccaagga

SEQ ID NO: 1533952 - RNA, 20 nt, Human adenovirus A
aggcguagaugugcugugga

SEQ ID NO: 1533953 - RNA, 13 nt, Human adenovirus A
gauugggaguuca

SEQ ID NO: 1533954 - RNA, 20 nt, Human adenovirus A
accaccgaucgcucgcagcg

SEQ ID NO: 1533955 - RNA, 20 nt, Human adenovirus A
acucuccaauuuguggagga

SEQ ID NO: 1533956 - RNA, 20 nt, Human adenovirus A
cuguuacauaccuggcaaac

SEQ ID NO: 1533957 - RNA, 16 nt, Human adenovirus A
gaaaugguaggacgcu

SEQ ID NO: 1533958 - RNA, 17 nt, Human adenovirus A
uaaaguaaauuaaaugg

SEQ ID NO: 1533959 - RNA, 16 nt, Human adenovirus A
auuguuaacacugccg

SEQ ID NO: 1533960 - RNA, 21 nt, Human adenovirus A
caccaugguaaaaaggaagca

SEQ ID NO: 1533961 - RNA, 21 nt, Human adenovirus A
caaugcagcuguggagggcau

SEQ ID NO: 1533962 - RNA, 19 nt, Human adenovirus A
aacagcaaacuuucuccaa

SEQ ID NO: 1533963 - RNA, 20 nt, Human adenovirus A
ucaccgcgcugcggccauga

SEQ ID NO: 1533964 - RNA, 14 nt, Human adenovirus A
uccaauuuguggag

SEQ ID NO: 1533965 - RNA, 18 nt, Human adenovirus A
cauguuaagaaaugacac

SEQ ID NO: 1533966 - RNA, 20 nt, Human adenovirus A
gagcuacgcaguuuuucuac

SEQ ID NO: 1533967 - RNA, 18 nt, Human adenovirus A
ucaaacauuaugcuggaa

SEQ ID NO: 1533968 - RNA, 17 nt, Human adenovirus A
accuuugcucaggcgcc

SEQ ID NO: 1533969 - RNA, 12 nt, Human adenovirus A
cccccuccugga

SEQ ID NO: 1533970 - RNA, 22 nt, Human adenovirus A
cuaugacccuugagcugccucc

SEQ ID NO: 1533971 - RNA, 18 nt, Human adenovirus A
ugaguugggauuacaugc

SEQ ID NO: 1533972 - RNA, 17 nt, Human adenovirus A
cccaacuuaacgcagua

SEQ ID NO: 1533973 - RNA, 23 nt, Human adenovirus A
ucucaaaagcagccauaaugccu

SEQ ID NO: 1533974 - RNA, 13 nt, Human adenovirus A
cugaaagaaaguu

SEQ ID NO: 1533975 - RNA, 21 nt, Human adenovirus A
cugacagagcgcggcugcgac

SEQ ID NO: 1533976 - RNA, 14 nt, Human adenovirus A
cauuuguauucaua

SEQ ID NO: 1533977 - RNA, 22 nt, Human adenovirus A
cacuucauuuuaauauuggcac

SEQ ID NO: 1533978 - RNA, 15 nt, Human adenovirus A
agagaacaaacagug

SEQ ID NO: 1533979 - RNA, 13 nt, Human adenovirus A
ugggcacauugca

SEQ ID NO: 1533980 - RNA, 14 nt, Human adenovirus A
cuuaagcagugaaa

SEQ ID NO: 1533981 - RNA, 19 nt, Human adenovirus A
cucaaaagcgaagaucagu

SEQ ID NO: 1533982 - RNA, 19 nt, Human adenovirus A
acgaggauccagaggagga

SEQ ID NO: 1533983 - RNA, 14 nt, Human adenovirus A
gucagauucuucuu

SEQ ID NO: 1533984 - RNA, 18 nt, Human adenovirus A
gaucggcacgagccagcu

SEQ ID NO: 1533985 - RNA, 24 nt, Human adenovirus A
aggugcaagaaggccauguacuug

SEQ ID NO: 1533986 - RNA, 11 nt, Human adenovirus A
guuaaauuaaa

SEQ ID NO: 1533987 - RNA, 21 nt, Human adenovirus A
uucuuaguaggcuaacuguua

SEQ ID NO: 1533988 - RNA, 18 nt, Human adenovirus A
aagucaacccaaacugua

SEQ ID NO: 1533989 - RNA, 14 nt, Human adenovirus A
ccuccuuauccuuc

SEQ ID NO: 1533990 - RNA, 16 nt, Human adenovirus A
gaacgacgaagucaca

SEQ ID NO: 1533991 - RNA, 17 nt, Human adenovirus A
acagacuugcaaacagc

SEQ ID NO: 1533992 - RNA, 16 nt, Human adenovirus A
cacgcgcucaaaggca

SEQ ID NO: 1533993 - RNA, 13 nt, Human adenovirus A
uuauguaugaaca

SEQ ID NO: 1533994 - RNA, 14 nt, Human adenovirus A
gcggcguccuuucu

SEQ ID NO: 1533995 - RNA, 21 nt, Human adenovirus A
cagagcacacugggaaaugau

SEQ ID NO: 1533996 - RNA, 17 nt, Human adenovirus A
ugggccuucggaagaaa

SEQ ID NO: 1533997 - RNA, 15 nt, Human adenovirus A
acuccaucuguuuac

SEQ ID NO: 1533998 - RNA, 14 nt, Human adenovirus A
augaauuaaauaaa

SEQ ID NO: 1533999 - RNA, 16 nt, Human adenovirus A
aguucuguuucaugua

SEQ ID NO: 1534000 - RNA, 11 nt, Human adenovirus A
auuuaggacac

SEQ ID NO: 1534001 - RNA, 17 nt, Human adenovirus A
agagucaggcagaggac

SEQ ID NO: 1534002 - RNA, 13 nt, Human adenovirus A
ucagccagagccg

SEQ ID NO: 1534003 - RNA, 13 nt, Human adenovirus A
gcucagcuggaag

SEQ ID NO: 1534004 - RNA, 14 nt, Human adenovirus A
cuccuuauccuucc

SEQ ID NO: 1534005 - RNA, 20 nt, Human adenovirus A
ucgagaucuaggcuguggac

SEQ ID NO: 1534006 - RNA, 11 nt, Human adenovirus A
aaaaauguuuu

SEQ ID NO: 1534007 - RNA, 20 nt, Human adenovirus A
accaaaaacaccuuuuguua

SEQ ID NO: 1534008 - RNA, 16 nt, Human adenovirus A
aggguggggugcugcc

SEQ ID NO: 1534009 - RNA, 18 nt, Human adenovirus A
gccuuaaauaaggcugcu

SEQ ID NO: 1534010 - RNA, 23 nt, Human adenovirus A
cgaaaaaaaucacuuccgcauau

SEQ ID NO: 1534011 - RNA, 18 nt, Human adenovirus A
uuaagaaaacgcauuuuu

SEQ ID NO: 1534012 - RNA, 20 nt, Human adenovirus A
acgcagaagcucuguucaau

SEQ ID NO: 1534013 - RNA, 17 nt, Human adenovirus A
aguggcacaacacauac

SEQ ID NO: 1534014 - RNA, 16 nt, Human adenovirus A
aaccaaucuacaaacu

SEQ ID NO: 1534015 - RNA, 14 nt, Human adenovirus A
acuuuaauguuuca

SEQ ID NO: 1534016 - RNA, 13 nt, Human adenovirus A
ugaaaguagaaau

SEQ ID NO: 1534017 - RNA, 15 nt, Human adenovirus A
caaacuuacaagcac

SEQ ID NO: 1534018 - RNA, 18 nt, Human adenovirus A
cugaucuagaaauugaug

SEQ ID NO: 1534019 - RNA, 21 nt, Human adenovirus A
augaccguuugcuaaccccaa

SEQ ID NO: 1534020 - RNA, 20 nt, Human adenovirus A
cagcauguccccgaaagccg

SEQ ID NO: 1534021 - RNA, 19 nt, Human adenovirus A
accacggccucagcagcgg

SEQ ID NO: 1534022 - RNA, 13 nt, Human adenovirus A
ccuggauaaagcg

SEQ ID NO: 1534023 - RNA, 15 nt, Human adenovirus A
uccaacugauuuuca

SEQ ID NO: 1534024 - RNA, 18 nt, Human adenovirus A
ccgucuucguggagaagc

SEQ ID NO: 1534025 - RNA, 11 nt, Human adenovirus A
augaauuaaau

SEQ ID NO: 1534026 - RNA, 16 nt, Human adenovirus A
uacuaaaagcuuuaau

SEQ ID NO: 1534027 - RNA, 19 nt, Human adenovirus A
gacaacauccuuuuucuac

SEQ ID NO: 1534028 - RNA, 18 nt, Human adenovirus A
agcagguguaaccagcug

SEQ ID NO: 1534029 - RNA, 14 nt, Human adenovirus A
gaucagaaaaaacu

SEQ ID NO: 1534030 - RNA, 22 nt, Human adenovirus A
uucuagaacaaaaaggaggaag

SEQ ID NO: 1534031 - RNA, 17 nt, Human adenovirus A
cacaucgccggucagga

SEQ ID NO: 1534032 - RNA, 16 nt, Human adenovirus A
ucaggcagaggacgag

SEQ ID NO: 1534033 - RNA, 17 nt, Human adenovirus A
guacgcagacgaugaca

SEQ ID NO: 1534034 - RNA, 15 nt, Human adenovirus A
acacagcguuccaga

SEQ ID NO: 1534035 - RNA, 15 nt, Human adenovirus A
aaugcagcaaacacu

SEQ ID NO: 1534036 - RNA, 22 nt, Human adenovirus A
cuuggaagaaugggaggaggag

SEQ ID NO: 1534037 - RNA, 19 nt, Human adenovirus A
guccucagguagugggcac

SEQ ID NO: 1534038 - RNA, 14 nt, Human adenovirus A
caaaugagcaaaac

SEQ ID NO: 1534039 - RNA, 22 nt, Human adenovirus A
acaucagacguacccuuuguua

SEQ ID NO: 1534040 - RNA, 14 nt, Human adenovirus A
ccuuagaagacaaa

SEQ ID NO: 1534041 - RNA, 16 nt, Human adenovirus A
gcagcaacaaggaaag

SEQ ID NO: 1534042 - RNA, 23 nt, Human adenovirus A
gaugcauaauuaaacccuuuagc

SEQ ID NO: 1534043 - RNA, 14 nt, Human adenovirus A
acugcagccugucu

SEQ ID NO: 1534044 - RNA, 19 nt, Human adenovirus A
cugauauuaguaccgaaaa

SEQ ID NO: 1534045 - RNA, 20 nt, Human adenovirus A
caaaagauccguacaaggca

SEQ ID NO: 1534046 - RNA, 23 nt, Human adenovirus A
gucauagcaacaacgcugggcau

SEQ ID NO: 1534047 - RNA, 20 nt, Human adenovirus A
uaauugaguaacuucaacau

SEQ ID NO: 1534048 - RNA, 21 nt, Human adenovirus A
caacaaaacuuaucagccaga

SEQ ID NO: 1534049 - RNA, 23 nt, Human adenovirus A
agcauuaguucuuuucuuuaugu

SEQ ID NO: 1534050 - RNA, 17 nt, Human adenovirus A
gaccggauggguacaga

SEQ ID NO: 1534051 - RNA, 17 nt, Human adenovirus A
gcuuucaagauggccac

SEQ ID NO: 1534052 - RNA, 13 nt, Human adenovirus A
gccgcagagagcu

SEQ ID NO: 1534053 - RNA, 19 nt, Human adenovirus A
acucuccaauuuguggagg

SEQ ID NO: 1534054 - RNA, 16 nt, Human adenovirus A
uaaaaaaacaaaacca

SEQ ID NO: 1534055 - RNA, 20 nt, Human adenovirus A
gucaucguaggacaacuuaa

SEQ ID NO: 1534056 - RNA, 16 nt, Human adenovirus A
caaagccacaccucca

SEQ ID NO: 1534057 - RNA, 14 nt, Human adenovirus A
cccggcguaaccaa

SEQ ID NO: 1534058 - RNA, 12 nt, Human adenovirus A
gacucagugacc

SEQ ID NO: 1534059 - RNA, 20 nt, Human adenovirus A
aauaaucaauuuugcaagug

SEQ ID NO: 1534060 - RNA, 23 nt, Human adenovirus A
gcccccuaaacggcaagccaacg

SEQ ID NO: 1534061 - RNA, 18 nt, Human adenovirus A
cauaccugggucacuuag

SEQ ID NO: 1534062 - RNA, 17 nt, Human adenovirus A
aaagcuaaaucugccac

SEQ ID NO: 1534063 - RNA, 22 nt, Human adenovirus A
ccagcguucgcuuugacaacau

SEQ ID NO: 1534064 - RNA, 16 nt, Human adenovirus A
cuuacauaccaacaug

SEQ ID NO: 1534065 - RNA, 16 nt, Human adenovirus A
gauuaugguucagcuu

SEQ ID NO: 1534066 - RNA, 20 nt, Human adenovirus A
uaaucgccccgcugcaauuu

SEQ ID NO: 1534067 - RNA, 12 nt, Human adenovirus A
acauaggcauug

SEQ ID NO: 1534068 - RNA, 14 nt, Human adenovirus A
gagcugcugcaggc

SEQ ID NO: 1534069 - RNA, 12 nt, Human adenovirus A
aaguuuaaaggc

SEQ ID NO: 1534070 - RNA, 20 nt, Human adenovirus A
cgcagacgaugacauuuugg

SEQ ID NO: 1534071 - RNA, 15 nt, Human adenovirus A
aaauacacauaaaga

SEQ ID NO: 1534072 - RNA, 11 nt, Human adenovirus A
gugacuuccca

SEQ ID NO: 1534073 - RNA, 15 nt, Human adenovirus A
gcccuauccgucucc

SEQ ID NO: 1534074 - RNA, 24 nt, Human adenovirus A
gcugacauaauuuucccagaaagg

SEQ ID NO: 1534075 - RNA, 14 nt, Human adenovirus A
agguggcuggacug

SEQ ID NO: 1534076 - RNA, 21 nt, Human adenovirus A
uaccaagguuuuuacauucca

SEQ ID NO: 1534077 - RNA, 20 nt, Human adenovirus A
ucaugguuugcuaacagcuc

SEQ ID NO: 1534078 - RNA, 18 nt, Human adenovirus A
ugcccugcaaaaagaaaa

SEQ ID NO: 1534079 - RNA, 21 nt, Human adenovirus A
augccuaaugugagugcuuac

SEQ ID NO: 1534080 - RNA, 16 nt, Human adenovirus A
uuuaauuaacauucug

SEQ ID NO: 1534081 - RNA, 17 nt, Human adenovirus A
cagccgcuaccaucacu

SEQ ID NO: 1534082 - RNA, 23 nt, Human adenovirus A
ugcagggaccgcagucugacagc

SEQ ID NO: 1534083 - RNA, 22 nt, Human adenovirus A
aaugcaucuuugggacuuugua

SEQ ID NO: 1534084 - RNA, 20 nt, Human adenovirus A
aggggucuauccuucagugg

SEQ ID NO: 1534085 - RNA, 14 nt, Human adenovirus A
gaaguaagcuguuu

SEQ ID NO: 1534086 - RNA, 18 nt, Human adenovirus A
aaacucagcccaugcucu

SEQ ID NO: 1534087 - RNA, 17 nt, Human adenovirus A
auaccuuaaaaacuguu

SEQ ID NO: 1534088 - RNA, 19 nt, Human adenovirus A
cauaaggagacguuuuugc

SEQ ID NO: 1534089 - RNA, 15 nt, Human adenovirus A
cgugauggcagcggc

SEQ ID NO: 1534090 - RNA, 22 nt, Human adenovirus A
caugcgggggaugaaggaagcg

SEQ ID NO: 1534091 - RNA, 14 nt, Human adenovirus A
ccauuugacacauc

SEQ ID NO: 1534092 - RNA, 22 nt, Human adenovirus A
uucuccaaaucuuaaauggaag

SEQ ID NO: 1534093 - RNA, 13 nt, Human adenovirus A
acugaagugccuc

SEQ ID NO: 1534094 - RNA, 19 nt, Human adenovirus A
uggaucguauuauggcuuu

SEQ ID NO: 1534095 - RNA, 17 nt, Human adenovirus A
auaccuggcaaacuggg

SEQ ID NO: 1534096 - RNA, 23 nt, Human adenovirus A
uggaacucuccaauuuguggagg

SEQ ID NO: 1534097 - RNA, 16 nt, Human adenovirus A
aaaacgagcagcaaau

SEQ ID NO: 1534098 - RNA, 17 nt, Human adenovirus A
aggcuagugcccucaca

SEQ ID NO: 1534099 - RNA, 14 nt, Human adenovirus A
ggcuccgaacaggu

SEQ ID NO: 1534100 - RNA, 21 nt, Human adenovirus A
caucuauaguaaaaaugccag

SEQ ID NO: 1534101 - RNA, 20 nt, Human adenovirus A
uucgcaggcggucugccauu

SEQ ID NO: 1534102 - RNA, 16 nt, Human adenovirus A
cggucgaccuguggca

SEQ ID NO: 1534103 - RNA, 12 nt, Human adenovirus A
gcaucuguucca

SEQ ID NO: 1534104 - RNA, 12 nt, Human adenovirus A
auaauuucccuc

SEQ ID NO: 1534105 - RNA, 15 nt, Human adenovirus A
gaaccugaaagaaag

SEQ ID NO: 1534106 - RNA, 20 nt, Human adenovirus A
aaagcgcagaguauccacac

SEQ ID NO: 1534107 - RNA, 16 nt, Human adenovirus A
aaugaaaguugcauuu

SEQ ID NO: 1534108 - RNA, 22 nt, Human adenovirus A
agugcuuucaacaaaaaaaaag

SEQ ID NO: 1534109 - RNA, 12 nt, Human adenovirus A
gcaaucagaaug

SEQ ID NO: 1534110 - RNA, 14 nt, Human adenovirus A
uacuuuacaaaugc

SEQ ID NO: 1534111 - RNA, 20 nt, Human adenovirus A
augcgugagggugccacccc

SEQ ID NO: 1534112 - RNA, 15 nt, Human adenovirus A
auaggcauugggaau

SEQ ID NO: 1534113 - RNA, 12 nt, Human adenovirus A
aauuacauuuau

SEQ ID NO: 1534114 - RNA, 21 nt, Human adenovirus A
aguucgccuacacaacacaaa

SEQ ID NO: 1534115 - RNA, 19 nt, Human adenovirus A
ccacgccuggguaccgugg

SEQ ID NO: 1534116 - RNA, 20 nt, Human adenovirus A
cuguugaugugaugaaagua

SEQ ID NO: 1534117 - RNA, 20 nt, Human adenovirus A
aguguuuguuugaaaaaugu

SEQ ID NO: 1534118 - RNA, 16 nt, Human adenovirus A
acuuaccaaagccaug

SEQ ID NO: 1534119 - RNA, 17 nt, Human adenovirus A
aggauugggaguucaaa

SEQ ID NO: 1534120 - RNA, 20 nt, Human adenovirus A
aauugggcggcauuuagagg

SEQ ID NO: 1534121 - RNA, 18 nt, Human adenovirus A
ugccucaaagugaagugu

SEQ ID NO: 1534122 - RNA, 21 nt, Human adenovirus A
cuacaucuuuuacuaaaaugc

SEQ ID NO: 1534123 - RNA, 19 nt, Human adenovirus A
ugcuuagucauuacaacau

SEQ ID NO: 1534124 - RNA, 14 nt, Human adenovirus A
auuauuugaacaca

SEQ ID NO: 1534125 - RNA, 23 nt, Human adenovirus A
ucccgcgguuuuggcggccaugc

SEQ ID NO: 1534126 - RNA, 14 nt, Human adenovirus A
uccguggcaggcca

SEQ ID NO: 1534127 - RNA, 21 nt, Human adenovirus A
uguuuggcagcaaugcuugga

SEQ ID NO: 1534128 - RNA, 16 nt, Human adenovirus A
cucauccucagcuccg

SEQ ID NO: 1534129 - RNA, 17 nt, Human adenovirus A
acuucacccugggaaac

SEQ ID NO: 1534130 - RNA, 11 nt, Human adenovirus A
ugccagcucuu

SEQ ID NO: 1534131 - RNA, 13 nt, Human adenovirus A
cucgcagcucuua

SEQ ID NO: 1534132 - RNA, 15 nt, Human adenovirus A
caaaccuagcugcuc

SEQ ID NO: 1534133 - RNA, 22 nt, Human adenovirus A
cugcccugauauaucaggaaaa

SEQ ID NO: 1534134 - RNA, 17 nt, Human adenovirus A
aggcaacagaugaugga

SEQ ID NO: 1534135 - RNA, 15 nt, Human adenovirus A
cugacgauaacguuc

SEQ ID NO: 1534136 - RNA, 18 nt, Human adenovirus A
aggggcacaugcggggga

SEQ ID NO: 1534137 - RNA, 16 nt, Human adenovirus A
caaaucagaagccagc

SEQ ID NO: 1534138 - RNA, 15 nt, Human adenovirus A
uggguuuggauggaa

SEQ ID NO: 1534139 - RNA, 22 nt, Human adenovirus A
ggaguaauaaaaccugugccuc

SEQ ID NO: 1534140 - RNA, 16 nt, Human adenovirus A
ccucacugcuuugcuc

SEQ ID NO: 1534141 - RNA, 14 nt, Human adenovirus A
uggaauaagguuuc

SEQ ID NO: 1534142 - RNA, 15 nt, Human adenovirus A
cauagccccaggucc

SEQ ID NO: 1534143 - RNA, 18 nt, Human adenovirus A
cuaccaccuaucccauga

SEQ ID NO: 1534144 - RNA, 18 nt, Human adenovirus A
gcaaucuaguuucuuaca

SEQ ID NO: 1534145 - RNA, 20 nt, Human adenovirus A
agcucaguuauauuuucuau

SEQ ID NO: 1534146 - RNA, 20 nt, Human adenovirus A
ugcaaguguaauuuuccagc

SEQ ID NO: 1534147 - RNA, 16 nt, Human adenovirus A
caaguguaauuuucca

SEQ ID NO: 1534148 - RNA, 21 nt, Human adenovirus A
aacacguuaccaauacagaua

SEQ ID NO: 1534149 - RNA, 14 nt, Human adenovirus A
cucuucccaacugu

SEQ ID NO: 1534150 - RNA, 12 nt, Human adenovirus A
agagcggcgaga

SEQ ID NO: 1534151 - RNA, 22 nt, Human adenovirus A
cucuaacaaaggugcuucccac

SEQ ID NO: 1534152 - RNA, 16 nt, Human adenovirus A
ucagauuuugugccua

SEQ ID NO: 1534153 - RNA, 13 nt, Human adenovirus A
gucaacuacauaa

SEQ ID NO: 1534154 - RNA, 14 nt, Human adenovirus A
uaggcauuaaaugg

SEQ ID NO: 1534155 - RNA, 12 nt, Human adenovirus A
uuuagguccugu

SEQ ID NO: 1534156 - RNA, 14 nt, Human adenovirus A
caacugauuuucau

SEQ ID NO: 1534157 - RNA, 18 nt, Human adenovirus A
aguaccgcgcgcccgcug

SEQ ID NO: 1534158 - RNA, 23 nt, Human adenovirus A
aaugccuuaccagaaaaacagua

SEQ ID NO: 1534159 - RNA, 14 nt, Human adenovirus A
auaaaauuucuaga

SEQ ID NO: 1534160 - RNA, 22 nt, Human adenovirus A
aauggaacuuuagaaaggaugu

SEQ ID NO: 1534161 - RNA, 20 nt, Human adenovirus A
uaaaagcgugcgcaguguuc

SEQ ID NO: 1534162 - RNA, 14 nt, Human adenovirus A
cuaccugcgcaaau

SEQ ID NO: 1534163 - RNA, 18 nt, Human adenovirus A
gugauaagcuccugcauu

SEQ ID NO: 1534164 - RNA, 22 nt, Human adenovirus A
cacaugcgggggaugaaggaag

SEQ ID NO: 1534165 - RNA, 19 nt, Human adenovirus A
uaacugcucagcuggaaga

SEQ ID NO: 1534166 - RNA, 13 nt, Human adenovirus A
acauuugugacug

SEQ ID NO: 1534167 - RNA, 14 nt, Human adenovirus A
ucaaacaauaacau

SEQ ID NO: 1534168 - RNA, 14 nt, Human adenovirus A
augaaggaaugccu

SEQ ID NO: 1534169 - RNA, 14 nt, Human adenovirus A
agaacauacaacuu

SEQ ID NO: 1534170 - RNA, 19 nt, Human adenovirus A
uuacauguggagcuuucaa

SEQ ID NO: 1534171 - RNA, 15 nt, Human adenovirus A
uacacaacacaaaaa

SEQ ID NO: 1534172 - RNA, 17 nt, Human adenovirus A
ugaugcaguaauugaug

SEQ ID NO: 1534173 - RNA, 20 nt, Human adenovirus A
ccguuuucuucuugagccca

SEQ ID NO: 1534174 - RNA, 13 nt, Human adenovirus A
cagaaaaaguuuc

SEQ ID NO: 1534175 - RNA, 14 nt, Human adenovirus A
uguaucagcagcca

SEQ ID NO: 1534176 - RNA, 16 nt, Human adenovirus A
cuucucgaaaaaauua

SEQ ID NO: 1534177 - RNA, 14 nt, Human adenovirus A
accaaacgcaaguu

SEQ ID NO: 1534178 - RNA, 15 nt, Human adenovirus A
uucagaauaaaacaa

SEQ ID NO: 1534179 - RNA, 20 nt, Human adenovirus A
aauaaugcauuaccagcagc

SEQ ID NO: 1534180 - RNA, 14 nt, Human adenovirus A
auuaugguucagcu

SEQ ID NO: 1534181 - RNA, 20 nt, Human adenovirus A
ggcagccguuucaggaagga

SEQ ID NO: 1534182 - RNA, 12 nt, Human adenovirus A
uuauggcuuuaa

SEQ ID NO: 1534183 - RNA, 19 nt, Human adenovirus A
ugaaccgguugaaacagac

SEQ ID NO: 1534184 - RNA, 22 nt, Human adenovirus A
aaugcuuuccauuuuucuuuua

SEQ ID NO: 1534185 - RNA, 14 nt, Human adenovirus A
aaggaggaagaaca

SEQ ID NO: 1534186 - RNA, 16 nt, Human adenovirus A
aaauaguuccguaaag

SEQ ID NO: 1534187 - RNA, 21 nt, Human adenovirus A
auaaggagacguuuuugccca

SEQ ID NO: 1534188 - RNA, 17 nt, Human adenovirus A
uacgguggcagccaagc

SEQ ID NO: 1534189 - RNA, 22 nt, Human adenovirus A
gcaacauaccauauuuucuuua

SEQ ID NO: 1534190 - RNA, 21 nt, Human adenovirus A
uucccaaauauccaggaggaa

SEQ ID NO: 1534191 - RNA, 14 nt, Human adenovirus A
aagcacugccuguu

SEQ ID NO: 1534192 - RNA, 14 nt, Human adenovirus A
aaaaauuacaaagg

SEQ ID NO: 1534193 - RNA, 14 nt, Human adenovirus A
aauuuucuccccac

SEQ ID NO: 1534194 - RNA, 20 nt, Human adenovirus A
acauccuuccauugugccca

SEQ ID NO: 1534195 - RNA, 16 nt, Human adenovirus A
aaauacgaaaacaguc

SEQ ID NO: 1534196 - RNA, 23 nt, Human adenovirus A
acugggauggguguuuggcagca

SEQ ID NO: 1534197 - RNA, 21 nt, Human adenovirus A
cagcuaacaaugcagcaaaca

SEQ ID NO: 1534198 - RNA, 13 nt, Human adenovirus A
gcacuuccuucag

SEQ ID NO: 1534199 - RNA, 19 nt, Human adenovirus A
acaagaugaguaaagauau

SEQ ID NO: 1534200 - RNA, 21 nt, Human adenovirus A
acaaguuaaaagaccaaaauu

SEQ ID NO: 1534201 - RNA, 23 nt, Human adenovirus A
gaagauagacagcuuuuauaugc

SEQ ID NO: 1534202 - RNA, 23 nt, Human adenovirus A
agucuugaaugcucuggacaugg

SEQ ID NO: 1534203 - RNA, 15 nt, Human adenovirus A
gcacgccaaagccac

SEQ ID NO: 1534204 - RNA, 17 nt, Human adenovirus A
aaaugugccuaugaccc

SEQ ID NO: 1534205 - RNA, 23 nt, Human adenovirus A
accugagucccggucuggugcaa

SEQ ID NO: 1534206 - RNA, 19 nt, Human adenovirus A
cuaccgcugcucagcucca

SEQ ID NO: 1534207 - RNA, 15 nt, Human adenovirus A
gggggaugaaggaag

SEQ ID NO: 1534208 - RNA, 22 nt, Human adenovirus A
uacuucaccgcgcaagcuuuca

SEQ ID NO: 1534209 - RNA, 14 nt, Human adenovirus A
caaaguaccuuaca

SEQ ID NO: 1534210 - RNA, 22 nt, Human adenovirus A
uacuaccgucaucucuacagcc

SEQ ID NO: 1534211 - RNA, 18 nt, Human adenovirus A
auaggaggaguuaaauaa

SEQ ID NO: 1534212 - RNA, 20 nt, Human adenovirus A
cacuagucccauuacaguaa

SEQ ID NO: 1534213 - RNA, 22 nt, Human adenovirus A
ccuucuggcguuacagcuucag

SEQ ID NO: 1534214 - RNA, 17 nt, Human adenovirus A
gccggaccccacaugau

SEQ ID NO: 1534215 - RNA, 19 nt, Human adenovirus A
cgggcuggggacugggugc

SEQ ID NO: 1534216 - RNA, 12 nt, Human adenovirus A
aggcuggagcuu

SEQ ID NO: 1534217 - RNA, 21 nt, Human adenovirus A
gugccccccuccccuguggag

SEQ ID NO: 1534218 - RNA, 14 nt, Human adenovirus A
cggccauaggcaug

SEQ ID NO: 1534219 - RNA, 14 nt, Human adenovirus A
ccugguaaaacaag

SEQ ID NO: 1534220 - RNA, 16 nt, Human adenovirus A
gugcugauugcuggcc

SEQ ID NO: 1534221 - RNA, 21 nt, Human adenovirus A
aagccauggcgaccaguguuc

SEQ ID NO: 1534222 - RNA, 21 nt, Human adenovirus A
ucaacgacuaaaacaaaucua

SEQ ID NO: 1534223 - RNA, 23 nt, Human adenovirus A
gcaccuugcaggacgcagaagcu

SEQ ID NO: 1534224 - RNA, 20 nt, Human adenovirus A
acgcaagcgugcaaacagac

SEQ ID NO: 1534225 - RNA, 18 nt, Human adenovirus A
ccugcuccuuuucuuaca

SEQ ID NO: 1534226 - RNA, 15 nt, Human adenovirus A
ggaccccgaaaccca

SEQ ID NO: 1534227 - RNA, 15 nt, Human adenovirus A
ugaaugcguaaaucu

SEQ ID NO: 1534228 - RNA, 17 nt, Human adenovirus A
cuacccaccaucuucau

SEQ ID NO: 1534229 - RNA, 18 nt, Human adenovirus A
acguagucauauagcuca

SEQ ID NO: 1534230 - RNA, 17 nt, Human adenovirus A
gucuuuaccuacuuuga

SEQ ID NO: 1534231 - RNA, 18 nt, Human adenovirus A
agccacaguagacauugu

SEQ ID NO: 1534232 - RNA, 12 nt, Human adenovirus A
acugggccagga

SEQ ID NO: 1534233 - RNA, 15 nt, Human adenovirus A
cacacugauuuugca

SEQ ID NO: 1534234 - RNA, 17 nt, Human adenovirus A
cggguccugcgggaagc

SEQ ID NO: 1534235 - RNA, 12 nt, Human adenovirus A
cguacagccaga

SEQ ID NO: 1534236 - RNA, 22 nt, Human adenovirus A
cagcugccgucuucguggagaa

SEQ ID NO: 1534237 - RNA, 16 nt, Human adenovirus A
ccaugacuauugacuu

SEQ ID NO: 1534238 - RNA, 19 nt, Human adenovirus A
aaugauuaaacaacaaaac

SEQ ID NO: 1534239 - RNA, 20 nt, Human adenovirus A
ccaguuucaauugcagaacu

SEQ ID NO: 1534240 - RNA, 12 nt, Human adenovirus A
acaaaacacaaa

SEQ ID NO: 1534241 - RNA, 19 nt, Human adenovirus A
cugcaaaauugaaaaacug

SEQ ID NO: 1534242 - RNA, 19 nt, Human adenovirus A
agcauuaguucuuuucuuu

SEQ ID NO: 1534243 - RNA, 18 nt, Human adenovirus A
ucuauaguaaaaaugcca

SEQ ID NO: 1534244 - RNA, 15 nt, Human adenovirus A
gcuacacgcugccca

SEQ ID NO: 1534245 - RNA, 17 nt, Human adenovirus A
ccugcuccgacaacagc

SEQ ID NO: 1534246 - RNA, 13 nt, Human adenovirus A
agcugcaguuugu

SEQ ID NO: 1534247 - RNA, 15 nt, Human adenovirus A
guuuggaaacuguau

SEQ ID NO: 1534248 - RNA, 23 nt, Human adenovirus A
uucuaaaagagccacagcucuga

SEQ ID NO: 1534249 - RNA, 15 nt, Human adenovirus A
gugcaaaacuuucua

SEQ ID NO: 1534250 - RNA, 15 nt, Human adenovirus A
gacagaguugcuuuu

SEQ ID NO: 1534251 - RNA, 14 nt, Human adenovirus A
aaucuuaaauggaa

SEQ ID NO: 1534252 - RNA, 16 nt, Human adenovirus A
uauacgccuccuaugu

SEQ ID NO: 1534253 - RNA, 17 nt, Human adenovirus A
uaguaacauuuguguag

SEQ ID NO: 1534254 - RNA, 12 nt, Human adenovirus A
uucuugcuuuaa

SEQ ID NO: 1534255 - RNA, 16 nt, Human adenovirus A
ugucuccucuguaguu

SEQ ID NO: 1534256 - RNA, 11 nt, Human adenovirus A
gcccaagguca

SEQ ID NO: 1534257 - RNA, 16 nt, Human adenovirus A
agguauaacaaaauuc

SEQ ID NO: 1534258 - RNA, 15 nt, Human adenovirus A
caaaaaaacagauuc

SEQ ID NO: 1534259 - RNA, 19 nt, Human adenovirus A
gagccacuucauucaucau

SEQ ID NO: 1534260 - RNA, 20 nt, Human adenovirus A
aaugaaacccgcugugagca

SEQ ID NO: 1534261 - RNA, 16 nt, Human adenovirus A
acugcccagcuguucu

SEQ ID NO: 1534262 - RNA, 13 nt, Human adenovirus A
gaaacagcagcaa

SEQ ID NO: 1534263 - RNA, 17 nt, Human adenovirus A
cagcagcaacacuccau

SEQ ID NO: 1534264 - RNA, 23 nt, Human adenovirus A
aguucuucuucgcuuucggaauc

SEQ ID NO: 1534265 - RNA, 22 nt, Human adenovirus A
uuuaugccuaaugugagugcuu

SEQ ID NO: 1534266 - RNA, 14 nt, Human adenovirus A
cacaaggaaaugag

SEQ ID NO: 1534267 - RNA, 13 nt, Human adenovirus A
gaggcuggcacgc

SEQ ID NO: 1534268 - RNA, 12 nt, Human adenovirus A
cucauuugcaag

SEQ ID NO: 1534269 - RNA, 18 nt, Human adenovirus A
ugugcaaauauaaaagca

SEQ ID NO: 1534270 - RNA, 17 nt, Human adenovirus A
acacuuuaauaaaaaca

SEQ ID NO: 1534271 - RNA, 13 nt, Human adenovirus A
cuaggcuguggac

SEQ ID NO: 1534272 - RNA, 12 nt, Human adenovirus A
ugugcugcaaac

SEQ ID NO: 1534273 - RNA, 21 nt, Human adenovirus A
ugcugcacaauuaucgcucuu

SEQ ID NO: 1534274 - RNA, 18 nt, Human adenovirus A
cuccguguucccacagua

SEQ ID NO: 1534275 - RNA, 11 nt, Human adenovirus A
acgugugcccc

SEQ ID NO: 1534276 - RNA, 23 nt, Human adenovirus A
ggucggugguuacucgauuuaau

SEQ ID NO: 1534277 - RNA, 23 nt, Human adenovirus A
acccaguuuuugcagugccagaa

SEQ ID NO: 1534278 - RNA, 16 nt, Human adenovirus A
ccuaaauauuguauuu

SEQ ID NO: 1534279 - RNA, 18 nt, Human adenovirus A
ucuuccaauggucuucaa

SEQ ID NO: 1534280 - RNA, 20 nt, Human adenovirus A
accacccuagcauucucuaa

SEQ ID NO: 1534281 - RNA, 16 nt, Human adenovirus A
caucacucuauuucaa

SEQ ID NO: 1534282 - RNA, 20 nt, Human adenovirus A
aagaucuucguaggaaagau

SEQ ID NO: 1534283 - RNA, 21 nt, Human adenovirus A
acuuuguaccgcgaagccauu

SEQ ID NO: 1534284 - RNA, 19 nt, Human adenovirus A
agggucggugauggaaacg

SEQ ID NO: 1534285 - RNA, 16 nt, Human adenovirus A
aacccacgauccagua

SEQ ID NO: 1534286 - RNA, 14 nt, Human adenovirus A
aaaguaucugccca

SEQ ID NO: 1534287 - RNA, 19 nt, Human adenovirus A
agugucuuguuaauguuug

SEQ ID NO: 1534288 - RNA, 20 nt, Human adenovirus A
uuuccagcgccaccugccau

SEQ ID NO: 1534289 - RNA, 20 nt, Human adenovirus A
gcaucuagccagucacaguc

SEQ ID NO: 1534290 - RNA, 16 nt, Human adenovirus A
aaccuacacaugaagg

SEQ ID NO: 1534291 - RNA, 14 nt, Human adenovirus A
guuacgacccugac

SEQ ID NO: 1534292 - RNA, 13 nt, Human adenovirus A
aagguagcuccag

SEQ ID NO: 1534293 - RNA, 16 nt, Human adenovirus A
cugacgggagcaggaa

SEQ ID NO: 1534294 - RNA, 21 nt, Human adenovirus A
cucugguccugggacauaauu

SEQ ID NO: 1534295 - RNA, 20 nt, Human adenovirus A
ccgcaguggucuuacaugca

SEQ ID NO: 1534296 - RNA, 23 nt, Human adenovirus A
cuuagaagacaaagagugacuca

SEQ ID NO: 1534297 - RNA, 17 nt, Human adenovirus A
gagcugcugcaggccuu

SEQ ID NO: 1534298 - RNA, 19 nt, Human adenovirus A
ggcgcugacgggagcagga

SEQ ID NO: 1534299 - RNA, 15 nt, Human adenovirus A
aauaaaauaaaacuu

SEQ ID NO: 1534300 - RNA, 19 nt, Human adenovirus A
cuggaauaacaagccuagg

SEQ ID NO: 1534301 - RNA, 18 nt, Human adenovirus A
cguacuuaaaaaaacaaa

SEQ ID NO: 1534302 - RNA, 15 nt, Human adenovirus A
guuaagcaguagaaa

SEQ ID NO: 1534303 - RNA, 23 nt, Human adenovirus A
cgagcgcauagaaaaagcuacau

SEQ ID NO: 1534304 - RNA, 12 nt, Human adenovirus A
gagcaccugggc

SEQ ID NO: 1534305 - RNA, 23 nt, Human adenovirus A
cagcuccaaccaugaaaacagca

SEQ ID NO: 1534306 - RNA, 21 nt, Human adenovirus A
ccggcuaauguuccgcguggu

SEQ ID NO: 1534307 - RNA, 15 nt, Human adenovirus A
gcaacggcaggaaau

SEQ ID NO: 1534308 - RNA, 19 nt, Human adenovirus A
uugcgccaccuuggcuuuc

SEQ ID NO: 1534309 - RNA, 13 nt, Human adenovirus A
acuuacuacgacu

SEQ ID NO: 1534310 - RNA, 19 nt, Human adenovirus A
auccuuuuucuacaggcag

SEQ ID NO: 1534311 - RNA, 23 nt, Human adenovirus A
uaaggggaggaccccaaggcaug

SEQ ID NO: 1534312 - RNA, 16 nt, Human adenovirus A
gcgccgcggauuuaau

SEQ ID NO: 1534313 - RNA, 23 nt, Human adenovirus A
ucauguaaaaugggaaaugaggc

SEQ ID NO: 1534314 - RNA, 22 nt, Human adenovirus A
cuuuuagaugucgaaugcaggg

SEQ ID NO: 1534315 - RNA, 23 nt, Human adenovirus A
cccacgccgcgccccacuuccuc

SEQ ID NO: 1534316 - RNA, 20 nt, Human adenovirus A
guggaaaagucacaagggua

SEQ ID NO: 1534317 - RNA, 20 nt, Human adenovirus A
caagacuauucuagcaaaau

SEQ ID NO: 1534318 - RNA, 13 nt, Human adenovirus A
ccgucgccagcaa

SEQ ID NO: 1534319 - RNA, 21 nt, Human adenovirus A
ggcuggggacugggugccgcc

SEQ ID NO: 1534320 - RNA, 15 nt, Human adenovirus A
ugugauuauguauga

SEQ ID NO: 1534321 - RNA, 15 nt, Human adenovirus A
gcauagaaaaagcua

SEQ ID NO: 1534322 - RNA, 22 nt, Human adenovirus A
acuguagugcaaaauaaugacu

SEQ ID NO: 1534323 - RNA, 13 nt, Human adenovirus A
uggcauuugugcc

SEQ ID NO: 1534324 - RNA, 21 nt, Human adenovirus A
gaaagaagacuauagagagga

SEQ ID NO: 1534325 - RNA, 20 nt, Human adenovirus A
gaacguaacuuucaaaaaag

SEQ ID NO: 1534326 - RNA, 14 nt, Human adenovirus A
auuguuaacacugc

SEQ ID NO: 1534327 - RNA, 18 nt, Human adenovirus A
ugcucguaaaaucuacaa

SEQ ID NO: 1534328 - RNA, 14 nt, Human adenovirus A
aggcaaugggagau

SEQ ID NO: 1534329 - RNA, 19 nt, Human adenovirus A
cagcagcaacacuccauac

SEQ ID NO: 1534330 - RNA, 21 nt, Human adenovirus A
agggcguacaguuuuggagcc

SEQ ID NO: 1534331 - RNA, 21 nt, Human adenovirus A
gcccauaacaucaggagcaga

SEQ ID NO: 1534332 - RNA, 14 nt, Human adenovirus A
gaacgggcagccug

SEQ ID NO: 1534333 - RNA, 18 nt, Human adenovirus A
gaccgggcaccacagugg

SEQ ID NO: 1534334 - RNA, 15 nt, Human adenovirus A
cuguugggacagcaa

SEQ ID NO: 1534335 - RNA, 20 nt, Human adenovirus A
agaaauacagagcugucaua

SEQ ID NO: 1534336 - RNA, 14 nt, Human adenovirus A
uguaugaacacuua

SEQ ID NO: 1534337 - RNA, 15 nt, Human adenovirus A
ccgucaucucuacag

SEQ ID NO: 1534338 - RNA, 16 nt, Human adenovirus A
caaacggguggaaaaa

SEQ ID NO: 1534339 - RNA, 16 nt, Human adenovirus A
caccaaacgcccgcua

SEQ ID NO: 1534340 - RNA, 18 nt, Human adenovirus A
guaguaugcgcagacgca

SEQ ID NO: 1534341 - RNA, 15 nt, Human adenovirus A
cuuccaucaccuuug

SEQ ID NO: 1534342 - RNA, 15 nt, Human adenovirus A
cugcgugaggaggac

SEQ ID NO: 1534343 - RNA, 16 nt, Human adenovirus A
gacaaguugcuuucca

SEQ ID NO: 1534344 - RNA, 19 nt, Human adenovirus A
uuggccaccauagccccuc

SEQ ID NO: 1534345 - RNA, 17 nt, Human adenovirus A
ugcacguacuagccccu

SEQ ID NO: 1534346 - RNA, 14 nt, Human adenovirus A
aaucagaagccagc

SEQ ID NO: 1534347 - RNA, 15 nt, Human adenovirus A
cacccaagggugcag

SEQ ID NO: 1534348 - RNA, 15 nt, Human adenovirus A
cuguuuaaacaucua

SEQ ID NO: 1534349 - RNA, 19 nt, Human adenovirus A
aacacggaggacaauccaa

SEQ ID NO: 1534350 - RNA, 19 nt, Human adenovirus A
cugcggugguggagaagua

SEQ ID NO: 1534351 - RNA, 19 nt, Human adenovirus A
gcgcucaaaggcaggcauu

SEQ ID NO: 1534352 - RNA, 21 nt, Human adenovirus A
agcauucaugcugauguuugu

SEQ ID NO: 1534353 - RNA, 22 nt, Human adenovirus A
ccugcuuaaaaucggcggcgcg

SEQ ID NO: 1534354 - RNA, 19 nt, Human adenovirus A
uuuaauacugaaaaauagu

SEQ ID NO: 1534355 - RNA, 16 nt, Human adenovirus A
cagcagcgguggcgcu

SEQ ID NO: 1534356 - RNA, 19 nt, Human adenovirus A
agaaaggauguaaacauga

SEQ ID NO: 1534357 - RNA, 12 nt, Human adenovirus A
cuacacaacaca

SEQ ID NO: 1534358 - RNA, 13 nt, Human adenovirus A
uaagaaagaggca

SEQ ID NO: 1534359 - RNA, 22 nt, Human adenovirus A
uaaaaacuguucauauugugag

SEQ ID NO: 1534360 - RNA, 13 nt, Human adenovirus A
gucgcuguuuuga

SEQ ID NO: 1534361 - RNA, 19 nt, Human adenovirus A
uugguucgacgggccaggc

SEQ ID NO: 1534362 - RNA, 20 nt, Human adenovirus A
aaugaaaguugguaagcgac

SEQ ID NO: 1534363 - RNA, 11 nt, Human adenovirus A
gcuggaaccug

SEQ ID NO: 1534364 - RNA, 13 nt, Human adenovirus A
ugcuaacagcucu

SEQ ID NO: 1534365 - RNA, 16 nt, Human adenovirus A
accguagaugggacac

SEQ ID NO: 1534366 - RNA, 19 nt, Human adenovirus A
cggucaggaugccucggag

SEQ ID NO: 1534367 - RNA, 22 nt, Human adenovirus A
aguaauggaguuggaaacugug

SEQ ID NO: 1534368 - RNA, 21 nt, Human adenovirus A
gcccaucggauaaccuuacca

SEQ ID NO: 1534369 - RNA, 17 nt, Human adenovirus A
uaacauuuguguagagu

SEQ ID NO: 1534370 - RNA, 16 nt, Human adenovirus A
cgugcaucaguguaaa

SEQ ID NO: 1534371 - RNA, 16 nt, Human adenovirus A
acuugggaaauuuguc

SEQ ID NO: 1534372 - RNA, 18 nt, Human adenovirus A
gacucauaagcugugaaa

SEQ ID NO: 1534373 - RNA, 16 nt, Human adenovirus A
agcuuagccuuaauaa

SEQ ID NO: 1534374 - RNA, 17 nt, Human adenovirus A
cuacgguggcagccaag

SEQ ID NO: 1534375 - RNA, 23 nt, Human adenovirus A
cagcaaagaaaguucaccuccag

SEQ ID NO: 1534376 - RNA, 22 nt, Human adenovirus A
auugcaggggcucuuuuaagau

SEQ ID NO: 1534377 - RNA, 16 nt, Human adenovirus A
acgaaggccaaaccau

SEQ ID NO: 1534378 - RNA, 17 nt, Human adenovirus A
aucuuguuuccagugcg

SEQ ID NO: 1534379 - RNA, 22 nt, Human adenovirus A
gaggcagccguuucaggaagga

SEQ ID NO: 1534380 - RNA, 14 nt, Human adenovirus A
gaagcuucuuguac

SEQ ID NO: 1534381 - RNA, 23 nt, Human adenovirus A
auguaacugaggagcugagaagu

SEQ ID NO: 1534382 - RNA, 17 nt, Human adenovirus A
acaaguuccggaguucc

SEQ ID NO: 1534383 - RNA, 15 nt, Human adenovirus A
accucacugcuuugc

SEQ ID NO: 1534384 - RNA, 10 nt, Human adenovirus A
aucacuuccg

SEQ ID NO: 1534385 - RNA, 20 nt, Human adenovirus A
ggcaagaacaauuucaucaa

SEQ ID NO: 1534386 - RNA, 12 nt, Human adenovirus A
aggaaaagcugc

SEQ ID NO: 1534387 - RNA, 15 nt, Human adenovirus A
cugacacaaaagcuc

SEQ ID NO: 1534388 - RNA, 23 nt, Human adenovirus A
auuucgauaaacaaaagcaaagc

SEQ ID NO: 1534389 - RNA, 13 nt, Human adenovirus A
acgcuuugcuuga

SEQ ID NO: 1534390 - RNA, 15 nt, Human adenovirus A
cugcugucauuugug

SEQ ID NO: 1534391 - RNA, 19 nt, Human adenovirus A
aaagaucaguagcuaagga

SEQ ID NO: 1534392 - RNA, 22 nt, Human adenovirus A
gaacuauuaagugaaagucaag

SEQ ID NO: 1534393 - RNA, 16 nt, Human adenovirus A
caugcucuagacauga

SEQ ID NO: 1534394 - RNA, 13 nt, Human adenovirus A
agcaacuuuuuaa

SEQ ID NO: 1534395 - RNA, 22 nt, Human adenovirus A
ccgcacguucaauaguggcugc

SEQ ID NO: 1534396 - RNA, 15 nt, Human adenovirus A
aaauaaccaguguua

SEQ ID NO: 1534397 - RNA, 19 nt, Human adenovirus A
caaugugcaggcuaacuua

SEQ ID NO: 1534398 - RNA, 12 nt, Human adenovirus A
cuuuuuaaccac

SEQ ID NO: 1534399 - RNA, 14 nt, Human adenovirus A
gcucggccaccguc

SEQ ID NO: 1534400 - RNA, 23 nt, Human adenovirus A
acaacugcacuugaauauuucga

SEQ ID NO: 1534401 - RNA, 14 nt, Human adenovirus A
ggagcuaaaacaag

SEQ ID NO: 1534402 - RNA, 17 nt, Human adenovirus A
acaagguaggcuaaguu

SEQ ID NO: 1534403 - RNA, 15 nt, Human adenovirus A
aagcaauaaaacaag

SEQ ID NO: 1534404 - RNA, 23 nt, Human adenovirus A
gcuggcgcuuccauaccugggau

SEQ ID NO: 1534405 - RNA, 17 nt, Human adenovirus A
gcuuccaguucuucuuc

SEQ ID NO: 1534406 - RNA, 14 nt, Human adenovirus A
gcggccuguuuugu

SEQ ID NO: 1534407 - RNA, 23 nt, Human adenovirus A
ggaaacaaguuuagaaaccccac

SEQ ID NO: 1534408 - RNA, 14 nt, Human adenovirus A
uggaagcuggccau

SEQ ID NO: 1534409 - RNA, 17 nt, Human adenovirus A
agguagcauuuuaacau

SEQ ID NO: 1534410 - RNA, 22 nt, Human adenovirus A
uuuucuuuaaaaaucacaaaau

SEQ ID NO: 1534411 - RNA, 20 nt, Human adenovirus A
gcugacgggagcaggaacag

SEQ ID NO: 1534412 - RNA, 23 nt, Human adenovirus A
acaacagucaguguccaucagcc

SEQ ID NO: 1534413 - RNA, 23 nt, Human adenovirus A
cgcacguucaauaguggcugcaa

SEQ ID NO: 1534414 - RNA, 14 nt, Human adenovirus A
guacagccagaugu

SEQ ID NO: 1534415 - RNA, 17 nt, Human adenovirus A
cugucaaaccugacaga

SEQ ID NO: 1534416 - RNA, 20 nt, Human adenovirus A
cucauccauuauuauggcaa

SEQ ID NO: 1534417 - RNA, 14 nt, Human adenovirus A
aucaugaaaacagc

SEQ ID NO: 1534418 - RNA, 17 nt, Human adenovirus A
aaccaugaaaacagcau

SEQ ID NO: 1534419 - RNA, 17 nt, Human adenovirus A
aggaauuagcugaugcu

SEQ ID NO: 1534420 - RNA, 20 nt, Human adenovirus A
auacauaauuuuaaaguaaa

SEQ ID NO: 1534421 - RNA, 14 nt, Human adenovirus A
gcgagcugccaccg

SEQ ID NO: 1534422 - RNA, 13 nt, Human adenovirus A
cugaaaacaacug

SEQ ID NO: 1534423 - RNA, 12 nt, Human adenovirus A
caggcuggaggu

SEQ ID NO: 1534424 - RNA, 13 nt, Human adenovirus A
gugguucaggaac

SEQ ID NO: 1534425 - RNA, 17 nt, Human adenovirus A
augcgggcagccaggcg

SEQ ID NO: 1534426 - RNA, 23 nt, Human adenovirus A
uuaaugcaucuuugggacuuugu

SEQ ID NO: 1534427 - RNA, 12 nt, Human adenovirus A
uuaauacuggcu

SEQ ID NO: 1534428 - RNA, 23 nt, Human adenovirus A
auguaaguaggauagcaccugcc

SEQ ID NO: 1534429 - RNA, 19 nt, Human adenovirus A
cagugagccguccagcagu

SEQ ID NO: 1534430 - RNA, 16 nt, Human adenovirus A
ggcuaggaaaacaaac

SEQ ID NO: 1534431 - RNA, 15 nt, Human adenovirus A
ccauguaucagcagc

SEQ ID NO: 1534432 - RNA, 18 nt, Human adenovirus A
gaauuccgcaguggacag

SEQ ID NO: 1534433 - RNA, 21 nt, Human adenovirus A
ugcgccuauauuauagguaac

SEQ ID NO: 1534434 - RNA, 17 nt, Human adenovirus A
gaaccacgaaaacggug

SEQ ID NO: 1534435 - RNA, 17 nt, Human adenovirus A
ugaucacagcaacuuuu

SEQ ID NO: 1534436 - RNA, 23 nt, Human adenovirus A
auuaggcuuucuuccauuugauc

SEQ ID NO: 1534437 - RNA, 16 nt, Human adenovirus A
caaauagcucuuaaug

SEQ ID NO: 1534438 - RNA, 20 nt, Human adenovirus A
uaaaugcggaagaagaacgc

SEQ ID NO: 1534439 - RNA, 20 nt, Human adenovirus A
uuguugaauucgcaggcggu

SEQ ID NO: 1534440 - RNA, 18 nt, Human adenovirus A
gccgcagcugcggccgca

SEQ ID NO: 1534441 - RNA, 14 nt, Human adenovirus A
aggccaaacagcug

SEQ ID NO: 1534442 - RNA, 23 nt, Human adenovirus A
uacaaggaccgcauguauucuuu

SEQ ID NO: 1534443 - RNA, 23 nt, Human adenovirus A
cgcaagcuuucauugguccaggc

SEQ ID NO: 1534444 - RNA, 20 nt, Human adenovirus A
cuucagagcacacugggaaa

SEQ ID NO: 1534445 - RNA, 19 nt, Human adenovirus A
auggugacgguucuucuca

SEQ ID NO: 1534446 - RNA, 16 nt, Human adenovirus A
ugcuuuccaaaugccc

SEQ ID NO: 1534447 - RNA, 17 nt, Human adenovirus A
agauccguacaaggcau

SEQ ID NO: 1534448 - RNA, 20 nt, Human adenovirus A
gacgaagcgucagcucguug

SEQ ID NO: 1534449 - RNA, 19 nt, Human adenovirus A
cugaagugccucaaaguga

SEQ ID NO: 1534450 - RNA, 20 nt, Human adenovirus A
cauaccugggauuguguccu

SEQ ID NO: 1534451 - RNA, 14 nt, Human adenovirus A
acauaauuucccuc

SEQ ID NO: 1534452 - RNA, 22 nt, Human adenovirus A
cuuaaugccaguuguauaaaau

SEQ ID NO: 1534453 - RNA, 18 nt, Human adenovirus A
uaaacaaaagcaaagcaa

SEQ ID NO: 1534454 - RNA, 21 nt, Human adenovirus A
cauccaugugaugccggcagc

SEQ ID NO: 1534455 - RNA, 22 nt, Human adenovirus A
cuuucuaagguguguaaacaca

SEQ ID NO: 1534456 - RNA, 18 nt, Human adenovirus A
uguaaccagagcaccccu

SEQ ID NO: 1534457 - RNA, 17 nt, Human adenovirus A
agaucuuccaacaugag

SEQ ID NO: 1534458 - RNA, 15 nt, Human adenovirus A
gccaugcaaagccag

SEQ ID NO: 1534459 - RNA, 12 nt, Human adenovirus A
uuuaaaaaucac

SEQ ID NO: 1534460 - RNA, 13 nt, Human adenovirus A
acaugauuuccag

SEQ ID NO: 1534461 - RNA, 15 nt, Human adenovirus A
aagucuucugacauu

SEQ ID NO: 1534462 - RNA, 18 nt, Human adenovirus A
cguggaacagccaaaccg

SEQ ID NO: 1534463 - RNA, 12 nt, Human adenovirus A
caguguccauca

SEQ ID NO: 1534464 - RNA, 21 nt, Human adenovirus A
ucauaccuuaaaaacuguuca

SEQ ID NO: 1534465 - RNA, 14 nt, Human adenovirus A
ugaacgauuuuaug

SEQ ID NO: 1534466 - RNA, 13 nt, Human adenovirus A
uagagggaggcaa

SEQ ID NO: 1534467 - RNA, 15 nt, Human adenovirus A
ccgcagucagugacc

SEQ ID NO: 1534468 - RNA, 20 nt, Human adenovirus A
augagcaaaacgcugggcuc

SEQ ID NO: 1534469 - RNA, 16 nt, Human adenovirus A
caaaagguugaggaau

SEQ ID NO: 1534470 - RNA, 19 nt, Human adenovirus A
ucauauugugagccacagu

SEQ ID NO: 1534471 - RNA, 13 nt, Human adenovirus A
auuccgcagugga

SEQ ID NO: 1534472 - RNA, 18 nt, Human adenovirus A
cacaacggaugaaagcuu

SEQ ID NO: 1534473 - RNA, 19 nt, Human adenovirus A
gcuucuacuuuagaagcca

SEQ ID NO: 1534474 - RNA, 21 nt, Human adenovirus A
acuuccucauccgcccaaacu

SEQ ID NO: 1534475 - RNA, 22 nt, Human adenovirus A
ggauggguguuuggcagcaaug

SEQ ID NO: 1534476 - RNA, 14 nt, Human adenovirus A
ucccaucccagcua

SEQ ID NO: 1534477 - RNA, 14 nt, Human adenovirus A
cacugcaaugcagc

SEQ ID NO: 1534478 - RNA, 14 nt, Human adenovirus A
gccuucauuccuuc

SEQ ID NO: 1534479 - RNA, 22 nt, Human adenovirus A
acaaggaccguuuucugcagcg

SEQ ID NO: 1534480 - RNA, 21 nt, Human adenovirus A
caacacuacgcgaugaagcac

SEQ ID NO: 1534481 - RNA, 17 nt, Human adenovirus A
auuugcgcacugaaaaa

SEQ ID NO: 1534482 - RNA, 14 nt, Human adenovirus A
caacaaaacacuga

SEQ ID NO: 1534483 - RNA, 23 nt, Human adenovirus A
uaaugaugauacucgacaucguu

SEQ ID NO: 1534484 - RNA, 21 nt, Human adenovirus A
cuugaacaacuuuuaacauua

SEQ ID NO: 1534485 - RNA, 23 nt, Human adenovirus A
cuugagcaaaaauguuuucugga

SEQ ID NO: 1534486 - RNA, 22 nt, Human adenovirus A
cguuccgucaaaaaagcaaagu

SEQ ID NO: 1534487 - RNA, 15 nt, Human adenovirus A
agauuuaauuucaga

SEQ ID NO: 1534488 - RNA, 18 nt, Human adenovirus A
gcgcccacucuccugagc

SEQ ID NO: 1534489 - RNA, 23 nt, Human adenovirus A
cauuacccaagaauaaaaacaca

SEQ ID NO: 1534490 - RNA, 23 nt, Human adenovirus A
ccaacaaaacuuaucagccagag

SEQ ID NO: 1534491 - RNA, 12 nt, Human adenovirus A
gcucuaccuuaa

SEQ ID NO: 1534492 - RNA, 18 nt, Human adenovirus A
caccaaauuuaaggccag

SEQ ID NO: 1534493 - RNA, 20 nt, Human adenovirus A
ucacaaggucuuaaacuuuc

SEQ ID NO: 1534494 - RNA, 20 nt, Human adenovirus A
augggguggagauuuaaaaa

SEQ ID NO: 1534495 - RNA, 17 nt, Human adenovirus A
cagugcggccuguugcc

SEQ ID NO: 1534496 - RNA, 13 nt, Human adenovirus A
ucagcuucuccag

SEQ ID NO: 1534497 - RNA, 23 nt, Human adenovirus A
guugguucgacgggccaggcgca

SEQ ID NO: 1534498 - RNA, 22 nt, Human adenovirus A
ugacuggacagcggccauggau

SEQ ID NO: 1534499 - RNA, 15 nt, Human adenovirus A
agcacuaaaaucccu

SEQ ID NO: 1534500 - RNA, 23 nt, Human adenovirus A
gagcucauccucagcuccgagau

SEQ ID NO: 1534501 - RNA, 18 nt, Human adenovirus A
guuaccugugcugaugga

SEQ ID NO: 1534502 - RNA, 18 nt, Human adenovirus A
aagcgacaaagagcuuau

SEQ ID NO: 1534503 - RNA, 13 nt, Human adenovirus A
uaaucacaacaca

SEQ ID NO: 1534504 - RNA, 19 nt, Human adenovirus A
augaugcgggcagccaggc

SEQ ID NO: 1534505 - RNA, 11 nt, Human adenovirus A
cacggagagga

SEQ ID NO: 1534506 - RNA, 12 nt, Human adenovirus A
aaguuuaaagga

SEQ ID NO: 1534507 - RNA, 13 nt, Human adenovirus A
aacuacaaaaaag

SEQ ID NO: 1534508 - RNA, 14 nt, Human adenovirus A
cccucuccaaugaa

SEQ ID NO: 1534509 - RNA, 17 nt, Human adenovirus A
auggaguuggaaacugu

SEQ ID NO: 1534510 - RNA, 12 nt, Human adenovirus A
gacaacauugcc

SEQ ID NO: 1534511 - RNA, 23 nt, Human adenovirus A
uagguauaagaaagaggcagccg

SEQ ID NO: 1534512 - RNA, 15 nt, Human adenovirus A
guuuaaacuacacaa

SEQ ID NO: 1534513 - RNA, 20 nt, Human adenovirus A
gccaugcgcgcggccagagc

SEQ ID NO: 1534514 - RNA, 20 nt, Human adenovirus A
aacaguuugcgugccuggcu

SEQ ID NO: 1534515 - RNA, 18 nt, Human adenovirus A
aacaugauucuucagagc

SEQ ID NO: 1534516 - RNA, 22 nt, Human adenovirus A
ucagccagagccgcaaguagga

SEQ ID NO: 1534517 - RNA, 18 nt, Human adenovirus A
cgucuucguggagaagcg

SEQ ID NO: 1534518 - RNA, 20 nt, Human adenovirus A
accuacuucacccugggaaa

SEQ ID NO: 1534519 - RNA, 11 nt, Human adenovirus A
caagcugaaac

SEQ ID NO: 1534520 - RNA, 19 nt, Human adenovirus A
accuuugugugcuacugcg

SEQ ID NO: 1534521 - RNA, 19 nt, Human adenovirus A
caaaguucgccuacacaac

SEQ ID NO: 1534522 - RNA, 17 nt, Human adenovirus A
ugcucgaccguuuucac

SEQ ID NO: 1534523 - RNA, 12 nt, Human adenovirus A
ccuccuggaggu

SEQ ID NO: 1534524 - RNA, 23 nt, Human adenovirus A
aggcgaucguucaacuuugucca

SEQ ID NO: 1534525 - RNA, 21 nt, Human adenovirus A
cagcugacgacaguaguguau

SEQ ID NO: 1534526 - RNA, 23 nt, Human adenovirus A
ugcacauauucgcgugccaggca

SEQ ID NO: 1534527 - RNA, 10 nt, Human adenovirus A
ccagcucuug

SEQ ID NO: 1534528 - RNA, 15 nt, Human adenovirus A
ccuauagaggcuggc

SEQ ID NO: 1534529 - RNA, 12 nt, Human adenovirus A
acgggccaggcg

SEQ ID NO: 1534530 - RNA, 17 nt, Human adenovirus A
cagagcacacugggaaa

SEQ ID NO: 1534531 - RNA, 18 nt, Human adenovirus A
guuuacaaagcacugggc

SEQ ID NO: 1534532 - RNA, 14 nt, Human adenovirus A
cggcaugcugaaac

SEQ ID NO: 1534533 - RNA, 18 nt, Human adenovirus A
cuauaguaaaaaugccag

SEQ ID NO: 1534534 - RNA, 13 nt, Human adenovirus A
cauggcuuccaug

SEQ ID NO: 1534535 - RNA, 14 nt, Human adenovirus A
ugugcaaaacuuuc

SEQ ID NO: 1534536 - RNA, 15 nt, Human adenovirus A
gccugguaaaacaag

SEQ ID NO: 1534537 - RNA, 22 nt, Human adenovirus A
aacucagcccaugcucuagaca

SEQ ID NO: 1534538 - RNA, 12 nt, Human adenovirus A
acacuuaacaca

SEQ ID NO: 1534539 - RNA, 16 nt, Human adenovirus A
cgcuuuugccagacua

SEQ ID NO: 1534540 - RNA, 16 nt, Human adenovirus A
auuguagccugcuuuc

SEQ ID NO: 1534541 - RNA, 20 nt, Human adenovirus A
uaaucaagacggucagcaag

SEQ ID NO: 1534542 - RNA, 22 nt, Human adenovirus A
cugggugcgcgacucagugacc

SEQ ID NO: 1534543 - RNA, 19 nt, Human adenovirus A
agcugacgacaguagugua

SEQ ID NO: 1534544 - RNA, 14 nt, Human adenovirus A
acggagacaaaauu

SEQ ID NO: 1534545 - RNA, 18 nt, Human adenovirus A
uuaaacccuuuagcaguu

SEQ ID NO: 1534546 - RNA, 16 nt, Human adenovirus A
aagagguaucgcagcc

SEQ ID NO: 1534547 - RNA, 20 nt, Human adenovirus A
cauccggcgcgcccggcucc

SEQ ID NO: 1534548 - RNA, 15 nt, Human adenovirus A
cacuggcuggcuuuu

SEQ ID NO: 1534549 - RNA, 18 nt, Human adenovirus A
aguuacaacuugcuucca

SEQ ID NO: 1534550 - RNA, 17 nt, Human adenovirus A
aggaagguuccaaggac

SEQ ID NO: 1534551 - RNA, 22 nt, Human adenovirus A
cacuagaaucggcaacagcagc

SEQ ID NO: 1534552 - RNA, 23 nt, Human adenovirus A
ugaacgucgccugaguuaucuug

SEQ ID NO: 1534553 - RNA, 19 nt, Human adenovirus A
acuuuagaaaggauguaaa

SEQ ID NO: 1534554 - RNA, 16 nt, Human adenovirus A
ucuugcugaaaugcgc

SEQ ID NO: 1534555 - RNA, 16 nt, Human adenovirus A
accacugaaacucccu

SEQ ID NO: 1534556 - RNA, 22 nt, Human adenovirus A
aaguaaaccccuaacugcccag

SEQ ID NO: 1534557 - RNA, 13 nt, Human adenovirus A
caaaccugacaga

SEQ ID NO: 1534558 - RNA, 10 nt, Human adenovirus A
uguuaaccau

SEQ ID NO: 1534559 - RNA, 18 nt, Human adenovirus A
ucagcaguugcaagcgau

SEQ ID NO: 1534560 - RNA, 21 nt, Human adenovirus A
caccgcucccgccauuggcgc

SEQ ID NO: 1534561 - RNA, 12 nt, Human adenovirus A
gcgugccuggcu

SEQ ID NO: 1534562 - RNA, 19 nt, Human adenovirus A
augacuaacgcuggggcac

SEQ ID NO: 1534563 - RNA, 23 nt, Human adenovirus A
uaauggagcggcugacagagcgc

SEQ ID NO: 1534564 - RNA, 22 nt, Human adenovirus A
auucauauauguaucuggacau

SEQ ID NO: 1534565 - RNA, 19 nt, Human adenovirus A
agccuugucuacaacugcu

SEQ ID NO: 1534566 - RNA, 18 nt, Human adenovirus A
gcaggaaaucugggagga

SEQ ID NO: 1534567 - RNA, 14 nt, Human adenovirus A
aucggcggcgcgga

SEQ ID NO: 1534568 - RNA, 20 nt, Human adenovirus A
ucuucggguggacggagcca

SEQ ID NO: 1534569 - RNA, 16 nt, Human adenovirus A
ccgaauauccaaaccc

SEQ ID NO: 1534570 - RNA, 13 nt, Human adenovirus A
guguaugccaaca

SEQ ID NO: 1534571 - RNA, 13 nt, Human adenovirus A
aacagcuucuaaa

SEQ ID NO: 1534572 - RNA, 14 nt, Human adenovirus A
uugaauucuggaau

SEQ ID NO: 1534573 - RNA, 11 nt, Human adenovirus A
cgggcucuggc

SEQ ID NO: 1534574 - RNA, 16 nt, Human adenovirus A
guggauaccacagaau

SEQ ID NO: 1534575 - RNA, 18 nt, Human adenovirus A
cacgguauuggccauucc

SEQ ID NO: 1534576 - RNA, 21 nt, Human adenovirus A
gaaauugucauaccuuaaaaa

SEQ ID NO: 1534577 - RNA, 19 nt, Human adenovirus A
uagacauuguuggccugua

SEQ ID NO: 1534578 - RNA, 12 nt, Human adenovirus A
aggggcucuuuu

SEQ ID NO: 1534579 - RNA, 22 nt, Human adenovirus A
cagggaagauuaaucacaucaa

SEQ ID NO: 1534580 - RNA, 15 nt, Human adenovirus A
ucaauuuugcaagug

SEQ ID NO: 1534581 - RNA, 18 nt, Human adenovirus A
guguacuugguggacaac

SEQ ID NO: 1534582 - RNA, 19 nt, Human adenovirus A
ccauugggagucagacccg

SEQ ID NO: 1534583 - RNA, 16 nt, Human adenovirus A
auagcaacaacgcugg

SEQ ID NO: 1534584 - RNA, 19 nt, Human adenovirus A
gccggcgaacgggcagccu

SEQ ID NO: 1534585 - RNA, 23 nt, Human adenovirus A
gacauccaugugaugccggcagc

SEQ ID NO: 1534586 - RNA, 14 nt, Human adenovirus A
gagccauguugugc

SEQ ID NO: 1534587 - RNA, 17 nt, Human adenovirus A
cacaaauggacccauau

SEQ ID NO: 1534588 - RNA, 13 nt, Human adenovirus A
acacauaaagagu

SEQ ID NO: 1534589 - RNA, 17 nt, Human adenovirus A
uaugaccuuaaucuguu

SEQ ID NO: 1534590 - RNA, 18 nt, Human adenovirus A
caagacggucagcaagga

SEQ ID NO: 1534591 - RNA, 22 nt, Human adenovirus A
gaacaguguuuucagcaauuac

SEQ ID NO: 1534592 - RNA, 20 nt, Human adenovirus A
ucuuuguguguuucuaaaac

SEQ ID NO: 1534593 - RNA, 17 nt, Human adenovirus A
ccaccgccaugcgcgcg

SEQ ID NO: 1534594 - RNA, 20 nt, Human adenovirus A
gacagagcgcggcugcgaca

SEQ ID NO: 1534595 - RNA, 12 nt, Human adenovirus A
gcuucuccagac

SEQ ID NO: 1534596 - RNA, 15 nt, Human adenovirus A
aagcaaguacaaagg

SEQ ID NO: 1534597 - RNA, 16 nt, Human adenovirus A
uagaugugcuguggaa

SEQ ID NO: 1534598 - RNA, 18 nt, Human adenovirus A
aauagcacuuuggauggc

SEQ ID NO: 1534599 - RNA, 19 nt, Human adenovirus A
ucaauuugccuaaaagcua

SEQ ID NO: 1534600 - RNA, 17 nt, Human adenovirus A
agccaacauccagugcg

SEQ ID NO: 1534601 - RNA, 23 nt, Human adenovirus A
aaaaagcuuuaauaaccaugugc

SEQ ID NO: 1534602 - RNA, 20 nt, Human adenovirus A
cacauucaacugaccagguc

SEQ ID NO: 1534603 - RNA, 13 nt, Human adenovirus A
cucuuaaugcagg

SEQ ID NO: 1534604 - RNA, 15 nt, Human adenovirus A
uuugucauggaguuu

SEQ ID NO: 1534605 - RNA, 20 nt, Human adenovirus A
cagagucgaggucaagaaca

SEQ ID NO: 1534606 - RNA, 16 nt, Human adenovirus A
uaaguguucgcaacaa

SEQ ID NO: 1534607 - RNA, 17 nt, Human adenovirus A
gucgauuucggcggcgu

SEQ ID NO: 1534608 - RNA, 15 nt, Human adenovirus A
ccagcgccaccugcc

SEQ ID NO: 1534609 - RNA, 12 nt, Human adenovirus A
gaagagcugcug

SEQ ID NO: 1534610 - RNA, 21 nt, Human adenovirus A
ggcuggcuuuuggauggaacc

SEQ ID NO: 1534611 - RNA, 15 nt, Human adenovirus A
ugauuuacaaaccgu

SEQ ID NO: 1534612 - RNA, 22 nt, Human adenovirus A
acagcucugauuucgauaaaca

SEQ ID NO: 1534613 - RNA, 14 nt, Human adenovirus A
ugcauuuaguguuu

SEQ ID NO: 1534614 - RNA, 16 nt, Human adenovirus A
ugcgcuuuaaacugag

SEQ ID NO: 1534615 - RNA, 17 nt, Human adenovirus A
uaguugccacgcuuuga

SEQ ID NO: 1534616 - RNA, 14 nt, Human adenovirus A
gcugcucagcucca

SEQ ID NO: 1534617 - RNA, 19 nt, Human adenovirus A
agguguaaccagcugggca

SEQ ID NO: 1534618 - RNA, 16 nt, Human adenovirus A
gcaggaguugcaggau

SEQ ID NO: 1534619 - RNA, 17 nt, Human adenovirus A
uccaaggaugacaacau

SEQ ID NO: 1534620 - RNA, 14 nt, Human adenovirus A
aguauuuuguaaag

SEQ ID NO: 1534621 - RNA, 16 nt, Human adenovirus A
caggaagagccucaau

SEQ ID NO: 1534622 - RNA, 14 nt, Human adenovirus A
uuuguguagagucu

SEQ ID NO: 1534623 - RNA, 20 nt, Human adenovirus A
gccagaagcacuggcaacau

SEQ ID NO: 1534624 - RNA, 16 nt, Human adenovirus A
agccguagacgagguc

SEQ ID NO: 1534625 - RNA, 22 nt, Human adenovirus A
aaggaagccacaugggaagggu

SEQ ID NO: 1534626 - RNA, 18 nt, Human adenovirus A
guacauaauccagcaagu

SEQ ID NO: 1534627 - RNA, 14 nt, Human adenovirus A
ggacauaauuuccc

SEQ ID NO: 1534628 - RNA, 13 nt, Human adenovirus A
gcacugggccagg

SEQ ID NO: 1534629 - RNA, 15 nt, Human adenovirus A
uccuacauuggaguu

SEQ ID NO: 1534630 - RNA, 15 nt, Human adenovirus A
caugcaaagccagcc

SEQ ID NO: 1534631 - RNA, 18 nt, Human adenovirus A
gaagcugaggaaaugcga

SEQ ID NO: 1534632 - RNA, 13 nt, Human adenovirus A
cauggaaaaacuu

SEQ ID NO: 1534633 - RNA, 15 nt, Human adenovirus A
ucaaauggcucuucg

SEQ ID NO: 1534634 - RNA, 19 nt, Human adenovirus A
agugguauuccgcgguccu

SEQ ID NO: 1534635 - RNA, 16 nt, Human adenovirus A
uccaacgaacuacaac

SEQ ID NO: 1534636 - RNA, 21 nt, Human adenovirus A
ugacaccaacgaccagucuuu

SEQ ID NO: 1534637 - RNA, 12 nt, Human adenovirus A
ggccagcucacg

SEQ ID NO: 1534638 - RNA, 15 nt, Human adenovirus A
acucauaccccaaga

SEQ ID NO: 1534639 - RNA, 18 nt, Human adenovirus A
cugcaaaaagaaaaugaa

SEQ ID NO: 1534640 - RNA, 18 nt, Human adenovirus A
uguggaauaauaguuccc

SEQ ID NO: 1534641 - RNA, 19 nt, Human adenovirus A
aauacugguauuuaaaauc

SEQ ID NO: 1534642 - RNA, 15 nt, Human adenovirus A
ccagauuguggaaua

SEQ ID NO: 1534643 - RNA, 16 nt, Human adenovirus A
ucuguaguuucuuuac

SEQ ID NO: 1534644 - RNA, 18 nt, Human adenovirus A
gcaaauuacgcaacaacu

SEQ ID NO: 1534645 - RNA, 16 nt, Human adenovirus A
caaaugcccugcaaaa

SEQ ID NO: 1534646 - RNA, 23 nt, Human adenovirus A
caggggugguggguuuggaugga

SEQ ID NO: 1534647 - RNA, 21 nt, Human adenovirus A
uacagaaaaaaauugccaacc

SEQ ID NO: 1534648 - RNA, 16 nt, Human adenovirus A
ccgguugagcagaacu

SEQ ID NO: 1534649 - RNA, 23 nt, Human adenovirus A
gaccccaucuuguuuccagugcg

SEQ ID NO: 1534650 - RNA, 12 nt, Human adenovirus A
acccccagugcc

SEQ ID NO: 1534651 - RNA, 17 nt, Human adenovirus A
acaacacaaaaaaaacc

SEQ ID NO: 1534652 - RNA, 21 nt, Human adenovirus A
ggaggucuccaugucccgcac

SEQ ID NO: 1534653 - RNA, 20 nt, Human adenovirus A
auugaaaacguuaaagcugg

SEQ ID NO: 1534654 - RNA, 14 nt, Human adenovirus A
acuacucagaacaa

SEQ ID NO: 1534655 - RNA, 15 nt, Human adenovirus A
auccuguaguugcag

SEQ ID NO: 1534656 - RNA, 20 nt, Human adenovirus A
uaaugaggcuuuucauccag

SEQ ID NO: 1534657 - RNA, 16 nt, Human adenovirus A
ccaagcguagccgcag

SEQ ID NO: 1534658 - RNA, 20 nt, Human adenovirus A
caugggcaucuugcaugaaa

SEQ ID NO: 1534659 - RNA, 18 nt, Human adenovirus A
aggacacuggcaguuuag

SEQ ID NO: 1534660 - RNA, 22 nt, Human adenovirus A
aaauugcucgaugaugcauaau

SEQ ID NO: 1534661 - RNA, 19 nt, Human adenovirus A
ccgcgguuuuggcggccau

SEQ ID NO: 1534662 - RNA, 14 nt, Human adenovirus A
aguuucuccuucua

SEQ ID NO: 1534663 - RNA, 23 nt, Human adenovirus A
agccaacuuaguaacagcauaug

SEQ ID NO: 1534664 - RNA, 17 nt, Human adenovirus A
cacuggcgaugacgaug

SEQ ID NO: 1534665 - RNA, 16 nt, Human adenovirus A
gcggcccgacgaggua

SEQ ID NO: 1534666 - RNA, 19 nt, Human adenovirus A
uaaaaaggaagcaggugau

SEQ ID NO: 1534667 - RNA, 23 nt, Human adenovirus A
agcagcggcuugagcaaaaaugu

SEQ ID NO: 1534668 - RNA, 20 nt, Human adenovirus A
caccagguguauuagcacuu

SEQ ID NO: 1534669 - RNA, 19 nt, Human adenovirus A
cuuggccaguuccccuaac

SEQ ID NO: 1534670 - RNA, 19 nt, Human adenovirus A
gguaccauagcgaggaacc

SEQ ID NO: 1534671 - RNA, 20 nt, Human adenovirus A
uaacaaaggugcuucccaca

SEQ ID NO: 1534672 - RNA, 14 nt, Human adenovirus A
acuucauauuugcu

SEQ ID NO: 1534673 - RNA, 15 nt, Human adenovirus A
cgcauuuuucccacu

SEQ ID NO: 1534674 - RNA, 13 nt, Human adenovirus A
gaggaaagacagc

SEQ ID NO: 1534675 - RNA, 16 nt, Human adenovirus A
ugaguaacuucaacau

SEQ ID NO: 1534676 - RNA, 14 nt, Human adenovirus A
agacgacaacugag

SEQ ID NO: 1534677 - RNA, 23 nt, Human adenovirus A
gaccaauccaaacccccaaaagc

SEQ ID NO: 1534678 - RNA, 14 nt, Human adenovirus A
guaugcgcagacgc

SEQ ID NO: 1534679 - RNA, 15 nt, Human adenovirus A
ugcagccucauacaa

SEQ ID NO: 1534680 - RNA, 21 nt, Human adenovirus A
agccuucauuccuucagaaua

SEQ ID NO: 1534681 - RNA, 22 nt, Human adenovirus A
acgcgugguuaaacugccuccu

SEQ ID NO: 1534682 - RNA, 14 nt, Human adenovirus A
ugcaagugauaguu

SEQ ID NO: 1534683 - RNA, 16 nt, Human adenovirus A
caacuuaacaaauuua

SEQ ID NO: 1534684 - RNA, 18 nt, Human adenovirus A
cuggcaguuuagaggcca

SEQ ID NO: 1534685 - RNA, 13 nt, Human adenovirus A
ucacacuuaacac

SEQ ID NO: 1534686 - RNA, 15 nt, Human adenovirus A
gcgagcgcauagaaa

SEQ ID NO: 1534687 - RNA, 13 nt, Human adenovirus A
gcuaauaccuguc

SEQ ID NO: 1534688 - RNA, 19 nt, Human adenovirus A
caugauguuuaauaaagcg

SEQ ID NO: 1534689 - RNA, 20 nt, Human adenovirus A
accgacgaagcgucagcucg

SEQ ID NO: 1534690 - RNA, 15 nt, Human adenovirus A
gcugaggaaaugcga

SEQ ID NO: 1534691 - RNA, 17 nt, Human adenovirus A
cauccccagacaguuuc

SEQ ID NO: 1534692 - RNA, 20 nt, Human adenovirus A
caugcuuuagguuagccuga

SEQ ID NO: 1534693 - RNA, 15 nt, Human adenovirus A
aguuuaaaggcauua

SEQ ID NO: 1534694 - RNA, 16 nt, Human adenovirus A
uauaguaaaaaugcca

SEQ ID NO: 1534695 - RNA, 12 nt, Human adenovirus A
agcccacaagga

SEQ ID NO: 1534696 - RNA, 20 nt, Human adenovirus A
uggaaaaagaucaaggaaau

SEQ ID NO: 1534697 - RNA, 14 nt, Human adenovirus A
uucaauaaauacug

SEQ ID NO: 1534698 - RNA, 23 nt, Human adenovirus A
caacuaaaaauuguuuuuguucu

SEQ ID NO: 1534699 - RNA, 14 nt, Human adenovirus A
ugcauuaccagcag

SEQ ID NO: 1534700 - RNA, 12 nt, Human adenovirus A
aggcaaagaaca

SEQ ID NO: 1534701 - RNA, 16 nt, Human adenovirus A
gaugcgagcaauaacc

SEQ ID NO: 1534702 - RNA, 16 nt, Human adenovirus A
ggagaaggcauagccc

SEQ ID NO: 1534703 - RNA, 13 nt, Human adenovirus A
ugaaucuguggau

SEQ ID NO: 1534704 - RNA, 17 nt, Human adenovirus A
aggcaacguuggcagcg

SEQ ID NO: 1534705 - RNA, 17 nt, Human adenovirus A
gaacaaacagugccugu

SEQ ID NO: 1534706 - RNA, 16 nt, Human adenovirus A
auauguuucuguacug

SEQ ID NO: 1534707 - RNA, 13 nt, Human adenovirus A
gcagcuggagugg

SEQ ID NO: 1534708 - RNA, 18 nt, Human adenovirus A
cuagccaacauccagugc

SEQ ID NO: 1534709 - RNA, 14 nt, Human adenovirus A
aaugcccugcaaaa

SEQ ID NO: 1534710 - RNA, 20 nt, Human adenovirus A
gcuucagguguuaucuucaa

SEQ ID NO: 1534711 - RNA, 14 nt, Human adenovirus A
gcagugaggacacu

SEQ ID NO: 1534712 - RNA, 17 nt, Human adenovirus A
cauggcugaagaggagg

SEQ ID NO: 1534713 - RNA, 19 nt, Human adenovirus A
gcauugcgauaaacuggau

SEQ ID NO: 1534714 - RNA, 17 nt, Human adenovirus A
aguguauggaaaaaacg

SEQ ID NO: 1534715 - RNA, 14 nt, Human adenovirus A
gcgacucagugacc

SEQ ID NO: 1534716 - RNA, 14 nt, Human adenovirus A
aggauguugggccc

SEQ ID NO: 1534717 - RNA, 23 nt, Human adenovirus A
cucuuacgaaaccgugauggcag

SEQ ID NO: 1534718 - RNA, 17 nt, Human adenovirus A
cuuuaauaaaaacacug

SEQ ID NO: 1534719 - RNA, 14 nt, Human adenovirus A
ccuaucuguugcua

SEQ ID NO: 1534720 - RNA, 15 nt, Human adenovirus A
aauguguuccaguau

SEQ ID NO: 1534721 - RNA, 21 nt, Human adenovirus A
auuugcugaaaaaagucugga

SEQ ID NO: 1534722 - RNA, 15 nt, Human adenovirus A
agguggcuggacugc

SEQ ID NO: 1534723 - RNA, 14 nt, Human adenovirus A
cuaauagaacugga

SEQ ID NO: 1534724 - RNA, 21 nt, Human adenovirus A
gaucuagaaauugauggaaga

SEQ ID NO: 1534725 - RNA, 17 nt, Human adenovirus A
ugcauguccagauuuca

SEQ ID NO: 1534726 - RNA, 15 nt, Human adenovirus A
gguggacaacaaguc

SEQ ID NO: 1534727 - RNA, 19 nt, Human adenovirus A
agccaaaccggccagaugc

SEQ ID NO: 1534728 - RNA, 17 nt, Human adenovirus A
cuagucccauuacagua

SEQ ID NO: 1534729 - RNA, 19 nt, Human adenovirus A
caggaagagccucaauguc

SEQ ID NO: 1534730 - RNA, 22 nt, Human adenovirus A
gauacuaccgcugcucagcucc

SEQ ID NO: 1534731 - RNA, 20 nt, Human adenovirus A
agcaauuacuugaacaacuu

SEQ ID NO: 1534732 - RNA, 12 nt, Human adenovirus A
gcguacagccag

SEQ ID NO: 1534733 - RNA, 21 nt, Human adenovirus A
caaacaacgaaggccaaacca

SEQ ID NO: 1534734 - RNA, 18 nt, Human adenovirus A
gaaagaucacagccagau

SEQ ID NO: 1534735 - RNA, 18 nt, Human adenovirus A
gucaggcgugcgcagucu

SEQ ID NO: 1534736 - RNA, 23 nt, Human adenovirus A
aagcgcgacuaguccguuuucuu

SEQ ID NO: 1534737 - RNA, 16 nt, Human adenovirus A
auggagugucacugcc

SEQ ID NO: 1534738 - RNA, 23 nt, Human adenovirus A
gccuucaaaacguguaccugccu

SEQ ID NO: 1534739 - RNA, 14 nt, Human adenovirus A
aaccacggccucag

SEQ ID NO: 1534740 - RNA, 15 nt, Human adenovirus A
aagauacuaccuacu

SEQ ID NO: 1534741 - RNA, 21 nt, Human adenovirus A
cuaaaacaaggucuagccaac

SEQ ID NO: 1534742 - RNA, 23 nt, Human adenovirus A
ggagggacaagcuuaccccgcca

SEQ ID NO: 1534743 - RNA, 12 nt, Human adenovirus A
guuuccagugcg

SEQ ID NO: 1534744 - RNA, 16 nt, Human adenovirus A
cuuuggaggcagcugg

SEQ ID NO: 1534745 - RNA, 18 nt, Human adenovirus A
guagacauuguuggccug

SEQ ID NO: 1534746 - RNA, 17 nt, Human adenovirus A
uguaaagauuugaaauu

SEQ ID NO: 1534747 - RNA, 19 nt, Human adenovirus A
acucuacuaacaacuccag

SEQ ID NO: 1534748 - RNA, 17 nt, Human adenovirus A
ugcaagaggagaaggag

SEQ ID NO: 1534749 - RNA, 14 nt, Human adenovirus A
uuugaccggucagg

SEQ ID NO: 1534750 - RNA, 14 nt, Human adenovirus A
aaaacaaguuuccc

SEQ ID NO: 1534751 - RNA, 14 nt, Human adenovirus A
caaaaaguaacaac

SEQ ID NO: 1534752 - RNA, 21 nt, Human adenovirus A
ggucuuaaaaauuuugguucc

SEQ ID NO: 1534753 - RNA, 12 nt, Human adenovirus A
cacagcuuccag

SEQ ID NO: 1534754 - RNA, 17 nt, Human adenovirus A
agccauggcgaccagug

SEQ ID NO: 1534755 - RNA, 17 nt, Human adenovirus A
caagcgugcaaacagac

SEQ ID NO: 1534756 - RNA, 18 nt, Human adenovirus A
guaccgccugaagaagaa

SEQ ID NO: 1534757 - RNA, 14 nt, Human adenovirus A
aacccggccaagga

SEQ ID NO: 1534758 - RNA, 15 nt, Human adenovirus A
gauuguguccuugga

SEQ ID NO: 1534759 - RNA, 18 nt, Human adenovirus A
cuacuacgugagaauugu

SEQ ID NO: 1534760 - RNA, 11 nt, Human adenovirus A
uagucauauag

SEQ ID NO: 1534761 - RNA, 13 nt, Human adenovirus A
acaacaauuugca

SEQ ID NO: 1534762 - RNA, 17 nt, Human adenovirus A
gcgucagcucguugaug

SEQ ID NO: 1534763 - RNA, 15 nt, Human adenovirus A
uuacaacuugcuucc

SEQ ID NO: 1534764 - RNA, 15 nt, Human adenovirus A
augcuaugcaggcag

SEQ ID NO: 1534765 - RNA, 17 nt, Human adenovirus A
uuaauaauaaaaccauu

SEQ ID NO: 1534766 - RNA, 23 nt, Human adenovirus A
uuuucuagaacaaaaaggaggaa

SEQ ID NO: 1534767 - RNA, 18 nt, Human adenovirus A
agcuggguugguguugcu

SEQ ID NO: 1534768 - RNA, 14 nt, Human adenovirus A
gauagcaagcguaa

SEQ ID NO: 1534769 - RNA, 22 nt, Human adenovirus A
acaggcggguaagagcaggcug

SEQ ID NO: 1534770 - RNA, 22 nt, Human adenovirus A
ccuaucuguugcuacugcagac

SEQ ID NO: 1534771 - RNA, 17 nt, Human adenovirus A
cuaccaccuaagaaggc

SEQ ID NO: 1534772 - RNA, 17 nt, Human adenovirus A
aauucuggaauaacaag

SEQ ID NO: 1534773 - RNA, 18 nt, Human adenovirus A
cugagacgaagaaauaca

SEQ ID NO: 1534774 - RNA, 18 nt, Human adenovirus A
caucgccggucaggaugc

SEQ ID NO: 1534775 - RNA, 13 nt, Human adenovirus A
cugccgcugcaau

SEQ ID NO: 1534776 - RNA, 14 nt, Human adenovirus A
uaagaaccaagcau

SEQ ID NO: 1534777 - RNA, 17 nt, Human adenovirus A
guaaaccuugaaaugcc

SEQ ID NO: 1534778 - RNA, 17 nt, Human adenovirus A
cccugucaacagcauug

SEQ ID NO: 1534779 - RNA, 19 nt, Human adenovirus A
gaggugcucccgcagugag

SEQ ID NO: 1534780 - RNA, 13 nt, Human adenovirus A
ucuaccaaggaaa

SEQ ID NO: 1534781 - RNA, 12 nt, Human adenovirus A
guuucuucuaaa

SEQ ID NO: 1534782 - RNA, 21 nt, Human adenovirus A
accuucuggcuuguaugcuca

SEQ ID NO: 1534783 - RNA, 19 nt, Human adenovirus A
guauuauuugaacacacug

SEQ ID NO: 1534784 - RNA, 23 nt, Human adenovirus A
uaaagcgcagaguauccacacag

SEQ ID NO: 1534785 - RNA, 12 nt, Human adenovirus A
uaccaugaugga

SEQ ID NO: 1534786 - RNA, 11 nt, Human adenovirus A
ggcugaagagg

SEQ ID NO: 1534787 - RNA, 17 nt, Human adenovirus A
cugcuagaacaagccgc

SEQ ID NO: 1534788 - RNA, 14 nt, Human adenovirus A
aaaugggaaaugag

SEQ ID NO: 1534789 - RNA, 14 nt, Human adenovirus A
gcgucccaaaagca

SEQ ID NO: 1534790 - RNA, 14 nt, Human adenovirus A
acugcauuggguga

SEQ ID NO: 1534791 - RNA, 13 nt, Human adenovirus A
gguuuaauguuua

SEQ ID NO: 1534792 - RNA, 18 nt, Human adenovirus A
cuggccagugugcgcuuu

SEQ ID NO: 1534793 - RNA, 16 nt, Human adenovirus A
cgacucauaagcugug

SEQ ID NO: 1534794 - RNA, 15 nt, Human adenovirus A
gacucggcauaauac

SEQ ID NO: 1534795 - RNA, 23 nt, Human adenovirus A
agcccaacccauugacaaagaug

SEQ ID NO: 1534796 - RNA, 20 nt, Human adenovirus A
agguuuuuugggaugaaaaa

SEQ ID NO: 1534797 - RNA, 15 nt, Human adenovirus A
acuaccuagcuuacc

SEQ ID NO: 1534798 - RNA, 19 nt, Human adenovirus A
ugcgguuccagaaggagua

SEQ ID NO: 1534799 - RNA, 12 nt, Human adenovirus A
aacauuaaaaga

SEQ ID NO: 1534800 - RNA, 15 nt, Human adenovirus A
guauucauauaugua

SEQ ID NO: 1534801 - RNA, 17 nt, Human adenovirus A
aggugcaagaaggccau

SEQ ID NO: 1534802 - RNA, 13 nt, Human adenovirus A
uccagaggaggag

SEQ ID NO: 1534803 - RNA, 23 nt, Human adenovirus A
uggccauaauguaacccuucccc

SEQ ID NO: 1534804 - RNA, 21 nt, Human adenovirus A
gcgacaaagagcuuaugcaua

SEQ ID NO: 1534805 - RNA, 14 nt, Human adenovirus A
ucaacccaaacugu

SEQ ID NO: 1534806 - RNA, 17 nt, Human adenovirus A
agagcacacugggaaau

SEQ ID NO: 1534807 - RNA, 12 nt, Human adenovirus A
aaugaacaaaau

SEQ ID NO: 1534808 - RNA, 16 nt, Human adenovirus A
uaaagauuugaaauuu

SEQ ID NO: 1534809 - RNA, 20 nt, Human adenovirus A
gcucgcugguccccagaugu

SEQ ID NO: 1534810 - RNA, 18 nt, Human adenovirus A
agcucauuggaguacaag

SEQ ID NO: 1534811 - RNA, 20 nt, Human adenovirus A
ccacugcgucaguaacaaac

SEQ ID NO: 1534812 - RNA, 19 nt, Human adenovirus A
gggccaggaggacacuggc

SEQ ID NO: 1534813 - RNA, 19 nt, Human adenovirus A
gcuuagauggagguggaaa

SEQ ID NO: 1534814 - RNA, 18 nt, Human adenovirus A
caguggacaaaaacuaug

SEQ ID NO: 1534815 - RNA, 23 nt, Human adenovirus A
ccauccgugcguuaccacccuag

SEQ ID NO: 1534816 - RNA, 14 nt, Human adenovirus A
gguucucuuucaac

SEQ ID NO: 1534817 - RNA, 19 nt, Human adenovirus A
cuagccaacauccagugcg

SEQ ID NO: 1534818 - RNA, 20 nt, Human adenovirus A
gcuaauugcccccuuuacca

SEQ ID NO: 1534819 - RNA, 16 nt, Human adenovirus A
aucaaggaaauacuau

SEQ ID NO: 1534820 - RNA, 16 nt, Human adenovirus A
gugccuccccgcuauu

SEQ ID NO: 1534821 - RNA, 21 nt, Human adenovirus A
gcucgcagcgucugacgcugc

SEQ ID NO: 1534822 - RNA, 15 nt, Human adenovirus A
gaacggacaguagcu

SEQ ID NO: 1534823 - RNA, 14 nt, Human adenovirus A
acucaucagaggga

SEQ ID NO: 1534824 - RNA, 22 nt, Human adenovirus A
ccuacuuacuggggugccuaau

SEQ ID NO: 1534825 - RNA, 17 nt, Human adenovirus A
auauuaaaaagcucugu

SEQ ID NO: 1534826 - RNA, 20 nt, Human adenovirus A
aggcuuucuucaaauccaaa

SEQ ID NO: 1534827 - RNA, 13 nt, Human adenovirus A
guacucaucagag

SEQ ID NO: 1534828 - RNA, 21 nt, Human adenovirus A
cuuaguaacagcauaugaaca

SEQ ID NO: 1534829 - RNA, 22 nt, Human adenovirus A
agugaccgggacgcgugugcca

SEQ ID NO: 1534830 - RNA, 21 nt, Human adenovirus A
ugcagguaauacuuaauuucu

SEQ ID NO: 1534831 - RNA, 19 nt, Human adenovirus A
cagcggggaggaagcugag

SEQ ID NO: 1534832 - RNA, 20 nt, Human adenovirus A
ggaucaaaaacaaguuuccc

SEQ ID NO: 1534833 - RNA, 20 nt, Human adenovirus A
cauaggcaugugguccaggg

SEQ ID NO: 1534834 - RNA, 23 nt, Human adenovirus A
gaaaguuguagauggucuggcuu

SEQ ID NO: 1534835 - RNA, 13 nt, Human adenovirus A
caaccaaaggaga

SEQ ID NO: 1534836 - RNA, 15 nt, Human adenovirus A
gacgggccaggcgca

SEQ ID NO: 1534837 - RNA, 18 nt, Human adenovirus A
uacaaaugcuuagucauu

SEQ ID NO: 1534838 - RNA, 16 nt, Human adenovirus A
gcuucacaauggucag

SEQ ID NO: 1534839 - RNA, 22 nt, Human adenovirus A
ucauugguaccuucgaaaugca

SEQ ID NO: 1534840 - RNA, 17 nt, Human adenovirus A
gcuaacgccaccagcgu

SEQ ID NO: 1534841 - RNA, 13 nt, Human adenovirus A
gucgcaccacugu

SEQ ID NO: 1534842 - RNA, 18 nt, Human adenovirus A
gauauaguacugcuucca

SEQ ID NO: 1534843 - RNA, 23 nt, Human adenovirus A
cgacaaaaauuuucccaacaaug

SEQ ID NO: 1534844 - RNA, 20 nt, Human adenovirus A
gcguacaguuuuggagccaa

SEQ ID NO: 1534845 - RNA, 14 nt, Human adenovirus A
uggauagcaaagcc

SEQ ID NO: 1534846 - RNA, 18 nt, Human adenovirus A
cuguaucccaucccagcu

SEQ ID NO: 1534847 - RNA, 16 nt, Human adenovirus A
gccaacaaaaaccccu

SEQ ID NO: 1534848 - RNA, 22 nt, Human adenovirus A
acgaggguuuuguccuuccagg

SEQ ID NO: 1534849 - RNA, 23 nt, Human adenovirus A
ccuugcuugacucucgggcgagu

SEQ ID NO: 1534850 - RNA, 13 nt, Human adenovirus A
gugaguuggccug

SEQ ID NO: 1534851 - RNA, 21 nt, Human adenovirus A
guugcaagcgaucccauagcu

SEQ ID NO: 1534852 - RNA, 13 nt, Human adenovirus A
aaagccaaauggu

SEQ ID NO: 1534853 - RNA, 15 nt, Human adenovirus A
cagacaguggcuuuu

SEQ ID NO: 1534854 - RNA, 12 nt, Human adenovirus A
agucagcugcaa

SEQ ID NO: 1534855 - RNA, 22 nt, Human adenovirus A
cagucgcguggcauuugugccu

SEQ ID NO: 1534856 - RNA, 20 nt, Human adenovirus A
uaugcgcuguaccauacauu

SEQ ID NO: 1534857 - RNA, 15 nt, Human adenovirus A
caagaggaagaaaga

SEQ ID NO: 1534858 - RNA, 13 nt, Human adenovirus A
cacauacaucacc

SEQ ID NO: 1534859 - RNA, 17 nt, Human adenovirus A
gcuuaguauuugucucc

SEQ ID NO: 1534860 - RNA, 18 nt, Human adenovirus A
caaaacucacccugugcu

SEQ ID NO: 1534861 - RNA, 21 nt, Human adenovirus A
cacaacacauacauacacuca

SEQ ID NO: 1534862 - RNA, 16 nt, Human adenovirus A
uaaaacuaccugauaa

SEQ ID NO: 1534863 - RNA, 15 nt, Human adenovirus A
cuuguuaauguuugu

SEQ ID NO: 1534864 - RNA, 14 nt, Human adenovirus A
gcacugggccagga

SEQ ID NO: 1534865 - RNA, 15 nt, Human adenovirus A
cuuuaagggcuggcg

SEQ ID NO: 1534866 - RNA, 16 nt, Human adenovirus A
aggugcuucccacaua

SEQ ID NO: 1534867 - RNA, 16 nt, Human adenovirus A
cacacuuaacacaaga

SEQ ID NO: 1534868 - RNA, 19 nt, Human adenovirus A
guucucacgacacgucaca

SEQ ID NO: 1534869 - RNA, 12 nt, Human adenovirus A
gaccccaaggca

SEQ ID NO: 1534870 - RNA, 19 nt, Human adenovirus A
cagaauauaagaacuacaa

SEQ ID NO: 1534871 - RNA, 22 nt, Human adenovirus A
auguaaaggaggcgcuggcuca

SEQ ID NO: 1534872 - RNA, 16 nt, Human adenovirus A
aacgaaaaugugccua

SEQ ID NO: 1534873 - RNA, 17 nt, Human adenovirus A
aacuaccugauaacaag

SEQ ID NO: 1534874 - RNA, 15 nt, Human adenovirus A
uugccuacccggcag

SEQ ID NO: 1534875 - RNA, 21 nt, Human adenovirus A
auaaguuuaaaggcauuaugu

SEQ ID NO: 1534876 - RNA, 13 nt, Human adenovirus A
uggaggcagcugg

SEQ ID NO: 1534877 - RNA, 20 nt, Human adenovirus A
auaacuaacuuuaauguuuc

SEQ ID NO: 1534878 - RNA, 18 nt, Human adenovirus A
gcaaccacggccucagca

SEQ ID NO: 1534879 - RNA, 16 nt, Human adenovirus A
uauaagaaagaggcag

SEQ ID NO: 1534880 - RNA, 22 nt, Human adenovirus A
guucacaauuuucugguggugg

SEQ ID NO: 1534881 - RNA, 13 nt, Human adenovirus A
gacgggccaggcg

SEQ ID NO: 1534882 - RNA, 20 nt, Human adenovirus A
aauccaaggaugacaacauu

SEQ ID NO: 1534883 - RNA, 22 nt, Human adenovirus A
cacugggccaggaggacacugg

SEQ ID NO: 1534884 - RNA, 15 nt, Human adenovirus A
ucuuuugcagcucca

SEQ ID NO: 1534885 - RNA, 20 nt, Human adenovirus A
uucgauaauggggucaugaa

SEQ ID NO: 1534886 - RNA, 18 nt, Human adenovirus A
caucucaccacugaaacu

SEQ ID NO: 1534887 - RNA, 19 nt, Human adenovirus A
ugcagccuacaaugcaacu

SEQ ID NO: 1534888 - RNA, 17 nt, Human adenovirus A
uaaaacagaaccucuua

SEQ ID NO: 1534889 - RNA, 18 nt, Human adenovirus A
aucggcaacagcagcaac

SEQ ID NO: 1534890 - RNA, 17 nt, Human adenovirus A
cauuaucaugaaacucu

SEQ ID NO: 1534891 - RNA, 22 nt, Human adenovirus A
aaguuguggauaccacagaaua

SEQ ID NO: 1534892 - RNA, 19 nt, Human adenovirus A
caaaugcuuagucauuaca

SEQ ID NO: 1534893 - RNA, 15 nt, Human adenovirus A
gcagguggcagcgau

SEQ ID NO: 1534894 - RNA, 18 nt, Human adenovirus A
uaaccauuguaaaugcuu

SEQ ID NO: 1534895 - RNA, 15 nt, Human adenovirus A
gagguauuccuccuu

SEQ ID NO: 1534896 - RNA, 23 nt, Human adenovirus A
aacaugcuuuagguuagccugaa

SEQ ID NO: 1534897 - RNA, 17 nt, Human adenovirus A
cugaaacaaauauuuac

SEQ ID NO: 1534898 - RNA, 11 nt, Human adenovirus A
ccaugagcccg

SEQ ID NO: 1534899 - RNA, 15 nt, Human adenovirus A
gcucaaagaaacagc

SEQ ID NO: 1534900 - RNA, 12 nt, Human adenovirus A
agcaagcggcac

SEQ ID NO: 1534901 - RNA, 14 nt, Human adenovirus A
uagcguccacacag

SEQ ID NO: 1534902 - RNA, 15 nt, Human adenovirus A
cuaaacaaacuguua

SEQ ID NO: 1534903 - RNA, 19 nt, Human adenovirus A
augaaguuuugauuguauu

SEQ ID NO: 1534904 - RNA, 16 nt, Human adenovirus A
gugccacccccagugc

SEQ ID NO: 1534905 - RNA, 17 nt, Human adenovirus A
acaagcacgccaaagcc

SEQ ID NO: 1534906 - RNA, 17 nt, Human adenovirus A
cucgccuggacacuauc

SEQ ID NO: 1534907 - RNA, 22 nt, Human adenovirus A
uuacaagcacgccaaagccaca

SEQ ID NO: 1534908 - RNA, 12 nt, Human adenovirus A
uacaaagccagg

SEQ ID NO: 1534909 - RNA, 15 nt, Human adenovirus A
caucucauaaucagu

SEQ ID NO: 1534910 - RNA, 17 nt, Human adenovirus A
acauuccagagagcuac

SEQ ID NO: 1534911 - RNA, 14 nt, Human adenovirus A
gcaucgacagugag

SEQ ID NO: 1534912 - RNA, 13 nt, Human adenovirus A
agaaacagcagca

SEQ ID NO: 1534913 - RNA, 12 nt, Human adenovirus A
cgcugcagcuuc

SEQ ID NO: 1534914 - RNA, 18 nt, Human adenovirus A
gcccuauccgucuccagc

SEQ ID NO: 1534915 - RNA, 15 nt, Human adenovirus A
auguccuacauugga

SEQ ID NO: 1534916 - RNA, 21 nt, Human adenovirus A
aaaaugcguuuaguccaauuu

SEQ ID NO: 1534917 - RNA, 12 nt, Human adenovirus A
gcguggucagga

SEQ ID NO: 1534918 - RNA, 19 nt, Human adenovirus A
acauucaaauuccugugca

SEQ ID NO: 1534919 - RNA, 15 nt, Human adenovirus A
agacuauagagagga

SEQ ID NO: 1534920 - RNA, 16 nt, Human adenovirus A
uuaaaauuccauaauu

SEQ ID NO: 1534921 - RNA, 16 nt, Human adenovirus A
auuaacuuugaugaaa

SEQ ID NO: 1534922 - RNA, 16 nt, Human adenovirus A
uguggcaccugcaaau

SEQ ID NO: 1534923 - RNA, 14 nt, Human adenovirus A
caugucaaugcagc

SEQ ID NO: 1534924 - RNA, 14 nt, Human adenovirus A
uuaauguuucaggu

SEQ ID NO: 1534925 - RNA, 12 nt, Human adenovirus A
auuugaaugcgu

SEQ ID NO: 1534926 - RNA, 16 nt, Human adenovirus A
ugcuuagucauuacaa

SEQ ID NO: 1534927 - RNA, 18 nt, Human adenovirus A
uaauuuuagauguuaauu

SEQ ID NO: 1534928 - RNA, 20 nt, Human adenovirus A
acuuucuccaaaucuuaaau

SEQ ID NO: 1534929 - RNA, 16 nt, Human adenovirus A
gcgcugacgggagcag

SEQ ID NO: 1534930 - RNA, 20 nt, Human adenovirus A
ccuacccuucuuuauguuuu

SEQ ID NO: 1534931 - RNA, 15 nt, Human adenovirus A
uuuaccaggcaaaga

SEQ ID NO: 1534932 - RNA, 16 nt, Human adenovirus A
acaugguaagcucuug

SEQ ID NO: 1534933 - RNA, 15 nt, Human adenovirus A
uucaaacuuuacaaa

SEQ ID NO: 1534934 - RNA, 17 nt, Human adenovirus A
cagcgacaaagcacuau

SEQ ID NO: 1534935 - RNA, 15 nt, Human adenovirus A
ccugcuuucagcacu

SEQ ID NO: 1534936 - RNA, 16 nt, Human adenovirus A
ucacaaggucuuaaac

SEQ ID NO: 1534937 - RNA, 13 nt, Human adenovirus A
uaacaacaagcua

SEQ ID NO: 1534938 - RNA, 22 nt, Human adenovirus A
ccucguacaggaauucugacca

SEQ ID NO: 1534939 - RNA, 20 nt, Human adenovirus A
cagauguaacaggcggcucc

SEQ ID NO: 1534940 - RNA, 14 nt, Human adenovirus A
acuuaaaaaaggac

SEQ ID NO: 1534941 - RNA, 17 nt, Human adenovirus A
uaaccuguccuuaagac

SEQ ID NO: 1534942 - RNA, 13 nt, Human adenovirus A
ccgcgagcagcgg

SEQ ID NO: 1534943 - RNA, 20 nt, Human adenovirus A
gcaacagcagcaacaaggaa

SEQ ID NO: 1534944 - RNA, 22 nt, Human adenovirus A
agacuucccacagccagugggu

SEQ ID NO: 1534945 - RNA, 18 nt, Human adenovirus A
aggagguuuguaagcggu

SEQ ID NO: 1534946 - RNA, 19 nt, Human adenovirus A
cgagcucccggaggaagcg

SEQ ID NO: 1534947 - RNA, 23 nt, Human adenovirus A
caaauggacgaggguuuuguccu

SEQ ID NO: 1534948 - RNA, 21 nt, Human adenovirus A
gacauccaugugaugccggca

SEQ ID NO: 1534949 - RNA, 14 nt, Human adenovirus A
aacuaacuuuaaug

SEQ ID NO: 1534950 - RNA, 14 nt, Human adenovirus A
gucuguugccaauc

SEQ ID NO: 1534951 - RNA, 21 nt, Human adenovirus A
uaaagcgcagaguauccacac

SEQ ID NO: 1534952 - RNA, 19 nt, Human adenovirus A
ccagugcuuucaacaaaaa

SEQ ID NO: 1534953 - RNA, 22 nt, Human adenovirus A
ccaaaguucgccuacacaacac

SEQ ID NO: 1534954 - RNA, 11 nt, Human adenovirus A
caaugggagau

SEQ ID NO: 1534955 - RNA, 21 nt, Human adenovirus A
uguccuuggaagaggugccua

SEQ ID NO: 1534956 - RNA, 21 nt, Human adenovirus A
ucuucccaacugucaaaccug

SEQ ID NO: 1534957 - RNA, 16 nt, Human adenovirus A
agcggccacuaaagac

SEQ ID NO: 1534958 - RNA, 17 nt, Human adenovirus A
cuugcuuccagacaaaa

SEQ ID NO: 1534959 - RNA, 15 nt, Human adenovirus A
cguaaaaucuacaaa

SEQ ID NO: 1534960 - RNA, 20 nt, Human adenovirus A
gcuggccccgcgacacggca

SEQ ID NO: 1534961 - RNA, 13 nt, Human adenovirus A
aacagcuauugca

SEQ ID NO: 1534962 - RNA, 20 nt, Human adenovirus A
gcuggcgggagggcauuaaa

SEQ ID NO: 1534963 - RNA, 23 nt, Human adenovirus A
accguucccuaucauuaagaaca

SEQ ID NO: 1534964 - RNA, 18 nt, Human adenovirus A
gcaccuuuaauacugaaa

SEQ ID NO: 1534965 - RNA, 22 nt, Human adenovirus A
guaaacaugauucuucagagca

SEQ ID NO: 1534966 - RNA, 18 nt, Human adenovirus A
cuuucucugugacaaaaa

SEQ ID NO: 1534967 - RNA, 12 nt, Human adenovirus A
cuccaucuguuu

SEQ ID NO: 1534968 - RNA, 18 nt, Human adenovirus A
cauaauacgguguucuca

SEQ ID NO: 1534969 - RNA, 19 nt, Human adenovirus A
cuccugagcgucacccaag

SEQ ID NO: 1534970 - RNA, 14 nt, Human adenovirus A
agacaaagagugac

SEQ ID NO: 1534971 - RNA, 15 nt, Human adenovirus A
uucuuuacaacugua

SEQ ID NO: 1534972 - RNA, 22 nt, Human adenovirus A
gaauucgcaggcggucugccau

SEQ ID NO: 1534973 - RNA, 21 nt, Human adenovirus A
cgccaaguaacaacacgggcu

SEQ ID NO: 1534974 - RNA, 18 nt, Human adenovirus A
ccuucaauuggaacagua

SEQ ID NO: 1534975 - RNA, 19 nt, Human adenovirus A
gcgacagaguugcuuuuag

SEQ ID NO: 1534976 - RNA, 18 nt, Human adenovirus A
ugggcuuuggacuucugc

SEQ ID NO: 1534977 - RNA, 20 nt, Human adenovirus A
cucaaagaaacagcagcaac

SEQ ID NO: 1534978 - RNA, 22 nt, Human adenovirus A
agcggcaagaacaauuucauca

SEQ ID NO: 1534979 - RNA, 14 nt, Human adenovirus A
aagaccaauccaaa

SEQ ID NO: 1534980 - RNA, 14 nt, Human adenovirus A
acaggaaagcuuaa

SEQ ID NO: 1534981 - RNA, 14 nt, Human adenovirus A
gacgagcucccgga

SEQ ID NO: 1534982 - RNA, 22 nt, Human adenovirus A
gcggcgagaaugggaggaaaga

SEQ ID NO: 1534983 - RNA, 20 nt, Human adenovirus A
auacuaaauaucgcagcugg

SEQ ID NO: 1534984 - RNA, 18 nt, Human adenovirus A
uccuccauuacuaccguc

SEQ ID NO: 1534985 - RNA, 14 nt, Human adenovirus A
aaauauccaaagua

SEQ ID NO: 1534986 - RNA, 15 nt, Human adenovirus A
cauucuuccacuguu

SEQ ID NO: 1534987 - RNA, 17 nt, Human adenovirus A
uacaugggcaccuggaa

SEQ ID NO: 1534988 - RNA, 16 nt, Human adenovirus A
aaauuucccucuuccc

SEQ ID NO: 1534989 - RNA, 13 nt, Human adenovirus A
cuguaaaauuucu

SEQ ID NO: 1534990 - RNA, 16 nt, Human adenovirus A
ucagauccuuagauuu

SEQ ID NO: 1534991 - RNA, 23 nt, Human adenovirus A
ugucaacuacauaaaccauggaa

SEQ ID NO: 1534992 - RNA, 22 nt, Human adenovirus A
uaauaaagcuaaaucugccacu

SEQ ID NO: 1534993 - RNA, 15 nt, Human adenovirus A
aacuuaucagccaga

SEQ ID NO: 1534994 - RNA, 19 nt, Human adenovirus A
ccccgaggaauuugaaggc

SEQ ID NO: 1534995 - RNA, 18 nt, Human adenovirus A
guacaaauuuuuccaccu

SEQ ID NO: 1534996 - RNA, 12 nt, Human adenovirus A
cguuuggaaacu

SEQ ID NO: 1534997 - RNA, 19 nt, Human adenovirus A
cucgcgcuuuggaggcagc

SEQ ID NO: 1534998 - RNA, 18 nt, Human adenovirus A
gcgagcgacugcugcgug

SEQ ID NO: 1534999 - RNA, 21 nt, Human adenovirus A
cuuuaacggcgcgcaguccug

SEQ ID NO: 1535000 - RNA, 14 nt, Human adenovirus A
cuccccuguggagc

SEQ ID NO: 1535001 - RNA, 12 nt, Human adenovirus A
uuuauuggccug

SEQ ID NO: 1535002 - RNA, 11 nt, Human adenovirus A
caguauuuugu

SEQ ID NO: 1535003 - RNA, 16 nt, Human adenovirus A
gcuuucgggcucuggc

SEQ ID NO: 1535004 - RNA, 15 nt, Human adenovirus A
augaugccgcagugg

SEQ ID NO: 1535005 - RNA, 21 nt, Human adenovirus A
gcuuauguacauaauccagca

SEQ ID NO: 1535006 - RNA, 13 nt, Human adenovirus A
cuguaaaaaagug

SEQ ID NO: 1535007 - RNA, 14 nt, Human adenovirus A
gcggcgucagcaga

SEQ ID NO: 1535008 - RNA, 19 nt, Human adenovirus A
aggaaaugcgagacugcag

SEQ ID NO: 1535009 - RNA, 13 nt, Human adenovirus A
gacauccauguga

SEQ ID NO: 1535010 - RNA, 17 nt, Human adenovirus A
gaacggagagggugacg

SEQ ID NO: 1535011 - RNA, 16 nt, Human adenovirus A
cgacgggccaggcgca

SEQ ID NO: 1535012 - RNA, 13 nt, Human adenovirus A
uacaaaggcauua

SEQ ID NO: 1535013 - RNA, 17 nt, Human adenovirus A
cugugacaaaaagacug

SEQ ID NO: 1535014 - RNA, 13 nt, Human adenovirus A
gagaacuaaacaa

SEQ ID NO: 1535015 - RNA, 20 nt, Human adenovirus A
cgcugacgggagcaggaaca

SEQ ID NO: 1535016 - RNA, 16 nt, Human adenovirus A
ccaauaaagaaaaaac

SEQ ID NO: 1535017 - RNA, 22 nt, Human adenovirus A
acugggauggguguuuggcagc

SEQ ID NO: 1535018 - RNA, 13 nt, Human adenovirus A
aaugcaaaaugga

SEQ ID NO: 1535019 - RNA, 18 nt, Human adenovirus A
gacgggagcaggaacaga

SEQ ID NO: 1535020 - RNA, 22 nt, Human adenovirus A
gccagcaagugccuccucagua

SEQ ID NO: 1535021 - RNA, 15 nt, Human adenovirus A
gaggcagcuggagug

SEQ ID NO: 1535022 - RNA, 15 nt, Human adenovirus A
cagucaccaccagcg

SEQ ID NO: 1535023 - RNA, 12 nt, Human adenovirus A
cuaaauauugua

SEQ ID NO: 1535024 - RNA, 17 nt, Human adenovirus A
cagacaccgcccaggca

SEQ ID NO: 1535025 - RNA, 12 nt, Human adenovirus A
uuaagaaaucuu

SEQ ID NO: 1535026 - RNA, 14 nt, Human adenovirus A
auuuaaggccaggg

SEQ ID NO: 1535027 - RNA, 19 nt, Human adenovirus A
caccaaacugcagccucau

SEQ ID NO: 1535028 - RNA, 12 nt, Human adenovirus A
gcgccaccugcc

SEQ ID NO: 1535029 - RNA, 21 nt, Human adenovirus A
guuuuggcggccaugcaaagc

SEQ ID NO: 1535030 - RNA, 21 nt, Human adenovirus A
agaaggaaaggcauggaaaaa

SEQ ID NO: 1535031 - RNA, 19 nt, Human adenovirus A
aggaggacuuugagccaga

SEQ ID NO: 1535032 - RNA, 14 nt, Human adenovirus A
gcaccccuucccac

SEQ ID NO: 1535033 - RNA, 23 nt, Human adenovirus A
uuaacuaagugguugggaacaga

SEQ ID NO: 1535034 - RNA, 17 nt, Human adenovirus A
gaacaauaaaaaaaaca

SEQ ID NO: 1535035 - RNA, 22 nt, Human adenovirus A
cagguaauacuuaauuucuaga

SEQ ID NO: 1535036 - RNA, 18 nt, Human adenovirus A
acuaacaaugcuuuccau

SEQ ID NO: 1535037 - RNA, 14 nt, Human adenovirus A
guguacacaaugca

SEQ ID NO: 1535038 - RNA, 20 nt, Human adenovirus A
uuucgguugaagugucuugu

SEQ ID NO: 1535039 - RNA, 17 nt, Human adenovirus A
gcuauuguuaacacugc

SEQ ID NO: 1535040 - RNA, 20 nt, Human adenovirus A
gcuaugagcacaagugaggc

SEQ ID NO: 1535041 - RNA, 17 nt, Human adenovirus A
gccauuuuggaagcagu

SEQ ID NO: 1535042 - RNA, 11 nt, Human adenovirus A
cgucacuuuga

SEQ ID NO: 1535043 - RNA, 14 nt, Human adenovirus A
aucgcaagcaggcg

SEQ ID NO: 1535044 - RNA, 14 nt, Human adenovirus A
agaugagccuguau

SEQ ID NO: 1535045 - RNA, 12 nt, Human adenovirus A
cuacaggcaggg

SEQ ID NO: 1535046 - RNA, 17 nt, Human adenovirus A
agaaaucccaccugagu

SEQ ID NO: 1535047 - RNA, 21 nt, Human adenovirus A
gccgucaaaauuuucucccca

SEQ ID NO: 1535048 - RNA, 17 nt, Human adenovirus A
acuuuucaaacuuuaca

SEQ ID NO: 1535049 - RNA, 21 nt, Human adenovirus A
ugucuguugccaauccucuga

SEQ ID NO: 1535050 - RNA, 23 nt, Human adenovirus A
uuuagagggcgaacaguguuuuc

SEQ ID NO: 1535051 - RNA, 13 nt, Human adenovirus A
cugauuuucacau

SEQ ID NO: 1535052 - RNA, 17 nt, Human adenovirus A
ccuuacagaucacggga

SEQ ID NO: 1535053 - RNA, 18 nt, Human adenovirus A
guaauuuuuuucuccuuu

SEQ ID NO: 1535054 - RNA, 19 nt, Human adenovirus A
cuaacgcuggggcacagcu

SEQ ID NO: 1535055 - RNA, 20 nt, Human adenovirus A
caaagguaaugagcgcagug

SEQ ID NO: 1535056 - RNA, 14 nt, Human adenovirus A
auaacacagcuucu

SEQ ID NO: 1535057 - RNA, 13 nt, Human adenovirus A
aggagcagaaauc

SEQ ID NO: 1535058 - RNA, 13 nt, Human adenovirus A
ccgaaagaccacu

SEQ ID NO: 1535059 - RNA, 16 nt, Human adenovirus A
aacacgguacuuuucc

SEQ ID NO: 1535060 - RNA, 12 nt, Human adenovirus A
cccaacccuucc

SEQ ID NO: 1535061 - RNA, 14 nt, Human adenovirus A
ccccuguggagcca

SEQ ID NO: 1535062 - RNA, 18 nt, Human adenovirus A
cauuugcgcccagacgua

SEQ ID NO: 1535063 - RNA, 18 nt, Human adenovirus A
ucuaacugcucagcugga

SEQ ID NO: 1535064 - RNA, 20 nt, Human adenovirus A
uauucgcgugccaggcauuu

SEQ ID NO: 1535065 - RNA, 16 nt, Human adenovirus A
ugcagccuuucuuaaa

SEQ ID NO: 1535066 - RNA, 13 nt, Human adenovirus A
auuugaacacacu

SEQ ID NO: 1535067 - RNA, 13 nt, Human adenovirus A
gcguacagccaga

SEQ ID NO: 1535068 - RNA, 16 nt, Human adenovirus A
aagcaguagugccguc

SEQ ID NO: 1535069 - RNA, 13 nt, Human adenovirus A
auccuagcguaca

SEQ ID NO: 1535070 - RNA, 17 nt, Human adenovirus A
agaaccgucugcaugau

SEQ ID NO: 1535071 - RNA, 19 nt, Human adenovirus A
auguuaauuaucccuuuga

SEQ ID NO: 1535072 - RNA, 14 nt, Human adenovirus A
uggauguuggaagg

SEQ ID NO: 1535073 - RNA, 18 nt, Human adenovirus A
uggaaagcauuuuggauu

SEQ ID NO: 1535074 - RNA, 17 nt, Human adenovirus A
cccgcgguuuuggcggc

SEQ ID NO: 1535075 - RNA, 17 nt, Human adenovirus A
uaguuguggucuagagu

SEQ ID NO: 1535076 - RNA, 17 nt, Human adenovirus A
uuaagggcguacaguuu

SEQ ID NO: 1535077 - RNA, 14 nt, Human adenovirus A
cauccgcaggcagu

SEQ ID NO: 1535078 - RNA, 22 nt, Human adenovirus A
cccagugccgccuuagacauga

SEQ ID NO: 1535079 - RNA, 21 nt, Human adenovirus A
cuuuacaaaccacuuaguuuu

SEQ ID NO: 1535080 - RNA, 12 nt, Human adenovirus A
ugguccaggcua

SEQ ID NO: 1535081 - RNA, 20 nt, Human adenovirus A
cgcccauaacaucaggagca

SEQ ID NO: 1535082 - RNA, 13 nt, Human adenovirus A
uuucaaucauuuc

SEQ ID NO: 1535083 - RNA, 15 nt, Human adenovirus A
agcgacgagcaauua

SEQ ID NO: 1535084 - RNA, 18 nt, Human adenovirus A
cuuugaauaguucaucuu

SEQ ID NO: 1535085 - RNA, 23 nt, Human adenovirus A
cacuggcaacauaccauauuuuc

SEQ ID NO: 1535086 - RNA, 13 nt, Human adenovirus A
auaggaggaguua

SEQ ID NO: 1535087 - RNA, 15 nt, Human adenovirus A
auaucacucuucgcu

SEQ ID NO: 1535088 - RNA, 15 nt, Human adenovirus A
aaacaacgaaggcca

SEQ ID NO: 1535089 - RNA, 13 nt, Human adenovirus A
guacgaaacuguu

SEQ ID NO: 1535090 - RNA, 19 nt, Human adenovirus A
agcacgccaaagccacacc

SEQ ID NO: 1535091 - RNA, 15 nt, Human adenovirus A
cggugcacuuuucca

SEQ ID NO: 1535092 - RNA, 18 nt, Human adenovirus A
agacguaggguacagugg

SEQ ID NO: 1535093 - RNA, 17 nt, Human adenovirus A
uaauauuuugccagcuc

SEQ ID NO: 1535094 - RNA, 14 nt, Human adenovirus A
cacaggauccacuu

SEQ ID NO: 1535095 - RNA, 14 nt, Human adenovirus A
uacaagcacgccaa

SEQ ID NO: 1535096 - RNA, 20 nt, Human adenovirus A
cacuguaaaaccuacacaug

SEQ ID NO: 1535097 - RNA, 17 nt, Human adenovirus A
cgacacuaucaccgccg

SEQ ID NO: 1535098 - RNA, 15 nt, Human adenovirus A
ugugcugcaaacaug

SEQ ID NO: 1535099 - RNA, 19 nt, Human adenovirus A
acaaaaucaccaugggaau

SEQ ID NO: 1535100 - RNA, 15 nt, Human adenovirus A
cgacaacagcugcug

SEQ ID NO: 1535101 - RNA, 15 nt, Human adenovirus A
cuacuccuacaaggc

SEQ ID NO: 1535102 - RNA, 18 nt, Human adenovirus A
cagcgagucaccaucacu

SEQ ID NO: 1535103 - RNA, 17 nt, Human adenovirus A
ucggaagaaaagcgugg

SEQ ID NO: 1535104 - RNA, 14 nt, Human adenovirus A
acgcugcccacuca

SEQ ID NO: 1535105 - RNA, 13 nt, Human adenovirus A
gcccugcuccgac

SEQ ID NO: 1535106 - RNA, 18 nt, Human adenovirus A
uuugcuggagauaaguuu

SEQ ID NO: 1535107 - RNA, 14 nt, Human adenovirus A
acaagugaggcgcu

SEQ ID NO: 1535108 - RNA, 19 nt, Human adenovirus A
acugguaacggucuucaag

SEQ ID NO: 1535109 - RNA, 16 nt, Human adenovirus A
caagcauauaaaacug

SEQ ID NO: 1535110 - RNA, 15 nt, Human adenovirus A
caguuuuugcagugc

SEQ ID NO: 1535111 - RNA, 23 nt, Human adenovirus A
gccccauccguggcaggccaucu

SEQ ID NO: 1535112 - RNA, 12 nt, Human adenovirus A
cuuucuuuagaa

SEQ ID NO: 1535113 - RNA, 21 nt, Human adenovirus A
uggagcagguguaaccagcug

SEQ ID NO: 1535114 - RNA, 15 nt, Human adenovirus A
acugcgucuccccau

SEQ ID NO: 1535115 - RNA, 21 nt, Human adenovirus A
cgcuuucccgagaaccagaua

SEQ ID NO: 1535116 - RNA, 15 nt, Human adenovirus A
cucgcagcucuuauu

SEQ ID NO: 1535117 - RNA, 20 nt, Human adenovirus A
gcuucaagacguuccauggc

SEQ ID NO: 1535118 - RNA, 22 nt, Human adenovirus A
ccauguggagguauaacaaaau

SEQ ID NO: 1535119 - RNA, 17 nt, Human adenovirus A
gcaaagaaacacaugau

SEQ ID NO: 1535120 - RNA, 14 nt, Human adenovirus A
acugucccccacca

SEQ ID NO: 1535121 - RNA, 14 nt, Human adenovirus A
aggaagaacaucca

SEQ ID NO: 1535122 - RNA, 17 nt, Human adenovirus A
ggcuccacaccuugguc

SEQ ID NO: 1535123 - RNA, 18 nt, Human adenovirus A
ccuuauuugacuuccagg

SEQ ID NO: 1535124 - RNA, 14 nt, Human adenovirus A
cuguacgcaaacuc

SEQ ID NO: 1535125 - RNA, 21 nt, Human adenovirus A
gaauuauucccgcagccaaca

SEQ ID NO: 1535126 - RNA, 20 nt, Human adenovirus A
agcuacccuucgcuaugaau

SEQ ID NO: 1535127 - RNA, 16 nt, Human adenovirus A
caguacuucauauuug

SEQ ID NO: 1535128 - RNA, 17 nt, Human adenovirus A
uagcugcaguuugucau

SEQ ID NO: 1535129 - RNA, 22 nt, Human adenovirus A
ggcaaagaaacacaugauggau

SEQ ID NO: 1535130 - RNA, 17 nt, Human adenovirus A
uacaaccacucucgcag

SEQ ID NO: 1535131 - RNA, 17 nt, Human adenovirus A
gagauuacgugcgagac

SEQ ID NO: 1535132 - RNA, 18 nt, Human adenovirus A
aacccuuuagcaguugcu

SEQ ID NO: 1535133 - RNA, 20 nt, Human adenovirus A
uuauaugcgcauggcuuuaa

SEQ ID NO: 1535134 - RNA, 18 nt, Human adenovirus A
caaccucacugcuuugcu

SEQ ID NO: 1535135 - RNA, 20 nt, Human adenovirus A
cccacgccgcgccccacuuc

SEQ ID NO: 1535136 - RNA, 22 nt, Human adenovirus A
ucaaaaaagcaaaguacaacca

SEQ ID NO: 1535137 - RNA, 15 nt, Human adenovirus A
gagcacacugggaaa

SEQ ID NO: 1535138 - RNA, 23 nt, Human adenovirus A
ccuuugaagagcucgacaaggaa

SEQ ID NO: 1535139 - RNA, 19 nt, Human adenovirus A
cccaugaguaggcaaguug

SEQ ID NO: 1535140 - RNA, 13 nt, Human adenovirus A
uaacaacagucag

SEQ ID NO: 1535141 - RNA, 23 nt, Human adenovirus A
uucagguuuuuggagguaucugu

SEQ ID NO: 1535142 - RNA, 16 nt, Human adenovirus A
agagcauugugguuca

SEQ ID NO: 1535143 - RNA, 20 nt, Human adenovirus A
cgaucguucaacuuugucca

SEQ ID NO: 1535144 - RNA, 23 nt, Human adenovirus A
aguccguuuucuucuugagccca

SEQ ID NO: 1535145 - RNA, 18 nt, Human adenovirus A
accaaaugagcaaaacgc

SEQ ID NO: 1535146 - RNA, 19 nt, Human adenovirus A
augccaguuuacugacaga

SEQ ID NO: 1535147 - RNA, 19 nt, Human adenovirus A
cuuaugcgugagggugcca

SEQ ID NO: 1535148 - RNA, 21 nt, Human adenovirus A
acaaaacuuaucagccagagc

SEQ ID NO: 1535149 - RNA, 22 nt, Human adenovirus A
cuuuaagggcuggcgcuuccau

SEQ ID NO: 1535150 - RNA, 16 nt, Human adenovirus A
acaguugaaaaaggaa

SEQ ID NO: 1535151 - RNA, 20 nt, Human adenovirus A
uuacacucaggccauaaaga

SEQ ID NO: 1535152 - RNA, 13 nt, Human adenovirus A
aaaacaaaaccac

SEQ ID NO: 1535153 - RNA, 15 nt, Human adenovirus A
auucggcuauuuaca

SEQ ID NO: 1535154 - RNA, 18 nt, Human adenovirus A
ggcagccaagcgcucgcg

SEQ ID NO: 1535155 - RNA, 18 nt, Human adenovirus A
aaagcagccauaaugccu

SEQ ID NO: 1535156 - RNA, 16 nt, Human adenovirus A
acauugacuguuucca

SEQ ID NO: 1535157 - RNA, 17 nt, Human adenovirus A
agagcguucugggaugc

SEQ ID NO: 1535158 - RNA, 17 nt, Human adenovirus A
cuacauuacgcccccag

SEQ ID NO: 1535159 - RNA, 22 nt, Human adenovirus A
ggugaaagaagacuauagagag

SEQ ID NO: 1535160 - RNA, 18 nt, Human adenovirus A
aauuugccuaaaagcuau

SEQ ID NO: 1535161 - RNA, 13 nt, Human adenovirus A
cagcaagugccuc

SEQ ID NO: 1535162 - RNA, 18 nt, Human adenovirus A
guagaccugcaagacaga

SEQ ID NO: 1535163 - RNA, 16 nt, Human adenovirus A
gugcuacugcgucucc

SEQ ID NO: 1535164 - RNA, 14 nt, Human adenovirus A
acaacgagcaagcc

SEQ ID NO: 1535165 - RNA, 23 nt, Human adenovirus A
auguguugugcacuuccuucaga

SEQ ID NO: 1535166 - RNA, 18 nt, Human adenovirus A
uguagaagcuuauguaca

SEQ ID NO: 1535167 - RNA, 21 nt, Human adenovirus A
caacuuacagcuaguaauaau

SEQ ID NO: 1535168 - RNA, 13 nt, Human adenovirus A
uaaaaucauacaa

SEQ ID NO: 1535169 - RNA, 21 nt, Human adenovirus A
ucgcaauuagggccagcauug

SEQ ID NO: 1535170 - RNA, 18 nt, Human adenovirus A
caaaacacugagcuccau

SEQ ID NO: 1535171 - RNA, 22 nt, Human adenovirus A
aacggcgcgcaguccugaugcu

SEQ ID NO: 1535172 - RNA, 20 nt, Human adenovirus A
auucgcaggcggucugccau

SEQ ID NO: 1535173 - RNA, 13 nt, Human adenovirus A
auagaaaguuugg

SEQ ID NO: 1535174 - RNA, 15 nt, Human adenovirus A
agcagaauuacugcc

SEQ ID NO: 1535175 - RNA, 12 nt, Human adenovirus A
caggugcaagaa

SEQ ID NO: 1535176 - RNA, 14 nt, Human adenovirus A
ccacauacaucacc

SEQ ID NO: 1535177 - RNA, 20 nt, Human adenovirus A
gcagcauguccccgaaagcc

SEQ ID NO: 1535178 - RNA, 21 nt, Human adenovirus A
aacagacgaauaagcucggcc

SEQ ID NO: 1535179 - RNA, 20 nt, Human adenovirus A
aggaacuccgcgcaaggagc

SEQ ID NO: 1535180 - RNA, 15 nt, Human adenovirus A
aauauuguauuucca

SEQ ID NO: 1535181 - RNA, 22 nt, Human adenovirus A
cacauugcaacgcaaucagaau

SEQ ID NO: 1535182 - RNA, 18 nt, Human adenovirus A
aaguacuacuaccacugu

SEQ ID NO: 1535183 - RNA, 19 nt, Human adenovirus A
agcggccacggccggaugc

SEQ ID NO: 1535184 - RNA, 19 nt, Human adenovirus A
cuuacuacgacuugcuaac

SEQ ID NO: 1535185 - RNA, 18 nt, Human adenovirus A
gcaagcgugcaaacagac

SEQ ID NO: 1535186 - RNA, 18 nt, Human adenovirus A
ucuugcauuaaccuuucc

SEQ ID NO: 1535187 - RNA, 19 nt, Human adenovirus A
uaacgcuaccaccuaagaa

SEQ ID NO: 1535188 - RNA, 15 nt, Human adenovirus A
acgccaaagccacac

SEQ ID NO: 1535189 - RNA, 20 nt, Human adenovirus A
aaaacacgucggaaugauua

SEQ ID NO: 1535190 - RNA, 14 nt, Human adenovirus A
aucccagcuaacgc

SEQ ID NO: 1535191 - RNA, 21 nt, Human adenovirus A
aacauccuuuuucuacaggca

SEQ ID NO: 1535192 - RNA, 14 nt, Human adenovirus A
ucucagaaagccaa

SEQ ID NO: 1535193 - RNA, 22 nt, Human adenovirus A
ugcuguacgcaaacucagccca

SEQ ID NO: 1535194 - RNA, 15 nt, Human adenovirus A
ugauuuuacagagag

SEQ ID NO: 1535195 - RNA, 16 nt, Human adenovirus A
cguaaaauacacauaa

SEQ ID NO: 1535196 - RNA, 18 nt, Human adenovirus A
gaagccauguuaagaaau

SEQ ID NO: 1535197 - RNA, 11 nt, Human adenovirus A
ucucuuucaac

SEQ ID NO: 1535198 - RNA, 14 nt, Human adenovirus A
ucucuuuucuuuac

SEQ ID NO: 1535199 - RNA, 14 nt, Human adenovirus A
ugggaggaaagaca

SEQ ID NO: 1535200 - RNA, 21 nt, Human adenovirus A
aauguuuucuggaucagaaac

SEQ ID NO: 1535201 - RNA, 19 nt, Human adenovirus A
uccuuagauuuuucaucug

SEQ ID NO: 1535202 - RNA, 14 nt, Human adenovirus A
augacuggacagcg

SEQ ID NO: 1535203 - RNA, 15 nt, Human adenovirus A
acucacgagaaagug

SEQ ID NO: 1535204 - RNA, 19 nt, Human adenovirus A
aaacucccuuaguuguaaa

SEQ ID NO: 1535205 - RNA, 21 nt, Human adenovirus A
accgucgcuuucaaccaagcc

SEQ ID NO: 1535206 - RNA, 12 nt, Human adenovirus A
ucaccuccaggu

SEQ ID NO: 1535207 - RNA, 20 nt, Human adenovirus A
ggauuauaaaaggcuggaag

SEQ ID NO: 1535208 - RNA, 16 nt, Human adenovirus A
gcauuaccagcagcca

SEQ ID NO: 1535209 - RNA, 18 nt, Human adenovirus A
aaguggaucuccugccac

SEQ ID NO: 1535210 - RNA, 17 nt, Human adenovirus A
uggcuggacugccgaca

SEQ ID NO: 1535211 - RNA, 14 nt, Human adenovirus A
uccucuucugcugc

SEQ ID NO: 1535212 - RNA, 11 nt, Human adenovirus A
uaagggcuggc

SEQ ID NO: 1535213 - RNA, 15 nt, Human adenovirus A
ucagaagccagcagc

SEQ ID NO: 1535214 - RNA, 22 nt, Human adenovirus A
gccuuaaauaaggcugcuagga

SEQ ID NO: 1535215 - RNA, 21 nt, Human adenovirus A
ucauaagcugugaaaaugcgu

SEQ ID NO: 1535216 - RNA, 20 nt, Human adenovirus A
caaacggguggaaaaacaac

SEQ ID NO: 1535217 - RNA, 22 nt, Human adenovirus A
uggugcaauucgcccgcgccac

SEQ ID NO: 1535218 - RNA, 18 nt, Human adenovirus A
agaagacaaagagugacu

SEQ ID NO: 1535219 - RNA, 22 nt, Human adenovirus A
ccacccuguacgcaagcauuuu

SEQ ID NO: 1535220 - RNA, 20 nt, Human adenovirus A
aauuacuuaccggaaaucug

SEQ ID NO: 1535221 - RNA, 16 nt, Human adenovirus A
guacgcguccaccuca

SEQ ID NO: 1535222 - RNA, 17 nt, Human adenovirus A
cuuuagguuagccugaa

SEQ ID NO: 1535223 - RNA, 11 nt, Human adenovirus A
aagugccucaa

SEQ ID NO: 1535224 - RNA, 20 nt, Human adenovirus A
auugcaacgcaaucagaaug

SEQ ID NO: 1535225 - RNA, 17 nt, Human adenovirus A
agcccaauugcaugcua

SEQ ID NO: 1535226 - RNA, 23 nt, Human adenovirus A
gggaccgcagucugacagcaauu

SEQ ID NO: 1535227 - RNA, 16 nt, Human adenovirus A
acgcaugaaggguggg

SEQ ID NO: 1535228 - RNA, 18 nt, Human adenovirus A
cagaaauacagagcuguc

SEQ ID NO: 1535229 - RNA, 20 nt, Human adenovirus A
aggcaaagaaacacaugaug

SEQ ID NO: 1535230 - RNA, 15 nt, Human adenovirus A
caaugacaaugaaua

SEQ ID NO: 1535231 - RNA, 19 nt, Human adenovirus A
cuccagcuauaaaaagagu

SEQ ID NO: 1535232 - RNA, 10 nt, Human adenovirus A
uugcauggug

SEQ ID NO: 1535233 - RNA, 22 nt, Human adenovirus A
ugcgaguaggaagacagcaugg

SEQ ID NO: 1535234 - RNA, 17 nt, Human adenovirus A
gcucaguuauauuuucu

SEQ ID NO: 1535235 - RNA, 19 nt, Human adenovirus A
caagauccggugacuuuuc

SEQ ID NO: 1535236 - RNA, 13 nt, Human adenovirus A
gucuugcauuaac

SEQ ID NO: 1535237 - RNA, 22 nt, Human adenovirus A
cauuggcgcuacggcugucaug

SEQ ID NO: 1535238 - RNA, 12 nt, Human adenovirus A
cgccaagccugu

SEQ ID NO: 1535239 - RNA, 16 nt, Human adenovirus A
acugaggagcugagaa

SEQ ID NO: 1535240 - RNA, 17 nt, Human adenovirus A
caagccuaccugacacu

SEQ ID NO: 1535241 - RNA, 23 nt, Human adenovirus A
ugccacgcuuugaccggucaggc

SEQ ID NO: 1535242 - RNA, 18 nt, Human adenovirus A
caauaacuacaaacaguu

SEQ ID NO: 1535243 - RNA, 17 nt, Human adenovirus A
aggcaacauagccccag

SEQ ID NO: 1535244 - RNA, 14 nt, Human adenovirus A
aguaggcuaacugu

SEQ ID NO: 1535245 - RNA, 14 nt, Human adenovirus A
gacacuacagagcu

SEQ ID NO: 1535246 - RNA, 17 nt, Human adenovirus A
ccucgaccugcaugucc

SEQ ID NO: 1535247 - RNA, 17 nt, Human adenovirus A
cuggacagcggccaugg

SEQ ID NO: 1535248 - RNA, 15 nt, Human adenovirus A
ucaaaauaaacaucu

SEQ ID NO: 1535249 - RNA, 21 nt, Human adenovirus A
ugccuuaggcagcagcagcaa

SEQ ID NO: 1535250 - RNA, 21 nt, Human adenovirus A
acugaaccauucccagguaau

SEQ ID NO: 1535251 - RNA, 18 nt, Human adenovirus A
agucgcaauuagggccag

SEQ ID NO: 1535252 - RNA, 19 nt, Human adenovirus A
ggauuacaugucaaugcag

SEQ ID NO: 1535253 - RNA, 21 nt, Human adenovirus A
auaaagcguucuguggauggg

SEQ ID NO: 1535254 - RNA, 14 nt, Human adenovirus A
aucaguggaguuca

SEQ ID NO: 1535255 - RNA, 15 nt, Human adenovirus A
guagagacaucagau

SEQ ID NO: 1535256 - RNA, 16 nt, Human adenovirus A
ugaaagaucacagcca

SEQ ID NO: 1535257 - RNA, 19 nt, Human adenovirus A
aggaauuuacuccaucugu

SEQ ID NO: 1535258 - RNA, 14 nt, Human adenovirus A
aaaugaccccaucu

SEQ ID NO: 1535259 - RNA, 16 nt, Human adenovirus A
gcgcauugggcggcga

SEQ ID NO: 1535260 - RNA, 13 nt, Human adenovirus A
auuaggcuuucuu

SEQ ID NO: 1535261 - RNA, 21 nt, Human adenovirus A
uacauccuuccauugugccca

SEQ ID NO: 1535262 - RNA, 21 nt, Human adenovirus A
cagccuuuauuuaucugugcu

SEQ ID NO: 1535263 - RNA, 15 nt, Human adenovirus A
acccaagggugcagc

SEQ ID NO: 1535264 - RNA, 21 nt, Human adenovirus A
uaaaggcuagugcccucacac

SEQ ID NO: 1535265 - RNA, 19 nt, Human adenovirus A
uacggagggaagaaacagu

SEQ ID NO: 1535266 - RNA, 21 nt, Human adenovirus A
aauauuuagacuauaaucccu

SEQ ID NO: 1535267 - RNA, 17 nt, Human adenovirus A
cugacagacuugcaaac

SEQ ID NO: 1535268 - RNA, 21 nt, Human adenovirus A
ugcgacguuuuguuaccugug

SEQ ID NO: 1535269 - RNA, 15 nt, Human adenovirus A
aacaaguuuagaaac

SEQ ID NO: 1535270 - RNA, 13 nt, Human adenovirus A
uuugcauuuccca

SEQ ID NO: 1535271 - RNA, 21 nt, Human adenovirus A
ucaugucgcauaaugaaaaca

SEQ ID NO: 1535272 - RNA, 22 nt, Human adenovirus A
ugaaaacaauguucccaaauau

SEQ ID NO: 1535273 - RNA, 23 nt, Human adenovirus A
cugcguucacuuacccgcagcug

SEQ ID NO: 1535274 - RNA, 18 nt, Human adenovirus A
gcgauacaacggccagcc

SEQ ID NO: 1535275 - RNA, 14 nt, Human adenovirus A
uuguauaaaaucau

SEQ ID NO: 1535276 - RNA, 13 nt, Human adenovirus A
ccuguuuaaacau

SEQ ID NO: 1535277 - RNA, 20 nt, Human adenovirus A
ggcuucgaaugcugugacac

SEQ ID NO: 1535278 - RNA, 17 nt, Human adenovirus A
caaaaucuaagccaugc

SEQ ID NO: 1535279 - RNA, 16 nt, Human adenovirus A
aagcaguagaaaguag

SEQ ID NO: 1535280 - RNA, 13 nt, Human adenovirus A
gucucaaaagcag

SEQ ID NO: 1535281 - RNA, 21 nt, Human adenovirus A
ugaugccacuugaauucugga

SEQ ID NO: 1535282 - RNA, 16 nt, Human adenovirus A
uacgcuugugcagccu

SEQ ID NO: 1535283 - RNA, 20 nt, Human adenovirus A
aacagacuggggaauuugca

SEQ ID NO: 1535284 - RNA, 15 nt, Human adenovirus A
uucuuuaccuucugg

SEQ ID NO: 1535285 - RNA, 23 nt, Human adenovirus A
ggucccauccaaguucuaaugca

SEQ ID NO: 1535286 - RNA, 23 nt, Human adenovirus A
aacuuucuccaaaucuuaaaugg

SEQ ID NO: 1535287 - RNA, 21 nt, Human adenovirus A
uugaaccagcgucccaaaagc

SEQ ID NO: 1535288 - RNA, 15 nt, Human adenovirus A
uuuaaaaucuugguc

SEQ ID NO: 1535289 - RNA, 16 nt, Human adenovirus A
gaggacuuggaagaau

SEQ ID NO: 1535290 - RNA, 16 nt, Human adenovirus A
cuuaccaaagccaugg

SEQ ID NO: 1535291 - RNA, 12 nt, Human adenovirus A
caaagaaaacau

SEQ ID NO: 1535292 - RNA, 17 nt, Human adenovirus A
cgggagggacaagcuua

SEQ ID NO: 1535293 - RNA, 16 nt, Human adenovirus A
cgccaauaaaaacaac

SEQ ID NO: 1535294 - RNA, 15 nt, Human adenovirus A
uccagucauagcaac

SEQ ID NO: 1535295 - RNA, 13 nt, Human adenovirus A
gaacuaaaccuuc

SEQ ID NO: 1535296 - RNA, 21 nt, Human adenovirus A
cauauaaaacugauuuaccgc

SEQ ID NO: 1535297 - RNA, 18 nt, Human adenovirus A
ucuaaaccuauaacaaug

SEQ ID NO: 1535298 - RNA, 20 nt, Human adenovirus A
uccucuuccucuucugcugc

SEQ ID NO: 1535299 - RNA, 22 nt, Human adenovirus A
caaaugcgaccucagcccaggg

SEQ ID NO: 1535300 - RNA, 20 nt, Human adenovirus A
cuagccccugucaacagcau

SEQ ID NO: 1535301 - RNA, 20 nt, Human adenovirus A
uuuaugcucguaaaaucuac

SEQ ID NO: 1535302 - RNA, 18 nt, Human adenovirus A
cuuaguaacagcauauga

SEQ ID NO: 1535303 - RNA, 17 nt, Human adenovirus A
uucgcagcgcacuggca

SEQ ID NO: 1535304 - RNA, 13 nt, Human adenovirus A
gagacagaacacg

SEQ ID NO: 1535305 - RNA, 22 nt, Human adenovirus A
acaugcgggggaugaaggaagc

SEQ ID NO: 1535306 - RNA, 15 nt, Human adenovirus A
uccggaaacaacacg

SEQ ID NO: 1535307 - RNA, 16 nt, Human adenovirus A
accucuaaguucuguu

SEQ ID NO: 1535308 - RNA, 17 nt, Human adenovirus A
ggcaggggaagguguug

SEQ ID NO: 1535309 - RNA, 21 nt, Human adenovirus A
gccccauccguggcaggccau

SEQ ID NO: 1535310 - RNA, 22 nt, Human adenovirus A
cagauacuggugcguccaccag

SEQ ID NO: 1535311 - RNA, 13 nt, Human adenovirus A
acaguuuaacaca

SEQ ID NO: 1535312 - RNA, 20 nt, Human adenovirus A
gguggggaaaaugguggugc

SEQ ID NO: 1535313 - RNA, 15 nt, Human adenovirus A
cgcacugggccagga

SEQ ID NO: 1535314 - RNA, 14 nt, Human adenovirus A
uacauaccuggcaa

SEQ ID NO: 1535315 - RNA, 22 nt, Human adenovirus A
gauaagauuguaauuuuuuucu

SEQ ID NO: 1535316 - RNA, 13 nt, Human adenovirus A
aucuuaaauggaa

SEQ ID NO: 1535317 - RNA, 15 nt, Human adenovirus A
cacuguagugcaaaa

SEQ ID NO: 1535318 - RNA, 17 nt, Human adenovirus A
ccuagcguacagccaga

SEQ ID NO: 1535319 - RNA, 22 nt, Human adenovirus A
uuucauuaggcuuucuuccauu

SEQ ID NO: 1535320 - RNA, 15 nt, Human adenovirus A
cucuuuuaagaucuu

SEQ ID NO: 1535321 - RNA, 18 nt, Human adenovirus A
auauuuugccagcucuug

SEQ ID NO: 1535322 - RNA, 13 nt, Human adenovirus A
auagcgaggaacc

SEQ ID NO: 1535323 - RNA, 18 nt, Human adenovirus A
uucaaacaauaacauugc

SEQ ID NO: 1535324 - RNA, 13 nt, Human adenovirus A
gaacuaucuugca

SEQ ID NO: 1535325 - RNA, 20 nt, Human adenovirus A
aacggaucuugggcaaaaua

SEQ ID NO: 1535326 - RNA, 12 nt, Human adenovirus A
augggaggagga

SEQ ID NO: 1535327 - RNA, 23 nt, Human adenovirus A
uaaccugggauacuaccgcugcu

SEQ ID NO: 1535328 - RNA, 23 nt, Human adenovirus A
uggaacaacaggugcaagaaggc

SEQ ID NO: 1535329 - RNA, 21 nt, Human adenovirus A
ccugaugcuuuucgccagcag

SEQ ID NO: 1535330 - RNA, 23 nt, Human adenovirus A
cagcauguccccgaaagccgcaa

SEQ ID NO: 1535331 - RNA, 13 nt, Human adenovirus A
gcucccgccauug

SEQ ID NO: 1535332 - RNA, 14 nt, Human adenovirus A
agacguaggguaca

SEQ ID NO: 1535333 - RNA, 18 nt, Human adenovirus A
caaaucucagaaagccaa

SEQ ID NO: 1535334 - RNA, 15 nt, Human adenovirus A
aacaguacaaagcca

SEQ ID NO: 1535335 - RNA, 17 nt, Human adenovirus A
aauuacuaaaacaguaa

SEQ ID NO: 1535336 - RNA, 14 nt, Human adenovirus A
caggacgcagaagc

SEQ ID NO: 1535337 - RNA, 17 nt, Human adenovirus A
uuaggcagcagcagcaa

SEQ ID NO: 1535338 - RNA, 21 nt, Human adenovirus A
caaaggugcuucccacauaca

SEQ ID NO: 1535339 - RNA, 20 nt, Human adenovirus A
cagucaaugcuucugaaaca

SEQ ID NO: 1535340 - RNA, 16 nt, Human adenovirus A
ucgcgcauaggaggag

SEQ ID NO: 1535341 - RNA, 20 nt, Human adenovirus A
acagcauuggaauuuaacuu

SEQ ID NO: 1535342 - RNA, 23 nt, Human adenovirus A
cagucuguuuaguccugcaguua

SEQ ID NO: 1535343 - RNA, 13 nt, Human adenovirus A
aaguguaauuuuc

SEQ ID NO: 1535344 - RNA, 19 nt, Human adenovirus A
uugccgcacggccaaugcc

SEQ ID NO: 1535345 - RNA, 16 nt, Human adenovirus A
uagcccaauugcaugc

SEQ ID NO: 1535346 - RNA, 15 nt, Human adenovirus A
cuacacaacacaaaa

SEQ ID NO: 1535347 - RNA, 14 nt, Human adenovirus A
uguaacccuucccc

SEQ ID NO: 1535348 - RNA, 22 nt, Human adenovirus A
auccuuccauugugcccacgcc

SEQ ID NO: 1535349 - RNA, 19 nt, Human adenovirus A
ugaauggaacaccagcauu

SEQ ID NO: 1535350 - RNA, 18 nt, Human adenovirus A
aggaggacuuugagccag

SEQ ID NO: 1535351 - RNA, 20 nt, Human adenovirus A
aaaagcuuuaauaaccaugu

SEQ ID NO: 1535352 - RNA, 12 nt, Human adenovirus A
aaacacacacaa

SEQ ID NO: 1535353 - RNA, 17 nt, Human adenovirus A
caucuuaguaauggagu

SEQ ID NO: 1535354 - RNA, 22 nt, Human adenovirus A
gaaguagccauugguuuaaugc

SEQ ID NO: 1535355 - RNA, 19 nt, Human adenovirus A
aaauuguguacuuuucaaa

SEQ ID NO: 1535356 - RNA, 14 nt, Human adenovirus A
aaagccgcaaaaca

SEQ ID NO: 1535357 - RNA, 12 nt, Human adenovirus A
gaugaaggaagc

SEQ ID NO: 1535358 - RNA, 21 nt, Human adenovirus A
cugccauugccgcacggccaa

SEQ ID NO: 1535359 - RNA, 11 nt, Human adenovirus A
auaugcauuua

SEQ ID NO: 1535360 - RNA, 22 nt, Human adenovirus A
gcucgcuuuacgcuggcugugg

SEQ ID NO: 1535361 - RNA, 19 nt, Human adenovirus A
caguuuuggagccaaaaaa

SEQ ID NO: 1535362 - RNA, 14 nt, Human adenovirus A
cuggacauggaaaa

SEQ ID NO: 1535363 - RNA, 17 nt, Human adenovirus A
uccgcggggacagcgcg

SEQ ID NO: 1535364 - RNA, 12 nt, Human adenovirus A
aacaaaacacug

SEQ ID NO: 1535365 - RNA, 23 nt, Human adenovirus A
aaacgaaucccucgcccgcacag

SEQ ID NO: 1535366 - RNA, 21 nt, Human adenovirus A
aacaucuacagcgacaaagca

SEQ ID NO: 1535367 - RNA, 15 nt, Human adenovirus A
aagguauucagcuga

SEQ ID NO: 1535368 - RNA, 18 nt, Human adenovirus A
cucacauuguguaaccag

SEQ ID NO: 1535369 - RNA, 22 nt, Human adenovirus A
cgguccuccucguacaggaauu

SEQ ID NO: 1535370 - RNA, 16 nt, Human adenovirus A
ggcacaacagacuggg

SEQ ID NO: 1535371 - RNA, 15 nt, Human adenovirus A
ucagaugacuggaca

SEQ ID NO: 1535372 - RNA, 19 nt, Human adenovirus A
aaaagcagccauaaugccu

SEQ ID NO: 1535373 - RNA, 17 nt, Human adenovirus A
acauauggcaccaaggc

SEQ ID NO: 1535374 - RNA, 15 nt, Human adenovirus A
gccacagccccuagc

SEQ ID NO: 1535375 - RNA, 15 nt, Human adenovirus A
ugcguuuugugcccg

SEQ ID NO: 1535376 - RNA, 14 nt, Human adenovirus A
ccuugaaaugccag

SEQ ID NO: 1535377 - RNA, 20 nt, Human adenovirus A
ugcgaaccgauugggaaaaa

SEQ ID NO: 1535378 - RNA, 20 nt, Human adenovirus A
uauggagugugcuauuaaag

SEQ ID NO: 1535379 - RNA, 21 nt, Human adenovirus A
uccaaugaaacccgcugugag

SEQ ID NO: 1535380 - RNA, 14 nt, Human adenovirus A
ccacaggugguggg

SEQ ID NO: 1535381 - RNA, 14 nt, Human adenovirus A
gauaaacaaaagca

SEQ ID NO: 1535382 - RNA, 19 nt, Human adenovirus A
gaucuuuguaguagucuug

SEQ ID NO: 1535383 - RNA, 20 nt, Human adenovirus A
uugcuucauugaauuaccag

SEQ ID NO: 1535384 - RNA, 19 nt, Human adenovirus A
cuccaaugaaacccgcugu

SEQ ID NO: 1535385 - RNA, 14 nt, Human adenovirus A
ggugcagcucgccc

SEQ ID NO: 1535386 - RNA, 18 nt, Human adenovirus A
ggccaaacagcuguggaa

SEQ ID NO: 1535387 - RNA, 22 nt, Human adenovirus A
gcaucuauaguaaaaaugccag

SEQ ID NO: 1535388 - RNA, 16 nt, Human adenovirus A
acacaguuucuuuacg

SEQ ID NO: 1535389 - RNA, 16 nt, Human adenovirus A
uuaaauaauauuuugc

SEQ ID NO: 1535390 - RNA, 12 nt, Human adenovirus A
gacaacugaggu

SEQ ID NO: 1535391 - RNA, 16 nt, Human adenovirus A
guacagauguaaagga

SEQ ID NO: 1535392 - RNA, 19 nt, Human adenovirus A
uacaagcacgccaaagcca

SEQ ID NO: 1535393 - RNA, 19 nt, Human adenovirus A
auuaaaagggaagccaugg

SEQ ID NO: 1535394 - RNA, 16 nt, Human adenovirus A
ggaguucccacagaac

SEQ ID NO: 1535395 - RNA, 19 nt, Human adenovirus A
ccccgcgacacggcacgcg

SEQ ID NO: 1535396 - RNA, 20 nt, Human adenovirus A
gcuucuacaaucacuuggcu

SEQ ID NO: 1535397 - RNA, 18 nt, Human adenovirus A
cagaaaguuguagauggu

SEQ ID NO: 1535398 - RNA, 18 nt, Human adenovirus A
cagaugacuggacagcgg

SEQ ID NO: 1535399 - RNA, 16 nt, Human adenovirus A
agccuggagcugucca

SEQ ID NO: 1535400 - RNA, 14 nt, Human adenovirus A
cagcugcugucacu

SEQ ID NO: 1535401 - RNA, 20 nt, Human adenovirus A
caccgucaauucuucuucca

SEQ ID NO: 1535402 - RNA, 15 nt, Human adenovirus A
ucuauagguacgaaa

SEQ ID NO: 1535403 - RNA, 21 nt, Human adenovirus A
gcacugaaaaaccaacaaaca

SEQ ID NO: 1535404 - RNA, 15 nt, Human adenovirus A
cgguuccagaaggag

SEQ ID NO: 1535405 - RNA, 15 nt, Human adenovirus A
gucagcugcaaaccg

SEQ ID NO: 1535406 - RNA, 21 nt, Human adenovirus A
augaccaaacgcaaguucaaa

SEQ ID NO: 1535407 - RNA, 13 nt, Human adenovirus A
gugguuuggugga

SEQ ID NO: 1535408 - RNA, 20 nt, Human adenovirus A
cuuuuuuuuuccauaguucu

SEQ ID NO: 1535409 - RNA, 15 nt, Human adenovirus A
gaucugucagugaaa

SEQ ID NO: 1535410 - RNA, 20 nt, Human adenovirus A
gcuaguucuuacuuugacau

SEQ ID NO: 1535411 - RNA, 15 nt, Human adenovirus A
accguagaugggaca

SEQ ID NO: 1535412 - RNA, 12 nt, Human adenovirus A
ggcuggcuugcc

SEQ ID NO: 1535413 - RNA, 15 nt, Human adenovirus A
cucaggccauaaaga

SEQ ID NO: 1535414 - RNA, 14 nt, Human adenovirus A
cuuuugcagcucca

SEQ ID NO: 1535415 - RNA, 15 nt, Human adenovirus A
gaggaggcggacagc

SEQ ID NO: 1535416 - RNA, 15 nt, Human adenovirus A
aacaucaacugugcu

SEQ ID NO: 1535417 - RNA, 14 nt, Human adenovirus A
uggcuucgaaugcu

SEQ ID NO: 1535418 - RNA, 14 nt, Human adenovirus A
gguaaugagcgcag

SEQ ID NO: 1535419 - RNA, 18 nt, Human adenovirus A
uuacauuauguaaaguca

SEQ ID NO: 1535420 - RNA, 13 nt, Human adenovirus A
gcuacaucuuuua

SEQ ID NO: 1535421 - RNA, 19 nt, Human adenovirus A
cccagacguaggguacagu

SEQ ID NO: 1535422 - RNA, 18 nt, Human adenovirus A
uggaguuuagaaggaaag

SEQ ID NO: 1535423 - RNA, 23 nt, Human adenovirus A
gcgccaaguugaguuccacgagc

SEQ ID NO: 1535424 - RNA, 17 nt, Human adenovirus A
cggguggacggagccag

SEQ ID NO: 1535425 - RNA, 14 nt, Human adenovirus A
agaccaaaugccag

SEQ ID NO: 1535426 - RNA, 19 nt, Human adenovirus A
accaaaugcucuuugcgca

SEQ ID NO: 1535427 - RNA, 13 nt, Human adenovirus A
auacaauguggcc

SEQ ID NO: 1535428 - RNA, 17 nt, Human adenovirus A
ggcggcaugcugaaacc

SEQ ID NO: 1535429 - RNA, 20 nt, Human adenovirus A
auauuagagcguucugggau

SEQ ID NO: 1535430 - RNA, 20 nt, Human adenovirus A
gcaaguguaauuuuccagcg

SEQ ID NO: 1535431 - RNA, 15 nt, Human adenovirus A
caaggcguggaacag

SEQ ID NO: 1535432 - RNA, 23 nt, Human adenovirus A
uuccacuuauugcugcggccauu

SEQ ID NO: 1535433 - RNA, 13 nt, Human adenovirus A
caacaagaugagu

SEQ ID NO: 1535434 - RNA, 14 nt, Human adenovirus A
uucugccuaccugc

SEQ ID NO: 1535435 - RNA, 14 nt, Human adenovirus A
ccguuccuguugca

SEQ ID NO: 1535436 - RNA, 18 nt, Human adenovirus A
ccaacaugaggcgguggu

SEQ ID NO: 1535437 - RNA, 15 nt, Human adenovirus A
auggacucaaauaaa

SEQ ID NO: 1535438 - RNA, 16 nt, Human adenovirus A
uaaaauacacauaaag

SEQ ID NO: 1535439 - RNA, 21 nt, Human adenovirus A
acagcuucuacuuuagaagcc

SEQ ID NO: 1535440 - RNA, 22 nt, Human adenovirus A
cuauaacaguaccaaugugcag

SEQ ID NO: 1535441 - RNA, 17 nt, Human adenovirus A
gaaugauuaaacaacaa

SEQ ID NO: 1535442 - RNA, 14 nt, Human adenovirus A
gcuccugcauuaau

SEQ ID NO: 1535443 - RNA, 13 nt, Human adenovirus A
ccaccaccaaacu

SEQ ID NO: 1535444 - RNA, 22 nt, Human adenovirus A
agcaacuuuuuaaccacuguag

SEQ ID NO: 1535445 - RNA, 21 nt, Human adenovirus A
cagacaguuucaucaccagca

SEQ ID NO: 1535446 - RNA, 22 nt, Human adenovirus A
ggauccuagcguacagccagau

SEQ ID NO: 1535447 - RNA, 21 nt, Human adenovirus A
acucuauugccaccuuuuguu

SEQ ID NO: 1535448 - RNA, 14 nt, Human adenovirus A
gucgcaugugaggg

SEQ ID NO: 1535449 - RNA, 15 nt, Human adenovirus A
gcagcaacaaggaaa

SEQ ID NO: 1535450 - RNA, 21 nt, Human adenovirus A
caaccguuuagagccgcggcc

SEQ ID NO: 1535451 - RNA, 15 nt, Human adenovirus A
ccauuagcauagcca

SEQ ID NO: 1535452 - RNA, 23 nt, Human adenovirus A
uuaagaacacggugaauguguuc

SEQ ID NO: 1535453 - RNA, 17 nt, Human adenovirus A
uauggaaauccaaacuu

SEQ ID NO: 1535454 - RNA, 17 nt, Human adenovirus A
ugccgacguugcaagag

SEQ ID NO: 1535455 - RNA, 15 nt, Human adenovirus A
aggaccccaaggcau

SEQ ID NO: 1535456 - RNA, 17 nt, Human adenovirus A
auucuuucuuuagaaac

SEQ ID NO: 1535457 - RNA, 15 nt, Human adenovirus A
aauaauuggcuucag

SEQ ID NO: 1535458 - RNA, 14 nt, Human adenovirus A
uaguccaagcaagu

SEQ ID NO: 1535459 - RNA, 11 nt, Human adenovirus A
ccauguugcua

SEQ ID NO: 1535460 - RNA, 21 nt, Human adenovirus A
caaguugacuucgcacaggcg

SEQ ID NO: 1535461 - RNA, 19 nt, Human adenovirus A
uacaacucuacaaaucuug

SEQ ID NO: 1535462 - RNA, 16 nt, Human adenovirus A
cuucucccugugcuuc

SEQ ID NO: 1535463 - RNA, 18 nt, Human adenovirus A
acuguugaugcaguaauu

SEQ ID NO: 1535464 - RNA, 18 nt, Human adenovirus A
caguaugcugaagaaaca

SEQ ID NO: 1535465 - RNA, 18 nt, Human adenovirus A
aacuacauuacgccccca

SEQ ID NO: 1535466 - RNA, 13 nt, Human adenovirus A
gcauuaagccaga

SEQ ID NO: 1535467 - RNA, 18 nt, Human adenovirus A
acagcagcaacaaggaaa

SEQ ID NO: 1535468 - RNA, 17 nt, Human adenovirus A
ggcggccaugcaaagcc

SEQ ID NO: 1535469 - RNA, 21 nt, Human adenovirus A
caaaguaauauuguagccugc

SEQ ID NO: 1535470 - RNA, 13 nt, Human adenovirus A
gcgaguaggaaga

SEQ ID NO: 1535471 - RNA, 19 nt, Human adenovirus A
gcugccgacguugcaagag

SEQ ID NO: 1535472 - RNA, 16 nt, Human adenovirus A
agaccaaaauuuucaa

SEQ ID NO: 1535473 - RNA, 18 nt, Human adenovirus A
gugucuucucccugugcu

SEQ ID NO: 1535474 - RNA, 11 nt, Human adenovirus A
ucuagaaacug

SEQ ID NO: 1535475 - RNA, 17 nt, Human adenovirus A
ugggaggauauggagug

SEQ ID NO: 1535476 - RNA, 22 nt, Human adenovirus A
aauuaagcgagcccaacccauu

SEQ ID NO: 1535477 - RNA, 21 nt, Human adenovirus A
auauucgcgugccaggcauuu

SEQ ID NO: 1535478 - RNA, 17 nt, Human adenovirus A
aucagccuuucucuaca

SEQ ID NO: 1535479 - RNA, 18 nt, Human adenovirus A
uguaauaaagcuaaaucu

SEQ ID NO: 1535480 - RNA, 20 nt, Human adenovirus A
ggaguguacacuaaugaggc

SEQ ID NO: 1535481 - RNA, 15 nt, Human adenovirus A
agcuguggagggcau

SEQ ID NO: 1535482 - RNA, 21 nt, Human adenovirus A
gucgugguggaagcuggccau

SEQ ID NO: 1535483 - RNA, 13 nt, Human adenovirus A
gcagcaacggcag

SEQ ID NO: 1535484 - RNA, 15 nt, Human adenovirus A
aggagcugagaagug

SEQ ID NO: 1535485 - RNA, 16 nt, Human adenovirus A
auaaaagcauacuuac

SEQ ID NO: 1535486 - RNA, 22 nt, Human adenovirus A
cauuaccagcagccaaaacuca

SEQ ID NO: 1535487 - RNA, 23 nt, Human adenovirus A
gaaguauuccaugagcccgggga

SEQ ID NO: 1535488 - RNA, 14 nt, Human adenovirus A
auucaucauuuguc

SEQ ID NO: 1535489 - RNA, 12 nt, Human adenovirus A
guccacacaguu

SEQ ID NO: 1535490 - RNA, 19 nt, Human adenovirus A
uaaggcauguuugacaaga

SEQ ID NO: 1535491 - RNA, 21 nt, Human adenovirus A
cuaugaugcgggcagccaggc

SEQ ID NO: 1535492 - RNA, 23 nt, Human adenovirus A
cugggguuaagcaguagaaagua

SEQ ID NO: 1535493 - RNA, 13 nt, Human adenovirus A
aaagcaucccagc

SEQ ID NO: 1535494 - RNA, 16 nt, Human adenovirus A
cuacauuacgccccca

SEQ ID NO: 1535495 - RNA, 15 nt, Human adenovirus A
cucauccucagcucc

SEQ ID NO: 1535496 - RNA, 22 nt, Human adenovirus A
uauuauugaagggaauggcuau

SEQ ID NO: 1535497 - RNA, 22 nt, Human adenovirus A
uaagcaggaaaaaaaagaaagu

SEQ ID NO: 1535498 - RNA, 12 nt, Human adenovirus A
ccagucacaguc

SEQ ID NO: 1535499 - RNA, 18 nt, Human adenovirus A
auuugcgaguaggaagac

SEQ ID NO: 1535500 - RNA, 23 nt, Human adenovirus A
cuguacagaaaaaaauugccaac

SEQ ID NO: 1535501 - RNA, 19 nt, Human adenovirus A
ccagagcaccccuucccac

SEQ ID NO: 1535502 - RNA, 18 nt, Human adenovirus A
agcacacugggaaaugau

SEQ ID NO: 1535503 - RNA, 23 nt, Human adenovirus A
cuuauuuuauuccugauuucuaa

SEQ ID NO: 1535504 - RNA, 21 nt, Human adenovirus A
gaguuaggucaucguaggaca

SEQ ID NO: 1535505 - RNA, 11 nt, Human adenovirus A
caacccuuccc

SEQ ID NO: 1535506 - RNA, 14 nt, Human adenovirus A
uuccaccaaaugcu

SEQ ID NO: 1535507 - RNA, 16 nt, Human adenovirus A
ucaacgacuaaaacaa

SEQ ID NO: 1535508 - RNA, 20 nt, Human adenovirus A
aaaagcguggaauuaaaagg

SEQ ID NO: 1535509 - RNA, 13 nt, Human adenovirus A
agacaugacagcg

SEQ ID NO: 1535510 - RNA, 18 nt, Human adenovirus A
auuugauucaagaggaag

SEQ ID NO: 1535511 - RNA, 19 nt, Human adenovirus A
gcauacuuaccaaagccau

SEQ ID NO: 1535512 - RNA, 19 nt, Human adenovirus A
ucgaccuguggcaccugca

SEQ ID NO: 1535513 - RNA, 18 nt, Human adenovirus A
ggcagaauuugugcuacc

SEQ ID NO: 1535514 - RNA, 22 nt, Human adenovirus A
acuaccccuccuucgcuguccc

SEQ ID NO: 1535515 - RNA, 19 nt, Human adenovirus A
gucuucaagaaaaaccacc

SEQ ID NO: 1535516 - RNA, 16 nt, Human adenovirus A
cuucguugagccaugu

SEQ ID NO: 1535517 - RNA, 18 nt, Human adenovirus A
gaaaguaacucuuguaaa

SEQ ID NO: 1535518 - RNA, 22 nt, Human adenovirus A
guauacugaugaucuucccgaa

SEQ ID NO: 1535519 - RNA, 15 nt, Human adenovirus A
ucaagaaaggcaucu

SEQ ID NO: 1535520 - RNA, 13 nt, Human adenovirus A
uagcguacagcca

SEQ ID NO: 1535521 - RNA, 17 nt, Human adenovirus A
gcauuaccagcagccaa

SEQ ID NO: 1535522 - RNA, 21 nt, Human adenovirus A
cccgcgaaaaaaaucacuucc

SEQ ID NO: 1535523 - RNA, 12 nt, Human adenovirus A
ucauuccuucag

SEQ ID NO: 1535524 - RNA, 15 nt, Human adenovirus A
uaccccuauccuguc

SEQ ID NO: 1535525 - RNA, 15 nt, Human adenovirus A
acccuuccccaccuu

SEQ ID NO: 1535526 - RNA, 15 nt, Human adenovirus A
aacgcucguugccca

SEQ ID NO: 1535527 - RNA, 17 nt, Human adenovirus A
cacugggccaggaggac

SEQ ID NO: 1535528 - RNA, 20 nt, Human adenovirus A
cuccccuguggagccacugc

SEQ ID NO: 1535529 - RNA, 15 nt, Human adenovirus A
cugcugucacugagc

SEQ ID NO: 1535530 - RNA, 16 nt, Human adenovirus A
gucacaaguacaucca

SEQ ID NO: 1535531 - RNA, 20 nt, Human adenovirus A
uccaucaccuuugugugcua

SEQ ID NO: 1535532 - RNA, 15 nt, Human adenovirus A
uaacuccgggagugu

SEQ ID NO: 1535533 - RNA, 19 nt, Human adenovirus A
gaggagcacccccaggggc

SEQ ID NO: 1535534 - RNA, 21 nt, Human adenovirus A
agcacgccaaagccacaccuc

SEQ ID NO: 1535535 - RNA, 17 nt, Human adenovirus A
gugaaggcgccaggaug

SEQ ID NO: 1535536 - RNA, 14 nt, Human adenovirus A
caguaauugaugag

SEQ ID NO: 1535537 - RNA, 23 nt, Human adenovirus A
gauauaguacugcuuccagguug

SEQ ID NO: 1535538 - RNA, 16 nt, Human adenovirus A
cacccuuaauugcagg

SEQ ID NO: 1535539 - RNA, 20 nt, Human adenovirus A
cuacauaaaccauggaauuu

SEQ ID NO: 1535540 - RNA, 17 nt, Human adenovirus A
cuucuacaaucacuugg

SEQ ID NO: 1535541 - RNA, 17 nt, Human adenovirus A
agauugucauccccaga

SEQ ID NO: 1535542 - RNA, 23 nt, Human adenovirus A
agacuuaccccugggcuuuggac

SEQ ID NO: 1535543 - RNA, 14 nt, Human adenovirus A
gucaaaauaaucaa

SEQ ID NO: 1535544 - RNA, 15 nt, Human adenovirus A
aggcuaaguuuuguu

SEQ ID NO: 1535545 - RNA, 15 nt, Human adenovirus A
uccgccuaaggaaag

SEQ ID NO: 1535546 - RNA, 17 nt, Human adenovirus A
uaguccguuuucuucuu

SEQ ID NO: 1535547 - RNA, 19 nt, Human adenovirus A
agcuaagcgucugcauauc

SEQ ID NO: 1535548 - RNA, 12 nt, Human adenovirus A
ucgcggagaggg

SEQ ID NO: 1535549 - RNA, 15 nt, Human adenovirus A
uauugaguugcacau

SEQ ID NO: 1535550 - RNA, 23 nt, Human adenovirus A
cccccuuuguagcugaaaacaac

SEQ ID NO: 1535551 - RNA, 19 nt, Human adenovirus A
agcaacuuuuuaaccacug

SEQ ID NO: 1535552 - RNA, 15 nt, Human adenovirus A
aagaaauaaccagug

SEQ ID NO: 1535553 - RNA, 19 nt, Human adenovirus A
acuuuauauugcauuuguc

SEQ ID NO: 1535554 - RNA, 21 nt, Human adenovirus A
caaucagugucuaccaauacu

SEQ ID NO: 1535555 - RNA, 16 nt, Human adenovirus A
uaauaauugaguaacu

SEQ ID NO: 1535556 - RNA, 13 nt, Human adenovirus A
acugcagccuguc

SEQ ID NO: 1535557 - RNA, 23 nt, Human adenovirus A
uuuuaagaagcaccacaucuuug

SEQ ID NO: 1535558 - RNA, 17 nt, Human adenovirus A
ccugacacuacagagcu

SEQ ID NO: 1535559 - RNA, 24 nt, Human adenovirus A
uagaagccauguuaagaaaugaca

SEQ ID NO: 1535560 - RNA, 20 nt, Human adenovirus A
uuggguccggcuuguugaau

SEQ ID NO: 1535561 - RNA, 23 nt, Human adenovirus A
cgcugacgggagcaggaacagag

SEQ ID NO: 1535562 - RNA, 15 nt, Human adenovirus A
uaaauaucgcagcug

SEQ ID NO: 1535563 - RNA, 21 nt, Human adenovirus A
gcuaugaaucuuuaccaggca

SEQ ID NO: 1535564 - RNA, 14 nt, Human adenovirus A
gaacaaacagugcc

SEQ ID NO: 1535565 - RNA, 22 nt, Human adenovirus A
aagcucuguucaauaaauacug

SEQ ID NO: 1535566 - RNA, 20 nt, Human adenovirus A
gcaaagaaacacaugaugga

SEQ ID NO: 1535567 - RNA, 21 nt, Human adenovirus A
auuggaguacaagcuugacug

SEQ ID NO: 1535568 - RNA, 13 nt, Human adenovirus A
aagaagaacgcau

SEQ ID NO: 1535569 - RNA, 15 nt, Human adenovirus A
ccagcucuuggaaua

SEQ ID NO: 1535570 - RNA, 13 nt, Human adenovirus A
cggcaacagcagc

SEQ ID NO: 1535571 - RNA, 14 nt, Human adenovirus A
gaagcuuauguaca

SEQ ID NO: 1535572 - RNA, 15 nt, Human adenovirus A
aguguuaaccauugu

SEQ ID NO: 1535573 - RNA, 18 nt, Human adenovirus A
auuggucccauccaaguu

SEQ ID NO: 1535574 - RNA, 21 nt, Human adenovirus A
ucgucuuauuuuccuucuucc

SEQ ID NO: 1535575 - RNA, 14 nt, Human adenovirus A
agauucuucuuccc

SEQ ID NO: 1535576 - RNA, 15 nt, Human adenovirus A
gcaaacuacauugca

SEQ ID NO: 1535577 - RNA, 18 nt, Human adenovirus A
gcuugagcgcguggcacg

SEQ ID NO: 1535578 - RNA, 11 nt, Human adenovirus A
uauacaaacuu

SEQ ID NO: 1535579 - RNA, 16 nt, Human adenovirus A
agcauaugaacaaacg

SEQ ID NO: 1535580 - RNA, 19 nt, Human adenovirus A
caccgcgcugcggccauga

SEQ ID NO: 1535581 - RNA, 13 nt, Human adenovirus A
cgucccaaaagca

SEQ ID NO: 1535582 - RNA, 17 nt, Human adenovirus A
gcggccguacaugggca

SEQ ID NO: 1535583 - RNA, 14 nt, Human adenovirus A
uaguuccguaaaga

SEQ ID NO: 1535584 - RNA, 17 nt, Human adenovirus A
guacagaggaaauugug

SEQ ID NO: 1535585 - RNA, 15 nt, Human adenovirus A
cgacgggccaggcgc

SEQ ID NO: 1535586 - RNA, 20 nt, Human adenovirus A
gcaguauaccucuaaaaaca

SEQ ID NO: 1535587 - RNA, 21 nt, Human adenovirus A
cagcugaacgacgaagucaca

SEQ ID NO: 1535588 - RNA, 15 nt, Human adenovirus A
uggcagccaagcgcu

SEQ ID NO: 1535589 - RNA, 14 nt, Human adenovirus A
augcgcauggcuuu

SEQ ID NO: 1535590 - RNA, 19 nt, Human adenovirus A
augcgggagggacaagcuu

SEQ ID NO: 1535591 - RNA, 17 nt, Human adenovirus A
cuaacauguuauuuaaa

SEQ ID NO: 1535592 - RNA, 18 nt, Human adenovirus A
auauaguacugcuuccag

SEQ ID NO: 1535593 - RNA, 13 nt, Human adenovirus A
auagcaaagccau

SEQ ID NO: 1535594 - RNA, 17 nt, Human adenovirus A
gaaaacagcagcgggca

SEQ ID NO: 1535595 - RNA, 15 nt, Human adenovirus A
gccuaaaagcuauuu

SEQ ID NO: 1535596 - RNA, 22 nt, Human adenovirus A
aucauacauaauuuuaaaguaa

SEQ ID NO: 1535597 - RNA, 24 nt, Human adenovirus A
aguaacaacacgggcuggggacug

SEQ ID NO: 1535598 - RNA, 22 nt, Human adenovirus A
uguauaaauucuuaaacaaucu

SEQ ID NO: 1535599 - RNA, 13 nt, Human adenovirus A
auuguaaaugcuu

SEQ ID NO: 1535600 - RNA, 17 nt, Human adenovirus A
uccagguguagguuucu

SEQ ID NO: 1535601 - RNA, 19 nt, Human adenovirus A
cuucugcugcauugccacu

SEQ ID NO: 1535602 - RNA, 21 nt, Human adenovirus A
ccaaauauccaggaggaauau

SEQ ID NO: 1535603 - RNA, 18 nt, Human adenovirus A
aacggguggaaaaacaac

SEQ ID NO: 1535604 - RNA, 23 nt, Human adenovirus A
gaacgguugcuucuauugcuuuu

SEQ ID NO: 1535605 - RNA, 18 nt, Human adenovirus A
agaacacggugaaugugu

SEQ ID NO: 1535606 - RNA, 16 nt, Human adenovirus A
gccuucauuccuucag

SEQ ID NO: 1535607 - RNA, 23 nt, Human adenovirus A
aauuucccucuucccaacuguca

SEQ ID NO: 1535608 - RNA, 19 nt, Human adenovirus A
gaacuauuucuuguucuuc

SEQ ID NO: 1535609 - RNA, 21 nt, Human adenovirus A
gccaacaaaacuuaucagcca

SEQ ID NO: 1535610 - RNA, 16 nt, Human adenovirus A
augauaaccuugcaaa

SEQ ID NO: 1535611 - RNA, 22 nt, Human adenovirus A
cgggcuggggacugggugccgc

SEQ ID NO: 1535612 - RNA, 14 nt, Human adenovirus A
cuuggccaguuccc

SEQ ID NO: 1535613 - RNA, 16 nt, Human adenovirus A
aaagucuacugcaaaa

SEQ ID NO: 1535614 - RNA, 17 nt, Human adenovirus A
ugauggaucuggagcca

SEQ ID NO: 1535615 - RNA, 17 nt, Human adenovirus A
cgccagcaagugccucc

SEQ ID NO: 1535616 - RNA, 23 nt, Human adenovirus A
gcuaaccaggcauggccaucaua

SEQ ID NO: 1535617 - RNA, 15 nt, Human adenovirus A
cugucacugagcaca

SEQ ID NO: 1535618 - RNA, 17 nt, Human adenovirus A
ggccagcauaaaagcuu

SEQ ID NO: 1535619 - RNA, 14 nt, Human adenovirus A
ucaagaaaaaccac

SEQ ID NO: 1535620 - RNA, 24 nt, Human adenovirus A
gucgccgcggcgucagcagacggc

SEQ ID NO: 1535621 - RNA, 20 nt, Human adenovirus A
uguaagcgacgagcaauuaa

SEQ ID NO: 1535622 - RNA, 15 nt, Human adenovirus A
accacucgaguguac

SEQ ID NO: 1535623 - RNA, 22 nt, Human adenovirus A
cuuaugcucccacacgcagcaa

SEQ ID NO: 1535624 - RNA, 19 nt, Human adenovirus A
acgacaacugagguaagug

SEQ ID NO: 1535625 - RNA, 16 nt, Human adenovirus A
agcugagcaaugcuac

SEQ ID NO: 1535626 - RNA, 12 nt, Human adenovirus A
acuuccuucaga

SEQ ID NO: 1535627 - RNA, 18 nt, Human adenovirus A
guuccaguauuuuguaaa

SEQ ID NO: 1535628 - RNA, 13 nt, Human adenovirus A
cuuucaacaaaaa

SEQ ID NO: 1535629 - RNA, 23 nt, Human adenovirus A
cccgcgguuuuggcggccaugca

SEQ ID NO: 1535630 - RNA, 16 nt, Human adenovirus A
aguucaccuccaggua

SEQ ID NO: 1535631 - RNA, 17 nt, Human adenovirus A
agccccuuaccaacacc

SEQ ID NO: 1535632 - RNA, 19 nt, Human adenovirus A
acagguaguuuaagguggu

SEQ ID NO: 1535633 - RNA, 23 nt, Human adenovirus A
ccuccccuguggagccacugcua

SEQ ID NO: 1535634 - RNA, 19 nt, Human adenovirus A
aagcgaccucugaaacaug

SEQ ID NO: 1535635 - RNA, 18 nt, Human adenovirus A
gcucaacgagagcgcuuu

SEQ ID NO: 1535636 - RNA, 18 nt, Human adenovirus A
gcaacgcaccuugcagga

SEQ ID NO: 1535637 - RNA, 22 nt, Human adenovirus A
gugcgcuuuaaacugaggcggc

SEQ ID NO: 1535638 - RNA, 13 nt, Human adenovirus A
ccaccgaaacgca

SEQ ID NO: 1535639 - RNA, 22 nt, Human adenovirus A
uggucccuacccgauaugaugc

SEQ ID NO: 1535640 - RNA, 16 nt, Human adenovirus A
acuuguuuuuucugac

SEQ ID NO: 1535641 - RNA, 18 nt, Human adenovirus A
ggcgaucaucgcggagag

SEQ ID NO: 1535642 - RNA, 15 nt, Human adenovirus A
guagccuugcaggcu

SEQ ID NO: 1535643 - RNA, 15 nt, Human adenovirus A
uaaacaucucauaau

SEQ ID NO: 1535644 - RNA, 20 nt, Human adenovirus A
cauggguguauuggccgggc

SEQ ID NO: 1535645 - RNA, 22 nt, Human adenovirus A
cgacuaaugguuacugaagugc

SEQ ID NO: 1535646 - RNA, 21 nt, Human adenovirus A
ugggaauauagccgccaugga

SEQ ID NO: 1535647 - RNA, 20 nt, Human adenovirus A
ucaaaauaaucaauuuugca

SEQ ID NO: 1535648 - RNA, 13 nt, Human adenovirus A
gcuuaacauagcu

SEQ ID NO: 1535649 - RNA, 15 nt, Human adenovirus A
cgcaggcuugcuaaa

SEQ ID NO: 1535650 - RNA, 19 nt, Human adenovirus A
cuucuacaacgagcaagcc

SEQ ID NO: 1535651 - RNA, 18 nt, Human adenovirus A
aauccucugacuauuuca

SEQ ID NO: 1535652 - RNA, 15 nt, Human adenovirus A
uguggucuagaguua

SEQ ID NO: 1535653 - RNA, 14 nt, Human adenovirus A
ucgcuuucuucugc

SEQ ID NO: 1535654 - RNA, 12 nt, Human adenovirus A
acacaguuuaac

SEQ ID NO: 1535655 - RNA, 15 nt, Human adenovirus A
gcugcgugaggagga

SEQ ID NO: 1535656 - RNA, 15 nt, Human adenovirus A
acauuaggcuccaca

SEQ ID NO: 1535657 - RNA, 20 nt, Human adenovirus A
aaaugguaggacgcugaaac

SEQ ID NO: 1535658 - RNA, 20 nt, Human adenovirus A
gcagucuugaaugcucugga

SEQ ID NO: 1535659 - RNA, 13 nt, Human adenovirus A
gaaaaagcuacau

SEQ ID NO: 1535660 - RNA, 20 nt, Human adenovirus A
ucaaugcuucugaaacaaau

SEQ ID NO: 1535661 - RNA, 21 nt, Human adenovirus A
ucauccacaucuacaaagcgg

SEQ ID NO: 1535662 - RNA, 22 nt, Human adenovirus A
ucgccagcaagugccuccucag

SEQ ID NO: 1535663 - RNA, 17 nt, Human adenovirus A
gcuuuuuugaguacuca

SEQ ID NO: 1535664 - RNA, 23 nt, Human adenovirus A
cugcgcugccguuuuuucagaug

SEQ ID NO: 1535665 - RNA, 16 nt, Human adenovirus A
gcauacaacuacggag

SEQ ID NO: 1535666 - RNA, 19 nt, Human adenovirus A
uucgagaucuaggcugugg

SEQ ID NO: 1535667 - RNA, 20 nt, Human adenovirus A
aagauccguacaaggcauug

SEQ ID NO: 1535668 - RNA, 18 nt, Human adenovirus A
cuucccaaucccuaccca

SEQ ID NO: 1535669 - RNA, 23 nt, Human adenovirus A
uugcaagaggagaaggaggagga

SEQ ID NO: 1535670 - RNA, 18 nt, Human adenovirus A
cuaucaaacuauauaaau

SEQ ID NO: 1535671 - RNA, 18 nt, Human adenovirus A
cacgguuccacggugcac

SEQ ID NO: 1535672 - RNA, 24 nt, Human adenovirus A
aaaaucuaagccaugcaaauaguu

SEQ ID NO: 1535673 - RNA, 23 nt, Human adenovirus A
cuuaguaauggaguuggaaacug

SEQ ID NO: 1535674 - RNA, 17 nt, Human adenovirus A
aauugaaguaagcuguu

SEQ ID NO: 1535675 - RNA, 12 nt, Human adenovirus A
uaaagaguaaaa

SEQ ID NO: 1535676 - RNA, 14 nt, Human adenovirus A
accauccaauggau

SEQ ID NO: 1535677 - RNA, 12 nt, Human adenovirus A
ccccaaaagccc

SEQ ID NO: 1535678 - RNA, 14 nt, Human adenovirus A
augccaacaaaacu

SEQ ID NO: 1535679 - RNA, 13 nt, Human adenovirus A
aagucaacccaaa

SEQ ID NO: 1535680 - RNA, 20 nt, Human adenovirus A
cuccagacaacuucauuuuc

SEQ ID NO: 1535681 - RNA, 21 nt, Human adenovirus A
cgcgcuuuggaggcagcugga

SEQ ID NO: 1535682 - RNA, 16 nt, Human adenovirus A
gccagcagcaaagaaa

SEQ ID NO: 1535683 - RNA, 14 nt, Human adenovirus A
gacaacagcgggga

SEQ ID NO: 1535684 - RNA, 13 nt, Human adenovirus A
aaugcucuggaca

SEQ ID NO: 1535685 - RNA, 17 nt, Human adenovirus A
guacacuaaugaggcuu

SEQ ID NO: 1535686 - RNA, 15 nt, Human adenovirus A
ugaaugcucuggaca

SEQ ID NO: 1535687 - RNA, 15 nt, Human adenovirus A
ccgguugaaacagac

SEQ ID NO: 1535688 - RNA, 21 nt, Human adenovirus A
cugacacuguggacaacuccu

SEQ ID NO: 1535689 - RNA, 17 nt, Human adenovirus A
uggaaaaaaugaaaguu

SEQ ID NO: 1535690 - RNA, 17 nt, Human adenovirus A
uucgagaucuaggcugu

SEQ ID NO: 1535691 - RNA, 19 nt, Human adenovirus A
cuuggaauaaaauuucuag

SEQ ID NO: 1535692 - RNA, 15 nt, Human adenovirus A
ugaugugaugaaagu

SEQ ID NO: 1535693 - RNA, 12 nt, Human adenovirus A
caaauagcucuu

SEQ ID NO: 1535694 - RNA, 18 nt, Human adenovirus A
accuuuaauacugaaaaa

SEQ ID NO: 1535695 - RNA, 21 nt, Human adenovirus A
cauaacaucaggagcagaaau

SEQ ID NO: 1535696 - RNA, 15 nt, Human adenovirus A
acugguuagagccau

SEQ ID NO: 1535697 - RNA, 15 nt, Human adenovirus A
gcuuuggaggcagcu

SEQ ID NO: 1535698 - RNA, 18 nt, Human adenovirus A
gguggagauuuaaaaacc

SEQ ID NO: 1535699 - RNA, 11 nt, Human adenovirus A
gucccauccaa

SEQ ID NO: 1535700 - RNA, 15 nt, Human adenovirus A
cacaaaacacaaauu

SEQ ID NO: 1535701 - RNA, 16 nt, Human adenovirus A
cagccacaccgcggcg

SEQ ID NO: 1535702 - RNA, 16 nt, Human adenovirus A
uaaauggauacucuuu

SEQ ID NO: 1535703 - RNA, 16 nt, Human adenovirus A
auaaucuccaaauaaa

SEQ ID NO: 1535704 - RNA, 16 nt, Human adenovirus A
caaugcagcuguggag

SEQ ID NO: 1535705 - RNA, 16 nt, Human adenovirus A
gcaacuauuggacccu

SEQ ID NO: 1535706 - RNA, 14 nt, Human adenovirus A
aaagaccccauugu

SEQ ID NO: 1535707 - RNA, 22 nt, Human adenovirus A
cuaaaugcaucauuacuucaaa

SEQ ID NO: 1535708 - RNA, 16 nt, Human adenovirus A
acgaacugaaaauaaa

SEQ ID NO: 1535709 - RNA, 20 nt, Human adenovirus A
uaggggaugguuuaacauuc

SEQ ID NO: 1535710 - RNA, 18 nt, Human adenovirus A
uugcgcuauguacagcaa

SEQ ID NO: 1535711 - RNA, 20 nt, Human adenovirus A
caaugcagcaaacacugcuc

SEQ ID NO: 1535712 - RNA, 17 nt, Human adenovirus A
ugacaaugaauaagcca

SEQ ID NO: 1535713 - RNA, 15 nt, Human adenovirus A
gaacaauuucaucaa

SEQ ID NO: 1535714 - RNA, 15 nt, Human adenovirus A
aagcuaauaccuguc

SEQ ID NO: 1535715 - RNA, 21 nt, Human adenovirus A
ugauagagauaagcaggaaaa

SEQ ID NO: 1535716 - RNA, 14 nt, Human adenovirus A
aggaggaagaacau

SEQ ID NO: 1535717 - RNA, 13 nt, Human adenovirus A
auugauacuuguu

SEQ ID NO: 1535718 - RNA, 18 nt, Human adenovirus A
cugcuaaacucacauugu

SEQ ID NO: 1535719 - RNA, 21 nt, Human adenovirus A
caggaaaaaaaagaaaguuua

SEQ ID NO: 1535720 - RNA, 15 nt, Human adenovirus A
cgagcagcaaaugcc

SEQ ID NO: 1535721 - RNA, 19 nt, Human adenovirus A
cgggcagccugucuacaaa

SEQ ID NO: 1535722 - RNA, 15 nt, Human adenovirus A
auguucgaagcuaau

SEQ ID NO: 1535723 - RNA, 18 nt, Human adenovirus A
acucuccaauuuguggag

SEQ ID NO: 1535724 - RNA, 14 nt, Human adenovirus A
gcaaagaaacacau

SEQ ID NO: 1535725 - RNA, 13 nt, Human adenovirus A
uuuccaaaugccc

SEQ ID NO: 1535726 - RNA, 20 nt, Human adenovirus A
aacagucaguguccaucagc

SEQ ID NO: 1535727 - RNA, 21 nt, Human adenovirus A
gauuucuaacuuguuucuagu

SEQ ID NO: 1535728 - RNA, 18 nt, Human adenovirus A
uggaauuauguaagguua

SEQ ID NO: 1535729 - RNA, 15 nt, Human adenovirus A
guuuccgauaaugag

SEQ ID NO: 1535730 - RNA, 14 nt, Human adenovirus A
ggacuuggaagaau

SEQ ID NO: 1535731 - RNA, 15 nt, Human adenovirus A
ucauccgcccaaacu

SEQ ID NO: 1535732 - RNA, 19 nt, Human adenovirus A
guagcugcaguuugucauu

SEQ ID NO: 1535733 - RNA, 16 nt, Human adenovirus A
gauggaucaaaaacaa

SEQ ID NO: 1535734 - RNA, 22 nt, Human adenovirus A
ugcucguaaaaucuacaaaagu

SEQ ID NO: 1535735 - RNA, 13 nt, Human adenovirus A
uggaacaccagca

SEQ ID NO: 1535736 - RNA, 20 nt, Human adenovirus A
uacaaaucagaagccagcag

SEQ ID NO: 1535737 - RNA, 21 nt, Human adenovirus A
cuuuucuucguugagccaugu

SEQ ID NO: 1535738 - RNA, 22 nt, Human adenovirus A
ugaaauaaagcguucuguggau

SEQ ID NO: 1535739 - RNA, 23 nt, Human adenovirus A
gaaggucagauucuucuucccaa

SEQ ID NO: 1535740 - RNA, 22 nt, Human adenovirus A
ccuacguuuacaaagcacuggg

SEQ ID NO: 1535741 - RNA, 14 nt, Human adenovirus A
uugaacaauuaaaa

SEQ ID NO: 1535742 - RNA, 18 nt, Human adenovirus A
cuuuaauacugaaaaaua

SEQ ID NO: 1535743 - RNA, 17 nt, Human adenovirus A
gccucauacaagagcua

SEQ ID NO: 1535744 - RNA, 22 nt, Human adenovirus A
gaggguaacuauucggaaacca

SEQ ID NO: 1535745 - RNA, 13 nt, Human adenovirus A
caaaaaaaaagcg

SEQ ID NO: 1535746 - RNA, 18 nt, Human adenovirus A
guucuccccacgugugcc

SEQ ID NO: 1535747 - RNA, 17 nt, Human adenovirus A
guugcuuuccaaaugcc

SEQ ID NO: 1535748 - RNA, 16 nt, Human adenovirus A
gcacgagccagcugaa

SEQ ID NO: 1535749 - RNA, 13 nt, Human adenovirus A
cggccagccaagc

SEQ ID NO: 1535750 - RNA, 17 nt, Human adenovirus A
auccuaggcaaagaaac

SEQ ID NO: 1535751 - RNA, 21 nt, Human adenovirus A
uaugcucccacacgcagcaac

SEQ ID NO: 1535752 - RNA, 18 nt, Human adenovirus A
ugaaaaaccaacaaacac

SEQ ID NO: 1535753 - RNA, 20 nt, Human adenovirus A
acuugggaaauuugucaugg

SEQ ID NO: 1535754 - RNA, 16 nt, Human adenovirus A
gaacacuuagagggag

SEQ ID NO: 1535755 - RNA, 17 nt, Human adenovirus A
ugcguuucuuaccuugc

SEQ ID NO: 1535756 - RNA, 15 nt, Human adenovirus A
gcaagaggagaagga

SEQ ID NO: 1535757 - RNA, 17 nt, Human adenovirus A
acagcgcgcaaguugac

SEQ ID NO: 1535758 - RNA, 13 nt, Human adenovirus A
auuuuaacuguga

SEQ ID NO: 1535759 - RNA, 14 nt, Human adenovirus A
agucauauagcuca

SEQ ID NO: 1535760 - RNA, 13 nt, Human adenovirus A
aaaagagccacag

SEQ ID NO: 1535761 - RNA, 18 nt, Human adenovirus A
cauguauaauaaaacugg

SEQ ID NO: 1535762 - RNA, 21 nt, Human adenovirus A
accucccgauaccaaaaacac

SEQ ID NO: 1535763 - RNA, 13 nt, Human adenovirus A
gagauaagcagga

SEQ ID NO: 1535764 - RNA, 19 nt, Human adenovirus A
gguaggcaauuucugccau

SEQ ID NO: 1535765 - RNA, 12 nt, Human adenovirus A
aagcaaaccacu

SEQ ID NO: 1535766 - RNA, 19 nt, Human adenovirus A
caauaaaacaaggagccgc

SEQ ID NO: 1535767 - RNA, 19 nt, Human adenovirus A
ccacgccuuacauguggag

SEQ ID NO: 1535768 - RNA, 18 nt, Human adenovirus A
uaguacuccuauguaagu

SEQ ID NO: 1535769 - RNA, 17 nt, Human adenovirus A
ugggacauaauuucccu

SEQ ID NO: 1535770 - RNA, 23 nt, Human adenovirus A
uucagaauaaaacaagccgcagg

SEQ ID NO: 1535771 - RNA, 15 nt, Human adenovirus A
uaaaguaaauuaaau

SEQ ID NO: 1535772 - RNA, 13 nt, Human adenovirus A
ucuucuucccaau

SEQ ID NO: 1535773 - RNA, 16 nt, Human adenovirus A
auuggaaagcagcuug

SEQ ID NO: 1535774 - RNA, 15 nt, Human adenovirus A
uagcagccuuuauuu

SEQ ID NO: 1535775 - RNA, 16 nt, Human adenovirus A
ccuucuuuauguuuua

SEQ ID NO: 1535776 - RNA, 23 nt, Human adenovirus A
acccuucgcuaugaaucuuuacc

SEQ ID NO: 1535777 - RNA, 16 nt, Human adenovirus A
cuuccucguugcgggg

SEQ ID NO: 1535778 - RNA, 17 nt, Human adenovirus A
agcaaaccacugcaaug

SEQ ID NO: 1535779 - RNA, 20 nt, Human adenovirus A
guacuuaaaaaaacaaaacc

SEQ ID NO: 1535780 - RNA, 23 nt, Human adenovirus A
gcaggacuuuccggagaaagaau

SEQ ID NO: 1535781 - RNA, 15 nt, Human adenovirus A
aggcggucugccauu

SEQ ID NO: 1535782 - RNA, 21 nt, Human adenovirus A
gacaccgcccaggcaggcgcg

SEQ ID NO: 1535783 - RNA, 17 nt, Human adenovirus A
uggaaaaacuuggaaac

SEQ ID NO: 1535784 - RNA, 21 nt, Human adenovirus A
aggacccccagacacggagag

SEQ ID NO: 1535785 - RNA, 22 nt, Human adenovirus A
cccgcgaaaaaaaucacuuccg

SEQ ID NO: 1535786 - RNA, 13 nt, Human adenovirus A
uucccucuuccca

SEQ ID NO: 1535787 - RNA, 19 nt, Human adenovirus A
uaaaaacacacacaaaaca

SEQ ID NO: 1535788 - RNA, 21 nt, Human adenovirus A
agacugcauuuaccuuuuccu

SEQ ID NO: 1535789 - RNA, 20 nt, Human adenovirus A
cauuaagaacacggugaaug

SEQ ID NO: 1535790 - RNA, 23 nt, Human adenovirus A
gagcuguccaugguaucagucag

SEQ ID NO: 1535791 - RNA, 13 nt, Human adenovirus A
ugcccucacacuu

SEQ ID NO: 1535792 - RNA, 17 nt, Human adenovirus A
uagccgcagcaccugga

SEQ ID NO: 1535793 - RNA, 18 nt, Human adenovirus A
cagaggaggaggaggaag

SEQ ID NO: 1535794 - RNA, 19 nt, Human adenovirus A
uuugcucgagacaucugug

SEQ ID NO: 1535795 - RNA, 14 nt, Human adenovirus A
uggacggagccagc

SEQ ID NO: 1535796 - RNA, 19 nt, Human adenovirus A
guugcaacgcaccuugcag

SEQ ID NO: 1535797 - RNA, 17 nt, Human adenovirus A
uaaguuuaaaggcauua

SEQ ID NO: 1535798 - RNA, 13 nt, Human adenovirus A
aagagccacagcu

SEQ ID NO: 1535799 - RNA, 16 nt, Human adenovirus A
guuauguaugcccagc

SEQ ID NO: 1535800 - RNA, 17 nt, Human adenovirus A
guuugcuaacagcucuc

SEQ ID NO: 1535801 - RNA, 14 nt, Human adenovirus A
augcagaggaaacc

SEQ ID NO: 1535802 - RNA, 13 nt, Human adenovirus A
ccagccuucuggc

SEQ ID NO: 1535803 - RNA, 16 nt, Human adenovirus A
gcgcacugggccagga

SEQ ID NO: 1535804 - RNA, 21 nt, Human adenovirus A
ggucgaccuguggcaccugca

SEQ ID NO: 1535805 - RNA, 14 nt, Human adenovirus A
cacaaugcauuaau

SEQ ID NO: 1535806 - RNA, 18 nt, Human adenovirus A
agcgccagucgccgcaga

SEQ ID NO: 1535807 - RNA, 16 nt, Human adenovirus A
guagccuugcaggcuu

SEQ ID NO: 1535808 - RNA, 13 nt, Human adenovirus A
acucucuggggaa

SEQ ID NO: 1535809 - RNA, 19 nt, Human adenovirus A
aguucgccuacacaacaca

SEQ ID NO: 1535810 - RNA, 17 nt, Human adenovirus A
aggcaucuagccaguca

SEQ ID NO: 1535811 - RNA, 19 nt, Human adenovirus A
cuuacccgcagcugucucu

SEQ ID NO: 1535812 - RNA, 23 nt, Human adenovirus A
aaggaagcugcuguucuuaguag

SEQ ID NO: 1535813 - RNA, 17 nt, Human adenovirus A
cgucgaguuugugcgcu

SEQ ID NO: 1535814 - RNA, 23 nt, Human adenovirus A
uuugaaccugaaagaaaguucaa

SEQ ID NO: 1535815 - RNA, 11 nt, Human adenovirus A
cuacaucuuuu

SEQ ID NO: 1535816 - RNA, 13 nt, Human adenovirus A
acuacuaccacug

SEQ ID NO: 1535817 - RNA, 18 nt, Human adenovirus A
cugaagugccucaaagug

SEQ ID NO: 1535818 - RNA, 14 nt, Human adenovirus A
uucagcaguugcaa

SEQ ID NO: 1535819 - RNA, 19 nt, Human adenovirus A
caaauauuuacuaugauuu

SEQ ID NO: 1535820 - RNA, 18 nt, Human adenovirus A
caacaucaugaaaacagc

SEQ ID NO: 1535821 - RNA, 18 nt, Human adenovirus A
aaacugaggcggcuggug

SEQ ID NO: 1535822 - RNA, 15 nt, Human adenovirus A
uccaaccaaaggaga

SEQ ID NO: 1535823 - RNA, 14 nt, Human adenovirus A
cauagaaaaucuuu

SEQ ID NO: 1535824 - RNA, 13 nt, Human adenovirus A
caaaaccaggucc

SEQ ID NO: 1535825 - RNA, 17 nt, Human adenovirus A
aacaaugaaaguugcau

SEQ ID NO: 1535826 - RNA, 13 nt, Human adenovirus A
gcaaagccagccu

SEQ ID NO: 1535827 - RNA, 13 nt, Human adenovirus A
uauaguggcacaa

SEQ ID NO: 1535828 - RNA, 13 nt, Human adenovirus A
cuaggaaaacaaa

SEQ ID NO: 1535829 - RNA, 14 nt, Human adenovirus A
auguaucuggacau

SEQ ID NO: 1535830 - RNA, 22 nt, Human adenovirus A
auaaaacuaccugauaacaaga

SEQ ID NO: 1535831 - RNA, 17 nt, Human adenovirus A
aaauauuuacuaugauu

SEQ ID NO: 1535832 - RNA, 16 nt, Human adenovirus A
gaacucgagugcaugc

SEQ ID NO: 1535833 - RNA, 14 nt, Human adenovirus A
aguauaagguauau

SEQ ID NO: 1535834 - RNA, 13 nt, Human adenovirus A
gcggcaagaacaa

SEQ ID NO: 1535835 - RNA, 17 nt, Human adenovirus A
gucacacccuccguguu

SEQ ID NO: 1535836 - RNA, 13 nt, Human adenovirus A
uuauuugaacaca

SEQ ID NO: 1535837 - RNA, 20 nt, Human adenovirus A
gggcccaagaugugugcgcu

SEQ ID NO: 1535838 - RNA, 15 nt, Human adenovirus A
gagcaccccuuccca

SEQ ID NO: 1535839 - RNA, 22 nt, Human adenovirus A
ucaaacaccugcaguaaauuca

SEQ ID NO: 1535840 - RNA, 13 nt, Human adenovirus A
agcgcacuggcau

SEQ ID NO: 1535841 - RNA, 14 nt, Human adenovirus A
cuggcuguggguga

SEQ ID NO: 1535842 - RNA, 20 nt, Human adenovirus A
uccaaauguucaacaacagc

SEQ ID NO: 1535843 - RNA, 14 nt, Human adenovirus A
gauccagaggagga

SEQ ID NO: 1535844 - RNA, 12 nt, Human adenovirus A
ccuguggagcca

SEQ ID NO: 1535845 - RNA, 16 nt, Human adenovirus A
cguauuauggcuuuaa

SEQ ID NO: 1535846 - RNA, 14 nt, Human adenovirus A
agauuaccacgccc

SEQ ID NO: 1535847 - RNA, 21 nt, Human adenovirus A
agcccgaaguugacuggcaug

SEQ ID NO: 1535848 - RNA, 12 nt, Human adenovirus A
aaauguguacuu

SEQ ID NO: 1535849 - RNA, 15 nt, Human adenovirus A
cagaauaaaacaagc

SEQ ID NO: 1535850 - RNA, 13 nt, Human adenovirus A
agcagugcggccu

SEQ ID NO: 1535851 - RNA, 21 nt, Human adenovirus A
caaaagcaaccaaaugagcaa

SEQ ID NO: 1535852 - RNA, 13 nt, Human adenovirus A
gcuaagggacaag

SEQ ID NO: 1535853 - RNA, 20 nt, Human adenovirus A
aacaacucuacuuaaaagca

SEQ ID NO: 1535854 - RNA, 13 nt, Human adenovirus A
agaagagcugcug

SEQ ID NO: 1535855 - RNA, 16 nt, Human adenovirus A
gugauggcagcggcgc

SEQ ID NO: 1535856 - RNA, 16 nt, Human adenovirus A
uaggauagcaccugcc

SEQ ID NO: 1535857 - RNA, 22 nt, Human adenovirus A
ccuccuuugccagaacccacua

SEQ ID NO: 1535858 - RNA, 15 nt, Human adenovirus A
ccaagcaaguacaaa

SEQ ID NO: 1535859 - RNA, 12 nt, Human adenovirus A
cuggagaauaag

SEQ ID NO: 1535860 - RNA, 21 nt, Human adenovirus A
aagaacacggugaauguguuc

SEQ ID NO: 1535861 - RNA, 11 nt, Human adenovirus A
cccaccguggc

SEQ ID NO: 1535862 - RNA, 20 nt, Human adenovirus A
ccaggcauuuccaggugggg

SEQ ID NO: 1535863 - RNA, 19 nt, Human adenovirus A
cuccccacagcuggcgcac

SEQ ID NO: 1535864 - RNA, 18 nt, Human adenovirus A
caaagaugcaaacuugca

SEQ ID NO: 1535865 - RNA, 13 nt, Human adenovirus A
cgaggugcagcug

SEQ ID NO: 1535866 - RNA, 18 nt, Human adenovirus A
uacauuaggcuccacacc

SEQ ID NO: 1535867 - RNA, 14 nt, Human adenovirus A
ucagauagcaagcg

SEQ ID NO: 1535868 - RNA, 17 nt, Human adenovirus A
gcagcaaugcuuggaag

SEQ ID NO: 1535869 - RNA, 14 nt, Human adenovirus A
cucgaccacaggug

SEQ ID NO: 1535870 - RNA, 20 nt, Human adenovirus A
ccuacuucacccugggaaac

SEQ ID NO: 1535871 - RNA, 15 nt, Human adenovirus A
aauaauaaaaccauu

SEQ ID NO: 1535872 - RNA, 19 nt, Human adenovirus A
ggucuacuguugaugcagu

SEQ ID NO: 1535873 - RNA, 14 nt, Human adenovirus A
acggaacuacucag

SEQ ID NO: 1535874 - RNA, 22 nt, Human adenovirus A
caugcaucguuuuuucuccgac

SEQ ID NO: 1535875 - RNA, 18 nt, Human adenovirus A
ucuaagccaugcaaauag

SEQ ID NO: 1535876 - RNA, 15 nt, Human adenovirus A
ccggcguagaccaac

SEQ ID NO: 1535877 - RNA, 16 nt, Human adenovirus A
gcccacaaggaaauga

SEQ ID NO: 1535878 - RNA, 19 nt, Human adenovirus A
cuaacugcucagcuggaag

SEQ ID NO: 1535879 - RNA, 18 nt, Human adenovirus A
augggaggaaagacagcc

SEQ ID NO: 1535880 - RNA, 15 nt, Human adenovirus A
ugaaaguagaaaucu

SEQ ID NO: 1535881 - RNA, 23 nt, Human adenovirus A
caaccguuuagagccgcggcccg

SEQ ID NO: 1535882 - RNA, 23 nt, Human adenovirus A
cuggccauaauguaacccuuccc

SEQ ID NO: 1535883 - RNA, 17 nt, Human adenovirus A
gcagccaaaacucaggu

SEQ ID NO: 1535884 - RNA, 12 nt, Human adenovirus A
aagacagaaaua

SEQ ID NO: 1535885 - RNA, 14 nt, Human adenovirus A
ugaucgcucuucaa

SEQ ID NO: 1535886 - RNA, 15 nt, Human adenovirus A
ucggcggacagagca

SEQ ID NO: 1535887 - RNA, 21 nt, Human adenovirus A
gugccuaugacccuugagcug

SEQ ID NO: 1535888 - RNA, 18 nt, Human adenovirus A
gaaacacauuaaaaugug

SEQ ID NO: 1535889 - RNA, 13 nt, Human adenovirus A
cuuucagcccaug

SEQ ID NO: 1535890 - RNA, 12 nt, Human adenovirus A
gaaaaauaauau

SEQ ID NO: 1535891 - RNA, 22 nt, Human adenovirus A
ucggggucucaauuaguaacaa

SEQ ID NO: 1535892 - RNA, 23 nt, Human adenovirus A
agaaaaacaguacaaagccaggc

SEQ ID NO: 1535893 - RNA, 18 nt, Human adenovirus A
uccccagacaguuucauc

SEQ ID NO: 1535894 - RNA, 15 nt, Human adenovirus A
gcucgcccgggacag

SEQ ID NO: 1535895 - RNA, 18 nt, Human adenovirus A
caaguucaaagaagagcu

SEQ ID NO: 1535896 - RNA, 21 nt, Human adenovirus A
guaaaugcuuuguuggauagc

SEQ ID NO: 1535897 - RNA, 19 nt, Human adenovirus A
gcccauugagacaagugug

SEQ ID NO: 1535898 - RNA, 18 nt, Human adenovirus A
uaacaaaauucgcaggag

SEQ ID NO: 1535899 - RNA, 22 nt, Human adenovirus A
caguagauuuacauuaggcucc

SEQ ID NO: 1535900 - RNA, 15 nt, Human adenovirus A
uuugugccucgucag

SEQ ID NO: 1535901 - RNA, 14 nt, Human adenovirus A
aucauuaagaacac

SEQ ID NO: 1535902 - RNA, 18 nt, Human adenovirus A
acuguaagaggagacaac

SEQ ID NO: 1535903 - RNA, 13 nt, Human adenovirus A
ccgaggugacaug

SEQ ID NO: 1535904 - RNA, 14 nt, Human adenovirus A
auaaccaaucuaca

SEQ ID NO: 1535905 - RNA, 18 nt, Human adenovirus A
cagacgcaugaagggugg

SEQ ID NO: 1535906 - RNA, 17 nt, Human adenovirus A
guacacaaugcauuaau

SEQ ID NO: 1535907 - RNA, 13 nt, Human adenovirus A
ugcgcauggcuuu

SEQ ID NO: 1535908 - RNA, 17 nt, Human adenovirus A
ugcauuaucaugaaacu

SEQ ID NO: 1535909 - RNA, 14 nt, Human adenovirus A
uguccagauuucag

SEQ ID NO: 1535910 - RNA, 18 nt, Human adenovirus A
cuucagcguccaugaaug

SEQ ID NO: 1535911 - RNA, 15 nt, Human adenovirus A
uauaaucuccaaaua

SEQ ID NO: 1535912 - RNA, 17 nt, Human adenovirus A
gauucauauuguggaga

SEQ ID NO: 1535913 - RNA, 15 nt, Human adenovirus A
cgagucaccaucacu

SEQ ID NO: 1535914 - RNA, 21 nt, Human adenovirus A
ucauguggucaggucuaucaa

SEQ ID NO: 1535915 - RNA, 18 nt, Human adenovirus A
uggaacugcagacagugg

SEQ ID NO: 1535916 - RNA, 16 nt, Human adenovirus A
ucaucucuacagcccc

SEQ ID NO: 1535917 - RNA, 15 nt, Human adenovirus A
cgcugcagcuuccgc

SEQ ID NO: 1535918 - RNA, 13 nt, Human adenovirus A
gggcauuaaagca

SEQ ID NO: 1535919 - RNA, 23 nt, Human adenovirus A
aaaaagcaaaguacaaccacucu

SEQ ID NO: 1535920 - RNA, 11 nt, Human adenovirus A
ucuuggagugu

SEQ ID NO: 1535921 - RNA, 18 nt, Human adenovirus A
gcucccacccaugauguu

SEQ ID NO: 1535922 - RNA, 14 nt, Human adenovirus A
cucaccacugaaac

SEQ ID NO: 1535923 - RNA, 23 nt, Human adenovirus A
auaucuuuuaacaacaagcuaau

SEQ ID NO: 1535924 - RNA, 20 nt, Human adenovirus A
cuacgugcgccaagccugua

SEQ ID NO: 1535925 - RNA, 18 nt, Human adenovirus A
gcugcuacuaacauuaaa

SEQ ID NO: 1535926 - RNA, 13 nt, Human adenovirus A
guccuccuucugu

SEQ ID NO: 1535927 - RNA, 13 nt, Human adenovirus A
cucuaccucgcgg

SEQ ID NO: 1535928 - RNA, 17 nt, Human adenovirus A
agccgcaaguaggacca

SEQ ID NO: 1535929 - RNA, 19 nt, Human adenovirus A
uccuguaguugcagcagaa

SEQ ID NO: 1535930 - RNA, 21 nt, Human adenovirus A
ugccccccuccccuguggagc

SEQ ID NO: 1535931 - RNA, 15 nt, Human adenovirus A
gccgcagcaccugga

SEQ ID NO: 1535932 - RNA, 19 nt, Human adenovirus A
acaguagcugcagagcuag

SEQ ID NO: 1535933 - RNA, 21 nt, Human adenovirus A
cugucgagcuaaccgcagccg

SEQ ID NO: 1535934 - RNA, 17 nt, Human adenovirus A
agcauaaaagcuucaau

SEQ ID NO: 1535935 - RNA, 19 nt, Human adenovirus A
acugggaguugcgagcugc

SEQ ID NO: 1535936 - RNA, 16 nt, Human adenovirus A
cuauauuaacuuuaua

SEQ ID NO: 1535937 - RNA, 23 nt, Human adenovirus A
accagagcaccccuucccaccuu

SEQ ID NO: 1535938 - RNA, 13 nt, Human adenovirus A
cgauuaagacaua

SEQ ID NO: 1535939 - RNA, 23 nt, Human adenovirus A
uggucuggcuucgggaauuaaug

SEQ ID NO: 1535940 - RNA, 22 nt, Human adenovirus A
gccuguugaauuuggguaaggg

SEQ ID NO: 1535941 - RNA, 24 nt, Human adenovirus A
aagacagaaauacagagcugucau

SEQ ID NO: 1535942 - RNA, 17 nt, Human adenovirus A
cuuagauuuuucaucug

SEQ ID NO: 1535943 - RNA, 16 nt, Human adenovirus A
gacagaacgugcuaca

SEQ ID NO: 1535944 - RNA, 17 nt, Human adenovirus A
gcaaaucucagaaagcc

SEQ ID NO: 1535945 - RNA, 11 nt, Human adenovirus A
aaugcucuuug

SEQ ID NO: 1535946 - RNA, 21 nt, Human adenovirus A
uuucaaacuuuacaaaccacu

SEQ ID NO: 1535947 - RNA, 12 nt, Human adenovirus A
caccaccaaacu

SEQ ID NO: 1535948 - RNA, 23 nt, Human adenovirus A
caacguagcuuuugacuguuccu

SEQ ID NO: 1535949 - RNA, 11 nt, Human adenovirus A
uggaggcagcu

SEQ ID NO: 1535950 - RNA, 16 nt, Human adenovirus A
aagcgucacuacagac

SEQ ID NO: 1535951 - RNA, 15 nt, Human adenovirus A
cagccuacaaugcaa

SEQ ID NO: 1535952 - RNA, 15 nt, Human adenovirus A
ucuucuaucaucaaa

SEQ ID NO: 1535953 - RNA, 20 nt, Human adenovirus A
aagacagaaauacagagcug

SEQ ID NO: 1535954 - RNA, 15 nt, Human adenovirus A
cgauuuuccaaaugu

SEQ ID NO: 1535955 - RNA, 23 nt, Human adenovirus A
cacguucaauaguggcugcaagg

SEQ ID NO: 1535956 - RNA, 18 nt, Human adenovirus A
aggaguuaaauaaugcau

SEQ ID NO: 1535957 - RNA, 11 nt, Human adenovirus A
ggcucuuuuaa

SEQ ID NO: 1535958 - RNA, 18 nt, Human adenovirus A
cagaacauacaacuugca

SEQ ID NO: 1535959 - RNA, 21 nt, Human adenovirus A
uacacccccuuuuacuucuuc

SEQ ID NO: 1535960 - RNA, 17 nt, Human adenovirus A
caacagcuauugcaaac

SEQ ID NO: 1535961 - RNA, 16 nt, Human adenovirus A
cgagaacggagagggu

SEQ ID NO: 1535962 - RNA, 19 nt, Human adenovirus A
cuauauacaacucuacaaa

SEQ ID NO: 1535963 - RNA, 17 nt, Human adenovirus A
gcaacguuggcagcgac

SEQ ID NO: 1535964 - RNA, 17 nt, Human adenovirus A
ucggcaacagcagcaac

SEQ ID NO: 1535965 - RNA, 19 nt, Human adenovirus A
cuggggugccuaauuguau

SEQ ID NO: 1535966 - RNA, 21 nt, Human adenovirus A
ggauaauguaaacccuuuuaa

SEQ ID NO: 1535967 - RNA, 17 nt, Human adenovirus A
uacuuguaacuguggaa

SEQ ID NO: 1535968 - RNA, 22 nt, Human adenovirus A
acuagccccugucaacagcauu

SEQ ID NO: 1535969 - RNA, 23 nt, Human adenovirus A
uaaacugaggcggcuggugcuga

SEQ ID NO: 1535970 - RNA, 23 nt, Human adenovirus A
uaaucacacuuacccuuuuaaug

SEQ ID NO: 1535971 - RNA, 12 nt, Human adenovirus A
caacaaggaaag

SEQ ID NO: 1535972 - RNA, 20 nt, Human adenovirus A
cagugccagaagcacuggca

SEQ ID NO: 1535973 - RNA, 14 nt, Human adenovirus A
accgccaugcgcgc

SEQ ID NO: 1535974 - RNA, 13 nt, Human adenovirus A
aaacaaacuacau

SEQ ID NO: 1535975 - RNA, 13 nt, Human adenovirus A
accauccaaugga

SEQ ID NO: 1535976 - RNA, 18 nt, Human adenovirus A
ccuaaaauuuuugaaggu

SEQ ID NO: 1535977 - RNA, 14 nt, Human adenovirus A
cagcaagugccucc

SEQ ID NO: 1535978 - RNA, 23 nt, Human adenovirus A
cuuuuccauuagcauagccaugg

SEQ ID NO: 1535979 - RNA, 13 nt, Human adenovirus A
caaucagugucua

SEQ ID NO: 1535980 - RNA, 20 nt, Human adenovirus A
gcucgcaaguaccgcgcgcc

SEQ ID NO: 1535981 - RNA, 19 nt, Human adenovirus A
ccaguuucaauugcagaac

SEQ ID NO: 1535982 - RNA, 12 nt, Human adenovirus A
acaccuccaccc

SEQ ID NO: 1535983 - RNA, 23 nt, Human adenovirus A
gucauaccuuaaaaacuguucau

SEQ ID NO: 1535984 - RNA, 12 nt, Human adenovirus A
ggcgccaggaug

SEQ ID NO: 1535985 - RNA, 18 nt, Human adenovirus A
ccuuuucuagaacaaaaa

SEQ ID NO: 1535986 - RNA, 21 nt, Human adenovirus A
cuacauuggaguuggaagaag

SEQ ID NO: 1535987 - RNA, 16 nt, Human adenovirus A
cguaacucaaaaacuc

SEQ ID NO: 1535988 - RNA, 22 nt, Human adenovirus A
aaacuggauuugcgcacugaaa

SEQ ID NO: 1535989 - RNA, 20 nt, Human adenovirus A
cauccagauauaguacugcu

SEQ ID NO: 1535990 - RNA, 16 nt, Human adenovirus A
uugaaugcguaaaucu

SEQ ID NO: 1535991 - RNA, 12 nt, Human adenovirus A
uaagcuugcaua

SEQ ID NO: 1535992 - RNA, 16 nt, Human adenovirus A
auauguaucuggacau

SEQ ID NO: 1535993 - RNA, 11 nt, Human adenovirus A
uucuuccaaca

SEQ ID NO: 1535994 - RNA, 23 nt, Human adenovirus A
aaggcauggaaaaacuuggaaac

SEQ ID NO: 1535995 - RNA, 17 nt, Human adenovirus A
ucgcaguauggcagcug

SEQ ID NO: 1535996 - RNA, 16 nt, Human adenovirus A
acaaaugcgaccucag

SEQ ID NO: 1535997 - RNA, 13 nt, Human adenovirus A
gugagggugccac

SEQ ID NO: 1535998 - RNA, 15 nt, Human adenovirus A
aaugcagcuguggag

SEQ ID NO: 1535999 - RNA, 19 nt, Human adenovirus A
cugguucacaccaaacugg

SEQ ID NO: 1536000 - RNA, 14 nt, Human adenovirus A
cacuguaagaggag

SEQ ID NO: 1536001 - RNA, 15 nt, Human adenovirus A
auggaugcgcuccug

SEQ ID NO: 1536002 - RNA, 21 nt, Human adenovirus A
gacugcagguuuagggccggu

SEQ ID NO: 1536003 - RNA, 18 nt, Human adenovirus A
gugccaggcauuuccagg

SEQ ID NO: 1536004 - RNA, 20 nt, Human adenovirus A
uagccugcuuucagcacugc

SEQ ID NO: 1536005 - RNA, 18 nt, Human adenovirus A
ucgcgcacugggccagga

SEQ ID NO: 1536006 - RNA, 14 nt, Human adenovirus A
gcuuaccacucaga

SEQ ID NO: 1536007 - RNA, 19 nt, Human adenovirus A
gcugaggaaaugcgagacu

SEQ ID NO: 1536008 - RNA, 16 nt, Human adenovirus A
gcuacagauccauguu

SEQ ID NO: 1536009 - RNA, 22 nt, Human adenovirus A
aaacagugccuguugaucuguc

SEQ ID NO: 1536010 - RNA, 13 nt, Human adenovirus A
ggcuuaugcaagg

SEQ ID NO: 1536011 - RNA, 20 nt, Human adenovirus A
cggcgguguaugccaacaaa

SEQ ID NO: 1536012 - RNA, 22 nt, Human adenovirus A
ucaccuaccaccuaucccauga

SEQ ID NO: 1536013 - RNA, 14 nt, Human adenovirus A
auuuuccaaauguu

SEQ ID NO: 1536014 - RNA, 12 nt, Human adenovirus A
acucacuuugcc

SEQ ID NO: 1536015 - RNA, 24 nt, Human adenovirus A
aaugcaauaugacuaaggauuggu

SEQ ID NO: 1536016 - RNA, 15 nt, Human adenovirus A
acauuuagaccacug

SEQ ID NO: 1536017 - RNA, 15 nt, Human adenovirus A
cauuuuuuguugcuc

SEQ ID NO: 1536018 - RNA, 20 nt, Human adenovirus A
uacuucaccgcgcaagcuuu

SEQ ID NO: 1536019 - RNA, 16 nt, Human adenovirus A
cggaaugauuaaacaa

SEQ ID NO: 1536020 - RNA, 20 nt, Human adenovirus A
uaccagaaugaucacagcaa

SEQ ID NO: 1536021 - RNA, 17 nt, Human adenovirus A
guuccagauuguggaau

SEQ ID NO: 1536022 - RNA, 14 nt, Human adenovirus A
aagugccuccucag

SEQ ID NO: 1536023 - RNA, 18 nt, Human adenovirus A
cgcccacucuccugagcg

SEQ ID NO: 1536024 - RNA, 22 nt, Human adenovirus A
cucacaaauuugcauuucccaa

SEQ ID NO: 1536025 - RNA, 16 nt, Human adenovirus A
caaacccccaaaagcg

SEQ ID NO: 1536026 - RNA, 17 nt, Human adenovirus A
cucuggcgaacaggaag

SEQ ID NO: 1536027 - RNA, 21 nt, Human adenovirus A
aaauaaugcauuaccagcagc

SEQ ID NO: 1536028 - RNA, 18 nt, Human adenovirus A
acccaguuuuugcagugc

SEQ ID NO: 1536029 - RNA, 17 nt, Human adenovirus A
cacgagccagcugaacg

SEQ ID NO: 1536030 - RNA, 21 nt, Human adenovirus A
acacuuuaauaaaaacacugu

SEQ ID NO: 1536031 - RNA, 14 nt, Human adenovirus A
agaacaaacagugc

SEQ ID NO: 1536032 - RNA, 13 nt, Human adenovirus A
cugcaguaaauuc

SEQ ID NO: 1536033 - RNA, 23 nt, Human adenovirus A
gccacccuacgugccuccccgcu

SEQ ID NO: 1536034 - RNA, 21 nt, Human adenovirus A
ugagacuucccacagccagug

SEQ ID NO: 1536035 - RNA, 13 nt, Human adenovirus A
ccuguucucccca

SEQ ID NO: 1536036 - RNA, 21 nt, Human adenovirus A
uaaauggcgaccucuaacaaa

SEQ ID NO: 1536037 - RNA, 23 nt, Human adenovirus A
aaaggaggaagaacauccaacug

SEQ ID NO: 1536038 - RNA, 20 nt, Human adenovirus A
cuaugaugcgggcagccagg

SEQ ID NO: 1536039 - RNA, 18 nt, Human adenovirus A
gcaaaugcccugcaaaaa

SEQ ID NO: 1536040 - RNA, 17 nt, Human adenovirus A
uagggaugcaaugcuua

SEQ ID NO: 1536041 - RNA, 15 nt, Human adenovirus A
auauccaaaguacua

SEQ ID NO: 1536042 - RNA, 23 nt, Human adenovirus A
aggguuugcaaaccguaaacuua

SEQ ID NO: 1536043 - RNA, 15 nt, Human adenovirus A
ggggcuacugcucau

SEQ ID NO: 1536044 - RNA, 16 nt, Human adenovirus A
acugaugaucuucccg

SEQ ID NO: 1536045 - RNA, 13 nt, Human adenovirus A
caaaccggccaga

SEQ ID NO: 1536046 - RNA, 18 nt, Human adenovirus A
caaccaugaaaacagcau

SEQ ID NO: 1536047 - RNA, 16 nt, Human adenovirus A
ccgaggacgcacuggu

SEQ ID NO: 1536048 - RNA, 15 nt, Human adenovirus A
accuucgagaacuaa

SEQ ID NO: 1536049 - RNA, 16 nt, Human adenovirus A
auuuuauuauuugcug

SEQ ID NO: 1536050 - RNA, 19 nt, Human adenovirus A
auugcgcaaaauugaggaa

SEQ ID NO: 1536051 - RNA, 18 nt, Human adenovirus A
ggugauaagcuccugcau

SEQ ID NO: 1536052 - RNA, 13 nt, Human adenovirus A
aucuguuuggcuc

SEQ ID NO: 1536053 - RNA, 16 nt, Human adenovirus A
cagccaacaucaugaa

SEQ ID NO: 1536054 - RNA, 22 nt, Human adenovirus A
uacuagccccugucaacagcau

SEQ ID NO: 1536055 - RNA, 16 nt, Human adenovirus A
cguagccuugcagcgg

SEQ ID NO: 1536056 - RNA, 19 nt, Human adenovirus A
uacauccuuccauugugcc

SEQ ID NO: 1536057 - RNA, 21 nt, Human adenovirus A
cacuuuaauaaaaacacugug

SEQ ID NO: 1536058 - RNA, 23 nt, Human adenovirus A
uaacaggugaaagugaauacuua

SEQ ID NO: 1536059 - RNA, 16 nt, Human adenovirus A
cucuuggccagcugcc

SEQ ID NO: 1536060 - RNA, 14 nt, Human adenovirus A
ucaucaaacugccu

SEQ ID NO: 1536061 - RNA, 19 nt, Human adenovirus A
gccccaagcuaaccgcuuu

SEQ ID NO: 1536062 - RNA, 17 nt, Human adenovirus A
acggugucagaauaaca

SEQ ID NO: 1536063 - RNA, 20 nt, Human adenovirus A
gagcccgaaguugacuggca

SEQ ID NO: 1536064 - RNA, 13 nt, Human adenovirus A
augugcuguggaa

SEQ ID NO: 1536065 - RNA, 23 nt, Human adenovirus A
uaaucaagacggucagcaaggau

SEQ ID NO: 1536066 - RNA, 23 nt, Human adenovirus A
uaacaaaggugcuucccacauac

SEQ ID NO: 1536067 - RNA, 17 nt, Human adenovirus A
ccuucgaaaugcaggga

SEQ ID NO: 1536068 - RNA, 22 nt, Human adenovirus A
acgcguccaccucacccuuaga

SEQ ID NO: 1536069 - RNA, 19 nt, Human adenovirus A
caagccgcucucaccgcua

SEQ ID NO: 1536070 - RNA, 21 nt, Human adenovirus A
cccucccucuuggccagcugc

SEQ ID NO: 1536071 - RNA, 21 nt, Human adenovirus A
aaugccuuaccagaaaaacag

SEQ ID NO: 1536072 - RNA, 22 nt, Human adenovirus A
gauuugcgcacugaaaaaccaa

SEQ ID NO: 1536073 - RNA, 22 nt, Human adenovirus A
aaugguuacugaagugccucaa

SEQ ID NO: 1536074 - RNA, 16 nt, Human adenovirus A
cuacgugagaauuguu

SEQ ID NO: 1536075 - RNA, 12 nt, Human adenovirus A
aacuuuagaaag

SEQ ID NO: 1536076 - RNA, 14 nt, Human adenovirus A
cagauccguuaaug

SEQ ID NO: 1536077 - RNA, 15 nt, Human adenovirus A
gcuucagaugacugg

SEQ ID NO: 1536078 - RNA, 15 nt, Human adenovirus A
uauggauguuggaag

SEQ ID NO: 1536079 - RNA, 13 nt, Human adenovirus A
acacuggcuggcu

SEQ ID NO: 1536080 - RNA, 23 nt, Human adenovirus A
gucacucaagcggcauuccccau

SEQ ID NO: 1536081 - RNA, 18 nt, Human adenovirus A
aguuaaguuugacaccag

SEQ ID NO: 1536082 - RNA, 18 nt, Human adenovirus A
aaaaacuuggaaacgccu

SEQ ID NO: 1536083 - RNA, 16 nt, Human adenovirus A
acuuuccgccauggcu

SEQ ID NO: 1536084 - RNA, 21 nt, Human adenovirus A
ugcccugauauaucaggaaaa

SEQ ID NO: 1536085 - RNA, 15 nt, Human adenovirus A
uggaagcuggccaua

SEQ ID NO: 1536086 - RNA, 15 nt, Human adenovirus A
gcgugccaggcauuu

SEQ ID NO: 1536087 - RNA, 15 nt, Human adenovirus A
caaacagcuguggaa

SEQ ID NO: 1536088 - RNA, 15 nt, Human adenovirus A
gcgagcccaacccau

SEQ ID NO: 1536089 - RNA, 12 nt, Human adenovirus A
cgaggugcagcu

SEQ ID NO: 1536090 - RNA, 20 nt, Human adenovirus A
ugggcaucuugcaugaaaac

SEQ ID NO: 1536091 - RNA, 23 nt, Human adenovirus A
ugccagacuacguuuuacauccu

SEQ ID NO: 1536092 - RNA, 23 nt, Human adenovirus A
gccagccaagcguagccgcagca

SEQ ID NO: 1536093 - RNA, 23 nt, Human adenovirus A
ugaccgaauccacaaagcaguaa

SEQ ID NO: 1536094 - RNA, 21 nt, Human adenovirus A
augucggccugacgcucuggc

SEQ ID NO: 1536095 - RNA, 15 nt, Human adenovirus A
uccuaaaacugcucu

SEQ ID NO: 1536096 - RNA, 12 nt, Human adenovirus A
guacaaagccag

SEQ ID NO: 1536097 - RNA, 14 nt, Human adenovirus A
uacaacaguacagg

SEQ ID NO: 1536098 - RNA, 14 nt, Human adenovirus A
ugacauugcuucau

SEQ ID NO: 1536099 - RNA, 15 nt, Human adenovirus A
caaugcagcaaacac

SEQ ID NO: 1536100 - RNA, 15 nt, Human adenovirus A
agcgcacuggcauaa

SEQ ID NO: 1536101 - RNA, 13 nt, Human adenovirus A
uggaguuggaaac

SEQ ID NO: 1536102 - RNA, 17 nt, Human adenovirus A
aguuaagaaaacgcauu

SEQ ID NO: 1536103 - RNA, 12 nt, Human adenovirus A
aaugaaaacaau

SEQ ID NO: 1536104 - RNA, 16 nt, Human adenovirus A
ccuacacaacacaaaa

SEQ ID NO: 1536105 - RNA, 18 nt, Human adenovirus A
aguacgacgaaguguacg

SEQ ID NO: 1536106 - RNA, 16 nt, Human adenovirus A
gcaagauccggugacu

SEQ ID NO: 1536107 - RNA, 16 nt, Human adenovirus A
acaacugcacuugaau

SEQ ID NO: 1536108 - RNA, 18 nt, Human adenovirus A
ccacggccucagcagcgg

SEQ ID NO: 1536109 - RNA, 15 nt, Human adenovirus A
auuaguucuuuucuu

SEQ ID NO: 1536110 - RNA, 15 nt, Human adenovirus A
uggaacuuaacaacu

SEQ ID NO: 1536111 - RNA, 18 nt, Human adenovirus A
aaauguucaacaacagcu

SEQ ID NO: 1536112 - RNA, 20 nt, Human adenovirus A
agccagauguaaaaguacgu

SEQ ID NO: 1536113 - RNA, 22 nt, Human adenovirus A
agugaauggaacaccagcauug

SEQ ID NO: 1536114 - RNA, 16 nt, Human adenovirus A
cuccggaaacaacacg

SEQ ID NO: 1536115 - RNA, 14 nt, Human adenovirus A
uugcgauaaacugg

SEQ ID NO: 1536116 - RNA, 13 nt, Human adenovirus A
cagucaccaccag

SEQ ID NO: 1536117 - RNA, 14 nt, Human adenovirus A
guucgcuuugacaa

SEQ ID NO: 1536118 - RNA, 14 nt, Human adenovirus A
uacaaaucuuucaa

SEQ ID NO: 1536119 - RNA, 22 nt, Human adenovirus A
acuuauuacugguacuaugacu

SEQ ID NO: 1536120 - RNA, 22 nt, Human adenovirus A
aagucacguguucacaauuuuc

SEQ ID NO: 1536121 - RNA, 13 nt, Human adenovirus A
uaacuucuaccca

SEQ ID NO: 1536122 - RNA, 16 nt, Human adenovirus A
cauuuuucccacuuua

SEQ ID NO: 1536123 - RNA, 17 nt, Human adenovirus A
gcaaaaauuuuuugcca

SEQ ID NO: 1536124 - RNA, 17 nt, Human adenovirus A
agcgccgagccacagcc

SEQ ID NO: 1536125 - RNA, 14 nt, Human adenovirus A
cuuucaacaaaaaa

SEQ ID NO: 1536126 - RNA, 17 nt, Human adenovirus A
caaaauugaggaauguc

SEQ ID NO: 1536127 - RNA, 16 nt, Human adenovirus A
uuugccagcucuugga

SEQ ID NO: 1536128 - RNA, 15 nt, Human adenovirus A
cgcaauuagggccag

SEQ ID NO: 1536129 - RNA, 21 nt, Human adenovirus A
cgggcccauguaucagcagcc

SEQ ID NO: 1536130 - RNA, 16 nt, Human adenovirus A
cacgccaaagccacac

SEQ ID NO: 1536131 - RNA, 23 nt, Human adenovirus A
gccccccuccccuguggagccac

SEQ ID NO: 1536132 - RNA, 14 nt, Human adenovirus A
cccugauccggcaa

SEQ ID NO: 1536133 - RNA, 11 nt, Human adenovirus A
uacagagagca

SEQ ID NO: 1536134 - RNA, 18 nt, Human adenovirus A
uggauuugauucaagagg

SEQ ID NO: 1536135 - RNA, 18 nt, Human adenovirus A
agcagugcggccuguugc

SEQ ID NO: 1536136 - RNA, 17 nt, Human adenovirus A
gcuguacaguuucugug

SEQ ID NO: 1536137 - RNA, 20 nt, Human adenovirus A
cuuaaugaacaaugcuauua

SEQ ID NO: 1536138 - RNA, 14 nt, Human adenovirus A
gccaaucaggcugu

SEQ ID NO: 1536139 - RNA, 18 nt, Human adenovirus A
gguucgacgggccaggcg

SEQ ID NO: 1536140 - RNA, 18 nt, Human adenovirus A
aacuaugccaguuuacug

SEQ ID NO: 1536141 - RNA, 18 nt, Human adenovirus A
auucccagguaauuuuca

SEQ ID NO: 1536142 - RNA, 16 nt, Human adenovirus A
gaccccuacuuuguau

SEQ ID NO: 1536143 - RNA, 23 nt, Human adenovirus A
ggaggacuuugagccagaugaac

SEQ ID NO: 1536144 - RNA, 18 nt, Human adenovirus A
cucgcgcuuuggaggcag

SEQ ID NO: 1536145 - RNA, 16 nt, Human adenovirus A
ugaaccauucccaggu

SEQ ID NO: 1536146 - RNA, 18 nt, Human adenovirus A
cugcauguccagauuuca

SEQ ID NO: 1536147 - RNA, 22 nt, Human adenovirus A
aagcugaaacuaggggcuggcu

SEQ ID NO: 1536148 - RNA, 19 nt, Human adenovirus A
cuugcuuccagacaaaaaa

SEQ ID NO: 1536149 - RNA, 20 nt, Human adenovirus A
caauuuacauuuuaacugug

SEQ ID NO: 1536150 - RNA, 17 nt, Human adenovirus A
uacaacuugcacaaaug

SEQ ID NO: 1536151 - RNA, 19 nt, Human adenovirus A
cagucuugaaugcucugga

SEQ ID NO: 1536152 - RNA, 21 nt, Human adenovirus A
cugccgccacgaaugcuggcg

SEQ ID NO: 1536153 - RNA, 22 nt, Human adenovirus A
auugauaaaacgguuaagcugg

SEQ ID NO: 1536154 - RNA, 17 nt, Human adenovirus A
gacagacuugcaaacag

SEQ ID NO: 1536155 - RNA, 22 nt, Human adenovirus A
auacauauaugggcucuuuuag

SEQ ID NO: 1536156 - RNA, 16 nt, Human adenovirus A
cuaaaaugcaaaaugg

SEQ ID NO: 1536157 - RNA, 18 nt, Human adenovirus A
ugugcuacacgcugccca

SEQ ID NO: 1536158 - RNA, 13 nt, Human adenovirus A
aaccccaaaagcc

SEQ ID NO: 1536159 - RNA, 18 nt, Human adenovirus A
uuuucuuacauuacccaa

SEQ ID NO: 1536160 - RNA, 14 nt, Human adenovirus A
cccaacuuaacgca

SEQ ID NO: 1536161 - RNA, 17 nt, Human adenovirus A
gggcaucuugcaugaaa

SEQ ID NO: 1536162 - RNA, 19 nt, Human adenovirus A
cacauauucgcgugccagg

SEQ ID NO: 1536163 - RNA, 15 nt, Human adenovirus A
aucugccacuacccg

SEQ ID NO: 1536164 - RNA, 17 nt, Human adenovirus A
cuuuaacggaaaacacg

SEQ ID NO: 1536165 - RNA, 19 nt, Human adenovirus A
uauuagcucauuggaguac

SEQ ID NO: 1536166 - RNA, 23 nt, Human adenovirus A
cuauuauugagcauuauuugcga

SEQ ID NO: 1536167 - RNA, 20 nt, Human adenovirus A
caaagggggcgcacacuaau

SEQ ID NO: 1536168 - RNA, 15 nt, Human adenovirus A
caagccgcucucacc

SEQ ID NO: 1536169 - RNA, 14 nt, Human adenovirus A
caguggacaaaaac

SEQ ID NO: 1536170 - RNA, 14 nt, Human adenovirus A
agcccaacccuucc

SEQ ID NO: 1536171 - RNA, 13 nt, Human adenovirus A
gacugacuaugag

SEQ ID NO: 1536172 - RNA, 16 nt, Human adenovirus A
aggaaaaucccccucc

SEQ ID NO: 1536173 - RNA, 16 nt, Human adenovirus A
cguguuagacauggcu

SEQ ID NO: 1536174 - RNA, 19 nt, Human adenovirus A
gaccaaaaaguaaacuguc

SEQ ID NO: 1536175 - RNA, 14 nt, Human adenovirus A
gcagcaaaugcccu

SEQ ID NO: 1536176 - RNA, 18 nt, Human adenovirus A
gcuaggcgacgccaacag

SEQ ID NO: 1536177 - RNA, 13 nt, Human adenovirus A
auuuaaaaaccau

SEQ ID NO: 1536178 - RNA, 18 nt, Human adenovirus A
cgagaagaaguagccauu

SEQ ID NO: 1536179 - RNA, 21 nt, Human adenovirus A
acugcagccugucuuaaaauc

SEQ ID NO: 1536180 - RNA, 21 nt, Human adenovirus A
acccucccucuuggccagcug

SEQ ID NO: 1536181 - RNA, 20 nt, Human adenovirus A
gaaugggaggaaagacagcc

SEQ ID NO: 1536182 - RNA, 17 nt, Human adenovirus A
caaacuggaacuuaaca

SEQ ID NO: 1536183 - RNA, 21 nt, Human adenovirus A
aaucccucgcccgcacaguca

SEQ ID NO: 1536184 - RNA, 22 nt, Human adenovirus A
ccaccgucaauucuucuuccaa

SEQ ID NO: 1536185 - RNA, 15 nt, Human adenovirus A
accagcgucccaaaa

SEQ ID NO: 1536186 - RNA, 20 nt, Human adenovirus A
acaaggucuuaaacuuucuu

SEQ ID NO: 1536187 - RNA, 17 nt, Human adenovirus A
aucccuugcuugcuuac

SEQ ID NO: 1536188 - RNA, 18 nt, Human adenovirus A
acaaggaccguuuucugc

SEQ ID NO: 1536189 - RNA, 22 nt, Human adenovirus A
uuaagcgacgaucuuggagugu

SEQ ID NO: 1536190 - RNA, 17 nt, Human adenovirus A
agauuuguuccuuuuca

SEQ ID NO: 1536191 - RNA, 21 nt, Human adenovirus A
aagcauacuuaccaaagccau

SEQ ID NO: 1536192 - RNA, 16 nt, Human adenovirus A
cagcugacgacaguag

SEQ ID NO: 1536193 - RNA, 15 nt, Human adenovirus A
acuccgggaguguac

SEQ ID NO: 1536194 - RNA, 14 nt, Human adenovirus A
gacagcauggagug

SEQ ID NO: 1536195 - RNA, 15 nt, Human adenovirus A
uugaguacucagccg

SEQ ID NO: 1536196 - RNA, 19 nt, Human adenovirus A
uccaucuguuuacuucaau

SEQ ID NO: 1536197 - RNA, 18 nt, Human adenovirus A
uuccaaccaaaggagaaa

SEQ ID NO: 1536198 - RNA, 19 nt, Human adenovirus A
agcauucucuaacaagcug

SEQ ID NO: 1536199 - RNA, 13 nt, Human adenovirus A
uacgcuggcugug

SEQ ID NO: 1536200 - RNA, 20 nt, Human adenovirus A
ugaucaauuucuuccuccug

SEQ ID NO: 1536201 - RNA, 17 nt, Human adenovirus A
acugccgacaacacugu

SEQ ID NO: 1536202 - RNA, 19 nt, Human adenovirus A
caaagguaucucugaccau

SEQ ID NO: 1536203 - RNA, 18 nt, Human adenovirus A
uaaagaaacaaacuacau

SEQ ID NO: 1536204 - RNA, 19 nt, Human adenovirus A
ccaccaaacugcagccuca

SEQ ID NO: 1536205 - RNA, 15 nt, Human adenovirus A
gucagcucaggacau

SEQ ID NO: 1536206 - RNA, 16 nt, Human adenovirus A
cuacgguggcagccaa

SEQ ID NO: 1536207 - RNA, 17 nt, Human adenovirus A
cacaccaaacuggccau

SEQ ID NO: 1536208 - RNA, 21 nt, Human adenovirus A
acgcucaaagaaacagcagca

SEQ ID NO: 1536209 - RNA, 22 nt, Human adenovirus A
cccgcgguuuuggcggccaugc

SEQ ID NO: 1536210 - RNA, 15 nt, Human adenovirus A
auaaagaauuuuccg

SEQ ID NO: 1536211 - RNA, 16 nt, Human adenovirus A
aaacacugagcuccau

SEQ ID NO: 1536212 - RNA, 17 nt, Human adenovirus A
ucuugccugcggacuga

SEQ ID NO: 1536213 - RNA, 22 nt, Human adenovirus A
cggcaccuuuuaccuaaaccac

SEQ ID NO: 1536214 - RNA, 14 nt, Human adenovirus A
uauugcgcagcaac

SEQ ID NO: 1536215 - RNA, 21 nt, Human adenovirus A
caaggauuugaaugcguaaau

SEQ ID NO: 1536216 - RNA, 15 nt, Human adenovirus A
ggaaacaacacggag

SEQ ID NO: 1536217 - RNA, 20 nt, Human adenovirus A
caaugcauuaauaauaaaac

SEQ ID NO: 1536218 - RNA, 15 nt, Human adenovirus A
cagccugucuacaaa

SEQ ID NO: 1536219 - RNA, 20 nt, Human adenovirus A
cagauuucagcacgagaggg

SEQ ID NO: 1536220 - RNA, 23 nt, Human adenovirus A
uaaacaucuacagcgacaaagca

SEQ ID NO: 1536221 - RNA, 19 nt, Human adenovirus A
ugacuggacagcggccaug

SEQ ID NO: 1536222 - RNA, 14 nt, Human adenovirus A
gaggcgcuggcuca

SEQ ID NO: 1536223 - RNA, 11 nt, Human adenovirus A
ugacaaagaug

SEQ ID NO: 1536224 - RNA, 12 nt, Human adenovirus A
cguucuguggau

SEQ ID NO: 1536225 - RNA, 21 nt, Human adenovirus A
aagcaaaccacauaggcauug

SEQ ID NO: 1536226 - RNA, 19 nt, Human adenovirus A
cugucuugucuugcauggu

SEQ ID NO: 1536227 - RNA, 15 nt, Human adenovirus A
acgaacuacaacagc

SEQ ID NO: 1536228 - RNA, 22 nt, Human adenovirus A
caagcauuuuuuguugcuccag

SEQ ID NO: 1536229 - RNA, 16 nt, Human adenovirus A
gacaucuuaaugccag

SEQ ID NO: 1536230 - RNA, 15 nt, Human adenovirus A
gcccugcuccgacaa

SEQ ID NO: 1536231 - RNA, 14 nt, Human adenovirus A
aacauuaaaagacg

SEQ ID NO: 1536232 - RNA, 15 nt, Human adenovirus A
gagcgcccuuaacca

SEQ ID NO: 1536233 - RNA, 15 nt, Human adenovirus A
ugcgagcugccaccg

SEQ ID NO: 1536234 - RNA, 19 nt, Human adenovirus A
uagagcaaacuacauugca

SEQ ID NO: 1536235 - RNA, 22 nt, Human adenovirus A
gauuuaaggggucuauccuuca

SEQ ID NO: 1536236 - RNA, 14 nt, Human adenovirus A
auggagaaggacaa

SEQ ID NO: 1536237 - RNA, 16 nt, Human adenovirus A
aaaguagaaaucucgu

SEQ ID NO: 1536238 - RNA, 17 nt, Human adenovirus A
cagcugccguucguccu

SEQ ID NO: 1536239 - RNA, 16 nt, Human adenovirus A
cugauuaugcauuuua

SEQ ID NO: 1536240 - RNA, 13 nt, Human adenovirus A
acgccaacaggau

SEQ ID NO: 1536241 - RNA, 23 nt, Human adenovirus A
augaaaguugcauuuaauggcau

SEQ ID NO: 1536242 - RNA, 13 nt, Human adenovirus A
accauggaauuuu

SEQ ID NO: 1536243 - RNA, 19 nt, Human adenovirus A
acuccauguggagguauaa

SEQ ID NO: 1536244 - RNA, 13 nt, Human adenovirus A
uggaaaaacaacu

SEQ ID NO: 1536245 - RNA, 13 nt, Human adenovirus A
auucaucaacauu

SEQ ID NO: 1536246 - RNA, 23 nt, Human adenovirus A
agaauaggggaugguuuaacauu

SEQ ID NO: 1536247 - RNA, 12 nt, Human adenovirus A
gacagcaagcag

SEQ ID NO: 1536248 - RNA, 14 nt, Human adenovirus A
gcagcaacaaggaa

SEQ ID NO: 1536249 - RNA, 14 nt, Human adenovirus A
ugaaaauacaucau

SEQ ID NO: 1536250 - RNA, 20 nt, Human adenovirus A
ugacggugccccucgaccug

SEQ ID NO: 1536251 - RNA, 18 nt, Human adenovirus A
agucaaaguaugcugcac

SEQ ID NO: 1536252 - RNA, 19 nt, Human adenovirus A
cgcaguccugaugcuuuuc

SEQ ID NO: 1536253 - RNA, 21 nt, Human adenovirus A
gcuaugaugcgggcagccagg

SEQ ID NO: 1536254 - RNA, 17 nt, Human adenovirus A
aaaagucuacucauacc

SEQ ID NO: 1536255 - RNA, 15 nt, Human adenovirus A
acaacaagcuaauug

SEQ ID NO: 1536256 - RNA, 20 nt, Human adenovirus A
ccuacacuuacgaauggaac

SEQ ID NO: 1536257 - RNA, 18 nt, Human adenovirus A
cagacaguggcuuuuccu

SEQ ID NO: 1536258 - RNA, 14 nt, Human adenovirus A
cacugaaaaaccaa

SEQ ID NO: 1536259 - RNA, 14 nt, Human adenovirus A
accccaaaagcccg

SEQ ID NO: 1536260 - RNA, 16 nt, Human adenovirus A
gacgaggucgaggacu

SEQ ID NO: 1536261 - RNA, 18 nt, Human adenovirus A
cuuuggacuucugccuac

SEQ ID NO: 1536262 - RNA, 18 nt, Human adenovirus A
ucagcgagucaccaucac

SEQ ID NO: 1536263 - RNA, 14 nt, Human adenovirus A
cuuuucaaacuuua

SEQ ID NO: 1536264 - RNA, 11 nt, Human adenovirus A
accaggaagcu

SEQ ID NO: 1536265 - RNA, 13 nt, Human adenovirus A
ugucauggagaag

SEQ ID NO: 1536266 - RNA, 20 nt, Human adenovirus A
ucuacuaacaacuccagaug

SEQ ID NO: 1536267 - RNA, 14 nt, Human adenovirus A
gccgcaaaacaggc

SEQ ID NO: 1536268 - RNA, 14 nt, Human adenovirus A
uuuucuuagaugca

SEQ ID NO: 1536269 - RNA, 14 nt, Human adenovirus A
cgcgcaaguugacu

SEQ ID NO: 1536270 - RNA, 15 nt, Human adenovirus A
cugaacgggggcgcc

SEQ ID NO: 1536271 - RNA, 22 nt, Human adenovirus A
caaacuauauaaaucagccuuu

SEQ ID NO: 1536272 - RNA, 17 nt, Human adenovirus A
gugcuuccguagccuug

SEQ ID NO: 1536273 - RNA, 13 nt, Human adenovirus A
uaaugcagcuuca

SEQ ID NO: 1536274 - RNA, 16 nt, Human adenovirus A
aaacaaaagcaaagca

SEQ ID NO: 1536275 - RNA, 15 nt, Human adenovirus A
augaacaaaaucacc

SEQ ID NO: 1536276 - RNA, 21 nt, Human adenovirus A
gcugcccugauauaucaggaa

SEQ ID NO: 1536277 - RNA, 16 nt, Human adenovirus A
cacuguaagaggagac

SEQ ID NO: 1536278 - RNA, 19 nt, Human adenovirus A
gggauuguguccuuggaag

SEQ ID NO: 1536279 - RNA, 21 nt, Human adenovirus A
acucaacguagcuuuugacug

SEQ ID NO: 1536280 - RNA, 14 nt, Human adenovirus A
caacugcacuugaa

SEQ ID NO: 1536281 - RNA, 13 nt, Human adenovirus A
ugagguguaccug

SEQ ID NO: 1536282 - RNA, 12 nt, Human adenovirus A
cacacaaaacac

SEQ ID NO: 1536283 - RNA, 23 nt, Human adenovirus A
acagcacuaacauguuauuuaaa

SEQ ID NO: 1536284 - RNA, 15 nt, Human adenovirus A
uugcgagcugccacc

SEQ ID NO: 1536285 - RNA, 10 nt, Human adenovirus A
uggacacuau

SEQ ID NO: 1536286 - RNA, 18 nt, Human adenovirus A
caaacacggauacuuaau

SEQ ID NO: 1536287 - RNA, 14 nt, Human adenovirus A
aacuuaacccuccc

SEQ ID NO: 1536288 - RNA, 19 nt, Human adenovirus A
ggauacuaccgcugcucag

SEQ ID NO: 1536289 - RNA, 11 nt, Human adenovirus A
ccagugccgcc

SEQ ID NO: 1536290 - RNA, 22 nt, Human adenovirus A
gggcgcugacgggagcaggaac

SEQ ID NO: 1536291 - RNA, 16 nt, Human adenovirus A
ugacaaacgcccugcu

SEQ ID NO: 1536292 - RNA, 15 nt, Human adenovirus A
gccacaccuccaccc

SEQ ID NO: 1536293 - RNA, 20 nt, Human adenovirus A
gagcaggcuggaggugcagg

SEQ ID NO: 1536294 - RNA, 21 nt, Human adenovirus A
caaagaccccauuguaacuga

SEQ ID NO: 1536295 - RNA, 13 nt, Human adenovirus A
gggccgcagcugc

SEQ ID NO: 1536296 - RNA, 22 nt, Human adenovirus A
ggcaggaaaucugggaggaaga

SEQ ID NO: 1536297 - RNA, 19 nt, Human adenovirus A
aacgccaccagcgugccca

SEQ ID NO: 1536298 - RNA, 15 nt, Human adenovirus A
aaguaccaggaagcu

SEQ ID NO: 1536299 - RNA, 18 nt, Human adenovirus A
auugauacacaccucauu

SEQ ID NO: 1536300 - RNA, 22 nt, Human adenovirus A
auuugaaugcguaaaucucgca

SEQ ID NO: 1536301 - RNA, 14 nt, Human adenovirus A
uuugaaccugaaag

SEQ ID NO: 1536302 - RNA, 20 nt, Human adenovirus A
cagguauaaaggucgcacug

SEQ ID NO: 1536303 - RNA, 22 nt, Human adenovirus A
aggcuaaguuuuguuucuucua

SEQ ID NO: 1536304 - RNA, 21 nt, Human adenovirus A
cuuuuaacauuagcagucugg

SEQ ID NO: 1536305 - RNA, 19 nt, Human adenovirus A
auuaguaacuccgggagug

SEQ ID NO: 1536306 - RNA, 19 nt, Human adenovirus A
caacauugcccuguaugcu

SEQ ID NO: 1536307 - RNA, 18 nt, Human adenovirus A
acgccuuacauguggagc

SEQ ID NO: 1536308 - RNA, 19 nt, Human adenovirus A
gaaaugcgagacugcaggu

SEQ ID NO: 1536309 - RNA, 22 nt, Human adenovirus A
cuucaccgcgcugcggccauga

SEQ ID NO: 1536310 - RNA, 21 nt, Human adenovirus A
acaaccacucucgcaggcuug

SEQ ID NO: 1536311 - RNA, 14 nt, Human adenovirus A
agcgccaccugcca

SEQ ID NO: 1536312 - RNA, 16 nt, Human adenovirus A
ccaggcaggcgcggcg

SEQ ID NO: 1536313 - RNA, 15 nt, Human adenovirus A
aaaggcauggaaaaa

SEQ ID NO: 1536314 - RNA, 13 nt, Human adenovirus A
cuaacuguuaauc

SEQ ID NO: 1536315 - RNA, 12 nt, Human adenovirus A
gccgcagcugcg

SEQ ID NO: 1536316 - RNA, 17 nt, Human adenovirus A
acagcuucuaaaagagc

SEQ ID NO: 1536317 - RNA, 20 nt, Human adenovirus A
auguaaaggaggcgcuggcu

SEQ ID NO: 1536318 - RNA, 15 nt, Human adenovirus A
uggucccauccaagu

SEQ ID NO: 1536319 - RNA, 14 nt, Human adenovirus A
ucauccucagcucc

SEQ ID NO: 1536320 - RNA, 16 nt, Human adenovirus A
gagaagcggagccacu

SEQ ID NO: 1536321 - RNA, 16 nt, Human adenovirus A
uacugccaguucaugc

SEQ ID NO: 1536322 - RNA, 20 nt, Human adenovirus A
acaaacacggauacuuaaua

SEQ ID NO: 1536323 - RNA, 18 nt, Human adenovirus A
gcugggcucgaggaccau

SEQ ID NO: 1536324 - RNA, 21 nt, Human adenovirus A
uggacuuugagcaccugggca

SEQ ID NO: 1536325 - RNA, 17 nt, Human adenovirus A
ugggaccccgaaaccca

SEQ ID NO: 1536326 - RNA, 17 nt, Human adenovirus A
cugaggcggcuggugcu

SEQ ID NO: 1536327 - RNA, 21 nt, Human adenovirus A
acguaaugugcgcgucagggu

SEQ ID NO: 1536328 - RNA, 20 nt, Human adenovirus A
ucaaacugccugacugaacc

SEQ ID NO: 1536329 - RNA, 15 nt, Human adenovirus A
guuauccacauugcu

SEQ ID NO: 1536330 - RNA, 14 nt, Human adenovirus A
ucaccaccagcgcu

SEQ ID NO: 1536331 - RNA, 13 nt, Human adenovirus A
ucaccgcuacacc

SEQ ID NO: 1536332 - RNA, 18 nt, Human adenovirus A
agccuucauuccuucaga

SEQ ID NO: 1536333 - RNA, 14 nt, Human adenovirus A
gacgcagugaguga

SEQ ID NO: 1536334 - RNA, 13 nt, Human adenovirus A
uuuuugaguacuc

SEQ ID NO: 1536335 - RNA, 15 nt, Human adenovirus A
uucgucgcuguuuug

SEQ ID NO: 1536336 - RNA, 15 nt, Human adenovirus A
gcaauauuccagcuc

SEQ ID NO: 1536337 - RNA, 13 nt, Human adenovirus A
acuuauugcugcg

SEQ ID NO: 1536338 - RNA, 14 nt, Human adenovirus A
ggccagcauugccg

SEQ ID NO: 1536339 - RNA, 17 nt, Human adenovirus A
uguagagucuuggaaua

SEQ ID NO: 1536340 - RNA, 23 nt, Human adenovirus A
ucgccuaaaaacuaaagaaacuc

SEQ ID NO: 1536341 - RNA, 23 nt, Human adenovirus A
aagcgcucgcgcuuuggaggcag

SEQ ID NO: 1536342 - RNA, 16 nt, Human adenovirus A
caggaggacacuggca

SEQ ID NO: 1536343 - RNA, 18 nt, Human adenovirus A
guacuuguaacuguggaa

SEQ ID NO: 1536344 - RNA, 19 nt, Human adenovirus A
agagcuaagcgacaaagag

SEQ ID NO: 1536345 - RNA, 12 nt, Human adenovirus A
cuuuucaaacuu

SEQ ID NO: 1536346 - RNA, 18 nt, Human adenovirus A
cucuggcgaacaggaaga

SEQ ID NO: 1536347 - RNA, 17 nt, Human adenovirus A
caccgcgcugcggccau

SEQ ID NO: 1536348 - RNA, 23 nt, Human adenovirus A
gcaggguaugggcccaggggugg

SEQ ID NO: 1536349 - RNA, 16 nt, Human adenovirus A
uuggauagcaaagcca

SEQ ID NO: 1536350 - RNA, 22 nt, Human adenovirus A
guauguucccauugacaaggaa

SEQ ID NO: 1536351 - RNA, 17 nt, Human adenovirus A
cuuuauaacuaacuuua

SEQ ID NO: 1536352 - RNA, 12 nt, Human adenovirus A
ugcaaugcuuaa

SEQ ID NO: 1536353 - RNA, 22 nt, Human adenovirus A
uaauaauugaguaacuucaaca

SEQ ID NO: 1536354 - RNA, 15 nt, Human adenovirus A
aaguaaauuaaaugg

SEQ ID NO: 1536355 - RNA, 16 nt, Human adenovirus A
ccugcgggaagcgggg

SEQ ID NO: 1536356 - RNA, 18 nt, Human adenovirus A
aauuucuaauguggagcu

SEQ ID NO: 1536357 - RNA, 21 nt, Human adenovirus A
agagaacaaacagugccuguu

SEQ ID NO: 1536358 - RNA, 14 nt, Human adenovirus A
ggcgcucagugcga

SEQ ID NO: 1536359 - RNA, 20 nt, Human adenovirus A
caaaaucuaagccaugcaaa

SEQ ID NO: 1536360 - RNA, 16 nt, Human adenovirus A
aaggagguuuguaagc

SEQ ID NO: 1536361 - RNA, 16 nt, Human adenovirus A
aucuucaucuuuucua

SEQ ID NO: 1536362 - RNA, 21 nt, Human adenovirus A
ccagcccaaccuguaacccaa

SEQ ID NO: 1536363 - RNA, 19 nt, Human adenovirus A
agcauaaaugggacaaguu

SEQ ID NO: 1536364 - RNA, 16 nt, Human adenovirus A
cuauuguuaacacugc

SEQ ID NO: 1536365 - RNA, 12 nt, Human adenovirus A
ucaacugaccag

SEQ ID NO: 1536366 - RNA, 13 nt, Human adenovirus A
uggcgcuuccaua

SEQ ID NO: 1536367 - RNA, 23 nt, Human adenovirus A
ucucguugauuauaaucuccaaa

SEQ ID NO: 1536368 - RNA, 18 nt, Human adenovirus A
ggucgcaccacuguagac

SEQ ID NO: 1536369 - RNA, 21 nt, Human adenovirus A
acagacgaauaagcucggcca

SEQ ID NO: 1536370 - RNA, 20 nt, Human adenovirus A
ugguucugccucuucuucuu

SEQ ID NO: 1536371 - RNA, 21 nt, Human adenovirus A
aacacugucagugaagcaaac

SEQ ID NO: 1536372 - RNA, 18 nt, Human adenovirus A
ggcagccguuucaggaag

SEQ ID NO: 1536373 - RNA, 22 nt, Human adenovirus A
aguagccauugguuuaaugcau

SEQ ID NO: 1536374 - RNA, 14 nt, Human adenovirus A
acuuucaaaaaagc

SEQ ID NO: 1536375 - RNA, 18 nt, Human adenovirus A
ucaacgacuaaaacaaau

SEQ ID NO: 1536376 - RNA, 15 nt, Human adenovirus A
ucgagaacuaaacaa

SEQ ID NO: 1536377 - RNA, 14 nt, Human adenovirus A
auuaucgcucuuuu

SEQ ID NO: 1536378 - RNA, 20 nt, Human adenovirus A
guacugcaaacgcugaugcc

SEQ ID NO: 1536379 - RNA, 20 nt, Human adenovirus A
caccaucuucaucuuuucua

SEQ ID NO: 1536380 - RNA, 16 nt, Human adenovirus A
cucaaagugaagugua

SEQ ID NO: 1536381 - RNA, 15 nt, Human adenovirus A
aagucauccaaagau

SEQ ID NO: 1536382 - RNA, 14 nt, Human adenovirus A
caucuguuuacuuc

SEQ ID NO: 1536383 - RNA, 16 nt, Human adenovirus A
cauagcuuacaaaggg

SEQ ID NO: 1536384 - RNA, 19 nt, Human adenovirus A
agggcuuuuggcuucacua

SEQ ID NO: 1536385 - RNA, 17 nt, Human adenovirus A
gucacagucacaaggua

SEQ ID NO: 1536386 - RNA, 18 nt, Human adenovirus A
uacaauaaucacaacaca

SEQ ID NO: 1536387 - RNA, 17 nt, Human adenovirus A
uaaaaucauacaaauca

SEQ ID NO: 1536388 - RNA, 15 nt, Human adenovirus A
uauugauaaaacggu

SEQ ID NO: 1536389 - RNA, 17 nt, Human adenovirus A
cgauuauugucacauua

SEQ ID NO: 1536390 - RNA, 21 nt, Human adenovirus A
gagggugccacccccagugcc

SEQ ID NO: 1536391 - RNA, 23 nt, Human adenovirus A
acugaaacucccuuaguuguaaa

SEQ ID NO: 1536392 - RNA, 22 nt, Human adenovirus A
uaacauguuauuuaaaauucca

SEQ ID NO: 1536393 - RNA, 17 nt, Human adenovirus A
cgucaaaaaagcaaagu

SEQ ID NO: 1536394 - RNA, 13 nt, Human adenovirus A
aguugacuggcau

SEQ ID NO: 1536395 - RNA, 19 nt, Human adenovirus A
ggauuguguccuuggaaga

SEQ ID NO: 1536396 - RNA, 12 nt, Human adenovirus A
cgagccagcuga

SEQ ID NO: 1536397 - RNA, 17 nt, Human adenovirus A
aacacacugauuuugca

SEQ ID NO: 1536398 - RNA, 15 nt, Human adenovirus A
guaggcuaacuguua

SEQ ID NO: 1536399 - RNA, 20 nt, Human adenovirus A
aaaaaaccuucgagaacuaa

SEQ ID NO: 1536400 - RNA, 18 nt, Human adenovirus A
cauacaaaucagaagcca

SEQ ID NO: 1536401 - RNA, 15 nt, Human adenovirus A
gcaucugcacgguaa

SEQ ID NO: 1536402 - RNA, 22 nt, Human adenovirus A
cacgggcccauguaucagcagc

SEQ ID NO: 1536403 - RNA, 17 nt, Human adenovirus A
auggagcggcugacaga

SEQ ID NO: 1536404 - RNA, 20 nt, Human adenovirus A
uuucacauucaacugaccag

SEQ ID NO: 1536405 - RNA, 21 nt, Human adenovirus A
agugaauggaacaccagcauu

SEQ ID NO: 1536406 - RNA, 15 nt, Human adenovirus A
uaggcauaaugcagc

SEQ ID NO: 1536407 - RNA, 11 nt, Human adenovirus A
uaguugccacg

SEQ ID NO: 1536408 - RNA, 23 nt, Human adenovirus A
ucaucaacauuaaccuaugcaac

SEQ ID NO: 1536409 - RNA, 13 nt, Human adenovirus A
gaagcgggggaag

SEQ ID NO: 1536410 - RNA, 16 nt, Human adenovirus A
cuacacucaacacuac

SEQ ID NO: 1536411 - RNA, 15 nt, Human adenovirus A
uuuguauucugcuaa

SEQ ID NO: 1536412 - RNA, 15 nt, Human adenovirus A
gcucccgcagugagg

SEQ ID NO: 1536413 - RNA, 19 nt, Human adenovirus A
acagacuugcaaacagcaa

SEQ ID NO: 1536414 - RNA, 21 nt, Human adenovirus A
uggaaaccuagguuuaaaucu

SEQ ID NO: 1536415 - RNA, 17 nt, Human adenovirus A
auaguucaucuuaguaa

SEQ ID NO: 1536416 - RNA, 16 nt, Human adenovirus A
gagccguccagcagug

SEQ ID NO: 1536417 - RNA, 15 nt, Human adenovirus A
gagucucaaaagcag

SEQ ID NO: 1536418 - RNA, 11 nt, Human adenovirus A
accaaagccau

SEQ ID NO: 1536419 - RNA, 14 nt, Human adenovirus A
ccugacgcucuggc

SEQ ID NO: 1536420 - RNA, 14 nt, Human adenovirus A
augugaugccggca

SEQ ID NO: 1536421 - RNA, 14 nt, Human adenovirus A
cucuaagcuuagau

SEQ ID NO: 1536422 - RNA, 23 nt, Human adenovirus A
cgcuuuggaggcagcuggagugg

SEQ ID NO: 1536423 - RNA, 13 nt, Human adenovirus A
gccaaacagcugu

SEQ ID NO: 1536424 - RNA, 22 nt, Human adenovirus A
uggaucuggagccacaggaaag

SEQ ID NO: 1536425 - RNA, 16 nt, Human adenovirus A
auaucucauuugcaag

SEQ ID NO: 1536426 - RNA, 14 nt, Human adenovirus A
uggacauccaugug

SEQ ID NO: 1536427 - RNA, 17 nt, Human adenovirus A
agucucaaaagcagcca

SEQ ID NO: 1536428 - RNA, 15 nt, Human adenovirus A
cuccccauucgcagc

SEQ ID NO: 1536429 - RNA, 23 nt, Human adenovirus A
gucuguuuaguccugcaguuauu

SEQ ID NO: 1536430 - RNA, 18 nt, Human adenovirus A
ccgcgguuuuggcggcca

SEQ ID NO: 1536431 - RNA, 18 nt, Human adenovirus A
aaugcccccauccaggug

SEQ ID NO: 1536432 - RNA, 13 nt, Human adenovirus A
cuuaaaaacuguu

SEQ ID NO: 1536433 - RNA, 23 nt, Human adenovirus A
gacccgacggaguguuucagcuc

SEQ ID NO: 1536434 - RNA, 17 nt, Human adenovirus A
gauauaguacugcuucc

SEQ ID NO: 1536435 - RNA, 15 nt, Human adenovirus A
cauacaucaccucuu

SEQ ID NO: 1536436 - RNA, 20 nt, Human adenovirus A
caauaaaaaaaacaguuucu

SEQ ID NO: 1536437 - RNA, 18 nt, Human adenovirus A
gguuacugaagugccuca

SEQ ID NO: 1536438 - RNA, 22 nt, Human adenovirus A
cugagcccuauccgucuccagc

SEQ ID NO: 1536439 - RNA, 17 nt, Human adenovirus A
gcucaacgagagcgcuu

SEQ ID NO: 1536440 - RNA, 20 nt, Human adenovirus A
cuuuacucgccuaaaaacua

SEQ ID NO: 1536441 - RNA, 14 nt, Human adenovirus A
ugacaacauugccc

SEQ ID NO: 1536442 - RNA, 15 nt, Human adenovirus A
aucuuggaguguacc

SEQ ID NO: 1536443 - RNA, 21 nt, Human adenovirus A
gacgccaacaggaucaaaaaa

SEQ ID NO: 1536444 - RNA, 23 nt, Human adenovirus A
gcuuuccaaaugcccccauccag

SEQ ID NO: 1536445 - RNA, 23 nt, Human adenovirus A
cacacuaauagcgcgagaagaag

SEQ ID NO: 1536446 - RNA, 16 nt, Human adenovirus A
ggaguuguagacauag

SEQ ID NO: 1536447 - RNA, 22 nt, Human adenovirus A
cauacgcuugugcagccuuucu

SEQ ID NO: 1536448 - RNA, 14 nt, Human adenovirus A
cagauuuugugccu

SEQ ID NO: 1536449 - RNA, 15 nt, Human adenovirus A
uuccgcgaucagcca

SEQ ID NO: 1536450 - RNA, 13 nt, Human adenovirus A
caguuuuaagccc

SEQ ID NO: 1536451 - RNA, 18 nt, Human adenovirus A
ggauacuuaauacuggcu

SEQ ID NO: 1536452 - RNA, 17 nt, Human adenovirus A
agcuuuaauaaccaugu

SEQ ID NO: 1536453 - RNA, 16 nt, Human adenovirus A
caagcacgccaaagcc

SEQ ID NO: 1536454 - RNA, 19 nt, Human adenovirus A
ccugccggucgagcgcgga

SEQ ID NO: 1536455 - RNA, 15 nt, Human adenovirus A
cauaaugaaaacaau

SEQ ID NO: 1536456 - RNA, 13 nt, Human adenovirus A
agcggccacggcc

SEQ ID NO: 1536457 - RNA, 17 nt, Human adenovirus A
ccgcacggccaaugccc

SEQ ID NO: 1536458 - RNA, 13 nt, Human adenovirus A
agcugacggccau

SEQ ID NO: 1536459 - RNA, 20 nt, Human adenovirus A
aaugguaggacgcugaaaca

SEQ ID NO: 1536460 - RNA, 16 nt, Human adenovirus A
gggcauggcugaagag

SEQ ID NO: 1536461 - RNA, 16 nt, Human adenovirus A
auacaaaucagaagcc

SEQ ID NO: 1536462 - RNA, 14 nt, Human adenovirus A
auauucccacgccu

SEQ ID NO: 1536463 - RNA, 23 nt, Human adenovirus A
uauuuaaaauuccauaauuaaag

SEQ ID NO: 1536464 - RNA, 13 nt, Human adenovirus A
gcgccccacuucc

SEQ ID NO: 1536465 - RNA, 15 nt, Human adenovirus A
auugugggacuggga

SEQ ID NO: 1536466 - RNA, 23 nt, Human adenovirus A
cucuacagccccuuugaagagcu

SEQ ID NO: 1536467 - RNA, 20 nt, Human adenovirus A
cgcccuuacagaucacggga

SEQ ID NO: 1536468 - RNA, 19 nt, Human adenovirus A
aggaacuccgcgcaaggag

SEQ ID NO: 1536469 - RNA, 18 nt, Human adenovirus A
ugucauuuacugcagccu

SEQ ID NO: 1536470 - RNA, 15 nt, Human adenovirus A
uuucugacaugguaa

SEQ ID NO: 1536471 - RNA, 18 nt, Human adenovirus A
cgagcuaaccgcagccgc

SEQ ID NO: 1536472 - RNA, 16 nt, Human adenovirus A
auccaacugauuuuca

SEQ ID NO: 1536473 - RNA, 21 nt, Human adenovirus A
gcgcaaauuugaaccccaaga

SEQ ID NO: 1536474 - RNA, 11 nt, Human adenovirus A
gacuuccaggu

SEQ ID NO: 1536475 - RNA, 18 nt, Human adenovirus A
auaguaaaaaugccagga

SEQ ID NO: 1536476 - RNA, 14 nt, Human adenovirus A
ucuaaugcaaguug

SEQ ID NO: 1536477 - RNA, 15 nt, Human adenovirus A
ucaucucuacagccc

SEQ ID NO: 1536478 - RNA, 20 nt, Human adenovirus A
uugacaaacgcccugcuccg

SEQ ID NO: 1536479 - RNA, 22 nt, Human adenovirus A
uuggagccccuuaccaacaccu

SEQ ID NO: 1536480 - RNA, 12 nt, Human adenovirus A
cuccuuaauuuc

SEQ ID NO: 1536481 - RNA, 18 nt, Human adenovirus A
augcugauguuuguaaaa

SEQ ID NO: 1536482 - RNA, 17 nt, Human adenovirus A
ccaaaugaauuugaaau

SEQ ID NO: 1536483 - RNA, 18 nt, Human adenovirus A
aggagaaaauaacacaua

SEQ ID NO: 1536484 - RNA, 14 nt, Human adenovirus A
aacaacaagcuaau

SEQ ID NO: 1536485 - RNA, 20 nt, Human adenovirus A
ucuuggucgucacacccucc

SEQ ID NO: 1536486 - RNA, 16 nt, Human adenovirus A
aggaagguuccaagga

SEQ ID NO: 1536487 - RNA, 20 nt, Human adenovirus A
augaugcgggcagccaggcg

SEQ ID NO: 1536488 - RNA, 14 nt, Human adenovirus A
agcauuggaauuua

SEQ ID NO: 1536489 - RNA, 18 nt, Human adenovirus A
caaauagagcaaacuaca

SEQ ID NO: 1536490 - RNA, 21 nt, Human adenovirus A
aucaugauguuuaauaaagcg

SEQ ID NO: 1536491 - RNA, 16 nt, Human adenovirus A
acuaacaaugcuuucc

SEQ ID NO: 1536492 - RNA, 23 nt, Human adenovirus A
gcccaaacuuacaagcacgccaa

SEQ ID NO: 1536493 - RNA, 19 nt, Human adenovirus A
aacuuucuaccaaggaaaa

SEQ ID NO: 1536494 - RNA, 20 nt, Human adenovirus A
auggcagcggcgccacccua

SEQ ID NO: 1536495 - RNA, 15 nt, Human adenovirus A
uuacauccuuccauu

SEQ ID NO: 1536496 - RNA, 19 nt, Human adenovirus A
cccagcgguuuugcgccac

SEQ ID NO: 1536497 - RNA, 14 nt, Human adenovirus A
ccacacgcagcaac

SEQ ID NO: 1536498 - RNA, 13 nt, Human adenovirus A
gcguacagccugg

SEQ ID NO: 1536499 - RNA, 14 nt, Human adenovirus A
ucuacucauacccc

SEQ ID NO: 1536500 - RNA, 23 nt, Human adenovirus A
agaugcauccuguccugcgacaa

SEQ ID NO: 1536501 - RNA, 12 nt, Human adenovirus A
caggggccagcu

SEQ ID NO: 1536502 - RNA, 14 nt, Human adenovirus A
acacaaaagcucua

SEQ ID NO: 1536503 - RNA, 17 nt, Human adenovirus A
agcuuggcuauagaucu

SEQ ID NO: 1536504 - RNA, 23 nt, Human adenovirus A
uccgccauggcuacgugcgccaa

SEQ ID NO: 1536505 - RNA, 19 nt, Human adenovirus A
acaaugcagcaaacacugc

SEQ ID NO: 1536506 - RNA, 21 nt, Human adenovirus A
ccaggguuugcuucagcaguu

SEQ ID NO: 1536507 - RNA, 12 nt, Human adenovirus A
acaaaacacuga

SEQ ID NO: 1536508 - RNA, 13 nt, Human adenovirus A
acugaaaauggaa

SEQ ID NO: 1536509 - RNA, 12 nt, Human adenovirus A
uacacauaaaga

SEQ ID NO: 1536510 - RNA, 18 nt, Human adenovirus A
cgcaccgguugagcagaa

SEQ ID NO: 1536511 - RNA, 22 nt, Human adenovirus A
cgcaauuagggccagcauugcc

SEQ ID NO: 1536512 - RNA, 19 nt, Human adenovirus A
uuauaugcgcauggcuuua

SEQ ID NO: 1536513 - RNA, 15 nt, Human adenovirus A
caaaccacauaggca

SEQ ID NO: 1536514 - RNA, 15 nt, Human adenovirus A
gccacaugggaaggg

SEQ ID NO: 1536515 - RNA, 13 nt, Human adenovirus A
uccccauccaaaa

SEQ ID NO: 1536516 - RNA, 14 nt, Human adenovirus A
cuucugccuaccug

SEQ ID NO: 1536517 - RNA, 13 nt, Human adenovirus A
auccauuauuaug

SEQ ID NO: 1536518 - RNA, 19 nt, Human adenovirus A
aucucuacagccccuuuga

SEQ ID NO: 1536519 - RNA, 14 nt, Human adenovirus A
gaaacucccuuagu

SEQ ID NO: 1536520 - RNA, 21 nt, Human adenovirus A
agcuucuccagacaacuucau

SEQ ID NO: 1536521 - RNA, 21 nt, Human adenovirus A
ggcggccaugcaaagccagcc

SEQ ID NO: 1536522 - RNA, 22 nt, Human adenovirus A
uuagucgcgcacugggccagga

SEQ ID NO: 1536523 - RNA, 15 nt, Human adenovirus A
aguugcgagcugcca

SEQ ID NO: 1536524 - RNA, 13 nt, Human adenovirus A
uggagcuuucaac

SEQ ID NO: 1536525 - RNA, 20 nt, Human adenovirus A
ccugucuuaaaaucuccuga

SEQ ID NO: 1536526 - RNA, 14 nt, Human adenovirus A
accaaacuggccau

SEQ ID NO: 1536527 - RNA, 16 nt, Human adenovirus A
gaaagcagaugggaaa

SEQ ID NO: 1536528 - RNA, 15 nt, Human adenovirus A
ccacagguggugggg

SEQ ID NO: 1536529 - RNA, 18 nt, Human adenovirus A
ugaauguuuguacacuuu

SEQ ID NO: 1536530 - RNA, 16 nt, Human adenovirus A
ccccuccuucgcuguc

SEQ ID NO: 1536531 - RNA, 19 nt, Human adenovirus A
gagcguucgccagcucuug

SEQ ID NO: 1536532 - RNA, 14 nt, Human adenovirus A
uaaugcaucuuugg

SEQ ID NO: 1536533 - RNA, 23 nt, Human adenovirus A
gacgcagugagugaaucugugga

SEQ ID NO: 1536534 - RNA, 21 nt, Human adenovirus A
accgccguccuaugaggaagc

SEQ ID NO: 1536535 - RNA, 19 nt, Human adenovirus A
gcagcccaacccuucccaa

SEQ ID NO: 1536536 - RNA, 13 nt, Human adenovirus A
caagcgcugaaac

SEQ ID NO: 1536537 - RNA, 11 nt, Human adenovirus A
cuaaaacagaa

SEQ ID NO: 1536538 - RNA, 18 nt, Human adenovirus A
acucacccugugcuuaac

SEQ ID NO: 1536539 - RNA, 17 nt, Human adenovirus A
cauuacuccuaaaacug

SEQ ID NO: 1536540 - RNA, 15 nt, Human adenovirus A
ccuuugcucaggcgc

SEQ ID NO: 1536541 - RNA, 22 nt, Human adenovirus A
uaacugaaaauggaacccuuac

SEQ ID NO: 1536542 - RNA, 19 nt, Human adenovirus A
aguuuucuuuuuucuuaca

SEQ ID NO: 1536543 - RNA, 16 nt, Human adenovirus A
gcaauauuccagcucu

SEQ ID NO: 1536544 - RNA, 22 nt, Human adenovirus A
cugaggaaaugcgagacugcag

SEQ ID NO: 1536545 - RNA, 13 nt, Human adenovirus A
ugacacaucagac

SEQ ID NO: 1536546 - RNA, 20 nt, Human adenovirus A
accugauuuucacauuugug

SEQ ID NO: 1536547 - RNA, 15 nt, Human adenovirus A
gcagacaagguggcc

SEQ ID NO: 1536548 - RNA, 22 nt, Human adenovirus A
ggacagagcauucaugcugaug

SEQ ID NO: 1536549 - RNA, 23 nt, Human adenovirus A
cuagaugaagcgcagcagaaccc

SEQ ID NO: 1536550 - RNA, 14 nt, Human adenovirus A
cgcggggacagcgc

SEQ ID NO: 1536551 - RNA, 14 nt, Human adenovirus A
cggcauuccccauc

SEQ ID NO: 1536552 - RNA, 16 nt, Human adenovirus A
aacccaaacuguacaa

SEQ ID NO: 1536553 - RNA, 16 nt, Human adenovirus A
ucaaacaauaacauug

SEQ ID NO: 1536554 - RNA, 15 nt, Human adenovirus A
aaucucagaaagcca

SEQ ID NO: 1536555 - RNA, 21 nt, Human adenovirus A
cacuuugccuacccggcagua

SEQ ID NO: 1536556 - RNA, 13 nt, Human adenovirus A
aaagucuguugcg

SEQ ID NO: 1536557 - RNA, 20 nt, Human adenovirus A
caccucuagaaacugugccc

SEQ ID NO: 1536558 - RNA, 19 nt, Human adenovirus A
ugcacaucgccggucagga

SEQ ID NO: 1536559 - RNA, 16 nt, Human adenovirus A
aucguauuauggcuuu

SEQ ID NO: 1536560 - RNA, 20 nt, Human adenovirus A
ccuaauggagugucacugcc

SEQ ID NO: 1536561 - RNA, 18 nt, Human adenovirus A
ugcgaguaggaagacagc

SEQ ID NO: 1536562 - RNA, 16 nt, Human adenovirus A
ugcagccugucuuaaa

SEQ ID NO: 1536563 - RNA, 22 nt, Human adenovirus A
cgguggaacugcagacaguggc

SEQ ID NO: 1536564 - RNA, 17 nt, Human adenovirus A
caagacguuccauggcu

SEQ ID NO: 1536565 - RNA, 14 nt, Human adenovirus A
uuugagauuggcaa

SEQ ID NO: 1536566 - RNA, 14 nt, Human adenovirus A
cacacgcagcaacc

SEQ ID NO: 1536567 - RNA, 16 nt, Human adenovirus A
guuacauaccuggcaa

SEQ ID NO: 1536568 - RNA, 16 nt, Human adenovirus A
aagaaggagaaggcau

SEQ ID NO: 1536569 - RNA, 19 nt, Human adenovirus A
gcgcagaugagcuucuugc

SEQ ID NO: 1536570 - RNA, 14 nt, Human adenovirus A
aagaaaagcgugga

SEQ ID NO: 1536571 - RNA, 17 nt, Human adenovirus A
agguuuuuacauuccag

SEQ ID NO: 1536572 - RNA, 18 nt, Human adenovirus A
auggaaaaacuuggaaac

SEQ ID NO: 1536573 - RNA, 13 nt, Human adenovirus A
gggaggaggagga

SEQ ID NO: 1536574 - RNA, 20 nt, Human adenovirus A
uuaguaacagcauaugaaca

SEQ ID NO: 1536575 - RNA, 13 nt, Human adenovirus A
ugguuuaacauuc

SEQ ID NO: 1536576 - RNA, 22 nt, Human adenovirus A
gcuucuacaacgagcaagccgu

SEQ ID NO: 1536577 - RNA, 22 nt, Human adenovirus A
cccagggcaaccacggccucag

SEQ ID NO: 1536578 - RNA, 23 nt, Human adenovirus A
cauuuauaguggcacaacacaua

SEQ ID NO: 1536579 - RNA, 16 nt, Human adenovirus A
acaguugacgccccau

SEQ ID NO: 1536580 - RNA, 20 nt, Human adenovirus A
aaaacaucacucuauuucaa

SEQ ID NO: 1536581 - RNA, 21 nt, Human adenovirus A
cuccuauguuagcgccagagg

SEQ ID NO: 1536582 - RNA, 13 nt, Human adenovirus A
gauagcaccugcc

SEQ ID NO: 1536583 - RNA, 15 nt, Human adenovirus A
aguggcugcaagguc

SEQ ID NO: 1536584 - RNA, 14 nt, Human adenovirus A
gcuuugcucgagac

SEQ ID NO: 1536585 - RNA, 22 nt, Human adenovirus A
cuaccugacacuacagagcuca

SEQ ID NO: 1536586 - RNA, 15 nt, Human adenovirus A
cauaacauguuuaug

SEQ ID NO: 1536587 - RNA, 22 nt, Human adenovirus A
cggcaaguaaaacgcauuuugc

SEQ ID NO: 1536588 - RNA, 16 nt, Human adenovirus A
aguaauaaaaccugug

SEQ ID NO: 1536589 - RNA, 19 nt, Human adenovirus A
uaccugacacuacagagcu

SEQ ID NO: 1536590 - RNA, 17 nt, Human adenovirus A
acuaaauggaagacauc

SEQ ID NO: 1536591 - RNA, 16 nt, Human adenovirus A
caaagaaacagcagca

SEQ ID NO: 1536592 - RNA, 12 nt, Human adenovirus A
ccauugacaaag

SEQ ID NO: 1536593 - RNA, 21 nt, Human adenovirus A
aaaugaucuucggguggacgg

SEQ ID NO: 1536594 - RNA, 13 nt, Human adenovirus A
guacaaagccagg

SEQ ID NO: 1536595 - RNA, 21 nt, Human adenovirus A
cggggaauacuuuacaaaugc

SEQ ID NO: 1536596 - RNA, 15 nt, Human adenovirus A
aggaauacaagguag

SEQ ID NO: 1536597 - RNA, 20 nt, Human adenovirus A
cagaagccagcagcaaagaa

SEQ ID NO: 1536598 - RNA, 20 nt, Human adenovirus A
auaccuggcaaacugggaug

SEQ ID NO: 1536599 - RNA, 12 nt, Human adenovirus A
cuaacuuuaaug

SEQ ID NO: 1536600 - RNA, 18 nt, Human adenovirus A
gccaaggacccccagaca

SEQ ID NO: 1536601 - RNA, 13 nt, Human adenovirus A
cugagacuuccca

SEQ ID NO: 1536602 - RNA, 18 nt, Human adenovirus A
auauagccgccauggaaa

SEQ ID NO: 1536603 - RNA, 24 nt, Human adenovirus A
aggugguaaauagggugaaagaag

SEQ ID NO: 1536604 - RNA, 20 nt, Human adenovirus A
ugaugcuuuucgccagcagc

SEQ ID NO: 1536605 - RNA, 17 nt, Human adenovirus A
agcaaaacgcugggcuc

SEQ ID NO: 1536606 - RNA, 17 nt, Human adenovirus A
aucugaucgcucuucaa

SEQ ID NO: 1536607 - RNA, 16 nt, Human adenovirus A
gauccucgaaagcgag

SEQ ID NO: 1536608 - RNA, 21 nt, Human adenovirus A
agcugccuccuuugccagaac

SEQ ID NO: 1536609 - RNA, 20 nt, Human adenovirus A
aaggcaucuagccagucaca

SEQ ID NO: 1536610 - RNA, 14 nt, Human adenovirus A
aacacauacaguaa

SEQ ID NO: 1536611 - RNA, 16 nt, Human adenovirus A
auccguggcaggccau

SEQ ID NO: 1536612 - RNA, 13 nt, Human adenovirus A
ccgacaacacugu

SEQ ID NO: 1536613 - RNA, 12 nt, Human adenovirus A
acgccaccagcg

SEQ ID NO: 1536614 - RNA, 13 nt, Human adenovirus A
agaucaaggaaau

SEQ ID NO: 1536615 - RNA, 19 nt, Human adenovirus A
cugccaccucuagaaacug

SEQ ID NO: 1536616 - RNA, 21 nt, Human adenovirus A
gaucuccugccaccaguugga

SEQ ID NO: 1536617 - RNA, 15 nt, Human adenovirus A
gggcaucuugcauga

SEQ ID NO: 1536618 - RNA, 18 nt, Human adenovirus A
aauugaugagguaguggc

SEQ ID NO: 1536619 - RNA, 13 nt, Human adenovirus A
caaauuacacacu

SEQ ID NO: 1536620 - RNA, 16 nt, Human adenovirus A
guauaagaaagaggca

SEQ ID NO: 1536621 - RNA, 21 nt, Human adenovirus A
agugucauuuacugcagccug

SEQ ID NO: 1536622 - RNA, 16 nt, Human adenovirus A
cagacgaugacauuuu

SEQ ID NO: 1536623 - RNA, 14 nt, Human adenovirus A
gcaguauggcagcu

SEQ ID NO: 1536624 - RNA, 16 nt, Human adenovirus A
auuucccucuucccaa

SEQ ID NO: 1536625 - RNA, 13 nt, Human adenovirus A
guacucaaaugug

SEQ ID NO: 1536626 - RNA, 12 nt, Human adenovirus A
gcucuggcaggg

SEQ ID NO: 1536627 - RNA, 23 nt, Human adenovirus A
guaguagaccugcaagacagaaa

SEQ ID NO: 1536628 - RNA, 13 nt, Human adenovirus A
uugcgcaagcgcu

SEQ ID NO: 1536629 - RNA, 20 nt, Human adenovirus A
ugcaucucaccacugaaacu

SEQ ID NO: 1536630 - RNA, 23 nt, Human adenovirus A
cuucguaaaagucuacugcaaaa

SEQ ID NO: 1536631 - RNA, 21 nt, Human adenovirus A
caauuucuuccuccuggaggu

SEQ ID NO: 1536632 - RNA, 16 nt, Human adenovirus A
ggccggaugcagagga

SEQ ID NO: 1536633 - RNA, 18 nt, Human adenovirus A
auuggcuucagcauuuug

SEQ ID NO: 1536634 - RNA, 19 nt, Human adenovirus A
ugccagcucuuggaauaaa

SEQ ID NO: 1536635 - RNA, 16 nt, Human adenovirus A
cuuacuggggugccua

SEQ ID NO: 1536636 - RNA, 17 nt, Human adenovirus A
cucauccgcccaaacuu

SEQ ID NO: 1536637 - RNA, 19 nt, Human adenovirus A
cgggaugaaaaacgagcag

SEQ ID NO: 1536638 - RNA, 24 nt, Human adenovirus A
agugccucaaagugaaguguauca

SEQ ID NO: 1536639 - RNA, 13 nt, Human adenovirus A
acaaguuucccuc

SEQ ID NO: 1536640 - RNA, 21 nt, Human adenovirus A
gucccguaaaauacacauaaa

SEQ ID NO: 1536641 - RNA, 23 nt, Human adenovirus A
accgccaugcgcgcggccagagc

SEQ ID NO: 1536642 - RNA, 19 nt, Human adenovirus A
cgcagccgcgcagaugagc

SEQ ID NO: 1536643 - RNA, 23 nt, Human adenovirus A
ccacggacaccuacuucacccug

SEQ ID NO: 1536644 - RNA, 13 nt, Human adenovirus A
caacguuggcagc

SEQ ID NO: 1536645 - RNA, 19 nt, Human adenovirus A
gucgcaauuagggccagca

SEQ ID NO: 1536646 - RNA, 17 nt, Human adenovirus A
cggacagagcauucaug

SEQ ID NO: 1536647 - RNA, 18 nt, Human adenovirus A
caagaaggccauguacuu

SEQ ID NO: 1536648 - RNA, 16 nt, Human adenovirus A
cgaaagaccacuaaaa

SEQ ID NO: 1536649 - RNA, 21 nt, Human adenovirus A
uucaagaaaggcaucuagcca

SEQ ID NO: 1536650 - RNA, 16 nt, Human adenovirus A
aggggugguggguuug

SEQ ID NO: 1536651 - RNA, 24 nt, Human adenovirus A
aggacaaaagucuacucauacccc

SEQ ID NO: 1536652 - RNA, 16 nt, Human adenovirus A
aggauccagaggagga

SEQ ID NO: 1536653 - RNA, 15 nt, Human adenovirus A
accacuguagugcaa

SEQ ID NO: 1536654 - RNA, 21 nt, Human adenovirus A
agacugagaaccgucugcaug

SEQ ID NO: 1536655 - RNA, 22 nt, Human adenovirus A
cugcaaucuuugcaccccccac

SEQ ID NO: 1536656 - RNA, 20 nt, Human adenovirus A
agccuucuggcguuacagcu

SEQ ID NO: 1536657 - RNA, 19 nt, Human adenovirus A
uaaaggguuagaacuuucu

SEQ ID NO: 1536658 - RNA, 17 nt, Human adenovirus A
ggaauaauuggcuucag

SEQ ID NO: 1536659 - RNA, 16 nt, Human adenovirus A
aucagaagccagcagc

SEQ ID NO: 1536660 - RNA, 23 nt, Human adenovirus A
uaaacaaaagcaaagcaaaugca

SEQ ID NO: 1536661 - RNA, 19 nt, Human adenovirus A
gcgcuggcucaacgagagc

SEQ ID NO: 1536662 - RNA, 18 nt, Human adenovirus A
aacugccuccuucccauu

SEQ ID NO: 1536663 - RNA, 14 nt, Human adenovirus A
auuccaugagcccg

SEQ ID NO: 1536664 - RNA, 18 nt, Human adenovirus A
acagccuagacgaggauc

SEQ ID NO: 1536665 - RNA, 13 nt, Human adenovirus A
ugacaaggaagug

SEQ ID NO: 1536666 - RNA, 20 nt, Human adenovirus A
caaaggugcuucccacauac

SEQ ID NO: 1536667 - RNA, 14 nt, Human adenovirus A
aacaguaccaaugu

SEQ ID NO: 1536668 - RNA, 16 nt, Human adenovirus A
gaagggacggcaagua

SEQ ID NO: 1536669 - RNA, 22 nt, Human adenovirus A
uaaucaagacggucagcaagga

SEQ ID NO: 1536670 - RNA, 20 nt, Human adenovirus A
ggacgagcucccggaggaag

SEQ ID NO: 1536671 - RNA, 21 nt, Human adenovirus A
acacuguaagaggagacaacu

SEQ ID NO: 1536672 - RNA, 18 nt, Human adenovirus A
auagcugaaccccagggu

SEQ ID NO: 1536673 - RNA, 21 nt, Human adenovirus A
auaaagcgcagaguauccaca

SEQ ID NO: 1536674 - RNA, 20 nt, Human adenovirus A
gauggguguuuggcagcaau

SEQ ID NO: 1536675 - RNA, 19 nt, Human adenovirus A
gacgcaccgguugagcaga

SEQ ID NO: 1536676 - RNA, 13 nt, Human adenovirus A
ucauuccuucaga

SEQ ID NO: 1536677 - RNA, 18 nt, Human adenovirus A
ccgguugaaacagacccc

SEQ ID NO: 1536678 - RNA, 18 nt, Human adenovirus A
cuuuucuuuauguuaauc

SEQ ID NO: 1536679 - RNA, 15 nt, Human adenovirus A
uguauguucuuacac

SEQ ID NO: 1536680 - RNA, 20 nt, Human adenovirus A
cggguggacggagccagcgu

SEQ ID NO: 1536681 - RNA, 22 nt, Human adenovirus A
ccaucuugcuuguuuaaacauu

SEQ ID NO: 1536682 - RNA, 20 nt, Human adenovirus A
gcccgcguuuggaaacugua

SEQ ID NO: 1536683 - RNA, 19 nt, Human adenovirus A
acgcugcguuuugugcccg

SEQ ID NO: 1536684 - RNA, 21 nt, Human adenovirus A
augauuaaacaacaaaacacu

SEQ ID NO: 1536685 - RNA, 20 nt, Human adenovirus A
ggcgugccguuggcagaguc

SEQ ID NO: 1536686 - RNA, 18 nt, Human adenovirus A
auuucuuguucuuccucu

SEQ ID NO: 1536687 - RNA, 12 nt, Human adenovirus A
ugagaacuucug

SEQ ID NO: 1536688 - RNA, 17 nt, Human adenovirus A
aaaucccuauggaccgg

SEQ ID NO: 1536689 - RNA, 17 nt, Human adenovirus A
aacgaggugcagcugcc

SEQ ID NO: 1536690 - RNA, 15 nt, Human adenovirus A
ggguggagauuuaaa

SEQ ID NO: 1536691 - RNA, 12 nt, Human adenovirus A
ggcggugagcau

SEQ ID NO: 1536692 - RNA, 19 nt, Human adenovirus A
uggacguuaguaacaacaa

SEQ ID NO: 1536693 - RNA, 21 nt, Human adenovirus A
aauuuuuugccaucagaaauu

SEQ ID NO: 1536694 - RNA, 20 nt, Human adenovirus A
aucagaagccagcagcaaag

SEQ ID NO: 1536695 - RNA, 17 nt, Human adenovirus A
ccuccccgcuauuuggg

SEQ ID NO: 1536696 - RNA, 14 nt, Human adenovirus A
gcauuucccaagau

SEQ ID NO: 1536697 - RNA, 15 nt, Human adenovirus A
uagaaacugugcccg

SEQ ID NO: 1536698 - RNA, 20 nt, Human adenovirus A
ccugauuucuaacuuguuuc

SEQ ID NO: 1536699 - RNA, 18 nt, Human adenovirus A
aguacgucagaauguggu

SEQ ID NO: 1536700 - RNA, 12 nt, Human adenovirus A
ccgcagccaaca

SEQ ID NO: 1536701 - RNA, 17 nt, Human adenovirus A
uuugcaaggcgguauuu

SEQ ID NO: 1536702 - RNA, 14 nt, Human adenovirus A
caugaaaacagcau

SEQ ID NO: 1536703 - RNA, 21 nt, Human adenovirus A
cauuuauaguggcacaacaca

SEQ ID NO: 1536704 - RNA, 15 nt, Human adenovirus A
acuauagagaggaau

SEQ ID NO: 1536705 - RNA, 15 nt, Human adenovirus A
ugugugcugcaaaca

SEQ ID NO: 1536706 - RNA, 17 nt, Human adenovirus A
agcuucuacuuuagaag

SEQ ID NO: 1536707 - RNA, 14 nt, Human adenovirus A
uaugcccagcauga

SEQ ID NO: 1536708 - RNA, 19 nt, Human adenovirus A
ccugccauugccgcacggc

SEQ ID NO: 1536709 - RNA, 15 nt, Human adenovirus A
ccuuauccuuccagu

SEQ ID NO: 1536710 - RNA, 12 nt, Human adenovirus A
aacgcugggcuc

SEQ ID NO: 1536711 - RNA, 16 nt, Human adenovirus A
aaugcccccauccagg

SEQ ID NO: 1536712 - RNA, 23 nt, Human adenovirus A
gcugcacaauuaucgcucuuuua

SEQ ID NO: 1536713 - RNA, 22 nt, Human adenovirus A
aacagcuucuaaaagagccaca

SEQ ID NO: 1536714 - RNA, 22 nt, Human adenovirus A
uacccggcgauugauaucuuga

SEQ ID NO: 1536715 - RNA, 17 nt, Human adenovirus A
cagaugacuggacagcg

SEQ ID NO: 1536716 - RNA, 17 nt, Human adenovirus A
uguaaccagcugggcag

SEQ ID NO: 1536717 - RNA, 16 nt, Human adenovirus A
cuugucaacuacauaa

SEQ ID NO: 1536718 - RNA, 16 nt, Human adenovirus A
aacugcagacaguggc

SEQ ID NO: 1536719 - RNA, 15 nt, Human adenovirus A
ucuacucauacccca

SEQ ID NO: 1536720 - RNA, 21 nt, Human adenovirus A
uuacucgauuuaauuaacauu

SEQ ID NO: 1536721 - RNA, 21 nt, Human adenovirus A
auucauauauguaucuggaca

SEQ ID NO: 1536722 - RNA, 13 nt, Human adenovirus A
gaacuugggcuac

SEQ ID NO: 1536723 - RNA, 21 nt, Human adenovirus A
acauaauuucccucacaaauu

SEQ ID NO: 1536724 - RNA, 19 nt, Human adenovirus A
cucccucuuggccagcugc

SEQ ID NO: 1536725 - RNA, 16 nt, Human adenovirus A
aaacauaugcacaaga

SEQ ID NO: 1536726 - RNA, 12 nt, Human adenovirus A
aacauaagauca

SEQ ID NO: 1536727 - RNA, 20 nt, Human adenovirus A
ugaggacacugaaggcauuu

SEQ ID NO: 1536728 - RNA, 14 nt, Human adenovirus A
gauccagcaaacuu

SEQ ID NO: 1536729 - RNA, 18 nt, Human adenovirus A
cgcggagacgggccgcag

SEQ ID NO: 1536730 - RNA, 18 nt, Human adenovirus A
guacgcauucaccagcca

SEQ ID NO: 1536731 - RNA, 13 nt, Human adenovirus A
agugucuccguau

SEQ ID NO: 1536732 - RNA, 15 nt, Human adenovirus A
auucuugagccugga

SEQ ID NO: 1536733 - RNA, 18 nt, Human adenovirus A
cuaaccuggaucccgcgg

SEQ ID NO: 1536734 - RNA, 15 nt, Human adenovirus A
cugucccccaccagu

SEQ ID NO: 1536735 - RNA, 13 nt, Human adenovirus A
aaagcaaaugcau

SEQ ID NO: 1536736 - RNA, 13 nt, Human adenovirus A
acagaaccauggu

SEQ ID NO: 1536737 - RNA, 19 nt, Human adenovirus A
ccaaauauugcgcaggggu

SEQ ID NO: 1536738 - RNA, 18 nt, Human adenovirus A
aaccccaaaugggacugg

SEQ ID NO: 1536739 - RNA, 13 nt, Human adenovirus A
cacaguaaucuuu

SEQ ID NO: 1536740 - RNA, 18 nt, Human adenovirus A
cauuaccagcagccaaaa

SEQ ID NO: 1536741 - RNA, 14 nt, Human adenovirus A
gggaguugcgagcu

SEQ ID NO: 1536742 - RNA, 14 nt, Human adenovirus A
cuaccugacacuac

SEQ ID NO: 1536743 - RNA, 15 nt, Human adenovirus A
uuuuguauucugcua

SEQ ID NO: 1536744 - RNA, 22 nt, Human adenovirus A
acaacagcggcguaaacucaug

SEQ ID NO: 1536745 - RNA, 14 nt, Human adenovirus A
auagaacuggaagg

SEQ ID NO: 1536746 - RNA, 17 nt, Human adenovirus A
cguacuuguaacugugg

SEQ ID NO: 1536747 - RNA, 15 nt, Human adenovirus A
cacagcacuaacaug

SEQ ID NO: 1536748 - RNA, 20 nt, Human adenovirus A
acuuguuuuuucugacaugg

SEQ ID NO: 1536749 - RNA, 20 nt, Human adenovirus A
gggcucuggcgaacaggaag

SEQ ID NO: 1536750 - RNA, 13 nt, Human adenovirus A
caucuuuuuaugc

SEQ ID NO: 1536751 - RNA, 17 nt, Human adenovirus A
ucacauuugugacugcu

SEQ ID NO: 1536752 - RNA, 14 nt, Human adenovirus A
acauaaagagucuc

SEQ ID NO: 1536753 - RNA, 22 nt, Human adenovirus A
auaccaguuucaauugcagaac

SEQ ID NO: 1536754 - RNA, 22 nt, Human adenovirus A
cgggguugauuuuacagagagc

SEQ ID NO: 1536755 - RNA, 22 nt, Human adenovirus A
auccauguugcuaggcaauggg

SEQ ID NO: 1536756 - RNA, 21 nt, Human adenovirus A
agucaggcagaggacgagguc

SEQ ID NO: 1536757 - RNA, 19 nt, Human adenovirus A
aaacaaaagcaaagcaaau

SEQ ID NO: 1536758 - RNA, 19 nt, Human adenovirus A
auccuagcguacagccaga

SEQ ID NO: 1536759 - RNA, 13 nt, Human adenovirus A
ucguacuuaaaaa

SEQ ID NO: 1536760 - RNA, 17 nt, Human adenovirus A
ggagcugcacguacuag

SEQ ID NO: 1536761 - RNA, 21 nt, Human adenovirus A
cuuacccuagaccaaaugcca

SEQ ID NO: 1536762 - RNA, 13 nt, Human adenovirus A
cguccaggcaggg

SEQ ID NO: 1536763 - RNA, 21 nt, Human adenovirus A
aaaggcaggcauuaccucugu

SEQ ID NO: 1536764 - RNA, 15 nt, Human adenovirus A
uguguccuuggaaga

SEQ ID NO: 1536765 - RNA, 15 nt, Human adenovirus A
cguuuggaaacugua

SEQ ID NO: 1536766 - RNA, 13 nt, Human adenovirus A
agcagccaaaacu

SEQ ID NO: 1536767 - RNA, 19 nt, Human adenovirus A
gccaggcauuuccaggugg

SEQ ID NO: 1536768 - RNA, 19 nt, Human adenovirus A
acaccauugaaaccagcgc

SEQ ID NO: 1536769 - RNA, 17 nt, Human adenovirus A
guugacuucgcacaggc

SEQ ID NO: 1536770 - RNA, 19 nt, Human adenovirus A
agugcgguuccagaaggag

SEQ ID NO: 1536771 - RNA, 22 nt, Human adenovirus A
ggagcggcugacagagcgcggc

SEQ ID NO: 1536772 - RNA, 18 nt, Human adenovirus A
caugauguuaccaccgau

SEQ ID NO: 1536773 - RNA, 12 nt, Human adenovirus A
aaugaacaaugc

SEQ ID NO: 1536774 - RNA, 16 nt, Human adenovirus A
cucuucgcugcaguuu

SEQ ID NO: 1536775 - RNA, 19 nt, Human adenovirus A
cuuggaagaaugggaggag

SEQ ID NO: 1536776 - RNA, 12 nt, Human adenovirus A
aucauuaaauaa

SEQ ID NO: 1536777 - RNA, 19 nt, Human adenovirus A
ucuuaaaaucuccugaacg

SEQ ID NO: 1536778 - RNA, 22 nt, Human adenovirus A
auguuaauuaucccuuugaugc

SEQ ID NO: 1536779 - RNA, 16 nt, Human adenovirus A
uuuaguggcaaucaaa

SEQ ID NO: 1536780 - RNA, 14 nt, Human adenovirus A
uccaagaucuuugu

SEQ ID NO: 1536781 - RNA, 15 nt, Human adenovirus A
gccgccgcugcagcu

SEQ ID NO: 1536782 - RNA, 13 nt, Human adenovirus A
cgaaaaaaaucac

SEQ ID NO: 1536783 - RNA, 15 nt, Human adenovirus A
ggcaggaguugcagg

SEQ ID NO: 1536784 - RNA, 14 nt, Human adenovirus A
ugcgaccgggcacc

SEQ ID NO: 1536785 - RNA, 19 nt, Human adenovirus A
uucagguguuaucuucaaa

SEQ ID NO: 1536786 - RNA, 22 nt, Human adenovirus A
gugagcaaaucucagaaagcca

SEQ ID NO: 1536787 - RNA, 14 nt, Human adenovirus A
uugauuuaggaggu

SEQ ID NO: 1536788 - RNA, 21 nt, Human adenovirus A
gaggcgcgcgaguuaagaaaa

SEQ ID NO: 1536789 - RNA, 20 nt, Human adenovirus A
cugauuucgauaaacaaaag

SEQ ID NO: 1536790 - RNA, 20 nt, Human adenovirus A
ggagacgggccgcagcugcg

SEQ ID NO: 1536791 - RNA, 18 nt, Human adenovirus A
cgacguugcaagaggaga

SEQ ID NO: 1536792 - RNA, 15 nt, Human adenovirus A
gcauuaagccagaua

SEQ ID NO: 1536793 - RNA, 12 nt, Human adenovirus A
gcaacagcuauu

SEQ ID NO: 1536794 - RNA, 18 nt, Human adenovirus A
gcgcgucggggcuacugc

SEQ ID NO: 1536795 - RNA, 17 nt, Human adenovirus A
caaggucaacuuacagc

SEQ ID NO: 1536796 - RNA, 17 nt, Human adenovirus A
aggagguggcuggacug

SEQ ID NO: 1536797 - RNA, 14 nt, Human adenovirus A
uucccaaauaucca

SEQ ID NO: 1536798 - RNA, 18 nt, Human adenovirus A
auaauuaaacccuuuagc

SEQ ID NO: 1536799 - RNA, 20 nt, Human adenovirus A
cuuuuaguacuccuauguaa

SEQ ID NO: 1536800 - RNA, 16 nt, Human adenovirus A
gcaguauaccucuaaa

SEQ ID NO: 1536801 - RNA, 14 nt, Human adenovirus A
augaaaacagcauu

SEQ ID NO: 1536802 - RNA, 20 nt, Human adenovirus A
cagaguugcuuuuagauguc

SEQ ID NO: 1536803 - RNA, 16 nt, Human adenovirus A
auauugcauuuguccu

SEQ ID NO: 1536804 - RNA, 23 nt, Human adenovirus A
ucaaaaaagcaaaguacaaccac

SEQ ID NO: 1536805 - RNA, 19 nt, Human adenovirus A
agucgccgugguugguggg

SEQ ID NO: 1536806 - RNA, 17 nt, Human adenovirus A
uuccacggugcacuuuu

SEQ ID NO: 1536807 - RNA, 15 nt, Human adenovirus A
gacauggaaaaaaug

SEQ ID NO: 1536808 - RNA, 15 nt, Human adenovirus A
auuuugauuauuaua

SEQ ID NO: 1536809 - RNA, 23 nt, Human adenovirus A
caagcauguuaaaaaacgggaaa

SEQ ID NO: 1536810 - RNA, 14 nt, Human adenovirus A
ggauagcaccugcc

SEQ ID NO: 1536811 - RNA, 18 nt, Human adenovirus A
accgucaucucuacagcc

SEQ ID NO: 1536812 - RNA, 19 nt, Human adenovirus A
acugaacuauuaagugaaa

SEQ ID NO: 1536813 - RNA, 12 nt, Human adenovirus A
uguaucuggaca

SEQ ID NO: 1536814 - RNA, 22 nt, Human adenovirus A
cgaccgccuuuucuagaacaaa

SEQ ID NO: 1536815 - RNA, 21 nt, Human adenovirus A
aggcauggaaaaacuuggaaa

SEQ ID NO: 1536816 - RNA, 22 nt, Human adenovirus A
gccacucaaacauuaugcugga

SEQ ID NO: 1536817 - RNA, 21 nt, Human adenovirus A
ccaccaaauuuaaggccaggg

SEQ ID NO: 1536818 - RNA, 11 nt, Human adenovirus A
ggacuuucaac

SEQ ID NO: 1536819 - RNA, 20 nt, Human adenovirus A
aagcaauaaaacaaggagcc

SEQ ID NO: 1536820 - RNA, 18 nt, Human adenovirus A
agguuccguuccuguugc

SEQ ID NO: 1536821 - RNA, 15 nt, Human adenovirus A
cguugagccauguug

SEQ ID NO: 1536822 - RNA, 17 nt, Human adenovirus A
ccagcgccaccugccau

SEQ ID NO: 1536823 - RNA, 13 nt, Human adenovirus A
uguuaccaaugga

SEQ ID NO: 1536824 - RNA, 16 nt, Human adenovirus A
aauauuguauuuccag

SEQ ID NO: 1536825 - RNA, 20 nt, Human adenovirus A
gaacauacaacuugcacaaa

SEQ ID NO: 1536826 - RNA, 22 nt, Human adenovirus A
aguguacgcagacgaugacauu

SEQ ID NO: 1536827 - RNA, 17 nt, Human adenovirus A
agaaaauaacacauaag

SEQ ID NO: 1536828 - RNA, 22 nt, Human adenovirus A
guugcuuugaauaguucaucuu

SEQ ID NO: 1536829 - RNA, 14 nt, Human adenovirus A
cugagcaaugcuac

SEQ ID NO: 1536830 - RNA, 21 nt, Human adenovirus A
ccaucuugcuuguuuaaacau

SEQ ID NO: 1536831 - RNA, 18 nt, Human adenovirus A
acuauggaccuacuuacu

SEQ ID NO: 1536832 - RNA, 14 nt, Human adenovirus A
agaagccagcagca

SEQ ID NO: 1536833 - RNA, 14 nt, Human adenovirus A
agcccgaaguugac

SEQ ID NO: 1536834 - RNA, 22 nt, Human adenovirus A
uacuuacagggagauacaucua

SEQ ID NO: 1536835 - RNA, 19 nt, Human adenovirus A
gaagugaagauagacagcu

SEQ ID NO: 1536836 - RNA, 21 nt, Human adenovirus A
cgcagaccuacgguggcagcc

SEQ ID NO: 1536837 - RNA, 15 nt, Human adenovirus A
cuuguuuccagugcg

SEQ ID NO: 1536838 - RNA, 15 nt, Human adenovirus A
gccaaucaggcugua

SEQ ID NO: 1536839 - RNA, 12 nt, Human adenovirus A
aaauaugcugua

SEQ ID NO: 1536840 - RNA, 19 nt, Human adenovirus A
guauucugcuaaacucaca

SEQ ID NO: 1536841 - RNA, 16 nt, Human adenovirus A
aggcugucacuuugca

SEQ ID NO: 1536842 - RNA, 23 nt, Human adenovirus A
cgcaguggucuuacaugcacauc

SEQ ID NO: 1536843 - RNA, 16 nt, Human adenovirus A
ugcuuuucgccagcag

SEQ ID NO: 1536844 - RNA, 17 nt, Human adenovirus A
cuuuucuagaacaaaaa

SEQ ID NO: 1536845 - RNA, 15 nt, Human adenovirus A
cagagcacacuggga

SEQ ID NO: 1536846 - RNA, 19 nt, Human adenovirus A
auuuggauuuucugaucaa

SEQ ID NO: 1536847 - RNA, 20 nt, Human adenovirus A
agcuucagaaaaugccuguu

SEQ ID NO: 1536848 - RNA, 20 nt, Human adenovirus A
auggucuucaagaaaaacca

SEQ ID NO: 1536849 - RNA, 23 nt, Human adenovirus A
agugguauuccgcgguccuccuc

SEQ ID NO: 1536850 - RNA, 12 nt, Human adenovirus A
gccccacuuccu

SEQ ID NO: 1536851 - RNA, 14 nt, Human adenovirus A
cucauccucagcuc

SEQ ID NO: 1536852 - RNA, 17 nt, Human adenovirus A
uauuucucuuuucuuua

SEQ ID NO: 1536853 - RNA, 13 nt, Human adenovirus A
gaucacagccaga

SEQ ID NO: 1536854 - RNA, 21 nt, Human adenovirus A
ugaugcuuuucgccagcagcc

SEQ ID NO: 1536855 - RNA, 22 nt, Human adenovirus A
aguaugcugaagaaacagaaga

SEQ ID NO: 1536856 - RNA, 17 nt, Human adenovirus A
ucucgcagcucuuauuu

SEQ ID NO: 1536857 - RNA, 23 nt, Human adenovirus A
agauaacggaggaggagguggcu

SEQ ID NO: 1536858 - RNA, 16 nt, Human adenovirus A
gggacgcgugugccag

SEQ ID NO: 1536859 - RNA, 19 nt, Human adenovirus A
cugucuuaaaaucuccuga

SEQ ID NO: 1536860 - RNA, 14 nt, Human adenovirus A
uuucacauucaacu

SEQ ID NO: 1536861 - RNA, 23 nt, Human adenovirus A
ucuuggucgucacacccuccgug

SEQ ID NO: 1536862 - RNA, 14 nt, Human adenovirus A
cuuaacaaaaaacg

SEQ ID NO: 1536863 - RNA, 18 nt, Human adenovirus A
acauguggagcuuucaac

SEQ ID NO: 1536864 - RNA, 18 nt, Human adenovirus A
ugaagugccucaaaguga

SEQ ID NO: 1536865 - RNA, 21 nt, Human adenovirus A
acauaccuggcaaacugggau

SEQ ID NO: 1536866 - RNA, 19 nt, Human adenovirus A
guacucaacgugucaguuu

SEQ ID NO: 1536867 - RNA, 16 nt, Human adenovirus A
ucaauucuucuuccaa

SEQ ID NO: 1536868 - RNA, 15 nt, Human adenovirus A
cuuuagaagccaugu

SEQ ID NO: 1536869 - RNA, 14 nt, Human adenovirus A
ggcgacuacccggc

SEQ ID NO: 1536870 - RNA, 13 nt, Human adenovirus A
acacuuaacacaa

SEQ ID NO: 1536871 - RNA, 13 nt, Human adenovirus A
aaccguuuagagc

SEQ ID NO: 1536872 - RNA, 13 nt, Human adenovirus A
ggcaggggaaggu

SEQ ID NO: 1536873 - RNA, 17 nt, Human adenovirus A
ugcuggaaccugaagug

SEQ ID NO: 1536874 - RNA, 21 nt, Human adenovirus A
uggauuacaugucaaugcagc

SEQ ID NO: 1536875 - RNA, 16 nt, Human adenovirus A
agaugcauccuguccu

SEQ ID NO: 1536876 - RNA, 17 nt, Human adenovirus A
aagaugcaaacuugcaa

SEQ ID NO: 1536877 - RNA, 16 nt, Human adenovirus A
gaacuaaacaaacugu

SEQ ID NO: 1536878 - RNA, 14 nt, Human adenovirus A
ugggaaacaaguuu

SEQ ID NO: 1536879 - RNA, 21 nt, Human adenovirus A
auaaaagcuucaauuugccua

SEQ ID NO: 1536880 - RNA, 15 nt, Human adenovirus A
ccaggcgggcugcaa

SEQ ID NO: 1536881 - RNA, 11 nt, Human adenovirus A
cccccagugcc

SEQ ID NO: 1536882 - RNA, 14 nt, Human adenovirus A
gcuccaaccaugaa

SEQ ID NO: 1536883 - RNA, 14 nt, Human adenovirus A
agcaccugccgcca

SEQ ID NO: 1536884 - RNA, 22 nt, Human adenovirus A
agcaaaugcccugcaaaaagaa

SEQ ID NO: 1536885 - RNA, 17 nt, Human adenovirus A
cuuggccaccauagccc

SEQ ID NO: 1536886 - RNA, 18 nt, Human adenovirus A
cccaaucaaauuacacac

SEQ ID NO: 1536887 - RNA, 14 nt, Human adenovirus A
cauagccccucuaa

SEQ ID NO: 1536888 - RNA, 22 nt, Human adenovirus A
acaaaaaacggaucuauuguua

SEQ ID NO: 1536889 - RNA, 20 nt, Human adenovirus A
gaucaacgacuaaaacaaau

SEQ ID NO: 1536890 - RNA, 21 nt, Human adenovirus A
gggaaaaaaaagaggaagaag

SEQ ID NO: 1536891 - RNA, 18 nt, Human adenovirus A
ggaaagccgguuguaagc

SEQ ID NO: 1536892 - RNA, 13 nt, Human adenovirus A
guucagcuucucc

SEQ ID NO: 1536893 - RNA, 18 nt, Human adenovirus A
uaacaguugaaaaaggaa

SEQ ID NO: 1536894 - RNA, 15 nt, Human adenovirus A
caaccaaaggagaaa

SEQ ID NO: 1536895 - RNA, 13 nt, Human adenovirus A
aguuguaaggcau

SEQ ID NO: 1536896 - RNA, 12 nt, Human adenovirus A
ucgccagcagcc

SEQ ID NO: 1536897 - RNA, 15 nt, Human adenovirus A
cugcaacagccaagc

SEQ ID NO: 1536898 - RNA, 20 nt, Human adenovirus A
aauucgcaggcggucugcca

SEQ ID NO: 1536899 - RNA, 19 nt, Human adenovirus A
aucucacuuaagucuuuac

SEQ ID NO: 1536900 - RNA, 15 nt, Human adenovirus A
agccauccgcaaaga

SEQ ID NO: 1536901 - RNA, 21 nt, Human adenovirus A
aacucuaacugcucagcugga

SEQ ID NO: 1536902 - RNA, 14 nt, Human adenovirus A
cgcagacggcugcg

SEQ ID NO: 1536903 - RNA, 23 nt, Human adenovirus A
aagccacuuuagccccagcggca

SEQ ID NO: 1536904 - RNA, 21 nt, Human adenovirus A
acguucccgcccuuacagauc

SEQ ID NO: 1536905 - RNA, 16 nt, Human adenovirus A
agcauguuaaaaaacg

SEQ ID NO: 1536906 - RNA, 13 nt, Human adenovirus A
aaccuuugacaaa

SEQ ID NO: 1536907 - RNA, 19 nt, Human adenovirus A
aaugcgccugcuuaaaauc

SEQ ID NO: 1536908 - RNA, 21 nt, Human adenovirus A
auuuagaggcuggagcuuuac

SEQ ID NO: 1536909 - RNA, 18 nt, Human adenovirus A
acugcaaaauugaaaaac

SEQ ID NO: 1536910 - RNA, 16 nt, Human adenovirus A
aauaguuuaauguuuc

SEQ ID NO: 1536911 - RNA, 12 nt, Human adenovirus A
agucacaaggua

SEQ ID NO: 1536912 - RNA, 19 nt, Human adenovirus A
cacuuuaauaaaaacacug

SEQ ID NO: 1536913 - RNA, 18 nt, Human adenovirus A
auaugcuauuuuucagca

SEQ ID NO: 1536914 - RNA, 19 nt, Human adenovirus A
ggaucuggagccacaggaa

SEQ ID NO: 1536915 - RNA, 23 nt, Human adenovirus A
uccgauaaaaaagguagcuccag

SEQ ID NO: 1536916 - RNA, 20 nt, Human adenovirus A
cuagcuuaccacucagaccu

SEQ ID NO: 1536917 - RNA, 13 nt, Human adenovirus A
uauugguggaaaa

SEQ ID NO: 1536918 - RNA, 17 nt, Human adenovirus A
cgcccgcgccacggaca

SEQ ID NO: 1536919 - RNA, 15 nt, Human adenovirus A
ccugugcaaacugca

SEQ ID NO: 1536920 - RNA, 23 nt, Human adenovirus A
uuaauuacuccauguuaaguuug

SEQ ID NO: 1536921 - RNA, 20 nt, Human adenovirus A
agcuucagaugacuggacag

SEQ ID NO: 1536922 - RNA, 15 nt, Human adenovirus A
cucaaaagcagccau

SEQ ID NO: 1536923 - RNA, 20 nt, Human adenovirus A
ugagcccgaaguugacuggc

SEQ ID NO: 1536924 - RNA, 18 nt, Human adenovirus A
ccauguaucagcagccaa

SEQ ID NO: 1536925 - RNA, 19 nt, Human adenovirus A
aggggaagguguugagccc

SEQ ID NO: 1536926 - RNA, 17 nt, Human adenovirus A
gucgaggacuuggaaga

SEQ ID NO: 1536927 - RNA, 22 nt, Human adenovirus A
cggcaggauccgcuaugagcac

SEQ ID NO: 1536928 - RNA, 16 nt, Human adenovirus A
caguccugaugcuuuu

SEQ ID NO: 1536929 - RNA, 16 nt, Human adenovirus A
auugcgauaaacugga

SEQ ID NO: 1536930 - RNA, 23 nt, Human adenovirus A
gcuccugguugagcgcuggccag

SEQ ID NO: 1536931 - RNA, 16 nt, Human adenovirus A
auguauucagcuucag

SEQ ID NO: 1536932 - RNA, 11 nt, Human adenovirus A
augaacaaugc

SEQ ID NO: 1536933 - RNA, 18 nt, Human adenovirus A
gcggucuuaaaaauuuug

SEQ ID NO: 1536934 - RNA, 12 nt, Human adenovirus A
aucugucggcgu

SEQ ID NO: 1536935 - RNA, 18 nt, Human adenovirus A
accuauaacaaugaaagu

SEQ ID NO: 1536936 - RNA, 17 nt, Human adenovirus A
cauuugaucagaaaaaa

SEQ ID NO: 1536937 - RNA, 21 nt, Human adenovirus A
agaugcauccuguccugcgac

SEQ ID NO: 1536938 - RNA, 23 nt, Human adenovirus A
gcuuuuccugagacaccaccucc

SEQ ID NO: 1536939 - RNA, 18 nt, Human adenovirus A
ggauggguguuuggcagc

SEQ ID NO: 1536940 - RNA, 10 nt, Human adenovirus A
cugcagagca

SEQ ID NO: 1536941 - RNA, 22 nt, Human adenovirus A
ucuugaccaccguucccuauca

SEQ ID NO: 1536942 - RNA, 14 nt, Human adenovirus A
cccuguggagccac

SEQ ID NO: 1536943 - RNA, 20 nt, Human adenovirus A
gcuggugaaagaucacagcc

SEQ ID NO: 1536944 - RNA, 19 nt, Human adenovirus A
aaagaauuauucccgcagc

SEQ ID NO: 1536945 - RNA, 17 nt, Human adenovirus A
cugcacuaacucugauu

SEQ ID NO: 1536946 - RNA, 18 nt, Human adenovirus A
gaaagagaacaaacagug

SEQ ID NO: 1536947 - RNA, 12 nt, Human adenovirus A
cugcggccauga

SEQ ID NO: 1536948 - RNA, 12 nt, Human adenovirus A
acaacagcugcu

SEQ ID NO: 1536949 - RNA, 13 nt, Human adenovirus A
cauuuacugcagc

SEQ ID NO: 1536950 - RNA, 12 nt, Human adenovirus A
ccacucuccuga

SEQ ID NO: 1536951 - RNA, 15 nt, Human adenovirus A
auuugacuuccaggu

SEQ ID NO: 1536952 - RNA, 12 nt, Human adenovirus A
agauuggcaaug

SEQ ID NO: 1536953 - RNA, 19 nt, Human adenovirus A
ggcggguaagagcaggcug

SEQ ID NO: 1536954 - RNA, 22 nt, Human adenovirus A
uuccacugguaacggucuucaa

SEQ ID NO: 1536955 - RNA, 14 nt, Human adenovirus A
auagggguuaaggg

SEQ ID NO: 1536956 - RNA, 16 nt, Human adenovirus A
cgagaucggcacgagc

SEQ ID NO: 1536957 - RNA, 14 nt, Human adenovirus A
uuucguuccagacu

SEQ ID NO: 1536958 - RNA, 16 nt, Human adenovirus A
auaagaaagaggcagc

SEQ ID NO: 1536959 - RNA, 23 nt, Human adenovirus A
ggaaaucagggcguacagccugg

SEQ ID NO: 1536960 - RNA, 15 nt, Human adenovirus A
ugcuaaauuggccuu

SEQ ID NO: 1536961 - RNA, 15 nt, Human adenovirus A
auugaauaaaagcau

SEQ ID NO: 1536962 - RNA, 21 nt, Human adenovirus A
acguuuacaaagcacugggca

SEQ ID NO: 1536963 - RNA, 20 nt, Human adenovirus A
gcauacccgaggacgcacug

SEQ ID NO: 1536964 - RNA, 13 nt, Human adenovirus A
cgauaugaugcaa

SEQ ID NO: 1536965 - RNA, 22 nt, Human adenovirus A
aaauuugcauuucccaagauuu

SEQ ID NO: 1536966 - RNA, 22 nt, Human adenovirus A
gcacaaguugcagggcgcccau

SEQ ID NO: 1536967 - RNA, 21 nt, Human adenovirus A
uauuacacucaggccauaaag

SEQ ID NO: 1536968 - RNA, 11 nt, Human adenovirus A
agccacaggaa

SEQ ID NO: 1536969 - RNA, 14 nt, Human adenovirus A
cgaggcggugagca

SEQ ID NO: 1536970 - RNA, 19 nt, Human adenovirus A
aaauaguuccguaaagacu

SEQ ID NO: 1536971 - RNA, 17 nt, Human adenovirus A
gcgcugcggucuggggu

SEQ ID NO: 1536972 - RNA, 21 nt, Human adenovirus A
caggggaagguguugagcccg

SEQ ID NO: 1536973 - RNA, 15 nt, Human adenovirus A
acucaaaugugggcu

SEQ ID NO: 1536974 - RNA, 11 nt, Human adenovirus A
aguugacuggc

SEQ ID NO: 1536975 - RNA, 11 nt, Human adenovirus A
ccauaguucuu

SEQ ID NO: 1536976 - RNA, 14 nt, Human adenovirus A
aagagccacagcuc

SEQ ID NO: 1536977 - RNA, 24 nt, Human adenovirus A
auuuuauccuacaaaaaguaacaa

SEQ ID NO: 1536978 - RNA, 21 nt, Human adenovirus A
gcuucuauugcuuuuuuggca

SEQ ID NO: 1536979 - RNA, 13 nt, Human adenovirus A
aagcgcugaaaca

SEQ ID NO: 1536980 - RNA, 14 nt, Human adenovirus A
cuuuaauguuucag

SEQ ID NO: 1536981 - RNA, 17 nt, Human adenovirus A
cuggaggucuccauguc

SEQ ID NO: 1536982 - RNA, 17 nt, Human adenovirus A
guuccauggcuucguaa

SEQ ID NO: 1536983 - RNA, 15 nt, Human adenovirus A
agaaauaaccagugu

SEQ ID NO: 1536984 - RNA, 23 nt, Human adenovirus A
auaaagaguuaauugauuuacaa

SEQ ID NO: 1536985 - RNA, 18 nt, Human adenovirus A
caaagaaaguucaccucc

SEQ ID NO: 1536986 - RNA, 19 nt, Human adenovirus A
auggcagcggcgccacccu

SEQ ID NO: 1536987 - RNA, 17 nt, Human adenovirus A
cacggccucagcagcgg

SEQ ID NO: 1536988 - RNA, 15 nt, Human adenovirus A
agaaaguuuaaagga

SEQ ID NO: 1536989 - RNA, 16 nt, Human adenovirus A
cagcauaaaagcuuca

SEQ ID NO: 1536990 - RNA, 15 nt, Human adenovirus A
caagacagaaauaca

SEQ ID NO: 1536991 - RNA, 15 nt, Human adenovirus A
uggcagcggcgccac

SEQ ID NO: 1536992 - RNA, 19 nt, Human adenovirus A
agagggcgaacaguguuuu

SEQ ID NO: 1536993 - RNA, 13 nt, Human adenovirus A
cuccccuguggag

SEQ ID NO: 1536994 - RNA, 12 nt, Human adenovirus A
agaaacaaacua

SEQ ID NO: 1536995 - RNA, 15 nt, Human adenovirus A
ggcuauugcgcagca

SEQ ID NO: 1536996 - RNA, 18 nt, Human adenovirus A
gcuaaauguaacugagga

SEQ ID NO: 1536997 - RNA, 16 nt, Human adenovirus A
cugcuuucagcacugc

SEQ ID NO: 1536998 - RNA, 16 nt, Human adenovirus A
cuuuaauaaaaacacu

SEQ ID NO: 1536999 - RNA, 23 nt, Human adenovirus A
uccauguuaaguuugggaaaguu

SEQ ID NO: 1537000 - RNA, 22 nt, Human adenovirus A
augucggccugacgcucuggca

SEQ ID NO: 1537001 - RNA, 16 nt, Human adenovirus A
cacggccucagcagcg

SEQ ID NO: 1537002 - RNA, 12 nt, Human adenovirus A
ugcccugcaaaa

SEQ ID NO: 1537003 - RNA, 18 nt, Human adenovirus A
gaguacucaucagaggga

SEQ ID NO: 1537004 - RNA, 18 nt, Human adenovirus A
agaaucaaucucaguguc

SEQ ID NO: 1537005 - RNA, 14 nt, Human adenovirus A
agaucacagccaga

SEQ ID NO: 1537006 - RNA, 22 nt, Human adenovirus A
auacaacggccagccaagcgua

SEQ ID NO: 1537007 - RNA, 16 nt, Human adenovirus A
ugaugcauaaugcgga

SEQ ID NO: 1537008 - RNA, 15 nt, Human adenovirus A
uaaaccaagccaugc

SEQ ID NO: 1537009 - RNA, 21 nt, Human adenovirus A
uuccccuauagaggcuggcac

SEQ ID NO: 1537010 - RNA, 23 nt, Human adenovirus A
gcugccuccuuugccagaaccca

SEQ ID NO: 1537011 - RNA, 16 nt, Human adenovirus A
augguaaaaaggaagc

SEQ ID NO: 1537012 - RNA, 21 nt, Human adenovirus A
ugaugccgcaguggucuuaca

SEQ ID NO: 1537013 - RNA, 22 nt, Human adenovirus A
cagcgacgcaaaaaaggggcac

SEQ ID NO: 1537014 - RNA, 19 nt, Human adenovirus A
uccaaauguucaacaacag

SEQ ID NO: 1537015 - RNA, 14 nt, Human adenovirus A
cauuaccagcagcc

SEQ ID NO: 1537016 - RNA, 23 nt, Human adenovirus A
ugcuuuuagaugucgaaugcagg

SEQ ID NO: 1537017 - RNA, 22 nt, Human adenovirus A
uuaccaccaaauuuaaggccag

SEQ ID NO: 1537018 - RNA, 21 nt, Human adenovirus A
ccaaggcguggaacagccaaa

SEQ ID NO: 1537019 - RNA, 21 nt, Human adenovirus A
guuaucuaguuugguagcaaa

SEQ ID NO: 1537020 - RNA, 23 nt, Human adenovirus A
aggacacggaguguaccuugauc

SEQ ID NO: 1537021 - RNA, 22 nt, Human adenovirus A
aaacccaauuaguaacuccggg

SEQ ID NO: 1537022 - RNA, 17 nt, Human adenovirus A
ugagccauguugugcau

SEQ ID NO: 1537023 - RNA, 13 nt, Human adenovirus A
ccacaaagcagua

SEQ ID NO: 1537024 - RNA, 16 nt, Human adenovirus A
uaaccaaauacugcua

SEQ ID NO: 1537025 - RNA, 22 nt, Human adenovirus A
gacuuggaagaaugggaggagg

SEQ ID NO: 1537026 - RNA, 13 nt, Human adenovirus A
ucuaguccaagca

SEQ ID NO: 1537027 - RNA, 13 nt, Human adenovirus A
acuuuagccccag

SEQ ID NO: 1537028 - RNA, 13 nt, Human adenovirus A
caucauacauaau

SEQ ID NO: 1537029 - RNA, 15 nt, Human adenovirus A
gcagcaccuggagcg

SEQ ID NO: 1537030 - RNA, 17 nt, Human adenovirus A
cucgcagcucuuauuuu

SEQ ID NO: 1537031 - RNA, 15 nt, Human adenovirus A
gcaaugcuuggaaga

SEQ ID NO: 1537032 - RNA, 23 nt, Human adenovirus A
cacugucagugaagcaaaccaca

SEQ ID NO: 1537033 - RNA, 18 nt, Human adenovirus A
cgugaauauuaaaaagcu

SEQ ID NO: 1537034 - RNA, 20 nt, Human adenovirus A
cgugguacgcauucaccagc

SEQ ID NO: 1537035 - RNA, 16 nt, Human adenovirus A
auggaaccccaaaucg

SEQ ID NO: 1537036 - RNA, 19 nt, Human adenovirus A
acuggcuaacgcuccaggg

SEQ ID NO: 1537037 - RNA, 16 nt, Human adenovirus A
ucauccacaucuacaa

SEQ ID NO: 1537038 - RNA, 16 nt, Human adenovirus A
gccuacacaacacaaa

SEQ ID NO: 1537039 - RNA, 18 nt, Human adenovirus A
caagcauuuuuuguugcu

SEQ ID NO: 1537040 - RNA, 13 nt, Human adenovirus A
auaugcauuuaca

SEQ ID NO: 1537041 - RNA, 19 nt, Human adenovirus A
ggauggguguuuggcagca

SEQ ID NO: 1537042 - RNA, 20 nt, Human adenovirus A
uauguacauaauccagcaag

SEQ ID NO: 1537043 - RNA, 14 nt, Human adenovirus A
auuaccagcagcca

SEQ ID NO: 1537044 - RNA, 19 nt, Human adenovirus A
ugaaucgcagucaccacca

SEQ ID NO: 1537045 - RNA, 14 nt, Human adenovirus A
uggccagcugcccu

SEQ ID NO: 1537046 - RNA, 22 nt, Human adenovirus A
uuaacuaguuuacccgccagug

SEQ ID NO: 1537047 - RNA, 21 nt, Human adenovirus A
aacuaaccgucgccagcaagu

SEQ ID NO: 1537048 - RNA, 22 nt, Human adenovirus A
caaugacaaugaauaagccacc

SEQ ID NO: 1537049 - RNA, 22 nt, Human adenovirus A
cuaaccccaaaugaauuugaaa

SEQ ID NO: 1537050 - RNA, 17 nt, Human adenovirus A
cuaacaacuccagaugu

SEQ ID NO: 1537051 - RNA, 17 nt, Human adenovirus A
ccguaaaauacacauaa

SEQ ID NO: 1537052 - RNA, 15 nt, Human adenovirus A
acaacuuaacaaauu

SEQ ID NO: 1537053 - RNA, 16 nt, Human adenovirus A
cauuguaaaugcuuug

SEQ ID NO: 1537054 - RNA, 23 nt, Human adenovirus A
aucuggagcggucuuaaaaauuu

SEQ ID NO: 1537055 - RNA, 14 nt, Human adenovirus A
auuacaugcuggau

SEQ ID NO: 1537056 - RNA, 16 nt, Human adenovirus A
uucauugguccaggcu

SEQ ID NO: 1537057 - RNA, 23 nt, Human adenovirus A
cagacuaaauggaagacaucaau

SEQ ID NO: 1537058 - RNA, 13 nt, Human adenovirus A
aagacagcaugga

SEQ ID NO: 1537059 - RNA, 13 nt, Human adenovirus A
uaugcccagcaug

SEQ ID NO: 1537060 - RNA, 13 nt, Human adenovirus A
ccaccaguuggaa

SEQ ID NO: 1537061 - RNA, 12 nt, Human adenovirus A
uacuugaacaac

SEQ ID NO: 1537062 - RNA, 15 nt, Human adenovirus A
acaagcugcgcugcc

SEQ ID NO: 1537063 - RNA, 22 nt, Human adenovirus A
uuacaugaagauuucugcuguc

SEQ ID NO: 1537064 - RNA, 20 nt, Human adenovirus A
cgcuacagauccauguugcu

SEQ ID NO: 1537065 - RNA, 14 nt, Human adenovirus A
ggcgaacaggaaga

SEQ ID NO: 1537066 - RNA, 15 nt, Human adenovirus A
gguagucggccagca

SEQ ID NO: 1537067 - RNA, 14 nt, Human adenovirus A
augaggcagucaca

SEQ ID NO: 1537068 - RNA, 22 nt, Human adenovirus A
gcgcacuucuugcugaaaugcg

SEQ ID NO: 1537069 - RNA, 12 nt, Human adenovirus A
cagauuuugugc

SEQ ID NO: 1537070 - RNA, 21 nt, Human adenovirus A
gcacauauucgcgugccaggc

SEQ ID NO: 1537071 - RNA, 19 nt, Human adenovirus A
aguucaugcuaaaagcuuc

SEQ ID NO: 1537072 - RNA, 17 nt, Human adenovirus A
aauacugaaaaauagug

SEQ ID NO: 1537073 - RNA, 21 nt, Human adenovirus A
caacagcuucuaaaagagcca

SEQ ID NO: 1537074 - RNA, 20 nt, Human adenovirus A
auuacaugaagauuucugcu

SEQ ID NO: 1537075 - RNA, 20 nt, Human adenovirus A
gggauacuaccgcugcucag

SEQ ID NO: 1537076 - RNA, 14 nt, Human adenovirus A
ucaaaggcaggcau

SEQ ID NO: 1537077 - RNA, 17 nt, Human adenovirus A
aagaccaaaauuuucaa

SEQ ID NO: 1537078 - RNA, 18 nt, Human adenovirus A
caaacagccgaaagacca

SEQ ID NO: 1537079 - RNA, 17 nt, Human adenovirus A
gccggcgaacgggcagc

SEQ ID NO: 1537080 - RNA, 22 nt, Human adenovirus A
agccaaaaaaacagauucugga

SEQ ID NO: 1537081 - RNA, 17 nt, Human adenovirus A
ccagaaaaaggaguucg

SEQ ID NO: 1537082 - RNA, 17 nt, Human adenovirus A
augugaugaaaguagaa

SEQ ID NO: 1537083 - RNA, 13 nt, Human adenovirus A
cgccuuuucuaga

SEQ ID NO: 1537084 - RNA, 21 nt, Human adenovirus A
aguacaggcaacaugggugua

SEQ ID NO: 1537085 - RNA, 23 nt, Human adenovirus A
uccaccgccauccgcaggcagua

SEQ ID NO: 1537086 - RNA, 16 nt, Human adenovirus A
agguauucagcugaac

SEQ ID NO: 1537087 - RNA, 22 nt, Human adenovirus A
guuuaaaucuuucugcuccccu

SEQ ID NO: 1537088 - RNA, 20 nt, Human adenovirus A
gaagucaacuaaaaauuguu

SEQ ID NO: 1537089 - RNA, 15 nt, Human adenovirus A
augaugcgggcagcc

SEQ ID NO: 1537090 - RNA, 20 nt, Human adenovirus A
ugcauuuuauuauuugcugc

SEQ ID NO: 1537091 - RNA, 17 nt, Human adenovirus A
cugcuccgacaacagcu

SEQ ID NO: 1537092 - RNA, 15 nt, Human adenovirus A
aacugcagacagugg

SEQ ID NO: 1537093 - RNA, 19 nt, Human adenovirus A
agcugccguucguccucuu

SEQ ID NO: 1537094 - RNA, 16 nt, Human adenovirus A
ucauggagaaggacaa

SEQ ID NO: 1537095 - RNA, 11 nt, Human adenovirus A
ugcaaugcagc

SEQ ID NO: 1537096 - RNA, 13 nt, Human adenovirus A
ugucgaaugcagg

SEQ ID NO: 1537097 - RNA, 12 nt, Human adenovirus A
cuauuguuaaug

SEQ ID NO: 1537098 - RNA, 18 nt, Human adenovirus A
aacaauuugcaucucacc

SEQ ID NO: 1537099 - RNA, 21 nt, Human adenovirus A
cauuccugcagcacuguaaaa

SEQ ID NO: 1537100 - RNA, 18 nt, Human adenovirus A
guaggcaaguuguggaua

SEQ ID NO: 1537101 - RNA, 23 nt, Human adenovirus A
cguuguacaaagggggcgcacac

SEQ ID NO: 1537102 - RNA, 18 nt, Human adenovirus A
cuguacgcaagcauuuuu

SEQ ID NO: 1537103 - RNA, 18 nt, Human adenovirus A
agauguaacaggcggcuc

SEQ ID NO: 1537104 - RNA, 20 nt, Human adenovirus A
aaguguuuguuugaaaaaug

SEQ ID NO: 1537105 - RNA, 17 nt, Human adenovirus A
aggagguauuccuccuu

SEQ ID NO: 1537106 - RNA, 14 nt, Human adenovirus A
uccucgaaagcgag

SEQ ID NO: 1537107 - RNA, 11 nt, Human adenovirus A
uggcuuccaug

SEQ ID NO: 1537108 - RNA, 19 nt, Human adenovirus A
ggaugaaaaacgagcagca

SEQ ID NO: 1537109 - RNA, 20 nt, Human adenovirus A
caagucuucugacauugcuu

SEQ ID NO: 1537110 - RNA, 15 nt, Human adenovirus A
auuaggcuccacacc

SEQ ID NO: 1537111 - RNA, 13 nt, Human adenovirus A
ucucgauccagca

SEQ ID NO: 1537112 - RNA, 18 nt, Human adenovirus A
ggguguauuggccgggca

SEQ ID NO: 1537113 - RNA, 14 nt, Human adenovirus A
cuuaccaacaccuc

SEQ ID NO: 1537114 - RNA, 12 nt, Human adenovirus A
guagacgagguc

SEQ ID NO: 1537115 - RNA, 23 nt, Human adenovirus A
augcguuacccuagaaaagucaa

SEQ ID NO: 1537116 - RNA, 16 nt, Human adenovirus A
uaaucacaacacagca

SEQ ID NO: 1537117 - RNA, 15 nt, Human adenovirus A
gacauaauuuuccca

SEQ ID NO: 1537118 - RNA, 15 nt, Human adenovirus A
gagaagcggagccac

SEQ ID NO: 1537119 - RNA, 17 nt, Human adenovirus A
gccaggguaaugguggc

SEQ ID NO: 1537120 - RNA, 13 nt, Human adenovirus A
ucucuacagcccc

SEQ ID NO: 1537121 - RNA, 16 nt, Human adenovirus A
caagcuacccuucgcu

SEQ ID NO: 1537122 - RNA, 18 nt, Human adenovirus A
cacuuacccgcagcuguc

SEQ ID NO: 1537123 - RNA, 12 nt, Human adenovirus A
agcagcgguggc

SEQ ID NO: 1537124 - RNA, 22 nt, Human adenovirus A
accaaagccauggcgaccagug

SEQ ID NO: 1537125 - RNA, 21 nt, Human adenovirus A
cggcauuuagaggcuggagcu

SEQ ID NO: 1537126 - RNA, 16 nt, Human adenovirus A
cugaucgcucuucaau

SEQ ID NO: 1537127 - RNA, 15 nt, Human adenovirus A
acugcuuugcucgag

SEQ ID NO: 1537128 - RNA, 19 nt, Human adenovirus A
gcauguuugacaagauugu

SEQ ID NO: 1537129 - RNA, 22 nt, Human adenovirus A
cauggcuaguucuuacuuugac

SEQ ID NO: 1537130 - RNA, 22 nt, Human adenovirus A
acuacuuuauaacuaacuuuaa

SEQ ID NO: 1537131 - RNA, 20 nt, Human adenovirus A
acuaccgcugcucagcucca

SEQ ID NO: 1537132 - RNA, 15 nt, Human adenovirus A
accuacacaugaagg

SEQ ID NO: 1537133 - RNA, 19 nt, Human adenovirus A
gcgacauuuagaccacugu

SEQ ID NO: 1537134 - RNA, 18 nt, Human adenovirus A
cccgacggaguguuucag

SEQ ID NO: 1537135 - RNA, 21 nt, Human adenovirus A
aagcggcacaacagacugggg

SEQ ID NO: 1537136 - RNA, 21 nt, Human adenovirus A
gugaagcaaaccacauaggca

SEQ ID NO: 1537137 - RNA, 20 nt, Human adenovirus A
gaccaagccuauuuuaccca

SEQ ID NO: 1537138 - RNA, 14 nt, Human adenovirus A
aggcauuuccaggu

SEQ ID NO: 1537139 - RNA, 13 nt, Human adenovirus A
aaagacagccaag

SEQ ID NO: 1537140 - RNA, 22 nt, Human adenovirus A
aggcagccguuucaggaaggau

SEQ ID NO: 1537141 - RNA, 12 nt, Human adenovirus A
aguuaaguuuga

SEQ ID NO: 1537142 - RNA, 16 nt, Human adenovirus A
caguuuaacacauaca

SEQ ID NO: 1537143 - RNA, 13 nt, Human adenovirus A
aguagccuugcag

SEQ ID NO: 1537144 - RNA, 15 nt, Human adenovirus A
accuguucuccccac

SEQ ID NO: 1537145 - RNA, 16 nt, Human adenovirus A
cacuuaugcucccaca

SEQ ID NO: 1537146 - RNA, 22 nt, Human adenovirus A
aggccaucuugcuuguuuaaac

SEQ ID NO: 1537147 - RNA, 20 nt, Human adenovirus A
ucgcgcuuuggaggcagcug

SEQ ID NO: 1537148 - RNA, 17 nt, Human adenovirus A
caggaaaucugggagga

SEQ ID NO: 1537149 - RNA, 17 nt, Human adenovirus A
aguccaagcaaguacaa

SEQ ID NO: 1537150 - RNA, 23 nt, Human adenovirus A
agcuucuugcuuuaagggcuggc

SEQ ID NO: 1537151 - RNA, 17 nt, Human adenovirus A
gacugucagugucuccg

SEQ ID NO: 1537152 - RNA, 17 nt, Human adenovirus A
caguacacuugggaaau

SEQ ID NO: 1537153 - RNA, 20 nt, Human adenovirus A
acgcaacaacugagacuucc

SEQ ID NO: 1537154 - RNA, 22 nt, Human adenovirus A
uaaagucagacuauuacacuca

SEQ ID NO: 1537155 - RNA, 22 nt, Human adenovirus A
gaacaacuuuuaacauuagcag

SEQ ID NO: 1537156 - RNA, 13 nt, Human adenovirus A
cgugccaggcauu

SEQ ID NO: 1537157 - RNA, 16 nt, Human adenovirus A
uuuuaccuaaaccaca

SEQ ID NO: 1537158 - RNA, 16 nt, Human adenovirus A
cugcacucucugggga

SEQ ID NO: 1537159 - RNA, 22 nt, Human adenovirus A
ugauuucgauaaacaaaagcaa

SEQ ID NO: 1537160 - RNA, 13 nt, Human adenovirus A
agcugaaaacaac

SEQ ID NO: 1537161 - RNA, 14 nt, Human adenovirus A
uuucccucuuccca

SEQ ID NO: 1537162 - RNA, 16 nt, Human adenovirus A
auaaaaggcuggaagu

SEQ ID NO: 1537163 - RNA, 16 nt, Human adenovirus A
gggccggucgcgagcu

SEQ ID NO: 1537164 - RNA, 17 nt, Human adenovirus A
uuacaugucaaugcagc

SEQ ID NO: 1537165 - RNA, 14 nt, Human adenovirus A
ugagacuucccaca

SEQ ID NO: 1537166 - RNA, 19 nt, Human adenovirus A
acuuuccggagaaagaauu

SEQ ID NO: 1537167 - RNA, 15 nt, Human adenovirus A
guuauguaugcccag

SEQ ID NO: 1537168 - RNA, 13 nt, Human adenovirus A
caaccucacugcu

SEQ ID NO: 1537169 - RNA, 18 nt, Human adenovirus A
aggagcuaaaacaagguc

SEQ ID NO: 1537170 - RNA, 17 nt, Human adenovirus A
gcuacugcgucucccca

SEQ ID NO: 1537171 - RNA, 15 nt, Human adenovirus A
aaagaucaaggaaau

SEQ ID NO: 1537172 - RNA, 13 nt, Human adenovirus A
acaaguuaaaaga

SEQ ID NO: 1537173 - RNA, 19 nt, Human adenovirus A
cuacuaacaacuccagaug

SEQ ID NO: 1537174 - RNA, 20 nt, Human adenovirus A
uuacauaccuggcaaacugg

SEQ ID NO: 1537175 - RNA, 22 nt, Human adenovirus A
auguucccauugacaaggaagu

SEQ ID NO: 1537176 - RNA, 13 nt, Human adenovirus A
augaaaacaaugu

SEQ ID NO: 1537177 - RNA, 14 nt, Human adenovirus A
cuuacauuuaauaa

SEQ ID NO: 1537178 - RNA, 17 nt, Human adenovirus A
caauaaagaaaaaacuu

SEQ ID NO: 1537179 - RNA, 15 nt, Human adenovirus A
auuugccggaaggaa

SEQ ID NO: 1537180 - RNA, 12 nt, Human adenovirus A
aaucggcggcgc

SEQ ID NO: 1537181 - RNA, 19 nt, Human adenovirus A
accaaaauuuucaacagaa

SEQ ID NO: 1537182 - RNA, 22 nt, Human adenovirus A
cugauaacaagaacaccuacga

SEQ ID NO: 1537183 - RNA, 15 nt, Human adenovirus A
aggagcuaaaacaag

SEQ ID NO: 1537184 - RNA, 12 nt, Human adenovirus A
cgacaacacugu

SEQ ID NO: 1537185 - RNA, 17 nt, Human adenovirus A
cccgcauguauggagga

SEQ ID NO: 1537186 - RNA, 16 nt, Human adenovirus A
aacgcaaguucaaaga

SEQ ID NO: 1537187 - RNA, 21 nt, Human adenovirus A
aaguucaccggugaagaugau

SEQ ID NO: 1537188 - RNA, 18 nt, Human adenovirus A
cgagggaaauccaacacc

SEQ ID NO: 1537189 - RNA, 18 nt, Human adenovirus A
cauucucuaacaagcugc

SEQ ID NO: 1537190 - RNA, 16 nt, Human adenovirus A
uuacuugaacaacuuu

SEQ ID NO: 1537191 - RNA, 15 nt, Human adenovirus A
cacggccucagcagc

SEQ ID NO: 1537192 - RNA, 22 nt, Human adenovirus A
auacgcuugugcagccuuucuu

SEQ ID NO: 1537193 - RNA, 22 nt, Human adenovirus A
uccugaugcuuuucgccagcag

SEQ ID NO: 1537194 - RNA, 20 nt, Human adenovirus A
auaaauucuuaaacaaucug

SEQ ID NO: 1537195 - RNA, 20 nt, Human adenovirus A
cauguggucaggucuaucaa

SEQ ID NO: 1537196 - RNA, 22 nt, Human adenovirus A
acaacaaaacacugagcuccau

SEQ ID NO: 1537197 - RNA, 13 nt, Human adenovirus A
caaguuaaaagac

SEQ ID NO: 1537198 - RNA, 17 nt, Human adenovirus A
uucaaacaccugcagua

SEQ ID NO: 1537199 - RNA, 13 nt, Human adenovirus A
cguuaccacccua

SEQ ID NO: 1537200 - RNA, 14 nt, Human adenovirus A
cacaugucuccuuc

SEQ ID NO: 1537201 - RNA, 19 nt, Human adenovirus A
aauauugagguuacucacu

SEQ ID NO: 1537202 - RNA, 21 nt, Human adenovirus A
cgaguguuaauucccaucugu

SEQ ID NO: 1537203 - RNA, 19 nt, Human adenovirus A
ucauuugcgcccacagggu

SEQ ID NO: 1537204 - RNA, 17 nt, Human adenovirus A
cgcaggagaaaauaaca

SEQ ID NO: 1537205 - RNA, 21 nt, Human adenovirus A
auucaggugccgcaaaaauuu

SEQ ID NO: 1537206 - RNA, 16 nt, Human adenovirus A
caugcuaaaagcuucu

SEQ ID NO: 1537207 - RNA, 18 nt, Human adenovirus A
gcgcagcagaacccagua

SEQ ID NO: 1537208 - RNA, 16 nt, Human adenovirus A
cauaauuuuaaaguaa

SEQ ID NO: 1537209 - RNA, 11 nt, Human adenovirus A
uuguuaucuag

SEQ ID NO: 1537210 - RNA, 16 nt, Human adenovirus A
ucaaaggcaggcauua

SEQ ID NO: 1537211 - RNA, 16 nt, Human adenovirus A
cauucaacugaccagg

SEQ ID NO: 1537212 - RNA, 19 nt, Human adenovirus A
uggagugugcuauuaaagc

SEQ ID NO: 1537213 - RNA, 15 nt, Human adenovirus A
aggacaauccaagga

SEQ ID NO: 1537214 - RNA, 21 nt, Human adenovirus A
acuuaucaagaaauaaccagu

SEQ ID NO: 1537215 - RNA, 16 nt, Human adenovirus A
aagaucaguagcuaag

SEQ ID NO: 1537216 - RNA, 18 nt, Human adenovirus A
uggaagaaugggaggagg

SEQ ID NO: 1537217 - RNA, 19 nt, Human adenovirus A
uacagccccuuugaagagc

SEQ ID NO: 1537218 - RNA, 23 nt, Human adenovirus A
auggcuucguaaaagucuacugc

SEQ ID NO: 1537219 - RNA, 19 nt, Human adenovirus A
cuaaaagagccacagcucu

SEQ ID NO: 1537220 - RNA, 22 nt, Human adenovirus A
uagagucuuuuucccauugguc

SEQ ID NO: 1537221 - RNA, 14 nt, Human adenovirus A
gcugaggaaaugcg

SEQ ID NO: 1537222 - RNA, 14 nt, Human adenovirus A
cuucuugcugaaau

SEQ ID NO: 1537223 - RNA, 13 nt, Human adenovirus A
guuucuacaucau

SEQ ID NO: 1537224 - RNA, 23 nt, Human adenovirus A
uagacauagccaaucaggcugua

SEQ ID NO: 1537225 - RNA, 17 nt, Human adenovirus A
ccauugugcuaaaugua

SEQ ID NO: 1537226 - RNA, 19 nt, Human adenovirus A
caggaaaaaaaagaaaguu

SEQ ID NO: 1537227 - RNA, 12 nt, Human adenovirus A
acggaugaaagc

SEQ ID NO: 1537228 - RNA, 18 nt, Human adenovirus A
ugccgcccgcauguaugg

SEQ ID NO: 1537229 - RNA, 14 nt, Human adenovirus A
ugccguuggcagag

SEQ ID NO: 1537230 - RNA, 16 nt, Human adenovirus A
uccguacaaggcauug

SEQ ID NO: 1537231 - RNA, 14 nt, Human adenovirus A
uuuccggagaaaga

SEQ ID NO: 1537232 - RNA, 21 nt, Human adenovirus A
ggaaauuguguacuuuucaaa

SEQ ID NO: 1537233 - RNA, 16 nt, Human adenovirus A
agaugagccuguauau

SEQ ID NO: 1537234 - RNA, 17 nt, Human adenovirus A
aagaugauugaaccuga

SEQ ID NO: 1537235 - RNA, 22 nt, Human adenovirus A
gagcuccauucuugagccugga

SEQ ID NO: 1537236 - RNA, 19 nt, Human adenovirus A
cagcauuaguucuuuucuu

SEQ ID NO: 1537237 - RNA, 15 nt, Human adenovirus A
ugccuuaggcagcag

SEQ ID NO: 1537238 - RNA, 17 nt, Human adenovirus A
caaaaggcgcuccuaau

SEQ ID NO: 1537239 - RNA, 18 nt, Human adenovirus A
ccccucgaccugcauguc

SEQ ID NO: 1537240 - RNA, 21 nt, Human adenovirus A
ccaaggaaaacuuuuguauuc

SEQ ID NO: 1537241 - RNA, 15 nt, Human adenovirus A
guuagaacuuucuaa

SEQ ID NO: 1537242 - RNA, 16 nt, Human adenovirus A
auuucuaauguggagc

SEQ ID NO: 1537243 - RNA, 16 nt, Human adenovirus A
caaauccaaaagcaac

SEQ ID NO: 1537244 - RNA, 16 nt, Human adenovirus A
ucacagccagaucaaa

SEQ ID NO: 1537245 - RNA, 23 nt, Human adenovirus A
cuaccaaggaaaacuuuuguauu

SEQ ID NO: 1537246 - RNA, 15 nt, Human adenovirus A
agccauggcgaccag

SEQ ID NO: 1537247 - RNA, 12 nt, Human adenovirus A
augauggcuuuu

SEQ ID NO: 1537248 - RNA, 19 nt, Human adenovirus A
agcuauuugagccuucauu

SEQ ID NO: 1537249 - RNA, 20 nt, Human adenovirus A
uccuacaaggcucgcuuuac

SEQ ID NO: 1537250 - RNA, 15 nt, Human adenovirus A
ccacucucgcaggcu

SEQ ID NO: 1537251 - RNA, 23 nt, Human adenovirus A
aguuaauugauuuacaaaccgug

SEQ ID NO: 1537252 - RNA, 21 nt, Human adenovirus A
acagacaccgcccaggcaggc

SEQ ID NO: 1537253 - RNA, 14 nt, Human adenovirus A
gccuaauggagugu

SEQ ID NO: 1537254 - RNA, 16 nt, Human adenovirus A
cucuuuugcagcucca

SEQ ID NO: 1537255 - RNA, 15 nt, Human adenovirus A
ggcagcggcgccacc

SEQ ID NO: 1537256 - RNA, 19 nt, Human adenovirus A
cuggcaguuuagaggccac

SEQ ID NO: 1537257 - RNA, 16 nt, Human adenovirus A
cggcgcggcucaagac

SEQ ID NO: 1537258 - RNA, 17 nt, Human adenovirus A
cuuuaaagguacuaaca

SEQ ID NO: 1537259 - RNA, 12 nt, Human adenovirus A
gucaaucauguu

SEQ ID NO: 1537260 - RNA, 23 nt, Human adenovirus A
ucagcagagucgaggucaagaac

SEQ ID NO: 1537261 - RNA, 15 nt, Human adenovirus A
gacuuuguagaagcu

SEQ ID NO: 1537262 - RNA, 13 nt, Human adenovirus A
cguuuggaaacug

SEQ ID NO: 1537263 - RNA, 13 nt, Human adenovirus A
aaggcaggcauua

SEQ ID NO: 1537264 - RNA, 15 nt, Human adenovirus A
ugguuuaauauacaa

SEQ ID NO: 1537265 - RNA, 16 nt, Human adenovirus A
acaaaauuugucugaa

SEQ ID NO: 1537266 - RNA, 14 nt, Human adenovirus A
acuccaucuguuua

SEQ ID NO: 1537267 - RNA, 23 nt, Human adenovirus A
ggaggugcucccgcagugaggac

SEQ ID NO: 1537268 - RNA, 21 nt, Human adenovirus A
cagccgcgcagaugagcuucu

SEQ ID NO: 1537269 - RNA, 22 nt, Human adenovirus A
ggauacaauguggcccaaugca

SEQ ID NO: 1537270 - RNA, 19 nt, Human adenovirus A
aacuguuagacagagcacu

SEQ ID NO: 1537271 - RNA, 16 nt, Human adenovirus A
aaaaauguuuucugga

SEQ ID NO: 1537272 - RNA, 23 nt, Human adenovirus A
aaacuucgccaauaaaaacaacg

SEQ ID NO: 1537273 - RNA, 14 nt, Human adenovirus A
uuaaaagaccaaaa

SEQ ID NO: 1537274 - RNA, 14 nt, Human adenovirus A
cggcaaaaaacgaa

SEQ ID NO: 1537275 - RNA, 18 nt, Human adenovirus A
cuuaagucuuuacaauaa

SEQ ID NO: 1537276 - RNA, 20 nt, Human adenovirus A
gcagagcauugugguucagg

SEQ ID NO: 1537277 - RNA, 15 nt, Human adenovirus A
gcacgagccagcuga

SEQ ID NO: 1537278 - RNA, 17 nt, Human adenovirus A
ugcaaguuguaaggcau

SEQ ID NO: 1537279 - RNA, 19 nt, Human adenovirus A
gcagcuccaaccaugaaaa

SEQ ID NO: 1537280 - RNA, 18 nt, Human adenovirus A
gaagacuauagagaggaa

SEQ ID NO: 1537281 - RNA, 13 nt, Human adenovirus A
augguagaggaaa

SEQ ID NO: 1537282 - RNA, 19 nt, Human adenovirus A
agauccguacaaggcauug

SEQ ID NO: 1537283 - RNA, 20 nt, Human adenovirus A
uaacaguuugcgugccuggc

SEQ ID NO: 1537284 - RNA, 21 nt, Human adenovirus A
caauaaaacaaggagccgcuc

SEQ ID NO: 1537285 - RNA, 18 nt, Human adenovirus A
augccuuuuucccaagcu

SEQ ID NO: 1537286 - RNA, 19 nt, Human adenovirus A
uugcaaacagcaaacuuuc

SEQ ID NO: 1537287 - RNA, 11 nt, Human adenovirus A
gacugagaacc

SEQ ID NO: 1537288 - RNA, 17 nt, Human adenovirus A
cagguguauuagcacuu

SEQ ID NO: 1537289 - RNA, 12 nt, Human adenovirus A
aggcauuggaaa

SEQ ID NO: 1537290 - RNA, 17 nt, Human adenovirus A
cuguggacccuauuuuu

SEQ ID NO: 1537291 - RNA, 19 nt, Human adenovirus A
auaccuuugcucaggcgcc

SEQ ID NO: 1537292 - RNA, 20 nt, Human adenovirus A
ggagcagguguaaccagcug

SEQ ID NO: 1537293 - RNA, 23 nt, Human adenovirus A
gagauuggcaauguuaccugcca

SEQ ID NO: 1537294 - RNA, 15 nt, Human adenovirus A
uaguccaguauaagg

SEQ ID NO: 1537295 - RNA, 14 nt, Human adenovirus A
uguuaacacugccg

SEQ ID NO: 1537296 - RNA, 22 nt, Human adenovirus A
acagcuucagaugacuggacag

SEQ ID NO: 1537297 - RNA, 21 nt, Human adenovirus A
ugaccccaucuuguuuccagu

SEQ ID NO: 1537298 - RNA, 18 nt, Human adenovirus A
gcugacauaauuuuccca

SEQ ID NO: 1537299 - RNA, 22 nt, Human adenovirus A
gccaucuugcuuguuuaaacau

SEQ ID NO: 1537300 - RNA, 10 nt, Human adenovirus A
ucaaggaaau

SEQ ID NO: 1537301 - RNA, 23 nt, Human adenovirus A
acgcuuuuuugaguacucagccg

SEQ ID NO: 1537302 - RNA, 19 nt, Human adenovirus A
cacgccgcgccccacuucc

SEQ ID NO: 1537303 - RNA, 21 nt, Human adenovirus A
aaaccggcgaggaacuaaacc

SEQ ID NO: 1537304 - RNA, 18 nt, Human adenovirus A
acaucaauuuuucgucgc

SEQ ID NO: 1537305 - RNA, 16 nt, Human adenovirus A
cggccauuggagccgu

SEQ ID NO: 1537306 - RNA, 13 nt, Human adenovirus A
uguccuuccaggg

SEQ ID NO: 1537307 - RNA, 20 nt, Human adenovirus A
gguacuuuuccuuguggaau

SEQ ID NO: 1537308 - RNA, 15 nt, Human adenovirus A
agcgccagaggacca

SEQ ID NO: 1537309 - RNA, 13 nt, Human adenovirus A
cacuuagagggag

SEQ ID NO: 1537310 - RNA, 15 nt, Human adenovirus A
uguccccgaaagccg

SEQ ID NO: 1537311 - RNA, 12 nt, Human adenovirus A
gaaucuguggau

SEQ ID NO: 1537312 - RNA, 22 nt, Human adenovirus A
acauugcccuguaugcuaacuu

SEQ ID NO: 1537313 - RNA, 23 nt, Human adenovirus A
acccucccucuuggccagcugcc

SEQ ID NO: 1537314 - RNA, 15 nt, Human adenovirus A
auagcaacaacgcug

SEQ ID NO: 1537315 - RNA, 22 nt, Human adenovirus A
ccuacuuuguauacucuggaac

SEQ ID NO: 1537316 - RNA, 20 nt, Human adenovirus A
ccaaggcguggaacagccaa

SEQ ID NO: 1537317 - RNA, 15 nt, Human adenovirus A
cuaguucuugucaac

SEQ ID NO: 1537318 - RNA, 16 nt, Human adenovirus A
acgucgcuaaauggau

SEQ ID NO: 1537319 - RNA, 23 nt, Human adenovirus A
aaccaaaggagaaaagcggccac

SEQ ID NO: 1537320 - RNA, 13 nt, Human adenovirus A
auaucaauguuuu

SEQ ID NO: 1537321 - RNA, 22 nt, Human adenovirus A
aaaaucuaagccaugcaaauag

SEQ ID NO: 1537322 - RNA, 10 nt, Human adenovirus A
uuaauguuuc

SEQ ID NO: 1537323 - RNA, 10 nt, Human adenovirus A
ucaauguuuu

SEQ ID NO: 1537324 - RNA, 16 nt, Human adenovirus A
ugaucugucagugaaa

SEQ ID NO: 1537325 - RNA, 17 nt, Human adenovirus A
cgcucuggcaggggaag

SEQ ID NO: 1537326 - RNA, 19 nt, Human adenovirus A
ccuccuauguuagcgccag

SEQ ID NO: 1537327 - RNA, 16 nt, Human adenovirus A
ccagcucuuggaauaa

SEQ ID NO: 1537328 - RNA, 17 nt, Human adenovirus A
ccgcagcugucucuacc

SEQ ID NO: 1537329 - RNA, 12 nt, Human adenovirus A
ugcaaacagcaa

SEQ ID NO: 1537330 - RNA, 15 nt, Human adenovirus A
caucuuaaugccagu

SEQ ID NO: 1537331 - RNA, 12 nt, Human adenovirus A
agaccaaaaagu

SEQ ID NO: 1537332 - RNA, 12 nt, Human adenovirus A
acacaaagaaaa

SEQ ID NO: 1537333 - RNA, 16 nt, Human adenovirus A
acaacagcugcuguca

SEQ ID NO: 1537334 - RNA, 17 nt, Human adenovirus A
uauaguggcacaacaca

SEQ ID NO: 1537335 - RNA, 15 nt, Human adenovirus A
gacagcauggagugc

SEQ ID NO: 1537336 - RNA, 20 nt, Human adenovirus A
cacagaacauacaacuugca

SEQ ID NO: 1537337 - RNA, 17 nt, Human adenovirus A
cguauuuuuccuuugga

SEQ ID NO: 1537338 - RNA, 20 nt, Human adenovirus A
ucuaagguguguaaacacau

SEQ ID NO: 1537339 - RNA, 16 nt, Human adenovirus A
cucucgcuuaaagagu

SEQ ID NO: 1537340 - RNA, 19 nt, Human adenovirus A
uuuggauguaaaaaaauac

SEQ ID NO: 1537341 - RNA, 15 nt, Human adenovirus A
uggcuuuaggccauc

SEQ ID NO: 1537342 - RNA, 23 nt, Human adenovirus A
uaaagcaaaccacugcaaugcag

SEQ ID NO: 1537343 - RNA, 17 nt, Human adenovirus A
guucaauaguggcugca

SEQ ID NO: 1537344 - RNA, 22 nt, Human adenovirus A
uacaaacuggaacuuaacaacu

SEQ ID NO: 1537345 - RNA, 23 nt, Human adenovirus A
acgcaguuacaacuugcuuccag

SEQ ID NO: 1537346 - RNA, 14 nt, Human adenovirus A
ccgucgcuuucaac

SEQ ID NO: 1537347 - RNA, 21 nt, Human adenovirus A
acuuggcuucgaaugcuguga

SEQ ID NO: 1537348 - RNA, 19 nt, Human adenovirus A
gcaucuauaguaaaaaugc

SEQ ID NO: 1537349 - RNA, 21 nt, Human adenovirus A
cgcccagacguaggguacagu

SEQ ID NO: 1537350 - RNA, 18 nt, Human adenovirus A
cuggacugccgacaacac

SEQ ID NO: 1537351 - RNA, 21 nt, Human adenovirus A
aggguccggacguuccuccuu

SEQ ID NO: 1537352 - RNA, 18 nt, Human adenovirus A
uaaccagagcaccccuuc

SEQ ID NO: 1537353 - RNA, 16 nt, Human adenovirus A
aacagcaaacuuucuc

SEQ ID NO: 1537354 - RNA, 23 nt, Human adenovirus A
caacauuuguauucauacuaaca

SEQ ID NO: 1537355 - RNA, 21 nt, Human adenovirus A
ucuacccaguuuuugcagugc

SEQ ID NO: 1537356 - RNA, 18 nt, Human adenovirus A
ugcuccccucaacagcac

SEQ ID NO: 1537357 - RNA, 15 nt, Human adenovirus A
gcgcccuccaccgcc

SEQ ID NO: 1537358 - RNA, 16 nt, Human adenovirus A
cauacauaauuuuaaa

SEQ ID NO: 1537359 - RNA, 11 nt, Human adenovirus A
uaaacugccuc

SEQ ID NO: 1537360 - RNA, 12 nt, Human adenovirus A
cagcgcacuggc

SEQ ID NO: 1537361 - RNA, 19 nt, Human adenovirus A
cauuccccauccaaaacca

SEQ ID NO: 1537362 - RNA, 21 nt, Human adenovirus A
uaaccagagcaccccuuccca

SEQ ID NO: 1537363 - RNA, 14 nt, Human adenovirus A
gucguuacuuuugc

SEQ ID NO: 1537364 - RNA, 18 nt, Human adenovirus A
gccaucggccauaggcau

SEQ ID NO: 1537365 - RNA, 15 nt, Human adenovirus A
caacggccagccaag

SEQ ID NO: 1537366 - RNA, 13 nt, Human adenovirus A
aauuaaacccuuu

SEQ ID NO: 1537367 - RNA, 18 nt, Human adenovirus A
gcgcgcaauauggagccg

SEQ ID NO: 1537368 - RNA, 12 nt, Human adenovirus A
aaggguccaggg

SEQ ID NO: 1537369 - RNA, 18 nt, Human adenovirus A
ucuacaacgagcaagccg

SEQ ID NO: 1537370 - RNA, 17 nt, Human adenovirus A
uugcaagcgaucccaua

SEQ ID NO: 1537371 - RNA, 21 nt, Human adenovirus A
cauuaauaauaaaaccauuuu

SEQ ID NO: 1537372 - RNA, 21 nt, Human adenovirus A
gcguugguucgacgggccagg

SEQ ID NO: 1537373 - RNA, 18 nt, Human adenovirus A
ugaucacagcaacuuuuu

SEQ ID NO: 1537374 - RNA, 15 nt, Human adenovirus A
agaagcuuauguaca

SEQ ID NO: 1537375 - RNA, 13 nt, Human adenovirus A
agaggaagaaaga

SEQ ID NO: 1537376 - RNA, 23 nt, Human adenovirus A
uuguacggacaacauccuuuuuc

SEQ ID NO: 1537377 - RNA, 20 nt, Human adenovirus A
ugacccaccaccaaacugca

SEQ ID NO: 1537378 - RNA, 22 nt, Human adenovirus A
cgucuccccauucgcagcaugu

SEQ ID NO: 1537379 - RNA, 23 nt, Human adenovirus A
auugcccccuuuaccaacaccaa

SEQ ID NO: 1537380 - RNA, 21 nt, Human adenovirus A
cucaaacgccgacgcugcuac

SEQ ID NO: 1537381 - RNA, 13 nt, Human adenovirus A
aaaaaauugccaa

SEQ ID NO: 1537382 - RNA, 19 nt, Human adenovirus A
caggcgcggcgguguaugc

SEQ ID NO: 1537383 - RNA, 14 nt, Human adenovirus A
gacaaagagugacu

SEQ ID NO: 1537384 - RNA, 13 nt, Human adenovirus A
caaagaagagcug

SEQ ID NO: 1537385 - RNA, 21 nt, Human adenovirus A
uagaacaaaaaggaggaagaa

SEQ ID NO: 1537386 - RNA, 20 nt, Human adenovirus A
aaacuguauauuggcaggag

SEQ ID NO: 1537387 - RNA, 20 nt, Human adenovirus A
accuucgagaacuaaacaaa

SEQ ID NO: 1537388 - RNA, 16 nt, Human adenovirus A
gcaagaggagaaggag

SEQ ID NO: 1537389 - RNA, 16 nt, Human adenovirus A
cagucuguuuaguccu

SEQ ID NO: 1537390 - RNA, 19 nt, Human adenovirus A
cauuaccgagcuccauggg

SEQ ID NO: 1537391 - RNA, 16 nt, Human adenovirus A
gauuucgauaaacaaa

SEQ ID NO: 1537392 - RNA, 19 nt, Human adenovirus A
cccggauccguuccaacca

SEQ ID NO: 1537393 - RNA, 15 nt, Human adenovirus A
auauguaucuggaca

SEQ ID NO: 1537394 - RNA, 22 nt, Human adenovirus A
aggaaaaaaaagaaaguuuaaa

SEQ ID NO: 1537395 - RNA, 13 nt, Human adenovirus A
gagccccuuacca

SEQ ID NO: 1537396 - RNA, 14 nt, Human adenovirus A
aucguucaacuuug

SEQ ID NO: 1537397 - RNA, 22 nt, Human adenovirus A
caucuauaguaaaaaugccagg

SEQ ID NO: 1537398 - RNA, 16 nt, Human adenovirus A
uggaacugcagacagu

SEQ ID NO: 1537399 - RNA, 20 nt, Human adenovirus A
aagccuagggggggagccgu

SEQ ID NO: 1537400 - RNA, 13 nt, Human adenovirus A
cugaagaaacaga

SEQ ID NO: 1537401 - RNA, 18 nt, Human adenovirus A
cuccaauuuuuugauuac

SEQ ID NO: 1537402 - RNA, 20 nt, Human adenovirus A
cgugaaguauuccaugagcc

SEQ ID NO: 1537403 - RNA, 15 nt, Human adenovirus A
aaaauggaacccuua

SEQ ID NO: 1537404 - RNA, 23 nt, Human adenovirus A
gugcaaaacuuucuaccaaggaa

SEQ ID NO: 1537405 - RNA, 21 nt, Human adenovirus A
acacauugacuguuuccacug

SEQ ID NO: 1537406 - RNA, 21 nt, Human adenovirus A
cacauugcgcaaaauugagga

SEQ ID NO: 1537407 - RNA, 21 nt, Human adenovirus A
acaauuugcaucucaccacug

SEQ ID NO: 1537408 - RNA, 22 nt, Human adenovirus A
gccuguuuuguauuauugaagg

SEQ ID NO: 1537409 - RNA, 15 nt, Human adenovirus A
aauacuguuaccaau

SEQ ID NO: 1537410 - RNA, 20 nt, Human adenovirus A
cuacacaugaaggaaugccu

SEQ ID NO: 1537411 - RNA, 20 nt, Human adenovirus A
gcgcgcccggcucccacgcc

SEQ ID NO: 1537412 - RNA, 20 nt, Human adenovirus A
gcagacgcaugaaggguggg

SEQ ID NO: 1537413 - RNA, 19 nt, Human adenovirus A
cggguaagagcaggcugga

SEQ ID NO: 1537414 - RNA, 17 nt, Human adenovirus A
gaccuacuuacuggggu

SEQ ID NO: 1537415 - RNA, 16 nt, Human adenovirus A
gaccuuaaucuguuuu

SEQ ID NO: 1537416 - RNA, 15 nt, Human adenovirus A
gucgccgcagagagc

SEQ ID NO: 1537417 - RNA, 17 nt, Human adenovirus A
gccguggcuagcuugcg

SEQ ID NO: 1537418 - RNA, 22 nt, Human adenovirus A
cuucuccagacaacuucauuuu

SEQ ID NO: 1537419 - RNA, 14 nt, Human adenovirus A
cauaggagcugcac

SEQ ID NO: 1537420 - RNA, 20 nt, Human adenovirus A
uggcuucacuagaccuuugu

SEQ ID NO: 1537421 - RNA, 17 nt, Human adenovirus A
aguuuacccgccagugu

SEQ ID NO: 1537422 - RNA, 15 nt, Human adenovirus A
cucaugaccauguaa

SEQ ID NO: 1537423 - RNA, 23 nt, Human adenovirus A
cucagcuggaagagcuaucgcaa

SEQ ID NO: 1537424 - RNA, 18 nt, Human adenovirus A
cacggaguaaugaacaag

SEQ ID NO: 1537425 - RNA, 21 nt, Human adenovirus A
augggcaccuggaacgagauc

SEQ ID NO: 1537426 - RNA, 15 nt, Human adenovirus A
ccgcgcugcggccau

SEQ ID NO: 1537427 - RNA, 17 nt, Human adenovirus A
ucaugguuugcuaacag

SEQ ID NO: 1537428 - RNA, 15 nt, Human adenovirus A
ucaucguaggacaac

SEQ ID NO: 1537429 - RNA, 14 nt, Human adenovirus A
accgauugggacag

SEQ ID NO: 1537430 - RNA, 15 nt, Human adenovirus A
cgagcuaaccgcagc

SEQ ID NO: 1537431 - RNA, 14 nt, Human adenovirus A
aggagcuaaaacaa

SEQ ID NO: 1537432 - RNA, 15 nt, Human adenovirus A
gaccgccuuuucuag

SEQ ID NO: 1537433 - RNA, 14 nt, Human adenovirus A
cauguuaaaaaacg

SEQ ID NO: 1537434 - RNA, 21 nt, Human adenovirus A
caaggcauuggaaagcagcuu

SEQ ID NO: 1537435 - RNA, 15 nt, Human adenovirus A
aguucaaacagugga

SEQ ID NO: 1537436 - RNA, 20 nt, Human adenovirus A
aaagaauuauucccgcagcc

SEQ ID NO: 1537437 - RNA, 22 nt, Human adenovirus A
aagccgucuacucacagcuuau

SEQ ID NO: 1537438 - RNA, 13 nt, Human adenovirus A
gcccgccuggcag

SEQ ID NO: 1537439 - RNA, 16 nt, Human adenovirus A
caaacguccaggcagg

SEQ ID NO: 1537440 - RNA, 16 nt, Human adenovirus A
gcgagucaccaucacu

SEQ ID NO: 1537441 - RNA, 15 nt, Human adenovirus A
cagccauaaugccuu

SEQ ID NO: 1537442 - RNA, 20 nt, Human adenovirus A
gcacauugcaacgcaaucag

SEQ ID NO: 1537443 - RNA, 15 nt, Human adenovirus A
cagcguccaugaaug

SEQ ID NO: 1537444 - RNA, 14 nt, Human adenovirus A
uaauugaaguaagc

SEQ ID NO: 1537445 - RNA, 20 nt, Human adenovirus A
gcugagguuaaaaggaguga

SEQ ID NO: 1537446 - RNA, 13 nt, Human adenovirus A
gcacaauaguuua

SEQ ID NO: 1537447 - RNA, 20 nt, Human adenovirus A
gcgcgagaagaaguagccau

SEQ ID NO: 1537448 - RNA, 14 nt, Human adenovirus A
aucuguaaguuugu

SEQ ID NO: 1537449 - RNA, 15 nt, Human adenovirus A
guaacccuuccccac

SEQ ID NO: 1537450 - RNA, 22 nt, Human adenovirus A
ggguacuggaucguggucccag

SEQ ID NO: 1537451 - RNA, 22 nt, Human adenovirus A
cuaaacgagggagauguccugu

SEQ ID NO: 1537452 - RNA, 13 nt, Human adenovirus A
cucaaaaacucca

SEQ ID NO: 1537453 - RNA, 18 nt, Human adenovirus A
aagcgacagaguugcuuu

SEQ ID NO: 1537454 - RNA, 18 nt, Human adenovirus A
gcuccgacaacagcugcu

SEQ ID NO: 1537455 - RNA, 19 nt, Human adenovirus A
uguuaaauuaaagaugccu

SEQ ID NO: 1537456 - RNA, 20 nt, Human adenovirus A
gaugcgaaccgauugggaaa

SEQ ID NO: 1537457 - RNA, 13 nt, Human adenovirus A
ccauggcuuccau

SEQ ID NO: 1537458 - RNA, 21 nt, Human adenovirus A
gcgagucaccaucacugacgc

SEQ ID NO: 1537459 - RNA, 15 nt, Human adenovirus A
cacucugacacaaaa

SEQ ID NO: 1537460 - RNA, 20 nt, Human adenovirus A
agcugaaacuaggggcuggc

SEQ ID NO: 1537461 - RNA, 11 nt, Human adenovirus A
cagcuguggaa

SEQ ID NO: 1537462 - RNA, 17 nt, Human adenovirus A
ggcuauugcgcagcaac

SEQ ID NO: 1537463 - RNA, 17 nt, Human adenovirus A
gaacucgagugcaugca

SEQ ID NO: 1537464 - RNA, 15 nt, Human adenovirus A
gagcgccccccuagc

SEQ ID NO: 1537465 - RNA, 21 nt, Human adenovirus A
ccaacgcgugaaucgcaguca

SEQ ID NO: 1537466 - RNA, 13 nt, Human adenovirus A
gccacaccuccac

SEQ ID NO: 1537467 - RNA, 13 nt, Human adenovirus A
aagcaguagaaag

SEQ ID NO: 1537468 - RNA, 17 nt, Human adenovirus A
ggaagaacauccaacug

SEQ ID NO: 1537469 - RNA, 22 nt, Human adenovirus A
uuccacggugcacuuuuccaau

SEQ ID NO: 1537470 - RNA, 18 nt, Human adenovirus A
ucuagugcaacauuugua

SEQ ID NO: 1537471 - RNA, 17 nt, Human adenovirus A
aguaacuucaugucuau

SEQ ID NO: 1537472 - RNA, 16 nt, Human adenovirus A
aaaucagaagccagca

SEQ ID NO: 1537473 - RNA, 14 nt, Human adenovirus A
uacaggcagggcau

SEQ ID NO: 1537474 - RNA, 23 nt, Human adenovirus A
gguaguuuaaggugguggcaacg

SEQ ID NO: 1537475 - RNA, 22 nt, Human adenovirus A
cgucugcaguauuauuacucug

SEQ ID NO: 1537476 - RNA, 16 nt, Human adenovirus A
gaaagguauucagcug

SEQ ID NO: 1537477 - RNA, 17 nt, Human adenovirus A
uucagaugacuggacag

SEQ ID NO: 1537478 - RNA, 15 nt, Human adenovirus A
cacaaaauaccccua

SEQ ID NO: 1537479 - RNA, 23 nt, Human adenovirus A
cagaacauguuucgcgacaacag

SEQ ID NO: 1537480 - RNA, 18 nt, Human adenovirus A
uaaaaccuacacaugaag

SEQ ID NO: 1537481 - RNA, 12 nt, Human adenovirus A
acauuagcaguc

SEQ ID NO: 1537482 - RNA, 16 nt, Human adenovirus A
uugugguucaggaacg

SEQ ID NO: 1537483 - RNA, 23 nt, Human adenovirus A
cuugguaggcaauuucugccauu

SEQ ID NO: 1537484 - RNA, 19 nt, Human adenovirus A
ggaggugcucccgcaguga

SEQ ID NO: 1537485 - RNA, 15 nt, Human adenovirus A
gacucauaagcugug

SEQ ID NO: 1537486 - RNA, 19 nt, Human adenovirus A
gcaauuagggccagcauug

SEQ ID NO: 1537487 - RNA, 20 nt, Human adenovirus A
caauaaauacugcucccucu

SEQ ID NO: 1537488 - RNA, 17 nt, Human adenovirus A
gggcccagggguggugg

SEQ ID NO: 1537489 - RNA, 15 nt, Human adenovirus A
ggacaaguuaaaaga

SEQ ID NO: 1537490 - RNA, 22 nt, Human adenovirus A
ugguguuaugaaucuuuauuga

SEQ ID NO: 1537491 - RNA, 14 nt, Human adenovirus A
ucucuaacaagcug

SEQ ID NO: 1537492 - RNA, 22 nt, Human adenovirus A
cacagcuggcgcacaaguugca

SEQ ID NO: 1537493 - RNA, 23 nt, Human adenovirus A
ucaccuggaccuuuaacggaaaa

SEQ ID NO: 1537494 - RNA, 22 nt, Human adenovirus A
cauguuauuuaaaauuccauaa

SEQ ID NO: 1537495 - RNA, 15 nt, Human adenovirus A
caugaagauuucugc

SEQ ID NO: 1537496 - RNA, 14 nt, Human adenovirus A
gccagaacccacua

SEQ ID NO: 1537497 - RNA, 18 nt, Human adenovirus A
auguuagguuugcuggag

SEQ ID NO: 1537498 - RNA, 13 nt, Human adenovirus A
auagggugaaaga

SEQ ID NO: 1537499 - RNA, 23 nt, Human adenovirus A
aaccagcugggcagaaagcaaau

SEQ ID NO: 1537500 - RNA, 23 nt, Human adenovirus A
cagcccaacccuucccaacuacu

SEQ ID NO: 1537501 - RNA, 20 nt, Human adenovirus A
auccuuagauuuuucaucug

SEQ ID NO: 1537502 - RNA, 17 nt, Human adenovirus A
guuaaaaauacagucaa

SEQ ID NO: 1537503 - RNA, 14 nt, Human adenovirus A
uggacauggaaaaa

SEQ ID NO: 1537504 - RNA, 18 nt, Human adenovirus A
auaccacucgaguguacu

SEQ ID NO: 1537505 - RNA, 19 nt, Human adenovirus A
gcaauaaaacaaggagccg

SEQ ID NO: 1537506 - RNA, 18 nt, Human adenovirus A
cgucggggcuacugcuca

SEQ ID NO: 1537507 - RNA, 21 nt, Human adenovirus A
ccguacaaggcauuggaaagc

SEQ ID NO: 1537508 - RNA, 20 nt, Human adenovirus A
ccuuaacuucuacccaguuu

SEQ ID NO: 1537509 - RNA, 22 nt, Human adenovirus A
uuagccuuaauaaccgccccuc

SEQ ID NO: 1537510 - RNA, 18 nt, Human adenovirus A
auaauuggcuucagcauu

SEQ ID NO: 1537511 - RNA, 19 nt, Human adenovirus A
aacaacgcugggcauggug

SEQ ID NO: 1537512 - RNA, 13 nt, Human adenovirus A
aagaaaaugaaca

SEQ ID NO: 1537513 - RNA, 22 nt, Human adenovirus A
caugauguuuaauaaagcgcag

SEQ ID NO: 1537514 - RNA, 14 nt, Human adenovirus A
ggcgcccuccaccg

SEQ ID NO: 1537515 - RNA, 16 nt, Human adenovirus A
agguaggcuaaguuuu

SEQ ID NO: 1537516 - RNA, 20 nt, Human adenovirus A
gccauccgcaaagaugaggc

SEQ ID NO: 1537517 - RNA, 14 nt, Human adenovirus A
cugcucaaguugug

SEQ ID NO: 1537518 - RNA, 16 nt, Human adenovirus A
ccggucuggugcaauu

SEQ ID NO: 1537519 - RNA, 19 nt, Human adenovirus A
caucagaaauuuguugcug

SEQ ID NO: 1537520 - RNA, 18 nt, Human adenovirus A
gguaguuuaagguggugg

SEQ ID NO: 1537521 - RNA, 13 nt, Human adenovirus A
accugacagacuu

SEQ ID NO: 1537522 - RNA, 15 nt, Human adenovirus A
caaacagacccuugg

SEQ ID NO: 1537523 - RNA, 14 nt, Human adenovirus A
aaagcuucaauuug

SEQ ID NO: 1537524 - RNA, 16 nt, Human adenovirus A
aauuuuauuggccuga

SEQ ID NO: 1537525 - RNA, 22 nt, Human adenovirus A
agccauggcuuccaugccuuuu

SEQ ID NO: 1537526 - RNA, 22 nt, Human adenovirus A
cagcgaccggcgaucaucgcgg

SEQ ID NO: 1537527 - RNA, 14 nt, Human adenovirus A
ucagcgccaacaaa

SEQ ID NO: 1537528 - RNA, 15 nt, Human adenovirus A
caaauagagcaaacu

SEQ ID NO: 1537529 - RNA, 18 nt, Human adenovirus A
gcacuggucgcaccacug

SEQ ID NO: 1537530 - RNA, 18 nt, Human adenovirus A
acuaaaacaaaucuauca

SEQ ID NO: 1537531 - RNA, 17 nt, Human adenovirus A
agcagcaacaaggaaag

SEQ ID NO: 1537532 - RNA, 14 nt, Human adenovirus A
uuuaacggaaaaca

SEQ ID NO: 1537533 - RNA, 18 nt, Human adenovirus A
aacacaguuuaacacaua

SEQ ID NO: 1537534 - RNA, 13 nt, Human adenovirus A
aauaccugucuug

SEQ ID NO: 1537535 - RNA, 13 nt, Human adenovirus A
aaaaaucaaaugg

SEQ ID NO: 1537536 - RNA, 16 nt, Human adenovirus A
gcacacugggaaauga

SEQ ID NO: 1537537 - RNA, 19 nt, Human adenovirus A
acagcggcguaaacucaug

SEQ ID NO: 1537538 - RNA, 20 nt, Human adenovirus A
aacaucaugaaaacagcagc

SEQ ID NO: 1537539 - RNA, 14 nt, Human adenovirus A
agaagacaaagagu

SEQ ID NO: 1537540 - RNA, 21 nt, Human adenovirus A
aggaggagguggcuggacugc

SEQ ID NO: 1537541 - RNA, 13 nt, Human adenovirus A
uuggccagcugcc

SEQ ID NO: 1537542 - RNA, 18 nt, Human adenovirus A
accuucuggcuuguaugc

SEQ ID NO: 1537543 - RNA, 15 nt, Human adenovirus A
gaaugagaacuucug

SEQ ID NO: 1537544 - RNA, 22 nt, Human adenovirus A
cugugagugcugauugcuggcc

SEQ ID NO: 1537545 - RNA, 23 nt, Human adenovirus A
ucuaaaagagccacagcucugau

SEQ ID NO: 1537546 - RNA, 13 nt, Human adenovirus A
cguuaguaacaac

SEQ ID NO: 1537547 - RNA, 16 nt, Human adenovirus A
uucuagcaaaaugaau

SEQ ID NO: 1537548 - RNA, 16 nt, Human adenovirus A
caggcggucugccauu

SEQ ID NO: 1537549 - RNA, 13 nt, Human adenovirus A
uuuggagccccuu

SEQ ID NO: 1537550 - RNA, 16 nt, Human adenovirus A
gcugauggaaauuguc

SEQ ID NO: 1537551 - RNA, 16 nt, Human adenovirus A
gacguaaauggccaaa

SEQ ID NO: 1537552 - RNA, 23 nt, Human adenovirus A
auagcaacaacgcugggcauggu

SEQ ID NO: 1537553 - RNA, 19 nt, Human adenovirus A
caagcacgccaaagccaca

SEQ ID NO: 1537554 - RNA, 17 nt, Human adenovirus A
gcacgccaaagccacac

SEQ ID NO: 1537555 - RNA, 20 nt, Human adenovirus A
gcuagcugacauaauuuucc

SEQ ID NO: 1537556 - RNA, 13 nt, Human adenovirus A
uguauuagcacuu

SEQ ID NO: 1537557 - RNA, 17 nt, Human adenovirus A
aaggaaaugauggcuuu

SEQ ID NO: 1537558 - RNA, 21 nt, Human adenovirus A
uuagaagacaaagagugacuc

SEQ ID NO: 1537559 - RNA, 17 nt, Human adenovirus A
cucgucaagccuaccug

SEQ ID NO: 1537560 - RNA, 15 nt, Human adenovirus A
acuugggaaauuugu

SEQ ID NO: 1537561 - RNA, 13 nt, Human adenovirus A
ugcaaucuuugca

SEQ ID NO: 1537562 - RNA, 22 nt, Human adenovirus A
uaauuuuccagcgccaccugcc

SEQ ID NO: 1537563 - RNA, 22 nt, Human adenovirus A
auucgcgugccaggcauuucca

SEQ ID NO: 1537564 - RNA, 13 nt, Human adenovirus A
ccgggcaagcuuc

SEQ ID NO: 1537565 - RNA, 16 nt, Human adenovirus A
cgcacggccaaugccc

SEQ ID NO: 1537566 - RNA, 16 nt, Human adenovirus A
cuuuugcagcuccaac

SEQ ID NO: 1537567 - RNA, 22 nt, Human adenovirus A
uuggagcgccccccuagcagua

SEQ ID NO: 1537568 - RNA, 22 nt, Human adenovirus A
aguuuugauuguauuuugagau

SEQ ID NO: 1537569 - RNA, 16 nt, Human adenovirus A
augucgcauaaugaaa

SEQ ID NO: 1537570 - RNA, 19 nt, Human adenovirus A
uuagaccuucccaauguaa

SEQ ID NO: 1537571 - RNA, 13 nt, Human adenovirus A
gaaacuguugacc

SEQ ID NO: 1537572 - RNA, 13 nt, Human adenovirus A
cugcaaaaagaaa

SEQ ID NO: 1537573 - RNA, 20 nt, Human adenovirus A
aaaaagcuuuaauaaccaug

SEQ ID NO: 1537574 - RNA, 12 nt, Human adenovirus A
ccaccgccaugc

SEQ ID NO: 1537575 - RNA, 22 nt, Human adenovirus A
uaacuucuacccaguuuuugca

SEQ ID NO: 1537576 - RNA, 20 nt, Human adenovirus A
cuagagcacaugaaggugga

SEQ ID NO: 1537577 - RNA, 20 nt, Human adenovirus A
gcaaggcgguauuugcuaua

SEQ ID NO: 1537578 - RNA, 17 nt, Human adenovirus A
acacagcacuaacaugu

SEQ ID NO: 1537579 - RNA, 15 nt, Human adenovirus A
gucuuaaacuuucuu

SEQ ID NO: 1537580 - RNA, 20 nt, Human adenovirus A
cugucagugaagcaaaccac

SEQ ID NO: 1537581 - RNA, 14 nt, Human adenovirus A
cauugacaaggaag

SEQ ID NO: 1537582 - RNA, 18 nt, Human adenovirus A
uaaccaaucuacaaacug

SEQ ID NO: 1537583 - RNA, 19 nt, Human adenovirus A
gccgccuuagacaugacag

SEQ ID NO: 1537584 - RNA, 21 nt, Human adenovirus A
auaccacuuggcagcugccgu

SEQ ID NO: 1537585 - RNA, 23 nt, Human adenovirus A
cuaaggagguuuguaagcgguuu

SEQ ID NO: 1537586 - RNA, 17 nt, Human adenovirus A
aaaccgucgcuuucaac

SEQ ID NO: 1537587 - RNA, 21 nt, Human adenovirus A
aagguacuaacauuaagcgac

SEQ ID NO: 1537588 - RNA, 19 nt, Human adenovirus A
caucguaaacaacagacuu

SEQ ID NO: 1537589 - RNA, 18 nt, Human adenovirus A
aaugagcgcagugaugaa

SEQ ID NO: 1537590 - RNA, 17 nt, Human adenovirus A
cuagcuuaccacucaga

SEQ ID NO: 1537591 - RNA, 16 nt, Human adenovirus A
cacuagucccauuaca

SEQ ID NO: 1537592 - RNA, 14 nt, Human adenovirus A
cuccccacagcugg

SEQ ID NO: 1537593 - RNA, 17 nt, Human adenovirus A
ugcuggugaaagaucac

SEQ ID NO: 1537594 - RNA, 17 nt, Human adenovirus A
augugugcgcugugguu

SEQ ID NO: 1537595 - RNA, 18 nt, Human adenovirus A
uuacuuaccggaaaucug

SEQ ID NO: 1537596 - RNA, 12 nt, Human adenovirus A
uugacuguuuua

SEQ ID NO: 1537597 - RNA, 24 nt, Human adenovirus A
aaaagcugccaccucuagaaacug

SEQ ID NO: 1537598 - RNA, 20 nt, Human adenovirus A
acuuagagggaggcaauauu

SEQ ID NO: 1537599 - RNA, 18 nt, Human adenovirus A
cgccggcgaacgggcagc

SEQ ID NO: 1537600 - RNA, 22 nt, Human adenovirus A
aaugcuggaugcuuugggagac

SEQ ID NO: 1537601 - RNA, 19 nt, Human adenovirus A
caauguaacuucagccacu

SEQ ID NO: 1537602 - RNA, 18 nt, Human adenovirus A
ggcaagccaacggcacau

SEQ ID NO: 1537603 - RNA, 17 nt, Human adenovirus A
aauacagucaaugcuuc

SEQ ID NO: 1537604 - RNA, 20 nt, Human adenovirus A
ccuucgcugucccgagcgcg

SEQ ID NO: 1537605 - RNA, 15 nt, Human adenovirus A
uaauuacuccauguu

SEQ ID NO: 1537606 - RNA, 18 nt, Human adenovirus A
auuuaaaauuccauaauu

SEQ ID NO: 1537607 - RNA, 14 nt, Human adenovirus A
uggcccaaugcaau

SEQ ID NO: 1537608 - RNA, 20 nt, Human adenovirus A
caaaauaccccuauccuguc

SEQ ID NO: 1537609 - RNA, 19 nt, Human adenovirus A
guucgcuaguagcauuaaa

SEQ ID NO: 1537610 - RNA, 17 nt, Human adenovirus A
cuugcauuaaccuuucc

SEQ ID NO: 1537611 - RNA, 21 nt, Human adenovirus A
acuaaugaggcuuuucaucca

SEQ ID NO: 1537612 - RNA, 18 nt, Human adenovirus A
acugugcugcaaaguuuu

SEQ ID NO: 1537613 - RNA, 21 nt, Human adenovirus A
caaaggagaaaagcggccacg

SEQ ID NO: 1537614 - RNA, 14 nt, Human adenovirus A
accaugaaaacagc

SEQ ID NO: 1537615 - RNA, 15 nt, Human adenovirus A
cuugccaagcuugaa

SEQ ID NO: 1537616 - RNA, 16 nt, Human adenovirus A
gcuuuucgccagcagc

SEQ ID NO: 1537617 - RNA, 15 nt, Human adenovirus A
aguuugguagcaaaa

SEQ ID NO: 1537618 - RNA, 16 nt, Human adenovirus A
auacugcuagaacaag

SEQ ID NO: 1537619 - RNA, 14 nt, Human adenovirus A
ucugcccauuuuug

SEQ ID NO: 1537620 - RNA, 21 nt, Human adenovirus A
uggaauaaaauuucuagaaau

SEQ ID NO: 1537621 - RNA, 14 nt, Human adenovirus A
accggcccuguugu

SEQ ID NO: 1537622 - RNA, 16 nt, Human adenovirus A
cucguugaugucaccu

SEQ ID NO: 1537623 - RNA, 22 nt, Human adenovirus A
agcggcuugagcaaaaauguuu

SEQ ID NO: 1537624 - RNA, 22 nt, Human adenovirus A
cagagagcuaagcgacaaagag

SEQ ID NO: 1537625 - RNA, 23 nt, Human adenovirus A
acacaugauggaucuggagccac

SEQ ID NO: 1537626 - RNA, 21 nt, Human adenovirus A
guucaauaguugccacgcuuu

SEQ ID NO: 1537627 - RNA, 14 nt, Human adenovirus A
acuuaauacuggcu

SEQ ID NO: 1537628 - RNA, 21 nt, Human adenovirus A
aaauuguuuuuguucuuuuaa

SEQ ID NO: 1537629 - RNA, 16 nt, Human adenovirus A
aacaguacaaagccag

SEQ ID NO: 1537630 - RNA, 14 nt, Human adenovirus A
cuacaacugcuccc

SEQ ID NO: 1537631 - RNA, 11 nt, Human adenovirus A
acaggcagggc

SEQ ID NO: 1537632 - RNA, 15 nt, Human adenovirus A
gaccggucaggcgug

SEQ ID NO: 1537633 - RNA, 18 nt, Human adenovirus A
uuggauagcaaagccauc

SEQ ID NO: 1537634 - RNA, 16 nt, Human adenovirus A
ucaagacggucagcaa

SEQ ID NO: 1537635 - RNA, 17 nt, Human adenovirus A
acgccuuacauguggag

SEQ ID NO: 1537636 - RNA, 24 nt, Human adenovirus A
acaacuuuuaacauuagcagucug

SEQ ID NO: 1537637 - RNA, 15 nt, Human adenovirus A
guuggaaacugugcu

SEQ ID NO: 1537638 - RNA, 17 nt, Human adenovirus A
ccacugucgccaaccuc

SEQ ID NO: 1537639 - RNA, 21 nt, Human adenovirus A
uucuggcguuacagcuucaga

SEQ ID NO: 1537640 - RNA, 15 nt, Human adenovirus A
gaccacagguggugg

SEQ ID NO: 1537641 - RNA, 23 nt, Human adenovirus A
gacgccccauccguggcaggcca

SEQ ID NO: 1537642 - RNA, 15 nt, Human adenovirus A
uaacaggugaaagug

SEQ ID NO: 1537643 - RNA, 13 nt, Human adenovirus A
acauuuaggcuua

SEQ ID NO: 1537644 - RNA, 17 nt, Human adenovirus A
uccagaggaggaggagg

SEQ ID NO: 1537645 - RNA, 23 nt, Human adenovirus A
aggauccagaggaggaggaggaa

SEQ ID NO: 1537646 - RNA, 14 nt, Human adenovirus A
ggaaagacagccaa

SEQ ID NO: 1537647 - RNA, 22 nt, Human adenovirus A
cauaguagagacaaugaaacuu

SEQ ID NO: 1537648 - RNA, 16 nt, Human adenovirus A
gauucaaacaauaaca

SEQ ID NO: 1537649 - RNA, 14 nt, Human adenovirus A
gaagaaugggagga

SEQ ID NO: 1537650 - RNA, 17 nt, Human adenovirus A
cuuggugguucugccuc

SEQ ID NO: 1537651 - RNA, 22 nt, Human adenovirus A
cucuuggaauaaaauuucuaga

SEQ ID NO: 1537652 - RNA, 22 nt, Human adenovirus A
acggagacccagaaaaaggagu

SEQ ID NO: 1537653 - RNA, 13 nt, Human adenovirus A
gaguguauggaaa

SEQ ID NO: 1537654 - RNA, 19 nt, Human adenovirus A
uuugaaaacauauuggccg

SEQ ID NO: 1537655 - RNA, 15 nt, Human adenovirus A
ggcgccgcagacggc

SEQ ID NO: 1537656 - RNA, 20 nt, Human adenovirus A
aacaaugaaaguugcauuua

SEQ ID NO: 1537657 - RNA, 16 nt, Human adenovirus A
aaucuacaaacuggaa

SEQ ID NO: 1537658 - RNA, 17 nt, Human adenovirus A
uggcacauaacacagcu

SEQ ID NO: 1537659 - RNA, 21 nt, Human adenovirus A
gaugcauaaugcggacgggcg

SEQ ID NO: 1537660 - RNA, 15 nt, Human adenovirus A
acccgauaugaugca

SEQ ID NO: 1537661 - RNA, 14 nt, Human adenovirus A
gcaucuugcaugaa

SEQ ID NO: 1537662 - RNA, 21 nt, Human adenovirus A
agucuugaaugcucuggacau

SEQ ID NO: 1537663 - RNA, 14 nt, Human adenovirus A
auaaacaucucaua

SEQ ID NO: 1537664 - RNA, 17 nt, Human adenovirus A
cguuccagauuguggaa

SEQ ID NO: 1537665 - RNA, 17 nt, Human adenovirus A
agcuucaauuugccuaa

SEQ ID NO: 1537666 - RNA, 15 nt, Human adenovirus A
ggucuagccaacauc

SEQ ID NO: 1537667 - RNA, 23 nt, Human adenovirus A
ucacugccgcugcaaucuuugca

SEQ ID NO: 1537668 - RNA, 23 nt, Human adenovirus A
cguguucacaauuuucugguggu

SEQ ID NO: 1537669 - RNA, 16 nt, Human adenovirus A
gauaaacaaaagcaaa

SEQ ID NO: 1537670 - RNA, 23 nt, Human adenovirus A
ccacuguuguauuauuugaacac

SEQ ID NO: 1537671 - RNA, 17 nt, Human adenovirus A
aaaaucccccuccuacc

SEQ ID NO: 1537672 - RNA, 13 nt, Human adenovirus A
uuguauaaauucu

SEQ ID NO: 1537673 - RNA, 13 nt, Human adenovirus A
aagcucuguucaa

SEQ ID NO: 1537674 - RNA, 20 nt, Human adenovirus A
cagcugcggccgcaacagcu

SEQ ID NO: 1537675 - RNA, 19 nt, Human adenovirus A
aaaucugaaaauacaucau

SEQ ID NO: 1537676 - RNA, 14 nt, Human adenovirus A
aaauuacaaaggca

SEQ ID NO: 1537677 - RNA, 12 nt, Human adenovirus A
aacagaccccaa

SEQ ID NO: 1537678 - RNA, 17 nt, Human adenovirus A
gaguaccugagucccgg

SEQ ID NO: 1537679 - RNA, 20 nt, Human adenovirus A
gugauaacccugaauguuug

SEQ ID NO: 1537680 - RNA, 15 nt, Human adenovirus A
ggaucuccugccacc

SEQ ID NO: 1537681 - RNA, 22 nt, Human adenovirus A
uucuuccucgaccacagguggu

SEQ ID NO: 1537682 - RNA, 12 nt, Human adenovirus A
cacaucuacaaa

SEQ ID NO: 1537683 - RNA, 19 nt, Human adenovirus A
gauuaaauauaucuuuuaa

SEQ ID NO: 1537684 - RNA, 20 nt, Human adenovirus A
aacacggaggacaauccaag

SEQ ID NO: 1537685 - RNA, 16 nt, Human adenovirus A
cugcuaugugcaaaua

SEQ ID NO: 1537686 - RNA, 17 nt, Human adenovirus A
gcaacauagccccaggu

SEQ ID NO: 1537687 - RNA, 14 nt, Human adenovirus A
gcaagguagcauuu

SEQ ID NO: 1537688 - RNA, 14 nt, Human adenovirus A
cauccucagcuccg

SEQ ID NO: 1537689 - RNA, 12 nt, Human adenovirus A
uaguuucuccac

SEQ ID NO: 1537690 - RNA, 20 nt, Human adenovirus A
agauaacgcuaagcuuaaua

SEQ ID NO: 1537691 - RNA, 23 nt, Human adenovirus A
aagauguaugaguaagagcaaag

SEQ ID NO: 1537692 - RNA, 20 nt, Human adenovirus A
uguacagcaaucuguaaguu

SEQ ID NO: 1537693 - RNA, 18 nt, Human adenovirus A
guauaaauucuuaaacaa

SEQ ID NO: 1537694 - RNA, 13 nt, Human adenovirus A
uguugaaugaggu

SEQ ID NO: 1537695 - RNA, 12 nt, Human adenovirus A
ccaguuaaugcu

SEQ ID NO: 1537696 - RNA, 17 nt, Human adenovirus A
auccuacaaaaaguaac

SEQ ID NO: 1537697 - RNA, 18 nt, Human adenovirus A
gugaaagugaauacuuaa

SEQ ID NO: 1537698 - RNA, 21 nt, Human adenovirus A
acuaacgcuggggcacagcuu

SEQ ID NO: 1537699 - RNA, 14 nt, Human adenovirus A
cccaggcaggcgcg

SEQ ID NO: 1537700 - RNA, 23 nt, Human adenovirus A
auuaguaccgaaaaagguuuaau

SEQ ID NO: 1537701 - RNA, 13 nt, Human adenovirus A
aucagccaugugc

SEQ ID NO: 1537702 - RNA, 18 nt, Human adenovirus A
agaauuuuccgaaguacu

SEQ ID NO: 1537703 - RNA, 17 nt, Human adenovirus A
accuuggucucgcagcu

SEQ ID NO: 1537704 - RNA, 15 nt, Human adenovirus A
ucccugugcuucggc

SEQ ID NO: 1537705 - RNA, 17 nt, Human adenovirus A
agcaaaugcccugcaaa

SEQ ID NO: 1537706 - RNA, 20 nt, Human adenovirus A
acucaggauucgugggauac

SEQ ID NO: 1537707 - RNA, 21 nt, Human adenovirus A
cuauguaaguaggauagcacc

SEQ ID NO: 1537708 - RNA, 20 nt, Human adenovirus A
gagauguccuguuuaaacau

SEQ ID NO: 1537709 - RNA, 19 nt, Human adenovirus A
cacgggacccugccgcugc

SEQ ID NO: 1537710 - RNA, 17 nt, Human adenovirus A
cgcagcugcggccgcaa

SEQ ID NO: 1537711 - RNA, 17 nt, Human adenovirus A
acgcucaaagaaacagc

SEQ ID NO: 1537712 - RNA, 22 nt, Human adenovirus A
acaauccaaggaugacaacauu

SEQ ID NO: 1537713 - RNA, 16 nt, Human adenovirus A
acgggccgcagcugcg

SEQ ID NO: 1537714 - RNA, 19 nt, Human adenovirus A
cuuaguaacgcacacaaca

SEQ ID NO: 1537715 - RNA, 16 nt, Human adenovirus A
auugaaguaagcuguu

SEQ ID NO: 1537716 - RNA, 22 nt, Human adenovirus A
caaaguaauauuguagccugcu

SEQ ID NO: 1537717 - RNA, 22 nt, Human adenovirus A
ucguguuauguggcgcauccca

SEQ ID NO: 1537718 - RNA, 22 nt, Human adenovirus A
auuguaagcgauuuuccaaaug

SEQ ID NO: 1537719 - RNA, 22 nt, Human adenovirus A
guagcugaaaacaacugcacuu

SEQ ID NO: 1537720 - RNA, 22 nt, Human adenovirus A
uccugggacauaauuucccuca

SEQ ID NO: 1537721 - RNA, 21 nt, Human adenovirus A
ccugauaacaagaacaccuac

SEQ ID NO: 1537722 - RNA, 20 nt, Human adenovirus A
uaccaauacuguuaccaaug

SEQ ID NO: 1537723 - RNA, 15 nt, Human adenovirus A
gcagaugauagagau

SEQ ID NO: 1537724 - RNA, 13 nt, Human adenovirus A
accaacaaacacg

SEQ ID NO: 1537725 - RNA, 22 nt, Human adenovirus A
cuaguccguuuucuucuugagc

SEQ ID NO: 1537726 - RNA, 16 nt, Human adenovirus A
caagcggcgaaggccu

SEQ ID NO: 1537727 - RNA, 12 nt, Human adenovirus A
uagcgccagagg

SEQ ID NO: 1537728 - RNA, 15 nt, Human adenovirus A
cuacgcugguaacua

SEQ ID NO: 1537729 - RNA, 18 nt, Human adenovirus A
gaaggguggggugcugcc

SEQ ID NO: 1537730 - RNA, 20 nt, Human adenovirus A
uaaagcuuuugcuaaauugg

SEQ ID NO: 1537731 - RNA, 21 nt, Human adenovirus A
gccaguucguacgcguccacc

SEQ ID NO: 1537732 - RNA, 21 nt, Human adenovirus A
auacacauaaagagucucaaa

SEQ ID NO: 1537733 - RNA, 19 nt, Human adenovirus A
guucaauaaauacugcucc

SEQ ID NO: 1537734 - RNA, 22 nt, Human adenovirus A
augcgacguuuuguuaccugug

SEQ ID NO: 1537735 - RNA, 17 nt, Human adenovirus A
auaccaugauggagugg

SEQ ID NO: 1537736 - RNA, 18 nt, Human adenovirus A
auggagugcuggaaagug

SEQ ID NO: 1537737 - RNA, 16 nt, Human adenovirus A
acuauucggaaaccau

SEQ ID NO: 1537738 - RNA, 18 nt, Human adenovirus A
caggucccguaaaauaca

SEQ ID NO: 1537739 - RNA, 17 nt, Human adenovirus A
gaagcugagcaaugcua

SEQ ID NO: 1537740 - RNA, 17 nt, Human adenovirus A
ucuuuacaacuguaugc

SEQ ID NO: 1537741 - RNA, 16 nt, Human adenovirus A
cugaaggcauuuaagg

SEQ ID NO: 1537742 - RNA, 16 nt, Human adenovirus A
cuaaaccaagccaugc

SEQ ID NO: 1537743 - RNA, 14 nt, Human adenovirus A
cuuacauuauguaa

SEQ ID NO: 1537744 - RNA, 19 nt, Human adenovirus A
gcgcugcaucguaaacaac

SEQ ID NO: 1537745 - RNA, 18 nt, Human adenovirus A
uuucaaaauaaacaucuc

SEQ ID NO: 1537746 - RNA, 22 nt, Human adenovirus A
aacaguacaaagccaggcacag

SEQ ID NO: 1537747 - RNA, 16 nt, Human adenovirus A
cauuauguaaagucag

SEQ ID NO: 1537748 - RNA, 13 nt, Human adenovirus A
ggagguggcugga

SEQ ID NO: 1537749 - RNA, 14 nt, Human adenovirus A
auaccaaaaacacc

SEQ ID NO: 1537750 - RNA, 14 nt, Human adenovirus A
cuacacaacacaaa

SEQ ID NO: 1537751 - RNA, 23 nt, Human adenovirus A
ugcuaagggacaaguuaaaagac

SEQ ID NO: 1537752 - RNA, 13 nt, Human adenovirus A
guagagucuuuuu

SEQ ID NO: 1537753 - RNA, 12 nt, Human adenovirus A
uagauuucuuga

SEQ ID NO: 1537754 - RNA, 15 nt, Human adenovirus A
auacagauuuaaggg

SEQ ID NO: 1537755 - RNA, 16 nt, Human adenovirus A
cggaggaaagggcuga

SEQ ID NO: 1537756 - RNA, 18 nt, Human adenovirus A
aaaagcuuuaauaaccau

SEQ ID NO: 1537757 - RNA, 23 nt, Human adenovirus A
accgugaauauuaaaaagcucug

SEQ ID NO: 1537758 - RNA, 23 nt, Human adenovirus A
uuaguccugcaguuauuggacac

SEQ ID NO: 1537759 - RNA, 22 nt, Human adenovirus A
uacaaguuccggaguucccaca

SEQ ID NO: 1537760 - RNA, 17 nt, Human adenovirus A
uaaaaaggaagcaggug

SEQ ID NO: 1537761 - RNA, 14 nt, Human adenovirus A
uacgguggcagcca

SEQ ID NO: 1537762 - RNA, 13 nt, Human adenovirus A
ccacccccagugc

SEQ ID NO: 1537763 - RNA, 15 nt, Human adenovirus A
auacucuuuaacauu

SEQ ID NO: 1537764 - RNA, 14 nt, Human adenovirus A
cgaaaacagucugc

SEQ ID NO: 1537765 - RNA, 13 nt, Human adenovirus A
auauaguacugcu

SEQ ID NO: 1537766 - RNA, 15 nt, Human adenovirus A
caacacaaaaaaaac

SEQ ID NO: 1537767 - RNA, 15 nt, Human adenovirus A
cugugcuucggcaag

SEQ ID NO: 1537768 - RNA, 23 nt, Human adenovirus A
agcaaagccauccgcaaagauga

SEQ ID NO: 1537769 - RNA, 15 nt, Human adenovirus A
guacacuaaugaggc

SEQ ID NO: 1537770 - RNA, 19 nt, Human adenovirus A
gcuuaauaccuuugcucag

SEQ ID NO: 1537771 - RNA, 14 nt, Human adenovirus A
auaaagaaaaaacu

SEQ ID NO: 1537772 - RNA, 14 nt, Human adenovirus A
gagucucaaaagca

SEQ ID NO: 1537773 - RNA, 22 nt, Human adenovirus A
cuggaaaacauaugcacaagag

SEQ ID NO: 1537774 - RNA, 19 nt, Human adenovirus A
cauccguggcaggccaucu

SEQ ID NO: 1537775 - RNA, 18 nt, Human adenovirus A
aauuacuugaacaacuuu

SEQ ID NO: 1537776 - RNA, 24 nt, Human adenovirus A
gaaucccucgcccgcacagucacu

SEQ ID NO: 1537777 - RNA, 23 nt, Human adenovirus A
acuacccggcgauugauaucuug

SEQ ID NO: 1537778 - RNA, 20 nt, Human adenovirus A
gaugaaaaacgagcagcaaa

SEQ ID NO: 1537779 - RNA, 17 nt, Human adenovirus A
gugcgcguacgcggaca

SEQ ID NO: 1537780 - RNA, 20 nt, Human adenovirus A
cggcuugagcaaaaauguuu

SEQ ID NO: 1537781 - RNA, 21 nt, Human adenovirus A
gcagcaaugcuuggaagaaaa

SEQ ID NO: 1537782 - RNA, 21 nt, Human adenovirus A
aggaaagacagccaagaccag

SEQ ID NO: 1537783 - RNA, 21 nt, Human adenovirus A
cagcaaagaaaguucaccucc

SEQ ID NO: 1537784 - RNA, 22 nt, Human adenovirus A
uaacaaccucccgauaccaaaa

SEQ ID NO: 1537785 - RNA, 21 nt, Human adenovirus A
gcugucucuaccucaaaagcg

SEQ ID NO: 1537786 - RNA, 15 nt, Human adenovirus A
cuguucauauuguga

SEQ ID NO: 1537787 - RNA, 18 nt, Human adenovirus A
accacggccucagcagcg

SEQ ID NO: 1537788 - RNA, 13 nt, Human adenovirus A
agagcaggcugga

SEQ ID NO: 1537789 - RNA, 16 nt, Human adenovirus A
agcgcaacagcgcaug

SEQ ID NO: 1537790 - RNA, 18 nt, Human adenovirus A
aaucaggcuguacagaaa

SEQ ID NO: 1537791 - RNA, 14 nt, Human adenovirus A
ccagcucuuuugga

SEQ ID NO: 1537792 - RNA, 20 nt, Human adenovirus A
ucguacuuaaaaaaacaaaa

SEQ ID NO: 1537793 - RNA, 20 nt, Human adenovirus A
ccaauuuguggaggaauuua

SEQ ID NO: 1537794 - RNA, 19 nt, Human adenovirus A
ucuggaucuucaaacaccu

SEQ ID NO: 1537795 - RNA, 11 nt, Human adenovirus A
acaggaagagc

SEQ ID NO: 1537796 - RNA, 18 nt, Human adenovirus A
gcuaaucaccucgcucca

SEQ ID NO: 1537797 - RNA, 22 nt, Human adenovirus A
gaccaaacgcaaguucaaagaa

SEQ ID NO: 1537798 - RNA, 20 nt, Human adenovirus A
gucccgcccgcguuuggaaa

SEQ ID NO: 1537799 - RNA, 14 nt, Human adenovirus A
augggcaccuggaa

SEQ ID NO: 1537800 - RNA, 23 nt, Human adenovirus A
cguagcaguaucaguggaguuca

SEQ ID NO: 1537801 - RNA, 18 nt, Human adenovirus A
cagacgacuuaaaauaca

SEQ ID NO: 1537802 - RNA, 23 nt, Human adenovirus A
agaggagaaggaggaggagcgga

SEQ ID NO: 1537803 - RNA, 14 nt, Human adenovirus A
aaauuccugugcaa

SEQ ID NO: 1537804 - RNA, 17 nt, Human adenovirus A
uaacgaggugcagcugc

SEQ ID NO: 1537805 - RNA, 22 nt, Human adenovirus A
ccaguguuagucgcgcacuggg

SEQ ID NO: 1537806 - RNA, 18 nt, Human adenovirus A
caggcggucugccauucc

SEQ ID NO: 1537807 - RNA, 20 nt, Human adenovirus A
agacuccccccgaggaauuu

SEQ ID NO: 1537808 - RNA, 22 nt, Human adenovirus A
gauuacaugucaaugcagcugu

SEQ ID NO: 1537809 - RNA, 14 nt, Human adenovirus A
ccagguaauuuuca

SEQ ID NO: 1537810 - RNA, 16 nt, Human adenovirus A
caaucaaauagcucuu

SEQ ID NO: 1537811 - RNA, 18 nt, Human adenovirus A
gguacuuuuccuugugga

SEQ ID NO: 1537812 - RNA, 14 nt, Human adenovirus A
gagcggcugacaga

SEQ ID NO: 1537813 - RNA, 14 nt, Human adenovirus A
auugucacauuaca

SEQ ID NO: 1537814 - RNA, 14 nt, Human adenovirus A
ccaggggugguggg

SEQ ID NO: 1537815 - RNA, 13 nt, Human adenovirus A
ggcacaacagacu

SEQ ID NO: 1537816 - RNA, 18 nt, Human adenovirus A
gacacggcacgcggccgu

SEQ ID NO: 1537817 - RNA, 21 nt, Human adenovirus A
aauauuguagccugcuuucag

SEQ ID NO: 1537818 - RNA, 14 nt, Human adenovirus A
gucuugccugcgga

SEQ ID NO: 1537819 - RNA, 13 nt, Human adenovirus A
acagaaauacaga

SEQ ID NO: 1537820 - RNA, 19 nt, Human adenovirus A
uucaacaggcgggaaaagu

SEQ ID NO: 1537821 - RNA, 14 nt, Human adenovirus A
caacuuaacaaauu

SEQ ID NO: 1537822 - RNA, 19 nt, Human adenovirus A
agaagcuuauguacauaau

SEQ ID NO: 1537823 - RNA, 20 nt, Human adenovirus A
cgcagcaacgcucaaagaaa

SEQ ID NO: 1537824 - RNA, 23 nt, Human adenovirus A
caagucuucugacauugcuucau

SEQ ID NO: 1537825 - RNA, 18 nt, Human adenovirus A
aaauacugcucccucucg

SEQ ID NO: 1537826 - RNA, 16 nt, Human adenovirus A
cuucaauuugccuaaa

SEQ ID NO: 1537827 - RNA, 14 nt, Human adenovirus A
uacaugccgcaaau

SEQ ID NO: 1537828 - RNA, 14 nt, Human adenovirus A
auuucccucuuccc

SEQ ID NO: 1537829 - RNA, 17 nt, Human adenovirus A
ggcguacacuggcuggc

SEQ ID NO: 1537830 - RNA, 21 nt, Human adenovirus A
caaagguaaugagcgcaguga

SEQ ID NO: 1537831 - RNA, 20 nt, Human adenovirus A
accucccgauaccaaaaaca

SEQ ID NO: 1537832 - RNA, 17 nt, Human adenovirus A
augacaaugaauaagcc

SEQ ID NO: 1537833 - RNA, 16 nt, Human adenovirus A
cuugauccccaaaccg

SEQ ID NO: 1537834 - RNA, 16 nt, Human adenovirus A
uugucauuacugacca

SEQ ID NO: 1537835 - RNA, 17 nt, Human adenovirus A
ggaggaagcugaggaaa

SEQ ID NO: 1537836 - RNA, 16 nt, Human adenovirus A
gcgcucaaaggcaggc

SEQ ID NO: 1537837 - RNA, 23 nt, Human adenovirus A
cuugguacccgccagugcuuuca

SEQ ID NO: 1537838 - RNA, 15 nt, Human adenovirus A
gcaaacucagcccau

SEQ ID NO: 1537839 - RNA, 17 nt, Human adenovirus A
ugguugggaacagacaa

SEQ ID NO: 1537840 - RNA, 22 nt, Human adenovirus A
cuuuagguuagccugaaaaaua

SEQ ID NO: 1537841 - RNA, 13 nt, Human adenovirus A
cguuuucugcagc

SEQ ID NO: 1537842 - RNA, 17 nt, Human adenovirus A
gccauuccugcagcacu

SEQ ID NO: 1537843 - RNA, 21 nt, Human adenovirus A
ccugucuacaaaucuuucaau

SEQ ID NO: 1537844 - RNA, 22 nt, Human adenovirus A
uaaauacugguauuuaaaaucu

SEQ ID NO: 1537845 - RNA, 13 nt, Human adenovirus A
uguaaguaggaua

SEQ ID NO: 1537846 - RNA, 13 nt, Human adenovirus A
cuuuauugccuua

SEQ ID NO: 1537847 - RNA, 20 nt, Human adenovirus A
ucaacagaaucaaucucagu

SEQ ID NO: 1537848 - RNA, 22 nt, Human adenovirus A
aggcgcuugcgcguugaacccg

SEQ ID NO: 1537849 - RNA, 22 nt, Human adenovirus A
gagcccuauccgucuccagcua

SEQ ID NO: 1537850 - RNA, 17 nt, Human adenovirus A
aagcagccauaaugccu

SEQ ID NO: 1537851 - RNA, 20 nt, Human adenovirus A
ccagagcaccccuucccacc

SEQ ID NO: 1537852 - RNA, 10 nt, Human adenovirus A
cacaaggucu

SEQ ID NO: 1537853 - RNA, 16 nt, Human adenovirus A
ggaaccccaaaucgca

SEQ ID NO: 1537854 - RNA, 13 nt, Human adenovirus A
gucagacuauuac

SEQ ID NO: 1537855 - RNA, 15 nt, Human adenovirus A
caauaaaaaaaacag

SEQ ID NO: 1537856 - RNA, 11 nt, Human adenovirus A
ggaaaugaggc

SEQ ID NO: 1537857 - RNA, 18 nt, Human adenovirus A
ucaguacacuuuaaaugc

SEQ ID NO: 1537858 - RNA, 13 nt, Human adenovirus A
uuacgcuggcugu

SEQ ID NO: 1537859 - RNA, 20 nt, Human adenovirus A
auauuaaaaagcucuguaag

SEQ ID NO: 1537860 - RNA, 22 nt, Human adenovirus A
caucagacguacccuuuguuac

SEQ ID NO: 1537861 - RNA, 13 nt, Human adenovirus A
uaucagccagagc

SEQ ID NO: 1537862 - RNA, 15 nt, Human adenovirus A
cacuacgcccacuuc

SEQ ID NO: 1537863 - RNA, 19 nt, Human adenovirus A
gaagcgcgugucuucuccc

SEQ ID NO: 1537864 - RNA, 22 nt, Human adenovirus A
cacaugauggaucuggagccac

SEQ ID NO: 1537865 - RNA, 13 nt, Human adenovirus A
gcgcggccagagc

SEQ ID NO: 1537866 - RNA, 23 nt, Human adenovirus A
aagcgguaugucggccugacgcu

SEQ ID NO: 1537867 - RNA, 14 nt, Human adenovirus A
cagcggggaggaag

SEQ ID NO: 1537868 - RNA, 21 nt, Human adenovirus A
ccaugguaaaaaggaagcagg

SEQ ID NO: 1537869 - RNA, 16 nt, Human adenovirus A
agcugcugcaggccuu

SEQ ID NO: 1537870 - RNA, 23 nt, Human adenovirus A
acauacaacuugcacaaauggac

SEQ ID NO: 1537871 - RNA, 17 nt, Human adenovirus A
agauguaaaggaggcgc

SEQ ID NO: 1537872 - RNA, 22 nt, Human adenovirus A
agcaucccagcugacauacacu

SEQ ID NO: 1537873 - RNA, 22 nt, Human adenovirus A
ccugaugcuuuucgccagcagc

SEQ ID NO: 1537874 - RNA, 22 nt, Human adenovirus A
caacggaugaaagcuuagccuu

SEQ ID NO: 1537875 - RNA, 19 nt, Human adenovirus A
gaagugccucaaagugaag

SEQ ID NO: 1537876 - RNA, 17 nt, Human adenovirus A
cuuuuuucuuacaguau

SEQ ID NO: 1537877 - RNA, 16 nt, Human adenovirus A
augcgggcagccaggc

SEQ ID NO: 1537878 - RNA, 15 nt, Human adenovirus A
ggacaguagcugcag

SEQ ID NO: 1537879 - RNA, 15 nt, Human adenovirus A
caaaguaauauugua

SEQ ID NO: 1537880 - RNA, 20 nt, Human adenovirus A
aacgaccgccuuuucuagaa

SEQ ID NO: 1537881 - RNA, 22 nt, Human adenovirus A
agggcaaccacggccucagcag

SEQ ID NO: 1537882 - RNA, 15 nt, Human adenovirus A
caggaggacacuggc

SEQ ID NO: 1537883 - RNA, 22 nt, Human adenovirus A
caacauccuuuuucuacaggca

SEQ ID NO: 1537884 - RNA, 15 nt, Human adenovirus A
acuuaccccugggcu

SEQ ID NO: 1537885 - RNA, 14 nt, Human adenovirus A
cauggcugaagagg

SEQ ID NO: 1537886 - RNA, 17 nt, Human adenovirus A
cagugagugaaucugug

SEQ ID NO: 1537887 - RNA, 15 nt, Human adenovirus A
uuggccagcugcccu

SEQ ID NO: 1537888 - RNA, 14 nt, Human adenovirus A
ugcucuggacaugg

SEQ ID NO: 1537889 - RNA, 16 nt, Human adenovirus A
ucaccguuguacgaua

SEQ ID NO: 1537890 - RNA, 23 nt, Human adenovirus A
cuuguuuccagugcgcgacaaaa

SEQ ID NO: 1537891 - RNA, 13 nt, Human adenovirus A
acaguagcugcag

SEQ ID NO: 1537892 - RNA, 16 nt, Human adenovirus A
uggacguuaguaacaa

SEQ ID NO: 1537893 - RNA, 15 nt, Human adenovirus A
acucuaacugcucag

SEQ ID NO: 1537894 - RNA, 18 nt, Human adenovirus A
cgcagcugcggccgcaac

SEQ ID NO: 1537895 - RNA, 17 nt, Human adenovirus A
ugggaagggcaaaagua

SEQ ID NO: 1537896 - RNA, 22 nt, Human adenovirus A
gcgaagaguuuuuacuuaaaaa

SEQ ID NO: 1537897 - RNA, 14 nt, Human adenovirus A
caacuuacagcuag

SEQ ID NO: 1537898 - RNA, 13 nt, Human adenovirus A
accacaucuuugg

SEQ ID NO: 1537899 - RNA, 15 nt, Human adenovirus A
cugcugcauugccac

SEQ ID NO: 1537900 - RNA, 21 nt, Human adenovirus A
ccuccuggaggucuccauguc

SEQ ID NO: 1537901 - RNA, 17 nt, Human adenovirus A
ggaagcaauaaaacaag

SEQ ID NO: 1537902 - RNA, 13 nt, Human adenovirus A
uguauaaaaucau

SEQ ID NO: 1537903 - RNA, 19 nt, Human adenovirus A
ugguacgcauucaccagcc

SEQ ID NO: 1537904 - RNA, 21 nt, Human adenovirus A
cacaguuuaacacauacagua

SEQ ID NO: 1537905 - RNA, 12 nt, Human adenovirus A
uuucaagaaagg

SEQ ID NO: 1537906 - RNA, 14 nt, Human adenovirus A
uguaaccagcuggg

SEQ ID NO: 1537907 - RNA, 13 nt, Human adenovirus A
accuagguuuaaa

SEQ ID NO: 1537908 - RNA, 17 nt, Human adenovirus A
gaaggguggggugcugc

SEQ ID NO: 1537909 - RNA, 17 nt, Human adenovirus A
cuggaacuuaacaacug

SEQ ID NO: 1537910 - RNA, 18 nt, Human adenovirus A
cagugccagaagcacugg

SEQ ID NO: 1537911 - RNA, 20 nt, Human adenovirus A
cgggagcaggaacagaggac

SEQ ID NO: 1537912 - RNA, 19 nt, Human adenovirus A
cuucagcguccaugaaugu

SEQ ID NO: 1537913 - RNA, 13 nt, Human adenovirus A
agaggaggguuug

SEQ ID NO: 1537914 - RNA, 21 nt, Human adenovirus A
uaaaaaccaucuuacauacca

SEQ ID NO: 1537915 - RNA, 19 nt, Human adenovirus A
agcuucagaugacuggaca

SEQ ID NO: 1537916 - RNA, 11 nt, Human adenovirus A
guuccaaggac

SEQ ID NO: 1537917 - RNA, 22 nt, Human adenovirus A
uggcagcaaugcuuggaagaaa

SEQ ID NO: 1537918 - RNA, 12 nt, Human adenovirus A
gguauucagcug

SEQ ID NO: 1537919 - RNA, 19 nt, Human adenovirus A
cugcuagaacaagccgcuc

SEQ ID NO: 1537920 - RNA, 16 nt, Human adenovirus A
aggcaauuucugccau

SEQ ID NO: 1537921 - RNA, 12 nt, Human adenovirus A
cauugaaaccag

SEQ ID NO: 1537922 - RNA, 15 nt, Human adenovirus A
acacuuuccgccaug

SEQ ID NO: 1537923 - RNA, 16 nt, Human adenovirus A
gaaccuuucaagaaag

SEQ ID NO: 1537924 - RNA, 13 nt, Human adenovirus A
aacaacaaaacac

SEQ ID NO: 1537925 - RNA, 13 nt, Human adenovirus A
accuuuaacggaa

SEQ ID NO: 1537926 - RNA, 12 nt, Human adenovirus A
accaaacugcag

SEQ ID NO: 1537927 - RNA, 22 nt, Human adenovirus A
uacacuuuaaaugcggaagaag

SEQ ID NO: 1537928 - RNA, 14 nt, Human adenovirus A
gcuacaucuuuuac

SEQ ID NO: 1537929 - RNA, 14 nt, Human adenovirus A
aguccaauuucguu

SEQ ID NO: 1537930 - RNA, 14 nt, Human adenovirus A
aguacaaauuuuuc

SEQ ID NO: 1537931 - RNA, 16 nt, Human adenovirus A
gccguccagcagugcg

SEQ ID NO: 1537932 - RNA, 18 nt, Human adenovirus A
gaccaauuaacaguuugc

SEQ ID NO: 1537933 - RNA, 22 nt, Human adenovirus A
cugcuaaucaccucgcuccaau

SEQ ID NO: 1537934 - RNA, 19 nt, Human adenovirus A
ucccaugagcuccugaaag

SEQ ID NO: 1537935 - RNA, 15 nt, Human adenovirus A
aggaaugucuucacu

SEQ ID NO: 1537936 - RNA, 12 nt, Human adenovirus A
uuagacagagca

SEQ ID NO: 1537937 - RNA, 19 nt, Human adenovirus A
gguugauuuuacagagagc

SEQ ID NO: 1537938 - RNA, 23 nt, Human adenovirus A
gcugaagaggaggguuugcauuu

SEQ ID NO: 1537939 - RNA, 11 nt, Human adenovirus A
aaggaaaguaa

SEQ ID NO: 1537940 - RNA, 16 nt, Human adenovirus A
uguccccgaaagccgc

SEQ ID NO: 1537941 - RNA, 20 nt, Human adenovirus A
gcagcaacggcaggaaaucu

SEQ ID NO: 1537942 - RNA, 16 nt, Human adenovirus A
cagagcaccccuuccc

SEQ ID NO: 1537943 - RNA, 21 nt, Human adenovirus A
uuacagaggaacguaacuuuc

SEQ ID NO: 1537944 - RNA, 22 nt, Human adenovirus A
uggaacaacaggugcaagaagg

SEQ ID NO: 1537945 - RNA, 19 nt, Human adenovirus A
ucgagaucuaggcugugga

SEQ ID NO: 1537946 - RNA, 20 nt, Human adenovirus A
ugcauauauccuugcaaaaa

SEQ ID NO: 1537947 - RNA, 12 nt, Human adenovirus A
auacugggugcg

SEQ ID NO: 1537948 - RNA, 15 nt, Human adenovirus A
auuauuugugugcug

SEQ ID NO: 1537949 - RNA, 20 nt, Human adenovirus A
acaaagcacugggcauaguu

SEQ ID NO: 1537950 - RNA, 20 nt, Human adenovirus A
cauaacaucaggagcagaaa

SEQ ID NO: 1537951 - RNA, 20 nt, Human adenovirus A
aaccagagcaccccuuccca

SEQ ID NO: 1537952 - RNA, 15 nt, Human adenovirus A
ucauccucagcuccg

SEQ ID NO: 1537953 - RNA, 13 nt, Human adenovirus A
uggauccaaugga

SEQ ID NO: 1537954 - RNA, 20 nt, Human adenovirus A
gcuguugggacagcaagcag

SEQ ID NO: 1537955 - RNA, 23 nt, Human adenovirus A
ggagugucacugccgcugcaauc

SEQ ID NO: 1537956 - RNA, 19 nt, Human adenovirus A
gucagugaagcaaaccaca

SEQ ID NO: 1537957 - RNA, 22 nt, Human adenovirus A
aaugucuguuauguaugcccag

SEQ ID NO: 1537958 - RNA, 20 nt, Human adenovirus A
acaauaguuuaauguuuccc

SEQ ID NO: 1537959 - RNA, 14 nt, Human adenovirus A
auuucuagaaauuu

SEQ ID NO: 1537960 - RNA, 15 nt, Human adenovirus A
ggggauugggaaggg

SEQ ID NO: 1537961 - RNA, 21 nt, Human adenovirus A
ccuuguggaauuccgcagugg

SEQ ID NO: 1537962 - RNA, 17 nt, Human adenovirus A
guaagaaccaagcauau

SEQ ID NO: 1537963 - RNA, 19 nt, Human adenovirus A
cugcagacaguggcuuuuc

SEQ ID NO: 1537964 - RNA, 21 nt, Human adenovirus A
uguuuacuucaauccuuuuuc

SEQ ID NO: 1537965 - RNA, 17 nt, Human adenovirus A
caaggcauuggaaagca

SEQ ID NO: 1537966 - RNA, 16 nt, Human adenovirus A
ucagcuaacaaugcag

SEQ ID NO: 1537967 - RNA, 18 nt, Human adenovirus A
gaauggaugcgcuccugg

SEQ ID NO: 1537968 - RNA, 19 nt, Human adenovirus A
uacuguugcuaauugcccc

SEQ ID NO: 1537969 - RNA, 14 nt, Human adenovirus A
uguauacugggugc

SEQ ID NO: 1537970 - RNA, 16 nt, Human adenovirus A
ccuggagcuguccaug

SEQ ID NO: 1537971 - RNA, 22 nt, Human adenovirus A
gguuagaacuuucuaaggugug

SEQ ID NO: 1537972 - RNA, 16 nt, Human adenovirus A
ugugcugcaaaguuuu

SEQ ID NO: 1537973 - RNA, 21 nt, Human adenovirus A
uggaccuacuuacuggggugc

SEQ ID NO: 1537974 - RNA, 20 nt, Human adenovirus A
ccuacuguuaccaauggaac

SEQ ID NO: 1537975 - RNA, 20 nt, Human adenovirus A
uguacagaaaaaaauugcca

SEQ ID NO: 1537976 - RNA, 19 nt, Human adenovirus A
aaaugcccugcaaaaagaa

SEQ ID NO: 1537977 - RNA, 19 nt, Human adenovirus A
uccagaaaguaucugccca

SEQ ID NO: 1537978 - RNA, 22 nt, Human adenovirus A
cuuaaagaguaaaaaaagcccg

SEQ ID NO: 1537979 - RNA, 22 nt, Human adenovirus A
gugaaucgcagucaccaccagc

SEQ ID NO: 1537980 - RNA, 17 nt, Human adenovirus A
accaguacgaggacuga

SEQ ID NO: 1537981 - RNA, 22 nt, Human adenovirus A
gguuuguggggugucugaucaa

SEQ ID NO: 1537982 - RNA, 13 nt, Human adenovirus A
agcauuauuugcg

SEQ ID NO: 1537983 - RNA, 18 nt, Human adenovirus A
auugaagggaauggcuau

SEQ ID NO: 1537984 - RNA, 15 nt, Human adenovirus A
aagguguugagcccg

SEQ ID NO: 1537985 - RNA, 12 nt, Human adenovirus A
uucaacuuuguc

SEQ ID NO: 1537986 - RNA, 16 nt, Human adenovirus A
ccuacuucacccuggg

SEQ ID NO: 1537987 - RNA, 14 nt, Human adenovirus A
aucauauacauaua

SEQ ID NO: 1537988 - RNA, 13 nt, Human adenovirus A
agauaaguuuaaa

SEQ ID NO: 1537989 - RNA, 20 nt, Human adenovirus A
uucaccgcgcugcggccaug

SEQ ID NO: 1537990 - RNA, 14 nt, Human adenovirus A
guaugcucaaacag

SEQ ID NO: 1537991 - RNA, 22 nt, Human adenovirus A
cagcaaagaaaguucaccucca

SEQ ID NO: 1537992 - RNA, 14 nt, Human adenovirus A
cucuuuucuuuacc

SEQ ID NO: 1537993 - RNA, 17 nt, Human adenovirus A
cgcgcaagcuuucauug

SEQ ID NO: 1537994 - RNA, 23 nt, Human adenovirus A
cuaagacuuaccccugggcuuug

SEQ ID NO: 1537995 - RNA, 18 nt, Human adenovirus A
aaaguacccuaaacagua

SEQ ID NO: 1537996 - RNA, 20 nt, Human adenovirus A
ccaaucaggcuguacagaaa

SEQ ID NO: 1537997 - RNA, 13 nt, Human adenovirus A
gagccacagcucu

SEQ ID NO: 1537998 - RNA, 14 nt, Human adenovirus A
uauuaacuuuauau

SEQ ID NO: 1537999 - RNA, 16 nt, Human adenovirus A
caaaggugcuucccac

SEQ ID NO: 1538000 - RNA, 17 nt, Human adenovirus A
acuggauuugcgcacug

SEQ ID NO: 1538001 - RNA, 16 nt, Human adenovirus A
cauccguggcaggcca

SEQ ID NO: 1538002 - RNA, 13 nt, Human adenovirus A
aagcgcaauauug

SEQ ID NO: 1538003 - RNA, 15 nt, Human adenovirus A
guuaucuucaaauca

SEQ ID NO: 1538004 - RNA, 15 nt, Human adenovirus A
caauaaauacugcuc

SEQ ID NO: 1538005 - RNA, 17 nt, Human adenovirus A
cauaguucuugauuuag

SEQ ID NO: 1538006 - RNA, 21 nt, Human adenovirus A
cauuaagaacacggugaaugu

SEQ ID NO: 1538007 - RNA, 16 nt, Human adenovirus A
uuuuucccacuuuaua

SEQ ID NO: 1538008 - RNA, 12 nt, Human adenovirus A
aagaggaggguu

SEQ ID NO: 1538009 - RNA, 14 nt, Human adenovirus A
uggcuucagcauuu

SEQ ID NO: 1538010 - RNA, 14 nt, Human adenovirus A
cguugcaagaggag

SEQ ID NO: 1538011 - RNA, 21 nt, Human adenovirus A
cagauuaugguucagcuucuc

SEQ ID NO: 1538012 - RNA, 14 nt, Human adenovirus A
guccccgaaagccg

SEQ ID NO: 1538013 - RNA, 13 nt, Human adenovirus A
gcgcuccauccaa

SEQ ID NO: 1538014 - RNA, 22 nt, Human adenovirus A
gaacaaacgguuacagaggaac

SEQ ID NO: 1538015 - RNA, 14 nt, Human adenovirus A
cuccauggggcgcg

SEQ ID NO: 1538016 - RNA, 19 nt, Human adenovirus A
guguacuuuucaaacuuua

SEQ ID NO: 1538017 - RNA, 17 nt, Human adenovirus A
gucaucucuacagcccc

SEQ ID NO: 1538018 - RNA, 10 nt, Human adenovirus A
cuucugccua

SEQ ID NO: 1538019 - RNA, 22 nt, Human adenovirus A
augugcuauuguuaacacugcc

SEQ ID NO: 1538020 - RNA, 23 nt, Human adenovirus A
ugaagaagaaccuaacugucauc

SEQ ID NO: 1538021 - RNA, 21 nt, Human adenovirus A
auggaguuggaaacugugcug

SEQ ID NO: 1538022 - RNA, 20 nt, Human adenovirus A
aacagaaaguuguagauggu

SEQ ID NO: 1538023 - RNA, 21 nt, Human adenovirus A
agcugccaccucuagaaacug

SEQ ID NO: 1538024 - RNA, 17 nt, Human adenovirus A
gugccacccccagugcc

SEQ ID NO: 1538025 - RNA, 23 nt, Human adenovirus A
accuagguuuaaaucuuucugcu

SEQ ID NO: 1538026 - RNA, 17 nt, Human adenovirus A
ugggcuuauaccuacca

SEQ ID NO: 1538027 - RNA, 12 nt, Human adenovirus A
aagcaaaugcau

SEQ ID NO: 1538028 - RNA, 21 nt, Human adenovirus A
cccgacggaguguuucagcuc

SEQ ID NO: 1538029 - RNA, 15 nt, Human adenovirus A
agccaugcaaauagu

SEQ ID NO: 1538030 - RNA, 20 nt, Human adenovirus A
gaaucggcaacagcagcaac

SEQ ID NO: 1538031 - RNA, 21 nt, Human adenovirus A
ccccuaaacggcaagccaacg

SEQ ID NO: 1538032 - RNA, 16 nt, Human adenovirus A
aucggcggcgcggacg

SEQ ID NO: 1538033 - RNA, 15 nt, Human adenovirus A
auuacuugaacaacu

SEQ ID NO: 1538034 - RNA, 23 nt, Human adenovirus A
aucaaauuguaagcgauuuucca

SEQ ID NO: 1538035 - RNA, 15 nt, Human adenovirus A
uagacgaacaaacuu

SEQ ID NO: 1538036 - RNA, 14 nt, Human adenovirus A
aauacugaacuauu

SEQ ID NO: 1538037 - RNA, 11 nt, Human adenovirus A
ccucuucccaa

SEQ ID NO: 1538038 - RNA, 11 nt, Human adenovirus A
guucccacagu

SEQ ID NO: 1538039 - RNA, 16 nt, Human adenovirus A
uagcaaagccauccgc

SEQ ID NO: 1538040 - RNA, 22 nt, Human adenovirus A
cgcuguugggacagcaagcagc

SEQ ID NO: 1538041 - RNA, 22 nt, Human adenovirus A
cauuccuucagaauaaaacaag

SEQ ID NO: 1538042 - RNA, 14 nt, Human adenovirus A
ccaccucuagaaac

SEQ ID NO: 1538043 - RNA, 18 nt, Human adenovirus A
agacaaaaaaaauacuaa

SEQ ID NO: 1538044 - RNA, 14 nt, Human adenovirus A
ucuguuauguaugc

SEQ ID NO: 1538045 - RNA, 14 nt, Human adenovirus A
agucaccaccagcg

SEQ ID NO: 1538046 - RNA, 17 nt, Human adenovirus A
acaaaauaccccuaucc

SEQ ID NO: 1538047 - RNA, 15 nt, Human adenovirus A
cguaggguacagugg

SEQ ID NO: 1538048 - RNA, 13 nt, Human adenovirus A
ggaacuauuucuu

SEQ ID NO: 1538049 - RNA, 15 nt, Human adenovirus A
cuuaacccucccucu

SEQ ID NO: 1538050 - RNA, 23 nt, Human adenovirus A
uguaaccagagcaccccuuccca

SEQ ID NO: 1538051 - RNA, 16 nt, Human adenovirus A
auccuaggcaaagaaa

SEQ ID NO: 1538052 - RNA, 12 nt, Human adenovirus A
ggcaggaguugc

SEQ ID NO: 1538053 - RNA, 18 nt, Human adenovirus A
gucuacucacagcuuauu

SEQ ID NO: 1538054 - RNA, 10 nt, Human adenovirus A
cucuuuucuu

SEQ ID NO: 1538055 - RNA, 18 nt, Human adenovirus A
ccauugugcccacgccug

SEQ ID NO: 1538056 - RNA, 16 nt, Human adenovirus A
aaagcuucaauuugcc

SEQ ID NO: 1538057 - RNA, 22 nt, Human adenovirus A
aacugggggcguacacuggcug

SEQ ID NO: 1538058 - RNA, 18 nt, Human adenovirus A
aagaucaaggaaauacua

SEQ ID NO: 1538059 - RNA, 18 nt, Human adenovirus A
aguuuggcagacaaggug

SEQ ID NO: 1538060 - RNA, 19 nt, Human adenovirus A
aagguaaugagcgcaguga

SEQ ID NO: 1538061 - RNA, 19 nt, Human adenovirus A
aaacacuguaagaggagac

SEQ ID NO: 1538062 - RNA, 16 nt, Human adenovirus A
uaaaacuuccaacuua

SEQ ID NO: 1538063 - RNA, 17 nt, Human adenovirus A
gauguugggcccaagau

SEQ ID NO: 1538064 - RNA, 22 nt, Human adenovirus A
aacguagcuuuugacuguuccu

SEQ ID NO: 1538065 - RNA, 19 nt, Human adenovirus A
gcauauugcgcuauguaca

SEQ ID NO: 1538066 - RNA, 15 nt, Human adenovirus A
ugaagcaaaccacau

SEQ ID NO: 1538067 - RNA, 17 nt, Human adenovirus A
auggcugaagaggaggg

SEQ ID NO: 1538068 - RNA, 16 nt, Human adenovirus A
cgccaaagccacaccu

SEQ ID NO: 1538069 - RNA, 14 nt, Human adenovirus A
cugacuauuucaca

SEQ ID NO: 1538070 - RNA, 18 nt, Human adenovirus A
aucuucaucuuuucuaga

SEQ ID NO: 1538071 - RNA, 18 nt, Human adenovirus A
auucgcagcgcacuggca

SEQ ID NO: 1538072 - RNA, 20 nt, Human adenovirus A
gcuaaacgaccgccuuuucu

SEQ ID NO: 1538073 - RNA, 16 nt, Human adenovirus A
ccaaggaugacaacau

SEQ ID NO: 1538074 - RNA, 18 nt, Human adenovirus A
cuuuuauuucucuuuucu

SEQ ID NO: 1538075 - RNA, 20 nt, Human adenovirus A
cgagcucccggaggaagcgg

SEQ ID NO: 1538076 - RNA, 22 nt, Human adenovirus A
cuccgugaguuggccuggaaau

SEQ ID NO: 1538077 - RNA, 22 nt, Human adenovirus A
ugaagugccucaaagugaagug

SEQ ID NO: 1538078 - RNA, 15 nt, Human adenovirus A
cauuccccaguuuaa

SEQ ID NO: 1538079 - RNA, 11 nt, Human adenovirus A
caauguaacuu

SEQ ID NO: 1538080 - RNA, 21 nt, Human adenovirus A
ucauccgcauuuaagcaacau

SEQ ID NO: 1538081 - RNA, 13 nt, Human adenovirus A
gacagugugagug

SEQ ID NO: 1538082 - RNA, 12 nt, Human adenovirus A
ugcgggcagcca

SEQ ID NO: 1538083 - RNA, 22 nt, Human adenovirus A
aggaacuaaaccuuccaucacc

SEQ ID NO: 1538084 - RNA, 13 nt, Human adenovirus A
caacgacuaaaac

SEQ ID NO: 1538085 - RNA, 19 nt, Human adenovirus A
accacucugacacaaaagc

SEQ ID NO: 1538086 - RNA, 18 nt, Human adenovirus A
uuccggaguucccacaga

SEQ ID NO: 1538087 - RNA, 21 nt, Human adenovirus A
augcgcccggaacuauuucuu

SEQ ID NO: 1538088 - RNA, 15 nt, Human adenovirus A
ugagugggcagaauu

SEQ ID NO: 1538089 - RNA, 15 nt, Human adenovirus A
accccaaaagcccgc

SEQ ID NO: 1538090 - RNA, 14 nt, Human adenovirus A
ucuuuugcagcucc

SEQ ID NO: 1538091 - RNA, 17 nt, Human adenovirus A
cagccguuucaggaagg

SEQ ID NO: 1538092 - RNA, 22 nt, Human adenovirus A
acagcuucuaaaagagccacag

SEQ ID NO: 1538093 - RNA, 11 nt, Human adenovirus A
cuaacaccaaa

SEQ ID NO: 1538094 - RNA, 22 nt, Human adenovirus A
cugaagaagaaccuaacuguca

SEQ ID NO: 1538095 - RNA, 11 nt, Human adenovirus A
guccuacggag

SEQ ID NO: 1538096 - RNA, 14 nt, Human adenovirus A
augcauaauuaaac

SEQ ID NO: 1538097 - RNA, 12 nt, Human adenovirus A
acaugaggcggu

SEQ ID NO: 1538098 - RNA, 16 nt, Human adenovirus A
aagcacgccaaagcca

SEQ ID NO: 1538099 - RNA, 21 nt, Human adenovirus A
aaccgucgccagcaagugccu

SEQ ID NO: 1538100 - RNA, 21 nt, Human adenovirus A
caagcggcauuccccauccaa

SEQ ID NO: 1538101 - RNA, 13 nt, Human adenovirus A
gugguauuggaac

SEQ ID NO: 1538102 - RNA, 19 nt, Human adenovirus A
uagauacaagcgacagagu

SEQ ID NO: 1538103 - RNA, 14 nt, Human adenovirus A
guacccgccagugc

SEQ ID NO: 1538104 - RNA, 15 nt, Human adenovirus A
uguaaaaugggaaau

SEQ ID NO: 1538105 - RNA, 14 nt, Human adenovirus A
ccgcgaucagccau

SEQ ID NO: 1538106 - RNA, 13 nt, Human adenovirus A
aaggugguggcaa

SEQ ID NO: 1538107 - RNA, 14 nt, Human adenovirus A
acuauagagaggaa

SEQ ID NO: 1538108 - RNA, 23 nt, Human adenovirus A
ugguggaaaaagaucaaggaaau

SEQ ID NO: 1538109 - RNA, 15 nt, Human adenovirus A
aaaucauacaaauca

SEQ ID NO: 1538110 - RNA, 21 nt, Human adenovirus A
guaaaccuugaaaugccagac

SEQ ID NO: 1538111 - RNA, 18 nt, Human adenovirus A
ccacagccagugggucca

SEQ ID NO: 1538112 - RNA, 14 nt, Human adenovirus A
acgagacucccccc

SEQ ID NO: 1538113 - RNA, 15 nt, Human adenovirus A
uuacugguacuauga

SEQ ID NO: 1538114 - RNA, 23 nt, Human adenovirus A
auacacucauguauuuuuucaaa

SEQ ID NO: 1538115 - RNA, 16 nt, Human adenovirus A
cauugaaaccagcgcc

SEQ ID NO: 1538116 - RNA, 15 nt, Human adenovirus A
aucucagaaagccaa

SEQ ID NO: 1538117 - RNA, 14 nt, Human adenovirus A
aagagcugcugcag

SEQ ID NO: 1538118 - RNA, 18 nt, Human adenovirus A
cacugcuuugcucgagac

SEQ ID NO: 1538119 - RNA, 20 nt, Human adenovirus A
ucggcacgagccagcugaac

SEQ ID NO: 1538120 - RNA, 15 nt, Human adenovirus A
ucgcuuuugccagac

SEQ ID NO: 1538121 - RNA, 18 nt, Human adenovirus A
cuugguguuucaggaaaa

SEQ ID NO: 1538122 - RNA, 22 nt, Human adenovirus A
aguaaaucuuccgccaaaggua

SEQ ID NO: 1538123 - RNA, 21 nt, Human adenovirus A
aggcagccguuucaggaagga

SEQ ID NO: 1538124 - RNA, 16 nt, Human adenovirus A
acuuucaaaaaagcuu

SEQ ID NO: 1538125 - RNA, 17 nt, Human adenovirus A
guaaauucaguagauuu

SEQ ID NO: 1538126 - RNA, 13 nt, Human adenovirus A
uaaaaacacacac

SEQ ID NO: 1538127 - RNA, 16 nt, Human adenovirus A
ccaguuuaaaggcugu

SEQ ID NO: 1538128 - RNA, 12 nt, Human adenovirus A
aauuaacugcac

SEQ ID NO: 1538129 - RNA, 14 nt, Human adenovirus A
gccuccgcugugcu

SEQ ID NO: 1538130 - RNA, 16 nt, Human adenovirus A
gucccggucuggugca

SEQ ID NO: 1538131 - RNA, 13 nt, Human adenovirus A
gacugucaguguc

SEQ ID NO: 1538132 - RNA, 13 nt, Human adenovirus A
caaaaaagcuuua

SEQ ID NO: 1538133 - RNA, 19 nt, Human adenovirus A
ccaaaauuuucaacagaaa

SEQ ID NO: 1538134 - RNA, 21 nt, Human adenovirus A
cacugguuaucgcaccucguc

SEQ ID NO: 1538135 - RNA, 19 nt, Human adenovirus A
cccaacuuugacgcaguga

SEQ ID NO: 1538136 - RNA, 16 nt, Human adenovirus A
ggcgaacaggaagagc

SEQ ID NO: 1538137 - RNA, 14 nt, Human adenovirus A
aagguguguaaaca

SEQ ID NO: 1538138 - RNA, 20 nt, Human adenovirus A
gcuuguugaauucgcaggcg

SEQ ID NO: 1538139 - RNA, 16 nt, Human adenovirus A
auugguggaaaaagau

SEQ ID NO: 1538140 - RNA, 21 nt, Human adenovirus A
gcuggaugcuuugggagacag

SEQ ID NO: 1538141 - RNA, 10 nt, Human adenovirus A
caaacagugc

SEQ ID NO: 1538142 - RNA, 23 nt, Human adenovirus A
augaggaagcaauaaaacaagga

SEQ ID NO: 1538143 - RNA, 23 nt, Human adenovirus A
gucuucguacuuaaaaaaacaaa

SEQ ID NO: 1538144 - RNA, 17 nt, Human adenovirus A
aaauguguacuugcuuu

SEQ ID NO: 1538145 - RNA, 16 nt, Human adenovirus A
gcacuggcaacauacc

SEQ ID NO: 1538146 - RNA, 22 nt, Human adenovirus A
cauaaaagcuucaauuugccua

SEQ ID NO: 1538147 - RNA, 13 nt, Human adenovirus A
auuuuaaaguaaa

SEQ ID NO: 1538148 - RNA, 14 nt, Human adenovirus A
caagccgcaggacu

SEQ ID NO: 1538149 - RNA, 16 nt, Human adenovirus A
aacgguuaagcugggu

SEQ ID NO: 1538150 - RNA, 15 nt, Human adenovirus A
cagcauuaguucuuu

SEQ ID NO: 1538151 - RNA, 21 nt, Human adenovirus A
ugaauuguauaaauucuuaaa

SEQ ID NO: 1538152 - RNA, 15 nt, Human adenovirus A
acgauuaagacauau

SEQ ID NO: 1538153 - RNA, 18 nt, Human adenovirus A
agcgucuucguacuuaaa

SEQ ID NO: 1538154 - RNA, 21 nt, Human adenovirus A
ccauuuugguuucgccaagua

SEQ ID NO: 1538155 - RNA, 23 nt, Human adenovirus A
gagcucccggaggaagcggcggu

SEQ ID NO: 1538156 - RNA, 21 nt, Human adenovirus A
gcuuggaagaaaaaaaccuuc

SEQ ID NO: 1538157 - RNA, 14 nt, Human adenovirus A
acauguuauuuaaa

SEQ ID NO: 1538158 - RNA, 19 nt, Human adenovirus A
ugccaccaguuggaagaau

SEQ ID NO: 1538159 - RNA, 12 nt, Human adenovirus A
guaugccaacaa

SEQ ID NO: 1538160 - RNA, 13 nt, Human adenovirus A
aucuccugccacc

SEQ ID NO: 1538161 - RNA, 13 nt, Human adenovirus A
acuagguauugau

SEQ ID NO: 1538162 - RNA, 17 nt, Human adenovirus A
cacuguuguauuauuug

SEQ ID NO: 1538163 - RNA, 21 nt, Human adenovirus A
aucaacgacuaaaacaaaucu

SEQ ID NO: 1538164 - RNA, 15 nt, Human adenovirus A
ucaaaguaugcugca

SEQ ID NO: 1538165 - RNA, 15 nt, Human adenovirus A
agcagagucgagguc

SEQ ID NO: 1538166 - RNA, 20 nt, Human adenovirus A
caagacguuccauggcuucg

SEQ ID NO: 1538167 - RNA, 13 nt, Human adenovirus A
cauucgcagcgca

SEQ ID NO: 1538168 - RNA, 23 nt, Human adenovirus A
uggcucaacgagagcgcuuucau

SEQ ID NO: 1538169 - RNA, 22 nt, Human adenovirus A
gacaccuacuucacccugggaa

SEQ ID NO: 1538170 - RNA, 23 nt, Human adenovirus A
ccaaaguucgccuacacaacaca

SEQ ID NO: 1538171 - RNA, 15 nt, Human adenovirus A
aacgggcagccuguc

SEQ ID NO: 1538172 - RNA, 18 nt, Human adenovirus A
aguucaaagaagagcugc

SEQ ID NO: 1538173 - RNA, 20 nt, Human adenovirus A
aaccugaucuagaaauugau

SEQ ID NO: 1538174 - RNA, 19 nt, Human adenovirus A
caagcuuaccccgccaacu

SEQ ID NO: 1538175 - RNA, 14 nt, Human adenovirus A
ugcgaccucagccc

SEQ ID NO: 1538176 - RNA, 13 nt, Human adenovirus A
ucaccaaaguaau

SEQ ID NO: 1538177 - RNA, 18 nt, Human adenovirus A
agcacaacuccaugugga

SEQ ID NO: 1538178 - RNA, 19 nt, Human adenovirus A
agacaccgcccaggcaggc

SEQ ID NO: 1538179 - RNA, 14 nt, Human adenovirus A
agguuuaauguuua

SEQ ID NO: 1538180 - RNA, 20 nt, Human adenovirus A
cugauggugccuaagcggca

SEQ ID NO: 1538181 - RNA, 19 nt, Human adenovirus A
aauggaguuggaaacugug

SEQ ID NO: 1538182 - RNA, 18 nt, Human adenovirus A
agaucuuaggguuugauu

SEQ ID NO: 1538183 - RNA, 23 nt, Human adenovirus A
ccuggcaguuuuaaagcgcaaua

SEQ ID NO: 1538184 - RNA, 22 nt, Human adenovirus A
uguacagcaaucuguaaguuug

SEQ ID NO: 1538185 - RNA, 17 nt, Human adenovirus A
uuggauaccaagguuuu

SEQ ID NO: 1538186 - RNA, 13 nt, Human adenovirus A
augcagcugugga

SEQ ID NO: 1538187 - RNA, 12 nt, Human adenovirus A
agcaccccuucc

SEQ ID NO: 1538188 - RNA, 20 nt, Human adenovirus A
gcaaaugcauuaucaugaaa

SEQ ID NO: 1538189 - RNA, 22 nt, Human adenovirus A
cgcggagacgggccgcagcugc

SEQ ID NO: 1538190 - RNA, 16 nt, Human adenovirus A
ucagaagccagcagca

SEQ ID NO: 1538191 - RNA, 14 nt, Human adenovirus A
aggcgcuccuaaug

SEQ ID NO: 1538192 - RNA, 14 nt, Human adenovirus A
gaaaugaggcgcgc

SEQ ID NO: 1538193 - RNA, 15 nt, Human adenovirus A
agaaugaucacagca

SEQ ID NO: 1538194 - RNA, 23 nt, Human adenovirus A
agcccccgcguccuccuucuguu

SEQ ID NO: 1538195 - RNA, 15 nt, Human adenovirus A
ugguacuaugacugu

SEQ ID NO: 1538196 - RNA, 19 nt, Human adenovirus A
aucaagcauguuaaaaaac

SEQ ID NO: 1538197 - RNA, 20 nt, Human adenovirus A
ccaugggaauagugcucuaa

SEQ ID NO: 1538198 - RNA, 18 nt, Human adenovirus A
gggauuguguccuuggaa

SEQ ID NO: 1538199 - RNA, 22 nt, Human adenovirus A
cuuggcuucgaaugcugugaca

SEQ ID NO: 1538200 - RNA, 20 nt, Human adenovirus A
cgcagucuuaguuuggcaga

SEQ ID NO: 1538201 - RNA, 20 nt, Human adenovirus A
auccauuuccaccaaaugcu

SEQ ID NO: 1538202 - RNA, 13 nt, Human adenovirus A
caggcaaagaaca

SEQ ID NO: 1538203 - RNA, 17 nt, Human adenovirus A
gcaccaucuccauucca

SEQ ID NO: 1538204 - RNA, 20 nt, Human adenovirus A
cauauuaggcauaaugcagc

SEQ ID NO: 1538205 - RNA, 15 nt, Human adenovirus A
gaugcuuugggagac

SEQ ID NO: 1538206 - RNA, 14 nt, Human adenovirus A
gaggucaagaacac

SEQ ID NO: 1538207 - RNA, 19 nt, Human adenovirus A
cuuaaccgcccccaccgcu

SEQ ID NO: 1538208 - RNA, 16 nt, Human adenovirus A
aagaaugggaggagga

SEQ ID NO: 1538209 - RNA, 17 nt, Human adenovirus A
augugaaggcgccagga

SEQ ID NO: 1538210 - RNA, 21 nt, Human adenovirus A
aggauugguuccuaauacaaa

SEQ ID NO: 1538211 - RNA, 15 nt, Human adenovirus A
gacuucccacagcca

SEQ ID NO: 1538212 - RNA, 21 nt, Human adenovirus A
uacaacauuggauaccaaggu

SEQ ID NO: 1538213 - RNA, 18 nt, Human adenovirus A
cuguucuuaguaggcuaa

SEQ ID NO: 1538214 - RNA, 21 nt, Human adenovirus A
auuucgauaaacaaaagcaaa

SEQ ID NO: 1538215 - RNA, 19 nt, Human adenovirus A
gcugccuccuuugccagaa

SEQ ID NO: 1538216 - RNA, 13 nt, Human adenovirus A
ccgaggaauuuga

SEQ ID NO: 1538217 - RNA, 22 nt, Human adenovirus A
aaagucagacuauuacacucag

SEQ ID NO: 1538218 - RNA, 18 nt, Human adenovirus A
uaauacuuaauuucuaga

SEQ ID NO: 1538219 - RNA, 12 nt, Human adenovirus A
acgagcaagccg

SEQ ID NO: 1538220 - RNA, 17 nt, Human adenovirus A
aaugcucuggacaugga

SEQ ID NO: 1538221 - RNA, 20 nt, Human adenovirus A
ucgcaauuagggccagcauu

SEQ ID NO: 1538222 - RNA, 12 nt, Human adenovirus A
gacuaaaacaaa

SEQ ID NO: 1538223 - RNA, 17 nt, Human adenovirus A
ugcaucguaaacaacag

SEQ ID NO: 1538224 - RNA, 19 nt, Human adenovirus A
ggcgcuuucgggcucuggc

SEQ ID NO: 1538225 - RNA, 16 nt, Human adenovirus A
gauccagaggaggagg

SEQ ID NO: 1538226 - RNA, 16 nt, Human adenovirus A
agaccaaccaccgcca

SEQ ID NO: 1538227 - RNA, 21 nt, Human adenovirus A
gcuugagcaaaaauguuuucu

SEQ ID NO: 1538228 - RNA, 18 nt, Human adenovirus A
ugccgcacggccaaugcc

SEQ ID NO: 1538229 - RNA, 20 nt, Human adenovirus A
aagcuuucauugguccaggc

SEQ ID NO: 1538230 - RNA, 12 nt, Human adenovirus A
ugacuggacagc

SEQ ID NO: 1538231 - RNA, 13 nt, Human adenovirus A
ccaggaagcugag

SEQ ID NO: 1538232 - RNA, 13 nt, Human adenovirus A
auuugucuccucu

SEQ ID NO: 1538233 - RNA, 16 nt, Human adenovirus A
ccagauuguggaauaa

SEQ ID NO: 1538234 - RNA, 22 nt, Human adenovirus A
agccauggaugaauugcagccu

SEQ ID NO: 1538235 - RNA, 14 nt, Human adenovirus A
gguaagugggugga

SEQ ID NO: 1538236 - RNA, 12 nt, Human adenovirus A
agcuaaaacaag

SEQ ID NO: 1538237 - RNA, 20 nt, Human adenovirus A
aacacggaguaaugaacaag

SEQ ID NO: 1538238 - RNA, 21 nt, Human adenovirus A
cggccuguuuuguuguauguu

SEQ ID NO: 1538239 - RNA, 15 nt, Human adenovirus A
auuaccgagcuccau

SEQ ID NO: 1538240 - RNA, 22 nt, Human adenovirus A
ccacaaggaaaugaggaggagg

SEQ ID NO: 1538241 - RNA, 17 nt, Human adenovirus A
agugcuggaaagugaca

SEQ ID NO: 1538242 - RNA, 19 nt, Human adenovirus A
aaauaaagaguuaauugau

SEQ ID NO: 1538243 - RNA, 21 nt, Human adenovirus A
cuccccuguggagccacugcu

SEQ ID NO: 1538244 - RNA, 19 nt, Human adenovirus A
cagaacgugcuacacucaa

SEQ ID NO: 1538245 - RNA, 18 nt, Human adenovirus A
aucaacgacuaaaacaaa

SEQ ID NO: 1538246 - RNA, 19 nt, Human adenovirus A
cggacgagcucccggagga

SEQ ID NO: 1538247 - RNA, 23 nt, Human adenovirus A
cauaccaguuaaugcuggaugcu

SEQ ID NO: 1538248 - RNA, 18 nt, Human adenovirus A
ccguggcucccacccaug

SEQ ID NO: 1538249 - RNA, 20 nt, Human adenovirus A
uccuaccacuguacuuuugc

SEQ ID NO: 1538250 - RNA, 21 nt, Human adenovirus A
gccaugaacggggaauacuuu

SEQ ID NO: 1538251 - RNA, 20 nt, Human adenovirus A
ugccggauugcgaacaacaa

SEQ ID NO: 1538252 - RNA, 19 nt, Human adenovirus A
aaacauaaaacuaccugau

SEQ ID NO: 1538253 - RNA, 19 nt, Human adenovirus A
gcugugagcaaaucucaga

SEQ ID NO: 1538254 - RNA, 15 nt, Human adenovirus A
ucacaagacacauug

SEQ ID NO: 1538255 - RNA, 22 nt, Human adenovirus A
acaucuuuuacuaaaaugcaaa

SEQ ID NO: 1538256 - RNA, 17 nt, Human adenovirus A
ucaaacuuuacaaacca

SEQ ID NO: 1538257 - RNA, 16 nt, Human adenovirus A
cagcggggaggaagcu

SEQ ID NO: 1538258 - RNA, 15 nt, Human adenovirus A
cccuuuaccaacacc

SEQ ID NO: 1538259 - RNA, 13 nt, Human adenovirus A
augcucuggacau

SEQ ID NO: 1538260 - RNA, 14 nt, Human adenovirus A
caaagccaggcaca

SEQ ID NO: 1538261 - RNA, 14 nt, Human adenovirus A
agagagugcccccc

SEQ ID NO: 1538262 - RNA, 23 nt, Human adenovirus A
uugcaaaacggcuugccugacuu

SEQ ID NO: 1538263 - RNA, 11 nt, Human adenovirus A
accacaguggu

SEQ ID NO: 1538264 - RNA, 16 nt, Human adenovirus A
aagcuauuugagccuu

SEQ ID NO: 1538265 - RNA, 17 nt, Human adenovirus A
cccagcuaacgccacca

SEQ ID NO: 1538266 - RNA, 14 nt, Human adenovirus A
uucuaauguggagc

SEQ ID NO: 1538267 - RNA, 18 nt, Human adenovirus A
gcucccacacgcagcaac

SEQ ID NO: 1538268 - RNA, 14 nt, Human adenovirus A
cauauuguggagaa

SEQ ID NO: 1538269 - RNA, 22 nt, Human adenovirus A
aaggauugguuccuaauacaaa

SEQ ID NO: 1538270 - RNA, 20 nt, Human adenovirus A
caaagccacuuuagccccag

SEQ ID NO: 1538271 - RNA, 14 nt, Human adenovirus A
cucugaaacaugcu

SEQ ID NO: 1538272 - RNA, 14 nt, Human adenovirus A
guauggugccaauc

SEQ ID NO: 1538273 - RNA, 15 nt, Human adenovirus A
cucacuuaagucuuu

SEQ ID NO: 1538274 - RNA, 16 nt, Human adenovirus A
ggaagguguugagccc

SEQ ID NO: 1538275 - RNA, 13 nt, Human adenovirus A
ugcuccuuuucuu

SEQ ID NO: 1538276 - RNA, 19 nt, Human adenovirus A
gcucuuuugcagcuccaac

SEQ ID NO: 1538277 - RNA, 16 nt, Human adenovirus A
cuuccauugugcccac

SEQ ID NO: 1538278 - RNA, 14 nt, Human adenovirus A
aaacacaugaugga

SEQ ID NO: 1538279 - RNA, 22 nt, Human adenovirus A
cauggaucguauuauggcuuua

SEQ ID NO: 1538280 - RNA, 18 nt, Human adenovirus A
ugcaggaugaauuucagc

SEQ ID NO: 1538281 - RNA, 18 nt, Human adenovirus A
aaaauuuucccaacaaug

SEQ ID NO: 1538282 - RNA, 22 nt, Human adenovirus A
cuuccaacuuauuacugguacu

SEQ ID NO: 1538283 - RNA, 15 nt, Human adenovirus A
gcccagcuguucuua

SEQ ID NO: 1538284 - RNA, 23 nt, Human adenovirus A
gugaacgcaagcgugcaaacaga

SEQ ID NO: 1538285 - RNA, 16 nt, Human adenovirus A
agcggcugacagagcg

SEQ ID NO: 1538286 - RNA, 13 nt, Human adenovirus A
aucuccauuccau

SEQ ID NO: 1538287 - RNA, 18 nt, Human adenovirus A
cccagcugacauacacug

SEQ ID NO: 1538288 - RNA, 14 nt, Human adenovirus A
cagugaagcaaacc

SEQ ID NO: 1538289 - RNA, 12 nt, Human adenovirus A
ccccuuugaaga

SEQ ID NO: 1538290 - RNA, 20 nt, Human adenovirus A
ucgccagcaagugccuccuc

SEQ ID NO: 1538291 - RNA, 22 nt, Human adenovirus A
aucugcgccacaauaacuacaa

SEQ ID NO: 1538292 - RNA, 16 nt, Human adenovirus A
aaaguaccaggaagcu

SEQ ID NO: 1538293 - RNA, 19 nt, Human adenovirus A
uguuugacaagauugucau

SEQ ID NO: 1538294 - RNA, 15 nt, Human adenovirus A
guacuuaaaaaaaca

SEQ ID NO: 1538295 - RNA, 16 nt, Human adenovirus A
gaaguaagcuguuuua

SEQ ID NO: 1538296 - RNA, 13 nt, Human adenovirus A
aguaaugaacaag

SEQ ID NO: 1538297 - RNA, 20 nt, Human adenovirus A
cuuuaccaacaccaacaguu

SEQ ID NO: 1538298 - RNA, 17 nt, Human adenovirus A
cucccucuuggccagcu

SEQ ID NO: 1538299 - RNA, 16 nt, Human adenovirus A
gccagcucuugcagua

SEQ ID NO: 1538300 - RNA, 18 nt, Human adenovirus A
aaacagauucuggagaau

SEQ ID NO: 1538301 - RNA, 13 nt, Human adenovirus A
ugggaggaagaau

SEQ ID NO: 1538302 - RNA, 18 nt, Human adenovirus A
aauuaauggaguuguaga

SEQ ID NO: 1538303 - RNA, 17 nt, Human adenovirus A
cacuuuauaugcuauuu

SEQ ID NO: 1538304 - RNA, 14 nt, Human adenovirus A
agcuauaaaaagag

SEQ ID NO: 1538305 - RNA, 14 nt, Human adenovirus A
cuucucaucuuuuu

SEQ ID NO: 1538306 - RNA, 18 nt, Human adenovirus A
ucaacacaguuuaacaca

SEQ ID NO: 1538307 - RNA, 16 nt, Human adenovirus A
gcaaaccuagcugcuc

SEQ ID NO: 1538308 - RNA, 14 nt, Human adenovirus A
uucuggaauaacaa

SEQ ID NO: 1538309 - RNA, 21 nt, Human adenovirus A
uuagcucauuggaguacaagc

SEQ ID NO: 1538310 - RNA, 15 nt, Human adenovirus A
aacggaggaggaggu

SEQ ID NO: 1538311 - RNA, 14 nt, Human adenovirus A
auuacugccaguuc

SEQ ID NO: 1538312 - RNA, 18 nt, Human adenovirus A
auaaagcuggguuggugu

SEQ ID NO: 1538313 - RNA, 15 nt, Human adenovirus A
guacauccagggcac

SEQ ID NO: 1538314 - RNA, 20 nt, Human adenovirus A
cugcuacuaacauuaaaaga

SEQ ID NO: 1538315 - RNA, 14 nt, Human adenovirus A
gcacucucugggga

SEQ ID NO: 1538316 - RNA, 17 nt, Human adenovirus A
gaacaucgcaaaacacg

SEQ ID NO: 1538317 - RNA, 22 nt, Human adenovirus A
uccaaccaacgaacacggagga

SEQ ID NO: 1538318 - RNA, 16 nt, Human adenovirus A
caaaaaguaaacuguc

SEQ ID NO: 1538319 - RNA, 14 nt, Human adenovirus A
gacaguuucaucac

SEQ ID NO: 1538320 - RNA, 15 nt, Human adenovirus A
uggaucaaaaacaag

SEQ ID NO: 1538321 - RNA, 12 nt, Human adenovirus A
cuucagcauuuu

SEQ ID NO: 1538322 - RNA, 19 nt, Human adenovirus A
ggccauguacuugacucug

SEQ ID NO: 1538323 - RNA, 15 nt, Human adenovirus A
ggaagaaagagaaca

SEQ ID NO: 1538324 - RNA, 17 nt, Human adenovirus A
cauuggaguuaaguuug

SEQ ID NO: 1538325 - RNA, 23 nt, Human adenovirus A
ugcaaaaagaaaaugaacaaaau

SEQ ID NO: 1538326 - RNA, 23 nt, Human adenovirus A
cagaaggaguaauaaaaccugug

SEQ ID NO: 1538327 - RNA, 16 nt, Human adenovirus A
acagauguaaaggagg

SEQ ID NO: 1538328 - RNA, 16 nt, Human adenovirus A
cccagacacggagagg

SEQ ID NO: 1538329 - RNA, 21 nt, Human adenovirus A
caaauaaacguguacacaaug

SEQ ID NO: 1538330 - RNA, 23 nt, Human adenovirus A
auguaaacccuuuuaaccaccac

SEQ ID NO: 1538331 - RNA, 14 nt, Human adenovirus A
auuaucaugaaacu

SEQ ID NO: 1538332 - RNA, 22 nt, Human adenovirus A
ucuucaucuuuucuagaugaag

SEQ ID NO: 1538333 - RNA, 20 nt, Human adenovirus A
acacaaucugccgcaagugc

SEQ ID NO: 1538334 - RNA, 18 nt, Human adenovirus A
agaccacugucgccaacc

SEQ ID NO: 1538335 - RNA, 18 nt, Human adenovirus A
gccaguacacuugggaaa

SEQ ID NO: 1538336 - RNA, 12 nt, Human adenovirus A
cuguugauguga

SEQ ID NO: 1538337 - RNA, 21 nt, Human adenovirus A
cacaugauggaucuggagcca

SEQ ID NO: 1538338 - RNA, 13 nt, Human adenovirus A
cuaauacaaaugc

SEQ ID NO: 1538339 - RNA, 13 nt, Human adenovirus A
cuuuucauuuucg

SEQ ID NO: 1538340 - RNA, 21 nt, Human adenovirus A
cauugcgauaaacuggauuug

SEQ ID NO: 1538341 - RNA, 14 nt, Human adenovirus A
uuguuggauagcaa

SEQ ID NO: 1538342 - RNA, 13 nt, Human adenovirus A
cuuaucagccaga

SEQ ID NO: 1538343 - RNA, 15 nt, Human adenovirus A
aaggaggaagaacau

SEQ ID NO: 1538344 - RNA, 14 nt, Human adenovirus A
aggguuugcauuua

SEQ ID NO: 1538345 - RNA, 23 nt, Human adenovirus A
caaaauaccccuauccugucgag

SEQ ID NO: 1538346 - RNA, 15 nt, Human adenovirus A
uaugcccagcaugac

SEQ ID NO: 1538347 - RNA, 17 nt, Human adenovirus A
augcgggggaugaagga

SEQ ID NO: 1538348 - RNA, 12 nt, Human adenovirus A
caaacuacauag

SEQ ID NO: 1538349 - RNA, 18 nt, Human adenovirus A
uauaguacugcuuccagg

SEQ ID NO: 1538350 - RNA, 14 nt, Human adenovirus A
uuaaauauaucuuu

SEQ ID NO: 1538351 - RNA, 18 nt, Human adenovirus A
gcuuaauaccuuugcuca

SEQ ID NO: 1538352 - RNA, 19 nt, Human adenovirus A
cuuuucaaacuuuacaaac

SEQ ID NO: 1538353 - RNA, 14 nt, Human adenovirus A
cgauguuauugacu

SEQ ID NO: 1538354 - RNA, 14 nt, Human adenovirus A
cauuaaagcaaacc

SEQ ID NO: 1538355 - RNA, 16 nt, Human adenovirus A
cagccgcuaccaucac

SEQ ID NO: 1538356 - RNA, 17 nt, Human adenovirus A
ccauuacuuuuaaauac

SEQ ID NO: 1538357 - RNA, 14 nt, Human adenovirus A
ucccucuucccaac

SEQ ID NO: 1538358 - RNA, 14 nt, Human adenovirus A
auggaauuacauuu

SEQ ID NO: 1538359 - RNA, 19 nt, Human adenovirus A
ggcuucgaaugcugugaca

SEQ ID NO: 1538360 - RNA, 17 nt, Human adenovirus A
agcuuccaguucuucuu

SEQ ID NO: 1538361 - RNA, 20 nt, Human adenovirus A
aguauacugaugaucuuccc

SEQ ID NO: 1538362 - RNA, 21 nt, Human adenovirus A
caaaccugacagacuugcaaa

SEQ ID NO: 1538363 - RNA, 19 nt, Human adenovirus A
cauugacaaagaugcaaac

SEQ ID NO: 1538364 - RNA, 18 nt, Human adenovirus A
augucaccuaaggcuuca

SEQ ID NO: 1538365 - RNA, 23 nt, Human adenovirus A
uuccacugguaacggucuucaag

SEQ ID NO: 1538366 - RNA, 23 nt, Human adenovirus A
cagguauaaaggucgcacugagc

SEQ ID NO: 1538367 - RNA, 22 nt, Human adenovirus A
uggucuucaucgcuuucuucug

SEQ ID NO: 1538368 - RNA, 14 nt, Human adenovirus A
auguaucagcagcc

SEQ ID NO: 1538369 - RNA, 20 nt, Human adenovirus A
ccuggcaaacggguggaaaa

SEQ ID NO: 1538370 - RNA, 13 nt, Human adenovirus A
cacaugggaaggg

SEQ ID NO: 1538371 - RNA, 16 nt, Human adenovirus A
cacuucuugcugaaau

SEQ ID NO: 1538372 - RNA, 16 nt, Human adenovirus A
acggccggaugcagag

SEQ ID NO: 1538373 - RNA, 13 nt, Human adenovirus A
gcgagcugccacc

SEQ ID NO: 1538374 - RNA, 17 nt, Human adenovirus A
uggcagcugauuucagc

SEQ ID NO: 1538375 - RNA, 17 nt, Human adenovirus A
gaagauuucugcuguca

SEQ ID NO: 1538376 - RNA, 19 nt, Human adenovirus A
cgugucuucucccugugcu

SEQ ID NO: 1538377 - RNA, 21 nt, Human adenovirus A
accucaaaaucuaagccaugc

SEQ ID NO: 1538378 - RNA, 15 nt, Human adenovirus A
auuuguugcuguugc

SEQ ID NO: 1538379 - RNA, 17 nt, Human adenovirus A
ccuucccaacuacuuua

SEQ ID NO: 1538380 - RNA, 13 nt, Human adenovirus A
uccagagcccccg

SEQ ID NO: 1538381 - RNA, 15 nt, Human adenovirus A
aacgcugaugccacu

SEQ ID NO: 1538382 - RNA, 18 nt, Human adenovirus A
cgcucaaaggcaggcauu

SEQ ID NO: 1538383 - RNA, 12 nt, Human adenovirus A
agcaaaguacaa

SEQ ID NO: 1538384 - RNA, 22 nt, Human adenovirus A
guccaggguuugcuucagcagu

SEQ ID NO: 1538385 - RNA, 17 nt, Human adenovirus A
aagggcgcccuccaccg

SEQ ID NO: 1538386 - RNA, 16 nt, Human adenovirus A
acuauugacuuaauga

SEQ ID NO: 1538387 - RNA, 13 nt, Human adenovirus A
cugcaagacagaa

SEQ ID NO: 1538388 - RNA, 20 nt, Human adenovirus A
ucccgaguguuuagcccccu

SEQ ID NO: 1538389 - RNA, 14 nt, Human adenovirus A
uacaacuugcuucc

SEQ ID NO: 1538390 - RNA, 13 nt, Human adenovirus A
gcugauuaugcau

SEQ ID NO: 1538391 - RNA, 18 nt, Human adenovirus A
ugccgccacgaaugcugg

SEQ ID NO: 1538392 - RNA, 14 nt, Human adenovirus A
accauccugcuccu

SEQ ID NO: 1538393 - RNA, 21 nt, Human adenovirus A
ggaacagacaccgcccaggca

SEQ ID NO: 1538394 - RNA, 19 nt, Human adenovirus A
ggcacauugcaacgcaauc

SEQ ID NO: 1538395 - RNA, 20 nt, Human adenovirus A
agugaggacacugaaggcau

SEQ ID NO: 1538396 - RNA, 16 nt, Human adenovirus A
acuuaguuacuuugua

SEQ ID NO: 1538397 - RNA, 14 nt, Human adenovirus A
ucuucaaacaccug

SEQ ID NO: 1538398 - RNA, 23 nt, Human adenovirus A
agcaucccagcugacauacacug

SEQ ID NO: 1538399 - RNA, 13 nt, Human adenovirus A
auuaaaaugugcc

SEQ ID NO: 1538400 - RNA, 21 nt, Human adenovirus A
uaacaguaccaaugugcaggc

SEQ ID NO: 1538401 - RNA, 15 nt, Human adenovirus A
guggcuaggaaaaca

SEQ ID NO: 1538402 - RNA, 13 nt, Human adenovirus A
aaaggacuuuuuu

SEQ ID NO: 1538403 - RNA, 17 nt, Human adenovirus A
ucaauuuugcaagugua

SEQ ID NO: 1538404 - RNA, 15 nt, Human adenovirus A
agccaguacacuugg

SEQ ID NO: 1538405 - RNA, 16 nt, Human adenovirus A
aguuaaugcuggaugc

SEQ ID NO: 1538406 - RNA, 19 nt, Human adenovirus A
aauugagaugguguuauga

SEQ ID NO: 1538407 - RNA, 16 nt, Human adenovirus A
uacucaucagagggaa

SEQ ID NO: 1538408 - RNA, 21 nt, Human adenovirus A
ugcgaccgggcaccacagugg

SEQ ID NO: 1538409 - RNA, 14 nt, Human adenovirus A
auggaacaccagca

SEQ ID NO: 1538410 - RNA, 17 nt, Human adenovirus A
cuugcacaaauggaccc

SEQ ID NO: 1538411 - RNA, 15 nt, Human adenovirus A
guguaauuuuccagc

SEQ ID NO: 1538412 - RNA, 13 nt, Human adenovirus A
acuuaaaagcaag

SEQ ID NO: 1538413 - RNA, 22 nt, Human adenovirus A
accuaagacuuaccccugggcu

SEQ ID NO: 1538414 - RNA, 15 nt, Human adenovirus A
accccauuguaacug

SEQ ID NO: 1538415 - RNA, 16 nt, Human adenovirus A
uuggaaacugugcugc

SEQ ID NO: 1538416 - RNA, 23 nt, Human adenovirus A
ucuaaugcaaguuguaaggcaug

SEQ ID NO: 1538417 - RNA, 17 nt, Human adenovirus A
uacacuuaugcucccac

SEQ ID NO: 1538418 - RNA, 20 nt, Human adenovirus A
gaugcaugggcuaaaccaag

SEQ ID NO: 1538419 - RNA, 16 nt, Human adenovirus A
guacugcuuccagguu

SEQ ID NO: 1538420 - RNA, 21 nt, Human adenovirus A
gcucugauuucgauaaacaaa

SEQ ID NO: 1538421 - RNA, 12 nt, Human adenovirus A
acauuuaauaau

SEQ ID NO: 1538422 - RNA, 19 nt, Human adenovirus A
gauuacaugaagauuucug

SEQ ID NO: 1538423 - RNA, 17 nt, Human adenovirus A
aaagcuuaaccgccccc

SEQ ID NO: 1538424 - RNA, 22 nt, Human adenovirus A
cagcuuuuauaugcgcauggcu

SEQ ID NO: 1538425 - RNA, 16 nt, Human adenovirus A
acgcuaaccaggcaug

SEQ ID NO: 1538426 - RNA, 17 nt, Human adenovirus A
aguaagcgccagucgcc

SEQ ID NO: 1538427 - RNA, 16 nt, Human adenovirus A
guaaacucaugauggc

SEQ ID NO: 1538428 - RNA, 16 nt, Human adenovirus A
acuguccagggcuuuu

SEQ ID NO: 1538429 - RNA, 18 nt, Human adenovirus A
acgaugacgaagaccagu

SEQ ID NO: 1538430 - RNA, 20 nt, Human adenovirus A
cgguggaacugcagacagug

SEQ ID NO: 1538431 - RNA, 17 nt, Human adenovirus A
ccuaauacaaaugcuua

SEQ ID NO: 1538432 - RNA, 16 nt, Human adenovirus A
uacuaacaccaaacuc

SEQ ID NO: 1538433 - RNA, 14 nt, Human adenovirus A
uuuacucacuggcc

SEQ ID NO: 1538434 - RNA, 19 nt, Human adenovirus A
ugacuucccaaauuuucca

SEQ ID NO: 1538435 - RNA, 17 nt, Human adenovirus A
gccuucauuccuucaga

SEQ ID NO: 1538436 - RNA, 21 nt, Human adenovirus A
uccucuguaguuucuuuacaa

SEQ ID NO: 1538437 - RNA, 22 nt, Human adenovirus A
ugaacuauuaagugaaagucaa

SEQ ID NO: 1538438 - RNA, 17 nt, Human adenovirus A
ggcgcccuccaccgcca

SEQ ID NO: 1538439 - RNA, 18 nt, Human adenovirus A
gcggcgagaaugggagga

SEQ ID NO: 1538440 - RNA, 15 nt, Human adenovirus A
ugcgaacaacaacaa

SEQ ID NO: 1538441 - RNA, 16 nt, Human adenovirus A
cauguauaauaaaacu

SEQ ID NO: 1538442 - RNA, 16 nt, Human adenovirus A
acuuaucagccagagc

SEQ ID NO: 1538443 - RNA, 13 nt, Human adenovirus A
gccuccuucccau

SEQ ID NO: 1538444 - RNA, 19 nt, Human adenovirus A
gccgcucugucaccuacca

SEQ ID NO: 1538445 - RNA, 20 nt, Human adenovirus A
cgagguaaugguagaggaaa

SEQ ID NO: 1538446 - RNA, 21 nt, Human adenovirus A
cuuggaagaaugggaggagga

SEQ ID NO: 1538447 - RNA, 13 nt, Human adenovirus A
aaaaaacaguuuc

SEQ ID NO: 1538448 - RNA, 22 nt, Human adenovirus A
cgauccaguaauuggcaaagua

SEQ ID NO: 1538449 - RNA, 21 nt, Human adenovirus A
augaacaaacgguuacagagg

SEQ ID NO: 1538450 - RNA, 21 nt, Human adenovirus A
aguauggugacgguucuucuc

SEQ ID NO: 1538451 - RNA, 21 nt, Human adenovirus A
cuggaagucaacuaaaaauug

SEQ ID NO: 1538452 - RNA, 13 nt, Human adenovirus A
ccuugcaggcuuc

SEQ ID NO: 1538453 - RNA, 20 nt, Human adenovirus A
cgcuuuuuugaguacucagc

SEQ ID NO: 1538454 - RNA, 20 nt, Human adenovirus A
cuuaaggcgggguauguuua

SEQ ID NO: 1538455 - RNA, 12 nt, Human adenovirus A
uucugcugucau

SEQ ID NO: 1538456 - RNA, 23 nt, Human adenovirus A
caaauccauuaauauuguguccu

SEQ ID NO: 1538457 - RNA, 14 nt, Human adenovirus A
gucaaaaaagcaaa

SEQ ID NO: 1538458 - RNA, 17 nt, Human adenovirus A
gaggaauaucaacugcu

SEQ ID NO: 1538459 - RNA, 15 nt, Human adenovirus A
acaguacaaagccag

SEQ ID NO: 1538460 - RNA, 18 nt, Human adenovirus A
auagagauaagcaggaaa

SEQ ID NO: 1538461 - RNA, 16 nt, Human adenovirus A
cuacugcgucucccca

SEQ ID NO: 1538462 - RNA, 18 nt, Human adenovirus A
gcucugucaccuaccacc

SEQ ID NO: 1538463 - RNA, 18 nt, Human adenovirus A
ucagcgccgagccacagc

SEQ ID NO: 1538464 - RNA, 19 nt, Human adenovirus A
cagccaaaacucagguagc

SEQ ID NO: 1538465 - RNA, 19 nt, Human adenovirus A
ugcguagcaguaucagugg

SEQ ID NO: 1538466 - RNA, 14 nt, Human adenovirus A
cuaaaauguauuca

SEQ ID NO: 1538467 - RNA, 20 nt, Human adenovirus A
agucgcgcacugggccagga

SEQ ID NO: 1538468 - RNA, 19 nt, Human adenovirus A
cuugggagagucaggcaga

SEQ ID NO: 1538469 - RNA, 22 nt, Human adenovirus A
aacagcgcaugcguaucucacu

SEQ ID NO: 1538470 - RNA, 16 nt, Human adenovirus A
uaccucacuuacauua

SEQ ID NO: 1538471 - RNA, 19 nt, Human adenovirus A
cugcgggaagcgggggaag

SEQ ID NO: 1538472 - RNA, 20 nt, Human adenovirus A
ccguucccugcguucacuua

SEQ ID NO: 1538473 - RNA, 17 nt, Human adenovirus A
uuuguaccgcgaagcca

SEQ ID NO: 1538474 - RNA, 13 nt, Human adenovirus A
guuuuaaauuguu

SEQ ID NO: 1538475 - RNA, 17 nt, Human adenovirus A
caacagaaaguuguaga

SEQ ID NO: 1538476 - RNA, 19 nt, Human adenovirus A
uuacccuagaccaaaugcc

SEQ ID NO: 1538477 - RNA, 13 nt, Human adenovirus A
auuuuuugggaac

SEQ ID NO: 1538478 - RNA, 16 nt, Human adenovirus A
gcggccauuggagccg

SEQ ID NO: 1538479 - RNA, 16 nt, Human adenovirus A
aaaagaaaaugaacaa

SEQ ID NO: 1538480 - RNA, 13 nt, Human adenovirus A
aagugacauugga

SEQ ID NO: 1538481 - RNA, 16 nt, Human adenovirus A
caauacugaauauuua

SEQ ID NO: 1538482 - RNA, 20 nt, Human adenovirus A
cagcuugcgggcggugcacg

SEQ ID NO: 1538483 - RNA, 23 nt, Human adenovirus A
gcuguacgcaaacucagcccaug

SEQ ID NO: 1538484 - RNA, 18 nt, Human adenovirus A
caugcgcgcggccagagc

SEQ ID NO: 1538485 - RNA, 13 nt, Human adenovirus A
cuuaguauuuguc

SEQ ID NO: 1538486 - RNA, 18 nt, Human adenovirus A
cucuaaguucuguuucau

SEQ ID NO: 1538487 - RNA, 15 nt, Human adenovirus A
ggacaccauugaaac

SEQ ID NO: 1538488 - RNA, 22 nt, Human adenovirus A
ugccuacccggcaguaaaucuu

SEQ ID NO: 1538489 - RNA, 16 nt, Human adenovirus A
ucaauaguugccacgc

SEQ ID NO: 1538490 - RNA, 15 nt, Human adenovirus A
gaauauaagaacuac

SEQ ID NO: 1538491 - RNA, 20 nt, Human adenovirus A
ugaguaaagauauucccacg

SEQ ID NO: 1538492 - RNA, 15 nt, Human adenovirus A
uaacuuuauauugca

SEQ ID NO: 1538493 - RNA, 24 nt, Human adenovirus A
uaacaacagucaguguccaucagc

SEQ ID NO: 1538494 - RNA, 20 nt, Human adenovirus A
guuuaaaucuuucugcuccc

SEQ ID NO: 1538495 - RNA, 12 nt, Human adenovirus A
gcauuaguucuu

SEQ ID NO: 1538496 - RNA, 16 nt, Human adenovirus A
aacgcaccuugcagga

SEQ ID NO: 1538497 - RNA, 18 nt, Human adenovirus A
ugcuccgacaacagcugc

SEQ ID NO: 1538498 - RNA, 18 nt, Human adenovirus A
cgcagaagcucuguucaa

SEQ ID NO: 1538499 - RNA, 16 nt, Human adenovirus A
uccaauggucuucaag

SEQ ID NO: 1538500 - RNA, 22 nt, Human adenovirus A
ucuucguggagaagcggagcca

SEQ ID NO: 1538501 - RNA, 21 nt, Human adenovirus A
caaaaacaccuuuuguuaauu

SEQ ID NO: 1538502 - RNA, 22 nt, Human adenovirus A
agcucugauuucgauaaacaaa

SEQ ID NO: 1538503 - RNA, 18 nt, Human adenovirus A
agauuauacaaacuucau

SEQ ID NO: 1538504 - RNA, 17 nt, Human adenovirus A
ggccauuuuggaagcag

SEQ ID NO: 1538505 - RNA, 11 nt, Human adenovirus A
uuucugccauu

SEQ ID NO: 1538506 - RNA, 18 nt, Human adenovirus A
aggaagcaggugaugaag

SEQ ID NO: 1538507 - RNA, 23 nt, Human adenovirus A
cccggcguaaccaaauacugcua

SEQ ID NO: 1538508 - RNA, 20 nt, Human adenovirus A
agcucaugugaaggcgccag

SEQ ID NO: 1538509 - RNA, 14 nt, Human adenovirus A
cugacauacacugu

SEQ ID NO: 1538510 - RNA, 21 nt, Human adenovirus A
cacauauucgcgugccaggca

SEQ ID NO: 1538511 - RNA, 17 nt, Human adenovirus A
uagacggcaccuuuuac

SEQ ID NO: 1538512 - RNA, 22 nt, Human adenovirus A
ucacacccuccguguucccaca

SEQ ID NO: 1538513 - RNA, 19 nt, Human adenovirus A
guaaacuuaacucaggcuu

SEQ ID NO: 1538514 - RNA, 15 nt, Human adenovirus A
acagucacaagguag

SEQ ID NO: 1538515 - RNA, 15 nt, Human adenovirus A
ugcauuaccagcagc

SEQ ID NO: 1538516 - RNA, 17 nt, Human adenovirus A
aaaaucauacaaaucag

SEQ ID NO: 1538517 - RNA, 16 nt, Human adenovirus A
uggagcuuucaacccc

SEQ ID NO: 1538518 - RNA, 22 nt, Human adenovirus A
ggaccgcagucugacagcaauu

SEQ ID NO: 1538519 - RNA, 12 nt, Human adenovirus A
cuuuggaggcag

SEQ ID NO: 1538520 - RNA, 11 nt, Human adenovirus A
ucagccagagc

SEQ ID NO: 1538521 - RNA, 14 nt, Human adenovirus A
cgcgaaacuggggg

SEQ ID NO: 1538522 - RNA, 16 nt, Human adenovirus A
auuuugcagguuuaaa

SEQ ID NO: 1538523 - RNA, 20 nt, Human adenovirus A
cccucuuggccagcugcccu

SEQ ID NO: 1538524 - RNA, 16 nt, Human adenovirus A
accuccauuauuucuu

SEQ ID NO: 1538525 - RNA, 20 nt, Human adenovirus A
cagcuacuaauuaagcgagc

SEQ ID NO: 1538526 - RNA, 13 nt, Human adenovirus A
caaauccaaaagc

SEQ ID NO: 1538527 - RNA, 20 nt, Human adenovirus A
ccgcuacaccacguaaucaa

SEQ ID NO: 1538528 - RNA, 22 nt, Human adenovirus A
guguacuugguggacaacaagu

SEQ ID NO: 1538529 - RNA, 14 nt, Human adenovirus A
uuuucaguggacaa

SEQ ID NO: 1538530 - RNA, 14 nt, Human adenovirus A
agccauggaugaau

SEQ ID NO: 1538531 - RNA, 16 nt, Human adenovirus A
gagaaggacaaaaguc

SEQ ID NO: 1538532 - RNA, 22 nt, Human adenovirus A
ugcaguuuuuuuuccacacauc

SEQ ID NO: 1538533 - RNA, 20 nt, Human adenovirus A
auuccaugagcccggggacu

SEQ ID NO: 1538534 - RNA, 18 nt, Human adenovirus A
gacagaaauacagagcug

SEQ ID NO: 1538535 - RNA, 14 nt, Human adenovirus A
uuacuaaaacagua

SEQ ID NO: 1538536 - RNA, 21 nt, Human adenovirus A
uaugcauagcuuacaaagggc

SEQ ID NO: 1538537 - RNA, 18 nt, Human adenovirus A
accucuagaaacugugcc

SEQ ID NO: 1538538 - RNA, 23 nt, Human adenovirus A
cccgcgauuaugcaguguaacca

SEQ ID NO: 1538539 - RNA, 17 nt, Human adenovirus A
guguuaaccauuguaaa

SEQ ID NO: 1538540 - RNA, 23 nt, Human adenovirus A
ucccagcuaacgccaccagcgug

SEQ ID NO: 1538541 - RNA, 19 nt, Human adenovirus A
cugagacuucccacagcca

SEQ ID NO: 1538542 - RNA, 17 nt, Human adenovirus A
gguucgacgggccaggc

SEQ ID NO: 1538543 - RNA, 23 nt, Human adenovirus A
caacuuuguccaguuuacuaaca

SEQ ID NO: 1538544 - RNA, 17 nt, Human adenovirus A
auaaacaaaagcaaagc

SEQ ID NO: 1538545 - RNA, 21 nt, Human adenovirus A
acuuuuagggaugcaaugcuu

SEQ ID NO: 1538546 - RNA, 22 nt, Human adenovirus A
uccuaggcaacguuggcagcga

SEQ ID NO: 1538547 - RNA, 19 nt, Human adenovirus A
uuaagaucuucguaggaaa

SEQ ID NO: 1538548 - RNA, 18 nt, Human adenovirus A
uauaccaugauggagugg

SEQ ID NO: 1538549 - RNA, 22 nt, Human adenovirus A
acaccaugguaaaaaggaagca

SEQ ID NO: 1538550 - RNA, 19 nt, Human adenovirus A
ccgcgcgcggacuuucaac

SEQ ID NO: 1538551 - RNA, 20 nt, Human adenovirus A
cuuccguagccuugcagcgg

SEQ ID NO: 1538552 - RNA, 20 nt, Human adenovirus A
gguggcgcuuucgggcucug

SEQ ID NO: 1538553 - RNA, 15 nt, Human adenovirus A
cgucucguacuaacc

SEQ ID NO: 1538554 - RNA, 20 nt, Human adenovirus A
gcuuccaugccuuuuuccca

SEQ ID NO: 1538555 - RNA, 17 nt, Human adenovirus A
ucaacgugucaguuucu

SEQ ID NO: 1538556 - RNA, 16 nt, Human adenovirus A
cuggcuuuuggaugga

SEQ ID NO: 1538557 - RNA, 16 nt, Human adenovirus A
cggucucgcagcucuu

SEQ ID NO: 1538558 - RNA, 11 nt, Human adenovirus A
uuaucuuggua

SEQ ID NO: 1538559 - RNA, 23 nt, Human adenovirus A
cuugcaggacgcagaagcucugu

SEQ ID NO: 1538560 - RNA, 23 nt, Human adenovirus A
cugagcccuauccgucuccagcu

SEQ ID NO: 1538561 - RNA, 18 nt, Human adenovirus A
uguacuugacucuggcga

SEQ ID NO: 1538562 - RNA, 12 nt, Human adenovirus A
gaccugcaacag

SEQ ID NO: 1538563 - RNA, 21 nt, Human adenovirus A
guaggauagcaccugccgcca

SEQ ID NO: 1538564 - RNA, 18 nt, Human adenovirus A
uccuuuuucuacaggcag

SEQ ID NO: 1538565 - RNA, 20 nt, Human adenovirus A
cuaccugcgcacgcccuucu

SEQ ID NO: 1538566 - RNA, 22 nt, Human adenovirus A
ccugacgccuucauacccaacu

SEQ ID NO: 1538567 - RNA, 19 nt, Human adenovirus A
aguacguccgauaaaaaag

SEQ ID NO: 1538568 - RNA, 14 nt, Human adenovirus A
agcccaacccauug

SEQ ID NO: 1538569 - RNA, 23 nt, Human adenovirus A
ucccacgccgcgccccacuuccu

SEQ ID NO: 1538570 - RNA, 17 nt, Human adenovirus A
ucuuucuuuagaaacuu

SEQ ID NO: 1538571 - RNA, 16 nt, Human adenovirus A
guugaacccggccaag

SEQ ID NO: 1538572 - RNA, 13 nt, Human adenovirus A
ccaaccucacugc

SEQ ID NO: 1538573 - RNA, 12 nt, Human adenovirus A
cugaagaggagg

SEQ ID NO: 1538574 - RNA, 22 nt, Human adenovirus A
caguuuuggagccaaaaaaaca

SEQ ID NO: 1538575 - RNA, 20 nt, Human adenovirus A
ucaagacguuccauggcuuc

SEQ ID NO: 1538576 - RNA, 22 nt, Human adenovirus A
gucggaaugauuaaacaacaaa

SEQ ID NO: 1538577 - RNA, 15 nt, Human adenovirus A
uaccaggaagcugag

SEQ ID NO: 1538578 - RNA, 13 nt, Human adenovirus A
cacagcuggcgca

SEQ ID NO: 1538579 - RNA, 16 nt, Human adenovirus A
cuacgagacucccccc

SEQ ID NO: 1538580 - RNA, 13 nt, Human adenovirus A
uagaaaaagcuac

SEQ ID NO: 1538581 - RNA, 17 nt, Human adenovirus A
cuaaaccaagccaugcu

SEQ ID NO: 1538582 - RNA, 19 nt, Human adenovirus A
gauaaacuggauuugcgca

SEQ ID NO: 1538583 - RNA, 17 nt, Human adenovirus A
cgggaguguacacuaau

SEQ ID NO: 1538584 - RNA, 20 nt, Human adenovirus A
gcguagccgcagcaccugga

SEQ ID NO: 1538585 - RNA, 21 nt, Human adenovirus A
gaagaccaguacgaggacuga

SEQ ID NO: 1538586 - RNA, 16 nt, Human adenovirus A
agacgagguccaucac

SEQ ID NO: 1538587 - RNA, 14 nt, Human adenovirus A
cagagcacuaaaau

SEQ ID NO: 1538588 - RNA, 16 nt, Human adenovirus A
ggaaugauuaaacaac

SEQ ID NO: 1538589 - RNA, 21 nt, Human adenovirus A
ugcaucguaaacaacagacuu

SEQ ID NO: 1538590 - RNA, 17 nt, Human adenovirus A
cuuauuuuugauucaaa

SEQ ID NO: 1538591 - RNA, 16 nt, Human adenovirus A
caauuaguaacaagaa

SEQ ID NO: 1538592 - RNA, 13 nt, Human adenovirus A
aacauuaaaagac

SEQ ID NO: 1538593 - RNA, 22 nt, Human adenovirus A
acucagcgacaaaccuuuacug

SEQ ID NO: 1538594 - RNA, 20 nt, Human adenovirus A
aaacuuaaauugagauggug

SEQ ID NO: 1538595 - RNA, 18 nt, Human adenovirus A
cuugccgaaugcgcauac

SEQ ID NO: 1538596 - RNA, 15 nt, Human adenovirus A
gcuauguacagcaau

SEQ ID NO: 1538597 - RNA, 22 nt, Human adenovirus A
uggagcggucuuaaaaauuuug

SEQ ID NO: 1538598 - RNA, 15 nt, Human adenovirus A
cagaaugaauuguau

SEQ ID NO: 1538599 - RNA, 20 nt, Human adenovirus A
agugcucuaauagaacugga

SEQ ID NO: 1538600 - RNA, 20 nt, Human adenovirus A
cuaggcaacguuggcagcga

SEQ ID NO: 1538601 - RNA, 16 nt, Human adenovirus A
ugggcaucuugcauga

SEQ ID NO: 1538602 - RNA, 12 nt, Human adenovirus A
cugcucagcugg

SEQ ID NO: 1538603 - RNA, 23 nt, Human adenovirus A
aaaagcauacuuaccaaagccau

SEQ ID NO: 1538604 - RNA, 14 nt, Human adenovirus A
ugauuuuacagaga

SEQ ID NO: 1538605 - RNA, 18 nt, Human adenovirus A
cagcuucagaugacugga

SEQ ID NO: 1538606 - RNA, 16 nt, Human adenovirus A
ugcaggaucaaaacac

SEQ ID NO: 1538607 - RNA, 20 nt, Human adenovirus A
auguucccaaauauccagga

SEQ ID NO: 1538608 - RNA, 15 nt, Human adenovirus A
agacguuuuugccca

SEQ ID NO: 1538609 - RNA, 11 nt, Human adenovirus A
cuugcuuccag

SEQ ID NO: 1538610 - RNA, 15 nt, Human adenovirus A
aucugugucuuuacc

SEQ ID NO: 1538611 - RNA, 20 nt, Human adenovirus A
cuaguuugguagcaaaagau

SEQ ID NO: 1538612 - RNA, 19 nt, Human adenovirus A
cuugagccuggauaaagcg

SEQ ID NO: 1538613 - RNA, 19 nt, Human adenovirus A
caaacgguuacagaggaac

SEQ ID NO: 1538614 - RNA, 22 nt, Human adenovirus A
cggcgaucaucgcggagagggc

SEQ ID NO: 1538615 - RNA, 17 nt, Human adenovirus A
cugcacucucuggggaa

SEQ ID NO: 1538616 - RNA, 17 nt, Human adenovirus A
aggucgaggacuuggaa

SEQ ID NO: 1538617 - RNA, 22 nt, Human adenovirus A
gcggcauuccccauccaaaacc

SEQ ID NO: 1538618 - RNA, 20 nt, Human adenovirus A
acgucaccaccucaaaaucu

SEQ ID NO: 1538619 - RNA, 16 nt, Human adenovirus A
cccagcggcaguacgu

SEQ ID NO: 1538620 - RNA, 24 nt, Human adenovirus A
gcgcggacgagcucccggaggaag

SEQ ID NO: 1538621 - RNA, 21 nt, Human adenovirus A
uuuaaucgccccgcugcaauu

SEQ ID NO: 1538622 - RNA, 21 nt, Human adenovirus A
cgaugcucgcaaguaccgcgc

SEQ ID NO: 1538623 - RNA, 23 nt, Human adenovirus A
aaguucaaagaagagcugcugca

SEQ ID NO: 1538624 - RNA, 15 nt, Human adenovirus A
uuggcagacaaggug

SEQ ID NO: 1538625 - RNA, 16 nt, Human adenovirus A
ugaaaagacugagaac

SEQ ID NO: 1538626 - RNA, 16 nt, Human adenovirus A
gcaauuagggccagca

SEQ ID NO: 1538627 - RNA, 14 nt, Human adenovirus A
gcucuagacaugac

SEQ ID NO: 1538628 - RNA, 21 nt, Human adenovirus A
gacuuauuuuugauucaaaca

SEQ ID NO: 1538629 - RNA, 14 nt, Human adenovirus A
gaauuacuaaaaca

SEQ ID NO: 1538630 - RNA, 18 nt, Human adenovirus A
caacuuuuaacauuagca

SEQ ID NO: 1538631 - RNA, 14 nt, Human adenovirus A
cuguggcaccugca

SEQ ID NO: 1538632 - RNA, 17 nt, Human adenovirus A
ccauccguggcaggcca

SEQ ID NO: 1538633 - RNA, 18 nt, Human adenovirus A
agcccccgcguccuccuu

SEQ ID NO: 1538634 - RNA, 18 nt, Human adenovirus A
aaaugccuguuuuguauu

SEQ ID NO: 1538635 - RNA, 23 nt, Human adenovirus A
gcugcaauuucuuucauuaggcu

SEQ ID NO: 1538636 - RNA, 19 nt, Human adenovirus A
ugagucgcuguugggacag

SEQ ID NO: 1538637 - RNA, 13 nt, Human adenovirus A
cagguggcagcga

SEQ ID NO: 1538638 - RNA, 20 nt, Human adenovirus A
auauuugcugaaaaaagucu

SEQ ID NO: 1538639 - RNA, 23 nt, Human adenovirus A
acauaggcuggguuuauggaauu

SEQ ID NO: 1538640 - RNA, 18 nt, Human adenovirus A
augcgcauacccauucca

SEQ ID NO: 1538641 - RNA, 13 nt, Human adenovirus A
gcauuaggccauc

SEQ ID NO: 1538642 - RNA, 13 nt, Human adenovirus A
cacugggccagga

SEQ ID NO: 1538643 - RNA, 19 nt, Human adenovirus A
ggcgcgcgaguuaagaaaa

SEQ ID NO: 1538644 - RNA, 17 nt, Human adenovirus A
cuuuaggcauuaaaugg

SEQ ID NO: 1538645 - RNA, 21 nt, Human adenovirus A
cugagucccggucuggugcaa

SEQ ID NO: 1538646 - RNA, 20 nt, Human adenovirus A
cauugugcuaaauguaacug

SEQ ID NO: 1538647 - RNA, 14 nt, Human adenovirus A
cuggcaaacuggga

SEQ ID NO: 1538648 - RNA, 14 nt, Human adenovirus A
cuucuacuuuagaa

SEQ ID NO: 1538649 - RNA, 20 nt, Human adenovirus A
accuaucccaugaccaagcc

SEQ ID NO: 1538650 - RNA, 14 nt, Human adenovirus A
caaauuacacacua

SEQ ID NO: 1538651 - RNA, 22 nt, Human adenovirus A
gaaaaacaguacaaagccaggc

SEQ ID NO: 1538652 - RNA, 14 nt, Human adenovirus A
aagcagccauaaug

SEQ ID NO: 1538653 - RNA, 19 nt, Human adenovirus A
cggcguaguaugcgcagac

SEQ ID NO: 1538654 - RNA, 13 nt, Human adenovirus A
uacagauuuaagg

SEQ ID NO: 1538655 - RNA, 13 nt, Human adenovirus A
ccagacaguuuca

SEQ ID NO: 1538656 - RNA, 17 nt, Human adenovirus A
caaaauaaacaucucau

SEQ ID NO: 1538657 - RNA, 19 nt, Human adenovirus A
gcgugccguuggcagaguc

SEQ ID NO: 1538658 - RNA, 20 nt, Human adenovirus A
uuagucgcgcacugggccag

SEQ ID NO: 1538659 - RNA, 13 nt, Human adenovirus A
ggcugacagagcg

SEQ ID NO: 1538660 - RNA, 16 nt, Human adenovirus A
ucaacagaaaguugua

SEQ ID NO: 1538661 - RNA, 14 nt, Human adenovirus A
ugcauagcuuacaa

SEQ ID NO: 1538662 - RNA, 16 nt, Human adenovirus A
cuuuaccaacaccaac

SEQ ID NO: 1538663 - RNA, 19 nt, Human adenovirus A
acugaccaggucagcucag

SEQ ID NO: 1538664 - RNA, 13 nt, Human adenovirus A
uucuaccuccauu

SEQ ID NO: 1538665 - RNA, 20 nt, Human adenovirus A
guucacuuacccgcagcugu

SEQ ID NO: 1538666 - RNA, 23 nt, Human adenovirus A
acacgggcuggggacugggugcc

SEQ ID NO: 1538667 - RNA, 20 nt, Human adenovirus A
cuuggaauaaaauuucuaga

SEQ ID NO: 1538668 - RNA, 17 nt, Human adenovirus A
ccgcggcgucagcagac

SEQ ID NO: 1538669 - RNA, 21 nt, Human adenovirus A
gcagcugauuucagcuucuac

SEQ ID NO: 1538670 - RNA, 17 nt, Human adenovirus A
aaaaugaugacuucaac

SEQ ID NO: 1538671 - RNA, 15 nt, Human adenovirus A
acuuuaugagucaaa

SEQ ID NO: 1538672 - RNA, 19 nt, Human adenovirus A
aguuugacaccagaaacuu

SEQ ID NO: 1538673 - RNA, 21 nt, Human adenovirus A
gugacaaugcccgccuggcag

SEQ ID NO: 1538674 - RNA, 19 nt, Human adenovirus A
cagagggaaagguauucag

SEQ ID NO: 1538675 - RNA, 20 nt, Human adenovirus A
cuaagggacaaguuaaaaga

SEQ ID NO: 1538676 - RNA, 17 nt, Human adenovirus A
ccagagcaccccuuccc

SEQ ID NO: 1538677 - RNA, 16 nt, Human adenovirus A
caggcauggccaucau

SEQ ID NO: 1538678 - RNA, 23 nt, Human adenovirus A
guacaaggcauuggaaagcagcu

SEQ ID NO: 1538679 - RNA, 17 nt, Human adenovirus A
cuauucggaaaccauga

SEQ ID NO: 1538680 - RNA, 14 nt, Human adenovirus A
aggcuuucuucaaa

SEQ ID NO: 1538681 - RNA, 18 nt, Human adenovirus A
caucaugaaaacagcagc

SEQ ID NO: 1538682 - RNA, 20 nt, Human adenovirus A
agggugccacccccagugcc

SEQ ID NO: 1538683 - RNA, 15 nt, Human adenovirus A
gcugcaggccuuagc

SEQ ID NO: 1538684 - RNA, 16 nt, Human adenovirus A
acauugcauucagaga

SEQ ID NO: 1538685 - RNA, 18 nt, Human adenovirus A
guguucccacaguaggaa

SEQ ID NO: 1538686 - RNA, 18 nt, Human adenovirus A
uaccgugggacaacuuuu

SEQ ID NO: 1538687 - RNA, 23 nt, Human adenovirus A
agucagcugcaaaccgcgcuuuu

SEQ ID NO: 1538688 - RNA, 20 nt, Human adenovirus A
auggaaagccgguuguaagc

SEQ ID NO: 1538689 - RNA, 17 nt, Human adenovirus A
cccgccauuggcgcuac

SEQ ID NO: 1538690 - RNA, 11 nt, Human adenovirus A
ugaacacacug

SEQ ID NO: 1538691 - RNA, 21 nt, Human adenovirus A
cuggggugccuaauuguaugc

SEQ ID NO: 1538692 - RNA, 15 nt, Human adenovirus A
ugaauacuuaaauga

SEQ ID NO: 1538693 - RNA, 23 nt, Human adenovirus A
agcugcagagcuagcugacauaa

SEQ ID NO: 1538694 - RNA, 21 nt, Human adenovirus A
auguaugcccagcaugaccaa

SEQ ID NO: 1538695 - RNA, 16 nt, Human adenovirus A
gguagacgaacaaacu

SEQ ID NO: 1538696 - RNA, 22 nt, Human adenovirus A
cugaugcuuuucgccagcagcc

SEQ ID NO: 1538697 - RNA, 17 nt, Human adenovirus A
gugaauggaacaccagc

SEQ ID NO: 1538698 - RNA, 15 nt, Human adenovirus A
guggcaacguguucu

SEQ ID NO: 1538699 - RNA, 20 nt, Human adenovirus A
accaccaaauuuaaggccag

SEQ ID NO: 1538700 - RNA, 20 nt, Human adenovirus A
ugugcuauuaaagcuuuugc

SEQ ID NO: 1538701 - RNA, 22 nt, Human adenovirus A
ggcagcaaugcuuggaagaaaa

SEQ ID NO: 1538702 - RNA, 22 nt, Human adenovirus A
uacgcaaacucagcccaugcuc

SEQ ID NO: 1538703 - RNA, 17 nt, Human adenovirus A
ucaccuuugugugcuac

SEQ ID NO: 1538704 - RNA, 14 nt, Human adenovirus A
acgacuaaaacaaa

SEQ ID NO: 1538705 - RNA, 13 nt, Human adenovirus A
aacaguuucugga

SEQ ID NO: 1538706 - RNA, 17 nt, Human adenovirus A
agucgcaauuagggcca

SEQ ID NO: 1538707 - RNA, 21 nt, Human adenovirus A
agcaaaugcauuaucaugaaa

SEQ ID NO: 1538708 - RNA, 12 nt, Human adenovirus A
aguaaaaaaagc

SEQ ID NO: 1538709 - RNA, 22 nt, Human adenovirus A
cauuggucaagcgcagguagac

SEQ ID NO: 1538710 - RNA, 19 nt, Human adenovirus A
agguaauuuucauucuucc

SEQ ID NO: 1538711 - RNA, 14 nt, Human adenovirus A
accagaaaaacagu

SEQ ID NO: 1538712 - RNA, 16 nt, Human adenovirus A
auaagcauuagagucg

SEQ ID NO: 1538713 - RNA, 12 nt, Human adenovirus A
auugggaguuca

SEQ ID NO: 1538714 - RNA, 15 nt, Human adenovirus A
auuucacaagacaca

SEQ ID NO: 1538715 - RNA, 15 nt, Human adenovirus A
auguggagcuuucaa

SEQ ID NO: 1538716 - RNA, 19 nt, Human adenovirus A
agugaauggaacaccagca

SEQ ID NO: 1538717 - RNA, 19 nt, Human adenovirus A
cggcgagaaugggaggaaa

SEQ ID NO: 1538718 - RNA, 13 nt, Human adenovirus A
aaacucuaacugc

SEQ ID NO: 1538719 - RNA, 15 nt, Human adenovirus A
gccauguugugcaua

SEQ ID NO: 1538720 - RNA, 12 nt, Human adenovirus A
aaaugaccccau

SEQ ID NO: 1538721 - RNA, 14 nt, Human adenovirus A
ccagaagcacuggc

SEQ ID NO: 1538722 - RNA, 22 nt, Human adenovirus A
acguccaggcaggguuugcaaa

SEQ ID NO: 1538723 - RNA, 20 nt, Human adenovirus A
auuccuuuggacgagggaaa

SEQ ID NO: 1538724 - RNA, 13 nt, Human adenovirus A
cagcauggagugc

SEQ ID NO: 1538725 - RNA, 15 nt, Human adenovirus A
ucaacgugucaguuu

SEQ ID NO: 1538726 - RNA, 19 nt, Human adenovirus A
gaugcuaagggacaaguua

SEQ ID NO: 1538727 - RNA, 14 nt, Human adenovirus A
caaauccaaaagca

SEQ ID NO: 1538728 - RNA, 17 nt, Human adenovirus A
gcaauaaaauaggggua

SEQ ID NO: 1538729 - RNA, 12 nt, Human adenovirus A
aaacaugcugua

SEQ ID NO: 1538730 - RNA, 19 nt, Human adenovirus A
acgaccgccuuuucuagaa

SEQ ID NO: 1538731 - RNA, 15 nt, Human adenovirus A
cuguuagacagagca

SEQ ID NO: 1538732 - RNA, 13 nt, Human adenovirus A
uuauucccgcagc

SEQ ID NO: 1538733 - RNA, 21 nt, Human adenovirus A
uacgagacuccccccgaggaa

SEQ ID NO: 1538734 - RNA, 19 nt, Human adenovirus A
ugccgacguugcaagagga

SEQ ID NO: 1538735 - RNA, 16 nt, Human adenovirus A
acaguaaccauuacuu

SEQ ID NO: 1538736 - RNA, 17 nt, Human adenovirus A
guuaucuugguaggcaa

SEQ ID NO: 1538737 - RNA, 18 nt, Human adenovirus A
uguccccgaaagccgcaa

SEQ ID NO: 1538738 - RNA, 19 nt, Human adenovirus A
gaacacgguacuuuuccuu

SEQ ID NO: 1538739 - RNA, 22 nt, Human adenovirus A
acuguagacgauguuauugacu

SEQ ID NO: 1538740 - RNA, 18 nt, Human adenovirus A
agacuugcaaacagcaaa

SEQ ID NO: 1538741 - RNA, 16 nt, Human adenovirus A
cauggcugaagaggag

SEQ ID NO: 1538742 - RNA, 21 nt, Human adenovirus A
gggcagccaggcgggcugcaa

SEQ ID NO: 1538743 - RNA, 12 nt, Human adenovirus A
gaaugcucugga

SEQ ID NO: 1538744 - RNA, 10 nt, Human adenovirus A
augguuuaac

SEQ ID NO: 1538745 - RNA, 20 nt, Human adenovirus A
acguacuagagcacaugaag

SEQ ID NO: 1538746 - RNA, 13 nt, Human adenovirus A
aaucggcggcgcg

SEQ ID NO: 1538747 - RNA, 14 nt, Human adenovirus A
gaaagaucacagcc

SEQ ID NO: 1538748 - RNA, 13 nt, Human adenovirus A
agacaguuucauc

SEQ ID NO: 1538749 - RNA, 22 nt, Human adenovirus A
gcgcgcccggcucccacgccgc

SEQ ID NO: 1538750 - RNA, 19 nt, Human adenovirus A
cccauaacaucaggagcag

SEQ ID NO: 1538751 - RNA, 13 nt, Human adenovirus A
cgcgcgcauugcg

SEQ ID NO: 1538752 - RNA, 21 nt, Human adenovirus A
caagcuuucauugguccaggc

SEQ ID NO: 1538753 - RNA, 19 nt, Human adenovirus A
acgcaagcgugcaaacaga

SEQ ID NO: 1538754 - RNA, 21 nt, Human adenovirus A
cauguaaaaugggaaaugagg

SEQ ID NO: 1538755 - RNA, 22 nt, Human adenovirus A
acaaaugcgaccucagcccagg

SEQ ID NO: 1538756 - RNA, 13 nt, Human adenovirus A
augccggcagcgg

SEQ ID NO: 1538757 - RNA, 13 nt, Human adenovirus A
caguaacaaacug

SEQ ID NO: 1538758 - RNA, 22 nt, Human adenovirus A
accgcgagcgcauagaaaaagc

SEQ ID NO: 1538759 - RNA, 21 nt, Human adenovirus A
ucagugaaacgcccuagaugu

SEQ ID NO: 1538760 - RNA, 20 nt, Human adenovirus A
gcacaggcggguaagagcag

SEQ ID NO: 1538761 - RNA, 18 nt, Human adenovirus A
uccucuucugcugcauug

SEQ ID NO: 1538762 - RNA, 22 nt, Human adenovirus A
ucgacagugagccguccagcag

SEQ ID NO: 1538763 - RNA, 13 nt, Human adenovirus A
aaagagccacagc

SEQ ID NO: 1538764 - RNA, 22 nt, Human adenovirus A
gcaguaaaucuuccgccaaagg

SEQ ID NO: 1538765 - RNA, 21 nt, Human adenovirus A
cuggcaggggaagguguugag

SEQ ID NO: 1538766 - RNA, 15 nt, Human adenovirus A
agccugaaaaauaaa

SEQ ID NO: 1538767 - RNA, 21 nt, Human adenovirus A
cuuuguagaagcuuauguaca

SEQ ID NO: 1538768 - RNA, 21 nt, Human adenovirus A
ccacuaaagaccgaugcguua

SEQ ID NO: 1538769 - RNA, 16 nt, Human adenovirus A
gggauuaguucugcac

SEQ ID NO: 1538770 - RNA, 21 nt, Human adenovirus A
uugggcgcccacucuccugag

SEQ ID NO: 1538771 - RNA, 17 nt, Human adenovirus A
ggcguacagccuggagc

SEQ ID NO: 1538772 - RNA, 14 nt, Human adenovirus A
uguggaaagcauuu

SEQ ID NO: 1538773 - RNA, 20 nt, Human adenovirus A
gggcauacgcuugugcagcc

SEQ ID NO: 1538774 - RNA, 14 nt, Human adenovirus A
uguaaggaacgagg

SEQ ID NO: 1538775 - RNA, 14 nt, Human adenovirus A
aguauuugucuccu

SEQ ID NO: 1538776 - RNA, 22 nt, Human adenovirus A
uaaauauaucuuuuaacaacaa

SEQ ID NO: 1538777 - RNA, 22 nt, Human adenovirus A
cagaugggaaaaucaauaccac

SEQ ID NO: 1538778 - RNA, 23 nt, Human adenovirus A
guuuugagcggaagccuucaaaa

SEQ ID NO: 1538779 - RNA, 22 nt, Human adenovirus A
cucuguucaauaaauacugcuc

SEQ ID NO: 1538780 - RNA, 12 nt, Human adenovirus A
cuuccuccugga

SEQ ID NO: 1538781 - RNA, 19 nt, Human adenovirus A
acuaaauaucgcagcuggu

SEQ ID NO: 1538782 - RNA, 18 nt, Human adenovirus A
cuccccacagcuggcgca

SEQ ID NO: 1538783 - RNA, 19 nt, Human adenovirus A
aaguaucugcccauuuuug

SEQ ID NO: 1538784 - RNA, 21 nt, Human adenovirus A
ggcgcuguaccgccugaagaa

SEQ ID NO: 1538785 - RNA, 22 nt, Human adenovirus A
ccgcaacagcuauugcaaaccu

SEQ ID NO: 1538786 - RNA, 21 nt, Human adenovirus A
guuaaguuugacaccagaaac

SEQ ID NO: 1538787 - RNA, 15 nt, Human adenovirus A
uuuauuugaaguuuu

SEQ ID NO: 1538788 - RNA, 22 nt, Human adenovirus A
cgccugaaauauauggcccauc

SEQ ID NO: 1538789 - RNA, 21 nt, Human adenovirus A
auuuauaguggcacaacacau

SEQ ID NO: 1538790 - RNA, 22 nt, Human adenovirus A
cuuucaaccaagcccucuccaa

SEQ ID NO: 1538791 - RNA, 16 nt, Human adenovirus A
gcugggcucgaggacc

SEQ ID NO: 1538792 - RNA, 23 nt, Human adenovirus A
caagaccaguucgcccuccuagg

SEQ ID NO: 1538793 - RNA, 13 nt, Human adenovirus A
cgcugcagcuucc

SEQ ID NO: 1538794 - RNA, 16 nt, Human adenovirus A
aauuacuaaaacagua

SEQ ID NO: 1538795 - RNA, 21 nt, Human adenovirus A
cuaccugauaacaagaacacc

SEQ ID NO: 1538796 - RNA, 20 nt, Human adenovirus A
auaauguaauugaaguaagc

SEQ ID NO: 1538797 - RNA, 13 nt, Human adenovirus A
gaaccuuugacaa

SEQ ID NO: 1538798 - RNA, 18 nt, Human adenovirus A
cguggagaagcggagcca

SEQ ID NO: 1538799 - RNA, 16 nt, Human adenovirus A
gcauucaccagccaca

SEQ ID NO: 1538800 - RNA, 21 nt, Human adenovirus A
auggcuaugauuaaugucuaa

SEQ ID NO: 1538801 - RNA, 22 nt, Human adenovirus A
cacgcaucuuguguuuaagccu

SEQ ID NO: 1538802 - RNA, 16 nt, Human adenovirus A
cucacuuugccuaccc

SEQ ID NO: 1538803 - RNA, 16 nt, Human adenovirus A
ccaccaaaugcucuuu

SEQ ID NO: 1538804 - RNA, 14 nt, Human adenovirus A
cugauuuucaucug

SEQ ID NO: 1538805 - RNA, 18 nt, Human adenovirus A
gcagugcggccuguugcc

SEQ ID NO: 1538806 - RNA, 16 nt, Human adenovirus A
cacugggccaggagga

SEQ ID NO: 1538807 - RNA, 14 nt, Human adenovirus A
acaagguggccgcc

SEQ ID NO: 1538808 - RNA, 15 nt, Human adenovirus A
cgggcagccaggcgg

SEQ ID NO: 1538809 - RNA, 17 nt, Human adenovirus A
ccaccuuggcuuucgag

SEQ ID NO: 1538810 - RNA, 17 nt, Human adenovirus A
cuacgcucguccaacca

SEQ ID NO: 1538811 - RNA, 18 nt, Human adenovirus A
acaugcuggauuacaugu

SEQ ID NO: 1538812 - RNA, 16 nt, Human adenovirus A
cgcucgucaagccuac

SEQ ID NO: 1538813 - RNA, 16 nt, Human adenovirus A
cagcccaacccuuccc

SEQ ID NO: 1538814 - RNA, 21 nt, Human adenovirus A
acgagaaaguguuaaccauug

SEQ ID NO: 1538815 - RNA, 18 nt, Human adenovirus A
cauuuacugcagccuguc

SEQ ID NO: 1538816 - RNA, 17 nt, Human adenovirus A
aguggggauugggaagg

SEQ ID NO: 1538817 - RNA, 14 nt, Human adenovirus A
agaaaucuugaagu

SEQ ID NO: 1538818 - RNA, 15 nt, Human adenovirus A
gcgcucaaaggcagg

SEQ ID NO: 1538819 - RNA, 20 nt, Human adenovirus A
aaggcgcuccauccaaaacu

SEQ ID NO: 1538820 - RNA, 14 nt, Human adenovirus A
auuucuuccuccug

SEQ ID NO: 1538821 - RNA, 18 nt, Human adenovirus A
aacccauuugcaucugca

SEQ ID NO: 1538822 - RNA, 21 nt, Human adenovirus A
guagacauagccaaucaggcu

SEQ ID NO: 1538823 - RNA, 18 nt, Human adenovirus A
uaacucuuguaaagauuu

SEQ ID NO: 1538824 - RNA, 23 nt, Human adenovirus A
agcuaugaugcgggcagccaggc

SEQ ID NO: 1538825 - RNA, 23 nt, Human adenovirus A
gaucccguagguuccguuccugu

SEQ ID NO: 1538826 - RNA, 15 nt, Human adenovirus A
ugccagaagcacugg

SEQ ID NO: 1538827 - RNA, 11 nt, Human adenovirus A
gaaacgucacc

SEQ ID NO: 1538828 - RNA, 22 nt, Human adenovirus A
caguguuagucgcgcacugggc

SEQ ID NO: 1538829 - RNA, 22 nt, Human adenovirus A
cuaagugguugggaacagacaa

SEQ ID NO: 1538830 - RNA, 18 nt, Human adenovirus A
cuggacagcggccaugga

SEQ ID NO: 1538831 - RNA, 19 nt, Human adenovirus A
agaaugggaggaaagacag

SEQ ID NO: 1538832 - RNA, 18 nt, Human adenovirus A
uaccuacuccuacaaggc

SEQ ID NO: 1538833 - RNA, 19 nt, Human adenovirus A
ugagcagaacuugggcuac

SEQ ID NO: 1538834 - RNA, 12 nt, Human adenovirus A
augcaaggcgcc

SEQ ID NO: 1538835 - RNA, 23 nt, Human adenovirus A
cuccugacccaccaccaaacugc

SEQ ID NO: 1538836 - RNA, 13 nt, Human adenovirus A
uuacauguggagc

SEQ ID NO: 1538837 - RNA, 13 nt, Human adenovirus A
agggaaauccaac

SEQ ID NO: 1538838 - RNA, 14 nt, Human adenovirus A
ccaacugguugggu

SEQ ID NO: 1538839 - RNA, 19 nt, Human adenovirus A
cgagaaaguguuaaccauu

SEQ ID NO: 1538840 - RNA, 22 nt, Human adenovirus A
cuaauugcccccuuuaccaaca

SEQ ID NO: 1538841 - RNA, 22 nt, Human adenovirus A
acuaaugguuacugaagugccu

SEQ ID NO: 1538842 - RNA, 20 nt, Human adenovirus A
caacguuaaaaauacaguca

SEQ ID NO: 1538843 - RNA, 15 nt, Human adenovirus A
uaccaacaccucaca

SEQ ID NO: 1538844 - RNA, 14 nt, Human adenovirus A
uaacauuagcaguc

SEQ ID NO: 1538845 - RNA, 22 nt, Human adenovirus A
aaaacaguuucuggagcaggug

SEQ ID NO: 1538846 - RNA, 16 nt, Human adenovirus A
auaggccaaacagcug

SEQ ID NO: 1538847 - RNA, 16 nt, Human adenovirus A
gucuuacaugcacauc

SEQ ID NO: 1538848 - RNA, 21 nt, Human adenovirus A
cuguugcgccguagugcgcua

SEQ ID NO: 1538849 - RNA, 16 nt, Human adenovirus A
ugauuuuauccuacaa

SEQ ID NO: 1538850 - RNA, 18 nt, Human adenovirus A
acacuuacccuuuuaaug

SEQ ID NO: 1538851 - RNA, 22 nt, Human adenovirus A
acacuauccugacgccuucaua

SEQ ID NO: 1538852 - RNA, 20 nt, Human adenovirus A
aggggaagguguugagcccg

SEQ ID NO: 1538853 - RNA, 13 nt, Human adenovirus A
guuacugaagugc

SEQ ID NO: 1538854 - RNA, 16 nt, Human adenovirus A
ggacgaccccgccgga

SEQ ID NO: 1538855 - RNA, 17 nt, Human adenovirus A
caacuugcuuccagaca

SEQ ID NO: 1538856 - RNA, 23 nt, Human adenovirus A
ccuucgagaacuaaacaaacugu

SEQ ID NO: 1538857 - RNA, 22 nt, Human adenovirus A
ccagauuucagcacgagagggg

SEQ ID NO: 1538858 - RNA, 12 nt, Human adenovirus A
gacgggccaggc

SEQ ID NO: 1538859 - RNA, 14 nt, Human adenovirus A
ucaugaaaacagca

SEQ ID NO: 1538860 - RNA, 15 nt, Human adenovirus A
guuguggauaccaca

SEQ ID NO: 1538861 - RNA, 15 nt, Human adenovirus A
agcgacagaguugcu

SEQ ID NO: 1538862 - RNA, 19 nt, Human adenovirus A
caacgaaggccaaaccauu

SEQ ID NO: 1538863 - RNA, 18 nt, Human adenovirus A
ccaauuucguuccagacu

SEQ ID NO: 1538864 - RNA, 14 nt, Human adenovirus A
uccuaaugcuucac

SEQ ID NO: 1538865 - RNA, 18 nt, Human adenovirus A
gcugcaaggucauuagau

SEQ ID NO: 1538866 - RNA, 12 nt, Human adenovirus A
aauaauaucaau

SEQ ID NO: 1538867 - RNA, 15 nt, Human adenovirus A
aagcgacgagcaauu

SEQ ID NO: 1538868 - RNA, 23 nt, Human adenovirus A
gagcaaaucucagaaagccaacc

SEQ ID NO: 1538869 - RNA, 23 nt, Human adenovirus A
aaaauuacaaaggcauuaagcca

SEQ ID NO: 1538870 - RNA, 19 nt, Human adenovirus A
aagacacauugacuguuuc

SEQ ID NO: 1538871 - RNA, 23 nt, Human adenovirus A
gcauuuaagcaacauuaaaauca

SEQ ID NO: 1538872 - RNA, 14 nt, Human adenovirus A
guagucggccagca

SEQ ID NO: 1538873 - RNA, 20 nt, Human adenovirus A
gauacagcgcugauuaugca

SEQ ID NO: 1538874 - RNA, 13 nt, Human adenovirus A
acgagugcuuucu

SEQ ID NO: 1538875 - RNA, 22 nt, Human adenovirus A
gagcacuaaaaucccuauggac

SEQ ID NO: 1538876 - RNA, 15 nt, Human adenovirus A
aucauaguugugguc

SEQ ID NO: 1538877 - RNA, 20 nt, Human adenovirus A
acuucacccugggaaacaag

SEQ ID NO: 1538878 - RNA, 12 nt, Human adenovirus A
agcacuggcaac

SEQ ID NO: 1538879 - RNA, 17 nt, Human adenovirus A
cagcccaacccuuccca

SEQ ID NO: 1538880 - RNA, 21 nt, Human adenovirus A
auacacuccaggaaacauaaa

SEQ ID NO: 1538881 - RNA, 12 nt, Human adenovirus A
gaugcagcgacc

SEQ ID NO: 1538882 - RNA, 23 nt, Human adenovirus A
gacaccaacgaccagucuuuuaa

SEQ ID NO: 1538883 - RNA, 17 nt, Human adenovirus A
aacaguaccaaugugca

SEQ ID NO: 1538884 - RNA, 14 nt, Human adenovirus A
cgaggucaagaaca

SEQ ID NO: 1538885 - RNA, 20 nt, Human adenovirus A
acgggaaaaaaaagaggaag

SEQ ID NO: 1538886 - RNA, 22 nt, Human adenovirus A
caagugaauggaacaccagcau

SEQ ID NO: 1538887 - RNA, 16 nt, Human adenovirus A
gaaaagugacgucaca

SEQ ID NO: 1538888 - RNA, 16 nt, Human adenovirus A
aagguacauuggcauu

SEQ ID NO: 1538889 - RNA, 15 nt, Human adenovirus A
caguacaaagccagg

SEQ ID NO: 1538890 - RNA, 16 nt, Human adenovirus A
aauuacaaaggcauua

SEQ ID NO: 1538891 - RNA, 20 nt, Human adenovirus A
cagcguuggcguuccgucaa

SEQ ID NO: 1538892 - RNA, 18 nt, Human adenovirus A
gacuccauaaggcggcgu

SEQ ID NO: 1538893 - RNA, 18 nt, Human adenovirus A
uuuaauccuaggcaaaga

SEQ ID NO: 1538894 - RNA, 17 nt, Human adenovirus A
uaaaggucgcacugagc

SEQ ID NO: 1538895 - RNA, 20 nt, Human adenovirus A
auuaaacaacaaaacacuga

SEQ ID NO: 1538896 - RNA, 14 nt, Human adenovirus A
caagcuucccaacu

SEQ ID NO: 1538897 - RNA, 15 nt, Human adenovirus A
uuucaaacguccagg

SEQ ID NO: 1538898 - RNA, 21 nt, Human adenovirus A
gaaagcuuagccuuaauaacc

SEQ ID NO: 1538899 - RNA, 12 nt, Human adenovirus A
gcuuaucaugug

SEQ ID NO: 1538900 - RNA, 12 nt, Human adenovirus A
guaacuuucaaa

SEQ ID NO: 1538901 - RNA, 23 nt, Human adenovirus A
acacuauacgcgugguuaaacug

SEQ ID NO: 1538902 - RNA, 16 nt, Human adenovirus A
auucuagcaaaaugaa

SEQ ID NO: 1538903 - RNA, 20 nt, Human adenovirus A
ggcggcuccgaacaggugua

SEQ ID NO: 1538904 - RNA, 23 nt, Human adenovirus A
agaaucggcaacagcagcaacaa

SEQ ID NO: 1538905 - RNA, 13 nt, Human adenovirus A
gaagagcugcugc

SEQ ID NO: 1538906 - RNA, 16 nt, Human adenovirus A
cguguacacaaugcau

SEQ ID NO: 1538907 - RNA, 23 nt, Human adenovirus A
ugaauguguuccaguauuuugua

SEQ ID NO: 1538908 - RNA, 16 nt, Human adenovirus A
cuagcguacagccaga

SEQ ID NO: 1538909 - RNA, 21 nt, Human adenovirus A
guggaaagcaucacacagaaa

SEQ ID NO: 1538910 - RNA, 16 nt, Human adenovirus A
ugcuccuuuucuuaca

SEQ ID NO: 1538911 - RNA, 17 nt, Human adenovirus A
auuguagccugcuuuca

SEQ ID NO: 1538912 - RNA, 14 nt, Human adenovirus A
ggaggaagcugagg

SEQ ID NO: 1538913 - RNA, 19 nt, Human adenovirus A
agcgacacuaucaccgccg

SEQ ID NO: 1538914 - RNA, 23 nt, Human adenovirus A
acgaggcggugagcauccaaaug

SEQ ID NO: 1538915 - RNA, 22 nt, Human adenovirus A
cauacacucauguauuuuuuca

SEQ ID NO: 1538916 - RNA, 14 nt, Human adenovirus A
agaaacugugcccg

SEQ ID NO: 1538917 - RNA, 22 nt, Human adenovirus A
cuuccuucagauuuugugccua

SEQ ID NO: 1538918 - RNA, 15 nt, Human adenovirus A
acacugaaggcauuu

SEQ ID NO: 1538919 - RNA, 22 nt, Human adenovirus A
gccacaccuccacccaaucaaa

SEQ ID NO: 1538920 - RNA, 16 nt, Human adenovirus A
gugaauguguuccagu

SEQ ID NO: 1538921 - RNA, 22 nt, Human adenovirus A
acucuacuaacaacuccagaug

SEQ ID NO: 1538922 - RNA, 18 nt, Human adenovirus A
agacguaaaccuugaaau

SEQ ID NO: 1538923 - RNA, 18 nt, Human adenovirus A
uuggguccuacggaggga

SEQ ID NO: 1538924 - RNA, 22 nt, Human adenovirus A
augaaacccgcugugagcaaau

SEQ ID NO: 1538925 - RNA, 18 nt, Human adenovirus A
gcagcaaaugcccugcaa

SEQ ID NO: 1538926 - RNA, 15 nt, Human adenovirus A
ucuccaaaucuuaaa

SEQ ID NO: 1538927 - RNA, 14 nt, Human adenovirus A
uaaaacugauuuac

SEQ ID NO: 1538928 - RNA, 12 nt, Human adenovirus A
ugcagcagaauu

SEQ ID NO: 1538929 - RNA, 15 nt, Human adenovirus A
ugauaucuugaaucu

SEQ ID NO: 1538930 - RNA, 17 nt, Human adenovirus A
aggaaaacaaacaacga

SEQ ID NO: 1538931 - RNA, 10 nt, Human adenovirus A
cuuacaguau

SEQ ID NO: 1538932 - RNA, 17 nt, Human adenovirus A
ucuucugacauugcuuc

SEQ ID NO: 1538933 - RNA, 15 nt, Human adenovirus A
uccaauggucuucaa

SEQ ID NO: 1538934 - RNA, 16 nt, Human adenovirus A
aggcaaguuguggaua

SEQ ID NO: 1538935 - RNA, 21 nt, Human adenovirus A
gcggccauuggagccguuccc

SEQ ID NO: 1538936 - RNA, 13 nt, Human adenovirus A
uuaaaguaaauua

SEQ ID NO: 1538937 - RNA, 17 nt, Human adenovirus A
aagggugguugcaaagu

SEQ ID NO: 1538938 - RNA, 21 nt, Human adenovirus A
cuccaggggaaacccauuugc

SEQ ID NO: 1538939 - RNA, 18 nt, Human adenovirus A
ucaggaagauuauacaaa

SEQ ID NO: 1538940 - RNA, 13 nt, Human adenovirus A
caguaaucuuuuu

SEQ ID NO: 1538941 - RNA, 15 nt, Human adenovirus A
uccaaauggacgagg

SEQ ID NO: 1538942 - RNA, 19 nt, Human adenovirus A
ugaguaggcaaguugugga

SEQ ID NO: 1538943 - RNA, 11 nt, Human adenovirus A
aguuggaaacu

SEQ ID NO: 1538944 - RNA, 14 nt, Human adenovirus A
aaggggaggacccc

SEQ ID NO: 1538945 - RNA, 19 nt, Human adenovirus A
ggccaaacagcuguggaaa

SEQ ID NO: 1538946 - RNA, 17 nt, Human adenovirus A
uuuacuaaaaugcaaaa

SEQ ID NO: 1538947 - RNA, 20 nt, Human adenovirus A
uugaauaguucaucuuagua

SEQ ID NO: 1538948 - RNA, 15 nt, Human adenovirus A
cugucacuuugcaac

SEQ ID NO: 1538949 - RNA, 17 nt, Human adenovirus A
aaggauugguuccuaau

SEQ ID NO: 1538950 - RNA, 20 nt, Human adenovirus A
caccuuuuaccuaaaccaca

SEQ ID NO: 1538951 - RNA, 21 nt, Human adenovirus A
cauggcuuccaugccuuuuuc

SEQ ID NO: 1538952 - RNA, 18 nt, Human adenovirus A
gcuuggaagaaaaaaacc

SEQ ID NO: 1538953 - RNA, 12 nt, Human adenovirus A
uacuuguuguau

SEQ ID NO: 1538954 - RNA, 18 nt, Human adenovirus A
cauaguuucgguuacugc

SEQ ID NO: 1538955 - RNA, 13 nt, Human adenovirus A
acggcggcgcaua

SEQ ID NO: 1538956 - RNA, 12 nt, Human adenovirus A
acccuucccaac

SEQ ID NO: 1538957 - RNA, 16 nt, Human adenovirus A
ucgcagcgcacuggca

SEQ ID NO: 1538958 - RNA, 15 nt, Human adenovirus A
cggcgaacgggcagc

SEQ ID NO: 1538959 - RNA, 13 nt, Human adenovirus A
uuuauccuacaaa

SEQ ID NO: 1538960 - RNA, 16 nt, Human adenovirus A
acuggacagcggccau

SEQ ID NO: 1538961 - RNA, 10 nt, Human adenovirus A
guaaauuaaa

SEQ ID NO: 1538962 - RNA, 12 nt, Human adenovirus A
cuaaaaugcaaa

SEQ ID NO: 1538963 - RNA, 16 nt, Human adenovirus A
gcagagucuauugcgu

SEQ ID NO: 1538964 - RNA, 20 nt, Human adenovirus A
uacacuggcuggcuuuugga

SEQ ID NO: 1538965 - RNA, 20 nt, Human adenovirus A
aggucgaggacuuggaagaa

SEQ ID NO: 1538966 - RNA, 12 nt, Human adenovirus A
gaacacacugau

SEQ ID NO: 1538967 - RNA, 18 nt, Human adenovirus A
acccuauuuuuugggaac

SEQ ID NO: 1538968 - RNA, 14 nt, Human adenovirus A
acguaacuuucaaa

SEQ ID NO: 1538969 - RNA, 19 nt, Human adenovirus A
gauggaucuggagccacag

SEQ ID NO: 1538970 - RNA, 22 nt, Human adenovirus A
uggggugcugcccuuccuaauu

SEQ ID NO: 1538971 - RNA, 14 nt, Human adenovirus A
agggguacuggauc

SEQ ID NO: 1538972 - RNA, 12 nt, Human adenovirus A
gcucagcuggaa

SEQ ID NO: 1538973 - RNA, 22 nt, Human adenovirus A
aaacauucgcagcgcacuggca

SEQ ID NO: 1538974 - RNA, 15 nt, Human adenovirus A
agucugacagcaauu

SEQ ID NO: 1538975 - RNA, 20 nt, Human adenovirus A
cuucaaaguaccuuacaaac

SEQ ID NO: 1538976 - RNA, 16 nt, Human adenovirus A
uuugaguacucagccg

SEQ ID NO: 1538977 - RNA, 13 nt, Human adenovirus A
auaugggcgcaga

SEQ ID NO: 1538978 - RNA, 21 nt, Human adenovirus A
cuuacgaaaccgugauggcag

SEQ ID NO: 1538979 - RNA, 19 nt, Human adenovirus A
ggaacucgagugcaugcau

SEQ ID NO: 1538980 - RNA, 14 nt, Human adenovirus A
cagagcgcggcugc

SEQ ID NO: 1538981 - RNA, 16 nt, Human adenovirus A
uacugucccccaccag

SEQ ID NO: 1538982 - RNA, 22 nt, Human adenovirus A
agauaaguuuaaaggcauuaug

SEQ ID NO: 1538983 - RNA, 19 nt, Human adenovirus A
uucagcagagucgagguca

SEQ ID NO: 1538984 - RNA, 21 nt, Human adenovirus A
acagcaacuuuuuaaccacug

SEQ ID NO: 1538985 - RNA, 13 nt, Human adenovirus A
caaucucaguguc

SEQ ID NO: 1538986 - RNA, 19 nt, Human adenovirus A
auuuuuugggaaccuuuga

SEQ ID NO: 1538987 - RNA, 16 nt, Human adenovirus A
acguugcaagaggaga

SEQ ID NO: 1538988 - RNA, 17 nt, Human adenovirus A
ugcaucauuacuucaaa

SEQ ID NO: 1538989 - RNA, 13 nt, Human adenovirus A
acugaucggccgu

SEQ ID NO: 1538990 - RNA, 17 nt, Human adenovirus A
acuggacagcggccaug

SEQ ID NO: 1538991 - RNA, 13 nt, Human adenovirus A
uggcuuuuggaug

SEQ ID NO: 1538992 - RNA, 15 nt, Human adenovirus A
uaccgccugaagaag

SEQ ID NO: 1538993 - RNA, 17 nt, Human adenovirus A
gacaugguaagcucuug

SEQ ID NO: 1538994 - RNA, 22 nt, Human adenovirus A
ugaguuaucuugguaggcaauu

SEQ ID NO: 1538995 - RNA, 19 nt, Human adenovirus A
aaccacggccucagcagcg

SEQ ID NO: 1538996 - RNA, 21 nt, Human adenovirus A
ccacuugguguuucaggaaaa

SEQ ID NO: 1538997 - RNA, 16 nt, Human adenovirus A
auuuugccagcucuug

SEQ ID NO: 1538998 - RNA, 22 nt, Human adenovirus A
gcgugaaguauuccaugagccc

SEQ ID NO: 1538999 - RNA, 18 nt, Human adenovirus A
ccaaauuuaaggccaggg

SEQ ID NO: 1539000 - RNA, 17 nt, Human adenovirus A
cgcgcacugggccagga

SEQ ID NO: 1539001 - RNA, 13 nt, Human adenovirus A
cucccacccauga

SEQ ID NO: 1539002 - RNA, 18 nt, Human adenovirus A
gagaucuaggcuguggac

SEQ ID NO: 1539003 - RNA, 12 nt, Human adenovirus A
cccgccuggcag

SEQ ID NO: 1539004 - RNA, 20 nt, Human adenovirus A
aucuacagcgacaaagcacu

SEQ ID NO: 1539005 - RNA, 13 nt, Human adenovirus A
auugcgcaggggu

SEQ ID NO: 1539006 - RNA, 14 nt, Human adenovirus A
aaccaaauacugcu

SEQ ID NO: 1539007 - RNA, 15 nt, Human adenovirus A
uucgacgggccaggc

SEQ ID NO: 1539008 - RNA, 17 nt, Human adenovirus A
gagggucaggaaaccca

SEQ ID NO: 1539009 - RNA, 15 nt, Human adenovirus A
cauucuugagccugg

SEQ ID NO: 1539010 - RNA, 17 nt, Human adenovirus A
ucgcuaugaaucuuuac

SEQ ID NO: 1539011 - RNA, 15 nt, Human adenovirus A
aagguuuaauguuua

SEQ ID NO: 1539012 - RNA, 12 nt, Human adenovirus A
gcccagcuguuc

SEQ ID NO: 1539013 - RNA, 12 nt, Human adenovirus A
ggaggcagcugg

SEQ ID NO: 1539014 - RNA, 20 nt, Human adenovirus A
cuccaaccaugaaaacagca

SEQ ID NO: 1539015 - RNA, 16 nt, Human adenovirus A
agcugugaaaaugcgu

SEQ ID NO: 1539016 - RNA, 13 nt, Human adenovirus A
cuguuuacuucaa

SEQ ID NO: 1539017 - RNA, 23 nt, Human adenovirus A
cagagcguugguucgacgggcca

SEQ ID NO: 1539018 - RNA, 15 nt, Human adenovirus A
uuaucuucaaaucau

SEQ ID NO: 1539019 - RNA, 13 nt, Human adenovirus A
uaaguuuaaaggc

SEQ ID NO: 1539020 - RNA, 19 nt, Human adenovirus A
ugaauaagccaccgcucau

SEQ ID NO: 1539021 - RNA, 12 nt, Human adenovirus A
agccgucaaaau

SEQ ID NO: 1539022 - RNA, 17 nt, Human adenovirus A
acuagaguguauggaaa

SEQ ID NO: 1539023 - RNA, 18 nt, Human adenovirus A
uacuaaagaaacaaacua

SEQ ID NO: 1539024 - RNA, 14 nt, Human adenovirus A
agauuguaauuuuu

SEQ ID NO: 1539025 - RNA, 18 nt, Human adenovirus A
gaaaacaauguucccaaa

SEQ ID NO: 1539026 - RNA, 15 nt, Human adenovirus A
ugguggguuuggaug

SEQ ID NO: 1539027 - RNA, 20 nt, Human adenovirus A
uagaaucggcaacagcagca

SEQ ID NO: 1539028 - RNA, 23 nt, Human adenovirus A
uuuaaaggaagcugcuguucuua

SEQ ID NO: 1539029 - RNA, 19 nt, Human adenovirus A
aggcgcuccauccaaaacu

SEQ ID NO: 1539030 - RNA, 21 nt, Human adenovirus A
guaacuuucaaaaaagcuuua

SEQ ID NO: 1539031 - RNA, 14 nt, Human adenovirus A
agacuucccacagc

SEQ ID NO: 1539032 - RNA, 15 nt, Human adenovirus A
ugauucuucagagca

SEQ ID NO: 1539033 - RNA, 20 nt, Human adenovirus A
caccaaauuuaaggccaggg

SEQ ID NO: 1539034 - RNA, 20 nt, Human adenovirus A
gcgugaaguauuccaugagc

SEQ ID NO: 1539035 - RNA, 13 nt, Human adenovirus A
ccaacccuuccca

SEQ ID NO: 1539036 - RNA, 22 nt, Human adenovirus A
gccacacuuaacuuuuuacuaa

SEQ ID NO: 1539037 - RNA, 14 nt, Human adenovirus A
cuuucucugugaca

SEQ ID NO: 1539038 - RNA, 13 nt, Human adenovirus A
ugaacaaaaucac

SEQ ID NO: 1539039 - RNA, 15 nt, Human adenovirus A
acccucgccuuugga

SEQ ID NO: 1539040 - RNA, 15 nt, Human adenovirus A
acgggcgugugacug

SEQ ID NO: 1539041 - RNA, 16 nt, Human adenovirus A
cgacauuuagaccacu

SEQ ID NO: 1539042 - RNA, 21 nt, Human adenovirus A
caauuuacauuuuaacuguga

SEQ ID NO: 1539043 - RNA, 14 nt, Human adenovirus A
acgcucaaagaaac

SEQ ID NO: 1539044 - RNA, 19 nt, Human adenovirus A
uuugcgguguaccugauuu

SEQ ID NO: 1539045 - RNA, 14 nt, Human adenovirus A
uuuaaaaaccaucu

SEQ ID NO: 1539046 - RNA, 18 nt, Human adenovirus A
ggcgugguuaaacaggga

SEQ ID NO: 1539047 - RNA, 19 nt, Human adenovirus A
gcuuucaagauggccacuc

SEQ ID NO: 1539048 - RNA, 16 nt, Human adenovirus A
guugggauuacaugcu

SEQ ID NO: 1539049 - RNA, 13 nt, Human adenovirus A
aacggguggaaaa

SEQ ID NO: 1539050 - RNA, 18 nt, Human adenovirus A
cacccaaucaaauuacac

SEQ ID NO: 1539051 - RNA, 12 nt, Human adenovirus A
cuccccacagcu

SEQ ID NO: 1539052 - RNA, 16 nt, Human adenovirus A
ggaagaauggcuguug

SEQ ID NO: 1539053 - RNA, 13 nt, Human adenovirus A
caacagcacagga

SEQ ID NO: 1539054 - RNA, 14 nt, Human adenovirus A
aaagaucaguagcu

SEQ ID NO: 1539055 - RNA, 14 nt, Human adenovirus A
gcacuuccuucaga

SEQ ID NO: 1539056 - RNA, 15 nt, Human adenovirus A
auagaaaaagcuaca

SEQ ID NO: 1539057 - RNA, 17 nt, Human adenovirus A
acaaauuugcauuuccc

SEQ ID NO: 1539058 - RNA, 19 nt, Human adenovirus A
ucaccgcgcugcggccaug

SEQ ID NO: 1539059 - RNA, 12 nt, Human adenovirus A
uagaugugcugu

SEQ ID NO: 1539060 - RNA, 18 nt, Human adenovirus A
ucuugaaugcucuggaca

SEQ ID NO: 1539061 - RNA, 15 nt, Human adenovirus A
aggaaaagcugccac

SEQ ID NO: 1539062 - RNA, 16 nt, Human adenovirus A
acuccaggaaacauaa

SEQ ID NO: 1539063 - RNA, 13 nt, Human adenovirus A
agcugugaaaaug

SEQ ID NO: 1539064 - RNA, 14 nt, Human adenovirus A
gcccagcaugacca

SEQ ID NO: 1539065 - RNA, 15 nt, Human adenovirus A
auguguugugcacuu

SEQ ID NO: 1539066 - RNA, 15 nt, Human adenovirus A
aacuuaacaacugau

SEQ ID NO: 1539067 - RNA, 20 nt, Human adenovirus A
auugccgcacggccaaugcc

SEQ ID NO: 1539068 - RNA, 17 nt, Human adenovirus A
cagaccuacgguggcag

SEQ ID NO: 1539069 - RNA, 14 nt, Human adenovirus A
ugaaagucaaguca

SEQ ID NO: 1539070 - RNA, 17 nt, Human adenovirus A
aagucaacccaaacugu

SEQ ID NO: 1539071 - RNA, 18 nt, Human adenovirus A
acacucaggccauaaaga

SEQ ID NO: 1539072 - RNA, 19 nt, Human adenovirus A
gucccgacuuacaggagga

SEQ ID NO: 1539073 - RNA, 13 nt, Human adenovirus A
acaacaaaacacu

SEQ ID NO: 1539074 - RNA, 14 nt, Human adenovirus A
caagaugaguaaag

SEQ ID NO: 1539075 - RNA, 21 nt, Human adenovirus A
aggcauuuccagguggggaaa

SEQ ID NO: 1539076 - RNA, 18 nt, Human adenovirus A
agcugaugcuacuaccca

SEQ ID NO: 1539077 - RNA, 17 nt, Human adenovirus A
aaaagcauacuuaccaa

SEQ ID NO: 1539078 - RNA, 14 nt, Human adenovirus A
uacccaccaucuuc

SEQ ID NO: 1539079 - RNA, 17 nt, Human adenovirus A
ucgcugguccccagaug

SEQ ID NO: 1539080 - RNA, 21 nt, Human adenovirus A
uuuacaguacaaauacaguuu

SEQ ID NO: 1539081 - RNA, 20 nt, Human adenovirus A
agguagaggcauaaaaacuu

SEQ ID NO: 1539082 - RNA, 10 nt, Human adenovirus A
agcagugaaa

SEQ ID NO: 1539083 - RNA, 17 nt, Human adenovirus A
gaaaagcugccaccucu

SEQ ID NO: 1539084 - RNA, 16 nt, Human adenovirus A
ucacaucaaccccuac

SEQ ID NO: 1539085 - RNA, 17 nt, Human adenovirus A
agcaaccaaaugagcaa

SEQ ID NO: 1539086 - RNA, 22 nt, Human adenovirus A
cacuagaccuuuguuaccacuu

SEQ ID NO: 1539087 - RNA, 16 nt, Human adenovirus A
acuuguaacuguggaa

SEQ ID NO: 1539088 - RNA, 16 nt, Human adenovirus A
ccgacuaacaggugaa

SEQ ID NO: 1539089 - RNA, 15 nt, Human adenovirus A
caaaugcgaccucag

SEQ ID NO: 1539090 - RNA, 15 nt, Human adenovirus A
agcgcgcgacuggcu

SEQ ID NO: 1539091 - RNA, 12 nt, Human adenovirus A
cuuggaguguac

SEQ ID NO: 1539092 - RNA, 13 nt, Human adenovirus A
ucucauaaucagu

SEQ ID NO: 1539093 - RNA, 17 nt, Human adenovirus A
augauagagauaagcag

SEQ ID NO: 1539094 - RNA, 20 nt, Human adenovirus A
ucuccuaaauauccaaagua

SEQ ID NO: 1539095 - RNA, 13 nt, Human adenovirus A
aggaagacagcau

SEQ ID NO: 1539096 - RNA, 19 nt, Human adenovirus A
ucccgauaccaaaaacacc

SEQ ID NO: 1539097 - RNA, 24 nt, Human adenovirus A
aucucacuuaagucuuuacaauaa

SEQ ID NO: 1539098 - RNA, 18 nt, Human adenovirus A
gcaggcuggaggugcagg

SEQ ID NO: 1539099 - RNA, 16 nt, Human adenovirus A
gaaucggcaacagcag

SEQ ID NO: 1539100 - RNA, 13 nt, Human adenovirus A
aagaaacagcagc

SEQ ID NO: 1539101 - RNA, 18 nt, Human adenovirus A
gccauaauguaacccuuc

SEQ ID NO: 1539102 - RNA, 13 nt, Human adenovirus A
aaaccuagcugcu

SEQ ID NO: 1539103 - RNA, 23 nt, Human adenovirus A
gcaggaaaucugggaggaagaau

SEQ ID NO: 1539104 - RNA, 19 nt, Human adenovirus A
cuggcgaacaggaagagcc

SEQ ID NO: 1539105 - RNA, 18 nt, Human adenovirus A
cagauuaagcaacauacu

SEQ ID NO: 1539106 - RNA, 15 nt, Human adenovirus A
cugcagacaguggcu

SEQ ID NO: 1539107 - RNA, 15 nt, Human adenovirus A
agccgccauggaaau

SEQ ID NO: 1539108 - RNA, 21 nt, Human adenovirus A
augugcaaauauaaaagcaca

SEQ ID NO: 1539109 - RNA, 14 nt, Human adenovirus A
ugcacuuccuucag

SEQ ID NO: 1539110 - RNA, 14 nt, Human adenovirus A
gcuuaugcauagcu

SEQ ID NO: 1539111 - RNA, 11 nt, Human adenovirus A
agguggaaacc

SEQ ID NO: 1539112 - RNA, 12 nt, Human adenovirus A
guggucaggaag

SEQ ID NO: 1539113 - RNA, 19 nt, Human adenovirus A
uguauacucuggaaccauu

SEQ ID NO: 1539114 - RNA, 18 nt, Human adenovirus A
cacugaaaaaccaacaaa

SEQ ID NO: 1539115 - RNA, 14 nt, Human adenovirus A
aaguuuuguuucuu

SEQ ID NO: 1539116 - RNA, 17 nt, Human adenovirus A
acacgguacuuuuccuu

SEQ ID NO: 1539117 - RNA, 20 nt, Human adenovirus A
uuucaauugcagaacuaucu

SEQ ID NO: 1539118 - RNA, 12 nt, Human adenovirus A
cauccaaaacca

SEQ ID NO: 1539119 - RNA, 20 nt, Human adenovirus A
ugguuacugaagugccucaa

SEQ ID NO: 1539120 - RNA, 23 nt, Human adenovirus A
caaauauaaaagcacaacuccau

SEQ ID NO: 1539121 - RNA, 16 nt, Human adenovirus A
cacuaccgucagugaa

SEQ ID NO: 1539122 - RNA, 16 nt, Human adenovirus A
accuaaacgagggaga

SEQ ID NO: 1539123 - RNA, 19 nt, Human adenovirus A
uuauuugcugcguaggaac

SEQ ID NO: 1539124 - RNA, 14 nt, Human adenovirus A
augcagcaaacacu

SEQ ID NO: 1539125 - RNA, 20 nt, Human adenovirus A
caauuugccuaaaagcuauu

SEQ ID NO: 1539126 - RNA, 16 nt, Human adenovirus A
gcaagacagaaauaca

SEQ ID NO: 1539127 - RNA, 15 nt, Human adenovirus A
uucccaaauuuucca

SEQ ID NO: 1539128 - RNA, 15 nt, Human adenovirus A
caccaccaaacugca

SEQ ID NO: 1539129 - RNA, 19 nt, Human adenovirus A
aauuuuuuagauuguuaua

SEQ ID NO: 1539130 - RNA, 15 nt, Human adenovirus A
acgggcagccugucu

SEQ ID NO: 1539131 - RNA, 20 nt, Human adenovirus A
guagaggaaaagcugccacc

SEQ ID NO: 1539132 - RNA, 19 nt, Human adenovirus A
aggaagccacaugggaagg

SEQ ID NO: 1539133 - RNA, 18 nt, Human adenovirus A
agucauugguaccuucga

SEQ ID NO: 1539134 - RNA, 19 nt, Human adenovirus A
cuguugcuacugcagaccc

SEQ ID NO: 1539135 - RNA, 18 nt, Human adenovirus A
gcuuccaugccuuuuucc

SEQ ID NO: 1539136 - RNA, 13 nt, Human adenovirus A
aauucuuaaacaa

SEQ ID NO: 1539137 - RNA, 12 nt, Human adenovirus A
aguaacaaacug

SEQ ID NO: 1539138 - RNA, 13 nt, Human adenovirus A
agccaaaaaaaca

SEQ ID NO: 1539139 - RNA, 12 nt, Human adenovirus A
accccugggcuu

SEQ ID NO: 1539140 - RNA, 19 nt, Human adenovirus A
acuuuagccccagcggcag

SEQ ID NO: 1539141 - RNA, 16 nt, Human adenovirus A
uuacaaaggcauuaag

SEQ ID NO: 1539142 - RNA, 14 nt, Human adenovirus A
auaugggcucuuuu

SEQ ID NO: 1539143 - RNA, 22 nt, Human adenovirus A
aaacgcugggcucgaggaccau

SEQ ID NO: 1539144 - RNA, 13 nt, Human adenovirus A
gcuucuugcuuua

SEQ ID NO: 1539145 - RNA, 12 nt, Human adenovirus A
aaagaucacagc

SEQ ID NO: 1539146 - RNA, 13 nt, Human adenovirus A
cagaaagccaacc

SEQ ID NO: 1539147 - RNA, 20 nt, Human adenovirus A
aaaaauuuucccaacaaugg

SEQ ID NO: 1539148 - RNA, 21 nt, Human adenovirus A
acugcgucaguaacaaacugg

SEQ ID NO: 1539149 - RNA, 20 nt, Human adenovirus A
ccacgccgcgccccacuucc

SEQ ID NO: 1539150 - RNA, 21 nt, Human adenovirus A
gccaaacagcuguggaaagca

SEQ ID NO: 1539151 - RNA, 11 nt, Human adenovirus A
cauuacaguag

SEQ ID NO: 1539152 - RNA, 22 nt, Human adenovirus A
cacugucgccaaccucacugcu

SEQ ID NO: 1539153 - RNA, 19 nt, Human adenovirus A
uuccagcgccaccugccau

SEQ ID NO: 1539154 - RNA, 16 nt, Human adenovirus A
gaauaaaauuucuaga

SEQ ID NO: 1539155 - RNA, 13 nt, Human adenovirus A
guaguugcgcaag

SEQ ID NO: 1539156 - RNA, 21 nt, Human adenovirus A
uguugugcauauuuucuugua

SEQ ID NO: 1539157 - RNA, 11 nt, Human adenovirus A
uccaaaaccag

SEQ ID NO: 1539158 - RNA, 12 nt, Human adenovirus A
cagaagcacugg

SEQ ID NO: 1539159 - RNA, 21 nt, Human adenovirus A
gaguacacgcgcucaaaggca

SEQ ID NO: 1539160 - RNA, 20 nt, Human adenovirus A
uccauuuccaccaaaugcuc

SEQ ID NO: 1539161 - RNA, 22 nt, Human adenovirus A
uuaaauugagaugguguuauga

SEQ ID NO: 1539162 - RNA, 16 nt, Human adenovirus A
cagcuaacaaugcagc

SEQ ID NO: 1539163 - RNA, 13 nt, Human adenovirus A
cuucaucuuuucu

SEQ ID NO: 1539164 - RNA, 18 nt, Human adenovirus A
cuuagucauuacaacauu

SEQ ID NO: 1539165 - RNA, 16 nt, Human adenovirus A
cauacaucaccucuuu

SEQ ID NO: 1539166 - RNA, 19 nt, Human adenovirus A
uuuaccaaugaauuaaaua

SEQ ID NO: 1539167 - RNA, 23 nt, Human adenovirus A
ccuccgugaguuggccuggaaau

SEQ ID NO: 1539168 - RNA, 14 nt, Human adenovirus A
ccgccgccaaaccg

SEQ ID NO: 1539169 - RNA, 22 nt, Human adenovirus A
gugcccccuaaacggcaagcca

SEQ ID NO: 1539170 - RNA, 17 nt, Human adenovirus A
gcgcaccaucuccauuc

SEQ ID NO: 1539171 - RNA, 18 nt, Human adenovirus A
caggaaaaaaaagaaagu

SEQ ID NO: 1539172 - RNA, 20 nt, Human adenovirus A
uggcagcaaugcuuggaaga

SEQ ID NO: 1539173 - RNA, 17 nt, Human adenovirus A
uguucaacaacagcuuc

SEQ ID NO: 1539174 - RNA, 17 nt, Human adenovirus A
ucgggaauuaauggagu

SEQ ID NO: 1539175 - RNA, 18 nt, Human adenovirus A
acuagguauaagaaagag

SEQ ID NO: 1539176 - RNA, 17 nt, Human adenovirus A
uauugccaccuuuuguu

SEQ ID NO: 1539177 - RNA, 23 nt, Human adenovirus A
gcugcccugauauaucaggaaaa

SEQ ID NO: 1539178 - RNA, 12 nt, Human adenovirus A
cacagccagugg

SEQ ID NO: 1539179 - RNA, 17 nt, Human adenovirus A
aguuguggauaccacag

SEQ ID NO: 1539180 - RNA, 21 nt, Human adenovirus A
cucuaaguucuguuucaugua

SEQ ID NO: 1539181 - RNA, 16 nt, Human adenovirus A
ugcaggacgcagaagc

SEQ ID NO: 1539182 - RNA, 21 nt, Human adenovirus A
caacggcaggaaaucugggag

SEQ ID NO: 1539183 - RNA, 18 nt, Human adenovirus A
ggaaagcauuuuggauuu

SEQ ID NO: 1539184 - RNA, 21 nt, Human adenovirus A
gcauuccccauccaaaaccag

SEQ ID NO: 1539185 - RNA, 13 nt, Human adenovirus A
guccucuuccucu

SEQ ID NO: 1539186 - RNA, 18 nt, Human adenovirus A
uucagccacucaaacauu

SEQ ID NO: 1539187 - RNA, 13 nt, Human adenovirus A
uaaccgcccccac

SEQ ID NO: 1539188 - RNA, 13 nt, Human adenovirus A
guggaggaauuua

SEQ ID NO: 1539189 - RNA, 14 nt, Human adenovirus A
auuuaauuucagau

SEQ ID NO: 1539190 - RNA, 15 nt, Human adenovirus A
cuuaaaaaaacaaaa

SEQ ID NO: 1539191 - RNA, 22 nt, Human adenovirus A
gccaugcuaugcaggcagccgu

SEQ ID NO: 1539192 - RNA, 16 nt, Human adenovirus A
uaaacugucuguaaaa

SEQ ID NO: 1539193 - RNA, 13 nt, Human adenovirus A
ucccauuacagua

SEQ ID NO: 1539194 - RNA, 15 nt, Human adenovirus A
uuuaaugcaucuuug

SEQ ID NO: 1539195 - RNA, 19 nt, Human adenovirus A
cacaacacauacauacacu

SEQ ID NO: 1539196 - RNA, 15 nt, Human adenovirus A
uaauguaacccuucc

SEQ ID NO: 1539197 - RNA, 21 nt, Human adenovirus A
cgggucggagaaccuuucaag

SEQ ID NO: 1539198 - RNA, 21 nt, Human adenovirus A
aagcugaaacuaggggcuggc

SEQ ID NO: 1539199 - RNA, 16 nt, Human adenovirus A
cauaccuuaaaaacug

SEQ ID NO: 1539200 - RNA, 17 nt, Human adenovirus A
ccauuauuauggcaauu

SEQ ID NO: 1539201 - RNA, 16 nt, Human adenovirus A
cagguauuacuaaaag

SEQ ID NO: 1539202 - RNA, 20 nt, Human adenovirus A
acugccccgggguuggugga

SEQ ID NO: 1539203 - RNA, 20 nt, Human adenovirus A
ccaacggcacaugcgagcca

SEQ ID NO: 1539204 - RNA, 19 nt, Human adenovirus A
aaaaauguguacuugcuuu

SEQ ID NO: 1539205 - RNA, 15 nt, Human adenovirus A
uaccucaaaagcgaa

SEQ ID NO: 1539206 - RNA, 23 nt, Human adenovirus A
gggccaggcgcauugggcggcga

SEQ ID NO: 1539207 - RNA, 17 nt, Human adenovirus A
acauucgcagcgcacug

SEQ ID NO: 1539208 - RNA, 13 nt, Human adenovirus A
gcggcacaacaga

SEQ ID NO: 1539209 - RNA, 16 nt, Human adenovirus A
cgcuggggcacagcuu

SEQ ID NO: 1539210 - RNA, 15 nt, Human adenovirus A
cuuaaauugagaugg

SEQ ID NO: 1539211 - RNA, 22 nt, Human adenovirus A
aaugcuuagucauuacaacauu

SEQ ID NO: 1539212 - RNA, 21 nt, Human adenovirus A
auggaacaauugcuucugagu

SEQ ID NO: 1539213 - RNA, 22 nt, Human adenovirus A
cuagaggcgugccguuggcaga

SEQ ID NO: 1539214 - RNA, 10 nt, Human adenovirus A
augcuggaac

SEQ ID NO: 1539215 - RNA, 16 nt, Human adenovirus A
ucacaacacagcacua

SEQ ID NO: 1539216 - RNA, 22 nt, Human adenovirus A
caaaaguaauaucauuaaauaa

SEQ ID NO: 1539217 - RNA, 13 nt, Human adenovirus A
cagaaaaaaauug

SEQ ID NO: 1539218 - RNA, 20 nt, Human adenovirus A
auugaaccgguugaaacaga

SEQ ID NO: 1539219 - RNA, 17 nt, Human adenovirus A
uuggcuucgaaugcugu

SEQ ID NO: 1539220 - RNA, 21 nt, Human adenovirus A
caacaagucuucugacauugc

SEQ ID NO: 1539221 - RNA, 14 nt, Human adenovirus A
uugugcauauuuuc

SEQ ID NO: 1539222 - RNA, 18 nt, Human adenovirus A
caaggaccgcauguauuc

SEQ ID NO: 1539223 - RNA, 22 nt, Human adenovirus A
caaaucagaagccagcagcaaa

SEQ ID NO: 1539224 - RNA, 14 nt, Human adenovirus A
auuuacugcagccu

SEQ ID NO: 1539225 - RNA, 20 nt, Human adenovirus A
ucccgauaccaaaaacaccu

SEQ ID NO: 1539226 - RNA, 13 nt, Human adenovirus A
auagcugaacccc

SEQ ID NO: 1539227 - RNA, 16 nt, Human adenovirus A
gcucuaauagaacugg

SEQ ID NO: 1539228 - RNA, 16 nt, Human adenovirus A
guuacugaagugccuc

SEQ ID NO: 1539229 - RNA, 17 nt, Human adenovirus A
gcgaacaggagcugacg

SEQ ID NO: 1539230 - RNA, 13 nt, Human adenovirus A
cuaacuaccuagc

SEQ ID NO: 1539231 - RNA, 22 nt, Human adenovirus A
acaaacaacgaaggccaaacca

SEQ ID NO: 1539232 - RNA, 21 nt, Human adenovirus A
uggcuguugcuguaaggaacg

SEQ ID NO: 1539233 - RNA, 15 nt, Human adenovirus A
aagacugagaaccgu

SEQ ID NO: 1539234 - RNA, 12 nt, Human adenovirus A
caauuucugcca

SEQ ID NO: 1539235 - RNA, 14 nt, Human adenovirus A
gaaacagaagaaaa

SEQ ID NO: 1539236 - RNA, 15 nt, Human adenovirus A
uauguuaaauuaaag

SEQ ID NO: 1539237 - RNA, 22 nt, Human adenovirus A
aaggaaaguaacucuuguaaag

SEQ ID NO: 1539238 - RNA, 16 nt, Human adenovirus A
gggcauggugauuaaa

SEQ ID NO: 1539239 - RNA, 19 nt, Human adenovirus A
gucauuuacugcagccugu

SEQ ID NO: 1539240 - RNA, 20 nt, Human adenovirus A
uaugccaucucgauccagca

SEQ ID NO: 1539241 - RNA, 15 nt, Human adenovirus A
gugaagauagacagc

SEQ ID NO: 1539242 - RNA, 17 nt, Human adenovirus A
ggacaauccaaggauga

SEQ ID NO: 1539243 - RNA, 14 nt, Human adenovirus A
gugguugggaacag

SEQ ID NO: 1539244 - RNA, 20 nt, Human adenovirus A
accgcagucugacagcaauu

SEQ ID NO: 1539245 - RNA, 12 nt, Human adenovirus A
uaaccuuuccac

SEQ ID NO: 1539246 - RNA, 19 nt, Human adenovirus A
uguauauuaagguacauug

SEQ ID NO: 1539247 - RNA, 23 nt, Human adenovirus A
aacgagggagauguccuguuuaa

SEQ ID NO: 1539248 - RNA, 12 nt, Human adenovirus A
agagacaaugaa

SEQ ID NO: 1539249 - RNA, 14 nt, Human adenovirus A
agacugcuguaaug

SEQ ID NO: 1539250 - RNA, 15 nt, Human adenovirus A
cuuacccgcagcugu

SEQ ID NO: 1539251 - RNA, 19 nt, Human adenovirus A
ggccagugugcgcuuuaaa

SEQ ID NO: 1539252 - RNA, 17 nt, Human adenovirus A
caguaucaguggaguuc

SEQ ID NO: 1539253 - RNA, 23 nt, Human adenovirus A
uucuaccaaggaaaacuuuugua

SEQ ID NO: 1539254 - RNA, 15 nt, Human adenovirus A
cagccuagacgagga

SEQ ID NO: 1539255 - RNA, 16 nt, Human adenovirus A
ccagaagcacuggcaa

SEQ ID NO: 1539256 - RNA, 19 nt, Human adenovirus A
cgcgauacaacggccagcc

SEQ ID NO: 1539257 - RNA, 17 nt, Human adenovirus A
ugccaggcauuuccagg

SEQ ID NO: 1539258 - RNA, 14 nt, Human adenovirus A
agcauuaaacgcuu

SEQ ID NO: 1539259 - RNA, 19 nt, Human adenovirus A
ggaaauuaauuugcaggcu

SEQ ID NO: 1539260 - RNA, 14 nt, Human adenovirus A
gcugcaaacaugcu

SEQ ID NO: 1539261 - RNA, 13 nt, Human adenovirus A
guuccagaaggag

SEQ ID NO: 1539262 - RNA, 16 nt, Human adenovirus A
aauaaagaaaaaacuu

SEQ ID NO: 1539263 - RNA, 16 nt, Human adenovirus A
agaaucgcaagcaggc

SEQ ID NO: 1539264 - RNA, 23 nt, Human adenovirus A
ggagcggaacccugcgguggugg

SEQ ID NO: 1539265 - RNA, 15 nt, Human adenovirus A
gcagcaaacacugcu

SEQ ID NO: 1539266 - RNA, 14 nt, Human adenovirus A
agcguucuguggau

SEQ ID NO: 1539267 - RNA, 20 nt, Human adenovirus A
ccauguaucagcagccaacu

SEQ ID NO: 1539268 - RNA, 14 nt, Human adenovirus A
aacuacucagaaca

SEQ ID NO: 1539269 - RNA, 23 nt, Human adenovirus A
cuguuacauaccuggcaaacugg

SEQ ID NO: 1539270 - RNA, 15 nt, Human adenovirus A
gauuucugcugucau

SEQ ID NO: 1539271 - RNA, 17 nt, Human adenovirus A
ggcaguacuucauauuu

SEQ ID NO: 1539272 - RNA, 16 nt, Human adenovirus A
ccaggcgggcugcaac

SEQ ID NO: 1539273 - RNA, 15 nt, Human adenovirus A
gauugcgaacaacaa

SEQ ID NO: 1539274 - RNA, 17 nt, Human adenovirus A
uaaaaaauuacaaaggc

SEQ ID NO: 1539275 - RNA, 15 nt, Human adenovirus A
cgucuucguggagaa

SEQ ID NO: 1539276 - RNA, 17 nt, Human adenovirus A
gcuguaucuguugaaug

SEQ ID NO: 1539277 - RNA, 15 nt, Human adenovirus A
caaugaaacccgcug

SEQ ID NO: 1539278 - RNA, 14 nt, Human adenovirus A
caacaguacaggca

SEQ ID NO: 1539279 - RNA, 17 nt, Human adenovirus A
cggucgaccuguggcac

SEQ ID NO: 1539280 - RNA, 16 nt, Human adenovirus A
cuacucacgagaaagu

SEQ ID NO: 1539281 - RNA, 21 nt, Human adenovirus A
gucuagccaacauccagugcg

SEQ ID NO: 1539282 - RNA, 21 nt, Human adenovirus A
caaaaauuuucccaacaaugg

SEQ ID NO: 1539283 - RNA, 17 nt, Human adenovirus A
ugcaaauucaucaacau

SEQ ID NO: 1539284 - RNA, 20 nt, Human adenovirus A
cugccugacugaaccauucc

SEQ ID NO: 1539285 - RNA, 17 nt, Human adenovirus A
cuugauggauuaccuuc

SEQ ID NO: 1539286 - RNA, 20 nt, Human adenovirus A
auuuccagguggggaaaaug

SEQ ID NO: 1539287 - RNA, 14 nt, Human adenovirus A
aucccgaguguuua

SEQ ID NO: 1539288 - RNA, 21 nt, Human adenovirus A
agaaccuuucaagaaaggcau

SEQ ID NO: 1539289 - RNA, 23 nt, Human adenovirus A
uguucaacaacagcuucuaaaag

SEQ ID NO: 1539290 - RNA, 16 nt, Human adenovirus A
gccaaccucacugcuu

SEQ ID NO: 1539291 - RNA, 14 nt, Human adenovirus A
acaacgaaggccaa

SEQ ID NO: 1539292 - RNA, 13 nt, Human adenovirus A
gaagcacuggcaa

SEQ ID NO: 1539293 - RNA, 18 nt, Human adenovirus A
cuccccuguggagccacu

SEQ ID NO: 1539294 - RNA, 15 nt, Human adenovirus A
acugcucagcuggaa

SEQ ID NO: 1539295 - RNA, 16 nt, Human adenovirus A
uggaaaacauaugcac

SEQ ID NO: 1539296 - RNA, 22 nt, Human adenovirus A
accaggcauggccaucauacau

SEQ ID NO: 1539297 - RNA, 14 nt, Human adenovirus A
cuguguauacgccu

SEQ ID NO: 1539298 - RNA, 17 nt, Human adenovirus A
ucagaagccagcagcaa

SEQ ID NO: 1539299 - RNA, 23 nt, Human adenovirus A
gacccaccaccaaacugcagccu

SEQ ID NO: 1539300 - RNA, 15 nt, Human adenovirus A
uguuuguuugaaaaa

SEQ ID NO: 1539301 - RNA, 22 nt, Human adenovirus A
cagggcauacgcuugugcagcc

SEQ ID NO: 1539302 - RNA, 15 nt, Human adenovirus A
acaguaucaauuuuu

SEQ ID NO: 1539303 - RNA, 16 nt, Human adenovirus A
cugagacgaagaaaua

SEQ ID NO: 1539304 - RNA, 15 nt, Human adenovirus A
caggaagagccucaa

SEQ ID NO: 1539305 - RNA, 21 nt, Human adenovirus A
caacucuacuuaaaagcaagc

SEQ ID NO: 1539306 - RNA, 14 nt, Human adenovirus A
gcgggaagcggggg

SEQ ID NO: 1539307 - RNA, 16 nt, Human adenovirus A
auauuaaaaagcucug

SEQ ID NO: 1539308 - RNA, 14 nt, Human adenovirus A
auuucucuuuucuu

SEQ ID NO: 1539309 - RNA, 21 nt, Human adenovirus A
gcgccacccuacgugccuccc

SEQ ID NO: 1539310 - RNA, 16 nt, Human adenovirus A
gugccuauauauuuua

SEQ ID NO: 1539311 - RNA, 19 nt, Human adenovirus A
accccuaacugcccagcug

SEQ ID NO: 1539312 - RNA, 21 nt, Human adenovirus A
ccguacaugggcaccuggaac

SEQ ID NO: 1539313 - RNA, 16 nt, Human adenovirus A
agacuauaaucccuug

SEQ ID NO: 1539314 - RNA, 19 nt, Human adenovirus A
acacuuacgaauggaacuu

SEQ ID NO: 1539315 - RNA, 23 nt, Human adenovirus A
aaaugcuuuguuggauagcaaag

SEQ ID NO: 1539316 - RNA, 13 nt, Human adenovirus A
caaaaaaacagau

SEQ ID NO: 1539317 - RNA, 20 nt, Human adenovirus A
cggacaccuacuucacccug

SEQ ID NO: 1539318 - RNA, 15 nt, Human adenovirus A
gcgcucagugcgagg

SEQ ID NO: 1539319 - RNA, 23 nt, Human adenovirus A
guaauuuuccagcgccaccugcc

SEQ ID NO: 1539320 - RNA, 15 nt, Human adenovirus A
caacgcuuugcuuga

SEQ ID NO: 1539321 - RNA, 23 nt, Human adenovirus A
ugcgaccucagcccagggcaacc

SEQ ID NO: 1539322 - RNA, 13 nt, Human adenovirus A
gcaaguaggacca

SEQ ID NO: 1539323 - RNA, 21 nt, Human adenovirus A
acaguuuugaacaauuaaaaa

SEQ ID NO: 1539324 - RNA, 16 nt, Human adenovirus A
acagcggggaggaagc

SEQ ID NO: 1539325 - RNA, 16 nt, Human adenovirus A
ugucuacaacugcucc

SEQ ID NO: 1539326 - RNA, 10 nt, Human adenovirus A
cgacaaaugc

SEQ ID NO: 1539327 - RNA, 17 nt, Human adenovirus A
cuuuacaaaugcaauuc

SEQ ID NO: 1539328 - RNA, 16 nt, Human adenovirus A
agauguaauuaaugga

SEQ ID NO: 1539329 - RNA, 15 nt, Human adenovirus A
caaauuacacacuac

SEQ ID NO: 1539330 - RNA, 18 nt, Human adenovirus A
ugcaggcuaauuugugga

SEQ ID NO: 1539331 - RNA, 15 nt, Human adenovirus A
cagcagcgguggcgc

SEQ ID NO: 1539332 - RNA, 13 nt, Human adenovirus A
uccuccuggaggu

SEQ ID NO: 1539333 - RNA, 22 nt, Human adenovirus A
gauacagcgcugauuaugcauu

SEQ ID NO: 1539334 - RNA, 14 nt, Human adenovirus A
auguaaaaaaauac

SEQ ID NO: 1539335 - RNA, 17 nt, Human adenovirus A
caacuuaacccucccuc

SEQ ID NO: 1539336 - RNA, 14 nt, Human adenovirus A
guuccaguauuuug

SEQ ID NO: 1539337 - RNA, 15 nt, Human adenovirus A
auuacuuuuaaauac

SEQ ID NO: 1539338 - RNA, 20 nt, Human adenovirus A
uacaaagccaggcacagcag

SEQ ID NO: 1539339 - RNA, 20 nt, Human adenovirus A
agcuauugcaaaccuagcug

SEQ ID NO: 1539340 - RNA, 19 nt, Human adenovirus A
ugccgucuucguggagaag

SEQ ID NO: 1539341 - RNA, 17 nt, Human adenovirus A
cgucggggcuacugcuc

SEQ ID NO: 1539342 - RNA, 13 nt, Human adenovirus A
guaugcugaagaa

SEQ ID NO: 1539343 - RNA, 13 nt, Human adenovirus A
gugugacugcccc

SEQ ID NO: 1539344 - RNA, 22 nt, Human adenovirus A
cauugccgcacggccaaugccc

SEQ ID NO: 1539345 - RNA, 10 nt, Human adenovirus A
agaggcuggc

SEQ ID NO: 1539346 - RNA, 19 nt, Human adenovirus A
ccugacgcucuggcagggg

SEQ ID NO: 1539347 - RNA, 19 nt, Human adenovirus A
uuuccauuuuuugaaaaga

SEQ ID NO: 1539348 - RNA, 13 nt, Human adenovirus A
acuuuuuucccau

SEQ ID NO: 1539349 - RNA, 18 nt, Human adenovirus A
auaagcauuagagucgcc

SEQ ID NO: 1539350 - RNA, 23 nt, Human adenovirus A
cuggugguauuggaacucuccaa

SEQ ID NO: 1539351 - RNA, 19 nt, Human adenovirus A
cagaaaaaaauugccaacc

SEQ ID NO: 1539352 - RNA, 19 nt, Human adenovirus A
ugagugggcagaauuugug

SEQ ID NO: 1539353 - RNA, 20 nt, Human adenovirus A
gcaggagaaaauaacacaua

SEQ ID NO: 1539354 - RNA, 20 nt, Human adenovirus A
cagugagugaaucuguggau

SEQ ID NO: 1539355 - RNA, 12 nt, Human adenovirus A
uaccaaugaggc

SEQ ID NO: 1539356 - RNA, 20 nt, Human adenovirus A
ccgcgaaaaaaaucacuucc

SEQ ID NO: 1539357 - RNA, 13 nt, Human adenovirus A
aacauucgcagcg

SEQ ID NO: 1539358 - RNA, 18 nt, Human adenovirus A
gaagaauggcuguugaug

SEQ ID NO: 1539359 - RNA, 22 nt, Human adenovirus A
cguccaggcaggguuugcaaac

SEQ ID NO: 1539360 - RNA, 13 nt, Human adenovirus A
ugucuuguuaaug

SEQ ID NO: 1539361 - RNA, 14 nt, Human adenovirus A
aagaaacagcagca

SEQ ID NO: 1539362 - RNA, 22 nt, Human adenovirus A
aaagcaaauuacgcaacaacug

SEQ ID NO: 1539363 - RNA, 22 nt, Human adenovirus A
ucaaacagccgaaagaccacua

SEQ ID NO: 1539364 - RNA, 22 nt, Human adenovirus A
auuuugcaaguguaauuuucca

SEQ ID NO: 1539365 - RNA, 16 nt, Human adenovirus A
cuuuucuuacauuacc

SEQ ID NO: 1539366 - RNA, 22 nt, Human adenovirus A
caggcuaaacgaccgccuuuuc

SEQ ID NO: 1539367 - RNA, 20 nt, Human adenovirus A
gcccagacguaggguacagu

SEQ ID NO: 1539368 - RNA, 18 nt, Human adenovirus A
ugcaggcuucucgaaaaa

SEQ ID NO: 1539369 - RNA, 16 nt, Human adenovirus A
cggaacuauuucuugu

SEQ ID NO: 1539370 - RNA, 14 nt, Human adenovirus A
uuuuguuucuucua

SEQ ID NO: 1539371 - RNA, 19 nt, Human adenovirus A
ccauuguaaaugcuuuguu

SEQ ID NO: 1539372 - RNA, 19 nt, Human adenovirus A
cauggaugaauugcagccu

SEQ ID NO: 1539373 - RNA, 17 nt, Human adenovirus A
uagaaucggcaacagca

SEQ ID NO: 1539374 - RNA, 17 nt, Human adenovirus A
gacaucaccacauugcg

SEQ ID NO: 1539375 - RNA, 14 nt, Human adenovirus A
uaaugaaaacaaug

SEQ ID NO: 1539376 - RNA, 21 nt, Human adenovirus A
ggauuacaugaagauuucugc

SEQ ID NO: 1539377 - RNA, 16 nt, Human adenovirus A
acauuacaauuaacug

SEQ ID NO: 1539378 - RNA, 12 nt, Human adenovirus A
cugcagcuuccg

SEQ ID NO: 1539379 - RNA, 12 nt, Human adenovirus A
cugacugaacca

SEQ ID NO: 1539380 - RNA, 14 nt, Human adenovirus A
gaacugcagacagu

SEQ ID NO: 1539381 - RNA, 15 nt, Human adenovirus A
cuggccccgcgacac

SEQ ID NO: 1539382 - RNA, 23 nt, Human adenovirus A
cacuuacgaauggaacuuuagaa

SEQ ID NO: 1539383 - RNA, 22 nt, Human adenovirus A
cguucuuugguuugcaauacug

SEQ ID NO: 1539384 - RNA, 11 nt, Human adenovirus A
ggaucuucaaa

SEQ ID NO: 1539385 - RNA, 17 nt, Human adenovirus A
ugaaaaacgagcagcaa

SEQ ID NO: 1539386 - RNA, 19 nt, Human adenovirus A
auuucuuccuccuggaggu

SEQ ID NO: 1539387 - RNA, 14 nt, Human adenovirus A
ccacggccucagca

SEQ ID NO: 1539388 - RNA, 16 nt, Human adenovirus A
ccugcgacaaaugcga

SEQ ID NO: 1539389 - RNA, 19 nt, Human adenovirus A
ccauggaucguauuauggc

SEQ ID NO: 1539390 - RNA, 23 nt, Human adenovirus A
cgugaauauuaaaaagcucugua

SEQ ID NO: 1539391 - RNA, 19 nt, Human adenovirus A
guguagguuucuacaucau

SEQ ID NO: 1539392 - RNA, 23 nt, Human adenovirus A
agcuuaccacucagaccuuauga

SEQ ID NO: 1539393 - RNA, 21 nt, Human adenovirus A
gucuacaaaucuuucaaucau

SEQ ID NO: 1539394 - RNA, 15 nt, Human adenovirus A
acgcucuggcagggg

SEQ ID NO: 1539395 - RNA, 14 nt, Human adenovirus A
gagcugccaccguc

SEQ ID NO: 1539396 - RNA, 21 nt, Human adenovirus A
aaaaugcaaaauggacucaaa

SEQ ID NO: 1539397 - RNA, 22 nt, Human adenovirus A
gcugccaccucuagaaacugug

SEQ ID NO: 1539398 - RNA, 16 nt, Human adenovirus A
gcuauguacagcaauc

SEQ ID NO: 1539399 - RNA, 15 nt, Human adenovirus A
gaugauggaaagccg

SEQ ID NO: 1539400 - RNA, 10 nt, Human adenovirus A
augcaaagcc

SEQ ID NO: 1539401 - RNA, 22 nt, Human adenovirus A
ucuaacaagcugcgcugccguu

SEQ ID NO: 1539402 - RNA, 21 nt, Human adenovirus A
acauacuagguauaagaaaga

SEQ ID NO: 1539403 - RNA, 17 nt, Human adenovirus A
agcaagugccuccucag

SEQ ID NO: 1539404 - RNA, 22 nt, Human adenovirus A
uggcuacgugcgccaagccugu

SEQ ID NO: 1539405 - RNA, 14 nt, Human adenovirus A
uccauaccugggau

SEQ ID NO: 1539406 - RNA, 15 nt, Human adenovirus A
caccuuuuaccuaaa

SEQ ID NO: 1539407 - RNA, 17 nt, Human adenovirus A
caugcuauuaagcaagc

SEQ ID NO: 1539408 - RNA, 21 nt, Human adenovirus A
cagaaaaacaguacaaagcca

SEQ ID NO: 1539409 - RNA, 13 nt, Human adenovirus A
cccccguuaccaa

SEQ ID NO: 1539410 - RNA, 19 nt, Human adenovirus A
caaucccuacccaccaucu

SEQ ID NO: 1539411 - RNA, 21 nt, Human adenovirus A
agauuguaauuuuuuucuccu

SEQ ID NO: 1539412 - RNA, 17 nt, Human adenovirus A
aaggcauuggaaagcag

SEQ ID NO: 1539413 - RNA, 21 nt, Human adenovirus A
caaacccccaggaugauuuac

SEQ ID NO: 1539414 - RNA, 14 nt, Human adenovirus A
guuucaggaaggau

SEQ ID NO: 1539415 - RNA, 13 nt, Human adenovirus A
gcccgccgccgga

SEQ ID NO: 1539416 - RNA, 19 nt, Human adenovirus A
aguucaccuccagguacaa

SEQ ID NO: 1539417 - RNA, 22 nt, Human adenovirus A
cgucuucguacuuaaaaaaaca

SEQ ID NO: 1539418 - RNA, 17 nt, Human adenovirus A
guguuaucuucaaauca

SEQ ID NO: 1539419 - RNA, 15 nt, Human adenovirus A
uuaaagcaaaccacu

SEQ ID NO: 1539420 - RNA, 16 nt, Human adenovirus A
ugggcggcauuuagag

SEQ ID NO: 1539421 - RNA, 16 nt, Human adenovirus A
cucccucuuggccagc

SEQ ID NO: 1539422 - RNA, 19 nt, Human adenovirus A
aacgaccgccuuuucuaga

SEQ ID NO: 1539423 - RNA, 21 nt, Human adenovirus A
cuuacccgcagcugucucuac

SEQ ID NO: 1539424 - RNA, 23 nt, Human adenovirus A
cugcuccgacaacagcugcuguc

SEQ ID NO: 1539425 - RNA, 23 nt, Human adenovirus A
gacuguccagggcuuuuggcuuc

SEQ ID NO: 1539426 - RNA, 15 nt, Human adenovirus A
agcaauuacuugaac

SEQ ID NO: 1539427 - RNA, 14 nt, Human adenovirus A
ggaacaacaggugc

SEQ ID NO: 1539428 - RNA, 20 nt, Human adenovirus A
aaggggaggaccccaaggca

SEQ ID NO: 1539429 - RNA, 16 nt, Human adenovirus A
uccuuuucuuacauua

SEQ ID NO: 1539430 - RNA, 22 nt, Human adenovirus A
cagucuugaaugcucuggacau

SEQ ID NO: 1539431 - RNA, 20 nt, Human adenovirus A
cgcggccguacaugggcacc

SEQ ID NO: 1539432 - RNA, 14 nt, Human adenovirus A
cgucuuauuuuccu

SEQ ID NO: 1539433 - RNA, 20 nt, Human adenovirus A
ccaagaauaaaaacacacac

SEQ ID NO: 1539434 - RNA, 11 nt, Human adenovirus A
aguuucuggag

SEQ ID NO: 1539435 - RNA, 13 nt, Human adenovirus A
uuuaaggccaggg

SEQ ID NO: 1539436 - RNA, 14 nt, Human adenovirus A
auggaucuggagcc

SEQ ID NO: 1539437 - RNA, 14 nt, Human adenovirus A
auuccauaauuaaa

SEQ ID NO: 1539438 - RNA, 17 nt, Human adenovirus A
cuuuccaccucuaccuc

SEQ ID NO: 1539439 - RNA, 12 nt, Human adenovirus A
uaccaaagccau

SEQ ID NO: 1539440 - RNA, 19 nt, Human adenovirus A
uuuguagcugaaaacaacu

SEQ ID NO: 1539441 - RNA, 18 nt, Human adenovirus A
gggggaugaaggaagcga

SEQ ID NO: 1539442 - RNA, 21 nt, Human adenovirus A
gaaacucuaacugcucagcug

SEQ ID NO: 1539443 - RNA, 16 nt, Human adenovirus A
cggggaggaagcugag

SEQ ID NO: 1539444 - RNA, 17 nt, Human adenovirus A
ggcagcgguaguuguug

SEQ ID NO: 1539445 - RNA, 18 nt, Human adenovirus A
uccuccuuauccuuccag

SEQ ID NO: 1539446 - RNA, 11 nt, Human adenovirus A
cacaaaacaca

SEQ ID NO: 1539447 - RNA, 23 nt, Human adenovirus A
auuuauaaauguuagguuugcug

SEQ ID NO: 1539448 - RNA, 18 nt, Human adenovirus A
agcggggaggaagcugag

SEQ ID NO: 1539449 - RNA, 16 nt, Human adenovirus A
guuuaaaggaagcugc

SEQ ID NO: 1539450 - RNA, 22 nt, Human adenovirus A
ucuaaugcaaguuguaaggcau

SEQ ID NO: 1539451 - RNA, 20 nt, Human adenovirus A
agucgcacuuuuuaaaaaag

SEQ ID NO: 1539452 - RNA, 22 nt, Human adenovirus A
gcaguuuuucuaccaaugaggc

SEQ ID NO: 1539453 - RNA, 20 nt, Human adenovirus A
acacugaaggcauuuaaggg

SEQ ID NO: 1539454 - RNA, 16 nt, Human adenovirus A
agugcuggaaagugac

SEQ ID NO: 1539455 - RNA, 17 nt, Human adenovirus A
cacucagcgacaaaccu

SEQ ID NO: 1539456 - RNA, 16 nt, Human adenovirus A
uggcagcugauuucag

SEQ ID NO: 1539457 - RNA, 16 nt, Human adenovirus A
cagcagcagcaacacu

SEQ ID NO: 1539458 - RNA, 17 nt, Human adenovirus A
acccuuacacucaagcu

SEQ ID NO: 1539459 - RNA, 13 nt, Human adenovirus A
auuaaaagggaag

SEQ ID NO: 1539460 - RNA, 20 nt, Human adenovirus A
agucccauuacaguaauaaa

SEQ ID NO: 1539461 - RNA, 18 nt, Human adenovirus A
gucaaaccugacagacuu

SEQ ID NO: 1539462 - RNA, 17 nt, Human adenovirus A
acauacaucaccucuuu

SEQ ID NO: 1539463 - RNA, 17 nt, Human adenovirus A
agcggcauuccccaucc

SEQ ID NO: 1539464 - RNA, 16 nt, Human adenovirus A
aauaaaauuucuagaa

SEQ ID NO: 1539465 - RNA, 15 nt, Human adenovirus A
uggaacccuuacacu

SEQ ID NO: 1539466 - RNA, 18 nt, Human adenovirus A
cuagcccaauugcaugcu

SEQ ID NO: 1539467 - RNA, 14 nt, Human adenovirus A
cuuucagcccauga

SEQ ID NO: 1539468 - RNA, 20 nt, Human adenovirus A
aaaauaacacauaagcauua

SEQ ID NO: 1539469 - RNA, 17 nt, Human adenovirus A
uagauacaagcgacaga

SEQ ID NO: 1539470 - RNA, 21 nt, Human adenovirus A
agcggcgagaaugggaggaaa

SEQ ID NO: 1539471 - RNA, 21 nt, Human adenovirus A
ccacaccuccacccaaucaaa

SEQ ID NO: 1539472 - RNA, 22 nt, Human adenovirus A
gucgcgcacugggccaggagga

SEQ ID NO: 1539473 - RNA, 19 nt, Human adenovirus A
cacuuauugcugcggccau

SEQ ID NO: 1539474 - RNA, 17 nt, Human adenovirus A
gcaaauauaaaagcaca

SEQ ID NO: 1539475 - RNA, 14 nt, Human adenovirus A
cccaacccuuccca

SEQ ID NO: 1539476 - RNA, 19 nt, Human adenovirus A
gagcuaagcgacaaagagc

SEQ ID NO: 1539477 - RNA, 19 nt, Human adenovirus A
acaacacggaguaaugaac

SEQ ID NO: 1539478 - RNA, 13 nt, Human adenovirus A
aucuucaaacacc

SEQ ID NO: 1539479 - RNA, 23 nt, Human adenovirus A
gaacuggaaggugacaaugcccg

SEQ ID NO: 1539480 - RNA, 19 nt, Human adenovirus A
cuucaagacguuccauggc

SEQ ID NO: 1539481 - RNA, 14 nt, Human adenovirus A
auauaaaguuuaaa

SEQ ID NO: 1539482 - RNA, 14 nt, Human adenovirus A
ucaaggaaauacua

SEQ ID NO: 1539483 - RNA, 15 nt, Human adenovirus A
agauuauacaaacuu

SEQ ID NO: 1539484 - RNA, 23 nt, Human adenovirus A
aaagcuggguugguguugcuuug

SEQ ID NO: 1539485 - RNA, 19 nt, Human adenovirus A
cgcacuggucgcaccacug

SEQ ID NO: 1539486 - RNA, 16 nt, Human adenovirus A
uuggaguuggaagaag

SEQ ID NO: 1539487 - RNA, 15 nt, Human adenovirus A
gaacaucaacugugc

SEQ ID NO: 1539488 - RNA, 22 nt, Human adenovirus A
cuguaguuucuuuacaacugua

SEQ ID NO: 1539489 - RNA, 23 nt, Human adenovirus A
caugcgcgcggccagagcguugg

SEQ ID NO: 1539490 - RNA, 20 nt, Human adenovirus A
aaguaggauagcaccugccg

SEQ ID NO: 1539491 - RNA, 20 nt, Human adenovirus A
acaaaucagaagccagcagc

SEQ ID NO: 1539492 - RNA, 15 nt, Human adenovirus A
acaggugaaagugaa

SEQ ID NO: 1539493 - RNA, 20 nt, Human adenovirus A
uaugugaucauaacauguuu

SEQ ID NO: 1539494 - RNA, 15 nt, Human adenovirus A
cggcaacagcagcaa

SEQ ID NO: 1539495 - RNA, 14 nt, Human adenovirus A
uauuuuuucaaaau

SEQ ID NO: 1539496 - RNA, 23 nt, Human adenovirus A
cuggaaccauucccuauuuagac

SEQ ID NO: 1539497 - RNA, 21 nt, Human adenovirus A
gucugccauuccccacacguc

SEQ ID NO: 1539498 - RNA, 18 nt, Human adenovirus A
gccuaugugauaacccug

SEQ ID NO: 1539499 - RNA, 18 nt, Human adenovirus A
auaucaauguuauccaca

SEQ ID NO: 1539500 - RNA, 20 nt, Human adenovirus A
aaaauagggguaaugugguu

SEQ ID NO: 1539501 - RNA, 16 nt, Human adenovirus A
caagcgaacaggagcu

SEQ ID NO: 1539502 - RNA, 13 nt, Human adenovirus A
ucuuaaaaauuuu

SEQ ID NO: 1539503 - RNA, 22 nt, Human adenovirus A
aaucagaagccagcagcaaaga

SEQ ID NO: 1539504 - RNA, 22 nt, Human adenovirus A
cguaacuuucaaaaaagcuuua

SEQ ID NO: 1539505 - RNA, 22 nt, Human adenovirus A
cuagacgaggauccagaggagg

SEQ ID NO: 1539506 - RNA, 19 nt, Human adenovirus A
acgccuuacauguggagcu

SEQ ID NO: 1539507 - RNA, 18 nt, Human adenovirus A
cuuuuaaaaauuugcaag

SEQ ID NO: 1539508 - RNA, 20 nt, Human adenovirus A
ccgcugugagcaaaucucag

SEQ ID NO: 1539509 - RNA, 22 nt, Human adenovirus A
ggucaagaacacgaacugaaaa

SEQ ID NO: 1539510 - RNA, 14 nt, Human adenovirus A
uacgacccucugac

SEQ ID NO: 1539511 - RNA, 15 nt, Human adenovirus A
guaccgcgaagccau

SEQ ID NO: 1539512 - RNA, 22 nt, Human adenovirus A
aacaacagcuucuaaaagagcc

SEQ ID NO: 1539513 - RNA, 22 nt, Human adenovirus A
aggugacaugauaugaaguuuu

SEQ ID NO: 1539514 - RNA, 20 nt, Human adenovirus A
uuacaagcacgccaaagcca

SEQ ID NO: 1539515 - RNA, 14 nt, Human adenovirus A
guccuuccagggac

SEQ ID NO: 1539516 - RNA, 18 nt, Human adenovirus A
ggaugaauuucagcgggg

SEQ ID NO: 1539517 - RNA, 22 nt, Human adenovirus A
uugauucagcuaacaaugcagc

SEQ ID NO: 1539518 - RNA, 22 nt, Human adenovirus A
aagaccccauuguaacugaaaa

SEQ ID NO: 1539519 - RNA, 19 nt, Human adenovirus A
uuccagacaaaaaaaauac

SEQ ID NO: 1539520 - RNA, 13 nt, Human adenovirus A
uaauacuggcuaa

SEQ ID NO: 1539521 - RNA, 20 nt, Human adenovirus A
uccugcuccuuuucuuacau

SEQ ID NO: 1539522 - RNA, 19 nt, Human adenovirus A
cugguugagcgcuggccag

SEQ ID NO: 1539523 - RNA, 17 nt, Human adenovirus A
cgggacccugccgcugc

SEQ ID NO: 1539524 - RNA, 22 nt, Human adenovirus A
ccauaaggcggcguccuuucuc

SEQ ID NO: 1539525 - RNA, 13 nt, Human adenovirus A
ucacgccguagac

SEQ ID NO: 1539526 - RNA, 21 nt, Human adenovirus A
uucauauauguaucuggacau

SEQ ID NO: 1539527 - RNA, 24 nt, Human adenovirus A
ugagcccgaaguugacuggcaugg

SEQ ID NO: 1539528 - RNA, 14 nt, Human adenovirus A
caauuucugccauu

SEQ ID NO: 1539529 - RNA, 14 nt, Human adenovirus A
ugaagauagacagc

SEQ ID NO: 1539530 - RNA, 18 nt, Human adenovirus A
auggaguuuagaaggaaa

SEQ ID NO: 1539531 - RNA, 20 nt, Human adenovirus A
cauacuuaccaaagccaugg

SEQ ID NO: 1539532 - RNA, 13 nt, Human adenovirus A
aaagucacaaggg

SEQ ID NO: 1539533 - RNA, 21 nt, Human adenovirus A
acuuugagcuuccagaggagc

SEQ ID NO: 1539534 - RNA, 18 nt, Human adenovirus A
ccagcuaacgccaccagc

SEQ ID NO: 1539535 - RNA, 17 nt, Human adenovirus A
acucuggcgaagggccu

SEQ ID NO: 1539536 - RNA, 15 nt, Human adenovirus A
ucuuaggguuugauu

SEQ ID NO: 1539537 - RNA, 13 nt, Human adenovirus A
gaauuugaaaaca

SEQ ID NO: 1539538 - RNA, 18 nt, Human adenovirus A
agaaaaaccaccaggugu

SEQ ID NO: 1539539 - RNA, 21 nt, Human adenovirus A
cauaaagagucucaaaagcag

SEQ ID NO: 1539540 - RNA, 21 nt, Human adenovirus A
uaaagaaaaaacuuaaauuga

SEQ ID NO: 1539541 - RNA, 20 nt, Human adenovirus A
uuuccuguuacauaccuggc

SEQ ID NO: 1539542 - RNA, 21 nt, Human adenovirus A
cauuugugccucgucagaaca

SEQ ID NO: 1539543 - RNA, 13 nt, Human adenovirus A
caauauuccagcu

SEQ ID NO: 1539544 - RNA, 12 nt, Human adenovirus A
uugcauuuccca

SEQ ID NO: 1539545 - RNA, 16 nt, Human adenovirus A
caggcuggaggugcag

SEQ ID NO: 1539546 - RNA, 21 nt, Human adenovirus A
guugcuuuccaaaugccccca

SEQ ID NO: 1539547 - RNA, 16 nt, Human adenovirus A
gcuuggccaguucccc

SEQ ID NO: 1539548 - RNA, 18 nt, Human adenovirus A
caugauggaucaaaaaca

SEQ ID NO: 1539549 - RNA, 13 nt, Human adenovirus A
ccuuggaagaggu

SEQ ID NO: 1539550 - RNA, 17 nt, Human adenovirus A
gacgcucuggcagggga

SEQ ID NO: 1539551 - RNA, 14 nt, Human adenovirus A
uucuuaagcaguga

SEQ ID NO: 1539552 - RNA, 20 nt, Human adenovirus A
agcaagcagcgccaaauaga

SEQ ID NO: 1539553 - RNA, 19 nt, Human adenovirus A
ucauugaauuaccagaaug

SEQ ID NO: 1539554 - RNA, 18 nt, Human adenovirus A
cauugcgauaaacuggau

SEQ ID NO: 1539555 - RNA, 14 nt, Human adenovirus A
acaagccgcaggac

SEQ ID NO: 1539556 - RNA, 21 nt, Human adenovirus A
uacuuggcuaguagagacauc

SEQ ID NO: 1539557 - RNA, 21 nt, Human adenovirus A
aucucaccuggaccuuuaacg

SEQ ID NO: 1539558 - RNA, 13 nt, Human adenovirus A
aaaaggcuggaag

SEQ ID NO: 1539559 - RNA, 16 nt, Human adenovirus A
gccuacccuucuuuau

SEQ ID NO: 1539560 - RNA, 15 nt, Human adenovirus A
agcgaacaggagcug

SEQ ID NO: 1539561 - RNA, 18 nt, Human adenovirus A
acaauaaucacaacacag

SEQ ID NO: 1539562 - RNA, 16 nt, Human adenovirus A
caccucgcuccaauuu

SEQ ID NO: 1539563 - RNA, 17 nt, Human adenovirus A
aacaucgcaaaacacgu

SEQ ID NO: 1539564 - RNA, 13 nt, Human adenovirus A
guaacucuuguaa

SEQ ID NO: 1539565 - RNA, 14 nt, Human adenovirus A
cacagucacaaggu

SEQ ID NO: 1539566 - RNA, 14 nt, Human adenovirus A
caugcuaaaagcuu

SEQ ID NO: 1539567 - RNA, 23 nt, Human adenovirus A
cuaauggagcggcugacagagcg

SEQ ID NO: 1539568 - RNA, 12 nt, Human adenovirus A
cuaauagcacuu

SEQ ID NO: 1539569 - RNA, 20 nt, Human adenovirus A
aaucauacaaaucagaagcc

SEQ ID NO: 1539570 - RNA, 16 nt, Human adenovirus A
cgcgcacugggccagg

SEQ ID NO: 1539571 - RNA, 18 nt, Human adenovirus A
cggcgauugauaucuuga

SEQ ID NO: 1539572 - RNA, 16 nt, Human adenovirus A
acagaccccaaaggac

SEQ ID NO: 1539573 - RNA, 14 nt, Human adenovirus A
cccacagccagugg

SEQ ID NO: 1539574 - RNA, 12 nt, Human adenovirus A
cgagcugccacc

SEQ ID NO: 1539575 - RNA, 22 nt, Human adenovirus A
aggagcggaacccugcgguggu

SEQ ID NO: 1539576 - RNA, 14 nt, Human adenovirus A
uaacgaggugcagc

SEQ ID NO: 1539577 - RNA, 12 nt, Human adenovirus A
ucagcugcaaac

SEQ ID NO: 1539578 - RNA, 18 nt, Human adenovirus A
agaaaguucaccuccagg

SEQ ID NO: 1539579 - RNA, 23 nt, Human adenovirus A
aggaguaauaaaaccugugccuc

SEQ ID NO: 1539580 - RNA, 14 nt, Human adenovirus A
ggucuuaaacuuuc

SEQ ID NO: 1539581 - RNA, 18 nt, Human adenovirus A
gcagaccuacgguggcag

SEQ ID NO: 1539582 - RNA, 19 nt, Human adenovirus A
ucccucuuggccagcugcc

SEQ ID NO: 1539583 - RNA, 21 nt, Human adenovirus A
uguaaaaaaguguuuguuuga

SEQ ID NO: 1539584 - RNA, 19 nt, Human adenovirus A
uuaaauugagaugguguua

SEQ ID NO: 1539585 - RNA, 22 nt, Human adenovirus A
uaaccacgguuccacggugcac

SEQ ID NO: 1539586 - RNA, 16 nt, Human adenovirus A
gcgccaggauguuggg

SEQ ID NO: 1539587 - RNA, 13 nt, Human adenovirus A
uccuuucucugug

SEQ ID NO: 1539588 - RNA, 20 nt, Human adenovirus A
aaccauucccuauuuagacg

SEQ ID NO: 1539589 - RNA, 16 nt, Human adenovirus A
acaucacucuauuuca

SEQ ID NO: 1539590 - RNA, 20 nt, Human adenovirus A
caaauacugcuagaacaagc

SEQ ID NO: 1539591 - RNA, 15 nt, Human adenovirus A
agcuaaaucugccac

SEQ ID NO: 1539592 - RNA, 17 nt, Human adenovirus A
ugcguagcaguaucagu

SEQ ID NO: 1539593 - RNA, 23 nt, Human adenovirus A
gcgcggacuuucaacaggcggga

SEQ ID NO: 1539594 - RNA, 15 nt, Human adenovirus A
agcagcuuggcuaua

SEQ ID NO: 1539595 - RNA, 19 nt, Human adenovirus A
acaccuuuuguuaauuaag

SEQ ID NO: 1539596 - RNA, 16 nt, Human adenovirus A
acuuaccccugggcuu

SEQ ID NO: 1539597 - RNA, 16 nt, Human adenovirus A
cgcaguuuuucuacca

SEQ ID NO: 1539598 - RNA, 14 nt, Human adenovirus A
cuacagacaaacaa

SEQ ID NO: 1539599 - RNA, 17 nt, Human adenovirus A
guguaaacacuaccggc

SEQ ID NO: 1539600 - RNA, 14 nt, Human adenovirus A
gagccacaggaaag

SEQ ID NO: 1539601 - RNA, 16 nt, Human adenovirus A
aagcgucccaugagcu

SEQ ID NO: 1539602 - RNA, 16 nt, Human adenovirus A
auccuacaaaaaguaa

SEQ ID NO: 1539603 - RNA, 23 nt, Human adenovirus A
acuaaccgucgccagcaagugcc

SEQ ID NO: 1539604 - RNA, 22 nt, Human adenovirus A
gucacuacagacaaacaaguuc

SEQ ID NO: 1539605 - RNA, 19 nt, Human adenovirus A
uagacaucgcgcauaggag

SEQ ID NO: 1539606 - RNA, 18 nt, Human adenovirus A
caaagccauggcgaccag

SEQ ID NO: 1539607 - RNA, 20 nt, Human adenovirus A
uaauggaguuguagacauag

SEQ ID NO: 1539608 - RNA, 23 nt, Human adenovirus A
ucuuaguuuggcagacaaggugg

SEQ ID NO: 1539609 - RNA, 14 nt, Human adenovirus A
gagcguucugggau

SEQ ID NO: 1539610 - RNA, 18 nt, Human adenovirus A
ugccaccucuagaaacug

SEQ ID NO: 1539611 - RNA, 20 nt, Human adenovirus A
ugcgcaagcgcugaaacagg

SEQ ID NO: 1539612 - RNA, 13 nt, Human adenovirus A
gacguaaugugcg

SEQ ID NO: 1539613 - RNA, 17 nt, Human adenovirus A
ccggaguacgucagaau

SEQ ID NO: 1539614 - RNA, 22 nt, Human adenovirus A
gcaaacgcugaugccacuugaa

SEQ ID NO: 1539615 - RNA, 16 nt, Human adenovirus A
agcaaaacgcugggcu

SEQ ID NO: 1539616 - RNA, 16 nt, Human adenovirus A
aacuuaguaacagcau

SEQ ID NO: 1539617 - RNA, 16 nt, Human adenovirus A
gccaugcaaagccagc

SEQ ID NO: 1539618 - RNA, 18 nt, Human adenovirus A
agccagcagcaaagaaag

SEQ ID NO: 1539619 - RNA, 17 nt, Human adenovirus A
cuuaguuuuaaauuguu

SEQ ID NO: 1539620 - RNA, 18 nt, Human adenovirus A
uagccugcuuucagcacu

SEQ ID NO: 1539621 - RNA, 13 nt, Human adenovirus A
cauugcgcaaaau

SEQ ID NO: 1539622 - RNA, 21 nt, Human adenovirus A
cacgggcuggggacugggugc

SEQ ID NO: 1539623 - RNA, 14 nt, Human adenovirus A
cuguucauauugug

SEQ ID NO: 1539624 - RNA, 20 nt, Human adenovirus A
acugauuuugcagguuuaaa

SEQ ID NO: 1539625 - RNA, 22 nt, Human adenovirus A
ccuggagcgagaucuuccaaca

SEQ ID NO: 1539626 - RNA, 15 nt, Human adenovirus A
cuagaguguguuuaa

SEQ ID NO: 1539627 - RNA, 13 nt, Human adenovirus A
guuaaauuaaaga

SEQ ID NO: 1539628 - RNA, 19 nt, Human adenovirus A
auuuuucuuuuauuucucu

SEQ ID NO: 1539629 - RNA, 22 nt, Human adenovirus A
ugaaguuuugauuguauuuuga

SEQ ID NO: 1539630 - RNA, 21 nt, Human adenovirus A
aaugguggcuaggaaaacaaa

SEQ ID NO: 1539631 - RNA, 16 nt, Human adenovirus A
gcagcgccaaauagag

SEQ ID NO: 1539632 - RNA, 18 nt, Human adenovirus A
uguaauugaaguaagcug

SEQ ID NO: 1539633 - RNA, 15 nt, Human adenovirus A
guguugcuuugaaua

SEQ ID NO: 1539634 - RNA, 17 nt, Human adenovirus A
caguguuuucagcaauu

SEQ ID NO: 1539635 - RNA, 23 nt, Human adenovirus A
uuccccgauaagauuguaauuuu

SEQ ID NO: 1539636 - RNA, 13 nt, Human adenovirus A
gcgacggcggcgc

SEQ ID NO: 1539637 - RNA, 21 nt, Human adenovirus A
caugguuugcuaacagcucuc

SEQ ID NO: 1539638 - RNA, 18 nt, Human adenovirus A
ucacaccaaacuggccau

SEQ ID NO: 1539639 - RNA, 18 nt, Human adenovirus A
guaagagcaggcuggagg

SEQ ID NO: 1539640 - RNA, 22 nt, Human adenovirus A
aggaaagacagccaagaccagu

SEQ ID NO: 1539641 - RNA, 13 nt, Human adenovirus A
cugccuguugaau

SEQ ID NO: 1539642 - RNA, 13 nt, Human adenovirus A
uggcugaagagga

SEQ ID NO: 1539643 - RNA, 18 nt, Human adenovirus A
gcugguaacuacuucacc

SEQ ID NO: 1539644 - RNA, 17 nt, Human adenovirus A
gugccccucgaccugca

SEQ ID NO: 1539645 - RNA, 23 nt, Human adenovirus A
aaagcccgcgcgcggacuuucaa

SEQ ID NO: 1539646 - RNA, 19 nt, Human adenovirus A
ucaagacuauucuagcaaa

SEQ ID NO: 1539647 - RNA, 20 nt, Human adenovirus A
auucaggugccgcaaaaauu

SEQ ID NO: 1539648 - RNA, 21 nt, Human adenovirus A
gaaagaggcagccguuucagg

SEQ ID NO: 1539649 - RNA, 22 nt, Human adenovirus A
uacacucauguauuuuuucaaa

SEQ ID NO: 1539650 - RNA, 18 nt, Human adenovirus A
ucugaucaacgacuaaaa

SEQ ID NO: 1539651 - RNA, 21 nt, Human adenovirus A
acaacagcggcguaaacucau

SEQ ID NO: 1539652 - RNA, 18 nt, Human adenovirus A
acugaauauuuagacuau

SEQ ID NO: 1539653 - RNA, 20 nt, Human adenovirus A
uuugacccauuugacacauc

SEQ ID NO: 1539654 - RNA, 18 nt, Human adenovirus A
aaagcagaugggaaaauc

SEQ ID NO: 1539655 - RNA, 21 nt, Human adenovirus A
accuccauuauuucuuccucg

SEQ ID NO: 1539656 - RNA, 15 nt, Human adenovirus A
uaguucuuuucuuua

SEQ ID NO: 1539657 - RNA, 19 nt, Human adenovirus A
gcgacucccuuccgugguu

SEQ ID NO: 1539658 - RNA, 12 nt, Human adenovirus A
aaccaaauacug

SEQ ID NO: 1539659 - RNA, 14 nt, Human adenovirus A
acgaguacaugaac

SEQ ID NO: 1539660 - RNA, 23 nt, Human adenovirus A
acaugcgggggaugaaggaagcg

SEQ ID NO: 1539661 - RNA, 18 nt, Human adenovirus A
gcggcguaguaugcgcag

SEQ ID NO: 1539662 - RNA, 22 nt, Human adenovirus A
caguaggcgaucguucaacuuu

SEQ ID NO: 1539663 - RNA, 21 nt, Human adenovirus A
uaaaucuuccgccaaagguaa

SEQ ID NO: 1539664 - RNA, 13 nt, Human adenovirus A
cagaauauaagaa

SEQ ID NO: 1539665 - RNA, 12 nt, Human adenovirus A
cgcuccauccaa

SEQ ID NO: 1539666 - RNA, 19 nt, Human adenovirus A
agccgcagcaccuggagcg

SEQ ID NO: 1539667 - RNA, 15 nt, Human adenovirus A
ggcaaagaacaucaa

SEQ ID NO: 1539668 - RNA, 13 nt, Human adenovirus A
caacacagcacua

SEQ ID NO: 1539669 - RNA, 16 nt, Human adenovirus A
uguaucagucuggacc

SEQ ID NO: 1539670 - RNA, 20 nt, Human adenovirus A
uuaauccuaggcaaagaaac

SEQ ID NO: 1539671 - RNA, 23 nt, Human adenovirus A
guucaacaacagcuucuaaaaga

SEQ ID NO: 1539672 - RNA, 22 nt, Human adenovirus A
gauugggcgcccacucuccuga

SEQ ID NO: 1539673 - RNA, 22 nt, Human adenovirus A
cucuuauaggccaaacagcugu

SEQ ID NO: 1539674 - RNA, 15 nt, Human adenovirus A
cagaacauacaacuu

SEQ ID NO: 1539675 - RNA, 16 nt, Human adenovirus A
cuuugaccggucaggc

SEQ ID NO: 1539676 - RNA, 13 nt, Human adenovirus A
gaggacuuggaag

SEQ ID NO: 1539677 - RNA, 13 nt, Human adenovirus A
augcuuggaagaa

SEQ ID NO: 1539678 - RNA, 15 nt, Human adenovirus A
ggaauaauaguuccc

SEQ ID NO: 1539679 - RNA, 18 nt, Human adenovirus A
accucacaaggucuuaaa

SEQ ID NO: 1539680 - RNA, 19 nt, Human adenovirus A
agaucuucguaggaaagau

SEQ ID NO: 1539681 - RNA, 20 nt, Human adenovirus A
ggaggagcuaaaacaagguc

SEQ ID NO: 1539682 - RNA, 19 nt, Human adenovirus A
guccaauuucguuccagac

SEQ ID NO: 1539683 - RNA, 17 nt, Human adenovirus A
ggaggguuugcauuuac

SEQ ID NO: 1539684 - RNA, 18 nt, Human adenovirus A
uuacaagcacgccaaagc

SEQ ID NO: 1539685 - RNA, 14 nt, Human adenovirus A
aagaaucgcaagca

SEQ ID NO: 1539686 - RNA, 19 nt, Human adenovirus A
uaaaagagccacagcucug

SEQ ID NO: 1539687 - RNA, 17 nt, Human adenovirus A
ugcugagguuaaaagga

SEQ ID NO: 1539688 - RNA, 20 nt, Human adenovirus A
aagauguaugaguaagagca

SEQ ID NO: 1539689 - RNA, 14 nt, Human adenovirus A
ugguuaaacugccu

SEQ ID NO: 1539690 - RNA, 20 nt, Human adenovirus A
gauaauggggucaugaaagu

SEQ ID NO: 1539691 - RNA, 17 nt, Human adenovirus A
gccacacuuaacuuuuu

SEQ ID NO: 1539692 - RNA, 21 nt, Human adenovirus A
agggagauguccuguuuaaac

SEQ ID NO: 1539693 - RNA, 16 nt, Human adenovirus A
gugaugaaaguagaaa

SEQ ID NO: 1539694 - RNA, 17 nt, Human adenovirus A
cauggacucuacuaaca

SEQ ID NO: 1539695 - RNA, 20 nt, Human adenovirus A
cuacuucaccgcgcaagcuu

SEQ ID NO: 1539696 - RNA, 15 nt, Human adenovirus A
caaacaauaacauug

SEQ ID NO: 1539697 - RNA, 21 nt, Human adenovirus A
ucauacaaaucagaagccagc

SEQ ID NO: 1539698 - RNA, 22 nt, Human adenovirus A
uguccacuugcggaacaauaaa

SEQ ID NO: 1539699 - RNA, 21 nt, Human adenovirus A
cgucacccaagggugcagcuc

SEQ ID NO: 1539700 - RNA, 14 nt, Human adenovirus A
cagcaagcagcgcc

SEQ ID NO: 1539701 - RNA, 14 nt, Human adenovirus A
cuucacccugggaa

SEQ ID NO: 1539702 - RNA, 22 nt, Human adenovirus A
uucaagcgcgacuaguccguuu

SEQ ID NO: 1539703 - RNA, 17 nt, Human adenovirus A
gaucguguuauguggcg

SEQ ID NO: 1539704 - RNA, 18 nt, Human adenovirus A
accauguaauaauugagu

SEQ ID NO: 1539705 - RNA, 20 nt, Human adenovirus A
accuacgguggcagccaagc

SEQ ID NO: 1539706 - RNA, 16 nt, Human adenovirus A
cucgcaccagaaagca

SEQ ID NO: 1539707 - RNA, 19 nt, Human adenovirus A
uauuguauuuccagagccc

SEQ ID NO: 1539708 - RNA, 16 nt, Human adenovirus A
acguaaaccuugaaau

SEQ ID NO: 1539709 - RNA, 20 nt, Human adenovirus A
cauuguaacugaaaauggaa

SEQ ID NO: 1539710 - RNA, 17 nt, Human adenovirus A
cagcgguaguuguugcu

SEQ ID NO: 1539711 - RNA, 21 nt, Human adenovirus A
gccugaaccuaauagcacuuu

SEQ ID NO: 1539712 - RNA, 23 nt, Human adenovirus A
cugcgucuccccauucgcagcau

SEQ ID NO: 1539713 - RNA, 17 nt, Human adenovirus A
cagcugauuucagcuuc

SEQ ID NO: 1539714 - RNA, 16 nt, Human adenovirus A
gacaccgcccaggcag

SEQ ID NO: 1539715 - RNA, 18 nt, Human adenovirus A
acgcgaugaagcacgcag

SEQ ID NO: 1539716 - RNA, 13 nt, Human adenovirus A
ccacaugggaagg

SEQ ID NO: 1539717 - RNA, 19 nt, Human adenovirus A
aauccaaggaugacaacau

SEQ ID NO: 1539718 - RNA, 18 nt, Human adenovirus A
accuugaaaugccagaca

SEQ ID NO: 1539719 - RNA, 18 nt, Human adenovirus A
caucuaaaccuauaacaa

SEQ ID NO: 1539720 - RNA, 17 nt, Human adenovirus A
gaucaacgacuaaaaca

SEQ ID NO: 1539721 - RNA, 11 nt, Human adenovirus A
uaguucaucuu

SEQ ID NO: 1539722 - RNA, 19 nt, Human adenovirus A
guaauugaaguaagcuguu

SEQ ID NO: 1539723 - RNA, 17 nt, Human adenovirus A
cagucgccgcagagagc

SEQ ID NO: 1539724 - RNA, 18 nt, Human adenovirus A
cgaugaugccgcaguggu

SEQ ID NO: 1539725 - RNA, 23 nt, Human adenovirus A
gagacuucccacagccagugggu

SEQ ID NO: 1539726 - RNA, 20 nt, Human adenovirus A
cgcggcgguguaugccaaca

SEQ ID NO: 1539727 - RNA, 15 nt, Human adenovirus A
cugaagugccucaaa

SEQ ID NO: 1539728 - RNA, 15 nt, Human adenovirus A
uccugcgacaaaugc

SEQ ID NO: 1539729 - RNA, 17 nt, Human adenovirus A
ugugcuauuaaagcuuu

SEQ ID NO: 1539730 - RNA, 15 nt, Human adenovirus A
cuuuccgccauggcu

SEQ ID NO: 1539731 - RNA, 23 nt, Human adenovirus A
cugccgcugcaaucuuugcaccc

SEQ ID NO: 1539732 - RNA, 21 nt, Human adenovirus A
agucaaugcuucugaaacaaa

SEQ ID NO: 1539733 - RNA, 22 nt, Human adenovirus A
ugcuccaguuauugacaaacgc

SEQ ID NO: 1539734 - RNA, 18 nt, Human adenovirus A
cggacgcuggcaaugaca

SEQ ID NO: 1539735 - RNA, 17 nt, Human adenovirus A
gcauaaccacuugcgcc

SEQ ID NO: 1539736 - RNA, 17 nt, Human adenovirus A
ugcguaaaucucgcagg

SEQ ID NO: 1539737 - RNA, 17 nt, Human adenovirus A
gacagcuuuuauaugcg

SEQ ID NO: 1539738 - RNA, 13 nt, Human adenovirus A
cuguacugcaaac

SEQ ID NO: 1539739 - RNA, 16 nt, Human adenovirus A
uuccaccaaaugcucu

SEQ ID NO: 1539740 - RNA, 15 nt, Human adenovirus A
cgcuuuugccagacu

SEQ ID NO: 1539741 - RNA, 22 nt, Human adenovirus A
accugagucccggucuggugca

SEQ ID NO: 1539742 - RNA, 14 nt, Human adenovirus A
agcgguuauugauu

SEQ ID NO: 1539743 - RNA, 21 nt, Human adenovirus A
cgaccuucauuuuuucugggg

SEQ ID NO: 1539744 - RNA, 17 nt, Human adenovirus A
cauggaaaaacuuggaa

SEQ ID NO: 1539745 - RNA, 14 nt, Human adenovirus A
cacggcacgcggcc

SEQ ID NO: 1539746 - RNA, 14 nt, Human adenovirus A
gauagcaaagccau

SEQ ID NO: 1539747 - RNA, 15 nt, Human adenovirus A
cgcagcaacgcucaa

SEQ ID NO: 1539748 - RNA, 15 nt, Human adenovirus A
gucauggagaaggac

SEQ ID NO: 1539749 - RNA, 14 nt, Human adenovirus A
augagccugaaccu

SEQ ID NO: 1539750 - RNA, 17 nt, Human adenovirus A
uggaggcagcuggagug

SEQ ID NO: 1539751 - RNA, 22 nt, Human adenovirus A
aaccaccgccaugcgcgcggcc

SEQ ID NO: 1539752 - RNA, 12 nt, Human adenovirus A
caauaaaacaag

SEQ ID NO: 1539753 - RNA, 15 nt, Human adenovirus A
uggaguuggaagaag

SEQ ID NO: 1539754 - RNA, 15 nt, Human adenovirus A
aagcgugaguaagcc

SEQ ID NO: 1539755 - RNA, 20 nt, Human adenovirus A
uguaguggggauugggaagg

SEQ ID NO: 1539756 - RNA, 17 nt, Human adenovirus A
cugccuccuucccauuu

SEQ ID NO: 1539757 - RNA, 15 nt, Human adenovirus A
uuaaaaauuugcaag

SEQ ID NO: 1539758 - RNA, 21 nt, Human adenovirus A
gcguagaccaaccaccgccau

SEQ ID NO: 1539759 - RNA, 18 nt, Human adenovirus A
caguuugggcuaguucuu

SEQ ID NO: 1539760 - RNA, 21 nt, Human adenovirus A
aaaagcaaccaaaugagcaaa

SEQ ID NO: 1539761 - RNA, 17 nt, Human adenovirus A
gaacagacaccgcccag

SEQ ID NO: 1539762 - RNA, 16 nt, Human adenovirus A
gacccggaggcaacag

SEQ ID NO: 1539763 - RNA, 12 nt, Human adenovirus A
caauaaauacug

SEQ ID NO: 1539764 - RNA, 13 nt, Human adenovirus A
acauuauguaaag

SEQ ID NO: 1539765 - RNA, 22 nt, Human adenovirus A
cugccauuaauugaucaauuuc

SEQ ID NO: 1539766 - RNA, 17 nt, Human adenovirus A
ugcaucuacgaacgcaa

SEQ ID NO: 1539767 - RNA, 13 nt, Human adenovirus A
gagcgcccuuaac

SEQ ID NO: 1539768 - RNA, 18 nt, Human adenovirus A
acacgcuuuuacucacug

SEQ ID NO: 1539769 - RNA, 23 nt, Human adenovirus A
auguauucuuucuuuagaaacuu

SEQ ID NO: 1539770 - RNA, 15 nt, Human adenovirus A
gccaccauagccccu

SEQ ID NO: 1539771 - RNA, 16 nt, Human adenovirus A
uuggaaagcagcuugg

SEQ ID NO: 1539772 - RNA, 16 nt, Human adenovirus A
ucuagaacaaaaagga

SEQ ID NO: 1539773 - RNA, 14 nt, Human adenovirus A
ggaagaacauccaa

SEQ ID NO: 1539774 - RNA, 17 nt, Human adenovirus A
gcugggcucgaggacca

SEQ ID NO: 1539775 - RNA, 14 nt, Human adenovirus A
aauaaaacuuccaa

SEQ ID NO: 1539776 - RNA, 13 nt, Human adenovirus A
gcugaaacaggua

SEQ ID NO: 1539777 - RNA, 15 nt, Human adenovirus A
gcguguuagacaugg

SEQ ID NO: 1539778 - RNA, 21 nt, Human adenovirus A
ggugaaugggguacgagcccg

SEQ ID NO: 1539779 - RNA, 12 nt, Human adenovirus A
acauuuuaacug

SEQ ID NO: 1539780 - RNA, 15 nt, Human adenovirus A
cagaagccagcagca

SEQ ID NO: 1539781 - RNA, 12 nt, Human adenovirus A
ucaugaaacucu

SEQ ID NO: 1539782 - RNA, 22 nt, Human adenovirus A
acaguauugugggacugggagu

SEQ ID NO: 1539783 - RNA, 17 nt, Human adenovirus A
caguacgaggacugauc

SEQ ID NO: 1539784 - RNA, 15 nt, Human adenovirus A
aguacacuugggaaa

SEQ ID NO: 1539785 - RNA, 15 nt, Human adenovirus A
cuuagaugcauccug

SEQ ID NO: 1539786 - RNA, 17 nt, Human adenovirus A
acaucguccaagaucuu

SEQ ID NO: 1539787 - RNA, 23 nt, Human adenovirus A
aagaaucuugggagagucaggca

SEQ ID NO: 1539788 - RNA, 21 nt, Human adenovirus A
acgcuauaacaguaccaaugu

SEQ ID NO: 1539789 - RNA, 23 nt, Human adenovirus A
caccucaaaaucuaagccaugca

SEQ ID NO: 1539790 - RNA, 17 nt, Human adenovirus A
caguuacaacuugcuuc

SEQ ID NO: 1539791 - RNA, 20 nt, Human adenovirus A
cggcucuuuugcagcuccaa

SEQ ID NO: 1539792 - RNA, 14 nt, Human adenovirus A
gaagagcugcugca

SEQ ID NO: 1539793 - RNA, 15 nt, Human adenovirus A
gauaaacaaaagcaa

SEQ ID NO: 1539794 - RNA, 20 nt, Human adenovirus A
guuuuggcuuaagguggaaa

SEQ ID NO: 1539795 - RNA, 16 nt, Human adenovirus A
ucugggguuaagcagu

SEQ ID NO: 1539796 - RNA, 13 nt, Human adenovirus A
ggcacgagccagc

SEQ ID NO: 1539797 - RNA, 14 nt, Human adenovirus A
caccuuuuguuaau

SEQ ID NO: 1539798 - RNA, 16 nt, Human adenovirus A
cagagagaaaagcaug

SEQ ID NO: 1539799 - RNA, 21 nt, Human adenovirus A
aguuaggucaucguaggacaa

SEQ ID NO: 1539800 - RNA, 20 nt, Human adenovirus A
gaaaaacaguacaaagccag

SEQ ID NO: 1539801 - RNA, 13 nt, Human adenovirus A
ggacaccauggua

SEQ ID NO: 1539802 - RNA, 19 nt, Human adenovirus A
aaaucagaagccagcagca

SEQ ID NO: 1539803 - RNA, 13 nt, Human adenovirus A
auacuaaagaaac

SEQ ID NO: 1539804 - RNA, 20 nt, Human adenovirus A
auacgcgugguuaaacugcc

SEQ ID NO: 1539805 - RNA, 19 nt, Human adenovirus A
agccaugcuaugcaggcag

SEQ ID NO: 1539806 - RNA, 15 nt, Human adenovirus A
gcauaugaacaaacg

SEQ ID NO: 1539807 - RNA, 17 nt, Human adenovirus A
cuaucaucaaacugccu

SEQ ID NO: 1539808 - RNA, 18 nt, Human adenovirus A
aucgccccgcugcaauuu

SEQ ID NO: 1539809 - RNA, 14 nt, Human adenovirus A
aacgggcagccugu

SEQ ID NO: 1539810 - RNA, 14 nt, Human adenovirus A
gacacaaaagcucu

SEQ ID NO: 1539811 - RNA, 18 nt, Human adenovirus A
cauuuuuugaaaagacug

SEQ ID NO: 1539812 - RNA, 17 nt, Human adenovirus A
cauuuaagcaacauuaa

SEQ ID NO: 1539813 - RNA, 13 nt, Human adenovirus A
uacggcugucaug

SEQ ID NO: 1539814 - RNA, 23 nt, Human adenovirus A
acaugauggaucuggagccacag

SEQ ID NO: 1539815 - RNA, 17 nt, Human adenovirus A
cagaauuugugcuaccc

SEQ ID NO: 1539816 - RNA, 17 nt, Human adenovirus A
cgagcucccggaggaag

SEQ ID NO: 1539817 - RNA, 23 nt, Human adenovirus A
caacaguuuaagucgagauucau

SEQ ID NO: 1539818 - RNA, 14 nt, Human adenovirus A
ggagacguuuuugc

SEQ ID NO: 1539819 - RNA, 11 nt, Human adenovirus A
caccugccauu

SEQ ID NO: 1539820 - RNA, 13 nt, Human adenovirus A
gucaaaaaagcaa

SEQ ID NO: 1539821 - RNA, 16 nt, Human adenovirus A
cgccauccgcaggcag

SEQ ID NO: 1539822 - RNA, 21 nt, Human adenovirus A
uaagagcaaagguaucucuga

SEQ ID NO: 1539823 - RNA, 11 nt, Human adenovirus A
acuaacaccaa

SEQ ID NO: 1539824 - RNA, 13 nt, Human adenovirus A
guuuagaaggaaa

SEQ ID NO: 1539825 - RNA, 12 nt, Human adenovirus A
gcaggaguugca

SEQ ID NO: 1539826 - RNA, 14 nt, Human adenovirus A
uucugcugucauuu

SEQ ID NO: 1539827 - RNA, 19 nt, Human adenovirus A
gcuuccguagccuugcagc

SEQ ID NO: 1539828 - RNA, 16 nt, Human adenovirus A
gcauuaaaugguuaac

SEQ ID NO: 1539829 - RNA, 12 nt, Human adenovirus A
uacacuggcugg

SEQ ID NO: 1539830 - RNA, 22 nt, Human adenovirus A
ggcguuccgucaaaaaagcaaa

SEQ ID NO: 1539831 - RNA, 18 nt, Human adenovirus A
uacacgcugcccacucag

SEQ ID NO: 1539832 - RNA, 21 nt, Human adenovirus A
ccuacauuggaguuggaagaa

SEQ ID NO: 1539833 - RNA, 16 nt, Human adenovirus A
cgcugaaacagcaggg

SEQ ID NO: 1539834 - RNA, 22 nt, Human adenovirus A
cacuuaugcucccacacgcagc

SEQ ID NO: 1539835 - RNA, 20 nt, Human adenovirus A
ggacggucgaccuguggcac

SEQ ID NO: 1539836 - RNA, 22 nt, Human adenovirus A
ggcagucacaaguacauccagg

SEQ ID NO: 1539837 - RNA, 18 nt, Human adenovirus A
agguacagaggaaauugu

SEQ ID NO: 1539838 - RNA, 16 nt, Human adenovirus A
gacugcugcgugagga

SEQ ID NO: 1539839 - RNA, 12 nt, Human adenovirus A
uuuggaggcagc

SEQ ID NO: 1539840 - RNA, 14 nt, Human adenovirus A
agcggucuuaaaaa

SEQ ID NO: 1539841 - RNA, 22 nt, Human adenovirus A
aacugcuccccucaacagcaca

SEQ ID NO: 1539842 - RNA, 16 nt, Human adenovirus A
cuuugggagacagaac

SEQ ID NO: 1539843 - RNA, 21 nt, Human adenovirus A
caugucgcauaaugaaaacaa

SEQ ID NO: 1539844 - RNA, 14 nt, Human adenovirus A
gaacuaaacaaacu

SEQ ID NO: 1539845 - RNA, 22 nt, Human adenovirus A
ugccauuaauugaucaauuucu

SEQ ID NO: 1539846 - RNA, 22 nt, Human adenovirus A
aguugcacauauucgcgugcca

SEQ ID NO: 1539847 - RNA, 13 nt, Human adenovirus A
ggcggucugccau

SEQ ID NO: 1539848 - RNA, 17 nt, Human adenovirus A
gcuacaaaguccucagg

SEQ ID NO: 1539849 - RNA, 14 nt, Human adenovirus A
cucuuggccagcug

SEQ ID NO: 1539850 - RNA, 17 nt, Human adenovirus A
uacaucuuuuacuaaaa

SEQ ID NO: 1539851 - RNA, 20 nt, Human adenovirus A
uagagcacaugaagguggau

SEQ ID NO: 1539852 - RNA, 20 nt, Human adenovirus A
agaacccaguaugcugaaga

SEQ ID NO: 1539853 - RNA, 14 nt, Human adenovirus A
gauucuucuuccca

SEQ ID NO: 1539854 - RNA, 15 nt, Human adenovirus A
ucaccacauugcgca

SEQ ID NO: 1539855 - RNA, 16 nt, Human adenovirus A
uacauacacucaugua

SEQ ID NO: 1539856 - RNA, 16 nt, Human adenovirus A
aagcauauaaaacuga

SEQ ID NO: 1539857 - RNA, 19 nt, Human adenovirus A
aaccauuuuauuagcucau

SEQ ID NO: 1539858 - RNA, 12 nt, Human adenovirus A
auggucuucaag

SEQ ID NO: 1539859 - RNA, 17 nt, Human adenovirus A
agcuggcgggagggcau

SEQ ID NO: 1539860 - RNA, 22 nt, Human adenovirus A
ucaccaugggaauagugcucua

SEQ ID NO: 1539861 - RNA, 15 nt, Human adenovirus A
cagcugguauuuggc

SEQ ID NO: 1539862 - RNA, 12 nt, Human adenovirus A
cauucaccagcc

SEQ ID NO: 1539863 - RNA, 19 nt, Human adenovirus A
cguuuugugcccguggauc

SEQ ID NO: 1539864 - RNA, 14 nt, Human adenovirus A
ucccagacugcugu

SEQ ID NO: 1539865 - RNA, 16 nt, Human adenovirus A
aagcaucacacagaaa

SEQ ID NO: 1539866 - RNA, 15 nt, Human adenovirus A
caacuuuauugccuu

SEQ ID NO: 1539867 - RNA, 21 nt, Human adenovirus A
gcgcucgcgcuuuggaggcag

SEQ ID NO: 1539868 - RNA, 20 nt, Human adenovirus A
ggcgagaaugggaggaaaga

SEQ ID NO: 1539869 - RNA, 14 nt, Human adenovirus A
cgccgcgacggcgg

SEQ ID NO: 1539870 - RNA, 13 nt, Human adenovirus A
cugucaccuacca

SEQ ID NO: 1539871 - RNA, 22 nt, Human adenovirus A
gaucuucggguggacggagcca

SEQ ID NO: 1539872 - RNA, 14 nt, Human adenovirus A
cugacgucacuggc

SEQ ID NO: 1539873 - RNA, 20 nt, Human adenovirus A
auuuuaaaguaaauuaaaug

SEQ ID NO: 1539874 - RNA, 20 nt, Human adenovirus A
aacaaaagcaaagcaaaugc

SEQ ID NO: 1539875 - RNA, 16 nt, Human adenovirus A
caaaauugaaaaacug

SEQ ID NO: 1539876 - RNA, 18 nt, Human adenovirus A
uacaaaaaguaacaacag

SEQ ID NO: 1539877 - RNA, 22 nt, Human adenovirus A
caacaagaugaguaaagauauu

SEQ ID NO: 1539878 - RNA, 18 nt, Human adenovirus A
caagguuuuuacauucca

SEQ ID NO: 1539879 - RNA, 20 nt, Human adenovirus A
ggcauuccccauccaaaacc

SEQ ID NO: 1539880 - RNA, 16 nt, Human adenovirus A
ucaguguccaucagcc

SEQ ID NO: 1539881 - RNA, 12 nt, Human adenovirus A
gacccauauuag

SEQ ID NO: 1539882 - RNA, 16 nt, Human adenovirus A
uaugcuacaaaguccu

SEQ ID NO: 1539883 - RNA, 23 nt, Human adenovirus A
gcuuuguuggauagcaaagccau

SEQ ID NO: 1539884 - RNA, 14 nt, Human adenovirus A
gauuucagcuucua

SEQ ID NO: 1539885 - RNA, 15 nt, Human adenovirus A
cugacuauuucacaa

SEQ ID NO: 1539886 - RNA, 17 nt, Human adenovirus A
aaaccacguacgaccac

SEQ ID NO: 1539887 - RNA, 15 nt, Human adenovirus A
gacaacuuaacaaau

SEQ ID NO: 1539888 - RNA, 16 nt, Human adenovirus A
gguuaagcuggguggg

SEQ ID NO: 1539889 - RNA, 19 nt, Human adenovirus A
aauuuuaaaggguccaggg

SEQ ID NO: 1539890 - RNA, 11 nt, Human adenovirus A
auaaaaaauua

SEQ ID NO: 1539891 - RNA, 23 nt, Human adenovirus A
agcugccaccgucaauucuucuu

SEQ ID NO: 1539892 - RNA, 17 nt, Human adenovirus A
uacucggaauugucacc

SEQ ID NO: 1539893 - RNA, 17 nt, Human adenovirus A
caaauuuaaggccaggg

SEQ ID NO: 1539894 - RNA, 17 nt, Human adenovirus A
guaucuguuuggcucua

SEQ ID NO: 1539895 - RNA, 20 nt, Human adenovirus A
acaaaaagacugucaguguc

SEQ ID NO: 1539896 - RNA, 14 nt, Human adenovirus A
accaagcccucucc

SEQ ID NO: 1539897 - RNA, 16 nt, Human adenovirus A
cauggugauuaaauau

SEQ ID NO: 1539898 - RNA, 20 nt, Human adenovirus A
guucgcgauacaacggccag

SEQ ID NO: 1539899 - RNA, 23 nt, Human adenovirus A
uucauguggucaggucuaucaaa

SEQ ID NO: 1539900 - RNA, 12 nt, Human adenovirus A
gugccaggcauu

SEQ ID NO: 1539901 - RNA, 13 nt, Human adenovirus A
agcccaacccuuc

SEQ ID NO: 1539902 - RNA, 14 nt, Human adenovirus A
caaaccuuuacugc

SEQ ID NO: 1539903 - RNA, 12 nt, Human adenovirus A
uaaaagcaagcg

SEQ ID NO: 1539904 - RNA, 23 nt, Human adenovirus A
ccugcaguuauuggacaccaugg

SEQ ID NO: 1539905 - RNA, 18 nt, Human adenovirus A
acacuuuaauaaaaacac

SEQ ID NO: 1539906 - RNA, 22 nt, Human adenovirus A
agguuuaggucgggaugaaaaa

SEQ ID NO: 1539907 - RNA, 22 nt, Human adenovirus A
agauuguaauuuuuuucuccuu

SEQ ID NO: 1539908 - RNA, 22 nt, Human adenovirus A
gucacaaguacauccagggcac

SEQ ID NO: 1539909 - RNA, 14 nt, Human adenovirus A
uuuaauuaacauuc

SEQ ID NO: 1539910 - RNA, 14 nt, Human adenovirus A
ggcagccaggcggg

SEQ ID NO: 1539911 - RNA, 16 nt, Human adenovirus A
cagccugucuacaaau

SEQ ID NO: 1539912 - RNA, 21 nt, Human adenovirus A
guuagcaacuauccuguaguu

SEQ ID NO: 1539913 - RNA, 21 nt, Human adenovirus A
aggaacuccgcgcaaggagcu

SEQ ID NO: 1539914 - RNA, 14 nt, Human adenovirus A
uuaguguuguagau

SEQ ID NO: 1539915 - RNA, 15 nt, Human adenovirus A
guggcacaacacaua

SEQ ID NO: 1539916 - RNA, 22 nt, Human adenovirus A
aggggucuauccuucaguggua

SEQ ID NO: 1539917 - RNA, 22 nt, Human adenovirus A
cggcaggaaaucugggaggaag

SEQ ID NO: 1539918 - RNA, 14 nt, Human adenovirus A
caucgcaaaacacg

SEQ ID NO: 1539919 - RNA, 19 nt, Human adenovirus A
gcacccccaggggccagcu

SEQ ID NO: 1539920 - RNA, 14 nt, Human adenovirus A
accugaaagaaagu

SEQ ID NO: 1539921 - RNA, 17 nt, Human adenovirus A
uguagauaauccaguca

SEQ ID NO: 1539922 - RNA, 16 nt, Human adenovirus A
acugguacuaugacug

SEQ ID NO: 1539923 - RNA, 18 nt, Human adenovirus A
caaguaacaacacgggcu

SEQ ID NO: 1539924 - RNA, 15 nt, Human adenovirus A
aacgcaagcgugcaa

SEQ ID NO: 1539925 - RNA, 14 nt, Human adenovirus A
gagguguaccuggc

SEQ ID NO: 1539926 - RNA, 21 nt, Human adenovirus A
uaguugcagcagaauuacugc

SEQ ID NO: 1539927 - RNA, 18 nt, Human adenovirus A
ccgugcguuaccacccua

SEQ ID NO: 1539928 - RNA, 14 nt, Human adenovirus A
cuuugugacuuccc

SEQ ID NO: 1539929 - RNA, 15 nt, Human adenovirus A
cugguccccagaugu

SEQ ID NO: 1539930 - RNA, 16 nt, Human adenovirus A
augguguuaugaaucu

SEQ ID NO: 1539931 - RNA, 13 nt, Human adenovirus A
cguucuguggaug

SEQ ID NO: 1539932 - RNA, 22 nt, Human adenovirus A
uaccaaauuauugcuuuccucu

SEQ ID NO: 1539933 - RNA, 19 nt, Human adenovirus A
auuuucuuuaaaaaucaca

SEQ ID NO: 1539934 - RNA, 20 nt, Human adenovirus A
caucuagccagucacaguca

SEQ ID NO: 1539935 - RNA, 15 nt, Human adenovirus A
caaauuuaaggccag

SEQ ID NO: 1539936 - RNA, 17 nt, Human adenovirus A
guucgacgggccaggcg

SEQ ID NO: 1539937 - RNA, 18 nt, Human adenovirus A
agaacuacaaaaaaguaa

SEQ ID NO: 1539938 - RNA, 18 nt, Human adenovirus A
guaggaacuccgcgcaag

SEQ ID NO: 1539939 - RNA, 22 nt, Human adenovirus A
augucuaugggggcgcuaacgg

SEQ ID NO: 1539940 - RNA, 23 nt, Human adenovirus A
aaggccauguacuugacucuggc

SEQ ID NO: 1539941 - RNA, 14 nt, Human adenovirus A
ucuggaucuucaaa

SEQ ID NO: 1539942 - RNA, 16 nt, Human adenovirus A
ggcuguauacuacccc

SEQ ID NO: 1539943 - RNA, 14 nt, Human adenovirus A
cacaacacagcacu

SEQ ID NO: 1539944 - RNA, 15 nt, Human adenovirus A
augugaugaaaguag

SEQ ID NO: 1539945 - RNA, 20 nt, Human adenovirus A
ccauaucugaucgcucuuca

SEQ ID NO: 1539946 - RNA, 13 nt, Human adenovirus A
agaugaggcuggu

SEQ ID NO: 1539947 - RNA, 13 nt, Human adenovirus A
cccuccuaccacu

SEQ ID NO: 1539948 - RNA, 21 nt, Human adenovirus A
aguuccguaaagacuccggaa

SEQ ID NO: 1539949 - RNA, 12 nt, Human adenovirus A
cgauuccaagga

SEQ ID NO: 1539950 - RNA, 22 nt, Human adenovirus A
ccagacacgcaucuuguguuua

SEQ ID NO: 1539951 - RNA, 15 nt, Human adenovirus A
aauggagugucacug

SEQ ID NO: 1539952 - RNA, 12 nt, Human adenovirus A
uuuuuucuucuu

SEQ ID NO: 1539953 - RNA, 18 nt, Human adenovirus A
ucacuuaagucuuuacaa

SEQ ID NO: 1539954 - RNA, 15 nt, Human adenovirus A
gcaacagaugaugga

SEQ ID NO: 1539955 - RNA, 21 nt, Human adenovirus A
aauauaaaagcacaacuccau

SEQ ID NO: 1539956 - RNA, 17 nt, Human adenovirus A
cgauuccaaggaauguc

SEQ ID NO: 1539957 - RNA, 21 nt, Human adenovirus A
ugcagcgugcggccuguuuug

SEQ ID NO: 1539958 - RNA, 12 nt, Human adenovirus A
aaaacagcagcg

SEQ ID NO: 1539959 - RNA, 22 nt, Human adenovirus A
uggccauaauguaacccuuccc

SEQ ID NO: 1539960 - RNA, 19 nt, Human adenovirus A
ucuguguauacgccuccua

SEQ ID NO: 1539961 - RNA, 16 nt, Human adenovirus A
agaaacagcagcaacg

SEQ ID NO: 1539962 - RNA, 14 nt, Human adenovirus A
acacauuaaaaugu

SEQ ID NO: 1539963 - RNA, 18 nt, Human adenovirus A
uuuauuaaaaaucaaaug

SEQ ID NO: 1539964 - RNA, 19 nt, Human adenovirus A
aacugaccaggucagcuca

SEQ ID NO: 1539965 - RNA, 22 nt, Human adenovirus A
ucugccauuaauugaucaauuu

SEQ ID NO: 1539966 - RNA, 20 nt, Human adenovirus A
aguaacuccgggaguguaca

SEQ ID NO: 1539967 - RNA, 14 nt, Human adenovirus A
ugcgcgcggccaga

SEQ ID NO: 1539968 - RNA, 14 nt, Human adenovirus A
gcucagcuccaccc

SEQ ID NO: 1539969 - RNA, 18 nt, Human adenovirus A
auuuuauccuacaaaaag

SEQ ID NO: 1539970 - RNA, 15 nt, Human adenovirus A
uaguucugcacgggc

SEQ ID NO: 1539971 - RNA, 17 nt, Human adenovirus A
uuucuucaaauccaaaa

SEQ ID NO: 1539972 - RNA, 22 nt, Human adenovirus A
caacugagacuucccacagcca

SEQ ID NO: 1539973 - RNA, 20 nt, Human adenovirus A
caacaacagcuucuaaaaga

SEQ ID NO: 1539974 - RNA, 11 nt, Human adenovirus A
ccagcagccaa

SEQ ID NO: 1539975 - RNA, 17 nt, Human adenovirus A
ucgggcgaguucuccau

SEQ ID NO: 1539976 - RNA, 20 nt, Human adenovirus A
ucacguggucguaacucaaa

SEQ ID NO: 1539977 - RNA, 18 nt, Human adenovirus A
ccucccucuuggccagcu

SEQ ID NO: 1539978 - RNA, 24 nt, Human adenovirus A
cugccgcugcguagcaguaucagu

SEQ ID NO: 1539979 - RNA, 13 nt, Human adenovirus A
aucagcagccaac

SEQ ID NO: 1539980 - RNA, 17 nt, Human adenovirus A
ugagucgcuguugggac

SEQ ID NO: 1539981 - RNA, 15 nt, Human adenovirus A
auugaguugcacaua

SEQ ID NO: 1539982 - RNA, 15 nt, Human adenovirus A
aaccgucgcuuucaa

SEQ ID NO: 1539983 - RNA, 21 nt, Human adenovirus A
guaauggguucaagcgaacag

SEQ ID NO: 1539984 - RNA, 18 nt, Human adenovirus A
agagcacaugaaggugga

SEQ ID NO: 1539985 - RNA, 15 nt, Human adenovirus A
aagaaaaugaacaaa

SEQ ID NO: 1539986 - RNA, 12 nt, Human adenovirus A
cgcgccacggac

SEQ ID NO: 1539987 - RNA, 20 nt, Human adenovirus A
ugguaacauguccauuuugg

SEQ ID NO: 1539988 - RNA, 16 nt, Human adenovirus A
auacaguuuugaacaa

SEQ ID NO: 1539989 - RNA, 14 nt, Human adenovirus A
aaauggaacccuua

SEQ ID NO: 1539990 - RNA, 18 nt, Human adenovirus A
acacuguggacaacuccu

SEQ ID NO: 1539991 - RNA, 12 nt, Human adenovirus A
ucauaagcugug

SEQ ID NO: 1539992 - RNA, 21 nt, Human adenovirus A
acagcuucagaugacuggaca

SEQ ID NO: 1539993 - RNA, 15 nt, Human adenovirus A
uauauccuugcaaaa

SEQ ID NO: 1539994 - RNA, 11 nt, Human adenovirus A
aacggagaggg

SEQ ID NO: 1539995 - RNA, 21 nt, Human adenovirus A
ccugaaccuaauagcacuuug

SEQ ID NO: 1539996 - RNA, 22 nt, Human adenovirus A
cugggggcguacacuggcuggc

SEQ ID NO: 1539997 - RNA, 14 nt, Human adenovirus A
caagccuguaaaau

SEQ ID NO: 1539998 - RNA, 14 nt, Human adenovirus A
gccauccgcaggca

SEQ ID NO: 1539999 - RNA, 13 nt, Human adenovirus A
agcauguuaaaaa

SEQ ID NO: 1540000 - RNA, 19 nt, Human adenovirus A
gcgcggacgagcucccgga

SEQ ID NO: 1540001 - RNA, 14 nt, Human adenovirus A
cuauauuaacuuua

SEQ ID NO: 1540002 - RNA, 15 nt, Human adenovirus A
caggcaguacuucau

SEQ ID NO: 1540003 - RNA, 14 nt, Human adenovirus A
cucaggacaugaug

SEQ ID NO: 1540004 - RNA, 23 nt, Human adenovirus A
ugagaaccgucugcaugaugcau

SEQ ID NO: 1540005 - RNA, 18 nt, Human adenovirus A
gucaaaguaugcugcaca

SEQ ID NO: 1540006 - RNA, 14 nt, Human adenovirus A
ccuacgguggcagc

SEQ ID NO: 1540007 - RNA, 17 nt, Human adenovirus A
cgaugaagcacgcagag

SEQ ID NO: 1540008 - RNA, 18 nt, Human adenovirus A
cuugcauuaaccuuucca

SEQ ID NO: 1540009 - RNA, 15 nt, Human adenovirus A
cguggaauuaaaagg

SEQ ID NO: 1540010 - RNA, 16 nt, Human adenovirus A
caagaggagaaggagg

SEQ ID NO: 1540011 - RNA, 19 nt, Human adenovirus A
cgcgugucuucucccugug

SEQ ID NO: 1540012 - RNA, 21 nt, Human adenovirus A
aauaggggaugguuuaacauu

SEQ ID NO: 1540013 - RNA, 18 nt, Human adenovirus A
cuugugcagccuuucuua

SEQ ID NO: 1540014 - RNA, 11 nt, Human adenovirus A
aagcaggaaaa

SEQ ID NO: 1540015 - RNA, 15 nt, Human adenovirus A
agucgcacuuuuuaa

SEQ ID NO: 1540016 - RNA, 15 nt, Human adenovirus A
aauuacuugaacaac

SEQ ID NO: 1540017 - RNA, 19 nt, Human adenovirus A
gcuuugcgcgaacaucgca

SEQ ID NO: 1540018 - RNA, 15 nt, Human adenovirus A
agacggcugcgucgc

SEQ ID NO: 1540019 - RNA, 18 nt, Human adenovirus A
uccgcguggucaggaaga

SEQ ID NO: 1540020 - RNA, 22 nt, Human adenovirus A
uucuacuuuagaagccauguua

SEQ ID NO: 1540021 - RNA, 18 nt, Human adenovirus A
ggcugcgucgccggcgua

SEQ ID NO: 1540022 - RNA, 17 nt, Human adenovirus A
ccccagcggcaguacgu

SEQ ID NO: 1540023 - RNA, 14 nt, Human adenovirus A
aacuuuaauguuuc

SEQ ID NO: 1540024 - RNA, 20 nt, Human adenovirus A
gucagauaacgcuaagcuua

SEQ ID NO: 1540025 - RNA, 19 nt, Human adenovirus A
cgguguaugccaacaaaac

SEQ ID NO: 1540026 - RNA, 14 nt, Human adenovirus A
auuugaucagaaaa

SEQ ID NO: 1540027 - RNA, 20 nt, Human adenovirus A
gccaccgucaauucuucuuc

SEQ ID NO: 1540028 - RNA, 15 nt, Human adenovirus A
agauguaaaggaggc

SEQ ID NO: 1540029 - RNA, 15 nt, Human adenovirus A
ucaaagaaacagcag

SEQ ID NO: 1540030 - RNA, 15 nt, Human adenovirus A
uagagauaagcagga

SEQ ID NO: 1540031 - RNA, 16 nt, Human adenovirus A
aagcuugaaacucuaa

SEQ ID NO: 1540032 - RNA, 18 nt, Human adenovirus A
gccaagcgcucgcgcuuu

SEQ ID NO: 1540033 - RNA, 15 nt, Human adenovirus A
gacagucgcguggca

SEQ ID NO: 1540034 - RNA, 14 nt, Human adenovirus A
aacgucgccugagu

SEQ ID NO: 1540035 - RNA, 22 nt, Human adenovirus A
aaauaaagcguucuguggaugg

SEQ ID NO: 1540036 - RNA, 11 nt, Human adenovirus A
cucaagacuau

SEQ ID NO: 1540037 - RNA, 18 nt, Human adenovirus A
gaucauaacauguuuaug

SEQ ID NO: 1540038 - RNA, 20 nt, Human adenovirus A
aauggcuguugaugugauga

SEQ ID NO: 1540039 - RNA, 18 nt, Human adenovirus A
uaagaggagacaacuuua

SEQ ID NO: 1540040 - RNA, 15 nt, Human adenovirus A
accaaacuggccaug

SEQ ID NO: 1540041 - RNA, 15 nt, Human adenovirus A
cgggcaccacagugg

SEQ ID NO: 1540042 - RNA, 19 nt, Human adenovirus A
guaaugagcgcagugauga

SEQ ID NO: 1540043 - RNA, 14 nt, Human adenovirus A
cccuaucuguugcu

SEQ ID NO: 1540044 - RNA, 15 nt, Human adenovirus A
auggugauuaaauau

SEQ ID NO: 1540045 - RNA, 19 nt, Human adenovirus A
acuggggaauuugcauaug

SEQ ID NO: 1540046 - RNA, 20 nt, Human adenovirus A
uuacccgcagcugucucuac

SEQ ID NO: 1540047 - RNA, 18 nt, Human adenovirus A
auuagcacuuaauuacaa

SEQ ID NO: 1540048 - RNA, 17 nt, Human adenovirus A
acauaggcauugggaau

SEQ ID NO: 1540049 - RNA, 16 nt, Human adenovirus A
ccugaccauccaaugg

SEQ ID NO: 1540050 - RNA, 20 nt, Human adenovirus A
auuugucugaaaauugcaug

SEQ ID NO: 1540051 - RNA, 14 nt, Human adenovirus A
ccaaguaacaacac

SEQ ID NO: 1540052 - RNA, 14 nt, Human adenovirus A
auugguuccuaaua

SEQ ID NO: 1540053 - RNA, 22 nt, Human adenovirus A
cagcuguggagggcauggcuga

SEQ ID NO: 1540054 - RNA, 13 nt, Human adenovirus A
uaaacugucugua

SEQ ID NO: 1540055 - RNA, 15 nt, Human adenovirus A
cuuguguuuaagccu

SEQ ID NO: 1540056 - RNA, 17 nt, Human adenovirus A
gucagauagcaagcgua

SEQ ID NO: 1540057 - RNA, 17 nt, Human adenovirus A
gcaggcuggaggugcag

SEQ ID NO: 1540058 - RNA, 22 nt, Human adenovirus A
uacaaaguccucagguaguggg

SEQ ID NO: 1540059 - RNA, 20 nt, Human adenovirus A
cugugagcaaaucucagaaa

SEQ ID NO: 1540060 - RNA, 14 nt, Human adenovirus A
ggcaucuugcauga

SEQ ID NO: 1540061 - RNA, 21 nt, Human adenovirus A
aaccacuugcgccaaguugag

SEQ ID NO: 1540062 - RNA, 22 nt, Human adenovirus A
ucgcuuucaaccaagcccucuc

SEQ ID NO: 1540063 - RNA, 17 nt, Human adenovirus A
aaaauuuucaacagaaa

SEQ ID NO: 1540064 - RNA, 21 nt, Human adenovirus A
cgucaagacccacugcgucag

SEQ ID NO: 1540065 - RNA, 20 nt, Human adenovirus A
auccauuaauauuguguccu

SEQ ID NO: 1540066 - RNA, 14 nt, Human adenovirus A
gccugaagaagaac

SEQ ID NO: 1540067 - RNA, 15 nt, Human adenovirus A
ugacaaacguuuucc

SEQ ID NO: 1540068 - RNA, 20 nt, Human adenovirus A
uccgcauugguugcccccuc

SEQ ID NO: 1540069 - RNA, 19 nt, Human adenovirus A
caccaugguaaaaaggaag

SEQ ID NO: 1540070 - RNA, 22 nt, Human adenovirus A
acucacuggccugaccauccaa

SEQ ID NO: 1540071 - RNA, 12 nt, Human adenovirus A
guccuuccaggg

SEQ ID NO: 1540072 - RNA, 12 nt, Human adenovirus A
auacuaaagaaa

SEQ ID NO: 1540073 - RNA, 20 nt, Human adenovirus A
gugguacgcauucaccagcc

SEQ ID NO: 1540074 - RNA, 15 nt, Human adenovirus A
caacugauauuagua

SEQ ID NO: 1540075 - RNA, 21 nt, Human adenovirus A
ccaaggucaacuuacagcuag

SEQ ID NO: 1540076 - RNA, 21 nt, Human adenovirus A
uaauugcuaauggaagaccuu

SEQ ID NO: 1540077 - RNA, 21 nt, Human adenovirus A
gagaucggcacgagccagcug

SEQ ID NO: 1540078 - RNA, 19 nt, Human adenovirus A
gcggccuguuuuguuguau

SEQ ID NO: 1540079 - RNA, 20 nt, Human adenovirus A
gaaaggcauggaaaaacuug

SEQ ID NO: 1540080 - RNA, 16 nt, Human adenovirus A
aaaagcacaacuccau

SEQ ID NO: 1540081 - RNA, 23 nt, Human adenovirus A
aggaaaagcugccaccucuagaa

SEQ ID NO: 1540082 - RNA, 14 nt, Human adenovirus A
ucagaauaaaacaa

SEQ ID NO: 1540083 - RNA, 15 nt, Human adenovirus A
caacagucagugucc

SEQ ID NO: 1540084 - RNA, 20 nt, Human adenovirus A
ccaagcauauaaaacugauu

SEQ ID NO: 1540085 - RNA, 15 nt, Human adenovirus A
cccguuccgcaagca

SEQ ID NO: 1540086 - RNA, 17 nt, Human adenovirus A
augcuuagucauuacaa

SEQ ID NO: 1540087 - RNA, 16 nt, Human adenovirus A
cuuaaaaaaacaaaac

SEQ ID NO: 1540088 - RNA, 12 nt, Human adenovirus A
uacugcuuccag

SEQ ID NO: 1540089 - RNA, 13 nt, Human adenovirus A
ucucagugucauu

SEQ ID NO: 1540090 - RNA, 15 nt, Human adenovirus A
cuuaaaaaaggacac

SEQ ID NO: 1540091 - RNA, 11 nt, Human adenovirus A
uguccuuccag

SEQ ID NO: 1540092 - RNA, 13 nt, Human adenovirus A
aagaaugggagga

SEQ ID NO: 1540093 - RNA, 15 nt, Human adenovirus A
cgaacaguguuuuca

SEQ ID NO: 1540094 - RNA, 22 nt, Human adenovirus A
cauggcacauaacacagcuucu

SEQ ID NO: 1540095 - RNA, 13 nt, Human adenovirus A
auuugcugaaaaa

SEQ ID NO: 1540096 - RNA, 21 nt, Human adenovirus A
uaacauugccuuaggcagcag

SEQ ID NO: 1540097 - RNA, 19 nt, Human adenovirus A
agcaggcuggaggugcagg

SEQ ID NO: 1540098 - RNA, 21 nt, Human adenovirus A
gcucaaaggcaggcauuaccu

SEQ ID NO: 1540099 - RNA, 19 nt, Human adenovirus A
ccauuugaucagaaaaaac

SEQ ID NO: 1540100 - RNA, 23 nt, Human adenovirus A
agucagacccgacggaguguuuc

SEQ ID NO: 1540101 - RNA, 18 nt, Human adenovirus A
ucaaacgccgacgcugcu

SEQ ID NO: 1540102 - RNA, 20 nt, Human adenovirus A
guagccauugguuuaaugca

SEQ ID NO: 1540103 - RNA, 12 nt, Human adenovirus A
ggauauaaagcu

SEQ ID NO: 1540104 - RNA, 19 nt, Human adenovirus A
cucacgacacgucacaucc

SEQ ID NO: 1540105 - RNA, 21 nt, Human adenovirus A
guagccugcuuucagcacugc

SEQ ID NO: 1540106 - RNA, 16 nt, Human adenovirus A
augcacaagagcggcg

SEQ ID NO: 1540107 - RNA, 14 nt, Human adenovirus A
acccuuuagcaguu

SEQ ID NO: 1540108 - RNA, 21 nt, Human adenovirus A
augggaggaaagacagccaag

SEQ ID NO: 1540109 - RNA, 15 nt, Human adenovirus A
gcuaagggacaaguu

SEQ ID NO: 1540110 - RNA, 18 nt, Human adenovirus A
ggucagauccuuagauuu

SEQ ID NO: 1540111 - RNA, 18 nt, Human adenovirus A
aguucuaaugcaaguugu

SEQ ID NO: 1540112 - RNA, 21 nt, Human adenovirus A
cguuucagcgccaacaaaaac

SEQ ID NO: 1540113 - RNA, 16 nt, Human adenovirus A
accuaaggcuucaaga

SEQ ID NO: 1540114 - RNA, 15 nt, Human adenovirus A
auuuugccagcucuu

SEQ ID NO: 1540115 - RNA, 16 nt, Human adenovirus A
gugcaaauauaaaagc

SEQ ID NO: 1540116 - RNA, 14 nt, Human adenovirus A
cacaaguacaucca

SEQ ID NO: 1540117 - RNA, 15 nt, Human adenovirus A
acugauuuucaucug

SEQ ID NO: 1540118 - RNA, 20 nt, Human adenovirus A
ugggauacuaccgcugcuca

SEQ ID NO: 1540119 - RNA, 23 nt, Human adenovirus A
ucguccaaccaacgaacacggag

SEQ ID NO: 1540120 - RNA, 18 nt, Human adenovirus A
cucgcaguauggcagcug

SEQ ID NO: 1540121 - RNA, 14 nt, Human adenovirus A
aaucaaauuacaca

SEQ ID NO: 1540122 - RNA, 15 nt, Human adenovirus A
uuugaccggucaggc

SEQ ID NO: 1540123 - RNA, 21 nt, Human adenovirus A
ugacaaugcccgccuggcagu

SEQ ID NO: 1540124 - RNA, 20 nt, Human adenovirus A
gcgguuuaagaaaucuuuua

SEQ ID NO: 1540125 - RNA, 13 nt, Human adenovirus A
cgcucucaccgcu

SEQ ID NO: 1540126 - RNA, 17 nt, Human adenovirus A
guacgcaaacucagccc

SEQ ID NO: 1540127 - RNA, 12 nt, Human adenovirus A
cgccuuaauuuu

SEQ ID NO: 1540128 - RNA, 12 nt, Human adenovirus A
gugcacgucaca

SEQ ID NO: 1540129 - RNA, 22 nt, Human adenovirus A
auacuaaagaaacaaacuacau

SEQ ID NO: 1540130 - RNA, 23 nt, Human adenovirus A
aacugauggugccuaagcggcaa

SEQ ID NO: 1540131 - RNA, 16 nt, Human adenovirus A
cauguguugugcacuu

SEQ ID NO: 1540132 - RNA, 14 nt, Human adenovirus A
ggguucgugcucca

SEQ ID NO: 1540133 - RNA, 17 nt, Human adenovirus A
ggcagacaagguggccg

SEQ ID NO: 1540134 - RNA, 20 nt, Human adenovirus A
augaaaaagucagcugcaaa

SEQ ID NO: 1540135 - RNA, 19 nt, Human adenovirus A
aacucuacuuaaaagcaag

SEQ ID NO: 1540136 - RNA, 14 nt, Human adenovirus A
uugcgagcugccac

SEQ ID NO: 1540137 - RNA, 19 nt, Human adenovirus A
cauucgcagcgcacuggca

SEQ ID NO: 1540138 - RNA, 20 nt, Human adenovirus A
ccagcucacggugucagaau

SEQ ID NO: 1540139 - RNA, 20 nt, Human adenovirus A
aaacuuucuaccaaggaaaa

SEQ ID NO: 1540140 - RNA, 18 nt, Human adenovirus A
ccaccgacgaagcgucag

SEQ ID NO: 1540141 - RNA, 16 nt, Human adenovirus A
agcuaaaucugccacu

SEQ ID NO: 1540142 - RNA, 19 nt, Human adenovirus A
uggagccaaaaaaacagau

SEQ ID NO: 1540143 - RNA, 13 nt, Human adenovirus A
cacacgcagcaac

SEQ ID NO: 1540144 - RNA, 13 nt, Human adenovirus A
uacaaaucuuuca

SEQ ID NO: 1540145 - RNA, 14 nt, Human adenovirus A
cgggccgcagcugc

SEQ ID NO: 1540146 - RNA, 10 nt, Human adenovirus A
cuaaaacaga

SEQ ID NO: 1540147 - RNA, 23 nt, Human adenovirus A
cacaauaacuacaaacaguuuca

SEQ ID NO: 1540148 - RNA, 17 nt, Human adenovirus A
gcggguaagagcaggcu

SEQ ID NO: 1540149 - RNA, 22 nt, Human adenovirus A
accuagguuuaaaucuuucugc

SEQ ID NO: 1540150 - RNA, 14 nt, Human adenovirus A
uggaagaaaaaaac

SEQ ID NO: 1540151 - RNA, 21 nt, Human adenovirus A
uuuuaaauuguuccuguucua

SEQ ID NO: 1540152 - RNA, 18 nt, Human adenovirus A
cuggagcagguguaacca

SEQ ID NO: 1540153 - RNA, 12 nt, Human adenovirus A
caaaacacaaau

SEQ ID NO: 1540154 - RNA, 13 nt, Human adenovirus A
gggcgacuacccg

SEQ ID NO: 1540155 - RNA, 18 nt, Human adenovirus A
aaaagugugguaacaugu

SEQ ID NO: 1540156 - RNA, 21 nt, Human adenovirus A
aauaaacgguuccuuagccuu

SEQ ID NO: 1540157 - RNA, 22 nt, Human adenovirus A
uugcagcagaauuacugccagu

SEQ ID NO: 1540158 - RNA, 15 nt, Human adenovirus A
ucaaccuauuaaccu

SEQ ID NO: 1540159 - RNA, 21 nt, Human adenovirus A
agguggaaaccuagguuuaaa

SEQ ID NO: 1540160 - RNA, 13 nt, Human adenovirus A
gucaguguccauc

SEQ ID NO: 1540161 - RNA, 18 nt, Human adenovirus A
aacaacaggugcaagaag

SEQ ID NO: 1540162 - RNA, 18 nt, Human adenovirus A
ccuucgaaaugcagggac

SEQ ID NO: 1540163 - RNA, 18 nt, Human adenovirus A
cauuggaguacaagcuug

SEQ ID NO: 1540164 - RNA, 17 nt, Human adenovirus A
ucauacaaaucagaagc

SEQ ID NO: 1540165 - RNA, 15 nt, Human adenovirus A
agcugacggccauug

SEQ ID NO: 1540166 - RNA, 21 nt, Human adenovirus A
ucauaagacaaagccucugua

SEQ ID NO: 1540167 - RNA, 13 nt, Human adenovirus A
ucguuacuuuugc

SEQ ID NO: 1540168 - RNA, 15 nt, Human adenovirus A
cuacuaauaauguaa

SEQ ID NO: 1540169 - RNA, 12 nt, Human adenovirus A
aaccagcugggc

SEQ ID NO: 1540170 - RNA, 23 nt, Human adenovirus A
gcuuucgagggguucucuuucaa

SEQ ID NO: 1540171 - RNA, 15 nt, Human adenovirus A
aaagaucacagccag

SEQ ID NO: 1540172 - RNA, 18 nt, Human adenovirus A
cauacuuaccaaagccau

SEQ ID NO: 1540173 - RNA, 19 nt, Human adenovirus A
ugacacuguggacaacucc

SEQ ID NO: 1540174 - RNA, 20 nt, Human adenovirus A
cugcggggggaauaucucau

SEQ ID NO: 1540175 - RNA, 18 nt, Human adenovirus A
cucuaacugcucagcugg

SEQ ID NO: 1540176 - RNA, 20 nt, Human adenovirus A
gggauuauaaaaggcuggaa

SEQ ID NO: 1540177 - RNA, 14 nt, Human adenovirus A
auuugaacacacug

SEQ ID NO: 1540178 - RNA, 22 nt, Human adenovirus A
cguucaacuuuguccaguuuac

SEQ ID NO: 1540179 - RNA, 14 nt, Human adenovirus A
gucacaacaagaug

SEQ ID NO: 1540180 - RNA, 15 nt, Human adenovirus A
gaaggaaaugauggc

SEQ ID NO: 1540181 - RNA, 21 nt, Human adenovirus A
ggcuagcuugcgaaacccacg

SEQ ID NO: 1540182 - RNA, 15 nt, Human adenovirus A
acuguaagaggagac

SEQ ID NO: 1540183 - RNA, 20 nt, Human adenovirus A
cuucuccagacaacuucauu

SEQ ID NO: 1540184 - RNA, 13 nt, Human adenovirus A
aagcaaaguacaa

SEQ ID NO: 1540185 - RNA, 17 nt, Human adenovirus A
aguuauauuuucuaugc

SEQ ID NO: 1540186 - RNA, 14 nt, Human adenovirus A
aggcgcgcggugga

SEQ ID NO: 1540187 - RNA, 18 nt, Human adenovirus A
aguuaauugauuuacaaa

SEQ ID NO: 1540188 - RNA, 21 nt, Human adenovirus A
gacugagaaccgucugcauga

SEQ ID NO: 1540189 - RNA, 23 nt, Human adenovirus A
acuggccugaccauccaauggau

SEQ ID NO: 1540190 - RNA, 21 nt, Human adenovirus A
cacggccggaugcagaggaaa

SEQ ID NO: 1540191 - RNA, 20 nt, Human adenovirus A
uugaguaacuucaacauuua

SEQ ID NO: 1540192 - RNA, 12 nt, Human adenovirus A
aauaacacauaa

SEQ ID NO: 1540193 - RNA, 15 nt, Human adenovirus A
agccgcagcaccugg

SEQ ID NO: 1540194 - RNA, 15 nt, Human adenovirus A
uuuauuaaaaaucaa

SEQ ID NO: 1540195 - RNA, 20 nt, Human adenovirus A
ugaaugcguaaaucucgcag

SEQ ID NO: 1540196 - RNA, 22 nt, Human adenovirus A
cuuaaggcgggguauguuuaga

SEQ ID NO: 1540197 - RNA, 15 nt, Human adenovirus A
agauucuucuuccca

SEQ ID NO: 1540198 - RNA, 14 nt, Human adenovirus A
aggcgcucagugcg

SEQ ID NO: 1540199 - RNA, 14 nt, Human adenovirus A
acucauaagcugug

SEQ ID NO: 1540200 - RNA, 15 nt, Human adenovirus A
caaggucaacuuaca

SEQ ID NO: 1540201 - RNA, 13 nt, Human adenovirus A
acgccaaagccac

SEQ ID NO: 1540202 - RNA, 17 nt, Human adenovirus A
uagagccaugggaggau

SEQ ID NO: 1540203 - RNA, 15 nt, Human adenovirus A
gaaccgucugcauga

SEQ ID NO: 1540204 - RNA, 21 nt, Human adenovirus A
aggccuaauggagugucacug

SEQ ID NO: 1540205 - RNA, 18 nt, Human adenovirus A
gaugacuggacagcggcc

SEQ ID NO: 1540206 - RNA, 11 nt, Human adenovirus A
gcauaaugaaa

SEQ ID NO: 1540207 - RNA, 23 nt, Human adenovirus A
gaaaagcauguccgcggggacag

SEQ ID NO: 1540208 - RNA, 20 nt, Human adenovirus A
acagaguugcuuuuagaugu

SEQ ID NO: 1540209 - RNA, 22 nt, Human adenovirus A
aggaagcaauaaaacaaggagc

SEQ ID NO: 1540210 - RNA, 17 nt, Human adenovirus A
gguaccuucgaaaugca

SEQ ID NO: 1540211 - RNA, 15 nt, Human adenovirus A
aguguacuuggugga

SEQ ID NO: 1540212 - RNA, 17 nt, Human adenovirus A
auccuagcguacagcca

SEQ ID NO: 1540213 - RNA, 22 nt, Human adenovirus A
cuauggaccgguuuugacgaac

SEQ ID NO: 1540214 - RNA, 19 nt, Human adenovirus A
uugcaacgcaccuugcagg

SEQ ID NO: 1540215 - RNA, 14 nt, Human adenovirus A
ucaaacguccaggc

SEQ ID NO: 1540216 - RNA, 21 nt, Human adenovirus A
ggaagacagcauggagugcug

SEQ ID NO: 1540217 - RNA, 12 nt, Human adenovirus A
gcguuuggaaac

SEQ ID NO: 1540218 - RNA, 14 nt, Human adenovirus A
acagaaaaaaauug

SEQ ID NO: 1540219 - RNA, 15 nt, Human adenovirus A
cgguggaacugcaga

SEQ ID NO: 1540220 - RNA, 17 nt, Human adenovirus A
gccgacguugcaagagg

SEQ ID NO: 1540221 - RNA, 13 nt, Human adenovirus A
gaugcuuugggag

SEQ ID NO: 1540222 - RNA, 19 nt, Human adenovirus A
auacauaauuuuaaaguaa

SEQ ID NO: 1540223 - RNA, 20 nt, Human adenovirus A
cuaagaaggcacccucccag

SEQ ID NO: 1540224 - RNA, 14 nt, Human adenovirus A
cgaaacuguugacc

SEQ ID NO: 1540225 - RNA, 15 nt, Human adenovirus A
gcaaaaaaggggcac

SEQ ID NO: 1540226 - RNA, 12 nt, Human adenovirus A
aaauauccagga

SEQ ID NO: 1540227 - RNA, 13 nt, Human adenovirus A
uacccgccagugu

SEQ ID NO: 1540228 - RNA, 23 nt, Human adenovirus A
ccacuuuaagucugucuguugcc

SEQ ID NO: 1540229 - RNA, 19 nt, Human adenovirus A
augcccugcaaaaagaaaa

SEQ ID NO: 1540230 - RNA, 15 nt, Human adenovirus A
agucaacuaaaaauu

SEQ ID NO: 1540231 - RNA, 21 nt, Human adenovirus A
uccauguggagguauaacaaa

SEQ ID NO: 1540232 - RNA, 17 nt, Human adenovirus A
gauccuuagauuuuuca

SEQ ID NO: 1540233 - RNA, 17 nt, Human adenovirus A
caaguuaaaagaccaaa

SEQ ID NO: 1540234 - RNA, 12 nt, Human adenovirus A
cgagacugcagg

SEQ ID NO: 1540235 - RNA, 20 nt, Human adenovirus A
uuugagccagaugaacauuc

SEQ ID NO: 1540236 - RNA, 15 nt, Human adenovirus A
uucuaccaaggaaaa

SEQ ID NO: 1540237 - RNA, 20 nt, Human adenovirus A
aaccaagcccucuccaauga

SEQ ID NO: 1540238 - RNA, 14 nt, Human adenovirus A
agcaguaucagugg

SEQ ID NO: 1540239 - RNA, 20 nt, Human adenovirus A
uguagcugaaaacaacugca

SEQ ID NO: 1540240 - RNA, 23 nt, Human adenovirus A
uauuucuuguucuuccucuucua

SEQ ID NO: 1540241 - RNA, 14 nt, Human adenovirus A
cccuacgugccucc

SEQ ID NO: 1540242 - RNA, 16 nt, Human adenovirus A
acaagcugcgcugccg

SEQ ID NO: 1540243 - RNA, 13 nt, Human adenovirus A
aaagcaaaguaca

SEQ ID NO: 1540244 - RNA, 18 nt, Human adenovirus A
gucggaaugauuaaacaa

SEQ ID NO: 1540245 - RNA, 12 nt, Human adenovirus A
ucugcugucauu

SEQ ID NO: 1540246 - RNA, 19 nt, Human adenovirus A
uucaucuuaguaauggagu

SEQ ID NO: 1540247 - RNA, 14 nt, Human adenovirus A
aagcaggagaacaa

SEQ ID NO: 1540248 - RNA, 14 nt, Human adenovirus A
gauggguacagaug

SEQ ID NO: 1540249 - RNA, 16 nt, Human adenovirus A
ccuggaggucuccaug

SEQ ID NO: 1540250 - RNA, 15 nt, Human adenovirus A
cauaagcugugaaaa

SEQ ID NO: 1540251 - RNA, 18 nt, Human adenovirus A
ccaguuuacuaacaccaa

SEQ ID NO: 1540252 - RNA, 16 nt, Human adenovirus A
ggauuuuuuuguaaaa

SEQ ID NO: 1540253 - RNA, 20 nt, Human adenovirus A
cuacggcugucauggagaag

SEQ ID NO: 1540254 - RNA, 13 nt, Human adenovirus A
aaacauaaaacua

SEQ ID NO: 1540255 - RNA, 23 nt, Human adenovirus A
gaacgcauauugcgcuauguaca

SEQ ID NO: 1540256 - RNA, 19 nt, Human adenovirus A
uaagggcgcccuccaccgc

SEQ ID NO: 1540257 - RNA, 22 nt, Human adenovirus A
cagaaaaacaguacaaagccag

SEQ ID NO: 1540258 - RNA, 13 nt, Human adenovirus A
ucgaccugcaugu

SEQ ID NO: 1540259 - RNA, 23 nt, Human adenovirus A
gaacaaacgguuacagaggaacg

SEQ ID NO: 1540260 - RNA, 21 nt, Human adenovirus A
uaugaugcgggcagccaggcg

SEQ ID NO: 1540261 - RNA, 20 nt, Human adenovirus A
cucgcauaaauucgcgggcu

SEQ ID NO: 1540262 - RNA, 19 nt, Human adenovirus A
aaacacaugauggaucugg

SEQ ID NO: 1540263 - RNA, 23 nt, Human adenovirus A
ucgcagcugacaucuuaaugcca

SEQ ID NO: 1540264 - RNA, 14 nt, Human adenovirus A
auuaacaguuugcg

SEQ ID NO: 1540265 - RNA, 23 nt, Human adenovirus A
ccuaggcaacguuggcagcgacg

SEQ ID NO: 1540266 - RNA, 13 nt, Human adenovirus A
uuucagcacugcg

SEQ ID NO: 1540267 - RNA, 20 nt, Human adenovirus A
ucuugcuuuaagggcuggcg

SEQ ID NO: 1540268 - RNA, 15 nt, Human adenovirus A
ccuauccgucuccag

SEQ ID NO: 1540269 - RNA, 23 nt, Human adenovirus A
aagcaaaccacugcaaugcagcc

SEQ ID NO: 1540270 - RNA, 22 nt, Human adenovirus A
aauuugucugaaaauugcauga

SEQ ID NO: 1540271 - RNA, 18 nt, Human adenovirus A
cuuugagccagaugaaca

SEQ ID NO: 1540272 - RNA, 15 nt, Human adenovirus A
guauacagauuuaag

SEQ ID NO: 1540273 - RNA, 22 nt, Human adenovirus A
acuucaauccuuuuucgggcuc

SEQ ID NO: 1540274 - RNA, 19 nt, Human adenovirus A
uacugcccugguuccccaa

SEQ ID NO: 1540275 - RNA, 19 nt, Human adenovirus A
cuuuuacuaaaaugcaaaa

SEQ ID NO: 1540276 - RNA, 14 nt, Human adenovirus A
cggacaguagcugc

SEQ ID NO: 1540277 - RNA, 19 nt, Human adenovirus A
ccagaaaguaucugcccau

SEQ ID NO: 1540278 - RNA, 14 nt, Human adenovirus A
aagccaacggcaca

SEQ ID NO: 1540279 - RNA, 17 nt, Human adenovirus A
ucccacauacaucaccu

SEQ ID NO: 1540280 - RNA, 20 nt, Human adenovirus A
agggcuggcgcuuccauacc

SEQ ID NO: 1540281 - RNA, 13 nt, Human adenovirus A
aaauaucauauac

SEQ ID NO: 1540282 - RNA, 17 nt, Human adenovirus A
uucccaagauuuaauuu

SEQ ID NO: 1540283 - RNA, 15 nt, Human adenovirus A
aacagacaauuccaa

SEQ ID NO: 1540284 - RNA, 16 nt, Human adenovirus A
auacaacggccagcca

SEQ ID NO: 1540285 - RNA, 22 nt, Human adenovirus A
cauuacccaagaauaaaaacac

SEQ ID NO: 1540286 - RNA, 12 nt, Human adenovirus A
uaucgcagcugg

SEQ ID NO: 1540287 - RNA, 14 nt, Human adenovirus A
ucaagaaaggcauc

SEQ ID NO: 1540288 - RNA, 18 nt, Human adenovirus A
cagugaagcaaaccacau

SEQ ID NO: 1540289 - RNA, 14 nt, Human adenovirus A
ucuaccaaggaaaa

SEQ ID NO: 1540290 - RNA, 11 nt, Human adenovirus A
ccacaggaaag

SEQ ID NO: 1540291 - RNA, 12 nt, Human adenovirus A
ccaccagacccc

SEQ ID NO: 1540292 - RNA, 18 nt, Human adenovirus A
aggagacguuuuugccca

SEQ ID NO: 1540293 - RNA, 14 nt, Human adenovirus A
cagauguaaaagua

SEQ ID NO: 1540294 - RNA, 21 nt, Human adenovirus A
gcaaauaguuccguaaagacu

SEQ ID NO: 1540295 - RNA, 11 nt, Human adenovirus A
acaagccgcag

SEQ ID NO: 1540296 - RNA, 16 nt, Human adenovirus A
ugcauuaccagcagcc

SEQ ID NO: 1540297 - RNA, 16 nt, Human adenovirus A
cgaccgccgccaaacc

SEQ ID NO: 1540298 - RNA, 15 nt, Human adenovirus A
auaaaaccugugccu

SEQ ID NO: 1540299 - RNA, 23 nt, Human adenovirus A
cuuauaaaauuucccucuuccca

SEQ ID NO: 1540300 - RNA, 18 nt, Human adenovirus A
aagcgaagaucaguugca

SEQ ID NO: 1540301 - RNA, 17 nt, Human adenovirus A
gucaauucuucuuccaa

SEQ ID NO: 1540302 - RNA, 20 nt, Human adenovirus A
aacaagcgaccucugaaaca

SEQ ID NO: 1540303 - RNA, 18 nt, Human adenovirus A
cgccgcgacggcggcgca

SEQ ID NO: 1540304 - RNA, 21 nt, Human adenovirus A
gcauuacgucgcuaaauggau

SEQ ID NO: 1540305 - RNA, 16 nt, Human adenovirus A
acugggccaggaggac

SEQ ID NO: 1540306 - RNA, 19 nt, Human adenovirus A
cgauaaacaaaagcaaagc

SEQ ID NO: 1540307 - RNA, 13 nt, Human adenovirus A
aauaaauacugcu

SEQ ID NO: 1540308 - RNA, 17 nt, Human adenovirus A
ccuuucucugugacaaa

SEQ ID NO: 1540309 - RNA, 13 nt, Human adenovirus A
augcauaauuaaa

SEQ ID NO: 1540310 - RNA, 11 nt, Human adenovirus A
uggaacaccag

SEQ ID NO: 1540311 - RNA, 23 nt, Human adenovirus A
cagucagagagaaaagcaugucc

SEQ ID NO: 1540312 - RNA, 17 nt, Human adenovirus A
aauguggagcugagcaa

SEQ ID NO: 1540313 - RNA, 15 nt, Human adenovirus A
aguaacaacacgggc

SEQ ID NO: 1540314 - RNA, 23 nt, Human adenovirus A
uuaaugguguagcugcaguuugu

SEQ ID NO: 1540315 - RNA, 13 nt, Human adenovirus A
gcaggcuggaggu

SEQ ID NO: 1540316 - RNA, 17 nt, Human adenovirus A
aaugcauuaccagcagc

SEQ ID NO: 1540317 - RNA, 16 nt, Human adenovirus A
cccaacugucaaaccu

SEQ ID NO: 1540318 - RNA, 12 nt, Human adenovirus A
uuugcauuuacu

SEQ ID NO: 1540319 - RNA, 19 nt, Human adenovirus A
aaagccaggcacagcagac

SEQ ID NO: 1540320 - RNA, 15 nt, Human adenovirus A
cugccuaccugcgca

SEQ ID NO: 1540321 - RNA, 22 nt, Human adenovirus A
agcuugaaacucuaacugcuca

SEQ ID NO: 1540322 - RNA, 20 nt, Human adenovirus A
uccaaguucuaaugcaaguu

SEQ ID NO: 1540323 - RNA, 13 nt, Human adenovirus A
cccaacccuuccc

SEQ ID NO: 1540324 - RNA, 20 nt, Human adenovirus A
ggcguaaccaaauacugcua

SEQ ID NO: 1540325 - RNA, 14 nt, Human adenovirus A
acauaacacagcuu

SEQ ID NO: 1540326 - RNA, 23 nt, Human adenovirus A
aacacaguuuaacacauacagua

SEQ ID NO: 1540327 - RNA, 15 nt, Human adenovirus A
gaagcaauaaaacaa

SEQ ID NO: 1540328 - RNA, 18 nt, Human adenovirus A
acaauggcauagaaaguu

SEQ ID NO: 1540329 - RNA, 16 nt, Human adenovirus A
gcugacauacacugua

SEQ ID NO: 1540330 - RNA, 18 nt, Human adenovirus A
cagcuaacgccaccagcg

SEQ ID NO: 1540331 - RNA, 17 nt, Human adenovirus A
cuugugcagccuuucuu

SEQ ID NO: 1540332 - RNA, 13 nt, Human adenovirus A
cuacacaugaagg

SEQ ID NO: 1540333 - RNA, 19 nt, Human adenovirus A
caaaacuuucuaccaagga

SEQ ID NO: 1540334 - RNA, 18 nt, Human adenovirus A
augcccugcaaaaagaaa

SEQ ID NO: 1540335 - RNA, 17 nt, Human adenovirus A
aaagacuccggaaacaa

SEQ ID NO: 1540336 - RNA, 15 nt, Human adenovirus A
cuucaauaccaguuu

SEQ ID NO: 1540337 - RNA, 20 nt, Human adenovirus A
cagaugacuggacagcggcc

SEQ ID NO: 1540338 - RNA, 12 nt, Human adenovirus A
ugauaugaaguu

SEQ ID NO: 1540339 - RNA, 14 nt, Human adenovirus A
gcgcucaaaggcag

SEQ ID NO: 1540340 - RNA, 15 nt, Human adenovirus A
acgcuugugcagccu

SEQ ID NO: 1540341 - RNA, 13 nt, Human adenovirus A
acauaccuggcaa

SEQ ID NO: 1540342 - RNA, 22 nt, Human adenovirus A
uucugaucaacgacuaaaacaa

SEQ ID NO: 1540343 - RNA, 23 nt, Human adenovirus A
gcaacuuuuuaaccacuguagug

SEQ ID NO: 1540344 - RNA, 11 nt, Human adenovirus A
aaaacacugag

SEQ ID NO: 1540345 - RNA, 20 nt, Human adenovirus A
uaagcgccggaccccacaug

SEQ ID NO: 1540346 - RNA, 14 nt, Human adenovirus A
cguuacagcuucag

SEQ ID NO: 1540347 - RNA, 19 nt, Human adenovirus A
gcgcgcauacccgaggacg

SEQ ID NO: 1540348 - RNA, 17 nt, Human adenovirus A
guacucaucagagggaa

SEQ ID NO: 1540349 - RNA, 22 nt, Human adenovirus A
ucuucguaggaaagaucuucaa

SEQ ID NO: 1540350 - RNA, 15 nt, Human adenovirus A
agacaauuccaacga

SEQ ID NO: 1540351 - RNA, 20 nt, Human adenovirus A
ggagcgccccccuagcagua

SEQ ID NO: 1540352 - RNA, 15 nt, Human adenovirus A
cacgcuuugaccggu

SEQ ID NO: 1540353 - RNA, 14 nt, Human adenovirus A
cagggauauguuuc

SEQ ID NO: 1540354 - RNA, 14 nt, Human adenovirus A
caauuaguaacaag

SEQ ID NO: 1540355 - RNA, 19 nt, Human adenovirus A
auaauaguucccucugguc

SEQ ID NO: 1540356 - RNA, 18 nt, Human adenovirus A
aagagcuuaugcauagcu

SEQ ID NO: 1540357 - RNA, 16 nt, Human adenovirus A
cauauagcucauguga

SEQ ID NO: 1540358 - RNA, 19 nt, Human adenovirus A
uaagaucuucguaggaaag

SEQ ID NO: 1540359 - RNA, 23 nt, Human adenovirus A
uaaauggauacucuuuaacauuc

SEQ ID NO: 1540360 - RNA, 20 nt, Human adenovirus A
cuuguggaauuccgcagugg

SEQ ID NO: 1540361 - RNA, 13 nt, Human adenovirus A
cggaagaaaagcg

SEQ ID NO: 1540362 - RNA, 19 nt, Human adenovirus A
ucaaacaccugcaguaaau

SEQ ID NO: 1540363 - RNA, 17 nt, Human adenovirus A
gcgaacgggcagccugu

SEQ ID NO: 1540364 - RNA, 23 nt, Human adenovirus A
caauauugagguuacucacuuug

SEQ ID NO: 1540365 - RNA, 18 nt, Human adenovirus A
uucuccuuuuuuuuucca

SEQ ID NO: 1540366 - RNA, 14 nt, Human adenovirus A
agauccauguugcu

SEQ ID NO: 1540367 - RNA, 20 nt, Human adenovirus A
cacuuggcuucgaaugcugu

SEQ ID NO: 1540368 - RNA, 19 nt, Human adenovirus A
caucuaaaccuauaacaau

SEQ ID NO: 1540369 - RNA, 15 nt, Human adenovirus A
caaacagccgaaaga

SEQ ID NO: 1540370 - RNA, 18 nt, Human adenovirus A
ugaauuguauaaauucuu

SEQ ID NO: 1540371 - RNA, 14 nt, Human adenovirus A
acucacuggccuga

SEQ ID NO: 1540372 - RNA, 20 nt, Human adenovirus A
cggcacaacagacuggggaa

SEQ ID NO: 1540373 - RNA, 17 nt, Human adenovirus A
accaugaaaacagcauu

SEQ ID NO: 1540374 - RNA, 20 nt, Human adenovirus A
cuuccauuugaucagaaaaa

SEQ ID NO: 1540375 - RNA, 14 nt, Human adenovirus A
guuuagaaacccca

SEQ ID NO: 1540376 - RNA, 14 nt, Human adenovirus A
agacgaacaaacuu

SEQ ID NO: 1540377 - RNA, 12 nt, Human adenovirus A
uagcaaagccau

SEQ ID NO: 1540378 - RNA, 14 nt, Human adenovirus A
uucuaaaagagcca

SEQ ID NO: 1540379 - RNA, 18 nt, Human adenovirus A
ggcaauauuccagcucuu

SEQ ID NO: 1540380 - RNA, 15 nt, Human adenovirus A
gauucuucuucccaa

SEQ ID NO: 1540381 - RNA, 14 nt, Human adenovirus A
ucugcaugaugcau

SEQ ID NO: 1540382 - RNA, 16 nt, Human adenovirus A
ggcauuccccauccaa

SEQ ID NO: 1540383 - RNA, 17 nt, Human adenovirus A
auuucaugguuugcuaa

SEQ ID NO: 1540384 - RNA, 19 nt, Human adenovirus A
augcuuuagguuagccuga

SEQ ID NO: 1540385 - RNA, 19 nt, Human adenovirus A
gcaguuuagaggccacacu

SEQ ID NO: 1540386 - RNA, 12 nt, Human adenovirus A
caacaguacagg

SEQ ID NO: 1540387 - RNA, 18 nt, Human adenovirus A
cauagccaaucaggcugu

SEQ ID NO: 1540388 - RNA, 16 nt, Human adenovirus A
cuaauacuuccauccg

SEQ ID NO: 1540389 - RNA, 19 nt, Human adenovirus A
uaugcgugagggugccacc

SEQ ID NO: 1540390 - RNA, 19 nt, Human adenovirus A
aggaacuaaaccuuccauc

SEQ ID NO: 1540391 - RNA, 18 nt, Human adenovirus A
cucuguaguuucuuuaca

SEQ ID NO: 1540392 - RNA, 16 nt, Human adenovirus A
guucacuuacccgcag

SEQ ID NO: 1540393 - RNA, 15 nt, Human adenovirus A
gcugcauugccacua

SEQ ID NO: 1540394 - RNA, 14 nt, Human adenovirus A
gcauuaaagcaaac

SEQ ID NO: 1540395 - RNA, 17 nt, Human adenovirus A
ucaaugcagcuguggag

SEQ ID NO: 1540396 - RNA, 12 nt, Human adenovirus A
aguguuucagcu

SEQ ID NO: 1540397 - RNA, 12 nt, Human adenovirus A
ccugcagcacug

SEQ ID NO: 1540398 - RNA, 15 nt, Human adenovirus A
ugccaguuguauaaa

SEQ ID NO: 1540399 - RNA, 11 nt, Human adenovirus A
agcaaguaaac

SEQ ID NO: 1540400 - RNA, 13 nt, Human adenovirus A
cggccucagcagc

SEQ ID NO: 1540401 - RNA, 16 nt, Human adenovirus A
ccguaaaauacacaua

SEQ ID NO: 1540402 - RNA, 12 nt, Human adenovirus A
ggauacagagga

SEQ ID NO: 1540403 - RNA, 13 nt, Human adenovirus A
gcuggcuguugcu

SEQ ID NO: 1540404 - RNA, 18 nt, Human adenovirus A
auuccuccuuauccuucc

SEQ ID NO: 1540405 - RNA, 17 nt, Human adenovirus A
aacggcgcgcaguccug

SEQ ID NO: 1540406 - RNA, 17 nt, Human adenovirus A
aagugucuuguuaaugu

SEQ ID NO: 1540407 - RNA, 14 nt, Human adenovirus A
caagaggagaagga

SEQ ID NO: 1540408 - RNA, 18 nt, Human adenovirus A
ugaaguguaucagucugg

SEQ ID NO: 1540409 - RNA, 13 nt, Human adenovirus A
aagagcugcugca

SEQ ID NO: 1540410 - RNA, 16 nt, Human adenovirus A
caaggcguggaacagc

SEQ ID NO: 1540411 - RNA, 13 nt, Human adenovirus A
cgccguccuauga

SEQ ID NO: 1540412 - RNA, 13 nt, Human adenovirus A
uguuaucuucaaa

SEQ ID NO: 1540413 - RNA, 16 nt, Human adenovirus A
ucacacuuaacacaag

SEQ ID NO: 1540414 - RNA, 17 nt, Human adenovirus A
cauccgaggugacauga

SEQ ID NO: 1540415 - RNA, 13 nt, Human adenovirus A
ucgcgacaacagc

SEQ ID NO: 1540416 - RNA, 14 nt, Human adenovirus A
augaagcacgcaga

SEQ ID NO: 1540417 - RNA, 22 nt, Human adenovirus A
cccacgguauuggccauuccug

SEQ ID NO: 1540418 - RNA, 19 nt, Human adenovirus A
aaagaccccauuguaacug

SEQ ID NO: 1540419 - RNA, 20 nt, Human adenovirus A
uucccuaucauuaagaacac

SEQ ID NO: 1540420 - RNA, 15 nt, Human adenovirus A
cugcacuaacucuga

SEQ ID NO: 1540421 - RNA, 17 nt, Human adenovirus A
cuaugaugcgggcagcc

SEQ ID NO: 1540422 - RNA, 23 nt, Human adenovirus A
guaauuggcaaaguacccuaaac

SEQ ID NO: 1540423 - RNA, 13 nt, Human adenovirus A
caugcaaagccag

SEQ ID NO: 1540424 - RNA, 17 nt, Human adenovirus A
guuuaugcgcuguacca

SEQ ID NO: 1540425 - RNA, 17 nt, Human adenovirus A
ugaggagcugagaagug

SEQ ID NO: 1540426 - RNA, 16 nt, Human adenovirus A
ugcugaagaaacagaa

SEQ ID NO: 1540427 - RNA, 19 nt, Human adenovirus A
uacacacuacgcccacuuc

SEQ ID NO: 1540428 - RNA, 14 nt, Human adenovirus A
cggaaaucugaaaa

SEQ ID NO: 1540429 - RNA, 19 nt, Human adenovirus A
uaaaauuucuaauguggag

SEQ ID NO: 1540430 - RNA, 21 nt, Human adenovirus A
auccaaguucuaaugcaaguu

SEQ ID NO: 1540431 - RNA, 22 nt, Human adenovirus A
gauggauuaccuucaccgcgcu

SEQ ID NO: 1540432 - RNA, 15 nt, Human adenovirus A
gggacagcaagcagc

SEQ ID NO: 1540433 - RNA, 16 nt, Human adenovirus A
gaaaaagcuacaucuu

SEQ ID NO: 1540434 - RNA, 14 nt, Human adenovirus A
agcuuagccuuaau

SEQ ID NO: 1540435 - RNA, 19 nt, Human adenovirus A
ccaucagaaauuuguugcu

SEQ ID NO: 1540436 - RNA, 19 nt, Human adenovirus A
acaugauucuucagagcac

SEQ ID NO: 1540437 - RNA, 14 nt, Human adenovirus A
auggaaaaaacgaa

SEQ ID NO: 1540438 - RNA, 20 nt, Human adenovirus A
aguaaagauauucccacgcc

SEQ ID NO: 1540439 - RNA, 18 nt, Human adenovirus A
cugagaaccgucugcaug

SEQ ID NO: 1540440 - RNA, 13 nt, Human adenovirus A
cauaacauguuua

SEQ ID NO: 1540441 - RNA, 21 nt, Human adenovirus A
acgucaccaccucaaaaucua

SEQ ID NO: 1540442 - RNA, 22 nt, Human adenovirus A
aucccgcgguuuuggcggccau

SEQ ID NO: 1540443 - RNA, 19 nt, Human adenovirus A
cacgccaaagccacaccuc

SEQ ID NO: 1540444 - RNA, 13 nt, Human adenovirus A
gggugauaugcau

SEQ ID NO: 1540445 - RNA, 15 nt, Human adenovirus A
cugcaauuucuuuca

SEQ ID NO: 1540446 - RNA, 16 nt, Human adenovirus A
uaagcgauuuuccaaa

SEQ ID NO: 1540447 - RNA, 19 nt, Human adenovirus A
uaguaggcuaacuguuaau

SEQ ID NO: 1540448 - RNA, 18 nt, Human adenovirus A
cucauguauuuuuucaaa

SEQ ID NO: 1540449 - RNA, 13 nt, Human adenovirus A
caaugugcaggcu

SEQ ID NO: 1540450 - RNA, 15 nt, Human adenovirus A
gcgguggaacugcag

SEQ ID NO: 1540451 - RNA, 15 nt, Human adenovirus A
gacaaggaagugaag

SEQ ID NO: 1540452 - RNA, 17 nt, Human adenovirus A
ccuguaguugcagcaga

SEQ ID NO: 1540453 - RNA, 21 nt, Human adenovirus A
aacacgggcuggggacugggu

SEQ ID NO: 1540454 - RNA, 13 nt, Human adenovirus A
cccaagggugcag

SEQ ID NO: 1540455 - RNA, 13 nt, Human adenovirus A
agcaaaaugaauu

SEQ ID NO: 1540456 - RNA, 19 nt, Human adenovirus A
caaccuauuaaccugggau

SEQ ID NO: 1540457 - RNA, 19 nt, Human adenovirus A
gccucgcaccagaaagcag

SEQ ID NO: 1540458 - RNA, 18 nt, Human adenovirus A
gacaaagagcuuaugcau

SEQ ID NO: 1540459 - RNA, 18 nt, Human adenovirus A
cuacuaacaacuccagau

SEQ ID NO: 1540460 - RNA, 15 nt, Human adenovirus A
cauuaucaugaaacu

SEQ ID NO: 1540461 - RNA, 13 nt, Human adenovirus A
ugccgacaacacu

SEQ ID NO: 1540462 - RNA, 20 nt, Human adenovirus A
cgcguggcauuugugccucg

SEQ ID NO: 1540463 - RNA, 13 nt, Human adenovirus A
aacauaaaacuac

SEQ ID NO: 1540464 - RNA, 15 nt, Human adenovirus A
agagagcuaagcgac

SEQ ID NO: 1540465 - RNA, 22 nt, Human adenovirus A
uccauaaggcggcguccuuucu

SEQ ID NO: 1540466 - RNA, 13 nt, Human adenovirus A
agaggaaaagcug

SEQ ID NO: 1540467 - RNA, 18 nt, Human adenovirus A
uugcauauauccuugcaa

SEQ ID NO: 1540468 - RNA, 16 nt, Human adenovirus A
cuucacuacacuuucc

SEQ ID NO: 1540469 - RNA, 10 nt, Human adenovirus A
aaagaaacuc

SEQ ID NO: 1540470 - RNA, 14 nt, Human adenovirus A
gagcagcaaaugcc

SEQ ID NO: 1540471 - RNA, 23 nt, Human adenovirus A
ggcgguucggguccugcgggaag

SEQ ID NO: 1540472 - RNA, 21 nt, Human adenovirus A
cccugcuccgacaacagcugc

SEQ ID NO: 1540473 - RNA, 14 nt, Human adenovirus A
uaagauuguaauuu

SEQ ID NO: 1540474 - RNA, 15 nt, Human adenovirus A
gguggggugcugccc

SEQ ID NO: 1540475 - RNA, 19 nt, Human adenovirus A
ugcaagaggagaaggagga

SEQ ID NO: 1540476 - RNA, 17 nt, Human adenovirus A
caucuauaguaaaaaug

SEQ ID NO: 1540477 - RNA, 17 nt, Human adenovirus A
ugggaguucaaacagug

SEQ ID NO: 1540478 - RNA, 15 nt, Human adenovirus A
cugacgucacuggcg

SEQ ID NO: 1540479 - RNA, 16 nt, Human adenovirus A
ggaggcagcuggagug

SEQ ID NO: 1540480 - RNA, 18 nt, Human adenovirus A
uucgcaggagaaaauaac

SEQ ID NO: 1540481 - RNA, 14 nt, Human adenovirus A
cuaacucugauuac

SEQ ID NO: 1540482 - RNA, 15 nt, Human adenovirus A
uacugcucccucucg

SEQ ID NO: 1540483 - RNA, 20 nt, Human adenovirus A
acaucgccggucaggaugcc

SEQ ID NO: 1540484 - RNA, 15 nt, Human adenovirus A
gugugcugcaaacau

SEQ ID NO: 1540485 - RNA, 15 nt, Human adenovirus A
cuuaguuguaaauuc

SEQ ID NO: 1540486 - RNA, 18 nt, Human adenovirus A
cagaauauaagaacuaca

SEQ ID NO: 1540487 - RNA, 17 nt, Human adenovirus A
aaccaugacuauugacu

SEQ ID NO: 1540488 - RNA, 11 nt, Human adenovirus A
ccacagcucug

SEQ ID NO: 1540489 - RNA, 14 nt, Human adenovirus A
ccgcugcucagcuc

SEQ ID NO: 1540490 - RNA, 18 nt, Human adenovirus A
gcaaaccacugcaaugca

SEQ ID NO: 1540491 - RNA, 17 nt, Human adenovirus A
uuagaaggaaaggcaug

SEQ ID NO: 1540492 - RNA, 20 nt, Human adenovirus A
ugacuggacagcggccaugg

SEQ ID NO: 1540493 - RNA, 18 nt, Human adenovirus A
aaccagcugggcagaaag

SEQ ID NO: 1540494 - RNA, 16 nt, Human adenovirus A
gacuggcugcuuugcg

SEQ ID NO: 1540495 - RNA, 18 nt, Human adenovirus A
cacccuuaauugcagggg

SEQ ID NO: 1540496 - RNA, 19 nt, Human adenovirus A
cauuuuggagcaagcggca

SEQ ID NO: 1540497 - RNA, 14 nt, Human adenovirus A
ccagucgccgcaga

SEQ ID NO: 1540498 - RNA, 13 nt, Human adenovirus A
aacuuuuaacauu

SEQ ID NO: 1540499 - RNA, 19 nt, Human adenovirus A
ccagcugaacgggggcgcc

SEQ ID NO: 1540500 - RNA, 23 nt, Human adenovirus A
auccugucgagcuaaccgcagcc

SEQ ID NO: 1540501 - RNA, 16 nt, Human adenovirus A
ccaccguggcucccac

SEQ ID NO: 1540502 - RNA, 12 nt, Human adenovirus A
uuaugaaucuuu

SEQ ID NO: 1540503 - RNA, 14 nt, Human adenovirus A
agcacacugggaaa

SEQ ID NO: 1540504 - RNA, 24 nt, Human adenovirus A
aaacaaggucuagccaacauccag

SEQ ID NO: 1540505 - RNA, 18 nt, Human adenovirus A
uaacuuuauauugcauuu

SEQ ID NO: 1540506 - RNA, 18 nt, Human adenovirus A
aaauuuguugcuguugcc

SEQ ID NO: 1540507 - RNA, 15 nt, Human adenovirus A
uguggcccaaugcaa

SEQ ID NO: 1540508 - RNA, 23 nt, Human adenovirus A
uagguguaagucacguguucaca

SEQ ID NO: 1540509 - RNA, 17 nt, Human adenovirus A
ccugaguugggauuaca

SEQ ID NO: 1540510 - RNA, 17 nt, Human adenovirus A
accacguacgaccacug

SEQ ID NO: 1540511 - RNA, 20 nt, Human adenovirus A
uuccagcgccaccugccauu

SEQ ID NO: 1540512 - RNA, 22 nt, Human adenovirus A
agcuucuaaaagagccacagcu

SEQ ID NO: 1540513 - RNA, 21 nt, Human adenovirus A
gaacggucgauuucggcggcg

SEQ ID NO: 1540514 - RNA, 21 nt, Human adenovirus A
gcuacgagacuccccccgagg

SEQ ID NO: 1540515 - RNA, 13 nt, Human adenovirus A
cgagacugcauuu

SEQ ID NO: 1540516 - RNA, 22 nt, Human adenovirus A
gagacgggccgcagcugcggcc

SEQ ID NO: 1540517 - RNA, 23 nt, Human adenovirus A
gcuguggaaagcauuuuggauuu

SEQ ID NO: 1540518 - RNA, 22 nt, Human adenovirus A
uggcaggaguugcaggaugaau

SEQ ID NO: 1540519 - RNA, 13 nt, Human adenovirus A
caaagcacugggc

SEQ ID NO: 1540520 - RNA, 21 nt, Human adenovirus A
cggaguucccacagaacauac

SEQ ID NO: 1540521 - RNA, 15 nt, Human adenovirus A
ggguccugcgggaag

SEQ ID NO: 1540522 - RNA, 12 nt, Human adenovirus A
uccccuguggag

SEQ ID NO: 1540523 - RNA, 17 nt, Human adenovirus A
ccacugcaaugcagccg

SEQ ID NO: 1540524 - RNA, 21 nt, Human adenovirus A
cucccgauaccaaaaacaccu

SEQ ID NO: 1540525 - RNA, 17 nt, Human adenovirus A
caaaugcgaccucagcc

SEQ ID NO: 1540526 - RNA, 21 nt, Human adenovirus A
uccaggggaaacccauuugca

SEQ ID NO: 1540527 - RNA, 21 nt, Human adenovirus A
guacgcauucaccagccacac

SEQ ID NO: 1540528 - RNA, 16 nt, Human adenovirus A
ggacaaguugcuuucc

SEQ ID NO: 1540529 - RNA, 21 nt, Human adenovirus A
cuaaacgaccgccuuuucuag

SEQ ID NO: 1540530 - RNA, 21 nt, Human adenovirus A
gggccggaguacgucagaaug

SEQ ID NO: 1540531 - RNA, 16 nt, Human adenovirus A
uaaaaaucacaaaaua

SEQ ID NO: 1540532 - RNA, 14 nt, Human adenovirus A
aauuccgcagugga

SEQ ID NO: 1540533 - RNA, 13 nt, Human adenovirus A
gcaaagaugaggc

SEQ ID NO: 1540534 - RNA, 13 nt, Human adenovirus A
cagauucuggaga

SEQ ID NO: 1540535 - RNA, 13 nt, Human adenovirus A
auaaaaacacaca

SEQ ID NO: 1540536 - RNA, 17 nt, Human adenovirus A
uuugagccagaugaaca

SEQ ID NO: 1540537 - RNA, 16 nt, Human adenovirus A
guuuuaugcucguaaa

SEQ ID NO: 1540538 - RNA, 22 nt, Human adenovirus A
ugugagggccgaugcauacaug

SEQ ID NO: 1540539 - RNA, 14 nt, Human adenovirus A
aaagaaacagcagc

SEQ ID NO: 1540540 - RNA, 19 nt, Human adenovirus A
gcaaaugcccugcaaaaag

SEQ ID NO: 1540541 - RNA, 14 nt, Human adenovirus A
aagcagcgccaaau

SEQ ID NO: 1540542 - RNA, 17 nt, Human adenovirus A
aacuauggaaauccaaa

SEQ ID NO: 1540543 - RNA, 16 nt, Human adenovirus A
gucgcuuucaaccaag

SEQ ID NO: 1540544 - RNA, 16 nt, Human adenovirus A
ccuuuaccaacaccaa

SEQ ID NO: 1540545 - RNA, 21 nt, Human adenovirus A
auuuguuccuuuucacauuca

SEQ ID NO: 1540546 - RNA, 13 nt, Human adenovirus A
acaacauugaacu

SEQ ID NO: 1540547 - RNA, 15 nt, Human adenovirus A
ccaguacacuuggga

SEQ ID NO: 1540548 - RNA, 15 nt, Human adenovirus A
uacaaaucuuucaau

SEQ ID NO: 1540549 - RNA, 22 nt, Human adenovirus A
uaaggcggcguccuuucucugu

SEQ ID NO: 1540550 - RNA, 13 nt, Human adenovirus A
accccaaggcaug

SEQ ID NO: 1540551 - RNA, 18 nt, Human adenovirus A
gauuuaggagggucagga

SEQ ID NO: 1540552 - RNA, 14 nt, Human adenovirus A
cucaguagccuugc

SEQ ID NO: 1540553 - RNA, 11 nt, Human adenovirus A
uuuuccaaaug

SEQ ID NO: 1540554 - RNA, 18 nt, Human adenovirus A
auugcaacgcaaucagaa

SEQ ID NO: 1540555 - RNA, 15 nt, Human adenovirus A
auuguuggccuguau

SEQ ID NO: 1540556 - RNA, 19 nt, Human adenovirus A
gcaaugcagccgugcuaug

SEQ ID NO: 1540557 - RNA, 21 nt, Human adenovirus A
gcgcccauaacaucaggagca

SEQ ID NO: 1540558 - RNA, 13 nt, Human adenovirus A
uguaauaaagcua

SEQ ID NO: 1540559 - RNA, 18 nt, Human adenovirus A
auuacuaccgucaucucu

SEQ ID NO: 1540560 - RNA, 23 nt, Human adenovirus A
ucauacauaauuuuaaaguaaau

SEQ ID NO: 1540561 - RNA, 16 nt, Human adenovirus A
uuaaccacuguagugc

SEQ ID NO: 1540562 - RNA, 20 nt, Human adenovirus A
acuuagaccggauggguaca

SEQ ID NO: 1540563 - RNA, 16 nt, Human adenovirus A
cuuuuacucacuggcc

SEQ ID NO: 1540564 - RNA, 23 nt, Human adenovirus A
aaaucucgucggcggacagagca

SEQ ID NO: 1540565 - RNA, 18 nt, Human adenovirus A
aaccacauaggcauuggg

SEQ ID NO: 1540566 - RNA, 23 nt, Human adenovirus A
agugcccucacacuuaacacaag

SEQ ID NO: 1540567 - RNA, 19 nt, Human adenovirus A
acaccuuggucucgcagcu

SEQ ID NO: 1540568 - RNA, 16 nt, Human adenovirus A
ccuucuacgcuuccaa

SEQ ID NO: 1540569 - RNA, 22 nt, Human adenovirus A
gcgucacccaagggugcagcuc

SEQ ID NO: 1540570 - RNA, 16 nt, Human adenovirus A
uaauuaucccuuugau

SEQ ID NO: 1540571 - RNA, 12 nt, Human adenovirus A
ccuccuucccau

SEQ ID NO: 1540572 - RNA, 21 nt, Human adenovirus A
uggcauagaaaguuugguaga

SEQ ID NO: 1540573 - RNA, 14 nt, Human adenovirus A
aaaauaaucaauuu

SEQ ID NO: 1540574 - RNA, 21 nt, Human adenovirus A
accaagcccucuccaaugaaa

SEQ ID NO: 1540575 - RNA, 20 nt, Human adenovirus A
ccaccgccaugcgcgcggcc

SEQ ID NO: 1540576 - RNA, 18 nt, Human adenovirus A
uauuucacaagacacauu

SEQ ID NO: 1540577 - RNA, 23 nt, Human adenovirus A
uaauaucauuaaauaauauuuug

SEQ ID NO: 1540578 - RNA, 20 nt, Human adenovirus A
gcgcuuuggaggcagcugga

SEQ ID NO: 1540579 - RNA, 21 nt, Human adenovirus A
gaaaguucaccuccagguaca

SEQ ID NO: 1540580 - RNA, 12 nt, Human adenovirus A
cuagauggggug

SEQ ID NO: 1540581 - RNA, 21 nt, Human adenovirus A
cugcgacauuuagaccacugu

SEQ ID NO: 1540582 - RNA, 17 nt, Human adenovirus A
accacuguagugcaaaa

SEQ ID NO: 1540583 - RNA, 17 nt, Human adenovirus A
uaacauucugcagagca

SEQ ID NO: 1540584 - RNA, 20 nt, Human adenovirus A
cacaauuuucuggugguggg

SEQ ID NO: 1540585 - RNA, 11 nt, Human adenovirus A
agcaaagccau

SEQ ID NO: 1540586 - RNA, 23 nt, Human adenovirus A
uaccaccaaauuuaaggccaggg

SEQ ID NO: 1540587 - RNA, 17 nt, Human adenovirus A
caugugcgcacacuaau

SEQ ID NO: 1540588 - RNA, 16 nt, Human adenovirus A
cacccucccagacugc

SEQ ID NO: 1540589 - RNA, 21 nt, Human adenovirus A
cagcaaacuuucuccaaaucu

SEQ ID NO: 1540590 - RNA, 18 nt, Human adenovirus A
gacaacagcugcugucac

SEQ ID NO: 1540591 - RNA, 14 nt, Human adenovirus A
aggcauuaaauggu

SEQ ID NO: 1540592 - RNA, 19 nt, Human adenovirus A
uaugcaaggcgccgcagac

SEQ ID NO: 1540593 - RNA, 16 nt, Human adenovirus A
auuucucuuuucuuua

SEQ ID NO: 1540594 - RNA, 17 nt, Human adenovirus A
ggcaucuugcaugaaaa

SEQ ID NO: 1540595 - RNA, 15 nt, Human adenovirus A
uaccgucaucucuac

SEQ ID NO: 1540596 - RNA, 18 nt, Human adenovirus A
cucguaaaaucuacaaaa

SEQ ID NO: 1540597 - RNA, 14 nt, Human adenovirus A
ucgacgggccaggc

SEQ ID NO: 1540598 - RNA, 21 nt, Human adenovirus A
cugacuauuucacaagacaca

SEQ ID NO: 1540599 - RNA, 17 nt, Human adenovirus A
ggaauuuacuccaucug

SEQ ID NO: 1540600 - RNA, 23 nt, Human adenovirus A
aaacaggcuauugcgcagcaacg

SEQ ID NO: 1540601 - RNA, 15 nt, Human adenovirus A
ccgcccaggcaggcg

SEQ ID NO: 1540602 - RNA, 19 nt, Human adenovirus A
ugaggacacugaaggcauu

SEQ ID NO: 1540603 - RNA, 12 nt, Human adenovirus A
gauuuuuguccc

SEQ ID NO: 1540604 - RNA, 21 nt, Human adenovirus A
auaaugcagcuucagaaaaug

SEQ ID NO: 1540605 - RNA, 11 nt, Human adenovirus A
caagauuuaau

SEQ ID NO: 1540606 - RNA, 19 nt, Human adenovirus A
auuaccagcagccaaaacu

SEQ ID NO: 1540607 - RNA, 15 nt, Human adenovirus A
gugauaugcauuuac

SEQ ID NO: 1540608 - RNA, 12 nt, Human adenovirus A
ggagggucagga

SEQ ID NO: 1540609 - RNA, 20 nt, Human adenovirus A
accguucuuugguuugcaau

SEQ ID NO: 1540610 - RNA, 20 nt, Human adenovirus A
cauuguuggccuguauguga

SEQ ID NO: 1540611 - RNA, 21 nt, Human adenovirus A
agaaucaaucucagugucauu

SEQ ID NO: 1540612 - RNA, 20 nt, Human adenovirus A
ucaagccuaccugacacuac

SEQ ID NO: 1540613 - RNA, 18 nt, Human adenovirus A
ugaccaccuuacccuguc

SEQ ID NO: 1540614 - RNA, 20 nt, Human adenovirus A
agccaugcuaugcaggcagc

SEQ ID NO: 1540615 - RNA, 12 nt, Human adenovirus A
ugacuggcaugg

SEQ ID NO: 1540616 - RNA, 16 nt, Human adenovirus A
cggggcuacugcucau

SEQ ID NO: 1540617 - RNA, 21 nt, Human adenovirus A
agcguuucagcgccaacaaaa

SEQ ID NO: 1540618 - RNA, 13 nt, Human adenovirus A
cugcauuggguga

SEQ ID NO: 1540619 - RNA, 22 nt, Human adenovirus A
uguaacuguggaacucgagugc

SEQ ID NO: 1540620 - RNA, 15 nt, Human adenovirus A
ccgcgccccacuucc

SEQ ID NO: 1540621 - RNA, 19 nt, Human adenovirus A
caauaguggcugcaagguc

SEQ ID NO: 1540622 - RNA, 14 nt, Human adenovirus A
cugggaguaaaguc

SEQ ID NO: 1540623 - RNA, 22 nt, Human adenovirus A
agucgugguggaagcuggccau

SEQ ID NO: 1540624 - RNA, 12 nt, Human adenovirus A
aaagagccacag

SEQ ID NO: 1540625 - RNA, 18 nt, Human adenovirus A
auucauauuguggagaac

SEQ ID NO: 1540626 - RNA, 17 nt, Human adenovirus A
ucaacauaguagagaca

SEQ ID NO: 1540627 - RNA, 17 nt, Human adenovirus A
cuugggaaauuugucau

SEQ ID NO: 1540628 - RNA, 23 nt, Human adenovirus A
gggcuguaucuguugaaugaggu

SEQ ID NO: 1540629 - RNA, 17 nt, Human adenovirus A
auuuucuccccacagcu

SEQ ID NO: 1540630 - RNA, 17 nt, Human adenovirus A
auacuaacaaugcuuuc

SEQ ID NO: 1540631 - RNA, 19 nt, Human adenovirus A
caaaaauguuuucuggauc

SEQ ID NO: 1540632 - RNA, 13 nt, Human adenovirus A
aggaagcugagga

SEQ ID NO: 1540633 - RNA, 11 nt, Human adenovirus A
guacacuggcu

SEQ ID NO: 1540634 - RNA, 16 nt, Human adenovirus A
uuggcuuucgaggggu

SEQ ID NO: 1540635 - RNA, 16 nt, Human adenovirus A
caacuuaacccucccu

SEQ ID NO: 1540636 - RNA, 20 nt, Human adenovirus A
ucucaccacugaaacucccu

SEQ ID NO: 1540637 - RNA, 13 nt, Human adenovirus A
aaaagaucaagga

SEQ ID NO: 1540638 - RNA, 20 nt, Human adenovirus A
acauucgcagcgcacuggca

SEQ ID NO: 1540639 - RNA, 17 nt, Human adenovirus A
agucccggucuggugca

SEQ ID NO: 1540640 - RNA, 21 nt, Human adenovirus A
ugucggccugacgcucuggca

SEQ ID NO: 1540641 - RNA, 15 nt, Human adenovirus A
aucaucaaacugccu

SEQ ID NO: 1540642 - RNA, 20 nt, Human adenovirus A
aaugucucgcuggaaaacau

SEQ ID NO: 1540643 - RNA, 16 nt, Human adenovirus A
cauucuuuucauuuuc

SEQ ID NO: 1540644 - RNA, 16 nt, Human adenovirus A
acacuaauacuuccau

SEQ ID NO: 1540645 - RNA, 20 nt, Human adenovirus A
ccgccaugcgcgcggccaga

SEQ ID NO: 1540646 - RNA, 21 nt, Human adenovirus A
ccagcugcccugauauaucag

SEQ ID NO: 1540647 - RNA, 13 nt, Human adenovirus A
caacguagcuuuu

SEQ ID NO: 1540648 - RNA, 15 nt, Human adenovirus A
auauauccuugcaaa

SEQ ID NO: 1540649 - RNA, 15 nt, Human adenovirus A
cgcucauuugcgccc

SEQ ID NO: 1540650 - RNA, 23 nt, Human adenovirus A
uuacaacuugcuuccagacaaaa

SEQ ID NO: 1540651 - RNA, 13 nt, Human adenovirus A
cuaggggcuggcu

SEQ ID NO: 1540652 - RNA, 23 nt, Human adenovirus A
guugaccgaccuucauuuuuucu

SEQ ID NO: 1540653 - RNA, 22 nt, Human adenovirus A
gaggcguagaugugcuguggaa

SEQ ID NO: 1540654 - RNA, 17 nt, Human adenovirus A
guagaggaaaagcugcc

SEQ ID NO: 1540655 - RNA, 20 nt, Human adenovirus A
gcaguaggugaaauaaaaaa

SEQ ID NO: 1540656 - RNA, 11 nt, Human adenovirus A
uaaagaaacuc

SEQ ID NO: 1540657 - RNA, 19 nt, Human adenovirus A
guccuccucguacaggaau

SEQ ID NO: 1540658 - RNA, 18 nt, Human adenovirus A
agcugaaaacaacugcac

SEQ ID NO: 1540659 - RNA, 19 nt, Human adenovirus A
auguuaaauuaaagaugcc

SEQ ID NO: 1540660 - RNA, 16 nt, Human adenovirus A
gauuuaucuguggaau

SEQ ID NO: 1540661 - RNA, 23 nt, Human adenovirus A
cauaauuaaacccuuuagcaguu

SEQ ID NO: 1540662 - RNA, 15 nt, Human adenovirus A
uuuuaacugugaaaa

SEQ ID NO: 1540663 - RNA, 20 nt, Human adenovirus A
ugauucaagaggaagaaaga

SEQ ID NO: 1540664 - RNA, 11 nt, Human adenovirus A
ccuguggagcc

SEQ ID NO: 1540665 - RNA, 15 nt, Human adenovirus A
aguaggcuaacuguu

SEQ ID NO: 1540666 - RNA, 23 nt, Human adenovirus A
caggaugaauuucagcgggguga

SEQ ID NO: 1540667 - RNA, 15 nt, Human adenovirus A
acccucccucuuggc

SEQ ID NO: 1540668 - RNA, 20 nt, Human adenovirus A
auggaccuacuuacuggggu

SEQ ID NO: 1540669 - RNA, 16 nt, Human adenovirus A
auuggaguacaagcuu

SEQ ID NO: 1540670 - RNA, 22 nt, Human adenovirus A
aacaacugcacuugaauauuuc

SEQ ID NO: 1540671 - RNA, 13 nt, Human adenovirus A
caaggaaaugagg

SEQ ID NO: 1540672 - RNA, 18 nt, Human adenovirus A
ugcucuuggugguucugc

SEQ ID NO: 1540673 - RNA, 22 nt, Human adenovirus A
cuaaauguaacugaggagcuga

SEQ ID NO: 1540674 - RNA, 17 nt, Human adenovirus A
cuuaguuguaaauucua

SEQ ID NO: 1540675 - RNA, 22 nt, Human adenovirus A
uacagaggaacguaacuuucaa

SEQ ID NO: 1540676 - RNA, 12 nt, Human adenovirus A
gacgcaaaaaag

SEQ ID NO: 1540677 - RNA, 13 nt, Human adenovirus A
cgauuccaaggaa

SEQ ID NO: 1540678 - RNA, 13 nt, Human adenovirus A
cuuauuuuccuuc

SEQ ID NO: 1540679 - RNA, 17 nt, Human adenovirus A
uaauagcacuuuggaug

SEQ ID NO: 1540680 - RNA, 12 nt, Human adenovirus A
cugagcggcaag

SEQ ID NO: 1540681 - RNA, 20 nt, Human adenovirus A
agauauaguacugcuuccag

SEQ ID NO: 1540682 - RNA, 20 nt, Human adenovirus A
uaugaacacuuagagggagg

SEQ ID NO: 1540683 - RNA, 12 nt, Human adenovirus A
cuuaauuucuag

SEQ ID NO: 1540684 - RNA, 15 nt, Human adenovirus A
cuugagccuggauaa

SEQ ID NO: 1540685 - RNA, 21 nt, Human adenovirus A
acaugaagauuucugcuguca

SEQ ID NO: 1540686 - RNA, 12 nt, Human adenovirus A
auuucuuccucc

SEQ ID NO: 1540687 - RNA, 19 nt, Human adenovirus A
aggccaaacagcuguggaa

SEQ ID NO: 1540688 - RNA, 18 nt, Human adenovirus A
gacaccgcccaggcaggc

SEQ ID NO: 1540689 - RNA, 17 nt, Human adenovirus A
ugggaggcguagaugug

SEQ ID NO: 1540690 - RNA, 17 nt, Human adenovirus A
gcggccgcaacagcuau

SEQ ID NO: 1540691 - RNA, 23 nt, Human adenovirus A
caaacguuuuccggguuuugugu

SEQ ID NO: 1540692 - RNA, 13 nt, Human adenovirus A
caaggaaauacua

SEQ ID NO: 1540693 - RNA, 19 nt, Human adenovirus A
ugguuacugaagugccuca

SEQ ID NO: 1540694 - RNA, 17 nt, Human adenovirus A
caaacguccaggcaggg

SEQ ID NO: 1540695 - RNA, 20 nt, Human adenovirus A
uagaccaaaugccagugagg

SEQ ID NO: 1540696 - RNA, 22 nt, Human adenovirus A
cguaccuuuuguuagaugcagc

SEQ ID NO: 1540697 - RNA, 20 nt, Human adenovirus A
gagggcauggcugaagagga

SEQ ID NO: 1540698 - RNA, 14 nt, Human adenovirus A
acaucuuaaugcca

SEQ ID NO: 1540699 - RNA, 15 nt, Human adenovirus A
ugaacccggccaagg

SEQ ID NO: 1540700 - RNA, 18 nt, Human adenovirus A
cgcgugccaggcauuucc

SEQ ID NO: 1540701 - RNA, 17 nt, Human adenovirus A
gaggcguagaugugcug

SEQ ID NO: 1540702 - RNA, 18 nt, Human adenovirus A
gcccauguaucagcagcc

SEQ ID NO: 1540703 - RNA, 22 nt, Human adenovirus A
cacccugugcuuaacaaaaaac

SEQ ID NO: 1540704 - RNA, 19 nt, Human adenovirus A
auuugaaauuuuuaagugg

SEQ ID NO: 1540705 - RNA, 15 nt, Human adenovirus A
augugauaacccuga

SEQ ID NO: 1540706 - RNA, 19 nt, Human adenovirus A
cugcuaaacucacauugug

SEQ ID NO: 1540707 - RNA, 13 nt, Human adenovirus A
auucauauugugg

SEQ ID NO: 1540708 - RNA, 14 nt, Human adenovirus A
gccauuuuggaagc

SEQ ID NO: 1540709 - RNA, 13 nt, Human adenovirus A
ccaauccaaaccc

SEQ ID NO: 1540710 - RNA, 20 nt, Human adenovirus A
ucaauaccacuuggcagcug

SEQ ID NO: 1540711 - RNA, 15 nt, Human adenovirus A
aaccacgaaaacggu

SEQ ID NO: 1540712 - RNA, 16 nt, Human adenovirus A
ucacuacagacaaaca

SEQ ID NO: 1540713 - RNA, 18 nt, Human adenovirus A
ccaccgaucgcucgcagc

SEQ ID NO: 1540714 - RNA, 19 nt, Human adenovirus A
ugggacaaguugcuuucca

SEQ ID NO: 1540715 - RNA, 19 nt, Human adenovirus A
gcauuggaaagcagcuugg

SEQ ID NO: 1540716 - RNA, 21 nt, Human adenovirus A
ccacagcuggcgcacaaguug

SEQ ID NO: 1540717 - RNA, 23 nt, Human adenovirus A
cgcaugcguaucucacuuaaguc

SEQ ID NO: 1540718 - RNA, 21 nt, Human adenovirus A
acugccggucgcgaaacuggg

SEQ ID NO: 1540719 - RNA, 20 nt, Human adenovirus A
ucagcucggaggguccggac

SEQ ID NO: 1540720 - RNA, 22 nt, Human adenovirus A
ggugagcuccgauggguuggga

SEQ ID NO: 1540721 - RNA, 16 nt, Human adenovirus A
caaacaguggacauuc

SEQ ID NO: 1540722 - RNA, 16 nt, Human adenovirus A
gccagaagcacuggca

SEQ ID NO: 1540723 - RNA, 13 nt, Human adenovirus A
aguucuguuucau

SEQ ID NO: 1540724 - RNA, 23 nt, Human adenovirus A
agguaaugguagaggaaaagcug

SEQ ID NO: 1540725 - RNA, 18 nt, Human adenovirus A
caccgcccaggcaggcgc

SEQ ID NO: 1540726 - RNA, 13 nt, Human adenovirus A
agcuaauaccugu

SEQ ID NO: 1540727 - RNA, 16 nt, Human adenovirus A
cuaaauaucgcagcug

SEQ ID NO: 1540728 - RNA, 14 nt, Human adenovirus A
cucuccaauuugug

SEQ ID NO: 1540729 - RNA, 16 nt, Human adenovirus A
uggcaggaguugcagg

SEQ ID NO: 1540730 - RNA, 18 nt, Human adenovirus A
caaguuguggauaccaca

SEQ ID NO: 1540731 - RNA, 12 nt, Human adenovirus A
cuuaaucuguuu

SEQ ID NO: 1540732 - RNA, 17 nt, Human adenovirus A
aaggcugcuaggauuga

SEQ ID NO: 1540733 - RNA, 19 nt, Human adenovirus A
gcauggaaaaacuuggaaa

SEQ ID NO: 1540734 - RNA, 16 nt, Human adenovirus A
gccagcaagugccucc

SEQ ID NO: 1540735 - RNA, 20 nt, Human adenovirus A
aaacagcaaacuuucuccaa

SEQ ID NO: 1540736 - RNA, 19 nt, Human adenovirus A
ggaacagacaccgcccagg

SEQ ID NO: 1540737 - RNA, 23 nt, Human adenovirus A
acacgcuuuuacucacuggccug

SEQ ID NO: 1540738 - RNA, 13 nt, Human adenovirus A
ccaaaaacaccuu

SEQ ID NO: 1540739 - RNA, 17 nt, Human adenovirus A
agcgaucccauagcuca

SEQ ID NO: 1540740 - RNA, 18 nt, Human adenovirus A
gaagagcucgacaaggaa

SEQ ID NO: 1540741 - RNA, 23 nt, Human adenovirus A
ugaagcaaaccacauaggcauug

SEQ ID NO: 1540742 - RNA, 15 nt, Human adenovirus A
ggagaaccuuucaag

SEQ ID NO: 1540743 - RNA, 19 nt, Human adenovirus A
ugagcaaaucucagaaagc

SEQ ID NO: 1540744 - RNA, 19 nt, Human adenovirus A
caccugcaguaaauucagu

SEQ ID NO: 1540745 - RNA, 19 nt, Human adenovirus A
agcugaacgggggcgccuu

SEQ ID NO: 1540746 - RNA, 20 nt, Human adenovirus A
uuuccaccaaaugcucuuug

SEQ ID NO: 1540747 - RNA, 19 nt, Human adenovirus A
cggcacaacagacugggga

SEQ ID NO: 1540748 - RNA, 18 nt, Human adenovirus A
cucaacgugucaguuucu

SEQ ID NO: 1540749 - RNA, 13 nt, Human adenovirus A
caccaccucccuc

SEQ ID NO: 1540750 - RNA, 21 nt, Human adenovirus A
gcaaguaggaccaagugaaug

SEQ ID NO: 1540751 - RNA, 21 nt, Human adenovirus A
acaggaauucugaccacucug

SEQ ID NO: 1540752 - RNA, 13 nt, Human adenovirus A
caggaguugcagg

SEQ ID NO: 1540753 - RNA, 12 nt, Human adenovirus A
ccuuugacaaac

SEQ ID NO: 1540754 - RNA, 15 nt, Human adenovirus A
ccguuccuguugcau

SEQ ID NO: 1540755 - RNA, 21 nt, Human adenovirus A
gccacgcuuugaccggucagg

SEQ ID NO: 1540756 - RNA, 17 nt, Human adenovirus A
ccgcugcucagcuccac

SEQ ID NO: 1540757 - RNA, 19 nt, Human adenovirus A
uacaacugcuccccucaac

SEQ ID NO: 1540758 - RNA, 16 nt, Human adenovirus A
auaaaacugauuuacc

SEQ ID NO: 1540759 - RNA, 21 nt, Human adenovirus A
cacuacccguuccgcaagcac

SEQ ID NO: 1540760 - RNA, 16 nt, Human adenovirus A
aauaucucauuugcaa

SEQ ID NO: 1540761 - RNA, 16 nt, Human adenovirus A
caacaguacaggcaac

SEQ ID NO: 1540762 - RNA, 23 nt, Human adenovirus A
gccuccuauguuagcgccagagg

SEQ ID NO: 1540763 - RNA, 13 nt, Human adenovirus A
cauuaccucugua

SEQ ID NO: 1540764 - RNA, 13 nt, Human adenovirus A
aggguccagggac

SEQ ID NO: 1540765 - RNA, 16 nt, Human adenovirus A
aucuuccgccaaaggu

SEQ ID NO: 1540766 - RNA, 20 nt, Human adenovirus A
cuccuccgugaguuggccug

SEQ ID NO: 1540767 - RNA, 22 nt, Human adenovirus A
caccuuuuguuaauuaaggcgc

SEQ ID NO: 1540768 - RNA, 12 nt, Human adenovirus A
aaacagcagcaa

SEQ ID NO: 1540769 - RNA, 21 nt, Human adenovirus A
aaacaggcuauugcgcagcaa

SEQ ID NO: 1540770 - RNA, 13 nt, Human adenovirus A
aaacgagcagcaa

SEQ ID NO: 1540771 - RNA, 21 nt, Human adenovirus A
aaagagucucaaaagcagcca

SEQ ID NO: 1540772 - RNA, 23 nt, Human adenovirus A
aaauaaugcauuaccagcagcca

SEQ ID NO: 1540773 - RNA, 16 nt, Human adenovirus A
aaauauaaaagcacaa

SEQ ID NO: 1540774 - RNA, 19 nt, Human adenovirus A
aaaucagaagccagcagca

SEQ ID NO: 1540775 - RNA, 19 nt, Human adenovirus A
aaaucugaaaauacaucau

SEQ ID NO: 1540776 - RNA, 21 nt, Human adenovirus A
aaauggaacccuuacacucaa

SEQ ID NO: 1540777 - RNA, 17 nt, Human adenovirus A
caaaauaaacaucucau

SEQ ID NO: 1540778 - RNA, 20 nt, Human adenovirus A
caaauuuuccauacacucau

SEQ ID NO: 1540779 - RNA, 18 nt, Human adenovirus A
caacauaacaacucagga

SEQ ID NO: 1540780 - RNA, 21 nt, Human adenovirus A
cauuccagagagcuacaagga

SEQ ID NO: 1540781 - RNA, 19 nt, Human adenovirus A
cagcgucccaaaagcaucc

SEQ ID NO: 1540782 - RNA, 19 nt, Human adenovirus A
cagcgcacuggcauaagga

SEQ ID NO: 1540783 - RNA, 15 nt, Human adenovirus A
cauaauuaaaggcgc

SEQ ID NO: 1540784 - RNA, 15 nt, Human adenovirus A
cauacauacacucau

SEQ ID NO: 1540785 - RNA, 19 nt, Human adenovirus A
guaccauagcgaggaaccc

SEQ ID NO: 1540786 - RNA, 19 nt, Human adenovirus A
cuuagucauuacaacauug

SEQ ID NO: 1540787 - RNA, 14 nt, Human adenovirus A
cuucgcgaaauugg

SEQ ID NO: 1540788 - RNA, 21 nt, Human adenovirus A
aagcagcgccaaauagagcaa

SEQ ID NO: 1540789 - RNA, 12 nt, Human adenovirus A
cacgccguagac

SEQ ID NO: 1540790 - RNA, 20 nt, Human adenovirus A
cacacuuuuaagaagguguc

SEQ ID NO: 1540791 - RNA, 20 nt, Human adenovirus A
cacagccccuagccguagac

SEQ ID NO: 1540792 - RNA, 20 nt, Human adenovirus A
cacacuuaacacaagagcgc

SEQ ID NO: 1540793 - RNA, 20 nt, Human adenovirus A
cuacuuaaaagcaagcgcgc

SEQ ID NO: 1540794 - RNA, 15 nt, Human adenovirus A
acaucaggagcagaa

SEQ ID NO: 1540795 - RNA, 18 nt, Human adenovirus A
aaucggcaacagcagcaa

SEQ ID NO: 1540796 - RNA, 20 nt, Human adenovirus A
caggauccgcuaugagcaca

SEQ ID NO: 1540797 - RNA, 17 nt, Human adenovirus A
cagcuucuaaaagagcc

SEQ ID NO: 1540798 - RNA, 21 nt, Human adenovirus A
cacaaucugccgcaagugcgc

SEQ ID NO: 1540799 - RNA, 17 nt, Human adenovirus A
aucagccagagccgcaa

SEQ ID NO: 1540800 - RNA, 20 nt, Human adenovirus A
caacccaaacuguacaagga

SEQ ID NO: 1540801 - RNA, 14 nt, Human adenovirus A
caauaaaacaagga

SEQ ID NO: 1540802 - RNA, 23 nt, Human adenovirus A
caauccaaggaugacaacauuga

SEQ ID NO: 1540803 - RNA, 20 nt, Human adenovirus A
caaugcaauaugacuaagga

SEQ ID NO: 1540804 - RNA, 20 nt, Human adenovirus A
gugacaaugcccgccuggca

SEQ ID NO: 1540805 - RNA, 16 nt, Human adenovirus A
cuuguuuaaacauucg

SEQ ID NO: 1540806 - RNA, 14 nt, Human adenovirus A
cuuugacaacauug

SEQ ID NO: 1540807 - RNA, 15 nt, Human adenovirus A
cuuugacaacauugc

SEQ ID NO: 1540808 - RNA, 14 nt, Human adenovirus A
ugcagagcauugug

SEQ ID NO: 1540809 - RNA, 21 nt, Human adenovirus A
uaucgcaccucguccuuuuug

SEQ ID NO: 1540810 - RNA, 17 nt, Human adenovirus A
ucuaaauccgcauuggu

SEQ ID NO: 1540811 - RNA, 14 nt, Human adenovirus A
ucuaaugcaaguug

SEQ ID NO: 1540812 - RNA, 19 nt, Human adenovirus A
uugguuaagcgccggaccc

SEQ ID NO: 1540813 - RNA, 15 nt, Human adenovirus A
uguuugacaagauug

SEQ ID NO: 1540814 - RNA, 11 nt, Human adenovirus A
uuauuggccug

SEQ ID NO: 1540815 - RNA, 17 nt, Human adenovirus A
uucaccgcgcaagcuuu

SEQ ID NO: 1540816 - RNA, 15 nt, Human adenovirus A
uguaaaugcuuuguu

SEQ ID NO: 1540817 - RNA, 21 nt, Human adenovirus A
uguauuggccgggcaagcuuc

SEQ ID NO: 1540818 - RNA, 20 nt, Human adenovirus A
uguuaugcuugccaagcuug

SEQ ID NO: 1540819 - RNA, 13 nt, Human adenovirus A
cuauuacacucag

SEQ ID NO: 1540820 - RNA, 20 nt, Human adenovirus A
gagcccggcguaaccaaaua

SEQ ID NO: 1540821 - RNA, 15 nt, Human adenovirus A
uggaguacaagcuug

SEQ ID NO: 1540822 - RNA, 20 nt, Human adenovirus A
gcugugacacgcaccgcagu

SEQ ID NO: 1540823 - RNA, 20 nt, Human adenovirus A
ugcuauuauugagcauuauu

SEQ ID NO: 1540824 - RNA, 21 nt, Human adenovirus A
uaugcgggagggacaagcuua

SEQ ID NO: 1540825 - RNA, 17 nt, Human adenovirus A
gcagcugacaucuuaau

SEQ ID NO: 1540826 - RNA, 19 nt, Human adenovirus A
aacauuagcagucugguac

SEQ ID NO: 1540827 - RNA, 19 nt, Human adenovirus A
agcgccccccuagcaguaa

SEQ ID NO: 1540828 - RNA, 20 nt, Human adenovirus A
agugaacccggacgcuggca

SEQ ID NO: 1540829 - RNA, 19 nt, Human adenovirus A
agugccagaagcacuggca

SEQ ID NO: 1540830 - RNA, 18 nt, Human adenovirus A
agugucacugccgcugca

SEQ ID NO: 1540831 - RNA, 22 nt, Human adenovirus A
aguugacgccccauccguggca

SEQ ID NO: 1540832 - RNA, 18 nt, Human adenovirus A
ccacgccuggguaccgug

SEQ ID NO: 1540833 - RNA, 21 nt, Human adenovirus A
auucagcuaacaaugcagcaa

SEQ ID NO: 1540834 - RNA, 20 nt, Human adenovirus A
gguacccgccagugcuuuca

SEQ ID NO: 1540835 - RNA, 15 nt, Human adenovirus B (HAdV-B)
caguacaggacaggc

SEQ ID NO: 1540836 - RNA, 20 nt, Human adenovirus B (HAdV-B)
acaagugagaucggacaggg

SEQ ID NO: 1540837 - RNA, 20 nt, Human adenovirus B (HAdV-B)
auccuacgagaucaccgcua

SEQ ID NO: 1540838 - RNA, 21 nt, Human adenovirus B (HAdV-B)
gacugccgcuucuucaacccg

SEQ ID NO: 1540839 - RNA, 14 nt, Human adenovirus B (HAdV-B)
ucaaguacaaccac

SEQ ID NO: 1540840 - RNA, 20 nt, Human adenovirus B (HAdV-B)
cucauaaugacaaaauaucu

SEQ ID NO: 1540841 - RNA, 20 nt, Human adenovirus B (HAdV-B)
ugggauuguuucugaugcaa

SEQ ID NO: 1540842 - RNA, 14 nt, Human adenovirus B (HAdV-B)
gacuuggaagaggg

SEQ ID NO: 1540843 - RNA, 18 nt, Human adenovirus B (HAdV-B)
auuugccaaaaaaacauu

SEQ ID NO: 1540844 - RNA, 18 nt, Human adenovirus B (HAdV-B)
uugcuccugugucaccug

SEQ ID NO: 1540845 - RNA, 13 nt, Human adenovirus B (HAdV-B)
auuaugugcauuu

SEQ ID NO: 1540846 - RNA, 23 nt, Human adenovirus B (HAdV-B)
cagaagacaugcaugacccagau

SEQ ID NO: 1540847 - RNA, 12 nt, Human adenovirus B (HAdV-B)
agacauggaaac

SEQ ID NO: 1540848 - RNA, 18 nt, Human adenovirus B (HAdV-B)
uauagcuuccuuggaaga

SEQ ID NO: 1540849 - RNA, 15 nt, Human adenovirus B (HAdV-B)
ccaucuuccagcaga

SEQ ID NO: 1540850 - RNA, 16 nt, Human adenovirus B (HAdV-B)
ugccaucuuccagcag

SEQ ID NO: 1540851 - RNA, 14 nt, Human adenovirus B (HAdV-B)
cuuagaaaaugcaa

SEQ ID NO: 1540852 - RNA, 16 nt, Human adenovirus B (HAdV-B)
auuuccacuucaacaa

SEQ ID NO: 1540853 - RNA, 15 nt, Human adenovirus B (HAdV-B)
aacaaggucgcagug

SEQ ID NO: 1540854 - RNA, 23 nt, Human adenovirus B (HAdV-B)
cauuacuaccgucaccuccacag

SEQ ID NO: 1540855 - RNA, 12 nt, Human adenovirus B (HAdV-B)
acuuggaagacu

SEQ ID NO: 1540856 - RNA, 13 nt, Human adenovirus B (HAdV-B)
uaucggaggagga

SEQ ID NO: 1540857 - RNA, 18 nt, Human adenovirus B (HAdV-B)
aaucuauggcgaaguuuc

SEQ ID NO: 1540858 - RNA, 21 nt, Human adenovirus B (HAdV-B)
acagagacgagccugggauca

SEQ ID NO: 1540859 - RNA, 16 nt, Human adenovirus B (HAdV-B)
acaaguacugcgcgcu

SEQ ID NO: 1540860 - RNA, 16 nt, Human adenovirus B (HAdV-B)
acaugaaucaugugaa

SEQ ID NO: 1540861 - RNA, 17 nt, Human adenovirus B (HAdV-B)
uccaaggucuuccuaca

SEQ ID NO: 1540862 - RNA, 15 nt, Human adenovirus B (HAdV-B)
ugaauuggcucagcg

SEQ ID NO: 1540863 - RNA, 20 nt, Human adenovirus B (HAdV-B)
uuacaguggaugacaccaac

SEQ ID NO: 1540864 - RNA, 17 nt, Human adenovirus B (HAdV-B)
cuccaucagcagacaca

SEQ ID NO: 1540865 - RNA, 12 nt, Human adenovirus B (HAdV-B)
ccaaugccaucu

SEQ ID NO: 1540866 - RNA, 12 nt, Human adenovirus B (HAdV-B)
ucgcugcuuugc

SEQ ID NO: 1540867 - RNA, 17 nt, Human adenovirus B (HAdV-B)
ucgcagaaaacaaacuu

SEQ ID NO: 1540868 - RNA, 12 nt, Human adenovirus B (HAdV-B)
ccuacuccuggu

SEQ ID NO: 1540869 - RNA, 14 nt, Human adenovirus B (HAdV-B)
acaguaaaggaaga

SEQ ID NO: 1540870 - RNA, 20 nt, Human adenovirus B (HAdV-B)
aagcucuaaagugacucucc

SEQ ID NO: 1540871 - RNA, 16 nt, Human adenovirus B (HAdV-B)
cgagaagguggcugcc

SEQ ID NO: 1540872 - RNA, 14 nt, Human adenovirus B (HAdV-B)
uauggagcccagca

SEQ ID NO: 1540873 - RNA, 17 nt, Human adenovirus B (HAdV-B)
caccuuaaucccagaaa

SEQ ID NO: 1540874 - RNA, 15 nt, Human adenovirus B (HAdV-B)
gcugucaaccugccc

SEQ ID NO: 1540875 - RNA, 16 nt, Human adenovirus B (HAdV-B)
ggaccgaagacgagug

SEQ ID NO: 1540876 - RNA, 22 nt, Human adenovirus B (HAdV-B)
cuccacagccccuacuauagcc

SEQ ID NO: 1540877 - RNA, 14 nt, Human adenovirus B (HAdV-B)
accaaucacagccu

SEQ ID NO: 1540878 - RNA, 21 nt, Human adenovirus B (HAdV-B)
cucaaugcuucuuuugccauc

SEQ ID NO: 1540879 - RNA, 14 nt, Human adenovirus B (HAdV-B)
agacacggcuuugu

SEQ ID NO: 1540880 - RNA, 14 nt, Human adenovirus B (HAdV-B)
cccuaugaaaucaa

SEQ ID NO: 1540881 - RNA, 22 nt, Human adenovirus B (HAdV-B)
uugcaagccauccaaaaauccc

SEQ ID NO: 1540882 - RNA, 22 nt, Human adenovirus B (HAdV-B)
gcggcccuggcagaacacacuc

SEQ ID NO: 1540883 - RNA, 19 nt, Human adenovirus B (HAdV-B)
gcguucgcucaccagaagu

SEQ ID NO: 1540884 - RNA, 19 nt, Human adenovirus B (HAdV-B)
aacgaggaggcagaggagg

SEQ ID NO: 1540885 - RNA, 20 nt, Human adenovirus B (HAdV-B)
aagcugcuacagcugcugca

SEQ ID NO: 1540886 - RNA, 22 nt, Human adenovirus B (HAdV-B)
aaaaaguucuugugugacagaa

SEQ ID NO: 1540887 - RNA, 20 nt, Human adenovirus B (HAdV-B)
accagacggaaucuuucaga

SEQ ID NO: 1540888 - RNA, 22 nt, Human adenovirus B (HAdV-B)
ucauagauaauuacuugaaagu

SEQ ID NO: 1540889 - RNA, 13 nt, Human adenovirus B (HAdV-B)
cagccaugcauug

SEQ ID NO: 1540890 - RNA, 20 nt, Human adenovirus B (HAdV-B)
uagaccuacagagucucuga

SEQ ID NO: 1540891 - RNA, 21 nt, Human adenovirus B (HAdV-B)
cuagcuuguuaacuccgaacu

SEQ ID NO: 1540892 - RNA, 15 nt, Human adenovirus B (HAdV-B)
ggaggagaggauccu

SEQ ID NO: 1540893 - RNA, 17 nt, Human adenovirus B (HAdV-B)
cuggagugucacugccg

SEQ ID NO: 1540894 - RNA, 14 nt, Human adenovirus B (HAdV-B)
cgccagcaggaggc

SEQ ID NO: 1540895 - RNA, 17 nt, Human adenovirus B (HAdV-B)
aggaggcggaggaggac

SEQ ID NO: 1540896 - RNA, 16 nt, Human adenovirus B (HAdV-B)
cucugacacuccuggu

SEQ ID NO: 1540897 - RNA, 17 nt, Human adenovirus B (HAdV-B)
ccagugaaucuaaugau

SEQ ID NO: 1540898 - RNA, 19 nt, Human adenovirus B (HAdV-B)
agguuguaucugguggaca

SEQ ID NO: 1540899 - RNA, 19 nt, Human adenovirus B (HAdV-B)
ugaacaugcaaaucuggaa

SEQ ID NO: 1540900 - RNA, 14 nt, Human adenovirus B (HAdV-B)
gaaggacucccagu

SEQ ID NO: 1540901 - RNA, 18 nt, Human adenovirus B (HAdV-B)
agauugggacagucaggc

SEQ ID NO: 1540902 - RNA, 19 nt, Human adenovirus B (HAdV-B)
cgaagccuuuagacagcaa

SEQ ID NO: 1540903 - RNA, 19 nt, Human adenovirus B (HAdV-B)
uggcgugagaauuggaaga

SEQ ID NO: 1540904 - RNA, 19 nt, Human adenovirus B (HAdV-B)
cagcauuggcaaugcugaa

SEQ ID NO: 1540905 - RNA, 12 nt, Human adenovirus B (HAdV-B)
cuggccacaucc

SEQ ID NO: 1540906 - RNA, 21 nt, Human adenovirus B (HAdV-B)
gaugaaguuucuguauugcag

SEQ ID NO: 1540907 - RNA, 16 nt, Human adenovirus B (HAdV-B)
acccugucuaccccua

SEQ ID NO: 1540908 - RNA, 16 nt, Human adenovirus B (HAdV-B)
accagggaaaaguaca

SEQ ID NO: 1540909 - RNA, 16 nt, Human adenovirus B (HAdV-B)
auucugcaugagaauc

SEQ ID NO: 1540910 - RNA, 16 nt, Human adenovirus B (HAdV-B)
ggaaucauguccaccu

SEQ ID NO: 1540911 - RNA, 16 nt, Human adenovirus B (HAdV-B)
ugagaauuggaagaga

SEQ ID NO: 1540912 - RNA, 15 nt, Human adenovirus B (HAdV-B)
ugggaugggugagug

SEQ ID NO: 1540913 - RNA, 18 nt, Human adenovirus B (HAdV-B)
cagccgccgcccccagaa

SEQ ID NO: 1540914 - RNA, 23 nt, Human adenovirus B (HAdV-B)
ucucuguugaaauuuucucccag

SEQ ID NO: 1540915 - RNA, 11 nt, Human adenovirus B (HAdV-B)
ugggaccuggu

SEQ ID NO: 1540916 - RNA, 19 nt, Human adenovirus B (HAdV-B)
ucacaucucguccucagcg

SEQ ID NO: 1540917 - RNA, 15 nt, Human adenovirus B (HAdV-B)
auccgguggggccau

SEQ ID NO: 1540918 - RNA, 21 nt, Human adenovirus B (HAdV-B)
auacucauuugugcauuuaau

SEQ ID NO: 1540919 - RNA, 22 nt, Human adenovirus B (HAdV-B)
caacgagcagauaacuaucacc

SEQ ID NO: 1540920 - RNA, 18 nt, Human adenovirus B (HAdV-B)
cagcagcaccucacuucc

SEQ ID NO: 1540921 - RNA, 15 nt, Human adenovirus B (HAdV-B)
gaccagaacuuccaa

SEQ ID NO: 1540922 - RNA, 11 nt, Human adenovirus B (HAdV-B)
gggugggagag

SEQ ID NO: 1540923 - RNA, 18 nt, Human adenovirus B (HAdV-B)
aaugcgggcggcgcugca

SEQ ID NO: 1540924 - RNA, 23 nt, Human adenovirus B (HAdV-B)
acuccauacguucccauagacaa

SEQ ID NO: 1540925 - RNA, 16 nt, Human adenovirus B (HAdV-B)
auuguuucugaugcaa

SEQ ID NO: 1540926 - RNA, 14 nt, Human adenovirus B (HAdV-B)
cagaaguacuggcu

SEQ ID NO: 1540927 - RNA, 16 nt, Human adenovirus B (HAdV-B)
cacagggucuccagcu

SEQ ID NO: 1540928 - RNA, 18 nt, Human adenovirus B (HAdV-B)
aaguccuggcgggggcau

SEQ ID NO: 1540929 - RNA, 16 nt, Human adenovirus B (HAdV-B)
aggaggacagucugga

SEQ ID NO: 1540930 - RNA, 18 nt, Human adenovirus B (HAdV-B)
aucuaacguggaacucac

SEQ ID NO: 1540931 - RNA, 12 nt, Human adenovirus B (HAdV-B)
uauggagcccag

SEQ ID NO: 1540932 - RNA, 20 nt, Human adenovirus B (HAdV-B)
gcagccgccgcccccagaag

SEQ ID NO: 1540933 - RNA, 12 nt, Human adenovirus B (HAdV-B)
ggucagcugcaa

SEQ ID NO: 1540934 - RNA, 13 nt, Human adenovirus B (HAdV-B)
gucuaucuguacc

SEQ ID NO: 1540935 - RNA, 16 nt, Human adenovirus B (HAdV-B)
cucacuauucaaccug

SEQ ID NO: 1540936 - RNA, 16 nt, Human adenovirus B (HAdV-B)
gagccugggccuggcc

SEQ ID NO: 1540937 - RNA, 23 nt, Human adenovirus B (HAdV-B)
uugaugaaaugacagggaucagu

SEQ ID NO: 1540938 - RNA, 18 nt, Human adenovirus B (HAdV-B)
gcagcuccuuuagccaga

SEQ ID NO: 1540939 - RNA, 17 nt, Human adenovirus B (HAdV-B)
guuggauaaaaguuugg

SEQ ID NO: 1540940 - RNA, 17 nt, Human adenovirus B (HAdV-B)
aagaugaaagcaccucc

SEQ ID NO: 1540941 - RNA, 23 nt, Human adenovirus B (HAdV-B)
gaaccucagcugggagaugaaac

SEQ ID NO: 1540942 - RNA, 16 nt, Human adenovirus B (HAdV-B)
acugcagcacuggaca

SEQ ID NO: 1540943 - RNA, 16 nt, Human adenovirus B (HAdV-B)
acgucuagggcgcagu

SEQ ID NO: 1540944 - RNA, 21 nt, Human adenovirus B (HAdV-B)
ggcauuaacuccucggacgau

SEQ ID NO: 1540945 - RNA, 17 nt, Human adenovirus B (HAdV-B)
uccaaggaugagacagu

SEQ ID NO: 1540946 - RNA, 16 nt, Human adenovirus B (HAdV-B)
aagcucuugcagaaca

SEQ ID NO: 1540947 - RNA, 19 nt, Human adenovirus B (HAdV-B)
acgagaaaaaacagccaac

SEQ ID NO: 1540948 - RNA, 19 nt, Human adenovirus B (HAdV-B)
gcccgucuucucaaagagc

SEQ ID NO: 1540949 - RNA, 18 nt, Human adenovirus B (HAdV-B)
acagauaagcccuuggug

SEQ ID NO: 1540950 - RNA, 22 nt, Human adenovirus B (HAdV-B)
ucuagcggaaacccgucuuugu

SEQ ID NO: 1540951 - RNA, 22 nt, Human adenovirus B (HAdV-B)
agaagaggcggaugaaggcgag

SEQ ID NO: 1540952 - RNA, 20 nt, Human adenovirus B (HAdV-B)
cuugagaaugaaaaauaucu

SEQ ID NO: 1540953 - RNA, 15 nt, Human adenovirus B (HAdV-B)
cugagaguuucauga

SEQ ID NO: 1540954 - RNA, 15 nt, Human adenovirus B (HAdV-B)
ucaccaaggccaugg

SEQ ID NO: 1540955 - RNA, 20 nt, Human adenovirus B (HAdV-B)
accaaaguuuaauauaaauu

SEQ ID NO: 1540956 - RNA, 18 nt, Human adenovirus B (HAdV-B)
agaggaggcggaggagga

SEQ ID NO: 1540957 - RNA, 15 nt, Human adenovirus B (HAdV-B)
guaacuuuuguaaau

SEQ ID NO: 1540958 - RNA, 23 nt, Human adenovirus B (HAdV-B)
cuccgguauccugcccgccaccu

SEQ ID NO: 1540959 - RNA, 16 nt, Human adenovirus B (HAdV-B)
cucuaccccauuccug

SEQ ID NO: 1540960 - RNA, 22 nt, Human adenovirus B (HAdV-B)
agccguuaaccccacagccaau

SEQ ID NO: 1540961 - RNA, 12 nt, Human adenovirus B (HAdV-B)
caguggacggcu

SEQ ID NO: 1540962 - RNA, 22 nt, Human adenovirus B (HAdV-B)
ccauaauuaaaagcgcuccagc

SEQ ID NO: 1540963 - RNA, 22 nt, Human adenovirus B (HAdV-B)
augacuuuaccccuacggaagc

SEQ ID NO: 1540964 - RNA, 16 nt, Human adenovirus B (HAdV-B)
gcagcacuggacauga

SEQ ID NO: 1540965 - RNA, 14 nt, Human adenovirus B (HAdV-B)
gcaggucaggagcc

SEQ ID NO: 1540966 - RNA, 12 nt, Human adenovirus B (HAdV-B)
gugaacaccaau

SEQ ID NO: 1540967 - RNA, 21 nt, Human adenovirus B (HAdV-B)
ccggcaucauucacacagcag

SEQ ID NO: 1540968 - RNA, 16 nt, Human adenovirus B (HAdV-B)
gugaugcaauccccac

SEQ ID NO: 1540969 - RNA, 19 nt, Human adenovirus B (HAdV-B)
uuauaauggaauaguguuu

SEQ ID NO: 1540970 - RNA, 19 nt, Human adenovirus B (HAdV-B)
ucccaggacuacuccaccc

SEQ ID NO: 1540971 - RNA, 18 nt, Human adenovirus B (HAdV-B)
cguuaaccccacagccaa

SEQ ID NO: 1540972 - RNA, 13 nt, Human adenovirus B (HAdV-B)
ccgccggucccac

SEQ ID NO: 1540973 - RNA, 16 nt, Human adenovirus B (HAdV-B)
agugcaaacggaucca

SEQ ID NO: 1540974 - RNA, 20 nt, Human adenovirus B (HAdV-B)
cugcuuugcccgggaacuca

SEQ ID NO: 1540975 - RNA, 23 nt, Human adenovirus B (HAdV-B)
aaccgguauaucgggcaggaugu

SEQ ID NO: 1540976 - RNA, 20 nt, Human adenovirus B (HAdV-B)
gacuuuaugagccagagcau

SEQ ID NO: 1540977 - RNA, 13 nt, Human adenovirus B (HAdV-B)
cgguucuggagga

SEQ ID NO: 1540978 - RNA, 16 nt, Human adenovirus B (HAdV-B)
cauagauaauuacuug

SEQ ID NO: 1540979 - RNA, 14 nt, Human adenovirus B (HAdV-B)
gggaacugaugcac

SEQ ID NO: 1540980 - RNA, 14 nt, Human adenovirus B (HAdV-B)
aguagcugacuugu

SEQ ID NO: 1540981 - RNA, 17 nt, Human adenovirus B (HAdV-B)
aacagaaaaccagcagc

SEQ ID NO: 1540982 - RNA, 19 nt, Human adenovirus B (HAdV-B)
cggggucaucuugcagguc

SEQ ID NO: 1540983 - RNA, 16 nt, Human adenovirus B (HAdV-B)
ucccagaguuggaagu

SEQ ID NO: 1540984 - RNA, 17 nt, Human adenovirus B (HAdV-B)
ggcggagcgguggugua

SEQ ID NO: 1540985 - RNA, 13 nt, Human adenovirus B (HAdV-B)
agaaauauaaauu

SEQ ID NO: 1540986 - RNA, 11 nt, Human adenovirus B (HAdV-B)
cauucagaacc

SEQ ID NO: 1540987 - RNA, 15 nt, Human adenovirus B (HAdV-B)
acuucccucuuccca

SEQ ID NO: 1540988 - RNA, 17 nt, Human adenovirus B (HAdV-B)
aggucucuguugaaauu

SEQ ID NO: 1540989 - RNA, 16 nt, Human adenovirus B (HAdV-B)
aacuuauauugcaugg

SEQ ID NO: 1540990 - RNA, 14 nt, Human adenovirus B (HAdV-B)
gaucaugccuggag

SEQ ID NO: 1540991 - RNA, 21 nt, Human adenovirus B (HAdV-B)
cugaagugcccaucagugugg

SEQ ID NO: 1540992 - RNA, 22 nt, Human adenovirus B (HAdV-B)
aagacgcgcuccuuaaacaucu

SEQ ID NO: 1540993 - RNA, 18 nt, Human adenovirus B (HAdV-B)
cuguguagaugccugggg

SEQ ID NO: 1540994 - RNA, 24 nt, Human adenovirus B (HAdV-B)
aggguuuauuuccccaaauggcuu

SEQ ID NO: 1540995 - RNA, 19 nt, Human adenovirus B (HAdV-B)
guccguucucgcuggccac

SEQ ID NO: 1540996 - RNA, 17 nt, Human adenovirus B (HAdV-B)
acgccuuacauguggag

SEQ ID NO: 1540997 - RNA, 15 nt, Human adenovirus B (HAdV-B)
auaucuggaaauggg

SEQ ID NO: 1540998 - RNA, 16 nt, Human adenovirus B (HAdV-B)
ugaugcagcagcagca

SEQ ID NO: 1540999 - RNA, 22 nt, Human adenovirus B (HAdV-B)
gcaguagccacagcaaccccag

SEQ ID NO: 1541000 - RNA, 14 nt, Human adenovirus B (HAdV-B)
cuauaucucccaga

SEQ ID NO: 1541001 - RNA, 14 nt, Human adenovirus B (HAdV-B)
cuccuaggcagaga

SEQ ID NO: 1541002 - RNA, 14 nt, Human adenovirus B (HAdV-B)
cagcacgacugccu

SEQ ID NO: 1541003 - RNA, 21 nt, Human adenovirus B (HAdV-B)
uauuauggaaccgacuauaaa

SEQ ID NO: 1541004 - RNA, 14 nt, Human adenovirus B (HAdV-B)
uuucagaagacaug

SEQ ID NO: 1541005 - RNA, 16 nt, Human adenovirus B (HAdV-B)
gaauaccgcaaccaaa

SEQ ID NO: 1541006 - RNA, 11 nt, Human adenovirus B (HAdV-B)
gaucuccuggg

SEQ ID NO: 1541007 - RNA, 14 nt, Human adenovirus B (HAdV-B)
agcccgagucugca

SEQ ID NO: 1541008 - RNA, 19 nt, Human adenovirus B (HAdV-B)
cauugcuuauugcuugugc

SEQ ID NO: 1541009 - RNA, 16 nt, Human adenovirus B (HAdV-B)
uagcugaaacccacug

SEQ ID NO: 1541010 - RNA, 14 nt, Human adenovirus B (HAdV-B)
ccagacgccgcacc

SEQ ID NO: 1541011 - RNA, 21 nt, Human adenovirus B (HAdV-B)
cugcaacgaauuuucucccag

SEQ ID NO: 1541012 - RNA, 16 nt, Human adenovirus B (HAdV-B)
ugacggcggucaugga

SEQ ID NO: 1541013 - RNA, 18 nt, Human adenovirus B (HAdV-B)
uccuucgcggcuggccau

SEQ ID NO: 1541014 - RNA, 16 nt, Human adenovirus B (HAdV-B)
gacuccguagccugga

SEQ ID NO: 1541015 - RNA, 14 nt, Human adenovirus B (HAdV-B)
uuaaacacacccuc

SEQ ID NO: 1541016 - RNA, 14 nt, Human adenovirus B (HAdV-B)
gguacaacacauua

SEQ ID NO: 1541017 - RNA, 19 nt, Human adenovirus B (HAdV-B)
caguaacuuuuguaaaugu

SEQ ID NO: 1541018 - RNA, 17 nt, Human adenovirus B (HAdV-B)
auugccggcugcgggag

SEQ ID NO: 1541019 - RNA, 19 nt, Human adenovirus B (HAdV-B)
uuaaaauguuuaaccccac

SEQ ID NO: 1541020 - RNA, 15 nt, Human adenovirus B (HAdV-B)
ccaguccugccacca

SEQ ID NO: 1541021 - RNA, 17 nt, Human adenovirus B (HAdV-B)
acguguacccgugcgca

SEQ ID NO: 1541022 - RNA, 20 nt, Human adenovirus B (HAdV-B)
gguaagaaggaucggcaggg

SEQ ID NO: 1541023 - RNA, 20 nt, Human adenovirus B (HAdV-B)
cuauggagucacugcuaccu

SEQ ID NO: 1541024 - RNA, 15 nt, Human adenovirus B (HAdV-B)
agacccgggcuaugu

SEQ ID NO: 1541025 - RNA, 20 nt, Human adenovirus B (HAdV-B)
uagucaccuccccauuuacc

SEQ ID NO: 1541026 - RNA, 22 nt, Human adenovirus B (HAdV-B)
aggaugcuucggaguaccugag

SEQ ID NO: 1541027 - RNA, 18 nt, Human adenovirus B (HAdV-B)
ccagaaguuggaggacgu

SEQ ID NO: 1541028 - RNA, 19 nt, Human adenovirus B (HAdV-B)
ggcggccagacgugcagcu

SEQ ID NO: 1541029 - RNA, 14 nt, Human adenovirus B (HAdV-B)
uaagcauuccaccg

SEQ ID NO: 1541030 - RNA, 23 nt, Human adenovirus B (HAdV-B)
aaggcgaugggucuucuccuggg

SEQ ID NO: 1541031 - RNA, 22 nt, Human adenovirus B (HAdV-B)
gcccuggugcggcaaguguacc

SEQ ID NO: 1541032 - RNA, 16 nt, Human adenovirus B (HAdV-B)
uagugccuucccgcuc

SEQ ID NO: 1541033 - RNA, 14 nt, Human adenovirus B (HAdV-B)
gaggauuugcaugu

SEQ ID NO: 1541034 - RNA, 16 nt, Human adenovirus B (HAdV-B)
acaucgccggacagga

SEQ ID NO: 1541035 - RNA, 22 nt, Human adenovirus B (HAdV-B)
cgaagccauagggcaaagucag

SEQ ID NO: 1541036 - RNA, 17 nt, Human adenovirus B (HAdV-B)
gguucuuugcucuuccu

SEQ ID NO: 1541037 - RNA, 19 nt, Human adenovirus B (HAdV-B)
uugaaauuuucucccagca

SEQ ID NO: 1541038 - RNA, 15 nt, Human adenovirus B (HAdV-B)
aguaacuugcaacau

SEQ ID NO: 1541039 - RNA, 12 nt, Human adenovirus B (HAdV-B)
uauaaaacaucc

SEQ ID NO: 1541040 - RNA, 21 nt, Human adenovirus B (HAdV-B)
agucaugacggcggucaugga

SEQ ID NO: 1541041 - RNA, 23 nt, Human adenovirus B (HAdV-B)
gccgccaagaucccgucuugggu

SEQ ID NO: 1541042 - RNA, 18 nt, Human adenovirus B (HAdV-B)
acuuuuggcaaugcuccu

SEQ ID NO: 1541043 - RNA, 16 nt, Human adenovirus B (HAdV-B)
augaugggcuggcgga

SEQ ID NO: 1541044 - RNA, 14 nt, Human adenovirus B (HAdV-B)
ccgcgagugccccc

SEQ ID NO: 1541045 - RNA, 16 nt, Human adenovirus B (HAdV-B)
guuuaguaacaaguuc

SEQ ID NO: 1541046 - RNA, 17 nt, Human adenovirus B (HAdV-B)
accuugcuucacuuucu

SEQ ID NO: 1541047 - RNA, 16 nt, Human adenovirus B (HAdV-B)
ggcggcgcugcagagc

SEQ ID NO: 1541048 - RNA, 15 nt, Human adenovirus B (HAdV-B)
agaacaguaaagcug

SEQ ID NO: 1541049 - RNA, 14 nt, Human adenovirus B (HAdV-B)
ccuguaugccaucu

SEQ ID NO: 1541050 - RNA, 18 nt, Human adenovirus B (HAdV-B)
cuggcccaauugcaagcc

SEQ ID NO: 1541051 - RNA, 23 nt, Human adenovirus B (HAdV-B)
aacagccccccucgcagcagcag

SEQ ID NO: 1541052 - RNA, 22 nt, Human adenovirus B (HAdV-B)
ugccagcacggugggaucugca

SEQ ID NO: 1541053 - RNA, 13 nt, Human adenovirus B (HAdV-B)
ccuuaaucccaga

SEQ ID NO: 1541054 - RNA, 14 nt, Human adenovirus B (HAdV-B)
aguaacuugcaaca

SEQ ID NO: 1541055 - RNA, 16 nt, Human adenovirus B (HAdV-B)
ugaucacaagcaggau

SEQ ID NO: 1541056 - RNA, 14 nt, Human adenovirus B (HAdV-B)
caaguguuucuuga

SEQ ID NO: 1541057 - RNA, 20 nt, Human adenovirus B (HAdV-B)
ccucagcgacgaggaaaagg

SEQ ID NO: 1541058 - RNA, 23 nt, Human adenovirus B (HAdV-B)
caaagcuauucguccagaugagg

SEQ ID NO: 1541059 - RNA, 22 nt, Human adenovirus B (HAdV-B)
ggugcuaccgcggcugagcccg

SEQ ID NO: 1541060 - RNA, 13 nt, Human adenovirus B (HAdV-B)
ucaugcaacccaa

SEQ ID NO: 1541061 - RNA, 19 nt, Human adenovirus B (HAdV-B)
ugucucugaagaaaugcau

SEQ ID NO: 1541062 - RNA, 16 nt, Human adenovirus B (HAdV-B)
cgaugugucugaagga

SEQ ID NO: 1541063 - RNA, 20 nt, Human adenovirus B (HAdV-B)
caaagcgugcugcacagcac

SEQ ID NO: 1541064 - RNA, 16 nt, Human adenovirus B (HAdV-B)
aggaagacaguuugga

SEQ ID NO: 1541065 - RNA, 17 nt, Human adenovirus B (HAdV-B)
cugaugggagugggguc

SEQ ID NO: 1541066 - RNA, 14 nt, Human adenovirus B (HAdV-B)
gcgauaccuggcac

SEQ ID NO: 1541067 - RNA, 19 nt, Human adenovirus B (HAdV-B)
cugggaugggaucccgaaa

SEQ ID NO: 1541068 - RNA, 21 nt, Human adenovirus B (HAdV-B)
cacuuagaagauacugagcag

SEQ ID NO: 1541069 - RNA, 19 nt, Human adenovirus B (HAdV-B)
uccaugccuuucucccaag

SEQ ID NO: 1541070 - RNA, 18 nt, Human adenovirus B (HAdV-B)
uccgaccuggcagaccuc

SEQ ID NO: 1541071 - RNA, 18 nt, Human adenovirus B (HAdV-B)
caucuacuguggaugcag

SEQ ID NO: 1541072 - RNA, 18 nt, Human adenovirus B (HAdV-B)
cuccagacacucauguag

SEQ ID NO: 1541073 - RNA, 14 nt, Human adenovirus B (HAdV-B)
caguacaggacagg

SEQ ID NO: 1541074 - RNA, 13 nt, Human adenovirus B (HAdV-B)
ccgacugcagaau

SEQ ID NO: 1541075 - RNA, 15 nt, Human adenovirus B (HAdV-B)
ucuagcaagacaguc

SEQ ID NO: 1541076 - RNA, 14 nt, Human adenovirus B (HAdV-B)
guuacauggcuccg

SEQ ID NO: 1541077 - RNA, 14 nt, Human adenovirus B (HAdV-B)
gagacgcuggugac

SEQ ID NO: 1541078 - RNA, 22 nt, Human adenovirus B (HAdV-B)
agcaauggggccgugggcagcg

SEQ ID NO: 1541079 - RNA, 16 nt, Human adenovirus B (HAdV-B)
ugggucuucuccuggg

SEQ ID NO: 1541080 - RNA, 16 nt, Human adenovirus B (HAdV-B)
augccuuucaugaggu

SEQ ID NO: 1541081 - RNA, 15 nt, Human adenovirus B (HAdV-B)
ccaugcuuagggcgg

SEQ ID NO: 1541082 - RNA, 16 nt, Human adenovirus B (HAdV-B)
gcucuauaucucccag

SEQ ID NO: 1541083 - RNA, 21 nt, Human adenovirus B (HAdV-B)
cuugcuggagugucacugccg

SEQ ID NO: 1541084 - RNA, 16 nt, Human adenovirus B (HAdV-B)
ugcguucgcucaccag

SEQ ID NO: 1541085 - RNA, 19 nt, Human adenovirus B (HAdV-B)
gaggaaaaggagcagagcu

SEQ ID NO: 1541086 - RNA, 21 nt, Human adenovirus B (HAdV-B)
cauaauauugccaugcaggca

SEQ ID NO: 1541087 - RNA, 13 nt, Human adenovirus B (HAdV-B)
aucuuccagcaga

SEQ ID NO: 1541088 - RNA, 20 nt, Human adenovirus B (HAdV-B)
gccgagaagguggcugccau

SEQ ID NO: 1541089 - RNA, 23 nt, Human adenovirus B (HAdV-B)
uggagcaguaucuggagcgggcu

SEQ ID NO: 1541090 - RNA, 22 nt, Human adenovirus B (HAdV-B)
uuacaaaagaaggacucccagu

SEQ ID NO: 1541091 - RNA, 12 nt, Human adenovirus B (HAdV-B)
uacauggcuccg

SEQ ID NO: 1541092 - RNA, 13 nt, Human adenovirus B (HAdV-B)
agacgagccuggg

SEQ ID NO: 1541093 - RNA, 20 nt, Human adenovirus B (HAdV-B)
aguacagcgggcacacaaag

SEQ ID NO: 1541094 - RNA, 16 nt, Human adenovirus B (HAdV-B)
aggcagaggaggugga

SEQ ID NO: 1541095 - RNA, 16 nt, Human adenovirus B (HAdV-B)
gaucaccugggcagcu

SEQ ID NO: 1541096 - RNA, 17 nt, Human adenovirus B (HAdV-B)
ugcgccuaauuggaagg

SEQ ID NO: 1541097 - RNA, 18 nt, Human adenovirus B (HAdV-B)
ugcagccaugaggccaca

SEQ ID NO: 1541098 - RNA, 15 nt, Human adenovirus B (HAdV-B)
agaugccugugauga

SEQ ID NO: 1541099 - RNA, 21 nt, Human adenovirus B (HAdV-B)
gugcugcacagcacccugaag

SEQ ID NO: 1541100 - RNA, 15 nt, Human adenovirus B (HAdV-B)
aguacucagccugcu

SEQ ID NO: 1541101 - RNA, 14 nt, Human adenovirus B (HAdV-B)
gcaaaucuggaaga

SEQ ID NO: 1541102 - RNA, 17 nt, Human adenovirus B (HAdV-B)
aauucaccaaugcaaaa

SEQ ID NO: 1541103 - RNA, 16 nt, Human adenovirus B (HAdV-B)
accuugacccccagac

SEQ ID NO: 1541104 - RNA, 21 nt, Human adenovirus B (HAdV-B)
ugagagccgaucgggaagaac

SEQ ID NO: 1541105 - RNA, 18 nt, Human adenovirus B (HAdV-B)
cggcaggcgccucccagg

SEQ ID NO: 1541106 - RNA, 20 nt, Human adenovirus B (HAdV-B)
aaccucccgacggugcugca

SEQ ID NO: 1541107 - RNA, 11 nt, Human adenovirus B (HAdV-B)
cuuuaaguuua

SEQ ID NO: 1541108 - RNA, 21 nt, Human adenovirus B (HAdV-B)
acacaucauaguuauguuccu

SEQ ID NO: 1541109 - RNA, 15 nt, Human adenovirus B (HAdV-B)
gacucgggccgcaaa

SEQ ID NO: 1541110 - RNA, 12 nt, Human adenovirus B (HAdV-B)
caauccccacug

SEQ ID NO: 1541111 - RNA, 21 nt, Human adenovirus B (HAdV-B)
ugcgccuucacccgagcggca

SEQ ID NO: 1541112 - RNA, 14 nt, Human adenovirus B (HAdV-B)
ccuugacccccaga

SEQ ID NO: 1541113 - RNA, 16 nt, Human adenovirus B (HAdV-B)
gcagagacaaugaggc

SEQ ID NO: 1541114 - RNA, 16 nt, Human adenovirus B (HAdV-B)
gcauacaugccacaga

SEQ ID NO: 1541115 - RNA, 12 nt, Human adenovirus B (HAdV-B)
uucgcugcuuug

SEQ ID NO: 1541116 - RNA, 22 nt, Human adenovirus B (HAdV-B)
agugcuguuuguaacugguccc

SEQ ID NO: 1541117 - RNA, 16 nt, Human adenovirus B (HAdV-B)
ccaugccuuucuccca

SEQ ID NO: 1541118 - RNA, 17 nt, Human adenovirus B (HAdV-B)
gaaucaccaacuuggga

SEQ ID NO: 1541119 - RNA, 21 nt, Human adenovirus B (HAdV-B)
ugcaacgaauuuucucccagc

SEQ ID NO: 1541120 - RNA, 17 nt, Human adenovirus B (HAdV-B)
gucugcgcgcuccaagc

SEQ ID NO: 1541121 - RNA, 19 nt, Human adenovirus B (HAdV-B)
cuugaauucgggaaucacc

SEQ ID NO: 1541122 - RNA, 18 nt, Human adenovirus B (HAdV-B)
uccggaagauuaccaccc

SEQ ID NO: 1541123 - RNA, 16 nt, Human adenovirus B (HAdV-B)
augcuuuuauaugcuu

SEQ ID NO: 1541124 - RNA, 21 nt, Human adenovirus B (HAdV-B)
cgcaucucaugacaugcagaa

SEQ ID NO: 1541125 - RNA, 13 nt, Human adenovirus B (HAdV-B)
ugguuugaugcau

SEQ ID NO: 1541126 - RNA, 17 nt, Human adenovirus B (HAdV-B)
augaucuggacuuggaa

SEQ ID NO: 1541127 - RNA, 17 nt, Human adenovirus B (HAdV-B)
uuccaucgagugcaccu

SEQ ID NO: 1541128 - RNA, 16 nt, Human adenovirus B (HAdV-B)
guauugcaggagaaau

SEQ ID NO: 1541129 - RNA, 22 nt, Human adenovirus B (HAdV-B)
aaccgucuaucggccaucaugg

SEQ ID NO: 1541130 - RNA, 20 nt, Human adenovirus B (HAdV-B)
aguuuacuuugccagaaggc

SEQ ID NO: 1541131 - RNA, 16 nt, Human adenovirus B (HAdV-B)
auauguggccuggggu

SEQ ID NO: 1541132 - RNA, 20 nt, Human adenovirus B (HAdV-B)
caacgaauuuucucccagcg

SEQ ID NO: 1541133 - RNA, 20 nt, Human adenovirus B (HAdV-B)
ccaaugaauuaaaaaaugau

SEQ ID NO: 1541134 - RNA, 20 nt, Human adenovirus B (HAdV-B)
cucaggauuuagaaacauau

SEQ ID NO: 1541135 - RNA, 16 nt, Human adenovirus B (HAdV-B)
caucacuuccaugccu

SEQ ID NO: 1541136 - RNA, 18 nt, Human adenovirus B (HAdV-B)
gcgucccgauuuggaaga

SEQ ID NO: 1541137 - RNA, 15 nt, Human adenovirus B (HAdV-B)
ugcugcuucucccag

SEQ ID NO: 1541138 - RNA, 15 nt, Human adenovirus B (HAdV-B)
cuuaacauuuaauuu

SEQ ID NO: 1541139 - RNA, 23 nt, Human adenovirus B (HAdV-B)
ucgcuuuuggaaccggguucugc

SEQ ID NO: 1541140 - RNA, 14 nt, Human adenovirus B (HAdV-B)
ucuccgcuccgagu

SEQ ID NO: 1541141 - RNA, 22 nt, Human adenovirus B (HAdV-B)
ccccuucuccggaucuccuggg

SEQ ID NO: 1541142 - RNA, 21 nt, Human adenovirus B (HAdV-B)
ccuggcaccuacggagggcag

SEQ ID NO: 1541143 - RNA, 18 nt, Human adenovirus B (HAdV-B)
cgaggaggcagaggaggu

SEQ ID NO: 1541144 - RNA, 16 nt, Human adenovirus B (HAdV-B)
ugcaggcacuucagcu

SEQ ID NO: 1541145 - RNA, 21 nt, Human adenovirus B (HAdV-B)
gcgcugccaggguucgguccu

SEQ ID NO: 1541146 - RNA, 13 nt, Human adenovirus B (HAdV-B)
ccucggugcuccu

SEQ ID NO: 1541147 - RNA, 22 nt, Human adenovirus B (HAdV-B)
aaucuucaugucuuucuuccca

SEQ ID NO: 1541148 - RNA, 22 nt, Human adenovirus B (HAdV-B)
uaacgagaaaaaacagccaaca

SEQ ID NO: 1541149 - RNA, 19 nt, Human adenovirus B (HAdV-B)
gacgaggaaaaggagcaga

SEQ ID NO: 1541150 - RNA, 20 nt, Human adenovirus B (HAdV-B)
augauuugcggugcuuccga

SEQ ID NO: 1541151 - RNA, 15 nt, Human adenovirus B (HAdV-B)
caaucaccacacgau

SEQ ID NO: 1541152 - RNA, 19 nt, Human adenovirus B (HAdV-B)
uacaguuucacuuccgcaa

SEQ ID NO: 1541153 - RNA, 21 nt, Human adenovirus B (HAdV-B)
cguuccugcucucacagauca

SEQ ID NO: 1541154 - RNA, 19 nt, Human adenovirus B (HAdV-B)
acagagucucugacaaagu

SEQ ID NO: 1541155 - RNA, 11 nt, Human adenovirus B (HAdV-B)
ugcagcacuga

SEQ ID NO: 1541156 - RNA, 21 nt, Human adenovirus B (HAdV-B)
caaacugcuggacuacuugca

SEQ ID NO: 1541157 - RNA, 15 nt, Human adenovirus B (HAdV-B)
ugccaagauagcuuu

SEQ ID NO: 1541158 - RNA, 16 nt, Human adenovirus B (HAdV-B)
cccaauuggcuccagc

SEQ ID NO: 1541159 - RNA, 16 nt, Human adenovirus B (HAdV-B)
cuucuuuugccauccu

SEQ ID NO: 1541160 - RNA, 20 nt, Human adenovirus B (HAdV-B)
uggcagcaauguuuagaaga

SEQ ID NO: 1541161 - RNA, 16 nt, Human adenovirus B (HAdV-B)
cugcacacuuacuuuu

SEQ ID NO: 1541162 - RNA, 20 nt, Human adenovirus B (HAdV-B)
aucguugucaaccagggggu

SEQ ID NO: 1541163 - RNA, 10 nt, Human adenovirus B (HAdV-B)
aaccccacua

SEQ ID NO: 1541164 - RNA, 21 nt, Human adenovirus B (HAdV-B)
ccuuuggguguagcgggaauc

SEQ ID NO: 1541165 - RNA, 13 nt, Human adenovirus B (HAdV-B)
ccugcugcuucuc

SEQ ID NO: 1541166 - RNA, 12 nt, Human adenovirus B (HAdV-B)
augugauuggcu

SEQ ID NO: 1541167 - RNA, 12 nt, Human adenovirus B (HAdV-B)
auugccacagcu

SEQ ID NO: 1541168 - RNA, 14 nt, Human adenovirus B (HAdV-B)
gcagcagcagcaau

SEQ ID NO: 1541169 - RNA, 19 nt, Human adenovirus B (HAdV-B)
ccguagacgcacaagcaaa

SEQ ID NO: 1541170 - RNA, 12 nt, Human adenovirus B (HAdV-B)
ucaccugggcag

SEQ ID NO: 1541171 - RNA, 14 nt, Human adenovirus B (HAdV-B)
gagacgagccuggg

SEQ ID NO: 1541172 - RNA, 16 nt, Human adenovirus B (HAdV-B)
gccaacugucaaauca

SEQ ID NO: 1541173 - RNA, 21 nt, Human adenovirus B (HAdV-B)
gaagauugggacagucaggca

SEQ ID NO: 1541174 - RNA, 13 nt, Human adenovirus B (HAdV-B)
accuccacugaag

SEQ ID NO: 1541175 - RNA, 17 nt, Human adenovirus B (HAdV-B)
accaguguaacaugaau

SEQ ID NO: 1541176 - RNA, 13 nt, Human adenovirus B (HAdV-B)
agauccugaggua

SEQ ID NO: 1541177 - RNA, 22 nt, Human adenovirus B (HAdV-B)
aucaagaaauuacccaagucag

SEQ ID NO: 1541178 - RNA, 19 nt, Human adenovirus B (HAdV-B)
uaacaauuuucgcucuuuc

SEQ ID NO: 1541179 - RNA, 13 nt, Human adenovirus B (HAdV-B)
caggcgacggcgg

SEQ ID NO: 1541180 - RNA, 14 nt, Human adenovirus B (HAdV-B)
cguaguugagcgcc

SEQ ID NO: 1541181 - RNA, 17 nt, Human adenovirus B (HAdV-B)
ccguucucgcuggccac

SEQ ID NO: 1541182 - RNA, 18 nt, Human adenovirus B (HAdV-B)
uacacaccuugcuucacu

SEQ ID NO: 1541183 - RNA, 12 nt, Human adenovirus B (HAdV-B)
agccggccugga

SEQ ID NO: 1541184 - RNA, 22 nt, Human adenovirus B (HAdV-B)
aaugagccuaacaggaauuuuu

SEQ ID NO: 1541185 - RNA, 16 nt, Human adenovirus B (HAdV-B)
gccaaagagcucagag

SEQ ID NO: 1541186 - RNA, 13 nt, Human adenovirus B (HAdV-B)
cugcgcacugccc

SEQ ID NO: 1541187 - RNA, 16 nt, Human adenovirus B (HAdV-B)
guuggauugccacagc

SEQ ID NO: 1541188 - RNA, 15 nt, Human adenovirus B (HAdV-B)
uucuuguagugagga

SEQ ID NO: 1541189 - RNA, 19 nt, Human adenovirus B (HAdV-B)
ggcgacggcggugaugcaa

SEQ ID NO: 1541190 - RNA, 18 nt, Human adenovirus B (HAdV-B)
uugcaugguuguagcuuu

SEQ ID NO: 1541191 - RNA, 23 nt, Human adenovirus B (HAdV-B)
uaguugccagcgacucuacaagg

SEQ ID NO: 1541192 - RNA, 17 nt, Human adenovirus B (HAdV-B)
ggcguccagcgcugcca

SEQ ID NO: 1541193 - RNA, 16 nt, Human adenovirus B (HAdV-B)
ccuguacauucccaau

SEQ ID NO: 1541194 - RNA, 18 nt, Human adenovirus B (HAdV-B)
gauuacagccaacgagcc

SEQ ID NO: 1541195 - RNA, 14 nt, Human adenovirus B (HAdV-B)
cuuuaugagccaga

SEQ ID NO: 1541196 - RNA, 12 nt, Human adenovirus B (HAdV-B)
gacccaggccau

SEQ ID NO: 1541197 - RNA, 17 nt, Human adenovirus B (HAdV-B)
uugacugaugucuugca

SEQ ID NO: 1541198 - RNA, 22 nt, Human adenovirus B (HAdV-B)
agcaggggacgcuacagugcag

SEQ ID NO: 1541199 - RNA, 13 nt, Human adenovirus B (HAdV-B)
uuacucccucugu

SEQ ID NO: 1541200 - RNA, 17 nt, Human adenovirus B (HAdV-B)
gcccucgcuuggguggu

SEQ ID NO: 1541201 - RNA, 23 nt, Human adenovirus B (HAdV-B)
ccuacauggguauucugcaugag

SEQ ID NO: 1541202 - RNA, 14 nt, Human adenovirus B (HAdV-B)
auucaaacaacauu

SEQ ID NO: 1541203 - RNA, 16 nt, Human adenovirus B (HAdV-B)
cgacaugaguaaagaa

SEQ ID NO: 1541204 - RNA, 16 nt, Human adenovirus B (HAdV-B)
agauacuggauguuuu

SEQ ID NO: 1541205 - RNA, 18 nt, Human adenovirus B (HAdV-B)
aggcucaaacugcacacu

SEQ ID NO: 1541206 - RNA, 22 nt, Human adenovirus B (HAdV-B)
guugcggaacugauacuugggu

SEQ ID NO: 1541207 - RNA, 17 nt, Human adenovirus B (HAdV-B)
aauccaauccacacauu

SEQ ID NO: 1541208 - RNA, 18 nt, Human adenovirus B (HAdV-B)
uccguucucgcuggccac

SEQ ID NO: 1541209 - RNA, 20 nt, Human adenovirus B (HAdV-B)
ugugggagggguagcgaucg

SEQ ID NO: 1541210 - RNA, 20 nt, Human adenovirus B (HAdV-B)
ggugcuaccgcggcugagcc

SEQ ID NO: 1541211 - RNA, 18 nt, Human adenovirus B (HAdV-B)
aaggcgcauugccagacg

SEQ ID NO: 1541212 - RNA, 17 nt, Human adenovirus B (HAdV-B)
uaacuuuuguaaauguu

SEQ ID NO: 1541213 - RNA, 17 nt, Human adenovirus B (HAdV-B)
gucacuuugcagcaagu

SEQ ID NO: 1541214 - RNA, 18 nt, Human adenovirus B (HAdV-B)
aagauguaaccugggcau

SEQ ID NO: 1541215 - RNA, 23 nt, Human adenovirus B (HAdV-B)
ugcacaugaucauccacaagacc

SEQ ID NO: 1541216 - RNA, 13 nt, Human adenovirus B (HAdV-B)
uguaagggcagca

SEQ ID NO: 1541217 - RNA, 18 nt, Human adenovirus B (HAdV-B)
cagucuccgauguugugu

SEQ ID NO: 1541218 - RNA, 13 nt, Human adenovirus B (HAdV-B)
uuggaagagaugg

SEQ ID NO: 1541219 - RNA, 12 nt, Human adenovirus B (HAdV-B)
ccgacucuccca

SEQ ID NO: 1541220 - RNA, 15 nt, Human adenovirus B (HAdV-B)
agucuguuccacagu

SEQ ID NO: 1541221 - RNA, 15 nt, Human adenovirus B (HAdV-B)
uaccuuuuacuacau

SEQ ID NO: 1541222 - RNA, 15 nt, Human adenovirus B (HAdV-B)
ucauccuuggcuccg

SEQ ID NO: 1541223 - RNA, 20 nt, Human adenovirus B (HAdV-B)
acguggaacucaccaaccug

SEQ ID NO: 1541224 - RNA, 13 nt, Human adenovirus B (HAdV-B)
ucaguguggaaga

SEQ ID NO: 1541225 - RNA, 16 nt, Human adenovirus B (HAdV-B)
accggggugaugaaac

SEQ ID NO: 1541226 - RNA, 18 nt, Human adenovirus B (HAdV-B)
gaugagcgaaacccagau

SEQ ID NO: 1541227 - RNA, 23 nt, Human adenovirus B (HAdV-B)
ccacaacccccacuacucccugc

SEQ ID NO: 1541228 - RNA, 18 nt, Human adenovirus B (HAdV-B)
cuaccgucaccuccacag

SEQ ID NO: 1541229 - RNA, 19 nt, Human adenovirus B (HAdV-B)
aggacaaagcgugcugcac

SEQ ID NO: 1541230 - RNA, 11 nt, Human adenovirus B (HAdV-B)
ggaggcagagg

SEQ ID NO: 1541231 - RNA, 22 nt, Human adenovirus B (HAdV-B)
caagugcagcaacaggaggauu

SEQ ID NO: 1541232 - RNA, 23 nt, Human adenovirus B (HAdV-B)
uuuggggucuggauuugaccccu

SEQ ID NO: 1541233 - RNA, 13 nt, Human adenovirus B (HAdV-B)
ucugagacagaca

SEQ ID NO: 1541234 - RNA, 22 nt, Human adenovirus B (HAdV-B)
cgagucaguggacggcuacgau

SEQ ID NO: 1541235 - RNA, 20 nt, Human adenovirus B (HAdV-B)
gcacagcuagaucaaaagaa

SEQ ID NO: 1541236 - RNA, 16 nt, Human adenovirus B (HAdV-B)
cucccaagcagacacc

SEQ ID NO: 1541237 - RNA, 20 nt, Human adenovirus B (HAdV-B)
guaucauucccugcagaaau

SEQ ID NO: 1541238 - RNA, 21 nt, Human adenovirus B (HAdV-B)
ggggcaacuccgacugcagca

SEQ ID NO: 1541239 - RNA, 16 nt, Human adenovirus B (HAdV-B)
guucgcucaccagaag

SEQ ID NO: 1541240 - RNA, 18 nt, Human adenovirus B (HAdV-B)
caguaacuacccuguggu

SEQ ID NO: 1541241 - RNA, 19 nt, Human adenovirus B (HAdV-B)
caaaagaaggacucccagu

SEQ ID NO: 1541242 - RNA, 14 nt, Human adenovirus B (HAdV-B)
uguuaacuguucac

SEQ ID NO: 1541243 - RNA, 23 nt, Human adenovirus B (HAdV-B)
uggcugggcaccgacucucccag

SEQ ID NO: 1541244 - RNA, 20 nt, Human adenovirus B (HAdV-B)
ggauucuuaacagugcaggc

SEQ ID NO: 1541245 - RNA, 18 nt, Human adenovirus B (HAdV-B)
ugaugaacaaugccauca

SEQ ID NO: 1541246 - RNA, 15 nt, Human adenovirus B (HAdV-B)
cgagggucugggcaa

SEQ ID NO: 1541247 - RNA, 15 nt, Human adenovirus B (HAdV-B)
uggcaguuuggaagc

SEQ ID NO: 1541248 - RNA, 15 nt, Human adenovirus B (HAdV-B)
ugcgggacagcccgc

SEQ ID NO: 1541249 - RNA, 20 nt, Human adenovirus B (HAdV-B)
caggcauuaguuuaaaagag

SEQ ID NO: 1541250 - RNA, 13 nt, Human adenovirus B (HAdV-B)
ccauguuaauuuu

SEQ ID NO: 1541251 - RNA, 17 nt, Human adenovirus B (HAdV-B)
cacagcuuucuggucag

SEQ ID NO: 1541252 - RNA, 18 nt, Human adenovirus B (HAdV-B)
ucuugcuugacucucugg

SEQ ID NO: 1541253 - RNA, 14 nt, Human adenovirus B (HAdV-B)
cagggcucugagcg

SEQ ID NO: 1541254 - RNA, 13 nt, Human adenovirus B (HAdV-B)
cggcgucccagca

SEQ ID NO: 1541255 - RNA, 16 nt, Human adenovirus B (HAdV-B)
gaguucauaccgaacu

SEQ ID NO: 1541256 - RNA, 21 nt, Human adenovirus B (HAdV-B)
cgaggaaaaggagcagagcuu

SEQ ID NO: 1541257 - RNA, 13 nt, Human adenovirus B (HAdV-B)
cggcucugggcau

SEQ ID NO: 1541258 - RNA, 19 nt, Human adenovirus B (HAdV-B)
aggacaggcgcuuagaaau

SEQ ID NO: 1541259 - RNA, 15 nt, Human adenovirus B (HAdV-B)
uccugcaccauuccc

SEQ ID NO: 1541260 - RNA, 13 nt, Human adenovirus B (HAdV-B)
caggcagaggagg

SEQ ID NO: 1541261 - RNA, 14 nt, Human adenovirus B (HAdV-B)
agcuuaccuuugga

SEQ ID NO: 1541262 - RNA, 20 nt, Human adenovirus B (HAdV-B)
acagugcaggcagcagcucc

SEQ ID NO: 1541263 - RNA, 19 nt, Human adenovirus B (HAdV-B)
aagugcagcaacaggagga

SEQ ID NO: 1541264 - RNA, 23 nt, Human adenovirus B (HAdV-B)
uccuaggcagagaaacaacagac

SEQ ID NO: 1541265 - RNA, 20 nt, Human adenovirus B (HAdV-B)
acuggcaguuuggaagccac

SEQ ID NO: 1541266 - RNA, 17 nt, Human adenovirus B (HAdV-B)
cagcgugaugccaaccu

SEQ ID NO: 1541267 - RNA, 22 nt, Human adenovirus B (HAdV-B)
accaaaauaucgcggcacuucu

SEQ ID NO: 1541268 - RNA, 16 nt, Human adenovirus B (HAdV-B)
agaucugaguuggcuu

SEQ ID NO: 1541269 - RNA, 20 nt, Human adenovirus B (HAdV-B)
cugucaaaucaugaacucca

SEQ ID NO: 1541270 - RNA, 15 nt, Human adenovirus B (HAdV-B)
ucaaugauugcaauu

SEQ ID NO: 1541271 - RNA, 13 nt, Human adenovirus B (HAdV-B)
uauagcaaagcca

SEQ ID NO: 1541272 - RNA, 20 nt, Human adenovirus B (HAdV-B)
aaagaauguaucauucccug

SEQ ID NO: 1541273 - RNA, 21 nt, Human adenovirus B (HAdV-B)
agcaagauguacggaggcgca

SEQ ID NO: 1541274 - RNA, 20 nt, Human adenovirus B (HAdV-B)
aagauucccacugaaaguau

SEQ ID NO: 1541275 - RNA, 20 nt, Human adenovirus B (HAdV-B)
ggucuuuacacccggcgagc

SEQ ID NO: 1541276 - RNA, 17 nt, Human adenovirus B (HAdV-B)
uaccugauauagcuucc

SEQ ID NO: 1541277 - RNA, 13 nt, Human adenovirus B (HAdV-B)
aggcagaggaggc

SEQ ID NO: 1541278 - RNA, 22 nt, Human adenovirus B (HAdV-B)
cagagucggggucaagagcagg

SEQ ID NO: 1541279 - RNA, 16 nt, Human adenovirus B (HAdV-B)
agauaauuacuugaaa

SEQ ID NO: 1541280 - RNA, 17 nt, Human adenovirus B (HAdV-B)
accucccaacaccccuu

SEQ ID NO: 1541281 - RNA, 11 nt, Human adenovirus B (HAdV-B)
aaccugacccc

SEQ ID NO: 1541282 - RNA, 13 nt, Human adenovirus B (HAdV-B)
aaaauaaacuuug

SEQ ID NO: 1541283 - RNA, 13 nt, Human adenovirus B (HAdV-B)
acccagggggcaa

SEQ ID NO: 1541284 - RNA, 17 nt, Human adenovirus B (HAdV-B)
aaguacgucuagggcgc

SEQ ID NO: 1541285 - RNA, 23 nt, Human adenovirus B (HAdV-B)
ucagaugucaccugcggagcaga

SEQ ID NO: 1541286 - RNA, 13 nt, Human adenovirus B (HAdV-B)
aagaggcggauga

SEQ ID NO: 1541287 - RNA, 15 nt, Human adenovirus B (HAdV-B)
uggaaguuuucuugc

SEQ ID NO: 1541288 - RNA, 17 nt, Human adenovirus B (HAdV-B)
ucuggggguacaaacug

SEQ ID NO: 1541289 - RNA, 13 nt, Human adenovirus B (HAdV-B)
cuugggacagaau

SEQ ID NO: 1541290 - RNA, 12 nt, Human adenovirus B (HAdV-B)
cuuaccuuuggu

SEQ ID NO: 1541291 - RNA, 20 nt, Human adenovirus B (HAdV-B)
gcacauagucauauaguuca

SEQ ID NO: 1541292 - RNA, 16 nt, Human adenovirus B (HAdV-B)
ccaugcaugcaggugg

SEQ ID NO: 1541293 - RNA, 19 nt, Human adenovirus B (HAdV-B)
gcauuguggagaacaugga

SEQ ID NO: 1541294 - RNA, 19 nt, Human adenovirus B (HAdV-B)
gaugggugcauucggggug

SEQ ID NO: 1541295 - RNA, 17 nt, Human adenovirus B (HAdV-B)
ccaguguaacaugaauc

SEQ ID NO: 1541296 - RNA, 17 nt, Human adenovirus B (HAdV-B)
gcaccgacucucccagg

SEQ ID NO: 1541297 - RNA, 14 nt, Human adenovirus B (HAdV-B)
uucacucaaaucuu

SEQ ID NO: 1541298 - RNA, 18 nt, Human adenovirus B (HAdV-B)
cagguuguaucuggugga

SEQ ID NO: 1541299 - RNA, 14 nt, Human adenovirus B (HAdV-B)
gugcggcaggcaug

SEQ ID NO: 1541300 - RNA, 22 nt, Human adenovirus B (HAdV-B)
ugauggauauguggccuggggu

SEQ ID NO: 1541301 - RNA, 22 nt, Human adenovirus B (HAdV-B)
ugaugaaggauccugucacuuu

SEQ ID NO: 1541302 - RNA, 15 nt, Human adenovirus B (HAdV-B)
cugucgcuuggcgcc

SEQ ID NO: 1541303 - RNA, 15 nt, Human adenovirus B (HAdV-B)
cgaggaggaagaggg

SEQ ID NO: 1541304 - RNA, 17 nt, Human adenovirus B (HAdV-B)
ccugcccgccaccugcu

SEQ ID NO: 1541305 - RNA, 17 nt, Human adenovirus B (HAdV-B)
acgcauccgccagcagc

SEQ ID NO: 1541306 - RNA, 16 nt, Human adenovirus B (HAdV-B)
agagcgucgcaagcuu

SEQ ID NO: 1541307 - RNA, 22 nt, Human adenovirus B (HAdV-B)
aacuggauuuccugccaccagu

SEQ ID NO: 1541308 - RNA, 16 nt, Human adenovirus B (HAdV-B)
ucauccaaauucacca

SEQ ID NO: 1541309 - RNA, 20 nt, Human adenovirus B (HAdV-B)
ggcacacguggcugcagcca

SEQ ID NO: 1541310 - RNA, 15 nt, Human adenovirus B (HAdV-B)
uuaauaaaaacugaa

SEQ ID NO: 1541311 - RNA, 19 nt, Human adenovirus B (HAdV-B)
caaaccucugcuacaaccc

SEQ ID NO: 1541312 - RNA, 23 nt, Human adenovirus B (HAdV-B)
aacuuauauugcaugguuguagc

SEQ ID NO: 1541313 - RNA, 16 nt, Human adenovirus B (HAdV-B)
cagaagauauggagga

SEQ ID NO: 1541314 - RNA, 19 nt, Human adenovirus B (HAdV-B)
auuccacauuccaaacagu

SEQ ID NO: 1541315 - RNA, 20 nt, Human adenovirus B (HAdV-B)
ccagggcacacguggcugca

SEQ ID NO: 1541316 - RNA, 23 nt, Human adenovirus B (HAdV-B)
gucaugccagcgguucuggagga

SEQ ID NO: 1541317 - RNA, 22 nt, Human adenovirus B (HAdV-B)
ugcgcccccaacaacagccccc

SEQ ID NO: 1541318 - RNA, 16 nt, Human adenovirus B (HAdV-B)
aaccaggggguccacc

SEQ ID NO: 1541319 - RNA, 19 nt, Human adenovirus B (HAdV-B)
cuccaacauuguuaguuuu

SEQ ID NO: 1541320 - RNA, 21 nt, Human adenovirus B (HAdV-B)
uaugcucaggaucacagagac

SEQ ID NO: 1541321 - RNA, 15 nt, Human adenovirus B (HAdV-B)
gguggacaacaaguc

SEQ ID NO: 1541322 - RNA, 13 nt, Human adenovirus B (HAdV-B)
gaugugagcuucc

SEQ ID NO: 1541323 - RNA, 12 nt, Human adenovirus B (HAdV-B)
cugccccauggc

SEQ ID NO: 1541324 - RNA, 23 nt, Human adenovirus B (HAdV-B)
ugcuaccuguuccgucuggccaa

SEQ ID NO: 1541325 - RNA, 14 nt, Human adenovirus B (HAdV-B)
cugggcgacagaac

SEQ ID NO: 1541326 - RNA, 15 nt, Human adenovirus B (HAdV-B)
ggaacagcaagagga

SEQ ID NO: 1541327 - RNA, 23 nt, Human adenovirus B (HAdV-B)
ugcgccugcuugggcgcuugcca

SEQ ID NO: 1541328 - RNA, 20 nt, Human adenovirus B (HAdV-B)
ugcaaauuaauucuaacacu

SEQ ID NO: 1541329 - RNA, 16 nt, Human adenovirus B (HAdV-B)
aauugcaaggccccag

SEQ ID NO: 1541330 - RNA, 15 nt, Human adenovirus B (HAdV-B)
aagauucuugaagcu

SEQ ID NO: 1541331 - RNA, 16 nt, Human adenovirus B (HAdV-B)
gacagucaggcagagg

SEQ ID NO: 1541332 - RNA, 17 nt, Human adenovirus B (HAdV-B)
cacuagucacugcauuu

SEQ ID NO: 1541333 - RNA, 20 nt, Human adenovirus B (HAdV-B)
uacuuuuauauuagauaaau

SEQ ID NO: 1541334 - RNA, 15 nt, Human adenovirus B (HAdV-B)
gaagccguacauggg

SEQ ID NO: 1541335 - RNA, 15 nt, Human adenovirus B (HAdV-B)
accuuuggaaguuuu

SEQ ID NO: 1541336 - RNA, 18 nt, Human adenovirus B (HAdV-B)
aauugagauuugccacau

SEQ ID NO: 1541337 - RNA, 13 nt, Human adenovirus B (HAdV-B)
ucaucuucccaga

SEQ ID NO: 1541338 - RNA, 13 nt, Human adenovirus B (HAdV-B)
ugcaggcagcagc

SEQ ID NO: 1541339 - RNA, 15 nt, Human adenovirus B (HAdV-B)
ccccucccccugcug

SEQ ID NO: 1541340 - RNA, 16 nt, Human adenovirus B (HAdV-B)
uuuggaccgaagacga

SEQ ID NO: 1541341 - RNA, 21 nt, Human adenovirus B (HAdV-B)
ugaacaccaaucaugguaccu

SEQ ID NO: 1541342 - RNA, 12 nt, Human adenovirus B (HAdV-B)
acuuggaagagg

SEQ ID NO: 1541343 - RNA, 14 nt, Human adenovirus B (HAdV-B)
gugucaccuguagc

SEQ ID NO: 1541344 - RNA, 16 nt, Human adenovirus B (HAdV-B)
uggacccaggccaugc

SEQ ID NO: 1541345 - RNA, 12 nt, Human adenovirus B (HAdV-B)
ucccuggcuccu

SEQ ID NO: 1541346 - RNA, 23 nt, Human adenovirus B (HAdV-B)
gugguugacuugcaggacagaaa

SEQ ID NO: 1541347 - RNA, 21 nt, Human adenovirus B (HAdV-B)
aaaccauuugguggcaugagg

SEQ ID NO: 1541348 - RNA, 18 nt, Human adenovirus B (HAdV-B)
cgagagcgugaugcagca

SEQ ID NO: 1541349 - RNA, 20 nt, Human adenovirus B (HAdV-B)
ucauccuggaacgcuccggu

SEQ ID NO: 1541350 - RNA, 15 nt, Human adenovirus B (HAdV-B)
guaucaaggcucugc

SEQ ID NO: 1541351 - RNA, 20 nt, Human adenovirus B (HAdV-B)
cuuugugccucucaccuacc

SEQ ID NO: 1541352 - RNA, 19 nt, Human adenovirus B (HAdV-B)
ccaacaccgcucccccagc

SEQ ID NO: 1541353 - RNA, 15 nt, Human adenovirus B (HAdV-B)
caaacgucagccaaa

SEQ ID NO: 1541354 - RNA, 17 nt, Human adenovirus B (HAdV-B)
cugcugcuucucccagg

SEQ ID NO: 1541355 - RNA, 16 nt, Human adenovirus B (HAdV-B)
agaacgaaacuuuucc

SEQ ID NO: 1541356 - RNA, 21 nt, Human adenovirus B (HAdV-B)
ucagagcgagccaaucugggg

SEQ ID NO: 1541357 - RNA, 18 nt, Human adenovirus B (HAdV-B)
agaacaccgacuaccuca

SEQ ID NO: 1541358 - RNA, 20 nt, Human adenovirus B (HAdV-B)
cagaaccaagagucaauugu

SEQ ID NO: 1541359 - RNA, 14 nt, Human adenovirus B (HAdV-B)
cuugaaagugggua

SEQ ID NO: 1541360 - RNA, 14 nt, Human adenovirus B (HAdV-B)
gaguacuuggaaga

SEQ ID NO: 1541361 - RNA, 22 nt, Human adenovirus B (HAdV-B)
caaugcugaacggggucaucuu

SEQ ID NO: 1541362 - RNA, 18 nt, Human adenovirus B (HAdV-B)
ucccgacgaaaguacggu

SEQ ID NO: 1541363 - RNA, 18 nt, Human adenovirus B (HAdV-B)
acagcuagaucaaaagaa

SEQ ID NO: 1541364 - RNA, 15 nt, Human adenovirus B (HAdV-B)
uaacagugcaggcag

SEQ ID NO: 1541365 - RNA, 13 nt, Human adenovirus B (HAdV-B)
guccuuucaagcc

SEQ ID NO: 1541366 - RNA, 18 nt, Human adenovirus B (HAdV-B)
cggaggaggacagucugg

SEQ ID NO: 1541367 - RNA, 18 nt, Human adenovirus B (HAdV-B)
cucaguggauugcagaag

SEQ ID NO: 1541368 - RNA, 19 nt, Human adenovirus B (HAdV-B)
cccaacaacagccccccuc

SEQ ID NO: 1541369 - RNA, 19 nt, Human adenovirus B (HAdV-B)
caggccucuucuccagugg

SEQ ID NO: 1541370 - RNA, 11 nt, Human adenovirus B (HAdV-B)
cuccaagcaag

SEQ ID NO: 1541371 - RNA, 22 nt, Human adenovirus B (HAdV-B)
cugccaggguucgguccuucca

SEQ ID NO: 1541372 - RNA, 15 nt, Human adenovirus B (HAdV-B)
cuugguuugaugcau

SEQ ID NO: 1541373 - RNA, 20 nt, Human adenovirus B (HAdV-B)
uccccaaauggcuucacaca

SEQ ID NO: 1541374 - RNA, 19 nt, Human adenovirus B (HAdV-B)
ucaaaugcucacuugugcu

SEQ ID NO: 1541375 - RNA, 21 nt, Human adenovirus B (HAdV-B)
aauugcaaggccccagcagcc

SEQ ID NO: 1541376 - RNA, 12 nt, Human adenovirus B (HAdV-B)
uaaucccagaaa

SEQ ID NO: 1541377 - RNA, 13 nt, Human adenovirus B (HAdV-B)
aauacaauuucca

SEQ ID NO: 1541378 - RNA, 20 nt, Human adenovirus B (HAdV-B)
ccgacuuugugccucucacc

SEQ ID NO: 1541379 - RNA, 17 nt, Human adenovirus B (HAdV-B)
uguaaauguuaaguuua

SEQ ID NO: 1541380 - RNA, 13 nt, Human adenovirus B (HAdV-B)
gcguguuggauug

SEQ ID NO: 1541381 - RNA, 17 nt, Human adenovirus B (HAdV-B)
uaaccccacuaacaacc

SEQ ID NO: 1541382 - RNA, 23 nt, Human adenovirus B (HAdV-B)
aagggagaaaauggcauggauga

SEQ ID NO: 1541383 - RNA, 12 nt, Human adenovirus B (HAdV-B)
ggccgguaacgc

SEQ ID NO: 1541384 - RNA, 21 nt, Human adenovirus B (HAdV-B)
gcgaguuugcuuauggcaagc

SEQ ID NO: 1541385 - RNA, 17 nt, Human adenovirus B (HAdV-B)
ugaucaugccuggagug

SEQ ID NO: 1541386 - RNA, 18 nt, Human adenovirus B (HAdV-B)
augaauuaaaaaaugauu

SEQ ID NO: 1541387 - RNA, 14 nt, Human adenovirus B (HAdV-B)
ccacacgauccaca

SEQ ID NO: 1541388 - RNA, 22 nt, Human adenovirus B (HAdV-B)
ccaucgugaacgcguuggugga

SEQ ID NO: 1541389 - RNA, 18 nt, Human adenovirus B (HAdV-B)
aagugccaccacaccacu

SEQ ID NO: 1541390 - RNA, 22 nt, Human adenovirus B (HAdV-B)
gucgacgcugaguuacuuucaa

SEQ ID NO: 1541391 - RNA, 12 nt, Human adenovirus B (HAdV-B)
aguggaggaggc

SEQ ID NO: 1541392 - RNA, 13 nt, Human adenovirus B (HAdV-B)
uuggcuccagcaa

SEQ ID NO: 1541393 - RNA, 18 nt, Human adenovirus B (HAdV-B)
agaauaaaaaauauaauu

SEQ ID NO: 1541394 - RNA, 19 nt, Human adenovirus B (HAdV-B)
cgcccucaagggccgcacu

SEQ ID NO: 1541395 - RNA, 14 nt, Human adenovirus B (HAdV-B)
aauuucuuuuuaua

SEQ ID NO: 1541396 - RNA, 20 nt, Human adenovirus B (HAdV-B)
cuucagcgcacucucgagga

SEQ ID NO: 1541397 - RNA, 12 nt, Human adenovirus B (HAdV-B)
uucacagcagua

SEQ ID NO: 1541398 - RNA, 19 nt, Human adenovirus B (HAdV-B)
aagaucccgacgaaaguac

SEQ ID NO: 1541399 - RNA, 20 nt, Human adenovirus B (HAdV-B)
gcuaugaacucugauuauuu

SEQ ID NO: 1541400 - RNA, 15 nt, Human adenovirus B (HAdV-B)
caauuggcuccagca

SEQ ID NO: 1541401 - RNA, 16 nt, Human adenovirus B (HAdV-B)
uccgaacucccgccua

SEQ ID NO: 1541402 - RNA, 17 nt, Human adenovirus B (HAdV-B)
cucuucgggggcagagg

SEQ ID NO: 1541403 - RNA, 21 nt, Human adenovirus B (HAdV-B)
agaaaucucuuaagguucugu

SEQ ID NO: 1541404 - RNA, 20 nt, Human adenovirus B (HAdV-B)
gaauugcaaggccccagcag

SEQ ID NO: 1541405 - RNA, 19 nt, Human adenovirus B (HAdV-B)
uccaacagaaaaccagcag

SEQ ID NO: 1541406 - RNA, 20 nt, Human adenovirus B (HAdV-B)
ugaaagcaucauauugcuug

SEQ ID NO: 1541407 - RNA, 16 nt, Human adenovirus B (HAdV-B)
cgccacgagugccauc

SEQ ID NO: 1541408 - RNA, 12 nt, Human adenovirus B (HAdV-B)
auagccacagca

SEQ ID NO: 1541409 - RNA, 15 nt, Human adenovirus B (HAdV-B)
ucaugccuggagugu

SEQ ID NO: 1541410 - RNA, 22 nt, Human adenovirus B (HAdV-B)
cggauucuuaacagugcaggca

SEQ ID NO: 1541411 - RNA, 15 nt, Human adenovirus B (HAdV-B)
agccugggaucaugg

SEQ ID NO: 1541412 - RNA, 14 nt, Human adenovirus B (HAdV-B)
gauaugugcagcag

SEQ ID NO: 1541413 - RNA, 17 nt, Human adenovirus B (HAdV-B)
ggaaaaggagcagagcu

SEQ ID NO: 1541414 - RNA, 21 nt, Human adenovirus B (HAdV-B)
gaccuccaacagaaaaccagc

SEQ ID NO: 1541415 - RNA, 23 nt, Human adenovirus B (HAdV-B)
gccugcaacgaauuuucucccag

SEQ ID NO: 1541416 - RNA, 20 nt, Human adenovirus B (HAdV-B)
cgggccgcaaaugcucugca

SEQ ID NO: 1541417 - RNA, 15 nt, Human adenovirus B (HAdV-B)
uuuaacuuguuuauu

SEQ ID NO: 1541418 - RNA, 16 nt, Human adenovirus B (HAdV-B)
cuggacuuggaagagg

SEQ ID NO: 1541419 - RNA, 24 nt, Human adenovirus B (HAdV-B)
gccagcacccagaccauuaacuuu

SEQ ID NO: 1541420 - RNA, 11 nt, Human adenovirus B (HAdV-B)
aaaccuucuca

SEQ ID NO: 1541421 - RNA, 14 nt, Human adenovirus B (HAdV-B)
ccuucaccccucgu

SEQ ID NO: 1541422 - RNA, 19 nt, Human adenovirus B (HAdV-B)
uaaccccacuaacaaccac

SEQ ID NO: 1541423 - RNA, 18 nt, Human adenovirus B (HAdV-B)
aagguucccucaggaugu

SEQ ID NO: 1541424 - RNA, 13 nt, Human adenovirus B (HAdV-B)
gcuuauugcuugu

SEQ ID NO: 1541425 - RNA, 21 nt, Human adenovirus B (HAdV-B)
augauuaauaaaaaaucacuu

SEQ ID NO: 1541426 - RNA, 13 nt, Human adenovirus B (HAdV-B)
cugugccagaagu

SEQ ID NO: 1541427 - RNA, 14 nt, Human adenovirus B (HAdV-B)
uuggaacagcagua

SEQ ID NO: 1541428 - RNA, 19 nt, Human adenovirus B (HAdV-B)
ggguuuauuuccccaaaug

SEQ ID NO: 1541429 - RNA, 21 nt, Human adenovirus B (HAdV-B)
gugccuccgcgauaccuggca

SEQ ID NO: 1541430 - RNA, 18 nt, Human adenovirus B (HAdV-B)
caugcuucuggguaacgg

SEQ ID NO: 1541431 - RNA, 15 nt, Human adenovirus B (HAdV-B)
ugcaacacagcagag

SEQ ID NO: 1541432 - RNA, 19 nt, Human adenovirus B (HAdV-B)
aucccggcagucucgacag

SEQ ID NO: 1541433 - RNA, 19 nt, Human adenovirus B (HAdV-B)
gcugccaccggucaacgug

SEQ ID NO: 1541434 - RNA, 20 nt, Human adenovirus B (HAdV-B)
caagugcagcaacaggagga

SEQ ID NO: 1541435 - RNA, 19 nt, Human adenovirus B (HAdV-B)
gcugggcaccgacucuccc

SEQ ID NO: 1541436 - RNA, 13 nt, Human adenovirus B (HAdV-B)
ugagaauuggaag

SEQ ID NO: 1541437 - RNA, 20 nt, Human adenovirus B (HAdV-B)
ugaugauagcaaauuucuga

SEQ ID NO: 1541438 - RNA, 15 nt, Human adenovirus B (HAdV-B)
ccacaacccccacua

SEQ ID NO: 1541439 - RNA, 19 nt, Human adenovirus B (HAdV-B)
gggcacccaauuaggcuug

SEQ ID NO: 1541440 - RNA, 18 nt, Human adenovirus B (HAdV-B)
aaguuuaaaacugacccc

SEQ ID NO: 1541441 - RNA, 12 nt, Human adenovirus B (HAdV-B)
gccagaggguca

SEQ ID NO: 1541442 - RNA, 17 nt, Human adenovirus B (HAdV-B)
acuacaccgcuuuucca

SEQ ID NO: 1541443 - RNA, 21 nt, Human adenovirus B (HAdV-B)
caccgucgcuuccgaccuggc

SEQ ID NO: 1541444 - RNA, 22 nt, Human adenovirus B (HAdV-B)
cacacguggcugcagccaaccu

SEQ ID NO: 1541445 - RNA, 16 nt, Human adenovirus B (HAdV-B)
aacaaccaguuacaaa

SEQ ID NO: 1541446 - RNA, 16 nt, Human adenovirus B (HAdV-B)
uugggcgcuugccagg

SEQ ID NO: 1541447 - RNA, 19 nt, Human adenovirus B (HAdV-B)
cuucuccggaucuccuggg

SEQ ID NO: 1541448 - RNA, 21 nt, Human adenovirus B (HAdV-B)
uacuaagaugaaaccaugcua

SEQ ID NO: 1541449 - RNA, 15 nt, Human adenovirus B (HAdV-B)
caccguuucuggggc

SEQ ID NO: 1541450 - RNA, 21 nt, Human adenovirus B (HAdV-B)
uccagaagcauuuucccuacu

SEQ ID NO: 1541451 - RNA, 21 nt, Human adenovirus B (HAdV-B)
cggcgaggauguccaagcgca

SEQ ID NO: 1541452 - RNA, 12 nt, Human adenovirus B (HAdV-B)
agucgcagggcu

SEQ ID NO: 1541453 - RNA, 19 nt, Human adenovirus B (HAdV-B)
cugcaaccauggccugcgg

SEQ ID NO: 1541454 - RNA, 13 nt, Human adenovirus B (HAdV-B)
acgcucuucuccu

SEQ ID NO: 1541455 - RNA, 17 nt, Human adenovirus B (HAdV-B)
caaauucaccaaugcaa

SEQ ID NO: 1541456 - RNA, 19 nt, Human adenovirus B (HAdV-B)
ucgaggucacacacuucgc

SEQ ID NO: 1541457 - RNA, 12 nt, Human adenovirus B (HAdV-B)
aucgcagugcag

SEQ ID NO: 1541458 - RNA, 15 nt, Human adenovirus B (HAdV-B)
aauuacuugaaagug

SEQ ID NO: 1541459 - RNA, 17 nt, Human adenovirus B (HAdV-B)
aucuaacguggaacuca

SEQ ID NO: 1541460 - RNA, 19 nt, Human adenovirus B (HAdV-B)
gugcgcgaguuugccccac

SEQ ID NO: 1541461 - RNA, 13 nt, Human adenovirus B (HAdV-B)
cagauucaaugau

SEQ ID NO: 1541462 - RNA, 13 nt, Human adenovirus B (HAdV-B)
ugcagaacaguaa

SEQ ID NO: 1541463 - RNA, 21 nt, Human adenovirus B (HAdV-B)
guuuuggagaaaguaaaagug

SEQ ID NO: 1541464 - RNA, 18 nt, Human adenovirus B (HAdV-B)
ucagaccgucagccaugg

SEQ ID NO: 1541465 - RNA, 16 nt, Human adenovirus B (HAdV-B)
uaaaaccugucaucau

SEQ ID NO: 1541466 - RNA, 23 nt, Human adenovirus B (HAdV-B)
ccaacucuugcuugacucucugg

SEQ ID NO: 1541467 - RNA, 19 nt, Human adenovirus B (HAdV-B)
aggccccagcagccaaggc

SEQ ID NO: 1541468 - RNA, 14 nt, Human adenovirus B (HAdV-B)
gugcacgccccacc

SEQ ID NO: 1541469 - RNA, 15 nt, Human adenovirus B (HAdV-B)
uacaaagacuucaag

SEQ ID NO: 1541470 - RNA, 19 nt, Human adenovirus B (HAdV-B)
gaugcaauccccacuggag

SEQ ID NO: 1541471 - RNA, 12 nt, Human adenovirus B (HAdV-B)
aaacaacauuug

SEQ ID NO: 1541472 - RNA, 22 nt, Human adenovirus B (HAdV-B)
uugcaaggccccagcagccaag

SEQ ID NO: 1541473 - RNA, 16 nt, Human adenovirus B (HAdV-B)
aggaggcggaggagga

SEQ ID NO: 1541474 - RNA, 13 nt, Human adenovirus B (HAdV-B)
uagugcaggagcg

SEQ ID NO: 1541475 - RNA, 21 nt, Human adenovirus B (HAdV-B)
cgcgcuaaucgcacccgcgcc

SEQ ID NO: 1541476 - RNA, 21 nt, Human adenovirus B (HAdV-B)
cuugaaagagcuugacaagcu

SEQ ID NO: 1541477 - RNA, 18 nt, Human adenovirus B (HAdV-B)
uuugaagcucuuaauuug

SEQ ID NO: 1541478 - RNA, 20 nt, Human adenovirus B (HAdV-B)
caagcguaguagaauaacuu

SEQ ID NO: 1541479 - RNA, 13 nt, Human adenovirus B (HAdV-B)
cagucaggcagag

SEQ ID NO: 1541480 - RNA, 12 nt, Human adenovirus B (HAdV-B)
auguggccuggg

SEQ ID NO: 1541481 - RNA, 12 nt, Human adenovirus B (HAdV-B)
aauaugcuggcu

SEQ ID NO: 1541482 - RNA, 21 nt, Human adenovirus B (HAdV-B)
caagaaguugaaggugcagcc

SEQ ID NO: 1541483 - RNA, 13 nt, Human adenovirus B (HAdV-B)
uuacaucucucau

SEQ ID NO: 1541484 - RNA, 19 nt, Human adenovirus B (HAdV-B)
auugucucugaagaaaugc

SEQ ID NO: 1541485 - RNA, 16 nt, Human adenovirus B (HAdV-B)
caacucccuggcuccu

SEQ ID NO: 1541486 - RNA, 14 nt, Human adenovirus B (HAdV-B)
uagcuugcaacccc

SEQ ID NO: 1541487 - RNA, 21 nt, Human adenovirus B (HAdV-B)
agcaacagcgcuaccaucucc

SEQ ID NO: 1541488 - RNA, 18 nt, Human adenovirus B (HAdV-B)
ucaaccccuucuccggau

SEQ ID NO: 1541489 - RNA, 18 nt, Human adenovirus B (HAdV-B)
gucaauugucucugaaga

SEQ ID NO: 1541490 - RNA, 23 nt, Human adenovirus B (HAdV-B)
uuccccuacaaaacaugcaacau

SEQ ID NO: 1541491 - RNA, 19 nt, Human adenovirus B (HAdV-B)
ccagaccggcgaggaacuc

SEQ ID NO: 1541492 - RNA, 13 nt, Human adenovirus B (HAdV-B)
cauuugugcauuu

SEQ ID NO: 1541493 - RNA, 15 nt, Human adenovirus B (HAdV-B)
uacugacgccagacg

SEQ ID NO: 1541494 - RNA, 20 nt, Human adenovirus B (HAdV-B)
uccaacagaaaaccagcagc

SEQ ID NO: 1541495 - RNA, 15 nt, Human adenovirus B (HAdV-B)
ggauuggcggcaggc

SEQ ID NO: 1541496 - RNA, 21 nt, Human adenovirus B (HAdV-B)
uacaaaagaaggacucccagu

SEQ ID NO: 1541497 - RNA, 14 nt, Human adenovirus B (HAdV-B)
ucuugcuugcuauc

SEQ ID NO: 1541498 - RNA, 18 nt, Human adenovirus B (HAdV-B)
aaaugacgagacaucaua

SEQ ID NO: 1541499 - RNA, 18 nt, Human adenovirus B (HAdV-B)
cagaauggagugcuugaa

SEQ ID NO: 1541500 - RNA, 14 nt, Human adenovirus B (HAdV-B)
cagcagcagcaggc

SEQ ID NO: 1541501 - RNA, 19 nt, Human adenovirus B (HAdV-B)
acaacaagugcagcaacag

SEQ ID NO: 1541502 - RNA, 19 nt, Human adenovirus B (HAdV-B)
cagacgguaaaucugagcc

SEQ ID NO: 1541503 - RNA, 12 nt, Human adenovirus B (HAdV-B)
cagcgugcugga

SEQ ID NO: 1541504 - RNA, 20 nt, Human adenovirus B (HAdV-B)
cuggcggcuccacccuaugu

SEQ ID NO: 1541505 - RNA, 16 nt, Human adenovirus B (HAdV-B)
cucaugaaagcaucau

SEQ ID NO: 1541506 - RNA, 13 nt, Human adenovirus B (HAdV-B)
gaacgaaacuuuu

SEQ ID NO: 1541507 - RNA, 13 nt, Human adenovirus B (HAdV-B)
ccuuaucaaaugc

SEQ ID NO: 1541508 - RNA, 17 nt, Human adenovirus B (HAdV-B)
gcgaagcaucgagguca

SEQ ID NO: 1541509 - RNA, 22 nt, Human adenovirus B (HAdV-B)
ugagcaauugagauuugccaca

SEQ ID NO: 1541510 - RNA, 14 nt, Human adenovirus B (HAdV-B)
accacugccaugcg

SEQ ID NO: 1541511 - RNA, 19 nt, Human adenovirus B (HAdV-B)
cugccugguuauuaauuuu

SEQ ID NO: 1541512 - RNA, 15 nt, Human adenovirus B (HAdV-B)
gacacuccugguccu

SEQ ID NO: 1541513 - RNA, 12 nt, Human adenovirus B (HAdV-B)
cuugaaaucaca

SEQ ID NO: 1541514 - RNA, 18 nt, Human adenovirus B (HAdV-B)
cucgaaaacugguuagcu

SEQ ID NO: 1541515 - RNA, 19 nt, Human adenovirus B (HAdV-B)
cuguuaaaaaccugcugcu

SEQ ID NO: 1541516 - RNA, 17 nt, Human adenovirus B (HAdV-B)
uaugaagauuuagaagg

SEQ ID NO: 1541517 - RNA, 20 nt, Human adenovirus B (HAdV-B)
gguucuauucccuaccugga

SEQ ID NO: 1541518 - RNA, 18 nt, Human adenovirus B (HAdV-B)
gggagcugacuugcagug

SEQ ID NO: 1541519 - RNA, 15 nt, Human adenovirus B (HAdV-B)
gcaguuauugacagu

SEQ ID NO: 1541520 - RNA, 17 nt, Human adenovirus B (HAdV-B)
cugcgguccgaccugga

SEQ ID NO: 1541521 - RNA, 17 nt, Human adenovirus B (HAdV-B)
gaaguugaaggugcagc

SEQ ID NO: 1541522 - RNA, 22 nt, Human adenovirus B (HAdV-B)
gcugaaauuacaaaagaaggac

SEQ ID NO: 1541523 - RNA, 20 nt, Human adenovirus B (HAdV-B)
cauaggacccccaaucacuu

SEQ ID NO: 1541524 - RNA, 19 nt, Human adenovirus B (HAdV-B)
uacgagagcgugaugcagc

SEQ ID NO: 1541525 - RNA, 14 nt, Human adenovirus B (HAdV-B)
cuagaccacugccg

SEQ ID NO: 1541526 - RNA, 20 nt, Human adenovirus B (HAdV-B)
auucauuuuucagaaacuuc

SEQ ID NO: 1541527 - RNA, 15 nt, Human adenovirus B (HAdV-B)
aaauuuucucccagc

SEQ ID NO: 1541528 - RNA, 21 nt, Human adenovirus B (HAdV-B)
guagaagaaccugaccccaca

SEQ ID NO: 1541529 - RNA, 19 nt, Human adenovirus B (HAdV-B)
caaccguugaaggaugaaa

SEQ ID NO: 1541530 - RNA, 21 nt, Human adenovirus B (HAdV-B)
ccggccuggacccuccagugg

SEQ ID NO: 1541531 - RNA, 15 nt, Human adenovirus B (HAdV-B)
ugacuugucuccuga

SEQ ID NO: 1541532 - RNA, 19 nt, Human adenovirus B (HAdV-B)
aauucuucgcuguuaaaaa

SEQ ID NO: 1541533 - RNA, 14 nt, Human adenovirus B (HAdV-B)
uaacagugcaggca

SEQ ID NO: 1541534 - RNA, 16 nt, Human adenovirus B (HAdV-B)
ccaucuuccagcagag

SEQ ID NO: 1541535 - RNA, 17 nt, Human adenovirus B (HAdV-B)
cucgggauucuccuuua

SEQ ID NO: 1541536 - RNA, 16 nt, Human adenovirus B (HAdV-B)
ugggacagucaggcag

SEQ ID NO: 1541537 - RNA, 9 nt, Human adenovirus B (HAdV-B)
ccugcugcu

SEQ ID NO: 1541538 - RNA, 22 nt, Human adenovirus B (HAdV-B)
ggucuccaugaguucguguccu

SEQ ID NO: 1541539 - RNA, 23 nt, Human adenovirus B (HAdV-B)
caugauggauauguggccugggg

SEQ ID NO: 1541540 - RNA, 22 nt, Human adenovirus B (HAdV-B)
agaugcaucccgugcugcgaca

SEQ ID NO: 1541541 - RNA, 17 nt, Human adenovirus B (HAdV-B)
cccaauuggcuccagca

SEQ ID NO: 1541542 - RNA, 17 nt, Human adenovirus B (HAdV-B)
uacauucaauucaaaca

SEQ ID NO: 1541543 - RNA, 15 nt, Human adenovirus B (HAdV-B)
cuccacagccccuac

SEQ ID NO: 1541544 - RNA, 15 nt, Human adenovirus B (HAdV-B)
aggcgcugcugaaca

SEQ ID NO: 1541545 - RNA, 12 nt, Human adenovirus B (HAdV-B)
gagaauaaaaaa

SEQ ID NO: 1541546 - RNA, 23 nt, Human adenovirus B (HAdV-B)
gcagcgugcuggacuuggguggg

SEQ ID NO: 1541547 - RNA, 19 nt, Human adenovirus B (HAdV-B)
aggagccgaaaucuugaaa

SEQ ID NO: 1541548 - RNA, 18 nt, Human adenovirus B (HAdV-B)
ccagaggugcaaaccucu

SEQ ID NO: 1541549 - RNA, 16 nt, Human adenovirus B (HAdV-B)
cucuauaucucccaga

SEQ ID NO: 1541550 - RNA, 16 nt, Human adenovirus B (HAdV-B)
gcugaaacccacugcu

SEQ ID NO: 1541551 - RNA, 13 nt, Human adenovirus B (HAdV-B)
gacuauaaaagua

SEQ ID NO: 1541552 - RNA, 24 nt, Human adenovirus B (HAdV-B)
aguaccucagagcgaaguguauca

SEQ ID NO: 1541553 - RNA, 15 nt, Human adenovirus B (HAdV-B)
uagcgccagcaggag

SEQ ID NO: 1541554 - RNA, 19 nt, Human adenovirus B (HAdV-B)
cuaagaugaaaccaugcua

SEQ ID NO: 1541555 - RNA, 18 nt, Human adenovirus B (HAdV-B)
ugagcugcgucacgguuu

SEQ ID NO: 1541556 - RNA, 22 nt, Human adenovirus B (HAdV-B)
acccuguaugccaucuuccagc

SEQ ID NO: 1541557 - RNA, 14 nt, Human adenovirus B (HAdV-B)
aaaaugccaaauau

SEQ ID NO: 1541558 - RNA, 15 nt, Human adenovirus B (HAdV-B)
acaaguuuuccgcca

SEQ ID NO: 1541559 - RNA, 19 nt, Human adenovirus B (HAdV-B)
ugcaggagcggagccuggg

SEQ ID NO: 1541560 - RNA, 18 nt, Human adenovirus B (HAdV-B)
ucucuuaagguucugugg

SEQ ID NO: 1541561 - RNA, 15 nt, Human adenovirus B (HAdV-B)
gugggcgcaaaguuc

SEQ ID NO: 1541562 - RNA, 19 nt, Human adenovirus B (HAdV-B)
agagcgugaugcagcagca

SEQ ID NO: 1541563 - RNA, 14 nt, Human adenovirus B (HAdV-B)
ugccccccgccgcu

SEQ ID NO: 1541564 - RNA, 15 nt, Human adenovirus B (HAdV-B)
ucuggaagauccuga

SEQ ID NO: 1541565 - RNA, 17 nt, Human adenovirus B (HAdV-B)
gaugacuggcagaaccc

SEQ ID NO: 1541566 - RNA, 14 nt, Human adenovirus B (HAdV-B)
ggccccagcagcca

SEQ ID NO: 1541567 - RNA, 17 nt, Human adenovirus B (HAdV-B)
uaggagccggauuggga

SEQ ID NO: 1541568 - RNA, 18 nt, Human adenovirus B (HAdV-B)
aaucaaguucuaugagga

SEQ ID NO: 1541569 - RNA, 18 nt, Human adenovirus B (HAdV-B)
auggauauguggccuggg

SEQ ID NO: 1541570 - RNA, 23 nt, Human adenovirus B (HAdV-B)
agaggggucuugugugggacgau

SEQ ID NO: 1541571 - RNA, 13 nt, Human adenovirus B (HAdV-B)
cauugcagccaug

SEQ ID NO: 1541572 - RNA, 13 nt, Human adenovirus B (HAdV-B)
cagacaugaugaa

SEQ ID NO: 1541573 - RNA, 18 nt, Human adenovirus B (HAdV-B)
guuuagauacaugggcau

SEQ ID NO: 1541574 - RNA, 18 nt, Human adenovirus B (HAdV-B)
uugcuagauggaacagca

SEQ ID NO: 1541575 - RNA, 21 nt, Human adenovirus B (HAdV-B)
uugcaguagguacaacacauu

SEQ ID NO: 1541576 - RNA, 18 nt, Human adenovirus B (HAdV-B)
cauuauuggccgaugugu

SEQ ID NO: 1541577 - RNA, 17 nt, Human adenovirus B (HAdV-B)
acguggaaaaaggaagg

SEQ ID NO: 1541578 - RNA, 16 nt, Human adenovirus B (HAdV-B)
ccaugugaccaaccug

SEQ ID NO: 1541579 - RNA, 23 nt, Human adenovirus B (HAdV-B)
gaugggcguccagcgcugccagg

SEQ ID NO: 1541580 - RNA, 15 nt, Human adenovirus B (HAdV-B)
cuucagcuugcccuc

SEQ ID NO: 1541581 - RNA, 11 nt, Human adenovirus B (HAdV-B)
uagaaacuuuu

SEQ ID NO: 1541582 - RNA, 23 nt, Human adenovirus B (HAdV-B)
ccaugccuuucucccaagcagac

SEQ ID NO: 1541583 - RNA, 17 nt, Human adenovirus B (HAdV-B)
accuuaaucccagaaau

SEQ ID NO: 1541584 - RNA, 19 nt, Human adenovirus B (HAdV-B)
ccucaaaaacacacuaccc

SEQ ID NO: 1541585 - RNA, 12 nt, Human adenovirus B (HAdV-B)
aagagccaugcu

SEQ ID NO: 1541586 - RNA, 23 nt, Human adenovirus B (HAdV-B)
ucggucucaaaagaucccuccuc

SEQ ID NO: 1541587 - RNA, 17 nt, Human adenovirus B (HAdV-B)
augaauuaaaaaaugau

SEQ ID NO: 1541588 - RNA, 15 nt, Human adenovirus B (HAdV-B)
ccacaacgcacagcc

SEQ ID NO: 1541589 - RNA, 18 nt, Human adenovirus B (HAdV-B)
aucugcuccuucugaauc

SEQ ID NO: 1541590 - RNA, 18 nt, Human adenovirus B (HAdV-B)
ggggucaaaaacaaguuu

SEQ ID NO: 1541591 - RNA, 19 nt, Human adenovirus B (HAdV-B)
gcaugaccaucauaccaaa

SEQ ID NO: 1541592 - RNA, 17 nt, Human adenovirus B (HAdV-B)
uaccuguguagaugccu

SEQ ID NO: 1541593 - RNA, 11 nt, Human adenovirus B (HAdV-B)
ucgcagcagca

SEQ ID NO: 1541594 - RNA, 16 nt, Human adenovirus B (HAdV-B)
acaguaaaggaagagc

SEQ ID NO: 1541595 - RNA, 14 nt, Human adenovirus B (HAdV-B)
caguauaggcauuu

SEQ ID NO: 1541596 - RNA, 16 nt, Human adenovirus B (HAdV-B)
gcaguuuaccaugagu

SEQ ID NO: 1541597 - RNA, 22 nt, Human adenovirus B (HAdV-B)
cgaguuuaaugggcgaagagga

SEQ ID NO: 1541598 - RNA, 19 nt, Human adenovirus B (HAdV-B)
uguaugucggccaaguagc

SEQ ID NO: 1541599 - RNA, 19 nt, Human adenovirus B (HAdV-B)
aaaguggguagacagaaug

SEQ ID NO: 1541600 - RNA, 20 nt, Human adenovirus B (HAdV-B)
cgguaugcccuagaccaccg

SEQ ID NO: 1541601 - RNA, 16 nt, Human adenovirus B (HAdV-B)
ugaaggugcagccgcc

SEQ ID NO: 1541602 - RNA, 13 nt, Human adenovirus B (HAdV-B)
aaucaauucacaa

SEQ ID NO: 1541603 - RNA, 23 nt, Human adenovirus B (HAdV-B)
caugaacaugcaaaucuggaaga

SEQ ID NO: 1541604 - RNA, 13 nt, Human adenovirus B (HAdV-B)
acuuauauugcau

SEQ ID NO: 1541605 - RNA, 20 nt, Human adenovirus B (HAdV-B)
gauacucaagacaaggcagu

SEQ ID NO: 1541606 - RNA, 20 nt, Human adenovirus B (HAdV-B)
gacguuaugugccuuuccac

SEQ ID NO: 1541607 - RNA, 20 nt, Human adenovirus B (HAdV-B)
uggaagacugauggcacaac

SEQ ID NO: 1541608 - RNA, 18 nt, Human adenovirus B (HAdV-B)
ugaugacgaaguguacca

SEQ ID NO: 1541609 - RNA, 15 nt, Human adenovirus B (HAdV-B)
uccagcgcugccagg

SEQ ID NO: 1541610 - RNA, 18 nt, Human adenovirus B (HAdV-B)
uugcagcacugaaacacc

SEQ ID NO: 1541611 - RNA, 13 nt, Human adenovirus B (HAdV-B)
aaggauacaaaga

SEQ ID NO: 1541612 - RNA, 23 nt, Human adenovirus B (HAdV-B)
ugaccugggguccccgcuggggg

SEQ ID NO: 1541613 - RNA, 23 nt, Human adenovirus B (HAdV-B)
ugggucgcgguguaccccgguuc

SEQ ID NO: 1541614 - RNA, 20 nt, Human adenovirus B (HAdV-B)
cuguggacaguuaugauccu

SEQ ID NO: 1541615 - RNA, 20 nt, Human adenovirus B (HAdV-B)
ugaaaguguuguuggaacca

SEQ ID NO: 1541616 - RNA, 23 nt, Human adenovirus B (HAdV-B)
aucauagauaauuacuugaaagu

SEQ ID NO: 1541617 - RNA, 15 nt, Human adenovirus B (HAdV-B)
ucgggcgccagcgcc

SEQ ID NO: 1541618 - RNA, 13 nt, Human adenovirus B (HAdV-B)
caguguggaagag

SEQ ID NO: 1541619 - RNA, 21 nt, Human adenovirus B (HAdV-B)
aggacguuuuggagaaaguaa

SEQ ID NO: 1541620 - RNA, 21 nt, Human adenovirus B (HAdV-B)
auacuaaggguugcauucacu

SEQ ID NO: 1541621 - RNA, 18 nt, Human adenovirus B (HAdV-B)
ugacgccgccggucccac

SEQ ID NO: 1541622 - RNA, 14 nt, Human adenovirus B (HAdV-B)
caugacagacagag

SEQ ID NO: 1541623 - RNA, 21 nt, Human adenovirus B (HAdV-B)
gagaugcgagcuucccgcuuu

SEQ ID NO: 1541624 - RNA, 14 nt, Human adenovirus B (HAdV-B)
ccaccaccucuacc

SEQ ID NO: 1541625 - RNA, 18 nt, Human adenovirus B (HAdV-B)
augcaugcaggugggcgu

SEQ ID NO: 1541626 - RNA, 19 nt, Human adenovirus B (HAdV-B)
auuguugaucaccugggca

SEQ ID NO: 1541627 - RNA, 15 nt, Human adenovirus B (HAdV-B)
aggccuuaucaaaug

SEQ ID NO: 1541628 - RNA, 17 nt, Human adenovirus B (HAdV-B)
auaaaaauccaucggga

SEQ ID NO: 1541629 - RNA, 19 nt, Human adenovirus B (HAdV-B)
gaaucauaauauugccaug

SEQ ID NO: 1541630 - RNA, 19 nt, Human adenovirus B (HAdV-B)
gugggucuagcauaaguuc

SEQ ID NO: 1541631 - RNA, 21 nt, Human adenovirus B (HAdV-B)
aaguuucagaugaagaaagua

SEQ ID NO: 1541632 - RNA, 23 nt, Human adenovirus B (HAdV-B)
aacuucuugaccacgguggugca

SEQ ID NO: 1541633 - RNA, 13 nt, Human adenovirus B (HAdV-B)
ucagguggacgag

SEQ ID NO: 1541634 - RNA, 14 nt, Human adenovirus B (HAdV-B)
augacuggcagaac

SEQ ID NO: 1541635 - RNA, 20 nt, Human adenovirus B (HAdV-B)
ccuggacccuccaguggagg

SEQ ID NO: 1541636 - RNA, 23 nt, Human adenovirus B (HAdV-B)
agagccauuguccaagaccuggg

SEQ ID NO: 1541637 - RNA, 16 nt, Human adenovirus B (HAdV-B)
uccaaccucuccacaa

SEQ ID NO: 1541638 - RNA, 17 nt, Human adenovirus B (HAdV-B)
gcgccaaggucaacccu

SEQ ID NO: 1541639 - RNA, 17 nt, Human adenovirus B (HAdV-B)
accgucagccaugggca

SEQ ID NO: 1541640 - RNA, 17 nt, Human adenovirus B (HAdV-B)
uuguugguagauugccc

SEQ ID NO: 1541641 - RNA, 16 nt, Human adenovirus B (HAdV-B)
cagggaacugaugcac

SEQ ID NO: 1541642 - RNA, 12 nt, Human adenovirus B (HAdV-B)
cuguggaguucu

SEQ ID NO: 1541643 - RNA, 21 nt, Human adenovirus B (HAdV-B)
aacaagauuggaauaagcaua

SEQ ID NO: 1541644 - RNA, 21 nt, Human adenovirus B (HAdV-B)
ucaaauuuuagcuccucuccu

SEQ ID NO: 1541645 - RNA, 14 nt, Human adenovirus B (HAdV-B)
gauugcccaggacu

SEQ ID NO: 1541646 - RNA, 20 nt, Human adenovirus B (HAdV-B)
gccuggacccuccaguggag

SEQ ID NO: 1541647 - RNA, 23 nt, Human adenovirus B (HAdV-B)
uuacuuugcgaaacggauugccu

SEQ ID NO: 1541648 - RNA, 18 nt, Human adenovirus B (HAdV-B)
ccuggcagaacacacucu

SEQ ID NO: 1541649 - RNA, 16 nt, Human adenovirus B (HAdV-B)
aucuagaccacugccg

SEQ ID NO: 1541650 - RNA, 12 nt, Human adenovirus B (HAdV-B)
acccggcggcgu

SEQ ID NO: 1541651 - RNA, 13 nt, Human adenovirus B (HAdV-B)
uccguagccugga

SEQ ID NO: 1541652 - RNA, 21 nt, Human adenovirus B (HAdV-B)
ucagugacuccuucaacccug

SEQ ID NO: 1541653 - RNA, 21 nt, Human adenovirus B (HAdV-B)
gaaugacccgcaggcagugau

SEQ ID NO: 1541654 - RNA, 19 nt, Human adenovirus B (HAdV-B)
gaucuaccgccagugcugu

SEQ ID NO: 1541655 - RNA, 19 nt, Human adenovirus B (HAdV-B)
cucgauaaucugcuccuuc

SEQ ID NO: 1541656 - RNA, 22 nt, Human adenovirus B (HAdV-B)
gcggcaggcgccucccaggacu

SEQ ID NO: 1541657 - RNA, 17 nt, Human adenovirus B (HAdV-B)
uucuaacuccucaauca

SEQ ID NO: 1541658 - RNA, 15 nt, Human adenovirus B (HAdV-B)
aagcaacgaagcuug

SEQ ID NO: 1541659 - RNA, 20 nt, Human adenovirus B (HAdV-B)
gagaaaaaacagccaacaua

SEQ ID NO: 1541660 - RNA, 14 nt, Human adenovirus B (HAdV-B)
auugucaaguuugg

SEQ ID NO: 1541661 - RNA, 16 nt, Human adenovirus B (HAdV-B)
uguuacauaucuggaa

SEQ ID NO: 1541662 - RNA, 20 nt, Human adenovirus B (HAdV-B)
cuauugauuugaugaacaau

SEQ ID NO: 1541663 - RNA, 20 nt, Human adenovirus B (HAdV-B)
auauagcuuccuuggaagag

SEQ ID NO: 1541664 - RNA, 17 nt, Human adenovirus B (HAdV-B)
guuuggacggcuccugg

SEQ ID NO: 1541665 - RNA, 15 nt, Human adenovirus B (HAdV-B)
ucaggguuacuuugc

SEQ ID NO: 1541666 - RNA, 16 nt, Human adenovirus B (HAdV-B)
caccgacucucccagg

SEQ ID NO: 1541667 - RNA, 18 nt, Human adenovirus B (HAdV-B)
ugcaaggccccagcagcc

SEQ ID NO: 1541668 - RNA, 15 nt, Human adenovirus B (HAdV-B)
gcugcugcuguggcu

SEQ ID NO: 1541669 - RNA, 16 nt, Human adenovirus B (HAdV-B)
gguuguaucuggugga

SEQ ID NO: 1541670 - RNA, 15 nt, Human adenovirus B (HAdV-B)
gucucugaccaugac

SEQ ID NO: 1541671 - RNA, 14 nt, Human adenovirus B (HAdV-B)
uaagaaugccauca

SEQ ID NO: 1541672 - RNA, 16 nt, Human adenovirus B (HAdV-B)
cucacuugccacccuc

SEQ ID NO: 1541673 - RNA, 18 nt, Human adenovirus B (HAdV-B)
uccggaucgcuguccagg

SEQ ID NO: 1541674 - RNA, 21 nt, Human adenovirus B (HAdV-B)
aaauguuuaaccccacuaaca

SEQ ID NO: 1541675 - RNA, 13 nt, Human adenovirus B (HAdV-B)
uucuggaggagga

SEQ ID NO: 1541676 - RNA, 19 nt, Human adenovirus B (HAdV-B)
ugccucccccuucccauuu

SEQ ID NO: 1541677 - RNA, 15 nt, Human adenovirus B (HAdV-B)
acaccgcuuccaccc

SEQ ID NO: 1541678 - RNA, 16 nt, Human adenovirus B (HAdV-B)
agaacagaacuugaaa

SEQ ID NO: 1541679 - RNA, 12 nt, Human adenovirus B (HAdV-B)
acaugccacaga

SEQ ID NO: 1541680 - RNA, 12 nt, Human adenovirus B (HAdV-B)
ucgcuggccaca

SEQ ID NO: 1541681 - RNA, 19 nt, Human adenovirus B (HAdV-B)
aaggacaaaaaagaagagg

SEQ ID NO: 1541682 - RNA, 11 nt, Human adenovirus B (HAdV-B)
uggaagagcuc

SEQ ID NO: 1541683 - RNA, 17 nt, Human adenovirus B (HAdV-B)
ggcuuugugcggcaggc

SEQ ID NO: 1541684 - RNA, 16 nt, Human adenovirus B (HAdV-B)
uucgugcaggugagga

SEQ ID NO: 1541685 - RNA, 16 nt, Human adenovirus B (HAdV-B)
cagccaacgagccagc

SEQ ID NO: 1541686 - RNA, 20 nt, Human adenovirus B (HAdV-B)
ggcaggugguugaugagguc

SEQ ID NO: 1541687 - RNA, 15 nt, Human adenovirus B (HAdV-B)
aguacuggcuaccua

SEQ ID NO: 1541688 - RNA, 22 nt, Human adenovirus B (HAdV-B)
aacaggaauuuuugacaugaac

SEQ ID NO: 1541689 - RNA, 21 nt, Human adenovirus B (HAdV-B)
caucaucuccugcuugcauga

SEQ ID NO: 1541690 - RNA, 23 nt, Human adenovirus B (HAdV-B)
ccgcguucgggggugugcucccu

SEQ ID NO: 1541691 - RNA, 14 nt, Human adenovirus B (HAdV-B)
uuccuucaccccuc

SEQ ID NO: 1541692 - RNA, 14 nt, Human adenovirus B (HAdV-B)
ccgcacuggcugcc

SEQ ID NO: 1541693 - RNA, 15 nt, Human adenovirus B (HAdV-B)
uagcuuugaggccug

SEQ ID NO: 1541694 - RNA, 15 nt, Human adenovirus B (HAdV-B)
caucgccggacagga

SEQ ID NO: 1541695 - RNA, 22 nt, Human adenovirus B (HAdV-B)
agcgcauacaacuugggcgcaa

SEQ ID NO: 1541696 - RNA, 13 nt, Human adenovirus B (HAdV-B)
cucgcccccacug

SEQ ID NO: 1541697 - RNA, 22 nt, Human adenovirus B (HAdV-B)
ugagaggccuuaucaaaugcuc

SEQ ID NO: 1541698 - RNA, 22 nt, Human adenovirus B (HAdV-B)
uaauaugcuggcuacugugcau

SEQ ID NO: 1541699 - RNA, 22 nt, Human adenovirus B (HAdV-B)
acuuuuaagaagguuuccauca

SEQ ID NO: 1541700 - RNA, 17 nt, Human adenovirus B (HAdV-B)
ugcaaggccccagcagc

SEQ ID NO: 1541701 - RNA, 16 nt, Human adenovirus B (HAdV-B)
cagacuugggacagaa

SEQ ID NO: 1541702 - RNA, 20 nt, Human adenovirus B (HAdV-B)
ucuggggucuuguugccauc

SEQ ID NO: 1541703 - RNA, 21 nt, Human adenovirus B (HAdV-B)
gcaggaacugaaaauaaaaaa

SEQ ID NO: 1541704 - RNA, 17 nt, Human adenovirus B (HAdV-B)
caauccccacuggaggc

SEQ ID NO: 1541705 - RNA, 19 nt, Human adenovirus B (HAdV-B)
acaaugaggcuuucagaga

SEQ ID NO: 1541706 - RNA, 12 nt, Human adenovirus B (HAdV-B)
aggugucucuga

SEQ ID NO: 1541707 - RNA, 16 nt, Human adenovirus B (HAdV-B)
caguccugccaccacc

SEQ ID NO: 1541708 - RNA, 23 nt, Human adenovirus B (HAdV-B)
ucccgacgaaaguacgguccagc

SEQ ID NO: 1541709 - RNA, 22 nt, Human adenovirus B (HAdV-B)
ugaaagcaccucccaacacccc

SEQ ID NO: 1541710 - RNA, 17 nt, Human adenovirus B (HAdV-B)
ggucauuucuugcuugc

SEQ ID NO: 1541711 - RNA, 23 nt, Human adenovirus B (HAdV-B)
caggagaaauauucacuggaaca

SEQ ID NO: 1541712 - RNA, 15 nt, Human adenovirus B (HAdV-B)
agaaaagacaaacau

SEQ ID NO: 1541713 - RNA, 17 nt, Human adenovirus B (HAdV-B)
guauucugcaugagaau

SEQ ID NO: 1541714 - RNA, 21 nt, Human adenovirus B (HAdV-B)
aaacucgcgccguagaagagg

SEQ ID NO: 1541715 - RNA, 12 nt, Human adenovirus B (HAdV-B)
uuacacucucau

SEQ ID NO: 1541716 - RNA, 21 nt, Human adenovirus B (HAdV-B)
cuuguagugaggaaaaguuuu

SEQ ID NO: 1541717 - RNA, 19 nt, Human adenovirus B (HAdV-B)
ggugcaacacagcagagac

SEQ ID NO: 1541718 - RNA, 15 nt, Human adenovirus B (HAdV-B)
gucccuacguguaca

SEQ ID NO: 1541719 - RNA, 16 nt, Human adenovirus B (HAdV-B)
cugcugcuguggcuuu

SEQ ID NO: 1541720 - RNA, 17 nt, Human adenovirus B (HAdV-B)
auuuccauuccuucucg

SEQ ID NO: 1541721 - RNA, 18 nt, Human adenovirus B (HAdV-B)
ccauaguuaucacccagc

SEQ ID NO: 1541722 - RNA, 15 nt, Human adenovirus B (HAdV-B)
cagagacgagccugg

SEQ ID NO: 1541723 - RNA, 18 nt, Human adenovirus B (HAdV-B)
uuggauggaaaagcgugg

SEQ ID NO: 1541724 - RNA, 23 nt, Human adenovirus B (HAdV-B)
ugagcaucacagcguucuggugg

SEQ ID NO: 1541725 - RNA, 13 nt, Human adenovirus B (HAdV-B)
cugaguuggcuuu

SEQ ID NO: 1541726 - RNA, 22 nt, Human adenovirus B (HAdV-B)
ggaauuuuugacaugaacaugc

SEQ ID NO: 1541727 - RNA, 15 nt, Human adenovirus B (HAdV-B)
caaggccccagcagc

SEQ ID NO: 1541728 - RNA, 20 nt, Human adenovirus B (HAdV-B)
gcuguguacucccagcagcu

SEQ ID NO: 1541729 - RNA, 14 nt, Human adenovirus B (HAdV-B)
uacuaagaugaaac

SEQ ID NO: 1541730 - RNA, 14 nt, Human adenovirus B (HAdV-B)
gacagaauggagug

SEQ ID NO: 1541731 - RNA, 17 nt, Human adenovirus B (HAdV-B)
aucauguccaccugggg

SEQ ID NO: 1541732 - RNA, 21 nt, Human adenovirus B (HAdV-B)
auuaauauccggaaugcuugu

SEQ ID NO: 1541733 - RNA, 16 nt, Human adenovirus B (HAdV-B)
aauuaucgcugcugca

SEQ ID NO: 1541734 - RNA, 20 nt, Human adenovirus B (HAdV-B)
uaagauucccacugaaagua

SEQ ID NO: 1541735 - RNA, 21 nt, Human adenovirus B (HAdV-B)
cccgacgaaaguacgguccag

SEQ ID NO: 1541736 - RNA, 13 nt, Human adenovirus B (HAdV-B)
aucuugaaaucac

SEQ ID NO: 1541737 - RNA, 14 nt, Human adenovirus B (HAdV-B)
acagugcaggcagc

SEQ ID NO: 1541738 - RNA, 17 nt, Human adenovirus B (HAdV-B)
aacaccguuucuggggc

SEQ ID NO: 1541739 - RNA, 20 nt, Human adenovirus B (HAdV-B)
ccacguaagaagcuucuugc

SEQ ID NO: 1541740 - RNA, 19 nt, Human adenovirus B (HAdV-B)
agcaucauauugcuugaaa

SEQ ID NO: 1541741 - RNA, 18 nt, Human adenovirus B (HAdV-B)
uggaaaagcguggaaaaa

SEQ ID NO: 1541742 - RNA, 19 nt, Human adenovirus B (HAdV-B)
ucugacgagaaucagaaug

SEQ ID NO: 1541743 - RNA, 15 nt, Human adenovirus B (HAdV-B)
acacugguggccacc

SEQ ID NO: 1541744 - RNA, 15 nt, Human adenovirus B (HAdV-B)
agguggcugccauca

SEQ ID NO: 1541745 - RNA, 15 nt, Human adenovirus B (HAdV-B)
caaucgcgaagaggc

SEQ ID NO: 1541746 - RNA, 18 nt, Human adenovirus B (HAdV-B)
cagaaguacuggcuaccu

SEQ ID NO: 1541747 - RNA, 18 nt, Human adenovirus B (HAdV-B)
gagguucagaaagaggga

SEQ ID NO: 1541748 - RNA, 19 nt, Human adenovirus B (HAdV-B)
aaccaguggucagugauga

SEQ ID NO: 1541749 - RNA, 17 nt, Human adenovirus B (HAdV-B)
gaagaugaacuucccaa

SEQ ID NO: 1541750 - RNA, 21 nt, Human adenovirus B (HAdV-B)
cccgcacuggcugcccccacc

SEQ ID NO: 1541751 - RNA, 18 nt, Human adenovirus B (HAdV-B)
guugaaggugcagccgcc

SEQ ID NO: 1541752 - RNA, 12 nt, Human adenovirus B (HAdV-B)
auaaaacauccc

SEQ ID NO: 1541753 - RNA, 23 nt, Human adenovirus B (HAdV-B)
ccgauguugugucccagcggcga

SEQ ID NO: 1541754 - RNA, 15 nt, Human adenovirus B (HAdV-B)
cuugugacuagugaa

SEQ ID NO: 1541755 - RNA, 16 nt, Human adenovirus B (HAdV-B)
ugcgucaucacccagg

SEQ ID NO: 1541756 - RNA, 20 nt, Human adenovirus B (HAdV-B)
ucucgacagauaaagacagc

SEQ ID NO: 1541757 - RNA, 14 nt, Human adenovirus B (HAdV-B)
acagcaacuucuug

SEQ ID NO: 1541758 - RNA, 21 nt, Human adenovirus B (HAdV-B)
gugcagccgccgcccccagaa

SEQ ID NO: 1541759 - RNA, 22 nt, Human adenovirus B (HAdV-B)
cuucuuagacucaucuaaaacc

SEQ ID NO: 1541760 - RNA, 22 nt, Human adenovirus B (HAdV-B)
uaugaagaugaaagcaccuccc

SEQ ID NO: 1541761 - RNA, 12 nt, Human adenovirus B (HAdV-B)
ggagugcaugcc

SEQ ID NO: 1541762 - RNA, 21 nt, Human adenovirus B (HAdV-B)
uuguagugcuaggaauucuug

SEQ ID NO: 1541763 - RNA, 17 nt, Human adenovirus B (HAdV-B)
gccagacucgcaguacu

SEQ ID NO: 1541764 - RNA, 22 nt, Human adenovirus B (HAdV-B)
ucuucgcugucuugacugaugu

SEQ ID NO: 1541765 - RNA, 18 nt, Human adenovirus B (HAdV-B)
auuucugugggacgacgu

SEQ ID NO: 1541766 - RNA, 17 nt, Human adenovirus B (HAdV-B)
uuggcaauauugccgcc

SEQ ID NO: 1541767 - RNA, 19 nt, Human adenovirus B (HAdV-B)
uccaugcacucauccauga

SEQ ID NO: 1541768 - RNA, 22 nt, Human adenovirus B (HAdV-B)
cgcguucgggggugugcucccu

SEQ ID NO: 1541769 - RNA, 19 nt, Human adenovirus B (HAdV-B)
gcgcgauaccaggcauagc

SEQ ID NO: 1541770 - RNA, 18 nt, Human adenovirus B (HAdV-B)
uccgcgauaccuggcacc

SEQ ID NO: 1541771 - RNA, 14 nt, Human adenovirus B (HAdV-B)
gcugcgcacugccc

SEQ ID NO: 1541772 - RNA, 22 nt, Human adenovirus B (HAdV-B)
ggaagguucgcaagaugaggac

SEQ ID NO: 1541773 - RNA, 14 nt, Human adenovirus B (HAdV-B)
cguagccuggagga

SEQ ID NO: 1541774 - RNA, 14 nt, Human adenovirus B (HAdV-B)
cuucuccugggcaa

SEQ ID NO: 1541775 - RNA, 22 nt, Human adenovirus B (HAdV-B)
uuccacccuugaagccaugcug

SEQ ID NO: 1541776 - RNA, 19 nt, Human adenovirus B (HAdV-B)
cgaacccgaggggagaugg

SEQ ID NO: 1541777 - RNA, 17 nt, Human adenovirus B (HAdV-B)
aucaccaacuugggaac

SEQ ID NO: 1541778 - RNA, 16 nt, Human adenovirus B (HAdV-B)
caguagaugggacgag

SEQ ID NO: 1541779 - RNA, 16 nt, Human adenovirus B (HAdV-B)
gccugugaugagggua

SEQ ID NO: 1541780 - RNA, 17 nt, Human adenovirus B (HAdV-B)
cgaggaggcagaggagg

SEQ ID NO: 1541781 - RNA, 14 nt, Human adenovirus B (HAdV-B)
cauccuuggcuccg

SEQ ID NO: 1541782 - RNA, 14 nt, Human adenovirus B (HAdV-B)
cagaaguuggagga

SEQ ID NO: 1541783 - RNA, 12 nt, Human adenovirus B (HAdV-B)
caauaaacauca

SEQ ID NO: 1541784 - RNA, 15 nt, Human adenovirus B (HAdV-B)
cuggcuacugugcau

SEQ ID NO: 1541785 - RNA, 14 nt, Human adenovirus B (HAdV-B)
cugaagugcccauc

SEQ ID NO: 1541786 - RNA, 20 nt, Human adenovirus B (HAdV-B)
ucccggcgcccuggugcggc

SEQ ID NO: 1541787 - RNA, 12 nt, Human adenovirus B (HAdV-B)
ucacaccucacu

SEQ ID NO: 1541788 - RNA, 12 nt, Human adenovirus B (HAdV-B)
uuucuguucugu

SEQ ID NO: 1541789 - RNA, 11 nt, Human adenovirus B (HAdV-B)
ggggagugcau

SEQ ID NO: 1541790 - RNA, 17 nt, Human adenovirus B (HAdV-B)
acacccugcugaagacc

SEQ ID NO: 1541791 - RNA, 22 nt, Human adenovirus B (HAdV-B)
uacaacaauuuccacuucaaca

SEQ ID NO: 1541792 - RNA, 14 nt, Human adenovirus B (HAdV-B)
ccaaccucuccaca

SEQ ID NO: 1541793 - RNA, 19 nt, Human adenovirus B (HAdV-B)
uacuggucgcuuccagaca

SEQ ID NO: 1541794 - RNA, 16 nt, Human adenovirus B (HAdV-B)
ggggccgugggcagcg

SEQ ID NO: 1541795 - RNA, 16 nt, Human adenovirus B (HAdV-B)
uucuacagauacugga

SEQ ID NO: 1541796 - RNA, 12 nt, Human adenovirus B (HAdV-B)
uuuucucccagc

SEQ ID NO: 1541797 - RNA, 23 nt, Human adenovirus B (HAdV-B)
ugacggauuucugugggacgacg

SEQ ID NO: 1541798 - RNA, 13 nt, Human adenovirus B (HAdV-B)
cagaagacaugca

SEQ ID NO: 1541799 - RNA, 22 nt, Human adenovirus B (HAdV-B)
uacgcugucucaaccccagcug

SEQ ID NO: 1541800 - RNA, 19 nt, Human adenovirus B (HAdV-B)
cagcgggcacacaaagcac

SEQ ID NO: 1541801 - RNA, 17 nt, Human adenovirus B (HAdV-B)
uuccaacccuguaugcc

SEQ ID NO: 1541802 - RNA, 18 nt, Human adenovirus B (HAdV-B)
acagaacuuucuuaccaa

SEQ ID NO: 1541803 - RNA, 13 nt, Human adenovirus B (HAdV-B)
uugcuucccuacg

SEQ ID NO: 1541804 - RNA, 19 nt, Human adenovirus B (HAdV-B)
accguugauguuguguccu

SEQ ID NO: 1541805 - RNA, 12 nt, Human adenovirus B (HAdV-B)
ggcggaggagga

SEQ ID NO: 1541806 - RNA, 18 nt, Human adenovirus B (HAdV-B)
agcuagacgcguggggcg

SEQ ID NO: 1541807 - RNA, 19 nt, Human adenovirus B (HAdV-B)
aguccugccaccaccucua

SEQ ID NO: 1541808 - RNA, 15 nt, Human adenovirus B (HAdV-B)
agcgaucuucucaau

SEQ ID NO: 1541809 - RNA, 19 nt, Human adenovirus B (HAdV-B)
ccuguaugccaucuuccag

SEQ ID NO: 1541810 - RNA, 21 nt, Human adenovirus B (HAdV-B)
ucacaucucguccucagcgac

SEQ ID NO: 1541811 - RNA, 23 nt, Human adenovirus B (HAdV-B)
cggugcuuccgaugagaggccuu

SEQ ID NO: 1541812 - RNA, 13 nt, Human adenovirus B (HAdV-B)
gugcagcagagcg

SEQ ID NO: 1541813 - RNA, 22 nt, Human adenovirus B (HAdV-B)
gcacuucagcuugcccucauaa

SEQ ID NO: 1541814 - RNA, 14 nt, Human adenovirus B (HAdV-B)
ccaaacggaguucu

SEQ ID NO: 1541815 - RNA, 15 nt, Human adenovirus B (HAdV-B)
gccaaguagcaguuu

SEQ ID NO: 1541816 - RNA, 17 nt, Human adenovirus B (HAdV-B)
gcugcuacagcugcugc

SEQ ID NO: 1541817 - RNA, 11 nt, Human adenovirus B (HAdV-B)
cgaagugggua

SEQ ID NO: 1541818 - RNA, 14 nt, Human adenovirus B (HAdV-B)
gagugcgggggcaa

SEQ ID NO: 1541819 - RNA, 16 nt, Human adenovirus B (HAdV-B)
auuugaugaacaaugc

SEQ ID NO: 1541820 - RNA, 22 nt, Human adenovirus B (HAdV-B)
cugcaacgaauuuucucccagc

SEQ ID NO: 1541821 - RNA, 19 nt, Human adenovirus B (HAdV-B)
aaaacaagcgucauaucau

SEQ ID NO: 1541822 - RNA, 22 nt, Human adenovirus B (HAdV-B)
augcucaggaucacagagacga

SEQ ID NO: 1541823 - RNA, 21 nt, Human adenovirus B (HAdV-B)
ggcauggguguauggcagcaa

SEQ ID NO: 1541824 - RNA, 13 nt, Human adenovirus B (HAdV-B)
uuccgagggugga

SEQ ID NO: 1541825 - RNA, 15 nt, Human adenovirus B (HAdV-B)
ggguucgcugguggc

SEQ ID NO: 1541826 - RNA, 18 nt, Human adenovirus B (HAdV-B)
cuugaccacgguggugca

SEQ ID NO: 1541827 - RNA, 14 nt, Human adenovirus B (HAdV-B)
uacaccgcuuuucc

SEQ ID NO: 1541828 - RNA, 15 nt, Human adenovirus B (HAdV-B)
gagggucugcaucca

SEQ ID NO: 1541829 - RNA, 15 nt, Human adenovirus B (HAdV-B)
cucacuugccacccu

SEQ ID NO: 1541830 - RNA, 19 nt, Human adenovirus B (HAdV-B)
uaacgcuggagaggucaga

SEQ ID NO: 1541831 - RNA, 16 nt, Human adenovirus B (HAdV-B)
gcgccuucacccgagc

SEQ ID NO: 1541832 - RNA, 16 nt, Human adenovirus B (HAdV-B)
ugccuaugagaacagu

SEQ ID NO: 1541833 - RNA, 15 nt, Human adenovirus B (HAdV-B)
ccacgagugccauca

SEQ ID NO: 1541834 - RNA, 21 nt, Human adenovirus B (HAdV-B)
agcaccucacuucccucuucc

SEQ ID NO: 1541835 - RNA, 17 nt, Human adenovirus B (HAdV-B)
agcggagacggcuugcu

SEQ ID NO: 1541836 - RNA, 15 nt, Human adenovirus B (HAdV-B)
cuuacauagaagagg

SEQ ID NO: 1541837 - RNA, 14 nt, Human adenovirus B (HAdV-B)
cagauacuggaugu

SEQ ID NO: 1541838 - RNA, 15 nt, Human adenovirus B (HAdV-B)
gcuggauauggccag

SEQ ID NO: 1541839 - RNA, 21 nt, Human adenovirus B (HAdV-B)
gagacucgggccgcaaaugcu

SEQ ID NO: 1541840 - RNA, 16 nt, Human adenovirus B (HAdV-B)
aggacagucuggagga

SEQ ID NO: 1541841 - RNA, 12 nt, Human adenovirus B (HAdV-B)
gcauauucuguu

SEQ ID NO: 1541842 - RNA, 14 nt, Human adenovirus B (HAdV-B)
ucaacgacuacacc

SEQ ID NO: 1541843 - RNA, 22 nt, Human adenovirus B (HAdV-B)
uucuaugcguguuggauugcca

SEQ ID NO: 1541844 - RNA, 22 nt, Human adenovirus B (HAdV-B)
agggaucaguccugccagggca

SEQ ID NO: 1541845 - RNA, 21 nt, Human adenovirus B (HAdV-B)
uggcucgcuacaacaguagca

SEQ ID NO: 1541846 - RNA, 19 nt, Human adenovirus B (HAdV-B)
agggcuugacggggaagac

SEQ ID NO: 1541847 - RNA, 14 nt, Human adenovirus B (HAdV-B)
auugaauaaaagaa

SEQ ID NO: 1541848 - RNA, 22 nt, Human adenovirus B (HAdV-B)
gcuggacuacuugcacagagcu

SEQ ID NO: 1541849 - RNA, 18 nt, Human adenovirus B (HAdV-B)
accugcugcgcacugccc

SEQ ID NO: 1541850 - RNA, 19 nt, Human adenovirus B (HAdV-B)
gcaaggguccgccacugcg

SEQ ID NO: 1541851 - RNA, 23 nt, Human adenovirus B (HAdV-B)
gcagcaauguuuagaagaacaga

SEQ ID NO: 1541852 - RNA, 20 nt, Human adenovirus B (HAdV-B)
gcccaucaguguggaagagc

SEQ ID NO: 1541853 - RNA, 21 nt, Human adenovirus B (HAdV-B)
augagaacaguaagaaagaac

SEQ ID NO: 1541854 - RNA, 17 nt, Human adenovirus B (HAdV-B)
agguucccucaggaugu

SEQ ID NO: 1541855 - RNA, 22 nt, Human adenovirus B (HAdV-B)
aaaacacacuacccacauacau

SEQ ID NO: 1541856 - RNA, 23 nt, Human adenovirus B (HAdV-B)
cuucguacgagagcgugaugcag

SEQ ID NO: 1541857 - RNA, 16 nt, Human adenovirus B (HAdV-B)
cagaacccuacuagca

SEQ ID NO: 1541858 - RNA, 14 nt, Human adenovirus B (HAdV-B)
caggcgccucccag

SEQ ID NO: 1541859 - RNA, 13 nt, Human adenovirus B (HAdV-B)
ggugaccagcaug

SEQ ID NO: 1541860 - RNA, 23 nt, Human adenovirus B (HAdV-B)
cgggacccugccguugcgcagca

SEQ ID NO: 1541861 - RNA, 21 nt, Human adenovirus B (HAdV-B)
caaaugacaaaggcuucuauu

SEQ ID NO: 1541862 - RNA, 19 nt, Human adenovirus B (HAdV-B)
cugugcgaggaugagagcc

SEQ ID NO: 1541863 - RNA, 21 nt, Human adenovirus B (HAdV-B)
ccgguauaucgggcaggaugu

SEQ ID NO: 1541864 - RNA, 15 nt, Human adenovirus B (HAdV-B)
ugggacaggaagaca

SEQ ID NO: 1541865 - RNA, 22 nt, Human adenovirus B (HAdV-B)
cauguugguuggagccugagga

SEQ ID NO: 1541866 - RNA, 12 nt, Human adenovirus B (HAdV-B)
aaggcuacaacg

SEQ ID NO: 1541867 - RNA, 22 nt, Human adenovirus B (HAdV-B)
cagaacuugaaagagcuugaca

SEQ ID NO: 1541868 - RNA, 20 nt, Human adenovirus B (HAdV-B)
gcacacguggcugcagccaa

SEQ ID NO: 1541869 - RNA, 14 nt, Human adenovirus B (HAdV-B)
cuagucacugcauu

SEQ ID NO: 1541870 - RNA, 17 nt, Human adenovirus B (HAdV-B)
cagcuaacccgauggcu

SEQ ID NO: 1541871 - RNA, 16 nt, Human adenovirus B (HAdV-B)
uagcgaucuucucaau

SEQ ID NO: 1541872 - RNA, 21 nt, Human adenovirus B (HAdV-B)
gcacauccaagaacaaaagaa

SEQ ID NO: 1541873 - RNA, 12 nt, Human adenovirus B (HAdV-B)
ccuuucucccaa

SEQ ID NO: 1541874 - RNA, 14 nt, Human adenovirus B (HAdV-B)
ccaucuuccagcag

SEQ ID NO: 1541875 - RNA, 16 nt, Human adenovirus B (HAdV-B)
gcaccgacucucccag

SEQ ID NO: 1541876 - RNA, 15 nt, Human adenovirus B (HAdV-B)
gagcucagccgcgcc

SEQ ID NO: 1541877 - RNA, 17 nt, Human adenovirus B (HAdV-B)
gcaaggccccagcagcc

SEQ ID NO: 1541878 - RNA, 17 nt, Human adenovirus B (HAdV-B)
ccgauccaugcuucugg

SEQ ID NO: 1541879 - RNA, 23 nt, Human adenovirus B (HAdV-B)
gacacggcuuugugcggcaggca

SEQ ID NO: 1541880 - RNA, 18 nt, Human adenovirus B (HAdV-B)
guacuggugacagaugcg

SEQ ID NO: 1541881 - RNA, 14 nt, Human adenovirus B (HAdV-B)
acaguuucacuucc

SEQ ID NO: 1541882 - RNA, 19 nt, Human adenovirus B (HAdV-B)
guugaucaccugggcagcu

SEQ ID NO: 1541883 - RNA, 11 nt, Human adenovirus B (HAdV-B)
gcucagccgcg

SEQ ID NO: 1541884 - RNA, 12 nt, Human adenovirus B (HAdV-B)
uuuccauuccuu

SEQ ID NO: 1541885 - RNA, 16 nt, Human adenovirus B (HAdV-B)
ccuggcaccuacggag

SEQ ID NO: 1541886 - RNA, 18 nt, Human adenovirus B (HAdV-B)
acaagcucuaaagugacu

SEQ ID NO: 1541887 - RNA, 19 nt, Human adenovirus B (HAdV-B)
cuggaggaagacaguuugg

SEQ ID NO: 1541888 - RNA, 15 nt, Human adenovirus B (HAdV-B)
gauguagaugccuau

SEQ ID NO: 1541889 - RNA, 14 nt, Human adenovirus B (HAdV-B)
auuuugccuccccc

SEQ ID NO: 1541890 - RNA, 13 nt, Human adenovirus B (HAdV-B)
acugguggccacc

SEQ ID NO: 1541891 - RNA, 22 nt, Human adenovirus B (HAdV-B)
gcccucauaaucauugcagcca

SEQ ID NO: 1541892 - RNA, 14 nt, Human adenovirus B (HAdV-B)
acaacuacuuucuc

SEQ ID NO: 1541893 - RNA, 19 nt, Human adenovirus B (HAdV-B)
cguguuggauugccacagc

SEQ ID NO: 1541894 - RNA, 16 nt, Human adenovirus B (HAdV-B)
gcagacaguaaaggaa

SEQ ID NO: 1541895 - RNA, 13 nt, Human adenovirus B (HAdV-B)
aggaggcggagga

SEQ ID NO: 1541896 - RNA, 14 nt, Human adenovirus B (HAdV-B)
gcaaaaauaaaaaa

SEQ ID NO: 1541897 - RNA, 14 nt, Human adenovirus B (HAdV-B)
uauauauacacaag

SEQ ID NO: 1541898 - RNA, 15 nt, Human adenovirus B (HAdV-B)
aauggggcugaggug

SEQ ID NO: 1541899 - RNA, 13 nt, Human adenovirus B (HAdV-B)
uccaucagcagac

SEQ ID NO: 1541900 - RNA, 14 nt, Human adenovirus B (HAdV-B)
aguuaacuggaugc

SEQ ID NO: 1541901 - RNA, 15 nt, Human adenovirus B (HAdV-B)
uucaaguacaaccac

SEQ ID NO: 1541902 - RNA, 20 nt, Human adenovirus B (HAdV-B)
augugcauauuaacaaucug

SEQ ID NO: 1541903 - RNA, 16 nt, Human adenovirus B (HAdV-B)
aacugcuuagccagaa

SEQ ID NO: 1541904 - RNA, 13 nt, Human adenovirus B (HAdV-B)
ggaggaggagagg

SEQ ID NO: 1541905 - RNA, 12 nt, Human adenovirus B (HAdV-B)
gaugacaccaac

SEQ ID NO: 1541906 - RNA, 20 nt, Human adenovirus B (HAdV-B)
ucaccugcggagcagagcag

SEQ ID NO: 1541907 - RNA, 22 nt, Human adenovirus B (HAdV-B)
agauucuugaagcuugguuacc

SEQ ID NO: 1541908 - RNA, 17 nt, Human adenovirus B (HAdV-B)
cuauuuagagacagaag

SEQ ID NO: 1541909 - RNA, 22 nt, Human adenovirus B (HAdV-B)
ucauagaagcucggguuucauu

SEQ ID NO: 1541910 - RNA, 22 nt, Human adenovirus B (HAdV-B)
caagcucuuacagaaaucucuu

SEQ ID NO: 1541911 - RNA, 22 nt, Human adenovirus B (HAdV-B)
gaaggggugugcgccugcuugg

SEQ ID NO: 1541912 - RNA, 13 nt, Human adenovirus B (HAdV-B)
auauguggccugg

SEQ ID NO: 1541913 - RNA, 19 nt, Human adenovirus B (HAdV-B)
cuaaccaggcugugcagaa

SEQ ID NO: 1541914 - RNA, 15 nt, Human adenovirus B (HAdV-B)
uacagcugcugcaga

SEQ ID NO: 1541915 - RNA, 18 nt, Human adenovirus B (HAdV-B)
cuagugaucgcacugcuu

SEQ ID NO: 1541916 - RNA, 20 nt, Human adenovirus B (HAdV-B)
cagaagcggcgaggagccgg

SEQ ID NO: 1541917 - RNA, 20 nt, Human adenovirus B (HAdV-B)
cucccagacucguacaaaua

SEQ ID NO: 1541918 - RNA, 14 nt, Human adenovirus B (HAdV-B)
gauggaacagcaag

SEQ ID NO: 1541919 - RNA, 17 nt, Human adenovirus B (HAdV-B)
gaagcauuuucccuacu

SEQ ID NO: 1541920 - RNA, 21 nt, Human adenovirus B (HAdV-B)
uggccauuguguucuccuagg

SEQ ID NO: 1541921 - RNA, 12 nt, Human adenovirus B (HAdV-B)
aauuuggggcgg

SEQ ID NO: 1541922 - RNA, 18 nt, Human adenovirus B (HAdV-B)
uuggaauaucuauucuug

SEQ ID NO: 1541923 - RNA, 17 nt, Human adenovirus B (HAdV-B)
cuuacauucaauucaaa

SEQ ID NO: 1541924 - RNA, 22 nt, Human adenovirus B (HAdV-B)
gccuccuugcagauauggcccu

SEQ ID NO: 1541925 - RNA, 22 nt, Human adenovirus B (HAdV-B)
gugcuggugggcauuguaauau

SEQ ID NO: 1541926 - RNA, 16 nt, Human adenovirus B (HAdV-B)
cgccaaacccaacaca

SEQ ID NO: 1541927 - RNA, 21 nt, Human adenovirus B (HAdV-B)
caggcgacggcggugaugcaa

SEQ ID NO: 1541928 - RNA, 17 nt, Human adenovirus B (HAdV-B)
cgcgccguagaagaggg

SEQ ID NO: 1541929 - RNA, 22 nt, Human adenovirus B (HAdV-B)
ugacuuuaugagccagagcaug

SEQ ID NO: 1541930 - RNA, 14 nt, Human adenovirus B (HAdV-B)
gacaguuuggagga

SEQ ID NO: 1541931 - RNA, 19 nt, Human adenovirus B (HAdV-B)
caugccuuucucccaagca

SEQ ID NO: 1541932 - RNA, 18 nt, Human adenovirus B (HAdV-B)
auauaaucuguugcacca

SEQ ID NO: 1541933 - RNA, 19 nt, Human adenovirus B (HAdV-B)
ggcacacguggcugcagcc

SEQ ID NO: 1541934 - RNA, 14 nt, Human adenovirus B (HAdV-B)
aacagcaagcaccg

SEQ ID NO: 1541935 - RNA, 21 nt, Human adenovirus B (HAdV-B)
uauagcuuccuuggaagaggu

SEQ ID NO: 1541936 - RNA, 19 nt, Human adenovirus B (HAdV-B)
cugccguugcgcagcagua

SEQ ID NO: 1541937 - RNA, 20 nt, Human adenovirus B (HAdV-B)
aagcuaauuugggacaacaa

SEQ ID NO: 1541938 - RNA, 22 nt, Human adenovirus B (HAdV-B)
cuagucuguuccacaguucagu

SEQ ID NO: 1541939 - RNA, 15 nt, Human adenovirus B (HAdV-B)
acacucaccaccucc

SEQ ID NO: 1541940 - RNA, 21 nt, Human adenovirus B (HAdV-B)
cuucgacccagaaaacugcac

SEQ ID NO: 1541941 - RNA, 15 nt, Human adenovirus B (HAdV-B)
uaccgauccaugcuu

SEQ ID NO: 1541942 - RNA, 18 nt, Human adenovirus B (HAdV-B)
agaaaauggcauggauga

SEQ ID NO: 1541943 - RNA, 19 nt, Human adenovirus B (HAdV-B)
aagacaguuuggaggagga

SEQ ID NO: 1541944 - RNA, 13 nt, Human adenovirus B (HAdV-B)
cgugaugcagcag

SEQ ID NO: 1541945 - RNA, 15 nt, Human adenovirus B (HAdV-B)
cuucaacauccagga

SEQ ID NO: 1541946 - RNA, 20 nt, Human adenovirus B (HAdV-B)
ugaggccacaacgcacagcc

SEQ ID NO: 1541947 - RNA, 16 nt, Human adenovirus B (HAdV-B)
ccagcggcgaggaugu

SEQ ID NO: 1541948 - RNA, 22 nt, Human adenovirus B (HAdV-B)
gcaaagagcucugacuggagcu

SEQ ID NO: 1541949 - RNA, 19 nt, Human adenovirus B (HAdV-B)
gcagaggaggcggaggagg

SEQ ID NO: 1541950 - RNA, 20 nt, Human adenovirus B (HAdV-B)
guagucgguauggaagcagu

SEQ ID NO: 1541951 - RNA, 20 nt, Human adenovirus B (HAdV-B)
guaagaaggaucggcaggga

SEQ ID NO: 1541952 - RNA, 13 nt, Human adenovirus B (HAdV-B)
cugguggccaccu

SEQ ID NO: 1541953 - RNA, 17 nt, Human adenovirus B (HAdV-B)
cccuugaagccaugcug

SEQ ID NO: 1541954 - RNA, 16 nt, Human adenovirus B (HAdV-B)
cauuaacuuugaugaa

SEQ ID NO: 1541955 - RNA, 17 nt, Human adenovirus B (HAdV-B)
augucauaaccugguug

SEQ ID NO: 1541956 - RNA, 17 nt, Human adenovirus B (HAdV-B)
cauugcuucucugaacu

SEQ ID NO: 1541957 - RNA, 19 nt, Human adenovirus B (HAdV-B)
agaaugacccgcaggcagu

SEQ ID NO: 1541958 - RNA, 22 nt, Human adenovirus B (HAdV-B)
uacaauuauggcgaucccgaaa

SEQ ID NO: 1541959 - RNA, 20 nt, Human adenovirus B (HAdV-B)
uaauaugcuaacuacacaca

SEQ ID NO: 1541960 - RNA, 13 nt, Human adenovirus B (HAdV-B)
aucgcgaagccau

SEQ ID NO: 1541961 - RNA, 19 nt, Human adenovirus B (HAdV-B)
ugagacccauuaagcaggu

SEQ ID NO: 1541962 - RNA, 12 nt, Human adenovirus B (HAdV-B)
gagaauuacuuc

SEQ ID NO: 1541963 - RNA, 15 nt, Human adenovirus B (HAdV-B)
ggcggcgaccuccaa

SEQ ID NO: 1541964 - RNA, 16 nt, Human adenovirus B (HAdV-B)
gagcuuaagcauucca

SEQ ID NO: 1541965 - RNA, 13 nt, Human adenovirus B (HAdV-B)
ugcuauuccacca

SEQ ID NO: 1541966 - RNA, 11 nt, Human adenovirus B (HAdV-B)
cggcaccugcg

SEQ ID NO: 1541967 - RNA, 18 nt, Human adenovirus B (HAdV-B)
ccggucacuuugcagcaa

SEQ ID NO: 1541968 - RNA, 15 nt, Human adenovirus B (HAdV-B)
cuacggaagccagca

SEQ ID NO: 1541969 - RNA, 19 nt, Human adenovirus B (HAdV-B)
caacgaauuuucucccagc

SEQ ID NO: 1541970 - RNA, 13 nt, Human adenovirus B (HAdV-B)
augugucugaagg

SEQ ID NO: 1541971 - RNA, 21 nt, Human adenovirus B (HAdV-B)
cuucuccggaucuccugggca

SEQ ID NO: 1541972 - RNA, 15 nt, Human adenovirus B (HAdV-B)
gagugcuugaaagug

SEQ ID NO: 1541973 - RNA, 23 nt, Human adenovirus B (HAdV-B)
accaccauucuuaaacacacccu

SEQ ID NO: 1541974 - RNA, 13 nt, Human adenovirus B (HAdV-B)
ccuaucacaucuu

SEQ ID NO: 1541975 - RNA, 16 nt, Human adenovirus B (HAdV-B)
uuaaaccggucacuuu

SEQ ID NO: 1541976 - RNA, 19 nt, Human adenovirus B (HAdV-B)
cuggacuacuugcacagag

SEQ ID NO: 1541977 - RNA, 12 nt, Human adenovirus B (HAdV-B)
gucacaggccuc

SEQ ID NO: 1541978 - RNA, 23 nt, Human adenovirus B (HAdV-B)
uggcaugagguucagaaagaggg

SEQ ID NO: 1541979 - RNA, 23 nt, Human adenovirus B (HAdV-B)
cacaacccccacuacucccugcu

SEQ ID NO: 1541980 - RNA, 15 nt, Human adenovirus B (HAdV-B)
cauagugcaggagcg

SEQ ID NO: 1541981 - RNA, 12 nt, Human adenovirus B (HAdV-B)
gaugccugggga

SEQ ID NO: 1541982 - RNA, 19 nt, Human adenovirus B (HAdV-B)
uacaccggauugcagcacu

SEQ ID NO: 1541983 - RNA, 15 nt, Human adenovirus B (HAdV-B)
uuaccccuacggaag

SEQ ID NO: 1541984 - RNA, 20 nt, Human adenovirus B (HAdV-B)
ucaccagggaaaaguacagu

SEQ ID NO: 1541985 - RNA, 14 nt, Human adenovirus B (HAdV-B)
caaucacaaaaggc

SEQ ID NO: 1541986 - RNA, 18 nt, Human adenovirus B (HAdV-B)
ccuuaucaaaugcucacu

SEQ ID NO: 1541987 - RNA, 18 nt, Human adenovirus B (HAdV-B)
gcacccaauuaggcuugu

SEQ ID NO: 1541988 - RNA, 12 nt, Human adenovirus B (HAdV-B)
uaugugcagcag

SEQ ID NO: 1541989 - RNA, 20 nt, Human adenovirus B (HAdV-B)
cucgcaacucugacuucugc

SEQ ID NO: 1541990 - RNA, 19 nt, Human adenovirus B (HAdV-B)
uaugcggccuaagagaccu

SEQ ID NO: 1541991 - RNA, 21 nt, Human adenovirus B (HAdV-B)
gggauaggggcguuaagaggg

SEQ ID NO: 1541992 - RNA, 13 nt, Human adenovirus B (HAdV-B)
gcacgccccaccg

SEQ ID NO: 1541993 - RNA, 15 nt, Human adenovirus B (HAdV-B)
uauggccuccuagca

SEQ ID NO: 1541994 - RNA, 20 nt, Human adenovirus B (HAdV-B)
ugaaggcgaggaggaagagg

SEQ ID NO: 1541995 - RNA, 20 nt, Human adenovirus B (HAdV-B)
cgaucucgcaguacuucaaa

SEQ ID NO: 1541996 - RNA, 19 nt, Human adenovirus B (HAdV-B)
caacgugacagcaaaugac

SEQ ID NO: 1541997 - RNA, 16 nt, Human adenovirus B (HAdV-B)
gcaaaacaaugacuuu

SEQ ID NO: 1541998 - RNA, 13 nt, Human adenovirus B (HAdV-B)
cagcagcaggcga

SEQ ID NO: 1541999 - RNA, 14 nt, Human adenovirus B (HAdV-B)
ugaccacagcaacu

SEQ ID NO: 1542000 - RNA, 17 nt, Human adenovirus B (HAdV-B)
cccaggacuacuccacc

SEQ ID NO: 1542001 - RNA, 23 nt, Human adenovirus B (HAdV-B)
cuugccagggugcgcuucagacu

SEQ ID NO: 1542002 - RNA, 21 nt, Human adenovirus B (HAdV-B)
cagaggcauacaugccacaga

SEQ ID NO: 1542003 - RNA, 17 nt, Human adenovirus B (HAdV-B)
auccaagaacaaaagaa

SEQ ID NO: 1542004 - RNA, 12 nt, Human adenovirus B (HAdV-B)
acaacacuuuca

SEQ ID NO: 1542005 - RNA, 17 nt, Human adenovirus B (HAdV-B)
cuguauaggagcauuug

SEQ ID NO: 1542006 - RNA, 19 nt, Human adenovirus B (HAdV-B)
aacugaauuaagacucucc

SEQ ID NO: 1542007 - RNA, 16 nt, Human adenovirus B (HAdV-B)
agauuacagccaacga

SEQ ID NO: 1542008 - RNA, 19 nt, Human adenovirus B (HAdV-B)
ucugcaacggcagagaccu

SEQ ID NO: 1542009 - RNA, 12 nt, Human adenovirus B (HAdV-B)
acggcaggaugu

SEQ ID NO: 1542010 - RNA, 19 nt, Human adenovirus B (HAdV-B)
ucaugucuuucuucccaga

SEQ ID NO: 1542011 - RNA, 21 nt, Human adenovirus B (HAdV-B)
gaggucccaguuucaaacccu

SEQ ID NO: 1542012 - RNA, 18 nt, Human adenovirus B (HAdV-B)
agacuagcagacagggcu

SEQ ID NO: 1542013 - RNA, 22 nt, Human adenovirus B (HAdV-B)
ugacuugucuccugaacugcaa

SEQ ID NO: 1542014 - RNA, 14 nt, Human adenovirus B (HAdV-B)
uacacugucucugu

SEQ ID NO: 1542015 - RNA, 18 nt, Human adenovirus B (HAdV-B)
cuuuuaaaacgcacugug

SEQ ID NO: 1542016 - RNA, 22 nt, Human adenovirus B (HAdV-B)
gcauccgcgaguucaacugaaa

SEQ ID NO: 1542017 - RNA, 12 nt, Human adenovirus B (HAdV-B)
guaagggcagca

SEQ ID NO: 1542018 - RNA, 20 nt, Human adenovirus B (HAdV-B)
uccugcccgccaccugcugc

SEQ ID NO: 1542019 - RNA, 14 nt, Human adenovirus B (HAdV-B)
cgaggaggaagagg

SEQ ID NO: 1542020 - RNA, 18 nt, Human adenovirus B (HAdV-B)
gcaguagaugggacgaga

SEQ ID NO: 1542021 - RNA, 21 nt, Human adenovirus B (HAdV-B)
ucaccaagaugcuggaaauag

SEQ ID NO: 1542022 - RNA, 15 nt, Human adenovirus B (HAdV-B)
ugauuaauugugaug

SEQ ID NO: 1542023 - RNA, 15 nt, Human adenovirus B (HAdV-B)
uugggugggagagga

SEQ ID NO: 1542024 - RNA, 19 nt, Human adenovirus B (HAdV-B)
gaguucuuacuuuaaaaug

SEQ ID NO: 1542025 - RNA, 13 nt, Human adenovirus B (HAdV-B)
agugucacugccg

SEQ ID NO: 1542026 - RNA, 12 nt, Human adenovirus B (HAdV-B)
gucaccucccca

SEQ ID NO: 1542027 - RNA, 11 nt, Human adenovirus B (HAdV-B)
gccacuugaau

SEQ ID NO: 1542028 - RNA, 14 nt, Human adenovirus B (HAdV-B)
gagccugggaucau

SEQ ID NO: 1542029 - RNA, 19 nt, Human adenovirus B (HAdV-B)
cgaugggucuucuccuggg

SEQ ID NO: 1542030 - RNA, 19 nt, Human adenovirus B (HAdV-B)
uacacacaauaacaaaacc

SEQ ID NO: 1542031 - RNA, 13 nt, Human adenovirus B (HAdV-B)
acuuuaaaauguu

SEQ ID NO: 1542032 - RNA, 18 nt, Human adenovirus B (HAdV-B)
ugcacaguuugcaaagag

SEQ ID NO: 1542033 - RNA, 16 nt, Human adenovirus B (HAdV-B)
ucauucacacagcagc

SEQ ID NO: 1542034 - RNA, 14 nt, Human adenovirus B (HAdV-B)
gcgcgcgcagucau

SEQ ID NO: 1542035 - RNA, 21 nt, Human adenovirus B (HAdV-B)
gacaugcaugacccagaugcc

SEQ ID NO: 1542036 - RNA, 18 nt, Human adenovirus B (HAdV-B)
aauaugcaugcuuuuaua

SEQ ID NO: 1542037 - RNA, 13 nt, Human adenovirus B (HAdV-B)
gcugcacagcacc

SEQ ID NO: 1542038 - RNA, 17 nt, Human adenovirus B (HAdV-B)
ccguagaagagggaugu

SEQ ID NO: 1542039 - RNA, 16 nt, Human adenovirus B (HAdV-B)
ggacaaugucaaccca

SEQ ID NO: 1542040 - RNA, 14 nt, Human adenovirus B (HAdV-B)
ucccggcagucucg

SEQ ID NO: 1542041 - RNA, 21 nt, Human adenovirus B (HAdV-B)
cggugcgggacagcccgccua

SEQ ID NO: 1542042 - RNA, 16 nt, Human adenovirus B (HAdV-B)
aguuggaggauuggcu

SEQ ID NO: 1542043 - RNA, 20 nt, Human adenovirus B (HAdV-B)
ggugacgcgcguagaugaac

SEQ ID NO: 1542044 - RNA, 12 nt, Human adenovirus B (HAdV-B)
acaaucuggcaa

SEQ ID NO: 1542045 - RNA, 15 nt, Human adenovirus B (HAdV-B)
gagcaguaucuggag

SEQ ID NO: 1542046 - RNA, 16 nt, Human adenovirus B (HAdV-B)
cgggguugggcaaagc

SEQ ID NO: 1542047 - RNA, 18 nt, Human adenovirus B (HAdV-B)
gaaugaaaauaaacuuug

SEQ ID NO: 1542048 - RNA, 17 nt, Human adenovirus B (HAdV-B)
ugugcgaauugccuacc

SEQ ID NO: 1542049 - RNA, 22 nt, Human adenovirus B (HAdV-B)
cccuguggugggugcagagcuu

SEQ ID NO: 1542050 - RNA, 14 nt, Human adenovirus B (HAdV-B)
uauccggaaugcuu

SEQ ID NO: 1542051 - RNA, 12 nt, Human adenovirus B (HAdV-B)
gauguccaagcg

SEQ ID NO: 1542052 - RNA, 17 nt, Human adenovirus B (HAdV-B)
gcuagaucugaguuggc

SEQ ID NO: 1542053 - RNA, 15 nt, Human adenovirus B (HAdV-B)
ucacgcuugccagca

SEQ ID NO: 1542054 - RNA, 20 nt, Human adenovirus B (HAdV-B)
cacuugaauucgggaaucac

SEQ ID NO: 1542055 - RNA, 16 nt, Human adenovirus B (HAdV-B)
aaaguuaacuggaugc

SEQ ID NO: 1542056 - RNA, 18 nt, Human adenovirus B (HAdV-B)
caccacacgauccacacu

SEQ ID NO: 1542057 - RNA, 21 nt, Human adenovirus B (HAdV-B)
aucggauucuuaacagugcag

SEQ ID NO: 1542058 - RNA, 14 nt, Human adenovirus B (HAdV-B)
gugugacagugcaa

SEQ ID NO: 1542059 - RNA, 13 nt, Human adenovirus B (HAdV-B)
guagagcgagccg

SEQ ID NO: 1542060 - RNA, 23 nt, Human adenovirus B (HAdV-B)
cauacuuuaaaggggaugucaaa

SEQ ID NO: 1542061 - RNA, 16 nt, Human adenovirus B (HAdV-B)
ggacgauuggacccag

SEQ ID NO: 1542062 - RNA, 17 nt, Human adenovirus B (HAdV-B)
ucuauugcuucccuacg

SEQ ID NO: 1542063 - RNA, 22 nt, Human adenovirus B (HAdV-B)
caguuugcaaagagcucugacu

SEQ ID NO: 1542064 - RNA, 16 nt, Human adenovirus B (HAdV-B)
guacguagcagcgaag

SEQ ID NO: 1542065 - RNA, 20 nt, Human adenovirus B (HAdV-B)
gaucucuacagcuaaaagug

SEQ ID NO: 1542066 - RNA, 14 nt, Human adenovirus B (HAdV-B)
ccgacucucccagg

SEQ ID NO: 1542067 - RNA, 20 nt, Human adenovirus B (HAdV-B)
ucucugcguucgcucaccag

SEQ ID NO: 1542068 - RNA, 17 nt, Human adenovirus B (HAdV-B)
uucggccugcgucauca

SEQ ID NO: 1542069 - RNA, 12 nt, Human adenovirus B (HAdV-B)
auccuucucaac

SEQ ID NO: 1542070 - RNA, 20 nt, Human adenovirus B (HAdV-B)
guaggcacgguuugaccagu

SEQ ID NO: 1542071 - RNA, 18 nt, Human adenovirus B (HAdV-B)
caaucacagccuccaaag

SEQ ID NO: 1542072 - RNA, 21 nt, Human adenovirus B (HAdV-B)
cugcguucgcucaccagaagu

SEQ ID NO: 1542073 - RNA, 23 nt, Human adenovirus B (HAdV-B)
agaaaugcauauuucaaagaugu

SEQ ID NO: 1542074 - RNA, 12 nt, Human adenovirus B (HAdV-B)
cagcgcuaccau

SEQ ID NO: 1542075 - RNA, 15 nt, Human adenovirus B (HAdV-B)
cauuauuggacagaa

SEQ ID NO: 1542076 - RNA, 13 nt, Human adenovirus B (HAdV-B)
ucaauaaacauca

SEQ ID NO: 1542077 - RNA, 15 nt, Human adenovirus B (HAdV-B)
cugcaacuacugcaa

SEQ ID NO: 1542078 - RNA, 14 nt, Human adenovirus B (HAdV-B)
gcaggcaagcagcc

SEQ ID NO: 1542079 - RNA, 22 nt, Human adenovirus B (HAdV-B)
ggcacucccgucucgacccagc

SEQ ID NO: 1542080 - RNA, 22 nt, Human adenovirus B (HAdV-B)
cuggcacgauucucacuugcca

SEQ ID NO: 1542081 - RNA, 17 nt, Human adenovirus B (HAdV-B)
agcuugcccucauaauc

SEQ ID NO: 1542082 - RNA, 15 nt, Human adenovirus B (HAdV-B)
auaagcauauuggga

SEQ ID NO: 1542083 - RNA, 22 nt, Human adenovirus B (HAdV-B)
gcagagcaggucuacuggucgc

SEQ ID NO: 1542084 - RNA, 17 nt, Human adenovirus B (HAdV-B)
caucuacuucgaacucc

SEQ ID NO: 1542085 - RNA, 16 nt, Human adenovirus B (HAdV-B)
ucccauagacaaggag

SEQ ID NO: 1542086 - RNA, 18 nt, Human adenovirus B (HAdV-B)
gacagacaucgagcaaga

SEQ ID NO: 1542087 - RNA, 18 nt, Human adenovirus B (HAdV-B)
uguugaucaccugggcag

SEQ ID NO: 1542088 - RNA, 22 nt, Human adenovirus B (HAdV-B)
uacuuuuggaacagucagcucu

SEQ ID NO: 1542089 - RNA, 22 nt, Human adenovirus B (HAdV-B)
guacgagagcgugaugcagcag

SEQ ID NO: 1542090 - RNA, 23 nt, Human adenovirus B (HAdV-B)
guuggauugccacagcuggcaga

SEQ ID NO: 1542091 - RNA, 19 nt, Human adenovirus B (HAdV-B)
aacgcaaaaaauggccugu

SEQ ID NO: 1542092 - RNA, 23 nt, Human adenovirus B (HAdV-B)
caaaguuuacagcgguuacuauu

SEQ ID NO: 1542093 - RNA, 16 nt, Human adenovirus B (HAdV-B)
agcaaccccaggccaa

SEQ ID NO: 1542094 - RNA, 15 nt, Human adenovirus B (HAdV-B)
ggugggugcagagcu

SEQ ID NO: 1542095 - RNA, 20 nt, Human adenovirus B (HAdV-B)
cagaccucaucuucccagag

SEQ ID NO: 1542096 - RNA, 17 nt, Human adenovirus B (HAdV-B)
accucugaccgcccagc

SEQ ID NO: 1542097 - RNA, 17 nt, Human adenovirus B (HAdV-B)
acaucacuuccaugccu

SEQ ID NO: 1542098 - RNA, 20 nt, Human adenovirus B (HAdV-B)
auagccacagcauuguggag

SEQ ID NO: 1542099 - RNA, 12 nt, Human adenovirus B (HAdV-B)
agaaauuacuug

SEQ ID NO: 1542100 - RNA, 17 nt, Human adenovirus B (HAdV-B)
gaugccuuuuccagaau

SEQ ID NO: 1542101 - RNA, 14 nt, Human adenovirus B (HAdV-B)
gcaaggccccagca

SEQ ID NO: 1542102 - RNA, 21 nt, Human adenovirus B (HAdV-B)
gagccagcgcaaacccgagag

SEQ ID NO: 1542103 - RNA, 16 nt, Human adenovirus B (HAdV-B)
cgagagcgugaugcag

SEQ ID NO: 1542104 - RNA, 18 nt, Human adenovirus B (HAdV-B)
cacuaugcaacugauggu

SEQ ID NO: 1542105 - RNA, 19 nt, Human adenovirus B (HAdV-B)
cuucaaccccuucuccgga

SEQ ID NO: 1542106 - RNA, 15 nt, Human adenovirus B (HAdV-B)
aagacaaacauaaag

SEQ ID NO: 1542107 - RNA, 20 nt, Human adenovirus B (HAdV-B)
aaacccaggguuuauuuccc

SEQ ID NO: 1542108 - RNA, 16 nt, Human adenovirus B (HAdV-B)
cucuuacagaaaucuc

SEQ ID NO: 1542109 - RNA, 15 nt, Human adenovirus B (HAdV-B)
ucuaccacuccagca

SEQ ID NO: 1542110 - RNA, 14 nt, Human adenovirus B (HAdV-B)
cagcacccagacca

SEQ ID NO: 1542111 - RNA, 22 nt, Human adenovirus B (HAdV-B)
cauaaaggugauccauuacuua

SEQ ID NO: 1542112 - RNA, 19 nt, Human adenovirus B (HAdV-B)
ucagcaauaaggucucugu

SEQ ID NO: 1542113 - RNA, 14 nt, Human adenovirus B (HAdV-B)
cuugcaggacagaa

SEQ ID NO: 1542114 - RNA, 14 nt, Human adenovirus B (HAdV-B)
cagcagcuccuuua

SEQ ID NO: 1542115 - RNA, 20 nt, Human adenovirus B (HAdV-B)
ugguuuuagauuccacauuc

SEQ ID NO: 1542116 - RNA, 14 nt, Human adenovirus B (HAdV-B)
cagcugcugcagaa

SEQ ID NO: 1542117 - RNA, 19 nt, Human adenovirus B (HAdV-B)
uuaccccuacggaagccag

SEQ ID NO: 1542118 - RNA, 17 nt, Human adenovirus B (HAdV-B)
aggcugauugccacaga

SEQ ID NO: 1542119 - RNA, 14 nt, Human adenovirus B (HAdV-B)
ugaaggaugaaaaa

SEQ ID NO: 1542120 - RNA, 16 nt, Human adenovirus B (HAdV-B)
gcugcugcuguggcuu

SEQ ID NO: 1542121 - RNA, 19 nt, Human adenovirus B (HAdV-B)
gcaaugcugaacgggguca

SEQ ID NO: 1542122 - RNA, 13 nt, Human adenovirus B (HAdV-B)
gacgaaguguacc

SEQ ID NO: 1542123 - RNA, 15 nt, Human adenovirus B (HAdV-B)
ccagguggucucugg

SEQ ID NO: 1542124 - RNA, 23 nt, Human adenovirus B (HAdV-B)
cacucggaugugaucgaggaugu

SEQ ID NO: 1542125 - RNA, 15 nt, Human adenovirus B (HAdV-B)
aacauucuacagagu

SEQ ID NO: 1542126 - RNA, 12 nt, Human adenovirus B (HAdV-B)
ccuuggaagagg

SEQ ID NO: 1542127 - RNA, 17 nt, Human adenovirus B (HAdV-B)
acccuccaguggaggag

SEQ ID NO: 1542128 - RNA, 18 nt, Human adenovirus B (HAdV-B)
gcuguuucugguggugca

SEQ ID NO: 1542129 - RNA, 14 nt, Human adenovirus B (HAdV-B)
gguggcaugagguu

SEQ ID NO: 1542130 - RNA, 23 nt, Human adenovirus B (HAdV-B)
cacggcuuugugcggcaggcaug

SEQ ID NO: 1542131 - RNA, 13 nt, Human adenovirus B (HAdV-B)
agaugccugggga

SEQ ID NO: 1542132 - RNA, 19 nt, Human adenovirus B (HAdV-B)
ugagaagguccuggccauc

SEQ ID NO: 1542133 - RNA, 14 nt, Human adenovirus B (HAdV-B)
ugugcucccugugg

SEQ ID NO: 1542134 - RNA, 15 nt, Human adenovirus B (HAdV-B)
auuuuggauuggauu

SEQ ID NO: 1542135 - RNA, 13 nt, Human adenovirus B (HAdV-B)
ccgucaccuccac

SEQ ID NO: 1542136 - RNA, 19 nt, Human adenovirus B (HAdV-B)
uccgcauuaguaacaacac

SEQ ID NO: 1542137 - RNA, 19 nt, Human adenovirus B (HAdV-B)
guuccugcucucacagauc

SEQ ID NO: 1542138 - RNA, 21 nt, Human adenovirus B (HAdV-B)
caguccgguccugauuacuuc

SEQ ID NO: 1542139 - RNA, 21 nt, Human adenovirus B (HAdV-B)
cacccgcaugaauuggcucag

SEQ ID NO: 1542140 - RNA, 18 nt, Human adenovirus B (HAdV-B)
agcaucauauugcuugaa

SEQ ID NO: 1542141 - RNA, 19 nt, Human adenovirus B (HAdV-B)
augcuaacuacacacagaa

SEQ ID NO: 1542142 - RNA, 18 nt, Human adenovirus B (HAdV-B)
aauggagugcuugaaagu

SEQ ID NO: 1542143 - RNA, 19 nt, Human adenovirus B (HAdV-B)
ccaaacuuauauugcaugg

SEQ ID NO: 1542144 - RNA, 13 nt, Human adenovirus B (HAdV-B)
gcgcccuccacca

SEQ ID NO: 1542145 - RNA, 13 nt, Human adenovirus B (HAdV-B)
ucauagccacagc

SEQ ID NO: 1542146 - RNA, 17 nt, Human adenovirus B (HAdV-B)
ccaauuaucgcugcugc

SEQ ID NO: 1542147 - RNA, 18 nt, Human adenovirus B (HAdV-B)
aaacccaacacacacccc

SEQ ID NO: 1542148 - RNA, 18 nt, Human adenovirus B (HAdV-B)
ucaccaaacugcuuagcc

SEQ ID NO: 1542149 - RNA, 21 nt, Human adenovirus B (HAdV-B)
aggaugugagcggagacggcu

SEQ ID NO: 1542150 - RNA, 20 nt, Human adenovirus B (HAdV-B)
gccaugcgagccgcaagagc

SEQ ID NO: 1542151 - RNA, 22 nt, Human adenovirus B (HAdV-B)
auuacuucuuucagacuagcag

SEQ ID NO: 1542152 - RNA, 23 nt, Human adenovirus B (HAdV-B)
gcucgaaaacugguuagcugcac

SEQ ID NO: 1542153 - RNA, 21 nt, Human adenovirus B (HAdV-B)
aguugaaggugcagccgccgc

SEQ ID NO: 1542154 - RNA, 17 nt, Human adenovirus B (HAdV-B)
uuccgaugagaggccuu

SEQ ID NO: 1542155 - RNA, 23 nt, Human adenovirus B (HAdV-B)
cccagggggcaauucuggcccaa

SEQ ID NO: 1542156 - RNA, 15 nt, Human adenovirus B (HAdV-B)
acucugaacuucuug

SEQ ID NO: 1542157 - RNA, 18 nt, Human adenovirus B (HAdV-B)
cuaccgcgagugcccccc

SEQ ID NO: 1542158 - RNA, 20 nt, Human adenovirus B (HAdV-B)
gcaggcacuucagcuugccc

SEQ ID NO: 1542159 - RNA, 19 nt, Human adenovirus B (HAdV-B)
uguggguuacauggcuccg

SEQ ID NO: 1542160 - RNA, 15 nt, Human adenovirus B (HAdV-B)
gucagccaugggcau

SEQ ID NO: 1542161 - RNA, 21 nt, Human adenovirus B (HAdV-B)
ccaaugucacucuuccagaaa

SEQ ID NO: 1542162 - RNA, 18 nt, Human adenovirus B (HAdV-B)
uaccagacaaaguacagc

SEQ ID NO: 1542163 - RNA, 21 nt, Human adenovirus B (HAdV-B)
ugcagaggcauacaugccaca

SEQ ID NO: 1542164 - RNA, 12 nt, Human adenovirus B (HAdV-B)
acaaaccuggaa

SEQ ID NO: 1542165 - RNA, 18 nt, Human adenovirus B (HAdV-B)
aguucgacaccaggaacu

SEQ ID NO: 1542166 - RNA, 13 nt, Human adenovirus B (HAdV-B)
uaccuuuggaagu

SEQ ID NO: 1542167 - RNA, 21 nt, Human adenovirus B (HAdV-B)
cgaagcaucgaggucacacac

SEQ ID NO: 1542168 - RNA, 19 nt, Human adenovirus B (HAdV-B)
ggggucuaccuugaccccc

SEQ ID NO: 1542169 - RNA, 22 nt, Human adenovirus B (HAdV-B)
ugguaaagauucccggaaguaa

SEQ ID NO: 1542170 - RNA, 14 nt, Human adenovirus B (HAdV-B)
cuccauggggcgcc

SEQ ID NO: 1542171 - RNA, 14 nt, Human adenovirus B (HAdV-B)
gaagauauggagga

SEQ ID NO: 1542172 - RNA, 16 nt, Human adenovirus B (HAdV-B)
ugcugcuucucccagg

SEQ ID NO: 1542173 - RNA, 16 nt, Human adenovirus B (HAdV-B)
cagaagacaugcauga

SEQ ID NO: 1542174 - RNA, 15 nt, Human adenovirus B (HAdV-B)
agguccguugaaauu

SEQ ID NO: 1542175 - RNA, 23 nt, Human adenovirus B (HAdV-B)
acaacagacauggaaacucagcc

SEQ ID NO: 1542176 - RNA, 18 nt, Human adenovirus B (HAdV-B)
gguggaacacgaggaaga

SEQ ID NO: 1542177 - RNA, 15 nt, Human adenovirus B (HAdV-B)
ucaaccccagguaga

SEQ ID NO: 1542178 - RNA, 18 nt, Human adenovirus B (HAdV-B)
acuggauuuccugccacc

SEQ ID NO: 1542179 - RNA, 14 nt, Human adenovirus B (HAdV-B)
agaaucgccuagga

SEQ ID NO: 1542180 - RNA, 17 nt, Human adenovirus B (HAdV-B)
uaugccaucuuccagca

SEQ ID NO: 1542181 - RNA, 16 nt, Human adenovirus B (HAdV-B)
ccacagggucuccagc

SEQ ID NO: 1542182 - RNA, 17 nt, Human adenovirus B (HAdV-B)
aggacagucuggaggac

SEQ ID NO: 1542183 - RNA, 22 nt, Human adenovirus B (HAdV-B)
cucacuucccucuucccaacuc

SEQ ID NO: 1542184 - RNA, 18 nt, Human adenovirus B (HAdV-B)
cuuacauugauuaauguu

SEQ ID NO: 1542185 - RNA, 16 nt, Human adenovirus B (HAdV-B)
gaucugaguuggcuuu

SEQ ID NO: 1542186 - RNA, 18 nt, Human adenovirus B (HAdV-B)
aaauuuucucccagcagc

SEQ ID NO: 1542187 - RNA, 16 nt, Human adenovirus B (HAdV-B)
uacauggguauucugc

SEQ ID NO: 1542188 - RNA, 14 nt, Human adenovirus B (HAdV-B)
cuccuuaaacaucu

SEQ ID NO: 1542189 - RNA, 16 nt, Human adenovirus B (HAdV-B)
ugcaaggccccagcag

SEQ ID NO: 1542190 - RNA, 22 nt, Human adenovirus B (HAdV-B)
caaccacaggcggaucucuaca

SEQ ID NO: 1542191 - RNA, 22 nt, Human adenovirus B (HAdV-B)
cagcaccgaaaguuccucgcgg

SEQ ID NO: 1542192 - RNA, 23 nt, Human adenovirus B (HAdV-B)
caggacuacuccacccgcaugaa

SEQ ID NO: 1542193 - RNA, 19 nt, Human adenovirus B (HAdV-B)
ugccuuaccaguguaacau

SEQ ID NO: 1542194 - RNA, 13 nt, Human adenovirus B (HAdV-B)
ugugugacagaac

SEQ ID NO: 1542195 - RNA, 16 nt, Human adenovirus B (HAdV-B)
auaguaucacaaucug

SEQ ID NO: 1542196 - RNA, 14 nt, Human adenovirus B (HAdV-B)
gaagguucuggggu

SEQ ID NO: 1542197 - RNA, 13 nt, Human adenovirus B (HAdV-B)
uucacucaaaucu

SEQ ID NO: 1542198 - RNA, 17 nt, Human adenovirus B (HAdV-B)
cugguuuuuauugcuuu

SEQ ID NO: 1542199 - RNA, 15 nt, Human adenovirus B (HAdV-B)
cauuacccggacgag

SEQ ID NO: 1542200 - RNA, 13 nt, Human adenovirus B (HAdV-B)
acccaacacacac

SEQ ID NO: 1542201 - RNA, 22 nt, Human adenovirus B (HAdV-B)
aagagcuagacgcguggggcga

SEQ ID NO: 1542202 - RNA, 17 nt, Human adenovirus B (HAdV-B)
ggauacguuuuggauuu

SEQ ID NO: 1542203 - RNA, 21 nt, Human adenovirus B (HAdV-B)
ccuccccaauuggcuccagca

SEQ ID NO: 1542204 - RNA, 17 nt, Human adenovirus B (HAdV-B)
acagcugcugcagaagc

SEQ ID NO: 1542205 - RNA, 17 nt, Human adenovirus B (HAdV-B)
uaaauccaauccacaca

SEQ ID NO: 1542206 - RNA, 14 nt, Human adenovirus B (HAdV-B)
agagccggccugga

SEQ ID NO: 1542207 - RNA, 21 nt, Human adenovirus B (HAdV-B)
gaugcauuauuggacagaacu

SEQ ID NO: 1542208 - RNA, 23 nt, Human adenovirus B (HAdV-B)
gagcuuccuuacauagaagaggc

SEQ ID NO: 1542209 - RNA, 18 nt, Human adenovirus B (HAdV-B)
ggauuucauagccacagc

SEQ ID NO: 1542210 - RNA, 17 nt, Human adenovirus B (HAdV-B)
cacuggacaugacagcg

SEQ ID NO: 1542211 - RNA, 12 nt, Human adenovirus B (HAdV-B)
ugcacgccccac

SEQ ID NO: 1542212 - RNA, 12 nt, Human adenovirus B (HAdV-B)
uggcaaugcuga

SEQ ID NO: 1542213 - RNA, 14 nt, Human adenovirus B (HAdV-B)
ccugguccugugac

SEQ ID NO: 1542214 - RNA, 13 nt, Human adenovirus B (HAdV-B)
agauauggaggaa

SEQ ID NO: 1542215 - RNA, 18 nt, Human adenovirus B (HAdV-B)
aguuggugcgauuggguu

SEQ ID NO: 1542216 - RNA, 20 nt, Human adenovirus B (HAdV-B)
ugcaacgaauuuucucccag

SEQ ID NO: 1542217 - RNA, 19 nt, Human adenovirus B (HAdV-B)
ugcuuagggcggccagacg

SEQ ID NO: 1542218 - RNA, 23 nt, Human adenovirus B (HAdV-B)
cugagcaauugagauuugccaca

SEQ ID NO: 1542219 - RNA, 14 nt, Human adenovirus B (HAdV-B)
aaugccaucaucuc

SEQ ID NO: 1542220 - RNA, 13 nt, Human adenovirus B (HAdV-B)
cuaugagaacagu

SEQ ID NO: 1542221 - RNA, 16 nt, Human adenovirus B (HAdV-B)
uacuugaaaucagcaa

SEQ ID NO: 1542222 - RNA, 21 nt, Human adenovirus B (HAdV-B)
cugcaaucaugcccacaucca

SEQ ID NO: 1542223 - RNA, 14 nt, Human adenovirus B (HAdV-B)
cuaaugauugcaaa

SEQ ID NO: 1542224 - RNA, 16 nt, Human adenovirus B (HAdV-B)
ugacaugaacaugcaa

SEQ ID NO: 1542225 - RNA, 13 nt, Human adenovirus B (HAdV-B)
ccgauccaugcuu

SEQ ID NO: 1542226 - RNA, 16 nt, Human adenovirus B (HAdV-B)
cuuccagaaaacaaaa

SEQ ID NO: 1542227 - RNA, 20 nt, Human adenovirus B (HAdV-B)
acaccuugcuucacuuucuu

SEQ ID NO: 1542228 - RNA, 22 nt, Human adenovirus B (HAdV-B)
aacaagugcagcaacaggagga

SEQ ID NO: 1542229 - RNA, 22 nt, Human adenovirus B (HAdV-B)
gcugaguuacuuucaagauggc

SEQ ID NO: 1542230 - RNA, 21 nt, Human adenovirus B (HAdV-B)
cagcauucguuauucggaacu

SEQ ID NO: 1542231 - RNA, 13 nt, Human adenovirus B (HAdV-B)
ccuaacaggaauu

SEQ ID NO: 1542232 - RNA, 21 nt, Human adenovirus B (HAdV-B)
auuccagucuccugccgcgcu

SEQ ID NO: 1542233 - RNA, 20 nt, Human adenovirus B (HAdV-B)
ugagaaauugguauuugaag

SEQ ID NO: 1542234 - RNA, 17 nt, Human adenovirus B (HAdV-B)
cucgguauaaaacaucc

SEQ ID NO: 1542235 - RNA, 22 nt, Human adenovirus B (HAdV-B)
accgcaaugguagugcggaacc

SEQ ID NO: 1542236 - RNA, 15 nt, Human adenovirus B (HAdV-B)
cgguccuuccagggu

SEQ ID NO: 1542237 - RNA, 19 nt, Human adenovirus B (HAdV-B)
gcggucaggcaaaacaaaa

SEQ ID NO: 1542238 - RNA, 22 nt, Human adenovirus B (HAdV-B)
gcgcgguuagcgccagcaggag

SEQ ID NO: 1542239 - RNA, 18 nt, Human adenovirus B (HAdV-B)
cacacugguggccaccuc

SEQ ID NO: 1542240 - RNA, 14 nt, Human adenovirus B (HAdV-B)
cauguaugcagaaa

SEQ ID NO: 1542241 - RNA, 16 nt, Human adenovirus B (HAdV-B)
agcucugacuggagcu

SEQ ID NO: 1542242 - RNA, 17 nt, Human adenovirus B (HAdV-B)
ccuauccuuucaaugau

SEQ ID NO: 1542243 - RNA, 21 nt, Human adenovirus B (HAdV-B)
acagaguucccucgguaacga

SEQ ID NO: 1542244 - RNA, 16 nt, Human adenovirus B (HAdV-B)
uaucaccaaacugcuu

SEQ ID NO: 1542245 - RNA, 16 nt, Human adenovirus B (HAdV-B)
cuguauaggagcauuu

SEQ ID NO: 1542246 - RNA, 17 nt, Human adenovirus B (HAdV-B)
ugcggaggaggagagga

SEQ ID NO: 1542247 - RNA, 13 nt, Human adenovirus B (HAdV-B)
guggaagaugaac

SEQ ID NO: 1542248 - RNA, 19 nt, Human adenovirus B (HAdV-B)
ccccuacuauagccagcaa

SEQ ID NO: 1542249 - RNA, 16 nt, Human adenovirus B (HAdV-B)
aagcugaaauuacaaa

SEQ ID NO: 1542250 - RNA, 16 nt, Human adenovirus B (HAdV-B)
agccggcgaaggcgca

SEQ ID NO: 1542251 - RNA, 18 nt, Human adenovirus B (HAdV-B)
uccugcaccauucccaga

SEQ ID NO: 1542252 - RNA, 23 nt, Human adenovirus B (HAdV-B)
gacauggaaacucagccauugcu

SEQ ID NO: 1542253 - RNA, 15 nt, Human adenovirus B (HAdV-B)
acaguuuggaggagg

SEQ ID NO: 1542254 - RNA, 21 nt, Human adenovirus B (HAdV-B)
caggcauuaguuuaaaagagg

SEQ ID NO: 1542255 - RNA, 13 nt, Human adenovirus B (HAdV-B)
agaucggacaggg

SEQ ID NO: 1542256 - RNA, 20 nt, Human adenovirus B (HAdV-B)
agcgugaguaagggcaaagg

SEQ ID NO: 1542257 - RNA, 20 nt, Human adenovirus B (HAdV-B)
augagucgcagacguccuga

SEQ ID NO: 1542258 - RNA, 18 nt, Human adenovirus B (HAdV-B)
uaagguucuguggacagg

SEQ ID NO: 1542259 - RNA, 17 nt, Human adenovirus B (HAdV-B)
aauuacaaagacuucaa

SEQ ID NO: 1542260 - RNA, 17 nt, Human adenovirus B (HAdV-B)
cuuaccggcucugggca

SEQ ID NO: 1542261 - RNA, 14 nt, Human adenovirus B (HAdV-B)
aucaaggcucugca

SEQ ID NO: 1542262 - RNA, 14 nt, Human adenovirus B (HAdV-B)
cuucucauaauuuu

SEQ ID NO: 1542263 - RNA, 21 nt, Human adenovirus B (HAdV-B)
gauaacuaucaccaagaugcu

SEQ ID NO: 1542264 - RNA, 15 nt, Human adenovirus B (HAdV-B)
gacccuaugcggccu

SEQ ID NO: 1542265 - RNA, 10 nt, Human adenovirus B (HAdV-B)
gaccucccca

SEQ ID NO: 1542266 - RNA, 14 nt, Human adenovirus B (HAdV-B)
acuggccagugcag

SEQ ID NO: 1542267 - RNA, 21 nt, Human adenovirus B (HAdV-B)
aaaugggauuggcggcaggcg

SEQ ID NO: 1542268 - RNA, 22 nt, Human adenovirus B (HAdV-B)
gaacaaagcuuggaacagcagu

SEQ ID NO: 1542269 - RNA, 21 nt, Human adenovirus B (HAdV-B)
acauauccuucacgcggcgcu

SEQ ID NO: 1542270 - RNA, 14 nt, Human adenovirus B (HAdV-B)
cuucucaaagagcu

SEQ ID NO: 1542271 - RNA, 22 nt, Human adenovirus B (HAdV-B)
cccagggaauaggaagcucuug

SEQ ID NO: 1542272 - RNA, 16 nt, Human adenovirus B (HAdV-B)
cagcacugaaacacca

SEQ ID NO: 1542273 - RNA, 17 nt, Human adenovirus B (HAdV-B)
augccuuaccaguguaa

SEQ ID NO: 1542274 - RNA, 16 nt, Human adenovirus B (HAdV-B)
ucgcagcagcagcagc

SEQ ID NO: 1542275 - RNA, 23 nt, Human adenovirus B (HAdV-B)
aguggucagugaugagcagcuaa

SEQ ID NO: 1542276 - RNA, 19 nt, Human adenovirus B (HAdV-B)
cagcucuuaccaccacgcc

SEQ ID NO: 1542277 - RNA, 16 nt, Human adenovirus B (HAdV-B)
aggucaauuacaaaga

SEQ ID NO: 1542278 - RNA, 19 nt, Human adenovirus B (HAdV-B)
uuccagccuugaauuauuc

SEQ ID NO: 1542279 - RNA, 21 nt, Human adenovirus B (HAdV-B)
ugggacaggaagacacuggca

SEQ ID NO: 1542280 - RNA, 14 nt, Human adenovirus B (HAdV-B)
ccugcugcuacugc

SEQ ID NO: 1542281 - RNA, 17 nt, Human adenovirus B (HAdV-B)
ccccuacuauagccagc

SEQ ID NO: 1542282 - RNA, 17 nt, Human adenovirus B (HAdV-B)
cgggcggcgcugcagag

SEQ ID NO: 1542283 - RNA, 19 nt, Human adenovirus B (HAdV-B)
agacucucgccugcaacga

SEQ ID NO: 1542284 - RNA, 17 nt, Human adenovirus B (HAdV-B)
augcaucccgugcugcg

SEQ ID NO: 1542285 - RNA, 16 nt, Human adenovirus B (HAdV-B)
uaggcugauugccaca

SEQ ID NO: 1542286 - RNA, 21 nt, Human adenovirus B (HAdV-B)
aacgaauuuucucccagcggc

SEQ ID NO: 1542287 - RNA, 21 nt, Human adenovirus B (HAdV-B)
ugaaguuucuguauugcagga

SEQ ID NO: 1542288 - RNA, 17 nt, Human adenovirus B (HAdV-B)
ugaaagcaccucccaac

SEQ ID NO: 1542289 - RNA, 13 nt, Human adenovirus B (HAdV-B)
uagcccuuaacau

SEQ ID NO: 1542290 - RNA, 18 nt, Human adenovirus B (HAdV-B)
ccggagacagggaggauu

SEQ ID NO: 1542291 - RNA, 14 nt, Human adenovirus B (HAdV-B)
cagaggugcaaacc

SEQ ID NO: 1542292 - RNA, 21 nt, Human adenovirus B (HAdV-B)
cagaagacaugcaugacccag

SEQ ID NO: 1542293 - RNA, 20 nt, Human adenovirus B (HAdV-B)
caucgcgcgguuagcgccag

SEQ ID NO: 1542294 - RNA, 17 nt, Human adenovirus B (HAdV-B)
ggagccggaggagaugc

SEQ ID NO: 1542295 - RNA, 22 nt, Human adenovirus B (HAdV-B)
gcauaugcaaaucccaaccaag

SEQ ID NO: 1542296 - RNA, 22 nt, Human adenovirus B (HAdV-B)
aucagagaagacgacugacaaa

SEQ ID NO: 1542297 - RNA, 12 nt, Human adenovirus B (HAdV-B)
aaugacagaaug

SEQ ID NO: 1542298 - RNA, 20 nt, Human adenovirus B (HAdV-B)
auagcaauggggccgugggc

SEQ ID NO: 1542299 - RNA, 14 nt, Human adenovirus B (HAdV-B)
agcgggcuuaaaaa

SEQ ID NO: 1542300 - RNA, 11 nt, Human adenovirus B (HAdV-B)
aacugcacacu

SEQ ID NO: 1542301 - RNA, 18 nt, Human adenovirus B (HAdV-B)
aaaggcgcgcguccaggc

SEQ ID NO: 1542302 - RNA, 18 nt, Human adenovirus B (HAdV-B)
gcgccaugacagacagag

SEQ ID NO: 1542303 - RNA, 14 nt, Human adenovirus B (HAdV-B)
acacuucugcccca

SEQ ID NO: 1542304 - RNA, 17 nt, Human adenovirus B (HAdV-B)
cauuuucccuacuaaua

SEQ ID NO: 1542305 - RNA, 22 nt, Human adenovirus B (HAdV-B)
ccuaacaggaauuuuugacaug

SEQ ID NO: 1542306 - RNA, 20 nt, Human adenovirus B (HAdV-B)
aagcaccucccaacaccccu

SEQ ID NO: 1542307 - RNA, 16 nt, Human adenovirus B (HAdV-B)
cagcuccgccagucca

SEQ ID NO: 1542308 - RNA, 13 nt, Human adenovirus B (HAdV-B)
acaagcgcagacc

SEQ ID NO: 1542309 - RNA, 14 nt, Human adenovirus B (HAdV-B)
ggauugccacagcu

SEQ ID NO: 1542310 - RNA, 14 nt, Human adenovirus B (HAdV-B)
ugacauuggaaaaa

SEQ ID NO: 1542311 - RNA, 14 nt, Human adenovirus B (HAdV-B)
acggcuugcuggag

SEQ ID NO: 1542312 - RNA, 20 nt, Human adenovirus B (HAdV-B)
cauccaaaaaucccgccaag

SEQ ID NO: 1542313 - RNA, 14 nt, Human adenovirus B (HAdV-B)
ucucacuugccacc

SEQ ID NO: 1542314 - RNA, 21 nt, Human adenovirus B (HAdV-B)
cacaugggagccaggaguucc

SEQ ID NO: 1542315 - RNA, 20 nt, Human adenovirus B (HAdV-B)
uuacugugcguaugcauaca

SEQ ID NO: 1542316 - RNA, 18 nt, Human adenovirus B (HAdV-B)
ccuuaccaguguaacaug

SEQ ID NO: 1542317 - RNA, 15 nt, Human adenovirus B (HAdV-B)
acgcacaagcaaacc

SEQ ID NO: 1542318 - RNA, 15 nt, Human adenovirus B (HAdV-B)
gcugauugccacaga

SEQ ID NO: 1542319 - RNA, 20 nt, Human adenovirus B (HAdV-B)
ugggcauuacccggacgagu

SEQ ID NO: 1542320 - RNA, 22 nt, Human adenovirus B (HAdV-B)
aacccggcggcgucccagcagu

SEQ ID NO: 1542321 - RNA, 16 nt, Human adenovirus B (HAdV-B)
cggaucuccugggcau

SEQ ID NO: 1542322 - RNA, 13 nt, Human adenovirus B (HAdV-B)
uaauucuacaacu

SEQ ID NO: 1542323 - RNA, 17 nt, Human adenovirus B (HAdV-B)
acauacaacaauuucca

SEQ ID NO: 1542324 - RNA, 15 nt, Human adenovirus B (HAdV-B)
aaauauucacuggaa

SEQ ID NO: 1542325 - RNA, 22 nt, Human adenovirus B (HAdV-B)
ggacaggguucgacgagcgcac

SEQ ID NO: 1542326 - RNA, 15 nt, Human adenovirus B (HAdV-B)
gaucuucgagggucu

SEQ ID NO: 1542327 - RNA, 16 nt, Human adenovirus B (HAdV-B)
ccacacuucugcccca

SEQ ID NO: 1542328 - RNA, 19 nt, Human adenovirus B (HAdV-B)
ccugcagaaaucuucccau

SEQ ID NO: 1542329 - RNA, 16 nt, Human adenovirus B (HAdV-B)
ucaaaaccucugggau

SEQ ID NO: 1542330 - RNA, 22 nt, Human adenovirus B (HAdV-B)
uggcaauauugccgccaagauc

SEQ ID NO: 1542331 - RNA, 20 nt, Human adenovirus B (HAdV-B)
gccugacuuuaugagccaga

SEQ ID NO: 1542332 - RNA, 13 nt, Human adenovirus B (HAdV-B)
uggcuuccagcaa

SEQ ID NO: 1542333 - RNA, 20 nt, Human adenovirus B (HAdV-B)
auggcuuaccagacaaagua

SEQ ID NO: 1542334 - RNA, 19 nt, Human adenovirus B (HAdV-B)
uacgauugaugucugguga

SEQ ID NO: 1542335 - RNA, 13 nt, Human adenovirus B (HAdV-B)
acuuuuuucccca

SEQ ID NO: 1542336 - RNA, 13 nt, Human adenovirus B (HAdV-B)
ccaauccaaccuu

SEQ ID NO: 1542337 - RNA, 11 nt, Human adenovirus B (HAdV-B)
ccagaaugagc

SEQ ID NO: 1542338 - RNA, 18 nt, Human adenovirus B (HAdV-B)
ggacagucuggaggaaga

SEQ ID NO: 1542339 - RNA, 15 nt, Human adenovirus B (HAdV-B)
uggaaugcucccaau

SEQ ID NO: 1542340 - RNA, 14 nt, Human adenovirus B (HAdV-B)
acaacaauuuccac

SEQ ID NO: 1542341 - RNA, 18 nt, Human adenovirus B (HAdV-B)
cgaagagcaauaaaugac

SEQ ID NO: 1542342 - RNA, 19 nt, Human adenovirus B (HAdV-B)
cgcugucaaccugcccccu

SEQ ID NO: 1542343 - RNA, 14 nt, Human adenovirus B (HAdV-B)
cugugcgaggauga

SEQ ID NO: 1542344 - RNA, 22 nt, Human adenovirus B (HAdV-B)
ucuucccagagcgucucagggu

SEQ ID NO: 1542345 - RNA, 13 nt, Human adenovirus B (HAdV-B)
acagcagagacaa

SEQ ID NO: 1542346 - RNA, 17 nt, Human adenovirus B (HAdV-B)
ugcaguuauugacagug

SEQ ID NO: 1542347 - RNA, 23 nt, Human adenovirus B (HAdV-B)
acaccuguuccgacugcagaauc

SEQ ID NO: 1542348 - RNA, 23 nt, Human adenovirus B (HAdV-B)
ccaagauagcuuugaggccugau

SEQ ID NO: 1542349 - RNA, 13 nt, Human adenovirus B (HAdV-B)
agcggguuaaaaa

SEQ ID NO: 1542350 - RNA, 15 nt, Human adenovirus B (HAdV-B)
aucaugcccacaucc

SEQ ID NO: 1542351 - RNA, 22 nt, Human adenovirus B (HAdV-B)
gcuggacuugggugggagagga

SEQ ID NO: 1542352 - RNA, 18 nt, Human adenovirus B (HAdV-B)
ugcuuaaccgaagagcaa

SEQ ID NO: 1542353 - RNA, 23 nt, Human adenovirus B (HAdV-B)
caguuuggaagccacucugaacu

SEQ ID NO: 1542354 - RNA, 17 nt, Human adenovirus B (HAdV-B)
ucaccuccacagccccu

SEQ ID NO: 1542355 - RNA, 15 nt, Human adenovirus B (HAdV-B)
cuugcaggucugccu

SEQ ID NO: 1542356 - RNA, 16 nt, Human adenovirus B (HAdV-B)
agcagcgugcuggacu

SEQ ID NO: 1542357 - RNA, 13 nt, Human adenovirus B (HAdV-B)
ccaccccucgcgg

SEQ ID NO: 1542358 - RNA, 23 nt, Human adenovirus B (HAdV-B)
gacgaaaguacgguccagcaagu

SEQ ID NO: 1542359 - RNA, 22 nt, Human adenovirus B (HAdV-B)
cagugguugacuugcaggacag

SEQ ID NO: 1542360 - RNA, 15 nt, Human adenovirus B (HAdV-B)
uacuuugccagaagg

SEQ ID NO: 1542361 - RNA, 23 nt, Human adenovirus B (HAdV-B)
gucucaguguucgagucaggguu

SEQ ID NO: 1542362 - RNA, 23 nt, Human adenovirus B (HAdV-B)
gaagauugggacagucaggcaga

SEQ ID NO: 1542363 - RNA, 19 nt, Human adenovirus B (HAdV-B)
aaaccucugcuacaacccu

SEQ ID NO: 1542364 - RNA, 18 nt, Human adenovirus B (HAdV-B)
guaucauucccugcagaa

SEQ ID NO: 1542365 - RNA, 20 nt, Human adenovirus B (HAdV-B)
auguguugagaccuggaacu

SEQ ID NO: 1542366 - RNA, 19 nt, Human adenovirus B (HAdV-B)
cugguggugcaacacagca

SEQ ID NO: 1542367 - RNA, 15 nt, Human adenovirus B (HAdV-B)
gcugcaaaaguucua

SEQ ID NO: 1542368 - RNA, 14 nt, Human adenovirus B (HAdV-B)
cugcaaucaugccc

SEQ ID NO: 1542369 - RNA, 23 nt, Human adenovirus B (HAdV-B)
caagcgcaaauacaaggaagaaa

SEQ ID NO: 1542370 - RNA, 17 nt, Human adenovirus B (HAdV-B)
gaugauugggagguggc

SEQ ID NO: 1542371 - RNA, 14 nt, Human adenovirus B (HAdV-B)
gaaaucuucccauc

SEQ ID NO: 1542372 - RNA, 16 nt, Human adenovirus B (HAdV-B)
ugcauuauuggacaga

SEQ ID NO: 1542373 - RNA, 16 nt, Human adenovirus B (HAdV-B)
uaagucgcccgaguuu

SEQ ID NO: 1542374 - RNA, 16 nt, Human adenovirus B (HAdV-B)
agcugcugcagaagcu

SEQ ID NO: 1542375 - RNA, 18 nt, Human adenovirus B (HAdV-B)
ggcgacggcggugaugca

SEQ ID NO: 1542376 - RNA, 16 nt, Human adenovirus B (HAdV-B)
cuaggcggagcggugg

SEQ ID NO: 1542377 - RNA, 12 nt, Human adenovirus B (HAdV-B)
gcucaccagaag

SEQ ID NO: 1542378 - RNA, 17 nt, Human adenovirus B (HAdV-B)
ucuacagauacuggaug

SEQ ID NO: 1542379 - RNA, 16 nt, Human adenovirus B (HAdV-B)
aaucaugcccacaucc

SEQ ID NO: 1542380 - RNA, 18 nt, Human adenovirus B (HAdV-B)
uggaacaauaccuuaucc

SEQ ID NO: 1542381 - RNA, 20 nt, Human adenovirus B (HAdV-B)
cgcgguuagcgccagcagga

SEQ ID NO: 1542382 - RNA, 11 nt, Human adenovirus B (HAdV-B)
uuccagucucc

SEQ ID NO: 1542383 - RNA, 19 nt, Human adenovirus B (HAdV-B)
ucuuaaacccgcacuggcu

SEQ ID NO: 1542384 - RNA, 23 nt, Human adenovirus B (HAdV-B)
cugcuugggcgcuugccagggug

SEQ ID NO: 1542385 - RNA, 13 nt, Human adenovirus B (HAdV-B)
aaagcacaagcuc

SEQ ID NO: 1542386 - RNA, 16 nt, Human adenovirus B (HAdV-B)
uccugcccgccaccug

SEQ ID NO: 1542387 - RNA, 15 nt, Human adenovirus B (HAdV-B)
uccuaggcagagaaa

SEQ ID NO: 1542388 - RNA, 21 nt, Human adenovirus B (HAdV-B)
aaacuuaaagaccagaacuuc

SEQ ID NO: 1542389 - RNA, 12 nt, Human adenovirus B (HAdV-B)
ccgucuggccaa

SEQ ID NO: 1542390 - RNA, 13 nt, Human adenovirus B (HAdV-B)
agcaacaggagga

SEQ ID NO: 1542391 - RNA, 14 nt, Human adenovirus B (HAdV-B)
caggcuguccgugu

SEQ ID NO: 1542392 - RNA, 15 nt, Human adenovirus B (HAdV-B)
uucccagauaauuuu

SEQ ID NO: 1542393 - RNA, 20 nt, Human adenovirus B (HAdV-B)
cuuaucaacauucuacagag

SEQ ID NO: 1542394 - RNA, 12 nt, Human adenovirus B (HAdV-B)
caguugaaaacc

SEQ ID NO: 1542395 - RNA, 17 nt, Human adenovirus B (HAdV-B)
ggcccaauugcaagcca

SEQ ID NO: 1542396 - RNA, 18 nt, Human adenovirus B (HAdV-B)
acgcaaaaaauggccugu

SEQ ID NO: 1542397 - RNA, 13 nt, Human adenovirus B (HAdV-B)
ccggcaggucccg

SEQ ID NO: 1542398 - RNA, 21 nt, Human adenovirus B (HAdV-B)
gucgcuuccgaccuggcagac

SEQ ID NO: 1542399 - RNA, 13 nt, Human adenovirus B (HAdV-B)
ucacacagcagcg

SEQ ID NO: 1542400 - RNA, 18 nt, Human adenovirus B (HAdV-B)
ugccacauccgguggggc

SEQ ID NO: 1542401 - RNA, 14 nt, Human adenovirus B (HAdV-B)
cuauuuagagacag

SEQ ID NO: 1542402 - RNA, 18 nt, Human adenovirus B (HAdV-B)
acgcggcccuggcagaac

SEQ ID NO: 1542403 - RNA, 11 nt, Human adenovirus B (HAdV-B)
auugccacagc

SEQ ID NO: 1542404 - RNA, 20 nt, Human adenovirus B (HAdV-B)
ggcgcccuccaccaccauuc

SEQ ID NO: 1542405 - RNA, 20 nt, Human adenovirus B (HAdV-B)
cgcucgauuguugaucaccu

SEQ ID NO: 1542406 - RNA, 22 nt, Human adenovirus B (HAdV-B)
ccgaccuggcagaccucaucuu

SEQ ID NO: 1542407 - RNA, 23 nt, Human adenovirus B (HAdV-B)
accacgguggugcaaaacaauga

SEQ ID NO: 1542408 - RNA, 16 nt, Human adenovirus B (HAdV-B)
gcugcgcuccaacauu

SEQ ID NO: 1542409 - RNA, 11 nt, Human adenovirus B (HAdV-B)
agugcagcaac

SEQ ID NO: 1542410 - RNA, 15 nt, Human adenovirus B (HAdV-B)
cauagauaauuacuu

SEQ ID NO: 1542411 - RNA, 22 nt, Human adenovirus B (HAdV-B)
ggaggaaaacgaggaggcagag

SEQ ID NO: 1542412 - RNA, 23 nt, Human adenovirus B (HAdV-B)
gggcccauacuagucuugcuugu

SEQ ID NO: 1542413 - RNA, 18 nt, Human adenovirus B (HAdV-B)
ugguuaccgaggaagaaa

SEQ ID NO: 1542414 - RNA, 18 nt, Human adenovirus B (HAdV-B)
cuuugauauaaucugcaa

SEQ ID NO: 1542415 - RNA, 16 nt, Human adenovirus B (HAdV-B)
ggaggagaugcgagcu

SEQ ID NO: 1542416 - RNA, 19 nt, Human adenovirus B (HAdV-B)
cgcuuccgaccuggcagac

SEQ ID NO: 1542417 - RNA, 12 nt, Human adenovirus B (HAdV-B)
cauagccacagc

SEQ ID NO: 1542418 - RNA, 16 nt, Human adenovirus B (HAdV-B)
cuaccuugacccccag

SEQ ID NO: 1542419 - RNA, 12 nt, Human adenovirus B (HAdV-B)
auuacagccaac

SEQ ID NO: 1542420 - RNA, 19 nt, Human adenovirus B (HAdV-B)
gagagcccauucgugcagg

SEQ ID NO: 1542421 - RNA, 15 nt, Human adenovirus B (HAdV-B)
ggucgcagugcaugg

SEQ ID NO: 1542422 - RNA, 21 nt, Human adenovirus B (HAdV-B)
auguugaaaugggcaugaggu

SEQ ID NO: 1542423 - RNA, 13 nt, Human adenovirus B (HAdV-B)
cugcagaaucauu

SEQ ID NO: 1542424 - RNA, 16 nt, Human adenovirus B (HAdV-B)
uacaguuucacuuccg

SEQ ID NO: 1542425 - RNA, 20 nt, Human adenovirus B (HAdV-B)
guaaaaauugaauaaaagaa

SEQ ID NO: 1542426 - RNA, 12 nt, Human adenovirus B (HAdV-B)
ggugacaaguac

SEQ ID NO: 1542427 - RNA, 20 nt, Human adenovirus B (HAdV-B)
uuauaaacccaggguuuauu

SEQ ID NO: 1542428 - RNA, 14 nt, Human adenovirus B (HAdV-B)
ugcaguggcagccu

SEQ ID NO: 1542429 - RNA, 15 nt, Human adenovirus B (HAdV-B)
ucuaccgccagugcu

SEQ ID NO: 1542430 - RNA, 14 nt, Human adenovirus B (HAdV-B)
aaggcuacaacgua

SEQ ID NO: 1542431 - RNA, 19 nt, Human adenovirus B (HAdV-B)
auucuacugguaauuuacu

SEQ ID NO: 1542432 - RNA, 23 nt, Human adenovirus B (HAdV-B)
ugcaucgcuguccggggucaugg

SEQ ID NO: 1542433 - RNA, 18 nt, Human adenovirus B (HAdV-B)
ugauuucacucaaaucuu

SEQ ID NO: 1542434 - RNA, 21 nt, Human adenovirus B (HAdV-B)
ggcggaugaaggcgaggagga

SEQ ID NO: 1542435 - RNA, 19 nt, Human adenovirus B (HAdV-B)
acaguuucacauuccacca

SEQ ID NO: 1542436 - RNA, 13 nt, Human adenovirus B (HAdV-B)
uugaaacgcuuuc

SEQ ID NO: 1542437 - RNA, 13 nt, Human adenovirus B (HAdV-B)
cucccuggcuccu

SEQ ID NO: 1542438 - RNA, 20 nt, Human adenovirus B (HAdV-B)
caccaccucuacccuagaag

SEQ ID NO: 1542439 - RNA, 14 nt, Human adenovirus B (HAdV-B)
gagacaagcaacag

SEQ ID NO: 1542440 - RNA, 22 nt, Human adenovirus B (HAdV-B)
aucucuccuaccacucggaugu

SEQ ID NO: 1542441 - RNA, 22 nt, Human adenovirus B (HAdV-B)
cuuagauuugauauuuaauuug

SEQ ID NO: 1542442 - RNA, 19 nt, Human adenovirus B (HAdV-B)
auaugcuggcuacugugca

SEQ ID NO: 1542443 - RNA, 18 nt, Human adenovirus B (HAdV-B)
caacaauaccuguguaga

SEQ ID NO: 1542444 - RNA, 14 nt, Human adenovirus B (HAdV-B)
uacuauagccagca

SEQ ID NO: 1542445 - RNA, 17 nt, Human adenovirus B (HAdV-B)
acaguaaagcuggcaga

SEQ ID NO: 1542446 - RNA, 19 nt, Human adenovirus B (HAdV-B)
auaaaaaaaaaaacaagcg

SEQ ID NO: 1542447 - RNA, 23 nt, Human adenovirus B (HAdV-B)
gauccauggaugcccaugccuau

SEQ ID NO: 1542448 - RNA, 19 nt, Human adenovirus B (HAdV-B)
ucaacgguggcuuccagca

SEQ ID NO: 1542449 - RNA, 21 nt, Human adenovirus B (HAdV-B)
ggcaacuccgacugcagcacu

SEQ ID NO: 1542450 - RNA, 13 nt, Human adenovirus B (HAdV-B)
gcaguggcagccu

SEQ ID NO: 1542451 - RNA, 15 nt, Human adenovirus B (HAdV-B)
cugaacgggggcgcc

SEQ ID NO: 1542452 - RNA, 13 nt, Human adenovirus B (HAdV-B)
aacuacauuuacg

SEQ ID NO: 1542453 - RNA, 17 nt, Human adenovirus B (HAdV-B)
cucgagcugccagugcg

SEQ ID NO: 1542454 - RNA, 21 nt, Human adenovirus B (HAdV-B)
aauacauacucuuacaaagug

SEQ ID NO: 1542455 - RNA, 15 nt, Human adenovirus B (HAdV-B)
ugacagaugcgcuug

SEQ ID NO: 1542456 - RNA, 20 nt, Human adenovirus B (HAdV-B)
caaugaggcuuucagagagg

SEQ ID NO: 1542457 - RNA, 12 nt, Human adenovirus B (HAdV-B)
aaucugcaacaa

SEQ ID NO: 1542458 - RNA, 21 nt, Human adenovirus B (HAdV-B)
ccgcccuaguguaccaggaaa

SEQ ID NO: 1542459 - RNA, 21 nt, Human adenovirus B (HAdV-B)
agggcugcgguccgaccugga

SEQ ID NO: 1542460 - RNA, 16 nt, Human adenovirus B (HAdV-B)
ccaggaacgucagcug

SEQ ID NO: 1542461 - RNA, 16 nt, Human adenovirus B (HAdV-B)
cccagaaauuggcccg

SEQ ID NO: 1542462 - RNA, 11 nt, Human adenovirus B (HAdV-B)
ucugugggguc

SEQ ID NO: 1542463 - RNA, 14 nt, Human adenovirus B (HAdV-B)
auaugugcagcaga

SEQ ID NO: 1542464 - RNA, 16 nt, Human adenovirus B (HAdV-B)
ugccauccuucucaac

SEQ ID NO: 1542465 - RNA, 18 nt, Human adenovirus B (HAdV-B)
ucccagggauuuggaaga

SEQ ID NO: 1542466 - RNA, 15 nt, Human adenovirus B (HAdV-B)
gcacgucuucaaccg

SEQ ID NO: 1542467 - RNA, 13 nt, Human adenovirus B (HAdV-B)
agagagaggauga

SEQ ID NO: 1542468 - RNA, 15 nt, Human adenovirus B (HAdV-B)
acacguuccgugggu

SEQ ID NO: 1542469 - RNA, 23 nt, Human adenovirus B (HAdV-B)
gccuggggacagguuaguguacg

SEQ ID NO: 1542470 - RNA, 19 nt, Human adenovirus B (HAdV-B)
ccucuucuccaguggagug

SEQ ID NO: 1542471 - RNA, 15 nt, Human adenovirus B (HAdV-B)
gaacagcaguacagg

SEQ ID NO: 1542472 - RNA, 22 nt, Human adenovirus B (HAdV-B)
agcaaaacgcggcccuggcaga

SEQ ID NO: 1542473 - RNA, 19 nt, Human adenovirus B (HAdV-B)
gcagcaauguuuagaagaa

SEQ ID NO: 1542474 - RNA, 22 nt, Human adenovirus B (HAdV-B)
cucacagaucacgggacccugc

SEQ ID NO: 1542475 - RNA, 14 nt, Human adenovirus B (HAdV-B)
aacaaagcuuggaa

SEQ ID NO: 1542476 - RNA, 14 nt, Human adenovirus B (HAdV-B)
cucgcuggccacau

SEQ ID NO: 1542477 - RNA, 14 nt, Human adenovirus B (HAdV-B)
uacuuuaaaauguu

SEQ ID NO: 1542478 - RNA, 18 nt, Human adenovirus B (HAdV-B)
ggcggaugacuggcagaa

SEQ ID NO: 1542479 - RNA, 19 nt, Human adenovirus B (HAdV-B)
ccaaaggaucccauccagg

SEQ ID NO: 1542480 - RNA, 16 nt, Human adenovirus B (HAdV-B)
gcgcugcgcuccaaca

SEQ ID NO: 1542481 - RNA, 20 nt, Human adenovirus B (HAdV-B)
acgcgcaugcgaaugcggag

SEQ ID NO: 1542482 - RNA, 22 nt, Human adenovirus B (HAdV-B)
gccuccgcgauaccuggcaccu

SEQ ID NO: 1542483 - RNA, 20 nt, Human adenovirus B (HAdV-B)
aacugguuagcugcacagcc

SEQ ID NO: 1542484 - RNA, 18 nt, Human adenovirus B (HAdV-B)
aucauggggauuacaagu

SEQ ID NO: 1542485 - RNA, 21 nt, Human adenovirus B (HAdV-B)
ccaucagcagacacaucacuu

SEQ ID NO: 1542486 - RNA, 22 nt, Human adenovirus B (HAdV-B)
caagcggguuaaaaaggacaaa

SEQ ID NO: 1542487 - RNA, 19 nt, Human adenovirus B (HAdV-B)
cuagucuuaaaccggucac

SEQ ID NO: 1542488 - RNA, 14 nt, Human adenovirus B (HAdV-B)
ccaccacaccacuc

SEQ ID NO: 1542489 - RNA, 20 nt, Human adenovirus B (HAdV-B)
uagaagcugcuacagcugcu

SEQ ID NO: 1542490 - RNA, 23 nt, Human adenovirus B (HAdV-B)
cauuagggguguguuggacagag

SEQ ID NO: 1542491 - RNA, 11 nt, Human adenovirus B (HAdV-B)
uccgaccuggc

SEQ ID NO: 1542492 - RNA, 16 nt, Human adenovirus B (HAdV-B)
gguuagcugcacagcc

SEQ ID NO: 1542493 - RNA, 22 nt, Human adenovirus B (HAdV-B)
gcagcagcuccuuuagccagag

SEQ ID NO: 1542494 - RNA, 14 nt, Human adenovirus B (HAdV-B)
ucgcuuccgaccug

SEQ ID NO: 1542495 - RNA, 21 nt, Human adenovirus B (HAdV-B)
uauuguuucccaucaacgcaa

SEQ ID NO: 1542496 - RNA, 17 nt, Human adenovirus B (HAdV-B)
cagucaggcagaggagg

SEQ ID NO: 1542497 - RNA, 14 nt, Human adenovirus B (HAdV-B)
gcugucucaacccc

SEQ ID NO: 1542498 - RNA, 12 nt, Human adenovirus B (HAdV-B)
ggugagugcaga

SEQ ID NO: 1542499 - RNA, 19 nt, Human adenovirus B (HAdV-B)
gcagccuagucgcagggcu

SEQ ID NO: 1542500 - RNA, 13 nt, Human adenovirus B (HAdV-B)
cacuugugcuggu

SEQ ID NO: 1542501 - RNA, 16 nt, Human adenovirus B (HAdV-B)
ugagaacaguaagaaa

SEQ ID NO: 1542502 - RNA, 22 nt, Human adenovirus B (HAdV-B)
aguucaaguacaaccacacucu

SEQ ID NO: 1542503 - RNA, 13 nt, Human adenovirus B (HAdV-B)
ccaguggaggagg

SEQ ID NO: 1542504 - RNA, 15 nt, Human adenovirus B (HAdV-B)
augacccgcaggcag

SEQ ID NO: 1542505 - RNA, 18 nt, Human adenovirus B (HAdV-B)
aaauuuaccugcauggug

SEQ ID NO: 1542506 - RNA, 14 nt, Human adenovirus B (HAdV-B)
cccccaaauuuaau

SEQ ID NO: 1542507 - RNA, 14 nt, Human adenovirus B (HAdV-B)
gcuguuucuggugg

SEQ ID NO: 1542508 - RNA, 21 nt, Human adenovirus B (HAdV-B)
aauggagugcuugaaagugac

SEQ ID NO: 1542509 - RNA, 23 nt, Human adenovirus B (HAdV-B)
aacgcuaccacguaagaagcuuc

SEQ ID NO: 1542510 - RNA, 13 nt, Human adenovirus B (HAdV-B)
auccccacuggag

SEQ ID NO: 1542511 - RNA, 19 nt, Human adenovirus B (HAdV-B)
accccuacggaagccagca

SEQ ID NO: 1542512 - RNA, 13 nt, Human adenovirus B (HAdV-B)
acacaucacuucc

SEQ ID NO: 1542513 - RNA, 17 nt, Human adenovirus B (HAdV-B)
caccuuuccuacucaca

SEQ ID NO: 1542514 - RNA, 13 nt, Human adenovirus B (HAdV-B)
cuucuccugggca

SEQ ID NO: 1542515 - RNA, 20 nt, Human adenovirus B (HAdV-B)
ccaggcauagcuuccguggc

SEQ ID NO: 1542516 - RNA, 14 nt, Human adenovirus B (HAdV-B)
gagugcuugaaagu

SEQ ID NO: 1542517 - RNA, 23 nt, Human adenovirus B (HAdV-B)
agugcaauguaauaaaaauaugu

SEQ ID NO: 1542518 - RNA, 17 nt, Human adenovirus B (HAdV-B)
ggugagugcagaggcau

SEQ ID NO: 1542519 - RNA, 17 nt, Human adenovirus B (HAdV-B)
acauaauuacacucuca

SEQ ID NO: 1542520 - RNA, 19 nt, Human adenovirus B (HAdV-B)
cugggaccugguucacgcu

SEQ ID NO: 1542521 - RNA, 23 nt, Human adenovirus B (HAdV-B)
ggcaaaguuuaaaacugaccccg

SEQ ID NO: 1542522 - RNA, 15 nt, Human adenovirus B (HAdV-B)
uuuuugaucacaaug

SEQ ID NO: 1542523 - RNA, 15 nt, Human adenovirus B (HAdV-B)
acacccuuguguccu

SEQ ID NO: 1542524 - RNA, 18 nt, Human adenovirus B (HAdV-B)
ccgcuuucgcagcggcga

SEQ ID NO: 1542525 - RNA, 16 nt, Human adenovirus B (HAdV-B)
accucaucuucccaga

SEQ ID NO: 1542526 - RNA, 13 nt, Human adenovirus B (HAdV-B)
gagcgugaugcag

SEQ ID NO: 1542527 - RNA, 13 nt, Human adenovirus B (HAdV-B)
cagcuguuggggu

SEQ ID NO: 1542528 - RNA, 19 nt, Human adenovirus B (HAdV-B)
uaugaagaugaaagcaccu

SEQ ID NO: 1542529 - RNA, 17 nt, Human adenovirus B (HAdV-B)
gacuugucuccugaacu

SEQ ID NO: 1542530 - RNA, 15 nt, Human adenovirus B (HAdV-B)
caaaaaagaagagga

SEQ ID NO: 1542531 - RNA, 19 nt, Human adenovirus B (HAdV-B)
ucacgcuugccagcacggu

SEQ ID NO: 1542532 - RNA, 14 nt, Human adenovirus B (HAdV-B)
aacgaagcuuggaa

SEQ ID NO: 1542533 - RNA, 16 nt, Human adenovirus B (HAdV-B)
acccgucaccuuggau

SEQ ID NO: 1542534 - RNA, 16 nt, Human adenovirus B (HAdV-B)
uugggacagucaggca

SEQ ID NO: 1542535 - RNA, 22 nt, Human adenovirus B (HAdV-B)
ccugcaacgaauuuucucccag

SEQ ID NO: 1542536 - RNA, 20 nt, Human adenovirus B (HAdV-B)
aaaaauuucccaaacaaugg

SEQ ID NO: 1542537 - RNA, 20 nt, Human adenovirus B (HAdV-B)
agugauguguucuauggcau

SEQ ID NO: 1542538 - RNA, 13 nt, Human adenovirus B (HAdV-B)
cccaucgaugcug

SEQ ID NO: 1542539 - RNA, 13 nt, Human adenovirus B (HAdV-B)
gggaaucaacccc

SEQ ID NO: 1542540 - RNA, 19 nt, Human adenovirus B (HAdV-B)
agcucauaggagcuggcuu

SEQ ID NO: 1542541 - RNA, 14 nt, Human adenovirus B (HAdV-B)
uaugagccagagca

SEQ ID NO: 1542542 - RNA, 18 nt, Human adenovirus B (HAdV-B)
aucuacguccacuggacg

SEQ ID NO: 1542543 - RNA, 15 nt, Human adenovirus B (HAdV-B)
acagcuggcagaacc

SEQ ID NO: 1542544 - RNA, 21 nt, Human adenovirus B (HAdV-B)
ugaaaccauuugguggcauga

SEQ ID NO: 1542545 - RNA, 16 nt, Human adenovirus B (HAdV-B)
caaucugggaccuggu

SEQ ID NO: 1542546 - RNA, 12 nt, Human adenovirus B (HAdV-B)
uguaucuggugg

SEQ ID NO: 1542547 - RNA, 17 nt, Human adenovirus B (HAdV-B)
ccuucgcggcuggccau

SEQ ID NO: 1542548 - RNA, 12 nt, Human adenovirus B (HAdV-B)
guuggggauacu

SEQ ID NO: 1542549 - RNA, 16 nt, Human adenovirus B (HAdV-B)
ccagacgccaccgagc

SEQ ID NO: 1542550 - RNA, 20 nt, Human adenovirus B (HAdV-B)
ucaacccggauuuuacaacc

SEQ ID NO: 1542551 - RNA, 16 nt, Human adenovirus B (HAdV-B)
gcggaggaggagagga

SEQ ID NO: 1542552 - RNA, 17 nt, Human adenovirus B (HAdV-B)
cagcacuggacaugaca

SEQ ID NO: 1542553 - RNA, 19 nt, Human adenovirus B (HAdV-B)
ugauuaacugccuuguaag

SEQ ID NO: 1542554 - RNA, 13 nt, Human adenovirus B (HAdV-B)
cuuagagauggaa

SEQ ID NO: 1542555 - RNA, 21 nt, Human adenovirus B (HAdV-B)
uucccgaacccaaccagcgcu

SEQ ID NO: 1542556 - RNA, 16 nt, Human adenovirus B (HAdV-B)
gcaggcgccucccagg

SEQ ID NO: 1542557 - RNA, 19 nt, Human adenovirus B (HAdV-B)
ugauauucuugagcaggcg

SEQ ID NO: 1542558 - RNA, 18 nt, Human adenovirus B (HAdV-B)
cggcgcccuggugcggca

SEQ ID NO: 1542559 - RNA, 18 nt, Human adenovirus B (HAdV-B)
cuacagcugcugcagaag

SEQ ID NO: 1542560 - RNA, 21 nt, Human adenovirus B (HAdV-B)
cgacgcaucucaugacaugca

SEQ ID NO: 1542561 - RNA, 22 nt, Human adenovirus B (HAdV-B)
ucgacgcaucucaugacaugca

SEQ ID NO: 1542562 - RNA, 23 nt, Human adenovirus B (HAdV-B)
ucaagagcaggaacugaaaauaa

SEQ ID NO: 1542563 - RNA, 12 nt, Human adenovirus B (HAdV-B)
uaaugccagacu

SEQ ID NO: 1542564 - RNA, 13 nt, Human adenovirus B (HAdV-B)
gcguuaagaggga

SEQ ID NO: 1542565 - RNA, 23 nt, Human adenovirus B (HAdV-B)
aauucuaacacuaguuaaaacug

SEQ ID NO: 1542566 - RNA, 20 nt, Human adenovirus B (HAdV-B)
cuaaggccauuugccauucu

SEQ ID NO: 1542567 - RNA, 19 nt, Human adenovirus B (HAdV-B)
uguaucgcaaugacagaau

SEQ ID NO: 1542568 - RNA, 24 nt, Human adenovirus B (HAdV-B)
cuggaauaggguaugagacgaugg

SEQ ID NO: 1542569 - RNA, 17 nt, Human adenovirus B (HAdV-B)
caucaguuaacgagaaa

SEQ ID NO: 1542570 - RNA, 20 nt, Human adenovirus B (HAdV-B)
cuaugggggcccuuacagac

SEQ ID NO: 1542571 - RNA, 19 nt, Human adenovirus B (HAdV-B)
auuuuugauauacccccua

SEQ ID NO: 1542572 - RNA, 21 nt, Human adenovirus B (HAdV-B)
aggccaugcaacguaucaugg

SEQ ID NO: 1542573 - RNA, 19 nt, Human adenovirus B (HAdV-B)
ccagcgguucuggaggagg

SEQ ID NO: 1542574 - RNA, 21 nt, Human adenovirus B (HAdV-B)
augccagcgguucuggaggag

SEQ ID NO: 1542575 - RNA, 21 nt, Human adenovirus B (HAdV-B)
gguggugcaacacagcagaga

SEQ ID NO: 1542576 - RNA, 21 nt, Human adenovirus B (HAdV-B)
uguuggacagaggucccaguu

SEQ ID NO: 1542577 - RNA, 12 nt, Human adenovirus B (HAdV-B)
uaucaaaugcuc

SEQ ID NO: 1542578 - RNA, 23 nt, Human adenovirus B (HAdV-B)
agacagucgcucauagucaagga

SEQ ID NO: 1542579 - RNA, 18 nt, Human adenovirus B (HAdV-B)
aaaaccugcugcuucucc

SEQ ID NO: 1542580 - RNA, 19 nt, Human adenovirus B (HAdV-B)
gacaauucucuagaaacuu

SEQ ID NO: 1542581 - RNA, 15 nt, Human adenovirus B (HAdV-B)
acggagggcagaaac

SEQ ID NO: 1542582 - RNA, 20 nt, Human adenovirus B (HAdV-B)
acucauguaguguacaaacc

SEQ ID NO: 1542583 - RNA, 23 nt, Human adenovirus B (HAdV-B)
cagcagcggcaguuagaaaauac

SEQ ID NO: 1542584 - RNA, 15 nt, Human adenovirus B (HAdV-B)
ugcuaaagguuucau

SEQ ID NO: 1542585 - RNA, 21 nt, Human adenovirus B (HAdV-B)
accuguagcgaauugagaaug

SEQ ID NO: 1542586 - RNA, 17 nt, Human adenovirus B (HAdV-B)
ucgcagcagcagcagca

SEQ ID NO: 1542587 - RNA, 17 nt, Human adenovirus B (HAdV-B)
ggaugacuggcagaacc

SEQ ID NO: 1542588 - RNA, 14 nt, Human adenovirus B (HAdV-B)
cagaggcuggucau

SEQ ID NO: 1542589 - RNA, 14 nt, Human adenovirus B (HAdV-B)
cgauggcugggcac

SEQ ID NO: 1542590 - RNA, 14 nt, Human adenovirus B (HAdV-B)
auucccacugaaag

SEQ ID NO: 1542591 - RNA, 18 nt, Human adenovirus B (HAdV-B)
gaugucucacgcuugcca

SEQ ID NO: 1542592 - RNA, 16 nt, Human adenovirus B (HAdV-B)
cagccgccgcccccag

SEQ ID NO: 1542593 - RNA, 21 nt, Human adenovirus B (HAdV-B)
aguaugcaaacacaugucacc

SEQ ID NO: 1542594 - RNA, 20 nt, Human adenovirus B (HAdV-B)
cuugcuggagugucacugcc

SEQ ID NO: 1542595 - RNA, 18 nt, Human adenovirus B (HAdV-B)
aucaccaagaugcuggaa

SEQ ID NO: 1542596 - RNA, 20 nt, Human adenovirus B (HAdV-B)
uaccuguuccgucuggccaa

SEQ ID NO: 1542597 - RNA, 13 nt, Human adenovirus B (HAdV-B)
ugaugcagcagca

SEQ ID NO: 1542598 - RNA, 18 nt, Human adenovirus B (HAdV-B)
ucaccccucgucaggcug

SEQ ID NO: 1542599 - RNA, 15 nt, Human adenovirus B (HAdV-B)
caugacagacagagg

SEQ ID NO: 1542600 - RNA, 17 nt, Human adenovirus B (HAdV-B)
gaagcguugauuacuuu

SEQ ID NO: 1542601 - RNA, 17 nt, Human adenovirus B (HAdV-B)
acagcuuuaaacauuug

SEQ ID NO: 1542602 - RNA, 20 nt, Human adenovirus B (HAdV-B)
ugaugcaauccccacuggag

SEQ ID NO: 1542603 - RNA, 22 nt, Human adenovirus B (HAdV-B)
acgagccugggaucauggggau

SEQ ID NO: 1542604 - RNA, 19 nt, Human adenovirus B (HAdV-B)
guucggcggugacaaguac

SEQ ID NO: 1542605 - RNA, 17 nt, Human adenovirus B (HAdV-B)
ucuccggaucuccuggg

SEQ ID NO: 1542606 - RNA, 18 nt, Human adenovirus B (HAdV-B)
uaacuuguuuauuugaaa

SEQ ID NO: 1542607 - RNA, 16 nt, Human adenovirus B (HAdV-B)
acucuugcuugacucu

SEQ ID NO: 1542608 - RNA, 21 nt, Human adenovirus B (HAdV-B)
acaucuagcaagacagucgcu

SEQ ID NO: 1542609 - RNA, 22 nt, Human adenovirus B (HAdV-B)
ugcuggacuugggugggagagg

SEQ ID NO: 1542610 - RNA, 18 nt, Human adenovirus B (HAdV-B)
caccucagaugucaccug

SEQ ID NO: 1542611 - RNA, 17 nt, Human adenovirus B (HAdV-B)
uggaggaggaacagcaa

SEQ ID NO: 1542612 - RNA, 14 nt, Human adenovirus B (HAdV-B)
uaugcucaggauca

SEQ ID NO: 1542613 - RNA, 13 nt, Human adenovirus B (HAdV-B)
cacgaggaagagu

SEQ ID NO: 1542614 - RNA, 14 nt, Human adenovirus B (HAdV-B)
uccaccagaacacc

SEQ ID NO: 1542615 - RNA, 19 nt, Human adenovirus B (HAdV-B)
ccagguuguaucuggugga

SEQ ID NO: 1542616 - RNA, 22 nt, Human adenovirus B (HAdV-B)
uggcaccuacggagggcagaaa

SEQ ID NO: 1542617 - RNA, 22 nt, Human adenovirus B (HAdV-B)
caaaguaaaaggcacaggagaa

SEQ ID NO: 1542618 - RNA, 17 nt, Human adenovirus B (HAdV-B)
cagccaugaggccacaa

SEQ ID NO: 1542619 - RNA, 21 nt, Human adenovirus B (HAdV-B)
gguugcaaucgcagugcaggg

SEQ ID NO: 1542620 - RNA, 19 nt, Human adenovirus B (HAdV-B)
cauauuuuuugaugcguuu

SEQ ID NO: 1542621 - RNA, 23 nt, Human adenovirus B (HAdV-B)
cagaaccuauuuagagacagaag

SEQ ID NO: 1542622 - RNA, 17 nt, Human adenovirus B (HAdV-B)
gugcaggagcggagccu

SEQ ID NO: 1542623 - RNA, 15 nt, Human adenovirus B (HAdV-B)
ugcggcaggcaugca

SEQ ID NO: 1542624 - RNA, 22 nt, Human adenovirus B (HAdV-B)
caaaugcucugcaaaagggaga

SEQ ID NO: 1542625 - RNA, 22 nt, Human adenovirus B (HAdV-B)
gaauugagaauggcaacaucaa

SEQ ID NO: 1542626 - RNA, 21 nt, Human adenovirus B (HAdV-B)
ccugauuacuucuuucagacu

SEQ ID NO: 1542627 - RNA, 17 nt, Human adenovirus B (HAdV-B)
gcgacaucggcacgagc

SEQ ID NO: 1542628 - RNA, 23 nt, Human adenovirus B (HAdV-B)
cugccaugcgagccgcaagagcu

SEQ ID NO: 1542629 - RNA, 12 nt, Human adenovirus B (HAdV-B)
gcauacuuucuc

SEQ ID NO: 1542630 - RNA, 12 nt, Human adenovirus B (HAdV-B)
ugcuugaaagug

SEQ ID NO: 1542631 - RNA, 15 nt, Human adenovirus B (HAdV-B)
ugaugcagcagcagc

SEQ ID NO: 1542632 - RNA, 19 nt, Human adenovirus B (HAdV-B)
agcaggauauuuugaaaua

SEQ ID NO: 1542633 - RNA, 19 nt, Human adenovirus B (HAdV-B)
cucaguacgauaccaccag

SEQ ID NO: 1542634 - RNA, 14 nt, Human adenovirus B (HAdV-B)
uucucccagcagca

SEQ ID NO: 1542635 - RNA, 17 nt, Human adenovirus B (HAdV-B)
aaucuucccaucaucgu

SEQ ID NO: 1542636 - RNA, 17 nt, Human adenovirus B (HAdV-B)
ugguguugcacaauauc

SEQ ID NO: 1542637 - RNA, 15 nt, Human adenovirus B (HAdV-B)
auauaaucugcaaca

SEQ ID NO: 1542638 - RNA, 21 nt, Human adenovirus B (HAdV-B)
acauagccuuuggguauaauu

SEQ ID NO: 1542639 - RNA, 13 nt, Human adenovirus B (HAdV-B)
caguacaggacag

SEQ ID NO: 1542640 - RNA, 23 nt, Human adenovirus B (HAdV-B)
aauaucuauaguggcacaacaua

SEQ ID NO: 1542641 - RNA, 14 nt, Human adenovirus B (HAdV-B)
acuuacuugaaauc

SEQ ID NO: 1542642 - RNA, 22 nt, Human adenovirus B (HAdV-B)
cuccacagcuuucuggucagcu

SEQ ID NO: 1542643 - RNA, 20 nt, Human adenovirus B (HAdV-B)
uauuugcaccacacuucugc

SEQ ID NO: 1542644 - RNA, 20 nt, Human adenovirus B (HAdV-B)
auucaaccugagguuaaagu

SEQ ID NO: 1542645 - RNA, 14 nt, Human adenovirus B (HAdV-B)
ugcaggcagcagcu

SEQ ID NO: 1542646 - RNA, 18 nt, Human adenovirus B (HAdV-B)
ccccagcagccaaggcga

SEQ ID NO: 1542647 - RNA, 17 nt, Human adenovirus B (HAdV-B)
cacagcaguagccacag

SEQ ID NO: 1542648 - RNA, 15 nt, Human adenovirus B (HAdV-B)
accagacaaaguaca

SEQ ID NO: 1542649 - RNA, 15 nt, Human adenovirus B (HAdV-B)
cuauccgcaagcaau

SEQ ID NO: 1542650 - RNA, 12 nt, Human adenovirus B (HAdV-B)
ugcgggacgagg

SEQ ID NO: 1542651 - RNA, 22 nt, Human adenovirus B (HAdV-B)
auuugugggauuugauggaagc

SEQ ID NO: 1542652 - RNA, 17 nt, Human adenovirus B (HAdV-B)
ccaucaguguggaagag

SEQ ID NO: 1542653 - RNA, 22 nt, Human adenovirus B (HAdV-B)
aaaccuggaacagaagacacaa

SEQ ID NO: 1542654 - RNA, 15 nt, Human adenovirus B (HAdV-B)
caggcgccucccagg

SEQ ID NO: 1542655 - RNA, 15 nt, Human adenovirus B (HAdV-B)
gugauagaaguucuu

SEQ ID NO: 1542656 - RNA, 13 nt, Human adenovirus B (HAdV-B)
auuaccaccccua

SEQ ID NO: 1542657 - RNA, 15 nt, Human adenovirus B (HAdV-B)
acagucaggcagagg

SEQ ID NO: 1542658 - RNA, 13 nt, Human adenovirus B (HAdV-B)
gcuggcuggucaa

SEQ ID NO: 1542659 - RNA, 17 nt, Human adenovirus B (HAdV-B)
gucauggaccaguuacu

SEQ ID NO: 1542660 - RNA, 19 nt, Human adenovirus B (HAdV-B)
ucccaguagguuuggaagu

SEQ ID NO: 1542661 - RNA, 14 nt, Human adenovirus B (HAdV-B)
accagcgcuuccaa

SEQ ID NO: 1542662 - RNA, 19 nt, Human adenovirus B (HAdV-B)
acuggauuuccugccacca

SEQ ID NO: 1542663 - RNA, 15 nt, Human adenovirus B (HAdV-B)
uucagaaacuuccag

SEQ ID NO: 1542664 - RNA, 19 nt, Human adenovirus B (HAdV-B)
uggcucuauaucucccaga

SEQ ID NO: 1542665 - RNA, 21 nt, Human adenovirus B (HAdV-B)
caagaacaaaagaauaccaaa

SEQ ID NO: 1542666 - RNA, 20 nt, Human adenovirus B (HAdV-B)
ggacugccccauggcauggg

SEQ ID NO: 1542667 - RNA, 15 nt, Human adenovirus B (HAdV-B)
cgcugucaaccugcc

SEQ ID NO: 1542668 - RNA, 12 nt, Human adenovirus B (HAdV-B)
gaauacaccaau

SEQ ID NO: 1542669 - RNA, 15 nt, Human adenovirus B (HAdV-B)
cugcuacgaagagcu

SEQ ID NO: 1542670 - RNA, 19 nt, Human adenovirus B (HAdV-B)
aacaccguuucuggggcgg

SEQ ID NO: 1542671 - RNA, 13 nt, Human adenovirus B (HAdV-B)
acaacaguagcaa

SEQ ID NO: 1542672 - RNA, 23 nt, Human adenovirus B (HAdV-B)
acccugauugcccgcgaagaagu

SEQ ID NO: 1542673 - RNA, 18 nt, Human adenovirus B (HAdV-B)
cuggcuuucauccaugga

SEQ ID NO: 1542674 - RNA, 16 nt, Human adenovirus B (HAdV-B)
uucucuagcagcagug

SEQ ID NO: 1542675 - RNA, 17 nt, Human adenovirus B (HAdV-B)
gaggcagucuaccugcg

SEQ ID NO: 1542676 - RNA, 14 nt, Human adenovirus B (HAdV-B)
cuacaaaacaugca

SEQ ID NO: 1542677 - RNA, 20 nt, Human adenovirus B (HAdV-B)
aucuagaccacugccgccgc

SEQ ID NO: 1542678 - RNA, 15 nt, Human adenovirus B (HAdV-B)
aagguccggcccacg

SEQ ID NO: 1542679 - RNA, 23 nt, Human adenovirus B (HAdV-B)
cagagcuuaagcauuccaccgcc

SEQ ID NO: 1542680 - RNA, 18 nt, Human adenovirus B (HAdV-B)
ggugaaauuaugugcauu

SEQ ID NO: 1542681 - RNA, 13 nt, Human adenovirus B (HAdV-B)
gcaggaggcgcaa

SEQ ID NO: 1542682 - RNA, 16 nt, Human adenovirus B (HAdV-B)
ucguuauccagccugu

SEQ ID NO: 1542683 - RNA, 15 nt, Human adenovirus B (HAdV-B)
ucccgacggugcugc

SEQ ID NO: 1542684 - RNA, 23 nt, Human adenovirus B (HAdV-B)
cuccuacggacugccgcuucuuc

SEQ ID NO: 1542685 - RNA, 18 nt, Human adenovirus B (HAdV-B)
cugccaaugcaaccaaua

SEQ ID NO: 1542686 - RNA, 19 nt, Human adenovirus B (HAdV-B)
ucaaaaacacacuacccac

SEQ ID NO: 1542687 - RNA, 23 nt, Human adenovirus B (HAdV-B)
cucugagcgccgcgacggcagga

SEQ ID NO: 1542688 - RNA, 16 nt, Human adenovirus B (HAdV-B)
ccggccggagccgcgg

SEQ ID NO: 1542689 - RNA, 23 nt, Human adenovirus B (HAdV-B)
ggugcaacacagcagagacaaug

SEQ ID NO: 1542690 - RNA, 15 nt, Human adenovirus B (HAdV-B)
gagacgcccaggccg

SEQ ID NO: 1542691 - RNA, 14 nt, Human adenovirus B (HAdV-B)
agccagcacccaga

SEQ ID NO: 1542692 - RNA, 14 nt, Human adenovirus B (HAdV-B)
gcuccauggggcgc

SEQ ID NO: 1542693 - RNA, 22 nt, Human adenovirus B (HAdV-B)
ccucggcugcguggccuuuggc

SEQ ID NO: 1542694 - RNA, 16 nt, Human adenovirus B (HAdV-B)
gguggacgagcagacc

SEQ ID NO: 1542695 - RNA, 14 nt, Human adenovirus B (HAdV-B)
acaauauuaacacc

SEQ ID NO: 1542696 - RNA, 23 nt, Human adenovirus B (HAdV-B)
cucaacacaagguucccucagga

SEQ ID NO: 1542697 - RNA, 12 nt, Human adenovirus B (HAdV-B)
cucaaaacucca

SEQ ID NO: 1542698 - RNA, 14 nt, Human adenovirus B (HAdV-B)
caugaaagccuuug

SEQ ID NO: 1542699 - RNA, 17 nt, Human adenovirus B (HAdV-B)
caacuucacauacaaca

SEQ ID NO: 1542700 - RNA, 16 nt, Human adenovirus B (HAdV-B)
gcgggcaaacacguuc

SEQ ID NO: 1542701 - RNA, 15 nt, Human adenovirus B (HAdV-B)
ccucaucuucccaga

SEQ ID NO: 1542702 - RNA, 16 nt, Human adenovirus B (HAdV-B)
auuucauagccacagc

SEQ ID NO: 1542703 - RNA, 18 nt, Human adenovirus B (HAdV-B)
aucuguggaguucuuauu

SEQ ID NO: 1542704 - RNA, 13 nt, Human adenovirus B (HAdV-B)
ccuaugcacuuuu

SEQ ID NO: 1542705 - RNA, 14 nt, Human adenovirus B (HAdV-B)
cuuggguugccacu

SEQ ID NO: 1542706 - RNA, 16 nt, Human adenovirus B (HAdV-B)
gccugcgucaucaccc

SEQ ID NO: 1542707 - RNA, 12 nt, Human adenovirus B (HAdV-B)
aucaaaacucca

SEQ ID NO: 1542708 - RNA, 19 nt, Human adenovirus B (HAdV-B)
uaauauugccaugcaggca

SEQ ID NO: 1542709 - RNA, 16 nt, Human adenovirus B (HAdV-B)
caggagcggagccugg

SEQ ID NO: 1542710 - RNA, 22 nt, Human adenovirus B (HAdV-B)
uagugcaggagcggagccuggg

SEQ ID NO: 1542711 - RNA, 14 nt, Human adenovirus B (HAdV-B)
uacucccagcagcu

SEQ ID NO: 1542712 - RNA, 17 nt, Human adenovirus B (HAdV-B)
ggacaaagcgugcugca

SEQ ID NO: 1542713 - RNA, 20 nt, Human adenovirus B (HAdV-B)
gguagaagaaccugacccca

SEQ ID NO: 1542714 - RNA, 17 nt, Human adenovirus B (HAdV-B)
ggcuugcuggaguguca

SEQ ID NO: 1542715 - RNA, 22 nt, Human adenovirus B (HAdV-B)
uggaagucuacccguuucuugu

SEQ ID NO: 1542716 - RNA, 22 nt, Human adenovirus B (HAdV-B)
ggauccuuagauaugugcagca

SEQ ID NO: 1542717 - RNA, 17 nt, Human adenovirus B (HAdV-B)
acucaagcgaagcaucg

SEQ ID NO: 1542718 - RNA, 20 nt, Human adenovirus B (HAdV-B)
gucgccguagacgcacaagc

SEQ ID NO: 1542719 - RNA, 19 nt, Human adenovirus B (HAdV-B)
cguacgagagcgugaugca

SEQ ID NO: 1542720 - RNA, 20 nt, Human adenovirus B (HAdV-B)
agcucugacuggagcuggaa

SEQ ID NO: 1542721 - RNA, 12 nt, Human adenovirus B (HAdV-B)
caguaucaucuu

SEQ ID NO: 1542722 - RNA, 16 nt, Human adenovirus B (HAdV-B)
uugugauuauucuuug

SEQ ID NO: 1542723 - RNA, 12 nt, Human adenovirus B (HAdV-B)
ccgaccuggcag

SEQ ID NO: 1542724 - RNA, 11 nt, Human adenovirus B (HAdV-B)
gcgcuccagcc

SEQ ID NO: 1542725 - RNA, 17 nt, Human adenovirus B (HAdV-B)
aguacaggacaggcgcu

SEQ ID NO: 1542726 - RNA, 22 nt, Human adenovirus B (HAdV-B)
ucuggcccaauugcaagccauc

SEQ ID NO: 1542727 - RNA, 13 nt, Human adenovirus B (HAdV-B)
cugcagagccagc

SEQ ID NO: 1542728 - RNA, 16 nt, Human adenovirus B (HAdV-B)
agucacugcuaccugu

SEQ ID NO: 1542729 - RNA, 17 nt, Human adenovirus B (HAdV-B)
gagcugacuugcagugg

SEQ ID NO: 1542730 - RNA, 11 nt, Human adenovirus B (HAdV-B)
acuccacagcu

SEQ ID NO: 1542731 - RNA, 17 nt, Human adenovirus B (HAdV-B)
agugcuugaaagugaca

SEQ ID NO: 1542732 - RNA, 21 nt, Human adenovirus B (HAdV-B)
cgguugagaugccuuucauga

SEQ ID NO: 1542733 - RNA, 14 nt, Human adenovirus B (HAdV-B)
ccaguuggaggauu

SEQ ID NO: 1542734 - RNA, 13 nt, Human adenovirus B (HAdV-B)
uucaauucaaaca

SEQ ID NO: 1542735 - RNA, 11 nt, Human adenovirus B (HAdV-B)
uuggaggagga

SEQ ID NO: 1542736 - RNA, 17 nt, Human adenovirus B (HAdV-B)
gguaaaucugagccaag

SEQ ID NO: 1542737 - RNA, 17 nt, Human adenovirus B (HAdV-B)
guuaugaaggaccacca

SEQ ID NO: 1542738 - RNA, 22 nt, Human adenovirus B (HAdV-B)
ucaacccggauuuuacaaccag

SEQ ID NO: 1542739 - RNA, 15 nt, Human adenovirus B (HAdV-B)
acuacuuucaaaacc

SEQ ID NO: 1542740 - RNA, 22 nt, Human adenovirus B (HAdV-B)
gcgccugcuugggcgcuugcca

SEQ ID NO: 1542741 - RNA, 22 nt, Human adenovirus B (HAdV-B)
gguaaauccaauccacacauua

SEQ ID NO: 1542742 - RNA, 15 nt, Human adenovirus B (HAdV-B)
aauaaguuuagaaau

SEQ ID NO: 1542743 - RNA, 18 nt, Human adenovirus B (HAdV-B)
ugaggaccaaucacagcc

SEQ ID NO: 1542744 - RNA, 20 nt, Human adenovirus B (HAdV-B)
agugcuggauauggccagca

SEQ ID NO: 1542745 - RNA, 17 nt, Human adenovirus B (HAdV-B)
guaugagacgaugggcg

SEQ ID NO: 1542746 - RNA, 13 nt, Human adenovirus B (HAdV-B)
uacaaggaagaaa

SEQ ID NO: 1542747 - RNA, 22 nt, Human adenovirus B (HAdV-B)
uuccaacaaccaguuacaaauc

SEQ ID NO: 1542748 - RNA, 23 nt, Human adenovirus B (HAdV-B)
ugaguuacuuucaagauggccac

SEQ ID NO: 1542749 - RNA, 18 nt, Human adenovirus B (HAdV-B)
cgauccagcagaccuccu

SEQ ID NO: 1542750 - RNA, 17 nt, Human adenovirus B (HAdV-B)
acaguauggugaacacc

SEQ ID NO: 1542751 - RNA, 12 nt, Human adenovirus B (HAdV-B)
cagaagcggcga

SEQ ID NO: 1542752 - RNA, 16 nt, Human adenovirus B (HAdV-B)
aauaauucuacaacuu

SEQ ID NO: 1542753 - RNA, 15 nt, Human adenovirus B (HAdV-B)
acaagcucuuacaga

SEQ ID NO: 1542754 - RNA, 19 nt, Human adenovirus B (HAdV-B)
gaacugauuaacugccuug

SEQ ID NO: 1542755 - RNA, 13 nt, Human adenovirus B (HAdV-B)
cggaugacuggca

SEQ ID NO: 1542756 - RNA, 18 nt, Human adenovirus B (HAdV-B)
cccgucuucucaaagagc

SEQ ID NO: 1542757 - RNA, 15 nt, Human adenovirus B (HAdV-B)
acuccguagccugga

SEQ ID NO: 1542758 - RNA, 17 nt, Human adenovirus B (HAdV-B)
gugcgcacccguccccc

SEQ ID NO: 1542759 - RNA, 16 nt, Human adenovirus B (HAdV-B)
gcugucucaaccccag

SEQ ID NO: 1542760 - RNA, 20 nt, Human adenovirus B (HAdV-B)
ggucgaaaacuucugucgcu

SEQ ID NO: 1542761 - RNA, 20 nt, Human adenovirus B (HAdV-B)
cuucccagagcgucucaggg

SEQ ID NO: 1542762 - RNA, 21 nt, Human adenovirus B (HAdV-B)
cgaguuaaugauauacgcgcc

SEQ ID NO: 1542763 - RNA, 22 nt, Human adenovirus B (HAdV-B)
caucggcuaucagggcuucuac

SEQ ID NO: 1542764 - RNA, 16 nt, Human adenovirus B (HAdV-B)
aaauuucuucuucacc

SEQ ID NO: 1542765 - RNA, 15 nt, Human adenovirus B (HAdV-B)
uugaaaaucaauuca

SEQ ID NO: 1542766 - RNA, 12 nt, Human adenovirus B (HAdV-B)
cucuucucuuuc

SEQ ID NO: 1542767 - RNA, 14 nt, Human adenovirus B (HAdV-B)
aaaagaaaaauuug

SEQ ID NO: 1542768 - RNA, 14 nt, Human adenovirus B (HAdV-B)
uggguagacagaau

SEQ ID NO: 1542769 - RNA, 16 nt, Human adenovirus B (HAdV-B)
cccgaacccaaccagc

SEQ ID NO: 1542770 - RNA, 15 nt, Human adenovirus B (HAdV-B)
guauaucgggcagga

SEQ ID NO: 1542771 - RNA, 18 nt, Human adenovirus B (HAdV-B)
uauuuccccaaauggcuu

SEQ ID NO: 1542772 - RNA, 14 nt, Human adenovirus B (HAdV-B)
agcaagggggccac

SEQ ID NO: 1542773 - RNA, 22 nt, Human adenovirus B (HAdV-B)
ggcaggaugucacuccacagcu

SEQ ID NO: 1542774 - RNA, 11 nt, Human adenovirus B (HAdV-B)
ugaaagagcuu

SEQ ID NO: 1542775 - RNA, 16 nt, Human adenovirus B (HAdV-B)
cgcaaaaaauggccug

SEQ ID NO: 1542776 - RNA, 22 nt, Human adenovirus B (HAdV-B)
gagcuuaagcauuccaccgccc

SEQ ID NO: 1542777 - RNA, 13 nt, Human adenovirus B (HAdV-B)
guagccaggucac

SEQ ID NO: 1542778 - RNA, 17 nt, Human adenovirus B (HAdV-B)
cauaaaugcaugcaucu

SEQ ID NO: 1542779 - RNA, 15 nt, Human adenovirus B (HAdV-B)
aaugaaaauaaacuu

SEQ ID NO: 1542780 - RNA, 16 nt, Human adenovirus B (HAdV-B)
ugguggaauuggaagg

SEQ ID NO: 1542781 - RNA, 17 nt, Human adenovirus B (HAdV-B)
ccacagggucuccagcu

SEQ ID NO: 1542782 - RNA, 14 nt, Human adenovirus B (HAdV-B)
ucuacuucaacccc

SEQ ID NO: 1542783 - RNA, 16 nt, Human adenovirus B (HAdV-B)
ccacaacgcacagccu

SEQ ID NO: 1542784 - RNA, 20 nt, Human adenovirus B (HAdV-B)
uauccagcuuuugcugugcc

SEQ ID NO: 1542785 - RNA, 16 nt, Human adenovirus B (HAdV-B)
augccuggaguguaua

SEQ ID NO: 1542786 - RNA, 19 nt, Human adenovirus B (HAdV-B)
gcacgguuugaccagugag

SEQ ID NO: 1542787 - RNA, 17 nt, Human adenovirus B (HAdV-B)
ccgccgcccccagaaga

SEQ ID NO: 1542788 - RNA, 20 nt, Human adenovirus B (HAdV-B)
cuggaggacagucuggagga

SEQ ID NO: 1542789 - RNA, 13 nt, Human adenovirus B (HAdV-B)
cccagcagccaag

SEQ ID NO: 1542790 - RNA, 14 nt, Human adenovirus B (HAdV-B)
uaugugcagcagag

SEQ ID NO: 1542791 - RNA, 15 nt, Human adenovirus B (HAdV-B)
ccauuugguggcaug

SEQ ID NO: 1542792 - RNA, 12 nt, Human adenovirus B (HAdV-B)
acucacaaacua

SEQ ID NO: 1542793 - RNA, 13 nt, Human adenovirus B (HAdV-B)
caccaaacugcuu

SEQ ID NO: 1542794 - RNA, 14 nt, Human adenovirus B (HAdV-B)
ccgcaggaccugcu

SEQ ID NO: 1542795 - RNA, 13 nt, Human adenovirus B (HAdV-B)
gcagaauaaaaaa

SEQ ID NO: 1542796 - RNA, 20 nt, Human adenovirus B (HAdV-B)
uggcacgucuaggugcgccu

SEQ ID NO: 1542797 - RNA, 20 nt, Human adenovirus B (HAdV-B)
uauugcuugaaagccugcug

SEQ ID NO: 1542798 - RNA, 20 nt, Human adenovirus B (HAdV-B)
ugccaucaucuccugcuugc

SEQ ID NO: 1542799 - RNA, 12 nt, Human adenovirus B (HAdV-B)
cucgacccagcc

SEQ ID NO: 1542800 - RNA, 11 nt, Human adenovirus B (HAdV-B)
acugcuggacu

SEQ ID NO: 1542801 - RNA, 14 nt, Human adenovirus B (HAdV-B)
auauuagauaaaug

SEQ ID NO: 1542802 - RNA, 21 nt, Human adenovirus B (HAdV-B)
ugcgggcggcgcugcagagcc

SEQ ID NO: 1542803 - RNA, 17 nt, Human adenovirus B (HAdV-B)
ugcagcagcagcaggcg

SEQ ID NO: 1542804 - RNA, 21 nt, Human adenovirus B (HAdV-B)
uuccuagaacagaaaggggga

SEQ ID NO: 1542805 - RNA, 23 nt, Human adenovirus B (HAdV-B)
uuagacagcaaccccaggccaac

SEQ ID NO: 1542806 - RNA, 15 nt, Human adenovirus B (HAdV-B)
cgagucgaggaaccc

SEQ ID NO: 1542807 - RNA, 14 nt, Human adenovirus B (HAdV-B)
ugcuauuccaccau

SEQ ID NO: 1542808 - RNA, 18 nt, Human adenovirus B (HAdV-B)
cgguaaaucugagccaag

SEQ ID NO: 1542809 - RNA, 19 nt, Human adenovirus B (HAdV-B)
acagcaguacaggacaggc

SEQ ID NO: 1542810 - RNA, 19 nt, Human adenovirus B (HAdV-B)
cguccuuucaagccgcacu

SEQ ID NO: 1542811 - RNA, 16 nt, Human adenovirus B (HAdV-B)
uaguuuaaaagagguu

SEQ ID NO: 1542812 - RNA, 20 nt, Human adenovirus B (HAdV-B)
cccuccgacuuugugccucu

SEQ ID NO: 1542813 - RNA, 18 nt, Human adenovirus B (HAdV-B)
gauagccccaauggccac

SEQ ID NO: 1542814 - RNA, 16 nt, Human adenovirus B (HAdV-B)
ucaccuccacagcccc

SEQ ID NO: 1542815 - RNA, 15 nt, Human adenovirus B (HAdV-B)
uaggcugauugccac

SEQ ID NO: 1542816 - RNA, 13 nt, Human adenovirus B (HAdV-B)
uucacuuccgcaa

SEQ ID NO: 1542817 - RNA, 17 nt, Human adenovirus B (HAdV-B)
augcacaugaucaucca

SEQ ID NO: 1542818 - RNA, 16 nt, Human adenovirus B (HAdV-B)
aagagacggaagaacc

SEQ ID NO: 1542819 - RNA, 14 nt, Human adenovirus B (HAdV-B)
cguucgcucaccag

SEQ ID NO: 1542820 - RNA, 22 nt, Human adenovirus B (HAdV-B)
gucgcgcuuugggacaggaaga

SEQ ID NO: 1542821 - RNA, 22 nt, Human adenovirus B (HAdV-B)
augcaucugcgccgcaggaggc

SEQ ID NO: 1542822 - RNA, 19 nt, Human adenovirus B (HAdV-B)
cagcaaccccaggccaacc

SEQ ID NO: 1542823 - RNA, 15 nt, Human adenovirus B (HAdV-B)
gcuguuucugguggu

SEQ ID NO: 1542824 - RNA, 17 nt, Human adenovirus B (HAdV-B)
cgagaaaaaacagccaa

SEQ ID NO: 1542825 - RNA, 20 nt, Human adenovirus B (HAdV-B)
aggggacugccccauggcau

SEQ ID NO: 1542826 - RNA, 16 nt, Human adenovirus B (HAdV-B)
ucaucuucccagagcg

SEQ ID NO: 1542827 - RNA, 21 nt, Human adenovirus B (HAdV-B)
cuccaacagaaaaccagcagc

SEQ ID NO: 1542828 - RNA, 22 nt, Human adenovirus B (HAdV-B)
cucuccaaccucuccacaauau

SEQ ID NO: 1542829 - RNA, 12 nt, Human adenovirus B (HAdV-B)
acuacacagcua

SEQ ID NO: 1542830 - RNA, 15 nt, Human adenovirus B (HAdV-B)
cauuuuaaugaauuu

SEQ ID NO: 1542831 - RNA, 12 nt, Human adenovirus B (HAdV-B)
agucuggaggaa

SEQ ID NO: 1542832 - RNA, 15 nt, Human adenovirus B (HAdV-B)
agucuggaggaagac

SEQ ID NO: 1542833 - RNA, 22 nt, Human adenovirus B (HAdV-B)
ugagcagcuaacccgauggcug

SEQ ID NO: 1542834 - RNA, 19 nt, Human adenovirus B (HAdV-B)
gggucuugugugggacgau

SEQ ID NO: 1542835 - RNA, 19 nt, Human adenovirus B (HAdV-B)
cguuccuaugaugaggugu

SEQ ID NO: 1542836 - RNA, 22 nt, Human adenovirus B (HAdV-B)
aacauguugguuggagccugag

SEQ ID NO: 1542837 - RNA, 14 nt, Human adenovirus B (HAdV-B)
cucuucuccagugg

SEQ ID NO: 1542838 - RNA, 14 nt, Human adenovirus B (HAdV-B)
agaauuucuacuga

SEQ ID NO: 1542839 - RNA, 20 nt, Human adenovirus B (HAdV-B)
uccuaugcacuuuuugcuuu

SEQ ID NO: 1542840 - RNA, 16 nt, Human adenovirus B (HAdV-B)
ugauuaaacaacagca

SEQ ID NO: 1542841 - RNA, 21 nt, Human adenovirus B (HAdV-B)
gaaugaaggcgaagcaagggu

SEQ ID NO: 1542842 - RNA, 18 nt, Human adenovirus B (HAdV-B)
aggacgccgaggcucucu

SEQ ID NO: 1542843 - RNA, 19 nt, Human adenovirus B (HAdV-B)
agccaaucaccacacgauc

SEQ ID NO: 1542844 - RNA, 12 nt, Human adenovirus B (HAdV-B)
ggauacaaagua

SEQ ID NO: 1542845 - RNA, 18 nt, Human adenovirus B (HAdV-B)
gaauggcagggaagugag

SEQ ID NO: 1542846 - RNA, 12 nt, Human adenovirus B (HAdV-B)
ucaacauccagg

SEQ ID NO: 1542847 - RNA, 21 nt, Human adenovirus B (HAdV-B)
uagcucauaggagcuggcuuu

SEQ ID NO: 1542848 - RNA, 19 nt, Human adenovirus B (HAdV-B)
uugggcgcuugccagggug

SEQ ID NO: 1542849 - RNA, 15 nt, Human adenovirus B (HAdV-B)
gagaugcgagcuucc

SEQ ID NO: 1542850 - RNA, 19 nt, Human adenovirus B (HAdV-B)
cucugggaugcaaaugcaa

SEQ ID NO: 1542851 - RNA, 18 nt, Human adenovirus B (HAdV-B)
ugaucuggacuuggaaga

SEQ ID NO: 1542852 - RNA, 17 nt, Human adenovirus B (HAdV-B)
ccaucagcgacggaugu

SEQ ID NO: 1542853 - RNA, 19 nt, Human adenovirus B (HAdV-B)
cauccgaguaucaucacuu

SEQ ID NO: 1542854 - RNA, 16 nt, Human adenovirus B (HAdV-B)
caaggucgcagugcau

SEQ ID NO: 1542855 - RNA, 16 nt, Human adenovirus B (HAdV-B)
ccuucuccggaucucc

SEQ ID NO: 1542856 - RNA, 13 nt, Human adenovirus B (HAdV-B)
aggagucaacccc

SEQ ID NO: 1542857 - RNA, 12 nt, Human adenovirus B (HAdV-B)
acccaaccagcg

SEQ ID NO: 1542858 - RNA, 21 nt, Human adenovirus B (HAdV-B)
ucagcugcaaagcuccaagca

SEQ ID NO: 1542859 - RNA, 18 nt, Human adenovirus B (HAdV-B)
aucgaaguugcuggaaau

SEQ ID NO: 1542860 - RNA, 16 nt, Human adenovirus B (HAdV-B)
ugcggaggaggagagg

SEQ ID NO: 1542861 - RNA, 14 nt, Human adenovirus B (HAdV-B)
uaagggaaaugcca

SEQ ID NO: 1542862 - RNA, 17 nt, Human adenovirus B (HAdV-B)
gaagacaguuuggagga

SEQ ID NO: 1542863 - RNA, 12 nt, Human adenovirus B (HAdV-B)
gccccagcagcc

SEQ ID NO: 1542864 - RNA, 15 nt, Human adenovirus B (HAdV-B)
uguugaaaugggcau

SEQ ID NO: 1542865 - RNA, 18 nt, Human adenovirus B (HAdV-B)
accgcuuuccugagaacc

SEQ ID NO: 1542866 - RNA, 21 nt, Human adenovirus B (HAdV-B)
cagcaguacaggacaggcgcu

SEQ ID NO: 1542867 - RNA, 14 nt, Human adenovirus B (HAdV-B)
uuucuacacgggcg

SEQ ID NO: 1542868 - RNA, 13 nt, Human adenovirus B (HAdV-B)
aaaauguugaaau

SEQ ID NO: 1542869 - RNA, 15 nt, Human adenovirus B (HAdV-B)
ucgccaacuacaaca

SEQ ID NO: 1542870 - RNA, 15 nt, Human adenovirus B (HAdV-B)
gacuccuucaacccu

SEQ ID NO: 1542871 - RNA, 21 nt, Human adenovirus B (HAdV-B)
agcuguguacucccagcagcu

SEQ ID NO: 1542872 - RNA, 12 nt, Human adenovirus B (HAdV-B)
uguguagaugcc

SEQ ID NO: 1542873 - RNA, 19 nt, Human adenovirus B (HAdV-B)
ccaugcgagccgcaagagc

SEQ ID NO: 1542874 - RNA, 22 nt, Human adenovirus B (HAdV-B)
caggccucuucuccaguggagu

SEQ ID NO: 1542875 - RNA, 17 nt, Human adenovirus B (HAdV-B)
uuaugcucaggaucaca

SEQ ID NO: 1542876 - RNA, 20 nt, Human adenovirus B (HAdV-B)
uacccuguggugggugcaga

SEQ ID NO: 1542877 - RNA, 16 nt, Human adenovirus B (HAdV-B)
cugacacuccuggucc

SEQ ID NO: 1542878 - RNA, 17 nt, Human adenovirus B (HAdV-B)
caucuagaccacugccg

SEQ ID NO: 1542879 - RNA, 12 nt, Human adenovirus B (HAdV-B)
agaggaauguuu

SEQ ID NO: 1542880 - RNA, 17 nt, Human adenovirus B (HAdV-B)
uaccaacacaacaacuc

SEQ ID NO: 1542881 - RNA, 13 nt, Human adenovirus B (HAdV-B)
gcggagcagagca

SEQ ID NO: 1542882 - RNA, 23 nt, Human adenovirus B (HAdV-B)
caucauuucccuuacaugcauau

SEQ ID NO: 1542883 - RNA, 13 nt, Human adenovirus B (HAdV-B)
guuauuagaugcu

SEQ ID NO: 1542884 - RNA, 17 nt, Human adenovirus B (HAdV-B)
augauauucuugagcag

SEQ ID NO: 1542885 - RNA, 18 nt, Human adenovirus B (HAdV-B)
augccagcgguucuggag

SEQ ID NO: 1542886 - RNA, 11 nt, Human adenovirus B (HAdV-B)
gauucugggga

SEQ ID NO: 1542887 - RNA, 14 nt, Human adenovirus B (HAdV-B)
gucucugaagaaau

SEQ ID NO: 1542888 - RNA, 11 nt, Human adenovirus B (HAdV-B)
aauuaaaugac

SEQ ID NO: 1542889 - RNA, 15 nt, Human adenovirus B (HAdV-B)
aauuggcuccagcaa

SEQ ID NO: 1542890 - RNA, 20 nt, Human adenovirus B (HAdV-B)
gaaggcgauaaugccagacu

SEQ ID NO: 1542891 - RNA, 15 nt, Human adenovirus B (HAdV-B)
aacaucauugaagag

SEQ ID NO: 1542892 - RNA, 21 nt, Human adenovirus B (HAdV-B)
ccggauuuuacaaccagaaga

SEQ ID NO: 1542893 - RNA, 12 nt, Human adenovirus B (HAdV-B)
gagcagacagua

SEQ ID NO: 1542894 - RNA, 23 nt, Human adenovirus B (HAdV-B)
uuacuagucucgcaacucugacu

SEQ ID NO: 1542895 - RNA, 20 nt, Human adenovirus B (HAdV-B)
ggcaacuccgacugcagcac

SEQ ID NO: 1542896 - RNA, 16 nt, Human adenovirus B (HAdV-B)
augggacgagaccgga

SEQ ID NO: 1542897 - RNA, 19 nt, Human adenovirus B (HAdV-B)
uccuagcaaggacaacauc

SEQ ID NO: 1542898 - RNA, 12 nt, Human adenovirus B (HAdV-B)
gaugagcaucac

SEQ ID NO: 1542899 - RNA, 15 nt, Human adenovirus B (HAdV-B)
cagcagacacaucac

SEQ ID NO: 1542900 - RNA, 15 nt, Human adenovirus B (HAdV-B)
gagacgagccuggga

SEQ ID NO: 1542901 - RNA, 19 nt, Human adenovirus B (HAdV-B)
agacgaugggcguccagcg

SEQ ID NO: 1542902 - RNA, 12 nt, Human adenovirus B (HAdV-B)
guauaaugaggc

SEQ ID NO: 1542903 - RNA, 16 nt, Human adenovirus B (HAdV-B)
guugcuaacgcuggag

SEQ ID NO: 1542904 - RNA, 18 nt, Human adenovirus B (HAdV-B)
cuauucaaccuguagaaa

SEQ ID NO: 1542905 - RNA, 20 nt, Human adenovirus B (HAdV-B)
ccagcagcaccucacuuccc

SEQ ID NO: 1542906 - RNA, 19 nt, Human adenovirus B (HAdV-B)
cuauaggcucaaacugcac

SEQ ID NO: 1542907 - RNA, 16 nt, Human adenovirus B (HAdV-B)
ggacagucaggcagag

SEQ ID NO: 1542908 - RNA, 18 nt, Human adenovirus B (HAdV-B)
cccagggauuuggaagag

SEQ ID NO: 1542909 - RNA, 23 nt, Human adenovirus B (HAdV-B)
cuacacacagaaauauaaauuuu

SEQ ID NO: 1542910 - RNA, 14 nt, Human adenovirus B (HAdV-B)
cuccgacugcagca

SEQ ID NO: 1542911 - RNA, 12 nt, Human adenovirus B (HAdV-B)
auucacuggaac

SEQ ID NO: 1542912 - RNA, 17 nt, Human adenovirus B (HAdV-B)
cuagagagagaggauga

SEQ ID NO: 1542913 - RNA, 17 nt, Human adenovirus B (HAdV-B)
aucgaaguugcuggaaa

SEQ ID NO: 1542914 - RNA, 18 nt, Human adenovirus B (HAdV-B)
acgaucgcgguggggcgg

SEQ ID NO: 1542915 - RNA, 12 nt, Human adenovirus B (HAdV-B)
agugcaggagcg

SEQ ID NO: 1542916 - RNA, 17 nt, Human adenovirus B (HAdV-B)
cuaaaauugucauguau

SEQ ID NO: 1542917 - RNA, 19 nt, Human adenovirus B (HAdV-B)
gauccagauauucaaccug

SEQ ID NO: 1542918 - RNA, 16 nt, Human adenovirus B (HAdV-B)
ggacaggaagacacug

SEQ ID NO: 1542919 - RNA, 13 nt, Human adenovirus B (HAdV-B)
cagcgaccgcgcu

SEQ ID NO: 1542920 - RNA, 14 nt, Human adenovirus B (HAdV-B)
uacggaagccagca

SEQ ID NO: 1542921 - RNA, 17 nt, Human adenovirus B (HAdV-B)
cucccgacggugcugca

SEQ ID NO: 1542922 - RNA, 17 nt, Human adenovirus B (HAdV-B)
uagacagaauggagugc

SEQ ID NO: 1542923 - RNA, 12 nt, Human adenovirus B (HAdV-B)
acaacuuacacu

SEQ ID NO: 1542924 - RNA, 18 nt, Human adenovirus B (HAdV-B)
ccugcugcuucucccagg

SEQ ID NO: 1542925 - RNA, 15 nt, Human adenovirus B (HAdV-B)
acaccuacgacuaca

SEQ ID NO: 1542926 - RNA, 18 nt, Human adenovirus B (HAdV-B)
uaaacacacccucauaau

SEQ ID NO: 1542927 - RNA, 16 nt, Human adenovirus B (HAdV-B)
uacuaaggguugcauu

SEQ ID NO: 1542928 - RNA, 23 nt, Human adenovirus B (HAdV-B)
ugaugaagcauacaauccagaca

SEQ ID NO: 1542929 - RNA, 22 nt, Human adenovirus B (HAdV-B)
cuggaaauggggcugagguggu

SEQ ID NO: 1542930 - RNA, 17 nt, Human adenovirus B (HAdV-B)
ugagcggagacggcuug

SEQ ID NO: 1542931 - RNA, 12 nt, Human adenovirus B (HAdV-B)
gucuccaugagu

SEQ ID NO: 1542932 - RNA, 13 nt, Human adenovirus B (HAdV-B)
cucggcugcggag

SEQ ID NO: 1542933 - RNA, 16 nt, Human adenovirus B (HAdV-B)
ccgcuuuuccagaagc

SEQ ID NO: 1542934 - RNA, 12 nt, Human adenovirus B (HAdV-B)
ccaaaucagaaa

SEQ ID NO: 1542935 - RNA, 22 nt, Human
aagagucgcugugccacaggcu

SEQ ID NO: 1542936 - RNA, 15 nt, Human
aagagucgcugugcc

SEQ ID NO: 1542937 - RNA, 19 nt, Human
accacgggcccggguuggg

SEQ ID NO: 1542938 - RNA, 13 nt, Human
agcaucuaucaga

SEQ ID NO: 1542939 - RNA, 21 nt, Human
agggacaggaccccagcucug

SEQ ID NO: 1542940 - RNA, 17 nt, Human
gccggccaguggccuuc

SEQ ID NO: 1542941 - RNA, 17 nt, Human
gccaccccgagggcuga

SEQ ID NO: 1542942 - RNA, 23 nt, Human
gccaccccgagggcugagccugg

SEQ ID NO: 1542943 - RNA, 16 nt, Human
gccaccccgagggcug

SEQ ID NO: 1542944 - RNA, 13 nt, Human
ggaccccagcucu

SEQ ID NO: 1542945 - RNA, 15 nt, Human
ggaccccagcucugc

SEQ ID NO: 1542946 - RNA, 12 nt, Human
ggaccccagcuc

SEQ ID NO: 1542947 - RNA, 17 nt, Human
aaaagcuggauuuucuu

SEQ ID NO: 1542948 - RNA, 18 nt, Human
gaccucgugccaccccga

SEQ ID NO: 1542949 - RNA, 20 nt, Human
gagggcugagccugguccca

SEQ ID NO: 1542950 - RNA, 20 nt, Human
cuuauuagaaaaauauuaua

SEQ ID NO: 1542951 - RNA, 15 nt, Human
cuggaugcccaggaa

SEQ ID NO: 1542952 - RNA, 14 nt, Human
cuggaugcccagga

SEQ ID NO: 1542953 - RNA, 13 nt, Human
cuggaugcccagg

SEQ ID NO: 1542954 - RNA, 16 nt, Human
cuggaugcccaggaau

SEQ ID NO: 1542955 - RNA, 14 nt, Human
cuggaugauauuuu

SEQ ID NO: 1542956 - RNA, 11 nt, Human
cuggugcccug

SEQ ID NO: 1542957 - RNA, 15 nt, Human
cugcagccugcagga

SEQ ID NO: 1542958 - RNA, 19 nt, Human
cugcagccugcaggaccuc

SEQ ID NO: 1542959 - RNA, 14 nt, Human
cugcagccugcagg

SEQ ID NO: 1542960 - RNA, 12 nt, Human
cugcagccugca

SEQ ID NO: 1542961 - RNA, 21 nt, Human
cucgugccaccccgagggcug

SEQ ID NO: 1542962 - RNA, 13 nt, Human
ccuuccccagcau

SEQ ID NO: 1542963 - RNA, 12 nt, Human
ccuuccccagca

SEQ ID NO: 1542964 - RNA, 14 nt, Human
cuaagucauucaua

SEQ ID NO: 1542965 - RNA, 16 nt, Human
cccugacagggccagu

SEQ ID NO: 1542966 - RNA, 13 nt, Human
cccugacagggcc

SEQ ID NO: 1542967 - RNA, 16 nt, Human
cccuggaugcccagga

SEQ ID NO: 1542968 - RNA, 15 nt, Human
cccuggaugcccagg

SEQ ID NO: 1542969 - RNA, 19 nt, Human
cccagcaugcaccacgggc

SEQ ID NO: 1542970 - RNA, 23 nt, Human
cccagcaugcaccacgggcccgg

SEQ ID NO: 1542971 - RNA, 15 nt, Human
ccagacggggcugga

SEQ ID NO: 1542972 - RNA, 15 nt, Human
ccagaucaaggaugu

SEQ ID NO: 1542973 - RNA, 18 nt, Human
ccagacuugggaggaugu

SEQ ID NO: 1542974 - RNA, 15 nt, Human
caggaccccagcucu

SEQ ID NO: 1542975 - RNA, 14 nt, Human
caggaccccagcuc

SEQ ID NO: 1542976 - RNA, 13 nt, Human
caggaccccagcu

SEQ ID NO: 1542977 - RNA, 12 nt, Human
caggaccccagc

SEQ ID NO: 1542978 - RNA, 18 nt, Human
caggaccucgugccaccc

SEQ ID NO: 1542979 - RNA, 17 nt, Human
caggaccucgugccacc

SEQ ID NO: 1542980 - RNA, 14 nt, Human
cauuuguuguuuga

SEQ ID NO: 1542981 - RNA, 16 nt, Human
aacauuugcugucagc

SEQ ID NO: 1542982 - RNA, 23 nt, Human
gugccguguccccugacagggcc

SEQ ID NO: 1542983 - RNA, 22 nt, Human
gugccguguccccugacagggc

SEQ ID NO: 1542984 - RNA, 18 nt, Human
uaguuuugugaaggugau

SEQ ID NO: 1542985 - RNA, 12 nt, Human
accauuauuuuu

SEQ ID NO: 1542986 - RNA, 16 nt, Human
accagacggggcugga

SEQ ID NO: 1542987 - RNA, 21 nt, Human
accagacggggcuggagugug

SEQ ID NO: 1542988 - RNA, 15 nt, Human
accagacggggcugg

SEQ ID NO: 1542989 - RNA, 14 nt, Human
accagacggggcug

SEQ ID NO: 1542990 - RNA, 18 nt, Human
acaguugcuguuguguga

SEQ ID NO: 1542991 - RNA, 23 nt, Human
accucgugccaccccgagggcug

SEQ ID NO: 1542992 - RNA, 19 nt, Human
accucgugccaccccgagg

SEQ ID NO: 1542993 - RNA, 17 nt, Human
acgggcccggguugggu

SEQ ID NO: 1542994 - RNA, 16 nt, Human
acgggcccggguuggg

SEQ ID NO: 1542995 - RNA, 21 nt, Human
acgggcccggguugggucacc

SEQ ID NO: 1542996 - RNA, 20 nt, Human
acgggcccggguugggucac

SEQ ID NO: 1542997 - RNA, 16 nt, Human
ucgguccuggugcccu

SEQ ID NO: 1542998 - RNA, 13 nt, Human
ucgguccuggugc

SEQ ID NO: 1542999 - RNA, 15 nt, Human
acuuauagauugaaa

SEQ ID NO: 1543000 - RNA, 19 nt, Human
acuugaauaaccaucugaa

SEQ ID NO: 1543001 - RNA, 20 nt, Human
acuugaauaaccaucugaaa

SEQ ID NO: 1543002 - RNA, 15 nt, Human
agagucuccauuuaa

SEQ ID NO: 1543003 - RNA, 18 nt, Human
aggagccgaagcccaggg

SEQ ID NO: 1543004 - RNA, 16 nt, Human
aggagccgaagcccag

SEQ ID NO: 1543005 - RNA, 21 nt, Human
uggagugugaggguccugcag

SEQ ID NO: 1543006 - RNA, 13 nt, Human
agggaggcagggg

SEQ ID NO: 1543007 - RNA, 20 nt, Human
uggggccaugccuccucagg

SEQ ID NO: 1543008 - RNA, 21 nt, Human
uggggccaugccuccucagga

SEQ ID NO: 1543009 - RNA, 19 nt, Human
uggggccaugccuccucag

SEQ ID NO: 1543010 - RNA, 14 nt, Human
uggggccaugccuc

SEQ ID NO: 1543011 - RNA, 23 nt, Human
aggggugcggcggucccagcucc

SEQ ID NO: 1543012 - RNA, 21 nt, Human
aggggugcggcggucccagcu

SEQ ID NO: 1543013 - RNA, 20 nt, Human
aggggugcggcggucccagc

SEQ ID NO: 1543014 - RNA, 22 nt, Human
aggggugcggcggucccagcuc

SEQ ID NO: 1543015 - RNA, 18 nt, Human
aggugauauuuuucuuau

SEQ ID NO: 1543016 - RNA, 19 nt, Human
uggugcccuggaugcccag

SEQ ID NO: 1543017 - RNA, 14 nt, Human
uguaguaucucaua

SEQ ID NO: 1543018 - RNA, 21 nt, Human
agucucaugccuugagaucug

SEQ ID NO: 1543019 - RNA, 19 nt, Human
agucucaugccuugagauc

SEQ ID NO: 1543020 - RNA, 16 nt, Human
ugugccacaggcuuag

SEQ ID NO: 1543021 - RNA, 12 nt, Human
ugugccacaggc

SEQ ID NO: 1543022 - RNA, 20 nt, Human
uuuacuucuaagucauucau

SEQ ID NO: 1543023 - RNA, 23 nt, Human
uuuaggauguguauuucauuuau

SEQ ID NO: 1543024 - RNA, 12 nt, Human
uuuuugauauau

SEQ ID NO: 1543025 - RNA, 16 nt, Human
auuauaaaguuuucua

SEQ ID NO: 1543026 - RNA, 13 nt, Human
auuauaaaguuuu

SEQ ID NO: 1543027 - RNA, 16 nt, Human
auuauaacucauuugu

SEQ ID NO: 1543028 - RNA, 21 nt, Human
uuugacacuuauagauugaaa

SEQ ID NO: 1543029 - RNA, 18 nt, Human
uuuuccaaucauuugacu

SEQ ID NO: 1543030 - RNA, 16 nt, Human
caccagacggggcugg

SEQ ID NO: 1543031 - RNA, 17 nt, Human
caccagacggggcugga

SEQ ID NO: 1543032 - RNA, 21 nt, Human
ccacaggcuuagggacaggac

SEQ ID NO: 1543033 - RNA, 19 nt, Human
ccacaggcuuagggacagg

SEQ ID NO: 1543034 - RNA, 18 nt, Human
ccacaggcuuagggacag

SEQ ID NO: 1543035 - RNA, 15 nt, Human
ccacaggcuuaggga

SEQ ID NO: 1543036 - RNA, 15 nt, Human
ccaugccuccucagg

SEQ ID NO: 1543037 - RNA, 12 nt, Human
cccaggggccgg

SEQ ID NO: 1543038 - RNA, 16 nt, Human
cccaggugauauuuuu

SEQ ID NO: 1543039 - RNA, 9 nt, Human
cccagcucc

SEQ ID NO: 1543040 - RNA, 19 nt, Human
ccccaggagggaggcaggg

SEQ ID NO: 1543041 - RNA, 18 nt, Human
ccccaggagggaggcagg

SEQ ID NO: 1543042 - RNA, 22 nt, Human
ccgagggcugagccugguccca

SEQ ID NO: 1543043 - RNA, 16 nt, Human
ccgagggcugagccug

SEQ ID NO: 1543044 - RNA, 13 nt, Human
ccgagggcugagc

SEQ ID NO: 1543045 - RNA, 16 nt, Human
ccugaagaacuauuuu

SEQ ID NO: 1543046 - RNA, 21 nt, Human
cgggcaggguguggggccaug

SEQ ID NO: 1543047 - RNA, 15 nt, Human
cgucgguccuggugc

SEQ ID NO: 1543048 - RNA, 24 nt, Human
cuuacuugcauaccaaguugauac

SEQ ID NO: 1543049 - RNA, 18 nt, Human
gacagggccagugcaguu

SEQ ID NO: 1543050 - RNA, 19 nt, Human
gaauaaucaaauacauuuu

SEQ ID NO: 1543051 - RNA, 16 nt, Human
gaagcccaggggccgg

SEQ ID NO: 1543052 - RNA, 19 nt, Human
gcaagcucuuuuauaugcu

SEQ ID NO: 1543053 - RNA, 15 nt, Human
gcaugcaccacgggc

SEQ ID NO: 1543054 - RNA, 14 nt, Human
gcaugcaccacggg

SEQ ID NO: 1543055 - RNA, 15 nt, Human
gcaccacgggcccgg

SEQ ID NO: 1543056 - RNA, 13 nt, Human
gcagccugcagga

SEQ ID NO: 1543057 - RNA, 16 nt, Human
gcagccugcaggaccu

SEQ ID NO: 1543058 - RNA, 15 nt, Human
gcaggaccucgugcc

SEQ ID NO: 1543059 - RNA, 22 nt, Human
gcggucccagcucccuggcucc

SEQ ID NO: 1543060 - RNA, 18 nt, Human
gcggucccagcucccugg

SEQ ID NO: 1543061 - RNA, 14 nt, Human
gcggucccagcucc

SEQ ID NO: 1543062 - RNA, 13 nt, Human
gcggucccagcuc

SEQ ID NO: 1543063 - RNA, 23 nt, Human
gccugcaggaccucgugccaccc

SEQ ID NO: 1543064 - RNA, 18 nt, Human
gccugcaggaccucgugc

SEQ ID NO: 1543065 - RNA, 17 nt, Human
gccugcaggaccucgug

SEQ ID NO: 1543066 - RNA, 13 nt, Human
gccugcaggaccu

SEQ ID NO: 1543067 - RNA, 17 nt, Human
gccgggcaggguguggg

SEQ ID NO: 1543068 - RNA, 19 nt, Human
ggagccgaagcccaggggc

SEQ ID NO: 1543069 - RNA, 17 nt, Human
ggagccgaagcccaggg

SEQ ID NO: 1543070 - RNA, 15 nt, Human
ggagccgaagcccag

SEQ ID NO: 1543071 - RNA, 22 nt, Human
ggagccgaagcccaggggccgg

SEQ ID NO: 1543072 - RNA, 11 nt, Human
ggcugagccug

SEQ ID NO: 1543073 - RNA, 19 nt, Human
ggucaccagacggggcugg

SEQ ID NO: 1543074 - RNA, 21 nt, Human
gggugcggcggucccagcucc

SEQ ID NO: 1543075 - RNA, 22 nt, Human
ggggugcggcggucccagcucc

SEQ ID NO: 1543076 - RNA, 20 nt, Human
uacuugaauaaccaucugaa

SEQ ID NO: 1543077 - RNA, 18 nt, Human
uacuugaauaaccaucug

SEQ ID NO: 1543078 - RNA, 16 nt, Human
uacagaaauauccaug

SEQ ID NO: 1543079 - RNA, 16 nt, Human
uaagagguugauuaua

SEQ ID NO: 1543080 - RNA, 14 nt, Human
guuuucuaaauuua

SEQ ID NO: 1543081 - RNA, 22 nt, Human
uccuggugcccuggaugcccag

SEQ ID NO: 1543082 - RNA, 13 nt, Human
uccuggugcccug

SEQ ID NO: 1543083 - RNA, 12 nt, Human
uccuggugcccu

SEQ ID NO: 1543084 - RNA, 18 nt, Human
ugccaccccgagggcuga

SEQ ID NO: 1543085 - RNA, 17 nt, Human
ugccaccccgagggcug

SEQ ID NO: 1543086 - RNA, 13 nt, Human
uggaugcccagga

SEQ ID NO: 1543087 - RNA, 14 nt, Human
uggaugcccaggaa

SEQ ID NO: 1543088 - RNA, 19 nt, Human
uggaugauauuuuuuauca

SEQ ID NO: 1543089 - RNA, 14 nt, Human
uguguaguuccagc

SEQ ID NO: 1543090 - RNA, 15 nt, Human
uguuguuuuuggaug

SEQ ID NO: 1543091 - RNA, 23 nt, Human
uguggggccaugccuccucagga

SEQ ID NO: 1543092 - RNA, 17 nt, Human
ugugaggguccugcagc

SEQ ID NO: 1543093 - RNA, 22 nt, Human
uuccccagcaugcaccacgggc

SEQ ID NO: 1543094 - RNA, 14 nt, Human
uuugauauaugaaa

SEQ ID NO: 1543095 - RNA, 21 nt, Human
ggccaugccuccucaggagcc

SEQ ID NO: 1543096 - RNA, 18 nt, Human
ggccaugccuccucagga

SEQ ID NO: 1543097 - RNA, 17 nt, Human
ggccaugccuccucagg

SEQ ID NO: 1543098 - RNA, 22 nt, Human
ggccaguggccuuccccagcau

SEQ ID NO: 1543099 - RNA, 19 nt, Human
ggccaguggccuuccccag

SEQ ID NO: 1543100 - RNA, 22 nt, Human
gggacaggaccccagcucugcg

SEQ ID NO: 1543101 - RNA, 21 nt, Human
gggacaggaccccagcucugc

SEQ ID NO: 1543102 - RNA, 19 nt, Human
gggacaggaccccagcucu

SEQ ID NO: 1543103 - RNA, 17 nt, Human
gggacaggaccccagcu

SEQ ID NO: 1543104 - RNA, 15 nt, Human
gggacaggaccccag

SEQ ID NO: 1543105 - RNA, 22 nt, Human
gggccaugccuccucaggagcc

SEQ ID NO: 1543106 - RNA, 23 nt, Human
gggccaugccuccucaggagccg

SEQ ID NO: 1543107 - RNA, 13 nt, Human
gggccaugccucc

SEQ ID NO: 1543108 - RNA, 13 nt, Human
gguccuggugccc

SEQ ID NO: 1543109 - RNA, 12 nt, Human
gguccuggugcc

SEQ ID NO: 1543110 - RNA, 24 nt, Human
gguccuggugcccuggaugcccag

SEQ ID NO: 1543111 - RNA, 14 nt, Human
gguccuggugcccu

SEQ ID NO: 1543112 - RNA, 21 nt, Human
gcuggagugugaggguccugc

SEQ ID NO: 1543113 - RNA, 15 nt, Human
gcuggagugugaggg

SEQ ID NO: 1543114 - RNA, 13 nt, Human
gcugugccacagg

SEQ ID NO: 1543115 - RNA, 19 nt, Human
gcugugccacaggcuuagg

SEQ ID NO: 1543116 - RNA, 20 nt, Human
gcugugccacaggcuuaggg

SEQ ID NO: 1543117 - RNA, 15 nt, Human
gcugugccacaggcu

SEQ ID NO: 1543118 - RNA, 14 nt, Human
gcugugccacaggc

SEQ ID NO: 1543119 - RNA, 21 nt, Human
gccaguggccuuccccagcau

SEQ ID NO: 1543120 - RNA, 17 nt, Human
cuucuaagucauucaua

SEQ ID NO: 1543121 - RNA, 17 nt, Human
cuccgccuuaccaggag

SEQ ID NO: 1543122 - RNA, 22 nt, Human
cucugcgucgguccuggugccc

SEQ ID NO: 1543123 - RNA, 21 nt, Human
cucugcgucgguccuggugcc

SEQ ID NO: 1543124 - RNA, 20 nt, Human
cucugcgucgguccuggugc

SEQ ID NO: 1543125 - RNA, 19 nt, Human
cucugcgucgguccuggug

SEQ ID NO: 1543126 - RNA, 19 nt, Human
cggcggucccagcucccug

SEQ ID NO: 1543127 - RNA, 16 nt, Human
cggcggucccagcucc

SEQ ID NO: 1543128 - RNA, 15 nt, Human
cggcggucccagcuc

SEQ ID NO: 1543129 - RNA, 18 nt, Human
ccugcaggaccucgugcc

SEQ ID NO: 1543130 - RNA, 17 nt, Human
ccugcaggaccucgugc

SEQ ID NO: 1543131 - RNA, 19 nt, Human
ccugcagccugcaggaccu

SEQ ID NO: 1543132 - RNA, 22 nt, Human
ccaugucaagagucgcugugcc

SEQ ID NO: 1543133 - RNA, 21 nt, Human
cagccugcaggaccucgugcc

SEQ ID NO: 1543134 - RNA, 12 nt, Human
cagccugcagga

SEQ ID NO: 1543135 - RNA, 18 nt, Human
gugccaccccgagggcug

SEQ ID NO: 1543136 - RNA, 15 nt, Human
gugaggguccugcag

SEQ ID NO: 1543137 - RNA, 14 nt, Human
gugaggguccugca

SEQ ID NO: 1543138 - RNA, 23 nt, Human
gugaggguccugcagccugcagg

SEQ ID NO: 1543139 - RNA, 24 nt, Human
gugaggguccugcagccugcagga

SEQ ID NO: 1543140 - RNA, 11 nt, Human
aaauuguguua

SEQ ID NO: 1543141 - RNA, 23 nt, Human
guguggggccaugccuccucagg

SEQ ID NO: 1543142 - RNA, 14 nt, Human
guguauuucauuua

SEQ ID NO: 1543143 - RNA, 19 nt, Human
guggccuuccccagcaugc

SEQ ID NO: 1543144 - RNA, 21 nt, Human
guggccuuccccagcaugcac

SEQ ID NO: 1543145 - RNA, 18 nt, Human
guggccuuccccagcaug

SEQ ID NO: 1543146 - RNA, 17 nt, Human
guggccuuccccagcau

SEQ ID NO: 1543147 - RNA, 21 nt, Human
guggggccaugccuccucagg

SEQ ID NO: 1543148 - RNA, 22 nt, Human
guggggccaugccuccucagga

SEQ ID NO: 1543149 - RNA, 15 nt, Human
aagcccaggggccgg

SEQ ID NO: 1543150 - RNA, 18 nt, Human
uaccauuauuuuuaggau

SEQ ID NO: 1543151 - RNA, 20 nt, Human
aauuacuuacguauguuugu

SEQ ID NO: 1543152 - RNA, 15 nt, Human
uauaacucauuuguu

SEQ ID NO: 1543153 - RNA, 17 nt, Human
uagaaacauguaauccu

SEQ ID NO: 1543154 - RNA, 14 nt, Human
acgagggugccgug

SEQ ID NO: 1543155 - RNA, 15 nt, Human
uccccugacagggcc

SEQ ID NO: 1543156 - RNA, 12 nt, Human
uccccugacagg

SEQ ID NO: 1543157 - RNA, 11 nt, Human
accccagcucu

SEQ ID NO: 1543158 - RNA, 16 nt, Human
ucgcugugccacaggc

SEQ ID NO: 1543159 - RNA, 20 nt, Human
acuugaucauuuuuaccauu

SEQ ID NO: 1543160 - RNA, 20 nt, Human
agaaauuacuaauuuuacuu

SEQ ID NO: 1543161 - RNA, 17 nt, Human
agaauaaucaaauacau

SEQ ID NO: 1543162 - RNA, 20 nt, Human
ugaaaaagcuggauuuucuu

SEQ ID NO: 1543163 - RNA, 12 nt, Human
agauuuuguugg

SEQ ID NO: 1543164 - RNA, 22 nt, Human
ugaccccaggagggaggcaggg

SEQ ID NO: 1543165 - RNA, 20 nt, Human
ugaccccaggagggaggcag

SEQ ID NO: 1543166 - RNA, 17 nt, Human
agccacauauugagaug

SEQ ID NO: 1543167 - RNA, 17 nt, Human
ugaucaaacaugucucu

SEQ ID NO: 1543168 - RNA, 19 nt, Human
ugauauuuuuuaucauaaa

SEQ ID NO: 1543169 - RNA, 17 nt, Human
ugauauuuuuuaucaua

SEQ ID NO: 1543170 - RNA, 14 nt, Human
ugaguagucucaug

SEQ ID NO: 1543171 - RNA, 17 nt, Human
ugcagccugcaggaccu

SEQ ID NO: 1543172 - RNA, 18 nt, Human
ugcagccugcaggaccuc

SEQ ID NO: 1543173 - RNA, 22 nt, Human
agccuggucccacgagggugcc

SEQ ID NO: 1543174 - RNA, 17 nt, Human
ugcggcggucccagcuc

SEQ ID NO: 1543175 - RNA, 14 nt, Human
ugcggcggucccag

SEQ ID NO: 1543176 - RNA, 13 nt, Human
ugcggcgguccca

SEQ ID NO: 1543177 - RNA, 18 nt, Human
ugcggcggucccagcucc

SEQ ID NO: 1543178 - RNA, 15 nt, Human
uggccuuccccagca

SEQ ID NO: 1543179 - RNA, 23 nt, Human
uggccuuccccagcaugcaccac

SEQ ID NO: 1543180 - RNA, 13 nt, Human
uggccuuccccag

SEQ ID NO: 1543181 - RNA, 23 nt, Human
aggguguggggccaugccuccuc

SEQ ID NO: 1543182 - RNA, 22 nt, Human
aggguguggggccaugccuccu

SEQ ID NO: 1543183 - RNA, 19 nt, Human
ugucaagagucgcugugcc

SEQ ID NO: 1543184 - RNA, 17 nt, Human
ugucaagagucgcugug

SEQ ID NO: 1543185 - RNA, 15 nt, Human
aguuagaacauuugc

SEQ ID NO: 1543186 - RNA, 16 nt, Human
uuacaggcacuaaagu

SEQ ID NO: 1543187 - RNA, 16 nt, Human
auaaccaucugaaagu

SEQ ID NO: 1543188 - RNA, 21 nt, Human
auaaucccuggaugauauuuu

SEQ ID NO: 1543189 - RNA, 20 nt, Human
auaaucccuggaugauauuu

SEQ ID NO: 1543190 - RNA, 22 nt, Human
uuagggacaggaccccagcucu

SEQ ID NO: 1543191 - RNA, 21 nt, Human
uuagggacaggaccccagcuc

SEQ ID NO: 1543192 - RNA, 20 nt, Human
auaguucccaggugauauuu

SEQ ID NO: 1543193 - RNA, 18 nt, Human
uuaguuuugugaagguga

SEQ ID NO: 1543194 - RNA, 13 nt, Human
uugaaauuuccua

SEQ ID NO: 1543195 - RNA, 14 nt, Human
uuccuuuuuuugau

SEQ ID NO: 1543196 - RNA, 17 nt, Human
uuuaagcaaguuaagug

SEQ ID NO: 1543197 - RNA, 16 nt, Human
uuuaagcaaguuaagu

SEQ ID NO: 1543198 - RNA, 14 nt, Human
auggccgggcaggg

SEQ ID NO: 1543199 - RNA, 22 nt, Human
uuggaugguguuacauauuaua

SEQ ID NO: 1543200 - RNA, 23 nt, Human
aguugauacuugaauaaccaucu

SEQ ID NO: 1543201 - RNA, 17 nt, Human
aguggccuuccccagca

SEQ ID NO: 1543202 - RNA, 18 nt, Human
aguggccuuccccagcau

SEQ ID NO: 1543203 - RNA, 13 nt, Human
agggacuuagcaa

SEQ ID NO: 1543204 - RNA, 21 nt, Human
aggguccugcagccugcagga

SEQ ID NO: 1543205 - RNA, 19 nt, Human
aggguccugcagccugcag

SEQ ID NO: 1543206 - RNA, 17 nt, Human
aggguccugcagccugc

SEQ ID NO: 1543207 - RNA, 16 nt, Human
aggguccugcagccug

SEQ ID NO: 1543208 - RNA, 23 nt, Human
aggcuuagggacaggaccccagc

SEQ ID NO: 1543209 - RNA, 21 nt, Human
aacuuacuugcauaccaaguu

SEQ ID NO: 1543210 - RNA, 17 nt, Human
acagggccagugcaguu

SEQ ID NO: 1543211 - RNA, 22 nt, Human
accaucugaaagugguacuuga

SEQ ID NO: 1543212 - RNA, 22 nt, Human
caagagucgcugugccacaggc

SEQ ID NO: 1543213 - RNA, 19 nt, Human
caagagucgcugugccaca

SEQ ID NO: 1543214 - RNA, 16 nt, Human
ccaugccuccucagga

SEQ ID NO: 1543215 - RNA, 17 nt, Human
cccacgagggugccgug

SEQ ID NO: 1543216 - RNA, 12 nt, Human
cccagcucugcg

SEQ ID NO: 1543217 - RNA, 11 nt, Human
cccagcucugc

SEQ ID NO: 1543218 - RNA, 22 nt, Human
ccagcucugcgucgguccuggu

SEQ ID NO: 1543219 - RNA, 17 nt, Human
ccagugcuuuauguugu

SEQ ID NO: 1543220 - RNA, 15 nt, Human
caugccuccucagga

SEQ ID NO: 1543221 - RNA, 19 nt, Human
cauagaaaacacuacagug

SEQ ID NO: 1543222 - RNA, 19 nt, Human
caguggccuuccccagcau

SEQ ID NO: 1543223 - RNA, 17 nt, Human
caguggccuuccccagc

SEQ ID NO: 1543224 - RNA, 18 nt, Human
caguggccuuccccagca

SEQ ID NO: 1543225 - RNA, 22 nt, Human
cggccaguggccuuccccagca

SEQ ID NO: 1543226 - RNA, 12 nt, Human
cggucccagcuc

SEQ ID NO: 1543227 - RNA, 13 nt, Human
cggucccagcucc

SEQ ID NO: 1543228 - RNA, 13 nt, Human
cgguccuggugcc

SEQ ID NO: 1543229 - RNA, 19 nt, Human
cgugccaccccgagggcug

SEQ ID NO: 1543230 - RNA, 22 nt, Human
cgugccaccccgagggcugagc

SEQ ID NO: 1543231 - RNA, 15 nt, Human
cgugccaccccgagg

SEQ ID NO: 1543232 - RNA, 12 nt, Human
cugacagggcca

SEQ ID NO: 1543233 - RNA, 17 nt, Human
cugacagggccagugca

SEQ ID NO: 1543234 - RNA, 12 nt, Human
cugagccugguc

SEQ ID NO: 1543235 - RNA, 19 nt, Human
cuggucccacgagggugcc

SEQ ID NO: 1543236 - RNA, 17 nt, Human
cuggucccacgagggug

SEQ ID NO: 1543237 - RNA, 14 nt, Human
cuggucccacgagg

SEQ ID NO: 1543238 - RNA, 19 nt, Human
gaaauuacuaauuuuacuu

SEQ ID NO: 1543239 - RNA, 20 nt, Human
gaaauuuccuaauuuauucu

SEQ ID NO: 1543240 - RNA, 20 nt, Human
gaaauuacuaauuuuacuuc

SEQ ID NO: 1543241 - RNA, 16 nt, Human
gaaggugauuuauucu

SEQ ID NO: 1543242 - RNA, 20 nt, Human
gacaugggugaacuuacuug

SEQ ID NO: 1543243 - RNA, 14 nt, Human
gaccccagcucugc

SEQ ID NO: 1543244 - RNA, 12 nt, Human
gaccccagcucu

SEQ ID NO: 1543245 - RNA, 15 nt, Human
gagccgaagcccagg

SEQ ID NO: 1543246 - RNA, 14 nt, Human
gagccgaagcccag

SEQ ID NO: 1543247 - RNA, 15 nt, Human
gccaugccuccucag

SEQ ID NO: 1543248 - RNA, 18 nt, Human
gccguguccccugacagg

SEQ ID NO: 1543249 - RNA, 13 nt, Human
gccgaagcccagg

SEQ ID NO: 1543250 - RNA, 12 nt, Human
gccuccucagga

SEQ ID NO: 1543251 - RNA, 15 nt, Human
gccuccucaggagcc

SEQ ID NO: 1543252 - RNA, 15 nt, Human
gcgucgguccuggug

SEQ ID NO: 1543253 - RNA, 18 nt, Human
uuuuggaugguguuacau

SEQ ID NO: 1543254 - RNA, 15 nt, Human
uuuucuaaauuuauc

SEQ ID NO: 1543255 - RNA, 13 nt, Human
uuuuuugauauau

SEQ ID NO: 1543256 - RNA, 13 nt, Human
uuugaauaugaaa

SEQ ID NO: 1543257 - RNA, 15 nt, Human
guauguuuguacuug

SEQ ID NO: 1543258 - RNA, 16 nt, Human
gucaccagacggggcu

SEQ ID NO: 1543259 - RNA, 17 nt, Human
gucaccagacggggcug

SEQ ID NO: 1543260 - RNA, 17 nt, Human
gucgcugugccacaggc

SEQ ID NO: 1543261 - RNA, 18 nt, Human
gucgguccuggugcccug

SEQ ID NO: 1543262 - RNA, 17 nt, Human
gucgguccuggugcccu

SEQ ID NO: 1543263 - RNA, 15 nt, Human
gucgguccuggugcc

SEQ ID NO: 1543264 - RNA, 14 nt, Human
gugauauuuuucuu

SEQ ID NO: 1543265 - RNA, 22 nt, Human
gugcggcggucccagcucccug

SEQ ID NO: 1543266 - RNA, 19 nt, Human
gugcggcggucccagcucc

SEQ ID NO: 1543267 - RNA, 18 nt, Human
gugcggcggucccagcuc

SEQ ID NO: 1543268 - RNA, 21 nt, Human
gugcaguuugguguguccucc

SEQ ID NO: 1543269 - RNA, 14 nt, Human
gugguacuugauca

SEQ ID NO: 1543270 - RNA, 16 nt, Human
guggugaccccaggag

SEQ ID NO: 1543271 - RNA, 18 nt, Human
guggugaccccaggaggg

SEQ ID NO: 1543272 - RNA, 23 nt, Human
guguuacuagccucaaaauacau

SEQ ID NO: 1543273 - RNA, 18 nt, Human
guguccccugacagggcc

SEQ ID NO: 1543274 - RNA, 21 nt, Human
guguggggccaugccuccuca

SEQ ID NO: 1543275 - RNA, 20 nt, Human
guuacauauuauauguucua

SEQ ID NO: 1543276 - RNA, 21 nt, Human
uaaagaaaaguuuaccaucug

SEQ ID NO: 1543277 - RNA, 15 nt, Human
uaaaguuaguaaaga

SEQ ID NO: 1543278 - RNA, 22 nt, Human
uaagugguucuuugguuccagu

SEQ ID NO: 1543279 - RNA, 18 nt, Human
uaagucauucauaaaccu

SEQ ID NO: 1543280 - RNA, 14 nt, Human
uacagcuccuuuga

SEQ ID NO: 1543281 - RNA, 20 nt, Human
uacagcuccuuugaaaacuc

SEQ ID NO: 1543282 - RNA, 18 nt, Human
uccagcaaaucaagcuga

SEQ ID NO: 1543283 - RNA, 18 nt, Human
ucccacgagggugccgug

SEQ ID NO: 1543284 - RNA, 18 nt, Human
uccuccgccuuaccagga

SEQ ID NO: 1543285 - RNA, 16 nt, Human
ugcgucgguccuggug

SEQ ID NO: 1543286 - RNA, 17 nt, Human
ugcuaaaggagcaucua

SEQ ID NO: 1543287 - RNA, 21 nt, Human
uguccuccgccuuaccaggag

SEQ ID NO: 1543288 - RNA, 13 nt, Human
uuaaauauuuagu

SEQ ID NO: 1543289 - RNA, 21 nt, Human
uuaagagguugauuauaaagu

SEQ ID NO: 1543290 - RNA, 15 nt, Human
uuaagcaaguuaagu

SEQ ID NO: 1543291 - RNA, 22 nt, Human
ggccagugcaguuugguguguc

SEQ ID NO: 1543292 - RNA, 16 nt, Human
ggggccggccaguggc

SEQ ID NO: 1543293 - RNA, 16 nt, Human
gguccugcagccugca

SEQ ID NO: 1543294 - RNA, 15 nt, Human
gguccugcagccugc

SEQ ID NO: 1543295 - RNA, 15 nt, Human
aaauauuauaacuca

SEQ ID NO: 1543296 - RNA, 17 nt, Human
ggacaggaccccagcuc

SEQ ID NO: 1543297 - RNA, 16 nt, Human
ggacaggaccccagcu

SEQ ID NO: 1543298 - RNA, 15 nt, Human
ggacaggaccccagc

SEQ ID NO: 1543299 - RNA, 14 nt, Human
ggacaggaccccag

SEQ ID NO: 1543300 - RNA, 20 nt, Human
ggacaggaccccagcucugc

SEQ ID NO: 1543301 - RNA, 18 nt, Human
ggacaggaccccagcucu

SEQ ID NO: 1543302 - RNA, 21 nt, Human
ggacaggaccccagcucugcg

SEQ ID NO: 1543303 - RNA, 22 nt, Human
cuuagggacaggaccccagcuc

SEQ ID NO: 1543304 - RNA, 21 nt, Human
cuuagggacaggaccccagcu

SEQ ID NO: 1543305 - RNA, 23 nt, Human
cuuagggacaggaccccagcucu

SEQ ID NO: 1543306 - RNA, 20 nt, Human
cuuagggacaggaccccagc

SEQ ID NO: 1543307 - RNA, 18 nt, Human
cuuagggacaggacccca

SEQ ID NO: 1543308 - RNA, 18 nt, Human
cguguccccugacagggc

SEQ ID NO: 1543309 - RNA, 16 nt, Human
cguguccccugacagg

SEQ ID NO: 1543310 - RNA, 19 nt, Human
cguguccccugacagggcc

SEQ ID NO: 1543311 - RNA, 14 nt, Human
ccccgagggcugag

SEQ ID NO: 1543312 - RNA, 21 nt, Human
ccccgagggcugagccugguc

SEQ ID NO: 1543313 - RNA, 19 nt, Human
ccccgagggcugagccugg

SEQ ID NO: 1543314 - RNA, 16 nt, Human
ccccugacagggccag

SEQ ID NO: 1543315 - RNA, 17 nt, Human
ccgaagcccaggggccg

SEQ ID NO: 1543316 - RNA, 16 nt, Human
ccgaagcccaggggcc

SEQ ID NO: 1543317 - RNA, 15 nt, Human
ccgaagcccaggggc

SEQ ID NO: 1543318 - RNA, 14 nt, Human
ccuggaugcccagg

SEQ ID NO: 1543319 - RNA, 17 nt, Human
caggaccccagcucugc

SEQ ID NO: 1543320 - RNA, 16 nt, Human
caggaccccagcucug

SEQ ID NO: 1543321 - RNA, 18 nt, Human
caggaccccagcucugcg

SEQ ID NO: 1543322 - RNA, 21 nt, Human
caggagggaggcaggggaggg

SEQ ID NO: 1543323 - RNA, 15 nt, Human
caggagggaggcagg

SEQ ID NO: 1543324 - RNA, 22 nt, Human
caggguguggggccaugccucc

SEQ ID NO: 1543325 - RNA, 17 nt, Human
caggguguggggccaug

SEQ ID NO: 1543326 - RNA, 16 nt, Human
caggguguggggccau

SEQ ID NO: 1543327 - RNA, 22 nt, Human
cagugcaguuugguguguccuc

SEQ ID NO: 1543328 - RNA, 16 nt, Human
ccacgagggugccgug

SEQ ID NO: 1543329 - RNA, 21 nt, Human
caugucaagagucgcugugcc

SEQ ID NO: 1543330 - RNA, 19 nt, Human
caugucaagagucgcugug

SEQ ID NO: 1543331 - RNA, 14 nt, Human
caugcaccacgggc

SEQ ID NO: 1543332 - RNA, 18 nt, Human
cacaggcuuagggacagg

SEQ ID NO: 1543333 - RNA, 22 nt, Human
cacaggcuuagggacaggaccc

SEQ ID NO: 1543334 - RNA, 19 nt, Human
cacaggcuuagggacagga

SEQ ID NO: 1543335 - RNA, 14 nt, Human
guccugcagccugc

SEQ ID NO: 1543336 - RNA, 18 nt, Human
guccugcagccugcagga

SEQ ID NO: 1543337 - RNA, 10 nt, Human
guccugcagc

SEQ ID NO: 1543338 - RNA, 16 nt, Human
aagaaaaguuuaccau

SEQ ID NO: 1543339 - RNA, 21 nt, Human
aagauguagcgcuuugaauau

SEQ ID NO: 1543340 - RNA, 17 nt, Human
gugugaggguccugcag

SEQ ID NO: 1543341 - RNA, 14 nt, Human
aaguuuaccaucug

SEQ ID NO: 1543342 - RNA, 19 nt, Human
aaguuagaacauuugcugu

SEQ ID NO: 1543343 - RNA, 24 nt, Human
guuuuuggaugguguuacauauua

SEQ ID NO: 1543344 - RNA, 12 nt, Human
aaggagcaucua

SEQ ID NO: 1543345 - RNA, 21 nt, Human
guugggucaccagacggggcu

SEQ ID NO: 1543346 - RNA, 14 nt, Human
guugggucaccaga

SEQ ID NO: 1543347 - RNA, 22 nt, Human
aauuuacccucuugaauauaau

SEQ ID NO: 1543348 - RNA, 19 nt, Human
aauuuacccucuugaauau

SEQ ID NO: 1543349 - RNA, 17 nt, Human
aauuuaucaguaccuaa

SEQ ID NO: 1543350 - RNA, 19 nt, Human
uauagauugaaauuuccua

SEQ ID NO: 1543351 - RNA, 16 nt, Human
uauggccgggcagggu

SEQ ID NO: 1543352 - RNA, 13 nt, Human
uauuucauuuauu

SEQ ID NO: 1543353 - RNA, 18 nt, Human
ucauuugacuaagagucu

SEQ ID NO: 1543354 - RNA, 18 nt, Human
accgacguugccaucaaa

SEQ ID NO: 1543355 - RNA, 13 nt, Human
uccugcagccugc

SEQ ID NO: 1543356 - RNA, 11 nt, Human
ugagccugguc

SEQ ID NO: 1543357 - RNA, 19 nt, Human
ugaggguccugcagccugc

SEQ ID NO: 1543358 - RNA, 18 nt, Human
ugaggguccugcagccug

SEQ ID NO: 1543359 - RNA, 15 nt, Human
ugaggguccugcagc

SEQ ID NO: 1543360 - RNA, 14 nt, Human
ugaggguccugcag

SEQ ID NO: 1543361 - RNA, 22 nt, Human
ugaggguccugcagccugcagg

SEQ ID NO: 1543362 - RNA, 21 nt, Human
ugaggguccugcagccugcag

SEQ ID NO: 1543363 - RNA, 23 nt, Human
ugaggguccugcagccugcagga

SEQ ID NO: 1543364 - RNA, 14 nt, Human
agagucgcugugcc

SEQ ID NO: 1543365 - RNA, 19 nt, Human
agagucgcugugccacagg

SEQ ID NO: 1543366 - RNA, 15 nt, Human
agagucgcugugcca

SEQ ID NO: 1543367 - RNA, 14 nt, Human
ugaauauaaucccu

SEQ ID NO: 1543368 - RNA, 22 nt, Human
ucuggucuaaauuguguuacua

SEQ ID NO: 1543369 - RNA, 21 nt, Human
agccugcaggaccucgugcca

SEQ ID NO: 1543370 - RNA, 20 nt, Human
agccugcaggaccucgugcc

SEQ ID NO: 1543371 - RNA, 21 nt, Human
ugcaguuugguguguccuccg

SEQ ID NO: 1543372 - RNA, 22 nt, Human
agcucugcgucgguccuggugc

SEQ ID NO: 1543373 - RNA, 23 nt, Human
agcucugcgucgguccuggugcc

SEQ ID NO: 1543374 - RNA, 17 nt, Human
agggcugagccuggucc

SEQ ID NO: 1543375 - RNA, 16 nt, Human
agggcugagccugguc

SEQ ID NO: 1543376 - RNA, 18 nt, Human
agucgcugugccacaggc

SEQ ID NO: 1543377 - RNA, 18 nt, Human
uguccccugacagggcca

SEQ ID NO: 1543378 - RNA, 16 nt, Human
uguccccugacagggc

SEQ ID NO: 1543379 - RNA, 15 nt, Human
uguccccugacaggg

SEQ ID NO: 1543380 - RNA, 19 nt, Human
agugugaggguccugcagc

SEQ ID NO: 1543381 - RNA, 16 nt, Human
aguuuaccaucugaaa

SEQ ID NO: 1543382 - RNA, 12 nt, Human
aguuuaccaucu

SEQ ID NO: 1543383 - RNA, 21 nt, Human
aguuuugugaaggugauuuau

SEQ ID NO: 1543384 - RNA, 19 nt, Human
auaacucauuuguuguuug

SEQ ID NO: 1543385 - RNA, 17 nt, Human
auaaucaaauacauuuu

SEQ ID NO: 1543386 - RNA, 22 nt, Human
uugacacuuauagauugaaauu

SEQ ID NO: 1543387 - RNA, 13 nt, Human
uugauuauaaagu

SEQ ID NO: 1543388 - RNA, 18 nt, Human
auccuaaauuuacccucu

SEQ ID NO: 1543389 - RNA, 16 nt, Human
auauuuuuuaucauaa

SEQ ID NO: 1543390 - RNA, 18 nt, Human
augccuccucaggagccg

SEQ ID NO: 1543391 - RNA, 14 nt, Human
augccuccucagga

SEQ ID NO: 1543392 - RNA, 15 nt, Human
augccuccucaggag

SEQ ID NO: 1543393 - RNA, 13 nt, Human
augccuccucagg

SEQ ID NO: 1543394 - RNA, 21 nt, Human
auguagcgcuuugaauaugaa

SEQ ID NO: 1543395 - RNA, 19 nt, Human
auguagcgcuuugaauaug

SEQ ID NO: 1543396 - RNA, 18 nt, Human
uuugugaaggugauuuau

SEQ ID NO: 1543397 - RNA, 14 nt, Human
augguguuacauau

SEQ ID NO: 1543398 - RNA, 22 nt, Human
auugguuuuccaaucauuugac

SEQ ID NO: 1543399 - RNA, 22 nt, Human
aauauuauaacucauuuguugu

SEQ ID NO: 1543400 - RNA, 16 nt, Human
agggacaggaccccag

SEQ ID NO: 1543401 - RNA, 13 nt, Human
agggacaggaccc

SEQ ID NO: 1543402 - RNA, 18 nt, Human
agggacaggaccccagcu

SEQ ID NO: 1543403 - RNA, 17 nt, Human
agggacaggaccccagc

SEQ ID NO: 1543404 - RNA, 20 nt, Human
agggacaggaccccagcucu

SEQ ID NO: 1543405 - RNA, 19 nt, Human
aguggccuuccccagcaug

SEQ ID NO: 1543406 - RNA, 13 nt, Human
caaauacauuuua

SEQ ID NO: 1543407 - RNA, 15 nt, Human
caccccgagggcuga

SEQ ID NO: 1543408 - RNA, 19 nt, Human
ccaguggccuuccccagca

SEQ ID NO: 1543409 - RNA, 17 nt, Human
ccaguggccuuccccag

SEQ ID NO: 1543410 - RNA, 23 nt, Human
ccagugcaguuugguguguccuc

SEQ ID NO: 1543411 - RNA, 15 nt, Human
ccgggcagggugugg

SEQ ID NO: 1543412 - RNA, 16 nt, Human
cgaagcccaggggccg

SEQ ID NO: 1543413 - RNA, 13 nt, Human
cggaauauauuuu

SEQ ID NO: 1543414 - RNA, 15 nt, Human
cgcugugccacaggc

SEQ ID NO: 1543415 - RNA, 11 nt, Human
cuaaaaacaua

SEQ ID NO: 1543416 - RNA, 14 nt, Human
cuaaauuuuaagug

SEQ ID NO: 1543417 - RNA, 21 nt, Human
cucaggagccgaagcccaggg

SEQ ID NO: 1543418 - RNA, 23 nt, Human
cucaggagccgaagcccaggggc

SEQ ID NO: 1543419 - RNA, 22 nt, Human
cuguauauauuuauggccgggc

SEQ ID NO: 1543420 - RNA, 13 nt, Human
cugugccacaggc

SEQ ID NO: 1543421 - RNA, 20 nt, Human
gacaggaccccagcucugcg

SEQ ID NO: 1543422 - RNA, 18 nt, Human
gacaggaccccagcucug

SEQ ID NO: 1543423 - RNA, 17 nt, Human
gacaggaccccagcucu

SEQ ID NO: 1543424 - RNA, 16 nt, Human
gacaggaccccagcuc

SEQ ID NO: 1543425 - RNA, 15 nt, Human
gacaggaccccagcu

SEQ ID NO: 1543426 - RNA, 14 nt, Human
gacaggaccccagc

SEQ ID NO: 1543427 - RNA, 19 nt, Human
gacaggaccccagcucugc

SEQ ID NO: 1543428 - RNA, 22 nt, Human
gaggggugcggcggucccagcu

SEQ ID NO: 1543429 - RNA, 19 nt, Human
gaggggugcggcgguccca

SEQ ID NO: 1543430 - RNA, 23 nt, Human
gagggugccguguccccugacag

SEQ ID NO: 1543431 - RNA, 18 nt, Human
gaggguccugcagccugc

SEQ ID NO: 1543432 - RNA, 21 nt, Human
gaggguccugcagccugcagg

SEQ ID NO: 1543433 - RNA, 17 nt, Human
gaggguccugcagccug

SEQ ID NO: 1543434 - RNA, 13 nt, Human
gaggguccugcag

SEQ ID NO: 1543435 - RNA, 20 nt, Human
gcccuggaugcccaggaauc

SEQ ID NO: 1543436 - RNA, 20 nt, Human
gcucugcgucgguccuggug

SEQ ID NO: 1543437 - RNA, 21 nt, Human
gcucugcgucgguccuggugc

SEQ ID NO: 1543438 - RNA, 23 nt, Human
gcuuagggacaggaccccagcuc

SEQ ID NO: 1543439 - RNA, 22 nt, Human
gcuuagggacaggaccccagcu

SEQ ID NO: 1543440 - RNA, 13 nt, Human
ggaccucgugcca

SEQ ID NO: 1543441 - RNA, 23 nt, Human
guacaguugcuguugugugauca

SEQ ID NO: 1543442 - RNA, 21 nt, Human
gguuuuccaaucauuugacua

SEQ ID NO: 1543443 - RNA, 19 nt, Human
ggugcggcggucccagcuc

SEQ ID NO: 1543444 - RNA, 20 nt, Human
ggugcccuggaugcccagga

SEQ ID NO: 1543445 - RNA, 19 nt, Human
ggugcccuggaugcccagg

SEQ ID NO: 1543446 - RNA, 18 nt, Human
ggugcccuggaugcccag

SEQ ID NO: 1543447 - RNA, 15 nt, Human
ggugcccuggaugcc

SEQ ID NO: 1543448 - RNA, 15 nt, Human
ggucccagcucccug

SEQ ID NO: 1543449 - RNA, 14 nt, Human
ggucccagcucccu

SEQ ID NO: 1543450 - RNA, 12 nt, Human
ggucccagcucc

SEQ ID NO: 1543451 - RNA, 20 nt, Human
ggucccagcucccuggcucc

SEQ ID NO: 1543452 - RNA, 13 nt, Human
gggcugagccugg

SEQ ID NO: 1543453 - RNA, 23 nt, Human
gggcugagccuggucccacgagg

SEQ ID NO: 1543454 - RNA, 15 nt, Human
gggcugagccugguc

SEQ ID NO: 1543455 - RNA, 22 nt, Human
gggcccggguugggucaccaga

SEQ ID NO: 1543456 - RNA, 21 nt, Human
gggcccggguugggucaccag

SEQ ID NO: 1543457 - RNA, 19 nt, Human
ggggugcggcggucccagc

SEQ ID NO: 1543458 - RNA, 20 nt, Human
ggggugcggcggucccagcu

SEQ ID NO: 1543459 - RNA, 11 nt, Human
gucccagcucc

SEQ ID NO: 1543460 - RNA, 18 nt, Human
guccuccgccuuaccagg

SEQ ID NO: 1543461 - RNA, 23 nt, Human
guccuggugcccuggaugcccag

SEQ ID NO: 1543462 - RNA, 20 nt, Human
guccuggugcccuggaugcc

SEQ ID NO: 1543463 - RNA, 12 nt, Human
guccuggugccc

SEQ ID NO: 1543464 - RNA, 11 nt, Human
guccuggugcc

SEQ ID NO: 1543465 - RNA, 15 nt, Human
gucccagcucccugg

SEQ ID NO: 1543466 - RNA, 18 nt, Human
gugcccuggaugcccagg

SEQ ID NO: 1543467 - RNA, 19 nt, Human
gugcccuggaugcccagga

SEQ ID NO: 1543468 - RNA, 19 nt, Human
ucaccagacggggcuggag

SEQ ID NO: 1543469 - RNA, 15 nt, Human
ucaccagacggggcu

SEQ ID NO: 1543470 - RNA, 17 nt, Human
uauuauauguucuagaa

SEQ ID NO: 1543471 - RNA, 14 nt, Human
uauuauauguucua

SEQ ID NO: 1543472 - RNA, 20 nt, Human
uccccagcaugcaccacggg

SEQ ID NO: 1543473 - RNA, 19 nt, Human
uccccagcaugcaccacgg

SEQ ID NO: 1543474 - RNA, 21 nt, Human
uccccagcaugcaccacgggc

SEQ ID NO: 1543475 - RNA, 19 nt, Human
uccgccuuaccaggagaag

SEQ ID NO: 1543476 - RNA, 16 nt, Human
ucuaucagauuaaguu

SEQ ID NO: 1543477 - RNA, 13 nt, Human
ugccuccucagga

SEQ ID NO: 1543478 - RNA, 12 nt, Human
ugccuccucagg

SEQ ID NO: 1543479 - RNA, 16 nt, Human
ugccuccucaggagcc

SEQ ID NO: 1543480 - RNA, 19 nt, Human
ugggucaccagacggggcu

SEQ ID NO: 1543481 - RNA, 21 nt, Human
ugggucaccagacggggcugg

SEQ ID NO: 1543482 - RNA, 20 nt, Human
ugggucaccagacggggcug

SEQ ID NO: 1543483 - RNA, 20 nt, Human
uuauugguuuuccaaucauu

SEQ ID NO: 1543484 - RNA, 16 nt, Human
uuauggccgggcaggg

SEQ ID NO: 1543485 - RNA, 13 nt, Human
uuuccuaauuuau

SEQ ID NO: 1543486 - RNA, 21 nt, Human
uuuacccucuugaauauaauc

SEQ ID NO: 1543487 - RNA, 13 nt, Human
uuuaccaucugaa

SEQ ID NO: 1543488 - RNA, 14 nt, Human
uuuaccaucugaaa

SEQ ID NO: 1543489 - RNA, 13 nt, Human
uuguuugguuaua

SEQ ID NO: 1543490 - RNA, 18 nt, Human
uucuaagucauucauaaa

SEQ ID NO: 1543491 - RNA, 20 nt, Human
ggagugugaggguccugcag

SEQ ID NO: 1543492 - RNA, 18 nt, Human
aaaaaguuugucuuaguu

SEQ ID NO: 1543493 - RNA, 11 nt, Human
aaaaaguuugu

SEQ ID NO: 1543494 - RNA, 13 nt, Human
ggccuuccccagc

SEQ ID NO: 1543495 - RNA, 14 nt, Human
ggccuuccccagca

SEQ ID NO: 1543496 - RNA, 17 nt, Human
gggccggccaguggccu

SEQ ID NO: 1543497 - RNA, 23 nt, Human
ggggccaugccuccucaggagcc

SEQ ID NO: 1543498 - RNA, 19 nt, Human
ggggccaugccuccucagg

SEQ ID NO: 1543499 - RNA, 17 nt, Human
ggggccaugccuccuca

SEQ ID NO: 1543500 - RNA, 14 nt, Human
ggggccaugccucc

SEQ ID NO: 1543501 - RNA, 19 nt, Human
ggguccugcagccugcagg

SEQ ID NO: 1543502 - RNA, 23 nt, Human
ggguccugcagccugcaggaccu

SEQ ID NO: 1543503 - RNA, 18 nt, Human
ggguccugcagccugcag

SEQ ID NO: 1543504 - RNA, 13 nt, Human
guaauccuaaauu

SEQ ID NO: 1543505 - RNA, 23 nt, Human
aaagugguacuugaucauuuuua

SEQ ID NO: 1543506 - RNA, 20 nt, Human
aaagugguacuugaucauuu

SEQ ID NO: 1543507 - RNA, 14 nt, Human
aaagugguacuuga

SEQ ID NO: 1543508 - RNA, 17 nt, Human
gcggcggucccagcucc

SEQ ID NO: 1543509 - RNA, 16 nt, Human
gcggcggucccagcuc

SEQ ID NO: 1543510 - RNA, 14 nt, Human
gcggcggucccagc

SEQ ID NO: 1543511 - RNA, 16 nt, Human
gauacuugaauaacca

SEQ ID NO: 1543512 - RNA, 21 nt, Human
cuggugcccuggaugcccagg

SEQ ID NO: 1543513 - RNA, 20 nt, Human
cuggugcccuggaugcccag

SEQ ID NO: 1543514 - RNA, 17 nt, Human
cuggugcccuggaugcc

SEQ ID NO: 1543515 - RNA, 23 nt, Human
cuggagugugaggguccugcagc

SEQ ID NO: 1543516 - RNA, 17 nt, Human
cuaauuuauucuaaauu

SEQ ID NO: 1543517 - RNA, 16 nt, Human
ccugcagccugcagga

SEQ ID NO: 1543518 - RNA, 22 nt, Human
ccucaggagccgaagcccaggg

SEQ ID NO: 1543519 - RNA, 19 nt, Human
ccucaggagccgaagccca

SEQ ID NO: 1543520 - RNA, 12 nt, Human
ccucaggagccg

SEQ ID NO: 1543521 - RNA, 21 nt, Human
ccucaggagccgaagcccagg

SEQ ID NO: 1543522 - RNA, 22 nt, Human
ccaggagggaggcaggggaggg

SEQ ID NO: 1543523 - RNA, 15 nt, Human
ccaggagggaggcag

SEQ ID NO: 1543524 - RNA, 19 nt, Human
ccaggggccggccaguggc

SEQ ID NO: 1543525 - RNA, 21 nt, Human
ccaggagggaggcaggggagg

SEQ ID NO: 1543526 - RNA, 20 nt, Human
cagaauaaucaaauacauuu

SEQ ID NO: 1543527 - RNA, 16 nt, Human
gucgcugugccacagg

SEQ ID NO: 1543528 - RNA, 14 nt, Human
guccccugacaggg

SEQ ID NO: 1543529 - RNA, 14 nt, Human
aagaaacaacagaa

SEQ ID NO: 1543530 - RNA, 21 nt, Human
uagggacaggaccccagcucu

SEQ ID NO: 1543531 - RNA, 22 nt, Human
uagggacaggaccccagcucug

SEQ ID NO: 1543532 - RNA, 20 nt, Human
uagggacaggaccccagcuc

SEQ ID NO: 1543533 - RNA, 19 nt, Human
uagggacaggaccccagcu

SEQ ID NO: 1543534 - RNA, 15 nt, Human
uaguucccaggugau

SEQ ID NO: 1543535 - RNA, 16 nt, Human
acaggcuuagggacag

SEQ ID NO: 1543536 - RNA, 18 nt, Human
acaggaccccagcucugc

SEQ ID NO: 1543537 - RNA, 19 nt, Human
acaggaccccagcucugcg

SEQ ID NO: 1543538 - RNA, 17 nt, Human
acaggaccccagcucug

SEQ ID NO: 1543539 - RNA, 16 nt, Human
acaggaccccagcucu

SEQ ID NO: 1543540 - RNA, 15 nt, Human
acaggaccccagcuc

SEQ ID NO: 1543541 - RNA, 14 nt, Human
acaggaccccagcu

SEQ ID NO: 1543542 - RNA, 13 nt, Human
acaggaccccagc

SEQ ID NO: 1543543 - RNA, 12 nt, Human
acaggaccccag

SEQ ID NO: 1543544 - RNA, 21 nt, Human
aauuaguacagaaauauccau

SEQ ID NO: 1543545 - RNA, 21 nt, Human
uaagcaaguuaaguguccucc

SEQ ID NO: 1543546 - RNA, 10 nt, Human
ucccagcucc

SEQ ID NO: 1543547 - RNA, 15 nt, Human
acuaauuuuacuucu

SEQ ID NO: 1543548 - RNA, 22 nt, Human
uccucaggagccgaagcccagg

SEQ ID NO: 1543549 - RNA, 21 nt, Human
uccucaggagccgaagcccag

SEQ ID NO: 1543550 - RNA, 17 nt, Human
uccugcagccugcagga

SEQ ID NO: 1543551 - RNA, 20 nt, Human
ucugcgucgguccuggugcc

SEQ ID NO: 1543552 - RNA, 19 nt, Human
ugaaauuuccuaauuuauu

SEQ ID NO: 1543553 - RNA, 19 nt, Human
ugacagggccagugcaguu

SEQ ID NO: 1543554 - RNA, 16 nt, Human
ugacagggccagugca

SEQ ID NO: 1543555 - RNA, 22 nt, Human
aggagggaggcaggggaggggu

SEQ ID NO: 1543556 - RNA, 13 nt, Human
uggccgggcaggg

SEQ ID NO: 1543557 - RNA, 12 nt, Human
uggccgggcagg

SEQ ID NO: 1543558 - RNA, 13 nt, Human
agcccaggggccg

SEQ ID NO: 1543559 - RNA, 14 nt, Human
agccgaagcccagg

SEQ ID NO: 1543560 - RNA, 15 nt, Human
agggugccguguccc

SEQ ID NO: 1543561 - RNA, 24 nt, Human
agggugccguguccccugacaggg

SEQ ID NO: 1543562 - RNA, 22 nt, Human
auaaaccuugucuaugaaauga

SEQ ID NO: 1543563 - RNA, 19 nt, Human
auaccaaguugauacuuga

SEQ ID NO: 1543564 - RNA, 16 nt, Human
aguuugguguguccuc

SEQ ID NO: 1543565 - RNA, 13 nt, Human
agugguuuagaaa

SEQ ID NO: 1543566 - RNA, 19 nt, Human
aucaauucuguauuccaga

SEQ ID NO: 1543567 - RNA, 23 nt, Human
auauauuuauggccgggcagggu

SEQ ID NO: 1543568 - RNA, 22 nt, Human
uuugaaaacucuguguuuggaa

SEQ ID NO: 1543569 - RNA, 14 nt, Human
augaaaugacuucu

SEQ ID NO: 1543570 - RNA, 24 nt, Human
auuacuuacguauguuuguacuug

SEQ ID NO: 1543571 - RNA, 15 nt, Human
uuuugauauaugaaa

SEQ ID NO: 1543572 - RNA, 16 nt, Human
uuuuguuugguuauau

SEQ ID NO: 1543573 - RNA, 13 nt, Human
uuuuguuugguua

SEQ ID NO: 1543574 - RNA, 21 nt, Human
uuuuguuugguuauaucgaaa

SEQ ID NO: 1543575 - RNA, 14 nt, Human
aaaaauuuuuguuu

SEQ ID NO: 1543576 - RNA, 13 nt, Human
aaaaauuuuuguu

SEQ ID NO: 1543577 - RNA, 15 nt, Human
accccgagggcugag

SEQ ID NO: 1543578 - RNA, 13 nt, Human
agacggggcugga

SEQ ID NO: 1543579 - RNA, 15 nt, Human
agcaugcaccacggg

SEQ ID NO: 1543580 - RNA, 17 nt, Human
aggaccccagcucugcg

SEQ ID NO: 1543581 - RNA, 16 nt, Human
aggaccccagcucugc

SEQ ID NO: 1543582 - RNA, 14 nt, Human
aggaccccagcucu

SEQ ID NO: 1543583 - RNA, 13 nt, Human
aggaccccagcuc

SEQ ID NO: 1543584 - RNA, 14 nt, Human
aggaccucgugcca

SEQ ID NO: 1543585 - RNA, 13 nt, Human
cagacggggcugg

SEQ ID NO: 1543586 - RNA, 19 nt, Human
cagacggggcuggagugug

SEQ ID NO: 1543587 - RNA, 17 nt, Human
cagcaugcaccacgggc

SEQ ID NO: 1543588 - RNA, 19 nt, Human
caggaaucuguauauauuu

SEQ ID NO: 1543589 - RNA, 19 nt, Human
caggagaagaaccugaaga

SEQ ID NO: 1543590 - RNA, 21 nt, Human
caggagccgaagcccaggggc

SEQ ID NO: 1543591 - RNA, 18 nt, Human
caggagccgaagcccagg

SEQ ID NO: 1543592 - RNA, 17 nt, Human
caggagccgaagcccag

SEQ ID NO: 1543593 - RNA, 17 nt, Human
caggcuuagggacagga

SEQ ID NO: 1543594 - RNA, 16 nt, Human
caggcuuagggacagg

SEQ ID NO: 1543595 - RNA, 16 nt, Human
cagggccagugcaguu

SEQ ID NO: 1543596 - RNA, 13 nt, Human
caggggaggggug

SEQ ID NO: 1543597 - RNA, 22 nt, Human
caggggccggccaguggccuuc

SEQ ID NO: 1543598 - RNA, 17 nt, Human
caggggccggccagugg

SEQ ID NO: 1543599 - RNA, 14 nt, Human
cauuuuuaccauua

SEQ ID NO: 1543600 - RNA, 19 nt, Human
cauucauaaaccuugucua

SEQ ID NO: 1543601 - RNA, 23 nt, Human
ccaccccgagggcugagccuggu

SEQ ID NO: 1543602 - RNA, 20 nt, Human
ccagcaugcaccacgggccc

SEQ ID NO: 1543603 - RNA, 18 nt, Human
ccagcaugcaccacgggc

SEQ ID NO: 1543604 - RNA, 18 nt, Human
ccauuauuuuuaggaugu

SEQ ID NO: 1543605 - RNA, 17 nt, Human
ccaucugaaagugguac

SEQ ID NO: 1543606 - RNA, 18 nt, Human
cccggguugggucaccag

SEQ ID NO: 1543607 - RNA, 23 nt, Human
cccgagggcugagccugguccca

SEQ ID NO: 1543608 - RNA, 19 nt, Human
ccguguccccugacagggc

SEQ ID NO: 1543609 - RNA, 17 nt, Human
ccguguccccugacagg

SEQ ID NO: 1543610 - RNA, 13 nt, Human
ccgccuuaccagg

SEQ ID NO: 1543611 - RNA, 20 nt, Human
ccuggucccacgagggugcc

SEQ ID NO: 1543612 - RNA, 20 nt, Human
ccuggugcccuggaugccca

SEQ ID NO: 1543613 - RNA, 18 nt, Human
ccuggugcccuggaugcc

SEQ ID NO: 1543614 - RNA, 12 nt, Human
ccuggugcccug

SEQ ID NO: 1543615 - RNA, 21 nt, Human
ccuggugcccuggaugcccag

SEQ ID NO: 1543616 - RNA, 22 nt, Human
ccuggugcccuggaugcccagg

SEQ ID NO: 1543617 - RNA, 13 nt, Human
cuccucaggagcc

SEQ ID NO: 1543618 - RNA, 12 nt, Human
cuccucaggagc

SEQ ID NO: 1543619 - RNA, 14 nt, Human
cugaagaacuauuu

SEQ ID NO: 1543620 - RNA, 17 nt, Human
cugcgucgguccuggug

SEQ ID NO: 1543621 - RNA, 18 nt, Human
cugcgucgguccuggugc

SEQ ID NO: 1543622 - RNA, 16 nt, Human
gaaucuguauauauuu

SEQ ID NO: 1543623 - RNA, 18 nt, Human
gaacuuacuugcauacca

SEQ ID NO: 1543624 - RNA, 18 nt, Human
gaaccugaagaacuauuu

SEQ ID NO: 1543625 - RNA, 23 nt, Human
gagccuggucccacgagggugcc

SEQ ID NO: 1543626 - RNA, 19 nt, Human
gagccuggucccacgaggg

SEQ ID NO: 1543627 - RNA, 14 nt, Human
gauagacugcuaca

SEQ ID NO: 1543628 - RNA, 13 nt, Human
gagucgcugugcc

SEQ ID NO: 1543629 - RNA, 17 nt, Human
gcacuaaaguuaguaaa

SEQ ID NO: 1543630 - RNA, 12 nt, Human
gcaggggagggg

SEQ ID NO: 1543631 - RNA, 21 nt, Human
gccuggucccacgagggugcc

SEQ ID NO: 1543632 - RNA, 15 nt, Human
ggcggucccagcucc

SEQ ID NO: 1543633 - RNA, 14 nt, Human
ggcggucccagcuc

SEQ ID NO: 1543634 - RNA, 17 nt, Human
ggcucccaugucaagag

SEQ ID NO: 1543635 - RNA, 22 nt, Human
ggcuuagggacaggaccccagc

SEQ ID NO: 1543636 - RNA, 23 nt, Human
ucaggagccgaagcccaggggcc

SEQ ID NO: 1543637 - RNA, 22 nt, Human
uauuccagacuugggaggaugu

SEQ ID NO: 1543638 - RNA, 22 nt, Human
ucgugccaccccgagggcugag

SEQ ID NO: 1543639 - RNA, 18 nt, Human
ugcccuggaugcccagga

SEQ ID NO: 1543640 - RNA, 16 nt, Human
ugcccuggaugcccag

SEQ ID NO: 1543641 - RNA, 21 nt, Human
ugccguguccccugacagggc

SEQ ID NO: 1543642 - RNA, 20 nt, Human
ugccacaggcuuagggacag

SEQ ID NO: 1543643 - RNA, 21 nt, Human
ugccacaggcuuagggacagg

SEQ ID NO: 1543644 - RNA, 17 nt, Human
ugccacaggcuuaggga

SEQ ID NO: 1543645 - RNA, 19 nt, Human
uuauuagaaaaauauuaua

SEQ ID NO: 1543646 - RNA, 23 nt, Human
uuauguuguuguuguuuuuggau

SEQ ID NO: 1543647 - RNA, 21 nt, Human
uuauaucgaaauaguuacagg

SEQ ID NO: 1543648 - RNA, 21 nt, Human adenovirus B [HAdV-B]
cuguacuucuccaucagcaga

SEQ ID NO: 1543649 - RNA, 21 nt, Human adenovirus B [HAdV-B]
cgcaaaaaauggccuguuuuu

SEQ ID NO: 1543650 - RNA, 22 nt, Human adenovirus B [HAdV-B]
aagagcucugacuggagcugga

SEQ ID NO: 1543651 - RNA, 17 nt, Human adenovirus B [HAdV-B]
caaaauagaagcugcua

SEQ ID NO: 1543652 - RNA, 15 nt, Human adenovirus B [HAdV-B]
cuaccuauacacacc

SEQ ID NO: 1543653 - RNA, 23 nt, Human adenovirus B [HAdV-B]
ugcugaacggggucaucuugcag

SEQ ID NO: 1543654 - RNA, 18 nt, Human adenovirus B [HAdV-B]
cuccgacugcagcacugg

SEQ ID NO: 1543655 - RNA, 16 nt, Human adenovirus B [HAdV-B]
guggcgguucaggccu

SEQ ID NO: 1543656 - RNA, 18 nt, Human adenovirus B [HAdV-B]
cucaggaucacagagacg

SEQ ID NO: 1543657 - RNA, 17 nt, Human adenovirus B [HAdV-B]
cuauaggcucaaacugc

SEQ ID NO: 1543658 - RNA, 11 nt, Human adenovirus B [HAdV-B]
ucaugccugga

SEQ ID NO: 1543659 - RNA, 14 nt, Human adenovirus B [HAdV-B]
ccaccacaccacuc

SEQ ID NO: 1543660 - RNA, 17 nt, Human adenovirus B [HAdV-B]
acagcauuguggagaac

SEQ ID NO: 1543661 - RNA, 15 nt, Human adenovirus B [HAdV-B]
cuccucguccaaaug

SEQ ID NO: 1543662 - RNA, 14 nt, Human adenovirus B [HAdV-B]
gccuacugccaccu

SEQ ID NO: 1543663 - RNA, 15 nt, Human adenovirus B [HAdV-B]
auacugacgaaaaug

SEQ ID NO: 1543664 - RNA, 22 nt, Human adenovirus B [HAdV-B]
auuguguucuccuaggcagaga

SEQ ID NO: 1543665 - RNA, 14 nt, Human adenovirus B [HAdV-B]
ggacuacuccaccc

SEQ ID NO: 1543666 - RNA, 23 nt, Human adenovirus B [HAdV-B]
aaacaucccgcaggaccugcucg

SEQ ID NO: 1543667 - RNA, 23 nt, Human adenovirus B [HAdV-B]
cuagucucgcaacucugacuucu

SEQ ID NO: 1543668 - RNA, 16 nt, Human adenovirus B [HAdV-B]
ccuucuuacugcuuua

SEQ ID NO: 1543669 - RNA, 13 nt, Human adenovirus B [HAdV-B]
cgguccagcaagu

SEQ ID NO: 1543670 - RNA, 18 nt, Human adenovirus B [HAdV-B]
cacaucacuuccaugccu

SEQ ID NO: 1543671 - RNA, 13 nt, Human adenovirus B [HAdV-B]
gagugucacugcc

SEQ ID NO: 1543672 - RNA, 21 nt, Human adenovirus B [HAdV-B]
ugccuuucucccaagcagaca

SEQ ID NO: 1543673 - RNA, 22 nt, Human adenovirus B [HAdV-B]
auuuuggagagaguuugcugca

SEQ ID NO: 1543674 - RNA, 14 nt, Human adenovirus B [HAdV-B]
gaacaaaagaauac

SEQ ID NO: 1543675 - RNA, 15 nt, Human adenovirus B [HAdV-B]
ugcacucauccauga

SEQ ID NO: 1543676 - RNA, 20 nt, Human adenovirus B [HAdV-B]
acuacuguuuuccacuggac

SEQ ID NO: 1543677 - RNA, 16 nt, Human adenovirus B [HAdV-B]
ugggaugggugcauuc

SEQ ID NO: 1543678 - RNA, 20 nt, Human adenovirus B [HAdV-B]
aaucuuagguuacuggccag

SEQ ID NO: 1543679 - RNA, 17 nt, Human adenovirus B [HAdV-B]
uuuccaucacaagacaa

SEQ ID NO: 1543680 - RNA, 19 nt, Human adenovirus B [HAdV-B]
uggucagugaugagcagcu

SEQ ID NO: 1543681 - RNA, 14 nt, Human adenovirus B [HAdV-B]
auuacaaagacuuc

SEQ ID NO: 1543682 - RNA, 14 nt, Human adenovirus B [HAdV-B]
cggcgucccagcag

SEQ ID NO: 1543683 - RNA, 13 nt, Human adenovirus B [HAdV-B]
auggaaaucccac

SEQ ID NO: 1543684 - RNA, 18 nt, Human adenovirus B [HAdV-B]
agcucgccugugccauug

SEQ ID NO: 1543685 - RNA, 19 nt, Human adenovirus B [HAdV-B]
ugcaacaaaacaaaaccaa

SEQ ID NO: 1543686 - RNA, 15 nt, Human adenovirus B [HAdV-B]
cauccucgacaugag

SEQ ID NO: 1543687 - RNA, 16 nt, Human adenovirus B [HAdV-B]
cgaggcagucuaccug

SEQ ID NO: 1543688 - RNA, 12 nt, Human adenovirus B [HAdV-B]
caucuuccagca

SEQ ID NO: 1543689 - RNA, 23 nt, Human adenovirus B [HAdV-B]
agauugggguaugaauguuccuu

SEQ ID NO: 1543690 - RNA, 21 nt, Human adenovirus B [HAdV-B]
cuuaaagaguaggcagcgacc

SEQ ID NO: 1543691 - RNA, 18 nt, Human adenovirus B [HAdV-B]
cucauauuugucagcauu

SEQ ID NO: 1543692 - RNA, 13 nt, Human adenovirus B [HAdV-B]
augaucacaagca

SEQ ID NO: 1543693 - RNA, 14 nt, Human adenovirus B [HAdV-B]
uaugagccagagca

SEQ ID NO: 1543694 - RNA, 17 nt, Human adenovirus B [HAdV-B]
ucgacuccguagccugg

SEQ ID NO: 1543695 - RNA, 17 nt, Human adenovirus B [HAdV-B]
caccaagaugcuggaaa

SEQ ID NO: 1543696 - RNA, 17 nt, Human adenovirus B [HAdV-B]
uggcuccgaccaugcgc

SEQ ID NO: 1543697 - RNA, 19 nt, Human adenovirus B [HAdV-B]
gaccggcgaggaacucaac

SEQ ID NO: 1543698 - RNA, 15 nt, Human adenovirus B [HAdV-B]
aggagucaaccccac

SEQ ID NO: 1543699 - RNA, 11 nt, Human adenovirus B [HAdV-B]
cggaggaggac

SEQ ID NO: 1543700 - RNA, 17 nt, Human adenovirus B [HAdV-B]
ugccaucuuccagcaga

SEQ ID NO: 1543701 - RNA, 16 nt, Human adenovirus B [HAdV-B]
cucauggacaaacagu

SEQ ID NO: 1543702 - RNA, 13 nt, Human adenovirus B [HAdV-B]
uauuuuugcuucu

SEQ ID NO: 1543703 - RNA, 18 nt, Human adenovirus B [HAdV-B]
ugcaaaccucugcuacaa

SEQ ID NO: 1543704 - RNA, 23 nt, Human adenovirus B [HAdV-B]
gaaaaugccggccaauugccauu

SEQ ID NO: 1543705 - RNA, 18 nt, Human adenovirus B [HAdV-B]
aaauuuucucccagcagc

SEQ ID NO: 1543706 - RNA, 13 nt, Human adenovirus B [HAdV-B]
cgcuuccacccuu

SEQ ID NO: 1543707 - RNA, 19 nt, Human adenovirus B [HAdV-B]
aaguuugguggcaaaugau

SEQ ID NO: 1543708 - RNA, 17 nt, Human adenovirus B [HAdV-B]
accagacaaaguacagc

SEQ ID NO: 1543709 - RNA, 19 nt, Human adenovirus B [HAdV-B]
gcgggacgaggauuucgaa

SEQ ID NO: 1543710 - RNA, 16 nt, Human adenovirus B [HAdV-B]
ucguucaucauuuccc

SEQ ID NO: 1543711 - RNA, 23 nt, Human adenovirus B [HAdV-B]
uccuacauggguauucugcauga

SEQ ID NO: 1543712 - RNA, 21 nt, Human adenovirus B [HAdV-B]
acagagccuaccuccuuuccu

SEQ ID NO: 1543713 - RNA, 18 nt, Human adenovirus B [HAdV-B]
gauuaagggaaaugccag

SEQ ID NO: 1543714 - RNA, 19 nt, Human adenovirus B [HAdV-B]
gacaggaagacacuggcag

SEQ ID NO: 1543715 - RNA, 14 nt, Human adenovirus B [HAdV-B]
uacucacaaacuag

SEQ ID NO: 1543716 - RNA, 11 nt, Human adenovirus B [HAdV-B]
guaugaagauu

SEQ ID NO: 1543717 - RNA, 15 nt, Human adenovirus B [HAdV-B]
aacagccaacauagc

SEQ ID NO: 1543718 - RNA, 21 nt, Human adenovirus B [HAdV-B]
ugaugacaauauuaacaccuu

SEQ ID NO: 1543719 - RNA, 23 nt, Human adenovirus B [HAdV-B]
ggaccguucaauuuguggaggag

SEQ ID NO: 1543720 - RNA, 17 nt, Human adenovirus B [HAdV-B]
cuuaaacccgcacuggc

SEQ ID NO: 1543721 - RNA, 16 nt, Human adenovirus B [HAdV-B]
ccugucaucaugauua

SEQ ID NO: 1543722 - RNA, 23 nt, Human adenovirus B [HAdV-B]
caauggaugguuuacaaaaccau

SEQ ID NO: 1543723 - RNA, 12 nt, Human adenovirus B [HAdV-B]
guaugcaaacac

SEQ ID NO: 1543724 - RNA, 21 nt, Human adenovirus B [HAdV-B]
gcaacuccgacugcagcacug

SEQ ID NO: 1543725 - RNA, 20 nt, Human adenovirus B [HAdV-B]
ggacauaauuacacucucau

SEQ ID NO: 1543726 - RNA, 15 nt, Human adenovirus B [HAdV-B]
acguggcaaaccggc

SEQ ID NO: 1543727 - RNA, 14 nt, Human adenovirus B [HAdV-B]
uguauacugggugc

SEQ ID NO: 1543728 - RNA, 16 nt, Human adenovirus B [HAdV-B]
agauaacuaucaccaa

SEQ ID NO: 1543729 - RNA, 16 nt, Human adenovirus B [HAdV-B]
auaguuauguuccuga

SEQ ID NO: 1543730 - RNA, 15 nt, Human adenovirus B [HAdV-B]
acagugcaguacaag

SEQ ID NO: 1543731 - RNA, 14 nt, Human adenovirus B [HAdV-B]
cugcggaggaggag

SEQ ID NO: 1543732 - RNA, 18 nt, Human adenovirus B [HAdV-B]
cugcucgcucacaccuca

SEQ ID NO: 1543733 - RNA, 15 nt, Human adenovirus B [HAdV-B]
agugagaucggacag

SEQ ID NO: 1543734 - RNA, 18 nt, Human adenovirus B [HAdV-B]
cuucgagggucugggcaa

SEQ ID NO: 1543735 - RNA, 12 nt, Human adenovirus B [HAdV-B]
gugccaccacac

SEQ ID NO: 1543736 - RNA, 23 nt, Human adenovirus B [HAdV-B]
gcaagagcucugcuacgaagagc

SEQ ID NO: 1543737 - RNA, 22 nt, Human adenovirus B [HAdV-B]
auucccugcagaaaucuuccca

SEQ ID NO: 1543738 - RNA, 15 nt, Human adenovirus B [HAdV-B]
ccucugcacucaggu

SEQ ID NO: 1543739 - RNA, 17 nt, Human adenovirus B [HAdV-B]
gcggaguagcugacuug

SEQ ID NO: 1543740 - RNA, 15 nt, Human adenovirus B [HAdV-B]
auucuuaaacacacc

SEQ ID NO: 1543741 - RNA, 18 nt, Human adenovirus B [HAdV-B]
uuaagauucccacugaaa

SEQ ID NO: 1543742 - RNA, 18 nt, Human adenovirus B [HAdV-B]
aggacagucuggaggaag

SEQ ID NO: 1543743 - RNA, 18 nt, Human adenovirus B [HAdV-B]
gccaacuaucucuccuac

SEQ ID NO: 1543744 - RNA, 17 nt, Human adenovirus B [HAdV-B]
ccugcuuguaaccacuc

SEQ ID NO: 1543745 - RNA, 16 nt, Human adenovirus B [HAdV-B]
cacaacuuacacuaug

SEQ ID NO: 1543746 - RNA, 16 nt, Human adenovirus B [HAdV-B]
uuugcaguagguacaa

SEQ ID NO: 1543747 - RNA, 17 nt, Human adenovirus B [HAdV-B]
ggaagugaguccuauuu

SEQ ID NO: 1543748 - RNA, 15 nt, Human adenovirus B [HAdV-B]
cgcaguacuucaaau

SEQ ID NO: 1543749 - RNA, 15 nt, Human adenovirus B [HAdV-B]
acgguagcauaugca

SEQ ID NO: 1543750 - RNA, 20 nt, Human adenovirus B [HAdV-B]
ucacaggcucccuguuccca

SEQ ID NO: 1543751 - RNA, 20 nt, Human adenovirus B [HAdV-B]
ggcgagucgugcuaggcgga

SEQ ID NO: 1543752 - RNA, 13 nt, Human adenovirus B [HAdV-B]
aaccgaucucugc

SEQ ID NO: 1543753 - RNA, 13 nt, Human adenovirus B [HAdV-B]
guucuggaggagg

SEQ ID NO: 1543754 - RNA, 15 nt, Human adenovirus B [HAdV-B]
uccaguacucuucua

SEQ ID NO: 1543755 - RNA, 18 nt, Human adenovirus B [HAdV-B]
gaugucaccugcggagca

SEQ ID NO: 1543756 - RNA, 17 nt, Human adenovirus B [HAdV-B]
ucgcuacaaaaaguuuc

SEQ ID NO: 1543757 - RNA, 19 nt, Human adenovirus B [HAdV-B]
acccagaggaacacauucc

SEQ ID NO: 1543758 - RNA, 18 nt, Human adenovirus B [HAdV-B]
caagcuguguacucccag

SEQ ID NO: 1543759 - RNA, 23 nt, Human adenovirus B [HAdV-B]
ggauagcuuccggcaucaaugga

SEQ ID NO: 1543760 - RNA, 12 nt, Human adenovirus B [HAdV-B]
guuaauucaucu

SEQ ID NO: 1543761 - RNA, 13 nt, Human adenovirus B [HAdV-B]
caugggcauuuug

SEQ ID NO: 1543762 - RNA, 13 nt, Human adenovirus B [HAdV-B]
cuucuccaucagc

SEQ ID NO: 1543763 - RNA, 18 nt, Human adenovirus B [HAdV-B]
gguagucgguauggaagc

SEQ ID NO: 1543764 - RNA, 12 nt, Human adenovirus B [HAdV-B]
caacaaaacaaa

SEQ ID NO: 1543765 - RNA, 18 nt, Human adenovirus B [HAdV-B]
ugcaggugaggauuugca

SEQ ID NO: 1543766 - RNA, 13 nt, Human adenovirus B [HAdV-B]
ggagcgguggugu

SEQ ID NO: 1543767 - RNA, 21 nt, Human adenovirus B [HAdV-B]
cagaugucaccugcggagcag

SEQ ID NO: 1543768 - RNA, 16 nt, Human adenovirus B [HAdV-B]
uaagggggucuaccuu

SEQ ID NO: 1543769 - RNA, 14 nt, Human adenovirus B [HAdV-B]
caaagaaacucccu

SEQ ID NO: 1543770 - RNA, 12 nt, Human adenovirus B [HAdV-B]
ccaacagaaaac

SEQ ID NO: 1543771 - RNA, 18 nt, Human adenovirus B [HAdV-B]
caguacugguaacauggg

SEQ ID NO: 1543772 - RNA, 23 nt, Human adenovirus B [HAdV-B]
uggaggaggaaaacgaggaggca

SEQ ID NO: 1543773 - RNA, 14 nt, Human adenovirus B [HAdV-B]
caucuuccagcaga

SEQ ID NO: 1543774 - RNA, 20 nt, Human adenovirus B [HAdV-B]
gccuacccauggcgggcacc

SEQ ID NO: 1543775 - RNA, 14 nt, Human adenovirus B [HAdV-B]
gaugaaaugacagg

SEQ ID NO: 1543776 - RNA, 20 nt, Human adenovirus B [HAdV-B]
augacugaaacacucaccac

SEQ ID NO: 1543777 - RNA, 19 nt, Human adenovirus B [HAdV-B]
gcauccgccagcagcagga

SEQ ID NO: 1543778 - RNA, 14 nt, Human adenovirus B [HAdV-B]
cgccucccaggacu

SEQ ID NO: 1543779 - RNA, 15 nt, Human adenovirus B [HAdV-B]
ccgcaagacaccugc

SEQ ID NO: 1543780 - RNA, 18 nt, Human adenovirus B [HAdV-B]
uaccgucaccuccacagc

SEQ ID NO: 1543781 - RNA, 17 nt, Human adenovirus B [HAdV-B]
acccggcggcgucccag

SEQ ID NO: 1543782 - RNA, 12 nt, Human adenovirus B [HAdV-B]
cgucgcugcuuu

SEQ ID NO: 1543783 - RNA, 15 nt, Human adenovirus B [HAdV-B]
gcaggauauuuugaa

SEQ ID NO: 1543784 - RNA, 15 nt, Human adenovirus B [HAdV-B]
ugccaucgaucccac

SEQ ID NO: 1543785 - RNA, 15 nt, Human adenovirus B [HAdV-B]
agcgccggcaggucc

SEQ ID NO: 1543786 - RNA, 20 nt, Human adenovirus B [HAdV-B]
ccuggggacagguuagugua

SEQ ID NO: 1543787 - RNA, 19 nt, Human adenovirus B [HAdV-B]
caccucgcuuacgcacguc

SEQ ID NO: 1543788 - RNA, 20 nt, Human adenovirus B [HAdV-B]
ccugacgaacagauggauaa

SEQ ID NO: 1543789 - RNA, 23 nt, Human adenovirus B [HAdV-B]
cuugaaaguggguagacagaaug

SEQ ID NO: 1543790 - RNA, 15 nt, Human adenovirus B [HAdV-B]
cugacacuccugguc

SEQ ID NO: 1543791 - RNA, 16 nt, Human adenovirus B [HAdV-B]
aauuauggcgaucccg

SEQ ID NO: 1543792 - RNA, 18 nt, Human adenovirus B [HAdV-B]
ucccugcagaaaucuucc

SEQ ID NO: 1543793 - RNA, 22 nt, Human adenovirus B [HAdV-B]
auacuaacaugccaaacgugaa

SEQ ID NO: 1543794 - RNA, 18 nt, Human adenovirus B [HAdV-B]
gacucugacacuccuggu

SEQ ID NO: 1543795 - RNA, 17 nt, Human adenovirus B [HAdV-B]
ggcucagcgccgggccu

SEQ ID NO: 1543796 - RNA, 17 nt, Human adenovirus B [HAdV-B]
acgguaaaucugagcca

SEQ ID NO: 1543797 - RNA, 18 nt, Human adenovirus B [HAdV-B]
ucuuaaguuggucaaaag

SEQ ID NO: 1543798 - RNA, 20 nt, Human adenovirus B [HAdV-B]
caugaaaggaacuaguuguu

SEQ ID NO: 1543799 - RNA, 11 nt, Human adenovirus B [HAdV-B]
uuguugccauc

SEQ ID NO: 1543800 - RNA, 17 nt, Human adenovirus B [HAdV-B]
aaagugacauugguguu

SEQ ID NO: 1543801 - RNA, 16 nt, Human adenovirus B [HAdV-B]
ccuucgcggcuggcca

SEQ ID NO: 1543802 - RNA, 11 nt, Human adenovirus B [HAdV-B]
caagaggacaa

SEQ ID NO: 1543803 - RNA, 14 nt, Human adenovirus B [HAdV-B]
cuagucuugcuugu

SEQ ID NO: 1543804 - RNA, 15 nt, Human adenovirus B [HAdV-B]
caggcagcagcuccu

SEQ ID NO: 1543805 - RNA, 15 nt, Human adenovirus B [HAdV-B]
auuuucccuacuaau

SEQ ID NO: 1543806 - RNA, 24 nt, Human adenovirus B [HAdV-B]
cagucuuuccaucacaagacaagc

SEQ ID NO: 1543807 - RNA, 18 nt, Human adenovirus B [HAdV-B]
cuugaccacgguggugca

SEQ ID NO: 1543808 - RNA, 21 nt, Human adenovirus B [HAdV-B]
uuuaugccuuaccaguguaac

SEQ ID NO: 1543809 - RNA, 11 nt, Human adenovirus B [HAdV-B]
gaugcuggaaa

SEQ ID NO: 1543810 - RNA, 15 nt, Human adenovirus B [HAdV-B]
ucccagcagcaccuc

SEQ ID NO: 1543811 - RNA, 20 nt, Human adenovirus B [HAdV-B]
gaugucucacgcuugccagc

SEQ ID NO: 1543812 - RNA, 19 nt, Human adenovirus B [HAdV-B]
uugcuggagugucacugcc

SEQ ID NO: 1543813 - RNA, 14 nt, Human adenovirus B [HAdV-B]
ggugccaggugguc

SEQ ID NO: 1543814 - RNA, 18 nt, Human adenovirus B [HAdV-B]
gcaucucaugacaugcag

SEQ ID NO: 1543815 - RNA, 14 nt, Human adenovirus B [HAdV-B]
cuuggaagagguuc

SEQ ID NO: 1543816 - RNA, 16 nt, Human adenovirus B [HAdV-B]
guuucugaugcaagag

SEQ ID NO: 1543817 - RNA, 19 nt, Human adenovirus B [HAdV-B]
ccagaagauauggaggaag

SEQ ID NO: 1543818 - RNA, 19 nt, Human adenovirus B [HAdV-B]
aucacaaucuggcaacagc

SEQ ID NO: 1543819 - RNA, 23 nt, Human adenovirus B [HAdV-B]
uacccuguggugggugcagagcu

SEQ ID NO: 1543820 - RNA, 21 nt, Human adenovirus B [HAdV-B]
cggcgcugcagagccagccgu

SEQ ID NO: 1543821 - RNA, 18 nt, Human adenovirus B [HAdV-B]
ggagacggcuugcuggag

SEQ ID NO: 1543822 - RNA, 18 nt, Human adenovirus B [HAdV-B]
agccgcuuucgcagcggc

SEQ ID NO: 1543823 - RNA, 20 nt, Human adenovirus B [HAdV-B]
uauggaagcaguaacuuuug

SEQ ID NO: 1543824 - RNA, 20 nt, Human adenovirus B [HAdV-B]
cagcacggugggaucugcaa

SEQ ID NO: 1543825 - RNA, 12 nt, Human adenovirus B [HAdV-B]
uauggccagcac

SEQ ID NO: 1543826 - RNA, 18 nt, Human adenovirus B [HAdV-B]
aggggcguuaagagggag

SEQ ID NO: 1543827 - RNA, 22 nt, Human adenovirus B [HAdV-B]
cguuguccguucucgcuggcca

SEQ ID NO: 1543828 - RNA, 20 nt, Human adenovirus B [HAdV-B]
aaaaaauacaauggacucug

SEQ ID NO: 1543829 - RNA, 20 nt, Human adenovirus B [HAdV-B]
ugggagggggacuuacagug

SEQ ID NO: 1543830 - RNA, 19 nt, Human adenovirus B [HAdV-B]
caucucccaccacacccga

SEQ ID NO: 1543831 - RNA, 18 nt, Human adenovirus B [HAdV-B]
uuuagcgaucuucucaau

SEQ ID NO: 1543832 - RNA, 17 nt, Human adenovirus B [HAdV-B]
cagguagaacugcugcu

SEQ ID NO: 1543833 - RNA, 15 nt, Human adenovirus B [HAdV-B]
cgugaugcagcagca

SEQ ID NO: 1543834 - RNA, 18 nt, Human adenovirus B [HAdV-B]
guuugggccauuuuggaa

SEQ ID NO: 1543835 - RNA, 15 nt, Human adenovirus B [HAdV-B]
gacauggcuucucuu

SEQ ID NO: 1543836 - RNA, 23 nt, Human adenovirus B [HAdV-B]
uaaguuuaggggagaugguuaua

SEQ ID NO: 1543837 - RNA, 18 nt, Human adenovirus B [HAdV-B]
acccuaugucgucacagg

SEQ ID NO: 1543838 - RNA, 16 nt, Human adenovirus B [HAdV-B]
acuaccgucaccucca

SEQ ID NO: 1543839 - RNA, 22 nt, Human adenovirus B [HAdV-B]
aucccgccaaacccaacacaca

SEQ ID NO: 1543840 - RNA, 18 nt, Human adenovirus B [HAdV-B]
ccugauauagcuuccuug

SEQ ID NO: 1543841 - RNA, 13 nt, Human adenovirus B [HAdV-B]
ccuccgccagaaa

SEQ ID NO: 1543842 - RNA, 21 nt, Human adenovirus B [HAdV-B]
cacacauuacaaacagguccc

SEQ ID NO: 1543843 - RNA, 14 nt, Human adenovirus B [HAdV-B]
ugucuuucuuccca

SEQ ID NO: 1543844 - RNA, 14 nt, Human adenovirus B [HAdV-B]
ucacaaucuggcaa

SEQ ID NO: 1543845 - RNA, 13 nt, Human adenovirus B [HAdV-B]
ucaauaaacauca

SEQ ID NO: 1543846 - RNA, 18 nt, Human adenovirus B [HAdV-B]
auuauacuccuacugcgc

SEQ ID NO: 1543847 - RNA, 19 nt, Human adenovirus B [HAdV-B]
gcaauauugccgccaagau

SEQ ID NO: 1543848 - RNA, 15 nt, Human adenovirus B [HAdV-B]
acagacauggcuucu

SEQ ID NO: 1543849 - RNA, 15 nt, Human adenovirus B [HAdV-B]
acuuuaugagccaga

SEQ ID NO: 1543850 - RNA, 19 nt, Human adenovirus B [HAdV-B]
aguugagcgccucggcugc

SEQ ID NO: 1543851 - RNA, 15 nt, Human adenovirus B [HAdV-B]
uaaaacuggagcacu

SEQ ID NO: 1543852 - RNA, 18 nt, Human adenovirus B [HAdV-B]
gcaaagccuacugccacc

SEQ ID NO: 1543853 - RNA, 11 nt, Human adenovirus B [HAdV-B]
uaucuggagcg

SEQ ID NO: 1543854 - RNA, 18 nt, Human adenovirus B [HAdV-B]
gcuauggagucacugcua

SEQ ID NO: 1543855 - RNA, 14 nt, Human adenovirus B [HAdV-B]
gccccaauggccac

SEQ ID NO: 1543856 - RNA, 17 nt, Human adenovirus B [HAdV-B]
ccugcaacgaauuuucu

SEQ ID NO: 1543857 - RNA, 14 nt, Human adenovirus B [HAdV-B]
ucacugguuuuuau

SEQ ID NO: 1543858 - RNA, 20 nt, Human adenovirus B [HAdV-B]
acccuguggugggugcagag

SEQ ID NO: 1543859 - RNA, 15 nt, Human adenovirus B [HAdV-B]
uccagaugaggccgg

SEQ ID NO: 1543860 - RNA, 15 nt, Human adenovirus B [HAdV-B]
caguagccacagcaa

SEQ ID NO: 1543861 - RNA, 20 nt, Human adenovirus B [HAdV-B]
accagacugaaaaccaaaga

SEQ ID NO: 1543862 - RNA, 21 nt, Human adenovirus B [HAdV-B]
gagcccagcauguaugccagu

SEQ ID NO: 1543863 - RNA, 16 nt, Human adenovirus B [HAdV-B]
cauggaaacucagcca

SEQ ID NO: 1543864 - RNA, 20 nt, Human adenovirus B [HAdV-B]
auuuuacaggccucuucucc

SEQ ID NO: 1543865 - RNA, 20 nt, Human adenovirus B [HAdV-B]
ugcuacagcugcugcagaag

SEQ ID NO: 1543866 - RNA, 13 nt, Human adenovirus B [HAdV-B]
caggcaaaacaaa

SEQ ID NO: 1543867 - RNA, 17 nt, Human adenovirus B [HAdV-B]
uuucuuuucccacaguu

SEQ ID NO: 1543868 - RNA, 22 nt, Human adenovirus B [HAdV-B]
caauggacucugacacuccugg

SEQ ID NO: 1543869 - RNA, 15 nt, Human adenovirus B [HAdV-B]
cauaucagccagaac

SEQ ID NO: 1543870 - RNA, 20 nt, Human adenovirus B [HAdV-B]
augaguggaacuuuaggaag

SEQ ID NO: 1543871 - RNA, 21 nt, Human adenovirus B [HAdV-B]
cuccuaaaggcgcuccaaaua

SEQ ID NO: 1543872 - RNA, 13 nt, Human adenovirus B [HAdV-B]
ucauagccacagc

SEQ ID NO: 1543873 - RNA, 13 nt, Human adenovirus B [HAdV-B]
acggauucugggg

SEQ ID NO: 1543874 - RNA, 17 nt, Human adenovirus B [HAdV-B]
gggcggucagcuaaaga

SEQ ID NO: 1543875 - RNA, 20 nt, Human adenovirus B [HAdV-B]
ugccaaacguggcaaaccgg

SEQ ID NO: 1543876 - RNA, 19 nt, Human adenovirus B [HAdV-B]
cacacccgacgaaaaaaac

SEQ ID NO: 1543877 - RNA, 17 nt, Human adenovirus B [HAdV-B]
guucucgcuggccacau

SEQ ID NO: 1543878 - RNA, 20 nt, Human adenovirus B [HAdV-B]
acuuuaggaaggaugugaac

SEQ ID NO: 1543879 - RNA, 13 nt, Human adenovirus B [HAdV-B]
aguucaaguacaa

SEQ ID NO: 1543880 - RNA, 12 nt, Human adenovirus B [HAdV-B]
caaaucuggaag

SEQ ID NO: 1543881 - RNA, 21 nt, Human adenovirus B [HAdV-B]
gaccgcgcuuauucaaaaaag

SEQ ID NO: 1543882 - RNA, 14 nt, Human adenovirus B [HAdV-B]
gcaaaacaaugacu

SEQ ID NO: 1543883 - RNA, 19 nt, Human adenovirus B [HAdV-B]
uacagccaacgagccagcg

SEQ ID NO: 1543884 - RNA, 18 nt, Human adenovirus B [HAdV-B]
gacaaaaaagaagaggaa

SEQ ID NO: 1543885 - RNA, 14 nt, Human adenovirus B [HAdV-B]
acccacgaugugac

SEQ ID NO: 1543886 - RNA, 13 nt, Human adenovirus B [HAdV-B]
agaaccugacccc

SEQ ID NO: 1543887 - RNA, 14 nt, Human adenovirus B [HAdV-B]
gacgagaaaacaag

SEQ ID NO: 1543888 - RNA, 15 nt, Human adenovirus B [HAdV-B]
caggaucacagagac

SEQ ID NO: 1543889 - RNA, 21 nt, Human adenovirus B [HAdV-B]
ucuuagguuacuggccagugc

SEQ ID NO: 1543890 - RNA, 19 nt, Human adenovirus B [HAdV-B]
uguauaggagcauuugcuu

SEQ ID NO: 1543891 - RNA, 22 nt, Human adenovirus B [HAdV-B]
cagcgcgaaauauggagcccag

SEQ ID NO: 1543892 - RNA, 15 nt, Human adenovirus B [HAdV-B]
cacauuccaccagcc

SEQ ID NO: 1543893 - RNA, 22 nt, Human adenovirus B [HAdV-B]
uugugcggcaggcaugcaagau

SEQ ID NO: 1543894 - RNA, 22 nt, Human adenovirus B [HAdV-B]
gcagucucgacagauaaagaca

SEQ ID NO: 1543895 - RNA, 20 nt, Human adenovirus B [HAdV-B]
aaaaauuucccaaacaaugg

SEQ ID NO: 1543896 - RNA, 16 nt, Human adenovirus B [HAdV-B]
ccguucucgcuggcca

SEQ ID NO: 1543897 - RNA, 16 nt, Human adenovirus B [HAdV-B]
caccccguccaauguc

SEQ ID NO: 1543898 - RNA, 12 nt, Human adenovirus B [HAdV-B]
guguuggacaga

SEQ ID NO: 1543899 - RNA, 19 nt, Human adenovirus B [HAdV-B]
ucgacagauaaagacagcg

SEQ ID NO: 1543900 - RNA, 19 nt, Human adenovirus B [HAdV-B]
augcaguuauugacagugu

SEQ ID NO: 1543901 - RNA, 21 nt, Human adenovirus B [HAdV-B]
cuuccaaggaugagacagugu

SEQ ID NO: 1543902 - RNA, 21 nt, Human adenovirus B [HAdV-B]
ccagccuguacuucuccauca

SEQ ID NO: 1543903 - RNA, 21 nt, Human adenovirus B [HAdV-B]
gcauagcuuccguggcgguuc

SEQ ID NO: 1543904 - RNA, 18 nt, Human adenovirus B [HAdV-B]
cugcccgccaccugcugc

SEQ ID NO: 1543905 - RNA, 19 nt, Human adenovirus B [HAdV-B]
gaagcaacgaagcuuggaa

SEQ ID NO: 1543906 - RNA, 20 nt, Human adenovirus B [HAdV-B]
aagcaaggguccgccacugc

SEQ ID NO: 1543907 - RNA, 19 nt, Human adenovirus B [HAdV-B]
guacaugggcaccuggagc

SEQ ID NO: 1543908 - RNA, 16 nt, Human adenovirus B [HAdV-B]
cgggcaugaccucugc

SEQ ID NO: 1543909 - RNA, 16 nt, Human adenovirus B [HAdV-B]
uccagucuccugccgc

SEQ ID NO: 1543910 - RNA, 15 nt, Human adenovirus B [HAdV-B]
ucgcgauccuuccag

SEQ ID NO: 1543911 - RNA, 20 nt, Human adenovirus B [HAdV-B]
ggaaaacgaggaggcagagg

SEQ ID NO: 1543912 - RNA, 15 nt, Human adenovirus B [HAdV-B]
agugcuuugagacug

SEQ ID NO: 1543913 - RNA, 20 nt, Human adenovirus B [HAdV-B]
ggcauggguguauggcagca

SEQ ID NO: 1543914 - RNA, 20 nt, Human adenovirus B [HAdV-B]
cguagacugauuuuacaggc

SEQ ID NO: 1543915 - RNA, 22 nt, Human adenovirus B [HAdV-B]
caaagaucuaccgccagugcug

SEQ ID NO: 1543916 - RNA, 17 nt, Human adenovirus B [HAdV-B]
gacagcccgccuaugau

SEQ ID NO: 1543917 - RNA, 23 nt, Human adenovirus B [HAdV-B]
cacaagguucccucaggaugucc

SEQ ID NO: 1543918 - RNA, 21 nt, Human adenovirus B [HAdV-B]
cgcaugaauuggcucagcgcc

SEQ ID NO: 1543919 - RNA, 13 nt, Human adenovirus B [HAdV-B]
cuaaauacacaua

SEQ ID NO: 1543920 - RNA, 19 nt, Human adenovirus B [HAdV-B]
caucuauuauuccuacucc

SEQ ID NO: 1543921 - RNA, 21 nt, Human adenovirus B [HAdV-B]
gaaacccagauaauaggcacc

SEQ ID NO: 1543922 - RNA, 16 nt, Human adenovirus B [HAdV-B]
uaccgcggcugagccc

SEQ ID NO: 1543923 - RNA, 21 nt, Human adenovirus B [HAdV-B]
acgcuggagaggucagaggag

SEQ ID NO: 1543924 - RNA, 19 nt, Human adenovirus B [HAdV-B]
agaaaaaaauuucccaaac

SEQ ID NO: 1543925 - RNA, 14 nt, Human adenovirus B [HAdV-B]
cugcaaucugugca

SEQ ID NO: 1543926 - RNA, 12 nt, Human adenovirus B [HAdV-B]
ugcagaaaucuu

SEQ ID NO: 1543927 - RNA, 20 nt, Human adenovirus B [HAdV-B]
ucuucaaccgcuuuccugag

SEQ ID NO: 1543928 - RNA, 15 nt, Human adenovirus B [HAdV-B]
ucaccaaggccaugg

SEQ ID NO: 1543929 - RNA, 15 nt, Human adenovirus B [HAdV-B]
accggcucugggcau

SEQ ID NO: 1543930 - RNA, 16 nt, Human adenovirus B [HAdV-B]
cagcaaccccaggcca

SEQ ID NO: 1543931 - RNA, 14 nt, Human adenovirus B [HAdV-B]
cugauuacuucuuu

SEQ ID NO: 1543932 - RNA, 18 nt, Human adenovirus B [HAdV-B]
gccgcuaugaacucugau

SEQ ID NO: 1543933 - RNA, 14 nt, Human adenovirus B [HAdV-B]
ugccaaaaaaacau

SEQ ID NO: 1543934 - RNA, 16 nt, Human adenovirus B [HAdV-B]
uccagcgcugccaggg

SEQ ID NO: 1543935 - RNA, 22 nt, Human adenovirus B [HAdV-B]
gauauucuugagcaggcggcug

SEQ ID NO: 1543936 - RNA, 18 nt, Human adenovirus B [HAdV-B]
gcuaccaucuccgcuccg

SEQ ID NO: 1543937 - RNA, 24 nt, Human adenovirus B [HAdV-B]
auuucuaucgaaggcaaaauagac

SEQ ID NO: 1543938 - RNA, 22 nt, Human adenovirus B [HAdV-B]
cauaggacccccaaucacuuca

SEQ ID NO: 1543939 - RNA, 15 nt, Human adenovirus B [HAdV-B]
cucccccagccaugc

SEQ ID NO: 1543940 - RNA, 15 nt, Human adenovirus B [HAdV-B]
gaacagcaagaggac

SEQ ID NO: 1543941 - RNA, 14 nt, Human adenovirus B [HAdV-B]
auuguguuucaagc

SEQ ID NO: 1543942 - RNA, 13 nt, Human adenovirus B [HAdV-B]
auggacaggaguc

SEQ ID NO: 1543943 - RNA, 16 nt, Human adenovirus B [HAdV-B]
ccucugggaugcaaau

SEQ ID NO: 1543944 - RNA, 14 nt, Human adenovirus B [HAdV-B]
cggcgcugcagagc

SEQ ID NO: 1543945 - RNA, 13 nt, Human adenovirus B [HAdV-B]
agcagcagcaauc

SEQ ID NO: 1543946 - RNA, 12 nt, Human adenovirus B [HAdV-B]
cagagcugccgc

SEQ ID NO: 1543947 - RNA, 19 nt, Human adenovirus B [HAdV-B]
agaaugagccuaacaggaa

SEQ ID NO: 1543948 - RNA, 22 nt, Human adenovirus B [HAdV-B]
cucaacacaagguucccucagg

SEQ ID NO: 1543949 - RNA, 20 nt, Human adenovirus B [HAdV-B]
cuaccuguuccgucuggcca

SEQ ID NO: 1543950 - RNA, 15 nt, Human adenovirus B [HAdV-B]
cucgcagcagcagca

SEQ ID NO: 1543951 - RNA, 20 nt, Human adenovirus B [HAdV-B]
guuaccuacuaaaccuguau

SEQ ID NO: 1543952 - RNA, 19 nt, Human adenovirus B [HAdV-B]
caaggucgcagugcauggu

SEQ ID NO: 1543953 - RNA, 16 nt, Human adenovirus B [HAdV-B]
gaugaaaugacaggga

SEQ ID NO: 1543954 - RNA, 22 nt, Human adenovirus B [HAdV-B]
gcuucucugaacuaucagaaug

SEQ ID NO: 1543955 - RNA, 18 nt, Human adenovirus B [HAdV-B]
ggccaccucguucaucau

SEQ ID NO: 1543956 - RNA, 19 nt, Human adenovirus B [HAdV-B]
gcaugauggauauguggcc

SEQ ID NO: 1543957 - RNA, 16 nt, Human adenovirus B [HAdV-B]
cguuauccagccugua

SEQ ID NO: 1543958 - RNA, 15 nt, Human adenovirus B [HAdV-B]
cccuaguguaccagg

SEQ ID NO: 1543959 - RNA, 12 nt, Human adenovirus B [HAdV-B]
aaggaugugaac

SEQ ID NO: 1543960 - RNA, 21 nt, Human adenovirus B [HAdV-B]
uacaagcgcagaccuccccaa

SEQ ID NO: 1543961 - RNA, 19 nt, Human adenovirus B [HAdV-B]
ggaaaacggauucugggga

SEQ ID NO: 1543962 - RNA, 16 nt, Human adenovirus B [HAdV-B]
uguaucgcaaugacag

SEQ ID NO: 1543963 - RNA, 23 nt, Human adenovirus B [HAdV-B]
ugcccuacucaaucugggaccug

SEQ ID NO: 1543964 - RNA, 14 nt, Human adenovirus B [HAdV-B]
caggucaggagccg

SEQ ID NO: 1543965 - RNA, 22 nt, Human adenovirus B [HAdV-B]
gcuggaaccgagggugagaauu

SEQ ID NO: 1543966 - RNA, 13 nt, Human adenovirus B [HAdV-B]
uggauaaaucagu

SEQ ID NO: 1543967 - RNA, 12 nt, Human adenovirus B [HAdV-B]
ggaggcagagga

SEQ ID NO: 1543968 - RNA, 17 nt, Human adenovirus B [HAdV-B]
gagcgugaugcagcagc

SEQ ID NO: 1543969 - RNA, 14 nt, Human adenovirus B [HAdV-B]
cucguccucagcga

SEQ ID NO: 1543970 - RNA, 20 nt, Human adenovirus B [HAdV-B]
ccucguuuacguacugguga

SEQ ID NO: 1543971 - RNA, 14 nt, Human adenovirus B [HAdV-B]
gaucuccuacuaag

SEQ ID NO: 1543972 - RNA, 18 nt, Human adenovirus B [HAdV-B]
gaucgcgguggggcgguc

SEQ ID NO: 1543973 - RNA, 21 nt, Human adenovirus B [HAdV-B]
aaaaagcacagcuagaucaaa

SEQ ID NO: 1543974 - RNA, 21 nt, Human adenovirus B [HAdV-B]
gaaccacacugccaacaccgc

SEQ ID NO: 1543975 - RNA, 18 nt, Human adenovirus B [HAdV-B]
cagauaaagacagcggcg

SEQ ID NO: 1543976 - RNA, 17 nt, Human adenovirus B [HAdV-B]
ucacaucucguccucag

SEQ ID NO: 1543977 - RNA, 21 nt, Human adenovirus B [HAdV-B]
aacucagcucaugcucuggac

SEQ ID NO: 1543978 - RNA, 22 nt, Human adenovirus B [HAdV-B]
auaaaucagucuuuccaucaca

SEQ ID NO: 1543979 - RNA, 20 nt, Human adenovirus B [HAdV-B]
ucaccagggaaaaguacagu

SEQ ID NO: 1543980 - RNA, 20 nt, Human adenovirus B [HAdV-B]
cagggggcaauucuggccca

SEQ ID NO: 1543981 - RNA, 16 nt, Human adenovirus B [HAdV-B]
guacaaacuguagaca

SEQ ID NO: 1543982 - RNA, 13 nt, Human adenovirus B [HAdV-B]
gucgcuacaaaaa

SEQ ID NO: 1543983 - RNA, 19 nt, Human adenovirus B [HAdV-B]
uuccucgagacgcccaggc

SEQ ID NO: 1543984 - RNA, 12 nt, Human adenovirus B [HAdV-B]
cuacuccugguu

SEQ ID NO: 1543985 - RNA, 20 nt, Human adenovirus B [HAdV-B]
ggaacaaagcuuggaacagc

SEQ ID NO: 1543986 - RNA, 19 nt, Human adenovirus B [HAdV-B]
uauuuugccucccccuucc

SEQ ID NO: 1543987 - RNA, 13 nt, Human adenovirus B [HAdV-B]
acgugaccugggg

SEQ ID NO: 1543988 - RNA, 19 nt, Human adenovirus B [HAdV-B]
gaaugccaucaucuccugc

SEQ ID NO: 1543989 - RNA, 13 nt, Human adenovirus B [HAdV-B]
ugggccauuuugg

SEQ ID NO: 1543990 - RNA, 16 nt, Human adenovirus B [HAdV-B]
auugccacagcuggca

SEQ ID NO: 1543991 - RNA, 15 nt, Human adenovirus B [HAdV-B]
cugccuggcugcgga

SEQ ID NO: 1543992 - RNA, 20 nt, Human adenovirus B [HAdV-B]
agagcucugacuggagcugg

SEQ ID NO: 1543993 - RNA, 15 nt, Human adenovirus B [HAdV-B]
ccucccaacaccccu

SEQ ID NO: 1543994 - RNA, 18 nt, Human adenovirus B [HAdV-B]
ugacucuccaaccucucc

SEQ ID NO: 1543995 - RNA, 13 nt, Human adenovirus B [HAdV-B]
ggcacgagccaac

SEQ ID NO: 1543996 - RNA, 12 nt, Human adenovirus B [HAdV-B]
ucagaacaccga

SEQ ID NO: 1543997 - RNA, 12 nt, Human adenovirus B [HAdV-B]
gcaggcagcagc

SEQ ID NO: 1543998 - RNA, 21 nt, Human adenovirus B [HAdV-B]
ggcaucucgauccagcagacc

SEQ ID NO: 1543999 - RNA, 18 nt, Human adenovirus B [HAdV-B]
uggaacacgaggaagagu

SEQ ID NO: 1544000 - RNA, 15 nt, Human adenovirus B [HAdV-B]
guguugcucaggcau

SEQ ID NO: 1544001 - RNA, 21 nt, Human adenovirus B [HAdV-B]
uccuaccacucggaugugauc

SEQ ID NO: 1544002 - RNA, 13 nt, Human adenovirus B [HAdV-B]
uaaacaacagcac

SEQ ID NO: 1544003 - RNA, 18 nt, Human adenovirus B [HAdV-B]
uuugccauccuucucaac

SEQ ID NO: 1544004 - RNA, 18 nt, Human adenovirus B [HAdV-B]
agcagcagaggaaaaaag

SEQ ID NO: 1544005 - RNA, 18 nt, Human adenovirus B [HAdV-B]
ccagaacuuccaacaaaa

SEQ ID NO: 1544006 - RNA, 17 nt, Human adenovirus B [HAdV-B]
gacaguaaaggaagagc

SEQ ID NO: 1544007 - RNA, 17 nt, Human adenovirus B [HAdV-B]
ccuacggaagccagcac

SEQ ID NO: 1544008 - RNA, 14 nt, Human adenovirus B [HAdV-B]
aaccagcagcggca

SEQ ID NO: 1544009 - RNA, 15 nt, Human adenovirus B [HAdV-B]
cugcaaucugugcac

SEQ ID NO: 1544010 - RNA, 14 nt, Human adenovirus B [HAdV-B]
cugucucaacccca

SEQ ID NO: 1544011 - RNA, 17 nt, Human adenovirus B [HAdV-B]
aagucuacccguuucuu

SEQ ID NO: 1544012 - RNA, 22 nt, Human adenovirus B [HAdV-B]
gcagagucggggucaagagcag

SEQ ID NO: 1544013 - RNA, 19 nt, Human adenovirus B [HAdV-B]
gcauccaccggucaugcca

SEQ ID NO: 1544014 - RNA, 23 nt, Human adenovirus B [HAdV-B]
agagucaauugucucugaagaaa

SEQ ID NO: 1544015 - RNA, 20 nt, Human adenovirus B [HAdV-B]
aaauggcuucacacaaagcc

SEQ ID NO: 1544016 - RNA, 15 nt, Human adenovirus B [HAdV-B]
ucaggaucacagaga

SEQ ID NO: 1544017 - RNA, 18 nt, Human adenovirus B [HAdV-B]
cuuacuugaaaucagcaa

SEQ ID NO: 1544018 - RNA, 19 nt, Human adenovirus B [HAdV-B]
uaauggaauaguguuuaug

SEQ ID NO: 1544019 - RNA, 21 nt, Human adenovirus B [HAdV-B]
cagagcgugggauuguuucug

SEQ ID NO: 1544020 - RNA, 15 nt, Human adenovirus B [HAdV-B]
ugcaggugguaguuu

SEQ ID NO: 1544021 - RNA, 19 nt, Human adenovirus B [HAdV-B]
aagcaugauuuuaauagcc

SEQ ID NO: 1544022 - RNA, 19 nt, Human adenovirus B [HAdV-B]
uccagcuuuugcugugcca

SEQ ID NO: 1544023 - RNA, 17 nt, Human adenovirus B [HAdV-B]
uugaauucgggaaucac

SEQ ID NO: 1544024 - RNA, 15 nt, Human adenovirus B [HAdV-B]
ccugcugcgcacugc

SEQ ID NO: 1544025 - RNA, 18 nt, Human adenovirus B [HAdV-B]
cucacgcuugccagcacg

SEQ ID NO: 1544026 - RNA, 19 nt, Human adenovirus B [HAdV-B]
ccagaacuuccaacaaaaa

SEQ ID NO: 1544027 - RNA, 17 nt, Human adenovirus B [HAdV-B]
cagguuaucgcaccuga

SEQ ID NO: 1544028 - RNA, 22 nt, Human adenovirus B [HAdV-B]
accgaaaaguauggaggcaggg

SEQ ID NO: 1544029 - RNA, 17 nt, Human adenovirus B [HAdV-B]
uccacauuccaaacagu

SEQ ID NO: 1544030 - RNA, 22 nt, Human adenovirus B [HAdV-B]
cauccauggagguuugggccau

SEQ ID NO: 1544031 - RNA, 16 nt, Human adenovirus B [HAdV-B]
cucccccagccaugca

SEQ ID NO: 1544032 - RNA, 20 nt, Human adenovirus B [HAdV-B]
ucucugaccaugacuuugag

SEQ ID NO: 1544033 - RNA, 19 nt, Human adenovirus B [HAdV-B]
ucccgcugucaaccugccc

SEQ ID NO: 1544034 - RNA, 15 nt, Human adenovirus B [HAdV-B]
caggacagaaacaca

SEQ ID NO: 1544035 - RNA, 17 nt, Human adenovirus B [HAdV-B]
cccaauuggcuccagca

SEQ ID NO: 1544036 - RNA, 13 nt, Human adenovirus B [HAdV-B]
ccagaaaacaaaa

SEQ ID NO: 1544037 - RNA, 18 nt, Human adenovirus B [HAdV-B]
uucuucgcugucuugacu

SEQ ID NO: 1544038 - RNA, 16 nt, Human adenovirus B [HAdV-B]
cccaaugcaacaugac

SEQ ID NO: 1544039 - RNA, 20 nt, Human adenovirus B [HAdV-B]
caucuuuuuuaaaaaucaaa

SEQ ID NO: 1544040 - RNA, 15 nt, Human adenovirus B [HAdV-B]
gcgaaggugaagauu

SEQ ID NO: 1544041 - RNA, 20 nt, Human adenovirus B [HAdV-B]
cagcacuggacaugacagcg

SEQ ID NO: 1544042 - RNA, 13 nt, Human adenovirus B [HAdV-B]
agcggugguguau

SEQ ID NO: 1544043 - RNA, 12 nt, Human adenovirus B [HAdV-B]
ggagucacugcu

SEQ ID NO: 1544044 - RNA, 17 nt, Human adenovirus B [HAdV-B]
ucccgcaggaccugcuc

SEQ ID NO: 1544045 - RNA, 12 nt, Human adenovirus B [HAdV-B]
guccuuccaggg

SEQ ID NO: 1544046 - RNA, 18 nt, Human adenovirus B [HAdV-B]
gaauuuucucccagcggc

SEQ ID NO: 1544047 - RNA, 12 nt, Human adenovirus B [HAdV-B]
aggauuugcaug

SEQ ID NO: 1544048 - RNA, 13 nt, Human adenovirus B [HAdV-B]
uguucccagaguu

SEQ ID NO: 1544049 - RNA, 20 nt, Human adenovirus B [HAdV-B]
aauccacacauuacaaacag

SEQ ID NO: 1544050 - RNA, 13 nt, Human adenovirus B [HAdV-B]
gcaaaaacaagau

SEQ ID NO: 1544051 - RNA, 18 nt, Human adenovirus B [HAdV-B]
aggguugcauucacugcu

SEQ ID NO: 1544052 - RNA, 16 nt, Human adenovirus B [HAdV-B]
uguuuggucuuccuug

SEQ ID NO: 1544053 - RNA, 15 nt, Human adenovirus B [HAdV-B]
cguguugcucaggca

SEQ ID NO: 1544054 - RNA, 14 nt, Human adenovirus B [HAdV-B]
cucaaaaacacacu

SEQ ID NO: 1544055 - RNA, 15 nt, Human adenovirus B [HAdV-B]
cugcuccuucugaau

SEQ ID NO: 1544056 - RNA, 17 nt, Human adenovirus B [HAdV-B]
acauugcuucucugaac

SEQ ID NO: 1544057 - RNA, 15 nt, Human adenovirus B [HAdV-B]
auuuuuaacuccuca

SEQ ID NO: 1544058 - RNA, 23 nt, Human adenovirus B [HAdV-B]
gaucugcaaucaugcccacaucc

SEQ ID NO: 1544059 - RNA, 17 nt, Human adenovirus B [HAdV-B]
cuggcagaccucaucuu

SEQ ID NO: 1544060 - RNA, 17 nt, Human adenovirus B [HAdV-B]
ugcuacagcugcugcag

SEQ ID NO: 1544061 - RNA, 17 nt, Human adenovirus B [HAdV-B]
ugugauggcgcuagcag

SEQ ID NO: 1544062 - RNA, 15 nt, Human adenovirus B [HAdV-B]
gaguacuuggaagac

SEQ ID NO: 1544063 - RNA, 17 nt, Human adenovirus B [HAdV-B]
cauugcuuauugcuugu

SEQ ID NO: 1544064 - RNA, 13 nt, Human adenovirus B [HAdV-B]
aggaggacagucu

SEQ ID NO: 1544065 - RNA, 13 nt, Human adenovirus B [HAdV-B]
uaucauugagaac

SEQ ID NO: 1544066 - RNA, 22 nt, Human adenovirus B [HAdV-B]
cacaacgugguaacugggcucu

SEQ ID NO: 1544067 - RNA, 20 nt, Human adenovirus B [HAdV-B]
gccauucucgagcugccagu

SEQ ID NO: 1544068 - RNA, 14 nt, Human adenovirus B [HAdV-B]
uccugaaaccauuu

SEQ ID NO: 1544069 - RNA, 12 nt, Human adenovirus B [HAdV-B]
gaucaccugggc

SEQ ID NO: 1544070 - RNA, 22 nt, Human adenovirus B [HAdV-B]
aggaggaaaacgaggaggcaga

SEQ ID NO: 1544071 - RNA, 18 nt, Human adenovirus B [HAdV-B]
aaaauaaaaaaaaaaaca

SEQ ID NO: 1544072 - RNA, 13 nt, Human adenovirus B [HAdV-B]
uuaagagggagag

SEQ ID NO: 1544073 - RNA, 18 nt, Human adenovirus B [HAdV-B]
acugcccuccgacuuugu

SEQ ID NO: 1544074 - RNA, 22 nt, Human adenovirus B [HAdV-B]
gaaaccuugcgcaaacucgaag

SEQ ID NO: 1544075 - RNA, 18 nt, Human adenovirus B [HAdV-B]
gggcaacuccgacugcag

SEQ ID NO: 1544076 - RNA, 15 nt, Human adenovirus B [HAdV-B]
cucagguugucaguu

SEQ ID NO: 1544077 - RNA, 21 nt, Human adenovirus B [HAdV-B]
cccauggaugagcccacccug

SEQ ID NO: 1544078 - RNA, 18 nt, Human adenovirus B [HAdV-B]
gauuucauagccacagca

SEQ ID NO: 1544079 - RNA, 16 nt, Human adenovirus B [HAdV-B]
aagcauacaauccaga

SEQ ID NO: 1544080 - RNA, 15 nt, Human adenovirus B [HAdV-B]
gugacgcugccaccg

SEQ ID NO: 1544081 - RNA, 11 nt, Human adenovirus B [HAdV-B]
caccaaugcca

SEQ ID NO: 1544082 - RNA, 14 nt, Human adenovirus B [HAdV-B]
augauaacagaugu

SEQ ID NO: 1544083 - RNA, 17 nt, Human adenovirus B [HAdV-B]
ccauucuuaaacacacc

SEQ ID NO: 1544084 - RNA, 16 nt, Human adenovirus B [HAdV-B]
aggaccagugcuuuga

SEQ ID NO: 1544085 - RNA, 19 nt, Human adenovirus B [HAdV-B]
uaagugcuuugagacugau

SEQ ID NO: 1544086 - RNA, 19 nt, Human adenovirus B [HAdV-B]
uucuggcccaauugcaagc

SEQ ID NO: 1544087 - RNA, 17 nt, Human adenovirus B [HAdV-B]
caauguugccgcugccu

SEQ ID NO: 1544088 - RNA, 12 nt, Human adenovirus B [HAdV-B]
ggaauuggaagg

SEQ ID NO: 1544089 - RNA, 19 nt, Human adenovirus B [HAdV-B]
cuaucagaaugaccacagc

SEQ ID NO: 1544090 - RNA, 15 nt, Human adenovirus B [HAdV-B]
caguuuggaagccac

SEQ ID NO: 1544091 - RNA, 20 nt, Human adenovirus B [HAdV-B]
gaccucaucuucccagagcg

SEQ ID NO: 1544092 - RNA, 21 nt, Human adenovirus B [HAdV-B]
cagcggcggcgaccuccaaca

SEQ ID NO: 1544093 - RNA, 11 nt, Human adenovirus B [HAdV-B]
auaaaagaaaa

SEQ ID NO: 1544094 - RNA, 14 nt, Human adenovirus B [HAdV-B]
ccaguccugccacc

SEQ ID NO: 1544095 - RNA, 18 nt, Human adenovirus B [HAdV-B]
acaccgcucccccagcca

SEQ ID NO: 1544096 - RNA, 17 nt, Human adenovirus B [HAdV-B]
cuggagugucacugccg

SEQ ID NO: 1544097 - RNA, 15 nt, Human adenovirus B [HAdV-B]
cacguggcugcagcc

SEQ ID NO: 1544098 - RNA, 16 nt, Human adenovirus B [HAdV-B]
caguggauugcagaag

SEQ ID NO: 1544099 - RNA, 14 nt, Human adenovirus B [HAdV-B]
cgcucacaccucac

SEQ ID NO: 1544100 - RNA, 20 nt, Human adenovirus B [HAdV-B]
ucuccaaccucuccacaaua

SEQ ID NO: 1544101 - RNA, 17 nt, Human adenovirus B [HAdV-B]
uuaagcauuccaccgcc

SEQ ID NO: 1544102 - RNA, 23 nt, Human adenovirus B [HAdV-B]
ccagcuguuucugguggugcaac

SEQ ID NO: 1544103 - RNA, 13 nt, Human adenovirus B [HAdV-B]
auuaaaaaaugau

SEQ ID NO: 1544104 - RNA, 22 nt, Human adenovirus B [HAdV-B]
gcaggggacgcuacagugcagu

SEQ ID NO: 1544105 - RNA, 12 nt, Human adenovirus B [HAdV-B]
gacccaggccau

SEQ ID NO: 1544106 - RNA, 18 nt, Human adenovirus B [HAdV-B]
agagucucugacaaagug

SEQ ID NO: 1544107 - RNA, 18 nt, Human adenovirus B [HAdV-B]
ggccgagaagguggcugc

SEQ ID NO: 1544108 - RNA, 16 nt, Human adenovirus B [HAdV-B]
acaagagcgaagauca

SEQ ID NO: 1544109 - RNA, 14 nt, Human adenovirus B [HAdV-B]
cagcagcaccucac

SEQ ID NO: 1544110 - RNA, 15 nt, Human adenovirus B [HAdV-B]
uguacguagcagcga

SEQ ID NO: 1544111 - RNA, 23 nt, Human adenovirus B [HAdV-B]
augugagcggagacggcuugcug

SEQ ID NO: 1544112 - RNA, 18 nt, Human adenovirus B [HAdV-B]
ucuccaaccucuccacaa

SEQ ID NO: 1544113 - RNA, 12 nt, Human adenovirus B [HAdV-B]
acgaggaggcag

SEQ ID NO: 1544114 - RNA, 15 nt, Human adenovirus B [HAdV-B]
caaaggugucucuga

SEQ ID NO: 1544115 - RNA, 18 nt, Human adenovirus B [HAdV-B]
ggagccgaaaucuugaaa

SEQ ID NO: 1544116 - RNA, 21 nt, Human adenovirus B [HAdV-B]
gcaccgucgcuuccgaccugg

SEQ ID NO: 1544117 - RNA, 20 nt, Human adenovirus B [HAdV-B]
gguuaccguagaacuagagu

SEQ ID NO: 1544118 - RNA, 14 nt, Human adenovirus B [HAdV-B]
augacagaaugcau

SEQ ID NO: 1544119 - RNA, 21 nt, Human adenovirus B [HAdV-B]
auacaaagccucaucagccau

SEQ ID NO: 1544120 - RNA, 19 nt, Human adenovirus B [HAdV-B]
cauccaccggucaugccag

SEQ ID NO: 1544121 - RNA, 17 nt, Human adenovirus B [HAdV-B]
acagggaacugaugcac

SEQ ID NO: 1544122 - RNA, 13 nt, Human adenovirus B [HAdV-B]
ccaacuaucucuc

SEQ ID NO: 1544123 - RNA, 21 nt, Human adenovirus B [HAdV-B]
ccgcaaugcgggcggcgcugc

SEQ ID NO: 1544124 - RNA, 18 nt, Human adenovirus B [HAdV-B]
cacacuucugccccagcg

SEQ ID NO: 1544125 - RNA, 21 nt, Human adenovirus B [HAdV-B]
gucaccagggaaaaguacagu

SEQ ID NO: 1544126 - RNA, 15 nt, Human adenovirus B [HAdV-B]
cagcugcugcagaag

SEQ ID NO: 1544127 - RNA, 15 nt, Human adenovirus B [HAdV-B]
cucaaugcuucuuuu

SEQ ID NO: 1544128 - RNA, 18 nt, Human adenovirus B [HAdV-B]
gugccagguggucucugg

SEQ ID NO: 1544129 - RNA, 16 nt, Human adenovirus B [HAdV-B]
uggaagagcucagccg

SEQ ID NO: 1544130 - RNA, 17 nt, Human adenovirus B [HAdV-B]
auccucggcugcggaga

SEQ ID NO: 1544131 - RNA, 20 nt, Human adenovirus B [HAdV-B]
gaaucagaaugacccgcagg

SEQ ID NO: 1544132 - RNA, 18 nt, Human adenovirus B [HAdV-B]
cacugguuaccgaggaag

SEQ ID NO: 1544133 - RNA, 18 nt, Human adenovirus B [HAdV-B]
cuacuauagccagcaaau

SEQ ID NO: 1544134 - RNA, 21 nt, Human adenovirus B [HAdV-B]
gacaaugaggcuuucagagag

SEQ ID NO: 1544135 - RNA, 20 nt, Human adenovirus B [HAdV-B]
gccaucaucuccugcuugca

SEQ ID NO: 1544136 - RNA, 19 nt, Human adenovirus B [HAdV-B]
aucauauugcuugaaagcc

SEQ ID NO: 1544137 - RNA, 14 nt, Human adenovirus B [HAdV-B]
ggaggugaagauag

SEQ ID NO: 1544138 - RNA, 22 nt, Human adenovirus B [HAdV-B]
cguuuggacccgccgccagcaa

SEQ ID NO: 1544139 - RNA, 21 nt, Human adenovirus B [HAdV-B]
caccagguuguaucuggugga

SEQ ID NO: 1544140 - RNA, 15 nt, Human adenovirus B [HAdV-B]
auaccuguguagaug

SEQ ID NO: 1544141 - RNA, 22 nt, Human adenovirus B [HAdV-B]
gaagcuucuugcuucuugcaaa

SEQ ID NO: 1544142 - RNA, 16 nt, Human adenovirus B [HAdV-B]
ccgcaggcaagcagcc

SEQ ID NO: 1544143 - RNA, 14 nt, Human adenovirus B [HAdV-B]
uuucuaacuccuca

SEQ ID NO: 1544144 - RNA, 15 nt, Human adenovirus B [HAdV-B]
caccccgcacaacua

SEQ ID NO: 1544145 - RNA, 16 nt, Human adenovirus B [HAdV-B]
guccugccagggcaca

SEQ ID NO: 1544146 - RNA, 14 nt, Human adenovirus B [HAdV-B]
gacugaaaaccaaa

SEQ ID NO: 1544147 - RNA, 20 nt, Human adenovirus B [HAdV-B]
cucauauuugucagcauugu

SEQ ID NO: 1544148 - RNA, 15 nt, Human adenovirus B [HAdV-B]
guaucgcgaagccau

SEQ ID NO: 1544149 - RNA, 18 nt, Human adenovirus B [HAdV-B]
uuacacacaauaacaaaa

SEQ ID NO: 1544150 - RNA, 17 nt, Human adenovirus B [HAdV-B]
cauaguuauguuccuga

SEQ ID NO: 1544151 - RNA, 20 nt, Human adenovirus B [HAdV-B]
cacuguauuacuuccucgag

SEQ ID NO: 1544152 - RNA, 15 nt, Human adenovirus B [HAdV-B]
caaaacaacgagcag

SEQ ID NO: 1544153 - RNA, 15 nt, Human adenovirus B [HAdV-B]
gcgggacagcccgcc

SEQ ID NO: 1544154 - RNA, 14 nt, Human adenovirus B [HAdV-B]
ugggggugcuggcu

SEQ ID NO: 1544155 - RNA, 21 nt, Human adenovirus B [HAdV-B]
acagcuuucuggucagcugca

SEQ ID NO: 1544156 - RNA, 18 nt, Human adenovirus B [HAdV-B]
uuaccccuacggaagcca

SEQ ID NO: 1544157 - RNA, 21 nt, Human adenovirus B [HAdV-B]
uccuuaaacaucuagcaagac

SEQ ID NO: 1544158 - RNA, 14 nt, Human adenovirus B [HAdV-B]
uggcagaacacacu

SEQ ID NO: 1544159 - RNA, 18 nt, Human adenovirus B [HAdV-B]
cccagaagauauggagga

SEQ ID NO: 1544160 - RNA, 12 nt, Human adenovirus B [HAdV-B]
guagaggaaugu

SEQ ID NO: 1544161 - RNA, 18 nt, Human adenovirus B [HAdV-B]
auggcgaugaugggcugg

SEQ ID NO: 1544162 - RNA, 13 nt, Human adenovirus B [HAdV-B]
augaggcuuucag

SEQ ID NO: 1544163 - RNA, 17 nt, Human adenovirus B [HAdV-B]
auguguacugaguuuaa

SEQ ID NO: 1544164 - RNA, 20 nt, Human adenovirus B [HAdV-B]
acuuggaagacugauggcac

SEQ ID NO: 1544165 - RNA, 19 nt, Human adenovirus B [HAdV-B]
ggcagaccucaucuuccca

SEQ ID NO: 1544166 - RNA, 19 nt, Human adenovirus B [HAdV-B]
agcucuuaauuugggccau

SEQ ID NO: 1544167 - RNA, 17 nt, Human adenovirus B [HAdV-B]
uuucccaagcuuucagu

SEQ ID NO: 1544168 - RNA, 15 nt, Human adenovirus B [HAdV-B]
aaucuaaugauugca

SEQ ID NO: 1544169 - RNA, 15 nt, Human adenovirus B [HAdV-B]
acaaugucaacccau

SEQ ID NO: 1544170 - RNA, 13 nt, Human adenovirus B [HAdV-B]
gguaggagaaaga

SEQ ID NO: 1544171 - RNA, 19 nt, Human adenovirus B [HAdV-B]
ccugcgagccaaauccucg

SEQ ID NO: 1544172 - RNA, 18 nt, Human adenovirus B [HAdV-B]
ccacuagacaagucagua

SEQ ID NO: 1544173 - RNA, 19 nt, Human adenovirus B [HAdV-B]
cagccccccucgcagcagc

SEQ ID NO: 1544174 - RNA, 15 nt, Human adenovirus B [HAdV-B]
ccuuguguccuccaa

SEQ ID NO: 1544175 - RNA, 20 nt, Human adenovirus B [HAdV-B]
gaggccuuaucaaaugcuca

SEQ ID NO: 1544176 - RNA, 22 nt, Human adenovirus B [HAdV-B]
caacaaccguggucauuucuug

SEQ ID NO: 1544177 - RNA, 20 nt, Human adenovirus B [HAdV-B]
gauuacuuugauauaaucug

SEQ ID NO: 1544178 - RNA, 19 nt, Human adenovirus B [HAdV-B]
gaugcagcagcagcaggcg

SEQ ID NO: 1544179 - RNA, 21 nt, Human adenovirus B [HAdV-B]
aucaacgugacagcaaaugac

SEQ ID NO: 1544180 - RNA, 21 nt, Human adenovirus B [HAdV-B]
aacgagcagauaacuaucacc

SEQ ID NO: 1544181 - RNA, 16 nt, Human adenovirus B [HAdV-B]
cugccaccuccacuga

SEQ ID NO: 1544182 - RNA, 16 nt, Human adenovirus B [HAdV-B]
guuagcgccagcagga

SEQ ID NO: 1544183 - RNA, 19 nt, Human adenovirus B [HAdV-B]
ggacccuccaguggaggag

SEQ ID NO: 1544184 - RNA, 16 nt, Human adenovirus B [HAdV-B]
gacggcggugaugcaa

SEQ ID NO: 1544185 - RNA, 16 nt, Human adenovirus B [HAdV-B]
ccaugagcaggcaggu

SEQ ID NO: 1544186 - RNA, 16 nt, Human adenovirus B [HAdV-B]
gcaaucgcagugcagg

SEQ ID NO: 1544187 - RNA, 22 nt, Human adenovirus B [HAdV-B]
cugagcuaucucggcugcgaca

SEQ ID NO: 1544188 - RNA, 16 nt, Human adenovirus B [HAdV-B]
agucgaggaacccggc

SEQ ID NO: 1544189 - RNA, 19 nt, Human adenovirus B [HAdV-B]
aagccauagggcaaaguca

SEQ ID NO: 1544190 - RNA, 19 nt, Human adenovirus B [HAdV-B]
caccagggaaaaguacagu

SEQ ID NO: 1544191 - RNA, 18 nt, Human adenovirus B [HAdV-B]
uagauugcccaggacuuu

SEQ ID NO: 1544192 - RNA, 11 nt, Human adenovirus B [HAdV-B]
cagaggcuggu

SEQ ID NO: 1544193 - RNA, 19 nt, Human adenovirus B [HAdV-B]
cagcagcaggcgacggcgg

SEQ ID NO: 1544194 - RNA, 22 nt, Human adenovirus B [HAdV-B]
caguagaugggacgagaccgga

SEQ ID NO: 1544195 - RNA, 21 nt, Human adenovirus B [HAdV-B]
uguauaggagcauuugcuucc

SEQ ID NO: 1544196 - RNA, 20 nt, Human adenovirus B [HAdV-B]
auuaaaugacguucccucaa

SEQ ID NO: 1544197 - RNA, 14 nt, Human adenovirus B [HAdV-B]
cagaggaacacauu

SEQ ID NO: 1544198 - RNA, 13 nt, Human adenovirus B [HAdV-B]
gucucaaccccag

SEQ ID NO: 1544199 - RNA, 20 nt, Human adenovirus B [HAdV-B]
cacgagugccaucacaucuc

SEQ ID NO: 1544200 - RNA, 14 nt, Human adenovirus B [HAdV-B]
gagaaaaagaaaac

SEQ ID NO: 1544201 - RNA, 19 nt, Human adenovirus B [HAdV-B]
aaacuuuuauccagcuuuu

SEQ ID NO: 1544202 - RNA, 18 nt, Human adenovirus B [HAdV-B]
aagccaaaauagaagcug

SEQ ID NO: 1544203 - RNA, 23 nt, Human adenovirus B [HAdV-B]
ucauccauggagguuugggccau

SEQ ID NO: 1544204 - RNA, 17 nt, Human adenovirus B [HAdV-B]
ugauuauucuuugcuac

SEQ ID NO: 1544205 - RNA, 21 nt, Human adenovirus B [HAdV-B]
agacgcgcuccuuaaacaucu

SEQ ID NO: 1544206 - RNA, 20 nt, Human adenovirus B [HAdV-B]
gucggggucaagagcaggaa

SEQ ID NO: 1544207 - RNA, 23 nt, Human adenovirus B [HAdV-B]
cuugcgcaaguuugcuccggaag

SEQ ID NO: 1544208 - RNA, 20 nt, Human adenovirus B [HAdV-B]
caguggcagccuagucgcag

SEQ ID NO: 1544209 - RNA, 22 nt, Human adenovirus B [HAdV-B]
aaaaugccggccaauugccauu

SEQ ID NO: 1544210 - RNA, 20 nt, Human adenovirus B [HAdV-B]
aaacgaggaggcagaggagg

SEQ ID NO: 1544211 - RNA, 15 nt, Human adenovirus B [HAdV-B]
gcaguaucuggagcg

SEQ ID NO: 1544212 - RNA, 17 nt, Human adenovirus B [HAdV-B]
gauccauggaugcccau

SEQ ID NO: 1544213 - RNA, 17 nt, Human adenovirus B [HAdV-B]
caugccaaacgugaacg

SEQ ID NO: 1544214 - RNA, 14 nt, Human adenovirus B [HAdV-B]
aaauugucauguau

SEQ ID NO: 1544215 - RNA, 12 nt, Human adenovirus B [HAdV-B]
auaaaacaggac

SEQ ID NO: 1544216 - RNA, 21 nt, Human adenovirus B [HAdV-B]
accugcugcuucucccaggcu

SEQ ID NO: 1544217 - RNA, 23 nt, Human adenovirus B [HAdV-B]
auacugggugcgugacgcugcca

SEQ ID NO: 1544218 - RNA, 23 nt, Human adenovirus B [HAdV-B]
uuagacagcaaccccaggccaac

SEQ ID NO: 1544219 - RNA, 20 nt, Human adenovirus B [HAdV-B]
aguacuggcuaccuaucaca

SEQ ID NO: 1544220 - RNA, 14 nt, Human adenovirus B [HAdV-B]
gguagaacugcugc

SEQ ID NO: 1544221 - RNA, 12 nt, Human adenovirus B [HAdV-B]
ccgcaagagcuc

SEQ ID NO: 1544222 - RNA, 11 nt, Human adenovirus B [HAdV-B]
gccggacagga

SEQ ID NO: 1544223 - RNA, 13 nt, Human adenovirus B [HAdV-B]
auggcgcuagcag

SEQ ID NO: 1544224 - RNA, 14 nt, Human adenovirus B [HAdV-B]
gggauguaguuucu

SEQ ID NO: 1544225 - RNA, 21 nt, Human adenovirus B [HAdV-B]
aggaggauuaaagauuacagc

SEQ ID NO: 1544226 - RNA, 20 nt, Human adenovirus B [HAdV-B]
gcccccucccccugcugcua

SEQ ID NO: 1544227 - RNA, 16 nt, Human adenovirus B [HAdV-B]
ugcccgccaccugcug

SEQ ID NO: 1544228 - RNA, 16 nt, Human adenovirus B [HAdV-B]
ucuagcaagacagucg

SEQ ID NO: 1544229 - RNA, 19 nt, Human adenovirus B [HAdV-B]
cucuuucuucuucgcuguc

SEQ ID NO: 1544230 - RNA, 23 nt, Human adenovirus B [HAdV-B]
ccauaaccuacuacgccugcugc

SEQ ID NO: 1544231 - RNA, 22 nt, Human adenovirus B [HAdV-B]
gcacugggcauagucgcaccgc

SEQ ID NO: 1544232 - RNA, 20 nt, Human adenovirus B [HAdV-B]
agcugccuauaguacuccac

SEQ ID NO: 1544233 - RNA, 17 nt, Human adenovirus B [HAdV-B]
cauuaacuuugaugaac

SEQ ID NO: 1544234 - RNA, 17 nt, Human adenovirus B [HAdV-B]
cacugccaacaccgcuc

SEQ ID NO: 1544235 - RNA, 20 nt, Human adenovirus B [HAdV-B]
aaugagucgcagacguccug

SEQ ID NO: 1544236 - RNA, 15 nt, Human adenovirus B [HAdV-B]
ccucucaccuaccgc

SEQ ID NO: 1544237 - RNA, 23 nt, Human adenovirus B [HAdV-B]
acgaggaaaaggagcagagcuua

SEQ ID NO: 1544238 - RNA, 15 nt, Human adenovirus B [HAdV-B]
cuuaaucccagaaau

SEQ ID NO: 1544239 - RNA, 19 nt, Human adenovirus B [HAdV-B]
aggaugucacuccacagcu

SEQ ID NO: 1544240 - RNA, 18 nt, Human adenovirus B [HAdV-B]
aauaaaaaaaaaaacaag

SEQ ID NO: 1544241 - RNA, 18 nt, Human adenovirus B [HAdV-B]
cgaagcuaauuugggaca

SEQ ID NO: 1544242 - RNA, 23 nt, Human adenovirus B [HAdV-B]
uccaguggaggaggcggaguagc

SEQ ID NO: 1544243 - RNA, 12 nt, Human adenovirus B [HAdV-B]
gugcugcacagc

SEQ ID NO: 1544244 - RNA, 11 nt, Human adenovirus B [HAdV-B]
uuuccagaagc

SEQ ID NO: 1544245 - RNA, 21 nt, Human adenovirus B [HAdV-B]
ccacccuaugucgucacaggc

SEQ ID NO: 1544246 - RNA, 14 nt, Human adenovirus B [HAdV-B]
gaagacacuggcag

SEQ ID NO: 1544247 - RNA, 18 nt, Human adenovirus B [HAdV-B]
gagcccgagucugcaagu

SEQ ID NO: 1544248 - RNA, 23 nt, Human adenovirus B [HAdV-B]
uggcuuaccagacaaaguacagc

SEQ ID NO: 1544249 - RNA, 17 nt, Human adenovirus B [HAdV-B]
caaacugcuuagccaga

SEQ ID NO: 1544250 - RNA, 21 nt, Human adenovirus B [HAdV-B]
ccgacuuugugccucucaccu

SEQ ID NO: 1544251 - RNA, 23 nt, Human adenovirus B [HAdV-B]
aagucagucgcgcuuugggacag

SEQ ID NO: 1544252 - RNA, 18 nt, Human adenovirus B [HAdV-B]
agugccaucacaucucgu

SEQ ID NO: 1544253 - RNA, 24 nt, Human adenovirus B [HAdV-B]
aaugacggauuucugugggacgac

SEQ ID NO: 1544254 - RNA, 13 nt, Human adenovirus B [HAdV-B]
gaagggguucauu

SEQ ID NO: 1544255 - RNA, 22 nt, Human adenovirus B [HAdV-B]
cucugcguucgcucaccagaag

SEQ ID NO: 1544256 - RNA, 18 nt, Human adenovirus B [HAdV-B]
cgguacaccggauugcag

SEQ ID NO: 1544257 - RNA, 21 nt, Human adenovirus B [HAdV-B]
aacacaacaacucuggcuuug

SEQ ID NO: 1544258 - RNA, 23 nt, Human adenovirus B [HAdV-B]
cucaccauuaccaacugacuguc

SEQ ID NO: 1544259 - RNA, 17 nt, Human adenovirus B [HAdV-B]
cagcagcuccgccaguc

SEQ ID NO: 1544260 - RNA, 18 nt, Human adenovirus B [HAdV-B]
gcccaguccugccaccac

SEQ ID NO: 1544261 - RNA, 22 nt, Human adenovirus B [HAdV-B]
aaggacuuacauucaauucaaa

SEQ ID NO: 1544262 - RNA, 14 nt, Human adenovirus B [HAdV-B]
ccgcacuggcugcc

SEQ ID NO: 1544263 - RNA, 16 nt, Human adenovirus B [HAdV-B]
uuuuaggauaaaacag

SEQ ID NO: 1544264 - RNA, 15 nt, Human adenovirus B [HAdV-B]
gguccgaccuggaag

SEQ ID NO: 1544265 - RNA, 20 nt, Human adenovirus B [HAdV-B]
agaaguaggcugauugccac

SEQ ID NO: 1544266 - RNA, 15 nt, Human adenovirus B [HAdV-B]
cauggaaacucagcc

SEQ ID NO: 1544267 - RNA, 17 nt, Human adenovirus B [HAdV-B]
acuuuaaagaaaaaguu

SEQ ID NO: 1544268 - RNA, 17 nt, Human adenovirus B [HAdV-B]
uacuuucucuagcagca

SEQ ID NO: 1544269 - RNA, 18 nt, Human adenovirus B [HAdV-B]
cguagaggaauguuuaug

SEQ ID NO: 1544270 - RNA, 11 nt, Human adenovirus B [HAdV-B]
aaccugcugcu

SEQ ID NO: 1544271 - RNA, 18 nt, Human adenovirus B [HAdV-B]
guugaucaccugggcagc

SEQ ID NO: 1544272 - RNA, 19 nt, Human adenovirus B [HAdV-B]
uguuuggucuuccuuggcu

SEQ ID NO: 1544273 - RNA, 23 nt, Human adenovirus B [HAdV-B]
uuuugcugguuuccgaauggcag

SEQ ID NO: 1544274 - RNA, 12 nt, Human adenovirus B [HAdV-B]
ugcaacccccag

SEQ ID NO: 1544275 - RNA, 13 nt, Human adenovirus B [HAdV-B]
agaauacaccaau

SEQ ID NO: 1544276 - RNA, 19 nt, Human adenovirus B [HAdV-B]
aacuaucucuccuaccacu

SEQ ID NO: 1544277 - RNA, 21 nt, Human adenovirus B [HAdV-B]
caugagcaaacaguauucucu

SEQ ID NO: 1544278 - RNA, 20 nt, Human adenovirus B [HAdV-B]
guucagcggcauacuuucuc

SEQ ID NO: 1544279 - RNA, 19 nt, Human adenovirus B [HAdV-B]
caugcauacuaacaugcca

SEQ ID NO: 1544280 - RNA, 14 nt, Human adenovirus B [HAdV-B]
caagagcaggggac

SEQ ID NO: 1544281 - RNA, 16 nt, Human adenovirus B [HAdV-B]
gacccgccgccagcaa

SEQ ID NO: 1544282 - RNA, 16 nt, Human adenovirus B [HAdV-B]
agaagguccuggccau

SEQ ID NO: 1544283 - RNA, 17 nt, Human adenovirus B [HAdV-B]
guggauuuuuuccagga

SEQ ID NO: 1544284 - RNA, 13 nt, Human adenovirus B [HAdV-B]
cugcuugcaugag

SEQ ID NO: 1544285 - RNA, 19 nt, Human adenovirus B [HAdV-B]
cgaugggucuucuccuggg

SEQ ID NO: 1544286 - RNA, 19 nt, Human adenovirus B [HAdV-B]
gaucauggaaaucccaccc

SEQ ID NO: 1544287 - RNA, 22 nt, Human adenovirus B [HAdV-B]
auacuagucuugcuuguuuuac

SEQ ID NO: 1544288 - RNA, 20 nt, Human adenovirus B [HAdV-B]
uccaaugucacucuuccaga

SEQ ID NO: 1544289 - RNA, 14 nt, Human adenovirus B [HAdV-B]
gagagagaggauga

SEQ ID NO: 1544290 - RNA, 18 nt, Human adenovirus B [HAdV-B]
cuuucucccaagcagaca

SEQ ID NO: 1544291 - RNA, 13 nt, Human adenovirus B [HAdV-B]
ugaaggugcagcc

SEQ ID NO: 1544292 - RNA, 13 nt, Human adenovirus B [HAdV-B]
auucccggaagua

SEQ ID NO: 1544293 - RNA, 16 nt, Human adenovirus B [HAdV-B]
ugaagaaaugcauauu

SEQ ID NO: 1544294 - RNA, 22 nt, Human adenovirus B [HAdV-B]
uguucccagaguuggaagucua

SEQ ID NO: 1544295 - RNA, 23 nt, Human adenovirus B [HAdV-B]
acugcccuccgacuuugugccuc

SEQ ID NO: 1544296 - RNA, 23 nt, Human adenovirus B [HAdV-B]
gggcggcuuucagaggcugguca

SEQ ID NO: 1544297 - RNA, 15 nt, Human adenovirus B [HAdV-B]
agcaaaguuuacagc

SEQ ID NO: 1544298 - RNA, 23 nt, Human adenovirus B [HAdV-B]
gauuggcggcaggcgccucccag

SEQ ID NO: 1544299 - RNA, 17 nt, Human adenovirus B [HAdV-B]
cuagaucgugggccaug

SEQ ID NO: 1544300 - RNA, 20 nt, Human adenovirus B [HAdV-B]
ucugcacucagguugucagu

SEQ ID NO: 1544301 - RNA, 15 nt, Human adenovirus B [HAdV-B]
agcuguguacuccca

SEQ ID NO: 1544302 - RNA, 12 nt, Human adenovirus B [HAdV-B]
gugcgggggcaa

SEQ ID NO: 1544303 - RNA, 16 nt, Human adenovirus B [HAdV-B]
ugcaggagcggagccu

SEQ ID NO: 1544304 - RNA, 17 nt, Human adenovirus B [HAdV-B]
cagugcaggcagcagcu

SEQ ID NO: 1544305 - RNA, 13 nt, Human adenovirus B [HAdV-B]
agcagcagcaggc

SEQ ID NO: 1544306 - RNA, 21 nt, Human adenovirus B [HAdV-B]
gccagggcacacguggcugca

SEQ ID NO: 1544307 - RNA, 13 nt, Human adenovirus B [HAdV-B]
cacauacaagugc

SEQ ID NO: 1544308 - RNA, 14 nt, Human adenovirus B [HAdV-B]
cagucuggaggaag

SEQ ID NO: 1544309 - RNA, 18 nt, Human adenovirus B [HAdV-B]
guuuugagcuugggaaaa

SEQ ID NO: 1544310 - RNA, 14 nt, Human adenovirus B [HAdV-B]
uauucuuugcuacc

SEQ ID NO: 1544311 - RNA, 12 nt, Human adenovirus B [HAdV-B]
cccgcaggcagu

SEQ ID NO: 1544312 - RNA, 18 nt, Human adenovirus B [HAdV-B]
cuccaagauuuuccaugc

SEQ ID NO: 1544313 - RNA, 16 nt, Human adenovirus B [HAdV-B]
cugcuacgaagagcua

SEQ ID NO: 1544314 - RNA, 17 nt, Human adenovirus B [HAdV-B]
auauaaucugcaacaaa

SEQ ID NO: 1544315 - RNA, 16 nt, Human adenovirus B [HAdV-B]
gacggcggucauggac

SEQ ID NO: 1544316 - RNA, 21 nt, Human adenovirus B [HAdV-B]
gaucaguaucaucuuggccug

SEQ ID NO: 1544317 - RNA, 23 nt, Human adenovirus B [HAdV-B]
uggcacucccgucucgacccagc

SEQ ID NO: 1544318 - RNA, 21 nt, Human adenovirus B [HAdV-B]
aaacuccagacacucauguag

SEQ ID NO: 1544319 - RNA, 18 nt, Human adenovirus B [HAdV-B]
cguguuacccaguugaaa

SEQ ID NO: 1544320 - RNA, 15 nt, Human adenovirus B [HAdV-B]
auuaugugcauuuug

SEQ ID NO: 1544321 - RNA, 15 nt, Human adenovirus B [HAdV-B]
ugccaucaauuacuc

SEQ ID NO: 1544322 - RNA, 21 nt, Human adenovirus B [HAdV-B]
acaugcucuaccccauuccug

SEQ ID NO: 1544323 - RNA, 13 nt, Human adenovirus B [HAdV-B]
cuccuuuccuaga

SEQ ID NO: 1544324 - RNA, 21 nt, Human adenovirus B [HAdV-B]
auauuaucaccaaacugcuua

SEQ ID NO: 1544325 - RNA, 20 nt, Human adenovirus B [HAdV-B]
uccacacugguggccaccuc

SEQ ID NO: 1544326 - RNA, 14 nt, Human adenovirus B [HAdV-B]
ccaacgacgagaaa

SEQ ID NO: 1544327 - RNA, 20 nt, Human adenovirus B [HAdV-B]
agcauguggaaucaggcugu

SEQ ID NO: 1544328 - RNA, 14 nt, Human adenovirus B [HAdV-B]
cgagacgcccaggc

SEQ ID NO: 1544329 - RNA, 15 nt, Human adenovirus B [HAdV-B]
cacgguggugcaaaa

SEQ ID NO: 1544330 - RNA, 17 nt, Human adenovirus B [HAdV-B]
uggcaguuuggaagcca

SEQ ID NO: 1544331 - RNA, 18 nt, Human adenovirus B [HAdV-B]
cugagacagacaucgagc

SEQ ID NO: 1544332 - RNA, 12 nt, Human adenovirus B [HAdV-B]
agaguuucauga

SEQ ID NO: 1544333 - RNA, 18 nt, Human adenovirus B [HAdV-B]
gaggagaugcgagcuucc

SEQ ID NO: 1544334 - RNA, 22 nt, Human adenovirus B [HAdV-B]
cuguuucugguggugcaacaca

SEQ ID NO: 1544335 - RNA, 18 nt, Human adenovirus B [HAdV-B]
ccuucaauuggagcagua

SEQ ID NO: 1544336 - RNA, 18 nt, Human adenovirus B [HAdV-B]
uucuuagagauggaagac

SEQ ID NO: 1544337 - RNA, 12 nt, Human adenovirus B [HAdV-B]
aaagcuccaagc

SEQ ID NO: 1544338 - RNA, 20 nt, Human adenovirus B [HAdV-B]
ggugcaacacagcagagaca

SEQ ID NO: 1544339 - RNA, 21 nt, Human adenovirus B [HAdV-B]
gcccaaucgcgaagaggcaau

SEQ ID NO: 1544340 - RNA, 22 nt, Human adenovirus B [HAdV-B]
ccuccccaauuggcuccagcaa

SEQ ID NO: 1544341 - RNA, 15 nt, Human adenovirus B [HAdV-B]
cgacguggacagcga

SEQ ID NO: 1544342 - RNA, 18 nt, Human adenovirus B [HAdV-B]
acaugaccaaagacuggu

SEQ ID NO: 1544343 - RNA, 11 nt, Human adenovirus B [HAdV-B]
caacuggugag

SEQ ID NO: 1544344 - RNA, 14 nt, Human adenovirus B [HAdV-B]
auugccugacuuua

SEQ ID NO: 1544345 - RNA, 17 nt, Human adenovirus B [HAdV-B]
agucuguugaugcccaa

SEQ ID NO: 1544346 - RNA, 15 nt, Human adenovirus B [HAdV-B]
ccacugaagugcaaa

SEQ ID NO: 1544347 - RNA, 16 nt, Human adenovirus B [HAdV-B]
caaaguaaaaggcaca

SEQ ID NO: 1544348 - RNA, 17 nt, Human adenovirus B [HAdV-B]
cacgagccaacugaacg

SEQ ID NO: 1544349 - RNA, 17 nt, Human adenovirus B [HAdV-B]
cgccaccugcugcgcac

SEQ ID NO: 1544350 - RNA, 13 nt, Human adenovirus B [HAdV-B]
gagagcgugaugc

SEQ ID NO: 1544351 - RNA, 18 nt, Human adenovirus B [HAdV-B]
gcacaagcucuaaaguga

SEQ ID NO: 1544352 - RNA, 15 nt, Human adenovirus B [HAdV-B]
gagaauggcaacauc

SEQ ID NO: 1544353 - RNA, 16 nt, Human adenovirus B [HAdV-B]
ccccaucgaugcugcc

SEQ ID NO: 1544354 - RNA, 20 nt, Human adenovirus B [HAdV-B]
caucuagugguacugaugcu

SEQ ID NO: 1544355 - RNA, 19 nt, Human adenovirus B [HAdV-B]
ggaaguuucagaugaagaa

SEQ ID NO: 1544356 - RNA, 20 nt, Human adenovirus B [HAdV-B]
ccgagaagguggcugccauc

SEQ ID NO: 1544357 - RNA, 13 nt, Human adenovirus B [HAdV-B]
agacgcuggugac

SEQ ID NO: 1544358 - RNA, 16 nt, Human adenovirus B [HAdV-B]
cugucaacaucgccac

SEQ ID NO: 1544359 - RNA, 14 nt, Human adenovirus B [HAdV-B]
uagugauagaaguu

SEQ ID NO: 1544360 - RNA, 23 nt, Human adenovirus B [HAdV-B]
agacuguauaggagcauuugcuu

SEQ ID NO: 1544361 - RNA, 20 nt, Human adenovirus B [HAdV-B]
ugugacagugcaauguaaua

SEQ ID NO: 1544362 - RNA, 18 nt, Human adenovirus B [HAdV-B]
uauaaauuuuacugcaga

SEQ ID NO: 1544363 - RNA, 21 nt, Human adenovirus B [HAdV-B]
accccuacggaagccagcacc

SEQ ID NO: 1544364 - RNA, 14 nt, Human adenovirus B [HAdV-B]
cacauccaagaaca

SEQ ID NO: 1544365 - RNA, 14 nt, Human adenovirus B [HAdV-B]
cacucaccaccucc

SEQ ID NO: 1544366 - RNA, 12 nt, Human adenovirus B [HAdV-B]
uggaacucacca

SEQ ID NO: 1544367 - RNA, 15 nt, Human adenovirus B [HAdV-B]
uccagucuccugccg

SEQ ID NO: 1544368 - RNA, 20 nt, Human adenovirus B [HAdV-B]
accccacuaacaaccacagg

SEQ ID NO: 1544369 - RNA, 11 nt, Human adenovirus B [HAdV-B]
caacacuuuca

SEQ ID NO: 1544370 - RNA, 11 nt, Human adenovirus B [HAdV-B]
gaaaaagcaca

SEQ ID NO: 1544371 - RNA, 20 nt, Human adenovirus B [HAdV-B]
augagaaucgccuaggacaa

SEQ ID NO: 1544372 - RNA, 23 nt, Human adenovirus B [HAdV-B]
cagcugccuauaguacuccacca

SEQ ID NO: 1544373 - RNA, 15 nt, Human adenovirus B [HAdV-B]
cucugggaugcaaau

SEQ ID NO: 1544374 - RNA, 13 nt, Human adenovirus B [HAdV-B]
ccaucuaccacuc

SEQ ID NO: 1544375 - RNA, 16 nt, Human adenovirus B [HAdV-B]
ccaugcacucauccau

SEQ ID NO: 1544376 - RNA, 15 nt, Human adenovirus B [HAdV-B]
aggcugucccugcaa

SEQ ID NO: 1544377 - RNA, 16 nt, Human adenovirus B [HAdV-B]
gcauuaguaacaacac

SEQ ID NO: 1544378 - RNA, 18 nt, Human adenovirus B [HAdV-B]
ugaaaauaaacuuuguau

SEQ ID NO: 1544379 - RNA, 19 nt, Human adenovirus B [HAdV-B]
guauugguuuaaaaaaugg

SEQ ID NO: 1544380 - RNA, 18 nt, Human adenovirus B [HAdV-B]
gcuauuugcaccacacuu

SEQ ID NO: 1544381 - RNA, 19 nt, Human adenovirus B [HAdV-B]
aagaacaaaaagccaaaau

SEQ ID NO: 1544382 - RNA, 17 nt, Human adenovirus B [HAdV-B]
gacauuggaaaaaaacg

SEQ ID NO: 1544383 - RNA, 22 nt, Human adenovirus B [HAdV-B]
cggauucuuaacagugcaggca

SEQ ID NO: 1544384 - RNA, 22 nt, Human adenovirus B [HAdV-B]
gcaccgucgcuuccgaccuggc

SEQ ID NO: 1544385 - RNA, 15 nt, Human adenovirus B [HAdV-B]
gcauuauuggacaga

SEQ ID NO: 1544386 - RNA, 17 nt, Human adenovirus B [HAdV-B]
caucuagaccacugccg

SEQ ID NO: 1544387 - RNA, 18 nt, Human adenovirus B [HAdV-B]
uagaaaaugcaaauucca

SEQ ID NO: 1544388 - RNA, 13 nt, Human adenovirus B [HAdV-B]
cccacccugcuuu

SEQ ID NO: 1544389 - RNA, 14 nt, Human adenovirus B [HAdV-B]
gacagaaccagaua

SEQ ID NO: 1544390 - RNA, 20 nt, Human adenovirus B [HAdV-B]
ggcaaaauagacucucgccu

SEQ ID NO: 1544391 - RNA, 24 nt, Human adenovirus B [HAdV-B]
agaauuacuucgacaugggagcug

SEQ ID NO: 1544392 - RNA, 11 nt, Human adenovirus B [HAdV-B]
uuauuuacagu

SEQ ID NO: 1544393 - RNA, 16 nt, Human adenovirus B [HAdV-B]
gaggcgcugcugaaca

SEQ ID NO: 1544394 - RNA, 14 nt, Human adenovirus B [HAdV-B]
cauugcuucucuga

SEQ ID NO: 1544395 - RNA, 15 nt, Human adenovirus B [HAdV-B]
agggcgaaggacugg

SEQ ID NO: 1544396 - RNA, 14 nt, Human adenovirus B [HAdV-B]
agccggccuggacc

SEQ ID NO: 1544397 - RNA, 20 nt, Human adenovirus B [HAdV-B]
aggauauuuugaaauaugag

SEQ ID NO: 1544398 - RNA, 23 nt, Human adenovirus B [HAdV-B]
cuggaaggcggaugacuggcaga

SEQ ID NO: 1544399 - RNA, 23 nt, Human adenovirus B [HAdV-B]
aaaaugauuaauaaaaaaucacu

SEQ ID NO: 1544400 - RNA, 17 nt, Human adenovirus B [HAdV-B]
uccaaggaugagacagu

SEQ ID NO: 1544401 - RNA, 16 nt, Human adenovirus B [HAdV-B]
guauaauuaugcuuaa

SEQ ID NO: 1544402 - RNA, 19 nt, Human adenovirus B [HAdV-B]
cacuuagaagauacugagc

SEQ ID NO: 1544403 - RNA, 17 nt, Human adenovirus B [HAdV-B]
aacaauuuucgcucuuu

SEQ ID NO: 1544404 - RNA, 13 nt, Human adenovirus B [HAdV-B]
ucuaugaggacca

SEQ ID NO: 1544405 - RNA, 13 nt, Human adenovirus B [HAdV-B]
caacaaaacaaaa

SEQ ID NO: 1544406 - RNA, 16 nt, Human adenovirus B [HAdV-B]
ugcgaaaaggcugugg

SEQ ID NO: 1544407 - RNA, 15 nt, Human adenovirus B [HAdV-B]
ccagguggucucugg

SEQ ID NO: 1544408 - RNA, 14 nt, Human adenovirus B [HAdV-B]
cgagacgcucuucu

SEQ ID NO: 1544409 - RNA, 15 nt, Human adenovirus B [HAdV-B]
agauucccacugaaa

SEQ ID NO: 1544410 - RNA, 16 nt, Human adenovirus B [HAdV-B]
ccagacgugcagcuuc

SEQ ID NO: 1544411 - RNA, 15 nt, Human adenovirus B [HAdV-B]
acggugcugcaguug

SEQ ID NO: 1544412 - RNA, 21 nt, Human adenovirus B [HAdV-B]
ccauugaagggauucaugcuc

SEQ ID NO: 1544413 - RNA, 15 nt, Human adenovirus B [HAdV-B]
aggcauuaguuuaaa

SEQ ID NO: 1544414 - RNA, 14 nt, Human adenovirus B [HAdV-B]
guugagaccuggaa

SEQ ID NO: 1544415 - RNA, 21 nt, Human adenovirus B [HAdV-B]
cgcccagcuguuucugguggu

SEQ ID NO: 1544416 - RNA, 23 nt, Human adenovirus B [HAdV-B]
uaagcagguagcgccuggucugg

SEQ ID NO: 1544417 - RNA, 19 nt, Human adenovirus B [HAdV-B]
acgggaacaaagcuuggaa

SEQ ID NO: 1544418 - RNA, 11 nt, Human adenovirus B [HAdV-B]
ggacaggguuc

SEQ ID NO: 1544419 - RNA, 15 nt, Human adenovirus B [HAdV-B]
aucaugguguggaag

SEQ ID NO: 1544420 - RNA, 16 nt, Human adenovirus B [HAdV-B]
ccuccgcgauaccugg

SEQ ID NO: 1544421 - RNA, 15 nt, Human adenovirus B [HAdV-B]
uggcuucucuuacau

SEQ ID NO: 1544422 - RNA, 24 nt, Human adenovirus B [HAdV-B]
acugugcguaugcauacaccugcu

SEQ ID NO: 1544423 - RNA, 13 nt, Human adenovirus B [HAdV-B]
augaauguuccuu

SEQ ID NO: 1544424 - RNA, 16 nt, Human adenovirus B [HAdV-B]
auuuucuaacuccuca

SEQ ID NO: 1544425 - RNA, 13 nt, Human adenovirus B [HAdV-B]
ccauuguguucuc

SEQ ID NO: 1544426 - RNA, 19 nt, Human adenovirus B [HAdV-B]
agguuacuggccagugcag

SEQ ID NO: 1544427 - RNA, 12 nt, Human adenovirus B [HAdV-B]
cauugcuucucu

SEQ ID NO: 1544428 - RNA, 17 nt, Human adenovirus B [HAdV-B]
aaguucuaguuguaaaa

SEQ ID NO: 1544429 - RNA, 21 nt, Human adenovirus B [HAdV-B]
cugaacggggucaucuugcag

SEQ ID NO: 1544430 - RNA, 18 nt, Human adenovirus B [HAdV-B]
uuaccagacaaaguacag

SEQ ID NO: 1544431 - RNA, 23 nt, Human adenovirus B [HAdV-B]
uuaugcuuaaucguaaguauagc

SEQ ID NO: 1544432 - RNA, 15 nt, Human adenovirus B [HAdV-B]
cuggaggacagucug

SEQ ID NO: 1544433 - RNA, 13 nt, Human adenovirus B [HAdV-B]
ugcaugauggaua

SEQ ID NO: 1544434 - RNA, 14 nt, Human adenovirus B [HAdV-B]
aguuuggcaaugga

SEQ ID NO: 1544435 - RNA, 18 nt, Human adenovirus B [HAdV-B]
acagucaggcagaggagg

SEQ ID NO: 1544436 - RNA, 20 nt, Human adenovirus B [HAdV-B]
guucuggaggaggaacagca

SEQ ID NO: 1544437 - RNA, 14 nt, Human adenovirus B [HAdV-B]
cggcaggaugugag

SEQ ID NO: 1544438 - RNA, 22 nt, Human adenovirus B [HAdV-B]
ggucccuagcuugcaaccccca

SEQ ID NO: 1544439 - RNA, 23 nt, Human adenovirus B [HAdV-B]
gaacacaggagaugccccagagg

SEQ ID NO: 1544440 - RNA, 14 nt, Human adenovirus B [HAdV-B]
cacugaagugcaaa

SEQ ID NO: 1544441 - RNA, 17 nt, Human adenovirus B [HAdV-B]
uucuggcccaauugcaa

SEQ ID NO: 1544442 - RNA, 14 nt, Human adenovirus B [HAdV-B]
ugugucugaaggaa

SEQ ID NO: 1544443 - RNA, 20 nt, Human adenovirus B [HAdV-B]
caaugucacucuuccagaaa

SEQ ID NO: 1544444 - RNA, 22 nt, Human adenovirus B [HAdV-B]
cugacgccgccggucccacucg

SEQ ID NO: 1544445 - RNA, 19 nt, Human adenovirus B [HAdV-B]
cagugucgcuaacaauaca

SEQ ID NO: 1544446 - RNA, 22 nt, Human adenovirus B [HAdV-B]
auagggcuugacggggaagacg

SEQ ID NO: 1544447 - RNA, 21 nt, Human adenovirus B [HAdV-B]
caaguuugcuccggaagauua

SEQ ID NO: 1544448 - RNA, 20 nt, Human adenovirus B [HAdV-B]
guggacaggguucgacgagc

SEQ ID NO: 1544449 - RNA, 16 nt, Human adenovirus B [HAdV-B]
guucugacuuuggaaa

SEQ ID NO: 1544450 - RNA, 20 nt, Human adenovirus B [HAdV-B]
uucuuuugccauccuucuca

SEQ ID NO: 1544451 - RNA, 15 nt, Human adenovirus B [HAdV-B]
gcucaccauuaccaa

SEQ ID NO: 1544452 - RNA, 18 nt, Human adenovirus B [HAdV-B]
guggcgguucaggccucg

SEQ ID NO: 1544453 - RNA, 21 nt, Human adenovirus B [HAdV-B]
aagauagcuuugaggccugau

SEQ ID NO: 1544454 - RNA, 20 nt, Human adenovirus B [HAdV-B]
ggccugcgucaucacccagg

SEQ ID NO: 1544455 - RNA, 18 nt, Human adenovirus B [HAdV-B]
agagguuccaaagaucuu

SEQ ID NO: 1544456 - RNA, 22 nt, Human adenovirus B [HAdV-B]
ggaaccagaugccuuuuccaga

SEQ ID NO: 1544457 - RNA, 20 nt, Human adenovirus B [HAdV-B]
guuucauuuuccucacaacg

SEQ ID NO: 1544458 - RNA, 16 nt, Human adenovirus B [HAdV-B]
agcuagaucaaaagaa

SEQ ID NO: 1544459 - RNA, 14 nt, Human adenovirus B [HAdV-B]
gcagggcucugagc

SEQ ID NO: 1544460 - RNA, 21 nt, Human adenovirus B [HAdV-B]
cuauggagucacugcuaccug

SEQ ID NO: 1544461 - RNA, 17 nt, Human adenovirus B [HAdV-B]
ucuucaccauacucauu

SEQ ID NO: 1544462 - RNA, 15 nt, Human adenovirus B [HAdV-B]
uuagcgaucuucuca

SEQ ID NO: 1544463 - RNA, 14 nt, Human adenovirus B [HAdV-B]
cgcauugccagacg

SEQ ID NO: 1544464 - RNA, 17 nt, Human adenovirus B [HAdV-B]
gcgauaaugccagacuc

SEQ ID NO: 1544465 - RNA, 16 nt, Human adenovirus B [HAdV-B]
cuggaacacaggagau

SEQ ID NO: 1544466 - RNA, 15 nt, Human adenovirus B [HAdV-B]
guaucacaagagcga

SEQ ID NO: 1544467 - RNA, 13 nt, Human adenovirus B [HAdV-B]
aggauguccaagc

SEQ ID NO: 1544468 - RNA, 14 nt, Human adenovirus B [HAdV-B]
acggagggcagaaa

SEQ ID NO: 1544469 - RNA, 21 nt, Human adenovirus B [HAdV-B]
ccuuccagggucucaguguuc

SEQ ID NO: 1544470 - RNA, 15 nt, Human adenovirus B [HAdV-B]
aggcggagcgguggu

SEQ ID NO: 1544471 - RNA, 14 nt, Human adenovirus B [HAdV-B]
cgguccuuccaggg

SEQ ID NO: 1544472 - RNA, 17 nt, Human adenovirus B [HAdV-B]
ggccgcaaaugcucugc

SEQ ID NO: 1544473 - RNA, 22 nt, Human adenovirus B [HAdV-B]
ugcacagccggcaucauucaca

SEQ ID NO: 1544474 - RNA, 12 nt, Human adenovirus B [HAdV-B]
augcccagcacg

SEQ ID NO: 1544475 - RNA, 17 nt, Human adenovirus B [HAdV-B]
ccaucaucgugcucagu

SEQ ID NO: 1544476 - RNA, 18 nt, Human adenovirus B [HAdV-B]
caagaauuucuacugaaa

SEQ ID NO: 1544477 - RNA, 20 nt, Human adenovirus B [HAdV-B]
cugacacuccugguccugug

SEQ ID NO: 1544478 - RNA, 15 nt, Human adenovirus B [HAdV-B]
gaugaaaacugccca

SEQ ID NO: 1544479 - RNA, 20 nt, Human adenovirus B [HAdV-B]
caacccggauuuuacaacca

SEQ ID NO: 1544480 - RNA, 20 nt, Human adenovirus B [HAdV-B]
caggagaaauauucacugga

SEQ ID NO: 1544481 - RNA, 19 nt, Human adenovirus B [HAdV-B]
cagccgccgcccccagaag

SEQ ID NO: 1544482 - RNA, 13 nt, Human adenovirus B [HAdV-B]
aucaaaugcucac

SEQ ID NO: 1544483 - RNA, 16 nt, Human adenovirus B [HAdV-B]
aaggcgauaaugccag

SEQ ID NO: 1544484 - RNA, 17 nt, Human adenovirus B [HAdV-B]
ucgaaaccguugauguu

SEQ ID NO: 1544485 - RNA, 13 nt, Human adenovirus B [HAdV-B]
ucguucuucuuua

SEQ ID NO: 1544486 - RNA, 12 nt, Human adenovirus B [HAdV-B]
aggcaaaacaaa

SEQ ID NO: 1544487 - RNA, 14 nt, Human adenovirus B [HAdV-B]
uacaaaagaaggac

SEQ ID NO: 1544488 - RNA, 21 nt, Human adenovirus B [HAdV-B]
ucuuuagcgaucuucucaaug

SEQ ID NO: 1544489 - RNA, 22 nt, Human adenovirus B [HAdV-B]
ggcccaauugcaagccauccaa

SEQ ID NO: 1544490 - RNA, 21 nt, Human adenovirus B [HAdV-B]
augggcguccagcgcugccag

SEQ ID NO: 1544491 - RNA, 23 nt, Human adenovirus B [HAdV-B]
cccuguaugccaucuuccagcag

SEQ ID NO: 1544492 - RNA, 15 nt, Human adenovirus B [HAdV-B]
gcaucucaugacaug

SEQ ID NO: 1544493 - RNA, 20 nt, Human adenovirus B [HAdV-B]
gagaguuucaugaccagcau

SEQ ID NO: 1544494 - RNA, 19 nt, Human adenovirus B [HAdV-B]
auccauggaugcccaugcc

SEQ ID NO: 1544495 - RNA, 20 nt, Human adenovirus B [HAdV-B]
uguccguucucgcuggccac

SEQ ID NO: 1544496 - RNA, 18 nt, Human adenovirus B [HAdV-B]
gcggaugacuggcagaac

SEQ ID NO: 1544497 - RNA, 21 nt, Human adenovirus B [HAdV-B]
caccgguggaacacgaggaag

SEQ ID NO: 1544498 - RNA, 16 nt, Human adenovirus B [HAdV-B]
agcuguguacucccag

SEQ ID NO: 1544499 - RNA, 14 nt, Human adenovirus B [HAdV-B]
ucacagauuugcau

SEQ ID NO: 1544500 - RNA, 17 nt, Human adenovirus B [HAdV-B]
aaccccacuaacaacca

SEQ ID NO: 1544501 - RNA, 19 nt, Human adenovirus B [HAdV-B]
gcaaaguucgacauguguu

SEQ ID NO: 1544502 - RNA, 23 nt, Human adenovirus B [HAdV-B]
ccuggcagaccucaucuucccag

SEQ ID NO: 1544503 - RNA, 13 nt, Human adenovirus B [HAdV-B]
aguuauguuccug

SEQ ID NO: 1544504 - RNA, 15 nt, Human adenovirus B [HAdV-B]
caggcugugcagaaa

SEQ ID NO: 1544505 - RNA, 23 nt, Human adenovirus B [HAdV-B]
ugcagaggcauacaugccacaga

SEQ ID NO: 1544506 - RNA, 14 nt, Human adenovirus B [HAdV-B]
uucagcauuggcaa

SEQ ID NO: 1544507 - RNA, 19 nt, Human adenovirus B [HAdV-B]
auucuagagaaaaagaaaa

SEQ ID NO: 1544508 - RNA, 23 nt, Human adenovirus B [HAdV-B]
gggcaaaguuuaaaacugacccc

SEQ ID NO: 1544509 - RNA, 20 nt, Human adenovirus B [HAdV-B]
aacuuaaagaccagaacuuc

SEQ ID NO: 1544510 - RNA, 13 nt, Human adenovirus B [HAdV-B]
cacacaaagcaca

SEQ ID NO: 1544511 - RNA, 22 nt, Human adenovirus B [HAdV-B]
acagccccccucgcagcagcag

SEQ ID NO: 1544512 - RNA, 18 nt, Human adenovirus B [HAdV-B]
ugcagccgccgcccccag

SEQ ID NO: 1544513 - RNA, 20 nt, Human adenovirus B [HAdV-B]
agacgccaccgagcuaccac

SEQ ID NO: 1544514 - RNA, 22 nt, Human adenovirus B [HAdV-B]
uugcccucauaaucauugcagc

SEQ ID NO: 1544515 - RNA, 16 nt, Human adenovirus B [HAdV-B]
agaacucgguggauuu

SEQ ID NO: 1544516 - RNA, 14 nt, Human adenovirus B [HAdV-B]
cacaggagaauaaa

SEQ ID NO: 1544517 - RNA, 23 nt, Human adenovirus B [HAdV-B]
acaccaggaacuucaagcuggga

SEQ ID NO: 1544518 - RNA, 21 nt, Human adenovirus B [HAdV-B]
ccucaguacgauaccaccagg

SEQ ID NO: 1544519 - RNA, 20 nt, Human adenovirus B [HAdV-B]
gugaugcaauccccacugga

SEQ ID NO: 1544520 - RNA, 21 nt, Human adenovirus B [HAdV-B]
gacugcagcacuggacaugac

SEQ ID NO: 1544521 - RNA, 15 nt, Human adenovirus B [HAdV-B]
ccccagcagccaagg

SEQ ID NO: 1544522 - RNA, 17 nt, Human adenovirus B [HAdV-B]
aggucgacgcaucucau

SEQ ID NO: 1544523 - RNA, 20 nt, Human adenovirus B [HAdV-B]
aguuuacuuugccagaaggc

SEQ ID NO: 1544524 - RNA, 23 nt, Human adenovirus B [HAdV-B]
augggcguccagcgcugccaggg

SEQ ID NO: 1544525 - RNA, 17 nt, Human adenovirus B [HAdV-B]
gaucuaccgccagugcu

SEQ ID NO: 1544526 - RNA, 15 nt, Human adenovirus B [HAdV-B]
ugcugcgcacugccc

SEQ ID NO: 1544527 - RNA, 12 nt, Human adenovirus B [HAdV-B]
caccaaugcaaa

SEQ ID NO: 1544528 - RNA, 15 nt, Human adenovirus B [HAdV-B]
ugaucaccugggcag

SEQ ID NO: 1544529 - RNA, 17 nt, Human adenovirus B [HAdV-B]
cuaucucuccuaccacu

SEQ ID NO: 1544530 - RNA, 23 nt, Human adenovirus B [HAdV-B]
cuaacaaccacaggcggaucucu

SEQ ID NO: 1544531 - RNA, 22 nt, Human adenovirus B [HAdV-B]
augauauucuugagcaggcggc

SEQ ID NO: 1544532 - RNA, 17 nt, Human adenovirus B [HAdV-B]
aaaccaguggucaguga

SEQ ID NO: 1544533 - RNA, 18 nt, Human adenovirus B [HAdV-B]
uagaucaaaagaaaugcg

SEQ ID NO: 1544534 - RNA, 19 nt, Human adenovirus B [HAdV-B]
ugcagcuucgggcgccagc

SEQ ID NO: 1544535 - RNA, 20 nt, Human adenovirus B [HAdV-B]
cagaagguguaaaaaauaca

SEQ ID NO: 1544536 - RNA, 21 nt, Human adenovirus B [HAdV-B]
ggcuccagcaaaaacaagauu

SEQ ID NO: 1544537 - RNA, 12 nt, Human adenovirus B [HAdV-B]
uuucagaagaca

SEQ ID NO: 1544538 - RNA, 17 nt, Human adenovirus B [HAdV-B]
cacacugguggccaccu

SEQ ID NO: 1544539 - RNA, 15 nt, Human adenovirus B [HAdV-B]
cagcgcugccagggu

SEQ ID NO: 1544540 - RNA, 14 nt, Human adenovirus B [HAdV-B]
ggacuuggaagagg

SEQ ID NO: 1544541 - RNA, 14 nt, Human adenovirus B [HAdV-B]
uggauugccacagc

SEQ ID NO: 1544542 - RNA, 19 nt, Human adenovirus B [HAdV-B]
uacuugcuauuccaccaug

SEQ ID NO: 1544543 - RNA, 14 nt, Human adenovirus B [HAdV-B]
gcaaugacagaaug

SEQ ID NO: 1544544 - RNA, 21 nt, Human adenovirus B [HAdV-B]
agauuacagccaacgagccag

SEQ ID NO: 1544545 - RNA, 13 nt, Human adenovirus B [HAdV-B]
aacucaacacaag

SEQ ID NO: 1544546 - RNA, 19 nt, Human adenovirus B [HAdV-B]
uagucuacccuuuucucua

SEQ ID NO: 1544547 - RNA, 13 nt, Human adenovirus B [HAdV-B]
gcuuauggcaagc

SEQ ID NO: 1544548 - RNA, 20 nt, Human adenovirus B [HAdV-B]
ugccaccuccacugaagugc

SEQ ID NO: 1544549 - RNA, 17 nt, Human adenovirus B [HAdV-B]
cagaacaaggaagacca

SEQ ID NO: 1544550 - RNA, 21 nt, Human adenovirus B [HAdV-B]
cagaggagguggaagaaguaa

SEQ ID NO: 1544551 - RNA, 14 nt, Human adenovirus B [HAdV-B]
cuuacgagcagaca

SEQ ID NO: 1544552 - RNA, 14 nt, Human adenovirus B [HAdV-B]
caagauuggaauaa

SEQ ID NO: 1544553 - RNA, 20 nt, Human adenovirus B [HAdV-B]
acuuugauauaaucugcaac

SEQ ID NO: 1544554 - RNA, 14 nt, Human adenovirus B [HAdV-B]
cauugaugcucuau

SEQ ID NO: 1544555 - RNA, 23 nt, Human adenovirus B [HAdV-B]
cuaggacaaagcgugcugcacag

SEQ ID NO: 1544556 - RNA, 19 nt, Human adenovirus B [HAdV-B]
guauccugcccgccaccug

SEQ ID NO: 1544557 - RNA, 15 nt, Human adenovirus B [HAdV-B]
ggcucucaugaaagc

SEQ ID NO: 1544558 - RNA, 18 nt, Human adenovirus B [HAdV-B]
uaauggaauaguguuuau

SEQ ID NO: 1544559 - RNA, 14 nt, Human adenovirus B [HAdV-B]
ccauuaggaggcgc

SEQ ID NO: 1544560 - RNA, 16 nt, Human adenovirus B [HAdV-B]
gcguggggcgaagagc

SEQ ID NO: 1544561 - RNA, 20 nt, Human adenovirus B [HAdV-B]
aagaacaaaagaauaccaaa

SEQ ID NO: 1544562 - RNA, 14 nt, Human adenovirus B [HAdV-B]
aucucccaccacac

SEQ ID NO: 1544563 - RNA, 19 nt, Human adenovirus B [HAdV-B]
agugcgguacacccuggcc

SEQ ID NO: 1544564 - RNA, 13 nt, Human adenovirus B [HAdV-B]
uucccucuuccca

SEQ ID NO: 1544565 - RNA, 19 nt, Human adenovirus B [HAdV-B]
gaaaaugaaagcguucagc

SEQ ID NO: 1544566 - RNA, 17 nt, Human adenovirus B [HAdV-B]
gcauaugcaaaucccaa

SEQ ID NO: 1544567 - RNA, 18 nt, Human adenovirus B [HAdV-B]
ccuacauggguauucugc

SEQ ID NO: 1544568 - RNA, 11 nt, Human adenovirus B [HAdV-B]
aaccacaaccc

SEQ ID NO: 1544569 - RNA, 16 nt, Human adenovirus B [HAdV-B]
cauggaaaucccaccc

SEQ ID NO: 1544570 - RNA, 21 nt, Human adenovirus B [HAdV-B]
cugccuacccauggcgggcac

SEQ ID NO: 1544571 - RNA, 21 nt, Human adenovirus B [HAdV-B]
ucaugguaccuagaaauuucu

SEQ ID NO: 1544572 - RNA, 16 nt, Human adenovirus B [HAdV-B]
cgccaugacagacaga

SEQ ID NO: 1544573 - RNA, 17 nt, Human adenovirus B [HAdV-B]
cuugacaagcucuuaca

SEQ ID NO: 1544574 - RNA, 21 nt, Human adenovirus B [HAdV-B]
gucaucuuuagcgaucuucuc

SEQ ID NO: 1544575 - RNA, 19 nt, Human adenovirus B [HAdV-B]
ggcaggaugugagcuuccu

SEQ ID NO: 1544576 - RNA, 18 nt, Human adenovirus B [HAdV-B]
gcagaccucaucuuccca

SEQ ID NO: 1544577 - RNA, 13 nt, Human adenovirus B [HAdV-B]
aaaugcucugcaa

SEQ ID NO: 1544578 - RNA, 17 nt, Human adenovirus B [HAdV-B]
caccucuuucugaucau

SEQ ID NO: 1544579 - RNA, 22 nt, Human adenovirus B [HAdV-B]
gcagcagcuccuuuagccagag

SEQ ID NO: 1544580 - RNA, 22 nt, Human adenovirus B [HAdV-B]
gucaucuuuagcgaucuucuca

SEQ ID NO: 1544581 - RNA, 16 nt, Human adenovirus B [HAdV-B]
gaacugaagugcccau

SEQ ID NO: 1544582 - RNA, 18 nt, Human adenovirus B [HAdV-B]
uggcgcgauaccaggcau

SEQ ID NO: 1544583 - RNA, 19 nt, Human adenovirus B [HAdV-B]
cagcgcuuccaagaccggu

SEQ ID NO: 1544584 - RNA, 15 nt, Human adenovirus B [HAdV-B]
uuacuuugccagaag

SEQ ID NO: 1544585 - RNA, 14 nt, Human adenovirus B [HAdV-B]
augugccccaacag

SEQ ID NO: 1544586 - RNA, 18 nt, Human adenovirus B [HAdV-B]
cuccggaucuccugggca

SEQ ID NO: 1544587 - RNA, 18 nt, Human adenovirus B [HAdV-B]
cuuacuuuaaaauguuua

SEQ ID NO: 1544588 - RNA, 13 nt, Human adenovirus B [HAdV-B]
ccucgcagcagca

SEQ ID NO: 1544589 - RNA, 20 nt, Human adenovirus B [HAdV-B]
uacggagggcagaaacagca

SEQ ID NO: 1544590 - RNA, 10 nt, Human adenovirus B [HAdV-B]
gcggaggagg

SEQ ID NO: 1544591 - RNA, 11 nt, Human adenovirus B [HAdV-B]
agugucacugc

SEQ ID NO: 1544592 - RNA, 18 nt, Human adenovirus B [HAdV-B]
guaccgcaaugguagugc

SEQ ID NO: 1544593 - RNA, 22 nt, Human adenovirus B [HAdV-B]
cuucuccggaucuccugggcau

SEQ ID NO: 1544594 - RNA, 14 nt, Human adenovirus B [HAdV-B]
acacacagaaauau

SEQ ID NO: 1544595 - RNA, 16 nt, Human adenovirus B [HAdV-B]
ugccaugcaggcacuu

SEQ ID NO: 1544596 - RNA, 23 nt, Human adenovirus B [HAdV-B]
cucagcgacgaggaaaaggagca

SEQ ID NO: 1544597 - RNA, 19 nt, Human adenovirus B [HAdV-B]
cuccucaauaugcucuuac

SEQ ID NO: 1544598 - RNA, 12 nt, Human adenovirus B [HAdV-B]
uaaugacaaaau

SEQ ID NO: 1544599 - RNA, 15 nt, Human adenovirus B [HAdV-B]
gcuuuugcugugcca

SEQ ID NO: 1544600 - RNA, 14 nt, Human adenovirus B [HAdV-B]
aggucaggagccga

SEQ ID NO: 1544601 - RNA, 16 nt, Human adenovirus B [HAdV-B]
guaguguuguaaauca

SEQ ID NO: 1544602 - RNA, 13 nt, Human adenovirus B [HAdV-B]
caggaacugaaaa

SEQ ID NO: 1544603 - RNA, 22 nt, Human adenovirus B [HAdV-B]
gaacuugaaagagcuugacaag

SEQ ID NO: 1544604 - RNA, 21 nt, Human adenovirus B [HAdV-B]
gaagcucuuaauuugggccau

SEQ ID NO: 1544605 - RNA, 22 nt, Human adenovirus B [HAdV-B]
gcccccagaagauauggaggaa

SEQ ID NO: 1544606 - RNA, 15 nt, Human adenovirus B [HAdV-B]
gcugcgcacugcccu

SEQ ID NO: 1544607 - RNA, 22 nt, Human adenovirus B [HAdV-B]
uuucuuaccuuuggucuccaug

SEQ ID NO: 1544608 - RNA, 20 nt, Human adenovirus B [HAdV-B]
gcgaaauauggagcccagca

SEQ ID NO: 1544609 - RNA, 22 nt, Human adenovirus B [HAdV-B]
ccaguagguuuggaaguuucag

SEQ ID NO: 1544610 - RNA, 13 nt, Human adenovirus B [HAdV-B]
gauugcagcacug

SEQ ID NO: 1544611 - RNA, 21 nt, Human adenovirus B [HAdV-B]
uugagcgccucggcugcgugg

SEQ ID NO: 1544612 - RNA, 19 nt, Human adenovirus B [HAdV-B]
ugucgucacaggccucggc

SEQ ID NO: 1544613 - RNA, 17 nt, Human adenovirus B [HAdV-B]
aauugugaugauagcaa

SEQ ID NO: 1544614 - RNA, 17 nt, Human adenovirus B [HAdV-B]
gaagauauggaggaaga

SEQ ID NO: 1544615 - RNA, 15 nt, Human adenovirus B [HAdV-B]
ugucucacgcuugcc

SEQ ID NO: 1544616 - RNA, 22 nt, Human adenovirus B [HAdV-B]
auacacggcucucaugaaagca

SEQ ID NO: 1544617 - RNA, 16 nt, Human adenovirus B [HAdV-B]
acucaucuaaaaccau

SEQ ID NO: 1544618 - RNA, 20 nt, Human adenovirus B [HAdV-B]
gaagaccacgaacacaacuu

SEQ ID NO: 1544619 - RNA, 20 nt, Human adenovirus B [HAdV-B]
gcagcacuggacaugacagc

SEQ ID NO: 1544620 - RNA, 22 nt, Human adenovirus B [HAdV-B]
aucucuuaagguucuguggaca

SEQ ID NO: 1544621 - RNA, 12 nt, Human adenovirus B [HAdV-B]
aaaaaacagcca

SEQ ID NO: 1544622 - RNA, 18 nt, Human adenovirus B [HAdV-B]
cugcccaaaacaacgagc

SEQ ID NO: 1544623 - RNA, 16 nt, Human adenovirus B [HAdV-B]
caauccacacauuaca

SEQ ID NO: 1544624 - RNA, 20 nt, Human adenovirus B [HAdV-B]
caguaagaaagaacaaaaag

SEQ ID NO: 1544625 - RNA, 18 nt, Human adenovirus B [HAdV-B]
cauguggaaucaggcugu

SEQ ID NO: 1544626 - RNA, 14 nt, Human adenovirus B [HAdV-B]
agcgcuuucacagu

SEQ ID NO: 1544627 - RNA, 23 nt, Human adenovirus B [HAdV-B]
uugcagacgguaaaucugagcca

SEQ ID NO: 1544628 - RNA, 17 nt, Human adenovirus B [HAdV-B]
acugcagcacuggacau

SEQ ID NO: 1544629 - RNA, 16 nt, Human adenovirus B [HAdV-B]
gcagaaaucuucccau

SEQ ID NO: 1544630 - RNA, 16 nt, Human adenovirus B [HAdV-B]
gaagcuauaauguguu

SEQ ID NO: 1544631 - RNA, 23 nt, Human adenovirus B [HAdV-B]
agaacaaaagaauaccaaaagaa

SEQ ID NO: 1544632 - RNA, 20 nt, Human adenovirus B [HAdV-B]
ggaagagucuuucugugcga

SEQ ID NO: 1544633 - RNA, 14 nt, Human adenovirus B [HAdV-B]
ucacuucccucuuc

SEQ ID NO: 1544634 - RNA, 16 nt, Human adenovirus B [HAdV-B]
ggauuuccugccacca

SEQ ID NO: 1544635 - RNA, 12 nt, Human adenovirus B [HAdV-B]
caauuguugcag

SEQ ID NO: 1544636 - RNA, 17 nt, Human adenovirus B [HAdV-B]
aacagaaaaccagcagc

SEQ ID NO: 1544637 - RNA, 18 nt, Human adenovirus B [HAdV-B]
gaaaccauuugguggcau

SEQ ID NO: 1544638 - RNA, 13 nt, Human adenovirus B [HAdV-B]
ucgggggcagagg

SEQ ID NO: 1544639 - RNA, 15 nt, Human adenovirus B [HAdV-B]
cgucaucacccaggg

SEQ ID NO: 1544640 - RNA, 12 nt, Human adenovirus B [HAdV-B]
caggccagcaca

SEQ ID NO: 1544641 - RNA, 20 nt, Human adenovirus B [HAdV-B]
guuugcgcuacuuucacagc

SEQ ID NO: 1544642 - RNA, 12 nt, Human adenovirus B [HAdV-B]
uggcugcagcca

SEQ ID NO: 1544643 - RNA, 13 nt, Human adenovirus B [HAdV-B]
cacaacccccacu

SEQ ID NO: 1544644 - RNA, 22 nt, Human adenovirus B [HAdV-B]
ugaagcucuuaauuugggccau

SEQ ID NO: 1544645 - RNA, 15 nt, Human adenovirus B [HAdV-B]
agcuuaagcauucca

SEQ ID NO: 1544646 - RNA, 19 nt, Human adenovirus B [HAdV-B]
cuuucagaagacaugcaug

SEQ ID NO: 1544647 - RNA, 12 nt, Human adenovirus B [HAdV-B]
auggcugggcac

SEQ ID NO: 1544648 - RNA, 19 nt, Human adenovirus B [HAdV-B]
agugaaccacaacccccac

SEQ ID NO: 1544649 - RNA, 18 nt, Human adenovirus B [HAdV-B]
ccacgguagcauaugcaa

SEQ ID NO: 1544650 - RNA, 14 nt, Human adenovirus B [HAdV-B]
cuucaauuggagca

SEQ ID NO: 1544651 - RNA, 23 nt, Human adenovirus B [HAdV-B]
agcaggaacgcgcggccaaagag

SEQ ID NO: 1544652 - RNA, 18 nt, Human adenovirus B [HAdV-B]
ugaaggaugaaaaaaaac

SEQ ID NO: 1544653 - RNA, 18 nt, Human adenovirus B [HAdV-B]
uguuccacaguucaguga

SEQ ID NO: 1544654 - RNA, 21 nt, Human adenovirus B [HAdV-B]
ugucauaauggaguugcuucc

SEQ ID NO: 1544655 - RNA, 17 nt, Human adenovirus B [HAdV-B]
ugguuuuagauuccaca

SEQ ID NO: 1544656 - RNA, 20 nt, Human adenovirus B [HAdV-B]
ccgcguucgggggugugcuc

SEQ ID NO: 1544657 - RNA, 17 nt, Human adenovirus B [HAdV-B]
auuuucucccagcggcc

SEQ ID NO: 1544658 - RNA, 13 nt, Human adenovirus B [HAdV-B]
ccagggucucagu

SEQ ID NO: 1544659 - RNA, 22 nt, Human adenovirus B [HAdV-B]
ucgcauguauucauuuuucaga

SEQ ID NO: 1544660 - RNA, 13 nt, Human adenovirus B [HAdV-B]
cccgccaccugcu

SEQ ID NO: 1544661 - RNA, 19 nt, Human adenovirus B [HAdV-B]
cagggcacacguggcugca

SEQ ID NO: 1544662 - RNA, 16 nt, Human adenovirus B [HAdV-B]
accuacuaaugugaaa

SEQ ID NO: 1544663 - RNA, 16 nt, Human adenovirus B [HAdV-B]
cagaggaacacauucc

SEQ ID NO: 1544664 - RNA, 14 nt, Human adenovirus B [HAdV-B]
caacaagugcagca

SEQ ID NO: 1544665 - RNA, 21 nt, Human adenovirus B [HAdV-B]
ugacauucucguauuuuguau

SEQ ID NO: 1544666 - RNA, 18 nt, Human adenovirus B [HAdV-B]
uggggcgaagagccaugc

SEQ ID NO: 1544667 - RNA, 13 nt, Human adenovirus B [HAdV-B]
gaagguucugggg

SEQ ID NO: 1544668 - RNA, 19 nt, Human adenovirus B [HAdV-B]
gaacacgaggaagaguuga

SEQ ID NO: 1544669 - RNA, 18 nt, Human adenovirus B [HAdV-B]
cauaucauaguagccuga

SEQ ID NO: 1544670 - RNA, 23 nt, Human adenovirus B [HAdV-B]
aggauccuauagaggugggauug

SEQ ID NO: 1544671 - RNA, 20 nt, Human adenovirus B [HAdV-B]
gccaccugcugcgcacugcc

SEQ ID NO: 1544672 - RNA, 22 nt, Human adenovirus B [HAdV-B]
cuagugaaaguuaacuggaugc

SEQ ID NO: 1544673 - RNA, 22 nt, Human adenovirus B [HAdV-B]
caccaaggccauggcgacgagc

SEQ ID NO: 1544674 - RNA, 23 nt, Human adenovirus B [HAdV-B]
uacucgcgugccaggcacuucca

SEQ ID NO: 1544675 - RNA, 22 nt, Human adenovirus B [HAdV-B]
acaaugaagaacccaauucucu

SEQ ID NO: 1544676 - RNA, 18 nt, Human adenovirus B [HAdV-B]
uccaacagagccuaccuc

SEQ ID NO: 1544677 - RNA, 21 nt, Human adenovirus B [HAdV-B]
uauguuccugaguuaaaucau

SEQ ID NO: 1544678 - RNA, 11 nt, Human adenovirus B [HAdV-B]
ugaacucugau

SEQ ID NO: 1544679 - RNA, 19 nt, Human adenovirus B [HAdV-B]
ggugcaacacagcagagac

SEQ ID NO: 1544680 - RNA, 23 nt, Human adenovirus B [HAdV-B]
agaggauccuuagauaugugcag

SEQ ID NO: 1544681 - RNA, 18 nt, Human adenovirus B [HAdV-B]
gccauugcugucaacauc

SEQ ID NO: 1544682 - RNA, 23 nt, Human adenovirus B [HAdV-B]
auguugacgagacgcucuucucc

SEQ ID NO: 1544683 - RNA, 17 nt, Human adenovirus B [HAdV-B]
aguucguuauccagccu

SEQ ID NO: 1544684 - RNA, 14 nt, Human adenovirus B [HAdV-B]
cgcuugccagcacg

SEQ ID NO: 1544685 - RNA, 17 nt, Human adenovirus B [HAdV-B]
ccucccgacggugcugc

SEQ ID NO: 1544686 - RNA, 17 nt, Human adenovirus B [HAdV-B]
cugaccccgggacugug

SEQ ID NO: 1544687 - RNA, 18 nt, Human adenovirus B [HAdV-B]
ugugccucucaccuaccg

SEQ ID NO: 1544688 - RNA, 22 nt, Human adenovirus B [HAdV-B]
uccaucagcagacacaucacuu

SEQ ID NO: 1544689 - RNA, 14 nt, Human adenovirus B [HAdV-B]
gcgggucgugagcu

SEQ ID NO: 1544690 - RNA, 14 nt, Human adenovirus B [HAdV-B]
gauggcgccagcau

SEQ ID NO: 1544691 - RNA, 16 nt, Human adenovirus B [HAdV-B]
gccuucaauuggagca

SEQ ID NO: 1544692 - RNA, 12 nt, Human adenovirus B [HAdV-B]
uacuaauacuac

SEQ ID NO: 1544693 - RNA, 16 nt, Human adenovirus B [HAdV-B]
agcucaugcucuggac

SEQ ID NO: 1544694 - RNA, 18 nt, Human adenovirus B [HAdV-B]
accaauauuuuugcuucu

SEQ ID NO: 1544695 - RNA, 21 nt, Human adenovirus B [HAdV-B]
uccaccgcccaguccugccac

SEQ ID NO: 1544696 - RNA, 18 nt, Human adenovirus B [HAdV-B]
ugaguuuaauggcuagau

SEQ ID NO: 1544697 - RNA, 23 nt, Human adenovirus B [HAdV-B]
agugcggaaccuuugacacugcc

SEQ ID NO: 1544698 - RNA, 20 nt, Human adenovirus B [HAdV-B]
acaugggagccaggaguucc

SEQ ID NO: 1544699 - RNA, 17 nt, Human adenovirus B [HAdV-B]
acuucuccaucagcaga

SEQ ID NO: 1544700 - RNA, 14 nt, Human adenovirus B [HAdV-B]
guacgagagcguga

SEQ ID NO: 1544701 - RNA, 17 nt, Human adenovirus B [HAdV-B]
cagaccucaucuuccca

SEQ ID NO: 1544702 - RNA, 18 nt, Human adenovirus B [HAdV-B]
ugacugucgguagaagaa

SEQ ID NO: 1544703 - RNA, 13 nt, Human adenovirus B [HAdV-B]
caguuacuaugac

SEQ ID NO: 1544704 - RNA, 15 nt, Human adenovirus B [HAdV-B]
uacuggauguuuuau

SEQ ID NO: 1544705 - RNA, 22 nt, Human adenovirus B [HAdV-B]
gcacuuagaagauacugagcag

SEQ ID NO: 1544706 - RNA, 20 nt, Human adenovirus B [HAdV-B]
caaagcgcgugugauggugu

SEQ ID NO: 1544707 - RNA, 23 nt, Human adenovirus B [HAdV-B]
cucgagcaacuucaugucuaugg

SEQ ID NO: 1544708 - RNA, 12 nt, Human adenovirus B [HAdV-B]
acuaucgcagcc

SEQ ID NO: 1544709 - RNA, 16 nt, Human adenovirus B [HAdV-B]
uacguucguucuucuu

SEQ ID NO: 1544710 - RNA, 18 nt, Human adenovirus B [HAdV-B]
acaugcagaauaaaaaag

SEQ ID NO: 1544711 - RNA, 17 nt, Human adenovirus B [HAdV-B]
ccuacaaaacaugcaac

SEQ ID NO: 1544712 - RNA, 21 nt, Human adenovirus B [HAdV-B]
aucaagcggguuaaaaaggac

SEQ ID NO: 1544713 - RNA, 19 nt, Human adenovirus B [HAdV-B]
caagaauuucuacugaaaa

SEQ ID NO: 1544714 - RNA, 11 nt, Human adenovirus B [HAdV-B]
gaagaaaugca

SEQ ID NO: 1544715 - RNA, 11 nt, Human adenovirus B [HAdV-B]
gagcgaagugu

SEQ ID NO: 1544716 - RNA, 14 nt, Human adenovirus B [HAdV-B]
gacuagcagacagg

SEQ ID NO: 1544717 - RNA, 18 nt, Human adenovirus B [HAdV-B]
agccuggaggaacgugaa

SEQ ID NO: 1544718 - RNA, 13 nt, Human adenovirus B [HAdV-B]
ucuuaaagaguag

SEQ ID NO: 1544719 - RNA, 16 nt, Human adenovirus B [HAdV-B]
cacaagacaagccaca

SEQ ID NO: 1544720 - RNA, 11 nt, Human adenovirus B [HAdV-B]
uucuggggagu

SEQ ID NO: 1544721 - RNA, 20 nt, Human adenovirus B [HAdV-B]
cagcuuuugcugugccagaa

SEQ ID NO: 1544722 - RNA, 22 nt, Human adenovirus B [HAdV-B]
gcucuuacugcggaggaggaga

SEQ ID NO: 1544723 - RNA, 20 nt, Human adenovirus B [HAdV-B]
cuaguuguuugccaaaggau

SEQ ID NO: 1544724 - RNA, 17 nt, Human adenovirus B [HAdV-B]
ucugcaaucaugcccac

SEQ ID NO: 1544725 - RNA, 15 nt, Human adenovirus B [HAdV-B]
ucauccuuggcuccg

SEQ ID NO: 1544726 - RNA, 16 nt, Human adenovirus B [HAdV-B]
gcaugcgaaugcggag

SEQ ID NO: 1544727 - RNA, 12 nt, Human adenovirus B [HAdV-B]
gagggcgaagga

SEQ ID NO: 1544728 - RNA, 19 nt, Human adenovirus B [HAdV-B]
cugccuuguaagggcagca

SEQ ID NO: 1544729 - RNA, 17 nt, Human adenovirus B [HAdV-B]
agaguaucauagugcag

SEQ ID NO: 1544730 - RNA, 22 nt, Human adenovirus B [HAdV-B]
ccgggacuguggaccuccgccu

SEQ ID NO: 1544731 - RNA, 19 nt, Human adenovirus B [HAdV-B]
uguaccgcaaugguagugc

SEQ ID NO: 1544732 - RNA, 18 nt, Human adenovirus B [HAdV-B]
aacaucaauugacaugcc

SEQ ID NO: 1544733 - RNA, 15 nt, Human adenovirus B [HAdV-B]
gcuggcggcuccacc

SEQ ID NO: 1544734 - RNA, 16 nt, Human adenovirus B [HAdV-B]
guacgauaccaccagg

SEQ ID NO: 1544735 - RNA, 20 nt, Human adenovirus B [HAdV-B]
aacaccuuagaaaaugcaaa

SEQ ID NO: 1544736 - RNA, 14 nt, Human adenovirus B [HAdV-B]
ugucaaccaggggg

SEQ ID NO: 1544737 - RNA, 16 nt, Human adenovirus B [HAdV-B]
ucgagggucugggcaa

SEQ ID NO: 1544738 - RNA, 16 nt, Human adenovirus B [HAdV-B]
gauuuuggcuggaaug

SEQ ID NO: 1544739 - RNA, 20 nt, Human adenovirus B [HAdV-B]
acuguugguagcuccuuuca

SEQ ID NO: 1544740 - RNA, 14 nt, Human adenovirus B [HAdV-B]
ccgacggugcugca

SEQ ID NO: 1544741 - RNA, 13 nt, Human adenovirus B [HAdV-B]
ccuaugcacuuuu

SEQ ID NO: 1544742 - RNA, 20 nt, Human adenovirus B [HAdV-B]
cacuggcugcccccaccugg

SEQ ID NO: 1544743 - RNA, 20 nt, Human adenovirus B [HAdV-B]
acaugggggugcuggcuggu

SEQ ID NO: 1544744 - RNA, 12 nt, Human adenovirus B [HAdV-B]
cauguccaccug

SEQ ID NO: 1544745 - RNA, 12 nt, Human adenovirus B [HAdV-B]
ugaccacagcaa

SEQ ID NO: 1544746 - RNA, 14 nt, Human adenovirus B [HAdV-B]
uuguucguguugcu

SEQ ID NO: 1544747 - RNA, 21 nt, Human adenovirus B [HAdV-B]
cagcgccaugacagacagagg

SEQ ID NO: 1544748 - RNA, 22 nt, Human adenovirus B [HAdV-B]
ccaaaacaacgagcagauaacu

SEQ ID NO: 1544749 - RNA, 16 nt, Human adenovirus B [HAdV-B]
gcagaacacacucuuc

SEQ ID NO: 1544750 - RNA, 20 nt, Human adenovirus B [HAdV-B]
aaugccuuaaccucuuucug

SEQ ID NO: 1544751 - RNA, 18 nt, Human adenovirus B [HAdV-B]
agccguuaaccccacagc

SEQ ID NO: 1544752 - RNA, 12 nt, Human adenovirus B [HAdV-B]
aaaacaggacua

SEQ ID NO: 1544753 - RNA, 12 nt, Human adenovirus B [HAdV-B]
auucacugcucc

SEQ ID NO: 1544754 - RNA, 18 nt, Human adenovirus B [HAdV-B]
gccaugcuuagggcggcc

SEQ ID NO: 1544755 - RNA, 17 nt, Human adenovirus B [HAdV-B]
gccaaccguugaaggau

SEQ ID NO: 1544756 - RNA, 16 nt, Human adenovirus B [HAdV-B]
auggaagugcaaacug

SEQ ID NO: 1544757 - RNA, 18 nt, Human adenovirus B [HAdV-B]
cuucuccaucagcagaca

SEQ ID NO: 1544758 - RNA, 17 nt, Human adenovirus B [HAdV-B]
gugagcuggccuggaaa

SEQ ID NO: 1544759 - RNA, 17 nt, Human adenovirus B [HAdV-B]
auuccaccagccagguu

SEQ ID NO: 1544760 - RNA, 13 nt, Human adenovirus B [HAdV-B]
aaaccugcugcuu

SEQ ID NO: 1544761 - RNA, 15 nt, Human adenovirus B [HAdV-B]
gugagaauuggaaga

SEQ ID NO: 1544762 - RNA, 17 nt, Human adenovirus B [HAdV-B]
cuguauaggagcauuug

SEQ ID NO: 1544763 - RNA, 15 nt, Human adenovirus B [HAdV-B]
ggaacacgaggaaga

SEQ ID NO: 1544764 - RNA, 16 nt, Human adenovirus B [HAdV-B]
agaagcagaccugugu

SEQ ID NO: 1544765 - RNA, 18 nt, Human adenovirus B [HAdV-B]
cuugggugggagaggaag

SEQ ID NO: 1544766 - RNA, 16 nt, Human adenovirus B [HAdV-B]
auuguguuucaagcag

SEQ ID NO: 1544767 - RNA, 13 nt, Human adenovirus B [HAdV-B]
acguuuuggauuu

SEQ ID NO: 1544768 - RNA, 22 nt, Human adenovirus B [HAdV-B]
cagccagaaccucagcugggag

SEQ ID NO: 1544769 - RNA, 22 nt, Human adenovirus B [HAdV-B]
gcaagguaauuaaauccacacu

SEQ ID NO: 1544770 - RNA, 20 nt, Human adenovirus B [HAdV-B]
cauggaugagcaucacagcg

SEQ ID NO: 1544771 - RNA, 17 nt, Human adenovirus B [HAdV-B]
cucaaccccagcugccu

SEQ ID NO: 1544772 - RNA, 22 nt, Human adenovirus B [HAdV-B]
ucuacuggucgcuuccagacau

SEQ ID NO: 1544773 - RNA, 12 nt, Human adenovirus B [HAdV-B]
cacacagcagcg

SEQ ID NO: 1544774 - RNA, 19 nt, Human adenovirus B [HAdV-B]
agcugacuugucuccugaa

SEQ ID NO: 1544775 - RNA, 21 nt, Human adenovirus B [HAdV-B]
ugcuuaacaauuuucgcucuu

SEQ ID NO: 1544776 - RNA, 23 nt, Human adenovirus B [HAdV-B]
agugcccaucaguguggaagagc

SEQ ID NO: 1544777 - RNA, 22 nt, Human adenovirus B [HAdV-B]
ucgguccuuccagggucucagu

SEQ ID NO: 1544778 - RNA, 12 nt, Human adenovirus B [HAdV-B]
gacagauaaaga

SEQ ID NO: 1544779 - RNA, 19 nt, Human adenovirus B [HAdV-B]
agagcgugaugcagcagca

SEQ ID NO: 1544780 - RNA, 22 nt, Human adenovirus B [HAdV-B]
acagcggcggcgaccuccaaca

SEQ ID NO: 1544781 - RNA, 14 nt, Human adenovirus B [HAdV-B]
gaaacgcuuucuag

SEQ ID NO: 1544782 - RNA, 23 nt, Human adenovirus B [HAdV-B]
uaacaggaauuuuugacaugaac

SEQ ID NO: 1544783 - RNA, 21 nt, Human adenovirus B [HAdV-B]
uccgaccuggaaggcggauga

SEQ ID NO: 1544784 - RNA, 13 nt, Human adenovirus B [HAdV-B]
auggugggucuuu

SEQ ID NO: 1544785 - RNA, 19 nt, Human adenovirus B [HAdV-B]
gugaaaguguuguuggaac

SEQ ID NO: 1544786 - RNA, 16 nt, Human adenovirus B [HAdV-B]
cuugcaacauacaaaa

SEQ ID NO: 1544787 - RNA, 12 nt, Human adenovirus B [HAdV-B]
accccaggccaa

SEQ ID NO: 1544788 - RNA, 15 nt, Human adenovirus B [HAdV-B]
caaguugaucaugcc

SEQ ID NO: 1544789 - RNA, 15 nt, Human adenovirus B [HAdV-B]
uugaguacucagccu

SEQ ID NO: 1544790 - RNA, 12 nt, Human adenovirus B [HAdV-B]
cgccagcagcag

SEQ ID NO: 1544791 - RNA, 18 nt, Human adenovirus B [HAdV-B]
ugucacccucuucaacau

SEQ ID NO: 1544792 - RNA, 14 nt, Human adenovirus B [HAdV-B]
agugcaaacugaac

SEQ ID NO: 1544793 - RNA, 20 nt, Human adenovirus B [HAdV-B]
gguggaacacgaggaagagu

SEQ ID NO: 1544794 - RNA, 22 nt, Human adenovirus B [HAdV-B]
aagaaaucggaucuuuccaacc

SEQ ID NO: 1544795 - RNA, 14 nt, Human adenovirus B [HAdV-B]
ucuccuaggcagag

SEQ ID NO: 1544796 - RNA, 22 nt, Human adenovirus B [HAdV-B]
gggugcuaccgcggcugagccc

SEQ ID NO: 1544797 - RNA, 21 nt, Human adenovirus B [HAdV-B]
aauugacaugcccuuggcucu

SEQ ID NO: 1544798 - RNA, 22 nt, Human adenovirus B [HAdV-B]
cuggaggacagucuggaggaag

SEQ ID NO: 1544799 - RNA, 15 nt, Human adenovirus B [HAdV-B]
gccuacugccaccuc

SEQ ID NO: 1544800 - RNA, 15 nt, Human adenovirus B [HAdV-B]
gucaaguguuucuug

SEQ ID NO: 1544801 - RNA, 14 nt, Human adenovirus B [HAdV-B]
uuagcuauuugcac

SEQ ID NO: 1544802 - RNA, 18 nt, Human adenovirus B [HAdV-B]
ccuacggaagccagcacc

SEQ ID NO: 1544803 - RNA, 16 nt, Human adenovirus B [HAdV-B]
ccaccugcugcgcacu

SEQ ID NO: 1544804 - RNA, 16 nt, Human adenovirus B [HAdV-B]
cagcagcccuucucua

SEQ ID NO: 1544805 - RNA, 19 nt, Human adenovirus B [HAdV-B]
uaucuaacguggaacucac

SEQ ID NO: 1544806 - RNA, 14 nt, Human adenovirus B [HAdV-B]
ugcauucacugcuc

SEQ ID NO: 1544807 - RNA, 20 nt, Human adenovirus B [HAdV-B]
aggcagaguuucuuguaaaa

SEQ ID NO: 1544808 - RNA, 17 nt, Human adenovirus B [HAdV-B]
aaccuuugacacugccg

SEQ ID NO: 1544809 - RNA, 16 nt, Human adenovirus B [HAdV-B]
acagauggauaaauca

SEQ ID NO: 1544810 - RNA, 15 nt, Human adenovirus B [HAdV-B]
gcuucgugcccguug

SEQ ID NO: 1544811 - RNA, 20 nt, Human adenovirus B [HAdV-B]
ugucagcauugucacugccg

SEQ ID NO: 1544812 - RNA, 17 nt, Human adenovirus B [HAdV-B]
agucggcggacauugcu

SEQ ID NO: 1544813 - RNA, 22 nt, Human adenovirus B [HAdV-B]
gacaauggaugguuuacaaaac

SEQ ID NO: 1544814 - RNA, 17 nt, Human adenovirus B [HAdV-B]
gacaaugaggcuuucag

SEQ ID NO: 1544815 - RNA, 14 nt, Human adenovirus B [HAdV-B]
gugacgcugccacc

SEQ ID NO: 1544816 - RNA, 14 nt, Human adenovirus B [HAdV-B]
gucuuguugccauc

SEQ ID NO: 1544817 - RNA, 17 nt, Human adenovirus B [HAdV-B]
gcaggaugugagcuucc

SEQ ID NO: 1544818 - RNA, 21 nt, Human adenovirus B [HAdV-B]
acaaagcccaaacggaguucu

SEQ ID NO: 1544819 - RNA, 19 nt, Human adenovirus B [HAdV-B]
gaggguaaaccagugguca

SEQ ID NO: 1544820 - RNA, 15 nt, Human adenovirus B [HAdV-B]
gccgccggucccacu

SEQ ID NO: 1544821 - RNA, 11 nt, Human adenovirus B [HAdV-B]
agaaaaaaaca

SEQ ID NO: 1544822 - RNA, 19 nt, Human adenovirus B [HAdV-B]
ccuguagaaaaagauagua

SEQ ID NO: 1544823 - RNA, 18 nt, Human adenovirus B [HAdV-B]
gcuucacacaaagcccaa

SEQ ID NO: 1544824 - RNA, 15 nt, Human adenovirus B [HAdV-B]
cagccuccaaaggcc

SEQ ID NO: 1544825 - RNA, 14 nt, Human adenovirus B [HAdV-B]
cggagggcagaaac

SEQ ID NO: 1544826 - RNA, 15 nt, Human adenovirus B [HAdV-B]
ucccucuaaauacac

SEQ ID NO: 1544827 - RNA, 22 nt, Human adenovirus B [HAdV-B]
acucucccagggauuuggaaga

SEQ ID NO: 1544828 - RNA, 13 nt, Human adenovirus B [HAdV-B]
ggcggcuccaccc

SEQ ID NO: 1544829 - RNA, 20 nt, Human adenovirus B [HAdV-B]
uuuuaauagcccuuaacauc

SEQ ID NO: 1544830 - RNA, 20 nt, Human adenovirus B [HAdV-B]
auucauuuuucagaaacuuc

SEQ ID NO: 1544831 - RNA, 21 nt, Human adenovirus B [HAdV-B]
agcucaugcucuggacaugac

SEQ ID NO: 1544832 - RNA, 14 nt, Human adenovirus B [HAdV-B]
gaacaacugccgua

SEQ ID NO: 1544833 - RNA, 17 nt, Human adenovirus B [HAdV-B]
gcgccgcgacggcagga

SEQ ID NO: 1544834 - RNA, 20 nt, Human adenovirus B [HAdV-B]
ugcagcacuggacaugacag

SEQ ID NO: 1544835 - RNA, 14 nt, Human adenovirus B [HAdV-B]
gcggcgcugcagag

SEQ ID NO: 1544836 - RNA, 14 nt, Human adenovirus B [HAdV-B]
aaaacaugcaacau

SEQ ID NO: 1544837 - RNA, 17 nt, Human adenovirus B [HAdV-B]
ucgcaaugacagaaugc

SEQ ID NO: 1544838 - RNA, 18 nt, Human adenovirus B [HAdV-B]
cuugagcagcuuuucgua

SEQ ID NO: 1544839 - RNA, 22 nt, Human adenovirus B [HAdV-B]
cgguacaccggauugcagcacu

SEQ ID NO: 1544840 - RNA, 23 nt, Human adenovirus B [HAdV-B]
ucagaugcaucccgugcugcgac

SEQ ID NO: 1544841 - RNA, 18 nt, Human adenovirus B [HAdV-B]
ggcgcuccucguccaaau

SEQ ID NO: 1544842 - RNA, 22 nt, Human adenovirus B [HAdV-B]
cagcagugucgcuaacaauaca

SEQ ID NO: 1544843 - RNA, 18 nt, Human adenovirus B [HAdV-B]
auaccgcaaccaaaauau

SEQ ID NO: 1544844 - RNA, 17 nt, Human adenovirus B [HAdV-B]
gaaugagccuaacagga

SEQ ID NO: 1544845 - RNA, 22 nt, Human adenovirus B [HAdV-B]
cagucuuuccaucacaagacaa

SEQ ID NO: 1544846 - RNA, 16 nt, Human adenovirus B [HAdV-B]
ccaaacggcaccugcg

SEQ ID NO: 1544847 - RNA, 14 nt, Human adenovirus B [HAdV-B]
ugcacuuuuugcuu

SEQ ID NO: 1544848 - RNA, 11 nt, Human adenovirus B [HAdV-B]
cgauuuggaag

SEQ ID NO: 1544849 - RNA, 13 nt, Human adenovirus B [HAdV-B]
gguggcuuccagc

SEQ ID NO: 1544850 - RNA, 16 nt, Human adenovirus B [HAdV-B]
cuuucucuagcagcag

SEQ ID NO: 1544851 - RNA, 13 nt, Human adenovirus B [HAdV-B]
ugcaaaacaauga

SEQ ID NO: 1544852 - RNA, 16 nt, Human adenovirus B [HAdV-B]
cuucaacauccaggaa

SEQ ID NO: 1544853 - RNA, 15 nt, Human adenovirus B [HAdV-B]
cagcgacggaugucu

SEQ ID NO: 1544854 - RNA, 12 nt, Human adenovirus B [HAdV-B]
gucaccugcgga

SEQ ID NO: 1544855 - RNA, 15 nt, Human adenovirus B [HAdV-B]
cagacuagcagacag

SEQ ID NO: 1544856 - RNA, 14 nt, Human adenovirus B [HAdV-B]
uggaaacucagcca

SEQ ID NO: 1544857 - RNA, 18 nt, Human adenovirus B [HAdV-B]
agccaacgagccagcgca

SEQ ID NO: 1544858 - RNA, 17 nt, Human adenovirus B [HAdV-B]
accggauugcagcacug

SEQ ID NO: 1544859 - RNA, 22 nt, Human adenovirus B [HAdV-B]
gaaucagaaugacccgcaggca

SEQ ID NO: 1544860 - RNA, 16 nt, Human adenovirus B [HAdV-B]
guuccuggacauugcu

SEQ ID NO: 1544861 - RNA, 20 nt, Human adenovirus B [HAdV-B]
cgccuucaauuggagcagua

SEQ ID NO: 1544862 - RNA, 22 nt, Human adenovirus B [HAdV-B]
aacucugaccacucugauacaa

SEQ ID NO: 1544863 - RNA, 18 nt, Human adenovirus B [HAdV-B]
uccggaucuccugggcau

SEQ ID NO: 1544864 - RNA, 17 nt, Human adenovirus B [HAdV-B]
agugccaucacaucucg

SEQ ID NO: 1544865 - RNA, 22 nt, Human adenovirus B [HAdV-B]
uugagcugggaugggugcauuc

SEQ ID NO: 1544866 - RNA, 19 nt, Human adenovirus B [HAdV-B]
ccacgccuuacauguggag

SEQ ID NO: 1544867 - RNA, 15 nt, Human adenovirus B [HAdV-B]
cuggagugucacugc

SEQ ID NO: 1544868 - RNA, 23 nt, Human adenovirus B [HAdV-B]
uguguccuccaagauuuuccaug

SEQ ID NO: 1544869 - RNA, 17 nt, Human adenovirus B [HAdV-B]
gccguagacgccagcgc

SEQ ID NO: 1544870 - RNA, 20 nt, Human adenovirus B [HAdV-B]
gcugacuugucuccugaacu

SEQ ID NO: 1544871 - RNA, 18 nt, Human adenovirus B [HAdV-B]
cggaucgcuguccaggaa

SEQ ID NO: 1544872 - RNA, 14 nt, Human adenovirus B [HAdV-B]
cagugcaggcagca

SEQ ID NO: 1544873 - RNA, 13 nt, Human adenovirus B [HAdV-B]
gccauuugccauu

SEQ ID NO: 1544874 - RNA, 15 nt, Human adenovirus B [HAdV-B]
gcugcagagccagcc

SEQ ID NO: 1544875 - RNA, 16 nt, Human adenovirus B [HAdV-B]
aucauagugcaggagc

SEQ ID NO: 1544876 - RNA, 14 nt, Human adenovirus B [HAdV-B]
gguagacagaaugg

SEQ ID NO: 1544877 - RNA, 21 nt, Human adenovirus B [HAdV-B]
gcucuuaccaccacgccccgc

SEQ ID NO: 1544878 - RNA, 20 nt, Human adenovirus B [HAdV-B]
ucaacaauaccuguguagau

SEQ ID NO: 1544879 - RNA, 21 nt, Human adenovirus B [HAdV-B]
ugcaaguccuuuuccuagucu

SEQ ID NO: 1544880 - RNA, 14 nt, Human adenovirus B [HAdV-B]
cuggcuaccuauca

SEQ ID NO: 1544881 - RNA, 14 nt, Human adenovirus B [HAdV-B]
ugaugaaaugacag

SEQ ID NO: 1544882 - RNA, 18 nt, Human adenovirus B [HAdV-B]
cccugccguugcgcagca

SEQ ID NO: 1544883 - RNA, 12 nt, Human adenovirus B [HAdV-B]
acgcccaggccg

SEQ ID NO: 1544884 - RNA, 22 nt, Human adenovirus B [HAdV-B]
ccagaacaccuuagaaaaugca

SEQ ID NO: 1544885 - RNA, 17 nt, Human adenovirus B [HAdV-B]
gcuugggcgcuugccag

SEQ ID NO: 1544886 - RNA, 23 nt, Human adenovirus B [HAdV-B]
aacagugcaggcagcagcuccuu

SEQ ID NO: 1544887 - RNA, 17 nt, Human adenovirus B [HAdV-B]
ugcccaggacuuuuuga

SEQ ID NO: 1544888 - RNA, 18 nt, Human adenovirus B [HAdV-B]
ggugacgcggcugagcua

SEQ ID NO: 1544889 - RNA, 18 nt, Human adenovirus B [HAdV-B]
cuuucagacuagcagaca

SEQ ID NO: 1544890 - RNA, 23 nt, Human adenovirus B [HAdV-B]
ccauucucgagcugccagugcgc

SEQ ID NO: 1544891 - RNA, 22 nt, Human adenovirus B [HAdV-B]
aacugcccaaaacaacgagcag

SEQ ID NO: 1544892 - RNA, 14 nt, Human adenovirus B [HAdV-B]
aggucgcagugcau

SEQ ID NO: 1544893 - RNA, 14 nt, Human adenovirus B [HAdV-B]
uuacaaccagaaga

SEQ ID NO: 1544894 - RNA, 14 nt, Human adenovirus B [HAdV-B]
uggggcgaagagcc

SEQ ID NO: 1544895 - RNA, 21 nt, Human adenovirus B [HAdV-B]
accugaagucuacggccaacc

SEQ ID NO: 1544896 - RNA, 23 nt, Human adenovirus B [HAdV-B]
aucccgacgaaaguacgguccag

SEQ ID NO: 1544897 - RNA, 16 nt, Human adenovirus B [HAdV-B]
aguaguuauuuugccu

SEQ ID NO: 1544898 - RNA, 19 nt, Human adenovirus B [HAdV-B]
cccaguccugccaccaccu

SEQ ID NO: 1544899 - RNA, 23 nt, Human adenovirus B [HAdV-B]
ggcggaugaaggcgaggaggaag

SEQ ID NO: 1544900 - RNA, 22 nt, Human adenovirus B [HAdV-B]
ccggccggagccgcggcuaacg

SEQ ID NO: 1544901 - RNA, 15 nt, Human adenovirus B [HAdV-B]
agguggacgagcaga

SEQ ID NO: 1544902 - RNA, 23 nt, Human adenovirus B [HAdV-B]
ccaucuauuauuccuacuccugg

SEQ ID NO: 1544903 - RNA, 15 nt, Human adenovirus B [HAdV-B]
ucggcugcggagaca

SEQ ID NO: 1544904 - RNA, 18 nt, Human adenovirus B [HAdV-B]
cacagccaaucaccacac

SEQ ID NO: 1544905 - RNA, 13 nt, Human adenovirus B [HAdV-B]
gcaaggacaacau

SEQ ID NO: 1544906 - RNA, 23 nt, Human adenovirus B [HAdV-B]
aaaucaaguguuuuuauuucauu

SEQ ID NO: 1544907 - RNA, 14 nt, Human adenovirus B [HAdV-B]
ccuuugacacugcc

SEQ ID NO: 1544908 - RNA, 21 nt, Human adenovirus B [HAdV-B]
uagacacggcuuugugcggca

SEQ ID NO: 1544909 - RNA, 19 nt, Human adenovirus B [HAdV-B]
auuaacaaacugcuggacu

SEQ ID NO: 1544910 - RNA, 21 nt, Human adenovirus B [HAdV-B]
cuccccaaggaucacccucaa

SEQ ID NO: 1544911 - RNA, 19 nt, Human adenovirus B [HAdV-B]
agaaacauaucccagggaa

SEQ ID NO: 1544912 - RNA, 19 nt, Human adenovirus B [HAdV-B]
cgcgcagauggcaucucuc

SEQ ID NO: 1544913 - RNA, 15 nt, Human adenovirus B [HAdV-B]
ggcaauucuggccca

SEQ ID NO: 1544914 - RNA, 16 nt, Human adenovirus B [HAdV-B]
caggacuacuccaccc

SEQ ID NO: 1544915 - RNA, 19 nt, Human adenovirus B [HAdV-B]
gcuagugaucgcacugcuu

SEQ ID NO: 1544916 - RNA, 14 nt, Human adenovirus B [HAdV-B]
uggacccaggccau

SEQ ID NO: 1544917 - RNA, 23 nt, Human adenovirus B [HAdV-B]
cuggccaacuaucucuccuacca

SEQ ID NO: 1544918 - RNA, 13 nt, Human adenovirus B [HAdV-B]
aagaaaugcauau

SEQ ID NO: 1544919 - RNA, 14 nt, Human adenovirus B [HAdV-B]
ccaggggguccacc

SEQ ID NO: 1544920 - RNA, 16 nt, Human adenovirus B [HAdV-B]
ugagcugggaugggug

SEQ ID NO: 1544921 - RNA, 18 nt, Human adenovirus B [HAdV-B]
acuucaacaaucagcauu

SEQ ID NO: 1544922 - RNA, 17 nt, Human adenovirus B [HAdV-B]
aucugcaacaaaacaaa

SEQ ID NO: 1544923 - RNA, 18 nt, Human adenovirus B [HAdV-B]
ugauuuaaaaucaagugu

SEQ ID NO: 1544924 - RNA, 16 nt, Human adenovirus B [HAdV-B]
gucuacccguuucuug

SEQ ID NO: 1544925 - RNA, 14 nt, Human adenovirus B [HAdV-B]
agacauaaaugcau

SEQ ID NO: 1544926 - RNA, 13 nt, Human adenovirus B [HAdV-B]
cgccaccugcugc

SEQ ID NO: 1544927 - RNA, 20 nt, Human adenovirus B [HAdV-B]
aggagaaauauucacuggaa

SEQ ID NO: 1544928 - RNA, 20 nt, Human adenovirus B [HAdV-B]
gauuugauauugacagugcc

SEQ ID NO: 1544929 - RNA, 22 nt, Human adenovirus B [HAdV-B]
cagaguaucauagugcaggagc

SEQ ID NO: 1544930 - RNA, 22 nt, Human adenovirus B [HAdV-B]
gagcuucuacaacgaacaagcu

SEQ ID NO: 1544931 - RNA, 13 nt, Human adenovirus B [HAdV-B]
auaagaaugccau

SEQ ID NO: 1544932 - RNA, 15 nt, Human adenovirus B [HAdV-B]
guccggcccacggag

SEQ ID NO: 1544933 - RNA, 17 nt, Human adenovirus B [HAdV-B]
agccacagcaaccccag

SEQ ID NO: 1544934 - RNA, 18 nt, Human adenovirus B [HAdV-B]
uaccagacaaaguacagc

SEQ ID NO: 1544935 - RNA, 23 nt, Human adenovirus B [HAdV-B]
ugguuagcucauaggagcuggcu

SEQ ID NO: 1544936 - RNA, 14 nt, Human adenovirus B [HAdV-B]
agggaaaaguacag

SEQ ID NO: 1544937 - RNA, 16 nt, Human adenovirus B [HAdV-B]
ugcagcaacaggagga

SEQ ID NO: 1544938 - RNA, 12 nt, Human adenovirus B [HAdV-B]
auugccacagcu

SEQ ID NO: 1544939 - RNA, 15 nt, Human adenovirus B [HAdV-B]
gaaauuuucucccag

SEQ ID NO: 1544940 - RNA, 23 nt, Human adenovirus B [HAdV-B]
uauuuugauuaagggaaaugcca

SEQ ID NO: 1544941 - RNA, 17 nt, Human adenovirus B [HAdV-B]
acccaauauaaccuucc

SEQ ID NO: 1544942 - RNA, 18 nt, Human adenovirus B [HAdV-B]
auuugugugacagugcaa

SEQ ID NO: 1544943 - RNA, 21 nt, Human adenovirus B [HAdV-B]
gcaaugcgggcggcgcugcag

SEQ ID NO: 1544944 - RNA, 17 nt, Human adenovirus B [HAdV-B]
ggcucucuucaacaagu

SEQ ID NO: 1544945 - RNA, 19 nt, Human adenovirus B [HAdV-B]
uuuccaucauguuugacuc

SEQ ID NO: 1544946 - RNA, 17 nt, Human adenovirus B [HAdV-B]
cgaugggucuucuccug

SEQ ID NO: 1544947 - RNA, 17 nt, Human adenovirus B [HAdV-B]
aaagcacaagcucuaaa

SEQ ID NO: 1544948 - RNA, 21 nt, Human adenovirus B [HAdV-B]
cgugcagcuucgggcgccagc

SEQ ID NO: 1544949 - RNA, 19 nt, Human adenovirus B [HAdV-B]
uugaugaacaaugccauca

SEQ ID NO: 1544950 - RNA, 17 nt, Human adenovirus B [HAdV-B]
auuaucaccaaacugcu

SEQ ID NO: 1544951 - RNA, 16 nt, Human adenovirus B [HAdV-B]
cgcugcaaucugugca

SEQ ID NO: 1544952 - RNA, 20 nt, Human adenovirus B [HAdV-B]
ugaggccacaacgcacagcc

SEQ ID NO: 1544953 - RNA, 17 nt, Human adenovirus B [HAdV-B]
ucuguauugcaggagaa

SEQ ID NO: 1544954 - RNA, 17 nt, Human adenovirus B [HAdV-B]
augaacaaugccaucau

SEQ ID NO: 1544955 - RNA, 14 nt, Human adenovirus B [HAdV-B]
agugcaauguaaua

SEQ ID NO: 1544956 - RNA, 18 nt, Human adenovirus B [HAdV-B]
uacaacucccuggcuccu

SEQ ID NO: 1544957 - RNA, 14 nt, Human adenovirus B [HAdV-B]
cagcgcugccaggg

SEQ ID NO: 1544958 - RNA, 23 nt, Human adenovirus B [HAdV-B]
ucacaaaaggcugucccugcaac

SEQ ID NO: 1544959 - RNA, 23 nt, Human adenovirus B [HAdV-B]
cuaauaauaauaugcaugcuuuu

SEQ ID NO: 1544960 - RNA, 23 nt, Human adenovirus B [HAdV-B]
caggaugucccaacgacgagaaa

SEQ ID NO: 1544961 - RNA, 16 nt, Human adenovirus B [HAdV-B]
gcaauccccacuggag

SEQ ID NO: 1544962 - RNA, 13 nt, Human adenovirus B [HAdV-B]
accguuucugggg

SEQ ID NO: 1544963 - RNA, 12 nt, Human adenovirus B [HAdV-B]
ucacuccacagc

SEQ ID NO: 1544964 - RNA, 16 nt, Human adenovirus B [HAdV-B]
ggcgcuugccagggug

SEQ ID NO: 1544965 - RNA, 18 nt, Human adenovirus B [HAdV-B]
agauugggacagucaggc

SEQ ID NO: 1544966 - RNA, 13 nt, Human adenovirus B [HAdV-B]
gauugcuggaaua

SEQ ID NO: 1544967 - RNA, 18 nt, Human adenovirus B [HAdV-B]
cccuacggaagccagcac

SEQ ID NO: 1544968 - RNA, 23 nt, Human adenovirus B [HAdV-B]
ucuacggccaaccguugaaggau

SEQ ID NO: 1544969 - RNA, 19 nt, Human adenovirus B [HAdV-B]
cuacggaagccagcaccca

SEQ ID NO: 1544970 - RNA, 14 nt, Human adenovirus B [HAdV-B]
cuucccucuuccca

SEQ ID NO: 1544971 - RNA, 17 nt, Human adenovirus B [HAdV-B]
ccaaggaugagacagug

SEQ ID NO: 1544972 - RNA, 21 nt, Human adenovirus B [HAdV-B]
guaucagaaaaaaacagccau

SEQ ID NO: 1544973 - RNA, 13 nt, Human adenovirus B [HAdV-B]
cuggaggaggaac

SEQ ID NO: 1544974 - RNA, 19 nt, Human adenovirus B [HAdV-B]
cggcgaggagccggaggag

SEQ ID NO: 1544975 - RNA, 20 nt, Human adenovirus B [HAdV-B]
gugaugcagcagcagcaggc

SEQ ID NO: 1544976 - RNA, 15 nt, Human adenovirus B [HAdV-B]
cgggcggcgcugcag

SEQ ID NO: 1544977 - RNA, 15 nt, Human adenovirus B [HAdV-B]
cgcccaguccugcca

SEQ ID NO: 1544978 - RNA, 16 nt, Human adenovirus B [HAdV-B]
ugcaaagagcucugac

SEQ ID NO: 1544979 - RNA, 13 nt, Human adenovirus B [HAdV-B]
caugaacaugcaa

SEQ ID NO: 1544980 - RNA, 18 nt, Human adenovirus B [HAdV-B]
uuccuggauacacggcuc

SEQ ID NO: 1544981 - RNA, 20 nt, Human adenovirus B [HAdV-B]
ugacagugccgguugagaug

SEQ ID NO: 1544982 - RNA, 15 nt, Human adenovirus B [HAdV-B]
aaccccacagccaau

SEQ ID NO: 1544983 - RNA, 21 nt, Human adenovirus B [HAdV-B]
aguucuugugguaaauccaau

SEQ ID NO: 1544984 - RNA, 17 nt, Human adenovirus B [HAdV-B]
ugaaacucacuauucaa

SEQ ID NO: 1544985 - RNA, 21 nt, Human adenovirus B [HAdV-B]
ccucagagcgaaguguaucag

SEQ ID NO: 1544986 - RNA, 14 nt, Human adenovirus B [HAdV-B]
ucaguccugccagg

SEQ ID NO: 1544987 - RNA, 15 nt, Human adenovirus B [HAdV-B]
ccacuaccacauucc

SEQ ID NO: 1544988 - RNA, 15 nt, Human adenovirus B [HAdV-B]
gcgaccuccaacaga

SEQ ID NO: 1544989 - RNA, 23 nt, Human adenovirus B [HAdV-B]
cagcauuguggagaacauggaag

SEQ ID NO: 1544990 - RNA, 17 nt, Human adenovirus B [HAdV-B]
acaugaaucaugugaaa

SEQ ID NO: 1544991 - RNA, 23 nt, Human adenovirus B [HAdV-B]
guuucacauuccaccagccaggu

SEQ ID NO: 1544992 - RNA, 19 nt, Human adenovirus B [HAdV-B]
aacagugcaggcagcagcu

SEQ ID NO: 1544993 - RNA, 13 nt, Human adenovirus B [HAdV-B]
uggaucccaugga

SEQ ID NO: 1544994 - RNA, 18 nt, Human adenovirus B [HAdV-B]
ccuaguguaccaggaaag

SEQ ID NO: 1544995 - RNA, 23 nt, Human adenovirus B [HAdV-B]
cgacgaggaaaaggagcagagcu

SEQ ID NO: 1544996 - RNA, 20 nt, Human adenovirus B [HAdV-B]
acuuccgcaaucccaacagg

SEQ ID NO: 1544997 - RNA, 23 nt, Human adenovirus B [HAdV-B]
ccgccuaugaucuggacuuggaa

SEQ ID NO: 1544998 - RNA, 14 nt, Human adenovirus B [HAdV-B]
cgcagggcucugag

SEQ ID NO: 1544999 - RNA, 14 nt, Human adenovirus B [HAdV-B]
ccucggcugcggag

SEQ ID NO: 1545000 - RNA, 15 nt, Human adenovirus B [HAdV-B]
gcgcugcagagccag

SEQ ID NO: 1545001 - RNA, 16 nt, Human adenovirus B [HAdV-B]
uuaagauucccacuga

SEQ ID NO: 1545002 - RNA, 15 nt, Human adenovirus B [HAdV-B]
caguacaagcgcaga

SEQ ID NO: 1545003 - RNA, 22 nt, Human adenovirus B [HAdV-B]
uuacuugaaaguggguagacag

SEQ ID NO: 1545004 - RNA, 22 nt, Human adenovirus B [HAdV-B]
cuucuuucagacuagcagacag

SEQ ID NO: 1545005 - RNA, 22 nt, Human adenovirus B [HAdV-B]
gucuugacugaugucuugcaug

SEQ ID NO: 1545006 - RNA, 14 nt, Human adenovirus B [HAdV-B]
cuguaccugugcca

SEQ ID NO: 1545007 - RNA, 12 nt, Human adenovirus B [HAdV-B]
accuaugugaac

SEQ ID NO: 1545008 - RNA, 12 nt, Human adenovirus B [HAdV-B]
gaucggacaggg

SEQ ID NO: 1545009 - RNA, 15 nt, Human adenovirus B [HAdV-B]
uuuuccgccauauuu

SEQ ID NO: 1545010 - RNA, 21 nt, Human adenovirus B [HAdV-B]
caucaaccucuaugcuacuuu

SEQ ID NO: 1545011 - RNA, 19 nt, Human adenovirus B [HAdV-B]
ucgaguuuacuuugccaga

SEQ ID NO: 1545012 - RNA, 20 nt, Human adenovirus B [HAdV-B]
acuuacuugaaaucagcaau

SEQ ID NO: 1545013 - RNA, 15 nt, Human adenovirus B [HAdV-B]
ucucacuugccaccc

SEQ ID NO: 1545014 - RNA, 22 nt, Human adenovirus B [HAdV-B]
aacauguugguuggagccugag

SEQ ID NO: 1545015 - RNA, 17 nt, Human adenovirus B [HAdV-B]
gacaauuggaauaucua

SEQ ID NO: 1545016 - RNA, 17 nt, Human adenovirus B [HAdV-B]
ucagccagaaccucagc

SEQ ID NO: 1545017 - RNA, 17 nt, Human adenovirus B [HAdV-B]
uuacuaccgucaccucc

SEQ ID NO: 1545018 - RNA, 19 nt, Human adenovirus B [HAdV-B]
ugcggcaucgcagaaaaca

SEQ ID NO: 1545019 - RNA, 18 nt, Human adenovirus B [HAdV-B]
ugcuauuaguuacuucaa

SEQ ID NO: 1545020 - RNA, 20 nt, Human adenovirus B [HAdV-B]
gcgacagggaacugaugcac

SEQ ID NO: 1545021 - RNA, 16 nt, Human adenovirus B [HAdV-B]
cccagagcgucucagg

SEQ ID NO: 1545022 - RNA, 11 nt, Human adenovirus B [HAdV-B]
uaugaaaucaa

SEQ ID NO: 1545023 - RNA, 19 nt, Human adenovirus B [HAdV-B]
ucggcuuacgagcagacag

SEQ ID NO: 1545024 - RNA, 22 nt, Human adenovirus B [HAdV-B]
accuauacacaccuugcuucac

SEQ ID NO: 1545025 - RNA, 12 nt, Human adenovirus B [HAdV-B]
uacuuucucuag

SEQ ID NO: 1545026 - RNA, 22 nt, Human adenovirus B [HAdV-B]
gaagacaguuuggaggaggaaa

SEQ ID NO: 1545027 - RNA, 22 nt, Human adenovirus B [HAdV-B]
cucgaaaacugguuagcugcac

SEQ ID NO: 1545028 - RNA, 22 nt, Human adenovirus B [HAdV-B]
augcguguuggauugccacagc

SEQ ID NO: 1545029 - RNA, 19 nt, Human adenovirus B [HAdV-B]
gguguaucgcaaugacaga

SEQ ID NO: 1545030 - RNA, 19 nt, Human adenovirus B [HAdV-B]
ccagaucuucagcauuggc

SEQ ID NO: 1545031 - RNA, 18 nt, Human adenovirus B [HAdV-B]
acgaggaaaaggagcaga

SEQ ID NO: 1545032 - RNA, 14 nt, Human adenovirus B [HAdV-B]
ucuccuccuaguga

SEQ ID NO: 1545033 - RNA, 15 nt, Human adenovirus B [HAdV-B]
agauugcccaggacu

SEQ ID NO: 1545034 - RNA, 15 nt, Human adenovirus B [HAdV-B]
cauacaauccagaca

SEQ ID NO: 1545035 - RNA, 13 nt, Human adenovirus B [HAdV-B]
gcuucuugcaaau

SEQ ID NO: 1545036 - RNA, 13 nt, Human adenovirus B [HAdV-B]
aacgagccagcgc

SEQ ID NO: 1545037 - RNA, 15 nt, Human adenovirus B [HAdV-B]
aggcgcugcugaaca

SEQ ID NO: 1545038 - RNA, 16 nt, Human adenovirus B [HAdV-B]
gccuacugccaccucc

SEQ ID NO: 1545039 - RNA, 21 nt, Human adenovirus B [HAdV-B]
cgcuaacaauacaauuuccaa

SEQ ID NO: 1545040 - RNA, 13 nt, Human adenovirus B [HAdV-B]
gagcccagcaugu

SEQ ID NO: 1545041 - RNA, 16 nt, Human adenovirus B [HAdV-B]
ccaccagguuguaucu

SEQ ID NO: 1545042 - RNA, 16 nt, Human adenovirus B [HAdV-B]
ggcacuucagcuugcc

SEQ ID NO: 1545043 - RNA, 17 nt, Human adenovirus B [HAdV-B]
ugauuugcggugcuucc

SEQ ID NO: 1545044 - RNA, 18 nt, Human adenovirus B [HAdV-B]
agacaaggcaguuauuag

SEQ ID NO: 1545045 - RNA, 21 nt, Human adenovirus B [HAdV-B]
agugguugacuugcaggacag

SEQ ID NO: 1545046 - RNA, 14 nt, Human adenovirus B [HAdV-B]
auuccaccagccag

SEQ ID NO: 1545047 - RNA, 14 nt, Human adenovirus B [HAdV-B]
cccgccgccagcaa

SEQ ID NO: 1545048 - RNA, 20 nt, Human adenovirus B [HAdV-B]
aaagcuauucguccagauga

SEQ ID NO: 1545049 - RNA, 17 nt, Human adenovirus B [HAdV-B]
uuagaagauacugagca

SEQ ID NO: 1545050 - RNA, 18 nt, Human adenovirus B [HAdV-B]
cagcuccuuuagccagag

SEQ ID NO: 1545051 - RNA, 20 nt, Human adenovirus B [HAdV-B]
gcauuaucgcugcagugaca

SEQ ID NO: 1545052 - RNA, 11 nt, Human adenovirus B [HAdV-B]
cuagcuugcaa

SEQ ID NO: 1545053 - RNA, 19 nt, Human adenovirus B [HAdV-B]
cugccguugcgcagcagua

SEQ ID NO: 1545054 - RNA, 17 nt, Human adenovirus B [HAdV-B]
aauuuuagcuccucucc

SEQ ID NO: 1545055 - RNA, 21 nt, Human adenovirus B [HAdV-B]
gauacuuaugaucacaagcag

SEQ ID NO: 1545056 - RNA, 20 nt, Human adenovirus B [HAdV-B]
uuuugaucacaaugugauga

SEQ ID NO: 1545057 - RNA, 19 nt, Human adenovirus B [HAdV-B]
cagauauggcccucacuug

SEQ ID NO: 1545058 - RNA, 14 nt, Human adenovirus B [HAdV-B]
gaguagauggaaga

SEQ ID NO: 1545059 - RNA, 14 nt, Human adenovirus B [HAdV-B]
caaagagcucugac

SEQ ID NO: 1545060 - RNA, 21 nt, Human adenovirus B [HAdV-B]
uuugcaguagguacaacacau

SEQ ID NO: 1545061 - RNA, 14 nt, Human adenovirus B [HAdV-B]
caugaaagccuuug

SEQ ID NO: 1545062 - RNA, 14 nt, Human adenovirus B [HAdV-B]
cgacauguguugag

SEQ ID NO: 1545063 - RNA, 21 nt, Human adenovirus B [HAdV-B]
ucucccagacucguacaaaua

SEQ ID NO: 1545064 - RNA, 14 nt, Human adenovirus B [HAdV-B]
uacuugaaaucagc

SEQ ID NO: 1545065 - RNA, 17 nt, Human adenovirus B [HAdV-B]
gcuccagcaaaaacaag

SEQ ID NO: 1545066 - RNA, 22 nt, Human adenovirus B [HAdV-B]
aaccgguauaucgggcaggaug

SEQ ID NO: 1545067 - RNA, 14 nt, Human adenovirus B [HAdV-B]
uaguggcacaacau

SEQ ID NO: 1545068 - RNA, 16 nt, Human adenovirus B [HAdV-B]
cgaggaggaagagggc

SEQ ID NO: 1545069 - RNA, 16 nt, Human adenovirus B [HAdV-B]
cuccaagcaagaugua

SEQ ID NO: 1545070 - RNA, 14 nt, Human adenovirus B [HAdV-B]
cccagcuguuucug

SEQ ID NO: 1545071 - RNA, 12 nt, Human adenovirus B [HAdV-B]
ugcaagauaucu

SEQ ID NO: 1545072 - RNA, 14 nt, Human adenovirus B [HAdV-B]
uccuaugcacuuuu

SEQ ID NO: 1545073 - RNA, 14 nt, Human adenovirus B [HAdV-B]
acucccagcagcuc

SEQ ID NO: 1545074 - RNA, 21 nt, Human adenovirus B [HAdV-B]
gccacagggucuccagcucga

SEQ ID NO: 1545075 - RNA, 20 nt, Human adenovirus B [HAdV-B]
augcuuagggcggccagacg

SEQ ID NO: 1545076 - RNA, 20 nt, Human adenovirus B [HAdV-B]
agcuguguacucccagcagc

SEQ ID NO: 1545077 - RNA, 18 nt, Human adenovirus B [HAdV-B]
ccacagcauuguggagaa

SEQ ID NO: 1545078 - RNA, 18 nt, Human adenovirus B [HAdV-B]
acaagaauuugaaaaguu

SEQ ID NO: 1545079 - RNA, 12 nt, Human adenovirus B [HAdV-B]
ucuucuccuggg

SEQ ID NO: 1545080 - RNA, 12 nt, Human adenovirus B [HAdV-B]
cagucaggcaga

SEQ ID NO: 1545081 - RNA, 18 nt, Human adenovirus B [HAdV-B]
cucuucgggggcagaggu

SEQ ID NO: 1545082 - RNA, 17 nt, Human adenovirus B [HAdV-B]
cacauccagaucuucag

SEQ ID NO: 1545083 - RNA, 18 nt, Human adenovirus B [HAdV-B]
aggcuguucugacuuugg

SEQ ID NO: 1545084 - RNA, 19 nt, Human adenovirus B [HAdV-B]
acuauaaaaguaguuuaga

SEQ ID NO: 1545085 - RNA, 17 nt, Human adenovirus B [HAdV-B]
gguugcauucacugcuc

SEQ ID NO: 1545086 - RNA, 12 nt, Human adenovirus B [HAdV-B]
auucccugcaga

SEQ ID NO: 1545087 - RNA, 13 nt, Human adenovirus B [HAdV-B]
uuacagaaaucuc

SEQ ID NO: 1545088 - RNA, 13 nt, Human adenovirus B [HAdV-B]
gucaauugucucu

SEQ ID NO: 1545089 - RNA, 23 nt, Human adenovirus B [HAdV-B]
cuggagcuggaaccgagggugag

SEQ ID NO: 1545090 - RNA, 12 nt, Human adenovirus B [HAdV-B]
uauaaauuaaau

SEQ ID NO: 1545091 - RNA, 19 nt, Human adenovirus B [HAdV-B]
gaaucauaauauugccaug

SEQ ID NO: 1545092 - RNA, 14 nt, Human adenovirus B [HAdV-B]
augaacaaugccau

SEQ ID NO: 1545093 - RNA, 15 nt, Human adenovirus B [HAdV-B]
uggucuccaugaguu

SEQ ID NO: 1545094 - RNA, 19 nt, Human adenovirus B [HAdV-B]
ugccagguggucucuggau

SEQ ID NO: 1545095 - RNA, 18 nt, Human adenovirus B [HAdV-B]
caacaccuuaaucccaga

SEQ ID NO: 1545096 - RNA, 18 nt, Human adenovirus B [HAdV-B]
agucaaguguuucuugaa

SEQ ID NO: 1545097 - RNA, 14 nt, Human adenovirus B [HAdV-B]
caagguucccucag

SEQ ID NO: 1545098 - RNA, 15 nt, Human adenovirus B [HAdV-B]
gcaguacucaagcga

SEQ ID NO: 1545099 - RNA, 20 nt, Human adenovirus B [HAdV-B]
cacuauucaaccuguagaaa

SEQ ID NO: 1545100 - RNA, 14 nt, Human adenovirus B [HAdV-B]
ugaucgcacugcuu

SEQ ID NO: 1545101 - RNA, 14 nt, Human adenovirus B [HAdV-B]
guuaacuguucacu

SEQ ID NO: 1545102 - RNA, 23 nt, Human adenovirus B [HAdV-B]
cuuuuccaaaguaugcaaacaca

SEQ ID NO: 1545103 - RNA, 24 nt, Human adenovirus B [HAdV-B]
acuauguuuucuuagagauggaag

SEQ ID NO: 1545104 - RNA, 18 nt, Human adenovirus B [HAdV-B]
uaaaaaauauaauuauuu

SEQ ID NO: 1545105 - RNA, 16 nt, Human adenovirus B [HAdV-B]
ucaauaguuccaaaug

SEQ ID NO: 1545106 - RNA, 13 nt, Human adenovirus B [HAdV-B]
gaggccggacugg

SEQ ID NO: 1545107 - RNA, 11 nt, Human adenovirus B [HAdV-B]
cccagcagcuc

SEQ ID NO: 1545108 - RNA, 21 nt, Human adenovirus B [HAdV-B]
caaacggcaccugcgagccaa

SEQ ID NO: 1545109 - RNA, 15 nt, Human adenovirus B [HAdV-B]
gccagcgccaugaca

SEQ ID NO: 1545110 - RNA, 15 nt, Human adenovirus B [HAdV-B]
acaugggcaccugga

SEQ ID NO: 1545111 - RNA, 20 nt, Human adenovirus B [HAdV-B]
agcucuuacagaaaucucuu

SEQ ID NO: 1545112 - RNA, 20 nt, Human adenovirus B [HAdV-B]
guggucagugaugagcagcu

SEQ ID NO: 1545113 - RNA, 13 nt, Human adenovirus B [HAdV-B]
cugcaaaaauaaa

SEQ ID NO: 1545114 - RNA, 19 nt, Human adenovirus B [HAdV-B]
uuugaggccugauaaacag

SEQ ID NO: 1545115 - RNA, 17 nt, Human adenovirus B [HAdV-B]
accacguaagaagcuuc

SEQ ID NO: 1545116 - RNA, 21 nt, Human adenovirus B [HAdV-B]
cugauuauuucaccaaugcca

SEQ ID NO: 1545117 - RNA, 17 nt, Human adenovirus B [HAdV-B]
ccccucccccugcugcu

SEQ ID NO: 1545118 - RNA, 14 nt, Human adenovirus B [HAdV-B]
ccagaaaacaaaaa

SEQ ID NO: 1545119 - RNA, 15 nt, Human adenovirus B [HAdV-B]
acaaugaggcuuuca

SEQ ID NO: 1545120 - RNA, 14 nt, Human adenovirus B [HAdV-B]
guuagcugcacagc

SEQ ID NO: 1545121 - RNA, 12 nt, Human adenovirus B [HAdV-B]
augagacagugu

SEQ ID NO: 1545122 - RNA, 21 nt, Human adenovirus B [HAdV-B]
ggaaucaccaacuugggaacc

SEQ ID NO: 1545123 - RNA, 16 nt, Human adenovirus B [HAdV-B]
auagcuuugaggccug

SEQ ID NO: 1545124 - RNA, 18 nt, Human adenovirus B [HAdV-B]
cuggccaacuaucucucc

SEQ ID NO: 1545125 - RNA, 20 nt, Human adenovirus B [HAdV-B]
aggggacugccccauggcau

SEQ ID NO: 1545126 - RNA, 20 nt, Human adenovirus B [HAdV-B]
caccauucuuaaacacaccc

SEQ ID NO: 1545127 - RNA, 13 nt, Human adenovirus B [HAdV-B]
caccuccacugaa

SEQ ID NO: 1545128 - RNA, 15 nt, Human adenovirus B [HAdV-B]
aaucugcacuacacu

SEQ ID NO: 1545129 - RNA, 12 nt, Human adenovirus B [HAdV-B]
ggaaauggggcu

SEQ ID NO: 1545130 - RNA, 22 nt, Human adenovirus B [HAdV-B]
augcccaugccuauuacaacug

SEQ ID NO: 1545131 - RNA, 12 nt, Human adenovirus B [HAdV-B]
acaauccagaca

SEQ ID NO: 1545132 - RNA, 23 nt, Human adenovirus B [HAdV-B]
aagagggcgaguacuuggaagac

SEQ ID NO: 1545133 - RNA, 20 nt, Human adenovirus B [HAdV-B]
accgucgcuuccgaccuggc

SEQ ID NO: 1545134 - RNA, 13 nt, Human adenovirus B [HAdV-B]
cuccuaggcagag

SEQ ID NO: 1545135 - RNA, 13 nt, Human adenovirus B [HAdV-B]
uguuuagaagaac

SEQ ID NO: 1545136 - RNA, 19 nt, Human adenovirus B [HAdV-B]
auagcuuccuuggaagagg

SEQ ID NO: 1545137 - RNA, 16 nt, Human adenovirus B [HAdV-B]
gacgcuacagugcagu

SEQ ID NO: 1545138 - RNA, 23 nt, Human adenovirus B [HAdV-B]
agcucauaggagcuggcuuucau

SEQ ID NO: 1545139 - RNA, 23 nt, Human adenovirus B [HAdV-B]
agagucguuugagcaaccuucuu

SEQ ID NO: 1545140 - RNA, 22 nt, Human adenovirus B [HAdV-B]
gucuuccggaucgcuguccagg

SEQ ID NO: 1545141 - RNA, 14 nt, Human adenovirus B [HAdV-B]
gguguccagaaaac

SEQ ID NO: 1545142 - RNA, 17 nt, Human adenovirus B [HAdV-B]
ccaauuaucgcugcugc

SEQ ID NO: 1545143 - RNA, 12 nt, Human adenovirus B [HAdV-B]
uuuaacuccuca

SEQ ID NO: 1545144 - RNA, 20 nt, Human adenovirus B [HAdV-B]
gaggaagauggcgaugaugg

SEQ ID NO: 1545145 - RNA, 16 nt, Human adenovirus B [HAdV-B]
aacaaagaaaaaaugc

SEQ ID NO: 1545146 - RNA, 15 nt, Human adenovirus B [HAdV-B]
cucauuugugcauuu

SEQ ID NO: 1545147 - RNA, 20 nt, Human adenovirus B [HAdV-B]
gcggacauugcuucucugaa

SEQ ID NO: 1545148 - RNA, 13 nt, Human adenovirus B [HAdV-B]
cugccgcugcaau

SEQ ID NO: 1545149 - RNA, 17 nt, Human adenovirus B [HAdV-B]
aacgcgggucgugagcu

SEQ ID NO: 1545150 - RNA, 18 nt, Human adenovirus B [HAdV-B]
acucuuccagaaaacaaa

SEQ ID NO: 1545151 - RNA, 13 nt, Human adenovirus B [HAdV-B]
gugcggcaggcau

SEQ ID NO: 1545152 - RNA, 21 nt, Human adenovirus B [HAdV-B]
gcagcagcaaucacaaaaggc

SEQ ID NO: 1545153 - RNA, 15 nt, Human adenovirus B [HAdV-B]
gauauguggccuggg

SEQ ID NO: 1545154 - RNA, 14 nt, Human adenovirus B [HAdV-B]
caaagcgugcugca

SEQ ID NO: 1545155 - RNA, 22 nt, Human adenovirus B [HAdV-B]
agucuguuccacaguucaguga

SEQ ID NO: 1545156 - RNA, 13 nt, Human adenovirus B [HAdV-B]
uauugcuuuuugg

SEQ ID NO: 1545157 - RNA, 17 nt, Human adenovirus B [HAdV-B]
ucuaaggccauuugcca

SEQ ID NO: 1545158 - RNA, 15 nt, Human adenovirus B [HAdV-B]
gagugcguuccugga

SEQ ID NO: 1545159 - RNA, 13 nt, Human adenovirus B [HAdV-B]
aaguuuucuugca

SEQ ID NO: 1545160 - RNA, 18 nt, Human adenovirus B [HAdV-B]
acugccuauccuuucaau

SEQ ID NO: 1545161 - RNA, 17 nt, Human adenovirus B [HAdV-B]
auaguaacuugcaacau

SEQ ID NO: 1545162 - RNA, 16 nt, Human adenovirus B [HAdV-B]
uugacaugaacaugca

SEQ ID NO: 1545163 - RNA, 16 nt, Human adenovirus B [HAdV-B]
cucgcggugaccagca

SEQ ID NO: 1545164 - RNA, 21 nt, Human adenovirus B [HAdV-B]
ugcagcacuggacaugacagc

SEQ ID NO: 1545165 - RNA, 22 nt, Human adenovirus B [HAdV-B]
cacaaagcccaaacggaguucu

SEQ ID NO: 1545166 - RNA, 14 nt, Human adenovirus B [HAdV-B]
acauccaauagcgc

SEQ ID NO: 1545167 - RNA, 15 nt, Human adenovirus B [HAdV-B]
cuggucagcugcaaa

SEQ ID NO: 1545168 - RNA, 16 nt, Human adenovirus B [HAdV-B]
gaccggacgcuucccg

SEQ ID NO: 1545169 - RNA, 22 nt, Human adenovirus B [HAdV-B]
agauuacagccaacgagccagc

SEQ ID NO: 1545170 - RNA, 18 nt, Human adenovirus B [HAdV-B]
guaaugggaguaaagugu

SEQ ID NO: 1545171 - RNA, 16 nt, Human adenovirus B [HAdV-B]
augcuggcuacugugc

SEQ ID NO: 1545172 - RNA, 14 nt, Human adenovirus B [HAdV-B]
agagcgagccguag

SEQ ID NO: 1545173 - RNA, 16 nt, Human adenovirus B [HAdV-B]
aacauucuacagagua

SEQ ID NO: 1545174 - RNA, 20 nt, Human adenovirus B [HAdV-B]
ccauggaugagcccacccug

SEQ ID NO: 1545175 - RNA, 23 nt, Human adenovirus B [HAdV-B]
ggcccuuacagacuugggacaga

SEQ ID NO: 1545176 - RNA, 15 nt, Human adenovirus B [HAdV-B]
uaagcauuccaccgc

SEQ ID NO: 1545177 - RNA, 21 nt, Human adenovirus B [HAdV-B]
cugagcuaucucggcugcgac

SEQ ID NO: 1545178 - RNA, 18 nt, Human adenovirus B [HAdV-B]
ugggcaccgacucuccca

SEQ ID NO: 1545179 - RNA, 16 nt, Human adenovirus B [HAdV-B]
gacguaagagccggcg

SEQ ID NO: 1545180 - RNA, 18 nt, Human adenovirus B [HAdV-B]
ccgucgccauacccuacc

SEQ ID NO: 1545181 - RNA, 12 nt, Human adenovirus B [HAdV-B]
cacagacaccua

SEQ ID NO: 1545182 - RNA, 20 nt, Human adenovirus B [HAdV-B]
uggucuggggguacaaacug

SEQ ID NO: 1545183 - RNA, 21 nt, Human adenovirus B [HAdV-B]
ggacagaggucccaguuucaa

SEQ ID NO: 1545184 - RNA, 23 nt, Human adenovirus B [HAdV-B]
cggaagccagcacccagaccauu

SEQ ID NO: 1545185 - RNA, 16 nt, Human adenovirus B [HAdV-B]
cguagcccaaugcaac

SEQ ID NO: 1545186 - RNA, 23 nt, Human adenovirus B [HAdV-B]
aaugcuuguuacauaucuggaaa

SEQ ID NO: 1545187 - RNA, 18 nt, Human adenovirus B [HAdV-B]
uaugcccgucuucucaaa

SEQ ID NO: 1545188 - RNA, 20 nt, Human adenovirus B [HAdV-B]
gcagagaaacaacagacaug

SEQ ID NO: 1545189 - RNA, 20 nt, Human adenovirus B [HAdV-B]
augccauggacaaugucaac

SEQ ID NO: 1545190 - RNA, 13 nt, Human adenovirus B [HAdV-B]
caaacgccagaag

SEQ ID NO: 1545191 - RNA, 12 nt, Human adenovirus B [HAdV-B]
caggaacugaaa

SEQ ID NO: 1545192 - RNA, 12 nt, Human adenovirus B [HAdV-B]
ggagggcagaaa

SEQ ID NO: 1545193 - RNA, 13 nt, Human adenovirus B [HAdV-B]
agcugggaugggu

SEQ ID NO: 1545194 - RNA, 17 nt, Human adenovirus B [HAdV-B]
ugacguuucgcucacca

SEQ ID NO: 1545195 - RNA, 15 nt, Human adenovirus B [HAdV-B]
auccauggaugccca

SEQ ID NO: 1545196 - RNA, 16 nt, Human adenovirus B [HAdV-B]
uugcugugccagaagu

SEQ ID NO: 1545197 - RNA, 20 nt, Human adenovirus B [HAdV-B]
cuggacauugcucaccaccu

SEQ ID NO: 1545198 - RNA, 22 nt, Human adenovirus B [HAdV-B]
ggucaaaagaaugcuggcuuca

SEQ ID NO: 1545199 - RNA, 15 nt, Human adenovirus B [HAdV-B]
ggcaggaugugagcu

SEQ ID NO: 1545200 - RNA, 18 nt, Human adenovirus B [HAdV-B]
gcguuccuggacauugcu

SEQ ID NO: 1545201 - RNA, 22 nt, Human adenovirus B [HAdV-B]
cuggcagaccucaucuucccag

SEQ ID NO: 1545202 - RNA, 14 nt, Human adenovirus B [HAdV-B]
guagguuuggaagu

SEQ ID NO: 1545203 - RNA, 14 nt, Human adenovirus B [HAdV-B]
ccccucgcagcagc

SEQ ID NO: 1545204 - RNA, 15 nt, Human adenovirus B [HAdV-B]
gacggcggugaugca

SEQ ID NO: 1545205 - RNA, 23 nt, Human adenovirus B [HAdV-B]
cuaugacuauugauuugaugaac

SEQ ID NO: 1545206 - RNA, 16 nt, Human adenovirus B [HAdV-B]
uauuccaauguggcuc

SEQ ID NO: 1545207 - RNA, 22 nt, Human adenovirus B [HAdV-B]
gcgccucccaggacuacuccac

SEQ ID NO: 1545208 - RNA, 21 nt, Human adenovirus B [HAdV-B]
cugagguuaaagugagaccca

SEQ ID NO: 1545209 - RNA, 22 nt, Human adenovirus B [HAdV-B]
uuccacaguucagugauguguu

SEQ ID NO: 1545210 - RNA, 16 nt, Human adenovirus B [HAdV-B]
ccuccaguggaggagg

SEQ ID NO: 1545211 - RNA, 17 nt, Human adenovirus B [HAdV-B]
cgguucuuugcucuucc

SEQ ID NO: 1545212 - RNA, 22 nt, Human adenovirus B [HAdV-B]
cacugguuuuuauugcuuuuug

SEQ ID NO: 1545213 - RNA, 16 nt, Human adenovirus B [HAdV-B]
caaucaucauauuaca

SEQ ID NO: 1545214 - RNA, 15 nt, Human adenovirus B [HAdV-B]
cucuagcagcagugu

SEQ ID NO: 1545215 - RNA, 18 nt, Human adenovirus B [HAdV-B]
uugcaaggccccagcagc

SEQ ID NO: 1545216 - RNA, 21 nt, Human adenovirus B [HAdV-B]
cagccccccucgcagcagcag

SEQ ID NO: 1545217 - RNA, 21 nt, Human adenovirus B [HAdV-B]
caguagucaaguguuucuuga

SEQ ID NO: 1545218 - RNA, 16 nt, Human adenovirus B [HAdV-B]
caggcaaaacaaaaaa

SEQ ID NO: 1545219 - RNA, 18 nt, Human adenovirus B [HAdV-B]
ccacaucguaggucagga

SEQ ID NO: 1545220 - RNA, 13 nt, Human adenovirus B [HAdV-B]
uuuugcugugcca

SEQ ID NO: 1545221 - RNA, 15 nt, Human adenovirus B [HAdV-B]
cauuccuuaugcuua

SEQ ID NO: 1545222 - RNA, 15 nt, Human adenovirus B [HAdV-B]
ggaucacccucaagg

SEQ ID NO: 1545223 - RNA, 18 nt, Human adenovirus B [HAdV-B]
aagauuuuguaugaagau

SEQ ID NO: 1545224 - RNA, 16 nt, Human adenovirus B [HAdV-B]
gcaaacucgaagagaa

SEQ ID NO: 1545225 - RNA, 17 nt, Human adenovirus B [HAdV-B]
cagccgccgcccccaga

SEQ ID NO: 1545226 - RNA, 15 nt, Human adenovirus B [HAdV-B]
gggugggagaggaag

SEQ ID NO: 1545227 - RNA, 14 nt, Human adenovirus B [HAdV-B]
agagcgugaugcag

SEQ ID NO: 1545228 - RNA, 13 nt, Human adenovirus B [HAdV-B]
cucgaagcaaggg

SEQ ID NO: 1545229 - RNA, 14 nt, Human adenovirus B [HAdV-B]
aaauccgguucauu

SEQ ID NO: 1545230 - RNA, 14 nt, Human adenovirus B [HAdV-B]
gcaacauacaaaau

SEQ ID NO: 1545231 - RNA, 13 nt, Human adenovirus B [HAdV-B]
uucggaacuggca

SEQ ID NO: 1545232 - RNA, 19 nt, Human adenovirus B [HAdV-B]
cuucgcauaucccgcuguc

SEQ ID NO: 1545233 - RNA, 23 nt, Human adenovirus B [HAdV-B]
ugaggccugauaaacaguauaag

SEQ ID NO: 1545234 - RNA, 21 nt, Human adenovirus B [HAdV-B]
ccaugcuuagggcggccagac

SEQ ID NO: 1545235 - RNA, 19 nt, Human adenovirus B [HAdV-B]
ccgagucgaggaacccggc

SEQ ID NO: 1545236 - RNA, 21 nt, Human adenovirus B [HAdV-B]
cagcacugaaacaccaucagc

SEQ ID NO: 1545237 - RNA, 20 nt, Human adenovirus B [HAdV-B]
gccccuacuauagccagcaa

SEQ ID NO: 1545238 - RNA, 16 nt, Human adenovirus B [HAdV-B]
acuucagcgcacucuc

SEQ ID NO: 1545239 - RNA, 18 nt, Human adenovirus B [HAdV-B]
gcuugggcgcuugccagg

SEQ ID NO: 1545240 - RNA, 16 nt, Human adenovirus B [HAdV-B]
acaacugacgccgccg

SEQ ID NO: 1545241 - RNA, 20 nt, Human adenovirus B [HAdV-B]
ccaucuauuauuccuacucc

SEQ ID NO: 1545242 - RNA, 15 nt, Human adenovirus B [HAdV-B]
guugaaggugcagcc

SEQ ID NO: 1545243 - RNA, 20 nt, Human adenovirus B [HAdV-B]
uggacccuccaguggaggag

SEQ ID NO: 1545244 - RNA, 14 nt, Human adenovirus B [HAdV-B]
agagcuucuacaac

SEQ ID NO: 1545245 - RNA, 21 nt, Human adenovirus B [HAdV-B]
uacccucgguauaaaacaucc

SEQ ID NO: 1545246 - RNA, 17 nt, Human adenovirus B [HAdV-B]
gagcgccgcgacggcag

SEQ ID NO: 1545247 - RNA, 20 nt, Human adenovirus B [HAdV-B]
gaaucauguccaccuggggg

SEQ ID NO: 1545248 - RNA, 19 nt, Human adenovirus B [HAdV-B]
uccgagucgaggaacccgg

SEQ ID NO: 1545249 - RNA, 14 nt, Human adenovirus B [HAdV-B]
uccuaaaaaacaag

SEQ ID NO: 1545250 - RNA, 17 nt, Human adenovirus B [HAdV-B]
gggggcaauucuggccc

SEQ ID NO: 1545251 - RNA, 22 nt, Human adenovirus B [HAdV-B]
ucuuagacucaucuaaaaccau

SEQ ID NO: 1545252 - RNA, 18 nt, Human adenovirus B [HAdV-B]
accugaaguaaauggaac

SEQ ID NO: 1545253 - RNA, 23 nt, Human adenovirus B [HAdV-B]
agcaagcaccggaucccgcaaug

SEQ ID NO: 1545254 - RNA, 22 nt, Human adenovirus B [HAdV-B]
aaucucuuaagguucuguggac

SEQ ID NO: 1545255 - RNA, 15 nt, Human adenovirus B [HAdV-B]
gguacuuccgcucga

SEQ ID NO: 1545256 - RNA, 17 nt, Human adenovirus B [HAdV-B]
augucaccugcggagca

SEQ ID NO: 1545257 - RNA, 16 nt, Human adenovirus B [HAdV-B]
ugcaaggccccagcag

SEQ ID NO: 1545258 - RNA, 14 nt, Human adenovirus B [HAdV-B]
gucaggcuguucug

SEQ ID NO: 1545259 - RNA, 12 nt, Human adenovirus B [HAdV-B]
cacagagcugcc

SEQ ID NO: 1545260 - RNA, 18 nt, Human adenovirus B [HAdV-B]
ccgccaaacccaacacac

SEQ ID NO: 1545261 - RNA, 18 nt, Human adenovirus B [HAdV-B]
ccuggagcgacaucggca

SEQ ID NO: 1545262 - RNA, 16 nt, Human adenovirus B [HAdV-B]
ugcucacuugugcugg

SEQ ID NO: 1545263 - RNA, 15 nt, Human adenovirus B [HAdV-B]
auguaaauuuggaaa

SEQ ID NO: 1545264 - RNA, 10 nt, Human adenovirus B [HAdV-B]
ugaauuauuc

SEQ ID NO: 1545265 - RNA, 23 nt, Human adenovirus B [HAdV-B]
agccagguuaaauccgguucauu

SEQ ID NO: 1545266 - RNA, 14 nt, Human adenovirus B [HAdV-B]
cacaacgcacagcc

SEQ ID NO: 1545267 - RNA, 18 nt, Human adenovirus B [HAdV-B]
ggcgacggcggugaugca

SEQ ID NO: 1545268 - RNA, 19 nt, Human adenovirus B [HAdV-B]
gcuggacuacuugcacaga

SEQ ID NO: 1545269 - RNA, 16 nt, Human adenovirus B [HAdV-B]
gccaaggcgauggguc

SEQ ID NO: 1545270 - RNA, 14 nt, Human adenovirus B [HAdV-B]
aacccaaccagcgc

SEQ ID NO: 1545271 - RNA, 22 nt, Human adenovirus B [HAdV-B]
gcaaagauucgauccgaugaca

SEQ ID NO: 1545272 - RNA, 14 nt, Human adenovirus B [HAdV-B]
caucuucccagagc

SEQ ID NO: 1545273 - RNA, 19 nt, Human adenovirus B [HAdV-B]
aguagacaccuaugugaac

SEQ ID NO: 1545274 - RNA, 20 nt, Human adenovirus B [HAdV-B]
acaacugacgccgccggucc

SEQ ID NO: 1545275 - RNA, 17 nt, Human adenovirus B [HAdV-B]
uguuuccgucacaguga

SEQ ID NO: 1545276 - RNA, 16 nt, Human adenovirus B [HAdV-B]
ucgacgcaucucauga

SEQ ID NO: 1545277 - RNA, 22 nt, Human adenovirus B [HAdV-B]
agauguacgcgaagccgugucu

SEQ ID NO: 1545278 - RNA, 21 nt, Human adenovirus B [HAdV-B]
ccauguucaugagcaaacagu

SEQ ID NO: 1545279 - RNA, 20 nt, Human adenovirus B [HAdV-B]
auggaagacuuaugcucagg

SEQ ID NO: 1545280 - RNA, 12 nt, Human adenovirus B [HAdV-B]
ugcaaacugaac

SEQ ID NO: 1545281 - RNA, 20 nt, Human adenovirus B [HAdV-B]
gcuccaaauacaucucagug

SEQ ID NO: 1545282 - RNA, 17 nt, Human adenovirus B [HAdV-B]
ccaggacuacuccaccc

SEQ ID NO: 1545283 - RNA, 21 nt, Human adenovirus B [HAdV-B]
cgauucucacuugccacccuc

SEQ ID NO: 1545284 - RNA, 12 nt, Human adenovirus B [HAdV-B]
aaucaugugaaa

SEQ ID NO: 1545285 - RNA, 13 nt, Human adenovirus B [HAdV-B]
ggcagcagcuccu

SEQ ID NO: 1545286 - RNA, 13 nt, Human adenovirus B [HAdV-B]
aaguauggaggca

SEQ ID NO: 1545287 - RNA, 22 nt, Human adenovirus B [HAdV-B]
aguuucuaugcguguuggauug

SEQ ID NO: 1545288 - RNA, 19 nt, Human adenovirus B [HAdV-B]
cugugccagaaguacuggc

SEQ ID NO: 1545289 - RNA, 22 nt, Human adenovirus B [HAdV-B]
uucugaucaucgcacguggaaa

SEQ ID NO: 1545290 - RNA, 23 nt, Human adenovirus B [HAdV-B]
aacucuugcuugacucucugggc

SEQ ID NO: 1545291 - RNA, 13 nt, Human adenovirus B [HAdV-B]
gcgggucgugagc

SEQ ID NO: 1545292 - RNA, 16 nt, Human adenovirus B [HAdV-B]
acgggugcuuacugga

SEQ ID NO: 1545293 - RNA, 21 nt, Human adenovirus B [HAdV-B]
ccugucacuuuccgcuccacu

SEQ ID NO: 1545294 - RNA, 22 nt, Human adenovirus B [HAdV-B]
gcgcgguuagcgccagcaggag

SEQ ID NO: 1545295 - RNA, 14 nt, Human adenovirus B [HAdV-B]
caacucugacuucu

SEQ ID NO: 1545296 - RNA, 20 nt, Human adenovirus B [HAdV-B]
gaaagguuccagcgugaugc

SEQ ID NO: 1545297 - RNA, 20 nt, Human adenovirus B [HAdV-B]
cagaugcaucccgugcugcg

SEQ ID NO: 1545298 - RNA, 22 nt, Human adenovirus B [HAdV-B]
auugaugacaauauuaacaccu

SEQ ID NO: 1545299 - RNA, 14 nt, Human adenovirus B [HAdV-B]
acaccuaugugaac

SEQ ID NO: 1545300 - RNA, 14 nt, Human adenovirus B [HAdV-B]
cauuuccauuccuu

SEQ ID NO: 1545301 - RNA, 21 nt, Human adenovirus B [HAdV-B]
aguugaaaaccacgaaaaugc

SEQ ID NO: 1545302 - RNA, 15 nt, Human adenovirus B [HAdV-B]
uccgguauccugccc

SEQ ID NO: 1545303 - RNA, 22 nt, Human adenovirus B [HAdV-B]
cucccgacggugcugcaguugg

SEQ ID NO: 1545304 - RNA, 18 nt, Human adenovirus B [HAdV-B]
ugcucuaccccauuccug

SEQ ID NO: 1545305 - RNA, 17 nt, Human adenovirus B [HAdV-B]
gugaacgcguuggugga

SEQ ID NO: 1545306 - RNA, 15 nt, Human adenovirus B [HAdV-B]
uaaucauaaaucagg

SEQ ID NO: 1545307 - RNA, 21 nt, Human adenovirus B [HAdV-B]
gugaugaggguaaaccagugg

SEQ ID NO: 1545308 - RNA, 17 nt, Human adenovirus B [HAdV-B]
acgcauccgccagcagc

SEQ ID NO: 1545309 - RNA, 16 nt, Human adenovirus B [HAdV-B]
uacuuagauuugauau

SEQ ID NO: 1545310 - RNA, 12 nt, Human adenovirus B [HAdV-B]
gauugcuggaau

SEQ ID NO: 1545311 - RNA, 12 nt, Human adenovirus B [HAdV-B]
agagcucagccg

SEQ ID NO: 1545312 - RNA, 20 nt, Human adenovirus B [HAdV-B]
cccgaagccuuuagacagca

SEQ ID NO: 1545313 - RNA, 18 nt, Human adenovirus B [HAdV-B]
aaaauguugaaaugggca

SEQ ID NO: 1545314 - RNA, 18 nt, Human adenovirus B [HAdV-B]
ucuggcacgauucucacu

SEQ ID NO: 1545315 - RNA, 14 nt, Human adenovirus B [HAdV-B]
guccaaaugcgcac

SEQ ID NO: 1545316 - RNA, 19 nt, Human adenovirus B [HAdV-B]
gccuggacccuccagugga

SEQ ID NO: 1545317 - RNA, 21 nt, Human adenovirus B [HAdV-B]
ccugcagaaaucuucccauca

SEQ ID NO: 1545318 - RNA, 19 nt, Human adenovirus B [HAdV-B]
ccagcgccaugacagacag

SEQ ID NO: 1545319 - RNA, 15 nt, Human adenovirus B [HAdV-B]
cuaaugauugcaaau

SEQ ID NO: 1545320 - RNA, 16 nt, Human adenovirus B [HAdV-B]
caugcaugacccagau

SEQ ID NO: 1545321 - RNA, 19 nt, Human adenovirus B [HAdV-B]
uuaaauccacacugguggc

SEQ ID NO: 1545322 - RNA, 13 nt, Human adenovirus B [HAdV-B]
gcagcacugaaac

SEQ ID NO: 1545323 - RNA, 14 nt, Human adenovirus B [HAdV-B]
aaaucaacacagcc

SEQ ID NO: 1545324 - RNA, 19 nt, Human adenovirus B [HAdV-B]
gaauaauuaauauaaucug

SEQ ID NO: 1545325 - RNA, 17 nt, Human adenovirus B [HAdV-B]
gccagcacccagaccau

SEQ ID NO: 1545326 - RNA, 17 nt, Human adenovirus B [HAdV-B]
gcaguaacuuuuguaaa

SEQ ID NO: 1545327 - RNA, 23 nt, Human adenovirus B [HAdV-B]
auagugcaggagcggagccuggg

SEQ ID NO: 1545328 - RNA, 23 nt, Human adenovirus B [HAdV-B]
cacagccccuacuauagccagca

SEQ ID NO: 1545329 - RNA, 20 nt, Human adenovirus B [HAdV-B]
agacaauuuugcgccaacac

SEQ ID NO: 1545330 - RNA, 22 nt, Human adenovirus B [HAdV-B]
ugcagccgccgcccccagaaga

SEQ ID NO: 1545331 - RNA, 14 nt, Human adenovirus B [HAdV-B]
caguguggaagagc

SEQ ID NO: 1545332 - RNA, 13 nt, Human adenovirus B [HAdV-B]
ugaaagaaaacau

SEQ ID NO: 1545333 - RNA, 21 nt, Human adenovirus B [HAdV-B]
uauucuucgcgauccuuccag

SEQ ID NO: 1545334 - RNA, 14 nt, Human adenovirus B [HAdV-B]
caauaaacaucacu

SEQ ID NO: 1545335 - RNA, 14 nt, Human adenovirus B [HAdV-B]
ucucaaccccagcu

SEQ ID NO: 1545336 - RNA, 16 nt, Human adenovirus B [HAdV-B]
gugggauuguuucuga

SEQ ID NO: 1545337 - RNA, 14 nt, Human adenovirus B [HAdV-B]
guaccaugcaugca

SEQ ID NO: 1545338 - RNA, 19 nt, Human adenovirus B [HAdV-B]
gcggccuaagagaccugcu

SEQ ID NO: 1545339 - RNA, 19 nt, Human adenovirus B [HAdV-B]
gccagcgcaaacccgagag

SEQ ID NO: 1545340 - RNA, 17 nt, Human adenovirus B [HAdV-B]
ggcggagcgguggugua

SEQ ID NO: 1545341 - RNA, 23 nt, Human adenovirus B [HAdV-B]
cagccaaggcgaugggucuucuc

SEQ ID NO: 1545342 - RNA, 18 nt, Human adenovirus B [HAdV-B]
aaaacggauucuggggag

SEQ ID NO: 1545343 - RNA, 13 nt, Human adenovirus B [HAdV-B]
gaggaauguuuau

SEQ ID NO: 1545344 - RNA, 13 nt, Human adenovirus B [HAdV-B]
auggagucacugc

SEQ ID NO: 1545345 - RNA, 22 nt, Human adenovirus B [HAdV-B]
acaugaacaugcaaaucuggaa

SEQ ID NO: 1545346 - RNA, 23 nt, Human adenovirus B [HAdV-B]
agauuuguaucccacuaugcaac

SEQ ID NO: 1545347 - RNA, 12 nt, Human adenovirus B [HAdV-B]
gcgccagcagga

SEQ ID NO: 1545348 - RNA, 16 nt, Human adenovirus B [HAdV-B]
aacuuuuacaucuccc

SEQ ID NO: 1545349 - RNA, 16 nt, Human adenovirus B [HAdV-B]
uuuucucccagcagca

SEQ ID NO: 1545350 - RNA, 14 nt, Human adenovirus B [HAdV-B]
uggguauaauuaug

SEQ ID NO: 1545351 - RNA, 15 nt, Human adenovirus B [HAdV-B]
caccccgaaacugcg

SEQ ID NO: 1545352 - RNA, 15 nt, Human adenovirus B [HAdV-B]
acgaggaaaaggagc

SEQ ID NO: 1545353 - RNA, 18 nt, Human adenovirus B [HAdV-B]
augaggaccaaucacagc

SEQ ID NO: 1545354 - RNA, 14 nt, Human adenovirus B [HAdV-B]
cucuuucuucuucg

SEQ ID NO: 1545355 - RNA, 16 nt, Human adenovirus B [HAdV-B]
acuggaacaggugaaa

SEQ ID NO: 1545356 - RNA, 16 nt, Human adenovirus B [HAdV-B]
cgggucgugagcugcg

SEQ ID NO: 1545357 - RNA, 13 nt, Human adenovirus B [HAdV-B]
guguuggacagag

SEQ ID NO: 1545358 - RNA, 18 nt, Human adenovirus B [HAdV-B]
ccauuagauauagacaug

SEQ ID NO: 1545359 - RNA, 15 nt, Human adenovirus B [HAdV-B]
gcaugaauuggcuca

SEQ ID NO: 1545360 - RNA, 17 nt, Human adenovirus B [HAdV-B]
acccaguugaaaaccac

SEQ ID NO: 1545361 - RNA, 20 nt, Human adenovirus B [HAdV-B]
ggaggacagucuggaggaca

SEQ ID NO: 1545362 - RNA, 22 nt, Human adenovirus B [HAdV-B]
cuggaacagaagacacaaguuc

SEQ ID NO: 1545363 - RNA, 16 nt, Human adenovirus B [HAdV-B]
ugaauuaagacucucc

SEQ ID NO: 1545364 - RNA, 21 nt, Human adenovirus B [HAdV-B]
auaaacaagcuuguuguugau

SEQ ID NO: 1545365 - RNA, 13 nt, Human adenovirus B [HAdV-B]
uugggccauuuug

SEQ ID NO: 1545366 - RNA, 22 nt, Human adenovirus B [HAdV-B]
agauaauuacuugaaagugggu

SEQ ID NO: 1545367 - RNA, 15 nt, Human adenovirus B [HAdV-B]
ugccaugcgagccgc

SEQ ID NO: 1545368 - RNA, 17 nt, Human adenovirus B [HAdV-B]
ccgucuuugucugcacg

SEQ ID NO: 1545369 - RNA, 14 nt, Human adenovirus B [HAdV-B]
caguuucacauucc

SEQ ID NO: 1545370 - RNA, 23 nt, Human adenovirus B [HAdV-B]
gaaguaggcugauugccacagau

SEQ ID NO: 1545371 - RNA, 23 nt, Human adenovirus B [HAdV-B]
cucgguauaaaacaucccgcagg

SEQ ID NO: 1545372 - RNA, 18 nt, Human adenovirus B [HAdV-B]
caguguccugaagcauga

SEQ ID NO: 1545373 - RNA, 16 nt, Human adenovirus B [HAdV-B]
uggcaugggaugggug

SEQ ID NO: 1545374 - RNA, 20 nt, Human adenovirus B [HAdV-B]
aucuaaggccauuugccauu

SEQ ID NO: 1545375 - RNA, 14 nt, Human adenovirus B [HAdV-B]
cagacaugaugaag

SEQ ID NO: 1545376 - RNA, 12 nt, Human adenovirus B [HAdV-B]
aacacgaggaag

SEQ ID NO: 1545377 - RNA, 19 nt, Human adenovirus B [HAdV-B]
cgagcuaccacugccaugc

SEQ ID NO: 1545378 - RNA, 18 nt, Human adenovirus B [HAdV-B]
ggucagugaugagcagcu

SEQ ID NO: 1545379 - RNA, 21 nt, Human adenovirus B [HAdV-B]
ccaaaauaucgcggcacuucu

SEQ ID NO: 1545380 - RNA, 15 nt, Human adenovirus B [HAdV-B]
ucugauuccuggaua

SEQ ID NO: 1545381 - RNA, 14 nt, Human adenovirus B [HAdV-B]
cgcgaagaggcaau

SEQ ID NO: 1545382 - RNA, 15 nt, Human adenovirus B [HAdV-B]
uaaacgcgaagguga

SEQ ID NO: 1545383 - RNA, 21 nt, Human adenovirus B [HAdV-B]
agcucagagaugucauccaaa

SEQ ID NO: 1545384 - RNA, 22 nt, Human adenovirus B [HAdV-B]
gcaacucugacuucugcucgcu

SEQ ID NO: 1545385 - RNA, 21 nt, Human adenovirus B [HAdV-B]
gauauugacagugccgguuga

SEQ ID NO: 1545386 - RNA, 18 nt, Human adenovirus B [HAdV-B]
accugcugcgcacugccc

SEQ ID NO: 1545387 - RNA, 19 nt, Human adenovirus B [HAdV-B]
cuuccgaccuggcagaccu

SEQ ID NO: 1545388 - RNA, 19 nt, Human adenovirus B [HAdV-B]
auaauauugccaugcaggc

SEQ ID NO: 1545389 - RNA, 14 nt, Human adenovirus B [HAdV-B]
uggaacagaagaca

SEQ ID NO: 1545390 - RNA, 15 nt, Human adenovirus B [HAdV-B]
gacagaauggagugc

SEQ ID NO: 1545391 - RNA, 17 nt, Human adenovirus B [HAdV-B]
cuuacgagcagacagua

SEQ ID NO: 1545392 - RNA, 14 nt, Human adenovirus B [HAdV-B]
gcuacagcugcugc

SEQ ID NO: 1545393 - RNA, 15 nt, Human adenovirus B [HAdV-B]
gggguguguuggaca

SEQ ID NO: 1545394 - RNA, 18 nt, Human adenovirus B [HAdV-B]
cuguucugacuuuggaaa

SEQ ID NO: 1545395 - RNA, 13 nt, Human adenovirus B [HAdV-B]
cccuacgcugucu

SEQ ID NO: 1545396 - RNA, 18 nt, Human adenovirus B [HAdV-B]
cugcgcacugcccuccga

SEQ ID NO: 1545397 - RNA, 16 nt, Human adenovirus B [HAdV-B]
augugacaccggugga

SEQ ID NO: 1545398 - RNA, 16 nt, Human adenovirus B [HAdV-B]
ccagacaaaguacagc

SEQ ID NO: 1545399 - RNA, 19 nt, Human adenovirus B [HAdV-B]
cguguacaaggcacugggc

SEQ ID NO: 1545400 - RNA, 11 nt, Human adenovirus B [HAdV-B]
caaaacaaaaa

SEQ ID NO: 1545401 - RNA, 21 nt, Human adenovirus B [HAdV-B]
ugcgauuuucaaggugcucaa

SEQ ID NO: 1545402 - RNA, 24 nt, Human adenovirus B [HAdV-B]
gcgacucgacuccguagccuggag

SEQ ID NO: 1545403 - RNA, 18 nt, Human adenovirus B [HAdV-B]
caaaguacagcgggcaca

SEQ ID NO: 1545404 - RNA, 14 nt, Human adenovirus B [HAdV-B]
gcagacacaucacu

SEQ ID NO: 1545405 - RNA, 13 nt, Human adenovirus B [HAdV-B]
cagcacugaaaca

SEQ ID NO: 1545406 - RNA, 17 nt, Human adenovirus B [HAdV-B]
uggguagacagaaugga

SEQ ID NO: 1545407 - RNA, 16 nt, Human adenovirus B [HAdV-B]
uaugaagaugaaagca

SEQ ID NO: 1545408 - RNA, 18 nt, Human adenovirus B [HAdV-B]
aucccgcugucaaccugc

SEQ ID NO: 1545409 - RNA, 22 nt, Human adenovirus B [HAdV-B]
cugguuagcugcacagccggca

SEQ ID NO: 1545410 - RNA, 19 nt, Human adenovirus B [HAdV-B]
ugcagacgguaaaucugag

SEQ ID NO: 1545411 - RNA, 12 nt, Human adenovirus B [HAdV-B]
aaacucgcgccg

SEQ ID NO: 1545412 - RNA, 17 nt, Human adenovirus B [HAdV-B]
cugggaugcaaaugcaa

SEQ ID NO: 1545413 - RNA, 12 nt, Human adenovirus B [HAdV-B]
caucuacugugg

SEQ ID NO: 1545414 - RNA, 12 nt, Human adenovirus B [HAdV-B]
aaacccacugcu

SEQ ID NO: 1545415 - RNA, 20 nt, Human adenovirus B [HAdV-B]
gcaugaauuggcucagcgcc

SEQ ID NO: 1545416 - RNA, 14 nt, Human adenovirus B [HAdV-B]
gacaaagcgugcug

SEQ ID NO: 1545417 - RNA, 13 nt, Human adenovirus B [HAdV-B]
cggaucuccuggg

SEQ ID NO: 1545418 - RNA, 19 nt, Human adenovirus B [HAdV-B]
caucuagugguacugaugc

SEQ ID NO: 1545419 - RNA, 20 nt, Human adenovirus B [HAdV-B]
ucacaucucguccucagcga

SEQ ID NO: 1545420 - RNA, 13 nt, Human adenovirus B [HAdV-B]
auuacaacugacg

SEQ ID NO: 1545421 - RNA, 19 nt, Human adenovirus B [HAdV-B]
auguaguuucuaugcgugu

SEQ ID NO: 1545422 - RNA, 20 nt, Human adenovirus B [HAdV-B]
auauucacuggaacagguga

SEQ ID NO: 1545423 - RNA, 14 nt, Human adenovirus B [HAdV-B]
cgcuaccaucuccg

SEQ ID NO: 1545424 - RNA, 18 nt, Human adenovirus B [HAdV-B]
uacacaacaagugcagca

SEQ ID NO: 1545425 - RNA, 20 nt, Human adenovirus B [HAdV-B]
uguagaugccuaugagaaca

SEQ ID NO: 1545426 - RNA, 13 nt, Human adenovirus B [HAdV-B]
cugggcauucuga

SEQ ID NO: 1545427 - RNA, 22 nt, Human adenovirus B [HAdV-B]
ucgcccccggucccucuaaaua

SEQ ID NO: 1545428 - RNA, 18 nt, Human adenovirus B [HAdV-B]
augacagaaugcaucgcg

SEQ ID NO: 1545429 - RNA, 14 nt, Human adenovirus B [HAdV-B]
guguauggcagcaa

SEQ ID NO: 1545430 - RNA, 15 nt, Human adenovirus B [HAdV-B]
cgcaagagcucugcu

SEQ ID NO: 1545431 - RNA, 18 nt, Human adenovirus B [HAdV-B]
guuaaaaaccugcugcuu

SEQ ID NO: 1545432 - RNA, 14 nt, Human adenovirus B [HAdV-B]
cucccccugcugcu

SEQ ID NO: 1545433 - RNA, 19 nt, Human adenovirus B [HAdV-B]
aguccugccagggcacacg

SEQ ID NO: 1545434 - RNA, 20 nt, Human adenovirus B [HAdV-B]
caauggaugguuuacaaaac

SEQ ID NO: 1545435 - RNA, 14 nt, Human adenovirus B [HAdV-B]
cacagcagagacaa

SEQ ID NO: 1545436 - RNA, 21 nt, Human adenovirus B [HAdV-B]
ugcagccgccgcccccagaag

SEQ ID NO: 1545437 - RNA, 13 nt, Human adenovirus B [HAdV-B]
uccccuacaaaac

SEQ ID NO: 1545438 - RNA, 18 nt, Human adenovirus B [HAdV-B]
cacaacaagugcagcaac

SEQ ID NO: 1545439 - RNA, 20 nt, Human adenovirus B [HAdV-B]
ucauaggagcuggcuuucau

SEQ ID NO: 1545440 - RNA, 15 nt, Human adenovirus B [HAdV-B]
cuggcagaacacacu

SEQ ID NO: 1545441 - RNA, 23 nt, Human adenovirus B [HAdV-B]
ugccaccuccacugaagugcaaa

SEQ ID NO: 1545442 - RNA, 19 nt, Human adenovirus B [HAdV-B]
guuuaugccuuaccagugu

SEQ ID NO: 1545443 - RNA, 18 nt, Human adenovirus B [HAdV-B]
cuuucagagaggcgcugc

SEQ ID NO: 1545444 - RNA, 19 nt, Human adenovirus B [HAdV-B]
ugagaagguccuggccauc

SEQ ID NO: 1545445 - RNA, 22 nt, Human adenovirus B [HAdV-B]
cgaagccguacaugggcaccug

SEQ ID NO: 1545446 - RNA, 15 nt, Human adenovirus B [HAdV-B]
gugaaaguguuguug

SEQ ID NO: 1545447 - RNA, 15 nt, Human adenovirus B [HAdV-B]
cccgggacuguggac

SEQ ID NO: 1545448 - RNA, 22 nt, Human adenovirus B [HAdV-B]
cgagagcgugaugcagcagcag

SEQ ID NO: 1545449 - RNA, 20 nt, Human adenovirus B [HAdV-B]
uguuugccaaaggaucccau

SEQ ID NO: 1545450 - RNA, 19 nt, Human adenovirus B [HAdV-B]
gcuugggcgcuugccaggg

SEQ ID NO: 1545451 - RNA, 12 nt, Human adenovirus B [HAdV-B]
cagccaacgagc

SEQ ID NO: 1545452 - RNA, 18 nt, Human adenovirus B [HAdV-B]
cuaacgaauuugaaauaa

SEQ ID NO: 1545453 - RNA, 16 nt, Human adenovirus B [HAdV-B]
agaagauacugagcag

SEQ ID NO: 1545454 - RNA, 17 nt, Human adenovirus B [HAdV-B]
ggcacacguggcugcag

SEQ ID NO: 1545455 - RNA, 13 nt, Human adenovirus B [HAdV-B]
aaugacaaaauau

SEQ ID NO: 1545456 - RNA, 15 nt, Human adenovirus B [HAdV-B]
cggccagacgugcag

SEQ ID NO: 1545457 - RNA, 14 nt, Human adenovirus B [HAdV-B]
ggcaguuuggaagc

SEQ ID NO: 1545458 - RNA, 19 nt, Human adenovirus B [HAdV-B]
gagggcgaaggacuggcac

SEQ ID NO: 1545459 - RNA, 21 nt, Human adenovirus B [HAdV-B]
gggacaacaaucuaugcccaa

SEQ ID NO: 1545460 - RNA, 14 nt, Human adenovirus B [HAdV-B]
gcggcucauguugc

SEQ ID NO: 1545461 - RNA, 15 nt, Human adenovirus B [HAdV-B]
ucgcucaccagaagu

SEQ ID NO: 1545462 - RNA, 20 nt, Human adenovirus B [HAdV-B]
cagccauggcuuaccagaca

SEQ ID NO: 1545463 - RNA, 21 nt, Human adenovirus B [HAdV-B]
auuacuaaugcuaaagguuuc

SEQ ID NO: 1545464 - RNA, 14 nt, Human adenovirus B [HAdV-B]
acgcacagccugua

SEQ ID NO: 1545465 - RNA, 22 nt, Human adenovirus B [HAdV-B]
aacccggcggcgucccagcagu

SEQ ID NO: 1545466 - RNA, 15 nt, Human adenovirus B [HAdV-B]
uugauuugaugaaca

SEQ ID NO: 1545467 - RNA, 14 nt, Human adenovirus B [HAdV-B]
cuuuccagccuuga

SEQ ID NO: 1545468 - RNA, 13 nt, Human adenovirus B [HAdV-B]
auacuuuuggaac

SEQ ID NO: 1545469 - RNA, 16 nt, Human adenovirus B [HAdV-B]
agucuguugaugccca

SEQ ID NO: 1545470 - RNA, 17 nt, Human adenovirus B [HAdV-B]
gaacagaacuugaaaga

SEQ ID NO: 1545471 - RNA, 14 nt, Human adenovirus B [HAdV-B]
aguuccaaauggag

SEQ ID NO: 1545472 - RNA, 16 nt, Human adenovirus B [HAdV-B]
accucuuucuguuuac

SEQ ID NO: 1545473 - RNA, 21 nt, Human adenovirus B [HAdV-B]
caguggucagugaugagcagc

SEQ ID NO: 1545474 - RNA, 21 nt, Human adenovirus B [HAdV-B]
gcaaucaugcccacauccaga

SEQ ID NO: 1545475 - RNA, 15 nt, Human adenovirus B [HAdV-B]
agauuuuucugcaac

SEQ ID NO: 1545476 - RNA, 21 nt, Human adenovirus B [HAdV-B]
uugcaugguuguagcuuuuuu

SEQ ID NO: 1545477 - RNA, 16 nt, Human adenovirus B [HAdV-B]
uacugagcucaucaaa

SEQ ID NO: 1545478 - RNA, 12 nt, Human adenovirus B [HAdV-B]
uguuaacuguuc

SEQ ID NO: 1545479 - RNA, 13 nt, Human adenovirus B [HAdV-B]
gccccgccaacac

SEQ ID NO: 1545480 - RNA, 19 nt, Human adenovirus B [HAdV-B]
cauaaucauugcagccaug

SEQ ID NO: 1545481 - RNA, 15 nt, Human adenovirus B [HAdV-B]
ggagcugacuugcag

SEQ ID NO: 1545482 - RNA, 19 nt, Human adenovirus B [HAdV-B]
cauuuggucagaaaacaca

SEQ ID NO: 1545483 - RNA, 17 nt, Human adenovirus B [HAdV-B]
gacucucgccugcaacg

SEQ ID NO: 1545484 - RNA, 16 nt, Human adenovirus B [HAdV-B]
uauggagucacugcua

SEQ ID NO: 1545485 - RNA, 15 nt, Human adenovirus B [HAdV-B]
gauuuuggcuggaau

SEQ ID NO: 1545486 - RNA, 15 nt, Human adenovirus B [HAdV-B]
caacauauccuucac

SEQ ID NO: 1545487 - RNA, 18 nt, Human adenovirus B [HAdV-B]
cauugguccaacagagcc

SEQ ID NO: 1545488 - RNA, 19 nt, Human adenovirus B [HAdV-B]
uucuaacuccucaaucauc

SEQ ID NO: 1545489 - RNA, 20 nt, Human adenovirus B [HAdV-B]
ccuagucgcagggcucugag

SEQ ID NO: 1545490 - RNA, 16 nt, Human adenovirus B [HAdV-B]
uaucaacgugacagca

SEQ ID NO: 1545491 - RNA, 16 nt, Human adenovirus B [HAdV-B]
cgagcaagacccgggc

SEQ ID NO: 1545492 - RNA, 22 nt, Human adenovirus B [HAdV-B]
ccggcgaaggcgcauugccaga

SEQ ID NO: 1545493 - RNA, 13 nt, Human adenovirus B [HAdV-B]
acagugcaggcag

SEQ ID NO: 1545494 - RNA, 18 nt, Human adenovirus B [HAdV-B]
cuacacaguguacguagc

SEQ ID NO: 1545495 - RNA, 17 nt, Human adenovirus B [HAdV-B]
ggagcagccaaaucaga

SEQ ID NO: 1545496 - RNA, 14 nt, Human adenovirus B [HAdV-B]
ccucaaaaacacac

SEQ ID NO: 1545497 - RNA, 23 nt, Human adenovirus B [HAdV-B]
acuagugaaaguuaacuggaugc

SEQ ID NO: 1545498 - RNA, 17 nt, Human adenovirus B [HAdV-B]
agacgacugacaaauaa

SEQ ID NO: 1545499 - RNA, 21 nt, Human adenovirus B [HAdV-B]
cucaggaucacagagacgagc

SEQ ID NO: 1545500 - RNA, 17 nt, Human adenovirus B [HAdV-B]
gcacgucuucaaccgcu

SEQ ID NO: 1545501 - RNA, 17 nt, Human adenovirus B [HAdV-B]
cgcguggggcgaagagc

SEQ ID NO: 1545502 - RNA, 15 nt, Human adenovirus B [HAdV-B]
cuggauuuccugcca

SEQ ID NO: 1545503 - RNA, 12 nt, Human adenovirus B [HAdV-B]
acugcuggacua

SEQ ID NO: 1545504 - RNA, 21 nt, Human adenovirus B [HAdV-B]
cugcucucacagaucacggga

SEQ ID NO: 1545505 - RNA, 18 nt, Human adenovirus B [HAdV-B]
cuuuuaaaacgcacugug

SEQ ID NO: 1545506 - RNA, 17 nt, Human adenovirus B [HAdV-B]
ugggucugacacaucau

SEQ ID NO: 1545507 - RNA, 22 nt, Human adenovirus B [HAdV-B]
gugaaaacauguugguuggagc

SEQ ID NO: 1545508 - RNA, 19 nt, Human adenovirus B [HAdV-B]
ucgcgcgguuagcgccagc

SEQ ID NO: 1545509 - RNA, 14 nt, Human adenovirus B [HAdV-B]
ccuaccaacacaac

SEQ ID NO: 1545510 - RNA, 18 nt, Human adenovirus B [HAdV-B]
caccggauugcagcacug

SEQ ID NO: 1545511 - RNA, 17 nt, Human adenovirus B [HAdV-B]
ccacagggucuccagcu

SEQ ID NO: 1545512 - RNA, 20 nt, Human adenovirus B [HAdV-B]
agaugccuggggacagguua

SEQ ID NO: 1545513 - RNA, 16 nt, Human adenovirus B [HAdV-B]
ggcaccgacucuccca

SEQ ID NO: 1545514 - RNA, 21 nt, Human adenovirus B [HAdV-B]
cuuucagaagacaugcaugac

SEQ ID NO: 1545515 - RNA, 19 nt, Human adenovirus B [HAdV-B]
acuggaucuacguccacug

SEQ ID NO: 1545516 - RNA, 13 nt, Human adenovirus B [HAdV-B]
ucaauucacaaaa

SEQ ID NO: 1545517 - RNA, 20 nt, Human adenovirus B [HAdV-B]
agcugaaauuacaaaagaag

SEQ ID NO: 1545518 - RNA, 22 nt, Human adenovirus B [HAdV-B]
gugucuaucuguaccugugcca

SEQ ID NO: 1545519 - RNA, 21 nt, Human adenovirus B [HAdV-B]
gcuaggcggagcgguggugua

SEQ ID NO: 1545520 - RNA, 14 nt, Human adenovirus B [HAdV-B]
uucucgagcugcca

SEQ ID NO: 1545521 - RNA, 19 nt, Human adenovirus B [HAdV-B]
gacaggguucgacgagcgc

SEQ ID NO: 1545522 - RNA, 23 nt, Human adenovirus B [HAdV-B]
gccuggacccuccaguggaggag

SEQ ID NO: 1545523 - RNA, 18 nt, Human adenovirus B [HAdV-B]
gcuuaacugauuuccuuc

SEQ ID NO: 1545524 - RNA, 20 nt, Human adenovirus B [HAdV-B]
augggucuucuccugggcaa

SEQ ID NO: 1545525 - RNA, 21 nt, Human adenovirus B [HAdV-B]
ggauucuuaacagugcaggca

SEQ ID NO: 1545526 - RNA, 15 nt, Human adenovirus B [HAdV-B]
cuuccuaugcacuuu

SEQ ID NO: 1545527 - RNA, 13 nt, Human adenovirus B [HAdV-B]
gacaaaguacagc

SEQ ID NO: 1545528 - RNA, 13 nt, Human adenovirus B [HAdV-B]
ucuacauuccaga

SEQ ID NO: 1545529 - RNA, 22 nt, Human adenovirus B [HAdV-B]
gccuaggacaaagcgugcugca

SEQ ID NO: 1545530 - RNA, 13 nt, Human adenovirus B [HAdV-B]
gagaggaugaaaa

SEQ ID NO: 1545531 - RNA, 16 nt, Human adenovirus B [HAdV-B]
auggcuuaccagacaa

SEQ ID NO: 1545532 - RNA, 15 nt, Human adenovirus B [HAdV-B]
agccccaauggccac

SEQ ID NO: 1545533 - RNA, 15 nt, Human adenovirus B [HAdV-B]
guacggggaugauga

SEQ ID NO: 1545534 - RNA, 21 nt, Human adenovirus B [HAdV-B]
guuaaguucgacaccaggaac

SEQ ID NO: 1545535 - RNA, 16 nt, Human adenovirus B [HAdV-B]
agcugcuacagcugcu

SEQ ID NO: 1545536 - RNA, 14 nt, Human adenovirus B [HAdV-B]
cuauuuagagacag

SEQ ID NO: 1545537 - RNA, 13 nt, Human adenovirus B [HAdV-B]
aucaccugggcag

SEQ ID NO: 1545538 - RNA, 22 nt, Human adenovirus B [HAdV-B]
agaggcaauguauacugggugc

SEQ ID NO: 1545539 - RNA, 14 nt, Human adenovirus B [HAdV-B]
caccugcggagcag

SEQ ID NO: 1545540 - RNA, 17 nt, Human adenovirus B [HAdV-B]
gcgcaguagucaagugu

SEQ ID NO: 1545541 - RNA, 13 nt, Human adenovirus B [HAdV-B]
acugacgccagac

SEQ ID NO: 1545542 - RNA, 15 nt, Human adenovirus B [HAdV-B]
ugaaacccacugcua

SEQ ID NO: 1545543 - RNA, 15 nt, Human adenovirus B [HAdV-B]
gaucacaaugugaug

SEQ ID NO: 1545544 - RNA, 15 nt, Human adenovirus B [HAdV-B]
cuacggaagccagca

SEQ ID NO: 1545545 - RNA, 23 nt, Human adenovirus B [HAdV-B]
gaugucccaacgacgagaaaaca

SEQ ID NO: 1545546 - RNA, 16 nt, Human adenovirus B [HAdV-B]
agggauuuggaagagc

SEQ ID NO: 1545547 - RNA, 20 nt, Human adenovirus B [HAdV-B]
aauuuuucauccuuggcucc

SEQ ID NO: 1545548 - RNA, 21 nt, Human adenovirus B [HAdV-B]
gucggcggacauugcuucucu

SEQ ID NO: 1545549 - RNA, 18 nt, Human adenovirus B [HAdV-B]
acaucuagaccacugccg

SEQ ID NO: 1545550 - RNA, 14 nt, Human adenovirus B [HAdV-B]
auuccuugcucaga

SEQ ID NO: 1545551 - RNA, 18 nt, Human adenovirus B [HAdV-B]
ucuucccagagcgucuca

SEQ ID NO: 1545552 - RNA, 11 nt, Human adenovirus B [HAdV-B]
gcuagcagccc

SEQ ID NO: 1545553 - RNA, 16 nt, Human adenovirus B [HAdV-B]
gcccucaagggccgca

SEQ ID NO: 1545554 - RNA, 15 nt, Human adenovirus B [HAdV-B]
caugaaucaugugaa

SEQ ID NO: 1545555 - RNA, 17 nt, Human adenovirus B [HAdV-B]
ccaauauuuuugcuucu

SEQ ID NO: 1545556 - RNA, 17 nt, Human adenovirus B [HAdV-B]
cauaggagcuggcuuuc

SEQ ID NO: 1545557 - RNA, 11 nt, Human adenovirus B [HAdV-B]
ggcagaggugg

SEQ ID NO: 1545558 - RNA, 18 nt, Human adenovirus B [HAdV-B]
aucaaaaaauuccagucu

SEQ ID NO: 1545559 - RNA, 23 nt, Human adenovirus B [HAdV-B]
gaagagcguaacuuccaaaaguc

SEQ ID NO: 1545560 - RNA, 15 nt, Human adenovirus B [HAdV-B]
cagaaugacccgcag

SEQ ID NO: 1545561 - RNA, 12 nt, Human adenovirus B [HAdV-B]
gcaggagcggag

SEQ ID NO: 1545562 - RNA, 15 nt, Human adenovirus B [HAdV-B]
cagagaggcgcugcu

SEQ ID NO: 1545563 - RNA, 16 nt, Human adenovirus B [HAdV-B]
cauagauaauuacuug

SEQ ID NO: 1545564 - RNA, 13 nt, Human adenovirus B [HAdV-B]
agugaugagcagc

SEQ ID NO: 1545565 - RNA, 17 nt, Human adenovirus B [HAdV-B]
cgcgaguuaagcgacag

SEQ ID NO: 1545566 - RNA, 19 nt, Human adenovirus B [HAdV-B]
auuuggcuaaccaggcugu

SEQ ID NO: 1545567 - RNA, 18 nt, Human adenovirus B [HAdV-B]
ccuuguaagggcagcagc

SEQ ID NO: 1545568 - RNA, 11 nt, Human adenovirus B [HAdV-B]
cgcuuucacag

SEQ ID NO: 1545569 - RNA, 22 nt, Human adenovirus B [HAdV-B]
ucuugaccacgguggugcaaaa

SEQ ID NO: 1545570 - RNA, 12 nt, Human adenovirus B [HAdV-B]
ccugggccuggc

SEQ ID NO: 1545571 - RNA, 15 nt, Human adenovirus B [HAdV-B]
cauugucuuacugcc

SEQ ID NO: 1545572 - RNA, 21 nt, Human adenovirus B [HAdV-B]
caagccacagggucuccagcu

SEQ ID NO: 1545573 - RNA, 14 nt, Human adenovirus B [HAdV-B]
ucuuccagaaaaca

SEQ ID NO: 1545574 - RNA, 22 nt, Human adenovirus B [HAdV-B]
ucuuuugccauccuucucaacg

SEQ ID NO: 1545575 - RNA, 14 nt, Human adenovirus B [HAdV-B]
gcaagaugaggaca

SEQ ID NO: 1545576 - RNA, 20 nt, Human adenovirus B [HAdV-B]
cacacaaagcacaagcucua

SEQ ID NO: 1545577 - RNA, 15 nt, Human adenovirus B [HAdV-B]
cggaggaggacaguc

SEQ ID NO: 1545578 - RNA, 21 nt, Human adenovirus B [HAdV-B]
gugucuaucuguaccugugcc

SEQ ID NO: 1545579 - RNA, 20 nt, Human adenovirus B [HAdV-B]
cucgaagggguucauugguc

SEQ ID NO: 1545580 - RNA, 15 nt, Human adenovirus B [HAdV-B]
aggucaucugggcca

SEQ ID NO: 1545581 - RNA, 14 nt, Human adenovirus B [HAdV-B]
cucgaagagaaucu

SEQ ID NO: 1545582 - RNA, 13 nt, Human adenovirus B [HAdV-B]
cucccagcagcac

SEQ ID NO: 1545583 - RNA, 19 nt, Human adenovirus B [HAdV-B]
acggaguucuuacuuuaaa

SEQ ID NO: 1545584 - RNA, 14 nt, Human adenovirus B [HAdV-B]
gccucuucucuuuc

SEQ ID NO: 1545585 - RNA, 21 nt, Human adenovirus B [HAdV-B]
ccagcgccaugacagacagag

SEQ ID NO: 1545586 - RNA, 22 nt, Human adenovirus B [HAdV-B]
uauggaagcaguaacuuuugua

SEQ ID NO: 1545587 - RNA, 16 nt, Human adenovirus B [HAdV-B]
cagauguacgcgaagc

SEQ ID NO: 1545588 - RNA, 17 nt, Human adenovirus B [HAdV-B]
gaguuaagcgacaggga

SEQ ID NO: 1545589 - RNA, 21 nt, Human adenovirus B [HAdV-B]
ucaccaaacugcuuagccaga

SEQ ID NO: 1545590 - RNA, 23 nt, Human adenovirus B [HAdV-B]
uguaucggcuuacgagcagacag

SEQ ID NO: 1545591 - RNA, 14 nt, Human adenovirus B [HAdV-B]
gcacccgucccccu

SEQ ID NO: 1545592 - RNA, 15 nt, Human adenovirus B [HAdV-B]
auugcccaggacuuu

SEQ ID NO: 1545593 - RNA, 15 nt, Human adenovirus B [HAdV-B]
guguggaagagcuca

SEQ ID NO: 1545594 - RNA, 18 nt, Human adenovirus B [HAdV-B]
gagaaaaaucagaaauuc

SEQ ID NO: 1545595 - RNA, 22 nt, Human adenovirus B [HAdV-B]
gggacgaggauuucgaaguuga

SEQ ID NO: 1545596 - RNA, 16 nt, Human adenovirus B [HAdV-B]
acccaacauccugucc

SEQ ID NO: 1545597 - RNA, 23 nt, Human adenovirus B [HAdV-B]
auuuuggagagaguuugcugcaa

SEQ ID NO: 1545598 - RNA, 16 nt, Human adenovirus B [HAdV-B]
auccagaucuucagca

SEQ ID NO: 1545599 - RNA, 21 nt, Human adenovirus B [HAdV-B]
acuauaaacaagaauuugaaa

SEQ ID NO: 1545600 - RNA, 17 nt, Human adenovirus B [HAdV-B]
cucuuccagaaaacaaa

SEQ ID NO: 1545601 - RNA, 12 nt, Human adenovirus B [HAdV-B]
uuacaaaaccau

SEQ ID NO: 1545602 - RNA, 22 nt, Human adenovirus B [HAdV-B]
cgcccguaauuauacuccuacu

SEQ ID NO: 1545603 - RNA, 10 nt, Human adenovirus B [HAdV-B]
cgcgaacagg

SEQ ID NO: 1545604 - RNA, 16 nt, Human adenovirus B [HAdV-B]
guucgagucaggguug

SEQ ID NO: 1545605 - RNA, 12 nt, Human adenovirus B [HAdV-B]
acgcacagccug

SEQ ID NO: 1545606 - RNA, 21 nt, Human adenovirus B [HAdV-B]
gaggccacaacgcacagccug

SEQ ID NO: 1545607 - RNA, 19 nt, Human adenovirus B [HAdV-B]
gaugcauuauuggacagaa

SEQ ID NO: 1545608 - RNA, 21 nt, Human adenovirus B [HAdV-B]
gcaccuuugaauugcaaggcc

SEQ ID NO: 1545609 - RNA, 19 nt, Human adenovirus B [HAdV-B]
agcaauugagauuugccac

SEQ ID NO: 1545610 - RNA, 14 nt, Human adenovirus B [HAdV-B]
caggaucacagaga

SEQ ID NO: 1545611 - RNA, 22 nt, Human adenovirus B [HAdV-B]
gcacacuaaaaggaccucaagg

SEQ ID NO: 1545612 - RNA, 20 nt, Human adenovirus B [HAdV-B]
agacggauuaauauccggaa

SEQ ID NO: 1545613 - RNA, 12 nt, Human adenovirus B [HAdV-B]
ucccaguuucaa

SEQ ID NO: 1545614 - RNA, 18 nt, Human adenovirus B [HAdV-B]
ggacauugcuucucugaa

SEQ ID NO: 1545615 - RNA, 18 nt, Human adenovirus B [HAdV-B]
ccauacucauuugugcau

SEQ ID NO: 1545616 - RNA, 18 nt, Human adenovirus B [HAdV-B]
accagggaaaaguacagu

SEQ ID NO: 1545617 - RNA, 18 nt, Human adenovirus B [HAdV-B]
aagucagguggacgagca

SEQ ID NO: 1545618 - RNA, 20 nt, Human adenovirus B [HAdV-B]
caccuuagaaaaugcaaauu

SEQ ID NO: 1545619 - RNA, 22 nt, Human adenovirus B [HAdV-B]
agcgccggcaggucccgcaggc

SEQ ID NO: 1545620 - RNA, 14 nt, Human adenovirus B [HAdV-B]
gaugugaacauggu

SEQ ID NO: 1545621 - RNA, 21 nt, Human adenovirus B [HAdV-B]
cacagcagcgggcgucauugu

SEQ ID NO: 1545622 - RNA, 18 nt, Human adenovirus B [HAdV-B]
cgaaggcgcauugccaga

SEQ ID NO: 1545623 - RNA, 14 nt, Human adenovirus B [HAdV-B]
caguccugccacca

SEQ ID NO: 1545624 - RNA, 22 nt, Human adenovirus B [HAdV-B]
acuccccccaaacgucagccaa

SEQ ID NO: 1545625 - RNA, 21 nt, Human adenovirus B [HAdV-B]
ccacccucgauuaugcaaggu

SEQ ID NO: 1545626 - RNA, 22 nt, Human adenovirus B [HAdV-B]
ggcgcuacuugcuauuccacca

SEQ ID NO: 1545627 - RNA, 16 nt, Human adenovirus B [HAdV-B]
ggaacaaagcuuggaa

SEQ ID NO: 1545628 - RNA, 18 nt, Human adenovirus B [HAdV-B]
acgauuggacccaggcca

SEQ ID NO: 1545629 - RNA, 18 nt, Human adenovirus B [HAdV-B]
uuuauuugaaaaucaauu

SEQ ID NO: 1545630 - RNA, 13 nt, Human adenovirus B [HAdV-B]
cggggucaagagc

SEQ ID NO: 1545631 - RNA, 20 nt, Human adenovirus B [HAdV-B]
gaucccauggaugagcccac

SEQ ID NO: 1545632 - RNA, 23 nt, Human adenovirus B [HAdV-B]
uguugcacaauaucuuuuagaag

SEQ ID NO: 1545633 - RNA, 20 nt, Human adenovirus B [HAdV-B]
caucccgaauaccgcaacca

SEQ ID NO: 1545634 - RNA, 21 nt, Human adenovirus B [HAdV-B]
ugggcauucugaaugaaggcg

SEQ ID NO: 1545635 - RNA, 21 nt, Human adenovirus B [HAdV-B]
ugaacggggucaucuugcagg

SEQ ID NO: 1545636 - RNA, 18 nt, Human adenovirus B [HAdV-B]
gcaggacagaaacacaga

SEQ ID NO: 1545637 - RNA, 13 nt, Human adenovirus B [HAdV-B]
cauaguugccagc

SEQ ID NO: 1545638 - RNA, 14 nt, Human adenovirus B [HAdV-B]
caagaugaggacaa

SEQ ID NO: 1545639 - RNA, 11 nt, Human adenovirus B [HAdV-B]
aaaugcuuucu

SEQ ID NO: 1545640 - RNA, 15 nt, Human adenovirus B [HAdV-B]
ucaugcauacuaaca

SEQ ID NO: 1545641 - RNA, 20 nt, Human adenovirus B [HAdV-B]
acgaaguguaccaugcaugc

SEQ ID NO: 1545642 - RNA, 20 nt, Human adenovirus B [HAdV-B]
ggucaucuugcaggucugcc

SEQ ID NO: 1545643 - RNA, 17 nt, Human adenovirus B [HAdV-B]
ugaggaccaaucacagc

SEQ ID NO: 1545644 - RNA, 23 nt, Human adenovirus B [HAdV-B]
auacaccccguccaaugucacuc

SEQ ID NO: 1545645 - RNA, 20 nt, Human adenovirus B [HAdV-B]
agacauggaaacucagccau

SEQ ID NO: 1545646 - RNA, 20 nt, Human adenovirus B [HAdV-B]
gaucucgucgaaaccguuga

SEQ ID NO: 1545647 - RNA, 20 nt, Human adenovirus B [HAdV-B]
aaaaugaguagauggaagac

SEQ ID NO: 1545648 - RNA, 19 nt, Human adenovirus B [HAdV-B]
ugggagcugacuugcagug

SEQ ID NO: 1545649 - RNA, 21 nt, Human adenovirus B [HAdV-B]
aggcagagaaacaacagacau

SEQ ID NO: 1545650 - RNA, 12 nt, Human adenovirus B [HAdV-B]
aauuuuggcuca

SEQ ID NO: 1545651 - RNA, 19 nt, Human adenovirus B [HAdV-B]
aagcaaggguccgccacug

SEQ ID NO: 1545652 - RNA, 20 nt, Human adenovirus B [HAdV-B]
gugcaggagcggagccuggg

SEQ ID NO: 1545653 - RNA, 16 nt, Human adenovirus B [HAdV-B]
gacuugcaggacagaa

SEQ ID NO: 1545654 - RNA, 16 nt, Human adenovirus B [HAdV-B]
agcgugaugcagcagc

SEQ ID NO: 1545655 - RNA, 16 nt, Human adenovirus B [HAdV-B]
cuggccaucgugaacg

SEQ ID NO: 1545656 - RNA, 13 nt, Human adenovirus B [HAdV-B]
gcugauugccaca

SEQ ID NO: 1545657 - RNA, 14 nt, Human adenovirus B [HAdV-B]
agagcgugggauug

SEQ ID NO: 1545658 - RNA, 17 nt, Human adenovirus B [HAdV-B]
cucagcucaugcucugg

SEQ ID NO: 1545659 - RNA, 13 nt, Human adenovirus B [HAdV-B]
ucuucccagagcg

SEQ ID NO: 1545660 - RNA, 17 nt, Human adenovirus B [HAdV-B]
gcaggaggcgcaaacag

SEQ ID NO: 1545661 - RNA, 20 nt, Human adenovirus B [HAdV-B]
uccgcgauaccuggcaccua

SEQ ID NO: 1545662 - RNA, 17 nt, Human adenovirus B [HAdV-B]
ugcagcaacaggaggau

SEQ ID NO: 1545663 - RNA, 14 nt, Human adenovirus B [HAdV-B]
gaacugaugcacag

SEQ ID NO: 1545664 - RNA, 21 nt, Human adenovirus B [HAdV-B]
aaaaugccaaauauggcaaag

SEQ ID NO: 1545665 - RNA, 12 nt, Human adenovirus B [HAdV-B]
caauaacaaaac

SEQ ID NO: 1545666 - RNA, 17 nt, Human adenovirus B [HAdV-B]
aguacuccaccagaaca

SEQ ID NO: 1545667 - RNA, 20 nt, Human adenovirus B [HAdV-B]
gaaacuuuuacaucucccac

SEQ ID NO: 1545668 - RNA, 20 nt, Human adenovirus B [HAdV-B]
gcuccgguauccugcccgcc

SEQ ID NO: 1545669 - RNA, 17 nt, Human adenovirus B [HAdV-B]
ugcaggcagcagcuccu

SEQ ID NO: 1545670 - RNA, 13 nt, Human adenovirus B [HAdV-B]
uagcugcacagcc

SEQ ID NO: 1545671 - RNA, 23 nt, Human adenovirus B [HAdV-B]
auagcaauggggccgugggcagc

SEQ ID NO: 1545672 - RNA, 16 nt, Human adenovirus B [HAdV-B]
ggccgagaagguggcu

SEQ ID NO: 1545673 - RNA, 17 nt, Human adenovirus B [HAdV-B]
uguaucccacuaugcaa

SEQ ID NO: 1545674 - RNA, 14 nt, Human adenovirus B [HAdV-B]
cucgcucacaccuc

SEQ ID NO: 1545675 - RNA, 15 nt, Human adenovirus B [HAdV-B]
ggcagucucgacaga

SEQ ID NO: 1545676 - RNA, 21 nt, Human adenovirus B [HAdV-B]
gagaaacaacagacauggaaa

SEQ ID NO: 1545677 - RNA, 18 nt, Human adenovirus B [HAdV-B]
uguucaauaaacaucacu

SEQ ID NO: 1545678 - RNA, 20 nt, Human adenovirus B [HAdV-B]
aucugggaccugguucacgc

SEQ ID NO: 1545679 - RNA, 22 nt, Human adenovirus B [HAdV-B]
cgucagugaaaacguuccugcu

SEQ ID NO: 1545680 - RNA, 23 nt, Human adenovirus B [HAdV-B]
uuuugcacccgacacaagccgca

SEQ ID NO: 1545681 - RNA, 15 nt, Human adenovirus B [HAdV-B]
aguguuucuugaaug

SEQ ID NO: 1545682 - RNA, 18 nt, Human adenovirus B [HAdV-B]
gcuccgggguaguguugu

SEQ ID NO: 1545683 - RNA, 22 nt, Human adenovirus B [HAdV-B]
ucccgccaagaauuucuacuga

SEQ ID NO: 1545684 - RNA, 14 nt, Human adenovirus B [HAdV-B]
ccugccaaugcaac

SEQ ID NO: 1545685 - RNA, 20 nt, Human adenovirus B [HAdV-B]
caccuguuccgacugcagaa

SEQ ID NO: 1545686 - RNA, 19 nt, Human adenovirus B [HAdV-B]
gcgccgcgacggcaggaug

SEQ ID NO: 1545687 - RNA, 18 nt, Human adenovirus B [HAdV-B]
ugaucuggacuuggaaga

SEQ ID NO: 1545688 - RNA, 18 nt, Human adenovirus B [HAdV-B]
aaauacacauacaaagcc

SEQ ID NO: 1545689 - RNA, 22 nt, Human adenovirus B [HAdV-B]
acgaccagacggaaucuuucag

SEQ ID NO: 1545690 - RNA, 13 nt, Human adenovirus B [HAdV-B]
ccuggaaggcgga

SEQ ID NO: 1545691 - RNA, 13 nt, Human adenovirus B [HAdV-B]
caauccccacugg

SEQ ID NO: 1545692 - RNA, 24 nt, Human adenovirus B [HAdV-B]
gaccccacacggcgacagguguuu

SEQ ID NO: 1545693 - RNA, 22 nt, Human adenovirus B [HAdV-B]
augccaucauagauaauuacuu

SEQ ID NO: 1545694 - RNA, 14 nt, Human adenovirus B [HAdV-B]
uguuucugaugcaa

SEQ ID NO: 1545695 - RNA, 14 nt, Human adenovirus B [HAdV-B]
gcucuuccucacug

SEQ ID NO: 1545696 - RNA, 15 nt, Human adenovirus B [HAdV-B]
ugaaaccuucucagu

SEQ ID NO: 1545697 - RNA, 18 nt, Human adenovirus B [HAdV-B]
acggcgacgcgugcaaug

SEQ ID NO: 1545698 - RNA, 15 nt, Human adenovirus B [HAdV-B]
gacagggaacugaug

SEQ ID NO: 1545699 - RNA, 16 nt, Human adenovirus B [HAdV-B]
ccccggacccaaguug

SEQ ID NO: 1545700 - RNA, 20 nt, Human adenovirus B [HAdV-B]
aacaggaggauuaaagauua

SEQ ID NO: 1545701 - RNA, 22 nt, Human adenovirus B [HAdV-B]
uggggggguauaaaagggggcg

SEQ ID NO: 1545702 - RNA, 15 nt, Human adenovirus B [HAdV-B]
aaugugaaaggcggu

SEQ ID NO: 1545703 - RNA, 18 nt, Human adenovirus B [HAdV-B]
ccagcuuuugcugugcca

SEQ ID NO: 1545704 - RNA, 14 nt, Human adenovirus B [HAdV-B]
cauucacacagcag

SEQ ID NO: 1545705 - RNA, 16 nt, Human adenovirus B [HAdV-B]
ccaaagacugguucuu

SEQ ID NO: 1545706 - RNA, 21 nt, Human adenovirus B [HAdV-B]
cccgccaaacccaacacacac

SEQ ID NO: 1545707 - RNA, 22 nt, Human adenovirus B [HAdV-B]
cuucucgcaacugggcggcuuu

SEQ ID NO: 1545708 - RNA, 14 nt, Human adenovirus B [HAdV-B]
cuuccaacaaaaag

SEQ ID NO: 1545709 - RNA, 14 nt, Human adenovirus B [HAdV-B]
cuaggcaacuguua

SEQ ID NO: 1545710 - RNA, 11 nt, Human adenovirus B [HAdV-B]
gaguuggaagu

SEQ ID NO: 1545711 - RNA, 16 nt, Human adenovirus B [HAdV-B]
guacaaccacacucuu

SEQ ID NO: 1545712 - RNA, 22 nt, Human adenovirus B [HAdV-B]
aaucagaaugacccgcaggcag

SEQ ID NO: 1545713 - RNA, 17 nt, Human adenovirus B [HAdV-B]
cugcuacagcugcugca

SEQ ID NO: 1545714 - RNA, 13 nt, Human adenovirus B [HAdV-B]
uccagucuccugc

SEQ ID NO: 1545715 - RNA, 19 nt, Human adenovirus B [HAdV-B]
ugaaacgcuuucuagagag

SEQ ID NO: 1545716 - RNA, 17 nt, Human adenovirus B [HAdV-B]
aauaguuccaaauggag

SEQ ID NO: 1545717 - RNA, 19 nt, Human adenovirus B [HAdV-B]
gucggggucaagagcagga

SEQ ID NO: 1545718 - RNA, 15 nt, Human adenovirus B [HAdV-B]
cagaaugaccacagc

SEQ ID NO: 1545719 - RNA, 14 nt, Human adenovirus B [HAdV-B]
gauuccuugcucag

SEQ ID NO: 1545720 - RNA, 16 nt, Human adenovirus B [HAdV-B]
caacgaacaagcugug

SEQ ID NO: 1545721 - RNA, 21 nt, Human adenovirus B [HAdV-B]
caguuguaaucaaaacuccau

SEQ ID NO: 1545722 - RNA, 20 nt, Human adenovirus B [HAdV-B]
guuugggccauuuuggaaga

SEQ ID NO: 1545723 - RNA, 14 nt, Human adenovirus B [HAdV-B]
gcuacgaagagcua

SEQ ID NO: 1545724 - RNA, 15 nt, Human adenovirus B [HAdV-B]
ccucuuuucaccucg

SEQ ID NO: 1545725 - RNA, 15 nt, Human adenovirus B [HAdV-B]
ggaggcuauguggga

SEQ ID NO: 1545726 - RNA, 19 nt, Human adenovirus B [HAdV-B]
ucuucgcgauccuuccagu

SEQ ID NO: 1545727 - RNA, 15 nt, Human adenovirus B [HAdV-B]
caaaaaauuccaguc

SEQ ID NO: 1545728 - RNA, 21 nt, Human adenovirus B [HAdV-B]
ccaugccuuucucccaagcag

SEQ ID NO: 1545729 - RNA, 17 nt, Human adenovirus B [HAdV-B]
acuacuugcacagagcu

SEQ ID NO: 1545730 - RNA, 12 nt, Human adenovirus B [HAdV-B]
ggauuuggaaga

SEQ ID NO: 1545731 - RNA, 17 nt, Human adenovirus B [HAdV-B]
accaaucggucucaaaa

SEQ ID NO: 1545732 - RNA, 15 nt, Human adenovirus B [HAdV-B]
uucugaggaaaucau

SEQ ID NO: 1545733 - RNA, 23 nt, Human adenovirus B [HAdV-B]
cagauuugcauuucccaagcuuu

SEQ ID NO: 1545734 - RNA, 17 nt, Human adenovirus B [HAdV-B]
gaggcuuucagagaggc

SEQ ID NO: 1545735 - RNA, 16 nt, Human adenovirus B [HAdV-B]
cccagcagcaccucac

SEQ ID NO: 1545736 - RNA, 12 nt, Human adenovirus B [HAdV-B]
gacggcuugcug

SEQ ID NO: 1545737 - RNA, 23 nt, Human adenovirus B [HAdV-B]
cagaugcgcccccaacaacagcc

SEQ ID NO: 1545738 - RNA, 20 nt, Human adenovirus B [HAdV-B]
ugcaugaaagccuuugcugu

SEQ ID NO: 1545739 - RNA, 13 nt, Human adenovirus B [HAdV-B]
ggcaaaguuuaaa

SEQ ID NO: 1545740 - RNA, 16 nt, Human adenovirus B [HAdV-B]
agucugagacagacau

SEQ ID NO: 1545741 - RNA, 12 nt, Human adenovirus B [HAdV-B]
guugaugcccaa

SEQ ID NO: 1545742 - RNA, 14 nt, Human adenovirus B [HAdV-B]
acagucaggcagag

SEQ ID NO: 1545743 - RNA, 14 nt, Human adenovirus B [HAdV-B]
aaguaaauggaaca

SEQ ID NO: 1545744 - RNA, 13 nt, Human adenovirus B [HAdV-B]
gagcggagccugg

SEQ ID NO: 1545745 - RNA, 18 nt, Human adenovirus B [HAdV-B]
aucuacuucgaacucccc

SEQ ID NO: 1545746 - RNA, 23 nt, Human adenovirus B [HAdV-B]
cacaacaccgcuuccacccuuga

SEQ ID NO: 1545747 - RNA, 12 nt, Human adenovirus B [HAdV-B]
agccuacugcca

SEQ ID NO: 1545748 - RNA, 17 nt, Human adenovirus B [HAdV-B]
cugcguggccuuuggcg

SEQ ID NO: 1545749 - RNA, 16 nt, Human adenovirus B [HAdV-B]
ugcagaaaucuuccca

SEQ ID NO: 1545750 - RNA, 20 nt, Human adenovirus B [HAdV-B]
ucgcauaucccgcugucaac

SEQ ID NO: 1545751 - RNA, 17 nt, Human adenovirus B [HAdV-B]
ucaugauuaaacaacag

SEQ ID NO: 1545752 - RNA, 18 nt, Human adenovirus B [HAdV-B]
gacauacucgcgugccag

SEQ ID NO: 1545753 - RNA, 17 nt, Human adenovirus B [HAdV-B]
ucaucgggagggucugc

SEQ ID NO: 1545754 - RNA, 20 nt, Human adenovirus B [HAdV-B]
cccagagcgucucaggguua

SEQ ID NO: 1545755 - RNA, 21 nt, Human adenovirus B [HAdV-B]
uuggauaaaaguuuggcaaug

SEQ ID NO: 1545756 - RNA, 23 nt, Human adenovirus B [HAdV-B]
ggaagcaacgaagcuuggaaugc

SEQ ID NO: 1545757 - RNA, 17 nt, Human adenovirus B [HAdV-B]
cucagguugucaguuuc

SEQ ID NO: 1545758 - RNA, 11 nt, Human adenovirus B [HAdV-B]
augaacaaugc

SEQ ID NO: 1545759 - RNA, 13 nt, Human adenovirus B [HAdV-B]
cuucuccugggca

SEQ ID NO: 1545760 - RNA, 15 nt, Human adenovirus B [HAdV-B]
agauguaaccugggc

SEQ ID NO: 1545761 - RNA, 12 nt, Human adenovirus B [HAdV-B]
aaagccaaaaua

SEQ ID NO: 1545762 - RNA, 12 nt, Human adenovirus B [HAdV-B]
ucgauuguugau

SEQ ID NO: 1545763 - RNA, 14 nt, Human adenovirus B [HAdV-B]
ugaacaugguucua

SEQ ID NO: 1545764 - RNA, 16 nt, Human adenovirus B [HAdV-B]
auuguuucugaugcaa

SEQ ID NO: 1545765 - RNA, 16 nt, Human adenovirus B [HAdV-B]
cuuaaccgaagagcaa

SEQ ID NO: 1545766 - RNA, 23 nt, Human adenovirus B [HAdV-B]
ggaggcagggcucucaaacccga

SEQ ID NO: 1545767 - RNA, 16 nt, Human adenovirus B [HAdV-B]
ucccgcagacucauuu

SEQ ID NO: 1545768 - RNA, 19 nt, Human adenovirus B [HAdV-B]
uucagacucauccugcugg

SEQ ID NO: 1545769 - RNA, 18 nt, Human adenovirus B [HAdV-B]
uugucuccugaacugcaa

SEQ ID NO: 1545770 - RNA, 23 nt, Human adenovirus B [HAdV-B]
ggcguccagcgcugccaggguuc

SEQ ID NO: 1545771 - RNA, 15 nt, Human adenovirus B [HAdV-B]
gccaccugcugcgca

SEQ ID NO: 1545772 - RNA, 23 nt, Human adenovirus B [HAdV-B]
cguacgagagcgugaugcagcag

SEQ ID NO: 1545773 - RNA, 18 nt, Human adenovirus B [HAdV-B]
guguggaagagcucagcc

SEQ ID NO: 1545774 - RNA, 11 nt, Human adenovirus B [HAdV-B]
cucuuucugau

SEQ ID NO: 1545775 - RNA, 21 nt, Human adenovirus B [HAdV-B]
caugugauggcgcuagcagcc

SEQ ID NO: 1545776 - RNA, 14 nt, Human adenovirus B [HAdV-B]
aaacggcaccugcg

SEQ ID NO: 1545777 - RNA, 19 nt, Human adenovirus B [HAdV-B]
aacguugguuaaucaugca

SEQ ID NO: 1545778 - RNA, 17 nt, Human adenovirus B [HAdV-B]
ggggaguccaacgugug

SEQ ID NO: 1545779 - RNA, 18 nt, Human adenovirus B [HAdV-B]
uguagcgggaauccugag

SEQ ID NO: 1545780 - RNA, 13 nt, Human adenovirus B [HAdV-B]
gcaaguggaggaa

SEQ ID NO: 1545781 - RNA, 12 nt, Human adenovirus B [HAdV-B]
caaccacacucu

SEQ ID NO: 1545782 - RNA, 12 nt, Human adenovirus B [HAdV-B]
accacacucuua

SEQ ID NO: 1545783 - RNA, 21 nt, Human adenovirus B [HAdV-B]
auccugucugauuccuggaua

SEQ ID NO: 1545784 - RNA, 23 nt, Human adenovirus B [HAdV-B]
augaaaacugcccaaaacaacga

SEQ ID NO: 1545785 - RNA, 22 nt, Human adenovirus B [HAdV-B]
acucgguggauuuuuuccagga

SEQ ID NO: 1545786 - RNA, 14 nt, Human adenovirus B [HAdV-B]
acccacaagcagcc

SEQ ID NO: 1545787 - RNA, 13 nt, Human adenovirus B [HAdV-B]
ggcuguggacagu

SEQ ID NO: 1545788 - RNA, 21 nt, Human adenovirus B [HAdV-B]
ucaaaacuccacuuaaucaua

SEQ ID NO: 1545789 - RNA, 22 nt, Human adenovirus B [HAdV-B]
cugagcagucuccgauguugug

SEQ ID NO: 1545790 - RNA, 14 nt, Human adenovirus B [HAdV-B]
ugaugcguuucuua

SEQ ID NO: 1545791 - RNA, 21 nt, Human adenovirus B [HAdV-B]
agcccauucgugcaggugagg

SEQ ID NO: 1545792 - RNA, 23 nt, Human adenovirus B [HAdV-B]
caaaaauaaaaaaaaaaacaagc

SEQ ID NO: 1545793 - RNA, 18 nt, Human adenovirus B [HAdV-B]
acuucgaacuccccaagg

SEQ ID NO: 1545794 - RNA, 20 nt, Human adenovirus B [HAdV-B]
gacgccagcgccaugacaga

SEQ ID NO: 1545795 - RNA, 23 nt, Human adenovirus B [HAdV-B]
augccaucaucuccugcuugcau

SEQ ID NO: 1545796 - RNA, 22 nt, Human adenovirus B [HAdV-B]
ggaugggugagugcagaggcau

SEQ ID NO: 1545797 - RNA, 17 nt, Human adenovirus B [HAdV-B]
guugacuugcaggacag

SEQ ID NO: 1545798 - RNA, 21 nt, Human adenovirus B [HAdV-B]
accuuccggaaccacacugcc

SEQ ID NO: 1545799 - RNA, 16 nt, Human adenovirus B [HAdV-B]
gcguggcucgcuacaa

SEQ ID NO: 1545800 - RNA, 18 nt, Human adenovirus B [HAdV-B]
aacgaugggaaucauaau

SEQ ID NO: 1545801 - RNA, 20 nt, Human adenovirus B [HAdV-B]
uggaagacugauggcacaac

SEQ ID NO: 1545802 - RNA, 16 nt, Human adenovirus B [HAdV-B]
aaugauugcuggaaua

SEQ ID NO: 1545803 - RNA, 14 nt, Human adenovirus B [HAdV-B]
ggcaauucuggccc

SEQ ID NO: 1545804 - RNA, 16 nt, Human adenovirus B [HAdV-B]
guucgcgguugagaag

SEQ ID NO: 1545805 - RNA, 23 nt, Human adenovirus B [HAdV-B]
uugauuaauguuagcaaaguuua

SEQ ID NO: 1545806 - RNA, 23 nt, Human adenovirus B [HAdV-B]
cauauucuguuugguaaaacaag

SEQ ID NO: 1545807 - RNA, 16 nt, Human adenovirus B [HAdV-B]
guucaugagcaaacag

SEQ ID NO: 1545808 - RNA, 18 nt, Human adenovirus B [HAdV-B]
aaccccagguagaacugc

SEQ ID NO: 1545809 - RNA, 22 nt, Human adenovirus B [HAdV-B]
gcuauaauguguuggaagacaa

SEQ ID NO: 1545810 - RNA, 19 nt, Human adenovirus B [HAdV-B]
agaagguuuccaucauguu

SEQ ID NO: 1545811 - RNA, 14 nt, Human adenovirus B [HAdV-B]
gagaaaaugaaagc

SEQ ID NO: 1545812 - RNA, 10 nt, Human adenovirus B [HAdV-B]
aauuggcucc

SEQ ID NO: 1545813 - RNA, 14 nt, Human adenovirus B [HAdV-B]
cucugaacuucuug

SEQ ID NO: 1545814 - RNA, 21 nt, Human adenovirus B [HAdV-B]
agcagauaacuaucaccaaga

SEQ ID NO: 1545815 - RNA, 17 nt, Human adenovirus B [HAdV-B]
ccagacucgcaguacuc

SEQ ID NO: 1545816 - RNA, 18 nt, Human adenovirus B [HAdV-B]
caugaauuggcucagcgc

SEQ ID NO: 1545817 - RNA, 15 nt, Human adenovirus B [HAdV-B]
gaagauacugagcag

SEQ ID NO: 1545818 - RNA, 22 nt, Human adenovirus B [HAdV-B]
gccaugcgagccgcaagagcuc

SEQ ID NO: 1545819 - RNA, 20 nt, Human adenovirus B [HAdV-B]
acucgacuccguagccugga

SEQ ID NO: 1545820 - RNA, 19 nt, Human adenovirus B [HAdV-B]
ucagcaauaaggucucugu

SEQ ID NO: 1545821 - RNA, 19 nt, Human adenovirus B [HAdV-B]
uagucauauaguucaugug

SEQ ID NO: 1545822 - RNA, 15 nt, Human adenovirus B [HAdV-B]
aggcacuucagcuug

SEQ ID NO: 1545823 - RNA, 19 nt, Human adenovirus B [HAdV-B]
cagaccucaucuucccaga

SEQ ID NO: 1545824 - RNA, 23 nt, Human adenovirus B [HAdV-B]
gagcaucaaccucuaugcuacuu

SEQ ID NO: 1545825 - RNA, 22 nt, Human adenovirus B [HAdV-B]
cuccucguuuacguacugguga

SEQ ID NO: 1545826 - RNA, 17 nt, Human adenovirus B [HAdV-B]
acggcaggaugugagcu

SEQ ID NO: 1545827 - RNA, 22 nt, Human adenovirus B [HAdV-B]
ggguccaccuuuuccaaaguau

SEQ ID NO: 1545828 - RNA, 18 nt, Human adenovirus B [HAdV-B]
guugaucaugccuggagu

SEQ ID NO: 1545829 - RNA, 23 nt, Human adenovirus B [HAdV-B]
agcaggggacgcuacagugcagu

SEQ ID NO: 1545830 - RNA, 18 nt, Human adenovirus B [HAdV-B]
gaaagagucugagacaga

SEQ ID NO: 1545831 - RNA, 16 nt, Human adenovirus B [HAdV-B]
gaacucaccaaccugg

SEQ ID NO: 1545832 - RNA, 23 nt, Human adenovirus B [HAdV-B]
ucuuaacagugcaggcagcagcu

SEQ ID NO: 1545833 - RNA, 13 nt, Human adenovirus B [HAdV-B]
ucuuaugaggaag

SEQ ID NO: 1545834 - RNA, 19 nt, Human adenovirus B [HAdV-B]
ugaccaugacuuugagaaa

SEQ ID NO: 1545835 - RNA, 16 nt, Human adenovirus B [HAdV-B]
gggacagucaggcaga

SEQ ID NO: 1545836 - RNA, 16 nt, Human adenovirus B [HAdV-B]
ugacugaaacacucac

SEQ ID NO: 1545837 - RNA, 16 nt, Human adenovirus B [HAdV-B]
aggaaaaggagcagag

SEQ ID NO: 1545838 - RNA, 22 nt, Human adenovirus B [HAdV-B]
gguggugcaacacagcagagac

SEQ ID NO: 1545839 - RNA, 13 nt, Human adenovirus B [HAdV-B]
ccuagaaauuucu

SEQ ID NO: 1545840 - RNA, 16 nt, Human adenovirus B [HAdV-B]
acccacaaucuucaug

SEQ ID NO: 1545841 - RNA, 17 nt, Human adenovirus B [HAdV-B]
aauugcgagugaugcga

SEQ ID NO: 1545842 - RNA, 16 nt, Human adenovirus B [HAdV-B]
uggacauugcucacca

SEQ ID NO: 1545843 - RNA, 15 nt, Human adenovirus B [HAdV-B]
agccauugcugucaa

SEQ ID NO: 1545844 - RNA, 15 nt, Human adenovirus B [HAdV-B]
aggcgacggcgguga

SEQ ID NO: 1545845 - RNA, 13 nt, Human adenovirus B [HAdV-B]
gcacuuuuugcuu

SEQ ID NO: 1545846 - RNA, 19 nt, Human adenovirus B [HAdV-B]
ggcaggaugucacuccaca

SEQ ID NO: 1545847 - RNA, 22 nt, Human adenovirus B [HAdV-B]
ugaugcaauccccacuggaggc

SEQ ID NO: 1545848 - RNA, 23 nt, Human adenovirus B [HAdV-B]
uguuuucuuagagauggaagaca

SEQ ID NO: 1545849 - RNA, 14 nt, Human adenovirus B [HAdV-B]
acuucgaacucccc

SEQ ID NO: 1545850 - RNA, 14 nt, Human adenovirus B [HAdV-B]
cuccaguggaggag

SEQ ID NO: 1545851 - RNA, 22 nt, Human adenovirus B [HAdV-B]
uguucuccuaggcagagaaaca

SEQ ID NO: 1545852 - RNA, 21 nt, Human adenovirus B [HAdV-B]
aguuucauccuaaaaaacaag

SEQ ID NO: 1545853 - RNA, 18 nt, Human adenovirus B [HAdV-B]
caucgccggacaggaugc

SEQ ID NO: 1545854 - RNA, 15 nt, Human adenovirus B [HAdV-B]
gugaggcgcgcgcag

SEQ ID NO: 1545855 - RNA, 18 nt, Human adenovirus B [HAdV-B]
cccagaugccugugauga

SEQ ID NO: 1545856 - RNA, 16 nt, Human adenovirus B [HAdV-B]
uggaacaggugaaaac

SEQ ID NO: 1545857 - RNA, 16 nt, Human adenovirus B [HAdV-B]
ggcgaagagccaugcu

SEQ ID NO: 1545858 - RNA, 18 nt, Human adenovirus B [HAdV-B]
cagccccccucgcagcag

SEQ ID NO: 1545859 - RNA, 18 nt, Human adenovirus B [HAdV-B]
cugguucuauucccuacc

SEQ ID NO: 1545860 - RNA, 23 nt, Human adenovirus B [HAdV-B]
gcaugacccagaugccugugaug

SEQ ID NO: 1545861 - RNA, 22 nt, Human adenovirus B [HAdV-B]
caguuagcuggcggcuccaccc

SEQ ID NO: 1545862 - RNA, 21 nt, Human adenovirus B [HAdV-B]
gcaucaaaaacgccaauaaca

SEQ ID NO: 1545863 - RNA, 17 nt, Human adenovirus B [HAdV-B]
cgccagacgccgcaccu

SEQ ID NO: 1545864 - RNA, 22 nt, Human adenovirus B [HAdV-B]
aggcgaugggucuucuccuggg

SEQ ID NO: 1545865 - RNA, 20 nt, Human adenovirus B [HAdV-B]
uuuggagagaguuugcugca

SEQ ID NO: 1545866 - RNA, 21 nt, Human adenovirus B [HAdV-B]
aggugaagauuuguaucccac

SEQ ID NO: 1545867 - RNA, 21 nt, Human adenovirus B [HAdV-B]
ugaauaauucuacaacuucac

SEQ ID NO: 1545868 - RNA, 23 nt, Human adenovirus B [HAdV-B]
cgggccccggagcauaguucccc

SEQ ID NO: 1545869 - RNA, 23 nt, Human adenovirus B [HAdV-B]
accccguucagcggcauacuuuc

SEQ ID NO: 1545870 - RNA, 14 nt, Human adenovirus B [HAdV-B]
aacuggugaggaac

SEQ ID NO: 1545871 - RNA, 20 nt, Human adenovirus B [HAdV-B]
ggccaucauggaagcuguag

SEQ ID NO: 1545872 - RNA, 16 nt, Human adenovirus B [HAdV-B]
cugauuucacucaaau

SEQ ID NO: 1545873 - RNA, 18 nt, Human adenovirus B [HAdV-B]
gaagcuuggaaugcccac

SEQ ID NO: 1545874 - RNA, 12 nt, Human adenovirus B [HAdV-B]
cucccagcagca

SEQ ID NO: 1545875 - RNA, 18 nt, Human adenovirus B [HAdV-B]
augcgggcggcgcugcag

SEQ ID NO: 1545876 - RNA, 17 nt, Human adenovirus B [HAdV-B]
uugcaaucgcagugcag

SEQ ID NO: 1545877 - RNA, 14 nt, Human adenovirus B [HAdV-B]
gccuggcugcggag

SEQ ID NO: 1545878 - RNA, 16 nt, Human adenovirus B [HAdV-B]
cucuuucauccuggaa

SEQ ID NO: 1545879 - RNA, 17 nt, Human adenovirus B [HAdV-B]
guaucauagugcaggag

SEQ ID NO: 1545880 - RNA, 22 nt, Human adenovirus B [HAdV-B]
cauuagggguguguuggacaga

SEQ ID NO: 1545881 - RNA, 19 nt, Human adenovirus B [HAdV-B]
gacuacuugcacagagcug

SEQ ID NO: 1545882 - RNA, 14 nt, Human adenovirus B [HAdV-B]
uguuaauucaucug

SEQ ID NO: 1545883 - RNA, 12 nt, Human adenovirus B [HAdV-B]
auauaauuauuu

SEQ ID NO: 1545884 - RNA, 21 nt, Human adenovirus B [HAdV-B]
gcccgucuucucaaagagcuu

SEQ ID NO: 1545885 - RNA, 15 nt, Human adenovirus B [HAdV-B]
cugcugcagaagcua

SEQ ID NO: 1545886 - RNA, 15 nt, Human adenovirus B [HAdV-B]
gauacuggauguuuu

SEQ ID NO: 1545887 - RNA, 18 nt, Human adenovirus B [HAdV-B]
ggcgcaguagucaagugu

SEQ ID NO: 1545888 - RNA, 17 nt, Human adenovirus B [HAdV-B]
ccauuugccauucucga

SEQ ID NO: 1545889 - RNA, 13 nt, Human adenovirus B [HAdV-B]
cucucaccuaccg

SEQ ID NO: 1545890 - RNA, 13 nt, Human adenovirus B [HAdV-B]
uagagacagaagc

SEQ ID NO: 1545891 - RNA, 21 nt, Human adenovirus B [HAdV-B]
auccugcccgccaccugcugc

SEQ ID NO: 1545892 - RNA, 22 nt, Human adenovirus B [HAdV-B]
gcuuccagacaugaugaaggau

SEQ ID NO: 1545893 - RNA, 11 nt, Human adenovirus B [HAdV-B]
agaguuucaug

SEQ ID NO: 1545894 - RNA, 15 nt, Human adenovirus B [HAdV-B]
acucugaacuucuug

SEQ ID NO: 1545895 - RNA, 20 nt, Human adenovirus B [HAdV-B]
cagcccaugagcaggcaggu

SEQ ID NO: 1545896 - RNA, 11 nt, Human adenovirus B [HAdV-B]
cgaggaggaag

SEQ ID NO: 1545897 - RNA, 19 nt, Human adenovirus B [HAdV-B]
auuuccccaaauggcuuca

SEQ ID NO: 1545898 - RNA, 22 nt, Human adenovirus B [HAdV-B]
uguuggauugccacagcuggca

SEQ ID NO: 1545899 - RNA, 16 nt, Human adenovirus B [HAdV-B]
ugggcgcuugccaggg

SEQ ID NO: 1545900 - RNA, 20 nt, Human adenovirus B [HAdV-B]
uauccugcccgccaccugcu

SEQ ID NO: 1545901 - RNA, 16 nt, Human adenovirus B [HAdV-B]
uggggccgugggcagc

SEQ ID NO: 1545902 - RNA, 15 nt, Human adenovirus B [HAdV-B]
cuuggaagacugaug

SEQ ID NO: 1545903 - RNA, 21 nt, Human adenovirus B [HAdV-B]
agugcccaucaguguggaaga

SEQ ID NO: 1545904 - RNA, 20 nt, Human adenovirus B [HAdV-B]
aacacacaccccgaaacugc

SEQ ID NO: 1545905 - RNA, 15 nt, Human adenovirus B [HAdV-B]
caccauaauuucauu

SEQ ID NO: 1545906 - RNA, 20 nt, Human adenovirus B [HAdV-B]
gcaguacaagcgcagaccuc

SEQ ID NO: 1545907 - RNA, 14 nt, Human adenovirus B [HAdV-B]
gccgcaggaggcgc

SEQ ID NO: 1545908 - RNA, 16 nt, Human adenovirus B [HAdV-B]
cuacagagucucugac

SEQ ID NO: 1545909 - RNA, 21 nt, Human adenovirus B [HAdV-B]
agcagcuaacccgauggcugg

SEQ ID NO: 1545910 - RNA, 18 nt, Human adenovirus B [HAdV-B]
cauuuucgcgcuccaugg

SEQ ID NO: 1545911 - RNA, 12 nt, Human adenovirus B [HAdV-B]
agaaagagggaa

SEQ ID NO: 1545912 - RNA, 12 nt, Human adenovirus B [HAdV-B]
aucaaaagaaau

SEQ ID NO: 1545913 - RNA, 13 nt, Human adenovirus B [HAdV-B]
accugcggagcag

SEQ ID NO: 1545914 - RNA, 12 nt, Human adenovirus B [HAdV-B]
gcagccaaggcg

SEQ ID NO: 1545915 - RNA, 22 nt, Human adenovirus B [HAdV-B]
ucgcaacugggcggcuuucaga

SEQ ID NO: 1545916 - RNA, 20 nt, Human adenovirus B [HAdV-B]
acaagucggcggacauugcu

SEQ ID NO: 1545917 - RNA, 16 nt, Human adenovirus B [HAdV-B]
gacagucaggcagagg

SEQ ID NO: 1545918 - RNA, 23 nt, Human adenovirus B [HAdV-B]
cagcgccaugacagacagagggg

SEQ ID NO: 1545919 - RNA, 14 nt, Human adenovirus B [HAdV-B]
uaguuauguuccug

SEQ ID NO: 1545920 - RNA, 13 nt, Human adenovirus B [HAdV-B]
gacccgcaggcag

SEQ ID NO: 1545921 - RNA, 17 nt, Human adenovirus B [HAdV-B]
uguuagcaucaguuaac

SEQ ID NO: 1545922 - RNA, 20 nt, Human adenovirus B [HAdV-B]
ggaaucaggcuguggacagu

SEQ ID NO: 1545923 - RNA, 22 nt, Human adenovirus B [HAdV-B]
guuucacauuccaccagccagg

SEQ ID NO: 1545924 - RNA, 13 nt, Human adenovirus B [HAdV-B]
cccaguccugcca

SEQ ID NO: 1545925 - RNA, 12 nt, Human adenovirus B [HAdV-B]
ucuaccuugacc

SEQ ID NO: 1545926 - RNA, 22 nt, Human adenovirus B [HAdV-B]
caagagcucugcuacgaagagc

SEQ ID NO: 1545927 - RNA, 21 nt, Human adenovirus B [HAdV-B]
ccggcgaaggcgcauugccag

SEQ ID NO: 1545928 - RNA, 14 nt, Human adenovirus B [HAdV-B]
agauguacggaggc

SEQ ID NO: 1545929 - RNA, 12 nt, Human adenovirus B [HAdV-B]
cuugaauuauuc

SEQ ID NO: 1545930 - RNA, 17 nt, Human adenovirus B [HAdV-B]
ggaucaguccugccagg

SEQ ID NO: 1545931 - RNA, 22 nt, Human adenovirus B [HAdV-B]
ugccaggguucgguccuuccag

SEQ ID NO: 1545932 - RNA, 21 nt, Human adenovirus B [HAdV-B]
cggcccuggcagaacacacuc

SEQ ID NO: 1545933 - RNA, 20 nt, Human adenovirus B [HAdV-B]
acugcuacaaguugcgccuc

SEQ ID NO: 1545934 - RNA, 19 nt, Human adenovirus B [HAdV-B]
cguccagcgcugccagggu

SEQ ID NO: 1545935 - RNA, 20 nt, Human adenovirus B [HAdV-B]
cuuaacagugcaggcagcag

SEQ ID NO: 1545936 - RNA, 11 nt, Human adenovirus B [HAdV-B]
cagucuccugc

SEQ ID NO: 1545937 - RNA, 13 nt, Human adenovirus B [HAdV-B]
auggcgugggcgc

SEQ ID NO: 1545938 - RNA, 17 nt, Human adenovirus B [HAdV-B]
gccuguacuucuccauc

SEQ ID NO: 1545939 - RNA, 11 nt, Human adenovirus B [HAdV-B]
ggaacuggcac

SEQ ID NO: 1545940 - RNA, 19 nt, Human adenovirus B [HAdV-B]
ucgaugcugccccaauggg

SEQ ID NO: 1545941 - RNA, 18 nt, Human adenovirus B [HAdV-B]
auguuagcaaaguuuaca

SEQ ID NO: 1545942 - RNA, 17 nt, Human adenovirus B [HAdV-B]
ucagaccggcaagagaa

SEQ ID NO: 1545943 - RNA, 17 nt, Human adenovirus B [HAdV-B]
cugcagaaaucuuccca

SEQ ID NO: 1545944 - RNA, 18 nt, Human adenovirus B [HAdV-B]
acauuggugccagguggu

SEQ ID NO: 1545945 - RNA, 15 nt, Human adenovirus B [HAdV-B]
gauccugagguauga

SEQ ID NO: 1545946 - RNA, 19 nt, Human adenovirus B [HAdV-B]
agccccccgggaacaagag

SEQ ID NO: 1545947 - RNA, 12 nt, Human adenovirus B [HAdV-B]
ccagaugccuuu

SEQ ID NO: 1545948 - RNA, 16 nt, Human adenovirus B [HAdV-B]
ucuagaccacugccgc

SEQ ID NO: 1545949 - RNA, 17 nt, Human adenovirus B [HAdV-B]
cuagaagauaaggaggu

SEQ ID NO: 1545950 - RNA, 14 nt, Human adenovirus B [HAdV-B]
aaugaaagcguuca

SEQ ID NO: 1545951 - RNA, 17 nt, Human adenovirus B [HAdV-B]
ggcgcugcagagccagc

SEQ ID NO: 1545952 - RNA, 13 nt, Human adenovirus B [HAdV-B]
agguucuguggac

SEQ ID NO: 1545953 - RNA, 19 nt, Human adenovirus B [HAdV-B]
cuguguacucccagcagcu

SEQ ID NO: 1545954 - RNA, 19 nt, Human adenovirus B [HAdV-B]
ggcaguuauuagaugcugc

SEQ ID NO: 1545955 - RNA, 16 nt, Human adenovirus B [HAdV-B]
gccaaugcaaccaaua

SEQ ID NO: 1545956 - RNA, 22 nt, Human adenovirus B [HAdV-B]
agagcccauucgugcaggugag

SEQ ID NO: 1545957 - RNA, 12 nt, Human adenovirus B [HAdV-B]
caugaacuccag

SEQ ID NO: 1545958 - RNA, 20 nt, Human adenovirus B [HAdV-B]
ucaugcuccgggguaguguu

SEQ ID NO: 1545959 - RNA, 20 nt, Human adenovirus B [HAdV-B]
cguggucauuucuugcuugc

SEQ ID NO: 1545960 - RNA, 19 nt, Human adenovirus B [HAdV-B]
cugaagggggaagcccgcc

SEQ ID NO: 1545961 - RNA, 19 nt, Human adenovirus B [HAdV-B]
gcgccagcaucaguuucac

SEQ ID NO: 1545962 - RNA, 17 nt, Human adenovirus B [HAdV-B]
augaucuugggguguau

SEQ ID NO: 1545963 - RNA, 13 nt, Human adenovirus B [HAdV-B]
uggcaugggaugg

SEQ ID NO: 1545964 - RNA, 18 nt, Human adenovirus B [HAdV-B]
acacaagguucccucagg

SEQ ID NO: 1545965 - RNA, 22 nt, Human adenovirus B [HAdV-B]
aacauagacauaaaugcaugca

SEQ ID NO: 1545966 - RNA, 20 nt, Human adenovirus B [HAdV-B]
uagcaucgccccccucugau

SEQ ID NO: 1545967 - RNA, 21 nt, Human adenovirus B [HAdV-B]
uguauccggaggguccuccuc

SEQ ID NO: 1545968 - RNA, 20 nt, Human adenovirus B [HAdV-B]
uuaggccgucuuuggggugg

SEQ ID NO: 1545969 - RNA, 16 nt, Human adenovirus B [HAdV-B]
aagcuaaggcaaacau

SEQ ID NO: 1545970 - RNA, 12 nt, Human adenovirus B [HAdV-B]
cuacuuucacag

SEQ ID NO: 1545971 - RNA, 15 nt, Human adenovirus B [HAdV-B]
cuucgggggcagagg

SEQ ID NO: 1545972 - RNA, 22 nt, Human adenovirus B [HAdV-B]
acuaacuuuuuaagugcuuuga

SEQ ID NO: 1545973 - RNA, 20 nt, Human adenovirus B [HAdV-B]
cuaacccgauggcugggcac

SEQ ID NO: 1545974 - RNA, 14 nt, Human adenovirus B [HAdV-B]
gcgugaugcagcag

SEQ ID NO: 1545975 - RNA, 16 nt, Human adenovirus B [HAdV-B]
ggugggcauuguaaua

SEQ ID NO: 1545976 - RNA, 22 nt, Human adenovirus B [HAdV-B]
cgucgccguagacgcacaagca

SEQ ID NO: 1545977 - RNA, 14 nt, Human adenovirus B [HAdV-B]
agacuagcagacag

SEQ ID NO: 1545978 - RNA, 16 nt, Human adenovirus B [HAdV-B]
cuuucuccauacuuua

SEQ ID NO: 1545979 - RNA, 16 nt, Human adenovirus B [HAdV-B]
acaugaaucaugugaa

SEQ ID NO: 1545980 - RNA, 15 nt, Human adenovirus B [HAdV-B]
gcacuggacaugaca

SEQ ID NO: 1545981 - RNA, 15 nt, Human adenovirus B [HAdV-B]
guuuacuuaagguga

SEQ ID NO: 1545982 - RNA, 16 nt, Human adenovirus B [HAdV-B]
uugacaagcucuuaca

SEQ ID NO: 1545983 - RNA, 16 nt, Human adenovirus B [HAdV-B]
aggaugaaaaaaaacc

SEQ ID NO: 1545984 - RNA, 17 nt, Human adenovirus B [HAdV-B]
uugccauccuucucaac

SEQ ID NO: 1545985 - RNA, 19 nt, Human adenovirus B [HAdV-B]
uuugcugugccagaaguac

SEQ ID NO: 1545986 - RNA, 21 nt, Human adenovirus B [HAdV-B]
ucuuuugccauccuucucaac

SEQ ID NO: 1545987 - RNA, 15 nt, Human adenovirus B [HAdV-B]
uucgcugucuugacu

SEQ ID NO: 1545988 - RNA, 17 nt, Human adenovirus B [HAdV-B]
uaucggaggaggaggac

SEQ ID NO: 1545989 - RNA, 21 nt, Human adenovirus B [HAdV-B]
aggaaccugaaguaaauggaa

SEQ ID NO: 1545990 - RNA, 16 nt, Human adenovirus B [HAdV-B]
cgaagagaaucugcac

SEQ ID NO: 1545991 - RNA, 22 nt, Human adenovirus B [HAdV-B]
caccauucuuaaacacacccuc

SEQ ID NO: 1545992 - RNA, 15 nt, Human adenovirus B [HAdV-B]
ugcaccacacuucug

SEQ ID NO: 1545993 - RNA, 17 nt, Human adenovirus B [HAdV-B]
ggaaggcggaugacugg

SEQ ID NO: 1545994 - RNA, 16 nt, Human adenovirus B [HAdV-B]
ccaacgacgagaaaac

SEQ ID NO: 1545995 - RNA, 20 nt, Human adenovirus B [HAdV-B]
cucucccagggauuuggaag

SEQ ID NO: 1545996 - RNA, 15 nt, Human adenovirus B [HAdV-B]
ccagggcacacgugg

SEQ ID NO: 1545997 - RNA, 18 nt, Human adenovirus B [HAdV-B]
ucuaaucccacucaugag

SEQ ID NO: 1545998 - RNA, 22 nt, Human adenovirus B [HAdV-B]
acuccagugaaucuaaugauug

SEQ ID NO: 1545999 - RNA, 20 nt, Human adenovirus B [HAdV-B]
ugccagcacggugggaucug

SEQ ID NO: 1546000 - RNA, 18 nt, Human adenovirus B [HAdV-B]
caggaugugagcuuccuu

SEQ ID NO: 1546001 - RNA, 23 nt, Human adenovirus B [HAdV-B]
agaacgcuucggacggagucucc

SEQ ID NO: 1546002 - RNA, 21 nt, Human adenovirus B [HAdV-B]
aacauuauuguacugccaucu

SEQ ID NO: 1546003 - RNA, 15 nt, Human adenovirus B [HAdV-B]
gguccgccacugcgc

SEQ ID NO: 1546004 - RNA, 22 nt, Human adenovirus B [HAdV-B]
gcugcuacagcugcugcagaag

SEQ ID NO: 1546005 - RNA, 15 nt, Human adenovirus B [HAdV-B]
aagauuuuccaugca

SEQ ID NO: 1546006 - RNA, 19 nt, Human adenovirus B [HAdV-B]
gcauuguggagaacaugga

SEQ ID NO: 1546007 - RNA, 23 nt, Human adenovirus B [HAdV-B]
gagcuuaagcauuccaccgccca

SEQ ID NO: 1546008 - RNA, 19 nt, Human adenovirus B [HAdV-B]
ccagaccauuaacuuugau

SEQ ID NO: 1546009 - RNA, 11 nt, Human adenovirus B [HAdV-B]
ggaaguuucag

SEQ ID NO: 1546010 - RNA, 20 nt, Human adenovirus B [HAdV-B]
ccucccgacggugcugcagu

SEQ ID NO: 1546011 - RNA, 15 nt, Human adenovirus B [HAdV-B]
ccagcacgacugccu

SEQ ID NO: 1546012 - RNA, 15 nt, Human adenovirus B [HAdV-B]
cugggcagcuaggac

SEQ ID NO: 1546013 - RNA, 16 nt, Human adenovirus B [HAdV-B]
uuacugacgccagacg

SEQ ID NO: 1546014 - RNA, 15 nt, Human adenovirus B [HAdV-B]
acuggcuaccuauca

SEQ ID NO: 1546015 - RNA, 22 nt, Human adenovirus B [HAdV-B]
ccuucuccggaucuccugggca

SEQ ID NO: 1546016 - RNA, 19 nt, Human adenovirus B [HAdV-B]
gacagcaaccccaggccaa

SEQ ID NO: 1546017 - RNA, 16 nt, Human adenovirus B [HAdV-B]
cccaaucgcgaagagg

SEQ ID NO: 1546018 - RNA, 20 nt, Human adenovirus B [HAdV-B]
agaacuggauuuccugccac

SEQ ID NO: 1546019 - RNA, 17 nt, Human adenovirus B [HAdV-B]
cucucauaggaccccca

SEQ ID NO: 1546020 - RNA, 19 nt, Human adenovirus B [HAdV-B]
ugcucagugucuugugacu

SEQ ID NO: 1546021 - RNA, 14 nt, Human adenovirus B [HAdV-B]
uugcuaacgcugga

SEQ ID NO: 1546022 - RNA, 14 nt, Human adenovirus B [HAdV-B]
gugcuuugagacug

SEQ ID NO: 1546023 - RNA, 19 nt, Human adenovirus B [HAdV-B]
ggagcuuaccuuuggaagu

SEQ ID NO: 1546024 - RNA, 15 nt, Human adenovirus B [HAdV-B]
agaugccuuucauga

SEQ ID NO: 1546025 - RNA, 21 nt, Human adenovirus B [HAdV-B]
ggaucacagagacgagccugg

SEQ ID NO: 1546026 - RNA, 19 nt, Human adenovirus B [HAdV-B]
cugcggagcagagcagguc

SEQ ID NO: 1546027 - RNA, 14 nt, Human adenovirus B [HAdV-B]
auggcagggaagug

SEQ ID NO: 1546028 - RNA, 18 nt, Human adenovirus B [HAdV-B]
gacuuuaugagccagagc

SEQ ID NO: 1546029 - RNA, 12 nt, Human adenovirus B [HAdV-B]
aagggaaaugcc

SEQ ID NO: 1546030 - RNA, 13 nt, Human adenovirus B [HAdV-B]
gagucgaggaacc

SEQ ID NO: 1546031 - RNA, 15 nt, Human adenovirus B [HAdV-B]
acuggaggcucccuu

SEQ ID NO: 1546032 - RNA, 20 nt, Human adenovirus B [HAdV-B]
gucaaauuuuagcuccucuc

SEQ ID NO: 1546033 - RNA, 17 nt, Human adenovirus B [HAdV-B]
aaagcgugcugcacagc

SEQ ID NO: 1546034 - RNA, 22 nt, Human adenovirus B [HAdV-B]
ucaguguggaagagcucagccg

SEQ ID NO: 1546035 - RNA, 14 nt, Human adenovirus B [HAdV-B]
ugagcugcgucacg

SEQ ID NO: 1546036 - RNA, 21 nt, Human adenovirus B [HAdV-B]
aaggucgcagugcaugguguu

SEQ ID NO: 1546037 - RNA, 14 nt, Human adenovirus B [HAdV-B]
aaucauaauccgaa

SEQ ID NO: 1546038 - RNA, 19 nt, Human adenovirus B [HAdV-B]
cucagccauugcugucaac

SEQ ID NO: 1546039 - RNA, 14 nt, Human adenovirus B [HAdV-B]
ggcugcagccaacc

SEQ ID NO: 1546040 - RNA, 14 nt, Human adenovirus B [HAdV-B]
gacagaaacacaga

SEQ ID NO: 1546041 - RNA, 15 nt, Human adenovirus B [HAdV-B]
cgaggaaaaggagca

SEQ ID NO: 1546042 - RNA, 21 nt, Human adenovirus B [HAdV-B]
augcuggcuacugugcauauu

SEQ ID NO: 1546043 - RNA, 17 nt, Human adenovirus B [HAdV-B]
uagaaugcauucuucug

SEQ ID NO: 1546044 - RNA, 11 nt, Human adenovirus B [HAdV-B]
agaagaggaag

SEQ ID NO: 1546045 - RNA, 23 nt, Human adenovirus B [HAdV-B]
uacgaccagacggaaucuuucag

SEQ ID NO: 1546046 - RNA, 15 nt, Human adenovirus B [HAdV-B]
cuuucuguuuacaga

SEQ ID NO: 1546047 - RNA, 21 nt, Human adenovirus B [HAdV-B]
aucggcacgagccaacugaac

SEQ ID NO: 1546048 - RNA, 14 nt, Human adenovirus B [HAdV-B]
gaguacuuggaaga

SEQ ID NO: 1546049 - RNA, 13 nt, Human adenovirus B [HAdV-B]
ucacagagacgag

SEQ ID NO: 1546050 - RNA, 14 nt, Human adenovirus B [HAdV-B]
gcucuaugccaacu

SEQ ID NO: 1546051 - RNA, 13 nt, Human adenovirus B [HAdV-B]
cgaguacuuggaa

SEQ ID NO: 1546052 - RNA, 20 nt, Human adenovirus B [HAdV-B]
ccuuggaagagguuccaaag

SEQ ID NO: 1546053 - RNA, 19 nt, Human adenovirus B [HAdV-B]
gaaaguauggaagugcaaa

SEQ ID NO: 1546054 - RNA, 15 nt, Human adenovirus B [HAdV-B]
gauuaugcaagguaa

SEQ ID NO: 1546055 - RNA, 14 nt, Human adenovirus B [HAdV-B]
ccuccaguggagga

SEQ ID NO: 1546056 - RNA, 16 nt, Human adenovirus B [HAdV-B]
cugcguucgcucacca

SEQ ID NO: 1546057 - RNA, 14 nt, Human adenovirus B [HAdV-B]
guuucugguggugc

SEQ ID NO: 1546058 - RNA, 12 nt, Human adenovirus B [HAdV-B]
gaacaguaagaa

SEQ ID NO: 1546059 - RNA, 20 nt, Human adenovirus B [HAdV-B]
uacuaaggguugcauucacu

SEQ ID NO: 1546060 - RNA, 14 nt, Human adenovirus B [HAdV-B]
aacagugcaggcag

SEQ ID NO: 1546061 - RNA, 14 nt, Human adenovirus B [HAdV-B]
cuuugagacugaug

SEQ ID NO: 1546062 - RNA, 21 nt, Human adenovirus B [HAdV-B]
cagcuuuugcugugccagaag

SEQ ID NO: 1546063 - RNA, 14 nt, Human adenovirus B [HAdV-B]
cugauugccacaga

SEQ ID NO: 1546064 - RNA, 20 nt, Human adenovirus B [HAdV-B]
accaggaacuucaagcuggg

SEQ ID NO: 1546065 - RNA, 14 nt, Human adenovirus B [HAdV-B]
gcgcgggcaaacac

SEQ ID NO: 1546066 - RNA, 13 nt, Human adenovirus B [HAdV-B]
ccgacugcagcac

SEQ ID NO: 1546067 - RNA, 18 nt, Human adenovirus B [HAdV-B]
uauggaagugcaaacuga

SEQ ID NO: 1546068 - RNA, 17 nt, Human adenovirus B [HAdV-B]
acagcaaccccaggcca

SEQ ID NO: 1546069 - RNA, 14 nt, Human adenovirus B [HAdV-B]
gcuuaccuuuggaa

SEQ ID NO: 1546070 - RNA, 13 nt, Human adenovirus B [HAdV-B]
guccucagcgacg

SEQ ID NO: 1546071 - RNA, 16 nt, Human adenovirus B [HAdV-B]
auacaacaauuuccac

SEQ ID NO: 1546072 - RNA, 20 nt, Human adenovirus B [HAdV-B]
cuugcuggagugucacugcc

SEQ ID NO: 1546073 - RNA, 18 nt, Human adenovirus B [HAdV-B]
accaaugccaucuuaaac

SEQ ID NO: 1546074 - RNA, 14 nt, Human adenovirus B [HAdV-B]
guaucgcaaugaca

SEQ ID NO: 1546075 - RNA, 23 nt, Human adenovirus B [HAdV-B]
uagagcgagccguagacgccagc

SEQ ID NO: 1546076 - RNA, 16 nt, Human adenovirus B [HAdV-B]
cuuucaagauggccac

SEQ ID NO: 1546077 - RNA, 12 nt, Human adenovirus B [HAdV-B]
gaguuaaaucau

SEQ ID NO: 1546078 - RNA, 14 nt, Human adenovirus B [HAdV-B]
gaacgaaacuuuuc

SEQ ID NO: 1546079 - RNA, 17 nt, Human adenovirus B [HAdV-B]
aagcuaaggcaaacaua

SEQ ID NO: 1546080 - RNA, 21 nt, Human adenovirus B [HAdV-B]
uggaggaagauugggacaguc

SEQ ID NO: 1546081 - RNA, 15 nt, Human adenovirus B [HAdV-B]
gccagcgguucugga

SEQ ID NO: 1546082 - RNA, 19 nt, Human adenovirus B [HAdV-B]
ucagauaaggcguaguguu

SEQ ID NO: 1546083 - RNA, 16 nt, Human adenovirus B [HAdV-B]
agcagcaggcgacggc

SEQ ID NO: 1546084 - RNA, 13 nt, Human adenovirus B [HAdV-B]
caugggcaccugg

SEQ ID NO: 1546085 - RNA, 19 nt, Human adenovirus B [HAdV-B]
gaugcaauccccacuggag

SEQ ID NO: 1546086 - RNA, 20 nt, Human adenovirus B [HAdV-B]
cgcgcgguuagcgccagcag

SEQ ID NO: 1546087 - RNA, 12 nt, Human adenovirus B [HAdV-B]
ccuuugcugucu

SEQ ID NO: 1546088 - RNA, 17 nt, Human adenovirus B [HAdV-B]
aguugcgccucuucucu

SEQ ID NO: 1546089 - RNA, 19 nt, Human adenovirus B [HAdV-B]
uacaugggcaccuggagcg

SEQ ID NO: 1546090 - RNA, 17 nt, Human adenovirus B [HAdV-B]
augacccagaugccugu

SEQ ID NO: 1546091 - RNA, 18 nt, Human adenovirus B [HAdV-B]
agguggacgagcagaccu

SEQ ID NO: 1546092 - RNA, 12 nt, Human adenovirus B [HAdV-B]
caagcaggagag

SEQ ID NO: 1546093 - RNA, 16 nt, Human adenovirus B [HAdV-B]
ccugccaccaccucua

SEQ ID NO: 1546094 - RNA, 11 nt, Human adenovirus B [HAdV-B]
cccugcugcua

SEQ ID NO: 1546095 - RNA, 14 nt, Human adenovirus B [HAdV-B]
uguacucccagcag

SEQ ID NO: 1546096 - RNA, 13 nt, Human adenovirus B [HAdV-B]
ucgcaaccccgcu

SEQ ID NO: 1546097 - RNA, 18 nt, Human adenovirus B [HAdV-B]
ugucucugaagaaaugca

SEQ ID NO: 1546098 - RNA, 13 nt, Human adenovirus B [HAdV-B]
uugcaugaaagcc

SEQ ID NO: 1546099 - RNA, 21 nt, Human adenovirus B [HAdV-B]
augaaggcgaggaggaagagg

SEQ ID NO: 1546100 - RNA, 15 nt, Human adenovirus B [HAdV-B]
uauaauucuaugaaa

SEQ ID NO: 1546101 - RNA, 19 nt, Human adenovirus B [HAdV-B]
agugcaccuacacccugcu

SEQ ID NO: 1546102 - RNA, 13 nt, Human adenovirus B [HAdV-B]
uggugaacaccaa

SEQ ID NO: 1546103 - RNA, 23 nt, Human adenovirus B [HAdV-B]
gcccaaugcaacaugaccaaaga

SEQ ID NO: 1546104 - RNA, 19 nt, Human adenovirus B [HAdV-B]
ucgagccggccggagccgc

SEQ ID NO: 1546105 - RNA, 13 nt, Human adenovirus B [HAdV-B]
guuaaaucaucau

SEQ ID NO: 1546106 - RNA, 14 nt, Human adenovirus B [HAdV-B]
cgagcugccagugc

SEQ ID NO: 1546107 - RNA, 14 nt, Human adenovirus B [HAdV-B]
ccucaaaacuccac

SEQ ID NO: 1546108 - RNA, 22 nt, Human adenovirus B [HAdV-B]
ucagucgcgcuuugggacagga

SEQ ID NO: 1546109 - RNA, 19 nt, Human adenovirus B [HAdV-B]
cagguuaucgcaccugaag

SEQ ID NO: 1546110 - RNA, 17 nt, Human adenovirus B [HAdV-B]
uuugacaugaacaugca

SEQ ID NO: 1546111 - RNA, 15 nt, Human adenovirus B [HAdV-B]
cagcaccucacuucc

SEQ ID NO: 1546112 - RNA, 19 nt, Human adenovirus B [HAdV-B]
cugacuuuaugagccagag

SEQ ID NO: 1546113 - RNA, 17 nt, Human adenovirus B [HAdV-B]
cugccuccuugcagaua

SEQ ID NO: 1546114 - RNA, 19 nt, Human adenovirus B [HAdV-B]
uucuggggucuuguugcca

SEQ ID NO: 1546115 - RNA, 15 nt, Human adenovirus B [HAdV-B]
auacaauccagacau

SEQ ID NO: 1546116 - RNA, 23 nt, Human adenovirus B [HAdV-B]
caccgagcuaccacugccaugcg

SEQ ID NO: 1546117 - RNA, 13 nt, Human adenovirus B [HAdV-B]
ugcaggucugccu

SEQ ID NO: 1546118 - RNA, 18 nt, Human adenovirus B [HAdV-B]
auccacaagacccagagg

SEQ ID NO: 1546119 - RNA, 21 nt, Human adenovirus B [HAdV-B]
cucgcacuuagaagauacuga

SEQ ID NO: 1546120 - RNA, 20 nt, Human adenovirus B [HAdV-B]
gaaauauggagcccagcaug

SEQ ID NO: 1546121 - RNA, 21 nt, Human adenovirus B [HAdV-B]
cugaaucauaauauugccaug

SEQ ID NO: 1546122 - RNA, 17 nt, Human adenovirus B [HAdV-B]
ccgcuuucgcagcggcg

SEQ ID NO: 1546123 - RNA, 14 nt, Human adenovirus B [HAdV-B]
ucaaacugcacacu

SEQ ID NO: 1546124 - RNA, 20 nt, Human adenovirus B [HAdV-B]
agagcgugaugcagcagcag

SEQ ID NO: 1546125 - RNA, 14 nt, Human adenovirus B [HAdV-B]
uuguaucuggugga

SEQ ID NO: 1546126 - RNA, 18 nt, Human adenovirus B [HAdV-B]
gcaguuauugacagugua

SEQ ID NO: 1546127 - RNA, 17 nt, Human adenovirus B [HAdV-B]
ccuguuccgucuggcca

SEQ ID NO: 1546128 - RNA, 17 nt, Human adenovirus B [HAdV-B]
gcaugaccucugcacuc

SEQ ID NO: 1546129 - RNA, 15 nt, Human adenovirus B [HAdV-B]
cuacagagucucuga

SEQ ID NO: 1546130 - RNA, 11 nt, Human adenovirus B [HAdV-B]
ggagcagagcu

SEQ ID NO: 1546131 - RNA, 20 nt, Human adenovirus B [HAdV-B]
ugccauucucgagcugccag

SEQ ID NO: 1546132 - RNA, 20 nt, Human adenovirus B [HAdV-B]
auaacaaaaccuggaacaau

SEQ ID NO: 1546133 - RNA, 12 nt, Human adenovirus B [HAdV-B]
ugaauguuccuu

SEQ ID NO: 1546134 - RNA, 22 nt, Human adenovirus B [HAdV-B]
cagaacugaagugcccaucagu

SEQ ID NO: 1546135 - RNA, 18 nt, Human adenovirus B [HAdV-B]
gcccaucaguguggaaga

SEQ ID NO: 1546136 - RNA, 21 nt, Human adenovirus B [HAdV-B]
aacgaauuuucucccagcggc

SEQ ID NO: 1546137 - RNA, 16 nt, Human adenovirus B [HAdV-B]
aauuggcgcgauacca

SEQ ID NO: 1546138 - RNA, 18 nt, Human adenovirus B [HAdV-B]
cgaugggucuucuccugg

SEQ ID NO: 1546139 - RNA, 17 nt, Human adenovirus B [HAdV-B]
ugaaauuaugugcauuu

SEQ ID NO: 1546140 - RNA, 19 nt, Human adenovirus B [HAdV-B]
ggcugcgguccgaccugga

SEQ ID NO: 1546141 - RNA, 20 nt, Human adenovirus B [HAdV-B]
aucccgccaaacccaacaca

SEQ ID NO: 1546142 - RNA, 13 nt, Human adenovirus B [HAdV-B]
agauuacagccaa

SEQ ID NO: 1546143 - RNA, 23 nt, Human adenovirus B [HAdV-B]
ccucgcggugaccagcaugaaua

SEQ ID NO: 1546144 - RNA, 17 nt, Human adenovirus B [HAdV-B]
ggccgaacuuucggccu

SEQ ID NO: 1546145 - RNA, 12 nt, Human adenovirus B [HAdV-B]
ucagaaauuccc

SEQ ID NO: 1546146 - RNA, 16 nt, Human adenovirus B [HAdV-B]
agcgcuaccaucuccg

SEQ ID NO: 1546147 - RNA, 17 nt, Human adenovirus B [HAdV-B]
cggaggguccuccuccu

SEQ ID NO: 1546148 - RNA, 20 nt, Human adenovirus B [HAdV-B]
gcuauggagucacugcuacc

SEQ ID NO: 1546149 - RNA, 21 nt, Human adenovirus B [HAdV-B]
gccuuguaagggcagcagccc

SEQ ID NO: 1546150 - RNA, 19 nt, Human adenovirus B [HAdV-B]
cuccguagccuggaggaac

SEQ ID NO: 1546151 - RNA, 22 nt, Human adenovirus B [HAdV-B]
auuuccacuucaacaaucagca

SEQ ID NO: 1546152 - RNA, 18 nt, Human adenovirus B [HAdV-B]
gcuccuucugaaucauaa

SEQ ID NO: 1546153 - RNA, 21 nt, Human adenovirus B [HAdV-B]
auuggagcaguaucuggagcg

SEQ ID NO: 1546154 - RNA, 19 nt, Human adenovirus B [HAdV-B]
uacccuugguuugaugcau

SEQ ID NO: 1546155 - RNA, 15 nt, Human adenovirus B [HAdV-B]
guaacagaagaggaa

SEQ ID NO: 1546156 - RNA, 15 nt, Human adenovirus B [HAdV-B]
cgaugacaauucucu

SEQ ID NO: 1546157 - RNA, 20 nt, Human adenovirus B [HAdV-B]
auuugauuuuggcuggaaug

SEQ ID NO: 1546158 - RNA, 14 nt, Human adenovirus B [HAdV-B]
guccguugaaauua

SEQ ID NO: 1546159 - RNA, 19 nt, Human adenovirus B [HAdV-B]
caccugcugcgcacugccc

SEQ ID NO: 1546160 - RNA, 13 nt, Human adenovirus B [HAdV-B]
auucagaaaccuu

SEQ ID NO: 1546161 - RNA, 17 nt, Human adenovirus B [HAdV-B]
ugaauuagucugcaaaa

SEQ ID NO: 1546162 - RNA, 12 nt, Human adenovirus B [HAdV-B]
gcagcgaagugg

SEQ ID NO: 1546163 - RNA, 15 nt, Human adenovirus B [HAdV-B]
gucagcauugucacu

SEQ ID NO: 1546164 - RNA, 20 nt, Human adenovirus B [HAdV-B]
gccauacccuaccaacacaa

SEQ ID NO: 1546165 - RNA, 14 nt, Human adenovirus B [HAdV-B]
gcaguacaggacag

SEQ ID NO: 1546166 - RNA, 22 nt, Human adenovirus B [HAdV-B]
cuguagugccuucccgcucuaa

SEQ ID NO: 1546167 - RNA, 13 nt, Human adenovirus B [HAdV-B]
gacagucaggcag

SEQ ID NO: 1546168 - RNA, 15 nt, Human adenovirus B [HAdV-B]
cagcuaaagaccauc

SEQ ID NO: 1546169 - RNA, 20 nt, Human adenovirus B [HAdV-B]
agacgagccugggaucaugg

SEQ ID NO: 1546170 - RNA, 16 nt, Human adenovirus B [HAdV-B]
gcccaguccugccacc

SEQ ID NO: 1546171 - RNA, 14 nt, Human adenovirus B [HAdV-B]
gcuugacucucugg

SEQ ID NO: 1546172 - RNA, 23 nt, Human adenovirus B [HAdV-B]
gacuuuaccccuacggaagccag

SEQ ID NO: 1546173 - RNA, 15 nt, Human adenovirus B [HAdV-B]
gaucccauggaugag

SEQ ID NO: 1546174 - RNA, 19 nt, Human adenovirus B [HAdV-B]
gccaucuuccagcagaguc

SEQ ID NO: 1546175 - RNA, 19 nt, Human adenovirus B [HAdV-B]
aaauuuuggcucaaccaua

SEQ ID NO: 1546176 - RNA, 14 nt, Human adenovirus B [HAdV-B]
gggucuucuccugg

SEQ ID NO: 1546177 - RNA, 14 nt, Human adenovirus B [HAdV-B]
cagaacuugaaaga

SEQ ID NO: 1546178 - RNA, 13 nt, Human adenovirus B [HAdV-B]
agcugacuugcag

SEQ ID NO: 1546179 - RNA, 20 nt, Human adenovirus B [HAdV-B]
gccugacuuuaugagccaga

SEQ ID NO: 1546180 - RNA, 12 nt, Human adenovirus B [HAdV-B]
guaccugugcca

SEQ ID NO: 1546181 - RNA, 18 nt, Human adenovirus B [HAdV-B]
cauuguggagaacaugga

SEQ ID NO: 1546182 - RNA, 21 nt, Human adenovirus B [HAdV-B]
aggauccuuagauaugugcag

SEQ ID NO: 1546183 - RNA, 14 nt, Human adenovirus B [HAdV-B]
caacuucacauaca

SEQ ID NO: 1546184 - RNA, 23 nt, Human adenovirus B [HAdV-B]
acaacaauuuccacuucaacaau

SEQ ID NO: 1546185 - RNA, 20 nt, Human adenovirus B [HAdV-B]
gaggcggaugaaggcgagga

SEQ ID NO: 1546186 - RNA, 18 nt, Human adenovirus B [HAdV-B]
gcuggauauggccagcac

SEQ ID NO: 1546187 - RNA, 15 nt, Human adenovirus B [HAdV-B]
cagcuccgccagucc

SEQ ID NO: 1546188 - RNA, 20 nt, Human adenovirus B [HAdV-B]
cagacauggaaacucagcca

SEQ ID NO: 1546189 - RNA, 12 nt, Human adenovirus B [HAdV-B]
ucccaucacugg

SEQ ID NO: 1546190 - RNA, 18 nt, Human adenovirus B [HAdV-B]
gucuaucuguaccugugc

SEQ ID NO: 1546191 - RNA, 17 nt, Human adenovirus B [HAdV-B]
ccuuccaguacucuucu

SEQ ID NO: 1546192 - RNA, 15 nt, Human adenovirus B [HAdV-B]
acaauacaauuucca

SEQ ID NO: 1546193 - RNA, 13 nt, Human adenovirus B [HAdV-B]
ugcaacccccagu

SEQ ID NO: 1546194 - RNA, 18 nt, Human adenovirus B [HAdV-B]
gauaugugcagcagagcg

SEQ ID NO: 1546195 - RNA, 20 nt, Human adenovirus B [HAdV-B]
uccaacagaaaaccagcagc

SEQ ID NO: 1546196 - RNA, 22 nt, Human adenovirus B [HAdV-B]
ugcaaaucuggaagauccugag

SEQ ID NO: 1546197 - RNA, 22 nt, Human adenovirus B [HAdV-B]
uacacaccuugcuucacuuucu

SEQ ID NO: 1546198 - RNA, 18 nt, Human adenovirus B [HAdV-B]
cauacucgcgugccaggc

SEQ ID NO: 1546199 - RNA, 23 nt, Human adenovirus B [HAdV-B]
cggugaugcaauccccacuggag

SEQ ID NO: 1546200 - RNA, 18 nt, Human adenovirus B [HAdV-B]
cuccuccuucguacgaga

SEQ ID NO: 1546201 - RNA, 23 nt, Human adenovirus B [HAdV-B]
ugcgacaucuagaccacugccgc

SEQ ID NO: 1546202 - RNA, 22 nt, Human adenovirus B [HAdV-B]
ccaacaccuuaaucccagaaau

SEQ ID NO: 1546203 - RNA, 18 nt, Human adenovirus B [HAdV-B]
cguuaaccccacagccaa

SEQ ID NO: 1546204 - RNA, 16 nt, Human adenovirus B [HAdV-B]
agcuuuugcugugcca

SEQ ID NO: 1546205 - RNA, 17 nt, Human adenovirus B [HAdV-B]
uguuggauugccacagc

SEQ ID NO: 1546206 - RNA, 21 nt, Human adenovirus B [HAdV-B]
uccaucagcagacacaucacu

SEQ ID NO: 1546207 - RNA, 21 nt, Human adenovirus B [HAdV-B]
ucguacgagagcgugaugcag

SEQ ID NO: 1546208 - RNA, 16 nt, Human adenovirus B [HAdV-B]
ccuuuauuccaaugug

SEQ ID NO: 1546209 - RNA, 19 nt, Human adenovirus B [HAdV-B]
gugcccaucaguguggaag

SEQ ID NO: 1546210 - RNA, 19 nt, Human adenovirus B [HAdV-B]
cugcuacaaguugcgccuc

SEQ ID NO: 1546211 - RNA, 12 nt, Human adenovirus B [HAdV-B]
acaauucucuag

SEQ ID NO: 1546212 - RNA, 15 nt, Human adenovirus B [HAdV-B]
acuugggugggagag

SEQ ID NO: 1546213 - RNA, 17 nt, Human adenovirus B [HAdV-B]
uagucuguuccacaguu

SEQ ID NO: 1546214 - RNA, 21 nt, Human adenovirus B [HAdV-B]
aucacaauuaggaccagugcu

SEQ ID NO: 1546215 - RNA, 23 nt, Human adenovirus B [HAdV-B]
ugccugacuuuaugagccagagc

SEQ ID NO: 1546216 - RNA, 16 nt, Human adenovirus B [HAdV-B]
ggcgaggaggaagagg

SEQ ID NO: 1546217 - RNA, 20 nt, Human adenovirus B [HAdV-B]
ccugcauggugggaaucaac

SEQ ID NO: 1546218 - RNA, 19 nt, Human adenovirus B [HAdV-B]
aaugggaguaaaguguaaa

SEQ ID NO: 1546219 - RNA, 13 nt, Human adenovirus B [HAdV-B]
gggcggguggugc

SEQ ID NO: 1546220 - RNA, 20 nt, Human adenovirus B [HAdV-B]
cuggacuacuugcacagagc

SEQ ID NO: 1546221 - RNA, 21 nt, Human adenovirus B [HAdV-B]
ccauccgaguaucaucacuua

SEQ ID NO: 1546222 - RNA, 15 nt, Human adenovirus B [HAdV-B]
uccgacugcagaauc

SEQ ID NO: 1546223 - RNA, 16 nt, Human adenovirus B [HAdV-B]
cuccuaggcagagaaa

SEQ ID NO: 1546224 - RNA, 18 nt, Human adenovirus B [HAdV-B]
ugccaucuuccagcagag

SEQ ID NO: 1546225 - RNA, 15 nt, Human adenovirus B [HAdV-B]
gguucuguggacagg

SEQ ID NO: 1546226 - RNA, 16 nt, Human adenovirus B [HAdV-B]
gucuuuccaucacaag

SEQ ID NO: 1546227 - RNA, 14 nt, Human adenovirus B [HAdV-B]
cauaagauucuuga

SEQ ID NO: 1546228 - RNA, 21 nt, Human adenovirus B [HAdV-B]
ccuggaaggcggaugacuggc

SEQ ID NO: 1546229 - RNA, 13 nt, Human adenovirus B [HAdV-B]
ugaaaugggcaug

SEQ ID NO: 1546230 - RNA, 15 nt, Human adenovirus B [HAdV-B]
cagccuguacuucuc

SEQ ID NO: 1546231 - RNA, 18 nt, Human adenovirus B [HAdV-B]
gugccaggcacuuccauu

SEQ ID NO: 1546232 - RNA, 16 nt, Human adenovirus B [HAdV-B]
aagauugggacaguca

SEQ ID NO: 1546233 - RNA, 18 nt, Human adenovirus B [HAdV-B]
ugucucugaccaugacuu

SEQ ID NO: 1546234 - RNA, 18 nt, Human adenovirus B [HAdV-B]
ucaucugggccaaacugg

SEQ ID NO: 1546235 - RNA, 21 nt, Human adenovirus B [HAdV-B]
guggcagccuagucgcagggc

SEQ ID NO: 1546236 - RNA, 15 nt, Human adenovirus B [HAdV-B]
gaucaaaagaaaugc

SEQ ID NO: 1546237 - RNA, 16 nt, Human adenovirus B [HAdV-B]
gaggaaaaggagcaga

SEQ ID NO: 1546238 - RNA, 12 nt, Human adenovirus B [HAdV-B]
cuucuugcuuac

SEQ ID NO: 1546239 - RNA, 16 nt, Human adenovirus B [HAdV-B]
ugaucacaaugugaug

SEQ ID NO: 1546240 - RNA, 18 nt, Human adenovirus B [HAdV-B]
cuucagcuugcccucaua

SEQ ID NO: 1546241 - RNA, 18 nt, Human adenovirus B [HAdV-B]
ggccuaagagaccugcua

SEQ ID NO: 1546242 - RNA, 13 nt, Human adenovirus B [HAdV-B]
agacgagccuggg

SEQ ID NO: 1546243 - RNA, 22 nt, Human adenovirus B [HAdV-B]
aggucccgcaggcaagcagccg

SEQ ID NO: 1546244 - RNA, 18 nt, Human adenovirus B [HAdV-B]
gcuguuucugguggugca

SEQ ID NO: 1546245 - RNA, 18 nt, Human adenovirus B [HAdV-B]
agaaguaccucagagcga

SEQ ID NO: 1546246 - RNA, 11 nt, Human adenovirus B [HAdV-B]
accaaugccau

SEQ ID NO: 1546247 - RNA, 12 nt, Human adenovirus B [HAdV-B]
caucagccaugg

SEQ ID NO: 1546248 - RNA, 15 nt, Human adenovirus B [HAdV-B]
cuauuuagagacaga

SEQ ID NO: 1546249 - RNA, 14 nt, Human adenovirus B [HAdV-B]
agcagagcguggga

SEQ ID NO: 1546250 - RNA, 22 nt, Human adenovirus B [HAdV-B]
cagcauuaucgcugcagugaca

SEQ ID NO: 1546251 - RNA, 16 nt, Human adenovirus B [HAdV-B]
gcaaggccccagcagc

SEQ ID NO: 1546252 - RNA, 23 nt, Human adenovirus B [HAdV-B]
uucggacggagucuccgguuuuu

SEQ ID NO: 1546253 - RNA, 15 nt, Human adenovirus B [HAdV-B]
uguccuccaagauuu

SEQ ID NO: 1546254 - RNA, 20 nt, Human adenovirus B [HAdV-B]
cagaauaaaaaagcgaaaga

SEQ ID NO: 1546255 - RNA, 19 nt, Human adenovirus B [HAdV-B]
ucagacucauccugcuggu

SEQ ID NO: 1546256 - RNA, 14 nt, Human adenovirus B [HAdV-B]
ucaggaugucccaa

SEQ ID NO: 1546257 - RNA, 18 nt, Human adenovirus B [HAdV-B]
aaauuuaccugcauggug

SEQ ID NO: 1546258 - RNA, 21 nt, Human adenovirus B [HAdV-B]
uaacuguucacugguuuuuau

SEQ ID NO: 1546259 - RNA, 15 nt, Human adenovirus B [HAdV-B]
ccuggcagaacacac

SEQ ID NO: 1546260 - RNA, 17 nt, Human adenovirus B [HAdV-B]
agguguauuucacguga

SEQ ID NO: 1546261 - RNA, 18 nt, Human adenovirus B [HAdV-B]
guuucuguauugcaggag

SEQ ID NO: 1546262 - RNA, 22 nt, Human adenovirus B [HAdV-B]
cacucuuccagaaaacaaaaac

SEQ ID NO: 1546263 - RNA, 21 nt, Human adenovirus B [HAdV-B]
ccgguauccugcccgccaccu

SEQ ID NO: 1546264 - RNA, 23 nt, Human adenovirus B [HAdV-B]
caaugaauaaauaaacaagcuug

SEQ ID NO: 1546265 - RNA, 12 nt, Human adenovirus B [HAdV-B]
uccgacugcagc

SEQ ID NO: 1546266 - RNA, 15 nt, Human adenovirus B [HAdV-B]
auucacacagcagcg

SEQ ID NO: 1546267 - RNA, 20 nt, Human adenovirus B [HAdV-B]
cucggcugcggagacaagca

SEQ ID NO: 1546268 - RNA, 22 nt, Human adenovirus B [HAdV-B]
cuggcagaacaaggaagaccac

SEQ ID NO: 1546269 - RNA, 16 nt, Human adenovirus B [HAdV-B]
ccggauugcagcacug

SEQ ID NO: 1546270 - RNA, 18 nt, Human adenovirus B [HAdV-B]
ucacagagacgagccugg

SEQ ID NO: 1546271 - RNA, 20 nt, Human adenovirus B [HAdV-B]
auugcucaccaccucagaug

SEQ ID NO: 1546272 - RNA, 15 nt, Human adenovirus B [HAdV-B]
gucuuacugccuggc

SEQ ID NO: 1546273 - RNA, 16 nt, Human adenovirus B [HAdV-B]
uuugaaaaauguugaa

SEQ ID NO: 1546274 - RNA, 16 nt, Human adenovirus B [HAdV-B]
cuccuuuagccagagg

SEQ ID NO: 1546275 - RNA, 17 nt, Human adenovirus B [HAdV-B]
ggcuugacggggaagac

SEQ ID NO: 1546276 - RNA, 17 nt, Human adenovirus B [HAdV-B]
gcagcacuggacaugac

SEQ ID NO: 1546277 - RNA, 16 nt, Human adenovirus B [HAdV-B]
auuucaccaaugccau

SEQ ID NO: 1546278 - RNA, 12 nt, Human adenovirus B [HAdV-B]
cacuccacagcu

SEQ ID NO: 1546279 - RNA, 14 nt, Human adenovirus B [HAdV-B]
caaggccccagcag

SEQ ID NO: 1546280 - RNA, 22 nt, Human adenovirus B [HAdV-B]
cacgguuuggaccgaagacgag

SEQ ID NO: 1546281 - RNA, 22 nt, Human adenovirus B [HAdV-B]
uacguccacuggacgggauagg

SEQ ID NO: 1546282 - RNA, 15 nt, Human adenovirus B [HAdV-B]
gagagccggccugga

SEQ ID NO: 1546283 - RNA, 14 nt, Human adenovirus B [HAdV-B]
ccaucaucgugcuc

SEQ ID NO: 1546284 - RNA, 19 nt, Human adenovirus B [HAdV-B]
cucaagguccggcccacgg

SEQ ID NO: 1546285 - RNA, 16 nt, Human adenovirus B [HAdV-B]
uugcgccaacaccugu

SEQ ID NO: 1546286 - RNA, 23 nt, Human adenovirus B [HAdV-B]
ugacguucccucaaaaacacacu

SEQ ID NO: 1546287 - RNA, 16 nt, Human adenovirus B [HAdV-B]
aggagcggagccuggg

SEQ ID NO: 1546288 - RNA, 23 nt, Human adenovirus B [HAdV-B]
gcacgucuucaaccgcuuuccug

SEQ ID NO: 1546289 - RNA, 21 nt, Human adenovirus B [HAdV-B]
ucgaagcaagggggccaccuc

SEQ ID NO: 1546290 - RNA, 14 nt, Human adenovirus B [HAdV-B]
uacgagcagacagu

SEQ ID NO: 1546291 - RNA, 22 nt, Human adenovirus B [HAdV-B]
caaaaauaaaaaaaaaaacaag

SEQ ID NO: 1546292 - RNA, 13 nt, Human adenovirus B [HAdV-B]
ugcgggggcaaca

SEQ ID NO: 1546293 - RNA, 18 nt, Human adenovirus B [HAdV-B]
uccagguguaaguuucca

SEQ ID NO: 1546294 - RNA, 23 nt, Human adenovirus B [HAdV-B]
aucuugcaggucugccuacccau

SEQ ID NO: 1546295 - RNA, 23 nt, Human adenovirus B [HAdV-B]
uacggaagccagcacccagacca

SEQ ID NO: 1546296 - RNA, 22 nt, Human adenovirus B [HAdV-B]
gccagcgccaugacagacagag

SEQ ID NO: 1546297 - RNA, 16 nt, Human adenovirus B [HAdV-B]
gcgcaaguuugcuccg

SEQ ID NO: 1546298 - RNA, 19 nt, Human adenovirus B [HAdV-B]
cagcccaugagcaggcagg

SEQ ID NO: 1546299 - RNA, 16 nt, Human adenovirus B [HAdV-B]
gguguguuggacagag

SEQ ID NO: 1546300 - RNA, 19 nt, Human adenovirus B [HAdV-B]
cauggguauucugcaugag

SEQ ID NO: 1546301 - RNA, 18 nt, Human adenovirus B [HAdV-B]
augaacgaucgcgguggg

SEQ ID NO: 1546302 - RNA, 21 nt, Human adenovirus B [HAdV-B]
cauuaagcagguagcgccugg

SEQ ID NO: 1546303 - RNA, 16 nt, Human adenovirus B [HAdV-B]
gacgauuggacccagg

SEQ ID NO: 1546304 - RNA, 22 nt, Human adenovirus B [HAdV-B]
acuugucgccuucgcguuccca

SEQ ID NO: 1546305 - RNA, 16 nt, Human adenovirus B [HAdV-B]
cucugacuggagcugg

SEQ ID NO: 1546306 - RNA, 17 nt, Human adenovirus B [HAdV-B]
ccuggcagaacacacuc

SEQ ID NO: 1546307 - RNA, 21 nt, Human adenovirus B [HAdV-B]
cagcacggugggaucugcaau

SEQ ID NO: 1546308 - RNA, 16 nt, Human adenovirus B [HAdV-B]
cucagccauugcuguc

SEQ ID NO: 1546309 - RNA, 20 nt, Human adenovirus B [HAdV-B]
cugcaacgggugcuuacugg

SEQ ID NO: 1546310 - RNA, 14 nt, Human adenovirus B [HAdV-B]
ccaucaucuccugc

SEQ ID NO: 1546311 - RNA, 18 nt, Human adenovirus B [HAdV-B]
cacugguggccaccucgc

SEQ ID NO: 1546312 - RNA, 16 nt, Human adenovirus B [HAdV-B]
guaucaaggcucugca

SEQ ID NO: 1546313 - RNA, 14 nt, Human adenovirus B [HAdV-B]
uuuucuuacuuuua

SEQ ID NO: 1546314 - RNA, 22 nt, Human adenovirus B [HAdV-B]
cccaggccaugcaacguaucau

SEQ ID NO: 1546315 - RNA, 21 nt, Human adenovirus B [HAdV-B]
cugaaaguauggaagugcaaa

SEQ ID NO: 1546316 - RNA, 23 nt, Human adenovirus B [HAdV-B]
cuccguuccggagacagggagga

SEQ ID NO: 1546317 - RNA, 18 nt, Human adenovirus B [HAdV-B]
cuaucuguaccugugcca

SEQ ID NO: 1546318 - RNA, 15 nt, Human adenovirus B [HAdV-B]
aucacuuccaugccu

SEQ ID NO: 1546319 - RNA, 19 nt, Human adenovirus B [HAdV-B]
ccaugauaauagcaauggg

SEQ ID NO: 1546320 - RNA, 17 nt, Human adenovirus B [HAdV-B]
uuuauuugaaaaucaau

SEQ ID NO: 1546321 - RNA, 23 nt, Human adenovirus B [HAdV-B]
gaugcggcaucgcagaaaacaaa

SEQ ID NO: 1546322 - RNA, 22 nt, Human adenovirus B [HAdV-B]
uauggccaauaccaaacuuaua

SEQ ID NO: 1546323 - RNA, 19 nt, Human adenovirus B [HAdV-B]
caacucagcucaugcucug

SEQ ID NO: 1546324 - RNA, 20 nt, Human adenovirus B [HAdV-B]
uccugcccgccaccugcugc

SEQ ID NO: 1546325 - RNA, 22 nt, Human adenovirus B [HAdV-B]
cauaauuaaaagcgcuccagcc

SEQ ID NO: 1546326 - RNA, 15 nt, Human adenovirus B [HAdV-B]
guuaggucugugggg

SEQ ID NO: 1546327 - RNA, 14 nt, Human adenovirus B [HAdV-B]
uccgaccuggcaga

SEQ ID NO: 1546328 - RNA, 18 nt, Human adenovirus B [HAdV-B]
cagaaguaccucagagcg

SEQ ID NO: 1546329 - RNA, 17 nt, Human adenovirus B [HAdV-B]
ccuugaagccaugcugc

SEQ ID NO: 1546330 - RNA, 13 nt, Human adenovirus B [HAdV-B]
ccgacugcagaau

SEQ ID NO: 1546331 - RNA, 18 nt, Human adenovirus B [HAdV-B]
aguaaauggaacaaguga

SEQ ID NO: 1546332 - RNA, 19 nt, Human adenovirus B [HAdV-B]
gauuugauggaagcuauca

SEQ ID NO: 1546333 - RNA, 15 nt, Human adenovirus B [HAdV-B]
cuacccuagaagaua

SEQ ID NO: 1546334 - RNA, 16 nt, Human adenovirus B [HAdV-B]
ccauuguguucuccua

SEQ ID NO: 1546335 - RNA, 16 nt, Human adenovirus B [HAdV-B]
uacuuggaagacugau

SEQ ID NO: 1546336 - RNA, 14 nt, Human adenovirus B [HAdV-B]
guugguuaaucaug

SEQ ID NO: 1546337 - RNA, 15 nt, Human adenovirus B [HAdV-B]
gaugguuauaaugga

SEQ ID NO: 1546338 - RNA, 15 nt, Human adenovirus B [HAdV-B]
cucccgacggugcug

SEQ ID NO: 1546339 - RNA, 22 nt, Human adenovirus B [HAdV-B]
ccacaauauauauauacacaag

SEQ ID NO: 1546340 - RNA, 22 nt, Human adenovirus B [HAdV-B]
cucccagcagcaccucacuucc

SEQ ID NO: 1546341 - RNA, 21 nt, Human adenovirus B [HAdV-B]
uuugagaaauugguauuugaa

SEQ ID NO: 1546342 - RNA, 17 nt, Human adenovirus B [HAdV-B]
ucuucgggggcagaggu

SEQ ID NO: 1546343 - RNA, 22 nt, Human adenovirus B [HAdV-B]
ugucauagacguagaugggauc

SEQ ID NO: 1546344 - RNA, 20 nt, Human adenovirus B [HAdV-B]
ucagagaggcgcugcugaac

SEQ ID NO: 1546345 - RNA, 19 nt, Human adenovirus B [HAdV-B]
uugacugaugucuugcaug

SEQ ID NO: 1546346 - RNA, 22 nt, Human adenovirus B [HAdV-B]
ccuuguagugcuaggaauucuu

SEQ ID NO: 1546347 - RNA, 10 nt, Human adenovirus B [HAdV-B]
uuugccaaaa

SEQ ID NO: 1546348 - RNA, 15 nt, Human adenovirus B [HAdV-B]
ugauuacuuugauau

SEQ ID NO: 1546349 - RNA, 16 nt, Human adenovirus B [HAdV-B]
aucuguaccugugcca

SEQ ID NO: 1546350 - RNA, 18 nt, Human adenovirus B [HAdV-B]
cuuaugcccgucuucuca

SEQ ID NO: 1546351 - RNA, 18 nt, Human adenovirus B [HAdV-B]
accuguaucgcgaagcca

SEQ ID NO: 1546352 - RNA, 15 nt, Human adenovirus B [HAdV-B]
aauuuccaauccaac

SEQ ID NO: 1546353 - RNA, 18 nt, Human adenovirus B [HAdV-B]
ggcgcugcagagccagcc

SEQ ID NO: 1546354 - RNA, 20 nt, Human adenovirus B [HAdV-B]
accugaagucuacggccaac

SEQ ID NO: 1546355 - RNA, 20 nt, Human adenovirus B [HAdV-B]
augaugaaggauccugucac

SEQ ID NO: 1546356 - RNA, 20 nt, Human adenovirus B [HAdV-B]
cagaccgucagccaugggca

SEQ ID NO: 1546357 - RNA, 21 nt, Human adenovirus B [HAdV-B]
gccagacucgcaguacucaag

SEQ ID NO: 1546358 - RNA, 20 nt, Human adenovirus B [HAdV-B]
cauggaagcuguagugccuu

SEQ ID NO: 1546359 - RNA, 15 nt, Human adenovirus B [HAdV-B]
agguggucucuggau

SEQ ID NO: 1546360 - RNA, 22 nt, Human adenovirus B [HAdV-B]
caaaguaaaaggcacaggagaa

SEQ ID NO: 1546361 - RNA, 14 nt, Human adenovirus B [HAdV-B]
acagcaacuucuug

SEQ ID NO: 1546362 - RNA, 16 nt, Human adenovirus B [HAdV-B]
ccacacgauccacacu

SEQ ID NO: 1546363 - RNA, 16 nt, Human adenovirus B [HAdV-B]
agggugagaauuacuu

SEQ ID NO: 1546364 - RNA, 14 nt, Human adenovirus B [HAdV-B]
cacauacaaagccu

SEQ ID NO: 1546365 - RNA, 20 nt, Human adenovirus B [HAdV-B]
uuaauauaaauuaaaugacg

SEQ ID NO: 1546366 - RNA, 21 nt, Human adenovirus B [HAdV-B]
cagauucaaugauugcaauug

SEQ ID NO: 1546367 - RNA, 17 nt, Human adenovirus B [HAdV-B]
ccaaccaagcaaugcaa

SEQ ID NO: 1546368 - RNA, 13 nt, Human adenovirus B [HAdV-B]
uaaagcuggcaga

SEQ ID NO: 1546369 - RNA, 18 nt, Human adenovirus B [HAdV-B]
gcuuccgaccuggcagac

SEQ ID NO: 1546370 - RNA, 12 nt, Human adenovirus B [HAdV-B]
cagcaguacagg

SEQ ID NO: 1546371 - RNA, 15 nt, Human adenovirus B [HAdV-B]
acguggaacucacca

SEQ ID NO: 1546372 - RNA, 22 nt, Human adenovirus B [HAdV-B]
acugccgcugcaaucugugcac

SEQ ID NO: 1546373 - RNA, 20 nt, Human adenovirus B [HAdV-B]
cuaaaggcgcuccaaauaca

SEQ ID NO: 1546374 - RNA, 17 nt, Human adenovirus B [HAdV-B]
cuuuggguauaauuaug

SEQ ID NO: 1546375 - RNA, 17 nt, Human adenovirus B [HAdV-B]
agaauuucuacugaaaa

SEQ ID NO: 1546376 - RNA, 18 nt, Human adenovirus B [HAdV-B]
ucccaguagguuuggaag

SEQ ID NO: 1546377 - RNA, 22 nt, Human adenovirus B [HAdV-B]
cugauuauuucaccaaugccau

SEQ ID NO: 1546378 - RNA, 13 nt, Human adenovirus B [HAdV-B]
ucaaaugcucacu

SEQ ID NO: 1546379 - RNA, 18 nt, Human adenovirus B [HAdV-B]
acugcacacuaaaaggac

SEQ ID NO: 1546380 - RNA, 18 nt, Human adenovirus B [HAdV-B]
cuucgacaugggagcuga

SEQ ID NO: 1546381 - RNA, 19 nt, Human adenovirus B [HAdV-B]
auuaguuuaaaagagguuc

SEQ ID NO: 1546382 - RNA, 22 nt, Human adenovirus B [HAdV-B]
uaugcaucugcgccgcaggagg

SEQ ID NO: 1546383 - RNA, 15 nt, Human adenovirus B [HAdV-B]
ccaguugaaaaccac

SEQ ID NO: 1546384 - RNA, 16 nt, Human adenovirus B [HAdV-B]
cugcccgccaccugcu

SEQ ID NO: 1546385 - RNA, 20 nt, Human adenovirus B [HAdV-B]
gaccuuucauuaacaaacug

SEQ ID NO: 1546386 - RNA, 17 nt, Human adenovirus B [HAdV-B]
agaggucaucugggcca

SEQ ID NO: 1546387 - RNA, 21 nt, Human adenovirus B [HAdV-B]
augcaaacacaugucacccuc

SEQ ID NO: 1546388 - RNA, 13 nt, Human adenovirus B [HAdV-B]
cagucaggcagag

SEQ ID NO: 1546389 - RNA, 15 nt, Human adenovirus B [HAdV-B]
uccagguguaaguuu

SEQ ID NO: 1546390 - RNA, 13 nt, Human adenovirus B [HAdV-B]
gaccucaucuucc

SEQ ID NO: 1546391 - RNA, 17 nt, Human adenovirus B [HAdV-B]
ggcauggaugagcauca

SEQ ID NO: 1546392 - RNA, 17 nt, Human adenovirus B [HAdV-B]
ucagacuagcagacagg

SEQ ID NO: 1546393 - RNA, 14 nt, Human adenovirus B [HAdV-B]
ucaccugggcagcu

SEQ ID NO: 1546394 - RNA, 19 nt, Human adenovirus B [HAdV-B]
gccagcgguucuggaggag

SEQ ID NO: 1546395 - RNA, 13 nt, Human adenovirus B [HAdV-B]
uguagaaaaagau

SEQ ID NO: 1546396 - RNA, 16 nt, Human adenovirus B [HAdV-B]
ccaaguagcaguuuac

SEQ ID NO: 1546397 - RNA, 21 nt, Human adenovirus B [HAdV-B]
gccaggguucgguccuuccag

SEQ ID NO: 1546398 - RNA, 17 nt, Human adenovirus B [HAdV-B]
cccucaaaaacacacua

SEQ ID NO: 1546399 - RNA, 13 nt, Human adenovirus B [HAdV-B]
gcugguuuccgaa

SEQ ID NO: 1546400 - RNA, 16 nt, Human adenovirus B [HAdV-B]
caaagccuacugccac

SEQ ID NO: 1546401 - RNA, 17 nt, Human adenovirus B [HAdV-B]
caccauucuuaaacaca

SEQ ID NO: 1546402 - RNA, 12 nt, Human adenovirus B [HAdV-B]
augaaaaacacc

SEQ ID NO: 1546403 - RNA, 20 nt, Human adenovirus B [HAdV-B]
gcuuaacuugccuaucugug

SEQ ID NO: 1546404 - RNA, 22 nt, Human adenovirus B [HAdV-B]
uacuggaucuacguccacugga

SEQ ID NO: 1546405 - RNA, 23 nt, Human adenovirus B [HAdV-B]
cugcacagccggcaucauucaca

SEQ ID NO: 1546406 - RNA, 15 nt, Human adenovirus B [HAdV-B]
cgauccaugcuucug

SEQ ID NO: 1546407 - RNA, 19 nt, Human adenovirus B [HAdV-B]
aagcggcgaggagccggag

SEQ ID NO: 1546408 - RNA, 21 nt, Human adenovirus B [HAdV-B]
ugcaacuggauuguguuucaa

SEQ ID NO: 1546409 - RNA, 11 nt, Human adenovirus B [HAdV-B]
ccaacaccugu

SEQ ID NO: 1546410 - RNA, 21 nt, Human adenovirus B [HAdV-B]
gguagcugaaacccacugcua

SEQ ID NO: 1546411 - RNA, 14 nt, Human adenovirus B [HAdV-B]
guuccgucuggcca

SEQ ID NO: 1546412 - RNA, 21 nt, Human adenovirus B [HAdV-B]
gucuuacugccuggcugcgga

SEQ ID NO: 1546413 - RNA, 18 nt, Human adenovirus B [HAdV-B]
gccagcgguucuggagga

SEQ ID NO: 1546414 - RNA, 15 nt, Human adenovirus B [HAdV-B]
gcucuuacugcggag

SEQ ID NO: 1546415 - RNA, 21 nt, Human adenovirus B [HAdV-B]
auuugugggauuugauggaag

SEQ ID NO: 1546416 - RNA, 21 nt, Human adenovirus B [HAdV-B]
gaaauaugagugguucgaguu

SEQ ID NO: 1546417 - RNA, 14 nt, Human adenovirus B [HAdV-B]
cgaagccauagggc

SEQ ID NO: 1546418 - RNA, 20 nt, Human adenovirus B [HAdV-B]
auuuacuaacuagacucuca

SEQ ID NO: 1546419 - RNA, 23 nt, Human adenovirus B [HAdV-B]
ucagcagacacaucacuuccaug

SEQ ID NO: 1546420 - RNA, 21 nt, Human adenovirus B [HAdV-B]
aucauucccugcagaaaucuu

SEQ ID NO: 1546421 - RNA, 17 nt, Human adenovirus B [HAdV-B]
aagggagaaaauggcau

SEQ ID NO: 1546422 - RNA, 21 nt, Human adenovirus B [HAdV-B]
ccuacuugcgcaaguuugcuc

SEQ ID NO: 1546423 - RNA, 15 nt, Human adenovirus B [HAdV-B]
acuccguagccugga

SEQ ID NO: 1546424 - RNA, 15 nt, Human adenovirus B [HAdV-B]
gcuuggaaugcccac

SEQ ID NO: 1546425 - RNA, 15 nt, Human adenovirus B [HAdV-B]
uggacuuggaagagg

SEQ ID NO: 1546426 - RNA, 18 nt, Human adenovirus B [HAdV-B]
gugcgccugcuugggcgc

SEQ ID NO: 1546427 - RNA, 23 nt, Human adenovirus B [HAdV-B]
acaccaaucucuccccacgcaca

SEQ ID NO: 1546428 - RNA, 22 nt, Human adenovirus B [HAdV-B]
cgaggguggaaucauguccacc

SEQ ID NO: 1546429 - RNA, 22 nt, Human adenovirus B [HAdV-B]
cucggacgauuggacccaggcc

SEQ ID NO: 1546430 - RNA, 20 nt, Human adenovirus B [HAdV-B]
ucggcuuacgagcagacagu

SEQ ID NO: 1546431 - RNA, 22 nt, Human adenovirus B [HAdV-B]
caagguaauuaaauccacacug

SEQ ID NO: 1546432 - RNA, 16 nt, Human adenovirus B [HAdV-B]
ccaccgagcuaccacu

SEQ ID NO: 1546433 - RNA, 20 nt, Human adenovirus B [HAdV-B]
ugagcgccgcgacggcagga

SEQ ID NO: 1546434 - RNA, 18 nt, Human adenovirus B [HAdV-B]
gggaacucauugaguuca

SEQ ID NO: 1546435 - RNA, 15 nt, Human adenovirus B [HAdV-B]
uuucauagccacagc

SEQ ID NO: 1546436 - RNA, 22 nt, Human adenovirus B [HAdV-B]
agcuguagugccuucccgcucu

SEQ ID NO: 1546437 - RNA, 20 nt, Human adenovirus B [HAdV-B]
accuugacccccagaccggc

SEQ ID NO: 1546438 - RNA, 12 nt, Human adenovirus B [HAdV-B]
caaggaggugaa

SEQ ID NO: 1546439 - RNA, 18 nt, Human adenovirus B [HAdV-B]
caaaucaugaacuccagu

SEQ ID NO: 1546440 - RNA, 11 nt, Human adenovirus B [HAdV-B]
gggggcagagg

SEQ ID NO: 1546441 - RNA, 13 nt, Human adenovirus B [HAdV-B]
acacggcacgaag

SEQ ID NO: 1546442 - RNA, 21 nt, Human adenovirus B [HAdV-B]
ugacgaaaaugccggccaauu

SEQ ID NO: 1546443 - RNA, 21 nt, Human adenovirus B [HAdV-B]
caguguggaagagcucagccg

SEQ ID NO: 1546444 - RNA, 13 nt, Human adenovirus B [HAdV-B]
gcucaccaccuca

SEQ ID NO: 1546445 - RNA, 21 nt, Human adenovirus B [HAdV-B]
uccgcgauugugucuaucugu

SEQ ID NO: 1546446 - RNA, 14 nt, Human adenovirus B [HAdV-B]
aguucaucgggagg

SEQ ID NO: 1546447 - RNA, 20 nt, Human adenovirus B [HAdV-B]
cccggcggcgucccagcagu

SEQ ID NO: 1546448 - RNA, 18 nt, Human adenovirus B [HAdV-B]
gaugguuauaauggaaua

SEQ ID NO: 1546449 - RNA, 20 nt, Human adenovirus B [HAdV-B]
aaucaugcaacccaauauaa

SEQ ID NO: 1546450 - RNA, 20 nt, Human adenovirus B [HAdV-B]
aggaggcggaguagcugacu

SEQ ID NO: 1546451 - RNA, 15 nt, Human adenovirus B [HAdV-B]
gaagauuaccacccc

SEQ ID NO: 1546452 - RNA, 19 nt, Human adenovirus B [HAdV-B]
gaaaauguaaauuuggaaa

SEQ ID NO: 1546453 - RNA, 18 nt, Human adenovirus B [HAdV-B]
cagaaugacccgcaggca

SEQ ID NO: 1546454 - RNA, 19 nt, Human adenovirus B [HAdV-B]
gugcucaacgguggcuucc

SEQ ID NO: 1546455 - RNA, 14 nt, Human adenovirus B [HAdV-B]
caaaacaaaaccaa

SEQ ID NO: 1546456 - RNA, 22 nt, Human adenovirus B [HAdV-B]
uccauggagguuugggccauuu

SEQ ID NO: 1546457 - RNA, 14 nt, Human adenovirus B [HAdV-B]
cauguaugcagaaa

SEQ ID NO: 1546458 - RNA, 12 nt, Human adenovirus B [HAdV-B]
gcugccagugcg

SEQ ID NO: 1546459 - RNA, 16 nt, Human adenovirus B [HAdV-B]
agcaguaucuggagcg

SEQ ID NO: 1546460 - RNA, 14 nt, Human adenovirus B [HAdV-B]
gcacacaaagcaca

SEQ ID NO: 1546461 - RNA, 21 nt, Human adenovirus B [HAdV-B]
gcgugcaauggcgugggcgca

SEQ ID NO: 1546462 - RNA, 16 nt, Human adenovirus B [HAdV-B]
cuccagcaaaaacaag

SEQ ID NO: 1546463 - RNA, 19 nt, Human adenovirus B [HAdV-B]
uccagacaugaugaaggau

SEQ ID NO: 1546464 - RNA, 14 nt, Human adenovirus B [HAdV-B]
cuaggcagagaaac

SEQ ID NO: 1546465 - RNA, 15 nt, Human adenovirus B [HAdV-B]
gacauggaaacucag

SEQ ID NO: 1546466 - RNA, 20 nt, Human adenovirus B [HAdV-B]
auugcaaggccccagcagcc

SEQ ID NO: 1546467 - RNA, 11 nt, Human adenovirus B [HAdV-B]
gccggaggaga

SEQ ID NO: 1546468 - RNA, 18 nt, Human adenovirus B [HAdV-B]
uauagcuuccuuggaaga

SEQ ID NO: 1546469 - RNA, 15 nt, Human adenovirus B [HAdV-B]
cuuuccugagaacca

SEQ ID NO: 1546470 - RNA, 18 nt, Human adenovirus B [HAdV-B]
aauacaauggacucugac

SEQ ID NO: 1546471 - RNA, 18 nt, Human adenovirus B [HAdV-B]
guuguuggaaccagaugc

SEQ ID NO: 1546472 - RNA, 22 nt, Human adenovirus B [HAdV-B]
ggaauguuuaugccuuaccagu

SEQ ID NO: 1546473 - RNA, 15 nt, Human adenovirus B [HAdV-B]
gagucggugagcucu

SEQ ID NO: 1546474 - RNA, 17 nt, Human adenovirus B [HAdV-B]
ucugaacuaucagaaug

SEQ ID NO: 1546475 - RNA, 14 nt, Human adenovirus B [HAdV-B]
agcagagcaggucu

SEQ ID NO: 1546476 - RNA, 15 nt, Human adenovirus B [HAdV-B]
aauuaagacucuccu

SEQ ID NO: 1546477 - RNA, 19 nt, Human adenovirus B [HAdV-B]
aguucuuguagugaggaaa

SEQ ID NO: 1546478 - RNA, 15 nt, Human adenovirus B [HAdV-B]
cgugacgcugccacc

SEQ ID NO: 1546479 - RNA, 16 nt, Human adenovirus B [HAdV-B]
caagcagacaccaggg

SEQ ID NO: 1546480 - RNA, 15 nt, Human adenovirus B [HAdV-B]
ggaauccugaggcau

SEQ ID NO: 1546481 - RNA, 22 nt, Human adenovirus B [HAdV-B]
acgcacagccuguacauuccca

SEQ ID NO: 1546482 - RNA, 15 nt, Human adenovirus B [HAdV-B]
gcaagucuguugaug

SEQ ID NO: 1546483 - RNA, 19 nt, Human adenovirus B [HAdV-B]
cuuccgcaaucccaacagg

SEQ ID NO: 1546484 - RNA, 15 nt, Human adenovirus B [HAdV-B]
agcgugcugcacagc

SEQ ID NO: 1546485 - RNA, 23 nt, Human adenovirus B [HAdV-B]
ucccacucaugagaagguccugg

SEQ ID NO: 1546486 - RNA, 22 nt, Human adenovirus B [HAdV-B]
gcucuaccccauuccugccaau

SEQ ID NO: 1546487 - RNA, 21 nt, Human adenovirus B [HAdV-B]
gaaucauaauauugccaugca

SEQ ID NO: 1546488 - RNA, 23 nt, Human adenovirus B [HAdV-B]
gauccuuagauaugugcagcaga

SEQ ID NO: 1546489 - RNA, 17 nt, Human adenovirus B [HAdV-B]
cgauuggacccaggcca

SEQ ID NO: 1546490 - RNA, 15 nt, Human adenovirus B [HAdV-B]
gauggccguggugcu

SEQ ID NO: 1546491 - RNA, 19 nt, Human adenovirus B [HAdV-B]
gcucccuuugugccuccgc

SEQ ID NO: 1546492 - RNA, 20 nt, Human adenovirus B [HAdV-B]
cgagucggugagcucuccgc

SEQ ID NO: 1546493 - RNA, 17 nt, Human adenovirus B [HAdV-B]
caaccauaaaaacauac

SEQ ID NO: 1546494 - RNA, 21 nt, Human adenovirus B [HAdV-B]
ggccaacuaucucuccuacca

SEQ ID NO: 1546495 - RNA, 12 nt, Human adenovirus B [HAdV-B]
ccagcagcggca

SEQ ID NO: 1546496 - RNA, 16 nt, Human adenovirus B [HAdV-B]
agcgccagcaggaggc

SEQ ID NO: 1546497 - RNA, 14 nt, Human adenovirus B [HAdV-B]
gaccacgguggugc

SEQ ID NO: 1546498 - RNA, 12 nt, Human adenovirus B [HAdV-B]
cuucacacaaag

SEQ ID NO: 1546499 - RNA, 13 nt, Human adenovirus B [HAdV-B]
ucaagauggccac

SEQ ID NO: 1546500 - RNA, 18 nt, Human adenovirus B [HAdV-B]
ggcggaugaaggcgagga

SEQ ID NO: 1546501 - RNA, 18 nt, Human adenovirus B [HAdV-B]
aggcaauguauacugggu

SEQ ID NO: 1546502 - RNA, 15 nt, Human adenovirus B [HAdV-B]
gagcaauaaaugacg

SEQ ID NO: 1546503 - RNA, 18 nt, Human adenovirus B [HAdV-B]
uguucccagaguuggaag

SEQ ID NO: 1546504 - RNA, 18 nt, Human adenovirus B [HAdV-B]
caauuaggaccagugcuu

SEQ ID NO: 1546505 - RNA, 21 nt, Human adenovirus B [HAdV-B]
ucagcauuggcaaugcugaac

SEQ ID NO: 1546506 - RNA, 23 nt, Human adenovirus B [HAdV-B]
uggcuacugugcauauuguuucc

SEQ ID NO: 1546507 - RNA, 16 nt, Human adenovirus B [HAdV-B]
aacccccacuacuccc

SEQ ID NO: 1546508 - RNA, 16 nt, Human adenovirus B [HAdV-B]
gguggggcggucagcu

SEQ ID NO: 1546509 - RNA, 18 nt, Human adenovirus B [HAdV-B]
cuggauguuuuauuuuga

SEQ ID NO: 1546510 - RNA, 19 nt, Human adenovirus B [HAdV-B]
gacaucuagaccacugccg

SEQ ID NO: 1546511 - RNA, 21 nt, Human adenovirus B [HAdV-B]
accccagguagaacugcugcu

SEQ ID NO: 1546512 - RNA, 18 nt, Human adenovirus B [HAdV-B]
gcuuacaacucccuggcu

SEQ ID NO: 1546513 - RNA, 18 nt, Human adenovirus B [HAdV-B]
gaacccuacuagcaaacc

SEQ ID NO: 1546514 - RNA, 21 nt, Human adenovirus B [HAdV-B]
uagaauaagucgcccgaguuu

SEQ ID NO: 1546515 - RNA, 12 nt, Human adenovirus B [HAdV-B]
ugcucugcaaaa

SEQ ID NO: 1546516 - RNA, 19 nt, Human adenovirus B [HAdV-B]
aggcagaggaggcggagga

SEQ ID NO: 1546517 - RNA, 20 nt, Human adenovirus B [HAdV-B]
cgauuagcgagucaguggac

SEQ ID NO: 1546518 - RNA, 20 nt, Human adenovirus B [HAdV-B]
auggcgaucccgaaaaagga

SEQ ID NO: 1546519 - RNA, 17 nt, Human adenovirus B [HAdV-B]
guccuggcgggggcaua

SEQ ID NO: 1546520 - RNA, 18 nt, Human adenovirus B [HAdV-B]
agcauaugcaaaucccaa

SEQ ID NO: 1546521 - RNA, 14 nt, Human adenovirus B [HAdV-B]
cgaaguugaugaaa

SEQ ID NO: 1546522 - RNA, 17 nt, Human adenovirus B [HAdV-B]
acagcaguagccacagc

SEQ ID NO: 1546523 - RNA, 11 nt, Human adenovirus B [HAdV-B]
aucuguugcac

SEQ ID NO: 1546524 - RNA, 21 nt, Human adenovirus B [HAdV-B]
aaaugccggccaauugccauu

SEQ ID NO: 1546525 - RNA, 18 nt, Human adenovirus B [HAdV-B]
gccuacaucuacugugga

SEQ ID NO: 1546526 - RNA, 16 nt, Human adenovirus B [HAdV-B]
uuaccaguguaacaug

SEQ ID NO: 1546527 - RNA, 17 nt, Human adenovirus B [HAdV-B]
caguccugccaccaccu

SEQ ID NO: 1546528 - RNA, 16 nt, Human adenovirus B [HAdV-B]
cagccaaacggcaccu

SEQ ID NO: 1546529 - RNA, 16 nt, Human adenovirus B [HAdV-B]
cagcgcugccaggguu

SEQ ID NO: 1546530 - RNA, 20 nt, Human adenovirus B [HAdV-B]
ugcgcacgggcggguagcug

SEQ ID NO: 1546531 - RNA, 16 nt, Human adenovirus B [HAdV-B]
uguuaauucaucuggc

SEQ ID NO: 1546532 - RNA, 13 nt, Human adenovirus B [HAdV-B]
agauacaugggca

SEQ ID NO: 1546533 - RNA, 13 nt, Human adenovirus B [HAdV-B]
gacagaacugaag

SEQ ID NO: 1546534 - RNA, 15 nt, Human adenovirus B [HAdV-B]
gcgauaaugccagac

SEQ ID NO: 1546535 - RNA, 19 nt, Human adenovirus B [HAdV-B]
uccccccaaacgucagcca

SEQ ID NO: 1546536 - RNA, 20 nt, Human adenovirus B [HAdV-B]
cagcaguacaggacaggcgc

SEQ ID NO: 1546537 - RNA, 21 nt, Human adenovirus B [HAdV-B]
acacacucuucuucgccuucu

SEQ ID NO: 1546538 - RNA, 20 nt, Human adenovirus B [HAdV-B]
cugacuuuaugagccagagc

SEQ ID NO: 1546539 - RNA, 22 nt, Human adenovirus B [HAdV-B]
gcucaucaaagguuaggucugu

SEQ ID NO: 1546540 - RNA, 14 nt, Human adenovirus B [HAdV-B]
auguuuaaccccac

SEQ ID NO: 1546541 - RNA, 20 nt, Human adenovirus B [HAdV-B]
ugcgaucuggccauguucau

SEQ ID NO: 1546542 - RNA, 20 nt, Human adenovirus B [HAdV-B]
cagaaccuauuuagagacag

SEQ ID NO: 1546543 - RNA, 22 nt, Human adenovirus B [HAdV-B]
guuucucuucgggggcagaggu

SEQ ID NO: 1546544 - RNA, 12 nt, Human adenovirus B [HAdV-B]
gccgaugugucu

SEQ ID NO: 1546545 - RNA, 15 nt, Human adenovirus B [HAdV-B]
ggcaggcaugcaaga

SEQ ID NO: 1546546 - RNA, 14 nt, Human adenovirus B [HAdV-B]
cagcugcugcagaa

SEQ ID NO: 1546547 - RNA, 21 nt, Human adenovirus B [HAdV-B]
gagcaguaucuggagcgggcu

SEQ ID NO: 1546548 - RNA, 11 nt, Human adenovirus B [HAdV-B]
augaauuaaaa

SEQ ID NO: 1546549 - RNA, 16 nt, Human adenovirus B [HAdV-B]
caucgcagaaaacaaa

SEQ ID NO: 1546550 - RNA, 12 nt, Human adenovirus B [HAdV-B]
uacauggcuccg

SEQ ID NO: 1546551 - RNA, 16 nt, Human adenovirus B [HAdV-B]
ucccagggauuuggaa

SEQ ID NO: 1546552 - RNA, 20 nt, Human adenovirus B [HAdV-B]
gaugagcccacccugcuuua

SEQ ID NO: 1546553 - RNA, 14 nt, Human adenovirus B [HAdV-B]
gcgaggagccggag

SEQ ID NO: 1546554 - RNA, 21 nt, Human adenovirus B [HAdV-B]
augguuguagcuuuuuugguu

SEQ ID NO: 1546555 - RNA, 16 nt, Human adenovirus B [HAdV-B]
ccugcggagcagagca

SEQ ID NO: 1546556 - RNA, 20 nt, Human adenovirus B [HAdV-B]
ucuuuagcgaucuucucaau

SEQ ID NO: 1546557 - RNA, 17 nt, Human adenovirus B [HAdV-B]
uggauccagauauucaa

SEQ ID NO: 1546558 - RNA, 20 nt, Human adenovirus B [HAdV-B]
uacuucuccaucagcagaca

SEQ ID NO: 1546559 - RNA, 18 nt, Human adenovirus B [HAdV-B]
cgguucaggccucgcaac

SEQ ID NO: 1546560 - RNA, 23 nt, Human adenovirus B [HAdV-B]
aggaugauugggagguggccauu

SEQ ID NO: 1546561 - RNA, 17 nt, Human adenovirus B [HAdV-B]
aguaacuuuuguaaaug

SEQ ID NO: 1546562 - RNA, 15 nt, Human adenovirus B [HAdV-B]
gcuacagcugcugca

SEQ ID NO: 1546563 - RNA, 14 nt, Human adenovirus B [HAdV-B]
ugaagccaugcugc

SEQ ID NO: 1546564 - RNA, 13 nt, Human adenovirus B [HAdV-B]
gcaugggaugggu

SEQ ID NO: 1546565 - RNA, 16 nt, Human adenovirus B [HAdV-B]
aagacuaggcaacugu

SEQ ID NO: 1546566 - RNA, 12 nt, Human adenovirus B [HAdV-B]
aaaaauggccug

SEQ ID NO: 1546567 - RNA, 20 nt, Human adenovirus B [HAdV-B]
gccaccaucccgaauaccgc

SEQ ID NO: 1546568 - RNA, 14 nt, Human adenovirus B [HAdV-B]
ccaugacagacaga

SEQ ID NO: 1546569 - RNA, 14 nt, Human adenovirus B [HAdV-B]
gccaugacagacag

SEQ ID NO: 1546570 - RNA, 11 nt, Human adenovirus B [HAdV-B]
cacuggcugcc

SEQ ID NO: 1546571 - RNA, 17 nt, Human adenovirus B [HAdV-B]
uauuguucguguugcuc

SEQ ID NO: 1546572 - RNA, 21 nt, Human adenovirus B [HAdV-B]
gaauugcaaggccccagcagc

SEQ ID NO: 1546573 - RNA, 19 nt, Human adenovirus B [HAdV-B]
aggacaaaaaagaagagga

SEQ ID NO: 1546574 - RNA, 13 nt, Human adenovirus B [HAdV-B]
cucucgaggacgc

SEQ ID NO: 1546575 - RNA, 19 nt, Human adenovirus B [HAdV-B]
gcuccgccaguccaccucg

SEQ ID NO: 1546576 - RNA, 23 nt, Human adenovirus B [HAdV-B]
auuugccauucucgagcugccag

SEQ ID NO: 1546577 - RNA, 13 nt, Human adenovirus B [HAdV-B]
cguguugcucagg

SEQ ID NO: 1546578 - RNA, 24 nt, Human adenovirus B [HAdV-B]
aacuuggacugaccuugauggaaa

SEQ ID NO: 1546579 - RNA, 18 nt, Human adenovirus B [HAdV-B]
cuuaccggcucugggcau

SEQ ID NO: 1546580 - RNA, 19 nt, Human adenovirus B [HAdV-B]
ccaucaucgugcucagugu

SEQ ID NO: 1546581 - RNA, 13 nt, Human adenovirus B [HAdV-B]
auuuccauuccuu

SEQ ID NO: 1546582 - RNA, 20 nt, Human adenovirus B [HAdV-B]
auuuacauauuggcaccauu

SEQ ID NO: 1546583 - RNA, 17 nt, Human adenovirus B [HAdV-B]
cucgauaaucugcuccu

SEQ ID NO: 1546584 - RNA, 18 nt, Human adenovirus B [HAdV-B]
gugcugcacagcacccug

SEQ ID NO: 1546585 - RNA, 20 nt, Human adenovirus B [HAdV-B]
gaguuuaaugggcgaagagg

SEQ ID NO: 1546586 - RNA, 14 nt, Human adenovirus B [HAdV-B]
gacuugggacagaa

SEQ ID NO: 1546587 - RNA, 20 nt, Human adenovirus B [HAdV-B]
ggaagagcucagccgcgccu

SEQ ID NO: 1546588 - RNA, 14 nt, Human adenovirus B [HAdV-B]
agcaggaacugaaa

SEQ ID NO: 1546589 - RNA, 17 nt, Human adenovirus B [HAdV-B]
uauaauggaauaguguu

SEQ ID NO: 1546590 - RNA, 14 nt, Human adenovirus B [HAdV-B]
uaccaggaaagucc

SEQ ID NO: 1546591 - RNA, 13 nt, Human adenovirus B [HAdV-B]
cgaggaggcagag

SEQ ID NO: 1546592 - RNA, 22 nt, Human adenovirus B [HAdV-B]
ccugcuugggcgcuugccaggg

SEQ ID NO: 1546593 - RNA, 20 nt, Human adenovirus B [HAdV-B]
acauaucuggaaauggggcu

SEQ ID NO: 1546594 - RNA, 19 nt, Human adenovirus B [HAdV-B]
cuccaacagaaaaccagca

SEQ ID NO: 1546595 - RNA, 18 nt, Human adenovirus B [HAdV-B]
gagucugagacagacauc

SEQ ID NO: 1546596 - RNA, 23 nt, Human adenovirus B [HAdV-B]
gacggaugucucacgcuugccag

SEQ ID NO: 1546597 - RNA, 15 nt, Human adenovirus B [HAdV-B]
uuggacggcuccugg

SEQ ID NO: 1546598 - RNA, 18 nt, Human adenovirus B [HAdV-B]
guacagcgggcacacaaa

SEQ ID NO: 1546599 - RNA, 15 nt, Human adenovirus B [HAdV-B]
ugcaaggccccagca

SEQ ID NO: 1546600 - RNA, 15 nt, Human adenovirus B [HAdV-B]
ucuauucugguucua

SEQ ID NO: 1546601 - RNA, 20 nt, Human adenovirus B [HAdV-B]
gucuaucuguaccugugcca

SEQ ID NO: 1546602 - RNA, 17 nt, Human adenovirus B [HAdV-B]
cgagaaaaaacagccaa

SEQ ID NO: 1546603 - RNA, 21 nt, Human adenovirus B [HAdV-B]
gagucugagacagacaucgag

SEQ ID NO: 1546604 - RNA, 17 nt, Human adenovirus B [HAdV-B]
ugucacuccacagcuuu

SEQ ID NO: 1546605 - RNA, 18 nt, Human adenovirus B [HAdV-B]
gcguccagcgcugccagg

SEQ ID NO: 1546606 - RNA, 13 nt, Human adenovirus B [HAdV-B]
uucuuaacagugc

SEQ ID NO: 1546607 - RNA, 23 nt, Human adenovirus B [HAdV-B]
ucuacuucaaccccuucuccgga

SEQ ID NO: 1546608 - RNA, 14 nt, Human adenovirus B [HAdV-B]
uggagucacugcua

SEQ ID NO: 1546609 - RNA, 22 nt, Human adenovirus B [HAdV-B]
ccgggccuucuaugauuucucg

SEQ ID NO: 1546610 - RNA, 20 nt, Human adenovirus B [HAdV-B]
ggugcucaacgguggcuucc

SEQ ID NO: 1546611 - RNA, 13 nt, Human adenovirus B [HAdV-B]
auacaauggacuc

SEQ ID NO: 1546612 - RNA, 20 nt, Human adenovirus B [HAdV-B]
uggcagaccucaucuuccca

SEQ ID NO: 1546613 - RNA, 20 nt, Human adenovirus B [HAdV-B]
cacuuacuugaaaucagcaa

SEQ ID NO: 1546614 - RNA, 14 nt, Human adenovirus B [HAdV-B]
agaggucagaggag

SEQ ID NO: 1546615 - RNA, 16 nt, Human adenovirus B [HAdV-B]
ugcagcuaacaugcuc

SEQ ID NO: 1546616 - RNA, 22 nt, Human adenovirus B [HAdV-B]
uggcuuccagcaaagccuccac

SEQ ID NO: 1546617 - RNA, 14 nt, Human adenovirus B [HAdV-B]
aaaguuugguggau

SEQ ID NO: 1546618 - RNA, 16 nt, Human adenovirus B [HAdV-B]
gcccuacucaaucugg

SEQ ID NO: 1546619 - RNA, 14 nt, Human adenovirus B [HAdV-B]
agcuccgccagucc

SEQ ID NO: 1546620 - RNA, 15 nt, Human adenovirus B [HAdV-B]
gucuuccuuggcuuc

SEQ ID NO: 1546621 - RNA, 16 nt, Human adenovirus B [HAdV-B]
aggcagaggaggugga

SEQ ID NO: 1546622 - RNA, 17 nt, Human adenovirus B [HAdV-B]
caagcuuucaguuccga

SEQ ID NO: 1546623 - RNA, 15 nt, Human adenovirus B [HAdV-B]
uagguuggauagcau

SEQ ID NO: 1546624 - RNA, 13 nt, Human adenovirus B [HAdV-B]
ccaaauggagaca

SEQ ID NO: 1546625 - RNA, 12 nt, Human adenovirus B [HAdV-B]
ucccaucaucgu

SEQ ID NO: 1546626 - RNA, 23 nt, Human adenovirus B [HAdV-B]
aauugcaaggccccagcagccaa

SEQ ID NO: 1546627 - RNA, 20 nt, Human adenovirus B [HAdV-B]
ccaacaccgcucccccagcc

SEQ ID NO: 1546628 - RNA, 16 nt, Human adenovirus B [HAdV-B]
aacgaggaggcagagg

SEQ ID NO: 1546629 - RNA, 14 nt, Human adenovirus B [HAdV-B]
aggaguaucuaaac

SEQ ID NO: 1546630 - RNA, 19 nt, Human adenovirus B [HAdV-B]
guucaauuuguggaggagu

SEQ ID NO: 1546631 - RNA, 19 nt, Human adenovirus B [HAdV-B]
aucuggacuuggaagaggg

SEQ ID NO: 1546632 - RNA, 16 nt, Human adenovirus B [HAdV-B]
ggucuugugugggacg

SEQ ID NO: 1546633 - RNA, 22 nt, Human adenovirus B [HAdV-B]
gggucuugugugggacgaugag

SEQ ID NO: 1546634 - RNA, 21 nt, Human adenovirus B [HAdV-B]
caggguuguuuccgucacagu

SEQ ID NO: 1546635 - RNA, 22 nt, Human adenovirus B [HAdV-B]
ggcuccuaaaggcgcuccaaau

SEQ ID NO: 1546636 - RNA, 13 nt, Human adenovirus B [HAdV-B]
guuugguggauaa

SEQ ID NO: 1546637 - RNA, 15 nt, Human adenovirus B [HAdV-B]
caguagguuuggaag

SEQ ID NO: 1546638 - RNA, 18 nt, Human adenovirus B [HAdV-B]
cugccaugcgagccgcaa

SEQ ID NO: 1546639 - RNA, 18 nt, Human adenovirus B [HAdV-B]
cucacuauucaaccugua

SEQ ID NO: 1546640 - RNA, 18 nt, Human adenovirus B [HAdV-B]
cgcuauggagucacugcu

SEQ ID NO: 1546641 - RNA, 19 nt, Human adenovirus B [HAdV-B]
uggaagccacucugaacuu

SEQ ID NO: 1546642 - RNA, 14 nt, Human adenovirus B [HAdV-B]
caggucuacugguc

SEQ ID NO: 1546643 - RNA, 14 nt, Human adenovirus B [HAdV-B]
ggcaggaugugagc

SEQ ID NO: 1546644 - RNA, 18 nt, Human adenovirus B [HAdV-B]
gcaacgaauuuucuccca

SEQ ID NO: 1546645 - RNA, 18 nt, Human adenovirus B [HAdV-B]
uuguaucccacuaugcaa

SEQ ID NO: 1546646 - RNA, 16 nt, Human adenovirus B [HAdV-B]
ccaagaugcuggaaau

SEQ ID NO: 1546647 - RNA, 18 nt, Human adenovirus B [HAdV-B]
gaccccgggacuguggac

SEQ ID NO: 1546648 - RNA, 15 nt, Human adenovirus B [HAdV-B]
gacaguuuggaggag

SEQ ID NO: 1546649 - RNA, 19 nt, Human adenovirus B [HAdV-B]
uagacagcaaccccaggcc

SEQ ID NO: 1546650 - RNA, 18 nt, Human adenovirus B [HAdV-B]
ucggggaagauaguuguu

SEQ ID NO: 1546651 - RNA, 15 nt, Human adenovirus B [HAdV-B]
aaauuacccaaguca

SEQ ID NO: 1546652 - RNA, 14 nt, Human adenovirus B [HAdV-B]
ccgcugucaaccug

SEQ ID NO: 1546653 - RNA, 16 nt, Human adenovirus B [HAdV-B]
guuaagacuggucacu

SEQ ID NO: 1546654 - RNA, 22 nt, Human adenovirus B [HAdV-B]
aaggaccaccaagacgguguau

SEQ ID NO: 1546655 - RNA, 12 nt, Human adenovirus B [HAdV-B]
acuaaugugaaa

SEQ ID NO: 1546656 - RNA, 14 nt, Human adenovirus B [HAdV-B]
agccuacugccacc

SEQ ID NO: 1546657 - RNA, 19 nt, Human adenovirus B [HAdV-B]
ccugcagaaaucuucccau

SEQ ID NO: 1546658 - RNA, 17 nt, Human adenovirus B [HAdV-B]
aggacccccaaucacuu

SEQ ID NO: 1546659 - RNA, 12 nt, Human adenovirus B [HAdV-B]
cugacaaauaaa

SEQ ID NO: 1546660 - RNA, 14 nt, Human adenovirus B [HAdV-B]
cagacuagcagaca

SEQ ID NO: 1546661 - RNA, 21 nt, Human adenovirus B [HAdV-B]
cugcaacgaauuuucucccag

SEQ ID NO: 1546662 - RNA, 16 nt, Human adenovirus B [HAdV-B]
guccagcgcugccagg

SEQ ID NO: 1546663 - RNA, 20 nt, Human adenovirus B [HAdV-B]
auccagcuuuugcugugcca

SEQ ID NO: 1546664 - RNA, 16 nt, Human adenovirus B [HAdV-B]
ccugauuacuucuuuc

SEQ ID NO: 1546665 - RNA, 15 nt, Human adenovirus B [HAdV-B]
agauaguuguuaauu

SEQ ID NO: 1546666 - RNA, 17 nt, Human adenovirus B [HAdV-B]
uaacgcuggagagguca

SEQ ID NO: 1546667 - RNA, 17 nt, Human adenovirus B [HAdV-B]
cauucucgagcugccag

SEQ ID NO: 1546668 - RNA, 19 nt, Human adenovirus B [HAdV-B]
uaucagaaaaaaacagcca

SEQ ID NO: 1546669 - RNA, 21 nt, Human adenovirus B [HAdV-B]
uggccgaugugucugaaggaa

SEQ ID NO: 1546670 - RNA, 15 nt, Human adenovirus B [HAdV-B]
uaagguauauuauug

SEQ ID NO: 1546671 - RNA, 15 nt, Human adenovirus B [HAdV-B]
cggaagccagcaccc

SEQ ID NO: 1546672 - RNA, 13 nt, Human adenovirus B [HAdV-B]
cagugcaggcagc

SEQ ID NO: 1546673 - RNA, 14 nt, Human adenovirus B [HAdV-B]
caggcggcugaccg

SEQ ID NO: 1546674 - RNA, 18 nt, Human adenovirus B [HAdV-B]
ggacucuguuaacuucac

SEQ ID NO: 1546675 - RNA, 11 nt, Human adenovirus B [HAdV-B]
aggagcuggcu

SEQ ID NO: 1546676 - RNA, 21 nt, Human adenovirus B [HAdV-B]
uugccaugcaggcacuucagc

SEQ ID NO: 1546677 - RNA, 15 nt, Human adenovirus B [HAdV-B]
ccagucgccguagcc

SEQ ID NO: 1546678 - RNA, 22 nt, Human adenovirus B [HAdV-B]
acgccagacgccgcaccugucc

SEQ ID NO: 1546679 - RNA, 17 nt, Human adenovirus B [HAdV-B]
ggcaguuuggaagccac

SEQ ID NO: 1546680 - RNA, 21 nt, Human adenovirus B [HAdV-B]
ccgcaggcaagcagccgcuuu

SEQ ID NO: 1546681 - RNA, 18 nt, Human adenovirus B [HAdV-B]
gauucuuaacagugcagg

SEQ ID NO: 1546682 - RNA, 15 nt, Human adenovirus B [HAdV-B]
cgaggaggcagagga

SEQ ID NO: 1546683 - RNA, 18 nt, Human adenovirus B [HAdV-B]
guucgcaagaugaggaca

SEQ ID NO: 1546684 - RNA, 16 nt, Human adenovirus B [HAdV-B]
aucaccugggcagcua

SEQ ID NO: 1546685 - RNA, 17 nt, Human adenovirus B [HAdV-B]
cccgcaggaccugcucg

SEQ ID NO: 1546686 - RNA, 18 nt, Human adenovirus B [HAdV-B]
ucagugaaaacguuccug

SEQ ID NO: 1546687 - RNA, 15 nt, Human adenovirus B [HAdV-B]
ccucaagggccgcac

SEQ ID NO: 1546688 - RNA, 12 nt, Human adenovirus B [HAdV-B]
ucagcugcaaag

SEQ ID NO: 1546689 - RNA, 16 nt, Human adenovirus B [HAdV-B]
uaguuauuuugccucc

SEQ ID NO: 1546690 - RNA, 22 nt, Human adenovirus B [HAdV-B]
cugcaaagcuccaagcagguca

SEQ ID NO: 1546691 - RNA, 15 nt, Human adenovirus B [HAdV-B]
agcuugguuaccagu

SEQ ID NO: 1546692 - RNA, 17 nt, Human adenovirus B [HAdV-B]
caaggucaacccuaucc

SEQ ID NO: 1546693 - RNA, 12 nt, Human adenovirus B [HAdV-B]
caucaguuucac

SEQ ID NO: 1546694 - RNA, 13 nt, Human adenovirus B [HAdV-B]
gaugagaggccuu

SEQ ID NO: 1546695 - RNA, 11 nt, Human adenovirus B [HAdV-B]
ggagucacugc

SEQ ID NO: 1546696 - RNA, 12 nt, Human adenovirus B [HAdV-B]
guagaagaggga

SEQ ID NO: 1546697 - RNA, 16 nt, Human adenovirus B [HAdV-B]
aacacacccucauaau

SEQ ID NO: 1546698 - RNA, 17 nt, Human adenovirus B [HAdV-B]
guagauggcgccagcau

SEQ ID NO: 1546699 - RNA, 21 nt, Human adenovirus B [HAdV-B]
cuugcuggagugucacugccg

SEQ ID NO: 1546700 - RNA, 21 nt, Human adenovirus B [HAdV-B]
gagcuuaagcauuccaccgcc

SEQ ID NO: 1546701 - RNA, 15 nt, Human adenovirus B [HAdV-B]
gccacagcuggcaga

SEQ ID NO: 1546702 - RNA, 14 nt, Human adenovirus B [HAdV-B]
aucuguggaguucu

SEQ ID NO: 1546703 - RNA, 23 nt, Human adenovirus B [HAdV-B]
guagacgccagcgccaugacaga

SEQ ID NO: 1546704 - RNA, 14 nt, Human adenovirus B [HAdV-B]
acuugcaguggcag

SEQ ID NO: 1546705 - RNA, 19 nt, Human adenovirus B [HAdV-B]
cugacgccagacgccgcac

SEQ ID NO: 1546706 - RNA, 13 nt, Human adenovirus B [HAdV-B]
cuuucuaaaaaaa

SEQ ID NO: 1546707 - RNA, 16 nt, Human adenovirus B [HAdV-B]
acgagccaacugaacg

SEQ ID NO: 1546708 - RNA, 23 nt, Human adenovirus B [HAdV-B]
cggcgcuacuugcuauuccacca

SEQ ID NO: 1546709 - RNA, 17 nt, Human adenovirus B [HAdV-B]
ggcgacggcggugaugc

SEQ ID NO: 1546710 - RNA, 14 nt, Human adenovirus B [HAdV-B]
gaauuaaaaaauga

SEQ ID NO: 1546711 - RNA, 15 nt, Human adenovirus B [HAdV-B]
cgccgucacagcagc

SEQ ID NO: 1546712 - RNA, 21 nt, Human adenovirus B [HAdV-B]
ugccgccaucucuaguagaca

SEQ ID NO: 1546713 - RNA, 15 nt, Human adenovirus B [HAdV-B]
acaaaacaaaaccaa

SEQ ID NO: 1546714 - RNA, 13 nt, Human adenovirus B [HAdV-B]
cuuggcuucuuuu

SEQ ID NO: 1546715 - RNA, 18 nt, Human adenovirus B [HAdV-B]
gcaaacucgaagagaauc

SEQ ID NO: 1546716 - RNA, 19 nt, Human adenovirus B [HAdV-B]
caaguugaucaugccugga

SEQ ID NO: 1546717 - RNA, 13 nt, Human adenovirus B [HAdV-B]
ggcaccuggagcg

SEQ ID NO: 1546718 - RNA, 22 nt, Human adenovirus B [HAdV-B]
gauuuccuucgcggcuggccau

SEQ ID NO: 1546719 - RNA, 19 nt, Human adenovirus B [HAdV-B]
aggaggcggaggaggacag

SEQ ID NO: 1546720 - RNA, 20 nt, Human adenovirus B [HAdV-B]
ugcuaucgagaaaaaucaga

SEQ ID NO: 1546721 - RNA, 23 nt, Human adenovirus B [HAdV-B]
aggcuacaacguagcccaaugca

SEQ ID NO: 1546722 - RNA, 16 nt, Human adenovirus B [HAdV-B]
aacugcccaaaacaac

SEQ ID NO: 1546723 - RNA, 11 nt, Human adenovirus B [HAdV-B]
cuguggcuuuu

SEQ ID NO: 1546724 - RNA, 21 nt, Human adenovirus B [HAdV-B]
caaucaugcccacauccagau

SEQ ID NO: 1546725 - RNA, 17 nt, Human adenovirus B [HAdV-B]
guucugaggaaaucauc

SEQ ID NO: 1546726 - RNA, 22 nt, Human adenovirus B [HAdV-B]
augaccagcaugaaaggaacua

SEQ ID NO: 1546727 - RNA, 12 nt, Human adenovirus B [HAdV-B]
gcgccaacaccu

SEQ ID NO: 1546728 - RNA, 18 nt, Human adenovirus B [HAdV-B]
cagugucgcuaacaauac

SEQ ID NO: 1546729 - RNA, 21 nt, Human adenovirus B [HAdV-B]
ggauguagaugccuaugagaa

SEQ ID NO: 1546730 - RNA, 16 nt, Human adenovirus B [HAdV-B]
cgggcggaaucgggac

SEQ ID NO: 1546731 - RNA, 19 nt, Human adenovirus B [HAdV-B]
cccuaguguaccaggaaag

SEQ ID NO: 1546732 - RNA, 11 nt, Human adenovirus B [HAdV-B]
cugcacagcac

SEQ ID NO: 1546733 - RNA, 17 nt, Human adenovirus B [HAdV-B]
gaaugaugaccaaagau

SEQ ID NO: 1546734 - RNA, 19 nt, Human adenovirus B [HAdV-B]
accugcgagccaaauccuc

SEQ ID NO: 1546735 - RNA, 16 nt, Human adenovirus B [HAdV-B]
agaccggcgaggaacu

SEQ ID NO: 1546736 - RNA, 14 nt, Human adenovirus B [HAdV-B]
ucaucuaaaaccau

SEQ ID NO: 1546737 - RNA, 16 nt, Human adenovirus B [HAdV-B]
ucggaacuggcaccuc

SEQ ID NO: 1546738 - RNA, 23 nt, Human adenovirus B [HAdV-B]
cacugaaaguauggaagugcaaa

SEQ ID NO: 1546739 - RNA, 17 nt, Human adenovirus B [HAdV-B]
agugaaucuaaugauug

SEQ ID NO: 1546740 - RNA, 20 nt, Human adenovirus B [HAdV-B]
caaaacgcggcccuggcaga

SEQ ID NO: 1546741 - RNA, 20 nt, Human adenovirus B [HAdV-B]
ggaggcagaggagguggaag

SEQ ID NO: 1546742 - RNA, 17 nt, Human adenovirus B [HAdV-B]
ccuacauggguauucug

SEQ ID NO: 1546743 - RNA, 15 nt, Human adenovirus B [HAdV-B]
agucugcaaaaauaa

SEQ ID NO: 1546744 - RNA, 18 nt, Human adenovirus B [HAdV-B]
caaaucccaaccaagcaa

SEQ ID NO: 1546745 - RNA, 17 nt, Human adenovirus B [HAdV-B]
aguuucagaugaagaaa

SEQ ID NO: 1546746 - RNA, 16 nt, Human adenovirus B [HAdV-B]
acagcugcugcagaag

SEQ ID NO: 1546747 - RNA, 18 nt, Human adenovirus B [HAdV-B]
gcaggcgccucccaggac

SEQ ID NO: 1546748 - RNA, 16 nt, Human adenovirus B [HAdV-B]
caggugaaaacauguu

SEQ ID NO: 1546749 - RNA, 16 nt, Human adenovirus B [HAdV-B]
agaacagaacuugaaa

SEQ ID NO: 1546750 - RNA, 21 nt, Human adenovirus B [HAdV-B]
aauaguaacuugcaacauaca

SEQ ID NO: 1546751 - RNA, 23 nt, Human adenovirus B [HAdV-B]
aauaucaucgaaguugcuggaaa

SEQ ID NO: 1546752 - RNA, 13 nt, Human adenovirus B [HAdV-B]
caauguggcucua

SEQ ID NO: 1546753 - RNA, 18 nt, Human adenovirus B [HAdV-B]
gcuccgguauccugcccg

SEQ ID NO: 1546754 - RNA, 21 nt, Human adenovirus B [HAdV-B]
auggacaggagucaaccccac

SEQ ID NO: 1546755 - RNA, 20 nt, Human adenovirus B [HAdV-B]
ugcuggagugucacugccgc

SEQ ID NO: 1546756 - RNA, 16 nt, Human adenovirus B [HAdV-B]
cagacgccgcaccugu

SEQ ID NO: 1546757 - RNA, 17 nt, Human adenovirus B [HAdV-B]
cggagacaagcaacagc

SEQ ID NO: 1546758 - RNA, 14 nt, Human adenovirus B [HAdV-B]
cuuuugcugugcca

SEQ ID NO: 1546759 - RNA, 19 nt, Human adenovirus B [HAdV-B]
agcaauggggccgugggca

SEQ ID NO: 1546760 - RNA, 16 nt, Human adenovirus B [HAdV-B]
gucucugacaaagugg

SEQ ID NO: 1546761 - RNA, 14 nt, Human adenovirus B [HAdV-B]
ggucugcauccaug

SEQ ID NO: 1546762 - RNA, 20 nt, Human adenovirus B [HAdV-B]
gucuucucaaagagcuucua

SEQ ID NO: 1546763 - RNA, 17 nt, Human adenovirus B [HAdV-B]
agccguuaaccccacag

SEQ ID NO: 1546764 - RNA, 15 nt, Human adenovirus B [HAdV-B]
gagucugagacagac

SEQ ID NO: 1546765 - RNA, 18 nt, Human adenovirus B [HAdV-B]
acaagauuggaauaagca

SEQ ID NO: 1546766 - RNA, 22 nt, Human adenovirus B [HAdV-B]
cacagcuagugaucgcacugcu

SEQ ID NO: 1546767 - RNA, 16 nt, Human adenovirus B [HAdV-B]
ugugccuuuccacaua

SEQ ID NO: 1546768 - RNA, 16 nt, Human adenovirus B [HAdV-B]
agcaagggggccaccu

SEQ ID NO: 1546769 - RNA, 19 nt, Human adenovirus B [HAdV-B]
uuaccagacaaaguacagc

SEQ ID NO: 1546770 - RNA, 16 nt, Human adenovirus B [HAdV-B]
gauucucacuugccac

SEQ ID NO: 1546771 - RNA, 22 nt, Human adenovirus B [HAdV-B]
caaauuaggacaaggacuuaca

SEQ ID NO: 1546772 - RNA, 18 nt, Human adenovirus B [HAdV-B]
gucuacuggucgcuucca

SEQ ID NO: 1546773 - RNA, 15 nt, Human adenovirus B [HAdV-B]
cagguuaucgcaccu

SEQ ID NO: 1546774 - RNA, 18 nt, Human adenovirus B [HAdV-B]
ggaaugcgacgcuacagg

SEQ ID NO: 1546775 - RNA, 15 nt, Human adenovirus B [HAdV-B]
gaagaugaaagcacc

SEQ ID NO: 1546776 - RNA, 18 nt, Human adenovirus B [HAdV-B]
uggaagagaugguggguc

SEQ ID NO: 1546777 - RNA, 19 nt, Human adenovirus B [HAdV-B]
gcgcgguuagcgccagcag

SEQ ID NO: 1546778 - RNA, 13 nt, Human adenovirus B [HAdV-B]
cgacugcagcacu

SEQ ID NO: 1546779 - RNA, 14 nt, Human adenovirus B [HAdV-B]
gcggcgauagaaug

SEQ ID NO: 1546780 - RNA, 13 nt, Human adenovirus B [HAdV-B]
uuaggaccagugc

SEQ ID NO: 1546781 - RNA, 19 nt, Human adenovirus B [HAdV-B]
ccucccgacggugcugcag

SEQ ID NO: 1546782 - RNA, 21 nt, Human adenovirus B [HAdV-B]
gcuaacccgauggcugggcac

SEQ ID NO: 1546783 - RNA, 12 nt, Human adenovirus B [HAdV-B]
uuaugugcauuu

SEQ ID NO: 1546784 - RNA, 17 nt, Human adenovirus B [HAdV-B]
agaagaggcggaugaag

SEQ ID NO: 1546785 - RNA, 13 nt, Human adenovirus B [HAdV-B]
caagauagcuuug

SEQ ID NO: 1546786 - RNA, 13 nt, Human adenovirus B [HAdV-B]
ucgcgugccaggc

SEQ ID NO: 1546787 - RNA, 17 nt, Human adenovirus B [HAdV-B]
aauucgggaaucaccaa

SEQ ID NO: 1546788 - RNA, 22 nt, Human adenovirus B [HAdV-B]
cuggucuggggguacaaacugu

SEQ ID NO: 1546789 - RNA, 18 nt, Human adenovirus B [HAdV-B]
cacgccccgccaacaccu

SEQ ID NO: 1546790 - RNA, 20 nt, Human adenovirus B [HAdV-B]
aauugcaaggccccagcagc

SEQ ID NO: 1546791 - RNA, 22 nt, Human adenovirus B [HAdV-B]
ccggcauggguguauggcagca

SEQ ID NO: 1546792 - RNA, 23 nt, Human adenovirus B [HAdV-B]
cagugaugagcagcuaacccgau

SEQ ID NO: 1546793 - RNA, 15 nt, Human adenovirus B [HAdV-B]
ucauccaaauucacc

SEQ ID NO: 1546794 - RNA, 18 nt, Human adenovirus B [HAdV-B]
agacaugcaugacccaga

SEQ ID NO: 1546795 - RNA, 21 nt, Human adenovirus B [HAdV-B]
aaccggucacuuugcagcaag

SEQ ID NO: 1546796 - RNA, 15 nt, Human adenovirus B [HAdV-B]
guggugggugcagag

SEQ ID NO: 1546797 - RNA, 13 nt, Human adenovirus B [HAdV-B]
cgcugcagagcca

SEQ ID NO: 1546798 - RNA, 13 nt, Human adenovirus B [HAdV-B]
uggaugccaugga

SEQ ID NO: 1546799 - RNA, 23 nt, Human adenovirus B [HAdV-B]
uugcaacauacaaaaucuuacau

SEQ ID NO: 1546800 - RNA, 14 nt, Human adenovirus B [HAdV-B]
ggcaccugcgagcc

SEQ ID NO: 1546801 - RNA, 14 nt, Human adenovirus B [HAdV-B]
uccccgcugggggg

SEQ ID NO: 1546802 - RNA, 17 nt, Human adenovirus B [HAdV-B]
aaguagcaguuuaccau

SEQ ID NO: 1546803 - RNA, 16 nt, Human adenovirus B [HAdV-B]
ugaacuaucagaauga

SEQ ID NO: 1546804 - RNA, 15 nt, Human adenovirus B [HAdV-B]
cugacuugcaguggc

SEQ ID NO: 1546805 - RNA, 17 nt, Human adenovirus B [HAdV-B]
cugaagcugaaauuaca

SEQ ID NO: 1546806 - RNA, 22 nt, Human adenovirus B [HAdV-B]
cgcggcgugccucugacgugag

SEQ ID NO: 1546807 - RNA, 15 nt, Human adenovirus B [HAdV-B]
ggaagacgcgcuccu

SEQ ID NO: 1546808 - RNA, 12 nt, Human adenovirus B [HAdV-B]
caccgacagcgg

SEQ ID NO: 1546809 - RNA, 22 nt, Human adenovirus B [HAdV-B]
ggucaagagcaggaacugaaaa

SEQ ID NO: 1546810 - RNA, 17 nt, Human adenovirus B [HAdV-B]
cauauuucaaagaugua

SEQ ID NO: 1546811 - RNA, 17 nt, Human adenovirus B [HAdV-B]
gcccaguccugccacca

SEQ ID NO: 1546812 - RNA, 13 nt, Human adenovirus B [HAdV-B]
cucccaggacuac

SEQ ID NO: 1546813 - RNA, 16 nt, Human adenovirus B [HAdV-B]
cuguuccgucuggcca

SEQ ID NO: 1546814 - RNA, 21 nt, Human adenovirus B [HAdV-B]
cuaugaggaccaaucacagcc

SEQ ID NO: 1546815 - RNA, 22 nt, Human adenovirus B [HAdV-B]
ggcagcaauguuuagaagaaca

SEQ ID NO: 1546816 - RNA, 18 nt, Human adenovirus B [HAdV-B]
ccgaagagcaauaaauga

SEQ ID NO: 1546817 - RNA, 13 nt, Human adenovirus B [HAdV-B]
gccauugcuguca

SEQ ID NO: 1546818 - RNA, 22 nt, Human adenovirus B [HAdV-B]
cgguucauuggggucaaaaaca

SEQ ID NO: 1546819 - RNA, 21 nt, Human adenovirus B [HAdV-B]
augauuaauaaaaaaucacuu

SEQ ID NO: 1546820 - RNA, 23 nt, Human adenovirus B [HAdV-B]
guaaaacaagccaagauauccua

SEQ ID NO: 1546821 - RNA, 23 nt, Human adenovirus B [HAdV-B]
acuaucuccuaacgaauuugaaa

SEQ ID NO: 1546822 - RNA, 16 nt, Human adenovirus B [HAdV-B]
uccgaccuggcagacc

SEQ ID NO: 1546823 - RNA, 12 nt, Human adenovirus B [HAdV-B]
ugccuggagugu

SEQ ID NO: 1546824 - RNA, 14 nt, Human adenovirus B [HAdV-B]
aaccuugucauaau

SEQ ID NO: 1546825 - RNA, 21 nt, Human adenovirus B [HAdV-B]
cccugcaacuacugcaacugc

SEQ ID NO: 1546826 - RNA, 24 nt, Human adenovirus B [HAdV-B]
ggaagauccugagguaugaugaua

SEQ ID NO: 1546827 - RNA, 14 nt, Human adenovirus B [HAdV-B]
ggaagacugauggc

SEQ ID NO: 1546828 - RNA, 13 nt, Human adenovirus B [HAdV-B]
aaguuuggcaaug

SEQ ID NO: 1546829 - RNA, 16 nt, Human adenovirus B [HAdV-B]
cagucaggcagaggag

SEQ ID NO: 1546830 - RNA, 17 nt, Human adenovirus B [HAdV-B]
cagccgaaacaguaccu

SEQ ID NO: 1546831 - RNA, 14 nt, Human adenovirus B [HAdV-B]
gcuuacaacucccu

SEQ ID NO: 1546832 - RNA, 15 nt, Human adenovirus B [HAdV-B]
ccuguggugggugca

SEQ ID NO: 1546833 - RNA, 18 nt, Human adenovirus B [HAdV-B]
acuuacuugaaaucagca

SEQ ID NO: 1546834 - RNA, 15 nt, Human adenovirus B [HAdV-B]
gggauuuggaagagc

SEQ ID NO: 1546835 - RNA, 12 nt, Human adenovirus B [HAdV-B]
cucccaagcaga

SEQ ID NO: 1546836 - RNA, 23 nt, Human adenovirus B [HAdV-B]
guaugccaucuuccagcagaguc

SEQ ID NO: 1546837 - RNA, 19 nt, Human adenovirus B [HAdV-B]
aaacaccguuucuggggcg

SEQ ID NO: 1546838 - RNA, 13 nt, Human adenovirus B [HAdV-B]
cccgcaggcagug

SEQ ID NO: 1546839 - RNA, 22 nt, Human adenovirus B [HAdV-B]
aaaacugguuagcugcacagcc

SEQ ID NO: 1546840 - RNA, 12 nt, Human adenovirus B [HAdV-B]
ugaucuggacuu

SEQ ID NO: 1546841 - RNA, 13 nt, Human adenovirus B [HAdV-B]
cuaccgccagugc

SEQ ID NO: 1546842 - RNA, 16 nt, Human adenovirus B [HAdV-B]
gaagaaaguaaaccga

SEQ ID NO: 1546843 - RNA, 17 nt, Human adenovirus B [HAdV-B]
gcguccagcgcugccag

SEQ ID NO: 1546844 - RNA, 22 nt, Human adenovirus B [HAdV-B]
aggguaauuuguuugccaugga

SEQ ID NO: 1546845 - RNA, 16 nt, Human adenovirus B [HAdV-B]
uacacggcucucauga

SEQ ID NO: 1546846 - RNA, 14 nt, Human adenovirus B [HAdV-B]
cgugcugcacagca

SEQ ID NO: 1546847 - RNA, 19 nt, Human adenovirus B [HAdV-B]
gcuuccagacaugaugaag

SEQ ID NO: 1546848 - RNA, 21 nt, Human adenovirus B [HAdV-B]
cuaggacaaagcgugcugcac

SEQ ID NO: 1546849 - RNA, 20 nt, Human adenovirus B [HAdV-B]
ucccgagugguacacugucu

SEQ ID NO: 1546850 - RNA, 22 nt, Human adenovirus B [HAdV-B]
gaucgaggguacgcgcaugcga

SEQ ID NO: 1546851 - RNA, 16 nt, Human adenovirus B [HAdV-B]
gcaccgacucucccag

SEQ ID NO: 1546852 - RNA, 23 nt, Human adenovirus B [HAdV-B]
aaauguaaauuuggaaacuccag

SEQ ID NO: 1546853 - RNA, 13 nt, Human adenovirus B [HAdV-B]
acuacacuuuuag

SEQ ID NO: 1546854 - RNA, 19 nt, Human adenovirus B [HAdV-B]
uaaccuacuacgccugcug

SEQ ID NO: 1546855 - RNA, 18 nt, Human adenovirus B [HAdV-B]
uuaaaaaccugcugcuuc

SEQ ID NO: 1546856 - RNA, 14 nt, Human adenovirus B [HAdV-B]
cgggcaggauguca

SEQ ID NO: 1546857 - RNA, 22 nt, Human adenovirus B [HAdV-B]
gagcuuccuuacauagaagagg

SEQ ID NO: 1546858 - RNA, 17 nt, Human adenovirus B [HAdV-B]
cucagccauugcuguca

SEQ ID NO: 1546859 - RNA, 20 nt, Human adenovirus B [HAdV-B]
aagagcuugacaagcucuua

SEQ ID NO: 1546860 - RNA, 18 nt, Human adenovirus B [HAdV-B]
ccugucugauuccuggau

SEQ ID NO: 1546861 - RNA, 22 nt, Human adenovirus B [HAdV-B]
guuagcuggcggcuccacccua

SEQ ID NO: 1546862 - RNA, 13 nt, Human adenovirus B [HAdV-B]
cucacgcuugcca

SEQ ID NO: 1546863 - RNA, 21 nt, Human adenovirus B [HAdV-B]
ccccacggcgacgcgugcaau

SEQ ID NO: 1546864 - RNA, 15 nt, Human adenovirus B [HAdV-B]
ccagggucucagugu

SEQ ID NO: 1546865 - RNA, 14 nt, Human adenovirus B [HAdV-B]
cugaccgcccagcu

SEQ ID NO: 1546866 - RNA, 12 nt, Human adenovirus B [HAdV-B]
acacagaacuuu

SEQ ID NO: 1546867 - RNA, 17 nt, Human adenovirus B [HAdV-B]
ccacagcaacuucuuga

SEQ ID NO: 1546868 - RNA, 13 nt, Human adenovirus B [HAdV-B]
auacaauuuccaa

SEQ ID NO: 1546869 - RNA, 11 nt, Human adenovirus B [HAdV-B]
aauaugagugg

SEQ ID NO: 1546870 - RNA, 19 nt, Human adenovirus B [HAdV-B]
guuccggagacagggagga

SEQ ID NO: 1546871 - RNA, 23 nt, Human adenovirus B [HAdV-B]
ccaugccuauuacaacugacgcc

SEQ ID NO: 1546872 - RNA, 19 nt, Human adenovirus B [HAdV-B]
acgguuuuuugaaagaaaa

SEQ ID NO: 1546873 - RNA, 21 nt, Human adenovirus B [HAdV-B]
cucacuauucaaccuguagaa

SEQ ID NO: 1546874 - RNA, 11 nt, Human adenovirus B [HAdV-B]
ugaagugcaaa

SEQ ID NO: 1546875 - RNA, 20 nt, Human adenovirus B [HAdV-B]
accagcgcuuccaagaccgg

SEQ ID NO: 1546876 - RNA, 17 nt, Human adenovirus B [HAdV-B]
uugcaaggccccagcag

SEQ ID NO: 1546877 - RNA, 18 nt, Human adenovirus B [HAdV-B]
caucccucaaaacuccac

SEQ ID NO: 1546878 - RNA, 16 nt, Human adenovirus B [HAdV-B]
augggcaccuggagcg

SEQ ID NO: 1546879 - RNA, 21 nt, Human adenovirus B [HAdV-B]
gccaugcuuagggcggccaga

SEQ ID NO: 1546880 - RNA, 14 nt, Human adenovirus B [HAdV-B]
cucuuccucacugu

SEQ ID NO: 1546881 - RNA, 17 nt, Human adenovirus B [HAdV-B]
acagggcguuggauaaa

SEQ ID NO: 1546882 - RNA, 16 nt, Human adenovirus B [HAdV-B]
auagcuuccuuggaag

SEQ ID NO: 1546883 - RNA, 21 nt, Human adenovirus B [HAdV-B]
gaugauauucuugagcaggcg

SEQ ID NO: 1546884 - RNA, 22 nt, Human adenovirus B [HAdV-B]
caaagcuauucguccagaugag

SEQ ID NO: 1546885 - RNA, 16 nt, Human adenovirus B [HAdV-B]
gaauguuuaugccuua

SEQ ID NO: 1546886 - RNA, 16 nt, Human adenovirus B [HAdV-B]
gaugaaaacugcccaa

SEQ ID NO: 1546887 - RNA, 15 nt, Human adenovirus B [HAdV-B]
aaucugcaacaaaac

SEQ ID NO: 1546888 - RNA, 20 nt, Human adenovirus B [HAdV-B]
cacagcacccugaaggggga

SEQ ID NO: 1546889 - RNA, 14 nt, Human adenovirus B [HAdV-B]
gacagcaaaugaca

SEQ ID NO: 1546890 - RNA, 14 nt, Human adenovirus B [HAdV-B]
ggaaucaaccccau

SEQ ID NO: 1546891 - RNA, 19 nt, Human adenovirus B [HAdV-B]
gaugccuuuuccagaauga

SEQ ID NO: 1546892 - RNA, 16 nt, Human adenovirus B [HAdV-B]
acagugcaggcagcag

SEQ ID NO: 1546893 - RNA, 14 nt, Human adenovirus B [HAdV-B]
gcaagggggccacc

SEQ ID NO: 1546894 - RNA, 16 nt, Human adenovirus B [HAdV-B]
cuaccacugccaugcg

SEQ ID NO: 1546895 - RNA, 11 nt, Human adenovirus B [HAdV-B]
uuugcugugcc

SEQ ID NO: 1546896 - RNA, 13 nt, Human adenovirus B [HAdV-B]
cagucuggaggac

SEQ ID NO: 1546897 - RNA, 15 nt, Human adenovirus B [HAdV-B]
gaaaguggguagaca

SEQ ID NO: 1546898 - RNA, 17 nt, Human adenovirus B [HAdV-B]
cagcuuuugcugugcca

SEQ ID NO: 1546899 - RNA, 17 nt, Human adenovirus B [HAdV-B]
gccaaacccaacacaca

SEQ ID NO: 1546900 - RNA, 13 nt, Human adenovirus B [HAdV-B]
augggucuucucc

SEQ ID NO: 1546901 - RNA, 14 nt, Human adenovirus B [HAdV-B]
ccaagcaaugcaac

SEQ ID NO: 1546902 - RNA, 21 nt, Human adenovirus B [HAdV-B]
cuggccgagaagguggcugcc

SEQ ID NO: 1546903 - RNA, 15 nt, Human adenovirus B [HAdV-B]
gcaggcgccucccag

SEQ ID NO: 1546904 - RNA, 17 nt, Human adenovirus B [HAdV-B]
gucccgauuuggaagag

SEQ ID NO: 1546905 - RNA, 17 nt, Human adenovirus B [HAdV-B]
gcgccaugacagacaga

SEQ ID NO: 1546906 - RNA, 21 nt, Human adenovirus B [HAdV-B]
cgauguugugucccagcggcg

SEQ ID NO: 1546907 - RNA, 19 nt, Human adenovirus B [HAdV-B]
cuguuaaaaaccugcugcu

SEQ ID NO: 1546908 - RNA, 16 nt, Human adenovirus B [HAdV-B]
agagcucugacuggag

SEQ ID NO: 1546909 - RNA, 14 nt, Human adenovirus B [HAdV-B]
gggacagucaggca

SEQ ID NO: 1546910 - RNA, 21 nt, Human adenovirus B [HAdV-B]
ucuuaccuuuggucuccauga

SEQ ID NO: 1546911 - RNA, 13 nt, Human adenovirus B [HAdV-B]
uccaccuuuucca

SEQ ID NO: 1546912 - RNA, 14 nt, Human adenovirus B [HAdV-B]
agagaggaugaaaa

SEQ ID NO: 1546913 - RNA, 15 nt, Human adenovirus B [HAdV-B]
agccggccggagccg

SEQ ID NO: 1546914 - RNA, 12 nt, Human adenovirus B [HAdV-B]
cuccauacuuua

SEQ ID NO: 1546915 - RNA, 16 nt, Human adenovirus B [HAdV-B]
uggaagccacucugaa

SEQ ID NO: 1546916 - RNA, 17 nt, Human adenovirus B [HAdV-B]
acauacaacaauuucca

SEQ ID NO: 1546917 - RNA, 18 nt, Human adenovirus B [HAdV-B]
gcauacaauccagacaug

SEQ ID NO: 1546918 - RNA, 22 nt, Human adenovirus B [HAdV-B]
aggagaaagagcaaccgugucu

SEQ ID NO: 1546919 - RNA, 23 nt, Human adenovirus B [HAdV-B]
aacacguuccgugggucugacac

SEQ ID NO: 1546920 - RNA, 15 nt, Human adenovirus B [HAdV-B]
ggccuccuagcaagg

SEQ ID NO: 1546921 - RNA, 22 nt, Human adenovirus B [HAdV-B]
gguggauaaaaugaguagaugg

SEQ ID NO: 1546922 - RNA, 19 nt, Human adenovirus B [HAdV-B]
cacauacaacaauuuccac

SEQ ID NO: 1546923 - RNA, 21 nt, Human adenovirus B [HAdV-B]
augguacccaaacgccagaag

SEQ ID NO: 1546924 - RNA, 17 nt, Human adenovirus B [HAdV-B]
caacaaucuaugcccaa

SEQ ID NO: 1546925 - RNA, 15 nt, Human adenovirus B [HAdV-B]
gacagcaaccccagg

SEQ ID NO: 1546926 - RNA, 12 nt, Human adenovirus B [HAdV-B]
aaagccugcugg

SEQ ID NO: 1546927 - RNA, 16 nt, Human adenovirus B [HAdV-B]
ucucaacgaugcgcac

SEQ ID NO: 1546928 - RNA, 18 nt, Human adenovirus B [HAdV-B]
ugcaccuacacccugcug

SEQ ID NO: 1546929 - RNA, 13 nt, Human adenovirus B [HAdV-B]
gcuucacuuucuu

SEQ ID NO: 1546930 - RNA, 18 nt, Human adenovirus B [HAdV-B]
ccuccacugaagugcaaa

SEQ ID NO: 1546931 - RNA, 14 nt, Human adenovirus B [HAdV-B]
gucucacgcuugcc

SEQ ID NO: 1546932 - RNA, 14 nt, Human adenovirus B [HAdV-B]
uuaucaaaugcuca

SEQ ID NO: 1546933 - RNA, 21 nt, Human adenovirus B [HAdV-B]
ugacauaucugucaugcuuaa

SEQ ID NO: 1546934 - RNA, 12 nt, Human adenovirus B [HAdV-B]
auauuuuugcuu

SEQ ID NO: 1546935 - RNA, 14 nt, Human adenovirus B [HAdV-B]
ugaaggggugugcg

SEQ ID NO: 1546936 - RNA, 18 nt, Human adenovirus B [HAdV-B]
uagcagcgugcuggacuu

SEQ ID NO: 1546937 - RNA, 19 nt, Human adenovirus B [HAdV-B]
uagcugaaacccacugcua

SEQ ID NO: 1546938 - RNA, 22 nt, Human adenovirus B [HAdV-B]
aagcuguguacucccagcagcu

SEQ ID NO: 1546939 - RNA, 22 nt, Human adenovirus B [HAdV-B]
auggaauagaaaguuuggugga

SEQ ID NO: 1546940 - RNA, 20 nt, Human adenovirus B [HAdV-B]
gacuuuaugagccagagcau

SEQ ID NO: 1546941 - RNA, 14 nt, Human adenovirus B [HAdV-B]
uaucggaggaggag

SEQ ID NO: 1546942 - RNA, 12 nt, Human adenovirus B [HAdV-B]
accacacugcca

SEQ ID NO: 1546943 - RNA, 20 nt, Human adenovirus B [HAdV-B]
uacuaccaauauuuuugcuu

SEQ ID NO: 1546944 - RNA, 17 nt, Human adenovirus B [HAdV-B]
ucagcuguugggguagg

SEQ ID NO: 1546945 - RNA, 14 nt, Human adenovirus B [HAdV-B]
acuuccagcccaug

SEQ ID NO: 1546946 - RNA, 13 nt, Human adenovirus B [HAdV-B]
uuuggaggaggaa

SEQ ID NO: 1546947 - RNA, 14 nt, Human adenovirus B [HAdV-B]
cgcucgggauucuc

SEQ ID NO: 1546948 - RNA, 19 nt, Human adenovirus B [HAdV-B]
caaugaggcuuucagagag

SEQ ID NO: 1546949 - RNA, 17 nt, Human adenovirus B [HAdV-B]
aaucuggggucagugau

SEQ ID NO: 1546950 - RNA, 18 nt, Human adenovirus B [HAdV-B]
ccagcgccaugacagaca

SEQ ID NO: 1546951 - RNA, 14 nt, Human adenovirus B [HAdV-B]
gcggagacaagcaa

SEQ ID NO: 1546952 - RNA, 20 nt, Human adenovirus B [HAdV-B]
cuaggacaaagcgugcugca

SEQ ID NO: 1546953 - RNA, 21 nt, Human adenovirus B [HAdV-B]
caguccugccagggcacacgu

SEQ ID NO: 1546954 - RNA, 13 nt, Human adenovirus B [HAdV-B]
uggauuuccugcc

SEQ ID NO: 1546955 - RNA, 19 nt, Human adenovirus B [HAdV-B]
cuccacuagacaagucagu

SEQ ID NO: 1546956 - RNA, 17 nt, Human adenovirus B [HAdV-B]
cauuccugcaccauucc

SEQ ID NO: 1546957 - RNA, 14 nt, Human adenovirus B [HAdV-B]
aaagauaguaagaa

SEQ ID NO: 1546958 - RNA, 14 nt, Human adenovirus B [HAdV-B]
gauggaaaaaccga

SEQ ID NO: 1546959 - RNA, 14 nt, Human adenovirus B [HAdV-B]
cuucuccugggcaa

SEQ ID NO: 1546960 - RNA, 12 nt, Human adenovirus B [HAdV-B]
accucacuuccc

SEQ ID NO: 1546961 - RNA, 14 nt, Human adenovirus B [HAdV-B]
uacuuugccagaag

SEQ ID NO: 1546962 - RNA, 13 nt, Human adenovirus B [HAdV-B]
auauuuucccgca

SEQ ID NO: 1546963 - RNA, 19 nt, Human adenovirus B [HAdV-B]
aagagcucugacuggagcu

SEQ ID NO: 1546964 - RNA, 14 nt, Human adenovirus B [HAdV-B]
cuaguagacaccua

SEQ ID NO: 1546965 - RNA, 14 nt, Human adenovirus B [HAdV-B]
cauugcagccauga

SEQ ID NO: 1546966 - RNA, 19 nt, Human adenovirus B [HAdV-B]
caggauccuauagaggugg

SEQ ID NO: 1546967 - RNA, 15 nt, Human adenovirus B [HAdV-B]
cgaggcucucuucaa

SEQ ID NO: 1546968 - RNA, 18 nt, Human adenovirus B [HAdV-B]
uaguuauguuccugaguu

SEQ ID NO: 1546969 - RNA, 23 nt, Human adenovirus B [HAdV-B]
acacucaccaccuccaauuccgc

SEQ ID NO: 1546970 - RNA, 13 nt, Human adenovirus B [HAdV-B]
cagaacacacucu

SEQ ID NO: 1546971 - RNA, 14 nt, Human adenovirus B [HAdV-B]
ggcgaccuccaaca

SEQ ID NO: 1546972 - RNA, 23 nt, Human adenovirus B [HAdV-B]
cccguaacuccgcgaacaggugu

SEQ ID NO: 1546973 - RNA, 14 nt, Human adenovirus B [HAdV-B]
aacagucagcucuu

SEQ ID NO: 1546974 - RNA, 21 nt, Human adenovirus B [HAdV-B]
acagauaagcccuugguguag

SEQ ID NO: 1546975 - RNA, 20 nt, Human adenovirus B [HAdV-B]
gaagccuuuagacagcaacc

SEQ ID NO: 1546976 - RNA, 14 nt, Human adenovirus B [HAdV-B]
acugcuuuucccau

SEQ ID NO: 1546977 - RNA, 13 nt, Human adenovirus B [HAdV-B]
cugacuugucucc

SEQ ID NO: 1546978 - RNA, 16 nt, Human adenovirus B [HAdV-B]
aagcgcgugugauggu

SEQ ID NO: 1546979 - RNA, 16 nt, Human adenovirus B [HAdV-B]
gacaggcgcuuagaaa

SEQ ID NO: 1546980 - RNA, 21 nt, Human adenovirus B [HAdV-B]
gucucaguguucgagucaggg

SEQ ID NO: 1546981 - RNA, 15 nt, Human adenovirus B [HAdV-B]
ugcuagauggaacag

SEQ ID NO: 1546982 - RNA, 19 nt, Human adenovirus B [HAdV-B]
gaaucauguccaccugggg

SEQ ID NO: 1546983 - RNA, 19 nt, Human adenovirus B [HAdV-B]
gaggcagucuaccugcgua

SEQ ID NO: 1546984 - RNA, 19 nt, Human adenovirus B [HAdV-B]
guucugacgagaaucagaa

SEQ ID NO: 1546985 - RNA, 13 nt, Human adenovirus B [HAdV-B]
ccuuccaguacuc

SEQ ID NO: 1546986 - RNA, 19 nt, Human adenovirus B [HAdV-B]
uucagaagacaugcaugac

SEQ ID NO: 1546987 - RNA, 20 nt, Human adenovirus B [HAdV-B]
ugaaaguauggaagugcaaa

SEQ ID NO: 1546988 - RNA, 18 nt, Human adenovirus B [HAdV-B]
uggacucugacacuccug

SEQ ID NO: 1546989 - RNA, 12 nt, Human adenovirus B [HAdV-B]
augaggccacaa

SEQ ID NO: 1546990 - RNA, 14 nt, Human adenovirus B [HAdV-B]
ucuguugaaauuuu

SEQ ID NO: 1546991 - RNA, 15 nt, Human adenovirus B [HAdV-B]
augggcgaagaggag

SEQ ID NO: 1546992 - RNA, 19 nt, Human adenovirus B [HAdV-B]
aggaugcauuauuggacag

SEQ ID NO: 1546993 - RNA, 13 nt, Human adenovirus B [HAdV-B]
aauguuagcaaag

SEQ ID NO: 1546994 - RNA, 14 nt, Human adenovirus B [HAdV-B]
ucacaagacaagcc

SEQ ID NO: 1546995 - RNA, 11 nt, Human adenovirus B [HAdV-B]
ucuuccuucac

SEQ ID NO: 1546996 - RNA, 19 nt, Human adenovirus B [HAdV-B]
accguucaauuuguggagg

SEQ ID NO: 1546997 - RNA, 14 nt, Human adenovirus B [HAdV-B]
cacuugccacccuc

SEQ ID NO: 1546998 - RNA, 18 nt, Human adenovirus B [HAdV-B]
cucaaacugcacacuaaa

SEQ ID NO: 1546999 - RNA, 20 nt, Human adenovirus B [HAdV-B]
cucgcgugccaggcacuucc

SEQ ID NO: 1547000 - RNA, 15 nt, Human adenovirus B [HAdV-B]
guauggaagugcaaa

SEQ ID NO: 1547001 - RNA, 14 nt, Human adenovirus B [HAdV-B]
cccgcaggcaagca

SEQ ID NO: 1547002 - RNA, 13 nt, Human adenovirus B [HAdV-B]
cagacacaucacu

SEQ ID NO: 1547003 - RNA, 18 nt, Human adenovirus B [HAdV-B]
guuguaucugguggacaa

SEQ ID NO: 1547004 - RNA, 18 nt, Human adenovirus B [HAdV-B]
cacugaaacaccaucagc

SEQ ID NO: 1547005 - RNA, 18 nt, Human adenovirus B [HAdV-B]
ucggcuuacgagcagaca

SEQ ID NO: 1547006 - RNA, 19 nt, Human adenovirus B [HAdV-B]
cggucacuuugcagcaagu

SEQ ID NO: 1547007 - RNA, 22 nt, Human adenovirus B [HAdV-B]
cagccuguacuucuccaucagc

SEQ ID NO: 1547008 - RNA, 16 nt, Human adenovirus B [HAdV-B]
gcaacgggugcuuacu

SEQ ID NO: 1547009 - RNA, 20 nt, Human adenovirus B [HAdV-B]
gcgcuuugggacaggaagac

SEQ ID NO: 1547010 - RNA, 16 nt, Human adenovirus B [HAdV-B]
cgaguaucaucacuua

SEQ ID NO: 1547011 - RNA, 13 nt, Human adenovirus B [HAdV-B]
aggaucacagaga

SEQ ID NO: 1547012 - RNA, 18 nt, Human adenovirus B [HAdV-B]
uucuccggaucuccuggg

SEQ ID NO: 1547013 - RNA, 18 nt, Human adenovirus B [HAdV-B]
cgagagccggccuggacc

SEQ ID NO: 1547014 - RNA, 22 nt, Human adenovirus B [HAdV-B]
aauggagugguagauuuggcua

SEQ ID NO: 1547015 - RNA, 20 nt, Human adenovirus B [HAdV-B]
cacaggcucccuguucccag

SEQ ID NO: 1547016 - RNA, 23 nt, Human adenovirus B [HAdV-B]
cagaccauuaacuuugaugaacg

SEQ ID NO: 1547017 - RNA, 13 nt, Human adenovirus B [HAdV-B]
caucgugcucagu

SEQ ID NO: 1547018 - RNA, 17 nt, Human adenovirus B [HAdV-B]
acagauuugcauuuccc

SEQ ID NO: 1547019 - RNA, 21 nt, Human adenovirus B [HAdV-B]
aucccgugcugcgacagaugc

SEQ ID NO: 1547020 - RNA, 14 nt, Human adenovirus B [HAdV-B]
gauucucacuugcc

SEQ ID NO: 1547021 - RNA, 17 nt, Human adenovirus B [HAdV-B]
acagaaaaccagcagcg

SEQ ID NO: 1547022 - RNA, 13 nt, Human adenovirus B [HAdV-B]
guaauuaaaucca

SEQ ID NO: 1547023 - RNA, 12 nt, Human adenovirus B [HAdV-B]
gcuacugcugua

SEQ ID NO: 1547024 - RNA, 23 nt, Human adenovirus B [HAdV-B]
accaagagucaauugucucugaa

SEQ ID NO: 1547025 - RNA, 13 nt, Human adenovirus B [HAdV-B]
cgaucuucucaau

SEQ ID NO: 1547026 - RNA, 19 nt, Human adenovirus B [HAdV-B]
ugccuuguaagggcagcag

SEQ ID NO: 1547027 - RNA, 23 nt, Human adenovirus B [HAdV-B]
aagcuguguacucccagcagcuc

SEQ ID NO: 1547028 - RNA, 21 nt, Human adenovirus B [HAdV-B]
caaccuggguucgcugguggc

SEQ ID NO: 1547029 - RNA, 21 nt, Human adenovirus B [HAdV-B]
aggaccagugcuuugagcgcg

SEQ ID NO: 1547030 - RNA, 18 nt, Human adenovirus B [HAdV-B]
ugcccacauccagaucuu

SEQ ID NO: 1547031 - RNA, 13 nt, Human adenovirus B [HAdV-B]
guaucggaggagg

SEQ ID NO: 1547032 - RNA, 22 nt, Human adenovirus B [HAdV-B]
ggcacgauucucacuugccacc

SEQ ID NO: 1547033 - RNA, 17 nt, Human adenovirus B [HAdV-B]
agaggugggauugaaug

SEQ ID NO: 1547034 - RNA, 17 nt, Human adenovirus B [HAdV-B]
gcucgggauucuccuuu

SEQ ID NO: 1547035 - RNA, 23 nt, Human adenovirus B [HAdV-B]
gaacaauaccuuauccaccacau

SEQ ID NO: 1547036 - RNA, 19 nt, Human adenovirus B [HAdV-B]
cgcaaaguucgacaugugu

SEQ ID NO: 1547037 - RNA, 13 nt, Human adenovirus B [HAdV-B]
guucucgcuggcc

SEQ ID NO: 1547038 - RNA, 14 nt, Human adenovirus B [HAdV-B]
cugcagagccagcc

SEQ ID NO: 1547039 - RNA, 18 nt, Human adenovirus B [HAdV-B]
uaacuuuuguaaauguua

SEQ ID NO: 1547040 - RNA, 20 nt, Human adenovirus B [HAdV-B]
acauugucuuacugccuggc

SEQ ID NO: 1547041 - RNA, 21 nt, Human adenovirus B [HAdV-B]
guuucacuuccgcaaucccaa

SEQ ID NO: 1547042 - RNA, 19 nt, Human adenovirus B [HAdV-B]
augaggcuuucagagaggc

SEQ ID NO: 1547043 - RNA, 13 nt, Human adenovirus B [HAdV-B]
uguccaagcgcaa

SEQ ID NO: 1547044 - RNA, 15 nt, Human adenovirus B [HAdV-B]
uuugauuaagggaaa

SEQ ID NO: 1547045 - RNA, 16 nt, Human adenovirus B [HAdV-B]
cagcagcagcagcagc

SEQ ID NO: 1547046 - RNA, 23 nt, Human adenovirus B [HAdV-B]
cuuuaaaauguuuaaccccacua

SEQ ID NO: 1547047 - RNA, 11 nt, Human adenovirus B [HAdV-B]
cuaggcagaga

SEQ ID NO: 1547048 - RNA, 19 nt, Human adenovirus B [HAdV-B]
auuguguucuccuaggcag

SEQ ID NO: 1547049 - RNA, 16 nt, Human adenovirus B [HAdV-B]
cuacuggucgcuucca

SEQ ID NO: 1547050 - RNA, 17 nt, Human adenovirus B [HAdV-B]
auuucauagccacagca

SEQ ID NO: 1547051 - RNA, 20 nt, Human adenovirus B [HAdV-B]
auucuguuugguaaaacaag

SEQ ID NO: 1547052 - RNA, 16 nt, Human adenovirus B [HAdV-B]
ccaguguaacaugaau

SEQ ID NO: 1547053 - RNA, 22 nt, Human adenovirus B [HAdV-B]
agaaucuuaccggcucugggca

SEQ ID NO: 1547054 - RNA, 24 nt, Human adenovirus B [HAdV-B]
cagugagcuggccuggaaaugaca

SEQ ID NO: 1547055 - RNA, 14 nt, Human adenovirus B [HAdV-B]
acaagaauuugaaa

SEQ ID NO: 1547056 - RNA, 16 nt, Human adenovirus B [HAdV-B]
uaaaccauaauuaaaa

SEQ ID NO: 1547057 - RNA, 18 nt, Human adenovirus B [HAdV-B]
auuccagucuccugccgc

SEQ ID NO: 1547058 - RNA, 14 nt, Human adenovirus B [HAdV-B]
ccaaacgccagaag

SEQ ID NO: 1547059 - RNA, 18 nt, Human adenovirus B [HAdV-B]
gucuccgguuuuuggaga

SEQ ID NO: 1547060 - RNA, 20 nt, Human adenovirus B [HAdV-B]
ugucgguagaagaaccugac

SEQ ID NO: 1547061 - RNA, 20 nt, Human adenovirus B [HAdV-B]
caccuuggauuugcccccuc

SEQ ID NO: 1547062 - RNA, 15 nt, Human adenovirus B [HAdV-B]
caccgucgaugaugu

SEQ ID NO: 1547063 - RNA, 19 nt, Human adenovirus B [HAdV-B]
ucaccugcggagcagagca

SEQ ID NO: 1547064 - RNA, 19 nt, Human adenovirus B [HAdV-B]
cucugacuggagcuggaac

SEQ ID NO: 1547065 - RNA, 23 nt, Human adenovirus B [HAdV-B]
uagcugaugggaguggggucauc

SEQ ID NO: 1547066 - RNA, 17 nt, Human adenovirus B [HAdV-B]
ggggugcuggcugguca

SEQ ID NO: 1547067 - RNA, 21 nt, Human adenovirus B [HAdV-B]
agaauguaucauucccugcag

SEQ ID NO: 1547068 - RNA, 14 nt, Human adenovirus B [HAdV-B]
ggcggguggugccg

SEQ ID NO: 1547069 - RNA, 12 nt, Human adenovirus B [HAdV-B]
guuuggaggagg

SEQ ID NO: 1547070 - RNA, 14 nt, Human adenovirus B [HAdV-B]
acgaggaggcagag

SEQ ID NO: 1547071 - RNA, 17 nt, Human adenovirus B [HAdV-B]
cggcaggcgccucccag

SEQ ID NO: 1547072 - RNA, 22 nt, Human adenovirus B [HAdV-B]
caggacaggcgcuuagaaauaa

SEQ ID NO: 1547073 - RNA, 16 nt, Human adenovirus B [HAdV-B]
ccuuagaaaaugcaaa

SEQ ID NO: 1547074 - RNA, 16 nt, Human adenovirus B [HAdV-B]
ccggucccacucgaag

SEQ ID NO: 1547075 - RNA, 21 nt, Human adenovirus B [HAdV-B]
gcggcgaggagccggaggaga

SEQ ID NO: 1547076 - RNA, 15 nt, Human adenovirus B [HAdV-B]
gucccgauuuggaag

SEQ ID NO: 1547077 - RNA, 19 nt, Human adenovirus B [HAdV-B]
caugaaagccuuugcuguc

SEQ ID NO: 1547078 - RNA, 19 nt, Human adenovirus B [HAdV-B]
augagaacaguaagaaaga

SEQ ID NO: 1547079 - RNA, 13 nt, Human adenovirus B [HAdV-B]
ggcgggcacccaa

SEQ ID NO: 1547080 - RNA, 24 nt, Human adenovirus B [HAdV-B]
ccgacugcagcacuggacaugaca

SEQ ID NO: 1547081 - RNA, 15 nt, Human adenovirus B [HAdV-B]
gcagcagcaaucaca

SEQ ID NO: 1547082 - RNA, 16 nt, Human adenovirus B [HAdV-B]
cucguucaucauuucc

SEQ ID NO: 1547083 - RNA, 14 nt, Human adenovirus B [HAdV-B]
uacacugucucugu

SEQ ID NO: 1547084 - RNA, 16 nt, Human adenovirus B [HAdV-B]
acaugggagcugacuu

SEQ ID NO: 1547085 - RNA, 16 nt, Human adenovirus B [HAdV-B]
cauucaauucaaacaa

SEQ ID NO: 1547086 - RNA, 19 nt, Human adenovirus B [HAdV-B]
gggacagucaggcagagga

SEQ ID NO: 1547087 - RNA, 18 nt, Human adenovirus B [HAdV-B]
caggaaagucccgcuccc

SEQ ID NO: 1547088 - RNA, 20 nt, Human adenovirus B [HAdV-B]
cgaguuuacuuugccagaag

SEQ ID NO: 1547089 - RNA, 16 nt, Human adenovirus B [HAdV-B]
ugugggagggguagcg

SEQ ID NO: 1547090 - RNA, 18 nt, Human adenovirus B [HAdV-B]
acgccuuacauguggagu

SEQ ID NO: 1547091 - RNA, 19 nt, Human adenovirus B [HAdV-B]
ucuaaauacacauacaaag

SEQ ID NO: 1547092 - RNA, 13 nt, Human adenovirus B [HAdV-B]
caccacaccacuc

SEQ ID NO: 1547093 - RNA, 19 nt, Human adenovirus B [HAdV-B]
ucuaccuugacccccagac

SEQ ID NO: 1547094 - RNA, 21 nt, Human adenovirus B [HAdV-B]
uccaucacaagacaagccaca

SEQ ID NO: 1547095 - RNA, 17 nt, Human adenovirus B [HAdV-B]
gcugccccgaaaccagu

SEQ ID NO: 1547096 - RNA, 22 nt, Human adenovirus B [HAdV-B]
augacccagaugccugugauga

SEQ ID NO: 1547097 - RNA, 22 nt, Human adenovirus B [HAdV-B]
ugcgucaucacccagggggcaa

SEQ ID NO: 1547098 - RNA, 16 nt, Human adenovirus B [HAdV-B]
gcacaacuacuuucuc

SEQ ID NO: 1547099 - RNA, 21 nt, Human adenovirus B [HAdV-B]
auuacagccaacgagccagcg

SEQ ID NO: 1547100 - RNA, 18 nt, Human adenovirus B [HAdV-B]
aaccacgaaaaugccaaa

SEQ ID NO: 1547101 - RNA, 18 nt, Human adenovirus B [HAdV-B]
caacagacccaacuacau

SEQ ID NO: 1547102 - RNA, 11 nt, Human adenovirus B [HAdV-B]
cuacuccuggu

SEQ ID NO: 1547103 - RNA, 18 nt, Human adenovirus B [HAdV-B]
cugcguauguagcauagu

SEQ ID NO: 1547104 - RNA, 22 nt, Human adenovirus B [HAdV-B]
cccgcaaugcgggcggcgcugc

SEQ ID NO: 1547105 - RNA, 15 nt, Human adenovirus B [HAdV-B]
cauacaugccacaga

SEQ ID NO: 1547106 - RNA, 14 nt, Human adenovirus B [HAdV-B]
ucuuacugcuuuac

SEQ ID NO: 1547107 - RNA, 14 nt, Human adenovirus B [HAdV-B]
gaacauuggugcca

SEQ ID NO: 1547108 - RNA, 15 nt, Human adenovirus B [HAdV-B]
cagguggacgagcag

SEQ ID NO: 1547109 - RNA, 23 nt, Human adenovirus B [HAdV-B]
cgcaggaggcgcaaacaguuuca

SEQ ID NO: 1547110 - RNA, 20 nt, Human adenovirus B [HAdV-B]
aucccacuaugcaacugaug

SEQ ID NO: 1547111 - RNA, 19 nt, Human adenovirus B [HAdV-B]
aaaauuugccaaaaaaaca

SEQ ID NO: 1547112 - RNA, 20 nt, Human adenovirus B [HAdV-B]
agcucaacgacuacaccgcu

SEQ ID NO: 1547113 - RNA, 16 nt, Human adenovirus B [HAdV-B]
aauuccagucuccugc

SEQ ID NO: 1547114 - RNA, 19 nt, Human adenovirus B [HAdV-B]
ugaaccacaacccccacua

SEQ ID NO: 1547115 - RNA, 11 nt, Human adenovirus B [HAdV-B]
ggaucuccugg

SEQ ID NO: 1547116 - RNA, 11 nt, Human adenovirus B [HAdV-B]
gcugcuacagc

SEQ ID NO: 1547117 - RNA, 15 nt, Human adenovirus B [HAdV-B]
ggccauuuuggaaga

SEQ ID NO: 1547118 - RNA, 15 nt, Human adenovirus B [HAdV-B]
gauagccccaauggc

SEQ ID NO: 1547119 - RNA, 11 nt, Human adenovirus B [HAdV-B]
gauuuggaaga

SEQ ID NO: 1547120 - RNA, 17 nt, Human adenovirus B [HAdV-B]
cuacccaacauccuguc

SEQ ID NO: 1547121 - RNA, 23 nt, Human adenovirus B [HAdV-B]
cgaugcccuacucaaucugggac

SEQ ID NO: 1547122 - RNA, 22 nt, Human adenovirus B [HAdV-B]
cugggaugggaucccgaaacca

SEQ ID NO: 1547123 - RNA, 18 nt, Human adenovirus B [HAdV-B]
gcaccacacuucugcccc

SEQ ID NO: 1547124 - RNA, 13 nt, Human adenovirus B [HAdV-B]
caguguaacauga

SEQ ID NO: 1547125 - RNA, 13 nt, Human adenovirus B [HAdV-B]
ggagggcagaaac

SEQ ID NO: 1547126 - RNA, 21 nt, Human adenovirus B [HAdV-B]
aauuugccaaaaaaacauuca

SEQ ID NO: 1547127 - RNA, 19 nt, Human adenovirus B [HAdV-B]
guagucaauauagaaauua

SEQ ID NO: 1547128 - RNA, 14 nt, Human adenovirus B [HAdV-B]
cacgcgcacaucca

SEQ ID NO: 1547129 - RNA, 16 nt, Human adenovirus B [HAdV-B]
gcuuccuuggaagagg

SEQ ID NO: 1547130 - RNA, 20 nt, Human adenovirus B [HAdV-B]
ccagcgugaugccaaccugg

SEQ ID NO: 1547131 - RNA, 14 nt, Human adenovirus B [HAdV-B]
gcgcugcagagcca

SEQ ID NO: 1547132 - RNA, 22 nt, Human adenovirus B [HAdV-B]
gaaagcaucauauugcuugaaa

SEQ ID NO: 1547133 - RNA, 21 nt, Human adenovirus B [HAdV-B]
cuggaugguaccuucuaccug

SEQ ID NO: 1547134 - RNA, 23 nt, Human adenovirus B [HAdV-B]
guugagcgccucggcugcguggc

SEQ ID NO: 1547135 - RNA, 18 nt, Human adenovirus B [HAdV-B]
uacccaguugaaaaccac

SEQ ID NO: 1547136 - RNA, 22 nt, Human adenovirus B [HAdV-B]
gagaccugcuaccaaugaauua

SEQ ID NO: 1547137 - RNA, 22 nt, Human adenovirus B [HAdV-B]
aguuacccuugguuugaugcau

SEQ ID NO: 1547138 - RNA, 22 nt, Human adenovirus B [HAdV-B]
gaugaaaccuucucaguugcau

SEQ ID NO: 1547139 - RNA, 17 nt, Human adenovirus B [HAdV-B]
aaaacaacggagcagcc

SEQ ID NO: 1547140 - RNA, 19 nt, Human adenovirus B [HAdV-B]
gcaccuuugaauugcaagg

SEQ ID NO: 1547141 - RNA, 19 nt, Human adenovirus B [HAdV-B]
acauaucagccagaaccuc

SEQ ID NO: 1547142 - RNA, 13 nt, Human adenovirus B [HAdV-B]
augaacaaugcca

SEQ ID NO: 1547143 - RNA, 23 nt, Human adenovirus B [HAdV-B]
cgcguggggcgaagagccaugcu

SEQ ID NO: 1547144 - RNA, 18 nt, Human adenovirus B [HAdV-B]
agauaugugcagcagagc

SEQ ID NO: 1547145 - RNA, 19 nt, Human adenovirus B [HAdV-B]
ugcaguagguacaacacau

SEQ ID NO: 1547146 - RNA, 22 nt, Human adenovirus B [HAdV-B]
ggaacagcaguacaggacaggc

SEQ ID NO: 1547147 - RNA, 21 nt, Human adenovirus B [HAdV-B]
cggguuaaaaaggacaaaaaa

SEQ ID NO: 1547148 - RNA, 22 nt, Human adenovirus B [HAdV-B]
aucagccauggcuuaccagaca

SEQ ID NO: 1547149 - RNA, 18 nt, Human adenovirus B [HAdV-B]
ggcggcgcugcagagcca

SEQ ID NO: 1547150 - RNA, 18 nt, Human adenovirus B [HAdV-B]
gacgguaaaucugagcca

SEQ ID NO: 1547151 - RNA, 17 nt, Human adenovirus B [HAdV-B]
ucaggagccgaaaucuu

SEQ ID NO: 1547152 - RNA, 19 nt, Human adenovirus B [HAdV-B]
cuucuccggaucuccuggg

SEQ ID NO: 1547153 - RNA, 22 nt, Human adenovirus B [HAdV-B]
ucuuaaaccggucacuuugcag

SEQ ID NO: 1547154 - RNA, 20 nt, Human adenovirus B [HAdV-B]
aacugacgccgccgguccca

SEQ ID NO: 1547155 - RNA, 18 nt, Human adenovirus B [HAdV-B]
caaacccaacacacaccc

SEQ ID NO: 1547156 - RNA, 14 nt, Human adenovirus B [HAdV-B]
aaaagaagaggaag

SEQ ID NO: 1547157 - RNA, 11 nt, Human adenovirus B [HAdV-B]
uacaaaaccau

SEQ ID NO: 1547158 - RNA, 21 nt, Human adenovirus B [HAdV-B]
aaaacugguuagcugcacagc

SEQ ID NO: 1547159 - RNA, 19 nt, Human adenovirus B [HAdV-B]
gucucacgcuugccagcac

SEQ ID NO: 1547160 - RNA, 12 nt, Human adenovirus B [HAdV-B]
cgaucugagaaa

SEQ ID NO: 1547161 - RNA, 14 nt, Human adenovirus B [HAdV-B]
gggaugaaguuucu

SEQ ID NO: 1547162 - RNA, 17 nt, Human adenovirus B [HAdV-B]
gcuccgccaguccaccu

SEQ ID NO: 1547163 - RNA, 23 nt, Human adenovirus B [HAdV-B]
gaugcuggaaauagggaucagaa

SEQ ID NO: 1547164 - RNA, 22 nt, Human adenovirus B [HAdV-B]
uccaacaaccguggucauuucu

SEQ ID NO: 1547165 - RNA, 20 nt, Human adenovirus B [HAdV-B]
aguaagaaagaacaaaaagc

SEQ ID NO: 1547166 - RNA, 22 nt, Human adenovirus B [HAdV-B]
gccaccucguucaucauuuccc

SEQ ID NO: 1547167 - RNA, 11 nt, Human adenovirus B [HAdV-B]
ugcagcagcag

SEQ ID NO: 1547168 - RNA, 12 nt, Human adenovirus B [HAdV-B]
cugggaccuggu

SEQ ID NO: 1547169 - RNA, 17 nt, Human adenovirus B [HAdV-B]
cucgaagggguucauug

SEQ ID NO: 1547170 - RNA, 16 nt, Human adenovirus B [HAdV-B]
uagccccaauggccac

SEQ ID NO: 1547171 - RNA, 22 nt, Human adenovirus B [HAdV-B]
acugcccaaaacaacgagcaga

SEQ ID NO: 1547172 - RNA, 21 nt, Human adenovirus B [HAdV-B]
gcaguuggggauacuuaugau

SEQ ID NO: 1547173 - RNA, 20 nt, Human adenovirus B [HAdV-B]
ccgucgcuuccgaccuggca

SEQ ID NO: 1547174 - RNA, 14 nt, Human adenovirus B [HAdV-B]
gcgugccaggcacu

SEQ ID NO: 1547175 - RNA, 15 nt, Human adenovirus B [HAdV-B]
gaccacgguggugca

SEQ ID NO: 1547176 - RNA, 18 nt, Human adenovirus B [HAdV-B]
cggcaacugccgucuucu

SEQ ID NO: 1547177 - RNA, 20 nt, Human adenovirus B [HAdV-B]
agccguagacgccagcgcca

SEQ ID NO: 1547178 - RNA, 17 nt, Human adenovirus B [HAdV-B]
cuagcauaaguucaucg

SEQ ID NO: 1547179 - RNA, 16 nt, Human adenovirus B [HAdV-B]
auucuuaacagugcag

SEQ ID NO: 1547180 - RNA, 18 nt, Human adenovirus B [HAdV-B]
acugaagugcccaucagu

SEQ ID NO: 1547181 - RNA, 17 nt, Human adenovirus B [HAdV-B]
uguugggacgcggaaug

SEQ ID NO: 1547182 - RNA, 15 nt, Human adenovirus B [HAdV-B]
cuggcggcuccaccc

SEQ ID NO: 1547183 - RNA, 22 nt, Human adenovirus B [HAdV-B]
gacuauaaacaagaauuugaaa

SEQ ID NO: 1547184 - RNA, 21 nt, Human adenovirus B [HAdV-B]
ccugcugcuucucccaggcuc

SEQ ID NO: 1547185 - RNA, 17 nt, Human adenovirus B [HAdV-B]
cuaccuugacccccaga

SEQ ID NO: 1547186 - RNA, 19 nt, Human adenovirus B [HAdV-B]
ucgccacgagugccaucac

SEQ ID NO: 1547187 - RNA, 19 nt, Human adenovirus B [HAdV-B]
ugaugcagcagcagcaggc

SEQ ID NO: 1547188 - RNA, 22 nt, Human adenovirus B [HAdV-B]
accuuccggaaccacacugcca

SEQ ID NO: 1547189 - RNA, 15 nt, Human adenovirus B [HAdV-B]
ccucaaaacuccacu

SEQ ID NO: 1547190 - RNA, 20 nt, Human adenovirus B [HAdV-B]
cuagagagagaggaugaaaa

SEQ ID NO: 1547191 - RNA, 21 nt, Human adenovirus B [HAdV-B]
auggugggucuuugaaaaaug

SEQ ID NO: 1547192 - RNA, 17 nt, Human adenovirus B [HAdV-B]
uccgguauccugcccgc

SEQ ID NO: 1547193 - RNA, 17 nt, Human adenovirus B [HAdV-B]
ugagcugggaugggugc

SEQ ID NO: 1547194 - RNA, 20 nt, Human adenovirus B [HAdV-B]
gauugggacagucaggcaga

SEQ ID NO: 1547195 - RNA, 16 nt, Human adenovirus B [HAdV-B]
caccccggauugcaug

SEQ ID NO: 1547196 - RNA, 15 nt, Human adenovirus B [HAdV-B]
caagacaagccacag

SEQ ID NO: 1547197 - RNA, 20 nt, Human adenovirus B [HAdV-B]
gcugcaaagcuccaagcagg

SEQ ID NO: 1547198 - RNA, 17 nt, Human adenovirus B [HAdV-B]
accugaaguaaauggaa

SEQ ID NO: 1547199 - RNA, 15 nt, Human adenovirus B [HAdV-B]
ccaccuccacugaag

SEQ ID NO: 1547200 - RNA, 15 nt, Human adenovirus B [HAdV-B]
cggcgugccucugac

SEQ ID NO: 1547201 - RNA, 19 nt, Human adenovirus B [HAdV-B]
ucuaaggccauuugccauu

SEQ ID NO: 1547202 - RNA, 23 nt, Human adenovirus B [HAdV-B]
guucgaaccaccgucgaugaugu

SEQ ID NO: 1547203 - RNA, 16 nt, Human adenovirus B [HAdV-B]
caagcaaaccgacucc

SEQ ID NO: 1547204 - RNA, 19 nt, Human adenovirus B [HAdV-B]
acuuagaagauacugagca

SEQ ID NO: 1547205 - RNA, 16 nt, Human adenovirus B [HAdV-B]
gcagaagcuaaggcaa

SEQ ID NO: 1547206 - RNA, 23 nt, Human adenovirus B [HAdV-B]
cccacugaaaguauggaagugca

SEQ ID NO: 1547207 - RNA, 13 nt, Human adenovirus B [HAdV-B]
aaccaagcaaugc

SEQ ID NO: 1547208 - RNA, 18 nt, Human adenovirus B [HAdV-B]
cuuaagguucuguggaca

SEQ ID NO: 1547209 - RNA, 21 nt, Human adenovirus B [HAdV-B]
uggaaaucccaccccuagucu

SEQ ID NO: 1547210 - RNA, 13 nt, Human adenovirus B [HAdV-B]
aaugaggcuuuca

SEQ ID NO: 1547211 - RNA, 17 nt, Human adenovirus B [HAdV-B]
ggcggaugacuggcaga

SEQ ID NO: 1547212 - RNA, 15 nt, Human adenovirus B [HAdV-B]
gaggaugugagcgga

SEQ ID NO: 1547213 - RNA, 18 nt, Human adenovirus B [HAdV-B]
ugggacagucaggcagag

SEQ ID NO: 1547214 - RNA, 17 nt, Human adenovirus B [HAdV-B]
cgcaaguccccuuucag

SEQ ID NO: 1547215 - RNA, 20 nt, Human adenovirus B [HAdV-B]
ggcgccuucaauuggagcag

SEQ ID NO: 1547216 - RNA, 23 nt, Human adenovirus B [HAdV-B]
cuguacuucuccaucagcagaca

SEQ ID NO: 1547217 - RNA, 16 nt, Human adenovirus B [HAdV-B]
cuguagacgaucuggc

SEQ ID NO: 1547218 - RNA, 13 nt, Human adenovirus B [HAdV-B]
ugauugccacaga

SEQ ID NO: 1547219 - RNA, 14 nt, Human adenovirus B [HAdV-B]
uguuucaagcagga

SEQ ID NO: 1547220 - RNA, 20 nt, Human adenovirus B [HAdV-B]
aucacugguuaccgaggaag

SEQ ID NO: 1547221 - RNA, 15 nt, Human adenovirus B [HAdV-B]
cacaacgcacagccu

SEQ ID NO: 1547222 - RNA, 13 nt, Human adenovirus B [HAdV-B]
aagccaugcugcg

SEQ ID NO: 1547223 - RNA, 13 nt, Human adenovirus B [HAdV-B]
uaaacaagaauuu

SEQ ID NO: 1547224 - RNA, 14 nt, Human adenovirus B [HAdV-B]
ugcuacgaagagcu

SEQ ID NO: 1547225 - RNA, 13 nt, Human adenovirus B [HAdV-B]
gacuuaugcucag

SEQ ID NO: 1547226 - RNA, 17 nt, Human adenovirus B [HAdV-B]
uggggccgugggcagcg

SEQ ID NO: 1547227 - RNA, 19 nt, Human adenovirus B [HAdV-B]
uagaagcugcuacagcugc

SEQ ID NO: 1547228 - RNA, 17 nt, Human adenovirus B [HAdV-B]
ucaugaccagcaugaaa

SEQ ID NO: 1547229 - RNA, 15 nt, Human adenovirus B [HAdV-B]
ugccgcugccuccuu

SEQ ID NO: 1547230 - RNA, 17 nt, Human adenovirus B [HAdV-B]
aggguugcauucacugc

SEQ ID NO: 1547231 - RNA, 19 nt, Human adenovirus B [HAdV-B]
gcaacgaauuuucucccag

SEQ ID NO: 1547232 - RNA, 12 nt, Human adenovirus B [HAdV-B]
agcauguggaau

SEQ ID NO: 1547233 - RNA, 12 nt, Human adenovirus B [HAdV-B]
aauuccagucuc

SEQ ID NO: 1547234 - RNA, 17 nt, Human adenovirus B [HAdV-B]
guccugccaccaccucu

SEQ ID NO: 1547235 - RNA, 20 nt, Human adenovirus B [HAdV-B]
gcagcuccuuuagccagagg

SEQ ID NO: 1547236 - RNA, 15 nt, Human adenovirus B [HAdV-B]
caugacagacagagg

SEQ ID NO: 1547237 - RNA, 18 nt, Human adenovirus B [HAdV-B]
ucuugcuucuugcaaaua

SEQ ID NO: 1547238 - RNA, 20 nt, Human adenovirus B [HAdV-B]
gcccaaucgcgaagaggcaa

SEQ ID NO: 1547239 - RNA, 23 nt, Human adenovirus B [HAdV-B]
uagaugggauccucaaagaugcc

SEQ ID NO: 1547240 - RNA, 12 nt, Human adenovirus B [HAdV-B]
gcauacuuucuc

SEQ ID NO: 1547241 - RNA, 22 nt, Human adenovirus B [HAdV-B]
gaaaacugcacacuuacuuuug

SEQ ID NO: 1547242 - RNA, 16 nt, Human adenovirus B [HAdV-B]
gcucauggacaaacag

SEQ ID NO: 1547243 - RNA, 15 nt, Human adenovirus B [HAdV-B]
cuccggaucuccugg

SEQ ID NO: 1547244 - RNA, 15 nt, Human adenovirus B [HAdV-B]
cuucgcggcuggcca

SEQ ID NO: 1547245 - RNA, 20 nt, Human adenovirus B [HAdV-B]
cguacgagagcgugaugcag

SEQ ID NO: 1547246 - RNA, 22 nt, Human adenovirus B [HAdV-B]
gccccccgggaacaagagcagg

SEQ ID NO: 1547247 - RNA, 14 nt, Human adenovirus B [HAdV-B]
gacucuuaaagagu

SEQ ID NO: 1547248 - RNA, 14 nt, Human adenovirus B [HAdV-B]
caggagcggagccu

SEQ ID NO: 1547249 - RNA, 17 nt, Human adenovirus B [HAdV-B]
ucaaccccagcugccua

SEQ ID NO: 1547250 - RNA, 20 nt, Human adenovirus B [HAdV-B]
ugccagcgguucuggaggag

SEQ ID NO: 1547251 - RNA, 23 nt, Human adenovirus B [HAdV-B]
ccaacgguuuuuugaaagaaaac

SEQ ID NO: 1547252 - RNA, 19 nt, Human adenovirus B [HAdV-B]
gggucuaccuugaccccca

SEQ ID NO: 1547253 - RNA, 13 nt, Human adenovirus B [HAdV-B]
gcugcacagcacc

SEQ ID NO: 1547254 - RNA, 18 nt, Human adenovirus B [HAdV-B]
ggccugcgucaucaccca

SEQ ID NO: 1547255 - RNA, 14 nt, Human adenovirus B [HAdV-B]
guccuuugccaaac

SEQ ID NO: 1547256 - RNA, 14 nt, Human adenovirus B [HAdV-B]
cuaacgcuggagag

SEQ ID NO: 1547257 - RNA, 18 nt, Human adenovirus B [HAdV-B]
agcagacagggcuugcag

SEQ ID NO: 1547258 - RNA, 22 nt, Human adenovirus B [HAdV-B]
guuugugcgcgaguuugcccca

SEQ ID NO: 1547259 - RNA, 21 nt, Human adenovirus B [HAdV-B]
cuucccauuuaacagaauaca

SEQ ID NO: 1547260 - RNA, 19 nt, Human adenovirus B [HAdV-B]
gaucuaccgccagugcugu

SEQ ID NO: 1547261 - RNA, 13 nt, Human adenovirus B [HAdV-B]
guuccugcucuca

SEQ ID NO: 1547262 - RNA, 15 nt, Human adenovirus B [HAdV-B]
cccuccaguggagga

SEQ ID NO: 1547263 - RNA, 16 nt, Human adenovirus B [HAdV-B]
gcugucaaccugcccc

SEQ ID NO: 1547264 - RNA, 18 nt, Human adenovirus B [HAdV-B]
caggucccgcaggcaagc

SEQ ID NO: 1547265 - RNA, 17 nt, Human adenovirus B [HAdV-B]
uucucuagaaacuuuua

SEQ ID NO: 1547266 - RNA, 15 nt, Human adenovirus B [HAdV-B]
agaccugcuaccaau

SEQ ID NO: 1547267 - RNA, 18 nt, Human adenovirus B [HAdV-B]
cuacaucuacuguggaug

SEQ ID NO: 1547268 - RNA, 13 nt, Human adenovirus B [HAdV-B]
ccuuuagacagca

SEQ ID NO: 1547269 - RNA, 20 nt, Human adenovirus B [HAdV-B]
aguuauuagaugcugcauga

SEQ ID NO: 1547270 - RNA, 17 nt, Human adenovirus B [HAdV-B]
acuaucagaaugaccac

SEQ ID NO: 1547271 - RNA, 13 nt, Human adenovirus B [HAdV-B]
cgcuugccagggu

SEQ ID NO: 1547272 - RNA, 22 nt, Human adenovirus B [HAdV-B]
acguggaacucaccaaccuggu

SEQ ID NO: 1547273 - RNA, 22 nt, Human adenovirus B [HAdV-B]
aggauucggccgaugauagcag

SEQ ID NO: 1547274 - RNA, 14 nt, Human adenovirus B [HAdV-B]
caaacccacaagca

SEQ ID NO: 1547275 - RNA, 17 nt, Human adenovirus B [HAdV-B]
ccgacugcagcacugga

SEQ ID NO: 1547276 - RNA, 16 nt, Human adenovirus B [HAdV-B]
acagucaggcagagga

SEQ ID NO: 1547277 - RNA, 13 nt, Human adenovirus B [HAdV-B]
ugagcugggaugg

SEQ ID NO: 1547278 - RNA, 17 nt, Human adenovirus B [HAdV-B]
cccuacggaagccagca

SEQ ID NO: 1547279 - RNA, 11 nt, Human adenovirus B [HAdV-B]
uaauuggaagg

SEQ ID NO: 1547280 - RNA, 17 nt, Human adenovirus B [HAdV-B]
ucacaagacaagccaca

SEQ ID NO: 1547281 - RNA, 23 nt, Human adenovirus B [HAdV-B]
gccuacaucuacuguggaugcag

SEQ ID NO: 1547282 - RNA, 22 nt, Human adenovirus B [HAdV-B]
ggcccuggcagaacacacucuu

SEQ ID NO: 1547283 - RNA, 15 nt, Human adenovirus B [HAdV-B]
cgaugucgucacagg

SEQ ID NO: 1547284 - RNA, 18 nt, Human adenovirus B [HAdV-B]
uggucauuucuugcuugc

SEQ ID NO: 1547285 - RNA, 20 nt, Human adenovirus B [HAdV-B]
cuagaucugaguuggcuuua

SEQ ID NO: 1547286 - RNA, 14 nt, Human adenovirus B [HAdV-B]
gaugagacaguguc

SEQ ID NO: 1547287 - RNA, 16 nt, Human adenovirus B [HAdV-B]
caaggccccagcagcc

SEQ ID NO: 1547288 - RNA, 14 nt, Human adenovirus B [HAdV-B]
ugaccccgggacug

SEQ ID NO: 1547289 - RNA, 14 nt, Human adenovirus B [HAdV-B]
cgcucuaaucccac

SEQ ID NO: 1547290 - RNA, 18 nt, Human adenovirus B [HAdV-B]
ucccgacgaaaguacggu

SEQ ID NO: 1547291 - RNA, 18 nt, Human adenovirus B [HAdV-B]
aagaucaacuucagcgca

SEQ ID NO: 1547292 - RNA, 17 nt, Human adenovirus B [HAdV-B]
gccaugcauugaaguga

SEQ ID NO: 1547293 - RNA, 13 nt, Human adenovirus B [HAdV-B]
guacugaugcuag

SEQ ID NO: 1547294 - RNA, 16 nt, Human adenovirus B [HAdV-B]
cauccuaaaaaacaag

SEQ ID NO: 1547295 - RNA, 17 nt, Human adenovirus B [HAdV-B]
caagcucuuacagaaau

SEQ ID NO: 1547296 - RNA, 12 nt, Human adenovirus B [HAdV-B]
cgcuugccuucu

SEQ ID NO: 1547297 - RNA, 20 nt, Human adenovirus B [HAdV-B]
gccaccuccacugaagugca

SEQ ID NO: 1547298 - RNA, 21 nt, Human adenovirus B [HAdV-B]
gucaugggugcuaccgcggcu

SEQ ID NO: 1547299 - RNA, 17 nt, Human adenovirus B [HAdV-B]
cggcaggucccgcaggc

SEQ ID NO: 1547300 - RNA, 18 nt, Human adenovirus B [HAdV-B]
ccuacuacgccugcugcu

SEQ ID NO: 1547301 - RNA, 16 nt, Human adenovirus B [HAdV-B]
ucgaaggcgggcauga

SEQ ID NO: 1547302 - RNA, 16 nt, Human adenovirus B [HAdV-B]
ucaauucaaacaacau

SEQ ID NO: 1547303 - RNA, 21 nt, Human adenovirus B [HAdV-B]
ccuuggcuccgcgacacggca

SEQ ID NO: 1547304 - RNA, 14 nt, Human adenovirus B [HAdV-B]
gcuauacuaccaau

SEQ ID NO: 1547305 - RNA, 14 nt, Human adenovirus B [HAdV-B]
aaugcacaugauca

SEQ ID NO: 1547306 - RNA, 16 nt, Human adenovirus B [HAdV-B]
agaaugacccgcaggc

SEQ ID NO: 1547307 - RNA, 13 nt, Human adenovirus B [HAdV-B]
guuuggaggagga

SEQ ID NO: 1547308 - RNA, 21 nt, Human adenovirus B [HAdV-B]
ccuagucuacccuuuucucua

SEQ ID NO: 1547309 - RNA, 20 nt, Human adenovirus B [HAdV-B]
cagacgguaaaucugagcca

SEQ ID NO: 1547310 - RNA, 14 nt, Human adenovirus B [HAdV-B]
uuuuccaacuuaua

SEQ ID NO: 1547311 - RNA, 13 nt, Human adenovirus B [HAdV-B]
gauugccacagcu

SEQ ID NO: 1547312 - RNA, 12 nt, Human adenovirus B [HAdV-B]
ggaggaggaaca

SEQ ID NO: 1547313 - RNA, 15 nt, Human adenovirus B [HAdV-B]
ccacaacgcacagcc

SEQ ID NO: 1547314 - RNA, 22 nt, Human adenovirus B [HAdV-B]
gcguugguggagaacaaagcua

SEQ ID NO: 1547315 - RNA, 15 nt, Human adenovirus B [HAdV-B]
gggcggcgcugcaga

SEQ ID NO: 1547316 - RNA, 15 nt, Human adenovirus B [HAdV-B]
acagucaggcagagg

SEQ ID NO: 1547317 - RNA, 14 nt, Human adenovirus B [HAdV-B]
gagacgagccuggg

SEQ ID NO: 1547318 - RNA, 17 nt, Human adenovirus B [HAdV-B]
acugaccaucgccucuc

SEQ ID NO: 1547319 - RNA, 19 nt, Human adenovirus B [HAdV-B]
uggauguagaugccuauga

SEQ ID NO: 1547320 - RNA, 17 nt, Human adenovirus B [HAdV-B]
gccacgagugccaucac

SEQ ID NO: 1547321 - RNA, 15 nt, Human adenovirus B [HAdV-B]
cugucgguagaagaa

SEQ ID NO: 1547322 - RNA, 22 nt, Human adenovirus B [HAdV-B]
agcaacgcauucugauuucacu

SEQ ID NO: 1547323 - RNA, 22 nt, Human adenovirus B [HAdV-B]
gcaaauacaaggaagaaaugcu

SEQ ID NO: 1547324 - RNA, 17 nt, Human adenovirus B [HAdV-B]
gauuucugugggacgac

SEQ ID NO: 1547325 - RNA, 16 nt, Human adenovirus B [HAdV-B]
cuguauaggagcauuu

SEQ ID NO: 1547326 - RNA, 12 nt, Human adenovirus B [HAdV-B]
aucacccagcaa

SEQ ID NO: 1547327 - RNA, 16 nt, Human adenovirus B [HAdV-B]
guugauuuaaaaucaa

SEQ ID NO: 1547328 - RNA, 18 nt, Human adenovirus B [HAdV-B]
aaguccccuuucagaaga

SEQ ID NO: 1547329 - RNA, 14 nt, Human adenovirus B [HAdV-B]
aaaaucaauucaca

SEQ ID NO: 1547330 - RNA, 18 nt, Human adenovirus B [HAdV-B]
ccgagcuaccacugccau

SEQ ID NO: 1547331 - RNA, 16 nt, Human adenovirus B [HAdV-B]
gaaaucuugaaaucac

SEQ ID NO: 1547332 - RNA, 19 nt, Human adenovirus B [HAdV-B]
cauuaagauucccacugaa

SEQ ID NO: 1547333 - RNA, 13 nt, Human adenovirus B [HAdV-B]
ugugcagcagagc

SEQ ID NO: 1547334 - RNA, 20 nt, Human adenovirus B [HAdV-B]
caaggccccagcagccaagg

SEQ ID NO: 1547335 - RNA, 11 nt, Human adenovirus B [HAdV-B]
acacagcagcg

SEQ ID NO: 1547336 - RNA, 21 nt, Human adenovirus B [HAdV-B]
cuuaagcauuccaccgcccag

SEQ ID NO: 1547337 - RNA, 13 nt, Human adenovirus B [HAdV-B]
cugcacagcaccc

SEQ ID NO: 1547338 - RNA, 16 nt, Human adenovirus B [HAdV-B]
gucucuguugaaauuu

SEQ ID NO: 1547339 - RNA, 15 nt, Human adenovirus B [HAdV-B]
agcucagagccauug

SEQ ID NO: 1547340 - RNA, 16 nt, Human adenovirus B [HAdV-B]
uacauuccagaaggau

SEQ ID NO: 1547341 - RNA, 16 nt, Human adenovirus B [HAdV-B]
cuucaacaaguacugc

SEQ ID NO: 1547342 - RNA, 21 nt, Human adenovirus B [HAdV-B]
agcgcuccagccaaaacucau

SEQ ID NO: 1547343 - RNA, 23 nt, Human adenovirus B [HAdV-B]
ugccccacggcgacgcgugcaau

SEQ ID NO: 1547344 - RNA, 21 nt, Human adenovirus B [HAdV-B]
caucaccgaacccgaggggag

SEQ ID NO: 1547345 - RNA, 20 nt, Human adenovirus B [HAdV-B]
ugucggccaaguagcaguuu

SEQ ID NO: 1547346 - RNA, 17 nt, Human adenovirus B [HAdV-B]
guucuggaggaggaaca

SEQ ID NO: 1547347 - RNA, 23 nt, Human adenovirus B [HAdV-B]
acagcauuguggagaacauggaa

SEQ ID NO: 1547348 - RNA, 12 nt, Human adenovirus B [HAdV-B]
ucuggggucuug

SEQ ID NO: 1547349 - RNA, 22 nt, Human adenovirus B [HAdV-B]
cugccaccaccucuacccuaga

SEQ ID NO: 1547350 - RNA, 21 nt, Human
agggacaggaccccagcucug

SEQ ID NO: 1547351 - RNA, 13 nt, Human
agcaucuaucaga

SEQ ID NO: 1547352 - RNA, 19 nt, Human
accacgggcccggguuggg

SEQ ID NO: 1547353 - RNA, 15 nt, Human
aagagucgcugugcc

SEQ ID NO: 1547354 - RNA, 22 nt, Human
aagagucgcugugccacaggcu

SEQ ID NO: 1547355 - RNA, 17 nt, Human
gccggccaguggccuuc

SEQ ID NO: 1547356 - RNA, 16 nt, Human
gccaccccgagggcug

SEQ ID NO: 1547357 - RNA, 23 nt, Human
gccaccccgagggcugagccugg

SEQ ID NO: 1547358 - RNA, 17 nt, Human
gccaccccgagggcuga

SEQ ID NO: 1547359 - RNA, 12 nt, Human
ggaccccagcuc

SEQ ID NO: 1547360 - RNA, 15 nt, Human
ggaccccagcucugc

SEQ ID NO: 1547361 - RNA, 13 nt, Human
ggaccccagcucu

SEQ ID NO: 1547362 - RNA, 17 nt, Human
aaaagcuggauuuucuu

SEQ ID NO: 1547363 - RNA, 18 nt, Human
gaccucgugccaccccga

SEQ ID NO: 1547364 - RNA, 20 nt, Human
gagggcugagccugguccca

SEQ ID NO: 1547365 - RNA, 20 nt, Human
cuuauuagaaaaauauuaua

SEQ ID NO: 1547366 - RNA, 14 nt, Human
cuggaugauauuuu

SEQ ID NO: 1547367 - RNA, 16 nt, Human
cuggaugcccaggaau

SEQ ID NO: 1547368 - RNA, 13 nt, Human
cuggaugcccagg

SEQ ID NO: 1547369 - RNA, 14 nt, Human
cuggaugcccagga

SEQ ID NO: 1547370 - RNA, 15 nt, Human
cuggaugcccaggaa

SEQ ID NO: 1547371 - RNA, 11 nt, Human
cuggugcccug

SEQ ID NO: 1547372 - RNA, 12 nt, Human
cugcagccugca

SEQ ID NO: 1547373 - RNA, 14 nt, Human
cugcagccugcagg

SEQ ID NO: 1547374 - RNA, 19 nt, Human
cugcagccugcaggaccuc

SEQ ID NO: 1547375 - RNA, 15 nt, Human
cugcagccugcagga

SEQ ID NO: 1547376 - RNA, 14 nt, Human
cauuuguuguuuga

SEQ ID NO: 1547377 - RNA, 17 nt, Human
caggaccucgugccacc

SEQ ID NO: 1547378 - RNA, 12 nt, Human
caggaccccagc

SEQ ID NO: 1547379 - RNA, 13 nt, Human
caggaccccagcu

SEQ ID NO: 1547380 - RNA, 14 nt, Human
caggaccccagcuc

SEQ ID NO: 1547381 - RNA, 15 nt, Human
caggaccccagcucu

SEQ ID NO: 1547382 - RNA, 18 nt, Human
ccagacuugggaggaugu

SEQ ID NO: 1547383 - RNA, 15 nt, Human
ccagaucaaggaugu

SEQ ID NO: 1547384 - RNA, 15 nt, Human
ccagacggggcugga

SEQ ID NO: 1547385 - RNA, 23 nt, Human
cccagcaugcaccacgggcccgg

SEQ ID NO: 1547386 - RNA, 19 nt, Human
cccagcaugcaccacgggc

SEQ ID NO: 1547387 - RNA, 15 nt, Human
cccuggaugcccagg

SEQ ID NO: 1547388 - RNA, 16 nt, Human
cccuggaugcccagga

SEQ ID NO: 1547389 - RNA, 13 nt, Human
cccugacagggcc

SEQ ID NO: 1547390 - RNA, 16 nt, Human
cccugacagggccagu

SEQ ID NO: 1547391 - RNA, 14 nt, Human
cuaagucauucaua

SEQ ID NO: 1547392 - RNA, 12 nt, Human
ccuuccccagca

SEQ ID NO: 1547393 - RNA, 13 nt, Human
ccuuccccagcau

SEQ ID NO: 1547394 - RNA, 21 nt, Human
cucgugccaccccgagggcug

SEQ ID NO: 1547395 - RNA, 18 nt, Human
uuuuccaaucauuugacu

SEQ ID NO: 1547396 - RNA, 21 nt, Human
uuugacacuuauagauugaaa

SEQ ID NO: 1547397 - RNA, 16 nt, Human
auuauaacucauuugu

SEQ ID NO: 1547398 - RNA, 13 nt, Human
auuauaaaguuuu

SEQ ID NO: 1547399 - RNA, 16 nt, Human
auuauaaaguuuucua

SEQ ID NO: 1547400 - RNA, 12 nt, Human
uuuuugauauau

SEQ ID NO: 1547401 - RNA, 23 nt, Human
uuuaggauguguauuucauuuau

SEQ ID NO: 1547402 - RNA, 20 nt, Human
uuuacuucuaagucauucau

SEQ ID NO: 1547403 - RNA, 12 nt, Human
ugugccacaggc

SEQ ID NO: 1547404 - RNA, 16 nt, Human
ugugccacaggcuuag

SEQ ID NO: 1547405 - RNA, 19 nt, Human
agucucaugccuugagauc

SEQ ID NO: 1547406 - RNA, 21 nt, Human
agucucaugccuugagaucug

SEQ ID NO: 1547407 - RNA, 14 nt, Human
uguaguaucucaua

SEQ ID NO: 1547408 - RNA, 19 nt, Human
uggugcccuggaugcccag

SEQ ID NO: 1547409 - RNA, 18 nt, Human
aggugauauuuuucuuau

SEQ ID NO: 1547410 - RNA, 22 nt, Human
aggggugcggcggucccagcuc

SEQ ID NO: 1547411 - RNA, 20 nt, Human
aggggugcggcggucccagc

SEQ ID NO: 1547412 - RNA, 21 nt, Human
aggggugcggcggucccagcu

SEQ ID NO: 1547413 - RNA, 23 nt, Human
aggggugcggcggucccagcucc

SEQ ID NO: 1547414 - RNA, 14 nt, Human
uggggccaugccuc

SEQ ID NO: 1547415 - RNA, 19 nt, Human
uggggccaugccuccucag

SEQ ID NO: 1547416 - RNA, 21 nt, Human
uggggccaugccuccucagga

SEQ ID NO: 1547417 - RNA, 20 nt, Human
uggggccaugccuccucagg

SEQ ID NO: 1547418 - RNA, 13 nt, Human
agggaggcagggg

SEQ ID NO: 1547419 - RNA, 21 nt, Human
uggagugugaggguccugcag

SEQ ID NO: 1547420 - RNA, 16 nt, Human
aggagccgaagcccag

SEQ ID NO: 1547421 - RNA, 18 nt, Human
aggagccgaagcccaggg

SEQ ID NO: 1547422 - RNA, 15 nt, Human
agagucuccauuuaa

SEQ ID NO: 1547423 - RNA, 20 nt, Human
acuugaauaaccaucugaaa

SEQ ID NO: 1547424 - RNA, 19 nt, Human
acuugaauaaccaucugaa

SEQ ID NO: 1547425 - RNA, 15 nt, Human
acuuauagauugaaa

SEQ ID NO: 1547426 - RNA, 13 nt, Human
ucgguccuggugc

SEQ ID NO: 1547427 - RNA, 16 nt, Human
ucgguccuggugcccu

SEQ ID NO: 1547428 - RNA, 20 nt, Human
acgggcccggguugggucac

SEQ ID NO: 1547429 - RNA, 21 nt, Human
acgggcccggguugggucacc

SEQ ID NO: 1547430 - RNA, 16 nt, Human
acgggcccggguuggg

SEQ ID NO: 1547431 - RNA, 17 nt, Human
acgggcccggguugggu

SEQ ID NO: 1547432 - RNA, 19 nt, Human
accucgugccaccccgagg

SEQ ID NO: 1547433 - RNA, 23 nt, Human
accucgugccaccccgagggcug

SEQ ID NO: 1547434 - RNA, 18 nt, Human
acaguugcuguuguguga

SEQ ID NO: 1547435 - RNA, 14 nt, Human
accagacggggcug

SEQ ID NO: 1547436 - RNA, 15 nt, Human
accagacggggcugg

SEQ ID NO: 1547437 - RNA, 21 nt, Human
accagacggggcuggagugug

SEQ ID NO: 1547438 - RNA, 16 nt, Human
accagacggggcugga

SEQ ID NO: 1547439 - RNA, 12 nt, Human
accauuauuuuu

SEQ ID NO: 1547440 - RNA, 18 nt, Human
uaguuuugugaaggugau

SEQ ID NO: 1547441 - RNA, 22 nt, Human
gugccguguccccugacagggc

SEQ ID NO: 1547442 - RNA, 23 nt, Human
gugccguguccccugacagggcc

SEQ ID NO: 1547443 - RNA, 16 nt, Human
aacauuugcugucagc

SEQ ID NO: 1547444 - RNA, 17 nt, Human
caccagacggggcugga

SEQ ID NO: 1547445 - RNA, 16 nt, Human
caccagacggggcugg

SEQ ID NO: 1547446 - RNA, 14 nt, Human
uuugauauaugaaa

SEQ ID NO: 1547447 - RNA, 22 nt, Human
uuccccagcaugcaccacgggc

SEQ ID NO: 1547448 - RNA, 17 nt, Human
ugugaggguccugcagc

SEQ ID NO: 1547449 - RNA, 23 nt, Human
uguggggccaugccuccucagga

SEQ ID NO: 1547450 - RNA, 15 nt, Human
uguuguuuuuggaug

SEQ ID NO: 1547451 - RNA, 14 nt, Human
uguguaguuccagc

SEQ ID NO: 1547452 - RNA, 19 nt, Human
uggaugauauuuuuuauca

SEQ ID NO: 1547453 - RNA, 14 nt, Human
uggaugcccaggaa

SEQ ID NO: 1547454 - RNA, 13 nt, Human
uggaugcccagga

SEQ ID NO: 1547455 - RNA, 17 nt, Human
ugccaccccgagggcug

SEQ ID NO: 1547456 - RNA, 18 nt, Human
ugccaccccgagggcuga

SEQ ID NO: 1547457 - RNA, 12 nt, Human
uccuggugcccu

SEQ ID NO: 1547458 - RNA, 13 nt, Human
uccuggugcccug

SEQ ID NO: 1547459 - RNA, 22 nt, Human
uccuggugcccuggaugcccag

SEQ ID NO: 1547460 - RNA, 14 nt, Human
guuuucuaaauuua

SEQ ID NO: 1547461 - RNA, 16 nt, Human
uaagagguugauuaua

SEQ ID NO: 1547462 - RNA, 16 nt, Human
uacagaaauauccaug

SEQ ID NO: 1547463 - RNA, 18 nt, Human
uacuugaauaaccaucug

SEQ ID NO: 1547464 - RNA, 20 nt, Human
uacuugaauaaccaucugaa

SEQ ID NO: 1547465 - RNA, 22 nt, Human
ggggugcggcggucccagcucc

SEQ ID NO: 1547466 - RNA, 20 nt, Human
ggggugcggcggucccagcu

SEQ ID NO: 1547467 - RNA, 21 nt, Human
gggugcggcggucccagcucc

SEQ ID NO: 1547468 - RNA, 19 nt, Human
ggucaccagacggggcugg

SEQ ID NO: 1547469 - RNA, 11 nt, Human
ggcugagccug

SEQ ID NO: 1547470 - RNA, 22 nt, Human
ggagccgaagcccaggggccgg

SEQ ID NO: 1547471 - RNA, 15 nt, Human
ggagccgaagcccag

SEQ ID NO: 1547472 - RNA, 17 nt, Human
ggagccgaagcccaggg

SEQ ID NO: 1547473 - RNA, 19 nt, Human
ggagccgaagcccaggggc

SEQ ID NO: 1547474 - RNA, 17 nt, Human
gccgggcaggguguggg

SEQ ID NO: 1547475 - RNA, 13 nt, Human
gccugcaggaccu

SEQ ID NO: 1547476 - RNA, 17 nt, Human
gccugcaggaccucgug

SEQ ID NO: 1547477 - RNA, 18 nt, Human
gccugcaggaccucgugc

SEQ ID NO: 1547478 - RNA, 23 nt, Human
gccugcaggaccucgugccaccc

SEQ ID NO: 1547479 - RNA, 13 nt, Human
gcggucccagcuc

SEQ ID NO: 1547480 - RNA, 14 nt, Human
gcggucccagcucc

SEQ ID NO: 1547481 - RNA, 18 nt, Human
gcggucccagcucccugg

SEQ ID NO: 1547482 - RNA, 22 nt, Human
gcggucccagcucccuggcucc

SEQ ID NO: 1547483 - RNA, 15 nt, Human
gcaggaccucgugcc

SEQ ID NO: 1547484 - RNA, 16 nt, Human
gcagccugcaggaccu

SEQ ID NO: 1547485 - RNA, 13 nt, Human
gcagccugcagga

SEQ ID NO: 1547486 - RNA, 15 nt, Human
gcaccacgggcccgg

SEQ ID NO: 1547487 - RNA, 14 nt, Human
gcaugcaccacggg

SEQ ID NO: 1547488 - RNA, 15 nt, Human
gcaugcaccacgggc

SEQ ID NO: 1547489 - RNA, 19 nt, Human
gcaagcucuuuuauaugcu

SEQ ID NO: 1547490 - RNA, 16 nt, Human
gaagcccaggggccgg

SEQ ID NO: 1547491 - RNA, 19 nt, Human
gaauaaucaaauacauuuu

SEQ ID NO: 1547492 - RNA, 16 nt, Human
gaaggugauuuauucu

SEQ ID NO: 1547493 - RNA, 18 nt, Human
gacagggccagugcaguu

SEQ ID NO: 1547494 - RNA, 24 nt, Human
cuuacuugcauaccaaguugauac

SEQ ID NO: 1547495 - RNA, 15 nt, Human
cgucgguccuggugc

SEQ ID NO: 1547496 - RNA, 21 nt, Human
cgggcaggguguggggccaug

SEQ ID NO: 1547497 - RNA, 16 nt, Human
ccugaagaacuauuuu

SEQ ID NO: 1547498 - RNA, 13 nt, Human
ccgagggcugagc

SEQ ID NO: 1547499 - RNA, 16 nt, Human
ccgagggcugagccug

SEQ ID NO: 1547500 - RNA, 22 nt, Human
ccgagggcugagccugguccca

SEQ ID NO: 1547501 - RNA, 18 nt, Human
ccccaggagggaggcagg

SEQ ID NO: 1547502 - RNA, 19 nt, Human
ccccaggagggaggcaggg

SEQ ID NO: 1547503 - RNA, 9 nt, Human
cccagcucc

SEQ ID NO: 1547504 - RNA, 16 nt, Human
cccaggugauauuuuu

SEQ ID NO: 1547505 - RNA, 12 nt, Human
cccaggggccgg

SEQ ID NO: 1547506 - RNA, 15 nt, Human
ccacaggcuuaggga

SEQ ID NO: 1547507 - RNA, 18 nt, Human
ccacaggcuuagggacag

SEQ ID NO: 1547508 - RNA, 19 nt, Human
ccacaggcuuagggacagg

SEQ ID NO: 1547509 - RNA, 21 nt, Human
ccacaggcuuagggacaggac

SEQ ID NO: 1547510 - RNA, 19 nt, Human
ggccaguggccuuccccag

SEQ ID NO: 1547511 - RNA, 22 nt, Human
ggccaguggccuuccccagcau

SEQ ID NO: 1547512 - RNA, 17 nt, Human
ggccaugccuccucagg

SEQ ID NO: 1547513 - RNA, 18 nt, Human
ggccaugccuccucagga

SEQ ID NO: 1547514 - RNA, 21 nt, Human
ggccaugccuccucaggagcc

SEQ ID NO: 1547515 - RNA, 14 nt, Human
gguccuggugcccu

SEQ ID NO: 1547516 - RNA, 24 nt, Human
gguccuggugcccuggaugcccag

SEQ ID NO: 1547517 - RNA, 12 nt, Human
gguccuggugcc

SEQ ID NO: 1547518 - RNA, 13 nt, Human
gguccuggugccc

SEQ ID NO: 1547519 - RNA, 13 nt, Human
gggccaugccucc

SEQ ID NO: 1547520 - RNA, 23 nt, Human
gggccaugccuccucaggagccg

SEQ ID NO: 1547521 - RNA, 22 nt, Human
gggccaugccuccucaggagcc

SEQ ID NO: 1547522 - RNA, 15 nt, Human
gggacaggaccccag

SEQ ID NO: 1547523 - RNA, 17 nt, Human
gggacaggaccccagcu

SEQ ID NO: 1547524 - RNA, 19 nt, Human
gggacaggaccccagcucu

SEQ ID NO: 1547525 - RNA, 21 nt, Human
gggacaggaccccagcucugc

SEQ ID NO: 1547526 - RNA, 22 nt, Human
gggacaggaccccagcucugcg

SEQ ID NO: 1547527 - RNA, 15 nt, Human
gcuggagugugaggg

SEQ ID NO: 1547528 - RNA, 21 nt, Human
gcuggagugugaggguccugc

SEQ ID NO: 1547529 - RNA, 13 nt, Human
gcugugccacagg

SEQ ID NO: 1547530 - RNA, 14 nt, Human
gcugugccacaggc

SEQ ID NO: 1547531 - RNA, 15 nt, Human
gcugugccacaggcu

SEQ ID NO: 1547532 - RNA, 20 nt, Human
gcugugccacaggcuuaggg

SEQ ID NO: 1547533 - RNA, 19 nt, Human
gcugugccacaggcuuagg

SEQ ID NO: 1547534 - RNA, 21 nt, Human
gccaguggccuuccccagcau

SEQ ID NO: 1547535 - RNA, 17 nt, Human
cuucuaagucauucaua

SEQ ID NO: 1547536 - RNA, 12 nt, Human
cagccugcagga

SEQ ID NO: 1547537 - RNA, 21 nt, Human
cagccugcaggaccucgugcc

SEQ ID NO: 1547538 - RNA, 22 nt, Human
ccaugucaagagucgcugugcc

SEQ ID NO: 1547539 - RNA, 19 nt, Human
ccugcagccugcaggaccu

SEQ ID NO: 1547540 - RNA, 17 nt, Human
ccugcaggaccucgugc

SEQ ID NO: 1547541 - RNA, 18 nt, Human
ccugcaggaccucgugcc

SEQ ID NO: 1547542 - RNA, 15 nt, Human
cggcggucccagcuc

SEQ ID NO: 1547543 - RNA, 16 nt, Human
cggcggucccagcucc

SEQ ID NO: 1547544 - RNA, 19 nt, Human
cggcggucccagcucccug

SEQ ID NO: 1547545 - RNA, 19 nt, Human
cucugcgucgguccuggug

SEQ ID NO: 1547546 - RNA, 20 nt, Human
cucugcgucgguccuggugc

SEQ ID NO: 1547547 - RNA, 21 nt, Human
cucugcgucgguccuggugcc

SEQ ID NO: 1547548 - RNA, 22 nt, Human
cucugcgucgguccuggugccc

SEQ ID NO: 1547549 - RNA, 17 nt, Human
cuccgccuuaccaggag

SEQ ID NO: 1547550 - RNA, 22 nt, Human
uuggaugguguuacauauuaua

SEQ ID NO: 1547551 - RNA, 14 nt, Human
auggccgggcaggg

SEQ ID NO: 1547552 - RNA, 16 nt, Human
uuuaagcaaguuaagu

SEQ ID NO: 1547553 - RNA, 17 nt, Human
uuuaagcaaguuaagug

SEQ ID NO: 1547554 - RNA, 14 nt, Human
uuccuuuuuuugau

SEQ ID NO: 1547555 - RNA, 13 nt, Human
uugaaauuuccua

SEQ ID NO: 1547556 - RNA, 18 nt, Human
uuaguuuugugaagguga

SEQ ID NO: 1547557 - RNA, 20 nt, Human
auaguucccaggugauauuu

SEQ ID NO: 1547558 - RNA, 21 nt, Human
uuagggacaggaccccagcuc

SEQ ID NO: 1547559 - RNA, 22 nt, Human
uuagggacaggaccccagcucu

SEQ ID NO: 1547560 - RNA, 20 nt, Human
auaaucccuggaugauauuu

SEQ ID NO: 1547561 - RNA, 21 nt, Human
auaaucccuggaugauauuuu

SEQ ID NO: 1547562 - RNA, 16 nt, Human
auaaccaucugaaagu

SEQ ID NO: 1547563 - RNA, 16 nt, Human
uuacaggcacuaaagu

SEQ ID NO: 1547564 - RNA, 15 nt, Human
aguuagaacauuugc

SEQ ID NO: 1547565 - RNA, 17 nt, Human
ugucaagagucgcugug

SEQ ID NO: 1547566 - RNA, 19 nt, Human
ugucaagagucgcugugcc

SEQ ID NO: 1547567 - RNA, 22 nt, Human
aggguguggggccaugccuccu

SEQ ID NO: 1547568 - RNA, 23 nt, Human
aggguguggggccaugccuccuc

SEQ ID NO: 1547569 - RNA, 13 nt, Human
uggccuuccccag

SEQ ID NO: 1547570 - RNA, 23 nt, Human
uggccuuccccagcaugcaccac

SEQ ID NO: 1547571 - RNA, 15 nt, Human
uggccuuccccagca

SEQ ID NO: 1547572 - RNA, 18 nt, Human
ugcggcggucccagcucc

SEQ ID NO: 1547573 - RNA, 13 nt, Human
ugcggcgguccca

SEQ ID NO: 1547574 - RNA, 14 nt, Human
ugcggcggucccag

SEQ ID NO: 1547575 - RNA, 17 nt, Human
ugcggcggucccagcuc

SEQ ID NO: 1547576 - RNA, 22 nt, Human
agccuggucccacgagggugcc

SEQ ID NO: 1547577 - RNA, 18 nt, Human
ugcagccugcaggaccuc

SEQ ID NO: 1547578 - RNA, 17 nt, Human
ugcagccugcaggaccu

SEQ ID NO: 1547579 - RNA, 14 nt, Human
ugaguagucucaug

SEQ ID NO: 1547580 - RNA, 17 nt, Human
ugauauuuuuuaucaua

SEQ ID NO: 1547581 - RNA, 19 nt, Human
ugauauuuuuuaucauaaa

SEQ ID NO: 1547582 - RNA, 17 nt, Human
ugaucaaacaugucucu

SEQ ID NO: 1547583 - RNA, 17 nt, Human
agccacauauugagaug

SEQ ID NO: 1547584 - RNA, 20 nt, Human
ugaccccaggagggaggcag

SEQ ID NO: 1547585 - RNA, 22 nt, Human
ugaccccaggagggaggcaggg

SEQ ID NO: 1547586 - RNA, 12 nt, Human
agauuuuguugg

SEQ ID NO: 1547587 - RNA, 20 nt, Human
ugaaaaagcuggauuuucuu

SEQ ID NO: 1547588 - RNA, 17 nt, Human
agaauaaucaaauacau

SEQ ID NO: 1547589 - RNA, 20 nt, Human
agaaauuacuaauuuuacuu

SEQ ID NO: 1547590 - RNA, 20 nt, Human
acuugaucauuuuuaccauu

SEQ ID NO: 1547591 - RNA, 16 nt, Human
ucgcugugccacaggc

SEQ ID NO: 1547592 - RNA, 11 nt, Human
accccagcucu

SEQ ID NO: 1547593 - RNA, 12 nt, Human
uccccugacagg

SEQ ID NO: 1547594 - RNA, 15 nt, Human
uccccugacagggcc

SEQ ID NO: 1547595 - RNA, 14 nt, Human
acgagggugccgug

SEQ ID NO: 1547596 - RNA, 17 nt, Human
uagaaacauguaauccu

SEQ ID NO: 1547597 - RNA, 15 nt, Human
uauaacucauuuguu

SEQ ID NO: 1547598 - RNA, 20 nt, Human
aauuacuuacguauguuugu

SEQ ID NO: 1547599 - RNA, 18 nt, Human
uaccauuauuuuuaggau

SEQ ID NO: 1547600 - RNA, 15 nt, Human
aagcccaggggccgg

SEQ ID NO: 1547601 - RNA, 22 nt, Human
guggggccaugccuccucagga

SEQ ID NO: 1547602 - RNA, 21 nt, Human
guggggccaugccuccucagg

SEQ ID NO: 1547603 - RNA, 17 nt, Human
guggccuuccccagcau

SEQ ID NO: 1547604 - RNA, 18 nt, Human
guggccuuccccagcaug

SEQ ID NO: 1547605 - RNA, 21 nt, Human
guggccuuccccagcaugcac

SEQ ID NO: 1547606 - RNA, 19 nt, Human
guggccuuccccagcaugc

SEQ ID NO: 1547607 - RNA, 14 nt, Human
guguauuucauuua

SEQ ID NO: 1547608 - RNA, 23 nt, Human
guguggggccaugccuccucagg

SEQ ID NO: 1547609 - RNA, 11 nt, Human
aaauuguguua

SEQ ID NO: 1547610 - RNA, 24 nt, Human
gugaggguccugcagccugcagga

SEQ ID NO: 1547611 - RNA, 23 nt, Human
gugaggguccugcagccugcagg

SEQ ID NO: 1547612 - RNA, 14 nt, Human
gugaggguccugca

SEQ ID NO: 1547613 - RNA, 15 nt, Human
gugaggguccugcag

SEQ ID NO: 1547614 - RNA, 18 nt, Human
gugccaccccgagggcug

SEQ ID NO: 1547615 - RNA, 22 nt, Human
accaucugaaagugguacuuga

SEQ ID NO: 1547616 - RNA, 17 nt, Human
acagggccagugcaguu

SEQ ID NO: 1547617 - RNA, 21 nt, Human
aacuuacuugcauaccaaguu

SEQ ID NO: 1547618 - RNA, 23 nt, Human
aggcuuagggacaggaccccagc

SEQ ID NO: 1547619 - RNA, 16 nt, Human
aggguccugcagccug

SEQ ID NO: 1547620 - RNA, 17 nt, Human
aggguccugcagccugc

SEQ ID NO: 1547621 - RNA, 19 nt, Human
aggguccugcagccugcag

SEQ ID NO: 1547622 - RNA, 21 nt, Human
aggguccugcagccugcagga

SEQ ID NO: 1547623 - RNA, 13 nt, Human
agggacuuagcaa

SEQ ID NO: 1547624 - RNA, 18 nt, Human
aguggccuuccccagcau

SEQ ID NO: 1547625 - RNA, 17 nt, Human
aguggccuuccccagca

SEQ ID NO: 1547626 - RNA, 23 nt, Human
aguugauacuugaauaaccaucu

SEQ ID NO: 1547627 - RNA, 19 nt, Human
caagagucgcugugccaca

SEQ ID NO: 1547628 - RNA, 22 nt, Human
caagagucgcugugccacaggc

SEQ ID NO: 1547629 - RNA, 15 nt, Human
uuaagcaaguuaagu

SEQ ID NO: 1547630 - RNA, 21 nt, Human
uuaagagguugauuauaaagu

SEQ ID NO: 1547631 - RNA, 13 nt, Human
uuaaauauuuagu

SEQ ID NO: 1547632 - RNA, 21 nt, Human
uguccuccgccuuaccaggag

SEQ ID NO: 1547633 - RNA, 17 nt, Human
ugcuaaaggagcaucua

SEQ ID NO: 1547634 - RNA, 16 nt, Human
ugcgucgguccuggug

SEQ ID NO: 1547635 - RNA, 18 nt, Human
uccuccgccuuaccagga

SEQ ID NO: 1547636 - RNA, 18 nt, Human
ucccacgagggugccgug

SEQ ID NO: 1547637 - RNA, 18 nt, Human
uccagcaaaucaagcuga

SEQ ID NO: 1547638 - RNA, 20 nt, Human
uacagcuccuuugaaaacuc

SEQ ID NO: 1547639 - RNA, 14 nt, Human
uacagcuccuuuga

SEQ ID NO: 1547640 - RNA, 18 nt, Human
uaagucauucauaaaccu

SEQ ID NO: 1547641 - RNA, 22 nt, Human
uaagugguucuuugguuccagu

SEQ ID NO: 1547642 - RNA, 15 nt, Human
uaaaguuaguaaaga

SEQ ID NO: 1547643 - RNA, 21 nt, Human
uaaagaaaaguuuaccaucug

SEQ ID NO: 1547644 - RNA, 20 nt, Human
guuacauauuauauguucua

SEQ ID NO: 1547645 - RNA, 21 nt, Human
guguggggccaugccuccuca

SEQ ID NO: 1547646 - RNA, 18 nt, Human
guguccccugacagggcc

SEQ ID NO: 1547647 - RNA, 23 nt, Human
guguuacuagccucaaaauacau

SEQ ID NO: 1547648 - RNA, 18 nt, Human
guggugaccccaggaggg

SEQ ID NO: 1547649 - RNA, 16 nt, Human
guggugaccccaggag

SEQ ID NO: 1547650 - RNA, 14 nt, Human
gugguacuugauca

SEQ ID NO: 1547651 - RNA, 21 nt, Human
gugcaguuugguguguccucc

SEQ ID NO: 1547652 - RNA, 18 nt, Human
gugcggcggucccagcuc

SEQ ID NO: 1547653 - RNA, 19 nt, Human
gugcggcggucccagcucc

SEQ ID NO: 1547654 - RNA, 22 nt, Human
gugcggcggucccagcucccug

SEQ ID NO: 1547655 - RNA, 14 nt, Human
gugauauuuuucuu

SEQ ID NO: 1547656 - RNA, 15 nt, Human
gucgguccuggugcc

SEQ ID NO: 1547657 - RNA, 17 nt, Human
gucgguccuggugcccu

SEQ ID NO: 1547658 - RNA, 18 nt, Human
gucgguccuggugcccug

SEQ ID NO: 1547659 - RNA, 17 nt, Human
gucgcugugccacaggc

SEQ ID NO: 1547660 - RNA, 17 nt, Human
gucaccagacggggcug

SEQ ID NO: 1547661 - RNA, 16 nt, Human
gucaccagacggggcu

SEQ ID NO: 1547662 - RNA, 15 nt, Human
guauguuuguacuug

SEQ ID NO: 1547663 - RNA, 13 nt, Human
uuugaauaugaaa

SEQ ID NO: 1547664 - RNA, 13 nt, Human
uuuuuugauauau

SEQ ID NO: 1547665 - RNA, 15 nt, Human
uuuucuaaauuuauc

SEQ ID NO: 1547666 - RNA, 18 nt, Human
uuuuggaugguguuacau

SEQ ID NO: 1547667 - RNA, 15 nt, Human
gcgucgguccuggug

SEQ ID NO: 1547668 - RNA, 15 nt, Human
gccuccucaggagcc

SEQ ID NO: 1547669 - RNA, 12 nt, Human
gccuccucagga

SEQ ID NO: 1547670 - RNA, 13 nt, Human
gccgaagcccagg

SEQ ID NO: 1547671 - RNA, 18 nt, Human
gccguguccccugacagg

SEQ ID NO: 1547672 - RNA, 15 nt, Human
gccaugccuccucag

SEQ ID NO: 1547673 - RNA, 14 nt, Human
gagccgaagcccag

SEQ ID NO: 1547674 - RNA, 15 nt, Human
gagccgaagcccagg

SEQ ID NO: 1547675 - RNA, 12 nt, Human
gaccccagcucu

SEQ ID NO: 1547676 - RNA, 14 nt, Human
gaccccagcucugc

SEQ ID NO: 1547677 - RNA, 20 nt, Human
gacaugggugaacuuacuug

SEQ ID NO: 1547678 - RNA, 20 nt, Human
gaaauuacuaauuuuacuuc

SEQ ID NO: 1547679 - RNA, 20 nt, Human
gaaauuuccuaauuuauucu

SEQ ID NO: 1547680 - RNA, 19 nt, Human
gaaauuacuaauuuuacuu

SEQ ID NO: 1547681 - RNA, 14 nt, Human
cuggucccacgagg

SEQ ID NO: 1547682 - RNA, 17 nt, Human
cuggucccacgagggug

SEQ ID NO: 1547683 - RNA, 19 nt, Human
cuggucccacgagggugcc

SEQ ID NO: 1547684 - RNA, 12 nt, Human
cugagccugguc

SEQ ID NO: 1547685 - RNA, 17 nt, Human
cugacagggccagugca

SEQ ID NO: 1547686 - RNA, 12 nt, Human
cugacagggcca

SEQ ID NO: 1547687 - RNA, 15 nt, Human
cgugccaccccgagg

SEQ ID NO: 1547688 - RNA, 22 nt, Human
cgugccaccccgagggcugagc

SEQ ID NO: 1547689 - RNA, 19 nt, Human
cgugccaccccgagggcug

SEQ ID NO: 1547690 - RNA, 13 nt, Human
cgguccuggugcc

SEQ ID NO: 1547691 - RNA, 13 nt, Human
cggucccagcucc

SEQ ID NO: 1547692 - RNA, 12 nt, Human
cggucccagcuc

SEQ ID NO: 1547693 - RNA, 22 nt, Human
cggccaguggccuuccccagca

SEQ ID NO: 1547694 - RNA, 18 nt, Human
caguggccuuccccagca

SEQ ID NO: 1547695 - RNA, 17 nt, Human
caguggccuuccccagc

SEQ ID NO: 1547696 - RNA, 19 nt, Human
caguggccuuccccagcau

SEQ ID NO: 1547697 - RNA, 19 nt, Human
cauagaaaacacuacagug

SEQ ID NO: 1547698 - RNA, 15 nt, Human
caugccuccucagga

SEQ ID NO: 1547699 - RNA, 17 nt, Human
ccagugcuuuauguugu

SEQ ID NO: 1547700 - RNA, 22 nt, Human
ccagcucugcgucgguccuggu

SEQ ID NO: 1547701 - RNA, 11 nt, Human
cccagcucugc

SEQ ID NO: 1547702 - RNA, 12 nt, Human
cccagcucugcg

SEQ ID NO: 1547703 - RNA, 17 nt, Human
cccacgagggugccgug

SEQ ID NO: 1547704 - RNA, 16 nt, Human
ccaugccuccucagga

SEQ ID NO: 1547705 - RNA, 15 nt, Human
ccaugccuccucagg

SEQ ID NO: 1547706 - RNA, 22 nt, Human
ggccagugcaguuugguguguc

SEQ ID NO: 1547707 - RNA, 15 nt, Human
aaauauuauaacuca

SEQ ID NO: 1547708 - RNA, 15 nt, Human
gguccugcagccugc

SEQ ID NO: 1547709 - RNA, 16 nt, Human
gguccugcagccugca

SEQ ID NO: 1547710 - RNA, 16 nt, Human
ggggccggccaguggc

SEQ ID NO: 1547711 - RNA, 14 nt, Human
ggacaggaccccag

SEQ ID NO: 1547712 - RNA, 15 nt, Human
ggacaggaccccagc

SEQ ID NO: 1547713 - RNA, 16 nt, Human
ggacaggaccccagcu

SEQ ID NO: 1547714 - RNA, 17 nt, Human
ggacaggaccccagcuc

SEQ ID NO: 1547715 - RNA, 21 nt, Human
ggacaggaccccagcucugcg

SEQ ID NO: 1547716 - RNA, 18 nt, Human
ggacaggaccccagcucu

SEQ ID NO: 1547717 - RNA, 20 nt, Human
ggacaggaccccagcucugc

SEQ ID NO: 1547718 - RNA, 23 nt, Human
cuuagggacaggaccccagcucu

SEQ ID NO: 1547719 - RNA, 21 nt, Human
cuuagggacaggaccccagcu

SEQ ID NO: 1547720 - RNA, 22 nt, Human
cuuagggacaggaccccagcuc

SEQ ID NO: 1547721 - RNA, 18 nt, Human
cuuagggacaggacccca

SEQ ID NO: 1547722 - RNA, 20 nt, Human
cuuagggacaggaccccagc

SEQ ID NO: 1547723 - RNA, 19 nt, Human
cacaggcuuagggacagga

SEQ ID NO: 1547724 - RNA, 22 nt, Human
cacaggcuuagggacaggaccc

SEQ ID NO: 1547725 - RNA, 18 nt, Human
cacaggcuuagggacagg

SEQ ID NO: 1547726 - RNA, 14 nt, Human
caugcaccacgggc

SEQ ID NO: 1547727 - RNA, 19 nt, Human
caugucaagagucgcugug

SEQ ID NO: 1547728 - RNA, 21 nt, Human
caugucaagagucgcugugcc

SEQ ID NO: 1547729 - RNA, 16 nt, Human
ccacgagggugccgug

SEQ ID NO: 1547730 - RNA, 22 nt, Human
cagugcaguuugguguguccuc

SEQ ID NO: 1547731 - RNA, 16 nt, Human
caggguguggggccau

SEQ ID NO: 1547732 - RNA, 17 nt, Human
caggguguggggccaug

SEQ ID NO: 1547733 - RNA, 22 nt, Human
caggguguggggccaugccucc

SEQ ID NO: 1547734 - RNA, 15 nt, Human
caggagggaggcagg

SEQ ID NO: 1547735 - RNA, 21 nt, Human
caggagggaggcaggggaggg

SEQ ID NO: 1547736 - RNA, 18 nt, Human
caggaccccagcucugcg

SEQ ID NO: 1547737 - RNA, 16 nt, Human
caggaccccagcucug

SEQ ID NO: 1547738 - RNA, 17 nt, Human
caggaccccagcucugc

SEQ ID NO: 1547739 - RNA, 14 nt, Human
ccuggaugcccagg

SEQ ID NO: 1547740 - RNA, 15 nt, Human
ccgaagcccaggggc

SEQ ID NO: 1547741 - RNA, 16 nt, Human
ccgaagcccaggggcc

SEQ ID NO: 1547742 - RNA, 17 nt, Human
ccgaagcccaggggccg

SEQ ID NO: 1547743 - RNA, 16 nt, Human
ccccugacagggccag

SEQ ID NO: 1547744 - RNA, 19 nt, Human
ccccgagggcugagccugg

SEQ ID NO: 1547745 - RNA, 21 nt, Human
ccccgagggcugagccugguc

SEQ ID NO: 1547746 - RNA, 14 nt, Human
ccccgagggcugag

SEQ ID NO: 1547747 - RNA, 19 nt, Human
cguguccccugacagggcc

SEQ ID NO: 1547748 - RNA, 16 nt, Human
cguguccccugacagg

SEQ ID NO: 1547749 - RNA, 18 nt, Human
cguguccccugacagggc

SEQ ID NO: 1547750 - RNA, 22 nt, Human
auugguuuuccaaucauuugac

SEQ ID NO: 1547751 - RNA, 14 nt, Human
augguguuacauau

SEQ ID NO: 1547752 - RNA, 18 nt, Human
uuugugaaggugauuuau

SEQ ID NO: 1547753 - RNA, 19 nt, Human
auguagcgcuuugaauaug

SEQ ID NO: 1547754 - RNA, 21 nt, Human
auguagcgcuuugaauaugaa

SEQ ID NO: 1547755 - RNA, 13 nt, Human
augccuccucagg

SEQ ID NO: 1547756 - RNA, 15 nt, Human
augccuccucaggag

SEQ ID NO: 1547757 - RNA, 14 nt, Human
augccuccucagga

SEQ ID NO: 1547758 - RNA, 18 nt, Human
augccuccucaggagccg

SEQ ID NO: 1547759 - RNA, 16 nt, Human
auauuuuuuaucauaa

SEQ ID NO: 1547760 - RNA, 18 nt, Human
auccuaaauuuacccucu

SEQ ID NO: 1547761 - RNA, 13 nt, Human
uugauuauaaagu

SEQ ID NO: 1547762 - RNA, 22 nt, Human
uugacacuuauagauugaaauu

SEQ ID NO: 1547763 - RNA, 17 nt, Human
auaaucaaauacauuuu

SEQ ID NO: 1547764 - RNA, 19 nt, Human
auaacucauuuguuguuug

SEQ ID NO: 1547765 - RNA, 21 nt, Human
aguuuugugaaggugauuuau

SEQ ID NO: 1547766 - RNA, 12 nt, Human
aguuuaccaucu

SEQ ID NO: 1547767 - RNA, 16 nt, Human
aguuuaccaucugaaa

SEQ ID NO: 1547768 - RNA, 19 nt, Human
agugugaggguccugcagc

SEQ ID NO: 1547769 - RNA, 15 nt, Human
uguccccugacaggg

SEQ ID NO: 1547770 - RNA, 16 nt, Human
uguccccugacagggc

SEQ ID NO: 1547771 - RNA, 18 nt, Human
uguccccugacagggcca

SEQ ID NO: 1547772 - RNA, 18 nt, Human
agucgcugugccacaggc

SEQ ID NO: 1547773 - RNA, 16 nt, Human
agggcugagccugguc

SEQ ID NO: 1547774 - RNA, 17 nt, Human
agggcugagccuggucc

SEQ ID NO: 1547775 - RNA, 23 nt, Human
agcucugcgucgguccuggugcc

SEQ ID NO: 1547776 - RNA, 22 nt, Human
agcucugcgucgguccuggugc

SEQ ID NO: 1547777 - RNA, 21 nt, Human
ugcaguuugguguguccuccg

SEQ ID NO: 1547778 - RNA, 20 nt, Human
agccugcaggaccucgugcc

SEQ ID NO: 1547779 - RNA, 21 nt, Human
agccugcaggaccucgugcca

SEQ ID NO: 1547780 - RNA, 22 nt, Human
ucuggucuaaauuguguuacua

SEQ ID NO: 1547781 - RNA, 14 nt, Human
ugaauauaaucccu

SEQ ID NO: 1547782 - RNA, 15 nt, Human
agagucgcugugcca

SEQ ID NO: 1547783 - RNA, 19 nt, Human
agagucgcugugccacagg

SEQ ID NO: 1547784 - RNA, 14 nt, Human
agagucgcugugcc

SEQ ID NO: 1547785 - RNA, 23 nt, Human
ugaggguccugcagccugcagga

SEQ ID NO: 1547786 - RNA, 21 nt, Human
ugaggguccugcagccugcag

SEQ ID NO: 1547787 - RNA, 22 nt, Human
ugaggguccugcagccugcagg

SEQ ID NO: 1547788 - RNA, 14 nt, Human
ugaggguccugcag

SEQ ID NO: 1547789 - RNA, 15 nt, Human
ugaggguccugcagc

SEQ ID NO: 1547790 - RNA, 18 nt, Human
ugaggguccugcagccug

SEQ ID NO: 1547791 - RNA, 19 nt, Human
ugaggguccugcagccugc

SEQ ID NO: 1547792 - RNA, 11 nt, Human
ugagccugguc

SEQ ID NO: 1547793 - RNA, 13 nt, Human
uccugcagccugc

SEQ ID NO: 1547794 - RNA, 18 nt, Human
accgacguugccaucaaa

SEQ ID NO: 1547795 - RNA, 18 nt, Human
ucauuugacuaagagucu

SEQ ID NO: 1547796 - RNA, 13 nt, Human
uauuucauuuauu

SEQ ID NO: 1547797 - RNA, 16 nt, Human
uauggccgggcagggu

SEQ ID NO: 1547798 - RNA, 19 nt, Human
uauagauugaaauuuccua

SEQ ID NO: 1547799 - RNA, 17 nt, Human
aauuuaucaguaccuaa

SEQ ID NO: 1547800 - RNA, 19 nt, Human
aauuuacccucuugaauau

SEQ ID NO: 1547801 - RNA, 22 nt, Human
aauuuacccucuugaauauaau

SEQ ID NO: 1547802 - RNA, 14 nt, Human
guugggucaccaga

SEQ ID NO: 1547803 - RNA, 21 nt, Human
guugggucaccagacggggcu

SEQ ID NO: 1547804 - RNA, 12 nt, Human
aaggagcaucua

SEQ ID NO: 1547805 - RNA, 24 nt, Human
guuuuuggaugguguuacauauua

SEQ ID NO: 1547806 - RNA, 19 nt, Human
aaguuagaacauuugcugu

SEQ ID NO: 1547807 - RNA, 14 nt, Human
aaguuuaccaucug

SEQ ID NO: 1547808 - RNA, 17 nt, Human
gugugaggguccugcag

SEQ ID NO: 1547809 - RNA, 21 nt, Human
aagauguagcgcuuugaauau

SEQ ID NO: 1547810 - RNA, 16 nt, Human
aagaaaaguuuaccau

SEQ ID NO: 1547811 - RNA, 10 nt, Human
guccugcagc

SEQ ID NO: 1547812 - RNA, 18 nt, Human
guccugcagccugcagga

SEQ ID NO: 1547813 - RNA, 14 nt, Human
guccugcagccugc

SEQ ID NO: 1547814 - RNA, 19 nt, Human
aguggccuuccccagcaug

SEQ ID NO: 1547815 - RNA, 20 nt, Human
agggacaggaccccagcucu

SEQ ID NO: 1547816 - RNA, 17 nt, Human
agggacaggaccccagc

SEQ ID NO: 1547817 - RNA, 18 nt, Human
agggacaggaccccagcu

SEQ ID NO: 1547818 - RNA, 13 nt, Human
agggacaggaccc

SEQ ID NO: 1547819 - RNA, 16 nt, Human
agggacaggaccccag

SEQ ID NO: 1547820 - RNA, 22 nt, Human
aauauuauaacucauuuguugu

SEQ ID NO: 1547821 - RNA, 15 nt, Human
caccccgagggcuga

SEQ ID NO: 1547822 - RNA, 13 nt, Human
caaauacauuuua

SEQ ID NO: 1547823 - RNA, 18 nt, Human
uucuaagucauucauaaa

SEQ ID NO: 1547824 - RNA, 13 nt, Human
uuguuugguuaua

SEQ ID NO: 1547825 - RNA, 14 nt, Human
uuuaccaucugaaa

SEQ ID NO: 1547826 - RNA, 13 nt, Human
uuuaccaucugaa

SEQ ID NO: 1547827 - RNA, 21 nt, Human
uuuacccucuugaauauaauc

SEQ ID NO: 1547828 - RNA, 13 nt, Human
uuuccuaauuuau

SEQ ID NO: 1547829 - RNA, 16 nt, Human
uuauggccgggcaggg

SEQ ID NO: 1547830 - RNA, 20 nt, Human
uuauugguuuuccaaucauu

SEQ ID NO: 1547831 - RNA, 20 nt, Human
ugggucaccagacggggcug

SEQ ID NO: 1547832 - RNA, 21 nt, Human
ugggucaccagacggggcugg

SEQ ID NO: 1547833 - RNA, 19 nt, Human
ugggucaccagacggggcu

SEQ ID NO: 1547834 - RNA, 16 nt, Human
ugccuccucaggagcc

SEQ ID NO: 1547835 - RNA, 12 nt, Human
ugccuccucagg

SEQ ID NO: 1547836 - RNA, 13 nt, Human
ugccuccucagga

SEQ ID NO: 1547837 - RNA, 16 nt, Human
ucuaucagauuaaguu

SEQ ID NO: 1547838 - RNA, 19 nt, Human
uccgccuuaccaggagaag

SEQ ID NO: 1547839 - RNA, 21 nt, Human
uccccagcaugcaccacgggc

SEQ ID NO: 1547840 - RNA, 19 nt, Human
uccccagcaugcaccacgg

SEQ ID NO: 1547841 - RNA, 20 nt, Human
uccccagcaugcaccacggg

SEQ ID NO: 1547842 - RNA, 14 nt, Human
uauuauauguucua

SEQ ID NO: 1547843 - RNA, 17 nt, Human
uauuauauguucuagaa

SEQ ID NO: 1547844 - RNA, 15 nt, Human
ucaccagacggggcu

SEQ ID NO: 1547845 - RNA, 19 nt, Human
ucaccagacggggcuggag

SEQ ID NO: 1547846 - RNA, 19 nt, Human
gugcccuggaugcccagga

SEQ ID NO: 1547847 - RNA, 18 nt, Human
gugcccuggaugcccagg

SEQ ID NO: 1547848 - RNA, 15 nt, Human
gucccagcucccugg

SEQ ID NO: 1547849 - RNA, 11 nt, Human
guccuggugcc

SEQ ID NO: 1547850 - RNA, 12 nt, Human
guccuggugccc

SEQ ID NO: 1547851 - RNA, 20 nt, Human
guccuggugcccuggaugcc

SEQ ID NO: 1547852 - RNA, 23 nt, Human
guccuggugcccuggaugcccag

SEQ ID NO: 1547853 - RNA, 18 nt, Human
guccuccgccuuaccagg

SEQ ID NO: 1547854 - RNA, 11 nt, Human
gucccagcucc

SEQ ID NO: 1547855 - RNA, 19 nt, Human
ggggugcggcggucccagc

SEQ ID NO: 1547856 - RNA, 21 nt, Human
gggcccggguugggucaccag

SEQ ID NO: 1547857 - RNA, 22 nt, Human
gggcccggguugggucaccaga

SEQ ID NO: 1547858 - RNA, 15 nt, Human
gggcugagccugguc

SEQ ID NO: 1547859 - RNA, 23 nt, Human
gggcugagccuggucccacgagg

SEQ ID NO: 1547860 - RNA, 13 nt, Human
gggcugagccugg

SEQ ID NO: 1547861 - RNA, 20 nt, Human
ggucccagcucccuggcucc

SEQ ID NO: 1547862 - RNA, 12 nt, Human
ggucccagcucc

SEQ ID NO: 1547863 - RNA, 14 nt, Human
ggucccagcucccu

SEQ ID NO: 1547864 - RNA, 15 nt, Human
ggucccagcucccug

SEQ ID NO: 1547865 - RNA, 15 nt, Human
ggugcccuggaugcc

SEQ ID NO: 1547866 - RNA, 18 nt, Human
ggugcccuggaugcccag

SEQ ID NO: 1547867 - RNA, 19 nt, Human
ggugcccuggaugcccagg

SEQ ID NO: 1547868 - RNA, 20 nt, Human
ggugcccuggaugcccagga

SEQ ID NO: 1547869 - RNA, 19 nt, Human
ggugcggcggucccagcuc

SEQ ID NO: 1547870 - RNA, 21 nt, Human
gguuuuccaaucauuugacua

SEQ ID NO: 1547871 - RNA, 23 nt, Human
guacaguugcuguugugugauca

SEQ ID NO: 1547872 - RNA, 13 nt, Human
ggaccucgugcca

SEQ ID NO: 1547873 - RNA, 22 nt, Human
gcuuagggacaggaccccagcu

SEQ ID NO: 1547874 - RNA, 23 nt, Human
gcuuagggacaggaccccagcuc

SEQ ID NO: 1547875 - RNA, 21 nt, Human
gcucugcgucgguccuggugc

SEQ ID NO: 1547876 - RNA, 20 nt, Human
gcucugcgucgguccuggug

SEQ ID NO: 1547877 - RNA, 20 nt, Human
gcccuggaugcccaggaauc

SEQ ID NO: 1547878 - RNA, 13 nt, Human
gaggguccugcag

SEQ ID NO: 1547879 - RNA, 17 nt, Human
gaggguccugcagccug

SEQ ID NO: 1547880 - RNA, 21 nt, Human
gaggguccugcagccugcagg

SEQ ID NO: 1547881 - RNA, 18 nt, Human
gaggguccugcagccugc

SEQ ID NO: 1547882 - RNA, 23 nt, Human
gagggugccguguccccugacag

SEQ ID NO: 1547883 - RNA, 19 nt, Human
gaggggugcggcgguccca

SEQ ID NO: 1547884 - RNA, 22 nt, Human
gaggggugcggcggucccagcu

SEQ ID NO: 1547885 - RNA, 19 nt, Human
gacaggaccccagcucugc

SEQ ID NO: 1547886 - RNA, 14 nt, Human
gacaggaccccagc

SEQ ID NO: 1547887 - RNA, 15 nt, Human
gacaggaccccagcu

SEQ ID NO: 1547888 - RNA, 16 nt, Human
gacaggaccccagcuc

SEQ ID NO: 1547889 - RNA, 17 nt, Human
gacaggaccccagcucu

SEQ ID NO: 1547890 - RNA, 18 nt, Human
gacaggaccccagcucug

SEQ ID NO: 1547891 - RNA, 20 nt, Human
gacaggaccccagcucugcg

SEQ ID NO: 1547892 - RNA, 13 nt, Human
cugugccacaggc

SEQ ID NO: 1547893 - RNA, 22 nt, Human
cuguauauauuuauggccgggc

SEQ ID NO: 1547894 - RNA, 23 nt, Human
cucaggagccgaagcccaggggc

SEQ ID NO: 1547895 - RNA, 21 nt, Human
cucaggagccgaagcccaggg

SEQ ID NO: 1547896 - RNA, 14 nt, Human
cuaaauuuuaagug

SEQ ID NO: 1547897 - RNA, 11 nt, Human
cuaaaaacaua

SEQ ID NO: 1547898 - RNA, 15 nt, Human
cgcugugccacaggc

SEQ ID NO: 1547899 - RNA, 13 nt, Human
cggaauauauuuu

SEQ ID NO: 1547900 - RNA, 16 nt, Human
cgaagcccaggggccg

SEQ ID NO: 1547901 - RNA, 15 nt, Human
ccgggcagggugugg

SEQ ID NO: 1547902 - RNA, 23 nt, Human
ccagugcaguuugguguguccuc

SEQ ID NO: 1547903 - RNA, 17 nt, Human
ccaguggccuuccccag

SEQ ID NO: 1547904 - RNA, 19 nt, Human
ccaguggccuuccccagca

SEQ ID NO: 1547905 - RNA, 20 nt, Human
ggagugugaggguccugcag

SEQ ID NO: 1547906 - RNA, 11 nt, Human
aaaaaguuugu

SEQ ID NO: 1547907 - RNA, 18 nt, Human
aaaaaguuugucuuaguu

SEQ ID NO: 1547908 - RNA, 14 nt, Human
ggccuuccccagca

SEQ ID NO: 1547909 - RNA, 13 nt, Human
ggccuuccccagc

SEQ ID NO: 1547910 - RNA, 14 nt, Human
aaagugguacuuga

SEQ ID NO: 1547911 - RNA, 20 nt, Human
aaagugguacuugaucauuu

SEQ ID NO: 1547912 - RNA, 23 nt, Human
aaagugguacuugaucauuuuua

SEQ ID NO: 1547913 - RNA, 13 nt, Human
guaauccuaaauu

SEQ ID NO: 1547914 - RNA, 18 nt, Human
ggguccugcagccugcag

SEQ ID NO: 1547915 - RNA, 23 nt, Human
ggguccugcagccugcaggaccu

SEQ ID NO: 1547916 - RNA, 19 nt, Human
ggguccugcagccugcagg

SEQ ID NO: 1547917 - RNA, 14 nt, Human
ggggccaugccucc

SEQ ID NO: 1547918 - RNA, 17 nt, Human
ggggccaugccuccuca

SEQ ID NO: 1547919 - RNA, 19 nt, Human
ggggccaugccuccucagg

SEQ ID NO: 1547920 - RNA, 23 nt, Human
ggggccaugccuccucaggagcc

SEQ ID NO: 1547921 - RNA, 17 nt, Human
gggccggccaguggccu

SEQ ID NO: 1547922 - RNA, 14 nt, Human
gcggcggucccagc

SEQ ID NO: 1547923 - RNA, 16 nt, Human
gcggcggucccagcuc

SEQ ID NO: 1547924 - RNA, 17 nt, Human
gcggcggucccagcucc

SEQ ID NO: 1547925 - RNA, 16 nt, Human
gauacuugaauaacca

SEQ ID NO: 1547926 - RNA, 17 nt, Human
cuggugcccuggaugcc

SEQ ID NO: 1547927 - RNA, 20 nt, Human
cuggugcccuggaugcccag

SEQ ID NO: 1547928 - RNA, 21 nt, Human
cuggugcccuggaugcccagg

SEQ ID NO: 1547929 - RNA, 23 nt, Human
cuggagugugaggguccugcagc

SEQ ID NO: 1547930 - RNA, 20 nt, Human
cagaauaaucaaauacauuu

SEQ ID NO: 1547931 - RNA, 21 nt, Human
ccaggagggaggcaggggagg

SEQ ID NO: 1547932 - RNA, 19 nt, Human
ccaggggccggccaguggc

SEQ ID NO: 1547933 - RNA, 15 nt, Human
ccaggagggaggcag

SEQ ID NO: 1547934 - RNA, 22 nt, Human
ccaggagggaggcaggggaggg

SEQ ID NO: 1547935 - RNA, 21 nt, Human
ccucaggagccgaagcccagg

SEQ ID NO: 1547936 - RNA, 12 nt, Human
ccucaggagccg

SEQ ID NO: 1547937 - RNA, 19 nt, Human
ccucaggagccgaagccca

SEQ ID NO: 1547938 - RNA, 22 nt, Human
ccucaggagccgaagcccaggg

SEQ ID NO: 1547939 - RNA, 16 nt, Human
ccugcagccugcagga

SEQ ID NO: 1547940 - RNA, 17 nt, Human
cuaauuuauucuaaauu

SEQ ID NO: 1547941 - RNA, 21 nt, Human
uuuuguuugguuauaucgaaa

SEQ ID NO: 1547942 - RNA, 13 nt, Human
uuuuguuugguua

SEQ ID NO: 1547943 - RNA, 16 nt, Human
uuuuguuugguuauau

SEQ ID NO: 1547944 - RNA, 15 nt, Human
uuuugauauaugaaa

SEQ ID NO: 1547945 - RNA, 24 nt, Human
auuacuuacguauguuuguacuug

SEQ ID NO: 1547946 - RNA, 14 nt, Human
augaaaugacuucu

SEQ ID NO: 1547947 - RNA, 22 nt, Human
uuugaaaacucuguguuuggaa

SEQ ID NO: 1547948 - RNA, 23 nt, Human
auauauuuauggccgggcagggu

SEQ ID NO: 1547949 - RNA, 19 nt, Human
aucaauucuguauuccaga

SEQ ID NO: 1547950 - RNA, 13 nt, Human
agugguuuagaaa

SEQ ID NO: 1547951 - RNA, 16 nt, Human
aguuugguguguccuc

SEQ ID NO: 1547952 - RNA, 19 nt, Human
auaccaaguugauacuuga

SEQ ID NO: 1547953 - RNA, 22 nt, Human
auaaaccuugucuaugaaauga

SEQ ID NO: 1547954 - RNA, 24 nt, Human
agggugccguguccccugacaggg

SEQ ID NO: 1547955 - RNA, 15 nt, Human
agggugccguguccc

SEQ ID NO: 1547956 - RNA, 14 nt, Human
agccgaagcccagg

SEQ ID NO: 1547957 - RNA, 13 nt, Human
agcccaggggccg

SEQ ID NO: 1547958 - RNA, 12 nt, Human
uggccgggcagg

SEQ ID NO: 1547959 - RNA, 13 nt, Human
uggccgggcaggg

SEQ ID NO: 1547960 - RNA, 22 nt, Human
aggagggaggcaggggaggggu

SEQ ID NO: 1547961 - RNA, 16 nt, Human
ugacagggccagugca

SEQ ID NO: 1547962 - RNA, 19 nt, Human
ugacagggccagugcaguu

SEQ ID NO: 1547963 - RNA, 19 nt, Human
ugaaauuuccuaauuuauu

SEQ ID NO: 1547964 - RNA, 20 nt, Human
ucugcgucgguccuggugcc

SEQ ID NO: 1547965 - RNA, 17 nt, Human
uccugcagccugcagga

SEQ ID NO: 1547966 - RNA, 21 nt, Human
uccucaggagccgaagcccag

SEQ ID NO: 1547967 - RNA, 22 nt, Human
uccucaggagccgaagcccagg

SEQ ID NO: 1547968 - RNA, 15 nt, Human
acuaauuuuacuucu

SEQ ID NO: 1547969 - RNA, 10 nt, Human
ucccagcucc

SEQ ID NO: 1547970 - RNA, 21 nt, Human
uaagcaaguuaaguguccucc

SEQ ID NO: 1547971 - RNA, 21 nt, Human
aauuaguacagaaauauccau

SEQ ID NO: 1547972 - RNA, 12 nt, Human
acaggaccccag

SEQ ID NO: 1547973 - RNA, 13 nt, Human
acaggaccccagc

SEQ ID NO: 1547974 - RNA, 14 nt, Human
acaggaccccagcu

SEQ ID NO: 1547975 - RNA, 15 nt, Human
acaggaccccagcuc

SEQ ID NO: 1547976 - RNA, 16 nt, Human
acaggaccccagcucu

SEQ ID NO: 1547977 - RNA, 17 nt, Human
acaggaccccagcucug

SEQ ID NO: 1547978 - RNA, 19 nt, Human
acaggaccccagcucugcg

SEQ ID NO: 1547979 - RNA, 18 nt, Human
acaggaccccagcucugc

SEQ ID NO: 1547980 - RNA, 16 nt, Human
acaggcuuagggacag

SEQ ID NO: 1547981 - RNA, 15 nt, Human
uaguucccaggugau

SEQ ID NO: 1547982 - RNA, 19 nt, Human
uagggacaggaccccagcu

SEQ ID NO: 1547983 - RNA, 20 nt, Human
uagggacaggaccccagcuc

SEQ ID NO: 1547984 - RNA, 22 nt, Human
uagggacaggaccccagcucug

SEQ ID NO: 1547985 - RNA, 21 nt, Human
uagggacaggaccccagcucu

SEQ ID NO: 1547986 - RNA, 14 nt, Human
aagaaacaacagaa

SEQ ID NO: 1547987 - RNA, 14 nt, Human
guccccugacaggg

SEQ ID NO: 1547988 - RNA, 16 nt, Human
gucgcugugccacagg

SEQ ID NO: 1547989 - RNA, 13 nt, Human
aaaaauuuuuguu

SEQ ID NO: 1547990 - RNA, 14 nt, Human
aaaaauuuuuguuu

SEQ ID NO: 1547991 - RNA, 14 nt, Human
aggaccucgugcca

SEQ ID NO: 1547992 - RNA, 13 nt, Human
aggaccccagcuc

SEQ ID NO: 1547993 - RNA, 14 nt, Human
aggaccccagcucu

SEQ ID NO: 1547994 - RNA, 16 nt, Human
aggaccccagcucugc

SEQ ID NO: 1547995 - RNA, 17 nt, Human
aggaccccagcucugcg

SEQ ID NO: 1547996 - RNA, 15 nt, Human
agcaugcaccacggg

SEQ ID NO: 1547997 - RNA, 13 nt, Human
agacggggcugga

SEQ ID NO: 1547998 - RNA, 15 nt, Human
accccgagggcugag

SEQ ID NO: 1547999 - RNA, 21 nt, Human
uuauaucgaaauaguuacagg

SEQ ID NO: 1548000 - RNA, 23 nt, Human
uuauguuguuguuguuuuuggau

SEQ ID NO: 1548001 - RNA, 19 nt, Human
uuauuagaaaaauauuaua

SEQ ID NO: 1548002 - RNA, 17 nt, Human
ugccacaggcuuaggga

SEQ ID NO: 1548003 - RNA, 21 nt, Human
ugccacaggcuuagggacagg

SEQ ID NO: 1548004 - RNA, 20 nt, Human
ugccacaggcuuagggacag

SEQ ID NO: 1548005 - RNA, 21 nt, Human
ugccguguccccugacagggc

SEQ ID NO: 1548006 - RNA, 16 nt, Human
ugcccuggaugcccag

SEQ ID NO: 1548007 - RNA, 18 nt, Human
ugcccuggaugcccagga

SEQ ID NO: 1548008 - RNA, 22 nt, Human
ucgugccaccccgagggcugag

SEQ ID NO: 1548009 - RNA, 22 nt, Human
uauuccagacuugggaggaugu

SEQ ID NO: 1548010 - RNA, 23 nt, Human
ucaggagccgaagcccaggggcc

SEQ ID NO: 1548011 - RNA, 22 nt, Human
ggcuuagggacaggaccccagc

SEQ ID NO: 1548012 - RNA, 17 nt, Human
ggcucccaugucaagag

SEQ ID NO: 1548013 - RNA, 14 nt, Human
ggcggucccagcuc

SEQ ID NO: 1548014 - RNA, 15 nt, Human
ggcggucccagcucc

SEQ ID NO: 1548015 - RNA, 21 nt, Human
gccuggucccacgagggugcc

SEQ ID NO: 1548016 - RNA, 12 nt, Human
gcaggggagggg

SEQ ID NO: 1548017 - RNA, 17 nt, Human
gcacuaaaguuaguaaa

SEQ ID NO: 1548018 - RNA, 13 nt, Human
gagucgcugugcc

SEQ ID NO: 1548019 - RNA, 14 nt, Human
gauagacugcuaca

SEQ ID NO: 1548020 - RNA, 19 nt, Human
gagccuggucccacgaggg

SEQ ID NO: 1548021 - RNA, 23 nt, Human
gagccuggucccacgagggugcc

SEQ ID NO: 1548022 - RNA, 18 nt, Human
gaaccugaagaacuauuu

SEQ ID NO: 1548023 - RNA, 18 nt, Human
gaacuuacuugcauacca

SEQ ID NO: 1548024 - RNA, 16 nt, Human
gaaucuguauauauuu

SEQ ID NO: 1548025 - RNA, 18 nt, Human
cugcgucgguccuggugc

SEQ ID NO: 1548026 - RNA, 17 nt, Human
cugcgucgguccuggug

SEQ ID NO: 1548027 - RNA, 14 nt, Human
cugaagaacuauuu

SEQ ID NO: 1548028 - RNA, 12 nt, Human
cuccucaggagc

SEQ ID NO: 1548029 - RNA, 13 nt, Human
cuccucaggagcc

SEQ ID NO: 1548030 - RNA, 22 nt, Human
ccuggugcccuggaugcccagg

SEQ ID NO: 1548031 - RNA, 21 nt, Human
ccuggugcccuggaugcccag

SEQ ID NO: 1548032 - RNA, 12 nt, Human
ccuggugcccug

SEQ ID NO: 1548033 - RNA, 18 nt, Human
ccuggugcccuggaugcc

SEQ ID NO: 1548034 - RNA, 20 nt, Human
ccuggugcccuggaugccca

SEQ ID NO: 1548035 - RNA, 20 nt, Human
ccuggucccacgagggugcc

SEQ ID NO: 1548036 - RNA, 13 nt, Human
ccgccuuaccagg

SEQ ID NO: 1548037 - RNA, 17 nt, Human
ccguguccccugacagg

SEQ ID NO: 1548038 - RNA, 19 nt, Human
ccguguccccugacagggc

SEQ ID NO: 1548039 - RNA, 23 nt, Human
cccgagggcugagccugguccca

SEQ ID NO: 1548040 - RNA, 18 nt, Human
cccggguugggucaccag

SEQ ID NO: 1548041 - RNA, 17 nt, Human
ccaucugaaagugguac

SEQ ID NO: 1548042 - RNA, 18 nt, Human
ccauuauuuuuaggaugu

SEQ ID NO: 1548043 - RNA, 18 nt, Human
ccagcaugcaccacgggc

SEQ ID NO: 1548044 - RNA, 20 nt, Human
ccagcaugcaccacgggccc

SEQ ID NO: 1548045 - RNA, 23 nt, Human
ccaccccgagggcugagccuggu

SEQ ID NO: 1548046 - RNA, 19 nt, Human
cauucauaaaccuugucua

SEQ ID NO: 1548047 - RNA, 14 nt, Human
cauuuuuaccauua

SEQ ID NO: 1548048 - RNA, 17 nt, Human
caggggccggccagugg

SEQ ID NO: 1548049 - RNA, 22 nt, Human
caggggccggccaguggccuuc

SEQ ID NO: 1548050 - RNA, 13 nt, Human
caggggaggggug

SEQ ID NO: 1548051 - RNA, 16 nt, Human
cagggccagugcaguu

SEQ ID NO: 1548052 - RNA, 16 nt, Human
caggcuuagggacagg

SEQ ID NO: 1548053 - RNA, 17 nt, Human
caggcuuagggacagga

SEQ ID NO: 1548054 - RNA, 17 nt, Human
caggagccgaagcccag

SEQ ID NO: 1548055 - RNA, 18 nt, Human
caggagccgaagcccagg

SEQ ID NO: 1548056 - RNA, 21 nt, Human
caggagccgaagcccaggggc

SEQ ID NO: 1548057 - RNA, 19 nt, Human
caggagaagaaccugaaga

SEQ ID NO: 1548058 - RNA, 19 nt, Human
caggaaucuguauauauuu

SEQ ID NO: 1548059 - RNA, 18 nt, Human
caggaccucgugccaccc

SEQ ID NO: 1548060 - RNA, 17 nt, Human
cagcaugcaccacgggc

SEQ ID NO: 1548061 - RNA, 19 nt, Human
cagacggggcuggagugug

SEQ ID NO: 1548062 - RNA, 13 nt, Human
cagacggggcugg

SEQ ID NO: 1548063 - RNA, 14 nt, Human
auuucauguugggu

SEQ ID NO: 1548064 - RNA, 23 nt, Human
ggucaccagacggggcuggagug

SEQ ID NO: 1548065 - RNA, 13 nt, Human
ggugcccuggaug

SEQ ID NO: 1548066 - RNA, 14 nt, Human adenovirus C
cugaagcagggcca

SEQ ID NO: 1548067 - RNA, 20 nt, Human adenovirus C
gcaacccuuccaggagggcu

SEQ ID NO: 1548068 - RNA, 15 nt, Human adenovirus C
cccgagggccgcugg

SEQ ID NO: 1548069 - RNA, 16 nt, Human adenovirus C
ggaauuugagccccuc

SEQ ID NO: 1548070 - RNA, 17 nt, Human adenovirus C
uggccgcguccaucugg

SEQ ID NO: 1548071 - RNA, 14 nt, Human adenovirus C
ucuuugugguucuu

SEQ ID NO: 1548072 - RNA, 21 nt, Human adenovirus C
augguuaaccuacaccagugu

SEQ ID NO: 1548073 - RNA, 16 nt, Human adenovirus C
ccuacuccggcacugc

SEQ ID NO: 1548074 - RNA, 13 nt, Human adenovirus C
ucaaacccagcuu

SEQ ID NO: 1548075 - RNA, 21 nt, Human adenovirus C
gaguggcuguugaugugguga

SEQ ID NO: 1548076 - RNA, 13 nt, Human adenovirus C
acugccgccgcca

SEQ ID NO: 1548077 - RNA, 15 nt, Human adenovirus C
agggcaaccugggcu

SEQ ID NO: 1548078 - RNA, 16 nt, Human adenovirus C
accguagaugggacac

SEQ ID NO: 1548079 - RNA, 14 nt, Human adenovirus C
agcaaggccuggaa

SEQ ID NO: 1548080 - RNA, 13 nt, Human adenovirus C
cccucuuccuccc

SEQ ID NO: 1548081 - RNA, 18 nt, Human adenovirus C
gcuggagcugcccaagac

SEQ ID NO: 1548082 - RNA, 22 nt, Human adenovirus C
accacccgcccgcgccugcugg

SEQ ID NO: 1548083 - RNA, 15 nt, Human adenovirus C
aagacagaaacacag

SEQ ID NO: 1548084 - RNA, 19 nt, Human adenovirus C
cggaaacagggacgagccc

SEQ ID NO: 1548085 - RNA, 18 nt, Human adenovirus C
accaacgugcccaucucc

SEQ ID NO: 1548086 - RNA, 16 nt, Human adenovirus C
uggcaaugggcccacg

SEQ ID NO: 1548087 - RNA, 19 nt, Human adenovirus C
gaacuugcaggggcugugg

SEQ ID NO: 1548088 - RNA, 14 nt, Human adenovirus C
ccgcguccgcgcuc

SEQ ID NO: 1548089 - RNA, 14 nt, Human adenovirus C
ggugguuuuccaua

SEQ ID NO: 1548090 - RNA, 18 nt, Human adenovirus C
caaccgcgcccaggcggc

SEQ ID NO: 1548091 - RNA, 14 nt, Human adenovirus C
gcugccagggccgu

SEQ ID NO: 1548092 - RNA, 17 nt, Human adenovirus C
gugacuuggcacccacc

SEQ ID NO: 1548093 - RNA, 21 nt, Human adenovirus C
uggcgaucguaaacgcgcugg

SEQ ID NO: 1548094 - RNA, 13 nt, Human adenovirus C
acugggaguugcg

SEQ ID NO: 1548095 - RNA, 21 nt, Human adenovirus C
agcugccgucaucccugagca

SEQ ID NO: 1548096 - RNA, 19 nt, Human adenovirus C
caagcuacccacccagcgc

SEQ ID NO: 1548097 - RNA, 13 nt, Human adenovirus C
agcauuugaccau

SEQ ID NO: 1548098 - RNA, 14 nt, Human adenovirus C
agccggccuggacc

SEQ ID NO: 1548099 - RNA, 14 nt, Human adenovirus C
agcgcccccugcua

SEQ ID NO: 1548100 - RNA, 18 nt, Human adenovirus C
uugaucaaacccagcuuc

SEQ ID NO: 1548101 - RNA, 14 nt, Human adenovirus C
guaaacgcgcuggc

SEQ ID NO: 1548102 - RNA, 18 nt, Human adenovirus C
uauaccuuuuuaaugcau

SEQ ID NO: 1548103 - RNA, 14 nt, Human adenovirus C
guggcaacuggcaa

SEQ ID NO: 1548104 - RNA, 20 nt, Human adenovirus C
caggcuacuaagaaaacaca

SEQ ID NO: 1548105 - RNA, 23 nt, Human adenovirus C
agcaaugacagcaccuucaccca

SEQ ID NO: 1548106 - RNA, 19 nt, Human adenovirus C
cgcggcgugcuggacaggg

SEQ ID NO: 1548107 - RNA, 17 nt, Human adenovirus C
cgcuggccagcacgcuc

SEQ ID NO: 1548108 - RNA, 18 nt, Human adenovirus C
gcgaaggaggcaggaccc

SEQ ID NO: 1548109 - RNA, 18 nt, Human adenovirus C
ggacacgggcagccugga

SEQ ID NO: 1548110 - RNA, 17 nt, Human adenovirus C
agaacuauggcagcaag

SEQ ID NO: 1548111 - RNA, 23 nt, Human adenovirus C
guuucuggcggaggugcugcuga

SEQ ID NO: 1548112 - RNA, 18 nt, Human adenovirus C
gcccagcgauagcaguuc

SEQ ID NO: 1548113 - RNA, 20 nt, Human adenovirus C
ggaaagcuuccgcaggccaa

SEQ ID NO: 1548114 - RNA, 22 nt, Human adenovirus C
uaccuugagcgacgaccugggc

SEQ ID NO: 1548115 - RNA, 12 nt, Human adenovirus C
gcaggcagaacg

SEQ ID NO: 1548116 - RNA, 11 nt, Human adenovirus C
cggccccaccg

SEQ ID NO: 1548117 - RNA, 15 nt, Human adenovirus C
cugguguaccaggaa

SEQ ID NO: 1548118 - RNA, 13 nt, Human adenovirus C
ggcagcucgguga

SEQ ID NO: 1548119 - RNA, 18 nt, Human adenovirus C
ugcgcuuuuuggaacgcg

SEQ ID NO: 1548120 - RNA, 19 nt, Human adenovirus C
auggccggccacggccuga

SEQ ID NO: 1548121 - RNA, 11 nt, Human adenovirus C
ccucagcagcg

SEQ ID NO: 1548122 - RNA, 15 nt, Human adenovirus C
cgccgccgacccggc

SEQ ID NO: 1548123 - RNA, 19 nt, Human adenovirus C
ccgcucauggcgcagcugu

SEQ ID NO: 1548124 - RNA, 16 nt, Human adenovirus C
gagguccgcgugcggc

SEQ ID NO: 1548125 - RNA, 15 nt, Human adenovirus C
uucagagaagaacau

SEQ ID NO: 1548126 - RNA, 20 nt, Human adenovirus C
gcagucugcagcgcugccaa

SEQ ID NO: 1548127 - RNA, 13 nt, Human adenovirus C
aagucacugugga

SEQ ID NO: 1548128 - RNA, 15 nt, Human adenovirus C
gcggggugcugggau

SEQ ID NO: 1548129 - RNA, 20 nt, Human adenovirus C
uaccuaggucacuugcugac

SEQ ID NO: 1548130 - RNA, 19 nt, Human adenovirus C
ugaaugaccaguggagagg

SEQ ID NO: 1548131 - RNA, 18 nt, Human adenovirus C
ugacagguggagaugacu

SEQ ID NO: 1548132 - RNA, 13 nt, Human adenovirus C
aagccgacgcgcc

SEQ ID NO: 1548133 - RNA, 24 nt, Human adenovirus C
gacggcguaguuucgcaggcgcug

SEQ ID NO: 1548134 - RNA, 16 nt, Human adenovirus C
uaugcuaaaaugaaga

SEQ ID NO: 1548135 - RNA, 20 nt, Human adenovirus C
ggcaguggucuccucagcga

SEQ ID NO: 1548136 - RNA, 16 nt, Human adenovirus C
augccaaccuauggag

SEQ ID NO: 1548137 - RNA, 16 nt, Human adenovirus C
cuuccucccaacucug

SEQ ID NO: 1548138 - RNA, 13 nt, Human adenovirus C
acuauaacagagg

SEQ ID NO: 1548139 - RNA, 19 nt, Human adenovirus C
cuacaccuuucgccagggc

SEQ ID NO: 1548140 - RNA, 19 nt, Human adenovirus C
aacacaugucuaugcccag

SEQ ID NO: 1548141 - RNA, 22 nt, Human adenovirus C
gugggccgcggggguguccuug

SEQ ID NO: 1548142 - RNA, 19 nt, Human adenovirus C
cucuuccuuuuccucuugc

SEQ ID NO: 1548143 - RNA, 14 nt, Human adenovirus C
cugggucgucuuca

SEQ ID NO: 1548144 - RNA, 18 nt, Human adenovirus C
ggccaagaacaagagcug

SEQ ID NO: 1548145 - RNA, 21 nt, Human adenovirus C
acuggcaccuuuuguuccacc

SEQ ID NO: 1548146 - RNA, 18 nt, Human adenovirus C
cagcaucgcuacaaccuc

SEQ ID NO: 1548147 - RNA, 18 nt, Human adenovirus C
auuugucacccuuauccu

SEQ ID NO: 1548148 - RNA, 19 nt, Human adenovirus C
accacuaccggcaaccgcc

SEQ ID NO: 1548149 - RNA, 13 nt, Human adenovirus C
ccggcgccagcac

SEQ ID NO: 1548150 - RNA, 20 nt, Human adenovirus C
ggccauauuuuuugggcacc

SEQ ID NO: 1548151 - RNA, 22 nt, Human adenovirus C
gaugccgccaacgcgccuacca

SEQ ID NO: 1548152 - RNA, 20 nt, Human adenovirus C
cugugccuuuuacugcugcu

SEQ ID NO: 1548153 - RNA, 23 nt, Human adenovirus C
ugagcuccacaggucacgggcca

SEQ ID NO: 1548154 - RNA, 19 nt, Human adenovirus C
gaagaucuggaaggugcug

SEQ ID NO: 1548155 - RNA, 13 nt, Human adenovirus C
uccuccuggagau

SEQ ID NO: 1548156 - RNA, 17 nt, Human adenovirus C
caucaucgucacaaagg

SEQ ID NO: 1548157 - RNA, 14 nt, Human adenovirus C
guccguguccccgu

SEQ ID NO: 1548158 - RNA, 13 nt, Human adenovirus C
ucagcgccuccca

SEQ ID NO: 1548159 - RNA, 24 nt, Human adenovirus C
cgacuacaugaacaagcgaguggu

SEQ ID NO: 1548160 - RNA, 15 nt, Human adenovirus C
ggugcaggagcgcag

SEQ ID NO: 1548161 - RNA, 13 nt, Human adenovirus C
cgcagcagcaggg

SEQ ID NO: 1548162 - RNA, 16 nt, Human adenovirus C
cgcuaacuacugccac

SEQ ID NO: 1548163 - RNA, 12 nt, Human adenovirus C
aagaucagcuuc

SEQ ID NO: 1548164 - RNA, 13 nt, Human adenovirus C
gcagccgcaggcc

SEQ ID NO: 1548165 - RNA, 17 nt, Human adenovirus C
cucgaucucuuccuccu

SEQ ID NO: 1548166 - RNA, 16 nt, Human adenovirus C
accgcgcgcccugggg

SEQ ID NO: 1548167 - RNA, 10 nt, Human adenovirus C
aacaggaggg

SEQ ID NO: 1548168 - RNA, 12 nt, Human adenovirus C
cucaccucccaa

SEQ ID NO: 1548169 - RNA, 16 nt, Human adenovirus C
ccaagcaguuccaggc

SEQ ID NO: 1548170 - RNA, 18 nt, Human adenovirus C
cuucagcuugccugcucc

SEQ ID NO: 1548171 - RNA, 15 nt, Human adenovirus C
caggcuuaccccgcc

SEQ ID NO: 1548172 - RNA, 17 nt, Human adenovirus C
caacuuugguagcugcc

SEQ ID NO: 1548173 - RNA, 21 nt, Human adenovirus C
cagcaacuuuccggugguggg

SEQ ID NO: 1548174 - RNA, 15 nt, Human adenovirus C
acacagaagcaaagg

SEQ ID NO: 1548175 - RNA, 15 nt, Human adenovirus C
acccgcgcgcgcugg

SEQ ID NO: 1548176 - RNA, 15 nt, Human adenovirus C
guucggggcugugcc

SEQ ID NO: 1548177 - RNA, 17 nt, Human adenovirus C
acgcggaggcucucuuc

SEQ ID NO: 1548178 - RNA, 15 nt, Human adenovirus C
gacgagcggccgccg

SEQ ID NO: 1548179 - RNA, 16 nt, Human adenovirus C
ggccugguaggcgcag

SEQ ID NO: 1548180 - RNA, 19 nt, Human adenovirus C
ugcaccacagaacaugaaa

SEQ ID NO: 1548181 - RNA, 23 nt, Human adenovirus C
acgccaccuucuuccccauggcc

SEQ ID NO: 1548182 - RNA, 13 nt, Human adenovirus C
acccuggcugugg

SEQ ID NO: 1548183 - RNA, 13 nt, Human adenovirus C
gcgcccuggaggc

SEQ ID NO: 1548184 - RNA, 13 nt, Human adenovirus C
acucgcugcugca

SEQ ID NO: 1548185 - RNA, 14 nt, Human adenovirus C
gucccgcucccacc

SEQ ID NO: 1548186 - RNA, 18 nt, Human adenovirus C
acgucgcaccggccgacg

SEQ ID NO: 1548187 - RNA, 19 nt, Human adenovirus C
aggucccuucgcagggcca

SEQ ID NO: 1548188 - RNA, 20 nt, Human adenovirus C
cuuuaacggcucuucauuug

SEQ ID NO: 1548189 - RNA, 21 nt, Human adenovirus C
agcgguuaagcugggaugggu

SEQ ID NO: 1548190 - RNA, 16 nt, Human adenovirus C
ucacugucgcugcaac

SEQ ID NO: 1548191 - RNA, 17 nt, Human adenovirus C
ccaccggcggcggcgcg

SEQ ID NO: 1548192 - RNA, 13 nt, Human adenovirus C
acgucgcgccgca

SEQ ID NO: 1548193 - RNA, 18 nt, Human adenovirus C
ucgcgcaacugggcagca

SEQ ID NO: 1548194 - RNA, 20 nt, Human adenovirus C
cuuuccgccgccaacaugcu

SEQ ID NO: 1548195 - RNA, 22 nt, Human adenovirus C
cugcugcuaauagcgcccuuca

SEQ ID NO: 1548196 - RNA, 20 nt, Human adenovirus C
ucagcuggggcucgcugugg

SEQ ID NO: 1548197 - RNA, 22 nt, Human adenovirus C
cccggaauugcauccguggccu

SEQ ID NO: 1548198 - RNA, 17 nt, Human adenovirus C
ccuaugacaagcgcuuu

SEQ ID NO: 1548199 - RNA, 18 nt, Human adenovirus C
aaguuugccacacaaccu

SEQ ID NO: 1548200 - RNA, 13 nt, Human adenovirus C
guuuuccuggcca

SEQ ID NO: 1548201 - RNA, 21 nt, Human adenovirus C
cuucuucaaucuccucuucca

SEQ ID NO: 1548202 - RNA, 17 nt, Human adenovirus C
ggccagcuguuggggug

SEQ ID NO: 1548203 - RNA, 13 nt, Human adenovirus C
gccuacccgcagu

SEQ ID NO: 1548204 - RNA, 17 nt, Human adenovirus C
gaggaagguccuccucc

SEQ ID NO: 1548205 - RNA, 14 nt, Human adenovirus C
ccaacuccaugcuu

SEQ ID NO: 1548206 - RNA, 13 nt, Human adenovirus C
caucugcagcgcc

SEQ ID NO: 1548207 - RNA, 23 nt, Human adenovirus C
ugcgcuuaaaaugggcagcgguc

SEQ ID NO: 1548208 - RNA, 17 nt, Human adenovirus C
uaggaucagacaaugca

SEQ ID NO: 1548209 - RNA, 16 nt, Human adenovirus C
ccggccuuaacuccac

SEQ ID NO: 1548210 - RNA, 22 nt, Human adenovirus C
acagaagcaccauguccuuggg

SEQ ID NO: 1548211 - RNA, 19 nt, Human adenovirus C
ccacgcccuacauguggag

SEQ ID NO: 1548212 - RNA, 20 nt, Human adenovirus C
guaacuuuauguccaugggc

SEQ ID NO: 1548213 - RNA, 17 nt, Human adenovirus C
cuauaggacugaugcau

SEQ ID NO: 1548214 - RNA, 16 nt, Human adenovirus C
cgauguuuagcugcac

SEQ ID NO: 1548215 - RNA, 19 nt, Human adenovirus C
cucguccagacgggccagg

SEQ ID NO: 1548216 - RNA, 19 nt, Human adenovirus C
ugccauuaaaaaccuccuc

SEQ ID NO: 1548217 - RNA, 18 nt, Human adenovirus C
ggcggccaugcgggccgc

SEQ ID NO: 1548218 - RNA, 16 nt, Human adenovirus C
cgcagcggugcagcca

SEQ ID NO: 1548219 - RNA, 15 nt, Human adenovirus C
caggugcagacccug

SEQ ID NO: 1548220 - RNA, 18 nt, Human adenovirus C
ugcagaccaaccuggacc

SEQ ID NO: 1548221 - RNA, 17 nt, Human adenovirus C
gccccccuucucccacc

SEQ ID NO: 1548222 - RNA, 17 nt, Human adenovirus C
gauagcggccgggcagu

SEQ ID NO: 1548223 - RNA, 14 nt, Human adenovirus C
ggucucgcauucca

SEQ ID NO: 1548224 - RNA, 13 nt, Human adenovirus C
ucagccacuuaaa

SEQ ID NO: 1548225 - RNA, 21 nt, Human adenovirus C
aaaggugguagauggccuggc

SEQ ID NO: 1548226 - RNA, 21 nt, Human adenovirus C
gcagaaguauuccauagagca

SEQ ID NO: 1548227 - RNA, 16 nt, Human adenovirus C
uguaccugccagacaa

SEQ ID NO: 1548228 - RNA, 21 nt, Human adenovirus C
gauguaauuaaaguaggcggu

SEQ ID NO: 1548229 - RNA, 15 nt, Human adenovirus C
cucaaauauggaaca

SEQ ID NO: 1548230 - RNA, 15 nt, Human adenovirus C
cagccggugggcccg

SEQ ID NO: 1548231 - RNA, 17 nt, Human adenovirus C
ggcgcugcagagccagc

SEQ ID NO: 1548232 - RNA, 23 nt, Human adenovirus C
cgggucaaaaagaaaaagaaaga

SEQ ID NO: 1548233 - RNA, 20 nt, Human adenovirus C
caagcggcaacccuuccagg

SEQ ID NO: 1548234 - RNA, 15 nt, Human adenovirus C
ccgcggcgugcugga

SEQ ID NO: 1548235 - RNA, 15 nt, Human adenovirus C
gaccaaccggcggca

SEQ ID NO: 1548236 - RNA, 14 nt, Human adenovirus C
gaaacacagagcug

SEQ ID NO: 1548237 - RNA, 19 nt, Human adenovirus C
acgccucggaguaccugag

SEQ ID NO: 1548238 - RNA, 23 nt, Human adenovirus C
cgaggucguuggagaugcgggcc

SEQ ID NO: 1548239 - RNA, 18 nt, Human adenovirus C
cgcgcggagguugcuggc

SEQ ID NO: 1548240 - RNA, 12 nt, Human adenovirus C
cauuaacaaaaa

SEQ ID NO: 1548241 - RNA, 19 nt, Human adenovirus C
cgcggcuguagaccacgcc

SEQ ID NO: 1548242 - RNA, 23 nt, Human adenovirus C
ccauuaacgaggaugggcagggg

SEQ ID NO: 1548243 - RNA, 19 nt, Human adenovirus C
ccuauaccuuuuuaaugca

SEQ ID NO: 1548244 - RNA, 22 nt, Human adenovirus C
ggcguccggcucaccacccagg

SEQ ID NO: 1548245 - RNA, 19 nt, Human adenovirus C
aggcgcauguggacgagca

SEQ ID NO: 1548246 - RNA, 19 nt, Human adenovirus C
caaauacaaaagcagacgc

SEQ ID NO: 1548247 - RNA, 20 nt, Human adenovirus C
cauggguguucuugcugguc

SEQ ID NO: 1548248 - RNA, 16 nt, Human adenovirus C
ugcauguuuucccuga

SEQ ID NO: 1548249 - RNA, 17 nt, Human adenovirus C
cuccucuauaaacauuc

SEQ ID NO: 1548250 - RNA, 13 nt, Human adenovirus C
ggcgaugagcagc

SEQ ID NO: 1548251 - RNA, 19 nt, Human adenovirus C
agaugcgggccaugagcug

SEQ ID NO: 1548252 - RNA, 19 nt, Human adenovirus C
ccuguguggaagccuggac

SEQ ID NO: 1548253 - RNA, 15 nt, Human adenovirus C
ccgcgagcuuagaaa

SEQ ID NO: 1548254 - RNA, 14 nt, Human adenovirus C
cuggaacagagcuc

SEQ ID NO: 1548255 - RNA, 20 nt, Human adenovirus C
cacaagaaucgccugcuacu

SEQ ID NO: 1548256 - RNA, 15 nt, Human adenovirus C
acagcgccugcauga

SEQ ID NO: 1548257 - RNA, 21 nt, Human adenovirus C
ccuucuccuaccgcgucagga

SEQ ID NO: 1548258 - RNA, 13 nt, Human adenovirus C
cgggcacuaccgc

SEQ ID NO: 1548259 - RNA, 20 nt, Human adenovirus C
ccaaaccucagcgccuccca

SEQ ID NO: 1548260 - RNA, 20 nt, Human adenovirus C
ccugcaggaaucgccccauc

SEQ ID NO: 1548261 - RNA, 20 nt, Human adenovirus C
cgcgcggcggcggcccugcu

SEQ ID NO: 1548262 - RNA, 19 nt, Human adenovirus C
gccaguggcaacuggcaaa

SEQ ID NO: 1548263 - RNA, 17 nt, Human adenovirus C
aaaugaugacaaacuua

SEQ ID NO: 1548264 - RNA, 19 nt, Human adenovirus C
gcagcgugagcgcgcgcag

SEQ ID NO: 1548265 - RNA, 15 nt, Human adenovirus C
aucugcuggcgcaga

SEQ ID NO: 1548266 - RNA, 16 nt, Human adenovirus C
gcgcagcuugcccuug

SEQ ID NO: 1548267 - RNA, 12 nt, Human adenovirus C
ccugggcuggcg

SEQ ID NO: 1548268 - RNA, 21 nt, Human adenovirus C
cggcagucugcagcgcugcca

SEQ ID NO: 1548269 - RNA, 13 nt, Human adenovirus C
caccaccacccuc

SEQ ID NO: 1548270 - RNA, 20 nt, Human adenovirus C
ggcaccaggugcacgcgcca

SEQ ID NO: 1548271 - RNA, 16 nt, Human adenovirus C
caucuccagcggccac

SEQ ID NO: 1548272 - RNA, 21 nt, Human adenovirus C
ccaugucgccgccagaggagc

SEQ ID NO: 1548273 - RNA, 17 nt, Human adenovirus C
uaaacucaggcacaacc

SEQ ID NO: 1548274 - RNA, 13 nt, Human adenovirus C
cuggcgcgcuggc

SEQ ID NO: 1548275 - RNA, 15 nt, Human adenovirus C
gcucuacagcuuccu

SEQ ID NO: 1548276 - RNA, 14 nt, Human adenovirus C
gcuguccagcugcu

SEQ ID NO: 1548277 - RNA, 20 nt, Human adenovirus C
gucucgcauuccacgagcca

SEQ ID NO: 1548278 - RNA, 23 nt, Human adenovirus C
ucgcccuugcggcagucugcagc

SEQ ID NO: 1548279 - RNA, 14 nt, Human adenovirus C
cugcaacaagaaaa

SEQ ID NO: 1548280 - RNA, 13 nt, Human adenovirus C
ccuugauuuuccg

SEQ ID NO: 1548281 - RNA, 13 nt, Human adenovirus C
ggacgacgcagag

SEQ ID NO: 1548282 - RNA, 22 nt, Human adenovirus C
cgacuggcgccaggucauggac

SEQ ID NO: 1548283 - RNA, 13 nt, Human adenovirus C
gcaguuccaggcg

SEQ ID NO: 1548284 - RNA, 19 nt, Human adenovirus C
caucaaacaauacuaaaaa

SEQ ID NO: 1548285 - RNA, 13 nt, Human adenovirus C
ccacgugccgggc

SEQ ID NO: 1548286 - RNA, 22 nt, Human adenovirus C
cccggcuaucguggcuacaccu

SEQ ID NO: 1548287 - RNA, 20 nt, Human adenovirus C
auuuuuccaaaacaggaggu

SEQ ID NO: 1548288 - RNA, 16 nt, Human adenovirus C
cgagcccaaaguccag

SEQ ID NO: 1548289 - RNA, 11 nt, Human adenovirus C
agcgaggagga

SEQ ID NO: 1548290 - RNA, 16 nt, Human adenovirus C
acacuuaagcucgccu

SEQ ID NO: 1548291 - RNA, 19 nt, Human adenovirus C
ggaagaugaagaugaagaa

SEQ ID NO: 1548292 - RNA, 15 nt, Human adenovirus C
uuucugccagcgccu

SEQ ID NO: 1548293 - RNA, 22 nt, Human adenovirus C
acugacuuugcuuuccugagcc

SEQ ID NO: 1548294 - RNA, 17 nt, Human adenovirus C
cuugaaagugggcaggc

SEQ ID NO: 1548295 - RNA, 16 nt, Human adenovirus C
ccagaggagcugcuga

SEQ ID NO: 1548296 - RNA, 23 nt, Human adenovirus C
cucauguucuugucccuccgcac

SEQ ID NO: 1548297 - RNA, 13 nt, Human adenovirus C
cuggguucccccu

SEQ ID NO: 1548298 - RNA, 11 nt, Human adenovirus C
cgcgccgcacc

SEQ ID NO: 1548299 - RNA, 15 nt, Human adenovirus C
ugcaaauuccuccgg

SEQ ID NO: 1548300 - RNA, 12 nt, Human adenovirus C
cccaccacugug

SEQ ID NO: 1548301 - RNA, 16 nt, Human adenovirus C
uggugcgcggagcccg

SEQ ID NO: 1548302 - RNA, 23 nt, Human adenovirus C
aggagcgcagcuugagccuggcu

SEQ ID NO: 1548303 - RNA, 13 nt, Human adenovirus C
ugauccuccagua

SEQ ID NO: 1548304 - RNA, 19 nt, Human adenovirus C
ucguaggugagcuccucag

SEQ ID NO: 1548305 - RNA, 18 nt, Human adenovirus C
ccauuuuuccaaaacagg

SEQ ID NO: 1548306 - RNA, 14 nt, Human adenovirus C
gucaucccugagca

SEQ ID NO: 1548307 - RNA, 14 nt, Human adenovirus C
agguacugaaaugu

SEQ ID NO: 1548308 - RNA, 13 nt, Human adenovirus C
gcaacaagaaaac

SEQ ID NO: 1548309 - RNA, 21 nt, Human adenovirus C
ugacgcguuccggcagcagcc

SEQ ID NO: 1548310 - RNA, 17 nt, Human adenovirus C
ugaggcugguccugcug

SEQ ID NO: 1548311 - RNA, 21 nt, Human adenovirus C
gaggagccuccaccggccgug

SEQ ID NO: 1548312 - RNA, 16 nt, Human adenovirus C
gcaagagcgcagcgau

SEQ ID NO: 1548313 - RNA, 15 nt, Human adenovirus C
uaccaacucuuacac

SEQ ID NO: 1548314 - RNA, 15 nt, Human adenovirus C
ggcggcggcgcgcaa

SEQ ID NO: 1548315 - RNA, 16 nt, Human adenovirus C
uauguauaaauuucca

SEQ ID NO: 1548316 - RNA, 17 nt, Human adenovirus C
ccggcggcgguggugga

SEQ ID NO: 1548317 - RNA, 22 nt, Human adenovirus C
uacagcccgggggaggcaagca

SEQ ID NO: 1548318 - RNA, 22 nt, Human adenovirus C
cugaguauaauaaauacagaaa

SEQ ID NO: 1548319 - RNA, 19 nt, Human adenovirus C
cugcgacuuaccgcagccg

SEQ ID NO: 1548320 - RNA, 17 nt, Human adenovirus C
aggguaucauggcggac

SEQ ID NO: 1548321 - RNA, 14 nt, Human adenovirus C
cgucacccagcacu

SEQ ID NO: 1548322 - RNA, 14 nt, Human adenovirus C
caaagcaggggcca

SEQ ID NO: 1548323 - RNA, 12 nt, Human adenovirus C
ucaggcgccgcc

SEQ ID NO: 1548324 - RNA, 14 nt, Human adenovirus C
cagugagcaggaac

SEQ ID NO: 1548325 - RNA, 18 nt, Human adenovirus C
cuggugcugaagcgcugc

SEQ ID NO: 1548326 - RNA, 16 nt, Human adenovirus C
cgcacccgccccccgc

SEQ ID NO: 1548327 - RNA, 15 nt, Human adenovirus C
aguuucgcaggcgcu

SEQ ID NO: 1548328 - RNA, 12 nt, Human adenovirus C
ugaccaugaaga

SEQ ID NO: 1548329 - RNA, 15 nt, Human adenovirus C
cuacaacaaacagag

SEQ ID NO: 1548330 - RNA, 20 nt, Human adenovirus C
cuggaagacgcggaggcucu

SEQ ID NO: 1548331 - RNA, 20 nt, Human adenovirus C
gcaaccuaaaggagcugcag

SEQ ID NO: 1548332 - RNA, 19 nt, Human adenovirus C
caacauccgcggcugacgc

SEQ ID NO: 1548333 - RNA, 16 nt, Human adenovirus C
uggaggaggcgccgca

SEQ ID NO: 1548334 - RNA, 14 nt, Human adenovirus C
cugcagaauuaagg

SEQ ID NO: 1548335 - RNA, 12 nt, Human adenovirus C
auccgcccugcu

SEQ ID NO: 1548336 - RNA, 13 nt, Human adenovirus C
agcgcggggugcc

SEQ ID NO: 1548337 - RNA, 22 nt, Human adenovirus C
cagcgugagcgcgcgcagcagc

SEQ ID NO: 1548338 - RNA, 21 nt, Human adenovirus C
caugcgcgagggacaggcuua

SEQ ID NO: 1548339 - RNA, 13 nt, Human adenovirus C
ccccagguccagg

SEQ ID NO: 1548340 - RNA, 16 nt, Human adenovirus C
gaggaggaauacuggg

SEQ ID NO: 1548341 - RNA, 20 nt, Human adenovirus C
ccaugggcgcacucacagac

SEQ ID NO: 1548342 - RNA, 21 nt, Human adenovirus C
uagcauuaaguuugacagcau

SEQ ID NO: 1548343 - RNA, 15 nt, Human adenovirus C
accuaaaugccaacc

SEQ ID NO: 1548344 - RNA, 16 nt, Human adenovirus C
agcgccaaaaacuggu

SEQ ID NO: 1548345 - RNA, 14 nt, Human adenovirus C
gcggguuggggcgg

SEQ ID NO: 1548346 - RNA, 18 nt, Human adenovirus C
cgcaccgcguccgcgcuc

SEQ ID NO: 1548347 - RNA, 16 nt, Human adenovirus C
gcagcggguggcgguc

SEQ ID NO: 1548348 - RNA, 17 nt, Human adenovirus C
guggacgucgcgccgca

SEQ ID NO: 1548349 - RNA, 22 nt, Human adenovirus C
cagcaauaugagcgguggcgcc

SEQ ID NO: 1548350 - RNA, 16 nt, Human adenovirus C
ggcagaaacagagggc

SEQ ID NO: 1548351 - RNA, 15 nt, Human adenovirus C
agggugccagacugc

SEQ ID NO: 1548352 - RNA, 16 nt, Human adenovirus C
gcuauaaaugcaggaa

SEQ ID NO: 1548353 - RNA, 18 nt, Human adenovirus C
ugguacuuguccaucaac

SEQ ID NO: 1548354 - RNA, 14 nt, Human adenovirus C
ggcggcggcggagu

SEQ ID NO: 1548355 - RNA, 18 nt, Human adenovirus C
gaaaaugccuugauuuuc

SEQ ID NO: 1548356 - RNA, 15 nt, Human adenovirus C
uggcaaugggcccac

SEQ ID NO: 1548357 - RNA, 16 nt, Human adenovirus C
gauuaaaaacaaguug

SEQ ID NO: 1548358 - RNA, 14 nt, Human adenovirus C
acuaaagcaaggcc

SEQ ID NO: 1548359 - RNA, 18 nt, Human adenovirus C
guuccucguaggugagcu

SEQ ID NO: 1548360 - RNA, 17 nt, Human adenovirus C
ugagacaugauuccucg

SEQ ID NO: 1548361 - RNA, 14 nt, Human adenovirus C
uccuccugccaggc

SEQ ID NO: 1548362 - RNA, 14 nt, Human adenovirus C
cggucggccaugcc

SEQ ID NO: 1548363 - RNA, 18 nt, Human adenovirus C
cacaggguugcagcacug

SEQ ID NO: 1548364 - RNA, 13 nt, Human adenovirus C
gugagcgcacugc

SEQ ID NO: 1548365 - RNA, 15 nt, Human adenovirus C
aggaccucugcacuc

SEQ ID NO: 1548366 - RNA, 18 nt, Human adenovirus C
gacagcaccuucacccag

SEQ ID NO: 1548367 - RNA, 15 nt, Human adenovirus C
aaguccacaaaaaac

SEQ ID NO: 1548368 - RNA, 20 nt, Human adenovirus C
ggcgaaaagcguccgcggcc

SEQ ID NO: 1548369 - RNA, 22 nt, Human adenovirus C
cccgccaccugcugugcgcuuc

SEQ ID NO: 1548370 - RNA, 16 nt, Human adenovirus C
gggcgcaguaguccag

SEQ ID NO: 1548371 - RNA, 20 nt, Human adenovirus C
cauccguggccuugcaggcg

SEQ ID NO: 1548372 - RNA, 21 nt, Human adenovirus C
ccauccuuauaucgcccagca

SEQ ID NO: 1548373 - RNA, 13 nt, Human adenovirus C
accuucaaaucaa

SEQ ID NO: 1548374 - RNA, 18 nt, Human adenovirus C
cagagaugaccggcucaa

SEQ ID NO: 1548375 - RNA, 22 nt, Human adenovirus C
cggcgcggaagagaacuccaac

SEQ ID NO: 1548376 - RNA, 22 nt, Human adenovirus C
guccaggcgacgagcggccgcc

SEQ ID NO: 1548377 - RNA, 15 nt, Human adenovirus C
cugggcuggagcccg

SEQ ID NO: 1548378 - RNA, 14 nt, Human adenovirus C
ggacagcaagaaac

SEQ ID NO: 1548379 - RNA, 17 nt, Human adenovirus C
agagggagcggggggcu

SEQ ID NO: 1548380 - RNA, 22 nt, Human adenovirus C
ccaccugcgcgagauugagcuc

SEQ ID NO: 1548381 - RNA, 23 nt, Human adenovirus C
gcucgcccuugcggcagucugca

SEQ ID NO: 1548382 - RNA, 21 nt, Human adenovirus C
ccaaaagauuauccaaaaccu

SEQ ID NO: 1548383 - RNA, 21 nt, Human adenovirus C
ccggggcgcgcugcggcugcu

SEQ ID NO: 1548384 - RNA, 22 nt, Human adenovirus C
acuggucuugucaugccugggg

SEQ ID NO: 1548385 - RNA, 22 nt, Human adenovirus C
uggacaaccccagacccaucuc

SEQ ID NO: 1548386 - RNA, 18 nt, Human adenovirus C
ggcugccgugcggcaggg

SEQ ID NO: 1548387 - RNA, 13 nt, Human adenovirus C
cauccgcgccgca

SEQ ID NO: 1548388 - RNA, 13 nt, Human adenovirus C
ccaugcuuuuuga

SEQ ID NO: 1548389 - RNA, 19 nt, Human adenovirus C
gcuccuuuuggcuuccuuc

SEQ ID NO: 1548390 - RNA, 23 nt, Human adenovirus C
cugcagagcauaguggugcagga

SEQ ID NO: 1548391 - RNA, 14 nt, Human adenovirus C
gaaaagcuuauuau

SEQ ID NO: 1548392 - RNA, 18 nt, Human adenovirus C
gaggagcaacagcaggag

SEQ ID NO: 1548393 - RNA, 17 nt, Human adenovirus C
gguggcucccgggcuug

SEQ ID NO: 1548394 - RNA, 20 nt, Human adenovirus C
cgcccuggaggcagcugggg

SEQ ID NO: 1548395 - RNA, 20 nt, Human adenovirus C
acuacaugaacaagcgagug

SEQ ID NO: 1548396 - RNA, 18 nt, Human adenovirus C
aaccuaucaccgucaccc

SEQ ID NO: 1548397 - RNA, 21 nt, Human adenovirus C
aaaaugugggagucaaguacu

SEQ ID NO: 1548398 - RNA, 15 nt, Human adenovirus C
agcaaaccucaccuc

SEQ ID NO: 1548399 - RNA, 14 nt, Human adenovirus C
ccaaaccucagcgc

SEQ ID NO: 1548400 - RNA, 20 nt, Human adenovirus C
gcaugauaaauauguggccg

SEQ ID NO: 1548401 - RNA, 20 nt, Human adenovirus C
gagacguacuucagccugaa

SEQ ID NO: 1548402 - RNA, 22 nt, Human adenovirus C
uuggcguugccgcuggacgagg

SEQ ID NO: 1548403 - RNA, 20 nt, Human adenovirus C
cugcacgcaaccgcgcccag

SEQ ID NO: 1548404 - RNA, 12 nt, Human adenovirus C
cauucugcagag

SEQ ID NO: 1548405 - RNA, 14 nt, Human adenovirus C
ugcgugcucuacau

SEQ ID NO: 1548406 - RNA, 15 nt, Human adenovirus C
cgggcggcgcugcag

SEQ ID NO: 1548407 - RNA, 18 nt, Human adenovirus C
cauugcuuucagggacaa

SEQ ID NO: 1548408 - RNA, 14 nt, Human adenovirus C
gcaccgccagcgca

SEQ ID NO: 1548409 - RNA, 20 nt, Human adenovirus C
ucugcgacgcguugcaagag

SEQ ID NO: 1548410 - RNA, 20 nt, Human adenovirus C
cuucucggccggcaacgcca

SEQ ID NO: 1548411 - RNA, 18 nt, Human adenovirus C
gcuccuuuuggcuuccuu

SEQ ID NO: 1548412 - RNA, 17 nt, Human adenovirus C
cugaccugcgcugggcc

SEQ ID NO: 1548413 - RNA, 14 nt, Human adenovirus C
cuacucccagcuca

SEQ ID NO: 1548414 - RNA, 16 nt, Human adenovirus C
uggggcggcgaccuga

SEQ ID NO: 1548415 - RNA, 16 nt, Human adenovirus C
gcaagcuagaggaaac

SEQ ID NO: 1548416 - RNA, 15 nt, Human adenovirus C
gacaaaagaacccac

SEQ ID NO: 1548417 - RNA, 23 nt, Human adenovirus C
gaaacagagggcugccugcacuu

SEQ ID NO: 1548418 - RNA, 18 nt, Human adenovirus C
ucacggugaaggggugcg

SEQ ID NO: 1548419 - RNA, 20 nt, Human adenovirus C
ccgugggcucguggugcuug

SEQ ID NO: 1548420 - RNA, 16 nt, Human adenovirus C
cucagcagcggcaaga

SEQ ID NO: 1548421 - RNA, 13 nt, Human adenovirus C
gcuuucagggaca

SEQ ID NO: 1548422 - RNA, 11 nt, Human adenovirus C
agucacugugg

SEQ ID NO: 1548423 - RNA, 17 nt, Human adenovirus C
cgcaguuggggccuccg

SEQ ID NO: 1548424 - RNA, 16 nt, Human adenovirus C
cagcaauaacacaggc

SEQ ID NO: 1548425 - RNA, 19 nt, Human adenovirus C
cgugacacugcagcaggug

SEQ ID NO: 1548426 - RNA, 22 nt, Human adenovirus C
cuuuuaagggcguagagcuugg

SEQ ID NO: 1548427 - RNA, 13 nt, Human adenovirus C
aaucaaacucaca

SEQ ID NO: 1548428 - RNA, 14 nt, Human adenovirus C
uggcaaccaccgcu

SEQ ID NO: 1548429 - RNA, 18 nt, Human adenovirus C
gcagcccuaucagcagcc

SEQ ID NO: 1548430 - RNA, 20 nt, Human adenovirus C
gcacuaguauugccacugcc

SEQ ID NO: 1548431 - RNA, 15 nt, Human adenovirus C
gcauacggccgccag

SEQ ID NO: 1548432 - RNA, 14 nt, Human adenovirus C
uguccuuggaugau

SEQ ID NO: 1548433 - RNA, 23 nt, Human adenovirus C
acgcuggaccugccuccccccgc

SEQ ID NO: 1548434 - RNA, 18 nt, Human adenovirus C
cagaggagcugcugagcc

SEQ ID NO: 1548435 - RNA, 21 nt, Human adenovirus C
caggggcgcagcuugcgggcg

SEQ ID NO: 1548436 - RNA, 12 nt, Human adenovirus C
ugaaaccaugcu

SEQ ID NO: 1548437 - RNA, 13 nt, Human adenovirus C
cgcaaccgcagac

SEQ ID NO: 1548438 - RNA, 16 nt, Human adenovirus C
gagccaggugagcucu

SEQ ID NO: 1548439 - RNA, 18 nt, Human adenovirus C
uacauucgggcagcagcg

SEQ ID NO: 1548440 - RNA, 20 nt, Human adenovirus C
guccagcagaggcggccgcc

SEQ ID NO: 1548441 - RNA, 22 nt, Human adenovirus C
cagcagcagggcaaccugggcu

SEQ ID NO: 1548442 - RNA, 14 nt, Human adenovirus C
gcgcgcuggagcaa

SEQ ID NO: 1548443 - RNA, 22 nt, Human adenovirus C
ccagauuuuggcgcgcccgcca

SEQ ID NO: 1548444 - RNA, 20 nt, Human adenovirus C
ucagcgcagcggugcagcca

SEQ ID NO: 1548445 - RNA, 14 nt, Human adenovirus C
ccuuuccgccgcca

SEQ ID NO: 1548446 - RNA, 20 nt, Human adenovirus C
ccgauuuccgugcgcagggu

SEQ ID NO: 1548447 - RNA, 22 nt, Human adenovirus C
agcggggugguggaccuggcca

SEQ ID NO: 1548448 - RNA, 18 nt, Human adenovirus C
ccugcgccguagcgccau

SEQ ID NO: 1548449 - RNA, 19 nt, Human adenovirus C
cggaggcguacaugccgca

SEQ ID NO: 1548450 - RNA, 14 nt, Human adenovirus C
guggagccugggcu

SEQ ID NO: 1548451 - RNA, 23 nt, Human adenovirus C
aacuccagggugcgccacaaugu

SEQ ID NO: 1548452 - RNA, 19 nt, Human adenovirus C
ucugacaaccccaacaccu

SEQ ID NO: 1548453 - RNA, 13 nt, Human adenovirus C
cugcccaccaccc

SEQ ID NO: 1548454 - RNA, 21 nt, Human adenovirus C
ccugcacgucuagggcgcagu

SEQ ID NO: 1548455 - RNA, 13 nt, Human adenovirus C
ccggccugcugaa

SEQ ID NO: 1548456 - RNA, 20 nt, Human adenovirus C
uccgaucuaggcgcugcggc

SEQ ID NO: 1548457 - RNA, 16 nt, Human adenovirus C
ccacagaaacuagcga

SEQ ID NO: 1548458 - RNA, 14 nt, Human adenovirus C
agcuuguugaccag

SEQ ID NO: 1548459 - RNA, 20 nt, Human adenovirus C
agacugggguuugacccagu

SEQ ID NO: 1548460 - RNA, 10 nt, Human adenovirus C
aaaaaacaac

SEQ ID NO: 1548461 - RNA, 18 nt, Human adenovirus C
accccgccaacgugcccu

SEQ ID NO: 1548462 - RNA, 20 nt, Human adenovirus C
aggacaaacagguggagcug

SEQ ID NO: 1548463 - RNA, 17 nt, Human adenovirus C
caaagggcccuggcugg

SEQ ID NO: 1548464 - RNA, 12 nt, Human adenovirus C
uccucaccugcc

SEQ ID NO: 1548465 - RNA, 19 nt, Human adenovirus C
cggccaugcgggccgcucg

SEQ ID NO: 1548466 - RNA, 17 nt, Human adenovirus C
gaagacguaugcgcagg

SEQ ID NO: 1548467 - RNA, 15 nt, Human adenovirus C
gcggucggccaugcc

SEQ ID NO: 1548468 - RNA, 21 nt, Human adenovirus C
acuuugcgucucuggccccgc

SEQ ID NO: 1548469 - RNA, 20 nt, Human adenovirus C
caaagcaaaccucaccuccg

SEQ ID NO: 1548470 - RNA, 15 nt, Human adenovirus C
gccuccgcccugcgc

SEQ ID NO: 1548471 - RNA, 22 nt, Human adenovirus C
acuacccgacgccgaaccacca

SEQ ID NO: 1548472 - RNA, 16 nt, Human adenovirus C
gcggcagcggcagcaa

SEQ ID NO: 1548473 - RNA, 19 nt, Human adenovirus C
cuugcgcuaugugcagcag

SEQ ID NO: 1548474 - RNA, 10 nt, Human adenovirus C
uaacuccugu

SEQ ID NO: 1548475 - RNA, 20 nt, Human adenovirus C
ugaugccuuugaggguggcc

SEQ ID NO: 1548476 - RNA, 15 nt, Human adenovirus C
caacaaucuaugcca

SEQ ID NO: 1548477 - RNA, 22 nt, Human adenovirus C
ccgauguaaggguucggggcug

SEQ ID NO: 1548478 - RNA, 17 nt, Human adenovirus C
gugcuggacagggggcc

SEQ ID NO: 1548479 - RNA, 21 nt, Human adenovirus C
aagcccgugacacugcagcag

SEQ ID NO: 1548480 - RNA, 15 nt, Human adenovirus C
acacguggcggccgc

SEQ ID NO: 1548481 - RNA, 13 nt, Human adenovirus C
cugccgccgccac

SEQ ID NO: 1548482 - RNA, 17 nt, Human adenovirus C
cccaugaaaccaugcua

SEQ ID NO: 1548483 - RNA, 16 nt, Human adenovirus C
gugaccgaggagcuga

SEQ ID NO: 1548484 - RNA, 14 nt, Human adenovirus C
ccugacgggcggca

SEQ ID NO: 1548485 - RNA, 15 nt, Human adenovirus C
accguagaugggaca

SEQ ID NO: 1548486 - RNA, 23 nt, Human adenovirus C
gcaagucuagcgccugcugccau

SEQ ID NO: 1548487 - RNA, 22 nt, Human adenovirus C
ccacauccuuggccaauugcaa

SEQ ID NO: 1548488 - RNA, 16 nt, Human adenovirus C
uucaauugcagaaaau

SEQ ID NO: 1548489 - RNA, 19 nt, Human adenovirus C
gcgcacaaacgcggccgca

SEQ ID NO: 1548490 - RNA, 22 nt, Human adenovirus C
ccauaagggccuccccuucuuc

SEQ ID NO: 1548491 - RNA, 22 nt, Human adenovirus C
agucagucgagaaggaggacag

SEQ ID NO: 1548492 - RNA, 14 nt, Human adenovirus C
gcaggcggccgcug

SEQ ID NO: 1548493 - RNA, 19 nt, Human adenovirus C
gcaagccgcucauggcgca

SEQ ID NO: 1548494 - RNA, 21 nt, Human adenovirus C
agcagguuccugagcagcugc

SEQ ID NO: 1548495 - RNA, 17 nt, Human adenovirus C
acugucacuugcugaag

SEQ ID NO: 1548496 - RNA, 19 nt, Human adenovirus C
cuaccuuaccaaugcaauu

SEQ ID NO: 1548497 - RNA, 14 nt, Human adenovirus C
ugcccuccgccgcu

SEQ ID NO: 1548498 - RNA, 21 nt, Human adenovirus C
gugauuauuuaccccccaccc

SEQ ID NO: 1548499 - RNA, 19 nt, Human adenovirus C
agaagacggaugagcucgg

SEQ ID NO: 1548500 - RNA, 13 nt, Human adenovirus C
auccacaaggccg

SEQ ID NO: 1548501 - RNA, 14 nt, Human adenovirus C
guaccugcgcacgc

SEQ ID NO: 1548502 - RNA, 14 nt, Human adenovirus C
acccccgcggcgcc

SEQ ID NO: 1548503 - RNA, 17 nt, Human adenovirus C
cggcguccggcucacca

SEQ ID NO: 1548504 - RNA, 16 nt, Human adenovirus C
caaccccaccaaugug

SEQ ID NO: 1548505 - RNA, 18 nt, Human adenovirus C
cuacuccgagaccaugac

SEQ ID NO: 1548506 - RNA, 14 nt, Human adenovirus C
cugcaaccuggucu

SEQ ID NO: 1548507 - RNA, 22 nt, Human adenovirus C
uggccauuaccuuugacucuuc

SEQ ID NO: 1548508 - RNA, 18 nt, Human adenovirus C
gcacacugaacagcaucg

SEQ ID NO: 1548509 - RNA, 21 nt, Human adenovirus C
guccggacgggacauuucaga

SEQ ID NO: 1548510 - RNA, 19 nt, Human adenovirus C
uucgcgaccgcgagggaga

SEQ ID NO: 1548511 - RNA, 21 nt, Human adenovirus C
ugagcacagucaugagcgagc

SEQ ID NO: 1548512 - RNA, 23 nt, Human adenovirus C
acucccauuuuuccaaaacagga

SEQ ID NO: 1548513 - RNA, 15 nt, Human adenovirus C
gcugccgccgccgcc

SEQ ID NO: 1548514 - RNA, 20 nt, Human adenovirus C
cccuggaggcagcuggggcc

SEQ ID NO: 1548515 - RNA, 14 nt, Human adenovirus C
gcccaugagccggc

SEQ ID NO: 1548516 - RNA, 15 nt, Human adenovirus C
gcuacccacccagcg

SEQ ID NO: 1548517 - RNA, 19 nt, Human adenovirus C
cgacgccgaaccaccacug

SEQ ID NO: 1548518 - RNA, 19 nt, Human adenovirus C
gaggaggacuuugagcccg

SEQ ID NO: 1548519 - RNA, 13 nt, Human adenovirus C
gcaccggcggcag

SEQ ID NO: 1548520 - RNA, 14 nt, Human adenovirus C
ggccgccagagcuu

SEQ ID NO: 1548521 - RNA, 20 nt, Human adenovirus C
ggacgaugaguacgagccag

SEQ ID NO: 1548522 - RNA, 24 nt, Human adenovirus C
gcaugugaguuggaugauaugguu

SEQ ID NO: 1548523 - RNA, 15 nt, Human adenovirus C
gcauguuuucccuga

SEQ ID NO: 1548524 - RNA, 17 nt, Human adenovirus C
ucacagaccugggccaa

SEQ ID NO: 1548525 - RNA, 22 nt, Human adenovirus C
uggaaucaggcuguagacagcu

SEQ ID NO: 1548526 - RNA, 23 nt, Human adenovirus C
gccccuccgcggcguggcccuug

SEQ ID NO: 1548527 - RNA, 15 nt, Human adenovirus C
aaaaucugcuccaga

SEQ ID NO: 1548528 - RNA, 14 nt, Human adenovirus C
aaagaugacaccga

SEQ ID NO: 1548529 - RNA, 12 nt, Human adenovirus C
cagacgggccag

SEQ ID NO: 1548530 - RNA, 16 nt, Human adenovirus C
gcgcggcggcugcugc

SEQ ID NO: 1548531 - RNA, 23 nt, Human adenovirus C
cgcgaggcguacgugccgcggca

SEQ ID NO: 1548532 - RNA, 22 nt, Human adenovirus C
agcagcugcgacuuaccgcagc

SEQ ID NO: 1548533 - RNA, 20 nt, Human adenovirus C
agucugcagcgcugccaaaa

SEQ ID NO: 1548534 - RNA, 18 nt, Human adenovirus C
auccagucguagcaggag

SEQ ID NO: 1548535 - RNA, 13 nt, Human adenovirus C
ccauccaccacca

SEQ ID NO: 1548536 - RNA, 13 nt, Human adenovirus C
cgcaauucuggaa

SEQ ID NO: 1548537 - RNA, 14 nt, Human adenovirus C
gcuccagugagcag

SEQ ID NO: 1548538 - RNA, 15 nt, Human adenovirus C
cggcugcuguugcuu

SEQ ID NO: 1548539 - RNA, 17 nt, Human adenovirus C
cgagcgguugcugcgcg

SEQ ID NO: 1548540 - RNA, 21 nt, Human adenovirus C
caagucgggcggggggaccaa

SEQ ID NO: 1548541 - RNA, 22 nt, Human adenovirus C
acuugcauggcguguuaaaugg

SEQ ID NO: 1548542 - RNA, 13 nt, Human adenovirus C
caggcgggagcuc

SEQ ID NO: 1548543 - RNA, 15 nt, Human adenovirus C
ggccgccgaccuggu

SEQ ID NO: 1548544 - RNA, 19 nt, Human adenovirus C
gcuagugaaaagcguggcu

SEQ ID NO: 1548545 - RNA, 22 nt, Human adenovirus C
cuugacgaccguucgcacuggg

SEQ ID NO: 1548546 - RNA, 23 nt, Human adenovirus C
cucagcgaccgcgagcugaugca

SEQ ID NO: 1548547 - RNA, 14 nt, Human adenovirus C
ugggccggggugcg

SEQ ID NO: 1548548 - RNA, 20 nt, Human adenovirus C
cggccgacgggcggccaugc

SEQ ID NO: 1548549 - RNA, 17 nt, Human adenovirus C
aggaugggcaggggcua

SEQ ID NO: 1548550 - RNA, 18 nt, Human adenovirus C
ccucguccucggagccgc

SEQ ID NO: 1548551 - RNA, 15 nt, Human adenovirus C
cacuggcaacauggg

SEQ ID NO: 1548552 - RNA, 17 nt, Human adenovirus C
cgugcuggacagggggc

SEQ ID NO: 1548553 - RNA, 22 nt, Human adenovirus C
ggcgauccuaacucugcagacc

SEQ ID NO: 1548554 - RNA, 14 nt, Human adenovirus C
gcgggagcuccugc

SEQ ID NO: 1548555 - RNA, 15 nt, Human adenovirus C
ucuagcgccugcugc

SEQ ID NO: 1548556 - RNA, 21 nt, Human adenovirus C
accaguggagaggcagagcga

SEQ ID NO: 1548557 - RNA, 22 nt, Human adenovirus C
cuuugaguucgccaccaccgcc

SEQ ID NO: 1548558 - RNA, 14 nt, Human adenovirus C
acaccuacagccug

SEQ ID NO: 1548559 - RNA, 16 nt, Human adenovirus C
cugcaagaugaggguu

SEQ ID NO: 1548560 - RNA, 17 nt, Human adenovirus C
cagugucuccagagggg

SEQ ID NO: 1548561 - RNA, 15 nt, Human adenovirus C
agcagccgcggccau

SEQ ID NO: 1548562 - RNA, 15 nt, Human adenovirus C
uacaacguagcucag

SEQ ID NO: 1548563 - RNA, 14 nt, Human adenovirus C
cauccacaaggccg

SEQ ID NO: 1548564 - RNA, 13 nt, Human adenovirus C
aggcgcggcggcu

SEQ ID NO: 1548565 - RNA, 17 nt, Human adenovirus C
cggcaacugucacuugc

SEQ ID NO: 1548566 - RNA, 23 nt, Human adenovirus C
gcagcuagccaacuaccuugccu

SEQ ID NO: 1548567 - RNA, 16 nt, Human adenovirus C
agacucggcggacggc

SEQ ID NO: 1548568 - RNA, 12 nt, Human adenovirus C
gggcucgggacc

SEQ ID NO: 1548569 - RNA, 16 nt, Human adenovirus C
cccaccgugcagcuga

SEQ ID NO: 1548570 - RNA, 17 nt, Human adenovirus C
gugagcuguuugauucu

SEQ ID NO: 1548571 - RNA, 16 nt, Human adenovirus C
cggaggugcugcugau

SEQ ID NO: 1548572 - RNA, 19 nt, Human adenovirus C
ccacuuacaauuaccucag

SEQ ID NO: 1548573 - RNA, 15 nt, Human adenovirus C
cgccgccgcagcccu

SEQ ID NO: 1548574 - RNA, 16 nt, Human adenovirus C
gcggggaccacagaac

SEQ ID NO: 1548575 - RNA, 23 nt, Human adenovirus C
ccagacuauuuuuuccagaccag

SEQ ID NO: 1548576 - RNA, 15 nt, Human adenovirus C
aaucaaagaagagau

SEQ ID NO: 1548577 - RNA, 18 nt, Human adenovirus C
aggacccuggugcugcca

SEQ ID NO: 1548578 - RNA, 11 nt, Human adenovirus C
gaaucaggcug

SEQ ID NO: 1548579 - RNA, 13 nt, Human adenovirus C
gcacgggcagcgg

SEQ ID NO: 1548580 - RNA, 21 nt, Human adenovirus C
gcagcuuguugaccagcucgg

SEQ ID NO: 1548581 - RNA, 16 nt, Human adenovirus C
guggagccugggcugg

SEQ ID NO: 1548582 - RNA, 14 nt, Human adenovirus C
ggcaccaggugcac

SEQ ID NO: 1548583 - RNA, 15 nt, Human adenovirus C
cgcggcgccgggccc

SEQ ID NO: 1548584 - RNA, 14 nt, Human adenovirus C
cgcacccgcccccc

SEQ ID NO: 1548585 - RNA, 13 nt, Human adenovirus C
gacagcaagaaac

SEQ ID NO: 1548586 - RNA, 15 nt, Human adenovirus C
ucacccacagccgcc

SEQ ID NO: 1548587 - RNA, 14 nt, Human adenovirus C
gcaggcgcagagac

SEQ ID NO: 1548588 - RNA, 14 nt, Human adenovirus C
ugcgcaggagcaca

SEQ ID NO: 1548589 - RNA, 24 nt, Human adenovirus C
cggccguggagacagugucuccag

SEQ ID NO: 1548590 - RNA, 13 nt, Human adenovirus C
auuaccauguaca

SEQ ID NO: 1548591 - RNA, 21 nt, Human adenovirus C
acgcugguggcuaccucuccg

SEQ ID NO: 1548592 - RNA, 15 nt, Human adenovirus C
cgccagaggagcugc

SEQ ID NO: 1548593 - RNA, 12 nt, Human adenovirus C
cggcggcggugg

SEQ ID NO: 1548594 - RNA, 19 nt, Human adenovirus C
cucccggaacucaggucaa

SEQ ID NO: 1548595 - RNA, 21 nt, Human adenovirus C
uagcgccauugcuucuucccc

SEQ ID NO: 1548596 - RNA, 14 nt, Human adenovirus C
agaguuucugcuac

SEQ ID NO: 1548597 - RNA, 16 nt, Human adenovirus C
gaugaagaagaggaag

SEQ ID NO: 1548598 - RNA, 17 nt, Human adenovirus C
cagcacaguaacugcag

SEQ ID NO: 1548599 - RNA, 21 nt, Human adenovirus C
cgcgggcgcugaccugcgcug

SEQ ID NO: 1548600 - RNA, 22 nt, Human adenovirus C
cuacaacguagcucagugcaac

SEQ ID NO: 1548601 - RNA, 18 nt, Human adenovirus C
ccgcgucaugcacgcagc

SEQ ID NO: 1548602 - RNA, 19 nt, Human adenovirus C
ugcaaacuugcaagaacaa

SEQ ID NO: 1548603 - RNA, 16 nt, Human adenovirus C
accgugcagcugaugg

SEQ ID NO: 1548604 - RNA, 23 nt, Human adenovirus C
cuuccauaagggccuccccuucu

SEQ ID NO: 1548605 - RNA, 16 nt, Human adenovirus C
ggcgcggcggcugcug

SEQ ID NO: 1548606 - RNA, 13 nt, Human adenovirus C
gguaacaggaggg

SEQ ID NO: 1548607 - RNA, 20 nt, Human adenovirus C
cgacugaaugaccaguggag

SEQ ID NO: 1548608 - RNA, 17 nt, Human adenovirus C
cuguauaacgcuggaaa

SEQ ID NO: 1548609 - RNA, 23 nt, Human adenovirus C
guaguuuuuacgcccggugagcg

SEQ ID NO: 1548610 - RNA, 24 nt, Human adenovirus C
gccccucgccauagcggaugucag

SEQ ID NO: 1548611 - RNA, 17 nt, Human adenovirus C
accugagccccgggcug

SEQ ID NO: 1548612 - RNA, 13 nt, Human adenovirus C
uagcacaaaacuc

SEQ ID NO: 1548613 - RNA, 14 nt, Human adenovirus C
cuuugcgucucugg

SEQ ID NO: 1548614 - RNA, 16 nt, Human adenovirus C
caggggaugauuuuga

SEQ ID NO: 1548615 - RNA, 22 nt, Human adenovirus C
ccaaaugcggagcuuaccgccu

SEQ ID NO: 1548616 - RNA, 17 nt, Human adenovirus C
cgcgcgucccugcgccg

SEQ ID NO: 1548617 - RNA, 15 nt, Human adenovirus C
caaguauaggucucu

SEQ ID NO: 1548618 - RNA, 14 nt, Human adenovirus C
cacuaaagcaaggc

SEQ ID NO: 1548619 - RNA, 21 nt, Human adenovirus C
agccuaaagcccgugacacug

SEQ ID NO: 1548620 - RNA, 18 nt, Human adenovirus C
cgggcccuugcuucccag

SEQ ID NO: 1548621 - RNA, 21 nt, Human adenovirus C
gucagacaacgggggagcgcu

SEQ ID NO: 1548622 - RNA, 17 nt, Human adenovirus C
augcgccccccuccuca

SEQ ID NO: 1548623 - RNA, 23 nt, Human adenovirus C
gccugcgucauuacccagggcca

SEQ ID NO: 1548624 - RNA, 14 nt, Human adenovirus C
ccaaccaggcagug

SEQ ID NO: 1548625 - RNA, 17 nt, Human adenovirus C
agcaagacucugacaaa

SEQ ID NO: 1548626 - RNA, 18 nt, Human adenovirus C
ggcccgaugaggccggcc

SEQ ID NO: 1548627 - RNA, 15 nt, Human adenovirus C
augagcuugaucugc

SEQ ID NO: 1548628 - RNA, 18 nt, Human adenovirus C
cagcggcagcggcagcaa

SEQ ID NO: 1548629 - RNA, 24 nt, Human adenovirus C
cccacaacacggccuccacgcugg

SEQ ID NO: 1548630 - RNA, 17 nt, Human adenovirus C
agcuaaaauacaacccc

SEQ ID NO: 1548631 - RNA, 13 nt, Human adenovirus C
acggcggccuggc

SEQ ID NO: 1548632 - RNA, 17 nt, Human adenovirus C
cagaaaccugugcugcc

SEQ ID NO: 1548633 - RNA, 21 nt, Human adenovirus C
cgcgcugcggcugcuguugcu

SEQ ID NO: 1548634 - RNA, 23 nt, Human adenovirus C
gcagcugccgccgccgccaccca

SEQ ID NO: 1548635 - RNA, 22 nt, Human adenovirus C
agagcuuccacuuggucaggca

SEQ ID NO: 1548636 - RNA, 16 nt, Human adenovirus C
gcgcagcggugcagcc

SEQ ID NO: 1548637 - RNA, 15 nt, Human adenovirus C
gagccagaggacggc

SEQ ID NO: 1548638 - RNA, 13 nt, Human adenovirus C
gccgcggugcagg

SEQ ID NO: 1548639 - RNA, 23 nt, Human adenovirus C
cggcccguagccaguggcaacug

SEQ ID NO: 1548640 - RNA, 23 nt, Human adenovirus C
cgaggaggcacuaaagcaaggcc

SEQ ID NO: 1548641 - RNA, 22 nt, Human adenovirus C
ccuacugcaccggcggcagcgg

SEQ ID NO: 1548642 - RNA, 15 nt, Human adenovirus C
cccggugccgggauu

SEQ ID NO: 1548643 - RNA, 19 nt, Human adenovirus C
gugccaaccgcagccgagc

SEQ ID NO: 1548644 - RNA, 19 nt, Human adenovirus C
aucuccagcggccacaccc

SEQ ID NO: 1548645 - RNA, 19 nt, Human adenovirus C
cagaugccgcggugcaggc

SEQ ID NO: 1548646 - RNA, 17 nt, Human adenovirus C
uugagccuggcugacaa

SEQ ID NO: 1548647 - RNA, 17 nt, Human adenovirus C
cuccuaacuccugugag

SEQ ID NO: 1548648 - RNA, 17 nt, Human adenovirus C
cagcgccugcacugcaa

SEQ ID NO: 1548649 - RNA, 23 nt, Human adenovirus C
ccuacuuucccagugcccgcugu

SEQ ID NO: 1548650 - RNA, 14 nt, Human adenovirus C
ggccgccuguggac

SEQ ID NO: 1548651 - RNA, 17 nt, Human adenovirus C
cuuuuacugcugcugga

SEQ ID NO: 1548652 - RNA, 16 nt, Human adenovirus C
ccuugcggcagucugc

SEQ ID NO: 1548653 - RNA, 13 nt, Human adenovirus C
caggagcuggugc

SEQ ID NO: 1548654 - RNA, 22 nt, Human adenovirus C
uguccacaguggacgcggccau

SEQ ID NO: 1548655 - RNA, 14 nt, Human adenovirus C
caguuuauucccaa

SEQ ID NO: 1548656 - RNA, 17 nt, Human adenovirus C
cacccagcgccaaaaac

SEQ ID NO: 1548657 - RNA, 19 nt, Human adenovirus C
guuguacagguggcugaac

SEQ ID NO: 1548658 - RNA, 16 nt, Human adenovirus C
ggagcugcccaagacu

SEQ ID NO: 1548659 - RNA, 19 nt, Human adenovirus C
gccgcgcgcgggcaggagc

SEQ ID NO: 1548660 - RNA, 17 nt, Human adenovirus C
caaacaucagccccccu

SEQ ID NO: 1548661 - RNA, 22 nt, Human adenovirus C
agcgguacgguuuuccuggcca

SEQ ID NO: 1548662 - RNA, 12 nt, Human adenovirus C
ggccgccagagc

SEQ ID NO: 1548663 - RNA, 17 nt, Human adenovirus C
augcgcgggcggcaagc

SEQ ID NO: 1548664 - RNA, 11 nt, Human adenovirus C
cucgcugcugc

SEQ ID NO: 1548665 - RNA, 15 nt, Human adenovirus C
ugaccugcgcugggc

SEQ ID NO: 1548666 - RNA, 19 nt, Human adenovirus C
ggcugacgcggcggcagau

SEQ ID NO: 1548667 - RNA, 21 nt, Human adenovirus C
cagacaucauuuugcugccag

SEQ ID NO: 1548668 - RNA, 23 nt, Human adenovirus C
uuugccuccccgucaugcaagac

SEQ ID NO: 1548669 - RNA, 12 nt, Human adenovirus C
ccacccuugccg

SEQ ID NO: 1548670 - RNA, 21 nt, Human adenovirus C
caugaaccacccuacuuuccc

SEQ ID NO: 1548671 - RNA, 17 nt, Human adenovirus C
caaacucuacagccaaa

SEQ ID NO: 1548672 - RNA, 18 nt, Human adenovirus C
gacgcgcccuggaggcag

SEQ ID NO: 1548673 - RNA, 16 nt, Human adenovirus C
gugcugcggcagaugc

SEQ ID NO: 1548674 - RNA, 14 nt, Human adenovirus C
cggcgugcuggaca

SEQ ID NO: 1548675 - RNA, 17 nt, Human adenovirus C
caccuauuaccggcugc

SEQ ID NO: 1548676 - RNA, 23 nt, Human adenovirus C
gcaaggccuggaacagcagcaca

SEQ ID NO: 1548677 - RNA, 23 nt, Human adenovirus C
agcaggcagaggcggcgcugcga

SEQ ID NO: 1548678 - RNA, 14 nt, Human adenovirus C
gaagccuggaccga

SEQ ID NO: 1548679 - RNA, 22 nt, Human adenovirus C
agccugcaaagggcccuggcug

SEQ ID NO: 1548680 - RNA, 21 nt, Human adenovirus C
accgaagauagcggccgggca

SEQ ID NO: 1548681 - RNA, 15 nt, Human adenovirus C
ggcgcggcuaggagc

SEQ ID NO: 1548682 - RNA, 15 nt, Human adenovirus C
aucuaugccaaacag

SEQ ID NO: 1548683 - RNA, 22 nt, Human adenovirus C
gguuuacuucaaccccuuuucu

SEQ ID NO: 1548684 - RNA, 18 nt, Human adenovirus C
gaggcuaagugggagggg

SEQ ID NO: 1548685 - RNA, 15 nt, Human adenovirus C
ccgagaccaugacca

SEQ ID NO: 1548686 - RNA, 13 nt, Human adenovirus C
uggaccuggccaa

SEQ ID NO: 1548687 - RNA, 16 nt, Human adenovirus C
aaacgacugcagguac

SEQ ID NO: 1548688 - RNA, 15 nt, Human adenovirus C
agucuuccaagguga

SEQ ID NO: 1548689 - RNA, 17 nt, Human adenovirus C
ugucgcgaucggcgcgc

SEQ ID NO: 1548690 - RNA, 23 nt, Human adenovirus C
cacuccugacguaaccugcggcu

SEQ ID NO: 1548691 - RNA, 16 nt, Human adenovirus C
aaggccuggccagugu

SEQ ID NO: 1548692 - RNA, 22 nt, Human adenovirus C
ccggaccaguuuauucccaacu

SEQ ID NO: 1548693 - RNA, 18 nt, Human adenovirus C
cuggauuuucuggccaug

SEQ ID NO: 1548694 - RNA, 17 nt, Human adenovirus C
ucagccgcgcgcugggg

SEQ ID NO: 1548695 - RNA, 13 nt, Human adenovirus C
ccaacuggcccca

SEQ ID NO: 1548696 - RNA, 16 nt, Human adenovirus C
cggcggccuggcgcaa

SEQ ID NO: 1548697 - RNA, 18 nt, Human adenovirus C
ucgccugcuacuguuguc

SEQ ID NO: 1548698 - RNA, 14 nt, Human adenovirus C
guccuccgggcaca

SEQ ID NO: 1548699 - RNA, 18 nt, Human adenovirus C
gcagcgccagugcgccau

SEQ ID NO: 1548700 - RNA, 16 nt, Human adenovirus C
gcgcgcaacgcaccgc

SEQ ID NO: 1548701 - RNA, 16 nt, Human adenovirus C
cgaggcagcggcagaa

SEQ ID NO: 1548702 - RNA, 22 nt, Human adenovirus C
uugagccuggcugacaaggugg

SEQ ID NO: 1548703 - RNA, 21 nt, Human adenovirus C
uagaaaccccacgguggcacc

SEQ ID NO: 1548704 - RNA, 17 nt, Human adenovirus C
aaugugagguuuacugg

SEQ ID NO: 1548705 - RNA, 16 nt, Human adenovirus C
cgugcgcaccaccggc

SEQ ID NO: 1548706 - RNA, 13 nt, Human adenovirus C
cucccacgcagac

SEQ ID NO: 1548707 - RNA, 21 nt, Human adenovirus C
cagcugaccacuuacuggcug

SEQ ID NO: 1548708 - RNA, 13 nt, Human adenovirus C
cuucagcuggggc

SEQ ID NO: 1548709 - RNA, 20 nt, Human adenovirus C
cucccaaaagacauauuucc

SEQ ID NO: 1548710 - RNA, 17 nt, Human adenovirus C
acaggccagaugcugag

SEQ ID NO: 1548711 - RNA, 17 nt, Human adenovirus C
guggugagcgcggcgcc

SEQ ID NO: 1548712 - RNA, 24 nt, Human adenovirus C
ugggggugcaaucccugaagcgcc

SEQ ID NO: 1548713 - RNA, 16 nt, Human adenovirus C
gcccugcucccagagc

SEQ ID NO: 1548714 - RNA, 15 nt, Human adenovirus C
cuuuuuugaguuuua

SEQ ID NO: 1548715 - RNA, 13 nt, Human adenovirus C
gcgcccaggcggc

SEQ ID NO: 1548716 - RNA, 20 nt, Human adenovirus C
agcaugaagggcacgagcug

SEQ ID NO: 1548717 - RNA, 17 nt, Human adenovirus C
ggccugacgggcggcau

SEQ ID NO: 1548718 - RNA, 16 nt, Human adenovirus C
acuucaggaaggaugu

SEQ ID NO: 1548719 - RNA, 17 nt, Human adenovirus C
agcgcgcuaccacccca

SEQ ID NO: 1548720 - RNA, 13 nt, Human adenovirus C
gcuuaaggguggg

SEQ ID NO: 1548721 - RNA, 23 nt, Human adenovirus C
aaaaccuaucaccgucacccagc

SEQ ID NO: 1548722 - RNA, 20 nt, Human adenovirus C
ggauagagagccuaguggac

SEQ ID NO: 1548723 - RNA, 17 nt, Human adenovirus C
auggaagacugggacag

SEQ ID NO: 1548724 - RNA, 20 nt, Human adenovirus C
uaaagcaaaacuugaaggac

SEQ ID NO: 1548725 - RNA, 20 nt, Human adenovirus C
ucaacgcgcgcgcagccucc

SEQ ID NO: 1548726 - RNA, 19 nt, Human adenovirus C
auguccaaggugaaccuga

SEQ ID NO: 1548727 - RNA, 16 nt, Human adenovirus C
cuaacucaggggcgca

SEQ ID NO: 1548728 - RNA, 20 nt, Human adenovirus C
uuuuuggccacuggccgcgc

SEQ ID NO: 1548729 - RNA, 14 nt, Human adenovirus C
ggcgcagcgugagc

SEQ ID NO: 1548730 - RNA, 15 nt, Human adenovirus C
cucaaagcauccagg

SEQ ID NO: 1548731 - RNA, 17 nt, Human adenovirus C
gaaagugggcaggcaga

SEQ ID NO: 1548732 - RNA, 16 nt, Human adenovirus C
uguauuauaacagcac

SEQ ID NO: 1548733 - RNA, 17 nt, Human adenovirus C
agauuuuucugcugugc

SEQ ID NO: 1548734 - RNA, 15 nt, Human adenovirus C
cgaucucuuccuccu

SEQ ID NO: 1548735 - RNA, 18 nt, Human adenovirus C
aggggcaacauccgcggc

SEQ ID NO: 1548736 - RNA, 18 nt, Human adenovirus C
caggacccuggugcugcc

SEQ ID NO: 1548737 - RNA, 20 nt, Human adenovirus C
cguugauguuguggcccacg

SEQ ID NO: 1548738 - RNA, 20 nt, Human adenovirus C
cgcgggcuagguccagguga

SEQ ID NO: 1548739 - RNA, 17 nt, Human adenovirus C
aaccuaaaugccaaccu

SEQ ID NO: 1548740 - RNA, 16 nt, Human adenovirus C
cguccagacgggccag

SEQ ID NO: 1548741 - RNA, 16 nt, Human adenovirus C
uauggcagcaaggccu

SEQ ID NO: 1548742 - RNA, 13 nt, Human adenovirus C
gccggguggugca

SEQ ID NO: 1548743 - RNA, 14 nt, Human adenovirus C
accgcggaugcugg

SEQ ID NO: 1548744 - RNA, 22 nt, Human adenovirus C
cucacucucuuccgcaucgcug

SEQ ID NO: 1548745 - RNA, 15 nt, Human adenovirus C
gccugcuuaaaaccc

SEQ ID NO: 1548746 - RNA, 14 nt, Human adenovirus C
aggcuguagacagc

SEQ ID NO: 1548747 - RNA, 17 nt, Human adenovirus C
cugugcuuugcucccaa

SEQ ID NO: 1548748 - RNA, 16 nt, Human adenovirus C
cauugaaaaccaugga

SEQ ID NO: 1548749 - RNA, 14 nt, Human adenovirus C
gguagauggccugg

SEQ ID NO: 1548750 - RNA, 14 nt, Human adenovirus C
aggcagcuggggcc

SEQ ID NO: 1548751 - RNA, 14 nt, Human adenovirus C
gcagcagccgcagg

SEQ ID NO: 1548752 - RNA, 12 nt, Human adenovirus C
guggagcucugc

SEQ ID NO: 1548753 - RNA, 12 nt, Human adenovirus C
ucgggcagcagc

SEQ ID NO: 1548754 - RNA, 15 nt, Human adenovirus C
ugcacgcuggccagc

SEQ ID NO: 1548755 - RNA, 16 nt, Human adenovirus C
ugccuuugaggguggc

SEQ ID NO: 1548756 - RNA, 16 nt, Human adenovirus C
guagguacuccgccac

SEQ ID NO: 1548757 - RNA, 15 nt, Human adenovirus C
cagggaugcgcugcu

SEQ ID NO: 1548758 - RNA, 12 nt, Human adenovirus C
gcugcugagccg

SEQ ID NO: 1548759 - RNA, 16 nt, Human adenovirus C
cccauggcccacaaca

SEQ ID NO: 1548760 - RNA, 21 nt, Human adenovirus C
cagaaaccugugcugccaggg

SEQ ID NO: 1548761 - RNA, 19 nt, Human adenovirus C
gacuugagaggccuguccu

SEQ ID NO: 1548762 - RNA, 20 nt, Human adenovirus C
ucugcagaauuaaggaggau

SEQ ID NO: 1548763 - RNA, 12 nt, Human adenovirus C
ccuaaaugccaa

SEQ ID NO: 1548764 - RNA, 16 nt, Human adenovirus C
uggaaaauacaccacu

SEQ ID NO: 1548765 - RNA, 17 nt, Human adenovirus C
acccaagggugcagcug

SEQ ID NO: 1548766 - RNA, 23 nt, Human adenovirus C
ggccuaucauugugcucaaccca

SEQ ID NO: 1548767 - RNA, 14 nt, Human adenovirus C
gcggcagggcgcug

SEQ ID NO: 1548768 - RNA, 13 nt, Human adenovirus C
cacuccugcgccg

SEQ ID NO: 1548769 - RNA, 18 nt, Human adenovirus C
acucggaccacucugaga

SEQ ID NO: 1548770 - RNA, 15 nt, Human adenovirus C
gucgcgccgcaccgc

SEQ ID NO: 1548771 - RNA, 19 nt, Human adenovirus C
gaucuugguugugggccau

SEQ ID NO: 1548772 - RNA, 20 nt, Human adenovirus C
cucgcgcucaaaggcuacag

SEQ ID NO: 1548773 - RNA, 16 nt, Human adenovirus C
gggauagagagccuag

SEQ ID NO: 1548774 - RNA, 15 nt, Human adenovirus C
ccgcggcguggcccu

SEQ ID NO: 1548775 - RNA, 14 nt, Human adenovirus C
accucauggaggcu

SEQ ID NO: 1548776 - RNA, 14 nt, Human adenovirus C
gcgaugagcagcug

SEQ ID NO: 1548777 - RNA, 13 nt, Human adenovirus C
cugaggacuacca

SEQ ID NO: 1548778 - RNA, 19 nt, Human adenovirus C
guaaagaccccgggcagca

SEQ ID NO: 1548779 - RNA, 19 nt, Human adenovirus C
gugcuguugaagcaucugc

SEQ ID NO: 1548780 - RNA, 19 nt, Human adenovirus C
ccggacuaacaucugcccu

SEQ ID NO: 1548781 - RNA, 16 nt, Human adenovirus C
cgccugcugggcgagg

SEQ ID NO: 1548782 - RNA, 19 nt, Human adenovirus C
cacccaaaaagaagcugca

SEQ ID NO: 1548783 - RNA, 18 nt, Human adenovirus C
gccgccaugggcuccagu

SEQ ID NO: 1548784 - RNA, 13 nt, Human adenovirus C
aagagacgcucgg

SEQ ID NO: 1548785 - RNA, 13 nt, Human adenovirus C
ccacucgcuccag

SEQ ID NO: 1548786 - RNA, 17 nt, Human adenovirus C
cacaucucgggccagga

SEQ ID NO: 1548787 - RNA, 22 nt, Human adenovirus C
acuuuugcuaccaacucuuaca

SEQ ID NO: 1548788 - RNA, 18 nt, Human adenovirus C
caucuccuaacugcagaa

SEQ ID NO: 1548789 - RNA, 15 nt, Human adenovirus C
caguagacaaggccu

SEQ ID NO: 1548790 - RNA, 18 nt, Human adenovirus C
uacucccauuuuuccaaa

SEQ ID NO: 1548791 - RNA, 20 nt, Human adenovirus C
cccgcggcgacaggucaggc

SEQ ID NO: 1548792 - RNA, 17 nt, Human adenovirus C
gcaggagcgcugggcgu

SEQ ID NO: 1548793 - RNA, 21 nt, Human adenovirus C
agcccguguucugacagggcc

SEQ ID NO: 1548794 - RNA, 12 nt, Human adenovirus C
gacgcucggugc

SEQ ID NO: 1548795 - RNA, 17 nt, Human adenovirus C
acggccgcuacgugccc

SEQ ID NO: 1548796 - RNA, 18 nt, Human adenovirus C
augcggcaggagggagag

SEQ ID NO: 1548797 - RNA, 18 nt, Human adenovirus C
agcuacccacccagcgcc

SEQ ID NO: 1548798 - RNA, 15 nt, Human adenovirus C
aaccuccgcuccuca

SEQ ID NO: 1548799 - RNA, 12 nt, Human adenovirus C
augagacaugau

SEQ ID NO: 1548800 - RNA, 18 nt, Human adenovirus C
aggccuggccaguguuug

SEQ ID NO: 1548801 - RNA, 18 nt, Human adenovirus C
cacgcuugaagacaaagg

SEQ ID NO: 1548802 - RNA, 19 nt, Human adenovirus C
gagcgacgcaagcuaauga

SEQ ID NO: 1548803 - RNA, 16 nt, Human adenovirus C
ggcagagcgacugcgc

SEQ ID NO: 1548804 - RNA, 17 nt, Human adenovirus C
caaggccggaaaccuca

SEQ ID NO: 1548805 - RNA, 12 nt, Human adenovirus C
agcuugguggca

SEQ ID NO: 1548806 - RNA, 15 nt, Human adenovirus C
agggggguguuccua

SEQ ID NO: 1548807 - RNA, 16 nt, Human adenovirus C
ccugagccccgggcug

SEQ ID NO: 1548808 - RNA, 15 nt, Human adenovirus C
acacgggcagccugg

SEQ ID NO: 1548809 - RNA, 21 nt, Human adenovirus C
gaugcaaacuugcaagaacaa

SEQ ID NO: 1548810 - RNA, 19 nt, Human adenovirus C
cccucguuccagacgcggc

SEQ ID NO: 1548811 - RNA, 16 nt, Human adenovirus C
cugaucagaugaugca

SEQ ID NO: 1548812 - RNA, 13 nt, Human adenovirus C
uggaacucuacaa

SEQ ID NO: 1548813 - RNA, 18 nt, Human adenovirus C
ugaccgugcccggucugg

SEQ ID NO: 1548814 - RNA, 14 nt, Human adenovirus C
cagccuccgccgcc

SEQ ID NO: 1548815 - RNA, 15 nt, Human adenovirus C
aaaaccuccuccucc

SEQ ID NO: 1548816 - RNA, 12 nt, Human adenovirus C
ccgccaccugcu

SEQ ID NO: 1548817 - RNA, 15 nt, Human adenovirus C
cuccucagcagcggc

SEQ ID NO: 1548818 - RNA, 15 nt, Human adenovirus C
gaagaaacucuggug

SEQ ID NO: 1548819 - RNA, 12 nt, Human adenovirus C
cugccaccuccc

SEQ ID NO: 1548820 - RNA, 11 nt, Human adenovirus C
cuuccucccaa

SEQ ID NO: 1548821 - RNA, 21 nt, Human adenovirus C
ugcauggugauaaaacuaaac

SEQ ID NO: 1548822 - RNA, 20 nt, Human adenovirus C
uuguaagcgcgcuggagcaa

SEQ ID NO: 1548823 - RNA, 22 nt, Human adenovirus C
aauuaaaacgggcgguggcaug

SEQ ID NO: 1548824 - RNA, 13 nt, Human adenovirus C
ucuuauacuagca

SEQ ID NO: 1548825 - RNA, 14 nt, Human adenovirus C
acccgcuguuccuu

SEQ ID NO: 1548826 - RNA, 14 nt, Human adenovirus C
acggccgccagagc

SEQ ID NO: 1548827 - RNA, 19 nt, Human adenovirus C
ucauggcggggaccacaga

SEQ ID NO: 1548828 - RNA, 23 nt, Human adenovirus C
uguaguagucuugcaugagccuu

SEQ ID NO: 1548829 - RNA, 15 nt, Human adenovirus C
ucacaaccccaccau

SEQ ID NO: 1548830 - RNA, 12 nt, Human adenovirus C
cacccgcccgcg

SEQ ID NO: 1548831 - RNA, 19 nt, Human adenovirus C
gagcaggcagaggcggcgc

SEQ ID NO: 1548832 - RNA, 22 nt, Human adenovirus C
acgcugguggcuaccucuccgc

SEQ ID NO: 1548833 - RNA, 16 nt, Human adenovirus C
cucguggcgcgggcac

SEQ ID NO: 1548834 - RNA, 13 nt, Human adenovirus C
cgcgcccuggggc

SEQ ID NO: 1548835 - RNA, 13 nt, Human adenovirus C
guguggcagcaau

SEQ ID NO: 1548836 - RNA, 20 nt, Human adenovirus C
gccugccgacuuggaggagc

SEQ ID NO: 1548837 - RNA, 19 nt, Human adenovirus C
cgccagagcuuccacuugg

SEQ ID NO: 1548838 - RNA, 19 nt, Human adenovirus C
aucaccgucacccagcacu

SEQ ID NO: 1548839 - RNA, 22 nt, Human adenovirus C
gcauaccccgcgccacuggguc

SEQ ID NO: 1548840 - RNA, 12 nt, Human adenovirus C
gacagaaacaca

SEQ ID NO: 1548841 - RNA, 14 nt, Human adenovirus C
uacaaaaagcgggc

SEQ ID NO: 1548842 - RNA, 19 nt, Human adenovirus C
cauuccacgagccagguga

SEQ ID NO: 1548843 - RNA, 17 nt, Human adenovirus C
acguggagcucugcaac

SEQ ID NO: 1548844 - RNA, 18 nt, Human adenovirus C
caggcggccgcugcggcc

SEQ ID NO: 1548845 - RNA, 11 nt, Human adenovirus C
aagggccuccc

SEQ ID NO: 1548846 - RNA, 14 nt, Human adenovirus C
aauucaccaccucc

SEQ ID NO: 1548847 - RNA, 13 nt, Human adenovirus C
caagagcagcggc

SEQ ID NO: 1548848 - RNA, 12 nt, Human adenovirus C
agucggugcucg

SEQ ID NO: 1548849 - RNA, 18 nt, Human adenovirus C
cauucgcggcgacaccuu

SEQ ID NO: 1548850 - RNA, 15 nt, Human adenovirus C
uccaggaaguacggc

SEQ ID NO: 1548851 - RNA, 13 nt, Human adenovirus C
ccuaacccuggau

SEQ ID NO: 1548852 - RNA, 13 nt, Human adenovirus C
gcugccugcacuu

SEQ ID NO: 1548853 - RNA, 18 nt, Human adenovirus C
gacgacauagacgacagc

SEQ ID NO: 1548854 - RNA, 22 nt, Human adenovirus C
gguggaccuggccaaccaggca

SEQ ID NO: 1548855 - RNA, 19 nt, Human adenovirus C
gcugcgguucaucccugug

SEQ ID NO: 1548856 - RNA, 15 nt, Human adenovirus C
cagcacagcaccaca

SEQ ID NO: 1548857 - RNA, 16 nt, Human adenovirus C
gagggcccggcgcacg

SEQ ID NO: 1548858 - RNA, 15 nt, Human adenovirus C
uacgugccgcggcag

SEQ ID NO: 1548859 - RNA, 19 nt, Human adenovirus C
ccuacgaugaccuggaggg

SEQ ID NO: 1548860 - RNA, 13 nt, Human adenovirus C
gcgcgcuggcaac

SEQ ID NO: 1548861 - RNA, 23 nt, Human adenovirus C
gcgggcacucuuccguggucugg

SEQ ID NO: 1548862 - RNA, 18 nt, Human adenovirus C
cccgguuauggguuggcg

SEQ ID NO: 1548863 - RNA, 14 nt, Human adenovirus C
gacagcauuugucu

SEQ ID NO: 1548864 - RNA, 17 nt, Human adenovirus C
ggcacgucggcgccgcg

SEQ ID NO: 1548865 - RNA, 17 nt, Human adenovirus C
gcgccgcacgaggggca

SEQ ID NO: 1548866 - RNA, 21 nt, Human adenovirus C
cccagcaauaacacaggcugg

SEQ ID NO: 1548867 - RNA, 16 nt, Human adenovirus C
uguuucuccacgccuu

SEQ ID NO: 1548868 - RNA, 21 nt, Human adenovirus C
ccagacuauuuuuuccagacc

SEQ ID NO: 1548869 - RNA, 22 nt, Human adenovirus C
ggcuuucgcuguacggcaguag

SEQ ID NO: 1548870 - RNA, 21 nt, Human adenovirus C
ggugagcuccucaggggagcu

SEQ ID NO: 1548871 - RNA, 19 nt, Human adenovirus C
gguuucugcccugaaggcu

SEQ ID NO: 1548872 - RNA, 17 nt, Human adenovirus C
aguacaagauuagcaaa

SEQ ID NO: 1548873 - RNA, 22 nt, Human adenovirus C
ucgcgcaccucgcgcucaaagg

SEQ ID NO: 1548874 - RNA, 19 nt, Human adenovirus C
uggcacccaccgugcagcu

SEQ ID NO: 1548875 - RNA, 20 nt, Human adenovirus C
gacccgccgggagagggggc

SEQ ID NO: 1548876 - RNA, 23 nt, Human adenovirus C
ugucccuuuuuuuuccacagcuc

SEQ ID NO: 1548877 - RNA, 16 nt, Human adenovirus C
auccacagcggcggca

SEQ ID NO: 1548878 - RNA, 22 nt, Human adenovirus C
gacauuggcuggaaugccauag

SEQ ID NO: 1548879 - RNA, 15 nt, Human adenovirus C
ccaggauggcaccca

SEQ ID NO: 1548880 - RNA, 15 nt, Human adenovirus C
ccauuuuaaaaaaac

SEQ ID NO: 1548881 - RNA, 14 nt, Human adenovirus C
ggcauuaacaugga

SEQ ID NO: 1548882 - RNA, 15 nt, Human adenovirus C
agaagcugcagcugc

SEQ ID NO: 1548883 - RNA, 20 nt, Human adenovirus C
gcaacuggcaaagcacacug

SEQ ID NO: 1548884 - RNA, 14 nt, Human adenovirus C
cgcgcuccuuggcc

SEQ ID NO: 1548885 - RNA, 20 nt, Human adenovirus C
caaagcgugcaggggcccaa

SEQ ID NO: 1548886 - RNA, 19 nt, Human adenovirus C
gggccccaagccgacgcgc

SEQ ID NO: 1548887 - RNA, 18 nt, Human adenovirus C
uagcaccacugcagagcu

SEQ ID NO: 1548888 - RNA, 14 nt, Human adenovirus C
gcgggcugcucugc

SEQ ID NO: 1548889 - RNA, 19 nt, Human adenovirus C
gcuacaccuaccgccccag

SEQ ID NO: 1548890 - RNA, 19 nt, Human adenovirus C
aacauuccagcaccuucaa

SEQ ID NO: 1548891 - RNA, 18 nt, Human adenovirus C
uacugcccgaauaugccc

SEQ ID NO: 1548892 - RNA, 18 nt, Human adenovirus C
uauauccacucucucaaa

SEQ ID NO: 1548893 - RNA, 16 nt, Human adenovirus C
agcaggggggccacuu

SEQ ID NO: 1548894 - RNA, 14 nt, Human adenovirus C
uccaggcgacgagc

SEQ ID NO: 1548895 - RNA, 14 nt, Human adenovirus C
guugcauguggaaa

SEQ ID NO: 1548896 - RNA, 13 nt, Human adenovirus C
cauccaugacagg

SEQ ID NO: 1548897 - RNA, 14 nt, Human adenovirus C
agccucgccccccu

SEQ ID NO: 1548898 - RNA, 20 nt, Human adenovirus C
caacaugaccaaggacuggu

SEQ ID NO: 1548899 - RNA, 13 nt, Human adenovirus C
gcuggucucugga

SEQ ID NO: 1548900 - RNA, 17 nt, Human adenovirus C
ccagauugcaaguacaa

SEQ ID NO: 1548901 - RNA, 23 nt, Human adenovirus C
cucggcuaauauggccugcugca

SEQ ID NO: 1548902 - RNA, 13 nt, Human adenovirus C
ccaaccggcggca

SEQ ID NO: 1548903 - RNA, 14 nt, Human adenovirus C
gacgcgguggugga

SEQ ID NO: 1548904 - RNA, 15 nt, Human adenovirus C
ccucaggcgccgccg

SEQ ID NO: 1548905 - RNA, 16 nt, Human adenovirus C
cgcgguucacccuggc

SEQ ID NO: 1548906 - RNA, 15 nt, Human adenovirus C
cccauuacaguguca

SEQ ID NO: 1548907 - RNA, 21 nt, Human adenovirus C
guccacgguaaagaccccggg

SEQ ID NO: 1548908 - RNA, 19 nt, Human adenovirus C
aggcgcuccauggccucgu

SEQ ID NO: 1548909 - RNA, 13 nt, Human adenovirus C
agcuuuugaaauc

SEQ ID NO: 1548910 - RNA, 15 nt, Human adenovirus C
uggggcaggaggaca

SEQ ID NO: 1548911 - RNA, 15 nt, Human adenovirus C
ucuccaucccaucgc

SEQ ID NO: 1548912 - RNA, 18 nt, Human adenovirus C
auagcggaugucagccuu

SEQ ID NO: 1548913 - RNA, 19 nt, Human adenovirus C
gcggaggcucucuucagca

SEQ ID NO: 1548914 - RNA, 18 nt, Human adenovirus C
cgccggagaucuauggcc

SEQ ID NO: 1548915 - RNA, 20 nt, Human adenovirus C
cgggacgcucuggccgguga

SEQ ID NO: 1548916 - RNA, 17 nt, Human adenovirus C
cacccacagccgccuga

SEQ ID NO: 1548917 - RNA, 23 nt, Human adenovirus C
ccugacgcguuccggcagcagcc

SEQ ID NO: 1548918 - RNA, 20 nt, Human adenovirus C
uacaaagcgcgguucacccu

SEQ ID NO: 1548919 - RNA, 21 nt, Human adenovirus C
gagcgcauccacaaggccgug

SEQ ID NO: 1548920 - RNA, 21 nt, Human adenovirus C
cgcauuccacgagccagguga

SEQ ID NO: 1548921 - RNA, 15 nt, Human adenovirus C
cagcgccagugcgcc

SEQ ID NO: 1548922 - RNA, 21 nt, Human adenovirus C
aaacgcggccgcacugggcgc

SEQ ID NO: 1548923 - RNA, 20 nt, Human adenovirus C
agugcagcacagcagggaca

SEQ ID NO: 1548924 - RNA, 17 nt, Human adenovirus C
gagaaggaggacagccu

SEQ ID NO: 1548925 - RNA, 14 nt, Human adenovirus C
gcgagggagcgagg

SEQ ID NO: 1548926 - RNA, 14 nt, Human adenovirus C
caaacucacagaac

SEQ ID NO: 1548927 - RNA, 14 nt, Human adenovirus C
augcggcaggaggg

SEQ ID NO: 1548928 - RNA, 13 nt, Human adenovirus C
cugcucccagagc

SEQ ID NO: 1548929 - RNA, 16 nt, Human adenovirus C
agaugaagaagaggaa

SEQ ID NO: 1548930 - RNA, 17 nt, Human adenovirus C
augugggauaugcucca

SEQ ID NO: 1548931 - RNA, 20 nt, Human adenovirus C
gcccgaucacuuggugcugg

SEQ ID NO: 1548932 - RNA, 15 nt, Human adenovirus C
agccggugggcccgu

SEQ ID NO: 1548933 - RNA, 18 nt, Human adenovirus C
gcgggcccuugcuuccca

SEQ ID NO: 1548934 - RNA, 15 nt, Human adenovirus C
ccgcaguggucuuac

SEQ ID NO: 1548935 - RNA, 16 nt, Human adenovirus C
aaccuuuggacaccuc

SEQ ID NO: 1548936 - RNA, 12 nt, Human adenovirus C
gcgcgcuggcca

SEQ ID NO: 1548937 - RNA, 20 nt, Human adenovirus C
aguacggcaccgccagcgca

SEQ ID NO: 1548938 - RNA, 22 nt, Human adenovirus C
augacugcaaauuuacuuuggu

SEQ ID NO: 1548939 - RNA, 19 nt, Human adenovirus C
caccaacgugcccaucucc

SEQ ID NO: 1548940 - RNA, 19 nt, Human adenovirus C
acuuccccgccaggaacca

SEQ ID NO: 1548941 - RNA, 13 nt, Human adenovirus C
auuuauguaaaua

SEQ ID NO: 1548942 - RNA, 13 nt, Human adenovirus C
gcccgugcacucc

SEQ ID NO: 1548943 - RNA, 12 nt, Human adenovirus C
gcugaaagaggu

SEQ ID NO: 1548944 - RNA, 14 nt, Human adenovirus C
cccugcuaguggag

SEQ ID NO: 1548945 - RNA, 16 nt, Human adenovirus C
uuaaugcaucucauaa

SEQ ID NO: 1548946 - RNA, 16 nt, Human adenovirus C
cuccacgugccgggcg

SEQ ID NO: 1548947 - RNA, 18 nt, Human adenovirus C
ugcuaccuucugcagcua

SEQ ID NO: 1548948 - RNA, 21 nt, Human adenovirus C
agaacugguugacggccuggu

SEQ ID NO: 1548949 - RNA, 17 nt, Human adenovirus C
gcggcaggagcagagcc

SEQ ID NO: 1548950 - RNA, 16 nt, Human adenovirus C
cgcuggaccugccucc

SEQ ID NO: 1548951 - RNA, 19 nt, Human adenovirus C
guacaaguuguggccccca

SEQ ID NO: 1548952 - RNA, 19 nt, Human adenovirus C
gacuuugcuuuccugagcc

SEQ ID NO: 1548953 - RNA, 17 nt, Human adenovirus C
cgagguggaacugcugc

SEQ ID NO: 1548954 - RNA, 14 nt, Human adenovirus C
cgggccaugagcug

SEQ ID NO: 1548955 - RNA, 16 nt, Human adenovirus C
cacauuucggccccac

SEQ ID NO: 1548956 - RNA, 15 nt, Human adenovirus C
gcaggaaucgcccca

SEQ ID NO: 1548957 - RNA, 20 nt, Human adenovirus C
cggggcuccgggggcgaggu

SEQ ID NO: 1548958 - RNA, 21 nt, Human adenovirus C
caaaauuuccaacaaaaggug

SEQ ID NO: 1548959 - RNA, 13 nt, Human adenovirus C
ucaucugcagccu

SEQ ID NO: 1548960 - RNA, 17 nt, Human adenovirus C
gacaaagcccaagaaau

SEQ ID NO: 1548961 - RNA, 16 nt, Human adenovirus C
aggcagugcaaaauaa

SEQ ID NO: 1548962 - RNA, 19 nt, Human adenovirus C
agguuccugagcagcugcg

SEQ ID NO: 1548963 - RNA, 21 nt, Human adenovirus C
ccucgcauagccgggucaggg

SEQ ID NO: 1548964 - RNA, 18 nt, Human adenovirus C
agacguaugcgcaggagc

SEQ ID NO: 1548965 - RNA, 21 nt, Human adenovirus C
cuacggcaucucgauccagca

SEQ ID NO: 1548966 - RNA, 21 nt, Human adenovirus C
gcccguguucugacagggccc

SEQ ID NO: 1548967 - RNA, 16 nt, Human adenovirus C
agacagugucuccaga

SEQ ID NO: 1548968 - RNA, 17 nt, Human adenovirus C
caaaaucaaagaagaga

SEQ ID NO: 1548969 - RNA, 19 nt, Human adenovirus C
cgugagcgcgcgcagcagc

SEQ ID NO: 1548970 - RNA, 14 nt, Human adenovirus C
cacgcaaccgcgcc

SEQ ID NO: 1548971 - RNA, 13 nt, Human adenovirus C
cugauaacaucca

SEQ ID NO: 1548972 - RNA, 20 nt, Human adenovirus C
gucaggcgggagcuccugca

SEQ ID NO: 1548973 - RNA, 23 nt, Human adenovirus C
auuuguagcgccacaucuucucu

SEQ ID NO: 1548974 - RNA, 12 nt, Human adenovirus C
aggaagccaggc

SEQ ID NO: 1548975 - RNA, 17 nt, Human adenovirus C
cacucacagaccugggc

SEQ ID NO: 1548976 - RNA, 16 nt, Human adenovirus C
cccagugcccgcuguc

SEQ ID NO: 1548977 - RNA, 15 nt, Human adenovirus C
agaugccaugaacca

SEQ ID NO: 1548978 - RNA, 15 nt, Human adenovirus C
aaugcaucaaacaau

SEQ ID NO: 1548979 - RNA, 23 nt, Human adenovirus C
cagccuagacgaagcuuccgagg

SEQ ID NO: 1548980 - RNA, 16 nt, Human adenovirus C
ggagcaacagcaggag

SEQ ID NO: 1548981 - RNA, 14 nt, Human adenovirus C
ccaacagaggauaa

SEQ ID NO: 1548982 - RNA, 16 nt, Human adenovirus C
cuuaccucccuugccg

SEQ ID NO: 1548983 - RNA, 17 nt, Human adenovirus C
cuagcccugcaaacauc

SEQ ID NO: 1548984 - RNA, 21 nt, Human adenovirus C
cacaugucuaugcccaggcuc

SEQ ID NO: 1548985 - RNA, 13 nt, Human adenovirus C
uggaagccaugcu

SEQ ID NO: 1548986 - RNA, 22 nt, Human adenovirus C
cagccugcaaagggcccuggcu

SEQ ID NO: 1548987 - RNA, 20 nt, Human adenovirus C
ugaccaacgacucaagcagg

SEQ ID NO: 1548988 - RNA, 20 nt, Human adenovirus C
cagcggcagacaugcagggc

SEQ ID NO: 1548989 - RNA, 20 nt, Human adenovirus C
ucagcacaguaacugcagca

SEQ ID NO: 1548990 - RNA, 16 nt, Human adenovirus C
aaccauaucccaggga

SEQ ID NO: 1548991 - RNA, 16 nt, Human adenovirus C
acaacucgcugcugca

SEQ ID NO: 1548992 - RNA, 23 nt, Human adenovirus C
ccauggaucacaaccccaccaug

SEQ ID NO: 1548993 - RNA, 20 nt, Human adenovirus C
cgcuccacgguggcggcgag

SEQ ID NO: 1548994 - RNA, 16 nt, Human adenovirus C
guuucgcgcugcuccu

SEQ ID NO: 1548995 - RNA, 23 nt, Human adenovirus C
cgcaccuucgccccaggcugggg

SEQ ID NO: 1548996 - RNA, 21 nt, Human adenovirus C
cacgagccaggugagcucugg

SEQ ID NO: 1548997 - RNA, 12 nt, Human adenovirus C
gacacggcggcg

SEQ ID NO: 1548998 - RNA, 12 nt, Human adenovirus C
gacgcggcggca

SEQ ID NO: 1548999 - RNA, 13 nt, Human adenovirus C
ccacgcucgguga

SEQ ID NO: 1549000 - RNA, 12 nt, Human adenovirus C
ugcccaggcucc

SEQ ID NO: 1549001 - RNA, 20 nt, Human adenovirus C
gcacugggcgcaccaccguc

SEQ ID NO: 1549002 - RNA, 20 nt, Human adenovirus C
cggacuaucgcaacaccacu

SEQ ID NO: 1549003 - RNA, 17 nt, Human adenovirus C
gccgccuuuuagcugca

SEQ ID NO: 1549004 - RNA, 13 nt, Human adenovirus C
cccacccccacug

SEQ ID NO: 1549005 - RNA, 13 nt, Human adenovirus C
cggaggugcugcu

SEQ ID NO: 1549006 - RNA, 16 nt, Human adenovirus C
agacgccgcaccugcc

SEQ ID NO: 1549007 - RNA, 12 nt, Human adenovirus C
cugcgagggcca

SEQ ID NO: 1549008 - RNA, 15 nt, Human adenovirus C
cgucacccagcacuc

SEQ ID NO: 1549009 - RNA, 11 nt, Human adenovirus C
uguagguacuc

SEQ ID NO: 1549010 - RNA, 18 nt, Human adenovirus C
guggccgggggugcuugg

SEQ ID NO: 1549011 - RNA, 18 nt, Human adenovirus C
ugacuacagcccggggga

SEQ ID NO: 1549012 - RNA, 14 nt, Human adenovirus C
gcggcgcugcagag

SEQ ID NO: 1549013 - RNA, 22 nt, Human adenovirus C
gcgucccugcgccgugccgcca

SEQ ID NO: 1549014 - RNA, 21 nt, Human adenovirus C
agccaaacgcucaucagugau

SEQ ID NO: 1549015 - RNA, 12 nt, Human adenovirus C
agccggccugga

SEQ ID NO: 1549016 - RNA, 15 nt, Human adenovirus C
gcucgaucucuuccu

SEQ ID NO: 1549017 - RNA, 14 nt, Human adenovirus C
agguugaguuuaag

SEQ ID NO: 1549018 - RNA, 22 nt, Human adenovirus C
ucagcgccauuaugagcaagga

SEQ ID NO: 1549019 - RNA, 23 nt, Human adenovirus C
cccagcacucggcagaaacagag

SEQ ID NO: 1549020 - RNA, 18 nt, Human adenovirus C
acccacccaaagcagacc

SEQ ID NO: 1549021 - RNA, 18 nt, Human adenovirus C
uuccaaaaacgaggagga

SEQ ID NO: 1549022 - RNA, 17 nt, Human adenovirus C
ucgcaaggccuggccag

SEQ ID NO: 1549023 - RNA, 18 nt, Human adenovirus C
cgaugccgccaacgcgcc

SEQ ID NO: 1549024 - RNA, 21 nt, Human adenovirus C
agcaacagcagcggucacaca

SEQ ID NO: 1549025 - RNA, 15 nt, Human adenovirus C
uaagcccgucucugg

SEQ ID NO: 1549026 - RNA, 20 nt, Human adenovirus C
uaugcaccccgcaccgcucc

SEQ ID NO: 1549027 - RNA, 13 nt, Human adenovirus C
cagcucuacagcu

SEQ ID NO: 1549028 - RNA, 14 nt, Human adenovirus C
acuggcagggacac

SEQ ID NO: 1549029 - RNA, 16 nt, Human adenovirus C
ccuaccggggggagaa

SEQ ID NO: 1549030 - RNA, 15 nt, Human adenovirus C
acccaccgugcagcu

SEQ ID NO: 1549031 - RNA, 21 nt, Human adenovirus C
auauggcccucaccugccgcc

SEQ ID NO: 1549032 - RNA, 16 nt, Human adenovirus C
ugcaucuaaaagcggu

SEQ ID NO: 1549033 - RNA, 22 nt, Human adenovirus C
ugcucguccagacgggccaggg

SEQ ID NO: 1549034 - RNA, 13 nt, Human adenovirus C
gucuccagagggg

SEQ ID NO: 1549035 - RNA, 13 nt, Human adenovirus C
cccuggugcugcc

SEQ ID NO: 1549036 - RNA, 21 nt, Human adenovirus C
ggcaccauccgcaauacagag

SEQ ID NO: 1549037 - RNA, 19 nt, Human adenovirus C
gaggcguaggagucgcgca

SEQ ID NO: 1549038 - RNA, 19 nt, Human adenovirus C
cccaauccccccgccgccg

SEQ ID NO: 1549039 - RNA, 16 nt, Human adenovirus C
uugaucaaacccagcu

SEQ ID NO: 1549040 - RNA, 13 nt, Human adenovirus C
ucaccuccuuucc

SEQ ID NO: 1549041 - RNA, 11 nt, Human adenovirus C
ugcuaccucuu

SEQ ID NO: 1549042 - RNA, 20 nt, Human adenovirus C
gccccuacguuuacaaggcc

SEQ ID NO: 1549043 - RNA, 19 nt, Human adenovirus C
cacgccgccaccagugucc

SEQ ID NO: 1549044 - RNA, 15 nt, Human adenovirus C
aguuaccagccacaa

SEQ ID NO: 1549045 - RNA, 17 nt, Human adenovirus C
ccgcaacuucagacugg

SEQ ID NO: 1549046 - RNA, 15 nt, Human adenovirus C
gcuggaccugccucc

SEQ ID NO: 1549047 - RNA, 16 nt, Human adenovirus C
augcucagucugggca

SEQ ID NO: 1549048 - RNA, 14 nt, Human adenovirus C
cagcugccgccgcc

SEQ ID NO: 1549049 - RNA, 22 nt, Human adenovirus C
uaaauauggaaaccccagacac

SEQ ID NO: 1549050 - RNA, 22 nt, Human adenovirus C
ccaaguggacguaaaggcuaaa

SEQ ID NO: 1549051 - RNA, 14 nt, Human adenovirus C
caggcgcagagaca

SEQ ID NO: 1549052 - RNA, 17 nt, Human adenovirus C
gcagccgcaggccaacc

SEQ ID NO: 1549053 - RNA, 22 nt, Human adenovirus C
gcagcggcagacaugcagggca

SEQ ID NO: 1549054 - RNA, 22 nt, Human adenovirus C
ccguagaggagccuccaccggc

SEQ ID NO: 1549055 - RNA, 17 nt, Human adenovirus C
cccacggacgaggagga

SEQ ID NO: 1549056 - RNA, 13 nt, Human adenovirus C
ccgcaccgcuccc

SEQ ID NO: 1549057 - RNA, 14 nt, Human adenovirus C
gaccuggccaacca

SEQ ID NO: 1549058 - RNA, 17 nt, Human adenovirus C
cauggcauggggugggu

SEQ ID NO: 1549059 - RNA, 15 nt, Human adenovirus C
accacuuacuggcug

SEQ ID NO: 1549060 - RNA, 22 nt, Human adenovirus C
cgcgcacaaacgcggccgcacu

SEQ ID NO: 1549061 - RNA, 15 nt, Human adenovirus C
ggccguagguggcgc

SEQ ID NO: 1549062 - RNA, 14 nt, Human adenovirus C
gccuguccucgagc

SEQ ID NO: 1549063 - RNA, 15 nt, Human adenovirus C
ugcuggacagggggc

SEQ ID NO: 1549064 - RNA, 23 nt, Human adenovirus C
aguucaugucgcuguccagcugc

SEQ ID NO: 1549065 - RNA, 17 nt, Human adenovirus C
aguaaguuugccacaca

SEQ ID NO: 1549066 - RNA, 23 nt, Human adenovirus C
gcugcggggugguguuguagaug

SEQ ID NO: 1549067 - RNA, 14 nt, Human adenovirus C
aucuauaggccuau

SEQ ID NO: 1549068 - RNA, 22 nt, Human adenovirus C
accccacgguggcaccuacgca

SEQ ID NO: 1549069 - RNA, 20 nt, Human adenovirus C
gugacacugcagcaggugcu

SEQ ID NO: 1549070 - RNA, 12 nt, Human adenovirus C
aggacugaugca

SEQ ID NO: 1549071 - RNA, 15 nt, Human adenovirus C
ggcgauuggcgccgu

SEQ ID NO: 1549072 - RNA, 19 nt, Human adenovirus C
gagcgugagccggcggcgc

SEQ ID NO: 1549073 - RNA, 21 nt, Human adenovirus C
cccggaauugcauccguggcc

SEQ ID NO: 1549074 - RNA, 15 nt, Human adenovirus C
uccccuaucaggguc

SEQ ID NO: 1549075 - RNA, 13 nt, Human adenovirus C
aaccucaccuccc

SEQ ID NO: 1549076 - RNA, 20 nt, Human adenovirus C
caggcgcuuuuccaagagaa

SEQ ID NO: 1549077 - RNA, 18 nt, Human adenovirus C
uggcgcagcgugagcgcg

SEQ ID NO: 1549078 - RNA, 18 nt, Human adenovirus C
gcaaaaucuccugcacgu

SEQ ID NO: 1549079 - RNA, 13 nt, Human adenovirus C
cucaaaagcgggc

SEQ ID NO: 1549080 - RNA, 12 nt, Human adenovirus C
cacuacccggac

SEQ ID NO: 1549081 - RNA, 20 nt, Human adenovirus C
gguuccugagcagcugcgac

SEQ ID NO: 1549082 - RNA, 16 nt, Human adenovirus C
gcgcaaaaucuccugc

SEQ ID NO: 1549083 - RNA, 20 nt, Human adenovirus C
cgguucgagucucgggccgg

SEQ ID NO: 1549084 - RNA, 21 nt, Human adenovirus C
cucgccccccuucucccaccc

SEQ ID NO: 1549085 - RNA, 13 nt, Human adenovirus C
guaccgcagcugg

SEQ ID NO: 1549086 - RNA, 13 nt, Human adenovirus C
agcaacagcagcg

SEQ ID NO: 1549087 - RNA, 14 nt, Human adenovirus C
caggagcgcugggc

SEQ ID NO: 1549088 - RNA, 13 nt, Human adenovirus C
cgcgcgcagcagc

SEQ ID NO: 1549089 - RNA, 22 nt, Human adenovirus C
aggggcaacguguacugggugc

SEQ ID NO: 1549090 - RNA, 11 nt, Human adenovirus C
aaucuugguua

SEQ ID NO: 1549091 - RNA, 13 nt, Human adenovirus C
aagcaagaccagg

SEQ ID NO: 1549092 - RNA, 13 nt, Human adenovirus C
gggcuagguccag

SEQ ID NO: 1549093 - RNA, 16 nt, Human adenovirus C
ccggcggcagcggcag

SEQ ID NO: 1549094 - RNA, 20 nt, Human adenovirus C
caccuguaacgcuggaccug

SEQ ID NO: 1549095 - RNA, 23 nt, Human adenovirus C
gcagcggcagacaugcagggcac

SEQ ID NO: 1549096 - RNA, 13 nt, Human adenovirus C
ugaccugcacguc

SEQ ID NO: 1549097 - RNA, 12 nt, Human adenovirus C
agcaugaagggc

SEQ ID NO: 1549098 - RNA, 23 nt, Human adenovirus C
cagcauuugucuuuacgccaccu

SEQ ID NO: 1549099 - RNA, 15 nt, Human adenovirus C
aggagggcgagggcc

SEQ ID NO: 1549100 - RNA, 16 nt, Human adenovirus C
cacucgcuccagggug

SEQ ID NO: 1549101 - RNA, 19 nt, Human adenovirus C
cacggugaaggggugcgcu

SEQ ID NO: 1549102 - RNA, 15 nt, Human adenovirus C
gcagggcacccuccc

SEQ ID NO: 1549103 - RNA, 13 nt, Human adenovirus C
cgcuccagggugu

SEQ ID NO: 1549104 - RNA, 14 nt, Human adenovirus C
cuugaucugcuggc

SEQ ID NO: 1549105 - RNA, 21 nt, Human adenovirus C
gaggaagugauuaucgagcag

SEQ ID NO: 1549106 - RNA, 19 nt, Human adenovirus C
gcaaguuuuacgcccgcaa

SEQ ID NO: 1549107 - RNA, 13 nt, Human adenovirus C
ccagguacagccc

SEQ ID NO: 1549108 - RNA, 20 nt, Human adenovirus C
cguagccaguggcaacuggc

SEQ ID NO: 1549109 - RNA, 20 nt, Human adenovirus C
uuuacgccaccuucuucccc

SEQ ID NO: 1549110 - RNA, 13 nt, Human adenovirus C
cugaaacccacca

SEQ ID NO: 1549111 - RNA, 14 nt, Human adenovirus C
cgucccugcgccgu

SEQ ID NO: 1549112 - RNA, 15 nt, Human adenovirus C
gcagcacaggccaga

SEQ ID NO: 1549113 - RNA, 18 nt, Human adenovirus C
gccgcacugggcgcacca

SEQ ID NO: 1549114 - RNA, 14 nt, Human adenovirus C
uccugccaggcuca

SEQ ID NO: 1549115 - RNA, 22 nt, Human adenovirus C
gcuacaacaaacagagcgauuu

SEQ ID NO: 1549116 - RNA, 19 nt, Human adenovirus C
cuucagcuugccugcucca

SEQ ID NO: 1549117 - RNA, 15 nt, Human adenovirus C
gcguggucaaacucu

SEQ ID NO: 1549118 - RNA, 11 nt, Human adenovirus C
cccagacacac

SEQ ID NO: 1549119 - RNA, 13 nt, Human adenovirus C
ccgccaacgugcc

SEQ ID NO: 1549120 - RNA, 14 nt, Human adenovirus C
auccagcggcggcg

SEQ ID NO: 1549121 - RNA, 19 nt, Human adenovirus C
cuaccgcgcgcccuggggc

SEQ ID NO: 1549122 - RNA, 18 nt, Human adenovirus C
cgcagcuugagccuggcu

SEQ ID NO: 1549123 - RNA, 22 nt, Human adenovirus C
cccaccaugcgcgagggacagg

SEQ ID NO: 1549124 - RNA, 17 nt, Human adenovirus C
uauagguguaggccacg

SEQ ID NO: 1549125 - RNA, 22 nt, Human adenovirus C
ccgcgucagaaccauaucccag

SEQ ID NO: 1549126 - RNA, 23 nt, Human adenovirus C
cucccaaaauguaaccacuguua

SEQ ID NO: 1549127 - RNA, 21 nt, Human adenovirus C
gcccuggaggcagcuggggcc

SEQ ID NO: 1549128 - RNA, 19 nt, Human adenovirus C
cgggccgaacacucgugcu

SEQ ID NO: 1549129 - RNA, 13 nt, Human adenovirus C
agcugaucuucuc

SEQ ID NO: 1549130 - RNA, 17 nt, Human adenovirus C
cgcuggggcaggaggac

SEQ ID NO: 1549131 - RNA, 12 nt, Human adenovirus C
caccacugcaga

SEQ ID NO: 1549132 - RNA, 20 nt, Human adenovirus C
guaguggcaucagaagguga

SEQ ID NO: 1549133 - RNA, 13 nt, Human adenovirus C
ccuggaggagcgc

SEQ ID NO: 1549134 - RNA, 20 nt, Human adenovirus C
ccgagcggacaagcagcugg

SEQ ID NO: 1549135 - RNA, 17 nt, Human adenovirus C
uauuauucgccacaaag

SEQ ID NO: 1549136 - RNA, 20 nt, Human adenovirus C
aggaggcaggacccuggugc

SEQ ID NO: 1549137 - RNA, 12 nt, Human adenovirus C
accucagcgccu

SEQ ID NO: 1549138 - RNA, 17 nt, Human adenovirus C
cuguaacgcuggaccug

SEQ ID NO: 1549139 - RNA, 21 nt, Human adenovirus C
cuugaugacaacaucgcgcag

SEQ ID NO: 1549140 - RNA, 13 nt, Human adenovirus C
ggcgugcagaccg

SEQ ID NO: 1549141 - RNA, 23 nt, Human adenovirus C
ccugcgcgagauugagcuccacg

SEQ ID NO: 1549142 - RNA, 14 nt, Human adenovirus C
aguaccgcagcugg

SEQ ID NO: 1549143 - RNA, 22 nt, Human adenovirus C
cccugcgucgcaaccaggaaca

SEQ ID NO: 1549144 - RNA, 21 nt, Human adenovirus C
cagggcuacgugcgccaggcc

SEQ ID NO: 1549145 - RNA, 18 nt, Human adenovirus C
uccacagcggcggcagca

SEQ ID NO: 1549146 - RNA, 12 nt, Human adenovirus C
ccgcugcagcca

SEQ ID NO: 1549147 - RNA, 13 nt, Human adenovirus C
agaagaagagcaa

SEQ ID NO: 1549148 - RNA, 18 nt, Human adenovirus C
gccagaaggcgcucgccg

SEQ ID NO: 1549149 - RNA, 19 nt, Human adenovirus C
cguucucgcgggggcgcag

SEQ ID NO: 1549150 - RNA, 22 nt, Human adenovirus C
auaagggccuccccuucuucuu

SEQ ID NO: 1549151 - RNA, 22 nt, Human adenovirus C
gucgaagccguugauguugugg

SEQ ID NO: 1549152 - RNA, 15 nt, Human adenovirus C
gcagguuccugagca

SEQ ID NO: 1549153 - RNA, 13 nt, Human adenovirus C
acacccuuacugu

SEQ ID NO: 1549154 - RNA, 17 nt, Human adenovirus C
acuauucugcugcaugu

SEQ ID NO: 1549155 - RNA, 15 nt, Human adenovirus C
ccagcgccugcacug

SEQ ID NO: 1549156 - RNA, 15 nt, Human adenovirus C
uguauauuaaugcau

SEQ ID NO: 1549157 - RNA, 18 nt, Human adenovirus C
ggacaaccccagacccau

SEQ ID NO: 1549158 - RNA, 11 nt, Human adenovirus C
aacuacugcca

SEQ ID NO: 1549159 - RNA, 13 nt, Human adenovirus C
ggccgaggcagcg

SEQ ID NO: 1549160 - RNA, 16 nt, Human adenovirus C
ggcgaggcgcgccgcg

SEQ ID NO: 1549161 - RNA, 19 nt, Human adenovirus C
acgguaaagaccccgggca

SEQ ID NO: 1549162 - RNA, 21 nt, Human adenovirus C
cgccaccgagacguacuucag

SEQ ID NO: 1549163 - RNA, 13 nt, Human adenovirus C
ucgaugcuccccu

SEQ ID NO: 1549164 - RNA, 21 nt, Human adenovirus C
uucgggaaagacgguggugcg

SEQ ID NO: 1549165 - RNA, 13 nt, Human adenovirus C
ugcagaccgugga

SEQ ID NO: 1549166 - RNA, 13 nt, Human adenovirus C
cacccgcagcugc

SEQ ID NO: 1549167 - RNA, 22 nt, Human adenovirus C
cgucaccgguugcugcgcccac

SEQ ID NO: 1549168 - RNA, 16 nt, Human adenovirus C
agguacgaugagaccc

SEQ ID NO: 1549169 - RNA, 17 nt, Human adenovirus C
agguuccugagcagcug

SEQ ID NO: 1549170 - RNA, 22 nt, Human adenovirus C
aguaaguuugccacacaaccuu

SEQ ID NO: 1549171 - RNA, 15 nt, Human adenovirus C
ugaggcuacagagga

SEQ ID NO: 1549172 - RNA, 16 nt, Human adenovirus C
cugguggaacuugagg

SEQ ID NO: 1549173 - RNA, 23 nt, Human adenovirus C
agcgccugauuucugccagcgcc

SEQ ID NO: 1549174 - RNA, 13 nt, Human adenovirus C
cacggacgaggag

SEQ ID NO: 1549175 - RNA, 21 nt, Human adenovirus C
cgcgaccgugucuagcuugcu

SEQ ID NO: 1549176 - RNA, 16 nt, Human adenovirus C
cuauucugcugcaugu

SEQ ID NO: 1549177 - RNA, 23 nt, Human adenovirus C
gcacgaccgucagcggggucugg

SEQ ID NO: 1549178 - RNA, 22 nt, Human adenovirus C
uaacccugacgcguuccggcag

SEQ ID NO: 1549179 - RNA, 15 nt, Human adenovirus C
uggaaggggguggug

SEQ ID NO: 1549180 - RNA, 16 nt, Human adenovirus C
ugguuaugauucauca

SEQ ID NO: 1549181 - RNA, 17 nt, Human adenovirus C
cugucgagccaaacgcu

SEQ ID NO: 1549182 - RNA, 18 nt, Human adenovirus C
cagcggucacacagaagc

SEQ ID NO: 1549183 - RNA, 12 nt, Human adenovirus C
acugcugcugga

SEQ ID NO: 1549184 - RNA, 14 nt, Human adenovirus C
gccugugaugcugg

SEQ ID NO: 1549185 - RNA, 17 nt, Human adenovirus C
cgagggccgcuggcugc

SEQ ID NO: 1549186 - RNA, 12 nt, Human adenovirus C
accugggcggcg

SEQ ID NO: 1549187 - RNA, 18 nt, Human adenovirus C
ccaccaguuggaggagug

SEQ ID NO: 1549188 - RNA, 13 nt, Human adenovirus C
cagcgccaaggcu

SEQ ID NO: 1549189 - RNA, 17 nt, Human adenovirus C
gcgccgggcccggcacu

SEQ ID NO: 1549190 - RNA, 20 nt, Human adenovirus C
agaggagcugcugagccgcc

SEQ ID NO: 1549191 - RNA, 20 nt, Human adenovirus C
aaaccuucucuacgccaacu

SEQ ID NO: 1549192 - RNA, 14 nt, Human adenovirus C
cugggggcguacac

SEQ ID NO: 1549193 - RNA, 13 nt, Human adenovirus C
acagcacuggcaa

SEQ ID NO: 1549194 - RNA, 19 nt, Human adenovirus C
cucccgguaccauauaaac

SEQ ID NO: 1549195 - RNA, 21 nt, Human adenovirus C
ugccgcggugcaggcggccgc

SEQ ID NO: 1549196 - RNA, 17 nt, Human adenovirus C
ccccgucgaggcacccc

SEQ ID NO: 1549197 - RNA, 13 nt, Human adenovirus C
gcaccagccgcac

SEQ ID NO: 1549198 - RNA, 20 nt, Human adenovirus C
cucggcuaauauggccugcu

SEQ ID NO: 1549199 - RNA, 16 nt, Human adenovirus C
aucucgucgaagccgu

SEQ ID NO: 1549200 - RNA, 14 nt, Human adenovirus C
cgcagcagcagggc

SEQ ID NO: 1549201 - RNA, 13 nt, Human adenovirus C
ugcuugcuugcaa

SEQ ID NO: 1549202 - RNA, 22 nt, Human adenovirus C
gcucauggcgcagcuguuccuu

SEQ ID NO: 1549203 - RNA, 22 nt, Human adenovirus C
cuauuuauguaaauaauggaaa

SEQ ID NO: 1549204 - RNA, 20 nt, Human adenovirus C
cggugacgcgggcgggcccc

SEQ ID NO: 1549205 - RNA, 17 nt, Human adenovirus C
aacucaacuaaugcaaa

SEQ ID NO: 1549206 - RNA, 16 nt, Human adenovirus C
cuucagcgcgcgcugc

SEQ ID NO: 1549207 - RNA, 17 nt, Human adenovirus C
gcuacaacaaacagagc

SEQ ID NO: 1549208 - RNA, 23 nt, Human adenovirus C
gccaacuacaauauuggcuacca

SEQ ID NO: 1549209 - RNA, 14 nt, Human adenovirus C
agcaggagcgcugg

SEQ ID NO: 1549210 - RNA, 20 nt, Human adenovirus C
ggacguaaaggcuaaacccu

SEQ ID NO: 1549211 - RNA, 20 nt, Human adenovirus C
cauacccgccaacgccacca

SEQ ID NO: 1549212 - RNA, 16 nt, Human adenovirus C
cgggagagggggcagg

SEQ ID NO: 1549213 - RNA, 22 nt, Human adenovirus C
ugcuauggaucuuaugccaggc

SEQ ID NO: 1549214 - RNA, 14 nt, Human adenovirus C
gaagaucuggaagg

SEQ ID NO: 1549215 - RNA, 14 nt, Human adenovirus C
ggcaacgaccgccu

SEQ ID NO: 1549216 - RNA, 22 nt, Human adenovirus C
ugaaguuuucacuccacaggcu

SEQ ID NO: 1549217 - RNA, 16 nt, Human adenovirus C
gugcgcggcaccagcg

SEQ ID NO: 1549218 - RNA, 18 nt, Human adenovirus C
aaccuuuggacaccuccc

SEQ ID NO: 1549219 - RNA, 17 nt, Human adenovirus C
cuucagaaacuuccagc

SEQ ID NO: 1549220 - RNA, 23 nt, Human adenovirus C
augggacuugcggcuggagcugc

SEQ ID NO: 1549221 - RNA, 15 nt, Human adenovirus C
uccagacgggccagg

SEQ ID NO: 1549222 - RNA, 20 nt, Human adenovirus C
augaaugugagguuuacugg

SEQ ID NO: 1549223 - RNA, 20 nt, Human adenovirus C
cugaggccgaggcagcggca

SEQ ID NO: 1549224 - RNA, 17 nt, Human adenovirus C
uggcuaccccuucgaug

SEQ ID NO: 1549225 - RNA, 16 nt, Human adenovirus C
uugcgucucuggcccc

SEQ ID NO: 1549226 - RNA, 22 nt, Human adenovirus C
gcuagcuuuuuuggccacuggc

SEQ ID NO: 1549227 - RNA, 11 nt, Human adenovirus C
cgcggagcccg

SEQ ID NO: 1549228 - RNA, 13 nt, Human adenovirus C
gggaacaacccau

SEQ ID NO: 1549229 - RNA, 15 nt, Human adenovirus C
uacggauuugucacc

SEQ ID NO: 1549230 - RNA, 18 nt, Human adenovirus C
ugaggcugguccugcugg

SEQ ID NO: 1549231 - RNA, 15 nt, Human adenovirus C
gaugaagaugaagaa

SEQ ID NO: 1549232 - RNA, 20 nt, Human adenovirus C
cuauggccccccgaagaagg

SEQ ID NO: 1549233 - RNA, 20 nt, Human adenovirus C
uggaguuaccagccacaaau

SEQ ID NO: 1549234 - RNA, 22 nt, Human adenovirus C
cacucucgcaaggccuggccag

SEQ ID NO: 1549235 - RNA, 15 nt, Human adenovirus C
uggcugcucgagggg

SEQ ID NO: 1549236 - RNA, 18 nt, Human adenovirus C
gcccugcgcgucggccag

SEQ ID NO: 1549237 - RNA, 19 nt, Human adenovirus C
acauugcuuucagggacaa

SEQ ID NO: 1549238 - RNA, 23 nt, Human adenovirus C
agcugccgucaucccugagcagg

SEQ ID NO: 1549239 - RNA, 17 nt, Human adenovirus C
agaaaccgggccuccaa

SEQ ID NO: 1549240 - RNA, 11 nt, Human adenovirus C
ccauccagaca

SEQ ID NO: 1549241 - RNA, 17 nt, Human adenovirus C
gcggcuggcgguagagg

SEQ ID NO: 1549242 - RNA, 20 nt, Human adenovirus C
gaguuuaaggaaccagcuug

SEQ ID NO: 1549243 - RNA, 15 nt, Human adenovirus C
gaaaagcgcggccua

SEQ ID NO: 1549244 - RNA, 18 nt, Human adenovirus C
ccauuaugagcaaggaaa

SEQ ID NO: 1549245 - RNA, 19 nt, Human adenovirus C
auacugggacagucaggca

SEQ ID NO: 1549246 - RNA, 17 nt, Human adenovirus C
cgcgucggccagguagc

SEQ ID NO: 1549247 - RNA, 14 nt, Human adenovirus C
cgcuccuaacuccu

SEQ ID NO: 1549248 - RNA, 23 nt, Human adenovirus C
gaaggggguggugugucgcccca

SEQ ID NO: 1549249 - RNA, 21 nt, Human adenovirus C
gcccuggcuggcacgggcagc

SEQ ID NO: 1549250 - RNA, 12 nt, Human adenovirus C
gggccggggugc

SEQ ID NO: 1549251 - RNA, 13 nt, Human adenovirus C
agugggcaggcag

SEQ ID NO: 1549252 - RNA, 19 nt, Human adenovirus C
acgaagccuuccauccaga

SEQ ID NO: 1549253 - RNA, 20 nt, Human adenovirus C
caacgcgcgccuagccgugc

SEQ ID NO: 1549254 - RNA, 16 nt, Human adenovirus C
aaucaaaauaaaaagu

SEQ ID NO: 1549255 - RNA, 14 nt, Human adenovirus C
auugcuucuucccc

SEQ ID NO: 1549256 - RNA, 18 nt, Human adenovirus C
cagggucaugucuuucca

SEQ ID NO: 1549257 - RNA, 18 nt, Human adenovirus C
ccgcgguugugcagggug

SEQ ID NO: 1549258 - RNA, 17 nt, Human adenovirus C
aagucuaagcagccgcc

SEQ ID NO: 1549259 - RNA, 19 nt, Human adenovirus C
gggauuugaggugcccgag

SEQ ID NO: 1549260 - RNA, 15 nt, Human adenovirus C
gcagcagggcaaccu

SEQ ID NO: 1549261 - RNA, 17 nt, Human adenovirus C
aacccagcuucagcuug

SEQ ID NO: 1549262 - RNA, 16 nt, Human adenovirus C
guaccugccagacaag

SEQ ID NO: 1549263 - RNA, 17 nt, Human adenovirus C
gucgccgccagaggagc

SEQ ID NO: 1549264 - RNA, 21 nt, Human adenovirus C
augagcagcuggcgcgcuggc

SEQ ID NO: 1549265 - RNA, 13 nt, Human adenovirus C
auaacaacucagg

SEQ ID NO: 1549266 - RNA, 12 nt, Human adenovirus C
gcuaccucuccg

SEQ ID NO: 1549267 - RNA, 17 nt, Human adenovirus C
cccgcggcgccgggccc

SEQ ID NO: 1549268 - RNA, 17 nt, Human adenovirus C
gccaaccaggcagugca

SEQ ID NO: 1549269 - RNA, 17 nt, Human adenovirus C
acgagcggccgccgcag

SEQ ID NO: 1549270 - RNA, 20 nt, Human adenovirus C
acuuuuagcuuaaugaccag

SEQ ID NO: 1549271 - RNA, 21 nt, Human adenovirus C
ugccgccaacgcgccuaccac

SEQ ID NO: 1549272 - RNA, 13 nt, Human adenovirus C
gcgagauugagcu

SEQ ID NO: 1549273 - RNA, 16 nt, Human adenovirus C
ugucguuucucagcag

SEQ ID NO: 1549274 - RNA, 16 nt, Human adenovirus C
cgagcggccgccgcag

SEQ ID NO: 1549275 - RNA, 20 nt, Human adenovirus C
acgcgcgcgcagccuccaug

SEQ ID NO: 1549276 - RNA, 12 nt, Human adenovirus C
ccaggcgccccc

SEQ ID NO: 1549277 - RNA, 14 nt, Human adenovirus C
cgcggcugacgcgg

SEQ ID NO: 1549278 - RNA, 20 nt, Human adenovirus C
gacuauuuuuuccagaccag

SEQ ID NO: 1549279 - RNA, 18 nt, Human adenovirus C
ccagcccaugagccggca

SEQ ID NO: 1549280 - RNA, 16 nt, Human adenovirus C
gcagagcgacugcgcc

SEQ ID NO: 1549281 - RNA, 16 nt, Human adenovirus C
gcucagucugggcaag

SEQ ID NO: 1549282 - RNA, 16 nt, Human adenovirus C
ccugggcggcgagcac

SEQ ID NO: 1549283 - RNA, 17 nt, Human adenovirus C
cggcacuuaaccuaccc

SEQ ID NO: 1549284 - RNA, 14 nt, Human adenovirus C
cgccccaggcuggg

SEQ ID NO: 1549285 - RNA, 20 nt, Human adenovirus C
gcccgcuugcaagcagugca

SEQ ID NO: 1549286 - RNA, 20 nt, Human adenovirus C
ggccaagaacaagagcugaa

SEQ ID NO: 1549287 - RNA, 13 nt, Human adenovirus C
ccuccuccagaag

SEQ ID NO: 1549288 - RNA, 24 nt, Human adenovirus C
cgcagacacgaucggcaggcucag

SEQ ID NO: 1549289 - RNA, 14 nt, Human adenovirus C
uaugauucaucaaa

SEQ ID NO: 1549290 - RNA, 12 nt, Human adenovirus C
gucggcgccgcg

SEQ ID NO: 1549291 - RNA, 14 nt, Human adenovirus C
gcguguggcagcaa

SEQ ID NO: 1549292 - RNA, 18 nt, Human adenovirus C
uccucggagccgcgcucc

SEQ ID NO: 1549293 - RNA, 23 nt, Human adenovirus C
guggugaaaguagaagucccugc

SEQ ID NO: 1549294 - RNA, 21 nt, Human adenovirus C
cagagcgauuugucagaagcc

SEQ ID NO: 1549295 - RNA, 21 nt, Human adenovirus C
cuccugcgccguagcgccauu

SEQ ID NO: 1549296 - RNA, 17 nt, Human adenovirus C
gcugucauaccacugca

SEQ ID NO: 1549297 - RNA, 22 nt, Human adenovirus C
acgcccagcguggcgcuggaca

SEQ ID NO: 1549298 - RNA, 16 nt, Human adenovirus C
gacacgggcagccugg

SEQ ID NO: 1549299 - RNA, 17 nt, Human adenovirus C
cgucgcgccgcaccgcg

SEQ ID NO: 1549300 - RNA, 23 nt, Human adenovirus C
uccucauguucuugucccuccgc

SEQ ID NO: 1549301 - RNA, 15 nt, Human adenovirus C
ggcgcagcgugagcg

SEQ ID NO: 1549302 - RNA, 14 nt, Human adenovirus C
cucucugacccacg

SEQ ID NO: 1549303 - RNA, 12 nt, Human adenovirus C
cgaucgcacccu

SEQ ID NO: 1549304 - RNA, 24 nt, Human adenovirus C
acaguaugauuaaaugagacauga

SEQ ID NO: 1549305 - RNA, 22 nt, Human adenovirus C
caccaugcgcgagggacaggcu

SEQ ID NO: 1549306 - RNA, 22 nt, Human adenovirus C
gaugcgggccaugagcugcgag

SEQ ID NO: 1549307 - RNA, 16 nt, Human adenovirus C
aucgcucaguaccaac

SEQ ID NO: 1549308 - RNA, 17 nt, Human adenovirus C
uguccagcuuauucagc

SEQ ID NO: 1549309 - RNA, 18 nt, Human adenovirus C
augcgagcccaacccgcg

SEQ ID NO: 1549310 - RNA, 17 nt, Human adenovirus C
ccccuuugaguucgcca

SEQ ID NO: 1549311 - RNA, 12 nt, Human adenovirus C
aucauugaaaac

SEQ ID NO: 1549312 - RNA, 16 nt, Human adenovirus C
ggugggugagcgcgga

SEQ ID NO: 1549313 - RNA, 17 nt, Human adenovirus C
agagcauaguggugcag

SEQ ID NO: 1549314 - RNA, 20 nt, Human adenovirus C
acagggcccagucugcaaga

SEQ ID NO: 1549315 - RNA, 12 nt, Human adenovirus C
uccugccaggcu

SEQ ID NO: 1549316 - RNA, 20 nt, Human adenovirus C
cuuugccacacgggcggagg

SEQ ID NO: 1549317 - RNA, 22 nt, Human adenovirus C
cgcccucccguagaggagccuc

SEQ ID NO: 1549318 - RNA, 20 nt, Human adenovirus C
acgccucggaguaccugagc

SEQ ID NO: 1549319 - RNA, 15 nt, Human adenovirus C
gugcgcaguacuggc

SEQ ID NO: 1549320 - RNA, 13 nt, Human adenovirus C
ucaacaacagcug

SEQ ID NO: 1549321 - RNA, 22 nt, Human adenovirus C
cuuggcgcgcagcuugcccuug

SEQ ID NO: 1549322 - RNA, 20 nt, Human adenovirus C
gcuacaggggccucuucuuc

SEQ ID NO: 1549323 - RNA, 16 nt, Human adenovirus C
cgugcgcaguacuggc

SEQ ID NO: 1549324 - RNA, 13 nt, Human adenovirus C
cugacagggccca

SEQ ID NO: 1549325 - RNA, 19 nt, Human adenovirus C
cgggcccuugcuucccagg

SEQ ID NO: 1549326 - RNA, 13 nt, Human adenovirus C
ucucgauccagca

SEQ ID NO: 1549327 - RNA, 20 nt, Human adenovirus C
acugcuaccuucugcagcua

SEQ ID NO: 1549328 - RNA, 19 nt, Human adenovirus C
gacuuuguaagcgcgcugg

SEQ ID NO: 1549329 - RNA, 19 nt, Human adenovirus C
uggcgggcgcucgggcuug

SEQ ID NO: 1549330 - RNA, 16 nt, Human adenovirus C
cuacgaaaaaaccacu

SEQ ID NO: 1549331 - RNA, 20 nt, Human adenovirus C
cuccguggccgcgcaccugg

SEQ ID NO: 1549332 - RNA, 13 nt, Human adenovirus C
gcccgagggcaac

SEQ ID NO: 1549333 - RNA, 12 nt, Human adenovirus C
gaacccccgcgg

SEQ ID NO: 1549334 - RNA, 15 nt, Human adenovirus C
cgcggcccgacaggg

SEQ ID NO: 1549335 - RNA, 19 nt, Human adenovirus C
aaacccaaagucaaacugc

SEQ ID NO: 1549336 - RNA, 17 nt, Human adenovirus C
auugcauccguggccuu

SEQ ID NO: 1549337 - RNA, 17 nt, Human adenovirus C
cugggggcguacacugg

SEQ ID NO: 1549338 - RNA, 12 nt, Human adenovirus C
aggcgccgccgg

SEQ ID NO: 1549339 - RNA, 20 nt, Human adenovirus C
ucccgcggcgacaggucagg

SEQ ID NO: 1549340 - RNA, 17 nt, Human adenovirus C
aguuaagagagcugcag

SEQ ID NO: 1549341 - RNA, 21 nt, Human adenovirus C
uaacgugucguaugugucaug

SEQ ID NO: 1549342 - RNA, 14 nt, Human adenovirus C
aacaaguuuagaaa

SEQ ID NO: 1549343 - RNA, 16 nt, Human adenovirus C
cuucgcggucuuucca

SEQ ID NO: 1549344 - RNA, 22 nt, Human adenovirus C
gacaugcagggcacccuccccu

SEQ ID NO: 1549345 - RNA, 14 nt, Human adenovirus C
gcaauaacacaggc

SEQ ID NO: 1549346 - RNA, 15 nt, Human adenovirus C
agguacgccugcagg

SEQ ID NO: 1549347 - RNA, 15 nt, Human adenovirus C
gcgcgagggacaggc

SEQ ID NO: 1549348 - RNA, 22 nt, Human adenovirus C
gccauuagcauuugcagguggu

SEQ ID NO: 1549349 - RNA, 14 nt, Human adenovirus C
gaggaagaugaaga

SEQ ID NO: 1549350 - RNA, 21 nt, Human adenovirus C
gcugcaaacuuucuccaaagu

SEQ ID NO: 1549351 - RNA, 23 nt, Human adenovirus C
cugaaaauaaaaaacaggucucu

SEQ ID NO: 1549352 - RNA, 16 nt, Human adenovirus C
ggugacaaccgugugc

SEQ ID NO: 1549353 - RNA, 13 nt, Human adenovirus C
ugggcaggcagaa

SEQ ID NO: 1549354 - RNA, 17 nt, Human adenovirus C
acuagauugcaagaaaa

SEQ ID NO: 1549355 - RNA, 10 nt, Human adenovirus C
ccagcggcgg

SEQ ID NO: 1549356 - RNA, 19 nt, Human adenovirus C
guuuguaccuauugucagc

SEQ ID NO: 1549357 - RNA, 20 nt, Human adenovirus C
gccuggcggguuuggcuggu

SEQ ID NO: 1549358 - RNA, 20 nt, Human adenovirus C
aucuucucagaauucuuuaa

SEQ ID NO: 1549359 - RNA, 17 nt, Human adenovirus C
agggcaacccaacaccu

SEQ ID NO: 1549360 - RNA, 22 nt, Human adenovirus C
uuccuaucaaccagaaccucaa

SEQ ID NO: 1549361 - RNA, 14 nt, Human adenovirus C
acacagaagcaaag

SEQ ID NO: 1549362 - RNA, 14 nt, Human adenovirus C
aagcuacaaggacc

SEQ ID NO: 1549363 - RNA, 22 nt, Human adenovirus C
gacacugcagcaggugcugccc

SEQ ID NO: 1549364 - RNA, 22 nt, Human adenovirus C
cuaacauaaacacacaauaaau

SEQ ID NO: 1549365 - RNA, 20 nt, Human adenovirus C
acgugcauacacuuccucag

SEQ ID NO: 1549366 - RNA, 21 nt, Human adenovirus C
cauccguggccuugcaggcgc

SEQ ID NO: 1549367 - RNA, 13 nt, Human adenovirus C
cuaucagcagccg

SEQ ID NO: 1549368 - RNA, 16 nt, Human adenovirus C
augauuuugaggaggc

SEQ ID NO: 1549369 - RNA, 17 nt, Human adenovirus C
aaagugguuuuguacag

SEQ ID NO: 1549370 - RNA, 17 nt, Human adenovirus C
agcuuguugaccagcuc

SEQ ID NO: 1549371 - RNA, 17 nt, Human adenovirus C
cgagcugcuucccaaag

SEQ ID NO: 1549372 - RNA, 15 nt, Human adenovirus C
ccgccgcagcagccg

SEQ ID NO: 1549373 - RNA, 16 nt, Human adenovirus C
uggcacaacacaggca

SEQ ID NO: 1549374 - RNA, 21 nt, Human adenovirus C
cucgcuccagggugugaagac

SEQ ID NO: 1549375 - RNA, 17 nt, Human adenovirus C
gccaccaguuggaggag

SEQ ID NO: 1549376 - RNA, 14 nt, Human adenovirus C
ggaccucugcacuc

SEQ ID NO: 1549377 - RNA, 17 nt, Human adenovirus C
uauggcccucaccugcc

SEQ ID NO: 1549378 - RNA, 19 nt, Human adenovirus C
gacuacuugcaucgcgcgg

SEQ ID NO: 1549379 - RNA, 15 nt, Human adenovirus C
ccgggaggcggucga

SEQ ID NO: 1549380 - RNA, 13 nt, Human adenovirus C
ugcuuacucccaa

SEQ ID NO: 1549381 - RNA, 21 nt, Human adenovirus C
ugcugcacgcaaccgcgccca

SEQ ID NO: 1549382 - RNA, 23 nt, Human adenovirus C
ggccaaucaagcagguggcaccg

SEQ ID NO: 1549383 - RNA, 22 nt, Human adenovirus C
gacgcggcgguugaucuccuga

SEQ ID NO: 1549384 - RNA, 13 nt, Human adenovirus C
gggggcugccgug

SEQ ID NO: 1549385 - RNA, 15 nt, Human adenovirus C
cgcagcagcagggca

SEQ ID NO: 1549386 - RNA, 14 nt, Human adenovirus C
cuacauuccagaaa

SEQ ID NO: 1549387 - RNA, 14 nt, Human adenovirus C
cuaccaccuucccc

SEQ ID NO: 1549388 - RNA, 15 nt, Human adenovirus C
augaagaagaggaag

SEQ ID NO: 1549389 - RNA, 14 nt, Human adenovirus C
augcgccacuggca

SEQ ID NO: 1549390 - RNA, 18 nt, Human adenovirus C
agccaguggcaacuggca

SEQ ID NO: 1549391 - RNA, 17 nt, Human adenovirus C
auaaacauuccagcacc

SEQ ID NO: 1549392 - RNA, 14 nt, Human adenovirus C
ggagcugcugagcc

SEQ ID NO: 1549393 - RNA, 17 nt, Human adenovirus C
ggcgggcgcucgggcuu

SEQ ID NO: 1549394 - RNA, 14 nt, Human adenovirus C
cuccuuugcacucc

SEQ ID NO: 1549395 - RNA, 12 nt, Human adenovirus C
ggaggggggaca

SEQ ID NO: 1549396 - RNA, 14 nt, Human adenovirus C
aggccugcagaccg

SEQ ID NO: 1549397 - RNA, 21 nt, Human adenovirus C
auuuccgugcgcaggguggcu

SEQ ID NO: 1549398 - RNA, 14 nt, Human adenovirus C
cagcgccugcauga

SEQ ID NO: 1549399 - RNA, 23 nt, Human adenovirus C
cacuggucuugucaugccugggg

SEQ ID NO: 1549400 - RNA, 15 nt, Human adenovirus C
acaauaccugugugg

SEQ ID NO: 1549401 - RNA, 13 nt, Human adenovirus C
gaugcgaguagcc

SEQ ID NO: 1549402 - RNA, 16 nt, Human adenovirus C
gaaaauucuaaagcua

SEQ ID NO: 1549403 - RNA, 17 nt, Human adenovirus C
cuacgaacgccaccugu

SEQ ID NO: 1549404 - RNA, 14 nt, Human adenovirus C
gccagguagcauuu

SEQ ID NO: 1549405 - RNA, 17 nt, Human adenovirus C
acccggcgccagcaccu

SEQ ID NO: 1549406 - RNA, 22 nt, Human adenovirus C
ugcugacccggagaugcagcgc

SEQ ID NO: 1549407 - RNA, 20 nt, Human adenovirus C
auuucugccagcgccugcac

SEQ ID NO: 1549408 - RNA, 21 nt, Human adenovirus C
ugaagacaugguuaaccuaca

SEQ ID NO: 1549409 - RNA, 11 nt, Human adenovirus C
gcccuggggcg

SEQ ID NO: 1549410 - RNA, 12 nt, Human adenovirus C
agauggccuggc

SEQ ID NO: 1549411 - RNA, 12 nt, Human adenovirus C
acaaagcagggg

SEQ ID NO: 1549412 - RNA, 15 nt, Human adenovirus C
cauccaccaccaucc

SEQ ID NO: 1549413 - RNA, 18 nt, Human adenovirus C
ggcgcugcagagccagcc

SEQ ID NO: 1549414 - RNA, 21 nt, Human adenovirus C
gcaggucugcacggaccagcg

SEQ ID NO: 1549415 - RNA, 17 nt, Human adenovirus C
accuuggggcgcgcugg

SEQ ID NO: 1549416 - RNA, 17 nt, Human adenovirus C
auggaaaccccagacac

SEQ ID NO: 1549417 - RNA, 21 nt, Human adenovirus C
gagcggggggcuucugaggcu

SEQ ID NO: 1549418 - RNA, 23 nt, Human adenovirus C
caggcuccuuugucuggagaaac

SEQ ID NO: 1549419 - RNA, 15 nt, Human adenovirus C
gcagcaaggccugga

SEQ ID NO: 1549420 - RNA, 21 nt, Human adenovirus C
ccaacuacaauauuggcuacc

SEQ ID NO: 1549421 - RNA, 13 nt, Human adenovirus C
gcgagugguggcu

SEQ ID NO: 1549422 - RNA, 13 nt, Human adenovirus C
auggaaauuaaaa

SEQ ID NO: 1549423 - RNA, 16 nt, Human adenovirus C
ccccgggcagcaggcg

SEQ ID NO: 1549424 - RNA, 21 nt, Human adenovirus C
ccucguaggugagcuccucag

SEQ ID NO: 1549425 - RNA, 19 nt, Human adenovirus C
ggauuacaagcuccucccg

SEQ ID NO: 1549426 - RNA, 15 nt, Human adenovirus C
agcauaguggugcag

SEQ ID NO: 1549427 - RNA, 12 nt, Human adenovirus C
gacggcggccug

SEQ ID NO: 1549428 - RNA, 21 nt, Human adenovirus C
uuagugcuccacuuaaacuca

SEQ ID NO: 1549429 - RNA, 19 nt, Human adenovirus C
gcacgcuggccagcacgcu

SEQ ID NO: 1549430 - RNA, 14 nt, Human adenovirus C
aucaggguccagag

SEQ ID NO: 1549431 - RNA, 14 nt, Human adenovirus C
ccuacugcaccggc

SEQ ID NO: 1549432 - RNA, 21 nt, Human adenovirus C
caacggacuaucgcaacacca

SEQ ID NO: 1549433 - RNA, 13 nt, Human adenovirus C
cagcagcacaggc

SEQ ID NO: 1549434 - RNA, 19 nt, Human adenovirus C
acucgcuccagggugugaa

SEQ ID NO: 1549435 - RNA, 24 nt, Human adenovirus C
cacugcuaccuucugcagcuagcc

SEQ ID NO: 1549436 - RNA, 22 nt, Human adenovirus C
ggaugaagaagaggaagaugaa

SEQ ID NO: 1549437 - RNA, 15 nt, Human adenovirus C
accgcucccuggucu

SEQ ID NO: 1549438 - RNA, 13 nt, Human adenovirus C
cugcgaggacagg

SEQ ID NO: 1549439 - RNA, 17 nt, Human adenovirus C
gcuuauuacagcgcuug

SEQ ID NO: 1549440 - RNA, 12 nt, Human adenovirus C
gccagcgacugg

SEQ ID NO: 1549441 - RNA, 21 nt, Human adenovirus C
cagcaggaggaagccaggcgg

SEQ ID NO: 1549442 - RNA, 22 nt, Human adenovirus C
ucgcccugcgcgucggccaggu

SEQ ID NO: 1549443 - RNA, 19 nt, Human adenovirus C
gcgcucgucgggcaccagg

SEQ ID NO: 1549444 - RNA, 15 nt, Human adenovirus C
auuggccggacaggc

SEQ ID NO: 1549445 - RNA, 15 nt, Human adenovirus C
gacaccuucaacccc

SEQ ID NO: 1549446 - RNA, 22 nt, Human adenovirus C
ccgccaacgccaccaacgugcc

SEQ ID NO: 1549447 - RNA, 17 nt, Human adenovirus C
gcugguccugcuggugc

SEQ ID NO: 1549448 - RNA, 10 nt, Human adenovirus C
caucgcgccu

SEQ ID NO: 1549449 - RNA, 18 nt, Human adenovirus C
cuauguggaaucaggcug

SEQ ID NO: 1549450 - RNA, 20 nt, Human adenovirus C
ccgggcugcgcgcuggccag

SEQ ID NO: 1549451 - RNA, 22 nt, Human adenovirus C
cuucauucaguucauugacugg

SEQ ID NO: 1549452 - RNA, 13 nt, Human adenovirus C
augcgggccuccg

SEQ ID NO: 1549453 - RNA, 13 nt, Human adenovirus C
agcgccugcacug

SEQ ID NO: 1549454 - RNA, 22 nt, Human adenovirus C
gcaagcugauugccaggggcag

SEQ ID NO: 1549455 - RNA, 22 nt, Human adenovirus C
uuccaggcgcggcggcugcugc

SEQ ID NO: 1549456 - RNA, 15 nt, Human adenovirus C
cggucgcauuccccu

SEQ ID NO: 1549457 - RNA, 16 nt, Human adenovirus C
caggcggcuauuacca

SEQ ID NO: 1549458 - RNA, 20 nt, Human adenovirus C
ucacuugcugaagaccauuc

SEQ ID NO: 1549459 - RNA, 15 nt, Human adenovirus C
gcaugcuuuugagcg

SEQ ID NO: 1549460 - RNA, 16 nt, Human adenovirus C
gccuuccggagcgagg

SEQ ID NO: 1549461 - RNA, 15 nt, Human adenovirus C
cgccguuagcccaag

SEQ ID NO: 1549462 - RNA, 22 nt, Human adenovirus C
guccuuggguccggccugcuga

SEQ ID NO: 1549463 - RNA, 14 nt, Human adenovirus C
acuggacucuuccu

SEQ ID NO: 1549464 - RNA, 17 nt, Human adenovirus C
cuaggucacuugcugac

SEQ ID NO: 1549465 - RNA, 18 nt, Human adenovirus C
agaugccgcggugcaggc

SEQ ID NO: 1549466 - RNA, 20 nt, Human adenovirus C
agcagcagggcaaccugggc

SEQ ID NO: 1549467 - RNA, 17 nt, Human adenovirus C
gcguuucagccccccgg

SEQ ID NO: 1549468 - RNA, 17 nt, Human adenovirus C
ggucgcccgggcagggu

SEQ ID NO: 1549469 - RNA, 13 nt, Human adenovirus C
guaguccaggguu

SEQ ID NO: 1549470 - RNA, 14 nt, Human adenovirus C
uugagccuggcuga

SEQ ID NO: 1549471 - RNA, 14 nt, Human adenovirus C
uuccaccgcucugc

SEQ ID NO: 1549472 - RNA, 17 nt, Human adenovirus C
gaucaggcuacuaagaa

SEQ ID NO: 1549473 - RNA, 15 nt, Human adenovirus C
cagcugguaccuugc

SEQ ID NO: 1549474 - RNA, 19 nt, Human adenovirus C
ccccggcuaucguggcuac

SEQ ID NO: 1549475 - RNA, 13 nt, Human adenovirus C
cgcggcggcugcu

SEQ ID NO: 1549476 - RNA, 19 nt, Human adenovirus C
augcaucuaaaagcgguga

SEQ ID NO: 1549477 - RNA, 22 nt, Human adenovirus C
agacagcuaugauccagauguu

SEQ ID NO: 1549478 - RNA, 22 nt, Human adenovirus C
acucgcgccuguugcugcugcu

SEQ ID NO: 1549479 - RNA, 13 nt, Human adenovirus C
ccucacucucuuc

SEQ ID NO: 1549480 - RNA, 16 nt, Human adenovirus C
aagcaggggccaagaa

SEQ ID NO: 1549481 - RNA, 14 nt, Human adenovirus C
gucuggagcucccg

SEQ ID NO: 1549482 - RNA, 16 nt, Human adenovirus C
gaccugcucggacggc

SEQ ID NO: 1549483 - RNA, 17 nt, Human adenovirus C
uugacaacucaggggcc

SEQ ID NO: 1549484 - RNA, 19 nt, Human adenovirus C
cuguccacgaucaccucug

SEQ ID NO: 1549485 - RNA, 23 nt, Human adenovirus C
ugcaaguagcacaaaacuccgau

SEQ ID NO: 1549486 - RNA, 19 nt, Human adenovirus C
ccaucaacaaagcccgcca

SEQ ID NO: 1549487 - RNA, 20 nt, Human adenovirus C
gccugaagauggcaugugag

SEQ ID NO: 1549488 - RNA, 15 nt, Human adenovirus C
cgcggcggcugcugc

SEQ ID NO: 1549489 - RNA, 15 nt, Human adenovirus C
aaaaucguaaaacuu

SEQ ID NO: 1549490 - RNA, 22 nt, Human adenovirus C
cgggcggcaugcgucgugcgca

SEQ ID NO: 1549491 - RNA, 15 nt, Human adenovirus C
cagccgcaggccaac

SEQ ID NO: 1549492 - RNA, 15 nt, Human adenovirus C
cuuacuguaacugca

SEQ ID NO: 1549493 - RNA, 21 nt, Human adenovirus C
ccgacacgguuaacuccuccu

SEQ ID NO: 1549494 - RNA, 14 nt, Human adenovirus C
uaucagcagccgcg

SEQ ID NO: 1549495 - RNA, 22 nt, Human adenovirus C
agaccaguagacaaggccugca

SEQ ID NO: 1549496 - RNA, 12 nt, Human adenovirus C
cgaagaaaagcg

SEQ ID NO: 1549497 - RNA, 13 nt, Human adenovirus C
ucgagaaggagga

SEQ ID NO: 1549498 - RNA, 17 nt, Human adenovirus C
gagcgcaggguuugguu

SEQ ID NO: 1549499 - RNA, 15 nt, Human adenovirus C
caugcagggcacccu

SEQ ID NO: 1549500 - RNA, 18 nt, Human adenovirus C
agcugcagcugccgccgc

SEQ ID NO: 1549501 - RNA, 15 nt, Human adenovirus C
gcccuugcuucccag

SEQ ID NO: 1549502 - RNA, 20 nt, Human adenovirus C
gggucugccagacuucacca

SEQ ID NO: 1549503 - RNA, 18 nt, Human adenovirus C
cgcucgagaucaggcuac

SEQ ID NO: 1549504 - RNA, 19 nt, Human adenovirus C
gguccgugugcaccagccg

SEQ ID NO: 1549505 - RNA, 22 nt, Human adenovirus C
gcccagcaauaacacaggcugg

SEQ ID NO: 1549506 - RNA, 23 nt, Human adenovirus C
accgugugcuugauauggcuucc

SEQ ID NO: 1549507 - RNA, 16 nt, Human adenovirus C
gggacacauaccuagg

SEQ ID NO: 1549508 - RNA, 16 nt, Human adenovirus C
ccugucgucagcgcca

SEQ ID NO: 1549509 - RNA, 16 nt, Human adenovirus C
agacaccuucaacccc

SEQ ID NO: 1549510 - RNA, 14 nt, Human adenovirus C
cucccacgcagaca

SEQ ID NO: 1549511 - RNA, 15 nt, Human adenovirus C
aaccuaaaugccaac

SEQ ID NO: 1549512 - RNA, 16 nt, Human adenovirus C
gcaguaguccaggguu

SEQ ID NO: 1549513 - RNA, 14 nt, Human adenovirus C
cagcagcgcacccu

SEQ ID NO: 1549514 - RNA, 16 nt, Human adenovirus C
gcgaggaugcgagccg

SEQ ID NO: 1549515 - RNA, 21 nt, Human adenovirus C
agcugauugccaggggcaggc

SEQ ID NO: 1549516 - RNA, 20 nt, Human adenovirus C
cuaaugcggcaggagggaga

SEQ ID NO: 1549517 - RNA, 21 nt, Human adenovirus C
gagggcuuuaggaucaccuac

SEQ ID NO: 1549518 - RNA, 12 nt, Human adenovirus C
ugcaacccgcgg

SEQ ID NO: 1549519 - RNA, 12 nt, Human adenovirus C
cgcgcuggagca

SEQ ID NO: 1549520 - RNA, 14 nt, Human adenovirus C
gcuguugcccgugc

SEQ ID NO: 1549521 - RNA, 16 nt, Human adenovirus C
gcggcauaaggacaug

SEQ ID NO: 1549522 - RNA, 21 nt, Human adenovirus C
gaucuccugaaucuggcgccu

SEQ ID NO: 1549523 - RNA, 21 nt, Human adenovirus C
cacgguuaacuccuccuccag

SEQ ID NO: 1549524 - RNA, 20 nt, Human adenovirus C
guucaggaauucugcccgcc

SEQ ID NO: 1549525 - RNA, 20 nt, Human adenovirus C
ugggaacucaacuaaugcaa

SEQ ID NO: 1549526 - RNA, 16 nt, Human adenovirus C
uaacaugguucugcag

SEQ ID NO: 1549527 - RNA, 13 nt, Human adenovirus C
gugaaccaggaga

SEQ ID NO: 1549528 - RNA, 22 nt, Human adenovirus C
gcgcacucacagaccugggcca

SEQ ID NO: 1549529 - RNA, 20 nt, Human adenovirus C
cgaucacuuggugcuggccu

SEQ ID NO: 1549530 - RNA, 12 nt, Human adenovirus C
accugugcugcc

SEQ ID NO: 1549531 - RNA, 16 nt, Human adenovirus C
aggacccuggugcugc

SEQ ID NO: 1549532 - RNA, 21 nt, Human adenovirus C
acguccccgguugccucggcg

SEQ ID NO: 1549533 - RNA, 19 nt, Human adenovirus C
ugguccgugugcaccagcc

SEQ ID NO: 1549534 - RNA, 20 nt, Human adenovirus C
acuugcggcuggagcugccc

SEQ ID NO: 1549535 - RNA, 12 nt, Human adenovirus C
ccugcgccgugc

SEQ ID NO: 1549536 - RNA, 15 nt, Human adenovirus C
ggcaaccugggcucc

SEQ ID NO: 1549537 - RNA, 23 nt, Human adenovirus C
gcuucccaaaggcccccauccaa

SEQ ID NO: 1549538 - RNA, 14 nt, Human adenovirus C
augaccaugaagau

SEQ ID NO: 1549539 - RNA, 14 nt, Human adenovirus C
cguaugcgcaggag

SEQ ID NO: 1549540 - RNA, 22 nt, Human adenovirus C
gccuggcggguuuggcuggugg

SEQ ID NO: 1549541 - RNA, 15 nt, Human adenovirus C
ccacgugcgcacgcu

SEQ ID NO: 1549542 - RNA, 15 nt, Human adenovirus C
caccucgaccacugc

SEQ ID NO: 1549543 - RNA, 15 nt, Human adenovirus C
gccuguccucgagcg

SEQ ID NO: 1549544 - RNA, 16 nt, Human adenovirus C
cgcuguaccugccaga

SEQ ID NO: 1549545 - RNA, 19 nt, Human adenovirus C
auuugagucacacuaagau

SEQ ID NO: 1549546 - RNA, 18 nt, Human adenovirus C
cuucauucagccgccgca

SEQ ID NO: 1549547 - RNA, 15 nt, Human adenovirus C
cuagacugcuccuuc

SEQ ID NO: 1549548 - RNA, 19 nt, Human adenovirus C
aguuggcccgcugcccugg

SEQ ID NO: 1549549 - RNA, 13 nt, Human adenovirus C
cgcaaggccuggc

SEQ ID NO: 1549550 - RNA, 16 nt, Human adenovirus C
aacagcgcgcuaccac

SEQ ID NO: 1549551 - RNA, 24 nt, Human adenovirus C
guacucccucucaaaagcgggcau

SEQ ID NO: 1549552 - RNA, 13 nt, Human adenovirus C
gcggcgacagguc

SEQ ID NO: 1549553 - RNA, 21 nt, Human adenovirus C
gaggcguaggagucgcgcagc

SEQ ID NO: 1549554 - RNA, 12 nt, Human adenovirus C
ggaggcagcugg

SEQ ID NO: 1549555 - RNA, 24 nt, Human adenovirus C
cauccacaaggccgugagcgugag

SEQ ID NO: 1549556 - RNA, 23 nt, Human adenovirus C
aauccacagcggcggcagcagca

SEQ ID NO: 1549557 - RNA, 15 nt, Human adenovirus C
cccuauccugccgug

SEQ ID NO: 1549558 - RNA, 22 nt, Human adenovirus C
ccugcgucauuacccagggcca

SEQ ID NO: 1549559 - RNA, 15 nt, Human adenovirus C
cgcaguacuggcagc

SEQ ID NO: 1549560 - RNA, 20 nt, Human adenovirus C
cgcccuacuuccgcagccac

SEQ ID NO: 1549561 - RNA, 12 nt, Human adenovirus C
caagcgcaaaau

SEQ ID NO: 1549562 - RNA, 15 nt, Human adenovirus C
cagaagcugccgccc

SEQ ID NO: 1549563 - RNA, 17 nt, Human adenovirus C
gacugguuccuggugca

SEQ ID NO: 1549564 - RNA, 16 nt, Human adenovirus C
aggcugcuguccaacu

SEQ ID NO: 1549565 - RNA, 9 nt, Human adenovirus C
cccuugccg

SEQ ID NO: 1549566 - RNA, 15 nt, Human adenovirus C
caugucgcuguccag

SEQ ID NO: 1549567 - RNA, 16 nt, Human adenovirus C
ugcgcgagggacaggc

SEQ ID NO: 1549568 - RNA, 23 nt, Human adenovirus C
gcaacuuuccgguggugggcgcc

SEQ ID NO: 1549569 - RNA, 21 nt, Human adenovirus C
cagcugcgacuuaccgcagcc

SEQ ID NO: 1549570 - RNA, 19 nt, Human adenovirus C
gggcgagguauucagcuca

SEQ ID NO: 1549571 - RNA, 11 nt, Human adenovirus C
cuccagagggg

SEQ ID NO: 1549572 - RNA, 15 nt, Human adenovirus C
cuguagucaucgccu

SEQ ID NO: 1549573 - RNA, 24 nt, Human adenovirus C
cuuccacuuggucaggcaguagcu

SEQ ID NO: 1549574 - RNA, 19 nt, Human adenovirus C
acgugcccaucuccauccc

SEQ ID NO: 1549575 - RNA, 16 nt, Human adenovirus C
agcaaugacagcaccu

SEQ ID NO: 1549576 - RNA, 15 nt, Human adenovirus C
aagaugaagaagagg

SEQ ID NO: 1549577 - RNA, 16 nt, Human adenovirus C
gggcuagguccaggug

SEQ ID NO: 1549578 - RNA, 19 nt, Human adenovirus C
aggcggcggguacagugga

SEQ ID NO: 1549579 - RNA, 11 nt, Human adenovirus C
gccacugccac

SEQ ID NO: 1549580 - RNA, 22 nt, Human adenovirus C
agaccgucugaagacaccuuca

SEQ ID NO: 1549581 - RNA, 22 nt, Human adenovirus C
guacuggcagcggugcacgggc

SEQ ID NO: 1549582 - RNA, 20 nt, Human adenovirus C
ccgccagaggagcugcugag

SEQ ID NO: 1549583 - RNA, 24 nt, Human adenovirus C
gauggcgggcgcucgggcuuggga

SEQ ID NO: 1549584 - RNA, 20 nt, Human adenovirus C
ccacagcggcggcagcagca

SEQ ID NO: 1549585 - RNA, 18 nt, Human adenovirus C
ggcagucugcagcgcugc

SEQ ID NO: 1549586 - RNA, 13 nt, Human adenovirus C
guggcuguugaug

SEQ ID NO: 1549587 - RNA, 18 nt, Human adenovirus C
cuugagugcaugcagcgg

SEQ ID NO: 1549588 - RNA, 23 nt, Human adenovirus C
gagcucggcgacagugucgcgca

SEQ ID NO: 1549589 - RNA, 21 nt, Human adenovirus C
ucagcugggaagaaagcaggu

SEQ ID NO: 1549590 - RNA, 17 nt, Human adenovirus C
agcggcagcggcagcaa

SEQ ID NO: 1549591 - RNA, 22 nt, Human adenovirus C
ccaagcaguuccaggcgguccc

SEQ ID NO: 1549592 - RNA, 23 nt, Human adenovirus C
ucccugaccaaaugcgccagaag

SEQ ID NO: 1549593 - RNA, 16 nt, Human adenovirus C
ggagcgggagcggggu

SEQ ID NO: 1549594 - RNA, 13 nt, Human adenovirus C
caaacaacaugga

SEQ ID NO: 1549595 - RNA, 19 nt, Human adenovirus C
ccugcaaagggcccuggcu

SEQ ID NO: 1549596 - RNA, 17 nt, Human adenovirus C
uccauagagcagcugac

SEQ ID NO: 1549597 - RNA, 14 nt, Human adenovirus C
cuugagaggccugu

SEQ ID NO: 1549598 - RNA, 16 nt, Human adenovirus C
ccaguagacaaggccu

SEQ ID NO: 1549599 - RNA, 15 nt, Human adenovirus C
gcggugcaggcggcc

SEQ ID NO: 1549600 - RNA, 16 nt, Human adenovirus C
gcaggauuacaagccc

SEQ ID NO: 1549601 - RNA, 22 nt, Human adenovirus C
cggaccacucugagacgaaggc

SEQ ID NO: 1549602 - RNA, 13 nt, Human adenovirus C
ccccccaggucca

SEQ ID NO: 1549603 - RNA, 13 nt, Human adenovirus C
auacgucacuucc

SEQ ID NO: 1549604 - RNA, 23 nt, Human adenovirus C
ucuuacaugcacaucucgggcca

SEQ ID NO: 1549605 - RNA, 18 nt, Human adenovirus C
caucgcagcuaaaugccg

SEQ ID NO: 1549606 - RNA, 20 nt, Human adenovirus C
auuuaccccccacccuugcc

SEQ ID NO: 1549607 - RNA, 19 nt, Human adenovirus C
gccccgggcuggugcaguu

SEQ ID NO: 1549608 - RNA, 20 nt, Human adenovirus C
cggcgacaggucaggcggga

SEQ ID NO: 1549609 - RNA, 15 nt, Human adenovirus C
acaccgaacagcgcc

SEQ ID NO: 1549610 - RNA, 17 nt, Human adenovirus C
cggcagcagcaggagga

SEQ ID NO: 1549611 - RNA, 21 nt, Human adenovirus C
cgcggugcaggcggccgcugc

SEQ ID NO: 1549612 - RNA, 15 nt, Human adenovirus C
cacagaccugggcca

SEQ ID NO: 1549613 - RNA, 16 nt, Human adenovirus C
uaacuuggacauaaac

SEQ ID NO: 1549614 - RNA, 19 nt, Human adenovirus C
ggcaacccguuugcgcacc

SEQ ID NO: 1549615 - RNA, 11 nt, Human adenovirus C
ggggucacugc

SEQ ID NO: 1549616 - RNA, 14 nt, Human adenovirus C
gugacggcgcggcc

SEQ ID NO: 1549617 - RNA, 11 nt, Human adenovirus C
uccugccaggc

SEQ ID NO: 1549618 - RNA, 23 nt, Human adenovirus C
cccuaacaguggcaaccaccgcu

SEQ ID NO: 1549619 - RNA, 15 nt, Human adenovirus C
uaccgucaucucuac

SEQ ID NO: 1549620 - RNA, 16 nt, Human adenovirus C
aacaaugacuacagcc

SEQ ID NO: 1549621 - RNA, 23 nt, Human adenovirus C
gguaccgcgcggcgggcgguggg

SEQ ID NO: 1549622 - RNA, 20 nt, Human adenovirus C
caccuuuuguuccaccgcuc

SEQ ID NO: 1549623 - RNA, 13 nt, Human adenovirus C
guuggauguggac

SEQ ID NO: 1549624 - RNA, 18 nt, Human adenovirus C
ccuccgcuccucaggcgc

SEQ ID NO: 1549625 - RNA, 15 nt, Human adenovirus C
ucaucccugagcagg

SEQ ID NO: 1549626 - RNA, 21 nt, Human adenovirus C
cagcuggggcucgcuguggag

SEQ ID NO: 1549627 - RNA, 17 nt, Human adenovirus C
ccagcgccugcacugca

SEQ ID NO: 1549628 - RNA, 20 nt, Human adenovirus C
acagaacccacguggccauc

SEQ ID NO: 1549629 - RNA, 22 nt, Human adenovirus C
cgcggcgugcuggacagggggc

SEQ ID NO: 1549630 - RNA, 19 nt, Human adenovirus C
acuggccauuuccuucucc

SEQ ID NO: 1549631 - RNA, 16 nt, Human adenovirus C
ugcgucauuacccagg

SEQ ID NO: 1549632 - RNA, 22 nt, Human adenovirus C
gccaugggcguguggcagcaau

SEQ ID NO: 1549633 - RNA, 12 nt, Human adenovirus C
cugcaaacauca

SEQ ID NO: 1549634 - RNA, 16 nt, Human adenovirus C
ggcgcgcuggucucug

SEQ ID NO: 1549635 - RNA, 19 nt, Human adenovirus C
caggcuuuguuucuccaca

SEQ ID NO: 1549636 - RNA, 16 nt, Human adenovirus C
gucccuccgcacccac

SEQ ID NO: 1549637 - RNA, 23 nt, Human adenovirus C
cugagcgggggguaccugcugga

SEQ ID NO: 1549638 - RNA, 23 nt, Human adenovirus C
augcuauggaucuuaugccaggc

SEQ ID NO: 1549639 - RNA, 22 nt, Human adenovirus C
ucagggcgcgggcuagguccag

SEQ ID NO: 1549640 - RNA, 13 nt, Human adenovirus C
gccgccugcugca

SEQ ID NO: 1549641 - RNA, 16 nt, Human adenovirus C
cugcuugagcaggcca

SEQ ID NO: 1549642 - RNA, 18 nt, Human adenovirus C
ucuaugcccaggcuccuu

SEQ ID NO: 1549643 - RNA, 12 nt, Human adenovirus C
cgaccaggccgu

SEQ ID NO: 1549644 - RNA, 20 nt, Human adenovirus C
gcgaccgcgagcugaugcac

SEQ ID NO: 1549645 - RNA, 21 nt, Human adenovirus C
ggcacccaaaaagaagcugca

SEQ ID NO: 1549646 - RNA, 13 nt, Human adenovirus C
cgcgccgacacgg

SEQ ID NO: 1549647 - RNA, 11 nt, Human adenovirus C
auaccacugca

SEQ ID NO: 1549648 - RNA, 15 nt, Human adenovirus C
cugcgcgaggaggac

SEQ ID NO: 1549649 - RNA, 18 nt, Human adenovirus C
ugccaggaugcggggugg

SEQ ID NO: 1549650 - RNA, 11 nt, Human adenovirus C
ugucagccgcg

SEQ ID NO: 1549651 - RNA, 13 nt, Human adenovirus C
uaacagcacuggc

SEQ ID NO: 1549652 - RNA, 18 nt, Human adenovirus C
cagcgcgagcaggcagag

SEQ ID NO: 1549653 - RNA, 16 nt, Human adenovirus C
gcaucugcagcgccag

SEQ ID NO: 1549654 - RNA, 16 nt, Human adenovirus C
acgcccacgccgccac

SEQ ID NO: 1549655 - RNA, 15 nt, Human adenovirus C
gccccucgccauagc

SEQ ID NO: 1549656 - RNA, 13 nt, Human adenovirus C
aggccggccuggu

SEQ ID NO: 1549657 - RNA, 15 nt, Human adenovirus C
aguaccucuugguuu

SEQ ID NO: 1549658 - RNA, 21 nt, Human adenovirus C
ccacuucuuuuugucacuuga

SEQ ID NO: 1549659 - RNA, 14 nt, Human adenovirus C
uuucaccaaugcca

SEQ ID NO: 1549660 - RNA, 22 nt, Human adenovirus C
cgguagugggucuagcugcguc

SEQ ID NO: 1549661 - RNA, 13 nt, Human adenovirus C
acgcuggccagca

SEQ ID NO: 1549662 - RNA, 15 nt, Human adenovirus C
caccaggugcagacc

SEQ ID NO: 1549663 - RNA, 18 nt, Human adenovirus C
auuggacggucugaaacc

SEQ ID NO: 1549664 - RNA, 18 nt, Human adenovirus C
caguuggggccuccgccc

SEQ ID NO: 1549665 - RNA, 14 nt, Human adenovirus C
caugaagaucugga

SEQ ID NO: 1549666 - RNA, 23 nt, Human adenovirus C
cagcaauaacacaggcuggggcc

SEQ ID NO: 1549667 - RNA, 13 nt, Human adenovirus C
caaagcacacuga

SEQ ID NO: 1549668 - RNA, 19 nt, Human adenovirus C
cagagggcauggagacaca

SEQ ID NO: 1549669 - RNA, 19 nt, Human adenovirus C
cugcagguacgccugcagg

SEQ ID NO: 1549670 - RNA, 18 nt, Human adenovirus C
cuauccugccgugccaac

SEQ ID NO: 1549671 - RNA, 17 nt, Human adenovirus C
ggccuccgacugugguu

SEQ ID NO: 1549672 - RNA, 14 nt, Human adenovirus C
cgccgaaccaccac

SEQ ID NO: 1549673 - RNA, 22 nt, Human adenovirus C
guggacguaaaggcuaaacccu

SEQ ID NO: 1549674 - RNA, 20 nt, Human adenovirus C
gcaagcugauugccaggggc

SEQ ID NO: 1549675 - RNA, 19 nt, Human adenovirus C
ccauucaacuaacauaaac

SEQ ID NO: 1549676 - RNA, 20 nt, Human adenovirus C
uuggaaaaaaugaccgugga

SEQ ID NO: 1549677 - RNA, 21 nt, Human adenovirus C
caccggccgacgggcggccau

SEQ ID NO: 1549678 - RNA, 22 nt, Human adenovirus C
cggugaugccuuugaggguggc

SEQ ID NO: 1549679 - RNA, 22 nt, Human adenovirus C
caggucucugcgcucccucacc

SEQ ID NO: 1549680 - RNA, 23 nt, Human adenovirus C
cauggagucagucgagaaggagg

SEQ ID NO: 1549681 - RNA, 19 nt, Human adenovirus C
cuguggugagcuguuugau

SEQ ID NO: 1549682 - RNA, 19 nt, Human adenovirus C
gccuuuuacugcugcugga

SEQ ID NO: 1549683 - RNA, 22 nt, Human adenovirus C
ccaaucaaucagccucgccccc

SEQ ID NO: 1549684 - RNA, 18 nt, Human adenovirus C
ggcgccuucagcuggggc

SEQ ID NO: 1549685 - RNA, 13 nt, Human adenovirus C
aauauuggcuacc

SEQ ID NO: 1549686 - RNA, 20 nt, Human adenovirus C
caaaccccugacagaggaca

SEQ ID NO: 1549687 - RNA, 20 nt, Human adenovirus C
ggcuaagugggagggguagc

SEQ ID NO: 1549688 - RNA, 20 nt, Human adenovirus C
uacaugagcgcgggacccca

SEQ ID NO: 1549689 - RNA, 11 nt, Human adenovirus C
acgccaagaaa

SEQ ID NO: 1549690 - RNA, 12 nt, Human adenovirus C
cucgcuguggag

SEQ ID NO: 1549691 - RNA, 14 nt, Human adenovirus C
ggacacgggcagcc

SEQ ID NO: 1549692 - RNA, 23 nt, Human adenovirus C
cagcgugagcgcgcgcagcagca

SEQ ID NO: 1549693 - RNA, 15 nt, Human adenovirus C
cgacccggcacugcc

SEQ ID NO: 1549694 - RNA, 13 nt, Human adenovirus C
gcacuacugcccg

SEQ ID NO: 1549695 - RNA, 17 nt, Human adenovirus C
acaaggucaacgcuggu

SEQ ID NO: 1549696 - RNA, 13 nt, Human adenovirus C
ccuuuuacugcug

SEQ ID NO: 1549697 - RNA, 17 nt, Human adenovirus C
auuugaugcucaaacaa

SEQ ID NO: 1549698 - RNA, 18 nt, Human adenovirus C
accaugcgcgagggacag

SEQ ID NO: 1549699 - RNA, 13 nt, Human adenovirus C
aucggcaccagca

SEQ ID NO: 1549700 - RNA, 18 nt, Human adenovirus C
gcaccggcggcagcggca

SEQ ID NO: 1549701 - RNA, 12 nt, Human adenovirus C
agacaugaugca

SEQ ID NO: 1549702 - RNA, 15 nt, Human adenovirus C
uacagagacaggacu

SEQ ID NO: 1549703 - RNA, 13 nt, Human adenovirus C
agccggccuggac

SEQ ID NO: 1549704 - RNA, 14 nt, Human adenovirus C
auuugucacccuua

SEQ ID NO: 1549705 - RNA, 16 nt, Human adenovirus C
gacucgagacgccgcc

SEQ ID NO: 1549706 - RNA, 19 nt, Human adenovirus C
gcaaccuaaaggagcugca

SEQ ID NO: 1549707 - RNA, 22 nt, Human adenovirus C
gacaacgaggcauucagggaug

SEQ ID NO: 1549708 - RNA, 20 nt, Human adenovirus C
gaggcaagcacacagaccau

SEQ ID NO: 1549709 - RNA, 22 nt, Human adenovirus C
aggacgaugaguacgagccaga

SEQ ID NO: 1549710 - RNA, 23 nt, Human adenovirus C
agcgcauccacaaggccgugagc

SEQ ID NO: 1549711 - RNA, 24 nt, Human adenovirus C
cgccaaccgcgguugugcagggug

SEQ ID NO: 1549712 - RNA, 23 nt, Human adenovirus C
agguagcaccacugcagagcuuc

SEQ ID NO: 1549713 - RNA, 20 nt, Human adenovirus C
cugccggucuucgcccugcg

SEQ ID NO: 1549714 - RNA, 14 nt, Human adenovirus C
gucaucucugugcu

SEQ ID NO: 1549715 - RNA, 13 nt, Human adenovirus C
cuuccaaggugaa

SEQ ID NO: 1549716 - RNA, 23 nt, Human adenovirus C
aggaaccagccugugaugcugga

SEQ ID NO: 1549717 - RNA, 22 nt, Human adenovirus C
cccgacgccgaaccaccacugg

SEQ ID NO: 1549718 - RNA, 23 nt, Human adenovirus C
ggcagcagcggaugauccuccag

SEQ ID NO: 1549719 - RNA, 20 nt, Human adenovirus C
ccugaagcgccgacgaugcu

SEQ ID NO: 1549720 - RNA, 18 nt, Human adenovirus C
cccagcacucggcagaaa

SEQ ID NO: 1549721 - RNA, 17 nt, Human adenovirus C
aggcuugggaguguuug

SEQ ID NO: 1549722 - RNA, 19 nt, Human adenovirus C
ugcuuguauuccccuggac

SEQ ID NO: 1549723 - RNA, 17 nt, Human adenovirus C
gcccuggaggcagcugg

SEQ ID NO: 1549724 - RNA, 12 nt, Human adenovirus C
cagcagcuguug

SEQ ID NO: 1549725 - RNA, 12 nt, Human adenovirus C
ccaccaacgugc

SEQ ID NO: 1549726 - RNA, 14 nt, Human adenovirus C
caccgccuccaccg

SEQ ID NO: 1549727 - RNA, 13 nt, Human adenovirus C
cagcacagcaggg

SEQ ID NO: 1549728 - RNA, 13 nt, Human adenovirus C
ccggcggcggugg

SEQ ID NO: 1549729 - RNA, 21 nt, Human adenovirus C
cgggaagaacuggaucucccg

SEQ ID NO: 1549730 - RNA, 20 nt, Human adenovirus C
acuagcuacuguagcugcuu

SEQ ID NO: 1549731 - RNA, 12 nt, Human adenovirus C
gacgguggugcg

SEQ ID NO: 1549732 - RNA, 15 nt, Human adenovirus C
caaccguucccagca

SEQ ID NO: 1549733 - RNA, 17 nt, Human adenovirus C
cugcggcugcuguugcu

SEQ ID NO: 1549734 - RNA, 17 nt, Human adenovirus C
uugauauucaccuggcc

SEQ ID NO: 1549735 - RNA, 18 nt, Human adenovirus C
gcagaugggagcugucca

SEQ ID NO: 1549736 - RNA, 23 nt, Human adenovirus C
gcaaaacgcucgagaucaggcua

SEQ ID NO: 1549737 - RNA, 19 nt, Human adenovirus C
gccaccgagggaccugagc

SEQ ID NO: 1549738 - RNA, 15 nt, Human adenovirus C
aggguggccgcgucc

SEQ ID NO: 1549739 - RNA, 11 nt, Human adenovirus C
acugcugcugg

SEQ ID NO: 1549740 - RNA, 16 nt, Human adenovirus C
gcgucagaaugugaug

SEQ ID NO: 1549741 - RNA, 20 nt, Human adenovirus C
ggccccaaacucccauggau

SEQ ID NO: 1549742 - RNA, 10 nt, Human adenovirus C
cugcagagca

SEQ ID NO: 1549743 - RNA, 16 nt, Human adenovirus C
gccagcacgcucuugu

SEQ ID NO: 1549744 - RNA, 21 nt, Human adenovirus C
ugagcugcagggucccucgcc

SEQ ID NO: 1549745 - RNA, 14 nt, Human adenovirus C
ggagccugggcugg

SEQ ID NO: 1549746 - RNA, 21 nt, Human adenovirus C
gaagaccauucacguagccag

SEQ ID NO: 1549747 - RNA, 16 nt, Human adenovirus C
caccgcggaugcuggc

SEQ ID NO: 1549748 - RNA, 22 nt, Human adenovirus C
cgucgguguuggagaucugcac

SEQ ID NO: 1549749 - RNA, 16 nt, Human adenovirus C
ugugacgagucuucuu

SEQ ID NO: 1549750 - RNA, 22 nt, Human adenovirus C
aucgcuacaaccuccgcuccuc

SEQ ID NO: 1549751 - RNA, 13 nt, Human adenovirus C
cggcggcagcagc

SEQ ID NO: 1549752 - RNA, 18 nt, Human adenovirus C
agcucauggcggggacca

SEQ ID NO: 1549753 - RNA, 21 nt, Human adenovirus C
augucguaaacguagaggggc

SEQ ID NO: 1549754 - RNA, 14 nt, Human adenovirus C
gcaccccgcaccgc

SEQ ID NO: 1549755 - RNA, 22 nt, Human adenovirus C
cacaaccauccgcggcagcucg

SEQ ID NO: 1549756 - RNA, 17 nt, Human adenovirus C
auggccugaaccgcgag

SEQ ID NO: 1549757 - RNA, 16 nt, Human adenovirus C
ugaccgaggagcugag

SEQ ID NO: 1549758 - RNA, 21 nt, Human adenovirus C
acacugcagcaggugcugccc

SEQ ID NO: 1549759 - RNA, 20 nt, Human adenovirus C
cacuagugaauccacagaaa

SEQ ID NO: 1549760 - RNA, 15 nt, Human adenovirus C
gacgugguaaaggug

SEQ ID NO: 1549761 - RNA, 16 nt, Human adenovirus C
gucaucaagacuuugg

SEQ ID NO: 1549762 - RNA, 11 nt, Human adenovirus C
ggcggaggcgc

SEQ ID NO: 1549763 - RNA, 19 nt, Human adenovirus C
accgccuccaccgaugccg

SEQ ID NO: 1549764 - RNA, 16 nt, Human adenovirus C
ucgcguuucagccccc

SEQ ID NO: 1549765 - RNA, 14 nt, Human adenovirus C
ggagggccuacccg

SEQ ID NO: 1549766 - RNA, 16 nt, Human adenovirus C
ccuaaaaaugucuuuc

SEQ ID NO: 1549767 - RNA, 21 nt, Human adenovirus C
cacgaaggaggcguaggaguc

SEQ ID NO: 1549768 - RNA, 19 nt, Human adenovirus C
uaccggagugcugggccag

SEQ ID NO: 1549769 - RNA, 18 nt, Human adenovirus C
cugcagcugccgccgccg

SEQ ID NO: 1549770 - RNA, 20 nt, Human adenovirus C
cucaggcgccgccggcacug

SEQ ID NO: 1549771 - RNA, 20 nt, Human adenovirus C
agauaucggcaccagcaaua

SEQ ID NO: 1549772 - RNA, 21 nt, Human adenovirus C
ugaugcggaagggucccggca

SEQ ID NO: 1549773 - RNA, 19 nt, Human adenovirus C
cgccgucgccagcccgugc

SEQ ID NO: 1549774 - RNA, 12 nt, Human adenovirus C
agcaccaugucc

SEQ ID NO: 1549775 - RNA, 15 nt, Human adenovirus C
uaaaugagacaugau

SEQ ID NO: 1549776 - RNA, 16 nt, Human adenovirus C
caggggccaagaacaa

SEQ ID NO: 1549777 - RNA, 22 nt, Human adenovirus C
ggcacccaaaaagaagcugcag

SEQ ID NO: 1549778 - RNA, 15 nt, Human adenovirus C
ggcuggcgguggcac

SEQ ID NO: 1549779 - RNA, 15 nt, Human adenovirus C
aggagcugcagaagc

SEQ ID NO: 1549780 - RNA, 16 nt, Human adenovirus C
gcaccgggaggcgguc

SEQ ID NO: 1549781 - RNA, 14 nt, Human adenovirus C
accugcgcugggcc

SEQ ID NO: 1549782 - RNA, 15 nt, Human adenovirus C
gcagcgcgaaaagaa

SEQ ID NO: 1549783 - RNA, 20 nt, Human adenovirus C
cuggcgguagaggggccagc

SEQ ID NO: 1549784 - RNA, 15 nt, Human adenovirus C
gaggccgaggcagcg

SEQ ID NO: 1549785 - RNA, 19 nt, Human adenovirus C
cguaggagucgcgcagcuu

SEQ ID NO: 1549786 - RNA, 21 nt, Human adenovirus C
gcgcgcugaggccgaggcagc

SEQ ID NO: 1549787 - RNA, 12 nt, Human adenovirus C
cuaauggcaaug

SEQ ID NO: 1549788 - RNA, 21 nt, Human adenovirus C
cggccaugaacugcucgaucu

SEQ ID NO: 1549789 - RNA, 19 nt, Human adenovirus C
ccuccucagcagcggcaag

SEQ ID NO: 1549790 - RNA, 22 nt, Human adenovirus C
aaauauguggccgggggugcuu

SEQ ID NO: 1549791 - RNA, 18 nt, Human adenovirus C
acgaggaggaggagauga

SEQ ID NO: 1549792 - RNA, 11 nt, Human adenovirus C
gcgccagcacc

SEQ ID NO: 1549793 - RNA, 21 nt, Human adenovirus C
gcaaggccuggaacagcagca

SEQ ID NO: 1549794 - RNA, 19 nt, Human adenovirus C
ucagacaaugcagaaacac

SEQ ID NO: 1549795 - RNA, 17 nt, Human adenovirus C
ugucagccgcgcgcugg

SEQ ID NO: 1549796 - RNA, 21 nt, Human adenovirus C
cacucuguaugcuauauuuca

SEQ ID NO: 1549797 - RNA, 16 nt, Human adenovirus C
ugcuaccucuuugagc

SEQ ID NO: 1549798 - RNA, 15 nt, Human adenovirus C
gcuggcgcgcacgua

SEQ ID NO: 1549799 - RNA, 15 nt, Human adenovirus C
agggucaugucuuuc

SEQ ID NO: 1549800 - RNA, 16 nt, Human adenovirus C
gagcgacgaccugggc

SEQ ID NO: 1549801 - RNA, 16 nt, Human adenovirus C
ccccagguccaggcga

SEQ ID NO: 1549802 - RNA, 20 nt, Human adenovirus C
acucuuccuuuuccucuugc

SEQ ID NO: 1549803 - RNA, 18 nt, Human adenovirus C
uaagcauugcuacuaaag

SEQ ID NO: 1549804 - RNA, 19 nt, Human adenovirus C
ugccgucaucccugagcag

SEQ ID NO: 1549805 - RNA, 22 nt, Human adenovirus C
cguucagauacccaccaccagu

SEQ ID NO: 1549806 - RNA, 23 nt, Human adenovirus C
caguaguauagccccaccaccac

SEQ ID NO: 1549807 - RNA, 14 nt, Human adenovirus C
cagcgaugugcccc

SEQ ID NO: 1549808 - RNA, 18 nt, Human adenovirus C
cacgcccacgccgccacc

SEQ ID NO: 1549809 - RNA, 19 nt, Human adenovirus C
guccggcucaccacccagg

SEQ ID NO: 1549810 - RNA, 16 nt, Human adenovirus C
aggcgcaaggcggcgu

SEQ ID NO: 1549811 - RNA, 13 nt, Human adenovirus C
ccaguggagaggc

SEQ ID NO: 1549812 - RNA, 21 nt, Human adenovirus C
gaagauacagauugagguacu

SEQ ID NO: 1549813 - RNA, 21 nt, Human adenovirus C
agugcaaaauaagauuaacag

SEQ ID NO: 1549814 - RNA, 15 nt, Human adenovirus C
ggccaugagcugcga

SEQ ID NO: 1549815 - RNA, 13 nt, Human adenovirus C
cuucauucagccg

SEQ ID NO: 1549816 - RNA, 20 nt, Human adenovirus C
cuguaacgcuggaccugccu

SEQ ID NO: 1549817 - RNA, 18 nt, Human adenovirus C
augcuaaaaugaagagac

SEQ ID NO: 1549818 - RNA, 17 nt, Human adenovirus C
acuguuacucagccacu

SEQ ID NO: 1549819 - RNA, 19 nt, Human adenovirus C
cugacgcguuccggcagca

SEQ ID NO: 1549820 - RNA, 16 nt, Human adenovirus C
ccggagugcugggcca

SEQ ID NO: 1549821 - RNA, 15 nt, Human adenovirus C
uucuauggguuuaac

SEQ ID NO: 1549822 - RNA, 21 nt, Human adenovirus C
caguuccaggcggucccacag

SEQ ID NO: 1549823 - RNA, 18 nt, Human adenovirus C
ccauagcggaugucagcc

SEQ ID NO: 1549824 - RNA, 22 nt, Human adenovirus C
ggcucuccgcaauucuggaagc

SEQ ID NO: 1549825 - RNA, 15 nt, Human adenovirus C
agccgcgcuccggag

SEQ ID NO: 1549826 - RNA, 16 nt, Human adenovirus C
aucuggagaucuuuca

SEQ ID NO: 1549827 - RNA, 15 nt, Human adenovirus C
cugcgccgugccgcc

SEQ ID NO: 1549828 - RNA, 18 nt, Human adenovirus C
cggucucggucguugagg

SEQ ID NO: 1549829 - RNA, 18 nt, Human adenovirus C
accagacauuacucccau

SEQ ID NO: 1549830 - RNA, 18 nt, Human adenovirus C
gaucuuaugccaggccua

SEQ ID NO: 1549831 - RNA, 13 nt, Human adenovirus C
gggagaggagccc

SEQ ID NO: 1549832 - RNA, 23 nt, Human adenovirus C
uguuaacaugguucugcagagcu

SEQ ID NO: 1549833 - RNA, 18 nt, Human adenovirus C
aaaagaagcaagcaacau

SEQ ID NO: 1549834 - RNA, 22 nt, Human adenovirus C
agcagcagggcaaccugggcuc

SEQ ID NO: 1549835 - RNA, 15 nt, Human adenovirus C
gugcgcuuaccuccc

SEQ ID NO: 1549836 - RNA, 14 nt, Human adenovirus C
gugcccgcugucau

SEQ ID NO: 1549837 - RNA, 23 nt, Human adenovirus C
acuucaggaaggauguuaacaug

SEQ ID NO: 1549838 - RNA, 14 nt, Human adenovirus C
ugcacugcagggaa

SEQ ID NO: 1549839 - RNA, 12 nt, Human adenovirus C
aacuuugccaug

SEQ ID NO: 1549840 - RNA, 19 nt, Human adenovirus C
uggggcuccucccaggcaa

SEQ ID NO: 1549841 - RNA, 19 nt, Human adenovirus C
acgcggguuuggcagggcg

SEQ ID NO: 1549842 - RNA, 19 nt, Human adenovirus C
gaaauuaaccuaaaugcca

SEQ ID NO: 1549843 - RNA, 11 nt, Human adenovirus C
ucaccagcaua

SEQ ID NO: 1549844 - RNA, 14 nt, Human adenovirus C
ggcagccuggaggc

SEQ ID NO: 1549845 - RNA, 20 nt, Human adenovirus C
caacauaaaagaagcaagca

SEQ ID NO: 1549846 - RNA, 22 nt, Human adenovirus C
gcgcuggcaacgucggcggcgu

SEQ ID NO: 1549847 - RNA, 14 nt, Human adenovirus C
gccuguugcugcug

SEQ ID NO: 1549848 - RNA, 21 nt, Human adenovirus C
ccauuuguagcgccacaucuu

SEQ ID NO: 1549849 - RNA, 23 nt, Human adenovirus C
aucugagcgggggguaccugcug

SEQ ID NO: 1549850 - RNA, 15 nt, Human adenovirus C
ucaaacucacagaac

SEQ ID NO: 1549851 - RNA, 18 nt, Human adenovirus C
accuucuuccccauggcc

SEQ ID NO: 1549852 - RNA, 12 nt, Human adenovirus C
ugcggcugcugu

SEQ ID NO: 1549853 - RNA, 21 nt, Human adenovirus C
aagccgcucauggcgcagcug

SEQ ID NO: 1549854 - RNA, 22 nt, Human adenovirus C
gcagcuggggccggaccugggc

SEQ ID NO: 1549855 - RNA, 20 nt, Human adenovirus C
aaugccauagaugccaugaa

SEQ ID NO: 1549856 - RNA, 22 nt, Human adenovirus C
gguaguuaagagagcugcagcu

SEQ ID NO: 1549857 - RNA, 13 nt, Human adenovirus C
guauccugccccu

SEQ ID NO: 1549858 - RNA, 22 nt, Human adenovirus C
cagccuggaggcaacccugaac

SEQ ID NO: 1549859 - RNA, 21 nt, Human adenovirus C
ccgccucgggcaaaacgugcu

SEQ ID NO: 1549860 - RNA, 13 nt, Human adenovirus C
ucgccccaucauc

SEQ ID NO: 1549861 - RNA, 15 nt, Human adenovirus C
acaacagcugccgcc

SEQ ID NO: 1549862 - RNA, 14 nt, Human adenovirus C
agaaacacagagcu

SEQ ID NO: 1549863 - RNA, 19 nt, Human adenovirus C
acugcucgaucucuuccuc

SEQ ID NO: 1549864 - RNA, 17 nt, Human adenovirus C
cgauauuaccauguaca

SEQ ID NO: 1549865 - RNA, 19 nt, Human adenovirus C
aaccccaccaauguggaaa

SEQ ID NO: 1549866 - RNA, 16 nt, Human adenovirus C
ccuugcuucccaggau

SEQ ID NO: 1549867 - RNA, 23 nt, Human adenovirus C
aaacuuuuauguauaaauuucca

SEQ ID NO: 1549868 - RNA, 17 nt, Human adenovirus C
aacuacaccgucaagaa

SEQ ID NO: 1549869 - RNA, 20 nt, Human adenovirus C
cuggcggacauuaucuuccc

SEQ ID NO: 1549870 - RNA, 15 nt, Human adenovirus C
ggcauaagcccgucu

SEQ ID NO: 1549871 - RNA, 15 nt, Human adenovirus C
agagagcugcagcug

SEQ ID NO: 1549872 - RNA, 18 nt, Human adenovirus C
gccccguccugcccgcaa

SEQ ID NO: 1549873 - RNA, 14 nt, Human adenovirus C
gccgccgcagcccu

SEQ ID NO: 1549874 - RNA, 22 nt, Human adenovirus C
ccaggcuuugaguugcacucgc

SEQ ID NO: 1549875 - RNA, 20 nt, Human adenovirus C
gucgcaccggccgacgggcg

SEQ ID NO: 1549876 - RNA, 17 nt, Human adenovirus C
cucguccagacgggcca

SEQ ID NO: 1549877 - RNA, 14 nt, Human adenovirus C
cggcucgcgcccgu

SEQ ID NO: 1549878 - RNA, 17 nt, Human adenovirus C
ccaaacgccaagaaaac

SEQ ID NO: 1549879 - RNA, 19 nt, Human adenovirus C
ccacagcggcggcagcagc

SEQ ID NO: 1549880 - RNA, 13 nt, Human adenovirus C
cgcgcaacuacac

SEQ ID NO: 1549881 - RNA, 18 nt, Human adenovirus C
gcggccuaaagcgcgagu

SEQ ID NO: 1549882 - RNA, 20 nt, Human adenovirus C
gaugugaccgaggagcugag

SEQ ID NO: 1549883 - RNA, 16 nt, Human adenovirus C
cagccgccgcaccgug

SEQ ID NO: 1549884 - RNA, 14 nt, Human adenovirus C
ggaugauccuccag

SEQ ID NO: 1549885 - RNA, 22 nt, Human adenovirus C
gcgcggggaggcggcggcgacg

SEQ ID NO: 1549886 - RNA, 16 nt, Human adenovirus C
gcauagccgggucagg

SEQ ID NO: 1549887 - RNA, 12 nt, Human adenovirus C
gggaggcggcgg

SEQ ID NO: 1549888 - RNA, 19 nt, Human adenovirus C
agcuaaaauacaaccccac

SEQ ID NO: 1549889 - RNA, 12 nt, Human adenovirus C
gccaaguacaga

SEQ ID NO: 1549890 - RNA, 21 nt, Human adenovirus C
cgucauaguuguguuccagga

SEQ ID NO: 1549891 - RNA, 15 nt, Human adenovirus C
gcggcagcggcagcg

SEQ ID NO: 1549892 - RNA, 22 nt, Human adenovirus C
uggcaaccaccgcuccucugau

SEQ ID NO: 1549893 - RNA, 18 nt, Human adenovirus C
cggucguugaggguccug

SEQ ID NO: 1549894 - RNA, 21 nt, Human adenovirus C
ggggcaacaucuccuucgccc

SEQ ID NO: 1549895 - RNA, 23 nt, Human adenovirus C
ggacgucgcgccgcaccgcgucc

SEQ ID NO: 1549896 - RNA, 16 nt, Human adenovirus C
gguggcucccgggcuu

SEQ ID NO: 1549897 - RNA, 17 nt, Human adenovirus C
uccucgaguucuuauau

SEQ ID NO: 1549898 - RNA, 17 nt, Human adenovirus C
ugcgacccggcaccacc

SEQ ID NO: 1549899 - RNA, 16 nt, Human adenovirus C
uuguuucuccacacaa

SEQ ID NO: 1549900 - RNA, 15 nt, Human adenovirus C
ggcaacgugcagacc

SEQ ID NO: 1549901 - RNA, 18 nt, Human adenovirus C
cacgcacgaaggaggcgu

SEQ ID NO: 1549902 - RNA, 14 nt, Human adenovirus C
aacgcaccgccauu

SEQ ID NO: 1549903 - RNA, 19 nt, Human adenovirus C
cgguaccuuugagcugcag

SEQ ID NO: 1549904 - RNA, 17 nt, Human adenovirus C
gcuuuccaagauggcua

SEQ ID NO: 1549905 - RNA, 17 nt, Human adenovirus C
ccguucgcacuggggcg

SEQ ID NO: 1549906 - RNA, 23 nt, Human adenovirus C
uggcagcaaggccuggaacagca

SEQ ID NO: 1549907 - RNA, 18 nt, Human adenovirus C
accuaugacaagcgcuuu

SEQ ID NO: 1549908 - RNA, 23 nt, Human adenovirus C
aguuccucguaggugagcuccuc

SEQ ID NO: 1549909 - RNA, 16 nt, Human adenovirus C
cccgccaacgccacca

SEQ ID NO: 1549910 - RNA, 15 nt, Human adenovirus C
gguggucuucuacuu

SEQ ID NO: 1549911 - RNA, 13 nt, Human adenovirus C
cagccgcaggcca

SEQ ID NO: 1549912 - RNA, 14 nt, Human adenovirus C
aggugcccgagggu

SEQ ID NO: 1549913 - RNA, 23 nt, Human adenovirus C
gcaccuaugacaagcgcuuucca

SEQ ID NO: 1549914 - RNA, 15 nt, Human adenovirus C
guucugcgagucaca

SEQ ID NO: 1549915 - RNA, 20 nt, Human adenovirus C
ggcagcaaugccuggaggag

SEQ ID NO: 1549916 - RNA, 20 nt, Human adenovirus C
cuauguugggucaacaaucu

SEQ ID NO: 1549917 - RNA, 13 nt, Human adenovirus C
caaccgcgcccag

SEQ ID NO: 1549918 - RNA, 16 nt, Human adenovirus C
ggaaagacgguggugc

SEQ ID NO: 1549919 - RNA, 14 nt, Human adenovirus C
agaagcgcuccgac

SEQ ID NO: 1549920 - RNA, 18 nt, Human adenovirus C
ugcucccaaaccucagcg

SEQ ID NO: 1549921 - RNA, 17 nt, Human adenovirus C
gguggucgcgaaagguc

SEQ ID NO: 1549922 - RNA, 18 nt, Human adenovirus C
ggcccacaacacggccuc

SEQ ID NO: 1549923 - RNA, 12 nt, Human adenovirus C
cgucuggcugcu

SEQ ID NO: 1549924 - RNA, 18 nt, Human adenovirus C
cgcugucugcgagggcca

SEQ ID NO: 1549925 - RNA, 15 nt, Human adenovirus C
accaucaaucuugac

SEQ ID NO: 1549926 - RNA, 14 nt, Human adenovirus C
acagcgcgagcagg

SEQ ID NO: 1549927 - RNA, 14 nt, Human adenovirus C
accugcggggcgau

SEQ ID NO: 1549928 - RNA, 16 nt, Human adenovirus C
acugcuccuucagcgc

SEQ ID NO: 1549929 - RNA, 20 nt, Human adenovirus C
gcauggucucggugacggcg

SEQ ID NO: 1549930 - RNA, 14 nt, Human adenovirus C
aaugcaucaaacaa

SEQ ID NO: 1549931 - RNA, 21 nt, Human adenovirus C
uggcaaugggcccacgggcgg

SEQ ID NO: 1549932 - RNA, 22 nt, Human adenovirus C
ugagacccgcaccaggugcaga

SEQ ID NO: 1549933 - RNA, 17 nt, Human adenovirus C
acccuccucaccugccg

SEQ ID NO: 1549934 - RNA, 11 nt, Human adenovirus C
ggcccacgggc

SEQ ID NO: 1549935 - RNA, 17 nt, Human adenovirus C
ucugacaaagcccaaga

SEQ ID NO: 1549936 - RNA, 20 nt, Human adenovirus C
cuuuggggucacugcuaccu

SEQ ID NO: 1549937 - RNA, 22 nt, Human adenovirus C
caacccaauccccccgccgccg

SEQ ID NO: 1549938 - RNA, 18 nt, Human adenovirus C
cucugcagaccucguccu

SEQ ID NO: 1549939 - RNA, 22 nt, Human adenovirus C
gccaugcucagaaaugacacca

SEQ ID NO: 1549940 - RNA, 16 nt, Human adenovirus C
gcccuuggcgcgcagc

SEQ ID NO: 1549941 - RNA, 14 nt, Human adenovirus C
ucacaagccccacu

SEQ ID NO: 1549942 - RNA, 16 nt, Human adenovirus C
uuauacccacaaccuu

SEQ ID NO: 1549943 - RNA, 15 nt, Human adenovirus C
ccugcggggcgauga

SEQ ID NO: 1549944 - RNA, 14 nt, Human adenovirus C
acggccuacuggag

SEQ ID NO: 1549945 - RNA, 16 nt, Human adenovirus C
cgcagaugggagcugu

SEQ ID NO: 1549946 - RNA, 23 nt, Human adenovirus C
auuaccauguacaugagcaaaca

SEQ ID NO: 1549947 - RNA, 22 nt, Human adenovirus C
ccgugugcaccagccgcaccgc

SEQ ID NO: 1549948 - RNA, 22 nt, Human adenovirus C
aggcggucuugagacggcggau

SEQ ID NO: 1549949 - RNA, 15 nt, Human adenovirus C
aguccacaaaaaaca

SEQ ID NO: 1549950 - RNA, 13 nt, Human adenovirus C
ggcucaccaccca

SEQ ID NO: 1549951 - RNA, 20 nt, Human adenovirus C
cauaaguuuggacaccuccg

SEQ ID NO: 1549952 - RNA, 16 nt, Human adenovirus C
caugcucagucugggc

SEQ ID NO: 1549953 - RNA, 10 nt, Human adenovirus C
gaucaggcua

SEQ ID NO: 1549954 - RNA, 21 nt, Human adenovirus C
acccagcacucggcagaaaca

SEQ ID NO: 1549955 - RNA, 13 nt, Human adenovirus C
guacaguggaaag

SEQ ID NO: 1549956 - RNA, 16 nt, Human adenovirus C
gcucgagaucaggcua

SEQ ID NO: 1549957 - RNA, 17 nt, Human adenovirus C
gauggaagacugggaca

SEQ ID NO: 1549958 - RNA, 20 nt, Human adenovirus C
uaggcgcucguugguccagc

SEQ ID NO: 1549959 - RNA, 14 nt, Human adenovirus C
ucaucccugagcag

SEQ ID NO: 1549960 - RNA, 23 nt, Human adenovirus C
ccgcggugaugccuuugagggug

SEQ ID NO: 1549961 - RNA, 17 nt, Human adenovirus C
cccuuucuuaccccucc

SEQ ID NO: 1549962 - RNA, 14 nt, Human adenovirus C
uucuaaagcuaugu

SEQ ID NO: 1549963 - RNA, 19 nt, Human adenovirus C
uuacuuauuucugugcuac

SEQ ID NO: 1549964 - RNA, 15 nt, Human adenovirus C
gagcgcuccacccgc

SEQ ID NO: 1549965 - RNA, 18 nt, Human adenovirus C
gacgcguuccggcagcag

SEQ ID NO: 1549966 - RNA, 23 nt, Human adenovirus C
cagaccguaaaccugagccaggc

SEQ ID NO: 1549967 - RNA, 13 nt, Human adenovirus C
gagcagacgguga

SEQ ID NO: 1549968 - RNA, 21 nt, Human adenovirus C
aucagauccgcguccaggucc

SEQ ID NO: 1549969 - RNA, 14 nt, Human adenovirus C
gagagggggcaggg

SEQ ID NO: 1549970 - RNA, 14 nt, Human adenovirus C
cggagaugcagcgc

SEQ ID NO: 1549971 - RNA, 14 nt, Human adenovirus C
gacaaagcccaaga

SEQ ID NO: 1549972 - RNA, 21 nt, Human adenovirus C
uugcauguuuucccugaccaa

SEQ ID NO: 1549973 - RNA, 19 nt, Human adenovirus C
cauguaugcguccaugucg

SEQ ID NO: 1549974 - RNA, 15 nt, Human adenovirus C
cagcaggugcugccc

SEQ ID NO: 1549975 - RNA, 10 nt, Human adenovirus C
uguccuugga

SEQ ID NO: 1549976 - RNA, 14 nt, Human adenovirus C
auucagauaaugac

SEQ ID NO: 1549977 - RNA, 19 nt, Human adenovirus C
ccgcgcacgucgcaccggc

SEQ ID NO: 1549978 - RNA, 12 nt, Human adenovirus C
augagcgcggga

SEQ ID NO: 1549979 - RNA, 17 nt, Human adenovirus C
ugaugggcuccagcauu

SEQ ID NO: 1549980 - RNA, 19 nt, Human adenovirus C
cgcacgaggggcagugcag

SEQ ID NO: 1549981 - RNA, 17 nt, Human adenovirus C
ucauuuguaauuuacaa

SEQ ID NO: 1549982 - RNA, 17 nt, Human adenovirus C
gaaaccugugcugccag

SEQ ID NO: 1549983 - RNA, 15 nt, Human adenovirus C
acgucuuaaacuggg

SEQ ID NO: 1549984 - RNA, 17 nt, Human adenovirus C
aaaaugugggagucaag

SEQ ID NO: 1549985 - RNA, 23 nt, Human adenovirus C
accagauauuuuucuauguggaa

SEQ ID NO: 1549986 - RNA, 19 nt, Human adenovirus C
cagucaugagcgagcugau

SEQ ID NO: 1549987 - RNA, 21 nt, Human adenovirus C
gagcgcaaccuaaaggagcug

SEQ ID NO: 1549988 - RNA, 12 nt, Human adenovirus C
aaauagcaagcc

SEQ ID NO: 1549989 - RNA, 22 nt, Human adenovirus C
agguggcaccgggacugggcgu

SEQ ID NO: 1549990 - RNA, 15 nt, Human adenovirus C
ugugaguuggaugau

SEQ ID NO: 1549991 - RNA, 15 nt, Human adenovirus C
caccagcauaacaac

SEQ ID NO: 1549992 - RNA, 15 nt, Human adenovirus C
ccucccuugccgugc

SEQ ID NO: 1549993 - RNA, 23 nt, Human adenovirus C
uaguuucgcgcccuuucucaaau

SEQ ID NO: 1549994 - RNA, 16 nt, Human adenovirus C
cucagugcaacaugac

SEQ ID NO: 1549995 - RNA, 23 nt, Human adenovirus C
cgccugacgaaaaguccgcggcu

SEQ ID NO: 1549996 - RNA, 14 nt, Human adenovirus C
gagcuuagaaauag

SEQ ID NO: 1549997 - RNA, 16 nt, Human adenovirus C
ucagccgcugcagcca

SEQ ID NO: 1549998 - RNA, 15 nt, Human adenovirus C
acagcaggaggaagc

SEQ ID NO: 1549999 - RNA, 17 nt, Human adenovirus C
gaaaaguccgcggcucc

SEQ ID NO: 1550000 - RNA, 20 nt, Human adenovirus C
ggcgcaggguccucgucagc

SEQ ID NO: 1550001 - RNA, 17 nt, Human adenovirus C
ucuggaaggugcugagg

SEQ ID NO: 1550002 - RNA, 19 nt, Human adenovirus C
cuccagagcgcccuccacc

SEQ ID NO: 1550003 - RNA, 13 nt, Human adenovirus C
uugaacaaaacuc

SEQ ID NO: 1550004 - RNA, 20 nt, Human adenovirus C
cgggcggcgcugcagagcca

SEQ ID NO: 1550005 - RNA, 16 nt, Human adenovirus C
cgccuguugcugcugc

SEQ ID NO: 1550006 - RNA, 15 nt, Human adenovirus C
caguucauugacugg

SEQ ID NO: 1550007 - RNA, 22 nt, Human adenovirus C
ugggaauuugaagagcuuuuga

SEQ ID NO: 1550008 - RNA, 21 nt, Human adenovirus C
agcagcggaugauccuccagu

SEQ ID NO: 1550009 - RNA, 17 nt, Human adenovirus C
uaaagcaaggccugccc

SEQ ID NO: 1550010 - RNA, 14 nt, Human adenovirus C
gugcccuugaugga

SEQ ID NO: 1550011 - RNA, 20 nt, Human adenovirus C
agcuugccugcuccagagau

SEQ ID NO: 1550012 - RNA, 13 nt, Human adenovirus C
ccaccacuggaac

SEQ ID NO: 1550013 - RNA, 13 nt, Human adenovirus C
gcagggccagcug

SEQ ID NO: 1550014 - RNA, 14 nt, Human adenovirus C
aacucaccugaaaa

SEQ ID NO: 1550015 - RNA, 20 nt, Human adenovirus C
ucugacaaccccaacaccua

SEQ ID NO: 1550016 - RNA, 13 nt, Human adenovirus C
uggggcaggagga

SEQ ID NO: 1550017 - RNA, 18 nt, Human adenovirus C
agacaccguccugagugu

SEQ ID NO: 1550018 - RNA, 20 nt, Human adenovirus C
acgcccggugagcgcuccac

SEQ ID NO: 1550019 - RNA, 21 nt, Human adenovirus C
gcuccuuugucuggagaaaca

SEQ ID NO: 1550020 - RNA, 22 nt, Human adenovirus C
ggccggaaaccucaccucccaa

SEQ ID NO: 1550021 - RNA, 22 nt, Human adenovirus C
ucagccacuuaaaaaaacaaag

SEQ ID NO: 1550022 - RNA, 14 nt, Human adenovirus C
caggcgccgccggc

SEQ ID NO: 1550023 - RNA, 15 nt, Human adenovirus C
acuucacccacagcc

SEQ ID NO: 1550024 - RNA, 22 nt, Human adenovirus C
cgcgcaugcccccaugggccgg

SEQ ID NO: 1550025 - RNA, 23 nt, Human adenovirus C
cugacgccagacgccgcaccugc

SEQ ID NO: 1550026 - RNA, 19 nt, Human adenovirus C
uccuuggccaauugcaagc

SEQ ID NO: 1550027 - RNA, 21 nt, Human adenovirus C
gcaccagcucaaucagucaca

SEQ ID NO: 1550028 - RNA, 20 nt, Human adenovirus C
cagagcgauuugucagaagc

SEQ ID NO: 1550029 - RNA, 16 nt, Human adenovirus C
caguggacgcggccau

SEQ ID NO: 1550030 - RNA, 22 nt, Human adenovirus C
ugccuccgcgguaccugcggcc

SEQ ID NO: 1550031 - RNA, 14 nt, Human adenovirus C
gcgagggccagcug

SEQ ID NO: 1550032 - RNA, 14 nt, Human adenovirus C
uccgcauaccccgc

SEQ ID NO: 1550033 - RNA, 18 nt, Human adenovirus C
uagcaggucgggcgccga

SEQ ID NO: 1550034 - RNA, 17 nt, Human adenovirus C
cuccaccgaugccgcca

SEQ ID NO: 1550035 - RNA, 19 nt, Human adenovirus C
ccuuugaguucgccaccac

SEQ ID NO: 1550036 - RNA, 22 nt, Human adenovirus C
cgcccugcgcgucggccaggua

SEQ ID NO: 1550037 - RNA, 19 nt, Human adenovirus C
cggcugaagcagggccagg

SEQ ID NO: 1550038 - RNA, 16 nt, Human adenovirus C
ucaaauacaaaagcag

SEQ ID NO: 1550039 - RNA, 21 nt, Human adenovirus C
cgcacggcguccggcucacca

SEQ ID NO: 1550040 - RNA, 17 nt, Human adenovirus C
gagaauguuuuaaaaaa

SEQ ID NO: 1550041 - RNA, 15 nt, Human adenovirus C
ccacaacgcgcagcc

SEQ ID NO: 1550042 - RNA, 18 nt, Human adenovirus C
ggcggcaggagcagagcc

SEQ ID NO: 1550043 - RNA, 14 nt, Human adenovirus C
cccacagcucgguc

SEQ ID NO: 1550044 - RNA, 17 nt, Human adenovirus C
uugcgcuaugugcagca

SEQ ID NO: 1550045 - RNA, 16 nt, Human adenovirus C
uccacucgcuccaggg

SEQ ID NO: 1550046 - RNA, 17 nt, Human adenovirus C
gcaacuuguugggcauc

SEQ ID NO: 1550047 - RNA, 23 nt, Human adenovirus C
gccuugccuacgaacgccaccug

SEQ ID NO: 1550048 - RNA, 15 nt, Human adenovirus C
acucacuccggggcu

SEQ ID NO: 1550049 - RNA, 18 nt, Human adenovirus C
cgcucguugguccagcag

SEQ ID NO: 1550050 - RNA, 14 nt, Human adenovirus C
ccaguuggaggagu

SEQ ID NO: 1550051 - RNA, 14 nt, Human adenovirus C
agccggcggcgcga

SEQ ID NO: 1550052 - RNA, 18 nt, Human adenovirus C
ucaaaggcuacaggggcc

SEQ ID NO: 1550053 - RNA, 14 nt, Human adenovirus C
agcgaguccgcauc

SEQ ID NO: 1550054 - RNA, 20 nt, Human adenovirus C
caguggaacgaagcugaugc

SEQ ID NO: 1550055 - RNA, 22 nt, Human adenovirus C
aaccuccuccuccugccaggcu

SEQ ID NO: 1550056 - RNA, 13 nt, Human adenovirus C
gcgguggcacccg

SEQ ID NO: 1550057 - RNA, 18 nt, Human adenovirus C
uccaaacuaagcauugcu

SEQ ID NO: 1550058 - RNA, 21 nt, Human adenovirus C
acgaggaggaauacugggaca

SEQ ID NO: 1550059 - RNA, 20 nt, Human adenovirus C
uccgcguccagguccuccgc

SEQ ID NO: 1550060 - RNA, 15 nt, Human adenovirus C
ugagccccgggcugg

SEQ ID NO: 1550061 - RNA, 21 nt, Human adenovirus C
gcuccuuuuggcuuccuucca

SEQ ID NO: 1550062 - RNA, 15 nt, Human adenovirus C
ucacccgcagcugcc

SEQ ID NO: 1550063 - RNA, 15 nt, Human adenovirus C
cuccuccugccaggc

SEQ ID NO: 1550064 - RNA, 14 nt, Human adenovirus C
agcgcgcuggagca

SEQ ID NO: 1550065 - RNA, 16 nt, Human adenovirus C
acgcgcccuggaggca

SEQ ID NO: 1550066 - RNA, 17 nt, Human adenovirus C
ugagcucaacucccgga

SEQ ID NO: 1550067 - RNA, 19 nt, Human adenovirus C
acacgggaggagcgggaag

SEQ ID NO: 1550068 - RNA, 20 nt, Human adenovirus C
gcagcggcgcggaagagaac

SEQ ID NO: 1550069 - RNA, 15 nt, Human adenovirus C
ggcgcagagacacug

SEQ ID NO: 1550070 - RNA, 19 nt, Human adenovirus C
gcccuuucuuaccccucca

SEQ ID NO: 1550071 - RNA, 18 nt, Human adenovirus C
auucgcaccgcccgcagc

SEQ ID NO: 1550072 - RNA, 17 nt, Human adenovirus C
ugagacgaaggcucgcg

SEQ ID NO: 1550073 - RNA, 22 nt, Human adenovirus C
caggacgccucggaguaccuga

SEQ ID NO: 1550074 - RNA, 11 nt, Human adenovirus C
acccuccccuu

SEQ ID NO: 1550075 - RNA, 16 nt, Human adenovirus C
gccucucagaugcuga

SEQ ID NO: 1550076 - RNA, 17 nt, Human adenovirus C
agcccgagggccgcugg

SEQ ID NO: 1550077 - RNA, 17 nt, Human adenovirus C
ggguaacagacauauuc

SEQ ID NO: 1550078 - RNA, 22 nt, Human adenovirus C
ugagguggaucccauggacgag

SEQ ID NO: 1550079 - RNA, 22 nt, Human adenovirus C
ccguucaugggaaacuggcaag

SEQ ID NO: 1550080 - RNA, 20 nt, Human adenovirus C
auaugguuggacgcuggaag

SEQ ID NO: 1550081 - RNA, 22 nt, Human adenovirus C
cgcuugcaagcagugcagcuuc

SEQ ID NO: 1550082 - RNA, 18 nt, Human adenovirus C
gagcgcagcuugagccug

SEQ ID NO: 1550083 - RNA, 18 nt, Human adenovirus C
agcauacuuuccaggaga

SEQ ID NO: 1550084 - RNA, 23 nt, Human adenovirus C
ucauguucuugucccuccgcacc

SEQ ID NO: 1550085 - RNA, 16 nt, Human adenovirus C
guggcgguguguucug

SEQ ID NO: 1550086 - RNA, 17 nt, Human adenovirus C
gcgcucccucacccgca

SEQ ID NO: 1550087 - RNA, 17 nt, Human adenovirus C
acgggcgggcugcucug

SEQ ID NO: 1550088 - RNA, 16 nt, Human adenovirus C
uccccuuaguaugcag

SEQ ID NO: 1550089 - RNA, 17 nt, Human adenovirus C
ugcugccaggaugcggg

SEQ ID NO: 1550090 - RNA, 19 nt, Human adenovirus C
gcgccagaccccccaucua

SEQ ID NO: 1550091 - RNA, 14 nt, Human adenovirus C
cgcuguggagcggc

SEQ ID NO: 1550092 - RNA, 19 nt, Human adenovirus C
uacacaggguugcagcacu

SEQ ID NO: 1550093 - RNA, 17 nt, Human adenovirus C
gcggccgcacugggcgc

SEQ ID NO: 1550094 - RNA, 20 nt, Human adenovirus C
cgggcccuugcuucccagga

SEQ ID NO: 1550095 - RNA, 11 nt, Human adenovirus C
ucaccucccaa

SEQ ID NO: 1550096 - RNA, 23 nt, Human adenovirus C
gcacccaaaaagaagcugcagcu

SEQ ID NO: 1550097 - RNA, 14 nt, Human adenovirus C
caugucgccgccag

SEQ ID NO: 1550098 - RNA, 19 nt, Human adenovirus C
uuucacuccacaggcugcg

SEQ ID NO: 1550099 - RNA, 22 nt, Human adenovirus C
acccgcccgcgccugcugggcg

SEQ ID NO: 1550100 - RNA, 19 nt, Human adenovirus C
gucugcagcgcugccaaaa

SEQ ID NO: 1550101 - RNA, 18 nt, Human adenovirus C
ucguaaacguagaggggc

SEQ ID NO: 1550102 - RNA, 16 nt, Human adenovirus C
auacacuuccucagga

SEQ ID NO: 1550103 - RNA, 14 nt, Human adenovirus C
ccuucggcaucgcg

SEQ ID NO: 1550104 - RNA, 19 nt, Human adenovirus C
acgcguuccggcagcagcc

SEQ ID NO: 1550105 - RNA, 20 nt, Human adenovirus C
uagauugcaagaaaaaacua

SEQ ID NO: 1550106 - RNA, 22 nt, Human adenovirus C
ucgccagcccgugcuggccccg

SEQ ID NO: 1550107 - RNA, 15 nt, Human adenovirus C
uucaacuaacauaaa

SEQ ID NO: 1550108 - RNA, 15 nt, Human adenovirus C
acagcgcgagcaggc

SEQ ID NO: 1550109 - RNA, 14 nt, Human adenovirus C
aguagcuugaaguu

SEQ ID NO: 1550110 - RNA, 23 nt, Human adenovirus C
agcagagcgugagccuuaaccug

SEQ ID NO: 1550111 - RNA, 16 nt, Human adenovirus C
caccuccgcaccacuu

SEQ ID NO: 1550112 - RNA, 12 nt, Human adenovirus C
acaagcagcugg

SEQ ID NO: 1550113 - RNA, 23 nt, Human adenovirus C
ucccaaaccucagcgccucccaa

SEQ ID NO: 1550114 - RNA, 13 nt, Human adenovirus C
agcaggaggagga

SEQ ID NO: 1550115 - RNA, 18 nt, Human adenovirus C
cagauaaugacugcaaau

SEQ ID NO: 1550116 - RNA, 21 nt, Human adenovirus C
acaauaggaaacaaaaaugau

SEQ ID NO: 1550117 - RNA, 23 nt, Human adenovirus C
uaaccuaaaugccaaccuaugga

SEQ ID NO: 1550118 - RNA, 17 nt, Human adenovirus C
auggccggccacggccu

SEQ ID NO: 1550119 - RNA, 16 nt, Human adenovirus C
ggcgcggcuaggagcg

SEQ ID NO: 1550120 - RNA, 16 nt, Human adenovirus C
guugacggcggccugg

SEQ ID NO: 1550121 - RNA, 16 nt, Human adenovirus C
cuacguccgcgacugc

SEQ ID NO: 1550122 - RNA, 15 nt, Human adenovirus C
cgucggcgccgcgcg

SEQ ID NO: 1550123 - RNA, 13 nt, Human adenovirus C
ugcuggucaggca

SEQ ID NO: 1550124 - RNA, 17 nt, Human adenovirus C
guugaagcaucugcagc

SEQ ID NO: 1550125 - RNA, 15 nt, Human adenovirus C
caccgucacccagca

SEQ ID NO: 1550126 - RNA, 22 nt, Human adenovirus C
accacuuacuggcugcagccag

SEQ ID NO: 1550127 - RNA, 15 nt, Human adenovirus C
acugccacagagggc

SEQ ID NO: 1550128 - RNA, 14 nt, Human adenovirus C
caggucucugcgcu

SEQ ID NO: 1550129 - RNA, 21 nt, Human adenovirus C
agcccgugacacugcagcagg

SEQ ID NO: 1550130 - RNA, 19 nt, Human adenovirus C
gaaccuuuggacaccuccc

SEQ ID NO: 1550131 - RNA, 18 nt, Human adenovirus C
gguagcugccuucccaaa

SEQ ID NO: 1550132 - RNA, 18 nt, Human adenovirus C
ggagcggggggcuucuga

SEQ ID NO: 1550133 - RNA, 13 nt, Human adenovirus C
cccuggcuguggg

SEQ ID NO: 1550134 - RNA, 20 nt, Human adenovirus C
ugccuacgaacgccaccugu

SEQ ID NO: 1550135 - RNA, 21 nt, Human adenovirus C
guaugcguccaugucgccgcc

SEQ ID NO: 1550136 - RNA, 17 nt, Human adenovirus C
ccacgguaaagaccccg

SEQ ID NO: 1550137 - RNA, 23 nt, Human adenovirus C
gcggcgguauccugccccuccuu

SEQ ID NO: 1550138 - RNA, 13 nt, Human adenovirus C
cguguggcagcaa

SEQ ID NO: 1550139 - RNA, 20 nt, Human adenovirus C
gagagcucgguguaccugag

SEQ ID NO: 1550140 - RNA, 15 nt, Human adenovirus C
acuaacauaaacaca

SEQ ID NO: 1550141 - RNA, 20 nt, Human adenovirus C
acagcuuccuggagcgccac

SEQ ID NO: 1550142 - RNA, 21 nt, Human adenovirus C
accguaccuuaaucaaacuca

SEQ ID NO: 1550143 - RNA, 21 nt, Human adenovirus C
ccauucacguagccagccacu

SEQ ID NO: 1550144 - RNA, 12 nt, Human adenovirus C
cugcagcacagc

SEQ ID NO: 1550145 - RNA, 23 nt, Human adenovirus C
uacugcaccggcggcagcggcag

SEQ ID NO: 1550146 - RNA, 19 nt, Human adenovirus C
cagcuugccugcuccagag

SEQ ID NO: 1550147 - RNA, 18 nt, Human adenovirus C
aacgcguuuagcaggucg

SEQ ID NO: 1550148 - RNA, 15 nt, Human adenovirus C
gcugccgccaugggc

SEQ ID NO: 1550149 - RNA, 22 nt, Human adenovirus C
cugcugugcgcuuccuagcgac

SEQ ID NO: 1550150 - RNA, 20 nt, Human adenovirus C
ccgcuccucaggcgccgccg

SEQ ID NO: 1550151 - RNA, 19 nt, Human adenovirus C
caggcggccgcugcggccg

SEQ ID NO: 1550152 - RNA, 21 nt, Human adenovirus C
gcugccggucuucgcccugcg

SEQ ID NO: 1550153 - RNA, 17 nt, Human adenovirus C
agccaugcucagaaaug

SEQ ID NO: 1550154 - RNA, 12 nt, Human adenovirus C
cgccugcugcac

SEQ ID NO: 1550155 - RNA, 13 nt, Human adenovirus C
ccgccucagccgc

SEQ ID NO: 1550156 - RNA, 18 nt, Human adenovirus C
gaucagcuucggcgcacg

SEQ ID NO: 1550157 - RNA, 18 nt, Human adenovirus C
caacccgcggugcuccuc

SEQ ID NO: 1550158 - RNA, 14 nt, Human adenovirus C
uaccaccacaccuc

SEQ ID NO: 1550159 - RNA, 13 nt, Human adenovirus C
aucguuuaaaagc

SEQ ID NO: 1550160 - RNA, 12 nt, Human adenovirus C
cgcccgcgccgu

SEQ ID NO: 1550161 - RNA, 18 nt, Human adenovirus C
ccaggcgacgagcggccg

SEQ ID NO: 1550162 - RNA, 16 nt, Human adenovirus C
cccauuuccaagcuug

SEQ ID NO: 1550163 - RNA, 21 nt, Human adenovirus C
accugcgcugggccccaagcc

SEQ ID NO: 1550164 - RNA, 22 nt, Human adenovirus C
acugcucgaucucuuccuccug

SEQ ID NO: 1550165 - RNA, 17 nt, Human adenovirus C
gcagcuaaaugccgugg

SEQ ID NO: 1550166 - RNA, 18 nt, Human adenovirus C
cagguacagcccacccug

SEQ ID NO: 1550167 - RNA, 17 nt, Human adenovirus C
agaugaagaugaagaag

SEQ ID NO: 1550168 - RNA, 16 nt, Human adenovirus C
agaugcugagggacaa

SEQ ID NO: 1550169 - RNA, 13 nt, Human adenovirus C
cggccgcacuggg

SEQ ID NO: 1550170 - RNA, 21 nt, Human adenovirus C
ugggagcuguccauggucugg

SEQ ID NO: 1550171 - RNA, 21 nt, Human adenovirus C
cuuccaggcgcggcggcugcu

SEQ ID NO: 1550172 - RNA, 21 nt, Human adenovirus C
cgguguuggagaucugcacca

SEQ ID NO: 1550173 - RNA, 19 nt, Human adenovirus C
ggaccucccggccacuacc

SEQ ID NO: 1550174 - RNA, 19 nt, Human adenovirus C
ugcgcgucggccagguagc

SEQ ID NO: 1550175 - RNA, 19 nt, Human adenovirus C
gcggcggucaccagaggcu

SEQ ID NO: 1550176 - RNA, 19 nt, Human adenovirus C
aggugaccgugcccggucu

SEQ ID NO: 1550177 - RNA, 14 nt, Human adenovirus C
agagcgacugcgcc

SEQ ID NO: 1550178 - RNA, 19 nt, Human adenovirus C
cguugguuuucuuguauuc

SEQ ID NO: 1550179 - RNA, 18 nt, Human adenovirus C
uacgagagcguggugagc

SEQ ID NO: 1550180 - RNA, 14 nt, Human adenovirus C
gaucugcuggcgca

SEQ ID NO: 1550181 - RNA, 17 nt, Human adenovirus C
cacugaucgccgcggcg

SEQ ID NO: 1550182 - RNA, 17 nt, Human adenovirus C
gcuccccuggacccgcc

SEQ ID NO: 1550183 - RNA, 23 nt, Human adenovirus C
acugcagguacgccugcaggaau

SEQ ID NO: 1550184 - RNA, 14 nt, Human adenovirus C
ccauccggcccagg

SEQ ID NO: 1550185 - RNA, 20 nt, Human adenovirus C
ccggcgcgcgcaaaccccac

SEQ ID NO: 1550186 - RNA, 23 nt, Human adenovirus C
agcacgaaggaggcuaaguggga

SEQ ID NO: 1550187 - RNA, 15 nt, Human adenovirus C
gauggaagacuggga

SEQ ID NO: 1550188 - RNA, 20 nt, Human adenovirus C
acagcagcggucacacagaa

SEQ ID NO: 1550189 - RNA, 18 nt, Human adenovirus C
ugcaaacggacccgugga

SEQ ID NO: 1550190 - RNA, 16 nt, Human adenovirus C
cagcgcacuacugccc

SEQ ID NO: 1550191 - RNA, 20 nt, Human adenovirus C
aaggugguagauggccuggc

SEQ ID NO: 1550192 - RNA, 17 nt, Human adenovirus C
caaagcaggggccaaga

SEQ ID NO: 1550193 - RNA, 12 nt, Human adenovirus C
caccucugggga

SEQ ID NO: 1550194 - RNA, 20 nt, Human adenovirus C
cuuugguagcugccuuccca

SEQ ID NO: 1550195 - RNA, 22 nt, Human adenovirus C
cauguggaguuaccagccacaa

SEQ ID NO: 1550196 - RNA, 18 nt, Human adenovirus C
ccaggaaccaugacaaaa

SEQ ID NO: 1550197 - RNA, 12 nt, Human adenovirus C
cagucaggcaga

SEQ ID NO: 1550198 - RNA, 15 nt, Human adenovirus C
ccagguacagcccac

SEQ ID NO: 1550199 - RNA, 17 nt, Human adenovirus C
ggcggugcgggcggcgc

SEQ ID NO: 1550200 - RNA, 21 nt, Human adenovirus C
caugaagggcacgagcugcuu

SEQ ID NO: 1550201 - RNA, 17 nt, Human adenovirus C
uuggacaccuccgcacc

SEQ ID NO: 1550202 - RNA, 18 nt, Human adenovirus C
uucaacuaacauaaacac

SEQ ID NO: 1550203 - RNA, 13 nt, Human adenovirus C
accccgcgccacu

SEQ ID NO: 1550204 - RNA, 18 nt, Human adenovirus C
ugacaguauuacccagaa

SEQ ID NO: 1550205 - RNA, 12 nt, Human adenovirus C
ccggcgcacggc

SEQ ID NO: 1550206 - RNA, 21 nt, Human adenovirus C
gcaauucaaguaacucuacaa

SEQ ID NO: 1550207 - RNA, 18 nt, Human adenovirus C
ccgcaggccaagcagcuu

SEQ ID NO: 1550208 - RNA, 20 nt, Human adenovirus C
aacaagcgagugguggcucc

SEQ ID NO: 1550209 - RNA, 15 nt, Human adenovirus C
gagcagcuggcgcgc

SEQ ID NO: 1550210 - RNA, 18 nt, Human adenovirus C
gacuacgguaccgcgcgg

SEQ ID NO: 1550211 - RNA, 20 nt, Human adenovirus C
gcugagguacgaugagaccc

SEQ ID NO: 1550212 - RNA, 13 nt, Human adenovirus C
uugguucuuacaa

SEQ ID NO: 1550213 - RNA, 11 nt, Human adenovirus C
ccguggagaca

SEQ ID NO: 1550214 - RNA, 12 nt, Human adenovirus C
ugggugagcgca

SEQ ID NO: 1550215 - RNA, 21 nt, Human adenovirus C
gcagcuguuggaucugcgcca

SEQ ID NO: 1550216 - RNA, 19 nt, Human adenovirus C
aaagccaccugagccuuug

SEQ ID NO: 1550217 - RNA, 22 nt, Human adenovirus C
agccuauccaaaaacccaaagu

SEQ ID NO: 1550218 - RNA, 17 nt, Human adenovirus C
caggccagaugcugagg

SEQ ID NO: 1550219 - RNA, 18 nt, Human adenovirus C
cggcagacaugcagggca

SEQ ID NO: 1550220 - RNA, 21 nt, Human adenovirus C
ucauugugcucaacccacaca

SEQ ID NO: 1550221 - RNA, 22 nt, Human adenovirus C
augaacuugacgacgaggugga

SEQ ID NO: 1550222 - RNA, 13 nt, Human adenovirus C
caaggccuggaac

SEQ ID NO: 1550223 - RNA, 16 nt, Human adenovirus C
agcgcgcgcagcagca

SEQ ID NO: 1550224 - RNA, 14 nt, Human adenovirus C
aucagccccccucu

SEQ ID NO: 1550225 - RNA, 15 nt, Human adenovirus C
gaaugcgcaggcggu

SEQ ID NO: 1550226 - RNA, 22 nt, Human adenovirus C
cagaaaccugugcugccagggc

SEQ ID NO: 1550227 - RNA, 16 nt, Human adenovirus C
uccauggucuggagcu

SEQ ID NO: 1550228 - RNA, 14 nt, Human adenovirus C
acgccaacuccgcc

SEQ ID NO: 1550229 - RNA, 21 nt, Human adenovirus C
caccgucgcaugcgcggcggu

SEQ ID NO: 1550230 - RNA, 18 nt, Human adenovirus C
cauggugucauaguccag

SEQ ID NO: 1550231 - RNA, 20 nt, Human adenovirus C
agcccaagaaauccacagcg

SEQ ID NO: 1550232 - RNA, 13 nt, Human adenovirus C
uggaggcagcugg

SEQ ID NO: 1550233 - RNA, 13 nt, Human adenovirus C
ccgcgcccaccga

SEQ ID NO: 1550234 - RNA, 18 nt, Human adenovirus C
cgcugaccugcgcugggc

SEQ ID NO: 1550235 - RNA, 20 nt, Human adenovirus C
gaaauccacagcggcggcag

SEQ ID NO: 1550236 - RNA, 13 nt, Human adenovirus C
cuccuaacugcag

SEQ ID NO: 1550237 - RNA, 14 nt, Human adenovirus C
augcgcgggcggca

SEQ ID NO: 1550238 - RNA, 19 nt, Human adenovirus C
gagucaacuuugguagcug

SEQ ID NO: 1550239 - RNA, 14 nt, Human adenovirus C
cgaaugagcuccac

SEQ ID NO: 1550240 - RNA, 19 nt, Human adenovirus C
ccugccaccucccucccaa

SEQ ID NO: 1550241 - RNA, 11 nt, Human adenovirus C
ccguucccacg

SEQ ID NO: 1550242 - RNA, 19 nt, Human adenovirus C
cggugagcgcuccacccgc

SEQ ID NO: 1550243 - RNA, 17 nt, Human adenovirus C
uggcauuagcggggugg

SEQ ID NO: 1550244 - RNA, 12 nt, Human adenovirus C
gcccgccaccug

SEQ ID NO: 1550245 - RNA, 17 nt, Human adenovirus C
cgcgcuggccagggugc

SEQ ID NO: 1550246 - RNA, 21 nt, Human adenovirus C
uacggcaucucgauccagcau

SEQ ID NO: 1550247 - RNA, 13 nt, Human adenovirus C
cagcgccucccaa

SEQ ID NO: 1550248 - RNA, 13 nt, Human adenovirus C
ugcuuauuacagc

SEQ ID NO: 1550249 - RNA, 17 nt, Human adenovirus C
auuacaaaaagcgggcu

SEQ ID NO: 1550250 - RNA, 13 nt, Human adenovirus C
cauccgcggcagc

SEQ ID NO: 1550251 - RNA, 20 nt, Human adenovirus C
gcaccucgcgcucaaaggcu

SEQ ID NO: 1550252 - RNA, 21 nt, Human adenovirus C
cuguuuauucuuauacuagca

SEQ ID NO: 1550253 - RNA, 22 nt, Human adenovirus C
gugacgaaaaggcuguccgugu

SEQ ID NO: 1550254 - RNA, 11 nt, Human adenovirus C
ggcaugacuuc

SEQ ID NO: 1550255 - RNA, 18 nt, Human adenovirus C
acucucgcaaggccuggc

SEQ ID NO: 1550256 - RNA, 14 nt, Human adenovirus C
acuuggaggagcga

SEQ ID NO: 1550257 - RNA, 17 nt, Human adenovirus C
ugccccaaucaaucagc

SEQ ID NO: 1550258 - RNA, 19 nt, Human adenovirus C
ucggcagaaacagagggcu

SEQ ID NO: 1550259 - RNA, 16 nt, Human adenovirus C
gaccgucuggcugcuc

SEQ ID NO: 1550260 - RNA, 19 nt, Human adenovirus C
cugcuuaaaagccaccuga

SEQ ID NO: 1550261 - RNA, 21 nt, Human adenovirus C
aggcagaacgggguucuggaa

SEQ ID NO: 1550262 - RNA, 13 nt, Human adenovirus C
caucccaccuuuc

SEQ ID NO: 1550263 - RNA, 21 nt, Human adenovirus C
gcagacuuuuaagggcguaga

SEQ ID NO: 1550264 - RNA, 23 nt, Human adenovirus C
cuagcuacuguagcugcuuuggc

SEQ ID NO: 1550265 - RNA, 22 nt, Human adenovirus C
cccuuacuacaccuacucuggc

SEQ ID NO: 1550266 - RNA, 22 nt, Human adenovirus C
gacauguuggcguugccgcugg

SEQ ID NO: 1550267 - RNA, 15 nt, Human adenovirus C
gacaugcagggcacc

SEQ ID NO: 1550268 - RNA, 13 nt, Human adenovirus C
aaccugugcugcc

SEQ ID NO: 1550269 - RNA, 14 nt, Human adenovirus C
gcagggccagcuga

SEQ ID NO: 1550270 - RNA, 17 nt, Human adenovirus C
ggcgcggcggcugcugc

SEQ ID NO: 1550271 - RNA, 19 nt, Human adenovirus C
ccguugauguuguggccca

SEQ ID NO: 1550272 - RNA, 15 nt, Human adenovirus C
caauaaaaacuaaaa

SEQ ID NO: 1550273 - RNA, 22 nt, Human adenovirus C
acgaaggaggcguaggagucgc

SEQ ID NO: 1550274 - RNA, 16 nt, Human adenovirus C
uccacccgcaccuaca

SEQ ID NO: 1550275 - RNA, 15 nt, Human adenovirus C
agcgacgaccugggc

SEQ ID NO: 1550276 - RNA, 15 nt, Human adenovirus C
cauucagaccguggu

SEQ ID NO: 1550277 - RNA, 22 nt, Human adenovirus C
ugucccuuuuuuuuccacagcu

SEQ ID NO: 1550278 - RNA, 13 nt, Human adenovirus C
ccagccugugaug

SEQ ID NO: 1550279 - RNA, 11 nt, Human adenovirus C
accgcagaccc

SEQ ID NO: 1550280 - RNA, 12 nt, Human adenovirus C
accccgcaccgc

SEQ ID NO: 1550281 - RNA, 15 nt, Human adenovirus C
uacuggcugcagcca

SEQ ID NO: 1550282 - RNA, 18 nt, Human adenovirus C
ugcacgcuggccagcacg

SEQ ID NO: 1550283 - RNA, 19 nt, Human adenovirus C
cggggauggcgcaggcggc

SEQ ID NO: 1550284 - RNA, 18 nt, Human adenovirus C
aucugggucaccaggcgc

SEQ ID NO: 1550285 - RNA, 19 nt, Human adenovirus C
aaaacccaaagucaaacug

SEQ ID NO: 1550286 - RNA, 15 nt, Human adenovirus C
cugugcuacaccugg

SEQ ID NO: 1550287 - RNA, 19 nt, Human adenovirus C
ucgagaaggaggacagccu

SEQ ID NO: 1550288 - RNA, 19 nt, Human adenovirus C
agcccgagggccgcuggcu

SEQ ID NO: 1550289 - RNA, 18 nt, Human adenovirus C
aauggggcggggcuuaaa

SEQ ID NO: 1550290 - RNA, 22 nt, Human adenovirus C
accggcacuucuucuucuccuu

SEQ ID NO: 1550291 - RNA, 20 nt, Human adenovirus C
gaagaucuggaaggugcuga

SEQ ID NO: 1550292 - RNA, 19 nt, Human adenovirus C
cagcaggaggaagccaggc

SEQ ID NO: 1550293 - RNA, 16 nt, Human adenovirus C
aucccuuuaaccacca

SEQ ID NO: 1550294 - RNA, 17 nt, Human adenovirus C
uccaggccagcacgaag

SEQ ID NO: 1550295 - RNA, 14 nt, Human adenovirus C
ugcauguggaaaaa

SEQ ID NO: 1550296 - RNA, 16 nt, Human adenovirus C
accaaaguugcaggag

SEQ ID NO: 1550297 - RNA, 22 nt, Human adenovirus C
gcagcacaggccagaugcugag

SEQ ID NO: 1550298 - RNA, 18 nt, Human adenovirus C
aucaaagaagagaugcuc

SEQ ID NO: 1550299 - RNA, 20 nt, Human adenovirus C
ggcgcaguaguccaggguuu

SEQ ID NO: 1550300 - RNA, 12 nt, Human adenovirus C
accgcaaaguga

SEQ ID NO: 1550301 - RNA, 19 nt, Human adenovirus C
gucaugcaagaccccgcuu

SEQ ID NO: 1550302 - RNA, 12 nt, Human adenovirus C
augaacugcucg

SEQ ID NO: 1550303 - RNA, 14 nt, Human adenovirus C
cugaucucacuuaa

SEQ ID NO: 1550304 - RNA, 18 nt, Human adenovirus C
guuccuuauagugcagca

SEQ ID NO: 1550305 - RNA, 21 nt, Human adenovirus C
augacaacaucgcgcagaugg

SEQ ID NO: 1550306 - RNA, 23 nt, Human adenovirus C
ccuggcggacauuaucuuccccg

SEQ ID NO: 1550307 - RNA, 23 nt, Human adenovirus C
ucuugcauacggccgccagagcu

SEQ ID NO: 1550308 - RNA, 13 nt, Human adenovirus C
cgccauagucaau

SEQ ID NO: 1550309 - RNA, 15 nt, Human adenovirus C
aguguccacagugga

SEQ ID NO: 1550310 - RNA, 20 nt, Human adenovirus C
cggcugaagcagggccaggu

SEQ ID NO: 1550311 - RNA, 18 nt, Human adenovirus C
cucaggggcgcagcuugc

SEQ ID NO: 1550312 - RNA, 16 nt, Human adenovirus C
cgccaccaccgccucc

SEQ ID NO: 1550313 - RNA, 12 nt, Human adenovirus C
ccaucaccaccg

SEQ ID NO: 1550314 - RNA, 15 nt, Human adenovirus C
cagcagauuaaggau

SEQ ID NO: 1550315 - RNA, 20 nt, Human adenovirus C
ccgccaagaguuucugcuac

SEQ ID NO: 1550316 - RNA, 21 nt, Human adenovirus C
gcccugcgcgcgcgaguugcg

SEQ ID NO: 1550317 - RNA, 14 nt, Human adenovirus C
gcucccaccacugu

SEQ ID NO: 1550318 - RNA, 17 nt, Human adenovirus C
gcgcacccgccccccgc

SEQ ID NO: 1550319 - RNA, 22 nt, Human adenovirus C
gugccgggauuccgaggaagaa

SEQ ID NO: 1550320 - RNA, 18 nt, Human adenovirus C
auuugaagagcuuuugaa

SEQ ID NO: 1550321 - RNA, 13 nt, Human adenovirus C
aggcagcuggggc

SEQ ID NO: 1550322 - RNA, 11 nt, Human adenovirus C
ggaugagcucg

SEQ ID NO: 1550323 - RNA, 15 nt, Human adenovirus C
ugguucuugcagaua

SEQ ID NO: 1550324 - RNA, 15 nt, Human adenovirus C
aaggcuacaggggcc

SEQ ID NO: 1550325 - RNA, 13 nt, Human adenovirus C
acugacgccagac

SEQ ID NO: 1550326 - RNA, 16 nt, Human adenovirus C
gcggccugggcgaaga

SEQ ID NO: 1550327 - RNA, 19 nt, Human adenovirus C
ccguguaccugcgcacgcc

SEQ ID NO: 1550328 - RNA, 14 nt, Human adenovirus C
uacuuuccaggaga

SEQ ID NO: 1550329 - RNA, 15 nt, Human adenovirus C
aucaccuacgaugac

SEQ ID NO: 1550330 - RNA, 14 nt, Human adenovirus C
uggccgcgggcugg

SEQ ID NO: 1550331 - RNA, 22 nt, Human adenovirus C
cagucgagaaggaggacagccu

SEQ ID NO: 1550332 - RNA, 16 nt, Human adenovirus C
cacgaaaaccgccucg

SEQ ID NO: 1550333 - RNA, 16 nt, Human adenovirus C
uggcacuuaggccaga

SEQ ID NO: 1550334 - RNA, 15 nt, Human adenovirus C
aacagagggcugccu

SEQ ID NO: 1550335 - RNA, 19 nt, Human adenovirus C
ccgcggcgugcuggacagg

SEQ ID NO: 1550336 - RNA, 16 nt, Human adenovirus C
aggucugcacggacca

SEQ ID NO: 1550337 - RNA, 22 nt, Human adenovirus C
gcgcauccacaaggccgugagc

SEQ ID NO: 1550338 - RNA, 20 nt, Human adenovirus C
cggcaugcgucgugcgcacc

SEQ ID NO: 1550339 - RNA, 22 nt, Human adenovirus C
ugcugcacgcacguuuguaccu

SEQ ID NO: 1550340 - RNA, 23 nt, Human adenovirus C
aaacuuaccuacgaaaaaaccac

SEQ ID NO: 1550341 - RNA, 21 nt, Human adenovirus C
ggacaccacuggaaccagggc

SEQ ID NO: 1550342 - RNA, 15 nt, Human adenovirus C
cauccgcccugcucc

SEQ ID NO: 1550343 - RNA, 16 nt, Human adenovirus C
acccuuccaggagggc

SEQ ID NO: 1550344 - RNA, 12 nt, Human adenovirus C
cggcgacgggga

SEQ ID NO: 1550345 - RNA, 19 nt, Human adenovirus C
uggccuuuagauguagcau

SEQ ID NO: 1550346 - RNA, 20 nt, Human adenovirus C
agcagguuccugagcagcug

SEQ ID NO: 1550347 - RNA, 13 nt, Human adenovirus C
gccuggcgcggcu

SEQ ID NO: 1550348 - RNA, 22 nt, Human adenovirus C
ggcuugggaguguuuggaagau

SEQ ID NO: 1550349 - RNA, 22 nt, Human adenovirus C
caaugcagaaacacaagcuaaa

SEQ ID NO: 1550350 - RNA, 22 nt, Human adenovirus C
ggcaguugccgaggaugaagaa

SEQ ID NO: 1550351 - RNA, 13 nt, Human adenovirus C
cgcgugcccgugc

SEQ ID NO: 1550352 - RNA, 15 nt, Human adenovirus C
ccgccgcaccgugcg

SEQ ID NO: 1550353 - RNA, 19 nt, Human adenovirus C
cgaugauauccguagaugu

SEQ ID NO: 1550354 - RNA, 18 nt, Human adenovirus C
gaagcuggcgucugugag

SEQ ID NO: 1550355 - RNA, 23 nt, Human adenovirus C
aacucgcgccuguugcugcugcu

SEQ ID NO: 1550356 - RNA, 16 nt, Human adenovirus C
uagcauguagaacugg

SEQ ID NO: 1550357 - RNA, 12 nt, Human adenovirus C
ccaaccgcagcc

SEQ ID NO: 1550358 - RNA, 22 nt, Human adenovirus C
cagaggagguuuuggacgagga

SEQ ID NO: 1550359 - RNA, 21 nt, Human adenovirus C
gcaaagcacacugaacagcau

SEQ ID NO: 1550360 - RNA, 14 nt, Human adenovirus C
gugacugacuuugc

SEQ ID NO: 1550361 - RNA, 18 nt, Human adenovirus C
cauaaguuuggacaccuc

SEQ ID NO: 1550362 - RNA, 18 nt, Human adenovirus C
ccagaacgaccacagcaa

SEQ ID NO: 1550363 - RNA, 17 nt, Human adenovirus C
cucggcagacgacagca

SEQ ID NO: 1550364 - RNA, 15 nt, Human adenovirus C
gcauggucucgguga

SEQ ID NO: 1550365 - RNA, 16 nt, Human adenovirus C
ugcgcgcuggccaggg

SEQ ID NO: 1550366 - RNA, 17 nt, Human adenovirus C
caaauacuaccucuuug

SEQ ID NO: 1550367 - RNA, 20 nt, Human adenovirus C
uuccauaagggccuccccuu

SEQ ID NO: 1550368 - RNA, 20 nt, Human adenovirus C
ccagcugcugagccacaggc

SEQ ID NO: 1550369 - RNA, 13 nt, Human adenovirus C
auucccagcugcu

SEQ ID NO: 1550370 - RNA, 13 nt, Human adenovirus C
gcugggggcaaca

SEQ ID NO: 1550371 - RNA, 21 nt, Human adenovirus C
cgccaaccgcgguugugcagg

SEQ ID NO: 1550372 - RNA, 22 nt, Human adenovirus C
uguucuaauggagaacuccuca

SEQ ID NO: 1550373 - RNA, 16 nt, Human adenovirus C
ggcggcgcugcagagc

SEQ ID NO: 1550374 - RNA, 17 nt, Human adenovirus C
cgaugaguacgagccag

SEQ ID NO: 1550375 - RNA, 21 nt, Human adenovirus C
ggccccgcgacacggcucgcg

SEQ ID NO: 1550376 - RNA, 18 nt, Human adenovirus C
ucggggucaaaaaccagg

SEQ ID NO: 1550377 - RNA, 13 nt, Human adenovirus C
cacugccacagag

SEQ ID NO: 1550378 - RNA, 19 nt, Human adenovirus C
cauucagggaugcgcugcu

SEQ ID NO: 1550379 - RNA, 16 nt, Human adenovirus C
cggcgccgggcccggc

SEQ ID NO: 1550380 - RNA, 13 nt, Human adenovirus C
ggggugggugagc

SEQ ID NO: 1550381 - RNA, 17 nt, Human adenovirus C
agccaggugagcucugg

SEQ ID NO: 1550382 - RNA, 18 nt, Human adenovirus C
ggcagcggugcacgggcu

SEQ ID NO: 1550383 - RNA, 15 nt, Human adenovirus C
gacuugcggcuggag

SEQ ID NO: 1550384 - RNA, 22 nt, Human adenovirus C
gcggguauugucacugugcccc

SEQ ID NO: 1550385 - RNA, 16 nt, Human adenovirus C
uggacgucgcgccgca

SEQ ID NO: 1550386 - RNA, 16 nt, Human adenovirus C
cuccacgccuuugcca

SEQ ID NO: 1550387 - RNA, 18 nt, Human adenovirus C
cgagguccgcgugcggcc

SEQ ID NO: 1550388 - RNA, 12 nt, Human adenovirus C
ugcagcacugga

SEQ ID NO: 1550389 - RNA, 15 nt, Human adenovirus C
guggagaggcagagc

SEQ ID NO: 1550390 - RNA, 14 nt, Human adenovirus C
ggccucuucuucuu

SEQ ID NO: 1550391 - RNA, 23 nt, Human adenovirus C
acaccuacucuggcuccauacca

SEQ ID NO: 1550392 - RNA, 19 nt, Human adenovirus C
ggcaggacccuggugcugc

SEQ ID NO: 1550393 - RNA, 22 nt, Human adenovirus C
ccaucgcgcaacugggcagcau

SEQ ID NO: 1550394 - RNA, 21 nt, Human adenovirus C
ccagaccgucugaagacaccu

SEQ ID NO: 1550395 - RNA, 21 nt, Human adenovirus C
ccagauguccgcgcgcggcgg

SEQ ID NO: 1550396 - RNA, 20 nt, Human adenovirus C
ugcuccucguuuagccaggu

SEQ ID NO: 1550397 - RNA, 19 nt, Human adenovirus C
ccggaaaccucaccuccca

SEQ ID NO: 1550398 - RNA, 17 nt, Human adenovirus C
caccuacgaugaccugg

SEQ ID NO: 1550399 - RNA, 18 nt, Human adenovirus C
auuccucgaguucuuaua

SEQ ID NO: 1550400 - RNA, 17 nt, Human adenovirus C
acgaucuuggccuugcu

SEQ ID NO: 1550401 - RNA, 14 nt, Human adenovirus C
ugguuuccaugagc

SEQ ID NO: 1550402 - RNA, 16 nt, Human adenovirus C
ucgcguccaggccagc

SEQ ID NO: 1550403 - RNA, 21 nt, Human adenovirus C
ggcccuuggcgcgcagcuugc

SEQ ID NO: 1550404 - RNA, 20 nt, Human adenovirus C
auuucaaucacgugcuccuu

SEQ ID NO: 1550405 - RNA, 16 nt, Human adenovirus C
ugcccuuggaggaggc

SEQ ID NO: 1550406 - RNA, 18 nt, Human adenovirus C
gugcccgugcgcacccgc

SEQ ID NO: 1550407 - RNA, 17 nt, Human adenovirus C
cagccgcgcgcuggggc

SEQ ID NO: 1550408 - RNA, 22 nt, Human adenovirus C
agcugccgucaucccugagcag

SEQ ID NO: 1550409 - RNA, 18 nt, Human adenovirus C
agugcgcgugcgcgggca

SEQ ID NO: 1550410 - RNA, 19 nt, Human adenovirus C
ccauggcccacaacacggc

SEQ ID NO: 1550411 - RNA, 20 nt, Human adenovirus C
gccugcugcaccugcgugag

SEQ ID NO: 1550412 - RNA, 14 nt, Human adenovirus C
ccugcgcugggccc

SEQ ID NO: 1550413 - RNA, 19 nt, Human adenovirus C
auggcaguggucuccucag

SEQ ID NO: 1550414 - RNA, 21 nt, Human adenovirus C
cccuugcggcagucugcagcg

SEQ ID NO: 1550415 - RNA, 19 nt, Human adenovirus C
ugaccuccgagauuuucca

SEQ ID NO: 1550416 - RNA, 12 nt, Human adenovirus C
gaccugcuugag

SEQ ID NO: 1550417 - RNA, 14 nt, Human adenovirus C
cggugcgaggaugc

SEQ ID NO: 1550418 - RNA, 16 nt, Human adenovirus C
ccugguaggcgcagca

SEQ ID NO: 1550419 - RNA, 12 nt, Human adenovirus C
ccuccugccagg

SEQ ID NO: 1550420 - RNA, 14 nt, Human adenovirus C
ccagcugcuacaac

SEQ ID NO: 1550421 - RNA, 19 nt, Human adenovirus C
aggugguagauggccuggc

SEQ ID NO: 1550422 - RNA, 21 nt, Human adenovirus C
gugcuuaaaaaaacaacuccc

SEQ ID NO: 1550423 - RNA, 12 nt, Human adenovirus C
ugcgggccauga

SEQ ID NO: 1550424 - RNA, 22 nt, Human adenovirus C
uauaaauuuccauuuuaugaaa

SEQ ID NO: 1550425 - RNA, 24 nt, Human adenovirus C
gugacaaggucaacgcugguggcu

SEQ ID NO: 1550426 - RNA, 21 nt, Human adenovirus C
cgccaccuucuuccccauggc

SEQ ID NO: 1550427 - RNA, 21 nt, Human adenovirus C
cuugaaagugggcaggcagaa

SEQ ID NO: 1550428 - RNA, 15 nt, Human adenovirus C
gcggcggugggggag

SEQ ID NO: 1550429 - RNA, 19 nt, Human adenovirus C
cccuggcuggcacgggcag

SEQ ID NO: 1550430 - RNA, 18 nt, Human adenovirus C
gcggcggugggggagggg

SEQ ID NO: 1550431 - RNA, 17 nt, Human adenovirus C
gcaggaggaagccaggc

SEQ ID NO: 1550432 - RNA, 14 nt, Human adenovirus C
gcagccgcaggcca

SEQ ID NO: 1550433 - RNA, 18 nt, Human adenovirus C
cgaugaugccgcaguggu

SEQ ID NO: 1550434 - RNA, 21 nt, Human adenovirus C
ggugaugccuuugaggguggc

SEQ ID NO: 1550435 - RNA, 22 nt, Human adenovirus C
cuaggggguccacucgcuccag

SEQ ID NO: 1550436 - RNA, 18 nt, Human adenovirus C
ccgaagaaaagcgcggcc

SEQ ID NO: 1550437 - RNA, 23 nt, Human adenovirus C
ucgcggacgcgguuccagauguu

SEQ ID NO: 1550438 - RNA, 22 nt, Human adenovirus C
ccccuucccugggaucaggcua

SEQ ID NO: 1550439 - RNA, 15 nt, Human adenovirus C
gcaacccaacaccua

SEQ ID NO: 1550440 - RNA, 23 nt, Human adenovirus C
cagaccaaagcaaaccucaccuc

SEQ ID NO: 1550441 - RNA, 14 nt, Human adenovirus C
cauaguagagcccg

SEQ ID NO: 1550442 - RNA, 17 nt, Human adenovirus C
acaccuagccuaaagcc

SEQ ID NO: 1550443 - RNA, 17 nt, Human adenovirus C
ccaagaacaagagcuga

SEQ ID NO: 1550444 - RNA, 16 nt, Human adenovirus C
accagaacgaccacag

SEQ ID NO: 1550445 - RNA, 14 nt, Human adenovirus C
ucgggccaggacgc

SEQ ID NO: 1550446 - RNA, 18 nt, Human adenovirus C
gccuuaggguugccgccu

SEQ ID NO: 1550447 - RNA, 19 nt, Human adenovirus C
cuucccugggaucaggcua

SEQ ID NO: 1550448 - RNA, 12 nt, Human adenovirus C
caagaccaggac

SEQ ID NO: 1550449 - RNA, 19 nt, Human adenovirus C
cuggccgaaaacagggcca

SEQ ID NO: 1550450 - RNA, 19 nt, Human adenovirus C
agcucggcggugaccugca

SEQ ID NO: 1550451 - RNA, 15 nt, Human adenovirus C
cauugcguaccucag

SEQ ID NO: 1550452 - RNA, 21 nt, Human adenovirus C
cgagugguggcucccgggcuu

SEQ ID NO: 1550453 - RNA, 16 nt, Human adenovirus C
agagccuaguggacaa

SEQ ID NO: 1550454 - RNA, 15 nt, Human adenovirus C
gacaagcuaaaauac

SEQ ID NO: 1550455 - RNA, 16 nt, Human adenovirus C
acgcccaacucgcgcc

SEQ ID NO: 1550456 - RNA, 13 nt, Human adenovirus C
cgcucccuggucu

SEQ ID NO: 1550457 - RNA, 17 nt, Human adenovirus C
aacaaacagagcgauuu

SEQ ID NO: 1550458 - RNA, 19 nt, Human adenovirus C
cuuccuagcgacuuugugc

SEQ ID NO: 1550459 - RNA, 19 nt, Human adenovirus C
ucgcuacaaccuccgcucc

SEQ ID NO: 1550460 - RNA, 22 nt, Human adenovirus C
ucccagaugcauccggugcugc

SEQ ID NO: 1550461 - RNA, 14 nt, Human adenovirus C
aucaaacccagcuu

SEQ ID NO: 1550462 - RNA, 13 nt, Human adenovirus C
aagaagagcaaaa

SEQ ID NO: 1550463 - RNA, 17 nt, Human adenovirus C
caaagcaaaccucaccu

SEQ ID NO: 1550464 - RNA, 16 nt, Human adenovirus C
cagcagccgcaggcca

SEQ ID NO: 1550465 - RNA, 13 nt, Human adenovirus C
aggcagaggaggu

SEQ ID NO: 1550466 - RNA, 14 nt, Human adenovirus C
cuggaacagcagca

SEQ ID NO: 1550467 - RNA, 17 nt, Human adenovirus C
ucaggcuacuaagaaaa

SEQ ID NO: 1550468 - RNA, 22 nt, Human adenovirus C
ccuuccccgucgaggcaccccc

SEQ ID NO: 1550469 - RNA, 16 nt, Human adenovirus C
cgcaugaccaccugcg

SEQ ID NO: 1550470 - RNA, 20 nt, Human adenovirus C
gugccgcggggacaggagga

SEQ ID NO: 1550471 - RNA, 12 nt, Human adenovirus C
uaacucuacaag

SEQ ID NO: 1550472 - RNA, 17 nt, Human adenovirus C
uucagcaaauacugcgc

SEQ ID NO: 1550473 - RNA, 17 nt, Human adenovirus C
auguagcuuagaaggaa

SEQ ID NO: 1550474 - RNA, 20 nt, Human adenovirus C
caacugcgaggacagggccu

SEQ ID NO: 1550475 - RNA, 14 nt, Human adenovirus C
cagcaggugcugcc

SEQ ID NO: 1550476 - RNA, 21 nt, Human adenovirus C
agcugcaaacuuucuccaaag

SEQ ID NO: 1550477 - RNA, 16 nt, Human adenovirus C
cgaucuuggccuugcu

SEQ ID NO: 1550478 - RNA, 14 nt, Human adenovirus C
ugguggaccuggcc

SEQ ID NO: 1550479 - RNA, 17 nt, Human adenovirus C
aucccacacugcaggga

SEQ ID NO: 1550480 - RNA, 20 nt, Human adenovirus C
auccgcucauggacccuccu

SEQ ID NO: 1550481 - RNA, 21 nt, Human adenovirus C
uacuugaaagugggcaggcag

SEQ ID NO: 1550482 - RNA, 20 nt, Human adenovirus C
ggaggacacgggcagccugg

SEQ ID NO: 1550483 - RNA, 18 nt, Human adenovirus C
ggggguccacucgcucca

SEQ ID NO: 1550484 - RNA, 14 nt, Human adenovirus C
gcauccgcgccgca

SEQ ID NO: 1550485 - RNA, 16 nt, Human adenovirus C
ucaccugaaaaucaga

SEQ ID NO: 1550486 - RNA, 16 nt, Human adenovirus C
agccagaucagcaacu

SEQ ID NO: 1550487 - RNA, 20 nt, Human adenovirus C
uggcuauaggacugaugcau

SEQ ID NO: 1550488 - RNA, 20 nt, Human adenovirus C
cagggcuacgugcgccaggc

SEQ ID NO: 1550489 - RNA, 20 nt, Human adenovirus C
ggcccuggcuggcacgggca

SEQ ID NO: 1550490 - RNA, 12 nt, Human adenovirus C
agcaacagcagc

SEQ ID NO: 1550491 - RNA, 22 nt, Human adenovirus C
uggccgcgauguuuagcugcac

SEQ ID NO: 1550492 - RNA, 16 nt, Human adenovirus C
aaacaauuacaaaaag

SEQ ID NO: 1550493 - RNA, 16 nt, Human adenovirus C
cggccgggcaguugcc

SEQ ID NO: 1550494 - RNA, 18 nt, Human adenovirus C
gcaacccuuccaggaggg

SEQ ID NO: 1550495 - RNA, 13 nt, Human adenovirus C
cguccugagugug

SEQ ID NO: 1550496 - RNA, 18 nt, Human adenovirus C
cucguccagacgggccag

SEQ ID NO: 1550497 - RNA, 12 nt, Human adenovirus C
ggucagcugcaa

SEQ ID NO: 1550498 - RNA, 21 nt, Human adenovirus C
agccuguaagcgggcacucuu

SEQ ID NO: 1550499 - RNA, 21 nt, Human adenovirus C
cgcccugcgcgucggccaggu

SEQ ID NO: 1550500 - RNA, 23 nt, Human adenovirus C
ccgggacugggcgugcagaccgu

SEQ ID NO: 1550501 - RNA, 19 nt, Human adenovirus C
ccauucuccaguaacuuua

SEQ ID NO: 1550502 - RNA, 19 nt, Human adenovirus C
agccuggaggcaacccuga

SEQ ID NO: 1550503 - RNA, 14 nt, Human adenovirus C
cgccgccagaggag

SEQ ID NO: 1550504 - RNA, 22 nt, Human adenovirus C
cugggcauagucucgccgcgcg

SEQ ID NO: 1550505 - RNA, 14 nt, Human adenovirus C
gcucgaaggcuggc

SEQ ID NO: 1550506 - RNA, 16 nt, Human adenovirus C
cucggaguaccugagc

SEQ ID NO: 1550507 - RNA, 12 nt, Human adenovirus C
cacaauguggcc

SEQ ID NO: 1550508 - RNA, 11 nt, Human adenovirus C
uugggcaccua

SEQ ID NO: 1550509 - RNA, 18 nt, Human adenovirus C
uuucgcgcugcuccucuu

SEQ ID NO: 1550510 - RNA, 15 nt, Human adenovirus C
cgcaacaccacugcu

SEQ ID NO: 1550511 - RNA, 21 nt, Human adenovirus C
ggugaaaaucguaaaacuuuu

SEQ ID NO: 1550512 - RNA, 18 nt, Human adenovirus C
ucuauguggaaucaggcu

SEQ ID NO: 1550513 - RNA, 21 nt, Human adenovirus C
agguccaggcgacgagcggcc

SEQ ID NO: 1550514 - RNA, 16 nt, Human adenovirus C
gcaccagccgcaccgc

SEQ ID NO: 1550515 - RNA, 15 nt, Human adenovirus C
gcuugcgggcggcuu

SEQ ID NO: 1550516 - RNA, 21 nt, Human adenovirus C
cucugcgugaagacgacgggc

SEQ ID NO: 1550517 - RNA, 21 nt, Human adenovirus C
acugcucgaucucuuccuccu

SEQ ID NO: 1550518 - RNA, 23 nt, Human adenovirus C
cagcuggggccggaccugggcug

SEQ ID NO: 1550519 - RNA, 15 nt, Human adenovirus C
cgccgccggcacugc

SEQ ID NO: 1550520 - RNA, 20 nt, Human adenovirus C
agggcuacgugcgccaggcc

SEQ ID NO: 1550521 - RNA, 12 nt, Human adenovirus C
ccacgcucggug

SEQ ID NO: 1550522 - RNA, 15 nt, Human adenovirus C
gaucaccucugggga

SEQ ID NO: 1550523 - RNA, 16 nt, Human adenovirus C
cuucggcgcacgcugg

SEQ ID NO: 1550524 - RNA, 14 nt, Human adenovirus C
cugauugccagggg

SEQ ID NO: 1550525 - RNA, 13 nt, Human adenovirus C
aaugagacaugau

SEQ ID NO: 1550526 - RNA, 13 nt, Human adenovirus C
agacagaaacaca

SEQ ID NO: 1550527 - RNA, 17 nt, Human adenovirus C
acgguuaacuccuccuc

SEQ ID NO: 1550528 - RNA, 17 nt, Human adenovirus C
gguggcaccgggacugg

SEQ ID NO: 1550529 - RNA, 21 nt, Human adenovirus C
gagcucggcgacagugucgcg

SEQ ID NO: 1550530 - RNA, 17 nt, Human adenovirus C
cgcgucaugcacgcagc

SEQ ID NO: 1550531 - RNA, 21 nt, Human adenovirus C
caaacagagcgauuugucaga

SEQ ID NO: 1550532 - RNA, 22 nt, Human adenovirus C
cagcgaccgcgagcugaugcac

SEQ ID NO: 1550533 - RNA, 22 nt, Human adenovirus C
cgggguggacuucacccacagc

SEQ ID NO: 1550534 - RNA, 22 nt, Human adenovirus C
ucauagauuggacggucugaaa

SEQ ID NO: 1550535 - RNA, 17 nt, Human adenovirus C
cucgcccuacuuccgca

SEQ ID NO: 1550536 - RNA, 22 nt, Human adenovirus C
uguuaccguggagcuugagugc

SEQ ID NO: 1550537 - RNA, 18 nt, Human adenovirus C
aggugcgggcgugacaaa

SEQ ID NO: 1550538 - RNA, 18 nt, Human adenovirus C
uaugagcgguggcgccuu

SEQ ID NO: 1550539 - RNA, 19 nt, Human adenovirus C
gugaccccgaagccccuca

SEQ ID NO: 1550540 - RNA, 14 nt, Human adenovirus C
gcguguaugaugag

SEQ ID NO: 1550541 - RNA, 12 nt, Human adenovirus C
ggaucagacaau

SEQ ID NO: 1550542 - RNA, 21 nt, Human adenovirus C
aguuucgcgcccuuucucaaa

SEQ ID NO: 1550543 - RNA, 19 nt, Human adenovirus C
cccccgcugacacccagca

SEQ ID NO: 1550544 - RNA, 15 nt, Human adenovirus C
cggcggcagcagcag

SEQ ID NO: 1550545 - RNA, 17 nt, Human adenovirus C
aguccacgccuacaugg

SEQ ID NO: 1550546 - RNA, 16 nt, Human adenovirus C
cgcacgaaggaggcgu

SEQ ID NO: 1550547 - RNA, 14 nt, Human adenovirus C
cgcugacacccagc

SEQ ID NO: 1550548 - RNA, 18 nt, Human adenovirus C
ccacaaccuucaaaucaa

SEQ ID NO: 1550549 - RNA, 19 nt, Human adenovirus C
caaccaggcagugcaaaau

SEQ ID NO: 1550550 - RNA, 18 nt, Human adenovirus C
gaaugagcuccacagguc

SEQ ID NO: 1550551 - RNA, 15 nt, Human adenovirus C
cucagcgccucccaa

SEQ ID NO: 1550552 - RNA, 17 nt, Human adenovirus C
ggccuacuggaguguca

SEQ ID NO: 1550553 - RNA, 16 nt, Human adenovirus C
gacaccuccgcaccac

SEQ ID NO: 1550554 - RNA, 13 nt, Human adenovirus C
cucaaagcaucca

SEQ ID NO: 1550555 - RNA, 14 nt, Human adenovirus C
gaucggcgcgcucc

SEQ ID NO: 1550556 - RNA, 20 nt, Human adenovirus C
cgagcgcauccacaaggccg

SEQ ID NO: 1550557 - RNA, 22 nt, Human adenovirus C
cucuuauaaaaugcaccacaga

SEQ ID NO: 1550558 - RNA, 19 nt, Human adenovirus C
gcacgcaaccgcgcccagg

SEQ ID NO: 1550559 - RNA, 16 nt, Human adenovirus C
acccuggugcugccaa

SEQ ID NO: 1550560 - RNA, 23 nt, Human adenovirus C
gaucuuaugccaggccuacaaau

SEQ ID NO: 1550561 - RNA, 14 nt, Human adenovirus C
cagcagcacaggcc

SEQ ID NO: 1550562 - RNA, 15 nt, Human adenovirus C
cggucaccagaggcu

SEQ ID NO: 1550563 - RNA, 16 nt, Human adenovirus C
ucacccuggcuguggg

SEQ ID NO: 1550564 - RNA, 17 nt, Human adenovirus C
caccugucgucagcgcc

SEQ ID NO: 1550565 - RNA, 14 nt, Human adenovirus C
ggccagggugcgcu

SEQ ID NO: 1550566 - RNA, 18 nt, Human adenovirus C
gccucaacuucuaccccg

SEQ ID NO: 1550567 - RNA, 15 nt, Human adenovirus C
caugccuuugucaau

SEQ ID NO: 1550568 - RNA, 12 nt, Human adenovirus C
ccgccaacgugc

SEQ ID NO: 1550569 - RNA, 22 nt, Human adenovirus C
cagccucgccccccuucuccca

SEQ ID NO: 1550570 - RNA, 11 nt, Human adenovirus C
cgggcagcagc

SEQ ID NO: 1550571 - RNA, 12 nt, Human adenovirus C
ccggcacugccg

SEQ ID NO: 1550572 - RNA, 16 nt, Human adenovirus C
gucagccgcgcgcugg

SEQ ID NO: 1550573 - RNA, 15 nt, Human adenovirus C
accggagugcugggc

SEQ ID NO: 1550574 - RNA, 18 nt, Human adenovirus C
gaccgaggagcugaggcc

SEQ ID NO: 1550575 - RNA, 18 nt, Human adenovirus C
caguggagaggcagagcg

SEQ ID NO: 1550576 - RNA, 17 nt, Human adenovirus C
agcgguguuccgcgguc

SEQ ID NO: 1550577 - RNA, 16 nt, Human adenovirus C
ccagcuguugggguga

SEQ ID NO: 1550578 - RNA, 21 nt, Human adenovirus C
cggggggcugccgugcggcag

SEQ ID NO: 1550579 - RNA, 14 nt, Human adenovirus C
acgacgggcccggu

SEQ ID NO: 1550580 - RNA, 18 nt, Human adenovirus C
cguaauaaccuuaauccc

SEQ ID NO: 1550581 - RNA, 15 nt, Human adenovirus C
guugagugggggacc

SEQ ID NO: 1550582 - RNA, 22 nt, Human adenovirus C
accucagcgccucccaaaagac

SEQ ID NO: 1550583 - RNA, 21 nt, Human adenovirus C
ucccagcaucgcuacaaccuc

SEQ ID NO: 1550584 - RNA, 14 nt, Human adenovirus C
gcuuguagacugcu

SEQ ID NO: 1550585 - RNA, 22 nt, Human adenovirus C
uugcauuuggguaacaggaggg

SEQ ID NO: 1550586 - RNA, 19 nt, Human adenovirus C
gagacugcagccuccgccg

SEQ ID NO: 1550587 - RNA, 17 nt, Human adenovirus C
ggcgggcggugggccgc

SEQ ID NO: 1550588 - RNA, 14 nt, Human adenovirus C
agggccgcuggcug

SEQ ID NO: 1550589 - RNA, 17 nt, Human adenovirus C
acagccccuacugcacc

SEQ ID NO: 1550590 - RNA, 17 nt, Human adenovirus C
uacagucacaagcccca

SEQ ID NO: 1550591 - RNA, 17 nt, Human adenovirus C
gugccccucgccauagc

SEQ ID NO: 1550592 - RNA, 23 nt, Human adenovirus C
ccugcaacagggucugccagacu

SEQ ID NO: 1550593 - RNA, 13 nt, Human adenovirus C
uggccucuggcau

SEQ ID NO: 1550594 - RNA, 19 nt, Human adenovirus C
uaagauugucaguuuccaa

SEQ ID NO: 1550595 - RNA, 15 nt, Human adenovirus C
cgucuggcugcucga

SEQ ID NO: 1550596 - RNA, 17 nt, Human adenovirus C
augcauccggugcugcg

SEQ ID NO: 1550597 - RNA, 13 nt, Human adenovirus C
gacucugacaaag

SEQ ID NO: 1550598 - RNA, 18 nt, Human adenovirus C
ugagcuccucaggggagc

SEQ ID NO: 1550599 - RNA, 18 nt, Human adenovirus C
ucaugggaaacuggcaag

SEQ ID NO: 1550600 - RNA, 14 nt, Human adenovirus C
cacucgugcuggcu

SEQ ID NO: 1550601 - RNA, 21 nt, Human adenovirus C
guuaagagagcugcagcugcc

SEQ ID NO: 1550602 - RNA, 18 nt, Human adenovirus C
acgagucacuccugcgcc

SEQ ID NO: 1550603 - RNA, 12 nt, Human adenovirus C
ggccgggcaguu

SEQ ID NO: 1550604 - RNA, 19 nt, Human adenovirus C
ccuggccaaccaggcagug

SEQ ID NO: 1550605 - RNA, 19 nt, Human adenovirus C
acgucgccaccgccgccga

SEQ ID NO: 1550606 - RNA, 21 nt, Human adenovirus C
agcgccaacucguuugaugga

SEQ ID NO: 1550607 - RNA, 16 nt, Human adenovirus C
cacuagugaauccaca

SEQ ID NO: 1550608 - RNA, 23 nt, Human adenovirus C
cuugggagaggggcgcuucuuuu

SEQ ID NO: 1550609 - RNA, 17 nt, Human adenovirus C
cccucacccgcagcugc

SEQ ID NO: 1550610 - RNA, 21 nt, Human adenovirus C
cccauggacgagcccacccuu

SEQ ID NO: 1550611 - RNA, 22 nt, Human adenovirus C
cuuaggguugccgccugcugca

SEQ ID NO: 1550612 - RNA, 15 nt, Human adenovirus C
ugcuacaacaaacag

SEQ ID NO: 1550613 - RNA, 18 nt, Human adenovirus C
cuggccccgcgacacggc

SEQ ID NO: 1550614 - RNA, 21 nt, Human adenovirus C
ucucacgcucgcuugguccug

SEQ ID NO: 1550615 - RNA, 20 nt, Human adenovirus C
acgggcggcggccugggcga

SEQ ID NO: 1550616 - RNA, 12 nt, Human adenovirus C
aggggccaagaa

SEQ ID NO: 1550617 - RNA, 21 nt, Human adenovirus C
ucucgcaaggccuggccagug

SEQ ID NO: 1550618 - RNA, 19 nt, Human adenovirus C
gcgguucacccuggcugug

SEQ ID NO: 1550619 - RNA, 16 nt, Human adenovirus C
caacccaacaccuagc

SEQ ID NO: 1550620 - RNA, 12 nt, Human adenovirus C
cgguggcaccua

SEQ ID NO: 1550621 - RNA, 12 nt, Human adenovirus C
ugcgcuccgggc

SEQ ID NO: 1550622 - RNA, 18 nt, Human adenovirus C
uuaaacagcgaggaggag

SEQ ID NO: 1550623 - RNA, 20 nt, Human adenovirus C
cuguugauguggugaaagua

SEQ ID NO: 1550624 - RNA, 20 nt, Human adenovirus C
cuaccccguauuugccgugc

SEQ ID NO: 1550625 - RNA, 19 nt, Human adenovirus C
caccgucgcaugcgcggcg

SEQ ID NO: 1550626 - RNA, 23 nt, Human adenovirus C
aaacguagaggggcucucugagu

SEQ ID NO: 1550627 - RNA, 15 nt, Human adenovirus C
cauuuuugcccuagc

SEQ ID NO: 1550628 - RNA, 14 nt, Human adenovirus C
cgcggcgacggcgc

SEQ ID NO: 1550629 - RNA, 18 nt, Human adenovirus C
caccugucgucagcgcca

SEQ ID NO: 1550630 - RNA, 17 nt, Human adenovirus C
ccgccgccacccacgga

SEQ ID NO: 1550631 - RNA, 21 nt, Human adenovirus C
gugacaacgcgcgccuagccg

SEQ ID NO: 1550632 - RNA, 12 nt, Human adenovirus C
acgugcagacca

SEQ ID NO: 1550633 - RNA, 23 nt, Human adenovirus C
ugggccaaaaccuucucuacgcc

SEQ ID NO: 1550634 - RNA, 16 nt, Human adenovirus C
caacgcugguggcuac

SEQ ID NO: 1550635 - RNA, 22 nt, Human adenovirus C
cagugcuuguuaccguggagcu

SEQ ID NO: 1550636 - RNA, 16 nt, Human adenovirus C
gcggcagcaacagcag

SEQ ID NO: 1550637 - RNA, 16 nt, Human adenovirus C
ugcacuacucuuauaa

SEQ ID NO: 1550638 - RNA, 12 nt, Human adenovirus C
gccacagagggc

SEQ ID NO: 1550639 - RNA, 13 nt, Human adenovirus C
aucaggcuacuaa

SEQ ID NO: 1550640 - RNA, 17 nt, Human adenovirus C
ugcgccccccuccucag

SEQ ID NO: 1550641 - RNA, 19 nt, Human adenovirus C
agacguaugcgcaggagca

SEQ ID NO: 1550642 - RNA, 23 nt, Human adenovirus C
guccauccuuauaucgcccagca

SEQ ID NO: 1550643 - RNA, 13 nt, Human adenovirus C
caagggugcagcu

SEQ ID NO: 1550644 - RNA, 13 nt, Human adenovirus C
gacagggaagaaa

SEQ ID NO: 1550645 - RNA, 14 nt, Human adenovirus C
uaacuccagggugc

SEQ ID NO: 1550646 - RNA, 21 nt, Human adenovirus C
gcaccacauuucggccccacc

SEQ ID NO: 1550647 - RNA, 17 nt, Human adenovirus C
ccgggcagcaggcgcgc

SEQ ID NO: 1550648 - RNA, 17 nt, Human adenovirus C
ggaugucaaauuccuca

SEQ ID NO: 1550649 - RNA, 18 nt, Human adenovirus C
acuugcggcuggagcugc

SEQ ID NO: 1550650 - RNA, 14 nt, Human adenovirus C
ccaacacacagagu

SEQ ID NO: 1550651 - RNA, 17 nt, Human adenovirus C
ccacuguuacucagcca

SEQ ID NO: 1550652 - RNA, 18 nt, Human adenovirus C
ggugcugaagcgcugccg

SEQ ID NO: 1550653 - RNA, 24 nt, Human adenovirus C
cuccugcgccguagcgccauugcu

SEQ ID NO: 1550654 - RNA, 17 nt, Human adenovirus C
cacuggaacccgccgcc

SEQ ID NO: 1550655 - RNA, 16 nt, Human adenovirus C
caguuggaggaguggc

SEQ ID NO: 1550656 - RNA, 19 nt, Human adenovirus C
ggcucgcgaaggaggcagg

SEQ ID NO: 1550657 - RNA, 21 nt, Human adenovirus C
cguacacuggauggccuuugc

SEQ ID NO: 1550658 - RNA, 15 nt, Human adenovirus C
cuggugugggaggac

SEQ ID NO: 1550659 - RNA, 19 nt, Human adenovirus C
caacacggccuccacgcug

SEQ ID NO: 1550660 - RNA, 23 nt, Human adenovirus C
acaugcacaucucgggccaggac

SEQ ID NO: 1550661 - RNA, 23 nt, Human adenovirus C
gcugcccugguguaccaggaaag

SEQ ID NO: 1550662 - RNA, 20 nt, Human adenovirus C
ugccgcggggacaggaggac

SEQ ID NO: 1550663 - RNA, 14 nt, Human adenovirus C
ggagugcugggcca

SEQ ID NO: 1550664 - RNA, 19 nt, Human adenovirus C
cacgaaaaccgccucgggc

SEQ ID NO: 1550665 - RNA, 14 nt, Human adenovirus C
aggaagaagaagag

SEQ ID NO: 1550666 - RNA, 16 nt, Human adenovirus C
ccuuccaggcgcggcg

SEQ ID NO: 1550667 - RNA, 14 nt, Human adenovirus C
gacagaaacacaga

SEQ ID NO: 1550668 - RNA, 21 nt, Human adenovirus C
cagaccguaaaccugagccag

SEQ ID NO: 1550669 - RNA, 15 nt, Human adenovirus C
gcacgcuggccagca

SEQ ID NO: 1550670 - RNA, 16 nt, Human adenovirus C
gcggaugcuggcgcgc

SEQ ID NO: 1550671 - RNA, 19 nt, Human adenovirus C
ugacuaccuuuccgccgcc

SEQ ID NO: 1550672 - RNA, 20 nt, Human adenovirus C
gaacgcggguuuggcagggc

SEQ ID NO: 1550673 - RNA, 19 nt, Human adenovirus C
gucccugcgccgugccgcc

SEQ ID NO: 1550674 - RNA, 20 nt, Human adenovirus C
cuggaccggcugguggggga

SEQ ID NO: 1550675 - RNA, 22 nt, Human adenovirus C
agaccugggccaaaaccuucuc

SEQ ID NO: 1550676 - RNA, 18 nt, Human adenovirus C
cugggcuggagcccgagg

SEQ ID NO: 1550677 - RNA, 14 nt, Human adenovirus C
cuccugccaggcuc

SEQ ID NO: 1550678 - RNA, 12 nt, Human adenovirus C
ggcgggcggcag

SEQ ID NO: 1550679 - RNA, 15 nt, Human adenovirus C
cggucguugaggguc

SEQ ID NO: 1550680 - RNA, 16 nt, Human adenovirus C
ggccuuccggagcgag

SEQ ID NO: 1550681 - RNA, 17 nt, Human adenovirus C
ucauaaccagcaugaag

SEQ ID NO: 1550682 - RNA, 21 nt, Human adenovirus C
cuagcuuuuuuggccacuggc

SEQ ID NO: 1550683 - RNA, 15 nt, Human adenovirus C
uccccccgccgccgc

SEQ ID NO: 1550684 - RNA, 16 nt, Human adenovirus C
gucgccgucgccagcc

SEQ ID NO: 1550685 - RNA, 16 nt, Human adenovirus C
aagcucgccugcgcca

SEQ ID NO: 1550686 - RNA, 12 nt, Human adenovirus C
cagcccacccug

SEQ ID NO: 1550687 - RNA, 15 nt, Human adenovirus C
gagagcugcagcugc

SEQ ID NO: 1550688 - RNA, 23 nt, Human adenovirus C
aacggauguggcaucccugaacu

SEQ ID NO: 1550689 - RNA, 14 nt, Human adenovirus C
uccaccggccgugg

SEQ ID NO: 1550690 - RNA, 14 nt, Human adenovirus C
ccgcugcagccacc

SEQ ID NO: 1550691 - RNA, 15 nt, Human adenovirus C
ggcgaggcgcgccgc

SEQ ID NO: 1550692 - RNA, 18 nt, Human adenovirus C
ccaugcccuucucccacg

SEQ ID NO: 1550693 - RNA, 15 nt, Human adenovirus C
aguaccaacagagga

SEQ ID NO: 1550694 - RNA, 20 nt, Human adenovirus C
guggucaagcaggccaaacu

SEQ ID NO: 1550695 - RNA, 16 nt, Human adenovirus C
guucggggcugugccu

SEQ ID NO: 1550696 - RNA, 21 nt, Human adenovirus C
gcugcuggaaggggguggugu

SEQ ID NO: 1550697 - RNA, 22 nt, Human adenovirus C
gggcacagcagcgcacccugau

SEQ ID NO: 1550698 - RNA, 17 nt, Human adenovirus C
gcccacaccuacagccu

SEQ ID NO: 1550699 - RNA, 17 nt, Human adenovirus C
cagcggcggcagcagca

SEQ ID NO: 1550700 - RNA, 13 nt, Human adenovirus C
cuaaagcccguga

SEQ ID NO: 1550701 - RNA, 20 nt, Human adenovirus C
ggaagaaagcagguuccuga

SEQ ID NO: 1550702 - RNA, 23 nt, Human adenovirus C
aaacuacgucaucuccagcggcc

SEQ ID NO: 1550703 - RNA, 13 nt, Human adenovirus C
cacggcggcgacg

SEQ ID NO: 1550704 - RNA, 18 nt, Human adenovirus C
auguuacauuuaaaucag

SEQ ID NO: 1550705 - RNA, 18 nt, Human adenovirus C
cuggccuuaaaaagcauc

SEQ ID NO: 1550706 - RNA, 20 nt, Human adenovirus C
guugaucuccugaaucuggc

SEQ ID NO: 1550707 - RNA, 18 nt, Human adenovirus C
cauccggugcugcggcag

SEQ ID NO: 1550708 - RNA, 19 nt, Human adenovirus C
ccacuggaacccgccgccg

SEQ ID NO: 1550709 - RNA, 16 nt, Human adenovirus C
uggaggcuugggagug

SEQ ID NO: 1550710 - RNA, 22 nt, Human adenovirus C
cagcggcaaaaagugcuccaug

SEQ ID NO: 1550711 - RNA, 14 nt, Human adenovirus C
ggacggcuacgacu

SEQ ID NO: 1550712 - RNA, 15 nt, Human adenovirus C
caggacgacgcagag

SEQ ID NO: 1550713 - RNA, 16 nt, Human adenovirus C
guggacuucacccaca

SEQ ID NO: 1550714 - RNA, 22 nt, Human adenovirus C
auagccgggucagggcgcgggc

SEQ ID NO: 1550715 - RNA, 19 nt, Human adenovirus C
ugggcgugcagaccgugga

SEQ ID NO: 1550716 - RNA, 14 nt, Human adenovirus C
accagccgcaccgc

SEQ ID NO: 1550717 - RNA, 13 nt, Human adenovirus C
ggcagcggcagca

SEQ ID NO: 1550718 - RNA, 18 nt, Human adenovirus C
ggcgcuggguucccccuu

SEQ ID NO: 1550719 - RNA, 13 nt, Human adenovirus C
gcggcggcggcgc

SEQ ID NO: 1550720 - RNA, 15 nt, Human adenovirus C
cauuuuaaaaaaacu

SEQ ID NO: 1550721 - RNA, 16 nt, Human adenovirus C
ucuaagcagccgccgc

SEQ ID NO: 1550722 - RNA, 18 nt, Human adenovirus C
ugacgcggcggcagaugg

SEQ ID NO: 1550723 - RNA, 14 nt, Human adenovirus C
caggucaucgcgcc

SEQ ID NO: 1550724 - RNA, 21 nt, Human adenovirus C
gcagguuccugagcagcugcg

SEQ ID NO: 1550725 - RNA, 20 nt, Human adenovirus C
cagguuggaauucuucacca

SEQ ID NO: 1550726 - RNA, 18 nt, Human adenovirus C
gcggccuuccggagcgag

SEQ ID NO: 1550727 - RNA, 20 nt, Human adenovirus C
guuugagcacaacauacuga

SEQ ID NO: 1550728 - RNA, 19 nt, Human adenovirus C
ugccuacggaaagcggcau

SEQ ID NO: 1550729 - RNA, 16 nt, Human adenovirus C
gagccuguaagcgggc

SEQ ID NO: 1550730 - RNA, 15 nt, Human adenovirus C
caaccuccgcuccuc

SEQ ID NO: 1550731 - RNA, 14 nt, Human adenovirus C
acaaugacuacagc

SEQ ID NO: 1550732 - RNA, 16 nt, Human adenovirus C
agaaggcguugaggcc

SEQ ID NO: 1550733 - RNA, 21 nt, Human adenovirus C
acccugcgucgcaaccaggaa

SEQ ID NO: 1550734 - RNA, 12 nt, Human adenovirus C
ccggaaacaggg

SEQ ID NO: 1550735 - RNA, 15 nt, Human adenovirus C
caaaccccugacaga

SEQ ID NO: 1550736 - RNA, 19 nt, Human adenovirus C
cagucacaagccccacuga

SEQ ID NO: 1550737 - RNA, 22 nt, Human adenovirus C
cugacaaagcccaagaaaucca

SEQ ID NO: 1550738 - RNA, 23 nt, Human adenovirus C
cuggccugcacccgcgcugaguu

SEQ ID NO: 1550739 - RNA, 18 nt, Human adenovirus C
agcaggaggaagccaggc

SEQ ID NO: 1550740 - RNA, 20 nt, Human adenovirus C
cuugcagauauggcccucac

SEQ ID NO: 1550741 - RNA, 23 nt, Human adenovirus C
aaugcaggaaagggucuggaguu

SEQ ID NO: 1550742 - RNA, 16 nt, Human adenovirus C
cucucuucagcaaaua

SEQ ID NO: 1550743 - RNA, 15 nt, Human adenovirus C
ccggcccaggggcgu

SEQ ID NO: 1550744 - RNA, 21 nt, Human adenovirus C
gacuacuugcaucgcgcggcc

SEQ ID NO: 1550745 - RNA, 23 nt, Human adenovirus C
cguaggcgcucguugguccagca

SEQ ID NO: 1550746 - RNA, 15 nt, Human adenovirus C
cugcgagggccagcu

SEQ ID NO: 1550747 - RNA, 12 nt, Human adenovirus C
gaugcaaaauaa

SEQ ID NO: 1550748 - RNA, 23 nt, Human adenovirus C
aauucccacgcccuacaugugga

SEQ ID NO: 1550749 - RNA, 18 nt, Human adenovirus C
cauggccggccacggccu

SEQ ID NO: 1550750 - RNA, 15 nt, Human adenovirus C
gcauccacaaggccg

SEQ ID NO: 1550751 - RNA, 21 nt, Human adenovirus C
gcguccuggauuugggaggga

SEQ ID NO: 1550752 - RNA, 15 nt, Human adenovirus C
uccgccgccaacaug

SEQ ID NO: 1550753 - RNA, 22 nt, Human adenovirus C
gcucggugaaguuuucacucca

SEQ ID NO: 1550754 - RNA, 12 nt, Human adenovirus C
cagccaggugac

SEQ ID NO: 1550755 - RNA, 20 nt, Human adenovirus C
gcaacaucaacaacagcugc

SEQ ID NO: 1550756 - RNA, 20 nt, Human adenovirus C
uuagcggggugguggaccug

SEQ ID NO: 1550757 - RNA, 23 nt, Human adenovirus C
acccuuauccucaucugcagccu

SEQ ID NO: 1550758 - RNA, 15 nt, Human adenovirus C
cgccaacgcgccuac

SEQ ID NO: 1550759 - RNA, 16 nt, Human adenovirus C
guggagaugacugaau

SEQ ID NO: 1550760 - RNA, 21 nt, Human adenovirus C
gagcgcagcuugagccuggcu

SEQ ID NO: 1550761 - RNA, 16 nt, Human adenovirus C
aggagcuggugcugcg

SEQ ID NO: 1550762 - RNA, 12 nt, Human adenovirus C
cuggugcugcca

SEQ ID NO: 1550763 - RNA, 17 nt, Human adenovirus C
ucucagaugcugaccug

SEQ ID NO: 1550764 - RNA, 14 nt, Human adenovirus C
acuuggaggagggc

SEQ ID NO: 1550765 - RNA, 14 nt, Human adenovirus C
ugugcuacaccugg

SEQ ID NO: 1550766 - RNA, 17 nt, Human adenovirus C
aggauggcacccaaaaa

SEQ ID NO: 1550767 - RNA, 21 nt, Human adenovirus C
gcaugucccugacuugcaugu

SEQ ID NO: 1550768 - RNA, 20 nt, Human adenovirus C
cccuucggcaucgcgggcgc

SEQ ID NO: 1550769 - RNA, 16 nt, Human adenovirus C
uggaacauucccagcu

SEQ ID NO: 1550770 - RNA, 15 nt, Human adenovirus C
accccuauccugccg

SEQ ID NO: 1550771 - RNA, 13 nt, Human adenovirus C
ugcugcagcagcg

SEQ ID NO: 1550772 - RNA, 16 nt, Human adenovirus C
auucagguuccucaca

SEQ ID NO: 1550773 - RNA, 13 nt, Human adenovirus C
ccguuuucccacg

SEQ ID NO: 1550774 - RNA, 22 nt, Human adenovirus C
ccugccgugccaaccgcagccg

SEQ ID NO: 1550775 - RNA, 14 nt, Human adenovirus C
agucucgggccggc

SEQ ID NO: 1550776 - RNA, 22 nt, Human adenovirus C
cucggcuaauauggccugcugc

SEQ ID NO: 1550777 - RNA, 19 nt, Human adenovirus C
gugccaaaaaucuuugagg

SEQ ID NO: 1550778 - RNA, 16 nt, Human adenovirus C
cgcauggucucgguga

SEQ ID NO: 1550779 - RNA, 22 nt, Human adenovirus C
acuuuuaagcccuacuccggca

SEQ ID NO: 1550780 - RNA, 19 nt, Human adenovirus C
cgugguacuuguccaucaa

SEQ ID NO: 1550781 - RNA, 13 nt, Human adenovirus C
aucagcacaguaa

SEQ ID NO: 1550782 - RNA, 23 nt, Human adenovirus C
caggagauuacaagugucagccg

SEQ ID NO: 1550783 - RNA, 12 nt, Human adenovirus C
cucgcugcugca

SEQ ID NO: 1550784 - RNA, 14 nt, Human adenovirus C
cucagcgccuccca

SEQ ID NO: 1550785 - RNA, 15 nt, Human adenovirus C
cucgagaucaggcua

SEQ ID NO: 1550786 - RNA, 16 nt, Human adenovirus C
gccugccgacuuggag

SEQ ID NO: 1550787 - RNA, 18 nt, Human adenovirus C
cuucauauuguugcagau

SEQ ID NO: 1550788 - RNA, 21 nt, Human adenovirus C
cugcagcugccgccgccgcca

SEQ ID NO: 1550789 - RNA, 19 nt, Human adenovirus C
cguaugcgcaggagcacag

SEQ ID NO: 1550790 - RNA, 18 nt, Human adenovirus C
caacuuugguagcugccu

SEQ ID NO: 1550791 - RNA, 13 nt, Human adenovirus C
ggccgacgggcgg

SEQ ID NO: 1550792 - RNA, 14 nt, Human adenovirus C
uacugaaaugugug

SEQ ID NO: 1550793 - RNA, 15 nt, Human adenovirus C
cggaccugggcuggc

SEQ ID NO: 1550794 - RNA, 21 nt, Human adenovirus C
ugcagagcauaguggugcagg

SEQ ID NO: 1550795 - RNA, 22 nt, Human adenovirus C
cgcaauggccaaauccgccguc

SEQ ID NO: 1550796 - RNA, 23 nt, Human adenovirus C
aagcagguuccugagcagcugcg

SEQ ID NO: 1550797 - RNA, 16 nt, Human adenovirus C
cucucugaguauucca

SEQ ID NO: 1550798 - RNA, 19 nt, Human adenovirus C
ggcguggcccuuggcgcgc

SEQ ID NO: 1550799 - RNA, 21 nt, Human adenovirus C
ggacaaacagguggagcugaa

SEQ ID NO: 1550800 - RNA, 22 nt, Human adenovirus C
agagaacuccaacgcggcagcc

SEQ ID NO: 1550801 - RNA, 21 nt, Human adenovirus C
gucauuacccagggccacauc

SEQ ID NO: 1550802 - RNA, 18 nt, Human adenovirus C
cggagaucuauggccccc

SEQ ID NO: 1550803 - RNA, 21 nt, Human adenovirus C
aagaacuauggcagcaaggcc

SEQ ID NO: 1550804 - RNA, 13 nt, Human adenovirus C
cgaccacagcaac

SEQ ID NO: 1550805 - RNA, 14 nt, Human adenovirus C
caccacccuccuca

SEQ ID NO: 1550806 - RNA, 13 nt, Human adenovirus C
ggaacaaaccgaa

SEQ ID NO: 1550807 - RNA, 16 nt, Human adenovirus C
cacggacgaggaggaa

SEQ ID NO: 1550808 - RNA, 23 nt, Human adenovirus C
ccgucaagaaaaacaccaccacc

SEQ ID NO: 1550809 - RNA, 15 nt, Human adenovirus C
ugauggaagcauugu

SEQ ID NO: 1550810 - RNA, 22 nt, Human adenovirus C
auguacaugagcaaacaguaca

SEQ ID NO: 1550811 - RNA, 16 nt, Human adenovirus C
gaacagcagcacaggc

SEQ ID NO: 1550812 - RNA, 22 nt, Human adenovirus C
gaacgguuguuaauuaccuggg

SEQ ID NO: 1550813 - RNA, 15 nt, Human adenovirus C
ugagcugcgagaagg

SEQ ID NO: 1550814 - RNA, 22 nt, Human adenovirus C
acauccgcggcgugcuggacag

SEQ ID NO: 1550815 - RNA, 13 nt, Human adenovirus C
cugcgcccacacc

SEQ ID NO: 1550816 - RNA, 21 nt, Human adenovirus C
cacugcagagcuucaugcugc

SEQ ID NO: 1550817 - RNA, 19 nt, Human adenovirus C
gcuaauauggccugcugca

SEQ ID NO: 1550818 - RNA, 14 nt, Human adenovirus C
cacaacgcgcagcc

SEQ ID NO: 1550819 - RNA, 22 nt, Human adenovirus C
agguggagauagauacggagga

SEQ ID NO: 1550820 - RNA, 23 nt, Human adenovirus C
ccggggcgcgcugcggcugcugu

SEQ ID NO: 1550821 - RNA, 13 nt, Human adenovirus C
ugaugccuuugag

SEQ ID NO: 1550822 - RNA, 19 nt, Human adenovirus C
ccaggcggucccacagcuc

SEQ ID NO: 1550823 - RNA, 23 nt, Human adenovirus C
ccucgucagcguagucuggguca

SEQ ID NO: 1550824 - RNA, 23 nt, Human adenovirus C
accaaaagugguuuuguacagug

SEQ ID NO: 1550825 - RNA, 21 nt, Human adenovirus C
uacaaauaggaucagacaaug

SEQ ID NO: 1550826 - RNA, 21 nt, Human adenovirus C
cgcugcaaccuaugcaccccg

SEQ ID NO: 1550827 - RNA, 23 nt, Human adenovirus C
cagcagguuucugcccugaaggc

SEQ ID NO: 1550828 - RNA, 18 nt, Human adenovirus C
ccgcucgaaggcuggccg

SEQ ID NO: 1550829 - RNA, 12 nt, Human adenovirus C
ggagcugaggcc

SEQ ID NO: 1550830 - RNA, 16 nt, Human adenovirus C
gaacugguugacggcc

SEQ ID NO: 1550831 - RNA, 23 nt, Human adenovirus C
auacaaccccaccaauguggaaa

SEQ ID NO: 1550832 - RNA, 12 nt, Human adenovirus C
ggaagccuggac

SEQ ID NO: 1550833 - RNA, 21 nt, Human adenovirus C
caugaccaugaagaucuggaa

SEQ ID NO: 1550834 - RNA, 15 nt, Human adenovirus C
cauggaaauuaaaac

SEQ ID NO: 1550835 - RNA, 19 nt, Human adenovirus C
guucuucagaaacuuccag

SEQ ID NO: 1550836 - RNA, 22 nt, Human adenovirus C
ugcaggggcccaacucggccgc

SEQ ID NO: 1550837 - RNA, 17 nt, Human adenovirus C
cucaggcaccauccgca

SEQ ID NO: 1550838 - RNA, 17 nt, Human adenovirus C
cgcggcggcggcccugc

SEQ ID NO: 1550839 - RNA, 18 nt, Human adenovirus C
gcgaggugugggugagcg

SEQ ID NO: 1550840 - RNA, 18 nt, Human adenovirus C
gguggaggaggcgcgcaa

SEQ ID NO: 1550841 - RNA, 15 nt, Human adenovirus C
cggaaaccucaccuc

SEQ ID NO: 1550842 - RNA, 20 nt, Human adenovirus C
ccagcaccugucgucagcgc

SEQ ID NO: 1550843 - RNA, 21 nt, Human adenovirus C
ggguuguuucuggcggaggug

SEQ ID NO: 1550844 - RNA, 13 nt, Human adenovirus C
cuugcuagacugc

SEQ ID NO: 1550845 - RNA, 19 nt, Human adenovirus C
cgggccgcucgaaggcugg

SEQ ID NO: 1550846 - RNA, 13 nt, Human adenovirus C
ggggccuccgccc

SEQ ID NO: 1550847 - RNA, 15 nt, Human adenovirus C
ggccuugcggcaggg

SEQ ID NO: 1550848 - RNA, 14 nt, Human adenovirus C
gcuugaggaggagg

SEQ ID NO: 1550849 - RNA, 16 nt, Human adenovirus C
ucgcaacaccacugcu

SEQ ID NO: 1550850 - RNA, 23 nt, Human adenovirus C
gcuaugcgccacuggcagggaca

SEQ ID NO: 1550851 - RNA, 18 nt, Human adenovirus C
cacaggcuggggccugcg

SEQ ID NO: 1550852 - RNA, 13 nt, Human adenovirus C
ggcggugaccugc

SEQ ID NO: 1550853 - RNA, 22 nt, Human adenovirus C
uuguaaaaaucugcuccagagc

SEQ ID NO: 1550854 - RNA, 22 nt, Human adenovirus C
ccuuguccuccgggcacagcag

SEQ ID NO: 1550855 - RNA, 22 nt, Human adenovirus C
ggagcucccgcggcgacagguc

SEQ ID NO: 1550856 - RNA, 23 nt, Human adenovirus C
acgaugcuucuaaauagcuaacg

SEQ ID NO: 1550857 - RNA, 15 nt, Human adenovirus C
ggaaggugcugaggu

SEQ ID NO: 1550858 - RNA, 18 nt, Human adenovirus C
ccggaaaccucaccuccc

SEQ ID NO: 1550859 - RNA, 15 nt, Human adenovirus C
cgggcaggagcuggu

SEQ ID NO: 1550860 - RNA, 14 nt, Human adenovirus C
uguggaaaaaucaa

SEQ ID NO: 1550861 - RNA, 14 nt, Human adenovirus C
ccgccucagccgcu

SEQ ID NO: 1550862 - RNA, 16 nt, Human adenovirus C
agagcuugggcgcgag

SEQ ID NO: 1550863 - RNA, 21 nt, Human adenovirus C
caggcuucguuuugacaucgg

SEQ ID NO: 1550864 - RNA, 14 nt, Human adenovirus C
ucagcuacaagcua

SEQ ID NO: 1550865 - RNA, 19 nt, Human adenovirus C
acagcggcggcagcagcag

SEQ ID NO: 1550866 - RNA, 20 nt, Human adenovirus C
cuggaagccaugcucagaaa

SEQ ID NO: 1550867 - RNA, 22 nt, Human adenovirus C
cuccgagauuuuccaugcauuc

SEQ ID NO: 1550868 - RNA, 16 nt, Human adenovirus C
aagucuaagcagccgc

SEQ ID NO: 1550869 - RNA, 15 nt, Human adenovirus C
ugcgauacacagggu

SEQ ID NO: 1550870 - RNA, 13 nt, Human adenovirus C
ugggaaacuggca

SEQ ID NO: 1550871 - RNA, 13 nt, Human adenovirus C
cccaacuccaugc

SEQ ID NO: 1550872 - RNA, 14 nt, Human adenovirus C
guaccgcgaggcca

SEQ ID NO: 1550873 - RNA, 22 nt, Human adenovirus C
gcucuggccggugaggcgugcg

SEQ ID NO: 1550874 - RNA, 18 nt, Human adenovirus C
gcaacaucaacaacagcu

SEQ ID NO: 1550875 - RNA, 16 nt, Human adenovirus C
gacucugacaaagccc

SEQ ID NO: 1550876 - RNA, 20 nt, Human adenovirus C
ucuaacaguaccucuugguu

SEQ ID NO: 1550877 - RNA, 14 nt, Human adenovirus C
cgcuugaggaggag

SEQ ID NO: 1550878 - RNA, 15 nt, Human adenovirus C
cagacgacagcagcg

SEQ ID NO: 1550879 - RNA, 16 nt, Human adenovirus C
uugcuggaacagagcu

SEQ ID NO: 1550880 - RNA, 11 nt, Human adenovirus C
ugguuuccaag

SEQ ID NO: 1550881 - RNA, 14 nt, Human adenovirus C
cggcaccagcaaua

SEQ ID NO: 1550882 - RNA, 23 nt, Human adenovirus C
gcuggccgaaaacagggccaucc

SEQ ID NO: 1550883 - RNA, 17 nt, Human adenovirus C
gcgagugguggcucccg

SEQ ID NO: 1550884 - RNA, 14 nt, Human adenovirus C
gggcccccggaggu

SEQ ID NO: 1550885 - RNA, 20 nt, Human adenovirus C
cgugaccggguguuccugaa

SEQ ID NO: 1550886 - RNA, 23 nt, Human adenovirus C
caggcgauccuaacucugcagac

SEQ ID NO: 1550887 - RNA, 21 nt, Human adenovirus C
cgcccagcguggcgcuggaca

SEQ ID NO: 1550888 - RNA, 14 nt, Human adenovirus C
cggagugcugggcc

SEQ ID NO: 1550889 - RNA, 20 nt, Human adenovirus C
aucaccuacgaugaccugga

SEQ ID NO: 1550890 - RNA, 20 nt, Human adenovirus C
uuaacaauaccuguguggaa

SEQ ID NO: 1550891 - RNA, 17 nt, Human adenovirus C
agcgcgaaaagaaccug

SEQ ID NO: 1550892 - RNA, 16 nt, Human adenovirus C
cagcaggugcugccca

SEQ ID NO: 1550893 - RNA, 18 nt, Human adenovirus C
gcagcacaggccagaugc

SEQ ID NO: 1550894 - RNA, 15 nt, Human adenovirus C
ucuuuaauuaugaaa

SEQ ID NO: 1550895 - RNA, 20 nt, Human adenovirus C
ucugcuuaaaagccaccuga

SEQ ID NO: 1550896 - RNA, 18 nt, Human adenovirus C
ccaagguuaugagcacag

SEQ ID NO: 1550897 - RNA, 13 nt, Human adenovirus C
uccgcaauacaga

SEQ ID NO: 1550898 - RNA, 23 nt, Human adenovirus C
gcagcggcaagagcaagagcagc

SEQ ID NO: 1550899 - RNA, 22 nt, Human adenovirus C
gucauaccacugcaacagguua

SEQ ID NO: 1550900 - RNA, 17 nt, Human adenovirus C
ggaggacuuugagcccg

SEQ ID NO: 1550901 - RNA, 17 nt, Human adenovirus C
cacccuacuuucccagu

SEQ ID NO: 1550902 - RNA, 15 nt, Human adenovirus C
gcagcacagcaggga

SEQ ID NO: 1550903 - RNA, 14 nt, Human adenovirus C
gcaguagucggugc

SEQ ID NO: 1550904 - RNA, 16 nt, Human adenovirus C
cagcacgaaggaggcu

SEQ ID NO: 1550905 - RNA, 12 nt, Human adenovirus C
gcgcgcuggggc

SEQ ID NO: 1550906 - RNA, 19 nt, Human adenovirus C
acuuucuccaaaguuuaaa

SEQ ID NO: 1550907 - RNA, 19 nt, Human adenovirus C
gagugggaauuugagcccc

SEQ ID NO: 1550908 - RNA, 21 nt, Human adenovirus C
aaacaacucgcugcugcagcc

SEQ ID NO: 1550909 - RNA, 22 nt, Human adenovirus C
gcgcuggccgaaaacagggcca

SEQ ID NO: 1550910 - RNA, 15 nt, Human adenovirus C
ccuguaagcgggcac

SEQ ID NO: 1550911 - RNA, 21 nt, Human adenovirus C
uacggaggauaggguggccuu

SEQ ID NO: 1550912 - RNA, 19 nt, Human adenovirus C
guagguggcgcccucuucc

SEQ ID NO: 1550913 - RNA, 14 nt, Human adenovirus C
acgcgcgagccugc

SEQ ID NO: 1550914 - RNA, 15 nt, Human adenovirus C
ccacagaacaugaaa

SEQ ID NO: 1550915 - RNA, 13 nt, Human adenovirus C
agcggacaagcag

SEQ ID NO: 1550916 - RNA, 12 nt, Human adenovirus C
cguccgagcgag

SEQ ID NO: 1550917 - RNA, 14 nt, Human adenovirus C
ccacuguuacucag

SEQ ID NO: 1550918 - RNA, 21 nt, Human adenovirus C
caugucuaccugcggggcgau

SEQ ID NO: 1550919 - RNA, 21 nt, Human adenovirus C
aacgccacaacauaaaagaag

SEQ ID NO: 1550920 - RNA, 13 nt, Human adenovirus C
ugcuucccaggau

SEQ ID NO: 1550921 - RNA, 22 nt, Human adenovirus C
ccucguaggugagcuccucagg

SEQ ID NO: 1550922 - RNA, 22 nt, Human adenovirus C
ugcuuaaaaaaacaacucccau

SEQ ID NO: 1550923 - RNA, 17 nt, Human adenovirus C
agggcguagagcuuggg

SEQ ID NO: 1550924 - RNA, 20 nt, Human adenovirus C
acucugguaucucagccgcc

SEQ ID NO: 1550925 - RNA, 16 nt, Human adenovirus C
ccuccugccaggcuca

SEQ ID NO: 1550926 - RNA, 18 nt, Human adenovirus C
guggccuccgacuguggu

SEQ ID NO: 1550927 - RNA, 16 nt, Human adenovirus C
uaccgcgucaggaggg

SEQ ID NO: 1550928 - RNA, 16 nt, Human adenovirus C
guuccuugcauuuggg

SEQ ID NO: 1550929 - RNA, 13 nt, Human adenovirus C
ugggcuccagcau

SEQ ID NO: 1550930 - RNA, 24 nt, Human adenovirus C
agcagguuccugagcagcugcgac

SEQ ID NO: 1550931 - RNA, 19 nt, Human adenovirus C
gcgaaaagaaccugccucc

SEQ ID NO: 1550932 - RNA, 17 nt, Human adenovirus C
ccaggcuuugaguugca

SEQ ID NO: 1550933 - RNA, 18 nt, Human adenovirus C
cggcugaagcagggccag

SEQ ID NO: 1550934 - RNA, 16 nt, Human adenovirus C
aacaaucuaugccaaa

SEQ ID NO: 1550935 - RNA, 13 nt, Human adenovirus C
ggcagaaacagag

SEQ ID NO: 1550936 - RNA, 22 nt, Human adenovirus C
aagcagguuccugagcagcugc

SEQ ID NO: 1550937 - RNA, 19 nt, Human adenovirus C
ggcuccuuugucuggagaa

SEQ ID NO: 1550938 - RNA, 18 nt, Human adenovirus C
ccacagaccggucccagc

SEQ ID NO: 1550939 - RNA, 12 nt, Human adenovirus C
uccugccccucc

SEQ ID NO: 1550940 - RNA, 16 nt, Human adenovirus C
gccccaggcuggggag

SEQ ID NO: 1550941 - RNA, 17 nt, Human adenovirus C
uggccaaccaggcagug

SEQ ID NO: 1550942 - RNA, 15 nt, Human adenovirus C
gagcgguggcgccuu

SEQ ID NO: 1550943 - RNA, 19 nt, Human adenovirus C
gcggcgguugaucuccuga

SEQ ID NO: 1550944 - RNA, 19 nt, Human adenovirus C
gagggugacaacgcgcgcc

SEQ ID NO: 1550945 - RNA, 16 nt, Human adenovirus C
cgcugcggccgcgucc

SEQ ID NO: 1550946 - RNA, 18 nt, Human adenovirus C
ucgccggcgccccagaaa

SEQ ID NO: 1550947 - RNA, 21 nt, Human adenovirus C
cgcccacaccuacagccugag

SEQ ID NO: 1550948 - RNA, 14 nt, Human adenovirus C
ugcccuugauggag

SEQ ID NO: 1550949 - RNA, 18 nt, Human adenovirus C
auuuccaacguggagcuc

SEQ ID NO: 1550950 - RNA, 20 nt, Human adenovirus C
gauauuuuucuauguggaau

SEQ ID NO: 1550951 - RNA, 12 nt, Human adenovirus C
accaauguggaa

SEQ ID NO: 1550952 - RNA, 18 nt, Human adenovirus C
caagagcaagagcagcgg

SEQ ID NO: 1550953 - RNA, 17 nt, Human adenovirus C
aaaaugaaagucacugu

SEQ ID NO: 1550954 - RNA, 16 nt, Human adenovirus C
acccacccaaagcaga

SEQ ID NO: 1550955 - RNA, 16 nt, Human adenovirus C
ugucgcgcaccucgcg

SEQ ID NO: 1550956 - RNA, 15 nt, Human adenovirus C
gaucaaacccagcuu

SEQ ID NO: 1550957 - RNA, 21 nt, Human adenovirus C
gacuaucgcaacaccacugcu

SEQ ID NO: 1550958 - RNA, 22 nt, Human adenovirus C
guuugcaacuguccuaacccug

SEQ ID NO: 1550959 - RNA, 18 nt, Human adenovirus C
caaacuuucuccaaaguu

SEQ ID NO: 1550960 - RNA, 13 nt, Human adenovirus C
cgagcaggcagag

SEQ ID NO: 1550961 - RNA, 19 nt, Human adenovirus C
cguggcucguuacaacagc

SEQ ID NO: 1550962 - RNA, 20 nt, Human adenovirus C
gcacaguguauccggugcac

SEQ ID NO: 1550963 - RNA, 16 nt, Human adenovirus C
ugcgcgucggccaggu

SEQ ID NO: 1550964 - RNA, 13 nt, Human adenovirus C
aacagcagcacag

SEQ ID NO: 1550965 - RNA, 18 nt, Human adenovirus C
gccuugcaggcgcagaga

SEQ ID NO: 1550966 - RNA, 19 nt, Human adenovirus C
ucaauccguucugguuccg

SEQ ID NO: 1550967 - RNA, 15 nt, Human adenovirus C
auauggccugcugca

SEQ ID NO: 1550968 - RNA, 19 nt, Human adenovirus C
gcguugcaagagcgcagcg

SEQ ID NO: 1550969 - RNA, 15 nt, Human adenovirus C
cagcggcggcggcgc

SEQ ID NO: 1550970 - RNA, 15 nt, Human adenovirus C
aagcgcagacgcgcc

SEQ ID NO: 1550971 - RNA, 18 nt, Human adenovirus C
uaacugacaccuaucaag

SEQ ID NO: 1550972 - RNA, 14 nt, Human adenovirus C
ccugcugcaccugc

SEQ ID NO: 1550973 - RNA, 18 nt, Human adenovirus C
gguacccaacuccaugcu

SEQ ID NO: 1550974 - RNA, 19 nt, Human adenovirus C
acagauaauggcauuugua

SEQ ID NO: 1550975 - RNA, 15 nt, Human adenovirus C
cgaucggcaggcuca

SEQ ID NO: 1550976 - RNA, 22 nt, Human adenovirus C
cagcggucccauccaaggucca

SEQ ID NO: 1550977 - RNA, 13 nt, Human adenovirus C
ccaaagcagacca

SEQ ID NO: 1550978 - RNA, 16 nt, Human adenovirus C
augccgcaguggucuu

SEQ ID NO: 1550979 - RNA, 18 nt, Human adenovirus C
ggacugggcgugcagacc

SEQ ID NO: 1550980 - RNA, 18 nt, Human adenovirus C
aaacaauuacaaaaagcg

SEQ ID NO: 1550981 - RNA, 17 nt, Human adenovirus C
acaugaccaaggacugg

SEQ ID NO: 1550982 - RNA, 20 nt, Human adenovirus C
gugcgccacaauguggccuc

SEQ ID NO: 1550983 - RNA, 15 nt, Human adenovirus C
guaacucuacaagcu

SEQ ID NO: 1550984 - RNA, 19 nt, Human adenovirus C
gcuccacaggucacgggcc

SEQ ID NO: 1550985 - RNA, 14 nt, Human adenovirus C
gcaacaccacugcu

SEQ ID NO: 1550986 - RNA, 15 nt, Human adenovirus C
aagcgugcaggggcc

SEQ ID NO: 1550987 - RNA, 18 nt, Human adenovirus C
cggcaaccgccucagcua

SEQ ID NO: 1550988 - RNA, 24 nt, Human adenovirus C
aacccaccauuuguagcgccacau

SEQ ID NO: 1550989 - RNA, 20 nt, Human adenovirus C
acagccugcaaagggcccug

SEQ ID NO: 1550990 - RNA, 17 nt, Human adenovirus C
cgcaaccgcagacccug

SEQ ID NO: 1550991 - RNA, 18 nt, Human adenovirus C
caugagccgguguccacg

SEQ ID NO: 1550992 - RNA, 15 nt, Human adenovirus C
gccaugcaucugugg

SEQ ID NO: 1550993 - RNA, 15 nt, Human adenovirus C
ccguccugcaggaau

SEQ ID NO: 1550994 - RNA, 16 nt, Human adenovirus C
cagcaaauacugcgcg

SEQ ID NO: 1550995 - RNA, 13 nt, Human adenovirus C
ggcuugcucgccc

SEQ ID NO: 1550996 - RNA, 16 nt, Human adenovirus C
caaggaaauucccacg

SEQ ID NO: 1550997 - RNA, 11 nt, Human adenovirus C
uuagcccaaga

SEQ ID NO: 1550998 - RNA, 19 nt, Human adenovirus C
gguccugcuggugcugaag

SEQ ID NO: 1550999 - RNA, 15 nt, Human adenovirus C
caccggcggcagcgg

SEQ ID NO: 1551000 - RNA, 19 nt, Human adenovirus C
cuccaucccaucgcgcaac

SEQ ID NO: 1551001 - RNA, 17 nt, Human adenovirus C
agcaggagcgcugggcg

SEQ ID NO: 1551002 - RNA, 18 nt, Human adenovirus C
acccaagggugcagcuga

SEQ ID NO: 1551003 - RNA, 12 nt, Human adenovirus C
acucgcugcugc

SEQ ID NO: 1551004 - RNA, 14 nt, Human adenovirus C
aucgcccagcaaua

SEQ ID NO: 1551005 - RNA, 18 nt, Human adenovirus C
cagaugccgcggugcagg

SEQ ID NO: 1551006 - RNA, 20 nt, Human adenovirus C
aaggguugagucgcaggacc

SEQ ID NO: 1551007 - RNA, 15 nt, Human adenovirus C
ccugauuuccagggg

SEQ ID NO: 1551008 - RNA, 19 nt, Human adenovirus C
ggaccuggccaaccaggca

SEQ ID NO: 1551009 - RNA, 14 nt, Human adenovirus C
ucacccgcagcugc

SEQ ID NO: 1551010 - RNA, 15 nt, Human adenovirus C
ucaauaugucucuaa

SEQ ID NO: 1551011 - RNA, 21 nt, Human adenovirus C
ccgcuuuccaagauggcuacc

SEQ ID NO: 1551012 - RNA, 14 nt, Human adenovirus C
aaaaggcaaacugc

SEQ ID NO: 1551013 - RNA, 17 nt, Human adenovirus C
cagcaaggccuggaaca

SEQ ID NO: 1551014 - RNA, 15 nt, Human adenovirus C
gugcuugccaccuau

SEQ ID NO: 1551015 - RNA, 14 nt, Human adenovirus C
cacccgcagcugcc

SEQ ID NO: 1551016 - RNA, 16 nt, Human adenovirus C
ggcgacgaggaccugc

SEQ ID NO: 1551017 - RNA, 21 nt, Human adenovirus C
cuucaaaucaaacuuuccugg

SEQ ID NO: 1551018 - RNA, 16 nt, Human adenovirus C
uguuggcguugccgcu

SEQ ID NO: 1551019 - RNA, 18 nt, Human adenovirus C
ccauggcuaccggagugc

SEQ ID NO: 1551020 - RNA, 15 nt, Human adenovirus C
ggaagaagaagagca

SEQ ID NO: 1551021 - RNA, 15 nt, Human adenovirus C
cccgggcuggugcag

SEQ ID NO: 1551022 - RNA, 17 nt, Human adenovirus C
cgaugagacccgcacca

SEQ ID NO: 1551023 - RNA, 15 nt, Human adenovirus C
ugccaccucccuccc

SEQ ID NO: 1551024 - RNA, 22 nt, Human adenovirus C
cacugugguacuucccagagac

SEQ ID NO: 1551025 - RNA, 22 nt, Human adenovirus C
cgcaucgcuaugcgccacuggc

SEQ ID NO: 1551026 - RNA, 21 nt, Human adenovirus C
gaaggucaucaagacuuugga

SEQ ID NO: 1551027 - RNA, 18 nt, Human adenovirus C
acuuugcuuuccugagcc

SEQ ID NO: 1551028 - RNA, 19 nt, Human adenovirus C
aacaaguugcauguggaaa

SEQ ID NO: 1551029 - RNA, 15 nt, Human adenovirus C
gcgcgcccuggggcg

SEQ ID NO: 1551030 - RNA, 22 nt, Human adenovirus C
ggcggggauggcgcaggcggcg

SEQ ID NO: 1551031 - RNA, 17 nt, Human adenovirus C
aggaaagucccgcuccc

SEQ ID NO: 1551032 - RNA, 13 nt, Human adenovirus C
gauuaaacauggc

SEQ ID NO: 1551033 - RNA, 18 nt, Human adenovirus C
cggcucaaccaucgcgcc

SEQ ID NO: 1551034 - RNA, 20 nt, Human adenovirus C
ccauggacgagcccacccuu

SEQ ID NO: 1551035 - RNA, 14 nt, Human adenovirus C
cggcagaugcgccc

SEQ ID NO: 1551036 - RNA, 12 nt, Human adenovirus C
ccgggcagcagg

SEQ ID NO: 1551037 - RNA, 17 nt, Human adenovirus C
caggacgacgcagaggc

SEQ ID NO: 1551038 - RNA, 21 nt, Human adenovirus C
cuggaugugaccgaggagcug

SEQ ID NO: 1551039 - RNA, 18 nt, Human adenovirus C
ugaccacuuacuggcugc

SEQ ID NO: 1551040 - RNA, 20 nt, Human adenovirus C
accuccuuuccuuccuccca

SEQ ID NO: 1551041 - RNA, 14 nt, Human adenovirus C
gcgguugugcaggg

SEQ ID NO: 1551042 - RNA, 16 nt, Human adenovirus C
gcgcccuucacggaca

SEQ ID NO: 1551043 - RNA, 21 nt, Human adenovirus C
cugucaugguuuuuugcagua

SEQ ID NO: 1551044 - RNA, 12 nt, Human adenovirus C
ugaugacaaacu

SEQ ID NO: 1551045 - RNA, 21 nt, Human adenovirus C
ggcggcgcugcagagccagcc

SEQ ID NO: 1551046 - RNA, 24 nt, Human adenovirus C
cagcgugagcgcgcgcagcagcag

SEQ ID NO: 1551047 - RNA, 17 nt, Human adenovirus C
ugaagaagaggaagaag

SEQ ID NO: 1551048 - RNA, 14 nt, Human adenovirus C
cugggacagccuag

SEQ ID NO: 1551049 - RNA, 23 nt, Human adenovirus C
uagauuugcaagacagaaacaca

SEQ ID NO: 1551050 - RNA, 20 nt, Human adenovirus C
ugguggaggaggcgcgcaac

SEQ ID NO: 1551051 - RNA, 18 nt, Human adenovirus C
cugucccuuuuuuuucca

SEQ ID NO: 1551052 - RNA, 23 nt, Human adenovirus C
cgcuguccacgaucaccucuggg

SEQ ID NO: 1551053 - RNA, 22 nt, Human adenovirus C
cagagcuuccacuuggucaggc

SEQ ID NO: 1551054 - RNA, 16 nt, Human adenovirus C
uccgugcgcuuuuugg

SEQ ID NO: 1551055 - RNA, 15 nt, Human adenovirus C
uggcggcggcgcugg

SEQ ID NO: 1551056 - RNA, 17 nt, Human adenovirus C
cggcugaagcagggcca

SEQ ID NO: 1551057 - RNA, 15 nt, Human adenovirus C
ggcguguggcagcaa

SEQ ID NO: 1551058 - RNA, 15 nt, Human adenovirus C
cugcuuaaccgcgca

SEQ ID NO: 1551059 - RNA, 16 nt, Human adenovirus C
cuggacauaaacauua

SEQ ID NO: 1551060 - RNA, 19 nt, Human adenovirus C
ugucugcgagggccagcug

SEQ ID NO: 1551061 - RNA, 13 nt, Human adenovirus C
cagccgcggccau

SEQ ID NO: 1551062 - RNA, 21 nt, Human adenovirus C
ccaggcgacgagcggccgccg

SEQ ID NO: 1551063 - RNA, 18 nt, Human adenovirus C
aagcuggcgucugugaga

SEQ ID NO: 1551064 - RNA, 13 nt, Human adenovirus C
gcaaaauaaaaaa

SEQ ID NO: 1551065 - RNA, 15 nt, Human adenovirus C
ugaagacgacgggcc

SEQ ID NO: 1551066 - RNA, 17 nt, Human adenovirus C
auuggcuaccagggcuu

SEQ ID NO: 1551067 - RNA, 16 nt, Human adenovirus C
aggcggucccacagcu

SEQ ID NO: 1551068 - RNA, 19 nt, Human adenovirus C
aggggcaacauccgcggcu

SEQ ID NO: 1551069 - RNA, 18 nt, Human adenovirus C
ugagcgcgcgcagcagca

SEQ ID NO: 1551070 - RNA, 22 nt, Human adenovirus C
aaggacugguuccuggugcaga

SEQ ID NO: 1551071 - RNA, 16 nt, Human adenovirus C
gaggaggcgccgcacg

SEQ ID NO: 1551072 - RNA, 14 nt, Human adenovirus C
agcgggcacucuuc

SEQ ID NO: 1551073 - RNA, 15 nt, Human adenovirus C
cacuccacaggcugc

SEQ ID NO: 1551074 - RNA, 19 nt, Human adenovirus C
agaacaugccgcaagacuu

SEQ ID NO: 1551075 - RNA, 12 nt, Human adenovirus C
aaugccaucuug

SEQ ID NO: 1551076 - RNA, 19 nt, Human adenovirus C
cugugccuuuuacugcugc

SEQ ID NO: 1551077 - RNA, 22 nt, Human adenovirus C
uccauagagcagcugaccacuu

SEQ ID NO: 1551078 - RNA, 18 nt, Human adenovirus C
cggcgacccucagaccgg

SEQ ID NO: 1551079 - RNA, 11 nt, Human adenovirus C
ugaugacaaac

SEQ ID NO: 1551080 - RNA, 17 nt, Human adenovirus C
cucccaaaauguaacca

SEQ ID NO: 1551081 - RNA, 23 nt, Human adenovirus C
uauucugcugcauguuucuccac

SEQ ID NO: 1551082 - RNA, 13 nt, Human adenovirus C
ggaggaggagcgc

SEQ ID NO: 1551083 - RNA, 14 nt, Human adenovirus C
gagaaggugcuggc

SEQ ID NO: 1551084 - RNA, 18 nt, Human adenovirus C
ugccaucuugaacccgca

SEQ ID NO: 1551085 - RNA, 19 nt, Human adenovirus C
agacugggguuugacccag

SEQ ID NO: 1551086 - RNA, 18 nt, Human adenovirus C
cggcccgaugaggccggc

SEQ ID NO: 1551087 - RNA, 12 nt, Human adenovirus C
cccacgccgcca

SEQ ID NO: 1551088 - RNA, 14 nt, Human adenovirus C
caugagcgagcuga

SEQ ID NO: 1551089 - RNA, 21 nt, Human adenovirus C
gcaggaggacacgggcagccu

SEQ ID NO: 1551090 - RNA, 21 nt, Human adenovirus C
cuggacaauuuacucuaugug

SEQ ID NO: 1551091 - RNA, 21 nt, Human adenovirus C
cgcgacuacgguaccgcgcgg

SEQ ID NO: 1551092 - RNA, 19 nt, Human adenovirus C
uuggagaugcgggccauga

SEQ ID NO: 1551093 - RNA, 15 nt, Human adenovirus C
gcagcaucgagguca

SEQ ID NO: 1551094 - RNA, 20 nt, Human adenovirus C
aggagaagcgcgcugaggcc

SEQ ID NO: 1551095 - RNA, 21 nt, Human adenovirus C
aaacuuaccuacgaaaaaacc

SEQ ID NO: 1551096 - RNA, 17 nt, Human adenovirus C
ucgcugcugcagccgca

SEQ ID NO: 1551097 - RNA, 19 nt, Human adenovirus C
ggccuggucuacgacgcgc

SEQ ID NO: 1551098 - RNA, 13 nt, Human adenovirus C
cgccagcccgugc

SEQ ID NO: 1551099 - RNA, 19 nt, Human adenovirus C
accaguuggaggaguggcu

SEQ ID NO: 1551100 - RNA, 17 nt, Human adenovirus C
cuuguaauucuguuuau

SEQ ID NO: 1551101 - RNA, 12 nt, Human adenovirus C
agcaugaugcaa

SEQ ID NO: 1551102 - RNA, 20 nt, Human adenovirus C
aggcggccgcccuugcgcga

SEQ ID NO: 1551103 - RNA, 16 nt, Human adenovirus C
cggccuaccgggggga

SEQ ID NO: 1551104 - RNA, 14 nt, Human adenovirus C
caggcgcugaaaga

SEQ ID NO: 1551105 - RNA, 19 nt, Human adenovirus C
gcggcgccaguggcggcgg

SEQ ID NO: 1551106 - RNA, 18 nt, Human adenovirus C
ccagaccgucugaagaca

SEQ ID NO: 1551107 - RNA, 19 nt, Human adenovirus C
acccggcggugcgggcggc

SEQ ID NO: 1551108 - RNA, 15 nt, Human adenovirus C
cugcuccucuucccg

SEQ ID NO: 1551109 - RNA, 18 nt, Human adenovirus C
gcugcgagagcucggugu

SEQ ID NO: 1551110 - RNA, 13 nt, Human adenovirus C
cuccggcacugcc

SEQ ID NO: 1551111 - RNA, 17 nt, Human adenovirus C
gccagcgcacuacugcc

SEQ ID NO: 1551112 - RNA, 17 nt, Human adenovirus C
caggcgcggcggcugcu

SEQ ID NO: 1551113 - RNA, 12 nt, Human adenovirus C
cgcgguggugga

SEQ ID NO: 1551114 - RNA, 19 nt, Human adenovirus C
cacuguuacucagccacuu

SEQ ID NO: 1551115 - RNA, 20 nt, Human adenovirus C
gacaccacuggaaccagggc

SEQ ID NO: 1551116 - RNA, 16 nt, Human adenovirus C
ccuccucaccugccgg

SEQ ID NO: 1551117 - RNA, 21 nt, Human adenovirus C
gaagaugucuuggaaaaaaug

SEQ ID NO: 1551118 - RNA, 12 nt, Human adenovirus C
ggaaacuggcaa

SEQ ID NO: 1551119 - RNA, 19 nt, Human adenovirus C
agacacgaucggcaggcuc

SEQ ID NO: 1551120 - RNA, 16 nt, Human adenovirus C
cgacgccgaaccacca

SEQ ID NO: 1551121 - RNA, 17 nt, Human adenovirus C
cgccaccaguuggagga

SEQ ID NO: 1551122 - RNA, 17 nt, Human adenovirus C
cgggagagggggcaggg

SEQ ID NO: 1551123 - RNA, 13 nt, Human adenovirus C
gaccaugaagauc

SEQ ID NO: 1551124 - RNA, 17 nt, Human adenovirus C
acgcgcgagccugccga

SEQ ID NO: 1551125 - RNA, 18 nt, Human adenovirus C
gcgccaguggcggcggcg

SEQ ID NO: 1551126 - RNA, 16 nt, Human adenovirus C
ugcuugcgcuuaaaau

SEQ ID NO: 1551127 - RNA, 21 nt, Human adenovirus C
cuuagaaauaggauuuuuccc

SEQ ID NO: 1551128 - RNA, 13 nt, Human adenovirus C
uccggggggucug

SEQ ID NO: 1551129 - RNA, 21 nt, Human adenovirus C
gcacccaaaaagaagcugcag

SEQ ID NO: 1551130 - RNA, 17 nt, Human adenovirus C
ucuuggaaaaaaugacc

SEQ ID NO: 1551131 - RNA, 17 nt, Human adenovirus C
gcagcgccagugcgcca

SEQ ID NO: 1551132 - RNA, 22 nt, Human adenovirus C
gcuugaucugcuggcgcagaag

SEQ ID NO: 1551133 - RNA, 14 nt, Human adenovirus C
accauuuuugcccu

SEQ ID NO: 1551134 - RNA, 12 nt, Human adenovirus C
ggcggcgguggg

SEQ ID NO: 1551135 - RNA, 17 nt, Human adenovirus C
cauguacucguucuuca

SEQ ID NO: 1551136 - RNA, 15 nt, Human adenovirus C
gcaggcggccgcugc

SEQ ID NO: 1551137 - RNA, 24 nt, Human adenovirus C
cccuaacaguggcaaccaccgcuc

SEQ ID NO: 1551138 - RNA, 15 nt, Human adenovirus C
caagcaggccaaacu

SEQ ID NO: 1551139 - RNA, 23 nt, Human adenovirus C
cgagcgguugcugcgcgaggagg

SEQ ID NO: 1551140 - RNA, 14 nt, Human adenovirus C
uuuacugcugcugg

SEQ ID NO: 1551141 - RNA, 13 nt, Human adenovirus C
caccgcucugcuu

SEQ ID NO: 1551142 - RNA, 16 nt, Human adenovirus C
cuaaggacaaacaggu

SEQ ID NO: 1551143 - RNA, 19 nt, Human adenovirus C
gccuaccggggggagaaac

SEQ ID NO: 1551144 - RNA, 18 nt, Human adenovirus C
cucguuacaacagcggca

SEQ ID NO: 1551145 - RNA, 14 nt, Human adenovirus C
gcggcaacccuucc

SEQ ID NO: 1551146 - RNA, 13 nt, Human adenovirus C
uuuguaauuuaca

SEQ ID NO: 1551147 - RNA, 17 nt, Human adenovirus C
ccauuaaaaaccuccuc

SEQ ID NO: 1551148 - RNA, 13 nt, Human adenovirus C
aguccacaaaaaa

SEQ ID NO: 1551149 - RNA, 20 nt, Human adenovirus C
gccgggucagggcgcgggcu

SEQ ID NO: 1551150 - RNA, 16 nt, Human adenovirus C
gccgaggaugaagaag

SEQ ID NO: 1551151 - RNA, 18 nt, Human adenovirus C
uccauagagcagcugacc

SEQ ID NO: 1551152 - RNA, 12 nt, Human adenovirus C
aaacauguaaaa

SEQ ID NO: 1551153 - RNA, 16 nt, Human adenovirus C
accuucgccccaggcu

SEQ ID NO: 1551154 - RNA, 22 nt, Human adenovirus C
cuaaugagcuugaucugcuggc

SEQ ID NO: 1551155 - RNA, 15 nt, Human adenovirus C
acuucagacuggggu

SEQ ID NO: 1551156 - RNA, 17 nt, Human adenovirus C
gcaauacagagacagga

SEQ ID NO: 1551157 - RNA, 17 nt, Human adenovirus C
ccugugcuuugcuccca

SEQ ID NO: 1551158 - RNA, 17 nt, Human adenovirus C
cuuaccauuacacuuaa

SEQ ID NO: 1551159 - RNA, 20 nt, Human adenovirus C
gcucuccgcaauucuggaag

SEQ ID NO: 1551160 - RNA, 22 nt, Human adenovirus C
acaucaacuuugcgucucuggc

SEQ ID NO: 1551161 - RNA, 24 nt, Human adenovirus C
cgaugacucggcagacgacagcag

SEQ ID NO: 1551162 - RNA, 20 nt, Human adenovirus C
agcgcagcuugagccuggcu

SEQ ID NO: 1551163 - RNA, 22 nt, Human adenovirus C
acuugcaucgcgcggccgccgu

SEQ ID NO: 1551164 - RNA, 14 nt, Human adenovirus C
ccagacgcggcugu

SEQ ID NO: 1551165 - RNA, 19 nt, Human adenovirus C
cagccgguggaggacauga

SEQ ID NO: 1551166 - RNA, 18 nt, Human adenovirus C
uagggcgcaguaguccag

SEQ ID NO: 1551167 - RNA, 20 nt, Human adenovirus C
ugacggggagggcuacaacg

SEQ ID NO: 1551168 - RNA, 23 nt, Human adenovirus C
uaaaguccacaaaaaacacccag

SEQ ID NO: 1551169 - RNA, 22 nt, Human adenovirus C
acuaucugccugaagauggcau

SEQ ID NO: 1551170 - RNA, 19 nt, Human adenovirus C
gacaagcgcuuuccaggcu

SEQ ID NO: 1551171 - RNA, 21 nt, Human adenovirus C
cugcccguuuucgcucgucac

SEQ ID NO: 1551172 - RNA, 19 nt, Human adenovirus C
accugagccccgggcuggu

SEQ ID NO: 1551173 - RNA, 11 nt, Human adenovirus C
aacgcgcggca

SEQ ID NO: 1551174 - RNA, 13 nt, Human adenovirus C
agcagggccaggu

SEQ ID NO: 1551175 - RNA, 17 nt, Human adenovirus C
cgaugcuccccuggacc

SEQ ID NO: 1551176 - RNA, 14 nt, Human adenovirus C
ucgugcgcaccacc

SEQ ID NO: 1551177 - RNA, 18 nt, Human adenovirus C
gcggacauuaucuucccc

SEQ ID NO: 1551178 - RNA, 13 nt, Human adenovirus C
aguuggaagacgc

SEQ ID NO: 1551179 - RNA, 20 nt, Human adenovirus C
gccaacuaccuugccuacca

SEQ ID NO: 1551180 - RNA, 14 nt, Human adenovirus C
gccgcaggccccgc

SEQ ID NO: 1551181 - RNA, 12 nt, Human adenovirus C
gcugcuggaagg

SEQ ID NO: 1551182 - RNA, 19 nt, Human adenovirus C
cagacaucauuuugcugcc

SEQ ID NO: 1551183 - RNA, 17 nt, Human adenovirus C
cugccgugcggcaggga

SEQ ID NO: 1551184 - RNA, 12 nt, Human adenovirus C
uacgcccagaaa

SEQ ID NO: 1551185 - RNA, 18 nt, Human adenovirus C
guagaccacgcccccuuc

SEQ ID NO: 1551186 - RNA, 19 nt, Human adenovirus C
guaccaguccgggccagac

SEQ ID NO: 1551187 - RNA, 17 nt, Human adenovirus C
gaucuauggccccccga

SEQ ID NO: 1551188 - RNA, 15 nt, Human adenovirus C
gacaacaucgcgcag

SEQ ID NO: 1551189 - RNA, 11 nt, Human adenovirus C
agguccuccuc

SEQ ID NO: 1551190 - RNA, 16 nt, Human adenovirus C
acgagaaacgcgcggc

SEQ ID NO: 1551191 - RNA, 20 nt, Human adenovirus C
cacuacccggaccaguuuau

SEQ ID NO: 1551192 - RNA, 17 nt, Human adenovirus C
ggaaagacgguggugcg

SEQ ID NO: 1551193 - RNA, 16 nt, Human adenovirus C
uugcgcccuaccugug

SEQ ID NO: 1551194 - RNA, 14 nt, Human adenovirus C
guggcuaccucucc

SEQ ID NO: 1551195 - RNA, 21 nt, Human adenovirus C
cgcucgucgggcaccaggugc

SEQ ID NO: 1551196 - RNA, 11 nt, Human adenovirus C
gcgaagaucag

SEQ ID NO: 1551197 - RNA, 15 nt, Human adenovirus C
ccggcggcagcggca

SEQ ID NO: 1551198 - RNA, 18 nt, Human adenovirus C
cacccugcgucgcaacca

SEQ ID NO: 1551199 - RNA, 14 nt, Human adenovirus C
ccgccgggagaggg

SEQ ID NO: 1551200 - RNA, 13 nt, Human adenovirus C
uggaccucccggc

SEQ ID NO: 1551201 - RNA, 18 nt, Human adenovirus C
ugcacaucucgggccagg

SEQ ID NO: 1551202 - RNA, 20 nt, Human adenovirus C
ugcaucaaacaauacuaaaa

SEQ ID NO: 1551203 - RNA, 15 nt, Human adenovirus C
gcagaccaaccugga

SEQ ID NO: 1551204 - RNA, 12 nt, Human adenovirus C
aaccaccagcac

SEQ ID NO: 1551205 - RNA, 23 nt, Human adenovirus C
uugcaggggcuguggggggugcg

SEQ ID NO: 1551206 - RNA, 23 nt, Human adenovirus C
ccagcuucagcuugccugcucca

SEQ ID NO: 1551207 - RNA, 12 nt, Human adenovirus C
aucuccucuucc

SEQ ID NO: 1551208 - RNA, 23 nt, Human adenovirus C
uggcacccaaaaagaagcugcag

SEQ ID NO: 1551209 - RNA, 15 nt, Human adenovirus C
cacagccgccugagc

SEQ ID NO: 1551210 - RNA, 22 nt, Human adenovirus C
cagcacaguguauccggugcac

SEQ ID NO: 1551211 - RNA, 20 nt, Human adenovirus C
aaaauacaaccccaccaaug

SEQ ID NO: 1551212 - RNA, 17 nt, Human adenovirus C
cccguagaggagccucc

SEQ ID NO: 1551213 - RNA, 21 nt, Human adenovirus C
acccuuauccucaucugcagc

SEQ ID NO: 1551214 - RNA, 19 nt, Human adenovirus C
gccgccagcgguccgcgau

SEQ ID NO: 1551215 - RNA, 16 nt, Human adenovirus C
agguuaccucugcaaa

SEQ ID NO: 1551216 - RNA, 19 nt, Human adenovirus C
uggcccuuggcgcgcagcu

SEQ ID NO: 1551217 - RNA, 20 nt, Human adenovirus C
cacaguuuaaacagcgagga

SEQ ID NO: 1551218 - RNA, 15 nt, Human adenovirus C
ggacaagcagcuggc

SEQ ID NO: 1551219 - RNA, 16 nt, Human adenovirus C
ucgcuguggagcggca

SEQ ID NO: 1551220 - RNA, 23 nt, Human adenovirus C
gcugcgcuagcuuuuuuggccac

SEQ ID NO: 1551221 - RNA, 17 nt, Human adenovirus C
ccagcuggccaaaaccu

SEQ ID NO: 1551222 - RNA, 20 nt, Human adenovirus C
cgacacgguuaacuccuccu

SEQ ID NO: 1551223 - RNA, 19 nt, Human adenovirus C
gcagguuccugagcagcug

SEQ ID NO: 1551224 - RNA, 18 nt, Human adenovirus C
gguuguuucuggcggagg

SEQ ID NO: 1551225 - RNA, 13 nt, Human adenovirus C
agucucgggccgg

SEQ ID NO: 1551226 - RNA, 19 nt, Human adenovirus C
ucugcuuaaaagccaccug

SEQ ID NO: 1551227 - RNA, 14 nt, Human adenovirus C
cggcagaaacagag

SEQ ID NO: 1551228 - RNA, 19 nt, Human adenovirus C
caccugaaaaucagagggc

SEQ ID NO: 1551229 - RNA, 21 nt, Human adenovirus C
cugccgcccccgcugcgcaac

SEQ ID NO: 1551230 - RNA, 19 nt, Human adenovirus C
agaguugcaacagcgcgag

SEQ ID NO: 1551231 - RNA, 18 nt, Human adenovirus C
cgccggcgccccagaaau

SEQ ID NO: 1551232 - RNA, 19 nt, Human adenovirus C
cgccgaaccaccacuggaa

SEQ ID NO: 1551233 - RNA, 18 nt, Human adenovirus C
aacaaguugcauguggaa

SEQ ID NO: 1551234 - RNA, 17 nt, Human adenovirus C
guuggagaucugcacca

SEQ ID NO: 1551235 - RNA, 12 nt, Human adenovirus C
ccgcuggcugcu

SEQ ID NO: 1551236 - RNA, 21 nt, Human adenovirus C
ccagggcuucuacauuccaga

SEQ ID NO: 1551237 - RNA, 15 nt, Human adenovirus C
cggcggcggcaggag

SEQ ID NO: 1551238 - RNA, 14 nt, Human adenovirus C
cuacaacaaacaga

SEQ ID NO: 1551239 - RNA, 15 nt, Human adenovirus C
cggacccggcggugc

SEQ ID NO: 1551240 - RNA, 14 nt, Human adenovirus C
gcaggccaagcagc

SEQ ID NO: 1551241 - RNA, 16 nt, Human adenovirus C
uuuacugcugcuggaa

SEQ ID NO: 1551242 - RNA, 13 nt, Human adenovirus C
caggaggacacgg

SEQ ID NO: 1551243 - RNA, 23 nt, Human adenovirus C
caacauacugacccgcuguuccu

SEQ ID NO: 1551244 - RNA, 23 nt, Human adenovirus C
ggcgaucguaaacgcgcuggccg

SEQ ID NO: 1551245 - RNA, 24 nt, Human adenovirus C
ccccgguugccucggcgguggcag

SEQ ID NO: 1551246 - RNA, 13 nt, Human adenovirus C
caagacagaaaca

SEQ ID NO: 1551247 - RNA, 23 nt, Human adenovirus C
ggucucgcauuccacgagccagg

SEQ ID NO: 1551248 - RNA, 20 nt, Human adenovirus C
accuggccaaccaggcagug

SEQ ID NO: 1551249 - RNA, 14 nt, Human adenovirus C
caacucgcugcugc

SEQ ID NO: 1551250 - RNA, 16 nt, Human adenovirus C
cacuuggucaggcagu

SEQ ID NO: 1551251 - RNA, 16 nt, Human adenovirus C
acgucuagggcgcagu

SEQ ID NO: 1551252 - RNA, 12 nt, Human adenovirus C
aauucccacgcc

SEQ ID NO: 1551253 - RNA, 18 nt, Human adenovirus C
cuugaaagugggcaggca

SEQ ID NO: 1551254 - RNA, 14 nt, Human adenovirus C
cagcggcggcagca

SEQ ID NO: 1551255 - RNA, 14 nt, Human adenovirus C
gcggcgcgcaacga

SEQ ID NO: 1551256 - RNA, 14 nt, Human adenovirus C
cgguaccuuugagc

SEQ ID NO: 1551257 - RNA, 17 nt, Human adenovirus C
cagggcuucaauuaaga

SEQ ID NO: 1551258 - RNA, 21 nt, Human adenovirus C
cacuacaccuuucgccagggc

SEQ ID NO: 1551259 - RNA, 20 nt, Human adenovirus C
cuggcuaccgcccccugguu

SEQ ID NO: 1551260 - RNA, 15 nt, Human adenovirus C
acccaacaccuagcc

SEQ ID NO: 1551261 - RNA, 17 nt, Human adenovirus C
ccgagguugcuacgggc

SEQ ID NO: 1551262 - RNA, 13 nt, Human adenovirus C
ucgccugcgccau

SEQ ID NO: 1551263 - RNA, 21 nt, Human adenovirus C
uuugagguacugguauuugaa

SEQ ID NO: 1551264 - RNA, 13 nt, Human adenovirus C
aaaggugaugaaa

SEQ ID NO: 1551265 - RNA, 21 nt, Human adenovirus C
cagcaucguuuaaaagccggu

SEQ ID NO: 1551266 - RNA, 19 nt, Human adenovirus C
gaccauucacguagccagc

SEQ ID NO: 1551267 - RNA, 21 nt, Human adenovirus C
cgacgaggaccugcuugagca

SEQ ID NO: 1551268 - RNA, 22 nt, Human adenovirus C
gguuguuaauuaccugggcggc

SEQ ID NO: 1551269 - RNA, 19 nt, Human adenovirus C
cgcgggcaggagcuggugc

SEQ ID NO: 1551270 - RNA, 23 nt, Human adenovirus C
caaggccggaaaccucaccuccc

SEQ ID NO: 1551271 - RNA, 21 nt, Human adenovirus C
aacagcggcaacgugcagacc

SEQ ID NO: 1551272 - RNA, 19 nt, Human adenovirus C
acgugccgggcgaagacgg

SEQ ID NO: 1551273 - RNA, 23 nt, Human adenovirus C
caccacugugguacuucccagag

SEQ ID NO: 1551274 - RNA, 16 nt, Human adenovirus C
gcgcgcuggucucugg

SEQ ID NO: 1551275 - RNA, 12 nt, Human adenovirus C
caaugggcccac

SEQ ID NO: 1551276 - RNA, 23 nt, Human adenovirus C
cgcgcucaaaggcuacaggggcc

SEQ ID NO: 1551277 - RNA, 19 nt, Human adenovirus C
cucucuacgcgucuccgaa

SEQ ID NO: 1551278 - RNA, 14 nt, Human adenovirus C
gcgaaucucagugg

SEQ ID NO: 1551279 - RNA, 20 nt, Human adenovirus C
aguuguaguauauccacucu

SEQ ID NO: 1551280 - RNA, 18 nt, Human adenovirus C
gaggaggaauacugggac

SEQ ID NO: 1551281 - RNA, 19 nt, Human adenovirus C
gcaacagggucugccagac

SEQ ID NO: 1551282 - RNA, 15 nt, Human adenovirus C
gcauuaacauggaag

SEQ ID NO: 1551283 - RNA, 19 nt, Human adenovirus C
gggcgcacucacagaccug

SEQ ID NO: 1551284 - RNA, 18 nt, Human adenovirus C
cagucaggcagaggaggu

SEQ ID NO: 1551285 - RNA, 20 nt, Human adenovirus C
cgugaggguagacuggaagu

SEQ ID NO: 1551286 - RNA, 16 nt, Human adenovirus C
gaccaaccggcggcag

SEQ ID NO: 1551287 - RNA, 19 nt, Human adenovirus C
ggagcggggggcuucugag

SEQ ID NO: 1551288 - RNA, 15 nt, Human adenovirus C
gaggccguggcgcag

SEQ ID NO: 1551289 - RNA, 20 nt, Human adenovirus C
gcuaaaauacaaccccacca

SEQ ID NO: 1551290 - RNA, 18 nt, Human adenovirus C
cgugcugaaacgcagcau

SEQ ID NO: 1551291 - RNA, 13 nt, Human adenovirus C
agcacagcaccac

SEQ ID NO: 1551292 - RNA, 16 nt, Human adenovirus C
augauggccgcagugc

SEQ ID NO: 1551293 - RNA, 19 nt, Human adenovirus C
cgagaaggaggacagccua

SEQ ID NO: 1551294 - RNA, 14 nt, Human adenovirus C
cauccauguccaca

SEQ ID NO: 1551295 - RNA, 16 nt, Human adenovirus C
ucuugcuggucaggca

SEQ ID NO: 1551296 - RNA, 22 nt, Human adenovirus C
guggcaaccaccgcuccucuga

SEQ ID NO: 1551297 - RNA, 22 nt, Human adenovirus C
gcuacaacguagcucagugcaa

SEQ ID NO: 1551298 - RNA, 15 nt, Human adenovirus C
ccagugagcaggaac

SEQ ID NO: 1551299 - RNA, 13 nt, Human adenovirus C
ccgcgaggccaua

SEQ ID NO: 1551300 - RNA, 21 nt, Human adenovirus C
gcgagaaggcguugaggccuc

SEQ ID NO: 1551301 - RNA, 14 nt, Human adenovirus C
aaccugugcugcca

SEQ ID NO: 1551302 - RNA, 15 nt, Human adenovirus C
aucugcgccagcagg

SEQ ID NO: 1551303 - RNA, 22 nt, Human adenovirus C
uggaagauuuuucugcugugcg

SEQ ID NO: 1551304 - RNA, 21 nt, Human adenovirus C
ccgccgcuuuggggucacugc

SEQ ID NO: 1551305 - RNA, 18 nt, Human adenovirus C
cucuggacuacauggaca

SEQ ID NO: 1551306 - RNA, 14 nt, Human adenovirus C
ucaccugccgccuc

SEQ ID NO: 1551307 - RNA, 16 nt, Human adenovirus C
cagggugacaagguca

SEQ ID NO: 1551308 - RNA, 16 nt, Human adenovirus C
guugcgcuuuucugug

SEQ ID NO: 1551309 - RNA, 19 nt, Human adenovirus C
aagcuaaugauggccgcag

SEQ ID NO: 1551310 - RNA, 13 nt, Human adenovirus C
cggaggaguccag

SEQ ID NO: 1551311 - RNA, 15 nt, Human adenovirus C
caaacugcccucacg

SEQ ID NO: 1551312 - RNA, 15 nt, Human adenovirus C
gucaggaggggcaac

SEQ ID NO: 1551313 - RNA, 15 nt, Human adenovirus C
gcggcggucggagcu

SEQ ID NO: 1551314 - RNA, 22 nt, Human adenovirus C
ccaaccgcgguugugcagggug

SEQ ID NO: 1551315 - RNA, 16 nt, Human adenovirus C
cuugccgucugcgccg

SEQ ID NO: 1551316 - RNA, 16 nt, Human adenovirus C
cgcuaugugcagcaga

SEQ ID NO: 1551317 - RNA, 16 nt, Human adenovirus C
cguaggagucgcgcag

SEQ ID NO: 1551318 - RNA, 23 nt, Human adenovirus C
gucuccuaccuuggaauuuugca

SEQ ID NO: 1551319 - RNA, 14 nt, Human adenovirus C
auacagacuugaga

SEQ ID NO: 1551320 - RNA, 16 nt, Human adenovirus C
auacaaggaguaucag

SEQ ID NO: 1551321 - RNA, 14 nt, Human adenovirus C
ggcguggccuuccc

SEQ ID NO: 1551322 - RNA, 21 nt, Human adenovirus C
agagcgcagcgaugugccccu

SEQ ID NO: 1551323 - RNA, 15 nt, Human adenovirus C
guacagcccacccug

SEQ ID NO: 1551324 - RNA, 13 nt, Human adenovirus C
uaacaugguucug

SEQ ID NO: 1551325 - RNA, 16 nt, Human adenovirus C
ggccugaaccgcgagc

SEQ ID NO: 1551326 - RNA, 20 nt, Human adenovirus C
cgagaccguguaccugcgca

SEQ ID NO: 1551327 - RNA, 17 nt, Human adenovirus C
ugguuccauccggccca

SEQ ID NO: 1551328 - RNA, 14 nt, Human adenovirus C
uggugcugccaaca

SEQ ID NO: 1551329 - RNA, 18 nt, Human adenovirus C
gucaagcaggccaaacuu

SEQ ID NO: 1551330 - RNA, 17 nt, Human adenovirus C
cuuacacguagccugau

SEQ ID NO: 1551331 - RNA, 15 nt, Human adenovirus C
cagcgaugugccccu

SEQ ID NO: 1551332 - RNA, 17 nt, Human adenovirus C
agcccgugacacugcag

SEQ ID NO: 1551333 - RNA, 20 nt, Human adenovirus C
uggcgccuucagcuggggcu

SEQ ID NO: 1551334 - RNA, 17 nt, Human adenovirus C
cucggaccacucugaga

SEQ ID NO: 1551335 - RNA, 18 nt, Human adenovirus C
ggaaaugcguggaagaac

SEQ ID NO: 1551336 - RNA, 21 nt, Human adenovirus C
auguuucuccacgccuuugcc

SEQ ID NO: 1551337 - RNA, 18 nt, Human adenovirus C
cggaccaguuuauuccca

SEQ ID NO: 1551338 - RNA, 23 nt, Human adenovirus C
gcugugccuuuuacugcugcugg

SEQ ID NO: 1551339 - RNA, 14 nt, Human adenovirus C
cauggcgccaucca

SEQ ID NO: 1551340 - RNA, 16 nt, Human adenovirus C
caaucaaucagccucg

SEQ ID NO: 1551341 - RNA, 14 nt, Human adenovirus C
cucuuacaccuucu

SEQ ID NO: 1551342 - RNA, 21 nt, Human adenovirus C
ucugguuccggaugaaaaagg

SEQ ID NO: 1551343 - RNA, 13 nt, Human adenovirus C
ugugcagcagagc

SEQ ID NO: 1551344 - RNA, 18 nt, Human adenovirus C
cuugcagauauggcccuc

SEQ ID NO: 1551345 - RNA, 13 nt, Human adenovirus C
aaagccaaaaaac

SEQ ID NO: 1551346 - RNA, 14 nt, Human adenovirus C
caagagcagcggca

SEQ ID NO: 1551347 - RNA, 21 nt, Human adenovirus C
gacgaugcuucuaaauagcua

SEQ ID NO: 1551348 - RNA, 14 nt, Human adenovirus C
gcuacagaggaggc

SEQ ID NO: 1551349 - RNA, 13 nt, Human adenovirus C
gccuggaggagcg

SEQ ID NO: 1551350 - RNA, 16 nt, Human adenovirus C
ccgccgccgccaccca

SEQ ID NO: 1551351 - RNA, 19 nt, Human adenovirus C
ugaccgaggagcugaggcc

SEQ ID NO: 1551352 - RNA, 18 nt, Human adenovirus C
gggccaggucggcgacaa

SEQ ID NO: 1551353 - RNA, 15 nt, Human adenovirus C
acccgcaacuucaga

SEQ ID NO: 1551354 - RNA, 19 nt, Human adenovirus C
guggugcaggagcgcagcu

SEQ ID NO: 1551355 - RNA, 15 nt, Human adenovirus C
uacgaacgccaccug

SEQ ID NO: 1551356 - RNA, 13 nt, Human adenovirus C
augugcccggccc

SEQ ID NO: 1551357 - RNA, 18 nt, Human adenovirus C
uuggacgcaauggccaaa

SEQ ID NO: 1551358 - RNA, 13 nt, Human adenovirus C
aagcaaugacagc

SEQ ID NO: 1551359 - RNA, 20 nt, Human adenovirus C
ucuuaugccaggccuacaaa

SEQ ID NO: 1551360 - RNA, 23 nt, Human adenovirus C
agccccuacugcaccggcggcag

SEQ ID NO: 1551361 - RNA, 21 nt, Human adenovirus C
cagcccgggggaggcaagcac

SEQ ID NO: 1551362 - RNA, 13 nt, Human adenovirus C
uccauagcgcuua

SEQ ID NO: 1551363 - RNA, 18 nt, Human adenovirus C
ucgcgccgcaccgcgucc

SEQ ID NO: 1551364 - RNA, 20 nt, Human adenovirus C
aaccuucuagccuauccaaa

SEQ ID NO: 1551365 - RNA, 21 nt, Human adenovirus C
acugcaacagguuauugcccc

SEQ ID NO: 1551366 - RNA, 21 nt, Human adenovirus C
cgaucguaaacgcgcuggccg

SEQ ID NO: 1551367 - RNA, 16 nt, Human adenovirus C
ccacauuucggcccca

SEQ ID NO: 1551368 - RNA, 13 nt, Human adenovirus C
ggucccacagcuc

SEQ ID NO: 1551369 - RNA, 22 nt, Human adenovirus C
caaaagugguuuuguacaguga

SEQ ID NO: 1551370 - RNA, 15 nt, Human adenovirus C
ucagcgccucccaaa

SEQ ID NO: 1551371 - RNA, 13 nt, Human adenovirus C
ggagcgaggaggu

SEQ ID NO: 1551372 - RNA, 21 nt, Human adenovirus C
gcugcggccccgcggucagau

SEQ ID NO: 1551373 - RNA, 18 nt, Human adenovirus C
aucgcgcccauggcuacc

SEQ ID NO: 1551374 - RNA, 18 nt, Human adenovirus C
ucaaagggguucugccgc

SEQ ID NO: 1551375 - RNA, 17 nt, Human adenovirus C
agguccgcgugcggcca

SEQ ID NO: 1551376 - RNA, 12 nt, Human adenovirus C
acgaccugggcg

SEQ ID NO: 1551377 - RNA, 14 nt, Human adenovirus C
cgaugagacccgca

SEQ ID NO: 1551378 - RNA, 15 nt, Human adenovirus C
cuagccaacuaccuu

SEQ ID NO: 1551379 - RNA, 14 nt, Human adenovirus C
uugauggagggcaa

SEQ ID NO: 1551380 - RNA, 23 nt, Human adenovirus C
gucuucgcccugcgcgucggcca

SEQ ID NO: 1551381 - RNA, 16 nt, Human adenovirus C
cauugucaaagaucuu

SEQ ID NO: 1551382 - RNA, 21 nt, Human adenovirus C
cuaaaccuaugauacuuacca

SEQ ID NO: 1551383 - RNA, 16 nt, Human adenovirus C
cugugcugccagggcc

SEQ ID NO: 1551384 - RNA, 15 nt, Human adenovirus C
caccaccaguagcac

SEQ ID NO: 1551385 - RNA, 15 nt, Human adenovirus C
agcagcagggcaacc

SEQ ID NO: 1551386 - RNA, 15 nt, Human adenovirus C
caaaucuucacuucc

SEQ ID NO: 1551387 - RNA, 22 nt, Human adenovirus C
gauggcaaugggcccacgggcg

SEQ ID NO: 1551388 - RNA, 20 nt, Human adenovirus C
ucaacaaagcccgccaagag

SEQ ID NO: 1551389 - RNA, 14 nt, Human adenovirus C
gcaggaggaagcca

SEQ ID NO: 1551390 - RNA, 20 nt, Human adenovirus C
ccucuuguccugcaucucuu

SEQ ID NO: 1551391 - RNA, 13 nt, Human adenovirus C
gaccccuggagag

SEQ ID NO: 1551392 - RNA, 20 nt, Human adenovirus C
ggcagccaggugacacuaac

SEQ ID NO: 1551393 - RNA, 19 nt, Human adenovirus C
cuacuuuuaagcccuacuc

SEQ ID NO: 1551394 - RNA, 17 nt, Human adenovirus C
aaagucccccuggaguu

SEQ ID NO: 1551395 - RNA, 20 nt, Human adenovirus C
gacugcagccuccgccgccg

SEQ ID NO: 1551396 - RNA, 20 nt, Human adenovirus C
uggccgcgauguuuagcugc

SEQ ID NO: 1551397 - RNA, 14 nt, Human adenovirus C
ucaugagcgagcug

SEQ ID NO: 1551398 - RNA, 15 nt, Human adenovirus C
ucacugugcccccca

SEQ ID NO: 1551399 - RNA, 20 nt, Human adenovirus C
gaugaaaagaaaaugccuug

SEQ ID NO: 1551400 - RNA, 20 nt, Human adenovirus C
uucccagugcccgcugucau

SEQ ID NO: 1551401 - RNA, 13 nt, Human adenovirus C
agcguccgcggcc

SEQ ID NO: 1551402 - RNA, 17 nt, Human adenovirus C
gcuaccucgcucccacc

SEQ ID NO: 1551403 - RNA, 15 nt, Human adenovirus C
cuauauuucaacaaa

SEQ ID NO: 1551404 - RNA, 19 nt, Human adenovirus C
gacucagggucgcaggggc

SEQ ID NO: 1551405 - RNA, 19 nt, Human adenovirus C
acuugaaaaacauguaaaa

SEQ ID NO: 1551406 - RNA, 11 nt, Human adenovirus C
gagaagaacau

SEQ ID NO: 1551407 - RNA, 22 nt, Human adenovirus C
cccaaaaagaagcugcagcugc

SEQ ID NO: 1551408 - RNA, 16 nt, Human adenovirus C
ugcagauucacucaaa

SEQ ID NO: 1551409 - RNA, 14 nt, Human adenovirus C
cuucagcuugccug

SEQ ID NO: 1551410 - RNA, 17 nt, Human adenovirus C
ucaggaauucugcccgc

SEQ ID NO: 1551411 - RNA, 17 nt, Human adenovirus C
cuggaagccaugcucag

SEQ ID NO: 1551412 - RNA, 14 nt, Human adenovirus C
accgcgcggcgggc

SEQ ID NO: 1551413 - RNA, 14 nt, Human adenovirus C
cgcaacugggcagc

SEQ ID NO: 1551414 - RNA, 13 nt, Human adenovirus C
gcagcagcagggc

SEQ ID NO: 1551415 - RNA, 17 nt, Human adenovirus C
agcugccuucccaaaaa

SEQ ID NO: 1551416 - RNA, 19 nt, Human adenovirus C
gaagucccugcgacgggcc

SEQ ID NO: 1551417 - RNA, 21 nt, Human adenovirus C
gagaacuccucacuuaaaaaa

SEQ ID NO: 1551418 - RNA, 17 nt, Human adenovirus C
cuuugguucuuacaaaa

SEQ ID NO: 1551419 - RNA, 13 nt, Human adenovirus C
ugagacacaagaa

SEQ ID NO: 1551420 - RNA, 21 nt, Human adenovirus C
uugucacccuuauccucaucu

SEQ ID NO: 1551421 - RNA, 22 nt, Human adenovirus C
ugcacaguuuaaacagcgagga

SEQ ID NO: 1551422 - RNA, 21 nt, Human adenovirus C
gaaacuagcgagguaagcacu

SEQ ID NO: 1551423 - RNA, 17 nt, Human adenovirus C
agacugugggggcaaca

SEQ ID NO: 1551424 - RNA, 20 nt, Human adenovirus C
agaucuugguugugggccau

SEQ ID NO: 1551425 - RNA, 23 nt, Human adenovirus C
gcggucuuuccaguacucuugga

SEQ ID NO: 1551426 - RNA, 21 nt, Human adenovirus C
gagcuuccacuuggucaggca

SEQ ID NO: 1551427 - RNA, 21 nt, Human adenovirus C
gugggggaugugcgcgaggcc

SEQ ID NO: 1551428 - RNA, 16 nt, Human adenovirus C
gccaacgcgccuacca

SEQ ID NO: 1551429 - RNA, 12 nt, Human adenovirus C
gcgaccgcgagg

SEQ ID NO: 1551430 - RNA, 20 nt, Human adenovirus C
gaccguggagccugggcugg

SEQ ID NO: 1551431 - RNA, 22 nt, Human adenovirus C
acgguuguuaauuaccugggcg

SEQ ID NO: 1551432 - RNA, 17 nt, Human adenovirus C
auguucuugucccuccg

SEQ ID NO: 1551433 - RNA, 18 nt, Human adenovirus C
ccgggacugggcgugcag

SEQ ID NO: 1551434 - RNA, 18 nt, Human adenovirus C
gacucgguuagcggccug

SEQ ID NO: 1551435 - RNA, 19 nt, Human adenovirus C
agauuauacccacaaccuu

SEQ ID NO: 1551436 - RNA, 18 nt, Human adenovirus C
gcgccaacucguuugaug

SEQ ID NO: 1551437 - RNA, 13 nt, Human adenovirus C
cagccgcaccgcg

SEQ ID NO: 1551438 - RNA, 16 nt, Human adenovirus C
caguggcggcggcgcu

SEQ ID NO: 1551439 - RNA, 17 nt, Human adenovirus C
ccaguggagaggcagag

SEQ ID NO: 1551440 - RNA, 18 nt, Human adenovirus C
uccuuuccuuccucccaa

SEQ ID NO: 1551441 - RNA, 14 nt, Human adenovirus C
gaacagcagcacag

SEQ ID NO: 1551442 - RNA, 14 nt, Human adenovirus C
caccaccacccucc

SEQ ID NO: 1551443 - RNA, 14 nt, Human adenovirus C
gcggggaggcggcg

SEQ ID NO: 1551444 - RNA, 15 nt, Human adenovirus C
ccaguggcaacuggc

SEQ ID NO: 1551445 - RNA, 21 nt, Human adenovirus C
cgugugaccccgaagccccuc

SEQ ID NO: 1551446 - RNA, 14 nt, Human adenovirus C
aagacugggacagc

SEQ ID NO: 1551447 - RNA, 16 nt, Human adenovirus C
cugagacgaaggcucg

SEQ ID NO: 1551448 - RNA, 18 nt, Human adenovirus C
uuccaggaaguacggcac

SEQ ID NO: 1551449 - RNA, 15 nt, Human adenovirus C
gcaaaucuuugucca

SEQ ID NO: 1551450 - RNA, 22 nt, Human adenovirus C
caccagcucaaucagucacagu

SEQ ID NO: 1551451 - RNA, 17 nt, Human adenovirus C
ggaggaauacugggaca

SEQ ID NO: 1551452 - RNA, 19 nt, Human adenovirus C
cgugcgagggagcgaggag

SEQ ID NO: 1551453 - RNA, 23 nt, Human adenovirus C
cuggaaugccauagaugccauga

SEQ ID NO: 1551454 - RNA, 16 nt, Human adenovirus C
cgcugcggcugcuguu

SEQ ID NO: 1551455 - RNA, 18 nt, Human adenovirus C
gcgagguauucagcucaa

SEQ ID NO: 1551456 - RNA, 13 nt, Human adenovirus C
uguaccugcgcac

SEQ ID NO: 1551457 - RNA, 20 nt, Human adenovirus C
gguauuagagaucuuauucc

SEQ ID NO: 1551458 - RNA, 16 nt, Human adenovirus C
cacacacgggaggagc

SEQ ID NO: 1551459 - RNA, 19 nt, Human adenovirus C
ucagagaagaacaugccgc

SEQ ID NO: 1551460 - RNA, 15 nt, Human adenovirus C
uccaagauggcuacc

SEQ ID NO: 1551461 - RNA, 16 nt, Human adenovirus C
accugaggacuaccac

SEQ ID NO: 1551462 - RNA, 19 nt, Human adenovirus C
ggcacccccgcuugaggag

SEQ ID NO: 1551463 - RNA, 20 nt, Human adenovirus C
augauggaagacugggacag

SEQ ID NO: 1551464 - RNA, 16 nt, Human adenovirus C
gaaugcgcaggcgguc

SEQ ID NO: 1551465 - RNA, 15 nt, Human adenovirus C
cuggagugucacugu

SEQ ID NO: 1551466 - RNA, 16 nt, Human adenovirus C
gccgcacgaggggcag

SEQ ID NO: 1551467 - RNA, 23 nt, Human adenovirus C
agccgcgcgcuggggcaggagga

SEQ ID NO: 1551468 - RNA, 19 nt, Human adenovirus C
ucaccgguugcugcgccca

SEQ ID NO: 1551469 - RNA, 18 nt, Human adenovirus C
aauacaaccccaccaaug

SEQ ID NO: 1551470 - RNA, 18 nt, Human adenovirus C
ccuguauauuaaugcauc

SEQ ID NO: 1551471 - RNA, 20 nt, Human adenovirus C
ccaaaaagaagcugcagcug

SEQ ID NO: 1551472 - RNA, 16 nt, Human adenovirus C
cguggccuugcaggcg

SEQ ID NO: 1551473 - RNA, 17 nt, Human adenovirus C
uucuuauauuauugacc

SEQ ID NO: 1551474 - RNA, 16 nt, Human adenovirus C
gcagcuggcgcgcugg

SEQ ID NO: 1551475 - RNA, 16 nt, Human adenovirus C
ugaaggggugcgcucc

SEQ ID NO: 1551476 - RNA, 19 nt, Human adenovirus C
gcccuacuuccgcagccac

SEQ ID NO: 1551477 - RNA, 22 nt, Human adenovirus C
cacuggucuugucaugccuggg

SEQ ID NO: 1551478 - RNA, 23 nt, Human adenovirus C
cgagucuggugacuuggcaccca

SEQ ID NO: 1551479 - RNA, 16 nt, Human adenovirus C
agcauuugcagguggu

SEQ ID NO: 1551480 - RNA, 20 nt, Human adenovirus C
ucaacucccggaacucaggu

SEQ ID NO: 1551481 - RNA, 14 nt, Human adenovirus C
cugugguacuuccc

SEQ ID NO: 1551482 - RNA, 15 nt, Human adenovirus C
cgaggucgagaagcc

SEQ ID NO: 1551483 - RNA, 16 nt, Human adenovirus C
cacuggaaccagggcc

SEQ ID NO: 1551484 - RNA, 14 nt, Human adenovirus C
agcgcuccguggcc

SEQ ID NO: 1551485 - RNA, 19 nt, Human adenovirus C
cucggaguaccugagcccc

SEQ ID NO: 1551486 - RNA, 13 nt, Human adenovirus C
ggggcauggccgg

SEQ ID NO: 1551487 - RNA, 23 nt, Human adenovirus C
ugagcuugaucugcuggcgcaga

SEQ ID NO: 1551488 - RNA, 20 nt, Human adenovirus C
gucucggugacggcgcggcc

SEQ ID NO: 1551489 - RNA, 12 nt, Human adenovirus C
ccuugcaggcgc

SEQ ID NO: 1551490 - RNA, 12 nt, Human adenovirus C
gguuggggcggc

SEQ ID NO: 1551491 - RNA, 21 nt, Human adenovirus C
uggacauguggugguuuucca

SEQ ID NO: 1551492 - RNA, 19 nt, Human adenovirus C
caaacccagcuucagcuug

SEQ ID NO: 1551493 - RNA, 16 nt, Human adenovirus C
uacaaccccaccaaug

SEQ ID NO: 1551494 - RNA, 22 nt, Human adenovirus C
gcuuucaagaacuugcaggggc

SEQ ID NO: 1551495 - RNA, 15 nt, Human adenovirus C
ccaucaacaaagccc

SEQ ID NO: 1551496 - RNA, 16 nt, Human adenovirus C
cagguuucugcccuga

SEQ ID NO: 1551497 - RNA, 15 nt, Human adenovirus C
gcggacaagcagcug

SEQ ID NO: 1551498 - RNA, 22 nt, Human adenovirus C
uguucccagcggucccauccaa

SEQ ID NO: 1551499 - RNA, 14 nt, Human adenovirus C
cguccugcaggaau

SEQ ID NO: 1551500 - RNA, 22 nt, Human adenovirus C
cauggcggggaccacagaaccc

SEQ ID NO: 1551501 - RNA, 19 nt, Human adenovirus C
auuaugaaacggaguguca

SEQ ID NO: 1551502 - RNA, 22 nt, Human adenovirus C
accuccuccuccugccaggcuc

SEQ ID NO: 1551503 - RNA, 20 nt, Human adenovirus C
cggcgaguacuaagcgguga

SEQ ID NO: 1551504 - RNA, 20 nt, Human adenovirus C
gccuggaacagcagcacagg

SEQ ID NO: 1551505 - RNA, 19 nt, Human adenovirus C
aggacgugguaaaggugac

SEQ ID NO: 1551506 - RNA, 23 nt, Human adenovirus C
gcuguccuaucaacucuugcuug

SEQ ID NO: 1551507 - RNA, 15 nt, Human adenovirus C
aggaugggcaggggc

SEQ ID NO: 1551508 - RNA, 17 nt, Human adenovirus C
aggacccuggugcugcc

SEQ ID NO: 1551509 - RNA, 11 nt, Human adenovirus C
gucacccagca

SEQ ID NO: 1551510 - RNA, 13 nt, Human adenovirus C
cuggggcgcgcac

SEQ ID NO: 1551511 - RNA, 13 nt, Human adenovirus C
cagcgccgggugg

SEQ ID NO: 1551512 - RNA, 14 nt, Human adenovirus C
aucucgggccagga

SEQ ID NO: 1551513 - RNA, 17 nt, Human adenovirus C
ggacugggcgugcagac

SEQ ID NO: 1551514 - RNA, 18 nt, Human adenovirus C
cgcaccgucgcaugcgcg

SEQ ID NO: 1551515 - RNA, 15 nt, Human adenovirus C
accaucgcgcccaca

SEQ ID NO: 1551516 - RNA, 14 nt, Human adenovirus C
auagcggccgggca

SEQ ID NO: 1551517 - RNA, 14 nt, Human adenovirus C
accgccuccaccga

SEQ ID NO: 1551518 - RNA, 15 nt, Human adenovirus C
caaagcccaagaaau

SEQ ID NO: 1551519 - RNA, 15 nt, Human adenovirus C
cgcggcgugcuggac

SEQ ID NO: 1551520 - RNA, 13 nt, Human adenovirus C
aucugagcggggg

SEQ ID NO: 1551521 - RNA, 23 nt, Human adenovirus C
accugccuccccccgcugacacc

SEQ ID NO: 1551522 - RNA, 23 nt, Human adenovirus C
gcgccgcgcgcgggcaggagcug

SEQ ID NO: 1551523 - RNA, 20 nt, Human adenovirus C
ccugcgucauuacccagggc

SEQ ID NO: 1551524 - RNA, 11 nt, Human adenovirus C
gugcagaccaa

SEQ ID NO: 1551525 - RNA, 15 nt, Human adenovirus C
cugcacgucuccuga

SEQ ID NO: 1551526 - RNA, 12 nt, Human adenovirus C
cugcaacccgcg

SEQ ID NO: 1551527 - RNA, 15 nt, Human adenovirus C
ccgugauccaugcgg

SEQ ID NO: 1551528 - RNA, 20 nt, Human adenovirus C
ccgggggugcuuggcaugga

SEQ ID NO: 1551529 - RNA, 17 nt, Human adenovirus C
cuuuggacaccucccac

SEQ ID NO: 1551530 - RNA, 16 nt, Human adenovirus C
uaacacaggcuggggc

SEQ ID NO: 1551531 - RNA, 22 nt, Human adenovirus C
gauauggcccucaccugccgcc

SEQ ID NO: 1551532 - RNA, 20 nt, Human adenovirus C
agacaugaugcaagaccccg

SEQ ID NO: 1551533 - RNA, 16 nt, Human adenovirus C
cugaagcagggccagg

SEQ ID NO: 1551534 - RNA, 16 nt, Human adenovirus C
ucauauuuccugaagc

SEQ ID NO: 1551535 - RNA, 14 nt, Human adenovirus C
ggcgauggagcgca

SEQ ID NO: 1551536 - RNA, 14 nt, Human adenovirus C
gcgaacggagucaa

SEQ ID NO: 1551537 - RNA, 15 nt, Human adenovirus C
uauaauaaauacaga

SEQ ID NO: 1551538 - RNA, 23 nt, Human adenovirus C
ggcgcuccauggccucguagaag

SEQ ID NO: 1551539 - RNA, 17 nt, Human adenovirus C
cucacagaccugggcca

SEQ ID NO: 1551540 - RNA, 14 nt, Human adenovirus C
ggccacuacccgga

SEQ ID NO: 1551541 - RNA, 22 nt, Human adenovirus C
auuaaaaaccuccuccuccugc

SEQ ID NO: 1551542 - RNA, 15 nt, Human adenovirus C
aagcccgucucuggg

SEQ ID NO: 1551543 - RNA, 15 nt, Human adenovirus C
gagucggugagcucc

SEQ ID NO: 1551544 - RNA, 17 nt, Human adenovirus C
cuuccauaagggccucc

SEQ ID NO: 1551545 - RNA, 13 nt, Human adenovirus C
gcgggcggagggu

SEQ ID NO: 1551546 - RNA, 18 nt, Human adenovirus C
ccgaggccgaagaggugu

SEQ ID NO: 1551547 - RNA, 12 nt, Human adenovirus C
cagagcuguccu

SEQ ID NO: 1551548 - RNA, 22 nt, Human adenovirus C
cugagcaacuuguugggcaucc

SEQ ID NO: 1551549 - RNA, 15 nt, Human adenovirus C
ccaagggugcagcug

SEQ ID NO: 1551550 - RNA, 18 nt, Human adenovirus C
ccaccgcggaugcuggcg

SEQ ID NO: 1551551 - RNA, 12 nt, Human adenovirus C
cagcaggaggag

SEQ ID NO: 1551552 - RNA, 16 nt, Human adenovirus C
cuuacaaaccuggaaa

SEQ ID NO: 1551553 - RNA, 22 nt, Human adenovirus C
gcgggccuccguuaucgcucca

SEQ ID NO: 1551554 - RNA, 17 nt, Human adenovirus C
cacgagaaggugcuggc

SEQ ID NO: 1551555 - RNA, 14 nt, Human adenovirus C
cgggcuagguccag

SEQ ID NO: 1551556 - RNA, 23 nt, Human adenovirus C
ccgcgguugugcagggugacaag

SEQ ID NO: 1551557 - RNA, 12 nt, Human adenovirus C
gcgccuaccacc

SEQ ID NO: 1551558 - RNA, 14 nt, Human adenovirus C
agggcgaaggugac

SEQ ID NO: 1551559 - RNA, 15 nt, Human adenovirus C
gccauggcaccgagc

SEQ ID NO: 1551560 - RNA, 18 nt, Human adenovirus C
caggaacagcucuacagc

SEQ ID NO: 1551561 - RNA, 19 nt, Human adenovirus C
ugcgcgcuggccagggugc

SEQ ID NO: 1551562 - RNA, 23 nt, Human adenovirus C
ccgccucgggcaaaacgugcuuc

SEQ ID NO: 1551563 - RNA, 20 nt, Human adenovirus C
gcagcggcagaagcugccgc

SEQ ID NO: 1551564 - RNA, 15 nt, Human adenovirus C
guuggacgcuggaag

SEQ ID NO: 1551565 - RNA, 20 nt, Human adenovirus C
uucccccguaacauccugca

SEQ ID NO: 1551566 - RNA, 22 nt, Human adenovirus C
ggccagggugcgcuugaggcug

SEQ ID NO: 1551567 - RNA, 16 nt, Human adenovirus C
cccgcaccaggugcag

SEQ ID NO: 1551568 - RNA, 22 nt, Human adenovirus C
cccgcggcgacaggucaggcgg

SEQ ID NO: 1551569 - RNA, 14 nt, Human adenovirus C
uacaauuaccucag

SEQ ID NO: 1551570 - RNA, 23 nt, Human adenovirus C
ugcugacacuguaccgcgaggcc

SEQ ID NO: 1551571 - RNA, 11 nt, Human adenovirus C
accugcuggau

SEQ ID NO: 1551572 - RNA, 21 nt, Human adenovirus C
ugaggguaacuccagggugcg

SEQ ID NO: 1551573 - RNA, 18 nt, Human adenovirus C
aguucaugucgcugucca

SEQ ID NO: 1551574 - RNA, 21 nt, Human adenovirus C
gaagacguaugcgcaggagca

SEQ ID NO: 1551575 - RNA, 19 nt, Human adenovirus C
agcgggggguaccugcugg

SEQ ID NO: 1551576 - RNA, 17 nt, Human adenovirus C
ggguugaaacucacucc

SEQ ID NO: 1551577 - RNA, 14 nt, Human adenovirus C
augccugcgcggcc

SEQ ID NO: 1551578 - RNA, 23 nt, Human adenovirus C
acaaaggucuuguugcuggugaa

SEQ ID NO: 1551579 - RNA, 11 nt, Human adenovirus C
accagccacaa

SEQ ID NO: 1551580 - RNA, 13 nt, Human adenovirus C
ccuacaccagugu

SEQ ID NO: 1551581 - RNA, 12 nt, Human adenovirus C
ucacccuuaucc

SEQ ID NO: 1551582 - RNA, 15 nt, Human adenovirus C
cagucugcagcgcug

SEQ ID NO: 1551583 - RNA, 18 nt, Human adenovirus C
gaagauuuuucugcugug

SEQ ID NO: 1551584 - RNA, 22 nt, Human adenovirus C
guggacguucagauacccacca

SEQ ID NO: 1551585 - RNA, 15 nt, Human adenovirus C
guauacagacuugag

SEQ ID NO: 1551586 - RNA, 17 nt, Human adenovirus C
caacaaaaggugguaga

SEQ ID NO: 1551587 - RNA, 22 nt, Human adenovirus C
ucccaucgcgcaacugggcagc

SEQ ID NO: 1551588 - RNA, 18 nt, Human adenovirus C
ccaaggccauggcaccga

SEQ ID NO: 1551589 - RNA, 18 nt, Human adenovirus C
aauccacagcggcggcag

SEQ ID NO: 1551590 - RNA, 13 nt, Human adenovirus C
gacggcgcaccgg

SEQ ID NO: 1551591 - RNA, 13 nt, Human adenovirus C
gcugcagccaggg

SEQ ID NO: 1551592 - RNA, 16 nt, Human adenovirus C
gccacaagugcuuugc

SEQ ID NO: 1551593 - RNA, 17 nt, Human adenovirus C
agccacucucgcaaggc

SEQ ID NO: 1551594 - RNA, 17 nt, Human adenovirus C
ggagugcugggccagca

SEQ ID NO: 1551595 - RNA, 13 nt, Human adenovirus C
ggaccugagcgag

SEQ ID NO: 1551596 - RNA, 22 nt, Human adenovirus C
cugaggacuaccacgcccacga

SEQ ID NO: 1551597 - RNA, 18 nt, Human adenovirus C
cgguuuuccuggccaaua

SEQ ID NO: 1551598 - RNA, 12 nt, Human adenovirus C
gcuaaccagcgu

SEQ ID NO: 1551599 - RNA, 15 nt, Human adenovirus C
augcuccccuggacc

SEQ ID NO: 1551600 - RNA, 15 nt, Human adenovirus C
cuuuggggucacugc

SEQ ID NO: 1551601 - RNA, 19 nt, Human adenovirus C
gagccccgggcuggugcag

SEQ ID NO: 1551602 - RNA, 16 nt, Human adenovirus C
cguuggagacugcagc

SEQ ID NO: 1551603 - RNA, 23 nt, Human adenovirus C
cuuaugccaggccuacaaauccu

SEQ ID NO: 1551604 - RNA, 16 nt, Human adenovirus C
caggcgauaauggaga

SEQ ID NO: 1551605 - RNA, 20 nt, Human adenovirus C
ccucagcgaugauucgcacc

SEQ ID NO: 1551606 - RNA, 15 nt, Human adenovirus C
ggcucaccacccagg

SEQ ID NO: 1551607 - RNA, 15 nt, Human adenovirus C
cucccucguacgagg

SEQ ID NO: 1551608 - RNA, 15 nt, Human adenovirus C
cugagacgcauuuua

SEQ ID NO: 1551609 - RNA, 21 nt, Human adenovirus C
ggcaguugccgaggaugaaga

SEQ ID NO: 1551610 - RNA, 13 nt, Human adenovirus C
ggacaagcagcug

SEQ ID NO: 1551611 - RNA, 15 nt, Human adenovirus C
ccaccggccguggag

SEQ ID NO: 1551612 - RNA, 23 nt, Human adenovirus C
aacccccgcggcgccgggcccgg

SEQ ID NO: 1551613 - RNA, 17 nt, Human adenovirus C
uguugggaaacggccgc

SEQ ID NO: 1551614 - RNA, 17 nt, Human adenovirus C
gcugaccugcgcugggc

SEQ ID NO: 1551615 - RNA, 22 nt, Human adenovirus C
cgcguucguccucacucucuuc

SEQ ID NO: 1551616 - RNA, 13 nt, Human adenovirus C
gcgggcaggagcu

SEQ ID NO: 1551617 - RNA, 23 nt, Human adenovirus C
gaacuauggcagcaaggccugga

SEQ ID NO: 1551618 - RNA, 19 nt, Human adenovirus C
uuggcgcgcagcuugcccu

SEQ ID NO: 1551619 - RNA, 17 nt, Human adenovirus C
cggcucaccacccaggu

SEQ ID NO: 1551620 - RNA, 13 nt, Human adenovirus C
gugguggaccugg

SEQ ID NO: 1551621 - RNA, 13 nt, Human adenovirus C
guacagcccaccc

SEQ ID NO: 1551622 - RNA, 23 nt, Human adenovirus C
cagauccuuccuaucaaccagaa

SEQ ID NO: 1551623 - RNA, 21 nt, Human adenovirus C
cgaaccuuuggacaccuccca

SEQ ID NO: 1551624 - RNA, 12 nt, Human adenovirus C
gcugcgcaaccc

SEQ ID NO: 1551625 - RNA, 13 nt, Human adenovirus C
gcgaggagcucaa

SEQ ID NO: 1551626 - RNA, 13 nt, Human adenovirus C
ccaacgcgcggcg

SEQ ID NO: 1551627 - RNA, 15 nt, Human adenovirus C
uacuuuaucucaaau

SEQ ID NO: 1551628 - RNA, 24 nt, Human adenovirus C
agccacuuaaaaaaacaaagucaa

SEQ ID NO: 1551629 - RNA, 13 nt, Human adenovirus C
ccuccgcaccacu

SEQ ID NO: 1551630 - RNA, 17 nt, Human adenovirus C
gaccugccuccccccgc

SEQ ID NO: 1551631 - RNA, 18 nt, Human adenovirus C
gcgccugauuucugccag

SEQ ID NO: 1551632 - RNA, 11 nt, Human adenovirus C
accaccacccu

SEQ ID NO: 1551633 - RNA, 23 nt, Human adenovirus C
cuagccaacuaccuugccuacca

SEQ ID NO: 1551634 - RNA, 17 nt, Human adenovirus C
gaagaccaaucccgccc

SEQ ID NO: 1551635 - RNA, 14 nt, Human adenovirus C
auauuguucaaaau

SEQ ID NO: 1551636 - RNA, 15 nt, Human adenovirus C
agccccaccaccaca

SEQ ID NO: 1551637 - RNA, 15 nt, Human adenovirus C
agugcugggccagca

SEQ ID NO: 1551638 - RNA, 20 nt, Human adenovirus C
cuucgaucucagcgcagcgg

SEQ ID NO: 1551639 - RNA, 18 nt, Human adenovirus C
cagcgccucccaaaagac

SEQ ID NO: 1551640 - RNA, 17 nt, Human adenovirus C
caugucuaugcccaggc

SEQ ID NO: 1551641 - RNA, 17 nt, Human adenovirus C
ccuccgcccugcgcgcg

SEQ ID NO: 1551642 - RNA, 20 nt, Human adenovirus C
ggccagcuguuggggugagu

SEQ ID NO: 1551643 - RNA, 13 nt, Human adenovirus C
gccgagcuguugc

SEQ ID NO: 1551644 - RNA, 16 nt, Human adenovirus C
guaggugagcuccuca

SEQ ID NO: 1551645 - RNA, 12 nt, Human adenovirus C
cucaucugcagc

SEQ ID NO: 1551646 - RNA, 13 nt, Human adenovirus C
accgccgccgacc

SEQ ID NO: 1551647 - RNA, 16 nt, Human adenovirus C
cugggccagcacacac

SEQ ID NO: 1551648 - RNA, 14 nt, Human adenovirus C
cauacugacccgcu

SEQ ID NO: 1551649 - RNA, 19 nt, Human adenovirus C
gcgcuccuuuuggcuuccu

SEQ ID NO: 1551650 - RNA, 23 nt, Human adenovirus C
ccaugaaccacccuacuuuccca

SEQ ID NO: 1551651 - RNA, 13 nt, Human adenovirus C
ccugagcagcugc

SEQ ID NO: 1551652 - RNA, 21 nt, Human adenovirus C
gcccgcugucauaccacugca

SEQ ID NO: 1551653 - RNA, 22 nt, Human adenovirus C
guuggcggggggcugccgugcg

SEQ ID NO: 1551654 - RNA, 17 nt, Human adenovirus C
ccagucguagcaggagc

SEQ ID NO: 1551655 - RNA, 20 nt, Human adenovirus C
acaacaguggcagcggcgcg

SEQ ID NO: 1551656 - RNA, 13 nt, Human adenovirus C
ugggcgaggagga

SEQ ID NO: 1551657 - RNA, 13 nt, Human adenovirus C
acggcaccgccag

SEQ ID NO: 1551658 - RNA, 17 nt, Human adenovirus C
agcaggaggaggagcgc

SEQ ID NO: 1551659 - RNA, 12 nt, Human adenovirus C
ucagccuugccu

SEQ ID NO: 1551660 - RNA, 21 nt, Human adenovirus C
uacgccaucaucucugucaug

SEQ ID NO: 1551661 - RNA, 19 nt, Human adenovirus C
cagaugaaacgcgccagac

SEQ ID NO: 1551662 - RNA, 16 nt, Human adenovirus C
gaggaauacugggaca

SEQ ID NO: 1551663 - RNA, 22 nt, Human adenovirus C
ccuguaagcgggcacucuuccg

SEQ ID NO: 1551664 - RNA, 15 nt, Human adenovirus C
gcaaggccuggccag

SEQ ID NO: 1551665 - RNA, 13 nt, Human adenovirus C
cuggugaagguca

SEQ ID NO: 1551666 - RNA, 15 nt, Human adenovirus C
gucgggcaccaggug

SEQ ID NO: 1551667 - RNA, 18 nt, Human adenovirus C
acuacaauauuggcuacc

SEQ ID NO: 1551668 - RNA, 20 nt, Human adenovirus C
gacugggggcguacacugga

SEQ ID NO: 1551669 - RNA, 23 nt, Human adenovirus C
guuccaggaaguacggcaccgcc

SEQ ID NO: 1551670 - RNA, 15 nt, Human adenovirus C
ccucgaacaggcggc

SEQ ID NO: 1551671 - RNA, 15 nt, Human adenovirus C
gccgugcggcaggga

SEQ ID NO: 1551672 - RNA, 20 nt, Human adenovirus C
cucaaaggcuacaggggccu

SEQ ID NO: 1551673 - RNA, 19 nt, Human adenovirus C
gacgcaaauagaugagccu

SEQ ID NO: 1551674 - RNA, 13 nt, Human adenovirus C
agaggaggcuagg

SEQ ID NO: 1551675 - RNA, 21 nt, Human adenovirus C
ucccccaugcuuuuugaugcg

SEQ ID NO: 1551676 - RNA, 18 nt, Human adenovirus C
ggucuccguccggacggg

SEQ ID NO: 1551677 - RNA, 16 nt, Human adenovirus C
guggcucccgggcuug

SEQ ID NO: 1551678 - RNA, 17 nt, Human adenovirus C
gccacccacggacgagg

SEQ ID NO: 1551679 - RNA, 21 nt, Human adenovirus C
aagauguugcacaauggcuuc

SEQ ID NO: 1551680 - RNA, 14 nt, Human adenovirus C
cagccucgcccccc

SEQ ID NO: 1551681 - RNA, 21 nt, Human adenovirus C
uggacauaaacuauaacagag

SEQ ID NO: 1551682 - RNA, 15 nt, Human adenovirus C
ccacccaaagcagac

SEQ ID NO: 1551683 - RNA, 14 nt, Human adenovirus C
ucacagauuugcau

SEQ ID NO: 1551684 - RNA, 15 nt, Human adenovirus C
ggcgucgaugacuug

SEQ ID NO: 1551685 - RNA, 13 nt, Human adenovirus C
ccaagaagcgcgg

SEQ ID NO: 1551686 - RNA, 15 nt, Human adenovirus C
gcgcgcgcugcccgu

SEQ ID NO: 1551687 - RNA, 17 nt, Human adenovirus C
gcggcuggagcugccca

SEQ ID NO: 1551688 - RNA, 18 nt, Human adenovirus C
gcuaccggagugcugggc

SEQ ID NO: 1551689 - RNA, 18 nt, Human adenovirus C
cugcggcuaauggugacu

SEQ ID NO: 1551690 - RNA, 16 nt, Human adenovirus C
gagcaaaauuuccaac

SEQ ID NO: 1551691 - RNA, 19 nt, Human adenovirus C
cagcuugagccuggcugac

SEQ ID NO: 1551692 - RNA, 19 nt, Human adenovirus C
cggaaaccucaccucccaa

SEQ ID NO: 1551693 - RNA, 19 nt, Human adenovirus C
gaacuauggcagcaaggcc

SEQ ID NO: 1551694 - RNA, 19 nt, Human adenovirus C
ugacaucggcgcaggucuu

SEQ ID NO: 1551695 - RNA, 13 nt, Human adenovirus C
caacuggccccaa

SEQ ID NO: 1551696 - RNA, 14 nt, Human adenovirus C
caaauuugaucaaa

SEQ ID NO: 1551697 - RNA, 20 nt, Human adenovirus C
agacucugacaaagcccaag

SEQ ID NO: 1551698 - RNA, 23 nt, Human adenovirus C
agagcaaaauuuccaacaaaagg

SEQ ID NO: 1551699 - RNA, 20 nt, Human adenovirus C
cagcgcgagcaggcagaggc

SEQ ID NO: 1551700 - RNA, 12 nt, Human adenovirus C
ggcaggacccug

SEQ ID NO: 1551701 - RNA, 16 nt, Human adenovirus C
cuguccauggucugga

SEQ ID NO: 1551702 - RNA, 15 nt, Human adenovirus C
guucgcacuggggcg

SEQ ID NO: 1551703 - RNA, 17 nt, Human adenovirus C
guaugcgcaggagcaca

SEQ ID NO: 1551704 - RNA, 17 nt, Human adenovirus C
ccccaccaauguggaaa

SEQ ID NO: 1551705 - RNA, 22 nt, Human adenovirus C
ccuccgacugugguugcuucau

SEQ ID NO: 1551706 - RNA, 18 nt, Human adenovirus C
caagggugcagcugaagc

SEQ ID NO: 1551707 - RNA, 14 nt, Human adenovirus C
cuuggaugaugcau

SEQ ID NO: 1551708 - RNA, 13 nt, Human adenovirus C
cagcccgugggcu

SEQ ID NO: 1551709 - RNA, 22 nt, Human adenovirus C
gggcgccgagcuguugcccgug

SEQ ID NO: 1551710 - RNA, 18 nt, Human adenovirus C
uggcgguggcacccgcgc

SEQ ID NO: 1551711 - RNA, 21 nt, Human adenovirus C
aacgaagccuuccauccagac

SEQ ID NO: 1551712 - RNA, 20 nt, Human adenovirus C
augcgagccgaucgggaaga

SEQ ID NO: 1551713 - RNA, 13 nt, Human adenovirus C
uccaagagcuucu

SEQ ID NO: 1551714 - RNA, 22 nt, Human adenovirus C
gacugaaugaccaguggagagg

SEQ ID NO: 1551715 - RNA, 13 nt, Human adenovirus C
cagccccccggcg

SEQ ID NO: 1551716 - RNA, 15 nt, Human adenovirus C
ccgacccggcacugc

SEQ ID NO: 1551717 - RNA, 15 nt, Human adenovirus C
gcaccggcggcagcg

SEQ ID NO: 1551718 - RNA, 15 nt, Human adenovirus C
cagacaugcagggca

SEQ ID NO: 1551719 - RNA, 13 nt, Human adenovirus C
uaaguuugccaca

SEQ ID NO: 1551720 - RNA, 17 nt, Human adenovirus C
accguggagccugggcu

SEQ ID NO: 1551721 - RNA, 24 nt, Human adenovirus C
cguggcccuuggcgcgcagcuugc

SEQ ID NO: 1551722 - RNA, 16 nt, Human adenovirus C
ccucuuugagcccuuu

SEQ ID NO: 1551723 - RNA, 17 nt, Human adenovirus C
uaccgugaaugcccucc

SEQ ID NO: 1551724 - RNA, 20 nt, Human adenovirus C
acuaaacuuugauaauacug

SEQ ID NO: 1551725 - RNA, 15 nt, Human adenovirus C
cugugcugccagggc

SEQ ID NO: 1551726 - RNA, 11 nt, Human adenovirus C
cuacaagcgcg

SEQ ID NO: 1551727 - RNA, 15 nt, Human adenovirus C
cacugcuaccggacu

SEQ ID NO: 1551728 - RNA, 15 nt, Human adenovirus C
ccaaaagcagggcuu

SEQ ID NO: 1551729 - RNA, 13 nt, Human adenovirus C
agguacugaaaug

SEQ ID NO: 1551730 - RNA, 20 nt, Human adenovirus C
ggccgcucgaaggcuggccg

SEQ ID NO: 1551731 - RNA, 18 nt, Human adenovirus C
caggguauaacucaccug

SEQ ID NO: 1551732 - RNA, 19 nt, Human adenovirus C
auggaucuuaugccaggcc

SEQ ID NO: 1551733 - RNA, 14 nt, Human adenovirus C
gugagcgcuccacc

SEQ ID NO: 1551734 - RNA, 18 nt, Human adenovirus C
auuuuaaaaaaacuacaa

SEQ ID NO: 1551735 - RNA, 15 nt, Human adenovirus C
uaaaagagguaucuu

SEQ ID NO: 1551736 - RNA, 12 nt, Human adenovirus C
gcgagggccugg

SEQ ID NO: 1551737 - RNA, 15 nt, Human adenovirus C
ggugucauaguccag

SEQ ID NO: 1551738 - RNA, 14 nt, Human adenovirus C
gcccucuccugagc

SEQ ID NO: 1551739 - RNA, 21 nt, Human adenovirus C
cuggagaucuuucauccauga

SEQ ID NO: 1551740 - RNA, 14 nt, Human adenovirus C
aagagaugcuccag

SEQ ID NO: 1551741 - RNA, 16 nt, Human adenovirus C
ggcagcggugcacggg

SEQ ID NO: 1551742 - RNA, 14 nt, Human adenovirus C
cgagcgguguuccg

SEQ ID NO: 1551743 - RNA, 16 nt, Human adenovirus C
cucccacccccacuga

SEQ ID NO: 1551744 - RNA, 19 nt, Human adenovirus C
agcuuauuauucgccacaa

SEQ ID NO: 1551745 - RNA, 12 nt, Human adenovirus C
cagggugcgcca

SEQ ID NO: 1551746 - RNA, 22 nt, Human adenovirus C
acggccuucaacgagcgcuccg

SEQ ID NO: 1551747 - RNA, 13 nt, Human adenovirus C
cuccacaggcugc

SEQ ID NO: 1551748 - RNA, 20 nt, Human adenovirus C
aagcgcgcuggagcaaaacc

SEQ ID NO: 1551749 - RNA, 19 nt, Human adenovirus C
ccccgcugacacccagcag

SEQ ID NO: 1551750 - RNA, 13 nt, Human adenovirus C
ccucagcgccucc

SEQ ID NO: 1551751 - RNA, 20 nt, Human adenovirus C
caguaugauuaaaugagaca

SEQ ID NO: 1551752 - RNA, 13 nt, Human adenovirus C
cagucugcaagau

SEQ ID NO: 1551753 - RNA, 22 nt, Human adenovirus C
cgaggaccugcuugagcaggcc

SEQ ID NO: 1551754 - RNA, 15 nt, Human adenovirus C
guccagacgggccag

SEQ ID NO: 1551755 - RNA, 24 nt, Human adenovirus C
gccagcaccugucgucagcgccau

SEQ ID NO: 1551756 - RNA, 19 nt, Human adenovirus C
cugguguuuagugcuccac

SEQ ID NO: 1551757 - RNA, 14 nt, Human adenovirus C
ugccuaaccuucua

SEQ ID NO: 1551758 - RNA, 19 nt, Human adenovirus C
acuuugcuuuccugagccc

SEQ ID NO: 1551759 - RNA, 12 nt, Human adenovirus C
ggcaggagcaga

SEQ ID NO: 1551760 - RNA, 16 nt, Human adenovirus C
agauguuuggcggggc

SEQ ID NO: 1551761 - RNA, 13 nt, Human adenovirus C
uacgaugaccugg

SEQ ID NO: 1551762 - RNA, 16 nt, Human adenovirus C
agcaccugucgucagc

SEQ ID NO: 1551763 - RNA, 23 nt, Human adenovirus C
caggcggcggcggcggcaggagc

SEQ ID NO: 1551764 - RNA, 22 nt, Human adenovirus C
agcggcggcagcagcaggagga

SEQ ID NO: 1551765 - RNA, 15 nt, Human adenovirus C
gccccaggcugggga

SEQ ID NO: 1551766 - RNA, 16 nt, Human adenovirus C
cuagccgugcugaaac

SEQ ID NO: 1551767 - RNA, 22 nt, Human adenovirus C
uaaagcccgugacacugcagca

SEQ ID NO: 1551768 - RNA, 16 nt, Human adenovirus C
gugggcucguggugcu

SEQ ID NO: 1551769 - RNA, 16 nt, Human adenovirus C
agcccuaucagcagcc

SEQ ID NO: 1551770 - RNA, 19 nt, Human adenovirus C
ugagcagcuggcgcgcugg

SEQ ID NO: 1551771 - RNA, 23 nt, Human adenovirus C
uucgcccugcgcgucggccaggu

SEQ ID NO: 1551772 - RNA, 12 nt, Human adenovirus C
aagcagggcuuc

SEQ ID NO: 1551773 - RNA, 12 nt, Human adenovirus C
ggcagcgggugg

SEQ ID NO: 1551774 - RNA, 15 nt, Human adenovirus C
aagcaggccaaacuu

SEQ ID NO: 1551775 - RNA, 15 nt, Human adenovirus C
cgagaaggaggacag

SEQ ID NO: 1551776 - RNA, 14 nt, Human adenovirus C
aggcaggacccugg

SEQ ID NO: 1551777 - RNA, 19 nt, Human adenovirus C
cgcacugggcgcaccaccg

SEQ ID NO: 1551778 - RNA, 14 nt, Human adenovirus C
ugagccccgggcug

SEQ ID NO: 1551779 - RNA, 22 nt, Human adenovirus C
acagucuuccaaggugaaaauc

SEQ ID NO: 1551780 - RNA, 17 nt, Human adenovirus C
cuucaaccccuuuucug

SEQ ID NO: 1551781 - RNA, 20 nt, Human adenovirus C
ccgugugcaccagccgcacc

SEQ ID NO: 1551782 - RNA, 21 nt, Human adenovirus C
ggcggguacaguggaaagguc

SEQ ID NO: 1551783 - RNA, 13 nt, Human adenovirus C
gcccaggcggcgg

SEQ ID NO: 1551784 - RNA, 21 nt, Human adenovirus C
gccacaacauaaaagaagcaa

SEQ ID NO: 1551785 - RNA, 17 nt, Human adenovirus C
gcuuaacaguccccagg

SEQ ID NO: 1551786 - RNA, 22 nt, Human adenovirus C
cagcuggggccggaccugggcu

SEQ ID NO: 1551787 - RNA, 21 nt, Human adenovirus C
auuaaccuuggggcgcgcugg

SEQ ID NO: 1551788 - RNA, 21 nt, Human adenovirus C
guuucgcgcugcuccucuucc

SEQ ID NO: 1551789 - RNA, 17 nt, Human adenovirus C
accccaaguucaugccu

SEQ ID NO: 1551790 - RNA, 14 nt, Human adenovirus C
gacccggcugcgag

SEQ ID NO: 1551791 - RNA, 16 nt, Human adenovirus C
gcuugaucugcuggcg

SEQ ID NO: 1551792 - RNA, 13 nt, Human adenovirus C
gccuuugccaacu

SEQ ID NO: 1551793 - RNA, 18 nt, Human adenovirus C
gcgcucguugguccagca

SEQ ID NO: 1551794 - RNA, 12 nt, Human adenovirus C
cggacaggccgc

SEQ ID NO: 1551795 - RNA, 18 nt, Human adenovirus C
ggcacugccuguucgccg

SEQ ID NO: 1551796 - RNA, 14 nt, Human adenovirus C
gcuaccaccccagc

SEQ ID NO: 1551797 - RNA, 14 nt, Human adenovirus C
ccaugcgcgaggga

SEQ ID NO: 1551798 - RNA, 17 nt, Human adenovirus C
ggccaucauaccacaag

SEQ ID NO: 1551799 - RNA, 16 nt, Human adenovirus C
gggacgcucuggccgg

SEQ ID NO: 1551800 - RNA, 16 nt, Human adenovirus C
uccagacgggccaggg

SEQ ID NO: 1551801 - RNA, 21 nt, Human adenovirus C
aauaauuuucaucucgccacc

SEQ ID NO: 1551802 - RNA, 16 nt, Human adenovirus C
ccuacuuccgcagcca

SEQ ID NO: 1551803 - RNA, 18 nt, Human adenovirus C
ggcggucccacagcucgg

SEQ ID NO: 1551804 - RNA, 14 nt, Human adenovirus C
ccuccgcccugcgc

SEQ ID NO: 1551805 - RNA, 15 nt, Human adenovirus C
cguggagccugggcu

SEQ ID NO: 1551806 - RNA, 22 nt, Human adenovirus C
cucaucagugauauuaauaaac

SEQ ID NO: 1551807 - RNA, 20 nt, Human adenovirus C
gaaacucggaccacucugag

SEQ ID NO: 1551808 - RNA, 19 nt, Human adenovirus C
gaacccuaguauucaaccu

SEQ ID NO: 1551809 - RNA, 11 nt, Human adenovirus C
gguuccagaug

SEQ ID NO: 1551810 - RNA, 13 nt, Human adenovirus C
gcgcccuggggcg

SEQ ID NO: 1551811 - RNA, 19 nt, Human adenovirus C
gccgugcgcccgcuuucca

SEQ ID NO: 1551812 - RNA, 13 nt, Human adenovirus C
gaugugcccggcc

SEQ ID NO: 1551813 - RNA, 11 nt, Human adenovirus C
ugggcgcacca

SEQ ID NO: 1551814 - RNA, 13 nt, Human adenovirus C
gcccgugcuggcc

SEQ ID NO: 1551815 - RNA, 23 nt, Human adenovirus C
ugcgauacacaggguugcagcac

SEQ ID NO: 1551816 - RNA, 16 nt, Human adenovirus C
guaaaccugagccagg

SEQ ID NO: 1551817 - RNA, 14 nt, Human adenovirus C
guugaaagagcaaa

SEQ ID NO: 1551818 - RNA, 17 nt, Human adenovirus C
gugggucugggggugca

SEQ ID NO: 1551819 - RNA, 15 nt, Human adenovirus C
ucgccccaggcuggg

SEQ ID NO: 1551820 - RNA, 15 nt, Human adenovirus C
acgugccgcggcaga

SEQ ID NO: 1551821 - RNA, 16 nt, Human adenovirus C
gucgcuguccagcugc

SEQ ID NO: 1551822 - RNA, 23 nt, Human adenovirus C
auuugucuuuacgccaccuucuu

SEQ ID NO: 1551823 - RNA, 17 nt, Human adenovirus C
aagcagguuccugagca

SEQ ID NO: 1551824 - RNA, 18 nt, Human adenovirus C
ggcagcaacagcagcggu

SEQ ID NO: 1551825 - RNA, 23 nt, Human adenovirus C
accagacauuacucccauuuuuc

SEQ ID NO: 1551826 - RNA, 21 nt, Human adenovirus C
acaaggccggaaaccucaccu

SEQ ID NO: 1551827 - RNA, 22 nt, Human adenovirus C
ucccguagaggagccuccaccg

SEQ ID NO: 1551828 - RNA, 14 nt, Human adenovirus C
cauccggugcugcg

SEQ ID NO: 1551829 - RNA, 13 nt, Human adenovirus C
caguaacugcagc

SEQ ID NO: 1551830 - RNA, 13 nt, Human adenovirus C
caccuacagccug

SEQ ID NO: 1551831 - RNA, 15 nt, Human adenovirus C
gcagguacgccugca

SEQ ID NO: 1551832 - RNA, 16 nt, Human adenovirus C
ggccguggagacagug

SEQ ID NO: 1551833 - RNA, 13 nt, Human adenovirus C
aaaccaugcuaug

SEQ ID NO: 1551834 - RNA, 15 nt, Human adenovirus C
guaugcgcaggagca

SEQ ID NO: 1551835 - RNA, 21 nt, Human adenovirus C
gacugcuacauuaaccuuggg

SEQ ID NO: 1551836 - RNA, 13 nt, Human adenovirus C
acacagcccgcca

SEQ ID NO: 1551837 - RNA, 13 nt, Human adenovirus C
gccggccacggcc

SEQ ID NO: 1551838 - RNA, 14 nt, Human adenovirus C
gaccugcgcugggc

SEQ ID NO: 1551839 - RNA, 19 nt, Human adenovirus C
cugacacccagcagaaacc

SEQ ID NO: 1551840 - RNA, 12 nt, Human adenovirus C
cuugaggaggag

SEQ ID NO: 1551841 - RNA, 21 nt, Human adenovirus C
accuccuccuccugccaggcu

SEQ ID NO: 1551842 - RNA, 17 nt, Human adenovirus C
ccgcgcccaggcggcgg

SEQ ID NO: 1551843 - RNA, 13 nt, Human adenovirus C
ggagcgcaggguu

SEQ ID NO: 1551844 - RNA, 14 nt, Human adenovirus C
cgucgcaaccagga

SEQ ID NO: 1551845 - RNA, 11 nt, Human adenovirus C
gggccagcaca

SEQ ID NO: 1551846 - RNA, 15 nt, Human adenovirus C
gcuggguucccccuu

SEQ ID NO: 1551847 - RNA, 18 nt, Human adenovirus C
cuuaccccuccauuuguu

SEQ ID NO: 1551848 - RNA, 15 nt, Human adenovirus C
ggggcauggccggcc

SEQ ID NO: 1551849 - RNA, 16 nt, Human adenovirus C
uacaugagcaaacagu

SEQ ID NO: 1551850 - RNA, 13 nt, Human adenovirus C
cuggagaucuccg

SEQ ID NO: 1551851 - RNA, 21 nt, Human adenovirus C
acccagcagaaaccugugcug

SEQ ID NO: 1551852 - RNA, 14 nt, Human adenovirus C
ccaggcggucccac

SEQ ID NO: 1551853 - RNA, 18 nt, Human adenovirus C
uucagagaagaacaugcc

SEQ ID NO: 1551854 - RNA, 22 nt, Human adenovirus C
gagcagacggugaaccaggaga

SEQ ID NO: 1551855 - RNA, 15 nt, Human adenovirus C
cuacuccggcacugc

SEQ ID NO: 1551856 - RNA, 21 nt, Human adenovirus C
acuggaacaaugacaguggag

SEQ ID NO: 1551857 - RNA, 22 nt, Human adenovirus C
ggauuugucacccuuauccuca

SEQ ID NO: 1551858 - RNA, 16 nt, Human adenovirus C
gcgcagaugggagcug

SEQ ID NO: 1551859 - RNA, 21 nt, Human adenovirus C
accuacgacuacaugaacaag

SEQ ID NO: 1551860 - RNA, 23 nt, Human adenovirus C
ugagcccgacgcgcggaccggga

SEQ ID NO: 1551861 - RNA, 22 nt, Human adenovirus C
cgacacccaagggugcagcuga

SEQ ID NO: 1551862 - RNA, 15 nt, Human adenovirus C
aggcaguagcuugaa

SEQ ID NO: 1551863 - RNA, 20 nt, Human adenovirus C
aaccugagccaggcuuucaa

SEQ ID NO: 1551864 - RNA, 19 nt, Human adenovirus C
cgcgccuaccaccuucccc

SEQ ID NO: 1551865 - RNA, 17 nt, Human adenovirus C
uuaagcccuacuccggc

SEQ ID NO: 1551866 - RNA, 12 nt, Human adenovirus C
uaucacaucuuu

SEQ ID NO: 1551867 - RNA, 14 nt, Human adenovirus C
acaugaccaaggac

SEQ ID NO: 1551868 - RNA, 13 nt, Human adenovirus C
ccagcuuauucag

SEQ ID NO: 1551869 - RNA, 12 nt, Human adenovirus C
cugagcagcugc

SEQ ID NO: 1551870 - RNA, 13 nt, Human adenovirus C
ccguguauccaua

SEQ ID NO: 1551871 - RNA, 18 nt, Human adenovirus C
cacaacuuccucaaaucu

SEQ ID NO: 1551872 - RNA, 16 nt, Human adenovirus C
agaugagguacaugau

SEQ ID NO: 1551873 - RNA, 23 nt, Human adenovirus C
uaaacguagaggggcucucugag

SEQ ID NO: 1551874 - RNA, 20 nt, Human adenovirus C
cucgccuucgaucucagcgc

SEQ ID NO: 1551875 - RNA, 16 nt, Human adenovirus C
gcacucacagaccugg

SEQ ID NO: 1551876 - RNA, 19 nt, Human adenovirus C
gugaagacgacgggcccgg

SEQ ID NO: 1551877 - RNA, 23 nt, Human adenovirus C
ugagcgcgcgcagcagcagggca

SEQ ID NO: 1551878 - RNA, 22 nt, Human adenovirus C
cgacaggucaggcgggagcucc

SEQ ID NO: 1551879 - RNA, 21 nt, Human adenovirus C
ugcuuaacaguccccagguac

SEQ ID NO: 1551880 - RNA, 23 nt, Human adenovirus C
ggccuugcggcagggcgcuguca

SEQ ID NO: 1551881 - RNA, 20 nt, Human adenovirus C
ugaaucuccucuauaaacau

SEQ ID NO: 1551882 - RNA, 21 nt, Human adenovirus C
cgagaccgugucuggaacgcc

SEQ ID NO: 1551883 - RNA, 23 nt, Human adenovirus C
uccacgguaaagaccccgggcag

SEQ ID NO: 1551884 - RNA, 23 nt, Human adenovirus C
aggagcgcaaccuaaaggagcug

SEQ ID NO: 1551885 - RNA, 17 nt, Human adenovirus C
cugggacagucaggcag

SEQ ID NO: 1551886 - RNA, 16 nt, Human adenovirus C
cagccgcaggccaacc

SEQ ID NO: 1551887 - RNA, 13 nt, Human adenovirus C
aucaaucagccuc

SEQ ID NO: 1551888 - RNA, 17 nt, Human adenovirus C
ucagauacccaccacca

SEQ ID NO: 1551889 - RNA, 16 nt, Human adenovirus C
gcgcagcggcaaaaag

SEQ ID NO: 1551890 - RNA, 15 nt, Human adenovirus C
acauucaggugcccc

SEQ ID NO: 1551891 - RNA, 20 nt, Human adenovirus C
guguaggccacgugaccggg

SEQ ID NO: 1551892 - RNA, 13 nt, Human adenovirus C
agagcccgagggc

SEQ ID NO: 1551893 - RNA, 16 nt, Human adenovirus C
cgcuucacuggacucu

SEQ ID NO: 1551894 - RNA, 22 nt, Human adenovirus C
uaccuguguggaagccuggacc

SEQ ID NO: 1551895 - RNA, 13 nt, Human adenovirus C
cuccugccaggcu

SEQ ID NO: 1551896 - RNA, 15 nt, Human adenovirus C
caggugcacgcgcca

SEQ ID NO: 1551897 - RNA, 20 nt, Human adenovirus C
gaugccggcggcgguggugg

SEQ ID NO: 1551898 - RNA, 21 nt, Human adenovirus C
aguucgccaccaccgccucca

SEQ ID NO: 1551899 - RNA, 13 nt, Human adenovirus C
gcgcccgcccacc

SEQ ID NO: 1551900 - RNA, 22 nt, Human adenovirus C
ccagcggccacacccggcgcca

SEQ ID NO: 1551901 - RNA, 16 nt, Human adenovirus C
aaagcuuccgcaggcc

SEQ ID NO: 1551902 - RNA, 23 nt, Human adenovirus C
aguguaaaaagggccaaguacag

SEQ ID NO: 1551903 - RNA, 13 nt, Human adenovirus C
cuaaaccagcugg

SEQ ID NO: 1551904 - RNA, 23 nt, Human adenovirus C
ucagggcgcgggcuagguccagg

SEQ ID NO: 1551905 - RNA, 13 nt, Human adenovirus C
ggcgauggagcgc

SEQ ID NO: 1551906 - RNA, 14 nt, Human adenovirus C
cacaguggacgcgg

SEQ ID NO: 1551907 - RNA, 16 nt, Human adenovirus C
cccgcgccugcugggc

SEQ ID NO: 1551908 - RNA, 18 nt, Human adenovirus C
cggccugguaggcgcagc

SEQ ID NO: 1551909 - RNA, 23 nt, Human adenovirus C
guuggagaugcgggccaugagcu

SEQ ID NO: 1551910 - RNA, 18 nt, Human adenovirus C
ccgagagccggccuggac

SEQ ID NO: 1551911 - RNA, 14 nt, Human adenovirus C
accugugcugccag

SEQ ID NO: 1551912 - RNA, 13 nt, Human adenovirus C
guuugugccuccg

SEQ ID NO: 1551913 - RNA, 19 nt, Human adenovirus C
cgcucguugguccagcaga

SEQ ID NO: 1551914 - RNA, 14 nt, Human adenovirus C
ccuccgcacccacu

SEQ ID NO: 1551915 - RNA, 17 nt, Human adenovirus C
agcgguuaagcugggau

SEQ ID NO: 1551916 - RNA, 16 nt, Human adenovirus C
gcagacgacagcagcg

SEQ ID NO: 1551917 - RNA, 14 nt, Human adenovirus C
cugggaagaaagca

SEQ ID NO: 1551918 - RNA, 19 nt, Human adenovirus C
gagcccgaggagaugcggg

SEQ ID NO: 1551919 - RNA, 19 nt, Human adenovirus C
cgagauuagguucuacgaa

SEQ ID NO: 1551920 - RNA, 18 nt, Human adenovirus C
aggcgcaaggcggcgucc

SEQ ID NO: 1551921 - RNA, 17 nt, Human adenovirus C
gcgguucacccuggcug

SEQ ID NO: 1551922 - RNA, 13 nt, Human adenovirus C
uuacugcugcugg

SEQ ID NO: 1551923 - RNA, 23 nt, Human adenovirus C
ccaggaaguacggcaccgccagc

SEQ ID NO: 1551924 - RNA, 23 nt, Human adenovirus C
gcuaccucuccgcguaggcgcuc

SEQ ID NO: 1551925 - RNA, 18 nt, Human adenovirus C
gccggacugcggcgaacg

SEQ ID NO: 1551926 - RNA, 19 nt, Human adenovirus C
gcugccgucaucccugagc

SEQ ID NO: 1551927 - RNA, 21 nt, Human adenovirus C
cugcagccuccgccgccgcuu

SEQ ID NO: 1551928 - RNA, 17 nt, Human adenovirus C
gacacagaaaccgggcc

SEQ ID NO: 1551929 - RNA, 20 nt, Human adenovirus C
cuacgugcccuuucacauuc

SEQ ID NO: 1551930 - RNA, 22 nt, Human adenovirus C
gacgcggaggcucucuucagca

SEQ ID NO: 1551931 - RNA, 17 nt, Human adenovirus C
cggcagaaacagagggc

SEQ ID NO: 1551932 - RNA, 13 nt, Human adenovirus C
ccuaccaccuucc

SEQ ID NO: 1551933 - RNA, 19 nt, Human adenovirus C
aagaaacccaucugagcgg

SEQ ID NO: 1551934 - RNA, 21 nt, Human adenovirus C
ggugacgcgggcgggcccccg

SEQ ID NO: 1551935 - RNA, 14 nt, Human adenovirus C
auguuacauuuaaa

SEQ ID NO: 1551936 - RNA, 18 nt, Human adenovirus C
ucccaugaaaccaugcua

SEQ ID NO: 1551937 - RNA, 11 nt, Human adenovirus C
ggcggcagcag

SEQ ID NO: 1551938 - RNA, 16 nt, Human adenovirus C
ggccggacaggccgcg

SEQ ID NO: 1551939 - RNA, 15 nt, Human adenovirus C
gauacgucacuuccc

SEQ ID NO: 1551940 - RNA, 17 nt, Human adenovirus C
cugcgcgucggccaggu

SEQ ID NO: 1551941 - RNA, 19 nt, Human adenovirus C
acggccugguaggcgcagc

SEQ ID NO: 1551942 - RNA, 18 nt, Human adenovirus C
uggcggaggugcugcuga

SEQ ID NO: 1551943 - RNA, 20 nt, Human adenovirus C
guuaacaugguucugcagag

SEQ ID NO: 1551944 - RNA, 13 nt, Human adenovirus C
uauaacagaggcc

SEQ ID NO: 1551945 - RNA, 22 nt, Human adenovirus C
acauauuuccugcagauucacu

SEQ ID NO: 1551946 - RNA, 21 nt, Human adenovirus C
cacagccugcaaagggcccug

SEQ ID NO: 1551947 - RNA, 22 nt, Human adenovirus C
uugcugcgcccacaccuacagc

SEQ ID NO: 1551948 - RNA, 12 nt, Human adenovirus C
ccuuccaggcgc

SEQ ID NO: 1551949 - RNA, 16 nt, Human adenovirus C
cagacaaugcagaaac

SEQ ID NO: 1551950 - RNA, 18 nt, Human adenovirus C
ggcccgcugcccuggugu

SEQ ID NO: 1551951 - RNA, 23 nt, Human adenovirus C
uucagauacccaccaccaguagc

SEQ ID NO: 1551952 - RNA, 22 nt, Human adenovirus C
guguagacacuuaagcucgccu

SEQ ID NO: 1551953 - RNA, 14 nt, Human adenovirus C
acaagcgcagguag

SEQ ID NO: 1551954 - RNA, 14 nt, Human adenovirus C
cagcccuaucagca

SEQ ID NO: 1551955 - RNA, 15 nt, Human adenovirus C
agcggcauaaggaca

SEQ ID NO: 1551956 - RNA, 16 nt, Human adenovirus C
aagauggcaugugagu

SEQ ID NO: 1551957 - RNA, 20 nt, Human adenovirus C
cuaccgcgucaggaggggca

SEQ ID NO: 1551958 - RNA, 14 nt, Human adenovirus C
ugccagacaagcua

SEQ ID NO: 1551959 - RNA, 22 nt, Human adenovirus C
ugacagcgacacccuuacugua

SEQ ID NO: 1551960 - RNA, 18 nt, Human adenovirus C
aacgcagcaucgagguca

SEQ ID NO: 1551961 - RNA, 15 nt, Human adenovirus C
ucaaaaucccacagu

SEQ ID NO: 1551962 - RNA, 12 nt, Human adenovirus C
gccucagccgcu

SEQ ID NO: 1551963 - RNA, 20 nt, Human adenovirus C
uccaggcuuuguuucuccac

SEQ ID NO: 1551964 - RNA, 17 nt, Human adenovirus C
cagaugcugagggacaa

SEQ ID NO: 1551965 - RNA, 20 nt, Human adenovirus C
guccggcucaccacccaggu

SEQ ID NO: 1551966 - RNA, 19 nt, Human adenovirus C
gaacgcggguuuggcaggg

SEQ ID NO: 1551967 - RNA, 23 nt, Human adenovirus C
cagcugaccacuuacuggcugca

SEQ ID NO: 1551968 - RNA, 20 nt, Human adenovirus C
acaucauuuugcugccagga

SEQ ID NO: 1551969 - RNA, 22 nt, Human adenovirus C
agugcuuaaaaaaacaacuccc

SEQ ID NO: 1551970 - RNA, 17 nt, Human adenovirus C
ccguuuuuacccaccca

SEQ ID NO: 1551971 - RNA, 24 nt, Human adenovirus C
cccagaugcauccggugcugcggc

SEQ ID NO: 1551972 - RNA, 14 nt, Human adenovirus C
uuauaaaaugcacc

SEQ ID NO: 1551973 - RNA, 12 nt, Human adenovirus C
uucugcugugcg

SEQ ID NO: 1551974 - RNA, 14 nt, Human adenovirus C
ucccacggcaugcu

SEQ ID NO: 1551975 - RNA, 14 nt, Human adenovirus C
uccguccugcagga

SEQ ID NO: 1551976 - RNA, 17 nt, Human adenovirus C
caucgcgcaacugggca

SEQ ID NO: 1551977 - RNA, 16 nt, Human adenovirus C
ggcaucucgauccagc

SEQ ID NO: 1551978 - RNA, 18 nt, Human adenovirus C
guauacgcagauccuucc

SEQ ID NO: 1551979 - RNA, 16 nt, Human adenovirus C
ugggcguguggcagca

SEQ ID NO: 1551980 - RNA, 19 nt, Human adenovirus C
acgcucaagggcgaggcgc

SEQ ID NO: 1551981 - RNA, 13 nt, Human adenovirus C
cgcuggggcagga

SEQ ID NO: 1551982 - RNA, 15 nt, Human adenovirus C
gccaccuucuucccc

SEQ ID NO: 1551983 - RNA, 12 nt, Human adenovirus C
gcgagggccagc

SEQ ID NO: 1551984 - RNA, 13 nt, Human adenovirus C
cacaagcucgccu

SEQ ID NO: 1551985 - RNA, 13 nt, Human adenovirus C
gcaaugacagcac

SEQ ID NO: 1551986 - RNA, 14 nt, Human adenovirus C
ugggaaacggccgc

SEQ ID NO: 1551987 - RNA, 16 nt, Human adenovirus C
ugcccgcggcuccggu

SEQ ID NO: 1551988 - RNA, 14 nt, Human adenovirus C
ggcacuuaggccag

SEQ ID NO: 1551989 - RNA, 19 nt, Human adenovirus C
ccucaggcgccgccggcac

SEQ ID NO: 1551990 - RNA, 17 nt, Human adenovirus C
ccagcggccacacccgg

SEQ ID NO: 1551991 - RNA, 19 nt, Human adenovirus C
acgugcgccaggccugcaa

SEQ ID NO: 1551992 - RNA, 17 nt, Human adenovirus C
aaagcaggggccaagaa

SEQ ID NO: 1551993 - RNA, 23 nt, Human adenovirus C
uuccaugagccgguguccacgcu

SEQ ID NO: 1551994 - RNA, 18 nt, Human adenovirus C
gccgcucauggcgcagcu

SEQ ID NO: 1551995 - RNA, 18 nt, Human adenovirus C
cugcagauucacucaaau

SEQ ID NO: 1551996 - RNA, 18 nt, Human adenovirus C
acaaggccugcagaccgu

SEQ ID NO: 1551997 - RNA, 11 nt, Human adenovirus C
gauacgucacu

SEQ ID NO: 1551998 - RNA, 18 nt, Human adenovirus C
aacuggccccaaacuccc

SEQ ID NO: 1551999 - RNA, 20 nt, Human adenovirus C
cacucgcccuacuuccgcag

SEQ ID NO: 1552000 - RNA, 23 nt, Human adenovirus C
cagcagcgcgcgaauaaacugcu

SEQ ID NO: 1552001 - RNA, 19 nt, Human adenovirus C
gcauugcguaccucaggca

SEQ ID NO: 1552002 - RNA, 18 nt, Human adenovirus C
ucagcagcggcaagagca

SEQ ID NO: 1552003 - RNA, 15 nt, Human adenovirus C
cuguuuugcagcagc

SEQ ID NO: 1552004 - RNA, 20 nt, Human adenovirus C
cgugcuguugaagcaucugc

SEQ ID NO: 1552005 - RNA, 23 nt, Human adenovirus C
ggcggcagcggcagcggcagcaa

SEQ ID NO: 1552006 - RNA, 15 nt, Human adenovirus C
gcggcagcggcagca

SEQ ID NO: 1552007 - RNA, 14 nt, Human adenovirus C
cgcguuccggcagc

SEQ ID NO: 1552008 - RNA, 21 nt, Human adenovirus C
cguggccuugcaggcgcagag

SEQ ID NO: 1552009 - RNA, 18 nt, Human adenovirus C
cccgccgggagagggggc

SEQ ID NO: 1552010 - RNA, 21 nt, Human adenovirus C
caggcacaaccauccgcggca

SEQ ID NO: 1552011 - RNA, 16 nt, Human adenovirus C
cuaacgaugcaucuca

SEQ ID NO: 1552012 - RNA, 17 nt, Human adenovirus C
cacccaccgugcagcug

SEQ ID NO: 1552013 - RNA, 14 nt, Human adenovirus C
ugccgugccagagg

SEQ ID NO: 1552014 - RNA, 15 nt, Human adenovirus C
aagcucgccugcgcc

SEQ ID NO: 1552015 - RNA, 13 nt, Human adenovirus C
guccagcagaggc

SEQ ID NO: 1552016 - RNA, 14 nt, Human adenovirus C
cuaugcgccacugg

SEQ ID NO: 1552017 - RNA, 13 nt, Human adenovirus C
gcauuccacgagc

SEQ ID NO: 1552018 - RNA, 22 nt, Human adenovirus C
cccaggcaaaguuagucugcag

SEQ ID NO: 1552019 - RNA, 13 nt, Human adenovirus C
gaugaccuggagg

SEQ ID NO: 1552020 - RNA, 14 nt, Human adenovirus C
gcaugaagggcacg

SEQ ID NO: 1552021 - RNA, 21 nt, Human adenovirus C
ccgaacagcgccuacuagaaa

SEQ ID NO: 1552022 - RNA, 21 nt, Human adenovirus C
guauguauccagcggcggcgg

SEQ ID NO: 1552023 - RNA, 14 nt, Human adenovirus C
ugcuccucuucccg

SEQ ID NO: 1552024 - RNA, 21 nt, Human adenovirus C
aaaaugaugacaaacuuaccc

SEQ ID NO: 1552025 - RNA, 22 nt, Human adenovirus C
cugccgucaucccugagcaggg

SEQ ID NO: 1552026 - RNA, 13 nt, Human adenovirus C
cccagcgccaaaa

SEQ ID NO: 1552027 - RNA, 17 nt, Human adenovirus C
cggcggucggagcuuga

SEQ ID NO: 1552028 - RNA, 12 nt, Human adenovirus C
cguggcgcagcg

SEQ ID NO: 1552029 - RNA, 15 nt, Human adenovirus C
cugcagcgccagugc

SEQ ID NO: 1552030 - RNA, 22 nt, Human adenovirus C
ggcaccagcucaaucagucaca

SEQ ID NO: 1552031 - RNA, 20 nt, Human adenovirus C
uauugaucaccguaccuuaa

SEQ ID NO: 1552032 - RNA, 23 nt, Human adenovirus C
gucgugcgcaccaccggcggcgg

SEQ ID NO: 1552033 - RNA, 13 nt, Human adenovirus C
ccccgcggcgccg

SEQ ID NO: 1552034 - RNA, 21 nt, Human adenovirus C
gcggcaagagcaagagcagcg

SEQ ID NO: 1552035 - RNA, 18 nt, Human adenovirus C
ccgagcuguugcccgugc

SEQ ID NO: 1552036 - RNA, 20 nt, Human adenovirus C
cagacuauuuuuuccagacc

SEQ ID NO: 1552037 - RNA, 21 nt, Human adenovirus C
ccagacaagcuaaaauacaac

SEQ ID NO: 1552038 - RNA, 18 nt, Human adenovirus C
uggccguagguggcgccc

SEQ ID NO: 1552039 - RNA, 15 nt, Human adenovirus C
caacucgcugcugca

SEQ ID NO: 1552040 - RNA, 13 nt, Human adenovirus C
ccacccagcgcca

SEQ ID NO: 1552041 - RNA, 20 nt, Human adenovirus C
cagccgccuuuuagcugcaa

SEQ ID NO: 1552042 - RNA, 15 nt, Human adenovirus C
cgggccaugagcugc

SEQ ID NO: 1552043 - RNA, 13 nt, Human adenovirus C
cuacaugagcgcg

SEQ ID NO: 1552044 - RNA, 17 nt, Human adenovirus C
cugcgagagcucggugu

SEQ ID NO: 1552045 - RNA, 22 nt, Human adenovirus C
gaagugauuaucgagcaggacc

SEQ ID NO: 1552046 - RNA, 13 nt, Human adenovirus C
gucgccgccagag

SEQ ID NO: 1552047 - RNA, 23 nt, Human adenovirus C
gugccuuuuacugcugcuggaag

SEQ ID NO: 1552048 - RNA, 16 nt, Human adenovirus C
aagacugugggggcaa

SEQ ID NO: 1552049 - RNA, 22 nt, Human adenovirus C
ugcgccagcagguuucugcccu

SEQ ID NO: 1552050 - RNA, 13 nt, Human adenovirus C
cuggcagggacac

SEQ ID NO: 1552051 - RNA, 19 nt, Human adenovirus C
gcuauggaucuuaugccag

SEQ ID NO: 1552052 - RNA, 13 nt, Human adenovirus C
agccgcgcgcugg

SEQ ID NO: 1552053 - RNA, 23 nt, Human adenovirus C
gucugaagacaccuucaaccccg

SEQ ID NO: 1552054 - RNA, 10 nt, Human adenovirus C
acugcugcug

SEQ ID NO: 1552055 - RNA, 16 nt, Human adenovirus C
ccucaucggcugaagc

SEQ ID NO: 1552056 - RNA, 18 nt, Human adenovirus C
acaagaaguugaagacau

SEQ ID NO: 1552057 - RNA, 19 nt, Human adenovirus C
cagcccgugcuggccccga

SEQ ID NO: 1552058 - RNA, 16 nt, Human adenovirus C
ccucacccgcagcugc

SEQ ID NO: 1552059 - RNA, 17 nt, Human adenovirus C
augcuucuaaauagcua

SEQ ID NO: 1552060 - RNA, 23 nt, Human adenovirus C
cucagccgccuuuuagcugcaaa

SEQ ID NO: 1552061 - RNA, 19 nt, Human adenovirus C
acucacguugugcauuguc

SEQ ID NO: 1552062 - RNA, 14 nt, Human adenovirus C
ccgccgcaccgugc

SEQ ID NO: 1552063 - RNA, 22 nt, Human adenovirus C
aucgcuuucccgagaaccagau

SEQ ID NO: 1552064 - RNA, 15 nt, Human adenovirus C
ccugcugcaccugcg

SEQ ID NO: 1552065 - RNA, 13 nt, Human adenovirus C
agggcaaccuggg

SEQ ID NO: 1552066 - RNA, 20 nt, Human adenovirus C
accgggguacccaacuccau

SEQ ID NO: 1552067 - RNA, 17 nt, Human adenovirus C
gggacccgccgggagag

SEQ ID NO: 1552068 - RNA, 20 nt, Human adenovirus C
ccaguggagaggcagagcga

SEQ ID NO: 1552069 - RNA, 15 nt, Human adenovirus C
cgccccaggcugggg

SEQ ID NO: 1552070 - RNA, 18 nt, Human adenovirus C
uggacuuggaggagggcg

SEQ ID NO: 1552071 - RNA, 13 nt, Human adenovirus C
cucaccaaggcca

SEQ ID NO: 1552072 - RNA, 22 nt, Human adenovirus C
aucccugagcaggggggccacu

SEQ ID NO: 1552073 - RNA, 20 nt, Human adenovirus C
aaaaucagucagcaaaucuu

SEQ ID NO: 1552074 - RNA, 13 nt, Human adenovirus C
augagcaaggaaa

SEQ ID NO: 1552075 - RNA, 13 nt, Human adenovirus C
aagauuauccaaa

SEQ ID NO: 1552076 - RNA, 18 nt, Human adenovirus C
gcuucagccgcugcagcc

SEQ ID NO: 1552077 - RNA, 22 nt, Human adenovirus C
gagaaggucaucaagacuuugg

SEQ ID NO: 1552078 - RNA, 14 nt, Human adenovirus C
cccagcugcuacaa

SEQ ID NO: 1552079 - RNA, 17 nt, Human adenovirus C
caggagcuggugcugcg

SEQ ID NO: 1552080 - RNA, 16 nt, Human adenovirus C
cagccgcaccgcggcg

SEQ ID NO: 1552081 - RNA, 21 nt, Human adenovirus C
agaugacuaacucaggggcgc

SEQ ID NO: 1552082 - RNA, 13 nt, Human adenovirus C
ggaccaccacgcc

SEQ ID NO: 1552083 - RNA, 13 nt, Human adenovirus C
agugcaaaauaag

SEQ ID NO: 1552084 - RNA, 20 nt, Human adenovirus C
cucacuuaaaucagcacagu

SEQ ID NO: 1552085 - RNA, 19 nt, Human adenovirus C
cugcagagcucucugggaa

SEQ ID NO: 1552086 - RNA, 18 nt, Human adenovirus C
agucugcagcgcugccaa

SEQ ID NO: 1552087 - RNA, 15 nt, Human adenovirus C
gcgacgucagacaac

SEQ ID NO: 1552088 - RNA, 22 nt, Human adenovirus C
aggucguuggagaugcgggcca

SEQ ID NO: 1552089 - RNA, 13 nt, Human adenovirus C
gggcgaggcgcgc

SEQ ID NO: 1552090 - RNA, 17 nt, Human adenovirus C
ccgugcacgaccccugg

SEQ ID NO: 1552091 - RNA, 22 nt, Human adenovirus C
aaccgcgguugugcagggugac

SEQ ID NO: 1552092 - RNA, 16 nt, Human adenovirus C
agcguggcgcuggaca

SEQ ID NO: 1552093 - RNA, 20 nt, Human adenovirus C
gcgcaacauggaaccgggca

SEQ ID NO: 1552094 - RNA, 13 nt, Human adenovirus C
ggcugcuuguccu

SEQ ID NO: 1552095 - RNA, 13 nt, Human adenovirus C
ucgcguccaggcc

SEQ ID NO: 1552096 - RNA, 14 nt, Human adenovirus C
acagucaggcagag

SEQ ID NO: 1552097 - RNA, 14 nt, Human adenovirus C
cuggcacgggcagc

SEQ ID NO: 1552098 - RNA, 14 nt, Human adenovirus C
gccuugcaggcgca

SEQ ID NO: 1552099 - RNA, 23 nt, Human adenovirus C
cgagcugcuucccaaaggccccc

SEQ ID NO: 1552100 - RNA, 19 nt, Human adenovirus C
accuaugauacuuaccauu

SEQ ID NO: 1552101 - RNA, 16 nt, Human adenovirus C
gcagccaccgcccgcg

SEQ ID NO: 1552102 - RNA, 18 nt, Human adenovirus C
cucccgccaccaguugga

SEQ ID NO: 1552103 - RNA, 18 nt, Human adenovirus C
gugacucuggauguucag

SEQ ID NO: 1552104 - RNA, 13 nt, Human adenovirus C
gcgcccauggcua

SEQ ID NO: 1552105 - RNA, 21 nt, Human adenovirus C
acuaccgcgcgcccuggggcg

SEQ ID NO: 1552106 - RNA, 16 nt, Human adenovirus C
gaacauucccagcugc

SEQ ID NO: 1552107 - RNA, 19 nt, Human adenovirus C
cuacaccuaccgccccaga

SEQ ID NO: 1552108 - RNA, 21 nt, Human adenovirus C
ugcucguccagacgggccagg

SEQ ID NO: 1552109 - RNA, 13 nt, Human adenovirus C
gccgccgcaccgu

SEQ ID NO: 1552110 - RNA, 14 nt, Human adenovirus C
caggcgacgagcgg

SEQ ID NO: 1552111 - RNA, 15 nt, Human adenovirus C
ugaguacgagccaga

SEQ ID NO: 1552112 - RNA, 14 nt, Human adenovirus C
caggggccucuucu

SEQ ID NO: 1552113 - RNA, 21 nt, Human adenovirus C
ccuaucaccgucacccagcac

SEQ ID NO: 1552114 - RNA, 20 nt, Human adenovirus C
ggcguccggcucaccaccca

SEQ ID NO: 1552115 - RNA, 15 nt, Human adenovirus C
ccagcugcugagcca

SEQ ID NO: 1552116 - RNA, 19 nt, Human adenovirus C
cugccaaaaagguugaguu

SEQ ID NO: 1552117 - RNA, 14 nt, Human adenovirus C
acuccacaggcugc

SEQ ID NO: 1552118 - RNA, 15 nt, Human adenovirus C
cugucuuacaaaccu

SEQ ID NO: 1552119 - RNA, 14 nt, Human adenovirus C
aagagcugaaaaua

SEQ ID NO: 1552120 - RNA, 19 nt, Human adenovirus C
ccugcugaaugcgcaggcg

SEQ ID NO: 1552121 - RNA, 18 nt, Human adenovirus C
accaguuggaggaguggc

SEQ ID NO: 1552122 - RNA, 21 nt, Human adenovirus C
acuuggcacccaccgugcagc

SEQ ID NO: 1552123 - RNA, 21 nt, Human adenovirus C
uccucagcgaugauucgcacc

SEQ ID NO: 1552124 - RNA, 20 nt, Human adenovirus C
gcgcugaccugcgcugggcc

SEQ ID NO: 1552125 - RNA, 18 nt, Human adenovirus C
acugcagcaggugcugcc

SEQ ID NO: 1552126 - RNA, 18 nt, Human adenovirus C
ucagucgagaaggaggac

SEQ ID NO: 1552127 - RNA, 18 nt, Human adenovirus C
gcucuagcgaugaagaua

SEQ ID NO: 1552128 - RNA, 18 nt, Human adenovirus C
gugucagacgaaacaccg

SEQ ID NO: 1552129 - RNA, 13 nt, Human adenovirus C
uccuccugccagg

SEQ ID NO: 1552130 - RNA, 16 nt, Human adenovirus C
gauaucggcaccagca

SEQ ID NO: 1552131 - RNA, 16 nt, Human adenovirus C
gcugggccagcacaca

SEQ ID NO: 1552132 - RNA, 12 nt, Human adenovirus C
cugggacagccu

SEQ ID NO: 1552133 - RNA, 12 nt, Human adenovirus C
gcggcugcugcg

SEQ ID NO: 1552134 - RNA, 20 nt, Human adenovirus C
cugccuccccccgcugacac

SEQ ID NO: 1552135 - RNA, 16 nt, Human adenovirus C
cacaggcugcgcacca

SEQ ID NO: 1552136 - RNA, 13 nt, Human adenovirus C
gaagucuuugacg

SEQ ID NO: 1552137 - RNA, 17 nt, Human adenovirus C
acugcagcacagcacca

SEQ ID NO: 1552138 - RNA, 17 nt, Human adenovirus C
ucccaggauggcaccca

SEQ ID NO: 1552139 - RNA, 20 nt, Human adenovirus C
caggcgcggcggcugcugcg

SEQ ID NO: 1552140 - RNA, 17 nt, Human adenovirus C
auaacagcacuggcaac

SEQ ID NO: 1552141 - RNA, 20 nt, Human adenovirus C
cccgcuugcaaauuccuccg

SEQ ID NO: 1552142 - RNA, 21 nt, Human adenovirus C
cagacacgaucggcaggcuca

SEQ ID NO: 1552143 - RNA, 18 nt, Human adenovirus C
uaggggagaucagcuggg

SEQ ID NO: 1552144 - RNA, 15 nt, Human adenovirus C
gccgccggcacugcc

SEQ ID NO: 1552145 - RNA, 22 nt, Human adenovirus C
cauggaccgcaucaugucgcug

SEQ ID NO: 1552146 - RNA, 14 nt, Human adenovirus C
cuccuccuccugcc

SEQ ID NO: 1552147 - RNA, 21 nt, Human adenovirus C
agaaccagauauuuuucuaug

SEQ ID NO: 1552148 - RNA, 21 nt, Human adenovirus C
ccgcguccggcucgcuccacg

SEQ ID NO: 1552149 - RNA, 17 nt, Human adenovirus C
cuccauggucgggacgc

SEQ ID NO: 1552150 - RNA, 20 nt, Human adenovirus C
ggugagcuccucaggggagc

SEQ ID NO: 1552151 - RNA, 20 nt, Human adenovirus C
ucaacuacaccgucaagaaa

SEQ ID NO: 1552152 - RNA, 18 nt, Human adenovirus C
caugcgcgagggacaggc

SEQ ID NO: 1552153 - RNA, 18 nt, Human adenovirus C
cacugugguacuucccag

SEQ ID NO: 1552154 - RNA, 23 nt, Human adenovirus C
cucccaccacugugguacuuccc

SEQ ID NO: 1552155 - RNA, 20 nt, Human adenovirus C
ugaccaguggagaggcagag

SEQ ID NO: 1552156 - RNA, 20 nt, Human adenovirus C
ccaauccccccgccgccgca

SEQ ID NO: 1552157 - RNA, 21 nt, Human adenovirus C
ccuaacuccugugagugggaa

SEQ ID NO: 1552158 - RNA, 12 nt, Human adenovirus C
ggacaccuccca

SEQ ID NO: 1552159 - RNA, 21 nt, Human adenovirus C
aauccaguggacuaaacuuug

SEQ ID NO: 1552160 - RNA, 15 nt, Human adenovirus C
ccaccaccacauagc

SEQ ID NO: 1552161 - RNA, 15 nt, Human adenovirus C
caguauuacccagaa

SEQ ID NO: 1552162 - RNA, 16 nt, Human adenovirus C
cauaaauaaaaaccag

SEQ ID NO: 1552163 - RNA, 14 nt, Human adenovirus C
cgcgcugcuccucu

SEQ ID NO: 1552164 - RNA, 21 nt, Human adenovirus C
ccgcagcccuaucagcagccg

SEQ ID NO: 1552165 - RNA, 21 nt, Human adenovirus C
ccaugcgcgagggacaggcuu

SEQ ID NO: 1552166 - RNA, 22 nt, Human adenovirus C
cgcgcaaaccccacgcacgaga

SEQ ID NO: 1552167 - RNA, 17 nt, Human adenovirus C
ggccgcgggcugggugu

SEQ ID NO: 1552168 - RNA, 15 nt, Human adenovirus C
uaagcacuuacucua

SEQ ID NO: 1552169 - RNA, 23 nt, Human adenovirus C
accggagugcugggccagcacac

SEQ ID NO: 1552170 - RNA, 20 nt, Human adenovirus C
caaccguagaugggacacca

SEQ ID NO: 1552171 - RNA, 12 nt, Human adenovirus C
aaaacaaaguca

SEQ ID NO: 1552172 - RNA, 20 nt, Human adenovirus C
cagcaauaacacaggcuggg

SEQ ID NO: 1552173 - RNA, 14 nt, Human adenovirus C
ccucacccgcagcu

SEQ ID NO: 1552174 - RNA, 16 nt, Human adenovirus C
accccugacagaggac

SEQ ID NO: 1552175 - RNA, 22 nt, Human adenovirus C
agcaugaagggcacgagcugcu

SEQ ID NO: 1552176 - RNA, 15 nt, Human adenovirus C
gguggugggcgccga

SEQ ID NO: 1552177 - RNA, 16 nt, Human adenovirus C
cucgucgggcaccagg

SEQ ID NO: 1552178 - RNA, 17 nt, Human adenovirus C
aagaugaagaagaggaa

SEQ ID NO: 1552179 - RNA, 15 nt, Human adenovirus C
cucacccgcagcugc

SEQ ID NO: 1552180 - RNA, 15 nt, Human adenovirus C
gggguaccugcugga

SEQ ID NO: 1552181 - RNA, 14 nt, Human adenovirus C
gcagaccguggacg

SEQ ID NO: 1552182 - RNA, 16 nt, Human adenovirus C
caagcuugguggcaaa

SEQ ID NO: 1552183 - RNA, 14 nt, Human adenovirus C
gguuuuccuggcca

SEQ ID NO: 1552184 - RNA, 16 nt, Human adenovirus C
guugucaagcuuggug

SEQ ID NO: 1552185 - RNA, 24 nt, Human adenovirus C
cagcggcaagagcaagagcagcgg

SEQ ID NO: 1552186 - RNA, 23 nt, Human adenovirus C
cccaccauuuguagcgccacauc

SEQ ID NO: 1552187 - RNA, 18 nt, Human adenovirus C
acuggucguugccagaca

SEQ ID NO: 1552188 - RNA, 19 nt, Human adenovirus C
agcgcgcgcucguaugggu

SEQ ID NO: 1552189 - RNA, 12 nt, Human adenovirus C
uuuccaggcuuu

SEQ ID NO: 1552190 - RNA, 11 nt, Human adenovirus C
ggagugcuggg

SEQ ID NO: 1552191 - RNA, 16 nt, Human adenovirus C
agaauggaagacauca

SEQ ID NO: 1552192 - RNA, 20 nt, Human adenovirus C
ccuuggaggaggcgccgcac

SEQ ID NO: 1552193 - RNA, 20 nt, Human adenovirus C
acacccagaaaaccgcacgc

SEQ ID NO: 1552194 - RNA, 17 nt, Human adenovirus C
ugaccguggagccuggg

SEQ ID NO: 1552195 - RNA, 16 nt, Human adenovirus C
cugggggcaacaucca

SEQ ID NO: 1552196 - RNA, 19 nt, Human adenovirus C
uuuaggcuugcucgcccuu

SEQ ID NO: 1552197 - RNA, 23 nt, Human adenovirus C
aaaccuucucuacgccaacuccg

SEQ ID NO: 1552198 - RNA, 19 nt, Human adenovirus C
caaucuccucuuccauaag

SEQ ID NO: 1552199 - RNA, 19 nt, Human adenovirus C
ugucuuuccacgggcgcag

SEQ ID NO: 1552200 - RNA, 21 nt, Human adenovirus C
uaucucaaauacaaaagcaga

SEQ ID NO: 1552201 - RNA, 22 nt, Human adenovirus C
ggccaaucaagcagguggcacc

SEQ ID NO: 1552202 - RNA, 16 nt, Human adenovirus C
cuuaacaguccccagg

SEQ ID NO: 1552203 - RNA, 15 nt, Human adenovirus C
cgccgcagcagccgc

SEQ ID NO: 1552204 - RNA, 14 nt, Human adenovirus C
ugcgcagcggcaaa

SEQ ID NO: 1552205 - RNA, 18 nt, Human adenovirus C
gcuggacgagggcaaccc

SEQ ID NO: 1552206 - RNA, 23 nt, Human adenovirus C
cgccgggagagggggcaggggca

SEQ ID NO: 1552207 - RNA, 16 nt, Human adenovirus C
aacucaccugaaaauc

SEQ ID NO: 1552208 - RNA, 23 nt, Human adenovirus C
gaggaccugcuugagcaggccaa

SEQ ID NO: 1552209 - RNA, 19 nt, Human adenovirus C
uaaugagcuugaucugcug

SEQ ID NO: 1552210 - RNA, 22 nt, Human adenovirus C
auauaaaccucugauuaaacau

SEQ ID NO: 1552211 - RNA, 11 nt, Human adenovirus C
aggcuggggcc

SEQ ID NO: 1552212 - RNA, 13 nt, Human adenovirus C
uaccugcugacca

SEQ ID NO: 1552213 - RNA, 14 nt, Human adenovirus C
gcugcagagccagc

SEQ ID NO: 1552214 - RNA, 16 nt, Human adenovirus C
cucgagaucaggcuac

SEQ ID NO: 1552215 - RNA, 15 nt, Human adenovirus C
ucguccagacgggcc

SEQ ID NO: 1552216 - RNA, 23 nt, Human adenovirus C
gcucgcuguggagcggcauuaaa

SEQ ID NO: 1552217 - RNA, 14 nt, Human adenovirus C
aggguccucgucag

SEQ ID NO: 1552218 - RNA, 19 nt, Human adenovirus C
auagugcagcacagcaggg

SEQ ID NO: 1552219 - RNA, 15 nt, Human adenovirus C
cgcguugcucagggc

SEQ ID NO: 1552220 - RNA, 18 nt, Human adenovirus C
aagaaagucccccuggag

SEQ ID NO: 1552221 - RNA, 20 nt, Human adenovirus C
cagagcauaguggugcagga

SEQ ID NO: 1552222 - RNA, 23 nt, Human adenovirus C
acuuuaacggcucuucauuugua

SEQ ID NO: 1552223 - RNA, 22 nt, Human adenovirus C
gccuugcaggcgcagagacacu

SEQ ID NO: 1552224 - RNA, 20 nt, Human adenovirus C
gccaccucccucccaacaca

SEQ ID NO: 1552225 - RNA, 14 nt, Human adenovirus C
aguggcggcggcgc

SEQ ID NO: 1552226 - RNA, 18 nt, Human adenovirus C
ccggcaaggcaaugcuac

SEQ ID NO: 1552227 - RNA, 18 nt, Human adenovirus C
cgugguccgugugcacca

SEQ ID NO: 1552228 - RNA, 14 nt, Human adenovirus C
aacgcugggggcaa

SEQ ID NO: 1552229 - RNA, 19 nt, Human adenovirus C
agcgaagaaacccaucuga

SEQ ID NO: 1552230 - RNA, 13 nt, Human adenovirus C
cagccgccugagc

SEQ ID NO: 1552231 - RNA, 20 nt, Human adenovirus C
cgcccagcaauaacacaggc

SEQ ID NO: 1552232 - RNA, 16 nt, Human adenovirus C
acgaacccccgcggcg

SEQ ID NO: 1552233 - RNA, 17 nt, Human adenovirus C
gaggccucccucguucc

SEQ ID NO: 1552234 - RNA, 13 nt, Human adenovirus C
cucagcgcagcgg

SEQ ID NO: 1552235 - RNA, 17 nt, Human adenovirus C
agcgcggcgccaguggc

SEQ ID NO: 1552236 - RNA, 17 nt, Human adenovirus C
gcgcaggguggcucgcg

SEQ ID NO: 1552237 - RNA, 20 nt, Human adenovirus C
ucaccagcauaacaacucag

SEQ ID NO: 1552238 - RNA, 22 nt, Human adenovirus C
ccuuucacauucaggugcccca

SEQ ID NO: 1552239 - RNA, 12 nt, Human adenovirus C
uccugaaggggg

SEQ ID NO: 1552240 - RNA, 18 nt, Human adenovirus C
caagccccgaaagcuaaa

SEQ ID NO: 1552241 - RNA, 15 nt, Human adenovirus C
ugucugcgagggcca

SEQ ID NO: 1552242 - RNA, 23 nt, Human adenovirus C
caagcgcaaaaucaaagaagaga

SEQ ID NO: 1552243 - RNA, 15 nt, Human adenovirus C
cgcgcuggucucugg

SEQ ID NO: 1552244 - RNA, 19 nt, Human adenovirus C
cugcaccacauuucggccc

SEQ ID NO: 1552245 - RNA, 19 nt, Human adenovirus C
cuucgaugcuccccuggac

SEQ ID NO: 1552246 - RNA, 21 nt, Human adenovirus C
acuacgucaucuccagcggcc

SEQ ID NO: 1552247 - RNA, 16 nt, Human adenovirus C
gccugggcuggagccc

SEQ ID NO: 1552248 - RNA, 19 nt, Human adenovirus C
cgugcagaccaaccuggac

SEQ ID NO: 1552249 - RNA, 22 nt, Human adenovirus C
ggcaaugcagccgguggaggac

SEQ ID NO: 1552250 - RNA, 20 nt, Human adenovirus C
gaucucuuccuccuggagau

SEQ ID NO: 1552251 - RNA, 15 nt, Human adenovirus C
gcgagucuggugacu

SEQ ID NO: 1552252 - RNA, 22 nt, Human adenovirus C
cacgguaaagaccccgggcagc

SEQ ID NO: 1552253 - RNA, 21 nt, Human adenovirus C
ccgaagaggugucagacgaaa

SEQ ID NO: 1552254 - RNA, 19 nt, Human adenovirus C
gcacuucuucuucuccuuc

SEQ ID NO: 1552255 - RNA, 17 nt, Human adenovirus C
cgcgcggcgggcggugg

SEQ ID NO: 1552256 - RNA, 15 nt, Human adenovirus C
gcaccaggugcagac

SEQ ID NO: 1552257 - RNA, 14 nt, Human adenovirus C
agaacuauggcagc

SEQ ID NO: 1552258 - RNA, 18 nt, Human adenovirus C
caacuguccuaacccugg

SEQ ID NO: 1552259 - RNA, 23 nt, Human adenovirus C
cugcgcucccucacccgcagcug

SEQ ID NO: 1552260 - RNA, 14 nt, Human adenovirus C
cgaggcagcggcag

SEQ ID NO: 1552261 - RNA, 20 nt, Human adenovirus C
accgcucccuggucugcaau

SEQ ID NO: 1552262 - RNA, 17 nt, Human adenovirus C
ccuccucagcagcggca

SEQ ID NO: 1552263 - RNA, 16 nt, Human adenovirus C
ugcaagcagugcagcu

SEQ ID NO: 1552264 - RNA, 16 nt, Human adenovirus C
auccccccgccgccgc

SEQ ID NO: 1552265 - RNA, 22 nt, Human adenovirus C
ccuacacgguguaagcuucuau

SEQ ID NO: 1552266 - RNA, 20 nt, Human adenovirus C
caacccgaggucgagaagcc

SEQ ID NO: 1552267 - RNA, 13 nt, Human adenovirus C
gcucugcaaccug

SEQ ID NO: 1552268 - RNA, 23 nt, Human adenovirus C
uucgugcgagggagcgaggaggu

SEQ ID NO: 1552269 - RNA, 14 nt, Human adenovirus C
gggagcuccugcag

SEQ ID NO: 1552270 - RNA, 16 nt, Human adenovirus C
caugcgcgagggacag

SEQ ID NO: 1552271 - RNA, 18 nt, Human adenovirus C
gguagcgcguaugccugc

SEQ ID NO: 1552272 - RNA, 17 nt, Human adenovirus C
acgcccuacauguggag

SEQ ID NO: 1552273 - RNA, 19 nt, Human adenovirus C
caacucggccgccugugga

SEQ ID NO: 1552274 - RNA, 23 nt, Human adenovirus C
gacaugcagggcacccuccccuu

SEQ ID NO: 1552275 - RNA, 15 nt, Human adenovirus C
agagcugcagcugcc

SEQ ID NO: 1552276 - RNA, 19 nt, Human adenovirus C
gacgagguggaacugcugc

SEQ ID NO: 1552277 - RNA, 20 nt, Human adenovirus C
uaaacacgcuggacauaaac

SEQ ID NO: 1552278 - RNA, 14 nt, Human adenovirus C
acacguccuccaug

SEQ ID NO: 1552279 - RNA, 17 nt, Human adenovirus C
cuuggguccggccugcu

SEQ ID NO: 1552280 - RNA, 14 nt, Human adenovirus C
acuggccccaaacu

SEQ ID NO: 1552281 - RNA, 18 nt, Human adenovirus C
cgcgagcgguugcugcgc

SEQ ID NO: 1552282 - RNA, 18 nt, Human adenovirus C
ugaggcuacagaggaggc

SEQ ID NO: 1552283 - RNA, 14 nt, Human adenovirus C
cauggcauggggug

SEQ ID NO: 1552284 - RNA, 17 nt, Human adenovirus C
aggcauccgcgccgcag

SEQ ID NO: 1552285 - RNA, 20 nt, Human adenovirus C
cugcgccgugccgccagcgg

SEQ ID NO: 1552286 - RNA, 23 nt, Human adenovirus C
gcuaaugagcuugaucugcuggc

SEQ ID NO: 1552287 - RNA, 19 nt, Human adenovirus C
guuaacaugguucugcaga

SEQ ID NO: 1552288 - RNA, 14 nt, Human adenovirus C
cacccaccgugcag

SEQ ID NO: 1552289 - RNA, 19 nt, Human adenovirus C
gugggugagcgcaaaggug

SEQ ID NO: 1552290 - RNA, 22 nt, Human adenovirus C
caucuugcgcuaugugcagcag

SEQ ID NO: 1552291 - RNA, 21 nt, Human adenovirus C
aaacuccgauacacuaacagu

SEQ ID NO: 1552292 - RNA, 15 nt, Human adenovirus C
gaagaugucuuggaa

SEQ ID NO: 1552293 - RNA, 20 nt, Human adenovirus C
caagucuagcgccugcugcc

SEQ ID NO: 1552294 - RNA, 15 nt, Human adenovirus C
cacaucucgggccag

SEQ ID NO: 1552295 - RNA, 16 nt, Human adenovirus C
cgacccgcgagcuuag

SEQ ID NO: 1552296 - RNA, 23 nt, Human adenovirus C
acuccugcgccguagcgccauug

SEQ ID NO: 1552297 - RNA, 20 nt, Human adenovirus C
gcggagguugcuggcgaacg

SEQ ID NO: 1552298 - RNA, 21 nt, Human adenovirus C
uaggcgcagcaucccuuuucu

SEQ ID NO: 1552299 - RNA, 15 nt, Human adenovirus C
aucuuaugccaggcc

SEQ ID NO: 1552300 - RNA, 13 nt, Human adenovirus C
gcgcgcgcagccu

SEQ ID NO: 1552301 - RNA, 23 nt, Human adenovirus C
ugcgcgacucgguuagcggccug

SEQ ID NO: 1552302 - RNA, 14 nt, Human adenovirus C
gcagcaggaggagg

SEQ ID NO: 1552303 - RNA, 16 nt, Human adenovirus C
ccuguauauuaaugca

SEQ ID NO: 1552304 - RNA, 21 nt, Human adenovirus C
ccccaguccggcgaggagcuc

SEQ ID NO: 1552305 - RNA, 16 nt, Human adenovirus C
guaaaggugacucugg

SEQ ID NO: 1552306 - RNA, 15 nt, Human adenovirus C
accuuuccgccgcca

SEQ ID NO: 1552307 - RNA, 16 nt, Human adenovirus C
ccuggacccucgggaa

SEQ ID NO: 1552308 - RNA, 20 nt, Human adenovirus C
ugcgcccacaccuacagccu

SEQ ID NO: 1552309 - RNA, 13 nt, Human adenovirus C
caggugagcucug

SEQ ID NO: 1552310 - RNA, 22 nt, Human adenovirus C
acgucauaguuguguuccagga

SEQ ID NO: 1552311 - RNA, 19 nt, Human adenovirus C
cuacuugcaucgcgcggcc

SEQ ID NO: 1552312 - RNA, 22 nt, Human adenovirus C
cagcggcagacaugcagggcac

SEQ ID NO: 1552313 - RNA, 16 nt, Human adenovirus C
ugaaacucacuccggg

SEQ ID NO: 1552314 - RNA, 21 nt, Human adenovirus C
gccagcagguuucugcccuga

SEQ ID NO: 1552315 - RNA, 15 nt, Human adenovirus C
caacuucagacuggg

SEQ ID NO: 1552316 - RNA, 13 nt, Human adenovirus C
cgggcaggagcug

SEQ ID NO: 1552317 - RNA, 13 nt, Human adenovirus C
ccaccacaccucg

SEQ ID NO: 1552318 - RNA, 20 nt, Human adenovirus C
ugcaccguaggaggggcaug

SEQ ID NO: 1552319 - RNA, 21 nt, Human adenovirus C
uaacucaggggcgcagcuugc

SEQ ID NO: 1552320 - RNA, 16 nt, Human adenovirus C
caucagccccccucuc

SEQ ID NO: 1552321 - RNA, 21 nt, Human adenovirus C
ggcccgaugaggccggccugg

SEQ ID NO: 1552322 - RNA, 20 nt, Human adenovirus C
cugccaugcgcgggcggcaa

SEQ ID NO: 1552323 - RNA, 19 nt, Human adenovirus C
ggaccugcuugagcaggcc

SEQ ID NO: 1552324 - RNA, 15 nt, Human adenovirus C
ugugcaccagccgca

SEQ ID NO: 1552325 - RNA, 16 nt, Human adenovirus C
augucgcuguccagcu

SEQ ID NO: 1552326 - RNA, 13 nt, Human adenovirus C
cucgccugcgcca

SEQ ID NO: 1552327 - RNA, 19 nt, Human adenovirus C
gcauccgcccugcucccag

SEQ ID NO: 1552328 - RNA, 24 nt, Human adenovirus C
caacagcugccgccaugggcucca

SEQ ID NO: 1552329 - RNA, 16 nt, Human adenovirus C
ucuuggaaaaaaugac

SEQ ID NO: 1552330 - RNA, 16 nt, Human adenovirus C
cuaccugugcuuugcu

SEQ ID NO: 1552331 - RNA, 13 nt, Human adenovirus C
caugagccggugu

SEQ ID NO: 1552332 - RNA, 17 nt, Human adenovirus C
agcuacccacccagcgc

SEQ ID NO: 1552333 - RNA, 17 nt, Human adenovirus C
gggcagccuggaggcaa

SEQ ID NO: 1552334 - RNA, 20 nt, Human adenovirus C
gcaugaagggcacgagcugc

SEQ ID NO: 1552335 - RNA, 16 nt, Human adenovirus C
cgggcacagcagcgca

SEQ ID NO: 1552336 - RNA, 16 nt, Human adenovirus C
guuaacuccuccucca

SEQ ID NO: 1552337 - RNA, 21 nt, Human adenovirus C
cgcaguggucuuacaugcaca

SEQ ID NO: 1552338 - RNA, 23 nt, Human adenovirus C
caacuuugguagcugccuuccca

SEQ ID NO: 1552339 - RNA, 12 nt, Human adenovirus C
ugugcgcgaggc

SEQ ID NO: 1552340 - RNA, 15 nt, Human adenovirus C
aacaguggcaaccac

SEQ ID NO: 1552341 - RNA, 14 nt, Human adenovirus C
uguuuugcugauuu

SEQ ID NO: 1552342 - RNA, 15 nt, Human adenovirus C
cagcaaauacugcgc

SEQ ID NO: 1552343 - RNA, 20 nt, Human adenovirus C
uacccacccaaagcagacca

SEQ ID NO: 1552344 - RNA, 15 nt, Human adenovirus C
gaccccgggcagcag

SEQ ID NO: 1552345 - RNA, 22 nt, Human adenovirus C
ccagcucggcggugaccugcac

SEQ ID NO: 1552346 - RNA, 14 nt, Human adenovirus C
aagacucggcggac

SEQ ID NO: 1552347 - RNA, 18 nt, Human adenovirus C
aggcgccgcacgaggggc

SEQ ID NO: 1552348 - RNA, 15 nt, Human adenovirus C
ccccauggcccacaa

SEQ ID NO: 1552349 - RNA, 19 nt, Human adenovirus C
cagaaaccgggccuccaac

SEQ ID NO: 1552350 - RNA, 20 nt, Human adenovirus C
gcgcccauggcuaccggagu

SEQ ID NO: 1552351 - RNA, 20 nt, Human adenovirus C
gcaacuuucuaaccacgguc

SEQ ID NO: 1552352 - RNA, 13 nt, Human adenovirus C
cuugagaggccug

SEQ ID NO: 1552353 - RNA, 13 nt, Human adenovirus C
cuaacucugcaga

SEQ ID NO: 1552354 - RNA, 16 nt, Human adenovirus C
auggcccucaccugcc

SEQ ID NO: 1552355 - RNA, 17 nt, Human adenovirus C
cacuuaaaaaaacaaag

SEQ ID NO: 1552356 - RNA, 14 nt, Human adenovirus C
ucccaaaagacaua

SEQ ID NO: 1552357 - RNA, 18 nt, Human adenovirus C
uuaccaagcgcccccugc

SEQ ID NO: 1552358 - RNA, 19 nt, Human adenovirus C
caguggagaggcagagcga

SEQ ID NO: 1552359 - RNA, 15 nt, Human adenovirus C
aggauaggguggccu

SEQ ID NO: 1552360 - RNA, 19 nt, Human adenovirus C
cgacccggcacugccgccc

SEQ ID NO: 1552361 - RNA, 21 nt, Human adenovirus C
cuacaugagcgcgggacccca

SEQ ID NO: 1552362 - RNA, 15 nt, Human adenovirus C
uuguuguaacccgcc

SEQ ID NO: 1552363 - RNA, 14 nt, Human adenovirus C
gucucuggccccgc

SEQ ID NO: 1552364 - RNA, 13 nt, Human adenovirus C
aaugcaccacaga

SEQ ID NO: 1552365 - RNA, 16 nt, Human adenovirus C
uuuccauuuuaugaaa

SEQ ID NO: 1552366 - RNA, 23 nt, Human adenovirus C
guagcaagcugauugccaggggc

SEQ ID NO: 1552367 - RNA, 14 nt, Human adenovirus C
cucagaaaugacac

SEQ ID NO: 1552368 - RNA, 19 nt, Human adenovirus C
cggacuaucgcaacaccac

SEQ ID NO: 1552369 - RNA, 23 nt, Human adenovirus C
ccaauccccccgccgccgcagcc

SEQ ID NO: 1552370 - RNA, 22 nt, Human adenovirus C
cagcugaugguacccaagcgcc

SEQ ID NO: 1552371 - RNA, 15 nt, Human adenovirus C
cgcaggcggcggcaa

SEQ ID NO: 1552372 - RNA, 15 nt, Human adenovirus C
cggcagcggcagcaa

SEQ ID NO: 1552373 - RNA, 13 nt, Human adenovirus C
guaggugagcucc

SEQ ID NO: 1552374 - RNA, 15 nt, Human adenovirus C
ggccguggagacagu

SEQ ID NO: 1552375 - RNA, 14 nt, Human adenovirus C
augacuaacucagg

SEQ ID NO: 1552376 - RNA, 17 nt, Human adenovirus C
aaggcucgcguccaggc

SEQ ID NO: 1552377 - RNA, 14 nt, Human adenovirus C
acgcggcagccgcg

SEQ ID NO: 1552378 - RNA, 18 nt, Human adenovirus C
caguggcaaccaccgcuc

SEQ ID NO: 1552379 - RNA, 16 nt, Human adenovirus C
cagcgcgagcaggcag

SEQ ID NO: 1552380 - RNA, 14 nt, Human adenovirus C
ccacgagccaggug

SEQ ID NO: 1552381 - RNA, 20 nt, Human adenovirus C
cacugcuaccuucugcagcu

SEQ ID NO: 1552382 - RNA, 15 nt, Human adenovirus C
gcgucauuacccagg

SEQ ID NO: 1552383 - RNA, 17 nt, Human adenovirus C
gguccugcuggugcuga

SEQ ID NO: 1552384 - RNA, 22 nt, Human adenovirus C
agaaaagcgcggccuaaagcgc

SEQ ID NO: 1552385 - RNA, 10 nt, Human adenovirus C
acaaccccaa

SEQ ID NO: 1552386 - RNA, 15 nt, Human adenovirus C
gcagagcgugagccu

SEQ ID NO: 1552387 - RNA, 22 nt, Human adenovirus C
cuaauguauuauaacagcacug

SEQ ID NO: 1552388 - RNA, 23 nt, Human adenovirus C
cacguacuuugacauccgcggcg

SEQ ID NO: 1552389 - RNA, 15 nt, Human adenovirus C
gccgaggaugaagaa

SEQ ID NO: 1552390 - RNA, 13 nt, Human adenovirus C
caugucgccgcca

SEQ ID NO: 1552391 - RNA, 16 nt, Human adenovirus C
caaagggguucugccg

SEQ ID NO: 1552392 - RNA, 21 nt, Human adenovirus C
ucugacaaagcccaagaaauc

SEQ ID NO: 1552393 - RNA, 18 nt, Human adenovirus C
gcguagcacgucgccacc

SEQ ID NO: 1552394 - RNA, 13 nt, Human adenovirus C
cgaaguaaguuug

SEQ ID NO: 1552395 - RNA, 21 nt, Human adenovirus C
acuacaccuuucgccagggcu

SEQ ID NO: 1552396 - RNA, 15 nt, Human adenovirus C
cccaggcuggggaga

SEQ ID NO: 1552397 - RNA, 19 nt, Human adenovirus C
ugagguggaucccauggac

SEQ ID NO: 1552398 - RNA, 20 nt, Human adenovirus C
cuagcuuuuuuggccacugg

SEQ ID NO: 1552399 - RNA, 17 nt, Human adenovirus C
guggagccugggcugga

SEQ ID NO: 1552400 - RNA, 22 nt, Human adenovirus C
gcgagauugagcuccacgugcc

SEQ ID NO: 1552401 - RNA, 14 nt, Human adenovirus C
ggccgaagaggugu

SEQ ID NO: 1552402 - RNA, 17 nt, Human adenovirus C
cgcaccuacaagcgcgu

SEQ ID NO: 1552403 - RNA, 16 nt, Human adenovirus C
uggugcaggagcgcag

SEQ ID NO: 1552404 - RNA, 13 nt, Human adenovirus C
ugcaucccaccuu

SEQ ID NO: 1552405 - RNA, 22 nt, Human adenovirus C
ggugcaugcccaggcuuugagu

SEQ ID NO: 1552406 - RNA, 15 nt, Human adenovirus C
uuggacaccucccac

SEQ ID NO: 1552407 - RNA, 16 nt, Human adenovirus C
cagggcgaaggugaca

SEQ ID NO: 1552408 - RNA, 19 nt, Human adenovirus C
auaugagaugcaucuugga

SEQ ID NO: 1552409 - RNA, 23 nt, Human adenovirus C
ugccuuugucaaugacugggcga

SEQ ID NO: 1552410 - RNA, 13 nt, Human adenovirus C
cgggcagcaggcg

SEQ ID NO: 1552411 - RNA, 12 nt, Human adenovirus C
ccaggccagcac

SEQ ID NO: 1552412 - RNA, 14 nt, Human adenovirus C
uaccuggaccccca

SEQ ID NO: 1552413 - RNA, 23 nt, Human adenovirus C
ggcgcacggcguccggcucacca

SEQ ID NO: 1552414 - RNA, 20 nt, Human adenovirus C
gagggcaacccaacaccuag

SEQ ID NO: 1552415 - RNA, 16 nt, Human adenovirus C
cagcgcgcuaccaccc

SEQ ID NO: 1552416 - RNA, 18 nt, Human adenovirus C
auccucaucugcagccuc

SEQ ID NO: 1552417 - RNA, 17 nt, Human adenovirus C
uugcugcgcgaggagga

SEQ ID NO: 1552418 - RNA, 20 nt, Human adenovirus C
cuuacuggcugcagccaggg

SEQ ID NO: 1552419 - RNA, 14 nt, Human adenovirus C
ccuucucccacccc

SEQ ID NO: 1552420 - RNA, 13 nt, Human adenovirus C
agccgccugagca

SEQ ID NO: 1552421 - RNA, 16 nt, Human adenovirus C
gucucgcgcggcgguc

SEQ ID NO: 1552422 - RNA, 20 nt, Human adenovirus C
cuugugacgagucuucuucg

SEQ ID NO: 1552423 - RNA, 17 nt, Human adenovirus C
aaaauuuccaacgugga

SEQ ID NO: 1552424 - RNA, 23 nt, Human adenovirus C
cagaaggcgcucgccgcccagcg

SEQ ID NO: 1552425 - RNA, 21 nt, Human adenovirus C
cuacuugcaucgcgcggccgc

SEQ ID NO: 1552426 - RNA, 15 nt, Human adenovirus C
caguggcagcggcgc

SEQ ID NO: 1552427 - RNA, 22 nt, Human adenovirus C
uggggcucgcuguggagcggca

SEQ ID NO: 1552428 - RNA, 16 nt, Human adenovirus C
cgguuaacuccuccuc

SEQ ID NO: 1552429 - RNA, 17 nt, Human adenovirus C
cagcagcaggaggagga

SEQ ID NO: 1552430 - RNA, 22 nt, Human adenovirus C
gcccguguucugacagggccca

SEQ ID NO: 1552431 - RNA, 23 nt, Human adenovirus C
gggccgcucgaaggcuggccgcg

SEQ ID NO: 1552432 - RNA, 13 nt, Human adenovirus C
gagggacaaguug

SEQ ID NO: 1552433 - RNA, 15 nt, Human adenovirus C
ggcagccuggaggca

SEQ ID NO: 1552434 - RNA, 16 nt, Human adenovirus C
gcuucagccgcugcag

SEQ ID NO: 1552435 - RNA, 14 nt, Human adenovirus C
ggcgcgcugcggcu

SEQ ID NO: 1552436 - RNA, 22 nt, Human adenovirus C
gucacccuuauccucaucugca

SEQ ID NO: 1552437 - RNA, 13 nt, Human adenovirus C
uccacagaaacua

SEQ ID NO: 1552438 - RNA, 22 nt, Human adenovirus C
uaaagcaaggccugcccaccac

SEQ ID NO: 1552439 - RNA, 17 nt, Human adenovirus C
gugguggaccuggccaa

SEQ ID NO: 1552440 - RNA, 13 nt, Human adenovirus C
gccgcaggccaac

SEQ ID NO: 1552441 - RNA, 18 nt, Human adenovirus C
cugcaaagggcccuggcu

SEQ ID NO: 1552442 - RNA, 17 nt, Human adenovirus C
uuucauucaguaguaua

SEQ ID NO: 1552443 - RNA, 23 nt, Human adenovirus C
ugacggccugguaggcgcagcau

SEQ ID NO: 1552444 - RNA, 16 nt, Human adenovirus C
acggccuacuggagug

SEQ ID NO: 1552445 - RNA, 15 nt, Human adenovirus C
cuggccgcucuucau

SEQ ID NO: 1552446 - RNA, 18 nt, Human adenovirus C
gaaagcuuccgcaggcca

SEQ ID NO: 1552447 - RNA, 17 nt, Human adenovirus C
ccagcccgugcuggccc

SEQ ID NO: 1552448 - RNA, 16 nt, Human adenovirus C
caugcacgcagcaccu

SEQ ID NO: 1552449 - RNA, 21 nt, Human adenovirus C
ucaggcgccgccggcacugcc

SEQ ID NO: 1552450 - RNA, 23 nt, Human adenovirus C
auacgcagauccuuccuaucaac

SEQ ID NO: 1552451 - RNA, 17 nt, Human adenovirus C
acuuugcgucucuggcc

SEQ ID NO: 1552452 - RNA, 19 nt, Human adenovirus C
acugcccucacguccaagu

SEQ ID NO: 1552453 - RNA, 17 nt, Human adenovirus C
cgucagcggggucuggu

SEQ ID NO: 1552454 - RNA, 15 nt, Human adenovirus C
aauguacuaggagac

SEQ ID NO: 1552455 - RNA, 21 nt, Human adenovirus C
auuuuuucuggggugaugcag

SEQ ID NO: 1552456 - RNA, 22 nt, Human adenovirus C
aagcgcucgaucaucuccccgc

SEQ ID NO: 1552457 - RNA, 23 nt, Human adenovirus C
augcuggaugugaccgaggagcu

SEQ ID NO: 1552458 - RNA, 22 nt, Human adenovirus C
ugccagaggugcuugccaccua

SEQ ID NO: 1552459 - RNA, 16 nt, Human adenovirus C
caggcgcggcggcugc

SEQ ID NO: 1552460 - RNA, 17 nt, Human adenovirus C
guaccuuaccugguacu

SEQ ID NO: 1552461 - RNA, 19 nt, Human adenovirus C
cuacaagcuacccacccag

SEQ ID NO: 1552462 - RNA, 14 nt, Human adenovirus C
ggcagccgcggcaa

SEQ ID NO: 1552463 - RNA, 19 nt, Human adenovirus C
uggcggguuuggcuggugg

SEQ ID NO: 1552464 - RNA, 23 nt, Human adenovirus C
cgggccaugagcugcgagaaggc

SEQ ID NO: 1552465 - RNA, 20 nt, Human adenovirus C
cagugcaacaugaccaagga

SEQ ID NO: 1552466 - RNA, 13 nt, Human adenovirus C
ggaugggugcaua

SEQ ID NO: 1552467 - RNA, 18 nt, Human adenovirus C
ugaugggcuccagcauug

SEQ ID NO: 1552468 - RNA, 15 nt, Human adenovirus C
aauacuaaaaaacug

SEQ ID NO: 1552469 - RNA, 21 nt, Human adenovirus C
caaggccuggaacagcagcac

SEQ ID NO: 1552470 - RNA, 16 nt, Human adenovirus C
gcagguuccugagcag

SEQ ID NO: 1552471 - RNA, 13 nt, Human adenovirus C
ucugcccgccacc

SEQ ID NO: 1552472 - RNA, 18 nt, Human adenovirus C
cacgcuggaagccaugcu

SEQ ID NO: 1552473 - RNA, 18 nt, Human adenovirus C
uacgccaccuucuucccc

SEQ ID NO: 1552474 - RNA, 22 nt, Human adenovirus C
aacauugucagucaaguuuacu

SEQ ID NO: 1552475 - RNA, 16 nt, Human adenovirus C
uucccagcaucgcuac

SEQ ID NO: 1552476 - RNA, 15 nt, Human adenovirus C
cugcauaccaacaug

SEQ ID NO: 1552477 - RNA, 19 nt, Human adenovirus C
caggaggugagcucaacuc

SEQ ID NO: 1552478 - RNA, 20 nt, Human adenovirus C
guauucaaccugccaccucc

SEQ ID NO: 1552479 - RNA, 22 nt, Human adenovirus C
cucaguggaacgaagcugaugc

SEQ ID NO: 1552480 - RNA, 14 nt, Human adenovirus C
cuuggcgcgcagcu

SEQ ID NO: 1552481 - RNA, 14 nt, Human adenovirus C
acggacgaggagga

SEQ ID NO: 1552482 - RNA, 13 nt, Human adenovirus C
accugugcugcca

SEQ ID NO: 1552483 - RNA, 14 nt, Human adenovirus C
caaacauaaguuug

SEQ ID NO: 1552484 - RNA, 12 nt, Human adenovirus C
gcagcugccugu

SEQ ID NO: 1552485 - RNA, 20 nt, Human adenovirus C
cucgcauuccacgagccagg

SEQ ID NO: 1552486 - RNA, 19 nt, Human adenovirus C
cccgcccgcgccugcuggg

SEQ ID NO: 1552487 - RNA, 21 nt, Human adenovirus C
uacaugcacaucucgggccag

SEQ ID NO: 1552488 - RNA, 13 nt, Human adenovirus C
gggagaggggcgc

SEQ ID NO: 1552489 - RNA, 17 nt, Human adenovirus C
uuccagaaagcuacaag

SEQ ID NO: 1552490 - RNA, 14 nt, Human adenovirus C
cgcgcgcggcgguc

SEQ ID NO: 1552491 - RNA, 12 nt, Human adenovirus C
augccgcagugg

SEQ ID NO: 1552492 - RNA, 21 nt, Human adenovirus C
uccguggccuugcaggcgcag

SEQ ID NO: 1552493 - RNA, 19 nt, Human adenovirus C
ugaugggcuccagcauuga

SEQ ID NO: 1552494 - RNA, 17 nt, Human adenovirus C
ccgcggcgauuggcgcc

SEQ ID NO: 1552495 - RNA, 13 nt, Human adenovirus C
gcugcaaacuuuc

SEQ ID NO: 1552496 - RNA, 18 nt, Human adenovirus C
ggggcgcgcuggucucug

SEQ ID NO: 1552497 - RNA, 22 nt, Human adenovirus C
ggaguugcgcgccgacacgguu

SEQ ID NO: 1552498 - RNA, 13 nt, Human adenovirus C
cacaacacggccu

SEQ ID NO: 1552499 - RNA, 15 nt, Human adenovirus C
uaugagcaauucaag

SEQ ID NO: 1552500 - RNA, 20 nt, Human adenovirus C
gcaagccgcucauggcgcag

SEQ ID NO: 1552501 - RNA, 19 nt, Human adenovirus C
gggcauccgcaagcggcaa

SEQ ID NO: 1552502 - RNA, 13 nt, Human adenovirus C
ccauagagcagcu

SEQ ID NO: 1552503 - RNA, 16 nt, Human adenovirus C
ucacaagccccacuga

SEQ ID NO: 1552504 - RNA, 21 nt, Human adenovirus C
cggcgccaguggcggcggcgc

SEQ ID NO: 1552505 - RNA, 21 nt, Human adenovirus C
ggagcuggugcugcgcgcgga

SEQ ID NO: 1552506 - RNA, 22 nt, Human adenovirus C
ugcaaguccgcaccagguacug

SEQ ID NO: 1552507 - RNA, 15 nt, Human adenovirus C
caacuugcgguugcu

SEQ ID NO: 1552508 - RNA, 16 nt, Human adenovirus C
agguuucuguggggcu

SEQ ID NO: 1552509 - RNA, 15 nt, Human adenovirus C
gcauggccggccacg

SEQ ID NO: 1552510 - RNA, 15 nt, Human adenovirus C
guugcauguggaaaa

SEQ ID NO: 1552511 - RNA, 21 nt, Human adenovirus C
gggagaucagcugggaagaaa

SEQ ID NO: 1552512 - RNA, 16 nt, Human adenovirus C
gcccuacuuccgcagc

SEQ ID NO: 1552513 - RNA, 14 nt, Human adenovirus C
uaugcacugcaggg

SEQ ID NO: 1552514 - RNA, 21 nt, Human adenovirus C
acccauuugaugcucaaacaa

SEQ ID NO: 1552515 - RNA, 14 nt, Human adenovirus C
ggugguggaccugg

SEQ ID NO: 1552516 - RNA, 17 nt, Human adenovirus C
ggaggacacgggcagcc

SEQ ID NO: 1552517 - RNA, 17 nt, Human adenovirus C
uacucugaguuggcacc

SEQ ID NO: 1552518 - RNA, 18 nt, Human adenovirus C
auaaaaugcaccacagaa

SEQ ID NO: 1552519 - RNA, 17 nt, Human adenovirus C
acgaggaggcacuaaag

SEQ ID NO: 1552520 - RNA, 20 nt, Human adenovirus C
ggccgccgugaaccccgagu

SEQ ID NO: 1552521 - RNA, 24 nt, Human adenovirus C
gacggccugguaggcgcagcaucc

SEQ ID NO: 1552522 - RNA, 17 nt, Human adenovirus C
ggcuggcacgggcagcg

SEQ ID NO: 1552523 - RNA, 16 nt, Human adenovirus C
cugagcaggggggcca

SEQ ID NO: 1552524 - RNA, 12 nt, Human adenovirus C
cggaaagcggca

SEQ ID NO: 1552525 - RNA, 14 nt, Human adenovirus C
acgcgcccuggagg

SEQ ID NO: 1552526 - RNA, 14 nt, Human adenovirus C
ccgcccugcuccca

SEQ ID NO: 1552527 - RNA, 19 nt, Human adenovirus C
agcgaccgcgagcugaugc

SEQ ID NO: 1552528 - RNA, 15 nt, Human adenovirus C
ucccacacugcaggg

SEQ ID NO: 1552529 - RNA, 18 nt, Human adenovirus C
agcccuacuccggcacug

SEQ ID NO: 1552530 - RNA, 14 nt, Human adenovirus C
cccggagguagggg

SEQ ID NO: 1552531 - RNA, 15 nt, Human adenovirus C
acuggcagcggugca

SEQ ID NO: 1552532 - RNA, 17 nt, Human adenovirus C
ugcagguuuaccucgca

SEQ ID NO: 1552533 - RNA, 19 nt, Human adenovirus C
cgcgccuguugcugcugcu

SEQ ID NO: 1552534 - RNA, 20 nt, Human adenovirus C
ggcgaccggauagcaagacu

SEQ ID NO: 1552535 - RNA, 15 nt, Human adenovirus C
ucuggggugaugcag

SEQ ID NO: 1552536 - RNA, 16 nt, Human adenovirus C
ccacucgcccuacuuc

SEQ ID NO: 1552537 - RNA, 16 nt, Human adenovirus C
agacacuuaagcucgc

SEQ ID NO: 1552538 - RNA, 16 nt, Human adenovirus C
cucugcucggaagacu

SEQ ID NO: 1552539 - RNA, 17 nt, Human adenovirus C
cucugauuaaacauggc

SEQ ID NO: 1552540 - RNA, 22 nt, Human adenovirus C
acacugcagcaggugcugccca

SEQ ID NO: 1552541 - RNA, 18 nt, Human adenovirus C
acacuaacaguaguuacu

SEQ ID NO: 1552542 - RNA, 20 nt, Human adenovirus C
uccuuuaaugacuaccuuuc

SEQ ID NO: 1552543 - RNA, 14 nt, Human adenovirus C
gaaagugggcaggc

SEQ ID NO: 1552544 - RNA, 20 nt, Human adenovirus C
gugcacgaccccuggagagg

SEQ ID NO: 1552545 - RNA, 20 nt, Human adenovirus C
gauucaucaaacaacaugga

SEQ ID NO: 1552546 - RNA, 19 nt, Human adenovirus C
ccugagcaggggggccacu

SEQ ID NO: 1552547 - RNA, 20 nt, Human adenovirus C
cuacacgcccacgccgccac

SEQ ID NO: 1552548 - RNA, 17 nt, Human adenovirus C
cuauaaaugcaggaaag

SEQ ID NO: 1552549 - RNA, 19 nt, Human adenovirus C
ccgccuuuuagcugcaaac

SEQ ID NO: 1552550 - RNA, 17 nt, Human adenovirus C
gccugcaaagggcccug

SEQ ID NO: 1552551 - RNA, 21 nt, Human adenovirus C
ucuucucaaauacuaccucuu

SEQ ID NO: 1552552 - RNA, 20 nt, Human adenovirus C
agcaugauaaauauguggcc

SEQ ID NO: 1552553 - RNA, 23 nt, Human adenovirus C
uugaguuuaaggaaccagcuugc

SEQ ID NO: 1552554 - RNA, 22 nt, Human adenovirus C
uggacuguauuuuuagguuggc

SEQ ID NO: 1552555 - RNA, 12 nt, Human adenovirus C
cuacaccagugu

SEQ ID NO: 1552556 - RNA, 21 nt, Human adenovirus C
ggaauuugaagagcuuuugaa

SEQ ID NO: 1552557 - RNA, 21 nt, Human adenovirus C
agggcccggcgcacggcgucc

SEQ ID NO: 1552558 - RNA, 22 nt, Human adenovirus C
ucggaagacuaucugccugaag

SEQ ID NO: 1552559 - RNA, 12 nt, Human adenovirus C
accugagccuuu

SEQ ID NO: 1552560 - RNA, 23 nt, Human adenovirus C
auuagcggggugguggaccuggc

SEQ ID NO: 1552561 - RNA, 22 nt, Human adenovirus C
cgcgcccuggaggcagcugggg

SEQ ID NO: 1552562 - RNA, 14 nt, Human adenovirus C
cugacagggcccag

SEQ ID NO: 1552563 - RNA, 16 nt, Human adenovirus C
gcagcggugcagccac

SEQ ID NO: 1552564 - RNA, 21 nt, Human adenovirus C
uccagaggaccucugcacucu

SEQ ID NO: 1552565 - RNA, 15 nt, Human adenovirus C
aggcaaugcuacuaa

SEQ ID NO: 1552566 - RNA, 14 nt, Human adenovirus C
accaguccgggcca

SEQ ID NO: 1552567 - RNA, 16 nt, Human adenovirus C
cgggccaugagcugcg

SEQ ID NO: 1552568 - RNA, 19 nt, Human adenovirus C
gcacucacagaccugggcc

SEQ ID NO: 1552569 - RNA, 16 nt, Human adenovirus C
cuagacgaagcuuccg

SEQ ID NO: 1552570 - RNA, 19 nt, Human adenovirus C
ggccgaacacucgugcugg

SEQ ID NO: 1552571 - RNA, 14 nt, Human adenovirus C
acuugcggcuggag

SEQ ID NO: 1552572 - RNA, 14 nt, Human adenovirus C
aggccaagcagcuu

SEQ ID NO: 1552573 - RNA, 22 nt, Human adenovirus C
cauagaugccaugaaccacccu

SEQ ID NO: 1552574 - RNA, 15 nt, Human adenovirus C
gccaucaucucuguc

SEQ ID NO: 1552575 - RNA, 22 nt, Human adenovirus C
cugcagaccguaaaccugagcc

SEQ ID NO: 1552576 - RNA, 14 nt, Human adenovirus C
ccgcgcgcgggcag

SEQ ID NO: 1552577 - RNA, 14 nt, Human adenovirus C
ugccuuugagggug

SEQ ID NO: 1552578 - RNA, 13 nt, Human adenovirus C
accuucuccuaca

SEQ ID NO: 1552579 - RNA, 13 nt, Human adenovirus C
auggcgcagcugu

SEQ ID NO: 1552580 - RNA, 18 nt, Human adenovirus C
cuaaugcggcaggaggga

SEQ ID NO: 1552581 - RNA, 17 nt, Human adenovirus C
caugaagaucuggaagg

SEQ ID NO: 1552582 - RNA, 20 nt, Human adenovirus C
cgcgcacgucgcaccggccg

SEQ ID NO: 1552583 - RNA, 18 nt, Human adenovirus C
uggaggaguggcuguuga

SEQ ID NO: 1552584 - RNA, 15 nt, Human adenovirus C
cgguuuuccuggcca

SEQ ID NO: 1552585 - RNA, 20 nt, Human adenovirus C
uccaagaugagguacaugau

SEQ ID NO: 1552586 - RNA, 13 nt, Human adenovirus C
caggcagaggcgg

SEQ ID NO: 1552587 - RNA, 20 nt, Human adenovirus C
cgcucgucgggcaccaggug

SEQ ID NO: 1552588 - RNA, 18 nt, Human adenovirus C
ccgugcacgaccccugga

SEQ ID NO: 1552589 - RNA, 22 nt, Human adenovirus C
gggcccacgggcggcggccugg

SEQ ID NO: 1552590 - RNA, 19 nt, Human adenovirus C
caccacugaaacuuuugcu

SEQ ID NO: 1552591 - RNA, 18 nt, Human adenovirus C
accuggccaaccaggcag

SEQ ID NO: 1552592 - RNA, 15 nt, Human adenovirus C
cagaugggagcuguc

SEQ ID NO: 1552593 - RNA, 22 nt, Human adenovirus C
caaaauuggcaaguaugcugua

SEQ ID NO: 1552594 - RNA, 17 nt, Human adenovirus C
cacccgcaacuucagac

SEQ ID NO: 1552595 - RNA, 19 nt, Human adenovirus C
cccguguucugacagggcc

SEQ ID NO: 1552596 - RNA, 13 nt, Human adenovirus C
agcagugcagcuu

SEQ ID NO: 1552597 - RNA, 14 nt, Human adenovirus C
cuugccugcuccag

SEQ ID NO: 1552598 - RNA, 19 nt, Human adenovirus C
gggcaggggcuaaaggggg

SEQ ID NO: 1552599 - RNA, 21 nt, Human adenovirus C
gcuaggucucgcgcggcgguc

SEQ ID NO: 1552600 - RNA, 13 nt, Human adenovirus C
gcugccuucccaa

SEQ ID NO: 1552601 - RNA, 13 nt, Human adenovirus C
caccggcggcagc

SEQ ID NO: 1552602 - RNA, 22 nt, Human adenovirus C
ggguguucuugcuggucaggca

SEQ ID NO: 1552603 - RNA, 20 nt, Human adenovirus C
acagcggcaacgugcagacc

SEQ ID NO: 1552604 - RNA, 11 nt, Human adenovirus C
cucagcagcug

SEQ ID NO: 1552605 - RNA, 15 nt, Human adenovirus C
ggcgcgggcacaaga

SEQ ID NO: 1552606 - RNA, 13 nt, Human adenovirus C
ucaccacccaggu

SEQ ID NO: 1552607 - RNA, 15 nt, Human adenovirus C
gccgcauccccgcgg

SEQ ID NO: 1552608 - RNA, 13 nt, Human adenovirus C
ggugugggugagc

SEQ ID NO: 1552609 - RNA, 15 nt, Human adenovirus C
auagccgggucaggg

SEQ ID NO: 1552610 - RNA, 15 nt, Human adenovirus C
guccagcuuauucag

SEQ ID NO: 1552611 - RNA, 17 nt, Human adenovirus C
cuuagaguugacggggc

SEQ ID NO: 1552612 - RNA, 13 nt, Human adenovirus C
ugauaaauaugug

SEQ ID NO: 1552613 - RNA, 15 nt, Human adenovirus C
cuauuaaaaaacacc

SEQ ID NO: 1552614 - RNA, 16 nt, Human adenovirus C
ccgagggccgcuggcu

SEQ ID NO: 1552615 - RNA, 14 nt, Human adenovirus C
cgcgcaccuggcgg

SEQ ID NO: 1552616 - RNA, 21 nt, Human adenovirus C
cgcggcaaacgcucugcaaca

SEQ ID NO: 1552617 - RNA, 18 nt, Human adenovirus C
gcggaugucagccuugcc

SEQ ID NO: 1552618 - RNA, 17 nt, Human adenovirus C
aguccacaaaaaacacc

SEQ ID NO: 1552619 - RNA, 18 nt, Human adenovirus C
ccaagccgacgcgcccug

SEQ ID NO: 1552620 - RNA, 13 nt, Human adenovirus C
aggggccaagaac

SEQ ID NO: 1552621 - RNA, 19 nt, Human adenovirus C
cgcuugcaaauuccuccgg

SEQ ID NO: 1552622 - RNA, 14 nt, Human adenovirus C
uugagccccucgcc

SEQ ID NO: 1552623 - RNA, 11 nt, Human adenovirus C
gcgccucccaa

SEQ ID NO: 1552624 - RNA, 22 nt, Human adenovirus C
gcuccacuuaaacucaggcaca

SEQ ID NO: 1552625 - RNA, 15 nt, Human adenovirus C
cgcaccugccccuac

SEQ ID NO: 1552626 - RNA, 17 nt, Human adenovirus C
guaccugaggacuacca

SEQ ID NO: 1552627 - RNA, 20 nt, Human adenovirus C
ccaggcggcggcggcggcag

SEQ ID NO: 1552628 - RNA, 17 nt, Human adenovirus C
aacuaaaauuggcucug

SEQ ID NO: 1552629 - RNA, 14 nt, Human adenovirus C
cagcaucaccuccu

SEQ ID NO: 1552630 - RNA, 14 nt, Human adenovirus C
cgcggcggcggccc

SEQ ID NO: 1552631 - RNA, 16 nt, Human adenovirus C
aaggcuaauggcaaug

SEQ ID NO: 1552632 - RNA, 19 nt, Human adenovirus C
ggcgugcuggacagggggc

SEQ ID NO: 1552633 - RNA, 19 nt, Human adenovirus C
cacuaguauugccacugcc

SEQ ID NO: 1552634 - RNA, 17 nt, Human adenovirus C
uuccuaucaaccagaac

SEQ ID NO: 1552635 - RNA, 19 nt, Human adenovirus C
accagcaauaugagcggug

SEQ ID NO: 1552636 - RNA, 23 nt, Human adenovirus C
cuggggcgcgcacaaacgcggcc

SEQ ID NO: 1552637 - RNA, 23 nt, Human adenovirus C
ccagcauugauggucgccccguc

SEQ ID NO: 1552638 - RNA, 20 nt, Human adenovirus C
gguucgagucucgggccggc

SEQ ID NO: 1552639 - RNA, 17 nt, Human adenovirus C
cagcgcgagcaggcaga

SEQ ID NO: 1552640 - RNA, 21 nt, Human adenovirus C
aacagcgcgcuaccaccccag

SEQ ID NO: 1552641 - RNA, 17 nt, Human adenovirus C
ggaagacuaucugccug

SEQ ID NO: 1552642 - RNA, 20 nt, Human adenovirus C
agccgcucauggcgcagcug

SEQ ID NO: 1552643 - RNA, 14 nt, Human adenovirus C
gauguuguggccca

SEQ ID NO: 1552644 - RNA, 13 nt, Human adenovirus C
ggcggcggcgcug

SEQ ID NO: 1552645 - RNA, 13 nt, Human adenovirus C
gaacaggcggcua

SEQ ID NO: 1552646 - RNA, 14 nt, Human adenovirus C
aagacauauuuccu

SEQ ID NO: 1552647 - RNA, 15 nt, Human adenovirus C
ccuugcuucccagga

SEQ ID NO: 1552648 - RNA, 16 nt, Human adenovirus C
ccgaggaagaaugcac

SEQ ID NO: 1552649 - RNA, 16 nt, Human adenovirus C
accccaacaccuacga

SEQ ID NO: 1552650 - RNA, 16 nt, Human adenovirus C
cuugaacccgcacugg

SEQ ID NO: 1552651 - RNA, 20 nt, Human adenovirus C
aaagguggcacuuaggccag

SEQ ID NO: 1552652 - RNA, 20 nt, Human adenovirus C
accugcuuuacggauuuguc

SEQ ID NO: 1552653 - RNA, 16 nt, Human adenovirus C
caacuggcaaagcaca

SEQ ID NO: 1552654 - RNA, 14 nt, Human adenovirus C
gccauugcuucuuc

SEQ ID NO: 1552655 - RNA, 21 nt, Human adenovirus C
gcaccguggcgggcggcagcg

SEQ ID NO: 1552656 - RNA, 21 nt, Human adenovirus C
gaaauuagaaucuacuggggc

SEQ ID NO: 1552657 - RNA, 18 nt, Human adenovirus C
cuugcuggaacagagcuc

SEQ ID NO: 1552658 - RNA, 15 nt, Human adenovirus C
gcgcugcggcugcug

SEQ ID NO: 1552659 - RNA, 19 nt, Human adenovirus C
agcggcaacgugcagacca

SEQ ID NO: 1552660 - RNA, 18 nt, Human adenovirus C
cggugguggaggaggcgc

SEQ ID NO: 1552661 - RNA, 16 nt, Human adenovirus C
ccaucauaccacaagc

SEQ ID NO: 1552662 - RNA, 21 nt, Human adenovirus C
cuacuuccgcagccacagugc

SEQ ID NO: 1552663 - RNA, 23 nt, Human adenovirus C
cuuccaggcgcggcggcugcugc

SEQ ID NO: 1552664 - RNA, 16 nt, Human adenovirus C
aguagcacaaaacucc

SEQ ID NO: 1552665 - RNA, 14 nt, Human adenovirus C
gugcgcggagcccg

SEQ ID NO: 1552666 - RNA, 21 nt, Human adenovirus C
cugcgguucaucccuguggac

SEQ ID NO: 1552667 - RNA, 12 nt, Human adenovirus C
agcaggacccag

SEQ ID NO: 1552668 - RNA, 19 nt, Human adenovirus C
ggcgaaucucaguggaacg

SEQ ID NO: 1552669 - RNA, 22 nt, Human adenovirus C
ggugcgggcggcgcugcagagc

SEQ ID NO: 1552670 - RNA, 13 nt, Human adenovirus C
guugcgcuuuucu

SEQ ID NO: 1552671 - RNA, 13 nt, Human adenovirus C
gcaagaccaggac

SEQ ID NO: 1552672 - RNA, 19 nt, Human adenovirus C
gcaagccaucaacaaagcc

SEQ ID NO: 1552673 - RNA, 23 nt, Human adenovirus C
cuccaccggccguggagacagug

SEQ ID NO: 1552674 - RNA, 17 nt, Human adenovirus C
cuaccggagugcugggc

SEQ ID NO: 1552675 - RNA, 17 nt, Human adenovirus C
gcucccuggucugcaau

SEQ ID NO: 1552676 - RNA, 15 nt, Human adenovirus C
cugguuuccaugagc

SEQ ID NO: 1552677 - RNA, 17 nt, Human adenovirus C
caccgucacccagcacu

SEQ ID NO: 1552678 - RNA, 15 nt, Human adenovirus C
cagccacuuaaaaaa

SEQ ID NO: 1552679 - RNA, 17 nt, Human adenovirus C
ccgaggucgagaagccu

SEQ ID NO: 1552680 - RNA, 17 nt, Human adenovirus C
gugccccccagguccag

SEQ ID NO: 1552681 - RNA, 20 nt, Human adenovirus C
cgcggcggucaccagaggcu

SEQ ID NO: 1552682 - RNA, 23 nt, Human adenovirus C
ccgagguugcuacgggcgggcug

SEQ ID NO: 1552683 - RNA, 21 nt, Human adenovirus C
gcaacgugcagaccaaccugg

SEQ ID NO: 1552684 - RNA, 16 nt, Human adenovirus C
ccuucugcagcuagcc

SEQ ID NO: 1552685 - RNA, 22 nt, Human adenovirus C
agcugaaauaugagugggugga

SEQ ID NO: 1552686 - RNA, 14 nt, Human adenovirus C
gcaccaggugcacg

SEQ ID NO: 1552687 - RNA, 16 nt, Human adenovirus C
caaauacaaaagcaga

SEQ ID NO: 1552688 - RNA, 23 nt, Human adenovirus C
cguagccugauucgggaguuuac

SEQ ID NO: 1552689 - RNA, 14 nt, Human adenovirus C
caggacccuggugc

SEQ ID NO: 1552690 - RNA, 22 nt, Human adenovirus C
agagcguggugagcgcggcgcc

SEQ ID NO: 1552691 - RNA, 20 nt, Human adenovirus C
ugacgcguuccggcagcagc

SEQ ID NO: 1552692 - RNA, 16 nt, Human adenovirus C
gucugcgagggccagc

SEQ ID NO: 1552693 - RNA, 22 nt, Human adenovirus C
acuuuccuggacguuagcgccu

SEQ ID NO: 1552694 - RNA, 12 nt, Human adenovirus C
ucucagcagcug

SEQ ID NO: 1552695 - RNA, 17 nt, Human adenovirus C
ucccugggaucaggcua

SEQ ID NO: 1552696 - RNA, 18 nt, Human adenovirus C
gcgcugcgaaaggaaagc

SEQ ID NO: 1552697 - RNA, 18 nt, Human adenovirus C
cagguacgccugcaggaa

SEQ ID NO: 1552698 - RNA, 13 nt, Human adenovirus C
cagccgccgcacc

SEQ ID NO: 1552699 - RNA, 18 nt, Human adenovirus C
ugcccggaauugcauccg

SEQ ID NO: 1552700 - RNA, 13 nt, Human adenovirus C
gacgccgccucag

SEQ ID NO: 1552701 - RNA, 17 nt, Human adenovirus C
gauacacuaacaguagu

SEQ ID NO: 1552702 - RNA, 22 nt, Human adenovirus C
uggcgaugagcagcuggcgcgc

SEQ ID NO: 1552703 - RNA, 19 nt, Human adenovirus C
gccaaccaggcagugcaaa

SEQ ID NO: 1552704 - RNA, 18 nt, Human adenovirus C
agcuccucaggggagcug

SEQ ID NO: 1552705 - RNA, 15 nt, Human adenovirus C
guacuucccagagac

SEQ ID NO: 1552706 - RNA, 19 nt, Human adenovirus C
agggccuccccuucuucuu

SEQ ID NO: 1552707 - RNA, 14 nt, Human adenovirus C
cagcuucagcuugc

SEQ ID NO: 1552708 - RNA, 16 nt, Human adenovirus C
gaaacuuccagcccau

SEQ ID NO: 1552709 - RNA, 14 nt, Human adenovirus C
aggacagggccucu

SEQ ID NO: 1552710 - RNA, 20 nt, Human adenovirus C
acccgcccgcgccugcuggg

SEQ ID NO: 1552711 - RNA, 17 nt, Human adenovirus C
gagccccuuuuuugcuu

SEQ ID NO: 1552712 - RNA, 18 nt, Human adenovirus C
ugcgggcgugacaaacag

SEQ ID NO: 1552713 - RNA, 14 nt, Human adenovirus C
acuacaugaacaag

SEQ ID NO: 1552714 - RNA, 13 nt, Human adenovirus C
ugcacgcagcacc

SEQ ID NO: 1552715 - RNA, 17 nt, Human adenovirus C
agccccccucucuggca

SEQ ID NO: 1552716 - RNA, 21 nt, Human adenovirus C
cauccauuucaaucacgugcu

SEQ ID NO: 1552717 - RNA, 15 nt, Human adenovirus C
ggcauggagacacaa

SEQ ID NO: 1552718 - RNA, 22 nt, Human adenovirus C
auugaaaaccauggaacugagg

SEQ ID NO: 1552719 - RNA, 14 nt, Human adenovirus C
gagcugcagcugcc

SEQ ID NO: 1552720 - RNA, 18 nt, Human adenovirus C
agacgacgugcuguugaa

SEQ ID NO: 1552721 - RNA, 15 nt, Human adenovirus C
uuaagggugggaaag

SEQ ID NO: 1552722 - RNA, 20 nt, Human adenovirus C
agccaaaaaacccacaacuu

SEQ ID NO: 1552723 - RNA, 11 nt, Human adenovirus C
ucagcugcaac

SEQ ID NO: 1552724 - RNA, 17 nt, Human adenovirus C
uauacccacaaccuuca

SEQ ID NO: 1552725 - RNA, 19 nt, Human adenovirus C
gauguggcaucccugaacu

SEQ ID NO: 1552726 - RNA, 13 nt, Human adenovirus C
ccuggccucuggc

SEQ ID NO: 1552727 - RNA, 22 nt, Human adenovirus C
uucaacuacaccgucaagaaaa

SEQ ID NO: 1552728 - RNA, 14 nt, Human adenovirus C
cauggugauaaaac

SEQ ID NO: 1552729 - RNA, 15 nt, Human adenovirus C
ccaccgugcagcuga

SEQ ID NO: 1552730 - RNA, 13 nt, Human adenovirus C
uucaccuggcccg

SEQ ID NO: 1552731 - RNA, 20 nt, Human adenovirus C
acccgcaccaggugcagacc

SEQ ID NO: 1552732 - RNA, 18 nt, Human adenovirus C
ucacuuggugcuggccug

SEQ ID NO: 1552733 - RNA, 17 nt, Human adenovirus C
cuaucauugugcucaac

SEQ ID NO: 1552734 - RNA, 19 nt, Human adenovirus C
ccagcaauaugagcggugg

SEQ ID NO: 1552735 - RNA, 14 nt, Human adenovirus C
accauuaagaacua

SEQ ID NO: 1552736 - RNA, 18 nt, Human adenovirus C
cuggaaaaguccacccaa

SEQ ID NO: 1552737 - RNA, 17 nt, Human adenovirus C
aggcaucgcagcuaaau

SEQ ID NO: 1552738 - RNA, 12 nt, Human adenovirus C
cauuaacaugga

SEQ ID NO: 1552739 - RNA, 21 nt, Human adenovirus C
acuacuugaaagugggcaggc

SEQ ID NO: 1552740 - RNA, 22 nt, Human adenovirus C
ccaauugcaagccaucaacaaa

SEQ ID NO: 1552741 - RNA, 17 nt, Human adenovirus C
guagaugauccagucgu

SEQ ID NO: 1552742 - RNA, 18 nt, Human adenovirus C
ugucauacuuauccuguc

SEQ ID NO: 1552743 - RNA, 17 nt, Human adenovirus C
caccuuucgccagggcu

SEQ ID NO: 1552744 - RNA, 19 nt, Human adenovirus C
ccccaaaaguuuuuugcca

SEQ ID NO: 1552745 - RNA, 14 nt, Human adenovirus C
cagauauggcccuc

SEQ ID NO: 1552746 - RNA, 13 nt, Human adenovirus C
aaaccgggccucc

SEQ ID NO: 1552747 - RNA, 18 nt, Human adenovirus C
gaugacgccauugacgcg

SEQ ID NO: 1552748 - RNA, 12 nt, Human adenovirus C
gucgccagcccg

SEQ ID NO: 1552749 - RNA, 13 nt, Human adenovirus C
cggcggcagaaga

SEQ ID NO: 1552750 - RNA, 21 nt, Human adenovirus C
acaugcuaccucuuugagccc

SEQ ID NO: 1552751 - RNA, 15 nt, Human adenovirus C
uacauugcccaggaa

SEQ ID NO: 1552752 - RNA, 16 nt, Human adenovirus C
acccaccgugcagcug

SEQ ID NO: 1552753 - RNA, 16 nt, Human adenovirus C
acagucaggcagagga

SEQ ID NO: 1552754 - RNA, 19 nt, Human adenovirus C
gaagauuuuucugcugugc

SEQ ID NO: 1552755 - RNA, 20 nt, Human adenovirus C
agcgccugcaugaaagccuu

SEQ ID NO: 1552756 - RNA, 21 nt, Human adenovirus C
acuucuucuucuccuuccucu

SEQ ID NO: 1552757 - RNA, 22 nt, Human adenovirus C
gugcacgaccccuggagaggga

SEQ ID NO: 1552758 - RNA, 16 nt, Human adenovirus C
aggaugaagaagagga

SEQ ID NO: 1552759 - RNA, 20 nt, Human adenovirus C
accucaggcgcccuaacagu

SEQ ID NO: 1552760 - RNA, 18 nt, Human adenovirus C
auggccuggccucuggca

SEQ ID NO: 1552761 - RNA, 12 nt, Human adenovirus C
ccuggcgcggcu

SEQ ID NO: 1552762 - RNA, 15 nt, Human adenovirus C
gagauugagcuccac

SEQ ID NO: 1552763 - RNA, 17 nt, Human adenovirus C
ggccuccccuucuucuu

SEQ ID NO: 1552764 - RNA, 16 nt, Human adenovirus C
cuuuccaagauggcua

SEQ ID NO: 1552765 - RNA, 20 nt, Human adenovirus C
gccuccgcgguaccugcggc

SEQ ID NO: 1552766 - RNA, 15 nt, Human adenovirus C
agcaugauaaauaug

SEQ ID NO: 1552767 - RNA, 22 nt, Human adenovirus C
uccgggcugcgcgcuggccagg

SEQ ID NO: 1552768 - RNA, 13 nt, Human adenovirus C
gcagcacaggcca

SEQ ID NO: 1552769 - RNA, 13 nt, Human adenovirus C
ccuccucccuccu

SEQ ID NO: 1552770 - RNA, 22 nt, Human adenovirus C
cugugguugcuucaugcuagug

SEQ ID NO: 1552771 - RNA, 16 nt, Human adenovirus C
cccaggauggcaccca

SEQ ID NO: 1552772 - RNA, 15 nt, Human adenovirus C
cacuuggugcuggcc

SEQ ID NO: 1552773 - RNA, 20 nt, Human adenovirus C
cggcuauuaccaccacaccu

SEQ ID NO: 1552774 - RNA, 15 nt, Human adenovirus C
ggcccgcggugaugc

SEQ ID NO: 1552775 - RNA, 13 nt, Human adenovirus C
cgcguccaggcca

SEQ ID NO: 1552776 - RNA, 14 nt, Human adenovirus C
gguguaagcuucua

SEQ ID NO: 1552777 - RNA, 13 nt, Human adenovirus C
ggcgcgcccgcca

SEQ ID NO: 1552778 - RNA, 17 nt, Human adenovirus C
augcgagccgaucggga

SEQ ID NO: 1552779 - RNA, 20 nt, Human adenovirus C
ugagcgugagccggcggcgc

SEQ ID NO: 1552780 - RNA, 14 nt, Human adenovirus C
caagaaaaacacca

SEQ ID NO: 1552781 - RNA, 23 nt, Human adenovirus C
cuaauggagaacuccucacuuaa

SEQ ID NO: 1552782 - RNA, 14 nt, Human adenovirus C
cgcguccaggccag

SEQ ID NO: 1552783 - RNA, 16 nt, Human adenovirus C
cgagauugagcuccac

SEQ ID NO: 1552784 - RNA, 18 nt, Human adenovirus C
uugcugcgcccacaccua

SEQ ID NO: 1552785 - RNA, 21 nt, Human adenovirus C
uggcgaaaagcguccgcggcc

SEQ ID NO: 1552786 - RNA, 13 nt, Human adenovirus C
caaaggugucccu

SEQ ID NO: 1552787 - RNA, 18 nt, Human adenovirus C
gucccagcguuugacgcu

SEQ ID NO: 1552788 - RNA, 16 nt, Human adenovirus C
aggcuacagaggaggc

SEQ ID NO: 1552789 - RNA, 21 nt, Human adenovirus C
uuccuccggaaacagggacga

SEQ ID NO: 1552790 - RNA, 20 nt, Human adenovirus C
aauuaaguauaugagcaauu

SEQ ID NO: 1552791 - RNA, 22 nt, Human adenovirus C
gcaaccuaaaggagcugcagaa

SEQ ID NO: 1552792 - RNA, 17 nt, Human adenovirus C
guuccugagcagcugcg

SEQ ID NO: 1552793 - RNA, 16 nt, Human adenovirus C
ugccuuuuacugcugc

SEQ ID NO: 1552794 - RNA, 21 nt, Human adenovirus C
aucagcuucggcgcacgcugg

SEQ ID NO: 1552795 - RNA, 11 nt, Human adenovirus C
gagaggccugu

SEQ ID NO: 1552796 - RNA, 16 nt, Human adenovirus C
aacaaagucaaacaua

SEQ ID NO: 1552797 - RNA, 16 nt, Human adenovirus C
cuacaacguagcucag

SEQ ID NO: 1552798 - RNA, 14 nt, Human adenovirus C
caccgcccgcagca

SEQ ID NO: 1552799 - RNA, 14 nt, Human adenovirus C
caaacagaucugcg

SEQ ID NO: 1552800 - RNA, 13 nt, Human adenovirus C
gucgccaccgccg

SEQ ID NO: 1552801 - RNA, 19 nt, Human adenovirus C
cugcgcgagauugagcucc

SEQ ID NO: 1552802 - RNA, 14 nt, Human adenovirus C
gaaucuggcgccuc

SEQ ID NO: 1552803 - RNA, 15 nt, Human adenovirus C
gacguacuucagccu

SEQ ID NO: 1552804 - RNA, 14 nt, Human adenovirus C
cuggugcugccaac

SEQ ID NO: 1552805 - RNA, 20 nt, Human adenovirus C
cuccacgcuggaagccaugc

SEQ ID NO: 1552806 - RNA, 15 nt, Human adenovirus C
gcggcugcuguugcu

SEQ ID NO: 1552807 - RNA, 20 nt, Human adenovirus C
aagagguaguugaggguggu

SEQ ID NO: 1552808 - RNA, 18 nt, Human adenovirus C
uggagaugcgggccauga

SEQ ID NO: 1552809 - RNA, 20 nt, Human adenovirus C
gguagcaccacugcagagcu

SEQ ID NO: 1552810 - RNA, 15 nt, Human adenovirus C
gagggcgagggccug

SEQ ID NO: 1552811 - RNA, 15 nt, Human adenovirus C
cgcggcguaagcggu

SEQ ID NO: 1552812 - RNA, 18 nt, Human adenovirus C
ugcaacaagaaaacagcg

SEQ ID NO: 1552813 - RNA, 17 nt, Human adenovirus C
cccuguggaccgcgagg

SEQ ID NO: 1552814 - RNA, 14 nt, Human adenovirus C
guugccgcuggacg

SEQ ID NO: 1552815 - RNA, 13 nt, Human adenovirus C
cagucaggcagag

SEQ ID NO: 1552816 - RNA, 21 nt, Human adenovirus C
ugacugacuuugcuuuccuga

SEQ ID NO: 1552817 - RNA, 18 nt, Human adenovirus C
guugucaagcuugguggc

SEQ ID NO: 1552818 - RNA, 16 nt, Human adenovirus C
gcgcaaaaucaaagaa

SEQ ID NO: 1552819 - RNA, 19 nt, Human adenovirus C
cggaagacuaucugccuga

SEQ ID NO: 1552820 - RNA, 13 nt, Human adenovirus C
aacagguggagcu

SEQ ID NO: 1552821 - RNA, 19 nt, Human adenovirus C
acacccggcgccagcaccu

SEQ ID NO: 1552822 - RNA, 20 nt, Human adenovirus C
cgcgggcacuaccgcgcgcc

SEQ ID NO: 1552823 - RNA, 18 nt, Human adenovirus C
caaagggcccuggcuggc

SEQ ID NO: 1552824 - RNA, 13 nt, Human adenovirus C
ggcgcgcggaaag

SEQ ID NO: 1552825 - RNA, 17 nt, Human adenovirus C
acucggcagacgacagc

SEQ ID NO: 1552826 - RNA, 17 nt, Human adenovirus C
acgugcccaucuccauc

SEQ ID NO: 1552827 - RNA, 13 nt, Human adenovirus C
agcgagugguggc

SEQ ID NO: 1552828 - RNA, 17 nt, Human adenovirus C
aggccgugagcgugagc

SEQ ID NO: 1552829 - RNA, 17 nt, Human adenovirus C
cucgcguccaggccagc

SEQ ID NO: 1552830 - RNA, 19 nt, Human adenovirus C
ucaauguuggcacaacaca

SEQ ID NO: 1552831 - RNA, 13 nt, Human adenovirus C
gaggacuaccacg

SEQ ID NO: 1552832 - RNA, 15 nt, Human adenovirus C
ccacucgacacggca

SEQ ID NO: 1552833 - RNA, 15 nt, Human adenovirus C
ggcgggagcuccugc

SEQ ID NO: 1552834 - RNA, 23 nt, Human adenovirus C
aggcuaauggcaauggcucaggc

SEQ ID NO: 1552835 - RNA, 20 nt, Human adenovirus C
acaauauuggcuaccagggc

SEQ ID NO: 1552836 - RNA, 18 nt, Human adenovirus C
uugcaauguuacauuuaa

SEQ ID NO: 1552837 - RNA, 19 nt, Human adenovirus C
cuaggucacuugcugacac

SEQ ID NO: 1552838 - RNA, 17 nt, Human adenovirus C
cgccagcccccaccauc

SEQ ID NO: 1552839 - RNA, 16 nt, Human adenovirus C
guuuaaggaaccagcu

SEQ ID NO: 1552840 - RNA, 15 nt, Human adenovirus C
auccucaucugcagc

SEQ ID NO: 1552841 - RNA, 15 nt, Human adenovirus C
ggugagcuccucagg

SEQ ID NO: 1552842 - RNA, 11 nt, Human adenovirus C
aucacaaaagc

SEQ ID NO: 1552843 - RNA, 15 nt, Human adenovirus C
cgacuggcgccaggu

SEQ ID NO: 1552844 - RNA, 18 nt, Human adenovirus C
ggccugcgcgugcccgug

SEQ ID NO: 1552845 - RNA, 17 nt, Human adenovirus C
ucgaugacuugcaagag

SEQ ID NO: 1552846 - RNA, 17 nt, Human adenovirus C
ucuggugacuuggcacc

SEQ ID NO: 1552847 - RNA, 16 nt, Human adenovirus C
gcaugcccccaugggc

SEQ ID NO: 1552848 - RNA, 20 nt, Human adenovirus C
ccguggagcuugagugcaug

SEQ ID NO: 1552849 - RNA, 13 nt, Human adenovirus C
uggccuuugccug

SEQ ID NO: 1552850 - RNA, 22 nt, Human adenovirus C
agcgaggaggagcgcaucuugc

SEQ ID NO: 1552851 - RNA, 23 nt, Human adenovirus C
uccgccgaacuucauaaccagca

SEQ ID NO: 1552852 - RNA, 21 nt, Human adenovirus C
guaguagucuugcaugagccu

SEQ ID NO: 1552853 - RNA, 16 nt, Human adenovirus C
cggcggugcgggcggc

SEQ ID NO: 1552854 - RNA, 15 nt, Human adenovirus C
gagcaggucuacugg

SEQ ID NO: 1552855 - RNA, 15 nt, Human adenovirus C
cagcagccgcaggcc

SEQ ID NO: 1552856 - RNA, 13 nt, Human adenovirus C
ggcacuaccugga

SEQ ID NO: 1552857 - RNA, 13 nt, Human adenovirus C
ugccgaggaugaa

SEQ ID NO: 1552858 - RNA, 21 nt, Human adenovirus C
gacagggcccagucugcaaga

SEQ ID NO: 1552859 - RNA, 16 nt, Human adenovirus C
ucgcuuacuaaggaca

SEQ ID NO: 1552860 - RNA, 16 nt, Human adenovirus C
uggagccugggcugga

SEQ ID NO: 1552861 - RNA, 14 nt, Human adenovirus C
ugaggguccugugu

SEQ ID NO: 1552862 - RNA, 17 nt, Human adenovirus C
gagaguucgacagaauc

SEQ ID NO: 1552863 - RNA, 13 nt, Human adenovirus C
ccagaggugcuug

SEQ ID NO: 1552864 - RNA, 19 nt, Human adenovirus C
caauucuucucaaauacua

SEQ ID NO: 1552865 - RNA, 20 nt, Human adenovirus C
auggaucuuaugccaggccu

SEQ ID NO: 1552866 - RNA, 23 nt, Human adenovirus C
cuccugcgccguagcgccauugc

SEQ ID NO: 1552867 - RNA, 14 nt, Human adenovirus C
cugcagccuccgcc

SEQ ID NO: 1552868 - RNA, 16 nt, Human adenovirus C
accagcaugaagggca

SEQ ID NO: 1552869 - RNA, 19 nt, Human adenovirus C
cugcaccugcgugagggua

SEQ ID NO: 1552870 - RNA, 15 nt, Human adenovirus C
guggugcugcagcag

SEQ ID NO: 1552871 - RNA, 15 nt, Human adenovirus C
gcugaagcgcugccg

SEQ ID NO: 1552872 - RNA, 22 nt, Human adenovirus C
agcccgcuugcaagcagugcag

SEQ ID NO: 1552873 - RNA, 12 nt, Human adenovirus C
caugggcgcacu

SEQ ID NO: 1552874 - RNA, 14 nt, Human adenovirus C
gcacgucgcaccgg

SEQ ID NO: 1552875 - RNA, 19 nt, Human adenovirus C
ggcgcgcugcggcugcugu

SEQ ID NO: 1552876 - RNA, 12 nt, Human adenovirus C
cuggcagugaca

SEQ ID NO: 1552877 - RNA, 21 nt, Human adenovirus C
accuggaaaaggugaugaaaa

SEQ ID NO: 1552878 - RNA, 18 nt, Human adenovirus C
ucaggcacaaccauccgc

SEQ ID NO: 1552879 - RNA, 14 nt, Human adenovirus C
ggcgcguucguccu

SEQ ID NO: 1552880 - RNA, 16 nt, Human adenovirus C
ugguuauuaugaaugu

SEQ ID NO: 1552881 - RNA, 14 nt, Human adenovirus C
acgagccagaggac

SEQ ID NO: 1552882 - RNA, 15 nt, Human adenovirus C
ggucaggcgggagcu

SEQ ID NO: 1552883 - RNA, 19 nt, Human adenovirus C
gcgcgugcccgugcgcacc

SEQ ID NO: 1552884 - RNA, 14 nt, Human adenovirus C
cagcggcagcaaca

SEQ ID NO: 1552885 - RNA, 15 nt, Human adenovirus C
ucacccuggcugugg

SEQ ID NO: 1552886 - RNA, 17 nt, Human adenovirus C
ccuuaguaugcagcgcg

SEQ ID NO: 1552887 - RNA, 21 nt, Human adenovirus C
gguacuucccagagacgccca

SEQ ID NO: 1552888 - RNA, 18 nt, Human adenovirus C
ugggauuuuuuaauuaag

SEQ ID NO: 1552889 - RNA, 22 nt, Human adenovirus C
uaaguuccucguaggugagcuc

SEQ ID NO: 1552890 - RNA, 15 nt, Human adenovirus C
ucaggcgggagcucc

SEQ ID NO: 1552891 - RNA, 18 nt, Human adenovirus C
cugagacaccgcaaagug

SEQ ID NO: 1552892 - RNA, 13 nt, Human adenovirus C
ugcaccacagaac

SEQ ID NO: 1552893 - RNA, 14 nt, Human adenovirus C
cggcgcugcagagc

SEQ ID NO: 1552894 - RNA, 19 nt, Human adenovirus C
gcuacaacguagcucagug

SEQ ID NO: 1552895 - RNA, 19 nt, Human adenovirus C
agcgcacccugaucucacu

SEQ ID NO: 1552896 - RNA, 13 nt, Human adenovirus C
gcagcaggaggag

SEQ ID NO: 1552897 - RNA, 13 nt, Human adenovirus C
uccggcagcagcc

SEQ ID NO: 1552898 - RNA, 21 nt, Human adenovirus C
gccugcuuaaaacccugcaac

SEQ ID NO: 1552899 - RNA, 15 nt, Human adenovirus C
aaagaaaaugccuug

SEQ ID NO: 1552900 - RNA, 14 nt, Human adenovirus C
cagccggugggccc

SEQ ID NO: 1552901 - RNA, 19 nt, Human adenovirus C
auguccacaaagcgguggu

SEQ ID NO: 1552902 - RNA, 13 nt, Human adenovirus C
ccugaauaacaag

SEQ ID NO: 1552903 - RNA, 14 nt, Human adenovirus C
agaucagcugggaa

SEQ ID NO: 1552904 - RNA, 23 nt, Human adenovirus C
gcccccuuugaguucgccaccac

SEQ ID NO: 1552905 - RNA, 13 nt, Human adenovirus C
cgacugcgccuga

SEQ ID NO: 1552906 - RNA, 21 nt, Human adenovirus C
ugcgcgaggccguggcgcagc

SEQ ID NO: 1552907 - RNA, 16 nt, Human adenovirus C
aggaauacugggacag

SEQ ID NO: 1552908 - RNA, 22 nt, Human adenovirus C
cugcaagaugaggguuggaagc

SEQ ID NO: 1552909 - RNA, 12 nt, Human adenovirus C
agugcggcggcg

SEQ ID NO: 1552910 - RNA, 14 nt, Human adenovirus C
gccagaaggcgcuc

SEQ ID NO: 1552911 - RNA, 16 nt, Human adenovirus C
caaaaagaagcugcag

SEQ ID NO: 1552912 - RNA, 19 nt, Human adenovirus C
ugcugccgccgccgcuccg

SEQ ID NO: 1552913 - RNA, 21 nt, Human adenovirus C
gcuucagcuugccugcuccag

SEQ ID NO: 1552914 - RNA, 20 nt, Human adenovirus C
ucaaaaugaagaucuauuaa

SEQ ID NO: 1552915 - RNA, 16 nt, Human adenovirus C
gaggcugguccugcug

SEQ ID NO: 1552916 - RNA, 13 nt, Human adenovirus C
uggacauaaacau

SEQ ID NO: 1552917 - RNA, 17 nt, Human adenovirus C
cuacuccggcacugccu

SEQ ID NO: 1552918 - RNA, 16 nt, Human adenovirus C
cggcgauuggcgccgu

SEQ ID NO: 1552919 - RNA, 19 nt, Human adenovirus C
acgagguggaacugcugca

SEQ ID NO: 1552920 - RNA, 15 nt, Human adenovirus C
ucuccgcguccggcu

SEQ ID NO: 1552921 - RNA, 13 nt, Human adenovirus C
gcaccaggugcac

SEQ ID NO: 1552922 - RNA, 17 nt, Human adenovirus C
ugaaaaguaucuuuccc

SEQ ID NO: 1552923 - RNA, 18 nt, Human adenovirus C
cgaucggcaggcucagcg

SEQ ID NO: 1552924 - RNA, 13 nt, Human adenovirus C
cauucccagcugc

SEQ ID NO: 1552925 - RNA, 16 nt, Human adenovirus C
gcccuuuggcuuuucu

SEQ ID NO: 1552926 - RNA, 19 nt, Human adenovirus C
ccggcccgaugaggccggc

SEQ ID NO: 1552927 - RNA, 20 nt, Human adenovirus C
cauauauccauaccuugaca

SEQ ID NO: 1552928 - RNA, 14 nt, Human adenovirus C
aggaggagcgcugc

SEQ ID NO: 1552929 - RNA, 16 nt, Human adenovirus C
acugggacagucaggc

SEQ ID NO: 1552930 - RNA, 23 nt, Human adenovirus C
aagaucuuuguugucaucucugu

SEQ ID NO: 1552931 - RNA, 15 nt, Human adenovirus C
uacauuccagaaagc

SEQ ID NO: 1552932 - RNA, 13 nt, Human adenovirus C
gcgcugcuccucu

SEQ ID NO: 1552933 - RNA, 23 nt, Human adenovirus C
gcagaccguaaaccugagccagg

SEQ ID NO: 1552934 - RNA, 17 nt, Human adenovirus C
gagggcauggagacaca

SEQ ID NO: 1552935 - RNA, 21 nt, Human adenovirus C
cgccucggaguaccugagccc

SEQ ID NO: 1552936 - RNA, 17 nt, Human adenovirus C
ugcagguacgccugcag

SEQ ID NO: 1552937 - RNA, 18 nt, Human adenovirus C
aacucccuuagaaccaaa

SEQ ID NO: 1552938 - RNA, 13 nt, Human adenovirus C
ugaaguuugccuu

SEQ ID NO: 1552939 - RNA, 20 nt, Human adenovirus C
ccaggcgcggcggcugcugc

SEQ ID NO: 1552940 - RNA, 20 nt, Human adenovirus C
cccucgccggcgccccagaa

SEQ ID NO: 1552941 - RNA, 21 nt, Human adenovirus C
cgccugcgucauuacccaggg

SEQ ID NO: 1552942 - RNA, 15 nt, Human adenovirus C
gccaguggcaacugg

SEQ ID NO: 1552943 - RNA, 14 nt, Human adenovirus C
cagccuaaccgccc

SEQ ID NO: 1552944 - RNA, 13 nt, Human adenovirus C
aaccuacgucacc

SEQ ID NO: 1552945 - RNA, 21 nt, Human adenovirus C
gccacacgggcggaggagaag

SEQ ID NO: 1552946 - RNA, 16 nt, Human adenovirus C
guacggcgacgaggac

SEQ ID NO: 1552947 - RNA, 21 nt, Human adenovirus C
cccuauguaagcuuguugcau

SEQ ID NO: 1552948 - RNA, 16 nt, Human adenovirus C
gccacuggcagggaca

SEQ ID NO: 1552949 - RNA, 16 nt, Human adenovirus C
gaccggcaaggcaaug

SEQ ID NO: 1552950 - RNA, 18 nt, Human adenovirus C
cccggccacuacccggac

SEQ ID NO: 1552951 - RNA, 14 nt, Human adenovirus C
agagcagcugacca

SEQ ID NO: 1552952 - RNA, 15 nt, Human adenovirus C
cauuccagcaccuuc

SEQ ID NO: 1552953 - RNA, 21 nt, Human adenovirus C
gacaccacccguguguaccuu

SEQ ID NO: 1552954 - RNA, 20 nt, Human adenovirus C
ucagccugaauaacaaguuu

SEQ ID NO: 1552955 - RNA, 22 nt, Human adenovirus C
ucauugugcucaacccacacaa

SEQ ID NO: 1552956 - RNA, 20 nt, Human adenovirus C
guuuucacuccacaggcugc

SEQ ID NO: 1552957 - RNA, 15 nt, Human adenovirus C
accaccacuggaacc

SEQ ID NO: 1552958 - RNA, 15 nt, Human adenovirus C
cuaccucgcucccac

SEQ ID NO: 1552959 - RNA, 18 nt, Human adenovirus C
ccgucuacucccagcuca

SEQ ID NO: 1552960 - RNA, 14 nt, Human adenovirus C
cuaugugcagcaga

SEQ ID NO: 1552961 - RNA, 18 nt, Human adenovirus C
gcuccuaacuccugugag

SEQ ID NO: 1552962 - RNA, 21 nt, Human adenovirus C
cagccugagcguaaccagaca

SEQ ID NO: 1552963 - RNA, 17 nt, Human adenovirus C
uuugucacuugaaaaac

SEQ ID NO: 1552964 - RNA, 14 nt, Human adenovirus C
gcaggagcgcagcu

SEQ ID NO: 1552965 - RNA, 15 nt, Human adenovirus C
caaacuuucuccaaa

SEQ ID NO: 1552966 - RNA, 20 nt, Human adenovirus C
cugacgcguuccggcagcag

SEQ ID NO: 1552967 - RNA, 22 nt, Human adenovirus C
caccgccgccgacccggcacug

SEQ ID NO: 1552968 - RNA, 13 nt, Human adenovirus C
ugcaucuguggga

SEQ ID NO: 1552969 - RNA, 14 nt, Human adenovirus C
gacgaaggcucgcg

SEQ ID NO: 1552970 - RNA, 18 nt, Human adenovirus C
accguucgcacuggggcg

SEQ ID NO: 1552971 - RNA, 12 nt, Human adenovirus C
cguggcggccgc

SEQ ID NO: 1552972 - RNA, 16 nt, Human adenovirus C
cccgccaacgugccgc

SEQ ID NO: 1552973 - RNA, 16 nt, Human adenovirus C
uacaagcuacccaccc

SEQ ID NO: 1552974 - RNA, 15 nt, Human adenovirus C
ggggccggaccuggg

SEQ ID NO: 1552975 - RNA, 22 nt, Human adenovirus C
agagcugaaaauaaaaaacagg

SEQ ID NO: 1552976 - RNA, 14 nt, Human adenovirus C
ccagacgccgcacc

SEQ ID NO: 1552977 - RNA, 15 nt, Human adenovirus C
ccaacgcggcagccg

SEQ ID NO: 1552978 - RNA, 18 nt, Human adenovirus C
cuugaucugcuggcgcag

SEQ ID NO: 1552979 - RNA, 19 nt, Human adenovirus C
aacaacgggauagagagcc

SEQ ID NO: 1552980 - RNA, 15 nt, Human adenovirus C
ccgaggagcugaggc

SEQ ID NO: 1552981 - RNA, 18 nt, Human adenovirus C
ccccgggcuggugcaguu

SEQ ID NO: 1552982 - RNA, 17 nt, Human adenovirus C
cgcccgcgccugcuggg

SEQ ID NO: 1552983 - RNA, 22 nt, Human adenovirus C
cugucgccauccugugaacgcc

SEQ ID NO: 1552984 - RNA, 14 nt, Human adenovirus C
cuauggccccccga

SEQ ID NO: 1552985 - RNA, 19 nt, Human adenovirus C
caugucgcuguccagcugc

SEQ ID NO: 1552986 - RNA, 14 nt, Human adenovirus C
agcgacgaccuggg

SEQ ID NO: 1552987 - RNA, 14 nt, Human adenovirus C
cccagggccacauc

SEQ ID NO: 1552988 - RNA, 20 nt, Human adenovirus C
aggcgcgcaacuacacgccc

SEQ ID NO: 1552989 - RNA, 17 nt, Human adenovirus C
auggagaacuccucacu

SEQ ID NO: 1552990 - RNA, 23 nt, Human adenovirus C
cucuaugugggauaugcuccagg

SEQ ID NO: 1552991 - RNA, 21 nt, Human adenovirus C
cagcggguuuaucaccgugcu

SEQ ID NO: 1552992 - RNA, 16 nt, Human adenovirus C
ggcaacgucggcggcg

SEQ ID NO: 1552993 - RNA, 18 nt, Human adenovirus C
ccagccugugaugcugga

SEQ ID NO: 1552994 - RNA, 15 nt, Human adenovirus C
gagccugggcuggag

SEQ ID NO: 1552995 - RNA, 23 nt, Human adenovirus C
acgaggaggaauacugggacagu

SEQ ID NO: 1552996 - RNA, 16 nt, Human adenovirus C
cgugacacugcagcag

SEQ ID NO: 1552997 - RNA, 18 nt, Human adenovirus C
auugaggaguucgugccu

SEQ ID NO: 1552998 - RNA, 12 nt, Human adenovirus C
cagguuccugag

SEQ ID NO: 1552999 - RNA, 16 nt, Human adenovirus C
accauccuaaaccagc

SEQ ID NO: 1553000 - RNA, 20 nt, Human adenovirus C
aaagagggagcggggggcuu

SEQ ID NO: 1553001 - RNA, 20 nt, Human adenovirus C
gcaacuagauugcaagaaaa

SEQ ID NO: 1553002 - RNA, 18 nt, Human adenovirus C
ucuuuacgccaccuucuu

SEQ ID NO: 1553003 - RNA, 22 nt, Human adenovirus C
aacucaggucaaaaaagcauuu

SEQ ID NO: 1553004 - RNA, 17 nt, Human adenovirus C
gacgugguccgugugca

SEQ ID NO: 1553005 - RNA, 12 nt, Human adenovirus C
cgagggccuggc

SEQ ID NO: 1553006 - RNA, 15 nt, Human adenovirus C
cggcgccgggcccgg

SEQ ID NO: 1553007 - RNA, 17 nt, Human adenovirus C
cuggauuuucuggccau

SEQ ID NO: 1553008 - RNA, 17 nt, Human adenovirus C
cauaguccagccccucc

SEQ ID NO: 1553009 - RNA, 18 nt, Human adenovirus C
cagcguagucugggucac

SEQ ID NO: 1553010 - RNA, 14 nt, Human adenovirus C
gggcggugggccgc

SEQ ID NO: 1553011 - RNA, 22 nt, Human adenovirus C
cagcgaaaaugaaagucacugu

SEQ ID NO: 1553012 - RNA, 23 nt, Human adenovirus C
augggcgcacucacagaccuggg

SEQ ID NO: 1553013 - RNA, 15 nt, Human adenovirus C
aacaaagucaaacau

SEQ ID NO: 1553014 - RNA, 18 nt, Human adenovirus C
cucacuuaaaaaacauua

SEQ ID NO: 1553015 - RNA, 16 nt, Human adenovirus C
acauucccagcugcua

SEQ ID NO: 1553016 - RNA, 20 nt, Human adenovirus C
aaacaauacuaaaaaacugg

SEQ ID NO: 1553017 - RNA, 22 nt, Human adenovirus C
gagggccagcuguuggggugag

SEQ ID NO: 1553018 - RNA, 17 nt, Human adenovirus C
cauacggccgccagagc

SEQ ID NO: 1553019 - RNA, 16 nt, Human adenovirus C
gaggacuaccacgccc

SEQ ID NO: 1553020 - RNA, 13 nt, Human adenovirus C
auacaaaagcaga

SEQ ID NO: 1553021 - RNA, 17 nt, Human adenovirus C
cccgggcuggugcaguu

SEQ ID NO: 1553022 - RNA, 14 nt, Human adenovirus C
ccuaaaccagcugg

SEQ ID NO: 1553023 - RNA, 22 nt, Human adenovirus C
cguucaggaauucugcccgcca

SEQ ID NO: 1553024 - RNA, 21 nt, Human adenovirus C
ccguucgcacuggggcggcga

SEQ ID NO: 1553025 - RNA, 13 nt, Human adenovirus C
cggccuggcgcaa

SEQ ID NO: 1553026 - RNA, 17 nt, Human adenovirus C
cagugagcaggaacuga

SEQ ID NO: 1553027 - RNA, 19 nt, Human adenovirus C
gcuccacuuaaacucaggc

SEQ ID NO: 1553028 - RNA, 17 nt, Human adenovirus C
gaccgauguaaggguuc

SEQ ID NO: 1553029 - RNA, 15 nt, Human adenovirus C
uucaggaauucugcc

SEQ ID NO: 1553030 - RNA, 15 nt, Human adenovirus C
acacaggcuggggcc

SEQ ID NO: 1553031 - RNA, 17 nt, Human adenovirus C
ggcuggagcccgagguc

SEQ ID NO: 1553032 - RNA, 15 nt, Human adenovirus C
uggcgauggagcgca

SEQ ID NO: 1553033 - RNA, 23 nt, Human adenovirus C
gcucccucacccgcagcugccug

SEQ ID NO: 1553034 - RNA, 16 nt, Human adenovirus C
uacuaagaaaacacau

SEQ ID NO: 1553035 - RNA, 13 nt, Human adenovirus C
gaggccucccucg

SEQ ID NO: 1553036 - RNA, 22 nt, Human adenovirus C
gacugacuuugcuuuccugagc

SEQ ID NO: 1553037 - RNA, 20 nt, Human adenovirus C
ucgagaaggaggacagccua

SEQ ID NO: 1553038 - RNA, 13 nt, Human adenovirus C
uaucccuccgggg

SEQ ID NO: 1553039 - RNA, 13 nt, Human adenovirus C
uaaugaaauagga

SEQ ID NO: 1553040 - RNA, 12 nt, Human adenovirus C
aggcccugggca

SEQ ID NO: 1553041 - RNA, 17 nt, Human adenovirus C
cgggauagagagccuag

SEQ ID NO: 1553042 - RNA, 16 nt, Human adenovirus C
ccaguccgggccagac

SEQ ID NO: 1553043 - RNA, 17 nt, Human adenovirus C
ugcaccggcggcagcgg

SEQ ID NO: 1553044 - RNA, 12 nt, Human adenovirus C
gcuggggccugc

SEQ ID NO: 1553045 - RNA, 12 nt, Human adenovirus C
aaccccuucccu

SEQ ID NO: 1553046 - RNA, 21 nt, Human adenovirus C
agccugcaaagggcccuggcu

SEQ ID NO: 1553047 - RNA, 16 nt, Human adenovirus C
gcgcacaaacgcggcc

SEQ ID NO: 1553048 - RNA, 19 nt, Human adenovirus C
aggguauaacucaccugaa

SEQ ID NO: 1553049 - RNA, 15 nt, Human adenovirus C
agcuugaucugcugg

SEQ ID NO: 1553050 - RNA, 18 nt, Human adenovirus C
gaccaguuaacggucugg

SEQ ID NO: 1553051 - RNA, 17 nt, Human adenovirus C
guccagccccuccgcgg

SEQ ID NO: 1553052 - RNA, 23 nt, Human adenovirus C
gcugggaagaaagcagguuccug

SEQ ID NO: 1553053 - RNA, 22 nt, Human adenovirus C
cagcaauaacacaggcuggggc

SEQ ID NO: 1553054 - RNA, 14 nt, Human adenovirus C
cucagcuacaagcu

SEQ ID NO: 1553055 - RNA, 17 nt, Human adenovirus C
gcauccgcccugcuccc

SEQ ID NO: 1553056 - RNA, 23 nt, Human adenovirus C
caucaaacaauacuaaaaaacug

SEQ ID NO: 1553057 - RNA, 20 nt, Human adenovirus C
aacucaccaaggccauggca

SEQ ID NO: 1553058 - RNA, 17 nt, Human adenovirus C
ccauuucaaucacgugc

SEQ ID NO: 1553059 - RNA, 15 nt, Human adenovirus C
ugaguucgccaccac

SEQ ID NO: 1553060 - RNA, 12 nt, Human adenovirus C
guagacuggaag

SEQ ID NO: 1553061 - RNA, 15 nt, Human adenovirus C
gaggagcucaaccca

SEQ ID NO: 1553062 - RNA, 17 nt, Human adenovirus C
ccugcugugcgcuuccu

SEQ ID NO: 1553063 - RNA, 23 nt, Human adenovirus C
gcaccuucgccccaggcugggga

SEQ ID NO: 1553064 - RNA, 19 nt, Human adenovirus C
ggaggagcaacagcaggag

SEQ ID NO: 1553065 - RNA, 16 nt, Human adenovirus C
caggaggaagccaggc

SEQ ID NO: 1553066 - RNA, 17 nt, Human adenovirus C
ggcagcagccgcaggcc

SEQ ID NO: 1553067 - RNA, 16 nt, Human adenovirus C
gcagauguuggccaac

SEQ ID NO: 1553068 - RNA, 16 nt, Human adenovirus C
cuggccgcgcgcggcg

SEQ ID NO: 1553069 - RNA, 15 nt, Human adenovirus C
acacaauaaauuacu

SEQ ID NO: 1553070 - RNA, 23 nt, Human adenovirus C
ccagcuuauucagcaucaccucc

SEQ ID NO: 1553071 - RNA, 20 nt, Human adenovirus C
uggaagcgacgaaugagcuc

SEQ ID NO: 1553072 - RNA, 19 nt, Human adenovirus C
gugucgaacccaggugugc

SEQ ID NO: 1553073 - RNA, 16 nt, Human adenovirus C
cacuaaagcaaggccu

SEQ ID NO: 1553074 - RNA, 17 nt, Human adenovirus C
gcuuccgcaggccaagc

SEQ ID NO: 1553075 - RNA, 20 nt, Human adenovirus C
cgggacgcuaccgcugcgca

SEQ ID NO: 1553076 - RNA, 14 nt, Human adenovirus C
ggcgcggcggcugc

SEQ ID NO: 1553077 - RNA, 21 nt, Human adenovirus C
ugacaaagagacgcucggugc

SEQ ID NO: 1553078 - RNA, 14 nt, Human adenovirus C
cguggagccugggc

SEQ ID NO: 1553079 - RNA, 16 nt, Human adenovirus C
gacaaugcagaaacac

SEQ ID NO: 1553080 - RNA, 17 nt, Human adenovirus C
aaaccgaauucuccucg

SEQ ID NO: 1553081 - RNA, 15 nt, Human adenovirus C
cagaaacuuccagcc

SEQ ID NO: 1553082 - RNA, 21 nt, Human adenovirus C
aggccguggcgcagcgugagc

SEQ ID NO: 1553083 - RNA, 18 nt, Human adenovirus C
cugcugggcgaggaggag

SEQ ID NO: 1553084 - RNA, 23 nt, Human adenovirus C
ggcacuaccuggacuuggaggag

SEQ ID NO: 1553085 - RNA, 18 nt, Human adenovirus C
ugcagggcacccuccccu

SEQ ID NO: 1553086 - RNA, 20 nt, Human adenovirus C
cucgacgaagugccaaaaau

SEQ ID NO: 1553087 - RNA, 18 nt, Human adenovirus C
uccguagauguaccugga

SEQ ID NO: 1553088 - RNA, 22 nt, Human adenovirus C
cgcgaggaggacuuugagcccg

SEQ ID NO: 1553089 - RNA, 18 nt, Human adenovirus C
cgugugcaccagccgcac

SEQ ID NO: 1553090 - RNA, 12 nt, Human adenovirus C
ccuuuugguggu

SEQ ID NO: 1553091 - RNA, 15 nt, Human adenovirus C
ccacaauguggccuc

SEQ ID NO: 1553092 - RNA, 15 nt, Human adenovirus C
cgaaaaggcuguccg

SEQ ID NO: 1553093 - RNA, 18 nt, Human adenovirus C
cucgguuagcggccugcg

SEQ ID NO: 1553094 - RNA, 17 nt, Human adenovirus C
ugcuaccuucugcagcu

SEQ ID NO: 1553095 - RNA, 14 nt, Human adenovirus C
aggcgccgccggca

SEQ ID NO: 1553096 - RNA, 23 nt, Human adenovirus C
aaaggugguagauggccuggccu

SEQ ID NO: 1553097 - RNA, 21 nt, Human adenovirus C
aggugagcuccucaggggagc

SEQ ID NO: 1553098 - RNA, 20 nt, Human adenovirus C
acugguuccuggugcagaug

SEQ ID NO: 1553099 - RNA, 12 nt, Human adenovirus C
augagcagcugg

SEQ ID NO: 1553100 - RNA, 13 nt, Human adenovirus C
gacggaugagcuc

SEQ ID NO: 1553101 - RNA, 21 nt, Human adenovirus C
agcacucggcagaaacagagg

SEQ ID NO: 1553102 - RNA, 18 nt, Human adenovirus C
cgcgcagaugggagcugu

SEQ ID NO: 1553103 - RNA, 18 nt, Human adenovirus C
cacagcggcggcagcagc

SEQ ID NO: 1553104 - RNA, 19 nt, Human adenovirus C
agcggucccauccaagguc

SEQ ID NO: 1553105 - RNA, 21 nt, Human adenovirus C
uaaguaccuuaccugguacuu

SEQ ID NO: 1553106 - RNA, 22 nt, Human adenovirus C
ggcaggggcacgucggcgccgc

SEQ ID NO: 1553107 - RNA, 17 nt, Human adenovirus C
acgccaccaacgugccc

SEQ ID NO: 1553108 - RNA, 17 nt, Human adenovirus C
ggccgucuacucccagc

SEQ ID NO: 1553109 - RNA, 17 nt, Human adenovirus C
ucuccuucgcccgccgc

SEQ ID NO: 1553110 - RNA, 18 nt, Human adenovirus C
caggcuggggccugcgcu

SEQ ID NO: 1553111 - RNA, 20 nt, Human adenovirus C
ccauuaagaacuauggcagc

SEQ ID NO: 1553112 - RNA, 15 nt, Human adenovirus C
cgcgagacugggggc

SEQ ID NO: 1553113 - RNA, 13 nt, Human adenovirus C
cauuuuaaaaaaa

SEQ ID NO: 1553114 - RNA, 19 nt, Human adenovirus C
accuguguggaagccugga

SEQ ID NO: 1553115 - RNA, 18 nt, Human adenovirus C
ugcuggaugugaccgagg

SEQ ID NO: 1553116 - RNA, 21 nt, Human adenovirus C
acuugcauggugauaaaacua

SEQ ID NO: 1553117 - RNA, 20 nt, Human adenovirus C
ucaggcgauccuaacucugc

SEQ ID NO: 1553118 - RNA, 14 nt, Human adenovirus C
ugagacgcgcgagc

SEQ ID NO: 1553119 - RNA, 15 nt, Human adenovirus C
cccucguuccagacg

SEQ ID NO: 1553120 - RNA, 20 nt, Human adenovirus C
ggcaacccuuccaggagggc

SEQ ID NO: 1553121 - RNA, 15 nt, Human adenovirus C
aucacuuggugcugg

SEQ ID NO: 1553122 - RNA, 22 nt, Human adenovirus C
gaagcgacgaaugagcuccaca

SEQ ID NO: 1553123 - RNA, 22 nt, Human adenovirus C
aaugaauguuguacagguggcu

SEQ ID NO: 1553124 - RNA, 13 nt, Human adenovirus C
agcugcugagccg

SEQ ID NO: 1553125 - RNA, 13 nt, Human adenovirus C
acauucccagcug

SEQ ID NO: 1553126 - RNA, 13 nt, Human adenovirus C
ucgcgcugcuccu

SEQ ID NO: 1553127 - RNA, 18 nt, Human adenovirus C
aacccaauccccccgccg

SEQ ID NO: 1553128 - RNA, 23 nt, Human adenovirus C
agcagguuccugagcagcugcga

SEQ ID NO: 1553129 - RNA, 15 nt, Human adenovirus C
gcggcgcggaagaga

SEQ ID NO: 1553130 - RNA, 12 nt, Human adenovirus C
uacuaccucuuu

SEQ ID NO: 1553131 - RNA, 12 nt, Human adenovirus C
gccggccuggac

SEQ ID NO: 1553132 - RNA, 19 nt, Human adenovirus C
gcgacgaaugagcuccaca

SEQ ID NO: 1553133 - RNA, 13 nt, Human adenovirus C
ggcucgcucccug

SEQ ID NO: 1553134 - RNA, 17 nt, Human adenovirus C
cuccuucagcgcgcgcu

SEQ ID NO: 1553135 - RNA, 16 nt, Human adenovirus C
ccgggccuccaacugu

SEQ ID NO: 1553136 - RNA, 15 nt, Human adenovirus C
ccuaucgagccgcac

SEQ ID NO: 1553137 - RNA, 17 nt, Human adenovirus C
cagguuggaauucuuca

SEQ ID NO: 1553138 - RNA, 21 nt, Human adenovirus C
ccgcguacgagcagacgguga

SEQ ID NO: 1553139 - RNA, 13 nt, Human adenovirus C
ccucgcucccacc

SEQ ID NO: 1553140 - RNA, 11 nt, Human adenovirus C
ugcccaggcuc

SEQ ID NO: 1553141 - RNA, 22 nt, Human adenovirus C
ucuacggcaucucgauccagca

SEQ ID NO: 1553142 - RNA, 19 nt, Human adenovirus C
aagaaagcagguuccugag

SEQ ID NO: 1553143 - RNA, 15 nt, Human adenovirus C
gucugcagcgcugcc

SEQ ID NO: 1553144 - RNA, 16 nt, Human adenovirus C
gaaugagcuccacagg

SEQ ID NO: 1553145 - RNA, 14 nt, Human adenovirus C
gcuguacauccugc

SEQ ID NO: 1553146 - RNA, 17 nt, Human adenovirus C
cgucaucccugagcagg

SEQ ID NO: 1553147 - RNA, 20 nt, Human adenovirus C
ccgcaauacagagacaggac

SEQ ID NO: 1553148 - RNA, 20 nt, Human adenovirus C
gagcucuggccguucggggu

SEQ ID NO: 1553149 - RNA, 14 nt, Human adenovirus C
caugaaaccaugcu

SEQ ID NO: 1553150 - RNA, 19 nt, Human adenovirus C
ugcggccaaucaagcaggu

SEQ ID NO: 1553151 - RNA, 20 nt, Human adenovirus C
caccgggacugggcgugcag

SEQ ID NO: 1553152 - RNA, 14 nt, Human adenovirus C
cagcggccacaccc

SEQ ID NO: 1553153 - RNA, 15 nt, Human adenovirus C
ccgugagcgugagcc

SEQ ID NO: 1553154 - RNA, 13 nt, Human adenovirus C
aggugaugaaaau

SEQ ID NO: 1553155 - RNA, 15 nt, Human adenovirus C
cucaccaaggccaug

SEQ ID NO: 1553156 - RNA, 17 nt, Human adenovirus C
ccgcauaccccgcgcca

SEQ ID NO: 1553157 - RNA, 18 nt, Human adenovirus C
aggcgacgagcggccgcc

SEQ ID NO: 1553158 - RNA, 17 nt, Human adenovirus C
cucugguaucucagccg

SEQ ID NO: 1553159 - RNA, 21 nt, Human adenovirus C
cugcgucauuacccagggcca

SEQ ID NO: 1553160 - RNA, 15 nt, Human adenovirus C
aaacacaugucuaug

SEQ ID NO: 1553161 - RNA, 21 nt, Human adenovirus C
aggguggcucgcgaaggaggc

SEQ ID NO: 1553162 - RNA, 18 nt, Human adenovirus C
gacacugcagcaggugcu

SEQ ID NO: 1553163 - RNA, 22 nt, Human adenovirus C
gacugugguugcuucaugcuag

SEQ ID NO: 1553164 - RNA, 14 nt, Human adenovirus C
agucuaagcagccg

SEQ ID NO: 1553165 - RNA, 13 nt, Human adenovirus C
uuagcauuugcag

SEQ ID NO: 1553166 - RNA, 13 nt, Human adenovirus C
uccacacaagcuc

SEQ ID NO: 1553167 - RNA, 17 nt, Human adenovirus C
gcccuugauggagggca

SEQ ID NO: 1553168 - RNA, 23 nt, Human adenovirus C
agcuacuuuaauuugacaggugg

SEQ ID NO: 1553169 - RNA, 17 nt, Human adenovirus C
cguacgugccgcggcag

SEQ ID NO: 1553170 - RNA, 14 nt, Human adenovirus C
cuuuaauuaugaaa

SEQ ID NO: 1553171 - RNA, 14 nt, Human adenovirus C
gggcccggcgcacg

SEQ ID NO: 1553172 - RNA, 15 nt, Human adenovirus C
ugauuaucgagcagg

SEQ ID NO: 1553173 - RNA, 16 nt, Human adenovirus C
cucgcugcugcagccg

SEQ ID NO: 1553174 - RNA, 13 nt, Human adenovirus C
ugcccuccgccgc

SEQ ID NO: 1553175 - RNA, 14 nt, Human adenovirus C
aucagaugaugcaa

SEQ ID NO: 1553176 - RNA, 22 nt, Human adenovirus C
aggaaccagccugugaugcugg

SEQ ID NO: 1553177 - RNA, 18 nt, Human adenovirus C
ugccauuaaaaaccuccu

SEQ ID NO: 1553178 - RNA, 15 nt, Human adenovirus C
aagaacaagagcuga

SEQ ID NO: 1553179 - RNA, 15 nt, Human adenovirus C
caccaccgccuccac

SEQ ID NO: 1553180 - RNA, 22 nt, Human adenovirus C
acggcguccggcucaccaccca

SEQ ID NO: 1553181 - RNA, 19 nt, Human adenovirus C
cagacaaugcagaaacaca

SEQ ID NO: 1553182 - RNA, 21 nt, Human adenovirus C
aaaaagaagcugcagcugccg

SEQ ID NO: 1553183 - RNA, 16 nt, Human adenovirus C
gaauggcgguaguggg

SEQ ID NO: 1553184 - RNA, 15 nt, Human adenovirus C
ggcagcaaggccugg

SEQ ID NO: 1553185 - RNA, 21 nt, Human adenovirus C
aagaaucgugaaccuguugca

SEQ ID NO: 1553186 - RNA, 21 nt, Human adenovirus C
cgccagaggagcugcugagcc

SEQ ID NO: 1553187 - RNA, 19 nt, Human adenovirus C
caguccccagguacagccc

SEQ ID NO: 1553188 - RNA, 14 nt, Human adenovirus C
ggccugacgggcgg

SEQ ID NO: 1553189 - RNA, 14 nt, Human adenovirus C
caaccguucccagc

SEQ ID NO: 1553190 - RNA, 14 nt, Human adenovirus C
caagcagguggcac

SEQ ID NO: 1553191 - RNA, 22 nt, Human adenovirus C
ugcucgaucucuuccuccugga

SEQ ID NO: 1553192 - RNA, 21 nt, Human adenovirus C
ugcgcuuuuuggaacgcgggu

SEQ ID NO: 1553193 - RNA, 20 nt, Human adenovirus C
ggcggcggaguuuggccgua

SEQ ID NO: 1553194 - RNA, 21 nt, Human adenovirus C
gaaaccgggccuccaacugug

SEQ ID NO: 1553195 - RNA, 18 nt, Human adenovirus C
aaacccaaauagcaagcc

SEQ ID NO: 1553196 - RNA, 21 nt, Human adenovirus C
agcgcaaccuaaaggagcugc

SEQ ID NO: 1553197 - RNA, 23 nt, Human adenovirus C
acgcgccaaccgcgguugugcag

SEQ ID NO: 1553198 - RNA, 21 nt, Human adenovirus C
cagcacuggaacacuaucagc

SEQ ID NO: 1553199 - RNA, 19 nt, Human adenovirus C
ugaacgcgcuccccuccgg

SEQ ID NO: 1553200 - RNA, 20 nt, Human adenovirus C
cucgaucucuuccuccugga

SEQ ID NO: 1553201 - RNA, 14 nt, Human adenovirus C
acugcuaccuucug

SEQ ID NO: 1553202 - RNA, 21 nt, Human adenovirus C
ggcgaugagcagcuggcgcgc

SEQ ID NO: 1553203 - RNA, 17 nt, Human adenovirus C
acaucucgggccaggac

SEQ ID NO: 1553204 - RNA, 13 nt, Human adenovirus C
cagaggcggcgcu

SEQ ID NO: 1553205 - RNA, 17 nt, Human adenovirus C
ggcgacgagcggccgcc

SEQ ID NO: 1553206 - RNA, 22 nt, Human adenovirus C
cacuguuggauguggacgccua

SEQ ID NO: 1553207 - RNA, 14 nt, Human adenovirus C
acgaccccuggaga

SEQ ID NO: 1553208 - RNA, 16 nt, Human adenovirus C
ggacguuagcgccuga

SEQ ID NO: 1553209 - RNA, 14 nt, Human adenovirus C
gggugguggcggug

SEQ ID NO: 1553210 - RNA, 15 nt, Human adenovirus C
uugcaagcagugcag

SEQ ID NO: 1553211 - RNA, 15 nt, Human adenovirus C
gccaagcagcuuguc

SEQ ID NO: 1553212 - RNA, 14 nt, Human adenovirus C
cucaacuaaugcaa

SEQ ID NO: 1553213 - RNA, 21 nt, Human adenovirus C
ccaguggcggcggcgcugggu

SEQ ID NO: 1553214 - RNA, 23 nt, Human adenovirus C
gcuugagacgcgcgagccugccg

SEQ ID NO: 1553215 - RNA, 17 nt, Human adenovirus C
gcagaccguaaaccuga

SEQ ID NO: 1553216 - RNA, 13 nt, Human adenovirus C
ugagcgcgggacc

SEQ ID NO: 1553217 - RNA, 14 nt, Human adenovirus C
cuuucacaguuuac

SEQ ID NO: 1553218 - RNA, 11 nt, Human adenovirus C
caggcugggga

SEQ ID NO: 1553219 - RNA, 14 nt, Human adenovirus C
agcaucgcuacaac

SEQ ID NO: 1553220 - RNA, 19 nt, Human adenovirus C
cuugcggcuggagcugccc

SEQ ID NO: 1553221 - RNA, 19 nt, Human adenovirus C
cggugcaggcggccgcugc

SEQ ID NO: 1553222 - RNA, 14 nt, Human adenovirus C
caguacuggcagcg

SEQ ID NO: 1553223 - RNA, 13 nt, Human adenovirus C
ccgccucagcuac

SEQ ID NO: 1553224 - RNA, 15 nt, Human adenovirus C
cuccagcggccacac

SEQ ID NO: 1553225 - RNA, 13 nt, Human adenovirus C
cacuaccuggacu

SEQ ID NO: 1553226 - RNA, 17 nt, Human adenovirus C
gguaccuuugagcugca

SEQ ID NO: 1553227 - RNA, 23 nt, Human adenovirus C
cacuaccggcaaccgccucagcu

SEQ ID NO: 1553228 - RNA, 17 nt, Human adenovirus C
auuuaccccccacccuu

SEQ ID NO: 1553229 - RNA, 17 nt, Human adenovirus C
caaagcccgccaagagu

SEQ ID NO: 1553230 - RNA, 21 nt, Human adenovirus C
aggaggcuaagugggaggggu

SEQ ID NO: 1553231 - RNA, 22 nt, Human adenovirus C
ggggccagcguaggguggccgg

SEQ ID NO: 1553232 - RNA, 13 nt, Human adenovirus C
cguggcugugauu

SEQ ID NO: 1553233 - RNA, 19 nt, Human adenovirus C
cgggaguuuaccaagcgcc

SEQ ID NO: 1553234 - RNA, 16 nt, Human adenovirus C
cagucaggcagaggag

SEQ ID NO: 1553235 - RNA, 13 nt, Human adenovirus C
aguaccugagccc

SEQ ID NO: 1553236 - RNA, 23 nt, Human adenovirus C
gugauugguuuauagguguaggc

SEQ ID NO: 1553237 - RNA, 21 nt, Human adenovirus C
cugucugcgagggccagcugu

SEQ ID NO: 1553238 - RNA, 13 nt, Human adenovirus C
ccacccuucuuua

SEQ ID NO: 1553239 - RNA, 14 nt, Human adenovirus C
guaggagucgcgca

SEQ ID NO: 1553240 - RNA, 14 nt, Human adenovirus C
uuagcgaaagucaa

SEQ ID NO: 1553241 - RNA, 13 nt, Human adenovirus C
acuggcugcagcc

SEQ ID NO: 1553242 - RNA, 16 nt, Human adenovirus C
caauaaaaacuaaaau

SEQ ID NO: 1553243 - RNA, 13 nt, Human adenovirus C
ucauaccacaagc

SEQ ID NO: 1553244 - RNA, 16 nt, Human adenovirus C
cucugcgugaagacga

SEQ ID NO: 1553245 - RNA, 21 nt, Human adenovirus C
uacuccggcacugccuacaac

SEQ ID NO: 1553246 - RNA, 18 nt, Human adenovirus C
uaugcuauuuggcagcca

SEQ ID NO: 1553247 - RNA, 18 nt, Human adenovirus C
uugccaggggcaggcccu

SEQ ID NO: 1553248 - RNA, 22 nt, Human adenovirus C
cgcagcgaugugccccucgcca

SEQ ID NO: 1553249 - RNA, 14 nt, Human adenovirus C
uccuggagaucucc

SEQ ID NO: 1553250 - RNA, 20 nt, Human adenovirus C
acucugacaaagcccaagaa

SEQ ID NO: 1553251 - RNA, 20 nt, Human adenovirus C
aguugccgaggaugaagaag

SEQ ID NO: 1553252 - RNA, 18 nt, Human adenovirus C
gaauuugaagagcuuuug

SEQ ID NO: 1553253 - RNA, 18 nt, Human adenovirus C
aucuccagcggccacacc

SEQ ID NO: 1553254 - RNA, 23 nt, Human adenovirus C
ccgcugcccugguguaccaggaa

SEQ ID NO: 1553255 - RNA, 15 nt, Human adenovirus C
gcggcggcugcugcg

SEQ ID NO: 1553256 - RNA, 15 nt, Human adenovirus C
ucuuccauaagggcc

SEQ ID NO: 1553257 - RNA, 17 nt, Human adenovirus C
uccugaagcaaaaccag

SEQ ID NO: 1553258 - RNA, 20 nt, Human adenovirus C
aguucgugccuucgguuuac

SEQ ID NO: 1553259 - RNA, 19 nt, Human adenovirus C
guagagggcguuggacagc

SEQ ID NO: 1553260 - RNA, 15 nt, Human adenovirus C
cagaaggcgcucgcc

SEQ ID NO: 1553261 - RNA, 20 nt, Human adenovirus C
uggcgcgcccgccagccccc

SEQ ID NO: 1553262 - RNA, 14 nt, Human adenovirus C
aggcacuaaagcaa

SEQ ID NO: 1553263 - RNA, 14 nt, Human adenovirus C
cucacucucuuccg

SEQ ID NO: 1553264 - RNA, 17 nt, Human adenovirus C
uggaucugcgccagcag

SEQ ID NO: 1553265 - RNA, 19 nt, Human adenovirus C
uacaaggaguaucagcagg

SEQ ID NO: 1553266 - RNA, 23 nt, Human adenovirus C
cagcuguuccuuauagugcagca

SEQ ID NO: 1553267 - RNA, 19 nt, Human adenovirus C
cacccaguaccgcagcugg

SEQ ID NO: 1553268 - RNA, 15 nt, Human adenovirus C
agcgcggggugcccu

SEQ ID NO: 1553269 - RNA, 18 nt, Human adenovirus C
cucugguaucucagccgc

SEQ ID NO: 1553270 - RNA, 12 nt, Human adenovirus C
aaacuacaugag

SEQ ID NO: 1553271 - RNA, 18 nt, Human adenovirus C
gcccuaucagcagccgcg

SEQ ID NO: 1553272 - RNA, 24 nt, Human adenovirus C
cuugagcaggccaacgagcgccuc

SEQ ID NO: 1553273 - RNA, 16 nt, Human adenovirus C
uaggagucgcgcagcu

SEQ ID NO: 1553274 - RNA, 17 nt, Human adenovirus C
cuggaccggcugguggg

SEQ ID NO: 1553275 - RNA, 21 nt, Human adenovirus C
cgccuucgaucucagcgcagc

SEQ ID NO: 1553276 - RNA, 13 nt, Human adenovirus C
uacaucugaccuc

SEQ ID NO: 1553277 - RNA, 19 nt, Human adenovirus C
ccagucguagcaggagcgc

SEQ ID NO: 1553278 - RNA, 20 nt, Human adenovirus C
agcaccgguggguugcugaa

SEQ ID NO: 1553279 - RNA, 23 nt, Human adenovirus C
cuccgcaauucuggaagcggugg

SEQ ID NO: 1553280 - RNA, 21 nt, Human adenovirus C
ccagaccaguagacaaggccu

SEQ ID NO: 1553281 - RNA, 22 nt, Human adenovirus C
ccaguagcacuaguauugccac

SEQ ID NO: 1553282 - RNA, 20 nt, Human adenovirus C
ugcgcuugaggcugguccug

SEQ ID NO: 1553283 - RNA, 13 nt, Human adenovirus C
aaacccaaaguca

SEQ ID NO: 1553284 - RNA, 20 nt, Human adenovirus C
cugccagcgccugcacugca

SEQ ID NO: 1553285 - RNA, 15 nt, Human adenovirus C
cagaugccgcggugc

SEQ ID NO: 1553286 - RNA, 18 nt, Human adenovirus C
cuggcgguagaggggcca

SEQ ID NO: 1553287 - RNA, 20 nt, Human adenovirus C
cucguccagacgggccaggg

SEQ ID NO: 1553288 - RNA, 17 nt, Human adenovirus C
acgggcgcaggguccuc

SEQ ID NO: 1553289 - RNA, 13 nt, Human adenovirus C
ucgccggcgcccc

SEQ ID NO: 1553290 - RNA, 23 nt, Human adenovirus C
uucuuaccucugguuuccaugag

SEQ ID NO: 1553291 - RNA, 15 nt, Human adenovirus C
aauuuccaacgugga

SEQ ID NO: 1553292 - RNA, 12 nt, Human adenovirus C
aagcagcuggcc

SEQ ID NO: 1553293 - RNA, 19 nt, Human adenovirus C
caccguuuuuacccaccca

SEQ ID NO: 1553294 - RNA, 16 nt, Human adenovirus C
gcagccucgucacugu

SEQ ID NO: 1553295 - RNA, 15 nt, Human adenovirus C
aggccgaggcagcgg

SEQ ID NO: 1553296 - RNA, 21 nt, Human adenovirus C
ugacggccugguaggcgcagc

SEQ ID NO: 1553297 - RNA, 16 nt, Human adenovirus C
gccagcgccugcacug

SEQ ID NO: 1553298 - RNA, 21 nt, Human adenovirus C
uucaucaaacaacauggaaau

SEQ ID NO: 1553299 - RNA, 22 nt, Human adenovirus C
ccuuucuaccggcacuucuucu

SEQ ID NO: 1553300 - RNA, 21 nt, Human adenovirus C
gcccaggcggcggguacagug

SEQ ID NO: 1553301 - RNA, 12 nt, Human adenovirus C
uacgucaucucc

SEQ ID NO: 1553302 - RNA, 20 nt, Human adenovirus C
accugccaccucccucccaa

SEQ ID NO: 1553303 - RNA, 22 nt, Human adenovirus C
cugcacgucuagggcgcaguag

SEQ ID NO: 1553304 - RNA, 14 nt, Human adenovirus C
agcaaugacagcac

SEQ ID NO: 1553305 - RNA, 14 nt, Human adenovirus C
gcagguggcaccgg

SEQ ID NO: 1553306 - RNA, 19 nt, Human adenovirus C
ucacgcucgcuugguccug

SEQ ID NO: 1553307 - RNA, 17 nt, Human adenovirus C
gaagccucagaagaaac

SEQ ID NO: 1553308 - RNA, 12 nt, Human adenovirus C
ugcagagccagc

SEQ ID NO: 1553309 - RNA, 20 nt, Human adenovirus C
agcucggcggugaccugcac

SEQ ID NO: 1553310 - RNA, 13 nt, Human adenovirus C
gugcagcagagcg

SEQ ID NO: 1553311 - RNA, 18 nt, Human adenovirus C
cgccuuuuagcugcaaac

SEQ ID NO: 1553312 - RNA, 18 nt, Human adenovirus C
ccacaccuacagccugag

SEQ ID NO: 1553313 - RNA, 16 nt, Human adenovirus C
ccgcgccugcugggcg

SEQ ID NO: 1553314 - RNA, 17 nt, Human adenovirus C
gauggcacccaaaaaga

SEQ ID NO: 1553315 - RNA, 21 nt, Human adenovirus C
gcgcacacguggcggccgccg

SEQ ID NO: 1553316 - RNA, 15 nt, Human adenovirus C
aacauucccagcugc

SEQ ID NO: 1553317 - RNA, 14 nt, Human adenovirus C
cgccugcugggcga

SEQ ID NO: 1553318 - RNA, 23 nt, Human adenovirus C
cuccagagcgcccuccaccuuca

SEQ ID NO: 1553319 - RNA, 20 nt, Human adenovirus C
accaaccuggaccggcuggu

SEQ ID NO: 1553320 - RNA, 15 nt, Human adenovirus C
gguucugcagagcuc

SEQ ID NO: 1553321 - RNA, 22 nt, Human adenovirus C
cggauagcaagacucugacaaa

SEQ ID NO: 1553322 - RNA, 12 nt, Human adenovirus C
gccgugaacccc

SEQ ID NO: 1553323 - RNA, 13 nt, Human adenovirus C
agugcugggccag

SEQ ID NO: 1553324 - RNA, 19 nt, Human adenovirus C
caaccuaaaggagcugcag

SEQ ID NO: 1553325 - RNA, 22 nt, Human adenovirus C
gcaccaccggcggcggcgcgcg

SEQ ID NO: 1553326 - RNA, 14 nt, Human adenovirus C
uuugacucuucugu

SEQ ID NO: 1553327 - RNA, 17 nt, Human adenovirus C
gccccguccugcccgca

SEQ ID NO: 1553328 - RNA, 15 nt, Human adenovirus C
gucagcguagucugg

SEQ ID NO: 1553329 - RNA, 14 nt, Human adenovirus C
cauaaaaaaaucca

SEQ ID NO: 1553330 - RNA, 17 nt, Human adenovirus C
gcucugcaacaagaaaa

SEQ ID NO: 1553331 - RNA, 19 nt, Human adenovirus C
cacuaccgcgcgcccuggg

SEQ ID NO: 1553332 - RNA, 14 nt, Human adenovirus C
uuugcuuuccugag

SEQ ID NO: 1553333 - RNA, 18 nt, Human adenovirus C
cuucucccacccccacug

SEQ ID NO: 1553334 - RNA, 14 nt, Human adenovirus C
ccgccucagcuaca

SEQ ID NO: 1553335 - RNA, 13 nt, Human adenovirus C
cauuacccagggc

SEQ ID NO: 1553336 - RNA, 18 nt, Human adenovirus C
ggaggauaggguggccuu

SEQ ID NO: 1553337 - RNA, 14 nt, Human adenovirus C
ccaucugagcgggg

SEQ ID NO: 1553338 - RNA, 12 nt, Human adenovirus C
cagccgcagcgc

SEQ ID NO: 1553339 - RNA, 15 nt, Human adenovirus C
cuccacgccuuugcc

SEQ ID NO: 1553340 - RNA, 15 nt, Human adenovirus C
ucgugcgcaccaccg

SEQ ID NO: 1553341 - RNA, 22 nt, Human adenovirus C
agcggcaacccuuccaggaggg

SEQ ID NO: 1553342 - RNA, 16 nt, Human adenovirus C
acccggcacugccgcc

SEQ ID NO: 1553343 - RNA, 20 nt, Human adenovirus C
acggccgccagagcuuccac

SEQ ID NO: 1553344 - RNA, 11 nt, Human adenovirus C
aacccuucagg

SEQ ID NO: 1553345 - RNA, 20 nt, Human adenovirus C
ugaaaugugcgauauuacca

SEQ ID NO: 1553346 - RNA, 20 nt, Human adenovirus C
gcccuggaggcagcuggggc

SEQ ID NO: 1553347 - RNA, 13 nt, Human adenovirus C
cagcuguuggggu

SEQ ID NO: 1553348 - RNA, 20 nt, Human adenovirus C
uacaagcuacccacccagcg

SEQ ID NO: 1553349 - RNA, 20 nt, Human adenovirus C
uuguccuccgggcacagcag

SEQ ID NO: 1553350 - RNA, 13 nt, Human adenovirus C
cagaggacagcaa

SEQ ID NO: 1553351 - RNA, 16 nt, Human adenovirus C
guuggacgcuggaaga

SEQ ID NO: 1553352 - RNA, 20 nt, Human adenovirus C
gccgcaccgugcgcuuaccu

SEQ ID NO: 1553353 - RNA, 16 nt, Human adenovirus C
uuuaccccccacccuu

SEQ ID NO: 1553354 - RNA, 17 nt, Human adenovirus C
ggcgcaggcggcggcaa

SEQ ID NO: 1553355 - RNA, 21 nt, Human adenovirus C
gugcuuguagguuaccucugc

SEQ ID NO: 1553356 - RNA, 13 nt, Human adenovirus C
gccgaaaacaggg

SEQ ID NO: 1553357 - RNA, 20 nt, Human adenovirus C
cacagaacaugaaaagcuua

SEQ ID NO: 1553358 - RNA, 17 nt, Human adenovirus C
caacccuuccaggaggg

SEQ ID NO: 1553359 - RNA, 15 nt, Human adenovirus C
ugcaaucccugaagc

SEQ ID NO: 1553360 - RNA, 12 nt, Human adenovirus C
ggccuacccgca

SEQ ID NO: 1553361 - RNA, 12 nt, Human adenovirus C
ccguucccagca

SEQ ID NO: 1553362 - RNA, 14 nt, Human adenovirus C
cggucaccagaggc

SEQ ID NO: 1553363 - RNA, 15 nt, Human adenovirus C
gcuggaagccaugcu

SEQ ID NO: 1553364 - RNA, 17 nt, Human adenovirus C
uucagccugaauaacaa

SEQ ID NO: 1553365 - RNA, 23 nt, Human adenovirus C
gaccacuuacuggcugcagccag

SEQ ID NO: 1553366 - RNA, 18 nt, Human adenovirus C
gagcagcggcagacaugc

SEQ ID NO: 1553367 - RNA, 13 nt, Human adenovirus C
cccgugggcucgu

SEQ ID NO: 1553368 - RNA, 21 nt, Human adenovirus C
caucaugucgcugacugcgcg

SEQ ID NO: 1553369 - RNA, 14 nt, Human adenovirus C
ccagacacacaucu

SEQ ID NO: 1553370 - RNA, 15 nt, Human adenovirus C
ggcggggaccacaga

SEQ ID NO: 1553371 - RNA, 13 nt, Human adenovirus C
cuugccuaccacu

SEQ ID NO: 1553372 - RNA, 14 nt, Human adenovirus C
aauuaccugggcgg

SEQ ID NO: 1553373 - RNA, 17 nt, Human adenovirus C
ggaacgaagcugaugcu

SEQ ID NO: 1553374 - RNA, 14 nt, Human adenovirus C
cauaaaagaagcaa

SEQ ID NO: 1553375 - RNA, 15 nt, Human adenovirus C
gccagaaggcgcucg

SEQ ID NO: 1553376 - RNA, 22 nt, Human adenovirus C
cagacuauuuuuuccagaccag

SEQ ID NO: 1553377 - RNA, 21 nt, Human adenovirus C
cacgggcuguacauccugcac

SEQ ID NO: 1553378 - RNA, 15 nt, Human adenovirus C
caggucaucgcgccg

SEQ ID NO: 1553379 - RNA, 18 nt, Human adenovirus C
ggccagcacgaaggaggc

SEQ ID NO: 1553380 - RNA, 17 nt, Human adenovirus C
cgcauagccgggucagg

SEQ ID NO: 1553381 - RNA, 15 nt, Human adenovirus C
cagggcaaccugggc

SEQ ID NO: 1553382 - RNA, 15 nt, Human adenovirus C
ggaauacaacauggc

SEQ ID NO: 1553383 - RNA, 23 nt, Human adenovirus C
auccugccgugccaaccgcagcc

SEQ ID NO: 1553384 - RNA, 16 nt, Human adenovirus C
auacuuuccaggagau

SEQ ID NO: 1553385 - RNA, 18 nt, Human adenovirus C
uguccuaucaacucuugc

SEQ ID NO: 1553386 - RNA, 12 nt, Human adenovirus C
cuggaccucccg

SEQ ID NO: 1553387 - RNA, 17 nt, Human adenovirus C
gccauuuuuucuggggu

SEQ ID NO: 1553388 - RNA, 13 nt, Human adenovirus C
ccugcugcacgca

SEQ ID NO: 1553389 - RNA, 22 nt, Human adenovirus C
cagagcaaaaaguccgugcgcu

SEQ ID NO: 1553390 - RNA, 21 nt, Human adenovirus C
cauaaacacgcuggacauaaa

SEQ ID NO: 1553391 - RNA, 18 nt, Human adenovirus C
gcuggugggggaugugcg

SEQ ID NO: 1553392 - RNA, 16 nt, Human adenovirus C
gacccuggugcugcca

SEQ ID NO: 1553393 - RNA, 15 nt, Human adenovirus C
uucugcccgccaccu

SEQ ID NO: 1553394 - RNA, 19 nt, Human adenovirus C
ggugggccgcggggguguc

SEQ ID NO: 1553395 - RNA, 13 nt, Human adenovirus C
aguacgagccaga

SEQ ID NO: 1553396 - RNA, 21 nt, Human adenovirus C
cagugcaacaugaccaaggac

SEQ ID NO: 1553397 - RNA, 17 nt, Human adenovirus C
cucgcucccaccaugcg

SEQ ID NO: 1553398 - RNA, 15 nt, Human adenovirus C
ccuucagcuggggcu

SEQ ID NO: 1553399 - RNA, 24 nt, Human adenovirus C
uccaugcccuucucccacgcagac

SEQ ID NO: 1553400 - RNA, 17 nt, Human adenovirus C
cuuagauuugaccaaaa

SEQ ID NO: 1553401 - RNA, 15 nt, Human adenovirus C
gcgcccacaccuaca

SEQ ID NO: 1553402 - RNA, 22 nt, Human adenovirus C
agauuauccaaaaccucaaaau

SEQ ID NO: 1553403 - RNA, 17 nt, Human adenovirus C
accgucaagaaaaacac

SEQ ID NO: 1553404 - RNA, 13 nt, Human adenovirus C
accgucacccagc

SEQ ID NO: 1553405 - RNA, 15 nt, Human adenovirus C
augucgcccucuucg

SEQ ID NO: 1553406 - RNA, 18 nt, Human adenovirus C
ccgccgccacccacggac

SEQ ID NO: 1553407 - RNA, 16 nt, Human adenovirus C
auuuccaggggcuggu

SEQ ID NO: 1553408 - RNA, 14 nt, Human adenovirus C
aagcgcgcuggagc

SEQ ID NO: 1553409 - RNA, 16 nt, Human adenovirus C
uuugccacacaaccuu

SEQ ID NO: 1553410 - RNA, 14 nt, Human adenovirus C
ccagaacgaccaca

SEQ ID NO: 1553411 - RNA, 16 nt, Human adenovirus C
gucuugucaugccugg

SEQ ID NO: 1553412 - RNA, 15 nt, Human adenovirus C
gcugggaugggugca

SEQ ID NO: 1553413 - RNA, 16 nt, Human adenovirus C
cugccgccgccgccac

SEQ ID NO: 1553414 - RNA, 22 nt, Human adenovirus C
cgacgcggcgguugaucuccug

SEQ ID NO: 1553415 - RNA, 19 nt, Human adenovirus C
caagaacaagagcugaaaa

SEQ ID NO: 1553416 - RNA, 14 nt, Human adenovirus C
cugcagcacagcac

SEQ ID NO: 1553417 - RNA, 22 nt, Human adenovirus C
aauuccuccggaaacagggacg

SEQ ID NO: 1553418 - RNA, 14 nt, Human adenovirus C
ccuugccgugcuug

SEQ ID NO: 1553419 - RNA, 21 nt, Human adenovirus C
ccaccgcagaauaagccacac

SEQ ID NO: 1553420 - RNA, 18 nt, Human adenovirus C
acgggcggcaugcgucgu

SEQ ID NO: 1553421 - RNA, 21 nt, Human adenovirus C
gccuucccccguaacauccug

SEQ ID NO: 1553422 - RNA, 16 nt, Human adenovirus C
cugggaguugcgcgcc

SEQ ID NO: 1553423 - RNA, 14 nt, Human adenovirus C
uggacaccucccac

SEQ ID NO: 1553424 - RNA, 18 nt, Human adenovirus C
cggcugacgcggcggcag

SEQ ID NO: 1553425 - RNA, 21 nt, Human adenovirus C
agcuaaagcgggucaaaaaga

SEQ ID NO: 1553426 - RNA, 15 nt, Human adenovirus C
cuggccccgcgacac

SEQ ID NO: 1553427 - RNA, 13 nt, Human adenovirus C
cccggcgccagca

SEQ ID NO: 1553428 - RNA, 14 nt, Human adenovirus C
gcucgccugcgcca

SEQ ID NO: 1553429 - RNA, 13 nt, Human adenovirus C
cuugaucugcugg

SEQ ID NO: 1553430 - RNA, 12 nt, Human adenovirus C
gaccccauggca

SEQ ID NO: 1553431 - RNA, 22 nt, Human adenovirus C
gcaugaagggcacgagcugcuu

SEQ ID NO: 1553432 - RNA, 20 nt, Human adenovirus C
gcuggaagccaugcucagaa

SEQ ID NO: 1553433 - RNA, 13 nt, Human adenovirus C
ccgaacagggcgg

SEQ ID NO: 1553434 - RNA, 22 nt, Human adenovirus C
uccgcgcgcggcggucggagcu

SEQ ID NO: 1553435 - RNA, 15 nt, Human adenovirus C
ccgcagccacagugc

SEQ ID NO: 1553436 - RNA, 17 nt, Human adenovirus C
cuccugaaucuggcgcc

SEQ ID NO: 1553437 - RNA, 21 nt, Human adenovirus C
gcaccccuauucgacaccacc

SEQ ID NO: 1553438 - RNA, 15 nt, Human adenovirus C
ucucaaaagcgggca

SEQ ID NO: 1553439 - RNA, 21 nt, Human adenovirus C
cauaaaguugcgugugaugcg

SEQ ID NO: 1553440 - RNA, 15 nt, Human adenovirus C
ucuuauuaaaaccau

SEQ ID NO: 1553441 - RNA, 22 nt, Human adenovirus C
acuacauggacaaaagaugaaa

SEQ ID NO: 1553442 - RNA, 18 nt, Human adenovirus C
cgagagccggccuggacc

SEQ ID NO: 1553443 - RNA, 20 nt, Human adenovirus C
ccgugcugaaacgcagcauc

SEQ ID NO: 1553444 - RNA, 21 nt, Human adenovirus C
gccaaaaaucuuugagggucu

SEQ ID NO: 1553445 - RNA, 14 nt, Human adenovirus C
gggccggaccuggg

SEQ ID NO: 1553446 - RNA, 19 nt, Human adenovirus C
acgcugcccgagggcaacu

SEQ ID NO: 1553447 - RNA, 15 nt, Human adenovirus C
cuuaaugaccagaca

SEQ ID NO: 1553448 - RNA, 20 nt, Human adenovirus C
gaggccauaggucaggcgca

SEQ ID NO: 1553449 - RNA, 13 nt, Human adenovirus C
gacuggaagaugu

SEQ ID NO: 1553450 - RNA, 23 nt, Human adenovirus C
uugacaugaccaugaagaucugg

SEQ ID NO: 1553451 - RNA, 16 nt, Human adenovirus C
uacacaggguugcagc

SEQ ID NO: 1553452 - RNA, 17 nt, Human adenovirus C
ccgcggcgacaggucag

SEQ ID NO: 1553453 - RNA, 23 nt, Human adenovirus C
gcacggcguccggcucaccaccc

SEQ ID NO: 1553454 - RNA, 17 nt, Human adenovirus C
ggugaaggucagcugca

SEQ ID NO: 1553455 - RNA, 20 nt, Human adenovirus C
agacucuguuuggauuuuga

SEQ ID NO: 1553456 - RNA, 19 nt, Human adenovirus C
ccgacggaggagcaacagc

SEQ ID NO: 1553457 - RNA, 20 nt, Human adenovirus C
acuaaaccuaugauacuuac

SEQ ID NO: 1553458 - RNA, 20 nt, Human adenovirus C
gcuccugucgccauccugug

SEQ ID NO: 1553459 - RNA, 19 nt, Human adenovirus C
uacuggucguugccagaca

SEQ ID NO: 1553460 - RNA, 17 nt, Human adenovirus C
cuugggcgcgagaaaua

SEQ ID NO: 1553461 - RNA, 19 nt, Human adenovirus C
ugcaagucuagcgccugcu

SEQ ID NO: 1553462 - RNA, 14 nt, Human adenovirus C
cagcgccaaggcua

SEQ ID NO: 1553463 - RNA, 23 nt, Human adenovirus C
cugaacuguuuccagaacugaga

SEQ ID NO: 1553464 - RNA, 23 nt, Human adenovirus C
cuacagcccgggggaggcaagca

SEQ ID NO: 1553465 - RNA, 19 nt, Human adenovirus C
ugcugcccacgcuugcacc

SEQ ID NO: 1553466 - RNA, 17 nt, Human adenovirus C
cgcguccaucuggucag

SEQ ID NO: 1553467 - RNA, 19 nt, Human adenovirus C
cagcaauaugagcgguggc

SEQ ID NO: 1553468 - RNA, 18 nt, Human adenovirus C
gcgccaaaaacuggugcu

SEQ ID NO: 1553469 - RNA, 20 nt, Human adenovirus C
ccuccgggcacagcagcgca

SEQ ID NO: 1553470 - RNA, 20 nt, Human adenovirus C
ugcauguuucuccacgccuu

SEQ ID NO: 1553471 - RNA, 19 nt, Human adenovirus C
cgcuggacaugaccgcgcg

SEQ ID NO: 1553472 - RNA, 18 nt, Human adenovirus C
auggcagcaaggccugga

SEQ ID NO: 1553473 - RNA, 12 nt, Human adenovirus C
acugaggaugaa

SEQ ID NO: 1553474 - RNA, 12 nt, Human adenovirus C
ccgcguacgagc

SEQ ID NO: 1553475 - RNA, 13 nt, Human adenovirus C
gcgcgggcaggag

SEQ ID NO: 1553476 - RNA, 11 nt, Human adenovirus C
agagggcaugg

SEQ ID NO: 1553477 - RNA, 16 nt, Human adenovirus C
cgucuagggcgcagua

SEQ ID NO: 1553478 - RNA, 23 nt, Human adenovirus C
ucagcgaccgcgagcugaugcac

SEQ ID NO: 1553479 - RNA, 22 nt, Human adenovirus C
ccugaacuaccagaacgaccac

SEQ ID NO: 1553480 - RNA, 22 nt, Human adenovirus C
augugaccgaggagcugaggcc

SEQ ID NO: 1553481 - RNA, 18 nt, Human adenovirus C
cccuccgcacccacuauc

SEQ ID NO: 1553482 - RNA, 17 nt, Human adenovirus C
cuguccauggucuggag

SEQ ID NO: 1553483 - RNA, 16 nt, Human adenovirus C
gacgagucggugagcu

SEQ ID NO: 1553484 - RNA, 15 nt, Human adenovirus C
ucaacgcugguggcu

SEQ ID NO: 1553485 - RNA, 21 nt, Human adenovirus C
ccgcggcugacgcggcggcag

SEQ ID NO: 1553486 - RNA, 22 nt, Human adenovirus C
ccagggugcgcuugaggcuggu

SEQ ID NO: 1553487 - RNA, 14 nt, Human adenovirus C
aaaagaaccugccu

SEQ ID NO: 1553488 - RNA, 17 nt, Human adenovirus C
cuugaagucgcaguugg

SEQ ID NO: 1553489 - RNA, 22 nt, Human adenovirus C
uccagacaucauuuugcugcca

SEQ ID NO: 1553490 - RNA, 21 nt, Human adenovirus C
cacgcaaccgcgcccaggcgg

SEQ ID NO: 1553491 - RNA, 18 nt, Human adenovirus C
aaugaaaacggugccaug

SEQ ID NO: 1553492 - RNA, 21 nt, Human adenovirus C
aggaucaccuacgaugaccug

SEQ ID NO: 1553493 - RNA, 15 nt, Human adenovirus C
cuucacggacagugg

SEQ ID NO: 1553494 - RNA, 21 nt, Human adenovirus C
aacggacuaucgcaacaccac

SEQ ID NO: 1553495 - RNA, 22 nt, Human adenovirus C
gacgagcauacuuuccaggaga

SEQ ID NO: 1553496 - RNA, 13 nt, Human adenovirus C
acgcgcgcgcagc

SEQ ID NO: 1553497 - RNA, 14 nt, Human adenovirus C
aggcugcuguccaa

SEQ ID NO: 1553498 - RNA, 18 nt, Human adenovirus C
aaggccggaaaccucacc

SEQ ID NO: 1553499 - RNA, 14 nt, Human adenovirus C
cgguagaggggcca

SEQ ID NO: 1553500 - RNA, 19 nt, Human adenovirus C
aacuuugauaauacugcca

SEQ ID NO: 1553501 - RNA, 15 nt, Human adenovirus C
gccgcgcgcuggggc

SEQ ID NO: 1553502 - RNA, 23 nt, Human adenovirus C
ccaggcgcggcggcugcugcgcu

SEQ ID NO: 1553503 - RNA, 23 nt, Human adenovirus C
cgcugaggccgaggcagcggcag

SEQ ID NO: 1553504 - RNA, 17 nt, Human adenovirus C
auaaacacgcuggacau

SEQ ID NO: 1553505 - RNA, 19 nt, Human adenovirus C
cggcccguagccaguggca

SEQ ID NO: 1553506 - RNA, 18 nt, Human adenovirus C
caguagucggugcucguc

SEQ ID NO: 1553507 - RNA, 15 nt, Human adenovirus C
aggaugcggggugga

SEQ ID NO: 1553508 - RNA, 15 nt, Human adenovirus C
gcgcgucccugcgcc

SEQ ID NO: 1553509 - RNA, 16 nt, Human adenovirus C
cacuguaccgcgaggc

SEQ ID NO: 1553510 - RNA, 17 nt, Human adenovirus C
cagacaaugcagaaaca

SEQ ID NO: 1553511 - RNA, 13 nt, Human adenovirus C
ccgccgcagcagc

SEQ ID NO: 1553512 - RNA, 20 nt, Human adenovirus C
cuaucaggguccagaggacc

SEQ ID NO: 1553513 - RNA, 21 nt, Human adenovirus C
uaccuguguggaagccuggac

SEQ ID NO: 1553514 - RNA, 21 nt, Human adenovirus C
caagccccacugaccgugcaa

SEQ ID NO: 1553515 - RNA, 16 nt, Human adenovirus C
acuccucacuuaaaaa

SEQ ID NO: 1553516 - RNA, 22 nt, Human adenovirus C
gcaacaucaacaacagcugccg

SEQ ID NO: 1553517 - RNA, 18 nt, Human adenovirus C
cacgaccccuggagaggg

SEQ ID NO: 1553518 - RNA, 14 nt, Human adenovirus C
accuuaaucaaacu

SEQ ID NO: 1553519 - RNA, 18 nt, Human adenovirus C
gggugguggaccuggcca

SEQ ID NO: 1553520 - RNA, 21 nt, Human adenovirus C
guagacaaggccugcagaccg

SEQ ID NO: 1553521 - RNA, 15 nt, Human adenovirus C
agacagugucuccag

SEQ ID NO: 1553522 - RNA, 20 nt, Human adenovirus C
guccaggcgacgagcggccg

SEQ ID NO: 1553523 - RNA, 20 nt, Human adenovirus C
ccuggcgcggcuaggagcgc

SEQ ID NO: 1553524 - RNA, 23 nt, Human adenovirus C
gcccguucaugggaaacuggcaa

SEQ ID NO: 1553525 - RNA, 20 nt, Human adenovirus C
ugacaagcgcuuuccaggcu

SEQ ID NO: 1553526 - RNA, 14 nt, Human adenovirus C
cagcucggcgguga

SEQ ID NO: 1553527 - RNA, 14 nt, Human adenovirus C
cccagaagacgagc

SEQ ID NO: 1553528 - RNA, 17 nt, Human adenovirus C
cacgaucggcaggcuca

SEQ ID NO: 1553529 - RNA, 21 nt, Human adenovirus C
aaagcgcgguucacccuggcu

SEQ ID NO: 1553530 - RNA, 21 nt, Human adenovirus C
ugguaguuaagagagcugcag

SEQ ID NO: 1553531 - RNA, 18 nt, Human adenovirus C
cuccucaggggagcugag

SEQ ID NO: 1553532 - RNA, 16 nt, Human adenovirus C
agccgcgcgcuggggc

SEQ ID NO: 1553533 - RNA, 19 nt, Human adenovirus C
cuagcgccugcugccaugc

SEQ ID NO: 1553534 - RNA, 17 nt, Human adenovirus C
uggccuugcaggcgcag

SEQ ID NO: 1553535 - RNA, 21 nt, Human adenovirus C
gccaaucaagcagguggcacc

SEQ ID NO: 1553536 - RNA, 17 nt, Human adenovirus C
gaggccggccuggucua

SEQ ID NO: 1553537 - RNA, 14 nt, Human adenovirus C
cgcccccuuugagu

SEQ ID NO: 1553538 - RNA, 21 nt, Human adenovirus C
guccuccgcguugcucagggc

SEQ ID NO: 1553539 - RNA, 17 nt, Human adenovirus C
gcagguacgccugcagg

SEQ ID NO: 1553540 - RNA, 16 nt, Human adenovirus C
cgccuaccaggcaagc

SEQ ID NO: 1553541 - RNA, 19 nt, Human adenovirus C
auuuccauuuuaugaaaug

SEQ ID NO: 1553542 - RNA, 13 nt, Human adenovirus C
ggguuugccuccc

SEQ ID NO: 1553543 - RNA, 18 nt, Human adenovirus C
gcacgacguaaccacaga

SEQ ID NO: 1553544 - RNA, 21 nt, Human adenovirus C
acacccagcagaaaccugugc

SEQ ID NO: 1553545 - RNA, 19 nt, Human adenovirus C
gguggcacuuaggccagau

SEQ ID NO: 1553546 - RNA, 21 nt, Human adenovirus C
uggcgguguguucugccacga

SEQ ID NO: 1553547 - RNA, 15 nt, Human adenovirus C
ggcagaagcugccgc

SEQ ID NO: 1553548 - RNA, 15 nt, Human adenovirus C
aaggcuaauggcaau

SEQ ID NO: 1553549 - RNA, 15 nt, Human adenovirus C
auuucaacaaagcag

SEQ ID NO: 1553550 - RNA, 16 nt, Human adenovirus C
cuggaacagcagcaca

SEQ ID NO: 1553551 - RNA, 20 nt, Human adenovirus C
cccaaaauguaaccacuguu

SEQ ID NO: 1553552 - RNA, 22 nt, Human adenovirus C
uaacaggagggggguguuccua

SEQ ID NO: 1553553 - RNA, 12 nt, Human adenovirus C
acaacucagggg

SEQ ID NO: 1553554 - RNA, 20 nt, Human adenovirus C
uuuuacccacccaaagcaga

SEQ ID NO: 1553555 - RNA, 16 nt, Human adenovirus C
uucccaggauggcacc

SEQ ID NO: 1553556 - RNA, 22 nt, Human adenovirus C
ugaauguuguacagguggcuga

SEQ ID NO: 1553557 - RNA, 16 nt, Human adenovirus C
cugcgcgcuggccagg

SEQ ID NO: 1553558 - RNA, 16 nt, Human adenovirus C
cgaggcauucagggau

SEQ ID NO: 1553559 - RNA, 17 nt, Human adenovirus C
ggccggaccugggcugg

SEQ ID NO: 1553560 - RNA, 20 nt, Human adenovirus C
cguggcuacaccuaccgccc

SEQ ID NO: 1553561 - RNA, 15 nt, Human adenovirus C
gagcgacgaccuggg

SEQ ID NO: 1553562 - RNA, 15 nt, Human adenovirus C
gcagcggcagacaug

SEQ ID NO: 1553563 - RNA, 19 nt, Human adenovirus C
uauacagacuugagaggcc

SEQ ID NO: 1553564 - RNA, 20 nt, Human adenovirus C
gaaucaggcuguagacagcu

SEQ ID NO: 1553565 - RNA, 21 nt, Human adenovirus C
cgcauugcguaccucaggcac

SEQ ID NO: 1553566 - RNA, 15 nt, Human adenovirus C
gcgcugaccugcgcu

SEQ ID NO: 1553567 - RNA, 12 nt, Human adenovirus C
uaccgcgcggcg

SEQ ID NO: 1553568 - RNA, 21 nt, Human adenovirus C
gaaacacaagcuaaaccugua

SEQ ID NO: 1553569 - RNA, 15 nt, Human adenovirus C
ccauucagaccgugg

SEQ ID NO: 1553570 - RNA, 14 nt, Human adenovirus C
uuugaagagcuuuu

SEQ ID NO: 1553571 - RNA, 15 nt, Human adenovirus C
gcaccgcccgcagca

SEQ ID NO: 1553572 - RNA, 20 nt, Human adenovirus C
cgccgccguuagcccaagag

SEQ ID NO: 1553573 - RNA, 18 nt, Human adenovirus C
ccuccaccuucagccuca

SEQ ID NO: 1553574 - RNA, 22 nt, Human adenovirus C
uuaaguucaugucgcuguccag

SEQ ID NO: 1553575 - RNA, 14 nt, Human adenovirus C
agcuggugcugcgc

SEQ ID NO: 1553576 - RNA, 14 nt, Human adenovirus C
aaccuauggagaaa

SEQ ID NO: 1553577 - RNA, 16 nt, Human adenovirus C
acgggcagccuggagg

SEQ ID NO: 1553578 - RNA, 17 nt, Human adenovirus C
caaacaauacuaaaaaa

SEQ ID NO: 1553579 - RNA, 16 nt, Human adenovirus C
gagccgguguccacgc

SEQ ID NO: 1553580 - RNA, 21 nt, Human adenovirus C
ugacaagcgcuuuccaggcuu

SEQ ID NO: 1553581 - RNA, 12 nt, Human adenovirus C
gcaaggccuggc

SEQ ID NO: 1553582 - RNA, 19 nt, Human adenovirus C
cgcgggcggagggugccag

SEQ ID NO: 1553583 - RNA, 14 nt, Human adenovirus C
ccccguccugcccg

SEQ ID NO: 1553584 - RNA, 21 nt, Human adenovirus C
cauucagauaaugacugcaaa

SEQ ID NO: 1553585 - RNA, 21 nt, Human adenovirus C
gugugaugcggaagggucccg

SEQ ID NO: 1553586 - RNA, 21 nt, Human adenovirus C
uccggcagcagccgcaggcca

SEQ ID NO: 1553587 - RNA, 16 nt, Human adenovirus C
ugcgcuaugugcagca

SEQ ID NO: 1553588 - RNA, 15 nt, Human adenovirus C
agcaggagcgcuggg

SEQ ID NO: 1553589 - RNA, 20 nt, Human adenovirus C
caccggggcgcgcugcggcu

SEQ ID NO: 1553590 - RNA, 15 nt, Human adenovirus C
cucgcguccaggcca

SEQ ID NO: 1553591 - RNA, 16 nt, Human adenovirus C
ggcccauuacaguguc

SEQ ID NO: 1553592 - RNA, 15 nt, Human adenovirus C
gcacccuccccuucu

SEQ ID NO: 1553593 - RNA, 15 nt, Human adenovirus C
uggcaccgggacugg

SEQ ID NO: 1553594 - RNA, 21 nt, Human adenovirus C
ccaugauuacuaaacuuggag

SEQ ID NO: 1553595 - RNA, 20 nt, Human adenovirus C
cgcuggccgaaaacagggcc

SEQ ID NO: 1553596 - RNA, 18 nt, Human adenovirus C
gaagccccucaucggcug

SEQ ID NO: 1553597 - RNA, 22 nt, Human adenovirus C
cuucacgaucuuggccuugcua

SEQ ID NO: 1553598 - RNA, 19 nt, Human adenovirus C
acucagggucgcaggggca

SEQ ID NO: 1553599 - RNA, 13 nt, Human adenovirus C
guaccugccagac

SEQ ID NO: 1553600 - RNA, 16 nt, Human adenovirus C
caaauagaugagccuc

SEQ ID NO: 1553601 - RNA, 14 nt, Human adenovirus C
caaauacaaaagca

SEQ ID NO: 1553602 - RNA, 16 nt, Human adenovirus C
gcacuuaaccuacccc

SEQ ID NO: 1553603 - RNA, 23 nt, Human adenovirus C
ucauuuuuguuuugcugauuuuu

SEQ ID NO: 1553604 - RNA, 16 nt, Human adenovirus C
aucuggcgccucugcg

SEQ ID NO: 1553605 - RNA, 19 nt, Human adenovirus C
ccgcguccaucuggucaga

SEQ ID NO: 1553606 - RNA, 17 nt, Human adenovirus C
aguaacucuacaagcuu

SEQ ID NO: 1553607 - RNA, 23 nt, Human adenovirus C
ggcaggaggacacgggcagccug

SEQ ID NO: 1553608 - RNA, 14 nt, Human adenovirus C
ugcagcacagcacc

SEQ ID NO: 1553609 - RNA, 16 nt, Human adenovirus C
cuacuuccgcagccac

SEQ ID NO: 1553610 - RNA, 16 nt, Human adenovirus C
cccaaaaagaagcugc

SEQ ID NO: 1553611 - RNA, 15 nt, Human adenovirus C
agagcaagagcagcg

SEQ ID NO: 1553612 - RNA, 19 nt, Human adenovirus C
gugguagauggccuggccu

SEQ ID NO: 1553613 - RNA, 21 nt, Human adenovirus C
ucugcagcgccagugcgccau

SEQ ID NO: 1553614 - RNA, 12 nt, Human adenovirus C
agcggccgccgc

SEQ ID NO: 1553615 - RNA, 20 nt, Human adenovirus C
gggacuugcggcuggagcug

SEQ ID NO: 1553616 - RNA, 17 nt, Human adenovirus C
ugucguuucucagcagc

SEQ ID NO: 1553617 - RNA, 13 nt, Human adenovirus C
gucgucagcgcca

SEQ ID NO: 1553618 - RNA, 20 nt, Human adenovirus C
gauccuaacucugcagaccu

SEQ ID NO: 1553619 - RNA, 15 nt, Human adenovirus C
cgccuacccccggcu

SEQ ID NO: 1553620 - RNA, 14 nt, Human adenovirus C
ccuaaaggagcugc

SEQ ID NO: 1553621 - RNA, 22 nt, Human adenovirus C
cuuagaaccaaaguugcaggag

SEQ ID NO: 1553622 - RNA, 21 nt, Human adenovirus C
ggccgcgauguuuagcugcac

SEQ ID NO: 1553623 - RNA, 18 nt, Human adenovirus C
gacugcgcguaacccuga

SEQ ID NO: 1553624 - RNA, 12 nt, Human adenovirus C
gcaacgccacaa

SEQ ID NO: 1553625 - RNA, 20 nt, Human adenovirus C
gccgcacugggcgcaccacc

SEQ ID NO: 1553626 - RNA, 13 nt, Human adenovirus C
cgcuggccagcac

SEQ ID NO: 1553627 - RNA, 14 nt, Human adenovirus C
agugcagacuuuua

SEQ ID NO: 1553628 - RNA, 16 nt, Human adenovirus C
agugcuuaaaaaaaca

SEQ ID NO: 1553629 - RNA, 22 nt, Human adenovirus C
ugacauccgcggcgugcuggac

SEQ ID NO: 1553630 - RNA, 21 nt, Human adenovirus C
ugggagacgacgugcuguuga

SEQ ID NO: 1553631 - RNA, 18 nt, Human adenovirus C
auuuggguaacaggaggg

SEQ ID NO: 1553632 - RNA, 16 nt, Human adenovirus C
gccgcaggccccgcag

SEQ ID NO: 1553633 - RNA, 18 nt, Human adenovirus C
aaccgcgguugugcaggg

SEQ ID NO: 1553634 - RNA, 14 nt, Human adenovirus C
cacgcuggccagca

SEQ ID NO: 1553635 - RNA, 14 nt, Human adenovirus C
uggaggaggcgcgc

SEQ ID NO: 1553636 - RNA, 19 nt, Human adenovirus C
cgauggauuccucugggac

SEQ ID NO: 1553637 - RNA, 17 nt, Human adenovirus C
acucuaugucuuuuaca

SEQ ID NO: 1553638 - RNA, 16 nt, Human adenovirus C
uccauccggcccaggg

SEQ ID NO: 1553639 - RNA, 21 nt, Human adenovirus C
aggcuacuaagaaaacacaug

SEQ ID NO: 1553640 - RNA, 24 nt, Human adenovirus C
gcggccguucucgcgggggcgcag

SEQ ID NO: 1553641 - RNA, 22 nt, Human adenovirus C
ugauaggcgauuucggccauga

SEQ ID NO: 1553642 - RNA, 19 nt, Human adenovirus C
uggaagacugggacagccu

SEQ ID NO: 1553643 - RNA, 18 nt, Human adenovirus C
uguaugcuauauuucaac

SEQ ID NO: 1553644 - RNA, 16 nt, Human adenovirus C
cucccggccacuaccc

SEQ ID NO: 1553645 - RNA, 21 nt, Human adenovirus C
ugcgccgugccgccagcgguc

SEQ ID NO: 1553646 - RNA, 21 nt, Human adenovirus C
ccgcacuggcuaccgcccccu

SEQ ID NO: 1553647 - RNA, 23 nt, Human adenovirus C
cgcccguucaugggaaacuggca

SEQ ID NO: 1553648 - RNA, 16 nt, Human adenovirus C
caaucuccucuuccau

SEQ ID NO: 1553649 - RNA, 17 nt, Human adenovirus C
acggaggauaggguggc

SEQ ID NO: 1553650 - RNA, 13 nt, Human adenovirus C
gugcagcugaugg

SEQ ID NO: 1553651 - RNA, 23 nt, Human adenovirus C
gauuucugccagcgccugcacug

SEQ ID NO: 1553652 - RNA, 14 nt, Human adenovirus C
aagggugcagcuga

SEQ ID NO: 1553653 - RNA, 21 nt, Human adenovirus C
gcagaaaccugugcugccagg

SEQ ID NO: 1553654 - RNA, 17 nt, Human adenovirus C
acaagcgagugguggcu

SEQ ID NO: 1553655 - RNA, 14 nt, Human adenovirus C
augaagaagaggaa

SEQ ID NO: 1553656 - RNA, 15 nt, Human adenovirus C
gcugaagcagggcca

SEQ ID NO: 1553657 - RNA, 12 nt, Human adenovirus C
aaccuguugcau

SEQ ID NO: 1553658 - RNA, 12 nt, Human adenovirus C
ggccugcagacc

SEQ ID NO: 1553659 - RNA, 21 nt, Human adenovirus C
uuaucucaaauacaaaagcag

SEQ ID NO: 1553660 - RNA, 21 nt, Human adenovirus C
uuuagagaacacuggcaccuu

SEQ ID NO: 1553661 - RNA, 21 nt, Human adenovirus C
gccugcgcggccuuccggagc

SEQ ID NO: 1553662 - RNA, 15 nt, Human adenovirus C
aacgggguguuugac

SEQ ID NO: 1553663 - RNA, 21 nt, Human adenovirus C
aaugucguuucucagcagcug

SEQ ID NO: 1553664 - RNA, 14 nt, Human adenovirus C
cauucccagcugcu

SEQ ID NO: 1553665 - RNA, 14 nt, Human adenovirus C
cacuccugcgccgu

SEQ ID NO: 1553666 - RNA, 13 nt, Human adenovirus C
ugccgcggcagaa

SEQ ID NO: 1553667 - RNA, 23 nt, Human adenovirus C
ggagcgcaaccuaaaggagcugc

SEQ ID NO: 1553668 - RNA, 23 nt, Human adenovirus C
gucuagggcgcaguaguccaggg

SEQ ID NO: 1553669 - RNA, 16 nt, Human adenovirus C
aaaguuuuuugccauu

SEQ ID NO: 1553670 - RNA, 17 nt, Human adenovirus C
ccggccggacugcggcg

SEQ ID NO: 1553671 - RNA, 12 nt, Human adenovirus C
caaauccuuuug

SEQ ID NO: 1553672 - RNA, 14 nt, Human adenovirus C
ugcaaacggacccg

SEQ ID NO: 1553673 - RNA, 17 nt, Human adenovirus C
gcuccguccugcaggaa

SEQ ID NO: 1553674 - RNA, 21 nt, Human adenovirus C
cugcgcgugcccgugcgcacc

SEQ ID NO: 1553675 - RNA, 13 nt, Human adenovirus C
ugcaugcccaggc

SEQ ID NO: 1553676 - RNA, 19 nt, Human adenovirus C
aggcacuaaagcaaggccu

SEQ ID NO: 1553677 - RNA, 16 nt, Human adenovirus C
cccuaucagcagccgc

SEQ ID NO: 1553678 - RNA, 18 nt, Human adenovirus C
ugccgccugcugcacgca

SEQ ID NO: 1553679 - RNA, 13 nt, Human adenovirus C
cugaagcagggcc

SEQ ID NO: 1553680 - RNA, 21 nt, Human adenovirus C
gaauaugcccuacauccuucc

SEQ ID NO: 1553681 - RNA, 20 nt, Human adenovirus C
gccggagaucuauggccccc

SEQ ID NO: 1553682 - RNA, 22 nt, Human adenovirus C
gcacugccgcccaacgcgcggc

SEQ ID NO: 1553683 - RNA, 22 nt, Human adenovirus C
gguguguucugccacgaagaag

SEQ ID NO: 1553684 - RNA, 11 nt, Human adenovirus C
ccaaguacaga

SEQ ID NO: 1553685 - RNA, 16 nt, Human adenovirus C
cugauugccaggggca

SEQ ID NO: 1553686 - RNA, 12 nt, Human adenovirus C
ugcuugcuugca

SEQ ID NO: 1553687 - RNA, 19 nt, Human adenovirus C
accaccauccuaaaccagc

SEQ ID NO: 1553688 - RNA, 18 nt, Human adenovirus C
ccgcguccggcucgcucc

SEQ ID NO: 1553689 - RNA, 13 nt, Human adenovirus C
acaggccgcguca

SEQ ID NO: 1553690 - RNA, 21 nt, Human adenovirus C
aacuggccccaaacucccaug

SEQ ID NO: 1553691 - RNA, 20 nt, Human adenovirus C
uugcccaggaauaaagaauc

SEQ ID NO: 1553692 - RNA, 22 nt, Human adenovirus C
agaugccgcggugcaggcggcc

SEQ ID NO: 1553693 - RNA, 16 nt, Human adenovirus C
gcagaggcggcgcugc

SEQ ID NO: 1553694 - RNA, 20 nt, Human adenovirus C
acgagcauacuuuccaggag

SEQ ID NO: 1553695 - RNA, 22 nt, Human adenovirus C
cgacgggccgaacacucgugcu

SEQ ID NO: 1553696 - RNA, 23 nt, Human adenovirus C
cuccagauaucaacccaauaaaa

SEQ ID NO: 1553697 - RNA, 17 nt, Human adenovirus C
uagcgacuuugugccca

SEQ ID NO: 1553698 - RNA, 13 nt, Human adenovirus C
cugccaccucccu

SEQ ID NO: 1553699 - RNA, 17 nt, Human adenovirus C
caaauccauacacaaau

SEQ ID NO: 1553700 - RNA, 17 nt, Human adenovirus C
gcccuucucggccggca

SEQ ID NO: 1553701 - RNA, 16 nt, Human adenovirus C
ccuggcuggcacgggc

SEQ ID NO: 1553702 - RNA, 22 nt, Human adenovirus C
cugaccacuuacuggcugcagc

SEQ ID NO: 1553703 - RNA, 22 nt, Human adenovirus C
ugacgaccgcgcacaaggaagc

SEQ ID NO: 1553704 - RNA, 17 nt, Human adenovirus C
gccguagcgccauugcu

SEQ ID NO: 1553705 - RNA, 15 nt, Human adenovirus C
cgcggcugacgcggc

SEQ ID NO: 1553706 - RNA, 14 nt, Human adenovirus C
cauguugugcagaa

SEQ ID NO: 1553707 - RNA, 16 nt, Human adenovirus C
cuucauucagccgccg

SEQ ID NO: 1553708 - RNA, 12 nt, Human adenovirus C
cgaccacagcaa

SEQ ID NO: 1553709 - RNA, 15 nt, Human adenovirus C
ucugcccgccaccug

SEQ ID NO: 1553710 - RNA, 16 nt, Human adenovirus C
acuggggcagggaccc

SEQ ID NO: 1553711 - RNA, 17 nt, Human adenovirus C
cuaccgcgucaggaggg

SEQ ID NO: 1553712 - RNA, 22 nt, Human adenovirus C
ccauuacaauaggaaacaaaaa

SEQ ID NO: 1553713 - RNA, 21 nt, Human adenovirus C
cgguucaucccuguggaccgc

SEQ ID NO: 1553714 - RNA, 14 nt, Human adenovirus C
agggcacgagcugc

SEQ ID NO: 1553715 - RNA, 16 nt, Human adenovirus C
gcggcgacaggucagg

SEQ ID NO: 1553716 - RNA, 23 nt, Human adenovirus C
gggaauuugagccccucgccugg

SEQ ID NO: 1553717 - RNA, 12 nt, Human adenovirus C
agcccacccugc

SEQ ID NO: 1553718 - RNA, 18 nt, Human adenovirus C
ugccaccucccucccaac

SEQ ID NO: 1553719 - RNA, 17 nt, Human adenovirus C
gcagacgcgccagaccc

SEQ ID NO: 1553720 - RNA, 21 nt, Human adenovirus C
gcacuucuucuucuccuuccu

SEQ ID NO: 1553721 - RNA, 18 nt, Human adenovirus C
agcagguuccugagcagc

SEQ ID NO: 1553722 - RNA, 19 nt, Human adenovirus C
cucgcauuccacgagccag

SEQ ID NO: 1553723 - RNA, 19 nt, Human adenovirus C
aacagcgaaaaugaaaguc

SEQ ID NO: 1553724 - RNA, 20 nt, Human adenovirus C
gcgacgggguaacgcccagc

SEQ ID NO: 1553725 - RNA, 15 nt, Human adenovirus C
ccuccuccugccagg

SEQ ID NO: 1553726 - RNA, 22 nt, Human adenovirus C
ucugugccuuaggguugccgcc

SEQ ID NO: 1553727 - RNA, 15 nt, Human adenovirus C
uguauuuuuuccagg

SEQ ID NO: 1553728 - RNA, 16 nt, Human adenovirus C
auaucgcccagcaaua

SEQ ID NO: 1553729 - RNA, 16 nt, Human adenovirus C
ugucgcccucuucggc

SEQ ID NO: 1553730 - RNA, 12 nt, Human adenovirus C
cccccuccucag

SEQ ID NO: 1553731 - RNA, 16 nt, Human adenovirus C
cguccgcauaccccgc

SEQ ID NO: 1553732 - RNA, 23 nt, Human adenovirus C
gccgcggugcaggcggccgcugc

SEQ ID NO: 1553733 - RNA, 18 nt, Human adenovirus C
agccagaggacggcgagu

SEQ ID NO: 1553734 - RNA, 20 nt, Human adenovirus C
gcccgagggccgcuggcugc

SEQ ID NO: 1553735 - RNA, 17 nt, Human adenovirus C
gccccaggcuggggaga

SEQ ID NO: 1553736 - RNA, 19 nt, Human adenovirus C
ugccgcggggacaggagga

SEQ ID NO: 1553737 - RNA, 23 nt, Human adenovirus C
auagauacggaggauaggguggc

SEQ ID NO: 1553738 - RNA, 19 nt, Human adenovirus C
ggccagcuguuggggugag

SEQ ID NO: 1553739 - RNA, 19 nt, Human adenovirus C
accgggacugggcgugcag

SEQ ID NO: 1553740 - RNA, 12 nt, Human adenovirus C
cggcgccagugg

SEQ ID NO: 1553741 - RNA, 22 nt, Human adenovirus C
cgcuggaagacguugaagcugg

SEQ ID NO: 1553742 - RNA, 17 nt, Human adenovirus C
uggcgccuucagcuggg

SEQ ID NO: 1553743 - RNA, 13 nt, Human adenovirus C
ggccuccccuucu

SEQ ID NO: 1553744 - RNA, 22 nt, Human adenovirus C
cggcguaagcgguuaggcugga

SEQ ID NO: 1553745 - RNA, 12 nt, Human adenovirus C
uuccagaacuga

SEQ ID NO: 1553746 - RNA, 14 nt, Human adenovirus C
cugcugccaugcgc

SEQ ID NO: 1553747 - RNA, 11 nt, Human adenovirus C
ccgggcagcag

SEQ ID NO: 1553748 - RNA, 16 nt, Human adenovirus C
cuuuccuuccucccaa

SEQ ID NO: 1553749 - RNA, 15 nt, Human adenovirus C
cccggcggugcgggc

SEQ ID NO: 1553750 - RNA, 19 nt, Human adenovirus C
gcgcuggccgcucuucauu

SEQ ID NO: 1553751 - RNA, 13 nt, Human adenovirus C
accguaggagggg

SEQ ID NO: 1553752 - RNA, 23 nt, Human adenovirus C
cacugugccccccagguccaggc

SEQ ID NO: 1553753 - RNA, 14 nt, Human adenovirus C
caggcgaccgcgcg

SEQ ID NO: 1553754 - RNA, 16 nt, Human adenovirus C
uugcccgugcacucca

SEQ ID NO: 1553755 - RNA, 17 nt, Human adenovirus C
aauacuaaaaaacugga

SEQ ID NO: 1553756 - RNA, 13 nt, Human adenovirus C
uaucgacccgcga

SEQ ID NO: 1553757 - RNA, 21 nt, Human adenovirus C
agguggcuauaggacugaugc

SEQ ID NO: 1553758 - RNA, 17 nt, Human adenovirus C
gaacgaccggcaaggca

SEQ ID NO: 1553759 - RNA, 13 nt, Human adenovirus C
ucauuccacgcuc

SEQ ID NO: 1553760 - RNA, 15 nt, Human adenovirus C
cugcugcagccgcag

SEQ ID NO: 1553761 - RNA, 15 nt, Human adenovirus C
caggaauuguugcua

SEQ ID NO: 1553762 - RNA, 20 nt, Human adenovirus C
gcaauaacacaggcuggggc

SEQ ID NO: 1553763 - RNA, 23 nt, Human adenovirus C
gccguugauguuguggcccacga

SEQ ID NO: 1553764 - RNA, 20 nt, Human adenovirus C
gcgccacaauguggccuccg

SEQ ID NO: 1553765 - RNA, 21 nt, Human adenovirus C
ugauggaagcauugugagcuc

SEQ ID NO: 1553766 - RNA, 17 nt, Human adenovirus C
cagacacacaucugucu

SEQ ID NO: 1553767 - RNA, 16 nt, Human adenovirus C
cggcgguggcagaugc

SEQ ID NO: 1553768 - RNA, 19 nt, Human adenovirus C
acgcguugcaagagcgcag

SEQ ID NO: 1553769 - RNA, 14 nt, Human adenovirus C
cauucugcagagca

SEQ ID NO: 1553770 - RNA, 23 nt, Human adenovirus C
gggacauuucagaucggcggcgc

SEQ ID NO: 1553771 - RNA, 16 nt, Human adenovirus C
gacgagaaacgcgcgg

SEQ ID NO: 1553772 - RNA, 17 nt, Human adenovirus C
guccauggucuggagcu

SEQ ID NO: 1553773 - RNA, 19 nt, Human adenovirus C
guuccuggugcagauguug

SEQ ID NO: 1553774 - RNA, 20 nt, Human adenovirus C
cgagagcguggugagcgcgg

SEQ ID NO: 1553775 - RNA, 17 nt, Human adenovirus C
cauuuggguaacaggag

SEQ ID NO: 1553776 - RNA, 15 nt, Human adenovirus C
ugguuccuggugcag

SEQ ID NO: 1553777 - RNA, 21 nt, Human adenovirus C
cucgcaaggccuggccagugu

SEQ ID NO: 1553778 - RNA, 16 nt, Human adenovirus C
cgugcucuacauuggc

SEQ ID NO: 1553779 - RNA, 14 nt, Human adenovirus C
aaaccugagccagg

SEQ ID NO: 1553780 - RNA, 15 nt, Human adenovirus C
gcgagauugagcucc

SEQ ID NO: 1553781 - RNA, 22 nt, Human adenovirus C
acgccaccguuuuuacccaccc

SEQ ID NO: 1553782 - RNA, 17 nt, Human adenovirus C
ccgcccuagccgcgcgu

SEQ ID NO: 1553783 - RNA, 16 nt, Human adenovirus C
aaauagaugagccucc

SEQ ID NO: 1553784 - RNA, 14 nt, Human adenovirus C
gcccgggaccagcg

SEQ ID NO: 1553785 - RNA, 17 nt, Human adenovirus C
cagcugccgccgccgcc

SEQ ID NO: 1553786 - RNA, 21 nt, Human adenovirus C
gcuccuucagcgcgcgcugcc

SEQ ID NO: 1553787 - RNA, 14 nt, Human adenovirus C
aaguuugccacaca

SEQ ID NO: 1553788 - RNA, 20 nt, Human adenovirus C
uggcagcggugcacgggcug

SEQ ID NO: 1553789 - RNA, 15 nt, Human adenovirus C
gcuaccucuccgcgu

SEQ ID NO: 1553790 - RNA, 17 nt, Human adenovirus C
caaccaggcagugcaaa

SEQ ID NO: 1553791 - RNA, 13 nt, Human adenovirus C
ugcacgaccccug

SEQ ID NO: 1553792 - RNA, 16 nt, Human adenovirus C
gguggacgucgcgccg

SEQ ID NO: 1553793 - RNA, 16 nt, Human adenovirus C
cacaguaacugcagca

SEQ ID NO: 1553794 - RNA, 19 nt, Human adenovirus C
gccgcgauguuuagcugca

SEQ ID NO: 1553795 - RNA, 14 nt, Human adenovirus C
cggcgcgcuccuug

SEQ ID NO: 1553796 - RNA, 16 nt, Human adenovirus C
caacggaauccgcgcc

SEQ ID NO: 1553797 - RNA, 22 nt, Human adenovirus C
uauggaucuuaugccaggccua

SEQ ID NO: 1553798 - RNA, 21 nt, Human adenovirus C
caaaaacaugcuaccucuuug

SEQ ID NO: 1553799 - RNA, 13 nt, Human adenovirus C
cacugaacagcau

SEQ ID NO: 1553800 - RNA, 20 nt, Human adenovirus C
cgcagcuuguugaccagcuc

SEQ ID NO: 1553801 - RNA, 14 nt, Human adenovirus C
gucuuacaaaccug

SEQ ID NO: 1553802 - RNA, 16 nt, Human adenovirus C
auaaacauuaccucuu

SEQ ID NO: 1553803 - RNA, 18 nt, Human adenovirus C
ucgcguuucagccccccg

SEQ ID NO: 1553804 - RNA, 21 nt, Human adenovirus C
aacaacauggaaauuaaaacg

SEQ ID NO: 1553805 - RNA, 20 nt, Human adenovirus C
uccucggagccgcgcuccgg

SEQ ID NO: 1553806 - RNA, 22 nt, Human adenovirus C
agcuguccauggucuggagcuc

SEQ ID NO: 1553807 - RNA, 13 nt, Human adenovirus C
gugcaugcccagg

SEQ ID NO: 1553808 - RNA, 20 nt, Human adenovirus C
cgaugaggccggccuggucu

SEQ ID NO: 1553809 - RNA, 18 nt, Human adenovirus C
gcagggcgaaggugacau

SEQ ID NO: 1553810 - RNA, 17 nt, Human adenovirus C
cagcggcaacgugcaga

SEQ ID NO: 1553811 - RNA, 16 nt, Human adenovirus C
aggucacuugcugaca

SEQ ID NO: 1553812 - RNA, 16 nt, Human adenovirus C
uugcgauacacagggu

SEQ ID NO: 1553813 - RNA, 22 nt, Human adenovirus C
cgcccaggcggcggguacagug

SEQ ID NO: 1553814 - RNA, 21 nt, Human adenovirus C
gguggcaccgggacugggcgu

SEQ ID NO: 1553815 - RNA, 14 nt, Human adenovirus C
gcgggcggcgcugc

SEQ ID NO: 1553816 - RNA, 14 nt, Human adenovirus C
cccuccucaccugc

SEQ ID NO: 1553817 - RNA, 21 nt, Human adenovirus C
ccgagcggacaagcagcuggc

SEQ ID NO: 1553818 - RNA, 13 nt, Human adenovirus C
uacaacaguuucc

SEQ ID NO: 1553819 - RNA, 21 nt, Human adenovirus C
auccgcggcgugcuggacagg

SEQ ID NO: 1553820 - RNA, 18 nt, Human adenovirus C
gcagaugcgccccccucc

SEQ ID NO: 1553821 - RNA, 14 nt, Human adenovirus C
ggaguuaccagcca

SEQ ID NO: 1553822 - RNA, 19 nt, Human adenovirus C
cuggagaaacaauuacaaa

SEQ ID NO: 1553823 - RNA, 20 nt, Human adenovirus C
cgccgcgcgcgggcaggagc

SEQ ID NO: 1553824 - RNA, 14 nt, Human adenovirus C
agcgguugcugcgc

SEQ ID NO: 1553825 - RNA, 20 nt, Human adenovirus C
accgugucuagcuugcugac

SEQ ID NO: 1553826 - RNA, 19 nt, Human adenovirus C
cgggcggcgcugcagagcc

SEQ ID NO: 1553827 - RNA, 23 nt, Human adenovirus C
ggcacaaccauccgcggcagcuc

SEQ ID NO: 1553828 - RNA, 19 nt, Human adenovirus C
uauguggaaucaggcugua

SEQ ID NO: 1553829 - RNA, 13 nt, Human adenovirus C
acuucugugccuu

SEQ ID NO: 1553830 - RNA, 18 nt, Human adenovirus C
ggugcugcgcgcggaggu

SEQ ID NO: 1553831 - RNA, 17 nt, Human adenovirus C
ccacacccagccaaccu

SEQ ID NO: 1553832 - RNA, 18 nt, Human adenovirus C
gugcgcccgcuuuccaag

SEQ ID NO: 1553833 - RNA, 15 nt, Human adenovirus C
ccacacugcagggaa

SEQ ID NO: 1553834 - RNA, 19 nt, Human adenovirus C
gauuugucacccuuauccu

SEQ ID NO: 1553835 - RNA, 17 nt, Human adenovirus C
gaugcgggccaugagcu

SEQ ID NO: 1553836 - RNA, 17 nt, Human adenovirus C
aggccagcacgaaggag

SEQ ID NO: 1553837 - RNA, 20 nt, Human adenovirus C
uacauugcccaggaauaaag

SEQ ID NO: 1553838 - RNA, 20 nt, Human adenovirus C
gcccgagggcaacuacuccg

SEQ ID NO: 1553839 - RNA, 20 nt, Human adenovirus C
gccguuggagacugcagccu

SEQ ID NO: 1553840 - RNA, 12 nt, Human adenovirus C
guaccugcugga

SEQ ID NO: 1553841 - RNA, 13 nt, Human adenovirus C
gcagaaacacaag

SEQ ID NO: 1553842 - RNA, 13 nt, Human adenovirus C
acuugcuggaaca

SEQ ID NO: 1553843 - RNA, 23 nt, Human adenovirus C
agugguuuuguacagugaagaug

SEQ ID NO: 1553844 - RNA, 15 nt, Human adenovirus C
gcacgaaggaggcgu

SEQ ID NO: 1553845 - RNA, 16 nt, Human adenovirus C
cgugcauacacuuccu

SEQ ID NO: 1553846 - RNA, 13 nt, Human adenovirus C
cuauuaccaccac

SEQ ID NO: 1553847 - RNA, 17 nt, Human adenovirus C
ccaaucaaucagccucg

SEQ ID NO: 1553848 - RNA, 22 nt, Human adenovirus C
gccauagaugccaugaaccacc

SEQ ID NO: 1553849 - RNA, 17 nt, Human adenovirus C
cuuccuuuuccucuugc

SEQ ID NO: 1553850 - RNA, 13 nt, Human adenovirus C
cacgcugcccgag

SEQ ID NO: 1553851 - RNA, 13 nt, Human adenovirus C
aggaagagcagga

SEQ ID NO: 1553852 - RNA, 13 nt, Human adenovirus C
cucccgccaccag

SEQ ID NO: 1553853 - RNA, 13 nt, Human adenovirus C
caccugagccuuu

SEQ ID NO: 1553854 - RNA, 16 nt, Human adenovirus C
gccaaccuacacauuc

SEQ ID NO: 1553855 - RNA, 18 nt, Human adenovirus C
cagagggcugccugcacu

SEQ ID NO: 1553856 - RNA, 15 nt, Human adenovirus C
gccauuuccuucucc

SEQ ID NO: 1553857 - RNA, 18 nt, Human adenovirus C
acuggaacccgccgccgc

SEQ ID NO: 1553858 - RNA, 20 nt, Human adenovirus C
caccaccgccuccaccgaug

SEQ ID NO: 1553859 - RNA, 16 nt, Human adenovirus C
ugaggacuaccacgcc

SEQ ID NO: 1553860 - RNA, 14 nt, Human adenovirus C
cggggugguggacc

SEQ ID NO: 1553861 - RNA, 18 nt, Human adenovirus C
gaucuggaaggugcugag

SEQ ID NO: 1553862 - RNA, 13 nt, Human adenovirus C
gccaaaaccugcc

SEQ ID NO: 1553863 - RNA, 16 nt, Human adenovirus C
caccucgaccacugcc

SEQ ID NO: 1553864 - RNA, 19 nt, Human adenovirus C
ggcuugagacgcgcgagcc

SEQ ID NO: 1553865 - RNA, 20 nt, Human adenovirus C
cuaaaggggguaaagaggga

SEQ ID NO: 1553866 - RNA, 18 nt, Human adenovirus C
cuggagcugcccaagacu

SEQ ID NO: 1553867 - RNA, 23 nt, Human adenovirus C
ccacuaggggguccacucgcucc

SEQ ID NO: 1553868 - RNA, 22 nt, Human adenovirus C
ucagcuggggcucgcuguggag

SEQ ID NO: 1553869 - RNA, 14 nt, Human adenovirus C
ccgacccggcacug

SEQ ID NO: 1553870 - RNA, 14 nt, Human adenovirus C
gaucauggagucag

SEQ ID NO: 1553871 - RNA, 14 nt, Human adenovirus C
caggcugcgcacca

SEQ ID NO: 1553872 - RNA, 17 nt, Human adenovirus C
ugucuuuacgccaccuu

SEQ ID NO: 1553873 - RNA, 17 nt, Human adenovirus C
ccggcuaugcacugcag

SEQ ID NO: 1553874 - RNA, 21 nt, Human adenovirus C
ucugccagcgccugcacugca

SEQ ID NO: 1553875 - RNA, 18 nt, Human adenovirus C
acaccuagccuaaagccc

SEQ ID NO: 1553876 - RNA, 15 nt, Human adenovirus C
cugagcagcugcgac

SEQ ID NO: 1553877 - RNA, 19 nt, Human adenovirus C
gcuguacauccugcacgag

SEQ ID NO: 1553878 - RNA, 19 nt, Human adenovirus C
gcgcuuaccucccuugccg

SEQ ID NO: 1553879 - RNA, 17 nt, Human adenovirus C
gcagcuuguugaccagc

SEQ ID NO: 1553880 - RNA, 15 nt, Human adenovirus C
cagacuugagaggcc

SEQ ID NO: 1553881 - RNA, 14 nt, Human adenovirus C
aggaugaagaagag

SEQ ID NO: 1553882 - RNA, 12 nt, Human adenovirus C
uggacaccuccc

SEQ ID NO: 1553883 - RNA, 13 nt, Human adenovirus C
gauaaauggagcg

SEQ ID NO: 1553884 - RNA, 16 nt, Human adenovirus C
acaaggccugcagacc

SEQ ID NO: 1553885 - RNA, 19 nt, Human adenovirus C
cagcucggcggugaccugc

SEQ ID NO: 1553886 - RNA, 18 nt, Human adenovirus C
gcucgccuucgaucucag

SEQ ID NO: 1553887 - RNA, 18 nt, Human adenovirus C
ccagcugcugagccacag

SEQ ID NO: 1553888 - RNA, 14 nt, Human adenovirus C
acgcuggaagacgu

SEQ ID NO: 1553889 - RNA, 14 nt, Human adenovirus C
gggcuaaagggggu

SEQ ID NO: 1553890 - RNA, 14 nt, Human adenovirus C
ccgccugcugcacg

SEQ ID NO: 1553891 - RNA, 21 nt, Human adenovirus C
acauggguguucuugcugguc

SEQ ID NO: 1553892 - RNA, 18 nt, Human adenovirus C
cguaguuucgcaggcgcu

SEQ ID NO: 1553893 - RNA, 14 nt, Human adenovirus C
ccaugggcuccagu

SEQ ID NO: 1553894 - RNA, 17 nt, Human adenovirus C
guugccucggcgguggc

SEQ ID NO: 1553895 - RNA, 22 nt, Human adenovirus C
acaaacuccacccccucauuau

SEQ ID NO: 1553896 - RNA, 14 nt, Human adenovirus C
ccaacgcgcggcgg

SEQ ID NO: 1553897 - RNA, 14 nt, Human adenovirus C
caggagcagagccc

SEQ ID NO: 1553898 - RNA, 19 nt, Human adenovirus C
ucagauacaugggcauaag

SEQ ID NO: 1553899 - RNA, 23 nt, Human adenovirus C
gccuccccccgcugacacccagc

SEQ ID NO: 1553900 - RNA, 16 nt, Human adenovirus C
ucuaugcccaggcucc

SEQ ID NO: 1553901 - RNA, 19 nt, Human adenovirus C
cguggcccuuggcgcgcag

SEQ ID NO: 1553902 - RNA, 15 nt, Human adenovirus C
gcucgcguccaggcc

SEQ ID NO: 1553903 - RNA, 21 nt, Human adenovirus C
aaaccuauuaaaaaacaccac

SEQ ID NO: 1553904 - RNA, 11 nt, Human adenovirus C
aaucaaaauaa

SEQ ID NO: 1553905 - RNA, 21 nt, Human adenovirus C
gcagcggcagcaacagcagcg

SEQ ID NO: 1553906 - RNA, 12 nt, Human adenovirus C
agguugcuggcg

SEQ ID NO: 1553907 - RNA, 14 nt, Human adenovirus C
ggggugggugagcg

SEQ ID NO: 1553908 - RNA, 15 nt, Human adenovirus C
cacuuucaauaaagg

SEQ ID NO: 1553909 - RNA, 15 nt, Human adenovirus C
gccacauccuuggcc

SEQ ID NO: 1553910 - RNA, 23 nt, Human adenovirus C
cgccaccguuuuuacccacccaa

SEQ ID NO: 1553911 - RNA, 14 nt, Human adenovirus C
caaaagcagggcuu

SEQ ID NO: 1553912 - RNA, 11 nt, Human adenovirus C
cuuuccaggcu

SEQ ID NO: 1553913 - RNA, 16 nt, Human adenovirus C
ccauaugacacagaaa

SEQ ID NO: 1553914 - RNA, 13 nt, Human adenovirus C
uccuacauugccc

SEQ ID NO: 1553915 - RNA, 17 nt, Human adenovirus C
cugacgaccgcgcacaa

SEQ ID NO: 1553916 - RNA, 23 nt, Human adenovirus C
cacacaaccuucucggcuucaac

SEQ ID NO: 1553917 - RNA, 12 nt, Human adenovirus C
ucgaccacugcc

SEQ ID NO: 1553918 - RNA, 14 nt, Human adenovirus C
agguuccugagcag

SEQ ID NO: 1553919 - RNA, 17 nt, Human adenovirus C
cacaagcucgccugcgc

SEQ ID NO: 1553920 - RNA, 19 nt, Human adenovirus C
augcgcggcgguauccugc

SEQ ID NO: 1553921 - RNA, 22 nt, Human adenovirus C
cgggucagggcgcgggcuaggu

SEQ ID NO: 1553922 - RNA, 22 nt, Human adenovirus C
agcacuaguauugccacugcca

SEQ ID NO: 1553923 - RNA, 18 nt, Human adenovirus C
cccagcguggcgcuggac

SEQ ID NO: 1553924 - RNA, 21 nt, Human adenovirus C
agggacaaguugaaagagcaa

SEQ ID NO: 1553925 - RNA, 13 nt, Human adenovirus C
gggccaagaacaa

SEQ ID NO: 1553926 - RNA, 22 nt, Human adenovirus C
uccagcuuauucagcaucaccu

SEQ ID NO: 1553927 - RNA, 13 nt, Human adenovirus C
ccucccggccacu

SEQ ID NO: 1553928 - RNA, 17 nt, Human adenovirus C
caagaaaaacaccacca

SEQ ID NO: 1553929 - RNA, 21 nt, Human adenovirus C
gcugcuaaacauaguagagcc

SEQ ID NO: 1553930 - RNA, 21 nt, Human adenovirus C
ggccaugggcguguggcagca

SEQ ID NO: 1553931 - RNA, 17 nt, Human adenovirus C
auggaucacaaccccac

SEQ ID NO: 1553932 - RNA, 18 nt, Human adenovirus C
guggccuugcaggcgcag

SEQ ID NO: 1553933 - RNA, 14 nt, Human adenovirus C
cccacucuguaugc

SEQ ID NO: 1553934 - RNA, 14 nt, Human adenovirus C
gaccucugcacucu

SEQ ID NO: 1553935 - RNA, 15 nt, Human adenovirus C
aggaggacacgggca

SEQ ID NO: 1553936 - RNA, 13 nt, Human adenovirus C
aauacaacauggc

SEQ ID NO: 1553937 - RNA, 23 nt, Human adenovirus C
uugcaagaacaaaccgaggaggg

SEQ ID NO: 1553938 - RNA, 12 nt, Human adenovirus C
gcagccuggagg

SEQ ID NO: 1553939 - RNA, 20 nt, Human adenovirus C
ccuguaacgcuggaccugcc

SEQ ID NO: 1553940 - RNA, 16 nt, Human adenovirus C
accacccuccucaccu

SEQ ID NO: 1553941 - RNA, 16 nt, Human adenovirus C
cgggcggaggagaagc

SEQ ID NO: 1553942 - RNA, 14 nt, Human adenovirus C
cccuccgcggcgug

SEQ ID NO: 1553943 - RNA, 19 nt, Human adenovirus C
cuaccggagugcugggcca

SEQ ID NO: 1553944 - RNA, 22 nt, Human adenovirus C
gcccugcuuaaccgcgcacguc

SEQ ID NO: 1553945 - RNA, 16 nt, Human adenovirus C
caaggccauggcaccg

SEQ ID NO: 1553946 - RNA, 15 nt, Human adenovirus C
cggcaaccgccucag

SEQ ID NO: 1553947 - RNA, 22 nt, Human adenovirus C
cugcucgaucucuuccuccugg

SEQ ID NO: 1553948 - RNA, 17 nt, Human adenovirus C
guggaccuggccaacca

SEQ ID NO: 1553949 - RNA, 13 nt, Human adenovirus C
uacucuggcucca

SEQ ID NO: 1553950 - RNA, 15 nt, Human adenovirus C
cgaucgaugcggccc

SEQ ID NO: 1553951 - RNA, 21 nt, Human adenovirus C
ccacuggcagggacacguugc

SEQ ID NO: 1553952 - RNA, 19 nt, Human adenovirus C
cggccgccgcagcagccgc

SEQ ID NO: 1553953 - RNA, 22 nt, Human adenovirus C
cugcuccucuucccgacuggcc

SEQ ID NO: 1553954 - RNA, 13 nt, Human adenovirus C
ccagcgacuggaa

SEQ ID NO: 1553955 - RNA, 16 nt, Human adenovirus C
ggccagaugcugaggg

SEQ ID NO: 1553956 - RNA, 14 nt, Human adenovirus C
caggaacugaaagc

SEQ ID NO: 1553957 - RNA, 17 nt, Human adenovirus C
ggcaagauaucggcacc

SEQ ID NO: 1553958 - RNA, 14 nt, Human adenovirus C
ggaggugagcucaa

SEQ ID NO: 1553959 - RNA, 13 nt, Human adenovirus C
ggcggcggcgcgc

SEQ ID NO: 1553960 - RNA, 14 nt, Human adenovirus C
gcccuaacaguggc

SEQ ID NO: 1553961 - RNA, 21 nt, Human adenovirus C
ugagcaaggaaauucccacgc

SEQ ID NO: 1553962 - RNA, 15 nt, Human adenovirus C
cggcuggagcugccc

SEQ ID NO: 1553963 - RNA, 15 nt, Human adenovirus C
cagagggcauggaga

SEQ ID NO: 1553964 - RNA, 19 nt, Human adenovirus C
aaccauuaacgaggauggg

SEQ ID NO: 1553965 - RNA, 16 nt, Human adenovirus C
gugcaugcccaggcuu

SEQ ID NO: 1553966 - RNA, 17 nt, Human adenovirus C
ccgcgccgcaggccccg

SEQ ID NO: 1553967 - RNA, 18 nt, Human adenovirus C
ccagcgcggccacuuccc

SEQ ID NO: 1553968 - RNA, 18 nt, Human adenovirus C
ccaggacgacgcagaggc

SEQ ID NO: 1553969 - RNA, 15 nt, Human adenovirus C
caccccgcaccgcuc

SEQ ID NO: 1553970 - RNA, 18 nt, Human adenovirus C
agcgugcaggggcccaac

SEQ ID NO: 1553971 - RNA, 17 nt, Human adenovirus C
cccucgccggcgcccca

SEQ ID NO: 1553972 - RNA, 20 nt, Human adenovirus C
uucuucacgaucuuggccuu

SEQ ID NO: 1553973 - RNA, 17 nt, Human adenovirus C
cgcaugcccccaugggc

SEQ ID NO: 1553974 - RNA, 10 nt, Human adenovirus C
ggcuggggcc

SEQ ID NO: 1553975 - RNA, 17 nt, Human adenovirus C
aaccuggaccggcuggu

SEQ ID NO: 1553976 - RNA, 16 nt, Human adenovirus C
cccuggaggcagcugg

SEQ ID NO: 1553977 - RNA, 16 nt, Human adenovirus C
aaagggcccuggcugg

SEQ ID NO: 1553978 - RNA, 17 nt, Human adenovirus C
aaaccuauuaaaaaaca

SEQ ID NO: 1553979 - RNA, 18 nt, Human adenovirus C
aguggagagcccaggacu

SEQ ID NO: 1553980 - RNA, 22 nt, Human adenovirus C
aagcuuccgaggccgaagaggu

SEQ ID NO: 1553981 - RNA, 15 nt, Human adenovirus C
cgcuguacggcagua

SEQ ID NO: 1553982 - RNA, 19 nt, Human adenovirus C
cagcucggucacgugcucu

SEQ ID NO: 1553983 - RNA, 21 nt, Human adenovirus C
ccaggguuuccuugaugaugu

SEQ ID NO: 1553984 - RNA, 14 nt, Human adenovirus C
ccagcggccacacc

SEQ ID NO: 1553985 - RNA, 13 nt, Human adenovirus C
aagggcccuggcu

SEQ ID NO: 1553986 - RNA, 17 nt, Human adenovirus C
cgcauugcguaccucag

SEQ ID NO: 1553987 - RNA, 12 nt, Human adenovirus C
gcuucaauccaa

SEQ ID NO: 1553988 - RNA, 17 nt, Human adenovirus C
uguucugacagggccca

SEQ ID NO: 1553989 - RNA, 21 nt, Human adenovirus C
ugacaguggagagcccaggac

SEQ ID NO: 1553990 - RNA, 18 nt, Human adenovirus C
aggccgaggcagcggcag

SEQ ID NO: 1553991 - RNA, 11 nt, Human adenovirus C
uacgccaccuu

SEQ ID NO: 1553992 - RNA, 23 nt, Human adenovirus C
ucaacuuugcgucucuggccccg

SEQ ID NO: 1553993 - RNA, 13 nt, Human adenovirus C
cgcaacugggcag

SEQ ID NO: 1553994 - RNA, 16 nt, Human adenovirus C
cccgggcuggugcagu

SEQ ID NO: 1553995 - RNA, 14 nt, Human adenovirus C
acgcucuggccggu

SEQ ID NO: 1553996 - RNA, 16 nt, Human adenovirus C
gaucuugguugugggc

SEQ ID NO: 1553997 - RNA, 11 nt, Human adenovirus C
caacuggcaaa

SEQ ID NO: 1553998 - RNA, 22 nt, Human adenovirus C
gccuucacacgcuugaagacaa

SEQ ID NO: 1553999 - RNA, 19 nt, Human adenovirus C
accaacaugccaaauguga

SEQ ID NO: 1554000 - RNA, 17 nt, Human adenovirus C
accuagaugugggagac

SEQ ID NO: 1554001 - RNA, 14 nt, Human adenovirus C
auaccacugcaaca

SEQ ID NO: 1554002 - RNA, 19 nt, Human adenovirus C
ucaagaaaaacaccaccac

SEQ ID NO: 1554003 - RNA, 15 nt, Human adenovirus C
gucugggucacggug

SEQ ID NO: 1554004 - RNA, 18 nt, Human adenovirus C
ugcauacacuuccucagg

SEQ ID NO: 1554005 - RNA, 16 nt, Human adenovirus C
acaccuaccgccccag

SEQ ID NO: 1554006 - RNA, 18 nt, Human adenovirus C
uacagcccgggggaggca

SEQ ID NO: 1554007 - RNA, 15 nt, Human adenovirus C
gcuggggcaggagga

SEQ ID NO: 1554008 - RNA, 17 nt, Human adenovirus C
ggugagcgcggaggcgu

SEQ ID NO: 1554009 - RNA, 14 nt, Human adenovirus C
agcaacaacagcgc

SEQ ID NO: 1554010 - RNA, 19 nt, Human adenovirus C
aggagcaacagcaggagga

SEQ ID NO: 1554011 - RNA, 14 nt, Human adenovirus C
ccagcgccugcacu

SEQ ID NO: 1554012 - RNA, 20 nt, Human adenovirus C
ggcggcuuucgucacagggu

SEQ ID NO: 1554013 - RNA, 17 nt, Human adenovirus C
aguucuugcaaggaagc

SEQ ID NO: 1554014 - RNA, 22 nt, Human adenovirus C
ggaucaccuacgaugaccugga

SEQ ID NO: 1554015 - RNA, 12 nt, Human adenovirus C
ugagguacauga

SEQ ID NO: 1554016 - RNA, 23 nt, Human adenovirus C
cgacgcggcgguugaucuccuga

SEQ ID NO: 1554017 - RNA, 20 nt, Human adenovirus C
gugugaccccgaagccccuc

SEQ ID NO: 1554018 - RNA, 18 nt, Human adenovirus C
gccgccguuagcccaaga

SEQ ID NO: 1554019 - RNA, 22 nt, Human adenovirus C
ccacagcucggucacgugcucu

SEQ ID NO: 1554020 - RNA, 21 nt, Human adenovirus C
gccuggcgcaaaaucuccugc

SEQ ID NO: 1554021 - RNA, 21 nt, Human adenovirus C
acuaccuuuccgccgccaaca

SEQ ID NO: 1554022 - RNA, 23 nt, Human adenovirus C
gccgccguuagcccaagagcaac

SEQ ID NO: 1554023 - RNA, 19 nt, Human adenovirus C
uuacaagugggaauuugaa

SEQ ID NO: 1554024 - RNA, 17 nt, Human adenovirus C
ugcaggagcgcagcuug

SEQ ID NO: 1554025 - RNA, 17 nt, Human adenovirus C
ggcagcagcaggaggag

SEQ ID NO: 1554026 - RNA, 12 nt, Human adenovirus C
ggcggaggcgcg

SEQ ID NO: 1554027 - RNA, 20 nt, Human adenovirus C
gccuagacgaagcuuccgag

SEQ ID NO: 1554028 - RNA, 17 nt, Human adenovirus C
gcccaucuccaucccau

SEQ ID NO: 1554029 - RNA, 14 nt, Human adenovirus C
auccggugcugcgg

SEQ ID NO: 1554030 - RNA, 17 nt, Human adenovirus C
ugagccccucgccuggc

SEQ ID NO: 1554031 - RNA, 13 nt, Human adenovirus C
cauuccagcaccu

SEQ ID NO: 1554032 - RNA, 17 nt, Human adenovirus C
cagcaauaacacaggcu

SEQ ID NO: 1554033 - RNA, 18 nt, Human adenovirus C
cuggcggaggugcugcug

SEQ ID NO: 1554034 - RNA, 16 nt, Human adenovirus C
uaacuuuauguccaug

SEQ ID NO: 1554035 - RNA, 19 nt, Human adenovirus C
accaaagcaaaccucaccu

SEQ ID NO: 1554036 - RNA, 15 nt, Human adenovirus C
acucagggucgcagg

SEQ ID NO: 1554037 - RNA, 14 nt, Human adenovirus C
gcagacaugcaggg

SEQ ID NO: 1554038 - RNA, 16 nt, Human adenovirus C
ugcuugcuugcaagac

SEQ ID NO: 1554039 - RNA, 16 nt, Human adenovirus C
uggggauaugagaugc

SEQ ID NO: 1554040 - RNA, 18 nt, Human adenovirus C
cuccgggcugcgcgcugg

SEQ ID NO: 1554041 - RNA, 20 nt, Human adenovirus C
gggcucccacaggcgaccgc

SEQ ID NO: 1554042 - RNA, 23 nt, Human adenovirus C
cucccucacccgcagcugccugu

SEQ ID NO: 1554043 - RNA, 24 nt, Human adenovirus C
ccagcccaugagccggcaaguggu

SEQ ID NO: 1554044 - RNA, 15 nt, Human adenovirus C
accguggcgggcggc

SEQ ID NO: 1554045 - RNA, 16 nt, Human adenovirus C
ggaccugcuugagcag

SEQ ID NO: 1554046 - RNA, 20 nt, Human adenovirus C
cccauggcauggggugggug

SEQ ID NO: 1554047 - RNA, 22 nt, Human adenovirus C
agucuagcgccugcugccaugc

SEQ ID NO: 1554048 - RNA, 18 nt, Human adenovirus C
gguaccuuugagcugcag

SEQ ID NO: 1554049 - RNA, 22 nt, Human adenovirus C
cgugaccuuccgcuccacgagc

SEQ ID NO: 1554050 - RNA, 12 nt, Human adenovirus C
gggcggcaagcg

SEQ ID NO: 1554051 - RNA, 16 nt, Human adenovirus C
auuucaacaaagcagg

SEQ ID NO: 1554052 - RNA, 12 nt, Human adenovirus C
auuaccugggcg

SEQ ID NO: 1554053 - RNA, 22 nt, Human adenovirus C
acaguaacugcagcacagcacc

SEQ ID NO: 1554054 - RNA, 20 nt, Human adenovirus C
uaggcuggaaagcgaaagca

SEQ ID NO: 1554055 - RNA, 16 nt, Human adenovirus C
gcaugaaagccuugau

SEQ ID NO: 1554056 - RNA, 21 nt, Human adenovirus C
cggcacugccgcccaacgcgc

SEQ ID NO: 1554057 - RNA, 20 nt, Human adenovirus C
caucuccuucgcccgccgcu

SEQ ID NO: 1554058 - RNA, 18 nt, Human adenovirus C
gcgugucccgggacacau

SEQ ID NO: 1554059 - RNA, 17 nt, Human adenovirus C
accuccuccuccugcca

SEQ ID NO: 1554060 - RNA, 18 nt, Human adenovirus C
uccgggguugaaacucac

SEQ ID NO: 1554061 - RNA, 18 nt, Human adenovirus C
agucacaagccccacuga

SEQ ID NO: 1554062 - RNA, 14 nt, Human adenovirus C
uacuaagaaaacac

SEQ ID NO: 1554063 - RNA, 16 nt, Human adenovirus C
cagucguagcaggagc

SEQ ID NO: 1554064 - RNA, 18 nt, Human adenovirus C
cgggacgcucuggccggu

SEQ ID NO: 1554065 - RNA, 21 nt, Human adenovirus C
ccuaauaagcaaugacagcac

SEQ ID NO: 1554066 - RNA, 21 nt, Human adenovirus C
uaaaacauaaauaaaaaccag

SEQ ID NO: 1554067 - RNA, 13 nt, Human adenovirus C
guagcgccacauc

SEQ ID NO: 1554068 - RNA, 12 nt, Human adenovirus C
gucacacagaag

SEQ ID NO: 1554069 - RNA, 22 nt, Human adenovirus C
gcacgaaggaggcguaggaguc

SEQ ID NO: 1554070 - RNA, 18 nt, Human adenovirus C
gcauguuuucccugacca

SEQ ID NO: 1554071 - RNA, 13 nt, Human adenovirus C
agccuggcugaca

SEQ ID NO: 1554072 - RNA, 20 nt, Human adenovirus C
gacugggguuugacccaguc

SEQ ID NO: 1554073 - RNA, 19 nt, Human adenovirus C
acgggcggcggccugggcg

SEQ ID NO: 1554074 - RNA, 15 nt, Human adenovirus C
ccgccggcacugccu

SEQ ID NO: 1554075 - RNA, 13 nt, Human adenovirus C
ccgugcuggcccc

SEQ ID NO: 1554076 - RNA, 14 nt, Human adenovirus C
aggacuaaaaaaug

SEQ ID NO: 1554077 - RNA, 22 nt, Human adenovirus C
aaugcacuacucuuauaaaaug

SEQ ID NO: 1554078 - RNA, 21 nt, Human adenovirus C
gcguagcacgucgccaccgcc

SEQ ID NO: 1554079 - RNA, 19 nt, Human adenovirus C
ccaggacgacgcagaggca

SEQ ID NO: 1554080 - RNA, 16 nt, Human adenovirus C
ucccguucauccgccc

SEQ ID NO: 1554081 - RNA, 17 nt, Human adenovirus C
ccgcugcgcaacagcau

SEQ ID NO: 1554082 - RNA, 23 nt, Human adenovirus C
uccaggcgcggcggcugcugcgc

SEQ ID NO: 1554083 - RNA, 15 nt, Human adenovirus C
aaaugggaugucaaa

SEQ ID NO: 1554084 - RNA, 15 nt, Human adenovirus C
gguucacccuggcug

SEQ ID NO: 1554085 - RNA, 22 nt, Human adenovirus C
cgcggggacaggaggacuacac

SEQ ID NO: 1554086 - RNA, 19 nt, Human adenovirus C
guggccuugcaggcgcaga

SEQ ID NO: 1554087 - RNA, 18 nt, Human adenovirus C
gcaguggucuccucagcg

SEQ ID NO: 1554088 - RNA, 16 nt, Human adenovirus C
gcaaccaggaacagcu

SEQ ID NO: 1554089 - RNA, 23 nt, Human adenovirus C
ggccuggcgcaaaaucuccugca

SEQ ID NO: 1554090 - RNA, 14 nt, Human adenovirus C
ugaugggcuccagc

SEQ ID NO: 1554091 - RNA, 20 nt, Human adenovirus C
gcagcuggccuugcggcagg

SEQ ID NO: 1554092 - RNA, 18 nt, Human adenovirus C
caagcagugcagcuuccc

SEQ ID NO: 1554093 - RNA, 14 nt, Human adenovirus C
cagggaugcgcugc

SEQ ID NO: 1554094 - RNA, 17 nt, Human adenovirus C
gcgcaacuagauugcaa

SEQ ID NO: 1554095 - RNA, 20 nt, Human adenovirus C
ucuacuggggcuccugucgc

SEQ ID NO: 1554096 - RNA, 15 nt, Human adenovirus C
agcaccuucaaccau

SEQ ID NO: 1554097 - RNA, 19 nt, Human adenovirus C
gcccuaccugugcuuugcu

SEQ ID NO: 1554098 - RNA, 18 nt, Human adenovirus C
ucuccuucgcccgccgcu

SEQ ID NO: 1554099 - RNA, 16 nt, Human adenovirus C
ggcgccgcgcgcgggc

SEQ ID NO: 1554100 - RNA, 17 nt, Human adenovirus C
gccuguuugaaaggugu

SEQ ID NO: 1554101 - RNA, 18 nt, Human adenovirus C
ugauucgggaguuuacca

SEQ ID NO: 1554102 - RNA, 18 nt, Human adenovirus C
cuuccuggagcgccacuc

SEQ ID NO: 1554103 - RNA, 12 nt, Human adenovirus C
cagcggcagcaa

SEQ ID NO: 1554104 - RNA, 21 nt, Human adenovirus C
cgugacacugcagcaggugcu

SEQ ID NO: 1554105 - RNA, 14 nt, Human adenovirus C
gcgcugcagagcca

SEQ ID NO: 1554106 - RNA, 14 nt, Human adenovirus C
uccaagauggcuac

SEQ ID NO: 1554107 - RNA, 15 nt, Human adenovirus C
ggcggcaggagcaga

SEQ ID NO: 1554108 - RNA, 20 nt, Human adenovirus C
ucacggugaaggggugcgcu

SEQ ID NO: 1554109 - RNA, 22 nt, Human adenovirus C
cuugcuuguauuccccuggaca

SEQ ID NO: 1554110 - RNA, 19 nt, Human adenovirus C
gcaagacucugacaaagcc

SEQ ID NO: 1554111 - RNA, 14 nt, Human adenovirus C
aaagcaaggccugc

SEQ ID NO: 1554112 - RNA, 20 nt, Human adenovirus C
cccaguccggcgaggagcuc

SEQ ID NO: 1554113 - RNA, 23 nt, Human adenovirus C
cuguugaagcaucugcagcgcca

SEQ ID NO: 1554114 - RNA, 18 nt, Human adenovirus C
ggagcugcugagccgccg

SEQ ID NO: 1554115 - RNA, 16 nt, Human adenovirus C
aucucccgccaccagu

SEQ ID NO: 1554116 - RNA, 14 nt, Human adenovirus C
agcaggggggccac

SEQ ID NO: 1554117 - RNA, 17 nt, Human adenovirus C
aucgcaacaccacugcu

SEQ ID NO: 1554118 - RNA, 14 nt, Human adenovirus C
gggcaaagaagcgc

SEQ ID NO: 1554119 - RNA, 23 nt, Human adenovirus C
caagcugauugccaggggcaggc

SEQ ID NO: 1554120 - RNA, 22 nt, Human adenovirus C
ccaaacuuaccuacgaaaaaac

SEQ ID NO: 1554121 - RNA, 20 nt, Human adenovirus C
cagcuguuggaucugcgcca

SEQ ID NO: 1554122 - RNA, 20 nt, Human adenovirus C
acccaaaaagaagcugcagc

SEQ ID NO: 1554123 - RNA, 19 nt, Human adenovirus C
aaugggcccacgggcggcg

SEQ ID NO: 1554124 - RNA, 19 nt, Human adenovirus C
ccucggcgguggcagaugc

SEQ ID NO: 1554125 - RNA, 19 nt, Human adenovirus C
gggcgggcccccggaggua

SEQ ID NO: 1554126 - RNA, 14 nt, Human adenovirus C
aggcccuuggugua

SEQ ID NO: 1554127 - RNA, 15 nt, Human adenovirus C
agggcauggagacac

SEQ ID NO: 1554128 - RNA, 20 nt, Human adenovirus C
cggagaugcagcgcaagcua

SEQ ID NO: 1554129 - RNA, 14 nt, Human adenovirus C
gcgcaggguggcuc

SEQ ID NO: 1554130 - RNA, 18 nt, Human adenovirus C
ggcgucaucgagaccgug

SEQ ID NO: 1554131 - RNA, 20 nt, Human adenovirus C
acaaauaggaucagacaaug

SEQ ID NO: 1554132 - RNA, 15 nt, Human adenovirus C
agggccgcuggcugc

SEQ ID NO: 1554133 - RNA, 20 nt, Human adenovirus C
ccaggugaugccggcggcgg

SEQ ID NO: 1554134 - RNA, 18 nt, Human adenovirus C
cugcccaagacuacucaa

SEQ ID NO: 1554135 - RNA, 18 nt, Human adenovirus C
cgcuucagccgcugcagc

SEQ ID NO: 1554136 - RNA, 17 nt, Human adenovirus C
cgucgccaccgccgccg

SEQ ID NO: 1554137 - RNA, 17 nt, Human adenovirus C
agcggggugguggaccu

SEQ ID NO: 1554138 - RNA, 16 nt, Human adenovirus C
cuggcgguagaggggc

SEQ ID NO: 1554139 - RNA, 16 nt, Human adenovirus C
gcagggauacggcgcu

SEQ ID NO: 1554140 - RNA, 18 nt, Human adenovirus C
accacuguuacucagcca

SEQ ID NO: 1554141 - RNA, 15 nt, Human adenovirus C
ccgugcuggccccga

SEQ ID NO: 1554142 - RNA, 16 nt, Human adenovirus C
gcugcgcgcuggccag

SEQ ID NO: 1554143 - RNA, 12 nt, Human adenovirus C
ggacgcuggaag

SEQ ID NO: 1554144 - RNA, 12 nt, Human adenovirus C
aacaacucccau

SEQ ID NO: 1554145 - RNA, 22 nt, Human adenovirus C
aacgcucaucagugauauuaau

SEQ ID NO: 1554146 - RNA, 14 nt, Human adenovirus C
caaacgccaagaaa

SEQ ID NO: 1554147 - RNA, 22 nt, Human adenovirus C
cgcagcugccuguaucacaaaa

SEQ ID NO: 1554148 - RNA, 19 nt, Human adenovirus C
cguuccugcucucacagau

SEQ ID NO: 1554149 - RNA, 13 nt, Human adenovirus C
aucccagggaaca

SEQ ID NO: 1554150 - RNA, 19 nt, Human adenovirus C
guuccagacgcggcuguag

SEQ ID NO: 1554151 - RNA, 21 nt, Human adenovirus C
ggcuaccgcucguggcgcggg

SEQ ID NO: 1554152 - RNA, 16 nt, Human adenovirus C
cauguucucuucuuuu

SEQ ID NO: 1554153 - RNA, 16 nt, Human adenovirus C
gggcuguggggggugc

SEQ ID NO: 1554154 - RNA, 21 nt, Human adenovirus C
ugcaccguaggaggggcaugg

SEQ ID NO: 1554155 - RNA, 22 nt, Human adenovirus C
agacucggcggacggcuacgac

SEQ ID NO: 1554156 - RNA, 17 nt, Human adenovirus C
guggauuacccauuuga

SEQ ID NO: 1554157 - RNA, 17 nt, Human adenovirus C
agcuugaucugcuggcg

SEQ ID NO: 1554158 - RNA, 19 nt, Human adenovirus C
cacgcuggaagccaugcuc

SEQ ID NO: 1554159 - RNA, 22 nt, Human adenovirus C
cuugagcaggccaacgagcgcc

SEQ ID NO: 1554160 - RNA, 15 nt, Human adenovirus C
aguaacugcagcaca

SEQ ID NO: 1554161 - RNA, 18 nt, Human adenovirus C
agggccuccccuucuucu

SEQ ID NO: 1554162 - RNA, 15 nt, Human adenovirus C
caucucgggccagga

SEQ ID NO: 1554163 - RNA, 18 nt, Human adenovirus C
auugcgcuguaccugcca

SEQ ID NO: 1554164 - RNA, 14 nt, Human adenovirus C
agcgcacugcggcu

SEQ ID NO: 1554165 - RNA, 14 nt, Human adenovirus C
cugcugcuggaagg

SEQ ID NO: 1554166 - RNA, 12 nt, Human adenovirus C
ccgccgccgcag

SEQ ID NO: 1554167 - RNA, 21 nt, Human adenovirus C
gcucguccagacgggccaggg

SEQ ID NO: 1554168 - RNA, 18 nt, Human adenovirus C
agguggucgcgaaagguc

SEQ ID NO: 1554169 - RNA, 14 nt, Human adenovirus C
uacuuacuuaaaau

SEQ ID NO: 1554170 - RNA, 11 nt, Human adenovirus C
ggcggcagcgg

SEQ ID NO: 1554171 - RNA, 15 nt, Human adenovirus C
acgugguccgugugc

SEQ ID NO: 1554172 - RNA, 22 nt, Human adenovirus C
cuuaaaagccaccugagccuuu

SEQ ID NO: 1554173 - RNA, 11 nt, Human adenovirus C
cugcagcagcg

SEQ ID NO: 1554174 - RNA, 22 nt, Human adenovirus C
cuaccccguauuugccgugcca

SEQ ID NO: 1554175 - RNA, 23 nt, Human adenovirus C
cgcgaggccauaggucaggcgca

SEQ ID NO: 1554176 - RNA, 16 nt, Human adenovirus C
acuaccuugccuacca

SEQ ID NO: 1554177 - RNA, 22 nt, Human adenovirus C
accguggcgggcggcagcgggu

SEQ ID NO: 1554178 - RNA, 22 nt, Human adenovirus C
agaccguaaaccugagccaggc

SEQ ID NO: 1554179 - RNA, 22 nt, Human adenovirus C
gcccugcucccagagcaaaaag

SEQ ID NO: 1554180 - RNA, 14 nt, Human adenovirus C
caaagcccaagaaa

SEQ ID NO: 1554181 - RNA, 14 nt, Human adenovirus C
gcggcaggagcaga

SEQ ID NO: 1554182 - RNA, 21 nt, Human adenovirus C
caaaauguaaccacuguuacu

SEQ ID NO: 1554183 - RNA, 14 nt, Human adenovirus C
cagcuggggccgga

SEQ ID NO: 1554184 - RNA, 14 nt, Human adenovirus C
gcgggcacucuucc

SEQ ID NO: 1554185 - RNA, 19 nt, Human adenovirus C
guccuccgcguugcucagg

SEQ ID NO: 1554186 - RNA, 23 nt, Human adenovirus C
cuugagacgcgcgagccugccga

SEQ ID NO: 1554187 - RNA, 16 nt, Human adenovirus C
uuucgcguuucagccc

SEQ ID NO: 1554188 - RNA, 17 nt, Human adenovirus C
cguucagauacccacca

SEQ ID NO: 1554189 - RNA, 13 nt, Human adenovirus C
gaaacacagagcu

SEQ ID NO: 1554190 - RNA, 12 nt, Human adenovirus C
aggugcagaccc

SEQ ID NO: 1554191 - RNA, 18 nt, Human adenovirus C
ucuuuccaguacucuugg

SEQ ID NO: 1554192 - RNA, 22 nt, Human adenovirus C
aaguauuccauagagcagcuga

SEQ ID NO: 1554193 - RNA, 15 nt, Human adenovirus C
gaaagcuuccgcagg

SEQ ID NO: 1554194 - RNA, 23 nt, Human adenovirus C
aucuuccaccgcggaugcuggcg

SEQ ID NO: 1554195 - RNA, 15 nt, Human adenovirus C
cucaaauacuaccuc

SEQ ID NO: 1554196 - RNA, 21 nt, Human adenovirus C
uaauacugccauagcuauaaa

SEQ ID NO: 1554197 - RNA, 15 nt, Human adenovirus C
ccaacuaccuugccu

SEQ ID NO: 1554198 - RNA, 18 nt, Human adenovirus C
uugccagacaugaugcaa

SEQ ID NO: 1554199 - RNA, 15 nt, Human adenovirus C
agcccgagagcaugu

SEQ ID NO: 1554200 - RNA, 14 nt, Human adenovirus C
cgacuuaccgcagc

SEQ ID NO: 1554201 - RNA, 15 nt, Human adenovirus C
ucacggugaaggggu

SEQ ID NO: 1554202 - RNA, 20 nt, Human adenovirus C
cgcggcaaacgcucugcaac

SEQ ID NO: 1554203 - RNA, 15 nt, Human adenovirus C
cgaccgcgagcugau

SEQ ID NO: 1554204 - RNA, 21 nt, Human adenovirus C
cguaggcgcucguugguccag

SEQ ID NO: 1554205 - RNA, 13 nt, Human adenovirus C
accgcccccuggu

SEQ ID NO: 1554206 - RNA, 11 nt, Human adenovirus C
augagcagcug

SEQ ID NO: 1554207 - RNA, 15 nt, Human adenovirus C
ccgcgcgcgggcagg

SEQ ID NO: 1554208 - RNA, 14 nt, Human adenovirus C
gacuuggaggagcg

SEQ ID NO: 1554209 - RNA, 21 nt, Human adenovirus C
aacaugguguguggcaacugc

SEQ ID NO: 1554210 - RNA, 18 nt, Human adenovirus C
auucaaccugccaccucc

SEQ ID NO: 1554211 - RNA, 13 nt, Human adenovirus C
cuagcuugcugac

SEQ ID NO: 1554212 - RNA, 15 nt, Human adenovirus C
gaguauaauaaauac

SEQ ID NO: 1554213 - RNA, 18 nt, Human adenovirus C
aucaugauugcaaaaauu

SEQ ID NO: 1554214 - RNA, 18 nt, Human adenovirus C
gaucuccgcguccggcuc

SEQ ID NO: 1554215 - RNA, 14 nt, Human adenovirus C
gcaagcacacagac

SEQ ID NO: 1554216 - RNA, 20 nt, Human adenovirus C
agccgcggcaaugcagccgg

SEQ ID NO: 1554217 - RNA, 14 nt, Human adenovirus C
ugaccaaggacugg

SEQ ID NO: 1554218 - RNA, 22 nt, Human adenovirus C
ccucggacucgagacgccgccu

SEQ ID NO: 1554219 - RNA, 18 nt, Human adenovirus C
gagcacagucaugagcga

SEQ ID NO: 1554220 - RNA, 16 nt, Human adenovirus C
ggcugcgcaccaucac

SEQ ID NO: 1554221 - RNA, 17 nt, Human adenovirus C
cucacuuaaaucagcac

SEQ ID NO: 1554222 - RNA, 13 nt, Human adenovirus C
caaacgacugcag

SEQ ID NO: 1554223 - RNA, 20 nt, Human adenovirus C
augcguccaugucgccgcca

SEQ ID NO: 1554224 - RNA, 14 nt, Human adenovirus C
cgggcgcagggucc

SEQ ID NO: 1554225 - RNA, 16 nt, Human adenovirus C
cgccgcacgaggggca

SEQ ID NO: 1554226 - RNA, 12 nt, Human adenovirus C
ccgggcugcgcg

SEQ ID NO: 1554227 - RNA, 22 nt, Human adenovirus C
gucuagcugcgucucguccggg

SEQ ID NO: 1554228 - RNA, 14 nt, Human adenovirus C
acuuccagcccaug

SEQ ID NO: 1554229 - RNA, 16 nt, Human adenovirus C
agauccgcguccaggu

SEQ ID NO: 1554230 - RNA, 16 nt, Human adenovirus C
gcuccucaggcgccgc

SEQ ID NO: 1554231 - RNA, 21 nt, Human adenovirus C
gaccuggccaaccaggcagug

SEQ ID NO: 1554232 - RNA, 14 nt, Human adenovirus C
ggcagcggcagcaa

SEQ ID NO: 1554233 - RNA, 16 nt, Human adenovirus C
agcaacagcaggagga

SEQ ID NO: 1554234 - RNA, 13 nt, Human adenovirus C
cuggcgcagaagu

SEQ ID NO: 1554235 - RNA, 16 nt, Human adenovirus C
gcgcugcuccucuucc

SEQ ID NO: 1554236 - RNA, 20 nt, Human adenovirus C
ggcacucuuccguggucugg

SEQ ID NO: 1554237 - RNA, 14 nt, Human adenovirus C
ugaugccuuugagg

SEQ ID NO: 1554238 - RNA, 12 nt, Human adenovirus C
cuucauucaguu

SEQ ID NO: 1554239 - RNA, 19 nt, Human adenovirus C
cucccauggaucacaaccc

SEQ ID NO: 1554240 - RNA, 17 nt, Human adenovirus C
ccagcaucguuuaaaag

SEQ ID NO: 1554241 - RNA, 16 nt, Human adenovirus C
cugcggcucggagcag

SEQ ID NO: 1554242 - RNA, 23 nt, Human adenovirus C
agcgcaaccuaaaggagcugcag

SEQ ID NO: 1554243 - RNA, 21 nt, Human adenovirus C
cauggcgccauccaccaccau

SEQ ID NO: 1554244 - RNA, 16 nt, Human adenovirus C
aguuggcccgcugccc

SEQ ID NO: 1554245 - RNA, 15 nt, Human adenovirus C
agacguugaagcugg

SEQ ID NO: 1554246 - RNA, 16 nt, Human adenovirus C
cagagacgcccaggcc

SEQ ID NO: 1554247 - RNA, 15 nt, Human adenovirus C
uagugaauccacaga

SEQ ID NO: 1554248 - RNA, 14 nt, Human adenovirus C
cgaggccgaagagg

SEQ ID NO: 1554249 - RNA, 22 nt, Human adenovirus C
gcccaacucggccgccugugga

SEQ ID NO: 1554250 - RNA, 19 nt, Human adenovirus C
ccgagcggacaagcagcug

SEQ ID NO: 1554251 - RNA, 20 nt, Human adenovirus C
aacuuugauaauacugccau

SEQ ID NO: 1554252 - RNA, 13 nt, Human adenovirus C
cagcggcggcagc

SEQ ID NO: 1554253 - RNA, 17 nt, Human adenovirus C
gguagugggucuagcug

SEQ ID NO: 1554254 - RNA, 18 nt, Human adenovirus C
ccaacgcggcagccgcgg

SEQ ID NO: 1554255 - RNA, 14 nt, Human adenovirus C
agauguugcacaau

SEQ ID NO: 1554256 - RNA, 15 nt, Human adenovirus C
gagcucagcgaccgc

SEQ ID NO: 1554257 - RNA, 21 nt, Human adenovirus C
aaggccuggccaguguuugag

SEQ ID NO: 1554258 - RNA, 19 nt, Human adenovirus C
gggagcggggggcuucuga

SEQ ID NO: 1554259 - RNA, 17 nt, Human adenovirus C
cuacgccaacuccgccc

SEQ ID NO: 1554260 - RNA, 17 nt, Human adenovirus C
ccauggucuggagcucc

SEQ ID NO: 1554261 - RNA, 10 nt, Human adenovirus C
cuggccaggg

SEQ ID NO: 1554262 - RNA, 16 nt, Human adenovirus C
uuaggccagauugcaa

SEQ ID NO: 1554263 - RNA, 14 nt, Human adenovirus C
gcgcgaggcguacg

SEQ ID NO: 1554264 - RNA, 18 nt, Human adenovirus C
cagaagacggaugagcuc

SEQ ID NO: 1554265 - RNA, 15 nt, Human adenovirus C
gcccucaccugccgc

SEQ ID NO: 1554266 - RNA, 21 nt, Human adenovirus C
caugcgagcccaacccgcgcc

SEQ ID NO: 1554267 - RNA, 18 nt, Human adenovirus C
ccgagggccgcuggcugc

SEQ ID NO: 1554268 - RNA, 20 nt, Human adenovirus C
cacggcggcgacgacggcgc

SEQ ID NO: 1554269 - RNA, 12 nt, Human adenovirus C
aggagcugaggc

SEQ ID NO: 1554270 - RNA, 22 nt, Human adenovirus C
cgccuguggacuauucugcugc

SEQ ID NO: 1554271 - RNA, 20 nt, Human adenovirus C
ccgcggugcaggcggccgcu

SEQ ID NO: 1554272 - RNA, 17 nt, Human adenovirus C
agucugcagcgcugcca

SEQ ID NO: 1554273 - RNA, 15 nt, Human adenovirus C
aacgccuuccugagu

SEQ ID NO: 1554274 - RNA, 21 nt, Human adenovirus C
agaugccgcggugcaggcggc

SEQ ID NO: 1554275 - RNA, 19 nt, Human adenovirus C
cagagggcgagguauucag

SEQ ID NO: 1554276 - RNA, 15 nt, Human adenovirus C
ccaacucggccgccu

SEQ ID NO: 1554277 - RNA, 21 nt, Human adenovirus C
ucccauccaagguccacggcu

SEQ ID NO: 1554278 - RNA, 21 nt, Human adenovirus C
cuucagaaacuuccagcccau

SEQ ID NO: 1554279 - RNA, 16 nt, Human adenovirus C
cugccaggaugcgggg

SEQ ID NO: 1554280 - RNA, 14 nt, Human adenovirus C
cugaaacccaccau

SEQ ID NO: 1554281 - RNA, 15 nt, Human adenovirus C
cagcggcggcagcag

SEQ ID NO: 1554282 - RNA, 22 nt, Human adenovirus C
ccauggcccacaacacggccuc

SEQ ID NO: 1554283 - RNA, 21 nt, Human adenovirus C
cacgggacgcuaccgcugcgc

SEQ ID NO: 1554284 - RNA, 14 nt, Human adenovirus C
ggaggggcaacauc

SEQ ID NO: 1554285 - RNA, 14 nt, Human adenovirus C
agagcugcagcugc

SEQ ID NO: 1554286 - RNA, 15 nt, Human adenovirus C
aagcaaaccucaccu

SEQ ID NO: 1554287 - RNA, 23 nt, Human adenovirus C
gcaacagcaggaggaagccaggc

SEQ ID NO: 1554288 - RNA, 22 nt, Human adenovirus C
uggugacgcaaauagaugagcc

SEQ ID NO: 1554289 - RNA, 18 nt, Human adenovirus C
caugcagggcacccuccc

SEQ ID NO: 1554290 - RNA, 14 nt, Human adenovirus C
cuggugugggagga

SEQ ID NO: 1554291 - RNA, 19 nt, Human adenovirus C
cggccacuuccccgccagg

SEQ ID NO: 1554292 - RNA, 17 nt, Human adenovirus C
guugagucgcaggaccc

SEQ ID NO: 1554293 - RNA, 17 nt, Human adenovirus C
uuccaaaacugcaagau

SEQ ID NO: 1554294 - RNA, 17 nt, Human adenovirus C
agcggcgcggaagagaa

SEQ ID NO: 1554295 - RNA, 13 nt, Human adenovirus C
auucaucaaacaa

SEQ ID NO: 1554296 - RNA, 12 nt, Human adenovirus C
cugaggccgagg

SEQ ID NO: 1554297 - RNA, 20 nt, Human adenovirus C
cuuggguauccugucugagg

SEQ ID NO: 1554298 - RNA, 14 nt, Human adenovirus C
aggccuggaacagc

SEQ ID NO: 1554299 - RNA, 19 nt, Human adenovirus C
cgcacggcguccggcucac

SEQ ID NO: 1554300 - RNA, 14 nt, Human adenovirus C
cucccggccacuac

SEQ ID NO: 1554301 - RNA, 21 nt, Human adenovirus C
gguggcugaacuguuuccaga

SEQ ID NO: 1554302 - RNA, 23 nt, Human adenovirus C
caccuccuuuccuuccucccaac

SEQ ID NO: 1554303 - RNA, 17 nt, Human adenovirus C
gcgcaccaccggcggcg

SEQ ID NO: 1554304 - RNA, 12 nt, Human adenovirus C
ccugucccuuuu

SEQ ID NO: 1554305 - RNA, 16 nt, Human adenovirus C
acguggcggccgccga

SEQ ID NO: 1554306 - RNA, 19 nt, Human adenovirus C
cacuuaauggcacuaguga

SEQ ID NO: 1554307 - RNA, 21 nt, Human adenovirus C
uuguagguuaccucugcaaac

SEQ ID NO: 1554308 - RNA, 16 nt, Human adenovirus C
aaaccugugcugccag

SEQ ID NO: 1554309 - RNA, 15 nt, Human adenovirus C
cggaggugcugcuga

SEQ ID NO: 1554310 - RNA, 20 nt, Human adenovirus C
aagggugcaugcccaggcuu

SEQ ID NO: 1554311 - RNA, 23 nt, Human adenovirus C
accugggcuggcgguggcacccg

SEQ ID NO: 1554312 - RNA, 18 nt, Human adenovirus C
ccagaggaccucugcacu

SEQ ID NO: 1554313 - RNA, 18 nt, Human adenovirus C
ccucuucccgacuggcca

SEQ ID NO: 1554314 - RNA, 19 nt, Human adenovirus C
ggcggcuauuaccaccaca

SEQ ID NO: 1554315 - RNA, 22 nt, Human adenovirus C
cugcaccacauuucggccccac

SEQ ID NO: 1554316 - RNA, 17 nt, Human adenovirus C
cuacauugcccaggaau

SEQ ID NO: 1554317 - RNA, 14 nt, Human adenovirus C
ucacuuuccgcuuc

SEQ ID NO: 1554318 - RNA, 13 nt, Human adenovirus C
cacugccgccgcc

SEQ ID NO: 1554319 - RNA, 18 nt, Human adenovirus C
uuacaauaggaaacaaaa

SEQ ID NO: 1554320 - RNA, 19 nt, Human adenovirus C
cgcuugcuuguauuccccu

SEQ ID NO: 1554321 - RNA, 17 nt, Human adenovirus C
cagaaacuuccagccca

SEQ ID NO: 1554322 - RNA, 19 nt, Human adenovirus C
acagagggcauggagacac

SEQ ID NO: 1554323 - RNA, 14 nt, Human adenovirus C
cggcagacgacagc

SEQ ID NO: 1554324 - RNA, 17 nt, Human adenovirus C
ugcugcgcgaggaggac

SEQ ID NO: 1554325 - RNA, 13 nt, Human adenovirus C
gcggcggcaggag

SEQ ID NO: 1554326 - RNA, 17 nt, Human adenovirus C
auuauucgccacaaaga

SEQ ID NO: 1554327 - RNA, 14 nt, Human adenovirus C
acaucauggaagac

SEQ ID NO: 1554328 - RNA, 18 nt, Human adenovirus C
cauuuuaaaaaaacuaca

SEQ ID NO: 1554329 - RNA, 17 nt, Human adenovirus C
cgcuaugcgccacuggc

SEQ ID NO: 1554330 - RNA, 18 nt, Human adenovirus C
cgcgcaaaccccacgcac

SEQ ID NO: 1554331 - RNA, 16 nt, Human adenovirus C
ucccagggaacaaccc

SEQ ID NO: 1554332 - RNA, 17 nt, Human adenovirus C
uaccuuuuuaaugcauc

SEQ ID NO: 1554333 - RNA, 16 nt, Human adenovirus C
cucgcguccaggccag

SEQ ID NO: 1554334 - RNA, 16 nt, Human adenovirus C
cggccauucagaccgu

SEQ ID NO: 1554335 - RNA, 22 nt, Human adenovirus C
agccuuucuaccggcacuucuu

SEQ ID NO: 1554336 - RNA, 15 nt, Human adenovirus C
ugagauuagcuacuu

SEQ ID NO: 1554337 - RNA, 16 nt, Human adenovirus C
cggcgcgcaacgaagc

SEQ ID NO: 1554338 - RNA, 19 nt, Human adenovirus C
guuuuggacgaggaggagg

SEQ ID NO: 1554339 - RNA, 16 nt, Human adenovirus C
gagcuugaucugcugg

SEQ ID NO: 1554340 - RNA, 22 nt, Human adenovirus C
cagaggggcguggcgaaaagcg

SEQ ID NO: 1554341 - RNA, 14 nt, Human adenovirus C
cugaguauuccaag

SEQ ID NO: 1554342 - RNA, 20 nt, Human adenovirus C
agaccaguagacaaggccug

SEQ ID NO: 1554343 - RNA, 14 nt, Human adenovirus C
gaugcacagccugc

SEQ ID NO: 1554344 - RNA, 18 nt, Human adenovirus C
cacaacacggccuccacg

SEQ ID NO: 1554345 - RNA, 18 nt, Human adenovirus C
ggagccugggcuggagcc

SEQ ID NO: 1554346 - RNA, 13 nt, Human adenovirus C
gcgggggcgcagu

SEQ ID NO: 1554347 - RNA, 21 nt, Human adenovirus C
uacauggacaaaagaugaaac

SEQ ID NO: 1554348 - RNA, 22 nt, Human adenovirus C
auuaagaaaugccuguuugaaa

SEQ ID NO: 1554349 - RNA, 13 nt, Human adenovirus C
gggcguguggcag

SEQ ID NO: 1554350 - RNA, 21 nt, Human adenovirus C
ucagcgcagcggugcagccac

SEQ ID NO: 1554351 - RNA, 12 nt, Human adenovirus C
aagauggcuacc

SEQ ID NO: 1554352 - RNA, 21 nt, Human adenovirus C
ggaucacaaccccaccaugaa

SEQ ID NO: 1554353 - RNA, 16 nt, Human adenovirus C
auccauaugacacaga

SEQ ID NO: 1554354 - RNA, 15 nt, Human adenovirus C
ucucuuccuccugga

SEQ ID NO: 1554355 - RNA, 15 nt, Human adenovirus C
acuuacccuguggac

SEQ ID NO: 1554356 - RNA, 22 nt, Human adenovirus C
ccccuacugcaccggcggcagc

SEQ ID NO: 1554357 - RNA, 17 nt, Human adenovirus C
guccaggguuuccuuga

SEQ ID NO: 1554358 - RNA, 14 nt, Human adenovirus C
ggacaaaagaugaa

SEQ ID NO: 1554359 - RNA, 14 nt, Human adenovirus C
acccccacugagau

SEQ ID NO: 1554360 - RNA, 15 nt, Human adenovirus C
gcgccuucagcuggg

SEQ ID NO: 1554361 - RNA, 20 nt, Human adenovirus C
guccgaagaaaagcgcggcc

SEQ ID NO: 1554362 - RNA, 17 nt, Human adenovirus C
cuaagcagccgccgccg

SEQ ID NO: 1554363 - RNA, 15 nt, Human adenovirus C
gccuguugcugcugc

SEQ ID NO: 1554364 - RNA, 14 nt, Human adenovirus C
cagacgacagcagc

SEQ ID NO: 1554365 - RNA, 18 nt, Human adenovirus C
gccgacgcgcccuggagg

SEQ ID NO: 1554366 - RNA, 22 nt, Human adenovirus C
cuggccgcggguauugucacug

SEQ ID NO: 1554367 - RNA, 15 nt, Human adenovirus C
cgcugcggcugcugu

SEQ ID NO: 1554368 - RNA, 16 nt, Human adenovirus C
cggcacuaccuggacu

SEQ ID NO: 1554369 - RNA, 14 nt, Human adenovirus C
ccacuuaaaaaaac

SEQ ID NO: 1554370 - RNA, 13 nt, Human adenovirus C
ugcuauauuucaa

SEQ ID NO: 1554371 - RNA, 17 nt, Human adenovirus C
accauuacugacgccag

SEQ ID NO: 1554372 - RNA, 15 nt, Human adenovirus C
ccuaucauugugcuc

SEQ ID NO: 1554373 - RNA, 21 nt, Human adenovirus C
cgggucaacggaauccgcgcc

SEQ ID NO: 1554374 - RNA, 20 nt, Human adenovirus C
caagugcuuugcccgcggcu

SEQ ID NO: 1554375 - RNA, 16 nt, Human adenovirus C
gccuaccggggggaga

SEQ ID NO: 1554376 - RNA, 22 nt, Human adenovirus C
ugcaagacagaaacacagagcu

SEQ ID NO: 1554377 - RNA, 20 nt, Human adenovirus C
cgcgcagcagcagggcaacc

SEQ ID NO: 1554378 - RNA, 18 nt, Human adenovirus C
agcgcuccacccgcaccu

SEQ ID NO: 1554379 - RNA, 14 nt, Human adenovirus C
gaccguggagccug

SEQ ID NO: 1554380 - RNA, 24 nt, Human adenovirus C
ggcagccaggugacacuaacgacu

SEQ ID NO: 1554381 - RNA, 21 nt, Human adenovirus C
ugcaagaccccgugaccuucc

SEQ ID NO: 1554382 - RNA, 16 nt, Human adenovirus C
ggugaaggggugcgcu

SEQ ID NO: 1554383 - RNA, 19 nt, Human adenovirus C
ggcggaggcgcguagcacg

SEQ ID NO: 1554384 - RNA, 18 nt, Human adenovirus C
ucagauaaugacugcaaa

SEQ ID NO: 1554385 - RNA, 14 nt, Human adenovirus C
gcgcgucgcaccgu

SEQ ID NO: 1554386 - RNA, 12 nt, Human adenovirus C
aagcuaaaccug

SEQ ID NO: 1554387 - RNA, 23 nt, Human adenovirus C
cuaagcauugcuacuaaagggcc

SEQ ID NO: 1554388 - RNA, 18 nt, Human adenovirus C
cugcagagcucucuggga

SEQ ID NO: 1554389 - RNA, 14 nt, Human adenovirus C
gcagggcacccucc

SEQ ID NO: 1554390 - RNA, 14 nt, Human adenovirus C
gucuuuccacgggc

SEQ ID NO: 1554391 - RNA, 18 nt, Human adenovirus C
ucgccccaucaucgucac

SEQ ID NO: 1554392 - RNA, 15 nt, Human adenovirus C
uugaugaaaagaaaa

SEQ ID NO: 1554393 - RNA, 21 nt, Human adenovirus C
cugguaggcgcagcaucccuu

SEQ ID NO: 1554394 - RNA, 19 nt, Human adenovirus C
caaagcaggggccaagaac

SEQ ID NO: 1554395 - RNA, 15 nt, Human adenovirus C
cgaaugagcuccaca

SEQ ID NO: 1554396 - RNA, 23 nt, Human adenovirus C
ugcuuguagguuaccucugcaaa

SEQ ID NO: 1554397 - RNA, 21 nt, Human adenovirus C
aaaauucagguuccucacaga

SEQ ID NO: 1554398 - RNA, 14 nt, Human adenovirus C
cacgagcugcuucc

SEQ ID NO: 1554399 - RNA, 13 nt, Human adenovirus C
accuucacccagu

SEQ ID NO: 1554400 - RNA, 15 nt, Human adenovirus C
aguggacaagaugag

SEQ ID NO: 1554401 - RNA, 16 nt, Human adenovirus C
cccagcuucagcuugc

SEQ ID NO: 1554402 - RNA, 18 nt, Human adenovirus C
aagggugcaugcccaggc

SEQ ID NO: 1554403 - RNA, 19 nt, Human adenovirus C
acacaugucuaugcccagg

SEQ ID NO: 1554404 - RNA, 15 nt, Human adenovirus C
cacgcagcaccuugc

SEQ ID NO: 1554405 - RNA, 19 nt, Human adenovirus C
ccacagcucgcgguugagg

SEQ ID NO: 1554406 - RNA, 14 nt, Human adenovirus C
acccgcagcugccu

SEQ ID NO: 1554407 - RNA, 21 nt, Human adenovirus C
ugaggacuaccacgcccacga

SEQ ID NO: 1554408 - RNA, 19 nt, Human adenovirus C
auguacuaggagacacuuu

SEQ ID NO: 1554409 - RNA, 20 nt, Human adenovirus C
agagugcuuaaaaaaacaac

SEQ ID NO: 1554410 - RNA, 21 nt, Human adenovirus C
accggcggcggcgcgcgucgc

SEQ ID NO: 1554411 - RNA, 14 nt, Human adenovirus C
ucgcuaugcgccac

SEQ ID NO: 1554412 - RNA, 12 nt, Human adenovirus C
cuuguugaccag

SEQ ID NO: 1554413 - RNA, 15 nt, Human adenovirus C
uaauuaccugggcgg

SEQ ID NO: 1554414 - RNA, 22 nt, Human adenovirus C
uauaacucaccugaaaaucaga

SEQ ID NO: 1554415 - RNA, 19 nt, Human adenovirus C
gcgcgaggccguggcgcag

SEQ ID NO: 1554416 - RNA, 11 nt, Human adenovirus C
uaccagccaca

SEQ ID NO: 1554417 - RNA, 19 nt, Human adenovirus C
gugcguaacuugcuggaac

SEQ ID NO: 1554418 - RNA, 23 nt, Human adenovirus C
caccggccgacgggcggccaugc

SEQ ID NO: 1554419 - RNA, 23 nt, Human adenovirus C
aucccauggacgagcccacccuu

SEQ ID NO: 1554420 - RNA, 15 nt, Human adenovirus C
uggaucugcgccagc

SEQ ID NO: 1554421 - RNA, 18 nt, Human adenovirus C
gcaaaccucaccuccggu

SEQ ID NO: 1554422 - RNA, 16 nt, Human adenovirus C
cucgggcuugggagag

SEQ ID NO: 1554423 - RNA, 16 nt, Human adenovirus C
gcgcaacugggcagca

SEQ ID NO: 1554424 - RNA, 19 nt, Human adenovirus C
aaucagcguaaaucccaca

SEQ ID NO: 1554425 - RNA, 16 nt, Human adenovirus C
gcauguagaacugguu

SEQ ID NO: 1554426 - RNA, 14 nt, Human adenovirus C
ucucuacagccccu

SEQ ID NO: 1554427 - RNA, 18 nt, Human adenovirus C
cgaaucaugauugcaaaa

SEQ ID NO: 1554428 - RNA, 20 nt, Human adenovirus C
auuaagaaaugccuguuuga

SEQ ID NO: 1554429 - RNA, 22 nt, Human adenovirus C
accacccuacuuucccagugcc

SEQ ID NO: 1554430 - RNA, 13 nt, Human adenovirus C
cggcuggagcugc

SEQ ID NO: 1554431 - RNA, 21 nt, Human adenovirus C
ggcugcgcgcuggccagggug

SEQ ID NO: 1554432 - RNA, 20 nt, Human adenovirus C
ccuguguggaagccuggacc

SEQ ID NO: 1554433 - RNA, 15 nt, Human adenovirus C
accgcgucaggaggg

SEQ ID NO: 1554434 - RNA, 12 nt, Human adenovirus C
ccugcacuuccc

SEQ ID NO: 1554435 - RNA, 23 nt, Human adenovirus C
gcuccuucagcgcgcgcugcccg

SEQ ID NO: 1554436 - RNA, 15 nt, Human adenovirus C
uggagccugggcugg

SEQ ID NO: 1554437 - RNA, 16 nt, Human adenovirus C
cugcagaauuaaggag

SEQ ID NO: 1554438 - RNA, 19 nt, Human adenovirus C
acuggggcuccugucgcca

SEQ ID NO: 1554439 - RNA, 12 nt, Human adenovirus C
cgcgccagaccc

SEQ ID NO: 1554440 - RNA, 15 nt, Human adenovirus C
aacguguacugggug

SEQ ID NO: 1554441 - RNA, 14 nt, Human adenovirus C
acacaggcuggggc

SEQ ID NO: 1554442 - RNA, 20 nt, Human adenovirus C
gccucggaguaccugagccc

SEQ ID NO: 1554443 - RNA, 18 nt, Human adenovirus C
agcugcaaacuuucucca

SEQ ID NO: 1554444 - RNA, 19 nt, Human adenovirus C
accuggccaaccaggcagu

SEQ ID NO: 1554445 - RNA, 14 nt, Human adenovirus C
gcgggccaugagcu

SEQ ID NO: 1554446 - RNA, 23 nt, Human adenovirus C
agcgcagcgaugugccccucgcc

SEQ ID NO: 1554447 - RNA, 15 nt, Human adenovirus C
aucaaacaauacuaa

SEQ ID NO: 1554448 - RNA, 17 nt, Human adenovirus C
accgcgcgcccuggggc

SEQ ID NO: 1554449 - RNA, 21 nt, Human adenovirus C
cgcugcgguucaucccugugg

SEQ ID NO: 1554450 - RNA, 23 nt, Human adenovirus C
gaguacuaagcggugauguuucu

SEQ ID NO: 1554451 - RNA, 12 nt, Human adenovirus C
aagcaugaugca

SEQ ID NO: 1554452 - RNA, 20 nt, Human adenovirus C
acucccauuuuuccaaaaca

SEQ ID NO: 1554453 - RNA, 14 nt, Human adenovirus C
gcucagggcgaacg

SEQ ID NO: 1554454 - RNA, 18 nt, Human adenovirus C
ccaguggcaacuggcaaa

SEQ ID NO: 1554455 - RNA, 14 nt, Human adenovirus C
aguccgggccagac

SEQ ID NO: 1554456 - RNA, 23 nt, Human adenovirus C
gcgucccugcgccgugccgccag

SEQ ID NO: 1554457 - RNA, 16 nt, Human adenovirus C
gagggagaggagcccg

SEQ ID NO: 1554458 - RNA, 16 nt, Human adenovirus C
gcggagggugccagac

SEQ ID NO: 1554459 - RNA, 16 nt, Human adenovirus C
gcgcaacgcaccgcca

SEQ ID NO: 1554460 - RNA, 16 nt, Human adenovirus C
gcucccaaaccucagc

SEQ ID NO: 1554461 - RNA, 19 nt, Human adenovirus C
ccagguccuccgcguugcu

SEQ ID NO: 1554462 - RNA, 13 nt, Human adenovirus C
gagcucaacuccc

SEQ ID NO: 1554463 - RNA, 22 nt, Human adenovirus C
ucagcagguuggaauucuucac

SEQ ID NO: 1554464 - RNA, 19 nt, Human adenovirus C
cacaagaaucgccugcuac

SEQ ID NO: 1554465 - RNA, 15 nt, Human adenovirus C
gcacuggcaacaugg

SEQ ID NO: 1554466 - RNA, 14 nt, Human adenovirus C
gccgccaacaugcu

SEQ ID NO: 1554467 - RNA, 14 nt, Human adenovirus C
gagcaacaacagcg

SEQ ID NO: 1554468 - RNA, 15 nt, Human adenovirus C
cucaccacccaggua

SEQ ID NO: 1554469 - RNA, 20 nt, Human adenovirus C
gcucggaagacuaucugccu

SEQ ID NO: 1554470 - RNA, 19 nt, Human adenovirus C
uggcacccgcgcgcgcugg

SEQ ID NO: 1554471 - RNA, 16 nt, Human adenovirus C
cuuggagacgcccuug

SEQ ID NO: 1554472 - RNA, 13 nt, Human adenovirus C
aagcaagcaacau

SEQ ID NO: 1554473 - RNA, 22 nt, Human adenovirus C
uggcacccgcgcgcgcuggcaa

SEQ ID NO: 1554474 - RNA, 18 nt, Human adenovirus C
caagaaaaacaccaccac

SEQ ID NO: 1554475 - RNA, 22 nt, Human adenovirus C
cauucccagcugcuacaacaaa

SEQ ID NO: 1554476 - RNA, 18 nt, Human adenovirus C
cggaaaccucaccuccca

SEQ ID NO: 1554477 - RNA, 15 nt, Human adenovirus C
cuagcgagguaagca

SEQ ID NO: 1554478 - RNA, 13 nt, Human adenovirus C
gcaaccguuccca

SEQ ID NO: 1554479 - RNA, 18 nt, Human adenovirus C
aggcuaccucgcucccac

SEQ ID NO: 1554480 - RNA, 20 nt, Human adenovirus C
gcagguggucgcgaaagguc

SEQ ID NO: 1554481 - RNA, 16 nt, Human adenovirus C
ucgcagggccagcuga

SEQ ID NO: 1554482 - RNA, 15 nt, Human adenovirus C
cgcccuggaggcagc

SEQ ID NO: 1554483 - RNA, 14 nt, Human adenovirus C
cuugcaaggaagca

SEQ ID NO: 1554484 - RNA, 13 nt, Human adenovirus C
cuuccgcaggcca

SEQ ID NO: 1554485 - RNA, 17 nt, Human adenovirus C
ccugagcguaaccagac

SEQ ID NO: 1554486 - RNA, 21 nt, Human adenovirus C
cuucuccuacauugcccagga

SEQ ID NO: 1554487 - RNA, 11 nt, Human adenovirus C
aacgccaagaa

SEQ ID NO: 1554488 - RNA, 15 nt, Human adenovirus C
cccagggccacaucc

SEQ ID NO: 1554489 - RNA, 22 nt, Human adenovirus C
gccacccacggacgaggaggaa

SEQ ID NO: 1554490 - RNA, 20 nt, Human adenovirus C
aggggccagcguaggguggc

SEQ ID NO: 1554491 - RNA, 13 nt, Human adenovirus C
cgugcuggccccg

SEQ ID NO: 1554492 - RNA, 14 nt, Human adenovirus C
agagggggcagggg

SEQ ID NO: 1554493 - RNA, 21 nt, Human adenovirus C
cucuaugugggauaugcucca

SEQ ID NO: 1554494 - RNA, 22 nt, Human adenovirus C
acaauacuaaaaaacuggaagu

SEQ ID NO: 1554495 - RNA, 21 nt, Human adenovirus C
cgcguagcacgucgccaccgc

SEQ ID NO: 1554496 - RNA, 21 nt, Human adenovirus C
ugccauuaaaaaccuccuccu

SEQ ID NO: 1554497 - RNA, 17 nt, Human adenovirus C
uuaaaucagcacaguaa

SEQ ID NO: 1554498 - RNA, 13 nt, Human adenovirus C
cuacaauucccaa

SEQ ID NO: 1554499 - RNA, 13 nt, Human adenovirus C
ucuucagaaacuu

SEQ ID NO: 1554500 - RNA, 13 nt, Human adenovirus C
caggccaacgagc

SEQ ID NO: 1554501 - RNA, 23 nt, Human adenovirus C
cacagagggcauggagacacaaa

SEQ ID NO: 1554502 - RNA, 19 nt, Human adenovirus C
aacugcuuagcgaaaguca

SEQ ID NO: 1554503 - RNA, 20 nt, Human adenovirus C
ccaagaaauccacagcggcg

SEQ ID NO: 1554504 - RNA, 15 nt, Human adenovirus C
gagcacuacuugaaa

SEQ ID NO: 1554505 - RNA, 12 nt, Human adenovirus C
ucgagaucaggc

SEQ ID NO: 1554506 - RNA, 20 nt, Human adenovirus C
acaguguauccggugcacuu

SEQ ID NO: 1554507 - RNA, 11 nt, Human adenovirus C
cuccucaccug

SEQ ID NO: 1554508 - RNA, 13 nt, Human adenovirus C
agcgcacuacugc

SEQ ID NO: 1554509 - RNA, 23 nt, Human adenovirus C
gguccacucgcuccaggguguga

SEQ ID NO: 1554510 - RNA, 15 nt, Human adenovirus C
aggucacuugcugac

SEQ ID NO: 1554511 - RNA, 13 nt, Human adenovirus C
gcagcggcagaca

SEQ ID NO: 1554512 - RNA, 14 nt, Human adenovirus C
gcuagacugcuccu

SEQ ID NO: 1554513 - RNA, 13 nt, Human adenovirus C
ugcuggcgcgcac

SEQ ID NO: 1554514 - RNA, 22 nt, Human adenovirus C
guggcaccgggacugggcgugc

SEQ ID NO: 1554515 - RNA, 16 nt, Human adenovirus C
cgcggcggcugcugcg

SEQ ID NO: 1554516 - RNA, 18 nt, Human adenovirus C
gugucguugacggcggcc

SEQ ID NO: 1554517 - RNA, 21 nt, Human adenovirus C
ccucagcgccucccaaaagac

SEQ ID NO: 1554518 - RNA, 19 nt, Human adenovirus C
ggcgccuucagcuggggcu

SEQ ID NO: 1554519 - RNA, 17 nt, Human adenovirus C
aucucaaauacaaaagc

SEQ ID NO: 1554520 - RNA, 15 nt, Human adenovirus C
cagcggcagcggcag

SEQ ID NO: 1554521 - RNA, 17 nt, Human adenovirus C
agcugccgccgccgcca

SEQ ID NO: 1554522 - RNA, 15 nt, Human adenovirus C
ccguggucuggugga

SEQ ID NO: 1554523 - RNA, 14 nt, Human adenovirus C
caucuuccaccgcg

SEQ ID NO: 1554524 - RNA, 16 nt, Human adenovirus C
cucggucgcauucccc

SEQ ID NO: 1554525 - RNA, 22 nt, Human adenovirus C
gcgguacgguuuuccuggccaa

SEQ ID NO: 1554526 - RNA, 17 nt, Human adenovirus C
gccccaaucaaucagcc

SEQ ID NO: 1554527 - RNA, 13 nt, Human adenovirus C
ggacccuggugcu

SEQ ID NO: 1554528 - RNA, 15 nt, Human adenovirus C
ucguugguccagcag

SEQ ID NO: 1554529 - RNA, 16 nt, Human adenovirus C
ggccggugaggcgugc

SEQ ID NO: 1554530 - RNA, 23 nt, Human adenovirus C
gacgaggaccugcuugagcaggc

SEQ ID NO: 1554531 - RNA, 14 nt, Human adenovirus C
acggacaguggcag

SEQ ID NO: 1554532 - RNA, 13 nt, Human adenovirus C
ccuccugccaggc

SEQ ID NO: 1554533 - RNA, 17 nt, Human adenovirus C
gccuccaacugugcccu

SEQ ID NO: 1554534 - RNA, 13 nt, Human adenovirus C
ccaaaaccuucuc

SEQ ID NO: 1554535 - RNA, 18 nt, Human adenovirus C
gaugccaugaaccacccu

SEQ ID NO: 1554536 - RNA, 23 nt, Human adenovirus C
aaacuaagcauugcuacuaaagg

SEQ ID NO: 1554537 - RNA, 18 nt, Human adenovirus C
acuuacuggcugcagcca

SEQ ID NO: 1554538 - RNA, 13 nt, Human adenovirus C
acaauaaauuacu

SEQ ID NO: 1554539 - RNA, 14 nt, Human adenovirus C
gcgcagaugggagc

SEQ ID NO: 1554540 - RNA, 21 nt, Human adenovirus C
cggugaaguuuucacuccaca

SEQ ID NO: 1554541 - RNA, 19 nt, Human adenovirus C
uguugcgcuuuucugugcg

SEQ ID NO: 1554542 - RNA, 21 nt, Human adenovirus C
ccagacaucauuuugcugcca

SEQ ID NO: 1554543 - RNA, 14 nt, Human adenovirus C
cagcagccgcggcc

SEQ ID NO: 1554544 - RNA, 15 nt, Human adenovirus C
gagccuccaccggcc

SEQ ID NO: 1554545 - RNA, 14 nt, Human adenovirus C
gcacugggcgcacc

SEQ ID NO: 1554546 - RNA, 21 nt, Human adenovirus C
accuguguggaagccuggacc

SEQ ID NO: 1554547 - RNA, 16 nt, Human adenovirus C
ccacgcuggaagccau

SEQ ID NO: 1554548 - RNA, 18 nt, Human adenovirus C
ggccacuacccggaccag

SEQ ID NO: 1554549 - RNA, 23 nt, Human adenovirus C
agugucagccgcgcgcuggggca

SEQ ID NO: 1554550 - RNA, 22 nt, Human adenovirus C
acguggcggccgccgaccuggu

SEQ ID NO: 1554551 - RNA, 20 nt, Human adenovirus C
gcacagggaugugcccggcc

SEQ ID NO: 1554552 - RNA, 22 nt, Human adenovirus C
ccacuaccggcaaccgccucag

SEQ ID NO: 1554553 - RNA, 17 nt, Human adenovirus C
uuuguccagcuuauuca

SEQ ID NO: 1554554 - RNA, 19 nt, Human adenovirus C
uacugggacagucaggcag

SEQ ID NO: 1554555 - RNA, 13 nt, Human adenovirus C
gauaucaacccaa

SEQ ID NO: 1554556 - RNA, 16 nt, Human adenovirus C
caggcagaggcggcgc

SEQ ID NO: 1554557 - RNA, 22 nt, Human adenovirus C
gcaucuaucgcuacggcggcgg

SEQ ID NO: 1554558 - RNA, 22 nt, Human adenovirus C
gcaaaaucaaagaagagaugcu

SEQ ID NO: 1554559 - RNA, 15 nt, Human adenovirus C
aaccugccaccuccc

SEQ ID NO: 1554560 - RNA, 16 nt, Human adenovirus C
acugccacagagggca

SEQ ID NO: 1554561 - RNA, 16 nt, Human adenovirus C
uacuaccgucaucucu

SEQ ID NO: 1554562 - RNA, 19 nt, Human adenovirus C
gcaggaggacacgggcagc

SEQ ID NO: 1554563 - RNA, 22 nt, Human adenovirus C
gcuguccauggucuggagcucc

SEQ ID NO: 1554564 - RNA, 20 nt, Human adenovirus C
gcagacccugcgaguguggc

SEQ ID NO: 1554565 - RNA, 18 nt, Human adenovirus C
gggguccacucgcuccag

SEQ ID NO: 1554566 - RNA, 20 nt, Human adenovirus C
ugcucgaucucuuccuccug

SEQ ID NO: 1554567 - RNA, 15 nt, Human adenovirus C
ggagcagagcccaug

SEQ ID NO: 1554568 - RNA, 21 nt, Human adenovirus C
gacugcagguacgccugcagg

SEQ ID NO: 1554569 - RNA, 15 nt, Human adenovirus C
agaaagaugaugaug

SEQ ID NO: 1554570 - RNA, 20 nt, Human adenovirus C
ccguaguuggcccgcugccc

SEQ ID NO: 1554571 - RNA, 22 nt, Human adenovirus C
cacucgcccuacuuccgcagcc

SEQ ID NO: 1554572 - RNA, 20 nt, Human adenovirus C
cguaggagucgcgcagcuug

SEQ ID NO: 1554573 - RNA, 20 nt, Human adenovirus C
ugcaaacaucagccccccuc

SEQ ID NO: 1554574 - RNA, 22 nt, Human adenovirus C
ccgaucacuuggugcuggccug

SEQ ID NO: 1554575 - RNA, 22 nt, Human adenovirus C
cagggugcgcuugaggcugguc

SEQ ID NO: 1554576 - RNA, 13 nt, Human adenovirus C
acugcagcaggug

SEQ ID NO: 1554577 - RNA, 22 nt, Human adenovirus C
aucgaaguagauugcaucccac

SEQ ID NO: 1554578 - RNA, 23 nt, Human adenovirus C
uguuuggaagauuuuucugcugu

SEQ ID NO: 1554579 - RNA, 14 nt, Human adenovirus C
uggcgaugagcagc

SEQ ID NO: 1554580 - RNA, 17 nt, Human adenovirus C
aaagcuacaaggaccgc

SEQ ID NO: 1554581 - RNA, 20 nt, Human adenovirus C
aucaacuuugcgucucuggc

SEQ ID NO: 1554582 - RNA, 17 nt, Human adenovirus C
ggcuguugaugugguga

SEQ ID NO: 1554583 - RNA, 12 nt, Human adenovirus C
ucuggacuacau

SEQ ID NO: 1554584 - RNA, 15 nt, Human adenovirus C
gagcccguguucuga

SEQ ID NO: 1554585 - RNA, 20 nt, Human adenovirus C
ggcgaccccucauaaacacg

SEQ ID NO: 1554586 - RNA, 20 nt, Human adenovirus C
accagccugugaugcuggau

SEQ ID NO: 1554587 - RNA, 21 nt, Human adenovirus C
cuagggcgcaguaguccaggg

SEQ ID NO: 1554588 - RNA, 21 nt, Human adenovirus C
uaaaugggaugucaaauuccu

SEQ ID NO: 1554589 - RNA, 19 nt, Human adenovirus C
ccugaacgggguguuugac

SEQ ID NO: 1554590 - RNA, 19 nt, Human adenovirus C
gcucccgggcuuguagacu

SEQ ID NO: 1554591 - RNA, 19 nt, Human adenovirus C
aggagcugcagaagcugcu

SEQ ID NO: 1554592 - RNA, 16 nt, Human adenovirus C
cuggcugcagccaggg

SEQ ID NO: 1554593 - RNA, 23 nt, Human adenovirus C
ggugcagauguuggccaacuaca

SEQ ID NO: 1554594 - RNA, 17 nt, Human adenovirus C
cccaagggugcagcuga

SEQ ID NO: 1554595 - RNA, 16 nt, Human adenovirus C
uagcccugcaaacauc

SEQ ID NO: 1554596 - RNA, 18 nt, Human adenovirus C
accaguuaacggucuggu

SEQ ID NO: 1554597 - RNA, 20 nt, Human adenovirus C
cggcguaguuucgcaggcgc

SEQ ID NO: 1554598 - RNA, 21 nt, Human adenovirus C
gggaagagcuggaagaaccau

SEQ ID NO: 1554599 - RNA, 12 nt, Human adenovirus C
gcggcugcuguu

SEQ ID NO: 1554600 - RNA, 14 nt, Human adenovirus C
guacauccugcacg

SEQ ID NO: 1554601 - RNA, 13 nt, Human adenovirus C
cccugcgacgggc

SEQ ID NO: 1554602 - RNA, 18 nt, Human adenovirus C
aacacaggcuggggccug

SEQ ID NO: 1554603 - RNA, 16 nt, Human adenovirus C
uaacagcacuggcaac

SEQ ID NO: 1554604 - RNA, 17 nt, Human adenovirus C
ggcccguagccaguggc

SEQ ID NO: 1554605 - RNA, 22 nt, Human adenovirus C
caucaccuccuuuccuuccucc

SEQ ID NO: 1554606 - RNA, 12 nt, Human adenovirus C
aaaguccagaug

SEQ ID NO: 1554607 - RNA, 14 nt, Human adenovirus C
gcaucuuggacugu

SEQ ID NO: 1554608 - RNA, 12 nt, Human adenovirus C
ccaggcgggcaa

SEQ ID NO: 1554609 - RNA, 21 nt, Human adenovirus C
aagacguguuuugcgacccgg

SEQ ID NO: 1554610 - RNA, 11 nt, Human adenovirus C
acaagcagcug

SEQ ID NO: 1554611 - RNA, 15 nt, Human adenovirus C
ucucgcaaggccugg

SEQ ID NO: 1554612 - RNA, 11 nt, Human adenovirus C
ggggcugugcc

SEQ ID NO: 1554613 - RNA, 18 nt, Human adenovirus C
gaaaccccacgguggcac

SEQ ID NO: 1554614 - RNA, 17 nt, Human adenovirus C
ggaucacaaccccacca

SEQ ID NO: 1554615 - RNA, 16 nt, Human adenovirus C
caacccuuccaggagg

SEQ ID NO: 1554616 - RNA, 15 nt, Human adenovirus C
gcccgcgccugcugg

SEQ ID NO: 1554617 - RNA, 21 nt, Human adenovirus C
cucgcauuccacgagccaggu

SEQ ID NO: 1554618 - RNA, 13 nt, Human adenovirus C
cugcagccagggg

SEQ ID NO: 1554619 - RNA, 20 nt, Human adenovirus C
gaacagcaucgugggucugg

SEQ ID NO: 1554620 - RNA, 13 nt, Human adenovirus C
cagcggugcagcc

SEQ ID NO: 1554621 - RNA, 22 nt, Human adenovirus C
guccacaaaaaacacccagaaa

SEQ ID NO: 1554622 - RNA, 24 nt, Human adenovirus C
augcccaggcuccuuugucuggag

SEQ ID NO: 1554623 - RNA, 13 nt, Human adenovirus C
ccagcggucucgg

SEQ ID NO: 1554624 - RNA, 15 nt, Human adenovirus C
guucuugcuggucag

SEQ ID NO: 1554625 - RNA, 16 nt, Human adenovirus C
auacagagacaggacu

SEQ ID NO: 1554626 - RNA, 15 nt, Human adenovirus C
cugaguuggcacccc

SEQ ID NO: 1554627 - RNA, 10 nt, Human adenovirus C
ccccuucccu

SEQ ID NO: 1554628 - RNA, 17 nt, Human adenovirus C
caugggaaacuggcaag

SEQ ID NO: 1554629 - RNA, 15 nt, Human adenovirus C
uacacucucggguga

SEQ ID NO: 1554630 - RNA, 13 nt, Human adenovirus C
uacaacgcucuag

SEQ ID NO: 1554631 - RNA, 14 nt, Human adenovirus C
ugcaugaaagccuu

SEQ ID NO: 1554632 - RNA, 18 nt, Human adenovirus C
cgcgcaacgaagcuaugu

SEQ ID NO: 1554633 - RNA, 15 nt, Human adenovirus C
acccgucggccuccg

SEQ ID NO: 1554634 - RNA, 15 nt, Human adenovirus C
ugcggaagggucccg

SEQ ID NO: 1554635 - RNA, 15 nt, Human adenovirus C
acucugacaaagccc

SEQ ID NO: 1554636 - RNA, 18 nt, Human adenovirus C
aucaccgucacccagcac

SEQ ID NO: 1554637 - RNA, 13 nt, Human adenovirus C
gcggcggcuggcg

SEQ ID NO: 1554638 - RNA, 16 nt, Human adenovirus C
gacgcgggcgggcccc

SEQ ID NO: 1554639 - RNA, 20 nt, Human adenovirus C
uggcaccgggacugggcgug

SEQ ID NO: 1554640 - RNA, 12 nt, Human adenovirus C
cgcccagcaaua

SEQ ID NO: 1554641 - RNA, 15 nt, Human adenovirus C
acuuugguucuuaca

SEQ ID NO: 1554642 - RNA, 23 nt, Human adenovirus C
uagcaccgguggguugcugaaac

SEQ ID NO: 1554643 - RNA, 23 nt, Human adenovirus C
augcaguagaagguaagcggguc

SEQ ID NO: 1554644 - RNA, 18 nt, Human adenovirus C
agguccgcgugcggccaa

SEQ ID NO: 1554645 - RNA, 18 nt, Human adenovirus C
cgugcaagacuccaaacu

SEQ ID NO: 1554646 - RNA, 22 nt, Human adenovirus C
gguccagaggaccucugcacuc

SEQ ID NO: 1554647 - RNA, 16 nt, Human adenovirus C
uaaguuugccacacaa

SEQ ID NO: 1554648 - RNA, 15 nt, Human adenovirus C
caccuuucgccaggg

SEQ ID NO: 1554649 - RNA, 22 nt, Human adenovirus C
agucgagaaggaggacagccua

SEQ ID NO: 1554650 - RNA, 15 nt, Human adenovirus C
agccugaauaacaag

SEQ ID NO: 1554651 - RNA, 14 nt, Human adenovirus C
ugacucggcagacg

SEQ ID NO: 1554652 - RNA, 16 nt, Human adenovirus C
accaaggacugguucc

SEQ ID NO: 1554653 - RNA, 16 nt, Human adenovirus C
acaagugcuuugcccg

SEQ ID NO: 1554654 - RNA, 18 nt, Human adenovirus C
cugaacauaaucgugcag

SEQ ID NO: 1554655 - RNA, 18 nt, Human adenovirus C
ggccugguaggcgcagca

SEQ ID NO: 1554656 - RNA, 21 nt, Human adenovirus C
ccucgcgcaaaaaagcaagca

SEQ ID NO: 1554657 - RNA, 18 nt, Human adenovirus C
gugacccggcugcgagag

SEQ ID NO: 1554658 - RNA, 12 nt, Human adenovirus C
cgugacacugca

SEQ ID NO: 1554659 - RNA, 17 nt, Human adenovirus C
gagaacgccuaaaacaa

SEQ ID NO: 1554660 - RNA, 14 nt, Human adenovirus C
gguggaggaggcgc

SEQ ID NO: 1554661 - RNA, 13 nt, Human adenovirus C
agaucggcggcgc

SEQ ID NO: 1554662 - RNA, 11 nt, Human adenovirus C
gcaaccaggaa

SEQ ID NO: 1554663 - RNA, 18 nt, Human adenovirus C
cucgcguccaggccagca

SEQ ID NO: 1554664 - RNA, 21 nt, Human adenovirus C
ugauuauuuaccccccacccu

SEQ ID NO: 1554665 - RNA, 18 nt, Human adenovirus C
acugccuguucgccgacc

SEQ ID NO: 1554666 - RNA, 17 nt, Human adenovirus C
gacccuggugcugccaa

SEQ ID NO: 1554667 - RNA, 21 nt, Human adenovirus C
agccacuuaaaaaaacaaagu

SEQ ID NO: 1554668 - RNA, 22 nt, Human adenovirus C
ccucgcucgacgaagugccaaa

SEQ ID NO: 1554669 - RNA, 23 nt, Human adenovirus C
ugacgaggacgaugaguacgagc

SEQ ID NO: 1554670 - RNA, 15 nt, Human adenovirus C
agauuuuucugcugu

SEQ ID NO: 1554671 - RNA, 20 nt, Human adenovirus C
uccauagagcagcugaccac

SEQ ID NO: 1554672 - RNA, 15 nt, Human adenovirus C
ggcuacuaagaaaac

SEQ ID NO: 1554673 - RNA, 16 nt, Human adenovirus C
agggaagaaacucugg

SEQ ID NO: 1554674 - RNA, 18 nt, Human adenovirus C
ggaggaauacugggacag

SEQ ID NO: 1554675 - RNA, 15 nt, Human adenovirus C
cugcagaccucgucc

SEQ ID NO: 1554676 - RNA, 21 nt, Human adenovirus C
gccucggcgguggcagaugcc

SEQ ID NO: 1554677 - RNA, 22 nt, Human adenovirus C
ccuggcugacaagguggccgcc

SEQ ID NO: 1554678 - RNA, 14 nt, Human adenovirus C
agcacgaaggaggc

SEQ ID NO: 1554679 - RNA, 23 nt, Human adenovirus C
guugcuggugaaggucagcugca

SEQ ID NO: 1554680 - RNA, 23 nt, Human adenovirus C
gccacaacgcgcagcccgugggc

SEQ ID NO: 1554681 - RNA, 14 nt, Human adenovirus C
agacgacagcagcg

SEQ ID NO: 1554682 - RNA, 13 nt, Human adenovirus C
gcagcggcgcgga

SEQ ID NO: 1554683 - RNA, 16 nt, Human adenovirus C
gucaggcgggagcucc

SEQ ID NO: 1554684 - RNA, 12 nt, Human adenovirus C
gcugcagagcca

SEQ ID NO: 1554685 - RNA, 17 nt, Human adenovirus C
cagacgggccaggguca

SEQ ID NO: 1554686 - RNA, 13 nt, Human adenovirus C
guaccuuaaucaa

SEQ ID NO: 1554687 - RNA, 17 nt, Human adenovirus C
cgcagccggugggcccg

SEQ ID NO: 1554688 - RNA, 22 nt, Human adenovirus C
caacagcaggaggaagccaggc

SEQ ID NO: 1554689 - RNA, 15 nt, Human adenovirus C
cgcagcuugagccug

SEQ ID NO: 1554690 - RNA, 20 nt, Human adenovirus C
acccaccgugcagcugaugg

SEQ ID NO: 1554691 - RNA, 15 nt, Human adenovirus C
gcuaccuucugcagc

SEQ ID NO: 1554692 - RNA, 20 nt, Human adenovirus C
ccguggagccugggcuggag

SEQ ID NO: 1554693 - RNA, 17 nt, Human adenovirus C
gcccucaccugccgccu

SEQ ID NO: 1554694 - RNA, 17 nt, Human adenovirus C
ccugcgcgugcccgugc

SEQ ID NO: 1554695 - RNA, 20 nt, Human adenovirus C
gcuugcuuugguauguaccu

SEQ ID NO: 1554696 - RNA, 15 nt, Human adenovirus C
gccugugaugcugga

SEQ ID NO: 1554697 - RNA, 16 nt, Human adenovirus C
uccugagcagcugcga

SEQ ID NO: 1554698 - RNA, 15 nt, Human adenovirus C
ccacugccacagagg

SEQ ID NO: 1554699 - RNA, 23 nt, Human adenovirus C
gccuuaggguugccgccugcugc

SEQ ID NO: 1554700 - RNA, 16 nt, Human adenovirus C
cguggcuacaccuacc

SEQ ID NO: 1554701 - RNA, 17 nt, Human adenovirus C
ugggauaugcuccaggc

SEQ ID NO: 1554702 - RNA, 22 nt, Human adenovirus C
gggugcuuggcauggacggggu

SEQ ID NO: 1554703 - RNA, 22 nt, Human adenovirus C
aaagcagguuccugagcagcug

SEQ ID NO: 1554704 - RNA, 22 nt, Human adenovirus C
gaagcaucugcagcgccagugc

SEQ ID NO: 1554705 - RNA, 18 nt, Human adenovirus C
aucggcugaagcagggcc

SEQ ID NO: 1554706 - RNA, 13 nt, Human adenovirus C
cgaacccccgcgg

SEQ ID NO: 1554707 - RNA, 22 nt, Human adenovirus C
gccuggcgcaaaaucuccugca

SEQ ID NO: 1554708 - RNA, 18 nt, Human adenovirus C
guagacaaggccugcaga

SEQ ID NO: 1554709 - RNA, 15 nt, Human adenovirus C
caagaccaggacgac

SEQ ID NO: 1554710 - RNA, 16 nt, Human adenovirus C
auccgcaauacagaga

SEQ ID NO: 1554711 - RNA, 20 nt, Human adenovirus C
guucugguuccggaugaaaa

SEQ ID NO: 1554712 - RNA, 12 nt, Human adenovirus C
agcacaggccag

SEQ ID NO: 1554713 - RNA, 18 nt, Human adenovirus C
cuccaacgcggcagccgc

SEQ ID NO: 1554714 - RNA, 23 nt, Human adenovirus C
cggcguaguuucgcaggcgcuga

SEQ ID NO: 1554715 - RNA, 21 nt, Human adenovirus C
aagcgaaagcauuaaguggcu

SEQ ID NO: 1554716 - RNA, 18 nt, Human adenovirus C
uccuacuuugacgcgggc

SEQ ID NO: 1554717 - RNA, 21 nt, Human adenovirus C
gacuggaagaugucuuggaaa

SEQ ID NO: 1554718 - RNA, 14 nt, Human adenovirus C
ggagcgaggagguc

SEQ ID NO: 1554719 - RNA, 17 nt, Human adenovirus C
cugcgcccacaccuaca

SEQ ID NO: 1554720 - RNA, 13 nt, Human adenovirus C
ugucuaccugcgg

SEQ ID NO: 1554721 - RNA, 16 nt, Human adenovirus C
ugagccccgggcuggu

SEQ ID NO: 1554722 - RNA, 21 nt, Human adenovirus C
uguccuuggguccggccugcu

SEQ ID NO: 1554723 - RNA, 20 nt, Human adenovirus C
uaccuguguggaagccugga

SEQ ID NO: 1554724 - RNA, 21 nt, Human adenovirus C
uaucagcgccggguggugcac

SEQ ID NO: 1554725 - RNA, 16 nt, Human adenovirus C
acgcugcccgagggca

SEQ ID NO: 1554726 - RNA, 14 nt, Human adenovirus C
cugcugggcgagga

SEQ ID NO: 1554727 - RNA, 14 nt, Human adenovirus C
gcacagcagggaca

SEQ ID NO: 1554728 - RNA, 23 nt, Human adenovirus C
ggggaggggggacacggcggcga

SEQ ID NO: 1554729 - RNA, 23 nt, Human adenovirus C
agcaccguggcgggcggcagcgg

SEQ ID NO: 1554730 - RNA, 18 nt, Human adenovirus C
ccaggccgucuacuccca

SEQ ID NO: 1554731 - RNA, 16 nt, Human adenovirus C
cagugcccgcugucau

SEQ ID NO: 1554732 - RNA, 22 nt, Human adenovirus C
ugcaaggcgcuguauccaaagc

SEQ ID NO: 1554733 - RNA, 15 nt, Human adenovirus C
ugcgcgucggccagg

SEQ ID NO: 1554734 - RNA, 13 nt, Human adenovirus C
uguaccgcgaggc

SEQ ID NO: 1554735 - RNA, 18 nt, Human adenovirus C
ccacggacgacuggcgcc

SEQ ID NO: 1554736 - RNA, 15 nt, Human adenovirus C
gggcugcgcgcuggc

SEQ ID NO: 1554737 - RNA, 16 nt, Human adenovirus C
ugacuuugagguacug

SEQ ID NO: 1554738 - RNA, 17 nt, Human adenovirus C
cgcagcuugagccuggc

SEQ ID NO: 1554739 - RNA, 19 nt, Human adenovirus C
cauguggaguuaccagcca

SEQ ID NO: 1554740 - RNA, 14 nt, Human adenovirus C
gccuuugccuggaa

SEQ ID NO: 1554741 - RNA, 15 nt, Human adenovirus C
ccuauccugccgugc

SEQ ID NO: 1554742 - RNA, 23 nt, Human adenovirus C
gaggcacuaaagcaaggccugcc

SEQ ID NO: 1554743 - RNA, 11 nt, Human adenovirus C
caccaaggcca

SEQ ID NO: 1554744 - RNA, 14 nt, Human adenovirus C
ugguggaggcgcgc

SEQ ID NO: 1554745 - RNA, 22 nt, Human adenovirus C
gcggcaugcgucgugcgcacca

SEQ ID NO: 1554746 - RNA, 17 nt, Human adenovirus C
gcccgccagcccccacc

SEQ ID NO: 1554747 - RNA, 18 nt, Human adenovirus C
gcacgcuuguggcgcgcg

SEQ ID NO: 1554748 - RNA, 19 nt, Human adenovirus C
guacgguuuuccuggccaa

SEQ ID NO: 1554749 - RNA, 23 nt, Human adenovirus C
aauccuguggugagcuguuugau

SEQ ID NO: 1554750 - RNA, 17 nt, Human adenovirus C
cgacagggaagaaacuc

SEQ ID NO: 1554751 - RNA, 15 nt, Human adenovirus C
ggagagcggugguga

SEQ ID NO: 1554752 - RNA, 21 nt, Human adenovirus C
cuguuggaucugcgccagcag

SEQ ID NO: 1554753 - RNA, 23 nt, Human adenovirus C
ccgcgcacaaggaagcagagugg

SEQ ID NO: 1554754 - RNA, 21 nt, Human adenovirus C
cuggcgcaaaaucuccugcac

SEQ ID NO: 1554755 - RNA, 14 nt, Human adenovirus C
uuucuuaccucugg

SEQ ID NO: 1554756 - RNA, 12 nt, Human adenovirus C
aaaaccuucucu

SEQ ID NO: 1554757 - RNA, 17 nt, Human adenovirus C
gccauagcggaugucag

SEQ ID NO: 1554758 - RNA, 19 nt, Human adenovirus C
uggccauuaccuuugacuc

SEQ ID NO: 1554759 - RNA, 16 nt, Human adenovirus C
cgcucugcuuauuaca

SEQ ID NO: 1554760 - RNA, 14 nt, Human adenovirus C
ucuuaaucacaccu

SEQ ID NO: 1554761 - RNA, 15 nt, Human adenovirus C
gcaaccgccucagcu

SEQ ID NO: 1554762 - RNA, 13 nt, Human adenovirus C
ccuucagcugggg

SEQ ID NO: 1554763 - RNA, 15 nt, Human adenovirus C
ucguugaggguccug

SEQ ID NO: 1554764 - RNA, 23 nt, Human adenovirus C
cugcagggaaccgggacuggaac

SEQ ID NO: 1554765 - RNA, 15 nt, Human adenovirus C
gccucuggcauuagc

SEQ ID NO: 1554766 - RNA, 15 nt, Human adenovirus C
uggccagggugcgcu

SEQ ID NO: 1554767 - RNA, 17 nt, Human adenovirus C
guauacagacuugagag

SEQ ID NO: 1554768 - RNA, 16 nt, Human adenovirus C
cgucugaagacaccuu

SEQ ID NO: 1554769 - RNA, 13 nt, Human adenovirus C
gggagcugagccc

SEQ ID NO: 1554770 - RNA, 15 nt, Human adenovirus C
ucccugggaucaggc

SEQ ID NO: 1554771 - RNA, 13 nt, Human adenovirus C
cuuauuuguugcc

SEQ ID NO: 1554772 - RNA, 21 nt, Human adenovirus C
caacuggccccaaacucccau

SEQ ID NO: 1554773 - RNA, 14 nt, Human adenovirus C
cucuuguccugcau

SEQ ID NO: 1554774 - RNA, 19 nt, Human adenovirus C
caaagcaaaccucaccucc

SEQ ID NO: 1554775 - RNA, 23 nt, Human adenovirus C
accguggcgggcggcagcgggug

SEQ ID NO: 1554776 - RNA, 18 nt, Human adenovirus C
uaacgcuggaccugccuc

SEQ ID NO: 1554777 - RNA, 22 nt, Human adenovirus C
acccggcggugcgggcggcgcu

SEQ ID NO: 1554778 - RNA, 11 nt, Human adenovirus C
aggugcugccc

SEQ ID NO: 1554779 - RNA, 21 nt, Human adenovirus C
gcgccugcugggcgaggagga

SEQ ID NO: 1554780 - RNA, 18 nt, Human adenovirus C
aacucuuacaccuucucc

SEQ ID NO: 1554781 - RNA, 21 nt, Human adenovirus C
ggcuuuguuucuccacacaag

SEQ ID NO: 1554782 - RNA, 17 nt, Human adenovirus C
gucuaugcccaggcucc

SEQ ID NO: 1554783 - RNA, 12 nt, Human adenovirus C
gcugcagcugcc

SEQ ID NO: 1554784 - RNA, 16 nt, Human adenovirus C
ugaucagaugaugcaa

SEQ ID NO: 1554785 - RNA, 14 nt, Human adenovirus C
cgggaagaacugga

SEQ ID NO: 1554786 - RNA, 17 nt, Human adenovirus C
guguccacgcucgguga

SEQ ID NO: 1554787 - RNA, 18 nt, Human adenovirus C
gggcuguacauccugcac

SEQ ID NO: 1554788 - RNA, 15 nt, Human adenovirus C
cguuccggcagcagc

SEQ ID NO: 1554789 - RNA, 21 nt, Human adenovirus C
ccaggugcgggcgugacaaac

SEQ ID NO: 1554790 - RNA, 22 nt, Human adenovirus C
uaccgcgucaggaggggcaaca

SEQ ID NO: 1554791 - RNA, 15 nt, Human adenovirus C
cgccagcgacuggaa

SEQ ID NO: 1554792 - RNA, 14 nt, Human adenovirus C
cuagcacuucugug

SEQ ID NO: 1554793 - RNA, 15 nt, Human adenovirus C
caagcuugguggcaa

SEQ ID NO: 1554794 - RNA, 19 nt, Human adenovirus C
guuagcgccugauuucugc

SEQ ID NO: 1554795 - RNA, 18 nt, Human adenovirus C
agaacgggguucuggaaa

SEQ ID NO: 1554796 - RNA, 16 nt, Human adenovirus C
ugauaugguuggacgc

SEQ ID NO: 1554797 - RNA, 16 nt, Human adenovirus C
cgcggcgccgggcccg

SEQ ID NO: 1554798 - RNA, 23 nt, Human adenovirus C
cgcucgaucaucuccccgcggcg

SEQ ID NO: 1554799 - RNA, 12 nt, Human adenovirus C
gcggcaggagca

SEQ ID NO: 1554800 - RNA, 12 nt, Human adenovirus C
agcccgaggaga

SEQ ID NO: 1554801 - RNA, 18 nt, Human adenovirus C
aaccagccugugaugcug

SEQ ID NO: 1554802 - RNA, 15 nt, Human adenovirus C
accacuguuacucag

SEQ ID NO: 1554803 - RNA, 15 nt, Human adenovirus C
aacacaggcuggggc

SEQ ID NO: 1554804 - RNA, 14 nt, Human adenovirus C
uaggcgcagcaucc

SEQ ID NO: 1554805 - RNA, 14 nt, Human adenovirus C
cagggucugccaga

SEQ ID NO: 1554806 - RNA, 20 nt, Human adenovirus C
gcccuuggaggaggcgccgc

SEQ ID NO: 1554807 - RNA, 23 nt, Human adenovirus C
gccgaagaggugucagacgaaac

SEQ ID NO: 1554808 - RNA, 20 nt, Human adenovirus C
uucaaguaacucuacaagcu

SEQ ID NO: 1554809 - RNA, 21 nt, Human adenovirus C
ccaggccagcacgaaggaggc

SEQ ID NO: 1554810 - RNA, 16 nt, Human adenovirus C
ugccacagagggcaug

SEQ ID NO: 1554811 - RNA, 22 nt, Human adenovirus C
gagcacaacauacugacccgcu

SEQ ID NO: 1554812 - RNA, 20 nt, Human adenovirus C
acgccccgcgccacgucaca

SEQ ID NO: 1554813 - RNA, 20 nt, Human adenovirus C
agcauuaaguggcucgcucc

SEQ ID NO: 1554814 - RNA, 22 nt, Human adenovirus C
gggguccacucgcuccagggug

SEQ ID NO: 1554815 - RNA, 16 nt, Human adenovirus C
gcauggccggccacgg

SEQ ID NO: 1554816 - RNA, 16 nt, Human adenovirus C
ugcccuaaauuuaccc

SEQ ID NO: 1554817 - RNA, 20 nt, Human adenovirus C
cucauaacuuggacauaaac

SEQ ID NO: 1554818 - RNA, 13 nt, Human adenovirus C
caaccggcggcag

SEQ ID NO: 1554819 - RNA, 17 nt, Human adenovirus C
ggggcuccgggggcgag

SEQ ID NO: 1554820 - RNA, 17 nt, Human adenovirus C
uaccggcacuucuucuu

SEQ ID NO: 1554821 - RNA, 15 nt, Human adenovirus C
gcccgucucuggggu

SEQ ID NO: 1554822 - RNA, 18 nt, Human adenovirus C
caaggucaacgcuggugg

SEQ ID NO: 1554823 - RNA, 16 nt, Human adenovirus C
ucuggaaggugcugag

SEQ ID NO: 1554824 - RNA, 12 nt, Human adenovirus C
ccgcuacgugcc

SEQ ID NO: 1554825 - RNA, 21 nt, Human adenovirus C
cgguugacaguauuacccaga

SEQ ID NO: 1554826 - RNA, 20 nt, Human adenovirus C
caagccgcucauggcgcagc

SEQ ID NO: 1554827 - RNA, 23 nt, Human adenovirus C
ucaacgcgcgcgcagccuccaug

SEQ ID NO: 1554828 - RNA, 18 nt, Human adenovirus C
uuauacgccaucaucucu

SEQ ID NO: 1554829 - RNA, 15 nt, Human adenovirus C
ggugcgcuugaggcu

SEQ ID NO: 1554830 - RNA, 21 nt, Human adenovirus C
cuaccuggacuuggaggaggg

SEQ ID NO: 1554831 - RNA, 15 nt, Human adenovirus C
cguggcuuaagggug

SEQ ID NO: 1554832 - RNA, 14 nt, Human adenovirus C
caucugcagccucg

SEQ ID NO: 1554833 - RNA, 12 nt, Human adenovirus C
cagcggcggcag

SEQ ID NO: 1554834 - RNA, 19 nt, Human adenovirus C
cacuuggugcuggccugca

SEQ ID NO: 1554835 - RNA, 15 nt, Human adenovirus C
cauucugcagagcau

SEQ ID NO: 1554836 - RNA, 13 nt, Human adenovirus C
aagcaucugcagc

SEQ ID NO: 1554837 - RNA, 20 nt, Human adenovirus C
ggccuugcaggcgcagagac

SEQ ID NO: 1554838 - RNA, 18 nt, Human adenovirus C
gucgcauuccccucgccg

SEQ ID NO: 1554839 - RNA, 22 nt, Human adenovirus C
gccgcgauguuuagcugcacgu

SEQ ID NO: 1554840 - RNA, 18 nt, Human adenovirus C
aacagcgcgagcaggcag

SEQ ID NO: 1554841 - RNA, 12 nt, Human adenovirus C
ggacaguggcag

SEQ ID NO: 1554842 - RNA, 22 nt, Human adenovirus C
aaacucccuuagaaccaaaguu

SEQ ID NO: 1554843 - RNA, 23 nt, Human adenovirus C
aaacuaaaauuggcucuggcauu

SEQ ID NO: 1554844 - RNA, 15 nt, Human adenovirus C
cucaucugcagccuc

SEQ ID NO: 1554845 - RNA, 13 nt, Human adenovirus C
cauccgcccugcu

SEQ ID NO: 1554846 - RNA, 11 nt, Human adenovirus C
caacagcagcg

SEQ ID NO: 1554847 - RNA, 21 nt, Human adenovirus C
aacauuaccucuuuuggcaug

SEQ ID NO: 1554848 - RNA, 21 nt, Human adenovirus C
ccggaccugggcuggcggugg

SEQ ID NO: 1554849 - RNA, 18 nt, Human adenovirus C
gcuaccaccccagcaucg

SEQ ID NO: 1554850 - RNA, 18 nt, Human adenovirus C
ugcaaacuuucuccaaag

SEQ ID NO: 1554851 - RNA, 20 nt, Human adenovirus C
gcuaauggcaauggcucagg

SEQ ID NO: 1554852 - RNA, 20 nt, Human adenovirus C
guucaugggaaacuggcaag

SEQ ID NO: 1554853 - RNA, 20 nt, Human adenovirus C
cccaggcggcggguacagug

SEQ ID NO: 1554854 - RNA, 19 nt, Human adenovirus C
gaggcagagcgacugcgcc

SEQ ID NO: 1554855 - RNA, 16 nt, Human adenovirus C
cauuaccuuugacucu

SEQ ID NO: 1554856 - RNA, 15 nt, Human adenovirus C
ggaggcaggacccug

SEQ ID NO: 1554857 - RNA, 21 nt, Human adenovirus C
gaaggcucgcguccaggccag

SEQ ID NO: 1554858 - RNA, 12 nt, Human adenovirus C
gacgacgaggug

SEQ ID NO: 1554859 - RNA, 15 nt, Human adenovirus C
ccggcaaggcaaugc

SEQ ID NO: 1554860 - RNA, 14 nt, Human adenovirus C
cuguaacugcauca

SEQ ID NO: 1554861 - RNA, 14 nt, Human adenovirus C
uuuagcugcacgua

SEQ ID NO: 1554862 - RNA, 22 nt, Human adenovirus C
ggcgauuucggccaugaacugc

SEQ ID NO: 1554863 - RNA, 13 nt, Human adenovirus C
cacuuaggccaga

SEQ ID NO: 1554864 - RNA, 20 nt, Human adenovirus C
uuugacgcggugaaagacuc

SEQ ID NO: 1554865 - RNA, 14 nt, Human adenovirus C
ugagcuccucaggg

SEQ ID NO: 1554866 - RNA, 20 nt, Human adenovirus C
gccuugcaggcgcagagaca

SEQ ID NO: 1554867 - RNA, 20 nt, Human adenovirus C
cgccaccuguucucaccgcg

SEQ ID NO: 1554868 - RNA, 15 nt, Human adenovirus C
cagcggugcagccac

SEQ ID NO: 1554869 - RNA, 17 nt, Human adenovirus C
cucaucggcugaagcag

SEQ ID NO: 1554870 - RNA, 14 nt, Human adenovirus C
cgagcgguugcugc

SEQ ID NO: 1554871 - RNA, 20 nt, Human adenovirus C
gucgcaaccaggaacagcuc

SEQ ID NO: 1554872 - RNA, 16 nt, Human adenovirus C
ggcgggcggugggccg

SEQ ID NO: 1554873 - RNA, 22 nt, Human adenovirus C
cugcagcagcgcgcgaauaaac

SEQ ID NO: 1554874 - RNA, 21 nt, Human adenovirus C
ugcgggcggcgcugcagagcc

SEQ ID NO: 1554875 - RNA, 19 nt, Human adenovirus C
gcuuauuuguugccuaaag

SEQ ID NO: 1554876 - RNA, 17 nt, Human adenovirus C
cuccacaggcugcgcac

SEQ ID NO: 1554877 - RNA, 20 nt, Human adenovirus C
caguaacugcagcacagcac

SEQ ID NO: 1554878 - RNA, 19 nt, Human adenovirus C
ugcgccguuuaaaaaucaa

SEQ ID NO: 1554879 - RNA, 17 nt, Human adenovirus C
aggggccucuucuucuu

SEQ ID NO: 1554880 - RNA, 16 nt, Human adenovirus C
cggcuggagcugccca

SEQ ID NO: 1554881 - RNA, 14 nt, Human adenovirus C
gcgcggcggcugcu

SEQ ID NO: 1554882 - RNA, 17 nt, Human adenovirus C
gcacaucucgggccagg

SEQ ID NO: 1554883 - RNA, 22 nt, Human adenovirus C
ugacgcaaauagaugagccucc

SEQ ID NO: 1554884 - RNA, 21 nt, Human adenovirus C
cauagcuauaaaugcaggaaa

SEQ ID NO: 1554885 - RNA, 13 nt, Human adenovirus C
agaacaagagcug

SEQ ID NO: 1554886 - RNA, 13 nt, Human adenovirus C
cacucgugcuggc

SEQ ID NO: 1554887 - RNA, 21 nt, Human adenovirus C
cucccaaaauguaaccacugu

SEQ ID NO: 1554888 - RNA, 23 nt, Human adenovirus C
ccaacgcgccuaccaccuucccc

SEQ ID NO: 1554889 - RNA, 20 nt, Human adenovirus C
ugcaacccgcggugcuccuc

SEQ ID NO: 1554890 - RNA, 20 nt, Human adenovirus C
acacaccucgaccacugccg

SEQ ID NO: 1554891 - RNA, 23 nt, Human adenovirus C
aaaggcuacaggggccucuucuu

SEQ ID NO: 1554892 - RNA, 15 nt, Human adenovirus C
gcggcagucugcagc

SEQ ID NO: 1554893 - RNA, 13 nt, Human adenovirus C
gugcggucgcccg

SEQ ID NO: 1554894 - RNA, 21 nt, Human adenovirus C
gaacugaggaugaauugccaa

SEQ ID NO: 1554895 - RNA, 15 nt, Human adenovirus C
accacucgacacggc

SEQ ID NO: 1554896 - RNA, 18 nt, Human adenovirus C
cggggggcuucugaggcu

SEQ ID NO: 1554897 - RNA, 20 nt, Human adenovirus C
gcgcuggggcaggaggacac

SEQ ID NO: 1554898 - RNA, 23 nt, Human adenovirus C
cgccaugggcuccagugagcagg

SEQ ID NO: 1554899 - RNA, 18 nt, Human adenovirus C
ugcuacgaaagggacggg

SEQ ID NO: 1554900 - RNA, 17 nt, Human adenovirus C
acaccuacucuggcucc

SEQ ID NO: 1554901 - RNA, 22 nt, Human adenovirus C
auguagcaugauaaauaugugg

SEQ ID NO: 1554902 - RNA, 22 nt, Human adenovirus C
ggcguugccgcuggacgagggc

SEQ ID NO: 1554903 - RNA, 13 nt, Human adenovirus C
gguucccccuucg

SEQ ID NO: 1554904 - RNA, 21 nt, Human adenovirus C
ccgggucagggcgcgggcuag

SEQ ID NO: 1554905 - RNA, 22 nt, Human adenovirus C
acgcgcgaggcguacgugccgc

SEQ ID NO: 1554906 - RNA, 18 nt, Human adenovirus C
cagcggcggcagcagcag

SEQ ID NO: 1554907 - RNA, 12 nt, Human adenovirus C
caauugcagaaa

SEQ ID NO: 1554908 - RNA, 21 nt, Human adenovirus C
agcgcguaugccugcgcggcc

SEQ ID NO: 1554909 - RNA, 15 nt, Human adenovirus C
ccuugcggcagggcg

SEQ ID NO: 1554910 - RNA, 17 nt, Human adenovirus C
ucccuguagccggaggg

SEQ ID NO: 1554911 - RNA, 16 nt, Human adenovirus C
cccagacacacaucug

SEQ ID NO: 1554912 - RNA, 10 nt, Human adenovirus C
cuggaccccc

SEQ ID NO: 1554913 - RNA, 18 nt, Human adenovirus C
agaauggcgguagugggu

SEQ ID NO: 1554914 - RNA, 13 nt, Human adenovirus C
agguggaacugcu

SEQ ID NO: 1554915 - RNA, 15 nt, Human adenovirus C
gguuauccuuacucu

SEQ ID NO: 1554916 - RNA, 19 nt, Human adenovirus C
agcacaacauacugacccg

SEQ ID NO: 1554917 - RNA, 15 nt, Human adenovirus C
ugggggcgcgcgggg

SEQ ID NO: 1554918 - RNA, 21 nt, Human adenovirus C
cagguggagaugacugaaucu

SEQ ID NO: 1554919 - RNA, 20 nt, Human adenovirus C
cgccaucaucucugucaugg

SEQ ID NO: 1554920 - RNA, 16 nt, Human adenovirus C
acgguuuuccuggcca

SEQ ID NO: 1554921 - RNA, 22 nt, Human adenovirus C
cacgcagacacgaucggcaggc

SEQ ID NO: 1554922 - RNA, 18 nt, Human adenovirus C
gcgacgaaugagcuccac

SEQ ID NO: 1554923 - RNA, 15 nt, Human adenovirus C
gucuaagcagccgcc

SEQ ID NO: 1554924 - RNA, 16 nt, Human adenovirus C
cggcagcggcagcggc

SEQ ID NO: 1554925 - RNA, 21 nt, Human adenovirus C
ucaggcgcauguggacgagca

SEQ ID NO: 1554926 - RNA, 16 nt, Human adenovirus C
cgccgacccggcacug

SEQ ID NO: 1554927 - RNA, 18 nt, Human adenovirus C
ccuccgggcacagcagcg

SEQ ID NO: 1554928 - RNA, 16 nt, Human adenovirus C
gaugcgggccaugagc

SEQ ID NO: 1554929 - RNA, 19 nt, Human adenovirus C
ugcacgaccccuggagagg

SEQ ID NO: 1554930 - RNA, 21 nt, Human adenovirus C
cugauuggccggacaggccgc

SEQ ID NO: 1554931 - RNA, 16 nt, Human adenovirus C
cccuauccugccgugc

SEQ ID NO: 1554932 - RNA, 14 nt, Human adenovirus C
ggaacauucccagc

SEQ ID NO: 1554933 - RNA, 13 nt, Human adenovirus C
gggucgcaggggc

SEQ ID NO: 1554934 - RNA, 15 nt, Human adenovirus C
ccacacaagcucgcc

SEQ ID NO: 1554935 - RNA, 12 nt, Human adenovirus C
gcaggacccagg

SEQ ID NO: 1554936 - RNA, 15 nt, Human adenovirus C
ccccaggcuggggag

SEQ ID NO: 1554937 - RNA, 16 nt, Human adenovirus C
cagagcauaguggugc

SEQ ID NO: 1554938 - RNA, 14 nt, Human adenovirus C
agcgcugccggucu

SEQ ID NO: 1554939 - RNA, 13 nt, Human adenovirus C
uugccaggggcag

SEQ ID NO: 1554940 - RNA, 13 nt, Human adenovirus C
gcggcugcuguug

SEQ ID NO: 1554941 - RNA, 13 nt, Human adenovirus C
cuggaggcaaccc

SEQ ID NO: 1554942 - RNA, 20 nt, Human adenovirus C
gcuggcaacgucggcggcgu

SEQ ID NO: 1554943 - RNA, 15 nt, Human adenovirus C
caguggucuccucag

SEQ ID NO: 1554944 - RNA, 23 nt, Human adenovirus C
cacaguccuuucuccccggcugg

SEQ ID NO: 1554945 - RNA, 23 nt, Human adenovirus C
acgccaccuguucucaccgcgcg

SEQ ID NO: 1554946 - RNA, 22 nt, Human adenovirus C
uguaguauauccacucucucaa

SEQ ID NO: 1554947 - RNA, 12 nt, Human adenovirus C
aucucuuccucc

SEQ ID NO: 1554948 - RNA, 18 nt, Human adenovirus C
caaagcagaccaaagcaa

SEQ ID NO: 1554949 - RNA, 20 nt, Human adenovirus C
aaugugaugggcuccagcau

SEQ ID NO: 1554950 - RNA, 17 nt, Human adenovirus C
ggcggcgacgacggcgc

SEQ ID NO: 1554951 - RNA, 18 nt, Human adenovirus C
caccuacucuggcuccau

SEQ ID NO: 1554952 - RNA, 17 nt, Human adenovirus C
caucuccuaacugcaga

SEQ ID NO: 1554953 - RNA, 13 nt, Human adenovirus C
guugcauguggaa

SEQ ID NO: 1554954 - RNA, 15 nt, Human adenovirus C
uaacucuacaagcuu

SEQ ID NO: 1554955 - RNA, 21 nt, Human adenovirus C
ggugucauaguccagccccuc

SEQ ID NO: 1554956 - RNA, 19 nt, Human adenovirus C
ugugguacuucccagagac

SEQ ID NO: 1554957 - RNA, 16 nt, Human adenovirus C
aacucaggcacaacca

SEQ ID NO: 1554958 - RNA, 14 nt, Human adenovirus C
gguacccaacucca

SEQ ID NO: 1554959 - RNA, 18 nt, Human adenovirus C
gcagaauaagccacaccc

SEQ ID NO: 1554960 - RNA, 15 nt, Human adenovirus C
gggcguagagcuugg

SEQ ID NO: 1554961 - RNA, 22 nt, Human adenovirus C
cccugcgccgugccgccagcgg

SEQ ID NO: 1554962 - RNA, 21 nt, Human adenovirus C
agggcgagguauucagcucaa

SEQ ID NO: 1554963 - RNA, 14 nt, Human adenovirus C
gcccggcgcacggc

SEQ ID NO: 1554964 - RNA, 13 nt, Human adenovirus C
aacgaccacagca

SEQ ID NO: 1554965 - RNA, 19 nt, Human adenovirus C
cuggcaaagcacacugaac

SEQ ID NO: 1554966 - RNA, 19 nt, Human adenovirus C
ugagguacgaugagacccg

SEQ ID NO: 1554967 - RNA, 18 nt, Human adenovirus C
acucacagaccugggcca

SEQ ID NO: 1554968 - RNA, 22 nt, Human adenovirus C
ccgcacgaggggcagugcagac

SEQ ID NO: 1554969 - RNA, 18 nt, Human adenovirus C
gguacgaugagacccgca

SEQ ID NO: 1554970 - RNA, 22 nt, Human adenovirus C
ugagcaaggaaauucccacgcc

SEQ ID NO: 1554971 - RNA, 21 nt, Human adenovirus C
gaucugcuuaaaagccaccug

SEQ ID NO: 1554972 - RNA, 18 nt, Human adenovirus C
uggaucugcgccagcagg

SEQ ID NO: 1554973 - RNA, 12 nt, Human adenovirus C
gcuggccgggca

SEQ ID NO: 1554974 - RNA, 17 nt, Human adenovirus C
gcucccaaaccucagcg

SEQ ID NO: 1554975 - RNA, 12 nt, Human adenovirus C
gcagcggcagca

SEQ ID NO: 1554976 - RNA, 14 nt, Human adenovirus C
uguaauuuacaaca

SEQ ID NO: 1554977 - RNA, 16 nt, Human adenovirus C
gcaggcgcagagacac

SEQ ID NO: 1554978 - RNA, 20 nt, Human adenovirus C
ccaucaacgcgcgcgcagcc

SEQ ID NO: 1554979 - RNA, 19 nt, Human adenovirus C
ggcugacaagguggccgcc

SEQ ID NO: 1554980 - RNA, 19 nt, Human adenovirus C
cugaggccgaggcagcggc

SEQ ID NO: 1554981 - RNA, 18 nt, Human adenovirus C
gacccuccuuugcacucc

SEQ ID NO: 1554982 - RNA, 14 nt, Human adenovirus C
cagucacagucgca

SEQ ID NO: 1554983 - RNA, 23 nt, Human adenovirus C
cagccugcaaagggcccuggcug

SEQ ID NO: 1554984 - RNA, 13 nt, Human adenovirus C
cugucugagggua

SEQ ID NO: 1554985 - RNA, 14 nt, Human adenovirus C
cagcagccgcgggc

SEQ ID NO: 1554986 - RNA, 17 nt, Human adenovirus C
gucgggguuguuucugg

SEQ ID NO: 1554987 - RNA, 15 nt, Human adenovirus C
cggcggcuggcggua

SEQ ID NO: 1554988 - RNA, 21 nt, Human adenovirus C
gcuaacgugucguauguguca

SEQ ID NO: 1554989 - RNA, 14 nt, Human adenovirus C
ucaguaccaacaga

SEQ ID NO: 1554990 - RNA, 20 nt, Human adenovirus C
gcuacaacguagcucagugc

SEQ ID NO: 1554991 - RNA, 21 nt, Human adenovirus C
uugcgcgcgcgguaggcccgg

SEQ ID NO: 1554992 - RNA, 20 nt, Human adenovirus C
aaugggcccacgggcggcgg

SEQ ID NO: 1554993 - RNA, 19 nt, Human adenovirus C
gacacuuucaauaaaggca

SEQ ID NO: 1554994 - RNA, 15 nt, Human adenovirus C
agaugaagaagagga

SEQ ID NO: 1554995 - RNA, 15 nt, Human adenovirus C
guaggaggggcaugg

SEQ ID NO: 1554996 - RNA, 14 nt, Human adenovirus C
acaccuacucuggc

SEQ ID NO: 1554997 - RNA, 18 nt, Human adenovirus C
ccaggcuuugaguugcac

SEQ ID NO: 1554998 - RNA, 19 nt, Human adenovirus C
ggcucgcguccaggccagc

SEQ ID NO: 1554999 - RNA, 13 nt, Human adenovirus C
cacuccacaggcu

SEQ ID NO: 1555000 - RNA, 22 nt, Human adenovirus C
aggggccaagaacaagagcuga

SEQ ID NO: 1555001 - RNA, 18 nt, Human adenovirus C
gcaccguccgaagaaaag

SEQ ID NO: 1555002 - RNA, 17 nt, Human adenovirus C
ccuuuuguuccaccgcu

SEQ ID NO: 1555003 - RNA, 19 nt, Human adenovirus C
cgcgagggagaggagcccg

SEQ ID NO: 1555004 - RNA, 15 nt, Human adenovirus C
ucuuguugcugguga

SEQ ID NO: 1555005 - RNA, 15 nt, Human adenovirus C
gcgcagaugggagcu

SEQ ID NO: 1555006 - RNA, 17 nt, Human adenovirus C
cagcuugagccuggcug

SEQ ID NO: 1555007 - RNA, 17 nt, Human adenovirus C
cacugccgccgccacaa

SEQ ID NO: 1555008 - RNA, 19 nt, Human adenovirus C
gacguaugcgcaggagcac

SEQ ID NO: 1555009 - RNA, 19 nt, Human adenovirus C
caugcagggcacccucccc

SEQ ID NO: 1555010 - RNA, 15 nt, Human adenovirus C
gccaugccccaggcu

SEQ ID NO: 1555011 - RNA, 15 nt, Human adenovirus C
acaugcgagcccaac

SEQ ID NO: 1555012 - RNA, 23 nt, Human adenovirus C
gacuaccuuuccgccgccaacau

SEQ ID NO: 1555013 - RNA, 18 nt, Human adenovirus C
ggccgcggucgcucacau

SEQ ID NO: 1555014 - RNA, 15 nt, Human adenovirus C
ccagacgggccaggg

SEQ ID NO: 1555015 - RNA, 21 nt, Human adenovirus C
agaaauuuccuuuacuccaau

SEQ ID NO: 1555016 - RNA, 13 nt, Human adenovirus C
ccaccggccgugg

SEQ ID NO: 1555017 - RNA, 17 nt, Human adenovirus C
ucagcuugccugcucca

SEQ ID NO: 1555018 - RNA, 16 nt, Human adenovirus C
caccggcggcggcgcg

SEQ ID NO: 1555019 - RNA, 22 nt, Human adenovirus C
ccaccugagccuuugcgccuuc

SEQ ID NO: 1555020 - RNA, 19 nt, Human adenovirus C
ugagggacaaguugaaaga

SEQ ID NO: 1555021 - RNA, 19 nt, Human adenovirus C
caccgugcuuucacuuucc

SEQ ID NO: 1555022 - RNA, 22 nt, Human adenovirus C
gcgugucgaacccaggugugcg

SEQ ID NO: 1555023 - RNA, 11 nt, Human adenovirus C
gcaucccaccu

SEQ ID NO: 1555024 - RNA, 18 nt, Human adenovirus C
cucguacgaggaggcacu

SEQ ID NO: 1555025 - RNA, 19 nt, Human adenovirus C
ggcgaguacuaagcgguga

SEQ ID NO: 1555026 - RNA, 14 nt, Human adenovirus C
gcgccgccggcacu

SEQ ID NO: 1555027 - RNA, 23 nt, Human adenovirus C
gcuuauuacagcgcuugcuuugg

SEQ ID NO: 1555028 - RNA, 21 nt, Human adenovirus C
gccgccgcuucagccgcugca

SEQ ID NO: 1555029 - RNA, 19 nt, Human adenovirus C
uggaucggaccaccacgcc

SEQ ID NO: 1555030 - RNA, 23 nt, Human adenovirus C
gcacuccugacguaaccugcggc

SEQ ID NO: 1555031 - RNA, 21 nt, Human adenovirus C
caccaugcgcgagggacaggc

SEQ ID NO: 1555032 - RNA, 18 nt, Human adenovirus C
acauguggugguuuucca

SEQ ID NO: 1555033 - RNA, 22 nt, Human adenovirus C
cugaaagagguaguugagggug

SEQ ID NO: 1555034 - RNA, 14 nt, Human adenovirus C
cccguagccagugg

SEQ ID NO: 1555035 - RNA, 23 nt, Human adenovirus C
cuggucuugucaugccuggggua

SEQ ID NO: 1555036 - RNA, 18 nt, Human adenovirus C
gccacacgggcggaggag

SEQ ID NO: 1555037 - RNA, 22 nt, Human adenovirus C
cagaccaguagacaaggccugc

SEQ ID NO: 1555038 - RNA, 16 nt, Human adenovirus C
caaaaggcaaacugcc

SEQ ID NO: 1555039 - RNA, 17 nt, Human adenovirus C
caacuaacauaaacaca

SEQ ID NO: 1555040 - RNA, 14 nt, Human adenovirus C
guuugccuuauuau

SEQ ID NO: 1555041 - RNA, 16 nt, Human adenovirus C
cagcaaugccuggagg

SEQ ID NO: 1555042 - RNA, 17 nt, Human adenovirus C
gcaacagcgcgagcagg

SEQ ID NO: 1555043 - RNA, 16 nt, Human adenovirus C
ggugugggaggacgau

SEQ ID NO: 1555044 - RNA, 20 nt, Human adenovirus C
cggcgacaccuuugccacac

SEQ ID NO: 1555045 - RNA, 17 nt, Human adenovirus C
gcggcagacaugcaggg

SEQ ID NO: 1555046 - RNA, 18 nt, Human adenovirus C
cuucggcaucgcgggcgc

SEQ ID NO: 1555047 - RNA, 17 nt, Human adenovirus C
ugccccucgccauagcg

SEQ ID NO: 1555048 - RNA, 12 nt, Human adenovirus C
ccaggacgccuc

SEQ ID NO: 1555049 - RNA, 18 nt, Human adenovirus C
gaagcugcuaaagcaaaa

SEQ ID NO: 1555050 - RNA, 23 nt, Human adenovirus C
ucaguaguauagccccaccacca

SEQ ID NO: 1555051 - RNA, 13 nt, Human adenovirus C
ccagcacacaccu

SEQ ID NO: 1555052 - RNA, 14 nt, Human adenovirus C
gcaaugcuacuaaa

SEQ ID NO: 1555053 - RNA, 13 nt, Human adenovirus C
aggccagaugcug

SEQ ID NO: 1555054 - RNA, 15 nt, Human adenovirus C
cgcacgcccuucucg

SEQ ID NO: 1555055 - RNA, 21 nt, Human adenovirus C
aagugauuaucgagcaggacc

SEQ ID NO: 1555056 - RNA, 12 nt, Human adenovirus C
caguuccaggcg

SEQ ID NO: 1555057 - RNA, 14 nt, Human adenovirus C
cgcgcccuggaggc

SEQ ID NO: 1555058 - RNA, 15 nt, Human adenovirus C
ccccgcugacaccca

SEQ ID NO: 1555059 - RNA, 23 nt, Human adenovirus C
cgccguuggagacugcagccucc

SEQ ID NO: 1555060 - RNA, 21 nt, Human adenovirus C
gcagaggagguuuuggacgag

SEQ ID NO: 1555061 - RNA, 14 nt, Human adenovirus C
gcccgcgccaccga

SEQ ID NO: 1555062 - RNA, 15 nt, Human adenovirus C
caacacggccuccac

SEQ ID NO: 1555063 - RNA, 14 nt, Human adenovirus C
gcaucugcagcgcc

SEQ ID NO: 1555064 - RNA, 13 nt, Human adenovirus C
gcugccagggccg

SEQ ID NO: 1555065 - RNA, 23 nt, Human adenovirus C
cugcagaccguaaaccugagcca

SEQ ID NO: 1555066 - RNA, 21 nt, Human adenovirus C
gaccaaagcaaaccucaccuc

SEQ ID NO: 1555067 - RNA, 14 nt, Human adenovirus C
aagcgggucaaaaa

SEQ ID NO: 1555068 - RNA, 20 nt, Human adenovirus C
cagccgagcggacaagcagc

SEQ ID NO: 1555069 - RNA, 18 nt, Human adenovirus C
ggccguggagacaguguc

SEQ ID NO: 1555070 - RNA, 22 nt, Human adenovirus C
aucgcugucugcgagggccagc

SEQ ID NO: 1555071 - RNA, 18 nt, Human adenovirus C
acaagcuaaaauacaacc

SEQ ID NO: 1555072 - RNA, 20 nt, Human adenovirus C
gaccgagguugcuacgggcg

SEQ ID NO: 1555073 - RNA, 16 nt, Human adenovirus C
gauuucugccagcgcc

SEQ ID NO: 1555074 - RNA, 19 nt, Human adenovirus C
caggacccuggugcugcca

SEQ ID NO: 1555075 - RNA, 16 nt, Human adenovirus C
ucgcuguccagcugcu

SEQ ID NO: 1555076 - RNA, 16 nt, Human adenovirus C
gugguggaccuggcca

SEQ ID NO: 1555077 - RNA, 12 nt, Human adenovirus C
uccugcaucucu

SEQ ID NO: 1555078 - RNA, 21 nt, Human adenovirus C
gccuguccucgagcgguguuc

SEQ ID NO: 1555079 - RNA, 13 nt, Human adenovirus C
gccacacccagcc

SEQ ID NO: 1555080 - RNA, 15 nt, Human adenovirus C
gggagcgaggagguc

SEQ ID NO: 1555081 - RNA, 16 nt, Human adenovirus C
gaggccguggcgcagc

SEQ ID NO: 1555082 - RNA, 15 nt, Human adenovirus C
agccaguggcaacug

SEQ ID NO: 1555083 - RNA, 16 nt, Human adenovirus C
agucacuggucuuguc

SEQ ID NO: 1555084 - RNA, 21 nt, Human adenovirus C
uuaaaucagcacaguaacugc

SEQ ID NO: 1555085 - RNA, 14 nt, Human adenovirus C
aggugcugcucaaa

SEQ ID NO: 1555086 - RNA, 14 nt, Human adenovirus C
cuccgggcugcgcg

SEQ ID NO: 1555087 - RNA, 21 nt, Human adenovirus C
ucccaucgcgcccauggcuac

SEQ ID NO: 1555088 - RNA, 20 nt, Human adenovirus C
cuggagcugcccaagacuac

SEQ ID NO: 1555089 - RNA, 13 nt, Human adenovirus C
accaggcagugca

SEQ ID NO: 1555090 - RNA, 16 nt, Human adenovirus C
cggaacauuaacaaaa

SEQ ID NO: 1555091 - RNA, 15 nt, Human adenovirus C
gcagggucccucgcc

SEQ ID NO: 1555092 - RNA, 18 nt, Human adenovirus C
cuucccccguaacauccu

SEQ ID NO: 1555093 - RNA, 23 nt, Human adenovirus C
auuaugagcaaggaaauucccac

SEQ ID NO: 1555094 - RNA, 22 nt, Human adenovirus C
acaauguggccuccgacugugg

SEQ ID NO: 1555095 - RNA, 23 nt, Human adenovirus C
gucuuuguaguagucuugcauga

SEQ ID NO: 1555096 - RNA, 21 nt, Human adenovirus C
uaucagcagccgcgggcccuu

SEQ ID NO: 1555097 - RNA, 19 nt, Human adenovirus C
ccuucgcagggccagcuga

SEQ ID NO: 1555098 - RNA, 18 nt, Human adenovirus C
ccaacucugguaucucag

SEQ ID NO: 1555099 - RNA, 12 nt, Human adenovirus C
ccuccgcaccca

SEQ ID NO: 1555100 - RNA, 15 nt, Human adenovirus C
cucuuccuccuggag

SEQ ID NO: 1555101 - RNA, 17 nt, Human adenovirus C
cucccguguagacacuu

SEQ ID NO: 1555102 - RNA, 16 nt, Human adenovirus C
ggccauuuccuucucc

SEQ ID NO: 1555103 - RNA, 17 nt, Human adenovirus C
agcuugagugcaugcag

SEQ ID NO: 1555104 - RNA, 21 nt, Human adenovirus C
aagcaagauguuuggcggggc

SEQ ID NO: 1555105 - RNA, 17 nt, Human adenovirus C
uacuaaaaaacuggaag

SEQ ID NO: 1555106 - RNA, 20 nt, Human adenovirus C
aaagaacagauaauggcauu

SEQ ID NO: 1555107 - RNA, 16 nt, Human adenovirus C
cggccugguaggcgca

SEQ ID NO: 1555108 - RNA, 23 nt, Human adenovirus C
cacaccggggcgcgcugcggcug

SEQ ID NO: 1555109 - RNA, 20 nt, Human adenovirus C
acuuuccgcuucacuggacu

SEQ ID NO: 1555110 - RNA, 15 nt, Human adenovirus C
cucgcgccuguugcu

SEQ ID NO: 1555111 - RNA, 18 nt, Human adenovirus C
acaagugggaauuugaag

SEQ ID NO: 1555112 - RNA, 17 nt, Human adenovirus C
ccgccgcuuucuucucu

SEQ ID NO: 1555113 - RNA, 15 nt, Human adenovirus C
caaagcccgccaaga

SEQ ID NO: 1555114 - RNA, 17 nt, Human adenovirus C
acuggcugcagccaggg

SEQ ID NO: 1555115 - RNA, 14 nt, Human adenovirus C
accuggucuccuac

SEQ ID NO: 1555116 - RNA, 19 nt, Human adenovirus C
ccagguacagcccacccug

SEQ ID NO: 1555117 - RNA, 17 nt, Human adenovirus C
gucuucauucagccgcc

SEQ ID NO: 1555118 - RNA, 23 nt, Human adenovirus C
gcccuagccgcgcgucccugcgc

SEQ ID NO: 1555119 - RNA, 16 nt, Human adenovirus C
cggcagaagauccccu

SEQ ID NO: 1555120 - RNA, 16 nt, Human adenovirus C
uucaaaucaaacuuuc

SEQ ID NO: 1555121 - RNA, 19 nt, Human adenovirus C
ccgucaagaaaaacaccac

SEQ ID NO: 1555122 - RNA, 21 nt, Human adenovirus C
ugaacgggguguuugacauga

SEQ ID NO: 1555123 - RNA, 16 nt, Human adenovirus C
ccugugcugccagggc

SEQ ID NO: 1555124 - RNA, 21 nt, Human adenovirus C
uaguuaagagagcugcagcug

SEQ ID NO: 1555125 - RNA, 14 nt, Human adenovirus C
auggcacccaaaaa

SEQ ID NO: 1555126 - RNA, 22 nt, Human adenovirus C
aaaaggcuguccguguccccgu

SEQ ID NO: 1555127 - RNA, 14 nt, Human adenovirus C
agccgcugcagcca

SEQ ID NO: 1555128 - RNA, 11 nt, Human adenovirus C
gucacaaacuc

SEQ ID NO: 1555129 - RNA, 23 nt, Human adenovirus C
cugguacuuuaacggcucuucau

SEQ ID NO: 1555130 - RNA, 14 nt, Human adenovirus C
gaagcugcagcugc

SEQ ID NO: 1555131 - RNA, 13 nt, Human adenovirus C
auggaaaccccag

SEQ ID NO: 1555132 - RNA, 14 nt, Human adenovirus C
ggacgagcccaccc

SEQ ID NO: 1555133 - RNA, 22 nt, Human adenovirus C
cagcgccggguggugcacgcug

SEQ ID NO: 1555134 - RNA, 16 nt, Human adenovirus C
cacgggcagccuggag

SEQ ID NO: 1555135 - RNA, 13 nt, Human adenovirus C
cggucccacagcu

SEQ ID NO: 1555136 - RNA, 12 nt, Human adenovirus C
caaauccauaca

SEQ ID NO: 1555137 - RNA, 13 nt, Human adenovirus C
gcgccugcugcca

SEQ ID NO: 1555138 - RNA, 14 nt, Human adenovirus C
ccgcucccaccacu

SEQ ID NO: 1555139 - RNA, 17 nt, Human adenovirus C
gcagguuccugagcagc

SEQ ID NO: 1555140 - RNA, 18 nt, Human adenovirus C
ugaccgucuggcugcucg

SEQ ID NO: 1555141 - RNA, 21 nt, Human adenovirus C
accuaaacaacucgcugcugc

SEQ ID NO: 1555142 - RNA, 19 nt, Human adenovirus C
uguacucguucuucagaaa

SEQ ID NO: 1555143 - RNA, 22 nt, Human adenovirus C
acgccugcuuaaaacccugcaa

SEQ ID NO: 1555144 - RNA, 14 nt, Human adenovirus C
ggcaagcgcgcgcu

SEQ ID NO: 1555145 - RNA, 13 nt, Human adenovirus C
ucccacccccacu

SEQ ID NO: 1555146 - RNA, 19 nt, Human adenovirus C
ugaccaagcaguuccaggc

SEQ ID NO: 1555147 - RNA, 17 nt, Human adenovirus C
acucacagaccugggcc

SEQ ID NO: 1555148 - RNA, 21 nt, Human adenovirus C
cuacgucaucuccagcggcca

SEQ ID NO: 1555149 - RNA, 13 nt, Human adenovirus C
cgccagugcgcca

SEQ ID NO: 1555150 - RNA, 15 nt, Human adenovirus C
auaagggccuccccu

SEQ ID NO: 1555151 - RNA, 17 nt, Human adenovirus C
cuugaacccgcacuggc

SEQ ID NO: 1555152 - RNA, 15 nt, Human adenovirus C
gcguaacuugcugga

SEQ ID NO: 1555153 - RNA, 20 nt, Human adenovirus C
gguggcguggucaaacucua

SEQ ID NO: 1555154 - RNA, 19 nt, Human adenovirus C
acgucaucuccagcggcca

SEQ ID NO: 1555155 - RNA, 17 nt, Human adenovirus C
cuggaaggugcugaggu

SEQ ID NO: 1555156 - RNA, 22 nt, Human adenovirus C
agcccuacuccggcacugccua

SEQ ID NO: 1555157 - RNA, 17 nt, Human adenovirus C
ugcuacgggcgggcugc

SEQ ID NO: 1555158 - RNA, 18 nt, Human adenovirus C
cugccaccucccucccaa

SEQ ID NO: 1555159 - RNA, 23 nt, Human adenovirus C
uaccuuuccgccgccaacaugcu

SEQ ID NO: 1555160 - RNA, 18 nt, Human adenovirus C
cacagggaugugcccggc

SEQ ID NO: 1555161 - RNA, 11 nt, Human adenovirus C
acgggcgcagg

SEQ ID NO: 1555162 - RNA, 20 nt, Human adenovirus C
gaaccuuuggacaccuccca

SEQ ID NO: 1555163 - RNA, 17 nt, Human adenovirus C
ccaacaccuagccuaaa

SEQ ID NO: 1555164 - RNA, 12 nt, Human adenovirus C
accgccucagcu

SEQ ID NO: 1555165 - RNA, 13 nt, Human adenovirus C
aggggcagugcag

SEQ ID NO: 1555166 - RNA, 18 nt, Human adenovirus C
gaacugguugacggccug

SEQ ID NO: 1555167 - RNA, 21 nt, Human adenovirus C
gccgcgcgcgggcaggagcug

SEQ ID NO: 1555168 - RNA, 14 nt, Human adenovirus C
aaccucaccuccca

SEQ ID NO: 1555169 - RNA, 19 nt, Human adenovirus C
gcccgugcacuccaagagc

SEQ ID NO: 1555170 - RNA, 16 nt, Human adenovirus C
gcagggugacaagguc

SEQ ID NO: 1555171 - RNA, 14 nt, Human adenovirus C
ggaagccaugcuca

SEQ ID NO: 1555172 - RNA, 12 nt, Human adenovirus C
acggacaguggc

SEQ ID NO: 1555173 - RNA, 22 nt, Human adenovirus C
uugcauuucccacgcuuugagu

SEQ ID NO: 1555174 - RNA, 21 nt, Human adenovirus C
aggcagugcaaaauaagauua

SEQ ID NO: 1555175 - RNA, 19 nt, Human adenovirus C
agacgccgcaccugccccu

SEQ ID NO: 1555176 - RNA, 21 nt, Human adenovirus C
aucaaaauaaaaagucuggag

SEQ ID NO: 1555177 - RNA, 14 nt, Human adenovirus C
gcggucggccaugc

SEQ ID NO: 1555178 - RNA, 11 nt, Human adenovirus C
caaccccacca

SEQ ID NO: 1555179 - RNA, 23 nt, Human adenovirus C
guaccugagccccgggcuggugc

SEQ ID NO: 1555180 - RNA, 20 nt, Human adenovirus C
gcggaugucagccuugccua

SEQ ID NO: 1555181 - RNA, 19 nt, Human adenovirus C
ugagcaggaacugaaagcc

SEQ ID NO: 1555182 - RNA, 18 nt, Human adenovirus C
agugcagcacagcaggga

SEQ ID NO: 1555183 - RNA, 14 nt, Human adenovirus C
uguguggucaagca

SEQ ID NO: 1555184 - RNA, 14 nt, Human adenovirus C
agcccuacuccggc

SEQ ID NO: 1555185 - RNA, 22 nt, Human adenovirus C
gcacaacauacugacccgcugu

SEQ ID NO: 1555186 - RNA, 18 nt, Human adenovirus C
cggcgacgacggcgcacc

SEQ ID NO: 1555187 - RNA, 18 nt, Human adenovirus C
cuugauccccgcccuccc

SEQ ID NO: 1555188 - RNA, 18 nt, Human adenovirus C
gccagcgccugcacugca

SEQ ID NO: 1555189 - RNA, 13 nt, Human adenovirus C
cagguacagccca

SEQ ID NO: 1555190 - RNA, 22 nt, Human adenovirus C
cgcuccacgguggcggcgaggu

SEQ ID NO: 1555191 - RNA, 14 nt, Human adenovirus C
acuuggcgauggag

SEQ ID NO: 1555192 - RNA, 14 nt, Human adenovirus C
gaucggcaggcuca

SEQ ID NO: 1555193 - RNA, 17 nt, Human adenovirus C
agagagcugcagcugcc

SEQ ID NO: 1555194 - RNA, 18 nt, Human adenovirus C
aaacaauacuaaaaaacu

SEQ ID NO: 1555195 - RNA, 20 nt, Human adenovirus C
caaacgacccguagagggcg

SEQ ID NO: 1555196 - RNA, 16 nt, Human adenovirus C
ccgcccuagccgcgcg

SEQ ID NO: 1555197 - RNA, 19 nt, Human adenovirus C
aaaauacaaccccaccaau

SEQ ID NO: 1555198 - RNA, 18 nt, Human adenovirus C
caggcuacuaagaaaaca

SEQ ID NO: 1555199 - RNA, 17 nt, Human adenovirus C
cuuauucagcaucaccu

SEQ ID NO: 1555200 - RNA, 16 nt, Human adenovirus C
gcggugcgggcggcgc

SEQ ID NO: 1555201 - RNA, 12 nt, Human adenovirus C
ggcccacgggcg

SEQ ID NO: 1555202 - RNA, 21 nt, Human adenovirus C
auguggccuccgacugugguu

SEQ ID NO: 1555203 - RNA, 17 nt, Human adenovirus C
acucaggucaaaaaagc

SEQ ID NO: 1555204 - RNA, 16 nt, Human adenovirus C
ccccgggcuggugcag

SEQ ID NO: 1555205 - RNA, 20 nt, Human adenovirus C
ugcuaaccagcguagccccu

SEQ ID NO: 1555206 - RNA, 13 nt, Human adenovirus C
agggcccuggcug

SEQ ID NO: 1555207 - RNA, 20 nt, Human adenovirus C
ucccagcugcuacaacaaac

SEQ ID NO: 1555208 - RNA, 19 nt, Human adenovirus C
cgcaccuacaagcgcgugu

SEQ ID NO: 1555209 - RNA, 18 nt, Human adenovirus C
ccaauauugcgcuguacc

SEQ ID NO: 1555210 - RNA, 20 nt, Human adenovirus C
cagcggcaacgugcagacca

SEQ ID NO: 1555211 - RNA, 16 nt, Human adenovirus C
uccgccguaggcaugc

SEQ ID NO: 1555212 - RNA, 17 nt, Human adenovirus C
aggcguugaggccuccc

SEQ ID NO: 1555213 - RNA, 18 nt, Human adenovirus C
caaggguaucauggcgga

SEQ ID NO: 1555214 - RNA, 13 nt, Human adenovirus C
caaugacuacagc

SEQ ID NO: 1555215 - RNA, 14 nt, Human adenovirus C
agcgcgcugaggcc

SEQ ID NO: 1555216 - RNA, 18 nt, Human adenovirus C
gcuaugugcagcagagcg

SEQ ID NO: 1555217 - RNA, 13 nt, Human adenovirus C
ucaaguacuagcu

SEQ ID NO: 1555218 - RNA, 18 nt, Human adenovirus C
cguggagccugggcugga

SEQ ID NO: 1555219 - RNA, 22 nt, Human adenovirus C
uugcaagacagaaacacagagc

SEQ ID NO: 1555220 - RNA, 22 nt, Human adenovirus C
uucacccacagccgccugagca

SEQ ID NO: 1555221 - RNA, 14 nt, Human adenovirus C
agugggcaggcaga

SEQ ID NO: 1555222 - RNA, 15 nt, Human adenovirus C
cccuucucccacccc

SEQ ID NO: 1555223 - RNA, 15 nt, Human adenovirus C
cgguagaggggccag

SEQ ID NO: 1555224 - RNA, 21 nt, Human adenovirus C
ggccauuagugcuaugacuca

SEQ ID NO: 1555225 - RNA, 16 nt, Human adenovirus C
cgcgccuaccaccuuc

SEQ ID NO: 1555226 - RNA, 22 nt, Human adenovirus C
caccacugugguacuucccaga

SEQ ID NO: 1555227 - RNA, 15 nt, Human adenovirus C
auuaccauguacaug

SEQ ID NO: 1555228 - RNA, 15 nt, Human adenovirus C
cgcggcgacagguca

SEQ ID NO: 1555229 - RNA, 16 nt, Human adenovirus C
ugcuccagagcgcccu

SEQ ID NO: 1555230 - RNA, 15 nt, Human adenovirus C
agccgccgugcgccc

SEQ ID NO: 1555231 - RNA, 23 nt, Human adenovirus C
gcccacaacacggccuccacgcu

SEQ ID NO: 1555232 - RNA, 18 nt, Human adenovirus C
gugggugagcgcggaggc

SEQ ID NO: 1555233 - RNA, 15 nt, Human adenovirus C
agauuauacccacaa

SEQ ID NO: 1555234 - RNA, 23 nt, Human adenovirus C
agcucagugcaacaugaccaagg

SEQ ID NO: 1555235 - RNA, 19 nt, Human adenovirus C
aggcgcuguauccaaagcu

SEQ ID NO: 1555236 - RNA, 23 nt, Human adenovirus C
accugugcuuugcucccaaaccu

SEQ ID NO: 1555237 - RNA, 18 nt, Human adenovirus C
gccccaaucaaucagccu

SEQ ID NO: 1555238 - RNA, 17 nt, Human adenovirus C
gaggugcuugccaccua

SEQ ID NO: 1555239 - RNA, 19 nt, Human adenovirus C
aacucugguaucucagccg

SEQ ID NO: 1555240 - RNA, 13 nt, Human adenovirus C
ccggccgacgggc

SEQ ID NO: 1555241 - RNA, 17 nt, Human adenovirus C
gccuccccuucuucuuc

SEQ ID NO: 1555242 - RNA, 14 nt, Human adenovirus C
cccgccaggaacca

SEQ ID NO: 1555243 - RNA, 13 nt, Human adenovirus C
cgcuggccagggu

SEQ ID NO: 1555244 - RNA, 20 nt, Human adenovirus C
augcgccacuggcagggaca

SEQ ID NO: 1555245 - RNA, 16 nt, Human adenovirus C
caccaacgaccagucc

SEQ ID NO: 1555246 - RNA, 23 nt, Human adenovirus C
ugcaagucuagcgccugcugcca

SEQ ID NO: 1555247 - RNA, 17 nt, Human adenovirus C
caguggcaacuggcaaa

SEQ ID NO: 1555248 - RNA, 19 nt, Human adenovirus C
gcuaauggcaauggcucag

SEQ ID NO: 1555249 - RNA, 11 nt, Human adenovirus C
gaccugcacgu

SEQ ID NO: 1555250 - RNA, 11 nt, Human adenovirus C
uguggaagccu

SEQ ID NO: 1555251 - RNA, 23 nt, Human adenovirus C
cugacccggagaugcagcgcaag

SEQ ID NO: 1555252 - RNA, 21 nt, Human adenovirus C
cuucgcaaauuuguaccugag

SEQ ID NO: 1555253 - RNA, 19 nt, Human adenovirus C
aggcguugaggccucccuc

SEQ ID NO: 1555254 - RNA, 20 nt, Human adenovirus C
gcuacaccuaccgccccaga

SEQ ID NO: 1555255 - RNA, 20 nt, Human adenovirus C
uuuaauuaaguauaugagca

SEQ ID NO: 1555256 - RNA, 14 nt, Human adenovirus C
acugacaccuauca

SEQ ID NO: 1555257 - RNA, 18 nt, Human adenovirus C
uacaauauuggcuaccag

SEQ ID NO: 1555258 - RNA, 18 nt, Human adenovirus C
gcuggaagccaugcucag

SEQ ID NO: 1555259 - RNA, 14 nt, Human adenovirus C
cgacgaaugagcuc

SEQ ID NO: 1555260 - RNA, 12 nt, Human adenovirus C
gggauggcgggc

SEQ ID NO: 1555261 - RNA, 17 nt, Human adenovirus C
cguaaaccugagccagg

SEQ ID NO: 1555262 - RNA, 20 nt, Human adenovirus C
cgcucgggcuugggagaggg

SEQ ID NO: 1555263 - RNA, 16 nt, Human adenovirus C
gcuuucagggacaauu

SEQ ID NO: 1555264 - RNA, 17 nt, Human adenovirus C
gccgggagagggggcag

SEQ ID NO: 1555265 - RNA, 14 nt, Human adenovirus C
gcucaucuccgccg

SEQ ID NO: 1555266 - RNA, 16 nt, Human adenovirus C
ccguggcgggcggcag

SEQ ID NO: 1555267 - RNA, 20 nt, Human adenovirus C
cgccgcuucagccgcugcag

SEQ ID NO: 1555268 - RNA, 18 nt, Human adenovirus C
uuaagagagcugcagcug

SEQ ID NO: 1555269 - RNA, 20 nt, Human adenovirus C
cuccaggcgggcaagauuau

SEQ ID NO: 1555270 - RNA, 20 nt, Human adenovirus C
cagcagaaaccugugcugcc

SEQ ID NO: 1555271 - RNA, 17 nt, Human adenovirus C
cuggaacagcagcacag

SEQ ID NO: 1555272 - RNA, 14 nt, Human adenovirus C
ggcagaagcugccg

SEQ ID NO: 1555273 - RNA, 22 nt, Human adenovirus C
uuguaaauaucaggaauuguug

SEQ ID NO: 1555274 - RNA, 12 nt, Human adenovirus C
ucaccaaggcca

SEQ ID NO: 1555275 - RNA, 20 nt, Human adenovirus C
agcuguugcccgugcacucc

SEQ ID NO: 1555276 - RNA, 19 nt, Human adenovirus C
ccuccaccggccguggaga

SEQ ID NO: 1555277 - RNA, 21 nt, Human adenovirus C
cugcccuaaauuuaccccaag

SEQ ID NO: 1555278 - RNA, 18 nt, Human adenovirus C
aagaacuauggcagcaag

SEQ ID NO: 1555279 - RNA, 15 nt, Human adenovirus C
uggugcaggagcgca

SEQ ID NO: 1555280 - RNA, 15 nt, Human adenovirus C
cuggcaaagcacacu

SEQ ID NO: 1555281 - RNA, 18 nt, Human adenovirus C
uacucagccacuuaaaaa

SEQ ID NO: 1555282 - RNA, 16 nt, Human adenovirus C
gugguggaggaggcgc

SEQ ID NO: 1555283 - RNA, 18 nt, Human adenovirus C
cuccauguuguugggaaa

SEQ ID NO: 1555284 - RNA, 20 nt, Human adenovirus C
gcggccuaccggggggagaa

SEQ ID NO: 1555285 - RNA, 15 nt, Human adenovirus C
ugagcgacgaccugg

SEQ ID NO: 1555286 - RNA, 17 nt, Human adenovirus C
gacaaguugaaagagca

SEQ ID NO: 1555287 - RNA, 19 nt, Human adenovirus C
agaugacuaacucaggggc

SEQ ID NO: 1555288 - RNA, 16 nt, Human adenovirus C
aacaugcuaccucuuu

SEQ ID NO: 1555289 - RNA, 18 nt, Human adenovirus C
acaccucgaccacugccg

SEQ ID NO: 1555290 - RNA, 20 nt, Human adenovirus C
ccaucgcgcccauggcuacc

SEQ ID NO: 1555291 - RNA, 20 nt, Human adenovirus C
caagcuaaugauggccgcag

SEQ ID NO: 1555292 - RNA, 19 nt, Human adenovirus C
augccugcgcggccuuccg

SEQ ID NO: 1555293 - RNA, 17 nt, Human adenovirus C
cccaggacucguaacca

SEQ ID NO: 1555294 - RNA, 19 nt, Human adenovirus C
gcacgaccgucagcggggu

SEQ ID NO: 1555295 - RNA, 22 nt, Human adenovirus C
ccauuugaugcucaaacaaaac

SEQ ID NO: 1555296 - RNA, 15 nt, Human adenovirus C
ugccucaaaccggcc

SEQ ID NO: 1555297 - RNA, 14 nt, Human adenovirus C
acugccgccgccac

SEQ ID NO: 1555298 - RNA, 15 nt, Human adenovirus C
cuacgggcgggcugc

SEQ ID NO: 1555299 - RNA, 15 nt, Human adenovirus C
ccucacucucuuccg

SEQ ID NO: 1555300 - RNA, 22 nt, Human adenovirus C
cuggcgaacgcgacgacgcggc

SEQ ID NO: 1555301 - RNA, 13 nt, Human adenovirus C
accucaggcacca

SEQ ID NO: 1555302 - RNA, 13 nt, Human adenovirus C
ucccgcggcgaca

SEQ ID NO: 1555303 - RNA, 16 nt, Human adenovirus C
cgugguaaaggugacu

SEQ ID NO: 1555304 - RNA, 20 nt, Human adenovirus C
agcugaucgugcgccgugca

SEQ ID NO: 1555305 - RNA, 16 nt, Human adenovirus C
cgcgcgcuggggcagg

SEQ ID NO: 1555306 - RNA, 13 nt, Human adenovirus C
gggacaccacugg

SEQ ID NO: 1555307 - RNA, 14 nt, Human adenovirus C
gcuggucucuggac

SEQ ID NO: 1555308 - RNA, 18 nt, Human adenovirus C
ggccacacccggcgccag

SEQ ID NO: 1555309 - RNA, 19 nt, Human adenovirus C
cguccuaucgagccgcacu

SEQ ID NO: 1555310 - RNA, 16 nt, Human adenovirus C
aggcaguagcuugaag

SEQ ID NO: 1555311 - RNA, 20 nt, Human adenovirus C
ugcagauauggcccucaccu

SEQ ID NO: 1555312 - RNA, 17 nt, Human adenovirus C
ucgccagcccgugcugg

SEQ ID NO: 1555313 - RNA, 17 nt, Human adenovirus C
uugaaauccugugguga

SEQ ID NO: 1555314 - RNA, 12 nt, Human adenovirus C
uagaggagccuc

SEQ ID NO: 1555315 - RNA, 22 nt, Human adenovirus C
acaacaguuuccagcgagacga

SEQ ID NO: 1555316 - RNA, 14 nt, Human adenovirus C
auauccauaccuug

SEQ ID NO: 1555317 - RNA, 16 nt, Human adenovirus C
gcgaugagcagcuggc

SEQ ID NO: 1555318 - RNA, 18 nt, Human adenovirus C
agcauugauggucgcccc

SEQ ID NO: 1555319 - RNA, 15 nt, Human adenovirus C
cggucuucgcccugc

SEQ ID NO: 1555320 - RNA, 14 nt, Human adenovirus C
ugacagggcccagu

SEQ ID NO: 1555321 - RNA, 17 nt, Human adenovirus C
ggcaggacccuggugcu

SEQ ID NO: 1555322 - RNA, 19 nt, Human adenovirus C
ggucacggugaaggggugc

SEQ ID NO: 1555323 - RNA, 15 nt, Human adenovirus C
ggcaggagcuggugc

SEQ ID NO: 1555324 - RNA, 13 nt, Human adenovirus C
ggccucuucuucu

SEQ ID NO: 1555325 - RNA, 14 nt, Human adenovirus C
gcccuggaggcagc

SEQ ID NO: 1555326 - RNA, 20 nt, Human adenovirus C
cguucaugggaaacuggcaa

SEQ ID NO: 1555327 - RNA, 12 nt, Human adenovirus C
aagggugggaaa

SEQ ID NO: 1555328 - RNA, 23 nt, Human adenovirus C
gacgaagcuuccgaggccgaaga

SEQ ID NO: 1555329 - RNA, 14 nt, Human adenovirus C
uccgaggccgaaga

SEQ ID NO: 1555330 - RNA, 14 nt, Human adenovirus C
acucaccaaggcca

SEQ ID NO: 1555331 - RNA, 22 nt, Human adenovirus C
uagaaucauugaaaaccaugga

SEQ ID NO: 1555332 - RNA, 15 nt, Human adenovirus C
gugcuuaccuugagc

SEQ ID NO: 1555333 - RNA, 18 nt, Human adenovirus C
cgacuacgguaccgcgcg

SEQ ID NO: 1555334 - RNA, 13 nt, Human adenovirus C
cuuuccacgggcg

SEQ ID NO: 1555335 - RNA, 18 nt, Human adenovirus C
uaaugucguuucucagca

SEQ ID NO: 1555336 - RNA, 21 nt, Human adenovirus C
acguagaggggcucucugagu

SEQ ID NO: 1555337 - RNA, 15 nt, Human adenovirus C
gcccuggaggcagcu

SEQ ID NO: 1555338 - RNA, 17 nt, Human adenovirus C
gcauugcguaccucagg

SEQ ID NO: 1555339 - RNA, 12 nt, Human adenovirus C
ccggcaccaccg

SEQ ID NO: 1555340 - RNA, 16 nt, Human adenovirus C
gggcaggagcuggugc

SEQ ID NO: 1555341 - RNA, 15 nt, Human adenovirus C
gcuacuaagaaaaca

SEQ ID NO: 1555342 - RNA, 19 nt, Human adenovirus C
aguucgccaccaccgccuc

SEQ ID NO: 1555343 - RNA, 23 nt, Human adenovirus C
ggcgcacucacagaccugggcca

SEQ ID NO: 1555344 - RNA, 15 nt, Human adenovirus C
cacucugagacgaag

SEQ ID NO: 1555345 - RNA, 21 nt, Human adenovirus C
cgcagcccuaucagcagccgc

SEQ ID NO: 1555346 - RNA, 18 nt, Human adenovirus C
cauccgcccugcucccag

SEQ ID NO: 1555347 - RNA, 13 nt, Human adenovirus C
cgcggcggcggcc

SEQ ID NO: 1555348 - RNA, 18 nt, Human adenovirus C
caccuacgacuacaugaa

SEQ ID NO: 1555349 - RNA, 16 nt, Human adenovirus C
cuuuggcgcaucccau

SEQ ID NO: 1555350 - RNA, 24 nt, Human adenovirus C
gcccuugcggcagucugcagcgcu

SEQ ID NO: 1555351 - RNA, 15 nt, Human adenovirus C
cgcggugcaggcggc

SEQ ID NO: 1555352 - RNA, 18 nt, Human adenovirus C
ugauccagucguagcagg

SEQ ID NO: 1555353 - RNA, 20 nt, Human adenovirus C
ccaaagcaaaccucaccucc

SEQ ID NO: 1555354 - RNA, 11 nt, Human adenovirus C
uuuucugcugu

SEQ ID NO: 1555355 - RNA, 16 nt, Human adenovirus C
agcgguuaagcuggga

SEQ ID NO: 1555356 - RNA, 13 nt, Human adenovirus C
aucugcgucuccg

SEQ ID NO: 1555357 - RNA, 15 nt, Human adenovirus C
cugaucuucucagaa

SEQ ID NO: 1555358 - RNA, 16 nt, Human adenovirus C
agccugggcuggagcc

SEQ ID NO: 1555359 - RNA, 18 nt, Human adenovirus C
agacguugaagcuggcgu

SEQ ID NO: 1555360 - RNA, 20 nt, Human adenovirus C
cguacgugccgcggcagaac

SEQ ID NO: 1555361 - RNA, 21 nt, Human adenovirus C
gcaaggguaucauggcggacg

SEQ ID NO: 1555362 - RNA, 19 nt, Human adenovirus C
aaaccgggccuccaacugu

SEQ ID NO: 1555363 - RNA, 14 nt, Human adenovirus C
cagcuuauucagca

SEQ ID NO: 1555364 - RNA, 23 nt, Human adenovirus C
guaacaggagggggguguuccua

SEQ ID NO: 1555365 - RNA, 15 nt, Human adenovirus C
augcaccacagaaca

SEQ ID NO: 1555366 - RNA, 19 nt, Human adenovirus C
agcucugcaaccuggucuc

SEQ ID NO: 1555367 - RNA, 17 nt, Human adenovirus C
aggcguacgugccgcgg

SEQ ID NO: 1555368 - RNA, 14 nt, Human adenovirus C
gugcugcggcagau

SEQ ID NO: 1555369 - RNA, 20 nt, Human adenovirus C
accuaucaccgucacccagc

SEQ ID NO: 1555370 - RNA, 21 nt, Human adenovirus C
cuuggaaaaaaugaccgugga

SEQ ID NO: 1555371 - RNA, 16 nt, Human adenovirus C
agccgcugcagccacc

SEQ ID NO: 1555372 - RNA, 17 nt, Human adenovirus C
gguuggcggggggcugc

SEQ ID NO: 1555373 - RNA, 15 nt, Human adenovirus C
guuuacuucaacccc

SEQ ID NO: 1555374 - RNA, 20 nt, Human adenovirus C
cggagaucuauggccccccg

SEQ ID NO: 1555375 - RNA, 15 nt, Human adenovirus C
gcgccauccaccacc

SEQ ID NO: 1555376 - RNA, 15 nt, Human adenovirus C
cgcaacuucagacug

SEQ ID NO: 1555377 - RNA, 17 nt, Human adenovirus C
gcacaugcgagcccaac

SEQ ID NO: 1555378 - RNA, 14 nt, Human adenovirus C
cagcagccgcaggc

SEQ ID NO: 1555379 - RNA, 13 nt, Human adenovirus C
caggcgcagagac

SEQ ID NO: 1555380 - RNA, 22 nt, Human adenovirus C
ggccgcgauguuuagcugcacg

SEQ ID NO: 1555381 - RNA, 18 nt, Human adenovirus C
ugugcgacgucagacaac

SEQ ID NO: 1555382 - RNA, 12 nt, Human adenovirus C
gacgacagcagc

SEQ ID NO: 1555383 - RNA, 12 nt, Human adenovirus C
uguuccaccgcu

SEQ ID NO: 1555384 - RNA, 19 nt, Human adenovirus C
agacaucauuuugcugcca

SEQ ID NO: 1555385 - RNA, 20 nt, Human adenovirus C
cuagcauuaaguuugacagc

SEQ ID NO: 1555386 - RNA, 14 nt, Human adenovirus C
acacuggauggccu

SEQ ID NO: 1555387 - RNA, 16 nt, Human adenovirus C
cugggguuugacccag

SEQ ID NO: 1555388 - RNA, 16 nt, Human adenovirus C
cgggcagccuggaggc

SEQ ID NO: 1555389 - RNA, 16 nt, Human adenovirus C
gcacgcuggccagcac

SEQ ID NO: 1555390 - RNA, 16 nt, Human adenovirus C
auuuucuggccaugca

SEQ ID NO: 1555391 - RNA, 14 nt, Human adenovirus C
accuacucuggcuc

SEQ ID NO: 1555392 - RNA, 23 nt, Human adenovirus C
acauccaggugaugccggcggcg

SEQ ID NO: 1555393 - RNA, 17 nt, Human adenovirus C
cggugagcgcuccaccc

SEQ ID NO: 1555394 - RNA, 19 nt, Human adenovirus C
uccuuccuaucaaccagaa

SEQ ID NO: 1555395 - RNA, 14 nt, Human adenovirus C
cggcggcugcugcg

SEQ ID NO: 1555396 - RNA, 19 nt, Human adenovirus C
uaccuggacuuggaggagg

SEQ ID NO: 1555397 - RNA, 14 nt, Human adenovirus C
ccgggucagggcgc

SEQ ID NO: 1555398 - RNA, 21 nt, Human adenovirus C
cacgggcggcggccugggcga

SEQ ID NO: 1555399 - RNA, 13 nt, Human adenovirus C
gugcugcagcagc

SEQ ID NO: 1555400 - RNA, 18 nt, Human adenovirus C
ccacgcuggaagccaugc

SEQ ID NO: 1555401 - RNA, 14 nt, Human adenovirus C
agggugacaagguc

SEQ ID NO: 1555402 - RNA, 13 nt, Human adenovirus C
gaagacgcggagg

SEQ ID NO: 1555403 - RNA, 20 nt, Human adenovirus C
ucaggcgggagcuccugcag

SEQ ID NO: 1555404 - RNA, 13 nt, Human adenovirus C
cgcgguaggcccg

SEQ ID NO: 1555405 - RNA, 19 nt, Human adenovirus C
acuggccccaaacucccau

SEQ ID NO: 1555406 - RNA, 14 nt, Human adenovirus C
caugcccaggcuuu

SEQ ID NO: 1555407 - RNA, 21 nt, Human adenovirus C
auucguccauaaugauggcaa

SEQ ID NO: 1555408 - RNA, 15 nt, Human adenovirus C
gcucaaaaacaugcu

SEQ ID NO: 1555409 - RNA, 15 nt, Human adenovirus C
cauccccgcggcgcg

SEQ ID NO: 1555410 - RNA, 14 nt, Human adenovirus C
ggcgguggcagaug

SEQ ID NO: 1555411 - RNA, 18 nt, Human adenovirus C
ccagcgcacuacugcccg

SEQ ID NO: 1555412 - RNA, 12 nt, Human adenovirus C
caagacuguggg

SEQ ID NO: 1555413 - RNA, 11 nt, Human adenovirus C
ccacuucuuuu
